United States Patent Application Publication US 2026/0021141 A1 - sequence listing, part 3

SEQ ID NO: 61273 - RNA, 20 nt, synthetic construct
  source 1..20: mol_type = other RNA
ttttttgcagagacggggtc

SEQ ID NO: 61274 - RNA, 20 nt, synthetic construct
  source 1..20: mol_type = other RNA
ttttttgccaagtataagat

SEQ ID NO: 61275 - RNA, 20 nt, synthetic construct
  source 1..20: mol_type = other RNA
ttttttgcccactcttatat

SEQ ID NO: 61276 - RNA, 20 nt, synthetic construct
  source 1..20: mol_type = other RNA
ttttttgcctttcgcttttg

SEQ ID NO: 61277 - RNA, 20 nt, synthetic construct
  source 1..20: mol_type = other RNA
ttttttggcatacaactgct

SEQ ID NO: 61278 - RNA, 20 nt, synthetic construct
  source 1..20: mol_type = other RNA
ttttttgggatcacacttga

SEQ ID NO: 61279 - RNA, 20 nt, synthetic construct
  source 1..20: mol_type = other RNA
ttttttggtagaggattcca

SEQ ID NO: 61280 - RNA, 20 nt, synthetic construct
  source 1..20: mol_type = other RNA
ttttttggtagataccagac

SEQ ID NO: 61281 - RNA, 20 nt, synthetic construct
  source 1..20: mol_type = other RNA
ttttttggtgtttttctagg

SEQ ID NO: 61282 - RNA, 20 nt, synthetic construct
  source 1..20: mol_type = other RNA
ttttttggtttgtatgtgtt

SEQ ID NO: 61283 - RNA, 20 nt, synthetic construct
  source 1..20: mol_type = other RNA
ttttttgtaataacttggag

SEQ ID NO: 61284 - RNA, 20 nt, synthetic construct
  source 1..20: mol_type = other RNA
ttttttgtagtgtcttaatc

SEQ ID NO: 61285 - RNA, 20 nt, synthetic construct
  source 1..20: mol_type = other RNA
ttttttgtccaccagacaaa

SEQ ID NO: 61286 - RNA, 20 nt, synthetic construct
  source 1..20: mol_type = other RNA
ttttttgtggagatggggac

SEQ ID NO: 61287 - RNA, 20 nt, synthetic construct
  source 1..20: mol_type = other RNA
ttttttgttatggtaggtgc

SEQ ID NO: 61288 - RNA, 20 nt, synthetic construct
  source 1..20: mol_type = other RNA
ttttttgttgttggtttgtg

SEQ ID NO: 61289 - RNA, 20 nt, synthetic construct
  source 1..20: mol_type = other RNA
ttttttgtttgtttctgagg

SEQ ID NO: 61290 - RNA, 20 nt, synthetic construct
  source 1..20: mol_type = other RNA
ttttttgttttggtcaaaac

SEQ ID NO: 61291 - RNA, 21 nt, synthetic construct
  source 1..21: mol_type = other RNA
aaaaaacaaaaaaccactgga

SEQ ID NO: 61292 - RNA, 21 nt, synthetic construct
  source 1..21: mol_type = other RNA
aaaaaacaaaacaaaaccctg

SEQ ID NO: 61293 - RNA, 21 nt, synthetic construct
  source 1..21: mol_type = other RNA
aaaaaacacagggactgatga

SEQ ID NO: 61294 - RNA, 21 nt, synthetic construct
  source 1..21: mol_type = other RNA
aaaaaacagaaatgaaatggc

SEQ ID NO: 61295 - RNA, 21 nt, synthetic construct
  source 1..21: mol_type = other RNA
aaaaaacagttgctattcaac

SEQ ID NO: 61296 - RNA, 21 nt, synthetic construct
  source 1..21: mol_type = other RNA
aaaaaaccacgcagaacagtg

SEQ ID NO: 61297 - RNA, 21 nt, synthetic construct
  source 1..21: mol_type = other RNA
aaaaaaccactggatacggaa

SEQ ID NO: 61298 - RNA, 21 nt, synthetic construct
  source 1..21: mol_type = other RNA
aaaaaacccagacctgcacaa

SEQ ID NO: 61299 - RNA, 21 nt, synthetic construct
  source 1..21: mol_type = other RNA
aaaaaacgcggcacttggtaa

SEQ ID NO: 61300 - RNA, 21 nt, synthetic construct
  source 1..21: mol_type = other RNA
aaaaaacgggttatacacaca

SEQ ID NO: 61301 - RNA, 21 nt, synthetic construct
  source 1..21: mol_type = other RNA
aaaaaactacttcgtgtgtgg

SEQ ID NO: 61302 - RNA, 21 nt, synthetic construct
  source 1..21: mol_type = other RNA
aaaaaacttatgcaagatggc

SEQ ID NO: 61303 - RNA, 21 nt, synthetic construct
  source 1..21: mol_type = other RNA
aaaaaacttcccttagctctc

SEQ ID NO: 61304 - RNA, 21 nt, synthetic construct
  source 1..21: mol_type = other RNA
aaaaaacttcgaactaaggaa

SEQ ID NO: 61305 - RNA, 21 nt, synthetic construct
  source 1..21: mol_type = other RNA
aaaaaagaacactataagcca

SEQ ID NO: 61306 - RNA, 21 nt, synthetic construct
  source 1..21: mol_type = other RNA
aaaaaagaaggccgtccctat

SEQ ID NO: 61307 - RNA, 21 nt, synthetic construct
  source 1..21: mol_type = other RNA
aaaaaagacagagctagaact

SEQ ID NO: 61308 - RNA, 21 nt, synthetic construct
  source 1..21: mol_type = other RNA
aaaaaagacgatattcctatc

SEQ ID NO: 61309 - RNA, 21 nt, synthetic construct
  source 1..21: mol_type = other RNA
aaaaaagagaacttgcacata

SEQ ID NO: 61310 - RNA, 21 nt, synthetic construct
  source 1..21: mol_type = other RNA
aaaaaagatgtgtaccaaaag

SEQ ID NO: 61311 - RNA, 21 nt, synthetic construct
  source 1..21: mol_type = other RNA
aaaaaagatgttttcagttgc

SEQ ID NO: 61312 - RNA, 21 nt, synthetic construct
  source 1..21: mol_type = other RNA
aaaaaagcaccagttatcacc

SEQ ID NO: 61313 - RNA, 21 nt, synthetic construct
  source 1..21: mol_type = other RNA
aaaaaagcagacagaaagaca

SEQ ID NO: 61314 - RNA, 21 nt, synthetic construct
  source 1..21: mol_type = other RNA
aaaaaagctatacacgttaca

SEQ ID NO: 61315 - RNA, 21 nt, synthetic construct
  source 1..21: mol_type = other RNA
aaaaaagctcagtgtgttttt

SEQ ID NO: 61316 - RNA, 21 nt, synthetic construct
  source 1..21: mol_type = other RNA
aaaaaaggaatctgacctaag

SEQ ID NO: 61317 - RNA, 21 nt, synthetic construct
  source 1..21: mol_type = other RNA
aaaaaaggaatctgggccggg

SEQ ID NO: 61318 - RNA, 21 nt, synthetic construct
  source 1..21: mol_type = other RNA
aaaaaaggaccatctgttaaa

SEQ ID NO: 61319 - RNA, 21 nt, synthetic construct
  source 1..21: mol_type = other RNA
aaaaaagggtgggggcatcaa

SEQ ID NO: 61320 - RNA, 21 nt, synthetic construct
  source 1..21: mol_type = other RNA
aaaaaaggtgctgttgtattt

SEQ ID NO: 61321 - RNA, 21 nt, synthetic construct
  source 1..21: mol_type = other RNA
aaaaaagtcatgacctgcttt

SEQ ID NO: 61322 - RNA, 21 nt, synthetic construct
  source 1..21: mol_type = other RNA
aaaaaagttttttcctttgcc

SEQ ID NO: 61323 - RNA, 21 nt, synthetic construct
  source 1..21: mol_type = other RNA
aaaaaataaagttccccattg

SEQ ID NO: 61324 - RNA, 21 nt, synthetic construct
  source 1..21: mol_type = other RNA
aaaaaatacatgtcatgttcc

SEQ ID NO: 61325 - RNA, 21 nt, synthetic construct
  source 1..21: mol_type = other RNA
aaaaaataccaaaaaaggtgc

SEQ ID NO: 61326 - RNA, 21 nt, synthetic construct
  source 1..21: mol_type = other RNA
aaaaaatacggccgggagtgg

SEQ ID NO: 61327 - RNA, 21 nt, synthetic construct
  source 1..21: mol_type = other RNA
aaaaaatcctgctgggctatt

SEQ ID NO: 61328 - RNA, 21 nt, synthetic construct
  source 1..21: mol_type = other RNA
aaaaaatgcagtagtaaagca

SEQ ID NO: 61329 - RNA, 21 nt, synthetic construct
  source 1..21: mol_type = other RNA
aaaaaatgcgcgtccgcgacc

SEQ ID NO: 61330 - RNA, 21 nt, synthetic construct
  source 1..21: mol_type = other RNA
aaaaaatgctttttctgcatc

SEQ ID NO: 61331 - RNA, 21 nt, synthetic construct
  source 1..21: mol_type = other RNA
aaaaaatggtgcagccactat

SEQ ID NO: 61332 - RNA, 21 nt, synthetic construct
  source 1..21: mol_type = other RNA
aaaaaatgtaaattctgccac

SEQ ID NO: 61333 - RNA, 21 nt, synthetic construct
  source 1..21: mol_type = other RNA
aaaaaatgtggcatatcacat

SEQ ID NO: 61334 - RNA, 21 nt, synthetic construct
  source 1..21: mol_type = other RNA
aaaaaatgtggcatttcttac

SEQ ID NO: 61335 - RNA, 21 nt, synthetic construct
  source 1..21: mol_type = other RNA
aaaaaatgttttaaggcaggg

SEQ ID NO: 61336 - RNA, 21 nt, synthetic construct
  source 1..21: mol_type = other RNA
aaaaaattaatgccccatgtg

SEQ ID NO: 61337 - RNA, 21 nt, synthetic construct
  source 1..21: mol_type = other RNA
aaaaaattagccttttacacc

SEQ ID NO: 61338 - RNA, 21 nt, synthetic construct
  source 1..21: mol_type = other RNA
aaaaaattgcaggtttactcc

SEQ ID NO: 61339 - RNA, 21 nt, synthetic construct
  source 1..21: mol_type = other RNA
aaaaacaaaaaaccactggat

SEQ ID NO: 61340 - RNA, 21 nt, synthetic construct
  source 1..21: mol_type = other RNA
aaaaacaaaacaaaaccctgt

SEQ ID NO: 61341 - RNA, 21 nt, synthetic construct
  source 1..21: mol_type = other RNA
aaaaacaaaagagtagattcc

SEQ ID NO: 61342 - RNA, 21 nt, synthetic construct
  source 1..21: mol_type = other RNA
aaaaacaacactaaccaacat

SEQ ID NO: 61343 - RNA, 21 nt, synthetic construct
  source 1..21: mol_type = other RNA
aaaaacacactgagctttttt

SEQ ID NO: 61344 - RNA, 21 nt, synthetic construct
  source 1..21: mol_type = other RNA
aaaaacacagggactgatgaa

SEQ ID NO: 61345 - RNA, 21 nt, synthetic construct
  source 1..21: mol_type = other RNA
aaaaacaccaaaaaagcacca

SEQ ID NO: 61346 - RNA, 21 nt, synthetic construct
  source 1..21: mol_type = other RNA
aaaaacacctaaagatatgtg

SEQ ID NO: 61347 - RNA, 21 nt, synthetic construct
  source 1..21: mol_type = other RNA
aaaaacacctcagttaaaccc

SEQ ID NO: 61348 - RNA, 21 nt, synthetic construct
  source 1..21: mol_type = other RNA
aaaaacagaaatgaaatggcc

SEQ ID NO: 61349 - RNA, 21 nt, synthetic construct
  source 1..21: mol_type = other RNA
aaaaacagaagacacaaaatc

SEQ ID NO: 61350 - RNA, 21 nt, synthetic construct
  source 1..21: mol_type = other RNA
aaaaacagatcttggccgaat

SEQ ID NO: 61351 - RNA, 21 nt, synthetic construct
  source 1..21: mol_type = other RNA
aaaaacagcatatacatgaca

SEQ ID NO: 61352 - RNA, 21 nt, synthetic construct
  source 1..21: mol_type = other RNA
aaaaacagttgctattcaaca

SEQ ID NO: 61353 - RNA, 21 nt, synthetic construct
  source 1..21: mol_type = other RNA
aaaaacagtttccctctgaga

SEQ ID NO: 61354 - RNA, 21 nt, synthetic construct
  source 1..21: mol_type = other RNA
aaaaacatatgcaggaccaac

SEQ ID NO: 61355 - RNA, 21 nt, synthetic construct
  source 1..21: mol_type = other RNA
aaaaacatccattactcgtgg

SEQ ID NO: 61356 - RNA, 21 nt, synthetic construct
  source 1..21: mol_type = other RNA
aaaaaccaaacactggaaatc

SEQ ID NO: 61357 - RNA, 21 nt, synthetic construct
  source 1..21: mol_type = other RNA
aaaaaccacatttcatagcag

SEQ ID NO: 61358 - RNA, 21 nt, synthetic construct
  source 1..21: mol_type = other RNA
aaaaaccacgcagaacagtgt

SEQ ID NO: 61359 - RNA, 21 nt, synthetic construct
  source 1..21: mol_type = other RNA
aaaaaccactggatacggaaa

SEQ ID NO: 61360 - RNA, 21 nt, synthetic construct
  source 1..21: mol_type = other RNA
aaaaacccaactctttctttg

SEQ ID NO: 61361 - RNA, 21 nt, synthetic construct
  source 1..21: mol_type = other RNA
aaaaacccagacctgcacaaa

SEQ ID NO: 61362 - RNA, 21 nt, synthetic construct
  source 1..21: mol_type = other RNA
aaaaacctaaacctgtgattt

SEQ ID NO: 61363 - RNA, 21 nt, synthetic construct
  source 1..21: mol_type = other RNA
aaaaacctcccaacaggctga

SEQ ID NO: 61364 - RNA, 21 nt, synthetic construct
  source 1..21: mol_type = other RNA
aaaaacctttttgggatctgt

SEQ ID NO: 61365 - RNA, 21 nt, synthetic construct
  source 1..21: mol_type = other RNA
aaaaacgcggcacttggtaag

SEQ ID NO: 61366 - RNA, 21 nt, synthetic construct
  source 1..21: mol_type = other RNA
aaaaacggaggttgcagtaag

SEQ ID NO: 61367 - RNA, 21 nt, synthetic construct
  source 1..21: mol_type = other RNA
aaaaacgggttatacacacat

SEQ ID NO: 61368 - RNA, 21 nt, synthetic construct
  source 1..21: mol_type = other RNA
aaaaacgtgcaaactaccaag

SEQ ID NO: 61369 - RNA, 21 nt, synthetic construct
  source 1..21: mol_type = other RNA
aaaaactacttcgtgtgtgga

SEQ ID NO: 61370 - RNA, 21 nt, synthetic construct
  source 1..21: mol_type = other RNA
aaaaactgaactacagtgttt

SEQ ID NO: 61371 - RNA, 21 nt, synthetic construct
  source 1..21: mol_type = other RNA
aaaaactgagaccggatgagg

SEQ ID NO: 61372 - RNA, 21 nt, synthetic construct
  source 1..21: mol_type = other RNA
aaaaactgcagcaattatttg

SEQ ID NO: 61373 - RNA, 21 nt, synthetic construct
  source 1..21: mol_type = other RNA
aaaaactgtttggctgggagc

SEQ ID NO: 61374 - RNA, 21 nt, synthetic construct
  source 1..21: mol_type = other RNA
aaaaacttaagtatctcagtc

SEQ ID NO: 61375 - RNA, 21 nt, synthetic construct
  source 1..21: mol_type = other RNA
aaaaacttaagtatctcggtc

SEQ ID NO: 61376 - RNA, 21 nt, synthetic construct
  source 1..21: mol_type = other RNA
aaaaacttatgcaagatggca

SEQ ID NO: 61377 - RNA, 21 nt, synthetic construct
  source 1..21: mol_type = other RNA
aaaaacttcccttagctctca

SEQ ID NO: 61378 - RNA, 21 nt, synthetic construct
  source 1..21: mol_type = other RNA
aaaaacttcgaactaaggaaa

SEQ ID NO: 61379 - RNA, 21 nt, synthetic construct
  source 1..21: mol_type = other RNA
aaaaactttttgggcctttct

SEQ ID NO: 61380 - RNA, 21 nt, synthetic construct
  source 1..21: mol_type = other RNA
aaaaagaaaaagctcacctct

SEQ ID NO: 61381 - RNA, 21 nt, synthetic construct
  source 1..21: mol_type = other RNA
aaaaagaaaaagttgggcttg

SEQ ID NO: 61382 - RNA, 21 nt, synthetic construct
  source 1..21: mol_type = other RNA
aaaaagaaatctgcatccaaa

SEQ ID NO: 61383 - RNA, 21 nt, synthetic construct
  source 1..21: mol_type = other RNA
aaaaagaacactataagccaa

SEQ ID NO: 61384 - RNA, 21 nt, synthetic construct
  source 1..21: mol_type = other RNA
aaaaagaaggccgtccctatt

SEQ ID NO: 61385 - RNA, 21 nt, synthetic construct
  source 1..21: mol_type = other RNA
aaaaagaataagctaatccca

SEQ ID NO: 61386 - RNA, 21 nt, synthetic construct
  source 1..21: mol_type = other RNA
aaaaagacaagtactgcatga

SEQ ID NO: 61387 - RNA, 21 nt, synthetic construct
  source 1..21: mol_type = other RNA
aaaaagacacaaaagagctgg

SEQ ID NO: 61388 - RNA, 21 nt, synthetic construct
  source 1..21: mol_type = other RNA
aaaaagacagagctagaacta

SEQ ID NO: 61389 - RNA, 21 nt, synthetic construct
  source 1..21: mol_type = other RNA
aaaaagacgatattcctatca

SEQ ID NO: 61390 - RNA, 21 nt, synthetic construct
  source 1..21: mol_type = other RNA
aaaaagagaacacacaatttg

SEQ ID NO: 61391 - RNA, 21 nt, synthetic construct
  source 1..21: mol_type = other RNA
aaaaagagaacttgcacataa

SEQ ID NO: 61392 - RNA, 21 nt, synthetic construct
  source 1..21: mol_type = other RNA
aaaaagatctgtggactttag

SEQ ID NO: 61393 - RNA, 21 nt, synthetic construct
  source 1..21: mol_type = other RNA
aaaaagatgtgtaccaaaagt

SEQ ID NO: 61394 - RNA, 21 nt, synthetic construct
  source 1..21: mol_type = other RNA
aaaaagatgttttcagttgca

SEQ ID NO: 61395 - RNA, 21 nt, synthetic construct
  source 1..21: mol_type = other RNA
aaaaagcaacttgaaggcaat

SEQ ID NO: 61396 - RNA, 21 nt, synthetic construct
  source 1..21: mol_type = other RNA
aaaaagcaccagttatcacca

SEQ ID NO: 61397 - RNA, 21 nt, synthetic construct
  source 1..21: mol_type = other RNA
aaaaagcacctaccataacaa

SEQ ID NO: 61398 - RNA, 21 nt, synthetic construct
  source 1..21: mol_type = other RNA
aaaaagcactatccacatttg

SEQ ID NO: 61399 - RNA, 21 nt, synthetic construct
  source 1..21: mol_type = other RNA
aaaaagcagacagaaagacag

SEQ ID NO: 61400 - RNA, 21 nt, synthetic construct
  source 1..21: mol_type = other RNA
aaaaagcagagaaactggaat

SEQ ID NO: 61401 - RNA, 21 nt, synthetic construct
  source 1..21: mol_type = other RNA
aaaaagcagctacctgttgat

SEQ ID NO: 61402 - RNA, 21 nt, synthetic construct
  source 1..21: mol_type = other RNA
aaaaagccatttatcagcacc

SEQ ID NO: 61403 - RNA, 21 nt, synthetic construct
  source 1..21: mol_type = other RNA
aaaaagcctctctgatggaac

SEQ ID NO: 61404 - RNA, 21 nt, synthetic construct
  source 1..21: mol_type = other RNA
aaaaagcctctgtggaccatg

SEQ ID NO: 61405 - RNA, 21 nt, synthetic construct
  source 1..21: mol_type = other RNA
aaaaagcctgcttcagcctaa

SEQ ID NO: 61406 - RNA, 21 nt, synthetic construct
  source 1..21: mol_type = other RNA
aaaaagcgttggagacagcct

SEQ ID NO: 61407 - RNA, 21 nt, synthetic construct
  source 1..21: mol_type = other RNA
aaaaagctatacacgttacaa

SEQ ID NO: 61408 - RNA, 21 nt, synthetic construct
  source 1..21: mol_type = other RNA
aaaaagctcacctctggactc

SEQ ID NO: 61409 - RNA, 21 nt, synthetic construct
  source 1..21: mol_type = other RNA
aaaaagctcagtgtgtttttg

SEQ ID NO: 61410 - RNA, 21 nt, synthetic construct
  source 1..21: mol_type = other RNA
aaaaaggaaagtaactgttgg

SEQ ID NO: 61411 - RNA, 21 nt, synthetic construct
  source 1..21: mol_type = other RNA
aaaaaggaatctgacctaagc

SEQ ID NO: 61412 - RNA, 21 nt, synthetic construct
  source 1..21: mol_type = other RNA
aaaaaggaatctgggccgggc

SEQ ID NO: 61413 - RNA, 21 nt, synthetic construct
  source 1..21: mol_type = other RNA
aaaaaggacacaaattatgac

SEQ ID NO: 61414 - RNA, 21 nt, synthetic construct
  source 1..21: mol_type = other RNA
aaaaaggaccatctgttaaaa

SEQ ID NO: 61415 - RNA, 21 nt, synthetic construct
  source 1..21: mol_type = other RNA
aaaaaggagggaaaatgttta

SEQ ID NO: 61416 - RNA, 21 nt, synthetic construct
  source 1..21: mol_type = other RNA
aaaaagggagtcagtagaggc

SEQ ID NO: 61417 - RNA, 21 nt, synthetic construct
  source 1..21: mol_type = other RNA
aaaaagggtgggggcatcaaa

SEQ ID NO: 61418 - RNA, 21 nt, synthetic construct
  source 1..21: mol_type = other RNA
aaaaaggtgctgttgtatttt

SEQ ID NO: 61419 - RNA, 21 nt, synthetic construct
  source 1..21: mol_type = other RNA
aaaaaggttaagggaagagct

SEQ ID NO: 61420 - RNA, 21 nt, synthetic construct
  source 1..21: mol_type = other RNA
aaaaaggtttttgaacaagag

SEQ ID NO: 61421 - RNA, 21 nt, synthetic construct
  source 1..21: mol_type = other RNA
aaaaagtactggaaatggaca

SEQ ID NO: 61422 - RNA, 21 nt, synthetic construct
  source 1..21: mol_type = other RNA
aaaaagtaggggtaaatcttt

SEQ ID NO: 61423 - RNA, 21 nt, synthetic construct
  source 1..21: mol_type = other RNA
aaaaagtatcgtgagactatt

SEQ ID NO: 61424 - RNA, 21 nt, synthetic construct
  source 1..21: mol_type = other RNA
aaaaagtcatgacctgctttc

SEQ ID NO: 61425 - RNA, 21 nt, synthetic construct
  source 1..21: mol_type = other RNA
aaaaagtgacttctggatgtg

SEQ ID NO: 61426 - RNA, 21 nt, synthetic construct
  source 1..21: mol_type = other RNA
aaaaagtgataccataaagtc

SEQ ID NO: 61427 - RNA, 21 nt, synthetic construct
  source 1..21: mol_type = other RNA
aaaaagtgcttctagtaactt

SEQ ID NO: 61428 - RNA, 21 nt, synthetic construct
  source 1..21: mol_type = other RNA
aaaaagtgtgaccacattccc

SEQ ID NO: 61429 - RNA, 21 nt, synthetic construct
  source 1..21: mol_type = other RNA
aaaaagttgggcttggttgga

SEQ ID NO: 61430 - RNA, 21 nt, synthetic construct
  source 1..21: mol_type = other RNA
aaaaagttttttcctttgcct

SEQ ID NO: 61431 - RNA, 21 nt, synthetic construct
  source 1..21: mol_type = other RNA
aaaaataaagacttcacgatg

SEQ ID NO: 61432 - RNA, 21 nt, synthetic construct
  source 1..21: mol_type = other RNA
aaaaataaaggctttcgtatg

SEQ ID NO: 61433 - RNA, 21 nt, synthetic construct
  source 1..21: mol_type = other RNA
aaaaataaagttccccattga

SEQ ID NO: 61434 - RNA, 21 nt, synthetic construct
  source 1..21: mol_type = other RNA
aaaaataacgggccgggcgct

SEQ ID NO: 61435 - RNA, 21 nt, synthetic construct
  source 1..21: mol_type = other RNA
aaaaatacagctccaaagaac

SEQ ID NO: 61436 - RNA, 21 nt, synthetic construct
  source 1..21: mol_type = other RNA
aaaaatacatgtcatgttccc

SEQ ID NO: 61437 - RNA, 21 nt, synthetic construct
  source 1..21: mol_type = other RNA
aaaaataccaaaaaaggtgct

SEQ ID NO: 61438 - RNA, 21 nt, synthetic construct
  source 1..21: mol_type = other RNA
aaaaatacgaaagtgctctac

SEQ ID NO: 61439 - RNA, 21 nt, synthetic construct
  source 1..21: mol_type = other RNA
aaaaatacggccgggagtggt

SEQ ID NO: 61440 - RNA, 21 nt, synthetic construct
  source 1..21: mol_type = other RNA
aaaaatactacaagagttccc

SEQ ID NO: 61441 - RNA, 21 nt, synthetic construct
  source 1..21: mol_type = other RNA
aaaaatactcaagggctttca

SEQ ID NO: 61442 - RNA, 21 nt, synthetic construct
  source 1..21: mol_type = other RNA
aaaaatagaggatgggcattc

SEQ ID NO: 61443 - RNA, 21 nt, synthetic construct
  source 1..21: mol_type = other RNA
aaaaatatagaaggccagagg

SEQ ID NO: 61444 - RNA, 21 nt, synthetic construct
  source 1..21: mol_type = other RNA
aaaaatcaaagaaagagttgg

SEQ ID NO: 61445 - RNA, 21 nt, synthetic construct
  source 1..21: mol_type = other RNA
aaaaatcctgctgggctattg

SEQ ID NO: 61446 - RNA, 21 nt, synthetic construct
  source 1..21: mol_type = other RNA
aaaaatcgtcctcttcgggtg

SEQ ID NO: 61447 - RNA, 21 nt, synthetic construct
  source 1..21: mol_type = other RNA
aaaaatctaaccctcaatccc

SEQ ID NO: 61448 - RNA, 21 nt, synthetic construct
  source 1..21: mol_type = other RNA
aaaaatctctacagggaaccg

SEQ ID NO: 61449 - RNA, 21 nt, synthetic construct
  source 1..21: mol_type = other RNA
aaaaatgacacaacttactac

SEQ ID NO: 61450 - RNA, 21 nt, synthetic construct
  source 1..21: mol_type = other RNA
aaaaatgacaccaaaactaca

SEQ ID NO: 61451 - RNA, 21 nt, synthetic construct
  source 1..21: mol_type = other RNA
aaaaatgcagtagtaaagcaa

SEQ ID NO: 61452 - RNA, 21 nt, synthetic construct
  source 1..21: mol_type = other RNA
aaaaatgcgcgtccgcgaccc

SEQ ID NO: 61453 - RNA, 21 nt, synthetic construct
  source 1..21: mol_type = other RNA
aaaaatgctttttctgcatct

SEQ ID NO: 61454 - RNA, 21 nt, synthetic construct
  source 1..21: mol_type = other RNA
aaaaatggcacatactgcata

SEQ ID NO: 61455 - RNA, 21 nt, synthetic construct
  source 1..21: mol_type = other RNA
aaaaatggggatatccaaaga

SEQ ID NO: 61456 - RNA, 21 nt, synthetic construct
  source 1..21: mol_type = other RNA
aaaaatggtcaacatgaaaag

SEQ ID NO: 61457 - RNA, 21 nt, synthetic construct
  source 1..21: mol_type = other RNA
aaaaatggtgcagccactata

SEQ ID NO: 61458 - RNA, 21 nt, synthetic construct
  source 1..21: mol_type = other RNA
aaaaatgtaaattctgccaca

SEQ ID NO: 61459 - RNA, 21 nt, synthetic construct
  source 1..21: mol_type = other RNA
aaaaatgtcaattttccccca

SEQ ID NO: 61460 - RNA, 21 nt, synthetic construct
  source 1..21: mol_type = other RNA
aaaaatgtccgttgaagtctt

SEQ ID NO: 61461 - RNA, 21 nt, synthetic construct
  source 1..21: mol_type = other RNA
aaaaatgtggcatatcacatt

SEQ ID NO: 61462 - RNA, 21 nt, synthetic construct
  source 1..21: mol_type = other RNA
aaaaatgtggcatttcttaca

SEQ ID NO: 61463 - RNA, 21 nt, synthetic construct
  source 1..21: mol_type = other RNA
aaaaatgtgtctagtgaatga

SEQ ID NO: 61464 - RNA, 21 nt, synthetic construct
  source 1..21: mol_type = other RNA
aaaaatgtttaattacccagg

SEQ ID NO: 61465 - RNA, 21 nt, synthetic construct
  source 1..21: mol_type = other RNA
aaaaatgttttaaggcagggc

SEQ ID NO: 61466 - RNA, 21 nt, synthetic construct
  source 1..21: mol_type = other RNA
aaaaattaatgccccatgtgt

SEQ ID NO: 61467 - RNA, 21 nt, synthetic construct
  source 1..21: mol_type = other RNA
aaaaattacaactggtttctg

SEQ ID NO: 61468 - RNA, 21 nt, synthetic construct
  source 1..21: mol_type = other RNA
aaaaattacaggtcaaactca

SEQ ID NO: 61469 - RNA, 21 nt, synthetic construct
  source 1..21: mol_type = other RNA
aaaaattagccttttacaccc

SEQ ID NO: 61470 - RNA, 21 nt, synthetic construct
  source 1..21: mol_type = other RNA
aaaaattagctgggcgagatg

SEQ ID NO: 61471 - RNA, 21 nt, synthetic construct
  source 1..21: mol_type = other RNA
aaaaattcactcctcattcac

SEQ ID NO: 61472 - RNA, 21 nt, synthetic construct
  source 1..21: mol_type = other RNA
aaaaattccctcagcaaaagc

SEQ ID NO: 61473 - RNA, 21 nt, synthetic construct
  source 1..21: mol_type = other RNA
aaaaattccgctctggtttta

SEQ ID NO: 61474 - RNA, 21 nt, synthetic construct
  source 1..21: mol_type = other RNA
aaaaattctgttctcagtatc

SEQ ID NO: 61475 - RNA, 21 nt, synthetic construct
  source 1..21: mol_type = other RNA
aaaaattgcaggtttactcca

SEQ ID NO: 61476 - RNA, 21 nt, synthetic construct
  source 1..21: mol_type = other RNA
aaaaatttgacatgacaggtg

SEQ ID NO: 61477 - RNA, 21 nt, synthetic construct
  source 1..21: mol_type = other RNA
aaaaattttcattctacctgg

SEQ ID NO: 61478 - RNA, 21 nt, synthetic construct
  source 1..21: mol_type = other RNA
aaaaattttctcccaaggttg

SEQ ID NO: 61479 - RNA, 21 nt, synthetic construct
  source 1..21: mol_type = other RNA
aaaacaaaaaacaaacccccc

SEQ ID NO: 61480 - RNA, 21 nt, synthetic construct
  source 1..21: mol_type = other RNA
aaaacaaaaaaccactggata

SEQ ID NO: 61481 - RNA, 21 nt, synthetic construct
  source 1..21: mol_type = other RNA
aaaacaaaacaaaaccctgtt

SEQ ID NO: 61482 - RNA, 21 nt, synthetic construct
  source 1..21: mol_type = other RNA
aaaacaaaacaaagtctttgg

SEQ ID NO: 61483 - RNA, 21 nt, synthetic construct
  source 1..21: mol_type = other RNA
aaaacaaaacacatggcatcg

SEQ ID NO: 61484 - RNA, 21 nt, synthetic construct
  source 1..21: mol_type = other RNA
aaaacaaaaccctgttgggct

SEQ ID NO: 61485 - RNA, 21 nt, synthetic construct
  source 1..21: mol_type = other RNA
aaaacaaaagagtagattccc

SEQ ID NO: 61486 - RNA, 21 nt, synthetic construct
  source 1..21: mol_type = other RNA
aaaacaaacaaacagaaaggc

SEQ ID NO: 61487 - RNA, 21 nt, synthetic construct
  source 1..21: mol_type = other RNA
aaaacaaagtctttgggtaat

SEQ ID NO: 61488 - RNA, 21 nt, synthetic construct
  source 1..21: mol_type = other RNA
aaaacaaatggaaccactgta

SEQ ID NO: 61489 - RNA, 21 nt, synthetic construct
  source 1..21: mol_type = other RNA
aaaacaaattcatgcaactga

SEQ ID NO: 61490 - RNA, 21 nt, synthetic construct
  source 1..21: mol_type = other RNA
aaaacaaattccctctacaaa

SEQ ID NO: 61491 - RNA, 21 nt, synthetic construct
  source 1..21: mol_type = other RNA
aaaacaaattgcatcaactgc

SEQ ID NO: 61492 - RNA, 21 nt, synthetic construct
  source 1..21: mol_type = other RNA
aaaacaacactaaccaacatt

SEQ ID NO: 61493 - RNA, 21 nt, synthetic construct
  source 1..21: mol_type = other RNA
aaaacaagaagaaaaagcaac

SEQ ID NO: 61494 - RNA, 21 nt, synthetic construct
  source 1..21: mol_type = other RNA
aaaacaataagacaccgctcc

SEQ ID NO: 61495 - RNA, 21 nt, synthetic construct
  source 1..21: mol_type = other RNA
aaaacaatagcccagcaggat

SEQ ID NO: 61496 - RNA, 21 nt, synthetic construct
  source 1..21: mol_type = other RNA
aaaacaattacttgagagcag

SEQ ID NO: 61497 - RNA, 21 nt, synthetic construct
  source 1..21: mol_type = other RNA
aaaacacaaactgcagaatga

SEQ ID NO: 61498 - RNA, 21 nt, synthetic construct
  source 1..21: mol_type = other RNA
aaaacacaacataccaaaacc

SEQ ID NO: 61499 - RNA, 21 nt, synthetic construct
  source 1..21: mol_type = other RNA
aaaacacaaggacaggtcaca

SEQ ID NO: 61500 - RNA, 21 nt, synthetic construct
  source 1..21: mol_type = other RNA
aaaacacacgggtacacatcc

SEQ ID NO: 61501 - RNA, 21 nt, synthetic construct
  source 1..21: mol_type = other RNA
aaaacacagggactgatgaag

SEQ ID NO: 61502 - RNA, 21 nt, synthetic construct
  source 1..21: mol_type = other RNA
aaaacacatggcatcggggcc

SEQ ID NO: 61503 - RNA, 21 nt, synthetic construct
  source 1..21: mol_type = other RNA
aaaacacatgtcatgggccgg

SEQ ID NO: 61504 - RNA, 21 nt, synthetic construct
  source 1..21: mol_type = other RNA
aaaacaccaaaaaagcaccag

SEQ ID NO: 61505 - RNA, 21 nt, synthetic construct
  source 1..21: mol_type = other RNA
aaaacacccttgaaaatttcc

SEQ ID NO: 61506 - RNA, 21 nt, synthetic construct
  source 1..21: mol_type = other RNA
aaaacacctaaagatatgtgt

SEQ ID NO: 61507 - RNA, 21 nt, synthetic construct
  source 1..21: mol_type = other RNA
aaaacacctcagttaaaccca

SEQ ID NO: 61508 - RNA, 21 nt, synthetic construct
  source 1..21: mol_type = other RNA
aaaacactccagaatgaccga

SEQ ID NO: 61509 - RNA, 21 nt, synthetic construct
  source 1..21: mol_type = other RNA
aaaacactggaagtaattggg

SEQ ID NO: 61510 - RNA, 21 nt, synthetic construct
  source 1..21: mol_type = other RNA
aaaacactggcaaaaatcatc

SEQ ID NO: 61511 - RNA, 21 nt, synthetic construct
  source 1..21: mol_type = other RNA
aaaacacttctgtgatcagaa

SEQ ID NO: 61512 - RNA, 21 nt, synthetic construct
  source 1..21: mol_type = other RNA
aaaacagaaatgaaatggccc

SEQ ID NO: 61513 - RNA, 21 nt, synthetic construct
  source 1..21: mol_type = other RNA
aaaacagaagacacaaaatca

SEQ ID NO: 61514 - RNA, 21 nt, synthetic construct
  source 1..21: mol_type = other RNA
aaaacagacccttatgtccag

SEQ ID NO: 61515 - RNA, 21 nt, synthetic construct
  source 1..21: mol_type = other RNA
aaaacagatcttggccgaatg

SEQ ID NO: 61516 - RNA, 21 nt, synthetic construct
  source 1..21: mol_type = other RNA
aaaacagcatatacatgacat

SEQ ID NO: 61517 - RNA, 21 nt, synthetic construct
  source 1..21: mol_type = other RNA
aaaacagctaggtgagtgaga

SEQ ID NO: 61518 - RNA, 21 nt, synthetic construct
  source 1..21: mol_type = other RNA
aaaacagcttcttgttagaat

SEQ ID NO: 61519 - RNA, 21 nt, synthetic construct
  source 1..21: mol_type = other RNA
aaaacaggaagttgagaaaga

SEQ ID NO: 61520 - RNA, 21 nt, synthetic construct
  source 1..21: mol_type = other RNA
aaaacagggttattaacatac

SEQ ID NO: 61521 - RNA, 21 nt, synthetic construct
  source 1..21: mol_type = other RNA
aaaacagttgctattcaacag

SEQ ID NO: 61522 - RNA, 21 nt, synthetic construct
  source 1..21: mol_type = other RNA
aaaacagtttccctctgagag

SEQ ID NO: 61523 - RNA, 21 nt, synthetic construct
  source 1..21: mol_type = other RNA
aaaacagtttggcaatttctc

SEQ ID NO: 61524 - RNA, 21 nt, synthetic construct
  source 1..21: mol_type = other RNA
aaaacatatccttctacatcc

SEQ ID NO: 61525 - RNA, 21 nt, synthetic construct
  source 1..21: mol_type = other RNA
aaaacatatgcaggaccaact

SEQ ID NO: 61526 - RNA, 21 nt, synthetic construct
  source 1..21: mol_type = other RNA
aaaacatatgtcagatggtaa

SEQ ID NO: 61527 - RNA, 21 nt, synthetic construct
  source 1..21: mol_type = other RNA
aaaacatcaaagtcccctgta

SEQ ID NO: 61528 - RNA, 21 nt, synthetic construct
  source 1..21: mol_type = other RNA
aaaacatcatctaatttccca

SEQ ID NO: 61529 - RNA, 21 nt, synthetic construct
  source 1..21: mol_type = other RNA
aaaacatccattactcgtggt

SEQ ID NO: 61530 - RNA, 21 nt, synthetic construct
  source 1..21: mol_type = other RNA
aaaacatctggaaggaaacac

SEQ ID NO: 61531 - RNA, 21 nt, synthetic construct
  source 1..21: mol_type = other RNA
aaaacatggatatttggccgg

SEQ ID NO: 61532 - RNA, 21 nt, synthetic construct
  source 1..21: mol_type = other RNA
aaaacatggccagtatctcct

SEQ ID NO: 61533 - RNA, 21 nt, synthetic construct
  source 1..21: mol_type = other RNA
aaaacatggtccacagaggct

SEQ ID NO: 61534 - RNA, 21 nt, synthetic construct
  source 1..21: mol_type = other RNA
aaaacatgttgtgtagaaatg

SEQ ID NO: 61535 - RNA, 21 nt, synthetic construct
  source 1..21: mol_type = other RNA
aaaacattggaggataatatc

SEQ ID NO: 61536 - RNA, 21 nt, synthetic construct
  source 1..21: mol_type = other RNA
aaaaccaaacactggaaatca

SEQ ID NO: 61537 - RNA, 21 nt, synthetic construct
  source 1..21: mol_type = other RNA
aaaaccaaagaaaggggaagg

SEQ ID NO: 61538 - RNA, 21 nt, synthetic construct
  source 1..21: mol_type = other RNA
aaaaccaaatgtggatagtgc

SEQ ID NO: 61539 - RNA, 21 nt, synthetic construct
  source 1..21: mol_type = other RNA
aaaaccacaaacatgaataac

SEQ ID NO: 61540 - RNA, 21 nt, synthetic construct
  source 1..21: mol_type = other RNA
aaaaccacatttcatagcaga

SEQ ID NO: 61541 - RNA, 21 nt, synthetic construct
  source 1..21: mol_type = other RNA
aaaaccacgcagaacagtgtt

SEQ ID NO: 61542 - RNA, 21 nt, synthetic construct
  source 1..21: mol_type = other RNA
aaaaccactggatacggaaat

SEQ ID NO: 61543 - RNA, 21 nt, synthetic construct
  source 1..21: mol_type = other RNA
aaaaccagaaaagtgaaacaa

SEQ ID NO: 61544 - RNA, 21 nt, synthetic construct
  source 1..21: mol_type = other RNA
aaaaccagagcggaattttta

SEQ ID NO: 61545 - RNA, 21 nt, synthetic construct
  source 1..21: mol_type = other RNA
aaaaccaggaggtttgcactg

SEQ ID NO: 61546 - RNA, 21 nt, synthetic construct
  source 1..21: mol_type = other RNA
aaaaccatgtcatgtatatgc

SEQ ID NO: 61547 - RNA, 21 nt, synthetic construct
  source 1..21: mol_type = other RNA
aaaacccaactctttctttga

SEQ ID NO: 61548 - RNA, 21 nt, synthetic construct
  source 1..21: mol_type = other RNA
aaaacccagacctgcacaaag

SEQ ID NO: 61549 - RNA, 21 nt, synthetic construct
  source 1..21: mol_type = other RNA
aaaacccatgatctttggaaa

SEQ ID NO: 61550 - RNA, 21 nt, synthetic construct
  source 1..21: mol_type = other RNA
aaaaccccgtccctactaaaa

SEQ ID NO: 61551 - RNA, 21 nt, synthetic construct
  source 1..21: mol_type = other RNA
aaaaccctgttgggctattaa

SEQ ID NO: 61552 - RNA, 21 nt, synthetic construct
  source 1..21: mol_type = other RNA
aaaacccttcatcatttgtat

SEQ ID NO: 61553 - RNA, 21 nt, synthetic construct
  source 1..21: mol_type = other RNA
aaaacccttgggatgcagcaa

SEQ ID NO: 61554 - RNA, 21 nt, synthetic construct
  source 1..21: mol_type = other RNA
aaaaccgacagcagataagat

SEQ ID NO: 61555 - RNA, 21 nt, synthetic construct
  source 1..21: mol_type = other RNA
aaaacctaaacctgtgatttc

SEQ ID NO: 61556 - RNA, 21 nt, synthetic construct
  source 1..21: mol_type = other RNA
aaaacctcccaacaggctgag

SEQ ID NO: 61557 - RNA, 21 nt, synthetic construct
  source 1..21: mol_type = other RNA
aaaacctgaaatggcttaagg

SEQ ID NO: 61558 - RNA, 21 nt, synthetic construct
  source 1..21: mol_type = other RNA
aaaacctggaatgggttggag

SEQ ID NO: 61559 - RNA, 21 nt, synthetic construct
  source 1..21: mol_type = other RNA
aaaacctggtaataatgaaag

SEQ ID NO: 61560 - RNA, 21 nt, synthetic construct
  source 1..21: mol_type = other RNA
aaaacctggtatgagtgtttc

SEQ ID NO: 61561 - RNA, 21 nt, synthetic construct
  source 1..21: mol_type = other RNA
aaaacctttttgggatctgtc

SEQ ID NO: 61562 - RNA, 21 nt, synthetic construct
  source 1..21: mol_type = other RNA
aaaacgaggaaaagagaacat

SEQ ID NO: 61563 - RNA, 21 nt, synthetic construct
  source 1..21: mol_type = other RNA
aaaacgcggcacttggtaagc

SEQ ID NO: 61564 - RNA, 21 nt, synthetic construct
  source 1..21: mol_type = other RNA
aaaacggaaactttatacctg

SEQ ID NO: 61565 - RNA, 21 nt, synthetic construct
  source 1..21: mol_type = other RNA
aaaacggaggttgcagtaagc

SEQ ID NO: 61566 - RNA, 21 nt, synthetic construct
  source 1..21: mol_type = other RNA
aaaacgggttatacacacata

SEQ ID NO: 61567 - RNA, 21 nt, synthetic construct
  source 1..21: mol_type = other RNA
aaaacgtgcaaactaccaaga

SEQ ID NO: 61568 - RNA, 21 nt, synthetic construct
  source 1..21: mol_type = other RNA
aaaactaaggtcaagagagat

SEQ ID NO: 61569 - RNA, 21 nt, synthetic construct
  source 1..21: mol_type = other RNA
aaaactacaggcaacaaaaga

SEQ ID NO: 61570 - RNA, 21 nt, synthetic construct
  source 1..21: mol_type = other RNA
aaaactacttcgtgtgtggag

SEQ ID NO: 61571 - RNA, 21 nt, synthetic construct
  source 1..21: mol_type = other RNA
aaaactagagatgggaaagta

SEQ ID NO: 61572 - RNA, 21 nt, synthetic construct
  source 1..21: mol_type = other RNA
aaaactaggctgtcccaaatg

SEQ ID NO: 61573 - RNA, 21 nt, synthetic construct
  source 1..21: mol_type = other RNA
aaaactcaacattcattcatg

SEQ ID NO: 61574 - RNA, 21 nt, synthetic construct
  source 1..21: mol_type = other RNA
aaaactcaactgcctctacat

SEQ ID NO: 61575 - RNA, 21 nt, synthetic construct
  source 1..21: mol_type = other RNA
aaaactcacaaaaagtgtgac

SEQ ID NO: 61576 - RNA, 21 nt, synthetic construct
  source 1..21: mol_type = other RNA
aaaactccaagtgtaaaaaga

SEQ ID NO: 61577 - RNA, 21 nt, synthetic construct
  source 1..21: mol_type = other RNA
aaaactccccatgcaggagaa

SEQ ID NO: 61578 - RNA, 21 nt, synthetic construct
  source 1..21: mol_type = other RNA
aaaactctgtttccttaccag

SEQ ID NO: 61579 - RNA, 21 nt, synthetic construct
  source 1..21: mol_type = other RNA
aaaactcttagcttagaagaa

SEQ ID NO: 61580 - RNA, 21 nt, synthetic construct
  source 1..21: mol_type = other RNA
aaaactgaactacagtgttta

SEQ ID NO: 61581 - RNA, 21 nt, synthetic construct
  source 1..21: mol_type = other RNA
aaaactgaactcaaaatggat

SEQ ID NO: 61582 - RNA, 21 nt, synthetic construct
  source 1..21: mol_type = other RNA
aaaactgaagtttatcagtct

SEQ ID NO: 61583 - RNA, 21 nt, synthetic construct
  source 1..21: mol_type = other RNA
aaaactgagaccggatgaggt

SEQ ID NO: 61584 - RNA, 21 nt, synthetic construct
  source 1..21: mol_type = other RNA
aaaactgcagcaattatttga

SEQ ID NO: 61585 - RNA, 21 nt, synthetic construct
  source 1..21: mol_type = other RNA
aaaactgctgagtcttctact

SEQ ID NO: 61586 - RNA, 21 nt, synthetic construct
  source 1..21: mol_type = other RNA
aaaactggcaatcaaatggcc

SEQ ID NO: 61587 - RNA, 21 nt, synthetic construct
  source 1..21: mol_type = other RNA
aaaactgggggctggacataa

SEQ ID NO: 61588 - RNA, 21 nt, synthetic construct
  source 1..21: mol_type = other RNA
aaaactgtttggctgggagct

SEQ ID NO: 61589 - RNA, 21 nt, synthetic construct
  source 1..21: mol_type = other RNA
aaaacttaagtatctcagtca

SEQ ID NO: 61590 - RNA, 21 nt, synthetic construct
  source 1..21: mol_type = other RNA
aaaacttaagtatctcggtca

SEQ ID NO: 61591 - RNA, 21 nt, synthetic construct
  source 1..21: mol_type = other RNA
aaaacttaggaggctattaac

SEQ ID NO: 61592 - RNA, 21 nt, synthetic construct
  source 1..21: mol_type = other RNA
aaaacttatgcaagatggcaa

SEQ ID NO: 61593 - RNA, 21 nt, synthetic construct
  source 1..21: mol_type = other RNA
aaaacttcccttagctctcat

SEQ ID NO: 61594 - RNA, 21 nt, synthetic construct
  source 1..21: mol_type = other RNA
aaaacttcgaactaaggaaag

SEQ ID NO: 61595 - RNA, 21 nt, synthetic construct
  source 1..21: mol_type = other RNA
aaaacttctctggagcaagca

SEQ ID NO: 61596 - RNA, 21 nt, synthetic construct
  source 1..21: mol_type = other RNA
aaaacttgagcagatcagtaa

SEQ ID NO: 61597 - RNA, 21 nt, synthetic construct
  source 1..21: mol_type = other RNA
aaaacttgtagaggaggaggg

SEQ ID NO: 61598 - RNA, 21 nt, synthetic construct
  source 1..21: mol_type = other RNA
aaaactttaggtcagaataca

SEQ ID NO: 61599 - RNA, 21 nt, synthetic construct
  source 1..21: mol_type = other RNA
aaaactttttgggcctttctg

SEQ ID NO: 61600 - RNA, 21 nt, synthetic construct
  source 1..21: mol_type = other RNA
aaaagaaaaagctcacctctg

SEQ ID NO: 61601 - RNA, 21 nt, synthetic construct
  source 1..21: mol_type = other RNA
aaaagaaaaaggttaagggaa

SEQ ID NO: 61602 - RNA, 21 nt, synthetic construct
  source 1..21: mol_type = other RNA
aaaagaaaaagttgggcttgg

SEQ ID NO: 61603 - RNA, 21 nt, synthetic construct
  source 1..21: mol_type = other RNA
aaaagaaaagtttcagtggtt

SEQ ID NO: 61604 - RNA, 21 nt, synthetic construct
  source 1..21: mol_type = other RNA
aaaagaaaatggccaagagtt

SEQ ID NO: 61605 - RNA, 21 nt, synthetic construct
  source 1..21: mol_type = other RNA
aaaagaaagctgtggatgttg

SEQ ID NO: 61606 - RNA, 21 nt, synthetic construct
  source 1..21: mol_type = other RNA
aaaagaaatctgcatccaaaa

SEQ ID NO: 61607 - RNA, 21 nt, synthetic construct
  source 1..21: mol_type = other RNA
aaaagaacaacatggtagacc

SEQ ID NO: 61608 - RNA, 21 nt, synthetic construct
  source 1..21: mol_type = other RNA
aaaagaacacagtgttgagaa

SEQ ID NO: 61609 - RNA, 21 nt, synthetic construct
  source 1..21: mol_type = other RNA
aaaagaacactataagccaat

SEQ ID NO: 61610 - RNA, 21 nt, synthetic construct
  source 1..21: mol_type = other RNA
aaaagaacaggacttttggta

SEQ ID NO: 61611 - RNA, 21 nt, synthetic construct
  source 1..21: mol_type = other RNA
aaaagaacctctggaaaggac

SEQ ID NO: 61612 - RNA, 21 nt, synthetic construct
  source 1..21: mol_type = other RNA
aaaagaagatgcagttgctta

SEQ ID NO: 61613 - RNA, 21 nt, synthetic construct
  source 1..21: mol_type = other RNA
aaaagaaggccgtccctattt

SEQ ID NO: 61614 - RNA, 21 nt, synthetic construct
  source 1..21: mol_type = other RNA
aaaagaagttacggttccctg

SEQ ID NO: 61615 - RNA, 21 nt, synthetic construct
  source 1..21: mol_type = other RNA
aaaagaataagctaatcccaa

SEQ ID NO: 61616 - RNA, 21 nt, synthetic construct
  source 1..21: mol_type = other RNA
aaaagacaagtactgcatgat

SEQ ID NO: 61617 - RNA, 21 nt, synthetic construct
  source 1..21: mol_type = other RNA
aaaagacaatagctagtgtct

SEQ ID NO: 61618 - RNA, 21 nt, synthetic construct
  source 1..21: mol_type = other RNA
aaaagacacaaaagagctggg

SEQ ID NO: 61619 - RNA, 21 nt, synthetic construct
  source 1..21: mol_type = other RNA
aaaagacagagctagaactag

SEQ ID NO: 61620 - RNA, 21 nt, synthetic construct
  source 1..21: mol_type = other RNA
aaaagacatcactaagagtga

SEQ ID NO: 61621 - RNA, 21 nt, synthetic construct
  source 1..21: mol_type = other RNA
aaaagacatctttcctgtgat

SEQ ID NO: 61622 - RNA, 21 nt, synthetic construct
  source 1..21: mol_type = other RNA
aaaagaccaagaattttccat

SEQ ID NO: 61623 - RNA, 21 nt, synthetic construct
  source 1..21: mol_type = other RNA
aaaagaccgcaagagttccaa

SEQ ID NO: 61624 - RNA, 21 nt, synthetic construct
  source 1..21: mol_type = other RNA
aaaagacgatattcctatcag

SEQ ID NO: 61625 - RNA, 21 nt, synthetic construct
  source 1..21: mol_type = other RNA
aaaagacttctcaaacaggat

SEQ ID NO: 61626 - RNA, 21 nt, synthetic construct
  source 1..21: mol_type = other RNA
aaaagacttgaggtttacttg

SEQ ID NO: 61627 - RNA, 21 nt, synthetic construct
  source 1..21: mol_type = other RNA
aaaagagaaaaattacaggtc

SEQ ID NO: 61628 - RNA, 21 nt, synthetic construct
  source 1..21: mol_type = other RNA
aaaagagaacacacaatttga

SEQ ID NO: 61629 - RNA, 21 nt, synthetic construct
  source 1..21: mol_type = other RNA
aaaagagaacattggtttgaa

SEQ ID NO: 61630 - RNA, 21 nt, synthetic construct
  source 1..21: mol_type = other RNA
aaaagagaacttgcacataat

SEQ ID NO: 61631 - RNA, 21 nt, synthetic construct
  source 1..21: mol_type = other RNA
aaaagagatctagtgaagtca

SEQ ID NO: 61632 - RNA, 21 nt, synthetic construct
  source 1..21: mol_type = other RNA
aaaagagcacaccaagacatg

SEQ ID NO: 61633 - RNA, 21 nt, synthetic construct
  source 1..21: mol_type = other RNA
aaaagagcgaagagggagaag

SEQ ID NO: 61634 - RNA, 21 nt, synthetic construct
  source 1..21: mol_type = other RNA
aaaagagctgggcccgcagtg

SEQ ID NO: 61635 - RNA, 21 nt, synthetic construct
  source 1..21: mol_type = other RNA
aaaagagtagattccccctta

SEQ ID NO: 61636 - RNA, 21 nt, synthetic construct
  source 1..21: mol_type = other RNA
aaaagagtgcacattccttct

SEQ ID NO: 61637 - RNA, 21 nt, synthetic construct
  source 1..21: mol_type = other RNA
aaaagataagtagaaggtcaa

SEQ ID NO: 61638 - RNA, 21 nt, synthetic construct
  source 1..21: mol_type = other RNA
aaaagatacacaagatctcta

SEQ ID NO: 61639 - RNA, 21 nt, synthetic construct
  source 1..21: mol_type = other RNA
aaaagatactcaacatcacta

SEQ ID NO: 61640 - RNA, 21 nt, synthetic construct
  source 1..21: mol_type = other RNA
aaaagatatccacagtatgct

SEQ ID NO: 61641 - RNA, 21 nt, synthetic construct
  source 1..21: mol_type = other RNA
aaaagatcagtaaaattccct

SEQ ID NO: 61642 - RNA, 21 nt, synthetic construct
  source 1..21: mol_type = other RNA
aaaagatctgtggactttagg

SEQ ID NO: 61643 - RNA, 21 nt, synthetic construct
  source 1..21: mol_type = other RNA
aaaagatgatgaacaaaggca

SEQ ID NO: 61644 - RNA, 21 nt, synthetic construct
  source 1..21: mol_type = other RNA
aaaagatgcagaaaaagcatt

SEQ ID NO: 61645 - RNA, 21 nt, synthetic construct
  source 1..21: mol_type = other RNA
aaaagatgcattctgtcacat

SEQ ID NO: 61646 - RNA, 21 nt, synthetic construct
  source 1..21: mol_type = other RNA
aaaagatgctggtggagtatt

SEQ ID NO: 61647 - RNA, 21 nt, synthetic construct
  source 1..21: mol_type = other RNA
aaaagatgtgtaccaaaagtc

SEQ ID NO: 61648 - RNA, 21 nt, synthetic construct
  source 1..21: mol_type = other RNA
aaaagatgttttcagttgcat

SEQ ID NO: 61649 - RNA, 21 nt, synthetic construct
  source 1..21: mol_type = other RNA
aaaagattaaatacagagcac

SEQ ID NO: 61650 - RNA, 21 nt, synthetic construct
  source 1..21: mol_type = other RNA
aaaagcaaatgtcatcttctc

SEQ ID NO: 61651 - RNA, 21 nt, synthetic construct
  source 1..21: mol_type = other RNA
aaaagcaacctcatttgcaga

SEQ ID NO: 61652 - RNA, 21 nt, synthetic construct
  source 1..21: mol_type = other RNA
aaaagcaacttgaaggcaatg

SEQ ID NO: 61653 - RNA, 21 nt, synthetic construct
  source 1..21: mol_type = other RNA
aaaagcacaagcacagagtca

SEQ ID NO: 61654 - RNA, 21 nt, synthetic construct
  source 1..21: mol_type = other RNA
aaaagcacaggcatcggccgg

SEQ ID NO: 61655 - RNA, 21 nt, synthetic construct
  source 1..21: mol_type = other RNA
aaaagcaccactgagagggaa

SEQ ID NO: 61656 - RNA, 21 nt, synthetic construct
  source 1..21: mol_type = other RNA
aaaagcaccagttatcaccat

SEQ ID NO: 61657 - RNA, 21 nt, synthetic construct
  source 1..21: mol_type = other RNA
aaaagcacctaccataacaaa

SEQ ID NO: 61658 - RNA, 21 nt, synthetic construct
  source 1..21: mol_type = other RNA
aaaagcactatccacatttgg

SEQ ID NO: 61659 - RNA, 21 nt, synthetic construct
  source 1..21: mol_type = other RNA
aaaagcagacagaaagacagg

SEQ ID NO: 61660 - RNA, 21 nt, synthetic construct
  source 1..21: mol_type = other RNA
aaaagcagagaaactggaatc

SEQ ID NO: 61661 - RNA, 21 nt, synthetic construct
  source 1..21: mol_type = other RNA
aaaagcagctacctgttgatt

SEQ ID NO: 61662 - RNA, 21 nt, synthetic construct
  source 1..21: mol_type = other RNA
aaaagcaggccctgagaagtc

SEQ ID NO: 61663 - RNA, 21 nt, synthetic construct
  source 1..21: mol_type = other RNA
aaaagccaagagcgaggcctg

SEQ ID NO: 61664 - RNA, 21 nt, synthetic construct
  source 1..21: mol_type = other RNA
aaaagccatagtgtaaactaa

SEQ ID NO: 61665 - RNA, 21 nt, synthetic construct
  source 1..21: mol_type = other RNA
aaaagccatttatcagcacca

SEQ ID NO: 61666 - RNA, 21 nt, synthetic construct
  source 1..21: mol_type = other RNA
aaaagcccaatctacaggtcg

SEQ ID NO: 61667 - RNA, 21 nt, synthetic construct
  source 1..21: mol_type = other RNA
aaaagccccaaaccatcaagt

SEQ ID NO: 61668 - RNA, 21 nt, synthetic construct
  source 1..21: mol_type = other RNA
aaaagcctcaaacgaaccaat

SEQ ID NO: 61669 - RNA, 21 nt, synthetic construct
  source 1..21: mol_type = other RNA
aaaagcctcatttgaactttc

SEQ ID NO: 61670 - RNA, 21 nt, synthetic construct
  source 1..21: mol_type = other RNA
aaaagcctctctgatggaacg

SEQ ID NO: 61671 - RNA, 21 nt, synthetic construct
  source 1..21: mol_type = other RNA
aaaagcctctgtggaccatgt

SEQ ID NO: 61672 - RNA, 21 nt, synthetic construct
  source 1..21: mol_type = other RNA
aaaagcctgcttcagcctaag

SEQ ID NO: 61673 - RNA, 21 nt, synthetic construct
  source 1..21: mol_type = other RNA
aaaagcgtactgtgattacaa

SEQ ID NO: 61674 - RNA, 21 nt, synthetic construct
  source 1..21: mol_type = other RNA
aaaagcgttggagacagccta

SEQ ID NO: 61675 - RNA, 21 nt, synthetic construct
  source 1..21: mol_type = other RNA
aaaagctaccctcgagtaaaa

SEQ ID NO: 61676 - RNA, 21 nt, synthetic construct
  source 1..21: mol_type = other RNA
aaaagctatacacgttacaaa

SEQ ID NO: 61677 - RNA, 21 nt, synthetic construct
  source 1..21: mol_type = other RNA
aaaagctcaaaaatactcaag

SEQ ID NO: 61678 - RNA, 21 nt, synthetic construct
  source 1..21: mol_type = other RNA
aaaagctcacctctggactca

SEQ ID NO: 61679 - RNA, 21 nt, synthetic construct
  source 1..21: mol_type = other RNA
aaaagctcagtgtgtttttgt

SEQ ID NO: 61680 - RNA, 21 nt, synthetic construct
  source 1..21: mol_type = other RNA
aaaagctccccggatgattct

SEQ ID NO: 61681 - RNA, 21 nt, synthetic construct
  source 1..21: mol_type = other RNA
aaaagctctaatagttcacct

SEQ ID NO: 61682 - RNA, 21 nt, synthetic construct
  source 1..21: mol_type = other RNA
aaaagctggagttatttgtat

SEQ ID NO: 61683 - RNA, 21 nt, synthetic construct
  source 1..21: mol_type = other RNA
aaaagcttatgatcttgggaa

SEQ ID NO: 61684 - RNA, 21 nt, synthetic construct
  source 1..21: mol_type = other RNA
aaaagcttcccccctctctct

SEQ ID NO: 61685 - RNA, 21 nt, synthetic construct
  source 1..21: mol_type = other RNA
aaaaggaaagtaactgttggc

SEQ ID NO: 61686 - RNA, 21 nt, synthetic construct
  source 1..21: mol_type = other RNA
aaaaggaatataaacgtgtgt

SEQ ID NO: 61687 - RNA, 21 nt, synthetic construct
  source 1..21: mol_type = other RNA
aaaaggaatctgacctaagct

SEQ ID NO: 61688 - RNA, 21 nt, synthetic construct
  source 1..21: mol_type = other RNA
aaaaggaatctgggccgggcg

SEQ ID NO: 61689 - RNA, 21 nt, synthetic construct
  source 1..21: mol_type = other RNA
aaaaggaatggaattctgatg

SEQ ID NO: 61690 - RNA, 21 nt, synthetic construct
  source 1..21: mol_type = other RNA
aaaaggacacaaattatgact

SEQ ID NO: 61691 - RNA, 21 nt, synthetic construct
  source 1..21: mol_type = other RNA
aaaaggacattagtggaaaaa

SEQ ID NO: 61692 - RNA, 21 nt, synthetic construct
  source 1..21: mol_type = other RNA
aaaaggaccatctgttaaaag

SEQ ID NO: 61693 - RNA, 21 nt, synthetic construct
  source 1..21: mol_type = other RNA
aaaaggagatatacaggaaga

SEQ ID NO: 61694 - RNA, 21 nt, synthetic construct
  source 1..21: mol_type = other RNA
aaaaggaggaactaattgata

SEQ ID NO: 61695 - RNA, 21 nt, synthetic construct
  source 1..21: mol_type = other RNA
aaaaggagggaaaatgtttat

SEQ ID NO: 61696 - RNA, 21 nt, synthetic construct
  source 1..21: mol_type = other RNA
aaaaggatatgggccaaagac

SEQ ID NO: 61697 - RNA, 21 nt, synthetic construct
  source 1..21: mol_type = other RNA
aaaaggatttgtttgtgaaga

SEQ ID NO: 61698 - RNA, 21 nt, synthetic construct
  source 1..21: mol_type = other RNA
aaaaggcaaaccacacagaga

SEQ ID NO: 61699 - RNA, 21 nt, synthetic construct
  source 1..21: mol_type = other RNA
aaaaggccccttgaaagatca

SEQ ID NO: 61700 - RNA, 21 nt, synthetic construct
  source 1..21: mol_type = other RNA
aaaaggctgagacctcatctt

SEQ ID NO: 61701 - RNA, 21 nt, synthetic construct
  source 1..21: mol_type = other RNA
aaaagggaaaacaattacttg

SEQ ID NO: 61702 - RNA, 21 nt, synthetic construct
  source 1..21: mol_type = other RNA
aaaagggaaatatgaaccaca

SEQ ID NO: 61703 - RNA, 21 nt, synthetic construct
  source 1..21: mol_type = other RNA
aaaagggagtcagtagaggcc

SEQ ID NO: 61704 - RNA, 21 nt, synthetic construct
  source 1..21: mol_type = other RNA
aaaagggtgggggcatcaaag

SEQ ID NO: 61705 - RNA, 21 nt, synthetic construct
  source 1..21: mol_type = other RNA
aaaaggtataaaggatgcaca

SEQ ID NO: 61706 - RNA, 21 nt, synthetic construct
  source 1..21: mol_type = other RNA
aaaaggtgctgttgtatttta

SEQ ID NO: 61707 - RNA, 21 nt, synthetic construct
  source 1..21: mol_type = other RNA
aaaaggttaagggaagagcta

SEQ ID NO: 61708 - RNA, 21 nt, synthetic construct
  source 1..21: mol_type = other RNA
aaaaggttgcttaattgagct

SEQ ID NO: 61709 - RNA, 21 nt, synthetic construct
  source 1..21: mol_type = other RNA
aaaaggtttccagtggccccc

SEQ ID NO: 61710 - RNA, 21 nt, synthetic construct
  source 1..21: mol_type = other RNA
aaaaggtttttgaacaagagc

SEQ ID NO: 61711 - RNA, 21 nt, synthetic construct
  source 1..21: mol_type = other RNA
aaaagtaaattcgcataacca

SEQ ID NO: 61712 - RNA, 21 nt, synthetic construct
  source 1..21: mol_type = other RNA
aaaagtactggaaatggacag

SEQ ID NO: 61713 - RNA, 21 nt, synthetic construct
  source 1..21: mol_type = other RNA
aaaagtaggggtaaatctttg

SEQ ID NO: 61714 - RNA, 21 nt, synthetic construct
  source 1..21: mol_type = other RNA
aaaagtatcgtgagactatta

SEQ ID NO: 61715 - RNA, 21 nt, synthetic construct
  source 1..21: mol_type = other RNA
aaaagtatggttgaagaaagt

SEQ ID NO: 61716 - RNA, 21 nt, synthetic construct
  source 1..21: mol_type = other RNA
aaaagtcagctaggcgtagta

SEQ ID NO: 61717 - RNA, 21 nt, synthetic construct
  source 1..21: mol_type = other RNA
aaaagtcagtaaaaaaggacc

SEQ ID NO: 61718 - RNA, 21 nt, synthetic construct
  source 1..21: mol_type = other RNA
aaaagtcatgacctgctttct

SEQ ID NO: 61719 - RNA, 21 nt, synthetic construct
  source 1..21: mol_type = other RNA
aaaagtcattgaaactcaatg

SEQ ID NO: 61720 - RNA, 21 nt, synthetic construct
  source 1..21: mol_type = other RNA
aaaagtcctgttcttttgtaa

SEQ ID NO: 61721 - RNA, 21 nt, synthetic construct
  source 1..21: mol_type = other RNA
aaaagtgaaaactaaggtcaa

SEQ ID NO: 61722 - RNA, 21 nt, synthetic construct
  source 1..21: mol_type = other RNA
aaaagtgaatcactacagcat

SEQ ID NO: 61723 - RNA, 21 nt, synthetic construct
  source 1..21: mol_type = other RNA
aaaagtgacttctggatgtgt

SEQ ID NO: 61724 - RNA, 21 nt, synthetic construct
  source 1..21: mol_type = other RNA
aaaagtgataccataaagtca

SEQ ID NO: 61725 - RNA, 21 nt, synthetic construct
  source 1..21: mol_type = other RNA
aaaagtgctgcagtatgcata

SEQ ID NO: 61726 - RNA, 21 nt, synthetic construct
  source 1..21: mol_type = other RNA
aaaagtgctgttgaggctggg

SEQ ID NO: 61727 - RNA, 21 nt, synthetic construct
  source 1..21: mol_type = other RNA
aaaagtgcttctagtaacttg

SEQ ID NO: 61728 - RNA, 21 nt, synthetic construct
  source 1..21: mol_type = other RNA
aaaagtgtgaccacattccca

SEQ ID NO: 61729 - RNA, 21 nt, synthetic construct
  source 1..21: mol_type = other RNA
aaaagtgttgactaccatctc

SEQ ID NO: 61730 - RNA, 21 nt, synthetic construct
  source 1..21: mol_type = other RNA
aaaagtgtttgtcacatagaa

SEQ ID NO: 61731 - RNA, 21 nt, synthetic construct
  source 1..21: mol_type = other RNA
aaaagttacaaggattgaatg

SEQ ID NO: 61732 - RNA, 21 nt, synthetic construct
  source 1..21: mol_type = other RNA
aaaagttagctggcaaaatgg

SEQ ID NO: 61733 - RNA, 21 nt, synthetic construct
  source 1..21: mol_type = other RNA
aaaagttccaagattttccca

SEQ ID NO: 61734 - RNA, 21 nt, synthetic construct
  source 1..21: mol_type = other RNA
aaaagttgggcttggttggaa

SEQ ID NO: 61735 - RNA, 21 nt, synthetic construct
  source 1..21: mol_type = other RNA
aaaagttttccaaccactgaa

SEQ ID NO: 61736 - RNA, 21 nt, synthetic construct
  source 1..21: mol_type = other RNA
aaaagttttttcctttgcctt

SEQ ID NO: 61737 - RNA, 21 nt, synthetic construct
  source 1..21: mol_type = other RNA
aaaataaacattttccctcct

SEQ ID NO: 61738 - RNA, 21 nt, synthetic construct
  source 1..21: mol_type = other RNA
aaaataaaccaagtttggttc

SEQ ID NO: 61739 - RNA, 21 nt, synthetic construct
  source 1..21: mol_type = other RNA
aaaataaagacttcacgatgc

SEQ ID NO: 61740 - RNA, 21 nt, synthetic construct
  source 1..21: mol_type = other RNA
aaaataaaggctttcgtatgg

SEQ ID NO: 61741 - RNA, 21 nt, synthetic construct
  source 1..21: mol_type = other RNA
aaaataaagttccccattgac

SEQ ID NO: 61742 - RNA, 21 nt, synthetic construct
  source 1..21: mol_type = other RNA
aaaataacacgcagaaccact

SEQ ID NO: 61743 - RNA, 21 nt, synthetic construct
  source 1..21: mol_type = other RNA
aaaataacgggccgggcgctg

SEQ ID NO: 61744 - RNA, 21 nt, synthetic construct
  source 1..21: mol_type = other RNA
aaaataatacctaacagccgg

SEQ ID NO: 61745 - RNA, 21 nt, synthetic construct
  source 1..21: mol_type = other RNA
aaaataatgttttccgtgtga

SEQ ID NO: 61746 - RNA, 21 nt, synthetic construct
  source 1..21: mol_type = other RNA
aaaatacaacagcaccttttt

SEQ ID NO: 61747 - RNA, 21 nt, synthetic construct
  source 1..21: mol_type = other RNA
aaaatacagctccaaagaaca

SEQ ID NO: 61748 - RNA, 21 nt, synthetic construct
  source 1..21: mol_type = other RNA
aaaatacatgaggcctctccc

SEQ ID NO: 61749 - RNA, 21 nt, synthetic construct
  source 1..21: mol_type = other RNA
aaaatacatgtcatgttcccg

SEQ ID NO: 61750 - RNA, 21 nt, synthetic construct
  source 1..21: mol_type = other RNA
aaaataccaaaaaaggtgctg

SEQ ID NO: 61751 - RNA, 21 nt, synthetic construct
  source 1..21: mol_type = other RNA
aaaataccagaggttaaagca

SEQ ID NO: 61752 - RNA, 21 nt, synthetic construct
  source 1..21: mol_type = other RNA
aaaatacccacaagaaaaacc

SEQ ID NO: 61753 - RNA, 21 nt, synthetic construct
  source 1..21: mol_type = other RNA
aaaatacgaaagtgctctacc

SEQ ID NO: 61754 - RNA, 21 nt, synthetic construct
  source 1..21: mol_type = other RNA
aaaatacggccgggagtggtg

SEQ ID NO: 61755 - RNA, 21 nt, synthetic construct
  source 1..21: mol_type = other RNA
aaaatactaacgatccttact

SEQ ID NO: 61756 - RNA, 21 nt, synthetic construct
  source 1..21: mol_type = other RNA
aaaatactacaagagttcccc

SEQ ID NO: 61757 - RNA, 21 nt, synthetic construct
  source 1..21: mol_type = other RNA
aaaatactagcaaactgaatc

SEQ ID NO: 61758 - RNA, 21 nt, synthetic construct
  source 1..21: mol_type = other RNA
aaaatactcaagggctttcaa

SEQ ID NO: 61759 - RNA, 21 nt, synthetic construct
  source 1..21: mol_type = other RNA
aaaatacttaagagcatgttg

SEQ ID NO: 61760 - RNA, 21 nt, synthetic construct
  source 1..21: mol_type = other RNA
aaaatagaggatgggcattcc

SEQ ID NO: 61761 - RNA, 21 nt, synthetic construct
  source 1..21: mol_type = other RNA
aaaatagagttccatctgtta

SEQ ID NO: 61762 - RNA, 21 nt, synthetic construct
  source 1..21: mol_type = other RNA
aaaatagcaggattcttgtta

SEQ ID NO: 61763 - RNA, 21 nt, synthetic construct
  source 1..21: mol_type = other RNA
aaaataggaagtccatgaaac

SEQ ID NO: 61764 - RNA, 21 nt, synthetic construct
  source 1..21: mol_type = other RNA
aaaataggattaagacactac

SEQ ID NO: 61765 - RNA, 21 nt, synthetic construct
  source 1..21: mol_type = other RNA
aaaataggcagtcctctactt

SEQ ID NO: 61766 - RNA, 21 nt, synthetic construct
  source 1..21: mol_type = other RNA
aaaataggcctaggtgtgata

SEQ ID NO: 61767 - RNA, 21 nt, synthetic construct
  source 1..21: mol_type = other RNA
aaaatagggacggccttcttt

SEQ ID NO: 61768 - RNA, 21 nt, synthetic construct
  source 1..21: mol_type = other RNA
aaaatagtcaagtaacagttc

SEQ ID NO: 61769 - RNA, 21 nt, synthetic construct
  source 1..21: mol_type = other RNA
aaaatatagaaggccagaggg

SEQ ID NO: 61770 - RNA, 21 nt, synthetic construct
  source 1..21: mol_type = other RNA
aaaatatccctggggtttcct

SEQ ID NO: 61771 - RNA, 21 nt, synthetic construct
  source 1..21: mol_type = other RNA
aaaatatgtaatgacctggaa

SEQ ID NO: 61772 - RNA, 21 nt, synthetic construct
  source 1..21: mol_type = other RNA
aaaatattgaagagggaacat

SEQ ID NO: 61773 - RNA, 21 nt, synthetic construct
  source 1..21: mol_type = other RNA
aaaatcaaagaaagagttggg

SEQ ID NO: 61774 - RNA, 21 nt, synthetic construct
  source 1..21: mol_type = other RNA
aaaatcaacattgcctccata

SEQ ID NO: 61775 - RNA, 21 nt, synthetic construct
  source 1..21: mol_type = other RNA
aaaatcaacccatgaaaattg

SEQ ID NO: 61776 - RNA, 21 nt, synthetic construct
  source 1..21: mol_type = other RNA
aaaatcaaccccatcaacaag

SEQ ID NO: 61777 - RNA, 21 nt, synthetic construct
  source 1..21: mol_type = other RNA
aaaatcaaggtgcgggattat

SEQ ID NO: 61778 - RNA, 21 nt, synthetic construct
  source 1..21: mol_type = other RNA
aaaatcagatatgaaagagga

SEQ ID NO: 61779 - RNA, 21 nt, synthetic construct
  source 1..21: mol_type = other RNA
aaaatcatcacagtatgcaca

SEQ ID NO: 61780 - RNA, 21 nt, synthetic construct
  source 1..21: mol_type = other RNA
aaaatcattgtagctatatcc

SEQ ID NO: 61781 - RNA, 21 nt, synthetic construct
  source 1..21: mol_type = other RNA
aaaatcattgttcagggaagg

SEQ ID NO: 61782 - RNA, 21 nt, synthetic construct
  source 1..21: mol_type = other RNA
aaaatccaaaagcctcaaaat

SEQ ID NO: 61783 - RNA, 21 nt, synthetic construct
  source 1..21: mol_type = other RNA
aaaatccaagaagacatgata

SEQ ID NO: 61784 - RNA, 21 nt, synthetic construct
  source 1..21: mol_type = other RNA
aaaatcccatttgtaacatgt

SEQ ID NO: 61785 - RNA, 21 nt, synthetic construct
  source 1..21: mol_type = other RNA
aaaatcctctgtagataaacg

SEQ ID NO: 61786 - RNA, 21 nt, synthetic construct
  source 1..21: mol_type = other RNA
aaaatcctgctgggctattgt

SEQ ID NO: 61787 - RNA, 21 nt, synthetic construct
  source 1..21: mol_type = other RNA
aaaatccttacttccagctca

SEQ ID NO: 61788 - RNA, 21 nt, synthetic construct
  source 1..21: mol_type = other RNA
aaaatcggaacaggctcaata

SEQ ID NO: 61789 - RNA, 21 nt, synthetic construct
  source 1..21: mol_type = other RNA
aaaatcgtcctcttcgggtgt

SEQ ID NO: 61790 - RNA, 21 nt, synthetic construct
  source 1..21: mol_type = other RNA
aaaatctaaccctcaatcccc

SEQ ID NO: 61791 - RNA, 21 nt, synthetic construct
  source 1..21: mol_type = other RNA
aaaatctctacagggaaccgt

SEQ ID NO: 61792 - RNA, 21 nt, synthetic construct
  source 1..21: mol_type = other RNA
aaaatctctgacttcattctt

SEQ ID NO: 61793 - RNA, 21 nt, synthetic construct
  source 1..21: mol_type = other RNA
aaaatctgacaatttgccaaa

SEQ ID NO: 61794 - RNA, 21 nt, synthetic construct
  source 1..21: mol_type = other RNA
aaaatctgatgtgtatgttac

SEQ ID NO: 61795 - RNA, 21 nt, synthetic construct
  source 1..21: mol_type = other RNA
aaaatctgattcagtggttgg

SEQ ID NO: 61796 - RNA, 21 nt, synthetic construct
  source 1..21: mol_type = other RNA
aaaatctgtatgagaagactg

SEQ ID NO: 61797 - RNA, 21 nt, synthetic construct
  source 1..21: mol_type = other RNA
aaaatcttattccccagggaa

SEQ ID NO: 61798 - RNA, 21 nt, synthetic construct
  source 1..21: mol_type = other RNA
aaaatgaaaaattcactcctc

SEQ ID NO: 61799 - RNA, 21 nt, synthetic construct
  source 1..21: mol_type = other RNA
aaaatgaaaatgttccctctt

SEQ ID NO: 61800 - RNA, 21 nt, synthetic construct
  source 1..21: mol_type = other RNA
aaaatgaacctgctttctact

SEQ ID NO: 61801 - RNA, 21 nt, synthetic construct
  source 1..21: mol_type = other RNA
aaaatgacacaacttactact

SEQ ID NO: 61802 - RNA, 21 nt, synthetic construct
  source 1..21: mol_type = other RNA
aaaatgacaccaaaactacag

SEQ ID NO: 61803 - RNA, 21 nt, synthetic construct
  source 1..21: mol_type = other RNA
aaaatgagaaacctaagaaag

SEQ ID NO: 61804 - RNA, 21 nt, synthetic construct
  source 1..21: mol_type = other RNA
aaaatgagccaggcatggtgg

SEQ ID NO: 61805 - RNA, 21 nt, synthetic construct
  source 1..21: mol_type = other RNA
aaaatgagggtaaaatagtca

SEQ ID NO: 61806 - RNA, 21 nt, synthetic construct
  source 1..21: mol_type = other RNA
aaaatgatagcattatcccag

SEQ ID NO: 61807 - RNA, 21 nt, synthetic construct
  source 1..21: mol_type = other RNA
aaaatgatggcaacaatcaac

SEQ ID NO: 61808 - RNA, 21 nt, synthetic construct
  source 1..21: mol_type = other RNA
aaaatgattttcacagggcag

SEQ ID NO: 61809 - RNA, 21 nt, synthetic construct
  source 1..21: mol_type = other RNA
aaaatgcagtagtaaagcaaa

SEQ ID NO: 61810 - RNA, 21 nt, synthetic construct
  source 1..21: mol_type = other RNA
aaaatgcccttatttaatgtg

SEQ ID NO: 61811 - RNA, 21 nt, synthetic construct
  source 1..21: mol_type = other RNA
aaaatgcgcgtccgcgacccg

SEQ ID NO: 61812 - RNA, 21 nt, synthetic construct
  source 1..21: mol_type = other RNA
aaaatgctggaaattttcaag

SEQ ID NO: 61813 - RNA, 21 nt, synthetic construct
  source 1..21: mol_type = other RNA
aaaatgcttaacaagaatcct

SEQ ID NO: 61814 - RNA, 21 nt, synthetic construct
  source 1..21: mol_type = other RNA
aaaatgcttatgtcttgtggc

SEQ ID NO: 61815 - RNA, 21 nt, synthetic construct
  source 1..21: mol_type = other RNA
aaaatgctttttctgcatctt

SEQ ID NO: 61816 - RNA, 21 nt, synthetic construct
  source 1..21: mol_type = other RNA
aaaatggaagactttatggta

SEQ ID NO: 61817 - RNA, 21 nt, synthetic construct
  source 1..21: mol_type = other RNA
aaaatggaagtgctgggctag

SEQ ID NO: 61818 - RNA, 21 nt, synthetic construct
  source 1..21: mol_type = other RNA
aaaatggaatattgttcagcc

SEQ ID NO: 61819 - RNA, 21 nt, synthetic construct
  source 1..21: mol_type = other RNA
aaaatggagacatctgagaca

SEQ ID NO: 61820 - RNA, 21 nt, synthetic construct
  source 1..21: mol_type = other RNA
aaaatggagacccatactcag

SEQ ID NO: 61821 - RNA, 21 nt, synthetic construct
  source 1..21: mol_type = other RNA
aaaatggatcaaagacctaag

SEQ ID NO: 61822 - RNA, 21 nt, synthetic construct
  source 1..21: mol_type = other RNA
aaaatggcacatactgcatat

SEQ ID NO: 61823 - RNA, 21 nt, synthetic construct
  source 1..21: mol_type = other RNA
aaaatggccaagagttgctga

SEQ ID NO: 61824 - RNA, 21 nt, synthetic construct
  source 1..21: mol_type = other RNA
aaaatgggccaaagacttcaa

SEQ ID NO: 61825 - RNA, 21 nt, synthetic construct
  source 1..21: mol_type = other RNA
aaaatggggatatccaaagat

SEQ ID NO: 61826 - RNA, 21 nt, synthetic construct
  source 1..21: mol_type = other RNA
aaaatggtcaacatgaaaaga

SEQ ID NO: 61827 - RNA, 21 nt, synthetic construct
  source 1..21: mol_type = other RNA
aaaatggtttaggctgtctcc

SEQ ID NO: 61828 - RNA, 21 nt, synthetic construct
  source 1..21: mol_type = other RNA
aaaatggttttatggtaactc

SEQ ID NO: 61829 - RNA, 21 nt, synthetic construct
  source 1..21: mol_type = other RNA
aaaatgtaaattctgccacat

SEQ ID NO: 61830 - RNA, 21 nt, synthetic construct
  source 1..21: mol_type = other RNA
aaaatgtcaattttcccccaa

SEQ ID NO: 61831 - RNA, 21 nt, synthetic construct
  source 1..21: mol_type = other RNA
aaaatgtccgttgaagtcttt

SEQ ID NO: 61832 - RNA, 21 nt, synthetic construct
  source 1..21: mol_type = other RNA
aaaatgtgacattagtggtgg

SEQ ID NO: 61833 - RNA, 21 nt, synthetic construct
  source 1..21: mol_type = other RNA
aaaatgtgatggcatcattca

SEQ ID NO: 61834 - RNA, 21 nt, synthetic construct
  source 1..21: mol_type = other RNA
aaaatgtggatgcatgaggca

SEQ ID NO: 61835 - RNA, 21 nt, synthetic construct
  source 1..21: mol_type = other RNA
aaaatgtggcaaatttatgtg

SEQ ID NO: 61836 - RNA, 21 nt, synthetic construct
  source 1..21: mol_type = other RNA
aaaatgtggcatatcacatta

SEQ ID NO: 61837 - RNA, 21 nt, synthetic construct
  source 1..21: mol_type = other RNA
aaaatgtggcatttcttacac

SEQ ID NO: 61838 - RNA, 21 nt, synthetic construct
  source 1..21: mol_type = other RNA
aaaatgtgtctagtgaatgag

SEQ ID NO: 61839 - RNA, 21 nt, synthetic construct
  source 1..21: mol_type = other RNA
aaaatgttccctcttcaatat

SEQ ID NO: 61840 - RNA, 21 nt, synthetic construct
  source 1..21: mol_type = other RNA
aaaatgttgccaatatctatc

SEQ ID NO: 61841 - RNA, 21 nt, synthetic construct
  source 1..21: mol_type = other RNA
aaaatgtttaattacccaggc

SEQ ID NO: 61842 - RNA, 21 nt, synthetic construct
  source 1..21: mol_type = other RNA
aaaatgtttagcggaatgact

SEQ ID NO: 61843 - RNA, 21 nt, synthetic construct
  source 1..21: mol_type = other RNA
aaaatgttttaaggcagggct

SEQ ID NO: 61844 - RNA, 21 nt, synthetic construct
  source 1..21: mol_type = other RNA
aaaattaatgccccatgtgtt

SEQ ID NO: 61845 - RNA, 21 nt, synthetic construct
  source 1..21: mol_type = other RNA
aaaattacaactggtttctgc

SEQ ID NO: 61846 - RNA, 21 nt, synthetic construct
  source 1..21: mol_type = other RNA
aaaattacaggtcaaactcac

SEQ ID NO: 61847 - RNA, 21 nt, synthetic construct
  source 1..21: mol_type = other RNA
aaaattaccccattcactcag

SEQ ID NO: 61848 - RNA, 21 nt, synthetic construct
  source 1..21: mol_type = other RNA
aaaattagccttttacaccct

SEQ ID NO: 61849 - RNA, 21 nt, synthetic construct
  source 1..21: mol_type = other RNA
aaaattagctggatgtggtgt

SEQ ID NO: 61850 - RNA, 21 nt, synthetic construct
  source 1..21: mol_type = other RNA
aaaattagctgggcgagatgg

SEQ ID NO: 61851 - RNA, 21 nt, synthetic construct
  source 1..21: mol_type = other RNA
aaaattcaaacatgacagatc

SEQ ID NO: 61852 - RNA, 21 nt, synthetic construct
  source 1..21: mol_type = other RNA
aaaattcaccaaacaccttac

SEQ ID NO: 61853 - RNA, 21 nt, synthetic construct
  source 1..21: mol_type = other RNA
aaaattcactcctcattcaca

SEQ ID NO: 61854 - RNA, 21 nt, synthetic construct
  source 1..21: mol_type = other RNA
aaaattccctcagcaaaagca

SEQ ID NO: 61855 - RNA, 21 nt, synthetic construct
  source 1..21: mol_type = other RNA
aaaattcccttcagtgtagtc

SEQ ID NO: 61856 - RNA, 21 nt, synthetic construct
  source 1..21: mol_type = other RNA
aaaattccgctctggttttaa

SEQ ID NO: 61857 - RNA, 21 nt, synthetic construct
  source 1..21: mol_type = other RNA
aaaattccttcccctttcttt

SEQ ID NO: 61858 - RNA, 21 nt, synthetic construct
  source 1..21: mol_type = other RNA
aaaattccttcctttgatgac

SEQ ID NO: 61859 - RNA, 21 nt, synthetic construct
  source 1..21: mol_type = other RNA
aaaattctaacaagaagctgt

SEQ ID NO: 61860 - RNA, 21 nt, synthetic construct
  source 1..21: mol_type = other RNA
aaaattctgaccctttattca

SEQ ID NO: 61861 - RNA, 21 nt, synthetic construct
  source 1..21: mol_type = other RNA
aaaattctgatagcttgacaa

SEQ ID NO: 61862 - RNA, 21 nt, synthetic construct
  source 1..21: mol_type = other RNA
aaaattctgttctcagtatcc

SEQ ID NO: 61863 - RNA, 21 nt, synthetic construct
  source 1..21: mol_type = other RNA
aaaattcttccagcctggtaa

SEQ ID NO: 61864 - RNA, 21 nt, synthetic construct
  source 1..21: mol_type = other RNA
aaaattgcagagtgttcaaaa

SEQ ID NO: 61865 - RNA, 21 nt, synthetic construct
  source 1..21: mol_type = other RNA
aaaattgcaggtttactccaa

SEQ ID NO: 61866 - RNA, 21 nt, synthetic construct
  source 1..21: mol_type = other RNA
aaaattggataacctagaaga

SEQ ID NO: 61867 - RNA, 21 nt, synthetic construct
  source 1..21: mol_type = other RNA
aaaattggcgtacatgtagat

SEQ ID NO: 61868 - RNA, 21 nt, synthetic construct
  source 1..21: mol_type = other RNA
aaaattgttcatgaaatcccc

SEQ ID NO: 61869 - RNA, 21 nt, synthetic construct
  source 1..21: mol_type = other RNA
aaaatttgacatgacaggtga

SEQ ID NO: 61870 - RNA, 21 nt, synthetic construct
  source 1..21: mol_type = other RNA
aaaattttcattctacctgga

SEQ ID NO: 61871 - RNA, 21 nt, synthetic construct
  source 1..21: mol_type = other RNA
aaaattttctcccaaggttgc

SEQ ID NO: 61872 - RNA, 21 nt, synthetic construct
  source 1..21: mol_type = other RNA
aaaattttctgagcaactact

SEQ ID NO: 61873 - RNA, 21 nt, synthetic construct
  source 1..21: mol_type = other RNA
aaaatttttgtctggaacaca

SEQ ID NO: 61874 - RNA, 21 nt, synthetic construct
  source 1..21: mol_type = other RNA
aaacaaaaaaccactggatac

SEQ ID NO: 61875 - RNA, 21 nt, synthetic construct
  source 1..21: mol_type = other RNA
aaacaaaacaaaaccctgttg

SEQ ID NO: 61876 - RNA, 21 nt, synthetic construct
  source 1..21: mol_type = other RNA
aaacaaaacaaagtctttggg

SEQ ID NO: 61877 - RNA, 21 nt, synthetic construct
  source 1..21: mol_type = other RNA
aaacaaaacacatggcatcgg

SEQ ID NO: 61878 - RNA, 21 nt, synthetic construct
  source 1..21: mol_type = other RNA
aaacaaaaccctgttgggcta

SEQ ID NO: 61879 - RNA, 21 nt, synthetic construct
  source 1..21: mol_type = other RNA
aaacaaaagagtagattcccc

SEQ ID NO: 61880 - RNA, 21 nt, synthetic construct
  source 1..21: mol_type = other RNA
aaacaaacaaacagaaaggcc

SEQ ID NO: 61881 - RNA, 21 nt, synthetic construct
  source 1..21: mol_type = other RNA
aaacaaacacactgggtaaac

SEQ ID NO: 61882 - RNA, 21 nt, synthetic construct
  source 1..21: mol_type = other RNA
aaacaaacagaaaggcccaaa

SEQ ID NO: 61883 - RNA, 21 nt, synthetic construct
  source 1..21: mol_type = other RNA
aaacaaacattttttgcagag

SEQ ID NO: 61884 - RNA, 21 nt, synthetic construct
  source 1..21: mol_type = other RNA
aaacaaagagaacaatggaat

SEQ ID NO: 61885 - RNA, 21 nt, synthetic construct
  source 1..21: mol_type = other RNA
aaacaaagtctttgggtaatt

SEQ ID NO: 61886 - RNA, 21 nt, synthetic construct
  source 1..21: mol_type = other RNA
aaacaaatcagatttcaggtg

SEQ ID NO: 61887 - RNA, 21 nt, synthetic construct
  source 1..21: mol_type = other RNA
aaacaaatccttttcccagga

SEQ ID NO: 61888 - RNA, 21 nt, synthetic construct
  source 1..21: mol_type = other RNA
aaacaaatggaaccactgtag

SEQ ID NO: 61889 - RNA, 21 nt, synthetic construct
  source 1..21: mol_type = other RNA
aaacaaattcatgcaactgaa

SEQ ID NO: 61890 - RNA, 21 nt, synthetic construct
  source 1..21: mol_type = other RNA
aaacaaattccctctacaaaa

SEQ ID NO: 61891 - RNA, 21 nt, synthetic construct
  source 1..21: mol_type = other RNA
aaacaaattgcatcaactgct

SEQ ID NO: 61892 - RNA, 21 nt, synthetic construct
  source 1..21: mol_type = other RNA
aaacaacaacaacaaaatacc

SEQ ID NO: 61893 - RNA, 21 nt, synthetic construct
  source 1..21: mol_type = other RNA
aaacaacaacaacaacaaaac

SEQ ID NO: 61894 - RNA, 21 nt, synthetic construct
  source 1..21: mol_type = other RNA
aaacaacactaaccaacattg

SEQ ID NO: 61895 - RNA, 21 nt, synthetic construct
  source 1..21: mol_type = other RNA
aaacaacctaaatgtccatcg

SEQ ID NO: 61896 - RNA, 21 nt, synthetic construct
  source 1..21: mol_type = other RNA
aaacaactcaaacgtccatca

SEQ ID NO: 61897 - RNA, 21 nt, synthetic construct
  source 1..21: mol_type = other RNA
aaacaactgactctaaagtct

SEQ ID NO: 61898 - RNA, 21 nt, synthetic construct
  source 1..21: mol_type = other RNA
aaacaagaagaaaaagcaact

SEQ ID NO: 61899 - RNA, 21 nt, synthetic construct
  source 1..21: mol_type = other RNA
aaacaagactcaacatgtgta

SEQ ID NO: 61900 - RNA, 21 nt, synthetic construct
  source 1..21: mol_type = other RNA
aaacaagtcacaaaaagacaa

SEQ ID NO: 61901 - RNA, 21 nt, synthetic construct
  source 1..21: mol_type = other RNA
aaacaataagacaccgctcca

SEQ ID NO: 61902 - RNA, 21 nt, synthetic construct
  source 1..21: mol_type = other RNA
aaacaatactttagacatggg

SEQ ID NO: 61903 - RNA, 21 nt, synthetic construct
  source 1..21: mol_type = other RNA
aaacaatagcccagcaggatt

SEQ ID NO: 61904 - RNA, 21 nt, synthetic construct
  source 1..21: mol_type = other RNA
aaacaatcgcaatccaaaatc

SEQ ID NO: 61905 - RNA, 21 nt, synthetic construct
  source 1..21: mol_type = other RNA
aaacaatctacagattcaatg

SEQ ID NO: 61906 - RNA, 21 nt, synthetic construct
  source 1..21: mol_type = other RNA
aaacaatcttgaaaggggcca

SEQ ID NO: 61907 - RNA, 21 nt, synthetic construct
  source 1..21: mol_type = other RNA
aaacaatgctgctatgaaaat

SEQ ID NO: 61908 - RNA, 21 nt, synthetic construct
  source 1..21: mol_type = other RNA
aaacaattacttgagagcaga

SEQ ID NO: 61909 - RNA, 21 nt, synthetic construct
  source 1..21: mol_type = other RNA
aaacacaaaacaaatggaacc

SEQ ID NO: 61910 - RNA, 21 nt, synthetic construct
  source 1..21: mol_type = other RNA
aaacacaaactgcagaatgac

SEQ ID NO: 61911 - RNA, 21 nt, synthetic construct
  source 1..21: mol_type = other RNA
aaacacaacataccaaaaccc

SEQ ID NO: 61912 - RNA, 21 nt, synthetic construct
  source 1..21: mol_type = other RNA
aaacacaaggacaggtcacat

SEQ ID NO: 61913 - RNA, 21 nt, synthetic construct
  source 1..21: mol_type = other RNA
aaacacacaaaccaacaacaa

SEQ ID NO: 61914 - RNA, 21 nt, synthetic construct
  source 1..21: mol_type = other RNA
aaacacacccttggtaaacag

SEQ ID NO: 61915 - RNA, 21 nt, synthetic construct
  source 1..21: mol_type = other RNA
aaacacacgggctgggcgcga

SEQ ID NO: 61916 - RNA, 21 nt, synthetic construct
  source 1..21: mol_type = other RNA
aaacacacgggtacacatcct

SEQ ID NO: 61917 - RNA, 21 nt, synthetic construct
  source 1..21: mol_type = other RNA
aaacacactcgtgtatgattt

SEQ ID NO: 61918 - RNA, 21 nt, synthetic construct
  source 1..21: mol_type = other RNA
aaacacactgggtaaacaaga

SEQ ID NO: 61919 - RNA, 21 nt, synthetic construct
  source 1..21: mol_type = other RNA
aaacacagaacactaaagggg

SEQ ID NO: 61920 - RNA, 21 nt, synthetic construct
  source 1..21: mol_type = other RNA
aaacacaggactgtgtgtgtc

SEQ ID NO: 61921 - RNA, 21 nt, synthetic construct
  source 1..21: mol_type = other RNA
aaacacagggactgatgaaga

SEQ ID NO: 61922 - RNA, 21 nt, synthetic construct
  source 1..21: mol_type = other RNA
aaacacatggcatcggggcct

SEQ ID NO: 61923 - RNA, 21 nt, synthetic construct
  source 1..21: mol_type = other RNA
aaacacatgtcatgggccggg

SEQ ID NO: 61924 - RNA, 21 nt, synthetic construct
  source 1..21: mol_type = other RNA
aaacaccaaaaaagcaccagt

SEQ ID NO: 61925 - RNA, 21 nt, synthetic construct
  source 1..21: mol_type = other RNA
aaacaccaacacaaagccttc

SEQ ID NO: 61926 - RNA, 21 nt, synthetic construct
  source 1..21: mol_type = other RNA
aaacacccttgaaaatttcca

SEQ ID NO: 61927 - RNA, 21 nt, synthetic construct
  source 1..21: mol_type = other RNA
aaacacctaaagatatgtgta

SEQ ID NO: 61928 - RNA, 21 nt, synthetic construct
  source 1..21: mol_type = other RNA
aaacacctcagttaaacccaa

SEQ ID NO: 61929 - RNA, 21 nt, synthetic construct
  source 1..21: mol_type = other RNA
aaacaccttacactcaaaagc

SEQ ID NO: 61930 - RNA, 21 nt, synthetic construct
  source 1..21: mol_type = other RNA
aaacactcataccaggttttg

SEQ ID NO: 61931 - RNA, 21 nt, synthetic construct
  source 1..21: mol_type = other RNA
aaacactccagaatgaccgag

SEQ ID NO: 61932 - RNA, 21 nt, synthetic construct
  source 1..21: mol_type = other RNA
aaacactgctcagaagctttc

SEQ ID NO: 61933 - RNA, 21 nt, synthetic construct
  source 1..21: mol_type = other RNA
aaacactggaaatcacaggtt

SEQ ID NO: 61934 - RNA, 21 nt, synthetic construct
  source 1..21: mol_type = other RNA
aaacactggaagtaattggga

SEQ ID NO: 61935 - RNA, 21 nt, synthetic construct
  source 1..21: mol_type = other RNA
aaacactggcaaaaatcatca

SEQ ID NO: 61936 - RNA, 21 nt, synthetic construct
  source 1..21: mol_type = other RNA
aaacactgtagttcagttttt

SEQ ID NO: 61937 - RNA, 21 nt, synthetic construct
  source 1..21: mol_type = other RNA
aaacactgttctgcgtggttt

SEQ ID NO: 61938 - RNA, 21 nt, synthetic construct
  source 1..21: mol_type = other RNA
aaacacttagcatgttgcttt

SEQ ID NO: 61939 - RNA, 21 nt, synthetic construct
  source 1..21: mol_type = other RNA
aaacacttctgtgatcagaag

SEQ ID NO: 61940 - RNA, 21 nt, synthetic construct
  source 1..21: mol_type = other RNA
aaacacttgtgtaactaccac

SEQ ID NO: 61941 - RNA, 21 nt, synthetic construct
  source 1..21: mol_type = other RNA
aaacagaaaccctgtacccat

SEQ ID NO: 61942 - RNA, 21 nt, synthetic construct
  source 1..21: mol_type = other RNA
aaacagaaaggcccaaaaagt

SEQ ID NO: 61943 - RNA, 21 nt, synthetic construct
  source 1..21: mol_type = other RNA
aaacagaaatgaaatggccct

SEQ ID NO: 61944 - RNA, 21 nt, synthetic construct
  source 1..21: mol_type = other RNA
aaacagaagacacaaaatcag

SEQ ID NO: 61945 - RNA, 21 nt, synthetic construct
  source 1..21: mol_type = other RNA
aaacagacccttatgtccagc

SEQ ID NO: 61946 - RNA, 21 nt, synthetic construct
  source 1..21: mol_type = other RNA
aaacagactgagccagcaaat

SEQ ID NO: 61947 - RNA, 21 nt, synthetic construct
  source 1..21: mol_type = other RNA
aaacagagttttccaataagt

SEQ ID NO: 61948 - RNA, 21 nt, synthetic construct
  source 1..21: mol_type = other RNA
aaacagatcttggccgaatgt

SEQ ID NO: 61949 - RNA, 21 nt, synthetic construct
  source 1..21: mol_type = other RNA
aaacagcagtcttaaccattg

SEQ ID NO: 61950 - RNA, 21 nt, synthetic construct
  source 1..21: mol_type = other RNA
aaacagcatactgtggatatc

SEQ ID NO: 61951 - RNA, 21 nt, synthetic construct
  source 1..21: mol_type = other RNA
aaacagcatatacatgacatg

SEQ ID NO: 61952 - RNA, 21 nt, synthetic construct
  source 1..21: mol_type = other RNA
aaacagcctaattgtacacct

SEQ ID NO: 61953 - RNA, 21 nt, synthetic construct
  source 1..21: mol_type = other RNA
aaacagcgccacttaaaaaat

SEQ ID NO: 61954 - RNA, 21 nt, synthetic construct
  source 1..21: mol_type = other RNA
aaacagctaggtgagtgagat

SEQ ID NO: 61955 - RNA, 21 nt, synthetic construct
  source 1..21: mol_type = other RNA
aaacagcttcttgttagaatt

SEQ ID NO: 61956 - RNA, 21 nt, synthetic construct
  source 1..21: mol_type = other RNA
aaacagcttgacattcttacc

SEQ ID NO: 61957 - RNA, 21 nt, synthetic construct
  source 1..21: mol_type = other RNA
aaacaggaagttgagaaagag

SEQ ID NO: 61958 - RNA, 21 nt, synthetic construct
  source 1..21: mol_type = other RNA
aaacaggatacaaaaagcacc

SEQ ID NO: 61959 - RNA, 21 nt, synthetic construct
  source 1..21: mol_type = other RNA
aaacaggattacaatgtaagg

SEQ ID NO: 61960 - RNA, 21 nt, synthetic construct
  source 1..21: mol_type = other RNA
aaacagggttacagtataggg

SEQ ID NO: 61961 - RNA, 21 nt, synthetic construct
  source 1..21: mol_type = other RNA
aaacagggttattaacatacc

SEQ ID NO: 61962 - RNA, 21 nt, synthetic construct
  source 1..21: mol_type = other RNA
aaacaggtgtaagagattaat

SEQ ID NO: 61963 - RNA, 21 nt, synthetic construct
  source 1..21: mol_type = other RNA
aaacagtacagtagtaaaacc

SEQ ID NO: 61964 - RNA, 21 nt, synthetic construct
  source 1..21: mol_type = other RNA
aaacagtgaccacagtttgaa

SEQ ID NO: 61965 - RNA, 21 nt, synthetic construct
  source 1..21: mol_type = other RNA
aaacagttgctattcaacagg

SEQ ID NO: 61966 - RNA, 21 nt, synthetic construct
  source 1..21: mol_type = other RNA
aaacagtttccctctgagaga

SEQ ID NO: 61967 - RNA, 21 nt, synthetic construct
  source 1..21: mol_type = other RNA
aaacagtttggcaatttctca

SEQ ID NO: 61968 - RNA, 21 nt, synthetic construct
  source 1..21: mol_type = other RNA
aaacataccccaaccctacct

SEQ ID NO: 61969 - RNA, 21 nt, synthetic construct
  source 1..21: mol_type = other RNA
aaacatatccttctacatccc

SEQ ID NO: 61970 - RNA, 21 nt, synthetic construct
  source 1..21: mol_type = other RNA
aaacatatgcaggaccaactt

SEQ ID NO: 61971 - RNA, 21 nt, synthetic construct
  source 1..21: mol_type = other RNA
aaacatatgcatgttatttgg

SEQ ID NO: 61972 - RNA, 21 nt, synthetic construct
  source 1..21: mol_type = other RNA
aaacatatgtcagatggtaaa

SEQ ID NO: 61973 - RNA, 21 nt, synthetic construct
  source 1..21: mol_type = other RNA
aaacatcaaagtcccctgtaa

SEQ ID NO: 61974 - RNA, 21 nt, synthetic construct
  source 1..21: mol_type = other RNA
aaacatcatctaatttcccat

SEQ ID NO: 61975 - RNA, 21 nt, synthetic construct
  source 1..21: mol_type = other RNA
aaacatccattactcgtggtt

SEQ ID NO: 61976 - RNA, 21 nt, synthetic construct
  source 1..21: mol_type = other RNA
aaacatcccaagtgcccatta

SEQ ID NO: 61977 - RNA, 21 nt, synthetic construct
  source 1..21: mol_type = other RNA
aaacatctggaaggaaacact

SEQ ID NO: 61978 - RNA, 21 nt, synthetic construct
  source 1..21: mol_type = other RNA
aaacatgaacaagttacaaac

SEQ ID NO: 61979 - RNA, 21 nt, synthetic construct
  source 1..21: mol_type = other RNA
aaacatgaataaccaatgtca

SEQ ID NO: 61980 - RNA, 21 nt, synthetic construct
  source 1..21: mol_type = other RNA
aaacatgacagatcccaaaaa

SEQ ID NO: 61981 - RNA, 21 nt, synthetic construct
  source 1..21: mol_type = other RNA
aaacatggatatttggccggg

SEQ ID NO: 61982 - RNA, 21 nt, synthetic construct
  source 1..21: mol_type = other RNA
aaacatggccagtatctcctt

SEQ ID NO: 61983 - RNA, 21 nt, synthetic construct
  source 1..21: mol_type = other RNA
aaacatggcttagaaatgaag

SEQ ID NO: 61984 - RNA, 21 nt, synthetic construct
  source 1..21: mol_type = other RNA
aaacatggtaatttgtccatc

SEQ ID NO: 61985 - RNA, 21 nt, synthetic construct
  source 1..21: mol_type = other RNA
aaacatggtccacagaggctt

SEQ ID NO: 61986 - RNA, 21 nt, synthetic construct
  source 1..21: mol_type = other RNA
aaacatgtaaaacagaccctt

SEQ ID NO: 61987 - RNA, 21 nt, synthetic construct
  source 1..21: mol_type = other RNA
aaacatgtgaggatttatttc

SEQ ID NO: 61988 - RNA, 21 nt, synthetic construct
  source 1..21: mol_type = other RNA
aaacatgttgtgtagaaatgt

SEQ ID NO: 61989 - RNA, 21 nt, synthetic construct
  source 1..21: mol_type = other RNA
aaacattctacagtattacac

SEQ ID NO: 61990 - RNA, 21 nt, synthetic construct
  source 1..21: mol_type = other RNA
aaacattgaaggcagaattat

SEQ ID NO: 61991 - RNA, 21 nt, synthetic construct
  source 1..21: mol_type = other RNA
aaacattggaggataatatct

SEQ ID NO: 61992 - RNA, 21 nt, synthetic construct
  source 1..21: mol_type = other RNA
aaacatttatggaattgccat

SEQ ID NO: 61993 - RNA, 21 nt, synthetic construct
  source 1..21: mol_type = other RNA
aaacattttattaggtgcaca

SEQ ID NO: 61994 - RNA, 21 nt, synthetic construct
  source 1..21: mol_type = other RNA
aaacattttccctccttttta

SEQ ID NO: 61995 - RNA, 21 nt, synthetic construct
  source 1..21: mol_type = other RNA
aaacattttttgcagagacgg

SEQ ID NO: 61996 - RNA, 21 nt, synthetic construct
  source 1..21: mol_type = other RNA
aaaccaaaaaatgtggcatat

SEQ ID NO: 61997 - RNA, 21 nt, synthetic construct
  source 1..21: mol_type = other RNA
aaaccaaacactggaaatcac

SEQ ID NO: 61998 - RNA, 21 nt, synthetic construct
  source 1..21: mol_type = other RNA
aaaccaaagaaaggggaagga

SEQ ID NO: 61999 - RNA, 21 nt, synthetic construct
  source 1..21: mol_type = other RNA
aaaccaaatgtggatagtgct

SEQ ID NO: 62000 - RNA, 21 nt, synthetic construct
  source 1..21: mol_type = other RNA
aaaccaagagcatagacttta

SEQ ID NO: 62001 - RNA, 21 nt, synthetic construct
  source 1..21: mol_type = other RNA
aaaccaagcaagtaaaagaag

SEQ ID NO: 62002 - RNA, 21 nt, synthetic construct
  source 1..21: mol_type = other RNA
aaaccaagtttggttcatttc

SEQ ID NO: 62003 - RNA, 21 nt, synthetic construct
  source 1..21: mol_type = other RNA
aaaccaatgttctcttttcct

SEQ ID NO: 62004 - RNA, 21 nt, synthetic construct
  source 1..21: mol_type = other RNA
aaaccacaaacatgaataacc

SEQ ID NO: 62005 - RNA, 21 nt, synthetic construct
  source 1..21: mol_type = other RNA
aaaccacacagagaacagcat

SEQ ID NO: 62006 - RNA, 21 nt, synthetic construct
  source 1..21: mol_type = other RNA
aaaccacagagcctaaaatag

SEQ ID NO: 62007 - RNA, 21 nt, synthetic construct
  source 1..21: mol_type = other RNA
aaaccacatttcatagcagaa

SEQ ID NO: 62008 - RNA, 21 nt, synthetic construct
  source 1..21: mol_type = other RNA
aaaccacctaactactaataa

SEQ ID NO: 62009 - RNA, 21 nt, synthetic construct
  source 1..21: mol_type = other RNA
aaaccacgcagaacagtgttt

SEQ ID NO: 62010 - RNA, 21 nt, synthetic construct
  source 1..21: mol_type = other RNA
aaaccacgcagtttgttctgc

SEQ ID NO: 62011 - RNA, 21 nt, synthetic construct
  source 1..21: mol_type = other RNA
aaaccactggatacggaaata

SEQ ID NO: 62012 - RNA, 21 nt, synthetic construct
  source 1..21: mol_type = other RNA
aaaccagaaaagtgaaacaat

SEQ ID NO: 62013 - RNA, 21 nt, synthetic construct
  source 1..21: mol_type = other RNA
aaaccagacatttctcatact

SEQ ID NO: 62014 - RNA, 21 nt, synthetic construct
  source 1..21: mol_type = other RNA
aaaccagagcggaatttttat

SEQ ID NO: 62015 - RNA, 21 nt, synthetic construct
  source 1..21: mol_type = other RNA
aaaccaggaggtttgcactgg

SEQ ID NO: 62016 - RNA, 21 nt, synthetic construct
  source 1..21: mol_type = other RNA
aaaccagtgctctcccccgaa

SEQ ID NO: 62017 - RNA, 21 nt, synthetic construct
  source 1..21: mol_type = other RNA
aaaccagtgggtcagctagtg

SEQ ID NO: 62018 - RNA, 21 nt, synthetic construct
  source 1..21: mol_type = other RNA
aaaccatatacaaaactgaac

SEQ ID NO: 62019 - RNA, 21 nt, synthetic construct
  source 1..21: mol_type = other RNA
aaaccatatggttaatagtga

SEQ ID NO: 62020 - RNA, 21 nt, synthetic construct
  source 1..21: mol_type = other RNA
aaaccatcaagtgtgatccca

SEQ ID NO: 62021 - RNA, 21 nt, synthetic construct
  source 1..21: mol_type = other RNA
aaaccatcctttccttgtcct

SEQ ID NO: 62022 - RNA, 21 nt, synthetic construct
  source 1..21: mol_type = other RNA
aaaccatcgttcacactcgca

SEQ ID NO: 62023 - RNA, 21 nt, synthetic construct
  source 1..21: mol_type = other RNA
aaaccatgtcatgtatatgct

SEQ ID NO: 62024 - RNA, 21 nt, synthetic construct
  source 1..21: mol_type = other RNA
aaaccatgttcatgggaagat

SEQ ID NO: 62025 - RNA, 21 nt, synthetic construct
  source 1..21: mol_type = other RNA
aaaccatttaccccttaaatt

SEQ ID NO: 62026 - RNA, 21 nt, synthetic construct
  source 1..21: mol_type = other RNA
aaaccattttcaatcttggaa

SEQ ID NO: 62027 - RNA, 21 nt, synthetic construct
  source 1..21: mol_type = other RNA
aaacccaaattaaaggatgtc

SEQ ID NO: 62028 - RNA, 21 nt, synthetic construct
  source 1..21: mol_type = other RNA
aaacccaacaaacaattagca

SEQ ID NO: 62029 - RNA, 21 nt, synthetic construct
  source 1..21: mol_type = other RNA
aaacccaactctttctttgat

SEQ ID NO: 62030 - RNA, 21 nt, synthetic construct
  source 1..21: mol_type = other RNA
aaacccagacctgcacaaagg

SEQ ID NO: 62031 - RNA, 21 nt, synthetic construct
  source 1..21: mol_type = other RNA
aaacccatgatctttggaaat

SEQ ID NO: 62032 - RNA, 21 nt, synthetic construct
  source 1..21: mol_type = other RNA
aaacccatttcatgccatcct

SEQ ID NO: 62033 - RNA, 21 nt, synthetic construct
  source 1..21: mol_type = other RNA
aaaccccagggatattttcgt

SEQ ID NO: 62034 - RNA, 21 nt, synthetic construct
  source 1..21: mol_type = other RNA
aaaccccgcatactgtgcagt

SEQ ID NO: 62035 - RNA, 21 nt, synthetic construct
  source 1..21: mol_type = other RNA
aaacccgctctgggtgcgttg

SEQ ID NO: 62036 - RNA, 21 nt, synthetic construct
  source 1..21: mol_type = other RNA
aaaccctacacccatccaccc

SEQ ID NO: 62037 - RNA, 21 nt, synthetic construct
  source 1..21: mol_type = other RNA
aaaccctcacgaaagcggtca

SEQ ID NO: 62038 - RNA, 21 nt, synthetic construct
  source 1..21: mol_type = other RNA
aaaccctgtacccattagaca

SEQ ID NO: 62039 - RNA, 21 nt, synthetic construct
  source 1..21: mol_type = other RNA
aaaccctgttgggctattaag

SEQ ID NO: 62040 - RNA, 21 nt, synthetic construct
  source 1..21: mol_type = other RNA
aaacccttcatcatttgtatt

SEQ ID NO: 62041 - RNA, 21 nt, synthetic construct
  source 1..21: mol_type = other RNA
aaacccttggctagactaaga

SEQ ID NO: 62042 - RNA, 21 nt, synthetic construct
  source 1..21: mol_type = other RNA
aaacccttgggatgcagcaaa

SEQ ID NO: 62043 - RNA, 21 nt, synthetic construct
  source 1..21: mol_type = other RNA
aaaccgacagcagataagatc

SEQ ID NO: 62044 - RNA, 21 nt, synthetic construct
  source 1..21: mol_type = other RNA
aaacctaaacctgtgatttcc

SEQ ID NO: 62045 - RNA, 21 nt, synthetic construct
  source 1..21: mol_type = other RNA
aaacctaagaaaggtctagtg

SEQ ID NO: 62046 - RNA, 21 nt, synthetic construct
  source 1..21: mol_type = other RNA
aaacctcaagtcttttcctag

SEQ ID NO: 62047 - RNA, 21 nt, synthetic construct
  source 1..21: mol_type = other RNA
aaacctcccaacaggctgagt

SEQ ID NO: 62048 - RNA, 21 nt, synthetic construct
  source 1..21: mol_type = other RNA
aaacctcctggttttgatcat

SEQ ID NO: 62049 - RNA, 21 nt, synthetic construct
  source 1..21: mol_type = other RNA
aaacctgaaatggcttaagga

SEQ ID NO: 62050 - RNA, 21 nt, synthetic construct
  source 1..21: mol_type = other RNA
aaacctgaggtctttaaaaga

SEQ ID NO: 62051 - RNA, 21 nt, synthetic construct
  source 1..21: mol_type = other RNA
aaacctgccatggtgttaaat

SEQ ID NO: 62052 - RNA, 21 nt, synthetic construct
  source 1..21: mol_type = other RNA
aaacctgctacgaatgaactc

SEQ ID NO: 62053 - RNA, 21 nt, synthetic construct
  source 1..21: mol_type = other RNA
aaacctggaatcctctaccaa

SEQ ID NO: 62054 - RNA, 21 nt, synthetic construct
  source 1..21: mol_type = other RNA
aaacctggaatgggttggagg

SEQ ID NO: 62055 - RNA, 21 nt, synthetic construct
  source 1..21: mol_type = other RNA
aaacctggcaatactctcaga

SEQ ID NO: 62056 - RNA, 21 nt, synthetic construct
  source 1..21: mol_type = other RNA
aaacctggtaataatgaaagc

SEQ ID NO: 62057 - RNA, 21 nt, synthetic construct
  source 1..21: mol_type = other RNA
aaacctggtatgagtgtttcc

SEQ ID NO: 62058 - RNA, 21 nt, synthetic construct
  source 1..21: mol_type = other RNA
aaacctgtgatttccagtgtt

SEQ ID NO: 62059 - RNA, 21 nt, synthetic construct
  source 1..21: mol_type = other RNA
aaacctgttacatggttctgt

SEQ ID NO: 62060 - RNA, 21 nt, synthetic construct
  source 1..21: mol_type = other RNA
aaaccttaaaagagtgaaatg

SEQ ID NO: 62061 - RNA, 21 nt, synthetic construct
  source 1..21: mol_type = other RNA
aaaccttcttatttccttcca

SEQ ID NO: 62062 - RNA, 21 nt, synthetic construct
  source 1..21: mol_type = other RNA
aaaccttggtgtgcttctgat

SEQ ID NO: 62063 - RNA, 21 nt, synthetic construct
  source 1..21: mol_type = other RNA
aaacctttaagttctccaagt

SEQ ID NO: 62064 - RNA, 21 nt, synthetic construct
  source 1..21: mol_type = other RNA
aaacctttctcaaagcccacc

SEQ ID NO: 62065 - RNA, 21 nt, synthetic construct
  source 1..21: mol_type = other RNA
aaaccttttgtagaccctgtt

SEQ ID NO: 62066 - RNA, 21 nt, synthetic construct
  source 1..21: mol_type = other RNA
aaacctttttgggatctgtca

SEQ ID NO: 62067 - RNA, 21 nt, synthetic construct
  source 1..21: mol_type = other RNA
aaacgaaccaattaccataaa

SEQ ID NO: 62068 - RNA, 21 nt, synthetic construct
  source 1..21: mol_type = other RNA
aaacgacaccagaactacaca

SEQ ID NO: 62069 - RNA, 21 nt, synthetic construct
  source 1..21: mol_type = other RNA
aaacgacagcaggaaaagcta

SEQ ID NO: 62070 - RNA, 21 nt, synthetic construct
  source 1..21: mol_type = other RNA
aaacgaccttgctcattcatc

SEQ ID NO: 62071 - RNA, 21 nt, synthetic construct
  source 1..21: mol_type = other RNA
aaacgaggaaaagagaacatt

SEQ ID NO: 62072 - RNA, 21 nt, synthetic construct
  source 1..21: mol_type = other RNA
aaacgatgcattccagattga

SEQ ID NO: 62073 - RNA, 21 nt, synthetic construct
  source 1..21: mol_type = other RNA
aaacgcattgtgatgtctcag

SEQ ID NO: 62074 - RNA, 21 nt, synthetic construct
  source 1..21: mol_type = other RNA
aaacgcggaatgaagcaggcc

SEQ ID NO: 62075 - RNA, 21 nt, synthetic construct
  source 1..21: mol_type = other RNA
aaacgcggcacttggtaagct

SEQ ID NO: 62076 - RNA, 21 nt, synthetic construct
  source 1..21: mol_type = other RNA
aaacggaaactttatacctgt

SEQ ID NO: 62077 - RNA, 21 nt, synthetic construct
  source 1..21: mol_type = other RNA
aaacgggttatacacacataa

SEQ ID NO: 62078 - RNA, 21 nt, synthetic construct
  source 1..21: mol_type = other RNA
aaacgtcagagcagcactgat

SEQ ID NO: 62079 - RNA, 21 nt, synthetic construct
  source 1..21: mol_type = other RNA
aaacgtccatcaacagcagaa

SEQ ID NO: 62080 - RNA, 21 nt, synthetic construct
  source 1..21: mol_type = other RNA
aaacgtgcaaactaccaagac

SEQ ID NO: 62081 - RNA, 21 nt, synthetic construct
  source 1..21: mol_type = other RNA
aaacgtgcacacccagttatc

SEQ ID NO: 62082 - RNA, 21 nt, synthetic construct
  source 1..21: mol_type = other RNA
aaacgtgctttccttattgag

SEQ ID NO: 62083 - RNA, 21 nt, synthetic construct
  source 1..21: mol_type = other RNA
aaacgtgtgtgtaagcacaca

SEQ ID NO: 62084 - RNA, 21 nt, synthetic construct
  source 1..21: mol_type = other RNA
aaacgtttggtgactgaattc

SEQ ID NO: 62085 - RNA, 21 nt, synthetic construct
  source 1..21: mol_type = other RNA
aaactaaatgtgagcatttag

SEQ ID NO: 62086 - RNA, 21 nt, synthetic construct
  source 1..21: mol_type = other RNA
aaactaacaaagaacaggaag

SEQ ID NO: 62087 - RNA, 21 nt, synthetic construct
  source 1..21: mol_type = other RNA
aaactaactagaaaaccgaca

SEQ ID NO: 62088 - RNA, 21 nt, synthetic construct
  source 1..21: mol_type = other RNA
aaactaaggtcaagagagatt

SEQ ID NO: 62089 - RNA, 21 nt, synthetic construct
  source 1..21: mol_type = other RNA
aaactaagtggtattctatca

SEQ ID NO: 62090 - RNA, 21 nt, synthetic construct
  source 1..21: mol_type = other RNA
aaactacaggcaacaaaagaa

SEQ ID NO: 62091 - RNA, 21 nt, synthetic construct
  source 1..21: mol_type = other RNA
aaactacctagaaaaacacca

SEQ ID NO: 62092 - RNA, 21 nt, synthetic construct
  source 1..21: mol_type = other RNA
aaactactgatagcgaaaggt

SEQ ID NO: 62093 - RNA, 21 nt, synthetic construct
  source 1..21: mol_type = other RNA
aaactacttcgtgtgtggagt

SEQ ID NO: 62094 - RNA, 21 nt, synthetic construct
  source 1..21: mol_type = other RNA
aaactagagatgggaaagtat

SEQ ID NO: 62095 - RNA, 21 nt, synthetic construct
  source 1..21: mol_type = other RNA
aaactagattaccttgaagtt

SEQ ID NO: 62096 - RNA, 21 nt, synthetic construct
  source 1..21: mol_type = other RNA
aaactaggctgtcccaaatgc

SEQ ID NO: 62097 - RNA, 21 nt, synthetic construct
  source 1..21: mol_type = other RNA
aaactagtatcaacctgcagg

SEQ ID NO: 62098 - RNA, 21 nt, synthetic construct
  source 1..21: mol_type = other RNA
aaactatacttcaatgctaca

SEQ ID NO: 62099 - RNA, 21 nt, synthetic construct
  source 1..21: mol_type = other RNA
aaactatagacccaaagcaaa

SEQ ID NO: 62100 - RNA, 21 nt, synthetic construct
  source 1..21: mol_type = other RNA
aaactatccaacatgccagct

SEQ ID NO: 62101 - RNA, 21 nt, synthetic construct
  source 1..21: mol_type = other RNA
aaactcaaacccaaattaaag

SEQ ID NO: 62102 - RNA, 21 nt, synthetic construct
  source 1..21: mol_type = other RNA
aaactcaacattcattcatga

SEQ ID NO: 62103 - RNA, 21 nt, synthetic construct
  source 1..21: mol_type = other RNA
aaactcaactgcctctacatc

SEQ ID NO: 62104 - RNA, 21 nt, synthetic construct
  source 1..21: mol_type = other RNA
aaactcaagttccggttctca

SEQ ID NO: 62105 - RNA, 21 nt, synthetic construct
  source 1..21: mol_type = other RNA
aaactcaatgttggttagtgt

SEQ ID NO: 62106 - RNA, 21 nt, synthetic construct
  source 1..21: mol_type = other RNA
aaactcacaaaaagtgtgacc

SEQ ID NO: 62107 - RNA, 21 nt, synthetic construct
  source 1..21: mol_type = other RNA
aaactcacttattagcaaaga

SEQ ID NO: 62108 - RNA, 21 nt, synthetic construct
  source 1..21: mol_type = other RNA
aaactcagatctgagagatag

SEQ ID NO: 62109 - RNA, 21 nt, synthetic construct
  source 1..21: mol_type = other RNA
aaactcattatcccagacaga

SEQ ID NO: 62110 - RNA, 21 nt, synthetic construct
  source 1..21: mol_type = other RNA
aaactccaaacctttaagttc

SEQ ID NO: 62111 - RNA, 21 nt, synthetic construct
  source 1..21: mol_type = other RNA
aaactccaagtctcatgcaat

SEQ ID NO: 62112 - RNA, 21 nt, synthetic construct
  source 1..21: mol_type = other RNA
aaactccaagtgtaaaaagac

SEQ ID NO: 62113 - RNA, 21 nt, synthetic construct
  source 1..21: mol_type = other RNA
aaactccccatgcaggagaaa

SEQ ID NO: 62114 - RNA, 21 nt, synthetic construct
  source 1..21: mol_type = other RNA
aaactcctgcactcaagcaat

SEQ ID NO: 62115 - RNA, 21 nt, synthetic construct
  source 1..21: mol_type = other RNA
aaactctggctcagaaacaac

SEQ ID NO: 62116 - RNA, 21 nt, synthetic construct
  source 1..21: mol_type = other RNA
aaactctgtttccttaccagt

SEQ ID NO: 62117 - RNA, 21 nt, synthetic construct
  source 1..21: mol_type = other RNA
aaactcttagcttagaagaag

SEQ ID NO: 62118 - RNA, 21 nt, synthetic construct
  source 1..21: mol_type = other RNA
aaactcttccttatccgataa

SEQ ID NO: 62119 - RNA, 21 nt, synthetic construct
  source 1..21: mol_type = other RNA
aaactgaacgaagtgaaaaaa

SEQ ID NO: 62120 - RNA, 21 nt, synthetic construct
  source 1..21: mol_type = other RNA
aaactgaactacagtgtttag

SEQ ID NO: 62121 - RNA, 21 nt, synthetic construct
  source 1..21: mol_type = other RNA
aaactgaactcaaaatggatc

SEQ ID NO: 62122 - RNA, 21 nt, synthetic construct
  source 1..21: mol_type = other RNA
aaactgaagtaataaagcaag

SEQ ID NO: 62123 - RNA, 21 nt, synthetic construct
  source 1..21: mol_type = other RNA
aaactgaagtttatcagtctc

SEQ ID NO: 62124 - RNA, 21 nt, synthetic construct
  source 1..21: mol_type = other RNA
aaactgaatcagacaacacat

SEQ ID NO: 62125 - RNA, 21 nt, synthetic construct
  source 1..21: mol_type = other RNA
aaactgacaggactccacaga

SEQ ID NO: 62126 - RNA, 21 nt, synthetic construct
  source 1..21: mol_type = other RNA
aaactgagaccggatgaggtg

SEQ ID NO: 62127 - RNA, 21 nt, synthetic construct
  source 1..21: mol_type = other RNA
aaactgagcatcccagaggta

SEQ ID NO: 62128 - RNA, 21 nt, synthetic construct
  source 1..21: mol_type = other RNA
aaactgcagaatgacagaaaa

SEQ ID NO: 62129 - RNA, 21 nt, synthetic construct
  source 1..21: mol_type = other RNA
aaactgcagcaattatttgaa

SEQ ID NO: 62130 - RNA, 21 nt, synthetic construct
  source 1..21: mol_type = other RNA
aaactgccaaaccctacaccc

SEQ ID NO: 62131 - RNA, 21 nt, synthetic construct
  source 1..21: mol_type = other RNA
aaactgcgtggtttattcata

SEQ ID NO: 62132 - RNA, 21 nt, synthetic construct
  source 1..21: mol_type = other RNA
aaactgctgagtcttctactg

SEQ ID NO: 62133 - RNA, 21 nt, synthetic construct
  source 1..21: mol_type = other RNA
aaactggaaggaaataagaag

SEQ ID NO: 62134 - RNA, 21 nt, synthetic construct
  source 1..21: mol_type = other RNA
aaactggaatcaatccagaca

SEQ ID NO: 62135 - RNA, 21 nt, synthetic construct
  source 1..21: mol_type = other RNA
aaactggaattcatcaaagtt

SEQ ID NO: 62136 - RNA, 21 nt, synthetic construct
  source 1..21: mol_type = other RNA
aaactggagtgcagtggtgca

SEQ ID NO: 62137 - RNA, 21 nt, synthetic construct
  source 1..21: mol_type = other RNA
aaactggatgaatacaaaggt

SEQ ID NO: 62138 - RNA, 21 nt, synthetic construct
  source 1..21: mol_type = other RNA
aaactggcaatcaaatggcct

SEQ ID NO: 62139 - RNA, 21 nt, synthetic construct
  source 1..21: mol_type = other RNA
aaactgggggctggacataag

SEQ ID NO: 62140 - RNA, 21 nt, synthetic construct
  source 1..21: mol_type = other RNA
aaactggtgaactgggtgtag

SEQ ID NO: 62141 - RNA, 21 nt, synthetic construct
  source 1..21: mol_type = other RNA
aaactggttttcctgatggac

SEQ ID NO: 62142 - RNA, 21 nt, synthetic construct
  source 1..21: mol_type = other RNA
aaactgtggtcactgtttgga

SEQ ID NO: 62143 - RNA, 21 nt, synthetic construct
  source 1..21: mol_type = other RNA
aaactgtgtgcttggagtcac

SEQ ID NO: 62144 - RNA, 21 nt, synthetic construct
  source 1..21: mol_type = other RNA
aaactgttccccaagccaaat

SEQ ID NO: 62145 - RNA, 21 nt, synthetic construct
  source 1..21: mol_type = other RNA
aaactgttggaaaaatcgtcc

SEQ ID NO: 62146 - RNA, 21 nt, synthetic construct
  source 1..21: mol_type = other RNA
aaactgtttggctgggagctt

SEQ ID NO: 62147 - RNA, 21 nt, synthetic construct
  source 1..21: mol_type = other RNA
aaactgttttccacagtgact

SEQ ID NO: 62148 - RNA, 21 nt, synthetic construct
  source 1..21: mol_type = other RNA
aaacttaagtatctcagtcat

SEQ ID NO: 62149 - RNA, 21 nt, synthetic construct
  source 1..21: mol_type = other RNA
aaacttaagtatctcggtcat

SEQ ID NO: 62150 - RNA, 21 nt, synthetic construct
  source 1..21: mol_type = other RNA
aaacttaggaggctattaact

SEQ ID NO: 62151 - RNA, 21 nt, synthetic construct
  source 1..21: mol_type = other RNA
aaacttatgcaagatggcaag

SEQ ID NO: 62152 - RNA, 21 nt, synthetic construct
  source 1..21: mol_type = other RNA
aaacttatttccagggggtat

SEQ ID NO: 62153 - RNA, 21 nt, synthetic construct
  source 1..21: mol_type = other RNA
aaacttcaaggtaatctagtt

SEQ ID NO: 62154 - RNA, 21 nt, synthetic construct
  source 1..21: mol_type = other RNA
aaacttcagttttgagtggca

SEQ ID NO: 62155 - RNA, 21 nt, synthetic construct
  source 1..21: mol_type = other RNA
aaacttccaaccatcttctta

SEQ ID NO: 62156 - RNA, 21 nt, synthetic construct
  source 1..21: mol_type = other RNA
aaacttccagaaacttccaac

SEQ ID NO: 62157 - RNA, 21 nt, synthetic construct
  source 1..21: mol_type = other RNA
aaacttccctctcagtggtgc

SEQ ID NO: 62158 - RNA, 21 nt, synthetic construct
  source 1..21: mol_type = other RNA
aaacttcccttagctctcatg

SEQ ID NO: 62159 - RNA, 21 nt, synthetic construct
  source 1..21: mol_type = other RNA
aaacttcgaactaaggaaagc

SEQ ID NO: 62160 - RNA, 21 nt, synthetic construct
  source 1..21: mol_type = other RNA
aaacttctctggagcaagcat

SEQ ID NO: 62161 - RNA, 21 nt, synthetic construct
  source 1..21: mol_type = other RNA
aaacttcttctgttggagaga

SEQ ID NO: 62162 - RNA, 21 nt, synthetic construct
  source 1..21: mol_type = other RNA
aaacttgaaccttcctcttcc

SEQ ID NO: 62163 - RNA, 21 nt, synthetic construct
  source 1..21: mol_type = other RNA
aaacttgaatactcgtgtgtc

SEQ ID NO: 62164 - RNA, 21 nt, synthetic construct
  source 1..21: mol_type = other RNA
aaacttgagcagatcagtaac

SEQ ID NO: 62165 - RNA, 21 nt, synthetic construct
  source 1..21: mol_type = other RNA
aaacttgccatcttgcataag

SEQ ID NO: 62166 - RNA, 21 nt, synthetic construct
  source 1..21: mol_type = other RNA
aaacttggattgtgtgtcgag

SEQ ID NO: 62167 - RNA, 21 nt, synthetic construct
  source 1..21: mol_type = other RNA
aaacttggtctgggtgatatc

SEQ ID NO: 62168 - RNA, 21 nt, synthetic construct
  source 1..21: mol_type = other RNA
aaacttggtttattttctgca

SEQ ID NO: 62169 - RNA, 21 nt, synthetic construct
  source 1..21: mol_type = other RNA
aaacttgtagaggaggagggt

SEQ ID NO: 62170 - RNA, 21 nt, synthetic construct
  source 1..21: mol_type = other RNA
aaactttaggtcagaatacaa

SEQ ID NO: 62171 - RNA, 21 nt, synthetic construct
  source 1..21: mol_type = other RNA
aaactttgagtagcaccctat

SEQ ID NO: 62172 - RNA, 21 nt, synthetic construct
  source 1..21: mol_type = other RNA
aaactttgcattcctgaaatg

SEQ ID NO: 62173 - RNA, 21 nt, synthetic construct
  source 1..21: mol_type = other RNA
aaactttttgggcctttctgt

SEQ ID NO: 62174 - RNA, 21 nt, synthetic construct
  source 1..21: mol_type = other RNA
aaagaaaaactgaactacagt

SEQ ID NO: 62175 - RNA, 21 nt, synthetic construct
  source 1..21: mol_type = other RNA
aaagaaaaagctcacctctgg

SEQ ID NO: 62176 - RNA, 21 nt, synthetic construct
  source 1..21: mol_type = other RNA
aaagaaaaaggttaagggaag

SEQ ID NO: 62177 - RNA, 21 nt, synthetic construct
  source 1..21: mol_type = other RNA
aaagaaaaagttgggcttggt

SEQ ID NO: 62178 - RNA, 21 nt, synthetic construct
  source 1..21: mol_type = other RNA
aaagaaaagtttcagtggtta

SEQ ID NO: 62179 - RNA, 21 nt, synthetic construct
  source 1..21: mol_type = other RNA
aaagaaaatccaaaagcctca

SEQ ID NO: 62180 - RNA, 21 nt, synthetic construct
  source 1..21: mol_type = other RNA
aaagaaaatggccaagagttg

SEQ ID NO: 62181 - RNA, 21 nt, synthetic construct
  source 1..21: mol_type = other RNA
aaagaaaattttctgagcaac

SEQ ID NO: 62182 - RNA, 21 nt, synthetic construct
  source 1..21: mol_type = other RNA
aaagaaactacctagaaaaac

SEQ ID NO: 62183 - RNA, 21 nt, synthetic construct
  source 1..21: mol_type = other RNA
aaagaaagaaggccatttgat

SEQ ID NO: 62184 - RNA, 21 nt, synthetic construct
  source 1..21: mol_type = other RNA
aaagaaagagttgggtttttg

SEQ ID NO: 62185 - RNA, 21 nt, synthetic construct
  source 1..21: mol_type = other RNA
aaagaaagctctcaattaatg

SEQ ID NO: 62186 - RNA, 21 nt, synthetic construct
  source 1..21: mol_type = other RNA
aaagaaagctgtggatgttgg

SEQ ID NO: 62187 - RNA, 21 nt, synthetic construct
  source 1..21: mol_type = other RNA
aaagaaaggggaaggaatttt

SEQ ID NO: 62188 - RNA, 21 nt, synthetic construct
  source 1..21: mol_type = other RNA
aaagaaaggtctctctctgtc

SEQ ID NO: 62189 - RNA, 21 nt, synthetic construct
  source 1..21: mol_type = other RNA
aaagaaatagaactgtcacaa

SEQ ID NO: 62190 - RNA, 21 nt, synthetic construct
  source 1..21: mol_type = other RNA
aaagaaatctgcatccaaaag

SEQ ID NO: 62191 - RNA, 21 nt, synthetic construct
  source 1..21: mol_type = other RNA
aaagaaattagaacatctggc

SEQ ID NO: 62192 - RNA, 21 nt, synthetic construct
  source 1..21: mol_type = other RNA
aaagaaattggacgggtggta

SEQ ID NO: 62193 - RNA, 21 nt, synthetic construct
  source 1..21: mol_type = other RNA
aaagaacaacatggtagacca

SEQ ID NO: 62194 - RNA, 21 nt, synthetic construct
  source 1..21: mol_type = other RNA
aaagaacacagtgttgagaaa

SEQ ID NO: 62195 - RNA, 21 nt, synthetic construct
  source 1..21: mol_type = other RNA
aaagaacactataagccaata

SEQ ID NO: 62196 - RNA, 21 nt, synthetic construct
  source 1..21: mol_type = other RNA
aaagaacaggaagggagagat

SEQ ID NO: 62197 - RNA, 21 nt, synthetic construct
  source 1..21: mol_type = other RNA
aaagaacaggacttttggtac

SEQ ID NO: 62198 - RNA, 21 nt, synthetic construct
  source 1..21: mol_type = other RNA
aaagaacaggagttaccataa

SEQ ID NO: 62199 - RNA, 21 nt, synthetic construct
  source 1..21: mol_type = other RNA
aaagaacatgattgggtcaac

SEQ ID NO: 62200 - RNA, 21 nt, synthetic construct
  source 1..21: mol_type = other RNA
aaagaacctctggaaaggact

SEQ ID NO: 62201 - RNA, 21 nt, synthetic construct
  source 1..21: mol_type = other RNA
aaagaactccaacaattcaac

SEQ ID NO: 62202 - RNA, 21 nt, synthetic construct
  source 1..21: mol_type = other RNA
aaagaactgaaagcagggact

SEQ ID NO: 62203 - RNA, 21 nt, synthetic construct
  source 1..21: mol_type = other RNA
aaagaagaaatcaaatgggaa

SEQ ID NO: 62204 - RNA, 21 nt, synthetic construct
  source 1..21: mol_type = other RNA
aaagaagatgcagttgcttac

SEQ ID NO: 62205 - RNA, 21 nt, synthetic construct
  source 1..21: mol_type = other RNA
aaagaaggaaaaaacacctaa

SEQ ID NO: 62206 - RNA, 21 nt, synthetic construct
  source 1..21: mol_type = other RNA
aaagaaggccatttgattgcc

SEQ ID NO: 62207 - RNA, 21 nt, synthetic construct
  source 1..21: mol_type = other RNA
aaagaaggccgtccctatttt

SEQ ID NO: 62208 - RNA, 21 nt, synthetic construct
  source 1..21: mol_type = other RNA
aaagaagttacggttccctgt

SEQ ID NO: 62209 - RNA, 21 nt, synthetic construct
  source 1..21: mol_type = other RNA
aaagaataagctaatcccaaa

SEQ ID NO: 62210 - RNA, 21 nt, synthetic construct
  source 1..21: mol_type = other RNA
aaagacaagtactgcatgatt

SEQ ID NO: 62211 - RNA, 21 nt, synthetic construct
  source 1..21: mol_type = other RNA
aaagacaagttcttacctcaa

SEQ ID NO: 62212 - RNA, 21 nt, synthetic construct
  source 1..21: mol_type = other RNA
aaagacaatagctagtgtctt

SEQ ID NO: 62213 - RNA, 21 nt, synthetic construct
  source 1..21: mol_type = other RNA
aaagacacaaaagagctgggc

SEQ ID NO: 62214 - RNA, 21 nt, synthetic construct
  source 1..21: mol_type = other RNA
aaagacagacatttggaatag

SEQ ID NO: 62215 - RNA, 21 nt, synthetic construct
  source 1..21: mol_type = other RNA
aaagacagacctctattaaat

SEQ ID NO: 62216 - RNA, 21 nt, synthetic construct
  source 1..21: mol_type = other RNA
aaagacagagctagaactaga

SEQ ID NO: 62217 - RNA, 21 nt, synthetic construct
  source 1..21: mol_type = other RNA
aaagacagatcttatggaata

SEQ ID NO: 62218 - RNA, 21 nt, synthetic construct
  source 1..21: mol_type = other RNA
aaagacagctactaaacaaat

SEQ ID NO: 62219 - RNA, 21 nt, synthetic construct
  source 1..21: mol_type = other RNA
aaagacaggtagacatgagta

SEQ ID NO: 62220 - RNA, 21 nt, synthetic construct
  source 1..21: mol_type = other RNA
aaagacatcactaagagtgaa

SEQ ID NO: 62221 - RNA, 21 nt, synthetic construct
  source 1..21: mol_type = other RNA
aaagacatcctgatttaggcc

SEQ ID NO: 62222 - RNA, 21 nt, synthetic construct
  source 1..21: mol_type = other RNA
aaagacatctttcctgtgatt

SEQ ID NO: 62223 - RNA, 21 nt, synthetic construct
  source 1..21: mol_type = other RNA
aaagacattattcttacagtg

SEQ ID NO: 62224 - RNA, 21 nt, synthetic construct
  source 1..21: mol_type = other RNA
aaagacattgtcttacatagg

SEQ ID NO: 62225 - RNA, 21 nt, synthetic construct
  source 1..21: mol_type = other RNA
aaagaccaagaattttccatt

SEQ ID NO: 62226 - RNA, 21 nt, synthetic construct
  source 1..21: mol_type = other RNA
aaagaccaagagtgtggcttt

SEQ ID NO: 62227 - RNA, 21 nt, synthetic construct
  source 1..21: mol_type = other RNA
aaagaccgcaagagttccaac

SEQ ID NO: 62228 - RNA, 21 nt, synthetic construct
  source 1..21: mol_type = other RNA
aaagaccggggactgcaacag

SEQ ID NO: 62229 - RNA, 21 nt, synthetic construct
  source 1..21: mol_type = other RNA
aaagacctaagcttaagagct

SEQ ID NO: 62230 - RNA, 21 nt, synthetic construct
  source 1..21: mol_type = other RNA
aaagacctcaggtttagaata

SEQ ID NO: 62231 - RNA, 21 nt, synthetic construct
  source 1..21: mol_type = other RNA
aaagacgatattcctatcaga

SEQ ID NO: 62232 - RNA, 21 nt, synthetic construct
  source 1..21: mol_type = other RNA
aaagacgttcagataacaaag

SEQ ID NO: 62233 - RNA, 21 nt, synthetic construct
  source 1..21: mol_type = other RNA
aaagacttcaacggacatttt

SEQ ID NO: 62234 - RNA, 21 nt, synthetic construct
  source 1..21: mol_type = other RNA
aaagacttcacgatgcttagg

SEQ ID NO: 62235 - RNA, 21 nt, synthetic construct
  source 1..21: mol_type = other RNA
aaagacttcaggaacaccttg

SEQ ID NO: 62236 - RNA, 21 nt, synthetic construct
  source 1..21: mol_type = other RNA
aaagacttctcaaacaggata

SEQ ID NO: 62237 - RNA, 21 nt, synthetic construct
  source 1..21: mol_type = other RNA
aaagacttgaggtttacttgg

SEQ ID NO: 62238 - RNA, 21 nt, synthetic construct
  source 1..21: mol_type = other RNA
aaagagaaaaattacaggtca

SEQ ID NO: 62239 - RNA, 21 nt, synthetic construct
  source 1..21: mol_type = other RNA
aaagagaacaaaatacctggg

SEQ ID NO: 62240 - RNA, 21 nt, synthetic construct
  source 1..21: mol_type = other RNA
aaagagaacaatggaatagaa

SEQ ID NO: 62241 - RNA, 21 nt, synthetic construct
  source 1..21: mol_type = other RNA
aaagagaacacacaatttgag

SEQ ID NO: 62242 - RNA, 21 nt, synthetic construct
  source 1..21: mol_type = other RNA
aaagagaacattggtttgaaa

SEQ ID NO: 62243 - RNA, 21 nt, synthetic construct
  source 1..21: mol_type = other RNA
aaagagaacttgcacataata

SEQ ID NO: 62244 - RNA, 21 nt, synthetic construct
  source 1..21: mol_type = other RNA
aaagagaatagcagaaacaca

SEQ ID NO: 62245 - RNA, 21 nt, synthetic construct
  source 1..21: mol_type = other RNA
aaagagacctgattcttccac

SEQ ID NO: 62246 - RNA, 21 nt, synthetic construct
  source 1..21: mol_type = other RNA
aaagagagagacaagcacagg

SEQ ID NO: 62247 - RNA, 21 nt, synthetic construct
  source 1..21: mol_type = other RNA
aaagagagaggggggaagctt

SEQ ID NO: 62248 - RNA, 21 nt, synthetic construct
  source 1..21: mol_type = other RNA
aaagagagtgacagctgagta

SEQ ID NO: 62249 - RNA, 21 nt, synthetic construct
  source 1..21: mol_type = other RNA
aaagagatctagtgaagtcaa

SEQ ID NO: 62250 - RNA, 21 nt, synthetic construct
  source 1..21: mol_type = other RNA
aaagagcacaccaagacatgt

SEQ ID NO: 62251 - RNA, 21 nt, synthetic construct
  source 1..21: mol_type = other RNA
aaagagcaggtggaaggcctg

SEQ ID NO: 62252 - RNA, 21 nt, synthetic construct
  source 1..21: mol_type = other RNA
aaagagccagcctgatgatga

SEQ ID NO: 62253 - RNA, 21 nt, synthetic construct
  source 1..21: mol_type = other RNA
aaagagcgaagagggagaaga

SEQ ID NO: 62254 - RNA, 21 nt, synthetic construct
  source 1..21: mol_type = other RNA
aaagagctgggactacaggtg

SEQ ID NO: 62255 - RNA, 21 nt, synthetic construct
  source 1..21: mol_type = other RNA
aaagagctgggcccgcagtgg

SEQ ID NO: 62256 - RNA, 21 nt, synthetic construct
  source 1..21: mol_type = other RNA
aaagaggcaaaactcctgaac

SEQ ID NO: 62257 - RNA, 21 nt, synthetic construct
  source 1..21: mol_type = other RNA
aaagagggaagtactgagtca

SEQ ID NO: 62258 - RNA, 21 nt, synthetic construct
  source 1..21: mol_type = other RNA
aaagagtagattcccccttat

SEQ ID NO: 62259 - RNA, 21 nt, synthetic construct
  source 1..21: mol_type = other RNA
aaagagtgaaatgatttcaag

SEQ ID NO: 62260 - RNA, 21 nt, synthetic construct
  source 1..21: mol_type = other RNA
aaagagtgcacattccttctt

SEQ ID NO: 62261 - RNA, 21 nt, synthetic construct
  source 1..21: mol_type = other RNA
aaagagttgggtttttgaaaa

SEQ ID NO: 62262 - RNA, 21 nt, synthetic construct
  source 1..21: mol_type = other RNA
aaagataaaggtaaggaaacc

SEQ ID NO: 62263 - RNA, 21 nt, synthetic construct
  source 1..21: mol_type = other RNA
aaagataaatcagaaactgac

SEQ ID NO: 62264 - RNA, 21 nt, synthetic construct
  source 1..21: mol_type = other RNA
aaagataaatccaacgaccgg

SEQ ID NO: 62265 - RNA, 21 nt, synthetic construct
  source 1..21: mol_type = other RNA
aaagataagtagaaggtcaat

SEQ ID NO: 62266 - RNA, 21 nt, synthetic construct
  source 1..21: mol_type = other RNA
aaagatacacaagatctctat

SEQ ID NO: 62267 - RNA, 21 nt, synthetic construct
  source 1..21: mol_type = other RNA
aaagatactcaacatcactag

SEQ ID NO: 62268 - RNA, 21 nt, synthetic construct
  source 1..21: mol_type = other RNA
aaagatagactcttcagaggt

SEQ ID NO: 62269 - RNA, 21 nt, synthetic construct
  source 1..21: mol_type = other RNA
aaagatagccccttatcagga

SEQ ID NO: 62270 - RNA, 21 nt, synthetic construct
  source 1..21: mol_type = other RNA
aaagatatccacagtatgctg

SEQ ID NO: 62271 - RNA, 21 nt, synthetic construct
  source 1..21: mol_type = other RNA
aaagatatgggttattcaccc

SEQ ID NO: 62272 - RNA, 21 nt, synthetic construct
  source 1..21: mol_type = other RNA
aaagatatgtgtaggaaggaa

SEQ ID NO: 62273 - RNA, 21 nt, synthetic construct
  source 1..21: mol_type = other RNA
aaagatattagctacaaaagg

SEQ ID NO: 62274 - RNA, 21 nt, synthetic construct
  source 1..21: mol_type = other RNA
aaagatcaagctcgccgtctc

SEQ ID NO: 62275 - RNA, 21 nt, synthetic construct
  source 1..21: mol_type = other RNA
aaagatcagtaaaattccctt

SEQ ID NO: 62276 - RNA, 21 nt, synthetic construct
  source 1..21: mol_type = other RNA
aaagatcatttagtaagtgtg

SEQ ID NO: 62277 - RNA, 21 nt, synthetic construct
  source 1..21: mol_type = other RNA
aaagatcatttcaaaccaatg

SEQ ID NO: 62278 - RNA, 21 nt, synthetic construct
  source 1..21: mol_type = other RNA
aaagatctcaaacagcctaat

SEQ ID NO: 62279 - RNA, 21 nt, synthetic construct
  source 1..21: mol_type = other RNA
aaagatctgtggactttaggc

SEQ ID NO: 62280 - RNA, 21 nt, synthetic construct
  source 1..21: mol_type = other RNA
aaagatgaagtatagaaagga

SEQ ID NO: 62281 - RNA, 21 nt, synthetic construct
  source 1..21: mol_type = other RNA
aaagatgatgaacaaaggcag

SEQ ID NO: 62282 - RNA, 21 nt, synthetic construct
  source 1..21: mol_type = other RNA
aaagatgcagaaaaagcattt

SEQ ID NO: 62283 - RNA, 21 nt, synthetic construct
  source 1..21: mol_type = other RNA
aaagatgcattctgtcacata

SEQ ID NO: 62284 - RNA, 21 nt, synthetic construct
  source 1..21: mol_type = other RNA
aaagatgccacaaatggagtg

SEQ ID NO: 62285 - RNA, 21 nt, synthetic construct
  source 1..21: mol_type = other RNA
aaagatgccatttataatagc

SEQ ID NO: 62286 - RNA, 21 nt, synthetic construct
  source 1..21: mol_type = other RNA
aaagatgctggtggagtattc

SEQ ID NO: 62287 - RNA, 21 nt, synthetic construct
  source 1..21: mol_type = other RNA
aaagatgtcttttaacttgct

SEQ ID NO: 62288 - RNA, 21 nt, synthetic construct
  source 1..21: mol_type = other RNA
aaagatgtgtaccaaaagtcc

SEQ ID NO: 62289 - RNA, 21 nt, synthetic construct
  source 1..21: mol_type = other RNA
aaagatgttttcagttgcatg

SEQ ID NO: 62290 - RNA, 21 nt, synthetic construct
  source 1..21: mol_type = other RNA
aaagattaaatacagagcaca

SEQ ID NO: 62291 - RNA, 21 nt, synthetic construct
  source 1..21: mol_type = other RNA
aaagattaatccttgtggtct

SEQ ID NO: 62292 - RNA, 21 nt, synthetic construct
  source 1..21: mol_type = other RNA
aaagattatgttccacatgtt

SEQ ID NO: 62293 - RNA, 21 nt, synthetic construct
  source 1..21: mol_type = other RNA
aaagattcttgtcatgaatga

SEQ ID NO: 62294 - RNA, 21 nt, synthetic construct
  source 1..21: mol_type = other RNA
aaagatttacccctacttttt

SEQ ID NO: 62295 - RNA, 21 nt, synthetic construct
  source 1..21: mol_type = other RNA
aaagatttactaaactgaacg

SEQ ID NO: 62296 - RNA, 21 nt, synthetic construct
  source 1..21: mol_type = other RNA
aaagcaaaccagacatttctc

SEQ ID NO: 62297 - RNA, 21 nt, synthetic construct
  source 1..21: mol_type = other RNA
aaagcaaacgtgcacacccag

SEQ ID NO: 62298 - RNA, 21 nt, synthetic construct
  source 1..21: mol_type = other RNA
aaagcaaatgtcatcttctct

SEQ ID NO: 62299 - RNA, 21 nt, synthetic construct
  source 1..21: mol_type = other RNA
aaagcaaatgtgactagaaga

SEQ ID NO: 62300 - RNA, 21 nt, synthetic construct
  source 1..21: mol_type = other RNA
aaagcaacaggaagaggcagc

SEQ ID NO: 62301 - RNA, 21 nt, synthetic construct
  source 1..21: mol_type = other RNA
aaagcaacatgctaagtgttt

SEQ ID NO: 62302 - RNA, 21 nt, synthetic construct
  source 1..21: mol_type = other RNA
aaagcaacctcatttgcagag

SEQ ID NO: 62303 - RNA, 21 nt, synthetic construct
  source 1..21: mol_type = other RNA
aaagcaacttgaaggcaatgt

SEQ ID NO: 62304 - RNA, 21 nt, synthetic construct
  source 1..21: mol_type = other RNA
aaagcaagccttggcaagggg

SEQ ID NO: 62305 - RNA, 21 nt, synthetic construct
  source 1..21: mol_type = other RNA
aaagcaagtatgagccactag

SEQ ID NO: 62306 - RNA, 21 nt, synthetic construct
  source 1..21: mol_type = other RNA
aaagcaagttaaaagacatct

SEQ ID NO: 62307 - RNA, 21 nt, synthetic construct
  source 1..21: mol_type = other RNA
aaagcacaagcacagagtcag

SEQ ID NO: 62308 - RNA, 21 nt, synthetic construct
  source 1..21: mol_type = other RNA
aaagcacaggcatcggccggg

SEQ ID NO: 62309 - RNA, 21 nt, synthetic construct
  source 1..21: mol_type = other RNA
aaagcacataaaaaaggaatc

SEQ ID NO: 62310 - RNA, 21 nt, synthetic construct
  source 1..21: mol_type = other RNA
aaagcaccactgagagggaag

SEQ ID NO: 62311 - RNA, 21 nt, synthetic construct
  source 1..21: mol_type = other RNA
aaagcaccagggcctctgaag

SEQ ID NO: 62312 - RNA, 21 nt, synthetic construct
  source 1..21: mol_type = other RNA
aaagcaccagttatcaccatg

SEQ ID NO: 62313 - RNA, 21 nt, synthetic construct
  source 1..21: mol_type = other RNA
aaagcacctaccataacaaaa

SEQ ID NO: 62314 - RNA, 21 nt, synthetic construct
  source 1..21: mol_type = other RNA
aaagcacgtttgatctggtca

SEQ ID NO: 62315 - RNA, 21 nt, synthetic construct
  source 1..21: mol_type = other RNA
aaagcactatccacatttggt

SEQ ID NO: 62316 - RNA, 21 nt, synthetic construct
  source 1..21: mol_type = other RNA
aaagcagaaatacagaccgat

SEQ ID NO: 62317 - RNA, 21 nt, synthetic construct
  source 1..21: mol_type = other RNA
aaagcagacagaaagacaggg

SEQ ID NO: 62318 - RNA, 21 nt, synthetic construct
  source 1..21: mol_type = other RNA
aaagcagagaaactggaatca

SEQ ID NO: 62319 - RNA, 21 nt, synthetic construct
  source 1..21: mol_type = other RNA
aaagcagctacctgttgattg

SEQ ID NO: 62320 - RNA, 21 nt, synthetic construct
  source 1..21: mol_type = other RNA
aaagcaggccctgagaagtca

SEQ ID NO: 62321 - RNA, 21 nt, synthetic construct
  source 1..21: mol_type = other RNA
aaagcagggactcccatatct

SEQ ID NO: 62322 - RNA, 21 nt, synthetic construct
  source 1..21: mol_type = other RNA
aaagcagggaggggtccccag

SEQ ID NO: 62323 - RNA, 21 nt, synthetic construct
  source 1..21: mol_type = other RNA
aaagcaggtcatgactttttt

SEQ ID NO: 62324 - RNA, 21 nt, synthetic construct
  source 1..21: mol_type = other RNA
aaagcaggttgcattaatgct

SEQ ID NO: 62325 - RNA, 21 nt, synthetic construct
  source 1..21: mol_type = other RNA
aaagcatatgaatctagaaag

SEQ ID NO: 62326 - RNA, 21 nt, synthetic construct
  source 1..21: mol_type = other RNA
aaagcatcagagctttgttat

SEQ ID NO: 62327 - RNA, 21 nt, synthetic construct
  source 1..21: mol_type = other RNA
aaagccaagagcgaggcctgg

SEQ ID NO: 62328 - RNA, 21 nt, synthetic construct
  source 1..21: mol_type = other RNA
aaagccaatcttcccaatcct

SEQ ID NO: 62329 - RNA, 21 nt, synthetic construct
  source 1..21: mol_type = other RNA
aaagccacactcttggtcttt

SEQ ID NO: 62330 - RNA, 21 nt, synthetic construct
  source 1..21: mol_type = other RNA
aaagccaggctttcccagggt

SEQ ID NO: 62331 - RNA, 21 nt, synthetic construct
  source 1..21: mol_type = other RNA
aaagccatagtgtaaactaaa

SEQ ID NO: 62332 - RNA, 21 nt, synthetic construct
  source 1..21: mol_type = other RNA
aaagccatttatcagcaccaa

SEQ ID NO: 62333 - RNA, 21 nt, synthetic construct
  source 1..21: mol_type = other RNA
aaagcccaatctacaggtcgg

SEQ ID NO: 62334 - RNA, 21 nt, synthetic construct
  source 1..21: mol_type = other RNA
aaagcccaccagcataagacc

SEQ ID NO: 62335 - RNA, 21 nt, synthetic construct
  source 1..21: mol_type = other RNA
aaagcccagccgcggactccg

SEQ ID NO: 62336 - RNA, 21 nt, synthetic construct
  source 1..21: mol_type = other RNA
aaagccccaaaccatcaagtg

SEQ ID NO: 62337 - RNA, 21 nt, synthetic construct
  source 1..21: mol_type = other RNA
aaagccccattgtacacatat

SEQ ID NO: 62338 - RNA, 21 nt, synthetic construct
  source 1..21: mol_type = other RNA
aaagccctcaggaccaggcag

SEQ ID NO: 62339 - RNA, 21 nt, synthetic construct
  source 1..21: mol_type = other RNA
aaagcccttgagtatttttga

SEQ ID NO: 62340 - RNA, 21 nt, synthetic construct
  source 1..21: mol_type = other RNA
aaagccggattcctttcaaag

SEQ ID NO: 62341 - RNA, 21 nt, synthetic construct
  source 1..21: mol_type = other RNA
aaagcctcaaaatttagtaag

SEQ ID NO: 62342 - RNA, 21 nt, synthetic construct
  source 1..21: mol_type = other RNA
aaagcctcaaacgaaccaatt

SEQ ID NO: 62343 - RNA, 21 nt, synthetic construct
  source 1..21: mol_type = other RNA
aaagcctcatttgaactttcc

SEQ ID NO: 62344 - RNA, 21 nt, synthetic construct
  source 1..21: mol_type = other RNA
aaagcctctcaacacttcagt

SEQ ID NO: 62345 - RNA, 21 nt, synthetic construct
  source 1..21: mol_type = other RNA
aaagcctctctgatggaacgg

SEQ ID NO: 62346 - RNA, 21 nt, synthetic construct
  source 1..21: mol_type = other RNA
aaagcctctgtggaccatgtt

SEQ ID NO: 62347 - RNA, 21 nt, synthetic construct
  source 1..21: mol_type = other RNA
aaagcctcttcagaagaggat

SEQ ID NO: 62348 - RNA, 21 nt, synthetic construct
  source 1..21: mol_type = other RNA
aaagcctgcttcagcctaagc

SEQ ID NO: 62349 - RNA, 21 nt, synthetic construct
  source 1..21: mol_type = other RNA
aaagcctggctttagatggta

SEQ ID NO: 62350 - RNA, 21 nt, synthetic construct
  source 1..21: mol_type = other RNA
aaagcctgtgacagtatgtca

SEQ ID NO: 62351 - RNA, 21 nt, synthetic construct
  source 1..21: mol_type = other RNA
aaagcctgtggaggcagtacc

SEQ ID NO: 62352 - RNA, 21 nt, synthetic construct
  source 1..21: mol_type = other RNA
aaagccttctctactctgcct

SEQ ID NO: 62353 - RNA, 21 nt, synthetic construct
  source 1..21: mol_type = other RNA
aaagcctttattttttcttcc

SEQ ID NO: 62354 - RNA, 21 nt, synthetic construct
  source 1..21: mol_type = other RNA
aaagcgctactcagctgtcac

SEQ ID NO: 62355 - RNA, 21 nt, synthetic construct
  source 1..21: mol_type = other RNA
aaagcggtcaacgcacccaga

SEQ ID NO: 62356 - RNA, 21 nt, synthetic construct
  source 1..21: mol_type = other RNA
aaagcgtactgtgattacaat

SEQ ID NO: 62357 - RNA, 21 nt, synthetic construct
  source 1..21: mol_type = other RNA
aaagcgttggagacagcctaa

SEQ ID NO: 62358 - RNA, 21 nt, synthetic construct
  source 1..21: mol_type = other RNA
aaagctaccctcgagtaaaaa

SEQ ID NO: 62359 - RNA, 21 nt, synthetic construct
  source 1..21: mol_type = other RNA
aaagctaccctttcttgttag

SEQ ID NO: 62360 - RNA, 21 nt, synthetic construct
  source 1..21: mol_type = other RNA
aaagctagaagacctcaaatt

SEQ ID NO: 62361 - RNA, 21 nt, synthetic construct
  source 1..21: mol_type = other RNA
aaagctatacacgttacaaaa

SEQ ID NO: 62362 - RNA, 21 nt, synthetic construct
  source 1..21: mol_type = other RNA
aaagctcaaaaatactcaagg

SEQ ID NO: 62363 - RNA, 21 nt, synthetic construct
  source 1..21: mol_type = other RNA
aaagctcacctctggactcag

SEQ ID NO: 62364 - RNA, 21 nt, synthetic construct
  source 1..21: mol_type = other RNA
aaagctcaggaccagatgact

SEQ ID NO: 62365 - RNA, 21 nt, synthetic construct
  source 1..21: mol_type = other RNA
aaagctcagtgtgtttttgta

SEQ ID NO: 62366 - RNA, 21 nt, synthetic construct
  source 1..21: mol_type = other RNA
aaagctcccaatgcttgaaga

SEQ ID NO: 62367 - RNA, 21 nt, synthetic construct
  source 1..21: mol_type = other RNA
aaagctccccggatgattcta

SEQ ID NO: 62368 - RNA, 21 nt, synthetic construct
  source 1..21: mol_type = other RNA
aaagctctaataaaagctgga

SEQ ID NO: 62369 - RNA, 21 nt, synthetic construct
  source 1..21: mol_type = other RNA
aaagctctaatagttcacctc

SEQ ID NO: 62370 - RNA, 21 nt, synthetic construct
  source 1..21: mol_type = other RNA
aaagctctatggcatttgagg

SEQ ID NO: 62371 - RNA, 21 nt, synthetic construct
  source 1..21: mol_type = other RNA
aaagctctcaattaatgccca

SEQ ID NO: 62372 - RNA, 21 nt, synthetic construct
  source 1..21: mol_type = other RNA
aaagctctgatgctttctcta

SEQ ID NO: 62373 - RNA, 21 nt, synthetic construct
  source 1..21: mol_type = other RNA
aaagctgaactcctttcttac

SEQ ID NO: 62374 - RNA, 21 nt, synthetic construct
  source 1..21: mol_type = other RNA
aaagctggactcattccaatc

SEQ ID NO: 62375 - RNA, 21 nt, synthetic construct
  source 1..21: mol_type = other RNA
aaagctggagttatttgtata

SEQ ID NO: 62376 - RNA, 21 nt, synthetic construct
  source 1..21: mol_type = other RNA
aaagctggcatgttggatagt

SEQ ID NO: 62377 - RNA, 21 nt, synthetic construct
  source 1..21: mol_type = other RNA
aaagctgtggatgttggtgag

SEQ ID NO: 62378 - RNA, 21 nt, synthetic construct
  source 1..21: mol_type = other RNA
aaagcttatgatcttgggaat

SEQ ID NO: 62379 - RNA, 21 nt, synthetic construct
  source 1..21: mol_type = other RNA
aaagcttcccccctctctctt

SEQ ID NO: 62380 - RNA, 21 nt, synthetic construct
  source 1..21: mol_type = other RNA
aaagcttctgagcagtgtttc

SEQ ID NO: 62381 - RNA, 21 nt, synthetic construct
  source 1..21: mol_type = other RNA
aaagctttaaactggatgaat

SEQ ID NO: 62382 - RNA, 21 nt, synthetic construct
  source 1..21: mol_type = other RNA
aaagctttgtgactgtgaggg

SEQ ID NO: 62383 - RNA, 21 nt, synthetic construct
  source 1..21: mol_type = other RNA
aaaggaaaaatctaaccctca

SEQ ID NO: 62384 - RNA, 21 nt, synthetic construct
  source 1..21: mol_type = other RNA
aaaggaaaagagatctagtga

SEQ ID NO: 62385 - RNA, 21 nt, synthetic construct
  source 1..21: mol_type = other RNA
aaaggaaagtaactgttggca

SEQ ID NO: 62386 - RNA, 21 nt, synthetic construct
  source 1..21: mol_type = other RNA
aaaggaaatgagtgtatgcag

SEQ ID NO: 62387 - RNA, 21 nt, synthetic construct
  source 1..21: mol_type = other RNA
aaaggaaggaattttaggaca

SEQ ID NO: 62388 - RNA, 21 nt, synthetic construct
  source 1..21: mol_type = other RNA
aaaggaatataaacgtgtgtg

SEQ ID NO: 62389 - RNA, 21 nt, synthetic construct
  source 1..21: mol_type = other RNA
aaaggaatccggctttatgag

SEQ ID NO: 62390 - RNA, 21 nt, synthetic construct
  source 1..21: mol_type = other RNA
aaaggaatctgacctaagctt

SEQ ID NO: 62391 - RNA, 21 nt, synthetic construct
  source 1..21: mol_type = other RNA
aaaggaatctgggccgggcgc

SEQ ID NO: 62392 - RNA, 21 nt, synthetic construct
  source 1..21: mol_type = other RNA
aaaggaatggaattctgatgc

SEQ ID NO: 62393 - RNA, 21 nt, synthetic construct
  source 1..21: mol_type = other RNA
aaaggaattgtaatcacagta

SEQ ID NO: 62394 - RNA, 21 nt, synthetic construct
  source 1..21: mol_type = other RNA
aaaggacacaaattatgactg

SEQ ID NO: 62395 - RNA, 21 nt, synthetic construct
  source 1..21: mol_type = other RNA
aaaggacactattgagagtga

SEQ ID NO: 62396 - RNA, 21 nt, synthetic construct
  source 1..21: mol_type = other RNA
aaaggacattagtggaaaaac

SEQ ID NO: 62397 - RNA, 21 nt, synthetic construct
  source 1..21: mol_type = other RNA
aaaggaccatctgttaaaaga

SEQ ID NO: 62398 - RNA, 21 nt, synthetic construct
  source 1..21: mol_type = other RNA
aaaggactggaactcatttct

SEQ ID NO: 62399 - RNA, 21 nt, synthetic construct
  source 1..21: mol_type = other RNA
aaaggactgggatcctaagca

SEQ ID NO: 62400 - RNA, 21 nt, synthetic construct
  source 1..21: mol_type = other RNA
aaaggacttcagtccttacca

SEQ ID NO: 62401 - RNA, 21 nt, synthetic construct
  source 1..21: mol_type = other RNA
aaaggacttgatctaaaatgg

SEQ ID NO: 62402 - RNA, 21 nt, synthetic construct
  source 1..21: mol_type = other RNA
aaaggagaccagttaggaagc

SEQ ID NO: 62403 - RNA, 21 nt, synthetic construct
  source 1..21: mol_type = other RNA
aaaggagagaagagggggcat

SEQ ID NO: 62404 - RNA, 21 nt, synthetic construct
  source 1..21: mol_type = other RNA
aaaggagatactggccatgtt

SEQ ID NO: 62405 - RNA, 21 nt, synthetic construct
  source 1..21: mol_type = other RNA
aaaggagatatacaggaagag

SEQ ID NO: 62406 - RNA, 21 nt, synthetic construct
  source 1..21: mol_type = other RNA
aaaggaggaactaattgataa

SEQ ID NO: 62407 - RNA, 21 nt, synthetic construct
  source 1..21: mol_type = other RNA
aaaggagggaaaatgtttatt

SEQ ID NO: 62408 - RNA, 21 nt, synthetic construct
  source 1..21: mol_type = other RNA
aaaggagggactgaaaccagt

SEQ ID NO: 62409 - RNA, 21 nt, synthetic construct
  source 1..21: mol_type = other RNA
aaaggagttcagctttaaaga

SEQ ID NO: 62410 - RNA, 21 nt, synthetic construct
  source 1..21: mol_type = other RNA
aaaggatactgagaacagaat

SEQ ID NO: 62411 - RNA, 21 nt, synthetic construct
  source 1..21: mol_type = other RNA
aaaggatatgggccaaagaca

SEQ ID NO: 62412 - RNA, 21 nt, synthetic construct
  source 1..21: mol_type = other RNA
aaaggatgaccttgacaataa

SEQ ID NO: 62413 - RNA, 21 nt, synthetic construct
  source 1..21: mol_type = other RNA
aaaggatgcacaagacagatg

SEQ ID NO: 62414 - RNA, 21 nt, synthetic construct
  source 1..21: mol_type = other RNA
aaaggatggtttgattgttcc

SEQ ID NO: 62415 - RNA, 21 nt, synthetic construct
  source 1..21: mol_type = other RNA
aaaggatgtcaacaaaatact

SEQ ID NO: 62416 - RNA, 21 nt, synthetic construct
  source 1..21: mol_type = other RNA
aaaggatgtcaactgaggcag

SEQ ID NO: 62417 - RNA, 21 nt, synthetic construct
  source 1..21: mol_type = other RNA
aaaggattcgggggagagcac

SEQ ID NO: 62418 - RNA, 21 nt, synthetic construct
  source 1..21: mol_type = other RNA
aaaggattgggaagattggct

SEQ ID NO: 62419 - RNA, 21 nt, synthetic construct
  source 1..21: mol_type = other RNA
aaaggatttgtttgtgaagat

SEQ ID NO: 62420 - RNA, 21 nt, synthetic construct
  source 1..21: mol_type = other RNA
aaaggcaaaccacacagagaa

SEQ ID NO: 62421 - RNA, 21 nt, synthetic construct
  source 1..21: mol_type = other RNA
aaaggcaaaggaaaaaacttt

SEQ ID NO: 62422 - RNA, 21 nt, synthetic construct
  source 1..21: mol_type = other RNA
aaaggcaatgctctcttcccc

SEQ ID NO: 62423 - RNA, 21 nt, synthetic construct
  source 1..21: mol_type = other RNA
aaaggcaggagcagtgtgaat

SEQ ID NO: 62424 - RNA, 21 nt, synthetic construct
  source 1..21: mol_type = other RNA
aaaggcatgaaattcttgggt

SEQ ID NO: 62425 - RNA, 21 nt, synthetic construct
  source 1..21: mol_type = other RNA
aaaggcccaaaaagtttttaa

SEQ ID NO: 62426 - RNA, 21 nt, synthetic construct
  source 1..21: mol_type = other RNA
aaaggccccttgaaagatcat

SEQ ID NO: 62427 - RNA, 21 nt, synthetic construct
  source 1..21: mol_type = other RNA
aaaggccctgatttaaagtag

SEQ ID NO: 62428 - RNA, 21 nt, synthetic construct
  source 1..21: mol_type = other RNA
aaaggccgctcttgaccttgt

SEQ ID NO: 62429 - RNA, 21 nt, synthetic construct
  source 1..21: mol_type = other RNA
aaaggcgaagcccgccgctcg

SEQ ID NO: 62430 - RNA, 21 nt, synthetic construct
  source 1..21: mol_type = other RNA
aaaggcgaagcggcagggccg

SEQ ID NO: 62431 - RNA, 21 nt, synthetic construct
  source 1..21: mol_type = other RNA
aaaggcgtcggggctgctggg

SEQ ID NO: 62432 - RNA, 21 nt, synthetic construct
  source 1..21: mol_type = other RNA
aaaggctgagacctcatctta

SEQ ID NO: 62433 - RNA, 21 nt, synthetic construct
  source 1..21: mol_type = other RNA
aaaggctggaaataatttccc

SEQ ID NO: 62434 - RNA, 21 nt, synthetic construct
  source 1..21: mol_type = other RNA
aaaggctttcgtatggaagat

SEQ ID NO: 62435 - RNA, 21 nt, synthetic construct
  source 1..21: mol_type = other RNA
aaagggaaaacaattacttga

SEQ ID NO: 62436 - RNA, 21 nt, synthetic construct
  source 1..21: mol_type = other RNA
aaagggaaatatgaaccacac

SEQ ID NO: 62437 - RNA, 21 nt, synthetic construct
  source 1..21: mol_type = other RNA
aaagggagtcagtagaggccg

SEQ ID NO: 62438 - RNA, 21 nt, synthetic construct
  source 1..21: mol_type = other RNA
aaagggataatgctatccaga

SEQ ID NO: 62439 - RNA, 21 nt, synthetic construct
  source 1..21: mol_type = other RNA
aaagggattctggccaaatcc

SEQ ID NO: 62440 - RNA, 21 nt, synthetic construct
  source 1..21: mol_type = other RNA
aaagggcctgttccaggcctc

SEQ ID NO: 62441 - RNA, 21 nt, synthetic construct
  source 1..21: mol_type = other RNA
aaaggggaaggaattttcagg

SEQ ID NO: 62442 - RNA, 21 nt, synthetic construct
  source 1..21: mol_type = other RNA
aaaggggatgggggacgacgt

SEQ ID NO: 62443 - RNA, 21 nt, synthetic construct
  source 1..21: mol_type = other RNA
aaaggggatttcatgaacaat

SEQ ID NO: 62444 - RNA, 21 nt, synthetic construct
  source 1..21: mol_type = other RNA
aaaggggcattccgtggaagg

SEQ ID NO: 62445 - RNA, 21 nt, synthetic construct
  source 1..21: mol_type = other RNA
aaaggggccaggtgtggaggc

SEQ ID NO: 62446 - RNA, 21 nt, synthetic construct
  source 1..21: mol_type = other RNA
aaagggtaagaaaattgtaca

SEQ ID NO: 62447 - RNA, 21 nt, synthetic construct
  source 1..21: mol_type = other RNA
aaagggtagagcactttcgta

SEQ ID NO: 62448 - RNA, 21 nt, synthetic construct
  source 1..21: mol_type = other RNA
aaagggtagctttgatgcccc

SEQ ID NO: 62449 - RNA, 21 nt, synthetic construct
  source 1..21: mol_type = other RNA
aaagggtcactattaaccata

SEQ ID NO: 62450 - RNA, 21 nt, synthetic construct
  source 1..21: mol_type = other RNA
aaagggtctggtatctaccaa

SEQ ID NO: 62451 - RNA, 21 nt, synthetic construct
  source 1..21: mol_type = other RNA
aaagggtgggggcatcaaagc

SEQ ID NO: 62452 - RNA, 21 nt, synthetic construct
  source 1..21: mol_type = other RNA
aaagggtgtgtgaatggaaaa

SEQ ID NO: 62453 - RNA, 21 nt, synthetic construct
  source 1..21: mol_type = other RNA
aaagggttcttggaaattaga

SEQ ID NO: 62454 - RNA, 21 nt, synthetic construct
  source 1..21: mol_type = other RNA
aaaggtaaggaaaccccaggg

SEQ ID NO: 62455 - RNA, 21 nt, synthetic construct
  source 1..21: mol_type = other RNA
aaaggtacgacgctcttgttc

SEQ ID NO: 62456 - RNA, 21 nt, synthetic construct
  source 1..21: mol_type = other RNA
aaaggtagaaacatcccaagt

SEQ ID NO: 62457 - RNA, 21 nt, synthetic construct
  source 1..21: mol_type = other RNA
aaaggtagaagataatgttag

SEQ ID NO: 62458 - RNA, 21 nt, synthetic construct
  source 1..21: mol_type = other RNA
aaaggtataaaggatgcacaa

SEQ ID NO: 62459 - RNA, 21 nt, synthetic construct
  source 1..21: mol_type = other RNA
aaaggtctagtgtgcatgtgt

SEQ ID NO: 62460 - RNA, 21 nt, synthetic construct
  source 1..21: mol_type = other RNA
aaaggtctctctctgtcaccc

SEQ ID NO: 62461 - RNA, 21 nt, synthetic construct
  source 1..21: mol_type = other RNA
aaaggtgctaattgtttgttg

SEQ ID NO: 62462 - RNA, 21 nt, synthetic construct
  source 1..21: mol_type = other RNA
aaaggtgctgttgtattttac

SEQ ID NO: 62463 - RNA, 21 nt, synthetic construct
  source 1..21: mol_type = other RNA
aaaggtgttaagccgttccat

SEQ ID NO: 62464 - RNA, 21 nt, synthetic construct
  source 1..21: mol_type = other RNA
aaaggttaagggaagagctaa

SEQ ID NO: 62465 - RNA, 21 nt, synthetic construct
  source 1..21: mol_type = other RNA
aaaggttgaaaactcaactgc

SEQ ID NO: 62466 - RNA, 21 nt, synthetic construct
  source 1..21: mol_type = other RNA
aaaggttgagacaagaccaca

SEQ ID NO: 62467 - RNA, 21 nt, synthetic construct
  source 1..21: mol_type = other RNA
aaaggttgcttaattgagctg

SEQ ID NO: 62468 - RNA, 21 nt, synthetic construct
  source 1..21: mol_type = other RNA
aaaggtttccagtggcccccc

SEQ ID NO: 62469 - RNA, 21 nt, synthetic construct
  source 1..21: mol_type = other RNA
aaaggtttcttcactcttaaa

SEQ ID NO: 62470 - RNA, 21 nt, synthetic construct
  source 1..21: mol_type = other RNA
aaaggtttggagtttgtagct

SEQ ID NO: 62471 - RNA, 21 nt, synthetic construct
  source 1..21: mol_type = other RNA
aaaggtttttgaacaagagcg

SEQ ID NO: 62472 - RNA, 21 nt, synthetic construct
  source 1..21: mol_type = other RNA
aaagtaaaaagcactatccac

SEQ ID NO: 62473 - RNA, 21 nt, synthetic construct
  source 1..21: mol_type = other RNA
aaagtaaagatagccccttat

SEQ ID NO: 62474 - RNA, 21 nt, synthetic construct
  source 1..21: mol_type = other RNA
aaagtaaattcgcataaccaa

SEQ ID NO: 62475 - RNA, 21 nt, synthetic construct
  source 1..21: mol_type = other RNA
aaagtaactgttggcaaggat

SEQ ID NO: 62476 - RNA, 21 nt, synthetic construct
  source 1..21: mol_type = other RNA
aaagtaatgaaaattagctgg

SEQ ID NO: 62477 - RNA, 21 nt, synthetic construct
  source 1..21: mol_type = other RNA
aaagtacagataaccaataag

SEQ ID NO: 62478 - RNA, 21 nt, synthetic construct
  source 1..21: mol_type = other RNA
aaagtactggaaatggacagc

SEQ ID NO: 62479 - RNA, 21 nt, synthetic construct
  source 1..21: mol_type = other RNA
aaagtagaaggccctatgcct

SEQ ID NO: 62480 - RNA, 21 nt, synthetic construct
  source 1..21: mol_type = other RNA
aaagtagaggactgcctattt

SEQ ID NO: 62481 - RNA, 21 nt, synthetic construct
  source 1..21: mol_type = other RNA
aaagtagattagcttttacga

SEQ ID NO: 62482 - RNA, 21 nt, synthetic construct
  source 1..21: mol_type = other RNA
aaagtaggggtaaatctttgt

SEQ ID NO: 62483 - RNA, 21 nt, synthetic construct
  source 1..21: mol_type = other RNA
aaagtaggttgagacttagat

SEQ ID NO: 62484 - RNA, 21 nt, synthetic construct
  source 1..21: mol_type = other RNA
aaagtatcgtgagactattat

SEQ ID NO: 62485 - RNA, 21 nt, synthetic construct
  source 1..21: mol_type = other RNA
aaagtatgagaaatgtctggt

SEQ ID NO: 62486 - RNA, 21 nt, synthetic construct
  source 1..21: mol_type = other RNA
aaagtatgcatagcagggtca

SEQ ID NO: 62487 - RNA, 21 nt, synthetic construct
  source 1..21: mol_type = other RNA
aaagtatggttgaagaaagta

SEQ ID NO: 62488 - RNA, 21 nt, synthetic construct
  source 1..21: mol_type = other RNA
aaagtattaaaagcacaagca

SEQ ID NO: 62489 - RNA, 21 nt, synthetic construct
  source 1..21: mol_type = other RNA
aaagtattcccaagatcataa

SEQ ID NO: 62490 - RNA, 21 nt, synthetic construct
  source 1..21: mol_type = other RNA
aaagtcactgtggaaaacagt

SEQ ID NO: 62491 - RNA, 21 nt, synthetic construct
  source 1..21: mol_type = other RNA
aaagtcagaggagcagttact

SEQ ID NO: 62492 - RNA, 21 nt, synthetic construct
  source 1..21: mol_type = other RNA
aaagtcagctaggcgtagtat

SEQ ID NO: 62493 - RNA, 21 nt, synthetic construct
  source 1..21: mol_type = other RNA
aaagtcagtaaaaaaggacca

SEQ ID NO: 62494 - RNA, 21 nt, synthetic construct
  source 1..21: mol_type = other RNA
aaagtcatgacctgctttctt

SEQ ID NO: 62495 - RNA, 21 nt, synthetic construct
  source 1..21: mol_type = other RNA
aaagtcattgaaactcaatgt

SEQ ID NO: 62496 - RNA, 21 nt, synthetic construct
  source 1..21: mol_type = other RNA
aaagtccacagatctttttgt

SEQ ID NO: 62497 - RNA, 21 nt, synthetic construct
  source 1..21: mol_type = other RNA
aaagtccccacatgactggcc

SEQ ID NO: 62498 - RNA, 21 nt, synthetic construct
  source 1..21: mol_type = other RNA
aaagtcccctgtaattacata

SEQ ID NO: 62499 - RNA, 21 nt, synthetic construct
  source 1..21: mol_type = other RNA
aaagtcctgttcttttgtaat

SEQ ID NO: 62500 - RNA, 21 nt, synthetic construct
  source 1..21: mol_type = other RNA
aaagtctatgctcttggtttc

SEQ ID NO: 62501 - RNA, 21 nt, synthetic construct
  source 1..21: mol_type = other RNA
aaagtctccctaaccaggccc

SEQ ID NO: 62502 - RNA, 21 nt, synthetic construct
  source 1..21: mol_type = other RNA
aaagtcttccattttagatca

SEQ ID NO: 62503 - RNA, 21 nt, synthetic construct
  source 1..21: mol_type = other RNA
aaagtcttgctggaagttggc

SEQ ID NO: 62504 - RNA, 21 nt, synthetic construct
  source 1..21: mol_type = other RNA
aaagtctttgggtaatttatc

SEQ ID NO: 62505 - RNA, 21 nt, synthetic construct
  source 1..21: mol_type = other RNA
aaagtgaaaactaaggtcaag

SEQ ID NO: 62506 - RNA, 21 nt, synthetic construct
  source 1..21: mol_type = other RNA
aaagtgaaaggcaaaggaaaa

SEQ ID NO: 62507 - RNA, 21 nt, synthetic construct
  source 1..21: mol_type = other RNA
aaagtgaagcccagagaggct

SEQ ID NO: 62508 - RNA, 21 nt, synthetic construct
  source 1..21: mol_type = other RNA
aaagtgaatcactacagcata

SEQ ID NO: 62509 - RNA, 21 nt, synthetic construct
  source 1..21: mol_type = other RNA
aaagtgacagatgagaaatac

SEQ ID NO: 62510 - RNA, 21 nt, synthetic construct
  source 1..21: mol_type = other RNA
aaagtgacttctggatgtgta

SEQ ID NO: 62511 - RNA, 21 nt, synthetic construct
  source 1..21: mol_type = other RNA
aaagtgagcagaaggaggaaa

SEQ ID NO: 62512 - RNA, 21 nt, synthetic construct
  source 1..21: mol_type = other RNA
aaagtgataccataaagtcag

SEQ ID NO: 62513 - RNA, 21 nt, synthetic construct
  source 1..21: mol_type = other RNA
aaagtgccagccacccttgct

SEQ ID NO: 62514 - RNA, 21 nt, synthetic construct
  source 1..21: mol_type = other RNA
aaagtgctctaccctttccaa

SEQ ID NO: 62515 - RNA, 21 nt, synthetic construct
  source 1..21: mol_type = other RNA
aaagtgctgcagtatgcatag

SEQ ID NO: 62516 - RNA, 21 nt, synthetic construct
  source 1..21: mol_type = other RNA
aaagtgctgttgaggctgggc

SEQ ID NO: 62517 - RNA, 21 nt, synthetic construct
  source 1..21: mol_type = other RNA
aaagtgcttctagtaacttgg

SEQ ID NO: 62518 - RNA, 21 nt, synthetic construct
  source 1..21: mol_type = other RNA
aaagtggactatgtaggcaca

SEQ ID NO: 62519 - RNA, 21 nt, synthetic construct
  source 1..21: mol_type = other RNA
aaagtgtaaagtttctctctc

SEQ ID NO: 62520 - RNA, 21 nt, synthetic construct
  source 1..21: mol_type = other RNA
aaagtgtgaccacattcccaa

SEQ ID NO: 62521 - RNA, 21 nt, synthetic construct
  source 1..21: mol_type = other RNA
aaagtgtgcttgggctccctt

SEQ ID NO: 62522 - RNA, 21 nt, synthetic construct
  source 1..21: mol_type = other RNA
aaagtgttgactaccatctct

SEQ ID NO: 62523 - RNA, 21 nt, synthetic construct
  source 1..21: mol_type = other RNA
aaagtgtttgtcacatagaag

SEQ ID NO: 62524 - RNA, 21 nt, synthetic construct
  source 1..21: mol_type = other RNA
aaagttaaacttttgtgcatc

SEQ ID NO: 62525 - RNA, 21 nt, synthetic construct
  source 1..21: mol_type = other RNA
aaagttaatagcctcctaagt

SEQ ID NO: 62526 - RNA, 21 nt, synthetic construct
  source 1..21: mol_type = other RNA
aaagttaatattgtaggtgtc

SEQ ID NO: 62527 - RNA, 21 nt, synthetic construct
  source 1..21: mol_type = other RNA
aaagttacaaggattgaatgg

SEQ ID NO: 62528 - RNA, 21 nt, synthetic construct
  source 1..21: mol_type = other RNA
aaagttagaagtatcccagat

SEQ ID NO: 62529 - RNA, 21 nt, synthetic construct
  source 1..21: mol_type = other RNA
aaagttagctggcaaaatgga

SEQ ID NO: 62530 - RNA, 21 nt, synthetic construct
  source 1..21: mol_type = other RNA
aaagttagtgaagcagagaga

SEQ ID NO: 62531 - RNA, 21 nt, synthetic construct
  source 1..21: mol_type = other RNA
aaagttagtgtctaatgggta

SEQ ID NO: 62532 - RNA, 21 nt, synthetic construct
  source 1..21: mol_type = other RNA
aaagttcaaatgaggctttta

SEQ ID NO: 62533 - RNA, 21 nt, synthetic construct
  source 1..21: mol_type = other RNA
aaagttcagaataccagagat

SEQ ID NO: 62534 - RNA, 21 nt, synthetic construct
  source 1..21: mol_type = other RNA
aaagttccaagattttcccaa

SEQ ID NO: 62535 - RNA, 21 nt, synthetic construct
  source 1..21: mol_type = other RNA
aaagttccccattgacaatat

SEQ ID NO: 62536 - RNA, 21 nt, synthetic construct
  source 1..21: mol_type = other RNA
aaagttgaggttgaagacctg

SEQ ID NO: 62537 - RNA, 21 nt, synthetic construct
  source 1..21: mol_type = other RNA
aaagttgggcttggttggaaa

SEQ ID NO: 62538 - RNA, 21 nt, synthetic construct
  source 1..21: mol_type = other RNA
aaagttggtcctgcatatgtt

SEQ ID NO: 62539 - RNA, 21 nt, synthetic construct
  source 1..21: mol_type = other RNA
aaagtttcaaactgtggtcac

SEQ ID NO: 62540 - RNA, 21 nt, synthetic construct
  source 1..21: mol_type = other RNA
aaagtttccgttttgcaagat

SEQ ID NO: 62541 - RNA, 21 nt, synthetic construct
  source 1..21: mol_type = other RNA
aaagtttcctacatactgcac

SEQ ID NO: 62542 - RNA, 21 nt, synthetic construct
  source 1..21: mol_type = other RNA
aaagtttctctctccctgccc

SEQ ID NO: 62543 - RNA, 21 nt, synthetic construct
  source 1..21: mol_type = other RNA
aaagttttccaaccactgaat

SEQ ID NO: 62544 - RNA, 21 nt, synthetic construct
  source 1..21: mol_type = other RNA
aaagttttgcagttggggact

SEQ ID NO: 62545 - RNA, 21 nt, synthetic construct
  source 1..21: mol_type = other RNA
aaagttttttcctttgccttt

SEQ ID NO: 62546 - RNA, 21 nt, synthetic construct
  source 1..21: mol_type = other RNA
aaataaaaagtatcgtgagac

SEQ ID NO: 62547 - RNA, 21 nt, synthetic construct
  source 1..21: mol_type = other RNA
aaataaaacacaaggacaggt

SEQ ID NO: 62548 - RNA, 21 nt, synthetic construct
  source 1..21: mol_type = other RNA
aaataaaacacatgtcatggg

SEQ ID NO: 62549 - RNA, 21 nt, synthetic construct
  source 1..21: mol_type = other RNA
aaataaaacatggccagtatc

SEQ ID NO: 62550 - RNA, 21 nt, synthetic construct
  source 1..21: mol_type = other RNA
aaataaaatgtctggccgggc

SEQ ID NO: 62551 - RNA, 21 nt, synthetic construct
  source 1..21: mol_type = other RNA
aaataaacattttccctcctt

SEQ ID NO: 62552 - RNA, 21 nt, synthetic construct
  source 1..21: mol_type = other RNA
aaataaaccaagtttggttca

SEQ ID NO: 62553 - RNA, 21 nt, synthetic construct
  source 1..21: mol_type = other RNA
aaataaacgacaccagaacta

SEQ ID NO: 62554 - RNA, 21 nt, synthetic construct
  source 1..21: mol_type = other RNA
aaataaagacttcacgatgct

SEQ ID NO: 62555 - RNA, 21 nt, synthetic construct
  source 1..21: mol_type = other RNA
aaataaaggctttcgtatgga

SEQ ID NO: 62556 - RNA, 21 nt, synthetic construct
  source 1..21: mol_type = other RNA
aaataaagttccccattgaca

SEQ ID NO: 62557 - RNA, 21 nt, synthetic construct
  source 1..21: mol_type = other RNA
aaataaatcctcacatgtttg

SEQ ID NO: 62558 - RNA, 21 nt, synthetic construct
  source 1..21: mol_type = other RNA
aaataaatctaagtctcaacc

SEQ ID NO: 62559 - RNA, 21 nt, synthetic construct
  source 1..21: mol_type = other RNA
aaataacaccatagctgaagg

SEQ ID NO: 62560 - RNA, 21 nt, synthetic construct
  source 1..21: mol_type = other RNA
aaataacacgcagaaccactg

SEQ ID NO: 62561 - RNA, 21 nt, synthetic construct
  source 1..21: mol_type = other RNA
aaataacgggccgggcgctgt

SEQ ID NO: 62562 - RNA, 21 nt, synthetic construct
  source 1..21: mol_type = other RNA
aaataacttccatgagattac

SEQ ID NO: 62563 - RNA, 21 nt, synthetic construct
  source 1..21: mol_type = other RNA
aaataactttaatcaccaggc

SEQ ID NO: 62564 - RNA, 21 nt, synthetic construct
  source 1..21: mol_type = other RNA
aaataagaagattgagtcagt

SEQ ID NO: 62565 - RNA, 21 nt, synthetic construct
  source 1..21: mol_type = other RNA
aaataagaaggtttgtagagc

SEQ ID NO: 62566 - RNA, 21 nt, synthetic construct
  source 1..21: mol_type = other RNA
aaataagggcattttcaaggt

SEQ ID NO: 62567 - RNA, 21 nt, synthetic construct
  source 1..21: mol_type = other RNA
aaataaggtcacattcagagg

SEQ ID NO: 62568 - RNA, 21 nt, synthetic construct
  source 1..21: mol_type = other RNA
aaataagtttcatggacttcc

SEQ ID NO: 62569 - RNA, 21 nt, synthetic construct
  source 1..21: mol_type = other RNA
aaataatacctaacagccggc

SEQ ID NO: 62570 - RNA, 21 nt, synthetic construct
  source 1..21: mol_type = other RNA
aaataatagctatcctaatgg

SEQ ID NO: 62571 - RNA, 21 nt, synthetic construct
  source 1..21: mol_type = other RNA
aaataatcattgttaggtgct

SEQ ID NO: 62572 - RNA, 21 nt, synthetic construct
  source 1..21: mol_type = other RNA
aaataatcccgcaccttgatt

SEQ ID NO: 62573 - RNA, 21 nt, synthetic construct
  source 1..21: mol_type = other RNA
aaataatgttttccgtgtgac

SEQ ID NO: 62574 - RNA, 21 nt, synthetic construct
  source 1..21: mol_type = other RNA
aaataattgctgcagtttttc

SEQ ID NO: 62575 - RNA, 21 nt, synthetic construct
  source 1..21: mol_type = other RNA
aaatacaacagcacctttttt

SEQ ID NO: 62576 - RNA, 21 nt, synthetic construct
  source 1..21: mol_type = other RNA
aaatacaatgtgagccacata

SEQ ID NO: 62577 - RNA, 21 nt, synthetic construct
  source 1..21: mol_type = other RNA
aaatacacatgttgagtcttg

SEQ ID NO: 62578 - RNA, 21 nt, synthetic construct
  source 1..21: mol_type = other RNA
aaatacaccaaactcaaaagg

SEQ ID NO: 62579 - RNA, 21 nt, synthetic construct
  source 1..21: mol_type = other RNA
aaatacagaccgatggaacag

SEQ ID NO: 62580 - RNA, 21 nt, synthetic construct
  source 1..21: mol_type = other RNA
aaatacagagcacagactcaa

SEQ ID NO: 62581 - RNA, 21 nt, synthetic construct
  source 1..21: mol_type = other RNA
aaatacagctccaaagaacag

SEQ ID NO: 62582 - RNA, 21 nt, synthetic construct
  source 1..21: mol_type = other RNA
aaatacagttttgaccaaaac

SEQ ID NO: 62583 - RNA, 21 nt, synthetic construct
  source 1..21: mol_type = other RNA
aaatacatgaggcctctcccc

SEQ ID NO: 62584 - RNA, 21 nt, synthetic construct
  source 1..21: mol_type = other RNA
aaatacatgtcatgttcccgg

SEQ ID NO: 62585 - RNA, 21 nt, synthetic construct
  source 1..21: mol_type = other RNA
aaataccaaaaaaggtgctgt

SEQ ID NO: 62586 - RNA, 21 nt, synthetic construct
  source 1..21: mol_type = other RNA
aaataccacctgaaatctgat

SEQ ID NO: 62587 - RNA, 21 nt, synthetic construct
  source 1..21: mol_type = other RNA
aaataccagaggttaaagcaa

SEQ ID NO: 62588 - RNA, 21 nt, synthetic construct
  source 1..21: mol_type = other RNA
aaatacccacaagaaaaacct

SEQ ID NO: 62589 - RNA, 21 nt, synthetic construct
  source 1..21: mol_type = other RNA
aaatacctagttttccaatcc

SEQ ID NO: 62590 - RNA, 21 nt, synthetic construct
  source 1..21: mol_type = other RNA
aaatacctctgaatgtgacct

SEQ ID NO: 62591 - RNA, 21 nt, synthetic construct
  source 1..21: mol_type = other RNA
aaatacctgcaggttgatact

SEQ ID NO: 62592 - RNA, 21 nt, synthetic construct
  source 1..21: mol_type = other RNA
aaatacgaaagtgctctaccc

SEQ ID NO: 62593 - RNA, 21 nt, synthetic construct
  source 1..21: mol_type = other RNA
aaatacggccgggagtggtgg

SEQ ID NO: 62594 - RNA, 21 nt, synthetic construct
  source 1..21: mol_type = other RNA
aaatacgtatatgaaaagccc

SEQ ID NO: 62595 - RNA, 21 nt, synthetic construct
  source 1..21: mol_type = other RNA
aaatacgtgtatactgggtgt

SEQ ID NO: 62596 - RNA, 21 nt, synthetic construct
  source 1..21: mol_type = other RNA
aaatactaacgatccttacta

SEQ ID NO: 62597 - RNA, 21 nt, synthetic construct
  source 1..21: mol_type = other RNA
aaatactacaagagttcccct

SEQ ID NO: 62598 - RNA, 21 nt, synthetic construct
  source 1..21: mol_type = other RNA
aaatactagcaaactgaatca

SEQ ID NO: 62599 - RNA, 21 nt, synthetic construct
  source 1..21: mol_type = other RNA
aaatactcaagggctttcaat

SEQ ID NO: 62600 - RNA, 21 nt, synthetic construct
  source 1..21: mol_type = other RNA
aaatacttaagagcatgttgg

SEQ ID NO: 62601 - RNA, 21 nt, synthetic construct
  source 1..21: mol_type = other RNA
aaatacttgaacattctgtag

SEQ ID NO: 62602 - RNA, 21 nt, synthetic construct
  source 1..21: mol_type = other RNA
aaatacttggacaggggacat

SEQ ID NO: 62603 - RNA, 21 nt, synthetic construct
  source 1..21: mol_type = other RNA
aaatagaaaacttgagcagat

SEQ ID NO: 62604 - RNA, 21 nt, synthetic construct
  source 1..21: mol_type = other RNA
aaatagaactgtcacaattca

SEQ ID NO: 62605 - RNA, 21 nt, synthetic construct
  source 1..21: mol_type = other RNA
aaatagactcccaacttataa

SEQ ID NO: 62606 - RNA, 21 nt, synthetic construct
  source 1..21: mol_type = other RNA
aaatagaggatgggcattcca

SEQ ID NO: 62607 - RNA, 21 nt, synthetic construct
  source 1..21: mol_type = other RNA
aaatagagttccatctgttat

SEQ ID NO: 62608 - RNA, 21 nt, synthetic construct
  source 1..21: mol_type = other RNA
aaatagataaggttgttcttg

SEQ ID NO: 62609 - RNA, 21 nt, synthetic construct
  source 1..21: mol_type = other RNA
aaatagatgcctagaaaggaa

SEQ ID NO: 62610 - RNA, 21 nt, synthetic construct
  source 1..21: mol_type = other RNA
aaatagcaggattcttgttaa

SEQ ID NO: 62611 - RNA, 21 nt, synthetic construct
  source 1..21: mol_type = other RNA
aaataggaagtccatgaaact

SEQ ID NO: 62612 - RNA, 21 nt, synthetic construct
  source 1..21: mol_type = other RNA
aaataggattaagacactaca

SEQ ID NO: 62613 - RNA, 21 nt, synthetic construct
  source 1..21: mol_type = other RNA
aaataggcagtcctctacttt

SEQ ID NO: 62614 - RNA, 21 nt, synthetic construct
  source 1..21: mol_type = other RNA
aaataggcctaggtgtgataa

SEQ ID NO: 62615 - RNA, 21 nt, synthetic construct
  source 1..21: mol_type = other RNA
aaatagggacggccttctttt

SEQ ID NO: 62616 - RNA, 21 nt, synthetic construct
  source 1..21: mol_type = other RNA
aaatagggtgctactcaaagt

SEQ ID NO: 62617 - RNA, 21 nt, synthetic construct
  source 1..21: mol_type = other RNA
aaataggtattcatgctgtga

SEQ ID NO: 62618 - RNA, 21 nt, synthetic construct
  source 1..21: mol_type = other RNA
aaatagtagttgctcagaaaa

SEQ ID NO: 62619 - RNA, 21 nt, synthetic construct
  source 1..21: mol_type = other RNA
aaatagtcaagtaacagttca

SEQ ID NO: 62620 - RNA, 21 nt, synthetic construct
  source 1..21: mol_type = other RNA
aaatagttggtcagaaaaatg

SEQ ID NO: 62621 - RNA, 21 nt, synthetic construct
  source 1..21: mol_type = other RNA
aaatataaaaagcctctgtgg

SEQ ID NO: 62622 - RNA, 21 nt, synthetic construct
  source 1..21: mol_type = other RNA
aaatatactgactagtggctc

SEQ ID NO: 62623 - RNA, 21 nt, synthetic construct
  source 1..21: mol_type = other RNA
aaatatagaaggccagaggga

SEQ ID NO: 62624 - RNA, 21 nt, synthetic construct
  source 1..21: mol_type = other RNA
aaatatatacggaatgattcc

SEQ ID NO: 62625 - RNA, 21 nt, synthetic construct
  source 1..21: mol_type = other RNA
aaatatattctaaacctgagg

SEQ ID NO: 62626 - RNA, 21 nt, synthetic construct
  source 1..21: mol_type = other RNA
aaatatccaatcactggctag

SEQ ID NO: 62627 - RNA, 21 nt, synthetic construct
  source 1..21: mol_type = other RNA
aaatatccctggggtttcctt

SEQ ID NO: 62628 - RNA, 21 nt, synthetic construct
  source 1..21: mol_type = other RNA
aaatatccgaaagaactgaaa

SEQ ID NO: 62629 - RNA, 21 nt, synthetic construct
  source 1..21: mol_type = other RNA
aaatatctccctcacagtcca

SEQ ID NO: 62630 - RNA, 21 nt, synthetic construct
  source 1..21: mol_type = other RNA
aaatatgaaccacactgacag

SEQ ID NO: 62631 - RNA, 21 nt, synthetic construct
  source 1..21: mol_type = other RNA
aaatatggtcactgctgatgt

SEQ ID NO: 62632 - RNA, 21 nt, synthetic construct
  source 1..21: mol_type = other RNA
aaatatgtaatgacctggaaa

SEQ ID NO: 62633 - RNA, 21 nt, synthetic construct
  source 1..21: mol_type = other RNA
aaatatgtccttttgagtttg

SEQ ID NO: 62634 - RNA, 21 nt, synthetic construct
  source 1..21: mol_type = other RNA
aaatattccatttttctgacc

SEQ ID NO: 62635 - RNA, 21 nt, synthetic construct
  source 1..21: mol_type = other RNA
aaatattgaagagggaacatt

SEQ ID NO: 62636 - RNA, 21 nt, synthetic construct
  source 1..21: mol_type = other RNA
aaatatttaacaccatggcag

SEQ ID NO: 62637 - RNA, 21 nt, synthetic construct
  source 1..21: mol_type = other RNA
aaatcaaaacaataagacacc

SEQ ID NO: 62638 - RNA, 21 nt, synthetic construct
  source 1..21: mol_type = other RNA
aaatcaaagaaagagttgggt

SEQ ID NO: 62639 - RNA, 21 nt, synthetic construct
  source 1..21: mol_type = other RNA
aaatcaacagtgtactagtct

SEQ ID NO: 62640 - RNA, 21 nt, synthetic construct
  source 1..21: mol_type = other RNA
aaatcaacattgcctccatat

SEQ ID NO: 62641 - RNA, 21 nt, synthetic construct
  source 1..21: mol_type = other RNA
aaatcaacccatgaaaattga

SEQ ID NO: 62642 - RNA, 21 nt, synthetic construct
  source 1..21: mol_type = other RNA
aaatcaaccccatcaacaagt

SEQ ID NO: 62643 - RNA, 21 nt, synthetic construct
  source 1..21: mol_type = other RNA
aaatcaaggtacaatacacta

SEQ ID NO: 62644 - RNA, 21 nt, synthetic construct
  source 1..21: mol_type = other RNA
aaatcaaggtgcgggattatt

SEQ ID NO: 62645 - RNA, 21 nt, synthetic construct
  source 1..21: mol_type = other RNA
aaatcaatctgtttcctaatc

SEQ ID NO: 62646 - RNA, 21 nt, synthetic construct
  source 1..21: mol_type = other RNA
aaatcacacaatcttgagacg

SEQ ID NO: 62647 - RNA, 21 nt, synthetic construct
  source 1..21: mol_type = other RNA
aaatcacaggaaagatgtctt

SEQ ID NO: 62648 - RNA, 21 nt, synthetic construct
  source 1..21: mol_type = other RNA
aaatcacaggtttaggttttt

SEQ ID NO: 62649 - RNA, 21 nt, synthetic construct
  source 1..21: mol_type = other RNA
aaatcagaaaaggctgagacc

SEQ ID NO: 62650 - RNA, 21 nt, synthetic construct
  source 1..21: mol_type = other RNA
aaatcagaaactgacaggact

SEQ ID NO: 62651 - RNA, 21 nt, synthetic construct
  source 1..21: mol_type = other RNA
aaatcagaacttgacaagtat

SEQ ID NO: 62652 - RNA, 21 nt, synthetic construct
  source 1..21: mol_type = other RNA
aaatcagactgtattaccagc

SEQ ID NO: 62653 - RNA, 21 nt, synthetic construct
  source 1..21: mol_type = other RNA
aaatcagatatgaaagaggag

SEQ ID NO: 62654 - RNA, 21 nt, synthetic construct
  source 1..21: mol_type = other RNA
aaatcagatttcaggtggtat

SEQ ID NO: 62655 - RNA, 21 nt, synthetic construct
  source 1..21: mol_type = other RNA
aaatcagcaccatctaacaga

SEQ ID NO: 62656 - RNA, 21 nt, synthetic construct
  source 1..21: mol_type = other RNA
aaatcaggaagtatgagtctt

SEQ ID NO: 62657 - RNA, 21 nt, synthetic construct
  source 1..21: mol_type = other RNA
aaatcaggatgtctttgggaa

SEQ ID NO: 62658 - RNA, 21 nt, synthetic construct
  source 1..21: mol_type = other RNA
aaatcagggcctttaatcacc

SEQ ID NO: 62659 - RNA, 21 nt, synthetic construct
  source 1..21: mol_type = other RNA
aaatcatacacgagtgtgttt

SEQ ID NO: 62660 - RNA, 21 nt, synthetic construct
  source 1..21: mol_type = other RNA
aaatcatcacagtatgcacaa

SEQ ID NO: 62661 - RNA, 21 nt, synthetic construct
  source 1..21: mol_type = other RNA
aaatcatgaaagtggagaatt

SEQ ID NO: 62662 - RNA, 21 nt, synthetic construct
  source 1..21: mol_type = other RNA
aaatcatgatgtttggctcct

SEQ ID NO: 62663 - RNA, 21 nt, synthetic construct
  source 1..21: mol_type = other RNA
aaatcattcaggacactggag

SEQ ID NO: 62664 - RNA, 21 nt, synthetic construct
  source 1..21: mol_type = other RNA
aaatcattgtagctatatccc

SEQ ID NO: 62665 - RNA, 21 nt, synthetic construct
  source 1..21: mol_type = other RNA
aaatcattgttcagggaaggc

SEQ ID NO: 62666 - RNA, 21 nt, synthetic construct
  source 1..21: mol_type = other RNA
aaatcattttggcaaattgtc

SEQ ID NO: 62667 - RNA, 21 nt, synthetic construct
  source 1..21: mol_type = other RNA
aaatccaaaagcctcaaaatt

SEQ ID NO: 62668 - RNA, 21 nt, synthetic construct
  source 1..21: mol_type = other RNA
aaatccaaattcacagcatga

SEQ ID NO: 62669 - RNA, 21 nt, synthetic construct
  source 1..21: mol_type = other RNA
aaatccaacgaccggacgtgg

SEQ ID NO: 62670 - RNA, 21 nt, synthetic construct
  source 1..21: mol_type = other RNA
aaatccaagaagacatgataa

SEQ ID NO: 62671 - RNA, 21 nt, synthetic construct
  source 1..21: mol_type = other RNA
aaatccaggatggcatgaaat

SEQ ID NO: 62672 - RNA, 21 nt, synthetic construct
  source 1..21: mol_type = other RNA
aaatccagtcttcaggtctct

SEQ ID NO: 62673 - RNA, 21 nt, synthetic construct
  source 1..21: mol_type = other RNA
aaatcccacttgatccaggtg

SEQ ID NO: 62674 - RNA, 21 nt, synthetic construct
  source 1..21: mol_type = other RNA
aaatcccatttgtaacatgtt

SEQ ID NO: 62675 - RNA, 21 nt, synthetic construct
  source 1..21: mol_type = other RNA
aaatcccctttagtgttctgt

SEQ ID NO: 62676 - RNA, 21 nt, synthetic construct
  source 1..21: mol_type = other RNA
aaatccctgatcaagttgctt

SEQ ID NO: 62677 - RNA, 21 nt, synthetic construct
  source 1..21: mol_type = other RNA
aaatccgagacaagttctcct

SEQ ID NO: 62678 - RNA, 21 nt, synthetic construct
  source 1..21: mol_type = other RNA
aaatcctagccccaaatacct

SEQ ID NO: 62679 - RNA, 21 nt, synthetic construct
  source 1..21: mol_type = other RNA
aaatcctcacatgtttggtca

SEQ ID NO: 62680 - RNA, 21 nt, synthetic construct
  source 1..21: mol_type = other RNA
aaatcctctgtagataaacgt

SEQ ID NO: 62681 - RNA, 21 nt, synthetic construct
  source 1..21: mol_type = other RNA
aaatcctgctgggctattgtt

SEQ ID NO: 62682 - RNA, 21 nt, synthetic construct
  source 1..21: mol_type = other RNA
aaatccttacttccagctcac

SEQ ID NO: 62683 - RNA, 21 nt, synthetic construct
  source 1..21: mol_type = other RNA
aaatccttttcccaggagcta

SEQ ID NO: 62684 - RNA, 21 nt, synthetic construct
  source 1..21: mol_type = other RNA
aaatcggaacaggctcaatac

SEQ ID NO: 62685 - RNA, 21 nt, synthetic construct
  source 1..21: mol_type = other RNA
aaatcggaactcctgtatgcc

SEQ ID NO: 62686 - RNA, 21 nt, synthetic construct
  source 1..21: mol_type = other RNA
aaatcgggagtaacagacctc

SEQ ID NO: 62687 - RNA, 21 nt, synthetic construct
  source 1..21: mol_type = other RNA
aaatcgtcctcttcgggtgtc

SEQ ID NO: 62688 - RNA, 21 nt, synthetic construct
  source 1..21: mol_type = other RNA
aaatctaaagccaatcttccc

SEQ ID NO: 62689 - RNA, 21 nt, synthetic construct
  source 1..21: mol_type = other RNA
aaatctaaccctcaatcccca

SEQ ID NO: 62690 - RNA, 21 nt, synthetic construct
  source 1..21: mol_type = other RNA
aaatctaagtctcaacctact

SEQ ID NO: 62691 - RNA, 21 nt, synthetic construct
  source 1..21: mol_type = other RNA
aaatctaataaaaagcctctc

SEQ ID NO: 62692 - RNA, 21 nt, synthetic construct
  source 1..21: mol_type = other RNA
aaatctaccaaacattgaagg

SEQ ID NO: 62693 - RNA, 21 nt, synthetic construct
  source 1..21: mol_type = other RNA
aaatctaggcatataataagc

SEQ ID NO: 62694 - RNA, 21 nt, synthetic construct
  source 1..21: mol_type = other RNA
aaatctaggttatctgttttc

SEQ ID NO: 62695 - RNA, 21 nt, synthetic construct
  source 1..21: mol_type = other RNA
aaatctctacagggaaccgta

SEQ ID NO: 62696 - RNA, 21 nt, synthetic construct
  source 1..21: mol_type = other RNA
aaatctctagaacttatgcat

SEQ ID NO: 62697 - RNA, 21 nt, synthetic construct
  source 1..21: mol_type = other RNA
aaatctctgacttcattcttg

SEQ ID NO: 62698 - RNA, 21 nt, synthetic construct
  source 1..21: mol_type = other RNA
aaatctgacaatttgccaaaa

SEQ ID NO: 62699 - RNA, 21 nt, synthetic construct
  source 1..21: mol_type = other RNA
aaatctgatgtgtatgttaca

SEQ ID NO: 62700 - RNA, 21 nt, synthetic construct
  source 1..21: mol_type = other RNA
aaatctgattcagtggttgga

SEQ ID NO: 62701 - RNA, 21 nt, synthetic construct
  source 1..21: mol_type = other RNA
aaatctgatttgtttagtagc

SEQ ID NO: 62702 - RNA, 21 nt, synthetic construct
  source 1..21: mol_type = other RNA
aaatctgcatccaaaagggaa

SEQ ID NO: 62703 - RNA, 21 nt, synthetic construct
  source 1..21: mol_type = other RNA
aaatctggctgcagggcttct

SEQ ID NO: 62704 - RNA, 21 nt, synthetic construct
  source 1..21: mol_type = other RNA
aaatctgtatgagaagactgg

SEQ ID NO: 62705 - RNA, 21 nt, synthetic construct
  source 1..21: mol_type = other RNA
aaatcttattccccagggaaa

SEQ ID NO: 62706 - RNA, 21 nt, synthetic construct
  source 1..21: mol_type = other RNA
aaatcttcaaaatctgatgtg

SEQ ID NO: 62707 - RNA, 21 nt, synthetic construct
  source 1..21: mol_type = other RNA
aaatcttccagaaggagaaaa

SEQ ID NO: 62708 - RNA, 21 nt, synthetic construct
  source 1..21: mol_type = other RNA
aaatcttgaagatggcaaaca

SEQ ID NO: 62709 - RNA, 21 nt, synthetic construct
  source 1..21: mol_type = other RNA
aaatctttagtgttgcttggt

SEQ ID NO: 62710 - RNA, 21 nt, synthetic construct
  source 1..21: mol_type = other RNA
aaatctttggtgaaggttcat

SEQ ID NO: 62711 - RNA, 21 nt, synthetic construct
  source 1..21: mol_type = other RNA
aaatgaaaaattcactcctca

SEQ ID NO: 62712 - RNA, 21 nt, synthetic construct
  source 1..21: mol_type = other RNA
aaatgaaaatgttccctcttc

SEQ ID NO: 62713 - RNA, 21 nt, synthetic construct
  source 1..21: mol_type = other RNA
aaatgaaacacttgtgtaact

SEQ ID NO: 62714 - RNA, 21 nt, synthetic construct
  source 1..21: mol_type = other RNA
aaatgaaaggcgtcggggctg

SEQ ID NO: 62715 - RNA, 21 nt, synthetic construct
  source 1..21: mol_type = other RNA
aaatgaaatggcccttaactt

SEQ ID NO: 62716 - RNA, 21 nt, synthetic construct
  source 1..21: mol_type = other RNA
aaatgaaatttgaggccctat

SEQ ID NO: 62717 - RNA, 21 nt, synthetic construct
  source 1..21: mol_type = other RNA
aaatgaacaggttcttcatca

SEQ ID NO: 62718 - RNA, 21 nt, synthetic construct
  source 1..21: mol_type = other RNA
aaatgaaccaaacttggttta

SEQ ID NO: 62719 - RNA, 21 nt, synthetic construct
  source 1..21: mol_type = other RNA
aaatgaacctgctttctacta

SEQ ID NO: 62720 - RNA, 21 nt, synthetic construct
  source 1..21: mol_type = other RNA
aaatgaagaaaatccaagaag

SEQ ID NO: 62721 - RNA, 21 nt, synthetic construct
  source 1..21: mol_type = other RNA
aaatgaagatggcctccctca

SEQ ID NO: 62722 - RNA, 21 nt, synthetic construct
  source 1..21: mol_type = other RNA
aaatgaaggaaaaaacgggtt

SEQ ID NO: 62723 - RNA, 21 nt, synthetic construct
  source 1..21: mol_type = other RNA
aaatgaagtattgatttgacc

SEQ ID NO: 62724 - RNA, 21 nt, synthetic construct
  source 1..21: mol_type = other RNA
aaatgaatattcgttccagca

SEQ ID NO: 62725 - RNA, 21 nt, synthetic construct
  source 1..21: mol_type = other RNA
aaatgacaagtaaatgcaatg

SEQ ID NO: 62726 - RNA, 21 nt, synthetic construct
  source 1..21: mol_type = other RNA
aaatgacacaacttactacta

SEQ ID NO: 62727 - RNA, 21 nt, synthetic construct
  source 1..21: mol_type = other RNA
aaatgacaccaaaactacagg

SEQ ID NO: 62728 - RNA, 21 nt, synthetic construct
  source 1..21: mol_type = other RNA
aaatgagaaacctaagaaagg

SEQ ID NO: 62729 - RNA, 21 nt, synthetic construct
  source 1..21: mol_type = other RNA
aaatgagacacctacaatatt

SEQ ID NO: 62730 - RNA, 21 nt, synthetic construct
  source 1..21: mol_type = other RNA
aaatgagccaggcatggtggt

SEQ ID NO: 62731 - RNA, 21 nt, synthetic construct
  source 1..21: mol_type = other RNA
aaatgaggcttttattggtaa

SEQ ID NO: 62732 - RNA, 21 nt, synthetic construct
  source 1..21: mol_type = other RNA
aaatgagggtaaaatagtcaa

SEQ ID NO: 62733 - RNA, 21 nt, synthetic construct
  source 1..21: mol_type = other RNA
aaatgaggtatcatttccaag

SEQ ID NO: 62734 - RNA, 21 nt, synthetic construct
  source 1..21: mol_type = other RNA
aaatgaggttgcttttacttg

SEQ ID NO: 62735 - RNA, 21 nt, synthetic construct
  source 1..21: mol_type = other RNA
aaatgagtgagccacagctac

SEQ ID NO: 62736 - RNA, 21 nt, synthetic construct
  source 1..21: mol_type = other RNA
aaatgagtgtatgcagggaaa

SEQ ID NO: 62737 - RNA, 21 nt, synthetic construct
  source 1..21: mol_type = other RNA
aaatgagttccagtcctttgt

SEQ ID NO: 62738 - RNA, 21 nt, synthetic construct
  source 1..21: mol_type = other RNA
aaatgatagcattatcccaga

SEQ ID NO: 62739 - RNA, 21 nt, synthetic construct
  source 1..21: mol_type = other RNA
aaatgatctttcaaggggcct

SEQ ID NO: 62740 - RNA, 21 nt, synthetic construct
  source 1..21: mol_type = other RNA
aaatgatctttgaataaaggg

SEQ ID NO: 62741 - RNA, 21 nt, synthetic construct
  source 1..21: mol_type = other RNA
aaatgatgaagggttttctgt

SEQ ID NO: 62742 - RNA, 21 nt, synthetic construct
  source 1..21: mol_type = other RNA
aaatgatgagctactgcatgc

SEQ ID NO: 62743 - RNA, 21 nt, synthetic construct
  source 1..21: mol_type = other RNA
aaatgatggcaacaatcaaca

SEQ ID NO: 62744 - RNA, 21 nt, synthetic construct
  source 1..21: mol_type = other RNA
aaatgatttcaagtaacactc

SEQ ID NO: 62745 - RNA, 21 nt, synthetic construct
  source 1..21: mol_type = other RNA
aaatgattttcacagggcagg

SEQ ID NO: 62746 - RNA, 21 nt, synthetic construct
  source 1..21: mol_type = other RNA
aaatgcaatgcaggcgcctgg

SEQ ID NO: 62747 - RNA, 21 nt, synthetic construct
  source 1..21: mol_type = other RNA
aaatgcaccaacacctgcagt

SEQ ID NO: 62748 - RNA, 21 nt, synthetic construct
  source 1..21: mol_type = other RNA
aaatgcacttagcgctgatgt

SEQ ID NO: 62749 - RNA, 21 nt, synthetic construct
  source 1..21: mol_type = other RNA
aaatgcagaaaataaaccaag

SEQ ID NO: 62750 - RNA, 21 nt, synthetic construct
  source 1..21: mol_type = other RNA
aaatgcagtagtaaagcaaat

SEQ ID NO: 62751 - RNA, 21 nt, synthetic construct
  source 1..21: mol_type = other RNA
aaatgcataaacgacagcagg

SEQ ID NO: 62752 - RNA, 21 nt, synthetic construct
  source 1..21: mol_type = other RNA
aaatgccaatttgggatatag

SEQ ID NO: 62753 - RNA, 21 nt, synthetic construct
  source 1..21: mol_type = other RNA
aaatgccacataaatcacagg

SEQ ID NO: 62754 - RNA, 21 nt, synthetic construct
  source 1..21: mol_type = other RNA
aaatgccatagagctttaaag

SEQ ID NO: 62755 - RNA, 21 nt, synthetic construct
  source 1..21: mol_type = other RNA
aaatgcccttatttaatgtgc

SEQ ID NO: 62756 - RNA, 21 nt, synthetic construct
  source 1..21: mol_type = other RNA
aaatgcgcgtccgcgacccgg

SEQ ID NO: 62757 - RNA, 21 nt, synthetic construct
  source 1..21: mol_type = other RNA
aaatgctcacatttagtttca

SEQ ID NO: 62758 - RNA, 21 nt, synthetic construct
  source 1..21: mol_type = other RNA
aaatgctcagtgggttcaatt

SEQ ID NO: 62759 - RNA, 21 nt, synthetic construct
  source 1..21: mol_type = other RNA
aaatgctggaaattttcaagg

SEQ ID NO: 62760 - RNA, 21 nt, synthetic construct
  source 1..21: mol_type = other RNA
aaatgctgtaactgacttcaa

SEQ ID NO: 62761 - RNA, 21 nt, synthetic construct
  source 1..21: mol_type = other RNA
aaatgcttaacaagaatcctg

SEQ ID NO: 62762 - RNA, 21 nt, synthetic construct
  source 1..21: mol_type = other RNA
aaatgcttatgtcttgtggct

SEQ ID NO: 62763 - RNA, 21 nt, synthetic construct
  source 1..21: mol_type = other RNA
aaatgctttttctgcatcttt

SEQ ID NO: 62764 - RNA, 21 nt, synthetic construct
  source 1..21: mol_type = other RNA
aaatggaaccactgtaggccc

SEQ ID NO: 62765 - RNA, 21 nt, synthetic construct
  source 1..21: mol_type = other RNA
aaatggaagactttatggtaa

SEQ ID NO: 62766 - RNA, 21 nt, synthetic construct
  source 1..21: mol_type = other RNA
aaatggaagtgctgggctagg

SEQ ID NO: 62767 - RNA, 21 nt, synthetic construct
  source 1..21: mol_type = other RNA
aaatggacagcacattaaata

SEQ ID NO: 62768 - RNA, 21 nt, synthetic construct
  source 1..21: mol_type = other RNA
aaatggacagcggggatggtt

SEQ ID NO: 62769 - RNA, 21 nt, synthetic construct
  source 1..21: mol_type = other RNA
aaatggagacatctgagacat

SEQ ID NO: 62770 - RNA, 21 nt, synthetic construct
  source 1..21: mol_type = other RNA
aaatggagacccatactcagc

SEQ ID NO: 62771 - RNA, 21 nt, synthetic construct
  source 1..21: mol_type = other RNA
aaatggagggccagaggaggg

SEQ ID NO: 62772 - RNA, 21 nt, synthetic construct
  source 1..21: mol_type = other RNA
aaatggagtgacttaagcaac

SEQ ID NO: 62773 - RNA, 21 nt, synthetic construct
  source 1..21: mol_type = other RNA
aaatggatcaaagacctaagc

SEQ ID NO: 62774 - RNA, 21 nt, synthetic construct
  source 1..21: mol_type = other RNA
aaatggcacatactgcatatt

SEQ ID NO: 62775 - RNA, 21 nt, synthetic construct
  source 1..21: mol_type = other RNA
aaatggccaagagttgctgac

SEQ ID NO: 62776 - RNA, 21 nt, synthetic construct
  source 1..21: mol_type = other RNA
aaatggcccttaacttcacct

SEQ ID NO: 62777 - RNA, 21 nt, synthetic construct
  source 1..21: mol_type = other RNA
aaatggccttctttctttcaa

SEQ ID NO: 62778 - RNA, 21 nt, synthetic construct
  source 1..21: mol_type = other RNA
aaatggctttttacgatgaaa

SEQ ID NO: 62779 - RNA, 21 nt, synthetic construct
  source 1..21: mol_type = other RNA
aaatgggaaattagatgatgt

SEQ ID NO: 62780 - RNA, 21 nt, synthetic construct
  source 1..21: mol_type = other RNA
aaatgggagcatgcacacagg

SEQ ID NO: 62781 - RNA, 21 nt, synthetic construct
  source 1..21: mol_type = other RNA
aaatgggccaaagacttcaac

SEQ ID NO: 62782 - RNA, 21 nt, synthetic construct
  source 1..21: mol_type = other RNA
aaatggggatatccaaagata

SEQ ID NO: 62783 - RNA, 21 nt, synthetic construct
  source 1..21: mol_type = other RNA
aaatgggtttaaaagagtgca

SEQ ID NO: 62784 - RNA, 21 nt, synthetic construct
  source 1..21: mol_type = other RNA
aaatggtaacagccaaataaa

SEQ ID NO: 62785 - RNA, 21 nt, synthetic construct
  source 1..21: mol_type = other RNA
aaatggtagcttgggctaagg

SEQ ID NO: 62786 - RNA, 21 nt, synthetic construct
  source 1..21: mol_type = other RNA
aaatggtcaacatgaaaagat

SEQ ID NO: 62787 - RNA, 21 nt, synthetic construct
  source 1..21: mol_type = other RNA
aaatggtgcagccactataga

SEQ ID NO: 62788 - RNA, 21 nt, synthetic construct
  source 1..21: mol_type = other RNA
aaatggtgcaggccagatatc

SEQ ID NO: 62789 - RNA, 21 nt, synthetic construct
  source 1..21: mol_type = other RNA
aaatggtgtgaagttgggctt

SEQ ID NO: 62790 - RNA, 21 nt, synthetic construct
  source 1..21: mol_type = other RNA
aaatggtttaggctgtctcca

SEQ ID NO: 62791 - RNA, 21 nt, synthetic construct
  source 1..21: mol_type = other RNA
aaatggtttctccttctgcag

SEQ ID NO: 62792 - RNA, 21 nt, synthetic construct
  source 1..21: mol_type = other RNA
aaatggttttatggtaactcc

SEQ ID NO: 62793 - RNA, 21 nt, synthetic construct
  source 1..21: mol_type = other RNA
aaatgtaaaacatcaaagtcc

SEQ ID NO: 62794 - RNA, 21 nt, synthetic construct
  source 1..21: mol_type = other RNA
aaatgtaaattctgccacatt

SEQ ID NO: 62795 - RNA, 21 nt, synthetic construct
  source 1..21: mol_type = other RNA
aaatgtacaacattcatccct

SEQ ID NO: 62796 - RNA, 21 nt, synthetic construct
  source 1..21: mol_type = other RNA
aaatgtagatcaagtatttcc

SEQ ID NO: 62797 - RNA, 21 nt, synthetic construct
  source 1..21: mol_type = other RNA
aaatgtcaattttcccccaat

SEQ ID NO: 62798 - RNA, 21 nt, synthetic construct
  source 1..21: mol_type = other RNA
aaatgtcatcttctctctctg

SEQ ID NO: 62799 - RNA, 21 nt, synthetic construct
  source 1..21: mol_type = other RNA
aaatgtccatcgagagatgaa

SEQ ID NO: 62800 - RNA, 21 nt, synthetic construct
  source 1..21: mol_type = other RNA
aaatgtccgttgaagtctttg

SEQ ID NO: 62801 - RNA, 21 nt, synthetic construct
  source 1..21: mol_type = other RNA
aaatgtctcattgtggatgag

SEQ ID NO: 62802 - RNA, 21 nt, synthetic construct
  source 1..21: mol_type = other RNA
aaatgtctggtttgctttgga

SEQ ID NO: 62803 - RNA, 21 nt, synthetic construct
  source 1..21: mol_type = other RNA
aaatgtctgtctttatgccaa

SEQ ID NO: 62804 - RNA, 21 nt, synthetic construct
  source 1..21: mol_type = other RNA
aaatgtcttaagaaggaaaag

SEQ ID NO: 62805 - RNA, 21 nt, synthetic construct
  source 1..21: mol_type = other RNA
aaatgtgaacagacagacatg

SEQ ID NO: 62806 - RNA, 21 nt, synthetic construct
  source 1..21: mol_type = other RNA
aaatgtgaattagatggctta

SEQ ID NO: 62807 - RNA, 21 nt, synthetic construct
  source 1..21: mol_type = other RNA
aaatgtgacagaacaaactca

SEQ ID NO: 62808 - RNA, 21 nt, synthetic construct
  source 1..21: mol_type = other RNA
aaatgtgacattagtggtggt

SEQ ID NO: 62809 - RNA, 21 nt, synthetic construct
  source 1..21: mol_type = other RNA
aaatgtgactagaagaaatgt

SEQ ID NO: 62810 - RNA, 21 nt, synthetic construct
  source 1..21: mol_type = other RNA
aaatgtgagcatttagccccc

SEQ ID NO: 62811 - RNA, 21 nt, synthetic construct
  source 1..21: mol_type = other RNA
aaatgtgatggcatcattcat

SEQ ID NO: 62812 - RNA, 21 nt, synthetic construct
  source 1..21: mol_type = other RNA
aaatgtggaagcagaactaag

SEQ ID NO: 62813 - RNA, 21 nt, synthetic construct
  source 1..21: mol_type = other RNA
aaatgtggagataaagagcag

SEQ ID NO: 62814 - RNA, 21 nt, synthetic construct
  source 1..21: mol_type = other RNA
aaatgtggatagtgcttttta

SEQ ID NO: 62815 - RNA, 21 nt, synthetic construct
  source 1..21: mol_type = other RNA
aaatgtggatgcatgaggcat

SEQ ID NO: 62816 - RNA, 21 nt, synthetic construct
  source 1..21: mol_type = other RNA
aaatgtggcaaatttatgtga

SEQ ID NO: 62817 - RNA, 21 nt, synthetic construct
  source 1..21: mol_type = other RNA
aaatgtggcatatcacattaa

SEQ ID NO: 62818 - RNA, 21 nt, synthetic construct
  source 1..21: mol_type = other RNA
aaatgtggcatttcttacaca

SEQ ID NO: 62819 - RNA, 21 nt, synthetic construct
  source 1..21: mol_type = other RNA
aaatgtggtttttggttcact

SEQ ID NO: 62820 - RNA, 21 nt, synthetic construct
  source 1..21: mol_type = other RNA
aaatgtgtctagtgaatgaga

SEQ ID NO: 62821 - RNA, 21 nt, synthetic construct
  source 1..21: mol_type = other RNA
aaatgttaagcccaacttcac

SEQ ID NO: 62822 - RNA, 21 nt, synthetic construct
  source 1..21: mol_type = other RNA
aaatgttatacagcaaatctc

SEQ ID NO: 62823 - RNA, 21 nt, synthetic construct
  source 1..21: mol_type = other RNA
aaatgttcagatagaaaagac

SEQ ID NO: 62824 - RNA, 21 nt, synthetic construct
  source 1..21: mol_type = other RNA
aaatgttcagtttatgggtca

SEQ ID NO: 62825 - RNA, 21 nt, synthetic construct
  source 1..21: mol_type = other RNA
aaatgttccctcttcaatatt

SEQ ID NO: 62826 - RNA, 21 nt, synthetic construct
  source 1..21: mol_type = other RNA
aaatgttgcagagactggata

SEQ ID NO: 62827 - RNA, 21 nt, synthetic construct
  source 1..21: mol_type = other RNA
aaatgttgccaatatctatca

SEQ ID NO: 62828 - RNA, 21 nt, synthetic construct
  source 1..21: mol_type = other RNA
aaatgtttaattacccaggca

SEQ ID NO: 62829 - RNA, 21 nt, synthetic construct
  source 1..21: mol_type = other RNA
aaatgtttagcggaatgacta

SEQ ID NO: 62830 - RNA, 21 nt, synthetic construct
  source 1..21: mol_type = other RNA
aaatgtttgtttaattagccg

SEQ ID NO: 62831 - RNA, 21 nt, synthetic construct
  source 1..21: mol_type = other RNA
aaatgttttaaggcagggctt

SEQ ID NO: 62832 - RNA, 21 nt, synthetic construct
  source 1..21: mol_type = other RNA
aaatgttttgcagagatgagg

SEQ ID NO: 62833 - RNA, 21 nt, synthetic construct
  source 1..21: mol_type = other RNA
aaattaaaaactgagaccgga

SEQ ID NO: 62834 - RNA, 21 nt, synthetic construct
  source 1..21: mol_type = other RNA
aaattaaacacacccttggta

SEQ ID NO: 62835 - RNA, 21 nt, synthetic construct
  source 1..21: mol_type = other RNA
aaattaaaggatgtcaactga

SEQ ID NO: 62836 - RNA, 21 nt, synthetic construct
  source 1..21: mol_type = other RNA
aaattaagcttcgacagtccc

SEQ ID NO: 62837 - RNA, 21 nt, synthetic construct
  source 1..21: mol_type = other RNA
aaattaatcagtctgtaagca

SEQ ID NO: 62838 - RNA, 21 nt, synthetic construct
  source 1..21: mol_type = other RNA
aaattaatgccccatgtgttg

SEQ ID NO: 62839 - RNA, 21 nt, synthetic construct
  source 1..21: mol_type = other RNA
aaattacaaaataggcagtcc

SEQ ID NO: 62840 - RNA, 21 nt, synthetic construct
  source 1..21: mol_type = other RNA
aaattacaactggtttctgca

SEQ ID NO: 62841 - RNA, 21 nt, synthetic construct
  source 1..21: mol_type = other RNA
aaattacaggtcaaactcact

SEQ ID NO: 62842 - RNA, 21 nt, synthetic construct
  source 1..21: mol_type = other RNA
aaattacccaaagactttgtt

SEQ ID NO: 62843 - RNA, 21 nt, synthetic construct
  source 1..21: mol_type = other RNA
aaattaccccattcactcagc

SEQ ID NO: 62844 - RNA, 21 nt, synthetic construct
  source 1..21: mol_type = other RNA
aaattagaaatgtggaagcag

SEQ ID NO: 62845 - RNA, 21 nt, synthetic construct
  source 1..21: mol_type = other RNA
aaattagaacatctggcagca

SEQ ID NO: 62846 - RNA, 21 nt, synthetic construct
  source 1..21: mol_type = other RNA
aaattagccaagcatggtggt

SEQ ID NO: 62847 - RNA, 21 nt, synthetic construct
  source 1..21: mol_type = other RNA
aaattagccttttacacccta

SEQ ID NO: 62848 - RNA, 21 nt, synthetic construct
  source 1..21: mol_type = other RNA
aaattagctaagtatgcagaa

SEQ ID NO: 62849 - RNA, 21 nt, synthetic construct
  source 1..21: mol_type = other RNA
aaattagctgactttcatttg

SEQ ID NO: 62850 - RNA, 21 nt, synthetic construct
  source 1..21: mol_type = other RNA
aaattagctggatgtggtgtg

SEQ ID NO: 62851 - RNA, 21 nt, synthetic construct
  source 1..21: mol_type = other RNA
aaattagctgggcgagatggc

SEQ ID NO: 62852 - RNA, 21 nt, synthetic construct
  source 1..21: mol_type = other RNA
aaattagctttctcccagctg

SEQ ID NO: 62853 - RNA, 21 nt, synthetic construct
  source 1..21: mol_type = other RNA
aaattaggccaggcactgtgg

SEQ ID NO: 62854 - RNA, 21 nt, synthetic construct
  source 1..21: mol_type = other RNA
aaattagtcatagcagtggga

SEQ ID NO: 62855 - RNA, 21 nt, synthetic construct
  source 1..21: mol_type = other RNA
aaattagttccttttaaggga

SEQ ID NO: 62856 - RNA, 21 nt, synthetic construct
  source 1..21: mol_type = other RNA
aaattataagcttcctctggc

SEQ ID NO: 62857 - RNA, 21 nt, synthetic construct
  source 1..21: mol_type = other RNA
aaattatagctccaaaagcga

SEQ ID NO: 62858 - RNA, 21 nt, synthetic construct
  source 1..21: mol_type = other RNA
aaattatctgtgggttaaaag

SEQ ID NO: 62859 - RNA, 21 nt, synthetic construct
  source 1..21: mol_type = other RNA
aaattattagcttgctagtag

SEQ ID NO: 62860 - RNA, 21 nt, synthetic construct
  source 1..21: mol_type = other RNA
aaattattgacaagacgtgta

SEQ ID NO: 62861 - RNA, 21 nt, synthetic construct
  source 1..21: mol_type = other RNA
aaattattttcctccttctgc

SEQ ID NO: 62862 - RNA, 21 nt, synthetic construct
  source 1..21: mol_type = other RNA
aaattcaaacatgacagatcc

SEQ ID NO: 62863 - RNA, 21 nt, synthetic construct
  source 1..21: mol_type = other RNA
aaattcacagaactgtcactg

SEQ ID NO: 62864 - RNA, 21 nt, synthetic construct
  source 1..21: mol_type = other RNA
aaattcacagcatgaatacct

SEQ ID NO: 62865 - RNA, 21 nt, synthetic construct
  source 1..21: mol_type = other RNA
aaattcaccaaacaccttaca

SEQ ID NO: 62866 - RNA, 21 nt, synthetic construct
  source 1..21: mol_type = other RNA
aaattcacgagactgttaggg

SEQ ID NO: 62867 - RNA, 21 nt, synthetic construct
  source 1..21: mol_type = other RNA
aaattcactcctcattcacac

SEQ ID NO: 62868 - RNA, 21 nt, synthetic construct
  source 1..21: mol_type = other RNA
aaattcatagatcaccagggg

SEQ ID NO: 62869 - RNA, 21 nt, synthetic construct
  source 1..21: mol_type = other RNA
aaattcatgcaactgaaaaca

SEQ ID NO: 62870 - RNA, 21 nt, synthetic construct
  source 1..21: mol_type = other RNA
aaattccctcagcaaaagcaa

SEQ ID NO: 62871 - RNA, 21 nt, synthetic construct
  source 1..21: mol_type = other RNA
aaattccctctacaaaaggag

SEQ ID NO: 62872 - RNA, 21 nt, synthetic construct
  source 1..21: mol_type = other RNA
aaattcccttcagtgtagtca

SEQ ID NO: 62873 - RNA, 21 nt, synthetic construct
  source 1..21: mol_type = other RNA
aaattccgctctggttttaaa

SEQ ID NO: 62874 - RNA, 21 nt, synthetic construct
  source 1..21: mol_type = other RNA
aaattcctaactcaagagtta

SEQ ID NO: 62875 - RNA, 21 nt, synthetic construct
  source 1..21: mol_type = other RNA
aaattccttcccctttctttg

SEQ ID NO: 62876 - RNA, 21 nt, synthetic construct
  source 1..21: mol_type = other RNA
aaattccttcctttgatgact

SEQ ID NO: 62877 - RNA, 21 nt, synthetic construct
  source 1..21: mol_type = other RNA
aaattctaacaagaagctgtt

SEQ ID NO: 62878 - RNA, 21 nt, synthetic construct
  source 1..21: mol_type = other RNA
aaattctcaaatgaacaggtt

SEQ ID NO: 62879 - RNA, 21 nt, synthetic construct
  source 1..21: mol_type = other RNA
aaattctgaccctttattcaa

SEQ ID NO: 62880 - RNA, 21 nt, synthetic construct
  source 1..21: mol_type = other RNA
aaattctgatagcttgacaaa

SEQ ID NO: 62881 - RNA, 21 nt, synthetic construct
  source 1..21: mol_type = other RNA
aaattctgccacattcaacaa

SEQ ID NO: 62882 - RNA, 21 nt, synthetic construct
  source 1..21: mol_type = other RNA
aaattctgttctcagtatcct

SEQ ID NO: 62883 - RNA, 21 nt, synthetic construct
  source 1..21: mol_type = other RNA
aaattcttccagcctggtaat

SEQ ID NO: 62884 - RNA, 21 nt, synthetic construct
  source 1..21: mol_type = other RNA
aaattcttgggtgaataaccc

SEQ ID NO: 62885 - RNA, 21 nt, synthetic construct
  source 1..21: mol_type = other RNA
aaattgaacagcctaaagtcc

SEQ ID NO: 62886 - RNA, 21 nt, synthetic construct
  source 1..21: mol_type = other RNA
aaattgaccattccacgctgt

SEQ ID NO: 62887 - RNA, 21 nt, synthetic construct
  source 1..21: mol_type = other RNA
aaattgacttcactagatctc

SEQ ID NO: 62888 - RNA, 21 nt, synthetic construct
  source 1..21: mol_type = other RNA
aaattgcaaaaacagtttccc

SEQ ID NO: 62889 - RNA, 21 nt, synthetic construct
  source 1..21: mol_type = other RNA
aaattgcagagtgttcaaaag

SEQ ID NO: 62890 - RNA, 21 nt, synthetic construct
  source 1..21: mol_type = other RNA
aaattgcaggtttactccaag

SEQ ID NO: 62891 - RNA, 21 nt, synthetic construct
  source 1..21: mol_type = other RNA
aaattgcatcaactgcttccc

SEQ ID NO: 62892 - RNA, 21 nt, synthetic construct
  source 1..21: mol_type = other RNA
aaattgccaaactgttttcca

SEQ ID NO: 62893 - RNA, 21 nt, synthetic construct
  source 1..21: mol_type = other RNA
aaattggaacctttgtccact

SEQ ID NO: 62894 - RNA, 21 nt, synthetic construct
  source 1..21: mol_type = other RNA
aaattggacgggtggtaggga

SEQ ID NO: 62895 - RNA, 21 nt, synthetic construct
  source 1..21: mol_type = other RNA
aaattggcatttaaaagaacc

SEQ ID NO: 62896 - RNA, 21 nt, synthetic construct
  source 1..21: mol_type = other RNA
aaattggcgtacatgtagata

SEQ ID NO: 62897 - RNA, 21 nt, synthetic construct
  source 1..21: mol_type = other RNA
aaattggtcctggaaaaagac

SEQ ID NO: 62898 - RNA, 21 nt, synthetic construct
  source 1..21: mol_type = other RNA
aaattgtcagaaaagatcagt

SEQ ID NO: 62899 - RNA, 21 nt, synthetic construct
  source 1..21: mol_type = other RNA
aaattgtgtgttctctttttg

SEQ ID NO: 62900 - RNA, 21 nt, synthetic construct
  source 1..21: mol_type = other RNA
aaattgttcatgaaatcccct

SEQ ID NO: 62901 - RNA, 21 nt, synthetic construct
  source 1..21: mol_type = other RNA
aaatttaaggaccaggtatgg

SEQ ID NO: 62902 - RNA, 21 nt, synthetic construct
  source 1..21: mol_type = other RNA
aaatttacccatttcttctag

SEQ ID NO: 62903 - RNA, 21 nt, synthetic construct
  source 1..21: mol_type = other RNA
aaatttagcttctgaattgag

SEQ ID NO: 62904 - RNA, 21 nt, synthetic construct
  source 1..21: mol_type = other RNA
aaatttagtaagggtaaacag

SEQ ID NO: 62905 - RNA, 21 nt, synthetic construct
  source 1..21: mol_type = other RNA
aaatttcattaggttgatggc

SEQ ID NO: 62906 - RNA, 21 nt, synthetic construct
  source 1..21: mol_type = other RNA
aaatttccagcattttatagg

SEQ ID NO: 62907 - RNA, 21 nt, synthetic construct
  source 1..21: mol_type = other RNA
aaatttctaaggttctgctat

SEQ ID NO: 62908 - RNA, 21 nt, synthetic construct
  source 1..21: mol_type = other RNA
aaatttctatagtcattccgc

SEQ ID NO: 62909 - RNA, 21 nt, synthetic construct
  source 1..21: mol_type = other RNA
aaatttctgttgcttaagtca

SEQ ID NO: 62910 - RNA, 21 nt, synthetic construct
  source 1..21: mol_type = other RNA
aaatttgacatgacaggtgag

SEQ ID NO: 62911 - RNA, 21 nt, synthetic construct
  source 1..21: mol_type = other RNA
aaatttgaggccctattcaac

SEQ ID NO: 62912 - RNA, 21 nt, synthetic construct
  source 1..21: mol_type = other RNA
aaatttgattgttagccacag

SEQ ID NO: 62913 - RNA, 21 nt, synthetic construct
  source 1..21: mol_type = other RNA
aaatttgccacattttaccaa

SEQ ID NO: 62914 - RNA, 21 nt, synthetic construct
  source 1..21: mol_type = other RNA
aaattttaaatcagcaccatc

SEQ ID NO: 62915 - RNA, 21 nt, synthetic construct
  source 1..21: mol_type = other RNA
aaattttaagtgcacaatgca

SEQ ID NO: 62916 - RNA, 21 nt, synthetic construct
  source 1..21: mol_type = other RNA
aaattttatggttttttcccc

SEQ ID NO: 62917 - RNA, 21 nt, synthetic construct
  source 1..21: mol_type = other RNA
aaattttcaagggtgttttcc

SEQ ID NO: 62918 - RNA, 21 nt, synthetic construct
  source 1..21: mol_type = other RNA
aaattttcattctacctggag

SEQ ID NO: 62919 - RNA, 21 nt, synthetic construct
  source 1..21: mol_type = other RNA
aaattttctcccaaggttgcc

SEQ ID NO: 62920 - RNA, 21 nt, synthetic construct
  source 1..21: mol_type = other RNA
aaattttctgagcaactacta

SEQ ID NO: 62921 - RNA, 21 nt, synthetic construct
  source 1..21: mol_type = other RNA
aaattttgagacctcaggcag

SEQ ID NO: 62922 - RNA, 21 nt, synthetic construct
  source 1..21: mol_type = other RNA
aaattttgaggcttttggatt

SEQ ID NO: 62923 - RNA, 21 nt, synthetic construct
  source 1..21: mol_type = other RNA
aaattttgcttaaagttggtc

SEQ ID NO: 62924 - RNA, 21 nt, synthetic construct
  source 1..21: mol_type = other RNA
aaattttgttcaggagttttg

SEQ ID NO: 62925 - RNA, 21 nt, synthetic construct
  source 1..21: mol_type = other RNA
aaatttttcacattcttcacc

SEQ ID NO: 62926 - RNA, 21 nt, synthetic construct
  source 1..21: mol_type = other RNA
aaatttttgcaaaccaaatgc

SEQ ID NO: 62927 - RNA, 21 nt, synthetic construct
  source 1..21: mol_type = other RNA
aaatttttgtctggaacacac

SEQ ID NO: 62928 - RNA, 21 nt, synthetic construct
  source 1..21: mol_type = other RNA
aacaaaaaaccactggatacg

SEQ ID NO: 62929 - RNA, 21 nt, synthetic construct
  source 1..21: mol_type = other RNA
aacaaaaatacgaaagtgctc

SEQ ID NO: 62930 - RNA, 21 nt, synthetic construct
  source 1..21: mol_type = other RNA
aacaaaacaaaaccctgttgg

SEQ ID NO: 62931 - RNA, 21 nt, synthetic construct
  source 1..21: mol_type = other RNA
aacaaaacaaagtctttgggt

SEQ ID NO: 62932 - RNA, 21 nt, synthetic construct
  source 1..21: mol_type = other RNA
aacaaaacaagaagaaaaagc

SEQ ID NO: 62933 - RNA, 21 nt, synthetic construct
  source 1..21: mol_type = other RNA
aacaaaacacacgggtacaca

SEQ ID NO: 62934 - RNA, 21 nt, synthetic construct
  source 1..21: mol_type = other RNA
aacaaaacacatggcatcggg

SEQ ID NO: 62935 - RNA, 21 nt, synthetic construct
  source 1..21: mol_type = other RNA
aacaaaaccctgttgggctat

SEQ ID NO: 62936 - RNA, 21 nt, synthetic construct
  source 1..21: mol_type = other RNA
aacaaaactaggctgtcccaa

SEQ ID NO: 62937 - RNA, 21 nt, synthetic construct
  source 1..21: mol_type = other RNA
aacaaaactgggggctggaca

SEQ ID NO: 62938 - RNA, 21 nt, synthetic construct
  source 1..21: mol_type = other RNA
aacaaaagagtagattccccc

SEQ ID NO: 62939 - RNA, 21 nt, synthetic construct
  source 1..21: mol_type = other RNA
aacaaaagatacacaagatct

SEQ ID NO: 62940 - RNA, 21 nt, synthetic construct
  source 1..21: mol_type = other RNA
aacaaaaggtagaagataatg

SEQ ID NO: 62941 - RNA, 21 nt, synthetic construct
  source 1..21: mol_type = other RNA
aacaaaatacccacaagaaaa

SEQ ID NO: 62942 - RNA, 21 nt, synthetic construct
  source 1..21: mol_type = other RNA
aacaaaatacctgggaatcca

SEQ ID NO: 62943 - RNA, 21 nt, synthetic construct
  source 1..21: mol_type = other RNA
aacaaaataggattaagacac

SEQ ID NO: 62944 - RNA, 21 nt, synthetic construct
  source 1..21: mol_type = other RNA
aacaaacaaacagaaaggccc

SEQ ID NO: 62945 - RNA, 21 nt, synthetic construct
  source 1..21: mol_type = other RNA
aacaaacaattagcaccttta

SEQ ID NO: 62946 - RNA, 21 nt, synthetic construct
  source 1..21: mol_type = other RNA
aacaaacacactgggtaaaca

SEQ ID NO: 62947 - RNA, 21 nt, synthetic construct
  source 1..21: mol_type = other RNA
aacaaacagaaaggcccaaaa

SEQ ID NO: 62948 - RNA, 21 nt, synthetic construct
  source 1..21: mol_type = other RNA
aacaaacattttttgcagaga

SEQ ID NO: 62949 - RNA, 21 nt, synthetic construct
  source 1..21: mol_type = other RNA
aacaaacgcattgtgatgtct

SEQ ID NO: 62950 - RNA, 21 nt, synthetic construct
  source 1..21: mol_type = other RNA
aacaaactaactagaaaaccg

SEQ ID NO: 62951 - RNA, 21 nt, synthetic construct
  source 1..21: mol_type = other RNA
aacaaactcaagttccggttc

SEQ ID NO: 62952 - RNA, 21 nt, synthetic construct
  source 1..21: mol_type = other RNA
aacaaactgcgtggtttattc

SEQ ID NO: 62953 - RNA, 21 nt, synthetic construct
  source 1..21: mol_type = other RNA
aacaaagaacaggaagggaga

SEQ ID NO: 62954 - RNA, 21 nt, synthetic construct
  source 1..21: mol_type = other RNA
aacaaagagaacaatggaata

SEQ ID NO: 62955 - RNA, 21 nt, synthetic construct
  source 1..21: mol_type = other RNA
aacaaagatgccacaaatgga

SEQ ID NO: 62956 - RNA, 21 nt, synthetic construct
  source 1..21: mol_type = other RNA
aacaaagctctgatgctttct

SEQ ID NO: 62957 - RNA, 21 nt, synthetic construct
  source 1..21: mol_type = other RNA
aacaaaggcaggagcagtgtg

SEQ ID NO: 62958 - RNA, 21 nt, synthetic construct
  source 1..21: mol_type = other RNA
aacaaaggcgaagcccgccgc

SEQ ID NO: 62959 - RNA, 21 nt, synthetic construct
  source 1..21: mol_type = other RNA
aacaaagggcctgttccaggc

SEQ ID NO: 62960 - RNA, 21 nt, synthetic construct
  source 1..21: mol_type = other RNA
aacaaagggttcttggaaatt

SEQ ID NO: 62961 - RNA, 21 nt, synthetic construct
  source 1..21: mol_type = other RNA
aacaaaggttgaaaactcaac

SEQ ID NO: 62962 - RNA, 21 nt, synthetic construct
  source 1..21: mol_type = other RNA
aacaaagtctttgggtaattt

SEQ ID NO: 62963 - RNA, 21 nt, synthetic construct
  source 1..21: mol_type = other RNA
aacaaataacaccatagctga

SEQ ID NO: 62964 - RNA, 21 nt, synthetic construct
  source 1..21: mol_type = other RNA
aacaaataagaagattgagtc

SEQ ID NO: 62965 - RNA, 21 nt, synthetic construct
  source 1..21: mol_type = other RNA
aacaaatcagatttcaggtgg

SEQ ID NO: 62966 - RNA, 21 nt, synthetic construct
  source 1..21: mol_type = other RNA
aacaaatccttttcccaggag

SEQ ID NO: 62967 - RNA, 21 nt, synthetic construct
  source 1..21: mol_type = other RNA
aacaaatggaaccactgtagg

SEQ ID NO: 62968 - RNA, 21 nt, synthetic construct
  source 1..21: mol_type = other RNA
aacaaatgttgcagagactgg

SEQ ID NO: 62969 - RNA, 21 nt, synthetic construct
  source 1..21: mol_type = other RNA
aacaaattcatgcaactgaaa

SEQ ID NO: 62970 - RNA, 21 nt, synthetic construct
  source 1..21: mol_type = other RNA
aacaaattccctctacaaaag

SEQ ID NO: 62971 - RNA, 21 nt, synthetic construct
  source 1..21: mol_type = other RNA
aacaaattgcatcaactgctt

SEQ ID NO: 62972 - RNA, 21 nt, synthetic construct
  source 1..21: mol_type = other RNA
aacaacaaaacacacgggtac

SEQ ID NO: 62973 - RNA, 21 nt, synthetic construct
  source 1..21: mol_type = other RNA
aacaacaaaatacccacaaga

SEQ ID NO: 62974 - RNA, 21 nt, synthetic construct
  source 1..21: mol_type = other RNA
aacaacaacaaaacacacggg

SEQ ID NO: 62975 - RNA, 21 nt, synthetic construct
  source 1..21: mol_type = other RNA
aacaacaacaaaatacccaca

SEQ ID NO: 62976 - RNA, 21 nt, synthetic construct
  source 1..21: mol_type = other RNA
aacaacaacaacaaaacacac

SEQ ID NO: 62977 - RNA, 21 nt, synthetic construct
  source 1..21: mol_type = other RNA
aacaacaacaacaaaacatgt

SEQ ID NO: 62978 - RNA, 21 nt, synthetic construct
  source 1..21: mol_type = other RNA
aacaacaacaacaaaataccc

SEQ ID NO: 62979 - RNA, 21 nt, synthetic construct
  source 1..21: mol_type = other RNA
aacaacaacaacaacaaaaca

SEQ ID NO: 62980 - RNA, 21 nt, synthetic construct
  source 1..21: mol_type = other RNA
aacaacactaaccaacattga

SEQ ID NO: 62981 - RNA, 21 nt, synthetic construct
  source 1..21: mol_type = other RNA
aacaacatggtagaccatata

SEQ ID NO: 62982 - RNA, 21 nt, synthetic construct
  source 1..21: mol_type = other RNA
aacaaccataatgagtaacat

SEQ ID NO: 62983 - RNA, 21 nt, synthetic construct
  source 1..21: mol_type = other RNA
aacaacctaaatgtccatcga

SEQ ID NO: 62984 - RNA, 21 nt, synthetic construct
  source 1..21: mol_type = other RNA
aacaacctgtctcaaaaataa

SEQ ID NO: 62985 - RNA, 21 nt, synthetic construct
  source 1..21: mol_type = other RNA
aacaacgctgtggctaacaat

SEQ ID NO: 62986 - RNA, 21 nt, synthetic construct
  source 1..21: mol_type = other RNA
aacaactcaaacgtccatcaa

SEQ ID NO: 62987 - RNA, 21 nt, synthetic construct
  source 1..21: mol_type = other RNA
aacaactgactctaaagtcta

SEQ ID NO: 62988 - RNA, 21 nt, synthetic construct
  source 1..21: mol_type = other RNA
aacaagaaagggtagctttga

SEQ ID NO: 62989 - RNA, 21 nt, synthetic construct
  source 1..21: mol_type = other RNA
aacaagaagaaaaagcaactt

SEQ ID NO: 62990 - RNA, 21 nt, synthetic construct
  source 1..21: mol_type = other RNA
aacaagaagctgttttggtaa

SEQ ID NO: 62991 - RNA, 21 nt, synthetic construct
  source 1..21: mol_type = other RNA
aacaagaatcctgctatttta

SEQ ID NO: 62992 - RNA, 21 nt, synthetic construct
  source 1..21: mol_type = other RNA
aacaagactcaacatgtgtat

SEQ ID NO: 62993 - RNA, 21 nt, synthetic construct
  source 1..21: mol_type = other RNA
aacaagagaggacagttggcc

SEQ ID NO: 62994 - RNA, 21 nt, synthetic construct
  source 1..21: mol_type = other RNA
aacaagagcgtcgtacctttc

SEQ ID NO: 62995 - RNA, 21 nt, synthetic construct
  source 1..21: mol_type = other RNA
aacaagggttggtgcttcctt

SEQ ID NO: 62996 - RNA, 21 nt, synthetic construct
  source 1..21: mol_type = other RNA
aacaagtcacaaaaagacaag

SEQ ID NO: 62997 - RNA, 21 nt, synthetic construct
  source 1..21: mol_type = other RNA
aacaagttacaaacatatgca

SEQ ID NO: 62998 - RNA, 21 nt, synthetic construct
  source 1..21: mol_type = other RNA
aacaataagacaccgctccac

SEQ ID NO: 62999 - RNA, 21 nt, synthetic construct
  source 1..21: mol_type = other RNA
aacaatactgcattgtgcact

SEQ ID NO: 63000 - RNA, 21 nt, synthetic construct
  source 1..21: mol_type = other RNA
aacaatactttagacatgggc

SEQ ID NO: 63001 - RNA, 21 nt, synthetic construct
  source 1..21: mol_type = other RNA
aacaatagcaacaaaacaatc

SEQ ID NO: 63002 - RNA, 21 nt, synthetic construct
  source 1..21: mol_type = other RNA
aacaatagcccagcaggattt

SEQ ID NO: 63003 - RNA, 21 nt, synthetic construct
  source 1..21: mol_type = other RNA
aacaataggaatagtattcag

SEQ ID NO: 63004 - RNA, 21 nt, synthetic construct
  source 1..21: mol_type = other RNA
aacaatcaaaccatcctttcc

SEQ ID NO: 63005 - RNA, 21 nt, synthetic construct
  source 1..21: mol_type = other RNA
aacaatcaacaggtagctgct

SEQ ID NO: 63006 - RNA, 21 nt, synthetic construct
  source 1..21: mol_type = other RNA
aacaatccttctaatcagtaa

SEQ ID NO: 63007 - RNA, 21 nt, synthetic construct
  source 1..21: mol_type = other RNA
aacaatcgcaatccaaaatcc

SEQ ID NO: 63008 - RNA, 21 nt, synthetic construct
  source 1..21: mol_type = other RNA
aacaatctaattcgaaaatgg

SEQ ID NO: 63009 - RNA, 21 nt, synthetic construct
  source 1..21: mol_type = other RNA
aacaatctacagattcaatgc

SEQ ID NO: 63010 - RNA, 21 nt, synthetic construct
  source 1..21: mol_type = other RNA
aacaatcttgaaaggggccag

SEQ ID NO: 63011 - RNA, 21 nt, synthetic construct
  source 1..21: mol_type = other RNA
aacaatgctgctatgaaaatt

SEQ ID NO: 63012 - RNA, 21 nt, synthetic construct
  source 1..21: mol_type = other RNA
aacaatggaatagaagggaga

SEQ ID NO: 63013 - RNA, 21 nt, synthetic construct
  source 1..21: mol_type = other RNA
aacaattacttgagagcagag

SEQ ID NO: 63014 - RNA, 21 nt, synthetic construct
  source 1..21: mol_type = other RNA
aacaattcaacaatagcaaca

SEQ ID NO: 63015 - RNA, 21 nt, synthetic construct
  source 1..21: mol_type = other RNA
aacaattcaacagctactatg

SEQ ID NO: 63016 - RNA, 21 nt, synthetic construct
  source 1..21: mol_type = other RNA
aacaattggtgaatctgagta

SEQ ID NO: 63017 - RNA, 21 nt, synthetic construct
  source 1..21: mol_type = other RNA
aacaattttctctcatgttgg

SEQ ID NO: 63018 - RNA, 21 nt, synthetic construct
  source 1..21: mol_type = other RNA
aacacaaaacaaatggaacca

SEQ ID NO: 63019 - RNA, 21 nt, synthetic construct
  source 1..21: mol_type = other RNA
aacacaaactgcagaatgaca

SEQ ID NO: 63020 - RNA, 21 nt, synthetic construct
  source 1..21: mol_type = other RNA
aacacaaagccttctctactc

SEQ ID NO: 63021 - RNA, 21 nt, synthetic construct
  source 1..21: mol_type = other RNA
aacacaacataccaaaaccct

SEQ ID NO: 63022 - RNA, 21 nt, synthetic construct
  source 1..21: mol_type = other RNA
aacacaaggacaggtcacatt

SEQ ID NO: 63023 - RNA, 21 nt, synthetic construct
  source 1..21: mol_type = other RNA
aacacacaaaccaacaacaaa

SEQ ID NO: 63024 - RNA, 21 nt, synthetic construct
  source 1..21: mol_type = other RNA
aacacacaacaatgaattctc

SEQ ID NO: 63025 - RNA, 21 nt, synthetic construct
  source 1..21: mol_type = other RNA
aacacacaatttgaggtagca

SEQ ID NO: 63026 - RNA, 21 nt, synthetic construct
  source 1..21: mol_type = other RNA
aacacacacctattcataggt

SEQ ID NO: 63027 - RNA, 21 nt, synthetic construct
  source 1..21: mol_type = other RNA
aacacacattagcctagacct

SEQ ID NO: 63028 - RNA, 21 nt, synthetic construct
  source 1..21: mol_type = other RNA
aacacacccttggtaaacagc

SEQ ID NO: 63029 - RNA, 21 nt, synthetic construct
  source 1..21: mol_type = other RNA
aacacacgggctgggcgcgat

SEQ ID NO: 63030 - RNA, 21 nt, synthetic construct
  source 1..21: mol_type = other RNA
aacacacgggtacacatccta

SEQ ID NO: 63031 - RNA, 21 nt, synthetic construct
  source 1..21: mol_type = other RNA
aacacactagccactgggtct

SEQ ID NO: 63032 - RNA, 21 nt, synthetic construct
  source 1..21: mol_type = other RNA
aacacactcgtgtatgatttc

SEQ ID NO: 63033 - RNA, 21 nt, synthetic construct
  source 1..21: mol_type = other RNA
aacacactgctcttctattcc

SEQ ID NO: 63034 - RNA, 21 nt, synthetic construct
  source 1..21: mol_type = other RNA
aacacactgggtaaacaagac

SEQ ID NO: 63035 - RNA, 21 nt, synthetic construct
  source 1..21: mol_type = other RNA
aacacagaacactaaagggga

SEQ ID NO: 63036 - RNA, 21 nt, synthetic construct
  source 1..21: mol_type = other RNA
aacacaggactgtgtgtgtcc

SEQ ID NO: 63037 - RNA, 21 nt, synthetic construct
  source 1..21: mol_type = other RNA
aacacagggactgatgaagaa

SEQ ID NO: 63038 - RNA, 21 nt, synthetic construct
  source 1..21: mol_type = other RNA
aacacagtgttgagaaagcac

SEQ ID NO: 63039 - RNA, 21 nt, synthetic construct
  source 1..21: mol_type = other RNA
aacacagttctagttctaata

SEQ ID NO: 63040 - RNA, 21 nt, synthetic construct
  source 1..21: mol_type = other RNA
aacacatcagcgctaagtgca

SEQ ID NO: 63041 - RNA, 21 nt, synthetic construct
  source 1..21: mol_type = other RNA
aacacatgcacactagacctt

SEQ ID NO: 63042 - RNA, 21 nt, synthetic construct
  source 1..21: mol_type = other RNA
aacacatggcatcggggccta

SEQ ID NO: 63043 - RNA, 21 nt, synthetic construct
  source 1..21: mol_type = other RNA
aacacatggggcattaatttt

SEQ ID NO: 63044 - RNA, 21 nt, synthetic construct
  source 1..21: mol_type = other RNA
aacacatgtcatgggccgggc

SEQ ID NO: 63045 - RNA, 21 nt, synthetic construct
  source 1..21: mol_type = other RNA
aacaccaaaaaagcaccagtt

SEQ ID NO: 63046 - RNA, 21 nt, synthetic construct
  source 1..21: mol_type = other RNA
aacaccaacacaaagccttct

SEQ ID NO: 63047 - RNA, 21 nt, synthetic construct
  source 1..21: mol_type = other RNA
aacaccaagcaacactaaaga

SEQ ID NO: 63048 - RNA, 21 nt, synthetic construct
  source 1..21: mol_type = other RNA
aacaccagatactcatgcttg

SEQ ID NO: 63049 - RNA, 21 nt, synthetic construct
  source 1..21: mol_type = other RNA
aacaccagtaagattctgtct

SEQ ID NO: 63050 - RNA, 21 nt, synthetic construct
  source 1..21: mol_type = other RNA
aacaccatagctgaaggcact

SEQ ID NO: 63051 - RNA, 21 nt, synthetic construct
  source 1..21: mol_type = other RNA
aacaccatggcaggtttcaag

SEQ ID NO: 63052 - RNA, 21 nt, synthetic construct
  source 1..21: mol_type = other RNA
aacacccttgaaaatttccag

SEQ ID NO: 63053 - RNA, 21 nt, synthetic construct
  source 1..21: mol_type = other RNA
aacacctaaagatatgtgtag

SEQ ID NO: 63054 - RNA, 21 nt, synthetic construct
  source 1..21: mol_type = other RNA
aacacctcagttaaacccaac

SEQ ID NO: 63055 - RNA, 21 nt, synthetic construct
  source 1..21: mol_type = other RNA
aacacctgcagtggcgtgtgc

SEQ ID NO: 63056 - RNA, 21 nt, synthetic construct
  source 1..21: mol_type = other RNA
aacaccttacactcaaaagcc

SEQ ID NO: 63057 - RNA, 21 nt, synthetic construct
  source 1..21: mol_type = other RNA
aacaccttgaacatgaacgag

SEQ ID NO: 63058 - RNA, 21 nt, synthetic construct
  source 1..21: mol_type = other RNA
aacaccttgaactgggacttc

SEQ ID NO: 63059 - RNA, 21 nt, synthetic construct
  source 1..21: mol_type = other RNA
aacaccttgggaggctgaggc

SEQ ID NO: 63060 - RNA, 21 nt, synthetic construct
  source 1..21: mol_type = other RNA
aacacctttgtattcatccag

SEQ ID NO: 63061 - RNA, 21 nt, synthetic construct
  source 1..21: mol_type = other RNA
aacacgcagaaccactgagca

SEQ ID NO: 63062 - RNA, 21 nt, synthetic construct
  source 1..21: mol_type = other RNA
aacactaaagatttgccaatc

SEQ ID NO: 63063 - RNA, 21 nt, synthetic construct
  source 1..21: mol_type = other RNA
aacactaaaggggatttcatg

SEQ ID NO: 63064 - RNA, 21 nt, synthetic construct
  source 1..21: mol_type = other RNA
aacactaaccaacattgagtt

SEQ ID NO: 63065 - RNA, 21 nt, synthetic construct
  source 1..21: mol_type = other RNA
aacactaagaagatggttgga

SEQ ID NO: 63066 - RNA, 21 nt, synthetic construct
  source 1..21: mol_type = other RNA
aacactaatccttctcatagt

SEQ ID NO: 63067 - RNA, 21 nt, synthetic construct
  source 1..21: mol_type = other RNA
aacactataagccaatatccc

SEQ ID NO: 63068 - RNA, 21 nt, synthetic construct
  source 1..21: mol_type = other RNA
aacactcagaagtactactca

SEQ ID NO: 63069 - RNA, 21 nt, synthetic construct
  source 1..21: mol_type = other RNA
aacactcagatatcaatctgg

SEQ ID NO: 63070 - RNA, 21 nt, synthetic construct
  source 1..21: mol_type = other RNA
aacactcataccaggttttgg

SEQ ID NO: 63071 - RNA, 21 nt, synthetic construct
  source 1..21: mol_type = other RNA
aacactccagaatgaccgaga

SEQ ID NO: 63072 - RNA, 21 nt, synthetic construct
  source 1..21: mol_type = other RNA
aacactctgcaattttaaatg

SEQ ID NO: 63073 - RNA, 21 nt, synthetic construct
  source 1..21: mol_type = other RNA
aacactgctcagaagctttca

SEQ ID NO: 63074 - RNA, 21 nt, synthetic construct
  source 1..21: mol_type = other RNA
aacactggaaatcacaggttt

SEQ ID NO: 63075 - RNA, 21 nt, synthetic construct
  source 1..21: mol_type = other RNA
aacactggaagtaattgggat

SEQ ID NO: 63076 - RNA, 21 nt, synthetic construct
  source 1..21: mol_type = other RNA
aacactggcaaaaatcatcat

SEQ ID NO: 63077 - RNA, 21 nt, synthetic construct
  source 1..21: mol_type = other RNA
aacactgtagttcagtttttc

SEQ ID NO: 63078 - RNA, 21 nt, synthetic construct
  source 1..21: mol_type = other RNA
aacactgtgttcttttccttc

SEQ ID NO: 63079 - RNA, 21 nt, synthetic construct
  source 1..21: mol_type = other RNA
aacactgttctgcgtggtttt

SEQ ID NO: 63080 - RNA, 21 nt, synthetic construct
  source 1..21: mol_type = other RNA
aacacttaacatgagatctaa

SEQ ID NO: 63081 - RNA, 21 nt, synthetic construct
  source 1..21: mol_type = other RNA
aacacttagcatgttgctttg

SEQ ID NO: 63082 - RNA, 21 nt, synthetic construct
  source 1..21: mol_type = other RNA
aacacttcagtggtaaggact

SEQ ID NO: 63083 - RNA, 21 nt, synthetic construct
  source 1..21: mol_type = other RNA
aacacttctgtgatcagaaga

SEQ ID NO: 63084 - RNA, 21 nt, synthetic construct
  source 1..21: mol_type = other RNA
aacacttgtgtaactaccact

SEQ ID NO: 63085 - RNA, 21 nt, synthetic construct
  source 1..21: mol_type = other RNA
aacacttttcaaacacttaac

SEQ ID NO: 63086 - RNA, 21 nt, synthetic construct
  source 1..21: mol_type = other RNA
aacacttttccagtcttctca

SEQ ID NO: 63087 - RNA, 21 nt, synthetic construct
  source 1..21: mol_type = other RNA
aacagaaaccctgtacccatt

SEQ ID NO: 63088 - RNA, 21 nt, synthetic construct
  source 1..21: mol_type = other RNA
aacagaaaggcccaaaaagtt

SEQ ID NO: 63089 - RNA, 21 nt, synthetic construct
  source 1..21: mol_type = other RNA
aacagaaatgaaatggccctt

SEQ ID NO: 63090 - RNA, 21 nt, synthetic construct
  source 1..21: mol_type = other RNA
aacagaagaagaattctatag

SEQ ID NO: 63091 - RNA, 21 nt, synthetic construct
  source 1..21: mol_type = other RNA
aacagaagaagtttctagtta

SEQ ID NO: 63092 - RNA, 21 nt, synthetic construct
  source 1..21: mol_type = other RNA
aacagaagacacaaaatcaga

SEQ ID NO: 63093 - RNA, 21 nt, synthetic construct
  source 1..21: mol_type = other RNA
aacagaagggtatatacaata

SEQ ID NO: 63094 - RNA, 21 nt, synthetic construct
  source 1..21: mol_type = other RNA
aacagaataaaaagtgacttc

SEQ ID NO: 63095 - RNA, 21 nt, synthetic construct
  source 1..21: mol_type = other RNA
aacagacagacatgcatgcac

SEQ ID NO: 63096 - RNA, 21 nt, synthetic construct
  source 1..21: mol_type = other RNA
aacagacccttatgtccagcc

SEQ ID NO: 63097 - RNA, 21 nt, synthetic construct
  source 1..21: mol_type = other RNA
aacagacctctgaagagtcta

SEQ ID NO: 63098 - RNA, 21 nt, synthetic construct
  source 1..21: mol_type = other RNA
aacagactgagccagcaaatc

SEQ ID NO: 63099 - RNA, 21 nt, synthetic construct
  source 1..21: mol_type = other RNA
aacagagacagagaatctgtc

SEQ ID NO: 63100 - RNA, 21 nt, synthetic construct
  source 1..21: mol_type = other RNA
aacagaggcatgcacggactt

SEQ ID NO: 63101 - RNA, 21 nt, synthetic construct
  source 1..21: mol_type = other RNA
aacagagttttccaataagtt

SEQ ID NO: 63102 - RNA, 21 nt, synthetic construct
  source 1..21: mol_type = other RNA
aacagatcctcacatcagtta

SEQ ID NO: 63103 - RNA, 21 nt, synthetic construct
  source 1..21: mol_type = other RNA
aacagatctgagaagactaag

SEQ ID NO: 63104 - RNA, 21 nt, synthetic construct
  source 1..21: mol_type = other RNA
aacagatcttggccgaatgtg

SEQ ID NO: 63105 - RNA, 21 nt, synthetic construct
  source 1..21: mol_type = other RNA
aacagatggaactctattttc

SEQ ID NO: 63106 - RNA, 21 nt, synthetic construct
  source 1..21: mol_type = other RNA
aacagatggtccttttttact

SEQ ID NO: 63107 - RNA, 21 nt, synthetic construct
  source 1..21: mol_type = other RNA
aacagattcacgcacagggag

SEQ ID NO: 63108 - RNA, 21 nt, synthetic construct
  source 1..21: mol_type = other RNA
aacagcaaggctcctgcagac

SEQ ID NO: 63109 - RNA, 21 nt, synthetic construct
  source 1..21: mol_type = other RNA
aacagcaccttttttggtatt

SEQ ID NO: 63110 - RNA, 21 nt, synthetic construct
  source 1..21: mol_type = other RNA
aacagcacttttgtactactt

SEQ ID NO: 63111 - RNA, 21 nt, synthetic construct
  source 1..21: mol_type = other RNA
aacagcagaacaaactgcgtg

SEQ ID NO: 63112 - RNA, 21 nt, synthetic construct
  source 1..21: mol_type = other RNA
aacagcaggggaaggcttcga

SEQ ID NO: 63113 - RNA, 21 nt, synthetic construct
  source 1..21: mol_type = other RNA
aacagcagtcttaaccattga

SEQ ID NO: 63114 - RNA, 21 nt, synthetic construct
  source 1..21: mol_type = other RNA
aacagcatactgtggatatct

SEQ ID NO: 63115 - RNA, 21 nt, synthetic construct
  source 1..21: mol_type = other RNA
aacagcatatacatgacatgg

SEQ ID NO: 63116 - RNA, 21 nt, synthetic construct
  source 1..21: mol_type = other RNA
aacagcattatcttaataacc

SEQ ID NO: 63117 - RNA, 21 nt, synthetic construct
  source 1..21: mol_type = other RNA
aacagccaaagaaattggacg

SEQ ID NO: 63118 - RNA, 21 nt, synthetic construct
  source 1..21: mol_type = other RNA
aacagccaaataaaacacaag

SEQ ID NO: 63119 - RNA, 21 nt, synthetic construct
  source 1..21: mol_type = other RNA
aacagcccctagcatgcagta

SEQ ID NO: 63120 - RNA, 21 nt, synthetic construct
  source 1..21: mol_type = other RNA
aacagccggcatatgtcactg

SEQ ID NO: 63121 - RNA, 21 nt, synthetic construct
  source 1..21: mol_type = other RNA
aacagcctaaagtccacagat

SEQ ID NO: 63122 - RNA, 21 nt, synthetic construct
  source 1..21: mol_type = other RNA
aacagcctaagcaaatgtaat

SEQ ID NO: 63123 - RNA, 21 nt, synthetic construct
  source 1..21: mol_type = other RNA
aacagcctaattgtacacctc

SEQ ID NO: 63124 - RNA, 21 nt, synthetic construct
  source 1..21: mol_type = other RNA
aacagcgccacttaaaaaatg

SEQ ID NO: 63125 - RNA, 21 nt, synthetic construct
  source 1..21: mol_type = other RNA
aacagctactatgaatatact

SEQ ID NO: 63126 - RNA, 21 nt, synthetic construct
  source 1..21: mol_type = other RNA
aacagctaggtgagtgagatg

SEQ ID NO: 63127 - RNA, 21 nt, synthetic construct
  source 1..21: mol_type = other RNA
aacagctcagaagctatagct

SEQ ID NO: 63128 - RNA, 21 nt, synthetic construct
  source 1..21: mol_type = other RNA
aacagcttcttgttagaattt

SEQ ID NO: 63129 - RNA, 21 nt, synthetic construct
  source 1..21: mol_type = other RNA
aacagcttgacattcttacct

SEQ ID NO: 63130 - RNA, 21 nt, synthetic construct
  source 1..21: mol_type = other RNA
aacaggaagaggcagctaagc

SEQ ID NO: 63131 - RNA, 21 nt, synthetic construct
  source 1..21: mol_type = other RNA
aacaggaagggagagatgcct

SEQ ID NO: 63132 - RNA, 21 nt, synthetic construct
  source 1..21: mol_type = other RNA
aacaggaagttgagaaagagg

SEQ ID NO: 63133 - RNA, 21 nt, synthetic construct
  source 1..21: mol_type = other RNA
aacaggacttttggtacacat

SEQ ID NO: 63134 - RNA, 21 nt, synthetic construct
  source 1..21: mol_type = other RNA
aacaggagttaccataaaacc

SEQ ID NO: 63135 - RNA, 21 nt, synthetic construct
  source 1..21: mol_type = other RNA
aacaggatacaaaaagcacct

SEQ ID NO: 63136 - RNA, 21 nt, synthetic construct
  source 1..21: mol_type = other RNA
aacaggattacaatgtaaggt

SEQ ID NO: 63137 - RNA, 21 nt, synthetic construct
  source 1..21: mol_type = other RNA
aacaggcaaccttgggagaaa

SEQ ID NO: 63138 - RNA, 21 nt, synthetic construct
  source 1..21: mol_type = other RNA
aacaggccctttgttagtgcc

SEQ ID NO: 63139 - RNA, 21 nt, synthetic construct
  source 1..21: mol_type = other RNA
aacaggcctgagccgtcggta

SEQ ID NO: 63140 - RNA, 21 nt, synthetic construct
  source 1..21: mol_type = other RNA
aacaggctcaatacctgaaaa

SEQ ID NO: 63141 - RNA, 21 nt, synthetic construct
  source 1..21: mol_type = other RNA
aacaggctgagtgcggtggct

SEQ ID NO: 63142 - RNA, 21 nt, synthetic construct
  source 1..21: mol_type = other RNA
aacagggccactgagagctca

SEQ ID NO: 63143 - RNA, 21 nt, synthetic construct
  source 1..21: mol_type = other RNA
aacagggtaagattccgtctc

SEQ ID NO: 63144 - RNA, 21 nt, synthetic construct
  source 1..21: mol_type = other RNA
aacagggtctacaaaaggttt

SEQ ID NO: 63145 - RNA, 21 nt, synthetic construct
  source 1..21: mol_type = other RNA
aacagggttacagtatagggg

SEQ ID NO: 63146 - RNA, 21 nt, synthetic construct
  source 1..21: mol_type = other RNA
aacagggttattaacataccg

SEQ ID NO: 63147 - RNA, 21 nt, synthetic construct
  source 1..21: mol_type = other RNA
aacagggttttgttttgtttt

SEQ ID NO: 63148 - RNA, 21 nt, synthetic construct
  source 1..21: mol_type = other RNA
aacaggtagctgctttttaaa

SEQ ID NO: 63149 - RNA, 21 nt, synthetic construct
  source 1..21: mol_type = other RNA
aacaggtataaagtttccgtt

SEQ ID NO: 63150 - RNA, 21 nt, synthetic construct
  source 1..21: mol_type = other RNA
aacaggtgtaagagattaatt

SEQ ID NO: 63151 - RNA, 21 nt, synthetic construct
  source 1..21: mol_type = other RNA
aacaggttcttcatcagtccc

SEQ ID NO: 63152 - RNA, 21 nt, synthetic construct
  source 1..21: mol_type = other RNA
aacagtaaagtcactgtggaa

SEQ ID NO: 63153 - RNA, 21 nt, synthetic construct
  source 1..21: mol_type = other RNA
aacagtaattagttacatgag

SEQ ID NO: 63154 - RNA, 21 nt, synthetic construct
  source 1..21: mol_type = other RNA
aacagtacagtagtaaaacca

SEQ ID NO: 63155 - RNA, 21 nt, synthetic construct
  source 1..21: mol_type = other RNA
aacagtattgtcttctaaccc

SEQ ID NO: 63156 - RNA, 21 nt, synthetic construct
  source 1..21: mol_type = other RNA
aacagtcattcaggtctatgt

SEQ ID NO: 63157 - RNA, 21 nt, synthetic construct
  source 1..21: mol_type = other RNA
aacagtctcgtgaatttggta

SEQ ID NO: 63158 - RNA, 21 nt, synthetic construct
  source 1..21: mol_type = other RNA
aacagtgaccacagtttgaaa

SEQ ID NO: 63159 - RNA, 21 nt, synthetic construct
  source 1..21: mol_type = other RNA
aacagtgctgtgccagtgcaa

SEQ ID NO: 63160 - RNA, 21 nt, synthetic construct
  source 1..21: mol_type = other RNA
aacagtggttaggaaaataca

SEQ ID NO: 63161 - RNA, 21 nt, synthetic construct
  source 1..21: mol_type = other RNA
aacagtgtactagtctccata

SEQ ID NO: 63162 - RNA, 21 nt, synthetic construct
  source 1..21: mol_type = other RNA
aacagtgtgagaccgtgtctc

SEQ ID NO: 63163 - RNA, 21 nt, synthetic construct
  source 1..21: mol_type = other RNA
aacagtgtttacacacctgaa

SEQ ID NO: 63164 - RNA, 21 nt, synthetic construct
  source 1..21: mol_type = other RNA
aacagttactttcctttttca

SEQ ID NO: 63165 - RNA, 21 nt, synthetic construct
  source 1..21: mol_type = other RNA
aacagttcaatactactgcaa

SEQ ID NO: 63166 - RNA, 21 nt, synthetic construct
  source 1..21: mol_type = other RNA
aacagttgctattcaacaggt

SEQ ID NO: 63167 - RNA, 21 nt, synthetic construct
  source 1..21: mol_type = other RNA
aacagtttacacgccttcgcg

SEQ ID NO: 63168 - RNA, 21 nt, synthetic construct
  source 1..21: mol_type = other RNA
aacagtttagcaatccaagga

SEQ ID NO: 63169 - RNA, 21 nt, synthetic construct
  source 1..21: mol_type = other RNA
aacagtttccctctgagagaa

SEQ ID NO: 63170 - RNA, 21 nt, synthetic construct
  source 1..21: mol_type = other RNA
aacagtttggcaatttctcaa

SEQ ID NO: 63171 - RNA, 21 nt, synthetic construct
  source 1..21: mol_type = other RNA
aacataaaagcgtactgtgat

SEQ ID NO: 63172 - RNA, 21 nt, synthetic construct
  source 1..21: mol_type = other RNA
aacataaatagggtgctactc

SEQ ID NO: 63173 - RNA, 21 nt, synthetic construct
  source 1..21: mol_type = other RNA
aacataatctttggtgctgat

SEQ ID NO: 63174 - RNA, 21 nt, synthetic construct
  source 1..21: mol_type = other RNA
aacatacacatcagattttga

SEQ ID NO: 63175 - RNA, 21 nt, synthetic construct
  source 1..21: mol_type = other RNA
aacataccaaaacccttggga

SEQ ID NO: 63176 - RNA, 21 nt, synthetic construct
  source 1..21: mol_type = other RNA
aacataccccaaccctaccta

SEQ ID NO: 63177 - RNA, 21 nt, synthetic construct
  source 1..21: mol_type = other RNA
aacataccgacggctcaggcc

SEQ ID NO: 63178 - RNA, 21 nt, synthetic construct
  source 1..21: mol_type = other RNA
aacatataatccaactgcagt

SEQ ID NO: 63179 - RNA, 21 nt, synthetic construct
  source 1..21: mol_type = other RNA
aacatatccttctacatcccc

SEQ ID NO: 63180 - RNA, 21 nt, synthetic construct
  source 1..21: mol_type = other RNA
aacatatgcaggaccaacttt

SEQ ID NO: 63181 - RNA, 21 nt, synthetic construct
  source 1..21: mol_type = other RNA
aacatatgcatgttatttggg

SEQ ID NO: 63182 - RNA, 21 nt, synthetic construct
  source 1..21: mol_type = other RNA
aacatatgtcagatggtaaat

SEQ ID NO: 63183 - RNA, 21 nt, synthetic construct
  source 1..21: mol_type = other RNA
aacatcaaagtcccctgtaat

SEQ ID NO: 63184 - RNA, 21 nt, synthetic construct
  source 1..21: mol_type = other RNA
aacatcacccagctcgaccag

SEQ ID NO: 63185 - RNA, 21 nt, synthetic construct
  source 1..21: mol_type = other RNA
aacatcactagctattagaga

SEQ ID NO: 63186 - RNA, 21 nt, synthetic construct
  source 1..21: mol_type = other RNA
aacatcatctaatttcccatt

SEQ ID NO: 63187 - RNA, 21 nt, synthetic construct
  source 1..21: mol_type = other RNA
aacatcatgatttaatagagg

SEQ ID NO: 63188 - RNA, 21 nt, synthetic construct
  source 1..21: mol_type = other RNA
aacatccacagctttcttttc

SEQ ID NO: 63189 - RNA, 21 nt, synthetic construct
  source 1..21: mol_type = other RNA
aacatccattactcgtggtta

SEQ ID NO: 63190 - RNA, 21 nt, synthetic construct
  source 1..21: mol_type = other RNA
aacatcccaagtgcccattaa

SEQ ID NO: 63191 - RNA, 21 nt, synthetic construct
  source 1..21: mol_type = other RNA
aacatccctatgcaataactc

SEQ ID NO: 63192 - RNA, 21 nt, synthetic construct
  source 1..21: mol_type = other RNA
aacatcgtaaaacctcatctc

SEQ ID NO: 63193 - RNA, 21 nt, synthetic construct
  source 1..21: mol_type = other RNA
aacatctgcctcccgggtcca

SEQ ID NO: 63194 - RNA, 21 nt, synthetic construct
  source 1..21: mol_type = other RNA
aacatctggaaggaaacacta

SEQ ID NO: 63195 - RNA, 21 nt, synthetic construct
  source 1..21: mol_type = other RNA
aacatctggcagcaggggcta

SEQ ID NO: 63196 - RNA, 21 nt, synthetic construct
  source 1..21: mol_type = other RNA
aacatgaaaagatactcaaca

SEQ ID NO: 63197 - RNA, 21 nt, synthetic construct
  source 1..21: mol_type = other RNA
aacatgaacaagttacaaaca

SEQ ID NO: 63198 - RNA, 21 nt, synthetic construct
  source 1..21: mol_type = other RNA
aacatgaacgagaacaaaaca

SEQ ID NO: 63199 - RNA, 21 nt, synthetic construct
  source 1..21: mol_type = other RNA
aacatgaactactcaaagaaa

SEQ ID NO: 63200 - RNA, 21 nt, synthetic construct
  source 1..21: mol_type = other RNA
aacatgaataaccaatgtcag

SEQ ID NO: 63201 - RNA, 21 nt, synthetic construct
  source 1..21: mol_type = other RNA
aacatgacagatcccaaaaag

SEQ ID NO: 63202 - RNA, 21 nt, synthetic construct
  source 1..21: mol_type = other RNA
aacatgagagaaaattgttca

SEQ ID NO: 63203 - RNA, 21 nt, synthetic construct
  source 1..21: mol_type = other RNA
aacatgattgggtcaacaaac

SEQ ID NO: 63204 - RNA, 21 nt, synthetic construct
  source 1..21: mol_type = other RNA
aacatgcatatgtttgtaact

SEQ ID NO: 63205 - RNA, 21 nt, synthetic construct
  source 1..21: mol_type = other RNA
aacatgccagctttggctgaa

SEQ ID NO: 63206 - RNA, 21 nt, synthetic construct
  source 1..21: mol_type = other RNA
aacatgctaagtgtttaggat

SEQ ID NO: 63207 - RNA, 21 nt, synthetic construct
  source 1..21: mol_type = other RNA
aacatggatatttggccgggc

SEQ ID NO: 63208 - RNA, 21 nt, synthetic construct
  source 1..21: mol_type = other RNA
aacatggcacatgtctacctg

SEQ ID NO: 63209 - RNA, 21 nt, synthetic construct
  source 1..21: mol_type = other RNA
aacatggccagtatctccttt

SEQ ID NO: 63210 - RNA, 21 nt, synthetic construct
  source 1..21: mol_type = other RNA
aacatggcttagaaatgaaga

SEQ ID NO: 63211 - RNA, 21 nt, synthetic construct
  source 1..21: mol_type = other RNA
aacatgggaatgcatatatct

SEQ ID NO: 63212 - RNA, 21 nt, synthetic construct
  source 1..21: mol_type = other RNA
aacatggtaatttgtccatct

SEQ ID NO: 63213 - RNA, 21 nt, synthetic construct
  source 1..21: mol_type = other RNA
aacatggtagaccatataatc

SEQ ID NO: 63214 - RNA, 21 nt, synthetic construct
  source 1..21: mol_type = other RNA
aacatggtccacagaggcttt

SEQ ID NO: 63215 - RNA, 21 nt, synthetic construct
  source 1..21: mol_type = other RNA
aacatggtttgatcccactag

SEQ ID NO: 63216 - RNA, 21 nt, synthetic construct
  source 1..21: mol_type = other RNA
aacatgtaaaacagaccctta

SEQ ID NO: 63217 - RNA, 21 nt, synthetic construct
  source 1..21: mol_type = other RNA
aacatgtatgtttctcattct

SEQ ID NO: 63218 - RNA, 21 nt, synthetic construct
  source 1..21: mol_type = other RNA
aacatgtcttggtgtgctctt

SEQ ID NO: 63219 - RNA, 21 nt, synthetic construct
  source 1..21: mol_type = other RNA
aacatgtgaggatttatttct

SEQ ID NO: 63220 - RNA, 21 nt, synthetic construct
  source 1..21: mol_type = other RNA
aacatgtggaacataatcttt

SEQ ID NO: 63221 - RNA, 21 nt, synthetic construct
  source 1..21: mol_type = other RNA
aacatgtgtatttagggagca

SEQ ID NO: 63222 - RNA, 21 nt, synthetic construct
  source 1..21: mol_type = other RNA
aacatgttagattaggaaaca

SEQ ID NO: 63223 - RNA, 21 nt, synthetic construct
  source 1..21: mol_type = other RNA
aacatgttgtgtagaaatgtg

SEQ ID NO: 63224 - RNA, 21 nt, synthetic construct
  source 1..21: mol_type = other RNA
aacattaagggaaacagggtt

SEQ ID NO: 63225 - RNA, 21 nt, synthetic construct
  source 1..21: mol_type = other RNA
aacattacaacagcaaggctc

SEQ ID NO: 63226 - RNA, 21 nt, synthetic construct
  source 1..21: mol_type = other RNA
aacattaccaataaaagcctc

SEQ ID NO: 63227 - RNA, 21 nt, synthetic construct
  source 1..21: mol_type = other RNA
aacattatcttctaccttttg

SEQ ID NO: 63228 - RNA, 21 nt, synthetic construct
  source 1..21: mol_type = other RNA
aacattcatccctctaaatag

SEQ ID NO: 63229 - RNA, 21 nt, synthetic construct
  source 1..21: mol_type = other RNA
aacattcattcatgacaagaa

SEQ ID NO: 63230 - RNA, 21 nt, synthetic construct
  source 1..21: mol_type = other RNA
aacattctacagtattacaca

SEQ ID NO: 63231 - RNA, 21 nt, synthetic construct
  source 1..21: mol_type = other RNA
aacattgaaggcagaattata

SEQ ID NO: 63232 - RNA, 21 nt, synthetic construct
  source 1..21: mol_type = other RNA
aacattgagtttcaatgactt

SEQ ID NO: 63233 - RNA, 21 nt, synthetic construct
  source 1..21: mol_type = other RNA
aacattgatacaatacttgga

SEQ ID NO: 63234 - RNA, 21 nt, synthetic construct
  source 1..21: mol_type = other RNA
aacattgcctccatatgggat

SEQ ID NO: 63235 - RNA, 21 nt, synthetic construct
  source 1..21: mol_type = other RNA
aacattggaggataatatctg

SEQ ID NO: 63236 - RNA, 21 nt, synthetic construct
  source 1..21: mol_type = other RNA
aacattggtttgaaatgatct

SEQ ID NO: 63237 - RNA, 21 nt, synthetic construct
  source 1..21: mol_type = other RNA
aacattgtgcaaccatccccg

SEQ ID NO: 63238 - RNA, 21 nt, synthetic construct
  source 1..21: mol_type = other RNA
aacatttatacagttggaact

SEQ ID NO: 63239 - RNA, 21 nt, synthetic construct
  source 1..21: mol_type = other RNA
aacatttatggaattgccata

SEQ ID NO: 63240 - RNA, 21 nt, synthetic construct
  source 1..21: mol_type = other RNA
aacatttcttctagtcacatt

SEQ ID NO: 63241 - RNA, 21 nt, synthetic construct
  source 1..21: mol_type = other RNA
aacatttgaactcactggcca

SEQ ID NO: 63242 - RNA, 21 nt, synthetic construct
  source 1..21: mol_type = other RNA
aacatttgttgcatccccatt

SEQ ID NO: 63243 - RNA, 21 nt, synthetic construct
  source 1..21: mol_type = other RNA
aacattttagctggggcagca

SEQ ID NO: 63244 - RNA, 21 nt, synthetic construct
  source 1..21: mol_type = other RNA
aacattttattaggtgcacac

SEQ ID NO: 63245 - RNA, 21 nt, synthetic construct
  source 1..21: mol_type = other RNA
aacattttccctcctttttat

SEQ ID NO: 63246 - RNA, 21 nt, synthetic construct
  source 1..21: mol_type = other RNA
aacattttctctacagttaac

SEQ ID NO: 63247 - RNA, 21 nt, synthetic construct
  source 1..21: mol_type = other RNA
aacattttttgcagagacggg

SEQ ID NO: 63248 - RNA, 21 nt, synthetic construct
  source 1..21: mol_type = other RNA
aaccaaaaaatgtggcatatc

SEQ ID NO: 63249 - RNA, 21 nt, synthetic construct
  source 1..21: mol_type = other RNA
aaccaaaaaccacatttcata

SEQ ID NO: 63250 - RNA, 21 nt, synthetic construct
  source 1..21: mol_type = other RNA
aaccaaacactggaaatcaca

SEQ ID NO: 63251 - RNA, 21 nt, synthetic construct
  source 1..21: mol_type = other RNA
aaccaaacttggtttattttc

SEQ ID NO: 63252 - RNA, 21 nt, synthetic construct
  source 1..21: mol_type = other RNA
aaccaaagaaaggggaaggaa

SEQ ID NO: 63253 - RNA, 21 nt, synthetic construct
  source 1..21: mol_type = other RNA
aaccaaatgcagaaaataaac

SEQ ID NO: 63254 - RNA, 21 nt, synthetic construct
  source 1..21: mol_type = other RNA
aaccaaatgtggatagtgctt

SEQ ID NO: 63255 - RNA, 21 nt, synthetic construct
  source 1..21: mol_type = other RNA
aaccaacattgagtttcaatg

SEQ ID NO: 63256 - RNA, 21 nt, synthetic construct
  source 1..21: mol_type = other RNA
aaccaagaacaaccttatcta

SEQ ID NO: 63257 - RNA, 21 nt, synthetic construct
  source 1..21: mol_type = other RNA
aaccaagagcatagactttag

SEQ ID NO: 63258 - RNA, 21 nt, synthetic construct
  source 1..21: mol_type = other RNA
aaccaagcaagtaaaagaaga

SEQ ID NO: 63259 - RNA, 21 nt, synthetic construct
  source 1..21: mol_type = other RNA
aaccaagcccaactttttctt

SEQ ID NO: 63260 - RNA, 21 nt, synthetic construct
  source 1..21: mol_type = other RNA
aaccaagtttggttcatttca

SEQ ID NO: 63261 - RNA, 21 nt, synthetic construct
  source 1..21: mol_type = other RNA
aaccaatcgcagggccattct

SEQ ID NO: 63262 - RNA, 21 nt, synthetic construct
  source 1..21: mol_type = other RNA
aaccaatgtcagagatctgaa

SEQ ID NO: 63263 - RNA, 21 nt, synthetic construct
  source 1..21: mol_type = other RNA
aaccaatgttctcttttcctc

SEQ ID NO: 63264 - RNA, 21 nt, synthetic construct
  source 1..21: mol_type = other RNA
aaccaattaccataaagtctt

SEQ ID NO: 63265 - RNA, 21 nt, synthetic construct
  source 1..21: mol_type = other RNA
aaccaattatgctgagtgaat

SEQ ID NO: 63266 - RNA, 21 nt, synthetic construct
  source 1..21: mol_type = other RNA
aaccacaaacatgaataacca

SEQ ID NO: 63267 - RNA, 21 nt, synthetic construct
  source 1..21: mol_type = other RNA
aaccacacagagaacagcatt

SEQ ID NO: 63268 - RNA, 21 nt, synthetic construct
  source 1..21: mol_type = other RNA
aaccacactgacaggacagag

SEQ ID NO: 63269 - RNA, 21 nt, synthetic construct
  source 1..21: mol_type = other RNA
aaccacagagcctaaaatagg

SEQ ID NO: 63270 - RNA, 21 nt, synthetic construct
  source 1..21: mol_type = other RNA
aaccacatgtggcttgtggct

SEQ ID NO: 63271 - RNA, 21 nt, synthetic construct
  source 1..21: mol_type = other RNA
aaccacatttcatagcagaat

SEQ ID NO: 63272 - RNA, 21 nt, synthetic construct
  source 1..21: mol_type = other RNA
aaccacctaactactaataaa

SEQ ID NO: 63273 - RNA, 21 nt, synthetic construct
  source 1..21: mol_type = other RNA
aaccacctgggggagactgtg

SEQ ID NO: 63274 - RNA, 21 nt, synthetic construct
  source 1..21: mol_type = other RNA
aaccacgagtaatggatgttt

SEQ ID NO: 63275 - RNA, 21 nt, synthetic construct
  source 1..21: mol_type = other RNA
aaccacgcagaacagtgttta

SEQ ID NO: 63276 - RNA, 21 nt, synthetic construct
  source 1..21: mol_type = other RNA
aaccacgcagtttgttctgct

SEQ ID NO: 63277 - RNA, 21 nt, synthetic construct
  source 1..21: mol_type = other RNA
aaccacgcatctggtctatct

SEQ ID NO: 63278 - RNA, 21 nt, synthetic construct
  source 1..21: mol_type = other RNA
aaccactaaggtcaacacatc

SEQ ID NO: 63279 - RNA, 21 nt, synthetic construct
  source 1..21: mol_type = other RNA
aaccactgaaacttttctttt

SEQ ID NO: 63280 - RNA, 21 nt, synthetic construct
  source 1..21: mol_type = other RNA
aaccactgaatcagattttaa

SEQ ID NO: 63281 - RNA, 21 nt, synthetic construct
  source 1..21: mol_type = other RNA
aaccactgagcacaatgcctg

SEQ ID NO: 63282 - RNA, 21 nt, synthetic construct
  source 1..21: mol_type = other RNA
aaccactgatggaattctgac

SEQ ID NO: 63283 - RNA, 21 nt, synthetic construct
  source 1..21: mol_type = other RNA
aaccactggatacggaaatat

SEQ ID NO: 63284 - RNA, 21 nt, synthetic construct
  source 1..21: mol_type = other RNA
aaccactggggagtgtgccca

SEQ ID NO: 63285 - RNA, 21 nt, synthetic construct
  source 1..21: mol_type = other RNA
aaccactgtaggccccgatgc

SEQ ID NO: 63286 - RNA, 21 nt, synthetic construct
  source 1..21: mol_type = other RNA
aaccactgttatctgggaaca

SEQ ID NO: 63287 - RNA, 21 nt, synthetic construct
  source 1..21: mol_type = other RNA
aaccagaaaagtgaaacaata

SEQ ID NO: 63288 - RNA, 21 nt, synthetic construct
  source 1..21: mol_type = other RNA
aaccagacatttctcatactt

SEQ ID NO: 63289 - RNA, 21 nt, synthetic construct
  source 1..21: mol_type = other RNA
aaccagagcggaatttttata

SEQ ID NO: 63290 - RNA, 21 nt, synthetic construct
  source 1..21: mol_type = other RNA
aaccaggaggtttgcactggc

SEQ ID NO: 63291 - RNA, 21 nt, synthetic construct
  source 1..21: mol_type = other RNA
aaccaggcccggggcagagaa

SEQ ID NO: 63292 - RNA, 21 nt, synthetic construct
  source 1..21: mol_type = other RNA
aaccagggaggcggaggttgc

SEQ ID NO: 63293 - RNA, 21 nt, synthetic construct
  source 1..21: mol_type = other RNA
aaccagtgctctcccccgaat

SEQ ID NO: 63294 - RNA, 21 nt, synthetic construct
  source 1..21: mol_type = other RNA
aaccagtgggtcagctagtgt

SEQ ID NO: 63295 - RNA, 21 nt, synthetic construct
  source 1..21: mol_type = other RNA
aaccataatgagtaacatgtg

SEQ ID NO: 63296 - RNA, 21 nt, synthetic construct
  source 1..21: mol_type = other RNA
aaccatacagtgccttcagct

SEQ ID NO: 63297 - RNA, 21 nt, synthetic construct
  source 1..21: mol_type = other RNA
aaccatacttttcaactgaac

SEQ ID NO: 63298 - RNA, 21 nt, synthetic construct
  source 1..21: mol_type = other RNA
aaccatatacaaaactgaact

SEQ ID NO: 63299 - RNA, 21 nt, synthetic construct
  source 1..21: mol_type = other RNA
aaccatatggttaatagtgac

SEQ ID NO: 63300 - RNA, 21 nt, synthetic construct
  source 1..21: mol_type = other RNA
aaccatatggtttacaatggt

SEQ ID NO: 63301 - RNA, 21 nt, synthetic construct
  source 1..21: mol_type = other RNA
aaccatattagagtgaaaaga

SEQ ID NO: 63302 - RNA, 21 nt, synthetic construct
  source 1..21: mol_type = other RNA
aaccatcaagtgtgatcccaa

SEQ ID NO: 63303 - RNA, 21 nt, synthetic construct
  source 1..21: mol_type = other RNA
aaccatccccgctgtccattt

SEQ ID NO: 63304 - RNA, 21 nt, synthetic construct
  source 1..21: mol_type = other RNA
aaccatcctttccttgtccta

SEQ ID NO: 63305 - RNA, 21 nt, synthetic construct
  source 1..21: mol_type = other RNA
aaccatcgttcacactcgcac

SEQ ID NO: 63306 - RNA, 21 nt, synthetic construct
  source 1..21: mol_type = other RNA
aaccatcttcttagtgttccc

SEQ ID NO: 63307 - RNA, 21 nt, synthetic construct
  source 1..21: mol_type = other RNA
aaccatgtaacaggtttaata

SEQ ID NO: 63308 - RNA, 21 nt, synthetic construct
  source 1..21: mol_type = other RNA
aaccatgtcatgtatatgctg

SEQ ID NO: 63309 - RNA, 21 nt, synthetic construct
  source 1..21: mol_type = other RNA
aaccatgttcatgggaagatg

SEQ ID NO: 63310 - RNA, 21 nt, synthetic construct
  source 1..21: mol_type = other RNA
aaccattaacagctcagaagc

SEQ ID NO: 63311 - RNA, 21 nt, synthetic construct
  source 1..21: mol_type = other RNA
aaccattactcttctactcac

SEQ ID NO: 63312 - RNA, 21 nt, synthetic construct
  source 1..21: mol_type = other RNA
aaccattgagccaaagaagaa

SEQ ID NO: 63313 - RNA, 21 nt, synthetic construct
  source 1..21: mol_type = other RNA
aaccattgtaaaccatatggt

SEQ ID NO: 63314 - RNA, 21 nt, synthetic construct
  source 1..21: mol_type = other RNA
aaccatttaccccttaaattc

SEQ ID NO: 63315 - RNA, 21 nt, synthetic construct
  source 1..21: mol_type = other RNA
aaccattttcaatcttggaaa

SEQ ID NO: 63316 - RNA, 21 nt, synthetic construct
  source 1..21: mol_type = other RNA
aacccaaattaaaggatgtca

SEQ ID NO: 63317 - RNA, 21 nt, synthetic construct
  source 1..21: mol_type = other RNA
aacccaacaaacaattagcac

SEQ ID NO: 63318 - RNA, 21 nt, synthetic construct
  source 1..21: mol_type = other RNA
aacccaactctttctttgatt

SEQ ID NO: 63319 - RNA, 21 nt, synthetic construct
  source 1..21: mol_type = other RNA
aacccacagataatttcttca

SEQ ID NO: 63320 - RNA, 21 nt, synthetic construct
  source 1..21: mol_type = other RNA
aacccaccaggaggcggagct

SEQ ID NO: 63321 - RNA, 21 nt, synthetic construct
  source 1..21: mol_type = other RNA
aacccactgagcatttatata

SEQ ID NO: 63322 - RNA, 21 nt, synthetic construct
  source 1..21: mol_type = other RNA
aacccagacctgcacaaagga

SEQ ID NO: 63323 - RNA, 21 nt, synthetic construct
  source 1..21: mol_type = other RNA
aacccaggaacagattcacgc

SEQ ID NO: 63324 - RNA, 21 nt, synthetic construct
  source 1..21: mol_type = other RNA
aacccaggaggcaaaggttga

SEQ ID NO: 63325 - RNA, 21 nt, synthetic construct
  source 1..21: mol_type = other RNA
aacccagtgtctgctacaggg

SEQ ID NO: 63326 - RNA, 21 nt, synthetic construct
  source 1..21: mol_type = other RNA
aacccatatctttgcttataa

SEQ ID NO: 63327 - RNA, 21 nt, synthetic construct
  source 1..21: mol_type = other RNA
aacccatgatctttggaaatg

SEQ ID NO: 63328 - RNA, 21 nt, synthetic construct
  source 1..21: mol_type = other RNA
aacccattccaggttttatct

SEQ ID NO: 63329 - RNA, 21 nt, synthetic construct
  source 1..21: mol_type = other RNA
aacccatttcatgccatcctg

SEQ ID NO: 63330 - RNA, 21 nt, synthetic construct
  source 1..21: mol_type = other RNA
aaccccagaaggttaactaat

SEQ ID NO: 63331 - RNA, 21 nt, synthetic construct
  source 1..21: mol_type = other RNA
aaccccagagattgtcgttga

SEQ ID NO: 63332 - RNA, 21 nt, synthetic construct
  source 1..21: mol_type = other RNA
aaccccagggatattttcgtg

SEQ ID NO: 63333 - RNA, 21 nt, synthetic construct
  source 1..21: mol_type = other RNA
aacccccggccctgccgcttc

SEQ ID NO: 63334 - RNA, 21 nt, synthetic construct
  source 1..21: mol_type = other RNA
aaccccgcatactgtgcagtg

SEQ ID NO: 63335 - RNA, 21 nt, synthetic construct
  source 1..21: mol_type = other RNA
aacccgaggtgcacaagggaa

SEQ ID NO: 63336 - RNA, 21 nt, synthetic construct
  source 1..21: mol_type = other RNA
aacccgctctgggtgcgttga

SEQ ID NO: 63337 - RNA, 21 nt, synthetic construct
  source 1..21: mol_type = other RNA
aacccgttttttccttcattt

SEQ ID NO: 63338 - RNA, 21 nt, synthetic construct
  source 1..21: mol_type = other RNA
aaccctacacccatccaccca

SEQ ID NO: 63339 - RNA, 21 nt, synthetic construct
  source 1..21: mol_type = other RNA
aaccctacctagggtgtaaaa

SEQ ID NO: 63340 - RNA, 21 nt, synthetic construct
  source 1..21: mol_type = other RNA
aaccctcaaatgccatagagc

SEQ ID NO: 63341 - RNA, 21 nt, synthetic construct
  source 1..21: mol_type = other RNA
aaccctcaatccccatctggg

SEQ ID NO: 63342 - RNA, 21 nt, synthetic construct
  source 1..21: mol_type = other RNA
aaccctcacgaaagcggtcaa

SEQ ID NO: 63343 - RNA, 21 nt, synthetic construct
  source 1..21: mol_type = other RNA
aaccctcctcctctacaagtt

SEQ ID NO: 63344 - RNA, 21 nt, synthetic construct
  source 1..21: mol_type = other RNA
aaccctcggcctctactgact

SEQ ID NO: 63345 - RNA, 21 nt, synthetic construct
  source 1..21: mol_type = other RNA
aaccctgtacccattagacac

SEQ ID NO: 63346 - RNA, 21 nt, synthetic construct
  source 1..21: mol_type = other RNA
aaccctgttgggctattaagt

SEQ ID NO: 63347 - RNA, 21 nt, synthetic construct
  source 1..21: mol_type = other RNA
aaccctgtttcccttaatgtt

SEQ ID NO: 63348 - RNA, 21 nt, synthetic construct
  source 1..21: mol_type = other RNA
aaccctgttttgtagattaaa

SEQ ID NO: 63349 - RNA, 21 nt, synthetic construct
  source 1..21: mol_type = other RNA
aacccttcatcatttgtatta

SEQ ID NO: 63350 - RNA, 21 nt, synthetic construct
  source 1..21: mol_type = other RNA
aacccttggctagactaagaa

SEQ ID NO: 63351 - RNA, 21 nt, synthetic construct
  source 1..21: mol_type = other RNA
aacccttgggatgcagcaaaa

SEQ ID NO: 63352 - RNA, 21 nt, synthetic construct
  source 1..21: mol_type = other RNA
aacccttgttggacagctggg

SEQ ID NO: 63353 - RNA, 21 nt, synthetic construct
  source 1..21: mol_type = other RNA
aaccctttgttatctgaacgt

SEQ ID NO: 63354 - RNA, 21 nt, synthetic construct
  source 1..21: mol_type = other RNA
aaccgacagcagataagatcc

SEQ ID NO: 63355 - RNA, 21 nt, synthetic construct
  source 1..21: mol_type = other RNA
aaccgactgaaaggaaatgag

SEQ ID NO: 63356 - RNA, 21 nt, synthetic construct
  source 1..21: mol_type = other RNA
aaccggaaaatgcttaacaag

SEQ ID NO: 63357 - RNA, 21 nt, synthetic construct
  source 1..21: mol_type = other RNA
aaccggaacttgagtttgttc

SEQ ID NO: 63358 - RNA, 21 nt, synthetic construct
  source 1..21: mol_type = other RNA
aaccgtaacttcttttcttaa

SEQ ID NO: 63359 - RNA, 21 nt, synthetic construct
  source 1..21: mol_type = other RNA
aacctaaacctgtgatttcca

SEQ ID NO: 63360 - RNA, 21 nt, synthetic construct
  source 1..21: mol_type = other RNA
aacctaaagttgaggttgaag

SEQ ID NO: 63361 - RNA, 21 nt, synthetic construct
  source 1..21: mol_type = other RNA
aacctaaatgtccatcgagag

SEQ ID NO: 63362 - RNA, 21 nt, synthetic construct
  source 1..21: mol_type = other RNA
aacctaacatgtcttggtgtg

SEQ ID NO: 63363 - RNA, 21 nt, synthetic construct
  source 1..21: mol_type = other RNA
aacctaagaaaggtctagtgt

SEQ ID NO: 63364 - RNA, 21 nt, synthetic construct
  source 1..21: mol_type = other RNA
aacctactttaaatcagggcc

SEQ ID NO: 63365 - RNA, 21 nt, synthetic construct
  source 1..21: mol_type = other RNA
aacctataagacccagtggct

SEQ ID NO: 63366 - RNA, 21 nt, synthetic construct
  source 1..21: mol_type = other RNA
aacctattatttagagtttgc

SEQ ID NO: 63367 - RNA, 21 nt, synthetic construct
  source 1..21: mol_type = other RNA
aacctcaaagtggaaacaact

SEQ ID NO: 63368 - RNA, 21 nt, synthetic construct
  source 1..21: mol_type = other RNA
aacctcaactttaggttacgt

SEQ ID NO: 63369 - RNA, 21 nt, synthetic construct
  source 1..21: mol_type = other RNA
aacctcaagtcttttcctaga

SEQ ID NO: 63370 - RNA, 21 nt, synthetic construct
  source 1..21: mol_type = other RNA
aacctcataagaactcctggt

SEQ ID NO: 63371 - RNA, 21 nt, synthetic construct
  source 1..21: mol_type = other RNA
aacctcatttgcagagcaaac

SEQ ID NO: 63372 - RNA, 21 nt, synthetic construct
  source 1..21: mol_type = other RNA
aacctcccaacaggctgagtg

SEQ ID NO: 63373 - RNA, 21 nt, synthetic construct
  source 1..21: mol_type = other RNA
aacctccgtttttcaggttca

SEQ ID NO: 63374 - RNA, 21 nt, synthetic construct
  source 1..21: mol_type = other RNA
aacctcctggttttgatcatc

SEQ ID NO: 63375 - RNA, 21 nt, synthetic construct
  source 1..21: mol_type = other RNA
aacctctggaaaggacttgat

SEQ ID NO: 63376 - RNA, 21 nt, synthetic construct
  source 1..21: mol_type = other RNA
aacctctggtattttaagatt

SEQ ID NO: 63377 - RNA, 21 nt, synthetic construct
  source 1..21: mol_type = other RNA
aacctcttgaagtcagttaca

SEQ ID NO: 63378 - RNA, 21 nt, synthetic construct
  source 1..21: mol_type = other RNA
aacctgaaaaacggaggttgc

SEQ ID NO: 63379 - RNA, 21 nt, synthetic construct
  source 1..21: mol_type = other RNA
aacctgaaatggcttaaggaa

SEQ ID NO: 63380 - RNA, 21 nt, synthetic construct
  source 1..21: mol_type = other RNA
aacctgaggtctttaaaagaa

SEQ ID NO: 63381 - RNA, 21 nt, synthetic construct
  source 1..21: mol_type = other RNA
aacctgattagaggctgcacc

SEQ ID NO: 63382 - RNA, 21 nt, synthetic construct
  source 1..21: mol_type = other RNA
aacctgcaggtatttctaaat

SEQ ID NO: 63383 - RNA, 21 nt, synthetic construct
  source 1..21: mol_type = other RNA
aacctgcatggtgtaaaatac

SEQ ID NO: 63384 - RNA, 21 nt, synthetic construct
  source 1..21: mol_type = other RNA
aacctgccatggtgttaaata

SEQ ID NO: 63385 - RNA, 21 nt, synthetic construct
  source 1..21: mol_type = other RNA
aacctgctacgaatgaactcc

SEQ ID NO: 63386 - RNA, 21 nt, synthetic construct
  source 1..21: mol_type = other RNA
aacctgctttcctcatgtcca

SEQ ID NO: 63387 - RNA, 21 nt, synthetic construct
  source 1..21: mol_type = other RNA
aacctgctttctactagtata

SEQ ID NO: 63388 - RNA, 21 nt, synthetic construct
  source 1..21: mol_type = other RNA
aacctggaatcctctaccaaa

SEQ ID NO: 63389 - RNA, 21 nt, synthetic construct
  source 1..21: mol_type = other RNA
aacctggaatgggttggagga

SEQ ID NO: 63390 - RNA, 21 nt, synthetic construct
  source 1..21: mol_type = other RNA
aacctggcaatactctcagaa

SEQ ID NO: 63391 - RNA, 21 nt, synthetic construct
  source 1..21: mol_type = other RNA
aacctggtaataatgaaagct

SEQ ID NO: 63392 - RNA, 21 nt, synthetic construct
  source 1..21: mol_type = other RNA
aacctggtatgagtgtttccc

SEQ ID NO: 63393 - RNA, 21 nt, synthetic construct
  source 1..21: mol_type = other RNA
aacctgtgatttccagtgttt

SEQ ID NO: 63394 - RNA, 21 nt, synthetic construct
  source 1..21: mol_type = other RNA
aacctgttacatggttctgtg

SEQ ID NO: 63395 - RNA, 21 nt, synthetic construct
  source 1..21: mol_type = other RNA
aacctgttcatttgagaattt

SEQ ID NO: 63396 - RNA, 21 nt, synthetic construct
  source 1..21: mol_type = other RNA
aaccttaaaagagtgaaatga

SEQ ID NO: 63397 - RNA, 21 nt, synthetic construct
  source 1..21: mol_type = other RNA
aaccttagaaatttaaggacc

SEQ ID NO: 63398 - RNA, 21 nt, synthetic construct
  source 1..21: mol_type = other RNA
aaccttcaccaaagatttact

SEQ ID NO: 63399 - RNA, 21 nt, synthetic construct
  source 1..21: mol_type = other RNA
aaccttcctcttcctcatccc

SEQ ID NO: 63400 - RNA, 21 nt, synthetic construct
  source 1..21: mol_type = other RNA
aaccttctggggttcaaacca

SEQ ID NO: 63401 - RNA, 21 nt, synthetic construct
  source 1..21: mol_type = other RNA
aaccttcttatttccttccag

SEQ ID NO: 63402 - RNA, 21 nt, synthetic construct
  source 1..21: mol_type = other RNA
aaccttgaagtacttcagcgc

SEQ ID NO: 63403 - RNA, 21 nt, synthetic construct
  source 1..21: mol_type = other RNA
aaccttgggagaaaattttta

SEQ ID NO: 63404 - RNA, 21 nt, synthetic construct
  source 1..21: mol_type = other RNA
aaccttggtgtgcttctgata

SEQ ID NO: 63405 - RNA, 21 nt, synthetic construct
  source 1..21: mol_type = other RNA
aacctttaagttctccaagtt

SEQ ID NO: 63406 - RNA, 21 nt, synthetic construct
  source 1..21: mol_type = other RNA
aacctttctcaaagcccacca

SEQ ID NO: 63407 - RNA, 21 nt, synthetic construct
  source 1..21: mol_type = other RNA
aacctttgcctcctgggttca

SEQ ID NO: 63408 - RNA, 21 nt, synthetic construct
  source 1..21: mol_type = other RNA
aacctttgtccactgtcagtg

SEQ ID NO: 63409 - RNA, 21 nt, synthetic construct
  source 1..21: mol_type = other RNA
aacctttgttgaaaacgagga

SEQ ID NO: 63410 - RNA, 21 nt, synthetic construct
  source 1..21: mol_type = other RNA
aaccttttaggtgccccactc

SEQ ID NO: 63411 - RNA, 21 nt, synthetic construct
  source 1..21: mol_type = other RNA
aaccttttgtagaccctgtta

SEQ ID NO: 63412 - RNA, 21 nt, synthetic construct
  source 1..21: mol_type = other RNA
aacctttttgggatctgtcat

SEQ ID NO: 63413 - RNA, 21 nt, synthetic construct
  source 1..21: mol_type = other RNA
aaccttttttaaggaaaagtc

SEQ ID NO: 63414 - RNA, 21 nt, synthetic construct
  source 1..21: mol_type = other RNA
aacgaaccaattaccataaag

SEQ ID NO: 63415 - RNA, 21 nt, synthetic construct
  source 1..21: mol_type = other RNA
aacgaatgaaaacacaacata

SEQ ID NO: 63416 - RNA, 21 nt, synthetic construct
  source 1..21: mol_type = other RNA
aacgaattctttaaaactgct

SEQ ID NO: 63417 - RNA, 21 nt, synthetic construct
  source 1..21: mol_type = other RNA
aacgacaatctctggggttag

SEQ ID NO: 63418 - RNA, 21 nt, synthetic construct
  source 1..21: mol_type = other RNA
aacgacaccagaactacacat

SEQ ID NO: 63419 - RNA, 21 nt, synthetic construct
  source 1..21: mol_type = other RNA
aacgacagcaggaaaagctac

SEQ ID NO: 63420 - RNA, 21 nt, synthetic construct
  source 1..21: mol_type = other RNA
aacgaccggacgtggtggctc

SEQ ID NO: 63421 - RNA, 21 nt, synthetic construct
  source 1..21: mol_type = other RNA
aacgaccttgctcattcatct

SEQ ID NO: 63422 - RNA, 21 nt, synthetic construct
  source 1..21: mol_type = other RNA
aacgagaacaaaacaagaaga

SEQ ID NO: 63423 - RNA, 21 nt, synthetic construct
  source 1..21: mol_type = other RNA
aacgaggaaaagagaacattg

SEQ ID NO: 63424 - RNA, 21 nt, synthetic construct
  source 1..21: mol_type = other RNA
aacgatagtctcctatattgt

SEQ ID NO: 63425 - RNA, 21 nt, synthetic construct
  source 1..21: mol_type = other RNA
aacgatccttactaccaccac

SEQ ID NO: 63426 - RNA, 21 nt, synthetic construct
  source 1..21: mol_type = other RNA
aacgatgcattccagattgaa

SEQ ID NO: 63427 - RNA, 21 nt, synthetic construct
  source 1..21: mol_type = other RNA
aacgatggtttctgacacccg

SEQ ID NO: 63428 - RNA, 21 nt, synthetic construct
  source 1..21: mol_type = other RNA
aacgcacccagagcgggtttc

SEQ ID NO: 63429 - RNA, 21 nt, synthetic construct
  source 1..21: mol_type = other RNA
aacgcattgtgatgtctcaga

SEQ ID NO: 63430 - RNA, 21 nt, synthetic construct
  source 1..21: mol_type = other RNA
aacgcggaatgaagcaggcct

SEQ ID NO: 63431 - RNA, 21 nt, synthetic construct
  source 1..21: mol_type = other RNA
aacgcggcacttggtaagctg

SEQ ID NO: 63432 - RNA, 21 nt, synthetic construct
  source 1..21: mol_type = other RNA
aacgctaaattaaaggctgga

SEQ ID NO: 63433 - RNA, 21 nt, synthetic construct
  source 1..21: mol_type = other RNA
aacgctgtggctaacaatcaa

SEQ ID NO: 63434 - RNA, 21 nt, synthetic construct
  source 1..21: mol_type = other RNA
aacgctttttatggaaacatg

SEQ ID NO: 63435 - RNA, 21 nt, synthetic construct
  source 1..21: mol_type = other RNA
aacggaaactttatacctgtt

SEQ ID NO: 63436 - RNA, 21 nt, synthetic construct
  source 1..21: mol_type = other RNA
aacggaaatgagtgagccaca

SEQ ID NO: 63437 - RNA, 21 nt, synthetic construct
  source 1..21: mol_type = other RNA
aacggacatttttccaaagat

SEQ ID NO: 63438 - RNA, 21 nt, synthetic construct
  source 1..21: mol_type = other RNA
aacggaggttgcagtaagccg

SEQ ID NO: 63439 - RNA, 21 nt, synthetic construct
  source 1..21: mol_type = other RNA
aacggcttaacacctttgtat

SEQ ID NO: 63440 - RNA, 21 nt, synthetic construct
  source 1..21: mol_type = other RNA
aacgggttatacacacataag

SEQ ID NO: 63441 - RNA, 21 nt, synthetic construct
  source 1..21: mol_type = other RNA
aacgtatctgggaaaaaataa

SEQ ID NO: 63442 - RNA, 21 nt, synthetic construct
  source 1..21: mol_type = other RNA
aacgtcagagcagcactgatg

SEQ ID NO: 63443 - RNA, 21 nt, synthetic construct
  source 1..21: mol_type = other RNA
aacgtccatcaacagcagaac

SEQ ID NO: 63444 - RNA, 21 nt, synthetic construct
  source 1..21: mol_type = other RNA
aacgtgagctggaagtaagga

SEQ ID NO: 63445 - RNA, 21 nt, synthetic construct
  source 1..21: mol_type = other RNA
aacgtgcaaactaccaagact

SEQ ID NO: 63446 - RNA, 21 nt, synthetic construct
  source 1..21: mol_type = other RNA
aacgtgcacacccagttatct

SEQ ID NO: 63447 - RNA, 21 nt, synthetic construct
  source 1..21: mol_type = other RNA
aacgtgcttgctctgcggcag

SEQ ID NO: 63448 - RNA, 21 nt, synthetic construct
  source 1..21: mol_type = other RNA
aacgtgctttccttattgaga

SEQ ID NO: 63449 - RNA, 21 nt, synthetic construct
  source 1..21: mol_type = other RNA
aacgtgtgtgtaagcacacat

SEQ ID NO: 63450 - RNA, 21 nt, synthetic construct
  source 1..21: mol_type = other RNA
aacgtttatctacagaggatt

SEQ ID NO: 63451 - RNA, 21 nt, synthetic construct
  source 1..21: mol_type = other RNA
aacgtttggtgactgaattcc

SEQ ID NO: 63452 - RNA, 21 nt, synthetic construct
  source 1..21: mol_type = other RNA
aactaaactttgagtagcacc

SEQ ID NO: 63453 - RNA, 21 nt, synthetic construct
  source 1..21: mol_type = other RNA
aactaaatgtgagcatttagc

SEQ ID NO: 63454 - RNA, 21 nt, synthetic construct
  source 1..21: mol_type = other RNA
aactaacaaagaacaggaagg

SEQ ID NO: 63455 - RNA, 21 nt, synthetic construct
  source 1..21: mol_type = other RNA
aactaactagaaaaccgacag

SEQ ID NO: 63456 - RNA, 21 nt, synthetic construct
  source 1..21: mol_type = other RNA
aactaagaccccagtagaaat

SEQ ID NO: 63457 - RNA, 21 nt, synthetic construct
  source 1..21: mol_type = other RNA
aactaaggaaagctcaggacc

SEQ ID NO: 63458 - RNA, 21 nt, synthetic construct
  source 1..21: mol_type = other RNA
aactaaggtcaagagagatta

SEQ ID NO: 63459 - RNA, 21 nt, synthetic construct
  source 1..21: mol_type = other RNA
aactaagtggtattctatcat

SEQ ID NO: 63460 - RNA, 21 nt, synthetic construct
  source 1..21: mol_type = other RNA
aactaagtgtgaagattaagc

SEQ ID NO: 63461 - RNA, 21 nt, synthetic construct
  source 1..21: mol_type = other RNA
aactaataattgcttttgctg

SEQ ID NO: 63462 - RNA, 21 nt, synthetic construct
  source 1..21: mol_type = other RNA
aactaatagccagtgcagcaa

SEQ ID NO: 63463 - RNA, 21 nt, synthetic construct
  source 1..21: mol_type = other RNA
aactaatcaaacataccccaa

SEQ ID NO: 63464 - RNA, 21 nt, synthetic construct
  source 1..21: mol_type = other RNA
aactaattactgtttcttagc

SEQ ID NO: 63465 - RNA, 21 nt, synthetic construct
  source 1..21: mol_type = other RNA
aactacaattactgtacaaag

SEQ ID NO: 63466 - RNA, 21 nt, synthetic construct
  source 1..21: mol_type = other RNA
aactacacagacatgaacaat

SEQ ID NO: 63467 - RNA, 21 nt, synthetic construct
  source 1..21: mol_type = other RNA
aactacacatcagtgctgctc

SEQ ID NO: 63468 - RNA, 21 nt, synthetic construct
  source 1..21: mol_type = other RNA
aactacacattccagaccagc

SEQ ID NO: 63469 - RNA, 21 nt, synthetic construct
  source 1..21: mol_type = other RNA
aactacagacatgccacacca

SEQ ID NO: 63470 - RNA, 21 nt, synthetic construct
  source 1..21: mol_type = other RNA
aactacaggcaacaaaagaaa

SEQ ID NO: 63471 - RNA, 21 nt, synthetic construct
  source 1..21: mol_type = other RNA
aactacagtgtttagggacga

SEQ ID NO: 63472 - RNA, 21 nt, synthetic construct
  source 1..21: mol_type = other RNA
aactaccactgaggtcaagaa

SEQ ID NO: 63473 - RNA, 21 nt, synthetic construct
  source 1..21: mol_type = other RNA
aactacctagaaaaacaccaa

SEQ ID NO: 63474 - RNA, 21 nt, synthetic construct
  source 1..21: mol_type = other RNA
aactactatttcgcaaagcaa

SEQ ID NO: 63475 - RNA, 21 nt, synthetic construct
  source 1..21: mol_type = other RNA
aactactgatagcgaaaggta

SEQ ID NO: 63476 - RNA, 21 nt, synthetic construct
  source 1..21: mol_type = other RNA
aactacttcgtgtgtggagtg

SEQ ID NO: 63477 - RNA, 21 nt, synthetic construct
  source 1..21: mol_type = other RNA
aactagaaaaccgacagcaga

SEQ ID NO: 63478 - RNA, 21 nt, synthetic construct
  source 1..21: mol_type = other RNA
aactagaaacttcttctgttg

SEQ ID NO: 63479 - RNA, 21 nt, synthetic construct
  source 1..21: mol_type = other RNA
aactagaactgtgttacattg

SEQ ID NO: 63480 - RNA, 21 nt, synthetic construct
  source 1..21: mol_type = other RNA
aactagaatactccaccagca

SEQ ID NO: 63481 - RNA, 21 nt, synthetic construct
  source 1..21: mol_type = other RNA
aactagaattgactttaccct

SEQ ID NO: 63482 - RNA, 21 nt, synthetic construct
  source 1..21: mol_type = other RNA
aactagagaaagcatcagagc

SEQ ID NO: 63483 - RNA, 21 nt, synthetic construct
  source 1..21: mol_type = other RNA
aactagagatgggaaagtatt

SEQ ID NO: 63484 - RNA, 21 nt, synthetic construct
  source 1..21: mol_type = other RNA
aactagatgcctcgaaggcct

SEQ ID NO: 63485 - RNA, 21 nt, synthetic construct
  source 1..21: mol_type = other RNA
aactagattaccttgaagttt

SEQ ID NO: 63486 - RNA, 21 nt, synthetic construct
  source 1..21: mol_type = other RNA
aactaggctgtcccaaatgca

SEQ ID NO: 63487 - RNA, 21 nt, synthetic construct
  source 1..21: mol_type = other RNA
aactagtaagtaaaatcggaa

SEQ ID NO: 63488 - RNA, 21 nt, synthetic construct
  source 1..21: mol_type = other RNA
aactagtatcaacctgcaggt

SEQ ID NO: 63489 - RNA, 21 nt, synthetic construct
  source 1..21: mol_type = other RNA
aactatacttcaatgctacag

SEQ ID NO: 63490 - RNA, 21 nt, synthetic construct
  source 1..21: mol_type = other RNA
aactatagacccaaagcaaaa

SEQ ID NO: 63491 - RNA, 21 nt, synthetic construct
  source 1..21: mol_type = other RNA
aactataggagttcattcgta

SEQ ID NO: 63492 - RNA, 21 nt, synthetic construct
  source 1..21: mol_type = other RNA
aactatcaaaacacttctgtg

SEQ ID NO: 63493 - RNA, 21 nt, synthetic construct
  source 1..21: mol_type = other RNA
aactatccaacatgccagctt

SEQ ID NO: 63494 - RNA, 21 nt, synthetic construct
  source 1..21: mol_type = other RNA
aactatcctatgtggggaatg

SEQ ID NO: 63495 - RNA, 21 nt, synthetic construct
  source 1..21: mol_type = other RNA
aactatggacatgaggaaagc

SEQ ID NO: 63496 - RNA, 21 nt, synthetic construct
  source 1..21: mol_type = other RNA
aactattccataagatctgtc

SEQ ID NO: 63497 - RNA, 21 nt, synthetic construct
  source 1..21: mol_type = other RNA
aactatttctctttaaagctg

SEQ ID NO: 63498 - RNA, 21 nt, synthetic construct
  source 1..21: mol_type = other RNA
aactcaaaagtgaatcactac

SEQ ID NO: 63499 - RNA, 21 nt, synthetic construct
  source 1..21: mol_type = other RNA
aactcaaacccaaattaaagg

SEQ ID NO: 63500 - RNA, 21 nt, synthetic construct
  source 1..21: mol_type = other RNA
aactcaaacgtccatcaacag

SEQ ID NO: 63501 - RNA, 21 nt, synthetic construct
  source 1..21: mol_type = other RNA
aactcaacattcattcatgac

SEQ ID NO: 63502 - RNA, 21 nt, synthetic construct
  source 1..21: mol_type = other RNA
aactcaactgcctctacatca

SEQ ID NO: 63503 - RNA, 21 nt, synthetic construct
  source 1..21: mol_type = other RNA
aactcaagagttacttctgga

SEQ ID NO: 63504 - RNA, 21 nt, synthetic construct
  source 1..21: mol_type = other RNA
aactcaagttccggttctcag

SEQ ID NO: 63505 - RNA, 21 nt, synthetic construct
  source 1..21: mol_type = other RNA
aactcaatgttggttagtgtt

SEQ ID NO: 63506 - RNA, 21 nt, synthetic construct
  source 1..21: mol_type = other RNA
aactcacaaaaagtgtgacca

SEQ ID NO: 63507 - RNA, 21 nt, synthetic construct
  source 1..21: mol_type = other RNA
aactcactggccagcattact

SEQ ID NO: 63508 - RNA, 21 nt, synthetic construct
  source 1..21: mol_type = other RNA
aactcacttattagcaaagag

SEQ ID NO: 63509 - RNA, 21 nt, synthetic construct
  source 1..21: mol_type = other RNA
aactcagatctgagagataga

SEQ ID NO: 63510 - RNA, 21 nt, synthetic construct
  source 1..21: mol_type = other RNA
aactcatattagtctgtagct

SEQ ID NO: 63511 - RNA, 21 nt, synthetic construct
  source 1..21: mol_type = other RNA
aactcattatcccagacagat

SEQ ID NO: 63512 - RNA, 21 nt, synthetic construct
  source 1..21: mol_type = other RNA
aactcatttaaacgtcagagc

SEQ ID NO: 63513 - RNA, 21 nt, synthetic construct
  source 1..21: mol_type = other RNA
aactcatttctgcttgaatgt

SEQ ID NO: 63514 - RNA, 21 nt, synthetic construct
  source 1..21: mol_type = other RNA
aactccaaacctttaagttct

SEQ ID NO: 63515 - RNA, 21 nt, synthetic construct
  source 1..21: mol_type = other RNA
aactccaacaattcaacaata

SEQ ID NO: 63516 - RNA, 21 nt, synthetic construct
  source 1..21: mol_type = other RNA
aactccaagtctcatgcaatt

SEQ ID NO: 63517 - RNA, 21 nt, synthetic construct
  source 1..21: mol_type = other RNA
aactccaagtgtaaaaagaca

SEQ ID NO: 63518 - RNA, 21 nt, synthetic construct
  source 1..21: mol_type = other RNA
aactccacattgtcttaatta

SEQ ID NO: 63519 - RNA, 21 nt, synthetic construct
  source 1..21: mol_type = other RNA
aactccacctcagaaacaaac

SEQ ID NO: 63520 - RNA, 21 nt, synthetic construct
  source 1..21: mol_type = other RNA
aactccagcttttattagagc

SEQ ID NO: 63521 - RNA, 21 nt, synthetic construct
  source 1..21: mol_type = other RNA
aactccaggggacatgctctg

SEQ ID NO: 63522 - RNA, 21 nt, synthetic construct
  source 1..21: mol_type = other RNA
aactccatcttcacgtggcgc

SEQ ID NO: 63523 - RNA, 21 nt, synthetic construct
  source 1..21: mol_type = other RNA
aactcccagaactcgaagcct

SEQ ID NO: 63524 - RNA, 21 nt, synthetic construct
  source 1..21: mol_type = other RNA
aactccccatgcaggagaaac

SEQ ID NO: 63525 - RNA, 21 nt, synthetic construct
  source 1..21: mol_type = other RNA
aactcctatagttaagtctga

SEQ ID NO: 63526 - RNA, 21 nt, synthetic construct
  source 1..21: mol_type = other RNA
aactcctgaacaaaatttttg

SEQ ID NO: 63527 - RNA, 21 nt, synthetic construct
  source 1..21: mol_type = other RNA
aactcctgacctcaagcgatc

SEQ ID NO: 63528 - RNA, 21 nt, synthetic construct
  source 1..21: mol_type = other RNA
aactcctgcactcaagcaatc

SEQ ID NO: 63529 - RNA, 21 nt, synthetic construct
  source 1..21: mol_type = other RNA
aactcctgggctcatctaagc

SEQ ID NO: 63530 - RNA, 21 nt, synthetic construct
  source 1..21: mol_type = other RNA
aactcctggtctcccagcatg

SEQ ID NO: 63531 - RNA, 21 nt, synthetic construct
  source 1..21: mol_type = other RNA
aactcctgtatgccgctggtg

SEQ ID NO: 63532 - RNA, 21 nt, synthetic construct
  source 1..21: mol_type = other RNA
aactcctgttctttggagctg

SEQ ID NO: 63533 - RNA, 21 nt, synthetic construct
  source 1..21: mol_type = other RNA
aactcctttcttaccctcaca

SEQ ID NO: 63534 - RNA, 21 nt, synthetic construct
  source 1..21: mol_type = other RNA
aactcgaagccttcccctgct

SEQ ID NO: 63535 - RNA, 21 nt, synthetic construct
  source 1..21: mol_type = other RNA
aactcgtaatgcgatgatcaa

SEQ ID NO: 63536 - RNA, 21 nt, synthetic construct
  source 1..21: mol_type = other RNA
aactcgtggcctcaagcagtc

SEQ ID NO: 63537 - RNA, 21 nt, synthetic construct
  source 1..21: mol_type = other RNA
aactctaataacagcctaagc

SEQ ID NO: 63538 - RNA, 21 nt, synthetic construct
  source 1..21: mol_type = other RNA
aactctattttcctaaaactc

SEQ ID NO: 63539 - RNA, 21 nt, synthetic construct
  source 1..21: mol_type = other RNA
aactctcgacctcgtgatctg

SEQ ID NO: 63540 - RNA, 21 nt, synthetic construct
  source 1..21: mol_type = other RNA
aactctgaccattgtgtggac

SEQ ID NO: 63541 - RNA, 21 nt, synthetic construct
  source 1..21: mol_type = other RNA
aactctggcaggtcacctagc

SEQ ID NO: 63542 - RNA, 21 nt, synthetic construct
  source 1..21: mol_type = other RNA
aactctggctcagaaacaaca

SEQ ID NO: 63543 - RNA, 21 nt, synthetic construct
  source 1..21: mol_type = other RNA
aactctgtcatggtgtgtctg

SEQ ID NO: 63544 - RNA, 21 nt, synthetic construct
  source 1..21: mol_type = other RNA
aactctgtggagtcctgtcag

SEQ ID NO: 63545 - RNA, 21 nt, synthetic construct
  source 1..21: mol_type = other RNA
aactctgtttccttaccagtg

SEQ ID NO: 63546 - RNA, 21 nt, synthetic construct
  source 1..21: mol_type = other RNA
aactcttagcttagaagaaga

SEQ ID NO: 63547 - RNA, 21 nt, synthetic construct
  source 1..21: mol_type = other RNA
aactcttccttatccgataaa

SEQ ID NO: 63548 - RNA, 21 nt, synthetic construct
  source 1..21: mol_type = other RNA
aactcttctccaaggaaagtg

SEQ ID NO: 63549 - RNA, 21 nt, synthetic construct
  source 1..21: mol_type = other RNA
aactcttgagttaggaattta

SEQ ID NO: 63550 - RNA, 21 nt, synthetic construct
  source 1..21: mol_type = other RNA
aactcttgcattagagcccca

SEQ ID NO: 63551 - RNA, 21 nt, synthetic construct
  source 1..21: mol_type = other RNA
aactcttgcggtcttttagcc

SEQ ID NO: 63552 - RNA, 21 nt, synthetic construct
  source 1..21: mol_type = other RNA
aactcttggccattttctttt

SEQ ID NO: 63553 - RNA, 21 nt, synthetic construct
  source 1..21: mol_type = other RNA
aactcttgtagtatttttgca

SEQ ID NO: 63554 - RNA, 21 nt, synthetic construct
  source 1..21: mol_type = other RNA
aactgaaagcagggactccca

SEQ ID NO: 63555 - RNA, 21 nt, synthetic construct
  source 1..21: mol_type = other RNA
aactgaaatcgggagtaacag

SEQ ID NO: 63556 - RNA, 21 nt, synthetic construct
  source 1..21: mol_type = other RNA
aactgaacaacgctgtggcta

SEQ ID NO: 63557 - RNA, 21 nt, synthetic construct
  source 1..21: mol_type = other RNA
aactgaacatgtatgtttctc

SEQ ID NO: 63558 - RNA, 21 nt, synthetic construct
  source 1..21: mol_type = other RNA
aactgaacatttatacagttg

SEQ ID NO: 63559 - RNA, 21 nt, synthetic construct
  source 1..21: mol_type = other RNA
aactgaactacagtgtttagg

SEQ ID NO: 63560 - RNA, 21 nt, synthetic construct
  source 1..21: mol_type = other RNA
aactgaactcaaaatggatca

SEQ ID NO: 63561 - RNA, 21 nt, synthetic construct
  source 1..21: mol_type = other RNA
aactgaagcggggctgccact

SEQ ID NO: 63562 - RNA, 21 nt, synthetic construct
  source 1..21: mol_type = other RNA
aactgaagtaataaagcaagt

SEQ ID NO: 63563 - RNA, 21 nt, synthetic construct
  source 1..21: mol_type = other RNA
aactgaagtttatcagtctcc

SEQ ID NO: 63564 - RNA, 21 nt, synthetic construct
  source 1..21: mol_type = other RNA
aactgaatcagacaacacatt

SEQ ID NO: 63565 - RNA, 21 nt, synthetic construct
  source 1..21: mol_type = other RNA
aactgacaggactccacagag

SEQ ID NO: 63566 - RNA, 21 nt, synthetic construct
  source 1..21: mol_type = other RNA
aactgactctaaagtctatgc

SEQ ID NO: 63567 - RNA, 21 nt, synthetic construct
  source 1..21: mol_type = other RNA
aactgactgaaggattcctcc

SEQ ID NO: 63568 - RNA, 21 nt, synthetic construct
  source 1..21: mol_type = other RNA
aactgacttacagaccttatt

SEQ ID NO: 63569 - RNA, 21 nt, synthetic construct
  source 1..21: mol_type = other RNA
aactgacttcaagaggttaaa

SEQ ID NO: 63570 - RNA, 21 nt, synthetic construct
  source 1..21: mol_type = other RNA
aactgagaagagctgtaacag

SEQ ID NO: 63571 - RNA, 21 nt, synthetic construct
  source 1..21: mol_type = other RNA
aactgagaccggatgaggtgg

SEQ ID NO: 63572 - RNA, 21 nt, synthetic construct
  source 1..21: mol_type = other RNA
aactgagcatcccagaggtac

SEQ ID NO: 63573 - RNA, 21 nt, synthetic construct
  source 1..21: mol_type = other RNA
aactgaggcagagtagagaag

SEQ ID NO: 63574 - RNA, 21 nt, synthetic construct
  source 1..21: mol_type = other RNA
aactgaggtgtttttcagccc

SEQ ID NO: 63575 - RNA, 21 nt, synthetic construct
  source 1..21: mol_type = other RNA
aactgatatgagggatgagga

SEQ ID NO: 63576 - RNA, 21 nt, synthetic construct
  source 1..21: mol_type = other RNA
aactgatgtgaggatctgttg

SEQ ID NO: 63577 - RNA, 21 nt, synthetic construct
  source 1..21: mol_type = other RNA
aactgcaaaactttcttcaaa

SEQ ID NO: 63578 - RNA, 21 nt, synthetic construct
  source 1..21: mol_type = other RNA
aactgcagaatgacagaaaat

SEQ ID NO: 63579 - RNA, 21 nt, synthetic construct
  source 1..21: mol_type = other RNA
aactgcagaggtcaggaaggc

SEQ ID NO: 63580 - RNA, 21 nt, synthetic construct
  source 1..21: mol_type = other RNA
aactgcagcaattatttgaat

SEQ ID NO: 63581 - RNA, 21 nt, synthetic construct
  source 1..21: mol_type = other RNA
aactgcagtctgtcctcgtaa

SEQ ID NO: 63582 - RNA, 21 nt, synthetic construct
  source 1..21: mol_type = other RNA
aactgcatcttcttttacttg

SEQ ID NO: 63583 - RNA, 21 nt, synthetic construct
  source 1..21: mol_type = other RNA
aactgccaaaccctacaccca

SEQ ID NO: 63584 - RNA, 21 nt, synthetic construct
  source 1..21: mol_type = other RNA
aactgcctaagtaatgctggc

SEQ ID NO: 63585 - RNA, 21 nt, synthetic construct
  source 1..21: mol_type = other RNA
aactgcctctacatcacagac

SEQ ID NO: 63586 - RNA, 21 nt, synthetic construct
  source 1..21: mol_type = other RNA
aactgcctggacccgggaggc

SEQ ID NO: 63587 - RNA, 21 nt, synthetic construct
  source 1..21: mol_type = other RNA
aactgcgtggtttattcatat

SEQ ID NO: 63588 - RNA, 21 nt, synthetic construct
  source 1..21: mol_type = other RNA
aactgctaatggtccttgctg

SEQ ID NO: 63589 - RNA, 21 nt, synthetic construct
  source 1..21: mol_type = other RNA
aactgctcataatagtctcac

SEQ ID NO: 63590 - RNA, 21 nt, synthetic construct
  source 1..21: mol_type = other RNA
aactgctcctctgactttatg

SEQ ID NO: 63591 - RNA, 21 nt, synthetic construct
  source 1..21: mol_type = other RNA
aactgctgacagattaaatac

SEQ ID NO: 63592 - RNA, 21 nt, synthetic construct
  source 1..21: mol_type = other RNA
aactgctgagtcttctactgt

SEQ ID NO: 63593 - RNA, 21 nt, synthetic construct
  source 1..21: mol_type = other RNA
aactgctggtctggaatgtgt

SEQ ID NO: 63594 - RNA, 21 nt, synthetic construct
  source 1..21: mol_type = other RNA
aactgcttccctagcccagca

SEQ ID NO: 63595 - RNA, 21 nt, synthetic construct
  source 1..21: mol_type = other RNA
aactggaaggaaataagaagg

SEQ ID NO: 63596 - RNA, 21 nt, synthetic construct
  source 1..21: mol_type = other RNA
aactggaatcaatccagacag

SEQ ID NO: 63597 - RNA, 21 nt, synthetic construct
  source 1..21: mol_type = other RNA
aactggaattcatcaaagtta

SEQ ID NO: 63598 - RNA, 21 nt, synthetic construct
  source 1..21: mol_type = other RNA
aactggagtgcagtggtgcaa

SEQ ID NO: 63599 - RNA, 21 nt, synthetic construct
  source 1..21: mol_type = other RNA
aactggatgaatacaaaggtg

SEQ ID NO: 63600 - RNA, 21 nt, synthetic construct
  source 1..21: mol_type = other RNA
aactggcaatcaaatggcctt

SEQ ID NO: 63601 - RNA, 21 nt, synthetic construct
  source 1..21: mol_type = other RNA
aactggcccctccatggaaac

SEQ ID NO: 63602 - RNA, 21 nt, synthetic construct
  source 1..21: mol_type = other RNA
aactgggacttctagcctcca

SEQ ID NO: 63603 - RNA, 21 nt, synthetic construct
  source 1..21: mol_type = other RNA
aactgggagaatggcaaggct

SEQ ID NO: 63604 - RNA, 21 nt, synthetic construct
  source 1..21: mol_type = other RNA
aactggggcttgaacccgagg

SEQ ID NO: 63605 - RNA, 21 nt, synthetic construct
  source 1..21: mol_type = other RNA
aactgggggctggacataagg

SEQ ID NO: 63606 - RNA, 21 nt, synthetic construct
  source 1..21: mol_type = other RNA
aactgggtgtagggggaaaac

SEQ ID NO: 63607 - RNA, 21 nt, synthetic construct
  source 1..21: mol_type = other RNA
aactgggtgtgcacgtttgct

SEQ ID NO: 63608 - RNA, 21 nt, synthetic construct
  source 1..21: mol_type = other RNA
aactggtccagatgaagcagg

SEQ ID NO: 63609 - RNA, 21 nt, synthetic construct
  source 1..21: mol_type = other RNA
aactggtctcctttctatact

SEQ ID NO: 63610 - RNA, 21 nt, synthetic construct
  source 1..21: mol_type = other RNA
aactggtgaactgggtgtagg

SEQ ID NO: 63611 - RNA, 21 nt, synthetic construct
  source 1..21: mol_type = other RNA
aactggtgcttttttggtgtt

SEQ ID NO: 63612 - RNA, 21 nt, synthetic construct
  source 1..21: mol_type = other RNA
aactggtttctgcatacttag

SEQ ID NO: 63613 - RNA, 21 nt, synthetic construct
  source 1..21: mol_type = other RNA
aactggttttcctgatggaca

SEQ ID NO: 63614 - RNA, 21 nt, synthetic construct
  source 1..21: mol_type = other RNA
aactgtaaagtaatcaagtga

SEQ ID NO: 63615 - RNA, 21 nt, synthetic construct
  source 1..21: mol_type = other RNA
aactgtattgcaaactaagtg

SEQ ID NO: 63616 - RNA, 21 nt, synthetic construct
  source 1..21: mol_type = other RNA
aactgtcacaattcacagaat

SEQ ID NO: 63617 - RNA, 21 nt, synthetic construct
  source 1..21: mol_type = other RNA
aactgtcactgacacaggctg

SEQ ID NO: 63618 - RNA, 21 nt, synthetic construct
  source 1..21: mol_type = other RNA
aactgtcatcagcgtcctcac

SEQ ID NO: 63619 - RNA, 21 nt, synthetic construct
  source 1..21: mol_type = other RNA
aactgtcctctcttgttgagg

SEQ ID NO: 63620 - RNA, 21 nt, synthetic construct
  source 1..21: mol_type = other RNA
aactgtcctgaattctaacat

SEQ ID NO: 63621 - RNA, 21 nt, synthetic construct
  source 1..21: mol_type = other RNA
aactgtggtcactgtttggac

SEQ ID NO: 63622 - RNA, 21 nt, synthetic construct
  source 1..21: mol_type = other RNA
aactgtgtgcttggagtcact

SEQ ID NO: 63623 - RNA, 21 nt, synthetic construct
  source 1..21: mol_type = other RNA
aactgtgttacattgccttcg

SEQ ID NO: 63624 - RNA, 21 nt, synthetic construct
  source 1..21: mol_type = other RNA
aactgttccccaagccaaatt

SEQ ID NO: 63625 - RNA, 21 nt, synthetic construct
  source 1..21: mol_type = other RNA
aactgttggaaaaatcgtcct

SEQ ID NO: 63626 - RNA, 21 nt, synthetic construct
  source 1..21: mol_type = other RNA
aactgtttggctgggagctta

SEQ ID NO: 63627 - RNA, 21 nt, synthetic construct
  source 1..21: mol_type = other RNA
aactgttttccacagtgactt

SEQ ID NO: 63628 - RNA, 21 nt, synthetic construct
  source 1..21: mol_type = other RNA
aactgttttttcctcccttca

SEQ ID NO: 63629 - RNA, 21 nt, synthetic construct
  source 1..21: mol_type = other RNA
aacttaaaggtttggagtttg

SEQ ID NO: 63630 - RNA, 21 nt, synthetic construct
  source 1..21: mol_type = other RNA
aacttaagtatctcagtcata

SEQ ID NO: 63631 - RNA, 21 nt, synthetic construct
  source 1..21: mol_type = other RNA
aacttaagtatctcggtcatt

SEQ ID NO: 63632 - RNA, 21 nt, synthetic construct
  source 1..21: mol_type = other RNA
aacttacagtaagatcctgga

SEQ ID NO: 63633 - RNA, 21 nt, synthetic construct
  source 1..21: mol_type = other RNA
aacttagccttggtaaaatca

SEQ ID NO: 63634 - RNA, 21 nt, synthetic construct
  source 1..21: mol_type = other RNA
aacttaggaggctattaactt

SEQ ID NO: 63635 - RNA, 21 nt, synthetic construct
  source 1..21: mol_type = other RNA
aacttatataaatgctcagtg

SEQ ID NO: 63636 - RNA, 21 nt, synthetic construct
  source 1..21: mol_type = other RNA
aacttatgcaagatggcaagt

SEQ ID NO: 63637 - RNA, 21 nt, synthetic construct
  source 1..21: mol_type = other RNA
aacttatgcatcttgcaaaac

SEQ ID NO: 63638 - RNA, 21 nt, synthetic construct
  source 1..21: mol_type = other RNA
aacttattggaaaactctgtt

SEQ ID NO: 63639 - RNA, 21 nt, synthetic construct
  source 1..21: mol_type = other RNA
aacttatttccagggggtatg

SEQ ID NO: 63640 - RNA, 21 nt, synthetic construct
  source 1..21: mol_type = other RNA
aacttcaaggtaatctagttt

SEQ ID NO: 63641 - RNA, 21 nt, synthetic construct
  source 1..21: mol_type = other RNA
aacttcacaccatttagatca

SEQ ID NO: 63642 - RNA, 21 nt, synthetic construct
  source 1..21: mol_type = other RNA
aacttcacctctacacaaaaa

SEQ ID NO: 63643 - RNA, 21 nt, synthetic construct
  source 1..21: mol_type = other RNA
aacttcagttttgagtggcat

SEQ ID NO: 63644 - RNA, 21 nt, synthetic construct
  source 1..21: mol_type = other RNA
aacttccaaccatcttcttag

SEQ ID NO: 63645 - RNA, 21 nt, synthetic construct
  source 1..21: mol_type = other RNA
aacttccagaaacttccaacc

SEQ ID NO: 63646 - RNA, 21 nt, synthetic construct
  source 1..21: mol_type = other RNA
aacttccagcaagactttatg

SEQ ID NO: 63647 - RNA, 21 nt, synthetic construct
  source 1..21: mol_type = other RNA
aacttccatgagattacatag

SEQ ID NO: 63648 - RNA, 21 nt, synthetic construct
  source 1..21: mol_type = other RNA
aacttcccagacagggaatgc

SEQ ID NO: 63649 - RNA, 21 nt, synthetic construct
  source 1..21: mol_type = other RNA
aacttccctctcagtggtgct

SEQ ID NO: 63650 - RNA, 21 nt, synthetic construct
  source 1..21: mol_type = other RNA
aacttcccttagctctcatgt

SEQ ID NO: 63651 - RNA, 21 nt, synthetic construct
  source 1..21: mol_type = other RNA
aacttcctgttttagtggctc

SEQ ID NO: 63652 - RNA, 21 nt, synthetic construct
  source 1..21: mol_type = other RNA
aacttcgaactaaggaaagct

SEQ ID NO: 63653 - RNA, 21 nt, synthetic construct
  source 1..21: mol_type = other RNA
aacttctaatgcccattaaaa

SEQ ID NO: 63654 - RNA, 21 nt, synthetic construct
  source 1..21: mol_type = other RNA
aacttctctggagcaagcatg

SEQ ID NO: 63655 - RNA, 21 nt, synthetic construct
  source 1..21: mol_type = other RNA
aacttcttcaaaagacatcac

SEQ ID NO: 63656 - RNA, 21 nt, synthetic construct
  source 1..21: mol_type = other RNA
aacttcttctgttggagagat

SEQ ID NO: 63657 - RNA, 21 nt, synthetic construct
  source 1..21: mol_type = other RNA
aacttgaaccttcctcttcct

SEQ ID NO: 63658 - RNA, 21 nt, synthetic construct
  source 1..21: mol_type = other RNA
aacttgaaggcaatgtaggga

SEQ ID NO: 63659 - RNA, 21 nt, synthetic construct
  source 1..21: mol_type = other RNA
aacttgaatactcgtgtgtct

SEQ ID NO: 63660 - RNA, 21 nt, synthetic construct
  source 1..21: mol_type = other RNA
aacttgaattcagatggcccc

SEQ ID NO: 63661 - RNA, 21 nt, synthetic construct
  source 1..21: mol_type = other RNA
aacttgagcagatcagtaaca

SEQ ID NO: 63662 - RNA, 21 nt, synthetic construct
  source 1..21: mol_type = other RNA
aacttgagtttgttctgtcac

SEQ ID NO: 63663 - RNA, 21 nt, synthetic construct
  source 1..21: mol_type = other RNA
aacttgatcagggatttggcc

SEQ ID NO: 63664 - RNA, 21 nt, synthetic construct
  source 1..21: mol_type = other RNA
aacttgcagaagagtgaagct

SEQ ID NO: 63665 - RNA, 21 nt, synthetic construct
  source 1..21: mol_type = other RNA
aacttgccatcttgcataagt

SEQ ID NO: 63666 - RNA, 21 nt, synthetic construct
  source 1..21: mol_type = other RNA
aacttgcttaggctgaagcag

SEQ ID NO: 63667 - RNA, 21 nt, synthetic construct
  source 1..21: mol_type = other RNA
aacttgctttgaatttggaaa

SEQ ID NO: 63668 - RNA, 21 nt, synthetic construct
  source 1..21: mol_type = other RNA
aacttggagaacttaaaggtt

SEQ ID NO: 63669 - RNA, 21 nt, synthetic construct
  source 1..21: mol_type = other RNA
aacttggattgtgtgtcgaga

SEQ ID NO: 63670 - RNA, 21 nt, synthetic construct
  source 1..21: mol_type = other RNA
aacttggtaaaaagtgcttct

SEQ ID NO: 63671 - RNA, 21 nt, synthetic construct
  source 1..21: mol_type = other RNA
aacttggtcgaaaacctgaaa

SEQ ID NO: 63672 - RNA, 21 nt, synthetic construct
  source 1..21: mol_type = other RNA
aacttggtctgggtgatatct

SEQ ID NO: 63673 - RNA, 21 nt, synthetic construct
  source 1..21: mol_type = other RNA
aacttggtttattttctgcat

SEQ ID NO: 63674 - RNA, 21 nt, synthetic construct
  source 1..21: mol_type = other RNA
aacttgtagaggaggagggtt

SEQ ID NO: 63675 - RNA, 21 nt, synthetic construct
  source 1..21: mol_type = other RNA
aacttgtatgaaattagttcc

SEQ ID NO: 63676 - RNA, 21 nt, synthetic construct
  source 1..21: mol_type = other RNA
aacttgtcacaaaatgtggat

SEQ ID NO: 63677 - RNA, 21 nt, synthetic construct
  source 1..21: mol_type = other RNA
aacttgtctcggatttaagag

SEQ ID NO: 63678 - RNA, 21 nt, synthetic construct
  source 1..21: mol_type = other RNA
aacttgtctttgtctattccc

SEQ ID NO: 63679 - RNA, 21 nt, synthetic construct
  source 1..21: mol_type = other RNA
aacttgttcatgtttacagaa

SEQ ID NO: 63680 - RNA, 21 nt, synthetic construct
  source 1..21: mol_type = other RNA
aactttaaagctctatggcat

SEQ ID NO: 63681 - RNA, 21 nt, synthetic construct
  source 1..21: mol_type = other RNA
aactttaaattttgagacctc

SEQ ID NO: 63682 - RNA, 21 nt, synthetic construct
  source 1..21: mol_type = other RNA
aactttaatcaccaggcgcgg

SEQ ID NO: 63683 - RNA, 21 nt, synthetic construct
  source 1..21: mol_type = other RNA
aactttaggtcagaatacaaa

SEQ ID NO: 63684 - RNA, 21 nt, synthetic construct
  source 1..21: mol_type = other RNA
aactttaggttacgtactagg

SEQ ID NO: 63685 - RNA, 21 nt, synthetic construct
  source 1..21: mol_type = other RNA
aactttatacctgttgaatag

SEQ ID NO: 63686 - RNA, 21 nt, synthetic construct
  source 1..21: mol_type = other RNA
aactttcaacctaacatgtct

SEQ ID NO: 63687 - RNA, 21 nt, synthetic construct
  source 1..21: mol_type = other RNA
aactttccagaagtaactctt

SEQ ID NO: 63688 - RNA, 21 nt, synthetic construct
  source 1..21: mol_type = other RNA
aactttcgaagtgggaagcaa

SEQ ID NO: 63689 - RNA, 21 nt, synthetic construct
  source 1..21: mol_type = other RNA
aactttctattcccctggatc

SEQ ID NO: 63690 - RNA, 21 nt, synthetic construct
  source 1..21: mol_type = other RNA
aactttctgcttaaagcctct

SEQ ID NO: 63691 - RNA, 21 nt, synthetic construct
  source 1..21: mol_type = other RNA
aactttgaaatcagaacttga

SEQ ID NO: 63692 - RNA, 21 nt, synthetic construct
  source 1..21: mol_type = other RNA
aactttgagtagcaccctatt

SEQ ID NO: 63693 - RNA, 21 nt, synthetic construct
  source 1..21: mol_type = other RNA
aactttgatgaattccagttt

SEQ ID NO: 63694 - RNA, 21 nt, synthetic construct
  source 1..21: mol_type = other RNA
aacttttaacccacagataat

SEQ ID NO: 63695 - RNA, 21 nt, synthetic construct
  source 1..21: mol_type = other RNA
aacttttagtaggtctccttg

SEQ ID NO: 63696 - RNA, 21 nt, synthetic construct
  source 1..21: mol_type = other RNA
aactttttgggcctttctgtt

SEQ ID NO: 63697 - RNA, 21 nt, synthetic construct
  source 1..21: mol_type = other RNA
aagaaaaaataaaggctttcg

SEQ ID NO: 63698 - RNA, 21 nt, synthetic construct
  source 1..21: mol_type = other RNA
aagaaaaacagaagacacaaa

SEQ ID NO: 63699 - RNA, 21 nt, synthetic construct
  source 1..21: mol_type = other RNA
aagaaaaacctaaacctgtga

SEQ ID NO: 63700 - RNA, 21 nt, synthetic construct
  source 1..21: mol_type = other RNA
aagaaaaactgaactacagtg

SEQ ID NO: 63701 - RNA, 21 nt, synthetic construct
  source 1..21: mol_type = other RNA
aagaaaaagaaaagacaagac

SEQ ID NO: 63702 - RNA, 21 nt, synthetic construct
  source 1..21: mol_type = other RNA
aagaaaaagcaacttgaaggc

SEQ ID NO: 63703 - RNA, 21 nt, synthetic construct
  source 1..21: mol_type = other RNA
aagaaaaagcagagaaactgg

SEQ ID NO: 63704 - RNA, 21 nt, synthetic construct
  source 1..21: mol_type = other RNA
aagaaaaagctcacctctgga

SEQ ID NO: 63705 - RNA, 21 nt, synthetic construct
  source 1..21: mol_type = other RNA
aagaaaaaggttaagggaaga

SEQ ID NO: 63706 - RNA, 21 nt, synthetic construct
  source 1..21: mol_type = other RNA
aagaaaaagttgggcttggtt

SEQ ID NO: 63707 - RNA, 21 nt, synthetic construct
  source 1..21: mol_type = other RNA
aagaaaaattccctcagcaaa

SEQ ID NO: 63708 - RNA, 21 nt, synthetic construct
  source 1..21: mol_type = other RNA
aagaaaacaaattcatgcaac

SEQ ID NO: 63709 - RNA, 21 nt, synthetic construct
  source 1..21: mol_type = other RNA
aagaaaacactccagaatgac

SEQ ID NO: 63710 - RNA, 21 nt, synthetic construct
  source 1..21: mol_type = other RNA
aagaaaacagataacctagat

SEQ ID NO: 63711 - RNA, 21 nt, synthetic construct
  source 1..21: mol_type = other RNA
aagaaaagaaaagtttcagtg

SEQ ID NO: 63712 - RNA, 21 nt, synthetic construct
  source 1..21: mol_type = other RNA
aagaaaagaagttacggttcc

SEQ ID NO: 63713 - RNA, 21 nt, synthetic construct
  source 1..21: mol_type = other RNA
aagaaaagtttcagtggttaa

SEQ ID NO: 63714 - RNA, 21 nt, synthetic construct
  source 1..21: mol_type = other RNA
aagaaaataaaattctgaccc

SEQ ID NO: 63715 - RNA, 21 nt, synthetic construct
  source 1..21: mol_type = other RNA
aagaaaataatgttttccgtg

SEQ ID NO: 63716 - RNA, 21 nt, synthetic construct
  source 1..21: mol_type = other RNA
aagaaaatcattgttcaggga

SEQ ID NO: 63717 - RNA, 21 nt, synthetic construct
  source 1..21: mol_type = other RNA
aagaaaatccaaaagcctcaa

SEQ ID NO: 63718 - RNA, 21 nt, synthetic construct
  source 1..21: mol_type = other RNA
aagaaaatccaagaagacatg

SEQ ID NO: 63719 - RNA, 21 nt, synthetic construct
  source 1..21: mol_type = other RNA
aagaaaatctgacaatttgcc

SEQ ID NO: 63720 - RNA, 21 nt, synthetic construct
  source 1..21: mol_type = other RNA
aagaaaatggccaagagttgc

SEQ ID NO: 63721 - RNA, 21 nt, synthetic construct
  source 1..21: mol_type = other RNA
aagaaaatgtgacattagtgg

SEQ ID NO: 63722 - RNA, 21 nt, synthetic construct
  source 1..21: mol_type = other RNA
aagaaaattttctgagcaact

SEQ ID NO: 63723 - RNA, 21 nt, synthetic construct
  source 1..21: mol_type = other RNA
aagaaaccaagagcatagact

SEQ ID NO: 63724 - RNA, 21 nt, synthetic construct
  source 1..21: mol_type = other RNA
aagaaaccacagagcctaaaa

SEQ ID NO: 63725 - RNA, 21 nt, synthetic construct
  source 1..21: mol_type = other RNA
aagaaacctttctcaaagccc

SEQ ID NO: 63726 - RNA, 21 nt, synthetic construct
  source 1..21: mol_type = other RNA
aagaaactacctagaaaaaca

SEQ ID NO: 63727 - RNA, 21 nt, synthetic construct
  source 1..21: mol_type = other RNA
aagaaagaaaaactgaactac

SEQ ID NO: 63728 - RNA, 21 nt, synthetic construct
  source 1..21: mol_type = other RNA
aagaaagaaggccatttgatt

SEQ ID NO: 63729 - RNA, 21 nt, synthetic construct
  source 1..21: mol_type = other RNA
aagaaagagttgggtttttga

SEQ ID NO: 63730 - RNA, 21 nt, synthetic construct
  source 1..21: mol_type = other RNA
aagaaagatctcaaacagcct

SEQ ID NO: 63731 - RNA, 21 nt, synthetic construct
  source 1..21: mol_type = other RNA
aagaaagcaggtcatgacttt

SEQ ID NO: 63732 - RNA, 21 nt, synthetic construct
  source 1..21: mol_type = other RNA
aagaaagctctcaattaatgc

SEQ ID NO: 63733 - RNA, 21 nt, synthetic construct
  source 1..21: mol_type = other RNA
aagaaagctgtggatgttggt

SEQ ID NO: 63734 - RNA, 21 nt, synthetic construct
  source 1..21: mol_type = other RNA
aagaaaggacttcagtcctta

SEQ ID NO: 63735 - RNA, 21 nt, synthetic construct
  source 1..21: mol_type = other RNA
aagaaaggagttcagctttaa

SEQ ID NO: 63736 - RNA, 21 nt, synthetic construct
  source 1..21: mol_type = other RNA
aagaaaggggaaggaattttc

SEQ ID NO: 63737 - RNA, 21 nt, synthetic construct
  source 1..21: mol_type = other RNA
aagaaagggtagctttgatgc

SEQ ID NO: 63738 - RNA, 21 nt, synthetic construct
  source 1..21: mol_type = other RNA
aagaaagggtgtgtgaatgga

SEQ ID NO: 63739 - RNA, 21 nt, synthetic construct
  source 1..21: mol_type = other RNA
aagaaaggtctagtgtgcatg

SEQ ID NO: 63740 - RNA, 21 nt, synthetic construct
  source 1..21: mol_type = other RNA
aagaaaggtctctctctgtca

SEQ ID NO: 63741 - RNA, 21 nt, synthetic construct
  source 1..21: mol_type = other RNA
aagaaagttttgcagttgggg

SEQ ID NO: 63742 - RNA, 21 nt, synthetic construct
  source 1..21: mol_type = other RNA
aagaaataaaacatggccagt

SEQ ID NO: 63743 - RNA, 21 nt, synthetic construct
  source 1..21: mol_type = other RNA
aagaaataaacgacaccagaa

SEQ ID NO: 63744 - RNA, 21 nt, synthetic construct
  source 1..21: mol_type = other RNA
aagaaatagaaaacttgagca

SEQ ID NO: 63745 - RNA, 21 nt, synthetic construct
  source 1..21: mol_type = other RNA
aagaaatagaactgtcacaat

SEQ ID NO: 63746 - RNA, 21 nt, synthetic construct
  source 1..21: mol_type = other RNA
aagaaatctgcatccaaaagg

SEQ ID NO: 63747 - RNA, 21 nt, synthetic construct
  source 1..21: mol_type = other RNA
aagaaatgttaacaattggtg

SEQ ID NO: 63748 - RNA, 21 nt, synthetic construct
  source 1..21: mol_type = other RNA
aagaaattagaacatctggca

SEQ ID NO: 63749 - RNA, 21 nt, synthetic construct
  source 1..21: mol_type = other RNA
aagaaattatctgtgggttaa

SEQ ID NO: 63750 - RNA, 21 nt, synthetic construct
  source 1..21: mol_type = other RNA
aagaaattggacgggtggtag

SEQ ID NO: 63751 - RNA, 21 nt, synthetic construct
  source 1..21: mol_type = other RNA
aagaacaacatggtagaccat

SEQ ID NO: 63752 - RNA, 21 nt, synthetic construct
  source 1..21: mol_type = other RNA
aagaacacagtgttgagaaag

SEQ ID NO: 63753 - RNA, 21 nt, synthetic construct
  source 1..21: mol_type = other RNA
aagaacactataagccaatat

SEQ ID NO: 63754 - RNA, 21 nt, synthetic construct
  source 1..21: mol_type = other RNA
aagaacacttaacatgagatc

SEQ ID NO: 63755 - RNA, 21 nt, synthetic construct
  source 1..21: mol_type = other RNA
aagaacaggaagggagagatg

SEQ ID NO: 63756 - RNA, 21 nt, synthetic construct
  source 1..21: mol_type = other RNA
aagaacaggacttttggtaca

SEQ ID NO: 63757 - RNA, 21 nt, synthetic construct
  source 1..21: mol_type = other RNA
aagaacaggagttaccataaa

SEQ ID NO: 63758 - RNA, 21 nt, synthetic construct
  source 1..21: mol_type = other RNA
aagaacatgattgggtcaaca

SEQ ID NO: 63759 - RNA, 21 nt, synthetic construct
  source 1..21: mol_type = other RNA
aagaaccatacagtgccttca

SEQ ID NO: 63760 - RNA, 21 nt, synthetic construct
  source 1..21: mol_type = other RNA
aagaaccctttgttatctgaa

SEQ ID NO: 63761 - RNA, 21 nt, synthetic construct
  source 1..21: mol_type = other RNA
aagaaccgactgaaaggaaat

SEQ ID NO: 63762 - RNA, 21 nt, synthetic construct
  source 1..21: mol_type = other RNA
aagaacctctggaaaggactt

SEQ ID NO: 63763 - RNA, 21 nt, synthetic construct
  source 1..21: mol_type = other RNA
aagaacctgttcatttgagaa

SEQ ID NO: 63764 - RNA, 21 nt, synthetic construct
  source 1..21: mol_type = other RNA
aagaaccttcatactattttc

SEQ ID NO: 63765 - RNA, 21 nt, synthetic construct
  source 1..21: mol_type = other RNA
aagaactccaacaattcaaca

SEQ ID NO: 63766 - RNA, 21 nt, synthetic construct
  source 1..21: mol_type = other RNA
aagaactcctggtctcccagc

SEQ ID NO: 63767 - RNA, 21 nt, synthetic construct
  source 1..21: mol_type = other RNA
aagaactgaaagcagggactc

SEQ ID NO: 63768 - RNA, 21 nt, synthetic construct
  source 1..21: mol_type = other RNA
aagaacttcttcaaaagacat

SEQ ID NO: 63769 - RNA, 21 nt, synthetic construct
  source 1..21: mol_type = other RNA
aagaacttgtctttgtctatt

SEQ ID NO: 63770 - RNA, 21 nt, synthetic construct
  source 1..21: mol_type = other RNA
aagaagaaaaagcaacttgaa

SEQ ID NO: 63771 - RNA, 21 nt, synthetic construct
  source 1..21: mol_type = other RNA
aagaagaaatcaaatgggaaa

SEQ ID NO: 63772 - RNA, 21 nt, synthetic construct
  source 1..21: mol_type = other RNA
aagaagaattctataggtagt

SEQ ID NO: 63773 - RNA, 21 nt, synthetic construct
  source 1..21: mol_type = other RNA
aagaagacatgataaatacgt

SEQ ID NO: 63774 - RNA, 21 nt, synthetic construct
  source 1..21: mol_type = other RNA
aagaagacttaggagaaaagc

SEQ ID NO: 63775 - RNA, 21 nt, synthetic construct
  source 1..21: mol_type = other RNA
aagaagatgcagttgcttact

SEQ ID NO: 63776 - RNA, 21 nt, synthetic construct
  source 1..21: mol_type = other RNA
aagaagatggttggaagtttc

SEQ ID NO: 63777 - RNA, 21 nt, synthetic construct
  source 1..21: mol_type = other RNA
aagaagattgagtcagtaatc

SEQ ID NO: 63778 - RNA, 21 nt, synthetic construct
  source 1..21: mol_type = other RNA
aagaagctgttttggtaaaat

SEQ ID NO: 63779 - RNA, 21 nt, synthetic construct
  source 1..21: mol_type = other RNA
aagaaggaaaaaacacctaaa

SEQ ID NO: 63780 - RNA, 21 nt, synthetic construct
  source 1..21: mol_type = other RNA
aagaaggaaaagaacacagtg

SEQ ID NO: 63781 - RNA, 21 nt, synthetic construct
  source 1..21: mol_type = other RNA
aagaaggaatgtgcactcttt

SEQ ID NO: 63782 - RNA, 21 nt, synthetic construct
  source 1..21: mol_type = other RNA
aagaaggccatttgattgcca

SEQ ID NO: 63783 - RNA, 21 nt, synthetic construct
  source 1..21: mol_type = other RNA
aagaaggccgtccctattttc

SEQ ID NO: 63784 - RNA, 21 nt, synthetic construct
  source 1..21: mol_type = other RNA
aagaaggctagcacagaggca

SEQ ID NO: 63785 - RNA, 21 nt, synthetic construct
  source 1..21: mol_type = other RNA
aagaagggaacactaagaaga

SEQ ID NO: 63786 - RNA, 21 nt, synthetic construct
  source 1..21: mol_type = other RNA
aagaaggtatcatcggaaata

SEQ ID NO: 63787 - RNA, 21 nt, synthetic construct
  source 1..21: mol_type = other RNA
aagaaggtttgtagagcaagc

SEQ ID NO: 63788 - RNA, 21 nt, synthetic construct
  source 1..21: mol_type = other RNA
aagaagtaatttcttctgaag

SEQ ID NO: 63789 - RNA, 21 nt, synthetic construct
  source 1..21: mol_type = other RNA
aagaagtgaaaaatgacctaa

SEQ ID NO: 63790 - RNA, 21 nt, synthetic construct
  source 1..21: mol_type = other RNA
aagaagtgaaactgctggatc

SEQ ID NO: 63791 - RNA, 21 nt, synthetic construct
  source 1..21: mol_type = other RNA
aagaagttacggttccctgta

SEQ ID NO: 63792 - RNA, 21 nt, synthetic construct
  source 1..21: mol_type = other RNA
aagaataactgtcctgaattc

SEQ ID NO: 63793 - RNA, 21 nt, synthetic construct
  source 1..21: mol_type = other RNA
aagaataagctaatcccaaag

SEQ ID NO: 63794 - RNA, 21 nt, synthetic construct
  source 1..21: mol_type = other RNA
aagaataccaaattcacgaga

SEQ ID NO: 63795 - RNA, 21 nt, synthetic construct
  source 1..21: mol_type = other RNA
aagaatcaggtctctttgaaa

SEQ ID NO: 63796 - RNA, 21 nt, synthetic construct
  source 1..21: mol_type = other RNA
aagaatctttggcaaacttag

SEQ ID NO: 63797 - RNA, 21 nt, synthetic construct
  source 1..21: mol_type = other RNA
aagaatgaagtcagagatttt

SEQ ID NO: 63798 - RNA, 21 nt, synthetic construct
  source 1..21: mol_type = other RNA
aagaatgagaaacatacatgt

SEQ ID NO: 63799 - RNA, 21 nt, synthetic construct
  source 1..21: mol_type = other RNA
aagaatgattatttgcggctt

SEQ ID NO: 63800 - RNA, 21 nt, synthetic construct
  source 1..21: mol_type = other RNA
aagaatggtttaacacataca

SEQ ID NO: 63801 - RNA, 21 nt, synthetic construct
  source 1..21: mol_type = other RNA
aagaatgtcaagctgtttgag

SEQ ID NO: 63802 - RNA, 21 nt, synthetic construct
  source 1..21: mol_type = other RNA
aagaattaaaaacattggagg

SEQ ID NO: 63803 - RNA, 21 nt, synthetic construct
  source 1..21: mol_type = other RNA
aagaattaaactcattatccc

SEQ ID NO: 63804 - RNA, 21 nt, synthetic construct
  source 1..21: mol_type = other RNA
aagaattaacactaatccttc

SEQ ID NO: 63805 - RNA, 21 nt, synthetic construct
  source 1..21: mol_type = other RNA
aagaattattgtctgcaagca

SEQ ID NO: 63806 - RNA, 21 nt, synthetic construct
  source 1..21: mol_type = other RNA
aagaattcgttaatacttgtg

SEQ ID NO: 63807 - RNA, 21 nt, synthetic construct
  source 1..21: mol_type = other RNA
aagaattctataggtagtaca

SEQ ID NO: 63808 - RNA, 21 nt, synthetic construct
  source 1..21: mol_type = other RNA
aagaatttcatgcctttcagc

SEQ ID NO: 63809 - RNA, 21 nt, synthetic construct
  source 1..21: mol_type = other RNA
aagaattttaagcctagagat

SEQ ID NO: 63810 - RNA, 21 nt, synthetic construct
  source 1..21: mol_type = other RNA
aagacaagcaaggaagggctt

SEQ ID NO: 63811 - RNA, 21 nt, synthetic construct
  source 1..21: mol_type = other RNA
aagacaagtactgcatgattc

SEQ ID NO: 63812 - RNA, 21 nt, synthetic construct
  source 1..21: mol_type = other RNA
aagacaagttcttacctcaaa

SEQ ID NO: 63813 - RNA, 21 nt, synthetic construct
  source 1..21: mol_type = other RNA
aagacaatactgttatgacaa

SEQ ID NO: 63814 - RNA, 21 nt, synthetic construct
  source 1..21: mol_type = other RNA
aagacaatagctagtgtctta

SEQ ID NO: 63815 - RNA, 21 nt, synthetic construct
  source 1..21: mol_type = other RNA
aagacaatgtctttggctctt

SEQ ID NO: 63816 - RNA, 21 nt, synthetic construct
  source 1..21: mol_type = other RNA
aagacaatgtggagttggtgc

SEQ ID NO: 63817 - RNA, 21 nt, synthetic construct
  source 1..21: mol_type = other RNA
aagacacaaaagagctgggcc

SEQ ID NO: 63818 - RNA, 21 nt, synthetic construct
  source 1..21: mol_type = other RNA
aagacacaaaatcagatatga

SEQ ID NO: 63819 - RNA, 21 nt, synthetic construct
  source 1..21: mol_type = other RNA
aagacacaaggaaggtcaaat

SEQ ID NO: 63820 - RNA, 21 nt, synthetic construct
  source 1..21: mol_type = other RNA
aagacaccgctccacgcccat

SEQ ID NO: 63821 - RNA, 21 nt, synthetic construct
  source 1..21: mol_type = other RNA
aagacactagctattgtcttt

SEQ ID NO: 63822 - RNA, 21 nt, synthetic construct
  source 1..21: mol_type = other RNA
aagacagacatttggaataga

SEQ ID NO: 63823 - RNA, 21 nt, synthetic construct
  source 1..21: mol_type = other RNA
aagacagacctctattaaatc

SEQ ID NO: 63824 - RNA, 21 nt, synthetic construct
  source 1..21: mol_type = other RNA
aagacagagctagaactagaa

SEQ ID NO: 63825 - RNA, 21 nt, synthetic construct
  source 1..21: mol_type = other RNA
aagacagagctccctctccct

SEQ ID NO: 63826 - RNA, 21 nt, synthetic construct
  source 1..21: mol_type = other RNA
aagacagatcttatggaatag

SEQ ID NO: 63827 - RNA, 21 nt, synthetic construct
  source 1..21: mol_type = other RNA
aagacagatgtgcttaatctt

SEQ ID NO: 63828 - RNA, 21 nt, synthetic construct
  source 1..21: mol_type = other RNA
aagacagctactaaacaaatc

SEQ ID NO: 63829 - RNA, 21 nt, synthetic construct
  source 1..21: mol_type = other RNA
aagacaggaagaattattgtc

SEQ ID NO: 63830 - RNA, 21 nt, synthetic construct
  source 1..21: mol_type = other RNA
aagacaggtagacatgagtaa

SEQ ID NO: 63831 - RNA, 21 nt, synthetic construct
  source 1..21: mol_type = other RNA
aagacatcactaagagtgaaa

SEQ ID NO: 63832 - RNA, 21 nt, synthetic construct
  source 1..21: mol_type = other RNA
aagacatcctgatttaggcca

SEQ ID NO: 63833 - RNA, 21 nt, synthetic construct
  source 1..21: mol_type = other RNA
aagacatctttcctgtgattt

SEQ ID NO: 63834 - RNA, 21 nt, synthetic construct
  source 1..21: mol_type = other RNA
aagacatgctgaggccccagg

SEQ ID NO: 63835 - RNA, 21 nt, synthetic construct
  source 1..21: mol_type = other RNA
aagacatgttaggttgaaagt

SEQ ID NO: 63836 - RNA, 21 nt, synthetic construct
  source 1..21: mol_type = other RNA
aagacattattcttacagtga

SEQ ID NO: 63837 - RNA, 21 nt, synthetic construct
  source 1..21: mol_type = other RNA
aagacattgtcttacataggc

SEQ ID NO: 63838 - RNA, 21 nt, synthetic construct
  source 1..21: mol_type = other RNA
aagacatttgggaatgtggtc

SEQ ID NO: 63839 - RNA, 21 nt, synthetic construct
  source 1..21: mol_type = other RNA
aagaccaaaatggagacccat

SEQ ID NO: 63840 - RNA, 21 nt, synthetic construct
  source 1..21: mol_type = other RNA
aagaccaagaattttccattc

SEQ ID NO: 63841 - RNA, 21 nt, synthetic construct
  source 1..21: mol_type = other RNA
aagaccaagagtgtggcttta

SEQ ID NO: 63842 - RNA, 21 nt, synthetic construct
  source 1..21: mol_type = other RNA
aagaccacaaggattaatctt

SEQ ID NO: 63843 - RNA, 21 nt, synthetic construct
  source 1..21: mol_type = other RNA
aagacccagtggctagtgtgt

SEQ ID NO: 63844 - RNA, 21 nt, synthetic construct
  source 1..21: mol_type = other RNA
aagaccccagtagaaatcttc

SEQ ID NO: 63845 - RNA, 21 nt, synthetic construct
  source 1..21: mol_type = other RNA
aagacccctcaggtgtcactg

SEQ ID NO: 63846 - RNA, 21 nt, synthetic construct
  source 1..21: mol_type = other RNA
aagaccctgtctctaaaaaat

SEQ ID NO: 63847 - RNA, 21 nt, synthetic construct
  source 1..21: mol_type = other RNA
aagaccgcaagagttccaact

SEQ ID NO: 63848 - RNA, 21 nt, synthetic construct
  source 1..21: mol_type = other RNA
aagaccggggactgcaacaga

SEQ ID NO: 63849 - RNA, 21 nt, synthetic construct
  source 1..21: mol_type = other RNA
aagacctaagcttaagagcta

SEQ ID NO: 63850 - RNA, 21 nt, synthetic construct
  source 1..21: mol_type = other RNA
aagacctcaaattctgaggga

SEQ ID NO: 63851 - RNA, 21 nt, synthetic construct
  source 1..21: mol_type = other RNA
aagacctcaggtttagaatat

SEQ ID NO: 63852 - RNA, 21 nt, synthetic construct
  source 1..21: mol_type = other RNA
aagacctgcagtctgcaggca

SEQ ID NO: 63853 - RNA, 21 nt, synthetic construct
  source 1..21: mol_type = other RNA
aagacgatattcctatcagaa

SEQ ID NO: 63854 - RNA, 21 nt, synthetic construct
  source 1..21: mol_type = other RNA
aagacgttcagataacaaagg

SEQ ID NO: 63855 - RNA, 21 nt, synthetic construct
  source 1..21: mol_type = other RNA
aagactaagcagaaatgacaa

SEQ ID NO: 63856 - RNA, 21 nt, synthetic construct
  source 1..21: mol_type = other RNA
aagactacctaaaacaatcta

SEQ ID NO: 63857 - RNA, 21 nt, synthetic construct
  source 1..21: mol_type = other RNA
aagactataaaactcttagct

SEQ ID NO: 63858 - RNA, 21 nt, synthetic construct
  source 1..21: mol_type = other RNA
aagactatcacgattctgacc

SEQ ID NO: 63859 - RNA, 21 nt, synthetic construct
  source 1..21: mol_type = other RNA
aagactatgagaaggattagt

SEQ ID NO: 63860 - RNA, 21 nt, synthetic construct
  source 1..21: mol_type = other RNA
aagactcaacatgtgtattta

SEQ ID NO: 63861 - RNA, 21 nt, synthetic construct
  source 1..21: mol_type = other RNA
aagactcagcagttttaaaga

SEQ ID NO: 63862 - RNA, 21 nt, synthetic construct
  source 1..21: mol_type = other RNA
aagactgctgtttaccaaggg

SEQ ID NO: 63863 - RNA, 21 nt, synthetic construct
  source 1..21: mol_type = other RNA
aagactggaaaagtgttgact

SEQ ID NO: 63864 - RNA, 21 nt, synthetic construct
  source 1..21: mol_type = other RNA
aagactggatttgattgggca

SEQ ID NO: 63865 - RNA, 21 nt, synthetic construct
  source 1..21: mol_type = other RNA
aagacttaggagaaaagcttc

SEQ ID NO: 63866 - RNA, 21 nt, synthetic construct
  source 1..21: mol_type = other RNA
aagacttcaacggacattttt

SEQ ID NO: 63867 - RNA, 21 nt, synthetic construct
  source 1..21: mol_type = other RNA
aagacttcacgatgcttaggt

SEQ ID NO: 63868 - RNA, 21 nt, synthetic construct
  source 1..21: mol_type = other RNA
aagacttcaggaacaccttga

SEQ ID NO: 63869 - RNA, 21 nt, synthetic construct
  source 1..21: mol_type = other RNA
aagacttctcaaacaggatac

SEQ ID NO: 63870 - RNA, 21 nt, synthetic construct
  source 1..21: mol_type = other RNA
aagacttgaggtttacttggg

SEQ ID NO: 63871 - RNA, 21 nt, synthetic construct
  source 1..21: mol_type = other RNA
aagactttatggtaattggtt

SEQ ID NO: 63872 - RNA, 21 nt, synthetic construct
  source 1..21: mol_type = other RNA
aagagaaaaattacaggtcaa

SEQ ID NO: 63873 - RNA, 21 nt, synthetic construct
  source 1..21: mol_type = other RNA
aagagaacaaaatacctggga

SEQ ID NO: 63874 - RNA, 21 nt, synthetic construct
  source 1..21: mol_type = other RNA
aagagaacaatggaatagaag

SEQ ID NO: 63875 - RNA, 21 nt, synthetic construct
  source 1..21: mol_type = other RNA
aagagaacacacaatttgagg

SEQ ID NO: 63876 - RNA, 21 nt, synthetic construct
  source 1..21: mol_type = other RNA
aagagaacattggtttgaaat

SEQ ID NO: 63877 - RNA, 21 nt, synthetic construct
  source 1..21: mol_type = other RNA
aagagaacttgcacataatat

SEQ ID NO: 63878 - RNA, 21 nt, synthetic construct
  source 1..21: mol_type = other RNA
aagagaaggaagcaccaaccc

SEQ ID NO: 63879 - RNA, 21 nt, synthetic construct
  source 1..21: mol_type = other RNA
aagagaatagcagaaacacag

SEQ ID NO: 63880 - RNA, 21 nt, synthetic construct
  source 1..21: mol_type = other RNA
aagagaatcttaaaataccag

SEQ ID NO: 63881 - RNA, 21 nt, synthetic construct
  source 1..21: mol_type = other RNA
aagagaatggaaacttgccat

SEQ ID NO: 63882 - RNA, 21 nt, synthetic construct
  source 1..21: mol_type = other RNA
aagagaatggctggaatggtg

SEQ ID NO: 63883 - RNA, 21 nt, synthetic construct
  source 1..21: mol_type = other RNA
aagagaccacaggctctcttc

SEQ ID NO: 63884 - RNA, 21 nt, synthetic construct
  source 1..21: mol_type = other RNA
aagagacctgattcttccact

SEQ ID NO: 63885 - RNA, 21 nt, synthetic construct
  source 1..21: mol_type = other RNA
aagagactatctcttcctcct

SEQ ID NO: 63886 - RNA, 21 nt, synthetic construct
  source 1..21: mol_type = other RNA
aagagactctcaagaaggtat

SEQ ID NO: 63887 - RNA, 21 nt, synthetic construct
  source 1..21: mol_type = other RNA
aagagagaaggctgccagcac

SEQ ID NO: 63888 - RNA, 21 nt, synthetic construct
  source 1..21: mol_type = other RNA
aagagagagacaagcacaggc

SEQ ID NO: 63889 - RNA, 21 nt, synthetic construct
  source 1..21: mol_type = other RNA
aagagagaggggggaagcttt

SEQ ID NO: 63890 - RNA, 21 nt, synthetic construct
  source 1..21: mol_type = other RNA
aagagagattaaataacttcc

SEQ ID NO: 63891 - RNA, 21 nt, synthetic construct
  source 1..21: mol_type = other RNA
aagagagcaagactcaaatct

SEQ ID NO: 63892 - RNA, 21 nt, synthetic construct
  source 1..21: mol_type = other RNA
aagagagcaagtccccatctc

SEQ ID NO: 63893 - RNA, 21 nt, synthetic construct
  source 1..21: mol_type = other RNA
aagagagcattgcctttatta

SEQ ID NO: 63894 - RNA, 21 nt, synthetic construct
  source 1..21: mol_type = other RNA
aagagagcctgtggtctcttc

SEQ ID NO: 63895 - RNA, 21 nt, synthetic construct
  source 1..21: mol_type = other RNA
aagagaggaagtgaccctgag

SEQ ID NO: 63896 - RNA, 21 nt, synthetic construct
  source 1..21: mol_type = other RNA
aagagaggaataaatggtagc

SEQ ID NO: 63897 - RNA, 21 nt, synthetic construct
  source 1..21: mol_type = other RNA
aagagaggacagttggccttg

SEQ ID NO: 63898 - RNA, 21 nt, synthetic construct
  source 1..21: mol_type = other RNA
aagagagtaaaataaaagctc

SEQ ID NO: 63899 - RNA, 21 nt, synthetic construct
  source 1..21: mol_type = other RNA
aagagagtgacagctgagtag

SEQ ID NO: 63900 - RNA, 21 nt, synthetic construct
  source 1..21: mol_type = other RNA
aagagatagtctcttcctgta

SEQ ID NO: 63901 - RNA, 21 nt, synthetic construct
  source 1..21: mol_type = other RNA
aagagatctagtgaagtcaat

SEQ ID NO: 63902 - RNA, 21 nt, synthetic construct
  source 1..21: mol_type = other RNA
aagagattaattcagtcaaca

SEQ ID NO: 63903 - RNA, 21 nt, synthetic construct
  source 1..21: mol_type = other RNA
aagagcacaccaagacatgtt

SEQ ID NO: 63904 - RNA, 21 nt, synthetic construct
  source 1..21: mol_type = other RNA
aagagcagaactccacctcag

SEQ ID NO: 63905 - RNA, 21 nt, synthetic construct
  source 1..21: mol_type = other RNA
aagagcaggtggaaggcctga

SEQ ID NO: 63906 - RNA, 21 nt, synthetic construct
  source 1..21: mol_type = other RNA
aagagcagtgtgttctgcctt

SEQ ID NO: 63907 - RNA, 21 nt, synthetic construct
  source 1..21: mol_type = other RNA
aagagcatagactttagagtc

SEQ ID NO: 63908 - RNA, 21 nt, synthetic construct
  source 1..21: mol_type = other RNA
aagagcatgttgggccaactt

SEQ ID NO: 63909 - RNA, 21 nt, synthetic construct
  source 1..21: mol_type = other RNA
aagagccaaagacattgtctt

SEQ ID NO: 63910 - RNA, 21 nt, synthetic construct
  source 1..21: mol_type = other RNA
aagagccagcctgatgatgat

SEQ ID NO: 63911 - RNA, 21 nt, synthetic construct
  source 1..21: mol_type = other RNA
aagagcgaagagggagaagaa

SEQ ID NO: 63912 - RNA, 21 nt, synthetic construct
  source 1..21: mol_type = other RNA
aagagcgaggcctggaacagg

SEQ ID NO: 63913 - RNA, 21 nt, synthetic construct
  source 1..21: mol_type = other RNA
aagagcgcttctatgtgacaa

SEQ ID NO: 63914 - RNA, 21 nt, synthetic construct
  source 1..21: mol_type = other RNA
aagagcggcctttgcctctcc

SEQ ID NO: 63915 - RNA, 21 nt, synthetic construct
  source 1..21: mol_type = other RNA
aagagcgtcgtacctttcgct

SEQ ID NO: 63916 - RNA, 21 nt, synthetic construct
  source 1..21: mol_type = other RNA
aagagctaagactataaaact

SEQ ID NO: 63917 - RNA, 21 nt, synthetic construct
  source 1..21: mol_type = other RNA
aagagctaagatgctattcaa

SEQ ID NO: 63918 - RNA, 21 nt, synthetic construct
  source 1..21: mol_type = other RNA
aagagctgggactacaggtgt

SEQ ID NO: 63919 - RNA, 21 nt, synthetic construct
  source 1..21: mol_type = other RNA
aagagctgggcccgcagtggc

SEQ ID NO: 63920 - RNA, 21 nt, synthetic construct
  source 1..21: mol_type = other RNA
aagagctgtaacagaggcatg

SEQ ID NO: 63921 - RNA, 21 nt, synthetic construct
  source 1..21: mol_type = other RNA
aagaggaaggttcaagtttgg

SEQ ID NO: 63922 - RNA, 21 nt, synthetic construct
  source 1..21: mol_type = other RNA
aagaggacgatttttccaaca

SEQ ID NO: 63923 - RNA, 21 nt, synthetic construct
  source 1..21: mol_type = other RNA
aagaggagacattacaattga

SEQ ID NO: 63924 - RNA, 21 nt, synthetic construct
  source 1..21: mol_type = other RNA
aagaggataaggggcagggtg

SEQ ID NO: 63925 - RNA, 21 nt, synthetic construct
  source 1..21: mol_type = other RNA
aagaggcaaaactcctgaaca

SEQ ID NO: 63926 - RNA, 21 nt, synthetic construct
  source 1..21: mol_type = other RNA
aagaggcagctaagcaccaac

SEQ ID NO: 63927 - RNA, 21 nt, synthetic construct
  source 1..21: mol_type = other RNA
aagaggccacaaagtccccac

SEQ ID NO: 63928 - RNA, 21 nt, synthetic construct
  source 1..21: mol_type = other RNA
aagaggctttctgtgtaatac

SEQ ID NO: 63929 - RNA, 21 nt, synthetic construct
  source 1..21: mol_type = other RNA
aagagggaacattttcatttt

SEQ ID NO: 63930 - RNA, 21 nt, synthetic construct
  source 1..21: mol_type = other RNA
aagagggaagtactgagtcaa

SEQ ID NO: 63931 - RNA, 21 nt, synthetic construct
  source 1..21: mol_type = other RNA
aagagggagaagaaataaacg

SEQ ID NO: 63932 - RNA, 21 nt, synthetic construct
  source 1..21: mol_type = other RNA
aagagggggcataacatctat

SEQ ID NO: 63933 - RNA, 21 nt, synthetic construct
  source 1..21: mol_type = other RNA
aagaggtatcaccatctgata

SEQ ID NO: 63934 - RNA, 21 nt, synthetic construct
  source 1..21: mol_type = other RNA
aagaggttaaaaccacaaaca

SEQ ID NO: 63935 - RNA, 21 nt, synthetic construct
  source 1..21: mol_type = other RNA
aagagtaatggttggccgagg

SEQ ID NO: 63936 - RNA, 21 nt, synthetic construct
  source 1..21: mol_type = other RNA
aagagtagattcccccttatg

SEQ ID NO: 63937 - RNA, 21 nt, synthetic construct
  source 1..21: mol_type = other RNA
aagagtatctttttcagcagc

SEQ ID NO: 63938 - RNA, 21 nt, synthetic construct
  source 1..21: mol_type = other RNA
aagagtccccaactgcaaaac

SEQ ID NO: 63939 - RNA, 21 nt, synthetic construct
  source 1..21: mol_type = other RNA
aagagtctatctttgggaaaa

SEQ ID NO: 63940 - RNA, 21 nt, synthetic construct
  source 1..21: mol_type = other RNA
aagagtctcatctgtcaaaaa

SEQ ID NO: 63941 - RNA, 21 nt, synthetic construct
  source 1..21: mol_type = other RNA
aagagtctgcagaccaagaaa

SEQ ID NO: 63942 - RNA, 21 nt, synthetic construct
  source 1..21: mol_type = other RNA
aagagtgaaaaggcaaaccac

SEQ ID NO: 63943 - RNA, 21 nt, synthetic construct
  source 1..21: mol_type = other RNA
aagagtgaaatgatttcaagt

SEQ ID NO: 63944 - RNA, 21 nt, synthetic construct
  source 1..21: mol_type = other RNA
aagagtgaagaaacctttctc

SEQ ID NO: 63945 - RNA, 21 nt, synthetic construct
  source 1..21: mol_type = other RNA
aagagtgaagctggaccctta

SEQ ID NO: 63946 - RNA, 21 nt, synthetic construct
  source 1..21: mol_type = other RNA
aagagtgcacattccttcttc

SEQ ID NO: 63947 - RNA, 21 nt, synthetic construct
  source 1..21: mol_type = other RNA
aagagtgggcaaaaaagtcat

SEQ ID NO: 63948 - RNA, 21 nt, synthetic construct
  source 1..21: mol_type = other RNA
aagagtgtgctgactagtacg

SEQ ID NO: 63949 - RNA, 21 nt, synthetic construct
  source 1..21: mol_type = other RNA
aagagtgtggctttaaggcgc

SEQ ID NO: 63950 - RNA, 21 nt, synthetic construct
  source 1..21: mol_type = other RNA
aagagttacttctggaaagtt

SEQ ID NO: 63951 - RNA, 21 nt, synthetic construct
  source 1..21: mol_type = other RNA
aagagttccaactgtataaat

SEQ ID NO: 63952 - RNA, 21 nt, synthetic construct
  source 1..21: mol_type = other RNA
aagagttcccctatactgtaa

SEQ ID NO: 63953 - RNA, 21 nt, synthetic construct
  source 1..21: mol_type = other RNA
aagagttctgaaggctcagcc

SEQ ID NO: 63954 - RNA, 21 nt, synthetic construct
  source 1..21: mol_type = other RNA
aagagttgctgacttcctggc

SEQ ID NO: 63955 - RNA, 21 nt, synthetic construct
  source 1..21: mol_type = other RNA
aagagttttatagtcttagct

SEQ ID NO: 63956 - RNA, 21 nt, synthetic construct
  source 1..21: mol_type = other RNA
aagataaaggtaaggaaaccc

SEQ ID NO: 63957 - RNA, 21 nt, synthetic construct
  source 1..21: mol_type = other RNA
aagataaatcagaaactgaca

SEQ ID NO: 63958 - RNA, 21 nt, synthetic construct
  source 1..21: mol_type = other RNA
aagataaatccaacgaccgga

SEQ ID NO: 63959 - RNA, 21 nt, synthetic construct
  source 1..21: mol_type = other RNA
aagataagtagaaggtcaatc

SEQ ID NO: 63960 - RNA, 21 nt, synthetic construct
  source 1..21: mol_type = other RNA
aagataatgctgttctctgtg

SEQ ID NO: 63961 - RNA, 21 nt, synthetic construct
  source 1..21: mol_type = other RNA
aagataatgttagaattcagg

SEQ ID NO: 63962 - RNA, 21 nt, synthetic construct
  source 1..21: mol_type = other RNA
aagatacacaagatctctatg

SEQ ID NO: 63963 - RNA, 21 nt, synthetic construct
  source 1..21: mol_type = other RNA
aagatactcaacatcactagc

SEQ ID NO: 63964 - RNA, 21 nt, synthetic construct
  source 1..21: mol_type = other RNA
aagatactgcactaaactagt

SEQ ID NO: 63965 - RNA, 21 nt, synthetic construct
  source 1..21: mol_type = other RNA
aagatagactcttcagaggtc

SEQ ID NO: 63966 - RNA, 21 nt, synthetic construct
  source 1..21: mol_type = other RNA
aagatagccccttatcaggaa

SEQ ID NO: 63967 - RNA, 21 nt, synthetic construct
  source 1..21: mol_type = other RNA
aagatagtactgaccatctca

SEQ ID NO: 63968 - RNA, 21 nt, synthetic construct
  source 1..21: mol_type = other RNA
aagatatccacagtatgctgt

SEQ ID NO: 63969 - RNA, 21 nt, synthetic construct
  source 1..21: mol_type = other RNA
aagatatgggttattcaccca

SEQ ID NO: 63970 - RNA, 21 nt, synthetic construct
  source 1..21: mol_type = other RNA
aagatatgtgtaggaaggaac

SEQ ID NO: 63971 - RNA, 21 nt, synthetic construct
  source 1..21: mol_type = other RNA
aagatattagctacaaaaggg

SEQ ID NO: 63972 - RNA, 21 nt, synthetic construct
  source 1..21: mol_type = other RNA
aagatcaagctcgccgtctcc

SEQ ID NO: 63973 - RNA, 21 nt, synthetic construct
  source 1..21: mol_type = other RNA
aagatcagtaaaattcccttc

SEQ ID NO: 63974 - RNA, 21 nt, synthetic construct
  source 1..21: mol_type = other RNA
aagatcatacacctggatcaa

SEQ ID NO: 63975 - RNA, 21 nt, synthetic construct
  source 1..21: mol_type = other RNA
aagatcatttagtaagtgtga

SEQ ID NO: 63976 - RNA, 21 nt, synthetic construct
  source 1..21: mol_type = other RNA
aagatcatttcaaaccaatgt

SEQ ID NO: 63977 - RNA, 21 nt, synthetic construct
  source 1..21: mol_type = other RNA
aagatcatttcacttgattac

SEQ ID NO: 63978 - RNA, 21 nt, synthetic construct
  source 1..21: mol_type = other RNA
aagatccaagtattgtatcaa

SEQ ID NO: 63979 - RNA, 21 nt, synthetic construct
  source 1..21: mol_type = other RNA
aagatcctggattgctagtgt

SEQ ID NO: 63980 - RNA, 21 nt, synthetic construct
  source 1..21: mol_type = other RNA
aagatctcaaacagcctaatt

SEQ ID NO: 63981 - RNA, 21 nt, synthetic construct
  source 1..21: mol_type = other RNA
aagatctctatgcagaaatct

SEQ ID NO: 63982 - RNA, 21 nt, synthetic construct
  source 1..21: mol_type = other RNA
aagatctgtctttggcccata

SEQ ID NO: 63983 - RNA, 21 nt, synthetic construct
  source 1..21: mol_type = other RNA
aagatctgtggactttaggct

SEQ ID NO: 63984 - RNA, 21 nt, synthetic construct
  source 1..21: mol_type = other RNA
aagatgaagtatagaaaggag

SEQ ID NO: 63985 - RNA, 21 nt, synthetic construct
  source 1..21: mol_type = other RNA
aagatgaatctgcaactatca

SEQ ID NO: 63986 - RNA, 21 nt, synthetic construct
  source 1..21: mol_type = other RNA
aagatgacatttgcttttcct

SEQ ID NO: 63987 - RNA, 21 nt, synthetic construct
  source 1..21: mol_type = other RNA
aagatgaggtctcagcctttt

SEQ ID NO: 63988 - RNA, 21 nt, synthetic construct
  source 1..21: mol_type = other RNA
aagatgatctaaatggtgtga

SEQ ID NO: 63989 - RNA, 21 nt, synthetic construct
  source 1..21: mol_type = other RNA
aagatgatgaacaaaggcagg

SEQ ID NO: 63990 - RNA, 21 nt, synthetic construct
  source 1..21: mol_type = other RNA
aagatgcagaaaaagcatttt

SEQ ID NO: 63991 - RNA, 21 nt, synthetic construct
  source 1..21: mol_type = other RNA
aagatgcagttgcttactcta

SEQ ID NO: 63992 - RNA, 21 nt, synthetic construct
  source 1..21: mol_type = other RNA
aagatgcataagttctagaga

SEQ ID NO: 63993 - RNA, 21 nt, synthetic construct
  source 1..21: mol_type = other RNA
aagatgcataccaagcccggc

SEQ ID NO: 63994 - RNA, 21 nt, synthetic construct
  source 1..21: mol_type = other RNA
aagatgcattctgtcacatag

SEQ ID NO: 63995 - RNA, 21 nt, synthetic construct
  source 1..21: mol_type = other RNA
aagatgccacaaatggagtga

SEQ ID NO: 63996 - RNA, 21 nt, synthetic construct
  source 1..21: mol_type = other RNA
aagatgccatttataatagca

SEQ ID NO: 63997 - RNA, 21 nt, synthetic construct
  source 1..21: mol_type = other RNA
aagatgctattcaagacaagc

SEQ ID NO: 63998 - RNA, 21 nt, synthetic construct
  source 1..21: mol_type = other RNA
aagatgctccctctatggcag

SEQ ID NO: 63999 - RNA, 21 nt, synthetic construct
  source 1..21: mol_type = other RNA
aagatgctgaacttgtcacaa

SEQ ID NO: 64000 - RNA, 21 nt, synthetic construct
  source 1..21: mol_type = other RNA
aagatgctggtggagtattct

SEQ ID NO: 64001 - RNA, 21 nt, synthetic construct
  source 1..21: mol_type = other RNA
aagatggaaagtggactatgt

SEQ ID NO: 64002 - RNA, 21 nt, synthetic construct
  source 1..21: mol_type = other RNA
aagatggagttacgctgccaa

SEQ ID NO: 64003 - RNA, 21 nt, synthetic construct
  source 1..21: mol_type = other RNA
aagatggatttttctgtttct

SEQ ID NO: 64004 - RNA, 21 nt, synthetic construct
  source 1..21: mol_type = other RNA
aagatggcaaacagactgagc

SEQ ID NO: 64005 - RNA, 21 nt, synthetic construct
  source 1..21: mol_type = other RNA
aagatggcaagtttccattct

SEQ ID NO: 64006 - RNA, 21 nt, synthetic construct
  source 1..21: mol_type = other RNA
aagatggcctccctcactaag

SEQ ID NO: 64007 - RNA, 21 nt, synthetic construct
  source 1..21: mol_type = other RNA
aagatgggacttcactagtgg

SEQ ID NO: 64008 - RNA, 21 nt, synthetic construct
  source 1..21: mol_type = other RNA
aagatggttggaagtttctgg

SEQ ID NO: 64009 - RNA, 21 nt, synthetic construct
  source 1..21: mol_type = other RNA
aagatgtcaacattaagggaa

SEQ ID NO: 64010 - RNA, 21 nt, synthetic construct
  source 1..21: mol_type = other RNA
aagatgtcttttaacttgctt

SEQ ID NO: 64011 - RNA, 21 nt, synthetic construct
  source 1..21: mol_type = other RNA
aagatgtgtaccaaaagtcct

SEQ ID NO: 64012 - RNA, 21 nt, synthetic construct
  source 1..21: mol_type = other RNA
aagatgttttcagttgcatga

SEQ ID NO: 64013 - RNA, 21 nt, synthetic construct
  source 1..21: mol_type = other RNA
aagattaaatacagagcacag

SEQ ID NO: 64014 - RNA, 21 nt, synthetic construct
  source 1..21: mol_type = other RNA
aagattaagcacatctgtctt

SEQ ID NO: 64015 - RNA, 21 nt, synthetic construct
  source 1..21: mol_type = other RNA
aagattaatccttgtggtctt

SEQ ID NO: 64016 - RNA, 21 nt, synthetic construct
  source 1..21: mol_type = other RNA
aagattactggatacaaggtc

SEQ ID NO: 64017 - RNA, 21 nt, synthetic construct
  source 1..21: mol_type = other RNA
aagattagaaaattagctgac

SEQ ID NO: 64018 - RNA, 21 nt, synthetic construct
  source 1..21: mol_type = other RNA
aagattatgttccacatgtta

SEQ ID NO: 64019 - RNA, 21 nt, synthetic construct
  source 1..21: mol_type = other RNA
aagattcaacaaaactggggg

SEQ ID NO: 64020 - RNA, 21 nt, synthetic construct
  source 1..21: mol_type = other RNA
aagattccgtctcaaaaaatt

SEQ ID NO: 64021 - RNA, 21 nt, synthetic construct
  source 1..21: mol_type = other RNA
aagattctctttagggaagat

SEQ ID NO: 64022 - RNA, 21 nt, synthetic construct
  source 1..21: mol_type = other RNA
aagattctgtctctacaaaaa

SEQ ID NO: 64023 - RNA, 21 nt, synthetic construct
  source 1..21: mol_type = other RNA
aagattcttgtcatgaatgaa

SEQ ID NO: 64024 - RNA, 21 nt, synthetic construct
  source 1..21: mol_type = other RNA
aagattgaaaatggtttaggc

SEQ ID NO: 64025 - RNA, 21 nt, synthetic construct
  source 1..21: mol_type = other RNA
aagattgagtcagtaatcaaa

SEQ ID NO: 64026 - RNA, 21 nt, synthetic construct
  source 1..21: mol_type = other RNA
aagattggctttagatttatc

SEQ ID NO: 64027 - RNA, 21 nt, synthetic construct
  source 1..21: mol_type = other RNA
aagattgtggtccagaaaaaa

SEQ ID NO: 64028 - RNA, 21 nt, synthetic construct
  source 1..21: mol_type = other RNA
aagattgtgtgatttcatatg

SEQ ID NO: 64029 - RNA, 21 nt, synthetic construct
  source 1..21: mol_type = other RNA
aagatttacccctactttttg

SEQ ID NO: 64030 - RNA, 21 nt, synthetic construct
  source 1..21: mol_type = other RNA
aagatttactaaactgaacga

SEQ ID NO: 64031 - RNA, 21 nt, synthetic construct
  source 1..21: mol_type = other RNA
aagatttcataggcatctctc

SEQ ID NO: 64032 - RNA, 21 nt, synthetic construct
  source 1..21: mol_type = other RNA
aagatttctactggggtctta

SEQ ID NO: 64033 - RNA, 21 nt, synthetic construct
  source 1..21: mol_type = other RNA
aagattttcccaatctctggt

SEQ ID NO: 64034 - RNA, 21 nt, synthetic construct
  source 1..21: mol_type = other RNA
aagcaaaacatatgtcagatg

SEQ ID NO: 64035 - RNA, 21 nt, synthetic construct
  source 1..21: mol_type = other RNA
aagcaaaagcaaaattctaac

SEQ ID NO: 64036 - RNA, 21 nt, synthetic construct
  source 1..21: mol_type = other RNA
aagcaaaatggaagtgctggg

SEQ ID NO: 64037 - RNA, 21 nt, synthetic construct
  source 1..21: mol_type = other RNA
aagcaaaattctaacaagaag

SEQ ID NO: 64038 - RNA, 21 nt, synthetic construct
  source 1..21: mol_type = other RNA
aagcaaaattgacaaaccctt

SEQ ID NO: 64039 - RNA, 21 nt, synthetic construct
  source 1..21: mol_type = other RNA
aagcaaaccagacatttctca

SEQ ID NO: 64040 - RNA, 21 nt, synthetic construct
  source 1..21: mol_type = other RNA
aagcaaacgtgcacacccagt

SEQ ID NO: 64041 - RNA, 21 nt, synthetic construct
  source 1..21: mol_type = other RNA
aagcaaagatatgggttattc

SEQ ID NO: 64042 - RNA, 21 nt, synthetic construct
  source 1..21: mol_type = other RNA
aagcaaaggattcgggggaga

SEQ ID NO: 64043 - RNA, 21 nt, synthetic construct
  source 1..21: mol_type = other RNA
aagcaaatgtcatcttctctc

SEQ ID NO: 64044 - RNA, 21 nt, synthetic construct
  source 1..21: mol_type = other RNA
aagcaaatgtgactagaagaa

SEQ ID NO: 64045 - RNA, 21 nt, synthetic construct
  source 1..21: mol_type = other RNA
aagcaacaccagatactcatg

SEQ ID NO: 64046 - RNA, 21 nt, synthetic construct
  source 1..21: mol_type = other RNA
aagcaacactaaagatttgcc

SEQ ID NO: 64047 - RNA, 21 nt, synthetic construct
  source 1..21: mol_type = other RNA
aagcaacaggaagaggcagct

SEQ ID NO: 64048 - RNA, 21 nt, synthetic construct
  source 1..21: mol_type = other RNA
aagcaacatgctaagtgttta

SEQ ID NO: 64049 - RNA, 21 nt, synthetic construct
  source 1..21: mol_type = other RNA
aagcaacctcatttgcagagc

SEQ ID NO: 64050 - RNA, 21 nt, synthetic construct
  source 1..21: mol_type = other RNA
aagcaaccttttaggtgcccc

SEQ ID NO: 64051 - RNA, 21 nt, synthetic construct
  source 1..21: mol_type = other RNA
aagcaactgcatcttctttta

SEQ ID NO: 64052 - RNA, 21 nt, synthetic construct
  source 1..21: mol_type = other RNA
aagcaacttgaaggcaatgta

SEQ ID NO: 64053 - RNA, 21 nt, synthetic construct
  source 1..21: mol_type = other RNA
aagcaacttgatcagggattt

SEQ ID NO: 64054 - RNA, 21 nt, synthetic construct
  source 1..21: mol_type = other RNA
aagcaagccttggcaagggga

SEQ ID NO: 64055 - RNA, 21 nt, synthetic construct
  source 1..21: mol_type = other RNA
aagcaaggaagggcttgatct

SEQ ID NO: 64056 - RNA, 21 nt, synthetic construct
  source 1..21: mol_type = other RNA
aagcaagtaaaagaagatgca

SEQ ID NO: 64057 - RNA, 21 nt, synthetic construct
  source 1..21: mol_type = other RNA
aagcaagtatgagccactagt

SEQ ID NO: 64058 - RNA, 21 nt, synthetic construct
  source 1..21: mol_type = other RNA
aagcaagtgtggtggtctcac

SEQ ID NO: 64059 - RNA, 21 nt, synthetic construct
  source 1..21: mol_type = other RNA
aagcaagttaaaagacatctt

SEQ ID NO: 64060 - RNA, 21 nt, synthetic construct
  source 1..21: mol_type = other RNA
aagcaagttacatgcttagcc

SEQ ID NO: 64061 - RNA, 21 nt, synthetic construct
  source 1..21: mol_type = other RNA
aagcaatctgaaacgaccttg

SEQ ID NO: 64062 - RNA, 21 nt, synthetic construct
  source 1..21: mol_type = other RNA
aagcacaaacctggcaatact

SEQ ID NO: 64063 - RNA, 21 nt, synthetic construct
  source 1..21: mol_type = other RNA
aagcacaaccactgatggaat

SEQ ID NO: 64064 - RNA, 21 nt, synthetic construct
  source 1..21: mol_type = other RNA
aagcacaagcacagagtcaga

SEQ ID NO: 64065 - RNA, 21 nt, synthetic construct
  source 1..21: mol_type = other RNA
aagcacacagtttgagaagcc

SEQ ID NO: 64066 - RNA, 21 nt, synthetic construct
  source 1..21: mol_type = other RNA
aagcacacatgaacctgcatg

SEQ ID NO: 64067 - RNA, 21 nt, synthetic construct
  source 1..21: mol_type = other RNA
aagcacaccaaggtttctctc

SEQ ID NO: 64068 - RNA, 21 nt, synthetic construct
  source 1..21: mol_type = other RNA
aagcacactttccttggagaa

SEQ ID NO: 64069 - RNA, 21 nt, synthetic construct
  source 1..21: mol_type = other RNA
aagcacagaattactatatga

SEQ ID NO: 64070 - RNA, 21 nt, synthetic construct
  source 1..21: mol_type = other RNA
aagcacagactgtgccttgat

SEQ ID NO: 64071 - RNA, 21 nt, synthetic construct
  source 1..21: mol_type = other RNA
aagcacagagtcagaaaatta

SEQ ID NO: 64072 - RNA, 21 nt, synthetic construct
  source 1..21: mol_type = other RNA
aagcacaggcatcggccgggc

SEQ ID NO: 64073 - RNA, 21 nt, synthetic construct
  source 1..21: mol_type = other RNA
aagcacaggcatctctctaaa

SEQ ID NO: 64074 - RNA, 21 nt, synthetic construct
  source 1..21: mol_type = other RNA
aagcacagtctctgcagagca

SEQ ID NO: 64075 - RNA, 21 nt, synthetic construct
  source 1..21: mol_type = other RNA
aagcacataaaaaaggaatct

SEQ ID NO: 64076 - RNA, 21 nt, synthetic construct
  source 1..21: mol_type = other RNA
aagcacatctgtcttgtgcat

SEQ ID NO: 64077 - RNA, 21 nt, synthetic construct
  source 1..21: mol_type = other RNA
aagcacatggtgataactggt

SEQ ID NO: 64078 - RNA, 21 nt, synthetic construct
  source 1..21: mol_type = other RNA
aagcacattccttccgacctg

SEQ ID NO: 64079 - RNA, 21 nt, synthetic construct
  source 1..21: mol_type = other RNA
aagcaccaacagatcctcaca

SEQ ID NO: 64080 - RNA, 21 nt, synthetic construct
  source 1..21: mol_type = other RNA
aagcaccaacccttgttggac

SEQ ID NO: 64081 - RNA, 21 nt, synthetic construct
  source 1..21: mol_type = other RNA
aagcaccactagagtattacc

SEQ ID NO: 64082 - RNA, 21 nt, synthetic construct
  source 1..21: mol_type = other RNA
aagcaccactgagagggaagt

SEQ ID NO: 64083 - RNA, 21 nt, synthetic construct
  source 1..21: mol_type = other RNA
aagcaccacttcgagaaggga

SEQ ID NO: 64084 - RNA, 21 nt, synthetic construct
  source 1..21: mol_type = other RNA
aagcaccagggcctctgaaga

SEQ ID NO: 64085 - RNA, 21 nt, synthetic construct
  source 1..21: mol_type = other RNA
aagcaccagttatcaccatgt

SEQ ID NO: 64086 - RNA, 21 nt, synthetic construct
  source 1..21: mol_type = other RNA
aagcacctaccataacaaaaa

SEQ ID NO: 64087 - RNA, 21 nt, synthetic construct
  source 1..21: mol_type = other RNA
aagcacgttagcatcaccatc

SEQ ID NO: 64088 - RNA, 21 nt, synthetic construct
  source 1..21: mol_type = other RNA
aagcacgtttgatctggtcac

SEQ ID NO: 64089 - RNA, 21 nt, synthetic construct
  source 1..21: mol_type = other RNA
aagcactatccacatttggtt

SEQ ID NO: 64090 - RNA, 21 nt, synthetic construct
  source 1..21: mol_type = other RNA
aagcactgcgccaagcaggga

SEQ ID NO: 64091 - RNA, 21 nt, synthetic construct
  source 1..21: mol_type = other RNA
aagcactggtaaggaaacaga

SEQ ID NO: 64092 - RNA, 21 nt, synthetic construct
  source 1..21: mol_type = other RNA
aagcactttttaccaagttga

SEQ ID NO: 64093 - RNA, 21 nt, synthetic construct
  source 1..21: mol_type = other RNA
aagcagaaaatcagtgtgaaa

SEQ ID NO: 64094 - RNA, 21 nt, synthetic construct
  source 1..21: mol_type = other RNA
aagcagaaagttactattttc

SEQ ID NO: 64095 - RNA, 21 nt, synthetic construct
  source 1..21: mol_type = other RNA
aagcagaaatacagaccgatg

SEQ ID NO: 64096 - RNA, 21 nt, synthetic construct
  source 1..21: mol_type = other RNA
aagcagaaatgacaagtaaat

SEQ ID NO: 64097 - RNA, 21 nt, synthetic construct
  source 1..21: mol_type = other RNA
aagcagaaatgagttccagtc

SEQ ID NO: 64098 - RNA, 21 nt, synthetic construct
  source 1..21: mol_type = other RNA
aagcagaactaagaccccagt

SEQ ID NO: 64099 - RNA, 21 nt, synthetic construct
  source 1..21: mol_type = other RNA
aagcagaatgtccatcaggaa

SEQ ID NO: 64100 - RNA, 21 nt, synthetic construct
  source 1..21: mol_type = other RNA
aagcagaattcaaaaacactg

SEQ ID NO: 64101 - RNA, 21 nt, synthetic construct
  source 1..21: mol_type = other RNA
aagcagacagaaagacaggga

SEQ ID NO: 64102 - RNA, 21 nt, synthetic construct
  source 1..21: mol_type = other RNA
aagcagagaaactggaatcaa

SEQ ID NO: 64103 - RNA, 21 nt, synthetic construct
  source 1..21: mol_type = other RNA
aagcagagagagaagatgaca

SEQ ID NO: 64104 - RNA, 21 nt, synthetic construct
  source 1..21: mol_type = other RNA
aagcagatctgctgtaagctg

SEQ ID NO: 64105 - RNA, 21 nt, synthetic construct
  source 1..21: mol_type = other RNA
aagcagcaagggtggctggca

SEQ ID NO: 64106 - RNA, 21 nt, synthetic construct
  source 1..21: mol_type = other RNA
aagcagctacctgttgattgt

SEQ ID NO: 64107 - RNA, 21 nt, synthetic construct
  source 1..21: mol_type = other RNA
aagcaggaactcatattagtc

SEQ ID NO: 64108 - RNA, 21 nt, synthetic construct
  source 1..21: mol_type = other RNA
aagcaggccctgagaagtcaa

SEQ ID NO: 64109 - RNA, 21 nt, synthetic construct
  source 1..21: mol_type = other RNA
aagcaggccttcgaggcatct

SEQ ID NO: 64110 - RNA, 21 nt, synthetic construct
  source 1..21: mol_type = other RNA
aagcaggctttttacccggag

SEQ ID NO: 64111 - RNA, 21 nt, synthetic construct
  source 1..21: mol_type = other RNA
aagcagggaaatggagggcca

SEQ ID NO: 64112 - RNA, 21 nt, synthetic construct
  source 1..21: mol_type = other RNA
aagcagggacgggcgggggag

SEQ ID NO: 64113 - RNA, 21 nt, synthetic construct
  source 1..21: mol_type = other RNA
aagcagggactcccatatcta

SEQ ID NO: 64114 - RNA, 21 nt, synthetic construct
  source 1..21: mol_type = other RNA
aagcagggaggggtccccagc

SEQ ID NO: 64115 - RNA, 21 nt, synthetic construct
  source 1..21: mol_type = other RNA
aagcaggtcatgacttttttg

SEQ ID NO: 64116 - RNA, 21 nt, synthetic construct
  source 1..21: mol_type = other RNA
aagcaggttcattttaataag

SEQ ID NO: 64117 - RNA, 21 nt, synthetic construct
  source 1..21: mol_type = other RNA
aagcaggttgcattaatgctt

SEQ ID NO: 64118 - RNA, 21 nt, synthetic construct
  source 1..21: mol_type = other RNA
aagcagtaaatatactgacta

SEQ ID NO: 64119 - RNA, 21 nt, synthetic construct
  source 1..21: mol_type = other RNA
aagcagtcctgccttggcctc

SEQ ID NO: 64120 - RNA, 21 nt, synthetic construct
  source 1..21: mol_type = other RNA
aagcagttgatgcaatttgtt

SEQ ID NO: 64121 - RNA, 21 nt, synthetic construct
  source 1..21: mol_type = other RNA
aagcatagtttgagtatttca

SEQ ID NO: 64122 - RNA, 21 nt, synthetic construct
  source 1..21: mol_type = other RNA
aagcatatgaatctagaaaga

SEQ ID NO: 64123 - RNA, 21 nt, synthetic construct
  source 1..21: mol_type = other RNA
aagcatcagagctttgttatg

SEQ ID NO: 64124 - RNA, 21 nt, synthetic construct
  source 1..21: mol_type = other RNA
aagcatcccatatggaggcaa

SEQ ID NO: 64125 - RNA, 21 nt, synthetic construct
  source 1..21: mol_type = other RNA
aagcatcgtgaagtctttatt

SEQ ID NO: 64126 - RNA, 21 nt, synthetic construct
  source 1..21: mol_type = other RNA
aagcatctgatacacttctat

SEQ ID NO: 64127 - RNA, 21 nt, synthetic construct
  source 1..21: mol_type = other RNA
aagcatgagatactacgccta

SEQ ID NO: 64128 - RNA, 21 nt, synthetic construct
  source 1..21: mol_type = other RNA
aagcatgagtatctggtgttg

SEQ ID NO: 64129 - RNA, 21 nt, synthetic construct
  source 1..21: mol_type = other RNA
aagcatggtggtaggtgtgtg

SEQ ID NO: 64130 - RNA, 21 nt, synthetic construct
  source 1..21: mol_type = other RNA
aagcatgtaacttgcttaggc

SEQ ID NO: 64131 - RNA, 21 nt, synthetic construct
  source 1..21: mol_type = other RNA
aagcatgtggccaggaggagg

SEQ ID NO: 64132 - RNA, 21 nt, synthetic construct
  source 1..21: mol_type = other RNA
aagcattaatgcaacctgctt

SEQ ID NO: 64133 - RNA, 21 nt, synthetic construct
  source 1..21: mol_type = other RNA
aagcattgggagctttcatta

SEQ ID NO: 64134 - RNA, 21 nt, synthetic construct
  source 1..21: mol_type = other RNA
aagcattttccggttgtatag

SEQ ID NO: 64135 - RNA, 21 nt, synthetic construct
  source 1..21: mol_type = other RNA
aagccaagagcgaggcctgga

SEQ ID NO: 64136 - RNA, 21 nt, synthetic construct
  source 1..21: mol_type = other RNA
aagccaatatccctgataatc

SEQ ID NO: 64137 - RNA, 21 nt, synthetic construct
  source 1..21: mol_type = other RNA
aagccaatcttcccaatcctt

SEQ ID NO: 64138 - RNA, 21 nt, synthetic construct
  source 1..21: mol_type = other RNA
aagccacacagtacaaggcta

SEQ ID NO: 64139 - RNA, 21 nt, synthetic construct
  source 1..21: mol_type = other RNA
aagccacactcttggtctttc

SEQ ID NO: 64140 - RNA, 21 nt, synthetic construct
  source 1..21: mol_type = other RNA
aagccacagcgtggaatggtc

SEQ ID NO: 64141 - RNA, 21 nt, synthetic construct
  source 1..21: mol_type = other RNA
aagccacatgtggttattgag

SEQ ID NO: 64142 - RNA, 21 nt, synthetic construct
  source 1..21: mol_type = other RNA
aagccacattagccactctga

SEQ ID NO: 64143 - RNA, 21 nt, synthetic construct
  source 1..21: mol_type = other RNA
aagccaccgcactcagcctgt

SEQ ID NO: 64144 - RNA, 21 nt, synthetic construct
  source 1..21: mol_type = other RNA
aagccactgcattcatccagg

SEQ ID NO: 64145 - RNA, 21 nt, synthetic construct
  source 1..21: mol_type = other RNA
aagccagcacctaacaatgat

SEQ ID NO: 64146 - RNA, 21 nt, synthetic construct
  source 1..21: mol_type = other RNA
aagccagcattaccctaataa

SEQ ID NO: 64147 - RNA, 21 nt, synthetic construct
  source 1..21: mol_type = other RNA
aagccaggctttcccagggtg

SEQ ID NO: 64148 - RNA, 21 nt, synthetic construct
  source 1..21: mol_type = other RNA
aagccagggtctgtctcacct

SEQ ID NO: 64149 - RNA, 21 nt, synthetic construct
  source 1..21: mol_type = other RNA
aagccagtcactaaaaatcag

SEQ ID NO: 64150 - RNA, 21 nt, synthetic construct
  source 1..21: mol_type = other RNA
aagccagtccttgtgatctat

SEQ ID NO: 64151 - RNA, 21 nt, synthetic construct
  source 1..21: mol_type = other RNA
aagccatagtgtaaactaaaa

SEQ ID NO: 64152 - RNA, 21 nt, synthetic construct
  source 1..21: mol_type = other RNA
aagccatcctccagccttaat

SEQ ID NO: 64153 - RNA, 21 nt, synthetic construct
  source 1..21: mol_type = other RNA
aagccatctaattcacattta

SEQ ID NO: 64154 - RNA, 21 nt, synthetic construct
  source 1..21: mol_type = other RNA
aagccatgtttctcctgcatg

SEQ ID NO: 64155 - RNA, 21 nt, synthetic construct
  source 1..21: mol_type = other RNA
aagccatttatcagcaccaaa

SEQ ID NO: 64156 - RNA, 21 nt, synthetic construct
  source 1..21: mol_type = other RNA
aagccatttcaggttttcgac

SEQ ID NO: 64157 - RNA, 21 nt, synthetic construct
  source 1..21: mol_type = other RNA
aagcccaacctgattagaggc

SEQ ID NO: 64158 - RNA, 21 nt, synthetic construct
  source 1..21: mol_type = other RNA
aagcccaacttcacaccattt

SEQ ID NO: 64159 - RNA, 21 nt, synthetic construct
  source 1..21: mol_type = other RNA
aagcccaactttttcttttta

SEQ ID NO: 64160 - RNA, 21 nt, synthetic construct
  source 1..21: mol_type = other RNA
aagcccaatctacaggtcgga

SEQ ID NO: 64161 - RNA, 21 nt, synthetic construct
  source 1..21: mol_type = other RNA
aagcccaccagcataagaccc

SEQ ID NO: 64162 - RNA, 21 nt, synthetic construct
  source 1..21: mol_type = other RNA
aagcccagagaggctaggtga

SEQ ID NO: 64163 - RNA, 21 nt, synthetic construct
  source 1..21: mol_type = other RNA
aagcccagccgcggactccgg

SEQ ID NO: 64164 - RNA, 21 nt, synthetic construct
  source 1..21: mol_type = other RNA
aagccccaaaccatcaagtgt

SEQ ID NO: 64165 - RNA, 21 nt, synthetic construct
  source 1..21: mol_type = other RNA
aagccccagttctgcgcaatt

SEQ ID NO: 64166 - RNA, 21 nt, synthetic construct
  source 1..21: mol_type = other RNA
aagccccattgtacacatatt

SEQ ID NO: 64167 - RNA, 21 nt, synthetic construct
  source 1..21: mol_type = other RNA
aagcccgccgctcgcaggtgg

SEQ ID NO: 64168 - RNA, 21 nt, synthetic construct
  source 1..21: mol_type = other RNA
aagccctcaggaccaggcagt

SEQ ID NO: 64169 - RNA, 21 nt, synthetic construct
  source 1..21: mol_type = other RNA
aagccctctaagtcagcctgg

SEQ ID NO: 64170 - RNA, 21 nt, synthetic construct
  source 1..21: mol_type = other RNA
aagccctgcagccagatttga

SEQ ID NO: 64171 - RNA, 21 nt, synthetic construct
  source 1..21: mol_type = other RNA
aagccctgccttaaaacattt

SEQ ID NO: 64172 - RNA, 21 nt, synthetic construct
  source 1..21: mol_type = other RNA
aagcccttccttgcttgtctt

SEQ ID NO: 64173 - RNA, 21 nt, synthetic construct
  source 1..21: mol_type = other RNA
aagcccttgagtatttttgag

SEQ ID NO: 64174 - RNA, 21 nt, synthetic construct
  source 1..21: mol_type = other RNA
aagccgcaaataatcattctt

SEQ ID NO: 64175 - RNA, 21 nt, synthetic construct
  source 1..21: mol_type = other RNA
aagccggattcctttcaaaga

SEQ ID NO: 64176 - RNA, 21 nt, synthetic construct
  source 1..21: mol_type = other RNA
aagccgttccatcagagaggc

SEQ ID NO: 64177 - RNA, 21 nt, synthetic construct
  source 1..21: mol_type = other RNA
aagcctacctcccttcacaaa

SEQ ID NO: 64178 - RNA, 21 nt, synthetic construct
  source 1..21: mol_type = other RNA
aagcctactgctctgtcctgt

SEQ ID NO: 64179 - RNA, 21 nt, synthetic construct
  source 1..21: mol_type = other RNA
aagcctagagattaggcagaa

SEQ ID NO: 64180 - RNA, 21 nt, synthetic construct
  source 1..21: mol_type = other RNA
aagcctatgtaagacaatgtc

SEQ ID NO: 64181 - RNA, 21 nt, synthetic construct
  source 1..21: mol_type = other RNA
aagcctcaaaatttagtaagg

SEQ ID NO: 64182 - RNA, 21 nt, synthetic construct
  source 1..21: mol_type = other RNA
aagcctcaaacgaaccaatta

SEQ ID NO: 64183 - RNA, 21 nt, synthetic construct
  source 1..21: mol_type = other RNA
aagcctcatttgaactttcca

SEQ ID NO: 64184 - RNA, 21 nt, synthetic construct
  source 1..21: mol_type = other RNA
aagcctctcaacacttcagtg

SEQ ID NO: 64185 - RNA, 21 nt, synthetic construct
  source 1..21: mol_type = other RNA
aagcctctctgatggaacggc

SEQ ID NO: 64186 - RNA, 21 nt, synthetic construct
  source 1..21: mol_type = other RNA
aagcctctgtggaccatgttt

SEQ ID NO: 64187 - RNA, 21 nt, synthetic construct
  source 1..21: mol_type = other RNA
aagcctcttcagaagaggata

SEQ ID NO: 64188 - RNA, 21 nt, synthetic construct
  source 1..21: mol_type = other RNA
aagcctgataagctcccagcc

SEQ ID NO: 64189 - RNA, 21 nt, synthetic construct
  source 1..21: mol_type = other RNA
aagcctgcttcagcctaagca

SEQ ID NO: 64190 - RNA, 21 nt, synthetic construct
  source 1..21: mol_type = other RNA
aagcctggctttagatggtaa

SEQ ID NO: 64191 - RNA, 21 nt, synthetic construct
  source 1..21: mol_type = other RNA
aagcctgtgacagtatgtcag

SEQ ID NO: 64192 - RNA, 21 nt, synthetic construct
  source 1..21: mol_type = other RNA
aagcctgtggaggcagtacca

SEQ ID NO: 64193 - RNA, 21 nt, synthetic construct
  source 1..21: mol_type = other RNA
aagccttaaaagtgctgcagt

SEQ ID NO: 64194 - RNA, 21 nt, synthetic construct
  source 1..21: mol_type = other RNA
aagccttcccctgctgttccc

SEQ ID NO: 64195 - RNA, 21 nt, synthetic construct
  source 1..21: mol_type = other RNA
aagccttctctactctgcctc

SEQ ID NO: 64196 - RNA, 21 nt, synthetic construct
  source 1..21: mol_type = other RNA
aagccttggcaaggggaatgg

SEQ ID NO: 64197 - RNA, 21 nt, synthetic construct
  source 1..21: mol_type = other RNA
aagcctttattttttcttccc

SEQ ID NO: 64198 - RNA, 21 nt, synthetic construct
  source 1..21: mol_type = other RNA
aagcgctactcagctgtcact

SEQ ID NO: 64199 - RNA, 21 nt, synthetic construct
  source 1..21: mol_type = other RNA
aagcgctcttcaagcattggg

SEQ ID NO: 64200 - RNA, 21 nt, synthetic construct
  source 1..21: mol_type = other RNA
aagcgctgaagtacttcaagg

SEQ ID NO: 64201 - RNA, 21 nt, synthetic construct
  source 1..21: mol_type = other RNA
aagcggcagggccgggggttg

SEQ ID NO: 64202 - RNA, 21 nt, synthetic construct
  source 1..21: mol_type = other RNA
aagcggggctgccactactta

SEQ ID NO: 64203 - RNA, 21 nt, synthetic construct
  source 1..21: mol_type = other RNA
aagcggtcaacgcacccagag

SEQ ID NO: 64204 - RNA, 21 nt, synthetic construct
  source 1..21: mol_type = other RNA
aagcgtactgtgattacaatt

SEQ ID NO: 64205 - RNA, 21 nt, synthetic construct
  source 1..21: mol_type = other RNA
aagcgttggagacagcctaaa

SEQ ID NO: 64206 - RNA, 21 nt, synthetic construct
  source 1..21: mol_type = other RNA
aagctaagagttttatagtct

SEQ ID NO: 64207 - RNA, 21 nt, synthetic construct
  source 1..21: mol_type = other RNA
aagctaatcaagccgcaaata

SEQ ID NO: 64208 - RNA, 21 nt, synthetic construct
  source 1..21: mol_type = other RNA
aagctaatcccaaagtgagca

SEQ ID NO: 64209 - RNA, 21 nt, synthetic construct
  source 1..21: mol_type = other RNA
aagctaatctactttctaatc

SEQ ID NO: 64210 - RNA, 21 nt, synthetic construct
  source 1..21: mol_type = other RNA
aagctacagactaatatgagt

SEQ ID NO: 64211 - RNA, 21 nt, synthetic construct
  source 1..21: mol_type = other RNA
aagctacagtaatcaaacagt

SEQ ID NO: 64212 - RNA, 21 nt, synthetic construct
  source 1..21: mol_type = other RNA
aagctaccatttattcctctc

SEQ ID NO: 64213 - RNA, 21 nt, synthetic construct
  source 1..21: mol_type = other RNA
aagctaccctcgagtaaaaag

SEQ ID NO: 64214 - RNA, 21 nt, synthetic construct
  source 1..21: mol_type = other RNA
aagctaccctttcttgttagt

SEQ ID NO: 64215 - RNA, 21 nt, synthetic construct
  source 1..21: mol_type = other RNA
aagctactattccaggatcaa

SEQ ID NO: 64216 - RNA, 21 nt, synthetic construct
  source 1..21: mol_type = other RNA
aagctagaagacctcaaattc

SEQ ID NO: 64217 - RNA, 21 nt, synthetic construct
  source 1..21: mol_type = other RNA
aagctatacacgttacaaaat

SEQ ID NO: 64218 - RNA, 21 nt, synthetic construct
  source 1..21: mol_type = other RNA
aagctatagctgagaagtaac

SEQ ID NO: 64219 - RNA, 21 nt, synthetic construct
  source 1..21: mol_type = other RNA
aagctatggagcactgtgagc

SEQ ID NO: 64220 - RNA, 21 nt, synthetic construct
  source 1..21: mol_type = other RNA
aagctcaaaaatactcaaggg

SEQ ID NO: 64221 - RNA, 21 nt, synthetic construct
  source 1..21: mol_type = other RNA
aagctcacctctggactcagg

SEQ ID NO: 64222 - RNA, 21 nt, synthetic construct
  source 1..21: mol_type = other RNA
aagctcaggaccagatgactt

SEQ ID NO: 64223 - RNA, 21 nt, synthetic construct
  source 1..21: mol_type = other RNA
aagctcagtgtgtttttgtaa

SEQ ID NO: 64224 - RNA, 21 nt, synthetic construct
  source 1..21: mol_type = other RNA
aagctcccaatgcttgaagag

SEQ ID NO: 64225 - RNA, 21 nt, synthetic construct
  source 1..21: mol_type = other RNA
aagctcccagccaaacagttt

SEQ ID NO: 64226 - RNA, 21 nt, synthetic construct
  source 1..21: mol_type = other RNA
aagctccccggatgattctaa

SEQ ID NO: 64227 - RNA, 21 nt, synthetic construct
  source 1..21: mol_type = other RNA
aagctccgcctcctggtgggt

SEQ ID NO: 64228 - RNA, 21 nt, synthetic construct
  source 1..21: mol_type = other RNA
aagctcgccgtctccctcggc

SEQ ID NO: 64229 - RNA, 21 nt, synthetic construct
  source 1..21: mol_type = other RNA
aagctctaataaaagctggag

SEQ ID NO: 64230 - RNA, 21 nt, synthetic construct
  source 1..21: mol_type = other RNA
aagctctaatagttcacctct

SEQ ID NO: 64231 - RNA, 21 nt, synthetic construct
  source 1..21: mol_type = other RNA
aagctctagtgagctatgatt

SEQ ID NO: 64232 - RNA, 21 nt, synthetic construct
  source 1..21: mol_type = other RNA
aagctctatggcatttgaggg

SEQ ID NO: 64233 - RNA, 21 nt, synthetic construct
  source 1..21: mol_type = other RNA
aagctctcaattaatgcccaa

SEQ ID NO: 64234 - RNA, 21 nt, synthetic construct
  source 1..21: mol_type = other RNA
aagctctgatgctttctctag

SEQ ID NO: 64235 - RNA, 21 nt, synthetic construct
  source 1..21: mol_type = other RNA
aagctgaactcctttcttacc

SEQ ID NO: 64236 - RNA, 21 nt, synthetic construct
  source 1..21: mol_type = other RNA
aagctgaactctgtggagtcc

SEQ ID NO: 64237 - RNA, 21 nt, synthetic construct
  source 1..21: mol_type = other RNA
aagctgatcaaggaagcttcc

SEQ ID NO: 64238 - RNA, 21 nt, synthetic construct
  source 1..21: mol_type = other RNA
aagctggacccttaccttaaa

SEQ ID NO: 64239 - RNA, 21 nt, synthetic construct
  source 1..21: mol_type = other RNA
aagctggactcattccaatcc

SEQ ID NO: 64240 - RNA, 21 nt, synthetic construct
  source 1..21: mol_type = other RNA
aagctggagttatttgtataa

SEQ ID NO: 64241 - RNA, 21 nt, synthetic construct
  source 1..21: mol_type = other RNA
aagctggcatgttggatagtt

SEQ ID NO: 64242 - RNA, 21 nt, synthetic construct
  source 1..21: mol_type = other RNA
aagctgggctagagccaggaa

SEQ ID NO: 64243 - RNA, 21 nt, synthetic construct
  source 1..21: mol_type = other RNA
aagctggtaatacagtctgat

SEQ ID NO: 64244 - RNA, 21 nt, synthetic construct
  source 1..21: mol_type = other RNA
aagctgtccttctcgtgtgag

SEQ ID NO: 64245 - RNA, 21 nt, synthetic construct
  source 1..21: mol_type = other RNA
aagctgtgagtccttccagta

SEQ ID NO: 64246 - RNA, 21 nt, synthetic construct
  source 1..21: mol_type = other RNA
aagctgtggatgttggtgaga

SEQ ID NO: 64247 - RNA, 21 nt, synthetic construct
  source 1..21: mol_type = other RNA
aagctgtttgagctgaaagta

SEQ ID NO: 64248 - RNA, 21 nt, synthetic construct
  source 1..21: mol_type = other RNA
aagctgttttggtaaaatgtg

SEQ ID NO: 64249 - RNA, 21 nt, synthetic construct
  source 1..21: mol_type = other RNA
aagcttaagagctaagactat

SEQ ID NO: 64250 - RNA, 21 nt, synthetic construct
  source 1..21: mol_type = other RNA
aagcttaatttagatgagagt

SEQ ID NO: 64251 - RNA, 21 nt, synthetic construct
  source 1..21: mol_type = other RNA
aagcttaggtcagattccttt

SEQ ID NO: 64252 - RNA, 21 nt, synthetic construct
  source 1..21: mol_type = other RNA
aagcttaggtctttgatccat

SEQ ID NO: 64253 - RNA, 21 nt, synthetic construct
  source 1..21: mol_type = other RNA
aagcttataatttctgagagt

SEQ ID NO: 64254 - RNA, 21 nt, synthetic construct
  source 1..21: mol_type = other RNA
aagcttatgatcttgggaata

SEQ ID NO: 64255 - RNA, 21 nt, synthetic construct
  source 1..21: mol_type = other RNA
aagcttattaaaatgaacctg

SEQ ID NO: 64256 - RNA, 21 nt, synthetic construct
  source 1..21: mol_type = other RNA
aagcttcaaaccactatctaa

SEQ ID NO: 64257 - RNA, 21 nt, synthetic construct
  source 1..21: mol_type = other RNA
aagcttcacttctctgctgct

SEQ ID NO: 64258 - RNA, 21 nt, synthetic construct
  source 1..21: mol_type = other RNA
aagcttcccccctctctcttt

SEQ ID NO: 64259 - RNA, 21 nt, synthetic construct
  source 1..21: mol_type = other RNA
aagcttcctaaagagagtgac

SEQ ID NO: 64260 - RNA, 21 nt, synthetic construct
  source 1..21: mol_type = other RNA
aagcttcctctggctgacctg

SEQ ID NO: 64261 - RNA, 21 nt, synthetic construct
  source 1..21: mol_type = other RNA
aagcttccttgatcagcttcc

SEQ ID NO: 64262 - RNA, 21 nt, synthetic construct
  source 1..21: mol_type = other RNA
aagcttcgaagcaaaacatat

SEQ ID NO: 64263 - RNA, 21 nt, synthetic construct
  source 1..21: mol_type = other RNA
aagcttcgacagtcccttgcc

SEQ ID NO: 64264 - RNA, 21 nt, synthetic construct
  source 1..21: mol_type = other RNA
aagcttctgagcagtgtttcc

SEQ ID NO: 64265 - RNA, 21 nt, synthetic construct
  source 1..21: mol_type = other RNA
aagcttgggtaggaagctgat

SEQ ID NO: 64266 - RNA, 21 nt, synthetic construct
  source 1..21: mol_type = other RNA
aagctttaaactggatgaata

SEQ ID NO: 64267 - RNA, 21 nt, synthetic construct
  source 1..21: mol_type = other RNA
aagctttcagacttaactata

SEQ ID NO: 64268 - RNA, 21 nt, synthetic construct
  source 1..21: mol_type = other RNA
aagctttgtgactgtgagggt

SEQ ID NO: 64269 - RNA, 21 nt, synthetic construct
  source 1..21: mol_type = other RNA
aagcttttctcctaagtcttc

SEQ ID NO: 64270 - RNA, 21 nt, synthetic construct
  source 1..21: mol_type = other RNA
aaggaaaaaacacctaaagat

SEQ ID NO: 64271 - RNA, 21 nt, synthetic construct
  source 1..21: mol_type = other RNA
aaggaaaaaacgggttataca

SEQ ID NO: 64272 - RNA, 21 nt, synthetic construct
  source 1..21: mol_type = other RNA
aaggaaaaatctaaccctcaa

SEQ ID NO: 64273 - RNA, 21 nt, synthetic construct
  source 1..21: mol_type = other RNA
aaggaaaagaacacagtgttg

SEQ ID NO: 64274 - RNA, 21 nt, synthetic construct
  source 1..21: mol_type = other RNA
aaggaaaagagatctagtgaa

SEQ ID NO: 64275 - RNA, 21 nt, synthetic construct
  source 1..21: mol_type = other RNA
aaggaaaagtcagtaaaaaag

SEQ ID NO: 64276 - RNA, 21 nt, synthetic construct
  source 1..21: mol_type = other RNA
aaggaaacactataaatcagt

SEQ ID NO: 64277 - RNA, 21 nt, synthetic construct
  source 1..21: mol_type = other RNA
aaggaaacagagttttccaat

SEQ ID NO: 64278 - RNA, 21 nt, synthetic construct
  source 1..21: mol_type = other RNA
aaggaaaccccagggatattt

SEQ ID NO: 64279 - RNA, 21 nt, synthetic construct
  source 1..21: mol_type = other RNA
aaggaaagcacgtttgatctg

SEQ ID NO: 64280 - RNA, 21 nt, synthetic construct
  source 1..21: mol_type = other RNA
aaggaaagctcaggaccagat

SEQ ID NO: 64281 - RNA, 21 nt, synthetic construct
  source 1..21: mol_type = other RNA
aaggaaaggagatactggcca

SEQ ID NO: 64282 - RNA, 21 nt, synthetic construct
  source 1..21: mol_type = other RNA
aaggaaaggatggtttgattg

SEQ ID NO: 64283 - RNA, 21 nt, synthetic construct
  source 1..21: mol_type = other RNA
aaggaaagtaactgttggcaa

SEQ ID NO: 64284 - RNA, 21 nt, synthetic construct
  source 1..21: mol_type = other RNA
aaggaaagtgtgcttgggctc

SEQ ID NO: 64285 - RNA, 21 nt, synthetic construct
  source 1..21: mol_type = other RNA
aaggaaataagaaggtttgta

SEQ ID NO: 64286 - RNA, 21 nt, synthetic construct
  source 1..21: mol_type = other RNA
aaggaaatgagtgtatgcagg

SEQ ID NO: 64287 - RNA, 21 nt, synthetic construct
  source 1..21: mol_type = other RNA
aaggaaatggacagcacatta

SEQ ID NO: 64288 - RNA, 21 nt, synthetic construct
  source 1..21: mol_type = other RNA
aaggaacacacacctattcat

SEQ ID NO: 64289 - RNA, 21 nt, synthetic construct
  source 1..21: mol_type = other RNA
aaggaactaatttcatacaag

SEQ ID NO: 64290 - RNA, 21 nt, synthetic construct
  source 1..21: mol_type = other RNA
aaggaagcaccaacccttgtt

SEQ ID NO: 64291 - RNA, 21 nt, synthetic construct
  source 1..21: mol_type = other RNA
aaggaagcagaatgtccatca

SEQ ID NO: 64292 - RNA, 21 nt, synthetic construct
  source 1..21: mol_type = other RNA
aaggaagcttcctaaagagag

SEQ ID NO: 64293 - RNA, 21 nt, synthetic construct
  source 1..21: mol_type = other RNA
aaggaaggaaaggagatactg

SEQ ID NO: 64294 - RNA, 21 nt, synthetic construct
  source 1..21: mol_type = other RNA
aaggaaggaattttaggacaa

SEQ ID NO: 64295 - RNA, 21 nt, synthetic construct
  source 1..21: mol_type = other RNA
aaggaaggattggaatgagtc

SEQ ID NO: 64296 - RNA, 21 nt, synthetic construct
  source 1..21: mol_type = other RNA
aaggaaggcagggtaggaagg

SEQ ID NO: 64297 - RNA, 21 nt, synthetic construct
  source 1..21: mol_type = other RNA
aaggaagggcttgatctagta

SEQ ID NO: 64298 - RNA, 21 nt, synthetic construct
  source 1..21: mol_type = other RNA
aaggaaggtcaaatggtaaca

SEQ ID NO: 64299 - RNA, 21 nt, synthetic construct
  source 1..21: mol_type = other RNA
aaggaatataaacgtgtgtgt

SEQ ID NO: 64300 - RNA, 21 nt, synthetic construct
  source 1..21: mol_type = other RNA
aaggaatccggctttatgaga

SEQ ID NO: 64301 - RNA, 21 nt, synthetic construct
  source 1..21: mol_type = other RNA
aaggaatctgacctaagcttg

SEQ ID NO: 64302 - RNA, 21 nt, synthetic construct
  source 1..21: mol_type = other RNA
aaggaatctgggccgggcgcg

SEQ ID NO: 64303 - RNA, 21 nt, synthetic construct
  source 1..21: mol_type = other RNA
aaggaatgcctataaaatgct

SEQ ID NO: 64304 - RNA, 21 nt, synthetic construct
  source 1..21: mol_type = other RNA
aaggaatggaattctgatgca

SEQ ID NO: 64305 - RNA, 21 nt, synthetic construct
  source 1..21: mol_type = other RNA
aaggaatgtgcactcttttaa

SEQ ID NO: 64306 - RNA, 21 nt, synthetic construct
  source 1..21: mol_type = other RNA
aaggaatgtgcttcctaaacc

SEQ ID NO: 64307 - RNA, 21 nt, synthetic construct
  source 1..21: mol_type = other RNA
aaggaattgtaatcacagtac

SEQ ID NO: 64308 - RNA, 21 nt, synthetic construct
  source 1..21: mol_type = other RNA
aaggaattttaggacaaggaa

SEQ ID NO: 64309 - RNA, 21 nt, synthetic construct
  source 1..21: mol_type = other RNA
aaggaattttcaggactcatg

SEQ ID NO: 64310 - RNA, 21 nt, synthetic construct
  source 1..21: mol_type = other RNA
aaggacacaaattatgactga

SEQ ID NO: 64311 - RNA, 21 nt, synthetic construct
  source 1..21: mol_type = other RNA
aaggacactattgagagtgaa

SEQ ID NO: 64312 - RNA, 21 nt, synthetic construct
  source 1..21: mol_type = other RNA
aaggacagaaattcaacttgg

SEQ ID NO: 64313 - RNA, 21 nt, synthetic construct
  source 1..21: mol_type = other RNA
aaggacagcttccacccaagt

SEQ ID NO: 64314 - RNA, 21 nt, synthetic construct
  source 1..21: mol_type = other RNA
aaggacaggtcacattctgcc

SEQ ID NO: 64315 - RNA, 21 nt, synthetic construct
  source 1..21: mol_type = other RNA
aaggacatccacaacattgtg

SEQ ID NO: 64316 - RNA, 21 nt, synthetic construct
  source 1..21: mol_type = other RNA
aaggacattagtggaaaaact

SEQ ID NO: 64317 - RNA, 21 nt, synthetic construct
  source 1..21: mol_type = other RNA
aaggaccaggtatggcgactc

SEQ ID NO: 64318 - RNA, 21 nt, synthetic construct
  source 1..21: mol_type = other RNA
aaggaccatctgttaaaagat

SEQ ID NO: 64319 - RNA, 21 nt, synthetic construct
  source 1..21: mol_type = other RNA
aaggaccattagcagttctgt

SEQ ID NO: 64320 - RNA, 21 nt, synthetic construct
  source 1..21: mol_type = other RNA
aaggactcacagcttaccaag

SEQ ID NO: 64321 - RNA, 21 nt, synthetic construct
  source 1..21: mol_type = other RNA
aaggactgaagtcctttcttg

SEQ ID NO: 64322 - RNA, 21 nt, synthetic construct
  source 1..21: mol_type = other RNA
aaggactggaactcatttctg

SEQ ID NO: 64323 - RNA, 21 nt, synthetic construct
  source 1..21: mol_type = other RNA
aaggactggcttcagtgccaa

SEQ ID NO: 64324 - RNA, 21 nt, synthetic construct
  source 1..21: mol_type = other RNA
aaggactgggatcctaagcat

SEQ ID NO: 64325 - RNA, 21 nt, synthetic construct
  source 1..21: mol_type = other RNA
aaggacttcagtccttaccac

SEQ ID NO: 64326 - RNA, 21 nt, synthetic construct
  source 1..21: mol_type = other RNA
aaggacttgatctaaaatgga

SEQ ID NO: 64327 - RNA, 21 nt, synthetic construct
  source 1..21: mol_type = other RNA
aaggagaaaacaaaaagaaac

SEQ ID NO: 64328 - RNA, 21 nt, synthetic construct
  source 1..21: mol_type = other RNA
aaggagaaaccatttacccct

SEQ ID NO: 64329 - RNA, 21 nt, synthetic construct
  source 1..21: mol_type = other RNA
aaggagaccagttaggaagcc

SEQ ID NO: 64330 - RNA, 21 nt, synthetic construct
  source 1..21: mol_type = other RNA
aaggagacctactaaaagttg

SEQ ID NO: 64331 - RNA, 21 nt, synthetic construct
  source 1..21: mol_type = other RNA
aaggagagaaaaacaaaacaa

SEQ ID NO: 64332 - RNA, 21 nt, synthetic construct
  source 1..21: mol_type = other RNA
aaggagagaagagggggcata

SEQ ID NO: 64333 - RNA, 21 nt, synthetic construct
  source 1..21: mol_type = other RNA
aaggagatactggccatgttt

SEQ ID NO: 64334 - RNA, 21 nt, synthetic construct
  source 1..21: mol_type = other RNA
aaggagatatacaggaagaga

SEQ ID NO: 64335 - RNA, 21 nt, synthetic construct
  source 1..21: mol_type = other RNA
aaggagatggcacataccatg

SEQ ID NO: 64336 - RNA, 21 nt, synthetic construct
  source 1..21: mol_type = other RNA
aaggagccaaacatcatgatt

SEQ ID NO: 64337 - RNA, 21 nt, synthetic construct
  source 1..21: mol_type = other RNA
aaggaggaaaataatttgcaa

SEQ ID NO: 64338 - RNA, 21 nt, synthetic construct
  source 1..21: mol_type = other RNA
aaggaggaactaattgataaa

SEQ ID NO: 64339 - RNA, 21 nt, synthetic construct
  source 1..21: mol_type = other RNA
aaggagggaaaatgtttattt

SEQ ID NO: 64340 - RNA, 21 nt, synthetic construct
  source 1..21: mol_type = other RNA
aaggagggactgaaaccagtg

SEQ ID NO: 64341 - RNA, 21 nt, synthetic construct
  source 1..21: mol_type = other RNA
aaggagggaggattgtttgag

SEQ ID NO: 64342 - RNA, 21 nt, synthetic construct
  source 1..21: mol_type = other RNA
aaggagtccagtcctgctaac

SEQ ID NO: 64343 - RNA, 21 nt, synthetic construct
  source 1..21: mol_type = other RNA
aaggagtctgcccatcctatc

SEQ ID NO: 64344 - RNA, 21 nt, synthetic construct
  source 1..21: mol_type = other RNA
aaggagttcagctttaaagag

SEQ ID NO: 64345 - RNA, 21 nt, synthetic construct
  source 1..21: mol_type = other RNA
aaggataaacaaagagaacaa

SEQ ID NO: 64346 - RNA, 21 nt, synthetic construct
  source 1..21: mol_type = other RNA
aaggatactgagaacagaatt

SEQ ID NO: 64347 - RNA, 21 nt, synthetic construct
  source 1..21: mol_type = other RNA
aaggatatgggccaaagacag

SEQ ID NO: 64348 - RNA, 21 nt, synthetic construct
  source 1..21: mol_type = other RNA
aaggatatgttttctaaacct

SEQ ID NO: 64349 - RNA, 21 nt, synthetic construct
  source 1..21: mol_type = other RNA
aaggatcgttagtattttcac

SEQ ID NO: 64350 - RNA, 21 nt, synthetic construct
  source 1..21: mol_type = other RNA
aaggatgaccttgacaataaa

SEQ ID NO: 64351 - RNA, 21 nt, synthetic construct
  source 1..21: mol_type = other RNA
aaggatgcacaagacagatgt

SEQ ID NO: 64352 - RNA, 21 nt, synthetic construct
  source 1..21: mol_type = other RNA
aaggatggccagtcatgtggg

SEQ ID NO: 64353 - RNA, 21 nt, synthetic construct
  source 1..21: mol_type = other RNA
aaggatggtttgattgttcca

SEQ ID NO: 64354 - RNA, 21 nt, synthetic construct
  source 1..21: mol_type = other RNA
aaggatgtcaacaaaatacta

SEQ ID NO: 64355 - RNA, 21 nt, synthetic construct
  source 1..21: mol_type = other RNA
aaggatgtcaactgaggcaga

SEQ ID NO: 64356 - RNA, 21 nt, synthetic construct
  source 1..21: mol_type = other RNA
aaggattaatctttctgaact

SEQ ID NO: 64357 - RNA, 21 nt, synthetic construct
  source 1..21: mol_type = other RNA
aaggattagaaagtagattag

SEQ ID NO: 64358 - RNA, 21 nt, synthetic construct
  source 1..21: mol_type = other RNA
aaggattagtgttaattcttc

SEQ ID NO: 64359 - RNA, 21 nt, synthetic construct
  source 1..21: mol_type = other RNA
aaggattatggctagaaactt

SEQ ID NO: 64360 - RNA, 21 nt, synthetic construct
  source 1..21: mol_type = other RNA
aaggattcctccctggagagg

SEQ ID NO: 64361 - RNA, 21 nt, synthetic construct
  source 1..21: mol_type = other RNA
aaggattcgggggagagcact

SEQ ID NO: 64362 - RNA, 21 nt, synthetic construct
  source 1..21: mol_type = other RNA
aaggattgaatggaaagaaat

SEQ ID NO: 64363 - RNA, 21 nt, synthetic construct
  source 1..21: mol_type = other RNA
aaggattgcctaacaccagta

SEQ ID NO: 64364 - RNA, 21 nt, synthetic construct
  source 1..21: mol_type = other RNA
aaggattggaatgagtccagc

SEQ ID NO: 64365 - RNA, 21 nt, synthetic construct
  source 1..21: mol_type = other RNA
aaggattgggaagattggctt

SEQ ID NO: 64366 - RNA, 21 nt, synthetic construct
  source 1..21: mol_type = other RNA
aaggattgttcatgtctgtgt

SEQ ID NO: 64367 - RNA, 21 nt, synthetic construct
  source 1..21: mol_type = other RNA
aaggatttgtttgtgaagata

SEQ ID NO: 64368 - RNA, 21 nt, synthetic construct
  source 1..21: mol_type = other RNA
aaggattttctattcattacc

SEQ ID NO: 64369 - RNA, 21 nt, synthetic construct
  source 1..21: mol_type = other RNA
aaggcaaaccacacagagaac

SEQ ID NO: 64370 - RNA, 21 nt, synthetic construct
  source 1..21: mol_type = other RNA
aaggcaaaggaaaaaactttt

SEQ ID NO: 64371 - RNA, 21 nt, synthetic construct
  source 1..21: mol_type = other RNA
aaggcaatgctctcttccccc

SEQ ID NO: 64372 - RNA, 21 nt, synthetic construct
  source 1..21: mol_type = other RNA
aaggcaatgtaacacagttct

SEQ ID NO: 64373 - RNA, 21 nt, synthetic construct
  source 1..21: mol_type = other RNA
aaggcaatgtagggaatagac

SEQ ID NO: 64374 - RNA, 21 nt, synthetic construct
  source 1..21: mol_type = other RNA
aaggcacagtctgtgcttaag

SEQ ID NO: 64375 - RNA, 21 nt, synthetic construct
  source 1..21: mol_type = other RNA
aaggcactaacaaagggcctg

SEQ ID NO: 64376 - RNA, 21 nt, synthetic construct
  source 1..21: mol_type = other RNA
aaggcactgtatggttcttaa

SEQ ID NO: 64377 - RNA, 21 nt, synthetic construct
  source 1..21: mol_type = other RNA
aaggcagaacacactgctctt

SEQ ID NO: 64378 - RNA, 21 nt, synthetic construct
  source 1..21: mol_type = other RNA
aaggcagaattatagagggcc

SEQ ID NO: 64379 - RNA, 21 nt, synthetic construct
  source 1..21: mol_type = other RNA
aaggcaggactgcttgaggcc

SEQ ID NO: 64380 - RNA, 21 nt, synthetic construct
  source 1..21: mol_type = other RNA
aaggcaggagcagtgtgaata

SEQ ID NO: 64381 - RNA, 21 nt, synthetic construct
  source 1..21: mol_type = other RNA
aaggcaggaggcctcagaatt

SEQ ID NO: 64382 - RNA, 21 nt, synthetic construct
  source 1..21: mol_type = other RNA
aaggcagggcttggtggccca

SEQ ID NO: 64383 - RNA, 21 nt, synthetic construct
  source 1..21: mol_type = other RNA
aaggcagggtaggaaggcggt

SEQ ID NO: 64384 - RNA, 21 nt, synthetic construct
  source 1..21: mol_type = other RNA
aaggcatagggccttctactt

SEQ ID NO: 64385 - RNA, 21 nt, synthetic construct
  source 1..21: mol_type = other RNA
aaggcatgaaattcttgggtg

SEQ ID NO: 64386 - RNA, 21 nt, synthetic construct
  source 1..21: mol_type = other RNA
aaggccaactgtcctctcttg

SEQ ID NO: 64387 - RNA, 21 nt, synthetic construct
  source 1..21: mol_type = other RNA
aaggccagagggaatctagga

SEQ ID NO: 64388 - RNA, 21 nt, synthetic construct
  source 1..21: mol_type = other RNA
aaggccatttgattgccagtt

SEQ ID NO: 64389 - RNA, 21 nt, synthetic construct
  source 1..21: mol_type = other RNA
aaggcccaaaaagtttttaaa

SEQ ID NO: 64390 - RNA, 21 nt, synthetic construct
  source 1..21: mol_type = other RNA
aaggcccaccatgatgcagcc

SEQ ID NO: 64391 - RNA, 21 nt, synthetic construct
  source 1..21: mol_type = other RNA
aaggccccttgaaagatcatt

SEQ ID NO: 64392 - RNA, 21 nt, synthetic construct
  source 1..21: mol_type = other RNA
aaggccctatgccttcagtat

SEQ ID NO: 64393 - RNA, 21 nt, synthetic construct
  source 1..21: mol_type = other RNA
aaggccctgattgagattagc

SEQ ID NO: 64394 - RNA, 21 nt, synthetic construct
  source 1..21: mol_type = other RNA
aaggccctgatttaaagtagg

SEQ ID NO: 64395 - RNA, 21 nt, synthetic construct
  source 1..21: mol_type = other RNA
aaggccgctcttgaccttgtg

SEQ ID NO: 64396 - RNA, 21 nt, synthetic construct
  source 1..21: mol_type = other RNA
aaggccgtccctattttctac

SEQ ID NO: 64397 - RNA, 21 nt, synthetic construct
  source 1..21: mol_type = other RNA
aaggcctgatagctgtggaag

SEQ ID NO: 64398 - RNA, 21 nt, synthetic construct
  source 1..21: mol_type = other RNA
aaggcctgcttcattccgcgt

SEQ ID NO: 64399 - RNA, 21 nt, synthetic construct
  source 1..21: mol_type = other RNA
aaggccttccacggaatgccc

SEQ ID NO: 64400 - RNA, 21 nt, synthetic construct
  source 1..21: mol_type = other RNA
aaggccttctcctccaaccca

SEQ ID NO: 64401 - RNA, 21 nt, synthetic construct
  source 1..21: mol_type = other RNA
aaggcgaaatgtgaacagaca

SEQ ID NO: 64402 - RNA, 21 nt, synthetic construct
  source 1..21: mol_type = other RNA
aaggcgaagcccgccgctcgc

SEQ ID NO: 64403 - RNA, 21 nt, synthetic construct
  source 1..21: mol_type = other RNA
aaggcgaagcggcagggccgg

SEQ ID NO: 64404 - RNA, 21 nt, synthetic construct
  source 1..21: mol_type = other RNA
aaggcgcagacacaccatgac

SEQ ID NO: 64405 - RNA, 21 nt, synthetic construct
  source 1..21: mol_type = other RNA
aaggcggaagttgcagtgagc

SEQ ID NO: 64406 - RNA, 21 nt, synthetic construct
  source 1..21: mol_type = other RNA
aaggcggtggggacagctcaa

SEQ ID NO: 64407 - RNA, 21 nt, synthetic construct
  source 1..21: mol_type = other RNA
aaggcgtcggggctgctgggg

SEQ ID NO: 64408 - RNA, 21 nt, synthetic construct
  source 1..21: mol_type = other RNA
aaggcgtgtaaactgttggaa

SEQ ID NO: 64409 - RNA, 21 nt, synthetic construct
  source 1..21: mol_type = other RNA
aaggctaaaacatacatgaga

SEQ ID NO: 64410 - RNA, 21 nt, synthetic construct
  source 1..21: mol_type = other RNA
aaggctaacagccaaagaaat

SEQ ID NO: 64411 - RNA, 21 nt, synthetic construct
  source 1..21: mol_type = other RNA
aaggctaagcatgtaacttgc

SEQ ID NO: 64412 - RNA, 21 nt, synthetic construct
  source 1..21: mol_type = other RNA
aaggctaagttgagaaactat

SEQ ID NO: 64413 - RNA, 21 nt, synthetic construct
  source 1..21: mol_type = other RNA
aaggctagagctcacacgaga

SEQ ID NO: 64414 - RNA, 21 nt, synthetic construct
  source 1..21: mol_type = other RNA
aaggctagcacagaggcaaca

SEQ ID NO: 64415 - RNA, 21 nt, synthetic construct
  source 1..21: mol_type = other RNA
aaggctcagcccctcatcctc

SEQ ID NO: 64416 - RNA, 21 nt, synthetic construct
  source 1..21: mol_type = other RNA
aaggctcctgcagacatgcac

SEQ ID NO: 64417 - RNA, 21 nt, synthetic construct
  source 1..21: mol_type = other RNA
aaggctgagacctcatcttag

SEQ ID NO: 64418 - RNA, 21 nt, synthetic construct
  source 1..21: mol_type = other RNA
aaggctgcaagcactggtaag

SEQ ID NO: 64419 - RNA, 21 nt, synthetic construct
  source 1..21: mol_type = other RNA
aaggctgccagcaccagatac

SEQ ID NO: 64420 - RNA, 21 nt, synthetic construct
  source 1..21: mol_type = other RNA
aaggctggaaataatttccct

SEQ ID NO: 64421 - RNA, 21 nt, synthetic construct
  source 1..21: mol_type = other RNA
aaggctggagtgcagtggcgc

SEQ ID NO: 64422 - RNA, 21 nt, synthetic construct
  source 1..21: mol_type = other RNA
aaggcttcgagttctgggagt

SEQ ID NO: 64423 - RNA, 21 nt, synthetic construct
  source 1..21: mol_type = other RNA
aaggcttgctttggctagaag

SEQ ID NO: 64424 - RNA, 21 nt, synthetic construct
  source 1..21: mol_type = other RNA
aaggcttggaaaacaaattgc

SEQ ID NO: 64425 - RNA, 21 nt, synthetic construct
  source 1..21: mol_type = other RNA
aaggcttgtgcatcagaattc

SEQ ID NO: 64426 - RNA, 21 nt, synthetic construct
  source 1..21: mol_type = other RNA
aaggctttcgtatggaagatg

SEQ ID NO: 64427 - RNA, 21 nt, synthetic construct
  source 1..21: mol_type = other RNA
aaggctttgtgttggtgtttc

SEQ ID NO: 64428 - RNA, 21 nt, synthetic construct
  source 1..21: mol_type = other RNA
aagggaaaacaattacttgag

SEQ ID NO: 64429 - RNA, 21 nt, synthetic construct
  source 1..21: mol_type = other RNA
aagggaaacactcataccagg

SEQ ID NO: 64430 - RNA, 21 nt, synthetic construct
  source 1..21: mol_type = other RNA
aagggaaacagggttacagta

SEQ ID NO: 64431 - RNA, 21 nt, synthetic construct
  source 1..21: mol_type = other RNA
aagggaaaggatgaccttgac

SEQ ID NO: 64432 - RNA, 21 nt, synthetic construct
  source 1..21: mol_type = other RNA
aagggaaatatgaaccacact

SEQ ID NO: 64433 - RNA, 21 nt, synthetic construct
  source 1..21: mol_type = other RNA
aagggaacactaagaagatgg

SEQ ID NO: 64434 - RNA, 21 nt, synthetic construct
  source 1..21: mol_type = other RNA
aagggaagagctaagatgcta

SEQ ID NO: 64435 - RNA, 21 nt, synthetic construct
  source 1..21: mol_type = other RNA
aagggaagaggccacaaagtc

SEQ ID NO: 64436 - RNA, 21 nt, synthetic construct
  source 1..21: mol_type = other RNA
aagggaagtaaagatcaagct

SEQ ID NO: 64437 - RNA, 21 nt, synthetic construct
  source 1..21: mol_type = other RNA
aagggaattttactgatcttt

SEQ ID NO: 64438 - RNA, 21 nt, synthetic construct
  source 1..21: mol_type = other RNA
aagggactgtcgaagcttaat

SEQ ID NO: 64439 - RNA, 21 nt, synthetic construct
  source 1..21: mol_type = other RNA
aagggagaacccaggaacaga

SEQ ID NO: 64440 - RNA, 21 nt, synthetic construct
  source 1..21: mol_type = other RNA
aagggagagatgcctatgaaa

SEQ ID NO: 64441 - RNA, 21 nt, synthetic construct
  source 1..21: mol_type = other RNA
aagggagcccaagcacacttt

SEQ ID NO: 64442 - RNA, 21 nt, synthetic construct
  source 1..21: mol_type = other RNA
aagggaggaaaaaacagttgc

SEQ ID NO: 64443 - RNA, 21 nt, synthetic construct
  source 1..21: mol_type = other RNA
aagggaggtaggcttagatga

SEQ ID NO: 64444 - RNA, 21 nt, synthetic construct
  source 1..21: mol_type = other RNA
aagggagtcagtagaggccga

SEQ ID NO: 64445 - RNA, 21 nt, synthetic construct
  source 1..21: mol_type = other RNA
aagggataatgctatccagaa

SEQ ID NO: 64446 - RNA, 21 nt, synthetic construct
  source 1..21: mol_type = other RNA
aagggattctggccaaatccc

SEQ ID NO: 64447 - RNA, 21 nt, synthetic construct
  source 1..21: mol_type = other RNA
aagggcattttcaaggtagaa

SEQ ID NO: 64448 - RNA, 21 nt, synthetic construct
  source 1..21: mol_type = other RNA
aagggccatttcatttctgtt

SEQ ID NO: 64449 - RNA, 21 nt, synthetic construct
  source 1..21: mol_type = other RNA
aagggcctgttccaggcctcg

SEQ ID NO: 64450 - RNA, 21 nt, synthetic construct
  source 1..21: mol_type = other RNA
aagggcttgatctagtaaata

SEQ ID NO: 64451 - RNA, 21 nt, synthetic construct
  source 1..21: mol_type = other RNA
aagggctttcaatagtgggta

SEQ ID NO: 64452 - RNA, 21 nt, synthetic construct
  source 1..21: mol_type = other RNA
aaggggaaggaattttcagga

SEQ ID NO: 64453 - RNA, 21 nt, synthetic construct
  source 1..21: mol_type = other RNA
aaggggaatcatgcagtactt

SEQ ID NO: 64454 - RNA, 21 nt, synthetic construct
  source 1..21: mol_type = other RNA
aaggggaatggtactgcctcc

SEQ ID NO: 64455 - RNA, 21 nt, synthetic construct
  source 1..21: mol_type = other RNA
aaggggagaggcctcatgtat

SEQ ID NO: 64456 - RNA, 21 nt, synthetic construct
  source 1..21: mol_type = other RNA
aaggggatgggggacgacgta

SEQ ID NO: 64457 - RNA, 21 nt, synthetic construct
  source 1..21: mol_type = other RNA
aaggggatttcatgaacaatt

SEQ ID NO: 64458 - RNA, 21 nt, synthetic construct
  source 1..21: mol_type = other RNA
aaggggcagggtggagtccaa

SEQ ID NO: 64459 - RNA, 21 nt, synthetic construct
  source 1..21: mol_type = other RNA
aaggggcattccgtggaaggc

SEQ ID NO: 64460 - RNA, 21 nt, synthetic construct
  source 1..21: mol_type = other RNA
aaggggccaggtgtggaggct

SEQ ID NO: 64461 - RNA, 21 nt, synthetic construct
  source 1..21: mol_type = other RNA
aaggggccttttgtcaagcta

SEQ ID NO: 64462 - RNA, 21 nt, synthetic construct
  source 1..21: mol_type = other RNA
aaggggctatctttactttca

SEQ ID NO: 64463 - RNA, 21 nt, synthetic construct
  source 1..21: mol_type = other RNA
aagggggaatctactcttttg

SEQ ID NO: 64464 - RNA, 21 nt, synthetic construct
  source 1..21: mol_type = other RNA
aaggggtaaatggtttctcct

SEQ ID NO: 64465 - RNA, 21 nt, synthetic construct
  source 1..21: mol_type = other RNA
aagggtaaacagaattaaaca

SEQ ID NO: 64466 - RNA, 21 nt, synthetic construct
  source 1..21: mol_type = other RNA
aagggtaagaaaattgtacaa

SEQ ID NO: 64467 - RNA, 21 nt, synthetic construct
  source 1..21: mol_type = other RNA
aagggtacagaactgctaatg

SEQ ID NO: 64468 - RNA, 21 nt, synthetic construct
  source 1..21: mol_type = other RNA
aagggtagagcactttcgtat

SEQ ID NO: 64469 - RNA, 21 nt, synthetic construct
  source 1..21: mol_type = other RNA
aagggtagctttgatgccccc

SEQ ID NO: 64470 - RNA, 21 nt, synthetic construct
  source 1..21: mol_type = other RNA
aagggtcactattaaccatat

SEQ ID NO: 64471 - RNA, 21 nt, synthetic construct
  source 1..21: mol_type = other RNA
aagggtcagaattttattttc

SEQ ID NO: 64472 - RNA, 21 nt, synthetic construct
  source 1..21: mol_type = other RNA
aagggtccagcttcactcttc

SEQ ID NO: 64473 - RNA, 21 nt, synthetic construct
  source 1..21: mol_type = other RNA
aagggtctggtatctaccaaa

SEQ ID NO: 64474 - RNA, 21 nt, synthetic construct
  source 1..21: mol_type = other RNA
aagggtctgttttacatgttt

SEQ ID NO: 64475 - RNA, 21 nt, synthetic construct
  source 1..21: mol_type = other RNA
aagggtgacagagccgagcag

SEQ ID NO: 64476 - RNA, 21 nt, synthetic construct
  source 1..21: mol_type = other RNA
aagggtgataaaaaggaggga

SEQ ID NO: 64477 - RNA, 21 nt, synthetic construct
  source 1..21: mol_type = other RNA
aagggtggctggcactttcct

SEQ ID NO: 64478 - RNA, 21 nt, synthetic construct
  source 1..21: mol_type = other RNA
aagggtgggggcatcaaagct

SEQ ID NO: 64479 - RNA, 21 nt, synthetic construct
  source 1..21: mol_type = other RNA
aagggtggtgctggactggag

SEQ ID NO: 64480 - RNA, 21 nt, synthetic construct
  source 1..21: mol_type = other RNA
aagggtgtgtgaatggaaaat

SEQ ID NO: 64481 - RNA, 21 nt, synthetic construct
  source 1..21: mol_type = other RNA
aagggtgtgtttaatttccac

SEQ ID NO: 64482 - RNA, 21 nt, synthetic construct
  source 1..21: mol_type = other RNA
aagggtgttttcccccctaaa

SEQ ID NO: 64483 - RNA, 21 nt, synthetic construct
  source 1..21: mol_type = other RNA
aagggttcttggaaattagaa

SEQ ID NO: 64484 - RNA, 21 nt, synthetic construct
  source 1..21: mol_type = other RNA
aagggttggtgcttccttctc

SEQ ID NO: 64485 - RNA, 21 nt, synthetic construct
  source 1..21: mol_type = other RNA
aagggttttctgtagaatatc

SEQ ID NO: 64486 - RNA, 21 nt, synthetic construct
  source 1..21: mol_type = other RNA
aagggttttggtatgttgtgt

SEQ ID NO: 64487 - RNA, 21 nt, synthetic construct
  source 1..21: mol_type = other RNA
aaggtaagaatgtcaagctgt

SEQ ID NO: 64488 - RNA, 21 nt, synthetic construct
  source 1..21: mol_type = other RNA
aaggtaaggaaaccccaggga

SEQ ID NO: 64489 - RNA, 21 nt, synthetic construct
  source 1..21: mol_type = other RNA
aaggtaagggtccagcttcac

SEQ ID NO: 64490 - RNA, 21 nt, synthetic construct
  source 1..21: mol_type = other RNA
aaggtaatctagtttatctca

SEQ ID NO: 64491 - RNA, 21 nt, synthetic construct
  source 1..21: mol_type = other RNA
aaggtacaattacacatctcc

SEQ ID NO: 64492 - RNA, 21 nt, synthetic construct
  source 1..21: mol_type = other RNA
aaggtacgacgctcttgttca

SEQ ID NO: 64493 - RNA, 21 nt, synthetic construct
  source 1..21: mol_type = other RNA
aaggtagaaacatcccaagtg

SEQ ID NO: 64494 - RNA, 21 nt, synthetic construct
  source 1..21: mol_type = other RNA
aaggtagaagataatgttaga

SEQ ID NO: 64495 - RNA, 21 nt, synthetic construct
  source 1..21: mol_type = other RNA
aaggtagaagtacaaacatta

SEQ ID NO: 64496 - RNA, 21 nt, synthetic construct
  source 1..21: mol_type = other RNA
aaggtaggagggtgtgatcag

SEQ ID NO: 64497 - RNA, 21 nt, synthetic construct
  source 1..21: mol_type = other RNA
aaggtataaaggatgcacaag

SEQ ID NO: 64498 - RNA, 21 nt, synthetic construct
  source 1..21: mol_type = other RNA
aaggtatcatcggaaatataa

SEQ ID NO: 64499 - RNA, 21 nt, synthetic construct
  source 1..21: mol_type = other RNA
aaggtatctccccaaagatat

SEQ ID NO: 64500 - RNA, 21 nt, synthetic construct
  source 1..21: mol_type = other RNA
aaggtcaaatggtaacagcca

SEQ ID NO: 64501 - RNA, 21 nt, synthetic construct
  source 1..21: mol_type = other RNA
aaggtcaacacatcagcgcta

SEQ ID NO: 64502 - RNA, 21 nt, synthetic construct
  source 1..21: mol_type = other RNA
aaggtcaagagagattaaata

SEQ ID NO: 64503 - RNA, 21 nt, synthetic construct
  source 1..21: mol_type = other RNA
aaggtcaagagcggcctttgc

SEQ ID NO: 64504 - RNA, 21 nt, synthetic construct
  source 1..21: mol_type = other RNA
aaggtcaatctaggaggtcta

SEQ ID NO: 64505 - RNA, 21 nt, synthetic construct
  source 1..21: mol_type = other RNA
aaggtcaatctgaaaaatatc

SEQ ID NO: 64506 - RNA, 21 nt, synthetic construct
  source 1..21: mol_type = other RNA
aaggtcacattcagaggtatt

SEQ ID NO: 64507 - RNA, 21 nt, synthetic construct
  source 1..21: mol_type = other RNA
aaggtcagaagtttggaacca

SEQ ID NO: 64508 - RNA, 21 nt, synthetic construct
  source 1..21: mol_type = other RNA
aaggtcatcctttcccttctg

SEQ ID NO: 64509 - RNA, 21 nt, synthetic construct
  source 1..21: mol_type = other RNA
aaggtcgtttcagattgcttg

SEQ ID NO: 64510 - RNA, 21 nt, synthetic construct
  source 1..21: mol_type = other RNA
aaggtctagtgtgcatgtgtt

SEQ ID NO: 64511 - RNA, 21 nt, synthetic construct
  source 1..21: mol_type = other RNA
aaggtctctctctgtcaccca

SEQ ID NO: 64512 - RNA, 21 nt, synthetic construct
  source 1..21: mol_type = other RNA
aaggtctgtaagtcagttaac

SEQ ID NO: 64513 - RNA, 21 nt, synthetic construct
  source 1..21: mol_type = other RNA
aaggtgagggactgagcagtg

SEQ ID NO: 64514 - RNA, 21 nt, synthetic construct
  source 1..21: mol_type = other RNA
aaggtgcacgctgtgaatgtg

SEQ ID NO: 64515 - RNA, 21 nt, synthetic construct
  source 1..21: mol_type = other RNA
aaggtgcccgcgaaggcgtgt

SEQ ID NO: 64516 - RNA, 21 nt, synthetic construct
  source 1..21: mol_type = other RNA
aaggtgcctgccatagaggga

SEQ ID NO: 64517 - RNA, 21 nt, synthetic construct
  source 1..21: mol_type = other RNA
aaggtgcgggattatttggaa

SEQ ID NO: 64518 - RNA, 21 nt, synthetic construct
  source 1..21: mol_type = other RNA
aaggtgctaattgtttgttgg

SEQ ID NO: 64519 - RNA, 21 nt, synthetic construct
  source 1..21: mol_type = other RNA
aaggtgctgttgtattttaca

SEQ ID NO: 64520 - RNA, 21 nt, synthetic construct
  source 1..21: mol_type = other RNA
aaggtggagtggtggatagag

SEQ ID NO: 64521 - RNA, 21 nt, synthetic construct
  source 1..21: mol_type = other RNA
aaggtgttaagccgttccatc

SEQ ID NO: 64522 - RNA, 21 nt, synthetic construct
  source 1..21: mol_type = other RNA
aaggtgttagcaggactggac

SEQ ID NO: 64523 - RNA, 21 nt, synthetic construct
  source 1..21: mol_type = other RNA
aaggtgttcctgaagtctttg

SEQ ID NO: 64524 - RNA, 21 nt, synthetic construct
  source 1..21: mol_type = other RNA
aaggtgtttggtgaattttat

SEQ ID NO: 64525 - RNA, 21 nt, synthetic construct
  source 1..21: mol_type = other RNA
aaggttaactaatagccagtg

SEQ ID NO: 64526 - RNA, 21 nt, synthetic construct
  source 1..21: mol_type = other RNA
aaggttaagggaagagctaag

SEQ ID NO: 64527 - RNA, 21 nt, synthetic construct
  source 1..21: mol_type = other RNA
aaggttataatcagccgtgat

SEQ ID NO: 64528 - RNA, 21 nt, synthetic construct
  source 1..21: mol_type = other RNA
aaggttcaagtttggctccca

SEQ ID NO: 64529 - RNA, 21 nt, synthetic construct
  source 1..21: mol_type = other RNA
aaggttcacaaattagaacaa

SEQ ID NO: 64530 - RNA, 21 nt, synthetic construct
  source 1..21: mol_type = other RNA
aaggttctgctatgctgaaag

SEQ ID NO: 64531 - RNA, 21 nt, synthetic construct
  source 1..21: mol_type = other RNA
aaggttgaaaactcaactgcc

SEQ ID NO: 64532 - RNA, 21 nt, synthetic construct
  source 1..21: mol_type = other RNA
aaggttgagacaagaccacac

SEQ ID NO: 64533 - RNA, 21 nt, synthetic construct
  source 1..21: mol_type = other RNA
aaggttgcttaattgagctgt

SEQ ID NO: 64534 - RNA, 21 nt, synthetic construct
  source 1..21: mol_type = other RNA
aaggttgttcttggttaatat

SEQ ID NO: 64535 - RNA, 21 nt, synthetic construct
  source 1..21: mol_type = other RNA
aaggtttagaaaacatatcct

SEQ ID NO: 64536 - RNA, 21 nt, synthetic construct
  source 1..21: mol_type = other RNA
aaggtttccagtggcccccct

SEQ ID NO: 64537 - RNA, 21 nt, synthetic construct
  source 1..21: mol_type = other RNA
aaggtttccctggggaataag

SEQ ID NO: 64538 - RNA, 21 nt, synthetic construct
  source 1..21: mol_type = other RNA
aaggtttctctccaaggtaca

SEQ ID NO: 64539 - RNA, 21 nt, synthetic construct
  source 1..21: mol_type = other RNA
aaggtttcttcactcttaaaa

SEQ ID NO: 64540 - RNA, 21 nt, synthetic construct
  source 1..21: mol_type = other RNA
aaggtttggagtttgtagctc

SEQ ID NO: 64541 - RNA, 21 nt, synthetic construct
  source 1..21: mol_type = other RNA
aaggtttgtagagcaagcaac

SEQ ID NO: 64542 - RNA, 21 nt, synthetic construct
  source 1..21: mol_type = other RNA
aaggtttttgaacaagagcgt

SEQ ID NO: 64543 - RNA, 21 nt, synthetic construct
  source 1..21: mol_type = other RNA
aagtaaaaagcactatccaca

SEQ ID NO: 64544 - RNA, 21 nt, synthetic construct
  source 1..21: mol_type = other RNA
aagtaaaagaagatgcagttg

SEQ ID NO: 64545 - RNA, 21 nt, synthetic construct
  source 1..21: mol_type = other RNA
aagtaaaagcaacctcatttg

SEQ ID NO: 64546 - RNA, 21 nt, synthetic construct
  source 1..21: mol_type = other RNA
aagtaaaatcggaacaggctc

SEQ ID NO: 64547 - RNA, 21 nt, synthetic construct
  source 1..21: mol_type = other RNA
aagtaaacaactgactctaaa

SEQ ID NO: 64548 - RNA, 21 nt, synthetic construct
  source 1..21: mol_type = other RNA
aagtaaacctcaagtcttttc

SEQ ID NO: 64549 - RNA, 21 nt, synthetic construct
  source 1..21: mol_type = other RNA
aagtaaagatagccccttatc

SEQ ID NO: 64550 - RNA, 21 nt, synthetic construct
  source 1..21: mol_type = other RNA
aagtaaagatcaagctcgccg

SEQ ID NO: 64551 - RNA, 21 nt, synthetic construct
  source 1..21: mol_type = other RNA
aagtaaatcagactgtattac

SEQ ID NO: 64552 - RNA, 21 nt, synthetic construct
  source 1..21: mol_type = other RNA
aagtaaatcccggccaggtgc

SEQ ID NO: 64553 - RNA, 21 nt, synthetic construct
  source 1..21: mol_type = other RNA
aagtaaatgcaatgcaggcgc

SEQ ID NO: 64554 - RNA, 21 nt, synthetic construct
  source 1..21: mol_type = other RNA
aagtaaattcgcataaccaaa

SEQ ID NO: 64555 - RNA, 21 nt, synthetic construct
  source 1..21: mol_type = other RNA
aagtaacactcagaagtacta

SEQ ID NO: 64556 - RNA, 21 nt, synthetic construct
  source 1..21: mol_type = other RNA
aagtaacagttcaatactact

SEQ ID NO: 64557 - RNA, 21 nt, synthetic construct
  source 1..21: mol_type = other RNA
aagtaacattacaacagcaag

SEQ ID NO: 64558 - RNA, 21 nt, synthetic construct
  source 1..21: mol_type = other RNA
aagtaactcttgagttaggaa

SEQ ID NO: 64559 - RNA, 21 nt, synthetic construct
  source 1..21: mol_type = other RNA
aagtaactgttggcaaggatg

SEQ ID NO: 64560 - RNA, 21 nt, synthetic construct
  source 1..21: mol_type = other RNA
aagtaataaagcaagtatgag

SEQ ID NO: 64561 - RNA, 21 nt, synthetic construct
  source 1..21: mol_type = other RNA
aagtaatcaagtgaaatgatc

SEQ ID NO: 64562 - RNA, 21 nt, synthetic construct
  source 1..21: mol_type = other RNA
aagtaatgaaaattagctgga

SEQ ID NO: 64563 - RNA, 21 nt, synthetic construct
  source 1..21: mol_type = other RNA
aagtaatgctggccagtgagt

SEQ ID NO: 64564 - RNA, 21 nt, synthetic construct
  source 1..21: mol_type = other RNA
aagtaattgggatctgataaa

SEQ ID NO: 64565 - RNA, 21 nt, synthetic construct
  source 1..21: mol_type = other RNA
aagtaattgttttcccttttg

SEQ ID NO: 64566 - RNA, 21 nt, synthetic construct
  source 1..21: mol_type = other RNA
aagtacagataaccaataaga

SEQ ID NO: 64567 - RNA, 21 nt, synthetic construct
  source 1..21: mol_type = other RNA
aagtacatgaaatactcaaac

SEQ ID NO: 64568 - RNA, 21 nt, synthetic construct
  source 1..21: mol_type = other RNA
aagtactgagtcaaaaccaaa

SEQ ID NO: 64569 - RNA, 21 nt, synthetic construct
  source 1..21: mol_type = other RNA
aagtactgcatgattcccctt

SEQ ID NO: 64570 - RNA, 21 nt, synthetic construct
  source 1..21: mol_type = other RNA
aagtactggaaatggacagcg

SEQ ID NO: 64571 - RNA, 21 nt, synthetic construct
  source 1..21: mol_type = other RNA
aagtacttcaaggttcacaaa

SEQ ID NO: 64572 - RNA, 21 nt, synthetic construct
  source 1..21: mol_type = other RNA
aagtacttcagcgcttgaaca

SEQ ID NO: 64573 - RNA, 21 nt, synthetic construct
  source 1..21: mol_type = other RNA
aagtagaaggccctatgcctt

SEQ ID NO: 64574 - RNA, 21 nt, synthetic construct
  source 1..21: mol_type = other RNA
aagtagaaggtcaatctagga

SEQ ID NO: 64575 - RNA, 21 nt, synthetic construct
  source 1..21: mol_type = other RNA
aagtagaggactgcctatttt

SEQ ID NO: 64576 - RNA, 21 nt, synthetic construct
  source 1..21: mol_type = other RNA
aagtagattagcttttacgag

SEQ ID NO: 64577 - RNA, 21 nt, synthetic construct
  source 1..21: mol_type = other RNA
aagtagcagggactacagtca

SEQ ID NO: 64578 - RNA, 21 nt, synthetic construct
  source 1..21: mol_type = other RNA
aagtagctaggaccataggca

SEQ ID NO: 64579 - RNA, 21 nt, synthetic construct
  source 1..21: mol_type = other RNA
aagtagctgggatcacaggcg

SEQ ID NO: 64580 - RNA, 21 nt, synthetic construct
  source 1..21: mol_type = other RNA
aagtaggggtaaatctttgta

SEQ ID NO: 64581 - RNA, 21 nt, synthetic construct
  source 1..21: mol_type = other RNA
aagtaggttgagacttagatt

SEQ ID NO: 64582 - RNA, 21 nt, synthetic construct
  source 1..21: mol_type = other RNA
aagtagtacaaaagtgctgtt

SEQ ID NO: 64583 - RNA, 21 nt, synthetic construct
  source 1..21: mol_type = other RNA
aagtagtggcagccccgcttc

SEQ ID NO: 64584 - RNA, 21 nt, synthetic construct
  source 1..21: mol_type = other RNA
aagtatagaaaggagaccagt

SEQ ID NO: 64585 - RNA, 21 nt, synthetic construct
  source 1..21: mol_type = other RNA
aagtatatatcatagagtacc

SEQ ID NO: 64586 - RNA, 21 nt, synthetic construct
  source 1..21: mol_type = other RNA
aagtatcccagatggggattg

SEQ ID NO: 64587 - RNA, 21 nt, synthetic construct
  source 1..21: mol_type = other RNA
aagtatcgtgagactattatg

SEQ ID NO: 64588 - RNA, 21 nt, synthetic construct
  source 1..21: mol_type = other RNA
aagtatctcagtcataatttg

SEQ ID NO: 64589 - RNA, 21 nt, synthetic construct
  source 1..21: mol_type = other RNA
aagtatctccctgtgcgtgaa

SEQ ID NO: 64590 - RNA, 21 nt, synthetic construct
  source 1..21: mol_type = other RNA
aagtatctcggtcattctgga

SEQ ID NO: 64591 - RNA, 21 nt, synthetic construct
  source 1..21: mol_type = other RNA
aagtatgagaaatgtctggtt

SEQ ID NO: 64592 - RNA, 21 nt, synthetic construct
  source 1..21: mol_type = other RNA
aagtatgagccactagtcagt

SEQ ID NO: 64593 - RNA, 21 nt, synthetic construct
  source 1..21: mol_type = other RNA
aagtatgagtcttccgtctca

SEQ ID NO: 64594 - RNA, 21 nt, synthetic construct
  source 1..21: mol_type = other RNA
aagtatgcagaaaccagttgt

SEQ ID NO: 64595 - RNA, 21 nt, synthetic construct
  source 1..21: mol_type = other RNA
aagtatgcatagcagggtcat

SEQ ID NO: 64596 - RNA, 21 nt, synthetic construct
  source 1..21: mol_type = other RNA
aagtatggttgaagaaagtag

SEQ ID NO: 64597 - RNA, 21 nt, synthetic construct
  source 1..21: mol_type = other RNA
aagtatgtaattacaggggac

SEQ ID NO: 64598 - RNA, 21 nt, synthetic construct
  source 1..21: mol_type = other RNA
aagtattaaaagcacaagcac

SEQ ID NO: 64599 - RNA, 21 nt, synthetic construct
  source 1..21: mol_type = other RNA
aagtattcccaagatcataag

SEQ ID NO: 64600 - RNA, 21 nt, synthetic construct
  source 1..21: mol_type = other RNA
aagtattgatttgaccatggg

SEQ ID NO: 64601 - RNA, 21 nt, synthetic construct
  source 1..21: mol_type = other RNA
aagtattgcattgaatctgta

SEQ ID NO: 64602 - RNA, 21 nt, synthetic construct
  source 1..21: mol_type = other RNA
aagtatttccacgggtaaaaa

SEQ ID NO: 64603 - RNA, 21 nt, synthetic construct
  source 1..21: mol_type = other RNA
aagtatttctcatctgtcact

SEQ ID NO: 64604 - RNA, 21 nt, synthetic construct
  source 1..21: mol_type = other RNA
aagtcaaagcctgtggaggca

SEQ ID NO: 64605 - RNA, 21 nt, synthetic construct
  source 1..21: mol_type = other RNA
aagtcaagatgaatctgcaac

SEQ ID NO: 64606 - RNA, 21 nt, synthetic construct
  source 1..21: mol_type = other RNA
aagtcaatttcagatctctga

SEQ ID NO: 64607 - RNA, 21 nt, synthetic construct
  source 1..21: mol_type = other RNA
aagtcacaaaaagacaagtac

SEQ ID NO: 64608 - RNA, 21 nt, synthetic construct
  source 1..21: mol_type = other RNA
aagtcacattctagtgatggg

SEQ ID NO: 64609 - RNA, 21 nt, synthetic construct
  source 1..21: mol_type = other RNA
aagtcactccatttgtggcat

SEQ ID NO: 64610 - RNA, 21 nt, synthetic construct
  source 1..21: mol_type = other RNA
aagtcactgtggaaaacagtt

SEQ ID NO: 64611 - RNA, 21 nt, synthetic construct
  source 1..21: mol_type = other RNA
aagtcactttttattctgttc

SEQ ID NO: 64612 - RNA, 21 nt, synthetic construct
  source 1..21: mol_type = other RNA
aagtcagaattcactgtgact

SEQ ID NO: 64613 - RNA, 21 nt, synthetic construct
  source 1..21: mol_type = other RNA
aagtcagactaagacactagc

SEQ ID NO: 64614 - RNA, 21 nt, synthetic construct
  source 1..21: mol_type = other RNA
aagtcagagattttcccaaag

SEQ ID NO: 64615 - RNA, 21 nt, synthetic construct
  source 1..21: mol_type = other RNA
aagtcagaggagcagttactc

SEQ ID NO: 64616 - RNA, 21 nt, synthetic construct
  source 1..21: mol_type = other RNA
aagtcagcaactcttggccat

SEQ ID NO: 64617 - RNA, 21 nt, synthetic construct
  source 1..21: mol_type = other RNA
aagtcagcacttctgatatcc

SEQ ID NO: 64618 - RNA, 21 nt, synthetic construct
  source 1..21: mol_type = other RNA
aagtcagcctgggcacacgcc

SEQ ID NO: 64619 - RNA, 21 nt, synthetic construct
  source 1..21: mol_type = other RNA
aagtcagctaattttctaatc

SEQ ID NO: 64620 - RNA, 21 nt, synthetic construct
  source 1..21: mol_type = other RNA
aagtcagctaggcgtagtatc

SEQ ID NO: 64621 - RNA, 21 nt, synthetic construct
  source 1..21: mol_type = other RNA
aagtcagtaaaaaaggaccat

SEQ ID NO: 64622 - RNA, 21 nt, synthetic construct
  source 1..21: mol_type = other RNA
aagtcagttaacagtgctgtg

SEQ ID NO: 64623 - RNA, 21 nt, synthetic construct
  source 1..21: mol_type = other RNA
aagtcagttacagcatttcag

SEQ ID NO: 64624 - RNA, 21 nt, synthetic construct
  source 1..21: mol_type = other RNA
aagtcatcaaaggaaggaatt

SEQ ID NO: 64625 - RNA, 21 nt, synthetic construct
  source 1..21: mol_type = other RNA
aagtcatctggtcctgagctt

SEQ ID NO: 64626 - RNA, 21 nt, synthetic construct
  source 1..21: mol_type = other RNA
aagtcatgacctgctttcttg

SEQ ID NO: 64627 - RNA, 21 nt, synthetic construct
  source 1..21: mol_type = other RNA
aagtcattgaaactcaatgtt

SEQ ID NO: 64628 - RNA, 21 nt, synthetic construct
  source 1..21: mol_type = other RNA
aagtccacagatctttttgtg

SEQ ID NO: 64629 - RNA, 21 nt, synthetic construct
  source 1..21: mol_type = other RNA
aagtccatgaaacttatttcc

SEQ ID NO: 64630 - RNA, 21 nt, synthetic construct
  source 1..21: mol_type = other RNA
aagtcccagttcaaggtgtta

SEQ ID NO: 64631 - RNA, 21 nt, synthetic construct
  source 1..21: mol_type = other RNA
aagtcccatcttccatacgaa

SEQ ID NO: 64632 - RNA, 21 nt, synthetic construct
  source 1..21: mol_type = other RNA
aagtccccacatgactggcca

SEQ ID NO: 64633 - RNA, 21 nt, synthetic construct
  source 1..21: mol_type = other RNA
aagtccccatctccacaaaaa

SEQ ID NO: 64634 - RNA, 21 nt, synthetic construct
  source 1..21: mol_type = other RNA
aagtcccctgtaattacatac

SEQ ID NO: 64635 - RNA, 21 nt, synthetic construct
  source 1..21: mol_type = other RNA
aagtcccggaagctgggctag

SEQ ID NO: 64636 - RNA, 21 nt, synthetic construct
  source 1..21: mol_type = other RNA
aagtccctaacagtctcgtga

SEQ ID NO: 64637 - RNA, 21 nt, synthetic construct
  source 1..21: mol_type = other RNA
aagtccgtgcatgcctctgtt

SEQ ID NO: 64638 - RNA, 21 nt, synthetic construct
  source 1..21: mol_type = other RNA
aagtcctcaatcatgtcaaga

SEQ ID NO: 64639 - RNA, 21 nt, synthetic construct
  source 1..21: mol_type = other RNA
aagtcctgttcttttgtaatc

SEQ ID NO: 64640 - RNA, 21 nt, synthetic construct
  source 1..21: mol_type = other RNA
aagtcctttccagaggttctt

SEQ ID NO: 64641 - RNA, 21 nt, synthetic construct
  source 1..21: mol_type = other RNA
aagtcctttcttggtctgcag

SEQ ID NO: 64642 - RNA, 21 nt, synthetic construct
  source 1..21: mol_type = other RNA
aagtctatgctcttggtttct

SEQ ID NO: 64643 - RNA, 21 nt, synthetic construct
  source 1..21: mol_type = other RNA
aagtctcaacctactttaaat

SEQ ID NO: 64644 - RNA, 21 nt, synthetic construct
  source 1..21: mol_type = other RNA
aagtctcatgcaattccccag

SEQ ID NO: 64645 - RNA, 21 nt, synthetic construct
  source 1..21: mol_type = other RNA
aagtctccctaaccaggcccg

SEQ ID NO: 64646 - RNA, 21 nt, synthetic construct
  source 1..21: mol_type = other RNA
aagtctgaaagcttctgagca

SEQ ID NO: 64647 - RNA, 21 nt, synthetic construct
  source 1..21: mol_type = other RNA
aagtcttccattttagatcaa

SEQ ID NO: 64648 - RNA, 21 nt, synthetic construct
  source 1..21: mol_type = other RNA
aagtcttcttctaagctaaga

SEQ ID NO: 64649 - RNA, 21 nt, synthetic construct
  source 1..21: mol_type = other RNA
aagtcttgctggaagttggcc

SEQ ID NO: 64650 - RNA, 21 nt, synthetic construct
  source 1..21: mol_type = other RNA
aagtctttggcccattttcga

SEQ ID NO: 64651 - RNA, 21 nt, synthetic construct
  source 1..21: mol_type = other RNA
aagtctttgggtaatttatct

SEQ ID NO: 64652 - RNA, 21 nt, synthetic construct
  source 1..21: mol_type = other RNA
aagtctttggtgatcctaagc

SEQ ID NO: 64653 - RNA, 21 nt, synthetic construct
  source 1..21: mol_type = other RNA
aagtcttttcctaccctgagg

SEQ ID NO: 64654 - RNA, 21 nt, synthetic construct
  source 1..21: mol_type = other RNA
aagtcttttcctagactgcca

SEQ ID NO: 64655 - RNA, 21 nt, synthetic construct
  source 1..21: mol_type = other RNA
aagtgaaaactaaggtcaaga

SEQ ID NO: 64656 - RNA, 21 nt, synthetic construct
  source 1..21: mol_type = other RNA
aagtgaaactgctggatcata

SEQ ID NO: 64657 - RNA, 21 nt, synthetic construct
  source 1..21: mol_type = other RNA
aagtgaaaggcaaaggaaaaa

SEQ ID NO: 64658 - RNA, 21 nt, synthetic construct
  source 1..21: mol_type = other RNA
aagtgaaccaaaaaccacatt

SEQ ID NO: 64659 - RNA, 21 nt, synthetic construct
  source 1..21: mol_type = other RNA
aagtgaagcccagagaggcta

SEQ ID NO: 64660 - RNA, 21 nt, synthetic construct
  source 1..21: mol_type = other RNA
aagtgaagcttcaaaccacta

SEQ ID NO: 64661 - RNA, 21 nt, synthetic construct
  source 1..21: mol_type = other RNA
aagtgaagtcaagatgaatct

SEQ ID NO: 64662 - RNA, 21 nt, synthetic construct
  source 1..21: mol_type = other RNA
aagtgaatatagctaagaaac

SEQ ID NO: 64663 - RNA, 21 nt, synthetic construct
  source 1..21: mol_type = other RNA
aagtgaatcactacagcatat

SEQ ID NO: 64664 - RNA, 21 nt, synthetic construct
  source 1..21: mol_type = other RNA
aagtgacagatgagaaatact

SEQ ID NO: 64665 - RNA, 21 nt, synthetic construct
  source 1..21: mol_type = other RNA
aagtgaccctgagtccagagg

SEQ ID NO: 64666 - RNA, 21 nt, synthetic construct
  source 1..21: mol_type = other RNA
aagtgactccaagcacacagt

SEQ ID NO: 64667 - RNA, 21 nt, synthetic construct
  source 1..21: mol_type = other RNA
aagtgacttctggatgtgtat

SEQ ID NO: 64668 - RNA, 21 nt, synthetic construct
  source 1..21: mol_type = other RNA
aagtgagcagaaggaggaaaa

SEQ ID NO: 64669 - RNA, 21 nt, synthetic construct
  source 1..21: mol_type = other RNA
aagtgagtttgacctgtaatt

SEQ ID NO: 64670 - RNA, 21 nt, synthetic construct
  source 1..21: mol_type = other RNA
aagtgataccataaagtcaga

SEQ ID NO: 64671 - RNA, 21 nt, synthetic construct
  source 1..21: mol_type = other RNA
aagtgatgcaactcctgggct

SEQ ID NO: 64672 - RNA, 21 nt, synthetic construct
  source 1..21: mol_type = other RNA
aagtgcacaatgcagtattgt

SEQ ID NO: 64673 - RNA, 21 nt, synthetic construct
  source 1..21: mol_type = other RNA
aagtgcatttcggctctgtgc

SEQ ID NO: 64674 - RNA, 21 nt, synthetic construct
  source 1..21: mol_type = other RNA
aagtgccagccacccttgctg

SEQ ID NO: 64675 - RNA, 21 nt, synthetic construct
  source 1..21: mol_type = other RNA
aagtgcccattaacagatgaa

SEQ ID NO: 64676 - RNA, 21 nt, synthetic construct
  source 1..21: mol_type = other RNA
aagtgccgcgttttttgtcca

SEQ ID NO: 64677 - RNA, 21 nt, synthetic construct
  source 1..21: mol_type = other RNA
aagtgctctaccctttccaaa

SEQ ID NO: 64678 - RNA, 21 nt, synthetic construct
  source 1..21: mol_type = other RNA
aagtgctgcagtatgcataga

SEQ ID NO: 64679 - RNA, 21 nt, synthetic construct
  source 1..21: mol_type = other RNA
aagtgctgggctagggaagca

SEQ ID NO: 64680 - RNA, 21 nt, synthetic construct
  source 1..21: mol_type = other RNA
aagtgctgtgattgcaggtgt

SEQ ID NO: 64681 - RNA, 21 nt, synthetic construct
  source 1..21: mol_type = other RNA
aagtgctgttgaggctgggcc

SEQ ID NO: 64682 - RNA, 21 nt, synthetic construct
  source 1..21: mol_type = other RNA
aagtgcttctagtaacttggt

SEQ ID NO: 64683 - RNA, 21 nt, synthetic construct
  source 1..21: mol_type = other RNA
aagtggaatcattccgtatat

SEQ ID NO: 64684 - RNA, 21 nt, synthetic construct
  source 1..21: mol_type = other RNA
aagtggactatgtaggcacat

SEQ ID NO: 64685 - RNA, 21 nt, synthetic construct
  source 1..21: mol_type = other RNA
aagtggagcctgctctgcaga

SEQ ID NO: 64686 - RNA, 21 nt, synthetic construct
  source 1..21: mol_type = other RNA
aagtggagtgcgagtgtgaac

SEQ ID NO: 64687 - RNA, 21 nt, synthetic construct
  source 1..21: mol_type = other RNA
aagtggcgctgtttgcctgcg

SEQ ID NO: 64688 - RNA, 21 nt, synthetic construct
  source 1..21: mol_type = other RNA
aagtggctagacggaaaaaca

SEQ ID NO: 64689 - RNA, 21 nt, synthetic construct
  source 1..21: mol_type = other RNA
aagtgggaagcaaaggattcg

SEQ ID NO: 64690 - RNA, 21 nt, synthetic construct
  source 1..21: mol_type = other RNA
aagtgggaggaggtcatactg

SEQ ID NO: 64691 - RNA, 21 nt, synthetic construct
  source 1..21: mol_type = other RNA
aagtgggtggatgggtgtagg

SEQ ID NO: 64692 - RNA, 21 nt, synthetic construct
  source 1..21: mol_type = other RNA
aagtggtattctatcatcaag

SEQ ID NO: 64693 - RNA, 21 nt, synthetic construct
  source 1..21: mol_type = other RNA
aagtggtgcttgaactgctgg

SEQ ID NO: 64694 - RNA, 21 nt, synthetic construct
  source 1..21: mol_type = other RNA
aagtgtaaagtttctctctcc

SEQ ID NO: 64695 - RNA, 21 nt, synthetic construct
  source 1..21: mol_type = other RNA
aagtgtaacatacacatcaga

SEQ ID NO: 64696 - RNA, 21 nt, synthetic construct
  source 1..21: mol_type = other RNA
aagtgtacaattcggtggcat

SEQ ID NO: 64697 - RNA, 21 nt, synthetic construct
  source 1..21: mol_type = other RNA
aagtgtatcagatgcttctag

SEQ ID NO: 64698 - RNA, 21 nt, synthetic construct
  source 1..21: mol_type = other RNA
aagtgtgaagattaagcacat

SEQ ID NO: 64699 - RNA, 21 nt, synthetic construct
  source 1..21: mol_type = other RNA
aagtgtgaccacattcccaaa

SEQ ID NO: 64700 - RNA, 21 nt, synthetic construct
  source 1..21: mol_type = other RNA
aagtgtgagcaaaaatacagc

SEQ ID NO: 64701 - RNA, 21 nt, synthetic construct
  source 1..21: mol_type = other RNA
aagtgtgcttgggctcccttc

SEQ ID NO: 64702 - RNA, 21 nt, synthetic construct
  source 1..21: mol_type = other RNA
aagtgtggtggtctcaccctc

SEQ ID NO: 64703 - RNA, 21 nt, synthetic construct
  source 1..21: mol_type = other RNA
aagtgttagaattacaggcat

SEQ ID NO: 64704 - RNA, 21 nt, synthetic construct
  source 1..21: mol_type = other RNA
aagtgttcttaccacaaaaaa

SEQ ID NO: 64705 - RNA, 21 nt, synthetic construct
  source 1..21: mol_type = other RNA
aagtgttgactaccatctctc

SEQ ID NO: 64706 - RNA, 21 nt, synthetic construct
  source 1..21: mol_type = other RNA
aagtgttgagaggctttaagc

SEQ ID NO: 64707 - RNA, 21 nt, synthetic construct
  source 1..21: mol_type = other RNA
aagtgtttaggatataagagt

SEQ ID NO: 64708 - RNA, 21 nt, synthetic construct
  source 1..21: mol_type = other RNA
aagtgtttgaaaagtgtttgt

SEQ ID NO: 64709 - RNA, 21 nt, synthetic construct
  source 1..21: mol_type = other RNA
aagtgtttgtcacatagaagc

SEQ ID NO: 64710 - RNA, 21 nt, synthetic construct
  source 1..21: mol_type = other RNA
aagtgttttgatagttgcaga

SEQ ID NO: 64711 - RNA, 21 nt, synthetic construct
  source 1..21: mol_type = other RNA
aagttaaaacttgtagaggag

SEQ ID NO: 64712 - RNA, 21 nt, synthetic construct
  source 1..21: mol_type = other RNA
aagttaaaagacatctttcct

SEQ ID NO: 64713 - RNA, 21 nt, synthetic construct
  source 1..21: mol_type = other RNA
aagttaaacttttgtgcatca

SEQ ID NO: 64714 - RNA, 21 nt, synthetic construct
  source 1..21: mol_type = other RNA
aagttaactgaaatcgggagt

SEQ ID NO: 64715 - RNA, 21 nt, synthetic construct
  source 1..21: mol_type = other RNA
aagttaagggccatttcattt

SEQ ID NO: 64716 - RNA, 21 nt, synthetic construct
  source 1..21: mol_type = other RNA
aagttaatagcctcctaagtt

SEQ ID NO: 64717 - RNA, 21 nt, synthetic construct
  source 1..21: mol_type = other RNA
aagttaatattgtaggtgtct

SEQ ID NO: 64718 - RNA, 21 nt, synthetic construct
  source 1..21: mol_type = other RNA
aagttacaaacatatgcatgt

SEQ ID NO: 64719 - RNA, 21 nt, synthetic construct
  source 1..21: mol_type = other RNA
aagttacaaggattgaatgga

SEQ ID NO: 64720 - RNA, 21 nt, synthetic construct
  source 1..21: mol_type = other RNA
aagttacaataatatgcctca

SEQ ID NO: 64721 - RNA, 21 nt, synthetic construct
  source 1..21: mol_type = other RNA
aagttacatgcttagccttcc

SEQ ID NO: 64722 - RNA, 21 nt, synthetic construct
  source 1..21: mol_type = other RNA
aagttacggttccctgtagag

SEQ ID NO: 64723 - RNA, 21 nt, synthetic construct
  source 1..21: mol_type = other RNA
aagttactagaagcacttttt

SEQ ID NO: 64724 - RNA, 21 nt, synthetic construct
  source 1..21: mol_type = other RNA
aagttactgattagaaggatt

SEQ ID NO: 64725 - RNA, 21 nt, synthetic construct
  source 1..21: mol_type = other RNA
aagttagaagtatcccagatg

SEQ ID NO: 64726 - RNA, 21 nt, synthetic construct
  source 1..21: mol_type = other RNA
aagttagctggcaaaatggag

SEQ ID NO: 64727 - RNA, 21 nt, synthetic construct
  source 1..21: mol_type = other RNA
aagttagtgaagcagagagag

SEQ ID NO: 64728 - RNA, 21 nt, synthetic construct
  source 1..21: mol_type = other RNA
aagttagtgtctaatgggtac

SEQ ID NO: 64729 - RNA, 21 nt, synthetic construct
  source 1..21: mol_type = other RNA
aagttatgtagctgggatggc

SEQ ID NO: 64730 - RNA, 21 nt, synthetic construct
  source 1..21: mol_type = other RNA
aagttcaaagaaactacctag

SEQ ID NO: 64731 - RNA, 21 nt, synthetic construct
  source 1..21: mol_type = other RNA
aagttcaaatgaggcttttat

SEQ ID NO: 64732 - RNA, 21 nt, synthetic construct
  source 1..21: mol_type = other RNA
aagttcaaggttataatcagc

SEQ ID NO: 64733 - RNA, 21 nt, synthetic construct
  source 1..21: mol_type = other RNA
aagttcagaataccagagatt

SEQ ID NO: 64734 - RNA, 21 nt, synthetic construct
  source 1..21: mol_type = other RNA
aagttcagcatcttcactgac

SEQ ID NO: 64735 - RNA, 21 nt, synthetic construct
  source 1..21: mol_type = other RNA
aagttccaagattttcccaat

SEQ ID NO: 64736 - RNA, 21 nt, synthetic construct
  source 1..21: mol_type = other RNA
aagttccccattgacaatata

SEQ ID NO: 64737 - RNA, 21 nt, synthetic construct
  source 1..21: mol_type = other RNA
aagttccggttctcaggagcc

SEQ ID NO: 64738 - RNA, 21 nt, synthetic construct
  source 1..21: mol_type = other RNA
aagttcctggactgtgatgac

SEQ ID NO: 64739 - RNA, 21 nt, synthetic construct
  source 1..21: mol_type = other RNA
aagttctcaggggtaaagggg

SEQ ID NO: 64740 - RNA, 21 nt, synthetic construct
  source 1..21: mol_type = other RNA
aagttctccaagttattacaa

SEQ ID NO: 64741 - RNA, 21 nt, synthetic construct
  source 1..21: mol_type = other RNA
aagttctcctgtgtgcatgct

SEQ ID NO: 64742 - RNA, 21 nt, synthetic construct
  source 1..21: mol_type = other RNA
aagttcttacctcaaaggaga

SEQ ID NO: 64743 - RNA, 21 nt, synthetic construct
  source 1..21: mol_type = other RNA
aagttgaatttctgtccttgg

SEQ ID NO: 64744 - RNA, 21 nt, synthetic construct
  source 1..21: mol_type = other RNA
aagttgagaaactatccaaca

SEQ ID NO: 64745 - RNA, 21 nt, synthetic construct
  source 1..21: mol_type = other RNA
aagttgagaaagagggaagta

SEQ ID NO: 64746 - RNA, 21 nt, synthetic construct
  source 1..21: mol_type = other RNA
aagttgaggttgaagacctgc

SEQ ID NO: 64747 - RNA, 21 nt, synthetic construct
  source 1..21: mol_type = other RNA
aagttgcaaaaatactacaag

SEQ ID NO: 64748 - RNA, 21 nt, synthetic construct
  source 1..21: mol_type = other RNA
aagttgcagtgagcccagaga

SEQ ID NO: 64749 - RNA, 21 nt, synthetic construct
  source 1..21: mol_type = other RNA
aagttgcatacgtcgtccccc

SEQ ID NO: 64750 - RNA, 21 nt, synthetic construct
  source 1..21: mol_type = other RNA
aagttgctatccagtctctgc

SEQ ID NO: 64751 - RNA, 21 nt, synthetic construct
  source 1..21: mol_type = other RNA
aagttgcttggcacagaatta

SEQ ID NO: 64752 - RNA, 21 nt, synthetic construct
  source 1..21: mol_type = other RNA
aagttgctttttcttcttgtt

SEQ ID NO: 64753 - RNA, 21 nt, synthetic construct
  source 1..21: mol_type = other RNA
aagttggcccaacatgctctt

SEQ ID NO: 64754 - RNA, 21 nt, synthetic construct
  source 1..21: mol_type = other RNA
aagttgggagtctatttctga

SEQ ID NO: 64755 - RNA, 21 nt, synthetic construct
  source 1..21: mol_type = other RNA
aagttgggcttaacatttgaa

SEQ ID NO: 64756 - RNA, 21 nt, synthetic construct
  source 1..21: mol_type = other RNA
aagttgggcttggttggaaaa

SEQ ID NO: 64757 - RNA, 21 nt, synthetic construct
  source 1..21: mol_type = other RNA
aagttggtcctgcatatgttt

SEQ ID NO: 64758 - RNA, 21 nt, synthetic construct
  source 1..21: mol_type = other RNA
aagttgtggtgagccaagatc

SEQ ID NO: 64759 - RNA, 21 nt, synthetic construct
  source 1..21: mol_type = other RNA
aagtttaaccaattatgctga

SEQ ID NO: 64760 - RNA, 21 nt, synthetic construct
  source 1..21: mol_type = other RNA
aagtttatcagtctccaatcc

SEQ ID NO: 64761 - RNA, 21 nt, synthetic construct
  source 1..21: mol_type = other RNA
aagtttcaaactgtggtcact

SEQ ID NO: 64762 - RNA, 21 nt, synthetic construct
  source 1..21: mol_type = other RNA
aagtttcaccctgcgaaggca

SEQ ID NO: 64763 - RNA, 21 nt, synthetic construct
  source 1..21: mol_type = other RNA
aagtttcatggacttcctatt

SEQ ID NO: 64764 - RNA, 21 nt, synthetic construct
  source 1..21: mol_type = other RNA
aagtttccgttttgcaagatg

SEQ ID NO: 64765 - RNA, 21 nt, synthetic construct
  source 1..21: mol_type = other RNA
aagtttcctacatactgcact

SEQ ID NO: 64766 - RNA, 21 nt, synthetic construct
  source 1..21: mol_type = other RNA
aagtttcctagaaaatcatac

SEQ ID NO: 64767 - RNA, 21 nt, synthetic construct
  source 1..21: mol_type = other RNA
aagtttcctgcacatgcacaa

SEQ ID NO: 64768 - RNA, 21 nt, synthetic construct
  source 1..21: mol_type = other RNA
aagtttctagccataatcctt

SEQ ID NO: 64769 - RNA, 21 nt, synthetic construct
  source 1..21: mol_type = other RNA
aagtttctctctccctgccct

SEQ ID NO: 64770 - RNA, 21 nt, synthetic construct
  source 1..21: mol_type = other RNA
aagtttctggaagtttcctgc

SEQ ID NO: 64771 - RNA, 21 nt, synthetic construct
  source 1..21: mol_type = other RNA
aagtttgccaaagattcttgt

SEQ ID NO: 64772 - RNA, 21 nt, synthetic construct
  source 1..21: mol_type = other RNA
aagtttggaaccagcctggcc

SEQ ID NO: 64773 - RNA, 21 nt, synthetic construct
  source 1..21: mol_type = other RNA
aagtttggctcccatgattca

SEQ ID NO: 64774 - RNA, 21 nt, synthetic construct
  source 1..21: mol_type = other RNA
aagtttggttcatttcaggaa

SEQ ID NO: 64775 - RNA, 21 nt, synthetic construct
  source 1..21: mol_type = other RNA
aagttttccaaccactgaatc

SEQ ID NO: 64776 - RNA, 21 nt, synthetic construct
  source 1..21: mol_type = other RNA
aagttttccaggaaaagcaaa

SEQ ID NO: 64777 - RNA, 21 nt, synthetic construct
  source 1..21: mol_type = other RNA
aagttttgcagttggggactc

SEQ ID NO: 64778 - RNA, 21 nt, synthetic construct
  source 1..21: mol_type = other RNA
aagttttgggggaagagagca

SEQ ID NO: 64779 - RNA, 21 nt, synthetic construct
  source 1..21: mol_type = other RNA
aagttttttcctttgcctttc

SEQ ID NO: 64780 - RNA, 21 nt, synthetic construct
  source 1..21: mol_type = other RNA
aataaaaacatatgcaggacc

SEQ ID NO: 64781 - RNA, 21 nt, synthetic construct
  source 1..21: mol_type = other RNA
aataaaaacctttttgggatc

SEQ ID NO: 64782 - RNA, 21 nt, synthetic construct
  source 1..21: mol_type = other RNA
aataaaaagcctctctgatgg

SEQ ID NO: 64783 - RNA, 21 nt, synthetic construct
  source 1..21: mol_type = other RNA
aataaaaagtatcgtgagact

SEQ ID NO: 64784 - RNA, 21 nt, synthetic construct
  source 1..21: mol_type = other RNA
aataaaaagtgacttctggat

SEQ ID NO: 64785 - RNA, 21 nt, synthetic construct
  source 1..21: mol_type = other RNA
aataaaacacaaggacaggtc

SEQ ID NO: 64786 - RNA, 21 nt, synthetic construct
  source 1..21: mol_type = other RNA
aataaaacacatgtcatgggc

SEQ ID NO: 64787 - RNA, 21 nt, synthetic construct
  source 1..21: mol_type = other RNA
aataaaacatggccagtatct

SEQ ID NO: 64788 - RNA, 21 nt, synthetic construct
  source 1..21: mol_type = other RNA
aataaaagcctcatttgaact

SEQ ID NO: 64789 - RNA, 21 nt, synthetic construct
  source 1..21: mol_type = other RNA
aataaaagctggagttatttg

SEQ ID NO: 64790 - RNA, 21 nt, synthetic construct
  source 1..21: mol_type = other RNA
aataaaagcttatgatcttgg

SEQ ID NO: 64791 - RNA, 21 nt, synthetic construct
  source 1..21: mol_type = other RNA
aataaaatagcaggattcttg

SEQ ID NO: 64792 - RNA, 21 nt, synthetic construct
  source 1..21: mol_type = other RNA
aataaaatgtctggccgggca

SEQ ID NO: 64793 - RNA, 21 nt, synthetic construct
  source 1..21: mol_type = other RNA
aataaaatgtttagcggaatg

SEQ ID NO: 64794 - RNA, 21 nt, synthetic construct
  source 1..21: mol_type = other RNA
aataaaattcaccaaacacct

SEQ ID NO: 64795 - RNA, 21 nt, synthetic construct
  source 1..21: mol_type = other RNA
aataaacattttccctccttt

SEQ ID NO: 64796 - RNA, 21 nt, synthetic construct
  source 1..21: mol_type = other RNA
aataaaccaagtttggttcat

SEQ ID NO: 64797 - RNA, 21 nt, synthetic construct
  source 1..21: mol_type = other RNA
aataaaccacgcagtttgttc

SEQ ID NO: 64798 - RNA, 21 nt, synthetic construct
  source 1..21: mol_type = other RNA
aataaacgacaccagaactac

SEQ ID NO: 64799 - RNA, 21 nt, synthetic construct
  source 1..21: mol_type = other RNA
aataaacgcggaatgaagcag

SEQ ID NO: 64800 - RNA, 21 nt, synthetic construct
  source 1..21: mol_type = other RNA
aataaactaacaaagaacagg

SEQ ID NO: 64801 - RNA, 21 nt, synthetic construct
  source 1..21: mol_type = other RNA
aataaagacttcacgatgctt

SEQ ID NO: 64802 - RNA, 21 nt, synthetic construct
  source 1..21: mol_type = other RNA
aataaagcaagtatgagccac

SEQ ID NO: 64803 - RNA, 21 nt, synthetic construct
  source 1..21: mol_type = other RNA
aataaaggcaatgctctcttc

SEQ ID NO: 64804 - RNA, 21 nt, synthetic construct
  source 1..21: mol_type = other RNA
aataaaggctttcgtatggaa

SEQ ID NO: 64805 - RNA, 21 nt, synthetic construct
  source 1..21: mol_type = other RNA
aataaaggtgctaattgtttg

SEQ ID NO: 64806 - RNA, 21 nt, synthetic construct
  source 1..21: mol_type = other RNA
aataaagttccccattgacaa

SEQ ID NO: 64807 - RNA, 21 nt, synthetic construct
  source 1..21: mol_type = other RNA
aataaatcctcacatgtttgg

SEQ ID NO: 64808 - RNA, 21 nt, synthetic construct
  source 1..21: mol_type = other RNA
aataaatctaagtctcaacct

SEQ ID NO: 64809 - RNA, 21 nt, synthetic construct
  source 1..21: mol_type = other RNA
aataaatgcataaacgacagc

SEQ ID NO: 64810 - RNA, 21 nt, synthetic construct
  source 1..21: mol_type = other RNA
aataaatggtagcttgggcta

SEQ ID NO: 64811 - RNA, 21 nt, synthetic construct
  source 1..21: mol_type = other RNA
aataaatggtgcaggccagat

SEQ ID NO: 64812 - RNA, 21 nt, synthetic construct
  source 1..21: mol_type = other RNA
aataacaccatagctgaaggc

SEQ ID NO: 64813 - RNA, 21 nt, synthetic construct
  source 1..21: mol_type = other RNA
aataacacgcagaaccactga

SEQ ID NO: 64814 - RNA, 21 nt, synthetic construct
  source 1..21: mol_type = other RNA
aataacagcctaagcaaatgt

SEQ ID NO: 64815 - RNA, 21 nt, synthetic construct
  source 1..21: mol_type = other RNA
aataaccaatgtcagagatct

SEQ ID NO: 64816 - RNA, 21 nt, synthetic construct
  source 1..21: mol_type = other RNA
aataaccacatgtggcttgtg

SEQ ID NO: 64817 - RNA, 21 nt, synthetic construct
  source 1..21: mol_type = other RNA
aataacccatatctttgctta

SEQ ID NO: 64818 - RNA, 21 nt, synthetic construct
  source 1..21: mol_type = other RNA
aataaccctgttttgtagatt

SEQ ID NO: 64819 - RNA, 21 nt, synthetic construct
  source 1..21: mol_type = other RNA
aataacctcaaagtggaaaca

SEQ ID NO: 64820 - RNA, 21 nt, synthetic construct
  source 1..21: mol_type = other RNA
aataacctcataagaactcct

SEQ ID NO: 64821 - RNA, 21 nt, synthetic construct
  source 1..21: mol_type = other RNA
aataacgggccgggcgctgtg

SEQ ID NO: 64822 - RNA, 21 nt, synthetic construct
  source 1..21: mol_type = other RNA
aataactaaactttgagtagc

SEQ ID NO: 64823 - RNA, 21 nt, synthetic construct
  source 1..21: mol_type = other RNA
aataactacacatcagtgctg

SEQ ID NO: 64824 - RNA, 21 nt, synthetic construct
  source 1..21: mol_type = other RNA
aataactagaaacttcttctg

SEQ ID NO: 64825 - RNA, 21 nt, synthetic construct
  source 1..21: mol_type = other RNA
aataactccagcttttattag

SEQ ID NO: 64826 - RNA, 21 nt, synthetic construct
  source 1..21: mol_type = other RNA
aataactgcctaagtaatgct

SEQ ID NO: 64827 - RNA, 21 nt, synthetic construct
  source 1..21: mol_type = other RNA
aataactgtcctgaattctaa

SEQ ID NO: 64828 - RNA, 21 nt, synthetic construct
  source 1..21: mol_type = other RNA
aataacttccatgagattaca

SEQ ID NO: 64829 - RNA, 21 nt, synthetic construct
  source 1..21: mol_type = other RNA
aataacttggagaacttaaag

SEQ ID NO: 64830 - RNA, 21 nt, synthetic construct
  source 1..21: mol_type = other RNA
aataactttaatcaccaggcg

SEQ ID NO: 64831 - RNA, 21 nt, synthetic construct
  source 1..21: mol_type = other RNA
aataagaaagatctcaaacag

SEQ ID NO: 64832 - RNA, 21 nt, synthetic construct
  source 1..21: mol_type = other RNA
aataagaagattgagtcagta

SEQ ID NO: 64833 - RNA, 21 nt, synthetic construct
  source 1..21: mol_type = other RNA
aataagaaggtttgtagagca

SEQ ID NO: 64834 - RNA, 21 nt, synthetic construct
  source 1..21: mol_type = other RNA
aataagaagtgaaaaatgacc

SEQ ID NO: 64835 - RNA, 21 nt, synthetic construct
  source 1..21: mol_type = other RNA
aataagacaccgctccacgcc

SEQ ID NO: 64836 - RNA, 21 nt, synthetic construct
  source 1..21: mol_type = other RNA
aataagatcatacacctggat

SEQ ID NO: 64837 - RNA, 21 nt, synthetic construct
  source 1..21: mol_type = other RNA
aataagctaatcccaaagtga

SEQ ID NO: 64838 - RNA, 21 nt, synthetic construct
  source 1..21: mol_type = other RNA
aataagcttcgaagcaaaaca

SEQ ID NO: 64839 - RNA, 21 nt, synthetic construct
  source 1..21: mol_type = other RNA
aataaggaaagcacgtttgat

SEQ ID NO: 64840 - RNA, 21 nt, synthetic construct
  source 1..21: mol_type = other RNA
aataagggcattttcaaggta

SEQ ID NO: 64841 - RNA, 21 nt, synthetic construct
  source 1..21: mol_type = other RNA
aataaggtcacattcagaggt

SEQ ID NO: 64842 - RNA, 21 nt, synthetic construct
  source 1..21: mol_type = other RNA
aataaggtctgtaagtcagtt

SEQ ID NO: 64843 - RNA, 21 nt, synthetic construct
  source 1..21: mol_type = other RNA
aataagtgagtttgacctgta

SEQ ID NO: 64844 - RNA, 21 nt, synthetic construct
  source 1..21: mol_type = other RNA
aataagttaactgaaatcggg

SEQ ID NO: 64845 - RNA, 21 nt, synthetic construct
  source 1..21: mol_type = other RNA
aataagtttcatggacttcct

SEQ ID NO: 64846 - RNA, 21 nt, synthetic construct
  source 1..21: mol_type = other RNA
aataataactacacatcagtg

SEQ ID NO: 64847 - RNA, 21 nt, synthetic construct
  source 1..21: mol_type = other RNA
aataatacaaatgatgaaggg

SEQ ID NO: 64848 - RNA, 21 nt, synthetic construct
  source 1..21: mol_type = other RNA
aataatacctaacagccggca

SEQ ID NO: 64849 - RNA, 21 nt, synthetic construct
  source 1..21: mol_type = other RNA
aataatagctatcctaatggg

SEQ ID NO: 64850 - RNA, 21 nt, synthetic construct
  source 1..21: mol_type = other RNA
aataatatgcctcatgcatcc

SEQ ID NO: 64851 - RNA, 21 nt, synthetic construct
  source 1..21: mol_type = other RNA
aataatcattgttaggtgctg

SEQ ID NO: 64852 - RNA, 21 nt, synthetic construct
  source 1..21: mol_type = other RNA
aataatcccgcaccttgattt

SEQ ID NO: 64853 - RNA, 21 nt, synthetic construct
  source 1..21: mol_type = other RNA
aataatgaaagctcccaatgc

SEQ ID NO: 64854 - RNA, 21 nt, synthetic construct
  source 1..21: mol_type = other RNA
aataatgcacatgggcatggg

SEQ ID NO: 64855 - RNA, 21 nt, synthetic construct
  source 1..21: mol_type = other RNA
aataatgttttccgtgtgaca

SEQ ID NO: 64856 - RNA, 21 nt, synthetic construct
  source 1..21: mol_type = other RNA
aataattaagacaatgtggag

SEQ ID NO: 64857 - RNA, 21 nt, synthetic construct
  source 1..21: mol_type = other RNA
aataattctgtgccaagcaac

SEQ ID NO: 64858 - RNA, 21 nt, synthetic construct
  source 1..21: mol_type = other RNA
aataattcttcctgtcttgga

SEQ ID NO: 64859 - RNA, 21 nt, synthetic construct
  source 1..21: mol_type = other RNA
aataattgctgcagtttttcc

SEQ ID NO: 64860 - RNA, 21 nt, synthetic construct
  source 1..21: mol_type = other RNA
aataattgcttttgctgaggg

SEQ ID NO: 64861 - RNA, 21 nt, synthetic construct
  source 1..21: mol_type = other RNA
aataatttccaggtcattaca

SEQ ID NO: 64862 - RNA, 21 nt, synthetic construct
  source 1..21: mol_type = other RNA
aataatttccctcagaatttg

SEQ ID NO: 64863 - RNA, 21 nt, synthetic construct
  source 1..21: mol_type = other RNA
aataatttggatgaacgctaa

SEQ ID NO: 64864 - RNA, 21 nt, synthetic construct
  source 1..21: mol_type = other RNA
aatacaaaggtgttaagccgt

SEQ ID NO: 64865 - RNA, 21 nt, synthetic construct
  source 1..21: mol_type = other RNA
aatacaaatgatgaagggttt

SEQ ID NO: 64866 - RNA, 21 nt, synthetic construct
  source 1..21: mol_type = other RNA
aatacaacagcaccttttttg

SEQ ID NO: 64867 - RNA, 21 nt, synthetic construct
  source 1..21: mol_type = other RNA
aatacaatgtgagccacatac

SEQ ID NO: 64868 - RNA, 21 nt, synthetic construct
  source 1..21: mol_type = other RNA
aatacacatgttgagtcttgt

SEQ ID NO: 64869 - RNA, 21 nt, synthetic construct
  source 1..21: mol_type = other RNA
aatacaccaaactcaaaagga

SEQ ID NO: 64870 - RNA, 21 nt, synthetic construct
  source 1..21: mol_type = other RNA
aatacacgtggctgtcaaaaa

SEQ ID NO: 64871 - RNA, 21 nt, synthetic construct
  source 1..21: mol_type = other RNA
aatacacttttcaggtattga

SEQ ID NO: 64872 - RNA, 21 nt, synthetic construct
  source 1..21: mol_type = other RNA
aatacagaccgatggaacaga

SEQ ID NO: 64873 - RNA, 21 nt, synthetic construct
  source 1..21: mol_type = other RNA
aatacagagcacagactcaag

SEQ ID NO: 64874 - RNA, 21 nt, synthetic construct
  source 1..21: mol_type = other RNA
aatacagctccaaagaacagg

SEQ ID NO: 64875 - RNA, 21 nt, synthetic construct
  source 1..21: mol_type = other RNA
aatacagtaaagccccattgt

SEQ ID NO: 64876 - RNA, 21 nt, synthetic construct
  source 1..21: mol_type = other RNA
aatacagttttgaccaaaaca

SEQ ID NO: 64877 - RNA, 21 nt, synthetic construct
  source 1..21: mol_type = other RNA
aatacatgaggcctctcccct

SEQ ID NO: 64878 - RNA, 21 nt, synthetic construct
  source 1..21: mol_type = other RNA
aatacatgtcatgttcccgga

SEQ ID NO: 64879 - RNA, 21 nt, synthetic construct
  source 1..21: mol_type = other RNA
aataccaaaaaaggtgctgtt

SEQ ID NO: 64880 - RNA, 21 nt, synthetic construct
  source 1..21: mol_type = other RNA
aataccaaattcacgagactg

SEQ ID NO: 64881 - RNA, 21 nt, synthetic construct
  source 1..21: mol_type = other RNA
aataccacctgaaatctgatt

SEQ ID NO: 64882 - RNA, 21 nt, synthetic construct
  source 1..21: mol_type = other RNA
aataccacttagtttgcaata

SEQ ID NO: 64883 - RNA, 21 nt, synthetic construct
  source 1..21: mol_type = other RNA
aataccagagattgggaaaat

SEQ ID NO: 64884 - RNA, 21 nt, synthetic construct
  source 1..21: mol_type = other RNA
aataccagaggttaaagcaac

SEQ ID NO: 64885 - RNA, 21 nt, synthetic construct
  source 1..21: mol_type = other RNA
aatacccacaagaaaaaccta

SEQ ID NO: 64886 - RNA, 21 nt, synthetic construct
  source 1..21: mol_type = other RNA
aatacccctccctacctggca

SEQ ID NO: 64887 - RNA, 21 nt, synthetic construct
  source 1..21: mol_type = other RNA
aatacctaacagccggcatat

SEQ ID NO: 64888 - RNA, 21 nt, synthetic construct
  source 1..21: mol_type = other RNA
aatacctagttttccaatccg

SEQ ID NO: 64889 - RNA, 21 nt, synthetic construct
  source 1..21: mol_type = other RNA
aatacctatttagagggatga

SEQ ID NO: 64890 - RNA, 21 nt, synthetic construct
  source 1..21: mol_type = other RNA
aatacctgcaggttgatacta

SEQ ID NO: 64891 - RNA, 21 nt, synthetic construct
  source 1..21: mol_type = other RNA
aatacgaaagtgctctaccct

SEQ ID NO: 64892 - RNA, 21 nt, synthetic construct
  source 1..21: mol_type = other RNA
aatacggccgggagtggtggc

SEQ ID NO: 64893 - RNA, 21 nt, synthetic construct
  source 1..21: mol_type = other RNA
aatacgtatatgaaaagccca

SEQ ID NO: 64894 - RNA, 21 nt, synthetic construct
  source 1..21: mol_type = other RNA
aatacgtgtatactgggtgtg

SEQ ID NO: 64895 - RNA, 21 nt, synthetic construct
  source 1..21: mol_type = other RNA
aatactaacgatccttactac

SEQ ID NO: 64896 - RNA, 21 nt, synthetic construct
  source 1..21: mol_type = other RNA
aatactacaagagttccccta

SEQ ID NO: 64897 - RNA, 21 nt, synthetic construct
  source 1..21: mol_type = other RNA
aatactactgcaaatatccaa

SEQ ID NO: 64898 - RNA, 21 nt, synthetic construct
  source 1..21: mol_type = other RNA
aatactagcaaactgaatcag

SEQ ID NO: 64899 - RNA, 21 nt, synthetic construct
  source 1..21: mol_type = other RNA
aatactagtaggatgaattac

SEQ ID NO: 64900 - RNA, 21 nt, synthetic construct
  source 1..21: mol_type = other RNA
aatactatgtatgtggctcac

SEQ ID NO: 64901 - RNA, 21 nt, synthetic construct
  source 1..21: mol_type = other RNA
aatactcaagggctttcaata

SEQ ID NO: 64902 - RNA, 21 nt, synthetic construct
  source 1..21: mol_type = other RNA
aatactccaccagcatctttt

SEQ ID NO: 64903 - RNA, 21 nt, synthetic construct
  source 1..21: mol_type = other RNA
aatactcgtgtgtctcataaa

SEQ ID NO: 64904 - RNA, 21 nt, synthetic construct
  source 1..21: mol_type = other RNA
aatactctagtggtgcttaat

SEQ ID NO: 64905 - RNA, 21 nt, synthetic construct
  source 1..21: mol_type = other RNA
aatactgcattgtgcacttaa

SEQ ID NO: 64906 - RNA, 21 nt, synthetic construct
  source 1..21: mol_type = other RNA
aatactgtagaatgtttttcc

SEQ ID NO: 64907 - RNA, 21 nt, synthetic construct
  source 1..21: mol_type = other RNA
aatactgtctcagtcccaaat

SEQ ID NO: 64908 - RNA, 21 nt, synthetic construct
  source 1..21: mol_type = other RNA
aatactgttatgacaagacta

SEQ ID NO: 64909 - RNA, 21 nt, synthetic construct
  source 1..21: mol_type = other RNA
aatacttaagagcatgttggg

SEQ ID NO: 64910 - RNA, 21 nt, synthetic construct
  source 1..21: mol_type = other RNA
aatacttaatagcccaacagg

SEQ ID NO: 64911 - RNA, 21 nt, synthetic construct
  source 1..21: mol_type = other RNA
aatacttgaacattctgtaga

SEQ ID NO: 64912 - RNA, 21 nt, synthetic construct
  source 1..21: mol_type = other RNA
aatacttggacaggggacatg

SEQ ID NO: 64913 - RNA, 21 nt, synthetic construct
  source 1..21: mol_type = other RNA
aatacttggatcttatctgct

SEQ ID NO: 64914 - RNA, 21 nt, synthetic construct
  source 1..21: mol_type = other RNA
aatacttgtgtagcgggaaaa

SEQ ID NO: 64915 - RNA, 21 nt, synthetic construct
  source 1..21: mol_type = other RNA
aatactttagacatgggctaa

SEQ ID NO: 64916 - RNA, 21 nt, synthetic construct
  source 1..21: mol_type = other RNA
aatactttcacactgattttc

SEQ ID NO: 64917 - RNA, 21 nt, synthetic construct
  source 1..21: mol_type = other RNA
aatactttcccatctctagtt

SEQ ID NO: 64918 - RNA, 21 nt, synthetic construct
  source 1..21: mol_type = other RNA
aatagaaaacttgagcagatc

SEQ ID NO: 64919 - RNA, 21 nt, synthetic construct
  source 1..21: mol_type = other RNA
aatagaaaatccttacttcca

SEQ ID NO: 64920 - RNA, 21 nt, synthetic construct
  source 1..21: mol_type = other RNA
aatagaactgtcacaattcac

SEQ ID NO: 64921 - RNA, 21 nt, synthetic construct
  source 1..21: mol_type = other RNA
aatagaagagcagtgtgttct

SEQ ID NO: 64922 - RNA, 21 nt, synthetic construct
  source 1..21: mol_type = other RNA
aatagaagggagaacccagga

SEQ ID NO: 64923 - RNA, 21 nt, synthetic construct
  source 1..21: mol_type = other RNA
aatagacaaagacaagttctt

SEQ ID NO: 64924 - RNA, 21 nt, synthetic construct
  source 1..21: mol_type = other RNA
aatagactcccaacttataat

SEQ ID NO: 64925 - RNA, 21 nt, synthetic construct
  source 1..21: mol_type = other RNA
aatagaggatgggcattccag

SEQ ID NO: 64926 - RNA, 21 nt, synthetic construct
  source 1..21: mol_type = other RNA
aatagaggtctgtctttcagt

SEQ ID NO: 64927 - RNA, 21 nt, synthetic construct
  source 1..21: mol_type = other RNA
aatagagttccatctgttata

SEQ ID NO: 64928 - RNA, 21 nt, synthetic construct
  source 1..21: mol_type = other RNA
aatagataaggttgttcttgg

SEQ ID NO: 64929 - RNA, 21 nt, synthetic construct
  source 1..21: mol_type = other RNA
aatagataggtcatgtacata

SEQ ID NO: 64930 - RNA, 21 nt, synthetic construct
  source 1..21: mol_type = other RNA
aatagatgcctagaaaggaat

SEQ ID NO: 64931 - RNA, 21 nt, synthetic construct
  source 1..21: mol_type = other RNA
aatagcaactgttttttcctc

SEQ ID NO: 64932 - RNA, 21 nt, synthetic construct
  source 1..21: mol_type = other RNA
aatagcagaaacacaggactg

SEQ ID NO: 64933 - RNA, 21 nt, synthetic construct
  source 1..21: mol_type = other RNA
aatagcaggattcttgttaag

SEQ ID NO: 64934 - RNA, 21 nt, synthetic construct
  source 1..21: mol_type = other RNA
aatagcagtgctgaaagctag

SEQ ID NO: 64935 - RNA, 21 nt, synthetic construct
  source 1..21: mol_type = other RNA
aatagcatcttagctcttccc

SEQ ID NO: 64936 - RNA, 21 nt, synthetic construct
  source 1..21: mol_type = other RNA
aatagccagtgcagcaagcag

SEQ ID NO: 64937 - RNA, 21 nt, synthetic construct
  source 1..21: mol_type = other RNA
aatagcccaacagggttttgt

SEQ ID NO: 64938 - RNA, 21 nt, synthetic construct
  source 1..21: mol_type = other RNA
aatagcccagcaggatttttt

SEQ ID NO: 64939 - RNA, 21 nt, synthetic construct
  source 1..21: mol_type = other RNA
aatagcctcctaagttttggg

SEQ ID NO: 64940 - RNA, 21 nt, synthetic construct
  source 1..21: mol_type = other RNA
aatagctagtgatgttgagta

SEQ ID NO: 64941 - RNA, 21 nt, synthetic construct
  source 1..21: mol_type = other RNA
aatagctagtgtcttagtctg

SEQ ID NO: 64942 - RNA, 21 nt, synthetic construct
  source 1..21: mol_type = other RNA
aatagctatcctaatgggcgt

SEQ ID NO: 64943 - RNA, 21 nt, synthetic construct
  source 1..21: mol_type = other RNA
aataggaaagtgacagatgag

SEQ ID NO: 64944 - RNA, 21 nt, synthetic construct
  source 1..21: mol_type = other RNA
aataggaagtccatgaaactt

SEQ ID NO: 64945 - RNA, 21 nt, synthetic construct
  source 1..21: mol_type = other RNA
aataggaagtggctagacgga

SEQ ID NO: 64946 - RNA, 21 nt, synthetic construct
  source 1..21: mol_type = other RNA
aataggaatagtattcaggac

SEQ ID NO: 64947 - RNA, 21 nt, synthetic construct
  source 1..21: mol_type = other RNA
aataggattaagacactacaa

SEQ ID NO: 64948 - RNA, 21 nt, synthetic construct
  source 1..21: mol_type = other RNA
aataggcaaattcatagatca

SEQ ID NO: 64949 - RNA, 21 nt, synthetic construct
  source 1..21: mol_type = other RNA
aataggcagtcctctactttc

SEQ ID NO: 64950 - RNA, 21 nt, synthetic construct
  source 1..21: mol_type = other RNA
aataggcctaggtgtgataac

SEQ ID NO: 64951 - RNA, 21 nt, synthetic construct
  source 1..21: mol_type = other RNA
aatagggacggccttcttttt

SEQ ID NO: 64952 - RNA, 21 nt, synthetic construct
  source 1..21: mol_type = other RNA
aatagggcctcaaatttcatt

SEQ ID NO: 64953 - RNA, 21 nt, synthetic construct
  source 1..21: mol_type = other RNA
aatagggtgctactcaaagtt

SEQ ID NO: 64954 - RNA, 21 nt, synthetic construct
  source 1..21: mol_type = other RNA
aataggtattcatgctgtgaa

SEQ ID NO: 64955 - RNA, 21 nt, synthetic construct
  source 1..21: mol_type = other RNA
aataggtgtgtgttccttcct

SEQ ID NO: 64956 - RNA, 21 nt, synthetic construct
  source 1..21: mol_type = other RNA
aatagtaataaaggcaatgct

SEQ ID NO: 64957 - RNA, 21 nt, synthetic construct
  source 1..21: mol_type = other RNA
aatagtagcttcaatgagggc

SEQ ID NO: 64958 - RNA, 21 nt, synthetic construct
  source 1..21: mol_type = other RNA
aatagtagttgctcagaaaat

SEQ ID NO: 64959 - RNA, 21 nt, synthetic construct
  source 1..21: mol_type = other RNA
aatagtattcaggacagatta

SEQ ID NO: 64960 - RNA, 21 nt, synthetic construct
  source 1..21: mol_type = other RNA
aatagtcaagtaacagttcaa

SEQ ID NO: 64961 - RNA, 21 nt, synthetic construct
  source 1..21: mol_type = other RNA
aatagtctcacgatacttttt

SEQ ID NO: 64962 - RNA, 21 nt, synthetic construct
  source 1..21: mol_type = other RNA
aatagtgaccctttgaagtat

SEQ ID NO: 64963 - RNA, 21 nt, synthetic construct
  source 1..21: mol_type = other RNA
aatagtgggtagaagcagcaa

SEQ ID NO: 64964 - RNA, 21 nt, synthetic construct
  source 1..21: mol_type = other RNA
aatagttcacctctccgggta

SEQ ID NO: 64965 - RNA, 21 nt, synthetic construct
  source 1..21: mol_type = other RNA
aatagttggtcagaaaaatgg

SEQ ID NO: 64966 - RNA, 21 nt, synthetic construct
  source 1..21: mol_type = other RNA
aatataaaaagcctctgtgga

SEQ ID NO: 64967 - RNA, 21 nt, synthetic construct
  source 1..21: mol_type = other RNA
aatataaaaattccgctctgg

SEQ ID NO: 64968 - RNA, 21 nt, synthetic construct
  source 1..21: mol_type = other RNA
aatataaacgtgtgtgtaagc

SEQ ID NO: 64969 - RNA, 21 nt, synthetic construct
  source 1..21: mol_type = other RNA
aatataaactcttccttatcc

SEQ ID NO: 64970 - RNA, 21 nt, synthetic construct
  source 1..21: mol_type = other RNA
aatatacctgtagaaaatagg

SEQ ID NO: 64971 - RNA, 21 nt, synthetic construct
  source 1..21: mol_type = other RNA
aatatactgactagtggctca

SEQ ID NO: 64972 - RNA, 21 nt, synthetic construct
  source 1..21: mol_type = other RNA
aatatactggaaaactagaga

SEQ ID NO: 64973 - RNA, 21 nt, synthetic construct
  source 1..21: mol_type = other RNA
aatatacttgtcaagttctga

SEQ ID NO: 64974 - RNA, 21 nt, synthetic construct
  source 1..21: mol_type = other RNA
aatatagaaggccagagggaa

SEQ ID NO: 64975 - RNA, 21 nt, synthetic construct
  source 1..21: mol_type = other RNA
aatataggagactatcgttat

SEQ ID NO: 64976 - RNA, 21 nt, synthetic construct
  source 1..21: mol_type = other RNA
aatatagtgggaccccgtctc

SEQ ID NO: 64977 - RNA, 21 nt, synthetic construct
  source 1..21: mol_type = other RNA
aatatatacggaatgattcca

SEQ ID NO: 64978 - RNA, 21 nt, synthetic construct
  source 1..21: mol_type = other RNA
aatatatactgaagttctcag

SEQ ID NO: 64979 - RNA, 21 nt, synthetic construct
  source 1..21: mol_type = other RNA
aatatattctaaacctgaggt

SEQ ID NO: 64980 - RNA, 21 nt, synthetic construct
  source 1..21: mol_type = other RNA
aatatcacactgtttgattac

SEQ ID NO: 64981 - RNA, 21 nt, synthetic construct
  source 1..21: mol_type = other RNA
aatatcatttgaatgatgcga

SEQ ID NO: 64982 - RNA, 21 nt, synthetic construct
  source 1..21: mol_type = other RNA
aatatccaagcacaaacctgg

SEQ ID NO: 64983 - RNA, 21 nt, synthetic construct
  source 1..21: mol_type = other RNA
aatatccaatcactggctagt

SEQ ID NO: 64984 - RNA, 21 nt, synthetic construct
  source 1..21: mol_type = other RNA
aatatccctgataatcacaga

SEQ ID NO: 64985 - RNA, 21 nt, synthetic construct
  source 1..21: mol_type = other RNA
aatatccctggggtttcctta

SEQ ID NO: 64986 - RNA, 21 nt, synthetic construct
  source 1..21: mol_type = other RNA
aatatccgaaagaactgaaag

SEQ ID NO: 64987 - RNA, 21 nt, synthetic construct
  source 1..21: mol_type = other RNA
aatatctatcagggctgaaaa

SEQ ID NO: 64988 - RNA, 21 nt, synthetic construct
  source 1..21: mol_type = other RNA
aatatctccctcacagtccac

SEQ ID NO: 64989 - RNA, 21 nt, synthetic construct
  source 1..21: mol_type = other RNA
aatatctggactgaaaagata

SEQ ID NO: 64990 - RNA, 21 nt, synthetic construct
  source 1..21: mol_type = other RNA
aatatctttggggagatacct

SEQ ID NO: 64991 - RNA, 21 nt, synthetic construct
  source 1..21: mol_type = other RNA
aatatgaaccacactgacagg

SEQ ID NO: 64992 - RNA, 21 nt, synthetic construct
  source 1..21: mol_type = other RNA
aatatgaagcattaatgcaac

SEQ ID NO: 64993 - RNA, 21 nt, synthetic construct
  source 1..21: mol_type = other RNA
aatatgactggtgtccttctg

SEQ ID NO: 64994 - RNA, 21 nt, synthetic construct
  source 1..21: mol_type = other RNA
aatatgagttcctgcttcccc

SEQ ID NO: 64995 - RNA, 21 nt, synthetic construct
  source 1..21: mol_type = other RNA
aatatgataccctcaaaagat

SEQ ID NO: 64996 - RNA, 21 nt, synthetic construct
  source 1..21: mol_type = other RNA
aatatgcagtatgtgccattt

SEQ ID NO: 64997 - RNA, 21 nt, synthetic construct
  source 1..21: mol_type = other RNA
aatatgcctcatgcatccaca

SEQ ID NO: 64998 - RNA, 21 nt, synthetic construct
  source 1..21: mol_type = other RNA
aatatgctgtagtgattcact

SEQ ID NO: 64999 - RNA, 21 nt, synthetic construct
  source 1..21: mol_type = other RNA
aatatggtcactgctgatgta

SEQ ID NO: 65000 - RNA, 21 nt, synthetic construct
  source 1..21: mol_type = other RNA
aatatgtaatgacctggaaat

SEQ ID NO: 65001 - RNA, 21 nt, synthetic construct
  source 1..21: mol_type = other RNA
aatatgtccttttgagtttgg

SEQ ID NO: 65002 - RNA, 21 nt, synthetic construct
  source 1..21: mol_type = other RNA
aatatgtgtacaatggggctt

SEQ ID NO: 65003 - RNA, 21 nt, synthetic construct
  source 1..21: mol_type = other RNA
aatattaaccaagaacaacct

SEQ ID NO: 65004 - RNA, 21 nt, synthetic construct
  source 1..21: mol_type = other RNA
aatattaagagtctcatctgt

SEQ ID NO: 65005 - RNA, 21 nt, synthetic construct
  source 1..21: mol_type = other RNA
aatattacagtaaggtttccc

SEQ ID NO: 65006 - RNA, 21 nt, synthetic construct
  source 1..21: mol_type = other RNA
aatattactcagtctcgaaaa

SEQ ID NO: 65007 - RNA, 21 nt, synthetic construct
  source 1..21: mol_type = other RNA
aatattataagttgggagtct

SEQ ID NO: 65008 - RNA, 21 nt, synthetic construct
  source 1..21: mol_type = other RNA
aatattccatttttctgacca

SEQ ID NO: 65009 - RNA, 21 nt, synthetic construct
  source 1..21: mol_type = other RNA
aatattcgttccagcagggta

SEQ ID NO: 65010 - RNA, 21 nt, synthetic construct
  source 1..21: mol_type = other RNA
aatattgaaacgatgcattcc

SEQ ID NO: 65011 - RNA, 21 nt, synthetic construct
  source 1..21: mol_type = other RNA
aatattgaagagggaacattt

SEQ ID NO: 65012 - RNA, 21 nt, synthetic construct
  source 1..21: mol_type = other RNA
aatattgtaggtgtctcattt

SEQ ID NO: 65013 - RNA, 21 nt, synthetic construct
  source 1..21: mol_type = other RNA
aatattgtatatacccttctg

SEQ ID NO: 65014 - RNA, 21 nt, synthetic construct
  source 1..21: mol_type = other RNA
aatatttaacaccatggcagg

SEQ ID NO: 65015 - RNA, 21 nt, synthetic construct
  source 1..21: mol_type = other RNA
aatattttggaagactatgag

SEQ ID NO: 65016 - RNA, 21 nt, synthetic construct
  source 1..21: mol_type = other RNA
aatcaaaaacctcccaacagg

SEQ ID NO: 65017 - RNA, 21 nt, synthetic construct
  source 1..21: mol_type = other RNA
aatcaaaacaataagacaccg

SEQ ID NO: 65018 - RNA, 21 nt, synthetic construct
  source 1..21: mol_type = other RNA
aatcaaacagtgtgatattgg

SEQ ID NO: 65019 - RNA, 21 nt, synthetic construct
  source 1..21: mol_type = other RNA
aatcaaacataccccaaccct

SEQ ID NO: 65020 - RNA, 21 nt, synthetic construct
  source 1..21: mol_type = other RNA
aatcaaaccatcctttccttg

SEQ ID NO: 65021 - RNA, 21 nt, synthetic construct
  source 1..21: mol_type = other RNA
aatcaaagaaagagttgggtt

SEQ ID NO: 65022 - RNA, 21 nt, synthetic construct
  source 1..21: mol_type = other RNA
aatcaaatccagtcttcaggt

SEQ ID NO: 65023 - RNA, 21 nt, synthetic construct
  source 1..21: mol_type = other RNA
aatcaaatggccttctttctt

SEQ ID NO: 65024 - RNA, 21 nt, synthetic construct
  source 1..21: mol_type = other RNA
aatcaaatgggaaattagatg

SEQ ID NO: 65025 - RNA, 21 nt, synthetic construct
  source 1..21: mol_type = other RNA
aatcaaattcacagaactgtc

SEQ ID NO: 65026 - RNA, 21 nt, synthetic construct
  source 1..21: mol_type = other RNA
aatcaacaggtagctgctttt

SEQ ID NO: 65027 - RNA, 21 nt, synthetic construct
  source 1..21: mol_type = other RNA
aatcaacagtgtactagtctc

SEQ ID NO: 65028 - RNA, 21 nt, synthetic construct
  source 1..21: mol_type = other RNA
aatcaacattgcctccatatg

SEQ ID NO: 65029 - RNA, 21 nt, synthetic construct
  source 1..21: mol_type = other RNA
aatcaacccatgaaaattgaa

SEQ ID NO: 65030 - RNA, 21 nt, synthetic construct
  source 1..21: mol_type = other RNA
aatcaaccccatcaacaagtg

SEQ ID NO: 65031 - RNA, 21 nt, synthetic construct
  source 1..21: mol_type = other RNA
aatcaactattccataagatc

SEQ ID NO: 65032 - RNA, 21 nt, synthetic construct
  source 1..21: mol_type = other RNA
aatcaagccgcaaataatcat

SEQ ID NO: 65033 - RNA, 21 nt, synthetic construct
  source 1..21: mol_type = other RNA
aatcaaggtacaatacactaa

SEQ ID NO: 65034 - RNA, 21 nt, synthetic construct
  source 1..21: mol_type = other RNA
aatcaaggtgcgggattattt

SEQ ID NO: 65035 - RNA, 21 nt, synthetic construct
  source 1..21: mol_type = other RNA
aatcaagtatctccctgtgcg

SEQ ID NO: 65036 - RNA, 21 nt, synthetic construct
  source 1..21: mol_type = other RNA
aatcaagtgaaatgatctttg

SEQ ID NO: 65037 - RNA, 21 nt, synthetic construct
  source 1..21: mol_type = other RNA
aatcaataattctgtgccaag

SEQ ID NO: 65038 - RNA, 21 nt, synthetic construct
  source 1..21: mol_type = other RNA
aatcaatccagacagctaata

SEQ ID NO: 65039 - RNA, 21 nt, synthetic construct
  source 1..21: mol_type = other RNA
aatcaatctgtttcctaatct

SEQ ID NO: 65040 - RNA, 21 nt, synthetic construct
  source 1..21: mol_type = other RNA
aatcacacaatcttgagacgg

SEQ ID NO: 65041 - RNA, 21 nt, synthetic construct
  source 1..21: mol_type = other RNA
aatcacagacgcaaaggatgt

SEQ ID NO: 65042 - RNA, 21 nt, synthetic construct
  source 1..21: mol_type = other RNA
aatcacaggaaagatgtcttt

SEQ ID NO: 65043 - RNA, 21 nt, synthetic construct
  source 1..21: mol_type = other RNA
aatcacaggtttaggtttttc

SEQ ID NO: 65044 - RNA, 21 nt, synthetic construct
  source 1..21: mol_type = other RNA
aatcacagtacgcttttatgt

SEQ ID NO: 65045 - RNA, 21 nt, synthetic construct
  source 1..21: mol_type = other RNA
aatcaccaggcgcggtggctc

SEQ ID NO: 65046 - RNA, 21 nt, synthetic construct
  source 1..21: mol_type = other RNA
aatcacctcaaggcagaacac

SEQ ID NO: 65047 - RNA, 21 nt, synthetic construct
  source 1..21: mol_type = other RNA
aatcacctcaagtgatgcaac

SEQ ID NO: 65048 - RNA, 21 nt, synthetic construct
  source 1..21: mol_type = other RNA
aatcacggctgattataacct

SEQ ID NO: 65049 - RNA, 21 nt, synthetic construct
  source 1..21: mol_type = other RNA
aatcactacagcatattagct

SEQ ID NO: 65050 - RNA, 21 nt, synthetic construct
  source 1..21: mol_type = other RNA
aatcactggctagtaggcaac

SEQ ID NO: 65051 - RNA, 21 nt, synthetic construct
  source 1..21: mol_type = other RNA
aatcagaaaaggctgagacct

SEQ ID NO: 65052 - RNA, 21 nt, synthetic construct
  source 1..21: mol_type = other RNA
aatcagaaactgacaggactc

SEQ ID NO: 65053 - RNA, 21 nt, synthetic construct
  source 1..21: mol_type = other RNA
aatcagaacttgacaagtata

SEQ ID NO: 65054 - RNA, 21 nt, synthetic construct
  source 1..21: mol_type = other RNA
aatcagactgtattaccagct

SEQ ID NO: 65055 - RNA, 21 nt, synthetic construct
  source 1..21: mol_type = other RNA
aatcagatatgaaagaggaga

SEQ ID NO: 65056 - RNA, 21 nt, synthetic construct
  source 1..21: mol_type = other RNA
aatcagattaagcatagtttg

SEQ ID NO: 65057 - RNA, 21 nt, synthetic construct
  source 1..21: mol_type = other RNA
aatcagatttcaggtggtatt

SEQ ID NO: 65058 - RNA, 21 nt, synthetic construct
  source 1..21: mol_type = other RNA
aatcagcaccatctaacagaa

SEQ ID NO: 65059 - RNA, 21 nt, synthetic construct
  source 1..21: mol_type = other RNA
aatcagccgtgattgcaccac

SEQ ID NO: 65060 - RNA, 21 nt, synthetic construct
  source 1..21: mol_type = other RNA
aatcaggaagtatgagtcttc

SEQ ID NO: 65061 - RNA, 21 nt, synthetic construct
  source 1..21: mol_type = other RNA
aatcaggatgtctttgggaag

SEQ ID NO: 65062 - RNA, 21 nt, synthetic construct
  source 1..21: mol_type = other RNA
aatcagggccttcccaaagac

SEQ ID NO: 65063 - RNA, 21 nt, synthetic construct
  source 1..21: mol_type = other RNA
aatcagggcctttaatcacct

SEQ ID NO: 65064 - RNA, 21 nt, synthetic construct
  source 1..21: mol_type = other RNA
aatcaggtctctttgaaagga

SEQ ID NO: 65065 - RNA, 21 nt, synthetic construct
  source 1..21: mol_type = other RNA
aatcaggttgggcttatcaga

SEQ ID NO: 65066 - RNA, 21 nt, synthetic construct
  source 1..21: mol_type = other RNA
aatcagtctgtaagcacctgt

SEQ ID NO: 65067 - RNA, 21 nt, synthetic construct
  source 1..21: mol_type = other RNA
aatcagtggccagtgaccagt

SEQ ID NO: 65068 - RNA, 21 nt, synthetic construct
  source 1..21: mol_type = other RNA
aatcatacacgagtgtgtttc

SEQ ID NO: 65069 - RNA, 21 nt, synthetic construct
  source 1..21: mol_type = other RNA
aatcatagctcactagagctt

SEQ ID NO: 65070 - RNA, 21 nt, synthetic construct
  source 1..21: mol_type = other RNA
aatcatcacagtatgcacaaa

SEQ ID NO: 65071 - RNA, 21 nt, synthetic construct
  source 1..21: mol_type = other RNA
aatcatccggggagcttttga

SEQ ID NO: 65072 - RNA, 21 nt, synthetic construct
  source 1..21: mol_type = other RNA
aatcatctaggcatataaact

SEQ ID NO: 65073 - RNA, 21 nt, synthetic construct
  source 1..21: mol_type = other RNA
aatcatgaaagtggagaatta

SEQ ID NO: 65074 - RNA, 21 nt, synthetic construct
  source 1..21: mol_type = other RNA
aatcatgatgtttggctcctt

SEQ ID NO: 65075 - RNA, 21 nt, synthetic construct
  source 1..21: mol_type = other RNA
aatcatgcagtacttgtcttt

SEQ ID NO: 65076 - RNA, 21 nt, synthetic construct
  source 1..21: mol_type = other RNA
aatcatgggagccaaacttga

SEQ ID NO: 65077 - RNA, 21 nt, synthetic construct
  source 1..21: mol_type = other RNA
aatcatgtcaagaatgaagtc

SEQ ID NO: 65078 - RNA, 21 nt, synthetic construct
  source 1..21: mol_type = other RNA
aatcattcaggacactggagg

SEQ ID NO: 65079 - RNA, 21 nt, synthetic construct
  source 1..21: mol_type = other RNA
aatcattcatctaaacgtttg

SEQ ID NO: 65080 - RNA, 21 nt, synthetic construct
  source 1..21: mol_type = other RNA
aatcattcttctaataggaag

SEQ ID NO: 65081 - RNA, 21 nt, synthetic construct
  source 1..21: mol_type = other RNA
aatcattgtagctatatccca

SEQ ID NO: 65082 - RNA, 21 nt, synthetic construct
  source 1..21: mol_type = other RNA
aatcattgttaggtgctggct

SEQ ID NO: 65083 - RNA, 21 nt, synthetic construct
  source 1..21: mol_type = other RNA
aatcattgttcagggaaggct

SEQ ID NO: 65084 - RNA, 21 nt, synthetic construct
  source 1..21: mol_type = other RNA
aatcatttcactcttttaagg

SEQ ID NO: 65085 - RNA, 21 nt, synthetic construct
  source 1..21: mol_type = other RNA
aatcattttggcaaattgtca

SEQ ID NO: 65086 - RNA, 21 nt, synthetic construct
  source 1..21: mol_type = other RNA
aatccaaaagcctcaaaattt

SEQ ID NO: 65087 - RNA, 21 nt, synthetic construct
  source 1..21: mol_type = other RNA
aatccaaaatcctctgtagat

SEQ ID NO: 65088 - RNA, 21 nt, synthetic construct
  source 1..21: mol_type = other RNA
aatccaaattcacagcatgaa

SEQ ID NO: 65089 - RNA, 21 nt, synthetic construct
  source 1..21: mol_type = other RNA
aatccaacgaccggacgtggt

SEQ ID NO: 65090 - RNA, 21 nt, synthetic construct
  source 1..21: mol_type = other RNA
aatccaactgcagtctgtcct

SEQ ID NO: 65091 - RNA, 21 nt, synthetic construct
  source 1..21: mol_type = other RNA
aatccaagaagacatgataaa

SEQ ID NO: 65092 - RNA, 21 nt, synthetic construct
  source 1..21: mol_type = other RNA
aatccaaggacagaaattcaa

SEQ ID NO: 65093 - RNA, 21 nt, synthetic construct
  source 1..21: mol_type = other RNA
aatccaagtttctagccataa

SEQ ID NO: 65094 - RNA, 21 nt, synthetic construct
  source 1..21: mol_type = other RNA
aatccagacagctaatatgct

SEQ ID NO: 65095 - RNA, 21 nt, synthetic construct
  source 1..21: mol_type = other RNA
aatccagataaattatagctc

SEQ ID NO: 65096 - RNA, 21 nt, synthetic construct
  source 1..21: mol_type = other RNA
aatccagatggacaaattacc

SEQ ID NO: 65097 - RNA, 21 nt, synthetic construct
  source 1..21: mol_type = other RNA
aatccaggatcttactgtaag

SEQ ID NO: 65098 - RNA, 21 nt, synthetic construct
  source 1..21: mol_type = other RNA
aatccaggatggcatgaaatg

SEQ ID NO: 65099 - RNA, 21 nt, synthetic construct
  source 1..21: mol_type = other RNA
aatccagtcttcaggtctctc

SEQ ID NO: 65100 - RNA, 21 nt, synthetic construct
  source 1..21: mol_type = other RNA
aatccattgggtacataccga

SEQ ID NO: 65101 - RNA, 21 nt, synthetic construct
  source 1..21: mol_type = other RNA
aatcccaaagtgagcagaagg

SEQ ID NO: 65102 - RNA, 21 nt, synthetic construct
  source 1..21: mol_type = other RNA
aatcccacttgatccaggtgt

SEQ ID NO: 65103 - RNA, 21 nt, synthetic construct
  source 1..21: mol_type = other RNA
aatcccatttgtaacatgtta

SEQ ID NO: 65104 - RNA, 21 nt, synthetic construct
  source 1..21: mol_type = other RNA
aatccccaaataacatgcata

SEQ ID NO: 65105 - RNA, 21 nt, synthetic construct
  source 1..21: mol_type = other RNA
aatccccatctgggatacttc

SEQ ID NO: 65106 - RNA, 21 nt, synthetic construct
  source 1..21: mol_type = other RNA
aatcccctttagtgttctgtg

SEQ ID NO: 65107 - RNA, 21 nt, synthetic construct
  source 1..21: mol_type = other RNA
aatcccgcaccttgattttga

SEQ ID NO: 65108 - RNA, 21 nt, synthetic construct
  source 1..21: mol_type = other RNA
aatccctgatcaagttgcttg

SEQ ID NO: 65109 - RNA, 21 nt, synthetic construct
  source 1..21: mol_type = other RNA
aatcccttccccacctttcct

SEQ ID NO: 65110 - RNA, 21 nt, synthetic construct
  source 1..21: mol_type = other RNA
aatccctttcgctaatctcaa

SEQ ID NO: 65111 - RNA, 21 nt, synthetic construct
  source 1..21: mol_type = other RNA
aatccgagacaagttctcctg

SEQ ID NO: 65112 - RNA, 21 nt, synthetic construct
  source 1..21: mol_type = other RNA
aatccggctttatgagacaca

SEQ ID NO: 65113 - RNA, 21 nt, synthetic construct
  source 1..21: mol_type = other RNA
aatccgggaacatgacatgta

SEQ ID NO: 65114 - RNA, 21 nt, synthetic construct
  source 1..21: mol_type = other RNA
aatcctagccccaaatacctc

SEQ ID NO: 65115 - RNA, 21 nt, synthetic construct
  source 1..21: mol_type = other RNA
aatcctattttgttattaggg

SEQ ID NO: 65116 - RNA, 21 nt, synthetic construct
  source 1..21: mol_type = other RNA
aatcctcacaacaggcctgag

SEQ ID NO: 65117 - RNA, 21 nt, synthetic construct
  source 1..21: mol_type = other RNA
aatcctcacatgtttggtcaa

SEQ ID NO: 65118 - RNA, 21 nt, synthetic construct
  source 1..21: mol_type = other RNA
aatcctcagccccctccctac

SEQ ID NO: 65119 - RNA, 21 nt, synthetic construct
  source 1..21: mol_type = other RNA
aatcctctgtagataaacgtt

SEQ ID NO: 65120 - RNA, 21 nt, synthetic construct
  source 1..21: mol_type = other RNA
aatcctgctgggctattgttt

SEQ ID NO: 65121 - RNA, 21 nt, synthetic construct
  source 1..21: mol_type = other RNA
aatcctgtttctctacatctg

SEQ ID NO: 65122 - RNA, 21 nt, synthetic construct
  source 1..21: mol_type = other RNA
aatccttacttccagctcacg

SEQ ID NO: 65123 - RNA, 21 nt, synthetic construct
  source 1..21: mol_type = other RNA
aatccttcagtcagttctctg

SEQ ID NO: 65124 - RNA, 21 nt, synthetic construct
  source 1..21: mol_type = other RNA
aatccttccgcctcagcctcc

SEQ ID NO: 65125 - RNA, 21 nt, synthetic construct
  source 1..21: mol_type = other RNA
aatccttccttcatgtcccct

SEQ ID NO: 65126 - RNA, 21 nt, synthetic construct
  source 1..21: mol_type = other RNA
aatccttctaatcagtaactt

SEQ ID NO: 65127 - RNA, 21 nt, synthetic construct
  source 1..21: mol_type = other RNA
aatccttctcatagtcttcca

SEQ ID NO: 65128 - RNA, 21 nt, synthetic construct
  source 1..21: mol_type = other RNA
aatccttgtggtcttaagaga

SEQ ID NO: 65129 - RNA, 21 nt, synthetic construct
  source 1..21: mol_type = other RNA
aatcctttgcacacaccaaat

SEQ ID NO: 65130 - RNA, 21 nt, synthetic construct
  source 1..21: mol_type = other RNA
aatcctttgcttcccacttcg

SEQ ID NO: 65131 - RNA, 21 nt, synthetic construct
  source 1..21: mol_type = other RNA
aatcctttgtgcaggtctggg

SEQ ID NO: 65132 - RNA, 21 nt, synthetic construct
  source 1..21: mol_type = other RNA
aatccttttcccaggagctag

SEQ ID NO: 65133 - RNA, 21 nt, synthetic construct
  source 1..21: mol_type = other RNA
aatcgaatcctcacaacaggc

SEQ ID NO: 65134 - RNA, 21 nt, synthetic construct
  source 1..21: mol_type = other RNA
aatcgcaatccaaaatcctct

SEQ ID NO: 65135 - RNA, 21 nt, synthetic construct
  source 1..21: mol_type = other RNA
aatcgcagggccattctgcta

SEQ ID NO: 65136 - RNA, 21 nt, synthetic construct
  source 1..21: mol_type = other RNA
aatcggaacaggctcaatacc

SEQ ID NO: 65137 - RNA, 21 nt, synthetic construct
  source 1..21: mol_type = other RNA
aatcggaactcctgtatgccg

SEQ ID NO: 65138 - RNA, 21 nt, synthetic construct
  source 1..21: mol_type = other RNA
aatcgggagtaacagacctct

SEQ ID NO: 65139 - RNA, 21 nt, synthetic construct
  source 1..21: mol_type = other RNA
aatcgtcctcttcgggtgtca

SEQ ID NO: 65140 - RNA, 21 nt, synthetic construct
  source 1..21: mol_type = other RNA
aatcgtgatagtcttccaatt

SEQ ID NO: 65141 - RNA, 21 nt, synthetic construct
  source 1..21: mol_type = other RNA
aatctaaagccaatcttccca

SEQ ID NO: 65142 - RNA, 21 nt, synthetic construct
  source 1..21: mol_type = other RNA
aatctaacatgttacaaatgg

SEQ ID NO: 65143 - RNA, 21 nt, synthetic construct
  source 1..21: mol_type = other RNA
aatctaaccctcaatccccat

SEQ ID NO: 65144 - RNA, 21 nt, synthetic construct
  source 1..21: mol_type = other RNA
aatctaaccctcctcctctac

SEQ ID NO: 65145 - RNA, 21 nt, synthetic construct
  source 1..21: mol_type = other RNA
aatctaaggattatggctaga

SEQ ID NO: 65146 - RNA, 21 nt, synthetic construct
  source 1..21: mol_type = other RNA
aatctaagtctcaacctactt

SEQ ID NO: 65147 - RNA, 21 nt, synthetic construct
  source 1..21: mol_type = other RNA
aatctaataaaaagcctctct

SEQ ID NO: 65148 - RNA, 21 nt, synthetic construct
  source 1..21: mol_type = other RNA
aatctaattcgaaaatgggcc

SEQ ID NO: 65149 - RNA, 21 nt, synthetic construct
  source 1..21: mol_type = other RNA
aatctacaaaacagggttatt

SEQ ID NO: 65150 - RNA, 21 nt, synthetic construct
  source 1..21: mol_type = other RNA
aatctacagattcaatgcaat

SEQ ID NO: 65151 - RNA, 21 nt, synthetic construct
  source 1..21: mol_type = other RNA
aatctacaggtcggaaggaat

SEQ ID NO: 65152 - RNA, 21 nt, synthetic construct
  source 1..21: mol_type = other RNA
aatctaccaaacattgaaggc

SEQ ID NO: 65153 - RNA, 21 nt, synthetic construct
  source 1..21: mol_type = other RNA
aatctactcttttgtttttgg

SEQ ID NO: 65154 - RNA, 21 nt, synthetic construct
  source 1..21: mol_type = other RNA
aatctactttctaatcctttg

SEQ ID NO: 65155 - RNA, 21 nt, synthetic construct
  source 1..21: mol_type = other RNA
aatctaggaaacactgctcag

SEQ ID NO: 65156 - RNA, 21 nt, synthetic construct
  source 1..21: mol_type = other RNA
aatctaggaggtctaagagat

SEQ ID NO: 65157 - RNA, 21 nt, synthetic construct
  source 1..21: mol_type = other RNA
aatctaggcatataataagca

SEQ ID NO: 65158 - RNA, 21 nt, synthetic construct
  source 1..21: mol_type = other RNA
aatctaggttatctgttttct

SEQ ID NO: 65159 - RNA, 21 nt, synthetic construct
  source 1..21: mol_type = other RNA
aatctcaatcagggccttccc

SEQ ID NO: 65160 - RNA, 21 nt, synthetic construct
  source 1..21: mol_type = other RNA
aatctcacacctgggtataca

SEQ ID NO: 65161 - RNA, 21 nt, synthetic construct
  source 1..21: mol_type = other RNA
aatctcagctcattacagtct

SEQ ID NO: 65162 - RNA, 21 nt, synthetic construct
  source 1..21: mol_type = other RNA
aatctcatccacaatgagaca

SEQ ID NO: 65163 - RNA, 21 nt, synthetic construct
  source 1..21: mol_type = other RNA
aatctcctgagtagcagggac

SEQ ID NO: 65164 - RNA, 21 nt, synthetic construct
  source 1..21: mol_type = other RNA
aatctcctgatccacctgcct

SEQ ID NO: 65165 - RNA, 21 nt, synthetic construct
  source 1..21: mol_type = other RNA
aatctctacagggaaccgtaa

SEQ ID NO: 65166 - RNA, 21 nt, synthetic construct
  source 1..21: mol_type = other RNA
aatctctagaacttatgcatc

SEQ ID NO: 65167 - RNA, 21 nt, synthetic construct
  source 1..21: mol_type = other RNA
aatctctaggcttaaaattct

SEQ ID NO: 65168 - RNA, 21 nt, synthetic construct
  source 1..21: mol_type = other RNA
aatctctctatccaccactcc

SEQ ID NO: 65169 - RNA, 21 nt, synthetic construct
  source 1..21: mol_type = other RNA
aatctctcttgaccttagttt

SEQ ID NO: 65170 - RNA, 21 nt, synthetic construct
  source 1..21: mol_type = other RNA
aatctctgacttcattcttga

SEQ ID NO: 65171 - RNA, 21 nt, synthetic construct
  source 1..21: mol_type = other RNA
aatctctggggttagggccta

SEQ ID NO: 65172 - RNA, 21 nt, synthetic construct
  source 1..21: mol_type = other RNA
aatctctggtattctgaactt

SEQ ID NO: 65173 - RNA, 21 nt, synthetic construct
  source 1..21: mol_type = other RNA
aatctcttacacctgtttaaa

SEQ ID NO: 65174 - RNA, 21 nt, synthetic construct
  source 1..21: mol_type = other RNA
aatctgaaacgaccttgctca

SEQ ID NO: 65175 - RNA, 21 nt, synthetic construct
  source 1..21: mol_type = other RNA
aatctgacaatttgccaaaat

SEQ ID NO: 65176 - RNA, 21 nt, synthetic construct
  source 1..21: mol_type = other RNA
aatctgacctaagcttgggta

SEQ ID NO: 65177 - RNA, 21 nt, synthetic construct
  source 1..21: mol_type = other RNA
aatctgagtaaagggtaagaa

SEQ ID NO: 65178 - RNA, 21 nt, synthetic construct
  source 1..21: mol_type = other RNA
aatctgatgtgtatgttacac

SEQ ID NO: 65179 - RNA, 21 nt, synthetic construct
  source 1..21: mol_type = other RNA
aatctgattcagtggttggaa

SEQ ID NO: 65180 - RNA, 21 nt, synthetic construct
  source 1..21: mol_type = other RNA
aatctgatttgtttagtagct

SEQ ID NO: 65181 - RNA, 21 nt, synthetic construct
  source 1..21: mol_type = other RNA
aatctgattttaatctgtcct

SEQ ID NO: 65182 - RNA, 21 nt, synthetic construct
  source 1..21: mol_type = other RNA
aatctgatttttagtgactgg

SEQ ID NO: 65183 - RNA, 21 nt, synthetic construct
  source 1..21: mol_type = other RNA
aatctgcaactatcaaaacac

SEQ ID NO: 65184 - RNA, 21 nt, synthetic construct
  source 1..21: mol_type = other RNA
aatctgcatccaaaagggaaa

SEQ ID NO: 65185 - RNA, 21 nt, synthetic construct
  source 1..21: mol_type = other RNA
aatctggaatgcatcgtttca

SEQ ID NO: 65186 - RNA, 21 nt, synthetic construct
  source 1..21: mol_type = other RNA
aatctggctgcagggcttctg

SEQ ID NO: 65187 - RNA, 21 nt, synthetic construct
  source 1..21: mol_type = other RNA
aatctgtagattgttttaggt

SEQ ID NO: 65188 - RNA, 21 nt, synthetic construct
  source 1..21: mol_type = other RNA
aatctgtatatgaaaagcttc

SEQ ID NO: 65189 - RNA, 21 nt, synthetic construct
  source 1..21: mol_type = other RNA
aatctgtatgagaagactgga

SEQ ID NO: 65190 - RNA, 21 nt, synthetic construct
  source 1..21: mol_type = other RNA
aatctgtcagcagttcagcct

SEQ ID NO: 65191 - RNA, 21 nt, synthetic construct
  source 1..21: mol_type = other RNA
aatctgtcctgaatactattc

SEQ ID NO: 65192 - RNA, 21 nt, synthetic construct
  source 1..21: mol_type = other RNA
aatctgttcctgggttctccc

SEQ ID NO: 65193 - RNA, 21 nt, synthetic construct
  source 1..21: mol_type = other RNA
aatctgtttcctaatctaaca

SEQ ID NO: 65194 - RNA, 21 nt, synthetic construct
  source 1..21: mol_type = other RNA
aatcttaaaataccagaggtt

SEQ ID NO: 65195 - RNA, 21 nt, synthetic construct
  source 1..21: mol_type = other RNA
aatcttacccccatcacactg

SEQ ID NO: 65196 - RNA, 21 nt, synthetic construct
  source 1..21: mol_type = other RNA
aatcttaccctgttgaccagg

SEQ ID NO: 65197 - RNA, 21 nt, synthetic construct
  source 1..21: mol_type = other RNA
aatcttactggtgttaggcaa

SEQ ID NO: 65198 - RNA, 21 nt, synthetic construct
  source 1..21: mol_type = other RNA
aatcttattccccagggaaac

SEQ ID NO: 65199 - RNA, 21 nt, synthetic construct
  source 1..21: mol_type = other RNA
aatcttcaaaatctgatgtgt

SEQ ID NO: 65200 - RNA, 21 nt, synthetic construct
  source 1..21: mol_type = other RNA
aatcttcacacttagttcaag

SEQ ID NO: 65201 - RNA, 21 nt, synthetic construct
  source 1..21: mol_type = other RNA
aatcttccagaaggagaaaac

SEQ ID NO: 65202 - RNA, 21 nt, synthetic construct
  source 1..21: mol_type = other RNA
aatcttcccaatcctttgtgc

SEQ ID NO: 65203 - RNA, 21 nt, synthetic construct
  source 1..21: mol_type = other RNA
aatcttgaaaggggccaggtg

SEQ ID NO: 65204 - RNA, 21 nt, synthetic construct
  source 1..21: mol_type = other RNA
aatcttgaagatggcaaacag

SEQ ID NO: 65205 - RNA, 21 nt, synthetic construct
  source 1..21: mol_type = other RNA
aatcttgagacggaagactca

SEQ ID NO: 65206 - RNA, 21 nt, synthetic construct
  source 1..21: mol_type = other RNA
aatcttgcaaaacaatagccc

SEQ ID NO: 65207 - RNA, 21 nt, synthetic construct
  source 1..21: mol_type = other RNA
aatcttgctaaacatgtatac

SEQ ID NO: 65208 - RNA, 21 nt, synthetic construct
  source 1..21: mol_type = other RNA
aatcttggaaatgatacctca

SEQ ID NO: 65209 - RNA, 21 nt, synthetic construct
  source 1..21: mol_type = other RNA
aatctttagtgttgcttggtg

SEQ ID NO: 65210 - RNA, 21 nt, synthetic construct
  source 1..21: mol_type = other RNA
aatctttctgaactcaaaagt

SEQ ID NO: 65211 - RNA, 21 nt, synthetic construct
  source 1..21: mol_type = other RNA
aatctttggcaaacttagaat

SEQ ID NO: 65212 - RNA, 21 nt, synthetic construct
  source 1..21: mol_type = other RNA
aatctttggtgaaggttcatg

SEQ ID NO: 65213 - RNA, 21 nt, synthetic construct
  source 1..21: mol_type = other RNA
aatctttggtgctgataaatg

SEQ ID NO: 65214 - RNA, 21 nt, synthetic construct
  source 1..21: mol_type = other RNA
aatgaaaaattcactcctcat

SEQ ID NO: 65215 - RNA, 21 nt, synthetic construct
  source 1..21: mol_type = other RNA
aatgaaaacacaacataccaa

SEQ ID NO: 65216 - RNA, 21 nt, synthetic construct
  source 1..21: mol_type = other RNA
aatgaaaatgttccctcttca

SEQ ID NO: 65217 - RNA, 21 nt, synthetic construct
  source 1..21: mol_type = other RNA
aatgaaaattagctggatgtg

SEQ ID NO: 65218 - RNA, 21 nt, synthetic construct
  source 1..21: mol_type = other RNA
aatgaaacacttgtgtaacta

SEQ ID NO: 65219 - RNA, 21 nt, synthetic construct
  source 1..21: mol_type = other RNA
aatgaaagctcccaatgcttg

SEQ ID NO: 65220 - RNA, 21 nt, synthetic construct
  source 1..21: mol_type = other RNA
aatgaaaggcgtcggggctgc

SEQ ID NO: 65221 - RNA, 21 nt, synthetic construct
  source 1..21: mol_type = other RNA
aatgaaagtcagctaattttc

SEQ ID NO: 65222 - RNA, 21 nt, synthetic construct
  source 1..21: mol_type = other RNA
aatgaaatggcccttaacttc

SEQ ID NO: 65223 - RNA, 21 nt, synthetic construct
  source 1..21: mol_type = other RNA
aatgaaatttgaggccctatt

SEQ ID NO: 65224 - RNA, 21 nt, synthetic construct
  source 1..21: mol_type = other RNA
aatgaacaggttcttcatcag

SEQ ID NO: 65225 - RNA, 21 nt, synthetic construct
  source 1..21: mol_type = other RNA
aatgaaccaaacttggtttat

SEQ ID NO: 65226 - RNA, 21 nt, synthetic construct
  source 1..21: mol_type = other RNA
aatgaacctgctttctactag

SEQ ID NO: 65227 - RNA, 21 nt, synthetic construct
  source 1..21: mol_type = other RNA
aatgaactcccagaactcgaa

SEQ ID NO: 65228 - RNA, 21 nt, synthetic construct
  source 1..21: mol_type = other RNA
aatgaactcctatagttaagt

SEQ ID NO: 65229 - RNA, 21 nt, synthetic construct
  source 1..21: mol_type = other RNA
aatgaagaaaatccaagaaga

SEQ ID NO: 65230 - RNA, 21 nt, synthetic construct
  source 1..21: mol_type = other RNA
aatgaagatggcctccctcac

SEQ ID NO: 65231 - RNA, 21 nt, synthetic construct
  source 1..21: mol_type = other RNA
aatgaagcaggccttcgaggc

SEQ ID NO: 65232 - RNA, 21 nt, synthetic construct
  source 1..21: mol_type = other RNA
aatgaaggaaaaaacgggtta

SEQ ID NO: 65233 - RNA, 21 nt, synthetic construct
  source 1..21: mol_type = other RNA
aatgaagtattgatttgacca

SEQ ID NO: 65234 - RNA, 21 nt, synthetic construct
  source 1..21: mol_type = other RNA
aatgaagtcagagattttccc

SEQ ID NO: 65235 - RNA, 21 nt, synthetic construct
  source 1..21: mol_type = other RNA
aatgaatattcgttccagcag

SEQ ID NO: 65236 - RNA, 21 nt, synthetic construct
  source 1..21: mol_type = other RNA
aatgaattagcaatgcgaatc

SEQ ID NO: 65237 - RNA, 21 nt, synthetic construct
  source 1..21: mol_type = other RNA
aatgacaagtaaatgcaatgc

SEQ ID NO: 65238 - RNA, 21 nt, synthetic construct
  source 1..21: mol_type = other RNA
aatgacacaacttactactaa

SEQ ID NO: 65239 - RNA, 21 nt, synthetic construct
  source 1..21: mol_type = other RNA
aatgacaccaaaactacaggc

SEQ ID NO: 65240 - RNA, 21 nt, synthetic construct
  source 1..21: mol_type = other RNA
aatgaccgagatacttaagtt

SEQ ID NO: 65241 - RNA, 21 nt, synthetic construct
  source 1..21: mol_type = other RNA
aatgacctaaaatcttattcc

SEQ ID NO: 65242 - RNA, 21 nt, synthetic construct
  source 1..21: mol_type = other RNA
aatgacctggaaattattcaa

SEQ ID NO: 65243 - RNA, 21 nt, synthetic construct
  source 1..21: mol_type = other RNA
aatgactgttgcctctgtgct

SEQ ID NO: 65244 - RNA, 21 nt, synthetic construct
  source 1..21: mol_type = other RNA
aatgagaaacatacatgttca

SEQ ID NO: 65245 - RNA, 21 nt, synthetic construct
  source 1..21: mol_type = other RNA
aatgagaaacctaagaaaggt

SEQ ID NO: 65246 - RNA, 21 nt, synthetic construct
  source 1..21: mol_type = other RNA
aatgagaatttcagaaagaga

SEQ ID NO: 65247 - RNA, 21 nt, synthetic construct
  source 1..21: mol_type = other RNA
aatgagacacctacaatatta

SEQ ID NO: 65248 - RNA, 21 nt, synthetic construct
  source 1..21: mol_type = other RNA
aatgagacatttgagggtgct

SEQ ID NO: 65249 - RNA, 21 nt, synthetic construct
  source 1..21: mol_type = other RNA
aatgagaccaaatgcataaaa

SEQ ID NO: 65250 - RNA, 21 nt, synthetic construct
  source 1..21: mol_type = other RNA
aatgagaccccatctctacca

SEQ ID NO: 65251 - RNA, 21 nt, synthetic construct
  source 1..21: mol_type = other RNA
aatgagataaactagattacc

SEQ ID NO: 65252 - RNA, 21 nt, synthetic construct
  source 1..21: mol_type = other RNA
aatgagatagaccagatgcgt

SEQ ID NO: 65253 - RNA, 21 nt, synthetic construct
  source 1..21: mol_type = other RNA
aatgagcaaggtcgtttcaga

SEQ ID NO: 65254 - RNA, 21 nt, synthetic construct
  source 1..21: mol_type = other RNA
aatgagccaggcatggtggtg

SEQ ID NO: 65255 - RNA, 21 nt, synthetic construct
  source 1..21: mol_type = other RNA
aatgaggagtgaatttttcat

SEQ ID NO: 65256 - RNA, 21 nt, synthetic construct
  source 1..21: mol_type = other RNA
aatgaggcttttattggtaat

SEQ ID NO: 65257 - RNA, 21 nt, synthetic construct
  source 1..21: mol_type = other RNA
aatgagggcagagataactgg

SEQ ID NO: 65258 - RNA, 21 nt, synthetic construct
  source 1..21: mol_type = other RNA
aatgagggtaaaatagtcaag

SEQ ID NO: 65259 - RNA, 21 nt, synthetic construct
  source 1..21: mol_type = other RNA
aatgaggtatcatttccaaga

SEQ ID NO: 65260 - RNA, 21 nt, synthetic construct
  source 1..21: mol_type = other RNA
aatgaggttgcttttacttgg

SEQ ID NO: 65261 - RNA, 21 nt, synthetic construct
  source 1..21: mol_type = other RNA
aatgagtaacatgtggaacat

SEQ ID NO: 65262 - RNA, 21 nt, synthetic construct
  source 1..21: mol_type = other RNA
aatgagtagtacttctgagtg

SEQ ID NO: 65263 - RNA, 21 nt, synthetic construct
  source 1..21: mol_type = other RNA
aatgagtccagctttctaatt

SEQ ID NO: 65264 - RNA, 21 nt, synthetic construct
  source 1..21: mol_type = other RNA
aatgagtctgacatactgtca

SEQ ID NO: 65265 - RNA, 21 nt, synthetic construct
  source 1..21: mol_type = other RNA
aatgagtgagccacagctaca

SEQ ID NO: 65266 - RNA, 21 nt, synthetic construct
  source 1..21: mol_type = other RNA
aatgagtgtatgcagggaaat

SEQ ID NO: 65267 - RNA, 21 nt, synthetic construct
  source 1..21: mol_type = other RNA
aatgagttccagtcctttgtg

SEQ ID NO: 65268 - RNA, 21 nt, synthetic construct
  source 1..21: mol_type = other RNA
aatgatagactggattaagga

SEQ ID NO: 65269 - RNA, 21 nt, synthetic construct
  source 1..21: mol_type = other RNA
aatgatagcattatcccagat

SEQ ID NO: 65270 - RNA, 21 nt, synthetic construct
  source 1..21: mol_type = other RNA
aatgataggtcactgcagtct

SEQ ID NO: 65271 - RNA, 21 nt, synthetic construct
  source 1..21: mol_type = other RNA
aatgatctttcaaggggcctt

SEQ ID NO: 65272 - RNA, 21 nt, synthetic construct
  source 1..21: mol_type = other RNA
aatgatctttgaataaagggt

SEQ ID NO: 65273 - RNA, 21 nt, synthetic construct
  source 1..21: mol_type = other RNA
aatgatgaagggttttctgta

SEQ ID NO: 65274 - RNA, 21 nt, synthetic construct
  source 1..21: mol_type = other RNA
aatgatgactatgaaaagcct

SEQ ID NO: 65275 - RNA, 21 nt, synthetic construct
  source 1..21: mol_type = other RNA
aatgatgagctactgcatgct

SEQ ID NO: 65276 - RNA, 21 nt, synthetic construct
  source 1..21: mol_type = other RNA
aatgatgccatcacattttga

SEQ ID NO: 65277 - RNA, 21 nt, synthetic construct
  source 1..21: mol_type = other RNA
aatgatggcaacaatcaacag

SEQ ID NO: 65278 - RNA, 21 nt, synthetic construct
  source 1..21: mol_type = other RNA
aatgattatttgcggcttgat

SEQ ID NO: 65279 - RNA, 21 nt, synthetic construct
  source 1..21: mol_type = other RNA
aatgattccacttatatgaag

SEQ ID NO: 65280 - RNA, 21 nt, synthetic construct
  source 1..21: mol_type = other RNA
aatgatttcaagtaacactca

SEQ ID NO: 65281 - RNA, 21 nt, synthetic construct
  source 1..21: mol_type = other RNA
aatgatttccctgcatacact

SEQ ID NO: 65282 - RNA, 21 nt, synthetic construct
  source 1..21: mol_type = other RNA
aatgattttcacagggcaggg

SEQ ID NO: 65283 - RNA, 21 nt, synthetic construct
  source 1..21: mol_type = other RNA
aatgcaaagtttcctacatac

SEQ ID NO: 65284 - RNA, 21 nt, synthetic construct
  source 1..21: mol_type = other RNA
aatgcaacctgctttcctcat

SEQ ID NO: 65285 - RNA, 21 nt, synthetic construct
  source 1..21: mol_type = other RNA
aatgcaagagttaaaactcac

SEQ ID NO: 65286 - RNA, 21 nt, synthetic construct
  source 1..21: mol_type = other RNA
aatgcaatacttaatagccca

SEQ ID NO: 65287 - RNA, 21 nt, synthetic construct
  source 1..21: mol_type = other RNA
aatgcaatgcaggcgcctgga

SEQ ID NO: 65288 - RNA, 21 nt, synthetic construct
  source 1..21: mol_type = other RNA
aatgcaatgcgtgtgaaacca

SEQ ID NO: 65289 - RNA, 21 nt, synthetic construct
  source 1..21: mol_type = other RNA
aatgcacatgggcatgggtcc

SEQ ID NO: 65290 - RNA, 21 nt, synthetic construct
  source 1..21: mol_type = other RNA
aatgcaccaacacctgcagtg

SEQ ID NO: 65291 - RNA, 21 nt, synthetic construct
  source 1..21: mol_type = other RNA
aatgcacgtgaagctacagac

SEQ ID NO: 65292 - RNA, 21 nt, synthetic construct
  source 1..21: mol_type = other RNA
aatgcacttagcgctgatgtg

SEQ ID NO: 65293 - RNA, 21 nt, synthetic construct
  source 1..21: mol_type = other RNA
aatgcagaaaataaaccaagt

SEQ ID NO: 65294 - RNA, 21 nt, synthetic construct
  source 1..21: mol_type = other RNA
aatgcaggcgcctggacagga

SEQ ID NO: 65295 - RNA, 21 nt, synthetic construct
  source 1..21: mol_type = other RNA
aatgcagtagtaaagcaaatg

SEQ ID NO: 65296 - RNA, 21 nt, synthetic construct
  source 1..21: mol_type = other RNA
aatgcagtattgttaactgta

SEQ ID NO: 65297 - RNA, 21 nt, synthetic construct
  source 1..21: mol_type = other RNA
aatgcagtggcttcctaactg

SEQ ID NO: 65298 - RNA, 21 nt, synthetic construct
  source 1..21: mol_type = other RNA
aatgcataaacgacagcagga

SEQ ID NO: 65299 - RNA, 21 nt, synthetic construct
  source 1..21: mol_type = other RNA
aatgcatatatctgtctggga

SEQ ID NO: 65300 - RNA, 21 nt, synthetic construct
  source 1..21: mol_type = other RNA
aatgcatccctcctctggccc

SEQ ID NO: 65301 - RNA, 21 nt, synthetic construct
  source 1..21: mol_type = other RNA
aatgcatgggaggtaatacta

SEQ ID NO: 65302 - RNA, 21 nt, synthetic construct
  source 1..21: mol_type = other RNA
aatgccaatttgggatatagc

SEQ ID NO: 65303 - RNA, 21 nt, synthetic construct
  source 1..21: mol_type = other RNA
aatgccacataaatcacagga

SEQ ID NO: 65304 - RNA, 21 nt, synthetic construct
  source 1..21: mol_type = other RNA
aatgccagggcgctcctctcc

SEQ ID NO: 65305 - RNA, 21 nt, synthetic construct
  source 1..21: mol_type = other RNA
aatgccatagagctttaaagt

SEQ ID NO: 65306 - RNA, 21 nt, synthetic construct
  source 1..21: mol_type = other RNA
aatgcccaatcaaatccagtc

SEQ ID NO: 65307 - RNA, 21 nt, synthetic construct
  source 1..21: mol_type = other RNA
aatgcccatcctctatttttg

SEQ ID NO: 65308 - RNA, 21 nt, synthetic construct
  source 1..21: mol_type = other RNA
aatgcccattaaaaccatgaa

SEQ ID NO: 65309 - RNA, 21 nt, synthetic construct
  source 1..21: mol_type = other RNA
aatgccccatgtgttggcact

SEQ ID NO: 65310 - RNA, 21 nt, synthetic construct
  source 1..21: mol_type = other RNA
aatgcccctgtagcagacact

SEQ ID NO: 65311 - RNA, 21 nt, synthetic construct
  source 1..21: mol_type = other RNA
aatgcccctttgagcagagtc

SEQ ID NO: 65312 - RNA, 21 nt, synthetic construct
  source 1..21: mol_type = other RNA
aatgcccttatttaatgtgct

SEQ ID NO: 65313 - RNA, 21 nt, synthetic construct
  source 1..21: mol_type = other RNA
aatgcctataaaatgctggaa

SEQ ID NO: 65314 - RNA, 21 nt, synthetic construct
  source 1..21: mol_type = other RNA
aatgcctcaaattagtcatag

SEQ ID NO: 65315 - RNA, 21 nt, synthetic construct
  source 1..21: mol_type = other RNA
aatgcctgccgcagagcaagc

SEQ ID NO: 65316 - RNA, 21 nt, synthetic construct
  source 1..21: mol_type = other RNA
aatgcgaatcatctaggcata

SEQ ID NO: 65317 - RNA, 21 nt, synthetic construct
  source 1..21: mol_type = other RNA
aatgcgatgatcaaaaccagg

SEQ ID NO: 65318 - RNA, 21 nt, synthetic construct
  source 1..21: mol_type = other RNA
aatgcgcgtccgcgacccggc

SEQ ID NO: 65319 - RNA, 21 nt, synthetic construct
  source 1..21: mol_type = other RNA
aatgcgtgtgaaaccaagcaa

SEQ ID NO: 65320 - RNA, 21 nt, synthetic construct
  source 1..21: mol_type = other RNA
aatgcgtttgttagatctggg

SEQ ID NO: 65321 - RNA, 21 nt, synthetic construct
  source 1..21: mol_type = other RNA
aatgctatcattttaaaggga

SEQ ID NO: 65322 - RNA, 21 nt, synthetic construct
  source 1..21: mol_type = other RNA
aatgctatccagaagagaatg

SEQ ID NO: 65323 - RNA, 21 nt, synthetic construct
  source 1..21: mol_type = other RNA
aatgctcacatttagtttcat

SEQ ID NO: 65324 - RNA, 21 nt, synthetic construct
  source 1..21: mol_type = other RNA
aatgctcagtgggttcaatta

SEQ ID NO: 65325 - RNA, 21 nt, synthetic construct
  source 1..21: mol_type = other RNA
aatgctcataattaaagagag

SEQ ID NO: 65326 - RNA, 21 nt, synthetic construct
  source 1..21: mol_type = other RNA
aatgctctcttcccccaaaac

SEQ ID NO: 65327 - RNA, 21 nt, synthetic construct
  source 1..21: mol_type = other RNA
aatgctgctatgaaaattggc

SEQ ID NO: 65328 - RNA, 21 nt, synthetic construct
  source 1..21: mol_type = other RNA
aatgctggaaattttcaaggg

SEQ ID NO: 65329 - RNA, 21 nt, synthetic construct
  source 1..21: mol_type = other RNA
aatgctggccagtgagttcaa

SEQ ID NO: 65330 - RNA, 21 nt, synthetic construct
  source 1..21: mol_type = other RNA
aatgctggcttcatgggtgga

SEQ ID NO: 65331 - RNA, 21 nt, synthetic construct
  source 1..21: mol_type = other RNA
aatgctgtaactgacttcaag

SEQ ID NO: 65332 - RNA, 21 nt, synthetic construct
  source 1..21: mol_type = other RNA
aatgctgttctctgtgtggtt

SEQ ID NO: 65333 - RNA, 21 nt, synthetic construct
  source 1..21: mol_type = other RNA
aatgcttaacaagaatcctgc

SEQ ID NO: 65334 - RNA, 21 nt, synthetic construct
  source 1..21: mol_type = other RNA
aatgcttatgtcttgtggctg

SEQ ID NO: 65335 - RNA, 21 nt, synthetic construct
  source 1..21: mol_type = other RNA
aatgcttcatattttgtggga

SEQ ID NO: 65336 - RNA, 21 nt, synthetic construct
  source 1..21: mol_type = other RNA
aatgcttgaagagcgcttcta

SEQ ID NO: 65337 - RNA, 21 nt, synthetic construct
  source 1..21: mol_type = other RNA
aatgctttttctgcatctttt

SEQ ID NO: 65338 - RNA, 21 nt, synthetic construct
  source 1..21: mol_type = other RNA
aatggaaaattcaaacatgac

SEQ ID NO: 65339 - RNA, 21 nt, synthetic construct
  source 1..21: mol_type = other RNA
aatggaaaattcttggtcttt

SEQ ID NO: 65340 - RNA, 21 nt, synthetic construct
  source 1..21: mol_type = other RNA
aatggaaacttgccatcttgc

SEQ ID NO: 65341 - RNA, 21 nt, synthetic construct
  source 1..21: mol_type = other RNA
aatggaaagaaatagaactgt

SEQ ID NO: 65342 - RNA, 21 nt, synthetic construct
  source 1..21: mol_type = other RNA
aatggaaccactgtaggcccc

SEQ ID NO: 65343 - RNA, 21 nt, synthetic construct
  source 1..21: mol_type = other RNA
aatggaagactttatggtaat

SEQ ID NO: 65344 - RNA, 21 nt, synthetic construct
  source 1..21: mol_type = other RNA
aatggaagtgctgggctaggg

SEQ ID NO: 65345 - RNA, 21 nt, synthetic construct
  source 1..21: mol_type = other RNA
aatggaatagaagggagaacc

SEQ ID NO: 65346 - RNA, 21 nt, synthetic construct
  source 1..21: mol_type = other RNA
aatggaatattactcagtctc

SEQ ID NO: 65347 - RNA, 21 nt, synthetic construct
  source 1..21: mol_type = other RNA
aatggaattctgatgcacaag

SEQ ID NO: 65348 - RNA, 21 nt, synthetic construct
  source 1..21: mol_type = other RNA
aatggacagcacattaaataa

SEQ ID NO: 65349 - RNA, 21 nt, synthetic construct
  source 1..21: mol_type = other RNA
aatggacagcggggatggttg

SEQ ID NO: 65350 - RNA, 21 nt, synthetic construct
  source 1..21: mol_type = other RNA
aatggagacatctgagacatc

SEQ ID NO: 65351 - RNA, 21 nt, synthetic construct
  source 1..21: mol_type = other RNA
aatggagacccatactcagcc

SEQ ID NO: 65352 - RNA, 21 nt, synthetic construct
  source 1..21: mol_type = other RNA
aatggagggccagaggaggga

SEQ ID NO: 65353 - RNA, 21 nt, synthetic construct
  source 1..21: mol_type = other RNA
aatggagtactatgcagcaac

SEQ ID NO: 65354 - RNA, 21 nt, synthetic construct
  source 1..21: mol_type = other RNA
aatggagtgacttaagcaaca

SEQ ID NO: 65355 - RNA, 21 nt, synthetic construct
  source 1..21: mol_type = other RNA
aatggatcaaagacctaagct

SEQ ID NO: 65356 - RNA, 21 nt, synthetic construct
  source 1..21: mol_type = other RNA
aatggatcaaggcacagtctg

SEQ ID NO: 65357 - RNA, 21 nt, synthetic construct
  source 1..21: mol_type = other RNA
aatggatgtttttagagagat

SEQ ID NO: 65358 - RNA, 21 nt, synthetic construct
  source 1..21: mol_type = other RNA
aatggcaaggctaacagccaa

SEQ ID NO: 65359 - RNA, 21 nt, synthetic construct
  source 1..21: mol_type = other RNA
aatggcacatactgcatattg

SEQ ID NO: 65360 - RNA, 21 nt, synthetic construct
  source 1..21: mol_type = other RNA
aatggcatgaacccaccagga

SEQ ID NO: 65361 - RNA, 21 nt, synthetic construct
  source 1..21: mol_type = other RNA
aatggccaagagttgctgact

SEQ ID NO: 65362 - RNA, 21 nt, synthetic construct
  source 1..21: mol_type = other RNA
aatggccctgcgattggttgg

SEQ ID NO: 65363 - RNA, 21 nt, synthetic construct
  source 1..21: mol_type = other RNA
aatggcccttaacttcacctc

SEQ ID NO: 65364 - RNA, 21 nt, synthetic construct
  source 1..21: mol_type = other RNA
aatggccttctttctttcaaa

SEQ ID NO: 65365 - RNA, 21 nt, synthetic construct
  source 1..21: mol_type = other RNA
aatggcggctttgtggagtgg

SEQ ID NO: 65366 - RNA, 21 nt, synthetic construct
  source 1..21: mol_type = other RNA
aatggctggaatggtgaagaa

SEQ ID NO: 65367 - RNA, 21 nt, synthetic construct
  source 1..21: mol_type = other RNA
aatggctttttacgatgaaat

SEQ ID NO: 65368 - RNA, 21 nt, synthetic construct
  source 1..21: mol_type = other RNA
aatgggaaagacaggtagaca

SEQ ID NO: 65369 - RNA, 21 nt, synthetic construct
  source 1..21: mol_type = other RNA
aatgggaaattagatgatgtt

SEQ ID NO: 65370 - RNA, 21 nt, synthetic construct
  source 1..21: mol_type = other RNA
aatgggagcatgcacacagga

SEQ ID NO: 65371 - RNA, 21 nt, synthetic construct
  source 1..21: mol_type = other RNA
aatgggcacttgggatgtttc

SEQ ID NO: 65372 - RNA, 21 nt, synthetic construct
  source 1..21: mol_type = other RNA
aatgggcattagaagttaaat

SEQ ID NO: 65373 - RNA, 21 nt, synthetic construct
  source 1..21: mol_type = other RNA
aatgggccaaagacttcaacg

SEQ ID NO: 65374 - RNA, 21 nt, synthetic construct
  source 1..21: mol_type = other RNA
aatgggcgtggagcggtgtct

SEQ ID NO: 65375 - RNA, 21 nt, synthetic construct
  source 1..21: mol_type = other RNA
aatggggaaatagatgcctag

SEQ ID NO: 65376 - RNA, 21 nt, synthetic construct
  source 1..21: mol_type = other RNA
aatggggagctagagggtaag

SEQ ID NO: 65377 - RNA, 21 nt, synthetic construct
  source 1..21: mol_type = other RNA
aatggggatatccaaagataa

SEQ ID NO: 65378 - RNA, 21 nt, synthetic construct
  source 1..21: mol_type = other RNA
aatggggatgcaacaaatgtt

SEQ ID NO: 65379 - RNA, 21 nt, synthetic construct
  source 1..21: mol_type = other RNA
aatggggcaatctcagctcat

SEQ ID NO: 65380 - RNA, 21 nt, synthetic construct
  source 1..21: mol_type = other RNA
aatggggctttactgtattag

SEQ ID NO: 65381 - RNA, 21 nt, synthetic construct
  source 1..21: mol_type = other RNA
aatggggtaattttggggcca

SEQ ID NO: 65382 - RNA, 21 nt, synthetic construct
  source 1..21: mol_type = other RNA
aatgggtacagggtttctgtt

SEQ ID NO: 65383 - RNA, 21 nt, synthetic construct
  source 1..21: mol_type = other RNA
aatgggttggaggagaaggcc

SEQ ID NO: 65384 - RNA, 21 nt, synthetic construct
  source 1..21: mol_type = other RNA
aatgggtttaaaagagtgcac

SEQ ID NO: 65385 - RNA, 21 nt, synthetic construct
  source 1..21: mol_type = other RNA
aatggtaacagccaaataaaa

SEQ ID NO: 65386 - RNA, 21 nt, synthetic construct
  source 1..21: mol_type = other RNA
aatggtactgcctccacaggc

SEQ ID NO: 65387 - RNA, 21 nt, synthetic construct
  source 1..21: mol_type = other RNA
aatggtagcttgggctaaggt

SEQ ID NO: 65388 - RNA, 21 nt, synthetic construct
  source 1..21: mol_type = other RNA
aatggtcaacatgaaaagata

SEQ ID NO: 65389 - RNA, 21 nt, synthetic construct
  source 1..21: mol_type = other RNA
aatggtcaatttcatcgtaaa

SEQ ID NO: 65390 - RNA, 21 nt, synthetic construct
  source 1..21: mol_type = other RNA
aatggtcagagttgtatctgt

SEQ ID NO: 65391 - RNA, 21 nt, synthetic construct
  source 1..21: mol_type = other RNA
aatggtccttgctgaagaata

SEQ ID NO: 65392 - RNA, 21 nt, synthetic construct
  source 1..21: mol_type = other RNA
aatggtgaagaatgtgaaaaa

SEQ ID NO: 65393 - RNA, 21 nt, synthetic construct
  source 1..21: mol_type = other RNA
aatggtgcagccactatagaa

SEQ ID NO: 65394 - RNA, 21 nt, synthetic construct
  source 1..21: mol_type = other RNA
aatggtgcaggccagatatcc

SEQ ID NO: 65395 - RNA, 21 nt, synthetic construct
  source 1..21: mol_type = other RNA
aatggtgggatctctgggctc

SEQ ID NO: 65396 - RNA, 21 nt, synthetic construct
  source 1..21: mol_type = other RNA
aatggtgtgaagttgggctta

SEQ ID NO: 65397 - RNA, 21 nt, synthetic construct
  source 1..21: mol_type = other RNA
aatggttaagactgctgttta

SEQ ID NO: 65398 - RNA, 21 nt, synthetic construct
  source 1..21: mol_type = other RNA
aatggttagactgcacataaa

SEQ ID NO: 65399 - RNA, 21 nt, synthetic construct
  source 1..21: mol_type = other RNA
aatggttggccgaggccagtc

SEQ ID NO: 65400 - RNA, 21 nt, synthetic construct
  source 1..21: mol_type = other RNA
aatggtttaacacatacaaac

SEQ ID NO: 65401 - RNA, 21 nt, synthetic construct
  source 1..21: mol_type = other RNA
aatggtttaggctgtctccaa

SEQ ID NO: 65402 - RNA, 21 nt, synthetic construct
  source 1..21: mol_type = other RNA
aatggtttcataaaatgatgg

SEQ ID NO: 65403 - RNA, 21 nt, synthetic construct
  source 1..21: mol_type = other RNA
aatggtttctccttctgcagg

SEQ ID NO: 65404 - RNA, 21 nt, synthetic construct
  source 1..21: mol_type = other RNA
aatggttttatggtaactcct

SEQ ID NO: 65405 - RNA, 21 nt, synthetic construct
  source 1..21: mol_type = other RNA
aatgtaaaaatatagaaggcc

SEQ ID NO: 65406 - RNA, 21 nt, synthetic construct
  source 1..21: mol_type = other RNA
aatgtaaaacatcaaagtccc

SEQ ID NO: 65407 - RNA, 21 nt, synthetic construct
  source 1..21: mol_type = other RNA
aatgtaaacagcatactgtgg

SEQ ID NO: 65408 - RNA, 21 nt, synthetic construct
  source 1..21: mol_type = other RNA
aatgtaaattcctaactcaag

SEQ ID NO: 65409 - RNA, 21 nt, synthetic construct
  source 1..21: mol_type = other RNA
aatgtaaattctgccacattc

SEQ ID NO: 65410 - RNA, 21 nt, synthetic construct
  source 1..21: mol_type = other RNA
aatgtaacacagttctagttc

SEQ ID NO: 65411 - RNA, 21 nt, synthetic construct
  source 1..21: mol_type = other RNA
aatgtaaggtgcacgctgtga

SEQ ID NO: 65412 - RNA, 21 nt, synthetic construct
  source 1..21: mol_type = other RNA
aatgtacaacattcatccctc

SEQ ID NO: 65413 - RNA, 21 nt, synthetic construct
  source 1..21: mol_type = other RNA
aatgtagatcaagtatttcct

SEQ ID NO: 65414 - RNA, 21 nt, synthetic construct
  source 1..21: mol_type = other RNA
aatgtagatcctgaggaagct

SEQ ID NO: 65415 - RNA, 21 nt, synthetic construct
  source 1..21: mol_type = other RNA
aatgtagggaatagacaaaga

SEQ ID NO: 65416 - RNA, 21 nt, synthetic construct
  source 1..21: mol_type = other RNA
aatgtaggtgtctgatgtgtg

SEQ ID NO: 65417 - RNA, 21 nt, synthetic construct
  source 1..21: mol_type = other RNA
aatgtcaagctgtttgagctg

SEQ ID NO: 65418 - RNA, 21 nt, synthetic construct
  source 1..21: mol_type = other RNA
aatgtcaattttcccccaatt

SEQ ID NO: 65419 - RNA, 21 nt, synthetic construct
  source 1..21: mol_type = other RNA
aatgtcagagatctgaaattg

SEQ ID NO: 65420 - RNA, 21 nt, synthetic construct
  source 1..21: mol_type = other RNA
aatgtcatcttctctctctgc

SEQ ID NO: 65421 - RNA, 21 nt, synthetic construct
  source 1..21: mol_type = other RNA
aatgtccagaggaggaagaga

SEQ ID NO: 65422 - RNA, 21 nt, synthetic construct
  source 1..21: mol_type = other RNA
aatgtccatcaggaaaaccag

SEQ ID NO: 65423 - RNA, 21 nt, synthetic construct
  source 1..21: mol_type = other RNA
aatgtccatcgagagatgaat

SEQ ID NO: 65424 - RNA, 21 nt, synthetic construct
  source 1..21: mol_type = other RNA
aatgtccgttgaagtctttgg

SEQ ID NO: 65425 - RNA, 21 nt, synthetic construct
  source 1..21: mol_type = other RNA
aatgtccttttcctgttccgg

SEQ ID NO: 65426 - RNA, 21 nt, synthetic construct
  source 1..21: mol_type = other RNA
aatgtctcattgtggatgaga

SEQ ID NO: 65427 - RNA, 21 nt, synthetic construct
  source 1..21: mol_type = other RNA
aatgtctcctctttcatatct

SEQ ID NO: 65428 - RNA, 21 nt, synthetic construct
  source 1..21: mol_type = other RNA
aatgtctggccgggcacggtg

SEQ ID NO: 65429 - RNA, 21 nt, synthetic construct
  source 1..21: mol_type = other RNA
aatgtctggtttgctttggag

SEQ ID NO: 65430 - RNA, 21 nt, synthetic construct
  source 1..21: mol_type = other RNA
aatgtctgtctttatgccaat

SEQ ID NO: 65431 - RNA, 21 nt, synthetic construct
  source 1..21: mol_type = other RNA
aatgtcttaagaaggaaaaga

SEQ ID NO: 65432 - RNA, 21 nt, synthetic construct
  source 1..21: mol_type = other RNA
aatgtctttggctcttagaaa

SEQ ID NO: 65433 - RNA, 21 nt, synthetic construct
  source 1..21: mol_type = other RNA
aatgtctttttacacttggag

SEQ ID NO: 65434 - RNA, 21 nt, synthetic construct
  source 1..21: mol_type = other RNA
aatgtgaacagacagacatgc

SEQ ID NO: 65435 - RNA, 21 nt, synthetic construct
  source 1..21: mol_type = other RNA
aatgtgaattagatggcttag

SEQ ID NO: 65436 - RNA, 21 nt, synthetic construct
  source 1..21: mol_type = other RNA
aatgtgacagaacaaactcaa

SEQ ID NO: 65437 - RNA, 21 nt, synthetic construct
  source 1..21: mol_type = other RNA
aatgtgacattagtggtggta

SEQ ID NO: 65438 - RNA, 21 nt, synthetic construct
  source 1..21: mol_type = other RNA
aatgtgacctgtccttgtgtt

SEQ ID NO: 65439 - RNA, 21 nt, synthetic construct
  source 1..21: mol_type = other RNA
aatgtgactagaagaaatgtt

SEQ ID NO: 65440 - RNA, 21 nt, synthetic construct
  source 1..21: mol_type = other RNA
aatgtgacttcgtcaagggga

SEQ ID NO: 65441 - RNA, 21 nt, synthetic construct
  source 1..21: mol_type = other RNA
aatgtgagcatttagccccct

SEQ ID NO: 65442 - RNA, 21 nt, synthetic construct
  source 1..21: mol_type = other RNA
aatgtgagccacatacatagt

SEQ ID NO: 65443 - RNA, 21 nt, synthetic construct
  source 1..21: mol_type = other RNA
aatgtgaggtgaggacatgga

SEQ ID NO: 65444 - RNA, 21 nt, synthetic construct
  source 1..21: mol_type = other RNA
aatgtgatatgccacattttt

SEQ ID NO: 65445 - RNA, 21 nt, synthetic construct
  source 1..21: mol_type = other RNA
aatgtgatggcatcattcata

SEQ ID NO: 65446 - RNA, 21 nt, synthetic construct
  source 1..21: mol_type = other RNA
aatgtgcaaggagagaaaaac

SEQ ID NO: 65447 - RNA, 21 nt, synthetic construct
  source 1..21: mol_type = other RNA
aatgtgcacctccagtgtcct

SEQ ID NO: 65448 - RNA, 21 nt, synthetic construct
  source 1..21: mol_type = other RNA
aatgtgcactcttttaaaccc

SEQ ID NO: 65449 - RNA, 21 nt, synthetic construct
  source 1..21: mol_type = other RNA
aatgtgcctacatagtccact

SEQ ID NO: 65450 - RNA, 21 nt, synthetic construct
  source 1..21: mol_type = other RNA
aatgtgctgtccatttcctta

SEQ ID NO: 65451 - RNA, 21 nt, synthetic construct
  source 1..21: mol_type = other RNA
aatgtgcttcctaaacctgct

SEQ ID NO: 65452 - RNA, 21 nt, synthetic construct
  source 1..21: mol_type = other RNA
aatgtggaagcagaactaaga

SEQ ID NO: 65453 - RNA, 21 nt, synthetic construct
  source 1..21: mol_type = other RNA
aatgtggagataaagagcagg

SEQ ID NO: 65454 - RNA, 21 nt, synthetic construct
  source 1..21: mol_type = other RNA
aatgtggagttggtgcaagga

SEQ ID NO: 65455 - RNA, 21 nt, synthetic construct
  source 1..21: mol_type = other RNA
aatgtggatagtgctttttac

SEQ ID NO: 65456 - RNA, 21 nt, synthetic construct
  source 1..21: mol_type = other RNA
aatgtggatgcatgaggcata

SEQ ID NO: 65457 - RNA, 21 nt, synthetic construct
  source 1..21: mol_type = other RNA
aatgtggcaaatttatgtgaa

SEQ ID NO: 65458 - RNA, 21 nt, synthetic construct
  source 1..21: mol_type = other RNA
aatgtggcagaatttacattt

SEQ ID NO: 65459 - RNA, 21 nt, synthetic construct
  source 1..21: mol_type = other RNA
aatgtggcatttcttacacat

SEQ ID NO: 65460 - RNA, 21 nt, synthetic construct
  source 1..21: mol_type = other RNA
aatgtggcttgcaaggcccac

SEQ ID NO: 65461 - RNA, 21 nt, synthetic construct
  source 1..21: mol_type = other RNA
aatgtggtcacactttttgtg

SEQ ID NO: 65462 - RNA, 21 nt, synthetic construct
  source 1..21: mol_type = other RNA
aatgtggtggtatgcactgta

SEQ ID NO: 65463 - RNA, 21 nt, synthetic construct
  source 1..21: mol_type = other RNA
aatgtggtttttggttcactt

SEQ ID NO: 65464 - RNA, 21 nt, synthetic construct
  source 1..21: mol_type = other RNA
aatgtgtaagaaatgccacat

SEQ ID NO: 65465 - RNA, 21 nt, synthetic construct
  source 1..21: mol_type = other RNA
aatgtgtagttctggtgtcgt

SEQ ID NO: 65466 - RNA, 21 nt, synthetic construct
  source 1..21: mol_type = other RNA
aatgtgtctagtgaatgagac

SEQ ID NO: 65467 - RNA, 21 nt, synthetic construct
  source 1..21: mol_type = other RNA
aatgtgtgaagaaggaatgtg

SEQ ID NO: 65468 - RNA, 21 nt, synthetic construct
  source 1..21: mol_type = other RNA
aatgtgtgttccagacaaaaa

SEQ ID NO: 65469 - RNA, 21 nt, synthetic construct
  source 1..21: mol_type = other RNA
aatgtgttgtctgattcagtt

SEQ ID NO: 65470 - RNA, 21 nt, synthetic construct
  source 1..21: mol_type = other RNA
aatgttaacaattggtgaatc

SEQ ID NO: 65471 - RNA, 21 nt, synthetic construct
  source 1..21: mol_type = other RNA
aatgttaagcccaacttcaca

SEQ ID NO: 65472 - RNA, 21 nt, synthetic construct
  source 1..21: mol_type = other RNA
aatgttacttctcagctatag

SEQ ID NO: 65473 - RNA, 21 nt, synthetic construct
  source 1..21: mol_type = other RNA
aatgttagaattcaggacagt

SEQ ID NO: 65474 - RNA, 21 nt, synthetic construct
  source 1..21: mol_type = other RNA
aatgttatatttccgtatcca

SEQ ID NO: 65475 - RNA, 21 nt, synthetic construct
  source 1..21: mol_type = other RNA
aatgttatgaagcttttctcc

SEQ ID NO: 65476 - RNA, 21 nt, synthetic construct
  source 1..21: mol_type = other RNA
aatgttcaagtatttccacgg

SEQ ID NO: 65477 - RNA, 21 nt, synthetic construct
  source 1..21: mol_type = other RNA
aatgttcagatagaaaagaca

SEQ ID NO: 65478 - RNA, 21 nt, synthetic construct
  source 1..21: mol_type = other RNA
aatgttcagtttatgggtcaa

SEQ ID NO: 65479 - RNA, 21 nt, synthetic construct
  source 1..21: mol_type = other RNA
aatgttccctcttcaatattt

SEQ ID NO: 65480 - RNA, 21 nt, synthetic construct
  source 1..21: mol_type = other RNA
aatgttctcttttcctcgttt

SEQ ID NO: 65481 - RNA, 21 nt, synthetic construct
  source 1..21: mol_type = other RNA
aatgttgacatcttgcataac

SEQ ID NO: 65482 - RNA, 21 nt, synthetic construct
  source 1..21: mol_type = other RNA
aatgttgattttgaggcagag

SEQ ID NO: 65483 - RNA, 21 nt, synthetic construct
  source 1..21: mol_type = other RNA
aatgttgcagagactggatag

SEQ ID NO: 65484 - RNA, 21 nt, synthetic construct
  source 1..21: mol_type = other RNA
aatgttgccaatatctatcag

SEQ ID NO: 65485 - RNA, 21 nt, synthetic construct
  source 1..21: mol_type = other RNA
aatgttggttagtgttgtttt

SEQ ID NO: 65486 - RNA, 21 nt, synthetic construct
  source 1..21: mol_type = other RNA
aatgttgtggatgtccttaat

SEQ ID NO: 65487 - RNA, 21 nt, synthetic construct
  source 1..21: mol_type = other RNA
aatgtttaattacccaggcat

SEQ ID NO: 65488 - RNA, 21 nt, synthetic construct
  source 1..21: mol_type = other RNA
aatgtttagcggaatgactat

SEQ ID NO: 65489 - RNA, 21 nt, synthetic construct
  source 1..21: mol_type = other RNA
aatgtttggtagatttctgca

SEQ ID NO: 65490 - RNA, 21 nt, synthetic construct
  source 1..21: mol_type = other RNA
aatgtttgtacttctaccttg

SEQ ID NO: 65491 - RNA, 21 nt, synthetic construct
  source 1..21: mol_type = other RNA
aatgtttgtttaattagccgg

SEQ ID NO: 65492 - RNA, 21 nt, synthetic construct
  source 1..21: mol_type = other RNA
aatgttttaaggcagggcttg

SEQ ID NO: 65493 - RNA, 21 nt, synthetic construct
  source 1..21: mol_type = other RNA
aatgttttatttagcccatgt

SEQ ID NO: 65494 - RNA, 21 nt, synthetic construct
  source 1..21: mol_type = other RNA
aatgttttccgtgtgacaaaa

SEQ ID NO: 65495 - RNA, 21 nt, synthetic construct
  source 1..21: mol_type = other RNA
aatgttttgcagagatgaggt

SEQ ID NO: 65496 - RNA, 21 nt, synthetic construct
  source 1..21: mol_type = other RNA
aatgtttttccgtctagccac

SEQ ID NO: 65497 - RNA, 21 nt, synthetic construct
  source 1..21: mol_type = other RNA
aattaaaaactgagaccggat

SEQ ID NO: 65498 - RNA, 21 nt, synthetic construct
  source 1..21: mol_type = other RNA
aattaaacaatcttgaaaggg

SEQ ID NO: 65499 - RNA, 21 nt, synthetic construct
  source 1..21: mol_type = other RNA
aattaaacacacccttggtaa

SEQ ID NO: 65500 - RNA, 21 nt, synthetic construct
  source 1..21: mol_type = other RNA
aattaaactatagacccaaag

SEQ ID NO: 65501 - RNA, 21 nt, synthetic construct
  source 1..21: mol_type = other RNA
aattaaactcattatcccaga

SEQ ID NO: 65502 - RNA, 21 nt, synthetic construct
  source 1..21: mol_type = other RNA
aattaaaggatgtcaactgag

SEQ ID NO: 65503 - RNA, 21 nt, synthetic construct
  source 1..21: mol_type = other RNA
aattaacactaatccttctca

SEQ ID NO: 65504 - RNA, 21 nt, synthetic construct
  source 1..21: mol_type = other RNA
aattaactccaggggacatgc

SEQ ID NO: 65505 - RNA, 21 nt, synthetic construct
  source 1..21: mol_type = other RNA
aattaagacaatgtggagttg

SEQ ID NO: 65506 - RNA, 21 nt, synthetic construct
  source 1..21: mol_type = other RNA
aattaagagaatggaaacttg

SEQ ID NO: 65507 - RNA, 21 nt, synthetic construct
  source 1..21: mol_type = other RNA
aattaagcaaccttttaggtg

SEQ ID NO: 65508 - RNA, 21 nt, synthetic construct
  source 1..21: mol_type = other RNA
aattaagcaccactagagtat

SEQ ID NO: 65509 - RNA, 21 nt, synthetic construct
  source 1..21: mol_type = other RNA
aattaagcttcgacagtccct

SEQ ID NO: 65510 - RNA, 21 nt, synthetic construct
  source 1..21: mol_type = other RNA
aattaatcagtctgtaagcac

SEQ ID NO: 65511 - RNA, 21 nt, synthetic construct
  source 1..21: mol_type = other RNA
aattaatctcttacacctgtt

SEQ ID NO: 65512 - RNA, 21 nt, synthetic construct
  source 1..21: mol_type = other RNA
aattaatgcccaatcaaatcc

SEQ ID NO: 65513 - RNA, 21 nt, synthetic construct
  source 1..21: mol_type = other RNA
aattaatgccccatgtgttgg

SEQ ID NO: 65514 - RNA, 21 nt, synthetic construct
  source 1..21: mol_type = other RNA
aattacaaaataggcagtcct

SEQ ID NO: 65515 - RNA, 21 nt, synthetic construct
  source 1..21: mol_type = other RNA
aattacaaatgaaagtcagct

SEQ ID NO: 65516 - RNA, 21 nt, synthetic construct
  source 1..21: mol_type = other RNA
aattacaactggtttctgcat

SEQ ID NO: 65517 - RNA, 21 nt, synthetic construct
  source 1..21: mol_type = other RNA
aattacaataatgcacatggg

SEQ ID NO: 65518 - RNA, 21 nt, synthetic construct
  source 1..21: mol_type = other RNA
aattacacatctcccatacca

SEQ ID NO: 65519 - RNA, 21 nt, synthetic construct
  source 1..21: mol_type = other RNA
aattacaggcatgagtcgcca

SEQ ID NO: 65520 - RNA, 21 nt, synthetic construct
  source 1..21: mol_type = other RNA
aattacaggggactttgatgt

SEQ ID NO: 65521 - RNA, 21 nt, synthetic construct
  source 1..21: mol_type = other RNA
aattacaggtcaaactcactt

SEQ ID NO: 65522 - RNA, 21 nt, synthetic construct
  source 1..21: mol_type = other RNA
aattacatacttcaaagggtc

SEQ ID NO: 65523 - RNA, 21 nt, synthetic construct
  source 1..21: mol_type = other RNA
aattaccataaagtcttccat

SEQ ID NO: 65524 - RNA, 21 nt, synthetic construct
  source 1..21: mol_type = other RNA
aattacccaaagactttgttt

SEQ ID NO: 65525 - RNA, 21 nt, synthetic construct
  source 1..21: mol_type = other RNA
aattacccaggcatgatggct

SEQ ID NO: 65526 - RNA, 21 nt, synthetic construct
  source 1..21: mol_type = other RNA
aattaccccattcactcagca

SEQ ID NO: 65527 - RNA, 21 nt, synthetic construct
  source 1..21: mol_type = other RNA
aattactgacaatagccaaga

SEQ ID NO: 65528 - RNA, 21 nt, synthetic construct
  source 1..21: mol_type = other RNA
aattacttccagtgttttagg

SEQ ID NO: 65529 - RNA, 21 nt, synthetic construct
  source 1..21: mol_type = other RNA
aattacttctttctctttcag

SEQ ID NO: 65530 - RNA, 21 nt, synthetic construct
  source 1..21: mol_type = other RNA
aattacttgagagcagagaca

SEQ ID NO: 65531 - RNA, 21 nt, synthetic construct
  source 1..21: mol_type = other RNA
aattagaaactggtgaactgg

SEQ ID NO: 65532 - RNA, 21 nt, synthetic construct
  source 1..21: mol_type = other RNA
aattagaaagctggactcatt

SEQ ID NO: 65533 - RNA, 21 nt, synthetic construct
  source 1..21: mol_type = other RNA
aattagaaatgtggaagcaga

SEQ ID NO: 65534 - RNA, 21 nt, synthetic construct
  source 1..21: mol_type = other RNA
aattagaacatctggcagcag

SEQ ID NO: 65535 - RNA, 21 nt, synthetic construct
  source 1..21: mol_type = other RNA
aattagatgatgttttgaacg

SEQ ID NO: 65536 - RNA, 21 nt, synthetic construct
  source 1..21: mol_type = other RNA
aattagatggcttaggatcac

SEQ ID NO: 65537 - RNA, 21 nt, synthetic construct
  source 1..21: mol_type = other RNA
aattagcaatgcgaatcatct

SEQ ID NO: 65538 - RNA, 21 nt, synthetic construct
  source 1..21: mol_type = other RNA
aattagccaagcatggtggta

SEQ ID NO: 65539 - RNA, 21 nt, synthetic construct
  source 1..21: mol_type = other RNA
aattagccgggtgtagtggtg

SEQ ID NO: 65540 - RNA, 21 nt, synthetic construct
  source 1..21: mol_type = other RNA
aattagccttttacaccctag

SEQ ID NO: 65541 - RNA, 21 nt, synthetic construct
  source 1..21: mol_type = other RNA
aattagctaagtatgcagaaa

SEQ ID NO: 65542 - RNA, 21 nt, synthetic construct
  source 1..21: mol_type = other RNA
aattagctgactttcatttgt

SEQ ID NO: 65543 - RNA, 21 nt, synthetic construct
  source 1..21: mol_type = other RNA
aattagctggatgtggtgtgg

SEQ ID NO: 65544 - RNA, 21 nt, synthetic construct
  source 1..21: mol_type = other RNA
aattagctgggcgagatggcg

SEQ ID NO: 65545 - RNA, 21 nt, synthetic construct
  source 1..21: mol_type = other RNA
aattagctttctcccagctgt

SEQ ID NO: 65546 - RNA, 21 nt, synthetic construct
  source 1..21: mol_type = other RNA
aattaggctgtttgagatctt

SEQ ID NO: 65547 - RNA, 21 nt, synthetic construct
  source 1..21: mol_type = other RNA
aattagtcatagcagtgggaa

SEQ ID NO: 65548 - RNA, 21 nt, synthetic construct
  source 1..21: mol_type = other RNA
aattagtgattttaccaaggc

SEQ ID NO: 65549 - RNA, 21 nt, synthetic construct
  source 1..21: mol_type = other RNA
aattagttacatgaggtcacc

SEQ ID NO: 65550 - RNA, 21 nt, synthetic construct
  source 1..21: mol_type = other RNA
aattagttcctccttttgtag

SEQ ID NO: 65551 - RNA, 21 nt, synthetic construct
  source 1..21: mol_type = other RNA
aattagttccttttaagggaa

SEQ ID NO: 65552 - RNA, 21 nt, synthetic construct
  source 1..21: mol_type = other RNA
aattataagcttcctctggct

SEQ ID NO: 65553 - RNA, 21 nt, synthetic construct
  source 1..21: mol_type = other RNA
aattatagagggcctaaataa

SEQ ID NO: 65554 - RNA, 21 nt, synthetic construct
  source 1..21: mol_type = other RNA
aattatagctccaaaagcgaa

SEQ ID NO: 65555 - RNA, 21 nt, synthetic construct
  source 1..21: mol_type = other RNA
aattatctgtgggttaaaagt

SEQ ID NO: 65556 - RNA, 21 nt, synthetic construct
  source 1..21: mol_type = other RNA
aattatgagcattccccacat

SEQ ID NO: 65557 - RNA, 21 nt, synthetic construct
  source 1..21: mol_type = other RNA
aattatgctaacatgaactac

SEQ ID NO: 65558 - RNA, 21 nt, synthetic construct
  source 1..21: mol_type = other RNA
aattatgctgagtgaatgggg

SEQ ID NO: 65559 - RNA, 21 nt, synthetic construct
  source 1..21: mol_type = other RNA
aattattagcttgctagtagc

SEQ ID NO: 65560 - RNA, 21 nt, synthetic construct
  source 1..21: mol_type = other RNA
aattattgacaagacgtgtac

SEQ ID NO: 65561 - RNA, 21 nt, synthetic construct
  source 1..21: mol_type = other RNA
aattattgtctgcaagcagat

SEQ ID NO: 65562 - RNA, 21 nt, synthetic construct
  source 1..21: mol_type = other RNA
aattatttgagagtaagttgc

SEQ ID NO: 65563 - RNA, 21 nt, synthetic construct
  source 1..21: mol_type = other RNA
aattatttgtgcatactgtga

SEQ ID NO: 65564 - RNA, 21 nt, synthetic construct
  source 1..21: mol_type = other RNA
aattattttcctccttctgct

SEQ ID NO: 65565 - RNA, 21 nt, synthetic construct
  source 1..21: mol_type = other RNA
aattcaaacatgacagatccc

SEQ ID NO: 65566 - RNA, 21 nt, synthetic construct
  source 1..21: mol_type = other RNA
aattcaacagctactatgaat

SEQ ID NO: 65567 - RNA, 21 nt, synthetic construct
  source 1..21: mol_type = other RNA
aattcaacttggtaaaaagtg

SEQ ID NO: 65568 - RNA, 21 nt, synthetic construct
  source 1..21: mol_type = other RNA
aattcaattttcatgggttga

SEQ ID NO: 65569 - RNA, 21 nt, synthetic construct
  source 1..21: mol_type = other RNA
aattcacaagattaatcttgc

SEQ ID NO: 65570 - RNA, 21 nt, synthetic construct
  source 1..21: mol_type = other RNA
aattcacagaactgtcactga

SEQ ID NO: 65571 - RNA, 21 nt, synthetic construct
  source 1..21: mol_type = other RNA
aattcacagaatatactcaga

SEQ ID NO: 65572 - RNA, 21 nt, synthetic construct
  source 1..21: mol_type = other RNA
aattcacagcatgaataccta

SEQ ID NO: 65573 - RNA, 21 nt, synthetic construct
  source 1..21: mol_type = other RNA
aattcacagtagaagactcag

SEQ ID NO: 65574 - RNA, 21 nt, synthetic construct
  source 1..21: mol_type = other RNA
aattcacatttaagaagggaa

SEQ ID NO: 65575 - RNA, 21 nt, synthetic construct
  source 1..21: mol_type = other RNA
aattcaccaaacaccttacac

SEQ ID NO: 65576 - RNA, 21 nt, synthetic construct
  source 1..21: mol_type = other RNA
aattcacgagactgttaggga

SEQ ID NO: 65577 - RNA, 21 nt, synthetic construct
  source 1..21: mol_type = other RNA
aattcactaatgcctcaaatt

SEQ ID NO: 65578 - RNA, 21 nt, synthetic construct
  source 1..21: mol_type = other RNA
aattcactcctcattcacact

SEQ ID NO: 65579 - RNA, 21 nt, synthetic construct
  source 1..21: mol_type = other RNA
aattcactgtgactccaaagc

SEQ ID NO: 65580 - RNA, 21 nt, synthetic construct
  source 1..21: mol_type = other RNA
aattcagagtggctaatgtgg

SEQ ID NO: 65581 - RNA, 21 nt, synthetic construct
  source 1..21: mol_type = other RNA
aattcagatggccccaaaatt

SEQ ID NO: 65582 - RNA, 21 nt, synthetic construct
  source 1..21: mol_type = other RNA
aattcaggacagtcatcctca

SEQ ID NO: 65583 - RNA, 21 nt, synthetic construct
  source 1..21: mol_type = other RNA
aattcaggacagttattcttc

SEQ ID NO: 65584 - RNA, 21 nt, synthetic construct
  source 1..21: mol_type = other RNA
aattcagtcaacaccaagcaa

SEQ ID NO: 65585 - RNA, 21 nt, synthetic construct
  source 1..21: mol_type = other RNA
aattcagtcaccaaacgttta

SEQ ID NO: 65586 - RNA, 21 nt, synthetic construct
  source 1..21: mol_type = other RNA
aattcatagatcaccaggggc

SEQ ID NO: 65587 - RNA, 21 nt, synthetic construct
  source 1..21: mol_type = other RNA
aattcatgcaactgaaaacat

SEQ ID NO: 65588 - RNA, 21 nt, synthetic construct
  source 1..21: mol_type = other RNA
aattcattgtacatgaagtcc

SEQ ID NO: 65589 - RNA, 21 nt, synthetic construct
  source 1..21: mol_type = other RNA
aattccaaaagtgaatatagc

SEQ ID NO: 65590 - RNA, 21 nt, synthetic construct
  source 1..21: mol_type = other RNA
aattccaaattagctttctcc

SEQ ID NO: 65591 - RNA, 21 nt, synthetic construct
  source 1..21: mol_type = other RNA
aattccacaaccactggggag

SEQ ID NO: 65592 - RNA, 21 nt, synthetic construct
  source 1..21: mol_type = other RNA
aattccatcagtggttgtgct

SEQ ID NO: 65593 - RNA, 21 nt, synthetic construct
  source 1..21: mol_type = other RNA
aattccattccttttcgagac

SEQ ID NO: 65594 - RNA, 21 nt, synthetic construct
  source 1..21: mol_type = other RNA
aattcccacaaaatatgaagc

SEQ ID NO: 65595 - RNA, 21 nt, synthetic construct
  source 1..21: mol_type = other RNA
aattccccagcctcagcctcc

SEQ ID NO: 65596 - RNA, 21 nt, synthetic construct
  source 1..21: mol_type = other RNA
aattccctcagcaaaagcaat

SEQ ID NO: 65597 - RNA, 21 nt, synthetic construct
  source 1..21: mol_type = other RNA
aattccctctacaaaaggagg

SEQ ID NO: 65598 - RNA, 21 nt, synthetic construct
  source 1..21: mol_type = other RNA
aattcccttcagtgtagtcag

SEQ ID NO: 65599 - RNA, 21 nt, synthetic construct
  source 1..21: mol_type = other RNA
aattccgctctggttttaaag

SEQ ID NO: 65600 - RNA, 21 nt, synthetic construct
  source 1..21: mol_type = other RNA
aattcctaactcaagagttac

SEQ ID NO: 65601 - RNA, 21 nt, synthetic construct
  source 1..21: mol_type = other RNA
aattcctactttcttcaacca

SEQ ID NO: 65602 - RNA, 21 nt, synthetic construct
  source 1..21: mol_type = other RNA
aattccttcccctttctttgg

SEQ ID NO: 65603 - RNA, 21 nt, synthetic construct
  source 1..21: mol_type = other RNA
aattccttcctttgatgactt

SEQ ID NO: 65604 - RNA, 21 nt, synthetic construct
  source 1..21: mol_type = other RNA
aattcctttctaggcatctat

SEQ ID NO: 65605 - RNA, 21 nt, synthetic construct
  source 1..21: mol_type = other RNA
aattcgaaaatgggccaaaga

SEQ ID NO: 65606 - RNA, 21 nt, synthetic construct
  source 1..21: mol_type = other RNA
aattcggtggcattaaggaca

SEQ ID NO: 65607 - RNA, 21 nt, synthetic construct
  source 1..21: mol_type = other RNA
aattcgttaatacttgtgtag

SEQ ID NO: 65608 - RNA, 21 nt, synthetic construct
  source 1..21: mol_type = other RNA
aattctaacaagaagctgttt

SEQ ID NO: 65609 - RNA, 21 nt, synthetic construct
  source 1..21: mol_type = other RNA
aattctaatgaactcccagaa

SEQ ID NO: 65610 - RNA, 21 nt, synthetic construct
  source 1..21: mol_type = other RNA
aattctaattagaaactggtg

SEQ ID NO: 65611 - RNA, 21 nt, synthetic construct
  source 1..21: mol_type = other RNA
aattctagttaataaaggtgc

SEQ ID NO: 65612 - RNA, 21 nt, synthetic construct
  source 1..21: mol_type = other RNA
aattctatctgaactttcgaa

SEQ ID NO: 65613 - RNA, 21 nt, synthetic construct
  source 1..21: mol_type = other RNA
aattctcaaatgaacaggttc

SEQ ID NO: 65614 - RNA, 21 nt, synthetic construct
  source 1..21: mol_type = other RNA
aattctccactttcatgattt

SEQ ID NO: 65615 - RNA, 21 nt, synthetic construct
  source 1..21: mol_type = other RNA
aattctccctgaaattgtcag

SEQ ID NO: 65616 - RNA, 21 nt, synthetic construct
  source 1..21: mol_type = other RNA
aattctctctcaactggcccc

SEQ ID NO: 65617 - RNA, 21 nt, synthetic construct
  source 1..21: mol_type = other RNA
aattctctggaatagaagagc

SEQ ID NO: 65618 - RNA, 21 nt, synthetic construct
  source 1..21: mol_type = other RNA
aattctgacaactgggagaat

SEQ ID NO: 65619 - RNA, 21 nt, synthetic construct
  source 1..21: mol_type = other RNA
aattctgacacccgaagagga

SEQ ID NO: 65620 - RNA, 21 nt, synthetic construct
  source 1..21: mol_type = other RNA
aattctgaccctttattcaaa

SEQ ID NO: 65621 - RNA, 21 nt, synthetic construct
  source 1..21: mol_type = other RNA
aattctgacttagtgagggag

SEQ ID NO: 65622 - RNA, 21 nt, synthetic construct
  source 1..21: mol_type = other RNA
aattctgaggcctcctgcctt

SEQ ID NO: 65623 - RNA, 21 nt, synthetic construct
  source 1..21: mol_type = other RNA
aattctgagggaaattatttc

SEQ ID NO: 65624 - RNA, 21 nt, synthetic construct
  source 1..21: mol_type = other RNA
aattctgatagcttgacaaaa

SEQ ID NO: 65625 - RNA, 21 nt, synthetic construct
  source 1..21: mol_type = other RNA
aattctgatgcacaagccttg

SEQ ID NO: 65626 - RNA, 21 nt, synthetic construct
  source 1..21: mol_type = other RNA
aattctgcagtgaacatggga

SEQ ID NO: 65627 - RNA, 21 nt, synthetic construct
  source 1..21: mol_type = other RNA
aattctgccacattcaacaac

SEQ ID NO: 65628 - RNA, 21 nt, synthetic construct
  source 1..21: mol_type = other RNA
aattctgccttcaatgtttgg

SEQ ID NO: 65629 - RNA, 21 nt, synthetic construct
  source 1..21: mol_type = other RNA
aattctgcttattatatgcct

SEQ ID NO: 65630 - RNA, 21 nt, synthetic construct
  source 1..21: mol_type = other RNA
aattctgtgccaagcaacttg

SEQ ID NO: 65631 - RNA, 21 nt, synthetic construct
  source 1..21: mol_type = other RNA
aattctgttctcagtatcctt

SEQ ID NO: 65632 - RNA, 21 nt, synthetic construct
  source 1..21: mol_type = other RNA
aattctgtttacccttactaa

SEQ ID NO: 65633 - RNA, 21 nt, synthetic construct
  source 1..21: mol_type = other RNA
aattcttaaactgccaaaccc

SEQ ID NO: 65634 - RNA, 21 nt, synthetic construct
  source 1..21: mol_type = other RNA
aattcttccagcctggtaatg

SEQ ID NO: 65635 - RNA, 21 nt, synthetic construct
  source 1..21: mol_type = other RNA
aattcttcctgtcttggaccc

SEQ ID NO: 65636 - RNA, 21 nt, synthetic construct
  source 1..21: mol_type = other RNA
aattcttgacctcaaatgatc

SEQ ID NO: 65637 - RNA, 21 nt, synthetic construct
  source 1..21: mol_type = other RNA
aattcttgggtgaataaccca

SEQ ID NO: 65638 - RNA, 21 nt, synthetic construct
  source 1..21: mol_type = other RNA
aattctttaaaactgctgagt

SEQ ID NO: 65639 - RNA, 21 nt, synthetic construct
  source 1..21: mol_type = other RNA
aattcttttgctgtataccca

SEQ ID NO: 65640 - RNA, 21 nt, synthetic construct
  source 1..21: mol_type = other RNA
aattgaacagcctaaagtcca

SEQ ID NO: 65641 - RNA, 21 nt, synthetic construct
  source 1..21: mol_type = other RNA
aattgaacccactgagcattt

SEQ ID NO: 65642 - RNA, 21 nt, synthetic construct
  source 1..21: mol_type = other RNA
aattgaatggggatgcaacaa

SEQ ID NO: 65643 - RNA, 21 nt, synthetic construct
  source 1..21: mol_type = other RNA
aattgaccaaacatgtgagga

SEQ ID NO: 65644 - RNA, 21 nt, synthetic construct
  source 1..21: mol_type = other RNA
aattgaccattccacgctgtg

SEQ ID NO: 65645 - RNA, 21 nt, synthetic construct
  source 1..21: mol_type = other RNA
aattgacttcactagatctct

SEQ ID NO: 65646 - RNA, 21 nt, synthetic construct
  source 1..21: mol_type = other RNA
aattgactttaccctgctgga

SEQ ID NO: 65647 - RNA, 21 nt, synthetic construct
  source 1..21: mol_type = other RNA
aattgagatgtactggaagtg

SEQ ID NO: 65648 - RNA, 21 nt, synthetic construct
  source 1..21: mol_type = other RNA
aattgagctgtccccaccgcc

SEQ ID NO: 65649 - RNA, 21 nt, synthetic construct
  source 1..21: mol_type = other RNA
aattgatctgccaggacaatt

SEQ ID NO: 65650 - RNA, 21 nt, synthetic construct
  source 1..21: mol_type = other RNA
aattgcaaaaacagtttccct

SEQ ID NO: 65651 - RNA, 21 nt, synthetic construct
  source 1..21: mol_type = other RNA
aattgcactccagcctaggca

SEQ ID NO: 65652 - RNA, 21 nt, synthetic construct
  source 1..21: mol_type = other RNA
aattgcagagtgttcaaaagc

SEQ ID NO: 65653 - RNA, 21 nt, synthetic construct
  source 1..21: mol_type = other RNA
aattgcagccagagagtggaa

SEQ ID NO: 65654 - RNA, 21 nt, synthetic construct
  source 1..21: mol_type = other RNA
aattgcaggtttactccaaga

SEQ ID NO: 65655 - RNA, 21 nt, synthetic construct
  source 1..21: mol_type = other RNA
aattgcatcaactgcttccct

SEQ ID NO: 65656 - RNA, 21 nt, synthetic construct
  source 1..21: mol_type = other RNA
aattgcatgagacttggagtt

SEQ ID NO: 65657 - RNA, 21 nt, synthetic construct
  source 1..21: mol_type = other RNA
aattgccaaactgttttccac

SEQ ID NO: 65658 - RNA, 21 nt, synthetic construct
  source 1..21: mol_type = other RNA
aattgccatatgtagggcacc

SEQ ID NO: 65659 - RNA, 21 nt, synthetic construct
  source 1..21: mol_type = other RNA
aattgcgcagaactggggctt

SEQ ID NO: 65660 - RNA, 21 nt, synthetic construct
  source 1..21: mol_type = other RNA
aattgctgcagtttttccact

SEQ ID NO: 65661 - RNA, 21 nt, synthetic construct
  source 1..21: mol_type = other RNA
aattgcttttgctgagggaat

SEQ ID NO: 65662 - RNA, 21 nt, synthetic construct
  source 1..21: mol_type = other RNA
aattggaacctttgtccactg

SEQ ID NO: 65663 - RNA, 21 nt, synthetic construct
  source 1..21: mol_type = other RNA
aattggaagactatcacgatt

SEQ ID NO: 65664 - RNA, 21 nt, synthetic construct
  source 1..21: mol_type = other RNA
aattggacgggtggtagggag

SEQ ID NO: 65665 - RNA, 21 nt, synthetic construct
  source 1..21: mol_type = other RNA
aattggcatttaaaagaacct

SEQ ID NO: 65666 - RNA, 21 nt, synthetic construct
  source 1..21: mol_type = other RNA
aattggcgtacatgtagatat

SEQ ID NO: 65667 - RNA, 21 nt, synthetic construct
  source 1..21: mol_type = other RNA
aattgggggaaaattgacatt

SEQ ID NO: 65668 - RNA, 21 nt, synthetic construct
  source 1..21: mol_type = other RNA
aattggtagtcaatgcaatgc

SEQ ID NO: 65669 - RNA, 21 nt, synthetic construct
  source 1..21: mol_type = other RNA
aattggtcctggaaaaagacc

SEQ ID NO: 65670 - RNA, 21 nt, synthetic construct
  source 1..21: mol_type = other RNA
aattggtgaatctgagtaaag

SEQ ID NO: 65671 - RNA, 21 nt, synthetic construct
  source 1..21: mol_type = other RNA
aattggttaaacttggtctgg

SEQ ID NO: 65672 - RNA, 21 nt, synthetic construct
  source 1..21: mol_type = other RNA
aattggttcgtttgaggcttt

SEQ ID NO: 65673 - RNA, 21 nt, synthetic construct
  source 1..21: mol_type = other RNA
aattgtaatcacagtacgctt

SEQ ID NO: 65674 - RNA, 21 nt, synthetic construct
  source 1..21: mol_type = other RNA
aattgtaatgtctcctctttc

SEQ ID NO: 65675 - RNA, 21 nt, synthetic construct
  source 1..21: mol_type = other RNA
aattgtacaattttcttaccc

SEQ ID NO: 65676 - RNA, 21 nt, synthetic construct
  source 1..21: mol_type = other RNA
aattgtacacctcaaactaga

SEQ ID NO: 65677 - RNA, 21 nt, synthetic construct
  source 1..21: mol_type = other RNA
aattgtaccttggagagaaac

SEQ ID NO: 65678 - RNA, 21 nt, synthetic construct
  source 1..21: mol_type = other RNA
aattgtagtttccatggaggg

SEQ ID NO: 65679 - RNA, 21 nt, synthetic construct
  source 1..21: mol_type = other RNA
aattgtcagaaaagatcagta

SEQ ID NO: 65680 - RNA, 21 nt, synthetic construct
  source 1..21: mol_type = other RNA
aattgtcctggcagatcaatt

SEQ ID NO: 65681 - RNA, 21 nt, synthetic construct
  source 1..21: mol_type = other RNA
aattgtgacagttctatttct

SEQ ID NO: 65682 - RNA, 21 nt, synthetic construct
  source 1..21: mol_type = other RNA
aattgtgtgttctctttttga

SEQ ID NO: 65683 - RNA, 21 nt, synthetic construct
  source 1..21: mol_type = other RNA
aattgttcatgaaatcccctt

SEQ ID NO: 65684 - RNA, 21 nt, synthetic construct
  source 1..21: mol_type = other RNA
aattgttgcgcgtcaaaagat

SEQ ID NO: 65685 - RNA, 21 nt, synthetic construct
  source 1..21: mol_type = other RNA
aattgtttgttgggtttaact

SEQ ID NO: 65686 - RNA, 21 nt, synthetic construct
  source 1..21: mol_type = other RNA
aattgttttcccttttgtagc

SEQ ID NO: 65687 - RNA, 21 nt, synthetic construct
  source 1..21: mol_type = other RNA
aatttaaagttagtgaagcag

SEQ ID NO: 65688 - RNA, 21 nt, synthetic construct
  source 1..21: mol_type = other RNA
aatttaacttctaatgcccat

SEQ ID NO: 65689 - RNA, 21 nt, synthetic construct
  source 1..21: mol_type = other RNA
aatttaagacacaaggaaggt

SEQ ID NO: 65690 - RNA, 21 nt, synthetic construct
  source 1..21: mol_type = other RNA
aatttaaggaccaggtatggc

SEQ ID NO: 65691 - RNA, 21 nt, synthetic construct
  source 1..21: mol_type = other RNA
aatttaaggggtaaatggttt

SEQ ID NO: 65692 - RNA, 21 nt, synthetic construct
  source 1..21: mol_type = other RNA
aatttaattttgagagtgcag

SEQ ID NO: 65693 - RNA, 21 nt, synthetic construct
  source 1..21: mol_type = other RNA
aatttacatagtgctcttctg

SEQ ID NO: 65694 - RNA, 21 nt, synthetic construct
  source 1..21: mol_type = other RNA
aatttaccatctgacatatgt

SEQ ID NO: 65695 - RNA, 21 nt, synthetic construct
  source 1..21: mol_type = other RNA
aatttagaattctctctcaac

SEQ ID NO: 65696 - RNA, 21 nt, synthetic construct
  source 1..21: mol_type = other RNA
aatttagatgagagtggccta

SEQ ID NO: 65697 - RNA, 21 nt, synthetic construct
  source 1..21: mol_type = other RNA
aatttagcgttcatccaaatt

SEQ ID NO: 65698 - RNA, 21 nt, synthetic construct
  source 1..21: mol_type = other RNA
aatttagcttctgaattgaga

SEQ ID NO: 65699 - RNA, 21 nt, synthetic construct
  source 1..21: mol_type = other RNA
aatttagtaagggtaaacaga

SEQ ID NO: 65700 - RNA, 21 nt, synthetic construct
  source 1..21: mol_type = other RNA
aatttagtgtattgtaccttg

SEQ ID NO: 65701 - RNA, 21 nt, synthetic construct
  source 1..21: mol_type = other RNA
aatttatcagatcccaattac

SEQ ID NO: 65702 - RNA, 21 nt, synthetic construct
  source 1..21: mol_type = other RNA
aatttatctccataagtccct

SEQ ID NO: 65703 - RNA, 21 nt, synthetic construct
  source 1..21: mol_type = other RNA
aatttatgtacatgacctatc

SEQ ID NO: 65704 - RNA, 21 nt, synthetic construct
  source 1..21: mol_type = other RNA
aatttatgttcatgaaccttc

SEQ ID NO: 65705 - RNA, 21 nt, synthetic construct
  source 1..21: mol_type = other RNA
aatttcagaaagagaatagca

SEQ ID NO: 65706 - RNA, 21 nt, synthetic construct
  source 1..21: mol_type = other RNA
aatttcagagagacctgaaga

SEQ ID NO: 65707 - RNA, 21 nt, synthetic construct
  source 1..21: mol_type = other RNA
aatttcagatctctgacattg

SEQ ID NO: 65708 - RNA, 21 nt, synthetic construct
  source 1..21: mol_type = other RNA
aatttcagggagaattggtag

SEQ ID NO: 65709 - RNA, 21 nt, synthetic construct
  source 1..21: mol_type = other RNA
aatttcaggtgtgtaaacact

SEQ ID NO: 65710 - RNA, 21 nt, synthetic construct
  source 1..21: mol_type = other RNA
aatttcatcgtaaaaagccat

SEQ ID NO: 65711 - RNA, 21 nt, synthetic construct
  source 1..21: mol_type = other RNA
aatttcatgcctttcagcata

SEQ ID NO: 65712 - RNA, 21 nt, synthetic construct
  source 1..21: mol_type = other RNA
aatttcattaggttgatggct

SEQ ID NO: 65713 - RNA, 21 nt, synthetic construct
  source 1..21: mol_type = other RNA
aatttccaagaaccctttgtt

SEQ ID NO: 65714 - RNA, 21 nt, synthetic construct
  source 1..21: mol_type = other RNA
aatttccacccatgaagccag

SEQ ID NO: 65715 - RNA, 21 nt, synthetic construct
  source 1..21: mol_type = other RNA
aatttccagcattttataggc

SEQ ID NO: 65716 - RNA, 21 nt, synthetic construct
  source 1..21: mol_type = other RNA
aatttccaggtcattacatat

SEQ ID NO: 65717 - RNA, 21 nt, synthetic construct
  source 1..21: mol_type = other RNA
aatttcccatttgatttcttc

SEQ ID NO: 65718 - RNA, 21 nt, synthetic construct
  source 1..21: mol_type = other RNA
aatttccctcagaatttgagg

SEQ ID NO: 65719 - RNA, 21 nt, synthetic construct
  source 1..21: mol_type = other RNA
aatttctaaaaacgtgcaaac

SEQ ID NO: 65720 - RNA, 21 nt, synthetic construct
  source 1..21: mol_type = other RNA
aatttctaaggttctgctatg

SEQ ID NO: 65721 - RNA, 21 nt, synthetic construct
  source 1..21: mol_type = other RNA
aatttctatagtcattccgct

SEQ ID NO: 65722 - RNA, 21 nt, synthetic construct
  source 1..21: mol_type = other RNA
aatttctgagagtattgccag

SEQ ID NO: 65723 - RNA, 21 nt, synthetic construct
  source 1..21: mol_type = other RNA
aatttctgtccttggattgct

SEQ ID NO: 65724 - RNA, 21 nt, synthetic construct
  source 1..21: mol_type = other RNA
aatttctgttgcttaagtcac

SEQ ID NO: 65725 - RNA, 21 nt, synthetic construct
  source 1..21: mol_type = other RNA
aatttctttaaaaccagagcg

SEQ ID NO: 65726 - RNA, 21 nt, synthetic construct
  source 1..21: mol_type = other RNA
aatttctttggctgttagcct

SEQ ID NO: 65727 - RNA, 21 nt, synthetic construct
  source 1..21: mol_type = other RNA
aatttgacatgacaggtgagt

SEQ ID NO: 65728 - RNA, 21 nt, synthetic construct
  source 1..21: mol_type = other RNA
aatttgaggcattagtgaatt

SEQ ID NO: 65729 - RNA, 21 nt, synthetic construct
  source 1..21: mol_type = other RNA
aatttgaggccctattcaacc

SEQ ID NO: 65730 - RNA, 21 nt, synthetic construct
  source 1..21: mol_type = other RNA
aatttgaggtagcacaactag

SEQ ID NO: 65731 - RNA, 21 nt, synthetic construct
  source 1..21: mol_type = other RNA
aatttgaggtctaggctaatg

SEQ ID NO: 65732 - RNA, 21 nt, synthetic construct
  source 1..21: mol_type = other RNA
aatttgaggtcttctagcttt

SEQ ID NO: 65733 - RNA, 21 nt, synthetic construct
  source 1..21: mol_type = other RNA
aatttgattgttagccacagc

SEQ ID NO: 65734 - RNA, 21 nt, synthetic construct
  source 1..21: mol_type = other RNA
aatttgccacattttaccaaa

SEQ ID NO: 65735 - RNA, 21 nt, synthetic construct
  source 1..21: mol_type = other RNA
aatttgcctattctggggctc

SEQ ID NO: 65736 - RNA, 21 nt, synthetic construct
  source 1..21: mol_type = other RNA
aatttggaaagggtagagcac

SEQ ID NO: 65737 - RNA, 21 nt, synthetic construct
  source 1..21: mol_type = other RNA
aatttggatgaacgctaaatt

SEQ ID NO: 65738 - RNA, 21 nt, synthetic construct
  source 1..21: mol_type = other RNA
aatttggcaaaaaatgcagta

SEQ ID NO: 65739 - RNA, 21 nt, synthetic construct
  source 1..21: mol_type = other RNA
aatttggcttggggaacagtt

SEQ ID NO: 65740 - RNA, 21 nt, synthetic construct
  source 1..21: mol_type = other RNA
aatttgggatatagctacaat

SEQ ID NO: 65741 - RNA, 21 nt, synthetic construct
  source 1..21: mol_type = other RNA
aatttgggtttgagtttccag

SEQ ID NO: 65742 - RNA, 21 nt, synthetic construct
  source 1..21: mol_type = other RNA
aatttggtattcttatcccta

SEQ ID NO: 65743 - RNA, 21 nt, synthetic construct
  source 1..21: mol_type = other RNA
aatttggttatgcgaatttac

SEQ ID NO: 65744 - RNA, 21 nt, synthetic construct
  source 1..21: mol_type = other RNA
aatttgtcaacttttagtagg

SEQ ID NO: 65745 - RNA, 21 nt, synthetic construct
  source 1..21: mol_type = other RNA
aatttgtccatctggattata

SEQ ID NO: 65746 - RNA, 21 nt, synthetic construct
  source 1..21: mol_type = other RNA
aatttgtgaaccttgaagtac

SEQ ID NO: 65747 - RNA, 21 nt, synthetic construct
  source 1..21: mol_type = other RNA
aatttgttttccaagccttaa

SEQ ID NO: 65748 - RNA, 21 nt, synthetic construct
  source 1..21: mol_type = other RNA
aattttaaatcagcaccatct

SEQ ID NO: 65749 - RNA, 21 nt, synthetic construct
  source 1..21: mol_type = other RNA
aattttaagcctagagattag

SEQ ID NO: 65750 - RNA, 21 nt, synthetic construct
  source 1..21: mol_type = other RNA
aattttaagtgcacaatgcag

SEQ ID NO: 65751 - RNA, 21 nt, synthetic construct
  source 1..21: mol_type = other RNA
aattttaggacaaggaaagga

SEQ ID NO: 65752 - RNA, 21 nt, synthetic construct
  source 1..21: mol_type = other RNA
aattttatggttttttccccc

SEQ ID NO: 65753 - RNA, 21 nt, synthetic construct
  source 1..21: mol_type = other RNA
aattttcaagggtgttttccc

SEQ ID NO: 65754 - RNA, 21 nt, synthetic construct
  source 1..21: mol_type = other RNA
aattttcaggactcatgagag

SEQ ID NO: 65755 - RNA, 21 nt, synthetic construct
  source 1..21: mol_type = other RNA
aattttcatagcagcattgtt

SEQ ID NO: 65756 - RNA, 21 nt, synthetic construct
  source 1..21: mol_type = other RNA
aattttcattctacctggagc

SEQ ID NO: 65757 - RNA, 21 nt, synthetic construct
  source 1..21: mol_type = other RNA
aattttccattcacacaccct

SEQ ID NO: 65758 - RNA, 21 nt, synthetic construct
  source 1..21: mol_type = other RNA
aattttccattcatgtaatgc

SEQ ID NO: 65759 - RNA, 21 nt, synthetic construct
  source 1..21: mol_type = other RNA
aattttcccccaattaaacta

SEQ ID NO: 65760 - RNA, 21 nt, synthetic construct
  source 1..21: mol_type = other RNA
aattttctcccaaggttgcct

SEQ ID NO: 65761 - RNA, 21 nt, synthetic construct
  source 1..21: mol_type = other RNA
aattttctctcatgttgggta

SEQ ID NO: 65762 - RNA, 21 nt, synthetic construct
  source 1..21: mol_type = other RNA
aattttctgactctgtgcttg

SEQ ID NO: 65763 - RNA, 21 nt, synthetic construct
  source 1..21: mol_type = other RNA
aattttctgagcaactactat

SEQ ID NO: 65764 - RNA, 21 nt, synthetic construct
  source 1..21: mol_type = other RNA
aattttcttaccctttactca

SEQ ID NO: 65765 - RNA, 21 nt, synthetic construct
  source 1..21: mol_type = other RNA
aattttgagacctcaggcagt

SEQ ID NO: 65766 - RNA, 21 nt, synthetic construct
  source 1..21: mol_type = other RNA
aattttgagagtgcagtatgt

SEQ ID NO: 65767 - RNA, 21 nt, synthetic construct
  source 1..21: mol_type = other RNA
aattttgaggcttttggattt

SEQ ID NO: 65768 - RNA, 21 nt, synthetic construct
  source 1..21: mol_type = other RNA
aattttgcttaaagttggtcc

SEQ ID NO: 65769 - RNA, 21 nt, synthetic construct
  source 1..21: mol_type = other RNA
aattttgcttttgctttgggt

SEQ ID NO: 65770 - RNA, 21 nt, synthetic construct
  source 1..21: mol_type = other RNA
aattttggggccatctgaatt

SEQ ID NO: 65771 - RNA, 21 nt, synthetic construct
  source 1..21: mol_type = other RNA
aattttgttcaggagttttgc

SEQ ID NO: 65772 - RNA, 21 nt, synthetic construct
  source 1..21: mol_type = other RNA
aatttttaaaaagcagctacc

SEQ ID NO: 65773 - RNA, 21 nt, synthetic construct
  source 1..21: mol_type = other RNA
aatttttaaaagagcgaagag

SEQ ID NO: 65774 - RNA, 21 nt, synthetic construct
  source 1..21: mol_type = other RNA
aatttttcacattcttcacca

SEQ ID NO: 65775 - RNA, 21 nt, synthetic construct
  source 1..21: mol_type = other RNA
aatttttcttacctaagcatc

SEQ ID NO: 65776 - RNA, 21 nt, synthetic construct
  source 1..21: mol_type = other RNA
aatttttgcaaaccaaatgca

SEQ ID NO: 65777 - RNA, 21 nt, synthetic construct
  source 1..21: mol_type = other RNA
aatttttgtcaagtgactcca

SEQ ID NO: 65778 - RNA, 21 nt, synthetic construct
  source 1..21: mol_type = other RNA
aatttttgtctggaacacaca

SEQ ID NO: 65779 - RNA, 21 nt, synthetic construct
  source 1..21: mol_type = other RNA
aattttttgagacggaatctt

SEQ ID NO: 65780 - RNA, 21 nt, synthetic construct
  source 1..21: mol_type = other RNA
aattttttggcatacaactgc

SEQ ID NO: 65781 - RNA, 21 nt, synthetic construct
  source 1..21: mol_type = other RNA
acaaaaaaccactggatacgg

SEQ ID NO: 65782 - RNA, 21 nt, synthetic construct
  source 1..21: mol_type = other RNA
acaaaaaacgcggcacttggt

SEQ ID NO: 65783 - RNA, 21 nt, synthetic construct
  source 1..21: mol_type = other RNA
acaaaaaatcttaaagatgcc

SEQ ID NO: 65784 - RNA, 21 nt, synthetic construct
  source 1..21: mol_type = other RNA
acaaaaacacactgagctttt

SEQ ID NO: 65785 - RNA, 21 nt, synthetic construct
  source 1..21: mol_type = other RNA
acaaaaagatctgtggacttt

SEQ ID NO: 65786 - RNA, 21 nt, synthetic construct
  source 1..21: mol_type = other RNA
acaaaaagcacctaccataac

SEQ ID NO: 65787 - RNA, 21 nt, synthetic construct
  source 1..21: mol_type = other RNA
acaaaaagtaggggtaaatct

SEQ ID NO: 65788 - RNA, 21 nt, synthetic construct
  source 1..21: mol_type = other RNA
acaaaaagtgataccataaag

SEQ ID NO: 65789 - RNA, 21 nt, synthetic construct
  source 1..21: mol_type = other RNA
acaaaaagtgtgaccacattc

SEQ ID NO: 65790 - RNA, 21 nt, synthetic construct
  source 1..21: mol_type = other RNA
acaaaaatacgaaagtgctct

SEQ ID NO: 65791 - RNA, 21 nt, synthetic construct
  source 1..21: mol_type = other RNA
acaaaaatacttaagagcatg

SEQ ID NO: 65792 - RNA, 21 nt, synthetic construct
  source 1..21: mol_type = other RNA
acaaaaatagaggatgggcat

SEQ ID NO: 65793 - RNA, 21 nt, synthetic construct
  source 1..21: mol_type = other RNA
acaaaaatgacacaacttact

SEQ ID NO: 65794 - RNA, 21 nt, synthetic construct
  source 1..21: mol_type = other RNA
acaaaaattagctgggcgaga

SEQ ID NO: 65795 - RNA, 21 nt, synthetic construct
  source 1..21: mol_type = other RNA
acaaaacaaaaccctgttggg

SEQ ID NO: 65796 - RNA, 21 nt, synthetic construct
  source 1..21: mol_type = other RNA
acaaaacaaagtctttgggta

SEQ ID NO: 65797 - RNA, 21 nt, synthetic construct
  source 1..21: mol_type = other RNA
acaaaacaaatggaaccactg

SEQ ID NO: 65798 - RNA, 21 nt, synthetic construct
  source 1..21: mol_type = other RNA
acaaaacaagaagaaaaagca

SEQ ID NO: 65799 - RNA, 21 nt, synthetic construct
  source 1..21: mol_type = other RNA
acaaaacacacgggtacacat

SEQ ID NO: 65800 - RNA, 21 nt, synthetic construct
  source 1..21: mol_type = other RNA
acaaaacacatggcatcgggg

SEQ ID NO: 65801 - RNA, 21 nt, synthetic construct
  source 1..21: mol_type = other RNA
acaaaacagggttattaacat

SEQ ID NO: 65802 - RNA, 21 nt, synthetic construct
  source 1..21: mol_type = other RNA
acaaaacatgttttcaaatgc

SEQ ID NO: 65803 - RNA, 21 nt, synthetic construct
  source 1..21: mol_type = other RNA
acaaaaccctgttgggctatt

SEQ ID NO: 65804 - RNA, 21 nt, synthetic construct
  source 1..21: mol_type = other RNA
acaaaactaggctgtcccaaa

SEQ ID NO: 65805 - RNA, 21 nt, synthetic construct
  source 1..21: mol_type = other RNA
acaaaactgaactcaaaatgg

SEQ ID NO: 65806 - RNA, 21 nt, synthetic construct
  source 1..21: mol_type = other RNA
acaaaactgggggctggacat

SEQ ID NO: 65807 - RNA, 21 nt, synthetic construct
  source 1..21: mol_type = other RNA
acaaaagaaaattttctgagc

SEQ ID NO: 65808 - RNA, 21 nt, synthetic construct
  source 1..21: mol_type = other RNA
acaaaagaacaggacttttgg

SEQ ID NO: 65809 - RNA, 21 nt, synthetic construct
  source 1..21: mol_type = other RNA
acaaaagagctgggcccgcag

SEQ ID NO: 65810 - RNA, 21 nt, synthetic construct
  source 1..21: mol_type = other RNA
acaaaagagtagattccccct

SEQ ID NO: 65811 - RNA, 21 nt, synthetic construct
  source 1..21: mol_type = other RNA
acaaaagatacacaagatctc

SEQ ID NO: 65812 - RNA, 21 nt, synthetic construct
  source 1..21: mol_type = other RNA
acaaaagatcatttcaaacca

SEQ ID NO: 65813 - RNA, 21 nt, synthetic construct
  source 1..21: mol_type = other RNA
acaaaaggaggaactaattga

SEQ ID NO: 65814 - RNA, 21 nt, synthetic construct
  source 1..21: mol_type = other RNA
acaaaaggccccttgaaagat

SEQ ID NO: 65815 - RNA, 21 nt, synthetic construct
  source 1..21: mol_type = other RNA
acaaaagggaaaacaattact

SEQ ID NO: 65816 - RNA, 21 nt, synthetic construct
  source 1..21: mol_type = other RNA
acaaaaggtagaagataatgt

SEQ ID NO: 65817 - RNA, 21 nt, synthetic construct
  source 1..21: mol_type = other RNA
acaaaaggtttccagtggccc

SEQ ID NO: 65818 - RNA, 21 nt, synthetic construct
  source 1..21: mol_type = other RNA
acaaaagtgaaaactaaggtc

SEQ ID NO: 65819 - RNA, 21 nt, synthetic construct
  source 1..21: mol_type = other RNA
acaaaagtgctgttgaggctg

SEQ ID NO: 65820 - RNA, 21 nt, synthetic construct
  source 1..21: mol_type = other RNA
acaaaatacccacaagaaaaa

SEQ ID NO: 65821 - RNA, 21 nt, synthetic construct
  source 1..21: mol_type = other RNA
acaaaatacctgggaatccaa

SEQ ID NO: 65822 - RNA, 21 nt, synthetic construct
  source 1..21: mol_type = other RNA
acaaaataggattaagacact

SEQ ID NO: 65823 - RNA, 21 nt, synthetic construct
  source 1..21: mol_type = other RNA
acaaaataggcagtcctctac

SEQ ID NO: 65824 - RNA, 21 nt, synthetic construct
  source 1..21: mol_type = other RNA
acaaaatatgtaatgacctgg

SEQ ID NO: 65825 - RNA, 21 nt, synthetic construct
  source 1..21: mol_type = other RNA
acaaaatcagatatgaaagag

SEQ ID NO: 65826 - RNA, 21 nt, synthetic construct
  source 1..21: mol_type = other RNA
acaaaatgtggatgcatgagg

SEQ ID NO: 65827 - RNA, 21 nt, synthetic construct
  source 1..21: mol_type = other RNA
acaaacaaacagaaaggccca

SEQ ID NO: 65828 - RNA, 21 nt, synthetic construct
  source 1..21: mol_type = other RNA
acaaacaaatccttttcccag

SEQ ID NO: 65829 - RNA, 21 nt, synthetic construct
  source 1..21: mol_type = other RNA
acaaacaattagcacctttat

SEQ ID NO: 65830 - RNA, 21 nt, synthetic construct
  source 1..21: mol_type = other RNA
acaaacacaaaacaaatggaa

SEQ ID NO: 65831 - RNA, 21 nt, synthetic construct
  source 1..21: mol_type = other RNA
acaaacacacaaaccaacaac

SEQ ID NO: 65832 - RNA, 21 nt, synthetic construct
  source 1..21: mol_type = other RNA
acaaacacactgggtaaacaa

SEQ ID NO: 65833 - RNA, 21 nt, synthetic construct
  source 1..21: mol_type = other RNA
acaaacacttttcaaacactt

SEQ ID NO: 65834 - RNA, 21 nt, synthetic construct
  source 1..21: mol_type = other RNA
acaaacagaaaggcccaaaaa

SEQ ID NO: 65835 - RNA, 21 nt, synthetic construct
  source 1..21: mol_type = other RNA
acaaacatgaataaccaatgt

SEQ ID NO: 65836 - RNA, 21 nt, synthetic construct
  source 1..21: mol_type = other RNA
acaaacattttttgcagagac

SEQ ID NO: 65837 - RNA, 21 nt, synthetic construct
  source 1..21: mol_type = other RNA
acaaaccaaaaaatgtggcat

SEQ ID NO: 65838 - RNA, 21 nt, synthetic construct
  source 1..21: mol_type = other RNA
acaaaccaacaacaaaaaatc

SEQ ID NO: 65839 - RNA, 21 nt, synthetic construct
  source 1..21: mol_type = other RNA
acaaacctggcaatactctca

SEQ ID NO: 65840 - RNA, 21 nt, synthetic construct
  source 1..21: mol_type = other RNA
acaaaccttcttatttccttc

SEQ ID NO: 65841 - RNA, 21 nt, synthetic construct
  source 1..21: mol_type = other RNA
acaaacgcattgtgatgtctc

SEQ ID NO: 65842 - RNA, 21 nt, synthetic construct
  source 1..21: mol_type = other RNA
acaaactaactagaaaaccga

SEQ ID NO: 65843 - RNA, 21 nt, synthetic construct
  source 1..21: mol_type = other RNA
acaaactcaagttccggttct

SEQ ID NO: 65844 - RNA, 21 nt, synthetic construct
  source 1..21: mol_type = other RNA
acaaactccaaacctttaagt

SEQ ID NO: 65845 - RNA, 21 nt, synthetic construct
  source 1..21: mol_type = other RNA
acaaactgcagaatgacagaa

SEQ ID NO: 65846 - RNA, 21 nt, synthetic construct
  source 1..21: mol_type = other RNA
acaaactgcgtggtttattca

SEQ ID NO: 65847 - RNA, 21 nt, synthetic construct
  source 1..21: mol_type = other RNA
acaaagaacaggaagggagag

SEQ ID NO: 65848 - RNA, 21 nt, synthetic construct
  source 1..21: mol_type = other RNA
acaaagacaagttcttacctc

SEQ ID NO: 65849 - RNA, 21 nt, synthetic construct
  source 1..21: mol_type = other RNA
acaaagagaacaatggaatag

SEQ ID NO: 65850 - RNA, 21 nt, synthetic construct
  source 1..21: mol_type = other RNA
acaaagatgccacaaatggag

SEQ ID NO: 65851 - RNA, 21 nt, synthetic construct
  source 1..21: mol_type = other RNA
acaaagatttacccctacttt

SEQ ID NO: 65852 - RNA, 21 nt, synthetic construct
  source 1..21: mol_type = other RNA
acaaagccctcaggaccaggc

SEQ ID NO: 65853 - RNA, 21 nt, synthetic construct
  source 1..21: mol_type = other RNA
acaaagccttctctactctgc

SEQ ID NO: 65854 - RNA, 21 nt, synthetic construct
  source 1..21: mol_type = other RNA
acaaagctctgatgctttctc

SEQ ID NO: 65855 - RNA, 21 nt, synthetic construct
  source 1..21: mol_type = other RNA
acaaagctttaaactggatga

SEQ ID NO: 65856 - RNA, 21 nt, synthetic construct
  source 1..21: mol_type = other RNA
acaaaggacatgaactcaacc

SEQ ID NO: 65857 - RNA, 21 nt, synthetic construct
  source 1..21: mol_type = other RNA
acaaaggactggaactcattt

SEQ ID NO: 65858 - RNA, 21 nt, synthetic construct
  source 1..21: mol_type = other RNA
acaaaggattgggaagattgg

SEQ ID NO: 65859 - RNA, 21 nt, synthetic construct
  source 1..21: mol_type = other RNA
acaaaggcaggagcagtgtga

SEQ ID NO: 65860 - RNA, 21 nt, synthetic construct
  source 1..21: mol_type = other RNA
acaaaggcgaagcccgccgct

SEQ ID NO: 65861 - RNA, 21 nt, synthetic construct
  source 1..21: mol_type = other RNA
acaaagggcctgttccaggcc

SEQ ID NO: 65862 - RNA, 21 nt, synthetic construct
  source 1..21: mol_type = other RNA
acaaagggttcttggaaatta

SEQ ID NO: 65863 - RNA, 21 nt, synthetic construct
  source 1..21: mol_type = other RNA
acaaaggtgttaagccgttcc

SEQ ID NO: 65864 - RNA, 21 nt, synthetic construct
  source 1..21: mol_type = other RNA
acaaaggttgaaaactcaact

SEQ ID NO: 65865 - RNA, 21 nt, synthetic construct
  source 1..21: mol_type = other RNA
acaaaggttgcagtgagcaga

SEQ ID NO: 65866 - RNA, 21 nt, synthetic construct
  source 1..21: mol_type = other RNA
acaaagtatgagaaatgtctg

SEQ ID NO: 65867 - RNA, 21 nt, synthetic construct
  source 1..21: mol_type = other RNA
acaaagtccccacatgactgg

SEQ ID NO: 65868 - RNA, 21 nt, synthetic construct
  source 1..21: mol_type = other RNA
acaaagtctttgggtaattta

SEQ ID NO: 65869 - RNA, 21 nt, synthetic construct
  source 1..21: mol_type = other RNA
acaaataacaccatagctgaa

SEQ ID NO: 65870 - RNA, 21 nt, synthetic construct
  source 1..21: mol_type = other RNA
acaaataactccagcttttat

SEQ ID NO: 65871 - RNA, 21 nt, synthetic construct
  source 1..21: mol_type = other RNA
acaaataagaagattgagtca

SEQ ID NO: 65872 - RNA, 21 nt, synthetic construct
  source 1..21: mol_type = other RNA
acaaatcagatttcaggtggt

SEQ ID NO: 65873 - RNA, 21 nt, synthetic construct
  source 1..21: mol_type = other RNA
acaaatccttttcccaggagc

SEQ ID NO: 65874 - RNA, 21 nt, synthetic construct
  source 1..21: mol_type = other RNA
acaaatgaaagtcagctaatt

SEQ ID NO: 65875 - RNA, 21 nt, synthetic construct
  source 1..21: mol_type = other RNA
acaaatgatgaagggttttct

SEQ ID NO: 65876 - RNA, 21 nt, synthetic construct
  source 1..21: mol_type = other RNA
acaaatggaaccactgtaggc

SEQ ID NO: 65877 - RNA, 21 nt, synthetic construct
  source 1..21: mol_type = other RNA
acaaatggagtgacttaagca

SEQ ID NO: 65878 - RNA, 21 nt, synthetic construct
  source 1..21: mol_type = other RNA
acaaatgttgcagagactgga

SEQ ID NO: 65879 - RNA, 21 nt, synthetic construct
  source 1..21: mol_type = other RNA
acaaattaccatgtttccata

SEQ ID NO: 65880 - RNA, 21 nt, synthetic construct
  source 1..21: mol_type = other RNA
acaaattagccaggcgtggtg

SEQ ID NO: 65881 - RNA, 21 nt, synthetic construct
  source 1..21: mol_type = other RNA
acaaattatgactgagatact

SEQ ID NO: 65882 - RNA, 21 nt, synthetic construct
  source 1..21: mol_type = other RNA
acaaattcatgcaactgaaaa

SEQ ID NO: 65883 - RNA, 21 nt, synthetic construct
  source 1..21: mol_type = other RNA
acaaattccctctacaaaagg

SEQ ID NO: 65884 - RNA, 21 nt, synthetic construct
  source 1..21: mol_type = other RNA
acaaattgcatcaactgcttc

SEQ ID NO: 65885 - RNA, 21 nt, synthetic construct
  source 1..21: mol_type = other RNA
acaaatttatgttcatgaacc

SEQ ID NO: 65886 - RNA, 21 nt, synthetic construct
  source 1..21: mol_type = other RNA
acaaatttctatagtcattcc

SEQ ID NO: 65887 - RNA, 21 nt, synthetic construct
  source 1..21: mol_type = other RNA
acaacaaaacacacgggtaca

SEQ ID NO: 65888 - RNA, 21 nt, synthetic construct
  source 1..21: mol_type = other RNA
acaacaaaatacccacaagaa

SEQ ID NO: 65889 - RNA, 21 nt, synthetic construct
  source 1..21: mol_type = other RNA
acaacaacaaaacacacgggt

SEQ ID NO: 65890 - RNA, 21 nt, synthetic construct
  source 1..21: mol_type = other RNA
acaacaacaaaacatgttttc

SEQ ID NO: 65891 - RNA, 21 nt, synthetic construct
  source 1..21: mol_type = other RNA
acaacaacaaaatacccacaa

SEQ ID NO: 65892 - RNA, 21 nt, synthetic construct
  source 1..21: mol_type = other RNA
acaacaacaacaaaacacacg

SEQ ID NO: 65893 - RNA, 21 nt, synthetic construct
  source 1..21: mol_type = other RNA
acaacaacaacaaaacatgtt

SEQ ID NO: 65894 - RNA, 21 nt, synthetic construct
  source 1..21: mol_type = other RNA
acaacaacaacaaaataccca

SEQ ID NO: 65895 - RNA, 21 nt, synthetic construct
  source 1..21: mol_type = other RNA
acaacaacaacaacaaaacac

SEQ ID NO: 65896 - RNA, 21 nt, synthetic construct
  source 1..21: mol_type = other RNA
acaacaacaacaacaaaacat

SEQ ID NO: 65897 - RNA, 21 nt, synthetic construct
  source 1..21: mol_type = other RNA
acaacacatgcacactagacc

SEQ ID NO: 65898 - RNA, 21 nt, synthetic construct
  source 1..21: mol_type = other RNA
acaacactaaccaacattgag

SEQ ID NO: 65899 - RNA, 21 nt, synthetic construct
  source 1..21: mol_type = other RNA
acaacactcagatatcaatct

SEQ ID NO: 65900 - RNA, 21 nt, synthetic construct
  source 1..21: mol_type = other RNA
acaacagcaaggctcctgcag

SEQ ID NO: 65901 - RNA, 21 nt, synthetic construct
  source 1..21: mol_type = other RNA
acaacagcaccttttttggta

SEQ ID NO: 65902 - RNA, 21 nt, synthetic construct
  source 1..21: mol_type = other RNA
acaacaggcctgagccgtcgg

SEQ ID NO: 65903 - RNA, 21 nt, synthetic construct
  source 1..21: mol_type = other RNA
acaacagtgtgagaccgtgtc

SEQ ID NO: 65904 - RNA, 21 nt, synthetic construct
  source 1..21: mol_type = other RNA
acaacataccaaaacccttgg

SEQ ID NO: 65905 - RNA, 21 nt, synthetic construct
  source 1..21: mol_type = other RNA
acaacatggtagaccatataa

SEQ ID NO: 65906 - RNA, 21 nt, synthetic construct
  source 1..21: mol_type = other RNA
acaacattcatccctctaaat

SEQ ID NO: 65907 - RNA, 21 nt, synthetic construct
  source 1..21: mol_type = other RNA
acaacattgtgcaaccatccc

SEQ ID NO: 65908 - RNA, 21 nt, synthetic construct
  source 1..21: mol_type = other RNA
acaaccactgatggaattctg

SEQ ID NO: 65909 - RNA, 21 nt, synthetic construct
  source 1..21: mol_type = other RNA
acaaccactggggagtgtgcc

SEQ ID NO: 65910 - RNA, 21 nt, synthetic construct
  source 1..21: mol_type = other RNA
acaaccataatgagtaacatg

SEQ ID NO: 65911 - RNA, 21 nt, synthetic construct
  source 1..21: mol_type = other RNA
acaaccggaaaatgcttaaca

SEQ ID NO: 65912 - RNA, 21 nt, synthetic construct
  source 1..21: mol_type = other RNA
acaacctaaatgtccatcgag

SEQ ID NO: 65913 - RNA, 21 nt, synthetic construct
  source 1..21: mol_type = other RNA
acaacctgtctcaaaaataaa

SEQ ID NO: 65914 - RNA, 21 nt, synthetic construct
  source 1..21: mol_type = other RNA
acaacgctgtggctaacaatc

SEQ ID NO: 65915 - RNA, 21 nt, synthetic construct
  source 1..21: mol_type = other RNA
acaactaataattgcttttgc

SEQ ID NO: 65916 - RNA, 21 nt, synthetic construct
  source 1..21: mol_type = other RNA
acaactagtaagtaaaatcgg

SEQ ID NO: 65917 - RNA, 21 nt, synthetic construct
  source 1..21: mol_type = other RNA
acaactcaaacgtccatcaac

SEQ ID NO: 65918 - RNA, 21 nt, synthetic construct
  source 1..21: mol_type = other RNA
acaactctaataacagcctaa

SEQ ID NO: 65919 - RNA, 21 nt, synthetic construct
  source 1..21: mol_type = other RNA
acaactctgaccattgtgtgg

SEQ ID NO: 65920 - RNA, 21 nt, synthetic construct
  source 1..21: mol_type = other RNA
acaactgactctaaagtctat

SEQ ID NO: 65921 - RNA, 21 nt, synthetic construct
  source 1..21: mol_type = other RNA
acaactgctcataatagtctc

SEQ ID NO: 65922 - RNA, 21 nt, synthetic construct
  source 1..21: mol_type = other RNA
acaactgggagaatggcaagg

SEQ ID NO: 65923 - RNA, 21 nt, synthetic construct
  source 1..21: mol_type = other RNA
acaactggtttctgcatactt

SEQ ID NO: 65924 - RNA, 21 nt, synthetic construct
  source 1..21: mol_type = other RNA
acaagaaaaacctaaacctgt

SEQ ID NO: 65925 - RNA, 21 nt, synthetic construct
  source 1..21: mol_type = other RNA
acaagaaaatctgacaatttg

SEQ ID NO: 65926 - RNA, 21 nt, synthetic construct
  source 1..21: mol_type = other RNA
acaagaaagggtagctttgat

SEQ ID NO: 65927 - RNA, 21 nt, synthetic construct
  source 1..21: mol_type = other RNA
acaagaagaaaaagcaacttg

SEQ ID NO: 65928 - RNA, 21 nt, synthetic construct
  source 1..21: mol_type = other RNA
acaagaagctgttttggtaaa

SEQ ID NO: 65929 - RNA, 21 nt, synthetic construct
  source 1..21: mol_type = other RNA
acaagaatcctgctattttat

SEQ ID NO: 65930 - RNA, 21 nt, synthetic construct
  source 1..21: mol_type = other RNA
acaagaatctttggcaaactt

SEQ ID NO: 65931 - RNA, 21 nt, synthetic construct
  source 1..21: mol_type = other RNA
acaagacagatgtgcttaatc

SEQ ID NO: 65932 - RNA, 21 nt, synthetic construct
  source 1..21: mol_type = other RNA
acaagacataagcattttcta

SEQ ID NO: 65933 - RNA, 21 nt, synthetic construct
  source 1..21: mol_type = other RNA
acaagaccagcctgggcaata

SEQ ID NO: 65934 - RNA, 21 nt, synthetic construct
  source 1..21: mol_type = other RNA
acaagacgtgtacataaaata

SEQ ID NO: 65935 - RNA, 21 nt, synthetic construct
  source 1..21: mol_type = other RNA
acaagactacctaaaacaatc

SEQ ID NO: 65936 - RNA, 21 nt, synthetic construct
  source 1..21: mol_type = other RNA
acaagactcaacatgtgtatt

SEQ ID NO: 65937 - RNA, 21 nt, synthetic construct
  source 1..21: mol_type = other RNA
acaagagaggacagttggcct

SEQ ID NO: 65938 - RNA, 21 nt, synthetic construct
  source 1..21: mol_type = other RNA
acaagagcagaactccacctc

SEQ ID NO: 65939 - RNA, 21 nt, synthetic construct
  source 1..21: mol_type = other RNA
acaagagcgtcgtacctttcg

SEQ ID NO: 65940 - RNA, 21 nt, synthetic construct
  source 1..21: mol_type = other RNA
acaagagtctgcagaccaaga

SEQ ID NO: 65941 - RNA, 21 nt, synthetic construct
  source 1..21: mol_type = other RNA
acaagagttcccctatactgt

SEQ ID NO: 65942 - RNA, 21 nt, synthetic construct
  source 1..21: mol_type = other RNA
acaagatctctatgcagaaat

SEQ ID NO: 65943 - RNA, 21 nt, synthetic construct
  source 1..21: mol_type = other RNA
acaagattaatcttgcaaaac

SEQ ID NO: 65944 - RNA, 21 nt, synthetic construct
  source 1..21: mol_type = other RNA
acaagcaaggaagggcttgat

SEQ ID NO: 65945 - RNA, 21 nt, synthetic construct
  source 1..21: mol_type = other RNA
acaagcacagagtcagaaaat

SEQ ID NO: 65946 - RNA, 21 nt, synthetic construct
  source 1..21: mol_type = other RNA
acaagcacaggcatctctcta

SEQ ID NO: 65947 - RNA, 21 nt, synthetic construct
  source 1..21: mol_type = other RNA
acaagccacatgtggttattg

SEQ ID NO: 65948 - RNA, 21 nt, synthetic construct
  source 1..21: mol_type = other RNA
acaagccagggtctgtctcac

SEQ ID NO: 65949 - RNA, 21 nt, synthetic construct
  source 1..21: mol_type = other RNA
acaagccttgaaaatatacta

SEQ ID NO: 65950 - RNA, 21 nt, synthetic construct
  source 1..21: mol_type = other RNA
acaaggaaaggatggtttgat

SEQ ID NO: 65951 - RNA, 21 nt, synthetic construct
  source 1..21: mol_type = other RNA
acaaggaaggtcaaatggtaa

SEQ ID NO: 65952 - RNA, 21 nt, synthetic construct
  source 1..21: mol_type = other RNA
acaaggacaggtcacattctg

SEQ ID NO: 65953 - RNA, 21 nt, synthetic construct
  source 1..21: mol_type = other RNA
acaaggactggcttcagtgcc

SEQ ID NO: 65954 - RNA, 21 nt, synthetic construct
  source 1..21: mol_type = other RNA
acaaggagacctactaaaagt

SEQ ID NO: 65955 - RNA, 21 nt, synthetic construct
  source 1..21: mol_type = other RNA
acaaggattaatctttctgaa

SEQ ID NO: 65956 - RNA, 21 nt, synthetic construct
  source 1..21: mol_type = other RNA
acaaggattgaatggaaagaa

SEQ ID NO: 65957 - RNA, 21 nt, synthetic construct
  source 1..21: mol_type = other RNA
acaaggctagagctcacacga

SEQ ID NO: 65958 - RNA, 21 nt, synthetic construct
  source 1..21: mol_type = other RNA
acaagggaagaggccacaaag

SEQ ID NO: 65959 - RNA, 21 nt, synthetic construct
  source 1..21: mol_type = other RNA
acaagggtgacagagccgagc

SEQ ID NO: 65960 - RNA, 21 nt, synthetic construct
  source 1..21: mol_type = other RNA
acaagggttggtgcttccttc

SEQ ID NO: 65961 - RNA, 21 nt, synthetic construct
  source 1..21: mol_type = other RNA
acaaggtcaagagcggccttt

SEQ ID NO: 65962 - RNA, 21 nt, synthetic construct
  source 1..21: mol_type = other RNA
acaaggtcaatctgaaaaata

SEQ ID NO: 65963 - RNA, 21 nt, synthetic construct
  source 1..21: mol_type = other RNA
acaaggtcagaagtttggaac

SEQ ID NO: 65964 - RNA, 21 nt, synthetic construct
  source 1..21: mol_type = other RNA
acaagtaaatgcaatgcaggc

SEQ ID NO: 65965 - RNA, 21 nt, synthetic construct
  source 1..21: mol_type = other RNA
acaagtacatgaaatactcaa

SEQ ID NO: 65966 - RNA, 21 nt, synthetic construct
  source 1..21: mol_type = other RNA
acaagtactgcatgattcccc

SEQ ID NO: 65967 - RNA, 21 nt, synthetic construct
  source 1..21: mol_type = other RNA
acaagtagcagggactacagt

SEQ ID NO: 65968 - RNA, 21 nt, synthetic construct
  source 1..21: mol_type = other RNA
acaagtagtacaaaagtgctg

SEQ ID NO: 65969 - RNA, 21 nt, synthetic construct
  source 1..21: mol_type = other RNA
acaagtcacaaaaagacaagt

SEQ ID NO: 65970 - RNA, 21 nt, synthetic construct
  source 1..21: mol_type = other RNA
acaagtgggtggatgggtgta

SEQ ID NO: 65971 - RNA, 21 nt, synthetic construct
  source 1..21: mol_type = other RNA
acaagttacaaacatatgcat

SEQ ID NO: 65972 - RNA, 21 nt, synthetic construct
  source 1..21: mol_type = other RNA
acaagttcagcatcttcactg

SEQ ID NO: 65973 - RNA, 21 nt, synthetic construct
  source 1..21: mol_type = other RNA
acaagttctcctgtgtgcatg

SEQ ID NO: 65974 - RNA, 21 nt, synthetic construct
  source 1..21: mol_type = other RNA
acaagttcttacctcaaagga

SEQ ID NO: 65975 - RNA, 21 nt, synthetic construct
  source 1..21: mol_type = other RNA
acaataaatggtgcaggccag

SEQ ID NO: 65976 - RNA, 21 nt, synthetic construct
  source 1..21: mol_type = other RNA
acaataagacaccgctccacg

SEQ ID NO: 65977 - RNA, 21 nt, synthetic construct
  source 1..21: mol_type = other RNA
acaataataactacacatcag

SEQ ID NO: 65978 - RNA, 21 nt, synthetic construct
  source 1..21: mol_type = other RNA
acaataatatgcctcatgcat

SEQ ID NO: 65979 - RNA, 21 nt, synthetic construct
  source 1..21: mol_type = other RNA
acaataatgcacatgggcatg

SEQ ID NO: 65980 - RNA, 21 nt, synthetic construct
  source 1..21: mol_type = other RNA
acaataattcttcctgtcttg

SEQ ID NO: 65981 - RNA, 21 nt, synthetic construct
  source 1..21: mol_type = other RNA
acaatactgcattgtgcactt

SEQ ID NO: 65982 - RNA, 21 nt, synthetic construct
  source 1..21: mol_type = other RNA
acaatactgtctcagtcccaa

SEQ ID NO: 65983 - RNA, 21 nt, synthetic construct
  source 1..21: mol_type = other RNA
acaatactgttatgacaagac

SEQ ID NO: 65984 - RNA, 21 nt, synthetic construct
  source 1..21: mol_type = other RNA
acaatacttggatcttatctg

SEQ ID NO: 65985 - RNA, 21 nt, synthetic construct
  source 1..21: mol_type = other RNA
acaatactttagacatgggct

SEQ ID NO: 65986 - RNA, 21 nt, synthetic construct
  source 1..21: mol_type = other RNA
acaatagcaacaaaacaatct

SEQ ID NO: 65987 - RNA, 21 nt, synthetic construct
  source 1..21: mol_type = other RNA
acaatagcccagcaggatttt

SEQ ID NO: 65988 - RNA, 21 nt, synthetic construct
  source 1..21: mol_type = other RNA
acaatagctagtgtcttagtc

SEQ ID NO: 65989 - RNA, 21 nt, synthetic construct
  source 1..21: mol_type = other RNA
acaataggaatagtattcagg

SEQ ID NO: 65990 - RNA, 21 nt, synthetic construct
  source 1..21: mol_type = other RNA
acaatataggagactatcgtt

SEQ ID NO: 65991 - RNA, 21 nt, synthetic construct
  source 1..21: mol_type = other RNA
acaatattacagtaaggtttc

SEQ ID NO: 65992 - RNA, 21 nt, synthetic construct
  source 1..21: mol_type = other RNA
acaatcaaaccatcctttcct

SEQ ID NO: 65993 - RNA, 21 nt, synthetic construct
  source 1..21: mol_type = other RNA
acaatcaacaggtagctgctt

SEQ ID NO: 65994 - RNA, 21 nt, synthetic construct
  source 1..21: mol_type = other RNA
acaatcatagctcactagagc

SEQ ID NO: 65995 - RNA, 21 nt, synthetic construct
  source 1..21: mol_type = other RNA
acaatccaagtttctagccat

SEQ ID NO: 65996 - RNA, 21 nt, synthetic construct
  source 1..21: mol_type = other RNA
acaatccttctaatcagtaac

SEQ ID NO: 65997 - RNA, 21 nt, synthetic construct
  source 1..21: mol_type = other RNA
acaatcgcaatccaaaatcct

SEQ ID NO: 65998 - RNA, 21 nt, synthetic construct
  source 1..21: mol_type = other RNA
acaatctaattcgaaaatggg

SEQ ID NO: 65999 - RNA, 21 nt, synthetic construct
  source 1..21: mol_type = other RNA
acaatctacagattcaatgca

SEQ ID NO: 66000 - RNA, 21 nt, synthetic construct
  source 1..21: mol_type = other RNA
acaatctctggggttagggcc

SEQ ID NO: 66001 - RNA, 21 nt, synthetic construct
  source 1..21: mol_type = other RNA
acaatcttacccccatcacac

SEQ ID NO: 66002 - RNA, 21 nt, synthetic construct
  source 1..21: mol_type = other RNA
acaatcttgaaaggggccagg

SEQ ID NO: 66003 - RNA, 21 nt, synthetic construct
  source 1..21: mol_type = other RNA
acaatcttgagacggaagact

SEQ ID NO: 66004 - RNA, 21 nt, synthetic construct
  source 1..21: mol_type = other RNA
acaatgaatatgtactaccta

SEQ ID NO: 66005 - RNA, 21 nt, synthetic construct
  source 1..21: mol_type = other RNA
acaatgaattagcaatgcgaa

SEQ ID NO: 66006 - RNA, 21 nt, synthetic construct
  source 1..21: mol_type = other RNA
acaatgagacatttgagggtg

SEQ ID NO: 66007 - RNA, 21 nt, synthetic construct
  source 1..21: mol_type = other RNA
acaatgagaccccatctctac

SEQ ID NO: 66008 - RNA, 21 nt, synthetic construct
  source 1..21: mol_type = other RNA
acaatgcagtattgttaactg

SEQ ID NO: 66009 - RNA, 21 nt, synthetic construct
  source 1..21: mol_type = other RNA
acaatgccagggcgctcctct

SEQ ID NO: 66010 - RNA, 21 nt, synthetic construct
  source 1..21: mol_type = other RNA
acaatgcctgccgcagagcaa

SEQ ID NO: 66011 - RNA, 21 nt, synthetic construct
  source 1..21: mol_type = other RNA
acaatgcgtttgttagatctg

SEQ ID NO: 66012 - RNA, 21 nt, synthetic construct
  source 1..21: mol_type = other RNA
acaatgctgctatgaaaattg

SEQ ID NO: 66013 - RNA, 21 nt, synthetic construct
  source 1..21: mol_type = other RNA
acaatggaaatgaagtattga

SEQ ID NO: 66014 - RNA, 21 nt, synthetic construct
  source 1..21: mol_type = other RNA
acaatggaatagaagggagaa

SEQ ID NO: 66015 - RNA, 21 nt, synthetic construct
  source 1..21: mol_type = other RNA
acaatggaatattactcagtc

SEQ ID NO: 66016 - RNA, 21 nt, synthetic construct
  source 1..21: mol_type = other RNA
acaatggggctttactgtatt

SEQ ID NO: 66017 - RNA, 21 nt, synthetic construct
  source 1..21: mol_type = other RNA
acaatggtcagagttgtatct

SEQ ID NO: 66018 - RNA, 21 nt, synthetic construct
  source 1..21: mol_type = other RNA
acaatgtaaggtgcacgctgt

SEQ ID NO: 66019 - RNA, 21 nt, synthetic construct
  source 1..21: mol_type = other RNA
acaatgtctttggctcttaga

SEQ ID NO: 66020 - RNA, 21 nt, synthetic construct
  source 1..21: mol_type = other RNA
acaatgtgagccacatacata

SEQ ID NO: 66021 - RNA, 21 nt, synthetic construct
  source 1..21: mol_type = other RNA
acaatgtggagttggtgcaag

SEQ ID NO: 66022 - RNA, 21 nt, synthetic construct
  source 1..21: mol_type = other RNA
acaatgttgtggatgtcctta

SEQ ID NO: 66023 - RNA, 21 nt, synthetic construct
  source 1..21: mol_type = other RNA
acaattacacatctcccatac

SEQ ID NO: 66024 - RNA, 21 nt, synthetic construct
  source 1..21: mol_type = other RNA
acaattacttgagagcagaga

SEQ ID NO: 66025 - RNA, 21 nt, synthetic construct
  source 1..21: mol_type = other RNA
acaattagcacctttattaac

SEQ ID NO: 66026 - RNA, 21 nt, synthetic construct
  source 1..21: mol_type = other RNA
acaattaggctgtttgagatc

SEQ ID NO: 66027 - RNA, 21 nt, synthetic construct
  source 1..21: mol_type = other RNA
acaattcaacaatagcaacaa

SEQ ID NO: 66028 - RNA, 21 nt, synthetic construct
  source 1..21: mol_type = other RNA
acaattcaacagctactatga

SEQ ID NO: 66029 - RNA, 21 nt, synthetic construct
  source 1..21: mol_type = other RNA
acaattcacagaatatactca

SEQ ID NO: 66030 - RNA, 21 nt, synthetic construct
  source 1..21: mol_type = other RNA
acaattcctttctaggcatct

SEQ ID NO: 66031 - RNA, 21 nt, synthetic construct
  source 1..21: mol_type = other RNA
acaattcggtggcattaagga

SEQ ID NO: 66032 - RNA, 21 nt, synthetic construct
  source 1..21: mol_type = other RNA
acaattgaatggggatgcaac

SEQ ID NO: 66033 - RNA, 21 nt, synthetic construct
  source 1..21: mol_type = other RNA
acaattgcactccagcctagg

SEQ ID NO: 66034 - RNA, 21 nt, synthetic construct
  source 1..21: mol_type = other RNA
acaattggtgaatctgagtaa

SEQ ID NO: 66035 - RNA, 21 nt, synthetic construct
  source 1..21: mol_type = other RNA
acaatttcagggagaattggt

SEQ ID NO: 66036 - RNA, 21 nt, synthetic construct
  source 1..21: mol_type = other RNA
acaatttgaggtagcacaact

SEQ ID NO: 66037 - RNA, 21 nt, synthetic construct
  source 1..21: mol_type = other RNA
acaattttctctcatgttggg

SEQ ID NO: 66038 - RNA, 21 nt, synthetic construct
  source 1..21: mol_type = other RNA
acaattttcttaccctttact

SEQ ID NO: 66039 - RNA, 21 nt, synthetic construct
  source 1..21: mol_type = other RNA
acacaaaaagatctgtggact

SEQ ID NO: 66040 - RNA, 21 nt, synthetic construct
  source 1..21: mol_type = other RNA
acacaaaacaaatggaaccac

SEQ ID NO: 66041 - RNA, 21 nt, synthetic construct
  source 1..21: mol_type = other RNA
acacaaaagagctgggcccgc

SEQ ID NO: 66042 - RNA, 21 nt, synthetic construct
  source 1..21: mol_type = other RNA
acacaaaatcagatatgaaag

SEQ ID NO: 66043 - RNA, 21 nt, synthetic construct
  source 1..21: mol_type = other RNA
acacaaaccaacaacaaaaaa

SEQ ID NO: 66044 - RNA, 21 nt, synthetic construct
  source 1..21: mol_type = other RNA
acacaaactgcagaatgacag

SEQ ID NO: 66045 - RNA, 21 nt, synthetic construct
  source 1..21: mol_type = other RNA
acacaaagccttctctactct

SEQ ID NO: 66046 - RNA, 21 nt, synthetic construct
  source 1..21: mol_type = other RNA
acacaaaggactggaactcat

SEQ ID NO: 66047 - RNA, 21 nt, synthetic construct
  source 1..21: mol_type = other RNA
acacaaattatgactgagata

SEQ ID NO: 66048 - RNA, 21 nt, synthetic construct
  source 1..21: mol_type = other RNA
acacaacaatgaattctcata

SEQ ID NO: 66049 - RNA, 21 nt, synthetic construct
  source 1..21: mol_type = other RNA
acacaacactcagatatcaat

SEQ ID NO: 66050 - RNA, 21 nt, synthetic construct
  source 1..21: mol_type = other RNA
acacaacataccaaaaccctt

SEQ ID NO: 66051 - RNA, 21 nt, synthetic construct
  source 1..21: mol_type = other RNA
acacaacatgttttatttctg

SEQ ID NO: 66052 - RNA, 21 nt, synthetic construct
  source 1..21: mol_type = other RNA
acacaagatctctatgcagaa

SEQ ID NO: 66053 - RNA, 21 nt, synthetic construct
  source 1..21: mol_type = other RNA
acacaaggaaggtcaaatggt

SEQ ID NO: 66054 - RNA, 21 nt, synthetic construct
  source 1..21: mol_type = other RNA
acacaaggacaggtcacattc

SEQ ID NO: 66055 - RNA, 21 nt, synthetic construct
  source 1..21: mol_type = other RNA
acacaagtattaacgaattct

SEQ ID NO: 66056 - RNA, 21 nt, synthetic construct
  source 1..21: mol_type = other RNA
acacaagtgtttcatttacaa

SEQ ID NO: 66057 - RNA, 21 nt, synthetic construct
  source 1..21: mol_type = other RNA
acacaatccaagtttctagcc

SEQ ID NO: 66058 - RNA, 21 nt, synthetic construct
  source 1..21: mol_type = other RNA
acacaatcttgagacggaaga

SEQ ID NO: 66059 - RNA, 21 nt, synthetic construct
  source 1..21: mol_type = other RNA
acacaatggtcagagttgtat

SEQ ID NO: 66060 - RNA, 21 nt, synthetic construct
  source 1..21: mol_type = other RNA
acacaatttgaggtagcacaa

SEQ ID NO: 66061 - RNA, 21 nt, synthetic construct
  source 1..21: mol_type = other RNA
acacacaaaccaacaacaaaa

SEQ ID NO: 66062 - RNA, 21 nt, synthetic construct
  source 1..21: mol_type = other RNA
acacacaacaatgaattctca

SEQ ID NO: 66063 - RNA, 21 nt, synthetic construct
  source 1..21: mol_type = other RNA
acacacaatccaagtttctag

SEQ ID NO: 66064 - RNA, 21 nt, synthetic construct
  source 1..21: mol_type = other RNA
acacacaatttgaggtagcac

SEQ ID NO: 66065 - RNA, 21 nt, synthetic construct
  source 1..21: mol_type = other RNA
acacacacagtcctgtgtttc

SEQ ID NO: 66066 - RNA, 21 nt, synthetic construct
  source 1..21: mol_type = other RNA
acacacacctaccaccatgct

SEQ ID NO: 66067 - RNA, 21 nt, synthetic construct
  source 1..21: mol_type = other RNA
acacacacctattcataggta

SEQ ID NO: 66068 - RNA, 21 nt, synthetic construct
  source 1..21: mol_type = other RNA
acacacacgtttatattcctt

SEQ ID NO: 66069 - RNA, 21 nt, synthetic construct
  source 1..21: mol_type = other RNA
acacacagtcctgtgtttctg

SEQ ID NO: 66070 - RNA, 21 nt, synthetic construct
  source 1..21: mol_type = other RNA
acacacataagggggaatcta

SEQ ID NO: 66071 - RNA, 21 nt, synthetic construct
  source 1..21: mol_type = other RNA
acacacatcagacacctacat

SEQ ID NO: 66072 - RNA, 21 nt, synthetic construct
  source 1..21: mol_type = other RNA
acacacattagcctagacctc

SEQ ID NO: 66073 - RNA, 21 nt, synthetic construct
  source 1..21: mol_type = other RNA
acacaccaaatcatgaaagtg

SEQ ID NO: 66074 - RNA, 21 nt, synthetic construct
  source 1..21: mol_type = other RNA
acacaccactacacccggcta

SEQ ID NO: 66075 - RNA, 21 nt, synthetic construct
  source 1..21: mol_type = other RNA
acacaccatgacagagttcca

SEQ ID NO: 66076 - RNA, 21 nt, synthetic construct
  source 1..21: mol_type = other RNA
acacacccttggtaaacagca

SEQ ID NO: 66077 - RNA, 21 nt, synthetic construct
  source 1..21: mol_type = other RNA
acacaccctttcttaggaagc

SEQ ID NO: 66078 - RNA, 21 nt, synthetic construct
  source 1..21: mol_type = other RNA
acacacctaccaccatgcttg

SEQ ID NO: 66079 - RNA, 21 nt, synthetic construct
  source 1..21: mol_type = other RNA
acacacctattcataggtaat

SEQ ID NO: 66080 - RNA, 21 nt, synthetic construct
  source 1..21: mol_type = other RNA
acacacctgaaattctcaaat

SEQ ID NO: 66081 - RNA, 21 nt, synthetic construct
  source 1..21: mol_type = other RNA
acacacgagtattcaagtttc

SEQ ID NO: 66082 - RNA, 21 nt, synthetic construct
  source 1..21: mol_type = other RNA
acacacgggctgggcgcgatg

SEQ ID NO: 66083 - RNA, 21 nt, synthetic construct
  source 1..21: mol_type = other RNA
acacacgggtacacatcctaa

SEQ ID NO: 66084 - RNA, 21 nt, synthetic construct
  source 1..21: mol_type = other RNA
acacacgtttatattcctttt

SEQ ID NO: 66085 - RNA, 21 nt, synthetic construct
  source 1..21: mol_type = other RNA
acacactagccactgggtctt

SEQ ID NO: 66086 - RNA, 21 nt, synthetic construct
  source 1..21: mol_type = other RNA
acacactagctgacccactgg

SEQ ID NO: 66087 - RNA, 21 nt, synthetic construct
  source 1..21: mol_type = other RNA
acacactcgtgtatgatttct

SEQ ID NO: 66088 - RNA, 21 nt, synthetic construct
  source 1..21: mol_type = other RNA
acacactgaaacaatcgcaat

SEQ ID NO: 66089 - RNA, 21 nt, synthetic construct
  source 1..21: mol_type = other RNA
acacactgctcttctattcca

SEQ ID NO: 66090 - RNA, 21 nt, synthetic construct
  source 1..21: mol_type = other RNA
acacactgggtaaacaagact

SEQ ID NO: 66091 - RNA, 21 nt, synthetic construct
  source 1..21: mol_type = other RNA
acacagaaagcctcttcagaa

SEQ ID NO: 66092 - RNA, 21 nt, synthetic construct
  source 1..21: mol_type = other RNA
acacagaacactaaaggggat

SEQ ID NO: 66093 - RNA, 21 nt, synthetic construct
  source 1..21: mol_type = other RNA
acacagacatgaacaatcctt

SEQ ID NO: 66094 - RNA, 21 nt, synthetic construct
  source 1..21: mol_type = other RNA
acacagagaacagcattatct

SEQ ID NO: 66095 - RNA, 21 nt, synthetic construct
  source 1..21: mol_type = other RNA
acacagagggagcgccacgtg

SEQ ID NO: 66096 - RNA, 21 nt, synthetic construct
  source 1..21: mol_type = other RNA
acacaggactgtgtgtgtcca

SEQ ID NO: 66097 - RNA, 21 nt, synthetic construct
  source 1..21: mol_type = other RNA
acacaggagaacttgtctcgg

SEQ ID NO: 66098 - RNA, 21 nt, synthetic construct
  source 1..21: mol_type = other RNA
acacaggctgaagggaggaaa

SEQ ID NO: 66099 - RNA, 21 nt, synthetic construct
  source 1..21: mol_type = other RNA
acacagggaaaactacatgta

SEQ ID NO: 66100 - RNA, 21 nt, synthetic construct
  source 1..21: mol_type = other RNA
acacagggactgatgaagaac

SEQ ID NO: 66101 - RNA, 21 nt, synthetic construct
  source 1..21: mol_type = other RNA
acacaggtagacatgtgccat

SEQ ID NO: 66102 - RNA, 21 nt, synthetic construct
  source 1..21: mol_type = other RNA
acacagtacaaggctagagct

SEQ ID NO: 66103 - RNA, 21 nt, synthetic construct
  source 1..21: mol_type = other RNA
acacagtcctgtgtttctgct

SEQ ID NO: 66104 - RNA, 21 nt, synthetic construct
  source 1..21: mol_type = other RNA
acacagtgttgagaaagcaca

SEQ ID NO: 66105 - RNA, 21 nt, synthetic construct
  source 1..21: mol_type = other RNA
acacagttctagttctaataa

SEQ ID NO: 66106 - RNA, 21 nt, synthetic construct
  source 1..21: mol_type = other RNA
acacagtttgagaagccacac

SEQ ID NO: 66107 - RNA, 21 nt, synthetic construct
  source 1..21: mol_type = other RNA
acacataagggggaatctact

SEQ ID NO: 66108 - RNA, 21 nt, synthetic construct
  source 1..21: mol_type = other RNA
acacatacaaaccaaaaaatg

SEQ ID NO: 66109 - RNA, 21 nt, synthetic construct
  source 1..21: mol_type = other RNA
acacatacacagggaaaacta

SEQ ID NO: 66110 - RNA, 21 nt, synthetic construct
  source 1..21: mol_type = other RNA
acacatactgaaagacagacc

SEQ ID NO: 66111 - RNA, 21 nt, synthetic construct
  source 1..21: mol_type = other RNA
acacatatctttaggtgtttt

SEQ ID NO: 66112 - RNA, 21 nt, synthetic construct
  source 1..21: mol_type = other RNA
acacatcagacacctacatta

SEQ ID NO: 66113 - RNA, 21 nt, synthetic construct
  source 1..21: mol_type = other RNA
acacatcagattttgaagatt

SEQ ID NO: 66114 - RNA, 21 nt, synthetic construct
  source 1..21: mol_type = other RNA
acacatcagcgctaagtgcat

SEQ ID NO: 66115 - RNA, 21 nt, synthetic construct
  source 1..21: mol_type = other RNA
acacatcagtgctgctctgac

SEQ ID NO: 66116 - RNA, 21 nt, synthetic construct
  source 1..21: mol_type = other RNA
acacatccacgcgtaagggta

SEQ ID NO: 66117 - RNA, 21 nt, synthetic construct
  source 1..21: mol_type = other RNA
acacatccagaagtcactttt

SEQ ID NO: 66118 - RNA, 21 nt, synthetic construct
  source 1..21: mol_type = other RNA
acacatcctaatacagtaaag

SEQ ID NO: 66119 - RNA, 21 nt, synthetic construct
  source 1..21: mol_type = other RNA
acacatctcccataccacctg

SEQ ID NO: 66120 - RNA, 21 nt, synthetic construct
  source 1..21: mol_type = other RNA
acacatgaacctgcatggtgt

SEQ ID NO: 66121 - RNA, 21 nt, synthetic construct
  source 1..21: mol_type = other RNA
acacatgcacactagaccttt

SEQ ID NO: 66122 - RNA, 21 nt, synthetic construct
  source 1..21: mol_type = other RNA
acacatggcatcggggcctac

SEQ ID NO: 66123 - RNA, 21 nt, synthetic construct
  source 1..21: mol_type = other RNA
acacatggggcattaattttt

SEQ ID NO: 66124 - RNA, 21 nt, synthetic construct
  source 1..21: mol_type = other RNA
acacatgtcagccacaagaca

SEQ ID NO: 66125 - RNA, 21 nt, synthetic construct
  source 1..21: mol_type = other RNA
acacatgtcatgggccgggcg

SEQ ID NO: 66126 - RNA, 21 nt, synthetic construct
  source 1..21: mol_type = other RNA
acacatgttgagtcttgttta

SEQ ID NO: 66127 - RNA, 21 nt, synthetic construct
  source 1..21: mol_type = other RNA
acacattaactatggacatga

SEQ ID NO: 66128 - RNA, 21 nt, synthetic construct
  source 1..21: mol_type = other RNA
acacattagcctagacctcaa

SEQ ID NO: 66129 - RNA, 21 nt, synthetic construct
  source 1..21: mol_type = other RNA
acacattaggctctgggtcag

SEQ ID NO: 66130 - RNA, 21 nt, synthetic construct
  source 1..21: mol_type = other RNA
acacattccagaccagcagtt

SEQ ID NO: 66131 - RNA, 21 nt, synthetic construct
  source 1..21: mol_type = other RNA
acacatttttgacagccacgt

SEQ ID NO: 66132 - RNA, 21 nt, synthetic construct
  source 1..21: mol_type = other RNA
acaccaaaaaagcaccagtta

SEQ ID NO: 66133 - RNA, 21 nt, synthetic construct
  source 1..21: mol_type = other RNA
acaccaaaactacaggcaaca

SEQ ID NO: 66134 - RNA, 21 nt, synthetic construct
  source 1..21: mol_type = other RNA
acaccaaactcaaaaggacat

SEQ ID NO: 66135 - RNA, 21 nt, synthetic construct
  source 1..21: mol_type = other RNA
acaccaaatcatgaaagtgga

SEQ ID NO: 66136 - RNA, 21 nt, synthetic construct
  source 1..21: mol_type = other RNA
acaccaacacaaagccttctc

SEQ ID NO: 66137 - RNA, 21 nt, synthetic construct
  source 1..21: mol_type = other RNA
acaccaacatggcacatgtct

SEQ ID NO: 66138 - RNA, 21 nt, synthetic construct
  source 1..21: mol_type = other RNA
acaccaagacatgttaggttg

SEQ ID NO: 66139 - RNA, 21 nt, synthetic construct
  source 1..21: mol_type = other RNA
acaccaagcaacactaaagat

SEQ ID NO: 66140 - RNA, 21 nt, synthetic construct
  source 1..21: mol_type = other RNA
acaccaaggtttctctccaag

SEQ ID NO: 66141 - RNA, 21 nt, synthetic construct
  source 1..21: mol_type = other RNA
acaccacatccagctaatttt

SEQ ID NO: 66142 - RNA, 21 nt, synthetic construct
  source 1..21: mol_type = other RNA
acaccactacacccggctaat

SEQ ID NO: 66143 - RNA, 21 nt, synthetic construct
  source 1..21: mol_type = other RNA
acaccagaactacacattcca

SEQ ID NO: 66144 - RNA, 21 nt, synthetic construct
  source 1..21: mol_type = other RNA
acaccagatactcatgcttgc

SEQ ID NO: 66145 - RNA, 21 nt, synthetic construct
  source 1..21: mol_type = other RNA
acaccagtaagattctgtctc

SEQ ID NO: 66146 - RNA, 21 nt, synthetic construct
  source 1..21: mol_type = other RNA
acaccatagctgaaggcactg

SEQ ID NO: 66147 - RNA, 21 nt, synthetic construct
  source 1..21: mol_type = other RNA
acaccatgacagagttccacc

SEQ ID NO: 66148 - RNA, 21 nt, synthetic construct
  source 1..21: mol_type = other RNA
acaccatgcaggttcatgtgt

SEQ ID NO: 66149 - RNA, 21 nt, synthetic construct
  source 1..21: mol_type = other RNA
acaccatggcaggtttcaagt

SEQ ID NO: 66150 - RNA, 21 nt, synthetic construct
  source 1..21: mol_type = other RNA
acaccatttagatcatcttat

SEQ ID NO: 66151 - RNA, 21 nt, synthetic construct
  source 1..21: mol_type = other RNA
acacccagtatacacgtattt

SEQ ID NO: 66152 - RNA, 21 nt, synthetic construct
  source 1..21: mol_type = other RNA
acacccagttatctctgccct

SEQ ID NO: 66153 - RNA, 21 nt, synthetic construct
  source 1..21: mol_type = other RNA
acacccagttcaccagtttct

SEQ ID NO: 66154 - RNA, 21 nt, synthetic construct
  source 1..21: mol_type = other RNA
acacccatccacccacttgtc

SEQ ID NO: 66155 - RNA, 21 nt, synthetic construct
  source 1..21: mol_type = other RNA
acacccgaagaggacgatttt

SEQ ID NO: 66156 - RNA, 21 nt, synthetic construct
  source 1..21: mol_type = other RNA
acacccgacccactagtgaag

SEQ ID NO: 66157 - RNA, 21 nt, synthetic construct
  source 1..21: mol_type = other RNA
acacccggctaattaaacaaa

SEQ ID NO: 66158 - RNA, 21 nt, synthetic construct
  source 1..21: mol_type = other RNA
acaccctaggtagggttgggg

SEQ ID NO: 66159 - RNA, 21 nt, synthetic construct
  source 1..21: mol_type = other RNA
acaccctcctaccttccaaag

SEQ ID NO: 66160 - RNA, 21 nt, synthetic construct
  source 1..21: mol_type = other RNA
acaccctgggaaagcctggct

SEQ ID NO: 66161 - RNA, 21 nt, synthetic construct
  source 1..21: mol_type = other RNA
acacccttgaaaatttccagc

SEQ ID NO: 66162 - RNA, 21 nt, synthetic construct
  source 1..21: mol_type = other RNA
acacccttggtaaacagcagt

SEQ ID NO: 66163 - RNA, 21 nt, synthetic construct
  source 1..21: mol_type = other RNA
acaccctttcttaggaagcta

SEQ ID NO: 66164 - RNA, 21 nt, synthetic construct
  source 1..21: mol_type = other RNA
acaccgctccacgcccattag

SEQ ID NO: 66165 - RNA, 21 nt, synthetic construct
  source 1..21: mol_type = other RNA
acaccgctgcattccagcctg

SEQ ID NO: 66166 - RNA, 21 nt, synthetic construct
  source 1..21: mol_type = other RNA
acacctaaagatatgtgtagg

SEQ ID NO: 66167 - RNA, 21 nt, synthetic construct
  source 1..21: mol_type = other RNA
acacctacattaatctcatcc

SEQ ID NO: 66168 - RNA, 21 nt, synthetic construct
  source 1..21: mol_type = other RNA
acacctaccaccatgcttggc

SEQ ID NO: 66169 - RNA, 21 nt, synthetic construct
  source 1..21: mol_type = other RNA
acacctaggcctattttaggc

SEQ ID NO: 66170 - RNA, 21 nt, synthetic construct
  source 1..21: mol_type = other RNA
acacctattcataggtaatac

SEQ ID NO: 66171 - RNA, 21 nt, synthetic construct
  source 1..21: mol_type = other RNA
acacctcaaactagaaaaaga

SEQ ID NO: 66172 - RNA, 21 nt, synthetic construct
  source 1..21: mol_type = other RNA
acacctcagttaaacccaaca

SEQ ID NO: 66173 - RNA, 21 nt, synthetic construct
  source 1..21: mol_type = other RNA
acacctgaaattctcaaatga

SEQ ID NO: 66174 - RNA, 21 nt, synthetic construct
  source 1..21: mol_type = other RNA
acacctgaggggtcttatgct

SEQ ID NO: 66175 - RNA, 21 nt, synthetic construct
  source 1..21: mol_type = other RNA
acacctgcagtggcgtgtgcc

SEQ ID NO: 66176 - RNA, 21 nt, synthetic construct
  source 1..21: mol_type = other RNA
acacctggatcaagtgggatt

SEQ ID NO: 66177 - RNA, 21 nt, synthetic construct
  source 1..21: mol_type = other RNA
acacctggcccctttcaagat

SEQ ID NO: 66178 - RNA, 21 nt, synthetic construct
  source 1..21: mol_type = other RNA
acacctgggtatacagcaaaa

SEQ ID NO: 66179 - RNA, 21 nt, synthetic construct
  source 1..21: mol_type = other RNA
acaccttacactcaaaagcca

SEQ ID NO: 66180 - RNA, 21 nt, synthetic construct
  source 1..21: mol_type = other RNA
acaccttgaacatgaacgaga

SEQ ID NO: 66181 - RNA, 21 nt, synthetic construct
  source 1..21: mol_type = other RNA
acaccttgaactgggacttct

SEQ ID NO: 66182 - RNA, 21 nt, synthetic construct
  source 1..21: mol_type = other RNA
acaccttgggaggctgaggct

SEQ ID NO: 66183 - RNA, 21 nt, synthetic construct
  source 1..21: mol_type = other RNA
acacctttgtattcatccagt

SEQ ID NO: 66184 - RNA, 21 nt, synthetic construct
  source 1..21: mol_type = other RNA
acacgaaaatatccctggggt

SEQ ID NO: 66185 - RNA, 21 nt, synthetic construct
  source 1..21: mol_type = other RNA
acacgagaaggacagcttcca

SEQ ID NO: 66186 - RNA, 21 nt, synthetic construct
  source 1..21: mol_type = other RNA
acacgagtattcaagtttcac

SEQ ID NO: 66187 - RNA, 21 nt, synthetic construct
  source 1..21: mol_type = other RNA
acacgagtgtgtttcgcaaag

SEQ ID NO: 66188 - RNA, 21 nt, synthetic construct
  source 1..21: mol_type = other RNA
acacgcagaaccactgagcac

SEQ ID NO: 66189 - RNA, 21 nt, synthetic construct
  source 1..21: mol_type = other RNA
acacgcattgcattgactacc

SEQ ID NO: 66190 - RNA, 21 nt, synthetic construct
  source 1..21: mol_type = other RNA
acacgccactgcaggtgttgg

SEQ ID NO: 66191 - RNA, 21 nt, synthetic construct
  source 1..21: mol_type = other RNA
acacgccttcgcgggcacctt

SEQ ID NO: 66192 - RNA, 21 nt, synthetic construct
  source 1..21: mol_type = other RNA
acacgctggaagggagcccaa

SEQ ID NO: 66193 - RNA, 21 nt, synthetic construct
  source 1..21: mol_type = other RNA
acacggaaaacattattttct

SEQ ID NO: 66194 - RNA, 21 nt, synthetic construct
  source 1..21: mol_type = other RNA
acacgggctgggcgcgatggc

SEQ ID NO: 66195 - RNA, 21 nt, synthetic construct
  source 1..21: mol_type = other RNA
acacgggtacacatcctaata

SEQ ID NO: 66196 - RNA, 21 nt, synthetic construct
  source 1..21: mol_type = other RNA
acacggtctcacactgttgtc

SEQ ID NO: 66197 - RNA, 21 nt, synthetic construct
  source 1..21: mol_type = other RNA
acacgtcttgtcaataatttg

SEQ ID NO: 66198 - RNA, 21 nt, synthetic construct
  source 1..21: mol_type = other RNA
acacgtggctgtcaaaaatgt

SEQ ID NO: 66199 - RNA, 21 nt, synthetic construct
  source 1..21: mol_type = other RNA
acactaaagatttgccaatca

SEQ ID NO: 66200 - RNA, 21 nt, synthetic construct
  source 1..21: mol_type = other RNA
acactaaaggggatttcatga

SEQ ID NO: 66201 - RNA, 21 nt, synthetic construct
  source 1..21: mol_type = other RNA
acactaaccaacattgagttt

SEQ ID NO: 66202 - RNA, 21 nt, synthetic construct
  source 1..21: mol_type = other RNA
acactaactttctattcccct

SEQ ID NO: 66203 - RNA, 21 nt, synthetic construct
  source 1..21: mol_type = other RNA
acactaagaagatggttggaa

SEQ ID NO: 66204 - RNA, 21 nt, synthetic construct
  source 1..21: mol_type = other RNA
acactaatccttctcatagtc

SEQ ID NO: 66205 - RNA, 21 nt, synthetic construct
  source 1..21: mol_type = other RNA
acactagacctttcttaggtt

SEQ ID NO: 66206 - RNA, 21 nt, synthetic construct
  source 1..21: mol_type = other RNA
acactagcaatccaggatctt

SEQ ID NO: 66207 - RNA, 21 nt, synthetic construct
  source 1..21: mol_type = other RNA
acactagccactgggtcttat

SEQ ID NO: 66208 - RNA, 21 nt, synthetic construct
  source 1..21: mol_type = other RNA
acactagctattgtcttttct

SEQ ID NO: 66209 - RNA, 21 nt, synthetic construct
  source 1..21: mol_type = other RNA
acactagctgacccactggtt

SEQ ID NO: 66210 - RNA, 21 nt, synthetic construct
  source 1..21: mol_type = other RNA
acactagggactggcctcggc

SEQ ID NO: 66211 - RNA, 21 nt, synthetic construct
  source 1..21: mol_type = other RNA
acactagtcaccctacagact

SEQ ID NO: 66212 - RNA, 21 nt, synthetic construct
  source 1..21: mol_type = other RNA
acactataacagatggaactc

SEQ ID NO: 66213 - RNA, 21 nt, synthetic construct
  source 1..21: mol_type = other RNA
acactataagccaatatccct

SEQ ID NO: 66214 - RNA, 21 nt, synthetic construct
  source 1..21: mol_type = other RNA
acactatggcttttgagtgta

SEQ ID NO: 66215 - RNA, 21 nt, synthetic construct
  source 1..21: mol_type = other RNA
acactattgagagtgaaaaca

SEQ ID NO: 66216 - RNA, 21 nt, synthetic construct
  source 1..21: mol_type = other RNA
acactcaaaagccatagtgta

SEQ ID NO: 66217 - RNA, 21 nt, synthetic construct
  source 1..21: mol_type = other RNA
acactcaatacacgtggctgt

SEQ ID NO: 66218 - RNA, 21 nt, synthetic construct
  source 1..21: mol_type = other RNA
acactcagaagtactactcat

SEQ ID NO: 66219 - RNA, 21 nt, synthetic construct
  source 1..21: mol_type = other RNA
acactcagatatcaatctgga

SEQ ID NO: 66220 - RNA, 21 nt, synthetic construct
  source 1..21: mol_type = other RNA
acactcataccaggttttggt

SEQ ID NO: 66221 - RNA, 21 nt, synthetic construct
  source 1..21: mol_type = other RNA
acactcatttcctttcagtcg

SEQ ID NO: 66222 - RNA, 21 nt, synthetic construct
  source 1..21: mol_type = other RNA
acactccagaatgaccgagat

SEQ ID NO: 66223 - RNA, 21 nt, synthetic construct
  source 1..21: mol_type = other RNA
acactccagcatccctccagt

SEQ ID NO: 66224 - RNA, 21 nt, synthetic construct
  source 1..21: mol_type = other RNA
acactccccagtggttgtgga

SEQ ID NO: 66225 - RNA, 21 nt, synthetic construct
  source 1..21: mol_type = other RNA
acactcgcactccacttccca

SEQ ID NO: 66226 - RNA, 21 nt, synthetic construct
  source 1..21: mol_type = other RNA
acactcgtgtatgatttctag

SEQ ID NO: 66227 - RNA, 21 nt, synthetic construct
  source 1..21: mol_type = other RNA
acactctgcaattttaaatgt

SEQ ID NO: 66228 - RNA, 21 nt, synthetic construct
  source 1..21: mol_type = other RNA
acactcttaataactgcctaa

SEQ ID NO: 66229 - RNA, 21 nt, synthetic construct
  source 1..21: mol_type = other RNA
acactcttggtctttctccca

SEQ ID NO: 66230 - RNA, 21 nt, synthetic construct
  source 1..21: mol_type = other RNA
acactgaaacaatcgcaatcc

SEQ ID NO: 66231 - RNA, 21 nt, synthetic construct
  source 1..21: mol_type = other RNA
acactgaagggaattttactg

SEQ ID NO: 66232 - RNA, 21 nt, synthetic construct
  source 1..21: mol_type = other RNA
acactgacaggacagagcagt

SEQ ID NO: 66233 - RNA, 21 nt, synthetic construct
  source 1..21: mol_type = other RNA
acactgattttctgcttctca

SEQ ID NO: 66234 - RNA, 21 nt, synthetic construct
  source 1..21: mol_type = other RNA
acactgcagatgaatgagcaa

SEQ ID NO: 66235 - RNA, 21 nt, synthetic construct
  source 1..21: mol_type = other RNA
acactgctcagaagctttcag

SEQ ID NO: 66236 - RNA, 21 nt, synthetic construct
  source 1..21: mol_type = other RNA
acactgctcctgcctttgttc

SEQ ID NO: 66237 - RNA, 21 nt, synthetic construct
  source 1..21: mol_type = other RNA
acactgctcttctattccaga

SEQ ID NO: 66238 - RNA, 21 nt, synthetic construct
  source 1..21: mol_type = other RNA
acactggaaatcacaggttta

SEQ ID NO: 66239 - RNA, 21 nt, synthetic construct
  source 1..21: mol_type = other RNA
acactggaagtaattgggatc

SEQ ID NO: 66240 - RNA, 21 nt, synthetic construct
  source 1..21: mol_type = other RNA
acactggaggtgcacattcca

SEQ ID NO: 66241 - RNA, 21 nt, synthetic construct
  source 1..21: mol_type = other RNA
acactggcaaaaatcatcata

SEQ ID NO: 66242 - RNA, 21 nt, synthetic construct
  source 1..21: mol_type = other RNA
acactgggtaaacaagactca

SEQ ID NO: 66243 - RNA, 21 nt, synthetic construct
  source 1..21: mol_type = other RNA
acactgggttctcaccaacat

SEQ ID NO: 66244 - RNA, 21 nt, synthetic construct
  source 1..21: mol_type = other RNA
acactggtcactggccactga

SEQ ID NO: 66245 - RNA, 21 nt, synthetic construct
  source 1..21: mol_type = other RNA
acactgtagttcagtttttct

SEQ ID NO: 66246 - RNA, 21 nt, synthetic construct
  source 1..21: mol_type = other RNA
acactgtgttcttttccttct

SEQ ID NO: 66247 - RNA, 21 nt, synthetic construct
  source 1..21: mol_type = other RNA
acactgttctgcgtggttttt

SEQ ID NO: 66248 - RNA, 21 nt, synthetic construct
  source 1..21: mol_type = other RNA
acactgttgatttagaaatac

SEQ ID NO: 66249 - RNA, 21 nt, synthetic construct
  source 1..21: mol_type = other RNA
acactgttgtccaggccagag

SEQ ID NO: 66250 - RNA, 21 nt, synthetic construct
  source 1..21: mol_type = other RNA
acactgtttgattactgtagc

SEQ ID NO: 66251 - RNA, 21 nt, synthetic construct
  source 1..21: mol_type = other RNA
acacttaacatgagatctaaa

SEQ ID NO: 66252 - RNA, 21 nt, synthetic construct
  source 1..21: mol_type = other RNA
acacttactaaatgatctttc

SEQ ID NO: 66253 - RNA, 21 nt, synthetic construct
  source 1..21: mol_type = other RNA
acacttagcatgttgctttgc

SEQ ID NO: 66254 - RNA, 21 nt, synthetic construct
  source 1..21: mol_type = other RNA
acacttagttcaagatgcata

SEQ ID NO: 66255 - RNA, 21 nt, synthetic construct
  source 1..21: mol_type = other RNA
acacttcagtggtaaggactg

SEQ ID NO: 66256 - RNA, 21 nt, synthetic construct
  source 1..21: mol_type = other RNA
acacttccagtacatctcaat

SEQ ID NO: 66257 - RNA, 21 nt, synthetic construct
  source 1..21: mol_type = other RNA
acacttctatccagtgacacc

SEQ ID NO: 66258 - RNA, 21 nt, synthetic construct
  source 1..21: mol_type = other RNA
acacttctgtgatcagaagag

SEQ ID NO: 66259 - RNA, 21 nt, synthetic construct
  source 1..21: mol_type = other RNA
acacttgatggtttggggctt

SEQ ID NO: 66260 - RNA, 21 nt, synthetic construct
  source 1..21: mol_type = other RNA
acacttgcttgggaacagcag

SEQ ID NO: 66261 - RNA, 21 nt, synthetic construct
  source 1..21: mol_type = other RNA
acacttggagttttcccccta

SEQ ID NO: 66262 - RNA, 21 nt, synthetic construct
  source 1..21: mol_type = other RNA
acacttgtgtaactaccactg

SEQ ID NO: 66263 - RNA, 21 nt, synthetic construct
  source 1..21: mol_type = other RNA
acactttccttggagaagagt

SEQ ID NO: 66264 - RNA, 21 nt, synthetic construct
  source 1..21: mol_type = other RNA
acacttttcaaacacttaaca

SEQ ID NO: 66265 - RNA, 21 nt, synthetic construct
  source 1..21: mol_type = other RNA
acacttttcaggtattgagcc

SEQ ID NO: 66266 - RNA, 21 nt, synthetic construct
  source 1..21: mol_type = other RNA
acacttttccagtcttctcat

SEQ ID NO: 66267 - RNA, 21 nt, synthetic construct
  source 1..21: mol_type = other RNA
acactttttgtgagttttaac

SEQ ID NO: 66268 - RNA, 21 nt, synthetic construct
  source 1..21: mol_type = other RNA
acagaaaacccttcatcattt

SEQ ID NO: 66269 - RNA, 21 nt, synthetic construct
  source 1..21: mol_type = other RNA
acagaaacagaaaaatccatc

SEQ ID NO: 66270 - RNA, 21 nt, synthetic construct
  source 1..21: mol_type = other RNA
acagaaaccctgtacccatta

SEQ ID NO: 66271 - RNA, 21 nt, synthetic construct
  source 1..21: mol_type = other RNA
acagaaagcctcttcagaaga

SEQ ID NO: 66272 - RNA, 21 nt, synthetic construct
  source 1..21: mol_type = other RNA
acagaaaggcccaaaaagttt

SEQ ID NO: 66273 - RNA, 21 nt, synthetic construct
  source 1..21: mol_type = other RNA
acagaaataaaacatgttgtg

SEQ ID NO: 66274 - RNA, 21 nt, synthetic construct
  source 1..21: mol_type = other RNA
acagaaatacaatgtgagcca

SEQ ID NO: 66275 - RNA, 21 nt, synthetic construct
  source 1..21: mol_type = other RNA
acagaaatataccttatgtga

SEQ ID NO: 66276 - RNA, 21 nt, synthetic construct
  source 1..21: mol_type = other RNA
acagaaatgaaatggccctta

SEQ ID NO: 66277 - RNA, 21 nt, synthetic construct
  source 1..21: mol_type = other RNA
acagaaattcaacttggtaaa

SEQ ID NO: 66278 - RNA, 21 nt, synthetic construct
  source 1..21: mol_type = other RNA
acagaacaaactcaagttccg

SEQ ID NO: 66279 - RNA, 21 nt, synthetic construct
  source 1..21: mol_type = other RNA
acagaacaaataacaccatag

SEQ ID NO: 66280 - RNA, 21 nt, synthetic construct
  source 1..21: mol_type = other RNA
acagaacactaaaggggattt

SEQ ID NO: 66281 - RNA, 21 nt, synthetic construct
  source 1..21: mol_type = other RNA
acagaaccatgtaacaggttt

SEQ ID NO: 66282 - RNA, 21 nt, synthetic construct
  source 1..21: mol_type = other RNA
acagaactgctaatggtcctt

SEQ ID NO: 66283 - RNA, 21 nt, synthetic construct
  source 1..21: mol_type = other RNA
acagaactgtcactgacacag

SEQ ID NO: 66284 - RNA, 21 nt, synthetic construct
  source 1..21: mol_type = other RNA
acagaagaagaattctatagg

SEQ ID NO: 66285 - RNA, 21 nt, synthetic construct
  source 1..21: mol_type = other RNA
acagaagaagtttctagttat

SEQ ID NO: 66286 - RNA, 21 nt, synthetic construct
  source 1..21: mol_type = other RNA
acagaagacacaaaatcagat

SEQ ID NO: 66287 - RNA, 21 nt, synthetic construct
  source 1..21: mol_type = other RNA
acagaagggtatatacaatat

SEQ ID NO: 66288 - RNA, 21 nt, synthetic construct
  source 1..21: mol_type = other RNA
acagaagtgttttgatagttg

SEQ ID NO: 66289 - RNA, 21 nt, synthetic construct
  source 1..21: mol_type = other RNA
acagaataaaaagtgacttct

SEQ ID NO: 66290 - RNA, 21 nt, synthetic construct
  source 1..21: mol_type = other RNA
acagaatcttactggtgttag

SEQ ID NO: 66291 - RNA, 21 nt, synthetic construct
  source 1..21: mol_type = other RNA
acagaatgttcaagtatttcc

SEQ ID NO: 66292 - RNA, 21 nt, synthetic construct
  source 1..21: mol_type = other RNA
acagaattattgattggcaaa

SEQ ID NO: 66293 - RNA, 21 nt, synthetic construct
  source 1..21: mol_type = other RNA
acagacagacatgcatgcaca

SEQ ID NO: 66294 - RNA, 21 nt, synthetic construct
  source 1..21: mol_type = other RNA
acagacagggaatggggagct

SEQ ID NO: 66295 - RNA, 21 nt, synthetic construct
  source 1..21: mol_type = other RNA
acagacatgaacaatccttct

SEQ ID NO: 66296 - RNA, 21 nt, synthetic construct
  source 1..21: mol_type = other RNA
acagacatgcatgcacacaga

SEQ ID NO: 66297 - RNA, 21 nt, synthetic construct
  source 1..21: mol_type = other RNA
acagacatgccacaccacatc

SEQ ID NO: 66298 - RNA, 21 nt, synthetic construct
  source 1..21: mol_type = other RNA
acagacatttggaatagagag

SEQ ID NO: 66299 - RNA, 21 nt, synthetic construct
  source 1..21: mol_type = other RNA
acagaccctggcttgtgacat

SEQ ID NO: 66300 - RNA, 21 nt, synthetic construct
  source 1..21: mol_type = other RNA
acagacccttatgtccagccc

SEQ ID NO: 66301 - RNA, 21 nt, synthetic construct
  source 1..21: mol_type = other RNA
acagacctctattaaatcatg

SEQ ID NO: 66302 - RNA, 21 nt, synthetic construct
  source 1..21: mol_type = other RNA
acagacctctgaagagtctat

SEQ ID NO: 66303 - RNA, 21 nt, synthetic construct
  source 1..21: mol_type = other RNA
acagacgcaaaggatgtcaac

SEQ ID NO: 66304 - RNA, 21 nt, synthetic construct
  source 1..21: mol_type = other RNA
acagactaatatgagttcctg

SEQ ID NO: 66305 - RNA, 21 nt, synthetic construct
  source 1..21: mol_type = other RNA
acagactcaagcctgataagc

SEQ ID NO: 66306 - RNA, 21 nt, synthetic construct
  source 1..21: mol_type = other RNA
acagactcaataaccacatgt

SEQ ID NO: 66307 - RNA, 21 nt, synthetic construct
  source 1..21: mol_type = other RNA
acagactgagccagcaaatca

SEQ ID NO: 66308 - RNA, 21 nt, synthetic construct
  source 1..21: mol_type = other RNA
acagactgattaatttgaggt

SEQ ID NO: 66309 - RNA, 21 nt, synthetic construct
  source 1..21: mol_type = other RNA
acagactgcagttggattata

SEQ ID NO: 66310 - RNA, 21 nt, synthetic construct
  source 1..21: mol_type = other RNA
acagactgtgccttgatccat

SEQ ID NO: 66311 - RNA, 21 nt, synthetic construct
  source 1..21: mol_type = other RNA
acagagaacagcattatctta

SEQ ID NO: 66312 - RNA, 21 nt, synthetic construct
  source 1..21: mol_type = other RNA
acagagacagagaatctgtct

SEQ ID NO: 66313 - RNA, 21 nt, synthetic construct
  source 1..21: mol_type = other RNA
acagagagagacctttcttta

SEQ ID NO: 66314 - RNA, 21 nt, synthetic construct
  source 1..21: mol_type = other RNA
acagagcaacaacctgtctca

SEQ ID NO: 66315 - RNA, 21 nt, synthetic construct
  source 1..21: mol_type = other RNA
acagagcacagactcaagcct

SEQ ID NO: 66316 - RNA, 21 nt, synthetic construct
  source 1..21: mol_type = other RNA
acagagcagtaggcttagata

SEQ ID NO: 66317 - RNA, 21 nt, synthetic construct
  source 1..21: mol_type = other RNA
acagagccgaaatgcacttag

SEQ ID NO: 66318 - RNA, 21 nt, synthetic construct
  source 1..21: mol_type = other RNA
acagagccgagcagaagggaa

SEQ ID NO: 66319 - RNA, 21 nt, synthetic construct
  source 1..21: mol_type = other RNA
acagagcctaaaataggccta

SEQ ID NO: 66320 - RNA, 21 nt, synthetic construct
  source 1..21: mol_type = other RNA
acagagctagaactagaatac

SEQ ID NO: 66321 - RNA, 21 nt, synthetic construct
  source 1..21: mol_type = other RNA
acagagctccctctccctccc

SEQ ID NO: 66322 - RNA, 21 nt, synthetic construct
  source 1..21: mol_type = other RNA
acagaggattttggattgcga

SEQ ID NO: 66323 - RNA, 21 nt, synthetic construct
  source 1..21: mol_type = other RNA
acagaggcaacagtcattcag

SEQ ID NO: 66324 - RNA, 21 nt, synthetic construct
  source 1..21: mol_type = other RNA
acagaggcatgcacggacttg

SEQ ID NO: 66325 - RNA, 21 nt, synthetic construct
  source 1..21: mol_type = other RNA
acagaggctttttatatttcc

SEQ ID NO: 66326 - RNA, 21 nt, synthetic construct
  source 1..21: mol_type = other RNA
acagagggagcgccacgtgaa

SEQ ID NO: 66327 - RNA, 21 nt, synthetic construct
  source 1..21: mol_type = other RNA
acagagtgaaactctggctca

SEQ ID NO: 66328 - RNA, 21 nt, synthetic construct
  source 1..21: mol_type = other RNA
acagagttcagcttacagtca

SEQ ID NO: 66329 - RNA, 21 nt, synthetic construct
  source 1..21: mol_type = other RNA
acagagttccacctccatcac

SEQ ID NO: 66330 - RNA, 21 nt, synthetic construct
  source 1..21: mol_type = other RNA
acagagttttccaataagtta

SEQ ID NO: 66331 - RNA, 21 nt, synthetic construct
  source 1..21: mol_type = other RNA
acagataaccaataagaagtg

SEQ ID NO: 66332 - RNA, 21 nt, synthetic construct
  source 1..21: mol_type = other RNA
acagataatttcttcagaaga

SEQ ID NO: 66333 - RNA, 21 nt, synthetic construct
  source 1..21: mol_type = other RNA
acagatacaactctgaccatt

SEQ ID NO: 66334 - RNA, 21 nt, synthetic construct
  source 1..21: mol_type = other RNA
acagatatatgcattcccatg

SEQ ID NO: 66335 - RNA, 21 nt, synthetic construct
  source 1..21: mol_type = other RNA
acagatatcacccagaccaag

SEQ ID NO: 66336 - RNA, 21 nt, synthetic construct
  source 1..21: mol_type = other RNA
acagatcccaaaaaggttttt

SEQ ID NO: 66337 - RNA, 21 nt, synthetic construct
  source 1..21: mol_type = other RNA
acagatcctcacatcagttac

SEQ ID NO: 66338 - RNA, 21 nt, synthetic construct
  source 1..21: mol_type = other RNA
acagatctgagaagactaagc

SEQ ID NO: 66339 - RNA, 21 nt, synthetic construct
  source 1..21: mol_type = other RNA
acagatcttatggaatagttg

SEQ ID NO: 66340 - RNA, 21 nt, synthetic construct
  source 1..21: mol_type = other RNA
acagatcttggccgaatgtgg

SEQ ID NO: 66341 - RNA, 21 nt, synthetic construct
  source 1..21: mol_type = other RNA
acagatctttttgtgtatatg

SEQ ID NO: 66342 - RNA, 21 nt, synthetic construct
  source 1..21: mol_type = other RNA
acagatgagaaatacttggac

SEQ ID NO: 66343 - RNA, 21 nt, synthetic construct
  source 1..21: mol_type = other RNA
acagatgagactcttaatatt

SEQ ID NO: 66344 - RNA, 21 nt, synthetic construct
  source 1..21: mol_type = other RNA
acagatggaactctattttcc

SEQ ID NO: 66345 - RNA, 21 nt, synthetic construct
  source 1..21: mol_type = other RNA
acagatggtccttttttactg

SEQ ID NO: 66346 - RNA, 21 nt, synthetic construct
  source 1..21: mol_type = other RNA
acagatgtgagcccccacgcc

SEQ ID NO: 66347 - RNA, 21 nt, synthetic construct
  source 1..21: mol_type = other RNA
acagatgtgcttaatcttcac

SEQ ID NO: 66348 - RNA, 21 nt, synthetic construct
  source 1..21: mol_type = other RNA
acagattaaataccacctgaa

SEQ ID NO: 66349 - RNA, 21 nt, synthetic construct
  source 1..21: mol_type = other RNA
acagattcaatgcaatactta

SEQ ID NO: 66350 - RNA, 21 nt, synthetic construct
  source 1..21: mol_type = other RNA
acagattcacgcacagggaga

SEQ ID NO: 66351 - RNA, 21 nt, synthetic construct
  source 1..21: mol_type = other RNA
acagattctctgtctctgttg

SEQ ID NO: 66352 - RNA, 21 nt, synthetic construct
  source 1..21: mol_type = other RNA
acagcaaaagaattaaactca

SEQ ID NO: 66353 - RNA, 21 nt, synthetic construct
  source 1..21: mol_type = other RNA
acagcaaatctctagaactta

SEQ ID NO: 66354 - RNA, 21 nt, synthetic construct
  source 1..21: mol_type = other RNA
acagcaaggctcctgcagaca

SEQ ID NO: 66355 - RNA, 21 nt, synthetic construct
  source 1..21: mol_type = other RNA
acagcacattaaataagggca

SEQ ID NO: 66356 - RNA, 21 nt, synthetic construct
  source 1..21: mol_type = other RNA
acagcaccttttttggtattt

SEQ ID NO: 66357 - RNA, 21 nt, synthetic construct
  source 1..21: mol_type = other RNA
acagcactgttaactgactta

SEQ ID NO: 66358 - RNA, 21 nt, synthetic construct
  source 1..21: mol_type = other RNA
acagcacttttgtactacttg

SEQ ID NO: 66359 - RNA, 21 nt, synthetic construct
  source 1..21: mol_type = other RNA
acagcagaacaaactgcgtgg

SEQ ID NO: 66360 - RNA, 21 nt, synthetic construct
  source 1..21: mol_type = other RNA
acagcagataagatccaagta

SEQ ID NO: 66361 - RNA, 21 nt, synthetic construct
  source 1..21: mol_type = other RNA
acagcagatctgcttgcagac

SEQ ID NO: 66362 - RNA, 21 nt, synthetic construct
  source 1..21: mol_type = other RNA
acagcagctctagcaaacaaa

SEQ ID NO: 66363 - RNA, 21 nt, synthetic construct
  source 1..21: mol_type = other RNA
acagcaggaaaagctaccctc

SEQ ID NO: 66364 - RNA, 21 nt, synthetic construct
  source 1..21: mol_type = other RNA
acagcagggctcctccaaggc

SEQ ID NO: 66365 - RNA, 21 nt, synthetic construct
  source 1..21: mol_type = other RNA
acagcaggggaaggcttcgag

SEQ ID NO: 66366 - RNA, 21 nt, synthetic construct
  source 1..21: mol_type = other RNA
acagcagtcttaaccattgag

SEQ ID NO: 66367 - RNA, 21 nt, synthetic construct
  source 1..21: mol_type = other RNA
acagcatactgtggatatctt

SEQ ID NO: 66368 - RNA, 21 nt, synthetic construct
  source 1..21: mol_type = other RNA
acagcatatacatgacatggt

SEQ ID NO: 66369 - RNA, 21 nt, synthetic construct
  source 1..21: mol_type = other RNA
acagcatattagctgtctgga

SEQ ID NO: 66370 - RNA, 21 nt, synthetic construct
  source 1..21: mol_type = other RNA
acagcatccccagaaagagag

SEQ ID NO: 66371 - RNA, 21 nt, synthetic construct
  source 1..21: mol_type = other RNA
acagcatgaatacctatttag

SEQ ID NO: 66372 - RNA, 21 nt, synthetic construct
  source 1..21: mol_type = other RNA
acagcattatcttaataacct

SEQ ID NO: 66373 - RNA, 21 nt, synthetic construct
  source 1..21: mol_type = other RNA
acagcatttcagccaaagctg

SEQ ID NO: 66374 - RNA, 21 nt, synthetic construct
  source 1..21: mol_type = other RNA
acagccaaagaaattggacgg

SEQ ID NO: 66375 - RNA, 21 nt, synthetic construct
  source 1..21: mol_type = other RNA
acagccaaataaaacacaagg

SEQ ID NO: 66376 - RNA, 21 nt, synthetic construct
  source 1..21: mol_type = other RNA
acagccacgtgtattgagtgt

SEQ ID NO: 66377 - RNA, 21 nt, synthetic construct
  source 1..21: mol_type = other RNA
acagccagtcagtgatggagg

SEQ ID NO: 66378 - RNA, 21 nt, synthetic construct
  source 1..21: mol_type = other RNA
acagccatcaacctaatgaaa

SEQ ID NO: 66379 - RNA, 21 nt, synthetic construct
  source 1..21: mol_type = other RNA
acagcccctagcatgcagtag

SEQ ID NO: 66380 - RNA, 21 nt, synthetic construct
  source 1..21: mol_type = other RNA
acagccggcatatgtcactgt

SEQ ID NO: 66381 - RNA, 21 nt, synthetic construct
  source 1..21: mol_type = other RNA
acagcctaaaccattttcaat

SEQ ID NO: 66382 - RNA, 21 nt, synthetic construct
  source 1..21: mol_type = other RNA
acagcctaaagtccacagatc

SEQ ID NO: 66383 - RNA, 21 nt, synthetic construct
  source 1..21: mol_type = other RNA
acagcctaagcaaatgtaatg

SEQ ID NO: 66384 - RNA, 21 nt, synthetic construct
  source 1..21: mol_type = other RNA
acagcctaattgtacacctca

SEQ ID NO: 66385 - RNA, 21 nt, synthetic construct
  source 1..21: mol_type = other RNA
acagcgccacttaaaaaatgc

SEQ ID NO: 66386 - RNA, 21 nt, synthetic construct
  source 1..21: mol_type = other RNA
acagcgcccggcccgttattt

SEQ ID NO: 66387 - RNA, 21 nt, synthetic construct
  source 1..21: mol_type = other RNA
acagcggggatggttgcacaa

SEQ ID NO: 66388 - RNA, 21 nt, synthetic construct
  source 1..21: mol_type = other RNA
acagcgtgcaccttacattgt

SEQ ID NO: 66389 - RNA, 21 nt, synthetic construct
  source 1..21: mol_type = other RNA
acagcgtggaatggtcaattt

SEQ ID NO: 66390 - RNA, 21 nt, synthetic construct
  source 1..21: mol_type = other RNA
acagcgttgttcagttgaaaa

SEQ ID NO: 66391 - RNA, 21 nt, synthetic construct
  source 1..21: mol_type = other RNA
acagctaatatgctgtagtga

SEQ ID NO: 66392 - RNA, 21 nt, synthetic construct
  source 1..21: mol_type = other RNA
acagctacactcaatacacgt

SEQ ID NO: 66393 - RNA, 21 nt, synthetic construct
  source 1..21: mol_type = other RNA
acagctacggaggatgagggg

SEQ ID NO: 66394 - RNA, 21 nt, synthetic construct
  source 1..21: mol_type = other RNA
acagctactaaacaaatcaga

SEQ ID NO: 66395 - RNA, 21 nt, synthetic construct
  source 1..21: mol_type = other RNA
acagctactatgaatatactg

SEQ ID NO: 66396 - RNA, 21 nt, synthetic construct
  source 1..21: mol_type = other RNA
acagctaggtgagtgagatgg

SEQ ID NO: 66397 - RNA, 21 nt, synthetic construct
  source 1..21: mol_type = other RNA
acagctatcaggccttccacc

SEQ ID NO: 66398 - RNA, 21 nt, synthetic construct
  source 1..21: mol_type = other RNA
acagctcaattaagcaacctt

SEQ ID NO: 66399 - RNA, 21 nt, synthetic construct
  source 1..21: mol_type = other RNA
acagctcagaagctatagctg

SEQ ID NO: 66400 - RNA, 21 nt, synthetic construct
  source 1..21: mol_type = other RNA
acagctccaaagaacaggagt

SEQ ID NO: 66401 - RNA, 21 nt, synthetic construct
  source 1..21: mol_type = other RNA
acagctctcatgagtcctgaa

SEQ ID NO: 66402 - RNA, 21 nt, synthetic construct
  source 1..21: mol_type = other RNA
acagctcttctcagttgcagc

SEQ ID NO: 66403 - RNA, 21 nt, synthetic construct
  source 1..21: mol_type = other RNA
acagctgagtagcgctttaag

SEQ ID NO: 66404 - RNA, 21 nt, synthetic construct
  source 1..21: mol_type = other RNA
acagctgggagaaagctaatt

SEQ ID NO: 66405 - RNA, 21 nt, synthetic construct
  source 1..21: mol_type = other RNA
acagcttaccaagtgccgcgt

SEQ ID NO: 66406 - RNA, 21 nt, synthetic construct
  source 1..21: mol_type = other RNA
acagcttccacccaagtggag

SEQ ID NO: 66407 - RNA, 21 nt, synthetic construct
  source 1..21: mol_type = other RNA
acagcttcttgttagaatttt

SEQ ID NO: 66408 - RNA, 21 nt, synthetic construct
  source 1..21: mol_type = other RNA
acagcttgacattcttacctt

SEQ ID NO: 66409 - RNA, 21 nt, synthetic construct
  source 1..21: mol_type = other RNA
acagctttcttttccaaccaa

SEQ ID NO: 66410 - RNA, 21 nt, synthetic construct
  source 1..21: mol_type = other RNA
acaggaaagatgtcttttaac

SEQ ID NO: 66411 - RNA, 21 nt, synthetic construct
  source 1..21: mol_type = other RNA
acaggaagaattattgtctgc

SEQ ID NO: 66412 - RNA, 21 nt, synthetic construct
  source 1..21: mol_type = other RNA
acaggaagagactatctcttc

SEQ ID NO: 66413 - RNA, 21 nt, synthetic construct
  source 1..21: mol_type = other RNA
acaggaagaggcagctaagca

SEQ ID NO: 66414 - RNA, 21 nt, synthetic construct
  source 1..21: mol_type = other RNA
acaggaagggagagatgccta

SEQ ID NO: 66415 - RNA, 21 nt, synthetic construct
  source 1..21: mol_type = other RNA
acaggaagttgagaaagaggg

SEQ ID NO: 66416 - RNA, 21 nt, synthetic construct
  source 1..21: mol_type = other RNA
acaggacagagcagtaggctt

SEQ ID NO: 66417 - RNA, 21 nt, synthetic construct
  source 1..21: mol_type = other RNA
acaggactccacagagttcag

SEQ ID NO: 66418 - RNA, 21 nt, synthetic construct
  source 1..21: mol_type = other RNA
acaggactgtgtgtgtccagg

SEQ ID NO: 66419 - RNA, 21 nt, synthetic construct
  source 1..21: mol_type = other RNA
acaggacttttggtacacatc

SEQ ID NO: 66420 - RNA, 21 nt, synthetic construct
  source 1..21: mol_type = other RNA
acaggagaacttgtctcggat

SEQ ID NO: 66421 - RNA, 21 nt, synthetic construct
  source 1..21: mol_type = other RNA
acaggagagcgacagctacgg

SEQ ID NO: 66422 - RNA, 21 nt, synthetic construct
  source 1..21: mol_type = other RNA
acaggagcccaccaccatgcc

SEQ ID NO: 66423 - RNA, 21 nt, synthetic construct
  source 1..21: mol_type = other RNA
acaggagttaccataaaacca

SEQ ID NO: 66424 - RNA, 21 nt, synthetic construct
  source 1..21: mol_type = other RNA
acaggagttccgatttctcgg

SEQ ID NO: 66425 - RNA, 21 nt, synthetic construct
  source 1..21: mol_type = other RNA
acaggatacaaaaagcaccta

SEQ ID NO: 66426 - RNA, 21 nt, synthetic construct
  source 1..21: mol_type = other RNA
acaggatatcagaagtgctga

SEQ ID NO: 66427 - RNA, 21 nt, synthetic construct
  source 1..21: mol_type = other RNA
acaggatccagatgtagagaa

SEQ ID NO: 66428 - RNA, 21 nt, synthetic construct
  source 1..21: mol_type = other RNA
acaggatcccggaacaggaaa

SEQ ID NO: 66429 - RNA, 21 nt, synthetic construct
  source 1..21: mol_type = other RNA
acaggattacaatgtaaggtg

SEQ ID NO: 66430 - RNA, 21 nt, synthetic construct
  source 1..21: mol_type = other RNA
acaggcaaccttgggagaaaa

SEQ ID NO: 66431 - RNA, 21 nt, synthetic construct
  source 1..21: mol_type = other RNA
acaggcataagccaccgcact

SEQ ID NO: 66432 - RNA, 21 nt, synthetic construct
  source 1..21: mol_type = other RNA
acaggcatcggccgggcgtgg

SEQ ID NO: 66433 - RNA, 21 nt, synthetic construct
  source 1..21: mol_type = other RNA
acaggcatctctctaaaaaca

SEQ ID NO: 66434 - RNA, 21 nt, synthetic construct
  source 1..21: mol_type = other RNA
acaggcatgagccactgcggg

SEQ ID NO: 66435 - RNA, 21 nt, synthetic construct
  source 1..21: mol_type = other RNA
acaggcatgagtcgccatacc

SEQ ID NO: 66436 - RNA, 21 nt, synthetic construct
  source 1..21: mol_type = other RNA
acaggcatgcgccatcacacc

SEQ ID NO: 66437 - RNA, 21 nt, synthetic construct
  source 1..21: mol_type = other RNA
acaggccctttgttagtgcct

SEQ ID NO: 66438 - RNA, 21 nt, synthetic construct
  source 1..21: mol_type = other RNA
acaggcctgagccgtcggtat

SEQ ID NO: 66439 - RNA, 21 nt, synthetic construct
  source 1..21: mol_type = other RNA
acaggcgcacgccatctcgcc

SEQ ID NO: 66440 - RNA, 21 nt, synthetic construct
  source 1..21: mol_type = other RNA
acaggcgtgagccaccacgtc

SEQ ID NO: 66441 - RNA, 21 nt, synthetic construct
  source 1..21: mol_type = other RNA
acaggcgtgagccacctcatc

SEQ ID NO: 66442 - RNA, 21 nt, synthetic construct
  source 1..21: mol_type = other RNA
acaggcgttgagccatcatgc

SEQ ID NO: 66443 - RNA, 21 nt, synthetic construct
  source 1..21: mol_type = other RNA
acaggctcaatacctgaaaag

SEQ ID NO: 66444 - RNA, 21 nt, synthetic construct
  source 1..21: mol_type = other RNA
acaggctctcttcaccaactg

SEQ ID NO: 66445 - RNA, 21 nt, synthetic construct
  source 1..21: mol_type = other RNA
acaggctgaagggaggaaaaa

SEQ ID NO: 66446 - RNA, 21 nt, synthetic construct
  source 1..21: mol_type = other RNA
acaggctgagtgcggtggctt

SEQ ID NO: 66447 - RNA, 21 nt, synthetic construct
  source 1..21: mol_type = other RNA
acaggctttcctacaatacag

SEQ ID NO: 66448 - RNA, 21 nt, synthetic construct
  source 1..21: mol_type = other RNA
acaggctttgacttctcaggg

SEQ ID NO: 66449 - RNA, 21 nt, synthetic construct
  source 1..21: mol_type = other RNA
acagggaaaactacatgtaaa

SEQ ID NO: 66450 - RNA, 21 nt, synthetic construct
  source 1..21: mol_type = other RNA
acagggaaccgtaacttcttt

SEQ ID NO: 66451 - RNA, 21 nt, synthetic construct
  source 1..21: mol_type = other RNA
acagggaatgcccctgtagca

SEQ ID NO: 66452 - RNA, 21 nt, synthetic construct
  source 1..21: mol_type = other RNA
acagggaatggggagctagag

SEQ ID NO: 66453 - RNA, 21 nt, synthetic construct
  source 1..21: mol_type = other RNA
acagggactgatgaagaacct

SEQ ID NO: 66454 - RNA, 21 nt, synthetic construct
  source 1..21: mol_type = other RNA
acagggagatacttgattaca

SEQ ID NO: 66455 - RNA, 21 nt, synthetic construct
  source 1..21: mol_type = other RNA
acagggcagggagagagaaac

SEQ ID NO: 66456 - RNA, 21 nt, synthetic construct
  source 1..21: mol_type = other RNA
acagggccactgagagctcag

SEQ ID NO: 66457 - RNA, 21 nt, synthetic construct
  source 1..21: mol_type = other RNA
acagggcccagcctcaacagc

SEQ ID NO: 66458 - RNA, 21 nt, synthetic construct
  source 1..21: mol_type = other RNA
acaggggacatgaaggaagga

SEQ ID NO: 66459 - RNA, 21 nt, synthetic construct
  source 1..21: mol_type = other RNA
acaggggactttgatgtttta

SEQ ID NO: 66460 - RNA, 21 nt, synthetic construct
  source 1..21: mol_type = other RNA
acaggggcattccctgtctgg

SEQ ID NO: 66461 - RNA, 21 nt, synthetic construct
  source 1..21: mol_type = other RNA
acagggtaagattccgtctca

SEQ ID NO: 66462 - RNA, 21 nt, synthetic construct
  source 1..21: mol_type = other RNA
acagggtctacaaaaggtttc

SEQ ID NO: 66463 - RNA, 21 nt, synthetic construct
  source 1..21: mol_type = other RNA
acagggtctcactcttaccaa

SEQ ID NO: 66464 - RNA, 21 nt, synthetic construct
  source 1..21: mol_type = other RNA
acagggtcttgctctgtcacc

SEQ ID NO: 66465 - RNA, 21 nt, synthetic construct
  source 1..21: mol_type = other RNA
acagggttacagtatagggga

SEQ ID NO: 66466 - RNA, 21 nt, synthetic construct
  source 1..21: mol_type = other RNA
acagggttattaacataccga

SEQ ID NO: 66467 - RNA, 21 nt, synthetic construct
  source 1..21: mol_type = other RNA
acagggtttctgtttggatga

SEQ ID NO: 66468 - RNA, 21 nt, synthetic construct
  source 1..21: mol_type = other RNA
acagggttttgttttgttttt

SEQ ID NO: 66469 - RNA, 21 nt, synthetic construct
  source 1..21: mol_type = other RNA
acaggtagacatgagtaaaaa

SEQ ID NO: 66470 - RNA, 21 nt, synthetic construct
  source 1..21: mol_type = other RNA
acaggtagacatgtgccatgt

SEQ ID NO: 66471 - RNA, 21 nt, synthetic construct
  source 1..21: mol_type = other RNA
acaggtagctgctttttaaaa

SEQ ID NO: 66472 - RNA, 21 nt, synthetic construct
  source 1..21: mol_type = other RNA
acaggtataaagtttccgttt

SEQ ID NO: 66473 - RNA, 21 nt, synthetic construct
  source 1..21: mol_type = other RNA
acaggtcaaactcacttatta

SEQ ID NO: 66474 - RNA, 21 nt, synthetic construct
  source 1..21: mol_type = other RNA
acaggtcacattctgcctgca

SEQ ID NO: 66475 - RNA, 21 nt, synthetic construct
  source 1..21: mol_type = other RNA
acaggtcggaaggaatgtgct

SEQ ID NO: 66476 - RNA, 21 nt, synthetic construct
  source 1..21: mol_type = other RNA
acaggtgagtggactgtgagg

SEQ ID NO: 66477 - RNA, 21 nt, synthetic construct
  source 1..21: mol_type = other RNA
acaggtgcttacagactgatt

SEQ ID NO: 66478 - RNA, 21 nt, synthetic construct
  source 1..21: mol_type = other RNA
acaggtggtatgggagatgtg

SEQ ID NO: 66479 - RNA, 21 nt, synthetic construct
  source 1..21: mol_type = other RNA
acaggtgtaagagattaattc

SEQ ID NO: 66480 - RNA, 21 nt, synthetic construct
  source 1..21: mol_type = other RNA
acaggtgtgaaccacgcatct

SEQ ID NO: 66481 - RNA, 21 nt, synthetic construct
  source 1..21: mol_type = other RNA
acaggttcttcatcagtccct

SEQ ID NO: 66482 - RNA, 21 nt, synthetic construct
  source 1..21: mol_type = other RNA
acaggtttaggtttttcttgt

SEQ ID NO: 66483 - RNA, 21 nt, synthetic construct
  source 1..21: mol_type = other RNA
acagtaaagccccattgtaca

SEQ ID NO: 66484 - RNA, 21 nt, synthetic construct
  source 1..21: mol_type = other RNA
acagtaaagtcactgtggaaa

SEQ ID NO: 66485 - RNA, 21 nt, synthetic construct
  source 1..21: mol_type = other RNA
acagtaagatcctggattgct

SEQ ID NO: 66486 - RNA, 21 nt, synthetic construct
  source 1..21: mol_type = other RNA
acagtaaggtttccctgggga

SEQ ID NO: 66487 - RNA, 21 nt, synthetic construct
  source 1..21: mol_type = other RNA
acagtaatcaaacagtgtgat

SEQ ID NO: 66488 - RNA, 21 nt, synthetic construct
  source 1..21: mol_type = other RNA
acagtaattagttacatgagg

SEQ ID NO: 66489 - RNA, 21 nt, synthetic construct
  source 1..21: mol_type = other RNA
acagtaattgtagtttccatg

SEQ ID NO: 66490 - RNA, 21 nt, synthetic construct
  source 1..21: mol_type = other RNA
acagtacaaggctagagctca

SEQ ID NO: 66491 - RNA, 21 nt, synthetic construct
  source 1..21: mol_type = other RNA
acagtacagtagtaaaaccaa

SEQ ID NO: 66492 - RNA, 21 nt, synthetic construct
  source 1..21: mol_type = other RNA
acagtacgcttttatgttata

SEQ ID NO: 66493 - RNA, 21 nt, synthetic construct
  source 1..21: mol_type = other RNA
acagtagaagactcagcagtt

SEQ ID NO: 66494 - RNA, 21 nt, synthetic construct
  source 1..21: mol_type = other RNA
acagtagccaaaggtagaaac

SEQ ID NO: 66495 - RNA, 21 nt, synthetic construct
  source 1..21: mol_type = other RNA
acagtagtaaaaccaaatgtg

SEQ ID NO: 66496 - RNA, 21 nt, synthetic construct
  source 1..21: mol_type = other RNA
acagtataggggaactcttgt

SEQ ID NO: 66497 - RNA, 21 nt, synthetic construct
  source 1..21: mol_type = other RNA
acagtatgcggggtttcagca

SEQ ID NO: 66498 - RNA, 21 nt, synthetic construct
  source 1..21: mol_type = other RNA
acagtatgctgtttacattag

SEQ ID NO: 66499 - RNA, 21 nt, synthetic construct
  source 1..21: mol_type = other RNA
acagtatgtcagactcattgc

SEQ ID NO: 66500 - RNA, 21 nt, synthetic construct
  source 1..21: mol_type = other RNA
acagtattacacagaaagcct

SEQ ID NO: 66501 - RNA, 21 nt, synthetic construct
  source 1..21: mol_type = other RNA
acagtattgtcttctaaccct

SEQ ID NO: 66502 - RNA, 21 nt, synthetic construct
  source 1..21: mol_type = other RNA
acagtattgtgctgaaacccc

SEQ ID NO: 66503 - RNA, 21 nt, synthetic construct
  source 1..21: mol_type = other RNA
acagtcacaaagctttaaact

SEQ ID NO: 66504 - RNA, 21 nt, synthetic construct
  source 1..21: mol_type = other RNA
acagtcacacaccactacacc

SEQ ID NO: 66505 - RNA, 21 nt, synthetic construct
  source 1..21: mol_type = other RNA
acagtcatcacagtccaggaa

SEQ ID NO: 66506 - RNA, 21 nt, synthetic construct
  source 1..21: mol_type = other RNA
acagtcatcctcaacaagaga

SEQ ID NO: 66507 - RNA, 21 nt, synthetic construct
  source 1..21: mol_type = other RNA
acagtcattcaggtctatgtg

SEQ ID NO: 66508 - RNA, 21 nt, synthetic construct
  source 1..21: mol_type = other RNA
acagtccactcacctgtcatg

SEQ ID NO: 66509 - RNA, 21 nt, synthetic construct
  source 1..21: mol_type = other RNA
acagtccaggaacttacagta

SEQ ID NO: 66510 - RNA, 21 nt, synthetic construct
  source 1..21: mol_type = other RNA
acagtcccttgcctgacagca

SEQ ID NO: 66511 - RNA, 21 nt, synthetic construct
  source 1..21: mol_type = other RNA
acagtcctgtgtttctgctat

SEQ ID NO: 66512 - RNA, 21 nt, synthetic construct
  source 1..21: mol_type = other RNA
acagtctcccccaggtggttc

SEQ ID NO: 66513 - RNA, 21 nt, synthetic construct
  source 1..21: mol_type = other RNA
acagtctcgaccccctgggct

SEQ ID NO: 66514 - RNA, 21 nt, synthetic construct
  source 1..21: mol_type = other RNA
acagtctcgtgaatttggtat

SEQ ID NO: 66515 - RNA, 21 nt, synthetic construct
  source 1..21: mol_type = other RNA
acagtctctgcagagcaggct

SEQ ID NO: 66516 - RNA, 21 nt, synthetic construct
  source 1..21: mol_type = other RNA
acagtctgtgcttaaggaaat

SEQ ID NO: 66517 - RNA, 21 nt, synthetic construct
  source 1..21: mol_type = other RNA
acagtgaattctgacttagtg

SEQ ID NO: 66518 - RNA, 21 nt, synthetic construct
  source 1..21: mol_type = other RNA
acagtgacatatgccggctgt

SEQ ID NO: 66519 - RNA, 21 nt, synthetic construct
  source 1..21: mol_type = other RNA
acagtgaccacagtttgaaac

SEQ ID NO: 66520 - RNA, 21 nt, synthetic construct
  source 1..21: mol_type = other RNA
acagtgactttactgttctcc

SEQ ID NO: 66521 - RNA, 21 nt, synthetic construct
  source 1..21: mol_type = other RNA
acagtgagcatgctgcaactg

SEQ ID NO: 66522 - RNA, 21 nt, synthetic construct
  source 1..21: mol_type = other RNA
acagtgaggacgctgatgaca

SEQ ID NO: 66523 - RNA, 21 nt, synthetic construct
  source 1..21: mol_type = other RNA
acagtgagtagaagagtaatg

SEQ ID NO: 66524 - RNA, 21 nt, synthetic construct
  source 1..21: mol_type = other RNA
acagtgcataccaccacattc

SEQ ID NO: 66525 - RNA, 21 nt, synthetic construct
  source 1..21: mol_type = other RNA
acagtgccttcagctatggtg

SEQ ID NO: 66526 - RNA, 21 nt, synthetic construct
  source 1..21: mol_type = other RNA
acagtgctccatagcttccta

SEQ ID NO: 66527 - RNA, 21 nt, synthetic construct
  source 1..21: mol_type = other RNA
acagtgctgtgccagtgcaaa

SEQ ID NO: 66528 - RNA, 21 nt, synthetic construct
  source 1..21: mol_type = other RNA
acagtggcacgattttggctc

SEQ ID NO: 66529 - RNA, 21 nt, synthetic construct
  source 1..21: mol_type = other RNA
acagtggttaggaaaatacat

SEQ ID NO: 66530 - RNA, 21 nt, synthetic construct
  source 1..21: mol_type = other RNA
acagtggttccatttgttttg

SEQ ID NO: 66531 - RNA, 21 nt, synthetic construct
  source 1..21: mol_type = other RNA
acagtgtactagtctccatac

SEQ ID NO: 66532 - RNA, 21 nt, synthetic construct
  source 1..21: mol_type = other RNA
acagtgttgagaaagcacata

SEQ ID NO: 66533 - RNA, 21 nt, synthetic construct
  source 1..21: mol_type = other RNA
acagtgtttacacacctgaaa

SEQ ID NO: 66534 - RNA, 21 nt, synthetic construct
  source 1..21: mol_type = other RNA
acagtgtttagggacgaatgc

SEQ ID NO: 66535 - RNA, 21 nt, synthetic construct
  source 1..21: mol_type = other RNA
acagtgtttttgaattctgct

SEQ ID NO: 66536 - RNA, 21 nt, synthetic construct
  source 1..21: mol_type = other RNA
acagttaacaatactgcattg

SEQ ID NO: 66537 - RNA, 21 nt, synthetic construct
  source 1..21: mol_type = other RNA
acagttaacgtatgaataaac

SEQ ID NO: 66538 - RNA, 21 nt, synthetic construct
  source 1..21: mol_type = other RNA
acagttactttcctttttcaa

SEQ ID NO: 66539 - RNA, 21 nt, synthetic construct
  source 1..21: mol_type = other RNA
acagttatgtcagtcaacaca

SEQ ID NO: 66540 - RNA, 21 nt, synthetic construct
  source 1..21: mol_type = other RNA
acagttattcttcagcaagga

SEQ ID NO: 66541 - RNA, 21 nt, synthetic construct
  source 1..21: mol_type = other RNA
acagttcaatactactgcaaa

SEQ ID NO: 66542 - RNA, 21 nt, synthetic construct
  source 1..21: mol_type = other RNA
acagttctagttctaataaac

SEQ ID NO: 66543 - RNA, 21 nt, synthetic construct
  source 1..21: mol_type = other RNA
acagttctatttctttccatt

SEQ ID NO: 66544 - RNA, 21 nt, synthetic construct
  source 1..21: mol_type = other RNA
acagttctgtgaatttgatta

SEQ ID NO: 66545 - RNA, 21 nt, synthetic construct
  source 1..21: mol_type = other RNA
acagttgctattcaacaggta

SEQ ID NO: 66546 - RNA, 21 nt, synthetic construct
  source 1..21: mol_type = other RNA
acagttggaactcttgcggtc

SEQ ID NO: 66547 - RNA, 21 nt, synthetic construct
  source 1..21: mol_type = other RNA
acagttggccttgaggtgaga

SEQ ID NO: 66548 - RNA, 21 nt, synthetic construct
  source 1..21: mol_type = other RNA
acagtttaaaagtaaattcgc

SEQ ID NO: 66549 - RNA, 21 nt, synthetic construct
  source 1..21: mol_type = other RNA
acagtttacacgccttcgcgg

SEQ ID NO: 66550 - RNA, 21 nt, synthetic construct
  source 1..21: mol_type = other RNA
acagtttagcaatccaaggac

SEQ ID NO: 66551 - RNA, 21 nt, synthetic construct
  source 1..21: mol_type = other RNA
acagtttccctctgagagaag

SEQ ID NO: 66552 - RNA, 21 nt, synthetic construct
  source 1..21: mol_type = other RNA
acagtttgaaactttaagagt

SEQ ID NO: 66553 - RNA, 21 nt, synthetic construct
  source 1..21: mol_type = other RNA
acagtttgagaagccacacag

SEQ ID NO: 66554 - RNA, 21 nt, synthetic construct
  source 1..21: mol_type = other RNA
acagtttggcaatttctcaaa

SEQ ID NO: 66555 - RNA, 21 nt, synthetic construct
  source 1..21: mol_type = other RNA
acagttttgaccaaaacaaaa

SEQ ID NO: 66556 - RNA, 21 nt, synthetic construct
  source 1..21: mol_type = other RNA
acataaaaaaggaatctgggc

SEQ ID NO: 66557 - RNA, 21 nt, synthetic construct
  source 1..21: mol_type = other RNA
acataaaagcgtactgtgatt

SEQ ID NO: 66558 - RNA, 21 nt, synthetic construct
  source 1..21: mol_type = other RNA
acataaaaggatatgggccaa

SEQ ID NO: 66559 - RNA, 21 nt, synthetic construct
  source 1..21: mol_type = other RNA
acataaagtcttgctggaagt

SEQ ID NO: 66560 - RNA, 21 nt, synthetic construct
  source 1..21: mol_type = other RNA
acataaatagggtgctactca

SEQ ID NO: 66561 - RNA, 21 nt, synthetic construct
  source 1..21: mol_type = other RNA
acataaatcacaggaaagatg

SEQ ID NO: 66562 - RNA, 21 nt, synthetic construct
  source 1..21: mol_type = other RNA
acataacttcccagacaggga

SEQ ID NO: 66563 - RNA, 21 nt, synthetic construct
  source 1..21: mol_type = other RNA
acataagggggaatctactct

SEQ ID NO: 66564 - RNA, 21 nt, synthetic construct
  source 1..21: mol_type = other RNA
acataagggtctgttttacat

SEQ ID NO: 66565 - RNA, 21 nt, synthetic construct
  source 1..21: mol_type = other RNA
acataatcaaattcacagaac

SEQ ID NO: 66566 - RNA, 21 nt, synthetic construct
  source 1..21: mol_type = other RNA
acataatctttggtgctgata

SEQ ID NO: 66567 - RNA, 21 nt, synthetic construct
  source 1..21: mol_type = other RNA
acataattgaacccactgagc

SEQ ID NO: 66568 - RNA, 21 nt, synthetic construct
  source 1..21: mol_type = other RNA
acatacaaaccaaaaaatgtg

SEQ ID NO: 66569 - RNA, 21 nt, synthetic construct
  source 1..21: mol_type = other RNA
acatacacagggaaaactaca

SEQ ID NO: 66570 - RNA, 21 nt, synthetic construct
  source 1..21: mol_type = other RNA
acatacacatcagattttgaa

SEQ ID NO: 66571 - RNA, 21 nt, synthetic construct
  source 1..21: mol_type = other RNA
acatacatgagaaatgttaag

SEQ ID NO: 66572 - RNA, 21 nt, synthetic construct
  source 1..21: mol_type = other RNA
acataccaaaacccttgggat

SEQ ID NO: 66573 - RNA, 21 nt, synthetic construct
  source 1..21: mol_type = other RNA
acataccccaaccctacctag

SEQ ID NO: 66574 - RNA, 21 nt, synthetic construct
  source 1..21: mol_type = other RNA
acataccgacggctcaggcct

SEQ ID NO: 66575 - RNA, 21 nt, synthetic construct
  source 1..21: mol_type = other RNA
acataccgagtaatgggatgg

SEQ ID NO: 66576 - RNA, 21 nt, synthetic construct
  source 1..21: mol_type = other RNA
acatactgaaagacagacctc

SEQ ID NO: 66577 - RNA, 21 nt, synthetic construct
  source 1..21: mol_type = other RNA
acatactgcactctcaaaatt

SEQ ID NO: 66578 - RNA, 21 nt, synthetic construct
  source 1..21: mol_type = other RNA
acatactgcatattgaagcca

SEQ ID NO: 66579 - RNA, 21 nt, synthetic construct
  source 1..21: mol_type = other RNA
acatactgtcacaggctttcc

SEQ ID NO: 66580 - RNA, 21 nt, synthetic construct
  source 1..21: mol_type = other RNA
acatacttcaaagggtcacta

SEQ ID NO: 66581 - RNA, 21 nt, synthetic construct
  source 1..21: mol_type = other RNA
acatagaagcgctcttcaagc

SEQ ID NO: 66582 - RNA, 21 nt, synthetic construct
  source 1..21: mol_type = other RNA
acatagacctgaatgactgtt

SEQ ID NO: 66583 - RNA, 21 nt, synthetic construct
  source 1..21: mol_type = other RNA
acatagatgaaactaaatgtg

SEQ ID NO: 66584 - RNA, 21 nt, synthetic construct
  source 1..21: mol_type = other RNA
acatagcaaggaagcagaatg

SEQ ID NO: 66585 - RNA, 21 nt, synthetic construct
  source 1..21: mol_type = other RNA
acataggatagttaaacatgt

SEQ ID NO: 66586 - RNA, 21 nt, synthetic construct
  source 1..21: mol_type = other RNA
acataggcttagtacagccat

SEQ ID NO: 66587 - RNA, 21 nt, synthetic construct
  source 1..21: mol_type = other RNA
acatagtccactttccatctt

SEQ ID NO: 66588 - RNA, 21 nt, synthetic construct
  source 1..21: mol_type = other RNA
acatagtgctcttctgatcac

SEQ ID NO: 66589 - RNA, 21 nt, synthetic construct
  source 1..21: mol_type = other RNA
acatataatccaactgcagtc

SEQ ID NO: 66590 - RNA, 21 nt, synthetic construct
  source 1..21: mol_type = other RNA
acatatagaagtaaatcccgg

SEQ ID NO: 66591 - RNA, 21 nt, synthetic construct
  source 1..21: mol_type = other RNA
acatatcagggatcacagata

SEQ ID NO: 66592 - RNA, 21 nt, synthetic construct
  source 1..21: mol_type = other RNA
acatatccttctacatccccc

SEQ ID NO: 66593 - RNA, 21 nt, synthetic construct
  source 1..21: mol_type = other RNA
acatatctaattaacatccag

SEQ ID NO: 66594 - RNA, 21 nt, synthetic construct
  source 1..21: mol_type = other RNA
acatatgcaggaccaacttta

SEQ ID NO: 66595 - RNA, 21 nt, synthetic construct
  source 1..21: mol_type = other RNA
acatatgcatgttatttgggg

SEQ ID NO: 66596 - RNA, 21 nt, synthetic construct
  source 1..21: mol_type = other RNA
acatatgccggctgttaggta

SEQ ID NO: 66597 - RNA, 21 nt, synthetic construct
  source 1..21: mol_type = other RNA
acatatggcaattccataaat

SEQ ID NO: 66598 - RNA, 21 nt, synthetic construct
  source 1..21: mol_type = other RNA
acatatgtcagatggtaaatt

SEQ ID NO: 66599 - RNA, 21 nt, synthetic construct
  source 1..21: mol_type = other RNA
acatatgttttgcttcgaagc

SEQ ID NO: 66600 - RNA, 21 nt, synthetic construct
  source 1..21: mol_type = other RNA
acatattgaataatttccagg

SEQ ID NO: 66601 - RNA, 21 nt, synthetic construct
  source 1..21: mol_type = other RNA
acatatttatttccttaagcc

SEQ ID NO: 66602 - RNA, 21 nt, synthetic construct
  source 1..21: mol_type = other RNA
acatattttatgctttgtctc

SEQ ID NO: 66603 - RNA, 21 nt, synthetic construct
  source 1..21: mol_type = other RNA
acatcaaagtcccctgtaatt

SEQ ID NO: 66604 - RNA, 21 nt, synthetic construct
  source 1..21: mol_type = other RNA
acatcaagggtggtgctggac

SEQ ID NO: 66605 - RNA, 21 nt, synthetic construct
  source 1..21: mol_type = other RNA
acatcacaatgcgtttgttag

SEQ ID NO: 66606 - RNA, 21 nt, synthetic construct
  source 1..21: mol_type = other RNA
acatcacagacagggaatggg

SEQ ID NO: 66607 - RNA, 21 nt, synthetic construct
  source 1..21: mol_type = other RNA
acatcacccagctcgaccagg

SEQ ID NO: 66608 - RNA, 21 nt, synthetic construct
  source 1..21: mol_type = other RNA
acatcactaagagtgaaaagg

SEQ ID NO: 66609 - RNA, 21 nt, synthetic construct
  source 1..21: mol_type = other RNA
acatcactagctattagagaa

SEQ ID NO: 66610 - RNA, 21 nt, synthetic construct
  source 1..21: mol_type = other RNA
acatcagacacctacattaat

SEQ ID NO: 66611 - RNA, 21 nt, synthetic construct
  source 1..21: mol_type = other RNA
acatcagcagtgaccatattt

SEQ ID NO: 66612 - RNA, 21 nt, synthetic construct
  source 1..21: mol_type = other RNA
acatcagcgctaagtgcattt

SEQ ID NO: 66613 - RNA, 21 nt, synthetic construct
  source 1..21: mol_type = other RNA
acatcagtgctgctctgacgt

SEQ ID NO: 66614 - RNA, 21 nt, synthetic construct
  source 1..21: mol_type = other RNA
acatcagttaccaccaagaaa

SEQ ID NO: 66615 - RNA, 21 nt, synthetic construct
  source 1..21: mol_type = other RNA
acatcatctaatttcccattt

SEQ ID NO: 66616 - RNA, 21 nt, synthetic construct
  source 1..21: mol_type = other RNA
acatcatgatttaatagaggt

SEQ ID NO: 66617 - RNA, 21 nt, synthetic construct
  source 1..21: mol_type = other RNA
acatccacaacattgtgcaac

SEQ ID NO: 66618 - RNA, 21 nt, synthetic construct
  source 1..21: mol_type = other RNA
acatccacagctttcttttcc

SEQ ID NO: 66619 - RNA, 21 nt, synthetic construct
  source 1..21: mol_type = other RNA
acatccacgcgtaagggtaca

SEQ ID NO: 66620 - RNA, 21 nt, synthetic construct
  source 1..21: mol_type = other RNA
acatccagaagtcacttttta

SEQ ID NO: 66621 - RNA, 21 nt, synthetic construct
  source 1..21: mol_type = other RNA
acatccagctaattttcatta

SEQ ID NO: 66622 - RNA, 21 nt, synthetic construct
  source 1..21: mol_type = other RNA
acatccattactcgtggttat

SEQ ID NO: 66623 - RNA, 21 nt, synthetic construct
  source 1..21: mol_type = other RNA
acatcccaagtgcccattaac

SEQ ID NO: 66624 - RNA, 21 nt, synthetic construct
  source 1..21: mol_type = other RNA
acatccccccacccctgctct

SEQ ID NO: 66625 - RNA, 21 nt, synthetic construct
  source 1..21: mol_type = other RNA
acatccctatgcaataactca

SEQ ID NO: 66626 - RNA, 21 nt, synthetic construct
  source 1..21: mol_type = other RNA
acatcctaatacagtaaagcc

SEQ ID NO: 66627 - RNA, 21 nt, synthetic construct
  source 1..21: mol_type = other RNA
acatcctgatttaggccactc

SEQ ID NO: 66628 - RNA, 21 nt, synthetic construct
  source 1..21: mol_type = other RNA
acatccttgccaacagttact

SEQ ID NO: 66629 - RNA, 21 nt, synthetic construct
  source 1..21: mol_type = other RNA
acatcctttaatttgggtttg

SEQ ID NO: 66630 - RNA, 21 nt, synthetic construct
  source 1..21: mol_type = other RNA
acatcctttgcgtctgtgatt

SEQ ID NO: 66631 - RNA, 21 nt, synthetic construct
  source 1..21: mol_type = other RNA
acatcgtaaaacctcatctct

SEQ ID NO: 66632 - RNA, 21 nt, synthetic construct
  source 1..21: mol_type = other RNA
acatctcccataccacctgtc

SEQ ID NO: 66633 - RNA, 21 nt, synthetic construct
  source 1..21: mol_type = other RNA
acatctgagacatcacaatgc

SEQ ID NO: 66634 - RNA, 21 nt, synthetic construct
  source 1..21: mol_type = other RNA
acatctgcctcccgggtccag

SEQ ID NO: 66635 - RNA, 21 nt, synthetic construct
  source 1..21: mol_type = other RNA
acatctggaaggaaacactat

SEQ ID NO: 66636 - RNA, 21 nt, synthetic construct
  source 1..21: mol_type = other RNA
acatctggatcctgtctcaga

SEQ ID NO: 66637 - RNA, 21 nt, synthetic construct
  source 1..21: mol_type = other RNA
acatctggcagcaggggctaa

SEQ ID NO: 66638 - RNA, 21 nt, synthetic construct
  source 1..21: mol_type = other RNA
acatctgtcttgtgcatcctt

SEQ ID NO: 66639 - RNA, 21 nt, synthetic construct
  source 1..21: mol_type = other RNA
acatcttgcataactcgtaat

SEQ ID NO: 66640 - RNA, 21 nt, synthetic construct
  source 1..21: mol_type = other RNA
acatctttcctgtgatttatg

SEQ ID NO: 66641 - RNA, 21 nt, synthetic construct
  source 1..21: mol_type = other RNA
acatgaaatactcaaactatg

SEQ ID NO: 66642 - RNA, 21 nt, synthetic construct
  source 1..21: mol_type = other RNA
acatgaacaagttacaaacat

SEQ ID NO: 66643 - RNA, 21 nt, synthetic construct
  source 1..21: mol_type = other RNA
acatgaacaatccttctaatc

SEQ ID NO: 66644 - RNA, 21 nt, synthetic construct
  source 1..21: mol_type = other RNA
acatgaacctgcatggtgtaa

SEQ ID NO: 66645 - RNA, 21 nt, synthetic construct
  source 1..21: mol_type = other RNA
acatgaacgagaacaaaacaa

SEQ ID NO: 66646 - RNA, 21 nt, synthetic construct
  source 1..21: mol_type = other RNA
acatgaactactcaaagaaaa

SEQ ID NO: 66647 - RNA, 21 nt, synthetic construct
  source 1..21: mol_type = other RNA
acatgaaggaaggattggaat

SEQ ID NO: 66648 - RNA, 21 nt, synthetic construct
  source 1..21: mol_type = other RNA
acatgaagtcctcaatcatgt

SEQ ID NO: 66649 - RNA, 21 nt, synthetic construct
  source 1..21: mol_type = other RNA
acatgaataaccaatgtcaga

SEQ ID NO: 66650 - RNA, 21 nt, synthetic construct
  source 1..21: mol_type = other RNA
acatgaatggaaaattcttgg

SEQ ID NO: 66651 - RNA, 21 nt, synthetic construct
  source 1..21: mol_type = other RNA
acatgacagatcccaaaaagg

SEQ ID NO: 66652 - RNA, 21 nt, synthetic construct
  source 1..21: mol_type = other RNA
acatgacaggtgagtggactg

SEQ ID NO: 66653 - RNA, 21 nt, synthetic construct
  source 1..21: mol_type = other RNA
acatgacatggttttcctact

SEQ ID NO: 66654 - RNA, 21 nt, synthetic construct
  source 1..21: mol_type = other RNA
acatgacctatctattaacag

SEQ ID NO: 66655 - RNA, 21 nt, synthetic construct
  source 1..21: mol_type = other RNA
acatgactggccatccttccc

SEQ ID NO: 66656 - RNA, 21 nt, synthetic construct
  source 1..21: mol_type = other RNA
acatgagaaatgttaagattc

SEQ ID NO: 66657 - RNA, 21 nt, synthetic construct
  source 1..21: mol_type = other RNA
acatgagagaaaattgttcat

SEQ ID NO: 66658 - RNA, 21 nt, synthetic construct
  source 1..21: mol_type = other RNA
acatgagagctaagggaagtt

SEQ ID NO: 66659 - RNA, 21 nt, synthetic construct
  source 1..21: mol_type = other RNA
acatgaggaaagcaggttgca

SEQ ID NO: 66660 - RNA, 21 nt, synthetic construct
  source 1..21: mol_type = other RNA
acatgaggcctctccccttga

SEQ ID NO: 66661 - RNA, 21 nt, synthetic construct
  source 1..21: mol_type = other RNA
acatgaggtcacccaagccac

SEQ ID NO: 66662 - RNA, 21 nt, synthetic construct
  source 1..21: mol_type = other RNA
acatgagtaaaaagaaatctg

SEQ ID NO: 66663 - RNA, 21 nt, synthetic construct
  source 1..21: mol_type = other RNA
acatgattgaggacttcatgt

SEQ ID NO: 66664 - RNA, 21 nt, synthetic construct
  source 1..21: mol_type = other RNA
acatgattgggtcaacaaact

SEQ ID NO: 66665 - RNA, 21 nt, synthetic construct
  source 1..21: mol_type = other RNA
acatgcacaaggtcaagagcg

SEQ ID NO: 66666 - RNA, 21 nt, synthetic construct
  source 1..21: mol_type = other RNA
acatgcacactagacctttct

SEQ ID NO: 66667 - RNA, 21 nt, synthetic construct
  source 1..21: mol_type = other RNA
acatgcacgagaaaagcacag

SEQ ID NO: 66668 - RNA, 21 nt, synthetic construct
  source 1..21: mol_type = other RNA
acatgcatatgtttgtaactt

SEQ ID NO: 66669 - RNA, 21 nt, synthetic construct
  source 1..21: mol_type = other RNA
acatgcatgcacacagaggga

SEQ ID NO: 66670 - RNA, 21 nt, synthetic construct
  source 1..21: mol_type = other RNA
acatgccacaccacatccagc

SEQ ID NO: 66671 - RNA, 21 nt, synthetic construct
  source 1..21: mol_type = other RNA
acatgccagctttggctgaaa

SEQ ID NO: 66672 - RNA, 21 nt, synthetic construct
  source 1..21: mol_type = other RNA
acatgctaagtgtttaggata

SEQ ID NO: 66673 - RNA, 21 nt, synthetic construct
  source 1..21: mol_type = other RNA
acatgctctgataggataatg

SEQ ID NO: 66674 - RNA, 21 nt, synthetic construct
  source 1..21: mol_type = other RNA
acatgctcttaagtatttttg

SEQ ID NO: 66675 - RNA, 21 nt, synthetic construct
  source 1..21: mol_type = other RNA
acatgctgaggccccagggga

SEQ ID NO: 66676 - RNA, 21 nt, synthetic construct
  source 1..21: mol_type = other RNA
acatgcttagccttccagaga

SEQ ID NO: 66677 - RNA, 21 nt, synthetic construct
  source 1..21: mol_type = other RNA
acatgcttccaaaagcaggcc

SEQ ID NO: 66678 - RNA, 21 nt, synthetic construct
  source 1..21: mol_type = other RNA
acatggaaacaacctaaatgt

SEQ ID NO: 66679 - RNA, 21 nt, synthetic construct
  source 1..21: mol_type = other RNA
acatggagacagtgagcatgc

SEQ ID NO: 66680 - RNA, 21 nt, synthetic construct
  source 1..21: mol_type = other RNA
acatggatatttggccgggcg

SEQ ID NO: 66681 - RNA, 21 nt, synthetic construct
  source 1..21: mol_type = other RNA
acatggcacatgtctacctgt

SEQ ID NO: 66682 - RNA, 21 nt, synthetic construct
  source 1..21: mol_type = other RNA
acatggcatcggggcctacag

SEQ ID NO: 66683 - RNA, 21 nt, synthetic construct
  source 1..21: mol_type = other RNA
acatggccagtatctcctttc

SEQ ID NO: 66684 - RNA, 21 nt, synthetic construct
  source 1..21: mol_type = other RNA
acatggcttagaaatgaagat

SEQ ID NO: 66685 - RNA, 21 nt, synthetic construct
  source 1..21: mol_type = other RNA
acatgggaatgcatatatctg

SEQ ID NO: 66686 - RNA, 21 nt, synthetic construct
  source 1..21: mol_type = other RNA
acatgggcatgggtccaagac

SEQ ID NO: 66687 - RNA, 21 nt, synthetic construct
  source 1..21: mol_type = other RNA
acatgggctaaataaaacatt

SEQ ID NO: 66688 - RNA, 21 nt, synthetic construct
  source 1..21: mol_type = other RNA
acatggtaatttgtccatctg

SEQ ID NO: 66689 - RNA, 21 nt, synthetic construct
  source 1..21: mol_type = other RNA
acatggtagaccatataatct

SEQ ID NO: 66690 - RNA, 21 nt, synthetic construct
  source 1..21: mol_type = other RNA
acatggtccacagaggctttt

SEQ ID NO: 66691 - RNA, 21 nt, synthetic construct
  source 1..21: mol_type = other RNA
acatggtgataactggtgctt

SEQ ID NO: 66692 - RNA, 21 nt, synthetic construct
  source 1..21: mol_type = other RNA
acatggttctgtgctagatgc

SEQ ID NO: 66693 - RNA, 21 nt, synthetic construct
  source 1..21: mol_type = other RNA
acatggtttgatcccactagt

SEQ ID NO: 66694 - RNA, 21 nt, synthetic construct
  source 1..21: mol_type = other RNA
acatggttttcctactaacaa

SEQ ID NO: 66695 - RNA, 21 nt, synthetic construct
  source 1..21: mol_type = other RNA
acatgtaaaaactgtttggct

SEQ ID NO: 66696 - RNA, 21 nt, synthetic construct
  source 1..21: mol_type = other RNA
acatgtaaaacagacccttat

SEQ ID NO: 66697 - RNA, 21 nt, synthetic construct
  source 1..21: mol_type = other RNA
acatgtacgccaattttcata

SEQ ID NO: 66698 - RNA, 21 nt, synthetic construct
  source 1..21: mol_type = other RNA
acatgtagatatgggagtccc

SEQ ID NO: 66699 - RNA, 21 nt, synthetic construct
  source 1..21: mol_type = other RNA
acatgtagttttccctgtgta

SEQ ID NO: 66700 - RNA, 21 nt, synthetic construct
  source 1..21: mol_type = other RNA
acatgtatgtttctcattctt

SEQ ID NO: 66701 - RNA, 21 nt, synthetic construct
  source 1..21: mol_type = other RNA
acatgtcagccacaagacata

SEQ ID NO: 66702 - RNA, 21 nt, synthetic construct
  source 1..21: mol_type = other RNA
acatgtcatgggccgggcgta

SEQ ID NO: 66703 - RNA, 21 nt, synthetic construct
  source 1..21: mol_type = other RNA
acatgtcatgttcccggattg

SEQ ID NO: 66704 - RNA, 21 nt, synthetic construct
  source 1..21: mol_type = other RNA
acatgtcttggtgtgctcttt

SEQ ID NO: 66705 - RNA, 21 nt, synthetic construct
  source 1..21: mol_type = other RNA
acatgtgaggatttatttctg

SEQ ID NO: 66706 - RNA, 21 nt, synthetic construct
  source 1..21: mol_type = other RNA
acatgtggaacataatctttg

SEQ ID NO: 66707 - RNA, 21 nt, synthetic construct
  source 1..21: mol_type = other RNA
acatgtggcttgtggctacac

SEQ ID NO: 66708 - RNA, 21 nt, synthetic construct
  source 1..21: mol_type = other RNA
acatgtggttattgagtctgt

SEQ ID NO: 66709 - RNA, 21 nt, synthetic construct
  source 1..21: mol_type = other RNA
acatgtgtaaaacatctggaa

SEQ ID NO: 66710 - RNA, 21 nt, synthetic construct
  source 1..21: mol_type = other RNA
acatgtgtatttagggagcat

SEQ ID NO: 66711 - RNA, 21 nt, synthetic construct
  source 1..21: mol_type = other RNA
acatgtgttttatttaggccc

SEQ ID NO: 66712 - RNA, 21 nt, synthetic construct
  source 1..21: mol_type = other RNA
acatgttactcattatggttg

SEQ ID NO: 66713 - RNA, 21 nt, synthetic construct
  source 1..21: mol_type = other RNA
acatgttagattaggaaacag

SEQ ID NO: 66714 - RNA, 21 nt, synthetic construct
  source 1..21: mol_type = other RNA
acatgttaggttgaaagttca

SEQ ID NO: 66715 - RNA, 21 nt, synthetic construct
  source 1..21: mol_type = other RNA
acatgttccctagaacttaaa

SEQ ID NO: 66716 - RNA, 21 nt, synthetic construct
  source 1..21: mol_type = other RNA
acatgttgagtcttgtttacc

SEQ ID NO: 66717 - RNA, 21 nt, synthetic construct
  source 1..21: mol_type = other RNA
acatgttgtgtagaaatgtgg

SEQ ID NO: 66718 - RNA, 21 nt, synthetic construct
  source 1..21: mol_type = other RNA
acatgtttaactatcctatgt

SEQ ID NO: 66719 - RNA, 21 nt, synthetic construct
  source 1..21: mol_type = other RNA
acatgtttagcaagattactg

SEQ ID NO: 66720 - RNA, 21 nt, synthetic construct
  source 1..21: mol_type = other RNA
acatgtttggtcaattgatct

SEQ ID NO: 66721 - RNA, 21 nt, synthetic construct
  source 1..21: mol_type = other RNA
acattaaagacagctactaaa

SEQ ID NO: 66722 - RNA, 21 nt, synthetic construct
  source 1..21: mol_type = other RNA
acattaaataagggcattttc

SEQ ID NO: 66723 - RNA, 21 nt, synthetic construct
  source 1..21: mol_type = other RNA
acattaactatggacatgagg

SEQ ID NO: 66724 - RNA, 21 nt, synthetic construct
  source 1..21: mol_type = other RNA
acattaaggaagaattaacac

SEQ ID NO: 66725 - RNA, 21 nt, synthetic construct
  source 1..21: mol_type = other RNA
acattaagggaaacagggtta

SEQ ID NO: 66726 - RNA, 21 nt, synthetic construct
  source 1..21: mol_type = other RNA
acattaataagatcatacacc

SEQ ID NO: 66727 - RNA, 21 nt, synthetic construct
  source 1..21: mol_type = other RNA
acattaatctcatccacaatg

SEQ ID NO: 66728 - RNA, 21 nt, synthetic construct
  source 1..21: mol_type = other RNA
acattacaacagcaaggctcc

SEQ ID NO: 66729 - RNA, 21 nt, synthetic construct
  source 1..21: mol_type = other RNA
acattacaattgataccatga

SEQ ID NO: 66730 - RNA, 21 nt, synthetic construct
  source 1..21: mol_type = other RNA
acattacagaaaaaattagcc

SEQ ID NO: 66731 - RNA, 21 nt, synthetic construct
  source 1..21: mol_type = other RNA
acattaccaataaaagcctca

SEQ ID NO: 66732 - RNA, 21 nt, synthetic construct
  source 1..21: mol_type = other RNA
acattagaatcatccggggag

SEQ ID NO: 66733 - RNA, 21 nt, synthetic construct
  source 1..21: mol_type = other RNA
acattagagaagaatgagaaa

SEQ ID NO: 66734 - RNA, 21 nt, synthetic construct
  source 1..21: mol_type = other RNA
acattagccactctgaattct

SEQ ID NO: 66735 - RNA, 21 nt, synthetic construct
  source 1..21: mol_type = other RNA
acattagcctagacctcaaat

SEQ ID NO: 66736 - RNA, 21 nt, synthetic construct
  source 1..21: mol_type = other RNA
acattaggctctgggtcagaa

SEQ ID NO: 66737 - RNA, 21 nt, synthetic construct
  source 1..21: mol_type = other RNA
acattagtggaaaaactgcag

SEQ ID NO: 66738 - RNA, 21 nt, synthetic construct
  source 1..21: mol_type = other RNA
acattagtggtggtagtaagg

SEQ ID NO: 66739 - RNA, 21 nt, synthetic construct
  source 1..21: mol_type = other RNA
acattatcctatcagagcatg

SEQ ID NO: 66740 - RNA, 21 nt, synthetic construct
  source 1..21: mol_type = other RNA
acattatcttctaccttttgt

SEQ ID NO: 66741 - RNA, 21 nt, synthetic construct
  source 1..21: mol_type = other RNA
acattattcttacagtgacat

SEQ ID NO: 66742 - RNA, 21 nt, synthetic construct
  source 1..21: mol_type = other RNA
acattcaacaacatggatgaa

SEQ ID NO: 66743 - RNA, 21 nt, synthetic construct
  source 1..21: mol_type = other RNA
acattcaagcagaaatgagtt

SEQ ID NO: 66744 - RNA, 21 nt, synthetic construct
  source 1..21: mol_type = other RNA
acattcacagcgtgcacctta

SEQ ID NO: 66745 - RNA, 21 nt, synthetic construct
  source 1..21: mol_type = other RNA
acattcagaggtatttggggc

SEQ ID NO: 66746 - RNA, 21 nt, synthetic construct
  source 1..21: mol_type = other RNA
acattcatccctctaaatagg

SEQ ID NO: 66747 - RNA, 21 nt, synthetic construct
  source 1..21: mol_type = other RNA
acattcattcatgacaagaat

SEQ ID NO: 66748 - RNA, 21 nt, synthetic construct
  source 1..21: mol_type = other RNA
acattccaagagaggaataaa

SEQ ID NO: 66749 - RNA, 21 nt, synthetic construct
  source 1..21: mol_type = other RNA
acattccagaccagcagttca

SEQ ID NO: 66750 - RNA, 21 nt, synthetic construct
  source 1..21: mol_type = other RNA
acattcccaaatgtcttaaga

SEQ ID NO: 66751 - RNA, 21 nt, synthetic construct
  source 1..21: mol_type = other RNA
acattccttccgacctgtaga

SEQ ID NO: 66752 - RNA, 21 nt, synthetic construct
  source 1..21: mol_type = other RNA
acattccttcttcacacatta

SEQ ID NO: 66753 - RNA, 21 nt, synthetic construct
  source 1..21: mol_type = other RNA
acattcggccaagatctgttt

SEQ ID NO: 66754 - RNA, 21 nt, synthetic construct
  source 1..21: mol_type = other RNA
acattctacagtattacacag

SEQ ID NO: 66755 - RNA, 21 nt, synthetic construct
  source 1..21: mol_type = other RNA
acattctagtgatgggagatg

SEQ ID NO: 66756 - RNA, 21 nt, synthetic construct
  source 1..21: mol_type = other RNA
acattctgcctgcagactgca

SEQ ID NO: 66757 - RNA, 21 nt, synthetic construct
  source 1..21: mol_type = other RNA
acattctgcttccttgctatg

SEQ ID NO: 66758 - RNA, 21 nt, synthetic construct
  source 1..21: mol_type = other RNA
acattcttaccttctaaaatc

SEQ ID NO: 66759 - RNA, 21 nt, synthetic construct
  source 1..21: mol_type = other RNA
acattcttcaccattccagcc

SEQ ID NO: 66760 - RNA, 21 nt, synthetic construct
  source 1..21: mol_type = other RNA
acattgaaggcagaattatag

SEQ ID NO: 66761 - RNA, 21 nt, synthetic construct
  source 1..21: mol_type = other RNA
acattgagtttcaatgacttt

SEQ ID NO: 66762 - RNA, 21 nt, synthetic construct
  source 1..21: mol_type = other RNA
acattgatacaatacttggat

SEQ ID NO: 66763 - RNA, 21 nt, synthetic construct
  source 1..21: mol_type = other RNA
acattgcacagtctcccccag

SEQ ID NO: 66764 - RNA, 21 nt, synthetic construct
  source 1..21: mol_type = other RNA
acattgcctccatatgggatg

SEQ ID NO: 66765 - RNA, 21 nt, synthetic construct
  source 1..21: mol_type = other RNA
acattgccttcaagttgcttt

SEQ ID NO: 66766 - RNA, 21 nt, synthetic construct
  source 1..21: mol_type = other RNA
acattgccttcgcagggtgaa

SEQ ID NO: 66767 - RNA, 21 nt, synthetic construct
  source 1..21: mol_type = other RNA
acattggaggataatatctgg

SEQ ID NO: 66768 - RNA, 21 nt, synthetic construct
  source 1..21: mol_type = other RNA
acattggttattcatgtttgt

SEQ ID NO: 66769 - RNA, 21 nt, synthetic construct
  source 1..21: mol_type = other RNA
acattggtttgaaatgatctt

SEQ ID NO: 66770 - RNA, 21 nt, synthetic construct
  source 1..21: mol_type = other RNA
acattgtaatcctgtttctct

SEQ ID NO: 66771 - RNA, 21 nt, synthetic construct
  source 1..21: mol_type = other RNA
acattgtatttctgttagatg

SEQ ID NO: 66772 - RNA, 21 nt, synthetic construct
  source 1..21: mol_type = other RNA
acattgtcttacataggctta

SEQ ID NO: 66773 - RNA, 21 nt, synthetic construct
  source 1..21: mol_type = other RNA
acattgtgcaaccatccccgc

SEQ ID NO: 66774 - RNA, 21 nt, synthetic construct
  source 1..21: mol_type = other RNA
acatttaaaagaaaatggcca

SEQ ID NO: 66775 - RNA, 21 nt, synthetic construct
  source 1..21: mol_type = other RNA
acatttaaaattgcagagtgt

SEQ ID NO: 66776 - RNA, 21 nt, synthetic construct
  source 1..21: mol_type = other RNA
acatttaagaagggaacacta

SEQ ID NO: 66777 - RNA, 21 nt, synthetic construct
  source 1..21: mol_type = other RNA
acatttagtttcatctatgtc

SEQ ID NO: 66778 - RNA, 21 nt, synthetic construct
  source 1..21: mol_type = other RNA
acatttatacagttggaactc

SEQ ID NO: 66779 - RNA, 21 nt, synthetic construct
  source 1..21: mol_type = other RNA
acatttatggaattgccatat

SEQ ID NO: 66780 - RNA, 21 nt, synthetic construct
  source 1..21: mol_type = other RNA
acatttcatagcagaatggcc

SEQ ID NO: 66781 - RNA, 21 nt, synthetic construct
  source 1..21: mol_type = other RNA
acatttcgccttctcagaagg

SEQ ID NO: 66782 - RNA, 21 nt, synthetic construct
  source 1..21: mol_type = other RNA
acatttctaatttccaagaac

SEQ ID NO: 66783 - RNA, 21 nt, synthetic construct
  source 1..21: mol_type = other RNA
acatttctacacaacatgttt

SEQ ID NO: 66784 - RNA, 21 nt, synthetic construct
  source 1..21: mol_type = other RNA
acatttctcatactttgtcag

SEQ ID NO: 66785 - RNA, 21 nt, synthetic construct
  source 1..21: mol_type = other RNA
acatttcttctagtcacattt

SEQ ID NO: 66786 - RNA, 21 nt, synthetic construct
  source 1..21: mol_type = other RNA
acatttgaaagaaagaaggcc

SEQ ID NO: 66787 - RNA, 21 nt, synthetic construct
  source 1..21: mol_type = other RNA
acatttgaactcactggccag

SEQ ID NO: 66788 - RNA, 21 nt, synthetic construct
  source 1..21: mol_type = other RNA
acatttgagggtgctgatcag

SEQ ID NO: 66789 - RNA, 21 nt, synthetic construct
  source 1..21: mol_type = other RNA
acatttgcttaggctgttatt

SEQ ID NO: 66790 - RNA, 21 nt, synthetic construct
  source 1..21: mol_type = other RNA
acatttgctttactactgcat

SEQ ID NO: 66791 - RNA, 21 nt, synthetic construct
  source 1..21: mol_type = other RNA
acatttgcttttcctggaaaa

SEQ ID NO: 66792 - RNA, 21 nt, synthetic construct
  source 1..21: mol_type = other RNA
acatttggaatagagagccca

SEQ ID NO: 66793 - RNA, 21 nt, synthetic construct
  source 1..21: mol_type = other RNA
acatttgggaatgtggtcaca

SEQ ID NO: 66794 - RNA, 21 nt, synthetic construct
  source 1..21: mol_type = other RNA
acatttggttttactactgta

SEQ ID NO: 66795 - RNA, 21 nt, synthetic construct
  source 1..21: mol_type = other RNA
acatttgttgcatccccattc

SEQ ID NO: 66796 - RNA, 21 nt, synthetic construct
  source 1..21: mol_type = other RNA
acattttaccaaaacagcttc

SEQ ID NO: 66797 - RNA, 21 nt, synthetic construct
  source 1..21: mol_type = other RNA
acattttagctggggcagcaa

SEQ ID NO: 66798 - RNA, 21 nt, synthetic construct
  source 1..21: mol_type = other RNA
acattttattaggtgcacaca

SEQ ID NO: 66799 - RNA, 21 nt, synthetic construct
  source 1..21: mol_type = other RNA
acattttatttatacaggtgc

SEQ ID NO: 66800 - RNA, 21 nt, synthetic construct
  source 1..21: mol_type = other RNA
acattttccctcctttttatc

SEQ ID NO: 66801 - RNA, 21 nt, synthetic construct
  source 1..21: mol_type = other RNA
acattttctctacagttaaca

SEQ ID NO: 66802 - RNA, 21 nt, synthetic construct
  source 1..21: mol_type = other RNA
acattttcttatctaggcgaa

SEQ ID NO: 66803 - RNA, 21 nt, synthetic construct
  source 1..21: mol_type = other RNA
acattttgaatcatgggagcc

SEQ ID NO: 66804 - RNA, 21 nt, synthetic construct
  source 1..21: mol_type = other RNA
acattttgagttattgcatag

SEQ ID NO: 66805 - RNA, 21 nt, synthetic construct
  source 1..21: mol_type = other RNA
acattttgtgacaagttcagc

SEQ ID NO: 66806 - RNA, 21 nt, synthetic construct
  source 1..21: mol_type = other RNA
acattttgttcattcatctgt

SEQ ID NO: 66807 - RNA, 21 nt, synthetic construct
  source 1..21: mol_type = other RNA
acatttttgacagccacgtgt

SEQ ID NO: 66808 - RNA, 21 nt, synthetic construct
  source 1..21: mol_type = other RNA
acattttttgcagagacgggg

SEQ ID NO: 66809 - RNA, 21 nt, synthetic construct
  source 1..21: mol_type = other RNA
acattttttggtttgtatgtg

SEQ ID NO: 66810 - RNA, 21 nt, synthetic construct
  source 1..21: mol_type = other RNA
accaaaaaactacgagtatca

SEQ ID NO: 66811 - RNA, 21 nt, synthetic construct
  source 1..21: mol_type = other RNA
accaaaaaagcaccagttatc

SEQ ID NO: 66812 - RNA, 21 nt, synthetic construct
  source 1..21: mol_type = other RNA
accaaaaaaggtgctgttgta

SEQ ID NO: 66813 - RNA, 21 nt, synthetic construct
  source 1..21: mol_type = other RNA
accaaaaaatgtggcatatca

SEQ ID NO: 66814 - RNA, 21 nt, synthetic construct
  source 1..21: mol_type = other RNA
accaaaaaccacatttcatag

SEQ ID NO: 66815 - RNA, 21 nt, synthetic construct
  source 1..21: mol_type = other RNA
accaaaacaaaaaacaaaccc

SEQ ID NO: 66816 - RNA, 21 nt, synthetic construct
  source 1..21: mol_type = other RNA
accaaaacagcttcttgttag

SEQ ID NO: 66817 - RNA, 21 nt, synthetic construct
  source 1..21: mol_type = other RNA
accaaaacccttgggatgcag

SEQ ID NO: 66818 - RNA, 21 nt, synthetic construct
  source 1..21: mol_type = other RNA
accaaaacctggtatgagtgt

SEQ ID NO: 66819 - RNA, 21 nt, synthetic construct
  source 1..21: mol_type = other RNA
accaaaagtcctgttcttttg

SEQ ID NO: 66820 - RNA, 21 nt, synthetic construct
  source 1..21: mol_type = other RNA
accaaaatggagacccatact

SEQ ID NO: 66821 - RNA, 21 nt, synthetic construct
  source 1..21: mol_type = other RNA
accaaacaccttacactcaaa

SEQ ID NO: 66822 - RNA, 21 nt, synthetic construct
  source 1..21: mol_type = other RNA
accaaacactggaaatcacag

SEQ ID NO: 66823 - RNA, 21 nt, synthetic construct
  source 1..21: mol_type = other RNA
accaaacatgtgaggatttat

SEQ ID NO: 66824 - RNA, 21 nt, synthetic construct
  source 1..21: mol_type = other RNA
accaaacattgaaggcagaat

SEQ ID NO: 66825 - RNA, 21 nt, synthetic construct
  source 1..21: mol_type = other RNA
accaaacgtttagatgaatga

SEQ ID NO: 66826 - RNA, 21 nt, synthetic construct
  source 1..21: mol_type = other RNA
accaaactcaaaaggacatat

SEQ ID NO: 66827 - RNA, 21 nt, synthetic construct
  source 1..21: mol_type = other RNA
accaaacttggtttattttct

SEQ ID NO: 66828 - RNA, 21 nt, synthetic construct
  source 1..21: mol_type = other RNA
accaaagaaaggggaaggaat

SEQ ID NO: 66829 - RNA, 21 nt, synthetic construct
  source 1..21: mol_type = other RNA
accaaagacttcaggaacacc

SEQ ID NO: 66830 - RNA, 21 nt, synthetic construct
  source 1..21: mol_type = other RNA
accaaagattatgttccacat

SEQ ID NO: 66831 - RNA, 21 nt, synthetic construct
  source 1..21: mol_type = other RNA
accaaagatttactaaactga

SEQ ID NO: 66832 - RNA, 21 nt, synthetic construct
  source 1..21: mol_type = other RNA
accaaagcagaaatacagacc

SEQ ID NO: 66833 - RNA, 21 nt, synthetic construct
  source 1..21: mol_type = other RNA
accaaatcatgaaagtggaga

SEQ ID NO: 66834 - RNA, 21 nt, synthetic construct
  source 1..21: mol_type = other RNA
accaaatgcagaaaataaacc

SEQ ID NO: 66835 - RNA, 21 nt, synthetic construct
  source 1..21: mol_type = other RNA
accaaatgtggatagtgcttt

SEQ ID NO: 66836 - RNA, 21 nt, synthetic construct
  source 1..21: mol_type = other RNA
accaaattcacgagactgtta

SEQ ID NO: 66837 - RNA, 21 nt, synthetic construct
  source 1..21: mol_type = other RNA
accaacacaaagccttctcta

SEQ ID NO: 66838 - RNA, 21 nt, synthetic construct
  source 1..21: mol_type = other RNA
accaacacctgcagtggcgtg

SEQ ID NO: 66839 - RNA, 21 nt, synthetic construct
  source 1..21: mol_type = other RNA
accaacagatcctcacatcag

SEQ ID NO: 66840 - RNA, 21 nt, synthetic construct
  source 1..21: mol_type = other RNA
accaacatccacagctttctt

SEQ ID NO: 66841 - RNA, 21 nt, synthetic construct
  source 1..21: mol_type = other RNA
accaacatggcacatgtctac

SEQ ID NO: 66842 - RNA, 21 nt, synthetic construct
  source 1..21: mol_type = other RNA
accaacattgagtttcaatga

SEQ ID NO: 66843 - RNA, 21 nt, synthetic construct
  source 1..21: mol_type = other RNA
accaacccttgttggacagct

SEQ ID NO: 66844 - RNA, 21 nt, synthetic construct
  source 1..21: mol_type = other RNA
accaactccacattgtcttaa

SEQ ID NO: 66845 - RNA, 21 nt, synthetic construct
  source 1..21: mol_type = other RNA
accaactgaagcggggctgcc

SEQ ID NO: 66846 - RNA, 21 nt, synthetic construct
  source 1..21: mol_type = other RNA
accaagaaaaagcagagaaac

SEQ ID NO: 66847 - RNA, 21 nt, synthetic construct
  source 1..21: mol_type = other RNA
accaagaaaggacttcagtcc

SEQ ID NO: 66848 - RNA, 21 nt, synthetic construct
  source 1..21: mol_type = other RNA
accaagaacaaccttatctat

SEQ ID NO: 66849 - RNA, 21 nt, synthetic construct
  source 1..21: mol_type = other RNA
accaagaattttccattcatg

SEQ ID NO: 66850 - RNA, 21 nt, synthetic construct
  source 1..21: mol_type = other RNA
accaagacatgttaggttgaa

SEQ ID NO: 66851 - RNA, 21 nt, synthetic construct
  source 1..21: mol_type = other RNA
accaagagcatagactttaga

SEQ ID NO: 66852 - RNA, 21 nt, synthetic construct
  source 1..21: mol_type = other RNA
accaagagtgtggctttaagg

SEQ ID NO: 66853 - RNA, 21 nt, synthetic construct
  source 1..21: mol_type = other RNA
accaagcaacactaaagattt

SEQ ID NO: 66854 - RNA, 21 nt, synthetic construct
  source 1..21: mol_type = other RNA
accaagcaagtaaaagaagat

SEQ ID NO: 66855 - RNA, 21 nt, synthetic construct
  source 1..21: mol_type = other RNA
accaagcccaactttttcttt

SEQ ID NO: 66856 - RNA, 21 nt, synthetic construct
  source 1..21: mol_type = other RNA
accaagcccggcacggtggct

SEQ ID NO: 66857 - RNA, 21 nt, synthetic construct
  source 1..21: mol_type = other RNA
accaagccctgccttaaaaca

SEQ ID NO: 66858 - RNA, 21 nt, synthetic construct
  source 1..21: mol_type = other RNA
accaaggctaagttgagaaac

SEQ ID NO: 66859 - RNA, 21 nt, synthetic construct
  source 1..21: mol_type = other RNA
accaaggctggagtgcagtgg

SEQ ID NO: 66860 - RNA, 21 nt, synthetic construct
  source 1..21: mol_type = other RNA
accaagggtgtgtttaatttc

SEQ ID NO: 66861 - RNA, 21 nt, synthetic construct
  source 1..21: mol_type = other RNA
accaaggtttctctccaaggt

SEQ ID NO: 66862 - RNA, 21 nt, synthetic construct
  source 1..21: mol_type = other RNA
accaagtgccgcgttttttgt

SEQ ID NO: 66863 - RNA, 21 nt, synthetic construct
  source 1..21: mol_type = other RNA
accaagttactagaagcactt

SEQ ID NO: 66864 - RNA, 21 nt, synthetic construct
  source 1..21: mol_type = other RNA
accaagttgaatttctgtcct

SEQ ID NO: 66865 - RNA, 21 nt, synthetic construct
  source 1..21: mol_type = other RNA
accaagtttaaccaattatgc

SEQ ID NO: 66866 - RNA, 21 nt, synthetic construct
  source 1..21: mol_type = other RNA
accaagtttggttcatttcag

SEQ ID NO: 66867 - RNA, 21 nt, synthetic construct
  source 1..21: mol_type = other RNA
accaataaaagcctcatttga

SEQ ID NO: 66868 - RNA, 21 nt, synthetic construct
  source 1..21: mol_type = other RNA
accaataagaagtgaaaaatg

SEQ ID NO: 66869 - RNA, 21 nt, synthetic construct
  source 1..21: mol_type = other RNA
accaatcgcagggccattctg

SEQ ID NO: 66870 - RNA, 21 nt, synthetic construct
  source 1..21: mol_type = other RNA
accaatgtcagagatctgaaa

SEQ ID NO: 66871 - RNA, 21 nt, synthetic construct
  source 1..21: mol_type = other RNA
accaatgttctcttttcctcg

SEQ ID NO: 66872 - RNA, 21 nt, synthetic construct
  source 1..21: mol_type = other RNA
accaattaccataaagtcttc

SEQ ID NO: 66873 - RNA, 21 nt, synthetic construct
  source 1..21: mol_type = other RNA
accaattatgctgagtgaatg

SEQ ID NO: 66874 - RNA, 21 nt, synthetic construct
  source 1..21: mol_type = other RNA
accaattctccctgaaattgt

SEQ ID NO: 66875 - RNA, 21 nt, synthetic construct
  source 1..21: mol_type = other RNA
accaattgttaacatttcttc

SEQ ID NO: 66876 - RNA, 21 nt, synthetic construct
  source 1..21: mol_type = other RNA
accaatttaccatctgacata

SEQ ID NO: 66877 - RNA, 21 nt, synthetic construct
  source 1..21: mol_type = other RNA
accacaaacatgaataaccaa

SEQ ID NO: 66878 - RNA, 21 nt, synthetic construct
  source 1..21: mol_type = other RNA
accacaaggattaatctttct

SEQ ID NO: 66879 - RNA, 21 nt, synthetic construct
  source 1..21: mol_type = other RNA
accacaatcttacccccatca

SEQ ID NO: 66880 - RNA, 21 nt, synthetic construct
  source 1..21: mol_type = other RNA
accacacagagaacagcatta

SEQ ID NO: 66881 - RNA, 21 nt, synthetic construct
  source 1..21: mol_type = other RNA
accacactgacaggacagagc

SEQ ID NO: 66882 - RNA, 21 nt, synthetic construct
  source 1..21: mol_type = other RNA
accacacttgcttgggaacag

SEQ ID NO: 66883 - RNA, 21 nt, synthetic construct
  source 1..21: mol_type = other RNA
accacagagcctaaaataggc

SEQ ID NO: 66884 - RNA, 21 nt, synthetic construct
  source 1..21: mol_type = other RNA
accacaggctctcttcaccaa

SEQ ID NO: 66885 - RNA, 21 nt, synthetic construct
  source 1..21: mol_type = other RNA
accacagtttgaaactttaag

SEQ ID NO: 66886 - RNA, 21 nt, synthetic construct
  source 1..21: mol_type = other RNA
accacatccagctaattttca

SEQ ID NO: 66887 - RNA, 21 nt, synthetic construct
  source 1..21: mol_type = other RNA
accacatgtggcttgtggcta

SEQ ID NO: 66888 - RNA, 21 nt, synthetic construct
  source 1..21: mol_type = other RNA
accacattcccaaatgtctta

SEQ ID NO: 66889 - RNA, 21 nt, synthetic construct
  source 1..21: mol_type = other RNA
accacattcggccaagatctg

SEQ ID NO: 66890 - RNA, 21 nt, synthetic construct
  source 1..21: mol_type = other RNA
accacatttcatagcagaatg

SEQ ID NO: 66891 - RNA, 21 nt, synthetic construct
  source 1..21: mol_type = other RNA
accacattttgttcattcatc

SEQ ID NO: 66892 - RNA, 21 nt, synthetic construct
  source 1..21: mol_type = other RNA
accaccaagaaaaagcagaga

SEQ ID NO: 66893 - RNA, 21 nt, synthetic construct
  source 1..21: mol_type = other RNA
accaccacacttgcttgggaa

SEQ ID NO: 66894 - RNA, 21 nt, synthetic construct
  source 1..21: mol_type = other RNA
accaccacattcggccaagat

SEQ ID NO: 66895 - RNA, 21 nt, synthetic construct
  source 1..21: mol_type = other RNA
accaccactaatgtcacattt

SEQ ID NO: 66896 - RNA, 21 nt, synthetic construct
  source 1..21: mol_type = other RNA
accacccgtccaatttctttg

SEQ ID NO: 66897 - RNA, 21 nt, synthetic construct
  source 1..21: mol_type = other RNA
accacccttgatgtcacaagc

SEQ ID NO: 66898 - RNA, 21 nt, synthetic construct
  source 1..21: mol_type = other RNA
accacctaactactaataaat

SEQ ID NO: 66899 - RNA, 21 nt, synthetic construct
  source 1..21: mol_type = other RNA
accacctgaaatctgatttgt

SEQ ID NO: 66900 - RNA, 21 nt, synthetic construct
  source 1..21: mol_type = other RNA
accacctgggggagactgtgc

SEQ ID NO: 66901 - RNA, 21 nt, synthetic construct
  source 1..21: mol_type = other RNA
accacctgtcagaaacaccaa

SEQ ID NO: 66902 - RNA, 21 nt, synthetic construct
  source 1..21: mol_type = other RNA
accacgagtaatggatgtttt

SEQ ID NO: 66903 - RNA, 21 nt, synthetic construct
  source 1..21: mol_type = other RNA
accacgcagaacagtgtttac

SEQ ID NO: 66904 - RNA, 21 nt, synthetic construct
  source 1..21: mol_type = other RNA
accacgcagtttgttctgctg

SEQ ID NO: 66905 - RNA, 21 nt, synthetic construct
  source 1..21: mol_type = other RNA
accacgcatctggtctatctc

SEQ ID NO: 66906 - RNA, 21 nt, synthetic construct
  source 1..21: mol_type = other RNA
accacgtccggtcgttggatt

SEQ ID NO: 66907 - RNA, 21 nt, synthetic construct
  source 1..21: mol_type = other RNA
accactaaggtcaacacatca

SEQ ID NO: 66908 - RNA, 21 nt, synthetic construct
  source 1..21: mol_type = other RNA
accactaatgtcacattttct

SEQ ID NO: 66909 - RNA, 21 nt, synthetic construct
  source 1..21: mol_type = other RNA
accactacacccggctaatta

SEQ ID NO: 66910 - RNA, 21 nt, synthetic construct
  source 1..21: mol_type = other RNA
accactagagtattacctatg

SEQ ID NO: 66911 - RNA, 21 nt, synthetic construct
  source 1..21: mol_type = other RNA
accactagcaaactactgata

SEQ ID NO: 66912 - RNA, 21 nt, synthetic construct
  source 1..21: mol_type = other RNA
accactataatccagatggac

SEQ ID NO: 66913 - RNA, 21 nt, synthetic construct
  source 1..21: mol_type = other RNA
accactatctaataaaatagc

SEQ ID NO: 66914 - RNA, 21 nt, synthetic construct
  source 1..21: mol_type = other RNA
accactccaccttagcccaag

SEQ ID NO: 66915 - RNA, 21 nt, synthetic construct
  source 1..21: mol_type = other RNA
accactcccggccgtattttt

SEQ ID NO: 66916 - RNA, 21 nt, synthetic construct
  source 1..21: mol_type = other RNA
accactgaaacttttcttttc

SEQ ID NO: 66917 - RNA, 21 nt, synthetic construct
  source 1..21: mol_type = other RNA
accactgaagtgttgagaggc

SEQ ID NO: 66918 - RNA, 21 nt, synthetic construct
  source 1..21: mol_type = other RNA
accactgaatcagattttaaa

SEQ ID NO: 66919 - RNA, 21 nt, synthetic construct
  source 1..21: mol_type = other RNA
accactgagagggaagtttat

SEQ ID NO: 66920 - RNA, 21 nt, synthetic construct
  source 1..21: mol_type = other RNA
accactgagcacaatgcctgc

SEQ ID NO: 66921 - RNA, 21 nt, synthetic construct
  source 1..21: mol_type = other RNA
accactgaggtcaagaaataa

SEQ ID NO: 66922 - RNA, 21 nt, synthetic construct
  source 1..21: mol_type = other RNA
accactgatggaattctgaca

SEQ ID NO: 66923 - RNA, 21 nt, synthetic construct
  source 1..21: mol_type = other RNA
accactggatacggaaatata

SEQ ID NO: 66924 - RNA, 21 nt, synthetic construct
  source 1..21: mol_type = other RNA
accactggggagtgtgcccaa

SEQ ID NO: 66925 - RNA, 21 nt, synthetic construct
  source 1..21: mol_type = other RNA
accactgtaggccccgatgcc

SEQ ID NO: 66926 - RNA, 21 nt, synthetic construct
  source 1..21: mol_type = other RNA
accactgttatctgggaacag

SEQ ID NO: 66927 - RNA, 21 nt, synthetic construct
  source 1..21: mol_type = other RNA
accacttagtttgcaatacag

SEQ ID NO: 66928 - RNA, 21 nt, synthetic construct
  source 1..21: mol_type = other RNA
accacttcgagaagggaagta

SEQ ID NO: 66929 - RNA, 21 nt, synthetic construct
  source 1..21: mol_type = other RNA
accagaaaagtgaaacaataa

SEQ ID NO: 66930 - RNA, 21 nt, synthetic construct
  source 1..21: mol_type = other RNA
accagaactacacattccaga

SEQ ID NO: 66931 - RNA, 21 nt, synthetic construct
  source 1..21: mol_type = other RNA
accagacaaaaatagaggatg

SEQ ID NO: 66932 - RNA, 21 nt, synthetic construct
  source 1..21: mol_type = other RNA
accagacatttctcatacttt

SEQ ID NO: 66933 - RNA, 21 nt, synthetic construct
  source 1..21: mol_type = other RNA
accagaccctttatcggataa

SEQ ID NO: 66934 - RNA, 21 nt, synthetic construct
  source 1..21: mol_type = other RNA
accagagattgggaaaatctt

SEQ ID NO: 66935 - RNA, 21 nt, synthetic construct
  source 1..21: mol_type = other RNA
accagagcggaatttttatat

SEQ ID NO: 66936 - RNA, 21 nt, synthetic construct
  source 1..21: mol_type = other RNA
accagaggttaaagcaacagg

SEQ ID NO: 66937 - RNA, 21 nt, synthetic construct
  source 1..21: mol_type = other RNA
accagatactcaatcagtggc

SEQ ID NO: 66938 - RNA, 21 nt, synthetic construct
  source 1..21: mol_type = other RNA
accagatactcatgcttgctc

SEQ ID NO: 66939 - RNA, 21 nt, synthetic construct
  source 1..21: mol_type = other RNA
accagatcaaacgtgctttcc

SEQ ID NO: 66940 - RNA, 21 nt, synthetic construct
  source 1..21: mol_type = other RNA
accagatgcgtggttcacacc

SEQ ID NO: 66941 - RNA, 21 nt, synthetic construct
  source 1..21: mol_type = other RNA
accagcagttcaagcaccact

SEQ ID NO: 66942 - RNA, 21 nt, synthetic construct
  source 1..21: mol_type = other RNA
accagcataagacccctcagg

SEQ ID NO: 66943 - RNA, 21 nt, synthetic construct
  source 1..21: mol_type = other RNA
accagcatcttttgacgcgca

SEQ ID NO: 66944 - RNA, 21 nt, synthetic construct
  source 1..21: mol_type = other RNA
accagcctggccaacatcgta

SEQ ID NO: 66945 - RNA, 21 nt, synthetic construct
  source 1..21: mol_type = other RNA
accagcggcatacaggagttc

SEQ ID NO: 66946 - RNA, 21 nt, synthetic construct
  source 1..21: mol_type = other RNA
accagcttacagcagatctgc

SEQ ID NO: 66947 - RNA, 21 nt, synthetic construct
  source 1..21: mol_type = other RNA
accagcttgggcaagagagca

SEQ ID NO: 66948 - RNA, 21 nt, synthetic construct
  source 1..21: mol_type = other RNA
accaggaggtttgcactggca

SEQ ID NO: 66949 - RNA, 21 nt, synthetic construct
  source 1..21: mol_type = other RNA
accaggagttcttatgaggtt

SEQ ID NO: 66950 - RNA, 21 nt, synthetic construct
  source 1..21: mol_type = other RNA
accaggcagtcctctcactcc

SEQ ID NO: 66951 - RNA, 21 nt, synthetic construct
  source 1..21: mol_type = other RNA
accaggcccggggcagagaac

SEQ ID NO: 66952 - RNA, 21 nt, synthetic construct
  source 1..21: mol_type = other RNA
accaggctggaagaattttaa

SEQ ID NO: 66953 - RNA, 21 nt, synthetic construct
  source 1..21: mol_type = other RNA
accaggctggaatgcagcggt

SEQ ID NO: 66954 - RNA, 21 nt, synthetic construct
  source 1..21: mol_type = other RNA
accagggaggcggaggttgcg

SEQ ID NO: 66955 - RNA, 21 nt, synthetic construct
  source 1..21: mol_type = other RNA
accagggcctctgaagacatg

SEQ ID NO: 66956 - RNA, 21 nt, synthetic construct
  source 1..21: mol_type = other RNA
accaggggaaggagtctgccc

SEQ ID NO: 66957 - RNA, 21 nt, synthetic construct
  source 1..21: mol_type = other RNA
accaggggctgggggatccag

SEQ ID NO: 66958 - RNA, 21 nt, synthetic construct
  source 1..21: mol_type = other RNA
accaggtatggcgactcatgc

SEQ ID NO: 66959 - RNA, 21 nt, synthetic construct
  source 1..21: mol_type = other RNA
accaggtcagccagaggaagc

SEQ ID NO: 66960 - RNA, 21 nt, synthetic construct
  source 1..21: mol_type = other RNA
accaggttttggtaatgggaa

SEQ ID NO: 66961 - RNA, 21 nt, synthetic construct
  source 1..21: mol_type = other RNA
accagtaagattctgtctcta

SEQ ID NO: 66962 - RNA, 21 nt, synthetic construct
  source 1..21: mol_type = other RNA
accagtgctctcccccgaatc

SEQ ID NO: 66963 - RNA, 21 nt, synthetic construct
  source 1..21: mol_type = other RNA
accagtgcttgcagccttccc

SEQ ID NO: 66964 - RNA, 21 nt, synthetic construct
  source 1..21: mol_type = other RNA
accagtgggtcagctagtgtg

SEQ ID NO: 66965 - RNA, 21 nt, synthetic construct
  source 1..21: mol_type = other RNA
accagtgtgatgggggtaaga

SEQ ID NO: 66966 - RNA, 21 nt, synthetic construct
  source 1..21: mol_type = other RNA
accagttactctctctgcctc

SEQ ID NO: 66967 - RNA, 21 nt, synthetic construct
  source 1..21: mol_type = other RNA
accagttaggaagccactgca

SEQ ID NO: 66968 - RNA, 21 nt, synthetic construct
  source 1..21: mol_type = other RNA
accagttatcaccatgtgctt

SEQ ID NO: 66969 - RNA, 21 nt, synthetic construct
  source 1..21: mol_type = other RNA
accataaaaccatttttcaga

SEQ ID NO: 66970 - RNA, 21 nt, synthetic construct
  source 1..21: mol_type = other RNA
accataaagtcagaggagcag

SEQ ID NO: 66971 - RNA, 21 nt, synthetic construct
  source 1..21: mol_type = other RNA
accataaagtcttccatttta

SEQ ID NO: 66972 - RNA, 21 nt, synthetic construct
  source 1..21: mol_type = other RNA
accataatgagtaacatgtgg

SEQ ID NO: 66973 - RNA, 21 nt, synthetic construct
  source 1..21: mol_type = other RNA
accatacagtgccttcagcta

SEQ ID NO: 66974 - RNA, 21 nt, synthetic construct
  source 1..21: mol_type = other RNA
accatacttttcaactgaaca

SEQ ID NO: 66975 - RNA, 21 nt, synthetic construct
  source 1..21: mol_type = other RNA
accatagctgaaggcactgta

SEQ ID NO: 66976 - RNA, 21 nt, synthetic construct
  source 1..21: mol_type = other RNA
accataggcacgcgcccccat

SEQ ID NO: 66977 - RNA, 21 nt, synthetic construct
  source 1..21: mol_type = other RNA
accatataatctaaccctcct

SEQ ID NO: 66978 - RNA, 21 nt, synthetic construct
  source 1..21: mol_type = other RNA
accatatacacaaaaagatct

SEQ ID NO: 66979 - RNA, 21 nt, synthetic construct
  source 1..21: mol_type = other RNA
accatatggttaatagtgacc

SEQ ID NO: 66980 - RNA, 21 nt, synthetic construct
  source 1..21: mol_type = other RNA
accatatggtttacaatggtt

SEQ ID NO: 66981 - RNA, 21 nt, synthetic construct
  source 1..21: mol_type = other RNA
accatattagagtgaaaagaa

SEQ ID NO: 66982 - RNA, 21 nt, synthetic construct
  source 1..21: mol_type = other RNA
accatattggccaggctggtt

SEQ ID NO: 66983 - RNA, 21 nt, synthetic construct
  source 1..21: mol_type = other RNA
accatcaagtgtgatcccaaa

SEQ ID NO: 66984 - RNA, 21 nt, synthetic construct
  source 1..21: mol_type = other RNA
accatcagagtgaacaggcaa

SEQ ID NO: 66985 - RNA, 21 nt, synthetic construct
  source 1..21: mol_type = other RNA
accatcatcatcaggctggct

SEQ ID NO: 66986 - RNA, 21 nt, synthetic construct
  source 1..21: mol_type = other RNA
accatccccgctgtccatttc

SEQ ID NO: 66987 - RNA, 21 nt, synthetic construct
  source 1..21: mol_type = other RNA
accatcctttccttgtcctaa

SEQ ID NO: 66988 - RNA, 21 nt, synthetic construct
  source 1..21: mol_type = other RNA
accatcgttcacactcgcact

SEQ ID NO: 66989 - RNA, 21 nt, synthetic construct
  source 1..21: mol_type = other RNA
accatctaaagccaggctttc

SEQ ID NO: 66990 - RNA, 21 nt, synthetic construct
  source 1..21: mol_type = other RNA
accatctaacagaaatacaat

SEQ ID NO: 66991 - RNA, 21 nt, synthetic construct
  source 1..21: mol_type = other RNA
accatctcagcacagagccga

SEQ ID NO: 66992 - RNA, 21 nt, synthetic construct
  source 1..21: mol_type = other RNA
accatctctccaacagaagaa

SEQ ID NO: 66993 - RNA, 21 nt, synthetic construct
  source 1..21: mol_type = other RNA
accatctctctgcctcaaaat

SEQ ID NO: 66994 - RNA, 21 nt, synthetic construct
  source 1..21: mol_type = other RNA
accatctgacatatgttttgc

SEQ ID NO: 66995 - RNA, 21 nt, synthetic construct
  source 1..21: mol_type = other RNA
accatctgataagcccaacct

SEQ ID NO: 66996 - RNA, 21 nt, synthetic construct
  source 1..21: mol_type = other RNA
accatctgttaaaagatacga

SEQ ID NO: 66997 - RNA, 21 nt, synthetic construct
  source 1..21: mol_type = other RNA
accatcttcttagtgttccct

SEQ ID NO: 66998 - RNA, 21 nt, synthetic construct
  source 1..21: mol_type = other RNA
accatgacagagttccacctc

SEQ ID NO: 66999 - RNA, 21 nt, synthetic construct
  source 1..21: mol_type = other RNA
accatgatgcagcccctgcca

SEQ ID NO: 67000 - RNA, 21 nt, synthetic construct
  source 1..21: mol_type = other RNA
accatgcaggttcatgtgtgc

SEQ ID NO: 67001 - RNA, 21 nt, synthetic construct
  source 1..21: mol_type = other RNA
accatggcaggtttcaagtga

SEQ ID NO: 67002 - RNA, 21 nt, synthetic construct
  source 1..21: mol_type = other RNA
accatgggacaagtgggtgga

SEQ ID NO: 67003 - RNA, 21 nt, synthetic construct
  source 1..21: mol_type = other RNA
accatgtaacaggtttaataa

SEQ ID NO: 67004 - RNA, 21 nt, synthetic construct
  source 1..21: mol_type = other RNA
accatgtcatgtatatgctgt

SEQ ID NO: 67005 - RNA, 21 nt, synthetic construct
  source 1..21: mol_type = other RNA
accatgtgcttatcaataaaa

SEQ ID NO: 67006 - RNA, 21 nt, synthetic construct
  source 1..21: mol_type = other RNA
accatgttcatgggaagatgc

SEQ ID NO: 67007 - RNA, 21 nt, synthetic construct
  source 1..21: mol_type = other RNA
accatgttgttcttttcaaaa

SEQ ID NO: 67008 - RNA, 21 nt, synthetic construct
  source 1..21: mol_type = other RNA
accatgtttccataaaaagcg

SEQ ID NO: 67009 - RNA, 21 nt, synthetic construct
  source 1..21: mol_type = other RNA
accatgttttaggagtcaact

SEQ ID NO: 67010 - RNA, 21 nt, synthetic construct
  source 1..21: mol_type = other RNA
accattaacagctcagaagct

SEQ ID NO: 67011 - RNA, 21 nt, synthetic construct
  source 1..21: mol_type = other RNA
accattactcttctactcact

SEQ ID NO: 67012 - RNA, 21 nt, synthetic construct
  source 1..21: mol_type = other RNA
accattagcagttctgtaccc

SEQ ID NO: 67013 - RNA, 21 nt, synthetic construct
  source 1..21: mol_type = other RNA
accattccacgctgtggcttg

SEQ ID NO: 67014 - RNA, 21 nt, synthetic construct
  source 1..21: mol_type = other RNA
accattccagccattctcttc

SEQ ID NO: 67015 - RNA, 21 nt, synthetic construct
  source 1..21: mol_type = other RNA
accattccccttgccaaggct

SEQ ID NO: 67016 - RNA, 21 nt, synthetic construct
  source 1..21: mol_type = other RNA
accattgagccaaagaagaaa

SEQ ID NO: 67017 - RNA, 21 nt, synthetic construct
  source 1..21: mol_type = other RNA
accattgtaaaccatatggtt

SEQ ID NO: 67018 - RNA, 21 nt, synthetic construct
  source 1..21: mol_type = other RNA
accattgtgtggacacactga

SEQ ID NO: 67019 - RNA, 21 nt, synthetic construct
  source 1..21: mol_type = other RNA
accatttaccccttaaattcc

SEQ ID NO: 67020 - RNA, 21 nt, synthetic construct
  source 1..21: mol_type = other RNA
accatttattcctctcttgga

SEQ ID NO: 67021 - RNA, 21 nt, synthetic construct
  source 1..21: mol_type = other RNA
accatttattgtcaaggtcat

SEQ ID NO: 67022 - RNA, 21 nt, synthetic construct
  source 1..21: mol_type = other RNA
accatttgaccttccttgtgt

SEQ ID NO: 67023 - RNA, 21 nt, synthetic construct
  source 1..21: mol_type = other RNA
accattttcaatcttggaaat

SEQ ID NO: 67024 - RNA, 21 nt, synthetic construct
  source 1..21: mol_type = other RNA
accattttttcaccagcggca

SEQ ID NO: 67025 - RNA, 21 nt, synthetic construct
  source 1..21: mol_type = other RNA
acccaaagactttgttttgtt

SEQ ID NO: 67026 - RNA, 21 nt, synthetic construct
  source 1..21: mol_type = other RNA
acccaaagcaaaagcaaaatt

SEQ ID NO: 67027 - RNA, 21 nt, synthetic construct
  source 1..21: mol_type = other RNA
acccaaattaaaggatgtcaa

SEQ ID NO: 67028 - RNA, 21 nt, synthetic construct
  source 1..21: mol_type = other RNA
acccaacaaacaattagcacc

SEQ ID NO: 67029 - RNA, 21 nt, synthetic construct
  source 1..21: mol_type = other RNA
acccaacatgagagaaaattg

SEQ ID NO: 67030 - RNA, 21 nt, synthetic construct
  source 1..21: mol_type = other RNA
acccaactctttctttgattt

SEQ ID NO: 67031 - RNA, 21 nt, synthetic construct
  source 1..21: mol_type = other RNA
acccaagaatttcatgccttt

SEQ ID NO: 67032 - RNA, 21 nt, synthetic construct
  source 1..21: mol_type = other RNA
acccaagccacagcgtggaat

SEQ ID NO: 67033 - RNA, 21 nt, synthetic construct
  source 1..21: mol_type = other RNA
acccaagcttaggtcagattc

SEQ ID NO: 67034 - RNA, 21 nt, synthetic construct
  source 1..21: mol_type = other RNA
acccaagtaaacaactgactc

SEQ ID NO: 67035 - RNA, 21 nt, synthetic construct
  source 1..21: mol_type = other RNA
acccaagtggagcctgctctg

SEQ ID NO: 67036 - RNA, 21 nt, synthetic construct
  source 1..21: mol_type = other RNA
acccaatcatgttctttatag

SEQ ID NO: 67037 - RNA, 21 nt, synthetic construct
  source 1..21: mol_type = other RNA
acccacaaaagaaaattttct

SEQ ID NO: 67038 - RNA, 21 nt, synthetic construct
  source 1..21: mol_type = other RNA
acccacaagaaaaacctaaac

SEQ ID NO: 67039 - RNA, 21 nt, synthetic construct
  source 1..21: mol_type = other RNA
acccacagataatttcttcag

SEQ ID NO: 67040 - RNA, 21 nt, synthetic construct
  source 1..21: mol_type = other RNA
acccaccaggaggcggagctt

SEQ ID NO: 67041 - RNA, 21 nt, synthetic construct
  source 1..21: mol_type = other RNA
acccacgtggagtgcaatggg

SEQ ID NO: 67042 - RNA, 21 nt, synthetic construct
  source 1..21: mol_type = other RNA
acccactagtgaagtcccatc

SEQ ID NO: 67043 - RNA, 21 nt, synthetic construct
  source 1..21: mol_type = other RNA
acccactattgaaagcccttg

SEQ ID NO: 67044 - RNA, 21 nt, synthetic construct
  source 1..21: mol_type = other RNA
acccactgagcatttatataa

SEQ ID NO: 67045 - RNA, 21 nt, synthetic construct
  source 1..21: mol_type = other RNA
acccactggtttcagtccctc

SEQ ID NO: 67046 - RNA, 21 nt, synthetic construct
  source 1..21: mol_type = other RNA
acccacttgtcccatggtcaa

SEQ ID NO: 67047 - RNA, 21 nt, synthetic construct
  source 1..21: mol_type = other RNA
acccagaccaagtttaaccaa

SEQ ID NO: 67048 - RNA, 21 nt, synthetic construct
  source 1..21: mol_type = other RNA
acccagacctgcacaaaggat

SEQ ID NO: 67049 - RNA, 21 nt, synthetic construct
  source 1..21: mol_type = other RNA
acccagagcctaatgtgtaag

SEQ ID NO: 67050 - RNA, 21 nt, synthetic construct
  source 1..21: mol_type = other RNA
acccagagcgggtttcctcgg

SEQ ID NO: 67051 - RNA, 21 nt, synthetic construct
  source 1..21: mol_type = other RNA
acccagcactctgaatcacct

SEQ ID NO: 67052 - RNA, 21 nt, synthetic construct
  source 1..21: mol_type = other RNA
acccagctcgaccaggggaag

SEQ ID NO: 67053 - RNA, 21 nt, synthetic construct
  source 1..21: mol_type = other RNA
acccaggaacagattcacgca

SEQ ID NO: 67054 - RNA, 21 nt, synthetic construct
  source 1..21: mol_type = other RNA
acccaggaggcaaaggttgag

SEQ ID NO: 67055 - RNA, 21 nt, synthetic construct
  source 1..21: mol_type = other RNA
acccaggcatgatggctcaac

SEQ ID NO: 67056 - RNA, 21 nt, synthetic construct
  source 1..21: mol_type = other RNA
acccaggtgtgagattgatag

SEQ ID NO: 67057 - RNA, 21 nt, synthetic construct
  source 1..21: mol_type = other RNA
acccagtatacacgtatttat

SEQ ID NO: 67058 - RNA, 21 nt, synthetic construct
  source 1..21: mol_type = other RNA
acccagtggctagtgtgttga

SEQ ID NO: 67059 - RNA, 21 nt, synthetic construct
  source 1..21: mol_type = other RNA
acccagtgtctgctacagggg

SEQ ID NO: 67060 - RNA, 21 nt, synthetic construct
  source 1..21: mol_type = other RNA
acccagtgtgtttgtttgcta

SEQ ID NO: 67061 - RNA, 21 nt, synthetic construct
  source 1..21: mol_type = other RNA
acccagttatctctgccctca

SEQ ID NO: 67062 - RNA, 21 nt, synthetic construct
  source 1..21: mol_type = other RNA
acccagttcaccagtttctaa

SEQ ID NO: 67063 - RNA, 21 nt, synthetic construct
  source 1..21: mol_type = other RNA
acccataaactgaacatttat

SEQ ID NO: 67064 - RNA, 21 nt, synthetic construct
  source 1..21: mol_type = other RNA
acccatactcagccccctcga

SEQ ID NO: 67065 - RNA, 21 nt, synthetic construct
  source 1..21: mol_type = other RNA
acccatatctttgcttataac

SEQ ID NO: 67066 - RNA, 21 nt, synthetic construct
  source 1..21: mol_type = other RNA
acccatccacccacttgtccc

SEQ ID NO: 67067 - RNA, 21 nt, synthetic construct
  source 1..21: mol_type = other RNA
acccatgaagccagcattacc

SEQ ID NO: 67068 - RNA, 21 nt, synthetic construct
  source 1..21: mol_type = other RNA
acccatgatctttggaaatga

SEQ ID NO: 67069 - RNA, 21 nt, synthetic construct
  source 1..21: mol_type = other RNA
acccatgcccatgtgcattat

SEQ ID NO: 67070 - RNA, 21 nt, synthetic construct
  source 1..21: mol_type = other RNA
acccattagacactaactttc

SEQ ID NO: 67071 - RNA, 21 nt, synthetic construct
  source 1..21: mol_type = other RNA
acccattccaggttttatctc

SEQ ID NO: 67072 - RNA, 21 nt, synthetic construct
  source 1..21: mol_type = other RNA
acccatttcatgccatcctgg

SEQ ID NO: 67073 - RNA, 21 nt, synthetic construct
  source 1..21: mol_type = other RNA
accccaaccctacctagggtg

SEQ ID NO: 67074 - RNA, 21 nt, synthetic construct
  source 1..21: mol_type = other RNA
accccagaaggttaactaata

SEQ ID NO: 67075 - RNA, 21 nt, synthetic construct
  source 1..21: mol_type = other RNA
accccagagattgtcgttgag

SEQ ID NO: 67076 - RNA, 21 nt, synthetic construct
  source 1..21: mol_type = other RNA
accccagggatattttcgtgt

SEQ ID NO: 67077 - RNA, 21 nt, synthetic construct
  source 1..21: mol_type = other RNA
accccagtagaaatcttccag

SEQ ID NO: 67078 - RNA, 21 nt, synthetic construct
  source 1..21: mol_type = other RNA
accccatctctaccaaaatat

SEQ ID NO: 67079 - RNA, 21 nt, synthetic construct
  source 1..21: mol_type = other RNA
accccattcactcagcataat

SEQ ID NO: 67080 - RNA, 21 nt, synthetic construct
  source 1..21: mol_type = other RNA
acccccatcacactggtcact

SEQ ID NO: 67081 - RNA, 21 nt, synthetic construct
  source 1..21: mol_type = other RNA
accccctggaaataagtttca

SEQ ID NO: 67082 - RNA, 21 nt, synthetic construct
  source 1..21: mol_type = other RNA
accccctgggctcaagccatc

SEQ ID NO: 67083 - RNA, 21 nt, synthetic construct
  source 1..21: mol_type = other RNA
accccgcatactgtgcagtgg

SEQ ID NO: 67084 - RNA, 21 nt, synthetic construct
  source 1..21: mol_type = other RNA
accccgtacgctccctcgcgc

SEQ ID NO: 67085 - RNA, 21 nt, synthetic construct
  source 1..21: mol_type = other RNA
accccgtctctgcaaaaaatg

SEQ ID NO: 67086 - RNA, 21 nt, synthetic construct
  source 1..21: mol_type = other RNA
acccctactttttgtcacacg

SEQ ID NO: 67087 - RNA, 21 nt, synthetic construct
  source 1..21: mol_type = other RNA
acccctcaggtgtcactggat

SEQ ID NO: 67088 - RNA, 21 nt, synthetic construct
  source 1..21: mol_type = other RNA
acccctccctacctggcagtc

SEQ ID NO: 67089 - RNA, 21 nt, synthetic construct
  source 1..21: mol_type = other RNA
acccctccctgctttaaaaca

SEQ ID NO: 67090 - RNA, 21 nt, synthetic construct
  source 1..21: mol_type = other RNA
acccctgagaacttcagtata

SEQ ID NO: 67091 - RNA, 21 nt, synthetic construct
  source 1..21: mol_type = other RNA
acccctgctctgcacgtacta

SEQ ID NO: 67092 - RNA, 21 nt, synthetic construct
  source 1..21: mol_type = other RNA
accccttaaattccaaaagtg

SEQ ID NO: 67093 - RNA, 21 nt, synthetic construct
  source 1..21: mol_type = other RNA
acccgaagaggacgatttttc

SEQ ID NO: 67094 - RNA, 21 nt, synthetic construct
  source 1..21: mol_type = other RNA
acccgacccactagtgaagtc

SEQ ID NO: 67095 - RNA, 21 nt, synthetic construct
  source 1..21: mol_type = other RNA
acccgaggtgcacaagggaag

SEQ ID NO: 67096 - RNA, 21 nt, synthetic construct
  source 1..21: mol_type = other RNA
acccgctctgggtgcgttgac

SEQ ID NO: 67097 - RNA, 21 nt, synthetic construct
  source 1..21: mol_type = other RNA
acccggagaggtgaactatta

SEQ ID NO: 67098 - RNA, 21 nt, synthetic construct
  source 1..21: mol_type = other RNA
acccggctaattaaacaaaca

SEQ ID NO: 67099 - RNA, 21 nt, synthetic construct
  source 1..21: mol_type = other RNA
acccgtccaatttctttggct

SEQ ID NO: 67100 - RNA, 21 nt, synthetic construct
  source 1..21: mol_type = other RNA
acccgtggaaatacttgaaca

SEQ ID NO: 67101 - RNA, 21 nt, synthetic construct
  source 1..21: mol_type = other RNA
acccgtgtgttttgttgttgt

SEQ ID NO: 67102 - RNA, 21 nt, synthetic construct
  source 1..21: mol_type = other RNA
acccgttttttccttcattta

SEQ ID NO: 67103 - RNA, 21 nt, synthetic construct
  source 1..21: mol_type = other RNA
accctaataacaaaataggat

SEQ ID NO: 67104 - RNA, 21 nt, synthetic construct
  source 1..21: mol_type = other RNA
accctacacccatccacccac

SEQ ID NO: 67105 - RNA, 21 nt, synthetic construct
  source 1..21: mol_type = other RNA
accctacagactcaataacca

SEQ ID NO: 67106 - RNA, 21 nt, synthetic construct
  source 1..21: mol_type = other RNA
accctacctagggtgtaaaag

SEQ ID NO: 67107 - RNA, 21 nt, synthetic construct
  source 1..21: mol_type = other RNA
accctaggtagggttggggta

SEQ ID NO: 67108 - RNA, 21 nt, synthetic construct
  source 1..21: mol_type = other RNA
accctatttatgttgcacaaa

SEQ ID NO: 67109 - RNA, 21 nt, synthetic construct
  source 1..21: mol_type = other RNA
accctcaaaagatgcagaaaa

SEQ ID NO: 67110 - RNA, 21 nt, synthetic construct
  source 1..21: mol_type = other RNA
accctcaaatgccatagagct

SEQ ID NO: 67111 - RNA, 21 nt, synthetic construct
  source 1..21: mol_type = other RNA
accctcaaatgtctcattgtg

SEQ ID NO: 67112 - RNA, 21 nt, synthetic construct
  source 1..21: mol_type = other RNA
accctcaatccccatctggga

SEQ ID NO: 67113 - RNA, 21 nt, synthetic construct
  source 1..21: mol_type = other RNA
accctcacagtcacaaagctt

SEQ ID NO: 67114 - RNA, 21 nt, synthetic construct
  source 1..21: mol_type = other RNA
accctcacgaaagcggtcaac

SEQ ID NO: 67115 - RNA, 21 nt, synthetic construct
  source 1..21: mol_type = other RNA
accctcaggactctgctcaaa

SEQ ID NO: 67116 - RNA, 21 nt, synthetic construct
  source 1..21: mol_type = other RNA
accctcattttataagggtga

SEQ ID NO: 67117 - RNA, 21 nt, synthetic construct
  source 1..21: mol_type = other RNA
accctcctaccttccaaagta

SEQ ID NO: 67118 - RNA, 21 nt, synthetic construct
  source 1..21: mol_type = other RNA
accctcctcctcctggccaca

SEQ ID NO: 67119 - RNA, 21 nt, synthetic construct
  source 1..21: mol_type = other RNA
accctcctcctctacaagttt

SEQ ID NO: 67120 - RNA, 21 nt, synthetic construct
  source 1..21: mol_type = other RNA
accctcgagtaaaaagaatga

SEQ ID NO: 67121 - RNA, 21 nt, synthetic construct
  source 1..21: mol_type = other RNA
accctcggcctctactgactc

SEQ ID NO: 67122 - RNA, 21 nt, synthetic construct
  source 1..21: mol_type = other RNA
accctctagctccccattccc

SEQ ID NO: 67123 - RNA, 21 nt, synthetic construct
  source 1..21: mol_type = other RNA
accctctggaatgcccatcct

SEQ ID NO: 67124 - RNA, 21 nt, synthetic construct
  source 1..21: mol_type = other RNA
accctgagcatccccgctgcg

SEQ ID NO: 67125 - RNA, 21 nt, synthetic construct
  source 1..21: mol_type = other RNA
accctgaggatataacgatag

SEQ ID NO: 67126 - RNA, 21 nt, synthetic construct
  source 1..21: mol_type = other RNA
accctgagtccagaggtgagc

SEQ ID NO: 67127 - RNA, 21 nt, synthetic construct
  source 1..21: mol_type = other RNA
accctgccccttatcctcttc

SEQ ID NO: 67128 - RNA, 21 nt, synthetic construct
  source 1..21: mol_type = other RNA
accctgccttccttgggcaca

SEQ ID NO: 67129 - RNA, 21 nt, synthetic construct
  source 1..21: mol_type = other RNA
accctgcgaaggcaatgtaac

SEQ ID NO: 67130 - RNA, 21 nt, synthetic construct
  source 1..21: mol_type = other RNA
accctgctatgcatactttgg

SEQ ID NO: 67131 - RNA, 21 nt, synthetic construct
  source 1..21: mol_type = other RNA
accctgctccagtatgacctc

SEQ ID NO: 67132 - RNA, 21 nt, synthetic construct
  source 1..21: mol_type = other RNA
accctgctggaacgaatattc

SEQ ID NO: 67133 - RNA, 21 nt, synthetic construct
  source 1..21: mol_type = other RNA
accctggcttgtgacatcaag

SEQ ID NO: 67134 - RNA, 21 nt, synthetic construct
  source 1..21: mol_type = other RNA
accctgggaaagcctggcttt

SEQ ID NO: 67135 - RNA, 21 nt, synthetic construct
  source 1..21: mol_type = other RNA
accctgtacccattagacact

SEQ ID NO: 67136 - RNA, 21 nt, synthetic construct
  source 1..21: mol_type = other RNA
accctgtctctaaaaaatacc

SEQ ID NO: 67137 - RNA, 21 nt, synthetic construct
  source 1..21: mol_type = other RNA
accctgttagtcccctagtgg

SEQ ID NO: 67138 - RNA, 21 nt, synthetic construct
  source 1..21: mol_type = other RNA
accctgttgggctattaagta

SEQ ID NO: 67139 - RNA, 21 nt, synthetic construct
  source 1..21: mol_type = other RNA
accctgtttcccttaatgttg

SEQ ID NO: 67140 - RNA, 21 nt, synthetic construct
  source 1..21: mol_type = other RNA
accctgttttgtagattaaaa

SEQ ID NO: 67141 - RNA, 21 nt, synthetic construct
  source 1..21: mol_type = other RNA
acccttaccttaaaccatata

SEQ ID NO: 67142 - RNA, 21 nt, synthetic construct
  source 1..21: mol_type = other RNA
acccttacgcgtggatgtgtg

SEQ ID NO: 67143 - RNA, 21 nt, synthetic construct
  source 1..21: mol_type = other RNA
acccttactaaattttgaggc

SEQ ID NO: 67144 - RNA, 21 nt, synthetic construct
  source 1..21: mol_type = other RNA
acccttataaaatgagggtaa

SEQ ID NO: 67145 - RNA, 21 nt, synthetic construct
  source 1..21: mol_type = other RNA
acccttatgtccagcccccag

SEQ ID NO: 67146 - RNA, 21 nt, synthetic construct
  source 1..21: mol_type = other RNA
acccttcatcatttgtattat

SEQ ID NO: 67147 - RNA, 21 nt, synthetic construct
  source 1..21: mol_type = other RNA
acccttctgttaatagatagg

SEQ ID NO: 67148 - RNA, 21 nt, synthetic construct
  source 1..21: mol_type = other RNA
acccttgaaaatttccagcat

SEQ ID NO: 67149 - RNA, 21 nt, synthetic construct
  source 1..21: mol_type = other RNA
acccttgatgtcacaagccag

SEQ ID NO: 67150 - RNA, 21 nt, synthetic construct
  source 1..21: mol_type = other RNA
acccttgctgcttctacccac

SEQ ID NO: 67151 - RNA, 21 nt, synthetic construct
  source 1..21: mol_type = other RNA
acccttggctagactaagaaa

SEQ ID NO: 67152 - RNA, 21 nt, synthetic construct
  source 1..21: mol_type = other RNA
acccttgggatgcagcaaaag

SEQ ID NO: 67153 - RNA, 21 nt, synthetic construct
  source 1..21: mol_type = other RNA
acccttggtaaacagcagtct

SEQ ID NO: 67154 - RNA, 21 nt, synthetic construct
  source 1..21: mol_type = other RNA
acccttgtaatcaagtatctc

SEQ ID NO: 67155 - RNA, 21 nt, synthetic construct
  source 1..21: mol_type = other RNA
acccttgttggacagctggga

SEQ ID NO: 67156 - RNA, 21 nt, synthetic construct
  source 1..21: mol_type = other RNA
accctttactcagattcacca

SEQ ID NO: 67157 - RNA, 21 nt, synthetic construct
  source 1..21: mol_type = other RNA
accctttatcggataaggaag

SEQ ID NO: 67158 - RNA, 21 nt, synthetic construct
  source 1..21: mol_type = other RNA
accctttattcaaagatcatt

SEQ ID NO: 67159 - RNA, 21 nt, synthetic construct
  source 1..21: mol_type = other RNA
accctttccaaattcaaagca

SEQ ID NO: 67160 - RNA, 21 nt, synthetic construct
  source 1..21: mol_type = other RNA
accctttcttaggaagctatg

SEQ ID NO: 67161 - RNA, 21 nt, synthetic construct
  source 1..21: mol_type = other RNA
accctttcttgttagtaggaa

SEQ ID NO: 67162 - RNA, 21 nt, synthetic construct
  source 1..21: mol_type = other RNA
accctttgaagtatgtaatta

SEQ ID NO: 67163 - RNA, 21 nt, synthetic construct
  source 1..21: mol_type = other RNA
accctttgttatctgaacgtc

SEQ ID NO: 67164 - RNA, 21 nt, synthetic construct
  source 1..21: mol_type = other RNA
accgacagcagataagatcca

SEQ ID NO: 67165 - RNA, 21 nt, synthetic construct
  source 1..21: mol_type = other RNA
accgacggctcaggcctgttg

SEQ ID NO: 67166 - RNA, 21 nt, synthetic construct
  source 1..21: mol_type = other RNA
accgactgaaaggaaatgagt

SEQ ID NO: 67167 - RNA, 21 nt, synthetic construct
  source 1..21: mol_type = other RNA
accgagatacttaagttttta

SEQ ID NO: 67168 - RNA, 21 nt, synthetic construct
  source 1..21: mol_type = other RNA
accgaggaaacccgctctggg

SEQ ID NO: 67169 - RNA, 21 nt, synthetic construct
  source 1..21: mol_type = other RNA
accgagtaatgggatggctgg

SEQ ID NO: 67170 - RNA, 21 nt, synthetic construct
  source 1..21: mol_type = other RNA
accgcaacatctgcctcccgg

SEQ ID NO: 67171 - RNA, 21 nt, synthetic construct
  source 1..21: mol_type = other RNA
accgcaagagttccaactgta

SEQ ID NO: 67172 - RNA, 21 nt, synthetic construct
  source 1..21: mol_type = other RNA
accgcacctggccgggattta

SEQ ID NO: 67173 - RNA, 21 nt, synthetic construct
  source 1..21: mol_type = other RNA
accgcactcagcctgttggga

SEQ ID NO: 67174 - RNA, 21 nt, synthetic construct
  source 1..21: mol_type = other RNA
accgccttcctaccctgcctt

SEQ ID NO: 67175 - RNA, 21 nt, synthetic construct
  source 1..21: mol_type = other RNA
accgcgcccggccaaatatcc

SEQ ID NO: 67176 - RNA, 21 nt, synthetic construct
  source 1..21: mol_type = other RNA
accgcgcccggcccagattcc

SEQ ID NO: 67177 - RNA, 21 nt, synthetic construct
  source 1..21: mol_type = other RNA
accgcgcccggccgagaaatc

SEQ ID NO: 67178 - RNA, 21 nt, synthetic construct
  source 1..21: mol_type = other RNA
accgcgcctggtgattaaagt

SEQ ID NO: 67179 - RNA, 21 nt, synthetic construct
  source 1..21: mol_type = other RNA
accgctccacgcccattagga

SEQ ID NO: 67180 - RNA, 21 nt, synthetic construct
  source 1..21: mol_type = other RNA
accgctgcattccagcctggt

SEQ ID NO: 67181 - RNA, 21 nt, synthetic construct
  source 1..21: mol_type = other RNA
accgctttcgtgagggtttca

SEQ ID NO: 67182 - RNA, 21 nt, synthetic construct
  source 1..21: mol_type = other RNA
accggaaaatgcttaacaaga

SEQ ID NO: 67183 - RNA, 21 nt, synthetic construct
  source 1..21: mol_type = other RNA
accggaacttgagtttgttct

SEQ ID NO: 67184 - RNA, 21 nt, synthetic construct
  source 1..21: mol_type = other RNA
accggatgaggtggctcacgc

SEQ ID NO: 67185 - RNA, 21 nt, synthetic construct
  source 1..21: mol_type = other RNA
accggcatccgccaccacgcc

SEQ ID NO: 67186 - RNA, 21 nt, synthetic construct
  source 1..21: mol_type = other RNA
accggggactgcaacagatct

SEQ ID NO: 67187 - RNA, 21 nt, synthetic construct
  source 1..21: mol_type = other RNA
accgtaacttcttttcttaaa

SEQ ID NO: 67188 - RNA, 21 nt, synthetic construct
  source 1..21: mol_type = other RNA
accgtgacagaacaaataaca

SEQ ID NO: 67189 - RNA, 21 nt, synthetic construct
  source 1..21: mol_type = other RNA
accgtgcaactagagaaagca

SEQ ID NO: 67190 - RNA, 21 nt, synthetic construct
  source 1..21: mol_type = other RNA
accgtgcccggccagacattt

SEQ ID NO: 67191 - RNA, 21 nt, synthetic construct
  source 1..21: mol_type = other RNA
accgtgccgggcttggtatgc

SEQ ID NO: 67192 - RNA, 21 nt, synthetic construct
  source 1..21: mol_type = other RNA
acctaaaaagggagtcagtag

SEQ ID NO: 67193 - RNA, 21 nt, synthetic construct
  source 1..21: mol_type = other RNA
acctaaaaggttgcttaattg

SEQ ID NO: 67194 - RNA, 21 nt, synthetic construct
  source 1..21: mol_type = other RNA
acctaaaatcttattccccag

SEQ ID NO: 67195 - RNA, 21 nt, synthetic construct
  source 1..21: mol_type = other RNA
acctaaacctgtgatttccag

SEQ ID NO: 67196 - RNA, 21 nt, synthetic construct
  source 1..21: mol_type = other RNA
acctaaagatatgtgtaggaa

SEQ ID NO: 67197 - RNA, 21 nt, synthetic construct
  source 1..21: mol_type = other RNA
acctaaagttgaggttgaaga

SEQ ID NO: 67198 - RNA, 21 nt, synthetic construct
  source 1..21: mol_type = other RNA
acctaaatgtccatcgagaga

SEQ ID NO: 67199 - RNA, 21 nt, synthetic construct
  source 1..21: mol_type = other RNA
acctaacaatgattatttcga

SEQ ID NO: 67200 - RNA, 21 nt, synthetic construct
  source 1..21: mol_type = other RNA
acctaacagccggcatatgtc

SEQ ID NO: 67201 - RNA, 21 nt, synthetic construct
  source 1..21: mol_type = other RNA
acctaacatgtcttggtgtgc

SEQ ID NO: 67202 - RNA, 21 nt, synthetic construct
  source 1..21: mol_type = other RNA
acctaactactaataaatgca

SEQ ID NO: 67203 - RNA, 21 nt, synthetic construct
  source 1..21: mol_type = other RNA
acctaagaaaggtctagtgtg

SEQ ID NO: 67204 - RNA, 21 nt, synthetic construct
  source 1..21: mol_type = other RNA
acctaagcatcgtgaagtctt

SEQ ID NO: 67205 - RNA, 21 nt, synthetic construct
  source 1..21: mol_type = other RNA
acctaagcttaagagctaaga

SEQ ID NO: 67206 - RNA, 21 nt, synthetic construct
  source 1..21: mol_type = other RNA
acctaagcttgggtaggaagc

SEQ ID NO: 67207 - RNA, 21 nt, synthetic construct
  source 1..21: mol_type = other RNA
acctaataaaatgtttagcgg

SEQ ID NO: 67208 - RNA, 21 nt, synthetic construct
  source 1..21: mol_type = other RNA
acctacattaatctcatccac

SEQ ID NO: 67209 - RNA, 21 nt, synthetic construct
  source 1..21: mol_type = other RNA
acctactaaaagttgacaaat

SEQ ID NO: 67210 - RNA, 21 nt, synthetic construct
  source 1..21: mol_type = other RNA
acctactttaaatcagggcct

SEQ ID NO: 67211 - RNA, 21 nt, synthetic construct
  source 1..21: mol_type = other RNA
acctagaaaaacaccaaaaaa

SEQ ID NO: 67212 - RNA, 21 nt, synthetic construct
  source 1..21: mol_type = other RNA
acctagaagaaatgggtaaat

SEQ ID NO: 67213 - RNA, 21 nt, synthetic construct
  source 1..21: mol_type = other RNA
acctagcctctctgggcttca

SEQ ID NO: 67214 - RNA, 21 nt, synthetic construct
  source 1..21: mol_type = other RNA
acctagctgttttcatgcgac

SEQ ID NO: 67215 - RNA, 21 nt, synthetic construct
  source 1..21: mol_type = other RNA
acctaggcctattttaggctc

SEQ ID NO: 67216 - RNA, 21 nt, synthetic construct
  source 1..21: mol_type = other RNA
acctagggtgtaaaaggctaa

SEQ ID NO: 67217 - RNA, 21 nt, synthetic construct
  source 1..21: mol_type = other RNA
acctagtacgtaacctaaagt

SEQ ID NO: 67218 - RNA, 21 nt, synthetic construct
  source 1..21: mol_type = other RNA
acctagttttccaatccggga

SEQ ID NO: 67219 - RNA, 21 nt, synthetic construct
  source 1..21: mol_type = other RNA
acctataagacccagtggcta

SEQ ID NO: 67220 - RNA, 21 nt, synthetic construct
  source 1..21: mol_type = other RNA
acctatagaattcttcttctg

SEQ ID NO: 67221 - RNA, 21 nt, synthetic construct
  source 1..21: mol_type = other RNA
acctatctattaacagaaggg

SEQ ID NO: 67222 - RNA, 21 nt, synthetic construct
  source 1..21: mol_type = other RNA
acctatgaataggtgtgtgtt

SEQ ID NO: 67223 - RNA, 21 nt, synthetic construct
  source 1..21: mol_type = other RNA
acctattatttagagtttgca

SEQ ID NO: 67224 - RNA, 21 nt, synthetic construct
  source 1..21: mol_type = other RNA
acctattcataggtaatactc

SEQ ID NO: 67225 - RNA, 21 nt, synthetic construct
  source 1..21: mol_type = other RNA
acctatttagagggatgaatg

SEQ ID NO: 67226 - RNA, 21 nt, synthetic construct
  source 1..21: mol_type = other RNA
acctcaaactagaaaaagaat

SEQ ID NO: 67227 - RNA, 21 nt, synthetic construct
  source 1..21: mol_type = other RNA
acctcaaaggagagaagaggg

SEQ ID NO: 67228 - RNA, 21 nt, synthetic construct
  source 1..21: mol_type = other RNA
acctcaaagtggaaacaactc

SEQ ID NO: 67229 - RNA, 21 nt, synthetic construct
  source 1..21: mol_type = other RNA
acctcaaattaatcagtctgt

SEQ ID NO: 67230 - RNA, 21 nt, synthetic construct
  source 1..21: mol_type = other RNA
acctcaaattctgagggaaat

SEQ ID NO: 67231 - RNA, 21 nt, synthetic construct
  source 1..21: mol_type = other RNA
acctcaaattgtgtgttctct

SEQ ID NO: 67232 - RNA, 21 nt, synthetic construct
  source 1..21: mol_type = other RNA
acctcaactttaggttacgta

SEQ ID NO: 67233 - RNA, 21 nt, synthetic construct
  source 1..21: mol_type = other RNA
acctcaagcgatccagccgcc

SEQ ID NO: 67234 - RNA, 21 nt, synthetic construct
  source 1..21: mol_type = other RNA
acctcaaggcagaacacactg

SEQ ID NO: 67235 - RNA, 21 nt, synthetic construct
  source 1..21: mol_type = other RNA
acctcaaggccaactgtcctc

SEQ ID NO: 67236 - RNA, 21 nt, synthetic construct
  source 1..21: mol_type = other RNA
acctcaagtcttttcctagac

SEQ ID NO: 67237 - RNA, 21 nt, synthetic construct
  source 1..21: mol_type = other RNA
acctcaagtgatgcaactcct

SEQ ID NO: 67238 - RNA, 21 nt, synthetic construct
  source 1..21: mol_type = other RNA
acctcacattcacagcgtgca

SEQ ID NO: 67239 - RNA, 21 nt, synthetic construct
  source 1..21: mol_type = other RNA
acctcagaaacaaacaaaaaa

SEQ ID NO: 67240 - RNA, 21 nt, synthetic construct
  source 1..21: mol_type = other RNA
acctcagccccacaagtagca

SEQ ID NO: 67241 - RNA, 21 nt, synthetic construct
  source 1..21: mol_type = other RNA
acctcaggcagtctagtccat

SEQ ID NO: 67242 - RNA, 21 nt, synthetic construct
  source 1..21: mol_type = other RNA
acctcaggtttagaatatatt

SEQ ID NO: 67243 - RNA, 21 nt, synthetic construct
  source 1..21: mol_type = other RNA
acctcagtggtagttacacaa

SEQ ID NO: 67244 - RNA, 21 nt, synthetic construct
  source 1..21: mol_type = other RNA
acctcagttaaacccaacaaa

SEQ ID NO: 67245 - RNA, 21 nt, synthetic construct
  source 1..21: mol_type = other RNA
acctcataagaactcctggtc

SEQ ID NO: 67246 - RNA, 21 nt, synthetic construct
  source 1..21: mol_type = other RNA
acctcatccggtctcagtttt

SEQ ID NO: 67247 - RNA, 21 nt, synthetic construct
  source 1..21: mol_type = other RNA
acctcatctctgcaaaacatt

SEQ ID NO: 67248 - RNA, 21 nt, synthetic construct
  source 1..21: mol_type = other RNA
acctcatcttagccgggagga

SEQ ID NO: 67249 - RNA, 21 nt, synthetic construct
  source 1..21: mol_type = other RNA
acctcatgtaactaattactg

SEQ ID NO: 67250 - RNA, 21 nt, synthetic construct
  source 1..21: mol_type = other RNA
acctcatttgcagagcaaact

SEQ ID NO: 67251 - RNA, 21 nt, synthetic construct
  source 1..21: mol_type = other RNA
acctccagcgctaagcactgc

SEQ ID NO: 67252 - RNA, 21 nt, synthetic construct
  source 1..21: mol_type = other RNA
acctccagtgtcctgaatgat

SEQ ID NO: 67253 - RNA, 21 nt, synthetic construct
  source 1..21: mol_type = other RNA
acctccatcactgactggctg

SEQ ID NO: 67254 - RNA, 21 nt, synthetic construct
  source 1..21: mol_type = other RNA
acctcccaaaggactgggatc

SEQ ID NO: 67255 - RNA, 21 nt, synthetic construct
  source 1..21: mol_type = other RNA
acctcccaacaggctgagtgc

SEQ ID NO: 67256 - RNA, 21 nt, synthetic construct
  source 1..21: mol_type = other RNA
acctcccatgcattcgtccct

SEQ ID NO: 67257 - RNA, 21 nt, synthetic construct
  source 1..21: mol_type = other RNA
acctcccttcacaaagccctc

SEQ ID NO: 67258 - RNA, 21 nt, synthetic construct
  source 1..21: mol_type = other RNA
acctccgcctccctggttcaa

SEQ ID NO: 67259 - RNA, 21 nt, synthetic construct
  source 1..21: mol_type = other RNA
acctccgtttttcaggttcaa

SEQ ID NO: 67260 - RNA, 21 nt, synthetic construct
  source 1..21: mol_type = other RNA
acctcctagattgaccttcta

SEQ ID NO: 67261 - RNA, 21 nt, synthetic construct
  source 1..21: mol_type = other RNA
acctcctcccacttacatcag

SEQ ID NO: 67262 - RNA, 21 nt, synthetic construct
  source 1..21: mol_type = other RNA
acctcctccggggacccagtg

SEQ ID NO: 67263 - RNA, 21 nt, synthetic construct
  source 1..21: mol_type = other RNA
acctcctggttttgatcatcg

SEQ ID NO: 67264 - RNA, 21 nt, synthetic construct
  source 1..21: mol_type = other RNA
acctcgaagcacaaccactga

SEQ ID NO: 67265 - RNA, 21 nt, synthetic construct
  source 1..21: mol_type = other RNA
acctcgggttcaagccccagt

SEQ ID NO: 67266 - RNA, 21 nt, synthetic construct
  source 1..21: mol_type = other RNA
acctctacacaaaaatccaga

SEQ ID NO: 67267 - RNA, 21 nt, synthetic construct
  source 1..21: mol_type = other RNA
acctctattaaatcatgatgt

SEQ ID NO: 67268 - RNA, 21 nt, synthetic construct
  source 1..21: mol_type = other RNA
acctctccgggtaaaaagcct

SEQ ID NO: 67269 - RNA, 21 nt, synthetic construct
  source 1..21: mol_type = other RNA
acctctgaagagtctatcttt

SEQ ID NO: 67270 - RNA, 21 nt, synthetic construct
  source 1..21: mol_type = other RNA
acctctgcagttagcatgcct

SEQ ID NO: 67271 - RNA, 21 nt, synthetic construct
  source 1..21: mol_type = other RNA
acctctggaaaggacttgatc

SEQ ID NO: 67272 - RNA, 21 nt, synthetic construct
  source 1..21: mol_type = other RNA
acctctggactcagggtcact

SEQ ID NO: 67273 - RNA, 21 nt, synthetic construct
  source 1..21: mol_type = other RNA
acctctgggatgctcagtttc

SEQ ID NO: 67274 - RNA, 21 nt, synthetic construct
  source 1..21: mol_type = other RNA
acctctggtattttaagattc

SEQ ID NO: 67275 - RNA, 21 nt, synthetic construct
  source 1..21: mol_type = other RNA
acctcttgaagtcagttacag

SEQ ID NO: 67276 - RNA, 21 nt, synthetic construct
  source 1..21: mol_type = other RNA
acctgaaaaacggaggttgca

SEQ ID NO: 67277 - RNA, 21 nt, synthetic construct
  source 1..21: mol_type = other RNA
acctgaaaagtgtattattct

SEQ ID NO: 67278 - RNA, 21 nt, synthetic construct
  source 1..21: mol_type = other RNA
acctgaaatctgatttgttta

SEQ ID NO: 67279 - RNA, 21 nt, synthetic construct
  source 1..21: mol_type = other RNA
acctgaaatggcttaaggaaa

SEQ ID NO: 67280 - RNA, 21 nt, synthetic construct
  source 1..21: mol_type = other RNA
acctgaaattctcaaatgaac

SEQ ID NO: 67281 - RNA, 21 nt, synthetic construct
  source 1..21: mol_type = other RNA
acctgaacccaggaggcaaag

SEQ ID NO: 67282 - RNA, 21 nt, synthetic construct
  source 1..21: mol_type = other RNA
acctgaagactggatttgatt

SEQ ID NO: 67283 - RNA, 21 nt, synthetic construct
  source 1..21: mol_type = other RNA
acctgaatgactgttgcctct

SEQ ID NO: 67284 - RNA, 21 nt, synthetic construct
  source 1..21: mol_type = other RNA
acctgacaagtagtacaaaag

SEQ ID NO: 67285 - RNA, 21 nt, synthetic construct
  source 1..21: mol_type = other RNA
acctgacttcaaactatactt

SEQ ID NO: 67286 - RNA, 21 nt, synthetic construct
  source 1..21: mol_type = other RNA
acctgaggggtcttatgctgg

SEQ ID NO: 67287 - RNA, 21 nt, synthetic construct
  source 1..21: mol_type = other RNA
acctgaggtctttaaaagaaa

SEQ ID NO: 67288 - RNA, 21 nt, synthetic construct
  source 1..21: mol_type = other RNA
acctgattagaggctgcaccc

SEQ ID NO: 67289 - RNA, 21 nt, synthetic construct
  source 1..21: mol_type = other RNA
acctgattcttccactagtgg

SEQ ID NO: 67290 - RNA, 21 nt, synthetic construct
  source 1..21: mol_type = other RNA
acctgcacaaaggattgggaa

SEQ ID NO: 67291 - RNA, 21 nt, synthetic construct
  source 1..21: mol_type = other RNA
acctgcaggtatttctaaatc

SEQ ID NO: 67292 - RNA, 21 nt, synthetic construct
  source 1..21: mol_type = other RNA
acctgcaggttgatactagtt

SEQ ID NO: 67293 - RNA, 21 nt, synthetic construct
  source 1..21: mol_type = other RNA
acctgcagtctgcaggcagaa

SEQ ID NO: 67294 - RNA, 21 nt, synthetic construct
  source 1..21: mol_type = other RNA
acctgcagtggcgtgtgccca

SEQ ID NO: 67295 - RNA, 21 nt, synthetic construct
  source 1..21: mol_type = other RNA
acctgcatggtgtaaaataca

SEQ ID NO: 67296 - RNA, 21 nt, synthetic construct
  source 1..21: mol_type = other RNA
acctgccagagttggcacagc

SEQ ID NO: 67297 - RNA, 21 nt, synthetic construct
  source 1..21: mol_type = other RNA
acctgccatggtgttaaatat

SEQ ID NO: 67298 - RNA, 21 nt, synthetic construct
  source 1..21: mol_type = other RNA
acctgcgagcggcgggcttcg

SEQ ID NO: 67299 - RNA, 21 nt, synthetic construct
  source 1..21: mol_type = other RNA
acctgctacgaatgaactcct

SEQ ID NO: 67300 - RNA, 21 nt, synthetic construct
  source 1..21: mol_type = other RNA
acctgctctttatctccacat

SEQ ID NO: 67301 - RNA, 21 nt, synthetic construct
  source 1..21: mol_type = other RNA
acctgctttcctcatgtccat

SEQ ID NO: 67302 - RNA, 21 nt, synthetic construct
  source 1..21: mol_type = other RNA
acctgctttctactagtataa

SEQ ID NO: 67303 - RNA, 21 nt, synthetic construct
  source 1..21: mol_type = other RNA
acctgctttcttggggctcta

SEQ ID NO: 67304 - RNA, 21 nt, synthetic construct
  source 1..21: mol_type = other RNA
acctggaaattattcaatatg

SEQ ID NO: 67305 - RNA, 21 nt, synthetic construct
  source 1..21: mol_type = other RNA
acctggaatcctctaccaaaa

SEQ ID NO: 67306 - RNA, 21 nt, synthetic construct
  source 1..21: mol_type = other RNA
acctggaatgggttggaggag

SEQ ID NO: 67307 - RNA, 21 nt, synthetic construct
  source 1..21: mol_type = other RNA
acctggagcctgaggacacta

SEQ ID NO: 67308 - RNA, 21 nt, synthetic construct
  source 1..21: mol_type = other RNA
acctggatcaagtgggattta

SEQ ID NO: 67309 - RNA, 21 nt, synthetic construct
  source 1..21: mol_type = other RNA
acctggcaacaaaggcgaagc

SEQ ID NO: 67310 - RNA, 21 nt, synthetic construct
  source 1..21: mol_type = other RNA
acctggcaatactctcagaaa

SEQ ID NO: 67311 - RNA, 21 nt, synthetic construct
  source 1..21: mol_type = other RNA
acctggcagtctaggaaaaga

SEQ ID NO: 67312 - RNA, 21 nt, synthetic construct
  source 1..21: mol_type = other RNA
acctggcccctttcaagattg

SEQ ID NO: 67313 - RNA, 21 nt, synthetic construct
  source 1..21: mol_type = other RNA
acctggccgggatttacttct

SEQ ID NO: 67314 - RNA, 21 nt, synthetic construct
  source 1..21: mol_type = other RNA
acctggctaatttttaaatgt

SEQ ID NO: 67315 - RNA, 21 nt, synthetic construct
  source 1..21: mol_type = other RNA
acctgggagaaagaccaagag

SEQ ID NO: 67316 - RNA, 21 nt, synthetic construct
  source 1..21: mol_type = other RNA
acctgggggagactgtgcaat

SEQ ID NO: 67317 - RNA, 21 nt, synthetic construct
  source 1..21: mol_type = other RNA
acctgggtatacagcaaaaga

SEQ ID NO: 67318 - RNA, 21 nt, synthetic construct
  source 1..21: mol_type = other RNA
acctggtaataatgaaagctc

SEQ ID NO: 67319 - RNA, 21 nt, synthetic construct
  source 1..21: mol_type = other RNA
acctggtactctatgatatat

SEQ ID NO: 67320 - RNA, 21 nt, synthetic construct
  source 1..21: mol_type = other RNA
acctggtatgagtgtttccct

SEQ ID NO: 67321 - RNA, 21 nt, synthetic construct
  source 1..21: mol_type = other RNA
acctggtccttaaatttctaa

SEQ ID NO: 67322 - RNA, 21 nt, synthetic construct
  source 1..21: mol_type = other RNA
acctgtagaaaatagggacgg

SEQ ID NO: 67323 - RNA, 21 nt, synthetic construct
  source 1..21: mol_type = other RNA
acctgtagattgggcttttca

SEQ ID NO: 67324 - RNA, 21 nt, synthetic construct
  source 1..21: mol_type = other RNA
acctgtcagaaacaccaacac

SEQ ID NO: 67325 - RNA, 21 nt, synthetic construct
  source 1..21: mol_type = other RNA
acctgtcatgtcaaatttttc

SEQ ID NO: 67326 - RNA, 21 nt, synthetic construct
  source 1..21: mol_type = other RNA
acctgtccttgtgttttattt

SEQ ID NO: 67327 - RNA, 21 nt, synthetic construct
  source 1..21: mol_type = other RNA
acctgtctttcccattaccaa

SEQ ID NO: 67328 - RNA, 21 nt, synthetic construct
  source 1..21: mol_type = other RNA
acctgtgatttccagtgtttg

SEQ ID NO: 67329 - RNA, 21 nt, synthetic construct
  source 1..21: mol_type = other RNA
acctgttacatggttctgtgc

SEQ ID NO: 67330 - RNA, 21 nt, synthetic construct
  source 1..21: mol_type = other RNA
acctgttcatttgagaatttc

SEQ ID NO: 67331 - RNA, 21 nt, synthetic construct
  source 1..21: mol_type = other RNA
acctgttgaatagcaactgtt

SEQ ID NO: 67332 - RNA, 21 nt, synthetic construct
  source 1..21: mol_type = other RNA
acctgttgattgttgccatca

SEQ ID NO: 67333 - RNA, 21 nt, synthetic construct
  source 1..21: mol_type = other RNA
acctgtttaaaaagaaaaagc

SEQ ID NO: 67334 - RNA, 21 nt, synthetic construct
  source 1..21: mol_type = other RNA
accttaaaagagtgaaatgat

SEQ ID NO: 67335 - RNA, 21 nt, synthetic construct
  source 1..21: mol_type = other RNA
accttaaaccatatacaaaac

SEQ ID NO: 67336 - RNA, 21 nt, synthetic construct
  source 1..21: mol_type = other RNA
accttacactcaaaagccata

SEQ ID NO: 67337 - RNA, 21 nt, synthetic construct
  source 1..21: mol_type = other RNA
accttacattgtaatcctgtt

SEQ ID NO: 67338 - RNA, 21 nt, synthetic construct
  source 1..21: mol_type = other RNA
accttagaaatttaaggacca

SEQ ID NO: 67339 - RNA, 21 nt, synthetic construct
  source 1..21: mol_type = other RNA
accttagcccaagctaccatt

SEQ ID NO: 67340 - RNA, 21 nt, synthetic construct
  source 1..21: mol_type = other RNA
accttagtggttgacccataa

SEQ ID NO: 67341 - RNA, 21 nt, synthetic construct
  source 1..21: mol_type = other RNA
accttagttttcacttttgtg

SEQ ID NO: 67342 - RNA, 21 nt, synthetic construct
  source 1..21: mol_type = other RNA
accttatagatgacgaaagtg

SEQ ID NO: 67343 - RNA, 21 nt, synthetic construct
  source 1..21: mol_type = other RNA
accttatgtgaaagtagagga

SEQ ID NO: 67344 - RNA, 21 nt, synthetic construct
  source 1..21: mol_type = other RNA
accttattcaaataattgctg

SEQ ID NO: 67345 - RNA, 21 nt, synthetic construct
  source 1..21: mol_type = other RNA
accttatttggaaatatggtc

SEQ ID NO: 67346 - RNA, 21 nt, synthetic construct
  source 1..21: mol_type = other RNA
accttcaccaaagatttacta

SEQ ID NO: 67347 - RNA, 21 nt, synthetic construct
  source 1..21: mol_type = other RNA
accttcagaagccctgcagcc

SEQ ID NO: 67348 - RNA, 21 nt, synthetic construct
  source 1..21: mol_type = other RNA
accttccaaagtatgcatagc

SEQ ID NO: 67349 - RNA, 21 nt, synthetic construct
  source 1..21: mol_type = other RNA
accttccctactcactgaaac

SEQ ID NO: 67350 - RNA, 21 nt, synthetic construct
  source 1..21: mol_type = other RNA
accttcctcttcctcatccct

SEQ ID NO: 67351 - RNA, 21 nt, synthetic construct
  source 1..21: mol_type = other RNA
accttccttgtgtcttaaatt

SEQ ID NO: 67352 - RNA, 21 nt, synthetic construct
  source 1..21: mol_type = other RNA
accttctaaaatcatcacagt

SEQ ID NO: 67353 - RNA, 21 nt, synthetic construct
  source 1..21: mol_type = other RNA
accttctacttatcttttcta

SEQ ID NO: 67354 - RNA, 21 nt, synthetic construct
  source 1..21: mol_type = other RNA
accttctgctgggcccactct

SEQ ID NO: 67355 - RNA, 21 nt, synthetic construct
  source 1..21: mol_type = other RNA
accttctggggttcaaaccac

SEQ ID NO: 67356 - RNA, 21 nt, synthetic construct
  source 1..21: mol_type = other RNA
accttcttatttccttccagt

SEQ ID NO: 67357 - RNA, 21 nt, synthetic construct
  source 1..21: mol_type = other RNA
accttcttgagagtctcttaa

SEQ ID NO: 67358 - RNA, 21 nt, synthetic construct
  source 1..21: mol_type = other RNA
accttgaaaatgcccttattt

SEQ ID NO: 67359 - RNA, 21 nt, synthetic construct
  source 1..21: mol_type = other RNA
accttgaaaggatactgagaa

SEQ ID NO: 67360 - RNA, 21 nt, synthetic construct
  source 1..21: mol_type = other RNA
accttgaacatgaacgagaac

SEQ ID NO: 67361 - RNA, 21 nt, synthetic construct
  source 1..21: mol_type = other RNA
accttgaactgggacttctag

SEQ ID NO: 67362 - RNA, 21 nt, synthetic construct
  source 1..21: mol_type = other RNA
accttgaagtacttcagcgct

SEQ ID NO: 67363 - RNA, 21 nt, synthetic construct
  source 1..21: mol_type = other RNA
accttgacaataaatggtgca

SEQ ID NO: 67364 - RNA, 21 nt, synthetic construct
  source 1..21: mol_type = other RNA
accttgatttatggcctaaga

SEQ ID NO: 67365 - RNA, 21 nt, synthetic construct
  source 1..21: mol_type = other RNA
accttgctcattcatctgcag

SEQ ID NO: 67366 - RNA, 21 nt, synthetic construct
  source 1..21: mol_type = other RNA
accttggagagaaaccttggt

SEQ ID NO: 67367 - RNA, 21 nt, synthetic construct
  source 1..21: mol_type = other RNA
accttgggagaaaatttttac

SEQ ID NO: 67368 - RNA, 21 nt, synthetic construct
  source 1..21: mol_type = other RNA
accttgggaggctgaggctgg

SEQ ID NO: 67369 - RNA, 21 nt, synthetic construct
  source 1..21: mol_type = other RNA
accttggtgtgcttctgatag

SEQ ID NO: 67370 - RNA, 21 nt, synthetic construct
  source 1..21: mol_type = other RNA
accttgtatccagtaatcttg

SEQ ID NO: 67371 - RNA, 21 nt, synthetic construct
  source 1..21: mol_type = other RNA
accttgtgcatgtgcaggaaa

SEQ ID NO: 67372 - RNA, 21 nt, synthetic construct
  source 1..21: mol_type = other RNA
acctttaagttctccaagtta

SEQ ID NO: 67373 - RNA, 21 nt, synthetic construct
  source 1..21: mol_type = other RNA
acctttatctttggatatccc

SEQ ID NO: 67374 - RNA, 21 nt, synthetic construct
  source 1..21: mol_type = other RNA
acctttcctgcccctccactc

SEQ ID NO: 67375 - RNA, 21 nt, synthetic construct
  source 1..21: mol_type = other RNA
acctttcgctatcagtagttt

SEQ ID NO: 67376 - RNA, 21 nt, synthetic construct
  source 1..21: mol_type = other RNA
acctttctcaaagcccaccag

SEQ ID NO: 67377 - RNA, 21 nt, synthetic construct
  source 1..21: mol_type = other RNA
acctttcttaggtttctcatt

SEQ ID NO: 67378 - RNA, 21 nt, synthetic construct
  source 1..21: mol_type = other RNA
acctttgcctcctgggttcag

SEQ ID NO: 67379 - RNA, 21 nt, synthetic construct
  source 1..21: mol_type = other RNA
acctttggctactgtaaacaa

SEQ ID NO: 67380 - RNA, 21 nt, synthetic construct
  source 1..21: mol_type = other RNA
acctttgtattcatccagttt

SEQ ID NO: 67381 - RNA, 21 nt, synthetic construct
  source 1..21: mol_type = other RNA
acctttgtccactgtcagtgg

SEQ ID NO: 67382 - RNA, 21 nt, synthetic construct
  source 1..21: mol_type = other RNA
acctttgttgaaaacgaggaa

SEQ ID NO: 67383 - RNA, 21 nt, synthetic construct
  source 1..21: mol_type = other RNA
accttttaggtgccccactcc

SEQ ID NO: 67384 - RNA, 21 nt, synthetic construct
  source 1..21: mol_type = other RNA
accttttgtagaccctgttag

SEQ ID NO: 67385 - RNA, 21 nt, synthetic construct
  source 1..21: mol_type = other RNA
acctttttgggatctgtcatg

SEQ ID NO: 67386 - RNA, 21 nt, synthetic construct
  source 1..21: mol_type = other RNA
accttttttaaggaaaagtca

SEQ ID NO: 67387 - RNA, 21 nt, synthetic construct
  source 1..21: mol_type = other RNA
acgaaaatatccctggggttt

SEQ ID NO: 67388 - RNA, 21 nt, synthetic construct
  source 1..21: mol_type = other RNA
acgaaagcctttattttttct

SEQ ID NO: 67389 - RNA, 21 nt, synthetic construct
  source 1..21: mol_type = other RNA
acgaaagcggtcaacgcaccc

SEQ ID NO: 67390 - RNA, 21 nt, synthetic construct
  source 1..21: mol_type = other RNA
acgaaagtgaagcccagagag

SEQ ID NO: 67391 - RNA, 21 nt, synthetic construct
  source 1..21: mol_type = other RNA
acgaaagtgctctaccctttc

SEQ ID NO: 67392 - RNA, 21 nt, synthetic construct
  source 1..21: mol_type = other RNA
acgaaccaattaccataaagt

SEQ ID NO: 67393 - RNA, 21 nt, synthetic construct
  source 1..21: mol_type = other RNA
acgaagctacagtaatcaaac

SEQ ID NO: 67394 - RNA, 21 nt, synthetic construct
  source 1..21: mol_type = other RNA
acgaagtcacattctagtgat

SEQ ID NO: 67395 - RNA, 21 nt, synthetic construct
  source 1..21: mol_type = other RNA
acgaatgaaaacacaacatac

SEQ ID NO: 67396 - RNA, 21 nt, synthetic construct
  source 1..21: mol_type = other RNA
acgaatgaactcctatagtta

SEQ ID NO: 67397 - RNA, 21 nt, synthetic construct
  source 1..21: mol_type = other RNA
acgaatgcatgggaggtaata

SEQ ID NO: 67398 - RNA, 21 nt, synthetic construct
  source 1..21: mol_type = other RNA
acgaattctttaaaactgctg

SEQ ID NO: 67399 - RNA, 21 nt, synthetic construct
  source 1..21: mol_type = other RNA
acgacaatctctggggttagg

SEQ ID NO: 67400 - RNA, 21 nt, synthetic construct
  source 1..21: mol_type = other RNA
acgacaccagaactacacatt

SEQ ID NO: 67401 - RNA, 21 nt, synthetic construct
  source 1..21: mol_type = other RNA
acgacagcaggaaaagctacc

SEQ ID NO: 67402 - RNA, 21 nt, synthetic construct
  source 1..21: mol_type = other RNA
acgaccggacgtggtggctca

SEQ ID NO: 67403 - RNA, 21 nt, synthetic construct
  source 1..21: mol_type = other RNA
acgaccttgctcattcatctg

SEQ ID NO: 67404 - RNA, 21 nt, synthetic construct
  source 1..21: mol_type = other RNA
acgacgctcttgttcaaaaac

SEQ ID NO: 67405 - RNA, 21 nt, synthetic construct
  source 1..21: mol_type = other RNA
acgacgtatgcaacttactct

SEQ ID NO: 67406 - RNA, 21 nt, synthetic construct
  source 1..21: mol_type = other RNA
acgagaaaagcacaggcatcg

SEQ ID NO: 67407 - RNA, 21 nt, synthetic construct
  source 1..21: mol_type = other RNA
acgagaacaaaacaagaagaa

SEQ ID NO: 67408 - RNA, 21 nt, synthetic construct
  source 1..21: mol_type = other RNA
acgagaaggacagcttccacc

SEQ ID NO: 67409 - RNA, 21 nt, synthetic construct
  source 1..21: mol_type = other RNA
acgagactgttagggacttat

SEQ ID NO: 67410 - RNA, 21 nt, synthetic construct
  source 1..21: mol_type = other RNA
acgaggaaaagagaacattgg

SEQ ID NO: 67411 - RNA, 21 nt, synthetic construct
  source 1..21: mol_type = other RNA
acgaggacagactgcagttgg

SEQ ID NO: 67412 - RNA, 21 nt, synthetic construct
  source 1..21: mol_type = other RNA
acgagtaatggatgtttttag

SEQ ID NO: 67413 - RNA, 21 nt, synthetic construct
  source 1..21: mol_type = other RNA
acgagtatcatataaattgca

SEQ ID NO: 67414 - RNA, 21 nt, synthetic construct
  source 1..21: mol_type = other RNA
acgagtattcaagtttcaccc

SEQ ID NO: 67415 - RNA, 21 nt, synthetic construct
  source 1..21: mol_type = other RNA
acgagtgtgtttcgcaaagta

SEQ ID NO: 67416 - RNA, 21 nt, synthetic construct
  source 1..21: mol_type = other RNA
acgagttatgcaagatgtcaa

SEQ ID NO: 67417 - RNA, 21 nt, synthetic construct
  source 1..21: mol_type = other RNA
acgagttcaggaccagcttgg

SEQ ID NO: 67418 - RNA, 21 nt, synthetic construct
  source 1..21: mol_type = other RNA
acgataaacttcagttttatc

SEQ ID NO: 67419 - RNA, 21 nt, synthetic construct
  source 1..21: mol_type = other RNA
acgatagtctcctatattgtc

SEQ ID NO: 67420 - RNA, 21 nt, synthetic construct
  source 1..21: mol_type = other RNA
acgatattcctatcagaagca

SEQ ID NO: 67421 - RNA, 21 nt, synthetic construct
  source 1..21: mol_type = other RNA
acgatccttactaccaccact

SEQ ID NO: 67422 - RNA, 21 nt, synthetic construct
  source 1..21: mol_type = other RNA
acgatgaaattgaccattcca

SEQ ID NO: 67423 - RNA, 21 nt, synthetic construct
  source 1..21: mol_type = other RNA
acgatgcattccagattgaaa

SEQ ID NO: 67424 - RNA, 21 nt, synthetic construct
  source 1..21: mol_type = other RNA
acgatgcttaggtaagaaaaa

SEQ ID NO: 67425 - RNA, 21 nt, synthetic construct
  source 1..21: mol_type = other RNA
acgatggtttctgacacccga

SEQ ID NO: 67426 - RNA, 21 nt, synthetic construct
  source 1..21: mol_type = other RNA
acgattctgacccagagccta

SEQ ID NO: 67427 - RNA, 21 nt, synthetic construct
  source 1..21: mol_type = other RNA
acgatttcttaaaaatgacac

SEQ ID NO: 67428 - RNA, 21 nt, synthetic construct
  source 1..21: mol_type = other RNA
acgatttttccaacagtttac

SEQ ID NO: 67429 - RNA, 21 nt, synthetic construct
  source 1..21: mol_type = other RNA
acgcaaaggatgtcaacaaaa

SEQ ID NO: 67430 - RNA, 21 nt, synthetic construct
  source 1..21: mol_type = other RNA
acgcacagggagatacttgat

SEQ ID NO: 67431 - RNA, 21 nt, synthetic construct
  source 1..21: mol_type = other RNA
acgcacccagagcgggtttcc

SEQ ID NO: 67432 - RNA, 21 nt, synthetic construct
  source 1..21: mol_type = other RNA
acgcagaacagtgtttacaca

SEQ ID NO: 67433 - RNA, 21 nt, synthetic construct
  source 1..21: mol_type = other RNA
acgcagaaccactgagcacaa

SEQ ID NO: 67434 - RNA, 21 nt, synthetic construct
  source 1..21: mol_type = other RNA
acgcaggcaaacagcgccact

SEQ ID NO: 67435 - RNA, 21 nt, synthetic construct
  source 1..21: mol_type = other RNA
acgcagtttgttctgctgttg

SEQ ID NO: 67436 - RNA, 21 nt, synthetic construct
  source 1..21: mol_type = other RNA
acgcatctggtctatctcatt

SEQ ID NO: 67437 - RNA, 21 nt, synthetic construct
  source 1..21: mol_type = other RNA
acgcattgcattgactaccaa

SEQ ID NO: 67438 - RNA, 21 nt, synthetic construct
  source 1..21: mol_type = other RNA
acgcattgtgatgtctcagat

SEQ ID NO: 67439 - RNA, 21 nt, synthetic construct
  source 1..21: mol_type = other RNA
acgccaattttcatagcagca

SEQ ID NO: 67440 - RNA, 21 nt, synthetic construct
  source 1..21: mol_type = other RNA
acgccactgcaggtgttggtg

SEQ ID NO: 67441 - RNA, 21 nt, synthetic construct
  source 1..21: mol_type = other RNA
acgccactgcattccgcctgg

SEQ ID NO: 67442 - RNA, 21 nt, synthetic construct
  source 1..21: mol_type = other RNA
acgccatctcgcccagctaat

SEQ ID NO: 67443 - RNA, 21 nt, synthetic construct
  source 1..21: mol_type = other RNA
acgcccattaggatagctatt

SEQ ID NO: 67444 - RNA, 21 nt, synthetic construct
  source 1..21: mol_type = other RNA
acgcccggcccatgacatgtg

SEQ ID NO: 67445 - RNA, 21 nt, synthetic construct
  source 1..21: mol_type = other RNA
acgcccggccgatgcctgtgc

SEQ ID NO: 67446 - RNA, 21 nt, synthetic construct
  source 1..21: mol_type = other RNA
acgcctagctgacttttaaaa

SEQ ID NO: 67447 - RNA, 21 nt, synthetic construct
  source 1..21: mol_type = other RNA
acgccttcgcgggcaccttcc

SEQ ID NO: 67448 - RNA, 21 nt, synthetic construct
  source 1..21: mol_type = other RNA
acgcctttcatttggcctctg

SEQ ID NO: 67449 - RNA, 21 nt, synthetic construct
  source 1..21: mol_type = other RNA
acgcgcaacaattcaacagct

SEQ ID NO: 67450 - RNA, 21 nt, synthetic construct
  source 1..21: mol_type = other RNA
acgcgcattttttaagtggcg

SEQ ID NO: 67451 - RNA, 21 nt, synthetic construct
  source 1..21: mol_type = other RNA
acgcggaatgaagcaggcctt

SEQ ID NO: 67452 - RNA, 21 nt, synthetic construct
  source 1..21: mol_type = other RNA
acgcggcacttggtaagctgt

SEQ ID NO: 67453 - RNA, 21 nt, synthetic construct
  source 1..21: mol_type = other RNA
acgcgggaggctgaggcagga

SEQ ID NO: 67454 - RNA, 21 nt, synthetic construct
  source 1..21: mol_type = other RNA
acgcgtaagggtacagaactg

SEQ ID NO: 67455 - RNA, 21 nt, synthetic construct
  source 1..21: mol_type = other RNA
acgcgtggatgtgtgcacaac

SEQ ID NO: 67456 - RNA, 21 nt, synthetic construct
  source 1..21: mol_type = other RNA
acgctaaattaaaggctggaa

SEQ ID NO: 67457 - RNA, 21 nt, synthetic construct
  source 1..21: mol_type = other RNA
acgctcttgttcaaaaacctt

SEQ ID NO: 67458 - RNA, 21 nt, synthetic construct
  source 1..21: mol_type = other RNA
acgctgatgacagttactcta

SEQ ID NO: 67459 - RNA, 21 nt, synthetic construct
  source 1..21: mol_type = other RNA
acgctgccaaaagccaagagc

SEQ ID NO: 67460 - RNA, 21 nt, synthetic construct
  source 1..21: mol_type = other RNA
acgctggaagggagcccaagc

SEQ ID NO: 67461 - RNA, 21 nt, synthetic construct
  source 1..21: mol_type = other RNA
acgctgtgaatgtgaggtgag

SEQ ID NO: 67462 - RNA, 21 nt, synthetic construct
  source 1..21: mol_type = other RNA
acgctgtggctaacaatcaaa

SEQ ID NO: 67463 - RNA, 21 nt, synthetic construct
  source 1..21: mol_type = other RNA
acgctgtggcttgggtgacct

SEQ ID NO: 67464 - RNA, 21 nt, synthetic construct
  source 1..21: mol_type = other RNA
acgcttttatgttataatgag

SEQ ID NO: 67465 - RNA, 21 nt, synthetic construct
  source 1..21: mol_type = other RNA
acgctttttatggaaacatgg

SEQ ID NO: 67466 - RNA, 21 nt, synthetic construct
  source 1..21: mol_type = other RNA
acggaaaaacattctacagta

SEQ ID NO: 67467 - RNA, 21 nt, synthetic construct
  source 1..21: mol_type = other RNA
acggaaactttatacctgttg

SEQ ID NO: 67468 - RNA, 21 nt, synthetic construct
  source 1..21: mol_type = other RNA
acggaaatataacattaccaa

SEQ ID NO: 67469 - RNA, 21 nt, synthetic construct
  source 1..21: mol_type = other RNA
acggaaatgagtgagccacag

SEQ ID NO: 67470 - RNA, 21 nt, synthetic construct
  source 1..21: mol_type = other RNA
acggaagactcatacttcctg

SEQ ID NO: 67471 - RNA, 21 nt, synthetic construct
  source 1..21: mol_type = other RNA
acggaatcttaccctgttgac

SEQ ID NO: 67472 - RNA, 21 nt, synthetic construct
  source 1..21: mol_type = other RNA
acggaatgattccacttatat

SEQ ID NO: 67473 - RNA, 21 nt, synthetic construct
  source 1..21: mol_type = other RNA
acggaatgcccctttgagcag

SEQ ID NO: 67474 - RNA, 21 nt, synthetic construct
  source 1..21: mol_type = other RNA
acggacatttttccaaagata

SEQ ID NO: 67475 - RNA, 21 nt, synthetic construct
  source 1..21: mol_type = other RNA
acggacgcaggcaaacagcgc

SEQ ID NO: 67476 - RNA, 21 nt, synthetic construct
  source 1..21: mol_type = other RNA
acggacttggcacaggagagc

SEQ ID NO: 67477 - RNA, 21 nt, synthetic construct
  source 1..21: mol_type = other RNA
acggaggatgaggggctgagc

SEQ ID NO: 67478 - RNA, 21 nt, synthetic construct
  source 1..21: mol_type = other RNA
acggcgagcttgatctttact

SEQ ID NO: 67479 - RNA, 21 nt, synthetic construct
  source 1..21: mol_type = other RNA
acggcgtttcgccatgttggc

SEQ ID NO: 67480 - RNA, 21 nt, synthetic construct
  source 1..21: mol_type = other RNA
acggctcaggcctgttgtgag

SEQ ID NO: 67481 - RNA, 21 nt, synthetic construct
  source 1..21: mol_type = other RNA
acggctgattataaccttgaa

SEQ ID NO: 67482 - RNA, 21 nt, synthetic construct
  source 1..21: mol_type = other RNA
acggcttaacacctttgtatt

SEQ ID NO: 67483 - RNA, 21 nt, synthetic construct
  source 1..21: mol_type = other RNA
acgggtacacatcctaataca

SEQ ID NO: 67484 - RNA, 21 nt, synthetic construct
  source 1..21: mol_type = other RNA
acgggtggtagggagggggct

SEQ ID NO: 67485 - RNA, 21 nt, synthetic construct
  source 1..21: mol_type = other RNA
acgggttatacacacataagg

SEQ ID NO: 67486 - RNA, 21 nt, synthetic construct
  source 1..21: mol_type = other RNA
acggtctcacactgttgtcca

SEQ ID NO: 67487 - RNA, 21 nt, synthetic construct
  source 1..21: mol_type = other RNA
acggtgaagaaccgactgaaa

SEQ ID NO: 67488 - RNA, 21 nt, synthetic construct
  source 1..21: mol_type = other RNA
acggtgccctacatatggcaa

SEQ ID NO: 67489 - RNA, 21 nt, synthetic construct
  source 1..21: mol_type = other RNA
acggttccctgtagagatttt

SEQ ID NO: 67490 - RNA, 21 nt, synthetic construct
  source 1..21: mol_type = other RNA
acgtaacctaaagttgaggtt

SEQ ID NO: 67491 - RNA, 21 nt, synthetic construct
  source 1..21: mol_type = other RNA
acgtactaggtatcacagtga

SEQ ID NO: 67492 - RNA, 21 nt, synthetic construct
  source 1..21: mol_type = other RNA
acgtactagtcagcacactct

SEQ ID NO: 67493 - RNA, 21 nt, synthetic construct
  source 1..21: mol_type = other RNA
acgtatatgaaaagcccaatc

SEQ ID NO: 67494 - RNA, 21 nt, synthetic construct
  source 1..21: mol_type = other RNA
acgtatctgggaaaaaataag

SEQ ID NO: 67495 - RNA, 21 nt, synthetic construct
  source 1..21: mol_type = other RNA
acgtatgcaacttactctcaa

SEQ ID NO: 67496 - RNA, 21 nt, synthetic construct
  source 1..21: mol_type = other RNA
acgtatttatcatgtcttctt

SEQ ID NO: 67497 - RNA, 21 nt, synthetic construct
  source 1..21: mol_type = other RNA
acgtcaccgcaacctccgcct

SEQ ID NO: 67498 - RNA, 21 nt, synthetic construct
  source 1..21: mol_type = other RNA
acgtcagagcagcactgatgt

SEQ ID NO: 67499 - RNA, 21 nt, synthetic construct
  source 1..21: mol_type = other RNA
acgtccatcaacagcagaaca

SEQ ID NO: 67500 - RNA, 21 nt, synthetic construct
  source 1..21: mol_type = other RNA
acgtccggtcgttggatttat

SEQ ID NO: 67501 - RNA, 21 nt, synthetic construct
  source 1..21: mol_type = other RNA
acgtcgtcccccatccccttt

SEQ ID NO: 67502 - RNA, 21 nt, synthetic construct
  source 1..21: mol_type = other RNA
acgtctgtggtctcagctcct

SEQ ID NO: 67503 - RNA, 21 nt, synthetic construct
  source 1..21: mol_type = other RNA
acgtcttgtcaataatttgga

SEQ ID NO: 67504 - RNA, 21 nt, synthetic construct
  source 1..21: mol_type = other RNA
acgtgaagatggagttacgct

SEQ ID NO: 67505 - RNA, 21 nt, synthetic construct
  source 1..21: mol_type = other RNA
acgtgaagctacagactaata

SEQ ID NO: 67506 - RNA, 21 nt, synthetic construct
  source 1..21: mol_type = other RNA
acgtgagatcatgccactcca

SEQ ID NO: 67507 - RNA, 21 nt, synthetic construct
  source 1..21: mol_type = other RNA
acgtgagccaccgcacctggc

SEQ ID NO: 67508 - RNA, 21 nt, synthetic construct
  source 1..21: mol_type = other RNA
acgtgagctggaagtaaggat

SEQ ID NO: 67509 - RNA, 21 nt, synthetic construct
  source 1..21: mol_type = other RNA
acgtgcaaactaccaagactg

SEQ ID NO: 67510 - RNA, 21 nt, synthetic construct
  source 1..21: mol_type = other RNA
acgtgcacacccagttatctc

SEQ ID NO: 67511 - RNA, 21 nt, synthetic construct
  source 1..21: mol_type = other RNA
acgtgcagagcaggggtgggg

SEQ ID NO: 67512 - RNA, 21 nt, synthetic construct
  source 1..21: mol_type = other RNA
acgtgcattcatactgaaggc

SEQ ID NO: 67513 - RNA, 21 nt, synthetic construct
  source 1..21: mol_type = other RNA
acgtgcttgctctgcggcagg

SEQ ID NO: 67514 - RNA, 21 nt, synthetic construct
  source 1..21: mol_type = other RNA
acgtgctttccttattgagaa

SEQ ID NO: 67515 - RNA, 21 nt, synthetic construct
  source 1..21: mol_type = other RNA
acgtggagtgcaatggggcaa

SEQ ID NO: 67516 - RNA, 21 nt, synthetic construct
  source 1..21: mol_type = other RNA
acgtggcgctccctctgtgtg

SEQ ID NO: 67517 - RNA, 21 nt, synthetic construct
  source 1..21: mol_type = other RNA
acgtggctgtcaaaaatgtgt

SEQ ID NO: 67518 - RNA, 21 nt, synthetic construct
  source 1..21: mol_type = other RNA
acgtgtatactgggtgtgatg

SEQ ID NO: 67519 - RNA, 21 nt, synthetic construct
  source 1..21: mol_type = other RNA
acgtgtattgagtgtagctgt

SEQ ID NO: 67520 - RNA, 21 nt, synthetic construct
  source 1..21: mol_type = other RNA
acgtgtgtgtaagcacacatg

SEQ ID NO: 67521 - RNA, 21 nt, synthetic construct
  source 1..21: mol_type = other RNA
acgttaaaggaaaagagatct

SEQ ID NO: 67522 - RNA, 21 nt, synthetic construct
  source 1..21: mol_type = other RNA
acgttaactgtattgcaaact

SEQ ID NO: 67523 - RNA, 21 nt, synthetic construct
  source 1..21: mol_type = other RNA
acgttaccctctggaatgccc

SEQ ID NO: 67524 - RNA, 21 nt, synthetic construct
  source 1..21: mol_type = other RNA
acgttagcatcaccatcatca

SEQ ID NO: 67525 - RNA, 21 nt, synthetic construct
  source 1..21: mol_type = other RNA
acgttcagataacaaagggtt

SEQ ID NO: 67526 - RNA, 21 nt, synthetic construct
  source 1..21: mol_type = other RNA
acgtttatctacagaggattt

SEQ ID NO: 67527 - RNA, 21 nt, synthetic construct
  source 1..21: mol_type = other RNA
acgtttgagttgtttccactt

SEQ ID NO: 67528 - RNA, 21 nt, synthetic construct
  source 1..21: mol_type = other RNA
acgtttgatctggtcacaaac

SEQ ID NO: 67529 - RNA, 21 nt, synthetic construct
  source 1..21: mol_type = other RNA
acgtttgctttggagtgagag

SEQ ID NO: 67530 - RNA, 21 nt, synthetic construct
  source 1..21: mol_type = other RNA
acgtttggtgactgaattccc

SEQ ID NO: 67531 - RNA, 21 nt, synthetic construct
  source 1..21: mol_type = other RNA
acgtttttagaaatttaccca

SEQ ID NO: 67532 - RNA, 21 nt, synthetic construct
  source 1..21: mol_type = other RNA
actaaaaagaaaaagttgggc

SEQ ID NO: 67533 - RNA, 21 nt, synthetic construct
  source 1..21: mol_type = other RNA
actaaaacaggaagttgagaa

SEQ ID NO: 67534 - RNA, 21 nt, synthetic construct
  source 1..21: mol_type = other RNA
actaaacaaatcagatttcag

SEQ ID NO: 67535 - RNA, 21 nt, synthetic construct
  source 1..21: mol_type = other RNA
actaaactagtatcaacctgc

SEQ ID NO: 67536 - RNA, 21 nt, synthetic construct
  source 1..21: mol_type = other RNA
actaaactgaacgaagtgaaa

SEQ ID NO: 67537 - RNA, 21 nt, synthetic construct
  source 1..21: mol_type = other RNA
actaaactttgagtagcaccc

SEQ ID NO: 67538 - RNA, 21 nt, synthetic construct
  source 1..21: mol_type = other RNA
actaaagatttgccaatcaat

SEQ ID NO: 67539 - RNA, 21 nt, synthetic construct
  source 1..21: mol_type = other RNA
actaaaggggatttcatgaac

SEQ ID NO: 67540 - RNA, 21 nt, synthetic construct
  source 1..21: mol_type = other RNA
actaaatacaccaaactcaaa

SEQ ID NO: 67541 - RNA, 21 nt, synthetic construct
  source 1..21: mol_type = other RNA
actaaatgatctttcaagggg

SEQ ID NO: 67542 - RNA, 21 nt, synthetic construct
  source 1..21: mol_type = other RNA
actaaatgtgagcatttagcc

SEQ ID NO: 67543 - RNA, 21 nt, synthetic construct
  source 1..21: mol_type = other RNA
actaaattttgaggcttttgg

SEQ ID NO: 67544 - RNA, 21 nt, synthetic construct
  source 1..21: mol_type = other RNA
actaacaaagaacaggaaggg

SEQ ID NO: 67545 - RNA, 21 nt, synthetic construct
  source 1..21: mol_type = other RNA
actaacaaagggcctgttcca

SEQ ID NO: 67546 - RNA, 21 nt, synthetic construct
  source 1..21: mol_type = other RNA
actaacaagaaagggtagctt

SEQ ID NO: 67547 - RNA, 21 nt, synthetic construct
  source 1..21: mol_type = other RNA
actaacagggtctacaaaagg

SEQ ID NO: 67548 - RNA, 21 nt, synthetic construct
  source 1..21: mol_type = other RNA
actaaccaacattgagtttca

SEQ ID NO: 67549 - RNA, 21 nt, synthetic construct
  source 1..21: mol_type = other RNA
actaacgatccttactaccac

SEQ ID NO: 67550 - RNA, 21 nt, synthetic construct
  source 1..21: mol_type = other RNA
actaactagaaaaccgacagc

SEQ ID NO: 67551 - RNA, 21 nt, synthetic construct
  source 1..21: mol_type = other RNA
actaactttctattcccctgg

SEQ ID NO: 67552 - RNA, 21 nt, synthetic construct
  source 1..21: mol_type = other RNA
actaagaaaaacagaagacac

SEQ ID NO: 67553 - RNA, 21 nt, synthetic construct
  source 1..21: mol_type = other RNA
actaagaagatggttggaagt

SEQ ID NO: 67554 - RNA, 21 nt, synthetic construct
  source 1..21: mol_type = other RNA
actaagaagtgaaactgctgg

SEQ ID NO: 67555 - RNA, 21 nt, synthetic construct
  source 1..21: mol_type = other RNA
actaagacactagctattgtc

SEQ ID NO: 67556 - RNA, 21 nt, synthetic construct
  source 1..21: mol_type = other RNA
actaagaccccagtagaaatc

SEQ ID NO: 67557 - RNA, 21 nt, synthetic construct
  source 1..21: mol_type = other RNA
actaagagtgaaaaggcaaac

SEQ ID NO: 67558 - RNA, 21 nt, synthetic construct
  source 1..21: mol_type = other RNA
actaagcagaaatgacaagta

SEQ ID NO: 67559 - RNA, 21 nt, synthetic construct
  source 1..21: mol_type = other RNA
actaagcctatgtaagacaat

SEQ ID NO: 67560 - RNA, 21 nt, synthetic construct
  source 1..21: mol_type = other RNA
actaaggaaagctcaggacca

SEQ ID NO: 67561 - RNA, 21 nt, synthetic construct
  source 1..21: mol_type = other RNA
actaaggtcaacacatcagcg

SEQ ID NO: 67562 - RNA, 21 nt, synthetic construct
  source 1..21: mol_type = other RNA
actaaggtcaagagagattaa

SEQ ID NO: 67563 - RNA, 21 nt, synthetic construct
  source 1..21: mol_type = other RNA
actaagtcagaattcactgtg

SEQ ID NO: 67564 - RNA, 21 nt, synthetic construct
  source 1..21: mol_type = other RNA
actaagtggtattctatcatc

SEQ ID NO: 67565 - RNA, 21 nt, synthetic construct
  source 1..21: mol_type = other RNA
actaagtgtgaagattaagca

SEQ ID NO: 67566 - RNA, 21 nt, synthetic construct
  source 1..21: mol_type = other RNA
actaataaatgcataaacgac

SEQ ID NO: 67567 - RNA, 21 nt, synthetic construct
  source 1..21: mol_type = other RNA
actaataattgcttttgctga

SEQ ID NO: 67568 - RNA, 21 nt, synthetic construct
  source 1..21: mol_type = other RNA
actaatagccagtgcagcaag

SEQ ID NO: 67569 - RNA, 21 nt, synthetic construct
  source 1..21: mol_type = other RNA
actaatatgagttcctgcttc

SEQ ID NO: 67570 - RNA, 21 nt, synthetic construct
  source 1..21: mol_type = other RNA
actaatcaaacataccccaac

SEQ ID NO: 67571 - RNA, 21 nt, synthetic construct
  source 1..21: mol_type = other RNA
actaatccttctcatagtctt

SEQ ID NO: 67572 - RNA, 21 nt, synthetic construct
  source 1..21: mol_type = other RNA
actaatgagaatttcagaaag

SEQ ID NO: 67573 - RNA, 21 nt, synthetic construct
  source 1..21: mol_type = other RNA
actaatgcctcaaattagtca

SEQ ID NO: 67574 - RNA, 21 nt, synthetic construct
  source 1..21: mol_type = other RNA
actaatgtccttttcctgttc

SEQ ID NO: 67575 - RNA, 21 nt, synthetic construct
  source 1..21: mol_type = other RNA
actaattactgtttcttagct

SEQ ID NO: 67576 - RNA, 21 nt, synthetic construct
  source 1..21: mol_type = other RNA
actaatttcatacaagttgtg

SEQ ID NO: 67577 - RNA, 21 nt, synthetic construct
  source 1..21: mol_type = other RNA
actaatttgaggcattagtga

SEQ ID NO: 67578 - RNA, 21 nt, synthetic construct
  source 1..21: mol_type = other RNA
actacaagagttcccctatac

SEQ ID NO: 67579 - RNA, 21 nt, synthetic construct
  source 1..21: mol_type = other RNA
actacaattactgtacaaaga

SEQ ID NO: 67580 - RNA, 21 nt, synthetic construct
  source 1..21: mol_type = other RNA
actacacagacatgaacaatc

SEQ ID NO: 67581 - RNA, 21 nt, synthetic construct
  source 1..21: mol_type = other RNA
actacacatacacagggaaaa

SEQ ID NO: 67582 - RNA, 21 nt, synthetic construct
  source 1..21: mol_type = other RNA
actacacatcagtgctgctct

SEQ ID NO: 67583 - RNA, 21 nt, synthetic construct
  source 1..21: mol_type = other RNA
actacacattccagaccagca

SEQ ID NO: 67584 - RNA, 21 nt, synthetic construct
  source 1..21: mol_type = other RNA
actacacccggctaattaaac

SEQ ID NO: 67585 - RNA, 21 nt, synthetic construct
  source 1..21: mol_type = other RNA
actacactgaagggaatttta

SEQ ID NO: 67586 - RNA, 21 nt, synthetic construct
  source 1..21: mol_type = other RNA
actacagacatgccacaccac

SEQ ID NO: 67587 - RNA, 21 nt, synthetic construct
  source 1..21: mol_type = other RNA
actacagcatattagctgtct

SEQ ID NO: 67588 - RNA, 21 nt, synthetic construct
  source 1..21: mol_type = other RNA
actacaggcaacaaaagaaaa

SEQ ID NO: 67589 - RNA, 21 nt, synthetic construct
  source 1..21: mol_type = other RNA
actacaggtgtgaaccacgca

SEQ ID NO: 67590 - RNA, 21 nt, synthetic construct
  source 1..21: mol_type = other RNA
actacagtcacacaccactac

SEQ ID NO: 67591 - RNA, 21 nt, synthetic construct
  source 1..21: mol_type = other RNA
actacagtgtttagggacgaa

SEQ ID NO: 67592 - RNA, 21 nt, synthetic construct
  source 1..21: mol_type = other RNA
actacatgtaaaaactgtttg

SEQ ID NO: 67593 - RNA, 21 nt, synthetic construct
  source 1..21: mol_type = other RNA
actaccaattctccctgaaat

SEQ ID NO: 67594 - RNA, 21 nt, synthetic construct
  source 1..21: mol_type = other RNA
actaccaccactaatgtcaca

SEQ ID NO: 67595 - RNA, 21 nt, synthetic construct
  source 1..21: mol_type = other RNA
actaccactgaggtcaagaaa

SEQ ID NO: 67596 - RNA, 21 nt, synthetic construct
  source 1..21: mol_type = other RNA
actaccatctctccaacagaa

SEQ ID NO: 67597 - RNA, 21 nt, synthetic construct
  source 1..21: mol_type = other RNA
actacctagaaaaacaccaaa

SEQ ID NO: 67598 - RNA, 21 nt, synthetic construct
  source 1..21: mol_type = other RNA
actacctatagaattcttctt

SEQ ID NO: 67599 - RNA, 21 nt, synthetic construct
  source 1..21: mol_type = other RNA
actacgaagctacagtaatca

SEQ ID NO: 67600 - RNA, 21 nt, synthetic construct
  source 1..21: mol_type = other RNA
actacgcccggcccatgacat

SEQ ID NO: 67601 - RNA, 21 nt, synthetic construct
  source 1..21: mol_type = other RNA
actacgcctagctgactttta

SEQ ID NO: 67602 - RNA, 21 nt, synthetic construct
  source 1..21: mol_type = other RNA
actactatttcgcaaagcaac

SEQ ID NO: 67603 - RNA, 21 nt, synthetic construct
  source 1..21: mol_type = other RNA
actactgacctgggagaaaga

SEQ ID NO: 67604 - RNA, 21 nt, synthetic construct
  source 1..21: mol_type = other RNA
actactgatagcgaaaggtac

SEQ ID NO: 67605 - RNA, 21 nt, synthetic construct
  source 1..21: mol_type = other RNA
actactgcaaatatccaatca

SEQ ID NO: 67606 - RNA, 21 nt, synthetic construct
  source 1..21: mol_type = other RNA
actactgcattttttgccaaa

SEQ ID NO: 67607 - RNA, 21 nt, synthetic construct
  source 1..21: mol_type = other RNA
actactgtactgtttagcatc

SEQ ID NO: 67608 - RNA, 21 nt, synthetic construct
  source 1..21: mol_type = other RNA
actacttagcccctgctgcca

SEQ ID NO: 67609 - RNA, 21 nt, synthetic construct
  source 1..21: mol_type = other RNA
actacttcgtgtgtggagtgg

SEQ ID NO: 67610 - RNA, 21 nt, synthetic construct
  source 1..21: mol_type = other RNA
actacttgtcaggtgggcact

SEQ ID NO: 67611 - RNA, 21 nt, synthetic construct
  source 1..21: mol_type = other RNA
actagaaaaccgacagcagat

SEQ ID NO: 67612 - RNA, 21 nt, synthetic construct
  source 1..21: mol_type = other RNA
actagaaaagataagtagaag

SEQ ID NO: 67613 - RNA, 21 nt, synthetic construct
  source 1..21: mol_type = other RNA
actagaaacttcttctgttgg

SEQ ID NO: 67614 - RNA, 21 nt, synthetic construct
  source 1..21: mol_type = other RNA
actagaactgtgttacattgc

SEQ ID NO: 67615 - RNA, 21 nt, synthetic construct
  source 1..21: mol_type = other RNA
actagaagcactttttaccaa

SEQ ID NO: 67616 - RNA, 21 nt, synthetic construct
  source 1..21: mol_type = other RNA
actagaatactccaccagcat

SEQ ID NO: 67617 - RNA, 21 nt, synthetic construct
  source 1..21: mol_type = other RNA
actagaatgtgacttcgtcaa

SEQ ID NO: 67618 - RNA, 21 nt, synthetic construct
  source 1..21: mol_type = other RNA
actagaattgactttaccctg

SEQ ID NO: 67619 - RNA, 21 nt, synthetic construct
  source 1..21: mol_type = other RNA
actagacacatttttgacagc

SEQ ID NO: 67620 - RNA, 21 nt, synthetic construct
  source 1..21: mol_type = other RNA
actagacctttcttaggtttc

SEQ ID NO: 67621 - RNA, 21 nt, synthetic construct
  source 1..21: mol_type = other RNA
actagactgcctgaggtctca

SEQ ID NO: 67622 - RNA, 21 nt, synthetic construct
  source 1..21: mol_type = other RNA
actagagaaagcatcagagct

SEQ ID NO: 67623 - RNA, 21 nt, synthetic construct
  source 1..21: mol_type = other RNA
actagagatgggaaagtattc

SEQ ID NO: 67624 - RNA, 21 nt, synthetic construct
  source 1..21: mol_type = other RNA
actagagcttcaacctcctgg

SEQ ID NO: 67625 - RNA, 21 nt, synthetic construct
  source 1..21: mol_type = other RNA
actagagtattacctatgaat

SEQ ID NO: 67626 - RNA, 21 nt, synthetic construct
  source 1..21: mol_type = other RNA
actagatcaagcccttccttg

SEQ ID NO: 67627 - RNA, 21 nt, synthetic construct
  source 1..21: mol_type = other RNA
actagatctcttttcctttaa

SEQ ID NO: 67628 - RNA, 21 nt, synthetic construct
  source 1..21: mol_type = other RNA
actagatgcctcgaaggcctg

SEQ ID NO: 67629 - RNA, 21 nt, synthetic construct
  source 1..21: mol_type = other RNA
actagattaccttgaagttta

SEQ ID NO: 67630 - RNA, 21 nt, synthetic construct
  source 1..21: mol_type = other RNA
actagcaaactactgatagcg

SEQ ID NO: 67631 - RNA, 21 nt, synthetic construct
  source 1..21: mol_type = other RNA
actagcaaactgaatcagaca

SEQ ID NO: 67632 - RNA, 21 nt, synthetic construct
  source 1..21: mol_type = other RNA
actagcaatccaggatcttac

SEQ ID NO: 67633 - RNA, 21 nt, synthetic construct
  source 1..21: mol_type = other RNA
actagccactgggtcttatag

SEQ ID NO: 67634 - RNA, 21 nt, synthetic construct
  source 1..21: mol_type = other RNA
actagccagtgattggatatt

SEQ ID NO: 67635 - RNA, 21 nt, synthetic construct
  source 1..21: mol_type = other RNA
actagctattagagaaatgca

SEQ ID NO: 67636 - RNA, 21 nt, synthetic construct
  source 1..21: mol_type = other RNA
actagctattgtcttttctat

SEQ ID NO: 67637 - RNA, 21 nt, synthetic construct
  source 1..21: mol_type = other RNA
actagctgacccactggtttc

SEQ ID NO: 67638 - RNA, 21 nt, synthetic construct
  source 1..21: mol_type = other RNA
actaggctcctgagaaccgga

SEQ ID NO: 67639 - RNA, 21 nt, synthetic construct
  source 1..21: mol_type = other RNA
actaggctgtcccaaatgcac

SEQ ID NO: 67640 - RNA, 21 nt, synthetic construct
  source 1..21: mol_type = other RNA
actagggactggcctcggcca

SEQ ID NO: 67641 - RNA, 21 nt, synthetic construct
  source 1..21: mol_type = other RNA
actaggggactaacagggtct

SEQ ID NO: 67642 - RNA, 21 nt, synthetic construct
  source 1..21: mol_type = other RNA
actaggtatcacagtgaggac

SEQ ID NO: 67643 - RNA, 21 nt, synthetic construct
  source 1..21: mol_type = other RNA
actaggtatttgaaaaatgtc

SEQ ID NO: 67644 - RNA, 21 nt, synthetic construct
  source 1..21: mol_type = other RNA
actagtaagtaaaatcggaac

SEQ ID NO: 67645 - RNA, 21 nt, synthetic construct
  source 1..21: mol_type = other RNA
actagtacactgttgatttag

SEQ ID NO: 67646 - RNA, 21 nt, synthetic construct
  source 1..21: mol_type = other RNA
actagtacgtgcagagcaggg

SEQ ID NO: 67647 - RNA, 21 nt, synthetic construct
  source 1..21: mol_type = other RNA
actagtagaaagcaggttcat

SEQ ID NO: 67648 - RNA, 21 nt, synthetic construct
  source 1..21: mol_type = other RNA
actagtaggatgaattacaaa

SEQ ID NO: 67649 - RNA, 21 nt, synthetic construct
  source 1..21: mol_type = other RNA
actagtataagagaaggaagc

SEQ ID NO: 67650 - RNA, 21 nt, synthetic construct
  source 1..21: mol_type = other RNA
actagtatcaacctgcaggta

SEQ ID NO: 67651 - RNA, 21 nt, synthetic construct
  source 1..21: mol_type = other RNA
actagtcaccctacagactca

SEQ ID NO: 67652 - RNA, 21 nt, synthetic construct
  source 1..21: mol_type = other RNA
actagtcagcacactcttaat

SEQ ID NO: 67653 - RNA, 21 nt, synthetic construct
  source 1..21: mol_type = other RNA
actagtcagtatatttactgc

SEQ ID NO: 67654 - RNA, 21 nt, synthetic construct
  source 1..21: mol_type = other RNA
actagtctccatacaaggaga

SEQ ID NO: 67655 - RNA, 21 nt, synthetic construct
  source 1..21: mol_type = other RNA
actagtgaagtcccatcttcc

SEQ ID NO: 67656 - RNA, 21 nt, synthetic construct
  source 1..21: mol_type = other RNA
actagtggaagaatcaggtct

SEQ ID NO: 67657 - RNA, 21 nt, synthetic construct
  source 1..21: mol_type = other RNA
actagtggctcatacttgctt

SEQ ID NO: 67658 - RNA, 21 nt, synthetic construct
  source 1..21: mol_type = other RNA
actagtgggatcaaaccatgt

SEQ ID NO: 67659 - RNA, 21 nt, synthetic construct
  source 1..21: mol_type = other RNA
actagtgggtcgggtgtcaga

SEQ ID NO: 67660 - RNA, 21 nt, synthetic construct
  source 1..21: mol_type = other RNA
actagtgtgaatgaggagtga

SEQ ID NO: 67661 - RNA, 21 nt, synthetic construct
  source 1..21: mol_type = other RNA
actagttgtgctacctcaaat

SEQ ID NO: 67662 - RNA, 21 nt, synthetic construct
  source 1..21: mol_type = other RNA
actagtttagtgcagtatctt

SEQ ID NO: 67663 - RNA, 21 nt, synthetic construct
  source 1..21: mol_type = other RNA
actataaaactcttagcttag

SEQ ID NO: 67664 - RNA, 21 nt, synthetic construct
  source 1..21: mol_type = other RNA
actataacagatggaactcta

SEQ ID NO: 67665 - RNA, 21 nt, synthetic construct
  source 1..21: mol_type = other RNA
actataagccaatatccctga

SEQ ID NO: 67666 - RNA, 21 nt, synthetic construct
  source 1..21: mol_type = other RNA
actataatccagatggacaaa

SEQ ID NO: 67667 - RNA, 21 nt, synthetic construct
  source 1..21: mol_type = other RNA
actatacttcaatgctacagt

SEQ ID NO: 67668 - RNA, 21 nt, synthetic construct
  source 1..21: mol_type = other RNA
actatagacccaaagcaaaag

SEQ ID NO: 67669 - RNA, 21 nt, synthetic construct
  source 1..21: mol_type = other RNA
actataggagttcattcgtag

SEQ ID NO: 67670 - RNA, 21 nt, synthetic construct
  source 1..21: mol_type = other RNA
actatatgatccagcagtttc

SEQ ID NO: 67671 - RNA, 21 nt, synthetic construct
  source 1..21: mol_type = other RNA
actatcaaaacacttctgtga

SEQ ID NO: 67672 - RNA, 21 nt, synthetic construct
  source 1..21: mol_type = other RNA
actatcacgattctgacccag

SEQ ID NO: 67673 - RNA, 21 nt, synthetic construct
  source 1..21: mol_type = other RNA
actatccaacatgccagcttt

SEQ ID NO: 67674 - RNA, 21 nt, synthetic construct
  source 1..21: mol_type = other RNA
actatccacatttggttttac

SEQ ID NO: 67675 - RNA, 21 nt, synthetic construct
  source 1..21: mol_type = other RNA
actatcctatgtggggaatgc

SEQ ID NO: 67676 - RNA, 21 nt, synthetic construct
  source 1..21: mol_type = other RNA
actatcgttatatcctcaggg

SEQ ID NO: 67677 - RNA, 21 nt, synthetic construct
  source 1..21: mol_type = other RNA
actatctaataaaatagcagg

SEQ ID NO: 67678 - RNA, 21 nt, synthetic construct
  source 1..21: mol_type = other RNA
actatctcttcctcctctgga

SEQ ID NO: 67679 - RNA, 21 nt, synthetic construct
  source 1..21: mol_type = other RNA
actatcttccctaaagagaat

SEQ ID NO: 67680 - RNA, 21 nt, synthetic construct
  source 1..21: mol_type = other RNA
actatgaaaagcctcaaacga

SEQ ID NO: 67681 - RNA, 21 nt, synthetic construct
  source 1..21: mol_type = other RNA
actatgaatatactggaaaac

SEQ ID NO: 67682 - RNA, 21 nt, synthetic construct
  source 1..21: mol_type = other RNA
actatgagaaggattagtgtt

SEQ ID NO: 67683 - RNA, 21 nt, synthetic construct
  source 1..21: mol_type = other RNA
actatgcagcaacggaaatga

SEQ ID NO: 67684 - RNA, 21 nt, synthetic construct
  source 1..21: mol_type = other RNA
actatggacatgaggaaagca

SEQ ID NO: 67685 - RNA, 21 nt, synthetic construct
  source 1..21: mol_type = other RNA
actatggcttttgagtgtaag

SEQ ID NO: 67686 - RNA, 21 nt, synthetic construct
  source 1..21: mol_type = other RNA
actatgtaggcacattcaagc

SEQ ID NO: 67687 - RNA, 21 nt, synthetic construct
  source 1..21: mol_type = other RNA
actatgtatgtggctcacatt

SEQ ID NO: 67688 - RNA, 21 nt, synthetic construct
  source 1..21: mol_type = other RNA
actattaaccatatggtttac

SEQ ID NO: 67689 - RNA, 21 nt, synthetic construct
  source 1..21: mol_type = other RNA
actattatgagcagttgtatg

SEQ ID NO: 67690 - RNA, 21 nt, synthetic construct
  source 1..21: mol_type = other RNA
actattccaggatcaaatctg

SEQ ID NO: 67691 - RNA, 21 nt, synthetic construct
  source 1..21: mol_type = other RNA
actattccataagatctgtct

SEQ ID NO: 67692 - RNA, 21 nt, synthetic construct
  source 1..21: mol_type = other RNA
actattgaaagcccttgagta

SEQ ID NO: 67693 - RNA, 21 nt, synthetic construct
  source 1..21: mol_type = other RNA
actattgagagtgaaaacaca

SEQ ID NO: 67694 - RNA, 21 nt, synthetic construct
  source 1..21: mol_type = other RNA
actatttcgcaaagcaacatg

SEQ ID NO: 67695 - RNA, 21 nt, synthetic construct
  source 1..21: mol_type = other RNA
actatttctctttaaagctga

SEQ ID NO: 67696 - RNA, 21 nt, synthetic construct
  source 1..21: mol_type = other RNA
actatttgtatcttcacaaac

SEQ ID NO: 67697 - RNA, 21 nt, synthetic construct
  source 1..21: mol_type = other RNA
actattttcataacaaagctc

SEQ ID NO: 67698 - RNA, 21 nt, synthetic construct
  source 1..21: mol_type = other RNA
actattttctatagtggctgc

SEQ ID NO: 67699 - RNA, 21 nt, synthetic construct
  source 1..21: mol_type = other RNA
actcaaaactgaagtttatca

SEQ ID NO: 67700 - RNA, 21 nt, synthetic construct
  source 1..21: mol_type = other RNA
actcaaaagccatagtgtaaa

SEQ ID NO: 67701 - RNA, 21 nt, synthetic construct
  source 1..21: mol_type = other RNA
actcaaaagtgaatcactaca

SEQ ID NO: 67702 - RNA, 21 nt, synthetic construct
  source 1..21: mol_type = other RNA
actcaaaatggatcaaagacc

SEQ ID NO: 67703 - RNA, 21 nt, synthetic construct
  source 1..21: mol_type = other RNA
actcaaacccaaattaaagga

SEQ ID NO: 67704 - RNA, 21 nt, synthetic construct
  source 1..21: mol_type = other RNA
actcaaacgtccatcaacagc

SEQ ID NO: 67705 - RNA, 21 nt, synthetic construct
  source 1..21: mol_type = other RNA
actcaaactatgcttaatctg

SEQ ID NO: 67706 - RNA, 21 nt, synthetic construct
  source 1..21: mol_type = other RNA
actcaaatccaaattcacagc

SEQ ID NO: 67707 - RNA, 21 nt, synthetic construct
  source 1..21: mol_type = other RNA
actcaacatcactagctatta

SEQ ID NO: 67708 - RNA, 21 nt, synthetic construct
  source 1..21: mol_type = other RNA
actcaacatgtgtatttaggg

SEQ ID NO: 67709 - RNA, 21 nt, synthetic construct
  source 1..21: mol_type = other RNA
actcaacattcattcatgaca

SEQ ID NO: 67710 - RNA, 21 nt, synthetic construct
  source 1..21: mol_type = other RNA
actcaacgacaatctctgggg

SEQ ID NO: 67711 - RNA, 21 nt, synthetic construct
  source 1..21: mol_type = other RNA
actcaactgcctctacatcac

SEQ ID NO: 67712 - RNA, 21 nt, synthetic construct
  source 1..21: mol_type = other RNA
actcaagagttacttctggaa

SEQ ID NO: 67713 - RNA, 21 nt, synthetic construct
  source 1..21: mol_type = other RNA
actcaagcctgataagctccc

SEQ ID NO: 67714 - RNA, 21 nt, synthetic construct
  source 1..21: mol_type = other RNA
actcaagggctttcaatagtg

SEQ ID NO: 67715 - RNA, 21 nt, synthetic construct
  source 1..21: mol_type = other RNA
actcaagttccggttctcagg

SEQ ID NO: 67716 - RNA, 21 nt, synthetic construct
  source 1..21: mol_type = other RNA
actcaataaccacatgtggct

SEQ ID NO: 67717 - RNA, 21 nt, synthetic construct
  source 1..21: mol_type = other RNA
actcaatacacgtggctgtca

SEQ ID NO: 67718 - RNA, 21 nt, synthetic construct
  source 1..21: mol_type = other RNA
actcaatcagtggccagtgac

SEQ ID NO: 67719 - RNA, 21 nt, synthetic construct
  source 1..21: mol_type = other RNA
actcaatgttggttagtgttg

SEQ ID NO: 67720 - RNA, 21 nt, synthetic construct
  source 1..21: mol_type = other RNA
actcacaaaaagtgtgaccac

SEQ ID NO: 67721 - RNA, 21 nt, synthetic construct
  source 1..21: mol_type = other RNA
actcacagcttaccaagtgcc

SEQ ID NO: 67722 - RNA, 21 nt, synthetic construct
  source 1..21: mol_type = other RNA
actcacctagctgttttcatg

SEQ ID NO: 67723 - RNA, 21 nt, synthetic construct
  source 1..21: mol_type = other RNA
actcacctgtcatgtcaaatt

SEQ ID NO: 67724 - RNA, 21 nt, synthetic construct
  source 1..21: mol_type = other RNA
actcactgaaaccctcacgaa

SEQ ID NO: 67725 - RNA, 21 nt, synthetic construct
  source 1..21: mol_type = other RNA
actcactggccagcattactt

SEQ ID NO: 67726 - RNA, 21 nt, synthetic construct
  source 1..21: mol_type = other RNA
actcactggcctgagctctca

SEQ ID NO: 67727 - RNA, 21 nt, synthetic construct
  source 1..21: mol_type = other RNA
actcactgtactactgacctg

SEQ ID NO: 67728 - RNA, 21 nt, synthetic construct
  source 1..21: mol_type = other RNA
actcacttattagcaaagagg

SEQ ID NO: 67729 - RNA, 21 nt, synthetic construct
  source 1..21: mol_type = other RNA
actcagaagtactactcatta

SEQ ID NO: 67730 - RNA, 21 nt, synthetic construct
  source 1..21: mol_type = other RNA
actcagatatcaatctggata

SEQ ID NO: 67731 - RNA, 21 nt, synthetic construct
  source 1..21: mol_type = other RNA
actcagatctgagagatagaa

SEQ ID NO: 67732 - RNA, 21 nt, synthetic construct
  source 1..21: mol_type = other RNA
actcagattcaccaattgtta

SEQ ID NO: 67733 - RNA, 21 nt, synthetic construct
  source 1..21: mol_type = other RNA
actcagcagttttaaagaatt

SEQ ID NO: 67734 - RNA, 21 nt, synthetic construct
  source 1..21: mol_type = other RNA
actcagcataattggttaaac

SEQ ID NO: 67735 - RNA, 21 nt, synthetic construct
  source 1..21: mol_type = other RNA
actcagccccctcgaagagac

SEQ ID NO: 67736 - RNA, 21 nt, synthetic construct
  source 1..21: mol_type = other RNA
actcagcctgttgggaggttt

SEQ ID NO: 67737 - RNA, 21 nt, synthetic construct
  source 1..21: mol_type = other RNA
actcagctgtcactctcttta

SEQ ID NO: 67738 - RNA, 21 nt, synthetic construct
  source 1..21: mol_type = other RNA
actcaggagattaaggctgga

SEQ ID NO: 67739 - RNA, 21 nt, synthetic construct
  source 1..21: mol_type = other RNA
actcaggaggctgaggcagga

SEQ ID NO: 67740 - RNA, 21 nt, synthetic construct
  source 1..21: mol_type = other RNA
actcagggtcacttcctctct

SEQ ID NO: 67741 - RNA, 21 nt, synthetic construct
  source 1..21: mol_type = other RNA
actcagtacttccctctttct

SEQ ID NO: 67742 - RNA, 21 nt, synthetic construct
  source 1..21: mol_type = other RNA
actcagtctcgaaaaggaatg

SEQ ID NO: 67743 - RNA, 21 nt, synthetic construct
  source 1..21: mol_type = other RNA
actcataccaggttttggtaa

SEQ ID NO: 67744 - RNA, 21 nt, synthetic construct
  source 1..21: mol_type = other RNA
actcatattagtctgtagctt

SEQ ID NO: 67745 - RNA, 21 nt, synthetic construct
  source 1..21: mol_type = other RNA
actcatgagagctgtgccgag

SEQ ID NO: 67746 - RNA, 21 nt, synthetic construct
  source 1..21: mol_type = other RNA
actcatgcttgctccagagaa

SEQ ID NO: 67747 - RNA, 21 nt, synthetic construct
  source 1..21: mol_type = other RNA
actcatgtctacctgtctttc

SEQ ID NO: 67748 - RNA, 21 nt, synthetic construct
  source 1..21: mol_type = other RNA
actcattatcccagacagata

SEQ ID NO: 67749 - RNA, 21 nt, synthetic construct
  source 1..21: mol_type = other RNA
actcattatggttgttggcta

SEQ ID NO: 67750 - RNA, 21 nt, synthetic construct
  source 1..21: mol_type = other RNA
actcattccaatccttccttc

SEQ ID NO: 67751 - RNA, 21 nt, synthetic construct
  source 1..21: mol_type = other RNA
actcattgcctatagacagca

SEQ ID NO: 67752 - RNA, 21 nt, synthetic construct
  source 1..21: mol_type = other RNA
actcatttaaacgtcagagca

SEQ ID NO: 67753 - RNA, 21 nt, synthetic construct
  source 1..21: mol_type = other RNA
actcatttccgttgctgcata

SEQ ID NO: 67754 - RNA, 21 nt, synthetic construct
  source 1..21: mol_type = other RNA
actcatttcctttcagtcggt

SEQ ID NO: 67755 - RNA, 21 nt, synthetic construct
  source 1..21: mol_type = other RNA
actcatttctgcttgaatgtg

SEQ ID NO: 67756 - RNA, 21 nt, synthetic construct
  source 1..21: mol_type = other RNA
actccaaacctttaagttctc

SEQ ID NO: 67757 - RNA, 21 nt, synthetic construct
  source 1..21: mol_type = other RNA
actccaaagcaaaccagacat

SEQ ID NO: 67758 - RNA, 21 nt, synthetic construct
  source 1..21: mol_type = other RNA
actccaaagcaaacgtgcaca

SEQ ID NO: 67759 - RNA, 21 nt, synthetic construct
  source 1..21: mol_type = other RNA
actccaacaattcaacaatag

SEQ ID NO: 67760 - RNA, 21 nt, synthetic construct
  source 1..21: mol_type = other RNA
actccaactcaaaaaagaaaa

SEQ ID NO: 67761 - RNA, 21 nt, synthetic construct
  source 1..21: mol_type = other RNA
actccaagaaggctagcacag

SEQ ID NO: 67762 - RNA, 21 nt, synthetic construct
  source 1..21: mol_type = other RNA
actccaagcacacagtttgag

SEQ ID NO: 67763 - RNA, 21 nt, synthetic construct
  source 1..21: mol_type = other RNA
actccaagtctcatgcaattc

SEQ ID NO: 67764 - RNA, 21 nt, synthetic construct
  source 1..21: mol_type = other RNA
actccaagtgtaaaaagacat

SEQ ID NO: 67765 - RNA, 21 nt, synthetic construct
  source 1..21: mol_type = other RNA
actccacacacgaagtagttt

SEQ ID NO: 67766 - RNA, 21 nt, synthetic construct
  source 1..21: mol_type = other RNA
actccacagagttcagcttac

SEQ ID NO: 67767 - RNA, 21 nt, synthetic construct
  source 1..21: mol_type = other RNA
actccacattgtcttaattat

SEQ ID NO: 67768 - RNA, 21 nt, synthetic construct
  source 1..21: mol_type = other RNA
actccaccagcatcttttgac

SEQ ID NO: 67769 - RNA, 21 nt, synthetic construct
  source 1..21: mol_type = other RNA
actccaccctgccccttatcc

SEQ ID NO: 67770 - RNA, 21 nt, synthetic construct
  source 1..21: mol_type = other RNA
actccacctcagaaacaaaca

SEQ ID NO: 67771 - RNA, 21 nt, synthetic construct
  source 1..21: mol_type = other RNA
actccaccttagcccaagcta

SEQ ID NO: 67772 - RNA, 21 nt, synthetic construct
  source 1..21: mol_type = other RNA
actccacgtgggtgacagagc

SEQ ID NO: 67773 - RNA, 21 nt, synthetic construct
  source 1..21: mol_type = other RNA
actccactccagcctgagcaa

SEQ ID NO: 67774 - RNA, 21 nt, synthetic construct
  source 1..21: mol_type = other RNA
actccacttcccactgctatg

SEQ ID NO: 67775 - RNA, 21 nt, synthetic construct
  source 1..21: mol_type = other RNA
actccagaatgaccgagatac

SEQ ID NO: 67776 - RNA, 21 nt, synthetic construct
  source 1..21: mol_type = other RNA
actccagactgggcaacagag

SEQ ID NO: 67777 - RNA, 21 nt, synthetic construct
  source 1..21: mol_type = other RNA
actccagcatccctccagtcc

SEQ ID NO: 67778 - RNA, 21 nt, synthetic construct
  source 1..21: mol_type = other RNA
actccagcctggtcaacaggg

SEQ ID NO: 67779 - RNA, 21 nt, synthetic construct
  source 1..21: mol_type = other RNA
actccagccttggtaagagtg

SEQ ID NO: 67780 - RNA, 21 nt, synthetic construct
  source 1..21: mol_type = other RNA
actccagcttttattagagct

SEQ ID NO: 67781 - RNA, 21 nt, synthetic construct
  source 1..21: mol_type = other RNA
actccaggggacatgctctga

SEQ ID NO: 67782 - RNA, 21 nt, synthetic construct
  source 1..21: mol_type = other RNA
actccatctcaagaaaacaag

SEQ ID NO: 67783 - RNA, 21 nt, synthetic construct
  source 1..21: mol_type = other RNA
actccatcttcacgtggcgct

SEQ ID NO: 67784 - RNA, 21 nt, synthetic construct
  source 1..21: mol_type = other RNA
actccattatatgaataaacc

SEQ ID NO: 67785 - RNA, 21 nt, synthetic construct
  source 1..21: mol_type = other RNA
actccatttgtggcatctttg

SEQ ID NO: 67786 - RNA, 21 nt, synthetic construct
  source 1..21: mol_type = other RNA
actcccagaactcgaagcctt

SEQ ID NO: 67787 - RNA, 21 nt, synthetic construct
  source 1..21: mol_type = other RNA
actcccagcctcaaacaatcc

SEQ ID NO: 67788 - RNA, 21 nt, synthetic construct
  source 1..21: mol_type = other RNA
actcccatatctacatgtacg

SEQ ID NO: 67789 - RNA, 21 nt, synthetic construct
  source 1..21: mol_type = other RNA
actccccagtggttgtggaat

SEQ ID NO: 67790 - RNA, 21 nt, synthetic construct
  source 1..21: mol_type = other RNA
actccccatgcaggagaaaca

SEQ ID NO: 67791 - RNA, 21 nt, synthetic construct
  source 1..21: mol_type = other RNA
actcccgatttcagttaactt

SEQ ID NO: 67792 - RNA, 21 nt, synthetic construct
  source 1..21: mol_type = other RNA
actccctttttaggtagggat

SEQ ID NO: 67793 - RNA, 21 nt, synthetic construct
  source 1..21: mol_type = other RNA
actccggcgggagaggagcgc

SEQ ID NO: 67794 - RNA, 21 nt, synthetic construct
  source 1..21: mol_type = other RNA
actcctaaaacatggtccaca

SEQ ID NO: 67795 - RNA, 21 nt, synthetic construct
  source 1..21: mol_type = other RNA
actcctagatactcgggaggc

SEQ ID NO: 67796 - RNA, 21 nt, synthetic construct
  source 1..21: mol_type = other RNA
actcctatagttaagtctgaa

SEQ ID NO: 67797 - RNA, 21 nt, synthetic construct
  source 1..21: mol_type = other RNA
actcctcattcacactagtca

SEQ ID NO: 67798 - RNA, 21 nt, synthetic construct
  source 1..21: mol_type = other RNA
actcctgaacaaaatttttgc

SEQ ID NO: 67799 - RNA, 21 nt, synthetic construct
  source 1..21: mol_type = other RNA
actcctgacctcaagcgatcc

SEQ ID NO: 67800 - RNA, 21 nt, synthetic construct
  source 1..21: mol_type = other RNA
actcctgagcaaggaaggaaa

SEQ ID NO: 67801 - RNA, 21 nt, synthetic construct
  source 1..21: mol_type = other RNA
actcctgcactcaagcaatcc

SEQ ID NO: 67802 - RNA, 21 nt, synthetic construct
  source 1..21: mol_type = other RNA
actcctgggctcatctaagcc

SEQ ID NO: 67803 - RNA, 21 nt, synthetic construct
  source 1..21: mol_type = other RNA
actcctggtctcccagcatga

SEQ ID NO: 67804 - RNA, 21 nt, synthetic construct
  source 1..21: mol_type = other RNA
actcctgtatgccgctggtga

SEQ ID NO: 67805 - RNA, 21 nt, synthetic construct
  source 1..21: mol_type = other RNA
actcctgttctttggagctgt

SEQ ID NO: 67806 - RNA, 21 nt, synthetic construct
  source 1..21: mol_type = other RNA
actccttcccctggtcgagct

SEQ ID NO: 67807 - RNA, 21 nt, synthetic construct
  source 1..21: mol_type = other RNA
actccttctgaaggcactaac

SEQ ID NO: 67808 - RNA, 21 nt, synthetic construct
  source 1..21: mol_type = other RNA
actcctttcttaccctcacag

SEQ ID NO: 67809 - RNA, 21 nt, synthetic construct
  source 1..21: mol_type = other RNA
actcgaagccttcccctgctg

SEQ ID NO: 67810 - RNA, 21 nt, synthetic construct
  source 1..21: mol_type = other RNA
actcgagggtagcttttcctg

SEQ ID NO: 67811 - RNA, 21 nt, synthetic construct
  source 1..21: mol_type = other RNA
actcgcactccacttcccact

SEQ ID NO: 67812 - RNA, 21 nt, synthetic construct
  source 1..21: mol_type = other RNA
actcggtatgtacccaatgga

SEQ ID NO: 67813 - RNA, 21 nt, synthetic construct
  source 1..21: mol_type = other RNA
actcggtctcaaaacaaacaa

SEQ ID NO: 67814 - RNA, 21 nt, synthetic construct
  source 1..21: mol_type = other RNA
actcgtaatgcgatgatcaaa

SEQ ID NO: 67815 - RNA, 21 nt, synthetic construct
  source 1..21: mol_type = other RNA
actcgtagttttttggtagat

SEQ ID NO: 67816 - RNA, 21 nt, synthetic construct
  source 1..21: mol_type = other RNA
actcgtggcctcaagcagtcc

SEQ ID NO: 67817 - RNA, 21 nt, synthetic construct
  source 1..21: mol_type = other RNA
actcgtggttatagccataag

SEQ ID NO: 67818 - RNA, 21 nt, synthetic construct
  source 1..21: mol_type = other RNA
actcgtgtatgatttctaggc

SEQ ID NO: 67819 - RNA, 21 nt, synthetic construct
  source 1..21: mol_type = other RNA
actcgtgtgtctcataaagcc

SEQ ID NO: 67820 - RNA, 21 nt, synthetic construct
  source 1..21: mol_type = other RNA
actctaaactagttcaaccat

SEQ ID NO: 67821 - RNA, 21 nt, synthetic construct
  source 1..21: mol_type = other RNA
actctaaagtctatgctcttg

SEQ ID NO: 67822 - RNA, 21 nt, synthetic construct
  source 1..21: mol_type = other RNA
actctaataacagcctaagca

SEQ ID NO: 67823 - RNA, 21 nt, synthetic construct
  source 1..21: mol_type = other RNA
actctaatatggttcctagaa

SEQ ID NO: 67824 - RNA, 21 nt, synthetic construct
  source 1..21: mol_type = other RNA
actctaatggggaaatagatg

SEQ ID NO: 67825 - RNA, 21 nt, synthetic construct
  source 1..21: mol_type = other RNA
actctagtggtgcttaattca

SEQ ID NO: 67826 - RNA, 21 nt, synthetic construct
  source 1..21: mol_type = other RNA
actctattttcctaaaactcc

SEQ ID NO: 67827 - RNA, 21 nt, synthetic construct
  source 1..21: mol_type = other RNA
actctcaaataatttggcaaa

SEQ ID NO: 67828 - RNA, 21 nt, synthetic construct
  source 1..21: mol_type = other RNA
actctcaagaaggtatcatcg

SEQ ID NO: 67829 - RNA, 21 nt, synthetic construct
  source 1..21: mol_type = other RNA
actctcaatagtgtcctttga

SEQ ID NO: 67830 - RNA, 21 nt, synthetic construct
  source 1..21: mol_type = other RNA
actctcagaaattataagctt

SEQ ID NO: 67831 - RNA, 21 nt, synthetic construct
  source 1..21: mol_type = other RNA
actctcatctaaattaagctt

SEQ ID NO: 67832 - RNA, 21 nt, synthetic construct
  source 1..21: mol_type = other RNA
actctccccaagtaaacctca

SEQ ID NO: 67833 - RNA, 21 nt, synthetic construct
  source 1..21: mol_type = other RNA
actctcgacctcgtgatctgc

SEQ ID NO: 67834 - RNA, 21 nt, synthetic construct
  source 1..21: mol_type = other RNA
actctctctgcctcggcacag

SEQ ID NO: 67835 - RNA, 21 nt, synthetic construct
  source 1..21: mol_type = other RNA
actctctggctgcaattgcgc

SEQ ID NO: 67836 - RNA, 21 nt, synthetic construct
  source 1..21: mol_type = other RNA
actctctttaattatgagcat

SEQ ID NO: 67837 - RNA, 21 nt, synthetic construct
  source 1..21: mol_type = other RNA
actctctttaggaagcttcct

SEQ ID NO: 67838 - RNA, 21 nt, synthetic construct
  source 1..21: mol_type = other RNA
actctgaatcacctcaaggca

SEQ ID NO: 67839 - RNA, 21 nt, synthetic construct
  source 1..21: mol_type = other RNA
actctgaattctctggaatag

SEQ ID NO: 67840 - RNA, 21 nt, synthetic construct
  source 1..21: mol_type = other RNA
actctgaccattgtgtggaca

SEQ ID NO: 67841 - RNA, 21 nt, synthetic construct
  source 1..21: mol_type = other RNA
actctgagacaggatccagat

SEQ ID NO: 67842 - RNA, 21 nt, synthetic construct
  source 1..21: mol_type = other RNA
actctgcaattttaaatgtac

SEQ ID NO: 67843 - RNA, 21 nt, synthetic construct
  source 1..21: mol_type = other RNA
actctgcctcagttgacatcc

SEQ ID NO: 67844 - RNA, 21 nt, synthetic construct
  source 1..21: mol_type = other RNA
actctgctcaaaggggcattc

SEQ ID NO: 67845 - RNA, 21 nt, synthetic construct
  source 1..21: mol_type = other RNA
actctggcaggtcacctagcc

SEQ ID NO: 67846 - RNA, 21 nt, synthetic construct
  source 1..21: mol_type = other RNA
actctggcctggacaacagtg

SEQ ID NO: 67847 - RNA, 21 nt, synthetic construct
  source 1..21: mol_type = other RNA
actctggctcagaaacaacaa

SEQ ID NO: 67848 - RNA, 21 nt, synthetic construct
  source 1..21: mol_type = other RNA
actctgtcatggtgtgtctgc

SEQ ID NO: 67849 - RNA, 21 nt, synthetic construct
  source 1..21: mol_type = other RNA
actctgtcgcccaggctggag

SEQ ID NO: 67850 - RNA, 21 nt, synthetic construct
  source 1..21: mol_type = other RNA
actctgtgcttgtgcttttaa

SEQ ID NO: 67851 - RNA, 21 nt, synthetic construct
  source 1..21: mol_type = other RNA
actctgtggagtcctgtcagt

SEQ ID NO: 67852 - RNA, 21 nt, synthetic construct
  source 1..21: mol_type = other RNA
actctgtttccttaccagtgc

SEQ ID NO: 67853 - RNA, 21 nt, synthetic construct
  source 1..21: mol_type = other RNA
actcttaaaaggagatataca

SEQ ID NO: 67854 - RNA, 21 nt, synthetic construct
  source 1..21: mol_type = other RNA
actcttaaagtttcaaactgt

SEQ ID NO: 67855 - RNA, 21 nt, synthetic construct
  source 1..21: mol_type = other RNA
actcttaataactgcctaagt

SEQ ID NO: 67856 - RNA, 21 nt, synthetic construct
  source 1..21: mol_type = other RNA
actcttaatattgaaacgatg

SEQ ID NO: 67857 - RNA, 21 nt, synthetic construct
  source 1..21: mol_type = other RNA
actcttaccaaggctggagtg

SEQ ID NO: 67858 - RNA, 21 nt, synthetic construct
  source 1..21: mol_type = other RNA
actcttagcttagaagaagac

SEQ ID NO: 67859 - RNA, 21 nt, synthetic construct
  source 1..21: mol_type = other RNA
actcttagtgatgtcttttga

SEQ ID NO: 67860 - RNA, 21 nt, synthetic construct
  source 1..21: mol_type = other RNA
actcttatatcctaaacactt

SEQ ID NO: 67861 - RNA, 21 nt, synthetic construct
  source 1..21: mol_type = other RNA
actcttatggctataaccacg

SEQ ID NO: 67862 - RNA, 21 nt, synthetic construct
  source 1..21: mol_type = other RNA
actcttcagaggtctgttact

SEQ ID NO: 67863 - RNA, 21 nt, synthetic construct
  source 1..21: mol_type = other RNA
actcttccttatccgataaag

SEQ ID NO: 67864 - RNA, 21 nt, synthetic construct
  source 1..21: mol_type = other RNA
actcttctactcactgtacta

SEQ ID NO: 67865 - RNA, 21 nt, synthetic construct
  source 1..21: mol_type = other RNA
actcttctccaaggaaagtgt

SEQ ID NO: 67866 - RNA, 21 nt, synthetic construct
  source 1..21: mol_type = other RNA
actcttctgcaagttgctatc

SEQ ID NO: 67867 - RNA, 21 nt, synthetic construct
  source 1..21: mol_type = other RNA
actcttgagttaggaatttac

SEQ ID NO: 67868 - RNA, 21 nt, synthetic construct
  source 1..21: mol_type = other RNA
actcttgcattagagccccaa

SEQ ID NO: 67869 - RNA, 21 nt, synthetic construct
  source 1..21: mol_type = other RNA
actcttgcggtcttttagcca

SEQ ID NO: 67870 - RNA, 21 nt, synthetic construct
  source 1..21: mol_type = other RNA
actcttggccattttctttta

SEQ ID NO: 67871 - RNA, 21 nt, synthetic construct
  source 1..21: mol_type = other RNA
actcttggtctttctcccagg

SEQ ID NO: 67872 - RNA, 21 nt, synthetic construct
  source 1..21: mol_type = other RNA
actcttgtagtatttttgcaa

SEQ ID NO: 67873 - RNA, 21 nt, synthetic construct
  source 1..21: mol_type = other RNA
actcttgtcccggcatgcctc

SEQ ID NO: 67874 - RNA, 21 nt, synthetic construct
  source 1..21: mol_type = other RNA
actcttttaaacccatttcat

SEQ ID NO: 67875 - RNA, 21 nt, synthetic construct
  source 1..21: mol_type = other RNA
actgaaacaatcgcaatccaa

SEQ ID NO: 67876 - RNA, 21 nt, synthetic construct
  source 1..21: mol_type = other RNA
actgaaaccagtgctctcccc

SEQ ID NO: 67877 - RNA, 21 nt, synthetic construct
  source 1..21: mol_type = other RNA
actgaaaccagtgggtcagct

SEQ ID NO: 67878 - RNA, 21 nt, synthetic construct
  source 1..21: mol_type = other RNA
actgaaaccctcacgaaagcg

SEQ ID NO: 67879 - RNA, 21 nt, synthetic construct
  source 1..21: mol_type = other RNA
actgaaagacagacctctatt

SEQ ID NO: 67880 - RNA, 21 nt, synthetic construct
  source 1..21: mol_type = other RNA
actgaaagcagggactcccat

SEQ ID NO: 67881 - RNA, 21 nt, synthetic construct
  source 1..21: mol_type = other RNA
actgaaaggaaatgagtgtat

SEQ ID NO: 67882 - RNA, 21 nt, synthetic construct
  source 1..21: mol_type = other RNA
actgaaataatttggttatgc

SEQ ID NO: 67883 - RNA, 21 nt, synthetic construct
  source 1..21: mol_type = other RNA
actgaaatcctagccccaaat

SEQ ID NO: 67884 - RNA, 21 nt, synthetic construct
  source 1..21: mol_type = other RNA
actgaaatcgggagtaacaga

SEQ ID NO: 67885 - RNA, 21 nt, synthetic construct
  source 1..21: mol_type = other RNA
actgaacaacgctgtggctaa

SEQ ID NO: 67886 - RNA, 21 nt, synthetic construct
  source 1..21: mol_type = other RNA
actgaacatgtatgtttctca

SEQ ID NO: 67887 - RNA, 21 nt, synthetic construct
  source 1..21: mol_type = other RNA
actgaacatttatacagttgg

SEQ ID NO: 67888 - RNA, 21 nt, synthetic construct
  source 1..21: mol_type = other RNA
actgaactacagtgtttaggg

SEQ ID NO: 67889 - RNA, 21 nt, synthetic construct
  source 1..21: mol_type = other RNA
actgaactcaaaatggatcaa

SEQ ID NO: 67890 - RNA, 21 nt, synthetic construct
  source 1..21: mol_type = other RNA
actgaagccagtccttgtgat

SEQ ID NO: 67891 - RNA, 21 nt, synthetic construct
  source 1..21: mol_type = other RNA
actgaagcggggctgccacta

SEQ ID NO: 67892 - RNA, 21 nt, synthetic construct
  source 1..21: mol_type = other RNA
actgaaggattcctccctgga

SEQ ID NO: 67893 - RNA, 21 nt, synthetic construct
  source 1..21: mol_type = other RNA
actgaaggcatagggccttct

SEQ ID NO: 67894 - RNA, 21 nt, synthetic construct
  source 1..21: mol_type = other RNA
actgaagggaattttactgat

SEQ ID NO: 67895 - RNA, 21 nt, synthetic construct
  source 1..21: mol_type = other RNA
actgaagtaataaagcaagta

SEQ ID NO: 67896 - RNA, 21 nt, synthetic construct
  source 1..21: mol_type = other RNA
actgaagtcctttcttggtct

SEQ ID NO: 67897 - RNA, 21 nt, synthetic construct
  source 1..21: mol_type = other RNA
actgaagtgttgagaggcttt

SEQ ID NO: 67898 - RNA, 21 nt, synthetic construct
  source 1..21: mol_type = other RNA
actgaagttctcaggggtaaa

SEQ ID NO: 67899 - RNA, 21 nt, synthetic construct
  source 1..21: mol_type = other RNA
actgaagtttatcagtctcca

SEQ ID NO: 67900 - RNA, 21 nt, synthetic construct
  source 1..21: mol_type = other RNA
actgaatcagacaacacatta

SEQ ID NO: 67901 - RNA, 21 nt, synthetic construct
  source 1..21: mol_type = other RNA
actgaattaatctcttacacc

SEQ ID NO: 67902 - RNA, 21 nt, synthetic construct
  source 1..21: mol_type = other RNA
actgaattcccacaaaatatg

SEQ ID NO: 67903 - RNA, 21 nt, synthetic construct
  source 1..21: mol_type = other RNA
actgacaatagccaagacatg

SEQ ID NO: 67904 - RNA, 21 nt, synthetic construct
  source 1..21: mol_type = other RNA
actgacacaggctgaagggag

SEQ ID NO: 67905 - RNA, 21 nt, synthetic construct
  source 1..21: mol_type = other RNA
actgacaggacagagcagtag

SEQ ID NO: 67906 - RNA, 21 nt, synthetic construct
  source 1..21: mol_type = other RNA
actgacaggactccacagagt

SEQ ID NO: 67907 - RNA, 21 nt, synthetic construct
  source 1..21: mol_type = other RNA
actgacagtggacaaaggttc

SEQ ID NO: 67908 - RNA, 21 nt, synthetic construct
  source 1..21: mol_type = other RNA
actgacataactgtaaagtaa

SEQ ID NO: 67909 - RNA, 21 nt, synthetic construct
  source 1..21: mol_type = other RNA
actgaccaacatggacaaacc

SEQ ID NO: 67910 - RNA, 21 nt, synthetic construct
  source 1..21: mol_type = other RNA
actgaccatctcagcacagag

SEQ ID NO: 67911 - RNA, 21 nt, synthetic construct
  source 1..21: mol_type = other RNA
actgacctgggagaaagacca

SEQ ID NO: 67912 - RNA, 21 nt, synthetic construct
  source 1..21: mol_type = other RNA
actgactacacatacacaggg

SEQ ID NO: 67913 - RNA, 21 nt, synthetic construct
  source 1..21: mol_type = other RNA
actgactagtggctcatactt

SEQ ID NO: 67914 - RNA, 21 nt, synthetic construct
  source 1..21: mol_type = other RNA
actgactcaatcttcttattt

SEQ ID NO: 67915 - RNA, 21 nt, synthetic construct
  source 1..21: mol_type = other RNA
actgactccctttttaggtag

SEQ ID NO: 67916 - RNA, 21 nt, synthetic construct
  source 1..21: mol_type = other RNA
actgactctaaagtctatgct

SEQ ID NO: 67917 - RNA, 21 nt, synthetic construct
  source 1..21: mol_type = other RNA
actgactgaaggattcctccc

SEQ ID NO: 67918 - RNA, 21 nt, synthetic construct
  source 1..21: mol_type = other RNA
actgactggctgtgccaactc

SEQ ID NO: 67919 - RNA, 21 nt, synthetic construct
  source 1..21: mol_type = other RNA
actgacttacagaccttattc

SEQ ID NO: 67920 - RNA, 21 nt, synthetic construct
  source 1..21: mol_type = other RNA
actgacttcaagaggttaaaa

SEQ ID NO: 67921 - RNA, 21 nt, synthetic construct
  source 1..21: mol_type = other RNA
actgacttttccttaaaaaag

SEQ ID NO: 67922 - RNA, 21 nt, synthetic construct
  source 1..21: mol_type = other RNA
actgagaagagctgtaacaga

SEQ ID NO: 67923 - RNA, 21 nt, synthetic construct
  source 1..21: mol_type = other RNA
actgagacagtattgtgctga

SEQ ID NO: 67924 - RNA, 21 nt, synthetic construct
  source 1..21: mol_type = other RNA
actgagaccggatgaggtggc

SEQ ID NO: 67925 - RNA, 21 nt, synthetic construct
  source 1..21: mol_type = other RNA
actgagagctcaggccagtga

SEQ ID NO: 67926 - RNA, 21 nt, synthetic construct
  source 1..21: mol_type = other RNA
actgagcacaatgcctgccgc

SEQ ID NO: 67927 - RNA, 21 nt, synthetic construct
  source 1..21: mol_type = other RNA
actgagcagtgaaagtctccc

SEQ ID NO: 67928 - RNA, 21 nt, synthetic construct
  source 1..21: mol_type = other RNA
actgagcatcccagaggtact

SEQ ID NO: 67929 - RNA, 21 nt, synthetic construct
  source 1..21: mol_type = other RNA
actgagcatttatataagttc

SEQ ID NO: 67930 - RNA, 21 nt, synthetic construct
  source 1..21: mol_type = other RNA
actgagccagcaaatcagaaa

SEQ ID NO: 67931 - RNA, 21 nt, synthetic construct
  source 1..21: mol_type = other RNA
actgaggcagagtagagaagg

SEQ ID NO: 67932 - RNA, 21 nt, synthetic construct
  source 1..21: mol_type = other RNA
actgaggtcaagaaataaaac

SEQ ID NO: 67933 - RNA, 21 nt, synthetic construct
  source 1..21: mol_type = other RNA
actgaggtgtttttcagccct

SEQ ID NO: 67934 - RNA, 21 nt, synthetic construct
  source 1..21: mol_type = other RNA
actgagtaatattccattgtg

SEQ ID NO: 67935 - RNA, 21 nt, synthetic construct
  source 1..21: mol_type = other RNA
actgagtcaaaaccaaagaaa

SEQ ID NO: 67936 - RNA, 21 nt, synthetic construct
  source 1..21: mol_type = other RNA
actgataaacttcagttttga

SEQ ID NO: 67937 - RNA, 21 nt, synthetic construct
  source 1..21: mol_type = other RNA
actgatagcgaaaggtacgac

SEQ ID NO: 67938 - RNA, 21 nt, synthetic construct
  source 1..21: mol_type = other RNA
actgatatgagggatgaggaa

SEQ ID NO: 67939 - RNA, 21 nt, synthetic construct
  source 1..21: mol_type = other RNA
actgatctgctcaagttttct

SEQ ID NO: 67940 - RNA, 21 nt, synthetic construct
  source 1..21: mol_type = other RNA
actgatcttttctgacaattt

SEQ ID NO: 67941 - RNA, 21 nt, synthetic construct
  source 1..21: mol_type = other RNA
actgatgaagaacctgttcat

SEQ ID NO: 67942 - RNA, 21 nt, synthetic construct
  source 1..21: mol_type = other RNA
actgatggaattctgacaccc

SEQ ID NO: 67943 - RNA, 21 nt, synthetic construct
  source 1..21: mol_type = other RNA
actgatgtgaggatctgttgg

SEQ ID NO: 67944 - RNA, 21 nt, synthetic construct
  source 1..21: mol_type = other RNA
actgatgtgtagttattattg

SEQ ID NO: 67945 - RNA, 21 nt, synthetic construct
  source 1..21: mol_type = other RNA
actgattaatttgaggtctag

SEQ ID NO: 67946 - RNA, 21 nt, synthetic construct
  source 1..21: mol_type = other RNA
actgattagaaggattgttca

SEQ ID NO: 67947 - RNA, 21 nt, synthetic construct
  source 1..21: mol_type = other RNA
actgattgagtatctggtgct

SEQ ID NO: 67948 - RNA, 21 nt, synthetic construct
  source 1..21: mol_type = other RNA
actgatttatagtgtttcctt

SEQ ID NO: 67949 - RNA, 21 nt, synthetic construct
  source 1..21: mol_type = other RNA
actgattttctgcttctcaat

SEQ ID NO: 67950 - RNA, 21 nt, synthetic construct
  source 1..21: mol_type = other RNA
actgcaaaactttcttcaaaa

SEQ ID NO: 67951 - RNA, 21 nt, synthetic construct
  source 1..21: mol_type = other RNA
actgcaaatatccaatcactg

SEQ ID NO: 67952 - RNA, 21 nt, synthetic construct
  source 1..21: mol_type = other RNA
actgcaacagatctgagaaga

SEQ ID NO: 67953 - RNA, 21 nt, synthetic construct
  source 1..21: mol_type = other RNA
actgcaacctccgtttttcag

SEQ ID NO: 67954 - RNA, 21 nt, synthetic construct
  source 1..21: mol_type = other RNA
actgcaagctccgcctcctgg

SEQ ID NO: 67955 - RNA, 21 nt, synthetic construct
  source 1..21: mol_type = other RNA
actgcacagtatgcggggttt

SEQ ID NO: 67956 - RNA, 21 nt, synthetic construct
  source 1..21: mol_type = other RNA
actgcacataaaaggatatgg

SEQ ID NO: 67957 - RNA, 21 nt, synthetic construct
  source 1..21: mol_type = other RNA
actgcactaaactagtatcaa

SEQ ID NO: 67958 - RNA, 21 nt, synthetic construct
  source 1..21: mol_type = other RNA
actgcactccagccttggtaa

SEQ ID NO: 67959 - RNA, 21 nt, synthetic construct
  source 1..21: mol_type = other RNA
actgcactctcaaaattaaat

SEQ ID NO: 67960 - RNA, 21 nt, synthetic construct
  source 1..21: mol_type = other RNA
actgcactctggcctggacaa

SEQ ID NO: 67961 - RNA, 21 nt, synthetic construct
  source 1..21: mol_type = other RNA
actgcagaatgacagaaaata

SEQ ID NO: 67962 - RNA, 21 nt, synthetic construct
  source 1..21: mol_type = other RNA
actgcagaattactgacaata

SEQ ID NO: 67963 - RNA, 21 nt, synthetic construct
  source 1..21: mol_type = other RNA
actgcagaggtcaggaaggca

SEQ ID NO: 67964 - RNA, 21 nt, synthetic construct
  source 1..21: mol_type = other RNA
actgcagatgaatgagcaagg

SEQ ID NO: 67965 - RNA, 21 nt, synthetic construct
  source 1..21: mol_type = other RNA
actgcagcaattatttgaata

SEQ ID NO: 67966 - RNA, 21 nt, synthetic construct
  source 1..21: mol_type = other RNA
actgcaggtcttcaacctcaa

SEQ ID NO: 67967 - RNA, 21 nt, synthetic construct
  source 1..21: mol_type = other RNA
actgcaggtgttggtgcattt

SEQ ID NO: 67968 - RNA, 21 nt, synthetic construct
  source 1..21: mol_type = other RNA
actgcagtctcaaactcctgc

SEQ ID NO: 67969 - RNA, 21 nt, synthetic construct
  source 1..21: mol_type = other RNA
actgcagtctgtcctcgtaaa

SEQ ID NO: 67970 - RNA, 21 nt, synthetic construct
  source 1..21: mol_type = other RNA
actgcagtgacctatcattgc

SEQ ID NO: 67971 - RNA, 21 nt, synthetic construct
  source 1..21: mol_type = other RNA
actgcagttggattatatgtt

SEQ ID NO: 67972 - RNA, 21 nt, synthetic construct
  source 1..21: mol_type = other RNA
actgcatattgaagccagcac

SEQ ID NO: 67973 - RNA, 21 nt, synthetic construct
  source 1..21: mol_type = other RNA
actgcatcttcttttacttgc

SEQ ID NO: 67974 - RNA, 21 nt, synthetic construct
  source 1..21: mol_type = other RNA
actgcatgattccccttatat

SEQ ID NO: 67975 - RNA, 21 nt, synthetic construct
  source 1..21: mol_type = other RNA
actgcatgctaggggctgttc

SEQ ID NO: 67976 - RNA, 21 nt, synthetic construct
  source 1..21: mol_type = other RNA
actgcattcatccaggcaaaa

SEQ ID NO: 67977 - RNA, 21 nt, synthetic construct
  source 1..21: mol_type = other RNA
actgcattccgcctgggcgac

SEQ ID NO: 67978 - RNA, 21 nt, synthetic construct
  source 1..21: mol_type = other RNA
actgcattgtgcacttaaaat

SEQ ID NO: 67979 - RNA, 21 nt, synthetic construct
  source 1..21: mol_type = other RNA
actgcattttttgccaaatta

SEQ ID NO: 67980 - RNA, 21 nt, synthetic construct
  source 1..21: mol_type = other RNA
actgccaaaccctacacccat

SEQ ID NO: 67981 - RNA, 21 nt, synthetic construct
  source 1..21: mol_type = other RNA
actgccaggtagggaggggta

SEQ ID NO: 67982 - RNA, 21 nt, synthetic construct
  source 1..21: mol_type = other RNA
actgcctaagtaatgctggcc

SEQ ID NO: 67983 - RNA, 21 nt, synthetic construct
  source 1..21: mol_type = other RNA
actgcctccacaggctttgac

SEQ ID NO: 67984 - RNA, 21 nt, synthetic construct
  source 1..21: mol_type = other RNA
actgcctctacatcacagaca

SEQ ID NO: 67985 - RNA, 21 nt, synthetic construct
  source 1..21: mol_type = other RNA
actgcctgaggtctcaaaatt

SEQ ID NO: 67986 - RNA, 21 nt, synthetic construct
  source 1..21: mol_type = other RNA
actgcctggacccgggaggca

SEQ ID NO: 67987 - RNA, 21 nt, synthetic construct
  source 1..21: mol_type = other RNA
actgcctggtcctgagggctt

SEQ ID NO: 67988 - RNA, 21 nt, synthetic construct
  source 1..21: mol_type = other RNA
actgcgccaagcagggacggg

SEQ ID NO: 67989 - RNA, 21 nt, synthetic construct
  source 1..21: mol_type = other RNA
actgcgggcccagctcttttg

SEQ ID NO: 67990 - RNA, 21 nt, synthetic construct
  source 1..21: mol_type = other RNA
actgcgtggtttattcatata

SEQ ID NO: 67991 - RNA, 21 nt, synthetic construct
  source 1..21: mol_type = other RNA
actgctaatggtccttgctga

SEQ ID NO: 67992 - RNA, 21 nt, synthetic construct
  source 1..21: mol_type = other RNA
actgctataaacttccctctc

SEQ ID NO: 67993 - RNA, 21 nt, synthetic construct
  source 1..21: mol_type = other RNA
actgctatacaaccggaaaat

SEQ ID NO: 67994 - RNA, 21 nt, synthetic construct
  source 1..21: mol_type = other RNA
actgctatgactaatttgagg

SEQ ID NO: 67995 - RNA, 21 nt, synthetic construct
  source 1..21: mol_type = other RNA
actgctcagaagctttcagac

SEQ ID NO: 67996 - RNA, 21 nt, synthetic construct
  source 1..21: mol_type = other RNA
actgctcagtccctcaccttc

SEQ ID NO: 67997 - RNA, 21 nt, synthetic construct
  source 1..21: mol_type = other RNA
actgctcataatagtctcacg

SEQ ID NO: 67998 - RNA, 21 nt, synthetic construct
  source 1..21: mol_type = other RNA
actgctcctctgactttatgg

SEQ ID NO: 67999 - RNA, 21 nt, synthetic construct
  source 1..21: mol_type = other RNA
actgctcctgcctttgttcat

SEQ ID NO: 68000 - RNA, 21 nt, synthetic construct
  source 1..21: mol_type = other RNA
actgctctgtcctgtcagtgt

SEQ ID NO: 68001 - RNA, 21 nt, synthetic construct
  source 1..21: mol_type = other RNA
actgctcttctattccagaga

SEQ ID NO: 68002 - RNA, 21 nt, synthetic construct
  source 1..21: mol_type = other RNA
actgctgacagattaaatacc

SEQ ID NO: 68003 - RNA, 21 nt, synthetic construct
  source 1..21: mol_type = other RNA
actgctgagtcttctactgtg

SEQ ID NO: 68004 - RNA, 21 nt, synthetic construct
  source 1..21: mol_type = other RNA
actgctgatgtaagtgggagg

SEQ ID NO: 68005 - RNA, 21 nt, synthetic construct
  source 1..21: mol_type = other RNA
actgctggatcatatagtaat

SEQ ID NO: 68006 - RNA, 21 nt, synthetic construct
  source 1..21: mol_type = other RNA
actgctggtctggaatgtgta

SEQ ID NO: 68007 - RNA, 21 nt, synthetic construct
  source 1..21: mol_type = other RNA
actgctgtttaccaagggtgt

SEQ ID NO: 68008 - RNA, 21 nt, synthetic construct
  source 1..21: mol_type = other RNA
actgcttccctagcccagcac

SEQ ID NO: 68009 - RNA, 21 nt, synthetic construct
  source 1..21: mol_type = other RNA
actgcttgaggccacgagttc

SEQ ID NO: 68010 - RNA, 21 nt, synthetic construct
  source 1..21: mol_type = other RNA
actgcttgctgcactggctat

SEQ ID NO: 68011 - RNA, 21 nt, synthetic construct
  source 1..21: mol_type = other RNA
actggaaaactagagatggga

SEQ ID NO: 68012 - RNA, 21 nt, synthetic construct
  source 1..21: mol_type = other RNA
actggaaaagtgttgactacc

SEQ ID NO: 68013 - RNA, 21 nt, synthetic construct
  source 1..21: mol_type = other RNA
actggaaaccttttgtagacc

SEQ ID NO: 68014 - RNA, 21 nt, synthetic construct
  source 1..21: mol_type = other RNA
actggaaatcacaggtttagg

SEQ ID NO: 68015 - RNA, 21 nt, synthetic construct
  source 1..21: mol_type = other RNA
actggaaatggacagcgggga

SEQ ID NO: 68016 - RNA, 21 nt, synthetic construct
  source 1..21: mol_type = other RNA
actggaactcatttctgcttg

SEQ ID NO: 68017 - RNA, 21 nt, synthetic construct
  source 1..21: mol_type = other RNA
actggaaggaaataagaaggt

SEQ ID NO: 68018 - RNA, 21 nt, synthetic construct
  source 1..21: mol_type = other RNA
actggaaggactcacagctta

SEQ ID NO: 68019 - RNA, 21 nt, synthetic construct
  source 1..21: mol_type = other RNA
actggaagtaattgggatctg

SEQ ID NO: 68020 - RNA, 21 nt, synthetic construct
  source 1..21: mol_type = other RNA
actggaagtgtaacatacaca

SEQ ID NO: 68021 - RNA, 21 nt, synthetic construct
  source 1..21: mol_type = other RNA
actggaatcaatccagacagc

SEQ ID NO: 68022 - RNA, 21 nt, synthetic construct
  source 1..21: mol_type = other RNA
actggaattcatcaaagttaa

SEQ ID NO: 68023 - RNA, 21 nt, synthetic construct
  source 1..21: mol_type = other RNA
actggactccttctgaaggca

SEQ ID NO: 68024 - RNA, 21 nt, synthetic construct
  source 1..21: mol_type = other RNA
actggagaacagtaaagtcac

SEQ ID NO: 68025 - RNA, 21 nt, synthetic construct
  source 1..21: mol_type = other RNA
actggagaattctactaaaca

SEQ ID NO: 68026 - RNA, 21 nt, synthetic construct
  source 1..21: mol_type = other RNA
actggagcagggtgggccctt

SEQ ID NO: 68027 - RNA, 21 nt, synthetic construct
  source 1..21: mol_type = other RNA
actggagggatgctggagtgt

SEQ ID NO: 68028 - RNA, 21 nt, synthetic construct
  source 1..21: mol_type = other RNA
actggaggtgcacattccaag

SEQ ID NO: 68029 - RNA, 21 nt, synthetic construct
  source 1..21: mol_type = other RNA
actggagtgcagtggtgcaat

SEQ ID NO: 68030 - RNA, 21 nt, synthetic construct
  source 1..21: mol_type = other RNA
actggagttcactggcacaat

SEQ ID NO: 68031 - RNA, 21 nt, synthetic construct
  source 1..21: mol_type = other RNA
actggatacaaggtcaatctg

SEQ ID NO: 68032 - RNA, 21 nt, synthetic construct
  source 1..21: mol_type = other RNA
actggatacggaaatataaca

SEQ ID NO: 68033 - RNA, 21 nt, synthetic construct
  source 1..21: mol_type = other RNA
actggatagaagtgtatcaga

SEQ ID NO: 68034 - RNA, 21 nt, synthetic construct
  source 1..21: mol_type = other RNA
actggatagcaacttgcagaa

SEQ ID NO: 68035 - RNA, 21 nt, synthetic construct
  source 1..21: mol_type = other RNA
actggatcctggagggctccc

SEQ ID NO: 68036 - RNA, 21 nt, synthetic construct
  source 1..21: mol_type = other RNA
actggatgaatacaaaggtgt

SEQ ID NO: 68037 - RNA, 21 nt, synthetic construct
  source 1..21: mol_type = other RNA
actggattaaggagatggcac

SEQ ID NO: 68038 - RNA, 21 nt, synthetic construct
  source 1..21: mol_type = other RNA
actggatttgattgggcatta

SEQ ID NO: 68039 - RNA, 21 nt, synthetic construct
  source 1..21: mol_type = other RNA
actggcaaaaatcatcatata

SEQ ID NO: 68040 - RNA, 21 nt, synthetic construct
  source 1..21: mol_type = other RNA
actggcaatcaaatggccttc

SEQ ID NO: 68041 - RNA, 21 nt, synthetic construct
  source 1..21: mol_type = other RNA
actggcacagcactgttaact

SEQ ID NO: 68042 - RNA, 21 nt, synthetic construct
  source 1..21: mol_type = other RNA
actggccactgattgagtatc

SEQ ID NO: 68043 - RNA, 21 nt, synthetic construct
  source 1..21: mol_type = other RNA
actggccagcattacttaggc

SEQ ID NO: 68044 - RNA, 21 nt, synthetic construct
  source 1..21: mol_type = other RNA
actggccatccttcccaaatc

SEQ ID NO: 68045 - RNA, 21 nt, synthetic construct
  source 1..21: mol_type = other RNA
actggccatgttttatttctt

SEQ ID NO: 68046 - RNA, 21 nt, synthetic construct
  source 1..21: mol_type = other RNA
actggcccctccatggaaact

SEQ ID NO: 68047 - RNA, 21 nt, synthetic construct
  source 1..21: mol_type = other RNA
actggcctcggccaaccatta

SEQ ID NO: 68048 - RNA, 21 nt, synthetic construct
  source 1..21: mol_type = other RNA
actggcctgagctctcagtgg

SEQ ID NO: 68049 - RNA, 21 nt, synthetic construct
  source 1..21: mol_type = other RNA
actggctagtaggcaacatcc

SEQ ID NO: 68050 - RNA, 21 nt, synthetic construct
  source 1..21: mol_type = other RNA
actggctattagttaaccttc

SEQ ID NO: 68051 - RNA, 21 nt, synthetic construct
  source 1..21: mol_type = other RNA
actggctgtgccaactctggc

SEQ ID NO: 68052 - RNA, 21 nt, synthetic construct
  source 1..21: mol_type = other RNA
actggcttaatgcatataaaa

SEQ ID NO: 68053 - RNA, 21 nt, synthetic construct
  source 1..21: mol_type = other RNA
actggcttcagtgccaacaca

SEQ ID NO: 68054 - RNA, 21 nt, synthetic construct
  source 1..21: mol_type = other RNA
actgggacttctagcctccag

SEQ ID NO: 68055 - RNA, 21 nt, synthetic construct
  source 1..21: mol_type = other RNA
actgggagaatggcaaggcta

SEQ ID NO: 68056 - RNA, 21 nt, synthetic construct
  source 1..21: mol_type = other RNA
actgggagccctccaggatcc

SEQ ID NO: 68057 - RNA, 21 nt, synthetic construct
  source 1..21: mol_type = other RNA
actgggatcctaagcatgaga

SEQ ID NO: 68058 - RNA, 21 nt, synthetic construct
  source 1..21: mol_type = other RNA
actgggcaacagagacagaga

SEQ ID NO: 68059 - RNA, 21 nt, synthetic construct
  source 1..21: mol_type = other RNA
actggggagtgtgcccaagga

SEQ ID NO: 68060 - RNA, 21 nt, synthetic construct
  source 1..21: mol_type = other RNA
actggggcttgaacccgaggt

SEQ ID NO: 68061 - RNA, 21 nt, synthetic construct
  source 1..21: mol_type = other RNA
actgggggctggacataaggg

SEQ ID NO: 68062 - RNA, 21 nt, synthetic construct
  source 1..21: mol_type = other RNA
actggggtcttagttctgctt

SEQ ID NO: 68063 - RNA, 21 nt, synthetic construct
  source 1..21: mol_type = other RNA
actgggtaaacaagactcaac

SEQ ID NO: 68064 - RNA, 21 nt, synthetic construct
  source 1..21: mol_type = other RNA
actgggtccccggaggaggtg

SEQ ID NO: 68065 - RNA, 21 nt, synthetic construct
  source 1..21: mol_type = other RNA
actgggtcttataggttgaat

SEQ ID NO: 68066 - RNA, 21 nt, synthetic construct
  source 1..21: mol_type = other RNA
actgggtgtagggggaaaact

SEQ ID NO: 68067 - RNA, 21 nt, synthetic construct
  source 1..21: mol_type = other RNA
actgggtgtgatggcgcatgc

SEQ ID NO: 68068 - RNA, 21 nt, synthetic construct
  source 1..21: mol_type = other RNA
actgggtgtgcacgtttgctt

SEQ ID NO: 68069 - RNA, 21 nt, synthetic construct
  source 1..21: mol_type = other RNA
actgggttctcaccaacatcc

SEQ ID NO: 68070 - RNA, 21 nt, synthetic construct
  source 1..21: mol_type = other RNA
actggtaaggaaacagagttt

SEQ ID NO: 68071 - RNA, 21 nt, synthetic construct
  source 1..21: mol_type = other RNA
actggtaccaaagcagaaata

SEQ ID NO: 68072 - RNA, 21 nt, synthetic construct
  source 1..21: mol_type = other RNA
actggtcactggccactgatt

SEQ ID NO: 68073 - RNA, 21 nt, synthetic construct
  source 1..21: mol_type = other RNA
actggtccagatgaagcaggg

SEQ ID NO: 68074 - RNA, 21 nt, synthetic construct
  source 1..21: mol_type = other RNA
actggtctcctttctatactt

SEQ ID NO: 68075 - RNA, 21 nt, synthetic construct
  source 1..21: mol_type = other RNA
actggtgaactgggtgtaggg

SEQ ID NO: 68076 - RNA, 21 nt, synthetic construct
  source 1..21: mol_type = other RNA
actggtgcttttttggtgttt

SEQ ID NO: 68077 - RNA, 21 nt, synthetic construct
  source 1..21: mol_type = other RNA
actggtgtccttctgagaagg

SEQ ID NO: 68078 - RNA, 21 nt, synthetic construct
  source 1..21: mol_type = other RNA
actggtgttaggcaatccttc

SEQ ID NO: 68079 - RNA, 21 nt, synthetic construct
  source 1..21: mol_type = other RNA
actggtttcagtacacgaaaa

SEQ ID NO: 68080 - RNA, 21 nt, synthetic construct
  source 1..21: mol_type = other RNA
actggtttcagtccctccttt

SEQ ID NO: 68081 - RNA, 21 nt, synthetic construct
  source 1..21: mol_type = other RNA
actggtttctgcatacttagc

SEQ ID NO: 68082 - RNA, 21 nt, synthetic construct
  source 1..21: mol_type = other RNA
actggttttcctgatggacat

SEQ ID NO: 68083 - RNA, 21 nt, synthetic construct
  source 1..21: mol_type = other RNA
actgtaaaaattttctcccaa

SEQ ID NO: 68084 - RNA, 21 nt, synthetic construct
  source 1..21: mol_type = other RNA
actgtaaacaatgctgctatg

SEQ ID NO: 68085 - RNA, 21 nt, synthetic construct
  source 1..21: mol_type = other RNA
actgtaaagtaatcaagtgaa

SEQ ID NO: 68086 - RNA, 21 nt, synthetic construct
  source 1..21: mol_type = other RNA
actgtaaccctgtttccctta

SEQ ID NO: 68087 - RNA, 21 nt, synthetic construct
  source 1..21: mol_type = other RNA
actgtaacctccacctcccag

SEQ ID NO: 68088 - RNA, 21 nt, synthetic construct
  source 1..21: mol_type = other RNA
actgtaagctgaactctgtgg

SEQ ID NO: 68089 - RNA, 21 nt, synthetic construct
  source 1..21: mol_type = other RNA
actgtaagttcctggactgtg

SEQ ID NO: 68090 - RNA, 21 nt, synthetic construct
  source 1..21: mol_type = other RNA
actgtaatattgtatataccc

SEQ ID NO: 68091 - RNA, 21 nt, synthetic construct
  source 1..21: mol_type = other RNA
actgtaatgagctgagattgc

SEQ ID NO: 68092 - RNA, 21 nt, synthetic construct
  source 1..21: mol_type = other RNA
actgtacaaagatttacccct

SEQ ID NO: 68093 - RNA, 21 nt, synthetic construct
  source 1..21: mol_type = other RNA
actgtactactgacctgggag

SEQ ID NO: 68094 - RNA, 21 nt, synthetic construct
  source 1..21: mol_type = other RNA
actgtactcctagatactcgg

SEQ ID NO: 68095 - RNA, 21 nt, synthetic construct
  source 1..21: mol_type = other RNA
actgtactgtttagcatctag

SEQ ID NO: 68096 - RNA, 21 nt, synthetic construct
  source 1..21: mol_type = other RNA
actgtagaatgtttttccgtc

SEQ ID NO: 68097 - RNA, 21 nt, synthetic construct
  source 1..21: mol_type = other RNA
actgtagagaaaatgttatac

SEQ ID NO: 68098 - RNA, 21 nt, synthetic construct
  source 1..21: mol_type = other RNA
actgtaggccccgatgccatg

SEQ ID NO: 68099 - RNA, 21 nt, synthetic construct
  source 1..21: mol_type = other RNA
actgtagtccctgctacttgt

SEQ ID NO: 68100 - RNA, 21 nt, synthetic construct
  source 1..21: mol_type = other RNA
actgtagttcagtttttcttt

SEQ ID NO: 68101 - RNA, 21 nt, synthetic construct
  source 1..21: mol_type = other RNA
actgtatggttcttaagatga

SEQ ID NO: 68102 - RNA, 21 nt, synthetic construct
  source 1..21: mol_type = other RNA
actgtattaccagcttacagc

SEQ ID NO: 68103 - RNA, 21 nt, synthetic construct
  source 1..21: mol_type = other RNA
actgtattaggatgtgtaccc

SEQ ID NO: 68104 - RNA, 21 nt, synthetic construct
  source 1..21: mol_type = other RNA
actgtattgcaaactaagtgg

SEQ ID NO: 68105 - RNA, 21 nt, synthetic construct
  source 1..21: mol_type = other RNA
actgtcacaattcacagaata

SEQ ID NO: 68106 - RNA, 21 nt, synthetic construct
  source 1..21: mol_type = other RNA
actgtcacaggctttcctaca

SEQ ID NO: 68107 - RNA, 21 nt, synthetic construct
  source 1..21: mol_type = other RNA
actgtcactgacacaggctga

SEQ ID NO: 68108 - RNA, 21 nt, synthetic construct
  source 1..21: mol_type = other RNA
actgtcagtgggactggagaa

SEQ ID NO: 68109 - RNA, 21 nt, synthetic construct
  source 1..21: mol_type = other RNA
actgtcatcagcgtcctcact

SEQ ID NO: 68110 - RNA, 21 nt, synthetic construct
  source 1..21: mol_type = other RNA
actgtccaaacagtgaccaca

SEQ ID NO: 68111 - RNA, 21 nt, synthetic construct
  source 1..21: mol_type = other RNA
actgtcctctcttgttgagga

SEQ ID NO: 68112 - RNA, 21 nt, synthetic construct
  source 1..21: mol_type = other RNA
actgtcctgaattctaacatt

SEQ ID NO: 68113 - RNA, 21 nt, synthetic construct
  source 1..21: mol_type = other RNA
actgtcctgaattctaatgaa

SEQ ID NO: 68114 - RNA, 21 nt, synthetic construct
  source 1..21: mol_type = other RNA
actgtcgaagcttaatttaga

SEQ ID NO: 68115 - RNA, 21 nt, synthetic construct
  source 1..21: mol_type = other RNA
actgtctcagtcccaaatggg

SEQ ID NO: 68116 - RNA, 21 nt, synthetic construct
  source 1..21: mol_type = other RNA
actgtctccatgtcctcacct

SEQ ID NO: 68117 - RNA, 21 nt, synthetic construct
  source 1..21: mol_type = other RNA
actgtctgtgaaaataatacc

SEQ ID NO: 68118 - RNA, 21 nt, synthetic construct
  source 1..21: mol_type = other RNA
actgtgaattcactaatgcct

SEQ ID NO: 68119 - RNA, 21 nt, synthetic construct
  source 1..21: mol_type = other RNA
actgtgactccaaagcaaacc

SEQ ID NO: 68120 - RNA, 21 nt, synthetic construct
  source 1..21: mol_type = other RNA
actgtgagccactaaaacagg

SEQ ID NO: 68121 - RNA, 21 nt, synthetic construct
  source 1..21: mol_type = other RNA
actgtgagggagatatttcgc

SEQ ID NO: 68122 - RNA, 21 nt, synthetic construct
  source 1..21: mol_type = other RNA
actgtgagggtaagaaaggag

SEQ ID NO: 68123 - RNA, 21 nt, synthetic construct
  source 1..21: mol_type = other RNA
actgtgatacctagtacgtaa

SEQ ID NO: 68124 - RNA, 21 nt, synthetic construct
  source 1..21: mol_type = other RNA
actgtgatgactgtaagctga

SEQ ID NO: 68125 - RNA, 21 nt, synthetic construct
  source 1..21: mol_type = other RNA
actgtgatgattttagaaggt

SEQ ID NO: 68126 - RNA, 21 nt, synthetic construct
  source 1..21: mol_type = other RNA
actgtgattacaattcctttc

SEQ ID NO: 68127 - RNA, 21 nt, synthetic construct
  source 1..21: mol_type = other RNA
actgtgcagtggatgactagg

SEQ ID NO: 68128 - RNA, 21 nt, synthetic construct
  source 1..21: mol_type = other RNA
actgtgccttgatccattaca

SEQ ID NO: 68129 - RNA, 21 nt, synthetic construct
  source 1..21: mol_type = other RNA
actgtgcttccacagctatca

SEQ ID NO: 68130 - RNA, 21 nt, synthetic construct
  source 1..21: mol_type = other RNA
actgtggtcactgtttggaca

SEQ ID NO: 68131 - RNA, 21 nt, synthetic construct
  source 1..21: mol_type = other RNA
actgtgtgcttggagtcactt

SEQ ID NO: 68132 - RNA, 21 nt, synthetic construct
  source 1..21: mol_type = other RNA
actgtgtggcttctcaaactg

SEQ ID NO: 68133 - RNA, 21 nt, synthetic construct
  source 1..21: mol_type = other RNA
actgtgtgtgtccaggccaac

SEQ ID NO: 68134 - RNA, 21 nt, synthetic construct
  source 1..21: mol_type = other RNA
actgtgttacattgccttcgc

SEQ ID NO: 68135 - RNA, 21 nt, synthetic construct
  source 1..21: mol_type = other RNA
actgtgttcttttccttctta

SEQ ID NO: 68136 - RNA, 21 nt, synthetic construct
  source 1..21: mol_type = other RNA
actgttaactgacttacagac

SEQ ID NO: 68137 - RNA, 21 nt, synthetic construct
  source 1..21: mol_type = other RNA
actgttacttgactattttac

SEQ ID NO: 68138 - RNA, 21 nt, synthetic construct
  source 1..21: mol_type = other RNA
actgttagggacttatggaga

SEQ ID NO: 68139 - RNA, 21 nt, synthetic construct
  source 1..21: mol_type = other RNA
actgttatctgggaacagccc

SEQ ID NO: 68140 - RNA, 21 nt, synthetic construct
  source 1..21: mol_type = other RNA
actgttatgacaagactacct

SEQ ID NO: 68141 - RNA, 21 nt, synthetic construct
  source 1..21: mol_type = other RNA
actgttccccaagccaaatta

SEQ ID NO: 68142 - RNA, 21 nt, synthetic construct
  source 1..21: mol_type = other RNA
actgttctccagtcccactga

SEQ ID NO: 68143 - RNA, 21 nt, synthetic construct
  source 1..21: mol_type = other RNA
actgttgatttagaaatacct

SEQ ID NO: 68144 - RNA, 21 nt, synthetic construct
  source 1..21: mol_type = other RNA
actgttgcctctgtgctagcc

SEQ ID NO: 68145 - RNA, 21 nt, synthetic construct
  source 1..21: mol_type = other RNA
actgttggaaaaatcgtcctc

SEQ ID NO: 68146 - RNA, 21 nt, synthetic construct
  source 1..21: mol_type = other RNA
actgttgtccaggccagagtg

SEQ ID NO: 68147 - RNA, 21 nt, synthetic construct
  source 1..21: mol_type = other RNA
actgtttagcatctagcacag

SEQ ID NO: 68148 - RNA, 21 nt, synthetic construct
  source 1..21: mol_type = other RNA
actgtttcttagctatattca

SEQ ID NO: 68149 - RNA, 21 nt, synthetic construct
  source 1..21: mol_type = other RNA
actgtttgattactgtagctt

SEQ ID NO: 68150 - RNA, 21 nt, synthetic construct
  source 1..21: mol_type = other RNA
actgtttggctgggagcttat

SEQ ID NO: 68151 - RNA, 21 nt, synthetic construct
  source 1..21: mol_type = other RNA
actgttttccacagtgacttt

SEQ ID NO: 68152 - RNA, 21 nt, synthetic construct
  source 1..21: mol_type = other RNA
actgttttttcctcccttcag

SEQ ID NO: 68153 - RNA, 21 nt, synthetic construct
  source 1..21: mol_type = other RNA
acttaaaaaatgcgcgtccgc

SEQ ID NO: 68154 - RNA, 21 nt, synthetic construct
  source 1..21: mol_type = other RNA
acttaaaggtttggagtttgt

SEQ ID NO: 68155 - RNA, 21 nt, synthetic construct
  source 1..21: mol_type = other RNA
acttaactataggagttcatt

SEQ ID NO: 68156 - RNA, 21 nt, synthetic construct
  source 1..21: mol_type = other RNA
acttaagagcatgttgggcca

SEQ ID NO: 68157 - RNA, 21 nt, synthetic construct
  source 1..21: mol_type = other RNA
acttaagtatctcagtcataa

SEQ ID NO: 68158 - RNA, 21 nt, synthetic construct
  source 1..21: mol_type = other RNA
acttaagtatctcggtcattc

SEQ ID NO: 68159 - RNA, 21 nt, synthetic construct
  source 1..21: mol_type = other RNA
acttaatagcccaacagggtt

SEQ ID NO: 68160 - RNA, 21 nt, synthetic construct
  source 1..21: mol_type = other RNA
acttaatttacccacaaaaga

SEQ ID NO: 68161 - RNA, 21 nt, synthetic construct
  source 1..21: mol_type = other RNA
acttacagaccttattcaaat

SEQ ID NO: 68162 - RNA, 21 nt, synthetic construct
  source 1..21: mol_type = other RNA
acttacagatatcacccagac

SEQ ID NO: 68163 - RNA, 21 nt, synthetic construct
  source 1..21: mol_type = other RNA
acttacagtaagatcctggat

SEQ ID NO: 68164 - RNA, 21 nt, synthetic construct
  source 1..21: mol_type = other RNA
acttacatcagcagtgaccat

SEQ ID NO: 68165 - RNA, 21 nt, synthetic construct
  source 1..21: mol_type = other RNA
acttactagttgtgctacctc

SEQ ID NO: 68166 - RNA, 21 nt, synthetic construct
  source 1..21: mol_type = other RNA
acttactctcaaataatttgg

SEQ ID NO: 68167 - RNA, 21 nt, synthetic construct
  source 1..21: mol_type = other RNA
acttacttgagccccagaata

SEQ ID NO: 68168 - RNA, 21 nt, synthetic construct
  source 1..21: mol_type = other RNA
acttagaatataaactcttcc

SEQ ID NO: 68169 - RNA, 21 nt, synthetic construct
  source 1..21: mol_type = other RNA
acttagagggcttcatgctgg

SEQ ID NO: 68170 - RNA, 21 nt, synthetic construct
  source 1..21: mol_type = other RNA
acttagcatgttgctttgcga

SEQ ID NO: 68171 - RNA, 21 nt, synthetic construct
  source 1..21: mol_type = other RNA
acttagcccctgctgccagat

SEQ ID NO: 68172 - RNA, 21 nt, synthetic construct
  source 1..21: mol_type = other RNA
acttagccttggtaaaatcac

SEQ ID NO: 68173 - RNA, 21 nt, synthetic construct
  source 1..21: mol_type = other RNA
acttagcgctgatgtgttgac

SEQ ID NO: 68174 - RNA, 21 nt, synthetic construct
  source 1..21: mol_type = other RNA
acttagctaatttcagagaga

SEQ ID NO: 68175 - RNA, 21 nt, synthetic construct
  source 1..21: mol_type = other RNA
acttaggagaaaagcttcata

SEQ ID NO: 68176 - RNA, 21 nt, synthetic construct
  source 1..21: mol_type = other RNA
acttaggaggctattaacttt

SEQ ID NO: 68177 - RNA, 21 nt, synthetic construct
  source 1..21: mol_type = other RNA
acttaggcaaaggaaaaatct

SEQ ID NO: 68178 - RNA, 21 nt, synthetic construct
  source 1..21: mol_type = other RNA
acttaggcagttattaagagt

SEQ ID NO: 68179 - RNA, 21 nt, synthetic construct
  source 1..21: mol_type = other RNA
acttagtgagggaggccatct

SEQ ID NO: 68180 - RNA, 21 nt, synthetic construct
  source 1..21: mol_type = other RNA
acttagttcaagatgcatacc

SEQ ID NO: 68181 - RNA, 21 nt, synthetic construct
  source 1..21: mol_type = other RNA
acttagtttgcaatacagtta

SEQ ID NO: 68182 - RNA, 21 nt, synthetic construct
  source 1..21: mol_type = other RNA
acttatataaatgctcagtgg

SEQ ID NO: 68183 - RNA, 21 nt, synthetic construct
  source 1..21: mol_type = other RNA
acttatgcaagatggcaagtt

SEQ ID NO: 68184 - RNA, 21 nt, synthetic construct
  source 1..21: mol_type = other RNA
acttatgcatcttgcaaaacg

SEQ ID NO: 68185 - RNA, 21 nt, synthetic construct
  source 1..21: mol_type = other RNA
acttatggagataaattaccc

SEQ ID NO: 68186 - RNA, 21 nt, synthetic construct
  source 1..21: mol_type = other RNA
acttattagcaaagaggcaaa

SEQ ID NO: 68187 - RNA, 21 nt, synthetic construct
  source 1..21: mol_type = other RNA
acttattggaaaactctgttt

SEQ ID NO: 68188 - RNA, 21 nt, synthetic construct
  source 1..21: mol_type = other RNA
acttatttccagggggtatgg

SEQ ID NO: 68189 - RNA, 21 nt, synthetic construct
  source 1..21: mol_type = other RNA
acttcaaagggtcactattaa

SEQ ID NO: 68190 - RNA, 21 nt, synthetic construct
  source 1..21: mol_type = other RNA
acttcaacggacatttttcca

SEQ ID NO: 68191 - RNA, 21 nt, synthetic construct
  source 1..21: mol_type = other RNA
acttcaagaggttaaaaccac

SEQ ID NO: 68192 - RNA, 21 nt, synthetic construct
  source 1..21: mol_type = other RNA
acttcaaggtaatctagttta

SEQ ID NO: 68193 - RNA, 21 nt, synthetic construct
  source 1..21: mol_type = other RNA
acttcaaggttcacaaattag

SEQ ID NO: 68194 - RNA, 21 nt, synthetic construct
  source 1..21: mol_type = other RNA
acttcaatgctacagtaagca

SEQ ID NO: 68195 - RNA, 21 nt, synthetic construct
  source 1..21: mol_type = other RNA
acttcacaccatttagatcat

SEQ ID NO: 68196 - RNA, 21 nt, synthetic construct
  source 1..21: mol_type = other RNA
acttcacctctacacaaaaat

SEQ ID NO: 68197 - RNA, 21 nt, synthetic construct
  source 1..21: mol_type = other RNA
acttcacgatgcttaggtaag

SEQ ID NO: 68198 - RNA, 21 nt, synthetic construct
  source 1..21: mol_type = other RNA
acttcactagatctcttttcc

SEQ ID NO: 68199 - RNA, 21 nt, synthetic construct
  source 1..21: mol_type = other RNA
acttcactagtgggtcgggtg

SEQ ID NO: 68200 - RNA, 21 nt, synthetic construct
  source 1..21: mol_type = other RNA
acttcactggagaattctact

SEQ ID NO: 68201 - RNA, 21 nt, synthetic construct
  source 1..21: mol_type = other RNA
acttcacttccaagtcccgga

SEQ ID NO: 68202 - RNA, 21 nt, synthetic construct
  source 1..21: mol_type = other RNA
acttcagcgcttgaacaaata

SEQ ID NO: 68203 - RNA, 21 nt, synthetic construct
  source 1..21: mol_type = other RNA
acttcaggaacaccttgaaca

SEQ ID NO: 68204 - RNA, 21 nt, synthetic construct
  source 1..21: mol_type = other RNA
acttcagtccttaccactgaa

SEQ ID NO: 68205 - RNA, 21 nt, synthetic construct
  source 1..21: mol_type = other RNA
acttcagtggtaaggactgaa

SEQ ID NO: 68206 - RNA, 21 nt, synthetic construct
  source 1..21: mol_type = other RNA
acttcagttttgagtggcatc

SEQ ID NO: 68207 - RNA, 21 nt, synthetic construct
  source 1..21: mol_type = other RNA
acttcatagatgttatgcccc

SEQ ID NO: 68208 - RNA, 21 nt, synthetic construct
  source 1..21: mol_type = other RNA
acttcatctttcctgatcaca

SEQ ID NO: 68209 - RNA, 21 nt, synthetic construct
  source 1..21: mol_type = other RNA
acttcatgtacaatgaattag

SEQ ID NO: 68210 - RNA, 21 nt, synthetic construct
  source 1..21: mol_type = other RNA
acttcattcttgacatgattg

SEQ ID NO: 68211 - RNA, 21 nt, synthetic construct
  source 1..21: mol_type = other RNA
acttccaaccatcttcttagt

SEQ ID NO: 68212 - RNA, 21 nt, synthetic construct
  source 1..21: mol_type = other RNA
acttccaagtcccggaagctg

SEQ ID NO: 68213 - RNA, 21 nt, synthetic construct
  source 1..21: mol_type = other RNA
acttccagaaacttccaacca

SEQ ID NO: 68214 - RNA, 21 nt, synthetic construct
  source 1..21: mol_type = other RNA
acttccagcaagactttatgt

SEQ ID NO: 68215 - RNA, 21 nt, synthetic construct
  source 1..21: mol_type = other RNA
acttccagctcacgttaccct

SEQ ID NO: 68216 - RNA, 21 nt, synthetic construct
  source 1..21: mol_type = other RNA
acttccagtacatctcaattc

SEQ ID NO: 68217 - RNA, 21 nt, synthetic construct
  source 1..21: mol_type = other RNA
acttccagtgttttagggggg

SEQ ID NO: 68218 - RNA, 21 nt, synthetic construct
  source 1..21: mol_type = other RNA
acttccatgagattacatagc

SEQ ID NO: 68219 - RNA, 21 nt, synthetic construct
  source 1..21: mol_type = other RNA
acttcccactgctatgactaa

SEQ ID NO: 68220 - RNA, 21 nt, synthetic construct
  source 1..21: mol_type = other RNA
acttcccagacagggaatgcc

SEQ ID NO: 68221 - RNA, 21 nt, synthetic construct
  source 1..21: mol_type = other RNA
acttccctctcagtggtgctt

SEQ ID NO: 68222 - RNA, 21 nt, synthetic construct
  source 1..21: mol_type = other RNA
acttccctctttctcaacttc

SEQ ID NO: 68223 - RNA, 21 nt, synthetic construct
  source 1..21: mol_type = other RNA
acttcccttagctctcatgtc

SEQ ID NO: 68224 - RNA, 21 nt, synthetic construct
  source 1..21: mol_type = other RNA
acttcccttctcgaagtggtg

SEQ ID NO: 68225 - RNA, 21 nt, synthetic construct
  source 1..21: mol_type = other RNA
acttcctattagaagaatgat

SEQ ID NO: 68226 - RNA, 21 nt, synthetic construct
  source 1..21: mol_type = other RNA
acttcctattttataatgggc

SEQ ID NO: 68227 - RNA, 21 nt, synthetic construct
  source 1..21: mol_type = other RNA
acttcctctcttaaatccgag

SEQ ID NO: 68228 - RNA, 21 nt, synthetic construct
  source 1..21: mol_type = other RNA
acttcctggctctagcccagc

SEQ ID NO: 68229 - RNA, 21 nt, synthetic construct
  source 1..21: mol_type = other RNA
acttcctgttttagtggctca

SEQ ID NO: 68230 - RNA, 21 nt, synthetic construct
  source 1..21: mol_type = other RNA
acttcgaaagttcagatagaa

SEQ ID NO: 68231 - RNA, 21 nt, synthetic construct
  source 1..21: mol_type = other RNA
acttcgaactaaggaaagctc

SEQ ID NO: 68232 - RNA, 21 nt, synthetic construct
  source 1..21: mol_type = other RNA
acttcgagaagggaagtaaag

SEQ ID NO: 68233 - RNA, 21 nt, synthetic construct
  source 1..21: mol_type = other RNA
acttcgtcaaggggagaggcc

SEQ ID NO: 68234 - RNA, 21 nt, synthetic construct
  source 1..21: mol_type = other RNA
acttcgtgtgtggagtggggc

SEQ ID NO: 68235 - RNA, 21 nt, synthetic construct
  source 1..21: mol_type = other RNA
acttcgttcagtttagtaaat

SEQ ID NO: 68236 - RNA, 21 nt, synthetic construct
  source 1..21: mol_type = other RNA
acttctaatgcccattaaaac

SEQ ID NO: 68237 - RNA, 21 nt, synthetic construct
  source 1..21: mol_type = other RNA
acttctacagaatgttcaagt

SEQ ID NO: 68238 - RNA, 21 nt, synthetic construct
  source 1..21: mol_type = other RNA
acttctaccttgaaaatgccc

SEQ ID NO: 68239 - RNA, 21 nt, synthetic construct
  source 1..21: mol_type = other RNA
acttctagcctccagaaaacc

SEQ ID NO: 68240 - RNA, 21 nt, synthetic construct
  source 1..21: mol_type = other RNA
acttctatccagtgacacctg

SEQ ID NO: 68241 - RNA, 21 nt, synthetic construct
  source 1..21: mol_type = other RNA
acttctcaaacaggatacaaa

SEQ ID NO: 68242 - RNA, 21 nt, synthetic construct
  source 1..21: mol_type = other RNA
acttctcagctatagcttctg

SEQ ID NO: 68243 - RNA, 21 nt, synthetic construct
  source 1..21: mol_type = other RNA
acttctcagggcctgcttttg

SEQ ID NO: 68244 - RNA, 21 nt, synthetic construct
  source 1..21: mol_type = other RNA
acttctctcagagggaaactg

SEQ ID NO: 68245 - RNA, 21 nt, synthetic construct
  source 1..21: mol_type = other RNA
acttctctgctgctgaaaaag

SEQ ID NO: 68246 - RNA, 21 nt, synthetic construct
  source 1..21: mol_type = other RNA
acttctctggagcaagcatga

SEQ ID NO: 68247 - RNA, 21 nt, synthetic construct
  source 1..21: mol_type = other RNA
acttctgagtgttacttgaaa

SEQ ID NO: 68248 - RNA, 21 nt, synthetic construct
  source 1..21: mol_type = other RNA
acttctgatatcctgtaaacc

SEQ ID NO: 68249 - RNA, 21 nt, synthetic construct
  source 1..21: mol_type = other RNA
acttctggaaagttcaaatga

SEQ ID NO: 68250 - RNA, 21 nt, synthetic construct
  source 1..21: mol_type = other RNA
acttctggatgtgtatgatca

SEQ ID NO: 68251 - RNA, 21 nt, synthetic construct
  source 1..21: mol_type = other RNA
acttctgtgatcagaagagca

SEQ ID NO: 68252 - RNA, 21 nt, synthetic construct
  source 1..21: mol_type = other RNA
acttcttagtaaatatccgaa

SEQ ID NO: 68253 - RNA, 21 nt, synthetic construct
  source 1..21: mol_type = other RNA
acttcttattggttatctgta

SEQ ID NO: 68254 - RNA, 21 nt, synthetic construct
  source 1..21: mol_type = other RNA
acttcttcaaaagacatcact

SEQ ID NO: 68255 - RNA, 21 nt, synthetic construct
  source 1..21: mol_type = other RNA
acttcttctgttggagagatg

SEQ ID NO: 68256 - RNA, 21 nt, synthetic construct
  source 1..21: mol_type = other RNA
acttctttctctttcagccat

SEQ ID NO: 68257 - RNA, 21 nt, synthetic construct
  source 1..21: mol_type = other RNA
acttgaaacctgccatggtgt

SEQ ID NO: 68258 - RNA, 21 nt, synthetic construct
  source 1..21: mol_type = other RNA
acttgaaatcatttcactctt

SEQ ID NO: 68259 - RNA, 21 nt, synthetic construct
  source 1..21: mol_type = other RNA
acttgaacattctgtagaagt

SEQ ID NO: 68260 - RNA, 21 nt, synthetic construct
  source 1..21: mol_type = other RNA
acttgaaccttcctcttcctc

SEQ ID NO: 68261 - RNA, 21 nt, synthetic construct
  source 1..21: mol_type = other RNA
acttgaaggcaatgtagggaa

SEQ ID NO: 68262 - RNA, 21 nt, synthetic construct
  source 1..21: mol_type = other RNA
acttgaatactcgtgtgtctc

SEQ ID NO: 68263 - RNA, 21 nt, synthetic construct
  source 1..21: mol_type = other RNA
acttgaattagtgattttacc

SEQ ID NO: 68264 - RNA, 21 nt, synthetic construct
  source 1..21: mol_type = other RNA
acttgaattcagatggcccca

SEQ ID NO: 68265 - RNA, 21 nt, synthetic construct
  source 1..21: mol_type = other RNA
acttgacacaaaggactggaa

SEQ ID NO: 68266 - RNA, 21 nt, synthetic construct
  source 1..21: mol_type = other RNA
acttgactattttaccctcat

SEQ ID NO: 68267 - RNA, 21 nt, synthetic construct
  source 1..21: mol_type = other RNA
acttgagagcagagacacaca

SEQ ID NO: 68268 - RNA, 21 nt, synthetic construct
  source 1..21: mol_type = other RNA
acttgagcagatcagtaacaa

SEQ ID NO: 68269 - RNA, 21 nt, synthetic construct
  source 1..21: mol_type = other RNA
acttgagccccagaataggca

SEQ ID NO: 68270 - RNA, 21 nt, synthetic construct
  source 1..21: mol_type = other RNA
acttgagcctggaagttcaag

SEQ ID NO: 68271 - RNA, 21 nt, synthetic construct
  source 1..21: mol_type = other RNA
acttgaggtgattaaaggccc

SEQ ID NO: 68272 - RNA, 21 nt, synthetic construct
  source 1..21: mol_type = other RNA
acttgaggtttacttggggag

SEQ ID NO: 68273 - RNA, 21 nt, synthetic construct
  source 1..21: mol_type = other RNA
acttgagtttgttctgtcaca

SEQ ID NO: 68274 - RNA, 21 nt, synthetic construct
  source 1..21: mol_type = other RNA
acttgatcagggatttggcca

SEQ ID NO: 68275 - RNA, 21 nt, synthetic construct
  source 1..21: mol_type = other RNA
acttgatccaggtgtatgatc

SEQ ID NO: 68276 - RNA, 21 nt, synthetic construct
  source 1..21: mol_type = other RNA
acttgatctaaaatggaagac

SEQ ID NO: 68277 - RNA, 21 nt, synthetic construct
  source 1..21: mol_type = other RNA
acttgatggtttggggctttt

SEQ ID NO: 68278 - RNA, 21 nt, synthetic construct
  source 1..21: mol_type = other RNA
acttgattacaagggtgacag

SEQ ID NO: 68279 - RNA, 21 nt, synthetic construct
  source 1..21: mol_type = other RNA
acttgcagaagagtgaagctg

SEQ ID NO: 68280 - RNA, 21 nt, synthetic construct
  source 1..21: mol_type = other RNA
acttgccatcttgcataagtt

SEQ ID NO: 68281 - RNA, 21 nt, synthetic construct
  source 1..21: mol_type = other RNA
acttgctctcttgcccaagct

SEQ ID NO: 68282 - RNA, 21 nt, synthetic construct
  source 1..21: mol_type = other RNA
acttgcttaggctgaagcagg

SEQ ID NO: 68283 - RNA, 21 nt, synthetic construct
  source 1..21: mol_type = other RNA
acttgcttgggaacagcaggg

SEQ ID NO: 68284 - RNA, 21 nt, synthetic construct
  source 1..21: mol_type = other RNA
acttgcttggtttcacacgca

SEQ ID NO: 68285 - RNA, 21 nt, synthetic construct
  source 1..21: mol_type = other RNA
acttgctttattacttcagtt

SEQ ID NO: 68286 - RNA, 21 nt, synthetic construct
  source 1..21: mol_type = other RNA
acttgctttgaatttggaaag

SEQ ID NO: 68287 - RNA, 21 nt, synthetic construct
  source 1..21: mol_type = other RNA
acttggaagtgaagtcaagat

SEQ ID NO: 68288 - RNA, 21 nt, synthetic construct
  source 1..21: mol_type = other RNA
acttggacaggggacatgaag

SEQ ID NO: 68289 - RNA, 21 nt, synthetic construct
  source 1..21: mol_type = other RNA
acttggagaacttaaaggttt

SEQ ID NO: 68290 - RNA, 21 nt, synthetic construct
  source 1..21: mol_type = other RNA
acttggagttttccccctaca

SEQ ID NO: 68291 - RNA, 21 nt, synthetic construct
  source 1..21: mol_type = other RNA
acttggatcttatctgctgtc

SEQ ID NO: 68292 - RNA, 21 nt, synthetic construct
  source 1..21: mol_type = other RNA
acttggattgtgtgtcgagaa

SEQ ID NO: 68293 - RNA, 21 nt, synthetic construct
  source 1..21: mol_type = other RNA
acttggcacaggagagcgaca

SEQ ID NO: 68294 - RNA, 21 nt, synthetic construct
  source 1..21: mol_type = other RNA
acttggctcctcccggctaag

SEQ ID NO: 68295 - RNA, 21 nt, synthetic construct
  source 1..21: mol_type = other RNA
acttgggaggctgagacacta

SEQ ID NO: 68296 - RNA, 21 nt, synthetic construct
  source 1..21: mol_type = other RNA
acttgggatgtttctaccttt

SEQ ID NO: 68297 - RNA, 21 nt, synthetic construct
  source 1..21: mol_type = other RNA
acttggggagagtgggcccag

SEQ ID NO: 68298 - RNA, 21 nt, synthetic construct
  source 1..21: mol_type = other RNA
acttggggaggccaaggcagg

SEQ ID NO: 68299 - RNA, 21 nt, synthetic construct
  source 1..21: mol_type = other RNA
acttgggtataaatgatgagc

SEQ ID NO: 68300 - RNA, 21 nt, synthetic construct
  source 1..21: mol_type = other RNA
acttgggtggaagctgtcctt

SEQ ID NO: 68301 - RNA, 21 nt, synthetic construct
  source 1..21: mol_type = other RNA
acttggtaaaaagtgcttcta

SEQ ID NO: 68302 - RNA, 21 nt, synthetic construct
  source 1..21: mol_type = other RNA
acttggtaagctgtgagtcct

SEQ ID NO: 68303 - RNA, 21 nt, synthetic construct
  source 1..21: mol_type = other RNA
acttggtcgaaaacctgaaat

SEQ ID NO: 68304 - RNA, 21 nt, synthetic construct
  source 1..21: mol_type = other RNA
acttggtctgggtgatatctg

SEQ ID NO: 68305 - RNA, 21 nt, synthetic construct
  source 1..21: mol_type = other RNA
acttggtttattttctgcatt

SEQ ID NO: 68306 - RNA, 21 nt, synthetic construct
  source 1..21: mol_type = other RNA
acttgtagaggaggagggtta

SEQ ID NO: 68307 - RNA, 21 nt, synthetic construct
  source 1..21: mol_type = other RNA
acttgtatgaaattagttcct

SEQ ID NO: 68308 - RNA, 21 nt, synthetic construct
  source 1..21: mol_type = other RNA
acttgtcaagttctgatttca

SEQ ID NO: 68309 - RNA, 21 nt, synthetic construct
  source 1..21: mol_type = other RNA
acttgtcacaaaatgtggatg

SEQ ID NO: 68310 - RNA, 21 nt, synthetic construct
  source 1..21: mol_type = other RNA
acttgtcaggtgggcactggg

SEQ ID NO: 68311 - RNA, 21 nt, synthetic construct
  source 1..21: mol_type = other RNA
acttgtcatttctgcttagtc

SEQ ID NO: 68312 - RNA, 21 nt, synthetic construct
  source 1..21: mol_type = other RNA
acttgtcccatggtcaaatca

SEQ ID NO: 68313 - RNA, 21 nt, synthetic construct
  source 1..21: mol_type = other RNA
acttgtctcggatttaagaga

SEQ ID NO: 68314 - RNA, 21 nt, synthetic construct
  source 1..21: mol_type = other RNA
acttgtctttgtctattccct

SEQ ID NO: 68315 - RNA, 21 nt, synthetic construct
  source 1..21: mol_type = other RNA
acttgtctttttgtgacttgt

SEQ ID NO: 68316 - RNA, 21 nt, synthetic construct
  source 1..21: mol_type = other RNA
acttgtgtaactaccactgag

SEQ ID NO: 68317 - RNA, 21 nt, synthetic construct
  source 1..21: mol_type = other RNA
acttgtgtagcgggaaaaaat

SEQ ID NO: 68318 - RNA, 21 nt, synthetic construct
  source 1..21: mol_type = other RNA
acttgttcatgtttacagaaa

SEQ ID NO: 68319 - RNA, 21 nt, synthetic construct
  source 1..21: mol_type = other RNA
acttgtttcttttcactctaa

SEQ ID NO: 68320 - RNA, 21 nt, synthetic construct
  source 1..21: mol_type = other RNA
actttaaagctctatggcatt

SEQ ID NO: 68321 - RNA, 21 nt, synthetic construct
  source 1..21: mol_type = other RNA
actttaaatcagggcctttaa

SEQ ID NO: 68322 - RNA, 21 nt, synthetic construct
  source 1..21: mol_type = other RNA
actttaaattttgagacctca

SEQ ID NO: 68323 - RNA, 21 nt, synthetic construct
  source 1..21: mol_type = other RNA
actttaatcaccaggcgcggt

SEQ ID NO: 68324 - RNA, 21 nt, synthetic construct
  source 1..21: mol_type = other RNA
actttacagttatgtcagtca

SEQ ID NO: 68325 - RNA, 21 nt, synthetic construct
  source 1..21: mol_type = other RNA
actttaccctgctggaacgaa

SEQ ID NO: 68326 - RNA, 21 nt, synthetic construct
  source 1..21: mol_type = other RNA
actttactgttctccagtccc

SEQ ID NO: 68327 - RNA, 21 nt, synthetic construct
  source 1..21: mol_type = other RNA
actttagacatgggctaaata

SEQ ID NO: 68328 - RNA, 21 nt, synthetic construct
  source 1..21: mol_type = other RNA
actttagagtcagttgtttac

SEQ ID NO: 68329 - RNA, 21 nt, synthetic construct
  source 1..21: mol_type = other RNA
actttaggctgttcaatttag

SEQ ID NO: 68330 - RNA, 21 nt, synthetic construct
  source 1..21: mol_type = other RNA
actttaggtcagaatacaaaa

SEQ ID NO: 68331 - RNA, 21 nt, synthetic construct
  source 1..21: mol_type = other RNA
actttaggttacgtactaggt

SEQ ID NO: 68332 - RNA, 21 nt, synthetic construct
  source 1..21: mol_type = other RNA
actttatacctgttgaatagc

SEQ ID NO: 68333 - RNA, 21 nt, synthetic construct
  source 1..21: mol_type = other RNA
actttatggtaattggttcgt

SEQ ID NO: 68334 - RNA, 21 nt, synthetic construct
  source 1..21: mol_type = other RNA
actttatggtatcactttttg

SEQ ID NO: 68335 - RNA, 21 nt, synthetic construct
  source 1..21: mol_type = other RNA
actttcaacctaacatgtctt

SEQ ID NO: 68336 - RNA, 21 nt, synthetic construct
  source 1..21: mol_type = other RNA
actttcacactgattttctgc

SEQ ID NO: 68337 - RNA, 21 nt, synthetic construct
  source 1..21: mol_type = other RNA
actttcactgctcagtccctc

SEQ ID NO: 68338 - RNA, 21 nt, synthetic construct
  source 1..21: mol_type = other RNA
actttcagctcaaacagcttg

SEQ ID NO: 68339 - RNA, 21 nt, synthetic construct
  source 1..21: mol_type = other RNA
actttcatgatttggtgtgtg

SEQ ID NO: 68340 - RNA, 21 nt, synthetic construct
  source 1..21: mol_type = other RNA
actttcatttgtaattcatcc

SEQ ID NO: 68341 - RNA, 21 nt, synthetic construct
  source 1..21: mol_type = other RNA
actttccagaagtaactcttg

SEQ ID NO: 68342 - RNA, 21 nt, synthetic construct
  source 1..21: mol_type = other RNA
actttccatcttaggccataa

SEQ ID NO: 68343 - RNA, 21 nt, synthetic construct
  source 1..21: mol_type = other RNA
actttcccatctctagttttc

SEQ ID NO: 68344 - RNA, 21 nt, synthetic construct
  source 1..21: mol_type = other RNA
actttcctattcacactgctc

SEQ ID NO: 68345 - RNA, 21 nt, synthetic construct
  source 1..21: mol_type = other RNA
actttcctgataaggggctat

SEQ ID NO: 68346 - RNA, 21 nt, synthetic construct
  source 1..21: mol_type = other RNA
actttccttggagaagagttc

SEQ ID NO: 68347 - RNA, 21 nt, synthetic construct
  source 1..21: mol_type = other RNA
actttcgaagtgggaagcaaa

SEQ ID NO: 68348 - RNA, 21 nt, synthetic construct
  source 1..21: mol_type = other RNA
actttcgtcatctataaggta

SEQ ID NO: 68349 - RNA, 21 nt, synthetic construct
  source 1..21: mol_type = other RNA
actttctaatcctttgcacac

SEQ ID NO: 68350 - RNA, 21 nt, synthetic construct
  source 1..21: mol_type = other RNA
actttctattcccctggatcc

SEQ ID NO: 68351 - RNA, 21 nt, synthetic construct
  source 1..21: mol_type = other RNA
actttctgcttaaagcctctc

SEQ ID NO: 68352 - RNA, 21 nt, synthetic construct
  source 1..21: mol_type = other RNA
actttcttcaaccatactttt

SEQ ID NO: 68353 - RNA, 21 nt, synthetic construct
  source 1..21: mol_type = other RNA
actttgaaatcagaacttgac

SEQ ID NO: 68354 - RNA, 21 nt, synthetic construct
  source 1..21: mol_type = other RNA
actttgaatttaagacacaag

SEQ ID NO: 68355 - RNA, 21 nt, synthetic construct
  source 1..21: mol_type = other RNA
actttgagtagcaccctattt

SEQ ID NO: 68356 - RNA, 21 nt, synthetic construct
  source 1..21: mol_type = other RNA
actttgatcatacacatccag

SEQ ID NO: 68357 - RNA, 21 nt, synthetic construct
  source 1..21: mol_type = other RNA
actttgatgaattccagttta

SEQ ID NO: 68358 - RNA, 21 nt, synthetic construct
  source 1..21: mol_type = other RNA
actttgcattcctgaaatgaa

SEQ ID NO: 68359 - RNA, 21 nt, synthetic construct
  source 1..21: mol_type = other RNA
actttgcgaaacacactcgtg

SEQ ID NO: 68360 - RNA, 21 nt, synthetic construct
  source 1..21: mol_type = other RNA
actttggaaggtaggagggtg

SEQ ID NO: 68361 - RNA, 21 nt, synthetic construct
  source 1..21: mol_type = other RNA
actttgggattagcttattct

SEQ ID NO: 68362 - RNA, 21 nt, synthetic construct
  source 1..21: mol_type = other RNA
actttgtcaggcatgctaact

SEQ ID NO: 68363 - RNA, 21 nt, synthetic construct
  source 1..21: mol_type = other RNA
actttgtggcctcttcccttg

SEQ ID NO: 68364 - RNA, 21 nt, synthetic construct
  source 1..21: mol_type = other RNA
actttgttgctcaggctggag

SEQ ID NO: 68365 - RNA, 21 nt, synthetic construct
  source 1..21: mol_type = other RNA
actttgttttgtttttctctc

SEQ ID NO: 68366 - RNA, 21 nt, synthetic construct
  source 1..21: mol_type = other RNA
acttttaaagaaaggtctctc

SEQ ID NO: 68367 - RNA, 21 nt, synthetic construct
  source 1..21: mol_type = other RNA
acttttaacccacagataatt

SEQ ID NO: 68368 - RNA, 21 nt, synthetic construct
  source 1..21: mol_type = other RNA
acttttaaggcttggaaaaca

SEQ ID NO: 68369 - RNA, 21 nt, synthetic construct
  source 1..21: mol_type = other RNA
acttttagtaggtctccttgt

SEQ ID NO: 68370 - RNA, 21 nt, synthetic construct
  source 1..21: mol_type = other RNA
acttttagtttacactatggc

SEQ ID NO: 68371 - RNA, 21 nt, synthetic construct
  source 1..21: mol_type = other RNA
acttttcaactgaacaacgct

SEQ ID NO: 68372 - RNA, 21 nt, synthetic construct
  source 1..21: mol_type = other RNA
acttttcaggtattgagcctg

SEQ ID NO: 68373 - RNA, 21 nt, synthetic construct
  source 1..21: mol_type = other RNA
acttttccagtcttctcatac

SEQ ID NO: 68374 - RNA, 21 nt, synthetic construct
  source 1..21: mol_type = other RNA
acttttctggttttctggagg

SEQ ID NO: 68375 - RNA, 21 nt, synthetic construct
  source 1..21: mol_type = other RNA
acttttgagttcagaaagatt

SEQ ID NO: 68376 - RNA, 21 nt, synthetic construct
  source 1..21: mol_type = other RNA
acttttggaatttaaggggta

SEQ ID NO: 68377 - RNA, 21 nt, synthetic construct
  source 1..21: mol_type = other RNA
acttttggtacacatcttttt

SEQ ID NO: 68378 - RNA, 21 nt, synthetic construct
  source 1..21: mol_type = other RNA
acttttgtactacttgtcagg

SEQ ID NO: 68379 - RNA, 21 nt, synthetic construct
  source 1..21: mol_type = other RNA
acttttgtgcaacataaatag

SEQ ID NO: 68380 - RNA, 21 nt, synthetic construct
  source 1..21: mol_type = other RNA
actttttattctgttctagct

SEQ ID NO: 68381 - RNA, 21 nt, synthetic construct
  source 1..21: mol_type = other RNA
actttttcatccaaacagaaa

SEQ ID NO: 68382 - RNA, 21 nt, synthetic construct
  source 1..21: mol_type = other RNA
actttttgggcctttctgttt

SEQ ID NO: 68383 - RNA, 21 nt, synthetic construct
  source 1..21: mol_type = other RNA
actttttgtcacacggaaaac

SEQ ID NO: 68384 - RNA, 21 nt, synthetic construct
  source 1..21: mol_type = other RNA
actttttgtgagttttaactc

SEQ ID NO: 68385 - RNA, 21 nt, synthetic construct
  source 1..21: mol_type = other RNA
acttttttgcccactcttata

SEQ ID NO: 68386 - RNA, 21 nt, synthetic construct
  source 1..21: mol_type = other RNA
acttttttgtagagacagaat

SEQ ID NO: 68387 - RNA, 21 nt, synthetic construct
  source 1..21: mol_type = other RNA
agaaaaaataaaggctttcgt

SEQ ID NO: 68388 - RNA, 21 nt, synthetic construct
  source 1..21: mol_type = other RNA
agaaaaacaccaaaaaagcac

SEQ ID NO: 68389 - RNA, 21 nt, synthetic construct
  source 1..21: mol_type = other RNA
agaaaaacagaagacacaaaa

SEQ ID NO: 68390 - RNA, 21 nt, synthetic construct
  source 1..21: mol_type = other RNA
agaaaaacctaaacctgtgat

SEQ ID NO: 68391 - RNA, 21 nt, synthetic construct
  source 1..21: mol_type = other RNA
agaaaaactgaactacagtgt

SEQ ID NO: 68392 - RNA, 21 nt, synthetic construct
  source 1..21: mol_type = other RNA
agaaaaagaaaagacaagact

SEQ ID NO: 68393 - RNA, 21 nt, synthetic construct
  source 1..21: mol_type = other RNA
agaaaaagaataagctaatcc

SEQ ID NO: 68394 - RNA, 21 nt, synthetic construct
  source 1..21: mol_type = other RNA
agaaaaagcaacttgaaggca

SEQ ID NO: 68395 - RNA, 21 nt, synthetic construct
  source 1..21: mol_type = other RNA
agaaaaagcagagaaactgga

SEQ ID NO: 68396 - RNA, 21 nt, synthetic construct
  source 1..21: mol_type = other RNA
agaaaaagctcacctctggac

SEQ ID NO: 68397 - RNA, 21 nt, synthetic construct
  source 1..21: mol_type = other RNA
agaaaaaggttaagggaagag

SEQ ID NO: 68398 - RNA, 21 nt, synthetic construct
  source 1..21: mol_type = other RNA
agaaaaagttgggcttggttg

SEQ ID NO: 68399 - RNA, 21 nt, synthetic construct
  source 1..21: mol_type = other RNA
agaaaaatggggatatccaaa

SEQ ID NO: 68400 - RNA, 21 nt, synthetic construct
  source 1..21: mol_type = other RNA
agaaaaattacaggtcaaact

SEQ ID NO: 68401 - RNA, 21 nt, synthetic construct
  source 1..21: mol_type = other RNA
agaaaaattccctcagcaaaa

SEQ ID NO: 68402 - RNA, 21 nt, synthetic construct
  source 1..21: mol_type = other RNA
agaaaacaaattcatgcaact

SEQ ID NO: 68403 - RNA, 21 nt, synthetic construct
  source 1..21: mol_type = other RNA
agaaaacactccagaatgacc

SEQ ID NO: 68404 - RNA, 21 nt, synthetic construct
  source 1..21: mol_type = other RNA
agaaaacagataacctagatt

SEQ ID NO: 68405 - RNA, 21 nt, synthetic construct
  source 1..21: mol_type = other RNA
agaaaacatatccttctacat

SEQ ID NO: 68406 - RNA, 21 nt, synthetic construct
  source 1..21: mol_type = other RNA
agaaaaccagaaaagtgaaac

SEQ ID NO: 68407 - RNA, 21 nt, synthetic construct
  source 1..21: mol_type = other RNA
agaaaacccttcatcatttgt

SEQ ID NO: 68408 - RNA, 21 nt, synthetic construct
  source 1..21: mol_type = other RNA
agaaaaccgacagcagataag

SEQ ID NO: 68409 - RNA, 21 nt, synthetic construct
  source 1..21: mol_type = other RNA
agaaaactggcaatcaaatgg

SEQ ID NO: 68410 - RNA, 21 nt, synthetic construct
  source 1..21: mol_type = other RNA
agaaaacttgagcagatcagt

SEQ ID NO: 68411 - RNA, 21 nt, synthetic construct
  source 1..21: mol_type = other RNA
agaaaagaaaagtttcagtgg

SEQ ID NO: 68412 - RNA, 21 nt, synthetic construct
  source 1..21: mol_type = other RNA
agaaaagaagttacggttccc

SEQ ID NO: 68413 - RNA, 21 nt, synthetic construct
  source 1..21: mol_type = other RNA
agaaaagacaatagctagtgt

SEQ ID NO: 68414 - RNA, 21 nt, synthetic construct
  source 1..21: mol_type = other RNA
agaaaagataagtagaaggtc

SEQ ID NO: 68415 - RNA, 21 nt, synthetic construct
  source 1..21: mol_type = other RNA
agaaaagatcagtaaaattcc

SEQ ID NO: 68416 - RNA, 21 nt, synthetic construct
  source 1..21: mol_type = other RNA
agaaaagcacaggcatcggcc

SEQ ID NO: 68417 - RNA, 21 nt, synthetic construct
  source 1..21: mol_type = other RNA
agaaaaggctgagacctcatc

SEQ ID NO: 68418 - RNA, 21 nt, synthetic construct
  source 1..21: mol_type = other RNA
agaaaagtttcagtggttaat

SEQ ID NO: 68419 - RNA, 21 nt, synthetic construct
  source 1..21: mol_type = other RNA
agaaaataaaattctgaccct

SEQ ID NO: 68420 - RNA, 21 nt, synthetic construct
  source 1..21: mol_type = other RNA
agaaaataaaccaagtttggt

SEQ ID NO: 68421 - RNA, 21 nt, synthetic construct
  source 1..21: mol_type = other RNA
agaaaataatgttttccgtgt

SEQ ID NO: 68422 - RNA, 21 nt, synthetic construct
  source 1..21: mol_type = other RNA
agaaaatacagttttgaccaa

SEQ ID NO: 68423 - RNA, 21 nt, synthetic construct
  source 1..21: mol_type = other RNA
agaaaatagggacggccttct

SEQ ID NO: 68424 - RNA, 21 nt, synthetic construct
  source 1..21: mol_type = other RNA
agaaaatagtatgaaggttct

SEQ ID NO: 68425 - RNA, 21 nt, synthetic construct
  source 1..21: mol_type = other RNA
agaaaatcagtgtgaaagtat

SEQ ID NO: 68426 - RNA, 21 nt, synthetic construct
  source 1..21: mol_type = other RNA
agaaaatcatacattttccac

SEQ ID NO: 68427 - RNA, 21 nt, synthetic construct
  source 1..21: mol_type = other RNA
agaaaatcattgttcagggaa

SEQ ID NO: 68428 - RNA, 21 nt, synthetic construct
  source 1..21: mol_type = other RNA
agaaaatccaaaagcctcaaa

SEQ ID NO: 68429 - RNA, 21 nt, synthetic construct
  source 1..21: mol_type = other RNA
agaaaatccaagaagacatga

SEQ ID NO: 68430 - RNA, 21 nt, synthetic construct
  source 1..21: mol_type = other RNA
agaaaatccttacttccagct

SEQ ID NO: 68431 - RNA, 21 nt, synthetic construct
  source 1..21: mol_type = other RNA
agaaaatctgacaatttgcca

SEQ ID NO: 68432 - RNA, 21 nt, synthetic construct
  source 1..21: mol_type = other RNA
agaaaatgcttatgtcttgtg

SEQ ID NO: 68433 - RNA, 21 nt, synthetic construct
  source 1..21: mol_type = other RNA
agaaaatggccaagagttgct

SEQ ID NO: 68434 - RNA, 21 nt, synthetic construct
  source 1..21: mol_type = other RNA
agaaaatgtgacattagtggt

SEQ ID NO: 68435 - RNA, 21 nt, synthetic construct
  source 1..21: mol_type = other RNA
agaaaattagctgactttcat

SEQ ID NO: 68436 - RNA, 21 nt, synthetic construct
  source 1..21: mol_type = other RNA
agaaaattgttcatgaaatcc

SEQ ID NO: 68437 - RNA, 21 nt, synthetic construct
  source 1..21: mol_type = other RNA
agaaaattttctgagcaacta

SEQ ID NO: 68438 - RNA, 21 nt, synthetic construct
  source 1..21: mol_type = other RNA
agaaaattttcttttgtgggt

SEQ ID NO: 68439 - RNA, 21 nt, synthetic construct
  source 1..21: mol_type = other RNA
agaaacacaggactgtgtgtg

SEQ ID NO: 68440 - RNA, 21 nt, synthetic construct
  source 1..21: mol_type = other RNA
agaaacaccaacacaaagcct

SEQ ID NO: 68441 - RNA, 21 nt, synthetic construct
  source 1..21: mol_type = other RNA
agaaacagaaaaatccatctt

SEQ ID NO: 68442 - RNA, 21 nt, synthetic construct
  source 1..21: mol_type = other RNA
agaaacaggattacaatgtaa

SEQ ID NO: 68443 - RNA, 21 nt, synthetic construct
  source 1..21: mol_type = other RNA
agaaacatacatgttcagtta

SEQ ID NO: 68444 - RNA, 21 nt, synthetic construct
  source 1..21: mol_type = other RNA
agaaacatcccaagtgcccat

SEQ ID NO: 68445 - RNA, 21 nt, synthetic construct
  source 1..21: mol_type = other RNA
agaaacatggcttagaaatga

SEQ ID NO: 68446 - RNA, 21 nt, synthetic construct
  source 1..21: mol_type = other RNA
agaaaccaagagcatagactt

SEQ ID NO: 68447 - RNA, 21 nt, synthetic construct
  source 1..21: mol_type = other RNA
agaaaccacagagcctaaaat

SEQ ID NO: 68448 - RNA, 21 nt, synthetic construct
  source 1..21: mol_type = other RNA
agaaaccatcgttcacactcg

SEQ ID NO: 68449 - RNA, 21 nt, synthetic construct
  source 1..21: mol_type = other RNA
agaaaccatttaccccttaaa

SEQ ID NO: 68450 - RNA, 21 nt, synthetic construct
  source 1..21: mol_type = other RNA
agaaaccctgtacccattaga

SEQ ID NO: 68451 - RNA, 21 nt, synthetic construct
  source 1..21: mol_type = other RNA
agaaacctaagaaaggtctag

SEQ ID NO: 68452 - RNA, 21 nt, synthetic construct
  source 1..21: mol_type = other RNA
agaaaccttggtgtgcttctg

SEQ ID NO: 68453 - RNA, 21 nt, synthetic construct
  source 1..21: mol_type = other RNA
agaaacctttctcaaagccca

SEQ ID NO: 68454 - RNA, 21 nt, synthetic construct
  source 1..21: mol_type = other RNA
agaaactacctagaaaaacac

SEQ ID NO: 68455 - RNA, 21 nt, synthetic construct
  source 1..21: mol_type = other RNA
agaaactatccaacatgccag

SEQ ID NO: 68456 - RNA, 21 nt, synthetic construct
  source 1..21: mol_type = other RNA
agaaactgacaggactccaca

SEQ ID NO: 68457 - RNA, 21 nt, synthetic construct
  source 1..21: mol_type = other RNA
agaaactggaatcaatccaga

SEQ ID NO: 68458 - RNA, 21 nt, synthetic construct
  source 1..21: mol_type = other RNA
agaaactggtgaactgggtgt

SEQ ID NO: 68459 - RNA, 21 nt, synthetic construct
  source 1..21: mol_type = other RNA
agaaacttccaaccatcttct

SEQ ID NO: 68460 - RNA, 21 nt, synthetic construct
  source 1..21: mol_type = other RNA
agaaacttcttctgttggaga

SEQ ID NO: 68461 - RNA, 21 nt, synthetic construct
  source 1..21: mol_type = other RNA
agaaacttggattgtgtgtcg

SEQ ID NO: 68462 - RNA, 21 nt, synthetic construct
  source 1..21: mol_type = other RNA
agaaagaaaaactgaactaca

SEQ ID NO: 68463 - RNA, 21 nt, synthetic construct
  source 1..21: mol_type = other RNA
agaaagaaaatccaaaagcct

SEQ ID NO: 68464 - RNA, 21 nt, synthetic construct
  source 1..21: mol_type = other RNA
agaaagaaggccatttgattg

SEQ ID NO: 68465 - RNA, 21 nt, synthetic construct
  source 1..21: mol_type = other RNA
agaaagaagtaatttcttctg

SEQ ID NO: 68466 - RNA, 21 nt, synthetic construct
  source 1..21: mol_type = other RNA
agaaagacagggagagagaga

SEQ ID NO: 68467 - RNA, 21 nt, synthetic construct
  source 1..21: mol_type = other RNA
agaaagaccaagagtgtggct

SEQ ID NO: 68468 - RNA, 21 nt, synthetic construct
  source 1..21: mol_type = other RNA
agaaagagaatagcagaaaca

SEQ ID NO: 68469 - RNA, 21 nt, synthetic construct
  source 1..21: mol_type = other RNA
agaaagagagagacaagcaca

SEQ ID NO: 68470 - RNA, 21 nt, synthetic construct
  source 1..21: mol_type = other RNA
agaaagagagaggggggaagc

SEQ ID NO: 68471 - RNA, 21 nt, synthetic construct
  source 1..21: mol_type = other RNA
agaaagagggaagtactgagt

SEQ ID NO: 68472 - RNA, 21 nt, synthetic construct
  source 1..21: mol_type = other RNA
agaaagagttgggtttttgaa

SEQ ID NO: 68473 - RNA, 21 nt, synthetic construct
  source 1..21: mol_type = other RNA
agaaagataaatcagaaactg

SEQ ID NO: 68474 - RNA, 21 nt, synthetic construct
  source 1..21: mol_type = other RNA
agaaagataaatccaacgacc

SEQ ID NO: 68475 - RNA, 21 nt, synthetic construct
  source 1..21: mol_type = other RNA
agaaagatctcaaacagccta

SEQ ID NO: 68476 - RNA, 21 nt, synthetic construct
  source 1..21: mol_type = other RNA
agaaagattaatccttgtggt

SEQ ID NO: 68477 - RNA, 21 nt, synthetic construct
  source 1..21: mol_type = other RNA
agaaagcacataaaaaaggaa

SEQ ID NO: 68478 - RNA, 21 nt, synthetic construct
  source 1..21: mol_type = other RNA
agaaagcaccagggcctctga

SEQ ID NO: 68479 - RNA, 21 nt, synthetic construct
  source 1..21: mol_type = other RNA
agaaagcaggtcatgactttt

SEQ ID NO: 68480 - RNA, 21 nt, synthetic construct
  source 1..21: mol_type = other RNA
agaaagcaggttcattttaat

SEQ ID NO: 68481 - RNA, 21 nt, synthetic construct
  source 1..21: mol_type = other RNA
agaaagcatcagagctttgtt

SEQ ID NO: 68482 - RNA, 21 nt, synthetic construct
  source 1..21: mol_type = other RNA
agaaagcccagccgcggactc

SEQ ID NO: 68483 - RNA, 21 nt, synthetic construct
  source 1..21: mol_type = other RNA
agaaagcctcttcagaagagg

SEQ ID NO: 68484 - RNA, 21 nt, synthetic construct
  source 1..21: mol_type = other RNA
agaaagctctcaattaatgcc

SEQ ID NO: 68485 - RNA, 21 nt, synthetic construct
  source 1..21: mol_type = other RNA
agaaagctggactcattccaa

SEQ ID NO: 68486 - RNA, 21 nt, synthetic construct
  source 1..21: mol_type = other RNA
agaaagctgtggatgttggtg

SEQ ID NO: 68487 - RNA, 21 nt, synthetic construct
  source 1..21: mol_type = other RNA
agaaaggaattgtaatcacag

SEQ ID NO: 68488 - RNA, 21 nt, synthetic construct
  source 1..21: mol_type = other RNA
agaaaggacttcagtccttac

SEQ ID NO: 68489 - RNA, 21 nt, synthetic construct
  source 1..21: mol_type = other RNA
agaaaggagaccagttaggaa

SEQ ID NO: 68490 - RNA, 21 nt, synthetic construct
  source 1..21: mol_type = other RNA
agaaaggagggactgaaacca

SEQ ID NO: 68491 - RNA, 21 nt, synthetic construct
  source 1..21: mol_type = other RNA
agaaaggagttcagctttaaa

SEQ ID NO: 68492 - RNA, 21 nt, synthetic construct
  source 1..21: mol_type = other RNA
agaaaggcccaaaaagttttt

SEQ ID NO: 68493 - RNA, 21 nt, synthetic construct
  source 1..21: mol_type = other RNA
agaaaggcgaagcggcagggc

SEQ ID NO: 68494 - RNA, 21 nt, synthetic construct
  source 1..21: mol_type = other RNA
agaaaggggaaggaattttca

SEQ ID NO: 68495 - RNA, 21 nt, synthetic construct
  source 1..21: mol_type = other RNA
agaaagggtagctttgatgcc

SEQ ID NO: 68496 - RNA, 21 nt, synthetic construct
  source 1..21: mol_type = other RNA
agaaagggtgtgtgaatggaa

SEQ ID NO: 68497 - RNA, 21 nt, synthetic construct
  source 1..21: mol_type = other RNA
agaaaggtctagtgtgcatgt

SEQ ID NO: 68498 - RNA, 21 nt, synthetic construct
  source 1..21: mol_type = other RNA
agaaaggtctctctctgtcac

SEQ ID NO: 68499 - RNA, 21 nt, synthetic construct
  source 1..21: mol_type = other RNA
agaaaggtttcttcactctta

SEQ ID NO: 68500 - RNA, 21 nt, synthetic construct
  source 1..21: mol_type = other RNA
agaaagtagattagcttttac

SEQ ID NO: 68501 - RNA, 21 nt, synthetic construct
  source 1..21: mol_type = other RNA
agaaagttagtgtctaatggg

SEQ ID NO: 68502 - RNA, 21 nt, synthetic construct
  source 1..21: mol_type = other RNA
agaaagttttgcagttgggga

SEQ ID NO: 68503 - RNA, 21 nt, synthetic construct
  source 1..21: mol_type = other RNA
agaaataaaacatggccagta

SEQ ID NO: 68504 - RNA, 21 nt, synthetic construct
  source 1..21: mol_type = other RNA
agaaataaacgacaccagaac

SEQ ID NO: 68505 - RNA, 21 nt, synthetic construct
  source 1..21: mol_type = other RNA
agaaataaatcctcacatgtt

SEQ ID NO: 68506 - RNA, 21 nt, synthetic construct
  source 1..21: mol_type = other RNA
agaaataactttaatcaccag

SEQ ID NO: 68507 - RNA, 21 nt, synthetic construct
  source 1..21: mol_type = other RNA
agaaatacagaccgatggaac

SEQ ID NO: 68508 - RNA, 21 nt, synthetic construct
  source 1..21: mol_type = other RNA
agaaatacctgcaggttgata

SEQ ID NO: 68509 - RNA, 21 nt, synthetic construct
  source 1..21: mol_type = other RNA
agaaatacttggacaggggac

SEQ ID NO: 68510 - RNA, 21 nt, synthetic construct
  source 1..21: mol_type = other RNA
agaaatagaaaacttgagcag

SEQ ID NO: 68511 - RNA, 21 nt, synthetic construct
  source 1..21: mol_type = other RNA
agaaatagaactgtcacaatt

SEQ ID NO: 68512 - RNA, 21 nt, synthetic construct
  source 1..21: mol_type = other RNA
agaaatagactcccaacttat

SEQ ID NO: 68513 - RNA, 21 nt, synthetic construct
  source 1..21: mol_type = other RNA
agaaatcaaatgggaaattag

SEQ ID NO: 68514 - RNA, 21 nt, synthetic construct
  source 1..21: mol_type = other RNA
agaaatcatacacgagtgtgt

SEQ ID NO: 68515 - RNA, 21 nt, synthetic construct
  source 1..21: mol_type = other RNA
agaaatcggaactcctgtatg

SEQ ID NO: 68516 - RNA, 21 nt, synthetic construct
  source 1..21: mol_type = other RNA
agaaatctaccaaacattgaa

SEQ ID NO: 68517 - RNA, 21 nt, synthetic construct
  source 1..21: mol_type = other RNA
agaaatctgcatccaaaaggg

SEQ ID NO: 68518 - RNA, 21 nt, synthetic construct
  source 1..21: mol_type = other RNA
agaaatcttccagaaggagaa

SEQ ID NO: 68519 - RNA, 21 nt, synthetic construct
  source 1..21: mol_type = other RNA
agaaatgaaatggcccttaac

SEQ ID NO: 68520 - RNA, 21 nt, synthetic construct
  source 1..21: mol_type = other RNA
agaaatgaagatggcctccct

SEQ ID NO: 68521 - RNA, 21 nt, synthetic construct
  source 1..21: mol_type = other RNA
agaaatgacaagtaaatgcaa

SEQ ID NO: 68522 - RNA, 21 nt, synthetic construct
  source 1..21: mol_type = other RNA
agaaatgagttccagtccttt

SEQ ID NO: 68523 - RNA, 21 nt, synthetic construct
  source 1..21: mol_type = other RNA
agaaatgtctggtttgctttg

SEQ ID NO: 68524 - RNA, 21 nt, synthetic construct
  source 1..21: mol_type = other RNA
agaaatgtggaagcagaacta

SEQ ID NO: 68525 - RNA, 21 nt, synthetic construct
  source 1..21: mol_type = other RNA
agaaatgtggagataaagagc

SEQ ID NO: 68526 - RNA, 21 nt, synthetic construct
  source 1..21: mol_type = other RNA
agaaatgttaacaattggtga

SEQ ID NO: 68527 - RNA, 21 nt, synthetic construct
  source 1..21: mol_type = other RNA
agaaattagaacatctggcag

SEQ ID NO: 68528 - RNA, 21 nt, synthetic construct
  source 1..21: mol_type = other RNA
agaaattataagcttcctctg

SEQ ID NO: 68529 - RNA, 21 nt, synthetic construct
  source 1..21: mol_type = other RNA
agaaattatctgtgggttaaa

SEQ ID NO: 68530 - RNA, 21 nt, synthetic construct
  source 1..21: mol_type = other RNA
agaaattggaacctttgtcca

SEQ ID NO: 68531 - RNA, 21 nt, synthetic construct
  source 1..21: mol_type = other RNA
agaaattggacgggtggtagg

SEQ ID NO: 68532 - RNA, 21 nt, synthetic construct
  source 1..21: mol_type = other RNA
agaaatttaaggaccaggtat

SEQ ID NO: 68533 - RNA, 21 nt, synthetic construct
  source 1..21: mol_type = other RNA
agaacaaactcaagttccggt

SEQ ID NO: 68534 - RNA, 21 nt, synthetic construct
  source 1..21: mol_type = other RNA
agaacaaactgcgtggtttat

SEQ ID NO: 68535 - RNA, 21 nt, synthetic construct
  source 1..21: mol_type = other RNA
agaacaaataacaccatagct

SEQ ID NO: 68536 - RNA, 21 nt, synthetic construct
  source 1..21: mol_type = other RNA
agaacaacatggtagaccata

SEQ ID NO: 68537 - RNA, 21 nt, synthetic construct
  source 1..21: mol_type = other RNA
agaacaatggaatagaaggga

SEQ ID NO: 68538 - RNA, 21 nt, synthetic construct
  source 1..21: mol_type = other RNA
agaacaattttgaatgtgttg

SEQ ID NO: 68539 - RNA, 21 nt, synthetic construct
  source 1..21: mol_type = other RNA
agaacacacaatttgaggtag

SEQ ID NO: 68540 - RNA, 21 nt, synthetic construct
  source 1..21: mol_type = other RNA
agaacacactgctcttctatt

SEQ ID NO: 68541 - RNA, 21 nt, synthetic construct
  source 1..21: mol_type = other RNA
agaacacagtgttgagaaagc

SEQ ID NO: 68542 - RNA, 21 nt, synthetic construct
  source 1..21: mol_type = other RNA
agaacactaaaggggatttca

SEQ ID NO: 68543 - RNA, 21 nt, synthetic construct
  source 1..21: mol_type = other RNA
agaacactataagccaatatc

SEQ ID NO: 68544 - RNA, 21 nt, synthetic construct
  source 1..21: mol_type = other RNA
agaacacttaacatgagatct

SEQ ID NO: 68545 - RNA, 21 nt, synthetic construct
  source 1..21: mol_type = other RNA
agaacagaataaaaagtgact

SEQ ID NO: 68546 - RNA, 21 nt, synthetic construct
  source 1..21: mol_type = other RNA
agaacaggaagggagagatgc

SEQ ID NO: 68547 - RNA, 21 nt, synthetic construct
  source 1..21: mol_type = other RNA
agaacaggacttttggtacac

SEQ ID NO: 68548 - RNA, 21 nt, synthetic construct
  source 1..21: mol_type = other RNA
agaacaggagttaccataaaa

SEQ ID NO: 68549 - RNA, 21 nt, synthetic construct
  source 1..21: mol_type = other RNA
agaacagtaaagtcactgtgg

SEQ ID NO: 68550 - RNA, 21 nt, synthetic construct
  source 1..21: mol_type = other RNA
agaacagtgtttacacacctg

SEQ ID NO: 68551 - RNA, 21 nt, synthetic construct
  source 1..21: mol_type = other RNA
agaacatataatccaactgca

SEQ ID NO: 68552 - RNA, 21 nt, synthetic construct
  source 1..21: mol_type = other RNA
agaacatctggcagcaggggc

SEQ ID NO: 68553 - RNA, 21 nt, synthetic construct
  source 1..21: mol_type = other RNA
agaacatgattgggtcaacaa

SEQ ID NO: 68554 - RNA, 21 nt, synthetic construct
  source 1..21: mol_type = other RNA
agaacattggtttgaaatgat

SEQ ID NO: 68555 - RNA, 21 nt, synthetic construct
  source 1..21: mol_type = other RNA
agaaccacctgggggagactg

SEQ ID NO: 68556 - RNA, 21 nt, synthetic construct
  source 1..21: mol_type = other RNA
agaaccactgagcacaatgcc

SEQ ID NO: 68557 - RNA, 21 nt, synthetic construct
  source 1..21: mol_type = other RNA
agaaccatacagtgccttcag

SEQ ID NO: 68558 - RNA, 21 nt, synthetic construct
  source 1..21: mol_type = other RNA
agaaccatgtaacaggtttaa

SEQ ID NO: 68559 - RNA, 21 nt, synthetic construct
  source 1..21: mol_type = other RNA
agaacccaggaacagattcac

SEQ ID NO: 68560 - RNA, 21 nt, synthetic construct
  source 1..21: mol_type = other RNA
agaacccagtgtctgctacag

SEQ ID NO: 68561 - RNA, 21 nt, synthetic construct
  source 1..21: mol_type = other RNA
agaaccctttgttatctgaac

SEQ ID NO: 68562 - RNA, 21 nt, synthetic construct
  source 1..21: mol_type = other RNA
agaaccgactgaaaggaaatg

SEQ ID NO: 68563 - RNA, 21 nt, synthetic construct
  source 1..21: mol_type = other RNA
agaaccggaacttgagtttgt

SEQ ID NO: 68564 - RNA, 21 nt, synthetic construct
  source 1..21: mol_type = other RNA
agaacctctggaaaggacttg

SEQ ID NO: 68565 - RNA, 21 nt, synthetic construct
  source 1..21: mol_type = other RNA
agaacctgttcatttgagaat

SEQ ID NO: 68566 - RNA, 21 nt, synthetic construct
  source 1..21: mol_type = other RNA
agaaccttagaaatttaagga

SEQ ID NO: 68567 - RNA, 21 nt, synthetic construct
  source 1..21: mol_type = other RNA
agaaccttcatactattttct

SEQ ID NO: 68568 - RNA, 21 nt, synthetic construct
  source 1..21: mol_type = other RNA
agaactaagaccccagtagaa

SEQ ID NO: 68569 - RNA, 21 nt, synthetic construct
  source 1..21: mol_type = other RNA
agaactacacattccagacca

SEQ ID NO: 68570 - RNA, 21 nt, synthetic construct
  source 1..21: mol_type = other RNA
agaactagaactgtgttacat

SEQ ID NO: 68571 - RNA, 21 nt, synthetic construct
  source 1..21: mol_type = other RNA
agaactagaatactccaccag

SEQ ID NO: 68572 - RNA, 21 nt, synthetic construct
  source 1..21: mol_type = other RNA
agaactccaacaattcaacaa

SEQ ID NO: 68573 - RNA, 21 nt, synthetic construct
  source 1..21: mol_type = other RNA
agaactccacctcagaaacaa

SEQ ID NO: 68574 - RNA, 21 nt, synthetic construct
  source 1..21: mol_type = other RNA
agaactcctggtctcccagca

SEQ ID NO: 68575 - RNA, 21 nt, synthetic construct
  source 1..21: mol_type = other RNA
agaactcgaagccttcccctg

SEQ ID NO: 68576 - RNA, 21 nt, synthetic construct
  source 1..21: mol_type = other RNA
agaactcttctccaaggaaag

SEQ ID NO: 68577 - RNA, 21 nt, synthetic construct
  source 1..21: mol_type = other RNA
agaactgaaagcagggactcc

SEQ ID NO: 68578 - RNA, 21 nt, synthetic construct
  source 1..21: mol_type = other RNA
agaactgactgaaggattcct

SEQ ID NO: 68579 - RNA, 21 nt, synthetic construct
  source 1..21: mol_type = other RNA
agaactgcctggacccgggag

SEQ ID NO: 68580 - RNA, 21 nt, synthetic construct
  source 1..21: mol_type = other RNA
agaactgctaatggtccttgc

SEQ ID NO: 68581 - RNA, 21 nt, synthetic construct
  source 1..21: mol_type = other RNA
agaactggggcttgaacccga

SEQ ID NO: 68582 - RNA, 21 nt, synthetic construct
  source 1..21: mol_type = other RNA
agaactgtcacaattcacaga

SEQ ID NO: 68583 - RNA, 21 nt, synthetic construct
  source 1..21: mol_type = other RNA
agaactgtcactgacacaggc

SEQ ID NO: 68584 - RNA, 21 nt, synthetic construct
  source 1..21: mol_type = other RNA
agaactgtgttacattgcctt

SEQ ID NO: 68585 - RNA, 21 nt, synthetic construct
  source 1..21: mol_type = other RNA
agaacttaaaggtttggagtt

SEQ ID NO: 68586 - RNA, 21 nt, synthetic construct
  source 1..21: mol_type = other RNA
agaacttatgcatcttgcaaa

SEQ ID NO: 68587 - RNA, 21 nt, synthetic construct
  source 1..21: mol_type = other RNA
agaacttcttcaaaagacatc

SEQ ID NO: 68588 - RNA, 21 nt, synthetic construct
  source 1..21: mol_type = other RNA
agaacttgacaagtatattac

SEQ ID NO: 68589 - RNA, 21 nt, synthetic construct
  source 1..21: mol_type = other RNA
agaacttgtctcggatttaag

SEQ ID NO: 68590 - RNA, 21 nt, synthetic construct
  source 1..21: mol_type = other RNA
agaacttgtctttgtctattc

SEQ ID NO: 68591 - RNA, 21 nt, synthetic construct
  source 1..21: mol_type = other RNA
agaagaaaaagcaacttgaag

SEQ ID NO: 68592 - RNA, 21 nt, synthetic construct
  source 1..21: mol_type = other RNA
agaagaaataaacgacaccag

SEQ ID NO: 68593 - RNA, 21 nt, synthetic construct
  source 1..21: mol_type = other RNA
agaagaaatcaaatgggaaat

SEQ ID NO: 68594 - RNA, 21 nt, synthetic construct
  source 1..21: mol_type = other RNA
agaagaaatgggtaaatttct

SEQ ID NO: 68595 - RNA, 21 nt, synthetic construct
  source 1..21: mol_type = other RNA
agaagaaatgttaacaattgg

SEQ ID NO: 68596 - RNA, 21 nt, synthetic construct
  source 1..21: mol_type = other RNA
agaagaaattacttctttctc

SEQ ID NO: 68597 - RNA, 21 nt, synthetic construct
  source 1..21: mol_type = other RNA
agaagaagaattctataggta

SEQ ID NO: 68598 - RNA, 21 nt, synthetic construct
  source 1..21: mol_type = other RNA
agaagaagacttaggagaaaa

SEQ ID NO: 68599 - RNA, 21 nt, synthetic construct
  source 1..21: mol_type = other RNA
agaagaatgagaaacatacat

SEQ ID NO: 68600 - RNA, 21 nt, synthetic construct
  source 1..21: mol_type = other RNA
agaagaatgattatttgcggc

SEQ ID NO: 68601 - RNA, 21 nt, synthetic construct
  source 1..21: mol_type = other RNA
agaagaattctataggtagta

SEQ ID NO: 68602 - RNA, 21 nt, synthetic construct
  source 1..21: mol_type = other RNA
agaagacaatactgttatgac

SEQ ID NO: 68603 - RNA, 21 nt, synthetic construct
  source 1..21: mol_type = other RNA
agaagacacaaaatcagatat

SEQ ID NO: 68604 - RNA, 21 nt, synthetic construct
  source 1..21: mol_type = other RNA
agaagacatgataaatacgta

SEQ ID NO: 68605 - RNA, 21 nt, synthetic construct
  source 1..21: mol_type = other RNA
agaagacctcaaattctgagg

SEQ ID NO: 68606 - RNA, 21 nt, synthetic construct
  source 1..21: mol_type = other RNA
agaagactaagcagaaatgac

SEQ ID NO: 68607 - RNA, 21 nt, synthetic construct
  source 1..21: mol_type = other RNA
agaagactcagcagttttaaa

SEQ ID NO: 68608 - RNA, 21 nt, synthetic construct
  source 1..21: mol_type = other RNA
agaagactggaaaagtgttga

SEQ ID NO: 68609 - RNA, 21 nt, synthetic construct
  source 1..21: mol_type = other RNA
agaagacttaggagaaaagct

SEQ ID NO: 68610 - RNA, 21 nt, synthetic construct
  source 1..21: mol_type = other RNA
agaagagaatggctggaatgg

SEQ ID NO: 68611 - RNA, 21 nt, synthetic construct
  source 1..21: mol_type = other RNA
agaagagcactatgtaaatta

SEQ ID NO: 68612 - RNA, 21 nt, synthetic construct
  source 1..21: mol_type = other RNA
agaagagcagtgtgttctgcc

SEQ ID NO: 68613 - RNA, 21 nt, synthetic construct
  source 1..21: mol_type = other RNA
agaagagctgtaacagaggca

SEQ ID NO: 68614 - RNA, 21 nt, synthetic construct
  source 1..21: mol_type = other RNA
agaagaggataaggggcaggg

SEQ ID NO: 68615 - RNA, 21 nt, synthetic construct
  source 1..21: mol_type = other RNA
agaagagggggcataacatct

SEQ ID NO: 68616 - RNA, 21 nt, synthetic construct
  source 1..21: mol_type = other RNA
agaagagtaatggttggccga

SEQ ID NO: 68617 - RNA, 21 nt, synthetic construct
  source 1..21: mol_type = other RNA
agaagagtgaagctggaccct

SEQ ID NO: 68618 - RNA, 21 nt, synthetic construct
  source 1..21: mol_type = other RNA
agaagagttctgaaggctcag

SEQ ID NO: 68619 - RNA, 21 nt, synthetic construct
  source 1..21: mol_type = other RNA
agaagatgacatttgcttttc

SEQ ID NO: 68620 - RNA, 21 nt, synthetic construct
  source 1..21: mol_type = other RNA
agaagatgcagttgcttactc

SEQ ID NO: 68621 - RNA, 21 nt, synthetic construct
  source 1..21: mol_type = other RNA
agaagatggttggaagtttct

SEQ ID NO: 68622 - RNA, 21 nt, synthetic construct
  source 1..21: mol_type = other RNA
agaagattgagtcagtaatca

SEQ ID NO: 68623 - RNA, 21 nt, synthetic construct
  source 1..21: mol_type = other RNA
agaagcacaccaaggtttctc

SEQ ID NO: 68624 - RNA, 21 nt, synthetic construct
  source 1..21: mol_type = other RNA
agaagcactttttaccaagtt

SEQ ID NO: 68625 - RNA, 21 nt, synthetic construct
  source 1..21: mol_type = other RNA
agaagcagaaaatcagtgtga

SEQ ID NO: 68626 - RNA, 21 nt, synthetic construct
  source 1..21: mol_type = other RNA
agaagcagcaagggtggctgg

SEQ ID NO: 68627 - RNA, 21 nt, synthetic construct
  source 1..21: mol_type = other RNA
agaagcatctgatacacttct

SEQ ID NO: 68628 - RNA, 21 nt, synthetic construct
  source 1..21: mol_type = other RNA
agaagccacacagtacaaggc

SEQ ID NO: 68629 - RNA, 21 nt, synthetic construct
  source 1..21: mol_type = other RNA
agaagccctgcagccagattt

SEQ ID NO: 68630 - RNA, 21 nt, synthetic construct
  source 1..21: mol_type = other RNA
agaagcgctcttcaagcattg

SEQ ID NO: 68631 - RNA, 21 nt, synthetic construct
  source 1..21: mol_type = other RNA
agaagctaaattttcatagga

SEQ ID NO: 68632 - RNA, 21 nt, synthetic construct
  source 1..21: mol_type = other RNA
agaagctatagctgagaagta

SEQ ID NO: 68633 - RNA, 21 nt, synthetic construct
  source 1..21: mol_type = other RNA
agaagctgttttggtaaaatg

SEQ ID NO: 68634 - RNA, 21 nt, synthetic construct
  source 1..21: mol_type = other RNA
agaagctttcagacttaacta

SEQ ID NO: 68635 - RNA, 21 nt, synthetic construct
  source 1..21: mol_type = other RNA
agaaggaaaaaacacctaaag

SEQ ID NO: 68636 - RNA, 21 nt, synthetic construct
  source 1..21: mol_type = other RNA
agaaggaaaagaacacagtgt

SEQ ID NO: 68637 - RNA, 21 nt, synthetic construct
  source 1..21: mol_type = other RNA
agaaggaagcaccaacccttg

SEQ ID NO: 68638 - RNA, 21 nt, synthetic construct
  source 1..21: mol_type = other RNA
agaaggaatgtgcactctttt

SEQ ID NO: 68639 - RNA, 21 nt, synthetic construct
  source 1..21: mol_type = other RNA
agaaggacagcttccacccaa

SEQ ID NO: 68640 - RNA, 21 nt, synthetic construct
  source 1..21: mol_type = other RNA
agaaggagaaaacaaaaagaa

SEQ ID NO: 68641 - RNA, 21 nt, synthetic construct
  source 1..21: mol_type = other RNA
agaaggagaaaccatttaccc

SEQ ID NO: 68642 - RNA, 21 nt, synthetic construct
  source 1..21: mol_type = other RNA
agaaggaggaaaataatttgc

SEQ ID NO: 68643 - RNA, 21 nt, synthetic construct
  source 1..21: mol_type = other RNA
agaaggagtccagtcctgcta

SEQ ID NO: 68644 - RNA, 21 nt, synthetic construct
  source 1..21: mol_type = other RNA
agaaggatatgttttctaaac

SEQ ID NO: 68645 - RNA, 21 nt, synthetic construct
  source 1..21: mol_type = other RNA
agaaggattgttcatgtctgt

SEQ ID NO: 68646 - RNA, 21 nt, synthetic construct
  source 1..21: mol_type = other RNA
agaaggccagagggaatctag

SEQ ID NO: 68647 - RNA, 21 nt, synthetic construct
  source 1..21: mol_type = other RNA
agaaggccatttgattgccag

SEQ ID NO: 68648 - RNA, 21 nt, synthetic construct
  source 1..21: mol_type = other RNA
agaaggccctatgccttcagt

SEQ ID NO: 68649 - RNA, 21 nt, synthetic construct
  source 1..21: mol_type = other RNA
agaaggccgtccctattttct

SEQ ID NO: 68650 - RNA, 21 nt, synthetic construct
  source 1..21: mol_type = other RNA
agaaggccttccacggaatgc

SEQ ID NO: 68651 - RNA, 21 nt, synthetic construct
  source 1..21: mol_type = other RNA
agaaggcgaaatgtgaacaga

SEQ ID NO: 68652 - RNA, 21 nt, synthetic construct
  source 1..21: mol_type = other RNA
agaaggctagcacagaggcaa

SEQ ID NO: 68653 - RNA, 21 nt, synthetic construct
  source 1..21: mol_type = other RNA
agaaggctgccagcaccagat

SEQ ID NO: 68654 - RNA, 21 nt, synthetic construct
  source 1..21: mol_type = other RNA
agaaggctttgtgttggtgtt

SEQ ID NO: 68655 - RNA, 21 nt, synthetic construct
  source 1..21: mol_type = other RNA
agaagggaaaggatgaccttg

SEQ ID NO: 68656 - RNA, 21 nt, synthetic construct
  source 1..21: mol_type = other RNA
agaagggaacactaagaagat

SEQ ID NO: 68657 - RNA, 21 nt, synthetic construct
  source 1..21: mol_type = other RNA
agaagggaagtaaagatcaag

SEQ ID NO: 68658 - RNA, 21 nt, synthetic construct
  source 1..21: mol_type = other RNA
agaagggagaacccaggaaca

SEQ ID NO: 68659 - RNA, 21 nt, synthetic construct
  source 1..21: mol_type = other RNA
agaaggtaagaatgtcaagct

SEQ ID NO: 68660 - RNA, 21 nt, synthetic construct
  source 1..21: mol_type = other RNA
agaaggtatcatcggaaatat

SEQ ID NO: 68661 - RNA, 21 nt, synthetic construct
  source 1..21: mol_type = other RNA
agaaggtcaatctaggaggtc

SEQ ID NO: 68662 - RNA, 21 nt, synthetic construct
  source 1..21: mol_type = other RNA
agaaggtgagggactgagcag

SEQ ID NO: 68663 - RNA, 21 nt, synthetic construct
  source 1..21: mol_type = other RNA
agaaggttaactaatagccag

SEQ ID NO: 68664 - RNA, 21 nt, synthetic construct
  source 1..21: mol_type = other RNA
agaaggtttgtagagcaagca

SEQ ID NO: 68665 - RNA, 21 nt, synthetic construct
  source 1..21: mol_type = other RNA
agaagtaaatcccggccaggt

SEQ ID NO: 68666 - RNA, 21 nt, synthetic construct
  source 1..21: mol_type = other RNA
agaagtaacattacaacagca

SEQ ID NO: 68667 - RNA, 21 nt, synthetic construct
  source 1..21: mol_type = other RNA
agaagtaactcttgagttagg

SEQ ID NO: 68668 - RNA, 21 nt, synthetic construct
  source 1..21: mol_type = other RNA
agaagtaatttcttctgaaga

SEQ ID NO: 68669 - RNA, 21 nt, synthetic construct
  source 1..21: mol_type = other RNA
agaagtacaaacattacagaa

SEQ ID NO: 68670 - RNA, 21 nt, synthetic construct
  source 1..21: mol_type = other RNA
agaagtatcccagatggggat

SEQ ID NO: 68671 - RNA, 21 nt, synthetic construct
  source 1..21: mol_type = other RNA
agaagtcaaagcctgtggagg

SEQ ID NO: 68672 - RNA, 21 nt, synthetic construct
  source 1..21: mol_type = other RNA
agaagtcactttttattctgt

SEQ ID NO: 68673 - RNA, 21 nt, synthetic construct
  source 1..21: mol_type = other RNA
agaagtcagactaagacacta

SEQ ID NO: 68674 - RNA, 21 nt, synthetic construct
  source 1..21: mol_type = other RNA
agaagtcccagttcaaggtgt

SEQ ID NO: 68675 - RNA, 21 nt, synthetic construct
  source 1..21: mol_type = other RNA
agaagtcttttcctaccctga

SEQ ID NO: 68676 - RNA, 21 nt, synthetic construct
  source 1..21: mol_type = other RNA
agaagtgaaaaatgacctaaa

SEQ ID NO: 68677 - RNA, 21 nt, synthetic construct
  source 1..21: mol_type = other RNA
agaagtgaaactgctggatca

SEQ ID NO: 68678 - RNA, 21 nt, synthetic construct
  source 1..21: mol_type = other RNA
agaagtgaagcttcaaaccac

SEQ ID NO: 68679 - RNA, 21 nt, synthetic construct
  source 1..21: mol_type = other RNA
agaagtgctgacttggcagca

SEQ ID NO: 68680 - RNA, 21 nt, synthetic construct
  source 1..21: mol_type = other RNA
agaagtgtatcagatgcttct

SEQ ID NO: 68681 - RNA, 21 nt, synthetic construct
  source 1..21: mol_type = other RNA
agaagtgttttgatagttgca

SEQ ID NO: 68682 - RNA, 21 nt, synthetic construct
  source 1..21: mol_type = other RNA
agaagttacggttccctgtag

SEQ ID NO: 68683 - RNA, 21 nt, synthetic construct
  source 1..21: mol_type = other RNA
agaagttgtggtgagccaaga

SEQ ID NO: 68684 - RNA, 21 nt, synthetic construct
  source 1..21: mol_type = other RNA
agaagtttggaaccagcctgg

SEQ ID NO: 68685 - RNA, 21 nt, synthetic construct
  source 1..21: mol_type = other RNA
agaagttttccaggaaaagca

SEQ ID NO: 68686 - RNA, 21 nt, synthetic construct
  source 1..21: mol_type = other RNA
agaataaaaagtgacttctgg

SEQ ID NO: 68687 - RNA, 21 nt, synthetic construct
  source 1..21: mol_type = other RNA
agaataaaattcaccaaacac

SEQ ID NO: 68688 - RNA, 21 nt, synthetic construct
  source 1..21: mol_type = other RNA
agaataactgtcctgaattct

SEQ ID NO: 68689 - RNA, 21 nt, synthetic construct
  source 1..21: mol_type = other RNA
agaataagctaatcccaaagt

SEQ ID NO: 68690 - RNA, 21 nt, synthetic construct
  source 1..21: mol_type = other RNA
agaataatacacttttcaggt

SEQ ID NO: 68691 - RNA, 21 nt, synthetic construct
  source 1..21: mol_type = other RNA
agaatacaaaaatgacacaac

SEQ ID NO: 68692 - RNA, 21 nt, synthetic construct
  source 1..21: mol_type = other RNA
agaataccaaattcacgagac

SEQ ID NO: 68693 - RNA, 21 nt, synthetic construct
  source 1..21: mol_type = other RNA
agaataccacttagtttgcaa

SEQ ID NO: 68694 - RNA, 21 nt, synthetic construct
  source 1..21: mol_type = other RNA
agaataccagagattgggaaa

SEQ ID NO: 68695 - RNA, 21 nt, synthetic construct
  source 1..21: mol_type = other RNA
agaatactccaccagcatctt

SEQ ID NO: 68696 - RNA, 21 nt, synthetic construct
  source 1..21: mol_type = other RNA
agaatagcagaaacacaggac

SEQ ID NO: 68697 - RNA, 21 nt, synthetic construct
  source 1..21: mol_type = other RNA
agaataggcaaattcatagat

SEQ ID NO: 68698 - RNA, 21 nt, synthetic construct
  source 1..21: mol_type = other RNA
agaatatccaagcacaaacct

SEQ ID NO: 68699 - RNA, 21 nt, synthetic construct
  source 1..21: mol_type = other RNA
agaatcaggtctctttgaaag

SEQ ID NO: 68700 - RNA, 21 nt, synthetic construct
  source 1..21: mol_type = other RNA
agaatcatccggggagctttt

SEQ ID NO: 68701 - RNA, 21 nt, synthetic construct
  source 1..21: mol_type = other RNA
agaatccccaaataacatgca

SEQ ID NO: 68702 - RNA, 21 nt, synthetic construct
  source 1..21: mol_type = other RNA
agaatccctttcgctaatctc

SEQ ID NO: 68703 - RNA, 21 nt, synthetic construct
  source 1..21: mol_type = other RNA
agaatcctgctattttattag

SEQ ID NO: 68704 - RNA, 21 nt, synthetic construct
  source 1..21: mol_type = other RNA
agaatcgtgatagtcttccaa

SEQ ID NO: 68705 - RNA, 21 nt, synthetic construct
  source 1..21: mol_type = other RNA
agaatctgggaggtggaggtt

SEQ ID NO: 68706 - RNA, 21 nt, synthetic construct
  source 1..21: mol_type = other RNA
agaatcttaaaataccagagg

SEQ ID NO: 68707 - RNA, 21 nt, synthetic construct
  source 1..21: mol_type = other RNA
agaatcttactggtgttaggc

SEQ ID NO: 68708 - RNA, 21 nt, synthetic construct
  source 1..21: mol_type = other RNA
agaatctttggcaaacttaga

SEQ ID NO: 68709 - RNA, 21 nt, synthetic construct
  source 1..21: mol_type = other RNA
agaatgaaaatttttgtctgg

SEQ ID NO: 68710 - RNA, 21 nt, synthetic construct
  source 1..21: mol_type = other RNA
agaatgaagtcagagattttc

SEQ ID NO: 68711 - RNA, 21 nt, synthetic construct
  source 1..21: mol_type = other RNA
agaatgacagaaaatatctac

SEQ ID NO: 68712 - RNA, 21 nt, synthetic construct
  source 1..21: mol_type = other RNA
agaatgaccgagatacttaag

SEQ ID NO: 68713 - RNA, 21 nt, synthetic construct
  source 1..21: mol_type = other RNA
agaatgagaaacatacatgtt

SEQ ID NO: 68714 - RNA, 21 nt, synthetic construct
  source 1..21: mol_type = other RNA
agaatgattatttgcggcttg

SEQ ID NO: 68715 - RNA, 21 nt, synthetic construct
  source 1..21: mol_type = other RNA
agaatgcatccctcctctggc

SEQ ID NO: 68716 - RNA, 21 nt, synthetic construct
  source 1..21: mol_type = other RNA
agaatgcatcttttaaaaacc

SEQ ID NO: 68717 - RNA, 21 nt, synthetic construct
  source 1..21: mol_type = other RNA
agaatggaaacttgccatctt

SEQ ID NO: 68718 - RNA, 21 nt, synthetic construct
  source 1..21: mol_type = other RNA
agaatggcaaggctaacagcc

SEQ ID NO: 68719 - RNA, 21 nt, synthetic construct
  source 1..21: mol_type = other RNA
agaatggcatgaacccaccag

SEQ ID NO: 68720 - RNA, 21 nt, synthetic construct
  source 1..21: mol_type = other RNA
agaatggccctgcgattggtt

SEQ ID NO: 68721 - RNA, 21 nt, synthetic construct
  source 1..21: mol_type = other RNA
agaatggctggaatggtgaag

SEQ ID NO: 68722 - RNA, 21 nt, synthetic construct
  source 1..21: mol_type = other RNA
agaatggtttaacacatacaa

SEQ ID NO: 68723 - RNA, 21 nt, synthetic construct
  source 1..21: mol_type = other RNA
agaatgtcaagctgtttgagc

SEQ ID NO: 68724 - RNA, 21 nt, synthetic construct
  source 1..21: mol_type = other RNA
agaatgtccatcaggaaaacc

SEQ ID NO: 68725 - RNA, 21 nt, synthetic construct
  source 1..21: mol_type = other RNA
agaatgtgacctgtccttgtg

SEQ ID NO: 68726 - RNA, 21 nt, synthetic construct
  source 1..21: mol_type = other RNA
agaatgtgacttcgtcaaggg

SEQ ID NO: 68727 - RNA, 21 nt, synthetic construct
  source 1..21: mol_type = other RNA
agaatgttcaagtatttccac

SEQ ID NO: 68728 - RNA, 21 nt, synthetic construct
  source 1..21: mol_type = other RNA
agaatgtttttccgtctagcc

SEQ ID NO: 68729 - RNA, 21 nt, synthetic construct
  source 1..21: mol_type = other RNA
agaattaaaaacattggagga

SEQ ID NO: 68730 - RNA, 21 nt, synthetic construct
  source 1..21: mol_type = other RNA
agaattaaactcattatccca

SEQ ID NO: 68731 - RNA, 21 nt, synthetic construct
  source 1..21: mol_type = other RNA
agaattaacactaatccttct

SEQ ID NO: 68732 - RNA, 21 nt, synthetic construct
  source 1..21: mol_type = other RNA
agaattacaggcatgagtcgc

SEQ ID NO: 68733 - RNA, 21 nt, synthetic construct
  source 1..21: mol_type = other RNA
agaattactgacaatagccaa

SEQ ID NO: 68734 - RNA, 21 nt, synthetic construct
  source 1..21: mol_type = other RNA
agaattagaaagctggactca

SEQ ID NO: 68735 - RNA, 21 nt, synthetic construct
  source 1..21: mol_type = other RNA
agaattatagagggcctaaat

SEQ ID NO: 68736 - RNA, 21 nt, synthetic construct
  source 1..21: mol_type = other RNA
agaattattgattggcaaatc

SEQ ID NO: 68737 - RNA, 21 nt, synthetic construct
  source 1..21: mol_type = other RNA
agaattattgtctgcaagcag

SEQ ID NO: 68738 - RNA, 21 nt, synthetic construct
  source 1..21: mol_type = other RNA
agaattcactgtgactccaaa

SEQ ID NO: 68739 - RNA, 21 nt, synthetic construct
  source 1..21: mol_type = other RNA
agaattcagagtggctaatgt

SEQ ID NO: 68740 - RNA, 21 nt, synthetic construct
  source 1..21: mol_type = other RNA
agaattcaggacagtcatcct

SEQ ID NO: 68741 - RNA, 21 nt, synthetic construct
  source 1..21: mol_type = other RNA
agaattcaggacagttattct

SEQ ID NO: 68742 - RNA, 21 nt, synthetic construct
  source 1..21: mol_type = other RNA
agaattcattgttgtgtgtta

SEQ ID NO: 68743 - RNA, 21 nt, synthetic construct
  source 1..21: mol_type = other RNA
agaattccatcagtggttgtg

SEQ ID NO: 68744 - RNA, 21 nt, synthetic construct
  source 1..21: mol_type = other RNA
agaattccattccttttcgag

SEQ ID NO: 68745 - RNA, 21 nt, synthetic construct
  source 1..21: mol_type = other RNA
agaattcgttaatacttgtgt

SEQ ID NO: 68746 - RNA, 21 nt, synthetic construct
  source 1..21: mol_type = other RNA
agaattctataggtagtacat

SEQ ID NO: 68747 - RNA, 21 nt, synthetic construct
  source 1..21: mol_type = other RNA
agaattctctctcaactggcc

SEQ ID NO: 68748 - RNA, 21 nt, synthetic construct
  source 1..21: mol_type = other RNA
agaattgactttaccctgctg

SEQ ID NO: 68749 - RNA, 21 nt, synthetic construct
  source 1..21: mol_type = other RNA
agaattggtagtcaatgcaat

SEQ ID NO: 68750 - RNA, 21 nt, synthetic construct
  source 1..21: mol_type = other RNA
agaatttcagaaagagaatag

SEQ ID NO: 68751 - RNA, 21 nt, synthetic construct
  source 1..21: mol_type = other RNA
agaatttcaggtgtgtaaaca

SEQ ID NO: 68752 - RNA, 21 nt, synthetic construct
  source 1..21: mol_type = other RNA
agaatttcatgcctttcagca

SEQ ID NO: 68753 - RNA, 21 nt, synthetic construct
  source 1..21: mol_type = other RNA
agaatttgaggtcttctagct

SEQ ID NO: 68754 - RNA, 21 nt, synthetic construct
  source 1..21: mol_type = other RNA
agaattttaagcctagagatt

SEQ ID NO: 68755 - RNA, 21 nt, synthetic construct
  source 1..21: mol_type = other RNA
agaattttgcttttgctttgg

SEQ ID NO: 68756 - RNA, 21 nt, synthetic construct
  source 1..21: mol_type = other RNA
agacaaaaatagaggatgggc

SEQ ID NO: 68757 - RNA, 21 nt, synthetic construct
  source 1..21: mol_type = other RNA
agacaaagacaagttcttacc

SEQ ID NO: 68758 - RNA, 21 nt, synthetic construct
  source 1..21: mol_type = other RNA
agacaaagcataaaatatgtg

SEQ ID NO: 68759 - RNA, 21 nt, synthetic construct
  source 1..21: mol_type = other RNA
agacaaaggttgcagtgagca

SEQ ID NO: 68760 - RNA, 21 nt, synthetic construct
  source 1..21: mol_type = other RNA
agacaacacattaataagatc

SEQ ID NO: 68761 - RNA, 21 nt, synthetic construct
  source 1..21: mol_type = other RNA
agacaagcaaggaagggcttg

SEQ ID NO: 68762 - RNA, 21 nt, synthetic construct
  source 1..21: mol_type = other RNA
agacaagcacaggcatctctc

SEQ ID NO: 68763 - RNA, 21 nt, synthetic construct
  source 1..21: mol_type = other RNA
agacaagtactgcatgattcc

SEQ ID NO: 68764 - RNA, 21 nt, synthetic construct
  source 1..21: mol_type = other RNA
agacaagttctcctgtgtgca

SEQ ID NO: 68765 - RNA, 21 nt, synthetic construct
  source 1..21: mol_type = other RNA
agacaagttcttacctcaaag

SEQ ID NO: 68766 - RNA, 21 nt, synthetic construct
  source 1..21: mol_type = other RNA
agacaataattcttcctgtct

SEQ ID NO: 68767 - RNA, 21 nt, synthetic construct
  source 1..21: mol_type = other RNA
agacaatactgttatgacaag

SEQ ID NO: 68768 - RNA, 21 nt, synthetic construct
  source 1..21: mol_type = other RNA
agacaatagctagtgtcttag

SEQ ID NO: 68769 - RNA, 21 nt, synthetic construct
  source 1..21: mol_type = other RNA
agacaatgtctttggctctta

SEQ ID NO: 68770 - RNA, 21 nt, synthetic construct
  source 1..21: mol_type = other RNA
agacaatgtggagttggtgca

SEQ ID NO: 68771 - RNA, 21 nt, synthetic construct
  source 1..21: mol_type = other RNA
agacacaaaagagctgggccc

SEQ ID NO: 68772 - RNA, 21 nt, synthetic construct
  source 1..21: mol_type = other RNA
agacacaaaatcagatatgaa

SEQ ID NO: 68773 - RNA, 21 nt, synthetic construct
  source 1..21: mol_type = other RNA
agacacaaggaaggtcaaatg

SEQ ID NO: 68774 - RNA, 21 nt, synthetic construct
  source 1..21: mol_type = other RNA
agacacacatcagacacctac

SEQ ID NO: 68775 - RNA, 21 nt, synthetic construct
  source 1..21: mol_type = other RNA
agacacaccatgacagagttc

SEQ ID NO: 68776 - RNA, 21 nt, synthetic construct
  source 1..21: mol_type = other RNA
agacacacgagtattcaagtt

SEQ ID NO: 68777 - RNA, 21 nt, synthetic construct
  source 1..21: mol_type = other RNA
agacacactagctgacccact

SEQ ID NO: 68778 - RNA, 21 nt, synthetic construct
  source 1..21: mol_type = other RNA
agacacatactgaaagacaga

SEQ ID NO: 68779 - RNA, 21 nt, synthetic construct
  source 1..21: mol_type = other RNA
agacacatttttgacagccac

SEQ ID NO: 68780 - RNA, 21 nt, synthetic construct
  source 1..21: mol_type = other RNA
agacaccgctccacgcccatt

SEQ ID NO: 68781 - RNA, 21 nt, synthetic construct
  source 1..21: mol_type = other RNA
agacacctacaatattaactt

SEQ ID NO: 68782 - RNA, 21 nt, synthetic construct
  source 1..21: mol_type = other RNA
agacacctacattaatctcat

SEQ ID NO: 68783 - RNA, 21 nt, synthetic construct
  source 1..21: mol_type = other RNA
agacacggtctcacactgttg

SEQ ID NO: 68784 - RNA, 21 nt, synthetic construct
  source 1..21: mol_type = other RNA
agacactaactttctattccc

SEQ ID NO: 68785 - RNA, 21 nt, synthetic construct
  source 1..21: mol_type = other RNA
agacactagctattgtctttt

SEQ ID NO: 68786 - RNA, 21 nt, synthetic construct
  source 1..21: mol_type = other RNA
agacactagggactggcctcg

SEQ ID NO: 68787 - RNA, 21 nt, synthetic construct
  source 1..21: mol_type = other RNA
agacactgggttctcaccaac

SEQ ID NO: 68788 - RNA, 21 nt, synthetic construct
  source 1..21: mol_type = other RNA
agacagaatcttactggtgtt

SEQ ID NO: 68789 - RNA, 21 nt, synthetic construct
  source 1..21: mol_type = other RNA
agacagacatgcatgcacaca

SEQ ID NO: 68790 - RNA, 21 nt, synthetic construct
  source 1..21: mol_type = other RNA
agacagacatttggaatagag

SEQ ID NO: 68791 - RNA, 21 nt, synthetic construct
  source 1..21: mol_type = other RNA
agacagaccctggcttgtgac

SEQ ID NO: 68792 - RNA, 21 nt, synthetic construct
  source 1..21: mol_type = other RNA
agacagacctctattaaatca

SEQ ID NO: 68793 - RNA, 21 nt, synthetic construct
  source 1..21: mol_type = other RNA
agacagagctagaactagaat

SEQ ID NO: 68794 - RNA, 21 nt, synthetic construct
  source 1..21: mol_type = other RNA
agacagagctccctctccctc

SEQ ID NO: 68795 - RNA, 21 nt, synthetic construct
  source 1..21: mol_type = other RNA
agacagatatatgcattccca

SEQ ID NO: 68796 - RNA, 21 nt, synthetic construct
  source 1..21: mol_type = other RNA
agacagatcttatggaatagt

SEQ ID NO: 68797 - RNA, 21 nt, synthetic construct
  source 1..21: mol_type = other RNA
agacagatgtgcttaatcttc

SEQ ID NO: 68798 - RNA, 21 nt, synthetic construct
  source 1..21: mol_type = other RNA
agacagattctctgtctctgt

SEQ ID NO: 68799 - RNA, 21 nt, synthetic construct
  source 1..21: mol_type = other RNA
agacagcatccccagaaagag

SEQ ID NO: 68800 - RNA, 21 nt, synthetic construct
  source 1..21: mol_type = other RNA
agacagcctaaaccattttca

SEQ ID NO: 68801 - RNA, 21 nt, synthetic construct
  source 1..21: mol_type = other RNA
agacagctaatatgctgtagt

SEQ ID NO: 68802 - RNA, 21 nt, synthetic construct
  source 1..21: mol_type = other RNA
agacagctactaaacaaatca

SEQ ID NO: 68803 - RNA, 21 nt, synthetic construct
  source 1..21: mol_type = other RNA
agacaggaagaattattgtct

SEQ ID NO: 68804 - RNA, 21 nt, synthetic construct
  source 1..21: mol_type = other RNA
agacaggatccagatgtagag

SEQ ID NO: 68805 - RNA, 21 nt, synthetic construct
  source 1..21: mol_type = other RNA
agacagggaatgcccctgtag

SEQ ID NO: 68806 - RNA, 21 nt, synthetic construct
  source 1..21: mol_type = other RNA
agacagggaatggggagctag

SEQ ID NO: 68807 - RNA, 21 nt, synthetic construct
  source 1..21: mol_type = other RNA
agacagggtctcactcttacc

SEQ ID NO: 68808 - RNA, 21 nt, synthetic construct
  source 1..21: mol_type = other RNA
agacaggtagacatgagtaaa

SEQ ID NO: 68809 - RNA, 21 nt, synthetic construct
  source 1..21: mol_type = other RNA
agacagtattgtgctgaaacc

SEQ ID NO: 68810 - RNA, 21 nt, synthetic construct
  source 1..21: mol_type = other RNA
agacagtgagcatgctgcaac

SEQ ID NO: 68811 - RNA, 21 nt, synthetic construct
  source 1..21: mol_type = other RNA
agacatcacaatgcgtttgtt

SEQ ID NO: 68812 - RNA, 21 nt, synthetic construct
  source 1..21: mol_type = other RNA
agacatcactaagagtgaaaa

SEQ ID NO: 68813 - RNA, 21 nt, synthetic construct
  source 1..21: mol_type = other RNA
agacatcctgatttaggccac

SEQ ID NO: 68814 - RNA, 21 nt, synthetic construct
  source 1..21: mol_type = other RNA
agacatctgagacatcacaat

SEQ ID NO: 68815 - RNA, 21 nt, synthetic construct
  source 1..21: mol_type = other RNA
agacatctttcctgtgattta

SEQ ID NO: 68816 - RNA, 21 nt, synthetic construct
  source 1..21: mol_type = other RNA
agacatgaacaatccttctaa

SEQ ID NO: 68817 - RNA, 21 nt, synthetic construct
  source 1..21: mol_type = other RNA
agacatgagtaaaaagaaatc

SEQ ID NO: 68818 - RNA, 21 nt, synthetic construct
  source 1..21: mol_type = other RNA
agacatgcacgagaaaagcac

SEQ ID NO: 68819 - RNA, 21 nt, synthetic construct
  source 1..21: mol_type = other RNA
agacatgcatgcacacagagg

SEQ ID NO: 68820 - RNA, 21 nt, synthetic construct
  source 1..21: mol_type = other RNA
agacatgccacaccacatcca

SEQ ID NO: 68821 - RNA, 21 nt, synthetic construct
  source 1..21: mol_type = other RNA
agacatgctgaggccccaggg

SEQ ID NO: 68822 - RNA, 21 nt, synthetic construct
  source 1..21: mol_type = other RNA
agacatgggctaaataaaaca

SEQ ID NO: 68823 - RNA, 21 nt, synthetic construct
  source 1..21: mol_type = other RNA
agacatgttaggttgaaagtt

SEQ ID NO: 68824 - RNA, 21 nt, synthetic construct
  source 1..21: mol_type = other RNA
agacattacaattgataccat

SEQ ID NO: 68825 - RNA, 21 nt, synthetic construct
  source 1..21: mol_type = other RNA
agacattattcttacagtgac

SEQ ID NO: 68826 - RNA, 21 nt, synthetic construct
  source 1..21: mol_type = other RNA
agacattgtcttacataggct

SEQ ID NO: 68827 - RNA, 21 nt, synthetic construct
  source 1..21: mol_type = other RNA
agacatttctcatactttgtc

SEQ ID NO: 68828 - RNA, 21 nt, synthetic construct
  source 1..21: mol_type = other RNA
agacatttgagggtgctgatc

SEQ ID NO: 68829 - RNA, 21 nt, synthetic construct
  source 1..21: mol_type = other RNA
agacatttggaatagagagcc

SEQ ID NO: 68830 - RNA, 21 nt, synthetic construct
  source 1..21: mol_type = other RNA
agacatttgggaatgtggtca

SEQ ID NO: 68831 - RNA, 21 nt, synthetic construct
  source 1..21: mol_type = other RNA
agaccaaaatggagacccata

SEQ ID NO: 68832 - RNA, 21 nt, synthetic construct
  source 1..21: mol_type = other RNA
agaccaagaaaggacttcagt

SEQ ID NO: 68833 - RNA, 21 nt, synthetic construct
  source 1..21: mol_type = other RNA
agaccaagaattttccattca

SEQ ID NO: 68834 - RNA, 21 nt, synthetic construct
  source 1..21: mol_type = other RNA
agaccaagagtgtggctttaa

SEQ ID NO: 68835 - RNA, 21 nt, synthetic construct
  source 1..21: mol_type = other RNA
agaccaagtttaaccaattat

SEQ ID NO: 68836 - RNA, 21 nt, synthetic construct
  source 1..21: mol_type = other RNA
agaccacaaggattaatcttt

SEQ ID NO: 68837 - RNA, 21 nt, synthetic construct
  source 1..21: mol_type = other RNA
agaccacagacgtgcagcacc

SEQ ID NO: 68838 - RNA, 21 nt, synthetic construct
  source 1..21: mol_type = other RNA
agaccacaggctctcttcacc

SEQ ID NO: 68839 - RNA, 21 nt, synthetic construct
  source 1..21: mol_type = other RNA
agaccaccacacttgcttggg

SEQ ID NO: 68840 - RNA, 21 nt, synthetic construct
  source 1..21: mol_type = other RNA
agaccagatgcgtggttcaca

SEQ ID NO: 68841 - RNA, 21 nt, synthetic construct
  source 1..21: mol_type = other RNA
agaccagcagttcaagcacca

SEQ ID NO: 68842 - RNA, 21 nt, synthetic construct
  source 1..21: mol_type = other RNA
agaccaggagttcttatgagg

SEQ ID NO: 68843 - RNA, 21 nt, synthetic construct
  source 1..21: mol_type = other RNA
agaccagttaggaagccactg

SEQ ID NO: 68844 - RNA, 21 nt, synthetic construct
  source 1..21: mol_type = other RNA
agaccatataatctaaccctc

SEQ ID NO: 68845 - RNA, 21 nt, synthetic construct
  source 1..21: mol_type = other RNA
agacccaaagcaaaagcaaaa

SEQ ID NO: 68846 - RNA, 21 nt, synthetic construct
  source 1..21: mol_type = other RNA
agacccagtggctagtgtgtt

SEQ ID NO: 68847 - RNA, 21 nt, synthetic construct
  source 1..21: mol_type = other RNA
agacccatactcagccccctc

SEQ ID NO: 68848 - RNA, 21 nt, synthetic construct
  source 1..21: mol_type = other RNA
agaccccagtagaaatcttcc

SEQ ID NO: 68849 - RNA, 21 nt, synthetic construct
  source 1..21: mol_type = other RNA
agaccccatctctaccaaaat

SEQ ID NO: 68850 - RNA, 21 nt, synthetic construct
  source 1..21: mol_type = other RNA
agacccctcaggtgtcactgg

SEQ ID NO: 68851 - RNA, 21 nt, synthetic construct
  source 1..21: mol_type = other RNA
agacccgccgcagagccggac

SEQ ID NO: 68852 - RNA, 21 nt, synthetic construct
  source 1..21: mol_type = other RNA
agaccctggcttgtgacatca

SEQ ID NO: 68853 - RNA, 21 nt, synthetic construct
  source 1..21: mol_type = other RNA
agaccctgtctctaaaaaata

SEQ ID NO: 68854 - RNA, 21 nt, synthetic construct
  source 1..21: mol_type = other RNA
agaccctgttagtcccctagt

SEQ ID NO: 68855 - RNA, 21 nt, synthetic construct
  source 1..21: mol_type = other RNA
agacccttatgtccagccccc

SEQ ID NO: 68856 - RNA, 21 nt, synthetic construct
  source 1..21: mol_type = other RNA
agaccctttatcggataagga

SEQ ID NO: 68857 - RNA, 21 nt, synthetic construct
  source 1..21: mol_type = other RNA
agaccgaggaaacccgctctg

SEQ ID NO: 68858 - RNA, 21 nt, synthetic construct
  source 1..21: mol_type = other RNA
agaccgcaagagttccaactg

SEQ ID NO: 68859 - RNA, 21 nt, synthetic construct
  source 1..21: mol_type = other RNA
agaccggatgaggtggctcac

SEQ ID NO: 68860 - RNA, 21 nt, synthetic construct
  source 1..21: mol_type = other RNA
agaccggggactgcaacagat

SEQ ID NO: 68861 - RNA, 21 nt, synthetic construct
  source 1..21: mol_type = other RNA
agaccgtggggggagggaggg

SEQ ID NO: 68862 - RNA, 21 nt, synthetic construct
  source 1..21: mol_type = other RNA
agacctaagcttaagagctaa

SEQ ID NO: 68863 - RNA, 21 nt, synthetic construct
  source 1..21: mol_type = other RNA
agacctactaaaagttgacaa

SEQ ID NO: 68864 - RNA, 21 nt, synthetic construct
  source 1..21: mol_type = other RNA
agacctcaaattaatcagtct

SEQ ID NO: 68865 - RNA, 21 nt, synthetic construct
  source 1..21: mol_type = other RNA
agacctcaaattctgagggaa

SEQ ID NO: 68866 - RNA, 21 nt, synthetic construct
  source 1..21: mol_type = other RNA
agacctcaggcagtctagtcc

SEQ ID NO: 68867 - RNA, 21 nt, synthetic construct
  source 1..21: mol_type = other RNA
agacctcaggtttagaatata

SEQ ID NO: 68868 - RNA, 21 nt, synthetic construct
  source 1..21: mol_type = other RNA
agacctcatctctgcaaaaca

SEQ ID NO: 68869 - RNA, 21 nt, synthetic construct
  source 1..21: mol_type = other RNA
agacctcatcttagccgggag

SEQ ID NO: 68870 - RNA, 21 nt, synthetic construct
  source 1..21: mol_type = other RNA
agacctcctagattgaccttc

SEQ ID NO: 68871 - RNA, 21 nt, synthetic construct
  source 1..21: mol_type = other RNA
agacctctattaaatcatgat

SEQ ID NO: 68872 - RNA, 21 nt, synthetic construct
  source 1..21: mol_type = other RNA
agacctctgaagagtctatct

SEQ ID NO: 68873 - RNA, 21 nt, synthetic construct
  source 1..21: mol_type = other RNA
agacctgaagactggatttga

SEQ ID NO: 68874 - RNA, 21 nt, synthetic construct
  source 1..21: mol_type = other RNA
agacctgaatgactgttgcct

SEQ ID NO: 68875 - RNA, 21 nt, synthetic construct
  source 1..21: mol_type = other RNA
agacctgattcttccactagt

SEQ ID NO: 68876 - RNA, 21 nt, synthetic construct
  source 1..21: mol_type = other RNA
agacctgcacaaaggattggg

SEQ ID NO: 68877 - RNA, 21 nt, synthetic construct
  source 1..21: mol_type = other RNA
agacctgcagtctgcaggcag

SEQ ID NO: 68878 - RNA, 21 nt, synthetic construct
  source 1..21: mol_type = other RNA
agaccttattcaaataattgc

SEQ ID NO: 68879 - RNA, 21 nt, synthetic construct
  source 1..21: mol_type = other RNA
agacctttcttaggtttctca

SEQ ID NO: 68880 - RNA, 21 nt, synthetic construct
  source 1..21: mol_type = other RNA
agacgatattcctatcagaag

SEQ ID NO: 68881 - RNA, 21 nt, synthetic construct
  source 1..21: mol_type = other RNA
agacgcaaaggatgtcaacaa

SEQ ID NO: 68882 - RNA, 21 nt, synthetic construct
  source 1..21: mol_type = other RNA
agacggaaaaacattctacag

SEQ ID NO: 68883 - RNA, 21 nt, synthetic construct
  source 1..21: mol_type = other RNA
agacggaagactcatacttcc

SEQ ID NO: 68884 - RNA, 21 nt, synthetic construct
  source 1..21: mol_type = other RNA
agacggaatcttaccctgttg

SEQ ID NO: 68885 - RNA, 21 nt, synthetic construct
  source 1..21: mol_type = other RNA
agacggcgagcttgatcttta

SEQ ID NO: 68886 - RNA, 21 nt, synthetic construct
  source 1..21: mol_type = other RNA
agacggcgtttcgccatgttg

SEQ ID NO: 68887 - RNA, 21 nt, synthetic construct
  source 1..21: mol_type = other RNA
agacgttcagataacaaaggg

SEQ ID NO: 68888 - RNA, 21 nt, synthetic construct
  source 1..21: mol_type = other RNA
agactaagaaaaacagaagac

SEQ ID NO: 68889 - RNA, 21 nt, synthetic construct
  source 1..21: mol_type = other RNA
agactaagacactagctattg

SEQ ID NO: 68890 - RNA, 21 nt, synthetic construct
  source 1..21: mol_type = other RNA
agactaagcagaaatgacaag

SEQ ID NO: 68891 - RNA, 21 nt, synthetic construct
  source 1..21: mol_type = other RNA
agactaatatgagttcctgct

SEQ ID NO: 68892 - RNA, 21 nt, synthetic construct
  source 1..21: mol_type = other RNA
agactacctaaaacaatctac

SEQ ID NO: 68893 - RNA, 21 nt, synthetic construct
  source 1..21: mol_type = other RNA
agactagtacactgttgattt

SEQ ID NO: 68894 - RNA, 21 nt, synthetic construct
  source 1..21: mol_type = other RNA
agactataaaactcttagctt

SEQ ID NO: 68895 - RNA, 21 nt, synthetic construct
  source 1..21: mol_type = other RNA
agactatcacgattctgaccc

SEQ ID NO: 68896 - RNA, 21 nt, synthetic construct
  source 1..21: mol_type = other RNA
agactatcgttatatcctcag

SEQ ID NO: 68897 - RNA, 21 nt, synthetic construct
  source 1..21: mol_type = other RNA
agactatctcttcctcctctg

SEQ ID NO: 68898 - RNA, 21 nt, synthetic construct
  source 1..21: mol_type = other RNA
agactatgagaaggattagtg

SEQ ID NO: 68899 - RNA, 21 nt, synthetic construct
  source 1..21: mol_type = other RNA
agactattatgagcagttgta

SEQ ID NO: 68900 - RNA, 21 nt, synthetic construct
  source 1..21: mol_type = other RNA
agactcaacatgtgtatttag

SEQ ID NO: 68901 - RNA, 21 nt, synthetic construct
  source 1..21: mol_type = other RNA
agactcaagcctgataagctc

SEQ ID NO: 68902 - RNA, 21 nt, synthetic construct
  source 1..21: mol_type = other RNA
agactcaataaccacatgtgg

SEQ ID NO: 68903 - RNA, 21 nt, synthetic construct
  source 1..21: mol_type = other RNA
agactcagcagttttaaagaa

SEQ ID NO: 68904 - RNA, 21 nt, synthetic construct
  source 1..21: mol_type = other RNA
agactcattgcctatagacag

SEQ ID NO: 68905 - RNA, 21 nt, synthetic construct
  source 1..21: mol_type = other RNA
agactccaactcaaaaaagaa

SEQ ID NO: 68906 - RNA, 21 nt, synthetic construct
  source 1..21: mol_type = other RNA
agactccatctcaagaaaaca

SEQ ID NO: 68907 - RNA, 21 nt, synthetic construct
  source 1..21: mol_type = other RNA
agactcccaacttataatatt

SEQ ID NO: 68908 - RNA, 21 nt, synthetic construct
  source 1..21: mol_type = other RNA
agactccttcccctggtcgag

SEQ ID NO: 68909 - RNA, 21 nt, synthetic construct
  source 1..21: mol_type = other RNA
agactcggtctcaaaacaaac

SEQ ID NO: 68910 - RNA, 21 nt, synthetic construct
  source 1..21: mol_type = other RNA
agactctcaagaaggtatcat

SEQ ID NO: 68911 - RNA, 21 nt, synthetic construct
  source 1..21: mol_type = other RNA
agactcttaatattgaaacga

SEQ ID NO: 68912 - RNA, 21 nt, synthetic construct
  source 1..21: mol_type = other RNA
agactcttcagaggtctgtta

SEQ ID NO: 68913 - RNA, 21 nt, synthetic construct
  source 1..21: mol_type = other RNA
agactcttgtcccggcatgcc

SEQ ID NO: 68914 - RNA, 21 nt, synthetic construct
  source 1..21: mol_type = other RNA
agactgaccaacatggacaaa

SEQ ID NO: 68915 - RNA, 21 nt, synthetic construct
  source 1..21: mol_type = other RNA
agactgagccagcaaatcaga

SEQ ID NO: 68916 - RNA, 21 nt, synthetic construct
  source 1..21: mol_type = other RNA
agactgagtaatattccattg

SEQ ID NO: 68917 - RNA, 21 nt, synthetic construct
  source 1..21: mol_type = other RNA
agactgataaacttcagtttt

SEQ ID NO: 68918 - RNA, 21 nt, synthetic construct
  source 1..21: mol_type = other RNA
agactgattaatttgaggtct

SEQ ID NO: 68919 - RNA, 21 nt, synthetic construct
  source 1..21: mol_type = other RNA
agactgcacataaaaggatat

SEQ ID NO: 68920 - RNA, 21 nt, synthetic construct
  source 1..21: mol_type = other RNA
agactgcaggtcttcaacctc

SEQ ID NO: 68921 - RNA, 21 nt, synthetic construct
  source 1..21: mol_type = other RNA
agactgcagtgacctatcatt

SEQ ID NO: 68922 - RNA, 21 nt, synthetic construct
  source 1..21: mol_type = other RNA
agactgcagttggattatatg

SEQ ID NO: 68923 - RNA, 21 nt, synthetic construct
  source 1..21: mol_type = other RNA
agactgccaggtagggagggg

SEQ ID NO: 68924 - RNA, 21 nt, synthetic construct
  source 1..21: mol_type = other RNA
agactgcctgaggtctcaaaa

SEQ ID NO: 68925 - RNA, 21 nt, synthetic construct
  source 1..21: mol_type = other RNA
agactgctgtttaccaagggt

SEQ ID NO: 68926 - RNA, 21 nt, synthetic construct
  source 1..21: mol_type = other RNA
agactggaaaagtgttgacta

SEQ ID NO: 68927 - RNA, 21 nt, synthetic construct
  source 1..21: mol_type = other RNA
agactggagttcactggcaca

SEQ ID NO: 68928 - RNA, 21 nt, synthetic construct
  source 1..21: mol_type = other RNA
agactggatagcaacttgcag

SEQ ID NO: 68929 - RNA, 21 nt, synthetic construct
  source 1..21: mol_type = other RNA
agactggatcctggagggctc

SEQ ID NO: 68930 - RNA, 21 nt, synthetic construct
  source 1..21: mol_type = other RNA
agactggattaaggagatggc

SEQ ID NO: 68931 - RNA, 21 nt, synthetic construct
  source 1..21: mol_type = other RNA
agactggatttgattgggcat

SEQ ID NO: 68932 - RNA, 21 nt, synthetic construct
  source 1..21: mol_type = other RNA
agactgggcaacagagacaga

SEQ ID NO: 68933 - RNA, 21 nt, synthetic construct
  source 1..21: mol_type = other RNA
agactgtaaaaattttctccc

SEQ ID NO: 68934 - RNA, 21 nt, synthetic construct
  source 1..21: mol_type = other RNA
agactgtaatgagctgagatt

SEQ ID NO: 68935 - RNA, 21 nt, synthetic construct
  source 1..21: mol_type = other RNA
agactgtattaccagcttaca

SEQ ID NO: 68936 - RNA, 21 nt, synthetic construct
  source 1..21: mol_type = other RNA
agactgtgcaatgtgaaaaaa

SEQ ID NO: 68937 - RNA, 21 nt, synthetic construct
  source 1..21: mol_type = other RNA
agactgtgccttgatccatta

SEQ ID NO: 68938 - RNA, 21 nt, synthetic construct
  source 1..21: mol_type = other RNA
agactgtgcttccacagctat

SEQ ID NO: 68939 - RNA, 21 nt, synthetic construct
  source 1..21: mol_type = other RNA
agactgttagggacttatgga

SEQ ID NO: 68940 - RNA, 21 nt, synthetic construct
  source 1..21: mol_type = other RNA
agacttaactataggagttca

SEQ ID NO: 68941 - RNA, 21 nt, synthetic construct
  source 1..21: mol_type = other RNA
agacttaggagaaaagcttca

SEQ ID NO: 68942 - RNA, 21 nt, synthetic construct
  source 1..21: mol_type = other RNA
agacttaggcaaaggaaaaat

SEQ ID NO: 68943 - RNA, 21 nt, synthetic construct
  source 1..21: mol_type = other RNA
agacttcaacggacatttttc

SEQ ID NO: 68944 - RNA, 21 nt, synthetic construct
  source 1..21: mol_type = other RNA
agacttcacgatgcttaggta

SEQ ID NO: 68945 - RNA, 21 nt, synthetic construct
  source 1..21: mol_type = other RNA
agacttcaggaacaccttgaa

SEQ ID NO: 68946 - RNA, 21 nt, synthetic construct
  source 1..21: mol_type = other RNA
agacttctcaaacaggataca

SEQ ID NO: 68947 - RNA, 21 nt, synthetic construct
  source 1..21: mol_type = other RNA
agacttgaggtttacttgggg

SEQ ID NO: 68948 - RNA, 21 nt, synthetic construct
  source 1..21: mol_type = other RNA
agactttagagtcagttgttt

SEQ ID NO: 68949 - RNA, 21 nt, synthetic construct
  source 1..21: mol_type = other RNA
agactttatggtaattggttc

SEQ ID NO: 68950 - RNA, 21 nt, synthetic construct
  source 1..21: mol_type = other RNA
agactttcactgctcagtccc

SEQ ID NO: 68951 - RNA, 21 nt, synthetic construct
  source 1..21: mol_type = other RNA
agactttgttttgtttttctc

SEQ ID NO: 68952 - RNA, 21 nt, synthetic construct
  source 1..21: mol_type = other RNA
agagaaaaacaaaacaaagtc

SEQ ID NO: 68953 - RNA, 21 nt, synthetic construct
  source 1..21: mol_type = other RNA
agagaaaaattacaggtcaaa

SEQ ID NO: 68954 - RNA, 21 nt, synthetic construct
  source 1..21: mol_type = other RNA
agagaaaatgttatacagcaa

SEQ ID NO: 68955 - RNA, 21 nt, synthetic construct
  source 1..21: mol_type = other RNA
agagaaacaggattacaatgt

SEQ ID NO: 68956 - RNA, 21 nt, synthetic construct
  source 1..21: mol_type = other RNA
agagaaaccttggtgtgcttc

SEQ ID NO: 68957 - RNA, 21 nt, synthetic construct
  source 1..21: mol_type = other RNA
agagaaactggaatcaatcca

SEQ ID NO: 68958 - RNA, 21 nt, synthetic construct
  source 1..21: mol_type = other RNA
agagaaagaagtaatttcttc

SEQ ID NO: 68959 - RNA, 21 nt, synthetic construct
  source 1..21: mol_type = other RNA
agagaaagagagagacaagca

SEQ ID NO: 68960 - RNA, 21 nt, synthetic construct
  source 1..21: mol_type = other RNA
agagaaagcatcagagctttg

SEQ ID NO: 68961 - RNA, 21 nt, synthetic construct
  source 1..21: mol_type = other RNA
agagaacaaaatacctgggaa

SEQ ID NO: 68962 - RNA, 21 nt, synthetic construct
  source 1..21: mol_type = other RNA
agagaacaatggaatagaagg

SEQ ID NO: 68963 - RNA, 21 nt, synthetic construct
  source 1..21: mol_type = other RNA
agagaacacacaatttgaggt

SEQ ID NO: 68964 - RNA, 21 nt, synthetic construct
  source 1..21: mol_type = other RNA
agagaacagcattatcttaat

SEQ ID NO: 68965 - RNA, 21 nt, synthetic construct
  source 1..21: mol_type = other RNA
agagaacattggtttgaaatg

SEQ ID NO: 68966 - RNA, 21 nt, synthetic construct
  source 1..21: mol_type = other RNA
agagaactgactgaaggattc

SEQ ID NO: 68967 - RNA, 21 nt, synthetic construct
  source 1..21: mol_type = other RNA
agagaacttgcacataatata

SEQ ID NO: 68968 - RNA, 21 nt, synthetic construct
  source 1..21: mol_type = other RNA
agagaagaatgagaaacatac

SEQ ID NO: 68969 - RNA, 21 nt, synthetic construct
  source 1..21: mol_type = other RNA
agagaagagggggcataacat

SEQ ID NO: 68970 - RNA, 21 nt, synthetic construct
  source 1..21: mol_type = other RNA
agagaagatgacatttgcttt

SEQ ID NO: 68971 - RNA, 21 nt, synthetic construct
  source 1..21: mol_type = other RNA
agagaaggaagcaccaaccct

SEQ ID NO: 68972 - RNA, 21 nt, synthetic construct
  source 1..21: mol_type = other RNA
agagaaggctgccagcaccag

SEQ ID NO: 68973 - RNA, 21 nt, synthetic construct
  source 1..21: mol_type = other RNA
agagaaggctttgtgttggtg

SEQ ID NO: 68974 - RNA, 21 nt, synthetic construct
  source 1..21: mol_type = other RNA
agagaagtcagactaagacac

SEQ ID NO: 68975 - RNA, 21 nt, synthetic construct
  source 1..21: mol_type = other RNA
agagaagtgaagcttcaaacc

SEQ ID NO: 68976 - RNA, 21 nt, synthetic construct
  source 1..21: mol_type = other RNA
agagaagttttccaggaaaag

SEQ ID NO: 68977 - RNA, 21 nt, synthetic construct
  source 1..21: mol_type = other RNA
agagaatagcagaaacacagg

SEQ ID NO: 68978 - RNA, 21 nt, synthetic construct
  source 1..21: mol_type = other RNA
agagaatcttaaaataccaga

SEQ ID NO: 68979 - RNA, 21 nt, synthetic construct
  source 1..21: mol_type = other RNA
agagaatggaaacttgccatc

SEQ ID NO: 68980 - RNA, 21 nt, synthetic construct
  source 1..21: mol_type = other RNA
agagaatggctggaatggtga

SEQ ID NO: 68981 - RNA, 21 nt, synthetic construct
  source 1..21: mol_type = other RNA
agagaattcagagtggctaat

SEQ ID NO: 68982 - RNA, 21 nt, synthetic construct
  source 1..21: mol_type = other RNA
agagaattctaaattgcctat

SEQ ID NO: 68983 - RNA, 21 nt, synthetic construct
  source 1..21: mol_type = other RNA
agagacaaagcataaaatatg

SEQ ID NO: 68984 - RNA, 21 nt, synthetic construct
  source 1..21: mol_type = other RNA
agagacaagcacaggcatctc

SEQ ID NO: 68985 - RNA, 21 nt, synthetic construct
  source 1..21: mol_type = other RNA
agagacacacatcagacacct

SEQ ID NO: 68986 - RNA, 21 nt, synthetic construct
  source 1..21: mol_type = other RNA
agagacacatactgaaagaca

SEQ ID NO: 68987 - RNA, 21 nt, synthetic construct
  source 1..21: mol_type = other RNA
agagacagaatcttactggtg

SEQ ID NO: 68988 - RNA, 21 nt, synthetic construct
  source 1..21: mol_type = other RNA
agagacagagaatctgtctca

SEQ ID NO: 68989 - RNA, 21 nt, synthetic construct
  source 1..21: mol_type = other RNA
agagaccacaggctctcttca

SEQ ID NO: 68990 - RNA, 21 nt, synthetic construct
  source 1..21: mol_type = other RNA
agagacctgaagactggattt

SEQ ID NO: 68991 - RNA, 21 nt, synthetic construct
  source 1..21: mol_type = other RNA
agagacctgattcttccacta

SEQ ID NO: 68992 - RNA, 21 nt, synthetic construct
  source 1..21: mol_type = other RNA
agagacctttctttaaaagta

SEQ ID NO: 68993 - RNA, 21 nt, synthetic construct
  source 1..21: mol_type = other RNA
agagactatctcttcctcctc

SEQ ID NO: 68994 - RNA, 21 nt, synthetic construct
  source 1..21: mol_type = other RNA
agagactctcaagaaggtatc

SEQ ID NO: 68995 - RNA, 21 nt, synthetic construct
  source 1..21: mol_type = other RNA
agagactggatagcaacttgc

SEQ ID NO: 68996 - RNA, 21 nt, synthetic construct
  source 1..21: mol_type = other RNA
agagactggatcctggagggc

SEQ ID NO: 68997 - RNA, 21 nt, synthetic construct
  source 1..21: mol_type = other RNA
agagactgtgcttccacagct

SEQ ID NO: 68998 - RNA, 21 nt, synthetic construct
  source 1..21: mol_type = other RNA
agagagaaactttacacttta

SEQ ID NO: 68999 - RNA, 21 nt, synthetic construct
  source 1..21: mol_type = other RNA
agagagaaagagagagacaag

SEQ ID NO: 69000 - RNA, 21 nt, synthetic construct
  source 1..21: mol_type = other RNA
agagagaagatgacatttgct

SEQ ID NO: 69001 - RNA, 21 nt, synthetic construct
  source 1..21: mol_type = other RNA
agagagaaggctgccagcacc

SEQ ID NO: 69002 - RNA, 21 nt, synthetic construct
  source 1..21: mol_type = other RNA
agagagaattctaaattgcct

SEQ ID NO: 69003 - RNA, 21 nt, synthetic construct
  source 1..21: mol_type = other RNA
agagagacaagcacaggcatc

SEQ ID NO: 69004 - RNA, 21 nt, synthetic construct
  source 1..21: mol_type = other RNA
agagagacctgaagactggat

SEQ ID NO: 69005 - RNA, 21 nt, synthetic construct
  source 1..21: mol_type = other RNA
agagagacctttctttaaaag

SEQ ID NO: 69006 - RNA, 21 nt, synthetic construct
  source 1..21: mol_type = other RNA
agagagagaaagagagagaca

SEQ ID NO: 69007 - RNA, 21 nt, synthetic construct
  source 1..21: mol_type = other RNA
agagagagaagatgacatttg

SEQ ID NO: 69008 - RNA, 21 nt, synthetic construct
  source 1..21: mol_type = other RNA
agagagagacaagcacaggca

SEQ ID NO: 69009 - RNA, 21 nt, synthetic construct
  source 1..21: mol_type = other RNA
agagagagacctttctttaaa

SEQ ID NO: 69010 - RNA, 21 nt, synthetic construct
  source 1..21: mol_type = other RNA
agagagagagaaagagagaga

SEQ ID NO: 69011 - RNA, 21 nt, synthetic construct
  source 1..21: mol_type = other RNA
agagagaggggggaagctttt

SEQ ID NO: 69012 - RNA, 21 nt, synthetic construct
  source 1..21: mol_type = other RNA
agagagagtaactggtccaga

SEQ ID NO: 69013 - RNA, 21 nt, synthetic construct
  source 1..21: mol_type = other RNA
agagagataaaacctggaatg

SEQ ID NO: 69014 - RNA, 21 nt, synthetic construct
  source 1..21: mol_type = other RNA
agagagatgcctgtgcttgtc

SEQ ID NO: 69015 - RNA, 21 nt, synthetic construct
  source 1..21: mol_type = other RNA
agagagatggtgggagaggca

SEQ ID NO: 69016 - RNA, 21 nt, synthetic construct
  source 1..21: mol_type = other RNA
agagagattaaataacttcca

SEQ ID NO: 69017 - RNA, 21 nt, synthetic construct
  source 1..21: mol_type = other RNA
agagagattcaagaaaccaca

SEQ ID NO: 69018 - RNA, 21 nt, synthetic construct
  source 1..21: mol_type = other RNA
agagagcaagactcaaatctc

SEQ ID NO: 69019 - RNA, 21 nt, synthetic construct
  source 1..21: mol_type = other RNA
agagagcaagtccccatctcc

SEQ ID NO: 69020 - RNA, 21 nt, synthetic construct
  source 1..21: mol_type = other RNA
agagagcattgcctttattac

SEQ ID NO: 69021 - RNA, 21 nt, synthetic construct
  source 1..21: mol_type = other RNA
agagagcctgtggtctcttcg

SEQ ID NO: 69022 - RNA, 21 nt, synthetic construct
  source 1..21: mol_type = other RNA
agagaggaagtgaccctgagt

SEQ ID NO: 69023 - RNA, 21 nt, synthetic construct
  source 1..21: mol_type = other RNA
agagaggaataaatggtagct

SEQ ID NO: 69024 - RNA, 21 nt, synthetic construct
  source 1..21: mol_type = other RNA
agagaggacagttggccttga

SEQ ID NO: 69025 - RNA, 21 nt, synthetic construct
  source 1..21: mol_type = other RNA
agagaggctaggtgacctgcc

SEQ ID NO: 69026 - RNA, 21 nt, synthetic construct
  source 1..21: mol_type = other RNA
agagaggctttttattagatt

SEQ ID NO: 69027 - RNA, 21 nt, synthetic construct
  source 1..21: mol_type = other RNA
agagaggggggaagcttttca

SEQ ID NO: 69028 - RNA, 21 nt, synthetic construct
  source 1..21: mol_type = other RNA
agagagtaaaataaaagctct

SEQ ID NO: 69029 - RNA, 21 nt, synthetic construct
  source 1..21: mol_type = other RNA
agagagtaactggtccagatg

SEQ ID NO: 69030 - RNA, 21 nt, synthetic construct
  source 1..21: mol_type = other RNA
agagagtgacagctgagtagc

SEQ ID NO: 69031 - RNA, 21 nt, synthetic construct
  source 1..21: mol_type = other RNA
agagagtggaaagagccagcc

SEQ ID NO: 69032 - RNA, 21 nt, synthetic construct
  source 1..21: mol_type = other RNA
agagataaaacctggaatggg

SEQ ID NO: 69033 - RNA, 21 nt, synthetic construct
  source 1..21: mol_type = other RNA
agagataactgggtgtgcacg

SEQ ID NO: 69034 - RNA, 21 nt, synthetic construct
  source 1..21: mol_type = other RNA
agagatagaaagcaccagggc

SEQ ID NO: 69035 - RNA, 21 nt, synthetic construct
  source 1..21: mol_type = other RNA
agagatagtctcttcctgtat

SEQ ID NO: 69036 - RNA, 21 nt, synthetic construct
  source 1..21: mol_type = other RNA
agagatctagtgaagtcaatt

SEQ ID NO: 69037 - RNA, 21 nt, synthetic construct
  source 1..21: mol_type = other RNA
agagatctgaaattgacttca

SEQ ID NO: 69038 - RNA, 21 nt, synthetic construct
  source 1..21: mol_type = other RNA
agagatcttgtgtatcttttg

SEQ ID NO: 69039 - RNA, 21 nt, synthetic construct
  source 1..21: mol_type = other RNA
agagatgaatggataaggaaa

SEQ ID NO: 69040 - RNA, 21 nt, synthetic construct
  source 1..21: mol_type = other RNA
agagatgaggttttacgatgt

SEQ ID NO: 69041 - RNA, 21 nt, synthetic construct
  source 1..21: mol_type = other RNA
agagatgcctatgaaatcttg

SEQ ID NO: 69042 - RNA, 21 nt, synthetic construct
  source 1..21: mol_type = other RNA
agagatgcctgtgcttgtctc

SEQ ID NO: 69043 - RNA, 21 nt, synthetic construct
  source 1..21: mol_type = other RNA
agagatgggaaagtattccca

SEQ ID NO: 69044 - RNA, 21 nt, synthetic construct
  source 1..21: mol_type = other RNA
agagatggtagtcaacacttt

SEQ ID NO: 69045 - RNA, 21 nt, synthetic construct
  source 1..21: mol_type = other RNA
agagatggtgggagaggcatg

SEQ ID NO: 69046 - RNA, 21 nt, synthetic construct
  source 1..21: mol_type = other RNA
agagattaaataacttccatg

SEQ ID NO: 69047 - RNA, 21 nt, synthetic construct
  source 1..21: mol_type = other RNA
agagattaattcagtcaacac

SEQ ID NO: 69048 - RNA, 21 nt, synthetic construct
  source 1..21: mol_type = other RNA
agagattaggcagaaccacct

SEQ ID NO: 69049 - RNA, 21 nt, synthetic construct
  source 1..21: mol_type = other RNA
agagattcaagaaaccacaga

SEQ ID NO: 69050 - RNA, 21 nt, synthetic construct
  source 1..21: mol_type = other RNA
agagattgggaaaatcttgga

SEQ ID NO: 69051 - RNA, 21 nt, synthetic construct
  source 1..21: mol_type = other RNA
agagattgtcgttgagtacct

SEQ ID NO: 69052 - RNA, 21 nt, synthetic construct
  source 1..21: mol_type = other RNA
agagatttgctgtataacatt

SEQ ID NO: 69053 - RNA, 21 nt, synthetic construct
  source 1..21: mol_type = other RNA
agagattttcccaaagataga

SEQ ID NO: 69054 - RNA, 21 nt, synthetic construct
  source 1..21: mol_type = other RNA
agagcaaactcagatctgaga

SEQ ID NO: 69055 - RNA, 21 nt, synthetic construct
  source 1..21: mol_type = other RNA
agagcaacaacctgtctcaaa

SEQ ID NO: 69056 - RNA, 21 nt, synthetic construct
  source 1..21: mol_type = other RNA
agagcaagactcaaatctcaa

SEQ ID NO: 69057 - RNA, 21 nt, synthetic construct
  source 1..21: mol_type = other RNA
agagcaagcaacaccagatac

SEQ ID NO: 69058 - RNA, 21 nt, synthetic construct
  source 1..21: mol_type = other RNA
agagcaagcacgttagcatca

SEQ ID NO: 69059 - RNA, 21 nt, synthetic construct
  source 1..21: mol_type = other RNA
agagcaagtccccatctccac

SEQ ID NO: 69060 - RNA, 21 nt, synthetic construct
  source 1..21: mol_type = other RNA
agagcacaccaagacatgtta

SEQ ID NO: 69061 - RNA, 21 nt, synthetic construct
  source 1..21: mol_type = other RNA
agagcacagactcaagcctga

SEQ ID NO: 69062 - RNA, 21 nt, synthetic construct
  source 1..21: mol_type = other RNA
agagcactggtttcagtacac

SEQ ID NO: 69063 - RNA, 21 nt, synthetic construct
  source 1..21: mol_type = other RNA
agagcactttcgtatttttgt

SEQ ID NO: 69064 - RNA, 21 nt, synthetic construct
  source 1..21: mol_type = other RNA
agagcagaactccacctcaga

SEQ ID NO: 69065 - RNA, 21 nt, synthetic construct
  source 1..21: mol_type = other RNA
agagcagagacacacatcaga

SEQ ID NO: 69066 - RNA, 21 nt, synthetic construct
  source 1..21: mol_type = other RNA
agagcagcactgatgtgtagt

SEQ ID NO: 69067 - RNA, 21 nt, synthetic construct
  source 1..21: mol_type = other RNA
agagcaggctccacttgggtg

SEQ ID NO: 69068 - RNA, 21 nt, synthetic construct
  source 1..21: mol_type = other RNA
agagcaggggtggggggatgt

SEQ ID NO: 69069 - RNA, 21 nt, synthetic construct
  source 1..21: mol_type = other RNA
agagcaggtggaaggcctgat

SEQ ID NO: 69070 - RNA, 21 nt, synthetic construct
  source 1..21: mol_type = other RNA
agagcagtaggcttagatagg

SEQ ID NO: 69071 - RNA, 21 nt, synthetic construct
  source 1..21: mol_type = other RNA
agagcagtgtgttctgccttg

SEQ ID NO: 69072 - RNA, 21 nt, synthetic construct
  source 1..21: mol_type = other RNA
agagcatagactttagagtca

SEQ ID NO: 69073 - RNA, 21 nt, synthetic construct
  source 1..21: mol_type = other RNA
agagcatgtcccctggagtta

SEQ ID NO: 69074 - RNA, 21 nt, synthetic construct
  source 1..21: mol_type = other RNA
agagcatgttgggccaacttc

SEQ ID NO: 69075 - RNA, 21 nt, synthetic construct
  source 1..21: mol_type = other RNA
agagcattgcctttattacta

SEQ ID NO: 69076 - RNA, 21 nt, synthetic construct
  source 1..21: mol_type = other RNA
agagccaaagacattgtctta

SEQ ID NO: 69077 - RNA, 21 nt, synthetic construct
  source 1..21: mol_type = other RNA
agagccagcctgatgatgatg

SEQ ID NO: 69078 - RNA, 21 nt, synthetic construct
  source 1..21: mol_type = other RNA
agagccaggaagtcagcaact

SEQ ID NO: 69079 - RNA, 21 nt, synthetic construct
  source 1..21: mol_type = other RNA
agagcccagaaataaatcctc

SEQ ID NO: 69080 - RNA, 21 nt, synthetic construct
  source 1..21: mol_type = other RNA
agagccccaagaaagcaggtc

SEQ ID NO: 69081 - RNA, 21 nt, synthetic construct
  source 1..21: mol_type = other RNA
agagccgaaatgcacttagcg

SEQ ID NO: 69082 - RNA, 21 nt, synthetic construct
  source 1..21: mol_type = other RNA
agagccgagcagaagggaaag

SEQ ID NO: 69083 - RNA, 21 nt, synthetic construct
  source 1..21: mol_type = other RNA
agagcctaaaataggcctagg

SEQ ID NO: 69084 - RNA, 21 nt, synthetic construct
  source 1..21: mol_type = other RNA
agagcctaatgtgtaagaaat

SEQ ID NO: 69085 - RNA, 21 nt, synthetic construct
  source 1..21: mol_type = other RNA
agagcctgtggtctcttcgag

SEQ ID NO: 69086 - RNA, 21 nt, synthetic construct
  source 1..21: mol_type = other RNA
agagcgaagagggagaagaaa

SEQ ID NO: 69087 - RNA, 21 nt, synthetic construct
  source 1..21: mol_type = other RNA
agagcgacagctacggaggat

SEQ ID NO: 69088 - RNA, 21 nt, synthetic construct
  source 1..21: mol_type = other RNA
agagcgaggcctggaacaggc

SEQ ID NO: 69089 - RNA, 21 nt, synthetic construct
  source 1..21: mol_type = other RNA
agagcgcttctatgtgacaaa

SEQ ID NO: 69090 - RNA, 21 nt, synthetic construct
  source 1..21: mol_type = other RNA
agagcggcctttgcctctcca

SEQ ID NO: 69091 - RNA, 21 nt, synthetic construct
  source 1..21: mol_type = other RNA
agagcgggtttcctcggtcta

SEQ ID NO: 69092 - RNA, 21 nt, synthetic construct
  source 1..21: mol_type = other RNA
agagcgtcgtacctttcgcta

SEQ ID NO: 69093 - RNA, 21 nt, synthetic construct
  source 1..21: mol_type = other RNA
agagctaagactataaaactc

SEQ ID NO: 69094 - RNA, 21 nt, synthetic construct
  source 1..21: mol_type = other RNA
agagctaagatgctattcaag

SEQ ID NO: 69095 - RNA, 21 nt, synthetic construct
  source 1..21: mol_type = other RNA
agagctaagggaagttttttc

SEQ ID NO: 69096 - RNA, 21 nt, synthetic construct
  source 1..21: mol_type = other RNA
agagctagaactagaatactc

SEQ ID NO: 69097 - RNA, 21 nt, synthetic construct
  source 1..21: mol_type = other RNA
agagctcacacgagaaggaca

SEQ ID NO: 69098 - RNA, 21 nt, synthetic construct
  source 1..21: mol_type = other RNA
agagctcaggccagtgagtga

SEQ ID NO: 69099 - RNA, 21 nt, synthetic construct
  source 1..21: mol_type = other RNA
agagctgctgtaacaaagatg

SEQ ID NO: 69100 - RNA, 21 nt, synthetic construct
  source 1..21: mol_type = other RNA
agagctgggactacaggtgtg

SEQ ID NO: 69101 - RNA, 21 nt, synthetic construct
  source 1..21: mol_type = other RNA
agagctgggcccgcagtggct

SEQ ID NO: 69102 - RNA, 21 nt, synthetic construct
  source 1..21: mol_type = other RNA
agagctgtaacagaggcatgc

SEQ ID NO: 69103 - RNA, 21 nt, synthetic construct
  source 1..21: mol_type = other RNA
agagctgtgccgaggcagaga

SEQ ID NO: 69104 - RNA, 21 nt, synthetic construct
  source 1..21: mol_type = other RNA
agagcttcaacctcctgggct

SEQ ID NO: 69105 - RNA, 21 nt, synthetic construct
  source 1..21: mol_type = other RNA
agagctttcttttaaagacct

SEQ ID NO: 69106 - RNA, 21 nt, synthetic construct
  source 1..21: mol_type = other RNA
agagctttgttatgaaaatag

SEQ ID NO: 69107 - RNA, 21 nt, synthetic construct
  source 1..21: mol_type = other RNA
agagcttttattttactctct

SEQ ID NO: 69108 - RNA, 21 nt, synthetic construct
  source 1..21: mol_type = other RNA
agaggaagcttataatttctg

SEQ ID NO: 69109 - RNA, 21 nt, synthetic construct
  source 1..21: mol_type = other RNA
agaggaaggttcaagtttggc

SEQ ID NO: 69110 - RNA, 21 nt, synthetic construct
  source 1..21: mol_type = other RNA
agaggaagtgaccctgagtcc

SEQ ID NO: 69111 - RNA, 21 nt, synthetic construct
  source 1..21: mol_type = other RNA
agaggaataaatggtagcttg

SEQ ID NO: 69112 - RNA, 21 nt, synthetic construct
  source 1..21: mol_type = other RNA
agaggacagttggccttgagg

SEQ ID NO: 69113 - RNA, 21 nt, synthetic construct
  source 1..21: mol_type = other RNA
agaggacgatttttccaacag

SEQ ID NO: 69114 - RNA, 21 nt, synthetic construct
  source 1..21: mol_type = other RNA
agaggactgcctattttgtaa

SEQ ID NO: 69115 - RNA, 21 nt, synthetic construct
  source 1..21: mol_type = other RNA
agaggactgcctggtcctgag

SEQ ID NO: 69116 - RNA, 21 nt, synthetic construct
  source 1..21: mol_type = other RNA
agaggagacattacaattgat

SEQ ID NO: 69117 - RNA, 21 nt, synthetic construct
  source 1..21: mol_type = other RNA
agaggagcagttactcctgag

SEQ ID NO: 69118 - RNA, 21 nt, synthetic construct
  source 1..21: mol_type = other RNA
agaggagcgccctggcattgt

SEQ ID NO: 69119 - RNA, 21 nt, synthetic construct
  source 1..21: mol_type = other RNA
agaggaggaagagatagtctc

SEQ ID NO: 69120 - RNA, 21 nt, synthetic construct
  source 1..21: mol_type = other RNA
agaggaggagggttagattat

SEQ ID NO: 69121 - RNA, 21 nt, synthetic construct
  source 1..21: mol_type = other RNA
agaggagggatgcattctaga

SEQ ID NO: 69122 - RNA, 21 nt, synthetic construct
  source 1..21: mol_type = other RNA
agaggataaggggcagggtgg

SEQ ID NO: 69123 - RNA, 21 nt, synthetic construct
  source 1..21: mol_type = other RNA
agaggatgggcattccagagg

SEQ ID NO: 69124 - RNA, 21 nt, synthetic construct
  source 1..21: mol_type = other RNA
agaggattccaggtttacagg

SEQ ID NO: 69125 - RNA, 21 nt, synthetic construct
  source 1..21: mol_type = other RNA
agaggattttggattgcgatt

SEQ ID NO: 69126 - RNA, 21 nt, synthetic construct
  source 1..21: mol_type = other RNA
agaggcaaaactcctgaacaa

SEQ ID NO: 69127 - RNA, 21 nt, synthetic construct
  source 1..21: mol_type = other RNA
agaggcaaaggccgctcttga

SEQ ID NO: 69128 - RNA, 21 nt, synthetic construct
  source 1..21: mol_type = other RNA
agaggcaacagtcattcaggt

SEQ ID NO: 69129 - RNA, 21 nt, synthetic construct
  source 1..21: mol_type = other RNA
agaggcagctaagcaccaaca

SEQ ID NO: 69130 - RNA, 21 nt, synthetic construct
  source 1..21: mol_type = other RNA
agaggcagttgagttttcaac

SEQ ID NO: 69131 - RNA, 21 nt, synthetic construct
  source 1..21: mol_type = other RNA
agaggcatgcacggacttggc

SEQ ID NO: 69132 - RNA, 21 nt, synthetic construct
  source 1..21: mol_type = other RNA
agaggcatgccgggacaagag

SEQ ID NO: 69133 - RNA, 21 nt, synthetic construct
  source 1..21: mol_type = other RNA
agaggccaaatgaaaggcgtc

SEQ ID NO: 69134 - RNA, 21 nt, synthetic construct
  source 1..21: mol_type = other RNA
agaggccacaaagtccccaca

SEQ ID NO: 69135 - RNA, 21 nt, synthetic construct
  source 1..21: mol_type = other RNA
agaggccctggtgctttctat

SEQ ID NO: 69136 - RNA, 21 nt, synthetic construct
  source 1..21: mol_type = other RNA
agaggccgagggttgaacatc

SEQ ID NO: 69137 - RNA, 21 nt, synthetic construct
  source 1..21: mol_type = other RNA
agaggcctcatgtattttcct

SEQ ID NO: 69138 - RNA, 21 nt, synthetic construct
  source 1..21: mol_type = other RNA
agaggctaggtgacctgccag

SEQ ID NO: 69139 - RNA, 21 nt, synthetic construct
  source 1..21: mol_type = other RNA
agaggctgcaccctcctcctc

SEQ ID NO: 69140 - RNA, 21 nt, synthetic construct
  source 1..21: mol_type = other RNA
agaggctgtattgtaggaaag

SEQ ID NO: 69141 - RNA, 21 nt, synthetic construct
  source 1..21: mol_type = other RNA
agaggctttaagcagaaagtt

SEQ ID NO: 69142 - RNA, 21 nt, synthetic construct
  source 1..21: mol_type = other RNA
agaggctttctgtgtaatact

SEQ ID NO: 69143 - RNA, 21 nt, synthetic construct
  source 1..21: mol_type = other RNA
agaggctttttatatttccga

SEQ ID NO: 69144 - RNA, 21 nt, synthetic construct
  source 1..21: mol_type = other RNA
agagggaaactgtttttgcaa

SEQ ID NO: 69145 - RNA, 21 nt, synthetic construct
  source 1..21: mol_type = other RNA
agagggaacattttcatttta

SEQ ID NO: 69146 - RNA, 21 nt, synthetic construct
  source 1..21: mol_type = other RNA
agagggaagtactgagtcaaa

SEQ ID NO: 69147 - RNA, 21 nt, synthetic construct
  source 1..21: mol_type = other RNA
agagggaatctaggaaacact

SEQ ID NO: 69148 - RNA, 21 nt, synthetic construct
  source 1..21: mol_type = other RNA
agagggaatttgttttaccat

SEQ ID NO: 69149 - RNA, 21 nt, synthetic construct
  source 1..21: mol_type = other RNA
agagggagaagaaataaacga

SEQ ID NO: 69150 - RNA, 21 nt, synthetic construct
  source 1..21: mol_type = other RNA
agagggagaccgtggggggag

SEQ ID NO: 69151 - RNA, 21 nt, synthetic construct
  source 1..21: mol_type = other RNA
agagggagcagcgggcggcct

SEQ ID NO: 69152 - RNA, 21 nt, synthetic construct
  source 1..21: mol_type = other RNA
agagggagcatcttcccatga

SEQ ID NO: 69153 - RNA, 21 nt, synthetic construct
  source 1..21: mol_type = other RNA
agagggagcgccacgtgaaga

SEQ ID NO: 69154 - RNA, 21 nt, synthetic construct
  source 1..21: mol_type = other RNA
agagggagctctgtcttgatg

SEQ ID NO: 69155 - RNA, 21 nt, synthetic construct
  source 1..21: mol_type = other RNA
agagggatgaatgttgtacat

SEQ ID NO: 69156 - RNA, 21 nt, synthetic construct
  source 1..21: mol_type = other RNA
agagggcctaaataaaacaca

SEQ ID NO: 69157 - RNA, 21 nt, synthetic construct
  source 1..21: mol_type = other RNA
agagggcttcatgctgggaga

SEQ ID NO: 69158 - RNA, 21 nt, synthetic construct
  source 1..21: mol_type = other RNA
agagggggcataacatctatg

SEQ ID NO: 69159 - RNA, 21 nt, synthetic construct
  source 1..21: mol_type = other RNA
agaggggggaagcttttcata

SEQ ID NO: 69160 - RNA, 21 nt, synthetic construct
  source 1..21: mol_type = other RNA
agagggtaacgtgagctggaa

SEQ ID NO: 69161 - RNA, 21 nt, synthetic construct
  source 1..21: mol_type = other RNA
agagggtaagaccaaaatgga

SEQ ID NO: 69162 - RNA, 21 nt, synthetic construct
  source 1..21: mol_type = other RNA
agaggtactcaacgacaatct

SEQ ID NO: 69163 - RNA, 21 nt, synthetic construct
  source 1..21: mol_type = other RNA
agaggtatcaccatctgataa

SEQ ID NO: 69164 - RNA, 21 nt, synthetic construct
  source 1..21: mol_type = other RNA
agaggtatttggggctaggat

SEQ ID NO: 69165 - RNA, 21 nt, synthetic construct
  source 1..21: mol_type = other RNA
agaggtcaggaaggcaggagg

SEQ ID NO: 69166 - RNA, 21 nt, synthetic construct
  source 1..21: mol_type = other RNA
agaggtctgtctttcagtatg

SEQ ID NO: 69167 - RNA, 21 nt, synthetic construct
  source 1..21: mol_type = other RNA
agaggtctgttactcccgatt

SEQ ID NO: 69168 - RNA, 21 nt, synthetic construct
  source 1..21: mol_type = other RNA
agaggtgaactattagagctt

SEQ ID NO: 69169 - RNA, 21 nt, synthetic construct
  source 1..21: mol_type = other RNA
agaggtgaagttaagggccat

SEQ ID NO: 69170 - RNA, 21 nt, synthetic construct
  source 1..21: mol_type = other RNA
agaggtgagctttttcttttt

SEQ ID NO: 69171 - RNA, 21 nt, synthetic construct
  source 1..21: mol_type = other RNA
agaggttaaaaccacaaacat

SEQ ID NO: 69172 - RNA, 21 nt, synthetic construct
  source 1..21: mol_type = other RNA
agaggttaaagcaacaggaag

SEQ ID NO: 69173 - RNA, 21 nt, synthetic construct
  source 1..21: mol_type = other RNA
agaggttcttttaaatgccaa

SEQ ID NO: 69174 - RNA, 21 nt, synthetic construct
  source 1..21: mol_type = other RNA
agaggttgcagtgaagccgag

SEQ ID NO: 69175 - RNA, 21 nt, synthetic construct
  source 1..21: mol_type = other RNA
agagtaactggtccagatgaa

SEQ ID NO: 69176 - RNA, 21 nt, synthetic construct
  source 1..21: mol_type = other RNA
agagtaactgtcatcagcgtc

SEQ ID NO: 69177 - RNA, 21 nt, synthetic construct
  source 1..21: mol_type = other RNA
agagtaagcaactgcatcttc

SEQ ID NO: 69178 - RNA, 21 nt, synthetic construct
  source 1..21: mol_type = other RNA
agagtaagttgcatacgtcgt

SEQ ID NO: 69179 - RNA, 21 nt, synthetic construct
  source 1..21: mol_type = other RNA
agagtaatggttggccgaggc

SEQ ID NO: 69180 - RNA, 21 nt, synthetic construct
  source 1..21: mol_type = other RNA
agagtaccaggtcagccagag

SEQ ID NO: 69181 - RNA, 21 nt, synthetic construct
  source 1..21: mol_type = other RNA
agagtagagaaggctttgtgt

SEQ ID NO: 69182 - RNA, 21 nt, synthetic construct
  source 1..21: mol_type = other RNA
agagtagattcccccttatgt

SEQ ID NO: 69183 - RNA, 21 nt, synthetic construct
  source 1..21: mol_type = other RNA
agagtatatatgctccctaaa

SEQ ID NO: 69184 - RNA, 21 nt, synthetic construct
  source 1..21: mol_type = other RNA
agagtatctttttcagcagca

SEQ ID NO: 69185 - RNA, 21 nt, synthetic construct
  source 1..21: mol_type = other RNA
agagtattacctatgaatagg

SEQ ID NO: 69186 - RNA, 21 nt, synthetic construct
  source 1..21: mol_type = other RNA
agagtattgccaggtttgtgc

SEQ ID NO: 69187 - RNA, 21 nt, synthetic construct
  source 1..21: mol_type = other RNA
agagtcagttgtttacttggg

SEQ ID NO: 69188 - RNA, 21 nt, synthetic construct
  source 1..21: mol_type = other RNA
agagtcatttgagcccaggag

SEQ ID NO: 69189 - RNA, 21 nt, synthetic construct
  source 1..21: mol_type = other RNA
agagtccccaactgcaaaact

SEQ ID NO: 69190 - RNA, 21 nt, synthetic construct
  source 1..21: mol_type = other RNA
agagtcctgagggtgagacca

SEQ ID NO: 69191 - RNA, 21 nt, synthetic construct
  source 1..21: mol_type = other RNA
agagtcgcttgaacctgaaaa

SEQ ID NO: 69192 - RNA, 21 nt, synthetic construct
  source 1..21: mol_type = other RNA
agagtctatctttgggaaaat

SEQ ID NO: 69193 - RNA, 21 nt, synthetic construct
  source 1..21: mol_type = other RNA
agagtctcatctgtcaaaaag

SEQ ID NO: 69194 - RNA, 21 nt, synthetic construct
  source 1..21: mol_type = other RNA
agagtctcttaagaccacaag

SEQ ID NO: 69195 - RNA, 21 nt, synthetic construct
  source 1..21: mol_type = other RNA
agagtctgcagaccaagaaag

SEQ ID NO: 69196 - RNA, 21 nt, synthetic construct
  source 1..21: mol_type = other RNA
agagtgaaaacacaaactgca

SEQ ID NO: 69197 - RNA, 21 nt, synthetic construct
  source 1..21: mol_type = other RNA
agagtgaaaagaaacaagtga

SEQ ID NO: 69198 - RNA, 21 nt, synthetic construct
  source 1..21: mol_type = other RNA
agagtgaaaaggcaaaccaca

SEQ ID NO: 69199 - RNA, 21 nt, synthetic construct
  source 1..21: mol_type = other RNA
agagtgaaactctggctcaga

SEQ ID NO: 69200 - RNA, 21 nt, synthetic construct
  source 1..21: mol_type = other RNA
agagtgaaatgatttcaagta

SEQ ID NO: 69201 - RNA, 21 nt, synthetic construct
  source 1..21: mol_type = other RNA
agagtgaacaggcaaccttgg

SEQ ID NO: 69202 - RNA, 21 nt, synthetic construct
  source 1..21: mol_type = other RNA
agagtgaagaaacctttctca

SEQ ID NO: 69203 - RNA, 21 nt, synthetic construct
  source 1..21: mol_type = other RNA
agagtgaagctggacccttac

SEQ ID NO: 69204 - RNA, 21 nt, synthetic construct
  source 1..21: mol_type = other RNA
agagtgacagctgagtagcgc

SEQ ID NO: 69205 - RNA, 21 nt, synthetic construct
  source 1..21: mol_type = other RNA
agagtgcacattccttcttca

SEQ ID NO: 69206 - RNA, 21 nt, synthetic construct
  source 1..21: mol_type = other RNA
agagtgcagtatgtaggaaac

SEQ ID NO: 69207 - RNA, 21 nt, synthetic construct
  source 1..21: mol_type = other RNA
agagtgctgggtagagactgg

SEQ ID NO: 69208 - RNA, 21 nt, synthetic construct
  source 1..21: mol_type = other RNA
agagtggaaagagccagcctg

SEQ ID NO: 69209 - RNA, 21 nt, synthetic construct
  source 1..21: mol_type = other RNA
agagtggcctaaatcaggatg

SEQ ID NO: 69210 - RNA, 21 nt, synthetic construct
  source 1..21: mol_type = other RNA
agagtggctaatgtggcttgc

SEQ ID NO: 69211 - RNA, 21 nt, synthetic construct
  source 1..21: mol_type = other RNA
agagtgggcaaaaaagtcatg

SEQ ID NO: 69212 - RNA, 21 nt, synthetic construct
  source 1..21: mol_type = other RNA
agagtgggcccagcagaaggt

SEQ ID NO: 69213 - RNA, 21 nt, synthetic construct
  source 1..21: mol_type = other RNA
agagtgtgctgactagtacgt

SEQ ID NO: 69214 - RNA, 21 nt, synthetic construct
  source 1..21: mol_type = other RNA
agagtgtggctttaaggcgca

SEQ ID NO: 69215 - RNA, 21 nt, synthetic construct
  source 1..21: mol_type = other RNA
agagtgttcaaaagccccaaa

SEQ ID NO: 69216 - RNA, 21 nt, synthetic construct
  source 1..21: mol_type = other RNA
agagttaaaactcacaaaaag

SEQ ID NO: 69217 - RNA, 21 nt, synthetic construct
  source 1..21: mol_type = other RNA
agagttacttctggaaagttc

SEQ ID NO: 69218 - RNA, 21 nt, synthetic construct
  source 1..21: mol_type = other RNA
agagttcagcttacagtcatc

SEQ ID NO: 69219 - RNA, 21 nt, synthetic construct
  source 1..21: mol_type = other RNA
agagttccaactgtataaatg

SEQ ID NO: 69220 - RNA, 21 nt, synthetic construct
  source 1..21: mol_type = other RNA
agagttccacctccatcactg

SEQ ID NO: 69221 - RNA, 21 nt, synthetic construct
  source 1..21: mol_type = other RNA
agagttccatctgttatagtg

SEQ ID NO: 69222 - RNA, 21 nt, synthetic construct
  source 1..21: mol_type = other RNA
agagttcccctatactgtaac

SEQ ID NO: 69223 - RNA, 21 nt, synthetic construct
  source 1..21: mol_type = other RNA
agagttctgaaggctcagccc

SEQ ID NO: 69224 - RNA, 21 nt, synthetic construct
  source 1..21: mol_type = other RNA
agagttgctgacttcctggct

SEQ ID NO: 69225 - RNA, 21 nt, synthetic construct
  source 1..21: mol_type = other RNA
agagttggcacagccagtcag

SEQ ID NO: 69226 - RNA, 21 nt, synthetic construct
  source 1..21: mol_type = other RNA
agagttgtatctgtgatccct

SEQ ID NO: 69227 - RNA, 21 nt, synthetic construct
  source 1..21: mol_type = other RNA
agagtttgagaccagcgtggg

SEQ ID NO: 69228 - RNA, 21 nt, synthetic construct
  source 1..21: mol_type = other RNA
agagtttgcattacatgaatg

SEQ ID NO: 69229 - RNA, 21 nt, synthetic construct
  source 1..21: mol_type = other RNA
agagttttatagtcttagctc

SEQ ID NO: 69230 - RNA, 21 nt, synthetic construct
  source 1..21: mol_type = other RNA
agagttttccaataagttaac

SEQ ID NO: 69231 - RNA, 21 nt, synthetic construct
  source 1..21: mol_type = other RNA
agataaaacctggaatgggtt

SEQ ID NO: 69232 - RNA, 21 nt, synthetic construct
  source 1..21: mol_type = other RNA
agataaactagattaccttga

SEQ ID NO: 69233 - RNA, 21 nt, synthetic construct
  source 1..21: mol_type = other RNA
agataaactggaattcatcaa

SEQ ID NO: 69234 - RNA, 21 nt, synthetic construct
  source 1..21: mol_type = other RNA
agataaagagcaggtggaagg

SEQ ID NO: 69235 - RNA, 21 nt, synthetic construct
  source 1..21: mol_type = other RNA
agataaaggtaaggaaacccc

SEQ ID NO: 69236 - RNA, 21 nt, synthetic construct
  source 1..21: mol_type = other RNA
agataaatcagaaactgacag

SEQ ID NO: 69237 - RNA, 21 nt, synthetic construct
  source 1..21: mol_type = other RNA
agataaatccaacgaccggac

SEQ ID NO: 69238 - RNA, 21 nt, synthetic construct
  source 1..21: mol_type = other RNA
agataaattacccaaagactt

SEQ ID NO: 69239 - RNA, 21 nt, synthetic construct
  source 1..21: mol_type = other RNA
agataacaaagggttcttgga

SEQ ID NO: 69240 - RNA, 21 nt, synthetic construct
  source 1..21: mol_type = other RNA
agataacagtggttaggaaaa

SEQ ID NO: 69241 - RNA, 21 nt, synthetic construct
  source 1..21: mol_type = other RNA
agataaccaataagaagtgaa

SEQ ID NO: 69242 - RNA, 21 nt, synthetic construct
  source 1..21: mol_type = other RNA
agataactgggtgtgcacgtt

SEQ ID NO: 69243 - RNA, 21 nt, synthetic construct
  source 1..21: mol_type = other RNA
agataagatccaagtattgta

SEQ ID NO: 69244 - RNA, 21 nt, synthetic construct
  source 1..21: mol_type = other RNA
agataagcaaaattgacaaac

SEQ ID NO: 69245 - RNA, 21 nt, synthetic construct
  source 1..21: mol_type = other RNA
agataaggttgttcttggtta

SEQ ID NO: 69246 - RNA, 21 nt, synthetic construct
  source 1..21: mol_type = other RNA
agataagtagaaggtcaatct

SEQ ID NO: 69247 - RNA, 21 nt, synthetic construct
  source 1..21: mol_type = other RNA
agataatgctgttctctgtgt

SEQ ID NO: 69248 - RNA, 21 nt, synthetic construct
  source 1..21: mol_type = other RNA
agataatgttagaattcagga

SEQ ID NO: 69249 - RNA, 21 nt, synthetic construct
  source 1..21: mol_type = other RNA
agatacaactctgaccattgt

SEQ ID NO: 69250 - RNA, 21 nt, synthetic construct
  source 1..21: mol_type = other RNA
agatacacaagatctctatgc

SEQ ID NO: 69251 - RNA, 21 nt, synthetic construct
  source 1..21: mol_type = other RNA
agataccagaccctttatcgg

SEQ ID NO: 69252 - RNA, 21 nt, synthetic construct
  source 1..21: mol_type = other RNA
agataccttgaaaggatactg

SEQ ID NO: 69253 - RNA, 21 nt, synthetic construct
  source 1..21: mol_type = other RNA
agatacgttaaaggaaaagag

SEQ ID NO: 69254 - RNA, 21 nt, synthetic construct
  source 1..21: mol_type = other RNA
agatactacgcctagctgact

SEQ ID NO: 69255 - RNA, 21 nt, synthetic construct
  source 1..21: mol_type = other RNA
agatactcaacatcactagct

SEQ ID NO: 69256 - RNA, 21 nt, synthetic construct
  source 1..21: mol_type = other RNA
agatactcaatcagtggccag

SEQ ID NO: 69257 - RNA, 21 nt, synthetic construct
  source 1..21: mol_type = other RNA
agatactcatgcttgctccag

SEQ ID NO: 69258 - RNA, 21 nt, synthetic construct
  source 1..21: mol_type = other RNA
agatactgcactaaactagta

SEQ ID NO: 69259 - RNA, 21 nt, synthetic construct
  source 1..21: mol_type = other RNA
agatactggccatgttttatt

SEQ ID NO: 69260 - RNA, 21 nt, synthetic construct
  source 1..21: mol_type = other RNA
agatacttgattacaagggtg

SEQ ID NO: 69261 - RNA, 21 nt, synthetic construct
  source 1..21: mol_type = other RNA
agatagaaaagacaatagcta

SEQ ID NO: 69262 - RNA, 21 nt, synthetic construct
  source 1..21: mol_type = other RNA
agatagaaagcaccagggcct

SEQ ID NO: 69263 - RNA, 21 nt, synthetic construct
  source 1..21: mol_type = other RNA
agatagaccagatgcgtggtt

SEQ ID NO: 69264 - RNA, 21 nt, synthetic construct
  source 1..21: mol_type = other RNA
agatagactcttcagaggtct

SEQ ID NO: 69265 - RNA, 21 nt, synthetic construct
  source 1..21: mol_type = other RNA
agatagccccttatcaggaaa

SEQ ID NO: 69266 - RNA, 21 nt, synthetic construct
  source 1..21: mol_type = other RNA
agataggatgggcagactcct

SEQ ID NO: 69267 - RNA, 21 nt, synthetic construct
  source 1..21: mol_type = other RNA
agataggtcatgtacataaat

SEQ ID NO: 69268 - RNA, 21 nt, synthetic construct
  source 1..21: mol_type = other RNA
agatagtactgaccatctcag

SEQ ID NO: 69269 - RNA, 21 nt, synthetic construct
  source 1..21: mol_type = other RNA
agatagtctcttcctgtatat

SEQ ID NO: 69270 - RNA, 21 nt, synthetic construct
  source 1..21: mol_type = other RNA
agatagtggtttgaagcttca

SEQ ID NO: 69271 - RNA, 21 nt, synthetic construct
  source 1..21: mol_type = other RNA
agatatacaggaagagactat

SEQ ID NO: 69272 - RNA, 21 nt, synthetic construct
  source 1..21: mol_type = other RNA
agatatatgcattcccatgtt

SEQ ID NO: 69273 - RNA, 21 nt, synthetic construct
  source 1..21: mol_type = other RNA
agatatcaatctggatataac

SEQ ID NO: 69274 - RNA, 21 nt, synthetic construct
  source 1..21: mol_type = other RNA
agatatcacccagaccaagtt

SEQ ID NO: 69275 - RNA, 21 nt, synthetic construct
  source 1..21: mol_type = other RNA
agatatccacagtatgctgtt

SEQ ID NO: 69276 - RNA, 21 nt, synthetic construct
  source 1..21: mol_type = other RNA
agatatcccatataaggggaa

SEQ ID NO: 69277 - RNA, 21 nt, synthetic construct
  source 1..21: mol_type = other RNA
agatatgaaagaggagacatt

SEQ ID NO: 69278 - RNA, 21 nt, synthetic construct
  source 1..21: mol_type = other RNA
agatatgggagtccctgcttt

SEQ ID NO: 69279 - RNA, 21 nt, synthetic construct
  source 1..21: mol_type = other RNA
agatatgggttattcacccaa

SEQ ID NO: 69280 - RNA, 21 nt, synthetic construct
  source 1..21: mol_type = other RNA
agatatgtgtaggaaggaaca

SEQ ID NO: 69281 - RNA, 21 nt, synthetic construct
  source 1..21: mol_type = other RNA
agatattagctacaaaaggga

SEQ ID NO: 69282 - RNA, 21 nt, synthetic construct
  source 1..21: mol_type = other RNA
agatattatcctccaatgttt

SEQ ID NO: 69283 - RNA, 21 nt, synthetic construct
  source 1..21: mol_type = other RNA
agatatttcgcctagataaga

SEQ ID NO: 69284 - RNA, 21 nt, synthetic construct
  source 1..21: mol_type = other RNA
agatattttctgtcattctgc

SEQ ID NO: 69285 - RNA, 21 nt, synthetic construct
  source 1..21: mol_type = other RNA
agatcaaacgtgctttcctta

SEQ ID NO: 69286 - RNA, 21 nt, synthetic construct
  source 1..21: mol_type = other RNA
agatcaagcccttccttgctt

SEQ ID NO: 69287 - RNA, 21 nt, synthetic construct
  source 1..21: mol_type = other RNA
agatcaagctcgccgtctccc

SEQ ID NO: 69288 - RNA, 21 nt, synthetic construct
  source 1..21: mol_type = other RNA
agatcaagtatttcctatgaa

SEQ ID NO: 69289 - RNA, 21 nt, synthetic construct
  source 1..21: mol_type = other RNA
agatcaagtcctttccagagg

SEQ ID NO: 69290 - RNA, 21 nt, synthetic construct
  source 1..21: mol_type = other RNA
agatcaattgaccaaacatgt

SEQ ID NO: 69291 - RNA, 21 nt, synthetic construct
  source 1..21: mol_type = other RNA
agatcacaaggactggcttca

SEQ ID NO: 69292 - RNA, 21 nt, synthetic construct
  source 1..21: mol_type = other RNA
agatcacaaggtcagaagttt

SEQ ID NO: 69293 - RNA, 21 nt, synthetic construct
  source 1..21: mol_type = other RNA
agatcaccaggggctggggga

SEQ ID NO: 69294 - RNA, 21 nt, synthetic construct
  source 1..21: mol_type = other RNA
agatcacgaggtcgagagttc

SEQ ID NO: 69295 - RNA, 21 nt, synthetic construct
  source 1..21: mol_type = other RNA
agatcacgccactgcattccg

SEQ ID NO: 69296 - RNA, 21 nt, synthetic construct
  source 1..21: mol_type = other RNA
agatcagtaaaattcccttca

SEQ ID NO: 69297 - RNA, 21 nt, synthetic construct
  source 1..21: mol_type = other RNA
agatcagtaacaaataagaag

SEQ ID NO: 69298 - RNA, 21 nt, synthetic construct
  source 1..21: mol_type = other RNA
agatcatacacctggatcaag

SEQ ID NO: 69299 - RNA, 21 nt, synthetic construct
  source 1..21: mol_type = other RNA
agatcatttagtaagtgtgag

SEQ ID NO: 69300 - RNA, 21 nt, synthetic construct
  source 1..21: mol_type = other RNA
agatcatttcaaaccaatgtt

SEQ ID NO: 69301 - RNA, 21 nt, synthetic construct
  source 1..21: mol_type = other RNA
agatcatttcacttgattact

SEQ ID NO: 69302 - RNA, 21 nt, synthetic construct
  source 1..21: mol_type = other RNA
agatccaagtattgtatcaat

SEQ ID NO: 69303 - RNA, 21 nt, synthetic construct
  source 1..21: mol_type = other RNA
agatcccaaaaaggtttttat

SEQ ID NO: 69304 - RNA, 21 nt, synthetic construct
  source 1..21: mol_type = other RNA
agatcccaattacttccagtg

SEQ ID NO: 69305 - RNA, 21 nt, synthetic construct
  source 1..21: mol_type = other RNA
agatcctcacatcagttacca

SEQ ID NO: 69306 - RNA, 21 nt, synthetic construct
  source 1..21: mol_type = other RNA
agatcctgaggaagctaatca

SEQ ID NO: 69307 - RNA, 21 nt, synthetic construct
  source 1..21: mol_type = other RNA
agatcctggattgctagtgtc

SEQ ID NO: 69308 - RNA, 21 nt, synthetic construct
  source 1..21: mol_type = other RNA
agatctaaattttaagtgcac

SEQ ID NO: 69309 - RNA, 21 nt, synthetic construct
  source 1..21: mol_type = other RNA
agatctaacaaacgcattgtg

SEQ ID NO: 69310 - RNA, 21 nt, synthetic construct
  source 1..21: mol_type = other RNA
agatctagtgaagtcaatttc

SEQ ID NO: 69311 - RNA, 21 nt, synthetic construct
  source 1..21: mol_type = other RNA
agatctcaaacagcctaattg

SEQ ID NO: 69312 - RNA, 21 nt, synthetic construct
  source 1..21: mol_type = other RNA
agatctcattttgaaaaacag

SEQ ID NO: 69313 - RNA, 21 nt, synthetic construct
  source 1..21: mol_type = other RNA
agatctctatgcagaaatcta

SEQ ID NO: 69314 - RNA, 21 nt, synthetic construct
  source 1..21: mol_type = other RNA
agatctctgacattggttatt

SEQ ID NO: 69315 - RNA, 21 nt, synthetic construct
  source 1..21: mol_type = other RNA
agatctcttttcctttaacgt

SEQ ID NO: 69316 - RNA, 21 nt, synthetic construct
  source 1..21: mol_type = other RNA
agatctgaaattgacttcact

SEQ ID NO: 69317 - RNA, 21 nt, synthetic construct
  source 1..21: mol_type = other RNA
agatctgagaagactaagcag

SEQ ID NO: 69318 - RNA, 21 nt, synthetic construct
  source 1..21: mol_type = other RNA
agatctgagagatagaaagca

SEQ ID NO: 69319 - RNA, 21 nt, synthetic construct
  source 1..21: mol_type = other RNA
agatctgagtttgctctgcaa

SEQ ID NO: 69320 - RNA, 21 nt, synthetic construct
  source 1..21: mol_type = other RNA
agatctgctgtaagctggtaa

SEQ ID NO: 69321 - RNA, 21 nt, synthetic construct
  source 1..21: mol_type = other RNA
agatctgcttgcagacaataa

SEQ ID NO: 69322 - RNA, 21 nt, synthetic construct
  source 1..21: mol_type = other RNA
agatctgggataatgctatca

SEQ ID NO: 69323 - RNA, 21 nt, synthetic construct
  source 1..21: mol_type = other RNA
agatctgtctttggcccatat

SEQ ID NO: 69324 - RNA, 21 nt, synthetic construct
  source 1..21: mol_type = other RNA
agatctgtggactttaggctg

SEQ ID NO: 69325 - RNA, 21 nt, synthetic construct
  source 1..21: mol_type = other RNA
agatctgttgcagtccccggt

SEQ ID NO: 69326 - RNA, 21 nt, synthetic construct
  source 1..21: mol_type = other RNA
agatctgtttttcaaaatgag

SEQ ID NO: 69327 - RNA, 21 nt, synthetic construct
  source 1..21: mol_type = other RNA
agatcttatggaatagttgat

SEQ ID NO: 69328 - RNA, 21 nt, synthetic construct
  source 1..21: mol_type = other RNA
agatcttggccgaatgtggtg

SEQ ID NO: 69329 - RNA, 21 nt, synthetic construct
  source 1..21: mol_type = other RNA
agatcttgtgtatcttttgtt

SEQ ID NO: 69330 - RNA, 21 nt, synthetic construct
  source 1..21: mol_type = other RNA
agatctttttgtgtatatggt

SEQ ID NO: 69331 - RNA, 21 nt, synthetic construct
  source 1..21: mol_type = other RNA
agatgaaactaaatgtgagca

SEQ ID NO: 69332 - RNA, 21 nt, synthetic construct
  source 1..21: mol_type = other RNA
agatgaagcagggaaatggag

SEQ ID NO: 69333 - RNA, 21 nt, synthetic construct
  source 1..21: mol_type = other RNA
agatgaagtatagaaaggaga

SEQ ID NO: 69334 - RNA, 21 nt, synthetic construct
  source 1..21: mol_type = other RNA
agatgaatctgcaactatcaa

SEQ ID NO: 69335 - RNA, 21 nt, synthetic construct
  source 1..21: mol_type = other RNA
agatgaatgaacaaaatgtgg

SEQ ID NO: 69336 - RNA, 21 nt, synthetic construct
  source 1..21: mol_type = other RNA
agatgaatgagcaaggtcgtt

SEQ ID NO: 69337 - RNA, 21 nt, synthetic construct
  source 1..21: mol_type = other RNA
agatgaatggataaggaaaat

SEQ ID NO: 69338 - RNA, 21 nt, synthetic construct
  source 1..21: mol_type = other RNA
agatgacatttgcttttcctg

SEQ ID NO: 69339 - RNA, 21 nt, synthetic construct
  source 1..21: mol_type = other RNA
agatgacgaaagtgaagccca

SEQ ID NO: 69340 - RNA, 21 nt, synthetic construct
  source 1..21: mol_type = other RNA
agatgacttcactggagaatt

SEQ ID NO: 69341 - RNA, 21 nt, synthetic construct
  source 1..21: mol_type = other RNA
agatgagaaatacttggacag

SEQ ID NO: 69342 - RNA, 21 nt, synthetic construct
  source 1..21: mol_type = other RNA
agatgagactcttaatattga

SEQ ID NO: 69343 - RNA, 21 nt, synthetic construct
  source 1..21: mol_type = other RNA
agatgagagtggcctaaatca

SEQ ID NO: 69344 - RNA, 21 nt, synthetic construct
  source 1..21: mol_type = other RNA
agatgagcccaggagttgcat

SEQ ID NO: 69345 - RNA, 21 nt, synthetic construct
  source 1..21: mol_type = other RNA
agatgaggtctcagccttttc

SEQ ID NO: 69346 - RNA, 21 nt, synthetic construct
  source 1..21: mol_type = other RNA
agatgaggttttacgatgttg

SEQ ID NO: 69347 - RNA, 21 nt, synthetic construct
  source 1..21: mol_type = other RNA
agatgatcctcccgccttggc

SEQ ID NO: 69348 - RNA, 21 nt, synthetic construct
  source 1..21: mol_type = other RNA
agatgatctaaatggtgtgaa

SEQ ID NO: 69349 - RNA, 21 nt, synthetic construct
  source 1..21: mol_type = other RNA
agatgatgaacaaaggcagga

SEQ ID NO: 69350 - RNA, 21 nt, synthetic construct
  source 1..21: mol_type = other RNA
agatgatgttttgaacgaatg

SEQ ID NO: 69351 - RNA, 21 nt, synthetic construct
  source 1..21: mol_type = other RNA
agatgattcgcattgctaatt

SEQ ID NO: 69352 - RNA, 21 nt, synthetic construct
  source 1..21: mol_type = other RNA
agatgcagaaaaagcattttt

SEQ ID NO: 69353 - RNA, 21 nt, synthetic construct
  source 1..21: mol_type = other RNA
agatgcagttgcttactctaa

SEQ ID NO: 69354 - RNA, 21 nt, synthetic construct
  source 1..21: mol_type = other RNA
agatgcataagttctagagat

SEQ ID NO: 69355 - RNA, 21 nt, synthetic construct
  source 1..21: mol_type = other RNA
agatgcataccaagcccggca

SEQ ID NO: 69356 - RNA, 21 nt, synthetic construct
  source 1..21: mol_type = other RNA
agatgcattctgtcacataga

SEQ ID NO: 69357 - RNA, 21 nt, synthetic construct
  source 1..21: mol_type = other RNA
agatgccacaaatggagtgac

SEQ ID NO: 69358 - RNA, 21 nt, synthetic construct
  source 1..21: mol_type = other RNA
agatgccatttataatagcat

SEQ ID NO: 69359 - RNA, 21 nt, synthetic construct
  source 1..21: mol_type = other RNA
agatgcctagaaaggaattgt

SEQ ID NO: 69360 - RNA, 21 nt, synthetic construct
  source 1..21: mol_type = other RNA
agatgcctatgaaatcttgaa

SEQ ID NO: 69361 - RNA, 21 nt, synthetic construct
  source 1..21: mol_type = other RNA
agatgcctcgaaggcctgctt

SEQ ID NO: 69362 - RNA, 21 nt, synthetic construct
  source 1..21: mol_type = other RNA
agatgcctgtgcttgtctctc

SEQ ID NO: 69363 - RNA, 21 nt, synthetic construct
  source 1..21: mol_type = other RNA
agatgcgtggttcacacctgt

SEQ ID NO: 69364 - RNA, 21 nt, synthetic construct
  source 1..21: mol_type = other RNA
agatgctaaacagtacagtag

SEQ ID NO: 69365 - RNA, 21 nt, synthetic construct
  source 1..21: mol_type = other RNA
agatgctattcaagacaagca

SEQ ID NO: 69366 - RNA, 21 nt, synthetic construct
  source 1..21: mol_type = other RNA
agatgctccctctatggcagg

SEQ ID NO: 69367 - RNA, 21 nt, synthetic construct
  source 1..21: mol_type = other RNA
agatgctgaacttgtcacaaa

SEQ ID NO: 69368 - RNA, 21 nt, synthetic construct
  source 1..21: mol_type = other RNA
agatgctggtggagtattcta

SEQ ID NO: 69369 - RNA, 21 nt, synthetic construct
  source 1..21: mol_type = other RNA
agatgcttctagccaaagcaa

SEQ ID NO: 69370 - RNA, 21 nt, synthetic construct
  source 1..21: mol_type = other RNA
agatggaaagtggactatgta

SEQ ID NO: 69371 - RNA, 21 nt, synthetic construct
  source 1..21: mol_type = other RNA
agatggaactctattttccta

SEQ ID NO: 69372 - RNA, 21 nt, synthetic construct
  source 1..21: mol_type = other RNA
agatggacaaattaccatgtt

SEQ ID NO: 69373 - RNA, 21 nt, synthetic construct
  source 1..21: mol_type = other RNA
agatggacactgcagatgaat

SEQ ID NO: 69374 - RNA, 21 nt, synthetic construct
  source 1..21: mol_type = other RNA
agatggagttacgctgccaaa

SEQ ID NO: 69375 - RNA, 21 nt, synthetic construct
  source 1..21: mol_type = other RNA
agatggatttttctgtttctg

SEQ ID NO: 69376 - RNA, 21 nt, synthetic construct
  source 1..21: mol_type = other RNA
agatggcaaacagactgagcc

SEQ ID NO: 69377 - RNA, 21 nt, synthetic construct
  source 1..21: mol_type = other RNA
agatggcaagtttccattctc

SEQ ID NO: 69378 - RNA, 21 nt, synthetic construct
  source 1..21: mol_type = other RNA
agatggcacataccatggaat

SEQ ID NO: 69379 - RNA, 21 nt, synthetic construct
  source 1..21: mol_type = other RNA
agatggccccaaaattacccc

SEQ ID NO: 69380 - RNA, 21 nt, synthetic construct
  source 1..21: mol_type = other RNA
agatggcctccctcactaagt

SEQ ID NO: 69381 - RNA, 21 nt, synthetic construct
  source 1..21: mol_type = other RNA
agatggcgtgcgcctgtaatc

SEQ ID NO: 69382 - RNA, 21 nt, synthetic construct
  source 1..21: mol_type = other RNA
agatggcttaggatcaccaaa

SEQ ID NO: 69383 - RNA, 21 nt, synthetic construct
  source 1..21: mol_type = other RNA
agatgggaaagtattcccaag

SEQ ID NO: 69384 - RNA, 21 nt, synthetic construct
  source 1..21: mol_type = other RNA
agatgggaagaaaaaataaag

SEQ ID NO: 69385 - RNA, 21 nt, synthetic construct
  source 1..21: mol_type = other RNA
agatgggacttcactagtggg

SEQ ID NO: 69386 - RNA, 21 nt, synthetic construct
  source 1..21: mol_type = other RNA
agatggggacttgctctcttg

SEQ ID NO: 69387 - RNA, 21 nt, synthetic construct
  source 1..21: mol_type = other RNA
agatggggattgagggttaga

SEQ ID NO: 69388 - RNA, 21 nt, synthetic construct
  source 1..21: mol_type = other RNA
agatggggtctcattgtgttg

SEQ ID NO: 69389 - RNA, 21 nt, synthetic construct
  source 1..21: mol_type = other RNA
agatggggtttgtccatgttg

SEQ ID NO: 69390 - RNA, 21 nt, synthetic construct
  source 1..21: mol_type = other RNA
agatggtaaaacaaattccct

SEQ ID NO: 69391 - RNA, 21 nt, synthetic construct
  source 1..21: mol_type = other RNA
agatggtaaattggtcctgga

SEQ ID NO: 69392 - RNA, 21 nt, synthetic construct
  source 1..21: mol_type = other RNA
agatggtagtcaacacttttc

SEQ ID NO: 69393 - RNA, 21 nt, synthetic construct
  source 1..21: mol_type = other RNA
agatggtcagtactatcttcc

SEQ ID NO: 69394 - RNA, 21 nt, synthetic construct
  source 1..21: mol_type = other RNA
agatggtccttttttactgac

SEQ ID NO: 69395 - RNA, 21 nt, synthetic construct
  source 1..21: mol_type = other RNA
agatggtgatacctcttacta

SEQ ID NO: 69396 - RNA, 21 nt, synthetic construct
  source 1..21: mol_type = other RNA
agatggtgctgatttaaaatt

SEQ ID NO: 69397 - RNA, 21 nt, synthetic construct
  source 1..21: mol_type = other RNA
agatggtgggagaggcatgcc

SEQ ID NO: 69398 - RNA, 21 nt, synthetic construct
  source 1..21: mol_type = other RNA
agatggttggaagtttctgga

SEQ ID NO: 69399 - RNA, 21 nt, synthetic construct
  source 1..21: mol_type = other RNA
agatgtactggaagtgtaaca

SEQ ID NO: 69400 - RNA, 21 nt, synthetic construct
  source 1..21: mol_type = other RNA
agatgtagagaaacaggatta

SEQ ID NO: 69401 - RNA, 21 nt, synthetic construct
  source 1..21: mol_type = other RNA
agatgtcaacattaagggaaa

SEQ ID NO: 69402 - RNA, 21 nt, synthetic construct
  source 1..21: mol_type = other RNA
agatgtctccattttgccagc

SEQ ID NO: 69403 - RNA, 21 nt, synthetic construct
  source 1..21: mol_type = other RNA
agatgtcttttaacttgcttt

SEQ ID NO: 69404 - RNA, 21 nt, synthetic construct
  source 1..21: mol_type = other RNA
agatgtgagcccccacgcccg

SEQ ID NO: 69405 - RNA, 21 nt, synthetic construct
  source 1..21: mol_type = other RNA
agatgtgcttaatcttcacac

SEQ ID NO: 69406 - RNA, 21 nt, synthetic construct
  source 1..21: mol_type = other RNA
agatgtgtaattgtaccttgg

SEQ ID NO: 69407 - RNA, 21 nt, synthetic construct
  source 1..21: mol_type = other RNA
agatgtgtaccaaaagtcctg

SEQ ID NO: 69408 - RNA, 21 nt, synthetic construct
  source 1..21: mol_type = other RNA
agatgttatgccccctcttct

SEQ ID NO: 69409 - RNA, 21 nt, synthetic construct
  source 1..21: mol_type = other RNA
agatgttgcggtgagcagaga

SEQ ID NO: 69410 - RNA, 21 nt, synthetic construct
  source 1..21: mol_type = other RNA
agatgttttacacatgtcagc

SEQ ID NO: 69411 - RNA, 21 nt, synthetic construct
  source 1..21: mol_type = other RNA
agatgttttcagttgcatgaa

SEQ ID NO: 69412 - RNA, 21 nt, synthetic construct
  source 1..21: mol_type = other RNA
agattaaataacttccatgag

SEQ ID NO: 69413 - RNA, 21 nt, synthetic construct
  source 1..21: mol_type = other RNA
agattaaatacagagcacaga

SEQ ID NO: 69414 - RNA, 21 nt, synthetic construct
  source 1..21: mol_type = other RNA
agattaaataccacctgaaat

SEQ ID NO: 69415 - RNA, 21 nt, synthetic construct
  source 1..21: mol_type = other RNA
agattaagcacatctgtcttg

SEQ ID NO: 69416 - RNA, 21 nt, synthetic construct
  source 1..21: mol_type = other RNA
agattaagcatagtttgagta

SEQ ID NO: 69417 - RNA, 21 nt, synthetic construct
  source 1..21: mol_type = other RNA
agattaaggctggaggatggc

SEQ ID NO: 69418 - RNA, 21 nt, synthetic construct
  source 1..21: mol_type = other RNA
agattaatccttgtggtctta

SEQ ID NO: 69419 - RNA, 21 nt, synthetic construct
  source 1..21: mol_type = other RNA
agattaatgtaggtgtctgat

SEQ ID NO: 69420 - RNA, 21 nt, synthetic construct
  source 1..21: mol_type = other RNA
agattaattcagtcaacacca

SEQ ID NO: 69421 - RNA, 21 nt, synthetic construct
  source 1..21: mol_type = other RNA
agattacaaaagaacaggact

SEQ ID NO: 69422 - RNA, 21 nt, synthetic construct
  source 1..21: mol_type = other RNA
agattacagatgtgagccccc

SEQ ID NO: 69423 - RNA, 21 nt, synthetic construct
  source 1..21: mol_type = other RNA
agattacatagcaaggaagca

SEQ ID NO: 69424 - RNA, 21 nt, synthetic construct
  source 1..21: mol_type = other RNA
agattactggatacaaggtca

SEQ ID NO: 69425 - RNA, 21 nt, synthetic construct
  source 1..21: mol_type = other RNA
agattagaaaattagctgact

SEQ ID NO: 69426 - RNA, 21 nt, synthetic construct
  source 1..21: mol_type = other RNA
agattagcgaaagggattctg

SEQ ID NO: 69427 - RNA, 21 nt, synthetic construct
  source 1..21: mol_type = other RNA
agattagcttttacgaggaca

SEQ ID NO: 69428 - RNA, 21 nt, synthetic construct
  source 1..21: mol_type = other RNA
agattaggaaacagattgatt

SEQ ID NO: 69429 - RNA, 21 nt, synthetic construct
  source 1..21: mol_type = other RNA
agattaggcagaaccacctgg

SEQ ID NO: 69430 - RNA, 21 nt, synthetic construct
  source 1..21: mol_type = other RNA
agattataggtgtgagccact

SEQ ID NO: 69431 - RNA, 21 nt, synthetic construct
  source 1..21: mol_type = other RNA
agattatatggtctaccatgt

SEQ ID NO: 69432 - RNA, 21 nt, synthetic construct
  source 1..21: mol_type = other RNA
agattatgttccacatgttac

SEQ ID NO: 69433 - RNA, 21 nt, synthetic construct
  source 1..21: mol_type = other RNA
agattcaacaaaactgggggc

SEQ ID NO: 69434 - RNA, 21 nt, synthetic construct
  source 1..21: mol_type = other RNA
agattcaagaaaccacagagc

SEQ ID NO: 69435 - RNA, 21 nt, synthetic construct
  source 1..21: mol_type = other RNA
agattcaccaattgttaacat

SEQ ID NO: 69436 - RNA, 21 nt, synthetic construct
  source 1..21: mol_type = other RNA
agattcacgcacagggagata

SEQ ID NO: 69437 - RNA, 21 nt, synthetic construct
  source 1..21: mol_type = other RNA
agattcatatgctttgagcta

SEQ ID NO: 69438 - RNA, 21 nt, synthetic construct
  source 1..21: mol_type = other RNA
agattcatcttgacttcactt

SEQ ID NO: 69439 - RNA, 21 nt, synthetic construct
  source 1..21: mol_type = other RNA
agattcccccttatgtgtgta

SEQ ID NO: 69440 - RNA, 21 nt, synthetic construct
  source 1..21: mol_type = other RNA
agattccctctggccttctat

SEQ ID NO: 69441 - RNA, 21 nt, synthetic construct
  source 1..21: mol_type = other RNA
agattccgtctcaaaaaatta

SEQ ID NO: 69442 - RNA, 21 nt, synthetic construct
  source 1..21: mol_type = other RNA
agattccttttttatgtgctt

SEQ ID NO: 69443 - RNA, 21 nt, synthetic construct
  source 1..21: mol_type = other RNA
agattctctgtctctgttgcc

SEQ ID NO: 69444 - RNA, 21 nt, synthetic construct
  source 1..21: mol_type = other RNA
agattctctttagggaagata

SEQ ID NO: 69445 - RNA, 21 nt, synthetic construct
  source 1..21: mol_type = other RNA
agattctgtctctacaaaaaa

SEQ ID NO: 69446 - RNA, 21 nt, synthetic construct
  source 1..21: mol_type = other RNA
agattcttgtcatgaatgaat

SEQ ID NO: 69447 - RNA, 21 nt, synthetic construct
  source 1..21: mol_type = other RNA
agattgaaaatggtttaggct

SEQ ID NO: 69448 - RNA, 21 nt, synthetic construct
  source 1..21: mol_type = other RNA
agattgaaatctaggcatata

SEQ ID NO: 69449 - RNA, 21 nt, synthetic construct
  source 1..21: mol_type = other RNA
agattgaccttctacttatct

SEQ ID NO: 69450 - RNA, 21 nt, synthetic construct
  source 1..21: mol_type = other RNA
agattgaccttgtatccagta

SEQ ID NO: 69451 - RNA, 21 nt, synthetic construct
  source 1..21: mol_type = other RNA
agattgatatctgagtgttgt

SEQ ID NO: 69452 - RNA, 21 nt, synthetic construct
  source 1..21: mol_type = other RNA
agattgccccattgcactcca

SEQ ID NO: 69453 - RNA, 21 nt, synthetic construct
  source 1..21: mol_type = other RNA
agattgcttgagagagataaa

SEQ ID NO: 69454 - RNA, 21 nt, synthetic construct
  source 1..21: mol_type = other RNA
agattggctttagatttatca

SEQ ID NO: 69455 - RNA, 21 nt, synthetic construct
  source 1..21: mol_type = other RNA
agattgggaaaatcttggaac

SEQ ID NO: 69456 - RNA, 21 nt, synthetic construct
  source 1..21: mol_type = other RNA
agattgggcttttcatatacg

SEQ ID NO: 69457 - RNA, 21 nt, synthetic construct
  source 1..21: mol_type = other RNA
agattgtcgttgagtacctct

SEQ ID NO: 69458 - RNA, 21 nt, synthetic construct
  source 1..21: mol_type = other RNA
agattgtgccagtgaactcca

SEQ ID NO: 69459 - RNA, 21 nt, synthetic construct
  source 1..21: mol_type = other RNA
agattgtgtgatttcatatga

SEQ ID NO: 69460 - RNA, 21 nt, synthetic construct
  source 1..21: mol_type = other RNA
agattgttttaggtagtcttg

SEQ ID NO: 69461 - RNA, 21 nt, synthetic construct
  source 1..21: mol_type = other RNA
agattgttttgttgctattgt

SEQ ID NO: 69462 - RNA, 21 nt, synthetic construct
  source 1..21: mol_type = other RNA
agatttacccctactttttgt

SEQ ID NO: 69463 - RNA, 21 nt, synthetic construct
  source 1..21: mol_type = other RNA
agatttactaaactgaacgaa

SEQ ID NO: 69464 - RNA, 21 nt, synthetic construct
  source 1..21: mol_type = other RNA
agatttatcaatagcagtgct

SEQ ID NO: 69465 - RNA, 21 nt, synthetic construct
  source 1..21: mol_type = other RNA
agatttatttttacccgtgga

SEQ ID NO: 69466 - RNA, 21 nt, synthetic construct
  source 1..21: mol_type = other RNA
agatttcaatctggaatgcat

SEQ ID NO: 69467 - RNA, 21 nt, synthetic construct
  source 1..21: mol_type = other RNA
agatttcaggtggtatttaat

SEQ ID NO: 69468 - RNA, 21 nt, synthetic construct
  source 1..21: mol_type = other RNA
agatttcataggcatctctcc

SEQ ID NO: 69469 - RNA, 21 nt, synthetic construct
  source 1..21: mol_type = other RNA
agatttctactggggtcttag

SEQ ID NO: 69470 - RNA, 21 nt, synthetic construct
  source 1..21: mol_type = other RNA
agatttctgcatagagatctt

SEQ ID NO: 69471 - RNA, 21 nt, synthetic construct
  source 1..21: mol_type = other RNA
agatttctttttactcatgtc

SEQ ID NO: 69472 - RNA, 21 nt, synthetic construct
  source 1..21: mol_type = other RNA
agatttgagtcttgctctctt

SEQ ID NO: 69473 - RNA, 21 nt, synthetic construct
  source 1..21: mol_type = other RNA
agatttgatcctggaatagta

SEQ ID NO: 69474 - RNA, 21 nt, synthetic construct
  source 1..21: mol_type = other RNA
agatttgccaatcaataattc

SEQ ID NO: 69475 - RNA, 21 nt, synthetic construct
  source 1..21: mol_type = other RNA
agattttaggtcatttttcac

SEQ ID NO: 69476 - RNA, 21 nt, synthetic construct
  source 1..21: mol_type = other RNA
agattttcccaaagatagact

SEQ ID NO: 69477 - RNA, 21 nt, synthetic construct
  source 1..21: mol_type = other RNA
agattttcccaatctctggta

SEQ ID NO: 69478 - RNA, 21 nt, synthetic construct
  source 1..21: mol_type = other RNA
agatttttcctttgcctaagt

SEQ ID NO: 69479 - RNA, 21 nt, synthetic construct
  source 1..21: mol_type = other RNA
agattttttgttgttggtttg

SEQ ID NO: 69480 - RNA, 21 nt, synthetic construct
  source 1..21: mol_type = other RNA
agcaaaaatacagctccaaag

SEQ ID NO: 69481 - RNA, 21 nt, synthetic construct
  source 1..21: mol_type = other RNA
agcaaaacatatgtcagatgg

SEQ ID NO: 69482 - RNA, 21 nt, synthetic construct
  source 1..21: mol_type = other RNA
agcaaaagcaaaattctaaca

SEQ ID NO: 69483 - RNA, 21 nt, synthetic construct
  source 1..21: mol_type = other RNA
agcaaaagcaattattagttg

SEQ ID NO: 69484 - RNA, 21 nt, synthetic construct
  source 1..21: mol_type = other RNA
agcaaaagcaccactgagagg

SEQ ID NO: 69485 - RNA, 21 nt, synthetic construct
  source 1..21: mol_type = other RNA
agcaaaatggaagtgctgggc

SEQ ID NO: 69486 - RNA, 21 nt, synthetic construct
  source 1..21: mol_type = other RNA
agcaaaattctaacaagaagc

SEQ ID NO: 69487 - RNA, 21 nt, synthetic construct
  source 1..21: mol_type = other RNA
agcaaaattgacaaacccttg

SEQ ID NO: 69488 - RNA, 21 nt, synthetic construct
  source 1..21: mol_type = other RNA
agcaaaattttaaatcagcac

SEQ ID NO: 69489 - RNA, 21 nt, synthetic construct
  source 1..21: mol_type = other RNA
agcaaacaaacacactgggta

SEQ ID NO: 69490 - RNA, 21 nt, synthetic construct
  source 1..21: mol_type = other RNA
agcaaacatttatggaattgc

SEQ ID NO: 69491 - RNA, 21 nt, synthetic construct
  source 1..21: mol_type = other RNA
agcaaaccagacatttctcat

SEQ ID NO: 69492 - RNA, 21 nt, synthetic construct
  source 1..21: mol_type = other RNA
agcaaacgtgcacacccagtt

SEQ ID NO: 69493 - RNA, 21 nt, synthetic construct
  source 1..21: mol_type = other RNA
agcaaactactgatagcgaaa

SEQ ID NO: 69494 - RNA, 21 nt, synthetic construct
  source 1..21: mol_type = other RNA
agcaaactcagatctgagaga

SEQ ID NO: 69495 - RNA, 21 nt, synthetic construct
  source 1..21: mol_type = other RNA
agcaaactgaatcagacaaca

SEQ ID NO: 69496 - RNA, 21 nt, synthetic construct
  source 1..21: mol_type = other RNA
agcaaagaggcaaaactcctg

SEQ ID NO: 69497 - RNA, 21 nt, synthetic construct
  source 1..21: mol_type = other RNA
agcaaagatatgggttattca

SEQ ID NO: 69498 - RNA, 21 nt, synthetic construct
  source 1..21: mol_type = other RNA
agcaaagcaagaaaaagaaat

SEQ ID NO: 69499 - RNA, 21 nt, synthetic construct
  source 1..21: mol_type = other RNA
agcaaaggattcgggggagag

SEQ ID NO: 69500 - RNA, 21 nt, synthetic construct
  source 1..21: mol_type = other RNA
agcaaatcagaaaaggctgag

SEQ ID NO: 69501 - RNA, 21 nt, synthetic construct
  source 1..21: mol_type = other RNA
agcaaatctctagaacttatg

SEQ ID NO: 69502 - RNA, 21 nt, synthetic construct
  source 1..21: mol_type = other RNA
agcaaatgtcatcttctctct

SEQ ID NO: 69503 - RNA, 21 nt, synthetic construct
  source 1..21: mol_type = other RNA
agcaaatgtgactagaagaaa

SEQ ID NO: 69504 - RNA, 21 nt, synthetic construct
  source 1..21: mol_type = other RNA
agcaacaaaacaatctaattc

SEQ ID NO: 69505 - RNA, 21 nt, synthetic construct
  source 1..21: mol_type = other RNA
agcaacaccagatactcatgc

SEQ ID NO: 69506 - RNA, 21 nt, synthetic construct
  source 1..21: mol_type = other RNA
agcaacactaaagatttgcca

SEQ ID NO: 69507 - RNA, 21 nt, synthetic construct
  source 1..21: mol_type = other RNA
agcaacaggaagaggcagcta

SEQ ID NO: 69508 - RNA, 21 nt, synthetic construct
  source 1..21: mol_type = other RNA
agcaacatgctaagtgtttag

SEQ ID NO: 69509 - RNA, 21 nt, synthetic construct
  source 1..21: mol_type = other RNA
agcaacctcatttgcagagca

SEQ ID NO: 69510 - RNA, 21 nt, synthetic construct
  source 1..21: mol_type = other RNA
agcaaccttttaggtgcccca

SEQ ID NO: 69511 - RNA, 21 nt, synthetic construct
  source 1..21: mol_type = other RNA
agcaacggaaatgagtgagcc

SEQ ID NO: 69512 - RNA, 21 nt, synthetic construct
  source 1..21: mol_type = other RNA
agcaactactatttcgcaaag

SEQ ID NO: 69513 - RNA, 21 nt, synthetic construct
  source 1..21: mol_type = other RNA
agcaactcttggccattttct

SEQ ID NO: 69514 - RNA, 21 nt, synthetic construct
  source 1..21: mol_type = other RNA
agcaactgcatcttcttttac

SEQ ID NO: 69515 - RNA, 21 nt, synthetic construct
  source 1..21: mol_type = other RNA
agcaactgttttttcctccct

SEQ ID NO: 69516 - RNA, 21 nt, synthetic construct
  source 1..21: mol_type = other RNA
agcaacttgaaggcaatgtag

SEQ ID NO: 69517 - RNA, 21 nt, synthetic construct
  source 1..21: mol_type = other RNA
agcaacttgatcagggatttg

SEQ ID NO: 69518 - RNA, 21 nt, synthetic construct
  source 1..21: mol_type = other RNA
agcaacttgcagaagagtgaa

SEQ ID NO: 69519 - RNA, 21 nt, synthetic construct
  source 1..21: mol_type = other RNA
agcaagaccctgtctctaaaa

SEQ ID NO: 69520 - RNA, 21 nt, synthetic construct
  source 1..21: mol_type = other RNA
agcaagactcaaatctcaaaa

SEQ ID NO: 69521 - RNA, 21 nt, synthetic construct
  source 1..21: mol_type = other RNA
agcaagactttatgtggaaaa

SEQ ID NO: 69522 - RNA, 21 nt, synthetic construct
  source 1..21: mol_type = other RNA
agcaagattactggatacaag

SEQ ID NO: 69523 - RNA, 21 nt, synthetic construct
  source 1..21: mol_type = other RNA
agcaagcaacaccagatactc

SEQ ID NO: 69524 - RNA, 21 nt, synthetic construct
  source 1..21: mol_type = other RNA
agcaagcacgttagcatcacc

SEQ ID NO: 69525 - RNA, 21 nt, synthetic construct
  source 1..21: mol_type = other RNA
agcaagcagtaaatatactga

SEQ ID NO: 69526 - RNA, 21 nt, synthetic construct
  source 1..21: mol_type = other RNA
agcaagcatgagtatctggtg

SEQ ID NO: 69527 - RNA, 21 nt, synthetic construct
  source 1..21: mol_type = other RNA
agcaagccttggcaaggggaa

SEQ ID NO: 69528 - RNA, 21 nt, synthetic construct
  source 1..21: mol_type = other RNA
agcaagctaataatttatcag

SEQ ID NO: 69529 - RNA, 21 nt, synthetic construct
  source 1..21: mol_type = other RNA
agcaaggaagcagaatgtcca

SEQ ID NO: 69530 - RNA, 21 nt, synthetic construct
  source 1..21: mol_type = other RNA
agcaaggaaggaaaggagata

SEQ ID NO: 69531 - RNA, 21 nt, synthetic construct
  source 1..21: mol_type = other RNA
agcaaggaagggcttgatcta

SEQ ID NO: 69532 - RNA, 21 nt, synthetic construct
  source 1..21: mol_type = other RNA
agcaaggaccattagcagttc

SEQ ID NO: 69533 - RNA, 21 nt, synthetic construct
  source 1..21: mol_type = other RNA
agcaaggctcctgcagacatg

SEQ ID NO: 69534 - RNA, 21 nt, synthetic construct
  source 1..21: mol_type = other RNA
agcaagggtggctggcacttt

SEQ ID NO: 69535 - RNA, 21 nt, synthetic construct
  source 1..21: mol_type = other RNA
agcaaggtcgtttcagattgc

SEQ ID NO: 69536 - RNA, 21 nt, synthetic construct
  source 1..21: mol_type = other RNA
agcaagtaaaagaagatgcag

SEQ ID NO: 69537 - RNA, 21 nt, synthetic construct
  source 1..21: mol_type = other RNA
agcaagtatgagccactagtc

SEQ ID NO: 69538 - RNA, 21 nt, synthetic construct
  source 1..21: mol_type = other RNA
agcaagtccccatctccacaa

SEQ ID NO: 69539 - RNA, 21 nt, synthetic construct
  source 1..21: mol_type = other RNA
agcaagtgtggtggtctcacc

SEQ ID NO: 69540 - RNA, 21 nt, synthetic construct
  source 1..21: mol_type = other RNA
agcaagttaaaagacatcttt

SEQ ID NO: 69541 - RNA, 21 nt, synthetic construct
  source 1..21: mol_type = other RNA
agcaagttacatgcttagcct

SEQ ID NO: 69542 - RNA, 21 nt, synthetic construct
  source 1..21: mol_type = other RNA
agcaatccaaggacagaaatt

SEQ ID NO: 69543 - RNA, 21 nt, synthetic construct
  source 1..21: mol_type = other RNA
agcaatccaggatcttactgt

SEQ ID NO: 69544 - RNA, 21 nt, synthetic construct
  source 1..21: mol_type = other RNA
agcaatctgaaacgaccttgc

SEQ ID NO: 69545 - RNA, 21 nt, synthetic construct
  source 1..21: mol_type = other RNA
agcaatgcgaatcatctaggc

SEQ ID NO: 69546 - RNA, 21 nt, synthetic construct
  source 1..21: mol_type = other RNA
agcaattattagttgtacttg

SEQ ID NO: 69547 - RNA, 21 nt, synthetic construct
  source 1..21: mol_type = other RNA
agcaattatttgaataaggtc

SEQ ID NO: 69548 - RNA, 21 nt, synthetic construct
  source 1..21: mol_type = other RNA
agcacaaacctggcaatactc

SEQ ID NO: 69549 - RNA, 21 nt, synthetic construct
  source 1..21: mol_type = other RNA
agcacaaccactgatggaatt

SEQ ID NO: 69550 - RNA, 21 nt, synthetic construct
  source 1..21: mol_type = other RNA
agcacaactagtaagtaaaat

SEQ ID NO: 69551 - RNA, 21 nt, synthetic construct
  source 1..21: mol_type = other RNA
agcacaagcacagagtcagaa

SEQ ID NO: 69552 - RNA, 21 nt, synthetic construct
  source 1..21: mol_type = other RNA
agcacaatactgtctcagtcc

SEQ ID NO: 69553 - RNA, 21 nt, synthetic construct
  source 1..21: mol_type = other RNA
agcacaatgcctgccgcagag

SEQ ID NO: 69554 - RNA, 21 nt, synthetic construct
  source 1..21: mol_type = other RNA
agcacacagtttgagaagcca

SEQ ID NO: 69555 - RNA, 21 nt, synthetic construct
  source 1..21: mol_type = other RNA
agcacacatgaacctgcatgg

SEQ ID NO: 69556 - RNA, 21 nt, synthetic construct
  source 1..21: mol_type = other RNA
agcacaccaacatggcacatg

SEQ ID NO: 69557 - RNA, 21 nt, synthetic construct
  source 1..21: mol_type = other RNA
agcacaccaagacatgttagg

SEQ ID NO: 69558 - RNA, 21 nt, synthetic construct
  source 1..21: mol_type = other RNA
agcacaccaaggtttctctcc

SEQ ID NO: 69559 - RNA, 21 nt, synthetic construct
  source 1..21: mol_type = other RNA
agcacactcttaataactgcc

SEQ ID NO: 69560 - RNA, 21 nt, synthetic construct
  source 1..21: mol_type = other RNA
agcacactttccttggagaag

SEQ ID NO: 69561 - RNA, 21 nt, synthetic construct
  source 1..21: mol_type = other RNA
agcacagaaccatgtaacagg

SEQ ID NO: 69562 - RNA, 21 nt, synthetic construct
  source 1..21: mol_type = other RNA
agcacagaattactatatgat

SEQ ID NO: 69563 - RNA, 21 nt, synthetic construct
  source 1..21: mol_type = other RNA
agcacagactcaagcctgata

SEQ ID NO: 69564 - RNA, 21 nt, synthetic construct
  source 1..21: mol_type = other RNA
agcacagactgtgccttgatc

SEQ ID NO: 69565 - RNA, 21 nt, synthetic construct
  source 1..21: mol_type = other RNA
agcacagagccgaaatgcact

SEQ ID NO: 69566 - RNA, 21 nt, synthetic construct
  source 1..21: mol_type = other RNA
agcacagaggcaacagtcatt

SEQ ID NO: 69567 - RNA, 21 nt, synthetic construct
  source 1..21: mol_type = other RNA
agcacagagtcagaaaattaa

SEQ ID NO: 69568 - RNA, 21 nt, synthetic construct
  source 1..21: mol_type = other RNA
agcacaggcatcggccgggcg

SEQ ID NO: 69569 - RNA, 21 nt, synthetic construct
  source 1..21: mol_type = other RNA
agcacaggcatctctctaaaa

SEQ ID NO: 69570 - RNA, 21 nt, synthetic construct
  source 1..21: mol_type = other RNA
agcacagtctctgcagagcag

SEQ ID NO: 69571 - RNA, 21 nt, synthetic construct
  source 1..21: mol_type = other RNA
agcacataaaaaaggaatctg

SEQ ID NO: 69572 - RNA, 21 nt, synthetic construct
  source 1..21: mol_type = other RNA
agcacatctgtcttgtgcatc

SEQ ID NO: 69573 - RNA, 21 nt, synthetic construct
  source 1..21: mol_type = other RNA
agcacatggtgataactggtg

SEQ ID NO: 69574 - RNA, 21 nt, synthetic construct
  source 1..21: mol_type = other RNA
agcacattaaataagggcatt

SEQ ID NO: 69575 - RNA, 21 nt, synthetic construct
  source 1..21: mol_type = other RNA
agcacattccttccgacctgt

SEQ ID NO: 69576 - RNA, 21 nt, synthetic construct
  source 1..21: mol_type = other RNA
agcaccaaagattatgttcca

SEQ ID NO: 69577 - RNA, 21 nt, synthetic construct
  source 1..21: mol_type = other RNA
agcaccaacagatcctcacat

SEQ ID NO: 69578 - RNA, 21 nt, synthetic construct
  source 1..21: mol_type = other RNA
agcaccaacccttgttggaca

SEQ ID NO: 69579 - RNA, 21 nt, synthetic construct
  source 1..21: mol_type = other RNA
agcaccacccttgatgtcaca

SEQ ID NO: 69580 - RNA, 21 nt, synthetic construct
  source 1..21: mol_type = other RNA
agcaccactagagtattacct

SEQ ID NO: 69581 - RNA, 21 nt, synthetic construct
  source 1..21: mol_type = other RNA
agcaccactgagagggaagtt

SEQ ID NO: 69582 - RNA, 21 nt, synthetic construct
  source 1..21: mol_type = other RNA
agcaccacttcgagaagggaa

SEQ ID NO: 69583 - RNA, 21 nt, synthetic construct
  source 1..21: mol_type = other RNA
agcaccagatactcaatcagt

SEQ ID NO: 69584 - RNA, 21 nt, synthetic construct
  source 1..21: mol_type = other RNA
agcaccagggcctctgaagac

SEQ ID NO: 69585 - RNA, 21 nt, synthetic construct
  source 1..21: mol_type = other RNA
agcaccagttatcaccatgtg

SEQ ID NO: 69586 - RNA, 21 nt, synthetic construct
  source 1..21: mol_type = other RNA
agcaccatctaacagaaatac

SEQ ID NO: 69587 - RNA, 21 nt, synthetic construct
  source 1..21: mol_type = other RNA
agcaccctatttatgttgcac

SEQ ID NO: 69588 - RNA, 21 nt, synthetic construct
  source 1..21: mol_type = other RNA
agcaccctcaaatgtctcatt

SEQ ID NO: 69589 - RNA, 21 nt, synthetic construct
  source 1..21: mol_type = other RNA
agcacctaacaatgattattt

SEQ ID NO: 69590 - RNA, 21 nt, synthetic construct
  source 1..21: mol_type = other RNA
agcacctaccataacaaaaaa

SEQ ID NO: 69591 - RNA, 21 nt, synthetic construct
  source 1..21: mol_type = other RNA
agcacctgtataaataaaatg

SEQ ID NO: 69592 - RNA, 21 nt, synthetic construct
  source 1..21: mol_type = other RNA
agcacctttattaactagaat

SEQ ID NO: 69593 - RNA, 21 nt, synthetic construct
  source 1..21: mol_type = other RNA
agcaccttttttggtattttt

SEQ ID NO: 69594 - RNA, 21 nt, synthetic construct
  source 1..21: mol_type = other RNA
agcacgttagcatcaccatca

SEQ ID NO: 69595 - RNA, 21 nt, synthetic construct
  source 1..21: mol_type = other RNA
agcacgtttgatctggtcaca

SEQ ID NO: 69596 - RNA, 21 nt, synthetic construct
  source 1..21: mol_type = other RNA
agcactatccacatttggttt

SEQ ID NO: 69597 - RNA, 21 nt, synthetic construct
  source 1..21: mol_type = other RNA
agcactctgaatcacctcaag

SEQ ID NO: 69598 - RNA, 21 nt, synthetic construct
  source 1..21: mol_type = other RNA
agcactgatgtgtagttatta

SEQ ID NO: 69599 - RNA, 21 nt, synthetic construct
  source 1..21: mol_type = other RNA
agcactgcgccaagcagggac

SEQ ID NO: 69600 - RNA, 21 nt, synthetic construct
  source 1..21: mol_type = other RNA
agcactgctattgataaatct

SEQ ID NO: 69601 - RNA, 21 nt, synthetic construct
  source 1..21: mol_type = other RNA
agcactggtaaggaaacagag

SEQ ID NO: 69602 - RNA, 21 nt, synthetic construct
  source 1..21: mol_type = other RNA
agcactggtttcagtacacga

SEQ ID NO: 69603 - RNA, 21 nt, synthetic construct
  source 1..21: mol_type = other RNA
agcactgtgagccactaaaac

SEQ ID NO: 69604 - RNA, 21 nt, synthetic construct
  source 1..21: mol_type = other RNA
agcactgttaactgacttaca

SEQ ID NO: 69605 - RNA, 21 nt, synthetic construct
  source 1..21: mol_type = other RNA
agcacttccattttgcttaat

SEQ ID NO: 69606 - RNA, 21 nt, synthetic construct
  source 1..21: mol_type = other RNA
agcacttctgatatcctgtaa

SEQ ID NO: 69607 - RNA, 21 nt, synthetic construct
  source 1..21: mol_type = other RNA
agcacttggggaggccaaggc

SEQ ID NO: 69608 - RNA, 21 nt, synthetic construct
  source 1..21: mol_type = other RNA
agcactttcgtatttttgtta

SEQ ID NO: 69609 - RNA, 21 nt, synthetic construct
  source 1..21: mol_type = other RNA
agcacttttaaggcttggaaa

SEQ ID NO: 69610 - RNA, 21 nt, synthetic construct
  source 1..21: mol_type = other RNA
agcacttttgtactacttgtc

SEQ ID NO: 69611 - RNA, 21 nt, synthetic construct
  source 1..21: mol_type = other RNA
agcactttttaccaagttgaa

SEQ ID NO: 69612 - RNA, 21 nt, synthetic construct
  source 1..21: mol_type = other RNA
agcagaaaatcagtgtgaaag

SEQ ID NO: 69613 - RNA, 21 nt, synthetic construct
  source 1..21: mol_type = other RNA
agcagaaacacaggactgtgt

SEQ ID NO: 69614 - RNA, 21 nt, synthetic construct
  source 1..21: mol_type = other RNA
agcagaaagttactattttca

SEQ ID NO: 69615 - RNA, 21 nt, synthetic construct
  source 1..21: mol_type = other RNA
agcagaaatacagaccgatgg

SEQ ID NO: 69616 - RNA, 21 nt, synthetic construct
  source 1..21: mol_type = other RNA
agcagaaatgacaagtaaatg

SEQ ID NO: 69617 - RNA, 21 nt, synthetic construct
  source 1..21: mol_type = other RNA
agcagaaatgagttccagtcc

SEQ ID NO: 69618 - RNA, 21 nt, synthetic construct
  source 1..21: mol_type = other RNA
agcagaacaaactgcgtggtt

SEQ ID NO: 69619 - RNA, 21 nt, synthetic construct
  source 1..21: mol_type = other RNA
agcagaaccttagaaatttaa

SEQ ID NO: 69620 - RNA, 21 nt, synthetic construct
  source 1..21: mol_type = other RNA
agcagaactaagaccccagta

SEQ ID NO: 69621 - RNA, 21 nt, synthetic construct
  source 1..21: mol_type = other RNA
agcagaactccacctcagaaa

SEQ ID NO: 69622 - RNA, 21 nt, synthetic construct
  source 1..21: mol_type = other RNA
agcagaaggaggaaaataatt

SEQ ID NO: 69623 - RNA, 21 nt, synthetic construct
  source 1..21: mol_type = other RNA
agcagaagggaaaggatgacc

SEQ ID NO: 69624 - RNA, 21 nt, synthetic construct
  source 1..21: mol_type = other RNA
agcagaaggtgagggactgag

SEQ ID NO: 69625 - RNA, 21 nt, synthetic construct
  source 1..21: mol_type = other RNA
agcagaatccccaaataacat

SEQ ID NO: 69626 - RNA, 21 nt, synthetic construct
  source 1..21: mol_type = other RNA
agcagaatggccctgcgattg

SEQ ID NO: 69627 - RNA, 21 nt, synthetic construct
  source 1..21: mol_type = other RNA
agcagaatgtccatcaggaaa

SEQ ID NO: 69628 - RNA, 21 nt, synthetic construct
  source 1..21: mol_type = other RNA
agcagaattcaaaaacactgt

SEQ ID NO: 69629 - RNA, 21 nt, synthetic construct
  source 1..21: mol_type = other RNA
agcagacactgggttctcacc

SEQ ID NO: 69630 - RNA, 21 nt, synthetic construct
  source 1..21: mol_type = other RNA
agcagacagaaagacagggag

SEQ ID NO: 69631 - RNA, 21 nt, synthetic construct
  source 1..21: mol_type = other RNA
agcagagaaactggaatcaat

SEQ ID NO: 69632 - RNA, 21 nt, synthetic construct
  source 1..21: mol_type = other RNA
agcagagaagtgaagcttcaa

SEQ ID NO: 69633 - RNA, 21 nt, synthetic construct
  source 1..21: mol_type = other RNA
agcagagacacacatcagaca

SEQ ID NO: 69634 - RNA, 21 nt, synthetic construct
  source 1..21: mol_type = other RNA
agcagagagagaagatgacat

SEQ ID NO: 69635 - RNA, 21 nt, synthetic construct
  source 1..21: mol_type = other RNA
agcagagtcctgagggtgaga

SEQ ID NO: 69636 - RNA, 21 nt, synthetic construct
  source 1..21: mol_type = other RNA
agcagataagatccaagtatt

SEQ ID NO: 69637 - RNA, 21 nt, synthetic construct
  source 1..21: mol_type = other RNA
agcagatcagtaacaaataag

SEQ ID NO: 69638 - RNA, 21 nt, synthetic construct
  source 1..21: mol_type = other RNA
agcagatctgctgtaagctgg

SEQ ID NO: 69639 - RNA, 21 nt, synthetic construct
  source 1..21: mol_type = other RNA
agcagatctgcttgcagacaa

SEQ ID NO: 69640 - RNA, 21 nt, synthetic construct
  source 1..21: mol_type = other RNA
agcagcaagggtggctggcac

SEQ ID NO: 69641 - RNA, 21 nt, synthetic construct
  source 1..21: mol_type = other RNA
agcagcactgatgtgtagtta

SEQ ID NO: 69642 - RNA, 21 nt, synthetic construct
  source 1..21: mol_type = other RNA
agcagcagagaagtgaagctt

SEQ ID NO: 69643 - RNA, 21 nt, synthetic construct
  source 1..21: mol_type = other RNA
agcagcattgtttacagtagc

SEQ ID NO: 69644 - RNA, 21 nt, synthetic construct
  source 1..21: mol_type = other RNA
agcagccccgacgcctttcat

SEQ ID NO: 69645 - RNA, 21 nt, synthetic construct
  source 1..21: mol_type = other RNA
agcagctacctgttgattgtt

SEQ ID NO: 69646 - RNA, 21 nt, synthetic construct
  source 1..21: mol_type = other RNA
agcagctctagcaaacaaaca

SEQ ID NO: 69647 - RNA, 21 nt, synthetic construct
  source 1..21: mol_type = other RNA
agcaggaaaagctaccctcga

SEQ ID NO: 69648 - RNA, 21 nt, synthetic construct
  source 1..21: mol_type = other RNA
agcaggaactcatattagtct

SEQ ID NO: 69649 - RNA, 21 nt, synthetic construct
  source 1..21: mol_type = other RNA
agcaggactggactccttctg

SEQ ID NO: 69650 - RNA, 21 nt, synthetic construct
  source 1..21: mol_type = other RNA
agcaggattcttgttaagcat

SEQ ID NO: 69651 - RNA, 21 nt, synthetic construct
  source 1..21: mol_type = other RNA
agcaggccctgagaagtcaaa

SEQ ID NO: 69652 - RNA, 21 nt, synthetic construct
  source 1..21: mol_type = other RNA
agcaggccttcgaggcatcta

SEQ ID NO: 69653 - RNA, 21 nt, synthetic construct
  source 1..21: mol_type = other RNA
agcaggctccacttgggtgga

SEQ ID NO: 69654 - RNA, 21 nt, synthetic construct
  source 1..21: mol_type = other RNA
agcaggctttttacccggaga

SEQ ID NO: 69655 - RNA, 21 nt, synthetic construct
  source 1..21: mol_type = other RNA
agcagggaaatggagggccag

SEQ ID NO: 69656 - RNA, 21 nt, synthetic construct
  source 1..21: mol_type = other RNA
agcagggaccacaggcatgcg

SEQ ID NO: 69657 - RNA, 21 nt, synthetic construct
  source 1..21: mol_type = other RNA
agcagggactacagtcacaca

SEQ ID NO: 69658 - RNA, 21 nt, synthetic construct
  source 1..21: mol_type = other RNA
agcagggactcccatatctac

SEQ ID NO: 69659 - RNA, 21 nt, synthetic construct
  source 1..21: mol_type = other RNA
agcagggaggggtccccagca

SEQ ID NO: 69660 - RNA, 21 nt, synthetic construct
  source 1..21: mol_type = other RNA
agcagggctcctccaaggctg

SEQ ID NO: 69661 - RNA, 21 nt, synthetic construct
  source 1..21: mol_type = other RNA
agcaggggaaggcttcgagtt

SEQ ID NO: 69662 - RNA, 21 nt, synthetic construct
  source 1..21: mol_type = other RNA
agcaggggctaagtagtggca

SEQ ID NO: 69663 - RNA, 21 nt, synthetic construct
  source 1..21: mol_type = other RNA
agcaggggtggggggatgtag

SEQ ID NO: 69664 - RNA, 21 nt, synthetic construct
  source 1..21: mol_type = other RNA
agcagggtaaagtcaattcta

SEQ ID NO: 69665 - RNA, 21 nt, synthetic construct
  source 1..21: mol_type = other RNA
agcagggtcatgcacacgctg

SEQ ID NO: 69666 - RNA, 21 nt, synthetic construct
  source 1..21: mol_type = other RNA
agcagggtgggcccttaatcc

SEQ ID NO: 69667 - RNA, 21 nt, synthetic construct
  source 1..21: mol_type = other RNA
agcaggtcatgacttttttgc

SEQ ID NO: 69668 - RNA, 21 nt, synthetic construct
  source 1..21: mol_type = other RNA
agcaggtggaaggcctgatag

SEQ ID NO: 69669 - RNA, 21 nt, synthetic construct
  source 1..21: mol_type = other RNA
agcaggttcattttaataagc

SEQ ID NO: 69670 - RNA, 21 nt, synthetic construct
  source 1..21: mol_type = other RNA
agcaggttgcattaatgcttc

SEQ ID NO: 69671 - RNA, 21 nt, synthetic construct
  source 1..21: mol_type = other RNA
agcaggtttaggaagcacatt

SEQ ID NO: 69672 - RNA, 21 nt, synthetic construct
  source 1..21: mol_type = other RNA
agcagtaaaatgaaaaaacct

SEQ ID NO: 69673 - RNA, 21 nt, synthetic construct
  source 1..21: mol_type = other RNA
agcagtaaatatactgactag

SEQ ID NO: 69674 - RNA, 21 nt, synthetic construct
  source 1..21: mol_type = other RNA
agcagtaaatgcctacattaa

SEQ ID NO: 69675 - RNA, 21 nt, synthetic construct
  source 1..21: mol_type = other RNA
agcagtaggcttagataggat

SEQ ID NO: 69676 - RNA, 21 nt, synthetic construct
  source 1..21: mol_type = other RNA
agcagtcctgccttggcctcc

SEQ ID NO: 69677 - RNA, 21 nt, synthetic construct
  source 1..21: mol_type = other RNA
agcagtcttaaccattgagcc

SEQ ID NO: 69678 - RNA, 21 nt, synthetic construct
  source 1..21: mol_type = other RNA
agcagtgaaagtctccctaac

SEQ ID NO: 69679 - RNA, 21 nt, synthetic construct
  source 1..21: mol_type = other RNA
agcagtgaccatatttccaaa

SEQ ID NO: 69680 - RNA, 21 nt, synthetic construct
  source 1..21: mol_type = other RNA
agcagtgctgaaagctagaag

SEQ ID NO: 69681 - RNA, 21 nt, synthetic construct
  source 1..21: mol_type = other RNA
agcagtgggaagtggagtgcg

SEQ ID NO: 69682 - RNA, 21 nt, synthetic construct
  source 1..21: mol_type = other RNA
agcagtgtgaataggaaagtg

SEQ ID NO: 69683 - RNA, 21 nt, synthetic construct
  source 1..21: mol_type = other RNA
agcagtgtgttctgccttgag

SEQ ID NO: 69684 - RNA, 21 nt, synthetic construct
  source 1..21: mol_type = other RNA
agcagtgtttcctagattccc

SEQ ID NO: 69685 - RNA, 21 nt, synthetic construct
  source 1..21: mol_type = other RNA
agcagttactcctgagcaagg

SEQ ID NO: 69686 - RNA, 21 nt, synthetic construct
  source 1..21: mol_type = other RNA
agcagttcaagcaccacttcg

SEQ ID NO: 69687 - RNA, 21 nt, synthetic construct
  source 1..21: mol_type = other RNA
agcagttcagcctgcagaagg

SEQ ID NO: 69688 - RNA, 21 nt, synthetic construct
  source 1..21: mol_type = other RNA
agcagttctgtacccttacgc

SEQ ID NO: 69689 - RNA, 21 nt, synthetic construct
  source 1..21: mol_type = other RNA
agcagttgatgcaatttgttt

SEQ ID NO: 69690 - RNA, 21 nt, synthetic construct
  source 1..21: mol_type = other RNA
agcagttgtatgccaaaaaat

SEQ ID NO: 69691 - RNA, 21 nt, synthetic construct
  source 1..21: mol_type = other RNA
agcagtttcacttcttagtaa

SEQ ID NO: 69692 - RNA, 21 nt, synthetic construct
  source 1..21: mol_type = other RNA
agcagttttaaagaattcgtt

SEQ ID NO: 69693 - RNA, 21 nt, synthetic construct
  source 1..21: mol_type = other RNA
agcataagacccctcaggtgt

SEQ ID NO: 69694 - RNA, 21 nt, synthetic construct
  source 1..21: mol_type = other RNA
agcataattggttaaacttgg

SEQ ID NO: 69695 - RNA, 21 nt, synthetic construct
  source 1..21: mol_type = other RNA
agcatactgtggatatctttt

SEQ ID NO: 69696 - RNA, 21 nt, synthetic construct
  source 1..21: mol_type = other RNA
agcatagactttagagtcagt

SEQ ID NO: 69697 - RNA, 21 nt, synthetic construct
  source 1..21: mol_type = other RNA
agcatagcagaaccttagaaa

SEQ ID NO: 69698 - RNA, 21 nt, synthetic construct
  source 1..21: mol_type = other RNA
agcatagcttgaaccagggag

SEQ ID NO: 69699 - RNA, 21 nt, synthetic construct
  source 1..21: mol_type = other RNA
agcatagtttgagtatttcat

SEQ ID NO: 69700 - RNA, 21 nt, synthetic construct
  source 1..21: mol_type = other RNA
agcatatacatgacatggttt

SEQ ID NO: 69701 - RNA, 21 nt, synthetic construct
  source 1..21: mol_type = other RNA
agcatatatactctgagacag

SEQ ID NO: 69702 - RNA, 21 nt, synthetic construct
  source 1..21: mol_type = other RNA
agcatatgaatctagaaagat

SEQ ID NO: 69703 - RNA, 21 nt, synthetic construct
  source 1..21: mol_type = other RNA
agcatattagctgtctggatt

SEQ ID NO: 69704 - RNA, 21 nt, synthetic construct
  source 1..21: mol_type = other RNA
agcatcaccatcatcatcagg

SEQ ID NO: 69705 - RNA, 21 nt, synthetic construct
  source 1..21: mol_type = other RNA
agcatcagagctttgttatga

SEQ ID NO: 69706 - RNA, 21 nt, synthetic construct
  source 1..21: mol_type = other RNA
agcatccactaggggactaac

SEQ ID NO: 69707 - RNA, 21 nt, synthetic construct
  source 1..21: mol_type = other RNA
agcatcccagaggtactcaac

SEQ ID NO: 69708 - RNA, 21 nt, synthetic construct
  source 1..21: mol_type = other RNA
agcatcccatatggaggcaat

SEQ ID NO: 69709 - RNA, 21 nt, synthetic construct
  source 1..21: mol_type = other RNA
agcatccccagaaagagagag

SEQ ID NO: 69710 - RNA, 21 nt, synthetic construct
  source 1..21: mol_type = other RNA
agcatccccgctgcgagaaag

SEQ ID NO: 69711 - RNA, 21 nt, synthetic construct
  source 1..21: mol_type = other RNA
agcatccctccagtccagcac

SEQ ID NO: 69712 - RNA, 21 nt, synthetic construct
  source 1..21: mol_type = other RNA
agcatccctgccgcgcgcgaa

SEQ ID NO: 69713 - RNA, 21 nt, synthetic construct
  source 1..21: mol_type = other RNA
agcatcgtgaagtctttattt

SEQ ID NO: 69714 - RNA, 21 nt, synthetic construct
  source 1..21: mol_type = other RNA
agcatctagcacagaaccatg

SEQ ID NO: 69715 - RNA, 21 nt, synthetic construct
  source 1..21: mol_type = other RNA
agcatctgatacacttctatc

SEQ ID NO: 69716 - RNA, 21 nt, synthetic construct
  source 1..21: mol_type = other RNA
agcatcttagctcttccctta

SEQ ID NO: 69717 - RNA, 21 nt, synthetic construct
  source 1..21: mol_type = other RNA
agcatcttcactgactacaca

SEQ ID NO: 69718 - RNA, 21 nt, synthetic construct
  source 1..21: mol_type = other RNA
agcatcttcccatgaacatgg

SEQ ID NO: 69719 - RNA, 21 nt, synthetic construct
  source 1..21: mol_type = other RNA
agcatcttttgacgcgcaaca

SEQ ID NO: 69720 - RNA, 21 nt, synthetic construct
  source 1..21: mol_type = other RNA
agcatgaagccctctaagtca

SEQ ID NO: 69721 - RNA, 21 nt, synthetic construct
  source 1..21: mol_type = other RNA
agcatgaatacctatttagag

SEQ ID NO: 69722 - RNA, 21 nt, synthetic construct
  source 1..21: mol_type = other RNA
agcatgagatactacgcctag

SEQ ID NO: 69723 - RNA, 21 nt, synthetic construct
  source 1..21: mol_type = other RNA
agcatgagtatctggtgttgc

SEQ ID NO: 69724 - RNA, 21 nt, synthetic construct
  source 1..21: mol_type = other RNA
agcatgatttataatccattg

SEQ ID NO: 69725 - RNA, 21 nt, synthetic construct
  source 1..21: mol_type = other RNA
agcatgcacacaggagaactt

SEQ ID NO: 69726 - RNA, 21 nt, synthetic construct
  source 1..21: mol_type = other RNA
agcatgcagtagctcatcatt

SEQ ID NO: 69727 - RNA, 21 nt, synthetic construct
  source 1..21: mol_type = other RNA
agcatgcctgacaaagtatga

SEQ ID NO: 69728 - RNA, 21 nt, synthetic construct
  source 1..21: mol_type = other RNA
agcatgctcactgtctccatg

SEQ ID NO: 69729 - RNA, 21 nt, synthetic construct
  source 1..21: mol_type = other RNA
agcatgctgcaactgagaaga

SEQ ID NO: 69730 - RNA, 21 nt, synthetic construct
  source 1..21: mol_type = other RNA
agcatggtggtaggtgtgtgt

SEQ ID NO: 69731 - RNA, 21 nt, synthetic construct
  source 1..21: mol_type = other RNA
agcatgtaacttgcttaggct

SEQ ID NO: 69732 - RNA, 21 nt, synthetic construct
  source 1..21: mol_type = other RNA
agcatgtcccctggagttaat

SEQ ID NO: 69733 - RNA, 21 nt, synthetic construct
  source 1..21: mol_type = other RNA
agcatgtcttcagaggccctg

SEQ ID NO: 69734 - RNA, 21 nt, synthetic construct
  source 1..21: mol_type = other RNA
agcatgtggccaggaggagga

SEQ ID NO: 69735 - RNA, 21 nt, synthetic construct
  source 1..21: mol_type = other RNA
agcatgttgctttgcgaaata

SEQ ID NO: 69736 - RNA, 21 nt, synthetic construct
  source 1..21: mol_type = other RNA
agcatgttgggccaacttcca

SEQ ID NO: 69737 - RNA, 21 nt, synthetic construct
  source 1..21: mol_type = other RNA
agcattaatgcaacctgcttt

SEQ ID NO: 69738 - RNA, 21 nt, synthetic construct
  source 1..21: mol_type = other RNA
agcattaccctaataacaaaa

SEQ ID NO: 69739 - RNA, 21 nt, synthetic construct
  source 1..21: mol_type = other RNA
agcattacttaggcagttatt

SEQ ID NO: 69740 - RNA, 21 nt, synthetic construct
  source 1..21: mol_type = other RNA
agcattatcccagatctaaca

SEQ ID NO: 69741 - RNA, 21 nt, synthetic construct
  source 1..21: mol_type = other RNA
agcattatccctttaaaatga

SEQ ID NO: 69742 - RNA, 21 nt, synthetic construct
  source 1..21: mol_type = other RNA
agcattatcttaataacctca

SEQ ID NO: 69743 - RNA, 21 nt, synthetic construct
  source 1..21: mol_type = other RNA
agcattccccacataggatag

SEQ ID NO: 69744 - RNA, 21 nt, synthetic construct
  source 1..21: mol_type = other RNA
agcattgaagtatagtttgaa

SEQ ID NO: 69745 - RNA, 21 nt, synthetic construct
  source 1..21: mol_type = other RNA
agcattgcctttattactatt

SEQ ID NO: 69746 - RNA, 21 nt, synthetic construct
  source 1..21: mol_type = other RNA
agcattgggagctttcattat

SEQ ID NO: 69747 - RNA, 21 nt, synthetic construct
  source 1..21: mol_type = other RNA
agcattgtttacagtagccaa

SEQ ID NO: 69748 - RNA, 21 nt, synthetic construct
  source 1..21: mol_type = other RNA
agcatttagccccctgaatac

SEQ ID NO: 69749 - RNA, 21 nt, synthetic construct
  source 1..21: mol_type = other RNA
agcatttcagccaaagctggc

SEQ ID NO: 69750 - RNA, 21 nt, synthetic construct
  source 1..21: mol_type = other RNA
agcatttgaaaacatgttttg

SEQ ID NO: 69751 - RNA, 21 nt, synthetic construct
  source 1..21: mol_type = other RNA
agcattttataggcattcctt

SEQ ID NO: 69752 - RNA, 21 nt, synthetic construct
  source 1..21: mol_type = other RNA
agcattttccggttgtatagc

SEQ ID NO: 69753 - RNA, 21 nt, synthetic construct
  source 1..21: mol_type = other RNA
agcattttctaaattgaacag

SEQ ID NO: 69754 - RNA, 21 nt, synthetic construct
  source 1..21: mol_type = other RNA
agccaaacagtttttacatgt

SEQ ID NO: 69755 - RNA, 21 nt, synthetic construct
  source 1..21: mol_type = other RNA
agccaaacatcatgatttaat

SEQ ID NO: 69756 - RNA, 21 nt, synthetic construct
  source 1..21: mol_type = other RNA
agccaaacttgaaccttcctc

SEQ ID NO: 69757 - RNA, 21 nt, synthetic construct
  source 1..21: mol_type = other RNA
agccaaagaaattggacgggt

SEQ ID NO: 69758 - RNA, 21 nt, synthetic construct
  source 1..21: mol_type = other RNA
agccaaagaagaaatcaaatg

SEQ ID NO: 69759 - RNA, 21 nt, synthetic construct
  source 1..21: mol_type = other RNA
agccaaagacattgtcttaca

SEQ ID NO: 69760 - RNA, 21 nt, synthetic construct
  source 1..21: mol_type = other RNA
agccaaagcaagccttggcaa

SEQ ID NO: 69761 - RNA, 21 nt, synthetic construct
  source 1..21: mol_type = other RNA
agccaaagctggcatgttgga

SEQ ID NO: 69762 - RNA, 21 nt, synthetic construct
  source 1..21: mol_type = other RNA
agccaaaggtagaaacatccc

SEQ ID NO: 69763 - RNA, 21 nt, synthetic construct
  source 1..21: mol_type = other RNA
agccaaataaaacacaaggac

SEQ ID NO: 69764 - RNA, 21 nt, synthetic construct
  source 1..21: mol_type = other RNA
agccaacaaccataatgagta

SEQ ID NO: 69765 - RNA, 21 nt, synthetic construct
  source 1..21: mol_type = other RNA
agccaagagcgaggcctggaa

SEQ ID NO: 69766 - RNA, 21 nt, synthetic construct
  source 1..21: mol_type = other RNA
agccaagcatggtggtaggtg

SEQ ID NO: 69767 - RNA, 21 nt, synthetic construct
  source 1..21: mol_type = other RNA
agccaagggtttgtcaatttt

SEQ ID NO: 69768 - RNA, 21 nt, synthetic construct
  source 1..21: mol_type = other RNA
agccaagtaaaagcaacctca

SEQ ID NO: 69769 - RNA, 21 nt, synthetic construct
  source 1..21: mol_type = other RNA
agccaatatccctgataatca

SEQ ID NO: 69770 - RNA, 21 nt, synthetic construct
  source 1..21: mol_type = other RNA
agccaatcttcccaatccttt

SEQ ID NO: 69771 - RNA, 21 nt, synthetic construct
  source 1..21: mol_type = other RNA
agccacaagacataagcattt

SEQ ID NO: 69772 - RNA, 21 nt, synthetic construct
  source 1..21: mol_type = other RNA
agccacacagtacaaggctag

SEQ ID NO: 69773 - RNA, 21 nt, synthetic construct
  source 1..21: mol_type = other RNA
agccacactcttggtctttct

SEQ ID NO: 69774 - RNA, 21 nt, synthetic construct
  source 1..21: mol_type = other RNA
agccacagcgcccggcccgtt

SEQ ID NO: 69775 - RNA, 21 nt, synthetic construct
  source 1..21: mol_type = other RNA
agccacagcgtggaatggtca

SEQ ID NO: 69776 - RNA, 21 nt, synthetic construct
  source 1..21: mol_type = other RNA
agccacagcgttgttcagttg

SEQ ID NO: 69777 - RNA, 21 nt, synthetic construct
  source 1..21: mol_type = other RNA
agccacagctacactcaatac

SEQ ID NO: 69778 - RNA, 21 nt, synthetic construct
  source 1..21: mol_type = other RNA
agccacagggcccagcctcaa

SEQ ID NO: 69779 - RNA, 21 nt, synthetic construct
  source 1..21: mol_type = other RNA
agccacatacatagtattaaa

SEQ ID NO: 69780 - RNA, 21 nt, synthetic construct
  source 1..21: mol_type = other RNA
agccacatgtggttattgagt

SEQ ID NO: 69781 - RNA, 21 nt, synthetic construct
  source 1..21: mol_type = other RNA
agccacattagccactctgaa

SEQ ID NO: 69782 - RNA, 21 nt, synthetic construct
  source 1..21: mol_type = other RNA
agccaccacgtccggtcgttg

SEQ ID NO: 69783 - RNA, 21 nt, synthetic construct
  source 1..21: mol_type = other RNA
agccaccactcccggccgtat

SEQ ID NO: 69784 - RNA, 21 nt, synthetic construct
  source 1..21: mol_type = other RNA
agccacccttgctgcttctac

SEQ ID NO: 69785 - RNA, 21 nt, synthetic construct
  source 1..21: mol_type = other RNA
agccaccgcacctggccggga

SEQ ID NO: 69786 - RNA, 21 nt, synthetic construct
  source 1..21: mol_type = other RNA
agccaccgcactcagcctgtt

SEQ ID NO: 69787 - RNA, 21 nt, synthetic construct
  source 1..21: mol_type = other RNA
agccaccgcgcccggccaaat

SEQ ID NO: 69788 - RNA, 21 nt, synthetic construct
  source 1..21: mol_type = other RNA
agccaccgcgcctggtgatta

SEQ ID NO: 69789 - RNA, 21 nt, synthetic construct
  source 1..21: mol_type = other RNA
agccaccgtgccgggcttggt

SEQ ID NO: 69790 - RNA, 21 nt, synthetic construct
  source 1..21: mol_type = other RNA
agccacctcatccggtctcag

SEQ ID NO: 69791 - RNA, 21 nt, synthetic construct
  source 1..21: mol_type = other RNA
agccacgtgtattgagtgtag

SEQ ID NO: 69792 - RNA, 21 nt, synthetic construct
  source 1..21: mol_type = other RNA
agccactaaaacaggaagttg

SEQ ID NO: 69793 - RNA, 21 nt, synthetic construct
  source 1..21: mol_type = other RNA
agccactacgcccggcccatg

SEQ ID NO: 69794 - RNA, 21 nt, synthetic construct
  source 1..21: mol_type = other RNA
agccactagtcagtatattta

SEQ ID NO: 69795 - RNA, 21 nt, synthetic construct
  source 1..21: mol_type = other RNA
agccactatagaaaatagtat

SEQ ID NO: 69796 - RNA, 21 nt, synthetic construct
  source 1..21: mol_type = other RNA
agccactctgaattctctgga

SEQ ID NO: 69797 - RNA, 21 nt, synthetic construct
  source 1..21: mol_type = other RNA
agccactgcattcatccaggc

SEQ ID NO: 69798 - RNA, 21 nt, synthetic construct
  source 1..21: mol_type = other RNA
agccactgcgggcccagctct

SEQ ID NO: 69799 - RNA, 21 nt, synthetic construct
  source 1..21: mol_type = other RNA
agccactgggtcttataggtt

SEQ ID NO: 69800 - RNA, 21 nt, synthetic construct
  source 1..21: mol_type = other RNA
agccacttcctattagaagaa

SEQ ID NO: 69801 - RNA, 21 nt, synthetic construct
  source 1..21: mol_type = other RNA
agccagagagtggaaagagcc

SEQ ID NO: 69802 - RNA, 21 nt, synthetic construct
  source 1..21: mol_type = other RNA
agccagaggaagcttataatt

SEQ ID NO: 69803 - RNA, 21 nt, synthetic construct
  source 1..21: mol_type = other RNA
agccagagtttcactctgtcg

SEQ ID NO: 69804 - RNA, 21 nt, synthetic construct
  source 1..21: mol_type = other RNA
agccagatttgatcctggaat

SEQ ID NO: 69805 - RNA, 21 nt, synthetic construct
  source 1..21: mol_type = other RNA
agccagcaaatcagaaaaggc

SEQ ID NO: 69806 - RNA, 21 nt, synthetic construct
  source 1..21: mol_type = other RNA
agccagcacctaacaatgatt

SEQ ID NO: 69807 - RNA, 21 nt, synthetic construct
  source 1..21: mol_type = other RNA
agccagcattaccctaataac

SEQ ID NO: 69808 - RNA, 21 nt, synthetic construct
  source 1..21: mol_type = other RNA
agccagcctgatgatgatggt

SEQ ID NO: 69809 - RNA, 21 nt, synthetic construct
  source 1..21: mol_type = other RNA
agccaggaagtcagcaactct

SEQ ID NO: 69810 - RNA, 21 nt, synthetic construct
  source 1..21: mol_type = other RNA
agccaggcatgggggcgcgtg

SEQ ID NO: 69811 - RNA, 21 nt, synthetic construct
  source 1..21: mol_type = other RNA
agccaggcgtggtggcggatg

SEQ ID NO: 69812 - RNA, 21 nt, synthetic construct
  source 1..21: mol_type = other RNA
agccaggctttcccagggtgt

SEQ ID NO: 69813 - RNA, 21 nt, synthetic construct
  source 1..21: mol_type = other RNA
agccagggtctgtctcacctc

SEQ ID NO: 69814 - RNA, 21 nt, synthetic construct
  source 1..21: mol_type = other RNA
agccagtcactaaaaatcaga

SEQ ID NO: 69815 - RNA, 21 nt, synthetic construct
  source 1..21: mol_type = other RNA
agccagtcagtgatggaggtg

SEQ ID NO: 69816 - RNA, 21 nt, synthetic construct
  source 1..21: mol_type = other RNA
agccagtccttgtgatctatg

SEQ ID NO: 69817 - RNA, 21 nt, synthetic construct
  source 1..21: mol_type = other RNA
agccagtgattggatatttgc

SEQ ID NO: 69818 - RNA, 21 nt, synthetic construct
  source 1..21: mol_type = other RNA
agccagtgcagcaagcagtaa

SEQ ID NO: 69819 - RNA, 21 nt, synthetic construct
  source 1..21: mol_type = other RNA
agccataagagtccccaactg

SEQ ID NO: 69820 - RNA, 21 nt, synthetic construct
  source 1..21: mol_type = other RNA
agccataatccttagattaca

SEQ ID NO: 69821 - RNA, 21 nt, synthetic construct
  source 1..21: mol_type = other RNA
agccatagtgtaaactaaaag

SEQ ID NO: 69822 - RNA, 21 nt, synthetic construct
  source 1..21: mol_type = other RNA
agccatcaacctaatgaaatt

SEQ ID NO: 69823 - RNA, 21 nt, synthetic construct
  source 1..21: mol_type = other RNA
agccatcatgcctgggtaatt

SEQ ID NO: 69824 - RNA, 21 nt, synthetic construct
  source 1..21: mol_type = other RNA
agccatcccagctacataact

SEQ ID NO: 69825 - RNA, 21 nt, synthetic construct
  source 1..21: mol_type = other RNA
agccatcctccagccttaatc

SEQ ID NO: 69826 - RNA, 21 nt, synthetic construct
  source 1..21: mol_type = other RNA
agccatcgcgcccagcccgtg

SEQ ID NO: 69827 - RNA, 21 nt, synthetic construct
  source 1..21: mol_type = other RNA
agccatctaattcacatttaa

SEQ ID NO: 69828 - RNA, 21 nt, synthetic construct
  source 1..21: mol_type = other RNA
agccatggctcactgcggcct

SEQ ID NO: 69829 - RNA, 21 nt, synthetic construct
  source 1..21: mol_type = other RNA
agccatgtttctcctgcatgg

SEQ ID NO: 69830 - RNA, 21 nt, synthetic construct
  source 1..21: mol_type = other RNA
agccattctcttctggatagc

SEQ ID NO: 69831 - RNA, 21 nt, synthetic construct
  source 1..21: mol_type = other RNA
agccatttatcagcaccaaag

SEQ ID NO: 69832 - RNA, 21 nt, synthetic construct
  source 1..21: mol_type = other RNA
agccatttcaggttttcgacc

SEQ ID NO: 69833 - RNA, 21 nt, synthetic construct
  source 1..21: mol_type = other RNA
agcccaacagggttttgtttt

SEQ ID NO: 69834 - RNA, 21 nt, synthetic construct
  source 1..21: mol_type = other RNA
agcccaacctgattagaggct

SEQ ID NO: 69835 - RNA, 21 nt, synthetic construct
  source 1..21: mol_type = other RNA
agcccaacttcacaccattta

SEQ ID NO: 69836 - RNA, 21 nt, synthetic construct
  source 1..21: mol_type = other RNA
agcccaactttttctttttag

SEQ ID NO: 69837 - RNA, 21 nt, synthetic construct
  source 1..21: mol_type = other RNA
agcccaagcacactttccttg

SEQ ID NO: 69838 - RNA, 21 nt, synthetic construct
  source 1..21: mol_type = other RNA
agcccaagctaccatttattc

SEQ ID NO: 69839 - RNA, 21 nt, synthetic construct
  source 1..21: mol_type = other RNA
agcccaatctacaggtcggaa

SEQ ID NO: 69840 - RNA, 21 nt, synthetic construct
  source 1..21: mol_type = other RNA
agcccaccaccatgcctggct

SEQ ID NO: 69841 - RNA, 21 nt, synthetic construct
  source 1..21: mol_type = other RNA
agcccaccagcataagacccc

SEQ ID NO: 69842 - RNA, 21 nt, synthetic construct
  source 1..21: mol_type = other RNA
agcccacttgttgatggggtt

SEQ ID NO: 69843 - RNA, 21 nt, synthetic construct
  source 1..21: mol_type = other RNA
agcccagaaataaatcctcac

SEQ ID NO: 69844 - RNA, 21 nt, synthetic construct
  source 1..21: mol_type = other RNA
agcccagagaggctaggtgac

SEQ ID NO: 69845 - RNA, 21 nt, synthetic construct
  source 1..21: mol_type = other RNA
agcccagagatcccaccattg

SEQ ID NO: 69846 - RNA, 21 nt, synthetic construct
  source 1..21: mol_type = other RNA
agcccagcacttccattttgc

SEQ ID NO: 69847 - RNA, 21 nt, synthetic construct
  source 1..21: mol_type = other RNA
agcccagcttccgggacttgg

SEQ ID NO: 69848 - RNA, 21 nt, synthetic construct
  source 1..21: mol_type = other RNA
agcccaggaggttgaagctct

SEQ ID NO: 69849 - RNA, 21 nt, synthetic construct
  source 1..21: mol_type = other RNA
agcccaggagttgcatcactt

SEQ ID NO: 69850 - RNA, 21 nt, synthetic construct
  source 1..21: mol_type = other RNA
agcccagggggtcgagactgt

SEQ ID NO: 69851 - RNA, 21 nt, synthetic construct
  source 1..21: mol_type = other RNA
agcccatgtctaaagtattgt

SEQ ID NO: 69852 - RNA, 21 nt, synthetic construct
  source 1..21: mol_type = other RNA
agccccaaaccatcaagtgtg

SEQ ID NO: 69853 - RNA, 21 nt, synthetic construct
  source 1..21: mol_type = other RNA
agccccaaatacctctgaatg

SEQ ID NO: 69854 - RNA, 21 nt, synthetic construct
  source 1..21: mol_type = other RNA
agccccaagaaagcaggtcat

SEQ ID NO: 69855 - RNA, 21 nt, synthetic construct
  source 1..21: mol_type = other RNA
agccccacaagtagcagggac

SEQ ID NO: 69856 - RNA, 21 nt, synthetic construct
  source 1..21: mol_type = other RNA
agccccagaataggcaaattc

SEQ ID NO: 69857 - RNA, 21 nt, synthetic construct
  source 1..21: mol_type = other RNA
agccccagttctgcgcaattg

SEQ ID NO: 69858 - RNA, 21 nt, synthetic construct
  source 1..21: mol_type = other RNA
agccccattgtacacatatta

SEQ ID NO: 69859 - RNA, 21 nt, synthetic construct
  source 1..21: mol_type = other RNA
agcccccagttttgttgaatc

SEQ ID NO: 69860 - RNA, 21 nt, synthetic construct
  source 1..21: mol_type = other RNA
agccccctccctaccacccgt

SEQ ID NO: 69861 - RNA, 21 nt, synthetic construct
  source 1..21: mol_type = other RNA
agccccctcgaagagaccaca

SEQ ID NO: 69862 - RNA, 21 nt, synthetic construct
  source 1..21: mol_type = other RNA
agccccctgaatacccctccc

SEQ ID NO: 69863 - RNA, 21 nt, synthetic construct
  source 1..21: mol_type = other RNA
agccccctgagtagctgtgat

SEQ ID NO: 69864 - RNA, 21 nt, synthetic construct
  source 1..21: mol_type = other RNA
agccccgacgcctttcatttg

SEQ ID NO: 69865 - RNA, 21 nt, synthetic construct
  source 1..21: mol_type = other RNA
agccccgcttcagttggtgaa

SEQ ID NO: 69866 - RNA, 21 nt, synthetic construct
  source 1..21: mol_type = other RNA
agcccctagcatgcagtagct

SEQ ID NO: 69867 - RNA, 21 nt, synthetic construct
  source 1..21: mol_type = other RNA
agcccctcatcctccgtagct

SEQ ID NO: 69868 - RNA, 21 nt, synthetic construct
  source 1..21: mol_type = other RNA
agcccctgccacactccagca

SEQ ID NO: 69869 - RNA, 21 nt, synthetic construct
  source 1..21: mol_type = other RNA
agcccctgctgccagatgttc

SEQ ID NO: 69870 - RNA, 21 nt, synthetic construct
  source 1..21: mol_type = other RNA
agcccctggtgatctatgaat

SEQ ID NO: 69871 - RNA, 21 nt, synthetic construct
  source 1..21: mol_type = other RNA
agccccttatcaggaaagtgc

SEQ ID NO: 69872 - RNA, 21 nt, synthetic construct
  source 1..21: mol_type = other RNA
agcccgacctccagcgctaag

SEQ ID NO: 69873 - RNA, 21 nt, synthetic construct
  source 1..21: mol_type = other RNA
agcccgtgtgtttagaataat

SEQ ID NO: 69874 - RNA, 21 nt, synthetic construct
  source 1..21: mol_type = other RNA
agccctcaggaccaggcagtc

SEQ ID NO: 69875 - RNA, 21 nt, synthetic construct
  source 1..21: mol_type = other RNA
agccctccaggatccagtctc

SEQ ID NO: 69876 - RNA, 21 nt, synthetic construct
  source 1..21: mol_type = other RNA
agccctctaagtcagcctggg

SEQ ID NO: 69877 - RNA, 21 nt, synthetic construct
  source 1..21: mol_type = other RNA
agccctgatagatattggcaa

SEQ ID NO: 69878 - RNA, 21 nt, synthetic construct
  source 1..21: mol_type = other RNA
agccctgcagccagatttgat

SEQ ID NO: 69879 - RNA, 21 nt, synthetic construct
  source 1..21: mol_type = other RNA
agccctgccttaaaacatttt

SEQ ID NO: 69880 - RNA, 21 nt, synthetic construct
  source 1..21: mol_type = other RNA
agccctgctgtggccgaggga

SEQ ID NO: 69881 - RNA, 21 nt, synthetic construct
  source 1..21: mol_type = other RNA
agcccttccttgcttgtcttg

SEQ ID NO: 69882 - RNA, 21 nt, synthetic construct
  source 1..21: mol_type = other RNA
agcccttgagtatttttgagc

SEQ ID NO: 69883 - RNA, 21 nt, synthetic construct
  source 1..21: mol_type = other RNA
agccgaaatgcacttagcgct

SEQ ID NO: 69884 - RNA, 21 nt, synthetic construct
  source 1..21: mol_type = other RNA
agccgagatcacgccactgca

SEQ ID NO: 69885 - RNA, 21 nt, synthetic construct
  source 1..21: mol_type = other RNA
agccgagcagaagggaaagga

SEQ ID NO: 69886 - RNA, 21 nt, synthetic construct
  source 1..21: mol_type = other RNA
agccgcaaataatcattcttc

SEQ ID NO: 69887 - RNA, 21 nt, synthetic construct
  source 1..21: mol_type = other RNA
agccgccgcagaggccaaatg

SEQ ID NO: 69888 - RNA, 21 nt, synthetic construct
  source 1..21: mol_type = other RNA
agccggattcctttcaaagag

SEQ ID NO: 69889 - RNA, 21 nt, synthetic construct
  source 1..21: mol_type = other RNA
agccggcatatgtcactgtaa

SEQ ID NO: 69890 - RNA, 21 nt, synthetic construct
  source 1..21: mol_type = other RNA
agccgggaggagccaagtaaa

SEQ ID NO: 69891 - RNA, 21 nt, synthetic construct
  source 1..21: mol_type = other RNA
agccgggtgtagtggtgtgtg

SEQ ID NO: 69892 - RNA, 21 nt, synthetic construct
  source 1..21: mol_type = other RNA
agccgtcggtatgttaataac

SEQ ID NO: 69893 - RNA, 21 nt, synthetic construct
  source 1..21: mol_type = other RNA
agccgttccatcagagaggct

SEQ ID NO: 69894 - RNA, 21 nt, synthetic construct
  source 1..21: mol_type = other RNA
agcctaaaataggcctaggtg

SEQ ID NO: 69895 - RNA, 21 nt, synthetic construct
  source 1..21: mol_type = other RNA
agcctaaaccattttcaatct

SEQ ID NO: 69896 - RNA, 21 nt, synthetic construct
  source 1..21: mol_type = other RNA
agcctaaagtccacagatctt

SEQ ID NO: 69897 - RNA, 21 nt, synthetic construct
  source 1..21: mol_type = other RNA
agcctaagcaaatgtaatgaa

SEQ ID NO: 69898 - RNA, 21 nt, synthetic construct
  source 1..21: mol_type = other RNA
agcctaagcaagttacatgct

SEQ ID NO: 69899 - RNA, 21 nt, synthetic construct
  source 1..21: mol_type = other RNA
agcctaatgtgtaagaaatgc

SEQ ID NO: 69900 - RNA, 21 nt, synthetic construct
  source 1..21: mol_type = other RNA
agcctaattgtacacctcaaa

SEQ ID NO: 69901 - RNA, 21 nt, synthetic construct
  source 1..21: mol_type = other RNA
agcctacctcccttcacaaag

SEQ ID NO: 69902 - RNA, 21 nt, synthetic construct
  source 1..21: mol_type = other RNA
agcctactgctctgtcctgtc

SEQ ID NO: 69903 - RNA, 21 nt, synthetic construct
  source 1..21: mol_type = other RNA
agcctagacctcaaattaatc

SEQ ID NO: 69904 - RNA, 21 nt, synthetic construct
  source 1..21: mol_type = other RNA
agcctagagattaggcagaac

SEQ ID NO: 69905 - RNA, 21 nt, synthetic construct
  source 1..21: mol_type = other RNA
agcctaggcaagagagcaaga

SEQ ID NO: 69906 - RNA, 21 nt, synthetic construct
  source 1..21: mol_type = other RNA
agcctagtcatccactgcaca

SEQ ID NO: 69907 - RNA, 21 nt, synthetic construct
  source 1..21: mol_type = other RNA
agcctatgtaagacaatgtct

SEQ ID NO: 69908 - RNA, 21 nt, synthetic construct
  source 1..21: mol_type = other RNA
agcctcaaaatttagtaaggg

SEQ ID NO: 69909 - RNA, 21 nt, synthetic construct
  source 1..21: mol_type = other RNA
agcctcaaacaatcctccctc

SEQ ID NO: 69910 - RNA, 21 nt, synthetic construct
  source 1..21: mol_type = other RNA
agcctcaaacgaaccaattac

SEQ ID NO: 69911 - RNA, 21 nt, synthetic construct
  source 1..21: mol_type = other RNA
agcctcaacagcacttttgta

SEQ ID NO: 69912 - RNA, 21 nt, synthetic construct
  source 1..21: mol_type = other RNA
agcctcatttgaactttccag

SEQ ID NO: 69913 - RNA, 21 nt, synthetic construct
  source 1..21: mol_type = other RNA
agcctccacacctggcccctt

SEQ ID NO: 69914 - RNA, 21 nt, synthetic construct
  source 1..21: mol_type = other RNA
agcctccagaaaaccagaaaa

SEQ ID NO: 69915 - RNA, 21 nt, synthetic construct
  source 1..21: mol_type = other RNA
agcctcccgagtagttgtaac

SEQ ID NO: 69916 - RNA, 21 nt, synthetic construct
  source 1..21: mol_type = other RNA
agcctcccgagtatctaggag

SEQ ID NO: 69917 - RNA, 21 nt, synthetic construct
  source 1..21: mol_type = other RNA
agcctcctaagttttggggga

SEQ ID NO: 69918 - RNA, 21 nt, synthetic construct
  source 1..21: mol_type = other RNA
agcctctaatcaggttgggct

SEQ ID NO: 69919 - RNA, 21 nt, synthetic construct
  source 1..21: mol_type = other RNA
agcctctcaacacttcagtgg

SEQ ID NO: 69920 - RNA, 21 nt, synthetic construct
  source 1..21: mol_type = other RNA
agcctctctgatggaacggct

SEQ ID NO: 69921 - RNA, 21 nt, synthetic construct
  source 1..21: mol_type = other RNA
agcctctctgggcttcacttt

SEQ ID NO: 69922 - RNA, 21 nt, synthetic construct
  source 1..21: mol_type = other RNA
agcctctgtggaccatgtttt

SEQ ID NO: 69923 - RNA, 21 nt, synthetic construct
  source 1..21: mol_type = other RNA
agcctcttcagaagaggataa

SEQ ID NO: 69924 - RNA, 21 nt, synthetic construct
  source 1..21: mol_type = other RNA
agcctgaggacactagcaatc

SEQ ID NO: 69925 - RNA, 21 nt, synthetic construct
  source 1..21: mol_type = other RNA
agcctgataagctcccagcca

SEQ ID NO: 69926 - RNA, 21 nt, synthetic construct
  source 1..21: mol_type = other RNA
agcctgatgatgatggtgatg

SEQ ID NO: 69927 - RNA, 21 nt, synthetic construct
  source 1..21: mol_type = other RNA
agcctgcagaaggagaaacca

SEQ ID NO: 69928 - RNA, 21 nt, synthetic construct
  source 1..21: mol_type = other RNA
agcctgctctgcagagactgt

SEQ ID NO: 69929 - RNA, 21 nt, synthetic construct
  source 1..21: mol_type = other RNA
agcctgcttcagcctaagcaa

SEQ ID NO: 69930 - RNA, 21 nt, synthetic construct
  source 1..21: mol_type = other RNA
agcctggaagttcaaggttat

SEQ ID NO: 69931 - RNA, 21 nt, synthetic construct
  source 1..21: mol_type = other RNA
agcctggccaacatcgtaaaa

SEQ ID NO: 69932 - RNA, 21 nt, synthetic construct
  source 1..21: mol_type = other RNA
agcctggctttagatggtaaa

SEQ ID NO: 69933 - RNA, 21 nt, synthetic construct
  source 1..21: mol_type = other RNA
agcctgggacagagcgagact

SEQ ID NO: 69934 - RNA, 21 nt, synthetic construct
  source 1..21: mol_type = other RNA
agcctgggcacacgccactgc

SEQ ID NO: 69935 - RNA, 21 nt, synthetic construct
  source 1..21: mol_type = other RNA
agcctgggcgacagagtgaaa

SEQ ID NO: 69936 - RNA, 21 nt, synthetic construct
  source 1..21: mol_type = other RNA
agcctggtaatgaatagaaaa

SEQ ID NO: 69937 - RNA, 21 nt, synthetic construct
  source 1..21: mol_type = other RNA
agcctggtcaacagggtaaga

SEQ ID NO: 69938 - RNA, 21 nt, synthetic construct
  source 1..21: mol_type = other RNA
agcctgtgacagtatgtcaga

SEQ ID NO: 69939 - RNA, 21 nt, synthetic construct
  source 1..21: mol_type = other RNA
agcctgtggaggcagtaccat

SEQ ID NO: 69940 - RNA, 21 nt, synthetic construct
  source 1..21: mol_type = other RNA
agcctgtggtctcttcgaggg

SEQ ID NO: 69941 - RNA, 21 nt, synthetic construct
  source 1..21: mol_type = other RNA
agcctgtgtcagtgacagttc

SEQ ID NO: 69942 - RNA, 21 nt, synthetic construct
  source 1..21: mol_type = other RNA
agcctgttccgattttactta

SEQ ID NO: 69943 - RNA, 21 nt, synthetic construct
  source 1..21: mol_type = other RNA
agccttaaaagtgctgcagta

SEQ ID NO: 69944 - RNA, 21 nt, synthetic construct
  source 1..21: mol_type = other RNA
agccttaatctcctgagtagc

SEQ ID NO: 69945 - RNA, 21 nt, synthetic construct
  source 1..21: mol_type = other RNA
agccttcagaactcttctcca

SEQ ID NO: 69946 - RNA, 21 nt, synthetic construct
  source 1..21: mol_type = other RNA
agccttccagagacaaagcat

SEQ ID NO: 69947 - RNA, 21 nt, synthetic construct
  source 1..21: mol_type = other RNA
agccttcccctgctgttccca

SEQ ID NO: 69948 - RNA, 21 nt, synthetic construct
  source 1..21: mol_type = other RNA
agccttccctgaacaatgatt

SEQ ID NO: 69949 - RNA, 21 nt, synthetic construct
  source 1..21: mol_type = other RNA
agccttctctactctgcctca

SEQ ID NO: 69950 - RNA, 21 nt, synthetic construct
  source 1..21: mol_type = other RNA
agccttctctcttccaaataa

SEQ ID NO: 69951 - RNA, 21 nt, synthetic construct
  source 1..21: mol_type = other RNA
agccttcttggagtaaacctg

SEQ ID NO: 69952 - RNA, 21 nt, synthetic construct
  source 1..21: mol_type = other RNA
agccttgccattctcccagtt

SEQ ID NO: 69953 - RNA, 21 nt, synthetic construct
  source 1..21: mol_type = other RNA
agccttgctgttgtaatgtta

SEQ ID NO: 69954 - RNA, 21 nt, synthetic construct
  source 1..21: mol_type = other RNA
agccttggaggagccctgctg

SEQ ID NO: 69955 - RNA, 21 nt, synthetic construct
  source 1..21: mol_type = other RNA
agccttggcaaggggaatggt

SEQ ID NO: 69956 - RNA, 21 nt, synthetic construct
  source 1..21: mol_type = other RNA
agccttggtaaaatcactaat

SEQ ID NO: 69957 - RNA, 21 nt, synthetic construct
  source 1..21: mol_type = other RNA
agccttggtaagagtgagacc

SEQ ID NO: 69958 - RNA, 21 nt, synthetic construct
  source 1..21: mol_type = other RNA
agccttgtactgtgtggcttc

SEQ ID NO: 69959 - RNA, 21 nt, synthetic construct
  source 1..21: mol_type = other RNA
agcctttaatttagcgttcat

SEQ ID NO: 69960 - RNA, 21 nt, synthetic construct
  source 1..21: mol_type = other RNA
agcctttattttttcttccca

SEQ ID NO: 69961 - RNA, 21 nt, synthetic construct
  source 1..21: mol_type = other RNA
agccttttacaccctaggtag

SEQ ID NO: 69962 - RNA, 21 nt, synthetic construct
  source 1..21: mol_type = other RNA
agccttttctgatttgctggc

SEQ ID NO: 69963 - RNA, 21 nt, synthetic construct
  source 1..21: mol_type = other RNA
agcgaaagggattctggccaa

SEQ ID NO: 69964 - RNA, 21 nt, synthetic construct
  source 1..21: mol_type = other RNA
agcgaaaggtacgacgctctt

SEQ ID NO: 69965 - RNA, 21 nt, synthetic construct
  source 1..21: mol_type = other RNA
agcgaagagggagaagaaata

SEQ ID NO: 69966 - RNA, 21 nt, synthetic construct
  source 1..21: mol_type = other RNA
agcgacagctacggaggatga

SEQ ID NO: 69967 - RNA, 21 nt, synthetic construct
  source 1..21: mol_type = other RNA
agcgagacctcatctctgcaa

SEQ ID NO: 69968 - RNA, 21 nt, synthetic construct
  source 1..21: mol_type = other RNA
agcgagactccatctcaagaa

SEQ ID NO: 69969 - RNA, 21 nt, synthetic construct
  source 1..21: mol_type = other RNA
agcgaggcctggaacaggccc

SEQ ID NO: 69970 - RNA, 21 nt, synthetic construct
  source 1..21: mol_type = other RNA
agcgccacgtgaagatggagt

SEQ ID NO: 69971 - RNA, 21 nt, synthetic construct
  source 1..21: mol_type = other RNA
agcgccacttaaaaaatgcgc

SEQ ID NO: 69972 - RNA, 21 nt, synthetic construct
  source 1..21: mol_type = other RNA
agcgcccggcccgttattttt

SEQ ID NO: 69973 - RNA, 21 nt, synthetic construct
  source 1..21: mol_type = other RNA
agcgccctggcattgtcccgg

SEQ ID NO: 69974 - RNA, 21 nt, synthetic construct
  source 1..21: mol_type = other RNA
agcgctaagcactgcgccaag

SEQ ID NO: 69975 - RNA, 21 nt, synthetic construct
  source 1..21: mol_type = other RNA
agcgctaagtgcatttcggct

SEQ ID NO: 69976 - RNA, 21 nt, synthetic construct
  source 1..21: mol_type = other RNA
agcgctactcagctgtcactc

SEQ ID NO: 69977 - RNA, 21 nt, synthetic construct
  source 1..21: mol_type = other RNA
agcgctcttcaagcattggga

SEQ ID NO: 69978 - RNA, 21 nt, synthetic construct
  source 1..21: mol_type = other RNA
agcgctgaagtacttcaaggt

SEQ ID NO: 69979 - RNA, 21 nt, synthetic construct
  source 1..21: mol_type = other RNA
agcgctgatgtgttgacctta

SEQ ID NO: 69980 - RNA, 21 nt, synthetic construct
  source 1..21: mol_type = other RNA
agcgctggaggtcgggctgcc

SEQ ID NO: 69981 - RNA, 21 nt, synthetic construct
  source 1..21: mol_type = other RNA
agcgcttctatgtgacaaaca

SEQ ID NO: 69982 - RNA, 21 nt, synthetic construct
  source 1..21: mol_type = other RNA
agcgcttgaacaaatatgaat

SEQ ID NO: 69983 - RNA, 21 nt, synthetic construct
  source 1..21: mol_type = other RNA
agcgctttaagcatcccatat

SEQ ID NO: 69984 - RNA, 21 nt, synthetic construct
  source 1..21: mol_type = other RNA
agcggaatgactatagaaatt

SEQ ID NO: 69985 - RNA, 21 nt, synthetic construct
  source 1..21: mol_type = other RNA
agcggcatacaggagttccga

SEQ ID NO: 69986 - RNA, 21 nt, synthetic construct
  source 1..21: mol_type = other RNA
agcggcctttgcctctccagg

SEQ ID NO: 69987 - RNA, 21 nt, synthetic construct
  source 1..21: mol_type = other RNA
agcggcgggcttcgcctttgt

SEQ ID NO: 69988 - RNA, 21 nt, synthetic construct
  source 1..21: mol_type = other RNA
agcgggaaaaaataatatgag

SEQ ID NO: 69989 - RNA, 21 nt, synthetic construct
  source 1..21: mol_type = other RNA
agcgggcagccttggaggagc

SEQ ID NO: 69990 - RNA, 21 nt, synthetic construct
  source 1..21: mol_type = other RNA
agcggggatgctcagggtgcg

SEQ ID NO: 69991 - RNA, 21 nt, synthetic construct
  source 1..21: mol_type = other RNA
agcggggatggttgcacaatg

SEQ ID NO: 69992 - RNA, 21 nt, synthetic construct
  source 1..21: mol_type = other RNA
agcggggctgccactacttag

SEQ ID NO: 69993 - RNA, 21 nt, synthetic construct
  source 1..21: mol_type = other RNA
agcgggtttcctcggtctacg

SEQ ID NO: 69994 - RNA, 21 nt, synthetic construct
  source 1..21: mol_type = other RNA
agcggtcaacgcacccagagc

SEQ ID NO: 69995 - RNA, 21 nt, synthetic construct
  source 1..21: mol_type = other RNA
agcggtgtcttattgttttga

SEQ ID NO: 69996 - RNA, 21 nt, synthetic construct
  source 1..21: mol_type = other RNA
agcgtaactccatcttcacgt

SEQ ID NO: 69997 - RNA, 21 nt, synthetic construct
  source 1..21: mol_type = other RNA
agcgtactgtgattacaattc

SEQ ID NO: 69998 - RNA, 21 nt, synthetic construct
  source 1..21: mol_type = other RNA
agcgtcctcactgtgatacct

SEQ ID NO: 69999 - RNA, 21 nt, synthetic construct
  source 1..21: mol_type = other RNA
agcgtcgtacctttcgctatc

SEQ ID NO: 70000 - RNA, 21 nt, synthetic construct
  source 1..21: mol_type = other RNA
agcgtgcaccttacattgtaa

SEQ ID NO: 70001 - RNA, 21 nt, synthetic construct
  source 1..21: mol_type = other RNA
agcgtggaatggtcaatttca

SEQ ID NO: 70002 - RNA, 21 nt, synthetic construct
  source 1..21: mol_type = other RNA
agcgtgggcaacacaatgaga

SEQ ID NO: 70003 - RNA, 21 nt, synthetic construct
  source 1..21: mol_type = other RNA
agcgtgtgcatgaccctgcta

SEQ ID NO: 70004 - RNA, 21 nt, synthetic construct
  source 1..21: mol_type = other RNA
agcgttcatccaaattattga

SEQ ID NO: 70005 - RNA, 21 nt, synthetic construct
  source 1..21: mol_type = other RNA
agcgttggagacagcctaaac

SEQ ID NO: 70006 - RNA, 21 nt, synthetic construct
  source 1..21: mol_type = other RNA
agcgttgttcagttgaaaagt

SEQ ID NO: 70007 - RNA, 21 nt, synthetic construct
  source 1..21: mol_type = other RNA
agctaaaatgttcagatagaa

SEQ ID NO: 70008 - RNA, 21 nt, synthetic construct
  source 1..21: mol_type = other RNA
agctaacttttaacccacaga

SEQ ID NO: 70009 - RNA, 21 nt, synthetic construct
  source 1..21: mol_type = other RNA
agctaagaaacagtaattagt

SEQ ID NO: 70010 - RNA, 21 nt, synthetic construct
  source 1..21: mol_type = other RNA
agctaagactataaaactctt

SEQ ID NO: 70011 - RNA, 21 nt, synthetic construct
  source 1..21: mol_type = other RNA
agctaagagttttatagtctt

SEQ ID NO: 70012 - RNA, 21 nt, synthetic construct
  source 1..21: mol_type = other RNA
agctaagatgctattcaagac

SEQ ID NO: 70013 - RNA, 21 nt, synthetic construct
  source 1..21: mol_type = other RNA
agctaagcaccaacagatcct

SEQ ID NO: 70014 - RNA, 21 nt, synthetic construct
  source 1..21: mol_type = other RNA
agctaagggaagttttttcaa

SEQ ID NO: 70015 - RNA, 21 nt, synthetic construct
  source 1..21: mol_type = other RNA
agctaagtatgcagaaaccag

SEQ ID NO: 70016 - RNA, 21 nt, synthetic construct
  source 1..21: mol_type = other RNA
agctaataatttatcagatcc

SEQ ID NO: 70017 - RNA, 21 nt, synthetic construct
  source 1..21: mol_type = other RNA
agctaatatctttggggagat

SEQ ID NO: 70018 - RNA, 21 nt, synthetic construct
  source 1..21: mol_type = other RNA
agctaatatgctgtagtgatt

SEQ ID NO: 70019 - RNA, 21 nt, synthetic construct
  source 1..21: mol_type = other RNA
agctaatcaagccgcaaataa

SEQ ID NO: 70020 - RNA, 21 nt, synthetic construct
  source 1..21: mol_type = other RNA
agctaatcccaaagtgagcag

SEQ ID NO: 70021 - RNA, 21 nt, synthetic construct
  source 1..21: mol_type = other RNA
agctaatctactttctaatcc

SEQ ID NO: 70022 - RNA, 21 nt, synthetic construct
  source 1..21: mol_type = other RNA
agctaatttcagagagacctg

SEQ ID NO: 70023 - RNA, 21 nt, synthetic construct
  source 1..21: mol_type = other RNA
agctacaaaagggaaaacaat

SEQ ID NO: 70024 - RNA, 21 nt, synthetic construct
  source 1..21: mol_type = other RNA
agctacaaactccaaaccttt

SEQ ID NO: 70025 - RNA, 21 nt, synthetic construct
  source 1..21: mol_type = other RNA
agctacactcaatacacgtgg

SEQ ID NO: 70026 - RNA, 21 nt, synthetic construct
  source 1..21: mol_type = other RNA
agctacagactaatatgagtt

SEQ ID NO: 70027 - RNA, 21 nt, synthetic construct
  source 1..21: mol_type = other RNA
agctacagtaatcaaacagtg

SEQ ID NO: 70028 - RNA, 21 nt, synthetic construct
  source 1..21: mol_type = other RNA
agctacataacttcccagaca

SEQ ID NO: 70029 - RNA, 21 nt, synthetic construct
  source 1..21: mol_type = other RNA
agctaccatttattcctctct

SEQ ID NO: 70030 - RNA, 21 nt, synthetic construct
  source 1..21: mol_type = other RNA
agctaccctcgagtaaaaaga

SEQ ID NO: 70031 - RNA, 21 nt, synthetic construct
  source 1..21: mol_type = other RNA
agctaccctttcttgttagta

SEQ ID NO: 70032 - RNA, 21 nt, synthetic construct
  source 1..21: mol_type = other RNA
agctacctgttgattgttgcc

SEQ ID NO: 70033 - RNA, 21 nt, synthetic construct
  source 1..21: mol_type = other RNA
agctacggaggatgaggggct

SEQ ID NO: 70034 - RNA, 21 nt, synthetic construct
  source 1..21: mol_type = other RNA
agctactaaacaaatcagatt

SEQ ID NO: 70035 - RNA, 21 nt, synthetic construct
  source 1..21: mol_type = other RNA
agctactatgaatatactgga

SEQ ID NO: 70036 - RNA, 21 nt, synthetic construct
  source 1..21: mol_type = other RNA
agctactattccaggatcaaa

SEQ ID NO: 70037 - RNA, 21 nt, synthetic construct
  source 1..21: mol_type = other RNA
agctactgcatgctaggggct

SEQ ID NO: 70038 - RNA, 21 nt, synthetic construct
  source 1..21: mol_type = other RNA
agctagaacagaataaaaagt

SEQ ID NO: 70039 - RNA, 21 nt, synthetic construct
  source 1..21: mol_type = other RNA
agctagaactagaatactcca

SEQ ID NO: 70040 - RNA, 21 nt, synthetic construct
  source 1..21: mol_type = other RNA
agctagaagacctcaaattct

SEQ ID NO: 70041 - RNA, 21 nt, synthetic construct
  source 1..21: mol_type = other RNA
agctagagggtaagaccaaaa

SEQ ID NO: 70042 - RNA, 21 nt, synthetic construct
  source 1..21: mol_type = other RNA
agctaggaccataggcacgcg

SEQ ID NO: 70043 - RNA, 21 nt, synthetic construct
  source 1..21: mol_type = other RNA
agctaggcgtagtatctcatg

SEQ ID NO: 70044 - RNA, 21 nt, synthetic construct
  source 1..21: mol_type = other RNA
agctaggtgagtgagatggga

SEQ ID NO: 70045 - RNA, 21 nt, synthetic construct
  source 1..21: mol_type = other RNA
agctagtgtcttagtctgact

SEQ ID NO: 70046 - RNA, 21 nt, synthetic construct
  source 1..21: mol_type = other RNA
agctagtgtgtctgactacac

SEQ ID NO: 70047 - RNA, 21 nt, synthetic construct
  source 1..21: mol_type = other RNA
agctatacacgttacaaaata

SEQ ID NO: 70048 - RNA, 21 nt, synthetic construct
  source 1..21: mol_type = other RNA
agctatagctgagaagtaaca

SEQ ID NO: 70049 - RNA, 21 nt, synthetic construct
  source 1..21: mol_type = other RNA
agctatagcttctgagctgtt

SEQ ID NO: 70050 - RNA, 21 nt, synthetic construct
  source 1..21: mol_type = other RNA
agctatatcccaaattggcat

SEQ ID NO: 70051 - RNA, 21 nt, synthetic construct
  source 1..21: mol_type = other RNA
agctatattcacttttggaat

SEQ ID NO: 70052 - RNA, 21 nt, synthetic construct
  source 1..21: mol_type = other RNA
agctatcaggccttccacctg

SEQ ID NO: 70053 - RNA, 21 nt, synthetic construct
  source 1..21: mol_type = other RNA
agctatcctaatgggcgtgga

SEQ ID NO: 70054 - RNA, 21 nt, synthetic construct
  source 1..21: mol_type = other RNA
agctatgctcctgcctcagcc

SEQ ID NO: 70055 - RNA, 21 nt, synthetic construct
  source 1..21: mol_type = other RNA
agctatggagcactgtgagcc

SEQ ID NO: 70056 - RNA, 21 nt, synthetic construct
  source 1..21: mol_type = other RNA
agctatggtgttatttgttct

SEQ ID NO: 70057 - RNA, 21 nt, synthetic construct
  source 1..21: mol_type = other RNA
agctattgtcttttctatctg

SEQ ID NO: 70058 - RNA, 21 nt, synthetic construct
  source 1..21: mol_type = other RNA
agctcaaaaatactcaagggc

SEQ ID NO: 70059 - RNA, 21 nt, synthetic construct
  source 1..21: mol_type = other RNA
agctcaaacagcttgacattc

SEQ ID NO: 70060 - RNA, 21 nt, synthetic construct
  source 1..21: mol_type = other RNA
agctcaaagcatatgaatcta

SEQ ID NO: 70061 - RNA, 21 nt, synthetic construct
  source 1..21: mol_type = other RNA
agctcaattaagcaacctttt

SEQ ID NO: 70062 - RNA, 21 nt, synthetic construct
  source 1..21: mol_type = other RNA
agctcacacgagaaggacagc

SEQ ID NO: 70063 - RNA, 21 nt, synthetic construct
  source 1..21: mol_type = other RNA
agctcacctctggactcaggg

SEQ ID NO: 70064 - RNA, 21 nt, synthetic construct
  source 1..21: mol_type = other RNA
agctcacgttaccctctggaa

SEQ ID NO: 70065 - RNA, 21 nt, synthetic construct
  source 1..21: mol_type = other RNA
agctcactagagcttcaacct

SEQ ID NO: 70066 - RNA, 21 nt, synthetic construct
  source 1..21: mol_type = other RNA
agctcagaagctatagctgag

SEQ ID NO: 70067 - RNA, 21 nt, synthetic construct
  source 1..21: mol_type = other RNA
agctcaggaccagatgacttc

SEQ ID NO: 70068 - RNA, 21 nt, synthetic construct
  source 1..21: mol_type = other RNA
agctcaggccagtgagtgatg

SEQ ID NO: 70069 - RNA, 21 nt, synthetic construct
  source 1..21: mol_type = other RNA
agctcagtgtgtttttgtaaa

SEQ ID NO: 70070 - RNA, 21 nt, synthetic construct
  source 1..21: mol_type = other RNA
agctcatcatttatacccaag

SEQ ID NO: 70071 - RNA, 21 nt, synthetic construct
  source 1..21: mol_type = other RNA
agctcattacagtctcgaccc

SEQ ID NO: 70072 - RNA, 21 nt, synthetic construct
  source 1..21: mol_type = other RNA
agctccaaaagcgaaaggcaa

SEQ ID NO: 70073 - RNA, 21 nt, synthetic construct
  source 1..21: mol_type = other RNA
agctccaaagaacaggagtta

SEQ ID NO: 70074 - RNA, 21 nt, synthetic construct
  source 1..21: mol_type = other RNA
agctccagcctgggcgacaga

SEQ ID NO: 70075 - RNA, 21 nt, synthetic construct
  source 1..21: mol_type = other RNA
agctcccaatgcttgaagagc

SEQ ID NO: 70076 - RNA, 21 nt, synthetic construct
  source 1..21: mol_type = other RNA
agctcccagccaaacagtttt

SEQ ID NO: 70077 - RNA, 21 nt, synthetic construct
  source 1..21: mol_type = other RNA
agctccccattccctgtctgt

SEQ ID NO: 70078 - RNA, 21 nt, synthetic construct
  source 1..21: mol_type = other RNA
agctccccggatgattctaat

SEQ ID NO: 70079 - RNA, 21 nt, synthetic construct
  source 1..21: mol_type = other RNA
agctccgcctcctggtgggtt

SEQ ID NO: 70080 - RNA, 21 nt, synthetic construct
  source 1..21: mol_type = other RNA
agctcctcagaaggccaaggc

SEQ ID NO: 70081 - RNA, 21 nt, synthetic construct
  source 1..21: mol_type = other RNA
agctcctgacctcagatatcc

SEQ ID NO: 70082 - RNA, 21 nt, synthetic construct
  source 1..21: mol_type = other RNA
agctcctgggaaaaggatttg

SEQ ID NO: 70083 - RNA, 21 nt, synthetic construct
  source 1..21: mol_type = other RNA
agctcgaccaggggaaggagt

SEQ ID NO: 70084 - RNA, 21 nt, synthetic construct
  source 1..21: mol_type = other RNA
agctcgccgtctccctcggcc

SEQ ID NO: 70085 - RNA, 21 nt, synthetic construct
  source 1..21: mol_type = other RNA
agctctaataaaagctggagt

SEQ ID NO: 70086 - RNA, 21 nt, synthetic construct
  source 1..21: mol_type = other RNA
agctctaatagttcacctctc

SEQ ID NO: 70087 - RNA, 21 nt, synthetic construct
  source 1..21: mol_type = other RNA
agctctagcaaacaaacacac

SEQ ID NO: 70088 - RNA, 21 nt, synthetic construct
  source 1..21: mol_type = other RNA
agctctagccttgtactgtgt

SEQ ID NO: 70089 - RNA, 21 nt, synthetic construct
  source 1..21: mol_type = other RNA
agctctagtgagctatgattg

SEQ ID NO: 70090 - RNA, 21 nt, synthetic construct
  source 1..21: mol_type = other RNA
agctctatggcatttgagggt

SEQ ID NO: 70091 - RNA, 21 nt, synthetic construct
  source 1..21: mol_type = other RNA
agctctcaattaatgcccaat

SEQ ID NO: 70092 - RNA, 21 nt, synthetic construct
  source 1..21: mol_type = other RNA
agctctcagtggccctgttgg

SEQ ID NO: 70093 - RNA, 21 nt, synthetic construct
  source 1..21: mol_type = other RNA
agctctcatgagtcctgaaaa

SEQ ID NO: 70094 - RNA, 21 nt, synthetic construct
  source 1..21: mol_type = other RNA
agctctcatgtcagagacaca

SEQ ID NO: 70095 - RNA, 21 nt, synthetic construct
  source 1..21: mol_type = other RNA
agctctgatgctttctctagt

SEQ ID NO: 70096 - RNA, 21 nt, synthetic construct
  source 1..21: mol_type = other RNA
agctctgtcttgatgatagaa

SEQ ID NO: 70097 - RNA, 21 nt, synthetic construct
  source 1..21: mol_type = other RNA
agctcttaagcttaggtcttt

SEQ ID NO: 70098 - RNA, 21 nt, synthetic construct
  source 1..21: mol_type = other RNA
agctcttcccttaaccttttt

SEQ ID NO: 70099 - RNA, 21 nt, synthetic construct
  source 1..21: mol_type = other RNA
agctcttctcagttgcagcat

SEQ ID NO: 70100 - RNA, 21 nt, synthetic construct
  source 1..21: mol_type = other RNA
agctcttttgtgtctttttat

SEQ ID NO: 70101 - RNA, 21 nt, synthetic construct
  source 1..21: mol_type = other RNA
agctgaaagtaaagatagccc

SEQ ID NO: 70102 - RNA, 21 nt, synthetic construct
  source 1..21: mol_type = other RNA
agctgaactcctttcttaccc

SEQ ID NO: 70103 - RNA, 21 nt, synthetic construct
  source 1..21: mol_type = other RNA
agctgaactctgtggagtcct

SEQ ID NO: 70104 - RNA, 21 nt, synthetic construct
  source 1..21: mol_type = other RNA
agctgaaggcactgtatggtt

SEQ ID NO: 70105 - RNA, 21 nt, synthetic construct
  source 1..21: mol_type = other RNA
agctgacccactggtttcagt

SEQ ID NO: 70106 - RNA, 21 nt, synthetic construct
  source 1..21: mol_type = other RNA
agctgactttcatttgtaatt

SEQ ID NO: 70107 - RNA, 21 nt, synthetic construct
  source 1..21: mol_type = other RNA
agctgacttttaaaatatgtg

SEQ ID NO: 70108 - RNA, 21 nt, synthetic construct
  source 1..21: mol_type = other RNA
agctgagaagtaacattacaa

SEQ ID NO: 70109 - RNA, 21 nt, synthetic construct
  source 1..21: mol_type = other RNA
agctgagaccacagacgtgca

SEQ ID NO: 70110 - RNA, 21 nt, synthetic construct
  source 1..21: mol_type = other RNA
agctgagtagcgctttaagca

SEQ ID NO: 70111 - RNA, 21 nt, synthetic construct
  source 1..21: mol_type = other RNA
agctgatcaaggaagcttcct

SEQ ID NO: 70112 - RNA, 21 nt, synthetic construct
  source 1..21: mol_type = other RNA
agctgcctcttcctgttgctt

SEQ ID NO: 70113 - RNA, 21 nt, synthetic construct
  source 1..21: mol_type = other RNA
agctgctgtaacaaagatgcc

SEQ ID NO: 70114 - RNA, 21 nt, synthetic construct
  source 1..21: mol_type = other RNA
agctggaagtaaggattttct

SEQ ID NO: 70115 - RNA, 21 nt, synthetic construct
  source 1..21: mol_type = other RNA
agctggacccttaccttaaac

SEQ ID NO: 70116 - RNA, 21 nt, synthetic construct
  source 1..21: mol_type = other RNA
agctggactcattccaatcct

SEQ ID NO: 70117 - RNA, 21 nt, synthetic construct
  source 1..21: mol_type = other RNA
agctggagttatttgtataaa

SEQ ID NO: 70118 - RNA, 21 nt, synthetic construct
  source 1..21: mol_type = other RNA
agctggatgtggtgtggcatg

SEQ ID NO: 70119 - RNA, 21 nt, synthetic construct
  source 1..21: mol_type = other RNA
agctggcaaaatggagacatc

SEQ ID NO: 70120 - RNA, 21 nt, synthetic construct
  source 1..21: mol_type = other RNA
agctggcatgttggatagttt

SEQ ID NO: 70121 - RNA, 21 nt, synthetic construct
  source 1..21: mol_type = other RNA
agctgggactacaggtgtgaa

SEQ ID NO: 70122 - RNA, 21 nt, synthetic construct
  source 1..21: mol_type = other RNA
agctgggagaaagctaatttg

SEQ ID NO: 70123 - RNA, 21 nt, synthetic construct
  source 1..21: mol_type = other RNA
agctgggatcacaggcgttga

SEQ ID NO: 70124 - RNA, 21 nt, synthetic construct
  source 1..21: mol_type = other RNA
agctgggatggctgaaagaga

SEQ ID NO: 70125 - RNA, 21 nt, synthetic construct
  source 1..21: mol_type = other RNA
agctgggattacacacaccta

SEQ ID NO: 70126 - RNA, 21 nt, synthetic construct
  source 1..21: mol_type = other RNA
agctgggattacaggcgcacg

SEQ ID NO: 70127 - RNA, 21 nt, synthetic construct
  source 1..21: mol_type = other RNA
agctgggcccgcagtggctca

SEQ ID NO: 70128 - RNA, 21 nt, synthetic construct
  source 1..21: mol_type = other RNA
agctgggcgagatggcgtgcg

SEQ ID NO: 70129 - RNA, 21 nt, synthetic construct
  source 1..21: mol_type = other RNA
agctgggctagagccaggaag

SEQ ID NO: 70130 - RNA, 21 nt, synthetic construct
  source 1..21: mol_type = other RNA
agctggggcagcaaagcaaga

SEQ ID NO: 70131 - RNA, 21 nt, synthetic construct
  source 1..21: mol_type = other RNA
agctgggtgatgttcaaccct

SEQ ID NO: 70132 - RNA, 21 nt, synthetic construct
  source 1..21: mol_type = other RNA
agctggtaatacagtctgatt

SEQ ID NO: 70133 - RNA, 21 nt, synthetic construct
  source 1..21: mol_type = other RNA
agctgtaacagaggcatgcac

SEQ ID NO: 70134 - RNA, 21 nt, synthetic construct
  source 1..21: mol_type = other RNA
agctgtatttttgctcacact

SEQ ID NO: 70135 - RNA, 21 nt, synthetic construct
  source 1..21: mol_type = other RNA
agctgtcactctctttaggaa

SEQ ID NO: 70136 - RNA, 21 nt, synthetic construct
  source 1..21: mol_type = other RNA
agctgtccaacaagggttggt

SEQ ID NO: 70137 - RNA, 21 nt, synthetic construct
  source 1..21: mol_type = other RNA
agctgtccccaccgccttcct

SEQ ID NO: 70138 - RNA, 21 nt, synthetic construct
  source 1..21: mol_type = other RNA
agctgtccttctcgtgtgagc

SEQ ID NO: 70139 - RNA, 21 nt, synthetic construct
  source 1..21: mol_type = other RNA
agctgtcgctctcctgtgcca

SEQ ID NO: 70140 - RNA, 21 nt, synthetic construct
  source 1..21: mol_type = other RNA
agctgtctggattgattccag

SEQ ID NO: 70141 - RNA, 21 nt, synthetic construct
  source 1..21: mol_type = other RNA
agctgtgagtccttccagtat

SEQ ID NO: 70142 - RNA, 21 nt, synthetic construct
  source 1..21: mol_type = other RNA
agctgtgattaccggcatccg

SEQ ID NO: 70143 - RNA, 21 nt, synthetic construct
  source 1..21: mol_type = other RNA
agctgtgccgaggcagagaga

SEQ ID NO: 70144 - RNA, 21 nt, synthetic construct
  source 1..21: mol_type = other RNA
agctgtggaagcacagtctct

SEQ ID NO: 70145 - RNA, 21 nt, synthetic construct
  source 1..21: mol_type = other RNA
agctgtggatgttggtgagaa

SEQ ID NO: 70146 - RNA, 21 nt, synthetic construct
  source 1..21: mol_type = other RNA
agctgtggctcactcatttcc

SEQ ID NO: 70147 - RNA, 21 nt, synthetic construct
  source 1..21: mol_type = other RNA
agctgttaatggttagactgc

SEQ ID NO: 70148 - RNA, 21 nt, synthetic construct
  source 1..21: mol_type = other RNA
agctgttgaattgttgcgcgt

SEQ ID NO: 70149 - RNA, 21 nt, synthetic construct
  source 1..21: mol_type = other RNA
agctgtttgagctgaaagtaa

SEQ ID NO: 70150 - RNA, 21 nt, synthetic construct
  source 1..21: mol_type = other RNA
agctgttttcatgcgacatat

SEQ ID NO: 70151 - RNA, 21 nt, synthetic construct
  source 1..21: mol_type = other RNA
agctgttttggtaaaatgtgg

SEQ ID NO: 70152 - RNA, 21 nt, synthetic construct
  source 1..21: mol_type = other RNA
agcttaagagctaagactata

SEQ ID NO: 70153 - RNA, 21 nt, synthetic construct
  source 1..21: mol_type = other RNA
agcttaatttagatgagagtg

SEQ ID NO: 70154 - RNA, 21 nt, synthetic construct
  source 1..21: mol_type = other RNA
agcttacagcagatctgcttg

SEQ ID NO: 70155 - RNA, 21 nt, synthetic construct
  source 1..21: mol_type = other RNA
agcttacagtcatcacagtcc

SEQ ID NO: 70156 - RNA, 21 nt, synthetic construct
  source 1..21: mol_type = other RNA
agcttaccaagtgccgcgttt

SEQ ID NO: 70157 - RNA, 21 nt, synthetic construct
  source 1..21: mol_type = other RNA
agcttagaagaagacttagga

SEQ ID NO: 70158 - RNA, 21 nt, synthetic construct
  source 1..21: mol_type = other RNA
agcttaggtcagattcctttt

SEQ ID NO: 70159 - RNA, 21 nt, synthetic construct
  source 1..21: mol_type = other RNA
agcttaggtctttgatccatt

SEQ ID NO: 70160 - RNA, 21 nt, synthetic construct
  source 1..21: mol_type = other RNA
agcttataatttctgagagta

SEQ ID NO: 70161 - RNA, 21 nt, synthetic construct
  source 1..21: mol_type = other RNA
agcttatcaggcttgagtctg

SEQ ID NO: 70162 - RNA, 21 nt, synthetic construct
  source 1..21: mol_type = other RNA
agcttatgatcttgggaatac

SEQ ID NO: 70163 - RNA, 21 nt, synthetic construct
  source 1..21: mol_type = other RNA
agcttattaaaatgaacctgc

SEQ ID NO: 70164 - RNA, 21 nt, synthetic construct
  source 1..21: mol_type = other RNA
agcttcaaaccactatctaat

SEQ ID NO: 70165 - RNA, 21 nt, synthetic construct
  source 1..21: mol_type = other RNA
agcttcaacctcctgggctca

SEQ ID NO: 70166 - RNA, 21 nt, synthetic construct
  source 1..21: mol_type = other RNA
agcttcaatgagggcagagat

SEQ ID NO: 70167 - RNA, 21 nt, synthetic construct
  source 1..21: mol_type = other RNA
agcttcacgtgcattcatact

SEQ ID NO: 70168 - RNA, 21 nt, synthetic construct
  source 1..21: mol_type = other RNA
agcttcactcttctgcaagtt

SEQ ID NO: 70169 - RNA, 21 nt, synthetic construct
  source 1..21: mol_type = other RNA
agcttcacttctctgctgctg

SEQ ID NO: 70170 - RNA, 21 nt, synthetic construct
  source 1..21: mol_type = other RNA
agcttcatataagtggaatca

SEQ ID NO: 70171 - RNA, 21 nt, synthetic construct
  source 1..21: mol_type = other RNA
agcttccacccaagtggagcc

SEQ ID NO: 70172 - RNA, 21 nt, synthetic construct
  source 1..21: mol_type = other RNA
agcttcccccctctctctttc

SEQ ID NO: 70173 - RNA, 21 nt, synthetic construct
  source 1..21: mol_type = other RNA
agcttccgggacttggaagtg

SEQ ID NO: 70174 - RNA, 21 nt, synthetic construct
  source 1..21: mol_type = other RNA
agcttcctaaagagagtgaca

SEQ ID NO: 70175 - RNA, 21 nt, synthetic construct
  source 1..21: mol_type = other RNA
agcttcctaagaaagggtgtg

SEQ ID NO: 70176 - RNA, 21 nt, synthetic construct
  source 1..21: mol_type = other RNA
agcttcctacccaagcttagg

SEQ ID NO: 70177 - RNA, 21 nt, synthetic construct
  source 1..21: mol_type = other RNA
agcttcctcaggatctacatt

SEQ ID NO: 70178 - RNA, 21 nt, synthetic construct
  source 1..21: mol_type = other RNA
agcttcctctggctgacctgg

SEQ ID NO: 70179 - RNA, 21 nt, synthetic construct
  source 1..21: mol_type = other RNA
agcttccttgatcagcttcct

SEQ ID NO: 70180 - RNA, 21 nt, synthetic construct
  source 1..21: mol_type = other RNA
agcttcgaagcaaaacatatg

SEQ ID NO: 70181 - RNA, 21 nt, synthetic construct
  source 1..21: mol_type = other RNA
agcttcgacagtcccttgcct

SEQ ID NO: 70182 - RNA, 21 nt, synthetic construct
  source 1..21: mol_type = other RNA
agcttctgaattgagatgtac

SEQ ID NO: 70183 - RNA, 21 nt, synthetic construct
  source 1..21: mol_type = other RNA
agcttctgagcagtgtttcct

SEQ ID NO: 70184 - RNA, 21 nt, synthetic construct
  source 1..21: mol_type = other RNA
agcttctgagctgttaatggt

SEQ ID NO: 70185 - RNA, 21 nt, synthetic construct
  source 1..21: mol_type = other RNA
agcttcttgttagaattttgc

SEQ ID NO: 70186 - RNA, 21 nt, synthetic construct
  source 1..21: mol_type = other RNA
agcttgacaaaaggccccttg

SEQ ID NO: 70187 - RNA, 21 nt, synthetic construct
  source 1..21: mol_type = other RNA
agcttgacattcttaccttct

SEQ ID NO: 70188 - RNA, 21 nt, synthetic construct
  source 1..21: mol_type = other RNA
agcttgatctttacttccctt

SEQ ID NO: 70189 - RNA, 21 nt, synthetic construct
  source 1..21: mol_type = other RNA
agcttgctagtagcagaatcc

SEQ ID NO: 70190 - RNA, 21 nt, synthetic construct
  source 1..21: mol_type = other RNA
agcttggccaacatggcgaaa

SEQ ID NO: 70191 - RNA, 21 nt, synthetic construct
  source 1..21: mol_type = other RNA
agcttgggcaagagagcaagt

SEQ ID NO: 70192 - RNA, 21 nt, synthetic construct
  source 1..21: mol_type = other RNA
agcttgggctaaggtggagtg

SEQ ID NO: 70193 - RNA, 21 nt, synthetic construct
  source 1..21: mol_type = other RNA
agcttgggtaggaagctgatc

SEQ ID NO: 70194 - RNA, 21 nt, synthetic construct
  source 1..21: mol_type = other RNA
agctttaaactggatgaatac

SEQ ID NO: 70195 - RNA, 21 nt, synthetic construct
  source 1..21: mol_type = other RNA
agctttcagacttaactatag

SEQ ID NO: 70196 - RNA, 21 nt, synthetic construct
  source 1..21: mol_type = other RNA
agctttcagcactgctattga

SEQ ID NO: 70197 - RNA, 21 nt, synthetic construct
  source 1..21: mol_type = other RNA
agctttcattattaccaggtt

SEQ ID NO: 70198 - RNA, 21 nt, synthetic construct
  source 1..21: mol_type = other RNA
agctttccttagttcgaagtt

SEQ ID NO: 70199 - RNA, 21 nt, synthetic construct
  source 1..21: mol_type = other RNA
agctttctaattctgacaact

SEQ ID NO: 70200 - RNA, 21 nt, synthetic construct
  source 1..21: mol_type = other RNA
agctttctcccagctgtccaa

SEQ ID NO: 70201 - RNA, 21 nt, synthetic construct
  source 1..21: mol_type = other RNA
agctttcttttaaagacctca

SEQ ID NO: 70202 - RNA, 21 nt, synthetic construct
  source 1..21: mol_type = other RNA
agctttcttttccaaccaagc

SEQ ID NO: 70203 - RNA, 21 nt, synthetic construct
  source 1..21: mol_type = other RNA
agctttgatgcccccaccctt

SEQ ID NO: 70204 - RNA, 21 nt, synthetic construct
  source 1..21: mol_type = other RNA
agctttggctgaaatgctgta

SEQ ID NO: 70205 - RNA, 21 nt, synthetic construct
  source 1..21: mol_type = other RNA
agctttgtgactgtgagggta

SEQ ID NO: 70206 - RNA, 21 nt, synthetic construct
  source 1..21: mol_type = other RNA
agcttttacgaggacagactg

SEQ ID NO: 70207 - RNA, 21 nt, synthetic construct
  source 1..21: mol_type = other RNA
agcttttcctgctgtcgttta

SEQ ID NO: 70208 - RNA, 21 nt, synthetic construct
  source 1..21: mol_type = other RNA
agcttttctcctaagtcttct

SEQ ID NO: 70209 - RNA, 21 nt, synthetic construct
  source 1..21: mol_type = other RNA
agcttttgaaactgagcatcc

SEQ ID NO: 70210 - RNA, 21 nt, synthetic construct
  source 1..21: mol_type = other RNA
agctttttctttttaaacagg

SEQ ID NO: 70211 - RNA, 21 nt, synthetic construct
  source 1..21: mol_type = other RNA
aggaaaaaacacctaaagata

SEQ ID NO: 70212 - RNA, 21 nt, synthetic construct
  source 1..21: mol_type = other RNA
aggaaaaaacagttgctattc

SEQ ID NO: 70213 - RNA, 21 nt, synthetic construct
  source 1..21: mol_type = other RNA
aggaaaaaacgggttatacac

SEQ ID NO: 70214 - RNA, 21 nt, synthetic construct
  source 1..21: mol_type = other RNA
aggaaaaatctaaccctcaat

SEQ ID NO: 70215 - RNA, 21 nt, synthetic construct
  source 1..21: mol_type = other RNA
aggaaaaccagtttagaaaaa

SEQ ID NO: 70216 - RNA, 21 nt, synthetic construct
  source 1..21: mol_type = other RNA
aggaaaaccatgtcatgtata

SEQ ID NO: 70217 - RNA, 21 nt, synthetic construct
  source 1..21: mol_type = other RNA
aggaaaagaacacagtgttga

SEQ ID NO: 70218 - RNA, 21 nt, synthetic construct
  source 1..21: mol_type = other RNA
aggaaaagacttctcaaacag

SEQ ID NO: 70219 - RNA, 21 nt, synthetic construct
  source 1..21: mol_type = other RNA
aggaaaagacttgaggtttac

SEQ ID NO: 70220 - RNA, 21 nt, synthetic construct
  source 1..21: mol_type = other RNA
aggaaaagagaacattggttt

SEQ ID NO: 70221 - RNA, 21 nt, synthetic construct
  source 1..21: mol_type = other RNA
aggaaaagagatctagtgaag

SEQ ID NO: 70222 - RNA, 21 nt, synthetic construct
  source 1..21: mol_type = other RNA
aggaaaagcaaatgtcatctt

SEQ ID NO: 70223 - RNA, 21 nt, synthetic construct
  source 1..21: mol_type = other RNA
aggaaaagctaccctcgagta

SEQ ID NO: 70224 - RNA, 21 nt, synthetic construct
  source 1..21: mol_type = other RNA
aggaaaagtcagtaaaaaagg

SEQ ID NO: 70225 - RNA, 21 nt, synthetic construct
  source 1..21: mol_type = other RNA
aggaaaataatttgcaacaga

SEQ ID NO: 70226 - RNA, 21 nt, synthetic construct
  source 1..21: mol_type = other RNA
aggaaaatacatgaggcctct

SEQ ID NO: 70227 - RNA, 21 nt, synthetic construct
  source 1..21: mol_type = other RNA
aggaaaatagagttccatctg

SEQ ID NO: 70228 - RNA, 21 nt, synthetic construct
  source 1..21: mol_type = other RNA
aggaaacactataaatcagta

SEQ ID NO: 70229 - RNA, 21 nt, synthetic construct
  source 1..21: mol_type = other RNA
aggaaacactgctcagaagct

SEQ ID NO: 70230 - RNA, 21 nt, synthetic construct
  source 1..21: mol_type = other RNA
aggaaacagagttttccaata

SEQ ID NO: 70231 - RNA, 21 nt, synthetic construct
  source 1..21: mol_type = other RNA
aggaaaccccagggatatttt

SEQ ID NO: 70232 - RNA, 21 nt, synthetic construct
  source 1..21: mol_type = other RNA
aggaaacccgctctgggtgcg

SEQ ID NO: 70233 - RNA, 21 nt, synthetic construct
  source 1..21: mol_type = other RNA
aggaaacttccagaaacttcc

SEQ ID NO: 70234 - RNA, 21 nt, synthetic construct
  source 1..21: mol_type = other RNA
aggaaactttgcattcctgaa

SEQ ID NO: 70235 - RNA, 21 nt, synthetic construct
  source 1..21: mol_type = other RNA
aggaaagaccggggactgcaa

SEQ ID NO: 70236 - RNA, 21 nt, synthetic construct
  source 1..21: mol_type = other RNA
aggaaagatgaagtatagaaa

SEQ ID NO: 70237 - RNA, 21 nt, synthetic construct
  source 1..21: mol_type = other RNA
aggaaagatgtcttttaactt

SEQ ID NO: 70238 - RNA, 21 nt, synthetic construct
  source 1..21: mol_type = other RNA
aggaaagcacgtttgatctgg

SEQ ID NO: 70239 - RNA, 21 nt, synthetic construct
  source 1..21: mol_type = other RNA
aggaaagcaggttgcattaat

SEQ ID NO: 70240 - RNA, 21 nt, synthetic construct
  source 1..21: mol_type = other RNA
aggaaagcctgtgacagtatg

SEQ ID NO: 70241 - RNA, 21 nt, synthetic construct
  source 1..21: mol_type = other RNA
aggaaagctcaggaccagatg

SEQ ID NO: 70242 - RNA, 21 nt, synthetic construct
  source 1..21: mol_type = other RNA
aggaaaggagatactggccat

SEQ ID NO: 70243 - RNA, 21 nt, synthetic construct
  source 1..21: mol_type = other RNA
aggaaaggatggtttgattgt

SEQ ID NO: 70244 - RNA, 21 nt, synthetic construct
  source 1..21: mol_type = other RNA
aggaaaggtggggaagggatt

SEQ ID NO: 70245 - RNA, 21 nt, synthetic construct
  source 1..21: mol_type = other RNA
aggaaagtaactgttggcaag

SEQ ID NO: 70246 - RNA, 21 nt, synthetic construct
  source 1..21: mol_type = other RNA
aggaaagtgacagatgagaaa

SEQ ID NO: 70247 - RNA, 21 nt, synthetic construct
  source 1..21: mol_type = other RNA
aggaaagtgccagccaccctt

SEQ ID NO: 70248 - RNA, 21 nt, synthetic construct
  source 1..21: mol_type = other RNA
aggaaagtgtgcttgggctcc

SEQ ID NO: 70249 - RNA, 21 nt, synthetic construct
  source 1..21: mol_type = other RNA
aggaaataagaaggtttgtag

SEQ ID NO: 70250 - RNA, 21 nt, synthetic construct
  source 1..21: mol_type = other RNA
aggaaatacaaaaagtgatac

SEQ ID NO: 70251 - RNA, 21 nt, synthetic construct
  source 1..21: mol_type = other RNA
aggaaatacttgatctacatt

SEQ ID NO: 70252 - RNA, 21 nt, synthetic construct
  source 1..21: mol_type = other RNA
aggaaatgagtgtatgcaggg

SEQ ID NO: 70253 - RNA, 21 nt, synthetic construct
  source 1..21: mol_type = other RNA
aggaaatggacagcacattaa

SEQ ID NO: 70254 - RNA, 21 nt, synthetic construct
  source 1..21: mol_type = other RNA
aggaacacacacctattcata

SEQ ID NO: 70255 - RNA, 21 nt, synthetic construct
  source 1..21: mol_type = other RNA
aggaacaccttgaacatgaac

SEQ ID NO: 70256 - RNA, 21 nt, synthetic construct
  source 1..21: mol_type = other RNA
aggaacagattcacgcacagg

SEQ ID NO: 70257 - RNA, 21 nt, synthetic construct
  source 1..21: mol_type = other RNA
aggaaccatattagagtgaaa

SEQ ID NO: 70258 - RNA, 21 nt, synthetic construct
  source 1..21: mol_type = other RNA
aggaactaattgataaaactg

SEQ ID NO: 70259 - RNA, 21 nt, synthetic construct
  source 1..21: mol_type = other RNA
aggaactaatttcatacaagt

SEQ ID NO: 70260 - RNA, 21 nt, synthetic construct
  source 1..21: mol_type = other RNA
aggaactcatattagtctgta

SEQ ID NO: 70261 - RNA, 21 nt, synthetic construct
  source 1..21: mol_type = other RNA
aggaacttacagtaagatcct

SEQ ID NO: 70262 - RNA, 21 nt, synthetic construct
  source 1..21: mol_type = other RNA
aggaagaattattgtctgcaa

SEQ ID NO: 70263 - RNA, 21 nt, synthetic construct
  source 1..21: mol_type = other RNA
aggaagagactatctcttcct

SEQ ID NO: 70264 - RNA, 21 nt, synthetic construct
  source 1..21: mol_type = other RNA
aggaagagatagtctcttcct

SEQ ID NO: 70265 - RNA, 21 nt, synthetic construct
  source 1..21: mol_type = other RNA
aggaagaggaaggttcaagtt

SEQ ID NO: 70266 - RNA, 21 nt, synthetic construct
  source 1..21: mol_type = other RNA
aggaagaggcagctaagcacc

SEQ ID NO: 70267 - RNA, 21 nt, synthetic construct
  source 1..21: mol_type = other RNA
aggaagagtttatattctaag

SEQ ID NO: 70268 - RNA, 21 nt, synthetic construct
  source 1..21: mol_type = other RNA
aggaagcacattccttccgac

SEQ ID NO: 70269 - RNA, 21 nt, synthetic construct
  source 1..21: mol_type = other RNA
aggaagcaccaacccttgttg

SEQ ID NO: 70270 - RNA, 21 nt, synthetic construct
  source 1..21: mol_type = other RNA
aggaagcagaatgtccatcag

SEQ ID NO: 70271 - RNA, 21 nt, synthetic construct
  source 1..21: mol_type = other RNA
aggaagccactgcattcatcc

SEQ ID NO: 70272 - RNA, 21 nt, synthetic construct
  source 1..21: mol_type = other RNA
aggaagctaatcaagccgcaa

SEQ ID NO: 70273 - RNA, 21 nt, synthetic construct
  source 1..21: mol_type = other RNA
aggaagctatggagcactgtg

SEQ ID NO: 70274 - RNA, 21 nt, synthetic construct
  source 1..21: mol_type = other RNA
aggaagctgatcaaggaagct

SEQ ID NO: 70275 - RNA, 21 nt, synthetic construct
  source 1..21: mol_type = other RNA
aggaagcttataatttctgag

SEQ ID NO: 70276 - RNA, 21 nt, synthetic construct
  source 1..21: mol_type = other RNA
aggaagcttcctaaagagagt

SEQ ID NO: 70277 - RNA, 21 nt, synthetic construct
  source 1..21: mol_type = other RNA
aggaagcttccttgatcagct

SEQ ID NO: 70278 - RNA, 21 nt, synthetic construct
  source 1..21: mol_type = other RNA
aggaaggaaaggagatactgg

SEQ ID NO: 70279 - RNA, 21 nt, synthetic construct
  source 1..21: mol_type = other RNA
aggaaggaacacacacctatt

SEQ ID NO: 70280 - RNA, 21 nt, synthetic construct
  source 1..21: mol_type = other RNA
aggaaggaattttaggacaag

SEQ ID NO: 70281 - RNA, 21 nt, synthetic construct
  source 1..21: mol_type = other RNA
aggaaggagaatcgcttaaac

SEQ ID NO: 70282 - RNA, 21 nt, synthetic construct
  source 1..21: mol_type = other RNA
aggaaggattggaatgagtcc

SEQ ID NO: 70283 - RNA, 21 nt, synthetic construct
  source 1..21: mol_type = other RNA
aggaaggcaggaggcctcaga

SEQ ID NO: 70284 - RNA, 21 nt, synthetic construct
  source 1..21: mol_type = other RNA
aggaaggcagggtaggaaggc

SEQ ID NO: 70285 - RNA, 21 nt, synthetic construct
  source 1..21: mol_type = other RNA
aggaaggcggtggggacagct

SEQ ID NO: 70286 - RNA, 21 nt, synthetic construct
  source 1..21: mol_type = other RNA
aggaagggagagatgcctatg

SEQ ID NO: 70287 - RNA, 21 nt, synthetic construct
  source 1..21: mol_type = other RNA
aggaagggcttgatctagtaa

SEQ ID NO: 70288 - RNA, 21 nt, synthetic construct
  source 1..21: mol_type = other RNA
aggaaggtcaaatggtaacag

SEQ ID NO: 70289 - RNA, 21 nt, synthetic construct
  source 1..21: mol_type = other RNA
aggaaggttcaagtttggctc

SEQ ID NO: 70290 - RNA, 21 nt, synthetic construct
  source 1..21: mol_type = other RNA
aggaagtatgagtcttccgtc

SEQ ID NO: 70291 - RNA, 21 nt, synthetic construct
  source 1..21: mol_type = other RNA
aggaagtcagcaactcttggc

SEQ ID NO: 70292 - RNA, 21 nt, synthetic construct
  source 1..21: mol_type = other RNA
aggaagtccatgaaacttatt

SEQ ID NO: 70293 - RNA, 21 nt, synthetic construct
  source 1..21: mol_type = other RNA
aggaagtgaccctgagtccag

SEQ ID NO: 70294 - RNA, 21 nt, synthetic construct
  source 1..21: mol_type = other RNA
aggaagtggctagacggaaaa

SEQ ID NO: 70295 - RNA, 21 nt, synthetic construct
  source 1..21: mol_type = other RNA
aggaagttgagaaagagggaa

SEQ ID NO: 70296 - RNA, 21 nt, synthetic construct
  source 1..21: mol_type = other RNA
aggaataaatggtagcttggg

SEQ ID NO: 70297 - RNA, 21 nt, synthetic construct
  source 1..21: mol_type = other RNA
aggaatagtattcaggacaga

SEQ ID NO: 70298 - RNA, 21 nt, synthetic construct
  source 1..21: mol_type = other RNA
aggaatataaacgtgtgtgta

SEQ ID NO: 70299 - RNA, 21 nt, synthetic construct
  source 1..21: mol_type = other RNA
aggaatccggctttatgagac

SEQ ID NO: 70300 - RNA, 21 nt, synthetic construct
  source 1..21: mol_type = other RNA
aggaatccttcagtcagttct

SEQ ID NO: 70301 - RNA, 21 nt, synthetic construct
  source 1..21: mol_type = other RNA
aggaatctgacctaagcttgg

SEQ ID NO: 70302 - RNA, 21 nt, synthetic construct
  source 1..21: mol_type = other RNA
aggaatgcaaagtttcctaca

SEQ ID NO: 70303 - RNA, 21 nt, synthetic construct
  source 1..21: mol_type = other RNA
aggaatgcctataaaatgctg

SEQ ID NO: 70304 - RNA, 21 nt, synthetic construct
  source 1..21: mol_type = other RNA
aggaatggaattctgatgcac

SEQ ID NO: 70305 - RNA, 21 nt, synthetic construct
  source 1..21: mol_type = other RNA
aggaatgtgcactcttttaaa

SEQ ID NO: 70306 - RNA, 21 nt, synthetic construct
  source 1..21: mol_type = other RNA
aggaatgtgcttcctaaacct

SEQ ID NO: 70307 - RNA, 21 nt, synthetic construct
  source 1..21: mol_type = other RNA
aggaattgtaatcacagtacg

SEQ ID NO: 70308 - RNA, 21 nt, synthetic construct
  source 1..21: mol_type = other RNA
aggaatttacatttccattca

SEQ ID NO: 70309 - RNA, 21 nt, synthetic construct
  source 1..21: mol_type = other RNA
aggaattttaggacaaggaaa

SEQ ID NO: 70310 - RNA, 21 nt, synthetic construct
  source 1..21: mol_type = other RNA
aggaattttcaggactcatga

SEQ ID NO: 70311 - RNA, 21 nt, synthetic construct
  source 1..21: mol_type = other RNA
aggacaaggaaaggatggttt

SEQ ID NO: 70312 - RNA, 21 nt, synthetic construct
  source 1..21: mol_type = other RNA
aggacaattgaatggggatgc

SEQ ID NO: 70313 - RNA, 21 nt, synthetic construct
  source 1..21: mol_type = other RNA
aggacacaaattatgactgag

SEQ ID NO: 70314 - RNA, 21 nt, synthetic construct
  source 1..21: mol_type = other RNA
aggacactagcaatccaggat

SEQ ID NO: 70315 - RNA, 21 nt, synthetic construct
  source 1..21: mol_type = other RNA
aggacactattgagagtgaaa

SEQ ID NO: 70316 - RNA, 21 nt, synthetic construct
  source 1..21: mol_type = other RNA
aggacactggaggtgcacatt

SEQ ID NO: 70317 - RNA, 21 nt, synthetic construct
  source 1..21: mol_type = other RNA
aggacagaaattcaacttggt

SEQ ID NO: 70318 - RNA, 21 nt, synthetic construct
  source 1..21: mol_type = other RNA
aggacagactgcagttggatt

SEQ ID NO: 70319 - RNA, 21 nt, synthetic construct
  source 1..21: mol_type = other RNA
aggacagagcagtaggcttag

SEQ ID NO: 70320 - RNA, 21 nt, synthetic construct
  source 1..21: mol_type = other RNA
aggacagattaaaatcagatt

SEQ ID NO: 70321 - RNA, 21 nt, synthetic construct
  source 1..21: mol_type = other RNA
aggacagcttccacccaagtg

SEQ ID NO: 70322 - RNA, 21 nt, synthetic construct
  source 1..21: mol_type = other RNA
aggacaggtcacattctgcct

SEQ ID NO: 70323 - RNA, 21 nt, synthetic construct
  source 1..21: mol_type = other RNA
aggacagtcatcctcaacaag

SEQ ID NO: 70324 - RNA, 21 nt, synthetic construct
  source 1..21: mol_type = other RNA
aggacagttattcttcagcaa

SEQ ID NO: 70325 - RNA, 21 nt, synthetic construct
  source 1..21: mol_type = other RNA
aggacagttggccttgaggtg

SEQ ID NO: 70326 - RNA, 21 nt, synthetic construct
  source 1..21: mol_type = other RNA
aggacatccacaacattgtgc

SEQ ID NO: 70327 - RNA, 21 nt, synthetic construct
  source 1..21: mol_type = other RNA
aggacatggagacagtgagca

SEQ ID NO: 70328 - RNA, 21 nt, synthetic construct
  source 1..21: mol_type = other RNA
aggacattagtggaaaaactg

SEQ ID NO: 70329 - RNA, 21 nt, synthetic construct
  source 1..21: mol_type = other RNA
aggacattatgctaagtaaaa

SEQ ID NO: 70330 - RNA, 21 nt, synthetic construct
  source 1..21: mol_type = other RNA
aggaccaactttaagcaaaat

SEQ ID NO: 70331 - RNA, 21 nt, synthetic construct
  source 1..21: mol_type = other RNA
aggaccaatttaccatctgac

SEQ ID NO: 70332 - RNA, 21 nt, synthetic construct
  source 1..21: mol_type = other RNA
aggaccagcttgggcaagaga

SEQ ID NO: 70333 - RNA, 21 nt, synthetic construct
  source 1..21: mol_type = other RNA
aggaccaggcagtcctctcac

SEQ ID NO: 70334 - RNA, 21 nt, synthetic construct
  source 1..21: mol_type = other RNA
aggaccaggtatggcgactca

SEQ ID NO: 70335 - RNA, 21 nt, synthetic construct
  source 1..21: mol_type = other RNA
aggaccataggcacgcgcccc

SEQ ID NO: 70336 - RNA, 21 nt, synthetic construct
  source 1..21: mol_type = other RNA
aggaccatctgttaaaagata

SEQ ID NO: 70337 - RNA, 21 nt, synthetic construct
  source 1..21: mol_type = other RNA
aggaccattagcagttctgta

SEQ ID NO: 70338 - RNA, 21 nt, synthetic construct
  source 1..21: mol_type = other RNA
aggacgatttttccaacagtt

SEQ ID NO: 70339 - RNA, 21 nt, synthetic construct
  source 1..21: mol_type = other RNA
aggacgctgatgacagttact

SEQ ID NO: 70340 - RNA, 21 nt, synthetic construct
  source 1..21: mol_type = other RNA
aggactcacagcttaccaagt

SEQ ID NO: 70341 - RNA, 21 nt, synthetic construct
  source 1..21: mol_type = other RNA
aggactcatgagagctgtgcc

SEQ ID NO: 70342 - RNA, 21 nt, synthetic construct
  source 1..21: mol_type = other RNA
aggactccacagagttcagct

SEQ ID NO: 70343 - RNA, 21 nt, synthetic construct
  source 1..21: mol_type = other RNA
aggactctgctcaaaggggca

SEQ ID NO: 70344 - RNA, 21 nt, synthetic construct
  source 1..21: mol_type = other RNA
aggactgaagtcctttcttgg

SEQ ID NO: 70345 - RNA, 21 nt, synthetic construct
  source 1..21: mol_type = other RNA
aggactgcctattttgtaatt

SEQ ID NO: 70346 - RNA, 21 nt, synthetic construct
  source 1..21: mol_type = other RNA
aggactgcctggtcctgaggg

SEQ ID NO: 70347 - RNA, 21 nt, synthetic construct
  source 1..21: mol_type = other RNA
aggactgcttgaggccacgag

SEQ ID NO: 70348 - RNA, 21 nt, synthetic construct
  source 1..21: mol_type = other RNA
aggactggaactcatttctgc

SEQ ID NO: 70349 - RNA, 21 nt, synthetic construct
  source 1..21: mol_type = other RNA
aggactggactccttctgaag

SEQ ID NO: 70350 - RNA, 21 nt, synthetic construct
  source 1..21: mol_type = other RNA
aggactggcttcagtgccaac

SEQ ID NO: 70351 - RNA, 21 nt, synthetic construct
  source 1..21: mol_type = other RNA
aggactgggatcctaagcatg

SEQ ID NO: 70352 - RNA, 21 nt, synthetic construct
  source 1..21: mol_type = other RNA
aggactgtgtgtgtccaggcc

SEQ ID NO: 70353 - RNA, 21 nt, synthetic construct
  source 1..21: mol_type = other RNA
aggacttcagtccttaccact

SEQ ID NO: 70354 - RNA, 21 nt, synthetic construct
  source 1..21: mol_type = other RNA
aggacttcatgtacaatgaat

SEQ ID NO: 70355 - RNA, 21 nt, synthetic construct
  source 1..21: mol_type = other RNA
aggacttgatctaaaatggaa

SEQ ID NO: 70356 - RNA, 21 nt, synthetic construct
  source 1..21: mol_type = other RNA
aggacttttggtacacatctt

SEQ ID NO: 70357 - RNA, 21 nt, synthetic construct
  source 1..21: mol_type = other RNA
aggagaaaacaaaaagaaact

SEQ ID NO: 70358 - RNA, 21 nt, synthetic construct
  source 1..21: mol_type = other RNA
aggagaaaagcttcataacat

SEQ ID NO: 70359 - RNA, 21 nt, synthetic construct
  source 1..21: mol_type = other RNA
aggagaaacatggcttagaaa

SEQ ID NO: 70360 - RNA, 21 nt, synthetic construct
  source 1..21: mol_type = other RNA
aggagaaaccatttacccctt

SEQ ID NO: 70361 - RNA, 21 nt, synthetic construct
  source 1..21: mol_type = other RNA
aggagaactgcctggacccgg

SEQ ID NO: 70362 - RNA, 21 nt, synthetic construct
  source 1..21: mol_type = other RNA
aggagaacttgtctcggattt

SEQ ID NO: 70363 - RNA, 21 nt, synthetic construct
  source 1..21: mol_type = other RNA
aggagaaggccttccacggaa

SEQ ID NO: 70364 - RNA, 21 nt, synthetic construct
  source 1..21: mol_type = other RNA
aggagaatctgggaggtggag

SEQ ID NO: 70365 - RNA, 21 nt, synthetic construct
  source 1..21: mol_type = other RNA
aggagaatggcatgaacccac

SEQ ID NO: 70366 - RNA, 21 nt, synthetic construct
  source 1..21: mol_type = other RNA
aggagacattacaattgatac

SEQ ID NO: 70367 - RNA, 21 nt, synthetic construct
  source 1..21: mol_type = other RNA
aggagaccagttaggaagcca

SEQ ID NO: 70368 - RNA, 21 nt, synthetic construct
  source 1..21: mol_type = other RNA
aggagacctactaaaagttga

SEQ ID NO: 70369 - RNA, 21 nt, synthetic construct
  source 1..21: mol_type = other RNA
aggagactatcgttatatcct

SEQ ID NO: 70370 - RNA, 21 nt, synthetic construct
  source 1..21: mol_type = other RNA
aggagagaaaaacaaaacaaa

SEQ ID NO: 70371 - RNA, 21 nt, synthetic construct
  source 1..21: mol_type = other RNA
aggagagaagagggggcataa

SEQ ID NO: 70372 - RNA, 21 nt, synthetic construct
  source 1..21: mol_type = other RNA
aggagagcgacagctacggag

SEQ ID NO: 70373 - RNA, 21 nt, synthetic construct
  source 1..21: mol_type = other RNA
aggagagtcgcttgaacctga

SEQ ID NO: 70374 - RNA, 21 nt, synthetic construct
  source 1..21: mol_type = other RNA
aggagatactggccatgtttt

SEQ ID NO: 70375 - RNA, 21 nt, synthetic construct
  source 1..21: mol_type = other RNA
aggagatatacaggaagagac

SEQ ID NO: 70376 - RNA, 21 nt, synthetic construct
  source 1..21: mol_type = other RNA
aggagatggcacataccatgg

SEQ ID NO: 70377 - RNA, 21 nt, synthetic construct
  source 1..21: mol_type = other RNA
aggagattaaggctggaggat

SEQ ID NO: 70378 - RNA, 21 nt, synthetic construct
  source 1..21: mol_type = other RNA
aggagcagtgtgaataggaaa

SEQ ID NO: 70379 - RNA, 21 nt, synthetic construct
  source 1..21: mol_type = other RNA
aggagcagttactcctgagca

SEQ ID NO: 70380 - RNA, 21 nt, synthetic construct
  source 1..21: mol_type = other RNA
aggagcatagcttgaaccagg

SEQ ID NO: 70381 - RNA, 21 nt, synthetic construct
  source 1..21: mol_type = other RNA
aggagccaaacatcatgattt

SEQ ID NO: 70382 - RNA, 21 nt, synthetic construct
  source 1..21: mol_type = other RNA
aggagccaagtaaaagcaacc

SEQ ID NO: 70383 - RNA, 21 nt, synthetic construct
  source 1..21: mol_type = other RNA
aggagcccaccaccatgcctg

SEQ ID NO: 70384 - RNA, 21 nt, synthetic construct
  source 1..21: mol_type = other RNA
aggagccctgctgtggccgag

SEQ ID NO: 70385 - RNA, 21 nt, synthetic construct
  source 1..21: mol_type = other RNA
aggagcctagtcatccactgc

SEQ ID NO: 70386 - RNA, 21 nt, synthetic construct
  source 1..21: mol_type = other RNA
aggagccttgctgttgtaatg

SEQ ID NO: 70387 - RNA, 21 nt, synthetic construct
  source 1..21: mol_type = other RNA
aggagcgccctggcattgtcc

SEQ ID NO: 70388 - RNA, 21 nt, synthetic construct
  source 1..21: mol_type = other RNA
aggagctagaacagaataaaa

SEQ ID NO: 70389 - RNA, 21 nt, synthetic construct
  source 1..21: mol_type = other RNA
aggagctgagaccacagacgt

SEQ ID NO: 70390 - RNA, 21 nt, synthetic construct
  source 1..21: mol_type = other RNA
aggaggaaaataatttgcaac

SEQ ID NO: 70391 - RNA, 21 nt, synthetic construct
  source 1..21: mol_type = other RNA
aggaggaactaattgataaaa

SEQ ID NO: 70392 - RNA, 21 nt, synthetic construct
  source 1..21: mol_type = other RNA
aggaggaagagatagtctctt

SEQ ID NO: 70393 - RNA, 21 nt, synthetic construct
  source 1..21: mol_type = other RNA
aggaggaggagggtgcagcct

SEQ ID NO: 70394 - RNA, 21 nt, synthetic construct
  source 1..21: mol_type = other RNA
aggaggagggtgcagcctcta

SEQ ID NO: 70395 - RNA, 21 nt, synthetic construct
  source 1..21: mol_type = other RNA
aggaggagggttagattatat

SEQ ID NO: 70396 - RNA, 21 nt, synthetic construct
  source 1..21: mol_type = other RNA
aggaggcaaaggttgagacaa

SEQ ID NO: 70397 - RNA, 21 nt, synthetic construct
  source 1..21: mol_type = other RNA
aggaggcacctgaacccagga

SEQ ID NO: 70398 - RNA, 21 nt, synthetic construct
  source 1..21: mol_type = other RNA
aggaggcctcagaattaatat

SEQ ID NO: 70399 - RNA, 21 nt, synthetic construct
  source 1..21: mol_type = other RNA
aggaggctattaactttgaaa

SEQ ID NO: 70400 - RNA, 21 nt, synthetic construct
  source 1..21: mol_type = other RNA
aggaggctgaggcaggaggca

SEQ ID NO: 70401 - RNA, 21 nt, synthetic construct
  source 1..21: mol_type = other RNA
aggagggaaaatgtttatttt

SEQ ID NO: 70402 - RNA, 21 nt, synthetic construct
  source 1..21: mol_type = other RNA
aggagggactgaaaccagtgg

SEQ ID NO: 70403 - RNA, 21 nt, synthetic construct
  source 1..21: mol_type = other RNA
aggagggaggattgtttgagg

SEQ ID NO: 70404 - RNA, 21 nt, synthetic construct
  source 1..21: mol_type = other RNA
aggagggatgcattctagaaa

SEQ ID NO: 70405 - RNA, 21 nt, synthetic construct
  source 1..21: mol_type = other RNA
aggagggtgcagcctctaatc

SEQ ID NO: 70406 - RNA, 21 nt, synthetic construct
  source 1..21: mol_type = other RNA
aggagggtgtgatcaggaaag

SEQ ID NO: 70407 - RNA, 21 nt, synthetic construct
  source 1..21: mol_type = other RNA
aggagggttagattatatggt

SEQ ID NO: 70408 - RNA, 21 nt, synthetic construct
  source 1..21: mol_type = other RNA
aggaggtcatactggagcagg

SEQ ID NO: 70409 - RNA, 21 nt, synthetic construct
  source 1..21: mol_type = other RNA
aggaggtctaagagataacta

SEQ ID NO: 70410 - RNA, 21 nt, synthetic construct
  source 1..21: mol_type = other RNA
aggaggttgaagctctagtga

SEQ ID NO: 70411 - RNA, 21 nt, synthetic construct
  source 1..21: mol_type = other RNA
aggaggtttgcactggcacag

SEQ ID NO: 70412 - RNA, 21 nt, synthetic construct
  source 1..21: mol_type = other RNA
aggagtaactgctcctctgac

SEQ ID NO: 70413 - RNA, 21 nt, synthetic construct
  source 1..21: mol_type = other RNA
aggagtacagtgcataccacc

SEQ ID NO: 70414 - RNA, 21 nt, synthetic construct
  source 1..21: mol_type = other RNA
aggagtcaactaatcaaacat

SEQ ID NO: 70415 - RNA, 21 nt, synthetic construct
  source 1..21: mol_type = other RNA
aggagtccagtcctgctaaca

SEQ ID NO: 70416 - RNA, 21 nt, synthetic construct
  source 1..21: mol_type = other RNA
aggagtctgcccatcctatct

SEQ ID NO: 70417 - RNA, 21 nt, synthetic construct
  source 1..21: mol_type = other RNA
aggagttaccataaaaccatt

SEQ ID NO: 70418 - RNA, 21 nt, synthetic construct
  source 1..21: mol_type = other RNA
aggagttcagctttaaagaga

SEQ ID NO: 70419 - RNA, 21 nt, synthetic construct
  source 1..21: mol_type = other RNA
aggagttcattcgtagcaggt

SEQ ID NO: 70420 - RNA, 21 nt, synthetic construct
  source 1..21: mol_type = other RNA
aggagttccgatttctcggcc

SEQ ID NO: 70421 - RNA, 21 nt, synthetic construct
  source 1..21: mol_type = other RNA
aggagttcttatgaggttatt

SEQ ID NO: 70422 - RNA, 21 nt, synthetic construct
  source 1..21: mol_type = other RNA
aggagttgcatcacttgaggt

SEQ ID NO: 70423 - RNA, 21 nt, synthetic construct
  source 1..21: mol_type = other RNA
aggagtttgagactgcagtga

SEQ ID NO: 70424 - RNA, 21 nt, synthetic construct
  source 1..21: mol_type = other RNA
aggagttttgcctctttgcta

SEQ ID NO: 70425 - RNA, 21 nt, synthetic construct
  source 1..21: mol_type = other RNA
aggataaacaaagagaacaat

SEQ ID NO: 70426 - RNA, 21 nt, synthetic construct
  source 1..21: mol_type = other RNA
aggataaggggcagggtggag

SEQ ID NO: 70427 - RNA, 21 nt, synthetic construct
  source 1..21: mol_type = other RNA
aggataatatctggactgaaa

SEQ ID NO: 70428 - RNA, 21 nt, synthetic construct
  source 1..21: mol_type = other RNA
aggataatgtccagaggagga

SEQ ID NO: 70429 - RNA, 21 nt, synthetic construct
  source 1..21: mol_type = other RNA
aggatacaaaaagcacctacc

SEQ ID NO: 70430 - RNA, 21 nt, synthetic construct
  source 1..21: mol_type = other RNA
aggatactgagaacagaattt

SEQ ID NO: 70431 - RNA, 21 nt, synthetic construct
  source 1..21: mol_type = other RNA
aggatataacgatagtctcct

SEQ ID NO: 70432 - RNA, 21 nt, synthetic construct
  source 1..21: mol_type = other RNA
aggatataagagtgggcaaaa

SEQ ID NO: 70433 - RNA, 21 nt, synthetic construct
  source 1..21: mol_type = other RNA
aggatatcagaagtgctgact

SEQ ID NO: 70434 - RNA, 21 nt, synthetic construct
  source 1..21: mol_type = other RNA
aggatatgggccaaagacaga

SEQ ID NO: 70435 - RNA, 21 nt, synthetic construct
  source 1..21: mol_type = other RNA
aggatatgttttctaaacctt

SEQ ID NO: 70436 - RNA, 21 nt, synthetic construct
  source 1..21: mol_type = other RNA
aggatcaaatctggctgcagg

SEQ ID NO: 70437 - RNA, 21 nt, synthetic construct
  source 1..21: mol_type = other RNA
aggatcaccaaagacttcagg

SEQ ID NO: 70438 - RNA, 21 nt, synthetic construct
  source 1..21: mol_type = other RNA
aggatccagatgtagagaaac

SEQ ID NO: 70439 - RNA, 21 nt, synthetic construct
  source 1..21: mol_type = other RNA
aggatccagtctctacccagc

SEQ ID NO: 70440 - RNA, 21 nt, synthetic construct
  source 1..21: mol_type = other RNA
aggatcccagtcctttgggag

SEQ ID NO: 70441 - RNA, 21 nt, synthetic construct
  source 1..21: mol_type = other RNA
aggatcccggaacaggaaaag

SEQ ID NO: 70442 - RNA, 21 nt, synthetic construct
  source 1..21: mol_type = other RNA
aggatcgttagtattttcaca

SEQ ID NO: 70443 - RNA, 21 nt, synthetic construct
  source 1..21: mol_type = other RNA
aggatctgttggtgcttagct

SEQ ID NO: 70444 - RNA, 21 nt, synthetic construct
  source 1..21: mol_type = other RNA
aggatcttactgtaagttcct

SEQ ID NO: 70445 - RNA, 21 nt, synthetic construct
  source 1..21: mol_type = other RNA
aggatgaattacaaatgaaag

SEQ ID NO: 70446 - RNA, 21 nt, synthetic construct
  source 1..21: mol_type = other RNA
aggatgaccttgacaataaat

SEQ ID NO: 70447 - RNA, 21 nt, synthetic construct
  source 1..21: mol_type = other RNA
aggatgactgtcctgaattct

SEQ ID NO: 70448 - RNA, 21 nt, synthetic construct
  source 1..21: mol_type = other RNA
aggatgaggggctgagccttc

SEQ ID NO: 70449 - RNA, 21 nt, synthetic construct
  source 1..21: mol_type = other RNA
aggatgcacaagacagatgtg

SEQ ID NO: 70450 - RNA, 21 nt, synthetic construct
  source 1..21: mol_type = other RNA
aggatggcatgaaatgggttt

SEQ ID NO: 70451 - RNA, 21 nt, synthetic construct
  source 1..21: mol_type = other RNA
aggatggccagtcatgtgggg

SEQ ID NO: 70452 - RNA, 21 nt, synthetic construct
  source 1..21: mol_type = other RNA
aggatggcttgagcccagggg

SEQ ID NO: 70453 - RNA, 21 nt, synthetic construct
  source 1..21: mol_type = other RNA
aggatgggcagactccttccc

SEQ ID NO: 70454 - RNA, 21 nt, synthetic construct
  source 1..21: mol_type = other RNA
aggatgggcattccagagggt

SEQ ID NO: 70455 - RNA, 21 nt, synthetic construct
  source 1..21: mol_type = other RNA
aggatggtttgattgttccag

SEQ ID NO: 70456 - RNA, 21 nt, synthetic construct
  source 1..21: mol_type = other RNA
aggatgtcaacaaaatactag

SEQ ID NO: 70457 - RNA, 21 nt, synthetic construct
  source 1..21: mol_type = other RNA
aggatgtcaactgaggcagag

SEQ ID NO: 70458 - RNA, 21 nt, synthetic construct
  source 1..21: mol_type = other RNA
aggatgtctttgggaaggccc

SEQ ID NO: 70459 - RNA, 21 nt, synthetic construct
  source 1..21: mol_type = other RNA
aggatgtgtacccgtgtgttt

SEQ ID NO: 70460 - RNA, 21 nt, synthetic construct
  source 1..21: mol_type = other RNA
aggattaagacactacaaaaa

SEQ ID NO: 70461 - RNA, 21 nt, synthetic construct
  source 1..21: mol_type = other RNA
aggattaatctttctgaactc

SEQ ID NO: 70462 - RNA, 21 nt, synthetic construct
  source 1..21: mol_type = other RNA
aggattacaatgtaaggtgca

SEQ ID NO: 70463 - RNA, 21 nt, synthetic construct
  source 1..21: mol_type = other RNA
aggattagaaagtagattagc

SEQ ID NO: 70464 - RNA, 21 nt, synthetic construct
  source 1..21: mol_type = other RNA
aggattagtgttaattcttcc

SEQ ID NO: 70465 - RNA, 21 nt, synthetic construct
  source 1..21: mol_type = other RNA
aggattatggctagaaacttg

SEQ ID NO: 70466 - RNA, 21 nt, synthetic construct
  source 1..21: mol_type = other RNA
aggattccaggtttacaggat

SEQ ID NO: 70467 - RNA, 21 nt, synthetic construct
  source 1..21: mol_type = other RNA
aggattcctccctggagaggc

SEQ ID NO: 70468 - RNA, 21 nt, synthetic construct
  source 1..21: mol_type = other RNA
aggattcgattaaaataacac

SEQ ID NO: 70469 - RNA, 21 nt, synthetic construct
  source 1..21: mol_type = other RNA
aggattcgggggagagcactg

SEQ ID NO: 70470 - RNA, 21 nt, synthetic construct
  source 1..21: mol_type = other RNA
aggattcttgttaagcatttt

SEQ ID NO: 70471 - RNA, 21 nt, synthetic construct
  source 1..21: mol_type = other RNA
aggattgaatggaaagaaata

SEQ ID NO: 70472 - RNA, 21 nt, synthetic construct
  source 1..21: mol_type = other RNA
aggattgcctaacaccagtaa

SEQ ID NO: 70473 - RNA, 21 nt, synthetic construct
  source 1..21: mol_type = other RNA
aggattggaatgagtccagct

SEQ ID NO: 70474 - RNA, 21 nt, synthetic construct
  source 1..21: mol_type = other RNA
aggattggagactgataaact

SEQ ID NO: 70475 - RNA, 21 nt, synthetic construct
  source 1..21: mol_type = other RNA
aggattgggaagattggcttt

SEQ ID NO: 70476 - RNA, 21 nt, synthetic construct
  source 1..21: mol_type = other RNA
aggattgttcatgtctgtgta

SEQ ID NO: 70477 - RNA, 21 nt, synthetic construct
  source 1..21: mol_type = other RNA
aggattgtttgaggctgggag

SEQ ID NO: 70478 - RNA, 21 nt, synthetic construct
  source 1..21: mol_type = other RNA
aggatttgtttgtgaagatac

SEQ ID NO: 70479 - RNA, 21 nt, synthetic construct
  source 1..21: mol_type = other RNA
aggattttcgtatcttttaac

SEQ ID NO: 70480 - RNA, 21 nt, synthetic construct
  source 1..21: mol_type = other RNA
aggattttctattcattacca

SEQ ID NO: 70481 - RNA, 21 nt, synthetic construct
  source 1..21: mol_type = other RNA
aggattttggattgcgattgt

SEQ ID NO: 70482 - RNA, 21 nt, synthetic construct
  source 1..21: mol_type = other RNA
aggcaaaactcctgaacaaaa

SEQ ID NO: 70483 - RNA, 21 nt, synthetic construct
  source 1..21: mol_type = other RNA
aggcaaaagatgatgaacaaa

SEQ ID NO: 70484 - RNA, 21 nt, synthetic construct
  source 1..21: mol_type = other RNA
aggcaaacagcgccacttaaa

SEQ ID NO: 70485 - RNA, 21 nt, synthetic construct
  source 1..21: mol_type = other RNA
aggcaaaccacacagagaaca

SEQ ID NO: 70486 - RNA, 21 nt, synthetic construct
  source 1..21: mol_type = other RNA
aggcaaaggaaaaaacttttt

SEQ ID NO: 70487 - RNA, 21 nt, synthetic construct
  source 1..21: mol_type = other RNA
aggcaaaggaaaaatctaacc

SEQ ID NO: 70488 - RNA, 21 nt, synthetic construct
  source 1..21: mol_type = other RNA
aggcaaaggccgctcttgacc

SEQ ID NO: 70489 - RNA, 21 nt, synthetic construct
  source 1..21: mol_type = other RNA
aggcaaaggttgagacaagac

SEQ ID NO: 70490 - RNA, 21 nt, synthetic construct
  source 1..21: mol_type = other RNA
aggcaaattcatagatcacca

SEQ ID NO: 70491 - RNA, 21 nt, synthetic construct
  source 1..21: mol_type = other RNA
aggcaacagtcattcaggtct

SEQ ID NO: 70492 - RNA, 21 nt, synthetic construct
  source 1..21: mol_type = other RNA
aggcaacatccctatgcaata

SEQ ID NO: 70493 - RNA, 21 nt, synthetic construct
  source 1..21: mol_type = other RNA
aggcaaccttgggagaaaatt

SEQ ID NO: 70494 - RNA, 21 nt, synthetic construct
  source 1..21: mol_type = other RNA
aggcaagagagcaagactcaa

SEQ ID NO: 70495 - RNA, 21 nt, synthetic construct
  source 1..21: mol_type = other RNA
aggcaagggactgtcgaagct

SEQ ID NO: 70496 - RNA, 21 nt, synthetic construct
  source 1..21: mol_type = other RNA
aggcaatccttccgcctcagc

SEQ ID NO: 70497 - RNA, 21 nt, synthetic construct
  source 1..21: mol_type = other RNA
aggcaatgagtctgacatact

SEQ ID NO: 70498 - RNA, 21 nt, synthetic construct
  source 1..21: mol_type = other RNA
aggcaatgctctcttccccca

SEQ ID NO: 70499 - RNA, 21 nt, synthetic construct
  source 1..21: mol_type = other RNA
aggcaatgtaacacagttcta

SEQ ID NO: 70500 - RNA, 21 nt, synthetic construct
  source 1..21: mol_type = other RNA
aggcaatgtagggaatagaca

SEQ ID NO: 70501 - RNA, 21 nt, synthetic construct
  source 1..21: mol_type = other RNA
aggcaatgttgattttgaggc

SEQ ID NO: 70502 - RNA, 21 nt, synthetic construct
  source 1..21: mol_type = other RNA
aggcaatttagaattctctct

SEQ ID NO: 70503 - RNA, 21 nt, synthetic construct
  source 1..21: mol_type = other RNA
aggcacagtctgtgcttaagg

SEQ ID NO: 70504 - RNA, 21 nt, synthetic construct
  source 1..21: mol_type = other RNA
aggcacattcaagcagaaatg

SEQ ID NO: 70505 - RNA, 21 nt, synthetic construct
  source 1..21: mol_type = other RNA
aggcacctgaacccaggaggc

SEQ ID NO: 70506 - RNA, 21 nt, synthetic construct
  source 1..21: mol_type = other RNA
aggcaccttcagaagccctgc

SEQ ID NO: 70507 - RNA, 21 nt, synthetic construct
  source 1..21: mol_type = other RNA
aggcactaacaaagggcctgt

SEQ ID NO: 70508 - RNA, 21 nt, synthetic construct
  source 1..21: mol_type = other RNA
aggcactgtatggttcttaag

SEQ ID NO: 70509 - RNA, 21 nt, synthetic construct
  source 1..21: mol_type = other RNA
aggcagaacacactgctcttc

SEQ ID NO: 70510 - RNA, 21 nt, synthetic construct
  source 1..21: mol_type = other RNA
aggcagaaccacctgggggag

SEQ ID NO: 70511 - RNA, 21 nt, synthetic construct
  source 1..21: mol_type = other RNA
aggcagaatgtgacctgtcct

SEQ ID NO: 70512 - RNA, 21 nt, synthetic construct
  source 1..21: mol_type = other RNA
aggcagaattatagagggcct

SEQ ID NO: 70513 - RNA, 21 nt, synthetic construct
  source 1..21: mol_type = other RNA
aggcagagagagtaactggtc

SEQ ID NO: 70514 - RNA, 21 nt, synthetic construct
  source 1..21: mol_type = other RNA
aggcagagagatggtgggaga

SEQ ID NO: 70515 - RNA, 21 nt, synthetic construct
  source 1..21: mol_type = other RNA
aggcagagtagagaaggcttt

SEQ ID NO: 70516 - RNA, 21 nt, synthetic construct
  source 1..21: mol_type = other RNA
aggcagatcacaaggtcagaa

SEQ ID NO: 70517 - RNA, 21 nt, synthetic construct
  source 1..21: mol_type = other RNA
aggcagatcacgaggtcgaga

SEQ ID NO: 70518 - RNA, 21 nt, synthetic construct
  source 1..21: mol_type = other RNA
aggcagatgttgcggtgagca

SEQ ID NO: 70519 - RNA, 21 nt, synthetic construct
  source 1..21: mol_type = other RNA
aggcagcccgacctccagcgc

SEQ ID NO: 70520 - RNA, 21 nt, synthetic construct
  source 1..21: mol_type = other RNA
aggcagctaagcaccaacaga

SEQ ID NO: 70521 - RNA, 21 nt, synthetic construct
  source 1..21: mol_type = other RNA
aggcaggactgcttgaggcca

SEQ ID NO: 70522 - RNA, 21 nt, synthetic construct
  source 1..21: mol_type = other RNA
aggcaggagaactgcctggac

SEQ ID NO: 70523 - RNA, 21 nt, synthetic construct
  source 1..21: mol_type = other RNA
aggcaggagaatggcatgaac

SEQ ID NO: 70524 - RNA, 21 nt, synthetic construct
  source 1..21: mol_type = other RNA
aggcaggagagtcgcttgaac

SEQ ID NO: 70525 - RNA, 21 nt, synthetic construct
  source 1..21: mol_type = other RNA
aggcaggagcagtgtgaatag

SEQ ID NO: 70526 - RNA, 21 nt, synthetic construct
  source 1..21: mol_type = other RNA
aggcaggagcatagcttgaac

SEQ ID NO: 70527 - RNA, 21 nt, synthetic construct
  source 1..21: mol_type = other RNA
aggcaggaggcacctgaaccc

SEQ ID NO: 70528 - RNA, 21 nt, synthetic construct
  source 1..21: mol_type = other RNA
aggcaggaggcctcagaatta

SEQ ID NO: 70529 - RNA, 21 nt, synthetic construct
  source 1..21: mol_type = other RNA
aggcaggcagatcacgaggtc

SEQ ID NO: 70530 - RNA, 21 nt, synthetic construct
  source 1..21: mol_type = other RNA
aggcagggcttggtggcccac

SEQ ID NO: 70531 - RNA, 21 nt, synthetic construct
  source 1..21: mol_type = other RNA
aggcagggtaggaaggcggtg

SEQ ID NO: 70532 - RNA, 21 nt, synthetic construct
  source 1..21: mol_type = other RNA
aggcaggtggatatctgaggt

SEQ ID NO: 70533 - RNA, 21 nt, synthetic construct
  source 1..21: mol_type = other RNA
aggcaggtggatcaggagatt

SEQ ID NO: 70534 - RNA, 21 nt, synthetic construct
  source 1..21: mol_type = other RNA
aggcagtaccattccccttgc

SEQ ID NO: 70535 - RNA, 21 nt, synthetic construct
  source 1..21: mol_type = other RNA
aggcagtcctctactttcaca

SEQ ID NO: 70536 - RNA, 21 nt, synthetic construct
  source 1..21: mol_type = other RNA
aggcagtcctctcactccaaa

SEQ ID NO: 70537 - RNA, 21 nt, synthetic construct
  source 1..21: mol_type = other RNA
aggcagtctagtccatgaaga

SEQ ID NO: 70538 - RNA, 21 nt, synthetic construct
  source 1..21: mol_type = other RNA
aggcagttattaagagtgtgc

SEQ ID NO: 70539 - RNA, 21 nt, synthetic construct
  source 1..21: mol_type = other RNA
aggcagttgagttttcaacct

SEQ ID NO: 70540 - RNA, 21 nt, synthetic construct
  source 1..21: mol_type = other RNA
aggcataagccaccgcactca

SEQ ID NO: 70541 - RNA, 21 nt, synthetic construct
  source 1..21: mol_type = other RNA
aggcatagggccttctacttt

SEQ ID NO: 70542 - RNA, 21 nt, synthetic construct
  source 1..21: mol_type = other RNA
aggcatataaactggaaggaa

SEQ ID NO: 70543 - RNA, 21 nt, synthetic construct
  source 1..21: mol_type = other RNA
aggcatataataagcagaatt

SEQ ID NO: 70544 - RNA, 21 nt, synthetic construct
  source 1..21: mol_type = other RNA
aggcatattattgtaacttga

SEQ ID NO: 70545 - RNA, 21 nt, synthetic construct
  source 1..21: mol_type = other RNA
aggcatctagttaccactagc

SEQ ID NO: 70546 - RNA, 21 nt, synthetic construct
  source 1..21: mol_type = other RNA
aggcatctatttccccattag

SEQ ID NO: 70547 - RNA, 21 nt, synthetic construct
  source 1..21: mol_type = other RNA
aggcatctctcccttcctgtt

SEQ ID NO: 70548 - RNA, 21 nt, synthetic construct
  source 1..21: mol_type = other RNA
aggcatctctctaaaaacatc

SEQ ID NO: 70549 - RNA, 21 nt, synthetic construct
  source 1..21: mol_type = other RNA
aggcatgaaattcttgggtga

SEQ ID NO: 70550 - RNA, 21 nt, synthetic construct
  source 1..21: mol_type = other RNA
aggcatgagccacagggccca

SEQ ID NO: 70551 - RNA, 21 nt, synthetic construct
  source 1..21: mol_type = other RNA
aggcatgagccactgcgggcc

SEQ ID NO: 70552 - RNA, 21 nt, synthetic construct
  source 1..21: mol_type = other RNA
aggcatgagtcgccatacctg

SEQ ID NO: 70553 - RNA, 21 nt, synthetic construct
  source 1..21: mol_type = other RNA
aggcatgatggctcaacgcct

SEQ ID NO: 70554 - RNA, 21 nt, synthetic construct
  source 1..21: mol_type = other RNA
aggcatgcacggacttggcac

SEQ ID NO: 70555 - RNA, 21 nt, synthetic construct
  source 1..21: mol_type = other RNA
aggcatgccgggacaagagtc

SEQ ID NO: 70556 - RNA, 21 nt, synthetic construct
  source 1..21: mol_type = other RNA
aggcatgcgccatcacaccca

SEQ ID NO: 70557 - RNA, 21 nt, synthetic construct
  source 1..21: mol_type = other RNA
aggcatgctaactgcagaggt

SEQ ID NO: 70558 - RNA, 21 nt, synthetic construct
  source 1..21: mol_type = other RNA
aggcatgggggcgcgtgccta

SEQ ID NO: 70559 - RNA, 21 nt, synthetic construct
  source 1..21: mol_type = other RNA
aggcattagtgaattcacagt

SEQ ID NO: 70560 - RNA, 21 nt, synthetic construct
  source 1..21: mol_type = other RNA
aggcattgtgctcagtggttc

SEQ ID NO: 70561 - RNA, 21 nt, synthetic construct
  source 1..21: mol_type = other RNA
aggccaaatgaaaggcgtcgg

SEQ ID NO: 70562 - RNA, 21 nt, synthetic construct
  source 1..21: mol_type = other RNA
aggccaacagggccactgaga

SEQ ID NO: 70563 - RNA, 21 nt, synthetic construct
  source 1..21: mol_type = other RNA
aggccaactgtcctctcttgt

SEQ ID NO: 70564 - RNA, 21 nt, synthetic construct
  source 1..21: mol_type = other RNA
aggccacaaagtccccacatg

SEQ ID NO: 70565 - RNA, 21 nt, synthetic construct
  source 1..21: mol_type = other RNA
aggccactctcatctaaatta

SEQ ID NO: 70566 - RNA, 21 nt, synthetic construct
  source 1..21: mol_type = other RNA
aggccagagggaatctaggaa

SEQ ID NO: 70567 - RNA, 21 nt, synthetic construct
  source 1..21: mol_type = other RNA
aggccagatatccataaggaa

SEQ ID NO: 70568 - RNA, 21 nt, synthetic construct
  source 1..21: mol_type = other RNA
aggccagtccctagtgtctcc

SEQ ID NO: 70569 - RNA, 21 nt, synthetic construct
  source 1..21: mol_type = other RNA
aggccagtgagtgatgaaaag

SEQ ID NO: 70570 - RNA, 21 nt, synthetic construct
  source 1..21: mol_type = other RNA
aggccataaatcaaggtacaa

SEQ ID NO: 70571 - RNA, 21 nt, synthetic construct
  source 1..21: mol_type = other RNA
aggccatcttcatttctaagc

SEQ ID NO: 70572 - RNA, 21 nt, synthetic construct
  source 1..21: mol_type = other RNA
aggccatttgattgccagttt

SEQ ID NO: 70573 - RNA, 21 nt, synthetic construct
  source 1..21: mol_type = other RNA
aggcccaaaaagtttttaaaa

SEQ ID NO: 70574 - RNA, 21 nt, synthetic construct
  source 1..21: mol_type = other RNA
aggcccaccatgatgcagccc

SEQ ID NO: 70575 - RNA, 21 nt, synthetic construct
  source 1..21: mol_type = other RNA
aggccccaggggacatagatg

SEQ ID NO: 70576 - RNA, 21 nt, synthetic construct
  source 1..21: mol_type = other RNA
aggccccgatgccatgtgttt

SEQ ID NO: 70577 - RNA, 21 nt, synthetic construct
  source 1..21: mol_type = other RNA
aggccccttgaaagatcattt

SEQ ID NO: 70578 - RNA, 21 nt, synthetic construct
  source 1..21: mol_type = other RNA
aggcccggggcagagaactga

SEQ ID NO: 70579 - RNA, 21 nt, synthetic construct
  source 1..21: mol_type = other RNA
aggccctaaccccagagattg

SEQ ID NO: 70580 - RNA, 21 nt, synthetic construct
  source 1..21: mol_type = other RNA
aggccctatgccttcagtatg

SEQ ID NO: 70581 - RNA, 21 nt, synthetic construct
  source 1..21: mol_type = other RNA
aggccctattcaacctataag

SEQ ID NO: 70582 - RNA, 21 nt, synthetic construct
  source 1..21: mol_type = other RNA
aggccctctataattctgcct

SEQ ID NO: 70583 - RNA, 21 nt, synthetic construct
  source 1..21: mol_type = other RNA
aggccctgagaagtcaaagcc

SEQ ID NO: 70584 - RNA, 21 nt, synthetic construct
  source 1..21: mol_type = other RNA
aggccctgattgagattagcg

SEQ ID NO: 70585 - RNA, 21 nt, synthetic construct
  source 1..21: mol_type = other RNA
aggccctgatttaaagtaggt

SEQ ID NO: 70586 - RNA, 21 nt, synthetic construct
  source 1..21: mol_type = other RNA
aggccctggtgctttctatct

SEQ ID NO: 70587 - RNA, 21 nt, synthetic construct
  source 1..21: mol_type = other RNA
aggccctttgttagtgccttc

SEQ ID NO: 70588 - RNA, 21 nt, synthetic construct
  source 1..21: mol_type = other RNA
aggccgaggcaggtggatcag

SEQ ID NO: 70589 - RNA, 21 nt, synthetic construct
  source 1..21: mol_type = other RNA
aggccgagggttgaacatcac

SEQ ID NO: 70590 - RNA, 21 nt, synthetic construct
  source 1..21: mol_type = other RNA
aggccgcagtgagccatggct

SEQ ID NO: 70591 - RNA, 21 nt, synthetic construct
  source 1..21: mol_type = other RNA
aggccgcccgctgctccctct

SEQ ID NO: 70592 - RNA, 21 nt, synthetic construct
  source 1..21: mol_type = other RNA
aggccgctcttgaccttgtgc

SEQ ID NO: 70593 - RNA, 21 nt, synthetic construct
  source 1..21: mol_type = other RNA
aggccggaggattgcttgagt

SEQ ID NO: 70594 - RNA, 21 nt, synthetic construct
  source 1..21: mol_type = other RNA
aggccgtccctattttctaca

SEQ ID NO: 70595 - RNA, 21 nt, synthetic construct
  source 1..21: mol_type = other RNA
aggcctaggtgtgataactga

SEQ ID NO: 70596 - RNA, 21 nt, synthetic construct
  source 1..21: mol_type = other RNA
aggcctattttaggctctgtg

SEQ ID NO: 70597 - RNA, 21 nt, synthetic construct
  source 1..21: mol_type = other RNA
aggcctcagaattaatataag

SEQ ID NO: 70598 - RNA, 21 nt, synthetic construct
  source 1..21: mol_type = other RNA
aggcctcatgtattttcctaa

SEQ ID NO: 70599 - RNA, 21 nt, synthetic construct
  source 1..21: mol_type = other RNA
aggcctcctgccttcctgacc

SEQ ID NO: 70600 - RNA, 21 nt, synthetic construct
  source 1..21: mol_type = other RNA
aggcctcgctcttggcttttg

SEQ ID NO: 70601 - RNA, 21 nt, synthetic construct
  source 1..21: mol_type = other RNA
aggcctctccccttgacgaag

SEQ ID NO: 70602 - RNA, 21 nt, synthetic construct
  source 1..21: mol_type = other RNA
aggcctgagccgtcggtatgt

SEQ ID NO: 70603 - RNA, 21 nt, synthetic construct
  source 1..21: mol_type = other RNA
aggcctgatagctgtggaagc

SEQ ID NO: 70604 - RNA, 21 nt, synthetic construct
  source 1..21: mol_type = other RNA
aggcctgcttcattccgcgtt

SEQ ID NO: 70605 - RNA, 21 nt, synthetic construct
  source 1..21: mol_type = other RNA
aggcctggaacaggccctttg

SEQ ID NO: 70606 - RNA, 21 nt, synthetic construct
  source 1..21: mol_type = other RNA
aggcctgttgtgaggattcga

SEQ ID NO: 70607 - RNA, 21 nt, synthetic construct
  source 1..21: mol_type = other RNA
aggccttccacctgctcttta

SEQ ID NO: 70608 - RNA, 21 nt, synthetic construct
  source 1..21: mol_type = other RNA
aggccttccacggaatgcccc

SEQ ID NO: 70609 - RNA, 21 nt, synthetic construct
  source 1..21: mol_type = other RNA
aggccttcgaggcatctagtt

SEQ ID NO: 70610 - RNA, 21 nt, synthetic construct
  source 1..21: mol_type = other RNA
aggccttctcctccaacccat

SEQ ID NO: 70611 - RNA, 21 nt, synthetic construct
  source 1..21: mol_type = other RNA
aggcgaaatatctccctcaca

SEQ ID NO: 70612 - RNA, 21 nt, synthetic construct
  source 1..21: mol_type = other RNA
aggcgaaatgtgaacagacag

SEQ ID NO: 70613 - RNA, 21 nt, synthetic construct
  source 1..21: mol_type = other RNA
aggcgaagcccgccgctcgca

SEQ ID NO: 70614 - RNA, 21 nt, synthetic construct
  source 1..21: mol_type = other RNA
aggcgcacgccatctcgccca

SEQ ID NO: 70615 - RNA, 21 nt, synthetic construct
  source 1..21: mol_type = other RNA
aggcgcagacacaccatgaca

SEQ ID NO: 70616 - RNA, 21 nt, synthetic construct
  source 1..21: mol_type = other RNA
aggcgcctgcattgcatttac

SEQ ID NO: 70617 - RNA, 21 nt, synthetic construct
  source 1..21: mol_type = other RNA
aggcgcctggacaggatcccg

SEQ ID NO: 70618 - RNA, 21 nt, synthetic construct
  source 1..21: mol_type = other RNA
aggcggaaggattgcctaaca

SEQ ID NO: 70619 - RNA, 21 nt, synthetic construct
  source 1..21: mol_type = other RNA
aggcggaagttgcagtgagcc

SEQ ID NO: 70620 - RNA, 21 nt, synthetic construct
  source 1..21: mol_type = other RNA
aggcggaatgcagtggcgtga

SEQ ID NO: 70621 - RNA, 21 nt, synthetic construct
  source 1..21: mol_type = other RNA
aggcggaggttgcggtgacgt

SEQ ID NO: 70622 - RNA, 21 nt, synthetic construct
  source 1..21: mol_type = other RNA
aggcggcagagggagcagcgg

SEQ ID NO: 70623 - RNA, 21 nt, synthetic construct
  source 1..21: mol_type = other RNA
aggcggctggatcgcttgagg

SEQ ID NO: 70624 - RNA, 21 nt, synthetic construct
  source 1..21: mol_type = other RNA
aggcggtggggacagctcaat

SEQ ID NO: 70625 - RNA, 21 nt, synthetic construct
  source 1..21: mol_type = other RNA
aggcgtagtatctcatgctta

SEQ ID NO: 70626 - RNA, 21 nt, synthetic construct
  source 1..21: mol_type = other RNA
aggcgtgagccaccacgtccg

SEQ ID NO: 70627 - RNA, 21 nt, synthetic construct
  source 1..21: mol_type = other RNA
aggcgtgagccaccgcgcctg

SEQ ID NO: 70628 - RNA, 21 nt, synthetic construct
  source 1..21: mol_type = other RNA
aggcgtgagccacctcatccg

SEQ ID NO: 70629 - RNA, 21 nt, synthetic construct
  source 1..21: mol_type = other RNA
aggcgtgagcctccacacctg

SEQ ID NO: 70630 - RNA, 21 nt, synthetic construct
  source 1..21: mol_type = other RNA
aggcgtggtggcggatgccgg

SEQ ID NO: 70631 - RNA, 21 nt, synthetic construct
  source 1..21: mol_type = other RNA
aggcgtgtaaactgttggaaa

SEQ ID NO: 70632 - RNA, 21 nt, synthetic construct
  source 1..21: mol_type = other RNA
aggcgttgagccatcatgcct

SEQ ID NO: 70633 - RNA, 21 nt, synthetic construct
  source 1..21: mol_type = other RNA
aggctaaaacatacatgagaa

SEQ ID NO: 70634 - RNA, 21 nt, synthetic construct
  source 1..21: mol_type = other RNA
aggctaacagccaaagaaatt

SEQ ID NO: 70635 - RNA, 21 nt, synthetic construct
  source 1..21: mol_type = other RNA
aggctaagcatgtaacttgct

SEQ ID NO: 70636 - RNA, 21 nt, synthetic construct
  source 1..21: mol_type = other RNA
aggctaagttgagaaactatc

SEQ ID NO: 70637 - RNA, 21 nt, synthetic construct
  source 1..21: mol_type = other RNA
aggctaatgtgtgttccagac

SEQ ID NO: 70638 - RNA, 21 nt, synthetic construct
  source 1..21: mol_type = other RNA
aggctaattttttctgtaatg

SEQ ID NO: 70639 - RNA, 21 nt, synthetic construct
  source 1..21: mol_type = other RNA
aggctagaagtcccagttcaa

SEQ ID NO: 70640 - RNA, 21 nt, synthetic construct
  source 1..21: mol_type = other RNA
aggctagagctcacacgagaa

SEQ ID NO: 70641 - RNA, 21 nt, synthetic construct
  source 1..21: mol_type = other RNA
aggctagcacagaggcaacag

SEQ ID NO: 70642 - RNA, 21 nt, synthetic construct
  source 1..21: mol_type = other RNA
aggctaggtgacctgccagag

SEQ ID NO: 70643 - RNA, 21 nt, synthetic construct
  source 1..21: mol_type = other RNA
aggctattaactttgaaatca

SEQ ID NO: 70644 - RNA, 21 nt, synthetic construct
  source 1..21: mol_type = other RNA
aggctcaatacctgaaaagtg

SEQ ID NO: 70645 - RNA, 21 nt, synthetic construct
  source 1..21: mol_type = other RNA
aggctcagcccctcatcctcc

SEQ ID NO: 70646 - RNA, 21 nt, synthetic construct
  source 1..21: mol_type = other RNA
aggctccacttgggtggaagc

SEQ ID NO: 70647 - RNA, 21 nt, synthetic construct
  source 1..21: mol_type = other RNA
aggctccaggtagaatgaaaa

SEQ ID NO: 70648 - RNA, 21 nt, synthetic construct
  source 1..21: mol_type = other RNA
aggctcctgagaaccggaact

SEQ ID NO: 70649 - RNA, 21 nt, synthetic construct
  source 1..21: mol_type = other RNA
aggctcctgcagacatgcacg

SEQ ID NO: 70650 - RNA, 21 nt, synthetic construct
  source 1..21: mol_type = other RNA
aggctctcttcaccaactgaa

SEQ ID NO: 70651 - RNA, 21 nt, synthetic construct
  source 1..21: mol_type = other RNA
aggctctgggtcagaatcgtg

SEQ ID NO: 70652 - RNA, 21 nt, synthetic construct
  source 1..21: mol_type = other RNA
aggctctgtggtttcttgaat

SEQ ID NO: 70653 - RNA, 21 nt, synthetic construct
  source 1..21: mol_type = other RNA
aggctgaactgctgacagatt

SEQ ID NO: 70654 - RNA, 21 nt, synthetic construct
  source 1..21: mol_type = other RNA
aggctgaagcaggctttttac

SEQ ID NO: 70655 - RNA, 21 nt, synthetic construct
  source 1..21: mol_type = other RNA
aggctgaagggaggaaaaaac

SEQ ID NO: 70656 - RNA, 21 nt, synthetic construct
  source 1..21: mol_type = other RNA
aggctgacttagagggcttca

SEQ ID NO: 70657 - RNA, 21 nt, synthetic construct
  source 1..21: mol_type = other RNA
aggctgagacctcatcttagc

SEQ ID NO: 70658 - RNA, 21 nt, synthetic construct
  source 1..21: mol_type = other RNA
aggctgaggcaggaggcacct

SEQ ID NO: 70659 - RNA, 21 nt, synthetic construct
  source 1..21: mol_type = other RNA
aggctgaggcggaaggattgc

SEQ ID NO: 70660 - RNA, 21 nt, synthetic construct
  source 1..21: mol_type = other RNA
aggctgaggctggggaattgc

SEQ ID NO: 70661 - RNA, 21 nt, synthetic construct
  source 1..21: mol_type = other RNA
aggctgagtgcggtggcttat

SEQ ID NO: 70662 - RNA, 21 nt, synthetic construct
  source 1..21: mol_type = other RNA
aggctgcaagcactggtaagg

SEQ ID NO: 70663 - RNA, 21 nt, synthetic construct
  source 1..21: mol_type = other RNA
aggctgcaccctcctcctcct

SEQ ID NO: 70664 - RNA, 21 nt, synthetic construct
  source 1..21: mol_type = other RNA
aggctgcagtgagctccagcc

SEQ ID NO: 70665 - RNA, 21 nt, synthetic construct
  source 1..21: mol_type = other RNA
aggctgccagcaccagatact

SEQ ID NO: 70666 - RNA, 21 nt, synthetic construct
  source 1..21: mol_type = other RNA
aggctggaaataatttccctc

SEQ ID NO: 70667 - RNA, 21 nt, synthetic construct
  source 1..21: mol_type = other RNA
aggctggaagaattttaagcc

SEQ ID NO: 70668 - RNA, 21 nt, synthetic construct
  source 1..21: mol_type = other RNA
aggctggagctcactgcagcc

SEQ ID NO: 70669 - RNA, 21 nt, synthetic construct
  source 1..21: mol_type = other RNA
aggctggaggatggcttgagc

SEQ ID NO: 70670 - RNA, 21 nt, synthetic construct
  source 1..21: mol_type = other RNA
aggctggctctttccactctc

SEQ ID NO: 70671 - RNA, 21 nt, synthetic construct
  source 1..21: mol_type = other RNA
aggctgggagtacaagaccag

SEQ ID NO: 70672 - RNA, 21 nt, synthetic construct
  source 1..21: mol_type = other RNA
aggctggggaattgcatgaga

SEQ ID NO: 70673 - RNA, 21 nt, synthetic construct
  source 1..21: mol_type = other RNA
aggctggtctcaaactccaag

SEQ ID NO: 70674 - RNA, 21 nt, synthetic construct
  source 1..21: mol_type = other RNA
aggctggtcttgtactcccag

SEQ ID NO: 70675 - RNA, 21 nt, synthetic construct
  source 1..21: mol_type = other RNA
aggctggttccaaacttctga

SEQ ID NO: 70676 - RNA, 21 nt, synthetic construct
  source 1..21: mol_type = other RNA
aggctgtattgtaggaaagcc

SEQ ID NO: 70677 - RNA, 21 nt, synthetic construct
  source 1..21: mol_type = other RNA
aggctgtcccaaatgcaccaa

SEQ ID NO: 70678 - RNA, 21 nt, synthetic construct
  source 1..21: mol_type = other RNA
aggctgtctccaacgcttttt

SEQ ID NO: 70679 - RNA, 21 nt, synthetic construct
  source 1..21: mol_type = other RNA
aggctgttattagagttgtaa

SEQ ID NO: 70680 - RNA, 21 nt, synthetic construct
  source 1..21: mol_type = other RNA
aggctgttcaatttagaaaat

SEQ ID NO: 70681 - RNA, 21 nt, synthetic construct
  source 1..21: mol_type = other RNA
aggctgtttgagatctttctt

SEQ ID NO: 70682 - RNA, 21 nt, synthetic construct
  source 1..21: mol_type = other RNA
aggcttaaaattcttccagcc

SEQ ID NO: 70683 - RNA, 21 nt, synthetic construct
  source 1..21: mol_type = other RNA
aggcttagataggatgggcag

SEQ ID NO: 70684 - RNA, 21 nt, synthetic construct
  source 1..21: mol_type = other RNA
aggcttagatgagcccaggag

SEQ ID NO: 70685 - RNA, 21 nt, synthetic construct
  source 1..21: mol_type = other RNA
aggcttagtacagccatcaac

SEQ ID NO: 70686 - RNA, 21 nt, synthetic construct
  source 1..21: mol_type = other RNA
aggcttcgagttctgggagtt

SEQ ID NO: 70687 - RNA, 21 nt, synthetic construct
  source 1..21: mol_type = other RNA
aggcttgagtctgtgctctgt

SEQ ID NO: 70688 - RNA, 21 nt, synthetic construct
  source 1..21: mol_type = other RNA
aggcttgctttggctagaagc

SEQ ID NO: 70689 - RNA, 21 nt, synthetic construct
  source 1..21: mol_type = other RNA
aggcttggaaaacaaattgca

SEQ ID NO: 70690 - RNA, 21 nt, synthetic construct
  source 1..21: mol_type = other RNA
aggcttgtgcatcagaattcc

SEQ ID NO: 70691 - RNA, 21 nt, synthetic construct
  source 1..21: mol_type = other RNA
aggctttaagcagaaagttac

SEQ ID NO: 70692 - RNA, 21 nt, synthetic construct
  source 1..21: mol_type = other RNA
aggctttcccagggtgtagcc

SEQ ID NO: 70693 - RNA, 21 nt, synthetic construct
  source 1..21: mol_type = other RNA
aggctttcgtatggaagatgg

SEQ ID NO: 70694 - RNA, 21 nt, synthetic construct
  source 1..21: mol_type = other RNA
aggctttctgtgtaatactgt

SEQ ID NO: 70695 - RNA, 21 nt, synthetic construct
  source 1..21: mol_type = other RNA
aggctttgacttctcagggcc

SEQ ID NO: 70696 - RNA, 21 nt, synthetic construct
  source 1..21: mol_type = other RNA
aggctttgtgttggtgtttct

SEQ ID NO: 70697 - RNA, 21 nt, synthetic construct
  source 1..21: mol_type = other RNA
aggcttttattggtaatgtta

SEQ ID NO: 70698 - RNA, 21 nt, synthetic construct
  source 1..21: mol_type = other RNA
aggcttttcatagtcatcatt

SEQ ID NO: 70699 - RNA, 21 nt, synthetic construct
  source 1..21: mol_type = other RNA
aggcttttggattttctttct

SEQ ID NO: 70700 - RNA, 21 nt, synthetic construct
  source 1..21: mol_type = other RNA
aggctttttacccggagaggt

SEQ ID NO: 70701 - RNA, 21 nt, synthetic construct
  source 1..21: mol_type = other RNA
aggctttttatatttccgatg

SEQ ID NO: 70702 - RNA, 21 nt, synthetic construct
  source 1..21: mol_type = other RNA
agggaaaacaattacttgaga

SEQ ID NO: 70703 - RNA, 21 nt, synthetic construct
  source 1..21: mol_type = other RNA
agggaaaactacatgtaaaaa

SEQ ID NO: 70704 - RNA, 21 nt, synthetic construct
  source 1..21: mol_type = other RNA
agggaaacactcataccaggt

SEQ ID NO: 70705 - RNA, 21 nt, synthetic construct
  source 1..21: mol_type = other RNA
agggaaacagggttacagtat

SEQ ID NO: 70706 - RNA, 21 nt, synthetic construct
  source 1..21: mol_type = other RNA
agggaaaccttactgtaatat

SEQ ID NO: 70707 - RNA, 21 nt, synthetic construct
  source 1..21: mol_type = other RNA
agggaaactgtttttgcaatt

SEQ ID NO: 70708 - RNA, 21 nt, synthetic construct
  source 1..21: mol_type = other RNA
agggaaaggatgaccttgaca

SEQ ID NO: 70709 - RNA, 21 nt, synthetic construct
  source 1..21: mol_type = other RNA
agggaaatatgaaccacactg

SEQ ID NO: 70710 - RNA, 21 nt, synthetic construct
  source 1..21: mol_type = other RNA
agggaaatcattcaggacact

SEQ ID NO: 70711 - RNA, 21 nt, synthetic construct
  source 1..21: mol_type = other RNA
agggaaatggagggccagagg

SEQ ID NO: 70712 - RNA, 21 nt, synthetic construct
  source 1..21: mol_type = other RNA
agggaaattatttccagcctt

SEQ ID NO: 70713 - RNA, 21 nt, synthetic construct
  source 1..21: mol_type = other RNA
agggaacactaagaagatggt

SEQ ID NO: 70714 - RNA, 21 nt, synthetic construct
  source 1..21: mol_type = other RNA
agggaacattttcattttaac

SEQ ID NO: 70715 - RNA, 21 nt, synthetic construct
  source 1..21: mol_type = other RNA
agggaaccgtaacttcttttc

SEQ ID NO: 70716 - RNA, 21 nt, synthetic construct
  source 1..21: mol_type = other RNA
agggaagagctaagatgctat

SEQ ID NO: 70717 - RNA, 21 nt, synthetic construct
  source 1..21: mol_type = other RNA
agggaagaggccacaaagtcc

SEQ ID NO: 70718 - RNA, 21 nt, synthetic construct
  source 1..21: mol_type = other RNA
agggaagatagtactgaccat

SEQ ID NO: 70719 - RNA, 21 nt, synthetic construct
  source 1..21: mol_type = other RNA
agggaagcagttgatgcaatt

SEQ ID NO: 70720 - RNA, 21 nt, synthetic construct
  source 1..21: mol_type = other RNA
agggaaggctgcaagcactgg

SEQ ID NO: 70721 - RNA, 21 nt, synthetic construct
  source 1..21: mol_type = other RNA
agggaaggtgcccgcgaaggc

SEQ ID NO: 70722 - RNA, 21 nt, synthetic construct
  source 1..21: mol_type = other RNA
agggaagtaaagatcaagctc

SEQ ID NO: 70723 - RNA, 21 nt, synthetic construct
  source 1..21: mol_type = other RNA
agggaagtactgagtcaaaac

SEQ ID NO: 70724 - RNA, 21 nt, synthetic construct
  source 1..21: mol_type = other RNA
agggaatagacaaagacaagt

SEQ ID NO: 70725 - RNA, 21 nt, synthetic construct
  source 1..21: mol_type = other RNA
agggaatctaggaaacactgc

SEQ ID NO: 70726 - RNA, 21 nt, synthetic construct
  source 1..21: mol_type = other RNA
agggaatgcccctgtagcaga

SEQ ID NO: 70727 - RNA, 21 nt, synthetic construct
  source 1..21: mol_type = other RNA
agggaatggggagctagaggg

SEQ ID NO: 70728 - RNA, 21 nt, synthetic construct
  source 1..21: mol_type = other RNA
agggaatttgttttaccatct

SEQ ID NO: 70729 - RNA, 21 nt, synthetic construct
  source 1..21: mol_type = other RNA
agggaattttactgatctttt

SEQ ID NO: 70730 - RNA, 21 nt, synthetic construct
  source 1..21: mol_type = other RNA
agggaatttttcttacctaag

SEQ ID NO: 70731 - RNA, 21 nt, synthetic construct
  source 1..21: mol_type = other RNA
agggaccacaggcatgcgcca

SEQ ID NO: 70732 - RNA, 21 nt, synthetic construct
  source 1..21: mol_type = other RNA
agggacgaatgcatgggaggt

SEQ ID NO: 70733 - RNA, 21 nt, synthetic construct
  source 1..21: mol_type = other RNA
agggacggggttttgccatgt

SEQ ID NO: 70734 - RNA, 21 nt, synthetic construct
  source 1..21: mol_type = other RNA
agggactacagtcacacacca

SEQ ID NO: 70735 - RNA, 21 nt, synthetic construct
  source 1..21: mol_type = other RNA
agggactcccatatctacatg

SEQ ID NO: 70736 - RNA, 21 nt, synthetic construct
  source 1..21: mol_type = other RNA
agggactgaaaccagtgggtc

SEQ ID NO: 70737 - RNA, 21 nt, synthetic construct
  source 1..21: mol_type = other RNA
agggactgagcagtgaaagtc

SEQ ID NO: 70738 - RNA, 21 nt, synthetic construct
  source 1..21: mol_type = other RNA
agggactgatgaagaacctgt

SEQ ID NO: 70739 - RNA, 21 nt, synthetic construct
  source 1..21: mol_type = other RNA
agggactggcctcggccaacc

SEQ ID NO: 70740 - RNA, 21 nt, synthetic construct
  source 1..21: mol_type = other RNA
agggactgtcgaagcttaatt

SEQ ID NO: 70741 - RNA, 21 nt, synthetic construct
  source 1..21: mol_type = other RNA
agggacttatggagataaatt

SEQ ID NO: 70742 - RNA, 21 nt, synthetic construct
  source 1..21: mol_type = other RNA
agggagaacccaggaacagat

SEQ ID NO: 70743 - RNA, 21 nt, synthetic construct
  source 1..21: mol_type = other RNA
agggagaagaaataaacgaca

SEQ ID NO: 70744 - RNA, 21 nt, synthetic construct
  source 1..21: mol_type = other RNA
agggagaattggtagtcaatg

SEQ ID NO: 70745 - RNA, 21 nt, synthetic construct
  source 1..21: mol_type = other RNA
agggagaccgtggggggaggg

SEQ ID NO: 70746 - RNA, 21 nt, synthetic construct
  source 1..21: mol_type = other RNA
agggagacggcgagcttgatc

SEQ ID NO: 70747 - RNA, 21 nt, synthetic construct
  source 1..21: mol_type = other RNA
agggagactttcactgctcag

SEQ ID NO: 70748 - RNA, 21 nt, synthetic construct
  source 1..21: mol_type = other RNA
agggagagagaaactttacac

SEQ ID NO: 70749 - RNA, 21 nt, synthetic construct
  source 1..21: mol_type = other RNA
agggagagatgcctatgaaat

SEQ ID NO: 70750 - RNA, 21 nt, synthetic construct
  source 1..21: mol_type = other RNA
agggagagggagctctgtctt

SEQ ID NO: 70751 - RNA, 21 nt, synthetic construct
  source 1..21: mol_type = other RNA
agggagatacttgattacaag

SEQ ID NO: 70752 - RNA, 21 nt, synthetic construct
  source 1..21: mol_type = other RNA
agggagatatttcgcctagat

SEQ ID NO: 70753 - RNA, 21 nt, synthetic construct
  source 1..21: mol_type = other RNA
agggagcatatatactctgag

SEQ ID NO: 70754 - RNA, 21 nt, synthetic construct
  source 1..21: mol_type = other RNA
agggagcatcttcccatgaac

SEQ ID NO: 70755 - RNA, 21 nt, synthetic construct
  source 1..21: mol_type = other RNA
agggagcccaagcacactttc

SEQ ID NO: 70756 - RNA, 21 nt, synthetic construct
  source 1..21: mol_type = other RNA
agggagcgccacgtgaagatg

SEQ ID NO: 70757 - RNA, 21 nt, synthetic construct
  source 1..21: mol_type = other RNA
agggagcgtacggggtccgcg

SEQ ID NO: 70758 - RNA, 21 nt, synthetic construct
  source 1..21: mol_type = other RNA
agggagctctgtcttgatgat

SEQ ID NO: 70759 - RNA, 21 nt, synthetic construct
  source 1..21: mol_type = other RNA
agggaggaaaaaacagttgct

SEQ ID NO: 70760 - RNA, 21 nt, synthetic construct
  source 1..21: mol_type = other RNA
agggaggaatccttcagtcag

SEQ ID NO: 70761 - RNA, 21 nt, synthetic construct
  source 1..21: mol_type = other RNA
agggaggattgtttgaggctg

SEQ ID NO: 70762 - RNA, 21 nt, synthetic construct
  source 1..21: mol_type = other RNA
agggaggccatcttcatttct

SEQ ID NO: 70763 - RNA, 21 nt, synthetic construct
  source 1..21: mol_type = other RNA
agggaggcggaggttgcggtg

SEQ ID NO: 70764 - RNA, 21 nt, synthetic construct
  source 1..21: mol_type = other RNA
agggagggggctgaggattgg

SEQ ID NO: 70765 - RNA, 21 nt, synthetic construct
  source 1..21: mol_type = other RNA
agggaggggtattcagggggc

SEQ ID NO: 70766 - RNA, 21 nt, synthetic construct
  source 1..21: mol_type = other RNA
agggaggggtccccagcatcc

SEQ ID NO: 70767 - RNA, 21 nt, synthetic construct
  source 1..21: mol_type = other RNA
agggaggtaggcttagatgag

SEQ ID NO: 70768 - RNA, 21 nt, synthetic construct
  source 1..21: mol_type = other RNA
agggagtcagtagaggccgag

SEQ ID NO: 70769 - RNA, 21 nt, synthetic construct
  source 1..21: mol_type = other RNA
agggataaatcccacttgatc

SEQ ID NO: 70770 - RNA, 21 nt, synthetic construct
  source 1..21: mol_type = other RNA
agggataagaataccaaattc

SEQ ID NO: 70771 - RNA, 21 nt, synthetic construct
  source 1..21: mol_type = other RNA
agggataatgctatccagaag

SEQ ID NO: 70772 - RNA, 21 nt, synthetic construct
  source 1..21: mol_type = other RNA
agggatattggcttatagtgt

SEQ ID NO: 70773 - RNA, 21 nt, synthetic construct
  source 1..21: mol_type = other RNA
agggatattttcgtgtactga

SEQ ID NO: 70774 - RNA, 21 nt, synthetic construct
  source 1..21: mol_type = other RNA
agggatcacagatacaactct

SEQ ID NO: 70775 - RNA, 21 nt, synthetic construct
  source 1..21: mol_type = other RNA
agggatgaatgttgtacattt

SEQ ID NO: 70776 - RNA, 21 nt, synthetic construct
  source 1..21: mol_type = other RNA
agggatgaggaagaggaaggt

SEQ ID NO: 70777 - RNA, 21 nt, synthetic construct
  source 1..21: mol_type = other RNA
agggatgcattctagaaagga

SEQ ID NO: 70778 - RNA, 21 nt, synthetic construct
  source 1..21: mol_type = other RNA
agggatgctgcgagccccggg

SEQ ID NO: 70779 - RNA, 21 nt, synthetic construct
  source 1..21: mol_type = other RNA
agggatgctggagtgtggcag

SEQ ID NO: 70780 - RNA, 21 nt, synthetic construct
  source 1..21: mol_type = other RNA
agggatgttgcctactagcca

SEQ ID NO: 70781 - RNA, 21 nt, synthetic construct
  source 1..21: mol_type = other RNA
agggattctggccaaatccct

SEQ ID NO: 70782 - RNA, 21 nt, synthetic construct
  source 1..21: mol_type = other RNA
agggatttggccagaatccct

SEQ ID NO: 70783 - RNA, 21 nt, synthetic construct
  source 1..21: mol_type = other RNA
agggcaccgtgacagaacaaa

SEQ ID NO: 70784 - RNA, 21 nt, synthetic construct
  source 1..21: mol_type = other RNA
agggcagagataactgggtgt

SEQ ID NO: 70785 - RNA, 21 nt, synthetic construct
  source 1..21: mol_type = other RNA
agggcagggagagagaaactt

SEQ ID NO: 70786 - RNA, 21 nt, synthetic construct
  source 1..21: mol_type = other RNA
agggcattttcaaggtagaag

SEQ ID NO: 70787 - RNA, 21 nt, synthetic construct
  source 1..21: mol_type = other RNA
agggccactgagagctcaggc

SEQ ID NO: 70788 - RNA, 21 nt, synthetic construct
  source 1..21: mol_type = other RNA
agggccagaggagggatgcat

SEQ ID NO: 70789 - RNA, 21 nt, synthetic construct
  source 1..21: mol_type = other RNA
agggccattctgctatgaaat

SEQ ID NO: 70790 - RNA, 21 nt, synthetic construct
  source 1..21: mol_type = other RNA
agggccatttcatttctgttt

SEQ ID NO: 70791 - RNA, 21 nt, synthetic construct
  source 1..21: mol_type = other RNA
agggcccagcctcaacagcac

SEQ ID NO: 70792 - RNA, 21 nt, synthetic construct
  source 1..21: mol_type = other RNA
agggcctaaataaaacacatg

SEQ ID NO: 70793 - RNA, 21 nt, synthetic construct
  source 1..21: mol_type = other RNA
agggcctagaaatcatacacg

SEQ ID NO: 70794 - RNA, 21 nt, synthetic construct
  source 1..21: mol_type = other RNA
agggcctcaaatttcatttac

SEQ ID NO: 70795 - RNA, 21 nt, synthetic construct
  source 1..21: mol_type = other RNA
agggcctctgaagacatgctg

SEQ ID NO: 70796 - RNA, 21 nt, synthetic construct
  source 1..21: mol_type = other RNA
agggcctgcttttggaagcat

SEQ ID NO: 70797 - RNA, 21 nt, synthetic construct
  source 1..21: mol_type = other RNA
agggcctgttccaggcctcgc

SEQ ID NO: 70798 - RNA, 21 nt, synthetic construct
  source 1..21: mol_type = other RNA
agggccttcccaaagacatcc

SEQ ID NO: 70799 - RNA, 21 nt, synthetic construct
  source 1..21: mol_type = other RNA
agggccttctactttaataaa

SEQ ID NO: 70800 - RNA, 21 nt, synthetic construct
  source 1..21: mol_type = other RNA
agggcctttaatcacctcaag

SEQ ID NO: 70801 - RNA, 21 nt, synthetic construct
  source 1..21: mol_type = other RNA
agggctcccagtgcccacctg

SEQ ID NO: 70802 - RNA, 21 nt, synthetic construct
  source 1..21: mol_type = other RNA
agggctcctccaaggctgccc

SEQ ID NO: 70803 - RNA, 21 nt, synthetic construct
  source 1..21: mol_type = other RNA
agggctgaaaaacacctcagt

SEQ ID NO: 70804 - RNA, 21 nt, synthetic construct
  source 1..21: mol_type = other RNA
agggcttcatgctgggagacc

SEQ ID NO: 70805 - RNA, 21 nt, synthetic construct
  source 1..21: mol_type = other RNA
agggcttctgaaggtgcctgc

SEQ ID NO: 70806 - RNA, 21 nt, synthetic construct
  source 1..21: mol_type = other RNA
agggcttgatctagtaaatat

SEQ ID NO: 70807 - RNA, 21 nt, synthetic construct
  source 1..21: mol_type = other RNA
agggcttggtggcccacacct

SEQ ID NO: 70808 - RNA, 21 nt, synthetic construct
  source 1..21: mol_type = other RNA
agggctttcaatagtgggtag

SEQ ID NO: 70809 - RNA, 21 nt, synthetic construct
  source 1..21: mol_type = other RNA
agggctttgtgaagggaggta

SEQ ID NO: 70810 - RNA, 21 nt, synthetic construct
  source 1..21: mol_type = other RNA
aggggaactcttgtagtattt

SEQ ID NO: 70811 - RNA, 21 nt, synthetic construct
  source 1..21: mol_type = other RNA
aggggaaggaattttcaggac

SEQ ID NO: 70812 - RNA, 21 nt, synthetic construct
  source 1..21: mol_type = other RNA
aggggaaggagtctgcccatc

SEQ ID NO: 70813 - RNA, 21 nt, synthetic construct
  source 1..21: mol_type = other RNA
aggggaaggcttcgagttctg

SEQ ID NO: 70814 - RNA, 21 nt, synthetic construct
  source 1..21: mol_type = other RNA
aggggaatagaaagttagtgt

SEQ ID NO: 70815 - RNA, 21 nt, synthetic construct
  source 1..21: mol_type = other RNA
aggggaatcatgcagtacttg

SEQ ID NO: 70816 - RNA, 21 nt, synthetic construct
  source 1..21: mol_type = other RNA
aggggaatggtactgcctcca

SEQ ID NO: 70817 - RNA, 21 nt, synthetic construct
  source 1..21: mol_type = other RNA
aggggacatagatgaaactaa

SEQ ID NO: 70818 - RNA, 21 nt, synthetic construct
  source 1..21: mol_type = other RNA
aggggacatgaaggaaggatt

SEQ ID NO: 70819 - RNA, 21 nt, synthetic construct
  source 1..21: mol_type = other RNA
aggggacatgctctgatagga

SEQ ID NO: 70820 - RNA, 21 nt, synthetic construct
  source 1..21: mol_type = other RNA
aggggactaacagggtctaca

SEQ ID NO: 70821 - RNA, 21 nt, synthetic construct
  source 1..21: mol_type = other RNA
aggggactttgatgttttaca

SEQ ID NO: 70822 - RNA, 21 nt, synthetic construct
  source 1..21: mol_type = other RNA
aggggagaggcctcatgtatt

SEQ ID NO: 70823 - RNA, 21 nt, synthetic construct
  source 1..21: mol_type = other RNA
aggggatgggggacgacgtat

SEQ ID NO: 70824 - RNA, 21 nt, synthetic construct
  source 1..21: mol_type = other RNA
aggggatttcatgaacaattt

SEQ ID NO: 70825 - RNA, 21 nt, synthetic construct
  source 1..21: mol_type = other RNA
aggggcaggaaaggtggggaa

SEQ ID NO: 70826 - RNA, 21 nt, synthetic construct
  source 1..21: mol_type = other RNA
aggggcagggtggagtccaac

SEQ ID NO: 70827 - RNA, 21 nt, synthetic construct
  source 1..21: mol_type = other RNA
aggggcattccctgtctggga

SEQ ID NO: 70828 - RNA, 21 nt, synthetic construct
  source 1..21: mol_type = other RNA
aggggcattccgtggaaggcc

SEQ ID NO: 70829 - RNA, 21 nt, synthetic construct
  source 1..21: mol_type = other RNA
aggggccaggtgtggaggctc

SEQ ID NO: 70830 - RNA, 21 nt, synthetic construct
  source 1..21: mol_type = other RNA
aggggccagttgagagagaat

SEQ ID NO: 70831 - RNA, 21 nt, synthetic construct
  source 1..21: mol_type = other RNA
aggggccttttgtcaagctat

SEQ ID NO: 70832 - RNA, 21 nt, synthetic construct
  source 1..21: mol_type = other RNA
aggggctaagtagtggcagcc

SEQ ID NO: 70833 - RNA, 21 nt, synthetic construct
  source 1..21: mol_type = other RNA
aggggctatctttactttcag

SEQ ID NO: 70834 - RNA, 21 nt, synthetic construct
  source 1..21: mol_type = other RNA
aggggctgagccttcagaact

SEQ ID NO: 70835 - RNA, 21 nt, synthetic construct
  source 1..21: mol_type = other RNA
aggggctgcatcatggtgggc

SEQ ID NO: 70836 - RNA, 21 nt, synthetic construct
  source 1..21: mol_type = other RNA
aggggctgggggatccagggg

SEQ ID NO: 70837 - RNA, 21 nt, synthetic construct
  source 1..21: mol_type = other RNA
aggggctgttcccagataaca

SEQ ID NO: 70838 - RNA, 21 nt, synthetic construct
  source 1..21: mol_type = other RNA
agggggaaaactccaagtgta

SEQ ID NO: 70839 - RNA, 21 nt, synthetic construct
  source 1..21: mol_type = other RNA
agggggaatctactcttttgt

SEQ ID NO: 70840 - RNA, 21 nt, synthetic construct
  source 1..21: mol_type = other RNA
agggggagggagagggagctc

SEQ ID NO: 70841 - RNA, 21 nt, synthetic construct
  source 1..21: mol_type = other RNA
agggggcataacatctatgaa

SEQ ID NO: 70842 - RNA, 21 nt, synthetic construct
  source 1..21: mol_type = other RNA
agggggctaaatgctcacatt

SEQ ID NO: 70843 - RNA, 21 nt, synthetic construct
  source 1..21: mol_type = other RNA
agggggctgaggattggagac

SEQ ID NO: 70844 - RNA, 21 nt, synthetic construct
  source 1..21: mol_type = other RNA
agggggctgagtatgggtctc

SEQ ID NO: 70845 - RNA, 21 nt, synthetic construct
  source 1..21: mol_type = other RNA
aggggggaaaaaaccataaaa

SEQ ID NO: 70846 - RNA, 21 nt, synthetic construct
  source 1..21: mol_type = other RNA
aggggggaaaacacccttgaa

SEQ ID NO: 70847 - RNA, 21 nt, synthetic construct
  source 1..21: mol_type = other RNA
aggggggaagcttttcatata

SEQ ID NO: 70848 - RNA, 21 nt, synthetic construct
  source 1..21: mol_type = other RNA
aggggggccactggaaacctt

SEQ ID NO: 70849 - RNA, 21 nt, synthetic construct
  source 1..21: mol_type = other RNA
agggggtatggagacactagg

SEQ ID NO: 70850 - RNA, 21 nt, synthetic construct
  source 1..21: mol_type = other RNA
agggggtcgagactgtaatga

SEQ ID NO: 70851 - RNA, 21 nt, synthetic construct
  source 1..21: mol_type = other RNA
aggggtaaaggggatggggga

SEQ ID NO: 70852 - RNA, 21 nt, synthetic construct
  source 1..21: mol_type = other RNA
aggggtaaatctttgtacagt

SEQ ID NO: 70853 - RNA, 21 nt, synthetic construct
  source 1..21: mol_type = other RNA
aggggtaaatggtttctcctt

SEQ ID NO: 70854 - RNA, 21 nt, synthetic construct
  source 1..21: mol_type = other RNA
aggggtattcagggggctaaa

SEQ ID NO: 70855 - RNA, 21 nt, synthetic construct
  source 1..21: mol_type = other RNA
aggggtccccagcatccacta

SEQ ID NO: 70856 - RNA, 21 nt, synthetic construct
  source 1..21: mol_type = other RNA
aggggtcttatgctggtgggc

SEQ ID NO: 70857 - RNA, 21 nt, synthetic construct
  source 1..21: mol_type = other RNA
aggggtggggggatgtagaag

SEQ ID NO: 70858 - RNA, 21 nt, synthetic construct
  source 1..21: mol_type = other RNA
agggtaaaatagtcaagtaac

SEQ ID NO: 70859 - RNA, 21 nt, synthetic construct
  source 1..21: mol_type = other RNA
agggtaaacagaattaaacaa

SEQ ID NO: 70860 - RNA, 21 nt, synthetic construct
  source 1..21: mol_type = other RNA
agggtaaagtcaattctagtt

SEQ ID NO: 70861 - RNA, 21 nt, synthetic construct
  source 1..21: mol_type = other RNA
agggtaacgtgagctggaagt

SEQ ID NO: 70862 - RNA, 21 nt, synthetic construct
  source 1..21: mol_type = other RNA
agggtaagaaaattgtacaat

SEQ ID NO: 70863 - RNA, 21 nt, synthetic construct
  source 1..21: mol_type = other RNA
agggtaagaaaggagttcagc

SEQ ID NO: 70864 - RNA, 21 nt, synthetic construct
  source 1..21: mol_type = other RNA
agggtaagaccaaaatggaga

SEQ ID NO: 70865 - RNA, 21 nt, synthetic construct
  source 1..21: mol_type = other RNA
agggtaagattccgtctcaaa

SEQ ID NO: 70866 - RNA, 21 nt, synthetic construct
  source 1..21: mol_type = other RNA
agggtaatgctggcttcatgg

SEQ ID NO: 70867 - RNA, 21 nt, synthetic construct
  source 1..21: mol_type = other RNA
agggtacagaactgctaatgg

SEQ ID NO: 70868 - RNA, 21 nt, synthetic construct
  source 1..21: mol_type = other RNA
agggtagagcactttcgtatt

SEQ ID NO: 70869 - RNA, 21 nt, synthetic construct
  source 1..21: mol_type = other RNA
agggtagctttgatgccccca

SEQ ID NO: 70870 - RNA, 21 nt, synthetic construct
  source 1..21: mol_type = other RNA
agggtagcttttcctgctgtc

SEQ ID NO: 70871 - RNA, 21 nt, synthetic construct
  source 1..21: mol_type = other RNA
agggtaggaaaagacttctca

SEQ ID NO: 70872 - RNA, 21 nt, synthetic construct
  source 1..21: mol_type = other RNA
agggtaggaaggcggtgggga

SEQ ID NO: 70873 - RNA, 21 nt, synthetic construct
  source 1..21: mol_type = other RNA
agggtatatacaatattacag

SEQ ID NO: 70874 - RNA, 21 nt, synthetic construct
  source 1..21: mol_type = other RNA
agggtcactattaaccatatg

SEQ ID NO: 70875 - RNA, 21 nt, synthetic construct
  source 1..21: mol_type = other RNA
agggtcacttcctctcttaaa

SEQ ID NO: 70876 - RNA, 21 nt, synthetic construct
  source 1..21: mol_type = other RNA
agggtcagaattttattttct

SEQ ID NO: 70877 - RNA, 21 nt, synthetic construct
  source 1..21: mol_type = other RNA
agggtcatgcacacgctggaa

SEQ ID NO: 70878 - RNA, 21 nt, synthetic construct
  source 1..21: mol_type = other RNA
agggtccagcttcactcttct

SEQ ID NO: 70879 - RNA, 21 nt, synthetic construct
  source 1..21: mol_type = other RNA
agggtctacaaaaggtttcca

SEQ ID NO: 70880 - RNA, 21 nt, synthetic construct
  source 1..21: mol_type = other RNA
agggtctcactcttaccaagg

SEQ ID NO: 70881 - RNA, 21 nt, synthetic construct
  source 1..21: mol_type = other RNA
agggtctggtatctaccaaaa

SEQ ID NO: 70882 - RNA, 21 nt, synthetic construct
  source 1..21: mol_type = other RNA
agggtctgtctcacctcaagg

SEQ ID NO: 70883 - RNA, 21 nt, synthetic construct
  source 1..21: mol_type = other RNA
agggtctgttttacatgttta

SEQ ID NO: 70884 - RNA, 21 nt, synthetic construct
  source 1..21: mol_type = other RNA
agggtcttgctctgtcaccca

SEQ ID NO: 70885 - RNA, 21 nt, synthetic construct
  source 1..21: mol_type = other RNA
agggtgaaacttgaatactcg

SEQ ID NO: 70886 - RNA, 21 nt, synthetic construct
  source 1..21: mol_type = other RNA
agggtgacagagccgagcaga

SEQ ID NO: 70887 - RNA, 21 nt, synthetic construct
  source 1..21: mol_type = other RNA
agggtgactagtgtgaatgag

SEQ ID NO: 70888 - RNA, 21 nt, synthetic construct
  source 1..21: mol_type = other RNA
agggtgagaccaccacacttg

SEQ ID NO: 70889 - RNA, 21 nt, synthetic construct
  source 1..21: mol_type = other RNA
agggtgataaaaaggagggaa

SEQ ID NO: 70890 - RNA, 21 nt, synthetic construct
  source 1..21: mol_type = other RNA
agggtgcagcctctaatcagg

SEQ ID NO: 70891 - RNA, 21 nt, synthetic construct
  source 1..21: mol_type = other RNA
agggtgcgacctcgaagcaca

SEQ ID NO: 70892 - RNA, 21 nt, synthetic construct
  source 1..21: mol_type = other RNA
agggtgctactcaaagtttag

SEQ ID NO: 70893 - RNA, 21 nt, synthetic construct
  source 1..21: mol_type = other RNA
agggtgctgatcaggaaagac

SEQ ID NO: 70894 - RNA, 21 nt, synthetic construct
  source 1..21: mol_type = other RNA
agggtggagtccaaccaatcg

SEQ ID NO: 70895 - RNA, 21 nt, synthetic construct
  source 1..21: mol_type = other RNA
agggtggctggcactttcctg

SEQ ID NO: 70896 - RNA, 21 nt, synthetic construct
  source 1..21: mol_type = other RNA
agggtgggggcatcaaagcta

SEQ ID NO: 70897 - RNA, 21 nt, synthetic construct
  source 1..21: mol_type = other RNA
agggtggtgctggactggagg

SEQ ID NO: 70898 - RNA, 21 nt, synthetic construct
  source 1..21: mol_type = other RNA
agggtgtaaaaggctaatttt

SEQ ID NO: 70899 - RNA, 21 nt, synthetic construct
  source 1..21: mol_type = other RNA
agggtgtagccacaagccaca

SEQ ID NO: 70900 - RNA, 21 nt, synthetic construct
  source 1..21: mol_type = other RNA
agggtgtgatcaggaaagatg

SEQ ID NO: 70901 - RNA, 21 nt, synthetic construct
  source 1..21: mol_type = other RNA
agggtgtgtgaatggaaaatt

SEQ ID NO: 70902 - RNA, 21 nt, synthetic construct
  source 1..21: mol_type = other RNA
agggtgtgtttaatttccacc

SEQ ID NO: 70903 - RNA, 21 nt, synthetic construct
  source 1..21: mol_type = other RNA
agggtgttttcccccctaaaa

SEQ ID NO: 70904 - RNA, 21 nt, synthetic construct
  source 1..21: mol_type = other RNA
agggttacagtataggggaac

SEQ ID NO: 70905 - RNA, 21 nt, synthetic construct
  source 1..21: mol_type = other RNA
agggttagaagacaatactgt

SEQ ID NO: 70906 - RNA, 21 nt, synthetic construct
  source 1..21: mol_type = other RNA
agggttagattatatggtcta

SEQ ID NO: 70907 - RNA, 21 nt, synthetic construct
  source 1..21: mol_type = other RNA
agggttagatttttcctttgc

SEQ ID NO: 70908 - RNA, 21 nt, synthetic construct
  source 1..21: mol_type = other RNA
agggttattaacataccgacg

SEQ ID NO: 70909 - RNA, 21 nt, synthetic construct
  source 1..21: mol_type = other RNA
agggttcttggaaattagaaa

SEQ ID NO: 70910 - RNA, 21 nt, synthetic construct
  source 1..21: mol_type = other RNA
agggttgaacatcacccagct

SEQ ID NO: 70911 - RNA, 21 nt, synthetic construct
  source 1..21: mol_type = other RNA
agggttggggtatgtttgatt

SEQ ID NO: 70912 - RNA, 21 nt, synthetic construct
  source 1..21: mol_type = other RNA
agggttggtgcttccttctct

SEQ ID NO: 70913 - RNA, 21 nt, synthetic construct
  source 1..21: mol_type = other RNA
agggtttcagtgagtagggaa

SEQ ID NO: 70914 - RNA, 21 nt, synthetic construct
  source 1..21: mol_type = other RNA
agggtttctgtttggatgaaa

SEQ ID NO: 70915 - RNA, 21 nt, synthetic construct
  source 1..21: mol_type = other RNA
agggtttggcagtttaagaat

SEQ ID NO: 70916 - RNA, 21 nt, synthetic construct
  source 1..21: mol_type = other RNA
agggttttctgtagaatatcc

SEQ ID NO: 70917 - RNA, 21 nt, synthetic construct
  source 1..21: mol_type = other RNA
agggttttggtatgttgtgtt

SEQ ID NO: 70918 - RNA, 21 nt, synthetic construct
  source 1..21: mol_type = other RNA
agggttttgttttgttttttc

SEQ ID NO: 70919 - RNA, 21 nt, synthetic construct
  source 1..21: mol_type = other RNA
aggtaagaaaaattccctcag

SEQ ID NO: 70920 - RNA, 21 nt, synthetic construct
  source 1..21: mol_type = other RNA
aggtaagaacttgtctttgtc

SEQ ID NO: 70921 - RNA, 21 nt, synthetic construct
  source 1..21: mol_type = other RNA
aggtaagaatgtcaagctgtt

SEQ ID NO: 70922 - RNA, 21 nt, synthetic construct
  source 1..21: mol_type = other RNA
aggtaaggaaaccccagggat

SEQ ID NO: 70923 - RNA, 21 nt, synthetic construct
  source 1..21: mol_type = other RNA
aggtaagggtccagcttcact

SEQ ID NO: 70924 - RNA, 21 nt, synthetic construct
  source 1..21: mol_type = other RNA
aggtaatactctagtggtgct

SEQ ID NO: 70925 - RNA, 21 nt, synthetic construct
  source 1..21: mol_type = other RNA
aggtaatctagtttatctcat

SEQ ID NO: 70926 - RNA, 21 nt, synthetic construct
  source 1..21: mol_type = other RNA
aggtacaattacacatctccc

SEQ ID NO: 70927 - RNA, 21 nt, synthetic construct
  source 1..21: mol_type = other RNA
aggtacgacgctcttgttcaa

SEQ ID NO: 70928 - RNA, 21 nt, synthetic construct
  source 1..21: mol_type = other RNA
aggtactcaacgacaatctct

SEQ ID NO: 70929 - RNA, 21 nt, synthetic construct
  source 1..21: mol_type = other RNA
aggtagaaacatcccaagtgc

SEQ ID NO: 70930 - RNA, 21 nt, synthetic construct
  source 1..21: mol_type = other RNA
aggtagaagataatgttagaa

SEQ ID NO: 70931 - RNA, 21 nt, synthetic construct
  source 1..21: mol_type = other RNA
aggtagaagtacaaacattac

SEQ ID NO: 70932 - RNA, 21 nt, synthetic construct
  source 1..21: mol_type = other RNA
aggtagacatgagtaaaaaga

SEQ ID NO: 70933 - RNA, 21 nt, synthetic construct
  source 1..21: mol_type = other RNA
aggtagacatgtgccatgttg

SEQ ID NO: 70934 - RNA, 21 nt, synthetic construct
  source 1..21: mol_type = other RNA
aggtagcacaactagtaagta

SEQ ID NO: 70935 - RNA, 21 nt, synthetic construct
  source 1..21: mol_type = other RNA
aggtagctgctttttaaaaat

SEQ ID NO: 70936 - RNA, 21 nt, synthetic construct
  source 1..21: mol_type = other RNA
aggtaggagggtgtgatcagg

SEQ ID NO: 70937 - RNA, 21 nt, synthetic construct
  source 1..21: mol_type = other RNA
aggtaggcttagatgagccca

SEQ ID NO: 70938 - RNA, 21 nt, synthetic construct
  source 1..21: mol_type = other RNA
aggtagggaggggtattcagg

SEQ ID NO: 70939 - RNA, 21 nt, synthetic construct
  source 1..21: mol_type = other RNA
aggtagggataagaataccaa

SEQ ID NO: 70940 - RNA, 21 nt, synthetic construct
  source 1..21: mol_type = other RNA
aggtagggttggggtatgttt

SEQ ID NO: 70941 - RNA, 21 nt, synthetic construct
  source 1..21: mol_type = other RNA
aggtagtacatattcattgta

SEQ ID NO: 70942 - RNA, 21 nt, synthetic construct
  source 1..21: mol_type = other RNA
aggtagtcttgtcataacagt

SEQ ID NO: 70943 - RNA, 21 nt, synthetic construct
  source 1..21: mol_type = other RNA
aggtagtttctttgaacttat

SEQ ID NO: 70944 - RNA, 21 nt, synthetic construct
  source 1..21: mol_type = other RNA
aggtataaaggatgcacaaga

SEQ ID NO: 70945 - RNA, 21 nt, synthetic construct
  source 1..21: mol_type = other RNA
aggtataaagtttccgttttg

SEQ ID NO: 70946 - RNA, 21 nt, synthetic construct
  source 1..21: mol_type = other RNA
aggtatatttctgtaaacatg

SEQ ID NO: 70947 - RNA, 21 nt, synthetic construct
  source 1..21: mol_type = other RNA
aggtatcacagtgaggacgct

SEQ ID NO: 70948 - RNA, 21 nt, synthetic construct
  source 1..21: mol_type = other RNA
aggtatcaccatctgataagc

SEQ ID NO: 70949 - RNA, 21 nt, synthetic construct
  source 1..21: mol_type = other RNA
aggtatcatcggaaatataaa

SEQ ID NO: 70950 - RNA, 21 nt, synthetic construct
  source 1..21: mol_type = other RNA
aggtatcatttccaagattga

SEQ ID NO: 70951 - RNA, 21 nt, synthetic construct
  source 1..21: mol_type = other RNA
aggtatctccccaaagatatt

SEQ ID NO: 70952 - RNA, 21 nt, synthetic construct
  source 1..21: mol_type = other RNA
aggtatggcgactcatgcctg

SEQ ID NO: 70953 - RNA, 21 nt, synthetic construct
  source 1..21: mol_type = other RNA
aggtattattttcacagacag

SEQ ID NO: 70954 - RNA, 21 nt, synthetic construct
  source 1..21: mol_type = other RNA
aggtattcatgctgtgaattt

SEQ ID NO: 70955 - RNA, 21 nt, synthetic construct
  source 1..21: mol_type = other RNA
aggtattgagcctgttccgat

SEQ ID NO: 70956 - RNA, 21 nt, synthetic construct
  source 1..21: mol_type = other RNA
aggtatttctaaatcaacagt

SEQ ID NO: 70957 - RNA, 21 nt, synthetic construct
  source 1..21: mol_type = other RNA
aggtatttggggctaggattt

SEQ ID NO: 70958 - RNA, 21 nt, synthetic construct
  source 1..21: mol_type = other RNA
aggtcaaactcacttattagc

SEQ ID NO: 70959 - RNA, 21 nt, synthetic construct
  source 1..21: mol_type = other RNA
aggtcaaatggtaacagccaa

SEQ ID NO: 70960 - RNA, 21 nt, synthetic construct
  source 1..21: mol_type = other RNA
aggtcaacacatcagcgctaa

SEQ ID NO: 70961 - RNA, 21 nt, synthetic construct
  source 1..21: mol_type = other RNA
aggtcaagaaataaaacatgg

SEQ ID NO: 70962 - RNA, 21 nt, synthetic construct
  source 1..21: mol_type = other RNA
aggtcaagagagattaaataa

SEQ ID NO: 70963 - RNA, 21 nt, synthetic construct
  source 1..21: mol_type = other RNA
aggtcaagagcggcctttgcc

SEQ ID NO: 70964 - RNA, 21 nt, synthetic construct
  source 1..21: mol_type = other RNA
aggtcaatctaggaggtctaa

SEQ ID NO: 70965 - RNA, 21 nt, synthetic construct
  source 1..21: mol_type = other RNA
aggtcaatctgaaaaatatca

SEQ ID NO: 70966 - RNA, 21 nt, synthetic construct
  source 1..21: mol_type = other RNA
aggtcacattcagaggtattt

SEQ ID NO: 70967 - RNA, 21 nt, synthetic construct
  source 1..21: mol_type = other RNA
aggtcacattctgcctgcaga

SEQ ID NO: 70968 - RNA, 21 nt, synthetic construct
  source 1..21: mol_type = other RNA
aggtcacccaagccacagcgt

SEQ ID NO: 70969 - RNA, 21 nt, synthetic construct
  source 1..21: mol_type = other RNA
aggtcacctagcctctctggg

SEQ ID NO: 70970 - RNA, 21 nt, synthetic construct
  source 1..21: mol_type = other RNA
aggtcactgcagtctcaaact

SEQ ID NO: 70971 - RNA, 21 nt, synthetic construct
  source 1..21: mol_type = other RNA
aggtcagaagtttggaaccag

SEQ ID NO: 70972 - RNA, 21 nt, synthetic construct
  source 1..21: mol_type = other RNA
aggtcagaatacaaaaatgac

SEQ ID NO: 70973 - RNA, 21 nt, synthetic construct
  source 1..21: mol_type = other RNA
aggtcagccagaggaagctta

SEQ ID NO: 70974 - RNA, 21 nt, synthetic construct
  source 1..21: mol_type = other RNA
aggtcaggaaggcaggaggcc

SEQ ID NO: 70975 - RNA, 21 nt, synthetic construct
  source 1..21: mol_type = other RNA
aggtcagtagtacagtgagta

SEQ ID NO: 70976 - RNA, 21 nt, synthetic construct
  source 1..21: mol_type = other RNA
aggtcatcctttcccttctgc

SEQ ID NO: 70977 - RNA, 21 nt, synthetic construct
  source 1..21: mol_type = other RNA
aggtcatgacttttttgccca

SEQ ID NO: 70978 - RNA, 21 nt, synthetic construct
  source 1..21: mol_type = other RNA
aggtcatttttcacttcttat

SEQ ID NO: 70979 - RNA, 21 nt, synthetic construct
  source 1..21: mol_type = other RNA
aggtccctacaaaggacatga

SEQ ID NO: 70980 - RNA, 21 nt, synthetic construct
  source 1..21: mol_type = other RNA
aggtcgcaccctgagcatccc

SEQ ID NO: 70981 - RNA, 21 nt, synthetic construct
  source 1..21: mol_type = other RNA
aggtcggaaggaatgtgcttc

SEQ ID NO: 70982 - RNA, 21 nt, synthetic construct
  source 1..21: mol_type = other RNA
aggtcgggctgcctcagccgc

SEQ ID NO: 70983 - RNA, 21 nt, synthetic construct
  source 1..21: mol_type = other RNA
aggtcgtttcagattgcttga

SEQ ID NO: 70984 - RNA, 21 nt, synthetic construct
  source 1..21: mol_type = other RNA
aggtctaagagataactaatg

SEQ ID NO: 70985 - RNA, 21 nt, synthetic construct
  source 1..21: mol_type = other RNA
aggtctaggctaatgtgtgtt

SEQ ID NO: 70986 - RNA, 21 nt, synthetic construct
  source 1..21: mol_type = other RNA
aggtctagtgtgcatgtgttg

SEQ ID NO: 70987 - RNA, 21 nt, synthetic construct
  source 1..21: mol_type = other RNA
aggtctatgtgacagaatgca

SEQ ID NO: 70988 - RNA, 21 nt, synthetic construct
  source 1..21: mol_type = other RNA
aggtctcagccttttctgatt

SEQ ID NO: 70989 - RNA, 21 nt, synthetic construct
  source 1..21: mol_type = other RNA
aggtctccttgtatggagact

SEQ ID NO: 70990 - RNA, 21 nt, synthetic construct
  source 1..21: mol_type = other RNA
aggtctctctctgtcacccaa

SEQ ID NO: 70991 - RNA, 21 nt, synthetic construct
  source 1..21: mol_type = other RNA
aggtctctctgaaattagcta

SEQ ID NO: 70992 - RNA, 21 nt, synthetic construct
  source 1..21: mol_type = other RNA
aggtctctttgaaaggaatcc

SEQ ID NO: 70993 - RNA, 21 nt, synthetic construct
  source 1..21: mol_type = other RNA
aggtctgtaagtcagttaaca

SEQ ID NO: 70994 - RNA, 21 nt, synthetic construct
  source 1..21: mol_type = other RNA
aggtctgtctttcagtatgtg

SEQ ID NO: 70995 - RNA, 21 nt, synthetic construct
  source 1..21: mol_type = other RNA
aggtctgttactcccgatttc

SEQ ID NO: 70996 - RNA, 21 nt, synthetic construct
  source 1..21: mol_type = other RNA
aggtcttcaacctcaacttta

SEQ ID NO: 70997 - RNA, 21 nt, synthetic construct
  source 1..21: mol_type = other RNA
aggtcttctagctttcagcac

SEQ ID NO: 70998 - RNA, 21 nt, synthetic construct
  source 1..21: mol_type = other RNA
aggtctttaaaagaaagctct

SEQ ID NO: 70999 - RNA, 21 nt, synthetic construct
  source 1..21: mol_type = other RNA
aggtctttgatccattttgag

SEQ ID NO: 71000 - RNA, 21 nt, synthetic construct
  source 1..21: mol_type = other RNA
aggtgaactattagagctttt

SEQ ID NO: 71001 - RNA, 21 nt, synthetic construct
  source 1..21: mol_type = other RNA
aggtgaagttaagggccattt

SEQ ID NO: 71002 - RNA, 21 nt, synthetic construct
  source 1..21: mol_type = other RNA
aggtgacctgccagagttggc

SEQ ID NO: 71003 - RNA, 21 nt, synthetic construct
  source 1..21: mol_type = other RNA
aggtgagacagaccctggctt

SEQ ID NO: 71004 - RNA, 21 nt, synthetic construct
  source 1..21: mol_type = other RNA
aggtgagctttttctttttaa

SEQ ID NO: 71005 - RNA, 21 nt, synthetic construct
  source 1..21: mol_type = other RNA
aggtgaggacatggagacagt

SEQ ID NO: 71006 - RNA, 21 nt, synthetic construct
  source 1..21: mol_type = other RNA
aggtgagggactgagcagtga

SEQ ID NO: 71007 - RNA, 21 nt, synthetic construct
  source 1..21: mol_type = other RNA
aggtgagtgagatgggaagaa

SEQ ID NO: 71008 - RNA, 21 nt, synthetic construct
  source 1..21: mol_type = other RNA
aggtgagtggactgtgaggga

SEQ ID NO: 71009 - RNA, 21 nt, synthetic construct
  source 1..21: mol_type = other RNA
aggtgattaaaggccctgatt

SEQ ID NO: 71010 - RNA, 21 nt, synthetic construct
  source 1..21: mol_type = other RNA
aggtgattcagagtgctgggt

SEQ ID NO: 71011 - RNA, 21 nt, synthetic construct
  source 1..21: mol_type = other RNA
aggtgcacaagggaagaggcc

SEQ ID NO: 71012 - RNA, 21 nt, synthetic construct
  source 1..21: mol_type = other RNA
aggtgcacacaacactcagat

SEQ ID NO: 71013 - RNA, 21 nt, synthetic construct
  source 1..21: mol_type = other RNA
aggtgcacattccaagagagg

SEQ ID NO: 71014 - RNA, 21 nt, synthetic construct
  source 1..21: mol_type = other RNA
aggtgcacgctgtgaatgtga

SEQ ID NO: 71015 - RNA, 21 nt, synthetic construct
  source 1..21: mol_type = other RNA
aggtgccccactccacacacg

SEQ ID NO: 71016 - RNA, 21 nt, synthetic construct
  source 1..21: mol_type = other RNA
aggtgcccgcgaaggcgtgta

SEQ ID NO: 71017 - RNA, 21 nt, synthetic construct
  source 1..21: mol_type = other RNA
aggtgcctcctgcctcagcct

SEQ ID NO: 71018 - RNA, 21 nt, synthetic construct
  source 1..21: mol_type = other RNA
aggtgcctgccatagagggag

SEQ ID NO: 71019 - RNA, 21 nt, synthetic construct
  source 1..21: mol_type = other RNA
aggtgcgggattatttggaag

SEQ ID NO: 71020 - RNA, 21 nt, synthetic construct
  source 1..21: mol_type = other RNA
aggtgctaattgtttgttggg

SEQ ID NO: 71021 - RNA, 21 nt, synthetic construct
  source 1..21: mol_type = other RNA
aggtgctggcttcaatatgca

SEQ ID NO: 71022 - RNA, 21 nt, synthetic construct
  source 1..21: mol_type = other RNA
aggtgctgttgtattttacac

SEQ ID NO: 71023 - RNA, 21 nt, synthetic construct
  source 1..21: mol_type = other RNA
aggtgcttacagactgattaa

SEQ ID NO: 71024 - RNA, 21 nt, synthetic construct
  source 1..21: mol_type = other RNA
aggtgctttttgtatcctgtt

SEQ ID NO: 71025 - RNA, 21 nt, synthetic construct
  source 1..21: mol_type = other RNA
aggtggaactctgtcatggtg

SEQ ID NO: 71026 - RNA, 21 nt, synthetic construct
  source 1..21: mol_type = other RNA
aggtggaaggcctgatagctg

SEQ ID NO: 71027 - RNA, 21 nt, synthetic construct
  source 1..21: mol_type = other RNA
aggtggagtggtggatagaga

SEQ ID NO: 71028 - RNA, 21 nt, synthetic construct
  source 1..21: mol_type = other RNA
aggtggagttctgctcttgtc

SEQ ID NO: 71029 - RNA, 21 nt, synthetic construct
  source 1..21: mol_type = other RNA
aggtggatatctgaggtcagg

SEQ ID NO: 71030 - RNA, 21 nt, synthetic construct
  source 1..21: mol_type = other RNA
aggtggatcaggagattgaga

SEQ ID NO: 71031 - RNA, 21 nt, synthetic construct
  source 1..21: mol_type = other RNA
aggtgggaggcccggagccga

SEQ ID NO: 71032 - RNA, 21 nt, synthetic construct
  source 1..21: mol_type = other RNA
aggtgggcactgggagccctc

SEQ ID NO: 71033 - RNA, 21 nt, synthetic construct
  source 1..21: mol_type = other RNA
aggtggtatgggagatgtgta

SEQ ID NO: 71034 - RNA, 21 nt, synthetic construct
  source 1..21: mol_type = other RNA
aggtggtatttaatctgtcag

SEQ ID NO: 71035 - RNA, 21 nt, synthetic construct
  source 1..21: mol_type = other RNA
aggtggttctgcctaatctct

SEQ ID NO: 71036 - RNA, 21 nt, synthetic construct
  source 1..21: mol_type = other RNA
aggtggtttgaaccccagaag

SEQ ID NO: 71037 - RNA, 21 nt, synthetic construct
  source 1..21: mol_type = other RNA
aggtgtaagagattaattcag

SEQ ID NO: 71038 - RNA, 21 nt, synthetic construct
  source 1..21: mol_type = other RNA
aggtgtacaattaggctgttt

SEQ ID NO: 71039 - RNA, 21 nt, synthetic construct
  source 1..21: mol_type = other RNA
aggtgtatgatcttattaatg

SEQ ID NO: 71040 - RNA, 21 nt, synthetic construct
  source 1..21: mol_type = other RNA
aggtgtcactggatagaagtg

SEQ ID NO: 71041 - RNA, 21 nt, synthetic construct
  source 1..21: mol_type = other RNA
aggtgtctcatttaataacta

SEQ ID NO: 71042 - RNA, 21 nt, synthetic construct
  source 1..21: mol_type = other RNA
aggtgtctgatgtgtgtctct

SEQ ID NO: 71043 - RNA, 21 nt, synthetic construct
  source 1..21: mol_type = other RNA
aggtgtgaaccacgcatctgg

SEQ ID NO: 71044 - RNA, 21 nt, synthetic construct
  source 1..21: mol_type = other RNA
aggtgtgagattgatagatca

SEQ ID NO: 71045 - RNA, 21 nt, synthetic construct
  source 1..21: mol_type = other RNA
aggtgtgagccaccgtgccgg

SEQ ID NO: 71046 - RNA, 21 nt, synthetic construct
  source 1..21: mol_type = other RNA
aggtgtgataactgatatgag

SEQ ID NO: 71047 - RNA, 21 nt, synthetic construct
  source 1..21: mol_type = other RNA
aggtgtgggccaccaagccct

SEQ ID NO: 71048 - RNA, 21 nt, synthetic construct
  source 1..21: mol_type = other RNA
aggtgtggtgctgcacgtctg

SEQ ID NO: 71049 - RNA, 21 nt, synthetic construct
  source 1..21: mol_type = other RNA
aggtgtgtaaacactgttctg

SEQ ID NO: 71050 - RNA, 21 nt, synthetic construct
  source 1..21: mol_type = other RNA
aggtgtgtgtaatcccagcta

SEQ ID NO: 71051 - RNA, 21 nt, synthetic construct
  source 1..21: mol_type = other RNA
aggtgtgtgttccttcctaca

SEQ ID NO: 71052 - RNA, 21 nt, synthetic construct
  source 1..21: mol_type = other RNA
aggtgttaagccgttccatca

SEQ ID NO: 71053 - RNA, 21 nt, synthetic construct
  source 1..21: mol_type = other RNA
aggtgttagcaggactggact

SEQ ID NO: 71054 - RNA, 21 nt, synthetic construct
  source 1..21: mol_type = other RNA
aggtgttcctgaagtctttgg

SEQ ID NO: 71055 - RNA, 21 nt, synthetic construct
  source 1..21: mol_type = other RNA
aggtgttggtgcatttgggac

SEQ ID NO: 71056 - RNA, 21 nt, synthetic construct
  source 1..21: mol_type = other RNA
aggtgtttggtgaattttatt

SEQ ID NO: 71057 - RNA, 21 nt, synthetic construct
  source 1..21: mol_type = other RNA
aggtgtttttcagccctgata

SEQ ID NO: 71058 - RNA, 21 nt, synthetic construct
  source 1..21: mol_type = other RNA
aggtgttttttccttctttgg

SEQ ID NO: 71059 - RNA, 21 nt, synthetic construct
  source 1..21: mol_type = other RNA
aggttaaaaccacaaacatga

SEQ ID NO: 71060 - RNA, 21 nt, synthetic construct
  source 1..21: mol_type = other RNA
aggttaaagcaacaggaagag

SEQ ID NO: 71061 - RNA, 21 nt, synthetic construct
  source 1..21: mol_type = other RNA
aggttaactaatagccagtgc

SEQ ID NO: 71062 - RNA, 21 nt, synthetic construct
  source 1..21: mol_type = other RNA
aggttaagggaagagctaaga

SEQ ID NO: 71063 - RNA, 21 nt, synthetic construct
  source 1..21: mol_type = other RNA
aggttacgtactaggtatcac

SEQ ID NO: 71064 - RNA, 21 nt, synthetic construct
  source 1..21: mol_type = other RNA
aggttataatcagccgtgatt

SEQ ID NO: 71065 - RNA, 21 nt, synthetic construct
  source 1..21: mol_type = other RNA
aggttatccaattttttggca

SEQ ID NO: 71066 - RNA, 21 nt, synthetic construct
  source 1..21: mol_type = other RNA
aggttatctgttttcttactg

SEQ ID NO: 71067 - RNA, 21 nt, synthetic construct
  source 1..21: mol_type = other RNA
aggttattaagataatgctgt

SEQ ID NO: 71068 - RNA, 21 nt, synthetic construct
  source 1..21: mol_type = other RNA
aggttattcaaaacaaaacac

SEQ ID NO: 71069 - RNA, 21 nt, synthetic construct
  source 1..21: mol_type = other RNA
aggttcaagtttggctcccat

SEQ ID NO: 71070 - RNA, 21 nt, synthetic construct
  source 1..21: mol_type = other RNA
aggttcacaaattagaacaaa

SEQ ID NO: 71071 - RNA, 21 nt, synthetic construct
  source 1..21: mol_type = other RNA
aggttcatccatgttgttgaa

SEQ ID NO: 71072 - RNA, 21 nt, synthetic construct
  source 1..21: mol_type = other RNA
aggttcatgaacataaatttg

SEQ ID NO: 71073 - RNA, 21 nt, synthetic construct
  source 1..21: mol_type = other RNA
aggttcatgtgtgcttacaca

SEQ ID NO: 71074 - RNA, 21 nt, synthetic construct
  source 1..21: mol_type = other RNA
aggttcattttaataagcttc

SEQ ID NO: 71075 - RNA, 21 nt, synthetic construct
  source 1..21: mol_type = other RNA
aggttctgctatgctgaaagg

SEQ ID NO: 71076 - RNA, 21 nt, synthetic construct
  source 1..21: mol_type = other RNA
aggttcttcatcagtccctgt

SEQ ID NO: 71077 - RNA, 21 nt, synthetic construct
  source 1..21: mol_type = other RNA
aggttcttttaaatgccaatt

SEQ ID NO: 71078 - RNA, 21 nt, synthetic construct
  source 1..21: mol_type = other RNA
aggttgaaaactcaactgcct

SEQ ID NO: 71079 - RNA, 21 nt, synthetic construct
  source 1..21: mol_type = other RNA
aggttgaaagttcagaatacc

SEQ ID NO: 71080 - RNA, 21 nt, synthetic construct
  source 1..21: mol_type = other RNA
aggttgaagacctgcagtctg

SEQ ID NO: 71081 - RNA, 21 nt, synthetic construct
  source 1..21: mol_type = other RNA
aggttgaagctctagtgagct

SEQ ID NO: 71082 - RNA, 21 nt, synthetic construct
  source 1..21: mol_type = other RNA
aggttgaatagggcctcaaat

SEQ ID NO: 71083 - RNA, 21 nt, synthetic construct
  source 1..21: mol_type = other RNA
aggttgagacaagaccacacc

SEQ ID NO: 71084 - RNA, 21 nt, synthetic construct
  source 1..21: mol_type = other RNA
aggttgagacttagatttatt

SEQ ID NO: 71085 - RNA, 21 nt, synthetic construct
  source 1..21: mol_type = other RNA
aggttgaggctgcagtgagct

SEQ ID NO: 71086 - RNA, 21 nt, synthetic construct
  source 1..21: mol_type = other RNA
aggttgatactagtttagtgc

SEQ ID NO: 71087 - RNA, 21 nt, synthetic construct
  source 1..21: mol_type = other RNA
aggttgatggctgtactaagc

SEQ ID NO: 71088 - RNA, 21 nt, synthetic construct
  source 1..21: mol_type = other RNA
aggttgcattaatgcttcata

SEQ ID NO: 71089 - RNA, 21 nt, synthetic construct
  source 1..21: mol_type = other RNA
aggttgcggtgacgtgagatc

SEQ ID NO: 71090 - RNA, 21 nt, synthetic construct
  source 1..21: mol_type = other RNA
aggttgcttaattgagctgtc

SEQ ID NO: 71091 - RNA, 21 nt, synthetic construct
  source 1..21: mol_type = other RNA
aggttgcttttacttggctcc

SEQ ID NO: 71092 - RNA, 21 nt, synthetic construct
  source 1..21: mol_type = other RNA
aggttgggcttatcagatggt

SEQ ID NO: 71093 - RNA, 21 nt, synthetic construct
  source 1..21: mol_type = other RNA
aggttgttcttggttaatatt

SEQ ID NO: 71094 - RNA, 21 nt, synthetic construct
  source 1..21: mol_type = other RNA
aggtttacaggatatcagaag

SEQ ID NO: 71095 - RNA, 21 nt, synthetic construct
  source 1..21: mol_type = other RNA
aggtttactccaagaaggcta

SEQ ID NO: 71096 - RNA, 21 nt, synthetic construct
  source 1..21: mol_type = other RNA
aggtttacttggggagagtgg

SEQ ID NO: 71097 - RNA, 21 nt, synthetic construct
  source 1..21: mol_type = other RNA
aggtttagaaaacatatcctt

SEQ ID NO: 71098 - RNA, 21 nt, synthetic construct
  source 1..21: mol_type = other RNA
aggtttaggaagcacattcct

SEQ ID NO: 71099 - RNA, 21 nt, synthetic construct
  source 1..21: mol_type = other RNA
aggtttaggtttttcttgtgg

SEQ ID NO: 71100 - RNA, 21 nt, synthetic construct
  source 1..21: mol_type = other RNA
aggtttcaagtgaaccaaaaa

SEQ ID NO: 71101 - RNA, 21 nt, synthetic construct
  source 1..21: mol_type = other RNA
aggtttccagtggcccccctg

SEQ ID NO: 71102 - RNA, 21 nt, synthetic construct
  source 1..21: mol_type = other RNA
aggtttccctggggaataaga

SEQ ID NO: 71103 - RNA, 21 nt, synthetic construct
  source 1..21: mol_type = other RNA
aggtttctcatttttcagggg

SEQ ID NO: 71104 - RNA, 21 nt, synthetic construct
  source 1..21: mol_type = other RNA
aggtttctctccaaggtacaa

SEQ ID NO: 71105 - RNA, 21 nt, synthetic construct
  source 1..21: mol_type = other RNA
aggtttcttcactcttaaaag

SEQ ID NO: 71106 - RNA, 21 nt, synthetic construct
  source 1..21: mol_type = other RNA
aggtttgcactggcacagcac

SEQ ID NO: 71107 - RNA, 21 nt, synthetic construct
  source 1..21: mol_type = other RNA
aggtttggagtttgtagctca

SEQ ID NO: 71108 - RNA, 21 nt, synthetic construct
  source 1..21: mol_type = other RNA
aggtttgtagagcaagcaaca

SEQ ID NO: 71109 - RNA, 21 nt, synthetic construct
  source 1..21: mol_type = other RNA
aggtttgtgcttggatattct

SEQ ID NO: 71110 - RNA, 21 nt, synthetic construct
  source 1..21: mol_type = other RNA
aggttttacgatgttggccag

SEQ ID NO: 71111 - RNA, 21 nt, synthetic construct
  source 1..21: mol_type = other RNA
aggttttatctctctcaagca

SEQ ID NO: 71112 - RNA, 21 nt, synthetic construct
  source 1..21: mol_type = other RNA
aggttttcgaccaagttacta

SEQ ID NO: 71113 - RNA, 21 nt, synthetic construct
  source 1..21: mol_type = other RNA
aggttttggtaatgggaaaga

SEQ ID NO: 71114 - RNA, 21 nt, synthetic construct
  source 1..21: mol_type = other RNA
aggtttttaaaagatgcattc

SEQ ID NO: 71115 - RNA, 21 nt, synthetic construct
  source 1..21: mol_type = other RNA
aggtttttcttgtgggtattt

SEQ ID NO: 71116 - RNA, 21 nt, synthetic construct
  source 1..21: mol_type = other RNA
aggtttttgaacaagagcgtc

SEQ ID NO: 71117 - RNA, 21 nt, synthetic construct
  source 1..21: mol_type = other RNA
aggtttttgattactgactca

SEQ ID NO: 71118 - RNA, 21 nt, synthetic construct
  source 1..21: mol_type = other RNA
aggttttttcattttactgct

SEQ ID NO: 71119 - RNA, 21 nt, synthetic construct
  source 1..21: mol_type = other RNA
agtaaaaaaggaccatctgtt

SEQ ID NO: 71120 - RNA, 21 nt, synthetic construct
  source 1..21: mol_type = other RNA
agtaaaaagaaatctgcatcc

SEQ ID NO: 71121 - RNA, 21 nt, synthetic construct
  source 1..21: mol_type = other RNA
agtaaaaagcactatccacat

SEQ ID NO: 71122 - RNA, 21 nt, synthetic construct
  source 1..21: mol_type = other RNA
agtaaaaccaaatgtggatag

SEQ ID NO: 71123 - RNA, 21 nt, synthetic construct
  source 1..21: mol_type = other RNA
agtaaaagaagatgcagttgc

SEQ ID NO: 71124 - RNA, 21 nt, synthetic construct
  source 1..21: mol_type = other RNA
agtaaaagcaacctcatttgc

SEQ ID NO: 71125 - RNA, 21 nt, synthetic construct
  source 1..21: mol_type = other RNA
agtaaaatcggaacaggctca

SEQ ID NO: 71126 - RNA, 21 nt, synthetic construct
  source 1..21: mol_type = other RNA
agtaaaattcccttcagtgta

SEQ ID NO: 71127 - RNA, 21 nt, synthetic construct
  source 1..21: mol_type = other RNA
agtaaacaactgactctaaag

SEQ ID NO: 71128 - RNA, 21 nt, synthetic construct
  source 1..21: mol_type = other RNA
agtaaacctcaagtcttttcc

SEQ ID NO: 71129 - RNA, 21 nt, synthetic construct
  source 1..21: mol_type = other RNA
agtaaagatagccccttatca

SEQ ID NO: 71130 - RNA, 21 nt, synthetic construct
  source 1..21: mol_type = other RNA
agtaaagatcaagctcgccgt

SEQ ID NO: 71131 - RNA, 21 nt, synthetic construct
  source 1..21: mol_type = other RNA
agtaaagcaaatgtgactaga

SEQ ID NO: 71132 - RNA, 21 nt, synthetic construct
  source 1..21: mol_type = other RNA
agtaaagccccattgtacaca

SEQ ID NO: 71133 - RNA, 21 nt, synthetic construct
  source 1..21: mol_type = other RNA
agtaaagggtaagaaaattgt

SEQ ID NO: 71134 - RNA, 21 nt, synthetic construct
  source 1..21: mol_type = other RNA
agtaaagtcactgtggaaaac

SEQ ID NO: 71135 - RNA, 21 nt, synthetic construct
  source 1..21: mol_type = other RNA
agtaaatatactgactagtgg

SEQ ID NO: 71136 - RNA, 21 nt, synthetic construct
  source 1..21: mol_type = other RNA
agtaaatatccgaaagaactg

SEQ ID NO: 71137 - RNA, 21 nt, synthetic construct
  source 1..21: mol_type = other RNA
agtaaatatttaacaccatgg

SEQ ID NO: 71138 - RNA, 21 nt, synthetic construct
  source 1..21: mol_type = other RNA
agtaaatcagactgtattacc

SEQ ID NO: 71139 - RNA, 21 nt, synthetic construct
  source 1..21: mol_type = other RNA
agtaaatcccggccaggtgcg

SEQ ID NO: 71140 - RNA, 21 nt, synthetic construct
  source 1..21: mol_type = other RNA
agtaaatctttggtgaaggtt

SEQ ID NO: 71141 - RNA, 21 nt, synthetic construct
  source 1..21: mol_type = other RNA
agtaaatgaaatttgaggccc

SEQ ID NO: 71142 - RNA, 21 nt, synthetic construct
  source 1..21: mol_type = other RNA
agtaaatgcaatgcaggcgcc

SEQ ID NO: 71143 - RNA, 21 nt, synthetic construct
  source 1..21: mol_type = other RNA
agtaaattcgcataaccaaat

SEQ ID NO: 71144 - RNA, 21 nt, synthetic construct
  source 1..21: mol_type = other RNA
agtaacactcagaagtactac

SEQ ID NO: 71145 - RNA, 21 nt, synthetic construct
  source 1..21: mol_type = other RNA
agtaacagacctctgaagagt

SEQ ID NO: 71146 - RNA, 21 nt, synthetic construct
  source 1..21: mol_type = other RNA
agtaacagttcaatactactg

SEQ ID NO: 71147 - RNA, 21 nt, synthetic construct
  source 1..21: mol_type = other RNA
agtaacatgtggaacataatc

SEQ ID NO: 71148 - RNA, 21 nt, synthetic construct
  source 1..21: mol_type = other RNA
agtaacattacaacagcaagg

SEQ ID NO: 71149 - RNA, 21 nt, synthetic construct
  source 1..21: mol_type = other RNA
agtaactcttgagttaggaat

SEQ ID NO: 71150 - RNA, 21 nt, synthetic construct
  source 1..21: mol_type = other RNA
agtaactgctcctctgacttt

SEQ ID NO: 71151 - RNA, 21 nt, synthetic construct
  source 1..21: mol_type = other RNA
agtaactggtccagatgaagc

SEQ ID NO: 71152 - RNA, 21 nt, synthetic construct
  source 1..21: mol_type = other RNA
agtaactgtcatcagcgtcct

SEQ ID NO: 71153 - RNA, 21 nt, synthetic construct
  source 1..21: mol_type = other RNA
agtaactgttggcaaggatgt

SEQ ID NO: 71154 - RNA, 21 nt, synthetic construct
  source 1..21: mol_type = other RNA
agtaacttggtcgaaaacctg

SEQ ID NO: 71155 - RNA, 21 nt, synthetic construct
  source 1..21: mol_type = other RNA
agtaactttctgcttaaagcc

SEQ ID NO: 71156 - RNA, 21 nt, synthetic construct
  source 1..21: mol_type = other RNA
agtaagaaaacagataaccta

SEQ ID NO: 71157 - RNA, 21 nt, synthetic construct
  source 1..21: mol_type = other RNA
agtaagaggtatcaccatctg

SEQ ID NO: 71158 - RNA, 21 nt, synthetic construct
  source 1..21: mol_type = other RNA
agtaagatcctggattgctag

SEQ ID NO: 71159 - RNA, 21 nt, synthetic construct
  source 1..21: mol_type = other RNA
agtaagattctgtctctacaa

SEQ ID NO: 71160 - RNA, 21 nt, synthetic construct
  source 1..21: mol_type = other RNA
agtaagcaactgcatcttctt

SEQ ID NO: 71161 - RNA, 21 nt, synthetic construct
  source 1..21: mol_type = other RNA
agtaaggatcgttagtatttt

SEQ ID NO: 71162 - RNA, 21 nt, synthetic construct
  source 1..21: mol_type = other RNA
agtaagggtaaacagaattaa

SEQ ID NO: 71163 - RNA, 21 nt, synthetic construct
  source 1..21: mol_type = other RNA
agtaaggtttccctggggaat

SEQ ID NO: 71164 - RNA, 21 nt, synthetic construct
  source 1..21: mol_type = other RNA
agtaagtaaaatcggaacagg

SEQ ID NO: 71165 - RNA, 21 nt, synthetic construct
  source 1..21: mol_type = other RNA
agtaagtgtgagcaaaaatac

SEQ ID NO: 71166 - RNA, 21 nt, synthetic construct
  source 1..21: mol_type = other RNA
agtaagttgcatacgtcgtcc

SEQ ID NO: 71167 - RNA, 21 nt, synthetic construct
  source 1..21: mol_type = other RNA
agtaagttgtgtcatttttgt

SEQ ID NO: 71168 - RNA, 21 nt, synthetic construct
  source 1..21: mol_type = other RNA
agtaataaagcaagtatgagc

SEQ ID NO: 71169 - RNA, 21 nt, synthetic construct
  source 1..21: mol_type = other RNA
agtaataaaggcaatgctctc

SEQ ID NO: 71170 - RNA, 21 nt, synthetic construct
  source 1..21: mol_type = other RNA
agtaatcaaacagtgtgatat

SEQ ID NO: 71171 - RNA, 21 nt, synthetic construct
  source 1..21: mol_type = other RNA
agtaatcaagtgaaatgatct

SEQ ID NO: 71172 - RNA, 21 nt, synthetic construct
  source 1..21: mol_type = other RNA
agtaatcttgctaaacatgta

SEQ ID NO: 71173 - RNA, 21 nt, synthetic construct
  source 1..21: mol_type = other RNA
agtaatgaaaattagctggat

SEQ ID NO: 71174 - RNA, 21 nt, synthetic construct
  source 1..21: mol_type = other RNA
agtaatgctggccagtgagtt

SEQ ID NO: 71175 - RNA, 21 nt, synthetic construct
  source 1..21: mol_type = other RNA
agtaatggatgtttttagaga

SEQ ID NO: 71176 - RNA, 21 nt, synthetic construct
  source 1..21: mol_type = other RNA
agtaatggttggccgaggcca

SEQ ID NO: 71177 - RNA, 21 nt, synthetic construct
  source 1..21: mol_type = other RNA
agtaattagttacatgaggtc

SEQ ID NO: 71178 - RNA, 21 nt, synthetic construct
  source 1..21: mol_type = other RNA
agtaattctccactttcatga

SEQ ID NO: 71179 - RNA, 21 nt, synthetic construct
  source 1..21: mol_type = other RNA
agtaattctgcagtgaacatg

SEQ ID NO: 71180 - RNA, 21 nt, synthetic construct
  source 1..21: mol_type = other RNA
agtaattgggatctgataaat

SEQ ID NO: 71181 - RNA, 21 nt, synthetic construct
  source 1..21: mol_type = other RNA
agtaattgtagtttccatgga

SEQ ID NO: 71182 - RNA, 21 nt, synthetic construct
  source 1..21: mol_type = other RNA
agtaattgttttcccttttgt

SEQ ID NO: 71183 - RNA, 21 nt, synthetic construct
  source 1..21: mol_type = other RNA
agtacaaaagtgctgttgagg

SEQ ID NO: 71184 - RNA, 21 nt, synthetic construct
  source 1..21: mol_type = other RNA
agtacaaggctagagctcaca

SEQ ID NO: 71185 - RNA, 21 nt, synthetic construct
  source 1..21: mol_type = other RNA
agtacacgaaaatatccctgg

SEQ ID NO: 71186 - RNA, 21 nt, synthetic construct
  source 1..21: mol_type = other RNA
agtacactgttgatttagaaa

SEQ ID NO: 71187 - RNA, 21 nt, synthetic construct
  source 1..21: mol_type = other RNA
agtacagataaccaataagaa

SEQ ID NO: 71188 - RNA, 21 nt, synthetic construct
  source 1..21: mol_type = other RNA
agtacagccatcaacctaatg

SEQ ID NO: 71189 - RNA, 21 nt, synthetic construct
  source 1..21: mol_type = other RNA
agtacagtagtaaaaccaaat

SEQ ID NO: 71190 - RNA, 21 nt, synthetic construct
  source 1..21: mol_type = other RNA
agtacagtgagtagaagagta

SEQ ID NO: 71191 - RNA, 21 nt, synthetic construct
  source 1..21: mol_type = other RNA
agtacagtgcataccaccaca

SEQ ID NO: 71192 - RNA, 21 nt, synthetic construct
  source 1..21: mol_type = other RNA
agtacatctcaattcagaagc

SEQ ID NO: 71193 - RNA, 21 nt, synthetic construct
  source 1..21: mol_type = other RNA
agtacatgaaatactcaaact

SEQ ID NO: 71194 - RNA, 21 nt, synthetic construct
  source 1..21: mol_type = other RNA
agtaccaggtcagccagagga

SEQ ID NO: 71195 - RNA, 21 nt, synthetic construct
  source 1..21: mol_type = other RNA
agtaccattccccttgccaag

SEQ ID NO: 71196 - RNA, 21 nt, synthetic construct
  source 1..21: mol_type = other RNA
agtacctctgggatgctcagt

SEQ ID NO: 71197 - RNA, 21 nt, synthetic construct
  source 1..21: mol_type = other RNA
agtacgtaacctaaagttgag

SEQ ID NO: 71198 - RNA, 21 nt, synthetic construct
  source 1..21: mol_type = other RNA
agtacgtgcagagcaggggtg

SEQ ID NO: 71199 - RNA, 21 nt, synthetic construct
  source 1..21: mol_type = other RNA
agtactatcttccctaaagag

SEQ ID NO: 71200 - RNA, 21 nt, synthetic construct
  source 1..21: mol_type = other RNA
agtactatgcagcaacggaaa

SEQ ID NO: 71201 - RNA, 21 nt, synthetic construct
  source 1..21: mol_type = other RNA
agtactgaccatctcagcaca

SEQ ID NO: 71202 - RNA, 21 nt, synthetic construct
  source 1..21: mol_type = other RNA
agtactgagtcaaaaccaaag

SEQ ID NO: 71203 - RNA, 21 nt, synthetic construct
  source 1..21: mol_type = other RNA
agtactgcatgattcccctta

SEQ ID NO: 71204 - RNA, 21 nt, synthetic construct
  source 1..21: mol_type = other RNA
agtactggaaatggacagcgg

SEQ ID NO: 71205 - RNA, 21 nt, synthetic construct
  source 1..21: mol_type = other RNA
agtacttcaaggttcacaaat

SEQ ID NO: 71206 - RNA, 21 nt, synthetic construct
  source 1..21: mol_type = other RNA
agtacttcagcgcttgaacaa

SEQ ID NO: 71207 - RNA, 21 nt, synthetic construct
  source 1..21: mol_type = other RNA
agtacttccctctttctcaac

SEQ ID NO: 71208 - RNA, 21 nt, synthetic construct
  source 1..21: mol_type = other RNA
agtacttctgagtgttacttg

SEQ ID NO: 71209 - RNA, 21 nt, synthetic construct
  source 1..21: mol_type = other RNA
agtacttgtctttttgtgact

SEQ ID NO: 71210 - RNA, 21 nt, synthetic construct
  source 1..21: mol_type = other RNA
agtactttttcatccaaacag

SEQ ID NO: 71211 - RNA, 21 nt, synthetic construct
  source 1..21: mol_type = other RNA
agtagaaagcaggttcatttt

SEQ ID NO: 71212 - RNA, 21 nt, synthetic construct
  source 1..21: mol_type = other RNA
agtagaaatcttccagaagga

SEQ ID NO: 71213 - RNA, 21 nt, synthetic construct
  source 1..21: mol_type = other RNA
agtagaagactcagcagtttt

SEQ ID NO: 71214 - RNA, 21 nt, synthetic construct
  source 1..21: mol_type = other RNA
agtagaagagtaatggttggc

SEQ ID NO: 71215 - RNA, 21 nt, synthetic construct
  source 1..21: mol_type = other RNA
agtagaaggccctatgccttc

SEQ ID NO: 71216 - RNA, 21 nt, synthetic construct
  source 1..21: mol_type = other RNA
agtagaaggtcaatctaggag

SEQ ID NO: 71217 - RNA, 21 nt, synthetic construct
  source 1..21: mol_type = other RNA
agtagaattctccagtgaagt

SEQ ID NO: 71218 - RNA, 21 nt, synthetic construct
  source 1..21: mol_type = other RNA
agtagagaaggctttgtgttg

SEQ ID NO: 71219 - RNA, 21 nt, synthetic construct
  source 1..21: mol_type = other RNA
agtagagatgaggttttacga

SEQ ID NO: 71220 - RNA, 21 nt, synthetic construct
  source 1..21: mol_type = other RNA
agtagaggactgcctattttg

SEQ ID NO: 71221 - RNA, 21 nt, synthetic construct
  source 1..21: mol_type = other RNA
agtagaggccgagggttgaac

SEQ ID NO: 71222 - RNA, 21 nt, synthetic construct
  source 1..21: mol_type = other RNA
agtagattagcttttacgagg

SEQ ID NO: 71223 - RNA, 21 nt, synthetic construct
  source 1..21: mol_type = other RNA
agtagattcccccttatgtgt

SEQ ID NO: 71224 - RNA, 21 nt, synthetic construct
  source 1..21: mol_type = other RNA
agtagcaccctatttatgttg

SEQ ID NO: 71225 - RNA, 21 nt, synthetic construct
  source 1..21: mol_type = other RNA
agtagcagaatccccaaataa

SEQ ID NO: 71226 - RNA, 21 nt, synthetic construct
  source 1..21: mol_type = other RNA
agtagcagggactacagtcac

SEQ ID NO: 71227 - RNA, 21 nt, synthetic construct
  source 1..21: mol_type = other RNA
agtagccaaaggtagaaacat

SEQ ID NO: 71228 - RNA, 21 nt, synthetic construct
  source 1..21: mol_type = other RNA
agtagcgctttaagcatccca

SEQ ID NO: 71229 - RNA, 21 nt, synthetic construct
  source 1..21: mol_type = other RNA
agtagctaggaccataggcac

SEQ ID NO: 71230 - RNA, 21 nt, synthetic construct
  source 1..21: mol_type = other RNA
agtagctcatcatttataccc

SEQ ID NO: 71231 - RNA, 21 nt, synthetic construct
  source 1..21: mol_type = other RNA
agtagctgggatcacaggcgt

SEQ ID NO: 71232 - RNA, 21 nt, synthetic construct
  source 1..21: mol_type = other RNA
agtagctgggattacacacac

SEQ ID NO: 71233 - RNA, 21 nt, synthetic construct
  source 1..21: mol_type = other RNA
agtagctgtctttaatgtaaa

SEQ ID NO: 71234 - RNA, 21 nt, synthetic construct
  source 1..21: mol_type = other RNA
agtagctgtgattaccggcat

SEQ ID NO: 71235 - RNA, 21 nt, synthetic construct
  source 1..21: mol_type = other RNA
agtagctgttgaattgttgcg

SEQ ID NO: 71236 - RNA, 21 nt, synthetic construct
  source 1..21: mol_type = other RNA
agtagcttcaatgagggcaga

SEQ ID NO: 71237 - RNA, 21 nt, synthetic construct
  source 1..21: mol_type = other RNA
agtaggaaaaccatgtcatgt

SEQ ID NO: 71238 - RNA, 21 nt, synthetic construct
  source 1..21: mol_type = other RNA
agtaggaattaaacatttctg

SEQ ID NO: 71239 - RNA, 21 nt, synthetic construct
  source 1..21: mol_type = other RNA
agtaggatgaattacaaatga

SEQ ID NO: 71240 - RNA, 21 nt, synthetic construct
  source 1..21: mol_type = other RNA
agtaggcaacatccctatgca

SEQ ID NO: 71241 - RNA, 21 nt, synthetic construct
  source 1..21: mol_type = other RNA
agtaggcttagataggatggg

SEQ ID NO: 71242 - RNA, 21 nt, synthetic construct
  source 1..21: mol_type = other RNA
agtagggaaggtgcccgcgaa

SEQ ID NO: 71243 - RNA, 21 nt, synthetic construct
  source 1..21: mol_type = other RNA
agtaggggtaaatctttgtac

SEQ ID NO: 71244 - RNA, 21 nt, synthetic construct
  source 1..21: mol_type = other RNA
agtaggtctccttgtatggag

SEQ ID NO: 71245 - RNA, 21 nt, synthetic construct
  source 1..21: mol_type = other RNA
agtaggttgagacttagattt

SEQ ID NO: 71246 - RNA, 21 nt, synthetic construct
  source 1..21: mol_type = other RNA
agtagtaaaaccaaatgtgga

SEQ ID NO: 71247 - RNA, 21 nt, synthetic construct
  source 1..21: mol_type = other RNA
agtagtaaagcaaatgtgact

SEQ ID NO: 71248 - RNA, 21 nt, synthetic construct
  source 1..21: mol_type = other RNA
agtagtaagttgtgtcatttt

SEQ ID NO: 71249 - RNA, 21 nt, synthetic construct
  source 1..21: mol_type = other RNA
agtagtacaaaagtgctgttg

SEQ ID NO: 71250 - RNA, 21 nt, synthetic construct
  source 1..21: mol_type = other RNA
agtagtacagtgagtagaaga

SEQ ID NO: 71251 - RNA, 21 nt, synthetic construct
  source 1..21: mol_type = other RNA
agtagtacttctgagtgttac

SEQ ID NO: 71252 - RNA, 21 nt, synthetic construct
  source 1..21: mol_type = other RNA
agtagtattgaactgttactt

SEQ ID NO: 71253 - RNA, 21 nt, synthetic construct
  source 1..21: mol_type = other RNA
agtagtggcagccccgcttca

SEQ ID NO: 71254 - RNA, 21 nt, synthetic construct
  source 1..21: mol_type = other RNA
agtagttaggtggtttgaacc

SEQ ID NO: 71255 - RNA, 21 nt, synthetic construct
  source 1..21: mol_type = other RNA
agtagttcatgttagcataat

SEQ ID NO: 71256 - RNA, 21 nt, synthetic construct
  source 1..21: mol_type = other RNA
agtagttgctcagaaaatttt

SEQ ID NO: 71257 - RNA, 21 nt, synthetic construct
  source 1..21: mol_type = other RNA
agtagttgtaactacagacat

SEQ ID NO: 71258 - RNA, 21 nt, synthetic construct
  source 1..21: mol_type = other RNA
agtagtttgctagtggtaact

SEQ ID NO: 71259 - RNA, 21 nt, synthetic construct
  source 1..21: mol_type = other RNA
agtataagagaaggaagcacc

SEQ ID NO: 71260 - RNA, 21 nt, synthetic construct
  source 1..21: mol_type = other RNA
agtatacatgtttagcaagat

SEQ ID NO: 71261 - RNA, 21 nt, synthetic construct
  source 1..21: mol_type = other RNA
agtatagaaaggagaccagtt

SEQ ID NO: 71262 - RNA, 21 nt, synthetic construct
  source 1..21: mol_type = other RNA
agtataggggaactcttgtag

SEQ ID NO: 71263 - RNA, 21 nt, synthetic construct
  source 1..21: mol_type = other RNA
agtatatatcatagagtacca

SEQ ID NO: 71264 - RNA, 21 nt, synthetic construct
  source 1..21: mol_type = other RNA
agtatatatgctccctaaata

SEQ ID NO: 71265 - RNA, 21 nt, synthetic construct
  source 1..21: mol_type = other RNA
agtatatattttctaagagcc

SEQ ID NO: 71266 - RNA, 21 nt, synthetic construct
  source 1..21: mol_type = other RNA
agtatattcatagtagctgtt

SEQ ID NO: 71267 - RNA, 21 nt, synthetic construct
  source 1..21: mol_type = other RNA
agtatattctgtgaattgtga

SEQ ID NO: 71268 - RNA, 21 nt, synthetic construct
  source 1..21: mol_type = other RNA
agtatatttactgcttgctgc

SEQ ID NO: 71269 - RNA, 21 nt, synthetic construct
  source 1..21: mol_type = other RNA
agtatattttcaaggcttgtg

SEQ ID NO: 71270 - RNA, 21 nt, synthetic construct
  source 1..21: mol_type = other RNA
agtatcaacctgcaggtattt

SEQ ID NO: 71271 - RNA, 21 nt, synthetic construct
  source 1..21: mol_type = other RNA
agtatcccagatggggattga

SEQ ID NO: 71272 - RNA, 21 nt, synthetic construct
  source 1..21: mol_type = other RNA
agtatcctttcaaggtatctc

SEQ ID NO: 71273 - RNA, 21 nt, synthetic construct
  source 1..21: mol_type = other RNA
agtatcgtgagactattatga

SEQ ID NO: 71274 - RNA, 21 nt, synthetic construct
  source 1..21: mol_type = other RNA
agtatctaggagtacagtgca

SEQ ID NO: 71275 - RNA, 21 nt, synthetic construct
  source 1..21: mol_type = other RNA
agtatctcagtcataatttgt

SEQ ID NO: 71276 - RNA, 21 nt, synthetic construct
  source 1..21: mol_type = other RNA
agtatctcatgcttaggatcc

SEQ ID NO: 71277 - RNA, 21 nt, synthetic construct
  source 1..21: mol_type = other RNA
agtatctccctgtgcgtgaat

SEQ ID NO: 71278 - RNA, 21 nt, synthetic construct
  source 1..21: mol_type = other RNA
agtatctcctttccttccttg

SEQ ID NO: 71279 - RNA, 21 nt, synthetic construct
  source 1..21: mol_type = other RNA
agtatctcggtcattctggag

SEQ ID NO: 71280 - RNA, 21 nt, synthetic construct
  source 1..21: mol_type = other RNA
agtatctggtgctggcagcct

SEQ ID NO: 71281 - RNA, 21 nt, synthetic construct
  source 1..21: mol_type = other RNA
agtatctggtgttgcttgctc

SEQ ID NO: 71282 - RNA, 21 nt, synthetic construct
  source 1..21: mol_type = other RNA
agtatcttgaagaaaccaaga

SEQ ID NO: 71283 - RNA, 21 nt, synthetic construct
  source 1..21: mol_type = other RNA
agtatcttttcatgttgacca

SEQ ID NO: 71284 - RNA, 21 nt, synthetic construct
  source 1..21: mol_type = other RNA
agtatctttttcagcagcaga

SEQ ID NO: 71285 - RNA, 21 nt, synthetic construct
  source 1..21: mol_type = other RNA
agtatgaatgcacgtgaagct

SEQ ID NO: 71286 - RNA, 21 nt, synthetic construct
  source 1..21: mol_type = other RNA
agtatgacctcctcccactta

SEQ ID NO: 71287 - RNA, 21 nt, synthetic construct
  source 1..21: mol_type = other RNA
agtatgagaaatgtctggttt

SEQ ID NO: 71288 - RNA, 21 nt, synthetic construct
  source 1..21: mol_type = other RNA
agtatgagccactagtcagta

SEQ ID NO: 71289 - RNA, 21 nt, synthetic construct
  source 1..21: mol_type = other RNA
agtatgagtcttccgtctcaa

SEQ ID NO: 71290 - RNA, 21 nt, synthetic construct
  source 1..21: mol_type = other RNA
agtatgatgccactcaaaact

SEQ ID NO: 71291 - RNA, 21 nt, synthetic construct
  source 1..21: mol_type = other RNA
agtatgcagaaaccagttgta

SEQ ID NO: 71292 - RNA, 21 nt, synthetic construct
  source 1..21: mol_type = other RNA
agtatgcatagatcacaagga

SEQ ID NO: 71293 - RNA, 21 nt, synthetic construct
  source 1..21: mol_type = other RNA
agtatgcatagcagggtcatg

SEQ ID NO: 71294 - RNA, 21 nt, synthetic construct
  source 1..21: mol_type = other RNA
agtatgcggggtttcagcaca

SEQ ID NO: 71295 - RNA, 21 nt, synthetic construct
  source 1..21: mol_type = other RNA
agtatgctgtttacattagag

SEQ ID NO: 71296 - RNA, 21 nt, synthetic construct
  source 1..21: mol_type = other RNA
agtatgggtctccattttggt

SEQ ID NO: 71297 - RNA, 21 nt, synthetic construct
  source 1..21: mol_type = other RNA
agtatggttgaagaaagtagg

SEQ ID NO: 71298 - RNA, 21 nt, synthetic construct
  source 1..21: mol_type = other RNA
agtatgtaattacaggggact

SEQ ID NO: 71299 - RNA, 21 nt, synthetic construct
  source 1..21: mol_type = other RNA
agtatgtaggaaactttgcat

SEQ ID NO: 71300 - RNA, 21 nt, synthetic construct
  source 1..21: mol_type = other RNA
agtatgtcagactcattgcct

SEQ ID NO: 71301 - RNA, 21 nt, synthetic construct
  source 1..21: mol_type = other RNA
agtatgtgtctctgacatgag

SEQ ID NO: 71302 - RNA, 21 nt, synthetic construct
  source 1..21: mol_type = other RNA
agtattaaaagcacaagcaca

SEQ ID NO: 71303 - RNA, 21 nt, synthetic construct
  source 1..21: mol_type = other RNA
agtattacacagaaagcctct

SEQ ID NO: 71304 - RNA, 21 nt, synthetic construct
  source 1..21: mol_type = other RNA
agtattacctatgaataggtg

SEQ ID NO: 71305 - RNA, 21 nt, synthetic construct
  source 1..21: mol_type = other RNA
agtattacctcccatgcattc

SEQ ID NO: 71306 - RNA, 21 nt, synthetic construct
  source 1..21: mol_type = other RNA
agtattcaagtttcaccctgc

SEQ ID NO: 71307 - RNA, 21 nt, synthetic construct
  source 1..21: mol_type = other RNA
agtattcaggacagattaaaa

SEQ ID NO: 71308 - RNA, 21 nt, synthetic construct
  source 1..21: mol_type = other RNA
agtattccatggtatgtgcca

SEQ ID NO: 71309 - RNA, 21 nt, synthetic construct
  source 1..21: mol_type = other RNA
agtattcccaagatcataagc

SEQ ID NO: 71310 - RNA, 21 nt, synthetic construct
  source 1..21: mol_type = other RNA
agtattctagttctagctctg

SEQ ID NO: 71311 - RNA, 21 nt, synthetic construct
  source 1..21: mol_type = other RNA
agtattgaactgttacttgac

SEQ ID NO: 71312 - RNA, 21 nt, synthetic construct
  source 1..21: mol_type = other RNA
agtattgatttgaccatggga

SEQ ID NO: 71313 - RNA, 21 nt, synthetic construct
  source 1..21: mol_type = other RNA
agtattgcattgaatctgtag

SEQ ID NO: 71314 - RNA, 21 nt, synthetic construct
  source 1..21: mol_type = other RNA
agtattgccaggtttgtgctt

SEQ ID NO: 71315 - RNA, 21 nt, synthetic construct
  source 1..21: mol_type = other RNA
agtattgtcttctaaccctca

SEQ ID NO: 71316 - RNA, 21 nt, synthetic construct
  source 1..21: mol_type = other RNA
agtattgtgctgaaaccccgc

SEQ ID NO: 71317 - RNA, 21 nt, synthetic construct
  source 1..21: mol_type = other RNA
agtattgttaactgtagagaa

SEQ ID NO: 71318 - RNA, 21 nt, synthetic construct
  source 1..21: mol_type = other RNA
agtatttccacgggtaaaaat

SEQ ID NO: 71319 - RNA, 21 nt, synthetic construct
  source 1..21: mol_type = other RNA
agtatttctcatctgtcactt

SEQ ID NO: 71320 - RNA, 21 nt, synthetic construct
  source 1..21: mol_type = other RNA
agtattttgttgacatccttt

SEQ ID NO: 71321 - RNA, 21 nt, synthetic construct
  source 1..21: mol_type = other RNA
agtcaaaaccaaagaaagggg

SEQ ID NO: 71322 - RNA, 21 nt, synthetic construct
  source 1..21: mol_type = other RNA
agtcaaagcctgtggaggcag

SEQ ID NO: 71323 - RNA, 21 nt, synthetic construct
  source 1..21: mol_type = other RNA
agtcaacacactagccactgg

SEQ ID NO: 71324 - RNA, 21 nt, synthetic construct
  source 1..21: mol_type = other RNA
agtcaacaccaagcaacacta

SEQ ID NO: 71325 - RNA, 21 nt, synthetic construct
  source 1..21: mol_type = other RNA
agtcaacacttttccagtctt

SEQ ID NO: 71326 - RNA, 21 nt, synthetic construct
  source 1..21: mol_type = other RNA
agtcaactaatcaaacatacc

SEQ ID NO: 71327 - RNA, 21 nt, synthetic construct
  source 1..21: mol_type = other RNA
agtcaagatgaatctgcaact

SEQ ID NO: 71328 - RNA, 21 nt, synthetic construct
  source 1..21: mol_type = other RNA
agtcaagtaacagttcaatac

SEQ ID NO: 71329 - RNA, 21 nt, synthetic construct
  source 1..21: mol_type = other RNA
agtcaatgcaatgcgtgtgaa

SEQ ID NO: 71330 - RNA, 21 nt, synthetic construct
  source 1..21: mol_type = other RNA
agtcaatttcagatctctgac

SEQ ID NO: 71331 - RNA, 21 nt, synthetic construct
  source 1..21: mol_type = other RNA
agtcacaaaaagacaagtact

SEQ ID NO: 71332 - RNA, 21 nt, synthetic construct
  source 1..21: mol_type = other RNA
agtcacaaagctttaaactgg

SEQ ID NO: 71333 - RNA, 21 nt, synthetic construct
  source 1..21: mol_type = other RNA
agtcacacaccactacacccg

SEQ ID NO: 71334 - RNA, 21 nt, synthetic construct
  source 1..21: mol_type = other RNA
agtcacagtgaattctgactt

SEQ ID NO: 71335 - RNA, 21 nt, synthetic construct
  source 1..21: mol_type = other RNA
agtcacattctagtgatggga

SEQ ID NO: 71336 - RNA, 21 nt, synthetic construct
  source 1..21: mol_type = other RNA
agtcacatttgctttactact

SEQ ID NO: 71337 - RNA, 21 nt, synthetic construct
  source 1..21: mol_type = other RNA
agtcaccaaacgtttagatga

SEQ ID NO: 71338 - RNA, 21 nt, synthetic construct
  source 1..21: mol_type = other RNA
agtcaccctacagactcaata

SEQ ID NO: 71339 - RNA, 21 nt, synthetic construct
  source 1..21: mol_type = other RNA
agtcactccatttgtggcatc

SEQ ID NO: 71340 - RNA, 21 nt, synthetic construct
  source 1..21: mol_type = other RNA
agtcactgtggaaaacagttt

SEQ ID NO: 71341 - RNA, 21 nt, synthetic construct
  source 1..21: mol_type = other RNA
agtcactttttattctgttct

SEQ ID NO: 71342 - RNA, 21 nt, synthetic construct
  source 1..21: mol_type = other RNA
agtcagaattcactgtgactc

SEQ ID NO: 71343 - RNA, 21 nt, synthetic construct
  source 1..21: mol_type = other RNA
agtcagacacactagctgacc

SEQ ID NO: 71344 - RNA, 21 nt, synthetic construct
  source 1..21: mol_type = other RNA
agtcagactaagacactagct

SEQ ID NO: 71345 - RNA, 21 nt, synthetic construct
  source 1..21: mol_type = other RNA
agtcagagattttcccaaaga

SEQ ID NO: 71346 - RNA, 21 nt, synthetic construct
  source 1..21: mol_type = other RNA
agtcagaggagcagttactcc

SEQ ID NO: 71347 - RNA, 21 nt, synthetic construct
  source 1..21: mol_type = other RNA
agtcagcaactcttggccatt

SEQ ID NO: 71348 - RNA, 21 nt, synthetic construct
  source 1..21: mol_type = other RNA
agtcagcacactcttaataac

SEQ ID NO: 71349 - RNA, 21 nt, synthetic construct
  source 1..21: mol_type = other RNA
agtcagcacttctgatatcct

SEQ ID NO: 71350 - RNA, 21 nt, synthetic construct
  source 1..21: mol_type = other RNA
agtcagcctgggcacacgcca

SEQ ID NO: 71351 - RNA, 21 nt, synthetic construct
  source 1..21: mol_type = other RNA
agtcagctaattttctaatct

SEQ ID NO: 71352 - RNA, 21 nt, synthetic construct
  source 1..21: mol_type = other RNA
agtcagctaggcgtagtatct

SEQ ID NO: 71353 - RNA, 21 nt, synthetic construct
  source 1..21: mol_type = other RNA
agtcagtaaaaaaggaccatc

SEQ ID NO: 71354 - RNA, 21 nt, synthetic construct
  source 1..21: mol_type = other RNA
agtcagtaatcaaaaacctcc

SEQ ID NO: 71355 - RNA, 21 nt, synthetic construct
  source 1..21: mol_type = other RNA
agtcagtagaggccgagggtt

SEQ ID NO: 71356 - RNA, 21 nt, synthetic construct
  source 1..21: mol_type = other RNA
agtcagtatatttactgcttg

SEQ ID NO: 71357 - RNA, 21 nt, synthetic construct
  source 1..21: mol_type = other RNA
agtcagtgaagatgctgaact

SEQ ID NO: 71358 - RNA, 21 nt, synthetic construct
  source 1..21: mol_type = other RNA
agtcagtgatggaggtggaac

SEQ ID NO: 71359 - RNA, 21 nt, synthetic construct
  source 1..21: mol_type = other RNA
agtcagttaacagtgctgtgc

SEQ ID NO: 71360 - RNA, 21 nt, synthetic construct
  source 1..21: mol_type = other RNA
agtcagttacagcatttcagc

SEQ ID NO: 71361 - RNA, 21 nt, synthetic construct
  source 1..21: mol_type = other RNA
agtcagttctctgccccgggc

SEQ ID NO: 71362 - RNA, 21 nt, synthetic construct
  source 1..21: mol_type = other RNA
agtcagttgtttacttgggta

SEQ ID NO: 71363 - RNA, 21 nt, synthetic construct
  source 1..21: mol_type = other RNA
agtcataatttgtgtcctttt

SEQ ID NO: 71364 - RNA, 21 nt, synthetic construct
  source 1..21: mol_type = other RNA
agtcatagcagtgggaagtgg

SEQ ID NO: 71365 - RNA, 21 nt, synthetic construct
  source 1..21: mol_type = other RNA
agtcatcaaaggaaggaattt

SEQ ID NO: 71366 - RNA, 21 nt, synthetic construct
  source 1..21: mol_type = other RNA
agtcatcacagtccaggaact

SEQ ID NO: 71367 - RNA, 21 nt, synthetic construct
  source 1..21: mol_type = other RNA
agtcatcattattagcaaaca

SEQ ID NO: 71368 - RNA, 21 nt, synthetic construct
  source 1..21: mol_type = other RNA
agtcatccactgcacagtatg

SEQ ID NO: 71369 - RNA, 21 nt, synthetic construct
  source 1..21: mol_type = other RNA
agtcatcctcaacaagagagg

SEQ ID NO: 71370 - RNA, 21 nt, synthetic construct
  source 1..21: mol_type = other RNA
agtcatctggtcctgagcttt

SEQ ID NO: 71371 - RNA, 21 nt, synthetic construct
  source 1..21: mol_type = other RNA
agtcatgacctgctttcttgg

SEQ ID NO: 71372 - RNA, 21 nt, synthetic construct
  source 1..21: mol_type = other RNA
agtcatgtggggactttgtgg

SEQ ID NO: 71373 - RNA, 21 nt, synthetic construct
  source 1..21: mol_type = other RNA
agtcattcaggtctatgtgac

SEQ ID NO: 71374 - RNA, 21 nt, synthetic construct
  source 1..21: mol_type = other RNA
agtcattccgctaaacatttt

SEQ ID NO: 71375 - RNA, 21 nt, synthetic construct
  source 1..21: mol_type = other RNA
agtcattgaaactcaatgttg

SEQ ID NO: 71376 - RNA, 21 nt, synthetic construct
  source 1..21: mol_type = other RNA
agtcatttgagcccaggaggt

SEQ ID NO: 71377 - RNA, 21 nt, synthetic construct
  source 1..21: mol_type = other RNA
agtccaaccaatcgcagggcc

SEQ ID NO: 71378 - RNA, 21 nt, synthetic construct
  source 1..21: mol_type = other RNA
agtccacagatctttttgtgt

SEQ ID NO: 71379 - RNA, 21 nt, synthetic construct
  source 1..21: mol_type = other RNA
agtccactcacctgtcatgtc

SEQ ID NO: 71380 - RNA, 21 nt, synthetic construct
  source 1..21: mol_type = other RNA
agtccactttccatcttaggc

SEQ ID NO: 71381 - RNA, 21 nt, synthetic construct
  source 1..21: mol_type = other RNA
agtccagaggtgagctttttc

SEQ ID NO: 71382 - RNA, 21 nt, synthetic construct
  source 1..21: mol_type = other RNA
agtccagatattatcctccaa

SEQ ID NO: 71383 - RNA, 21 nt, synthetic construct
  source 1..21: mol_type = other RNA
agtccagcaccacccttgatg

SEQ ID NO: 71384 - RNA, 21 nt, synthetic construct
  source 1..21: mol_type = other RNA
agtccagctttctaattctga

SEQ ID NO: 71385 - RNA, 21 nt, synthetic construct
  source 1..21: mol_type = other RNA
agtccaggaacttacagtaag

SEQ ID NO: 71386 - RNA, 21 nt, synthetic construct
  source 1..21: mol_type = other RNA
agtccagtcctgctaacacct

SEQ ID NO: 71387 - RNA, 21 nt, synthetic construct
  source 1..21: mol_type = other RNA
agtccatgaaacttatttcca

SEQ ID NO: 71388 - RNA, 21 nt, synthetic construct
  source 1..21: mol_type = other RNA
agtccatgaagaaaacactcc

SEQ ID NO: 71389 - RNA, 21 nt, synthetic construct
  source 1..21: mol_type = other RNA
agtcccaaatgggagcatgca

SEQ ID NO: 71390 - RNA, 21 nt, synthetic construct
  source 1..21: mol_type = other RNA
agtcccactgacagtggacaa

SEQ ID NO: 71391 - RNA, 21 nt, synthetic construct
  source 1..21: mol_type = other RNA
agtcccagttcaaggtgttag

SEQ ID NO: 71392 - RNA, 21 nt, synthetic construct
  source 1..21: mol_type = other RNA
agtcccatcttccatacgaaa

SEQ ID NO: 71393 - RNA, 21 nt, synthetic construct
  source 1..21: mol_type = other RNA
agtccccaactgcaaaacttt

SEQ ID NO: 71394 - RNA, 21 nt, synthetic construct
  source 1..21: mol_type = other RNA
agtccccacatgactggccat

SEQ ID NO: 71395 - RNA, 21 nt, synthetic construct
  source 1..21: mol_type = other RNA
agtccccatctccacaaaaaa

SEQ ID NO: 71396 - RNA, 21 nt, synthetic construct
  source 1..21: mol_type = other RNA
agtccccggtctttcctgatc

SEQ ID NO: 71397 - RNA, 21 nt, synthetic construct
  source 1..21: mol_type = other RNA
agtcccctagtggatgctggg

SEQ ID NO: 71398 - RNA, 21 nt, synthetic construct
  source 1..21: mol_type = other RNA
agtcccctgtaattacatact

SEQ ID NO: 71399 - RNA, 21 nt, synthetic construct
  source 1..21: mol_type = other RNA
agtcccggaagctgggctaga

SEQ ID NO: 71400 - RNA, 21 nt, synthetic construct
  source 1..21: mol_type = other RNA
agtccctaacagtctcgtgaa

SEQ ID NO: 71401 - RNA, 21 nt, synthetic construct
  source 1..21: mol_type = other RNA
agtccctagtgtctccatacc

SEQ ID NO: 71402 - RNA, 21 nt, synthetic construct
  source 1..21: mol_type = other RNA
agtccctcaccttctgctggg

SEQ ID NO: 71403 - RNA, 21 nt, synthetic construct
  source 1..21: mol_type = other RNA
agtccctcctttctagaatgc

SEQ ID NO: 71404 - RNA, 21 nt, synthetic construct
  source 1..21: mol_type = other RNA
agtccctgctacttgtggggc

SEQ ID NO: 71405 - RNA, 21 nt, synthetic construct
  source 1..21: mol_type = other RNA
agtccctgctttcagttcttt

SEQ ID NO: 71406 - RNA, 21 nt, synthetic construct
  source 1..21: mol_type = other RNA
agtcccttgcctgacagcaaa

SEQ ID NO: 71407 - RNA, 21 nt, synthetic construct
  source 1..21: mol_type = other RNA
agtccgcggctgggctttctc

SEQ ID NO: 71408 - RNA, 21 nt, synthetic construct
  source 1..21: mol_type = other RNA
agtccgtgcatgcctctgtta

SEQ ID NO: 71409 - RNA, 21 nt, synthetic construct
  source 1..21: mol_type = other RNA
agtcctcaatcatgtcaagaa

SEQ ID NO: 71410 - RNA, 21 nt, synthetic construct
  source 1..21: mol_type = other RNA
agtcctctactttcacataag

SEQ ID NO: 71411 - RNA, 21 nt, synthetic construct
  source 1..21: mol_type = other RNA
agtcctctcactccaaagcaa

SEQ ID NO: 71412 - RNA, 21 nt, synthetic construct
  source 1..21: mol_type = other RNA
agtcctgaaaattccttcccc

SEQ ID NO: 71413 - RNA, 21 nt, synthetic construct
  source 1..21: mol_type = other RNA
agtcctgagggtgagaccacc

SEQ ID NO: 71414 - RNA, 21 nt, synthetic construct
  source 1..21: mol_type = other RNA
agtcctgccttggcctcccca

SEQ ID NO: 71415 - RNA, 21 nt, synthetic construct
  source 1..21: mol_type = other RNA
agtcctgctaacaccttgaac

SEQ ID NO: 71416 - RNA, 21 nt, synthetic construct
  source 1..21: mol_type = other RNA
agtcctgtcagtttctgattt

SEQ ID NO: 71417 - RNA, 21 nt, synthetic construct
  source 1..21: mol_type = other RNA
agtcctgtgtttctgctattc

SEQ ID NO: 71418 - RNA, 21 nt, synthetic construct
  source 1..21: mol_type = other RNA
agtcctgttcttttgtaatct

SEQ ID NO: 71419 - RNA, 21 nt, synthetic construct
  source 1..21: mol_type = other RNA
agtccttaccactgaagtgtt

SEQ ID NO: 71420 - RNA, 21 nt, synthetic construct
  source 1..21: mol_type = other RNA
agtccttccagtatgatgcca

SEQ ID NO: 71421 - RNA, 21 nt, synthetic construct
  source 1..21: mol_type = other RNA
agtccttgtgatctatgcata

SEQ ID NO: 71422 - RNA, 21 nt, synthetic construct
  source 1..21: mol_type = other RNA
agtcctttccagaggttcttt

SEQ ID NO: 71423 - RNA, 21 nt, synthetic construct
  source 1..21: mol_type = other RNA
agtcctttcttggtctgcaga

SEQ ID NO: 71424 - RNA, 21 nt, synthetic construct
  source 1..21: mol_type = other RNA
agtcctttgggaggtcaaggc

SEQ ID NO: 71425 - RNA, 21 nt, synthetic construct
  source 1..21: mol_type = other RNA
agtcctttgtgtcaagtacaa

SEQ ID NO: 71426 - RNA, 21 nt, synthetic construct
  source 1..21: mol_type = other RNA
agtcgccatacctggtcctta

SEQ ID NO: 71427 - RNA, 21 nt, synthetic construct
  source 1..21: mol_type = other RNA
agtcgcttgaacctgaaaaac

SEQ ID NO: 71428 - RNA, 21 nt, synthetic construct
  source 1..21: mol_type = other RNA
agtcggttcttcaccgtgcaa

SEQ ID NO: 71429 - RNA, 21 nt, synthetic construct
  source 1..21: mol_type = other RNA
agtctaaccattaacagctca

SEQ ID NO: 71430 - RNA, 21 nt, synthetic construct
  source 1..21: mol_type = other RNA
agtctaggaaaagacttgagg

SEQ ID NO: 71431 - RNA, 21 nt, synthetic construct
  source 1..21: mol_type = other RNA
agtctagtccatgaagaaaac

SEQ ID NO: 71432 - RNA, 21 nt, synthetic construct
  source 1..21: mol_type = other RNA
agtctatctttgggaaaatct

SEQ ID NO: 71433 - RNA, 21 nt, synthetic construct
  source 1..21: mol_type = other RNA
agtctatgctcttggtttctt

SEQ ID NO: 71434 - RNA, 21 nt, synthetic construct
  source 1..21: mol_type = other RNA
agtctcaacctactttaaatc

SEQ ID NO: 71435 - RNA, 21 nt, synthetic construct
  source 1..21: mol_type = other RNA
agtctcacgatactttttatt

SEQ ID NO: 71436 - RNA, 21 nt, synthetic construct
  source 1..21: mol_type = other RNA
agtctcatctgtcaaaaagag

SEQ ID NO: 71437 - RNA, 21 nt, synthetic construct
  source 1..21: mol_type = other RNA
agtctcatgcaattccccagc

SEQ ID NO: 71438 - RNA, 21 nt, synthetic construct
  source 1..21: mol_type = other RNA
agtctccaatcctcagccccc

SEQ ID NO: 71439 - RNA, 21 nt, synthetic construct
  source 1..21: mol_type = other RNA
agtctccatacaaggagacct

SEQ ID NO: 71440 - RNA, 21 nt, synthetic construct
  source 1..21: mol_type = other RNA
agtctcccccaggtggttctg

SEQ ID NO: 71441 - RNA, 21 nt, synthetic construct
  source 1..21: mol_type = other RNA
agtctccctaaccaggcccgg

SEQ ID NO: 71442 - RNA, 21 nt, synthetic construct
  source 1..21: mol_type = other RNA
agtctcctatattgtcaatgg

SEQ ID NO: 71443 - RNA, 21 nt, synthetic construct
  source 1..21: mol_type = other RNA
agtctcgaaaaggaatggaat

SEQ ID NO: 71444 - RNA, 21 nt, synthetic construct
  source 1..21: mol_type = other RNA
agtctcgaccccctgggctca

SEQ ID NO: 71445 - RNA, 21 nt, synthetic construct
  source 1..21: mol_type = other RNA
agtctcgctctgtcgcccagg

SEQ ID NO: 71446 - RNA, 21 nt, synthetic construct
  source 1..21: mol_type = other RNA
agtctcgtgaatttggtattc

SEQ ID NO: 71447 - RNA, 21 nt, synthetic construct
  source 1..21: mol_type = other RNA
agtctctacccagcactctga

SEQ ID NO: 71448 - RNA, 21 nt, synthetic construct
  source 1..21: mol_type = other RNA
agtctctgcaacatttgttgc

SEQ ID NO: 71449 - RNA, 21 nt, synthetic construct
  source 1..21: mol_type = other RNA
agtctctgcagagcaggctcc

SEQ ID NO: 71450 - RNA, 21 nt, synthetic construct
  source 1..21: mol_type = other RNA
agtctctgctcactgcaacct

SEQ ID NO: 71451 - RNA, 21 nt, synthetic construct
  source 1..21: mol_type = other RNA
agtctcttaagaccacaagga

SEQ ID NO: 71452 - RNA, 21 nt, synthetic construct
  source 1..21: mol_type = other RNA
agtctcttcctgtatatctcc

SEQ ID NO: 71453 - RNA, 21 nt, synthetic construct
  source 1..21: mol_type = other RNA
agtctgaaagcttctgagcag

SEQ ID NO: 71454 - RNA, 21 nt, synthetic construct
  source 1..21: mol_type = other RNA
agtctgacatactgtcacagg

SEQ ID NO: 71455 - RNA, 21 nt, synthetic construct
  source 1..21: mol_type = other RNA
agtctgacttctctcagaggg

SEQ ID NO: 71456 - RNA, 21 nt, synthetic construct
  source 1..21: mol_type = other RNA
agtctgcagaccaagaaagga

SEQ ID NO: 71457 - RNA, 21 nt, synthetic construct
  source 1..21: mol_type = other RNA
agtctgcaggcagaatgtgac

SEQ ID NO: 71458 - RNA, 21 nt, synthetic construct
  source 1..21: mol_type = other RNA
agtctgcccatcctatctaag

SEQ ID NO: 71459 - RNA, 21 nt, synthetic construct
  source 1..21: mol_type = other RNA
agtctgtaagcacctgtataa

SEQ ID NO: 71460 - RNA, 21 nt, synthetic construct
  source 1..21: mol_type = other RNA
agtctgtagcttcacgtgcat

SEQ ID NO: 71461 - RNA, 21 nt, synthetic construct
  source 1..21: mol_type = other RNA
agtctgtagggtgactagtgt

SEQ ID NO: 71462 - RNA, 21 nt, synthetic construct
  source 1..21: mol_type = other RNA
agtctgtcctcgtaaaagcta

SEQ ID NO: 71463 - RNA, 21 nt, synthetic construct
  source 1..21: mol_type = other RNA
agtctgtgctctgtatttaat

SEQ ID NO: 71464 - RNA, 21 nt, synthetic construct
  source 1..21: mol_type = other RNA
agtctgtgcttaaggaaatgg

SEQ ID NO: 71465 - RNA, 21 nt, synthetic construct
  source 1..21: mol_type = other RNA
agtctgtttgccatcttcaag

SEQ ID NO: 71466 - RNA, 21 nt, synthetic construct
  source 1..21: mol_type = other RNA
agtcttaaccattgagccaaa

SEQ ID NO: 71467 - RNA, 21 nt, synthetic construct
  source 1..21: mol_type = other RNA
agtcttagctcttaagcttag

SEQ ID NO: 71468 - RNA, 21 nt, synthetic construct
  source 1..21: mol_type = other RNA
agtcttcaggtctctctgaaa

SEQ ID NO: 71469 - RNA, 21 nt, synthetic construct
  source 1..21: mol_type = other RNA
agtcttccaaaatattgaaga

SEQ ID NO: 71470 - RNA, 21 nt, synthetic construct
  source 1..21: mol_type = other RNA
agtcttccaattgcagaaaaa

SEQ ID NO: 71471 - RNA, 21 nt, synthetic construct
  source 1..21: mol_type = other RNA
agtcttccattttagatcaag

SEQ ID NO: 71472 - RNA, 21 nt, synthetic construct
  source 1..21: mol_type = other RNA
agtcttccgtctcaagattgt

SEQ ID NO: 71473 - RNA, 21 nt, synthetic construct
  source 1..21: mol_type = other RNA
agtcttctactgtgaattcac

SEQ ID NO: 71474 - RNA, 21 nt, synthetic construct
  source 1..21: mol_type = other RNA
agtcttctcagatctgttgca

SEQ ID NO: 71475 - RNA, 21 nt, synthetic construct
  source 1..21: mol_type = other RNA
agtcttctcatacagatttta

SEQ ID NO: 71476 - RNA, 21 nt, synthetic construct
  source 1..21: mol_type = other RNA
agtcttcttctaagctaagag

SEQ ID NO: 71477 - RNA, 21 nt, synthetic construct
  source 1..21: mol_type = other RNA
agtcttgctggaagttggccc

SEQ ID NO: 71478 - RNA, 21 nt, synthetic construct
  source 1..21: mol_type = other RNA
agtcttggtagtttgcacgtt

SEQ ID NO: 71479 - RNA, 21 nt, synthetic construct
  source 1..21: mol_type = other RNA
agtcttgtcataacagtattg

SEQ ID NO: 71480 - RNA, 21 nt, synthetic construct
  source 1..21: mol_type = other RNA
agtcttgtttacccagtgtgt

SEQ ID NO: 71481 - RNA, 21 nt, synthetic construct
  source 1..21: mol_type = other RNA
agtctttggcccattttcgaa

SEQ ID NO: 71482 - RNA, 21 nt, synthetic construct
  source 1..21: mol_type = other RNA
agtctttgggtaatttatctc

SEQ ID NO: 71483 - RNA, 21 nt, synthetic construct
  source 1..21: mol_type = other RNA
agtctttggtgatcctaagcc

SEQ ID NO: 71484 - RNA, 21 nt, synthetic construct
  source 1..21: mol_type = other RNA
agtcttttcctaccctgagga

SEQ ID NO: 71485 - RNA, 21 nt, synthetic construct
  source 1..21: mol_type = other RNA
agtcttttcctagactgccag

SEQ ID NO: 71486 - RNA, 21 nt, synthetic construct
  source 1..21: mol_type = other RNA
agtgaaaaatgacctaaaatc

SEQ ID NO: 71487 - RNA, 21 nt, synthetic construct
  source 1..21: mol_type = other RNA
agtgaaaacacaaactgcaga

SEQ ID NO: 71488 - RNA, 21 nt, synthetic construct
  source 1..21: mol_type = other RNA
agtgaaaactaaggtcaagag

SEQ ID NO: 71489 - RNA, 21 nt, synthetic construct
  source 1..21: mol_type = other RNA
agtgaaaagaaacaagtgaaa

SEQ ID NO: 71490 - RNA, 21 nt, synthetic construct
  source 1..21: mol_type = other RNA
agtgaaaaggcaaaccacaca

SEQ ID NO: 71491 - RNA, 21 nt, synthetic construct
  source 1..21: mol_type = other RNA
agtgaaactctggctcagaaa

SEQ ID NO: 71492 - RNA, 21 nt, synthetic construct
  source 1..21: mol_type = other RNA
agtgaaaggcaaaggaaaaaa

SEQ ID NO: 71493 - RNA, 21 nt, synthetic construct
  source 1..21: mol_type = other RNA
agtgaaagtctccctaaccag

SEQ ID NO: 71494 - RNA, 21 nt, synthetic construct
  source 1..21: mol_type = other RNA
agtgaaatagttggtcagaaa

SEQ ID NO: 71495 - RNA, 21 nt, synthetic construct
  source 1..21: mol_type = other RNA
agtgaaatgatttcaagtaac

SEQ ID NO: 71496 - RNA, 21 nt, synthetic construct
  source 1..21: mol_type = other RNA
agtgaacaggcaaccttggga

SEQ ID NO: 71497 - RNA, 21 nt, synthetic construct
  source 1..21: mol_type = other RNA
agtgaacatgggaatgcatat

SEQ ID NO: 71498 - RNA, 21 nt, synthetic construct
  source 1..21: mol_type = other RNA
agtgaaccaaaaaccacattt

SEQ ID NO: 71499 - RNA, 21 nt, synthetic construct
  source 1..21: mol_type = other RNA
agtgaactccagtctgggcaa

SEQ ID NO: 71500 - RNA, 21 nt, synthetic construct
  source 1..21: mol_type = other RNA
agtgaagaaacctttctcaaa

SEQ ID NO: 71501 - RNA, 21 nt, synthetic construct
  source 1..21: mol_type = other RNA
agtgaagatgctgaacttgtc

SEQ ID NO: 71502 - RNA, 21 nt, synthetic construct
  source 1..21: mol_type = other RNA
agtgaagcagagagagaagat

SEQ ID NO: 71503 - RNA, 21 nt, synthetic construct
  source 1..21: mol_type = other RNA
agtgaagcccagagaggctag

SEQ ID NO: 71504 - RNA, 21 nt, synthetic construct
  source 1..21: mol_type = other RNA
agtgaagctggacccttacct

SEQ ID NO: 71505 - RNA, 21 nt, synthetic construct
  source 1..21: mol_type = other RNA
agtgaagcttcaaaccactat

SEQ ID NO: 71506 - RNA, 21 nt, synthetic construct
  source 1..21: mol_type = other RNA
agtgaagtcaagatgaatctg

SEQ ID NO: 71507 - RNA, 21 nt, synthetic construct
  source 1..21: mol_type = other RNA
agtgaagtcaatttcagatct

SEQ ID NO: 71508 - RNA, 21 nt, synthetic construct
  source 1..21: mol_type = other RNA
agtgaagtcatctggtcctga

SEQ ID NO: 71509 - RNA, 21 nt, synthetic construct
  source 1..21: mol_type = other RNA
agtgaagtcccatcttccata

SEQ ID NO: 71510 - RNA, 21 nt, synthetic construct
  source 1..21: mol_type = other RNA
agtgaatatagctaagaaaca

SEQ ID NO: 71511 - RNA, 21 nt, synthetic construct
  source 1..21: mol_type = other RNA
agtgaatcactacagcatatt

SEQ ID NO: 71512 - RNA, 21 nt, synthetic construct
  source 1..21: mol_type = other RNA
agtgaatgagaccaaatgcat

SEQ ID NO: 71513 - RNA, 21 nt, synthetic construct
  source 1..21: mol_type = other RNA
agtgaatggggtaattttggg

SEQ ID NO: 71514 - RNA, 21 nt, synthetic construct
  source 1..21: mol_type = other RNA
agtgaattcacagtagaagac

SEQ ID NO: 71515 - RNA, 21 nt, synthetic construct
  source 1..21: mol_type = other RNA
agtgaattctgacttagtgag

SEQ ID NO: 71516 - RNA, 21 nt, synthetic construct
  source 1..21: mol_type = other RNA
agtgacacctgaggggtctta

SEQ ID NO: 71517 - RNA, 21 nt, synthetic construct
  source 1..21: mol_type = other RNA
agtgacagatgagaaatactt

SEQ ID NO: 71518 - RNA, 21 nt, synthetic construct
  source 1..21: mol_type = other RNA
agtgacagctgagtagcgctt

SEQ ID NO: 71519 - RNA, 21 nt, synthetic construct
  source 1..21: mol_type = other RNA
agtgacagttctgtgaatttg

SEQ ID NO: 71520 - RNA, 21 nt, synthetic construct
  source 1..21: mol_type = other RNA
agtgacatatgccggctgtta

SEQ ID NO: 71521 - RNA, 21 nt, synthetic construct
  source 1..21: mol_type = other RNA
agtgaccacagtttgaaactt

SEQ ID NO: 71522 - RNA, 21 nt, synthetic construct
  source 1..21: mol_type = other RNA
agtgaccagtgtgatgggggt

SEQ ID NO: 71523 - RNA, 21 nt, synthetic construct
  source 1..21: mol_type = other RNA
agtgaccctgagtccagaggt

SEQ ID NO: 71524 - RNA, 21 nt, synthetic construct
  source 1..21: mol_type = other RNA
agtgaccctttgaagtatgta

SEQ ID NO: 71525 - RNA, 21 nt, synthetic construct
  source 1..21: mol_type = other RNA
agtgactccaagcacacagtt

SEQ ID NO: 71526 - RNA, 21 nt, synthetic construct
  source 1..21: mol_type = other RNA
agtgactggcttaatgcatat

SEQ ID NO: 71527 - RNA, 21 nt, synthetic construct
  source 1..21: mol_type = other RNA
agtgacttaagcaacagaaat

SEQ ID NO: 71528 - RNA, 21 nt, synthetic construct
  source 1..21: mol_type = other RNA
agtgacttctggatgtgtatg

SEQ ID NO: 71529 - RNA, 21 nt, synthetic construct
  source 1..21: mol_type = other RNA
agtgactttactgttctccag

SEQ ID NO: 71530 - RNA, 21 nt, synthetic construct
  source 1..21: mol_type = other RNA
agtgagaggactgcctggtcc

SEQ ID NO: 71531 - RNA, 21 nt, synthetic construct
  source 1..21: mol_type = other RNA
agtgagatgggaagaaaaaat

SEQ ID NO: 71532 - RNA, 21 nt, synthetic construct
  source 1..21: mol_type = other RNA
agtgagcagaaggaggaaaat

SEQ ID NO: 71533 - RNA, 21 nt, synthetic construct
  source 1..21: mol_type = other RNA
agtgagcatgctgcaactgag

SEQ ID NO: 71534 - RNA, 21 nt, synthetic construct
  source 1..21: mol_type = other RNA
agtgagccacagctacactca

SEQ ID NO: 71535 - RNA, 21 nt, synthetic construct
  source 1..21: mol_type = other RNA
agtgagcccagagatcccacc

SEQ ID NO: 71536 - RNA, 21 nt, synthetic construct
  source 1..21: mol_type = other RNA
agtgagctccagcctgggcga

SEQ ID NO: 71537 - RNA, 21 nt, synthetic construct
  source 1..21: mol_type = other RNA
agtgaggacgctgatgacagt

SEQ ID NO: 71538 - RNA, 21 nt, synthetic construct
  source 1..21: mol_type = other RNA
agtgagggaggccatcttcat

SEQ ID NO: 71539 - RNA, 21 nt, synthetic construct
  source 1..21: mol_type = other RNA
agtgagtagaagagtaatggt

SEQ ID NO: 71540 - RNA, 21 nt, synthetic construct
  source 1..21: mol_type = other RNA
agtgagtagggaaggtgcccg

SEQ ID NO: 71541 - RNA, 21 nt, synthetic construct
  source 1..21: mol_type = other RNA
agtgagtgatgaaaagagcac

SEQ ID NO: 71542 - RNA, 21 nt, synthetic construct
  source 1..21: mol_type = other RNA
agtgagttcaaatgttaagcc

SEQ ID NO: 71543 - RNA, 21 nt, synthetic construct
  source 1..21: mol_type = other RNA
agtgagtttgacctgtaattt

SEQ ID NO: 71544 - RNA, 21 nt, synthetic construct
  source 1..21: mol_type = other RNA
agtgataccataaagtcagag

SEQ ID NO: 71545 - RNA, 21 nt, synthetic construct
  source 1..21: mol_type = other RNA
agtgatgaaaagagcacacca

SEQ ID NO: 71546 - RNA, 21 nt, synthetic construct
  source 1..21: mol_type = other RNA
agtgatgcaactcctgggctc

SEQ ID NO: 71547 - RNA, 21 nt, synthetic construct
  source 1..21: mol_type = other RNA
agtgatggaggtggaactctg

SEQ ID NO: 71548 - RNA, 21 nt, synthetic construct
  source 1..21: mol_type = other RNA
agtgatgggagatggacactg

SEQ ID NO: 71549 - RNA, 21 nt, synthetic construct
  source 1..21: mol_type = other RNA
agtgatgtcttttgaagaagt

SEQ ID NO: 71550 - RNA, 21 nt, synthetic construct
  source 1..21: mol_type = other RNA
agtgatgttgagtatcttttc

SEQ ID NO: 71551 - RNA, 21 nt, synthetic construct
  source 1..21: mol_type = other RNA
agtgattcacttttgagttca

SEQ ID NO: 71552 - RNA, 21 nt, synthetic construct
  source 1..21: mol_type = other RNA
agtgattggatatttgcagta

SEQ ID NO: 71553 - RNA, 21 nt, synthetic construct
  source 1..21: mol_type = other RNA
agtgattttaccaaggctaag

SEQ ID NO: 71554 - RNA, 21 nt, synthetic construct
  source 1..21: mol_type = other RNA
agtgcaaacctcctggttttg

SEQ ID NO: 71555 - RNA, 21 nt, synthetic construct
  source 1..21: mol_type = other RNA
agtgcaatggtgggatctctg

SEQ ID NO: 71556 - RNA, 21 nt, synthetic construct
  source 1..21: mol_type = other RNA
agtgcacaatgcagtattgtt

SEQ ID NO: 71557 - RNA, 21 nt, synthetic construct
  source 1..21: mol_type = other RNA
agtgcacattccttcttcaca

SEQ ID NO: 71558 - RNA, 21 nt, synthetic construct
  source 1..21: mol_type = other RNA
agtgcagcaagcagtaaatat

SEQ ID NO: 71559 - RNA, 21 nt, synthetic construct
  source 1..21: mol_type = other RNA
agtgcaggagtttgagactgc

SEQ ID NO: 71560 - RNA, 21 nt, synthetic construct
  source 1..21: mol_type = other RNA
agtgcagtatcttgaagaaac

SEQ ID NO: 71561 - RNA, 21 nt, synthetic construct
  source 1..21: mol_type = other RNA
agtgcagtatgtaggaaactt

SEQ ID NO: 71562 - RNA, 21 nt, synthetic construct
  source 1..21: mol_type = other RNA
agtgcagtggtgtggtcttgt

SEQ ID NO: 71563 - RNA, 21 nt, synthetic construct
  source 1..21: mol_type = other RNA
agtgcataccaccacattcgg

SEQ ID NO: 71564 - RNA, 21 nt, synthetic construct
  source 1..21: mol_type = other RNA
agtgcatttcggctctgtgct

SEQ ID NO: 71565 - RNA, 21 nt, synthetic construct
  source 1..21: mol_type = other RNA
agtgccaacacatggggcatt

SEQ ID NO: 71566 - RNA, 21 nt, synthetic construct
  source 1..21: mol_type = other RNA
agtgccagccacccttgctgc

SEQ ID NO: 71567 - RNA, 21 nt, synthetic construct
  source 1..21: mol_type = other RNA
agtgcccacctgacaagtagt

SEQ ID NO: 71568 - RNA, 21 nt, synthetic construct
  source 1..21: mol_type = other RNA
agtgcccattaacagatgaat

SEQ ID NO: 71569 - RNA, 21 nt, synthetic construct
  source 1..21: mol_type = other RNA
agtgccgcgttttttgtccac

SEQ ID NO: 71570 - RNA, 21 nt, synthetic construct
  source 1..21: mol_type = other RNA
agtgccttcagaaggagtcca

SEQ ID NO: 71571 - RNA, 21 nt, synthetic construct
  source 1..21: mol_type = other RNA
agtgccttcagctatggtgtt

SEQ ID NO: 71572 - RNA, 21 nt, synthetic construct
  source 1..21: mol_type = other RNA
agtgcgagtgtgaacgatggt

SEQ ID NO: 71573 - RNA, 21 nt, synthetic construct
  source 1..21: mol_type = other RNA
agtgctccatagcttcctaag

SEQ ID NO: 71574 - RNA, 21 nt, synthetic construct
  source 1..21: mol_type = other RNA
agtgctctaccctttccaaat

SEQ ID NO: 71575 - RNA, 21 nt, synthetic construct
  source 1..21: mol_type = other RNA
agtgctctcccccgaatcctt

SEQ ID NO: 71576 - RNA, 21 nt, synthetic construct
  source 1..21: mol_type = other RNA
agtgctcttctgatcacagaa

SEQ ID NO: 71577 - RNA, 21 nt, synthetic construct
  source 1..21: mol_type = other RNA
agtgctgaaagctagaagacc

SEQ ID NO: 71578 - RNA, 21 nt, synthetic construct
  source 1..21: mol_type = other RNA
agtgctgcagtatgcatagat

SEQ ID NO: 71579 - RNA, 21 nt, synthetic construct
  source 1..21: mol_type = other RNA
agtgctgctctgacgtttaaa

SEQ ID NO: 71580 - RNA, 21 nt, synthetic construct
  source 1..21: mol_type = other RNA
agtgctgggctagggaagcag

SEQ ID NO: 71581 - RNA, 21 nt, synthetic construct
  source 1..21: mol_type = other RNA
agtgctgggtagagactggat

SEQ ID NO: 71582 - RNA, 21 nt, synthetic construct
  source 1..21: mol_type = other RNA
agtgctgtgattgcaggtgtg

SEQ ID NO: 71583 - RNA, 21 nt, synthetic construct
  source 1..21: mol_type = other RNA
agtgctgtgccagtgcaaacc

SEQ ID NO: 71584 - RNA, 21 nt, synthetic construct
  source 1..21: mol_type = other RNA
agtgctgttgaggctgggccc

SEQ ID NO: 71585 - RNA, 21 nt, synthetic construct
  source 1..21: mol_type = other RNA
agtgcttagcgctggaggtcg

SEQ ID NO: 71586 - RNA, 21 nt, synthetic construct
  source 1..21: mol_type = other RNA
agtgcttctagtaacttggtc

SEQ ID NO: 71587 - RNA, 21 nt, synthetic construct
  source 1..21: mol_type = other RNA
agtgcttgcagccttccctga

SEQ ID NO: 71588 - RNA, 21 nt, synthetic construct
  source 1..21: mol_type = other RNA
agtgctttttactttgcgaaa

SEQ ID NO: 71589 - RNA, 21 nt, synthetic construct
  source 1..21: mol_type = other RNA
agtggaaaaactgcagcaatt

SEQ ID NO: 71590 - RNA, 21 nt, synthetic construct
  source 1..21: mol_type = other RNA
agtggaaacaactcaaacgtc

SEQ ID NO: 71591 - RNA, 21 nt, synthetic construct
  source 1..21: mol_type = other RNA
agtggaaagagccagcctgat

SEQ ID NO: 71592 - RNA, 21 nt, synthetic construct
  source 1..21: mol_type = other RNA
agtggaagaatcaggtctctt

SEQ ID NO: 71593 - RNA, 21 nt, synthetic construct
  source 1..21: mol_type = other RNA
agtggaatcattccgtatata

SEQ ID NO: 71594 - RNA, 21 nt, synthetic construct
  source 1..21: mol_type = other RNA
agtggactatgtaggcacatt

SEQ ID NO: 71595 - RNA, 21 nt, synthetic construct
  source 1..21: mol_type = other RNA
agtggactgtgagggagatat

SEQ ID NO: 71596 - RNA, 21 nt, synthetic construct
  source 1..21: mol_type = other RNA
agtggagaattactaaaattc

SEQ ID NO: 71597 - RNA, 21 nt, synthetic construct
  source 1..21: mol_type = other RNA
agtggagcctgctctgcagag

SEQ ID NO: 71598 - RNA, 21 nt, synthetic construct
  source 1..21: mol_type = other RNA
agtggaggggcaggaaaggtg

SEQ ID NO: 71599 - RNA, 21 nt, synthetic construct
  source 1..21: mol_type = other RNA
agtggagtgcgagtgtgaacg

SEQ ID NO: 71600 - RNA, 21 nt, synthetic construct
  source 1..21: mol_type = other RNA
agtggagtggcatgatctcac

SEQ ID NO: 71601 - RNA, 21 nt, synthetic construct
  source 1..21: mol_type = other RNA
agtggatcatttgaggtcaag

SEQ ID NO: 71602 - RNA, 21 nt, synthetic construct
  source 1..21: mol_type = other RNA
agtggatgactaggctcctga

SEQ ID NO: 71603 - RNA, 21 nt, synthetic construct
  source 1..21: mol_type = other RNA
agtggatgctggggacccctc

SEQ ID NO: 71604 - RNA, 21 nt, synthetic construct
  source 1..21: mol_type = other RNA
agtggcagccccgcttcagtt

SEQ ID NO: 71605 - RNA, 21 nt, synthetic construct
  source 1..21: mol_type = other RNA
agtggcatcatactggaagga

SEQ ID NO: 71606 - RNA, 21 nt, synthetic construct
  source 1..21: mol_type = other RNA
agtggcatgatctcacgtcac

SEQ ID NO: 71607 - RNA, 21 nt, synthetic construct
  source 1..21: mol_type = other RNA
agtggccagtgaccagtgtga

SEQ ID NO: 71608 - RNA, 21 nt, synthetic construct
  source 1..21: mol_type = other RNA
agtggcccccctgaaaaatga

SEQ ID NO: 71609 - RNA, 21 nt, synthetic construct
  source 1..21: mol_type = other RNA
agtggccctgttggcctggac

SEQ ID NO: 71610 - RNA, 21 nt, synthetic construct
  source 1..21: mol_type = other RNA
agtggcctaaatcaggatgtc

SEQ ID NO: 71611 - RNA, 21 nt, synthetic construct
  source 1..21: mol_type = other RNA
agtggcgcagccatggctcac

SEQ ID NO: 71612 - RNA, 21 nt, synthetic construct
  source 1..21: mol_type = other RNA
agtggcgctgtttgcctgcgt

SEQ ID NO: 71613 - RNA, 21 nt, synthetic construct
  source 1..21: mol_type = other RNA
agtggcgtgtgcccaggctga

SEQ ID NO: 71614 - RNA, 21 nt, synthetic construct
  source 1..21: mol_type = other RNA
agtggctaatgtggcttgcaa

SEQ ID NO: 71615 - RNA, 21 nt, synthetic construct
  source 1..21: mol_type = other RNA
agtggctagacggaaaaacat

SEQ ID NO: 71616 - RNA, 21 nt, synthetic construct
  source 1..21: mol_type = other RNA
agtggctagtgtgttgactga

SEQ ID NO: 71617 - RNA, 21 nt, synthetic construct
  source 1..21: mol_type = other RNA
agtggctcacagtgctccata

SEQ ID NO: 71618 - RNA, 21 nt, synthetic construct
  source 1..21: mol_type = other RNA
agtggctcatacttgctttat

SEQ ID NO: 71619 - RNA, 21 nt, synthetic construct
  source 1..21: mol_type = other RNA
agtggctgcaccattttttca

SEQ ID NO: 71620 - RNA, 21 nt, synthetic construct
  source 1..21: mol_type = other RNA
agtggcttcctaactggtctc

SEQ ID NO: 71621 - RNA, 21 nt, synthetic construct
  source 1..21: mol_type = other RNA
agtgggaagcaaaggattcgg

SEQ ID NO: 71622 - RNA, 21 nt, synthetic construct
  source 1..21: mol_type = other RNA
agtgggaagtggagtgcgagt

SEQ ID NO: 71623 - RNA, 21 nt, synthetic construct
  source 1..21: mol_type = other RNA
agtgggaccccgtctctgcaa

SEQ ID NO: 71624 - RNA, 21 nt, synthetic construct
  source 1..21: mol_type = other RNA
agtgggactggagaacagtaa

SEQ ID NO: 71625 - RNA, 21 nt, synthetic construct
  source 1..21: mol_type = other RNA
agtgggaggaggtcatactgg

SEQ ID NO: 71626 - RNA, 21 nt, synthetic construct
  source 1..21: mol_type = other RNA
agtgggatcaaaccatgttca

SEQ ID NO: 71627 - RNA, 21 nt, synthetic construct
  source 1..21: mol_type = other RNA
agtgggcaaaaaagtcatgac

SEQ ID NO: 71628 - RNA, 21 nt, synthetic construct
  source 1..21: mol_type = other RNA
agtgggcccagcagaaggtga

SEQ ID NO: 71629 - RNA, 21 nt, synthetic construct
  source 1..21: mol_type = other RNA
agtggggcacctaaaaggttg

SEQ ID NO: 71630 - RNA, 21 nt, synthetic construct
  source 1..21: mol_type = other RNA
agtgggtagaagcagcaaggg

SEQ ID NO: 71631 - RNA, 21 nt, synthetic construct
  source 1..21: mol_type = other RNA
agtgggtcagctagtgtgtct

SEQ ID NO: 71632 - RNA, 21 nt, synthetic construct
  source 1..21: mol_type = other RNA
agtgggtcgggtgtcagaaac

SEQ ID NO: 71633 - RNA, 21 nt, synthetic construct
  source 1..21: mol_type = other RNA
agtgggtggatgggtgtaggg

SEQ ID NO: 71634 - RNA, 21 nt, synthetic construct
  source 1..21: mol_type = other RNA
agtgggttcaattatgtggaa

SEQ ID NO: 71635 - RNA, 21 nt, synthetic construct
  source 1..21: mol_type = other RNA
agtggtaactagatgcctcga

SEQ ID NO: 71636 - RNA, 21 nt, synthetic construct
  source 1..21: mol_type = other RNA
agtggtaaggactgaagtcct

SEQ ID NO: 71637 - RNA, 21 nt, synthetic construct
  source 1..21: mol_type = other RNA
agtggtaaggagccaaacatc

SEQ ID NO: 71638 - RNA, 21 nt, synthetic construct
  source 1..21: mol_type = other RNA
agtggtagttacacaagtgtt

SEQ ID NO: 71639 - RNA, 21 nt, synthetic construct
  source 1..21: mol_type = other RNA
agtggtattctatcatcaaga

SEQ ID NO: 71640 - RNA, 21 nt, synthetic construct
  source 1..21: mol_type = other RNA
agtggtgcaatcacggctgat

SEQ ID NO: 71641 - RNA, 21 nt, synthetic construct
  source 1..21: mol_type = other RNA
agtggtgcaatgataggtcac

SEQ ID NO: 71642 - RNA, 21 nt, synthetic construct
  source 1..21: mol_type = other RNA
agtggtgcttaattcaaacaa

SEQ ID NO: 71643 - RNA, 21 nt, synthetic construct
  source 1..21: mol_type = other RNA
agtggtgcttgaactgctggt

SEQ ID NO: 71644 - RNA, 21 nt, synthetic construct
  source 1..21: mol_type = other RNA
agtggtgcttttgctgcatcc

SEQ ID NO: 71645 - RNA, 21 nt, synthetic construct
  source 1..21: mol_type = other RNA
agtggtggatagagagattca

SEQ ID NO: 71646 - RNA, 21 nt, synthetic construct
  source 1..21: mol_type = other RNA
agtggtggtagtaaggatcgt

SEQ ID NO: 71647 - RNA, 21 nt, synthetic construct
  source 1..21: mol_type = other RNA
agtggtgtggtcttgtctcaa

SEQ ID NO: 71648 - RNA, 21 nt, synthetic construct
  source 1..21: mol_type = other RNA
agtggtgtgtgactgtagtcc

SEQ ID NO: 71649 - RNA, 21 nt, synthetic construct
  source 1..21: mol_type = other RNA
agtggttaggaaaatacatga

SEQ ID NO: 71650 - RNA, 21 nt, synthetic construct
  source 1..21: mol_type = other RNA
agtggttccatttgttttgtg

SEQ ID NO: 71651 - RNA, 21 nt, synthetic construct
  source 1..21: mol_type = other RNA
agtggttctgcgtgttatttt

SEQ ID NO: 71652 - RNA, 21 nt, synthetic construct
  source 1..21: mol_type = other RNA
agtggttgacccataaactga

SEQ ID NO: 71653 - RNA, 21 nt, synthetic construct
  source 1..21: mol_type = other RNA
agtggttggaaaacttttaac

SEQ ID NO: 71654 - RNA, 21 nt, synthetic construct
  source 1..21: mol_type = other RNA
agtggttgtgcttcgaggtcg

SEQ ID NO: 71655 - RNA, 21 nt, synthetic construct
  source 1..21: mol_type = other RNA
agtggttgtggaattaactcc

SEQ ID NO: 71656 - RNA, 21 nt, synthetic construct
  source 1..21: mol_type = other RNA
agtggtttgaagcttcacttc

SEQ ID NO: 71657 - RNA, 21 nt, synthetic construct
  source 1..21: mol_type = other RNA
agtgtaaagtttctctctccc

SEQ ID NO: 71658 - RNA, 21 nt, synthetic construct
  source 1..21: mol_type = other RNA
agtgtaacatacacatcagat

SEQ ID NO: 71659 - RNA, 21 nt, synthetic construct
  source 1..21: mol_type = other RNA
agtgtaaggtgtttggtgaat

SEQ ID NO: 71660 - RNA, 21 nt, synthetic construct
  source 1..21: mol_type = other RNA
agtgtacaattcggtggcatt

SEQ ID NO: 71661 - RNA, 21 nt, synthetic construct
  source 1..21: mol_type = other RNA
agtgtactagtctccatacaa

SEQ ID NO: 71662 - RNA, 21 nt, synthetic construct
  source 1..21: mol_type = other RNA
agtgtagctgtggctcactca

SEQ ID NO: 71663 - RNA, 21 nt, synthetic construct
  source 1..21: mol_type = other RNA
agtgtagtcagacacactagc

SEQ ID NO: 71664 - RNA, 21 nt, synthetic construct
  source 1..21: mol_type = other RNA
agtgtatcagatgcttctagc

SEQ ID NO: 71665 - RNA, 21 nt, synthetic construct
  source 1..21: mol_type = other RNA
agtgtatgcagggaaatcatt

SEQ ID NO: 71666 - RNA, 21 nt, synthetic construct
  source 1..21: mol_type = other RNA
agtgtattattctaaacacac

SEQ ID NO: 71667 - RNA, 21 nt, synthetic construct
  source 1..21: mol_type = other RNA
agtgtattgtaccttgattta

SEQ ID NO: 71668 - RNA, 21 nt, synthetic construct
  source 1..21: mol_type = other RNA
agtgtccatctcccatcacta

SEQ ID NO: 71669 - RNA, 21 nt, synthetic construct
  source 1..21: mol_type = other RNA
agtgtcctcaggctccaggta

SEQ ID NO: 71670 - RNA, 21 nt, synthetic construct
  source 1..21: mol_type = other RNA
agtgtcctgaatgatttccct

SEQ ID NO: 71671 - RNA, 21 nt, synthetic construct
  source 1..21: mol_type = other RNA
agtgtctaatgggtacagggt

SEQ ID NO: 71672 - RNA, 21 nt, synthetic construct
  source 1..21: mol_type = other RNA
agtgtctcagcctcccaagta

SEQ ID NO: 71673 - RNA, 21 nt, synthetic construct
  source 1..21: mol_type = other RNA
agtgtctccataccccctgga

SEQ ID NO: 71674 - RNA, 21 nt, synthetic construct
  source 1..21: mol_type = other RNA
agtgtctgctacaggggcatt

SEQ ID NO: 71675 - RNA, 21 nt, synthetic construct
  source 1..21: mol_type = other RNA
agtgtcttaatcctattttgt

SEQ ID NO: 71676 - RNA, 21 nt, synthetic construct
  source 1..21: mol_type = other RNA
agtgtcttagtctgacttctc

SEQ ID NO: 71677 - RNA, 21 nt, synthetic construct
  source 1..21: mol_type = other RNA
agtgtgaaagtattaaaagca

SEQ ID NO: 71678 - RNA, 21 nt, synthetic construct
  source 1..21: mol_type = other RNA
agtgtgaacgatggtttctga

SEQ ID NO: 71679 - RNA, 21 nt, synthetic construct
  source 1..21: mol_type = other RNA
agtgtgaagattaagcacatc

SEQ ID NO: 71680 - RNA, 21 nt, synthetic construct
  source 1..21: mol_type = other RNA
agtgtgaataggaaagtgaca

SEQ ID NO: 71681 - RNA, 21 nt, synthetic construct
  source 1..21: mol_type = other RNA
agtgtgaatgaggagtgaatt

SEQ ID NO: 71682 - RNA, 21 nt, synthetic construct
  source 1..21: mol_type = other RNA
agtgtgaccacattcccaaat

SEQ ID NO: 71683 - RNA, 21 nt, synthetic construct
  source 1..21: mol_type = other RNA
agtgtgagcaaaaatacagct

SEQ ID NO: 71684 - RNA, 21 nt, synthetic construct
  source 1..21: mol_type = other RNA
agtgtgatgggggtaagattg

SEQ ID NO: 71685 - RNA, 21 nt, synthetic construct
  source 1..21: mol_type = other RNA
agtgtgcatgtgttgtgcaca

SEQ ID NO: 71686 - RNA, 21 nt, synthetic construct
  source 1..21: mol_type = other RNA
agtgtgcccaaggaaggcagg

SEQ ID NO: 71687 - RNA, 21 nt, synthetic construct
  source 1..21: mol_type = other RNA
agtgtgctgactagtacgtgc

SEQ ID NO: 71688 - RNA, 21 nt, synthetic construct
  source 1..21: mol_type = other RNA
agtgtgcttgggctcccttcc

SEQ ID NO: 71689 - RNA, 21 nt, synthetic construct
  source 1..21: mol_type = other RNA
agtgtggcaggggctgcatca

SEQ ID NO: 71690 - RNA, 21 nt, synthetic construct
  source 1..21: mol_type = other RNA
agtgtggctttaaggcgcaga

SEQ ID NO: 71691 - RNA, 21 nt, synthetic construct
  source 1..21: mol_type = other RNA
agtgtggtggtctcaccctca

SEQ ID NO: 71692 - RNA, 21 nt, synthetic construct
  source 1..21: mol_type = other RNA
agtgtggttcatatttccctt

SEQ ID NO: 71693 - RNA, 21 nt, synthetic construct
  source 1..21: mol_type = other RNA
agtgtgtccacacaatggtca

SEQ ID NO: 71694 - RNA, 21 nt, synthetic construct
  source 1..21: mol_type = other RNA
agtgtgtctgactacactgaa

SEQ ID NO: 71695 - RNA, 21 nt, synthetic construct
  source 1..21: mol_type = other RNA
agtgtgttctgccttgaggtg

SEQ ID NO: 71696 - RNA, 21 nt, synthetic construct
  source 1..21: mol_type = other RNA
agtgtgttgactgacataact

SEQ ID NO: 71697 - RNA, 21 nt, synthetic construct
  source 1..21: mol_type = other RNA
agtgtgtttcgcaaagtaaaa

SEQ ID NO: 71698 - RNA, 21 nt, synthetic construct
  source 1..21: mol_type = other RNA
agtgtgtttgtttgctagagc

SEQ ID NO: 71699 - RNA, 21 nt, synthetic construct
  source 1..21: mol_type = other RNA
agtgttaattcttccttaatg

SEQ ID NO: 71700 - RNA, 21 nt, synthetic construct
  source 1..21: mol_type = other RNA
agtgttacttgaaatcatttc

SEQ ID NO: 71701 - RNA, 21 nt, synthetic construct
  source 1..21: mol_type = other RNA
agtgttagaattacaggcatg

SEQ ID NO: 71702 - RNA, 21 nt, synthetic construct
  source 1..21: mol_type = other RNA
agtgttcaaaagccccaaacc

SEQ ID NO: 71703 - RNA, 21 nt, synthetic construct
  source 1..21: mol_type = other RNA
agtgttcccttcttaaatgtg

SEQ ID NO: 71704 - RNA, 21 nt, synthetic construct
  source 1..21: mol_type = other RNA
agtgttctgtgtttatgaatg

SEQ ID NO: 71705 - RNA, 21 nt, synthetic construct
  source 1..21: mol_type = other RNA
agtgttgactaccatctctcc

SEQ ID NO: 71706 - RNA, 21 nt, synthetic construct
  source 1..21: mol_type = other RNA
agtgttgagaaagcacataaa

SEQ ID NO: 71707 - RNA, 21 nt, synthetic construct
  source 1..21: mol_type = other RNA
agtgttgagaggctttaagca

SEQ ID NO: 71708 - RNA, 21 nt, synthetic construct
  source 1..21: mol_type = other RNA
agtgttgcttggtgttgactg

SEQ ID NO: 71709 - RNA, 21 nt, synthetic construct
  source 1..21: mol_type = other RNA
agtgttgtgtgcacctaataa

SEQ ID NO: 71710 - RNA, 21 nt, synthetic construct
  source 1..21: mol_type = other RNA
agtgtttacacacctgaaatt

SEQ ID NO: 71711 - RNA, 21 nt, synthetic construct
  source 1..21: mol_type = other RNA
agtgtttaggatataagagtg

SEQ ID NO: 71712 - RNA, 21 nt, synthetic construct
  source 1..21: mol_type = other RNA
agtgtttagggacgaatgcat

SEQ ID NO: 71713 - RNA, 21 nt, synthetic construct
  source 1..21: mol_type = other RNA
agtgtttcccttaaaaggaac

SEQ ID NO: 71714 - RNA, 21 nt, synthetic construct
  source 1..21: mol_type = other RNA
agtgtttcctagattccctct

SEQ ID NO: 71715 - RNA, 21 nt, synthetic construct
  source 1..21: mol_type = other RNA
agtgtttccttccagatgttt

SEQ ID NO: 71716 - RNA, 21 nt, synthetic construct
  source 1..21: mol_type = other RNA
agtgtttgaaaagtgtttgtc

SEQ ID NO: 71717 - RNA, 21 nt, synthetic construct
  source 1..21: mol_type = other RNA
agtgtttggtttttatggaat

SEQ ID NO: 71718 - RNA, 21 nt, synthetic construct
  source 1..21: mol_type = other RNA
agtgtttgtcacatagaagcg

SEQ ID NO: 71719 - RNA, 21 nt, synthetic construct
  source 1..21: mol_type = other RNA
agtgttttaaagcagggaggg

SEQ ID NO: 71720 - RNA, 21 nt, synthetic construct
  source 1..21: mol_type = other RNA
agtgttttaggggggaaaaca

SEQ ID NO: 71721 - RNA, 21 nt, synthetic construct
  source 1..21: mol_type = other RNA
agtgttttcttcatggactag

SEQ ID NO: 71722 - RNA, 21 nt, synthetic construct
  source 1..21: mol_type = other RNA
agtgttttgatagttgcagat

SEQ ID NO: 71723 - RNA, 21 nt, synthetic construct
  source 1..21: mol_type = other RNA
agtgtttttgaattctgctta

SEQ ID NO: 71724 - RNA, 21 nt, synthetic construct
  source 1..21: mol_type = other RNA
agttaaaactcacaaaaagtg

SEQ ID NO: 71725 - RNA, 21 nt, synthetic construct
  source 1..21: mol_type = other RNA
agttaaaacttgtagaggagg

SEQ ID NO: 71726 - RNA, 21 nt, synthetic construct
  source 1..21: mol_type = other RNA
agttaaaagacatctttcctg

SEQ ID NO: 71727 - RNA, 21 nt, synthetic construct
  source 1..21: mol_type = other RNA
agttaaaagttttccaaccac

SEQ ID NO: 71728 - RNA, 21 nt, synthetic construct
  source 1..21: mol_type = other RNA
agttaaaatgaaaatgttccc

SEQ ID NO: 71729 - RNA, 21 nt, synthetic construct
  source 1..21: mol_type = other RNA
agttaaacatgtaaaacagac

SEQ ID NO: 71730 - RNA, 21 nt, synthetic construct
  source 1..21: mol_type = other RNA
agttaaacccaacaaacaatt

SEQ ID NO: 71731 - RNA, 21 nt, synthetic construct
  source 1..21: mol_type = other RNA
agttaaacttttgtgcatcaa

SEQ ID NO: 71732 - RNA, 21 nt, synthetic construct
  source 1..21: mol_type = other RNA
agttaacaatactgcattgtg

SEQ ID NO: 71733 - RNA, 21 nt, synthetic construct
  source 1..21: mol_type = other RNA
agttaacagtgctgtgccagt

SEQ ID NO: 71734 - RNA, 21 nt, synthetic construct
  source 1..21: mol_type = other RNA
agttaaccttctggggttcaa

SEQ ID NO: 71735 - RNA, 21 nt, synthetic construct
  source 1..21: mol_type = other RNA
agttaacgtttatctacagag

SEQ ID NO: 71736 - RNA, 21 nt, synthetic construct
  source 1..21: mol_type = other RNA
agttaactgaaatcgggagta

SEQ ID NO: 71737 - RNA, 21 nt, synthetic construct
  source 1..21: mol_type = other RNA
agttaacttattggaaaactc

SEQ ID NO: 71738 - RNA, 21 nt, synthetic construct
  source 1..21: mol_type = other RNA
agttaagggccatttcatttc

SEQ ID NO: 71739 - RNA, 21 nt, synthetic construct
  source 1..21: mol_type = other RNA
agttaagtctgaaagcttctg

SEQ ID NO: 71740 - RNA, 21 nt, synthetic construct
  source 1..21: mol_type = other RNA
agttaataaaggtgctaattg

SEQ ID NO: 71741 - RNA, 21 nt, synthetic construct
  source 1..21: mol_type = other RNA
agttaatagcctcctaagttt

SEQ ID NO: 71742 - RNA, 21 nt, synthetic construct
  source 1..21: mol_type = other RNA
agttaatattgtaggtgtctc

SEQ ID NO: 71743 - RNA, 21 nt, synthetic construct
  source 1..21: mol_type = other RNA
agttaatgtgtgaagaaggaa

SEQ ID NO: 71744 - RNA, 21 nt, synthetic construct
  source 1..21: mol_type = other RNA
agttaattccacaaccactgg

SEQ ID NO: 71745 - RNA, 21 nt, synthetic construct
  source 1..21: mol_type = other RNA
agttacaaacatatgcatgtt

SEQ ID NO: 71746 - RNA, 21 nt, synthetic construct
  source 1..21: mol_type = other RNA
agttacaactactcgggaggc

SEQ ID NO: 71747 - RNA, 21 nt, synthetic construct
  source 1..21: mol_type = other RNA
agttacaaggattgaatggaa

SEQ ID NO: 71748 - RNA, 21 nt, synthetic construct
  source 1..21: mol_type = other RNA
agttacaataatatgcctcat

SEQ ID NO: 71749 - RNA, 21 nt, synthetic construct
  source 1..21: mol_type = other RNA
agttacacaagtgtttcattt

SEQ ID NO: 71750 - RNA, 21 nt, synthetic construct
  source 1..21: mol_type = other RNA
agttacagcatttcagccaaa

SEQ ID NO: 71751 - RNA, 21 nt, synthetic construct
  source 1..21: mol_type = other RNA
agttacatgaggtcacccaag

SEQ ID NO: 71752 - RNA, 21 nt, synthetic construct
  source 1..21: mol_type = other RNA
agttacatgcttagccttcca

SEQ ID NO: 71753 - RNA, 21 nt, synthetic construct
  source 1..21: mol_type = other RNA
agttaccaccaagaaaaagca

SEQ ID NO: 71754 - RNA, 21 nt, synthetic construct
  source 1..21: mol_type = other RNA
agttaccactagcaaactact

SEQ ID NO: 71755 - RNA, 21 nt, synthetic construct
  source 1..21: mol_type = other RNA
agttacgctgccaaaagccaa

SEQ ID NO: 71756 - RNA, 21 nt, synthetic construct
  source 1..21: mol_type = other RNA
agttacggttccctgtagaga

SEQ ID NO: 71757 - RNA, 21 nt, synthetic construct
  source 1..21: mol_type = other RNA
agttactagaagcacttttta

SEQ ID NO: 71758 - RNA, 21 nt, synthetic construct
  source 1..21: mol_type = other RNA
agttactcaaatccaaattca

SEQ ID NO: 71759 - RNA, 21 nt, synthetic construct
  source 1..21: mol_type = other RNA
agttactcctgagcaaggaag

SEQ ID NO: 71760 - RNA, 21 nt, synthetic construct
  source 1..21: mol_type = other RNA
agttactctctctgcctcggc

SEQ ID NO: 71761 - RNA, 21 nt, synthetic construct
  source 1..21: mol_type = other RNA
agttactgattagaaggattg

SEQ ID NO: 71762 - RNA, 21 nt, synthetic construct
  source 1..21: mol_type = other RNA
agttacttctggaaagttcaa

SEQ ID NO: 71763 - RNA, 21 nt, synthetic construct
  source 1..21: mol_type = other RNA
agttagaagtatcccagatgg

SEQ ID NO: 71764 - RNA, 21 nt, synthetic construct
  source 1..21: mol_type = other RNA
agttagcatgcctgacaaagt

SEQ ID NO: 71765 - RNA, 21 nt, synthetic construct
  source 1..21: mol_type = other RNA
agttagctggcaaaatggaga

SEQ ID NO: 71766 - RNA, 21 nt, synthetic construct
  source 1..21: mol_type = other RNA
agttaggaagccactgcattc

SEQ ID NO: 71767 - RNA, 21 nt, synthetic construct
  source 1..21: mol_type = other RNA
agttaggaatttacatttcca

SEQ ID NO: 71768 - RNA, 21 nt, synthetic construct
  source 1..21: mol_type = other RNA
agttaggtggtttgaacccca

SEQ ID NO: 71769 - RNA, 21 nt, synthetic construct
  source 1..21: mol_type = other RNA
agttagtgaagcagagagaga

SEQ ID NO: 71770 - RNA, 21 nt, synthetic construct
  source 1..21: mol_type = other RNA
agttagtgtctaatgggtaca

SEQ ID NO: 71771 - RNA, 21 nt, synthetic construct
  source 1..21: mol_type = other RNA
agttagtttgttgacccaatc

SEQ ID NO: 71772 - RNA, 21 nt, synthetic construct
  source 1..21: mol_type = other RNA
agttatcacacctaggcctat

SEQ ID NO: 71773 - RNA, 21 nt, synthetic construct
  source 1..21: mol_type = other RNA
agttatcaccatgtgcttatc

SEQ ID NO: 71774 - RNA, 21 nt, synthetic construct
  source 1..21: mol_type = other RNA
agttatctctgccctcattga

SEQ ID NO: 71775 - RNA, 21 nt, synthetic construct
  source 1..21: mol_type = other RNA
agttatctcttagacctccta

SEQ ID NO: 71776 - RNA, 21 nt, synthetic construct
  source 1..21: mol_type = other RNA
agttatgataaaaataacggg

SEQ ID NO: 71777 - RNA, 21 nt, synthetic construct
  source 1..21: mol_type = other RNA
agttatgcaagatgtcaacat

SEQ ID NO: 71778 - RNA, 21 nt, synthetic construct
  source 1..21: mol_type = other RNA
agttatgtagctgggatggct

SEQ ID NO: 71779 - RNA, 21 nt, synthetic construct
  source 1..21: mol_type = other RNA
agttatgtcagtcaacacact

SEQ ID NO: 71780 - RNA, 21 nt, synthetic construct
  source 1..21: mol_type = other RNA
agttattaaatgagacaccta

SEQ ID NO: 71781 - RNA, 21 nt, synthetic construct
  source 1..21: mol_type = other RNA
agttattaagagtgtgctgac

SEQ ID NO: 71782 - RNA, 21 nt, synthetic construct
  source 1..21: mol_type = other RNA
agttattcttcagcaaggacc

SEQ ID NO: 71783 - RNA, 21 nt, synthetic construct
  source 1..21: mol_type = other RNA
agttattgcatagggatgttg

SEQ ID NO: 71784 - RNA, 21 nt, synthetic construct
  source 1..21: mol_type = other RNA
agttatttaatctctcttgac

SEQ ID NO: 71785 - RNA, 21 nt, synthetic construct
  source 1..21: mol_type = other RNA
agttcaaagaaactacctaga

SEQ ID NO: 71786 - RNA, 21 nt, synthetic construct
  source 1..21: mol_type = other RNA
agttcaaatgaggcttttatt

SEQ ID NO: 71787 - RNA, 21 nt, synthetic construct
  source 1..21: mol_type = other RNA
agttcaaatgttaagcccaac

SEQ ID NO: 71788 - RNA, 21 nt, synthetic construct
  source 1..21: mol_type = other RNA
agttcaagatgcataccaagc

SEQ ID NO: 71789 - RNA, 21 nt, synthetic construct
  source 1..21: mol_type = other RNA
agttcaagcaccacttcgaga

SEQ ID NO: 71790 - RNA, 21 nt, synthetic construct
  source 1..21: mol_type = other RNA
agttcaaggtgttagcaggac

SEQ ID NO: 71791 - RNA, 21 nt, synthetic construct
  source 1..21: mol_type = other RNA
agttcaaggttataatcagcc

SEQ ID NO: 71792 - RNA, 21 nt, synthetic construct
  source 1..21: mol_type = other RNA
agttcaatactactgcaaata

SEQ ID NO: 71793 - RNA, 21 nt, synthetic construct
  source 1..21: mol_type = other RNA
agttcaccagtttctaattag

SEQ ID NO: 71794 - RNA, 21 nt, synthetic construct
  source 1..21: mol_type = other RNA
agttcacctctccgggtaaaa

SEQ ID NO: 71795 - RNA, 21 nt, synthetic construct
  source 1..21: mol_type = other RNA
agttcagaaagattaatcctt

SEQ ID NO: 71796 - RNA, 21 nt, synthetic construct
  source 1..21: mol_type = other RNA
agttcagaataccagagattg

SEQ ID NO: 71797 - RNA, 21 nt, synthetic construct
  source 1..21: mol_type = other RNA
agttcagcatcttcactgact

SEQ ID NO: 71798 - RNA, 21 nt, synthetic construct
  source 1..21: mol_type = other RNA
agttcagcctgcagaaggaga

SEQ ID NO: 71799 - RNA, 21 nt, synthetic construct
  source 1..21: mol_type = other RNA
agttcagcttacagtcatcac

SEQ ID NO: 71800 - RNA, 21 nt, synthetic construct
  source 1..21: mol_type = other RNA
agttcagctttaaagagaaat

SEQ ID NO: 71801 - RNA, 21 nt, synthetic construct
  source 1..21: mol_type = other RNA
agttcaggaccagcttgggca

SEQ ID NO: 71802 - RNA, 21 nt, synthetic construct
  source 1..21: mol_type = other RNA
agttcagtggtgcaatcacgg

SEQ ID NO: 71803 - RNA, 21 nt, synthetic construct
  source 1..21: mol_type = other RNA
agttcagttttgtatatggtt

SEQ ID NO: 71804 - RNA, 21 nt, synthetic construct
  source 1..21: mol_type = other RNA
agttcatgttagcataattcg

SEQ ID NO: 71805 - RNA, 21 nt, synthetic construct
  source 1..21: mol_type = other RNA
agttcattagaattcaggaca

SEQ ID NO: 71806 - RNA, 21 nt, synthetic construct
  source 1..21: mol_type = other RNA
agttcattcgtagcaggttta

SEQ ID NO: 71807 - RNA, 21 nt, synthetic construct
  source 1..21: mol_type = other RNA
agttccaactgtataaatgtt

SEQ ID NO: 71808 - RNA, 21 nt, synthetic construct
  source 1..21: mol_type = other RNA
agttccaagattttcccaatc

SEQ ID NO: 71809 - RNA, 21 nt, synthetic construct
  source 1..21: mol_type = other RNA
agttccacctccatcactgac

SEQ ID NO: 71810 - RNA, 21 nt, synthetic construct
  source 1..21: mol_type = other RNA
agttccagtcctttgtgtcaa

SEQ ID NO: 71811 - RNA, 21 nt, synthetic construct
  source 1..21: mol_type = other RNA
agttccatctgttatagtgtg

SEQ ID NO: 71812 - RNA, 21 nt, synthetic construct
  source 1..21: mol_type = other RNA
agttccccattgacaatatag

SEQ ID NO: 71813 - RNA, 21 nt, synthetic construct
  source 1..21: mol_type = other RNA
agttcccctatactgtaaccc

SEQ ID NO: 71814 - RNA, 21 nt, synthetic construct
  source 1..21: mol_type = other RNA
agttccgatttctcggccggg

SEQ ID NO: 71815 - RNA, 21 nt, synthetic construct
  source 1..21: mol_type = other RNA
agttccggttctcaggagcct

SEQ ID NO: 71816 - RNA, 21 nt, synthetic construct
  source 1..21: mol_type = other RNA
agttcctccttttgtagaggg

SEQ ID NO: 71817 - RNA, 21 nt, synthetic construct
  source 1..21: mol_type = other RNA
agttcctgcttcccccaaaga

SEQ ID NO: 71818 - RNA, 21 nt, synthetic construct
  source 1..21: mol_type = other RNA
agttcctggactgtgatgact

SEQ ID NO: 71819 - RNA, 21 nt, synthetic construct
  source 1..21: mol_type = other RNA
agttccttttaagggaaacac

SEQ ID NO: 71820 - RNA, 21 nt, synthetic construct
  source 1..21: mol_type = other RNA
agttctaataaacgcggaatg

SEQ ID NO: 71821 - RNA, 21 nt, synthetic construct
  source 1..21: mol_type = other RNA
agttctagctctgtctttttt

SEQ ID NO: 71822 - RNA, 21 nt, synthetic construct
  source 1..21: mol_type = other RNA
agttctagttctaataaacgc

SEQ ID NO: 71823 - RNA, 21 nt, synthetic construct
  source 1..21: mol_type = other RNA
agttctatttctttccattca

SEQ ID NO: 71824 - RNA, 21 nt, synthetic construct
  source 1..21: mol_type = other RNA
agttctcaggggtaaagggga

SEQ ID NO: 71825 - RNA, 21 nt, synthetic construct
  source 1..21: mol_type = other RNA
agttctccaagttattacaaa

SEQ ID NO: 71826 - RNA, 21 nt, synthetic construct
  source 1..21: mol_type = other RNA
agttctcctgtgtgcatgctc

SEQ ID NO: 71827 - RNA, 21 nt, synthetic construct
  source 1..21: mol_type = other RNA
agttctctgccccgggcctgg

SEQ ID NO: 71828 - RNA, 21 nt, synthetic construct
  source 1..21: mol_type = other RNA
agttctgaaggctcagcccct

SEQ ID NO: 71829 - RNA, 21 nt, synthetic construct
  source 1..21: mol_type = other RNA
agttctgcgcaattgcagcca

SEQ ID NO: 71830 - RNA, 21 nt, synthetic construct
  source 1..21: mol_type = other RNA
agttctgcttccacatttcta

SEQ ID NO: 71831 - RNA, 21 nt, synthetic construct
  source 1..21: mol_type = other RNA
agttctgggagttcattagaa

SEQ ID NO: 71832 - RNA, 21 nt, synthetic construct
  source 1..21: mol_type = other RNA
agttctggtgtcgtttatttc

SEQ ID NO: 71833 - RNA, 21 nt, synthetic construct
  source 1..21: mol_type = other RNA
agttctgtacccttacgcgtg

SEQ ID NO: 71834 - RNA, 21 nt, synthetic construct
  source 1..21: mol_type = other RNA
agttctgtgaatttgattatg

SEQ ID NO: 71835 - RNA, 21 nt, synthetic construct
  source 1..21: mol_type = other RNA
agttcttacctcaaaggagag

SEQ ID NO: 71836 - RNA, 21 nt, synthetic construct
  source 1..21: mol_type = other RNA
agttcttatgaggttattcaa

SEQ ID NO: 71837 - RNA, 21 nt, synthetic construct
  source 1..21: mol_type = other RNA
agttctttcggatatttacta

SEQ ID NO: 71838 - RNA, 21 nt, synthetic construct
  source 1..21: mol_type = other RNA
agttgaaaagtatggttgaag

SEQ ID NO: 71839 - RNA, 21 nt, synthetic construct
  source 1..21: mol_type = other RNA
agttgaatttctgtccttgga

SEQ ID NO: 71840 - RNA, 21 nt, synthetic construct
  source 1..21: mol_type = other RNA
agttgacatcctttaatttgg

SEQ ID NO: 71841 - RNA, 21 nt, synthetic construct
  source 1..21: mol_type = other RNA
agttgactcctaaaacatggt

SEQ ID NO: 71842 - RNA, 21 nt, synthetic construct
  source 1..21: mol_type = other RNA
agttgagaaactatccaacat

SEQ ID NO: 71843 - RNA, 21 nt, synthetic construct
  source 1..21: mol_type = other RNA
agttgagaaagagggaagtac

SEQ ID NO: 71844 - RNA, 21 nt, synthetic construct
  source 1..21: mol_type = other RNA
agttgagagagaattctaaat

SEQ ID NO: 71845 - RNA, 21 nt, synthetic construct
  source 1..21: mol_type = other RNA
agttgaggttgaagacctgca

SEQ ID NO: 71846 - RNA, 21 nt, synthetic construct
  source 1..21: mol_type = other RNA
agttgagttttcaacctttgt

SEQ ID NO: 71847 - RNA, 21 nt, synthetic construct
  source 1..21: mol_type = other RNA
agttgatgcaatttgttttcc

SEQ ID NO: 71848 - RNA, 21 nt, synthetic construct
  source 1..21: mol_type = other RNA
agttgattatttttacccaac

SEQ ID NO: 71849 - RNA, 21 nt, synthetic construct
  source 1..21: mol_type = other RNA
agttgcaaaaatactacaaga

SEQ ID NO: 71850 - RNA, 21 nt, synthetic construct
  source 1..21: mol_type = other RNA
agttgcacggtgaagaaccga

SEQ ID NO: 71851 - RNA, 21 nt, synthetic construct
  source 1..21: mol_type = other RNA
agttgcagattcatcttgact

SEQ ID NO: 71852 - RNA, 21 nt, synthetic construct
  source 1..21: mol_type = other RNA
agttgcagcatgctcactgtc

SEQ ID NO: 71853 - RNA, 21 nt, synthetic construct
  source 1..21: mol_type = other RNA
agttgcagtgagcccagagat

SEQ ID NO: 71854 - RNA, 21 nt, synthetic construct
  source 1..21: mol_type = other RNA
agttgcatacgtcgtccccca

SEQ ID NO: 71855 - RNA, 21 nt, synthetic construct
  source 1..21: mol_type = other RNA
agttgcatcacttgaggtgat

SEQ ID NO: 71856 - RNA, 21 nt, synthetic construct
  source 1..21: mol_type = other RNA
agttgcatgaatttgttttct

SEQ ID NO: 71857 - RNA, 21 nt, synthetic construct
  source 1..21: mol_type = other RNA
agttgctatccagtctctgca

SEQ ID NO: 71858 - RNA, 21 nt, synthetic construct
  source 1..21: mol_type = other RNA
agttgctcagaaaattttctt

SEQ ID NO: 71859 - RNA, 21 nt, synthetic construct
  source 1..21: mol_type = other RNA
agttgctgacttcctggctct

SEQ ID NO: 71860 - RNA, 21 nt, synthetic construct
  source 1..21: mol_type = other RNA
agttgcttactctaatgggga

SEQ ID NO: 71861 - RNA, 21 nt, synthetic construct
  source 1..21: mol_type = other RNA
agttgcttggcacagaattat

SEQ ID NO: 71862 - RNA, 21 nt, synthetic construct
  source 1..21: mol_type = other RNA
agttgctttttcttcttgttt

SEQ ID NO: 71863 - RNA, 21 nt, synthetic construct
  source 1..21: mol_type = other RNA
agttggaactcttgcggtctt

SEQ ID NO: 71864 - RNA, 21 nt, synthetic construct
  source 1..21: mol_type = other RNA
agttggattcccaggtatttt

SEQ ID NO: 71865 - RNA, 21 nt, synthetic construct
  source 1..21: mol_type = other RNA
agttggcacagccagtcagtg

SEQ ID NO: 71866 - RNA, 21 nt, synthetic construct
  source 1..21: mol_type = other RNA
agttggcccaacatgctctta

SEQ ID NO: 71867 - RNA, 21 nt, synthetic construct
  source 1..21: mol_type = other RNA
agttggccttgaggtgagaca

SEQ ID NO: 71868 - RNA, 21 nt, synthetic construct
  source 1..21: mol_type = other RNA
agttgggagtctatttctgaa

SEQ ID NO: 71869 - RNA, 21 nt, synthetic construct
  source 1..21: mol_type = other RNA
agttgggcttaacatttgaac

SEQ ID NO: 71870 - RNA, 21 nt, synthetic construct
  source 1..21: mol_type = other RNA
agttgggcttggttggaaaag

SEQ ID NO: 71871 - RNA, 21 nt, synthetic construct
  source 1..21: mol_type = other RNA
agttggggactcttatggcta

SEQ ID NO: 71872 - RNA, 21 nt, synthetic construct
  source 1..21: mol_type = other RNA
agttggtcagaaaaatggaat

SEQ ID NO: 71873 - RNA, 21 nt, synthetic construct
  source 1..21: mol_type = other RNA
agttggtcctgcatatgtttt

SEQ ID NO: 71874 - RNA, 21 nt, synthetic construct
  source 1..21: mol_type = other RNA
agttggtgaagagagcctgtg

SEQ ID NO: 71875 - RNA, 21 nt, synthetic construct
  source 1..21: mol_type = other RNA
agttggtgcaaggataaacaa

SEQ ID NO: 71876 - RNA, 21 nt, synthetic construct
  source 1..21: mol_type = other RNA
agttgtaactacagacatgcc

SEQ ID NO: 71877 - RNA, 21 nt, synthetic construct
  source 1..21: mol_type = other RNA
agttgtacttgacacaaagga

SEQ ID NO: 71878 - RNA, 21 nt, synthetic construct
  source 1..21: mol_type = other RNA
agttgtatctgtgatccctga

SEQ ID NO: 71879 - RNA, 21 nt, synthetic construct
  source 1..21: mol_type = other RNA
agttgtatgccaaaaaattgg

SEQ ID NO: 71880 - RNA, 21 nt, synthetic construct
  source 1..21: mol_type = other RNA
agttgtcagaattagaaagct

SEQ ID NO: 71881 - RNA, 21 nt, synthetic construct
  source 1..21: mol_type = other RNA
agttgtgatatattatgaacc

SEQ ID NO: 71882 - RNA, 21 nt, synthetic construct
  source 1..21: mol_type = other RNA
agttgtgctacctcaaattgt

SEQ ID NO: 71883 - RNA, 21 nt, synthetic construct
  source 1..21: mol_type = other RNA
agttgtggtgagccaagatcg

SEQ ID NO: 71884 - RNA, 21 nt, synthetic construct
  source 1..21: mol_type = other RNA
agttgtgtcatttttgtattc

SEQ ID NO: 71885 - RNA, 21 nt, synthetic construct
  source 1..21: mol_type = other RNA
agttgtttacttgggtataaa

SEQ ID NO: 71886 - RNA, 21 nt, synthetic construct
  source 1..21: mol_type = other RNA
agttgtttccactttgaggtt

SEQ ID NO: 71887 - RNA, 21 nt, synthetic construct
  source 1..21: mol_type = other RNA
agtttaaagctttgtgactgt

SEQ ID NO: 71888 - RNA, 21 nt, synthetic construct
  source 1..21: mol_type = other RNA
agtttaaccaattatgctgag

SEQ ID NO: 71889 - RNA, 21 nt, synthetic construct
  source 1..21: mol_type = other RNA
agtttaactttgatgaattcc

SEQ ID NO: 71890 - RNA, 21 nt, synthetic construct
  source 1..21: mol_type = other RNA
agtttaattgggggaaaattg

SEQ ID NO: 71891 - RNA, 21 nt, synthetic construct
  source 1..21: mol_type = other RNA
agtttacacgccttcgcgggc

SEQ ID NO: 71892 - RNA, 21 nt, synthetic construct
  source 1..21: mol_type = other RNA
agtttacactatggcttttga

SEQ ID NO: 71893 - RNA, 21 nt, synthetic construct
  source 1..21: mol_type = other RNA
agtttagcaatccaaggacag

SEQ ID NO: 71894 - RNA, 21 nt, synthetic construct
  source 1..21: mol_type = other RNA
agtttagtaaatctttggtga

SEQ ID NO: 71895 - RNA, 21 nt, synthetic construct
  source 1..21: mol_type = other RNA
agtttagtgcagtatcttgaa

SEQ ID NO: 71896 - RNA, 21 nt, synthetic construct
  source 1..21: mol_type = other RNA
agtttagttactcaaatccaa

SEQ ID NO: 71897 - RNA, 21 nt, synthetic construct
  source 1..21: mol_type = other RNA
agtttatatgcctagatgatt

SEQ ID NO: 71898 - RNA, 21 nt, synthetic construct
  source 1..21: mol_type = other RNA
agtttatattctaagtttgcc

SEQ ID NO: 71899 - RNA, 21 nt, synthetic construct
  source 1..21: mol_type = other RNA
agtttatcagtctccaatcct

SEQ ID NO: 71900 - RNA, 21 nt, synthetic construct
  source 1..21: mol_type = other RNA
agtttatgggtcaaccactaa

SEQ ID NO: 71901 - RNA, 21 nt, synthetic construct
  source 1..21: mol_type = other RNA
agtttattcatacgttaactg

SEQ ID NO: 71902 - RNA, 21 nt, synthetic construct
  source 1..21: mol_type = other RNA
agtttcaaaagctccccggat

SEQ ID NO: 71903 - RNA, 21 nt, synthetic construct
  source 1..21: mol_type = other RNA
agtttcaaactgtggtcactg

SEQ ID NO: 71904 - RNA, 21 nt, synthetic construct
  source 1..21: mol_type = other RNA
agtttcaccctgcgaaggcaa

SEQ ID NO: 71905 - RNA, 21 nt, synthetic construct
  source 1..21: mol_type = other RNA
agtttcatctatgtcccctgg

SEQ ID NO: 71906 - RNA, 21 nt, synthetic construct
  source 1..21: mol_type = other RNA
agtttcatggacttcctattt

SEQ ID NO: 71907 - RNA, 21 nt, synthetic construct
  source 1..21: mol_type = other RNA
agtttccagaaaactggcaat

SEQ ID NO: 71908 - RNA, 21 nt, synthetic construct
  source 1..21: mol_type = other RNA
agtttccatggaggggccagt

SEQ ID NO: 71909 - RNA, 21 nt, synthetic construct
  source 1..21: mol_type = other RNA
agtttccctctgagagaagtc

SEQ ID NO: 71910 - RNA, 21 nt, synthetic construct
  source 1..21: mol_type = other RNA
agtttccgttttgcaagatgc

SEQ ID NO: 71911 - RNA, 21 nt, synthetic construct
  source 1..21: mol_type = other RNA
agtttcctacatactgcactc

SEQ ID NO: 71912 - RNA, 21 nt, synthetic construct
  source 1..21: mol_type = other RNA
agtttcctagaaaatcataca

SEQ ID NO: 71913 - RNA, 21 nt, synthetic construct
  source 1..21: mol_type = other RNA
agtttcctgcacatgcacaag

SEQ ID NO: 71914 - RNA, 21 nt, synthetic construct
  source 1..21: mol_type = other RNA
agtttctagccataatcctta

SEQ ID NO: 71915 - RNA, 21 nt, synthetic construct
  source 1..21: mol_type = other RNA
agtttctcaacttagccttgg

SEQ ID NO: 71916 - RNA, 21 nt, synthetic construct
  source 1..21: mol_type = other RNA
agtttctctctccctgccctg

SEQ ID NO: 71917 - RNA, 21 nt, synthetic construct
  source 1..21: mol_type = other RNA
agtttctctgctttttcttgg

SEQ ID NO: 71918 - RNA, 21 nt, synthetic construct
  source 1..21: mol_type = other RNA
agtttctggaagtttcctgca

SEQ ID NO: 71919 - RNA, 21 nt, synthetic construct
  source 1..21: mol_type = other RNA
agtttctttttgttttctcct

SEQ ID NO: 71920 - RNA, 21 nt, synthetic construct
  source 1..21: mol_type = other RNA
agtttgacctgtaatttttct

SEQ ID NO: 71921 - RNA, 21 nt, synthetic construct
  source 1..21: mol_type = other RNA
agtttgagaagccacacagta

SEQ ID NO: 71922 - RNA, 21 nt, synthetic construct
  source 1..21: mol_type = other RNA
agtttgagaccagcgtgggca

SEQ ID NO: 71923 - RNA, 21 nt, synthetic construct
  source 1..21: mol_type = other RNA
agtttgagactgcagtgacct

SEQ ID NO: 71924 - RNA, 21 nt, synthetic construct
  source 1..21: mol_type = other RNA
agtttgaggccgcagtgagcc

SEQ ID NO: 71925 - RNA, 21 nt, synthetic construct
  source 1..21: mol_type = other RNA
agtttgaggtgtacaattagg

SEQ ID NO: 71926 - RNA, 21 nt, synthetic construct
  source 1..21: mol_type = other RNA
agtttgagtatttcatgtact

SEQ ID NO: 71927 - RNA, 21 nt, synthetic construct
  source 1..21: mol_type = other RNA
agtttgcaatacagttaacgt

SEQ ID NO: 71928 - RNA, 21 nt, synthetic construct
  source 1..21: mol_type = other RNA
agtttgcacgtttttagaaat

SEQ ID NO: 71929 - RNA, 21 nt, synthetic construct
  source 1..21: mol_type = other RNA
agtttgcattacatgaatgga

SEQ ID NO: 71930 - RNA, 21 nt, synthetic construct
  source 1..21: mol_type = other RNA
agtttgccaaagattcttgtc

SEQ ID NO: 71931 - RNA, 21 nt, synthetic construct
  source 1..21: mol_type = other RNA
agtttgctagtattttgttga

SEQ ID NO: 71932 - RNA, 21 nt, synthetic construct
  source 1..21: mol_type = other RNA
agtttgctagtggtaactaga

SEQ ID NO: 71933 - RNA, 21 nt, synthetic construct
  source 1..21: mol_type = other RNA
agtttgctctgcaaatgaggt

SEQ ID NO: 71934 - RNA, 21 nt, synthetic construct
  source 1..21: mol_type = other RNA
agtttggaaccagcctggcca

SEQ ID NO: 71935 - RNA, 21 nt, synthetic construct
  source 1..21: mol_type = other RNA
agtttggcaatttctcaaaaa

SEQ ID NO: 71936 - RNA, 21 nt, synthetic construct
  source 1..21: mol_type = other RNA
agtttggctcccatgattcaa

SEQ ID NO: 71937 - RNA, 21 nt, synthetic construct
  source 1..21: mol_type = other RNA
agtttgggtgacagagagaga

SEQ ID NO: 71938 - RNA, 21 nt, synthetic construct
  source 1..21: mol_type = other RNA
agtttggttcatttcaggaat

SEQ ID NO: 71939 - RNA, 21 nt, synthetic construct
  source 1..21: mol_type = other RNA
agtttgtagctcaaagcatat

SEQ ID NO: 71940 - RNA, 21 nt, synthetic construct
  source 1..21: mol_type = other RNA
agtttgtgttttcactctcaa

SEQ ID NO: 71941 - RNA, 21 nt, synthetic construct
  source 1..21: mol_type = other RNA
agtttgttctgctgttgatgg

SEQ ID NO: 71942 - RNA, 21 nt, synthetic construct
  source 1..21: mol_type = other RNA
agtttgttctgtcacatttga

SEQ ID NO: 71943 - RNA, 21 nt, synthetic construct
  source 1..21: mol_type = other RNA
agtttgttgacccaatcatgt

SEQ ID NO: 71944 - RNA, 21 nt, synthetic construct
  source 1..21: mol_type = other RNA
agttttaactcttgcattaga

SEQ ID NO: 71945 - RNA, 21 nt, synthetic construct
  source 1..21: mol_type = other RNA
agttttaggaaaatagagttc

SEQ ID NO: 71946 - RNA, 21 nt, synthetic construct
  source 1..21: mol_type = other RNA
agttttatagtcttagctctt

SEQ ID NO: 71947 - RNA, 21 nt, synthetic construct
  source 1..21: mol_type = other RNA
agttttatcaattagttcctc

SEQ ID NO: 71948 - RNA, 21 nt, synthetic construct
  source 1..21: mol_type = other RNA
agttttcaacctttgttgaaa

SEQ ID NO: 71949 - RNA, 21 nt, synthetic construct
  source 1..21: mol_type = other RNA
agttttcacttttgtgcaaca

SEQ ID NO: 71950 - RNA, 21 nt, synthetic construct
  source 1..21: mol_type = other RNA
agttttccaaccactgaatca

SEQ ID NO: 71951 - RNA, 21 nt, synthetic construct
  source 1..21: mol_type = other RNA
agttttccaataagttaactg

SEQ ID NO: 71952 - RNA, 21 nt, synthetic construct
  source 1..21: mol_type = other RNA
agttttccaatccgggaacat

SEQ ID NO: 71953 - RNA, 21 nt, synthetic construct
  source 1..21: mol_type = other RNA
agttttccaggaaaagcaaat

SEQ ID NO: 71954 - RNA, 21 nt, synthetic construct
  source 1..21: mol_type = other RNA
agttttccagtatattcatag

SEQ ID NO: 71955 - RNA, 21 nt, synthetic construct
  source 1..21: mol_type = other RNA
agttttccccctacacccagt

SEQ ID NO: 71956 - RNA, 21 nt, synthetic construct
  source 1..21: mol_type = other RNA
agttttccctgtgtatgtgta

SEQ ID NO: 71957 - RNA, 21 nt, synthetic construct
  source 1..21: mol_type = other RNA
agttttctggaaactcaaacc

SEQ ID NO: 71958 - RNA, 21 nt, synthetic construct
  source 1..21: mol_type = other RNA
agttttgagtggcatcatact

SEQ ID NO: 71959 - RNA, 21 nt, synthetic construct
  source 1..21: mol_type = other RNA
agttttgcagttggggactct

SEQ ID NO: 71960 - RNA, 21 nt, synthetic construct
  source 1..21: mol_type = other RNA
agttttgcctctttgctaata

SEQ ID NO: 71961 - RNA, 21 nt, synthetic construct
  source 1..21: mol_type = other RNA
agttttgggggaagagagcat

SEQ ID NO: 71962 - RNA, 21 nt, synthetic construct
  source 1..21: mol_type = other RNA
agttttggtgtcatttttaag

SEQ ID NO: 71963 - RNA, 21 nt, synthetic construct
  source 1..21: mol_type = other RNA
agttttgtatatggtttaagg

SEQ ID NO: 71964 - RNA, 21 nt, synthetic construct
  source 1..21: mol_type = other RNA
agtttttacatgtagttttcc

SEQ ID NO: 71965 - RNA, 21 nt, synthetic construct
  source 1..21: mol_type = other RNA
agttttttcctttgcctttca

SEQ ID NO: 71966 - RNA, 21 nt, synthetic construct
  source 1..21: mol_type = other RNA
agttttttggtagataccaga

SEQ ID NO: 71967 - RNA, 21 nt, synthetic construct
  source 1..21: mol_type = other RNA
ataaaaaaggaatctgggccg

SEQ ID NO: 71968 - RNA, 21 nt, synthetic construct
  source 1..21: mol_type = other RNA
ataaaaacatatgcaggacca

SEQ ID NO: 71969 - RNA, 21 nt, synthetic construct
  source 1..21: mol_type = other RNA
ataaaaaccaaacactggaaa

SEQ ID NO: 71970 - RNA, 21 nt, synthetic construct
  source 1..21: mol_type = other RNA
ataaaaacctttttgggatct

SEQ ID NO: 71971 - RNA, 21 nt, synthetic construct
  source 1..21: mol_type = other RNA
ataaaaagacacaaaagagct

SEQ ID NO: 71972 - RNA, 21 nt, synthetic construct
  source 1..21: mol_type = other RNA
ataaaaagcctctctgatgga

SEQ ID NO: 71973 - RNA, 21 nt, synthetic construct
  source 1..21: mol_type = other RNA
ataaaaagcctctgtggacca

SEQ ID NO: 71974 - RNA, 21 nt, synthetic construct
  source 1..21: mol_type = other RNA
ataaaaagcgttggagacagc

SEQ ID NO: 71975 - RNA, 21 nt, synthetic construct
  source 1..21: mol_type = other RNA
ataaaaaggagggaaaatgtt

SEQ ID NO: 71976 - RNA, 21 nt, synthetic construct
  source 1..21: mol_type = other RNA
ataaaaagtatcgtgagacta

SEQ ID NO: 71977 - RNA, 21 nt, synthetic construct
  source 1..21: mol_type = other RNA
ataaaaagtgacttctggatg

SEQ ID NO: 71978 - RNA, 21 nt, synthetic construct
  source 1..21: mol_type = other RNA
ataaaaataacgggccgggcg

SEQ ID NO: 71979 - RNA, 21 nt, synthetic construct
  source 1..21: mol_type = other RNA
ataaaaatctctacagggaac

SEQ ID NO: 71980 - RNA, 21 nt, synthetic construct
  source 1..21: mol_type = other RNA
ataaaaatggcacatactgca

SEQ ID NO: 71981 - RNA, 21 nt, synthetic construct
  source 1..21: mol_type = other RNA
ataaaaattccgctctggttt

SEQ ID NO: 71982 - RNA, 21 nt, synthetic construct
  source 1..21: mol_type = other RNA
ataaaacacaaggacaggtca

SEQ ID NO: 71983 - RNA, 21 nt, synthetic construct
  source 1..21: mol_type = other RNA
ataaaacacatgtcatgggcc

SEQ ID NO: 71984 - RNA, 21 nt, synthetic construct
  source 1..21: mol_type = other RNA
ataaaacatggccagtatctc

SEQ ID NO: 71985 - RNA, 21 nt, synthetic construct
  source 1..21: mol_type = other RNA
ataaaacctggaatgggttgg

SEQ ID NO: 71986 - RNA, 21 nt, synthetic construct
  source 1..21: mol_type = other RNA
ataaaactcttagcttagaag

SEQ ID NO: 71987 - RNA, 21 nt, synthetic construct
  source 1..21: mol_type = other RNA
ataaaagcctcatttgaactt

SEQ ID NO: 71988 - RNA, 21 nt, synthetic construct
  source 1..21: mol_type = other RNA
ataaaagcgtactgtgattac

SEQ ID NO: 71989 - RNA, 21 nt, synthetic construct
  source 1..21: mol_type = other RNA
ataaaagctctaatagttcac

SEQ ID NO: 71990 - RNA, 21 nt, synthetic construct
  source 1..21: mol_type = other RNA
ataaaagctggagttatttgt

SEQ ID NO: 71991 - RNA, 21 nt, synthetic construct
  source 1..21: mol_type = other RNA
ataaaagcttatgatcttggg

SEQ ID NO: 71992 - RNA, 21 nt, synthetic construct
  source 1..21: mol_type = other RNA
ataaaaggatatgggccaaag

SEQ ID NO: 71993 - RNA, 21 nt, synthetic construct
  source 1..21: mol_type = other RNA
ataaaagttccaagattttcc

SEQ ID NO: 71994 - RNA, 21 nt, synthetic construct
  source 1..21: mol_type = other RNA
ataaaatagcaggattcttgt

SEQ ID NO: 71995 - RNA, 21 nt, synthetic construct
  source 1..21: mol_type = other RNA
ataaaataggaagtccatgaa

SEQ ID NO: 71996 - RNA, 21 nt, synthetic construct
  source 1..21: mol_type = other RNA
ataaaatctgtatgagaagac

SEQ ID NO: 71997 - RNA, 21 nt, synthetic construct
  source 1..21: mol_type = other RNA
ataaaatgatggcaacaatca

SEQ ID NO: 71998 - RNA, 21 nt, synthetic construct
  source 1..21: mol_type = other RNA
ataaaatgtctggccgggcac

SEQ ID NO: 71999 - RNA, 21 nt, synthetic construct
  source 1..21: mol_type = other RNA
ataaaatgtttagcggaatga

SEQ ID NO: 72000 - RNA, 21 nt, synthetic construct
  source 1..21: mol_type = other RNA
ataaaattcaccaaacacctt

SEQ ID NO: 72001 - RNA, 21 nt, synthetic construct
  source 1..21: mol_type = other RNA
ataaaattctgatagcttgac

SEQ ID NO: 72002 - RNA, 21 nt, synthetic construct
  source 1..21: mol_type = other RNA
ataaacaaagagaacaatgga

SEQ ID NO: 72003 - RNA, 21 nt, synthetic construct
  source 1..21: mol_type = other RNA
ataaacaagtcacaaaaagac

SEQ ID NO: 72004 - RNA, 21 nt, synthetic construct
  source 1..21: mol_type = other RNA
ataaacacagaacactaaagg

SEQ ID NO: 72005 - RNA, 21 nt, synthetic construct
  source 1..21: mol_type = other RNA
ataaacattttccctcctttt

SEQ ID NO: 72006 - RNA, 21 nt, synthetic construct
  source 1..21: mol_type = other RNA
ataaaccaagtttggttcatt

SEQ ID NO: 72007 - RNA, 21 nt, synthetic construct
  source 1..21: mol_type = other RNA
ataaaccacgcagtttgttct

SEQ ID NO: 72008 - RNA, 21 nt, synthetic construct
  source 1..21: mol_type = other RNA
ataaacgacaccagaactaca

SEQ ID NO: 72009 - RNA, 21 nt, synthetic construct
  source 1..21: mol_type = other RNA
ataaacgacagcaggaaaagc

SEQ ID NO: 72010 - RNA, 21 nt, synthetic construct
  source 1..21: mol_type = other RNA
ataaacgcggaatgaagcagg

SEQ ID NO: 72011 - RNA, 21 nt, synthetic construct
  source 1..21: mol_type = other RNA
ataaacgtgtgtgtaagcaca

SEQ ID NO: 72012 - RNA, 21 nt, synthetic construct
  source 1..21: mol_type = other RNA
ataaactaacaaagaacagga

SEQ ID NO: 72013 - RNA, 21 nt, synthetic construct
  source 1..21: mol_type = other RNA
ataaactagattaccttgaag

SEQ ID NO: 72014 - RNA, 21 nt, synthetic construct
  source 1..21: mol_type = other RNA
ataaactcttccttatccgat

SEQ ID NO: 72015 - RNA, 21 nt, synthetic construct
  source 1..21: mol_type = other RNA
ataaactggaaggaaataaga

SEQ ID NO: 72016 - RNA, 21 nt, synthetic construct
  source 1..21: mol_type = other RNA
ataaactggaattcatcaaag

SEQ ID NO: 72017 - RNA, 21 nt, synthetic construct
  source 1..21: mol_type = other RNA
ataaacttcagttttgagtgg

SEQ ID NO: 72018 - RNA, 21 nt, synthetic construct
  source 1..21: mol_type = other RNA
ataaacttccctctcagtggt

SEQ ID NO: 72019 - RNA, 21 nt, synthetic construct
  source 1..21: mol_type = other RNA
ataaagaacatgattgggtca

SEQ ID NO: 72020 - RNA, 21 nt, synthetic construct
  source 1..21: mol_type = other RNA
ataaagaactccaacaattca

SEQ ID NO: 72021 - RNA, 21 nt, synthetic construct
  source 1..21: mol_type = other RNA
ataaagacagacatttggaat

SEQ ID NO: 72022 - RNA, 21 nt, synthetic construct
  source 1..21: mol_type = other RNA
ataaagacttcacgatgctta

SEQ ID NO: 72023 - RNA, 21 nt, synthetic construct
  source 1..21: mol_type = other RNA
ataaagagcaggtggaaggcc

SEQ ID NO: 72024 - RNA, 21 nt, synthetic construct
  source 1..21: mol_type = other RNA
ataaagcaagtatgagccact

SEQ ID NO: 72025 - RNA, 21 nt, synthetic construct
  source 1..21: mol_type = other RNA
ataaagccggattcctttcaa

SEQ ID NO: 72026 - RNA, 21 nt, synthetic construct
  source 1..21: mol_type = other RNA
ataaaggatgcacaagacaga

SEQ ID NO: 72027 - RNA, 21 nt, synthetic construct
  source 1..21: mol_type = other RNA
ataaaggcaatgctctcttcc

SEQ ID NO: 72028 - RNA, 21 nt, synthetic construct
  source 1..21: mol_type = other RNA
ataaaggctttcgtatggaag

SEQ ID NO: 72029 - RNA, 21 nt, synthetic construct
  source 1..21: mol_type = other RNA
ataaagggtctggtatctacc

SEQ ID NO: 72030 - RNA, 21 nt, synthetic construct
  source 1..21: mol_type = other RNA
ataaaggtaaggaaaccccag

SEQ ID NO: 72031 - RNA, 21 nt, synthetic construct
  source 1..21: mol_type = other RNA
ataaaggtgctaattgtttgt

SEQ ID NO: 72032 - RNA, 21 nt, synthetic construct
  source 1..21: mol_type = other RNA
ataaagtcagaggagcagtta

SEQ ID NO: 72033 - RNA, 21 nt, synthetic construct
  source 1..21: mol_type = other RNA
ataaagtcttgctggaagttg

SEQ ID NO: 72034 - RNA, 21 nt, synthetic construct
  source 1..21: mol_type = other RNA
ataaagttccccattgacaat

SEQ ID NO: 72035 - RNA, 21 nt, synthetic construct
  source 1..21: mol_type = other RNA
ataaagtttccgttttgcaag

SEQ ID NO: 72036 - RNA, 21 nt, synthetic construct
  source 1..21: mol_type = other RNA
ataaataaaatgtctggccgg

SEQ ID NO: 72037 - RNA, 21 nt, synthetic construct
  source 1..21: mol_type = other RNA
ataaatacgtgtatactgggt

SEQ ID NO: 72038 - RNA, 21 nt, synthetic construct
  source 1..21: mol_type = other RNA
ataaatagggtgctactcaaa

SEQ ID NO: 72039 - RNA, 21 nt, synthetic construct
  source 1..21: mol_type = other RNA
ataaatcaaggtacaatacac

SEQ ID NO: 72040 - RNA, 21 nt, synthetic construct
  source 1..21: mol_type = other RNA
ataaatcacaggaaagatgtc

SEQ ID NO: 72041 - RNA, 21 nt, synthetic construct
  source 1..21: mol_type = other RNA
ataaatcagaaactgacagga

SEQ ID NO: 72042 - RNA, 21 nt, synthetic construct
  source 1..21: mol_type = other RNA
ataaatccaacgaccggacgt

SEQ ID NO: 72043 - RNA, 21 nt, synthetic construct
  source 1..21: mol_type = other RNA
ataaatcccacttgatccagg

SEQ ID NO: 72044 - RNA, 21 nt, synthetic construct
  source 1..21: mol_type = other RNA
ataaatcctcacatgtttggt

SEQ ID NO: 72045 - RNA, 21 nt, synthetic construct
  source 1..21: mol_type = other RNA
ataaatctaaagccaatcttc

SEQ ID NO: 72046 - RNA, 21 nt, synthetic construct
  source 1..21: mol_type = other RNA
ataaatctaagtctcaaccta

SEQ ID NO: 72047 - RNA, 21 nt, synthetic construct
  source 1..21: mol_type = other RNA
ataaatgaatattcgttccag

SEQ ID NO: 72048 - RNA, 21 nt, synthetic construct
  source 1..21: mol_type = other RNA
ataaatgaggtatcatttcca

SEQ ID NO: 72049 - RNA, 21 nt, synthetic construct
  source 1..21: mol_type = other RNA
ataaatgatgagctactgcat

SEQ ID NO: 72050 - RNA, 21 nt, synthetic construct
  source 1..21: mol_type = other RNA
ataaatgcataaacgacagca

SEQ ID NO: 72051 - RNA, 21 nt, synthetic construct
  source 1..21: mol_type = other RNA
ataaatgctcagtgggttcaa

SEQ ID NO: 72052 - RNA, 21 nt, synthetic construct
  source 1..21: mol_type = other RNA
ataaatggctttttacgatga

SEQ ID NO: 72053 - RNA, 21 nt, synthetic construct
  source 1..21: mol_type = other RNA
ataaatggtagcttgggctaa

SEQ ID NO: 72054 - RNA, 21 nt, synthetic construct
  source 1..21: mol_type = other RNA
ataaatggtgcaggccagata

SEQ ID NO: 72055 - RNA, 21 nt, synthetic construct
  source 1..21: mol_type = other RNA
ataaatgttcagtttatgggt

SEQ ID NO: 72056 - RNA, 21 nt, synthetic construct
  source 1..21: mol_type = other RNA
ataaattacccaaagactttg

SEQ ID NO: 72057 - RNA, 21 nt, synthetic construct
  source 1..21: mol_type = other RNA
ataaattatagctccaaaagc

SEQ ID NO: 72058 - RNA, 21 nt, synthetic construct
  source 1..21: mol_type = other RNA
ataaatttgccacattttacc

SEQ ID NO: 72059 - RNA, 21 nt, synthetic construct
  source 1..21: mol_type = other RNA
ataacaaaaatacgaaagtgc

SEQ ID NO: 72060 - RNA, 21 nt, synthetic construct
  source 1..21: mol_type = other RNA
ataacaaagctctgatgcttt

SEQ ID NO: 72061 - RNA, 21 nt, synthetic construct
  source 1..21: mol_type = other RNA
ataacaaagggttcttggaaa

SEQ ID NO: 72062 - RNA, 21 nt, synthetic construct
  source 1..21: mol_type = other RNA
ataacaccatagctgaaggca

SEQ ID NO: 72063 - RNA, 21 nt, synthetic construct
  source 1..21: mol_type = other RNA
ataacacgcagaaccactgag

SEQ ID NO: 72064 - RNA, 21 nt, synthetic construct
  source 1..21: mol_type = other RNA
ataacagatggaactctattt

SEQ ID NO: 72065 - RNA, 21 nt, synthetic construct
  source 1..21: mol_type = other RNA
ataacagcctaagcaaatgta

SEQ ID NO: 72066 - RNA, 21 nt, synthetic construct
  source 1..21: mol_type = other RNA
ataacagtattgtcttctaac

SEQ ID NO: 72067 - RNA, 21 nt, synthetic construct
  source 1..21: mol_type = other RNA
ataacagtggttaggaaaata

SEQ ID NO: 72068 - RNA, 21 nt, synthetic construct
  source 1..21: mol_type = other RNA
ataacataaaagcgtactgtg

SEQ ID NO: 72069 - RNA, 21 nt, synthetic construct
  source 1..21: mol_type = other RNA
ataacattaccaataaaagcc

SEQ ID NO: 72070 - RNA, 21 nt, synthetic construct
  source 1..21: mol_type = other RNA
ataaccaatgtcagagatctg

SEQ ID NO: 72071 - RNA, 21 nt, synthetic construct
  source 1..21: mol_type = other RNA
ataaccacatgtggcttgtgg

SEQ ID NO: 72072 - RNA, 21 nt, synthetic construct
  source 1..21: mol_type = other RNA
ataaccacgagtaatggatgt

SEQ ID NO: 72073 - RNA, 21 nt, synthetic construct
  source 1..21: mol_type = other RNA
ataacccatatctttgcttat

SEQ ID NO: 72074 - RNA, 21 nt, synthetic construct
  source 1..21: mol_type = other RNA
ataacccgttttttccttcat

SEQ ID NO: 72075 - RNA, 21 nt, synthetic construct
  source 1..21: mol_type = other RNA
ataaccctgttttgtagatta

SEQ ID NO: 72076 - RNA, 21 nt, synthetic construct
  source 1..21: mol_type = other RNA
ataacctcaaagtggaaacaa

SEQ ID NO: 72077 - RNA, 21 nt, synthetic construct
  source 1..21: mol_type = other RNA
ataacctcataagaactcctg

SEQ ID NO: 72078 - RNA, 21 nt, synthetic construct
  source 1..21: mol_type = other RNA
ataaccttgaacttccaggct

SEQ ID NO: 72079 - RNA, 21 nt, synthetic construct
  source 1..21: mol_type = other RNA
ataacgatagtctcctatatt

SEQ ID NO: 72080 - RNA, 21 nt, synthetic construct
  source 1..21: mol_type = other RNA
ataacgggccgggcgctgtgg

SEQ ID NO: 72081 - RNA, 21 nt, synthetic construct
  source 1..21: mol_type = other RNA
ataactaaactttgagtagca

SEQ ID NO: 72082 - RNA, 21 nt, synthetic construct
  source 1..21: mol_type = other RNA
ataactacacatcagtgctgc

SEQ ID NO: 72083 - RNA, 21 nt, synthetic construct
  source 1..21: mol_type = other RNA
ataactagaaacttcttctgt

SEQ ID NO: 72084 - RNA, 21 nt, synthetic construct
  source 1..21: mol_type = other RNA
ataactccagcttttattaga

SEQ ID NO: 72085 - RNA, 21 nt, synthetic construct
  source 1..21: mol_type = other RNA
ataactcgtaatgcgatgatc

SEQ ID NO: 72086 - RNA, 21 nt, synthetic construct
  source 1..21: mol_type = other RNA
ataactgaacatgtatgtttc

SEQ ID NO: 72087 - RNA, 21 nt, synthetic construct
  source 1..21: mol_type = other RNA
ataactgatatgagggatgag

SEQ ID NO: 72088 - RNA, 21 nt, synthetic construct
  source 1..21: mol_type = other RNA
ataactgcctaagtaatgctg

SEQ ID NO: 72089 - RNA, 21 nt, synthetic construct
  source 1..21: mol_type = other RNA
ataactgggtgtgcacgtttg

SEQ ID NO: 72090 - RNA, 21 nt, synthetic construct
  source 1..21: mol_type = other RNA
ataactggtgcttttttggtg

SEQ ID NO: 72091 - RNA, 21 nt, synthetic construct
  source 1..21: mol_type = other RNA
ataactgtcctgaattctaac

SEQ ID NO: 72092 - RNA, 21 nt, synthetic construct
  source 1..21: mol_type = other RNA
ataacttccatgagattacat

SEQ ID NO: 72093 - RNA, 21 nt, synthetic construct
  source 1..21: mol_type = other RNA
ataacttcccagacagggaat

SEQ ID NO: 72094 - RNA, 21 nt, synthetic construct
  source 1..21: mol_type = other RNA
ataacttggagaacttaaagg

SEQ ID NO: 72095 - RNA, 21 nt, synthetic construct
  source 1..21: mol_type = other RNA
ataactttaatcaccaggcgc

SEQ ID NO: 72096 - RNA, 21 nt, synthetic construct
  source 1..21: mol_type = other RNA
ataagaaagatctcaaacagc

SEQ ID NO: 72097 - RNA, 21 nt, synthetic construct
  source 1..21: mol_type = other RNA
ataagaactcctggtctccca

SEQ ID NO: 72098 - RNA, 21 nt, synthetic construct
  source 1..21: mol_type = other RNA
ataagaagattgagtcagtaa

SEQ ID NO: 72099 - RNA, 21 nt, synthetic construct
  source 1..21: mol_type = other RNA
ataagaaggtttgtagagcaa

SEQ ID NO: 72100 - RNA, 21 nt, synthetic construct
  source 1..21: mol_type = other RNA
ataagaagtgaaaaatgacct

SEQ ID NO: 72101 - RNA, 21 nt, synthetic construct
  source 1..21: mol_type = other RNA
ataagaataccaaattcacga

SEQ ID NO: 72102 - RNA, 21 nt, synthetic construct
  source 1..21: mol_type = other RNA
ataagacaccgctccacgccc

SEQ ID NO: 72103 - RNA, 21 nt, synthetic construct
  source 1..21: mol_type = other RNA
ataagacccagtggctagtgt

SEQ ID NO: 72104 - RNA, 21 nt, synthetic construct
  source 1..21: mol_type = other RNA
ataagacccctcaggtgtcac

SEQ ID NO: 72105 - RNA, 21 nt, synthetic construct
  source 1..21: mol_type = other RNA
ataagagaaggaagcaccaac

SEQ ID NO: 72106 - RNA, 21 nt, synthetic construct
  source 1..21: mol_type = other RNA
ataagagtccccaactgcaaa

SEQ ID NO: 72107 - RNA, 21 nt, synthetic construct
  source 1..21: mol_type = other RNA
ataagagtgggcaaaaaagtc

SEQ ID NO: 72108 - RNA, 21 nt, synthetic construct
  source 1..21: mol_type = other RNA
ataagatcatacacctggatc

SEQ ID NO: 72109 - RNA, 21 nt, synthetic construct
  source 1..21: mol_type = other RNA
ataagatccaagtattgtatc

SEQ ID NO: 72110 - RNA, 21 nt, synthetic construct
  source 1..21: mol_type = other RNA
ataagatctgtctttggccca

SEQ ID NO: 72111 - RNA, 21 nt, synthetic construct
  source 1..21: mol_type = other RNA
ataagatgatctaaatggtgt

SEQ ID NO: 72112 - RNA, 21 nt, synthetic construct
  source 1..21: mol_type = other RNA
ataagcaaaattgacaaaccc

SEQ ID NO: 72113 - RNA, 21 nt, synthetic construct
  source 1..21: mol_type = other RNA
ataagcaaagatatgggttat

SEQ ID NO: 72114 - RNA, 21 nt, synthetic construct
  source 1..21: mol_type = other RNA
ataagcacatggtgataactg

SEQ ID NO: 72115 - RNA, 21 nt, synthetic construct
  source 1..21: mol_type = other RNA
ataagcagaattcaaaaacac

SEQ ID NO: 72116 - RNA, 21 nt, synthetic construct
  source 1..21: mol_type = other RNA
ataagccaatatccctgataa

SEQ ID NO: 72117 - RNA, 21 nt, synthetic construct
  source 1..21: mol_type = other RNA
ataagccaccgcactcagcct

SEQ ID NO: 72118 - RNA, 21 nt, synthetic construct
  source 1..21: mol_type = other RNA
ataagcccaacctgattagag

SEQ ID NO: 72119 - RNA, 21 nt, synthetic construct
  source 1..21: mol_type = other RNA
ataagctaatcccaaagtgag

SEQ ID NO: 72120 - RNA, 21 nt, synthetic construct
  source 1..21: mol_type = other RNA
ataagctcccagccaaacagt

SEQ ID NO: 72121 - RNA, 21 nt, synthetic construct
  source 1..21: mol_type = other RNA
ataagcttcctctggctgacc

SEQ ID NO: 72122 - RNA, 21 nt, synthetic construct
  source 1..21: mol_type = other RNA
ataagcttcgaagcaaaacat

SEQ ID NO: 72123 - RNA, 21 nt, synthetic construct
  source 1..21: mol_type = other RNA
ataaggaaagcacgtttgatc

SEQ ID NO: 72124 - RNA, 21 nt, synthetic construct
  source 1..21: mol_type = other RNA
ataagggcattttcaaggtag

SEQ ID NO: 72125 - RNA, 21 nt, synthetic construct
  source 1..21: mol_type = other RNA
ataaggggaatcatgcagtac

SEQ ID NO: 72126 - RNA, 21 nt, synthetic construct
  source 1..21: mol_type = other RNA
ataaggggcagggtggagtcc

SEQ ID NO: 72127 - RNA, 21 nt, synthetic construct
  source 1..21: mol_type = other RNA
ataaggggctatctttacttt

SEQ ID NO: 72128 - RNA, 21 nt, synthetic construct
  source 1..21: mol_type = other RNA
ataagggggaatctactcttt

SEQ ID NO: 72129 - RNA, 21 nt, synthetic construct
  source 1..21: mol_type = other RNA
ataagggtctgttttacatgt

SEQ ID NO: 72130 - RNA, 21 nt, synthetic construct
  source 1..21: mol_type = other RNA
ataagggtgataaaaaggagg

SEQ ID NO: 72131 - RNA, 21 nt, synthetic construct
  source 1..21: mol_type = other RNA
ataaggtcacattcagaggta

SEQ ID NO: 72132 - RNA, 21 nt, synthetic construct
  source 1..21: mol_type = other RNA
ataaggtctgtaagtcagtta

SEQ ID NO: 72133 - RNA, 21 nt, synthetic construct
  source 1..21: mol_type = other RNA
ataaggttgttcttggttaat

SEQ ID NO: 72134 - RNA, 21 nt, synthetic construct
  source 1..21: mol_type = other RNA
ataagtagaaggtcaatctag

SEQ ID NO: 72135 - RNA, 21 nt, synthetic construct
  source 1..21: mol_type = other RNA
ataagtccctaacagtctcgt

SEQ ID NO: 72136 - RNA, 21 nt, synthetic construct
  source 1..21: mol_type = other RNA
ataagtgagtttgacctgtaa

SEQ ID NO: 72137 - RNA, 21 nt, synthetic construct
  source 1..21: mol_type = other RNA
ataagtggaatcattccgtat

SEQ ID NO: 72138 - RNA, 21 nt, synthetic construct
  source 1..21: mol_type = other RNA
ataagttaactgaaatcggga

SEQ ID NO: 72139 - RNA, 21 nt, synthetic construct
  source 1..21: mol_type = other RNA
ataagttcaaagaaactacct

SEQ ID NO: 72140 - RNA, 21 nt, synthetic construct
  source 1..21: mol_type = other RNA
ataagttctagagatttgctg

SEQ ID NO: 72141 - RNA, 21 nt, synthetic construct
  source 1..21: mol_type = other RNA
ataagttgggagtctatttct

SEQ ID NO: 72142 - RNA, 21 nt, synthetic construct
  source 1..21: mol_type = other RNA
ataagtttcatggacttccta

SEQ ID NO: 72143 - RNA, 21 nt, synthetic construct
  source 1..21: mol_type = other RNA
ataataactacacatcagtgc

SEQ ID NO: 72144 - RNA, 21 nt, synthetic construct
  source 1..21: mol_type = other RNA
ataatacaaatgatgaagggt

SEQ ID NO: 72145 - RNA, 21 nt, synthetic construct
  source 1..21: mol_type = other RNA
ataatacctaacagccggcat

SEQ ID NO: 72146 - RNA, 21 nt, synthetic construct
  source 1..21: mol_type = other RNA
ataatagctatcctaatgggc

SEQ ID NO: 72147 - RNA, 21 nt, synthetic construct
  source 1..21: mol_type = other RNA
ataatagtctcacgatacttt

SEQ ID NO: 72148 - RNA, 21 nt, synthetic construct
  source 1..21: mol_type = other RNA
ataatatctggactgaaaaga

SEQ ID NO: 72149 - RNA, 21 nt, synthetic construct
  source 1..21: mol_type = other RNA
ataatatgataccctcaaaag

SEQ ID NO: 72150 - RNA, 21 nt, synthetic construct
  source 1..21: mol_type = other RNA
ataatatgcctcatgcatcca

SEQ ID NO: 72151 - RNA, 21 nt, synthetic construct
  source 1..21: mol_type = other RNA
ataatcaaattcacagaactg

SEQ ID NO: 72152 - RNA, 21 nt, synthetic construct
  source 1..21: mol_type = other RNA
ataatcacagacgcaaaggat

SEQ ID NO: 72153 - RNA, 21 nt, synthetic construct
  source 1..21: mol_type = other RNA
ataatcagccgtgattgcacc

SEQ ID NO: 72154 - RNA, 21 nt, synthetic construct
  source 1..21: mol_type = other RNA
ataatcattgttaggtgctgg

SEQ ID NO: 72155 - RNA, 21 nt, synthetic construct
  source 1..21: mol_type = other RNA
ataatccaactgcagtctgtc

SEQ ID NO: 72156 - RNA, 21 nt, synthetic construct
  source 1..21: mol_type = other RNA
ataatccagatggacaaatta

SEQ ID NO: 72157 - RNA, 21 nt, synthetic construct
  source 1..21: mol_type = other RNA
ataatccattgggtacatacc

SEQ ID NO: 72158 - RNA, 21 nt, synthetic construct
  source 1..21: mol_type = other RNA
ataatcccgcaccttgatttt

SEQ ID NO: 72159 - RNA, 21 nt, synthetic construct
  source 1..21: mol_type = other RNA
ataatctaaccctcctcctct

SEQ ID NO: 72160 - RNA, 21 nt, synthetic construct
  source 1..21: mol_type = other RNA
ataatctttggtgctgataaa

SEQ ID NO: 72161 - RNA, 21 nt, synthetic construct
  source 1..21: mol_type = other RNA
ataatgaaagctcccaatgct

SEQ ID NO: 72162 - RNA, 21 nt, synthetic construct
  source 1..21: mol_type = other RNA
ataatgagatagaccagatgc

SEQ ID NO: 72163 - RNA, 21 nt, synthetic construct
  source 1..21: mol_type = other RNA
ataatgagtaacatgtggaac

SEQ ID NO: 72164 - RNA, 21 nt, synthetic construct
  source 1..21: mol_type = other RNA
ataatgatgactatgaaaagc

SEQ ID NO: 72165 - RNA, 21 nt, synthetic construct
  source 1..21: mol_type = other RNA
ataatgcacatgggcatgggt

SEQ ID NO: 72166 - RNA, 21 nt, synthetic construct
  source 1..21: mol_type = other RNA
ataatgctatccagaagagaa

SEQ ID NO: 72167 - RNA, 21 nt, synthetic construct
  source 1..21: mol_type = other RNA
ataatgctgttctctgtgtgg

SEQ ID NO: 72168 - RNA, 21 nt, synthetic construct
  source 1..21: mol_type = other RNA
ataatggagtactatgcagca

SEQ ID NO: 72169 - RNA, 21 nt, synthetic construct
  source 1..21: mol_type = other RNA
ataatgggcaatcagaaaaaa

SEQ ID NO: 72170 - RNA, 21 nt, synthetic construct
  source 1..21: mol_type = other RNA
ataatgtccagaggaggaaga

SEQ ID NO: 72171 - RNA, 21 nt, synthetic construct
  source 1..21: mol_type = other RNA
ataatgtctttttacacttgg

SEQ ID NO: 72172 - RNA, 21 nt, synthetic construct
  source 1..21: mol_type = other RNA
ataatgttagaattcaggaca

SEQ ID NO: 72173 - RNA, 21 nt, synthetic construct
  source 1..21: mol_type = other RNA
ataatgttttccgtgtgacaa

SEQ ID NO: 72174 - RNA, 21 nt, synthetic construct
  source 1..21: mol_type = other RNA
ataattaagacaatgtggagt

SEQ ID NO: 72175 - RNA, 21 nt, synthetic construct
  source 1..21: mol_type = other RNA
ataattctgccttcaatgttt

SEQ ID NO: 72176 - RNA, 21 nt, synthetic construct
  source 1..21: mol_type = other RNA
ataattctgtgccaagcaact

SEQ ID NO: 72177 - RNA, 21 nt, synthetic construct
  source 1..21: mol_type = other RNA
ataattcttcctgtcttggac

SEQ ID NO: 72178 - RNA, 21 nt, synthetic construct
  source 1..21: mol_type = other RNA
ataattgaacccactgagcat

SEQ ID NO: 72179 - RNA, 21 nt, synthetic construct
  source 1..21: mol_type = other RNA
ataattgctgcagtttttcca

SEQ ID NO: 72180 - RNA, 21 nt, synthetic construct
  source 1..21: mol_type = other RNA
ataattgcttttgctgaggga

SEQ ID NO: 72181 - RNA, 21 nt, synthetic construct
  source 1..21: mol_type = other RNA
ataattggttaaacttggtct

SEQ ID NO: 72182 - RNA, 21 nt, synthetic construct
  source 1..21: mol_type = other RNA
ataatttacatagtgctcttc

SEQ ID NO: 72183 - RNA, 21 nt, synthetic construct
  source 1..21: mol_type = other RNA
ataatttccaggtcattacat

SEQ ID NO: 72184 - RNA, 21 nt, synthetic construct
  source 1..21: mol_type = other RNA
ataatttccctcagaatttga

SEQ ID NO: 72185 - RNA, 21 nt, synthetic construct
  source 1..21: mol_type = other RNA
ataatttctgagagtattgcc

SEQ ID NO: 72186 - RNA, 21 nt, synthetic construct
  source 1..21: mol_type = other RNA
ataatttggatgaacgctaaa

SEQ ID NO: 72187 - RNA, 21 nt, synthetic construct
  source 1..21: mol_type = other RNA
ataatttggcaaaaaatgcag

SEQ ID NO: 72188 - RNA, 21 nt, synthetic construct
  source 1..21: mol_type = other RNA
ataattttttgagacggaatc

SEQ ID NO: 72189 - RNA, 21 nt, synthetic construct
  source 1..21: mol_type = other RNA
atacaaaaagcacctaccata

SEQ ID NO: 72190 - RNA, 21 nt, synthetic construct
  source 1..21: mol_type = other RNA
atacaaaccaaaaaatgtggc

SEQ ID NO: 72191 - RNA, 21 nt, synthetic construct
  source 1..21: mol_type = other RNA
atacaaaggtgttaagccgtt

SEQ ID NO: 72192 - RNA, 21 nt, synthetic construct
  source 1..21: mol_type = other RNA
atacaaataactccagctttt

SEQ ID NO: 72193 - RNA, 21 nt, synthetic construct
  source 1..21: mol_type = other RNA
atacaaatgatgaagggtttt

SEQ ID NO: 72194 - RNA, 21 nt, synthetic construct
  source 1..21: mol_type = other RNA
atacaacagcaccttttttgg

SEQ ID NO: 72195 - RNA, 21 nt, synthetic construct
  source 1..21: mol_type = other RNA
atacaaccggaaaatgcttaa

SEQ ID NO: 72196 - RNA, 21 nt, synthetic construct
  source 1..21: mol_type = other RNA
atacaactctgaccattgtgt

SEQ ID NO: 72197 - RNA, 21 nt, synthetic construct
  source 1..21: mol_type = other RNA
atacaactgctcataatagtc

SEQ ID NO: 72198 - RNA, 21 nt, synthetic construct
  source 1..21: mol_type = other RNA
atacaaggagacctactaaaa

SEQ ID NO: 72199 - RNA, 21 nt, synthetic construct
  source 1..21: mol_type = other RNA
atacaaggtcaatctgaaaaa

SEQ ID NO: 72200 - RNA, 21 nt, synthetic construct
  source 1..21: mol_type = other RNA
atacaatacttggatcttatc

SEQ ID NO: 72201 - RNA, 21 nt, synthetic construct
  source 1..21: mol_type = other RNA
atacaatgtgagccacataca

SEQ ID NO: 72202 - RNA, 21 nt, synthetic construct
  source 1..21: mol_type = other RNA
atacacaaaaagatctgtgga

SEQ ID NO: 72203 - RNA, 21 nt, synthetic construct
  source 1..21: mol_type = other RNA
atacacaagatctctatgcag

SEQ ID NO: 72204 - RNA, 21 nt, synthetic construct
  source 1..21: mol_type = other RNA
atacacacataagggggaatc

SEQ ID NO: 72205 - RNA, 21 nt, synthetic construct
  source 1..21: mol_type = other RNA
atacacagggaaaactacatg

SEQ ID NO: 72206 - RNA, 21 nt, synthetic construct
  source 1..21: mol_type = other RNA
atacacatccagaagtcactt

SEQ ID NO: 72207 - RNA, 21 nt, synthetic construct
  source 1..21: mol_type = other RNA
atacacatgttgagtcttgtt

SEQ ID NO: 72208 - RNA, 21 nt, synthetic construct
  source 1..21: mol_type = other RNA
atacaccaaactcaaaaggac

SEQ ID NO: 72209 - RNA, 21 nt, synthetic construct
  source 1..21: mol_type = other RNA
atacacctggatcaagtggga

SEQ ID NO: 72210 - RNA, 21 nt, synthetic construct
  source 1..21: mol_type = other RNA
atacacgagtgtgtttcgcaa

SEQ ID NO: 72211 - RNA, 21 nt, synthetic construct
  source 1..21: mol_type = other RNA
atacacgtggctgtcaaaaat

SEQ ID NO: 72212 - RNA, 21 nt, synthetic construct
  source 1..21: mol_type = other RNA
atacactcatttcctttcagt

SEQ ID NO: 72213 - RNA, 21 nt, synthetic construct
  source 1..21: mol_type = other RNA
atacacttctatccagtgaca

SEQ ID NO: 72214 - RNA, 21 nt, synthetic construct
  source 1..21: mol_type = other RNA
atacacttttcaggtattgag

SEQ ID NO: 72215 - RNA, 21 nt, synthetic construct
  source 1..21: mol_type = other RNA
atacagagcacagactcaagc

SEQ ID NO: 72216 - RNA, 21 nt, synthetic construct
  source 1..21: mol_type = other RNA
atacagcaaatctctagaact

SEQ ID NO: 72217 - RNA, 21 nt, synthetic construct
  source 1..21: mol_type = other RNA
atacagctccaaagaacagga

SEQ ID NO: 72218 - RNA, 21 nt, synthetic construct
  source 1..21: mol_type = other RNA
atacaggaagagactatctct

SEQ ID NO: 72219 - RNA, 21 nt, synthetic construct
  source 1..21: mol_type = other RNA
atacaggagttccgatttctc

SEQ ID NO: 72220 - RNA, 21 nt, synthetic construct
  source 1..21: mol_type = other RNA
atacaggtgcttacagactga

SEQ ID NO: 72221 - RNA, 21 nt, synthetic construct
  source 1..21: mol_type = other RNA
atacagtaaagccccattgta

SEQ ID NO: 72222 - RNA, 21 nt, synthetic construct
  source 1..21: mol_type = other RNA
atacagtgccttcagctatgg

SEQ ID NO: 72223 - RNA, 21 nt, synthetic construct
  source 1..21: mol_type = other RNA
atacagtgtttttgaattctg

SEQ ID NO: 72224 - RNA, 21 nt, synthetic construct
  source 1..21: mol_type = other RNA
atacagttggaactcttgcgg

SEQ ID NO: 72225 - RNA, 21 nt, synthetic construct
  source 1..21: mol_type = other RNA
atacagttttgaccaaaacaa

SEQ ID NO: 72226 - RNA, 21 nt, synthetic construct
  source 1..21: mol_type = other RNA
atacatgacatggttttccta

SEQ ID NO: 72227 - RNA, 21 nt, synthetic construct
  source 1..21: mol_type = other RNA
atacatgaggcctctcccctt

SEQ ID NO: 72228 - RNA, 21 nt, synthetic construct
  source 1..21: mol_type = other RNA
atacatgtcatgttcccggat

SEQ ID NO: 72229 - RNA, 21 nt, synthetic construct
  source 1..21: mol_type = other RNA
atacatgtttagcaagattac

SEQ ID NO: 72230 - RNA, 21 nt, synthetic construct
  source 1..21: mol_type = other RNA
ataccaaaaaaggtgctgttg

SEQ ID NO: 72231 - RNA, 21 nt, synthetic construct
  source 1..21: mol_type = other RNA
ataccaaaacccttgggatgc

SEQ ID NO: 72232 - RNA, 21 nt, synthetic construct
  source 1..21: mol_type = other RNA
ataccaaattcacgagactgt

SEQ ID NO: 72233 - RNA, 21 nt, synthetic construct
  source 1..21: mol_type = other RNA
ataccaagcccggcacggtgg

SEQ ID NO: 72234 - RNA, 21 nt, synthetic construct
  source 1..21: mol_type = other RNA
ataccaccacattcggccaag

SEQ ID NO: 72235 - RNA, 21 nt, synthetic construct
  source 1..21: mol_type = other RNA
ataccacctgaaatctgattt

SEQ ID NO: 72236 - RNA, 21 nt, synthetic construct
  source 1..21: mol_type = other RNA
ataccacctgtcagaaacacc

SEQ ID NO: 72237 - RNA, 21 nt, synthetic construct
  source 1..21: mol_type = other RNA
ataccacttagtttgcaatac

SEQ ID NO: 72238 - RNA, 21 nt, synthetic construct
  source 1..21: mol_type = other RNA
ataccagaccctttatcggat

SEQ ID NO: 72239 - RNA, 21 nt, synthetic construct
  source 1..21: mol_type = other RNA
ataccagagattgggaaaatc

SEQ ID NO: 72240 - RNA, 21 nt, synthetic construct
  source 1..21: mol_type = other RNA
ataccagaggttaaagcaaca

SEQ ID NO: 72241 - RNA, 21 nt, synthetic construct
  source 1..21: mol_type = other RNA
ataccaggttttggtaatggg

SEQ ID NO: 72242 - RNA, 21 nt, synthetic construct
  source 1..21: mol_type = other RNA
ataccataaagtcagaggagc

SEQ ID NO: 72243 - RNA, 21 nt, synthetic construct
  source 1..21: mol_type = other RNA
atacccaagtaaacaactgac

SEQ ID NO: 72244 - RNA, 21 nt, synthetic construct
  source 1..21: mol_type = other RNA
atacccacaagaaaaacctaa

SEQ ID NO: 72245 - RNA, 21 nt, synthetic construct
  source 1..21: mol_type = other RNA
atacccaggtgtgagattgat

SEQ ID NO: 72246 - RNA, 21 nt, synthetic construct
  source 1..21: mol_type = other RNA
ataccccaaccctacctaggg

SEQ ID NO: 72247 - RNA, 21 nt, synthetic construct
  source 1..21: mol_type = other RNA
ataccccctggaaataagttt

SEQ ID NO: 72248 - RNA, 21 nt, synthetic construct
  source 1..21: mol_type = other RNA
atacccctccctacctggcag

SEQ ID NO: 72249 - RNA, 21 nt, synthetic construct
  source 1..21: mol_type = other RNA
ataccctcaaaagatgcagaa

SEQ ID NO: 72250 - RNA, 21 nt, synthetic construct
  source 1..21: mol_type = other RNA
atacccttctgttaatagata

SEQ ID NO: 72251 - RNA, 21 nt, synthetic construct
  source 1..21: mol_type = other RNA
ataccgacggctcaggcctgt

SEQ ID NO: 72252 - RNA, 21 nt, synthetic construct
  source 1..21: mol_type = other RNA
ataccgagtaatgggatggct

SEQ ID NO: 72253 - RNA, 21 nt, synthetic construct
  source 1..21: mol_type = other RNA
atacctaacagccggcatatg

SEQ ID NO: 72254 - RNA, 21 nt, synthetic construct
  source 1..21: mol_type = other RNA
atacctagtacgtaacctaaa

SEQ ID NO: 72255 - RNA, 21 nt, synthetic construct
  source 1..21: mol_type = other RNA
atacctagttttccaatccgg

SEQ ID NO: 72256 - RNA, 21 nt, synthetic construct
  source 1..21: mol_type = other RNA
atacctatttagagggatgaa

SEQ ID NO: 72257 - RNA, 21 nt, synthetic construct
  source 1..21: mol_type = other RNA
atacctgcaggttgatactag

SEQ ID NO: 72258 - RNA, 21 nt, synthetic construct
  source 1..21: mol_type = other RNA
atacctggtccttaaatttct

SEQ ID NO: 72259 - RNA, 21 nt, synthetic construct
  source 1..21: mol_type = other RNA
atacctgtagaaaatagggac

SEQ ID NO: 72260 - RNA, 21 nt, synthetic construct
  source 1..21: mol_type = other RNA
atacctgttgaatagcaactg

SEQ ID NO: 72261 - RNA, 21 nt, synthetic construct
  source 1..21: mol_type = other RNA
ataccttatgtgaaagtagag

SEQ ID NO: 72262 - RNA, 21 nt, synthetic construct
  source 1..21: mol_type = other RNA
ataccttcttgagagtctctt

SEQ ID NO: 72263 - RNA, 21 nt, synthetic construct
  source 1..21: mol_type = other RNA
ataccttgaaaggatactgag

SEQ ID NO: 72264 - RNA, 21 nt, synthetic construct
  source 1..21: mol_type = other RNA
atacgaaagtgctctaccctt

SEQ ID NO: 72265 - RNA, 21 nt, synthetic construct
  source 1..21: mol_type = other RNA
atacggaaatataacattacc

SEQ ID NO: 72266 - RNA, 21 nt, synthetic construct
  source 1..21: mol_type = other RNA
atacggaatgattccacttat

SEQ ID NO: 72267 - RNA, 21 nt, synthetic construct
  source 1..21: mol_type = other RNA
atacggagtctcgctctgtcc

SEQ ID NO: 72268 - RNA, 21 nt, synthetic construct
  source 1..21: mol_type = other RNA
atacgtatatgaaaagcccaa

SEQ ID NO: 72269 - RNA, 21 nt, synthetic construct
  source 1..21: mol_type = other RNA
atacgtatttatcatgtcttc

SEQ ID NO: 72270 - RNA, 21 nt, synthetic construct
  source 1..21: mol_type = other RNA
atacgtcgtcccccatcccct

SEQ ID NO: 72271 - RNA, 21 nt, synthetic construct
  source 1..21: mol_type = other RNA
atacgtgtatactgggtgtga

SEQ ID NO: 72272 - RNA, 21 nt, synthetic construct
  source 1..21: mol_type = other RNA
atacgttaaaggaaaagagat

SEQ ID NO: 72273 - RNA, 21 nt, synthetic construct
  source 1..21: mol_type = other RNA
atacgttaactgtattgcaaa

SEQ ID NO: 72274 - RNA, 21 nt, synthetic construct
  source 1..21: mol_type = other RNA
atactaaatacaccaaactca

SEQ ID NO: 72275 - RNA, 21 nt, synthetic construct
  source 1..21: mol_type = other RNA
atactaacgatccttactacc

SEQ ID NO: 72276 - RNA, 21 nt, synthetic construct
  source 1..21: mol_type = other RNA
atactacaagagttcccctat

SEQ ID NO: 72277 - RNA, 21 nt, synthetic construct
  source 1..21: mol_type = other RNA
atactacgcctagctgacttt

SEQ ID NO: 72278 - RNA, 21 nt, synthetic construct
  source 1..21: mol_type = other RNA
atactactgcaaatatccaat

SEQ ID NO: 72279 - RNA, 21 nt, synthetic construct
  source 1..21: mol_type = other RNA
atactagcaaactgaatcaga

SEQ ID NO: 72280 - RNA, 21 nt, synthetic construct
  source 1..21: mol_type = other RNA
atactagtagaaagcaggttc

SEQ ID NO: 72281 - RNA, 21 nt, synthetic construct
  source 1..21: mol_type = other RNA
atactagtaggatgaattaca

SEQ ID NO: 72282 - RNA, 21 nt, synthetic construct
  source 1..21: mol_type = other RNA
atactagtttagtgcagtatc

SEQ ID NO: 72283 - RNA, 21 nt, synthetic construct
  source 1..21: mol_type = other RNA
atactatgtatgtggctcaca

SEQ ID NO: 72284 - RNA, 21 nt, synthetic construct
  source 1..21: mol_type = other RNA
atactattttctatagtggct

SEQ ID NO: 72285 - RNA, 21 nt, synthetic construct
  source 1..21: mol_type = other RNA
atactcaaactatgcttaatc

SEQ ID NO: 72286 - RNA, 21 nt, synthetic construct
  source 1..21: mol_type = other RNA
atactcaacatcactagctat

SEQ ID NO: 72287 - RNA, 21 nt, synthetic construct
  source 1..21: mol_type = other RNA
atactcaagggctttcaatag

SEQ ID NO: 72288 - RNA, 21 nt, synthetic construct
  source 1..21: mol_type = other RNA
atactcaatcagtggccagtg

SEQ ID NO: 72289 - RNA, 21 nt, synthetic construct
  source 1..21: mol_type = other RNA
atactcagccccctcgaagag

SEQ ID NO: 72290 - RNA, 21 nt, synthetic construct
  source 1..21: mol_type = other RNA
atactcatgcttgctccagag

SEQ ID NO: 72291 - RNA, 21 nt, synthetic construct
  source 1..21: mol_type = other RNA
atactccaccagcatcttttg

SEQ ID NO: 72292 - RNA, 21 nt, synthetic construct
  source 1..21: mol_type = other RNA
atactcgtagttttttggtag

SEQ ID NO: 72293 - RNA, 21 nt, synthetic construct
  source 1..21: mol_type = other RNA
atactcgtgtgtctcataaag

SEQ ID NO: 72294 - RNA, 21 nt, synthetic construct
  source 1..21: mol_type = other RNA
atactctagtggtgcttaatt

SEQ ID NO: 72295 - RNA, 21 nt, synthetic construct
  source 1..21: mol_type = other RNA
atactctcagaaattataagc

SEQ ID NO: 72296 - RNA, 21 nt, synthetic construct
  source 1..21: mol_type = other RNA
atactctgagacaggatccag

SEQ ID NO: 72297 - RNA, 21 nt, synthetic construct
  source 1..21: mol_type = other RNA
atactgaaagacagacctcta

SEQ ID NO: 72298 - RNA, 21 nt, synthetic construct
  source 1..21: mol_type = other RNA
atactgaaggcatagggcctt

SEQ ID NO: 72299 - RNA, 21 nt, synthetic construct
  source 1..21: mol_type = other RNA
atactgaagttctcaggggta

SEQ ID NO: 72300 - RNA, 21 nt, synthetic construct
  source 1..21: mol_type = other RNA
atactgactagtggctcatac

SEQ ID NO: 72301 - RNA, 21 nt, synthetic construct
  source 1..21: mol_type = other RNA
atactgcactaaactagtatc

SEQ ID NO: 72302 - RNA, 21 nt, synthetic construct
  source 1..21: mol_type = other RNA
atactgcactctcaaaattaa

SEQ ID NO: 72303 - RNA, 21 nt, synthetic construct
  source 1..21: mol_type = other RNA
atactgcagcacttttaaggc

SEQ ID NO: 72304 - RNA, 21 nt, synthetic construct
  source 1..21: mol_type = other RNA
atactgcatattgaagccagc

SEQ ID NO: 72305 - RNA, 21 nt, synthetic construct
  source 1..21: mol_type = other RNA
atactgcattgtgcacttaaa

SEQ ID NO: 72306 - RNA, 21 nt, synthetic construct
  source 1..21: mol_type = other RNA
atactggaaaactagagatgg

SEQ ID NO: 72307 - RNA, 21 nt, synthetic construct
  source 1..21: mol_type = other RNA
atactggaaggactcacagct

SEQ ID NO: 72308 - RNA, 21 nt, synthetic construct
  source 1..21: mol_type = other RNA
atactggccatgttttatttc

SEQ ID NO: 72309 - RNA, 21 nt, synthetic construct
  source 1..21: mol_type = other RNA
atactgggtgtgatggcgcat

SEQ ID NO: 72310 - RNA, 21 nt, synthetic construct
  source 1..21: mol_type = other RNA
atactgtaaccctgtttccct

SEQ ID NO: 72311 - RNA, 21 nt, synthetic construct
  source 1..21: mol_type = other RNA
atactgtagaatgtttttccg

SEQ ID NO: 72312 - RNA, 21 nt, synthetic construct
  source 1..21: mol_type = other RNA
atactgtcacaggctttccta

SEQ ID NO: 72313 - RNA, 21 nt, synthetic construct
  source 1..21: mol_type = other RNA
atactgtctcagtcccaaatg

SEQ ID NO: 72314 - RNA, 21 nt, synthetic construct
  source 1..21: mol_type = other RNA
atactgtgatgattttagaag

SEQ ID NO: 72315 - RNA, 21 nt, synthetic construct
  source 1..21: mol_type = other RNA
atactgtgcagtggatgacta

SEQ ID NO: 72316 - RNA, 21 nt, synthetic construct
  source 1..21: mol_type = other RNA
atactgttatgacaagactac

SEQ ID NO: 72317 - RNA, 21 nt, synthetic construct
  source 1..21: mol_type = other RNA
atacttaagagcatgttgggc

SEQ ID NO: 72318 - RNA, 21 nt, synthetic construct
  source 1..21: mol_type = other RNA
atacttaatagcccaacaggg

SEQ ID NO: 72319 - RNA, 21 nt, synthetic construct
  source 1..21: mol_type = other RNA
atacttagctaatttcagaga

SEQ ID NO: 72320 - RNA, 21 nt, synthetic construct
  source 1..21: mol_type = other RNA
atacttcaaagggtcactatt

SEQ ID NO: 72321 - RNA, 21 nt, synthetic construct
  source 1..21: mol_type = other RNA
atacttcaatgctacagtaag

SEQ ID NO: 72322 - RNA, 21 nt, synthetic construct
  source 1..21: mol_type = other RNA
atacttcatctttcctgatca

SEQ ID NO: 72323 - RNA, 21 nt, synthetic construct
  source 1..21: mol_type = other RNA
atacttgaacattctgtagaa

SEQ ID NO: 72324 - RNA, 21 nt, synthetic construct
  source 1..21: mol_type = other RNA
atacttgattacaagggtgac

SEQ ID NO: 72325 - RNA, 21 nt, synthetic construct
  source 1..21: mol_type = other RNA
atacttgctttattacttcag

SEQ ID NO: 72326 - RNA, 21 nt, synthetic construct
  source 1..21: mol_type = other RNA
atacttggacaggggacatga

SEQ ID NO: 72327 - RNA, 21 nt, synthetic construct
  source 1..21: mol_type = other RNA
atacttggatcttatctgctg

SEQ ID NO: 72328 - RNA, 21 nt, synthetic construct
  source 1..21: mol_type = other RNA
atacttgtcaagttctgattt

SEQ ID NO: 72329 - RNA, 21 nt, synthetic construct
  source 1..21: mol_type = other RNA
atacttgtgtagcgggaaaaa

SEQ ID NO: 72330 - RNA, 21 nt, synthetic construct
  source 1..21: mol_type = other RNA
atactttagacatgggctaaa

SEQ ID NO: 72331 - RNA, 21 nt, synthetic construct
  source 1..21: mol_type = other RNA
atactttcacactgattttct

SEQ ID NO: 72332 - RNA, 21 nt, synthetic construct
  source 1..21: mol_type = other RNA
atactttcccatctctagttt

SEQ ID NO: 72333 - RNA, 21 nt, synthetic construct
  source 1..21: mol_type = other RNA
atactttggaaggtaggaggg

SEQ ID NO: 72334 - RNA, 21 nt, synthetic construct
  source 1..21: mol_type = other RNA
atactttgtcaggcatgctaa

SEQ ID NO: 72335 - RNA, 21 nt, synthetic construct
  source 1..21: mol_type = other RNA
atacttttcaactgaacaacg

SEQ ID NO: 72336 - RNA, 21 nt, synthetic construct
  source 1..21: mol_type = other RNA
atagaaaacttgagcagatca

SEQ ID NO: 72337 - RNA, 21 nt, synthetic construct
  source 1..21: mol_type = other RNA
atagaaaagacaatagctagt

SEQ ID NO: 72338 - RNA, 21 nt, synthetic construct
  source 1..21: mol_type = other RNA
atagaaaatccttacttccag

SEQ ID NO: 72339 - RNA, 21 nt, synthetic construct
  source 1..21: mol_type = other RNA
atagaaagcaccagggcctct

SEQ ID NO: 72340 - RNA, 21 nt, synthetic construct
  source 1..21: mol_type = other RNA
atagaaaggagaccagttagg

SEQ ID NO: 72341 - RNA, 21 nt, synthetic construct
  source 1..21: mol_type = other RNA
atagaaagttagtgtctaatg

SEQ ID NO: 72342 - RNA, 21 nt, synthetic construct
  source 1..21: mol_type = other RNA
atagaactgtcacaattcaca

SEQ ID NO: 72343 - RNA, 21 nt, synthetic construct
  source 1..21: mol_type = other RNA
atagaagagcagtgtgttctg

SEQ ID NO: 72344 - RNA, 21 nt, synthetic construct
  source 1..21: mol_type = other RNA
atagaagcgctcttcaagcat

SEQ ID NO: 72345 - RNA, 21 nt, synthetic construct
  source 1..21: mol_type = other RNA
atagaaggccagagggaatct

SEQ ID NO: 72346 - RNA, 21 nt, synthetic construct
  source 1..21: mol_type = other RNA
atagaagggagaacccaggaa

SEQ ID NO: 72347 - RNA, 21 nt, synthetic construct
  source 1..21: mol_type = other RNA
atagaagtaaatcccggccag

SEQ ID NO: 72348 - RNA, 21 nt, synthetic construct
  source 1..21: mol_type = other RNA
atagaagtgtatcagatgctt

SEQ ID NO: 72349 - RNA, 21 nt, synthetic construct
  source 1..21: mol_type = other RNA
atagaataccacttagtttgc

SEQ ID NO: 72350 - RNA, 21 nt, synthetic construct
  source 1..21: mol_type = other RNA
atagacaaagacaagttctta

SEQ ID NO: 72351 - RNA, 21 nt, synthetic construct
  source 1..21: mol_type = other RNA
atagacagcatccccagaaag

SEQ ID NO: 72352 - RNA, 21 nt, synthetic construct
  source 1..21: mol_type = other RNA
atagaccagatgcgtggttca

SEQ ID NO: 72353 - RNA, 21 nt, synthetic construct
  source 1..21: mol_type = other RNA
atagacccaaagcaaaagcaa

SEQ ID NO: 72354 - RNA, 21 nt, synthetic construct
  source 1..21: mol_type = other RNA
atagacctgaatgactgttgc

SEQ ID NO: 72355 - RNA, 21 nt, synthetic construct
  source 1..21: mol_type = other RNA
atagactcccaacttataata

SEQ ID NO: 72356 - RNA, 21 nt, synthetic construct
  source 1..21: mol_type = other RNA
atagactcttcagaggtctgt

SEQ ID NO: 72357 - RNA, 21 nt, synthetic construct
  source 1..21: mol_type = other RNA
atagactggattaaggagatg

SEQ ID NO: 72358 - RNA, 21 nt, synthetic construct
  source 1..21: mol_type = other RNA
atagactttagagtcagttgt

SEQ ID NO: 72359 - RNA, 21 nt, synthetic construct
  source 1..21: mol_type = other RNA
atagagagattcaagaaacca

SEQ ID NO: 72360 - RNA, 21 nt, synthetic construct
  source 1..21: mol_type = other RNA
atagagatcttgtgtatcttt

SEQ ID NO: 72361 - RNA, 21 nt, synthetic construct
  source 1..21: mol_type = other RNA
atagaggatgggcattccaga

SEQ ID NO: 72362 - RNA, 21 nt, synthetic construct
  source 1..21: mol_type = other RNA
atagagggagcatcttcccat

SEQ ID NO: 72363 - RNA, 21 nt, synthetic construct
  source 1..21: mol_type = other RNA
atagagggcctaaataaaaca

SEQ ID NO: 72364 - RNA, 21 nt, synthetic construct
  source 1..21: mol_type = other RNA
atagaggtctgtctttcagta

SEQ ID NO: 72365 - RNA, 21 nt, synthetic construct
  source 1..21: mol_type = other RNA
atagagtaccaggtcagccag

SEQ ID NO: 72366 - RNA, 21 nt, synthetic construct
  source 1..21: mol_type = other RNA
atagagttccatctgttatag

SEQ ID NO: 72367 - RNA, 21 nt, synthetic construct
  source 1..21: mol_type = other RNA
atagataaactggaattcatc

SEQ ID NO: 72368 - RNA, 21 nt, synthetic construct
  source 1..21: mol_type = other RNA
atagataaggttgttcttggt

SEQ ID NO: 72369 - RNA, 21 nt, synthetic construct
  source 1..21: mol_type = other RNA
atagataggtcatgtacataa

SEQ ID NO: 72370 - RNA, 21 nt, synthetic construct
  source 1..21: mol_type = other RNA
atagatcacaaggactggctt

SEQ ID NO: 72371 - RNA, 21 nt, synthetic construct
  source 1..21: mol_type = other RNA
atagatcaccaggggctgggg

SEQ ID NO: 72372 - RNA, 21 nt, synthetic construct
  source 1..21: mol_type = other RNA
atagatgaaactaaatgtgag

SEQ ID NO: 72373 - RNA, 21 nt, synthetic construct
  source 1..21: mol_type = other RNA
atagatgacgaaagtgaagcc

SEQ ID NO: 72374 - RNA, 21 nt, synthetic construct
  source 1..21: mol_type = other RNA
atagatgcctagaaaggaatt

SEQ ID NO: 72375 - RNA, 21 nt, synthetic construct
  source 1..21: mol_type = other RNA
atagatgttatgccccctctt

SEQ ID NO: 72376 - RNA, 21 nt, synthetic construct
  source 1..21: mol_type = other RNA
atagcaactgttttttcctcc

SEQ ID NO: 72377 - RNA, 21 nt, synthetic construct
  source 1..21: mol_type = other RNA
atagcaacttgcagaagagtg

SEQ ID NO: 72378 - RNA, 21 nt, synthetic construct
  source 1..21: mol_type = other RNA
atagcaaggaagcagaatgtc

SEQ ID NO: 72379 - RNA, 21 nt, synthetic construct
  source 1..21: mol_type = other RNA
atagcagaaacacaggactgt

SEQ ID NO: 72380 - RNA, 21 nt, synthetic construct
  source 1..21: mol_type = other RNA
atagcagaaccttagaaattt

SEQ ID NO: 72381 - RNA, 21 nt, synthetic construct
  source 1..21: mol_type = other RNA
atagcagaatggccctgcgat

SEQ ID NO: 72382 - RNA, 21 nt, synthetic construct
  source 1..21: mol_type = other RNA
atagcagcattgtttacagta

SEQ ID NO: 72383 - RNA, 21 nt, synthetic construct
  source 1..21: mol_type = other RNA
atagcaggattcttgttaagc

SEQ ID NO: 72384 - RNA, 21 nt, synthetic construct
  source 1..21: mol_type = other RNA
atagcagggtcatgcacacgc

SEQ ID NO: 72385 - RNA, 21 nt, synthetic construct
  source 1..21: mol_type = other RNA
atagcagtgctgaaagctaga

SEQ ID NO: 72386 - RNA, 21 nt, synthetic construct
  source 1..21: mol_type = other RNA
atagcagtgggaagtggagtg

SEQ ID NO: 72387 - RNA, 21 nt, synthetic construct
  source 1..21: mol_type = other RNA
atagcatcttagctcttccct

SEQ ID NO: 72388 - RNA, 21 nt, synthetic construct
  source 1..21: mol_type = other RNA
atagcattatcccagatctaa

SEQ ID NO: 72389 - RNA, 21 nt, synthetic construct
  source 1..21: mol_type = other RNA
atagccagtgcagcaagcagt

SEQ ID NO: 72390 - RNA, 21 nt, synthetic construct
  source 1..21: mol_type = other RNA
atagccataagagtccccaac

SEQ ID NO: 72391 - RNA, 21 nt, synthetic construct
  source 1..21: mol_type = other RNA
atagcccaacagggttttgtt

SEQ ID NO: 72392 - RNA, 21 nt, synthetic construct
  source 1..21: mol_type = other RNA
atagccccttatcaggaaagt

SEQ ID NO: 72393 - RNA, 21 nt, synthetic construct
  source 1..21: mol_type = other RNA
atagcctcctaagttttgggg

SEQ ID NO: 72394 - RNA, 21 nt, synthetic construct
  source 1..21: mol_type = other RNA
atagcgaaaggtacgacgctc

SEQ ID NO: 72395 - RNA, 21 nt, synthetic construct
  source 1..21: mol_type = other RNA
atagcgagacctcatctctgc

SEQ ID NO: 72396 - RNA, 21 nt, synthetic construct
  source 1..21: mol_type = other RNA
atagctagtgatgttgagtat

SEQ ID NO: 72397 - RNA, 21 nt, synthetic construct
  source 1..21: mol_type = other RNA
atagctagtgtcttagtctga

SEQ ID NO: 72398 - RNA, 21 nt, synthetic construct
  source 1..21: mol_type = other RNA
atagctatcctaatgggcgtg

SEQ ID NO: 72399 - RNA, 21 nt, synthetic construct
  source 1..21: mol_type = other RNA
atagctcactagagcttcaac

SEQ ID NO: 72400 - RNA, 21 nt, synthetic construct
  source 1..21: mol_type = other RNA
atagctccaaaagcgaaaggc

SEQ ID NO: 72401 - RNA, 21 nt, synthetic construct
  source 1..21: mol_type = other RNA
atagctgaaggcactgtatgg

SEQ ID NO: 72402 - RNA, 21 nt, synthetic construct
  source 1..21: mol_type = other RNA
atagctgagaagtaacattac

SEQ ID NO: 72403 - RNA, 21 nt, synthetic construct
  source 1..21: mol_type = other RNA
atagctgtggaagcacagtct

SEQ ID NO: 72404 - RNA, 21 nt, synthetic construct
  source 1..21: mol_type = other RNA
atagcttcctaagaaagggtg

SEQ ID NO: 72405 - RNA, 21 nt, synthetic construct
  source 1..21: mol_type = other RNA
atagcttctgagctgttaatg

SEQ ID NO: 72406 - RNA, 21 nt, synthetic construct
  source 1..21: mol_type = other RNA
atagcttgacaaaaggcccct

SEQ ID NO: 72407 - RNA, 21 nt, synthetic construct
  source 1..21: mol_type = other RNA
ataggaaagtgacagatgaga

SEQ ID NO: 72408 - RNA, 21 nt, synthetic construct
  source 1..21: mol_type = other RNA
ataggaaatacttgatctaca

SEQ ID NO: 72409 - RNA, 21 nt, synthetic construct
  source 1..21: mol_type = other RNA
ataggaagtccatgaaactta

SEQ ID NO: 72410 - RNA, 21 nt, synthetic construct
  source 1..21: mol_type = other RNA
ataggaagtggctagacggaa

SEQ ID NO: 72411 - RNA, 21 nt, synthetic construct
  source 1..21: mol_type = other RNA
ataggaatagtattcaggaca

SEQ ID NO: 72412 - RNA, 21 nt, synthetic construct
  source 1..21: mol_type = other RNA
ataggagactatcgttatatc

SEQ ID NO: 72413 - RNA, 21 nt, synthetic construct
  source 1..21: mol_type = other RNA
ataggagttcattcgtagcag

SEQ ID NO: 72414 - RNA, 21 nt, synthetic construct
  source 1..21: mol_type = other RNA
ataggataatgtccagaggag

SEQ ID NO: 72415 - RNA, 21 nt, synthetic construct
  source 1..21: mol_type = other RNA
ataggatgggcagactccttc

SEQ ID NO: 72416 - RNA, 21 nt, synthetic construct
  source 1..21: mol_type = other RNA
ataggattaagacactacaaa

SEQ ID NO: 72417 - RNA, 21 nt, synthetic construct
  source 1..21: mol_type = other RNA
ataggcaaattcatagatcac

SEQ ID NO: 72418 - RNA, 21 nt, synthetic construct
  source 1..21: mol_type = other RNA
ataggcaatgagtctgacata

SEQ ID NO: 72419 - RNA, 21 nt, synthetic construct
  source 1..21: mol_type = other RNA
ataggcaatttagaattctct

SEQ ID NO: 72420 - RNA, 21 nt, synthetic construct
  source 1..21: mol_type = other RNA
ataggcacgcgcccccatgcc

SEQ ID NO: 72421 - RNA, 21 nt, synthetic construct
  source 1..21: mol_type = other RNA
ataggcagtcctctactttca

SEQ ID NO: 72422 - RNA, 21 nt, synthetic construct
  source 1..21: mol_type = other RNA
ataggcatctctcccttcctg

SEQ ID NO: 72423 - RNA, 21 nt, synthetic construct
  source 1..21: mol_type = other RNA
ataggcctaggtgtgataact

SEQ ID NO: 72424 - RNA, 21 nt, synthetic construct
  source 1..21: mol_type = other RNA
ataggcttagtacagccatca

SEQ ID NO: 72425 - RNA, 21 nt, synthetic construct
  source 1..21: mol_type = other RNA
atagggacggccttctttttt

SEQ ID NO: 72426 - RNA, 21 nt, synthetic construct
  source 1..21: mol_type = other RNA
atagggatgttgcctactagc

SEQ ID NO: 72427 - RNA, 21 nt, synthetic construct
  source 1..21: mol_type = other RNA
atagggcctcaaatttcattt

SEQ ID NO: 72428 - RNA, 21 nt, synthetic construct
  source 1..21: mol_type = other RNA
atagggccttctactttaata

SEQ ID NO: 72429 - RNA, 21 nt, synthetic construct
  source 1..21: mol_type = other RNA
ataggggaactcttgtagtat

SEQ ID NO: 72430 - RNA, 21 nt, synthetic construct
  source 1..21: mol_type = other RNA
atagggtgctactcaaagttt

SEQ ID NO: 72431 - RNA, 21 nt, synthetic construct
  source 1..21: mol_type = other RNA
ataggtaatactctagtggtg

SEQ ID NO: 72432 - RNA, 21 nt, synthetic construct
  source 1..21: mol_type = other RNA
ataggtagtacatattcattg

SEQ ID NO: 72433 - RNA, 21 nt, synthetic construct
  source 1..21: mol_type = other RNA
ataggtattcatgctgtgaat

SEQ ID NO: 72434 - RNA, 21 nt, synthetic construct
  source 1..21: mol_type = other RNA
ataggtcactgcagtctcaaa

SEQ ID NO: 72435 - RNA, 21 nt, synthetic construct
  source 1..21: mol_type = other RNA
ataggtgtgtgttccttccta

SEQ ID NO: 72436 - RNA, 21 nt, synthetic construct
  source 1..21: mol_type = other RNA
ataggttgaatagggcctcaa

SEQ ID NO: 72437 - RNA, 21 nt, synthetic construct
  source 1..21: mol_type = other RNA
atagtaactttctgcttaaag

SEQ ID NO: 72438 - RNA, 21 nt, synthetic construct
  source 1..21: mol_type = other RNA
atagtaataaaggcaatgctc

SEQ ID NO: 72439 - RNA, 21 nt, synthetic construct
  source 1..21: mol_type = other RNA
atagtactgaccatctcagca

SEQ ID NO: 72440 - RNA, 21 nt, synthetic construct
  source 1..21: mol_type = other RNA
atagtagctgttgaattgttg

SEQ ID NO: 72441 - RNA, 21 nt, synthetic construct
  source 1..21: mol_type = other RNA
atagtagcttcaatgagggca

SEQ ID NO: 72442 - RNA, 21 nt, synthetic construct
  source 1..21: mol_type = other RNA
atagtagttgctcagaaaatt

SEQ ID NO: 72443 - RNA, 21 nt, synthetic construct
  source 1..21: mol_type = other RNA
atagtattacctcccatgcat

SEQ ID NO: 72444 - RNA, 21 nt, synthetic construct
  source 1..21: mol_type = other RNA
atagtattcaggacagattaa

SEQ ID NO: 72445 - RNA, 21 nt, synthetic construct
  source 1..21: mol_type = other RNA
atagtattccatggtatgtgc

SEQ ID NO: 72446 - RNA, 21 nt, synthetic construct
  source 1..21: mol_type = other RNA
atagtcaagtaacagttcaat

SEQ ID NO: 72447 - RNA, 21 nt, synthetic construct
  source 1..21: mol_type = other RNA
atagtcattccgctaaacatt

SEQ ID NO: 72448 - RNA, 21 nt, synthetic construct
  source 1..21: mol_type = other RNA
atagtccactttccatcttag

SEQ ID NO: 72449 - RNA, 21 nt, synthetic construct
  source 1..21: mol_type = other RNA
atagtctcacgatacttttta

SEQ ID NO: 72450 - RNA, 21 nt, synthetic construct
  source 1..21: mol_type = other RNA
atagtctcctatattgtcaat

SEQ ID NO: 72451 - RNA, 21 nt, synthetic construct
  source 1..21: mol_type = other RNA
atagtctcttcctgtatatct

SEQ ID NO: 72452 - RNA, 21 nt, synthetic construct
  source 1..21: mol_type = other RNA
atagtcttagctcttaagctt

SEQ ID NO: 72453 - RNA, 21 nt, synthetic construct
  source 1..21: mol_type = other RNA
atagtcttccaattgcagaaa

SEQ ID NO: 72454 - RNA, 21 nt, synthetic construct
  source 1..21: mol_type = other RNA
atagtgaccctttgaagtatg

SEQ ID NO: 72455 - RNA, 21 nt, synthetic construct
  source 1..21: mol_type = other RNA
atagtgctcttctgatcacag

SEQ ID NO: 72456 - RNA, 21 nt, synthetic construct
  source 1..21: mol_type = other RNA
atagtgctttttactttgcga

SEQ ID NO: 72457 - RNA, 21 nt, synthetic construct
  source 1..21: mol_type = other RNA
atagtggctgcaccatttttt

SEQ ID NO: 72458 - RNA, 21 nt, synthetic construct
  source 1..21: mol_type = other RNA
atagtgggaccccgtctctgc

SEQ ID NO: 72459 - RNA, 21 nt, synthetic construct
  source 1..21: mol_type = other RNA
atagtgggtagaagcagcaag

SEQ ID NO: 72460 - RNA, 21 nt, synthetic construct
  source 1..21: mol_type = other RNA
atagtggtaaggagccaaaca

SEQ ID NO: 72461 - RNA, 21 nt, synthetic construct
  source 1..21: mol_type = other RNA
atagtggtttgaagcttcact

SEQ ID NO: 72462 - RNA, 21 nt, synthetic construct
  source 1..21: mol_type = other RNA
atagtgtttccttccagatgt

SEQ ID NO: 72463 - RNA, 21 nt, synthetic construct
  source 1..21: mol_type = other RNA
atagttaacgtttatctacag

SEQ ID NO: 72464 - RNA, 21 nt, synthetic construct
  source 1..21: mol_type = other RNA
atagttaagtctgaaagcttc

SEQ ID NO: 72465 - RNA, 21 nt, synthetic construct
  source 1..21: mol_type = other RNA
atagttaatgtgtgaagaagg

SEQ ID NO: 72466 - RNA, 21 nt, synthetic construct
  source 1..21: mol_type = other RNA
atagttcacctctccgggtaa

SEQ ID NO: 72467 - RNA, 21 nt, synthetic construct
  source 1..21: mol_type = other RNA
atagttgcagattcatcttga

SEQ ID NO: 72468 - RNA, 21 nt, synthetic construct
  source 1..21: mol_type = other RNA
atagttggtcagaaaaatgga

SEQ ID NO: 72469 - RNA, 21 nt, synthetic construct
  source 1..21: mol_type = other RNA
atagtttaattgggggaaaat

SEQ ID NO: 72470 - RNA, 21 nt, synthetic construct
  source 1..21: mol_type = other RNA
atagtttagttactcaaatcc

SEQ ID NO: 72471 - RNA, 21 nt, synthetic construct
  source 1..21: mol_type = other RNA
atagtttctcaacttagcctt

SEQ ID NO: 72472 - RNA, 21 nt, synthetic construct
  source 1..21: mol_type = other RNA
atataaaaagcctctgtggac

SEQ ID NO: 72473 - RNA, 21 nt, synthetic construct
  source 1..21: mol_type = other RNA
atataaaaattccgctctggt

SEQ ID NO: 72474 - RNA, 21 nt, synthetic construct
  source 1..21: mol_type = other RNA
atataaacgtgtgtgtaagca

SEQ ID NO: 72475 - RNA, 21 nt, synthetic construct
  source 1..21: mol_type = other RNA
atataaactcttccttatccg

SEQ ID NO: 72476 - RNA, 21 nt, synthetic construct
  source 1..21: mol_type = other RNA
atataaatacgtgtatactgg

SEQ ID NO: 72477 - RNA, 21 nt, synthetic construct
  source 1..21: mol_type = other RNA
atataaatgctcagtgggttc

SEQ ID NO: 72478 - RNA, 21 nt, synthetic construct
  source 1..21: mol_type = other RNA
atataacgatagtctcctata

SEQ ID NO: 72479 - RNA, 21 nt, synthetic construct
  source 1..21: mol_type = other RNA
atataagagtgggcaaaaaag

SEQ ID NO: 72480 - RNA, 21 nt, synthetic construct
  source 1..21: mol_type = other RNA
atataaggggaatcatgcagt

SEQ ID NO: 72481 - RNA, 21 nt, synthetic construct
  source 1..21: mol_type = other RNA
atataagtggaatcattccgt

SEQ ID NO: 72482 - RNA, 21 nt, synthetic construct
  source 1..21: mol_type = other RNA
atataatccaactgcagtctg

SEQ ID NO: 72483 - RNA, 21 nt, synthetic construct
  source 1..21: mol_type = other RNA
atataatctaaccctcctcct

SEQ ID NO: 72484 - RNA, 21 nt, synthetic construct
  source 1..21: mol_type = other RNA
atataatggagtactatgcag

SEQ ID NO: 72485 - RNA, 21 nt, synthetic construct
  source 1..21: mol_type = other RNA
atatacacaaaaagatctgtg

SEQ ID NO: 72486 - RNA, 21 nt, synthetic construct
  source 1..21: mol_type = other RNA
atatacaggaagagactatct

SEQ ID NO: 72487 - RNA, 21 nt, synthetic construct
  source 1..21: mol_type = other RNA
atatacatgacatggttttcc

SEQ ID NO: 72488 - RNA, 21 nt, synthetic construct
  source 1..21: mol_type = other RNA
atatacccttctgttaataga

SEQ ID NO: 72489 - RNA, 21 nt, synthetic construct
  source 1..21: mol_type = other RNA
atatacctgtagaaaataggg

SEQ ID NO: 72490 - RNA, 21 nt, synthetic construct
  source 1..21: mol_type = other RNA
atataccttatgtgaaagtag

SEQ ID NO: 72491 - RNA, 21 nt, synthetic construct
  source 1..21: mol_type = other RNA
atatacggaatgattccactt

SEQ ID NO: 72492 - RNA, 21 nt, synthetic construct
  source 1..21: mol_type = other RNA
atatactctgagacaggatcc

SEQ ID NO: 72493 - RNA, 21 nt, synthetic construct
  source 1..21: mol_type = other RNA
atatactgaagttctcagggg

SEQ ID NO: 72494 - RNA, 21 nt, synthetic construct
  source 1..21: mol_type = other RNA
atatactgactagtggctcat

SEQ ID NO: 72495 - RNA, 21 nt, synthetic construct
  source 1..21: mol_type = other RNA
atatactggaaaactagagat

SEQ ID NO: 72496 - RNA, 21 nt, synthetic construct
  source 1..21: mol_type = other RNA
atatacttgtcaagttctgat

SEQ ID NO: 72497 - RNA, 21 nt, synthetic construct
  source 1..21: mol_type = other RNA
atatagaaggccagagggaat

SEQ ID NO: 72498 - RNA, 21 nt, synthetic construct
  source 1..21: mol_type = other RNA
atatagaagtaaatcccggcc

SEQ ID NO: 72499 - RNA, 21 nt, synthetic construct
  source 1..21: mol_type = other RNA
atatagcgagacctcatctct

SEQ ID NO: 72500 - RNA, 21 nt, synthetic construct
  source 1..21: mol_type = other RNA
atataggagactatcgttata

SEQ ID NO: 72501 - RNA, 21 nt, synthetic construct
  source 1..21: mol_type = other RNA
atatagtgggaccccgtctct

SEQ ID NO: 72502 - RNA, 21 nt, synthetic construct
  source 1..21: mol_type = other RNA
atatatacggaatgattccac

SEQ ID NO: 72503 - RNA, 21 nt, synthetic construct
  source 1..21: mol_type = other RNA
atatatactctgagacaggat

SEQ ID NO: 72504 - RNA, 21 nt, synthetic construct
  source 1..21: mol_type = other RNA
atatatactgaagttctcagg

SEQ ID NO: 72505 - RNA, 21 nt, synthetic construct
  source 1..21: mol_type = other RNA
atatatcatagagtaccaggt

SEQ ID NO: 72506 - RNA, 21 nt, synthetic construct
  source 1..21: mol_type = other RNA
atatatctgtctgggataatg

SEQ ID NO: 72507 - RNA, 21 nt, synthetic construct
  source 1..21: mol_type = other RNA
atatatgatgatttttgccag

SEQ ID NO: 72508 - RNA, 21 nt, synthetic construct
  source 1..21: mol_type = other RNA
atatatgcattcccatgttca

SEQ ID NO: 72509 - RNA, 21 nt, synthetic construct
  source 1..21: mol_type = other RNA
atatatgctccctaaatacac

SEQ ID NO: 72510 - RNA, 21 nt, synthetic construct
  source 1..21: mol_type = other RNA
atatattctaaacctgaggtc

SEQ ID NO: 72511 - RNA, 21 nt, synthetic construct
  source 1..21: mol_type = other RNA
atatcacactgtttgattact

SEQ ID NO: 72512 - RNA, 21 nt, synthetic construct
  source 1..21: mol_type = other RNA
atatcacccagaccaagttta

SEQ ID NO: 72513 - RNA, 21 nt, synthetic construct
  source 1..21: mol_type = other RNA
atatcagaagtgctgacttgg

SEQ ID NO: 72514 - RNA, 21 nt, synthetic construct
  source 1..21: mol_type = other RNA
atatcagggatcacagataca

SEQ ID NO: 72515 - RNA, 21 nt, synthetic construct
  source 1..21: mol_type = other RNA
atatcagttatcacacctagg

SEQ ID NO: 72516 - RNA, 21 nt, synthetic construct
  source 1..21: mol_type = other RNA
atatcatagagtaccaggtca

SEQ ID NO: 72517 - RNA, 21 nt, synthetic construct
  source 1..21: mol_type = other RNA
atatcatcatcttatacttgg

SEQ ID NO: 72518 - RNA, 21 nt, synthetic construct
  source 1..21: mol_type = other RNA
atatcatcttaagaaccatac

SEQ ID NO: 72519 - RNA, 21 nt, synthetic construct
  source 1..21: mol_type = other RNA
atatcatttgaatgatgcgaa

SEQ ID NO: 72520 - RNA, 21 nt, synthetic construct
  source 1..21: mol_type = other RNA
atatccaaagataaaggtaag

SEQ ID NO: 72521 - RNA, 21 nt, synthetic construct
  source 1..21: mol_type = other RNA
atatccaagcacaaacctggc

SEQ ID NO: 72522 - RNA, 21 nt, synthetic construct
  source 1..21: mol_type = other RNA
atatccaatcactggctagta

SEQ ID NO: 72523 - RNA, 21 nt, synthetic construct
  source 1..21: mol_type = other RNA
atatccacagtatgctgttta

SEQ ID NO: 72524 - RNA, 21 nt, synthetic construct
  source 1..21: mol_type = other RNA
atatccagattgatatctgag

SEQ ID NO: 72525 - RNA, 21 nt, synthetic construct
  source 1..21: mol_type = other RNA
atatcccaaattggcatttaa

SEQ ID NO: 72526 - RNA, 21 nt, synthetic construct
  source 1..21: mol_type = other RNA
atatcccatataaggggaatc

SEQ ID NO: 72527 - RNA, 21 nt, synthetic construct
  source 1..21: mol_type = other RNA
atatccccatttttctcgaca

SEQ ID NO: 72528 - RNA, 21 nt, synthetic construct
  source 1..21: mol_type = other RNA
atatccctgataatcacagac

SEQ ID NO: 72529 - RNA, 21 nt, synthetic construct
  source 1..21: mol_type = other RNA
atatccctggggtttccttac

SEQ ID NO: 72530 - RNA, 21 nt, synthetic construct
  source 1..21: mol_type = other RNA
atatccgaaagaactgaaagc

SEQ ID NO: 72531 - RNA, 21 nt, synthetic construct
  source 1..21: mol_type = other RNA
atatcctaaacacttagcatg

SEQ ID NO: 72532 - RNA, 21 nt, synthetic construct
  source 1..21: mol_type = other RNA
atatcctcagggtaggaaaag

SEQ ID NO: 72533 - RNA, 21 nt, synthetic construct
  source 1..21: mol_type = other RNA
atatcctgtaaacctggaatc

SEQ ID NO: 72534 - RNA, 21 nt, synthetic construct
  source 1..21: mol_type = other RNA
atatccttctacatcccccca

SEQ ID NO: 72535 - RNA, 21 nt, synthetic construct
  source 1..21: mol_type = other RNA
atatccttttatgtgcagtct

SEQ ID NO: 72536 - RNA, 21 nt, synthetic construct
  source 1..21: mol_type = other RNA
atatctacatgtacgccaatt

SEQ ID NO: 72537 - RNA, 21 nt, synthetic construct
  source 1..21: mol_type = other RNA
atatctatcagggctgaaaaa

SEQ ID NO: 72538 - RNA, 21 nt, synthetic construct
  source 1..21: mol_type = other RNA
atatctccctcacagtccact

SEQ ID NO: 72539 - RNA, 21 nt, synthetic construct
  source 1..21: mol_type = other RNA
atatctccttttaagagtgaa

SEQ ID NO: 72540 - RNA, 21 nt, synthetic construct
  source 1..21: mol_type = other RNA
atatctgaggtcaggagctcg

SEQ ID NO: 72541 - RNA, 21 nt, synthetic construct
  source 1..21: mol_type = other RNA
atatctgagtgttgtgtgcac

SEQ ID NO: 72542 - RNA, 21 nt, synthetic construct
  source 1..21: mol_type = other RNA
atatctgattttgtgtcttct

SEQ ID NO: 72543 - RNA, 21 nt, synthetic construct
  source 1..21: mol_type = other RNA
atatctggactgaaaagatac

SEQ ID NO: 72544 - RNA, 21 nt, synthetic construct
  source 1..21: mol_type = other RNA
atatctggcctgcaccattta

SEQ ID NO: 72545 - RNA, 21 nt, synthetic construct
  source 1..21: mol_type = other RNA
atatctgtaagtcatcaaagg

SEQ ID NO: 72546 - RNA, 21 nt, synthetic construct
  source 1..21: mol_type = other RNA
atatctgtctgggataatgag

SEQ ID NO: 72547 - RNA, 21 nt, synthetic construct
  source 1..21: mol_type = other RNA
atatctttaggtgttttttcc

SEQ ID NO: 72548 - RNA, 21 nt, synthetic construct
  source 1..21: mol_type = other RNA
atatctttggaaaaatgtccg

SEQ ID NO: 72549 - RNA, 21 nt, synthetic construct
  source 1..21: mol_type = other RNA
atatctttggggagatacctt

SEQ ID NO: 72550 - RNA, 21 nt, synthetic construct
  source 1..21: mol_type = other RNA
atatgaaaagcccaatctaca

SEQ ID NO: 72551 - RNA, 21 nt, synthetic construct
  source 1..21: mol_type = other RNA
atatgaaaagcttcccccctc

SEQ ID NO: 72552 - RNA, 21 nt, synthetic construct
  source 1..21: mol_type = other RNA
atatgaaagaggagacattac

SEQ ID NO: 72553 - RNA, 21 nt, synthetic construct
  source 1..21: mol_type = other RNA
atatgaaatcacacaatcttg

SEQ ID NO: 72554 - RNA, 21 nt, synthetic construct
  source 1..21: mol_type = other RNA
atatgaaccacactgacagga

SEQ ID NO: 72555 - RNA, 21 nt, synthetic construct
  source 1..21: mol_type = other RNA
atatgaagcattaatgcaacc

SEQ ID NO: 72556 - RNA, 21 nt, synthetic construct
  source 1..21: mol_type = other RNA
atatgaataaaccacgcagtt

SEQ ID NO: 72557 - RNA, 21 nt, synthetic construct
  source 1..21: mol_type = other RNA
atatgactggtgtccttctga

SEQ ID NO: 72558 - RNA, 21 nt, synthetic construct
  source 1..21: mol_type = other RNA
atatgagaattcattgttgtg

SEQ ID NO: 72559 - RNA, 21 nt, synthetic construct
  source 1..21: mol_type = other RNA
atatgagggatgaggaagagg

SEQ ID NO: 72560 - RNA, 21 nt, synthetic construct
  source 1..21: mol_type = other RNA
atatgagttcctgcttccccc

SEQ ID NO: 72561 - RNA, 21 nt, synthetic construct
  source 1..21: mol_type = other RNA
atatgataccctcaaaagatg

SEQ ID NO: 72562 - RNA, 21 nt, synthetic construct
  source 1..21: mol_type = other RNA
atatgatccagcagtttcact

SEQ ID NO: 72563 - RNA, 21 nt, synthetic construct
  source 1..21: mol_type = other RNA
atatgatctatcaatctcaca

SEQ ID NO: 72564 - RNA, 21 nt, synthetic construct
  source 1..21: mol_type = other RNA
atatgatgatttttgccagtg

SEQ ID NO: 72565 - RNA, 21 nt, synthetic construct
  source 1..21: mol_type = other RNA
atatgcacaatggaatattac

SEQ ID NO: 72566 - RNA, 21 nt, synthetic construct
  source 1..21: mol_type = other RNA
atatgcaggaccaactttaag

SEQ ID NO: 72567 - RNA, 21 nt, synthetic construct
  source 1..21: mol_type = other RNA
atatgcagtatgtgccatttt

SEQ ID NO: 72568 - RNA, 21 nt, synthetic construct
  source 1..21: mol_type = other RNA
atatgcatgttatttggggat

SEQ ID NO: 72569 - RNA, 21 nt, synthetic construct
  source 1..21: mol_type = other RNA
atatgcattaagccagtcact

SEQ ID NO: 72570 - RNA, 21 nt, synthetic construct
  source 1..21: mol_type = other RNA
atatgcattcccatgttcact

SEQ ID NO: 72571 - RNA, 21 nt, synthetic construct
  source 1..21: mol_type = other RNA
atatgccacattttttggttt

SEQ ID NO: 72572 - RNA, 21 nt, synthetic construct
  source 1..21: mol_type = other RNA
atatgccggctgttaggtatt

SEQ ID NO: 72573 - RNA, 21 nt, synthetic construct
  source 1..21: mol_type = other RNA
atatgcctagatgattcgcat

SEQ ID NO: 72574 - RNA, 21 nt, synthetic construct
  source 1..21: mol_type = other RNA
atatgcctagatttcaatctg

SEQ ID NO: 72575 - RNA, 21 nt, synthetic construct
  source 1..21: mol_type = other RNA
atatgcctcatgcatccacat

SEQ ID NO: 72576 - RNA, 21 nt, synthetic construct
  source 1..21: mol_type = other RNA
atatgctccctaaatacacat

SEQ ID NO: 72577 - RNA, 21 nt, synthetic construct
  source 1..21: mol_type = other RNA
atatgctgtagtgattcactt

SEQ ID NO: 72578 - RNA, 21 nt, synthetic construct
  source 1..21: mol_type = other RNA
atatgctttgagctacaaact

SEQ ID NO: 72579 - RNA, 21 nt, synthetic construct
  source 1..21: mol_type = other RNA
atatggaggcaatgttgattt

SEQ ID NO: 72580 - RNA, 21 nt, synthetic construct
  source 1..21: mol_type = other RNA
atatggcaattccataaatgt

SEQ ID NO: 72581 - RNA, 21 nt, synthetic construct
  source 1..21: mol_type = other RNA
atatgggagtccctgctttca

SEQ ID NO: 72582 - RNA, 21 nt, synthetic construct
  source 1..21: mol_type = other RNA
atatgggatgcttaaagcgct

SEQ ID NO: 72583 - RNA, 21 nt, synthetic construct
  source 1..21: mol_type = other RNA
atatgggccaaagacagatct

SEQ ID NO: 72584 - RNA, 21 nt, synthetic construct
  source 1..21: mol_type = other RNA
atatgggttattcacccaaga

SEQ ID NO: 72585 - RNA, 21 nt, synthetic construct
  source 1..21: mol_type = other RNA
atatggtcactgctgatgtaa

SEQ ID NO: 72586 - RNA, 21 nt, synthetic construct
  source 1..21: mol_type = other RNA
atatggtctaccatgttgttc

SEQ ID NO: 72587 - RNA, 21 nt, synthetic construct
  source 1..21: mol_type = other RNA
atatggttaatagtgaccctt

SEQ ID NO: 72588 - RNA, 21 nt, synthetic construct
  source 1..21: mol_type = other RNA
atatggtttaaggtaagggtc

SEQ ID NO: 72589 - RNA, 21 nt, synthetic construct
  source 1..21: mol_type = other RNA
atatggtttacaatggttcat

SEQ ID NO: 72590 - RNA, 21 nt, synthetic construct
  source 1..21: mol_type = other RNA
atatgtaatgacctggaaatt

SEQ ID NO: 72591 - RNA, 21 nt, synthetic construct
  source 1..21: mol_type = other RNA
atatgtagggcaccgtgacag

SEQ ID NO: 72592 - RNA, 21 nt, synthetic construct
  source 1..21: mol_type = other RNA
atatgtcagatggtaaattgg

SEQ ID NO: 72593 - RNA, 21 nt, synthetic construct
  source 1..21: mol_type = other RNA
atatgtccttttgagtttggt

SEQ ID NO: 72594 - RNA, 21 nt, synthetic construct
  source 1..21: mol_type = other RNA
atatgtcgcatgaaaacagct

SEQ ID NO: 72595 - RNA, 21 nt, synthetic construct
  source 1..21: mol_type = other RNA
atatgtgtacaatggggcttt

SEQ ID NO: 72596 - RNA, 21 nt, synthetic construct
  source 1..21: mol_type = other RNA
atatgtgtaggaaggaacaca

SEQ ID NO: 72597 - RNA, 21 nt, synthetic construct
  source 1..21: mol_type = other RNA
atatgttgatgtaatggatca

SEQ ID NO: 72598 - RNA, 21 nt, synthetic construct
  source 1..21: mol_type = other RNA
atatgttttgcttcgaagctt

SEQ ID NO: 72599 - RNA, 21 nt, synthetic construct
  source 1..21: mol_type = other RNA
atattaaccaagaacaacctt

SEQ ID NO: 72600 - RNA, 21 nt, synthetic construct
  source 1..21: mol_type = other RNA
atattaagagtctcatctgtc

SEQ ID NO: 72601 - RNA, 21 nt, synthetic construct
  source 1..21: mol_type = other RNA
atattaattctgaggcctcct

SEQ ID NO: 72602 - RNA, 21 nt, synthetic construct
  source 1..21: mol_type = other RNA
atattacagtaaggtttccct

SEQ ID NO: 72603 - RNA, 21 nt, synthetic construct
  source 1..21: mol_type = other RNA
atattactcagtctcgaaaag

SEQ ID NO: 72604 - RNA, 21 nt, synthetic construct
  source 1..21: mol_type = other RNA
atattagctacaaaagggaaa

SEQ ID NO: 72605 - RNA, 21 nt, synthetic construct
  source 1..21: mol_type = other RNA
atattagctgtctggattgat

SEQ ID NO: 72606 - RNA, 21 nt, synthetic construct
  source 1..21: mol_type = other RNA
atattagtctgtagcttcacg

SEQ ID NO: 72607 - RNA, 21 nt, synthetic construct
  source 1..21: mol_type = other RNA
atattataagttgggagtcta

SEQ ID NO: 72608 - RNA, 21 nt, synthetic construct
  source 1..21: mol_type = other RNA
atattatggtctttttccagg

SEQ ID NO: 72609 - RNA, 21 nt, synthetic construct
  source 1..21: mol_type = other RNA
atattatgtgcaagttctctt

SEQ ID NO: 72610 - RNA, 21 nt, synthetic construct
  source 1..21: mol_type = other RNA
atattattttttcccgctaca

SEQ ID NO: 72611 - RNA, 21 nt, synthetic construct
  source 1..21: mol_type = other RNA
atattcatagtagctgttgaa

SEQ ID NO: 72612 - RNA, 21 nt, synthetic construct
  source 1..21: mol_type = other RNA
atattccatttttctgaccaa

SEQ ID NO: 72613 - RNA, 21 nt, synthetic construct
  source 1..21: mol_type = other RNA
atattcctatcagaagcacac

SEQ ID NO: 72614 - RNA, 21 nt, synthetic construct
  source 1..21: mol_type = other RNA
atattcgttccagcagggtaa

SEQ ID NO: 72615 - RNA, 21 nt, synthetic construct
  source 1..21: mol_type = other RNA
atattctaaacctgaggtctt

SEQ ID NO: 72616 - RNA, 21 nt, synthetic construct
  source 1..21: mol_type = other RNA
atattctaagtttgccaaaga

SEQ ID NO: 72617 - RNA, 21 nt, synthetic construct
  source 1..21: mol_type = other RNA
atattctacagaaaacccttc

SEQ ID NO: 72618 - RNA, 21 nt, synthetic construct
  source 1..21: mol_type = other RNA
atattctgtgaattgtgacag

SEQ ID NO: 72619 - RNA, 21 nt, synthetic construct
  source 1..21: mol_type = other RNA
atattgaaacgatgcattcca

SEQ ID NO: 72620 - RNA, 21 nt, synthetic construct
  source 1..21: mol_type = other RNA
atattgaagagggaacatttt

SEQ ID NO: 72621 - RNA, 21 nt, synthetic construct
  source 1..21: mol_type = other RNA
atattgaagccagcacctaac

SEQ ID NO: 72622 - RNA, 21 nt, synthetic construct
  source 1..21: mol_type = other RNA
atattgaataatttccaggtc

SEQ ID NO: 72623 - RNA, 21 nt, synthetic construct
  source 1..21: mol_type = other RNA
atattggattaagggcccacc

SEQ ID NO: 72624 - RNA, 21 nt, synthetic construct
  source 1..21: mol_type = other RNA
atattggcataaagacagaca

SEQ ID NO: 72625 - RNA, 21 nt, synthetic construct
  source 1..21: mol_type = other RNA
atattggccaggctggttcca

SEQ ID NO: 72626 - RNA, 21 nt, synthetic construct
  source 1..21: mol_type = other RNA
atattggcttatagtgttctt

SEQ ID NO: 72627 - RNA, 21 nt, synthetic construct
  source 1..21: mol_type = other RNA
atattgtaggtgtctcattta

SEQ ID NO: 72628 - RNA, 21 nt, synthetic construct
  source 1..21: mol_type = other RNA
atattgtatatacccttctgt

SEQ ID NO: 72629 - RNA, 21 nt, synthetic construct
  source 1..21: mol_type = other RNA
atattgtcaatggggaacttt

SEQ ID NO: 72630 - RNA, 21 nt, synthetic construct
  source 1..21: mol_type = other RNA
atatttaacaccatggcaggt

SEQ ID NO: 72631 - RNA, 21 nt, synthetic construct
  source 1..21: mol_type = other RNA
atatttactagatcaagccct

SEQ ID NO: 72632 - RNA, 21 nt, synthetic construct
  source 1..21: mol_type = other RNA
atatttactgcttgctgcact

SEQ ID NO: 72633 - RNA, 21 nt, synthetic construct
  source 1..21: mol_type = other RNA
atatttccaaataaggtcaca

SEQ ID NO: 72634 - RNA, 21 nt, synthetic construct
  source 1..21: mol_type = other RNA
atatttcccttttggatgcag

SEQ ID NO: 72635 - RNA, 21 nt, synthetic construct
  source 1..21: mol_type = other RNA
atatttccgatgataccttct

SEQ ID NO: 72636 - RNA, 21 nt, synthetic construct
  source 1..21: mol_type = other RNA
atatttccgtatccagtggtt

SEQ ID NO: 72637 - RNA, 21 nt, synthetic construct
  source 1..21: mol_type = other RNA
atatttcgcctagataagaaa

SEQ ID NO: 72638 - RNA, 21 nt, synthetic construct
  source 1..21: mol_type = other RNA
atatttgcagtagtattgaac

SEQ ID NO: 72639 - RNA, 21 nt, synthetic construct
  source 1..21: mol_type = other RNA
atatttgttcaagcgctgaag

SEQ ID NO: 72640 - RNA, 21 nt, synthetic construct
  source 1..21: mol_type = other RNA
atattttaaaagtcagctagg

SEQ ID NO: 72641 - RNA, 21 nt, synthetic construct
  source 1..21: mol_type = other RNA
atattttaagttctagggaac

SEQ ID NO: 72642 - RNA, 21 nt, synthetic construct
  source 1..21: mol_type = other RNA
atattttatgctttgtctctg

SEQ ID NO: 72643 - RNA, 21 nt, synthetic construct
  source 1..21: mol_type = other RNA
atattttcaaggcttgtgcat

SEQ ID NO: 72644 - RNA, 21 nt, synthetic construct
  source 1..21: mol_type = other RNA
atattttcgtgtactgaaacc

SEQ ID NO: 72645 - RNA, 21 nt, synthetic construct
  source 1..21: mol_type = other RNA
atattttctaagagccaaaga

SEQ ID NO: 72646 - RNA, 21 nt, synthetic construct
  source 1..21: mol_type = other RNA
atattttctgtcattctgcag

SEQ ID NO: 72647 - RNA, 21 nt, synthetic construct
  source 1..21: mol_type = other RNA
atattttggaagactatgaga

SEQ ID NO: 72648 - RNA, 21 nt, synthetic construct
  source 1..21: mol_type = other RNA
atattttggtagagatggggt

SEQ ID NO: 72649 - RNA, 21 nt, synthetic construct
  source 1..21: mol_type = other RNA
atattttgtaacgtgtatagc

SEQ ID NO: 72650 - RNA, 21 nt, synthetic construct
  source 1..21: mol_type = other RNA
atattttgtgggaattcagtc

SEQ ID NO: 72651 - RNA, 21 nt, synthetic construct
  source 1..21: mol_type = other RNA
atatttttcagattgaccttg

SEQ ID NO: 72652 - RNA, 21 nt, synthetic construct
  source 1..21: mol_type = other RNA
atcaaaaacctcccaacaggc

SEQ ID NO: 72653 - RNA, 21 nt, synthetic construct
  source 1..21: mol_type = other RNA
atcaaaacaataagacaccgc

SEQ ID NO: 72654 - RNA, 21 nt, synthetic construct
  source 1..21: mol_type = other RNA
atcaaaacacttctgtgatca

SEQ ID NO: 72655 - RNA, 21 nt, synthetic construct
  source 1..21: mol_type = other RNA
atcaaaaccaggaggtttgca

SEQ ID NO: 72656 - RNA, 21 nt, synthetic construct
  source 1..21: mol_type = other RNA
atcaaaagaccaagaattttc

SEQ ID NO: 72657 - RNA, 21 nt, synthetic construct
  source 1..21: mol_type = other RNA
atcaaaatcaaggtgcgggat

SEQ ID NO: 72658 - RNA, 21 nt, synthetic construct
  source 1..21: mol_type = other RNA
atcaaacagtgtgatattggc

SEQ ID NO: 72659 - RNA, 21 nt, synthetic construct
  source 1..21: mol_type = other RNA
atcaaacataccccaacccta

SEQ ID NO: 72660 - RNA, 21 nt, synthetic construct
  source 1..21: mol_type = other RNA
atcaaaccatcctttccttgt

SEQ ID NO: 72661 - RNA, 21 nt, synthetic construct
  source 1..21: mol_type = other RNA
atcaaaccatgttcatgggaa

SEQ ID NO: 72662 - RNA, 21 nt, synthetic construct
  source 1..21: mol_type = other RNA
atcaaacgtgctttccttatt

SEQ ID NO: 72663 - RNA, 21 nt, synthetic construct
  source 1..21: mol_type = other RNA
atcaaagaaagagttgggttt

SEQ ID NO: 72664 - RNA, 21 nt, synthetic construct
  source 1..21: mol_type = other RNA
atcaaagacctaagcttaaga

SEQ ID NO: 72665 - RNA, 21 nt, synthetic construct
  source 1..21: mol_type = other RNA
atcaaagctaccctttcttgt

SEQ ID NO: 72666 - RNA, 21 nt, synthetic construct
  source 1..21: mol_type = other RNA
atcaaaggaaggaattttagg

SEQ ID NO: 72667 - RNA, 21 nt, synthetic construct
  source 1..21: mol_type = other RNA
atcaaagtcccctgtaattac

SEQ ID NO: 72668 - RNA, 21 nt, synthetic construct
  source 1..21: mol_type = other RNA
atcaaagtgaaaggcaaagga

SEQ ID NO: 72669 - RNA, 21 nt, synthetic construct
  source 1..21: mol_type = other RNA
atcaaagttaaacttttgtgc

SEQ ID NO: 72670 - RNA, 21 nt, synthetic construct
  source 1..21: mol_type = other RNA
atcaaatccagtcttcaggtc

SEQ ID NO: 72671 - RNA, 21 nt, synthetic construct
  source 1..21: mol_type = other RNA
atcaaatctggctgcagggct

SEQ ID NO: 72672 - RNA, 21 nt, synthetic construct
  source 1..21: mol_type = other RNA
atcaaatggccttctttcttt

SEQ ID NO: 72673 - RNA, 21 nt, synthetic construct
  source 1..21: mol_type = other RNA
atcaaatgggaaattagatga

SEQ ID NO: 72674 - RNA, 21 nt, synthetic construct
  source 1..21: mol_type = other RNA
atcaaattcacagaactgtca

SEQ ID NO: 72675 - RNA, 21 nt, synthetic construct
  source 1..21: mol_type = other RNA
atcaacagcagaacaaactgc

SEQ ID NO: 72676 - RNA, 21 nt, synthetic construct
  source 1..21: mol_type = other RNA
atcaacaggtagctgcttttt

SEQ ID NO: 72677 - RNA, 21 nt, synthetic construct
  source 1..21: mol_type = other RNA
atcaacagtgtactagtctcc

SEQ ID NO: 72678 - RNA, 21 nt, synthetic construct
  source 1..21: mol_type = other RNA
atcaacattgcctccatatgg

SEQ ID NO: 72679 - RNA, 21 nt, synthetic construct
  source 1..21: mol_type = other RNA
atcaacccatgaaaattgaat

SEQ ID NO: 72680 - RNA, 21 nt, synthetic construct
  source 1..21: mol_type = other RNA
atcaaccccatcaacaagtgg

SEQ ID NO: 72681 - RNA, 21 nt, synthetic construct
  source 1..21: mol_type = other RNA
atcaacctgcaggtatttcta

SEQ ID NO: 72682 - RNA, 21 nt, synthetic construct
  source 1..21: mol_type = other RNA
atcaactattccataagatct

SEQ ID NO: 72683 - RNA, 21 nt, synthetic construct
  source 1..21: mol_type = other RNA
atcaactgcttccctagccca

SEQ ID NO: 72684 - RNA, 21 nt, synthetic construct
  source 1..21: mol_type = other RNA
atcaagacagagctccctctc

SEQ ID NO: 72685 - RNA, 21 nt, synthetic construct
  source 1..21: mol_type = other RNA
atcaagcccttccttgcttgt

SEQ ID NO: 72686 - RNA, 21 nt, synthetic construct
  source 1..21: mol_type = other RNA
atcaagccgcaaataatcatt

SEQ ID NO: 72687 - RNA, 21 nt, synthetic construct
  source 1..21: mol_type = other RNA
atcaagctcgccgtctccctc

SEQ ID NO: 72688 - RNA, 21 nt, synthetic construct
  source 1..21: mol_type = other RNA
atcaaggaagcttcctaaaga

SEQ ID NO: 72689 - RNA, 21 nt, synthetic construct
  source 1..21: mol_type = other RNA
atcaaggcacagtctgtgctt

SEQ ID NO: 72690 - RNA, 21 nt, synthetic construct
  source 1..21: mol_type = other RNA
atcaagggtggtgctggactg

SEQ ID NO: 72691 - RNA, 21 nt, synthetic construct
  source 1..21: mol_type = other RNA
atcaaggtacaatacactaaa

SEQ ID NO: 72692 - RNA, 21 nt, synthetic construct
  source 1..21: mol_type = other RNA
atcaaggtgcgggattatttg

SEQ ID NO: 72693 - RNA, 21 nt, synthetic construct
  source 1..21: mol_type = other RNA
atcaagtatctccctgtgcgt

SEQ ID NO: 72694 - RNA, 21 nt, synthetic construct
  source 1..21: mol_type = other RNA
atcaagtcctttccagaggtt

SEQ ID NO: 72695 - RNA, 21 nt, synthetic construct
  source 1..21: mol_type = other RNA
atcaagtgaaatgatctttga

SEQ ID NO: 72696 - RNA, 21 nt, synthetic construct
  source 1..21: mol_type = other RNA
atcaagtgtgatcccaaaaaa

SEQ ID NO: 72697 - RNA, 21 nt, synthetic construct
  source 1..21: mol_type = other RNA
atcaagttgcttggcacagaa

SEQ ID NO: 72698 - RNA, 21 nt, synthetic construct
  source 1..21: mol_type = other RNA
atcaataattctgtgccaagc

SEQ ID NO: 72699 - RNA, 21 nt, synthetic construct
  source 1..21: mol_type = other RNA
atcaatacttcatttccattg

SEQ ID NO: 72700 - RNA, 21 nt, synthetic construct
  source 1..21: mol_type = other RNA
atcaatagcagtgctgaaagc

SEQ ID NO: 72701 - RNA, 21 nt, synthetic construct
  source 1..21: mol_type = other RNA
atcaatccagacagctaatat

SEQ ID NO: 72702 - RNA, 21 nt, synthetic construct
  source 1..21: mol_type = other RNA
atcaatctcacacctgggtat

SEQ ID NO: 72703 - RNA, 21 nt, synthetic construct
  source 1..21: mol_type = other RNA
atcaatctgtttcctaatcta

SEQ ID NO: 72704 - RNA, 21 nt, synthetic construct
  source 1..21: mol_type = other RNA
atcaatgatagactggattaa

SEQ ID NO: 72705 - RNA, 21 nt, synthetic construct
  source 1..21: mol_type = other RNA
atcaattagttcctccttttg

SEQ ID NO: 72706 - RNA, 21 nt, synthetic construct
  source 1..21: mol_type = other RNA
atcaattgaccaaacatgtga

SEQ ID NO: 72707 - RNA, 21 nt, synthetic construct
  source 1..21: mol_type = other RNA
atcaattgtaatgtctcctct

SEQ ID NO: 72708 - RNA, 21 nt, synthetic construct
  source 1..21: mol_type = other RNA
atcaatttaacttctaatgcc

SEQ ID NO: 72709 - RNA, 21 nt, synthetic construct
  source 1..21: mol_type = other RNA
atcacaaggactggcttcagt

SEQ ID NO: 72710 - RNA, 21 nt, synthetic construct
  source 1..21: mol_type = other RNA
atcacaaggtcagaagtttgg

SEQ ID NO: 72711 - RNA, 21 nt, synthetic construct
  source 1..21: mol_type = other RNA
atcacaatgcgtttgttagat

SEQ ID NO: 72712 - RNA, 21 nt, synthetic construct
  source 1..21: mol_type = other RNA
atcacacaatcttgagacgga

SEQ ID NO: 72713 - RNA, 21 nt, synthetic construct
  source 1..21: mol_type = other RNA
atcacacccagtatacacgta

SEQ ID NO: 72714 - RNA, 21 nt, synthetic construct
  source 1..21: mol_type = other RNA
atcacaccctcctaccttcca

SEQ ID NO: 72715 - RNA, 21 nt, synthetic construct
  source 1..21: mol_type = other RNA
atcacaccgctgcattccagc

SEQ ID NO: 72716 - RNA, 21 nt, synthetic construct
  source 1..21: mol_type = other RNA
atcacacctaggcctatttta

SEQ ID NO: 72717 - RNA, 21 nt, synthetic construct
  source 1..21: mol_type = other RNA
atcacactggtcactggccac

SEQ ID NO: 72718 - RNA, 21 nt, synthetic construct
  source 1..21: mol_type = other RNA
atcacactgtttgattactgt

SEQ ID NO: 72719 - RNA, 21 nt, synthetic construct
  source 1..21: mol_type = other RNA
atcacacttgatggtttgggg

SEQ ID NO: 72720 - RNA, 21 nt, synthetic construct
  source 1..21: mol_type = other RNA
atcacagaagtgttttgatag

SEQ ID NO: 72721 - RNA, 21 nt, synthetic construct
  source 1..21: mol_type = other RNA
atcacagacagggaatgggga

SEQ ID NO: 72722 - RNA, 21 nt, synthetic construct
  source 1..21: mol_type = other RNA
atcacagacgcaaaggatgtc

SEQ ID NO: 72723 - RNA, 21 nt, synthetic construct
  source 1..21: mol_type = other RNA
atcacagatacaactctgacc

SEQ ID NO: 72724 - RNA, 21 nt, synthetic construct
  source 1..21: mol_type = other RNA
atcacaggaaagatgtctttt

SEQ ID NO: 72725 - RNA, 21 nt, synthetic construct
  source 1..21: mol_type = other RNA
atcacaggcgttgagccatca

SEQ ID NO: 72726 - RNA, 21 nt, synthetic construct
  source 1..21: mol_type = other RNA
atcacaggtttaggtttttct

SEQ ID NO: 72727 - RNA, 21 nt, synthetic construct
  source 1..21: mol_type = other RNA
atcacagtacgcttttatgtt

SEQ ID NO: 72728 - RNA, 21 nt, synthetic construct
  source 1..21: mol_type = other RNA
atcacagtatgcacaaataat

SEQ ID NO: 72729 - RNA, 21 nt, synthetic construct
  source 1..21: mol_type = other RNA
atcacagtccaggaacttaca

SEQ ID NO: 72730 - RNA, 21 nt, synthetic construct
  source 1..21: mol_type = other RNA
atcacagtgaggacgctgatg

SEQ ID NO: 72731 - RNA, 21 nt, synthetic construct
  source 1..21: mol_type = other RNA
atcacattttgaatcatggga

SEQ ID NO: 72732 - RNA, 21 nt, synthetic construct
  source 1..21: mol_type = other RNA
atcaccaaagacttcaggaac

SEQ ID NO: 72733 - RNA, 21 nt, synthetic construct
  source 1..21: mol_type = other RNA
atcaccaggggctgggggatc

SEQ ID NO: 72734 - RNA, 21 nt, synthetic construct
  source 1..21: mol_type = other RNA
atcaccatcatcatcaggctg

SEQ ID NO: 72735 - RNA, 21 nt, synthetic construct
  source 1..21: mol_type = other RNA
atcaccatctgataagcccaa

SEQ ID NO: 72736 - RNA, 21 nt, synthetic construct
  source 1..21: mol_type = other RNA
atcaccatgtgcttatcaata

SEQ ID NO: 72737 - RNA, 21 nt, synthetic construct
  source 1..21: mol_type = other RNA
atcacccagaccaagtttaac

SEQ ID NO: 72738 - RNA, 21 nt, synthetic construct
  source 1..21: mol_type = other RNA
atcacccagctcgaccagggg

SEQ ID NO: 72739 - RNA, 21 nt, synthetic construct
  source 1..21: mol_type = other RNA
atcacccttataaaatgaggg

SEQ ID NO: 72740 - RNA, 21 nt, synthetic construct
  source 1..21: mol_type = other RNA
atcacctcaaggcagaacaca

SEQ ID NO: 72741 - RNA, 21 nt, synthetic construct
  source 1..21: mol_type = other RNA
atcacctcaagtgatgcaact

SEQ ID NO: 72742 - RNA, 21 nt, synthetic construct
  source 1..21: mol_type = other RNA
atcacgattctgacccagagc

SEQ ID NO: 72743 - RNA, 21 nt, synthetic construct
  source 1..21: mol_type = other RNA
atcacgccactgcattccgcc

SEQ ID NO: 72744 - RNA, 21 nt, synthetic construct
  source 1..21: mol_type = other RNA
atcacggctgattataacctt

SEQ ID NO: 72745 - RNA, 21 nt, synthetic construct
  source 1..21: mol_type = other RNA
atcactaagagtgaaaaggca

SEQ ID NO: 72746 - RNA, 21 nt, synthetic construct
  source 1..21: mol_type = other RNA
atcactacagcatattagctg

SEQ ID NO: 72747 - RNA, 21 nt, synthetic construct
  source 1..21: mol_type = other RNA
atcactagaatgtgacttcgt

SEQ ID NO: 72748 - RNA, 21 nt, synthetic construct
  source 1..21: mol_type = other RNA
atcactagctattagagaaat

SEQ ID NO: 72749 - RNA, 21 nt, synthetic construct
  source 1..21: mol_type = other RNA
atcactcactggcctgagctc

SEQ ID NO: 72750 - RNA, 21 nt, synthetic construct
  source 1..21: mol_type = other RNA
atcactgactggctgtgccaa

SEQ ID NO: 72751 - RNA, 21 nt, synthetic construct
  source 1..21: mol_type = other RNA
atcactggctagtaggcaaca

SEQ ID NO: 72752 - RNA, 21 nt, synthetic construct
  source 1..21: mol_type = other RNA
atcacttgaggtgattaaagg

SEQ ID NO: 72753 - RNA, 21 nt, synthetic construct
  source 1..21: mol_type = other RNA
atcagaaaaggctgagacctc

SEQ ID NO: 72754 - RNA, 21 nt, synthetic construct
  source 1..21: mol_type = other RNA
atcagaaactgacaggactcc

SEQ ID NO: 72755 - RNA, 21 nt, synthetic construct
  source 1..21: mol_type = other RNA
atcagaacttgacaagtatat

SEQ ID NO: 72756 - RNA, 21 nt, synthetic construct
  source 1..21: mol_type = other RNA
atcagaagagcactatgtaaa

SEQ ID NO: 72757 - RNA, 21 nt, synthetic construct
  source 1..21: mol_type = other RNA
atcagaagcacaccaaggttt

SEQ ID NO: 72758 - RNA, 21 nt, synthetic construct
  source 1..21: mol_type = other RNA
atcagaagtgctgacttggca

SEQ ID NO: 72759 - RNA, 21 nt, synthetic construct
  source 1..21: mol_type = other RNA
atcagaattccattccttttc

SEQ ID NO: 72760 - RNA, 21 nt, synthetic construct
  source 1..21: mol_type = other RNA
atcagacaacacattaataag

SEQ ID NO: 72761 - RNA, 21 nt, synthetic construct
  source 1..21: mol_type = other RNA
atcagacacctacattaatct

SEQ ID NO: 72762 - RNA, 21 nt, synthetic construct
  source 1..21: mol_type = other RNA
atcagactgtattaccagctt

SEQ ID NO: 72763 - RNA, 21 nt, synthetic construct
  source 1..21: mol_type = other RNA
atcagagaggctttttattag

SEQ ID NO: 72764 - RNA, 21 nt, synthetic construct
  source 1..21: mol_type = other RNA
atcagagcatgtcccctggag

SEQ ID NO: 72765 - RNA, 21 nt, synthetic construct
  source 1..21: mol_type = other RNA
atcagagctttgttatgaaaa

SEQ ID NO: 72766 - RNA, 21 nt, synthetic construct
  source 1..21: mol_type = other RNA
atcagagtgaacaggcaacct

SEQ ID NO: 72767 - RNA, 21 nt, synthetic construct
  source 1..21: mol_type = other RNA
atcagatatgaaagaggagac

SEQ ID NO: 72768 - RNA, 21 nt, synthetic construct
  source 1..21: mol_type = other RNA
atcagatcccaattacttcca

SEQ ID NO: 72769 - RNA, 21 nt, synthetic construct
  source 1..21: mol_type = other RNA
atcagatgcttctagccaaag

SEQ ID NO: 72770 - RNA, 21 nt, synthetic construct
  source 1..21: mol_type = other RNA
atcagatggtgatacctctta

SEQ ID NO: 72771 - RNA, 21 nt, synthetic construct
  source 1..21: mol_type = other RNA
atcagattaagcatagtttga

SEQ ID NO: 72772 - RNA, 21 nt, synthetic construct
  source 1..21: mol_type = other RNA
atcagatttcaggtggtattt

SEQ ID NO: 72773 - RNA, 21 nt, synthetic construct
  source 1..21: mol_type = other RNA
atcagcaccaaagattatgtt

SEQ ID NO: 72774 - RNA, 21 nt, synthetic construct
  source 1..21: mol_type = other RNA
atcagcaccatctaacagaaa

SEQ ID NO: 72775 - RNA, 21 nt, synthetic construct
  source 1..21: mol_type = other RNA
atcagcaccctcaaatgtctc

SEQ ID NO: 72776 - RNA, 21 nt, synthetic construct
  source 1..21: mol_type = other RNA
atcagcagtgaccatatttcc

SEQ ID NO: 72777 - RNA, 21 nt, synthetic construct
  source 1..21: mol_type = other RNA
atcagccgtgattgcaccact

SEQ ID NO: 72778 - RNA, 21 nt, synthetic construct
  source 1..21: mol_type = other RNA
atcagcgctaagtgcatttcg

SEQ ID NO: 72779 - RNA, 21 nt, synthetic construct
  source 1..21: mol_type = other RNA
atcagcgtcctcactgtgata

SEQ ID NO: 72780 - RNA, 21 nt, synthetic construct
  source 1..21: mol_type = other RNA
atcagcttcctacccaagctt

SEQ ID NO: 72781 - RNA, 21 nt, synthetic construct
  source 1..21: mol_type = other RNA
atcaggaaaaccagtttagaa

SEQ ID NO: 72782 - RNA, 21 nt, synthetic construct
  source 1..21: mol_type = other RNA
atcaggaaagaccggggactg

SEQ ID NO: 72783 - RNA, 21 nt, synthetic construct
  source 1..21: mol_type = other RNA
atcaggaaagatgaagtatag

SEQ ID NO: 72784 - RNA, 21 nt, synthetic construct
  source 1..21: mol_type = other RNA
atcaggaaagtgccagccacc

SEQ ID NO: 72785 - RNA, 21 nt, synthetic construct
  source 1..21: mol_type = other RNA
atcaggaagtatgagtcttcc

SEQ ID NO: 72786 - RNA, 21 nt, synthetic construct
  source 1..21: mol_type = other RNA
atcaggatgtctttgggaagg

SEQ ID NO: 72787 - RNA, 21 nt, synthetic construct
  source 1..21: mol_type = other RNA
atcaggccttccacctgctct

SEQ ID NO: 72788 - RNA, 21 nt, synthetic construct
  source 1..21: mol_type = other RNA
atcaggctggctctttccact

SEQ ID NO: 72789 - RNA, 21 nt, synthetic construct
  source 1..21: mol_type = other RNA
atcaggcttgagtctgtgctc

SEQ ID NO: 72790 - RNA, 21 nt, synthetic construct
  source 1..21: mol_type = other RNA
atcagggatattggcttatag

SEQ ID NO: 72791 - RNA, 21 nt, synthetic construct
  source 1..21: mol_type = other RNA
atcagggatcacagatacaac

SEQ ID NO: 72792 - RNA, 21 nt, synthetic construct
  source 1..21: mol_type = other RNA
atcagggatttggccagaatc

SEQ ID NO: 72793 - RNA, 21 nt, synthetic construct
  source 1..21: mol_type = other RNA
atcagggccttcccaaagaca

SEQ ID NO: 72794 - RNA, 21 nt, synthetic construct
  source 1..21: mol_type = other RNA
atcagggcctttaatcacctc

SEQ ID NO: 72795 - RNA, 21 nt, synthetic construct
  source 1..21: mol_type = other RNA
atcagggctgaaaaacacctc

SEQ ID NO: 72796 - RNA, 21 nt, synthetic construct
  source 1..21: mol_type = other RNA
atcaggtctctttgaaaggaa

SEQ ID NO: 72797 - RNA, 21 nt, synthetic construct
  source 1..21: mol_type = other RNA
atcaggttgggcttatcagat

SEQ ID NO: 72798 - RNA, 21 nt, synthetic construct
  source 1..21: mol_type = other RNA
atcagtaaaattcccttcagt

SEQ ID NO: 72799 - RNA, 21 nt, synthetic construct
  source 1..21: mol_type = other RNA
atcagtaagaaaacagataac

SEQ ID NO: 72800 - RNA, 21 nt, synthetic construct
  source 1..21: mol_type = other RNA
atcagtagtttgctagtggta

SEQ ID NO: 72801 - RNA, 21 nt, synthetic construct
  source 1..21: mol_type = other RNA
atcagtctccaatcctcagcc

SEQ ID NO: 72802 - RNA, 21 nt, synthetic construct
  source 1..21: mol_type = other RNA
atcagtctgtaagcacctgta

SEQ ID NO: 72803 - RNA, 21 nt, synthetic construct
  source 1..21: mol_type = other RNA
atcagtgctgctctgacgttt

SEQ ID NO: 72804 - RNA, 21 nt, synthetic construct
  source 1..21: mol_type = other RNA
atcagtggccagtgaccagtg

SEQ ID NO: 72805 - RNA, 21 nt, synthetic construct
  source 1..21: mol_type = other RNA
atcagtggttgtgcttcgagg

SEQ ID NO: 72806 - RNA, 21 nt, synthetic construct
  source 1..21: mol_type = other RNA
atcagttaccaccaagaaaaa

SEQ ID NO: 72807 - RNA, 21 nt, synthetic construct
  source 1..21: mol_type = other RNA
atcagttatcacacctaggcc

SEQ ID NO: 72808 - RNA, 21 nt, synthetic construct
  source 1..21: mol_type = other RNA
atcatacacatccagaagtca

SEQ ID NO: 72809 - RNA, 21 nt, synthetic construct
  source 1..21: mol_type = other RNA
atcatacacctggatcaagtg

SEQ ID NO: 72810 - RNA, 21 nt, synthetic construct
  source 1..21: mol_type = other RNA
atcatacacgagtgtgtttcg

SEQ ID NO: 72811 - RNA, 21 nt, synthetic construct
  source 1..21: mol_type = other RNA
atcatactggaaggactcaca

SEQ ID NO: 72812 - RNA, 21 nt, synthetic construct
  source 1..21: mol_type = other RNA
atcatagagtaccaggtcagc

SEQ ID NO: 72813 - RNA, 21 nt, synthetic construct
  source 1..21: mol_type = other RNA
atcatagctcactagagcttc

SEQ ID NO: 72814 - RNA, 21 nt, synthetic construct
  source 1..21: mol_type = other RNA
atcatatagtaattctgtgct

SEQ ID NO: 72815 - RNA, 21 nt, synthetic construct
  source 1..21: mol_type = other RNA
atcatatgatctatcaatctc

SEQ ID NO: 72816 - RNA, 21 nt, synthetic construct
  source 1..21: mol_type = other RNA
atcatcaagacagagctccct

SEQ ID NO: 72817 - RNA, 21 nt, synthetic construct
  source 1..21: mol_type = other RNA
atcatcacagtatgcacaaat

SEQ ID NO: 72818 - RNA, 21 nt, synthetic construct
  source 1..21: mol_type = other RNA
atcatcaggctggctctttcc

SEQ ID NO: 72819 - RNA, 21 nt, synthetic construct
  source 1..21: mol_type = other RNA
atcatcatcaggctggctctt

SEQ ID NO: 72820 - RNA, 21 nt, synthetic construct
  source 1..21: mol_type = other RNA
atcatcatcttatacttggca

SEQ ID NO: 72821 - RNA, 21 nt, synthetic construct
  source 1..21: mol_type = other RNA
atcatccggggagcttttgaa

SEQ ID NO: 72822 - RNA, 21 nt, synthetic construct
  source 1..21: mol_type = other RNA
atcatcgcattacgagttatg

SEQ ID NO: 72823 - RNA, 21 nt, synthetic construct
  source 1..21: mol_type = other RNA
atcatcggaaatataaaaagc

SEQ ID NO: 72824 - RNA, 21 nt, synthetic construct
  source 1..21: mol_type = other RNA
atcatctaatttcccatttga

SEQ ID NO: 72825 - RNA, 21 nt, synthetic construct
  source 1..21: mol_type = other RNA
atcatctaggcatataaactg

SEQ ID NO: 72826 - RNA, 21 nt, synthetic construct
  source 1..21: mol_type = other RNA
atcatcttaagaaccatacag

SEQ ID NO: 72827 - RNA, 21 nt, synthetic construct
  source 1..21: mol_type = other RNA
atcatcttatacttggcaaaa

SEQ ID NO: 72828 - RNA, 21 nt, synthetic construct
  source 1..21: mol_type = other RNA
atcatcttttgcctggatgaa

SEQ ID NO: 72829 - RNA, 21 nt, synthetic construct
  source 1..21: mol_type = other RNA
atcatgaaagtggagaattac

SEQ ID NO: 72830 - RNA, 21 nt, synthetic construct
  source 1..21: mol_type = other RNA
atcatgatgtttggctcctta

SEQ ID NO: 72831 - RNA, 21 nt, synthetic construct
  source 1..21: mol_type = other RNA
atcatgatttaatagaggtct

SEQ ID NO: 72832 - RNA, 21 nt, synthetic construct
  source 1..21: mol_type = other RNA
atcatgcagtacttgtctttt

SEQ ID NO: 72833 - RNA, 21 nt, synthetic construct
  source 1..21: mol_type = other RNA
atcatgcctgggtaattaaac

SEQ ID NO: 72834 - RNA, 21 nt, synthetic construct
  source 1..21: mol_type = other RNA
atcatgggagccaaacttgaa

SEQ ID NO: 72835 - RNA, 21 nt, synthetic construct
  source 1..21: mol_type = other RNA
atcatggtgggccttgcaagc

SEQ ID NO: 72836 - RNA, 21 nt, synthetic construct
  source 1..21: mol_type = other RNA
atcatgtcaagaatgaagtca

SEQ ID NO: 72837 - RNA, 21 nt, synthetic construct
  source 1..21: mol_type = other RNA
atcatgtcttcttggattttc

SEQ ID NO: 72838 - RNA, 21 nt, synthetic construct
  source 1..21: mol_type = other RNA
atcattcaggacactggaggt

SEQ ID NO: 72839 - RNA, 21 nt, synthetic construct
  source 1..21: mol_type = other RNA
atcattcataaacacagaaca

SEQ ID NO: 72840 - RNA, 21 nt, synthetic construct
  source 1..21: mol_type = other RNA
atcattcatctaaacgtttgg

SEQ ID NO: 72841 - RNA, 21 nt, synthetic construct
  source 1..21: mol_type = other RNA
atcattcttctaataggaagt

SEQ ID NO: 72842 - RNA, 21 nt, synthetic construct
  source 1..21: mol_type = other RNA
atcattgcaccactgcactcc

SEQ ID NO: 72843 - RNA, 21 nt, synthetic construct
  source 1..21: mol_type = other RNA
atcattgtagctatatcccaa

SEQ ID NO: 72844 - RNA, 21 nt, synthetic construct
  source 1..21: mol_type = other RNA
atcattgttaggtgctggctt

SEQ ID NO: 72845 - RNA, 21 nt, synthetic construct
  source 1..21: mol_type = other RNA
atcattgttcagggaaggctg

SEQ ID NO: 72846 - RNA, 21 nt, synthetic construct
  source 1..21: mol_type = other RNA
atcatttagtaagtgtgagca

SEQ ID NO: 72847 - RNA, 21 nt, synthetic construct
  source 1..21: mol_type = other RNA
atcatttatacccaagtaaac

SEQ ID NO: 72848 - RNA, 21 nt, synthetic construct
  source 1..21: mol_type = other RNA
atcatttcaaaccaatgttct

SEQ ID NO: 72849 - RNA, 21 nt, synthetic construct
  source 1..21: mol_type = other RNA
atcatttcactcttttaaggt

SEQ ID NO: 72850 - RNA, 21 nt, synthetic construct
  source 1..21: mol_type = other RNA
atcatttgaatgatgcgaaag

SEQ ID NO: 72851 - RNA, 21 nt, synthetic construct
  source 1..21: mol_type = other RNA
atcattttaaagggataatgc

SEQ ID NO: 72852 - RNA, 21 nt, synthetic construct
  source 1..21: mol_type = other RNA
atcattttggcaaattgtcag

SEQ ID NO: 72853 - RNA, 21 nt, synthetic construct
  source 1..21: mol_type = other RNA
atccaaaagcctcaaaattta

SEQ ID NO: 72854 - RNA, 21 nt, synthetic construct
  source 1..21: mol_type = other RNA
atccaaaagggaaatatgaac

SEQ ID NO: 72855 - RNA, 21 nt, synthetic construct
  source 1..21: mol_type = other RNA
atccaaaatcctctgtagata

SEQ ID NO: 72856 - RNA, 21 nt, synthetic construct
  source 1..21: mol_type = other RNA
atccaaacagaaaccctgtac

SEQ ID NO: 72857 - RNA, 21 nt, synthetic construct
  source 1..21: mol_type = other RNA
atccaaagataaaggtaagga

SEQ ID NO: 72858 - RNA, 21 nt, synthetic construct
  source 1..21: mol_type = other RNA
atccaaattattgacaagacg

SEQ ID NO: 72859 - RNA, 21 nt, synthetic construct
  source 1..21: mol_type = other RNA
atccaaattcacagcatgaat

SEQ ID NO: 72860 - RNA, 21 nt, synthetic construct
  source 1..21: mol_type = other RNA
atccaacatgccagctttggc

SEQ ID NO: 72861 - RNA, 21 nt, synthetic construct
  source 1..21: mol_type = other RNA
atccaacgaccggacgtggtg

SEQ ID NO: 72862 - RNA, 21 nt, synthetic construct
  source 1..21: mol_type = other RNA
atccaactgcagtctgtcctc

SEQ ID NO: 72863 - RNA, 21 nt, synthetic construct
  source 1..21: mol_type = other RNA
atccaagaagacatgataaat

SEQ ID NO: 72864 - RNA, 21 nt, synthetic construct
  source 1..21: mol_type = other RNA
atccaagcacaaacctggcaa

SEQ ID NO: 72865 - RNA, 21 nt, synthetic construct
  source 1..21: mol_type = other RNA
atccaaggacagaaattcaac

SEQ ID NO: 72866 - RNA, 21 nt, synthetic construct
  source 1..21: mol_type = other RNA
atccaagtattgtatcaatgt

SEQ ID NO: 72867 - RNA, 21 nt, synthetic construct
  source 1..21: mol_type = other RNA
atccaagtttctagccataat

SEQ ID NO: 72868 - RNA, 21 nt, synthetic construct
  source 1..21: mol_type = other RNA
atccaatcactggctagtagg

SEQ ID NO: 72869 - RNA, 21 nt, synthetic construct
  source 1..21: mol_type = other RNA
atccaattttttggcatacaa

SEQ ID NO: 72870 - RNA, 21 nt, synthetic construct
  source 1..21: mol_type = other RNA
atccacaacattgtgcaacca

SEQ ID NO: 72871 - RNA, 21 nt, synthetic construct
  source 1..21: mol_type = other RNA
atccacaatgagacatttgag

SEQ ID NO: 72872 - RNA, 21 nt, synthetic construct
  source 1..21: mol_type = other RNA
atccacagctttcttttccaa

SEQ ID NO: 72873 - RNA, 21 nt, synthetic construct
  source 1..21: mol_type = other RNA
atccacagtatgctgtttaca

SEQ ID NO: 72874 - RNA, 21 nt, synthetic construct
  source 1..21: mol_type = other RNA
atccacatttggttttactac

SEQ ID NO: 72875 - RNA, 21 nt, synthetic construct
  source 1..21: mol_type = other RNA
atccacattttgtgacaagtt

SEQ ID NO: 72876 - RNA, 21 nt, synthetic construct
  source 1..21: mol_type = other RNA
atccaccactccaccttagcc

SEQ ID NO: 72877 - RNA, 21 nt, synthetic construct
  source 1..21: mol_type = other RNA
atccacccacttgtcccatgg

SEQ ID NO: 72878 - RNA, 21 nt, synthetic construct
  source 1..21: mol_type = other RNA
atccacgcgtaagggtacaga

SEQ ID NO: 72879 - RNA, 21 nt, synthetic construct
  source 1..21: mol_type = other RNA
atccactaggggactaacagg

SEQ ID NO: 72880 - RNA, 21 nt, synthetic construct
  source 1..21: mol_type = other RNA
atccactgcacagtatgcggg

SEQ ID NO: 72881 - RNA, 21 nt, synthetic construct
  source 1..21: mol_type = other RNA
atccagaagagaatggctgga

SEQ ID NO: 72882 - RNA, 21 nt, synthetic construct
  source 1..21: mol_type = other RNA
atccagaagtcactttttatt

SEQ ID NO: 72883 - RNA, 21 nt, synthetic construct
  source 1..21: mol_type = other RNA
atccagacagctaatatgctg

SEQ ID NO: 72884 - RNA, 21 nt, synthetic construct
  source 1..21: mol_type = other RNA
atccagataaattatagctcc

SEQ ID NO: 72885 - RNA, 21 nt, synthetic construct
  source 1..21: mol_type = other RNA
atccagatggacaaattacca

SEQ ID NO: 72886 - RNA, 21 nt, synthetic construct
  source 1..21: mol_type = other RNA
atccagatgtagagaaacagg

SEQ ID NO: 72887 - RNA, 21 nt, synthetic construct
  source 1..21: mol_type = other RNA
atccagattgatatctgagtg

SEQ ID NO: 72888 - RNA, 21 nt, synthetic construct
  source 1..21: mol_type = other RNA
atccagcagtttcacttctta

SEQ ID NO: 72889 - RNA, 21 nt, synthetic construct
  source 1..21: mol_type = other RNA
atccagctaattttcattact

SEQ ID NO: 72890 - RNA, 21 nt, synthetic construct
  source 1..21: mol_type = other RNA
atccaggatcttactgtaagt

SEQ ID NO: 72891 - RNA, 21 nt, synthetic construct
  source 1..21: mol_type = other RNA
atccaggatggcatgaaatgg

SEQ ID NO: 72892 - RNA, 21 nt, synthetic construct
  source 1..21: mol_type = other RNA
atccaggcaaaagatgatgaa

SEQ ID NO: 72893 - RNA, 21 nt, synthetic construct
  source 1..21: mol_type = other RNA
atccaggggaatagaaagtta

SEQ ID NO: 72894 - RNA, 21 nt, synthetic construct
  source 1..21: mol_type = other RNA
atccaggtgtatgatcttatt

SEQ ID NO: 72895 - RNA, 21 nt, synthetic construct
  source 1..21: mol_type = other RNA
atccagtaatcttgctaaaca

SEQ ID NO: 72896 - RNA, 21 nt, synthetic construct
  source 1..21: mol_type = other RNA
atccagtctctacccagcact

SEQ ID NO: 72897 - RNA, 21 nt, synthetic construct
  source 1..21: mol_type = other RNA
atccagtctctgcaacatttg

SEQ ID NO: 72898 - RNA, 21 nt, synthetic construct
  source 1..21: mol_type = other RNA
atccagtcttcaggtctctct

SEQ ID NO: 72899 - RNA, 21 nt, synthetic construct
  source 1..21: mol_type = other RNA
atccagtgacacctgaggggt

SEQ ID NO: 72900 - RNA, 21 nt, synthetic construct
  source 1..21: mol_type = other RNA
atccagtggttttttgttttt

SEQ ID NO: 72901 - RNA, 21 nt, synthetic construct
  source 1..21: mol_type = other RNA
atccagtttaaagctttgtga

SEQ ID NO: 72902 - RNA, 21 nt, synthetic construct
  source 1..21: mol_type = other RNA
atccatgttgttgaatgtggc

SEQ ID NO: 72903 - RNA, 21 nt, synthetic construct
  source 1..21: mol_type = other RNA
atccattactcgtggttatag

SEQ ID NO: 72904 - RNA, 21 nt, synthetic construct
  source 1..21: mol_type = other RNA
atccattcatctctcgatgga

SEQ ID NO: 72905 - RNA, 21 nt, synthetic construct
  source 1..21: mol_type = other RNA
atccattgggtacataccgag

SEQ ID NO: 72906 - RNA, 21 nt, synthetic construct
  source 1..21: mol_type = other RNA
atcccaaagtgagcagaagga

SEQ ID NO: 72907 - RNA, 21 nt, synthetic construct
  source 1..21: mol_type = other RNA
atcccaaattggcatttaaaa

SEQ ID NO: 72908 - RNA, 21 nt, synthetic construct
  source 1..21: mol_type = other RNA
atcccaagggttttggtatgt

SEQ ID NO: 72909 - RNA, 21 nt, synthetic construct
  source 1..21: mol_type = other RNA
atcccaagtgcccattaacag

SEQ ID NO: 72910 - RNA, 21 nt, synthetic construct
  source 1..21: mol_type = other RNA
atcccaattacttccagtgtt

SEQ ID NO: 72911 - RNA, 21 nt, synthetic construct
  source 1..21: mol_type = other RNA
atcccactagtggaagaatca

SEQ ID NO: 72912 - RNA, 21 nt, synthetic construct
  source 1..21: mol_type = other RNA
atcccacttgatccaggtgta

SEQ ID NO: 72913 - RNA, 21 nt, synthetic construct
  source 1..21: mol_type = other RNA
atcccagacagatatatgcat

SEQ ID NO: 72914 - RNA, 21 nt, synthetic construct
  source 1..21: mol_type = other RNA
atcccagaggtactcaacgac

SEQ ID NO: 72915 - RNA, 21 nt, synthetic construct
  source 1..21: mol_type = other RNA
atcccagatctaacaaacgca

SEQ ID NO: 72916 - RNA, 21 nt, synthetic construct
  source 1..21: mol_type = other RNA
atcccagatggggattgaggg

SEQ ID NO: 72917 - RNA, 21 nt, synthetic construct
  source 1..21: mol_type = other RNA
atcccagctacataacttccc

SEQ ID NO: 72918 - RNA, 21 nt, synthetic construct
  source 1..21: mol_type = other RNA
atcccagtcctttgggaggtc

SEQ ID NO: 72919 - RNA, 21 nt, synthetic construct
  source 1..21: mol_type = other RNA
atcccatataaggggaatcat

SEQ ID NO: 72920 - RNA, 21 nt, synthetic construct
  source 1..21: mol_type = other RNA
atcccatatggaggcaatgtt

SEQ ID NO: 72921 - RNA, 21 nt, synthetic construct
  source 1..21: mol_type = other RNA
atcccattactcggtatgtac

SEQ ID NO: 72922 - RNA, 21 nt, synthetic construct
  source 1..21: mol_type = other RNA
atcccatttgtaacatgttag

SEQ ID NO: 72923 - RNA, 21 nt, synthetic construct
  source 1..21: mol_type = other RNA
atccccaaataacatgcatat

SEQ ID NO: 72924 - RNA, 21 nt, synthetic construct
  source 1..21: mol_type = other RNA
atccccagaaagagagagggg

SEQ ID NO: 72925 - RNA, 21 nt, synthetic construct
  source 1..21: mol_type = other RNA
atccccatctgggatacttct

SEQ ID NO: 72926 - RNA, 21 nt, synthetic construct
  source 1..21: mol_type = other RNA
atccccattcaattgtcctgg

SEQ ID NO: 72927 - RNA, 21 nt, synthetic construct
  source 1..21: mol_type = other RNA
atccccatttttctcgacaca

SEQ ID NO: 72928 - RNA, 21 nt, synthetic construct
  source 1..21: mol_type = other RNA
atcccccagcccctggtgatc

SEQ ID NO: 72929 - RNA, 21 nt, synthetic construct
  source 1..21: mol_type = other RNA
atccccccacccctgctctgc

SEQ ID NO: 72930 - RNA, 21 nt, synthetic construct
  source 1..21: mol_type = other RNA
atccccgctgcgagaaaggcg

SEQ ID NO: 72931 - RNA, 21 nt, synthetic construct
  source 1..21: mol_type = other RNA
atccccgctgtccatttccag

SEQ ID NO: 72932 - RNA, 21 nt, synthetic construct
  source 1..21: mol_type = other RNA
atcccctttacccctgagaac

SEQ ID NO: 72933 - RNA, 21 nt, synthetic construct
  source 1..21: mol_type = other RNA
atcccctttagtgttctgtgt

SEQ ID NO: 72934 - RNA, 21 nt, synthetic construct
  source 1..21: mol_type = other RNA
atcccgcaccttgattttgat

SEQ ID NO: 72935 - RNA, 21 nt, synthetic construct
  source 1..21: mol_type = other RNA
atcccggaacaggaaaaggac

SEQ ID NO: 72936 - RNA, 21 nt, synthetic construct
  source 1..21: mol_type = other RNA
atcccggccaggtgcggtggc

SEQ ID NO: 72937 - RNA, 21 nt, synthetic construct
  source 1..21: mol_type = other RNA
atccctacctaaaaagggagt

SEQ ID NO: 72938 - RNA, 21 nt, synthetic construct
  source 1..21: mol_type = other RNA
atccctatgcaataactcaaa

SEQ ID NO: 72939 - RNA, 21 nt, synthetic construct
  source 1..21: mol_type = other RNA
atccctcatatcagttatcac

SEQ ID NO: 72940 - RNA, 21 nt, synthetic construct
  source 1..21: mol_type = other RNA
atccctccagtccagcaccac

SEQ ID NO: 72941 - RNA, 21 nt, synthetic construct
  source 1..21: mol_type = other RNA
atccctcctctggccctccat

SEQ ID NO: 72942 - RNA, 21 nt, synthetic construct
  source 1..21: mol_type = other RNA
atccctctaaataggtattca

SEQ ID NO: 72943 - RNA, 21 nt, synthetic construct
  source 1..21: mol_type = other RNA
atccctgataatcacagacgc

SEQ ID NO: 72944 - RNA, 21 nt, synthetic construct
  source 1..21: mol_type = other RNA
atccctgatatgtcgcatgaa

SEQ ID NO: 72945 - RNA, 21 nt, synthetic construct
  source 1..21: mol_type = other RNA
atccctgatcaagttgcttgg

SEQ ID NO: 72946 - RNA, 21 nt, synthetic construct
  source 1..21: mol_type = other RNA
atccctgccgcgcgcgaaggc

SEQ ID NO: 72947 - RNA, 21 nt, synthetic construct
  source 1..21: mol_type = other RNA
atccctggggtttccttacct

SEQ ID NO: 72948 - RNA, 21 nt, synthetic construct
  source 1..21: mol_type = other RNA
atcccttccccacctttcctg

SEQ ID NO: 72949 - RNA, 21 nt, synthetic construct
  source 1..21: mol_type = other RNA
atccctttaaaatgatagcat

SEQ ID NO: 72950 - RNA, 21 nt, synthetic construct
  source 1..21: mol_type = other RNA
atccctttcgctaatctcaat

SEQ ID NO: 72951 - RNA, 21 nt, synthetic construct
  source 1..21: mol_type = other RNA
atccgaaagaactgaaagcag

SEQ ID NO: 72952 - RNA, 21 nt, synthetic construct
  source 1..21: mol_type = other RNA
atccgagacaagttctcctgt

SEQ ID NO: 72953 - RNA, 21 nt, synthetic construct
  source 1..21: mol_type = other RNA
atccgataaagggtctggtat

SEQ ID NO: 72954 - RNA, 21 nt, synthetic construct
  source 1..21: mol_type = other RNA
atccgccaccacgcctggcta

SEQ ID NO: 72955 - RNA, 21 nt, synthetic construct
  source 1..21: mol_type = other RNA
atccggctttatgagacacac

SEQ ID NO: 72956 - RNA, 21 nt, synthetic construct
  source 1..21: mol_type = other RNA
atccgggaacatgacatgtat

SEQ ID NO: 72957 - RNA, 21 nt, synthetic construct
  source 1..21: mol_type = other RNA
atccgggagggaggtaggggg

SEQ ID NO: 72958 - RNA, 21 nt, synthetic construct
  source 1..21: mol_type = other RNA
atccggggagcttttgaaact

SEQ ID NO: 72959 - RNA, 21 nt, synthetic construct
  source 1..21: mol_type = other RNA
atccggtctcagtttttaatt

SEQ ID NO: 72960 - RNA, 21 nt, synthetic construct
  source 1..21: mol_type = other RNA
atcctaaacacttagcatgtt

SEQ ID NO: 72961 - RNA, 21 nt, synthetic construct
  source 1..21: mol_type = other RNA
atcctaagcatgagatactac

SEQ ID NO: 72962 - RNA, 21 nt, synthetic construct
  source 1..21: mol_type = other RNA
atcctaagccatctaattcac

SEQ ID NO: 72963 - RNA, 21 nt, synthetic construct
  source 1..21: mol_type = other RNA
atcctaatacagtaaagcccc

SEQ ID NO: 72964 - RNA, 21 nt, synthetic construct
  source 1..21: mol_type = other RNA
atcctaatgggcgtggagcgg

SEQ ID NO: 72965 - RNA, 21 nt, synthetic construct
  source 1..21: mol_type = other RNA
atcctagccccaaatacctct

SEQ ID NO: 72966 - RNA, 21 nt, synthetic construct
  source 1..21: mol_type = other RNA
atcctatcagagcatgtcccc

SEQ ID NO: 72967 - RNA, 21 nt, synthetic construct
  source 1..21: mol_type = other RNA
atcctatctaagcctactgct

SEQ ID NO: 72968 - RNA, 21 nt, synthetic construct
  source 1..21: mol_type = other RNA
atcctatgtggggaatgctca

SEQ ID NO: 72969 - RNA, 21 nt, synthetic construct
  source 1..21: mol_type = other RNA
atcctattttgttattagggt

SEQ ID NO: 72970 - RNA, 21 nt, synthetic construct
  source 1..21: mol_type = other RNA
atcctcaacaagagaggacag

SEQ ID NO: 72971 - RNA, 21 nt, synthetic construct
  source 1..21: mol_type = other RNA
atcctcacaacaggcctgagc

SEQ ID NO: 72972 - RNA, 21 nt, synthetic construct
  source 1..21: mol_type = other RNA
atcctcacatcagttaccacc

SEQ ID NO: 72973 - RNA, 21 nt, synthetic construct
  source 1..21: mol_type = other RNA
atcctcacatgtttggtcaat

SEQ ID NO: 72974 - RNA, 21 nt, synthetic construct
  source 1..21: mol_type = other RNA
atcctcagccccctccctacc

SEQ ID NO: 72975 - RNA, 21 nt, synthetic construct
  source 1..21: mol_type = other RNA
atcctcagggtaggaaaagac

SEQ ID NO: 72976 - RNA, 21 nt, synthetic construct
  source 1..21: mol_type = other RNA
atcctccaatgtttttaattc

SEQ ID NO: 72977 - RNA, 21 nt, synthetic construct
  source 1..21: mol_type = other RNA
atcctccagccttaatctcct

SEQ ID NO: 72978 - RNA, 21 nt, synthetic construct
  source 1..21: mol_type = other RNA
atcctccgtagctgtcgctct

SEQ ID NO: 72979 - RNA, 21 nt, synthetic construct
  source 1..21: mol_type = other RNA
atcctcctgccttggccttct

SEQ ID NO: 72980 - RNA, 21 nt, synthetic construct
  source 1..21: mol_type = other RNA
atcctctatttttgtctggtg

SEQ ID NO: 72981 - RNA, 21 nt, synthetic construct
  source 1..21: mol_type = other RNA
atcctctgtagataaacgtta

SEQ ID NO: 72982 - RNA, 21 nt, synthetic construct
  source 1..21: mol_type = other RNA
atcctcttctgaagaggcttt

SEQ ID NO: 72983 - RNA, 21 nt, synthetic construct
  source 1..21: mol_type = other RNA
atcctgagacttaggcaaagg

SEQ ID NO: 72984 - RNA, 21 nt, synthetic construct
  source 1..21: mol_type = other RNA
atcctgaggaagctaatcaag

SEQ ID NO: 72985 - RNA, 21 nt, synthetic construct
  source 1..21: mol_type = other RNA
atcctgatttaggccactctc

SEQ ID NO: 72986 - RNA, 21 nt, synthetic construct
  source 1..21: mol_type = other RNA
atcctgctgggctattgtttt

SEQ ID NO: 72987 - RNA, 21 nt, synthetic construct
  source 1..21: mol_type = other RNA
atcctggaatagtagcttcaa

SEQ ID NO: 72988 - RNA, 21 nt, synthetic construct
  source 1..21: mol_type = other RNA
atcctggagggctcccagtgc

SEQ ID NO: 72989 - RNA, 21 nt, synthetic construct
  source 1..21: mol_type = other RNA
atcctggattgctagtgtcct

SEQ ID NO: 72990 - RNA, 21 nt, synthetic construct
  source 1..21: mol_type = other RNA
atcctggatttgggaaggatg

SEQ ID NO: 72991 - RNA, 21 nt, synthetic construct
  source 1..21: mol_type = other RNA
atcctgtaaacctggaatcct

SEQ ID NO: 72992 - RNA, 21 nt, synthetic construct
  source 1..21: mol_type = other RNA
atcctgtccaggcgcctgcat

SEQ ID NO: 72993 - RNA, 21 nt, synthetic construct
  source 1..21: mol_type = other RNA
atcctgtctcagagtatatat

SEQ ID NO: 72994 - RNA, 21 nt, synthetic construct
  source 1..21: mol_type = other RNA
atcctgtttctctacatctgg

SEQ ID NO: 72995 - RNA, 21 nt, synthetic construct
  source 1..21: mol_type = other RNA
atcctgtttgagaagtctttt

SEQ ID NO: 72996 - RNA, 21 nt, synthetic construct
  source 1..21: mol_type = other RNA
atccttactaccaccactaat

SEQ ID NO: 72997 - RNA, 21 nt, synthetic construct
  source 1..21: mol_type = other RNA
atccttacttccagctcacgt

SEQ ID NO: 72998 - RNA, 21 nt, synthetic construct
  source 1..21: mol_type = other RNA
atccttagattacaaaagaac

SEQ ID NO: 72999 - RNA, 21 nt, synthetic construct
  source 1..21: mol_type = other RNA
atccttcagtcagttctctgc

SEQ ID NO: 73000 - RNA, 21 nt, synthetic construct
  source 1..21: mol_type = other RNA
atccttcccaaatccaggatg

SEQ ID NO: 73001 - RNA, 21 nt, synthetic construct
  source 1..21: mol_type = other RNA
atccttccttcatgtcccctg

SEQ ID NO: 73002 - RNA, 21 nt, synthetic construct
  source 1..21: mol_type = other RNA
atccttctaatcagtaactta

SEQ ID NO: 73003 - RNA, 21 nt, synthetic construct
  source 1..21: mol_type = other RNA
atccttctacatccccccacc

SEQ ID NO: 73004 - RNA, 21 nt, synthetic construct
  source 1..21: mol_type = other RNA
atccttctcatagtcttccaa

SEQ ID NO: 73005 - RNA, 21 nt, synthetic construct
  source 1..21: mol_type = other RNA
atccttctgccttgacctccc

SEQ ID NO: 73006 - RNA, 21 nt, synthetic construct
  source 1..21: mol_type = other RNA
atccttgcaccaactccacat

SEQ ID NO: 73007 - RNA, 21 nt, synthetic construct
  source 1..21: mol_type = other RNA
atccttgccaacagttacttt

SEQ ID NO: 73008 - RNA, 21 nt, synthetic construct
  source 1..21: mol_type = other RNA
atccttgtggtcttaagagac

SEQ ID NO: 73009 - RNA, 21 nt, synthetic construct
  source 1..21: mol_type = other RNA
atcctttaatttgggtttgag

SEQ ID NO: 73010 - RNA, 21 nt, synthetic construct
  source 1..21: mol_type = other RNA
atcctttcaaggtatctcccc

SEQ ID NO: 73011 - RNA, 21 nt, synthetic construct
  source 1..21: mol_type = other RNA
atcctttcccttctgctcggc

SEQ ID NO: 73012 - RNA, 21 nt, synthetic construct
  source 1..21: mol_type = other RNA
atcctttccttgtcctaaaat

SEQ ID NO: 73013 - RNA, 21 nt, synthetic construct
  source 1..21: mol_type = other RNA
atcctttgcacacaccaaatc

SEQ ID NO: 73014 - RNA, 21 nt, synthetic construct
  source 1..21: mol_type = other RNA
atcctttgcgtctgtgattat

SEQ ID NO: 73015 - RNA, 21 nt, synthetic construct
  source 1..21: mol_type = other RNA
atcctttgcttcccacttcga

SEQ ID NO: 73016 - RNA, 21 nt, synthetic construct
  source 1..21: mol_type = other RNA
atcctttgtgcaggtctgggt

SEQ ID NO: 73017 - RNA, 21 nt, synthetic construct
  source 1..21: mol_type = other RNA
atccttttatgtgcagtctaa

SEQ ID NO: 73018 - RNA, 21 nt, synthetic construct
  source 1..21: mol_type = other RNA
atccttttcccaggagctaga

SEQ ID NO: 73019 - RNA, 21 nt, synthetic construct
  source 1..21: mol_type = other RNA
atcgaatcctcacaacaggcc

SEQ ID NO: 73020 - RNA, 21 nt, synthetic construct
  source 1..21: mol_type = other RNA
atcgagagatgaatggataag

SEQ ID NO: 73021 - RNA, 21 nt, synthetic construct
  source 1..21: mol_type = other RNA
atcgcaatccaaaatcctctg

SEQ ID NO: 73022 - RNA, 21 nt, synthetic construct
  source 1..21: mol_type = other RNA
atcgcagggccattctgctat

SEQ ID NO: 73023 - RNA, 21 nt, synthetic construct
  source 1..21: mol_type = other RNA
atcgcattacgagttatgcaa

SEQ ID NO: 73024 - RNA, 21 nt, synthetic construct
  source 1..21: mol_type = other RNA
atcgcgcccagcccgtgtgtt

SEQ ID NO: 73025 - RNA, 21 nt, synthetic construct
  source 1..21: mol_type = other RNA
atcggaaatataaaaagcctc

SEQ ID NO: 73026 - RNA, 21 nt, synthetic construct
  source 1..21: mol_type = other RNA
atcggaacaggctcaatacct

SEQ ID NO: 73027 - RNA, 21 nt, synthetic construct
  source 1..21: mol_type = other RNA
atcggaactcctgtatgccgc

SEQ ID NO: 73028 - RNA, 21 nt, synthetic construct
  source 1..21: mol_type = other RNA
atcggataaggaagagtttat

SEQ ID NO: 73029 - RNA, 21 nt, synthetic construct
  source 1..21: mol_type = other RNA
atcgggagtaacagacctctg

SEQ ID NO: 73030 - RNA, 21 nt, synthetic construct
  source 1..21: mol_type = other RNA
atcggggcctacagtggttcc

SEQ ID NO: 73031 - RNA, 21 nt, synthetic construct
  source 1..21: mol_type = other RNA
atcggtctgtatttctgcttt

SEQ ID NO: 73032 - RNA, 21 nt, synthetic construct
  source 1..21: mol_type = other RNA
atcgtaaaaagccatttatca

SEQ ID NO: 73033 - RNA, 21 nt, synthetic construct
  source 1..21: mol_type = other RNA
atcgtaaaacctcatctctac

SEQ ID NO: 73034 - RNA, 21 nt, synthetic construct
  source 1..21: mol_type = other RNA
atcgtcctcttcgggtgtcag

SEQ ID NO: 73035 - RNA, 21 nt, synthetic construct
  source 1..21: mol_type = other RNA
atcgtgagactattatgagca

SEQ ID NO: 73036 - RNA, 21 nt, synthetic construct
  source 1..21: mol_type = other RNA
atcgtgatagtcttccaattg

SEQ ID NO: 73037 - RNA, 21 nt, synthetic construct
  source 1..21: mol_type = other RNA
atcgttatatcctcagggtag

SEQ ID NO: 73038 - RNA, 21 nt, synthetic construct
  source 1..21: mol_type = other RNA
atcgttcacactcgcactcca

SEQ ID NO: 73039 - RNA, 21 nt, synthetic construct
  source 1..21: mol_type = other RNA
atcgtttcaatattaagagtc

SEQ ID NO: 73040 - RNA, 21 nt, synthetic construct
  source 1..21: mol_type = other RNA
atctaaacgtttggtgactga

SEQ ID NO: 73041 - RNA, 21 nt, synthetic construct
  source 1..21: mol_type = other RNA
atctaaagccaatcttcccaa

SEQ ID NO: 73042 - RNA, 21 nt, synthetic construct
  source 1..21: mol_type = other RNA
atctaaagccaggctttccca

SEQ ID NO: 73043 - RNA, 21 nt, synthetic construct
  source 1..21: mol_type = other RNA
atctaaatggtgtgaagttgg

SEQ ID NO: 73044 - RNA, 21 nt, synthetic construct
  source 1..21: mol_type = other RNA
atctaaattaagcttcgacag

SEQ ID NO: 73045 - RNA, 21 nt, synthetic construct
  source 1..21: mol_type = other RNA
atctaacaaaagatacacaag

SEQ ID NO: 73046 - RNA, 21 nt, synthetic construct
  source 1..21: mol_type = other RNA
atctaacaaacgcattgtgat

SEQ ID NO: 73047 - RNA, 21 nt, synthetic construct
  source 1..21: mol_type = other RNA
atctaacagaaatacaatgtg

SEQ ID NO: 73048 - RNA, 21 nt, synthetic construct
  source 1..21: mol_type = other RNA
atctaaccctcaatccccatc

SEQ ID NO: 73049 - RNA, 21 nt, synthetic construct
  source 1..21: mol_type = other RNA
atctaaccctcctcctctaca

SEQ ID NO: 73050 - RNA, 21 nt, synthetic construct
  source 1..21: mol_type = other RNA
atctaagcctacctcccttca

SEQ ID NO: 73051 - RNA, 21 nt, synthetic construct
  source 1..21: mol_type = other RNA
atctaagcctactgctctgtc

SEQ ID NO: 73052 - RNA, 21 nt, synthetic construct
  source 1..21: mol_type = other RNA
atctaaggattatggctagaa

SEQ ID NO: 73053 - RNA, 21 nt, synthetic construct
  source 1..21: mol_type = other RNA
atctaagtctcaacctacttt

SEQ ID NO: 73054 - RNA, 21 nt, synthetic construct
  source 1..21: mol_type = other RNA
atctaataaaaagcctctctg

SEQ ID NO: 73055 - RNA, 21 nt, synthetic construct
  source 1..21: mol_type = other RNA
atctaattcgaaaatgggcca

SEQ ID NO: 73056 - RNA, 21 nt, synthetic construct
  source 1..21: mol_type = other RNA
atctacaaaacagggttatta

SEQ ID NO: 73057 - RNA, 21 nt, synthetic construct
  source 1..21: mol_type = other RNA
atctacagaggattttggatt

SEQ ID NO: 73058 - RNA, 21 nt, synthetic construct
  source 1..21: mol_type = other RNA
atctacagattcaatgcaata

SEQ ID NO: 73059 - RNA, 21 nt, synthetic construct
  source 1..21: mol_type = other RNA
atctacaggtcggaaggaatg

SEQ ID NO: 73060 - RNA, 21 nt, synthetic construct
  source 1..21: mol_type = other RNA
atctacatgtacgccaatttt

SEQ ID NO: 73061 - RNA, 21 nt, synthetic construct
  source 1..21: mol_type = other RNA
atctaccaaaaaactacgagt

SEQ ID NO: 73062 - RNA, 21 nt, synthetic construct
  source 1..21: mol_type = other RNA
atctaccaaacattgaaggca

SEQ ID NO: 73063 - RNA, 21 nt, synthetic construct
  source 1..21: mol_type = other RNA
atctactcttttgtttttggg

SEQ ID NO: 73064 - RNA, 21 nt, synthetic construct
  source 1..21: mol_type = other RNA
atctactttctaatcctttgc

SEQ ID NO: 73065 - RNA, 21 nt, synthetic construct
  source 1..21: mol_type = other RNA
atctagaaagataaatccaac

SEQ ID NO: 73066 - RNA, 21 nt, synthetic construct
  source 1..21: mol_type = other RNA
atctagcacagaaccatgtaa

SEQ ID NO: 73067 - RNA, 21 nt, synthetic construct
  source 1..21: mol_type = other RNA
atctaggaaacactgctcaga

SEQ ID NO: 73068 - RNA, 21 nt, synthetic construct
  source 1..21: mol_type = other RNA
atctaggaggtctaagagata

SEQ ID NO: 73069 - RNA, 21 nt, synthetic construct
  source 1..21: mol_type = other RNA
atctaggagtacagtgcatac

SEQ ID NO: 73070 - RNA, 21 nt, synthetic construct
  source 1..21: mol_type = other RNA
atctaggcatataaactggaa

SEQ ID NO: 73071 - RNA, 21 nt, synthetic construct
  source 1..21: mol_type = other RNA
atctaggcatataataagcag

SEQ ID NO: 73072 - RNA, 21 nt, synthetic construct
  source 1..21: mol_type = other RNA
atctaggcgaaatatctccct

SEQ ID NO: 73073 - RNA, 21 nt, synthetic construct
  source 1..21: mol_type = other RNA
atctaggttatctgttttctt

SEQ ID NO: 73074 - RNA, 21 nt, synthetic construct
  source 1..21: mol_type = other RNA
atctagtgaagtcaatttcag

SEQ ID NO: 73075 - RNA, 21 nt, synthetic construct
  source 1..21: mol_type = other RNA
atctagttaccactagcaaac

SEQ ID NO: 73076 - RNA, 21 nt, synthetic construct
  source 1..21: mol_type = other RNA
atctatcaatctcacacctgg

SEQ ID NO: 73077 - RNA, 21 nt, synthetic construct
  source 1..21: mol_type = other RNA
atctatcagggctgaaaaaca

SEQ ID NO: 73078 - RNA, 21 nt, synthetic construct
  source 1..21: mol_type = other RNA
atctatgaatttgcctattct

SEQ ID NO: 73079 - RNA, 21 nt, synthetic construct
  source 1..21: mol_type = other RNA
atctatgcatactgcagcact

SEQ ID NO: 73080 - RNA, 21 nt, synthetic construct
  source 1..21: mol_type = other RNA
atctatgtcccctggggcctc

SEQ ID NO: 73081 - RNA, 21 nt, synthetic construct
  source 1..21: mol_type = other RNA
atctattaacagaagggtata

SEQ ID NO: 73082 - RNA, 21 nt, synthetic construct
  source 1..21: mol_type = other RNA
atctatttccccattagagta

SEQ ID NO: 73083 - RNA, 21 nt, synthetic construct
  source 1..21: mol_type = other RNA
atctcaaacagcctaattgta

SEQ ID NO: 73084 - RNA, 21 nt, synthetic construct
  source 1..21: mol_type = other RNA
atctcaatcagggccttccca

SEQ ID NO: 73085 - RNA, 21 nt, synthetic construct
  source 1..21: mol_type = other RNA
atctcacacctgggtatacag

SEQ ID NO: 73086 - RNA, 21 nt, synthetic construct
  source 1..21: mol_type = other RNA
atctcacgtcaccgcaacctc

SEQ ID NO: 73087 - RNA, 21 nt, synthetic construct
  source 1..21: mol_type = other RNA
atctcactcacctagctgttt

SEQ ID NO: 73088 - RNA, 21 nt, synthetic construct
  source 1..21: mol_type = other RNA
atctcagcacagagccgaaat

SEQ ID NO: 73089 - RNA, 21 nt, synthetic construct
  source 1..21: mol_type = other RNA
atctcagctcattacagtctc

SEQ ID NO: 73090 - RNA, 21 nt, synthetic construct
  source 1..21: mol_type = other RNA
atctcagtcataatttgtgtc

SEQ ID NO: 73091 - RNA, 21 nt, synthetic construct
  source 1..21: mol_type = other RNA
atctcatccacaatgagacat

SEQ ID NO: 73092 - RNA, 21 nt, synthetic construct
  source 1..21: mol_type = other RNA
atctcatgcttaggatcccag

SEQ ID NO: 73093 - RNA, 21 nt, synthetic construct
  source 1..21: mol_type = other RNA
atctcattaaaaatcaaccca

SEQ ID NO: 73094 - RNA, 21 nt, synthetic construct
  source 1..21: mol_type = other RNA
atctccacatttctacacaac

SEQ ID NO: 73095 - RNA, 21 nt, synthetic construct
  source 1..21: mol_type = other RNA
atctccataagtccctaacag

SEQ ID NO: 73096 - RNA, 21 nt, synthetic construct
  source 1..21: mol_type = other RNA
atctcccataccacctgtcag

SEQ ID NO: 73097 - RNA, 21 nt, synthetic construct
  source 1..21: mol_type = other RNA
atctcccatcactagaatgtg

SEQ ID NO: 73098 - RNA, 21 nt, synthetic construct
  source 1..21: mol_type = other RNA
atctccccaaagatattagct

SEQ ID NO: 73099 - RNA, 21 nt, synthetic construct
  source 1..21: mol_type = other RNA
atctccctcacagtccactca

SEQ ID NO: 73100 - RNA, 21 nt, synthetic construct
  source 1..21: mol_type = other RNA
atctccctgtgcgtgaatctg

SEQ ID NO: 73101 - RNA, 21 nt, synthetic construct
  source 1..21: mol_type = other RNA
atctcctgagtagcagggacc

SEQ ID NO: 73102 - RNA, 21 nt, synthetic construct
  source 1..21: mol_type = other RNA
atctccttaatccagtctatc

SEQ ID NO: 73103 - RNA, 21 nt, synthetic construct
  source 1..21: mol_type = other RNA
atctcctttccttccttgctc

SEQ ID NO: 73104 - RNA, 21 nt, synthetic construct
  source 1..21: mol_type = other RNA
atctccttttaagagtgaaga

SEQ ID NO: 73105 - RNA, 21 nt, synthetic construct
  source 1..21: mol_type = other RNA
atctcggcttactgcaacctc

SEQ ID NO: 73106 - RNA, 21 nt, synthetic construct
  source 1..21: mol_type = other RNA
atctcggtcattctggagtgt

SEQ ID NO: 73107 - RNA, 21 nt, synthetic construct
  source 1..21: mol_type = other RNA
atctctacagggaaccgtaac

SEQ ID NO: 73108 - RNA, 21 nt, synthetic construct
  source 1..21: mol_type = other RNA
atctctagaacttatgcatct

SEQ ID NO: 73109 - RNA, 21 nt, synthetic construct
  source 1..21: mol_type = other RNA
atctctaggcttaaaattctt

SEQ ID NO: 73110 - RNA, 21 nt, synthetic construct
  source 1..21: mol_type = other RNA
atctctagttttccagtatat

SEQ ID NO: 73111 - RNA, 21 nt, synthetic construct
  source 1..21: mol_type = other RNA
atctctatgcagaaatctacc

SEQ ID NO: 73112 - RNA, 21 nt, synthetic construct
  source 1..21: mol_type = other RNA
atctctcagatctgagtttgc

SEQ ID NO: 73113 - RNA, 21 nt, synthetic construct
  source 1..21: mol_type = other RNA
atctctccaacagaagaagtt

SEQ ID NO: 73114 - RNA, 21 nt, synthetic construct
  source 1..21: mol_type = other RNA
atctctcccttcctgttcttt

SEQ ID NO: 73115 - RNA, 21 nt, synthetic construct
  source 1..21: mol_type = other RNA
atctctcgatggacatttagg

SEQ ID NO: 73116 - RNA, 21 nt, synthetic construct
  source 1..21: mol_type = other RNA
atctctctaaaaacatccatt

SEQ ID NO: 73117 - RNA, 21 nt, synthetic construct
  source 1..21: mol_type = other RNA
atctctctatccaccactcca

SEQ ID NO: 73118 - RNA, 21 nt, synthetic construct
  source 1..21: mol_type = other RNA
atctctctcaagcaatctgaa

SEQ ID NO: 73119 - RNA, 21 nt, synthetic construct
  source 1..21: mol_type = other RNA
atctctctgcctcaaaatcaa

SEQ ID NO: 73120 - RNA, 21 nt, synthetic construct
  source 1..21: mol_type = other RNA
atctctcttgaccttagtttt

SEQ ID NO: 73121 - RNA, 21 nt, synthetic construct
  source 1..21: mol_type = other RNA
atctctgacattggttattca

SEQ ID NO: 73122 - RNA, 21 nt, synthetic construct
  source 1..21: mol_type = other RNA
atctctgacttcattcttgac

SEQ ID NO: 73123 - RNA, 21 nt, synthetic construct
  source 1..21: mol_type = other RNA
atctctgccctcattgaagct

SEQ ID NO: 73124 - RNA, 21 nt, synthetic construct
  source 1..21: mol_type = other RNA
atctctgggctcactgcaact

SEQ ID NO: 73125 - RNA, 21 nt, synthetic construct
  source 1..21: mol_type = other RNA
atctctggggttagggcctag

SEQ ID NO: 73126 - RNA, 21 nt, synthetic construct
  source 1..21: mol_type = other RNA
atctctggtattctgaacttt

SEQ ID NO: 73127 - RNA, 21 nt, synthetic construct
  source 1..21: mol_type = other RNA
atctcttacacctgtttaaaa

SEQ ID NO: 73128 - RNA, 21 nt, synthetic construct
  source 1..21: mol_type = other RNA
atctcttagacctcctagatt

SEQ ID NO: 73129 - RNA, 21 nt, synthetic construct
  source 1..21: mol_type = other RNA
atctcttcctcctctggacat

SEQ ID NO: 73130 - RNA, 21 nt, synthetic construct
  source 1..21: mol_type = other RNA
atctcttttcctttaacgtat

SEQ ID NO: 73131 - RNA, 21 nt, synthetic construct
  source 1..21: mol_type = other RNA
atctgaaacgaccttgctcat

SEQ ID NO: 73132 - RNA, 21 nt, synthetic construct
  source 1..21: mol_type = other RNA
atctgaaattgacttcactag

SEQ ID NO: 73133 - RNA, 21 nt, synthetic construct
  source 1..21: mol_type = other RNA
atctgaacattttagctgggg

SEQ ID NO: 73134 - RNA, 21 nt, synthetic construct
  source 1..21: mol_type = other RNA
atctgaacgtctttaaatttc

SEQ ID NO: 73135 - RNA, 21 nt, synthetic construct
  source 1..21: mol_type = other RNA
atctgaactttcgaagtggga

SEQ ID NO: 73136 - RNA, 21 nt, synthetic construct
  source 1..21: mol_type = other RNA
atctgacaatttgccaaaatg

SEQ ID NO: 73137 - RNA, 21 nt, synthetic construct
  source 1..21: mol_type = other RNA
atctgacatatgttttgcttc

SEQ ID NO: 73138 - RNA, 21 nt, synthetic construct
  source 1..21: mol_type = other RNA
atctgacctaagcttgggtag

SEQ ID NO: 73139 - RNA, 21 nt, synthetic construct
  source 1..21: mol_type = other RNA
atctgagaagactaagcagaa

SEQ ID NO: 73140 - RNA, 21 nt, synthetic construct
  source 1..21: mol_type = other RNA
atctgagacatcacaatgcgt

SEQ ID NO: 73141 - RNA, 21 nt, synthetic construct
  source 1..21: mol_type = other RNA
atctgagagatagaaagcacc

SEQ ID NO: 73142 - RNA, 21 nt, synthetic construct
  source 1..21: mol_type = other RNA
atctgagtaaagggtaagaaa

SEQ ID NO: 73143 - RNA, 21 nt, synthetic construct
  source 1..21: mol_type = other RNA
atctgagtgttgtgtgcacct

SEQ ID NO: 73144 - RNA, 21 nt, synthetic construct
  source 1..21: mol_type = other RNA
atctgagtttgctctgcaaat

SEQ ID NO: 73145 - RNA, 21 nt, synthetic construct
  source 1..21: mol_type = other RNA
atctgataagcccaacctgat

SEQ ID NO: 73146 - RNA, 21 nt, synthetic construct
  source 1..21: mol_type = other RNA
atctgatacacttctatccag

SEQ ID NO: 73147 - RNA, 21 nt, synthetic construct
  source 1..21: mol_type = other RNA
atctgatgtgtatgttacact

SEQ ID NO: 73148 - RNA, 21 nt, synthetic construct
  source 1..21: mol_type = other RNA
atctgattcagtggttggaaa

SEQ ID NO: 73149 - RNA, 21 nt, synthetic construct
  source 1..21: mol_type = other RNA
atctgatttgtttagtagctg

SEQ ID NO: 73150 - RNA, 21 nt, synthetic construct
  source 1..21: mol_type = other RNA
atctgattttaatctgtcctg

SEQ ID NO: 73151 - RNA, 21 nt, synthetic construct
  source 1..21: mol_type = other RNA
atctgattttgtgtcttctgt

SEQ ID NO: 73152 - RNA, 21 nt, synthetic construct
  source 1..21: mol_type = other RNA
atctgatttttagtgactggc

SEQ ID NO: 73153 - RNA, 21 nt, synthetic construct
  source 1..21: mol_type = other RNA
atctgcaactatcaaaacact

SEQ ID NO: 73154 - RNA, 21 nt, synthetic construct
  source 1..21: mol_type = other RNA
atctgcagtgtccatctccca

SEQ ID NO: 73155 - RNA, 21 nt, synthetic construct
  source 1..21: mol_type = other RNA
atctgcatccaaaagggaaat

SEQ ID NO: 73156 - RNA, 21 nt, synthetic construct
  source 1..21: mol_type = other RNA
atctgccaggacaattgaatg

SEQ ID NO: 73157 - RNA, 21 nt, synthetic construct
  source 1..21: mol_type = other RNA
atctgcctcccgggtccaggc

SEQ ID NO: 73158 - RNA, 21 nt, synthetic construct
  source 1..21: mol_type = other RNA
atctgctgtaagctggtaata

SEQ ID NO: 73159 - RNA, 21 nt, synthetic construct
  source 1..21: mol_type = other RNA
atctgctgtcggttttctagt

SEQ ID NO: 73160 - RNA, 21 nt, synthetic construct
  source 1..21: mol_type = other RNA
atctgcttgcagacaataatt

SEQ ID NO: 73161 - RNA, 21 nt, synthetic construct
  source 1..21: mol_type = other RNA
atctggaaggaaacactataa

SEQ ID NO: 73162 - RNA, 21 nt, synthetic construct
  source 1..21: mol_type = other RNA
atctggaatgcatcgtttcaa

SEQ ID NO: 73163 - RNA, 21 nt, synthetic construct
  source 1..21: mol_type = other RNA
atctggaccagttactctctc

SEQ ID NO: 73164 - RNA, 21 nt, synthetic construct
  source 1..21: mol_type = other RNA
atctggactgaaaagatacag

SEQ ID NO: 73165 - RNA, 21 nt, synthetic construct
  source 1..21: mol_type = other RNA
atctggatcctgtctcagagt

SEQ ID NO: 73166 - RNA, 21 nt, synthetic construct
  source 1..21: mol_type = other RNA
atctggattatagtggtaagg

SEQ ID NO: 73167 - RNA, 21 nt, synthetic construct
  source 1..21: mol_type = other RNA
atctggatttttgtgtagagg

SEQ ID NO: 73168 - RNA, 21 nt, synthetic construct
  source 1..21: mol_type = other RNA
atctggcagcaggggctaagt

SEQ ID NO: 73169 - RNA, 21 nt, synthetic construct
  source 1..21: mol_type = other RNA
atctggcctgcaccatttatt

SEQ ID NO: 73170 - RNA, 21 nt, synthetic construct
  source 1..21: mol_type = other RNA
atctggctgcagggcttctga

SEQ ID NO: 73171 - RNA, 21 nt, synthetic construct
  source 1..21: mol_type = other RNA
atctgggaacagcccctagca

SEQ ID NO: 73172 - RNA, 21 nt, synthetic construct
  source 1..21: mol_type = other RNA
atctgggataatgctatcatt

SEQ ID NO: 73173 - RNA, 21 nt, synthetic construct
  source 1..21: mol_type = other RNA
atctgggatacttctaacttt

SEQ ID NO: 73174 - RNA, 21 nt, synthetic construct
  source 1..21: mol_type = other RNA
atctggtcacaaacacaaaac

SEQ ID NO: 73175 - RNA, 21 nt, synthetic construct
  source 1..21: mol_type = other RNA
atctggtcctgagctttcctt

SEQ ID NO: 73176 - RNA, 21 nt, synthetic construct
  source 1..21: mol_type = other RNA
atctggtctatctcattataa

SEQ ID NO: 73177 - RNA, 21 nt, synthetic construct
  source 1..21: mol_type = other RNA
atctggtgctggcagccttct

SEQ ID NO: 73178 - RNA, 21 nt, synthetic construct
  source 1..21: mol_type = other RNA
atctggtgttgcttgctctac

SEQ ID NO: 73179 - RNA, 21 nt, synthetic construct
  source 1..21: mol_type = other RNA
atctgtaagtcatcaaaggaa

SEQ ID NO: 73180 - RNA, 21 nt, synthetic construct
  source 1..21: mol_type = other RNA
atctgtagattgttttaggta

SEQ ID NO: 73181 - RNA, 21 nt, synthetic construct
  source 1..21: mol_type = other RNA
atctgtatatgaaaagcttcc

SEQ ID NO: 73182 - RNA, 21 nt, synthetic construct
  source 1..21: mol_type = other RNA
atctgtatgagaagactggaa

SEQ ID NO: 73183 - RNA, 21 nt, synthetic construct
  source 1..21: mol_type = other RNA
atctgtcaaaaagagaacaca

SEQ ID NO: 73184 - RNA, 21 nt, synthetic construct
  source 1..21: mol_type = other RNA
atctgtcactttcctattcac

SEQ ID NO: 73185 - RNA, 21 nt, synthetic construct
  source 1..21: mol_type = other RNA
atctgtcagcagttcagcctg

SEQ ID NO: 73186 - RNA, 21 nt, synthetic construct
  source 1..21: mol_type = other RNA
atctgtcatgtttgaattttc

SEQ ID NO: 73187 - RNA, 21 nt, synthetic construct
  source 1..21: mol_type = other RNA
atctgtcctgaatactattcc

SEQ ID NO: 73188 - RNA, 21 nt, synthetic construct
  source 1..21: mol_type = other RNA
atctgtctgggataatgagtt

SEQ ID NO: 73189 - RNA, 21 nt, synthetic construct
  source 1..21: mol_type = other RNA
atctgtcttgtgcatccttta

SEQ ID NO: 73190 - RNA, 21 nt, synthetic construct
  source 1..21: mol_type = other RNA
atctgtctttggcccatatcc

SEQ ID NO: 73191 - RNA, 21 nt, synthetic construct
  source 1..21: mol_type = other RNA
atctgtgatccctgatatgtc

SEQ ID NO: 73192 - RNA, 21 nt, synthetic construct
  source 1..21: mol_type = other RNA
atctgtggactttaggctgtt

SEQ ID NO: 73193 - RNA, 21 nt, synthetic construct
  source 1..21: mol_type = other RNA
atctgtgggttaaaagttagc

SEQ ID NO: 73194 - RNA, 21 nt, synthetic construct
  source 1..21: mol_type = other RNA
atctgttaatgggcacttggg

SEQ ID NO: 73195 - RNA, 21 nt, synthetic construct
  source 1..21: mol_type = other RNA
atctgttcctgggttctccct

SEQ ID NO: 73196 - RNA, 21 nt, synthetic construct
  source 1..21: mol_type = other RNA
atctgttgcagtccccggtct

SEQ ID NO: 73197 - RNA, 21 nt, synthetic construct
  source 1..21: mol_type = other RNA
atctgttggtgcttagctgcc

SEQ ID NO: 73198 - RNA, 21 nt, synthetic construct
  source 1..21: mol_type = other RNA
atctgtttcctaatctaacat

SEQ ID NO: 73199 - RNA, 21 nt, synthetic construct
  source 1..21: mol_type = other RNA
atcttaaaataccagaggtta

SEQ ID NO: 73200 - RNA, 21 nt, synthetic construct
  source 1..21: mol_type = other RNA
atcttaagaaccatacagtgc

SEQ ID NO: 73201 - RNA, 21 nt, synthetic construct
  source 1..21: mol_type = other RNA
atcttaataacctcaaagtgg

SEQ ID NO: 73202 - RNA, 21 nt, synthetic construct
  source 1..21: mol_type = other RNA
atcttacccccatcacactgg

SEQ ID NO: 73203 - RNA, 21 nt, synthetic construct
  source 1..21: mol_type = other RNA
atcttaccctgttgaccaggc

SEQ ID NO: 73204 - RNA, 21 nt, synthetic construct
  source 1..21: mol_type = other RNA
atcttactggtgttaggcaat

SEQ ID NO: 73205 - RNA, 21 nt, synthetic construct
  source 1..21: mol_type = other RNA
atcttactgtaagttcctgga

SEQ ID NO: 73206 - RNA, 21 nt, synthetic construct
  source 1..21: mol_type = other RNA
atcttagccgggaggagccaa

SEQ ID NO: 73207 - RNA, 21 nt, synthetic construct
  source 1..21: mol_type = other RNA
atcttagctcttcccttaacc

SEQ ID NO: 73208 - RNA, 21 nt, synthetic construct
  source 1..21: mol_type = other RNA
atcttaggccataaatcaagg

SEQ ID NO: 73209 - RNA, 21 nt, synthetic construct
  source 1..21: mol_type = other RNA
atcttatattaattctgaggc

SEQ ID NO: 73210 - RNA, 21 nt, synthetic construct
  source 1..21: mol_type = other RNA
atcttatctgctgtcggtttt

SEQ ID NO: 73211 - RNA, 21 nt, synthetic construct
  source 1..21: mol_type = other RNA
atcttattaatgtgttgtctg

SEQ ID NO: 73212 - RNA, 21 nt, synthetic construct
  source 1..21: mol_type = other RNA
atcttattccccagggaaacc

SEQ ID NO: 73213 - RNA, 21 nt, synthetic construct
  source 1..21: mol_type = other RNA
atcttcaaaatctgatgtgta

SEQ ID NO: 73214 - RNA, 21 nt, synthetic construct
  source 1..21: mol_type = other RNA
atcttcaagatttcataggca

SEQ ID NO: 73215 - RNA, 21 nt, synthetic construct
  source 1..21: mol_type = other RNA
atcttcacaaacaaatccttt

SEQ ID NO: 73216 - RNA, 21 nt, synthetic construct
  source 1..21: mol_type = other RNA
atcttcacacttagttcaaga

SEQ ID NO: 73217 - RNA, 21 nt, synthetic construct
  source 1..21: mol_type = other RNA
atcttcacgtggcgctccctc

SEQ ID NO: 73218 - RNA, 21 nt, synthetic construct
  source 1..21: mol_type = other RNA
atcttcactgactacacatac

SEQ ID NO: 73219 - RNA, 21 nt, synthetic construct
  source 1..21: mol_type = other RNA
atcttcatttctaagccatgt

SEQ ID NO: 73220 - RNA, 21 nt, synthetic construct
  source 1..21: mol_type = other RNA
atcttccagaaggagaaaaca

SEQ ID NO: 73221 - RNA, 21 nt, synthetic construct
  source 1..21: mol_type = other RNA
atcttccatacgaaagccttt

SEQ ID NO: 73222 - RNA, 21 nt, synthetic construct
  source 1..21: mol_type = other RNA
atcttcccaatcctttgtgca

SEQ ID NO: 73223 - RNA, 21 nt, synthetic construct
  source 1..21: mol_type = other RNA
atcttcccatgaacatggttt

SEQ ID NO: 73224 - RNA, 21 nt, synthetic construct
  source 1..21: mol_type = other RNA
atcttccctaaagagaatctt

SEQ ID NO: 73225 - RNA, 21 nt, synthetic construct
  source 1..21: mol_type = other RNA
atcttctctctctgcttcact

SEQ ID NO: 73226 - RNA, 21 nt, synthetic construct
  source 1..21: mol_type = other RNA
atcttcttagtgttcccttct

SEQ ID NO: 73227 - RNA, 21 nt, synthetic construct
  source 1..21: mol_type = other RNA
atcttcttttacttgcttggt

SEQ ID NO: 73228 - RNA, 21 nt, synthetic construct
  source 1..21: mol_type = other RNA
atcttgaaaggggccaggtgt

SEQ ID NO: 73229 - RNA, 21 nt, synthetic construct
  source 1..21: mol_type = other RNA
atcttgaactaagtgtgaaga

SEQ ID NO: 73230 - RNA, 21 nt, synthetic construct
  source 1..21: mol_type = other RNA
atcttgaagaaaccaagagca

SEQ ID NO: 73231 - RNA, 21 nt, synthetic construct
  source 1..21: mol_type = other RNA
atcttgaagatggcaaacaga

SEQ ID NO: 73232 - RNA, 21 nt, synthetic construct
  source 1..21: mol_type = other RNA
atcttgacttcacttccaagt

SEQ ID NO: 73233 - RNA, 21 nt, synthetic construct
  source 1..21: mol_type = other RNA
atcttgagacggaagactcat

SEQ ID NO: 73234 - RNA, 21 nt, synthetic construct
  source 1..21: mol_type = other RNA
atcttgcaaaacaatagccca

SEQ ID NO: 73235 - RNA, 21 nt, synthetic construct
  source 1..21: mol_type = other RNA
atcttgcaaaacggaaacttt

SEQ ID NO: 73236 - RNA, 21 nt, synthetic construct
  source 1..21: mol_type = other RNA
atcttgcataactcgtaatgc

SEQ ID NO: 73237 - RNA, 21 nt, synthetic construct
  source 1..21: mol_type = other RNA
atcttgctaaacatgtatact

SEQ ID NO: 73238 - RNA, 21 nt, synthetic construct
  source 1..21: mol_type = other RNA
atcttggaaatgatacctcat

SEQ ID NO: 73239 - RNA, 21 nt, synthetic construct
  source 1..21: mol_type = other RNA
atcttggccgaatgtggtggt

SEQ ID NO: 73240 - RNA, 21 nt, synthetic construct
  source 1..21: mol_type = other RNA
atcttgggaatactttcccat

SEQ ID NO: 73241 - RNA, 21 nt, synthetic construct
  source 1..21: mol_type = other RNA
atcttgtgtatcttttgttag

SEQ ID NO: 73242 - RNA, 21 nt, synthetic construct
  source 1..21: mol_type = other RNA
atctttacttcccttctcgaa

SEQ ID NO: 73243 - RNA, 21 nt, synthetic construct
  source 1..21: mol_type = other RNA
atctttactttcagctcaaac

SEQ ID NO: 73244 - RNA, 21 nt, synthetic construct
  source 1..21: mol_type = other RNA
atctttaggtgttttttcctt

SEQ ID NO: 73245 - RNA, 21 nt, synthetic construct
  source 1..21: mol_type = other RNA
atctttagtgttgcttggtgt

SEQ ID NO: 73246 - RNA, 21 nt, synthetic construct
  source 1..21: mol_type = other RNA
atctttcaaggggccttttgt

SEQ ID NO: 73247 - RNA, 21 nt, synthetic construct
  source 1..21: mol_type = other RNA
atctttcctgatcacaccctc

SEQ ID NO: 73248 - RNA, 21 nt, synthetic construct
  source 1..21: mol_type = other RNA
atctttcctgtgatttatgtg

SEQ ID NO: 73249 - RNA, 21 nt, synthetic construct
  source 1..21: mol_type = other RNA
atctttctagattcatatgct

SEQ ID NO: 73250 - RNA, 21 nt, synthetic construct
  source 1..21: mol_type = other RNA
atctttctgaactcaaaagtg

SEQ ID NO: 73251 - RNA, 21 nt, synthetic construct
  source 1..21: mol_type = other RNA
atctttgaataaagggtcaga

SEQ ID NO: 73252 - RNA, 21 nt, synthetic construct
  source 1..21: mol_type = other RNA
atctttggaaaaatgtccgtt

SEQ ID NO: 73253 - RNA, 21 nt, synthetic construct
  source 1..21: mol_type = other RNA
atctttggatatccccatttt

SEQ ID NO: 73254 - RNA, 21 nt, synthetic construct
  source 1..21: mol_type = other RNA
atctttggcaaacttagaata

SEQ ID NO: 73255 - RNA, 21 nt, synthetic construct
  source 1..21: mol_type = other RNA
atctttgggaaaatctctgac

SEQ ID NO: 73256 - RNA, 21 nt, synthetic construct
  source 1..21: mol_type = other RNA
atctttggggagataccttga

SEQ ID NO: 73257 - RNA, 21 nt, synthetic construct
  source 1..21: mol_type = other RNA
atctttggtgaaggttcatga

SEQ ID NO: 73258 - RNA, 21 nt, synthetic construct
  source 1..21: mol_type = other RNA
atctttggtgctgataaatgg

SEQ ID NO: 73259 - RNA, 21 nt, synthetic construct
  source 1..21: mol_type = other RNA
atctttgtacagtaattgtag

SEQ ID NO: 73260 - RNA, 21 nt, synthetic construct
  source 1..21: mol_type = other RNA
atctttgttacagcagctcta

SEQ ID NO: 73261 - RNA, 21 nt, synthetic construct
  source 1..21: mol_type = other RNA
atcttttaacagatggtcctt

SEQ ID NO: 73262 - RNA, 21 nt, synthetic construct
  source 1..21: mol_type = other RNA
atcttttcaaaaacccaactc

SEQ ID NO: 73263 - RNA, 21 nt, synthetic construct
  source 1..21: mol_type = other RNA
atcttttcagtccagatatta

SEQ ID NO: 73264 - RNA, 21 nt, synthetic construct
  source 1..21: mol_type = other RNA
atcttttcatgttgaccattt

SEQ ID NO: 73265 - RNA, 21 nt, synthetic construct
  source 1..21: mol_type = other RNA
atcttttctgacaatttcagg

SEQ ID NO: 73266 - RNA, 21 nt, synthetic construct
  source 1..21: mol_type = other RNA
atcttttgacgcgcaacaatt

SEQ ID NO: 73267 - RNA, 21 nt, synthetic construct
  source 1..21: mol_type = other RNA
atcttttgagggtatcatatt

SEQ ID NO: 73268 - RNA, 21 nt, synthetic construct
  source 1..21: mol_type = other RNA
atcttttgcctggatgaatgc

SEQ ID NO: 73269 - RNA, 21 nt, synthetic construct
  source 1..21: mol_type = other RNA
atctttttcagcagcagagaa

SEQ ID NO: 73270 - RNA, 21 nt, synthetic construct
  source 1..21: mol_type = other RNA
atgaaaaagtactggaaatgg

SEQ ID NO: 73271 - RNA, 21 nt, synthetic construct
  source 1..21: mol_type = other RNA
atgaaaaattcactcctcatt

SEQ ID NO: 73272 - RNA, 21 nt, synthetic construct
  source 1..21: mol_type = other RNA
atgaaaacacaacataccaaa

SEQ ID NO: 73273 - RNA, 21 nt, synthetic construct
  source 1..21: mol_type = other RNA
atgaaaacagctaggtgagtg

SEQ ID NO: 73274 - RNA, 21 nt, synthetic construct
  source 1..21: mol_type = other RNA
atgaaaagagcacaccaagac

SEQ ID NO: 73275 - RNA, 21 nt, synthetic construct
  source 1..21: mol_type = other RNA
atgaaaagcccaatctacagg

SEQ ID NO: 73276 - RNA, 21 nt, synthetic construct
  source 1..21: mol_type = other RNA
atgaaaagcctcaaacgaacc

SEQ ID NO: 73277 - RNA, 21 nt, synthetic construct
  source 1..21: mol_type = other RNA
atgaaaagcttcccccctctc

SEQ ID NO: 73278 - RNA, 21 nt, synthetic construct
  source 1..21: mol_type = other RNA
atgaaaatagtaactttctgc

SEQ ID NO: 73279 - RNA, 21 nt, synthetic construct
  source 1..21: mol_type = other RNA
atgaaaatgttccctcttcaa

SEQ ID NO: 73280 - RNA, 21 nt, synthetic construct
  source 1..21: mol_type = other RNA
atgaaaattagctggatgtgg

SEQ ID NO: 73281 - RNA, 21 nt, synthetic construct
  source 1..21: mol_type = other RNA
atgaaaattggcgtacatgta

SEQ ID NO: 73282 - RNA, 21 nt, synthetic construct
  source 1..21: mol_type = other RNA
atgaaaatttttgtctggaac

SEQ ID NO: 73283 - RNA, 21 nt, synthetic construct
  source 1..21: mol_type = other RNA
atgaaacacttgtgtaactac

SEQ ID NO: 73284 - RNA, 21 nt, synthetic construct
  source 1..21: mol_type = other RNA
atgaaactaaatgtgagcatt

SEQ ID NO: 73285 - RNA, 21 nt, synthetic construct
  source 1..21: mol_type = other RNA
atgaaacttatttccaggggg

SEQ ID NO: 73286 - RNA, 21 nt, synthetic construct
  source 1..21: mol_type = other RNA
atgaaagctcccaatgcttga

SEQ ID NO: 73287 - RNA, 21 nt, synthetic construct
  source 1..21: mol_type = other RNA
atgaaaggcgtcggggctgct

SEQ ID NO: 73288 - RNA, 21 nt, synthetic construct
  source 1..21: mol_type = other RNA
atgaaagtcagctaattttct

SEQ ID NO: 73289 - RNA, 21 nt, synthetic construct
  source 1..21: mol_type = other RNA
atgaaagtggagaattactaa

SEQ ID NO: 73290 - RNA, 21 nt, synthetic construct
  source 1..21: mol_type = other RNA
atgaaatactcaaactatgct

SEQ ID NO: 73291 - RNA, 21 nt, synthetic construct
  source 1..21: mol_type = other RNA
atgaaatcacacaatcttgag

SEQ ID NO: 73292 - RNA, 21 nt, synthetic construct
  source 1..21: mol_type = other RNA
atgaaatcccctttagtgttc

SEQ ID NO: 73293 - RNA, 21 nt, synthetic construct
  source 1..21: mol_type = other RNA
atgaaatcttgaagatggcaa

SEQ ID NO: 73294 - RNA, 21 nt, synthetic construct
  source 1..21: mol_type = other RNA
atgaaatggcccttaacttca

SEQ ID NO: 73295 - RNA, 21 nt, synthetic construct
  source 1..21: mol_type = other RNA
atgaaatgggtttaaaagagt

SEQ ID NO: 73296 - RNA, 21 nt, synthetic construct
  source 1..21: mol_type = other RNA
atgaaatgtggtttttggttc

SEQ ID NO: 73297 - RNA, 21 nt, synthetic construct
  source 1..21: mol_type = other RNA
atgaaattcttgggtgaataa

SEQ ID NO: 73298 - RNA, 21 nt, synthetic construct
  source 1..21: mol_type = other RNA
atgaaattgaccattccacgc

SEQ ID NO: 73299 - RNA, 21 nt, synthetic construct
  source 1..21: mol_type = other RNA
atgaaatttgaggccctattc

SEQ ID NO: 73300 - RNA, 21 nt, synthetic construct
  source 1..21: mol_type = other RNA
atgaacaaaggcaggagcagt

SEQ ID NO: 73301 - RNA, 21 nt, synthetic construct
  source 1..21: mol_type = other RNA
atgaacaatccttctaatcag

SEQ ID NO: 73302 - RNA, 21 nt, synthetic construct
  source 1..21: mol_type = other RNA
atgaacaattttctctcatgt

SEQ ID NO: 73303 - RNA, 21 nt, synthetic construct
  source 1..21: mol_type = other RNA
atgaacaggttcttcatcagt

SEQ ID NO: 73304 - RNA, 21 nt, synthetic construct
  source 1..21: mol_type = other RNA
atgaacatggtttgatcccac

SEQ ID NO: 73305 - RNA, 21 nt, synthetic construct
  source 1..21: mol_type = other RNA
atgaacattttgagttattgc

SEQ ID NO: 73306 - RNA, 21 nt, synthetic construct
  source 1..21: mol_type = other RNA
atgaaccaaacttggtttatt

SEQ ID NO: 73307 - RNA, 21 nt, synthetic construct
  source 1..21: mol_type = other RNA
atgaaccacactgacaggaca

SEQ ID NO: 73308 - RNA, 21 nt, synthetic construct
  source 1..21: mol_type = other RNA
atgaaccattgtaaaccatat

SEQ ID NO: 73309 - RNA, 21 nt, synthetic construct
  source 1..21: mol_type = other RNA
atgaacccaccaggaggcgga

SEQ ID NO: 73310 - RNA, 21 nt, synthetic construct
  source 1..21: mol_type = other RNA
atgaacctgcatggtgtaaaa

SEQ ID NO: 73311 - RNA, 21 nt, synthetic construct
  source 1..21: mol_type = other RNA
atgaacctgctttctactagt

SEQ ID NO: 73312 - RNA, 21 nt, synthetic construct
  source 1..21: mol_type = other RNA
atgaaccttcaccaaagattt

SEQ ID NO: 73313 - RNA, 21 nt, synthetic construct
  source 1..21: mol_type = other RNA
atgaacgagaacaaaacaaga

SEQ ID NO: 73314 - RNA, 21 nt, synthetic construct
  source 1..21: mol_type = other RNA
atgaacgctaaattaaaggct

SEQ ID NO: 73315 - RNA, 21 nt, synthetic construct
  source 1..21: mol_type = other RNA
atgaactacacagacatgaac

SEQ ID NO: 73316 - RNA, 21 nt, synthetic construct
  source 1..21: mol_type = other RNA
atgaactcccagaactcgaag

SEQ ID NO: 73317 - RNA, 21 nt, synthetic construct
  source 1..21: mol_type = other RNA
atgaactcctatagttaagtc

SEQ ID NO: 73318 - RNA, 21 nt, synthetic construct
  source 1..21: mol_type = other RNA
atgaagaaaacactccagaat

SEQ ID NO: 73319 - RNA, 21 nt, synthetic construct
  source 1..21: mol_type = other RNA
atgaagaaaatccaagaagac

SEQ ID NO: 73320 - RNA, 21 nt, synthetic construct
  source 1..21: mol_type = other RNA
atgaagaacctgttcatttga

SEQ ID NO: 73321 - RNA, 21 nt, synthetic construct
  source 1..21: mol_type = other RNA
atgaagatggcctccctcact

SEQ ID NO: 73322 - RNA, 21 nt, synthetic construct
  source 1..21: mol_type = other RNA
atgaagcaggccttcgaggca

SEQ ID NO: 73323 - RNA, 21 nt, synthetic construct
  source 1..21: mol_type = other RNA
atgaagcagggaaatggaggg

SEQ ID NO: 73324 - RNA, 21 nt, synthetic construct
  source 1..21: mol_type = other RNA
atgaagcattaatgcaacctg

SEQ ID NO: 73325 - RNA, 21 nt, synthetic construct
  source 1..21: mol_type = other RNA
atgaagccctctaagtcagcc

SEQ ID NO: 73326 - RNA, 21 nt, synthetic construct
  source 1..21: mol_type = other RNA
atgaagcttttctcctaagtc

SEQ ID NO: 73327 - RNA, 21 nt, synthetic construct
  source 1..21: mol_type = other RNA
atgaaggaaaaaacgggttat

SEQ ID NO: 73328 - RNA, 21 nt, synthetic construct
  source 1..21: mol_type = other RNA
atgaaggaaggattggaatga

SEQ ID NO: 73329 - RNA, 21 nt, synthetic construct
  source 1..21: mol_type = other RNA
atgaagggttttctgtagaat

SEQ ID NO: 73330 - RNA, 21 nt, synthetic construct
  source 1..21: mol_type = other RNA
atgaagtatagaaaggagacc

SEQ ID NO: 73331 - RNA, 21 nt, synthetic construct
  source 1..21: mol_type = other RNA
atgaagtattgatttgaccat

SEQ ID NO: 73332 - RNA, 21 nt, synthetic construct
  source 1..21: mol_type = other RNA
atgaagtcagagattttccca

SEQ ID NO: 73333 - RNA, 21 nt, synthetic construct
  source 1..21: mol_type = other RNA
atgaagtcctcaatcatgtca

SEQ ID NO: 73334 - RNA, 21 nt, synthetic construct
  source 1..21: mol_type = other RNA
atgaataaaccacgcagtttg

SEQ ID NO: 73335 - RNA, 21 nt, synthetic construct
  source 1..21: mol_type = other RNA
atgaataaccaatgtcagaga

SEQ ID NO: 73336 - RNA, 21 nt, synthetic construct
  source 1..21: mol_type = other RNA
atgaatacaaaggtgttaagc

SEQ ID NO: 73337 - RNA, 21 nt, synthetic construct
  source 1..21: mol_type = other RNA
atgaatacctatttagaggga

SEQ ID NO: 73338 - RNA, 21 nt, synthetic construct
  source 1..21: mol_type = other RNA
atgaataggtgtgtgttcctt

SEQ ID NO: 73339 - RNA, 21 nt, synthetic construct
  source 1..21: mol_type = other RNA
atgaatatactggaaaactag

SEQ ID NO: 73340 - RNA, 21 nt, synthetic construct
  source 1..21: mol_type = other RNA
atgaatatgtactacctatag

SEQ ID NO: 73341 - RNA, 21 nt, synthetic construct
  source 1..21: mol_type = other RNA
atgaatattcgttccagcagg

SEQ ID NO: 73342 - RNA, 21 nt, synthetic construct
  source 1..21: mol_type = other RNA
atgaatctgcaactatcaaaa

SEQ ID NO: 73343 - RNA, 21 nt, synthetic construct
  source 1..21: mol_type = other RNA
atgaatgaacaaaatgtggta

SEQ ID NO: 73344 - RNA, 21 nt, synthetic construct
  source 1..21: mol_type = other RNA
atgaatgagcaaggtcgtttc

SEQ ID NO: 73345 - RNA, 21 nt, synthetic construct
  source 1..21: mol_type = other RNA
atgaatgatgccatcacattt

SEQ ID NO: 73346 - RNA, 21 nt, synthetic construct
  source 1..21: mol_type = other RNA
atgaatgcacgtgaagctaca

SEQ ID NO: 73347 - RNA, 21 nt, synthetic construct
  source 1..21: mol_type = other RNA
atgaatgcagtggcttcctaa

SEQ ID NO: 73348 - RNA, 21 nt, synthetic construct
  source 1..21: mol_type = other RNA
atgaatggaaaattcttggtc

SEQ ID NO: 73349 - RNA, 21 nt, synthetic construct
  source 1..21: mol_type = other RNA
atgaatggaaatgtaaattcc

SEQ ID NO: 73350 - RNA, 21 nt, synthetic construct
  source 1..21: mol_type = other RNA
atgaattagcaatgcgaatca

SEQ ID NO: 73351 - RNA, 21 nt, synthetic construct
  source 1..21: mol_type = other RNA
atgaatttgcctattctgggg

SEQ ID NO: 73352 - RNA, 21 nt, synthetic construct
  source 1..21: mol_type = other RNA
atgacaagaatctttggcaaa

SEQ ID NO: 73353 - RNA, 21 nt, synthetic construct
  source 1..21: mol_type = other RNA
atgacaagactacctaaaaca

SEQ ID NO: 73354 - RNA, 21 nt, synthetic construct
  source 1..21: mol_type = other RNA
atgacaagtaaatgcaatgca

SEQ ID NO: 73355 - RNA, 21 nt, synthetic construct
  source 1..21: mol_type = other RNA
atgacacaacttactactaaa

SEQ ID NO: 73356 - RNA, 21 nt, synthetic construct
  source 1..21: mol_type = other RNA
atgacaccaaaactacaggca

SEQ ID NO: 73357 - RNA, 21 nt, synthetic construct
  source 1..21: mol_type = other RNA
atgacagagttccacctccat

SEQ ID NO: 73358 - RNA, 21 nt, synthetic construct
  source 1..21: mol_type = other RNA
atgacagatcccaaaaaggtt

SEQ ID NO: 73359 - RNA, 21 nt, synthetic construct
  source 1..21: mol_type = other RNA
atgacaggtgagtggactgtg

SEQ ID NO: 73360 - RNA, 21 nt, synthetic construct
  source 1..21: mol_type = other RNA
atgacagttactctaaaagaa

SEQ ID NO: 73361 - RNA, 21 nt, synthetic construct
  source 1..21: mol_type = other RNA
atgacatggttttcctactaa

SEQ ID NO: 73362 - RNA, 21 nt, synthetic construct
  source 1..21: mol_type = other RNA
atgacatgtgttttatttagg

SEQ ID NO: 73363 - RNA, 21 nt, synthetic construct
  source 1..21: mol_type = other RNA
atgacatttgcttttcctgga

SEQ ID NO: 73364 - RNA, 21 nt, synthetic construct
  source 1..21: mol_type = other RNA
atgaccctgctatgcatactt

SEQ ID NO: 73365 - RNA, 21 nt, synthetic construct
  source 1..21: mol_type = other RNA
atgaccgagatacttaagttt

SEQ ID NO: 73366 - RNA, 21 nt, synthetic construct
  source 1..21: mol_type = other RNA
atgacctaaaatcttattccc

SEQ ID NO: 73367 - RNA, 21 nt, synthetic construct
  source 1..21: mol_type = other RNA
atgacctatctattaacagaa

SEQ ID NO: 73368 - RNA, 21 nt, synthetic construct
  source 1..21: mol_type = other RNA
atgacctcctcccacttacat

SEQ ID NO: 73369 - RNA, 21 nt, synthetic construct
  source 1..21: mol_type = other RNA
atgacctgctttcttggggct

SEQ ID NO: 73370 - RNA, 21 nt, synthetic construct
  source 1..21: mol_type = other RNA
atgacctggaaattattcaat

SEQ ID NO: 73371 - RNA, 21 nt, synthetic construct
  source 1..21: mol_type = other RNA
atgaccttgacaataaatggt

SEQ ID NO: 73372 - RNA, 21 nt, synthetic construct
  source 1..21: mol_type = other RNA
atgacgaaagtgaagcccaga

SEQ ID NO: 73373 - RNA, 21 nt, synthetic construct
  source 1..21: mol_type = other RNA
atgactaatttgaggcattag

SEQ ID NO: 73374 - RNA, 21 nt, synthetic construct
  source 1..21: mol_type = other RNA
atgactaggctcctgagaacc

SEQ ID NO: 73375 - RNA, 21 nt, synthetic construct
  source 1..21: mol_type = other RNA
atgactatgaaaagcctcaaa

SEQ ID NO: 73376 - RNA, 21 nt, synthetic construct
  source 1..21: mol_type = other RNA
atgactgagatacttaagttt

SEQ ID NO: 73377 - RNA, 21 nt, synthetic construct
  source 1..21: mol_type = other RNA
atgactggccatccttcccaa

SEQ ID NO: 73378 - RNA, 21 nt, synthetic construct
  source 1..21: mol_type = other RNA
atgactggtgtccttctgaga

SEQ ID NO: 73379 - RNA, 21 nt, synthetic construct
  source 1..21: mol_type = other RNA
atgactgtaagctgaactctg

SEQ ID NO: 73380 - RNA, 21 nt, synthetic construct
  source 1..21: mol_type = other RNA
atgactgtcctgaattctaat

SEQ ID NO: 73381 - RNA, 21 nt, synthetic construct
  source 1..21: mol_type = other RNA
atgactgttgcctctgtgcta

SEQ ID NO: 73382 - RNA, 21 nt, synthetic construct
  source 1..21: mol_type = other RNA
atgacttacagatatcaccca

SEQ ID NO: 73383 - RNA, 21 nt, synthetic construct
  source 1..21: mol_type = other RNA
atgacttcactggagaattct

SEQ ID NO: 73384 - RNA, 21 nt, synthetic construct
  source 1..21: mol_type = other RNA
atgacttttttgcccactctt

SEQ ID NO: 73385 - RNA, 21 nt, synthetic construct
  source 1..21: mol_type = other RNA
atgagaaacatacatgttcag

SEQ ID NO: 73386 - RNA, 21 nt, synthetic construct
  source 1..21: mol_type = other RNA
atgagaaacctaagaaaggtc

SEQ ID NO: 73387 - RNA, 21 nt, synthetic construct
  source 1..21: mol_type = other RNA
atgagaaatacttggacaggg

SEQ ID NO: 73388 - RNA, 21 nt, synthetic construct
  source 1..21: mol_type = other RNA
atgagaaatgtctggtttgct

SEQ ID NO: 73389 - RNA, 21 nt, synthetic construct
  source 1..21: mol_type = other RNA
atgagaagactggaaaagtgt

SEQ ID NO: 73390 - RNA, 21 nt, synthetic construct
  source 1..21: mol_type = other RNA
atgagaaggattagtgttaat

SEQ ID NO: 73391 - RNA, 21 nt, synthetic construct
  source 1..21: mol_type = other RNA
atgagaattcattgttgtgtg

SEQ ID NO: 73392 - RNA, 21 nt, synthetic construct
  source 1..21: mol_type = other RNA
atgagaatttcagaaagagaa

SEQ ID NO: 73393 - RNA, 21 nt, synthetic construct
  source 1..21: mol_type = other RNA
atgagacacacgagtattcaa

SEQ ID NO: 73394 - RNA, 21 nt, synthetic construct
  source 1..21: mol_type = other RNA
atgagacacctacaatattaa

SEQ ID NO: 73395 - RNA, 21 nt, synthetic construct
  source 1..21: mol_type = other RNA
atgagacatttgagggtgctg

SEQ ID NO: 73396 - RNA, 21 nt, synthetic construct
  source 1..21: mol_type = other RNA
atgagaccaaatgcataaaaa

SEQ ID NO: 73397 - RNA, 21 nt, synthetic construct
  source 1..21: mol_type = other RNA
atgagaccccatctctaccaa

SEQ ID NO: 73398 - RNA, 21 nt, synthetic construct
  source 1..21: mol_type = other RNA
atgagacttggagtttgagac

SEQ ID NO: 73399 - RNA, 21 nt, synthetic construct
  source 1..21: mol_type = other RNA
atgagagaaaattgttcatga

SEQ ID NO: 73400 - RNA, 21 nt, synthetic construct
  source 1..21: mol_type = other RNA
atgagagctaagggaagtttt

SEQ ID NO: 73401 - RNA, 21 nt, synthetic construct
  source 1..21: mol_type = other RNA
atgagagctgtgccgaggcag

SEQ ID NO: 73402 - RNA, 21 nt, synthetic construct
  source 1..21: mol_type = other RNA
atgagagggagaccgtggggg

SEQ ID NO: 73403 - RNA, 21 nt, synthetic construct
  source 1..21: mol_type = other RNA
atgagagtggcctaaatcagg

SEQ ID NO: 73404 - RNA, 21 nt, synthetic construct
  source 1..21: mol_type = other RNA
atgagataaactagattacct

SEQ ID NO: 73405 - RNA, 21 nt, synthetic construct
  source 1..21: mol_type = other RNA
atgagatactacgcctagctg

SEQ ID NO: 73406 - RNA, 21 nt, synthetic construct
  source 1..21: mol_type = other RNA
atgagatagaccagatgcgtg

SEQ ID NO: 73407 - RNA, 21 nt, synthetic construct
  source 1..21: mol_type = other RNA
atgagattaatgtaggtgtct

SEQ ID NO: 73408 - RNA, 21 nt, synthetic construct
  source 1..21: mol_type = other RNA
atgagattacatagcaaggaa

SEQ ID NO: 73409 - RNA, 21 nt, synthetic construct
  source 1..21: mol_type = other RNA
atgagcaaggtcgtttcagat

SEQ ID NO: 73410 - RNA, 21 nt, synthetic construct
  source 1..21: mol_type = other RNA
atgagcagttgtatgccaaaa

SEQ ID NO: 73411 - RNA, 21 nt, synthetic construct
  source 1..21: mol_type = other RNA
atgagcattccccacatagga

SEQ ID NO: 73412 - RNA, 21 nt, synthetic construct
  source 1..21: mol_type = other RNA
atgagccacagggcccagcct

SEQ ID NO: 73413 - RNA, 21 nt, synthetic construct
  source 1..21: mol_type = other RNA
atgagccaccgtgcccggcca

SEQ ID NO: 73414 - RNA, 21 nt, synthetic construct
  source 1..21: mol_type = other RNA
atgagccactagtcagtatat

SEQ ID NO: 73415 - RNA, 21 nt, synthetic construct
  source 1..21: mol_type = other RNA
atgagccactgcgggcccagc

SEQ ID NO: 73416 - RNA, 21 nt, synthetic construct
  source 1..21: mol_type = other RNA
atgagccaggcatggtggtgg

SEQ ID NO: 73417 - RNA, 21 nt, synthetic construct
  source 1..21: mol_type = other RNA
atgagcccaggagttgcatca

SEQ ID NO: 73418 - RNA, 21 nt, synthetic construct
  source 1..21: mol_type = other RNA
atgagctactgcatgctaggg

SEQ ID NO: 73419 - RNA, 21 nt, synthetic construct
  source 1..21: mol_type = other RNA
atgaggaaagcaggttgcatt

SEQ ID NO: 73420 - RNA, 21 nt, synthetic construct
  source 1..21: mol_type = other RNA
atgaggaagaggaaggttcaa

SEQ ID NO: 73421 - RNA, 21 nt, synthetic construct
  source 1..21: mol_type = other RNA
atgaggagtgaatttttcatt

SEQ ID NO: 73422 - RNA, 21 nt, synthetic construct
  source 1..21: mol_type = other RNA
atgaggcatattattgtaact

SEQ ID NO: 73423 - RNA, 21 nt, synthetic construct
  source 1..21: mol_type = other RNA
atgaggcctctccccttgacg

SEQ ID NO: 73424 - RNA, 21 nt, synthetic construct
  source 1..21: mol_type = other RNA
atgaggcttttattggtaatg

SEQ ID NO: 73425 - RNA, 21 nt, synthetic construct
  source 1..21: mol_type = other RNA
atgagggatgaggaagaggaa

SEQ ID NO: 73426 - RNA, 21 nt, synthetic construct
  source 1..21: mol_type = other RNA
atgagggcagagataactggg

SEQ ID NO: 73427 - RNA, 21 nt, synthetic construct
  source 1..21: mol_type = other RNA
atgaggggctgagccttcaga

SEQ ID NO: 73428 - RNA, 21 nt, synthetic construct
  source 1..21: mol_type = other RNA
atgagggtaaaatagtcaagt

SEQ ID NO: 73429 - RNA, 21 nt, synthetic construct
  source 1..21: mol_type = other RNA
atgaggtatcatttccaagat

SEQ ID NO: 73430 - RNA, 21 nt, synthetic construct
  source 1..21: mol_type = other RNA
atgaggtcacccaagccacag

SEQ ID NO: 73431 - RNA, 21 nt, synthetic construct
  source 1..21: mol_type = other RNA
atgaggtctcagccttttctg

SEQ ID NO: 73432 - RNA, 21 nt, synthetic construct
  source 1..21: mol_type = other RNA
atgaggttgcttttacttggc

SEQ ID NO: 73433 - RNA, 21 nt, synthetic construct
  source 1..21: mol_type = other RNA
atgaggttttacgatgttggc

SEQ ID NO: 73434 - RNA, 21 nt, synthetic construct
  source 1..21: mol_type = other RNA
atgagtaaaaagaaatctgca

SEQ ID NO: 73435 - RNA, 21 nt, synthetic construct
  source 1..21: mol_type = other RNA
atgagtaacatgtggaacata

SEQ ID NO: 73436 - RNA, 21 nt, synthetic construct
  source 1..21: mol_type = other RNA
atgagtagtacttctgagtgt

SEQ ID NO: 73437 - RNA, 21 nt, synthetic construct
  source 1..21: mol_type = other RNA
atgagtatctggtgttgcttg

SEQ ID NO: 73438 - RNA, 21 nt, synthetic construct
  source 1..21: mol_type = other RNA
atgagtccagctttctaattc

SEQ ID NO: 73439 - RNA, 21 nt, synthetic construct
  source 1..21: mol_type = other RNA
atgagtcctgaaaattccttc

SEQ ID NO: 73440 - RNA, 21 nt, synthetic construct
  source 1..21: mol_type = other RNA
atgagtcgccatacctggtcc

SEQ ID NO: 73441 - RNA, 21 nt, synthetic construct
  source 1..21: mol_type = other RNA
atgagtctgacatactgtcac

SEQ ID NO: 73442 - RNA, 21 nt, synthetic construct
  source 1..21: mol_type = other RNA
atgagtcttccgtctcaagat

SEQ ID NO: 73443 - RNA, 21 nt, synthetic construct
  source 1..21: mol_type = other RNA
atgagtgagccacagctacac

SEQ ID NO: 73444 - RNA, 21 nt, synthetic construct
  source 1..21: mol_type = other RNA
atgagtgtatgcagggaaatc

SEQ ID NO: 73445 - RNA, 21 nt, synthetic construct
  source 1..21: mol_type = other RNA
atgagtgtttcccttaaaagg

SEQ ID NO: 73446 - RNA, 21 nt, synthetic construct
  source 1..21: mol_type = other RNA
atgagttccagtcctttgtgt

SEQ ID NO: 73447 - RNA, 21 nt, synthetic construct
  source 1..21: mol_type = other RNA
atgagttcctgcttcccccaa

SEQ ID NO: 73448 - RNA, 21 nt, synthetic construct
  source 1..21: mol_type = other RNA
atgagtttaattcttttgctg

SEQ ID NO: 73449 - RNA, 21 nt, synthetic construct
  source 1..21: mol_type = other RNA
atgataaaaataacgggccgg

SEQ ID NO: 73450 - RNA, 21 nt, synthetic construct
  source 1..21: mol_type = other RNA
atgataccctcaaaagatgca

SEQ ID NO: 73451 - RNA, 21 nt, synthetic construct
  source 1..21: mol_type = other RNA
atgataccttcttgagagtct

SEQ ID NO: 73452 - RNA, 21 nt, synthetic construct
  source 1..21: mol_type = other RNA
atgatactcgtagttttttgg

SEQ ID NO: 73453 - RNA, 21 nt, synthetic construct
  source 1..21: mol_type = other RNA
atgatagaataccacttagtt

SEQ ID NO: 73454 - RNA, 21 nt, synthetic construct
  source 1..21: mol_type = other RNA
atgatagactggattaaggag

SEQ ID NO: 73455 - RNA, 21 nt, synthetic construct
  source 1..21: mol_type = other RNA
atgatagcattatcccagatc

SEQ ID NO: 73456 - RNA, 21 nt, synthetic construct
  source 1..21: mol_type = other RNA
atgataggtcactgcagtctc

SEQ ID NO: 73457 - RNA, 21 nt, synthetic construct
  source 1..21: mol_type = other RNA
atgatcaaaaccaggaggttt

SEQ ID NO: 73458 - RNA, 21 nt, synthetic construct
  source 1..21: mol_type = other RNA
atgatcaaagtgaaaggcaaa

SEQ ID NO: 73459 - RNA, 21 nt, synthetic construct
  source 1..21: mol_type = other RNA
atgatccagcagtttcacttc

SEQ ID NO: 73460 - RNA, 21 nt, synthetic construct
  source 1..21: mol_type = other RNA
atgatctaaatggtgtgaagt

SEQ ID NO: 73461 - RNA, 21 nt, synthetic construct
  source 1..21: mol_type = other RNA
atgatctatcaatctcacacc

SEQ ID NO: 73462 - RNA, 21 nt, synthetic construct
  source 1..21: mol_type = other RNA
atgatctcacgtcaccgcaac

SEQ ID NO: 73463 - RNA, 21 nt, synthetic construct
  source 1..21: mol_type = other RNA
atgatcttgggaatactttcc

SEQ ID NO: 73464 - RNA, 21 nt, synthetic construct
  source 1..21: mol_type = other RNA
atgatctttcaaggggccttt

SEQ ID NO: 73465 - RNA, 21 nt, synthetic construct
  source 1..21: mol_type = other RNA
atgatctttgaataaagggtc

SEQ ID NO: 73466 - RNA, 21 nt, synthetic construct
  source 1..21: mol_type = other RNA
atgatgaacaaaggcaggagc

SEQ ID NO: 73467 - RNA, 21 nt, synthetic construct
  source 1..21: mol_type = other RNA
atgatgaagggttttctgtag

SEQ ID NO: 73468 - RNA, 21 nt, synthetic construct
  source 1..21: mol_type = other RNA
atgatgactatgaaaagcctc

SEQ ID NO: 73469 - RNA, 21 nt, synthetic construct
  source 1..21: mol_type = other RNA
atgatgagctactgcatgcta

SEQ ID NO: 73470 - RNA, 21 nt, synthetic construct
  source 1..21: mol_type = other RNA
atgatgatggtgatgctaacg

SEQ ID NO: 73471 - RNA, 21 nt, synthetic construct
  source 1..21: mol_type = other RNA
atgatgatttttgccagtgtt

SEQ ID NO: 73472 - RNA, 21 nt, synthetic construct
  source 1..21: mol_type = other RNA
atgatgcagcccctgccacac

SEQ ID NO: 73473 - RNA, 21 nt, synthetic construct
  source 1..21: mol_type = other RNA
atgatgccactcaaaactgaa

SEQ ID NO: 73474 - RNA, 21 nt, synthetic construct
  source 1..21: mol_type = other RNA
atgatgccatcacattttgaa

SEQ ID NO: 73475 - RNA, 21 nt, synthetic construct
  source 1..21: mol_type = other RNA
atgatggcaacaatcaacagg

SEQ ID NO: 73476 - RNA, 21 nt, synthetic construct
  source 1..21: mol_type = other RNA
atgatggctcaacgcctgtga

SEQ ID NO: 73477 - RNA, 21 nt, synthetic construct
  source 1..21: mol_type = other RNA
atgatggtgatgctaacgtgc

SEQ ID NO: 73478 - RNA, 21 nt, synthetic construct
  source 1..21: mol_type = other RNA
atgatgtttggctccttacca

SEQ ID NO: 73479 - RNA, 21 nt, synthetic construct
  source 1..21: mol_type = other RNA
atgatgttttgaacgaatgaa

SEQ ID NO: 73480 - RNA, 21 nt, synthetic construct
  source 1..21: mol_type = other RNA
atgattatttgcggcttgatt

SEQ ID NO: 73481 - RNA, 21 nt, synthetic construct
  source 1..21: mol_type = other RNA
atgattcaaaatgtgatggca

SEQ ID NO: 73482 - RNA, 21 nt, synthetic construct
  source 1..21: mol_type = other RNA
atgattcagtcttggtagttt

SEQ ID NO: 73483 - RNA, 21 nt, synthetic construct
  source 1..21: mol_type = other RNA
atgattccacttatatgaagc

SEQ ID NO: 73484 - RNA, 21 nt, synthetic construct
  source 1..21: mol_type = other RNA
atgattccccttatatgggat

SEQ ID NO: 73485 - RNA, 21 nt, synthetic construct
  source 1..21: mol_type = other RNA
atgattcgcattgctaattca

SEQ ID NO: 73486 - RNA, 21 nt, synthetic construct
  source 1..21: mol_type = other RNA
atgattctaatgtgcaaggag

SEQ ID NO: 73487 - RNA, 21 nt, synthetic construct
  source 1..21: mol_type = other RNA
atgattgaggacttcatgtac

SEQ ID NO: 73488 - RNA, 21 nt, synthetic construct
  source 1..21: mol_type = other RNA
atgattgggtcaacaaactaa

SEQ ID NO: 73489 - RNA, 21 nt, synthetic construct
  source 1..21: mol_type = other RNA
atgatttaatagaggtctgtc

SEQ ID NO: 73490 - RNA, 21 nt, synthetic construct
  source 1..21: mol_type = other RNA
atgatttataatccattgggt

SEQ ID NO: 73491 - RNA, 21 nt, synthetic construct
  source 1..21: mol_type = other RNA
atgatttcaagtaacactcag

SEQ ID NO: 73492 - RNA, 21 nt, synthetic construct
  source 1..21: mol_type = other RNA
atgatttcacttacttgagcc

SEQ ID NO: 73493 - RNA, 21 nt, synthetic construct
  source 1..21: mol_type = other RNA
atgatttccctgcatacactc

SEQ ID NO: 73494 - RNA, 21 nt, synthetic construct
  source 1..21: mol_type = other RNA
atgatttctaggccctaaccc

SEQ ID NO: 73495 - RNA, 21 nt, synthetic construct
  source 1..21: mol_type = other RNA
atgatttggtgtgtgcaaagg

SEQ ID NO: 73496 - RNA, 21 nt, synthetic construct
  source 1..21: mol_type = other RNA
atgattttcacagggcaggga

SEQ ID NO: 73497 - RNA, 21 nt, synthetic construct
  source 1..21: mol_type = other RNA
atgatttttgccagtgtttta

SEQ ID NO: 73498 - RNA, 21 nt, synthetic construct
  source 1..21: mol_type = other RNA
atgcaaactctaaataatagg

SEQ ID NO: 73499 - RNA, 21 nt, synthetic construct
  source 1..21: mol_type = other RNA
atgcaaagtttcctacatact

SEQ ID NO: 73500 - RNA, 21 nt, synthetic construct
  source 1..21: mol_type = other RNA
atgcaacaaatgttgcagaga

SEQ ID NO: 73501 - RNA, 21 nt, synthetic construct
  source 1..21: mol_type = other RNA
atgcaacctgctttcctcatg

SEQ ID NO: 73502 - RNA, 21 nt, synthetic construct
  source 1..21: mol_type = other RNA
atgcaactcctgggctcatct

SEQ ID NO: 73503 - RNA, 21 nt, synthetic construct
  source 1..21: mol_type = other RNA
atgcaactgaaaacatctttt

SEQ ID NO: 73504 - RNA, 21 nt, synthetic construct
  source 1..21: mol_type = other RNA
atgcaacttactctcaaataa

SEQ ID NO: 73505 - RNA, 21 nt, synthetic construct
  source 1..21: mol_type = other RNA
atgcaagaatggtttaacaca

SEQ ID NO: 73506 - RNA, 21 nt, synthetic construct
  source 1..21: mol_type = other RNA
atgcaagagttaaaactcaca

SEQ ID NO: 73507 - RNA, 21 nt, synthetic construct
  source 1..21: mol_type = other RNA
atgcaagatggcaagtttcca

SEQ ID NO: 73508 - RNA, 21 nt, synthetic construct
  source 1..21: mol_type = other RNA
atgcaagatgtcaacattaag

SEQ ID NO: 73509 - RNA, 21 nt, synthetic construct
  source 1..21: mol_type = other RNA
atgcaataactcaaaatgttc

SEQ ID NO: 73510 - RNA, 21 nt, synthetic construct
  source 1..21: mol_type = other RNA
atgcaatacttaatagcccaa

SEQ ID NO: 73511 - RNA, 21 nt, synthetic construct
  source 1..21: mol_type = other RNA
atgcaatgcaggcgcctggac

SEQ ID NO: 73512 - RNA, 21 nt, synthetic construct
  source 1..21: mol_type = other RNA
atgcaatgcgtgtgaaaccaa

SEQ ID NO: 73513 - RNA, 21 nt, synthetic construct
  source 1..21: mol_type = other RNA
atgcaattccccagcctcagc

SEQ ID NO: 73514 - RNA, 21 nt, synthetic construct
  source 1..21: mol_type = other RNA
atgcaatttgttttccaagcc

SEQ ID NO: 73515 - RNA, 21 nt, synthetic construct
  source 1..21: mol_type = other RNA
atgcacaaaagtttaactttg

SEQ ID NO: 73516 - RNA, 21 nt, synthetic construct
  source 1..21: mol_type = other RNA
atgcacaagacagatgtgctt

SEQ ID NO: 73517 - RNA, 21 nt, synthetic construct
  source 1..21: mol_type = other RNA
atgcacaagccttgaaaatat

SEQ ID NO: 73518 - RNA, 21 nt, synthetic construct
  source 1..21: mol_type = other RNA
atgcacaaggtcaagagcggc

SEQ ID NO: 73519 - RNA, 21 nt, synthetic construct
  source 1..21: mol_type = other RNA
atgcacaatggaatattactc

SEQ ID NO: 73520 - RNA, 21 nt, synthetic construct
  source 1..21: mol_type = other RNA
atgcacacagagggagcgcca

SEQ ID NO: 73521 - RNA, 21 nt, synthetic construct
  source 1..21: mol_type = other RNA
atgcacacaggagaacttgtc

SEQ ID NO: 73522 - RNA, 21 nt, synthetic construct
  source 1..21: mol_type = other RNA
atgcacacgctggaagggagc

SEQ ID NO: 73523 - RNA, 21 nt, synthetic construct
  source 1..21: mol_type = other RNA
atgcacactagacctttctta

SEQ ID NO: 73524 - RNA, 21 nt, synthetic construct
  source 1..21: mol_type = other RNA
atgcacatgggcatgggtcca

SEQ ID NO: 73525 - RNA, 21 nt, synthetic construct
  source 1..21: mol_type = other RNA
atgcaccaacacctgcagtgg

SEQ ID NO: 73526 - RNA, 21 nt, synthetic construct
  source 1..21: mol_type = other RNA
atgcacgagaaaagcacaggc

SEQ ID NO: 73527 - RNA, 21 nt, synthetic construct
  source 1..21: mol_type = other RNA
atgcacggacttggcacagga

SEQ ID NO: 73528 - RNA, 21 nt, synthetic construct
  source 1..21: mol_type = other RNA
atgcacgtgaagctacagact

SEQ ID NO: 73529 - RNA, 21 nt, synthetic construct
  source 1..21: mol_type = other RNA
atgcactgtactcctagatac

SEQ ID NO: 73530 - RNA, 21 nt, synthetic construct
  source 1..21: mol_type = other RNA
atgcacttagcgctgatgtgt

SEQ ID NO: 73531 - RNA, 21 nt, synthetic construct
  source 1..21: mol_type = other RNA
atgcagaaaataaaccaagtt

SEQ ID NO: 73532 - RNA, 21 nt, synthetic construct
  source 1..21: mol_type = other RNA
atgcagaaaccagttgtaatt

SEQ ID NO: 73533 - RNA, 21 nt, synthetic construct
  source 1..21: mol_type = other RNA
atgcagaaatctaccaaacat

SEQ ID NO: 73534 - RNA, 21 nt, synthetic construct
  source 1..21: mol_type = other RNA
atgcagatttctttttactca

SEQ ID NO: 73535 - RNA, 21 nt, synthetic construct
  source 1..21: mol_type = other RNA
atgcagcaaaagcaccactga

SEQ ID NO: 73536 - RNA, 21 nt, synthetic construct
  source 1..21: mol_type = other RNA
atgcagcaacggaaatgagtg

SEQ ID NO: 73537 - RNA, 21 nt, synthetic construct
  source 1..21: mol_type = other RNA
atgcagcccctgccacactcc

SEQ ID NO: 73538 - RNA, 21 nt, synthetic construct
  source 1..21: mol_type = other RNA
atgcaggaccaactttaagca

SEQ ID NO: 73539 - RNA, 21 nt, synthetic construct
  source 1..21: mol_type = other RNA
atgcaggagaaacatggctta

SEQ ID NO: 73540 - RNA, 21 nt, synthetic construct
  source 1..21: mol_type = other RNA
atgcaggcgcctggacaggat

SEQ ID NO: 73541 - RNA, 21 nt, synthetic construct
  source 1..21: mol_type = other RNA
atgcagggaaatcattcagga

SEQ ID NO: 73542 - RNA, 21 nt, synthetic construct
  source 1..21: mol_type = other RNA
atgcaggttcatgtgtgctta

SEQ ID NO: 73543 - RNA, 21 nt, synthetic construct
  source 1..21: mol_type = other RNA
atgcagtacttgtctttttgt

SEQ ID NO: 73544 - RNA, 21 nt, synthetic construct
  source 1..21: mol_type = other RNA
atgcagtagctcatcatttat

SEQ ID NO: 73545 - RNA, 21 nt, synthetic construct
  source 1..21: mol_type = other RNA
atgcagtagtaaagcaaatgt

SEQ ID NO: 73546 - RNA, 21 nt, synthetic construct
  source 1..21: mol_type = other RNA
atgcagtatgtgccattttta

SEQ ID NO: 73547 - RNA, 21 nt, synthetic construct
  source 1..21: mol_type = other RNA
atgcagtattgttaactgtag

SEQ ID NO: 73548 - RNA, 21 nt, synthetic construct
  source 1..21: mol_type = other RNA
atgcagtggcttcctaactgg

SEQ ID NO: 73549 - RNA, 21 nt, synthetic construct
  source 1..21: mol_type = other RNA
atgcagttgcttactctaatg

SEQ ID NO: 73550 - RNA, 21 nt, synthetic construct
  source 1..21: mol_type = other RNA
atgcataaacgacagcaggaa

SEQ ID NO: 73551 - RNA, 21 nt, synthetic construct
  source 1..21: mol_type = other RNA
atgcataagttctagagattt

SEQ ID NO: 73552 - RNA, 21 nt, synthetic construct
  source 1..21: mol_type = other RNA
atgcataccaagcccggcacg

SEQ ID NO: 73553 - RNA, 21 nt, synthetic construct
  source 1..21: mol_type = other RNA
atgcatactgcagcactttta

SEQ ID NO: 73554 - RNA, 21 nt, synthetic construct
  source 1..21: mol_type = other RNA
atgcatactttggaaggtagg

SEQ ID NO: 73555 - RNA, 21 nt, synthetic construct
  source 1..21: mol_type = other RNA
atgcatagatcacaaggactg

SEQ ID NO: 73556 - RNA, 21 nt, synthetic construct
  source 1..21: mol_type = other RNA
atgcatagcagggtcatgcac

SEQ ID NO: 73557 - RNA, 21 nt, synthetic construct
  source 1..21: mol_type = other RNA
atgcatatatctgtctgggat

SEQ ID NO: 73558 - RNA, 21 nt, synthetic construct
  source 1..21: mol_type = other RNA
atgcatatgtttgtaacttgt

SEQ ID NO: 73559 - RNA, 21 nt, synthetic construct
  source 1..21: mol_type = other RNA
atgcatccacattttgtgaca

SEQ ID NO: 73560 - RNA, 21 nt, synthetic construct
  source 1..21: mol_type = other RNA
atgcatccctcctctggccct

SEQ ID NO: 73561 - RNA, 21 nt, synthetic construct
  source 1..21: mol_type = other RNA
atgcatcgtttcaatattaag

SEQ ID NO: 73562 - RNA, 21 nt, synthetic construct
  source 1..21: mol_type = other RNA
atgcatcttgaactaagtgtg

SEQ ID NO: 73563 - RNA, 21 nt, synthetic construct
  source 1..21: mol_type = other RNA
atgcatcttgcaaaacggaaa

SEQ ID NO: 73564 - RNA, 21 nt, synthetic construct
  source 1..21: mol_type = other RNA
atgcatgaggcatattattgt

SEQ ID NO: 73565 - RNA, 21 nt, synthetic construct
  source 1..21: mol_type = other RNA
atgcatgcacacagagggagc

SEQ ID NO: 73566 - RNA, 21 nt, synthetic construct
  source 1..21: mol_type = other RNA
atgcatgggaggtaatactat

SEQ ID NO: 73567 - RNA, 21 nt, synthetic construct
  source 1..21: mol_type = other RNA
atgcatgtctgtctgttcaca

SEQ ID NO: 73568 - RNA, 21 nt, synthetic construct
  source 1..21: mol_type = other RNA
atgcatgttatttggggattc

SEQ ID NO: 73569 - RNA, 21 nt, synthetic construct
  source 1..21: mol_type = other RNA
atgcattaagccagtcactaa

SEQ ID NO: 73570 - RNA, 21 nt, synthetic construct
  source 1..21: mol_type = other RNA
atgcattccagattgaaatct

SEQ ID NO: 73571 - RNA, 21 nt, synthetic construct
  source 1..21: mol_type = other RNA
atgcattcccatgttcactgc

SEQ ID NO: 73572 - RNA, 21 nt, synthetic construct
  source 1..21: mol_type = other RNA
atgcattcgtccctaaacact

SEQ ID NO: 73573 - RNA, 21 nt, synthetic construct
  source 1..21: mol_type = other RNA
atgcattctagaaaggaggga

SEQ ID NO: 73574 - RNA, 21 nt, synthetic construct
  source 1..21: mol_type = other RNA
atgcattctgtcacatagacc

SEQ ID NO: 73575 - RNA, 21 nt, synthetic construct
  source 1..21: mol_type = other RNA
atgcatttattagtagttagg

SEQ ID NO: 73576 - RNA, 21 nt, synthetic construct
  source 1..21: mol_type = other RNA
atgcatttggtctcattcact

SEQ ID NO: 73577 - RNA, 21 nt, synthetic construct
  source 1..21: mol_type = other RNA
atgccaatatcacactgtttg

SEQ ID NO: 73578 - RNA, 21 nt, synthetic construct
  source 1..21: mol_type = other RNA
atgccaatttgggatatagct

SEQ ID NO: 73579 - RNA, 21 nt, synthetic construct
  source 1..21: mol_type = other RNA
atgccacaaatggagtgactt

SEQ ID NO: 73580 - RNA, 21 nt, synthetic construct
  source 1..21: mol_type = other RNA
atgccacaccacatccagcta

SEQ ID NO: 73581 - RNA, 21 nt, synthetic construct
  source 1..21: mol_type = other RNA
atgccacataaatcacaggaa

SEQ ID NO: 73582 - RNA, 21 nt, synthetic construct
  source 1..21: mol_type = other RNA
atgccacattttttggtttgt

SEQ ID NO: 73583 - RNA, 21 nt, synthetic construct
  source 1..21: mol_type = other RNA
atgccactcaaaactgaagtt

SEQ ID NO: 73584 - RNA, 21 nt, synthetic construct
  source 1..21: mol_type = other RNA
atgccagctttggctgaaatg

SEQ ID NO: 73585 - RNA, 21 nt, synthetic construct
  source 1..21: mol_type = other RNA
atgccagggcgctcctctccc

SEQ ID NO: 73586 - RNA, 21 nt, synthetic construct
  source 1..21: mol_type = other RNA
atgccatagagctttaaagtt

SEQ ID NO: 73587 - RNA, 21 nt, synthetic construct
  source 1..21: mol_type = other RNA
atgccatcacattttgaatca

SEQ ID NO: 73588 - RNA, 21 nt, synthetic construct
  source 1..21: mol_type = other RNA
atgccatcctggatttgggaa

SEQ ID NO: 73589 - RNA, 21 nt, synthetic construct
  source 1..21: mol_type = other RNA
atgccatgtgttttgttttga

SEQ ID NO: 73590 - RNA, 21 nt, synthetic construct
  source 1..21: mol_type = other RNA
atgcccaatcaaatccagtct

SEQ ID NO: 73591 - RNA, 21 nt, synthetic construct
  source 1..21: mol_type = other RNA
atgcccatcctctatttttgt

SEQ ID NO: 73592 - RNA, 21 nt, synthetic construct
  source 1..21: mol_type = other RNA
atgcccatgtgcattattgta

SEQ ID NO: 73593 - RNA, 21 nt, synthetic construct
  source 1..21: mol_type = other RNA
atgcccattaaaaccatgaaa

SEQ ID NO: 73594 - RNA, 21 nt, synthetic construct
  source 1..21: mol_type = other RNA
atgccccatgtgttggcactg

SEQ ID NO: 73595 - RNA, 21 nt, synthetic construct
  source 1..21: mol_type = other RNA
atgccccctcttctctccttt

SEQ ID NO: 73596 - RNA, 21 nt, synthetic construct
  source 1..21: mol_type = other RNA
atgcccctgtagcagacactg

SEQ ID NO: 73597 - RNA, 21 nt, synthetic construct
  source 1..21: mol_type = other RNA
atgcccctttgagcagagtcc

SEQ ID NO: 73598 - RNA, 21 nt, synthetic construct
  source 1..21: mol_type = other RNA
atgcccttatttaatgtgctg

SEQ ID NO: 73599 - RNA, 21 nt, synthetic construct
  source 1..21: mol_type = other RNA
atgccgctggtgaaaaaatgg

SEQ ID NO: 73600 - RNA, 21 nt, synthetic construct
  source 1..21: mol_type = other RNA
atgccggctgttaggtattat

SEQ ID NO: 73601 - RNA, 21 nt, synthetic construct
  source 1..21: mol_type = other RNA
atgccgggacaagagtctgca

SEQ ID NO: 73602 - RNA, 21 nt, synthetic construct
  source 1..21: mol_type = other RNA
atgccggtaatcacagctact

SEQ ID NO: 73603 - RNA, 21 nt, synthetic construct
  source 1..21: mol_type = other RNA
atgcctagaaaggaattgtaa

SEQ ID NO: 73604 - RNA, 21 nt, synthetic construct
  source 1..21: mol_type = other RNA
atgcctagatgattcgcattg

SEQ ID NO: 73605 - RNA, 21 nt, synthetic construct
  source 1..21: mol_type = other RNA
atgcctagatttcaatctgga

SEQ ID NO: 73606 - RNA, 21 nt, synthetic construct
  source 1..21: mol_type = other RNA
atgcctataaaatgctggaaa

SEQ ID NO: 73607 - RNA, 21 nt, synthetic construct
  source 1..21: mol_type = other RNA
atgcctatgaaatcttgaaga

SEQ ID NO: 73608 - RNA, 21 nt, synthetic construct
  source 1..21: mol_type = other RNA
atgcctcaaattagtcatagc

SEQ ID NO: 73609 - RNA, 21 nt, synthetic construct
  source 1..21: mol_type = other RNA
atgcctcatgcatccacattt

SEQ ID NO: 73610 - RNA, 21 nt, synthetic construct
  source 1..21: mol_type = other RNA
atgcctcgaaggcctgcttca

SEQ ID NO: 73611 - RNA, 21 nt, synthetic construct
  source 1..21: mol_type = other RNA
atgcctctcccaccatctctc

SEQ ID NO: 73612 - RNA, 21 nt, synthetic construct
  source 1..21: mol_type = other RNA
atgcctctgttacagctcttc

SEQ ID NO: 73613 - RNA, 21 nt, synthetic construct
  source 1..21: mol_type = other RNA
atgcctgacaaagtatgagaa

SEQ ID NO: 73614 - RNA, 21 nt, synthetic construct
  source 1..21: mol_type = other RNA
atgcctgccgcagagcaagca

SEQ ID NO: 73615 - RNA, 21 nt, synthetic construct
  source 1..21: mol_type = other RNA
atgcctgggtaattaaacatt

SEQ ID NO: 73616 - RNA, 21 nt, synthetic construct
  source 1..21: mol_type = other RNA
atgcctgtgcttgtctctctc

SEQ ID NO: 73617 - RNA, 21 nt, synthetic construct
  source 1..21: mol_type = other RNA
atgcctgtgcttttctcgtgc

SEQ ID NO: 73618 - RNA, 21 nt, synthetic construct
  source 1..21: mol_type = other RNA
atgccttcagtatgaatgcac

SEQ ID NO: 73619 - RNA, 21 nt, synthetic construct
  source 1..21: mol_type = other RNA
atgcctttcagcatagcagaa

SEQ ID NO: 73620 - RNA, 21 nt, synthetic construct
  source 1..21: mol_type = other RNA
atgcgaatcatctaggcatat

SEQ ID NO: 73621 - RNA, 21 nt, synthetic construct
  source 1..21: mol_type = other RNA
atgcgacatatcagggatcac

SEQ ID NO: 73622 - RNA, 21 nt, synthetic construct
  source 1..21: mol_type = other RNA
atgcgatgatcaaaaccagga

SEQ ID NO: 73623 - RNA, 21 nt, synthetic construct
  source 1..21: mol_type = other RNA
atgcgccatcacacccagtat

SEQ ID NO: 73624 - RNA, 21 nt, synthetic construct
  source 1..21: mol_type = other RNA
atgcggggtttcagcacaata

SEQ ID NO: 73625 - RNA, 21 nt, synthetic construct
  source 1..21: mol_type = other RNA
atgcgtggttcacacctgtag

SEQ ID NO: 73626 - RNA, 21 nt, synthetic construct
  source 1..21: mol_type = other RNA
atgcgtgtgaaaccaagcaag

SEQ ID NO: 73627 - RNA, 21 nt, synthetic construct
  source 1..21: mol_type = other RNA
atgcgtttgttagatctggga

SEQ ID NO: 73628 - RNA, 21 nt, synthetic construct
  source 1..21: mol_type = other RNA
atgctaaacagtacagtagta

SEQ ID NO: 73629 - RNA, 21 nt, synthetic construct
  source 1..21: mol_type = other RNA
atgctaacatgaactactcaa

SEQ ID NO: 73630 - RNA, 21 nt, synthetic construct
  source 1..21: mol_type = other RNA
atgctaacgtgcttgctctgc

SEQ ID NO: 73631 - RNA, 21 nt, synthetic construct
  source 1..21: mol_type = other RNA
atgctaactgcagaggtcagg

SEQ ID NO: 73632 - RNA, 21 nt, synthetic construct
  source 1..21: mol_type = other RNA
atgctaagtgtttaggatata

SEQ ID NO: 73633 - RNA, 21 nt, synthetic construct
  source 1..21: mol_type = other RNA
atgctaggggctgttcccaga

SEQ ID NO: 73634 - RNA, 21 nt, synthetic construct
  source 1..21: mol_type = other RNA
atgctataaagaacatgattg

SEQ ID NO: 73635 - RNA, 21 nt, synthetic construct
  source 1..21: mol_type = other RNA
atgctatcattttaaagggat

SEQ ID NO: 73636 - RNA, 21 nt, synthetic construct
  source 1..21: mol_type = other RNA
atgctatccagaagagaatgg

SEQ ID NO: 73637 - RNA, 21 nt, synthetic construct
  source 1..21: mol_type = other RNA
atgctattataaatggcatct

SEQ ID NO: 73638 - RNA, 21 nt, synthetic construct
  source 1..21: mol_type = other RNA
atgctattcaagacaagcaag

SEQ ID NO: 73639 - RNA, 21 nt, synthetic construct
  source 1..21: mol_type = other RNA
atgctcacatttagtttcatc

SEQ ID NO: 73640 - RNA, 21 nt, synthetic construct
  source 1..21: mol_type = other RNA
atgctcactgtctccatgtcc

SEQ ID NO: 73641 - RNA, 21 nt, synthetic construct
  source 1..21: mol_type = other RNA
atgctcagggtgcgacctcga

SEQ ID NO: 73642 - RNA, 21 nt, synthetic construct
  source 1..21: mol_type = other RNA
atgctcagtgggttcaattat

SEQ ID NO: 73643 - RNA, 21 nt, synthetic construct
  source 1..21: mol_type = other RNA
atgctcagtttcaaaagctcc

SEQ ID NO: 73644 - RNA, 21 nt, synthetic construct
  source 1..21: mol_type = other RNA
atgctcataattaaagagagt

SEQ ID NO: 73645 - RNA, 21 nt, synthetic construct
  source 1..21: mol_type = other RNA
atgctcccatttgggactgag

SEQ ID NO: 73646 - RNA, 21 nt, synthetic construct
  source 1..21: mol_type = other RNA
atgctccctaaatacacatgt

SEQ ID NO: 73647 - RNA, 21 nt, synthetic construct
  source 1..21: mol_type = other RNA
atgctccctctatggcaggca

SEQ ID NO: 73648 - RNA, 21 nt, synthetic construct
  source 1..21: mol_type = other RNA
atgctctcttcccccaaaact

SEQ ID NO: 73649 - RNA, 21 nt, synthetic construct
  source 1..21: mol_type = other RNA
atgctctgataggataatgtc

SEQ ID NO: 73650 - RNA, 21 nt, synthetic construct
  source 1..21: mol_type = other RNA
atgctcttggtttcttcaaga

SEQ ID NO: 73651 - RNA, 21 nt, synthetic construct
  source 1..21: mol_type = other RNA
atgctgaaaggcatgaaattc

SEQ ID NO: 73652 - RNA, 21 nt, synthetic construct
  source 1..21: mol_type = other RNA
atgctgaacttgtcacaaaat

SEQ ID NO: 73653 - RNA, 21 nt, synthetic construct
  source 1..21: mol_type = other RNA
atgctgaggccccaggggaca

SEQ ID NO: 73654 - RNA, 21 nt, synthetic construct
  source 1..21: mol_type = other RNA
atgctgagtgaatggggtaat

SEQ ID NO: 73655 - RNA, 21 nt, synthetic construct
  source 1..21: mol_type = other RNA
atgctgatgaactacacagac

SEQ ID NO: 73656 - RNA, 21 nt, synthetic construct
  source 1..21: mol_type = other RNA
atgctgcaactgagaagagct

SEQ ID NO: 73657 - RNA, 21 nt, synthetic construct
  source 1..21: mol_type = other RNA
atgctgcgagccccgggggag

SEQ ID NO: 73658 - RNA, 21 nt, synthetic construct
  source 1..21: mol_type = other RNA
atgctgctatgaaaattggcg

SEQ ID NO: 73659 - RNA, 21 nt, synthetic construct
  source 1..21: mol_type = other RNA
atgctggaaattttcaagggt

SEQ ID NO: 73660 - RNA, 21 nt, synthetic construct
  source 1..21: mol_type = other RNA
atgctggagtgtggcaggggc

SEQ ID NO: 73661 - RNA, 21 nt, synthetic construct
  source 1..21: mol_type = other RNA
atgctggccagtgagttcaaa

SEQ ID NO: 73662 - RNA, 21 nt, synthetic construct
  source 1..21: mol_type = other RNA
atgctggcttcatgggtggaa

SEQ ID NO: 73663 - RNA, 21 nt, synthetic construct
  source 1..21: mol_type = other RNA
atgctgggagaccaggagttc

SEQ ID NO: 73664 - RNA, 21 nt, synthetic construct
  source 1..21: mol_type = other RNA
atgctggggacccctccctgc

SEQ ID NO: 73665 - RNA, 21 nt, synthetic construct
  source 1..21: mol_type = other RNA
atgctggtggagtattctagt

SEQ ID NO: 73666 - RNA, 21 nt, synthetic construct
  source 1..21: mol_type = other RNA
atgctggtgggctttgagaaa

SEQ ID NO: 73667 - RNA, 21 nt, synthetic construct
  source 1..21: mol_type = other RNA
atgctgtaactgacttcaaga

SEQ ID NO: 73668 - RNA, 21 nt, synthetic construct
  source 1..21: mol_type = other RNA
atgctgtagtgattcactttt

SEQ ID NO: 73669 - RNA, 21 nt, synthetic construct
  source 1..21: mol_type = other RNA
atgctgtctataggcaatgag

SEQ ID NO: 73670 - RNA, 21 nt, synthetic construct
  source 1..21: mol_type = other RNA
atgctgtgaatttggatttga

SEQ ID NO: 73671 - RNA, 21 nt, synthetic construct
  source 1..21: mol_type = other RNA
atgctgttctctgtgtggttt

SEQ ID NO: 73672 - RNA, 21 nt, synthetic construct
  source 1..21: mol_type = other RNA
atgctgtttacattagagaag

SEQ ID NO: 73673 - RNA, 21 nt, synthetic construct
  source 1..21: mol_type = other RNA
atgctgttttgcttactgtag

SEQ ID NO: 73674 - RNA, 21 nt, synthetic construct
  source 1..21: mol_type = other RNA
atgctgtttttgaaaagaaca

SEQ ID NO: 73675 - RNA, 21 nt, synthetic construct
  source 1..21: mol_type = other RNA
atgcttaaagcgctactcagc

SEQ ID NO: 73676 - RNA, 21 nt, synthetic construct
  source 1..21: mol_type = other RNA
atgcttaacaagaatcctgct

SEQ ID NO: 73677 - RNA, 21 nt, synthetic construct
  source 1..21: mol_type = other RNA
atgcttagccttccagagaca

SEQ ID NO: 73678 - RNA, 21 nt, synthetic construct
  source 1..21: mol_type = other RNA
atgcttaggatcccagtcctt

SEQ ID NO: 73679 - RNA, 21 nt, synthetic construct
  source 1..21: mol_type = other RNA
atgcttaggtaagaaaaattc

SEQ ID NO: 73680 - RNA, 21 nt, synthetic construct
  source 1..21: mol_type = other RNA
atgcttatgtcttgtggctga

SEQ ID NO: 73681 - RNA, 21 nt, synthetic construct
  source 1..21: mol_type = other RNA
atgcttcatattttgtgggaa

SEQ ID NO: 73682 - RNA, 21 nt, synthetic construct
  source 1..21: mol_type = other RNA
atgcttccaaaagcaggccct

SEQ ID NO: 73683 - RNA, 21 nt, synthetic construct
  source 1..21: mol_type = other RNA
atgcttctagccaaagcaagc

SEQ ID NO: 73684 - RNA, 21 nt, synthetic construct
  source 1..21: mol_type = other RNA
atgcttgaagagcgcttctat

SEQ ID NO: 73685 - RNA, 21 nt, synthetic construct
  source 1..21: mol_type = other RNA
atgcttgctccagagaagttt

SEQ ID NO: 73686 - RNA, 21 nt, synthetic construct
  source 1..21: mol_type = other RNA
atgctttctctagttgcacgg

SEQ ID NO: 73687 - RNA, 21 nt, synthetic construct
  source 1..21: mol_type = other RNA
atgctttgagctacaaactcc

SEQ ID NO: 73688 - RNA, 21 nt, synthetic construct
  source 1..21: mol_type = other RNA
atgctttgtctctggaaggct

SEQ ID NO: 73689 - RNA, 21 nt, synthetic construct
  source 1..21: mol_type = other RNA
atgctttttctgcatcttttg

SEQ ID NO: 73690 - RNA, 21 nt, synthetic construct
  source 1..21: mol_type = other RNA
atggaaaattcaaacatgaca

SEQ ID NO: 73691 - RNA, 21 nt, synthetic construct
  source 1..21: mol_type = other RNA
atggaaaattcttggtctttt

SEQ ID NO: 73692 - RNA, 21 nt, synthetic construct
  source 1..21: mol_type = other RNA
atggaaacaacctaaatgtcc

SEQ ID NO: 73693 - RNA, 21 nt, synthetic construct
  source 1..21: mol_type = other RNA
atggaaacatggtaatttgtc

SEQ ID NO: 73694 - RNA, 21 nt, synthetic construct
  source 1..21: mol_type = other RNA
atggaaactacaattactgta

SEQ ID NO: 73695 - RNA, 21 nt, synthetic construct
  source 1..21: mol_type = other RNA
atggaaacttgccatcttgca

SEQ ID NO: 73696 - RNA, 21 nt, synthetic construct
  source 1..21: mol_type = other RNA
atggaaagaaatagaactgtc

SEQ ID NO: 73697 - RNA, 21 nt, synthetic construct
  source 1..21: mol_type = other RNA
atggaaagtggactatgtagg

SEQ ID NO: 73698 - RNA, 21 nt, synthetic construct
  source 1..21: mol_type = other RNA
atggaaatgtaaattcctaac

SEQ ID NO: 73699 - RNA, 21 nt, synthetic construct
  source 1..21: mol_type = other RNA
atggaaccactgtaggccccg

SEQ ID NO: 73700 - RNA, 21 nt, synthetic construct
  source 1..21: mol_type = other RNA
atggaacggcttaacaccttt

SEQ ID NO: 73701 - RNA, 21 nt, synthetic construct
  source 1..21: mol_type = other RNA
atggaactctattttcctaaa

SEQ ID NO: 73702 - RNA, 21 nt, synthetic construct
  source 1..21: mol_type = other RNA
atggaagactttatggtaatt

SEQ ID NO: 73703 - RNA, 21 nt, synthetic construct
  source 1..21: mol_type = other RNA
atggaagatgggacttcacta

SEQ ID NO: 73704 - RNA, 21 nt, synthetic construct
  source 1..21: mol_type = other RNA
atggaagtgctgggctaggga

SEQ ID NO: 73705 - RNA, 21 nt, synthetic construct
  source 1..21: mol_type = other RNA
atggaagttatttaatctctc

SEQ ID NO: 73706 - RNA, 21 nt, synthetic construct
  source 1..21: mol_type = other RNA
atggaataatggaactaagaa

SEQ ID NO: 73707 - RNA, 21 nt, synthetic construct
  source 1..21: mol_type = other RNA
atggaatagaagggagaaccc

SEQ ID NO: 73708 - RNA, 21 nt, synthetic construct
  source 1..21: mol_type = other RNA
atggaatattactcagtctcg

SEQ ID NO: 73709 - RNA, 21 nt, synthetic construct
  source 1..21: mol_type = other RNA
atggaattctgacacccgaag

SEQ ID NO: 73710 - RNA, 21 nt, synthetic construct
  source 1..21: mol_type = other RNA
atggaattctgatgcacaagc

SEQ ID NO: 73711 - RNA, 21 nt, synthetic construct
  source 1..21: mol_type = other RNA
atggaattgccatatgtaggg

SEQ ID NO: 73712 - RNA, 21 nt, synthetic construct
  source 1..21: mol_type = other RNA
atggacaaattaccatgtttc

SEQ ID NO: 73713 - RNA, 21 nt, synthetic construct
  source 1..21: mol_type = other RNA
atggacactgcagatgaatga

SEQ ID NO: 73714 - RNA, 21 nt, synthetic construct
  source 1..21: mol_type = other RNA
atggacagcacattaaataag

SEQ ID NO: 73715 - RNA, 21 nt, synthetic construct
  source 1..21: mol_type = other RNA
atggacagcggggatggttgc

SEQ ID NO: 73716 - RNA, 21 nt, synthetic construct
  source 1..21: mol_type = other RNA
atggacatgaggaaagcaggt

SEQ ID NO: 73717 - RNA, 21 nt, synthetic construct
  source 1..21: mol_type = other RNA
atggacattctgcttccttgc

SEQ ID NO: 73718 - RNA, 21 nt, synthetic construct
  source 1..21: mol_type = other RNA
atggacgtttgagttgtttcc

SEQ ID NO: 73719 - RNA, 21 nt, synthetic construct
  source 1..21: mol_type = other RNA
atggactagactgcctgaggt

SEQ ID NO: 73720 - RNA, 21 nt, synthetic construct
  source 1..21: mol_type = other RNA
atggagacactagggactggc

SEQ ID NO: 73721 - RNA, 21 nt, synthetic construct
  source 1..21: mol_type = other RNA
atggagacagtgagcatgctg

SEQ ID NO: 73722 - RNA, 21 nt, synthetic construct
  source 1..21: mol_type = other RNA
atggagacatctgagacatca

SEQ ID NO: 73723 - RNA, 21 nt, synthetic construct
  source 1..21: mol_type = other RNA
atggagacccatactcagccc

SEQ ID NO: 73724 - RNA, 21 nt, synthetic construct
  source 1..21: mol_type = other RNA
atggagactagtacactgttg

SEQ ID NO: 73725 - RNA, 21 nt, synthetic construct
  source 1..21: mol_type = other RNA
atggagataaattacccaaag

SEQ ID NO: 73726 - RNA, 21 nt, synthetic construct
  source 1..21: mol_type = other RNA
atggagcactgtgagccacta

SEQ ID NO: 73727 - RNA, 21 nt, synthetic construct
  source 1..21: mol_type = other RNA
atggaggcaatgttgattttg

SEQ ID NO: 73728 - RNA, 21 nt, synthetic construct
  source 1..21: mol_type = other RNA
atggagggccagaggagggat

SEQ ID NO: 73729 - RNA, 21 nt, synthetic construct
  source 1..21: mol_type = other RNA
atggaggggccagttgagaga

SEQ ID NO: 73730 - RNA, 21 nt, synthetic construct
  source 1..21: mol_type = other RNA
atggaggtggaactctgtcat

SEQ ID NO: 73731 - RNA, 21 nt, synthetic construct
  source 1..21: mol_type = other RNA
atggagtactatgcagcaacg

SEQ ID NO: 73732 - RNA, 21 nt, synthetic construct
  source 1..21: mol_type = other RNA
atggagtgacttaagcaacag

SEQ ID NO: 73733 - RNA, 21 nt, synthetic construct
  source 1..21: mol_type = other RNA
atggagttacgctgccaaaag

SEQ ID NO: 73734 - RNA, 21 nt, synthetic construct
  source 1..21: mol_type = other RNA
atggatatctggcctgcacca

SEQ ID NO: 73735 - RNA, 21 nt, synthetic construct
  source 1..21: mol_type = other RNA
atggatatttggccgggcgcg

SEQ ID NO: 73736 - RNA, 21 nt, synthetic construct
  source 1..21: mol_type = other RNA
atggatcaaagacctaagctt

SEQ ID NO: 73737 - RNA, 21 nt, synthetic construct
  source 1..21: mol_type = other RNA
atggatcaaggcacagtctgt

SEQ ID NO: 73738 - RNA, 21 nt, synthetic construct
  source 1..21: mol_type = other RNA
atggatgtttttagagagatg

SEQ ID NO: 73739 - RNA, 21 nt, synthetic construct
  source 1..21: mol_type = other RNA
atggatttttctgtttctgtg

SEQ ID NO: 73740 - RNA, 21 nt, synthetic construct
  source 1..21: mol_type = other RNA
atggcaaacagactgagccag

SEQ ID NO: 73741 - RNA, 21 nt, synthetic construct
  source 1..21: mol_type = other RNA
atggcaacaatcaacaggtag

SEQ ID NO: 73742 - RNA, 21 nt, synthetic construct
  source 1..21: mol_type = other RNA
atggcaaggctaacagccaaa

SEQ ID NO: 73743 - RNA, 21 nt, synthetic construct
  source 1..21: mol_type = other RNA
atggcaagtttccattctctt

SEQ ID NO: 73744 - RNA, 21 nt, synthetic construct
  source 1..21: mol_type = other RNA
atggcaattccataaatgttt

SEQ ID NO: 73745 - RNA, 21 nt, synthetic construct
  source 1..21: mol_type = other RNA
atggcacatactgcatattga

SEQ ID NO: 73746 - RNA, 21 nt, synthetic construct
  source 1..21: mol_type = other RNA
atggcaggcaccttcagaagc

SEQ ID NO: 73747 - RNA, 21 nt, synthetic construct
  source 1..21: mol_type = other RNA
atggcaggtttcaagtgaacc

SEQ ID NO: 73748 - RNA, 21 nt, synthetic construct
  source 1..21: mol_type = other RNA
atggcatcattcataaacaca

SEQ ID NO: 73749 - RNA, 21 nt, synthetic construct
  source 1..21: mol_type = other RNA
atggcatcggggcctacagtg

SEQ ID NO: 73750 - RNA, 21 nt, synthetic construct
  source 1..21: mol_type = other RNA
atggcatgaaatgggtttaaa

SEQ ID NO: 73751 - RNA, 21 nt, synthetic construct
  source 1..21: mol_type = other RNA
atggcatgaacccaccaggag

SEQ ID NO: 73752 - RNA, 21 nt, synthetic construct
  source 1..21: mol_type = other RNA
atggcatttgagggttagaag

SEQ ID NO: 73753 - RNA, 21 nt, synthetic construct
  source 1..21: mol_type = other RNA
atggccaagagttgctgactt

SEQ ID NO: 73754 - RNA, 21 nt, synthetic construct
  source 1..21: mol_type = other RNA
atggccagtatctcctttcct

SEQ ID NO: 73755 - RNA, 21 nt, synthetic construct
  source 1..21: mol_type = other RNA
atggccagtcatgtggggact

SEQ ID NO: 73756 - RNA, 21 nt, synthetic construct
  source 1..21: mol_type = other RNA
atggccccaaaattaccccat

SEQ ID NO: 73757 - RNA, 21 nt, synthetic construct
  source 1..21: mol_type = other RNA
atggccctgcgattggttgga

SEQ ID NO: 73758 - RNA, 21 nt, synthetic construct
  source 1..21: mol_type = other RNA
atggcccttaacttcacctct

SEQ ID NO: 73759 - RNA, 21 nt, synthetic construct
  source 1..21: mol_type = other RNA
atggcctaagatggaaagtgg

SEQ ID NO: 73760 - RNA, 21 nt, synthetic construct
  source 1..21: mol_type = other RNA
atggcctccctcactaagtca

SEQ ID NO: 73761 - RNA, 21 nt, synthetic construct
  source 1..21: mol_type = other RNA
atggccttctttctttcaaat

SEQ ID NO: 73762 - RNA, 21 nt, synthetic construct
  source 1..21: mol_type = other RNA
atggcgactcatgcctgtaat

SEQ ID NO: 73763 - RNA, 21 nt, synthetic construct
  source 1..21: mol_type = other RNA
atggcggctttgtggagtgga

SEQ ID NO: 73764 - RNA, 21 nt, synthetic construct
  source 1..21: mol_type = other RNA
atggctagaaacttggattgt

SEQ ID NO: 73765 - RNA, 21 nt, synthetic construct
  source 1..21: mol_type = other RNA
atggctataaccacgagtaat

SEQ ID NO: 73766 - RNA, 21 nt, synthetic construct
  source 1..21: mol_type = other RNA
atggctcaacgcctgtgatcc

SEQ ID NO: 73767 - RNA, 21 nt, synthetic construct
  source 1..21: mol_type = other RNA
atggctgaaagagaaagaagt

SEQ ID NO: 73768 - RNA, 21 nt, synthetic construct
  source 1..21: mol_type = other RNA
atggctgcgccactgcactcc

SEQ ID NO: 73769 - RNA, 21 nt, synthetic construct
  source 1..21: mol_type = other RNA
atggctggaatggtgaagaat

SEQ ID NO: 73770 - RNA, 21 nt, synthetic construct
  source 1..21: mol_type = other RNA
atggctgtactaagcctatgt

SEQ ID NO: 73771 - RNA, 21 nt, synthetic construct
  source 1..21: mol_type = other RNA
atggcttagaaatgaagatgg

SEQ ID NO: 73772 - RNA, 21 nt, synthetic construct
  source 1..21: mol_type = other RNA
atggcttaggatcaccaaaga

SEQ ID NO: 73773 - RNA, 21 nt, synthetic construct
  source 1..21: mol_type = other RNA
atggcttgagcccagggggtc

SEQ ID NO: 73774 - RNA, 21 nt, synthetic construct
  source 1..21: mol_type = other RNA
atggcttttgagtgtaaggtg

SEQ ID NO: 73775 - RNA, 21 nt, synthetic construct
  source 1..21: mol_type = other RNA
atggctttttacgatgaaatt

SEQ ID NO: 73776 - RNA, 21 nt, synthetic construct
  source 1..21: mol_type = other RNA
atgggaaagacaggtagacat

SEQ ID NO: 73777 - RNA, 21 nt, synthetic construct
  source 1..21: mol_type = other RNA
atgggaaagtattcccaagat

SEQ ID NO: 73778 - RNA, 21 nt, synthetic construct
  source 1..21: mol_type = other RNA
atgggaaattagatgatgttt

SEQ ID NO: 73779 - RNA, 21 nt, synthetic construct
  source 1..21: mol_type = other RNA
atgggaagaaaaaataaaggc

SEQ ID NO: 73780 - RNA, 21 nt, synthetic construct
  source 1..21: mol_type = other RNA
atgggaagatgctccctctat

SEQ ID NO: 73781 - RNA, 21 nt, synthetic construct
  source 1..21: mol_type = other RNA
atgggaatgcatatatctgtc

SEQ ID NO: 73782 - RNA, 21 nt, synthetic construct
  source 1..21: mol_type = other RNA
atgggacaagtgggtggatgg

SEQ ID NO: 73783 - RNA, 21 nt, synthetic construct
  source 1..21: mol_type = other RNA
atgggacttcactagtgggtc

SEQ ID NO: 73784 - RNA, 21 nt, synthetic construct
  source 1..21: mol_type = other RNA
atgggagatggacactgcaga

SEQ ID NO: 73785 - RNA, 21 nt, synthetic construct
  source 1..21: mol_type = other RNA
atgggagatgtgtaattgtac

SEQ ID NO: 73786 - RNA, 21 nt, synthetic construct
  source 1..21: mol_type = other RNA
atgggagcatgcacacaggag

SEQ ID NO: 73787 - RNA, 21 nt, synthetic construct
  source 1..21: mol_type = other RNA
atgggagccaaacttgaacct

SEQ ID NO: 73788 - RNA, 21 nt, synthetic construct
  source 1..21: mol_type = other RNA
atgggaggtaatactataagg

SEQ ID NO: 73789 - RNA, 21 nt, synthetic construct
  source 1..21: mol_type = other RNA
atgggagtccctgctttcagt

SEQ ID NO: 73790 - RNA, 21 nt, synthetic construct
  source 1..21: mol_type = other RNA
atgggatatctaacataatca

SEQ ID NO: 73791 - RNA, 21 nt, synthetic construct
  source 1..21: mol_type = other RNA
atgggatgcttaaagcgctac

SEQ ID NO: 73792 - RNA, 21 nt, synthetic construct
  source 1..21: mol_type = other RNA
atgggcacttgggatgtttct

SEQ ID NO: 73793 - RNA, 21 nt, synthetic construct
  source 1..21: mol_type = other RNA
atgggcagactccttcccctg

SEQ ID NO: 73794 - RNA, 21 nt, synthetic construct
  source 1..21: mol_type = other RNA
atgggcatgggtccaagacag

SEQ ID NO: 73795 - RNA, 21 nt, synthetic construct
  source 1..21: mol_type = other RNA
atgggcattagaagttaaatt

SEQ ID NO: 73796 - RNA, 21 nt, synthetic construct
  source 1..21: mol_type = other RNA
atgggcattccagagggtaac

SEQ ID NO: 73797 - RNA, 21 nt, synthetic construct
  source 1..21: mol_type = other RNA
atgggccaaagacagatctta

SEQ ID NO: 73798 - RNA, 21 nt, synthetic construct
  source 1..21: mol_type = other RNA
atgggccaaagacttcaacgg

SEQ ID NO: 73799 - RNA, 21 nt, synthetic construct
  source 1..21: mol_type = other RNA
atgggcgtggagcggtgtctt

SEQ ID NO: 73800 - RNA, 21 nt, synthetic construct
  source 1..21: mol_type = other RNA
atggggaaatagatgcctaga

SEQ ID NO: 73801 - RNA, 21 nt, synthetic construct
  source 1..21: mol_type = other RNA
atggggacttgctctcttgcc

SEQ ID NO: 73802 - RNA, 21 nt, synthetic construct
  source 1..21: mol_type = other RNA
atggggagctagagggtaaga

SEQ ID NO: 73803 - RNA, 21 nt, synthetic construct
  source 1..21: mol_type = other RNA
atggggagttttaggaaaata

SEQ ID NO: 73804 - RNA, 21 nt, synthetic construct
  source 1..21: mol_type = other RNA
atggggatatccaaagataaa

SEQ ID NO: 73805 - RNA, 21 nt, synthetic construct
  source 1..21: mol_type = other RNA
atggggatgcaacaaatgttg

SEQ ID NO: 73806 - RNA, 21 nt, synthetic construct
  source 1..21: mol_type = other RNA
atggggattgagggttagatt

SEQ ID NO: 73807 - RNA, 21 nt, synthetic construct
  source 1..21: mol_type = other RNA
atggggcaatctcagctcatt

SEQ ID NO: 73808 - RNA, 21 nt, synthetic construct
  source 1..21: mol_type = other RNA
atggggcgatcttggctcacc

SEQ ID NO: 73809 - RNA, 21 nt, synthetic construct
  source 1..21: mol_type = other RNA
atggggctttactgtattagg

SEQ ID NO: 73810 - RNA, 21 nt, synthetic construct
  source 1..21: mol_type = other RNA
atgggggacgacgtatgcaac

SEQ ID NO: 73811 - RNA, 21 nt, synthetic construct
  source 1..21: mol_type = other RNA
atgggggcgcgtgcctatggt

SEQ ID NO: 73812 - RNA, 21 nt, synthetic construct
  source 1..21: mol_type = other RNA
atgggggtaagattgtggtcc

SEQ ID NO: 73813 - RNA, 21 nt, synthetic construct
  source 1..21: mol_type = other RNA
atggggtaattttggggccat

SEQ ID NO: 73814 - RNA, 21 nt, synthetic construct
  source 1..21: mol_type = other RNA
atggggtctcattgtgttgcc

SEQ ID NO: 73815 - RNA, 21 nt, synthetic construct
  source 1..21: mol_type = other RNA
atggggtttgtccatgttggt

SEQ ID NO: 73816 - RNA, 21 nt, synthetic construct
  source 1..21: mol_type = other RNA
atgggtaaatttctaaaaacg

SEQ ID NO: 73817 - RNA, 21 nt, synthetic construct
  source 1..21: mol_type = other RNA
atgggtacagggtttctgttt

SEQ ID NO: 73818 - RNA, 21 nt, synthetic construct
  source 1..21: mol_type = other RNA
atgggtcaaccactaaggtca

SEQ ID NO: 73819 - RNA, 21 nt, synthetic construct
  source 1..21: mol_type = other RNA
atgggtccaagacaggaagaa

SEQ ID NO: 73820 - RNA, 21 nt, synthetic construct
  source 1..21: mol_type = other RNA
atgggtctccattttggtctt

SEQ ID NO: 73821 - RNA, 21 nt, synthetic construct
  source 1..21: mol_type = other RNA
atgggtggaaattaaacacac

SEQ ID NO: 73822 - RNA, 21 nt, synthetic construct
  source 1..21: mol_type = other RNA
atgggtgtagggtttggcagt

SEQ ID NO: 73823 - RNA, 21 nt, synthetic construct
  source 1..21: mol_type = other RNA
atgggttattcacccaagaat

SEQ ID NO: 73824 - RNA, 21 nt, synthetic construct
  source 1..21: mol_type = other RNA
atgggttgatttttaatgaga

SEQ ID NO: 73825 - RNA, 21 nt, synthetic construct
  source 1..21: mol_type = other RNA
atgggttggaggagaaggcct

SEQ ID NO: 73826 - RNA, 21 nt, synthetic construct
  source 1..21: mol_type = other RNA
atgggtttaaaagagtgcaca

SEQ ID NO: 73827 - RNA, 21 nt, synthetic construct
  source 1..21: mol_type = other RNA
atggtaaaacaaattccctct

SEQ ID NO: 73828 - RNA, 21 nt, synthetic construct
  source 1..21: mol_type = other RNA
atggtaaattggtcctggaaa

SEQ ID NO: 73829 - RNA, 21 nt, synthetic construct
  source 1..21: mol_type = other RNA
atggtaacagccaaataaaac

SEQ ID NO: 73830 - RNA, 21 nt, synthetic construct
  source 1..21: mol_type = other RNA
atggtaactcctgttctttgg

SEQ ID NO: 73831 - RNA, 21 nt, synthetic construct
  source 1..21: mol_type = other RNA
atggtaattggttcgtttgag

SEQ ID NO: 73832 - RNA, 21 nt, synthetic construct
  source 1..21: mol_type = other RNA
atggtaatttgtccatctgga

SEQ ID NO: 73833 - RNA, 21 nt, synthetic construct
  source 1..21: mol_type = other RNA
atggtactgcctccacaggct

SEQ ID NO: 73834 - RNA, 21 nt, synthetic construct
  source 1..21: mol_type = other RNA
atggtactggtaccaaagcag

SEQ ID NO: 73835 - RNA, 21 nt, synthetic construct
  source 1..21: mol_type = other RNA
atggtagaccatataatctaa

SEQ ID NO: 73836 - RNA, 21 nt, synthetic construct
  source 1..21: mol_type = other RNA
atggtagcttgggctaaggtg

SEQ ID NO: 73837 - RNA, 21 nt, synthetic construct
  source 1..21: mol_type = other RNA
atggtaggtgctttttgtatc

SEQ ID NO: 73838 - RNA, 21 nt, synthetic construct
  source 1..21: mol_type = other RNA
atggtagtcaacacttttcca

SEQ ID NO: 73839 - RNA, 21 nt, synthetic construct
  source 1..21: mol_type = other RNA
atggtatcaattgtaatgtct

SEQ ID NO: 73840 - RNA, 21 nt, synthetic construct
  source 1..21: mol_type = other RNA
atggtatgtgccatctcctta

SEQ ID NO: 73841 - RNA, 21 nt, synthetic construct
  source 1..21: mol_type = other RNA
atggtcaaatcaatacttcat

SEQ ID NO: 73842 - RNA, 21 nt, synthetic construct
  source 1..21: mol_type = other RNA
atggtcaacatgaaaagatac

SEQ ID NO: 73843 - RNA, 21 nt, synthetic construct
  source 1..21: mol_type = other RNA
atggtcaatttcatcgtaaaa

SEQ ID NO: 73844 - RNA, 21 nt, synthetic construct
  source 1..21: mol_type = other RNA
atggtcactgctgatgtaagt

SEQ ID NO: 73845 - RNA, 21 nt, synthetic construct
  source 1..21: mol_type = other RNA
atggtcagagttgtatctgtg

SEQ ID NO: 73846 - RNA, 21 nt, synthetic construct
  source 1..21: mol_type = other RNA
atggtcagtactatcttccct

SEQ ID NO: 73847 - RNA, 21 nt, synthetic construct
  source 1..21: mol_type = other RNA
atggtccacagaggcttttta

SEQ ID NO: 73848 - RNA, 21 nt, synthetic construct
  source 1..21: mol_type = other RNA
atggtccttgctgaagaataa

SEQ ID NO: 73849 - RNA, 21 nt, synthetic construct
  source 1..21: mol_type = other RNA
atggtccttttttactgactt

SEQ ID NO: 73850 - RNA, 21 nt, synthetic construct
  source 1..21: mol_type = other RNA
atggtctaccatgttgttctt

SEQ ID NO: 73851 - RNA, 21 nt, synthetic construct
  source 1..21: mol_type = other RNA
atggtctcaatctcctgatcc

SEQ ID NO: 73852 - RNA, 21 nt, synthetic construct
  source 1..21: mol_type = other RNA
atggtctttttccaggaccaa

SEQ ID NO: 73853 - RNA, 21 nt, synthetic construct
  source 1..21: mol_type = other RNA
atggtgaagaatgtgaaaaat

SEQ ID NO: 73854 - RNA, 21 nt, synthetic construct
  source 1..21: mol_type = other RNA
atggtgataactggtgctttt

SEQ ID NO: 73855 - RNA, 21 nt, synthetic construct
  source 1..21: mol_type = other RNA
atggtgatacctcttactaaa

SEQ ID NO: 73856 - RNA, 21 nt, synthetic construct
  source 1..21: mol_type = other RNA
atggtgatgctaacgtgcttg

SEQ ID NO: 73857 - RNA, 21 nt, synthetic construct
  source 1..21: mol_type = other RNA
atggtgcagccactatagaaa

SEQ ID NO: 73858 - RNA, 21 nt, synthetic construct
  source 1..21: mol_type = other RNA
atggtgcaggccagatatcca

SEQ ID NO: 73859 - RNA, 21 nt, synthetic construct
  source 1..21: mol_type = other RNA
atggtgggagaggcatgccgg

SEQ ID NO: 73860 - RNA, 21 nt, synthetic construct
  source 1..21: mol_type = other RNA
atggtgggatctctgggctca

SEQ ID NO: 73861 - RNA, 21 nt, synthetic construct
  source 1..21: mol_type = other RNA
atggtgggccttgcaagccac

SEQ ID NO: 73862 - RNA, 21 nt, synthetic construct
  source 1..21: mol_type = other RNA
atggtggtaggtgtgtgtaat

SEQ ID NO: 73863 - RNA, 21 nt, synthetic construct
  source 1..21: mol_type = other RNA
atggtgtaaaatacaacagca

SEQ ID NO: 73864 - RNA, 21 nt, synthetic construct
  source 1..21: mol_type = other RNA
atggtgtgaagttgggcttaa

SEQ ID NO: 73865 - RNA, 21 nt, synthetic construct
  source 1..21: mol_type = other RNA
atggtgtgatctctgctcacc

SEQ ID NO: 73866 - RNA, 21 nt, synthetic construct
  source 1..21: mol_type = other RNA
atggtgtgtctgcgccttaaa

SEQ ID NO: 73867 - RNA, 21 nt, synthetic construct
  source 1..21: mol_type = other RNA
atggtgttatttgttctgtca

SEQ ID NO: 73868 - RNA, 21 nt, synthetic construct
  source 1..21: mol_type = other RNA
atggttaagactgctgtttac

SEQ ID NO: 73869 - RNA, 21 nt, synthetic construct
  source 1..21: mol_type = other RNA
atggttaatagtgaccctttg

SEQ ID NO: 73870 - RNA, 21 nt, synthetic construct
  source 1..21: mol_type = other RNA
atggttagactgcacataaaa

SEQ ID NO: 73871 - RNA, 21 nt, synthetic construct
  source 1..21: mol_type = other RNA
atggttctgtgctagatgcta

SEQ ID NO: 73872 - RNA, 21 nt, synthetic construct
  source 1..21: mol_type = other RNA
atggttgaagaaagtaggaat

SEQ ID NO: 73873 - RNA, 21 nt, synthetic construct
  source 1..21: mol_type = other RNA
atggttgcacaatgttgtgga

SEQ ID NO: 73874 - RNA, 21 nt, synthetic construct
  source 1..21: mol_type = other RNA
atggttggaagtttctggaag

SEQ ID NO: 73875 - RNA, 21 nt, synthetic construct
  source 1..21: mol_type = other RNA
atggttggccgaggccagtcc

SEQ ID NO: 73876 - RNA, 21 nt, synthetic construct
  source 1..21: mol_type = other RNA
atggttgttggctaaaagacc

SEQ ID NO: 73877 - RNA, 21 nt, synthetic construct
  source 1..21: mol_type = other RNA
atggtttaacacatacaaacc

SEQ ID NO: 73878 - RNA, 21 nt, synthetic construct
  source 1..21: mol_type = other RNA
atggtttaaggtaagggtcca

SEQ ID NO: 73879 - RNA, 21 nt, synthetic construct
  source 1..21: mol_type = other RNA
atggtttacaatggttcataa

SEQ ID NO: 73880 - RNA, 21 nt, synthetic construct
  source 1..21: mol_type = other RNA
atggtttaggctgtctccaac

SEQ ID NO: 73881 - RNA, 21 nt, synthetic construct
  source 1..21: mol_type = other RNA
atggtttcataaaatgatggc

SEQ ID NO: 73882 - RNA, 21 nt, synthetic construct
  source 1..21: mol_type = other RNA
atggtttctccttctgcaggc

SEQ ID NO: 73883 - RNA, 21 nt, synthetic construct
  source 1..21: mol_type = other RNA
atggtttctgacacccgaccc

SEQ ID NO: 73884 - RNA, 21 nt, synthetic construct
  source 1..21: mol_type = other RNA
atggtttgatcccactagtgg

SEQ ID NO: 73885 - RNA, 21 nt, synthetic construct
  source 1..21: mol_type = other RNA
atggtttgattgttccagggg

SEQ ID NO: 73886 - RNA, 21 nt, synthetic construct
  source 1..21: mol_type = other RNA
atggtttggggcttttgaaca

SEQ ID NO: 73887 - RNA, 21 nt, synthetic construct
  source 1..21: mol_type = other RNA
atggttttaatgggcattaga

SEQ ID NO: 73888 - RNA, 21 nt, synthetic construct
  source 1..21: mol_type = other RNA
atggttttatggtaactcctg

SEQ ID NO: 73889 - RNA, 21 nt, synthetic construct
  source 1..21: mol_type = other RNA
atggttttcctactaacaaga

SEQ ID NO: 73890 - RNA, 21 nt, synthetic construct
  source 1..21: mol_type = other RNA
atggttttttcccccctggaa

SEQ ID NO: 73891 - RNA, 21 nt, synthetic construct
  source 1..21: mol_type = other RNA
atgtaaaaactgtttggctgg

SEQ ID NO: 73892 - RNA, 21 nt, synthetic construct
  source 1..21: mol_type = other RNA
atgtaaaaatatagaaggcca

SEQ ID NO: 73893 - RNA, 21 nt, synthetic construct
  source 1..21: mol_type = other RNA
atgtaaaacagacccttatgt

SEQ ID NO: 73894 - RNA, 21 nt, synthetic construct
  source 1..21: mol_type = other RNA
atgtaaaacatcaaagtcccc

SEQ ID NO: 73895 - RNA, 21 nt, synthetic construct
  source 1..21: mol_type = other RNA
atgtaaacagcatactgtgga

SEQ ID NO: 73896 - RNA, 21 nt, synthetic construct
  source 1..21: mol_type = other RNA
atgtaaattcctaactcaaga

SEQ ID NO: 73897 - RNA, 21 nt, synthetic construct
  source 1..21: mol_type = other RNA
atgtaaattctgccacattca

SEQ ID NO: 73898 - RNA, 21 nt, synthetic construct
  source 1..21: mol_type = other RNA
atgtaacacagttctagttct

SEQ ID NO: 73899 - RNA, 21 nt, synthetic construct
  source 1..21: mol_type = other RNA
atgtaacttgcttaggctgaa

SEQ ID NO: 73900 - RNA, 21 nt, synthetic construct
  source 1..21: mol_type = other RNA
atgtaagacaatgtctttggc

SEQ ID NO: 73901 - RNA, 21 nt, synthetic construct
  source 1..21: mol_type = other RNA
atgtaaggtgcacgctgtgaa

SEQ ID NO: 73902 - RNA, 21 nt, synthetic construct
  source 1..21: mol_type = other RNA
atgtaagtgggaggaggtcat

SEQ ID NO: 73903 - RNA, 21 nt, synthetic construct
  source 1..21: mol_type = other RNA
atgtaatctcatggaagttat

SEQ ID NO: 73904 - RNA, 21 nt, synthetic construct
  source 1..21: mol_type = other RNA
atgtaatgacctggaaattat

SEQ ID NO: 73905 - RNA, 21 nt, synthetic construct
  source 1..21: mol_type = other RNA
atgtaatggatcaaggcacag

SEQ ID NO: 73906 - RNA, 21 nt, synthetic construct
  source 1..21: mol_type = other RNA
atgtaattacaggggactttg

SEQ ID NO: 73907 - RNA, 21 nt, synthetic construct
  source 1..21: mol_type = other RNA
atgtacaacattcatccctct

SEQ ID NO: 73908 - RNA, 21 nt, synthetic construct
  source 1..21: mol_type = other RNA
atgtacaatgaattagcaatg

SEQ ID NO: 73909 - RNA, 21 nt, synthetic construct
  source 1..21: mol_type = other RNA
atgtacacgtcttgtcaataa

SEQ ID NO: 73910 - RNA, 21 nt, synthetic construct
  source 1..21: mol_type = other RNA
atgtacatgacctatctatta

SEQ ID NO: 73911 - RNA, 21 nt, synthetic construct
  source 1..21: mol_type = other RNA
atgtacccaatggattataaa

SEQ ID NO: 73912 - RNA, 21 nt, synthetic construct
  source 1..21: mol_type = other RNA
atgtacgccaattttcatagc

SEQ ID NO: 73913 - RNA, 21 nt, synthetic construct
  source 1..21: mol_type = other RNA
atgtactacctatagaattct

SEQ ID NO: 73914 - RNA, 21 nt, synthetic construct
  source 1..21: mol_type = other RNA
atgtactggaagtgtaacata

SEQ ID NO: 73915 - RNA, 21 nt, synthetic construct
  source 1..21: mol_type = other RNA
atgtagaaggatatgttttct

SEQ ID NO: 73916 - RNA, 21 nt, synthetic construct
  source 1..21: mol_type = other RNA
atgtagagaaacaggattaca

SEQ ID NO: 73917 - RNA, 21 nt, synthetic construct
  source 1..21: mol_type = other RNA
atgtagaggcagttgagtttt

SEQ ID NO: 73918 - RNA, 21 nt, synthetic construct
  source 1..21: mol_type = other RNA
atgtagatatgggagtccctg

SEQ ID NO: 73919 - RNA, 21 nt, synthetic construct
  source 1..21: mol_type = other RNA
atgtagatcaagtatttccta

SEQ ID NO: 73920 - RNA, 21 nt, synthetic construct
  source 1..21: mol_type = other RNA
atgtagatcctgaggaagcta

SEQ ID NO: 73921 - RNA, 21 nt, synthetic construct
  source 1..21: mol_type = other RNA
atgtagctgggatggctgaaa

SEQ ID NO: 73922 - RNA, 21 nt, synthetic construct
  source 1..21: mol_type = other RNA
atgtaggaaactttgcattcc

SEQ ID NO: 73923 - RNA, 21 nt, synthetic construct
  source 1..21: mol_type = other RNA
atgtaggcacattcaagcaga

SEQ ID NO: 73924 - RNA, 21 nt, synthetic construct
  source 1..21: mol_type = other RNA
atgtagggaatagacaaagac

SEQ ID NO: 73925 - RNA, 21 nt, synthetic construct
  source 1..21: mol_type = other RNA
atgtagggcaccgtgacagaa

SEQ ID NO: 73926 - RNA, 21 nt, synthetic construct
  source 1..21: mol_type = other RNA
atgtaggtgtctgatgtgtgt

SEQ ID NO: 73927 - RNA, 21 nt, synthetic construct
  source 1..21: mol_type = other RNA
atgtagttttccctgtgtatg

SEQ ID NO: 73928 - RNA, 21 nt, synthetic construct
  source 1..21: mol_type = other RNA
atgtatgattttctaggaaac

SEQ ID NO: 73929 - RNA, 21 nt, synthetic construct
  source 1..21: mol_type = other RNA
atgtatgtggctcacattgta

SEQ ID NO: 73930 - RNA, 21 nt, synthetic construct
  source 1..21: mol_type = other RNA
atgtatgtttctcattcttct

SEQ ID NO: 73931 - RNA, 21 nt, synthetic construct
  source 1..21: mol_type = other RNA
atgtattttcctaaccactgt

SEQ ID NO: 73932 - RNA, 21 nt, synthetic construct
  source 1..21: mol_type = other RNA
atgtcaacaaaatactagcaa

SEQ ID NO: 73933 - RNA, 21 nt, synthetic construct
  source 1..21: mol_type = other RNA
atgtcaacattaagggaaaca

SEQ ID NO: 73934 - RNA, 21 nt, synthetic construct
  source 1..21: mol_type = other RNA
atgtcaactgaggcagagtag

SEQ ID NO: 73935 - RNA, 21 nt, synthetic construct
  source 1..21: mol_type = other RNA
atgtcaagaatgaagtcagag

SEQ ID NO: 73936 - RNA, 21 nt, synthetic construct
  source 1..21: mol_type = other RNA
atgtcaagctgtttgagctga

SEQ ID NO: 73937 - RNA, 21 nt, synthetic construct
  source 1..21: mol_type = other RNA
atgtcaattttcccccaatta

SEQ ID NO: 73938 - RNA, 21 nt, synthetic construct
  source 1..21: mol_type = other RNA
atgtcacaagccagggtctgt

SEQ ID NO: 73939 - RNA, 21 nt, synthetic construct
  source 1..21: mol_type = other RNA
atgtcacattttcttatctag

SEQ ID NO: 73940 - RNA, 21 nt, synthetic construct
  source 1..21: mol_type = other RNA
atgtcactgtaagaataatgt

SEQ ID NO: 73941 - RNA, 21 nt, synthetic construct
  source 1..21: mol_type = other RNA
atgtcagactcattgcctata

SEQ ID NO: 73942 - RNA, 21 nt, synthetic construct
  source 1..21: mol_type = other RNA
atgtcagagacacatactgaa

SEQ ID NO: 73943 - RNA, 21 nt, synthetic construct
  source 1..21: mol_type = other RNA
atgtcagagatctgaaattga

SEQ ID NO: 73944 - RNA, 21 nt, synthetic construct
  source 1..21: mol_type = other RNA
atgtcagatggtaaattggtc

SEQ ID NO: 73945 - RNA, 21 nt, synthetic construct
  source 1..21: mol_type = other RNA
atgtcagccacaagacataag

SEQ ID NO: 73946 - RNA, 21 nt, synthetic construct
  source 1..21: mol_type = other RNA
atgtcagtcaacacactagcc

SEQ ID NO: 73947 - RNA, 21 nt, synthetic construct
  source 1..21: mol_type = other RNA
atgtcatcttctctctctgct

SEQ ID NO: 73948 - RNA, 21 nt, synthetic construct
  source 1..21: mol_type = other RNA
atgtcatgggccgggcgtagt

SEQ ID NO: 73949 - RNA, 21 nt, synthetic construct
  source 1..21: mol_type = other RNA
atgtcatgtatatgctgtttt

SEQ ID NO: 73950 - RNA, 21 nt, synthetic construct
  source 1..21: mol_type = other RNA
atgtcatgttcccggattgga

SEQ ID NO: 73951 - RNA, 21 nt, synthetic construct
  source 1..21: mol_type = other RNA
atgtccagaggaggaagagat

SEQ ID NO: 73952 - RNA, 21 nt, synthetic construct
  source 1..21: mol_type = other RNA
atgtccagcccccagttttgt

SEQ ID NO: 73953 - RNA, 21 nt, synthetic construct
  source 1..21: mol_type = other RNA
atgtccatagttaatgtgtga

SEQ ID NO: 73954 - RNA, 21 nt, synthetic construct
  source 1..21: mol_type = other RNA
atgtccatcaggaaaaccagt

SEQ ID NO: 73955 - RNA, 21 nt, synthetic construct
  source 1..21: mol_type = other RNA
atgtccatcgagagatgaatg

SEQ ID NO: 73956 - RNA, 21 nt, synthetic construct
  source 1..21: mol_type = other RNA
atgtcccctggagttaattcc

SEQ ID NO: 73957 - RNA, 21 nt, synthetic construct
  source 1..21: mol_type = other RNA
atgtcccctggggcctcagca

SEQ ID NO: 73958 - RNA, 21 nt, synthetic construct
  source 1..21: mol_type = other RNA
atgtcccctgtccaagtattt

SEQ ID NO: 73959 - RNA, 21 nt, synthetic construct
  source 1..21: mol_type = other RNA
atgtccgttgaagtctttggc

SEQ ID NO: 73960 - RNA, 21 nt, synthetic construct
  source 1..21: mol_type = other RNA
atgtcctcacctcacattcac

SEQ ID NO: 73961 - RNA, 21 nt, synthetic construct
  source 1..21: mol_type = other RNA
atgtccttaatgccaccgaat

SEQ ID NO: 73962 - RNA, 21 nt, synthetic construct
  source 1..21: mol_type = other RNA
atgtccttttcctgttccggg

SEQ ID NO: 73963 - RNA, 21 nt, synthetic construct
  source 1..21: mol_type = other RNA
atgtccttttgagtttggtgt

SEQ ID NO: 73964 - RNA, 21 nt, synthetic construct
  source 1..21: mol_type = other RNA
atgtcgcatgaaaacagctag

SEQ ID NO: 73965 - RNA, 21 nt, synthetic construct
  source 1..21: mol_type = other RNA
atgtctacctgtctttcccat

SEQ ID NO: 73966 - RNA, 21 nt, synthetic construct
  source 1..21: mol_type = other RNA
atgtctacctgtgtaacaaac

SEQ ID NO: 73967 - RNA, 21 nt, synthetic construct
  source 1..21: mol_type = other RNA
atgtctcagatgtctccattt

SEQ ID NO: 73968 - RNA, 21 nt, synthetic construct
  source 1..21: mol_type = other RNA
atgtctcattgtggatgagat

SEQ ID NO: 73969 - RNA, 21 nt, synthetic construct
  source 1..21: mol_type = other RNA
atgtctccattttgccagcta

SEQ ID NO: 73970 - RNA, 21 nt, synthetic construct
  source 1..21: mol_type = other RNA
atgtctcctctttcatatctg

SEQ ID NO: 73971 - RNA, 21 nt, synthetic construct
  source 1..21: mol_type = other RNA
atgtctgcaggagccttgctg

SEQ ID NO: 73972 - RNA, 21 nt, synthetic construct
  source 1..21: mol_type = other RNA
atgtctggtttgctttggagt

SEQ ID NO: 73973 - RNA, 21 nt, synthetic construct
  source 1..21: mol_type = other RNA
atgtctgtagttacaactact

SEQ ID NO: 73974 - RNA, 21 nt, synthetic construct
  source 1..21: mol_type = other RNA
atgtctgtctgttcacatttc

SEQ ID NO: 73975 - RNA, 21 nt, synthetic construct
  source 1..21: mol_type = other RNA
atgtctgtgtagttcatcagc

SEQ ID NO: 73976 - RNA, 21 nt, synthetic construct
  source 1..21: mol_type = other RNA
atgtcttaagaaggaaaagaa

SEQ ID NO: 73977 - RNA, 21 nt, synthetic construct
  source 1..21: mol_type = other RNA
atgtcttcagaggccctggtg

SEQ ID NO: 73978 - RNA, 21 nt, synthetic construct
  source 1..21: mol_type = other RNA
atgtcttcttggattttcttc

SEQ ID NO: 73979 - RNA, 21 nt, synthetic construct
  source 1..21: mol_type = other RNA
atgtcttggctattgtcagta

SEQ ID NO: 73980 - RNA, 21 nt, synthetic construct
  source 1..21: mol_type = other RNA
atgtcttggtgtgctcttttc

SEQ ID NO: 73981 - RNA, 21 nt, synthetic construct
  source 1..21: mol_type = other RNA
atgtcttgtggctgacatgtg

SEQ ID NO: 73982 - RNA, 21 nt, synthetic construct
  source 1..21: mol_type = other RNA
atgtctttggctcttagaaaa

SEQ ID NO: 73983 - RNA, 21 nt, synthetic construct
  source 1..21: mol_type = other RNA
atgtctttgggaaggccctga

SEQ ID NO: 73984 - RNA, 21 nt, synthetic construct
  source 1..21: mol_type = other RNA
atgtcttttaacttgctttga

SEQ ID NO: 73985 - RNA, 21 nt, synthetic construct
  source 1..21: mol_type = other RNA
atgtcttttgaagaagttctt

SEQ ID NO: 73986 - RNA, 21 nt, synthetic construct
  source 1..21: mol_type = other RNA
atgtctttttacacttggagt

SEQ ID NO: 73987 - RNA, 21 nt, synthetic construct
  source 1..21: mol_type = other RNA
atgtgaaaaatttgacatgac

SEQ ID NO: 73988 - RNA, 21 nt, synthetic construct
  source 1..21: mol_type = other RNA
atgtgaaaatactaacgatcc

SEQ ID NO: 73989 - RNA, 21 nt, synthetic construct
  source 1..21: mol_type = other RNA
atgtgaaagtagaggactgcc

SEQ ID NO: 73990 - RNA, 21 nt, synthetic construct
  source 1..21: mol_type = other RNA
atgtgaacagacagacatgca

SEQ ID NO: 73991 - RNA, 21 nt, synthetic construct
  source 1..21: mol_type = other RNA
atgtgaattagatggcttagg

SEQ ID NO: 73992 - RNA, 21 nt, synthetic construct
  source 1..21: mol_type = other RNA
atgtgacaaacacttttcaaa

SEQ ID NO: 73993 - RNA, 21 nt, synthetic construct
  source 1..21: mol_type = other RNA
atgtgacagaacaaactcaag

SEQ ID NO: 73994 - RNA, 21 nt, synthetic construct
  source 1..21: mol_type = other RNA
atgtgacagaatgcatctttt

SEQ ID NO: 73995 - RNA, 21 nt, synthetic construct
  source 1..21: mol_type = other RNA
atgtgacattagtggtggtag

SEQ ID NO: 73996 - RNA, 21 nt, synthetic construct
  source 1..21: mol_type = other RNA
atgtgacctgtccttgtgttt

SEQ ID NO: 73997 - RNA, 21 nt, synthetic construct
  source 1..21: mol_type = other RNA
atgtgactagaagaaatgtta

SEQ ID NO: 73998 - RNA, 21 nt, synthetic construct
  source 1..21: mol_type = other RNA
atgtgacttcgtcaaggggag

SEQ ID NO: 73999 - RNA, 21 nt, synthetic construct
  source 1..21: mol_type = other RNA
atgtgagcatttagccccctg

SEQ ID NO: 74000 - RNA, 21 nt, synthetic construct
  source 1..21: mol_type = other RNA
atgtgagccacatacatagta

SEQ ID NO: 74001 - RNA, 21 nt, synthetic construct
  source 1..21: mol_type = other RNA
atgtgagcccccacgcccggc

SEQ ID NO: 74002 - RNA, 21 nt, synthetic construct
  source 1..21: mol_type = other RNA
atgtgaggatctgttggtgct

SEQ ID NO: 74003 - RNA, 21 nt, synthetic construct
  source 1..21: mol_type = other RNA
atgtgaggtgaggacatggag

SEQ ID NO: 74004 - RNA, 21 nt, synthetic construct
  source 1..21: mol_type = other RNA
atgtgatatgccacatttttt

SEQ ID NO: 74005 - RNA, 21 nt, synthetic construct
  source 1..21: mol_type = other RNA
atgtgatggcatcattcataa

SEQ ID NO: 74006 - RNA, 21 nt, synthetic construct
  source 1..21: mol_type = other RNA
atgtgcaaggagagaaaaaca

SEQ ID NO: 74007 - RNA, 21 nt, synthetic construct
  source 1..21: mol_type = other RNA
atgtgcacctccagtgtcctg

SEQ ID NO: 74008 - RNA, 21 nt, synthetic construct
  source 1..21: mol_type = other RNA
atgtgcactcttttaaaccca

SEQ ID NO: 74009 - RNA, 21 nt, synthetic construct
  source 1..21: mol_type = other RNA
atgtgcaggaaacttccagaa

SEQ ID NO: 74010 - RNA, 21 nt, synthetic construct
  source 1..21: mol_type = other RNA
atgtgcagtctaaccattaac

SEQ ID NO: 74011 - RNA, 21 nt, synthetic construct
  source 1..21: mol_type = other RNA
atgtgccatctccttaatcca

SEQ ID NO: 74012 - RNA, 21 nt, synthetic construct
  source 1..21: mol_type = other RNA
atgtgcctacatagtccactt

SEQ ID NO: 74013 - RNA, 21 nt, synthetic construct
  source 1..21: mol_type = other RNA
atgtgctgtccatttccttaa

SEQ ID NO: 74014 - RNA, 21 nt, synthetic construct
  source 1..21: mol_type = other RNA
atgtgcttaatcttcacactt

SEQ ID NO: 74015 - RNA, 21 nt, synthetic construct
  source 1..21: mol_type = other RNA
atgtgcttcctaaacctgcta

SEQ ID NO: 74016 - RNA, 21 nt, synthetic construct
  source 1..21: mol_type = other RNA
atgtgctttctcaacactgtg

SEQ ID NO: 74017 - RNA, 21 nt, synthetic construct
  source 1..21: mol_type = other RNA
atgtggaaaaatataggaaca

SEQ ID NO: 74018 - RNA, 21 nt, synthetic construct
  source 1..21: mol_type = other RNA
atgtggaacataatctttggt

SEQ ID NO: 74019 - RNA, 21 nt, synthetic construct
  source 1..21: mol_type = other RNA
atgtggaagcagaactaagac

SEQ ID NO: 74020 - RNA, 21 nt, synthetic construct
  source 1..21: mol_type = other RNA
atgtggagataaagagcaggt

SEQ ID NO: 74021 - RNA, 21 nt, synthetic construct
  source 1..21: mol_type = other RNA
atgtggagttggtgcaaggat

SEQ ID NO: 74022 - RNA, 21 nt, synthetic construct
  source 1..21: mol_type = other RNA
atgtggatagtgctttttact

SEQ ID NO: 74023 - RNA, 21 nt, synthetic construct
  source 1..21: mol_type = other RNA
atgtggatgcatgaggcatat

SEQ ID NO: 74024 - RNA, 21 nt, synthetic construct
  source 1..21: mol_type = other RNA
atgtggcaaatttatgtgaaa

SEQ ID NO: 74025 - RNA, 21 nt, synthetic construct
  source 1..21: mol_type = other RNA
atgtggcagaatttacatttt

SEQ ID NO: 74026 - RNA, 21 nt, synthetic construct
  source 1..21: mol_type = other RNA
atgtggcatttcttacacatt

SEQ ID NO: 74027 - RNA, 21 nt, synthetic construct
  source 1..21: mol_type = other RNA
atgtggccaggaggaggaggg

SEQ ID NO: 74028 - RNA, 21 nt, synthetic construct
  source 1..21: mol_type = other RNA
atgtggcttgcaaggcccacc

SEQ ID NO: 74029 - RNA, 21 nt, synthetic construct
  source 1..21: mol_type = other RNA
atgtggcttgtggctacaccc

SEQ ID NO: 74030 - RNA, 21 nt, synthetic construct
  source 1..21: mol_type = other RNA
atgtggggaatgctcataatt

SEQ ID NO: 74031 - RNA, 21 nt, synthetic construct
  source 1..21: mol_type = other RNA
atgtggggactttgtggcctc

SEQ ID NO: 74032 - RNA, 21 nt, synthetic construct
  source 1..21: mol_type = other RNA
atgtggtcacactttttgtga

SEQ ID NO: 74033 - RNA, 21 nt, synthetic construct
  source 1..21: mol_type = other RNA
atgtggtggtatgcactgtac

SEQ ID NO: 74034 - RNA, 21 nt, synthetic construct
  source 1..21: mol_type = other RNA
atgtggtgtggcatgtctgta

SEQ ID NO: 74035 - RNA, 21 nt, synthetic construct
  source 1..21: mol_type = other RNA
atgtggttattgagtctgtag

SEQ ID NO: 74036 - RNA, 21 nt, synthetic construct
  source 1..21: mol_type = other RNA
atgtggtttttggttcacttg

SEQ ID NO: 74037 - RNA, 21 nt, synthetic construct
  source 1..21: mol_type = other RNA
atgtgtaaaacatctggaagg

SEQ ID NO: 74038 - RNA, 21 nt, synthetic construct
  source 1..21: mol_type = other RNA
atgtgtaagaaatgccacatt

SEQ ID NO: 74039 - RNA, 21 nt, synthetic construct
  source 1..21: mol_type = other RNA
atgtgtaattgtaccttggag

SEQ ID NO: 74040 - RNA, 21 nt, synthetic construct
  source 1..21: mol_type = other RNA
atgtgtacaatggggctttac

SEQ ID NO: 74041 - RNA, 21 nt, synthetic construct
  source 1..21: mol_type = other RNA
atgtgtaccaaaagtcctgtt

SEQ ID NO: 74042 - RNA, 21 nt, synthetic construct
  source 1..21: mol_type = other RNA
atgtgtacccgtgtgttttgt

SEQ ID NO: 74043 - RNA, 21 nt, synthetic construct
  source 1..21: mol_type = other RNA
atgtgtaggaaggaacacaca

SEQ ID NO: 74044 - RNA, 21 nt, synthetic construct
  source 1..21: mol_type = other RNA
atgtgtagtcagtgaagatgc

SEQ ID NO: 74045 - RNA, 21 nt, synthetic construct
  source 1..21: mol_type = other RNA
atgtgtagttctggtgtcgtt

SEQ ID NO: 74046 - RNA, 21 nt, synthetic construct
  source 1..21: mol_type = other RNA
atgtgtatgatcaaagtgaaa

SEQ ID NO: 74047 - RNA, 21 nt, synthetic construct
  source 1..21: mol_type = other RNA
atgtgtatgttacacttccag

SEQ ID NO: 74048 - RNA, 21 nt, synthetic construct
  source 1..21: mol_type = other RNA
atgtgtatttagggagcatat

SEQ ID NO: 74049 - RNA, 21 nt, synthetic construct
  source 1..21: mol_type = other RNA
atgtgtctagtgaatgagacc

SEQ ID NO: 74050 - RNA, 21 nt, synthetic construct
  source 1..21: mol_type = other RNA
atgtgtctctgacatgagagc

SEQ ID NO: 74051 - RNA, 21 nt, synthetic construct
  source 1..21: mol_type = other RNA
atgtgtgaagaaggaatgtgc

SEQ ID NO: 74052 - RNA, 21 nt, synthetic construct
  source 1..21: mol_type = other RNA
atgtgtgcacaacacatgcac

SEQ ID NO: 74053 - RNA, 21 nt, synthetic construct
  source 1..21: mol_type = other RNA
atgtgtgcttacacacacgtt

SEQ ID NO: 74054 - RNA, 21 nt, synthetic construct
  source 1..21: mol_type = other RNA
atgtgtgtataacccgttttt

SEQ ID NO: 74055 - RNA, 21 nt, synthetic construct
  source 1..21: mol_type = other RNA
atgtgtgtctctgctctcaag

SEQ ID NO: 74056 - RNA, 21 nt, synthetic construct
  source 1..21: mol_type = other RNA
atgtgtgttccagacaaaaat

SEQ ID NO: 74057 - RNA, 21 nt, synthetic construct
  source 1..21: mol_type = other RNA
atgtgttaaaccattcttgca

SEQ ID NO: 74058 - RNA, 21 nt, synthetic construct
  source 1..21: mol_type = other RNA
atgtgttacaactctaataac

SEQ ID NO: 74059 - RNA, 21 nt, synthetic construct
  source 1..21: mol_type = other RNA
atgtgttgaccttagtggttg

SEQ ID NO: 74060 - RNA, 21 nt, synthetic construct
  source 1..21: mol_type = other RNA
atgtgttggcactgaagccag

SEQ ID NO: 74061 - RNA, 21 nt, synthetic construct
  source 1..21: mol_type = other RNA
atgtgttgtctgattcagttt

SEQ ID NO: 74062 - RNA, 21 nt, synthetic construct
  source 1..21: mol_type = other RNA
atgtgttgtgcacacatccac

SEQ ID NO: 74063 - RNA, 21 nt, synthetic construct
  source 1..21: mol_type = other RNA
atgtgttttatttaggccctc

SEQ ID NO: 74064 - RNA, 21 nt, synthetic construct
  source 1..21: mol_type = other RNA
atgttaacaattggtgaatct

SEQ ID NO: 74065 - RNA, 21 nt, synthetic construct
  source 1..21: mol_type = other RNA
atgttaagcccaacttcacac

SEQ ID NO: 74066 - RNA, 21 nt, synthetic construct
  source 1..21: mol_type = other RNA
atgttaagtgtttgaaaagtg

SEQ ID NO: 74067 - RNA, 21 nt, synthetic construct
  source 1..21: mol_type = other RNA
atgttaataaccctgttttgt

SEQ ID NO: 74068 - RNA, 21 nt, synthetic construct
  source 1..21: mol_type = other RNA
atgttacacttccagtacatc

SEQ ID NO: 74069 - RNA, 21 nt, synthetic construct
  source 1..21: mol_type = other RNA
atgttactcattatggttgtt

SEQ ID NO: 74070 - RNA, 21 nt, synthetic construct
  source 1..21: mol_type = other RNA
atgttacttctcagctatagc

SEQ ID NO: 74071 - RNA, 21 nt, synthetic construct
  source 1..21: mol_type = other RNA
atgttagaattcaggacagtt

SEQ ID NO: 74072 - RNA, 21 nt, synthetic construct
  source 1..21: mol_type = other RNA
atgttagatatcccatataag

SEQ ID NO: 74073 - RNA, 21 nt, synthetic construct
  source 1..21: mol_type = other RNA
atgttagattaggaaacagat

SEQ ID NO: 74074 - RNA, 21 nt, synthetic construct
  source 1..21: mol_type = other RNA
atgttaggttgaaagttcaga

SEQ ID NO: 74075 - RNA, 21 nt, synthetic construct
  source 1..21: mol_type = other RNA
atgttataatgagatagacca

SEQ ID NO: 74076 - RNA, 21 nt, synthetic construct
  source 1..21: mol_type = other RNA
atgttatatttccgtatccag

SEQ ID NO: 74077 - RNA, 21 nt, synthetic construct
  source 1..21: mol_type = other RNA
atgttatgaagcttttctcct

SEQ ID NO: 74078 - RNA, 21 nt, synthetic construct
  source 1..21: mol_type = other RNA
atgttatgccccctcttctct

SEQ ID NO: 74079 - RNA, 21 nt, synthetic construct
  source 1..21: mol_type = other RNA
atgttatttggggattctgct

SEQ ID NO: 74080 - RNA, 21 nt, synthetic construct
  source 1..21: mol_type = other RNA
atgttcaaccctcggcctcta

SEQ ID NO: 74081 - RNA, 21 nt, synthetic construct
  source 1..21: mol_type = other RNA
atgttcaaggtgttcctgaag

SEQ ID NO: 74082 - RNA, 21 nt, synthetic construct
  source 1..21: mol_type = other RNA
atgttcaagtatttccacggg

SEQ ID NO: 74083 - RNA, 21 nt, synthetic construct
  source 1..21: mol_type = other RNA
atgttcactgcagaattactg

SEQ ID NO: 74084 - RNA, 21 nt, synthetic construct
  source 1..21: mol_type = other RNA
atgttcagatagaaaagacaa

SEQ ID NO: 74085 - RNA, 21 nt, synthetic construct
  source 1..21: mol_type = other RNA
atgttcagtttatgggtcaac

SEQ ID NO: 74086 - RNA, 21 nt, synthetic construct
  source 1..21: mol_type = other RNA
atgttcatgaaccttcaccaa

SEQ ID NO: 74087 - RNA, 21 nt, synthetic construct
  source 1..21: mol_type = other RNA
atgttcatgggaagatgctcc

SEQ ID NO: 74088 - RNA, 21 nt, synthetic construct
  source 1..21: mol_type = other RNA
atgttccacatgttactcatt

SEQ ID NO: 74089 - RNA, 21 nt, synthetic construct
  source 1..21: mol_type = other RNA
atgttcccggattggaaaact

SEQ ID NO: 74090 - RNA, 21 nt, synthetic construct
  source 1..21: mol_type = other RNA
atgttccctagaacttaaaat

SEQ ID NO: 74091 - RNA, 21 nt, synthetic construct
  source 1..21: mol_type = other RNA
atgttccctcttcaatatttt

SEQ ID NO: 74092 - RNA, 21 nt, synthetic construct
  source 1..21: mol_type = other RNA
atgttcctatatttttccaca

SEQ ID NO: 74093 - RNA, 21 nt, synthetic construct
  source 1..21: mol_type = other RNA
atgttctcttttcctcgtttt

SEQ ID NO: 74094 - RNA, 21 nt, synthetic construct
  source 1..21: mol_type = other RNA
atgttgacatcttgcataact

SEQ ID NO: 74095 - RNA, 21 nt, synthetic construct
  source 1..21: mol_type = other RNA
atgttgagtatcttttcatgt

SEQ ID NO: 74096 - RNA, 21 nt, synthetic construct
  source 1..21: mol_type = other RNA
atgttgagtcttgtttaccca

SEQ ID NO: 74097 - RNA, 21 nt, synthetic construct
  source 1..21: mol_type = other RNA
atgttgatgtaatggatcaag

SEQ ID NO: 74098 - RNA, 21 nt, synthetic construct
  source 1..21: mol_type = other RNA
atgttgattttgaggcagaga

SEQ ID NO: 74099 - RNA, 21 nt, synthetic construct
  source 1..21: mol_type = other RNA
atgttgcacaaaagtgaaaac

SEQ ID NO: 74100 - RNA, 21 nt, synthetic construct
  source 1..21: mol_type = other RNA
atgttgcagagactggatagc

SEQ ID NO: 74101 - RNA, 21 nt, synthetic construct
  source 1..21: mol_type = other RNA
atgttgccaatatctatcagg

SEQ ID NO: 74102 - RNA, 21 nt, synthetic construct
  source 1..21: mol_type = other RNA
atgttgcctactagccagtga

SEQ ID NO: 74103 - RNA, 21 nt, synthetic construct
  source 1..21: mol_type = other RNA
atgttgcggtgagcagagatc

SEQ ID NO: 74104 - RNA, 21 nt, synthetic construct
  source 1..21: mol_type = other RNA
atgttgctttgcgaaatagta

SEQ ID NO: 74105 - RNA, 21 nt, synthetic construct
  source 1..21: mol_type = other RNA
atgttggatagtttctcaact

SEQ ID NO: 74106 - RNA, 21 nt, synthetic construct
  source 1..21: mol_type = other RNA
atgttgggccaacttccagca

SEQ ID NO: 74107 - RNA, 21 nt, synthetic construct
  source 1..21: mol_type = other RNA
atgttggtgagaacccagtgt

SEQ ID NO: 74108 - RNA, 21 nt, synthetic construct
  source 1..21: mol_type = other RNA
atgttggttagtgttgttttt

SEQ ID NO: 74109 - RNA, 21 nt, synthetic construct
  source 1..21: mol_type = other RNA
atgttgtggatgtccttaatg

SEQ ID NO: 74110 - RNA, 21 nt, synthetic construct
  source 1..21: mol_type = other RNA
atgttgtgtagaaatgtggag

SEQ ID NO: 74111 - RNA, 21 nt, synthetic construct
  source 1..21: mol_type = other RNA
atgttgtgttttcattcgttc

SEQ ID NO: 74112 - RNA, 21 nt, synthetic construct
  source 1..21: mol_type = other RNA
atgttgttgaatgtggcagaa

SEQ ID NO: 74113 - RNA, 21 nt, synthetic construct
  source 1..21: mol_type = other RNA
atgtttaactatcctatgtgg

SEQ ID NO: 74114 - RNA, 21 nt, synthetic construct
  source 1..21: mol_type = other RNA
atgtttaattacccaggcatg

SEQ ID NO: 74115 - RNA, 21 nt, synthetic construct
  source 1..21: mol_type = other RNA
atgtttagcaagattactgga

SEQ ID NO: 74116 - RNA, 21 nt, synthetic construct
  source 1..21: mol_type = other RNA
atgtttagcggaatgactata

SEQ ID NO: 74117 - RNA, 21 nt, synthetic construct
  source 1..21: mol_type = other RNA
atgtttagtagaattctccag

SEQ ID NO: 74118 - RNA, 21 nt, synthetic construct
  source 1..21: mol_type = other RNA
atgtttccataaaaagcgttg

SEQ ID NO: 74119 - RNA, 21 nt, synthetic construct
  source 1..21: mol_type = other RNA
atgtttctacctttggctact

SEQ ID NO: 74120 - RNA, 21 nt, synthetic construct
  source 1..21: mol_type = other RNA
atgtttctcattcttctctaa

SEQ ID NO: 74121 - RNA, 21 nt, synthetic construct
  source 1..21: mol_type = other RNA
atgtttctcctgcatggggag

SEQ ID NO: 74122 - RNA, 21 nt, synthetic construct
  source 1..21: mol_type = other RNA
atgtttgaattttccattcac

SEQ ID NO: 74123 - RNA, 21 nt, synthetic construct
  source 1..21: mol_type = other RNA
atgtttgattagttgactcct

SEQ ID NO: 74124 - RNA, 21 nt, synthetic construct
  source 1..21: mol_type = other RNA
atgtttgctaataatgatgac

SEQ ID NO: 74125 - RNA, 21 nt, synthetic construct
  source 1..21: mol_type = other RNA
atgtttggctccttaccacta

SEQ ID NO: 74126 - RNA, 21 nt, synthetic construct
  source 1..21: mol_type = other RNA
atgtttggtagatttctgcat

SEQ ID NO: 74127 - RNA, 21 nt, synthetic construct
  source 1..21: mol_type = other RNA
atgtttggtcaattgatctgc

SEQ ID NO: 74128 - RNA, 21 nt, synthetic construct
  source 1..21: mol_type = other RNA
atgtttgtaacttgttcatgt

SEQ ID NO: 74129 - RNA, 21 nt, synthetic construct
  source 1..21: mol_type = other RNA
atgtttgtacttctaccttga

SEQ ID NO: 74130 - RNA, 21 nt, synthetic construct
  source 1..21: mol_type = other RNA
atgtttgtggttttaacctct

SEQ ID NO: 74131 - RNA, 21 nt, synthetic construct
  source 1..21: mol_type = other RNA
atgtttgtttaattagccggg

SEQ ID NO: 74132 - RNA, 21 nt, synthetic construct
  source 1..21: mol_type = other RNA
atgttttaaggcagggcttgg

SEQ ID NO: 74133 - RNA, 21 nt, synthetic construct
  source 1..21: mol_type = other RNA
atgttttacacatgtcagcca

SEQ ID NO: 74134 - RNA, 21 nt, synthetic construct
  source 1..21: mol_type = other RNA
atgttttaggagtcaactaat

SEQ ID NO: 74135 - RNA, 21 nt, synthetic construct
  source 1..21: mol_type = other RNA
atgttttatttagcccatgtc

SEQ ID NO: 74136 - RNA, 21 nt, synthetic construct
  source 1..21: mol_type = other RNA
atgttttatttcttgacctca

SEQ ID NO: 74137 - RNA, 21 nt, synthetic construct
  source 1..21: mol_type = other RNA
atgttttcagttgcatgaatt

SEQ ID NO: 74138 - RNA, 21 nt, synthetic construct
  source 1..21: mol_type = other RNA
atgttttccgtgtgacaaaaa

SEQ ID NO: 74139 - RNA, 21 nt, synthetic construct
  source 1..21: mol_type = other RNA
atgttttgaacgaatgaaaac

SEQ ID NO: 74140 - RNA, 21 nt, synthetic construct
  source 1..21: mol_type = other RNA
atgttttgcagagatgaggtc

SEQ ID NO: 74141 - RNA, 21 nt, synthetic construct
  source 1..21: mol_type = other RNA
atgttttgcttcgaagcttat

SEQ ID NO: 74142 - RNA, 21 nt, synthetic construct
  source 1..21: mol_type = other RNA
atgtttttagagagatgcctg

SEQ ID NO: 74143 - RNA, 21 nt, synthetic construct
  source 1..21: mol_type = other RNA
atgtttttccgtctagccact

SEQ ID NO: 74144 - RNA, 21 nt, synthetic construct
  source 1..21: mol_type = other RNA
attaaaaactgagaccggatg

SEQ ID NO: 74145 - RNA, 21 nt, synthetic construct
  source 1..21: mol_type = other RNA
attaaaacatggatatttggc

SEQ ID NO: 74146 - RNA, 21 nt, synthetic construct
  source 1..21: mol_type = other RNA
attaaaacccatgatctttgg

SEQ ID NO: 74147 - RNA, 21 nt, synthetic construct
  source 1..21: mol_type = other RNA
attaaaagcacaagcacagag

SEQ ID NO: 74148 - RNA, 21 nt, synthetic construct
  source 1..21: mol_type = other RNA
attaaaaggtataaaggatgc

SEQ ID NO: 74149 - RNA, 21 nt, synthetic construct
  source 1..21: mol_type = other RNA
attaaaataacacgcagaacc

SEQ ID NO: 74150 - RNA, 21 nt, synthetic construct
  source 1..21: mol_type = other RNA
attaaaatgaacctgctttct

SEQ ID NO: 74151 - RNA, 21 nt, synthetic construct
  source 1..21: mol_type = other RNA
attaaacaatcttgaaagggg

SEQ ID NO: 74152 - RNA, 21 nt, synthetic construct
  source 1..21: mol_type = other RNA
attaaacacacccttggtaaa

SEQ ID NO: 74153 - RNA, 21 nt, synthetic construct
  source 1..21: mol_type = other RNA
attaaacctgttacatggttc

SEQ ID NO: 74154 - RNA, 21 nt, synthetic construct
  source 1..21: mol_type = other RNA
attaaactatagacccaaagc

SEQ ID NO: 74155 - RNA, 21 nt, synthetic construct
  source 1..21: mol_type = other RNA
attaaactcattatcccagac

SEQ ID NO: 74156 - RNA, 21 nt, synthetic construct
  source 1..21: mol_type = other RNA
attaaagacagctactaaaca

SEQ ID NO: 74157 - RNA, 21 nt, synthetic construct
  source 1..21: mol_type = other RNA
attaaaggatgtcaactgagg

SEQ ID NO: 74158 - RNA, 21 nt, synthetic construct
  source 1..21: mol_type = other RNA
attaaaggccctgatttaaag

SEQ ID NO: 74159 - RNA, 21 nt, synthetic construct
  source 1..21: mol_type = other RNA
attaaagtagaaggccctatg

SEQ ID NO: 74160 - RNA, 21 nt, synthetic construct
  source 1..21: mol_type = other RNA
attaaatacagagcacagact

SEQ ID NO: 74161 - RNA, 21 nt, synthetic construct
  source 1..21: mol_type = other RNA
attaaataccacctgaaatct

SEQ ID NO: 74162 - RNA, 21 nt, synthetic construct
  source 1..21: mol_type = other RNA
attaaatcatgatgtttggct

SEQ ID NO: 74163 - RNA, 21 nt, synthetic construct
  source 1..21: mol_type = other RNA
attaaatgagacacctacaat

SEQ ID NO: 74164 - RNA, 21 nt, synthetic construct
  source 1..21: mol_type = other RNA
attaacactaatccttctcat

SEQ ID NO: 74165 - RNA, 21 nt, synthetic construct
  source 1..21: mol_type = other RNA
attaacagaagggtatataca

SEQ ID NO: 74166 - RNA, 21 nt, synthetic construct
  source 1..21: mol_type = other RNA
attaacagctcagaagctata

SEQ ID NO: 74167 - RNA, 21 nt, synthetic construct
  source 1..21: mol_type = other RNA
attaacataccgacggctcag

SEQ ID NO: 74168 - RNA, 21 nt, synthetic construct
  source 1..21: mol_type = other RNA
attaaccaagaacaaccttat

SEQ ID NO: 74169 - RNA, 21 nt, synthetic construct
  source 1..21: mol_type = other RNA
attaaccactgaaacttttct

SEQ ID NO: 74170 - RNA, 21 nt, synthetic construct
  source 1..21: mol_type = other RNA
attaactatggacatgaggaa

SEQ ID NO: 74171 - RNA, 21 nt, synthetic construct
  source 1..21: mol_type = other RNA
attaactcatttaaacgtcag

SEQ ID NO: 74172 - RNA, 21 nt, synthetic construct
  source 1..21: mol_type = other RNA
attaactccaggggacatgct

SEQ ID NO: 74173 - RNA, 21 nt, synthetic construct
  source 1..21: mol_type = other RNA
attaactttaaagctctatgg

SEQ ID NO: 74174 - RNA, 21 nt, synthetic construct
  source 1..21: mol_type = other RNA
attaagacaatgtggagttgg

SEQ ID NO: 74175 - RNA, 21 nt, synthetic construct
  source 1..21: mol_type = other RNA
attaagagaatggaaacttgc

SEQ ID NO: 74176 - RNA, 21 nt, synthetic construct
  source 1..21: mol_type = other RNA
attaagagtctcatctgtcaa

SEQ ID NO: 74177 - RNA, 21 nt, synthetic construct
  source 1..21: mol_type = other RNA
attaagagtgtgctgactagt

SEQ ID NO: 74178 - RNA, 21 nt, synthetic construct
  source 1..21: mol_type = other RNA
attaagataatgctgttctct

SEQ ID NO: 74179 - RNA, 21 nt, synthetic construct
  source 1..21: mol_type = other RNA
attaagcaaaatggaagtgct

SEQ ID NO: 74180 - RNA, 21 nt, synthetic construct
  source 1..21: mol_type = other RNA
attaagcaaccttttaggtgc

SEQ ID NO: 74181 - RNA, 21 nt, synthetic construct
  source 1..21: mol_type = other RNA
attaagcacatctgtcttgtg

SEQ ID NO: 74182 - RNA, 21 nt, synthetic construct
  source 1..21: mol_type = other RNA
attaagcaccactagagtatt

SEQ ID NO: 74183 - RNA, 21 nt, synthetic construct
  source 1..21: mol_type = other RNA
attaagccagtcactaaaaat

SEQ ID NO: 74184 - RNA, 21 nt, synthetic construct
  source 1..21: mol_type = other RNA
attaagcttcgacagtccctt

SEQ ID NO: 74185 - RNA, 21 nt, synthetic construct
  source 1..21: mol_type = other RNA
attaaggacatccacaacatt

SEQ ID NO: 74186 - RNA, 21 nt, synthetic construct
  source 1..21: mol_type = other RNA
attaaggagatggcacatacc

SEQ ID NO: 74187 - RNA, 21 nt, synthetic construct
  source 1..21: mol_type = other RNA
attaaggctggaggatggctt

SEQ ID NO: 74188 - RNA, 21 nt, synthetic construct
  source 1..21: mol_type = other RNA
attaagggaaacagggttaca

SEQ ID NO: 74189 - RNA, 21 nt, synthetic construct
  source 1..21: mol_type = other RNA
attaataagatcatacacctg

SEQ ID NO: 74190 - RNA, 21 nt, synthetic construct
  source 1..21: mol_type = other RNA
attaatcagtctgtaagcacc

SEQ ID NO: 74191 - RNA, 21 nt, synthetic construct
  source 1..21: mol_type = other RNA
attaatccttgtggtcttaag

SEQ ID NO: 74192 - RNA, 21 nt, synthetic construct
  source 1..21: mol_type = other RNA
attaatctcatccacaatgag

SEQ ID NO: 74193 - RNA, 21 nt, synthetic construct
  source 1..21: mol_type = other RNA
attaatctcttacacctgttt

SEQ ID NO: 74194 - RNA, 21 nt, synthetic construct
  source 1..21: mol_type = other RNA
attaatgcaacctgctttcct

SEQ ID NO: 74195 - RNA, 21 nt, synthetic construct
  source 1..21: mol_type = other RNA
attaatgcccaatcaaatcca

SEQ ID NO: 74196 - RNA, 21 nt, synthetic construct
  source 1..21: mol_type = other RNA
attaatgccccatgtgttggc

SEQ ID NO: 74197 - RNA, 21 nt, synthetic construct
  source 1..21: mol_type = other RNA
attaatgtaggtgtctgatgt

SEQ ID NO: 74198 - RNA, 21 nt, synthetic construct
  source 1..21: mol_type = other RNA
attaatgtgttgtctgattca

SEQ ID NO: 74199 - RNA, 21 nt, synthetic construct
  source 1..21: mol_type = other RNA
attaattcagtcaacaccaag

SEQ ID NO: 74200 - RNA, 21 nt, synthetic construct
  source 1..21: mol_type = other RNA
attaattctgaggcctcctgc

SEQ ID NO: 74201 - RNA, 21 nt, synthetic construct
  source 1..21: mol_type = other RNA
attaatttgaggtctaggcta

SEQ ID NO: 74202 - RNA, 21 nt, synthetic construct
  source 1..21: mol_type = other RNA
attaatttggcttggggaaca

SEQ ID NO: 74203 - RNA, 21 nt, synthetic construct
  source 1..21: mol_type = other RNA
attacaaaagaacaggacttt

SEQ ID NO: 74204 - RNA, 21 nt, synthetic construct
  source 1..21: mol_type = other RNA
attacaaaataggcagtcctc

SEQ ID NO: 74205 - RNA, 21 nt, synthetic construct
  source 1..21: mol_type = other RNA
attacaaatgaaagtcagcta

SEQ ID NO: 74206 - RNA, 21 nt, synthetic construct
  source 1..21: mol_type = other RNA
attacaacagcaaggctcctg

SEQ ID NO: 74207 - RNA, 21 nt, synthetic construct
  source 1..21: mol_type = other RNA
attacaactggtttctgcata

SEQ ID NO: 74208 - RNA, 21 nt, synthetic construct
  source 1..21: mol_type = other RNA
attacaagggtgacagagccg

SEQ ID NO: 74209 - RNA, 21 nt, synthetic construct
  source 1..21: mol_type = other RNA
attacaataatgcacatgggc

SEQ ID NO: 74210 - RNA, 21 nt, synthetic construct
  source 1..21: mol_type = other RNA
attacaatgtaaggtgcacgc

SEQ ID NO: 74211 - RNA, 21 nt, synthetic construct
  source 1..21: mol_type = other RNA
attacaattcctttctaggca

SEQ ID NO: 74212 - RNA, 21 nt, synthetic construct
  source 1..21: mol_type = other RNA
attacacacacctaccaccat

SEQ ID NO: 74213 - RNA, 21 nt, synthetic construct
  source 1..21: mol_type = other RNA
attacacagaaagcctcttca

SEQ ID NO: 74214 - RNA, 21 nt, synthetic construct
  source 1..21: mol_type = other RNA
attacacatctcccataccac

SEQ ID NO: 74215 - RNA, 21 nt, synthetic construct
  source 1..21: mol_type = other RNA
attacaggcatgagccactgc

SEQ ID NO: 74216 - RNA, 21 nt, synthetic construct
  source 1..21: mol_type = other RNA
attacaggcatgagtcgccat

SEQ ID NO: 74217 - RNA, 21 nt, synthetic construct
  source 1..21: mol_type = other RNA
attacaggcgcacgccatctc

SEQ ID NO: 74218 - RNA, 21 nt, synthetic construct
  source 1..21: mol_type = other RNA
attacaggggactttgatgtt

SEQ ID NO: 74219 - RNA, 21 nt, synthetic construct
  source 1..21: mol_type = other RNA
attacaggtcaaactcactta

SEQ ID NO: 74220 - RNA, 21 nt, synthetic construct
  source 1..21: mol_type = other RNA
attacagtaaggtttccctgg

SEQ ID NO: 74221 - RNA, 21 nt, synthetic construct
  source 1..21: mol_type = other RNA
attacagtctcgaccccctgg

SEQ ID NO: 74222 - RNA, 21 nt, synthetic construct
  source 1..21: mol_type = other RNA
attacatacttcaaagggtca

SEQ ID NO: 74223 - RNA, 21 nt, synthetic construct
  source 1..21: mol_type = other RNA
attacatagcaaggaagcaga

SEQ ID NO: 74224 - RNA, 21 nt, synthetic construct
  source 1..21: mol_type = other RNA
attacatttgcttaggctgtt

SEQ ID NO: 74225 - RNA, 21 nt, synthetic construct
  source 1..21: mol_type = other RNA
attaccaaaacctggtatgag

SEQ ID NO: 74226 - RNA, 21 nt, synthetic construct
  source 1..21: mol_type = other RNA
attaccaataaaagcctcatt

SEQ ID NO: 74227 - RNA, 21 nt, synthetic construct
  source 1..21: mol_type = other RNA
attaccagcttacagcagatc

SEQ ID NO: 74228 - RNA, 21 nt, synthetic construct
  source 1..21: mol_type = other RNA
attaccaggctggaagaattt

SEQ ID NO: 74229 - RNA, 21 nt, synthetic construct
  source 1..21: mol_type = other RNA
attaccataaagtcttccatt

SEQ ID NO: 74230 - RNA, 21 nt, synthetic construct
  source 1..21: mol_type = other RNA
attacccaaagactttgtttt

SEQ ID NO: 74231 - RNA, 21 nt, synthetic construct
  source 1..21: mol_type = other RNA
attacccaggcatgatggctc

SEQ ID NO: 74232 - RNA, 21 nt, synthetic construct
  source 1..21: mol_type = other RNA
attaccccattcactcagcat

SEQ ID NO: 74233 - RNA, 21 nt, synthetic construct
  source 1..21: mol_type = other RNA
attaccggcatccgccaccac

SEQ ID NO: 74234 - RNA, 21 nt, synthetic construct
  source 1..21: mol_type = other RNA
attacctatgaataggtgtgt

SEQ ID NO: 74235 - RNA, 21 nt, synthetic construct
  source 1..21: mol_type = other RNA
attacctcccatgcattcgtc

SEQ ID NO: 74236 - RNA, 21 nt, synthetic construct
  source 1..21: mol_type = other RNA
attaccttatagatgacgaaa

SEQ ID NO: 74237 - RNA, 21 nt, synthetic construct
  source 1..21: mol_type = other RNA
attacgagttatgcaagatgt

SEQ ID NO: 74238 - RNA, 21 nt, synthetic construct
  source 1..21: mol_type = other RNA
attactcagtctcgaaaagga

SEQ ID NO: 74239 - RNA, 21 nt, synthetic construct
  source 1..21: mol_type = other RNA
attactcggtatgtacccaat

SEQ ID NO: 74240 - RNA, 21 nt, synthetic construct
  source 1..21: mol_type = other RNA
attactcgtggttatagccat

SEQ ID NO: 74241 - RNA, 21 nt, synthetic construct
  source 1..21: mol_type = other RNA
attactcttctactcactgta

SEQ ID NO: 74242 - RNA, 21 nt, synthetic construct
  source 1..21: mol_type = other RNA
attactgacaatagccaagac

SEQ ID NO: 74243 - RNA, 21 nt, synthetic construct
  source 1..21: mol_type = other RNA
attactgactcaatcttctta

SEQ ID NO: 74244 - RNA, 21 nt, synthetic construct
  source 1..21: mol_type = other RNA
attactggatacaaggtcaat

SEQ ID NO: 74245 - RNA, 21 nt, synthetic construct
  source 1..21: mol_type = other RNA
attactgtacaaagatttacc

SEQ ID NO: 74246 - RNA, 21 nt, synthetic construct
  source 1..21: mol_type = other RNA
attacttaggcagttattaag

SEQ ID NO: 74247 - RNA, 21 nt, synthetic construct
  source 1..21: mol_type = other RNA
attacttcatagatgttatgc

SEQ ID NO: 74248 - RNA, 21 nt, synthetic construct
  source 1..21: mol_type = other RNA
attacttccagtgttttaggg

SEQ ID NO: 74249 - RNA, 21 nt, synthetic construct
  source 1..21: mol_type = other RNA
attacttctttctctttcagc

SEQ ID NO: 74250 - RNA, 21 nt, synthetic construct
  source 1..21: mol_type = other RNA
attacttgagagcagagacac

SEQ ID NO: 74251 - RNA, 21 nt, synthetic construct
  source 1..21: mol_type = other RNA
attactttacagttatgtcag

SEQ ID NO: 74252 - RNA, 21 nt, synthetic construct
  source 1..21: mol_type = other RNA
attacttttttgtagagacag

SEQ ID NO: 74253 - RNA, 21 nt, synthetic construct
  source 1..21: mol_type = other RNA
attagaaactggtgaactggg

SEQ ID NO: 74254 - RNA, 21 nt, synthetic construct
  source 1..21: mol_type = other RNA
attagaaagctggactcattc

SEQ ID NO: 74255 - RNA, 21 nt, synthetic construct
  source 1..21: mol_type = other RNA
attagaaatgtggaagcagaa

SEQ ID NO: 74256 - RNA, 21 nt, synthetic construct
  source 1..21: mol_type = other RNA
attagaacatctggcagcagg

SEQ ID NO: 74257 - RNA, 21 nt, synthetic construct
  source 1..21: mol_type = other RNA
attagaactagaactgtgtta

SEQ ID NO: 74258 - RNA, 21 nt, synthetic construct
  source 1..21: mol_type = other RNA
attagaaggattgttcatgtc

SEQ ID NO: 74259 - RNA, 21 nt, synthetic construct
  source 1..21: mol_type = other RNA
attagaatcatccggggagct

SEQ ID NO: 74260 - RNA, 21 nt, synthetic construct
  source 1..21: mol_type = other RNA
attagaattcaggacagtcat

SEQ ID NO: 74261 - RNA, 21 nt, synthetic construct
  source 1..21: mol_type = other RNA
attagagaagaatgagaaaca

SEQ ID NO: 74262 - RNA, 21 nt, synthetic construct
  source 1..21: mol_type = other RNA
attagagccccaagaaagcag

SEQ ID NO: 74263 - RNA, 21 nt, synthetic construct
  source 1..21: mol_type = other RNA
attagaggctgcaccctcctc

SEQ ID NO: 74264 - RNA, 21 nt, synthetic construct
  source 1..21: mol_type = other RNA
attagagtaagcaactgcatc

SEQ ID NO: 74265 - RNA, 21 nt, synthetic construct
  source 1..21: mol_type = other RNA
attagagtgaaaagaaacaag

SEQ ID NO: 74266 - RNA, 21 nt, synthetic construct
  source 1..21: mol_type = other RNA
attagatagtggtttgaagct

SEQ ID NO: 74267 - RNA, 21 nt, synthetic construct
  source 1..21: mol_type = other RNA
attagatgatgttttgaacga

SEQ ID NO: 74268 - RNA, 21 nt, synthetic construct
  source 1..21: mol_type = other RNA
attagatggcttaggatcacc

SEQ ID NO: 74269 - RNA, 21 nt, synthetic construct
  source 1..21: mol_type = other RNA
attagcaaagaggcaaaactc

SEQ ID NO: 74270 - RNA, 21 nt, synthetic construct
  source 1..21: mol_type = other RNA
attagcaatgcgaatcatcta

SEQ ID NO: 74271 - RNA, 21 nt, synthetic construct
  source 1..21: mol_type = other RNA
attagcacctttattaactag

SEQ ID NO: 74272 - RNA, 21 nt, synthetic construct
  source 1..21: mol_type = other RNA
attagcagttctgtaccctta

SEQ ID NO: 74273 - RNA, 21 nt, synthetic construct
  source 1..21: mol_type = other RNA
attagccaagcatggtggtag

SEQ ID NO: 74274 - RNA, 21 nt, synthetic construct
  source 1..21: mol_type = other RNA
attagccactctgaattctct

SEQ ID NO: 74275 - RNA, 21 nt, synthetic construct
  source 1..21: mol_type = other RNA
attagccaggcgtggtggcgg

SEQ ID NO: 74276 - RNA, 21 nt, synthetic construct
  source 1..21: mol_type = other RNA
attagccgggtgtagtggtgt

SEQ ID NO: 74277 - RNA, 21 nt, synthetic construct
  source 1..21: mol_type = other RNA
attagcctagacctcaaatta

SEQ ID NO: 74278 - RNA, 21 nt, synthetic construct
  source 1..21: mol_type = other RNA
attagccttttacaccctagg

SEQ ID NO: 74279 - RNA, 21 nt, synthetic construct
  source 1..21: mol_type = other RNA
attagcgaaagggattctggc

SEQ ID NO: 74280 - RNA, 21 nt, synthetic construct
  source 1..21: mol_type = other RNA
attagctaagtatgcagaaac

SEQ ID NO: 74281 - RNA, 21 nt, synthetic construct
  source 1..21: mol_type = other RNA
attagctacaaaagggaaaac

SEQ ID NO: 74282 - RNA, 21 nt, synthetic construct
  source 1..21: mol_type = other RNA
attagctgactttcatttgta

SEQ ID NO: 74283 - RNA, 21 nt, synthetic construct
  source 1..21: mol_type = other RNA
attagctggatgtggtgtggc

SEQ ID NO: 74284 - RNA, 21 nt, synthetic construct
  source 1..21: mol_type = other RNA
attagctgggcgagatggcgt

SEQ ID NO: 74285 - RNA, 21 nt, synthetic construct
  source 1..21: mol_type = other RNA
attagctgtctggattgattc

SEQ ID NO: 74286 - RNA, 21 nt, synthetic construct
  source 1..21: mol_type = other RNA
attagcttcctcaggatctac

SEQ ID NO: 74287 - RNA, 21 nt, synthetic construct
  source 1..21: mol_type = other RNA
attagcttgctagtagcagaa

SEQ ID NO: 74288 - RNA, 21 nt, synthetic construct
  source 1..21: mol_type = other RNA
attagctttctcccagctgtc

SEQ ID NO: 74289 - RNA, 21 nt, synthetic construct
  source 1..21: mol_type = other RNA
attagcttttacgaggacaga

SEQ ID NO: 74290 - RNA, 21 nt, synthetic construct
  source 1..21: mol_type = other RNA
attaggatgtgtacccgtgtg

SEQ ID NO: 74291 - RNA, 21 nt, synthetic construct
  source 1..21: mol_type = other RNA
attaggcagaaccacctgggg

SEQ ID NO: 74292 - RNA, 21 nt, synthetic construct
  source 1..21: mol_type = other RNA
attaggctctgggtcagaatc

SEQ ID NO: 74293 - RNA, 21 nt, synthetic construct
  source 1..21: mol_type = other RNA
attaggctgtttgagatcttt

SEQ ID NO: 74294 - RNA, 21 nt, synthetic construct
  source 1..21: mol_type = other RNA
attagggtaatgctggcttca

SEQ ID NO: 74295 - RNA, 21 nt, synthetic construct
  source 1..21: mol_type = other RNA
attaggtgcacacaacactca

SEQ ID NO: 74296 - RNA, 21 nt, synthetic construct
  source 1..21: mol_type = other RNA
attaggttgatggctgtacta

SEQ ID NO: 74297 - RNA, 21 nt, synthetic construct
  source 1..21: mol_type = other RNA
attagtagttaggtggtttga

SEQ ID NO: 74298 - RNA, 21 nt, synthetic construct
  source 1..21: mol_type = other RNA
attagtcatagcagtgggaag

SEQ ID NO: 74299 - RNA, 21 nt, synthetic construct
  source 1..21: mol_type = other RNA
attagtctgtagcttcacgtg

SEQ ID NO: 74300 - RNA, 21 nt, synthetic construct
  source 1..21: mol_type = other RNA
attagtgaattcacagtagaa

SEQ ID NO: 74301 - RNA, 21 nt, synthetic construct
  source 1..21: mol_type = other RNA
attagtgattttaccaaggct

SEQ ID NO: 74302 - RNA, 21 nt, synthetic construct
  source 1..21: mol_type = other RNA
attagtggaaaaactgcagca

SEQ ID NO: 74303 - RNA, 21 nt, synthetic construct
  source 1..21: mol_type = other RNA
attagtggtggtagtaaggat

SEQ ID NO: 74304 - RNA, 21 nt, synthetic construct
  source 1..21: mol_type = other RNA
attagttaaccttctggggtt

SEQ ID NO: 74305 - RNA, 21 nt, synthetic construct
  source 1..21: mol_type = other RNA
attagttacatgaggtcaccc

SEQ ID NO: 74306 - RNA, 21 nt, synthetic construct
  source 1..21: mol_type = other RNA
attagttatctcttagacctc

SEQ ID NO: 74307 - RNA, 21 nt, synthetic construct
  source 1..21: mol_type = other RNA
attagttcctccttttgtaga

SEQ ID NO: 74308 - RNA, 21 nt, synthetic construct
  source 1..21: mol_type = other RNA
attagttccttttaagggaaa

SEQ ID NO: 74309 - RNA, 21 nt, synthetic construct
  source 1..21: mol_type = other RNA
attagttgactcctaaaacat

SEQ ID NO: 74310 - RNA, 21 nt, synthetic construct
  source 1..21: mol_type = other RNA
attagttgtacttgacacaaa

SEQ ID NO: 74311 - RNA, 21 nt, synthetic construct
  source 1..21: mol_type = other RNA
attataaccttgaacttccag

SEQ ID NO: 74312 - RNA, 21 nt, synthetic construct
  source 1..21: mol_type = other RNA
attataagcttcctctggctg

SEQ ID NO: 74313 - RNA, 21 nt, synthetic construct
  source 1..21: mol_type = other RNA
attataagttgggagtctatt

SEQ ID NO: 74314 - RNA, 21 nt, synthetic construct
  source 1..21: mol_type = other RNA
attatagagggcctaaataaa

SEQ ID NO: 74315 - RNA, 21 nt, synthetic construct
  source 1..21: mol_type = other RNA
attatagctccaaaagcgaaa

SEQ ID NO: 74316 - RNA, 21 nt, synthetic construct
  source 1..21: mol_type = other RNA
attatagtggtaaggagccaa

SEQ ID NO: 74317 - RNA, 21 nt, synthetic construct
  source 1..21: mol_type = other RNA
attatatgaataaaccacgca

SEQ ID NO: 74318 - RNA, 21 nt, synthetic construct
  source 1..21: mol_type = other RNA
attatatggtctaccatgttg

SEQ ID NO: 74319 - RNA, 21 nt, synthetic construct
  source 1..21: mol_type = other RNA
attatcagggatattggctta

SEQ ID NO: 74320 - RNA, 21 nt, synthetic construct
  source 1..21: mol_type = other RNA
attatcccagacagatatatg

SEQ ID NO: 74321 - RNA, 21 nt, synthetic construct
  source 1..21: mol_type = other RNA
attatcccagatctaacaaac

SEQ ID NO: 74322 - RNA, 21 nt, synthetic construct
  source 1..21: mol_type = other RNA
attatcctatcagagcatgtc

SEQ ID NO: 74323 - RNA, 21 nt, synthetic construct
  source 1..21: mol_type = other RNA
attatctgtgggttaaaagtt

SEQ ID NO: 74324 - RNA, 21 nt, synthetic construct
  source 1..21: mol_type = other RNA
attatgaaccattgtaaacca

SEQ ID NO: 74325 - RNA, 21 nt, synthetic construct
  source 1..21: mol_type = other RNA
attatgactgagatacttaag

SEQ ID NO: 74326 - RNA, 21 nt, synthetic construct
  source 1..21: mol_type = other RNA
attatgagcagttgtatgcca

SEQ ID NO: 74327 - RNA, 21 nt, synthetic construct
  source 1..21: mol_type = other RNA
attatgagcattccccacata

SEQ ID NO: 74328 - RNA, 21 nt, synthetic construct
  source 1..21: mol_type = other RNA
attatgctaacatgaactact

SEQ ID NO: 74329 - RNA, 21 nt, synthetic construct
  source 1..21: mol_type = other RNA
attatgctgagtgaatggggt

SEQ ID NO: 74330 - RNA, 21 nt, synthetic construct
  source 1..21: mol_type = other RNA
attatggctagaaacttggat

SEQ ID NO: 74331 - RNA, 21 nt, synthetic construct
  source 1..21: mol_type = other RNA
attatggtctttttccaggac

SEQ ID NO: 74332 - RNA, 21 nt, synthetic construct
  source 1..21: mol_type = other RNA
attatggttgttggctaaaag

SEQ ID NO: 74333 - RNA, 21 nt, synthetic construct
  source 1..21: mol_type = other RNA
attatgtgcaagttctctttt

SEQ ID NO: 74334 - RNA, 21 nt, synthetic construct
  source 1..21: mol_type = other RNA
attatgttccacatgttactc

SEQ ID NO: 74335 - RNA, 21 nt, synthetic construct
  source 1..21: mol_type = other RNA
attattagcttgctagtagca

SEQ ID NO: 74336 - RNA, 21 nt, synthetic construct
  source 1..21: mol_type = other RNA
attattagttgtacttgacac

SEQ ID NO: 74337 - RNA, 21 nt, synthetic construct
  source 1..21: mol_type = other RNA
attattctaaacacacgggct

SEQ ID NO: 74338 - RNA, 21 nt, synthetic construct
  source 1..21: mol_type = other RNA
attattgacaagacgtgtaca

SEQ ID NO: 74339 - RNA, 21 nt, synthetic construct
  source 1..21: mol_type = other RNA
attattgtctgcaagcagatc

SEQ ID NO: 74340 - RNA, 21 nt, synthetic construct
  source 1..21: mol_type = other RNA
attatttctgtcatctgaatc

SEQ ID NO: 74341 - RNA, 21 nt, synthetic construct
  source 1..21: mol_type = other RNA
attatttgagagtaagttgca

SEQ ID NO: 74342 - RNA, 21 nt, synthetic construct
  source 1..21: mol_type = other RNA
attatttgcggcttgattagc

SEQ ID NO: 74343 - RNA, 21 nt, synthetic construct
  source 1..21: mol_type = other RNA
attatttggaagagagaaggc

SEQ ID NO: 74344 - RNA, 21 nt, synthetic construct
  source 1..21: mol_type = other RNA
attatttgtgcatactgtgat

SEQ ID NO: 74345 - RNA, 21 nt, synthetic construct
  source 1..21: mol_type = other RNA
attattttcctccttctgctc

SEQ ID NO: 74346 - RNA, 21 nt, synthetic construct
  source 1..21: mol_type = other RNA
attatttttacccaacatgag

SEQ ID NO: 74347 - RNA, 21 nt, synthetic construct
  source 1..21: mol_type = other RNA
attattttttcccgctacaca

SEQ ID NO: 74348 - RNA, 21 nt, synthetic construct
  source 1..21: mol_type = other RNA
attcaaaacaaaacacatggc

SEQ ID NO: 74349 - RNA, 21 nt, synthetic construct
  source 1..21: mol_type = other RNA
attcaaaatgtgatggcatca

SEQ ID NO: 74350 - RNA, 21 nt, synthetic construct
  source 1..21: mol_type = other RNA
attcaaacatgacagatccca

SEQ ID NO: 74351 - RNA, 21 nt, synthetic construct
  source 1..21: mol_type = other RNA
attcaaagatcatttcacttg

SEQ ID NO: 74352 - RNA, 21 nt, synthetic construct
  source 1..21: mol_type = other RNA
attcaaagcaagttaaaagac

SEQ ID NO: 74353 - RNA, 21 nt, synthetic construct
  source 1..21: mol_type = other RNA
attcaaataattgctgcagtt

SEQ ID NO: 74354 - RNA, 21 nt, synthetic construct
  source 1..21: mol_type = other RNA
attcaacaaaactgggggctg

SEQ ID NO: 74355 - RNA, 21 nt, synthetic construct
  source 1..21: mol_type = other RNA
attcaacaacatggatgaacc

SEQ ID NO: 74356 - RNA, 21 nt, synthetic construct
  source 1..21: mol_type = other RNA
attcaacaatagcaacaaaac

SEQ ID NO: 74357 - RNA, 21 nt, synthetic construct
  source 1..21: mol_type = other RNA
attcaacagctactatgaata

SEQ ID NO: 74358 - RNA, 21 nt, synthetic construct
  source 1..21: mol_type = other RNA
attcaacaggtataaagtttc

SEQ ID NO: 74359 - RNA, 21 nt, synthetic construct
  source 1..21: mol_type = other RNA
attcaacctataagacccagt

SEQ ID NO: 74360 - RNA, 21 nt, synthetic construct
  source 1..21: mol_type = other RNA
attcaacttggtaaaaagtgc

SEQ ID NO: 74361 - RNA, 21 nt, synthetic construct
  source 1..21: mol_type = other RNA
attcaagaaaccacagagcct

SEQ ID NO: 74362 - RNA, 21 nt, synthetic construct
  source 1..21: mol_type = other RNA
attcaagacaagcaaggaagg

SEQ ID NO: 74363 - RNA, 21 nt, synthetic construct
  source 1..21: mol_type = other RNA
attcaagcagaaatgagttcc

SEQ ID NO: 74364 - RNA, 21 nt, synthetic construct
  source 1..21: mol_type = other RNA
attcaagtttcaccctgcgaa

SEQ ID NO: 74365 - RNA, 21 nt, synthetic construct
  source 1..21: mol_type = other RNA
attcaattgtcctggcagatc

SEQ ID NO: 74366 - RNA, 21 nt, synthetic construct
  source 1..21: mol_type = other RNA
attcaattttcatgggttgat

SEQ ID NO: 74367 - RNA, 21 nt, synthetic construct
  source 1..21: mol_type = other RNA
attcacaagattaatcttgca

SEQ ID NO: 74368 - RNA, 21 nt, synthetic construct
  source 1..21: mol_type = other RNA
attcacacaccctttcttagg

SEQ ID NO: 74369 - RNA, 21 nt, synthetic construct
  source 1..21: mol_type = other RNA
attcacactagtcaccctaca

SEQ ID NO: 74370 - RNA, 21 nt, synthetic construct
  source 1..21: mol_type = other RNA
attcacactgctcctgccttt

SEQ ID NO: 74371 - RNA, 21 nt, synthetic construct
  source 1..21: mol_type = other RNA
attcacagaactgtcactgac

SEQ ID NO: 74372 - RNA, 21 nt, synthetic construct
  source 1..21: mol_type = other RNA
attcacagaatatactcagaa

SEQ ID NO: 74373 - RNA, 21 nt, synthetic construct
  source 1..21: mol_type = other RNA
attcacagcatgaatacctat

SEQ ID NO: 74374 - RNA, 21 nt, synthetic construct
  source 1..21: mol_type = other RNA
attcacagcgtgcaccttaca

SEQ ID NO: 74375 - RNA, 21 nt, synthetic construct
  source 1..21: mol_type = other RNA
attcacagtagaagactcagc

SEQ ID NO: 74376 - RNA, 21 nt, synthetic construct
  source 1..21: mol_type = other RNA
attcacatttaagaagggaac

SEQ ID NO: 74377 - RNA, 21 nt, synthetic construct
  source 1..21: mol_type = other RNA
attcaccaaacaccttacact

SEQ ID NO: 74378 - RNA, 21 nt, synthetic construct
  source 1..21: mol_type = other RNA
attcacccaagaatttcatgc

SEQ ID NO: 74379 - RNA, 21 nt, synthetic construct
  source 1..21: mol_type = other RNA
attcacgagactgttagggac

SEQ ID NO: 74380 - RNA, 21 nt, synthetic construct
  source 1..21: mol_type = other RNA
attcacgcacagggagatact

SEQ ID NO: 74381 - RNA, 21 nt, synthetic construct
  source 1..21: mol_type = other RNA
attcactaatgcctcaaatta

SEQ ID NO: 74382 - RNA, 21 nt, synthetic construct
  source 1..21: mol_type = other RNA
attcactagacacatttttga

SEQ ID NO: 74383 - RNA, 21 nt, synthetic construct
  source 1..21: mol_type = other RNA
attcactcagcataattggtt

SEQ ID NO: 74384 - RNA, 21 nt, synthetic construct
  source 1..21: mol_type = other RNA
attcactcctcattcacacta

SEQ ID NO: 74385 - RNA, 21 nt, synthetic construct
  source 1..21: mol_type = other RNA
attcactgtgactccaaagca

SEQ ID NO: 74386 - RNA, 21 nt, synthetic construct
  source 1..21: mol_type = other RNA
attcacttttgagttcagaaa

SEQ ID NO: 74387 - RNA, 21 nt, synthetic construct
  source 1..21: mol_type = other RNA
attcacttttggaatttaagg

SEQ ID NO: 74388 - RNA, 21 nt, synthetic construct
  source 1..21: mol_type = other RNA
attcagaggtatttggggcta

SEQ ID NO: 74389 - RNA, 21 nt, synthetic construct
  source 1..21: mol_type = other RNA
attcagagtgctgggtagaga

SEQ ID NO: 74390 - RNA, 21 nt, synthetic construct
  source 1..21: mol_type = other RNA
attcagagtggctaatgtggc

SEQ ID NO: 74391 - RNA, 21 nt, synthetic construct
  source 1..21: mol_type = other RNA
attcagatggccccaaaatta

SEQ ID NO: 74392 - RNA, 21 nt, synthetic construct
  source 1..21: mol_type = other RNA
attcaggacactggaggtgca

SEQ ID NO: 74393 - RNA, 21 nt, synthetic construct
  source 1..21: mol_type = other RNA
attcaggacagattaaaatca

SEQ ID NO: 74394 - RNA, 21 nt, synthetic construct
  source 1..21: mol_type = other RNA
attcaggacagtcatcctcaa

SEQ ID NO: 74395 - RNA, 21 nt, synthetic construct
  source 1..21: mol_type = other RNA
attcaggacagttattcttca

SEQ ID NO: 74396 - RNA, 21 nt, synthetic construct
  source 1..21: mol_type = other RNA
attcagggggctaaatgctca

SEQ ID NO: 74397 - RNA, 21 nt, synthetic construct
  source 1..21: mol_type = other RNA
attcaggtctatgtgacagaa

SEQ ID NO: 74398 - RNA, 21 nt, synthetic construct
  source 1..21: mol_type = other RNA
attcagtcaacaccaagcaac

SEQ ID NO: 74399 - RNA, 21 nt, synthetic construct
  source 1..21: mol_type = other RNA
attcagtcaccaaacgtttag

SEQ ID NO: 74400 - RNA, 21 nt, synthetic construct
  source 1..21: mol_type = other RNA
attcagtcttggtagtttgca

SEQ ID NO: 74401 - RNA, 21 nt, synthetic construct
  source 1..21: mol_type = other RNA
attcagtggttggaaaacttt

SEQ ID NO: 74402 - RNA, 21 nt, synthetic construct
  source 1..21: mol_type = other RNA
attcataaacacagaacacta

SEQ ID NO: 74403 - RNA, 21 nt, synthetic construct
  source 1..21: mol_type = other RNA
attcatacgttaactgtattg

SEQ ID NO: 74404 - RNA, 21 nt, synthetic construct
  source 1..21: mol_type = other RNA
attcatactgaaggcataggg

SEQ ID NO: 74405 - RNA, 21 nt, synthetic construct
  source 1..21: mol_type = other RNA
attcatagatcaccaggggct

SEQ ID NO: 74406 - RNA, 21 nt, synthetic construct
  source 1..21: mol_type = other RNA
attcataggtaatactctagt

SEQ ID NO: 74407 - RNA, 21 nt, synthetic construct
  source 1..21: mol_type = other RNA
attcatagtagctgttgaatt

SEQ ID NO: 74408 - RNA, 21 nt, synthetic construct
  source 1..21: mol_type = other RNA
attcatatgctttgagctaca

SEQ ID NO: 74409 - RNA, 21 nt, synthetic construct
  source 1..21: mol_type = other RNA
attcatatttgttcaagcgct

SEQ ID NO: 74410 - RNA, 21 nt, synthetic construct
  source 1..21: mol_type = other RNA
attcatccaggcaaaagatga

SEQ ID NO: 74411 - RNA, 21 nt, synthetic construct
  source 1..21: mol_type = other RNA
attcatccagtttaaagcttt

SEQ ID NO: 74412 - RNA, 21 nt, synthetic construct
  source 1..21: mol_type = other RNA
attcatccctctaaataggta

SEQ ID NO: 74413 - RNA, 21 nt, synthetic construct
  source 1..21: mol_type = other RNA
attcatctaaacgtttggtga

SEQ ID NO: 74414 - RNA, 21 nt, synthetic construct
  source 1..21: mol_type = other RNA
attcatctctcgatggacatt

SEQ ID NO: 74415 - RNA, 21 nt, synthetic construct
  source 1..21: mol_type = other RNA
attcatctgcagtgtccatct

SEQ ID NO: 74416 - RNA, 21 nt, synthetic construct
  source 1..21: mol_type = other RNA
attcatctgttaatgggcact

SEQ ID NO: 74417 - RNA, 21 nt, synthetic construct
  source 1..21: mol_type = other RNA
attcatcttgacttcacttcc

SEQ ID NO: 74418 - RNA, 21 nt, synthetic construct
  source 1..21: mol_type = other RNA
attcatgacaagaatctttgg

SEQ ID NO: 74419 - RNA, 21 nt, synthetic construct
  source 1..21: mol_type = other RNA
attcatgcaactgaaaacatc

SEQ ID NO: 74420 - RNA, 21 nt, synthetic construct
  source 1..21: mol_type = other RNA
attcatgctgtgaatttggat

SEQ ID NO: 74421 - RNA, 21 nt, synthetic construct
  source 1..21: mol_type = other RNA
attcatgtaatgcaaactcta

SEQ ID NO: 74422 - RNA, 21 nt, synthetic construct
  source 1..21: mol_type = other RNA
attcatgtttgtggttttaac

SEQ ID NO: 74423 - RNA, 21 nt, synthetic construct
  source 1..21: mol_type = other RNA
attcattaccaggctggaaga

SEQ ID NO: 74424 - RNA, 21 nt, synthetic construct
  source 1..21: mol_type = other RNA
attcattcatgacaagaatct

SEQ ID NO: 74425 - RNA, 21 nt, synthetic construct
  source 1..21: mol_type = other RNA
attcattctttttactcgagg

SEQ ID NO: 74426 - RNA, 21 nt, synthetic construct
  source 1..21: mol_type = other RNA
attcattgtacatgaagtcct

SEQ ID NO: 74427 - RNA, 21 nt, synthetic construct
  source 1..21: mol_type = other RNA
attcatttccaaagatcatgg

SEQ ID NO: 74428 - RNA, 21 nt, synthetic construct
  source 1..21: mol_type = other RNA
attccaaaagtgaatatagct

SEQ ID NO: 74429 - RNA, 21 nt, synthetic construct
  source 1..21: mol_type = other RNA
attccaaatgtctgtctttat

SEQ ID NO: 74430 - RNA, 21 nt, synthetic construct
  source 1..21: mol_type = other RNA
attccaaattagctttctccc

SEQ ID NO: 74431 - RNA, 21 nt, synthetic construct
  source 1..21: mol_type = other RNA
attccaagagaggaataaatg

SEQ ID NO: 74432 - RNA, 21 nt, synthetic construct
  source 1..21: mol_type = other RNA
attccaatccttccttcatgt

SEQ ID NO: 74433 - RNA, 21 nt, synthetic construct
  source 1..21: mol_type = other RNA
attccacaaccactggggagt

SEQ ID NO: 74434 - RNA, 21 nt, synthetic construct
  source 1..21: mol_type = other RNA
attccacgctgtggcttgggt

SEQ ID NO: 74435 - RNA, 21 nt, synthetic construct
  source 1..21: mol_type = other RNA
attccacttatatgaagctaa

SEQ ID NO: 74436 - RNA, 21 nt, synthetic construct
  source 1..21: mol_type = other RNA
attccagaccagcagttcaag

SEQ ID NO: 74437 - RNA, 21 nt, synthetic construct
  source 1..21: mol_type = other RNA
attccagagaattcagagtgg

SEQ ID NO: 74438 - RNA, 21 nt, synthetic construct
  source 1..21: mol_type = other RNA
attccagagggtaacgtgagc

SEQ ID NO: 74439 - RNA, 21 nt, synthetic construct
  source 1..21: mol_type = other RNA
attccagattgaaatctaggc

SEQ ID NO: 74440 - RNA, 21 nt, synthetic construct
  source 1..21: mol_type = other RNA
attccagccattctcttctgg

SEQ ID NO: 74441 - RNA, 21 nt, synthetic construct
  source 1..21: mol_type = other RNA
attccaggatcaaatctggct

SEQ ID NO: 74442 - RNA, 21 nt, synthetic construct
  source 1..21: mol_type = other RNA
attccaggtttacaggatatc

SEQ ID NO: 74443 - RNA, 21 nt, synthetic construct
  source 1..21: mol_type = other RNA
attccaggttttatctctctc

SEQ ID NO: 74444 - RNA, 21 nt, synthetic construct
  source 1..21: mol_type = other RNA
attccagtttctctgcttttt

SEQ ID NO: 74445 - RNA, 21 nt, synthetic construct
  source 1..21: mol_type = other RNA
attccataaaaaccaaacact

SEQ ID NO: 74446 - RNA, 21 nt, synthetic construct
  source 1..21: mol_type = other RNA
attccataagatctgtctttg

SEQ ID NO: 74447 - RNA, 21 nt, synthetic construct
  source 1..21: mol_type = other RNA
attccatcagtggttgtgctt

SEQ ID NO: 74448 - RNA, 21 nt, synthetic construct
  source 1..21: mol_type = other RNA
attccatggtatgtgccatct

SEQ ID NO: 74449 - RNA, 21 nt, synthetic construct
  source 1..21: mol_type = other RNA
attccattccttttcgagact

SEQ ID NO: 74450 - RNA, 21 nt, synthetic construct
  source 1..21: mol_type = other RNA
attccattgttctctttgttt

SEQ ID NO: 74451 - RNA, 21 nt, synthetic construct
  source 1..21: mol_type = other RNA
attccatttttctgaccaact

SEQ ID NO: 74452 - RNA, 21 nt, synthetic construct
  source 1..21: mol_type = other RNA
attcccaaatgtcttaagaag

SEQ ID NO: 74453 - RNA, 21 nt, synthetic construct
  source 1..21: mol_type = other RNA
attcccaagatcataagcttt

SEQ ID NO: 74454 - RNA, 21 nt, synthetic construct
  source 1..21: mol_type = other RNA
attcccacaaaatatgaagca

SEQ ID NO: 74455 - RNA, 21 nt, synthetic construct
  source 1..21: mol_type = other RNA
attcccaggtattttgttctc

SEQ ID NO: 74456 - RNA, 21 nt, synthetic construct
  source 1..21: mol_type = other RNA
attcccatgttcactgcagaa

SEQ ID NO: 74457 - RNA, 21 nt, synthetic construct
  source 1..21: mol_type = other RNA
attccccacataggatagtta

SEQ ID NO: 74458 - RNA, 21 nt, synthetic construct
  source 1..21: mol_type = other RNA
attccccagcctcagcctccc

SEQ ID NO: 74459 - RNA, 21 nt, synthetic construct
  source 1..21: mol_type = other RNA
attccccagggaaaccttact

SEQ ID NO: 74460 - RNA, 21 nt, synthetic construct
  source 1..21: mol_type = other RNA
attcccccttatgtgtgtata

SEQ ID NO: 74461 - RNA, 21 nt, synthetic construct
  source 1..21: mol_type = other RNA
attcccctggatcccccagcc

SEQ ID NO: 74462 - RNA, 21 nt, synthetic construct
  source 1..21: mol_type = other RNA
attccccttatatgggatatc

SEQ ID NO: 74463 - RNA, 21 nt, synthetic construct
  source 1..21: mol_type = other RNA
attccccttgccaaggcttgc

SEQ ID NO: 74464 - RNA, 21 nt, synthetic construct
  source 1..21: mol_type = other RNA
attccctacattgccttcaag

SEQ ID NO: 74465 - RNA, 21 nt, synthetic construct
  source 1..21: mol_type = other RNA
attccctcagcaaaagcaatt

SEQ ID NO: 74466 - RNA, 21 nt, synthetic construct
  source 1..21: mol_type = other RNA
attccctctacaaaaggagga

SEQ ID NO: 74467 - RNA, 21 nt, synthetic construct
  source 1..21: mol_type = other RNA
attccctctggccttctatat

SEQ ID NO: 74468 - RNA, 21 nt, synthetic construct
  source 1..21: mol_type = other RNA
attccctgtctgggaagttat

SEQ ID NO: 74469 - RNA, 21 nt, synthetic construct
  source 1..21: mol_type = other RNA
attccctgtctgtgatgtaga

SEQ ID NO: 74470 - RNA, 21 nt, synthetic construct
  source 1..21: mol_type = other RNA
attcccttcagtgtagtcaga

SEQ ID NO: 74471 - RNA, 21 nt, synthetic construct
  source 1..21: mol_type = other RNA
attccgcctgggcgacagagc

SEQ ID NO: 74472 - RNA, 21 nt, synthetic construct
  source 1..21: mol_type = other RNA
attccgcgtttattagaacta

SEQ ID NO: 74473 - RNA, 21 nt, synthetic construct
  source 1..21: mol_type = other RNA
attccgctctggttttaaaga

SEQ ID NO: 74474 - RNA, 21 nt, synthetic construct
  source 1..21: mol_type = other RNA
attccgtggaaggccttctcc

SEQ ID NO: 74475 - RNA, 21 nt, synthetic construct
  source 1..21: mol_type = other RNA
attcctaactcaagagttact

SEQ ID NO: 74476 - RNA, 21 nt, synthetic construct
  source 1..21: mol_type = other RNA
attcctactttcttcaaccat

SEQ ID NO: 74477 - RNA, 21 nt, synthetic construct
  source 1..21: mol_type = other RNA
attcctatcagaagcacacca

SEQ ID NO: 74478 - RNA, 21 nt, synthetic construct
  source 1..21: mol_type = other RNA
attcctccctggagaggcaaa

SEQ ID NO: 74479 - RNA, 21 nt, synthetic construct
  source 1..21: mol_type = other RNA
attcctctcttggaatgtgca

SEQ ID NO: 74480 - RNA, 21 nt, synthetic construct
  source 1..21: mol_type = other RNA
attcctgaaatgaaccaaact

SEQ ID NO: 74481 - RNA, 21 nt, synthetic construct
  source 1..21: mol_type = other RNA
attccttcccctttctttggt

SEQ ID NO: 74482 - RNA, 21 nt, synthetic construct
  source 1..21: mol_type = other RNA
attccttccgacctgtagatt

SEQ ID NO: 74483 - RNA, 21 nt, synthetic construct
  source 1..21: mol_type = other RNA
attccttcctttgatgactta

SEQ ID NO: 74484 - RNA, 21 nt, synthetic construct
  source 1..21: mol_type = other RNA
attccttcttcacacattaac

SEQ ID NO: 74485 - RNA, 21 nt, synthetic construct
  source 1..21: mol_type = other RNA
attcctttcaaagagacctga

SEQ ID NO: 74486 - RNA, 21 nt, synthetic construct
  source 1..21: mol_type = other RNA
attcctttctaggcatctatt

SEQ ID NO: 74487 - RNA, 21 nt, synthetic construct
  source 1..21: mol_type = other RNA
attccttttcgagactgagta

SEQ ID NO: 74488 - RNA, 21 nt, synthetic construct
  source 1..21: mol_type = other RNA
attccttttttatgtgctttc

SEQ ID NO: 74489 - RNA, 21 nt, synthetic construct
  source 1..21: mol_type = other RNA
attcgaaaatgggccaaagac

SEQ ID NO: 74490 - RNA, 21 nt, synthetic construct
  source 1..21: mol_type = other RNA
attcgattaaaataacacgca

SEQ ID NO: 74491 - RNA, 21 nt, synthetic construct
  source 1..21: mol_type = other RNA
attcgcattgctaattcattg

SEQ ID NO: 74492 - RNA, 21 nt, synthetic construct
  source 1..21: mol_type = other RNA
attcggccaagatctgttttt

SEQ ID NO: 74493 - RNA, 21 nt, synthetic construct
  source 1..21: mol_type = other RNA
attcgggggagagcactggtt

SEQ ID NO: 74494 - RNA, 21 nt, synthetic construct
  source 1..21: mol_type = other RNA
attcggtggcattaaggacat

SEQ ID NO: 74495 - RNA, 21 nt, synthetic construct
  source 1..21: mol_type = other RNA
attcgtagcaggtttaggaag

SEQ ID NO: 74496 - RNA, 21 nt, synthetic construct
  source 1..21: mol_type = other RNA
attcgtccctaaacactgtag

SEQ ID NO: 74497 - RNA, 21 nt, synthetic construct
  source 1..21: mol_type = other RNA
attcgttaatacttgtgtagc

SEQ ID NO: 74498 - RNA, 21 nt, synthetic construct
  source 1..21: mol_type = other RNA
attcgttcaaaacatcatcta

SEQ ID NO: 74499 - RNA, 21 nt, synthetic construct
  source 1..21: mol_type = other RNA
attcgttccagcagggtaaag

SEQ ID NO: 74500 - RNA, 21 nt, synthetic construct
  source 1..21: mol_type = other RNA
attctaaacacacgggctggg

SEQ ID NO: 74501 - RNA, 21 nt, synthetic construct
  source 1..21: mol_type = other RNA
attctaaacctgaggtcttta

SEQ ID NO: 74502 - RNA, 21 nt, synthetic construct
  source 1..21: mol_type = other RNA
attctaacaagaagctgtttt

SEQ ID NO: 74503 - RNA, 21 nt, synthetic construct
  source 1..21: mol_type = other RNA
attctaacattatcttctacc

SEQ ID NO: 74504 - RNA, 21 nt, synthetic construct
  source 1..21: mol_type = other RNA
attctaagtttgccaaagatt

SEQ ID NO: 74505 - RNA, 21 nt, synthetic construct
  source 1..21: mol_type = other RNA
attctaatgaactcccagaac

SEQ ID NO: 74506 - RNA, 21 nt, synthetic construct
  source 1..21: mol_type = other RNA
attctaatgtgcaaggagaga

SEQ ID NO: 74507 - RNA, 21 nt, synthetic construct
  source 1..21: mol_type = other RNA
attctaattagaaactggtga

SEQ ID NO: 74508 - RNA, 21 nt, synthetic construct
  source 1..21: mol_type = other RNA
attctacagaaaacccttcat

SEQ ID NO: 74509 - RNA, 21 nt, synthetic construct
  source 1..21: mol_type = other RNA
attctacagtattacacagaa

SEQ ID NO: 74510 - RNA, 21 nt, synthetic construct
  source 1..21: mol_type = other RNA
attctacctggagcctgagga

SEQ ID NO: 74511 - RNA, 21 nt, synthetic construct
  source 1..21: mol_type = other RNA
attctagaaaggagggactga

SEQ ID NO: 74512 - RNA, 21 nt, synthetic construct
  source 1..21: mol_type = other RNA
attctagtgatgggagatgga

SEQ ID NO: 74513 - RNA, 21 nt, synthetic construct
  source 1..21: mol_type = other RNA
attctagttaataaaggtgct

SEQ ID NO: 74514 - RNA, 21 nt, synthetic construct
  source 1..21: mol_type = other RNA
attctagttctagctctgtct

SEQ ID NO: 74515 - RNA, 21 nt, synthetic construct
  source 1..21: mol_type = other RNA
attctatcatcaagacagagc

SEQ ID NO: 74516 - RNA, 21 nt, synthetic construct
  source 1..21: mol_type = other RNA
attctatctgaactttcgaag

SEQ ID NO: 74517 - RNA, 21 nt, synthetic construct
  source 1..21: mol_type = other RNA
attctatttttctgcaattgg

SEQ ID NO: 74518 - RNA, 21 nt, synthetic construct
  source 1..21: mol_type = other RNA
attctcaaatgaacaggttct

SEQ ID NO: 74519 - RNA, 21 nt, synthetic construct
  source 1..21: mol_type = other RNA
attctccactttcatgatttg

SEQ ID NO: 74520 - RNA, 21 nt, synthetic construct
  source 1..21: mol_type = other RNA
attctcccagttgtcagaatt

SEQ ID NO: 74521 - RNA, 21 nt, synthetic construct
  source 1..21: mol_type = other RNA
attctccctgaaattgtcaga

SEQ ID NO: 74522 - RNA, 21 nt, synthetic construct
  source 1..21: mol_type = other RNA
attctctctcaactggcccct

SEQ ID NO: 74523 - RNA, 21 nt, synthetic construct
  source 1..21: mol_type = other RNA
attctctggaatagaagagca

SEQ ID NO: 74524 - RNA, 21 nt, synthetic construct
  source 1..21: mol_type = other RNA
attctctgtctctgttgccca

SEQ ID NO: 74525 - RNA, 21 nt, synthetic construct
  source 1..21: mol_type = other RNA
attctcttctggatagcatta

SEQ ID NO: 74526 - RNA, 21 nt, synthetic construct
  source 1..21: mol_type = other RNA
attctctttagggaagatagt

SEQ ID NO: 74527 - RNA, 21 nt, synthetic construct
  source 1..21: mol_type = other RNA
attctctttctgaaattctca

SEQ ID NO: 74528 - RNA, 21 nt, synthetic construct
  source 1..21: mol_type = other RNA
attctgaactttcaacctaac

SEQ ID NO: 74529 - RNA, 21 nt, synthetic construct
  source 1..21: mol_type = other RNA
attctgacaactgggagaatg

SEQ ID NO: 74530 - RNA, 21 nt, synthetic construct
  source 1..21: mol_type = other RNA
attctgacacccgaagaggac

SEQ ID NO: 74531 - RNA, 21 nt, synthetic construct
  source 1..21: mol_type = other RNA
attctgacccagagcctaatg

SEQ ID NO: 74532 - RNA, 21 nt, synthetic construct
  source 1..21: mol_type = other RNA
attctgaccctttattcaaag

SEQ ID NO: 74533 - RNA, 21 nt, synthetic construct
  source 1..21: mol_type = other RNA
attctgacctaaagttttaag

SEQ ID NO: 74534 - RNA, 21 nt, synthetic construct
  source 1..21: mol_type = other RNA
attctgacttagtgagggagg

SEQ ID NO: 74535 - RNA, 21 nt, synthetic construct
  source 1..21: mol_type = other RNA
attctgaggcctcctgccttc

SEQ ID NO: 74536 - RNA, 21 nt, synthetic construct
  source 1..21: mol_type = other RNA
attctgagggaaattatttcc

SEQ ID NO: 74537 - RNA, 21 nt, synthetic construct
  source 1..21: mol_type = other RNA
attctgatagcttgacaaaag

SEQ ID NO: 74538 - RNA, 21 nt, synthetic construct
  source 1..21: mol_type = other RNA
attctgatgcacaagccttga

SEQ ID NO: 74539 - RNA, 21 nt, synthetic construct
  source 1..21: mol_type = other RNA
attctgcagtgaacatgggaa

SEQ ID NO: 74540 - RNA, 21 nt, synthetic construct
  source 1..21: mol_type = other RNA
attctgcagtttgtgttttca

SEQ ID NO: 74541 - RNA, 21 nt, synthetic construct
  source 1..21: mol_type = other RNA
attctgccacattcaacaaca

SEQ ID NO: 74542 - RNA, 21 nt, synthetic construct
  source 1..21: mol_type = other RNA
attctgcctgcagactgcagg

SEQ ID NO: 74543 - RNA, 21 nt, synthetic construct
  source 1..21: mol_type = other RNA
attctgccttcaatgtttggt

SEQ ID NO: 74544 - RNA, 21 nt, synthetic construct
  source 1..21: mol_type = other RNA
attctgctactagcaagctaa

SEQ ID NO: 74545 - RNA, 21 nt, synthetic construct
  source 1..21: mol_type = other RNA
attctgctatgaaatgtggtt

SEQ ID NO: 74546 - RNA, 21 nt, synthetic construct
  source 1..21: mol_type = other RNA
attctgcttattatatgccta

SEQ ID NO: 74547 - RNA, 21 nt, synthetic construct
  source 1..21: mol_type = other RNA
attctgcttccttgctatgta

SEQ ID NO: 74548 - RNA, 21 nt, synthetic construct
  source 1..21: mol_type = other RNA
attctggagtgttttcttcat

SEQ ID NO: 74549 - RNA, 21 nt, synthetic construct
  source 1..21: mol_type = other RNA
attctggccaaatccctgatc

SEQ ID NO: 74550 - RNA, 21 nt, synthetic construct
  source 1..21: mol_type = other RNA
attctggggctcaagtaagtg

SEQ ID NO: 74551 - RNA, 21 nt, synthetic construct
  source 1..21: mol_type = other RNA
attctgtcacatagacctgaa

SEQ ID NO: 74552 - RNA, 21 nt, synthetic construct
  source 1..21: mol_type = other RNA
attctgtctctacaaaaaagt

SEQ ID NO: 74553 - RNA, 21 nt, synthetic construct
  source 1..21: mol_type = other RNA
attctgtgaattgtgacagtt

SEQ ID NO: 74554 - RNA, 21 nt, synthetic construct
  source 1..21: mol_type = other RNA
attctgtgccaagcaacttga

SEQ ID NO: 74555 - RNA, 21 nt, synthetic construct
  source 1..21: mol_type = other RNA
attctgttaatgtgatatgcc

SEQ ID NO: 74556 - RNA, 21 nt, synthetic construct
  source 1..21: mol_type = other RNA
attctgttctagctcctggga

SEQ ID NO: 74557 - RNA, 21 nt, synthetic construct
  source 1..21: mol_type = other RNA
attctgttctcagtatccttt

SEQ ID NO: 74558 - RNA, 21 nt, synthetic construct
  source 1..21: mol_type = other RNA
attctgtttacccttactaaa

SEQ ID NO: 74559 - RNA, 21 nt, synthetic construct
  source 1..21: mol_type = other RNA
attcttaaactgccaaaccct

SEQ ID NO: 74560 - RNA, 21 nt, synthetic construct
  source 1..21: mol_type = other RNA
attcttacagtgacatatgcc

SEQ ID NO: 74561 - RNA, 21 nt, synthetic construct
  source 1..21: mol_type = other RNA
attcttatccctacctaaaaa

SEQ ID NO: 74562 - RNA, 21 nt, synthetic construct
  source 1..21: mol_type = other RNA
attcttattgattcagatgac

SEQ ID NO: 74563 - RNA, 21 nt, synthetic construct
  source 1..21: mol_type = other RNA
attcttcaccattccagccat

SEQ ID NO: 74564 - RNA, 21 nt, synthetic construct
  source 1..21: mol_type = other RNA
attcttcagcaaggaccatta

SEQ ID NO: 74565 - RNA, 21 nt, synthetic construct
  source 1..21: mol_type = other RNA
attcttccactagtgggatca

SEQ ID NO: 74566 - RNA, 21 nt, synthetic construct
  source 1..21: mol_type = other RNA
attcttccagcctggtaatga

SEQ ID NO: 74567 - RNA, 21 nt, synthetic construct
  source 1..21: mol_type = other RNA
attcttcctgtcttggaccca

SEQ ID NO: 74568 - RNA, 21 nt, synthetic construct
  source 1..21: mol_type = other RNA
attcttctaataggaagtggc

SEQ ID NO: 74569 - RNA, 21 nt, synthetic construct
  source 1..21: mol_type = other RNA
attcttctctaatgtaaacag

SEQ ID NO: 74570 - RNA, 21 nt, synthetic construct
  source 1..21: mol_type = other RNA
attcttgacatgattgaggac

SEQ ID NO: 74571 - RNA, 21 nt, synthetic construct
  source 1..21: mol_type = other RNA
attcttgacctcaaatgatcc

SEQ ID NO: 74572 - RNA, 21 nt, synthetic construct
  source 1..21: mol_type = other RNA
attcttgggtgaataacccat

SEQ ID NO: 74573 - RNA, 21 nt, synthetic construct
  source 1..21: mol_type = other RNA
attcttgtcatgaatgaatgt

SEQ ID NO: 74574 - RNA, 21 nt, synthetic construct
  source 1..21: mol_type = other RNA
attcttgttaagcattttccg

SEQ ID NO: 74575 - RNA, 21 nt, synthetic construct
  source 1..21: mol_type = other RNA
attcttgttttcttgagatgg

SEQ ID NO: 74576 - RNA, 21 nt, synthetic construct
  source 1..21: mol_type = other RNA
attctttaaaactgctgagtc

SEQ ID NO: 74577 - RNA, 21 nt, synthetic construct
  source 1..21: mol_type = other RNA
attcttttagagtaactgtca

SEQ ID NO: 74578 - RNA, 21 nt, synthetic construct
  source 1..21: mol_type = other RNA
attcttttgctgtatacccag

SEQ ID NO: 74579 - RNA, 21 nt, synthetic construct
  source 1..21: mol_type = other RNA
attctttttactcgagggtag

SEQ ID NO: 74580 - RNA, 21 nt, synthetic construct
  source 1..21: mol_type = other RNA
attctttttctagtttgaggt

SEQ ID NO: 74581 - RNA, 21 nt, synthetic construct
  source 1..21: mol_type = other RNA
attgaaaatggtttaggctgt

SEQ ID NO: 74582 - RNA, 21 nt, synthetic construct
  source 1..21: mol_type = other RNA
attgaaacgatgcattccaga

SEQ ID NO: 74583 - RNA, 21 nt, synthetic construct
  source 1..21: mol_type = other RNA
attgaaactcaatgttggtta

SEQ ID NO: 74584 - RNA, 21 nt, synthetic construct
  source 1..21: mol_type = other RNA
attgaaagcccttgagtattt

SEQ ID NO: 74585 - RNA, 21 nt, synthetic construct
  source 1..21: mol_type = other RNA
attgaacagcctaaagtccac

SEQ ID NO: 74586 - RNA, 21 nt, synthetic construct
  source 1..21: mol_type = other RNA
attgaacccactgagcattta

SEQ ID NO: 74587 - RNA, 21 nt, synthetic construct
  source 1..21: mol_type = other RNA
attgaactgttacttgactat

SEQ ID NO: 74588 - RNA, 21 nt, synthetic construct
  source 1..21: mol_type = other RNA
attgaagagggaacattttca

SEQ ID NO: 74589 - RNA, 21 nt, synthetic construct
  source 1..21: mol_type = other RNA
attgaagccagcacctaacaa

SEQ ID NO: 74590 - RNA, 21 nt, synthetic construct
  source 1..21: mol_type = other RNA
attgaagctactattccagga

SEQ ID NO: 74591 - RNA, 21 nt, synthetic construct
  source 1..21: mol_type = other RNA
attgaaggcagaattatagag

SEQ ID NO: 74592 - RNA, 21 nt, synthetic construct
  source 1..21: mol_type = other RNA
attgaagtatagtttgaagtc

SEQ ID NO: 74593 - RNA, 21 nt, synthetic construct
  source 1..21: mol_type = other RNA
attgaataatttccaggtcat

SEQ ID NO: 74594 - RNA, 21 nt, synthetic construct
  source 1..21: mol_type = other RNA
attgaatggggatgcaacaaa

SEQ ID NO: 74595 - RNA, 21 nt, synthetic construct
  source 1..21: mol_type = other RNA
attgacaagacgtgtacataa

SEQ ID NO: 74596 - RNA, 21 nt, synthetic construct
  source 1..21: mol_type = other RNA
attgacaatataggagactat

SEQ ID NO: 74597 - RNA, 21 nt, synthetic construct
  source 1..21: mol_type = other RNA
attgaccaaacatgtgaggat

SEQ ID NO: 74598 - RNA, 21 nt, synthetic construct
  source 1..21: mol_type = other RNA
attgaccattccacgctgtgg

SEQ ID NO: 74599 - RNA, 21 nt, synthetic construct
  source 1..21: mol_type = other RNA
attgaccttctacttatcttt

SEQ ID NO: 74600 - RNA, 21 nt, synthetic construct
  source 1..21: mol_type = other RNA
attgaccttgtatccagtaat

SEQ ID NO: 74601 - RNA, 21 nt, synthetic construct
  source 1..21: mol_type = other RNA
attgactaccaattctccctg

SEQ ID NO: 74602 - RNA, 21 nt, synthetic construct
  source 1..21: mol_type = other RNA
attgacttcactagatctctt

SEQ ID NO: 74603 - RNA, 21 nt, synthetic construct
  source 1..21: mol_type = other RNA
attgactttaccctgctggaa

SEQ ID NO: 74604 - RNA, 21 nt, synthetic construct
  source 1..21: mol_type = other RNA
attgagaagcagaaaatcagt

SEQ ID NO: 74605 - RNA, 21 nt, synthetic construct
  source 1..21: mol_type = other RNA
attgagagctttcttttaaag

SEQ ID NO: 74606 - RNA, 21 nt, synthetic construct
  source 1..21: mol_type = other RNA
attgagagtgaaaacacaaac

SEQ ID NO: 74607 - RNA, 21 nt, synthetic construct
  source 1..21: mol_type = other RNA
attgagatgtactggaagtgt

SEQ ID NO: 74608 - RNA, 21 nt, synthetic construct
  source 1..21: mol_type = other RNA
attgagattagcgaaagggat

SEQ ID NO: 74609 - RNA, 21 nt, synthetic construct
  source 1..21: mol_type = other RNA
attgagccaaagaagaaatca

SEQ ID NO: 74610 - RNA, 21 nt, synthetic construct
  source 1..21: mol_type = other RNA
attgagcctgttccgatttta

SEQ ID NO: 74611 - RNA, 21 nt, synthetic construct
  source 1..21: mol_type = other RNA
attgagctgtccccaccgcct

SEQ ID NO: 74612 - RNA, 21 nt, synthetic construct
  source 1..21: mol_type = other RNA
attgaggacttcatgtacaat

SEQ ID NO: 74613 - RNA, 21 nt, synthetic construct
  source 1..21: mol_type = other RNA
attgagggttagatttttcct

SEQ ID NO: 74614 - RNA, 21 nt, synthetic construct
  source 1..21: mol_type = other RNA
attgagtatctggtgctggca

SEQ ID NO: 74615 - RNA, 21 nt, synthetic construct
  source 1..21: mol_type = other RNA
attgagtctgtagggtgacta

SEQ ID NO: 74616 - RNA, 21 nt, synthetic construct
  source 1..21: mol_type = other RNA
attgagtgtagctgtggctca

SEQ ID NO: 74617 - RNA, 21 nt, synthetic construct
  source 1..21: mol_type = other RNA
attgataagcacatggtgata

SEQ ID NO: 74618 - RNA, 21 nt, synthetic construct
  source 1..21: mol_type = other RNA
attgatacaatacttggatct

SEQ ID NO: 74619 - RNA, 21 nt, synthetic construct
  source 1..21: mol_type = other RNA
attgatatctgagtgttgtgt

SEQ ID NO: 74620 - RNA, 21 nt, synthetic construct
  source 1..21: mol_type = other RNA
attgatctgccaggacaattg

SEQ ID NO: 74621 - RNA, 21 nt, synthetic construct
  source 1..21: mol_type = other RNA
attgattcagatgacagaaat

SEQ ID NO: 74622 - RNA, 21 nt, synthetic construct
  source 1..21: mol_type = other RNA
attgattccagtttctctgct

SEQ ID NO: 74623 - RNA, 21 nt, synthetic construct
  source 1..21: mol_type = other RNA
attgattggcaaatctttagt

SEQ ID NO: 74624 - RNA, 21 nt, synthetic construct
  source 1..21: mol_type = other RNA
attgatttgaccatgggacaa

SEQ ID NO: 74625 - RNA, 21 nt, synthetic construct
  source 1..21: mol_type = other RNA
attgattttgtatcctgagac

SEQ ID NO: 74626 - RNA, 21 nt, synthetic construct
  source 1..21: mol_type = other RNA
attgcaaaaacagtttccctc

SEQ ID NO: 74627 - RNA, 21 nt, synthetic construct
  source 1..21: mol_type = other RNA
attgcaaactaagtggtattc

SEQ ID NO: 74628 - RNA, 21 nt, synthetic construct
  source 1..21: mol_type = other RNA
attgcacagtctcccccaggt

SEQ ID NO: 74629 - RNA, 21 nt, synthetic construct
  source 1..21: mol_type = other RNA
attgcactccacgtgggtgac

SEQ ID NO: 74630 - RNA, 21 nt, synthetic construct
  source 1..21: mol_type = other RNA
attgcagagtgttcaaaagcc

SEQ ID NO: 74631 - RNA, 21 nt, synthetic construct
  source 1..21: mol_type = other RNA
attgcagccagagagtggaaa

SEQ ID NO: 74632 - RNA, 21 nt, synthetic construct
  source 1..21: mol_type = other RNA
attgcaggtgtgggccaccaa

SEQ ID NO: 74633 - RNA, 21 nt, synthetic construct
  source 1..21: mol_type = other RNA
attgcaggtttactccaagaa

SEQ ID NO: 74634 - RNA, 21 nt, synthetic construct
  source 1..21: mol_type = other RNA
attgcatagggatgttgccta

SEQ ID NO: 74635 - RNA, 21 nt, synthetic construct
  source 1..21: mol_type = other RNA
attgcatcaactgcttcccta

SEQ ID NO: 74636 - RNA, 21 nt, synthetic construct
  source 1..21: mol_type = other RNA
attgcatgagacttggagttt

SEQ ID NO: 74637 - RNA, 21 nt, synthetic construct
  source 1..21: mol_type = other RNA
attgcattgactaccaattct

SEQ ID NO: 74638 - RNA, 21 nt, synthetic construct
  source 1..21: mol_type = other RNA
attgcatttacttgtcatttc

SEQ ID NO: 74639 - RNA, 21 nt, synthetic construct
  source 1..21: mol_type = other RNA
attgccaaactgttttccaca

SEQ ID NO: 74640 - RNA, 21 nt, synthetic construct
  source 1..21: mol_type = other RNA
attgccaggtttgtgcttgga

SEQ ID NO: 74641 - RNA, 21 nt, synthetic construct
  source 1..21: mol_type = other RNA
attgccagttttctggaaact

SEQ ID NO: 74642 - RNA, 21 nt, synthetic construct
  source 1..21: mol_type = other RNA
attgccatatgtagggcaccg

SEQ ID NO: 74643 - RNA, 21 nt, synthetic construct
  source 1..21: mol_type = other RNA
attgcccaggctggtcttgta

SEQ ID NO: 74644 - RNA, 21 nt, synthetic construct
  source 1..21: mol_type = other RNA
attgcccattataaaatagga

SEQ ID NO: 74645 - RNA, 21 nt, synthetic construct
  source 1..21: mol_type = other RNA
attgccccattgcactccacg

SEQ ID NO: 74646 - RNA, 21 nt, synthetic construct
  source 1..21: mol_type = other RNA
attgcctaacaccagtaagat

SEQ ID NO: 74647 - RNA, 21 nt, synthetic construct
  source 1..21: mol_type = other RNA
attgcctatagacagcatccc

SEQ ID NO: 74648 - RNA, 21 nt, synthetic construct
  source 1..21: mol_type = other RNA
attgcctccatatgggatgct

SEQ ID NO: 74649 - RNA, 21 nt, synthetic construct
  source 1..21: mol_type = other RNA
attgccttcaagttgcttttt

SEQ ID NO: 74650 - RNA, 21 nt, synthetic construct
  source 1..21: mol_type = other RNA
attgccttcgcagggtgaaac

SEQ ID NO: 74651 - RNA, 21 nt, synthetic construct
  source 1..21: mol_type = other RNA
attgcgattgtttcagtgtgt

SEQ ID NO: 74652 - RNA, 21 nt, synthetic construct
  source 1..21: mol_type = other RNA
attgcgcagaactggggcttg

SEQ ID NO: 74653 - RNA, 21 nt, synthetic construct
  source 1..21: mol_type = other RNA
attgctaaactgttccccaag

SEQ ID NO: 74654 - RNA, 21 nt, synthetic construct
  source 1..21: mol_type = other RNA
attgctaattcattgtacatg

SEQ ID NO: 74655 - RNA, 21 nt, synthetic construct
  source 1..21: mol_type = other RNA
attgctagtgtcctcaggctc

SEQ ID NO: 74656 - RNA, 21 nt, synthetic construct
  source 1..21: mol_type = other RNA
attgctgcagtttttccacta

SEQ ID NO: 74657 - RNA, 21 nt, synthetic construct
  source 1..21: mol_type = other RNA
attgcttcaaagagaacaaaa

SEQ ID NO: 74658 - RNA, 21 nt, synthetic construct
  source 1..21: mol_type = other RNA
attgcttgagagagataaaac

SEQ ID NO: 74659 - RNA, 21 nt, synthetic construct
  source 1..21: mol_type = other RNA
attgcttttgctgagggaatt

SEQ ID NO: 74660 - RNA, 21 nt, synthetic construct
  source 1..21: mol_type = other RNA
attggaaaactaggtatttga

SEQ ID NO: 74661 - RNA, 21 nt, synthetic construct
  source 1..21: mol_type = other RNA
attggaaaactctgtttcctt

SEQ ID NO: 74662 - RNA, 21 nt, synthetic construct
  source 1..21: mol_type = other RNA
attggaacctttgtccactgt

SEQ ID NO: 74663 - RNA, 21 nt, synthetic construct
  source 1..21: mol_type = other RNA
attggaagactatcacgattc

SEQ ID NO: 74664 - RNA, 21 nt, synthetic construct
  source 1..21: mol_type = other RNA
attggaatgagtccagctttc

SEQ ID NO: 74665 - RNA, 21 nt, synthetic construct
  source 1..21: mol_type = other RNA
attggacgggtggtagggagg

SEQ ID NO: 74666 - RNA, 21 nt, synthetic construct
  source 1..21: mol_type = other RNA
attggagactgataaacttca

SEQ ID NO: 74667 - RNA, 21 nt, synthetic construct
  source 1..21: mol_type = other RNA
attggaggataatatctggac

SEQ ID NO: 74668 - RNA, 21 nt, synthetic construct
  source 1..21: mol_type = other RNA
attggatatttgcagtagtat

SEQ ID NO: 74669 - RNA, 21 nt, synthetic construct
  source 1..21: mol_type = other RNA
attggattaagggcccaccct

SEQ ID NO: 74670 - RNA, 21 nt, synthetic construct
  source 1..21: mol_type = other RNA
attggcaaatctttagtgttg

SEQ ID NO: 74671 - RNA, 21 nt, synthetic construct
  source 1..21: mol_type = other RNA
attggcaacattttaattcca

SEQ ID NO: 74672 - RNA, 21 nt, synthetic construct
  source 1..21: mol_type = other RNA
attggcataaagacagacatt

SEQ ID NO: 74673 - RNA, 21 nt, synthetic construct
  source 1..21: mol_type = other RNA
attggcatttaaaagaacctc

SEQ ID NO: 74674 - RNA, 21 nt, synthetic construct
  source 1..21: mol_type = other RNA
attggccaggctggttccaaa

SEQ ID NO: 74675 - RNA, 21 nt, synthetic construct
  source 1..21: mol_type = other RNA
attggcgtacatgtagatatg

SEQ ID NO: 74676 - RNA, 21 nt, synthetic construct
  source 1..21: mol_type = other RNA
attggcttatagtgttctttt

SEQ ID NO: 74677 - RNA, 21 nt, synthetic construct
  source 1..21: mol_type = other RNA
attgggaaaatcttggaactt

SEQ ID NO: 74678 - RNA, 21 nt, synthetic construct
  source 1..21: mol_type = other RNA
attgggaagattggctttaga

SEQ ID NO: 74679 - RNA, 21 nt, synthetic construct
  source 1..21: mol_type = other RNA
attgggagctttcattattac

SEQ ID NO: 74680 - RNA, 21 nt, synthetic construct
  source 1..21: mol_type = other RNA
attgggcattaattgagagct

SEQ ID NO: 74681 - RNA, 21 nt, synthetic construct
  source 1..21: mol_type = other RNA
attgggcttttcatatacgta

SEQ ID NO: 74682 - RNA, 21 nt, synthetic construct
  source 1..21: mol_type = other RNA
attgggggaaaattgacattt

SEQ ID NO: 74683 - RNA, 21 nt, synthetic construct
  source 1..21: mol_type = other RNA
attgggtacataccgagtaat

SEQ ID NO: 74684 - RNA, 21 nt, synthetic construct
  source 1..21: mol_type = other RNA
attgggtcaacaaactaacta

SEQ ID NO: 74685 - RNA, 21 nt, synthetic construct
  source 1..21: mol_type = other RNA
attggtaatgttatatttccg

SEQ ID NO: 74686 - RNA, 21 nt, synthetic construct
  source 1..21: mol_type = other RNA
attggtagtcaatgcaatgcg

SEQ ID NO: 74687 - RNA, 21 nt, synthetic construct
  source 1..21: mol_type = other RNA
attggtcctggaaaaagacca

SEQ ID NO: 74688 - RNA, 21 nt, synthetic construct
  source 1..21: mol_type = other RNA
attggtgaatctgagtaaagg

SEQ ID NO: 74689 - RNA, 21 nt, synthetic construct
  source 1..21: mol_type = other RNA
attggttaaacttggtctggg

SEQ ID NO: 74690 - RNA, 21 nt, synthetic construct
  source 1..21: mol_type = other RNA
attggttattcatgtttgtgg

SEQ ID NO: 74691 - RNA, 21 nt, synthetic construct
  source 1..21: mol_type = other RNA
attggttcgtttgaggctttt

SEQ ID NO: 74692 - RNA, 21 nt, synthetic construct
  source 1..21: mol_type = other RNA
attggttggactccaccctgc

SEQ ID NO: 74693 - RNA, 21 nt, synthetic construct
  source 1..21: mol_type = other RNA
attgtaacttgaattcagatg

SEQ ID NO: 74694 - RNA, 21 nt, synthetic construct
  source 1..21: mol_type = other RNA
attgtaatcacagtacgcttt

SEQ ID NO: 74695 - RNA, 21 nt, synthetic construct
  source 1..21: mol_type = other RNA
attgtaatcctgtttctctac

SEQ ID NO: 74696 - RNA, 21 nt, synthetic construct
  source 1..21: mol_type = other RNA
attgtaatgtctcctctttca

SEQ ID NO: 74697 - RNA, 21 nt, synthetic construct
  source 1..21: mol_type = other RNA
attgtacaattttcttaccct

SEQ ID NO: 74698 - RNA, 21 nt, synthetic construct
  source 1..21: mol_type = other RNA
attgtacacctcaaactagaa

SEQ ID NO: 74699 - RNA, 21 nt, synthetic construct
  source 1..21: mol_type = other RNA
attgtacatgaagtcctcaat

SEQ ID NO: 74700 - RNA, 21 nt, synthetic construct
  source 1..21: mol_type = other RNA
attgtaccttgatttatggcc

SEQ ID NO: 74701 - RNA, 21 nt, synthetic construct
  source 1..21: mol_type = other RNA
attgtaccttggagagaaacc

SEQ ID NO: 74702 - RNA, 21 nt, synthetic construct
  source 1..21: mol_type = other RNA
attgtagctatatcccaaatt

SEQ ID NO: 74703 - RNA, 21 nt, synthetic construct
  source 1..21: mol_type = other RNA
attgtaggaaagcctgtgaca

SEQ ID NO: 74704 - RNA, 21 nt, synthetic construct
  source 1..21: mol_type = other RNA
attgtaggtgtctcatttaat

SEQ ID NO: 74705 - RNA, 21 nt, synthetic construct
  source 1..21: mol_type = other RNA
attgtagtttccatggagggg

SEQ ID NO: 74706 - RNA, 21 nt, synthetic construct
  source 1..21: mol_type = other RNA
attgtatatacccttctgtta

SEQ ID NO: 74707 - RNA, 21 nt, synthetic construct
  source 1..21: mol_type = other RNA
attgtatttctgttagatggt

SEQ ID NO: 74708 - RNA, 21 nt, synthetic construct
  source 1..21: mol_type = other RNA
attgtcaaggtcatcctttcc

SEQ ID NO: 74709 - RNA, 21 nt, synthetic construct
  source 1..21: mol_type = other RNA
attgtcaatggggaactttat

SEQ ID NO: 74710 - RNA, 21 nt, synthetic construct
  source 1..21: mol_type = other RNA
attgtcagaaaagatcagtaa

SEQ ID NO: 74711 - RNA, 21 nt, synthetic construct
  source 1..21: mol_type = other RNA
attgtcagtaattctgcagtg

SEQ ID NO: 74712 - RNA, 21 nt, synthetic construct
  source 1..21: mol_type = other RNA
attgtcattaccttatagatg

SEQ ID NO: 74713 - RNA, 21 nt, synthetic construct
  source 1..21: mol_type = other RNA
attgtcccgggggagggcggg

SEQ ID NO: 74714 - RNA, 21 nt, synthetic construct
  source 1..21: mol_type = other RNA
attgtcctggcagatcaattg

SEQ ID NO: 74715 - RNA, 21 nt, synthetic construct
  source 1..21: mol_type = other RNA
attgtcgttgagtacctctgg

SEQ ID NO: 74716 - RNA, 21 nt, synthetic construct
  source 1..21: mol_type = other RNA
attgtctgcaagcagatctgc

SEQ ID NO: 74717 - RNA, 21 nt, synthetic construct
  source 1..21: mol_type = other RNA
attgtcttacataggcttagt

SEQ ID NO: 74718 - RNA, 21 nt, synthetic construct
  source 1..21: mol_type = other RNA
attgtcttctaaccctcaaat

SEQ ID NO: 74719 - RNA, 21 nt, synthetic construct
  source 1..21: mol_type = other RNA
attgtcttttctatctgaaca

SEQ ID NO: 74720 - RNA, 21 nt, synthetic construct
  source 1..21: mol_type = other RNA
attgtgacagttctatttctt

SEQ ID NO: 74721 - RNA, 21 nt, synthetic construct
  source 1..21: mol_type = other RNA
attgtgatgtctcagatgtct

SEQ ID NO: 74722 - RNA, 21 nt, synthetic construct
  source 1..21: mol_type = other RNA
attgtgcaaccatccccgctg

SEQ ID NO: 74723 - RNA, 21 nt, synthetic construct
  source 1..21: mol_type = other RNA
attgtgcatatataccacatt

SEQ ID NO: 74724 - RNA, 21 nt, synthetic construct
  source 1..21: mol_type = other RNA
attgtgccagtgaactccagt

SEQ ID NO: 74725 - RNA, 21 nt, synthetic construct
  source 1..21: mol_type = other RNA
attgtgctcagtggttctgcg

SEQ ID NO: 74726 - RNA, 21 nt, synthetic construct
  source 1..21: mol_type = other RNA
attgtgctgaaaccccgcata

SEQ ID NO: 74727 - RNA, 21 nt, synthetic construct
  source 1..21: mol_type = other RNA
attgtggatgagattaatgta

SEQ ID NO: 74728 - RNA, 21 nt, synthetic construct
  source 1..21: mol_type = other RNA
attgtgtggacacactgaaac

SEQ ID NO: 74729 - RNA, 21 nt, synthetic construct
  source 1..21: mol_type = other RNA
attgtgtgtcgagaaaaatgg

SEQ ID NO: 74730 - RNA, 21 nt, synthetic construct
  source 1..21: mol_type = other RNA
attgtgtgttctctttttgac

SEQ ID NO: 74731 - RNA, 21 nt, synthetic construct
  source 1..21: mol_type = other RNA
attgtgttgcccacgctggtc

SEQ ID NO: 74732 - RNA, 21 nt, synthetic construct
  source 1..21: mol_type = other RNA
attgttagccacagcgttgtt

SEQ ID NO: 74733 - RNA, 21 nt, synthetic construct
  source 1..21: mol_type = other RNA
attgttaggtgctggcttcaa

SEQ ID NO: 74734 - RNA, 21 nt, synthetic construct
  source 1..21: mol_type = other RNA
attgttcagggaaggctgcaa

SEQ ID NO: 74735 - RNA, 21 nt, synthetic construct
  source 1..21: mol_type = other RNA
attgttcatgaaatccccttt

SEQ ID NO: 74736 - RNA, 21 nt, synthetic construct
  source 1..21: mol_type = other RNA
attgttcatgtctgtgtagtt

SEQ ID NO: 74737 - RNA, 21 nt, synthetic construct
  source 1..21: mol_type = other RNA
attgttccaggggggaaaaaa

SEQ ID NO: 74738 - RNA, 21 nt, synthetic construct
  source 1..21: mol_type = other RNA
attgttctctttgtttatcct

SEQ ID NO: 74739 - RNA, 21 nt, synthetic construct
  source 1..21: mol_type = other RNA
attgttgaattgttggagttc

SEQ ID NO: 74740 - RNA, 21 nt, synthetic construct
  source 1..21: mol_type = other RNA
attgttgccatcattttatga

SEQ ID NO: 74741 - RNA, 21 nt, synthetic construct
  source 1..21: mol_type = other RNA
attgttgcgcgtcaaaagatg

SEQ ID NO: 74742 - RNA, 21 nt, synthetic construct
  source 1..21: mol_type = other RNA
attgtttaattctgtttaccc

SEQ ID NO: 74743 - RNA, 21 nt, synthetic construct
  source 1..21: mol_type = other RNA
attgtttacagtagccaaagg

SEQ ID NO: 74744 - RNA, 21 nt, synthetic construct
  source 1..21: mol_type = other RNA
attgtttcacttttctggttt

SEQ ID NO: 74745 - RNA, 21 nt, synthetic construct
  source 1..21: mol_type = other RNA
attgtttcagtgtgtccacac

SEQ ID NO: 74746 - RNA, 21 nt, synthetic construct
  source 1..21: mol_type = other RNA
attgtttgaggctgggagtac

SEQ ID NO: 74747 - RNA, 21 nt, synthetic construct
  source 1..21: mol_type = other RNA
attgtttgttgggtttaactg

SEQ ID NO: 74748 - RNA, 21 nt, synthetic construct
  source 1..21: mol_type = other RNA
attgttttaggtagtcttgtc

SEQ ID NO: 74749 - RNA, 21 nt, synthetic construct
  source 1..21: mol_type = other RNA
attgttttcccttttgtagct

SEQ ID NO: 74750 - RNA, 21 nt, synthetic construct
  source 1..21: mol_type = other RNA
attgttttgttgctattgttg

SEQ ID NO: 74751 - RNA, 21 nt, synthetic construct
  source 1..21: mol_type = other RNA
atttaaaagaaaatggccaag

SEQ ID NO: 74752 - RNA, 21 nt, synthetic construct
  source 1..21: mol_type = other RNA
atttaaaagaacctctggaaa

SEQ ID NO: 74753 - RNA, 21 nt, synthetic construct
  source 1..21: mol_type = other RNA
atttaaaatctgattcagtgg

SEQ ID NO: 74754 - RNA, 21 nt, synthetic construct
  source 1..21: mol_type = other RNA
atttaaaattgcagagtgttc

SEQ ID NO: 74755 - RNA, 21 nt, synthetic construct
  source 1..21: mol_type = other RNA
atttaaacgtcagagcagcac

SEQ ID NO: 74756 - RNA, 21 nt, synthetic construct
  source 1..21: mol_type = other RNA
atttaaagacgttcagataac

SEQ ID NO: 74757 - RNA, 21 nt, synthetic construct
  source 1..21: mol_type = other RNA
atttaaagtaggttgagactt

SEQ ID NO: 74758 - RNA, 21 nt, synthetic construct
  source 1..21: mol_type = other RNA
atttaaagttagtgaagcaga

SEQ ID NO: 74759 - RNA, 21 nt, synthetic construct
  source 1..21: mol_type = other RNA
atttaacaccatggcaggttt

SEQ ID NO: 74760 - RNA, 21 nt, synthetic construct
  source 1..21: mol_type = other RNA
atttaacttctaatgcccatt

SEQ ID NO: 74761 - RNA, 21 nt, synthetic construct
  source 1..21: mol_type = other RNA
atttaagaagggaacactaag

SEQ ID NO: 74762 - RNA, 21 nt, synthetic construct
  source 1..21: mol_type = other RNA
atttaagacacaaggaaggtc

SEQ ID NO: 74763 - RNA, 21 nt, synthetic construct
  source 1..21: mol_type = other RNA
atttaagagaggaagtgaccc

SEQ ID NO: 74764 - RNA, 21 nt, synthetic construct
  source 1..21: mol_type = other RNA
atttaaggaccaggtatggcg

SEQ ID NO: 74765 - RNA, 21 nt, synthetic construct
  source 1..21: mol_type = other RNA
atttaaggggtaaatggtttc

SEQ ID NO: 74766 - RNA, 21 nt, synthetic construct
  source 1..21: mol_type = other RNA
atttaatactatgtatgtggc

SEQ ID NO: 74767 - RNA, 21 nt, synthetic construct
  source 1..21: mol_type = other RNA
atttaatagaggtctgtcttt

SEQ ID NO: 74768 - RNA, 21 nt, synthetic construct
  source 1..21: mol_type = other RNA
atttaatatgtgtacaatggg

SEQ ID NO: 74769 - RNA, 21 nt, synthetic construct
  source 1..21: mol_type = other RNA
atttaatctctcttgacctta

SEQ ID NO: 74770 - RNA, 21 nt, synthetic construct
  source 1..21: mol_type = other RNA
atttaatctgtcagcagttca

SEQ ID NO: 74771 - RNA, 21 nt, synthetic construct
  source 1..21: mol_type = other RNA
atttaatgagtagtacttctg

SEQ ID NO: 74772 - RNA, 21 nt, synthetic construct
  source 1..21: mol_type = other RNA
atttaatgtgctgtccatttc

SEQ ID NO: 74773 - RNA, 21 nt, synthetic construct
  source 1..21: mol_type = other RNA
atttaattttctgactctgtg

SEQ ID NO: 74774 - RNA, 21 nt, synthetic construct
  source 1..21: mol_type = other RNA
atttaattttgagagtgcagt

SEQ ID NO: 74775 - RNA, 21 nt, synthetic construct
  source 1..21: mol_type = other RNA
atttacaaaaacacactgagc

SEQ ID NO: 74776 - RNA, 21 nt, synthetic construct
  source 1..21: mol_type = other RNA
atttacatagtgctcttctga

SEQ ID NO: 74777 - RNA, 21 nt, synthetic construct
  source 1..21: mol_type = other RNA
atttaccatctgacatatgtt

SEQ ID NO: 74778 - RNA, 21 nt, synthetic construct
  source 1..21: mol_type = other RNA
atttacccctactttttgtca

SEQ ID NO: 74779 - RNA, 21 nt, synthetic construct
  source 1..21: mol_type = other RNA
atttaccccttaaattccaaa

SEQ ID NO: 74780 - RNA, 21 nt, synthetic construct
  source 1..21: mol_type = other RNA
atttactaaactgaacgaagt

SEQ ID NO: 74781 - RNA, 21 nt, synthetic construct
  source 1..21: mol_type = other RNA
atttactaagaagtgaaactg

SEQ ID NO: 74782 - RNA, 21 nt, synthetic construct
  source 1..21: mol_type = other RNA
atttactagatcaagcccttc

SEQ ID NO: 74783 - RNA, 21 nt, synthetic construct
  source 1..21: mol_type = other RNA
atttactgaaatcctagcccc

SEQ ID NO: 74784 - RNA, 21 nt, synthetic construct
  source 1..21: mol_type = other RNA
atttactgcttgctgcactgg

SEQ ID NO: 74785 - RNA, 21 nt, synthetic construct
  source 1..21: mol_type = other RNA
atttacttctacagaatgttc

SEQ ID NO: 74786 - RNA, 21 nt, synthetic construct
  source 1..21: mol_type = other RNA
atttacttgtcatttctgctt

SEQ ID NO: 74787 - RNA, 21 nt, synthetic construct
  source 1..21: mol_type = other RNA
atttagaaatacctgcaggtt

SEQ ID NO: 74788 - RNA, 21 nt, synthetic construct
  source 1..21: mol_type = other RNA
atttagaattctctctcaact

SEQ ID NO: 74789 - RNA, 21 nt, synthetic construct
  source 1..21: mol_type = other RNA
atttagagggatgaatgttgt

SEQ ID NO: 74790 - RNA, 21 nt, synthetic construct
  source 1..21: mol_type = other RNA
atttagagtttgcattacatg

SEQ ID NO: 74791 - RNA, 21 nt, synthetic construct
  source 1..21: mol_type = other RNA
atttagatctcatgttaagtg

SEQ ID NO: 74792 - RNA, 21 nt, synthetic construct
  source 1..21: mol_type = other RNA
atttagatgagagtggcctaa

SEQ ID NO: 74793 - RNA, 21 nt, synthetic construct
  source 1..21: mol_type = other RNA
atttagcccatgtctaaagta

SEQ ID NO: 74794 - RNA, 21 nt, synthetic construct
  source 1..21: mol_type = other RNA
atttagccccctgaatacccc

SEQ ID NO: 74795 - RNA, 21 nt, synthetic construct
  source 1..21: mol_type = other RNA
atttagcgttcatccaaatta

SEQ ID NO: 74796 - RNA, 21 nt, synthetic construct
  source 1..21: mol_type = other RNA
atttagcttctgaattgagat

SEQ ID NO: 74797 - RNA, 21 nt, synthetic construct
  source 1..21: mol_type = other RNA
atttaggccactctcatctaa

SEQ ID NO: 74798 - RNA, 21 nt, synthetic construct
  source 1..21: mol_type = other RNA
atttaggccctctataattct

SEQ ID NO: 74799 - RNA, 21 nt, synthetic construct
  source 1..21: mol_type = other RNA
atttagggagcatatatactc

SEQ ID NO: 74800 - RNA, 21 nt, synthetic construct
  source 1..21: mol_type = other RNA
atttagtaagggtaaacagaa

SEQ ID NO: 74801 - RNA, 21 nt, synthetic construct
  source 1..21: mol_type = other RNA
atttagtaagtgtgagcaaaa

SEQ ID NO: 74802 - RNA, 21 nt, synthetic construct
  source 1..21: mol_type = other RNA
atttagtgaaatagttggtca

SEQ ID NO: 74803 - RNA, 21 nt, synthetic construct
  source 1..21: mol_type = other RNA
atttagtgtattgtaccttga

SEQ ID NO: 74804 - RNA, 21 nt, synthetic construct
  source 1..21: mol_type = other RNA
atttagtttcatctatgtccc

SEQ ID NO: 74805 - RNA, 21 nt, synthetic construct
  source 1..21: mol_type = other RNA
atttataatccattgggtaca

SEQ ID NO: 74806 - RNA, 21 nt, synthetic construct
  source 1..21: mol_type = other RNA
atttatacaaataactccagc

SEQ ID NO: 74807 - RNA, 21 nt, synthetic construct
  source 1..21: mol_type = other RNA
atttatacaggtgcttacaga

SEQ ID NO: 74808 - RNA, 21 nt, synthetic construct
  source 1..21: mol_type = other RNA
atttatacagttggaactctt

SEQ ID NO: 74809 - RNA, 21 nt, synthetic construct
  source 1..21: mol_type = other RNA
atttatacccaagtaaacaac

SEQ ID NO: 74810 - RNA, 21 nt, synthetic construct
  source 1..21: mol_type = other RNA
atttatagtgtttccttccag

SEQ ID NO: 74811 - RNA, 21 nt, synthetic construct
  source 1..21: mol_type = other RNA
atttatcaatagcagtgctga

SEQ ID NO: 74812 - RNA, 21 nt, synthetic construct
  source 1..21: mol_type = other RNA
atttatcagatcccaattact

SEQ ID NO: 74813 - RNA, 21 nt, synthetic construct
  source 1..21: mol_type = other RNA
atttatcagcaccaaagatta

SEQ ID NO: 74814 - RNA, 21 nt, synthetic construct
  source 1..21: mol_type = other RNA
atttatcatgtcttcttggat

SEQ ID NO: 74815 - RNA, 21 nt, synthetic construct
  source 1..21: mol_type = other RNA
atttatctccataagtcccta

SEQ ID NO: 74816 - RNA, 21 nt, synthetic construct
  source 1..21: mol_type = other RNA
atttatgctgatgaactacac

SEQ ID NO: 74817 - RNA, 21 nt, synthetic construct
  source 1..21: mol_type = other RNA
atttatggaattgccatatgt

SEQ ID NO: 74818 - RNA, 21 nt, synthetic construct
  source 1..21: mol_type = other RNA
atttatggcctaagatggaaa

SEQ ID NO: 74819 - RNA, 21 nt, synthetic construct
  source 1..21: mol_type = other RNA
atttatgtacatgacctatct

SEQ ID NO: 74820 - RNA, 21 nt, synthetic construct
  source 1..21: mol_type = other RNA
atttatgttcatgaaccttca

SEQ ID NO: 74821 - RNA, 21 nt, synthetic construct
  source 1..21: mol_type = other RNA
atttatgttgcacaaaagtga

SEQ ID NO: 74822 - RNA, 21 nt, synthetic construct
  source 1..21: mol_type = other RNA
atttattaaagtagaaggccc

SEQ ID NO: 74823 - RNA, 21 nt, synthetic construct
  source 1..21: mol_type = other RNA
atttattagtagttaggtggt

SEQ ID NO: 74824 - RNA, 21 nt, synthetic construct
  source 1..21: mol_type = other RNA
atttattcctctcttggaatg

SEQ ID NO: 74825 - RNA, 21 nt, synthetic construct
  source 1..21: mol_type = other RNA
atttattgtcaaggtcatcct

SEQ ID NO: 74826 - RNA, 21 nt, synthetic construct
  source 1..21: mol_type = other RNA
atttatttctgggctctctat

SEQ ID NO: 74827 - RNA, 21 nt, synthetic construct
  source 1..21: mol_type = other RNA
atttatttttacccgtggaaa

SEQ ID NO: 74828 - RNA, 21 nt, synthetic construct
  source 1..21: mol_type = other RNA
atttatttttgagacaggttg

SEQ ID NO: 74829 - RNA, 21 nt, synthetic construct
  source 1..21: mol_type = other RNA
atttcaaaccaatgttctctt

SEQ ID NO: 74830 - RNA, 21 nt, synthetic construct
  source 1..21: mol_type = other RNA
atttcaaagttaatagcctcc

SEQ ID NO: 74831 - RNA, 21 nt, synthetic construct
  source 1..21: mol_type = other RNA
atttcaagtaacactcagaag

SEQ ID NO: 74832 - RNA, 21 nt, synthetic construct
  source 1..21: mol_type = other RNA
atttcaatctggaatgcatcg

SEQ ID NO: 74833 - RNA, 21 nt, synthetic construct
  source 1..21: mol_type = other RNA
atttcacttacttgagcccca

SEQ ID NO: 74834 - RNA, 21 nt, synthetic construct
  source 1..21: mol_type = other RNA
atttcacttgtttcttttcac

SEQ ID NO: 74835 - RNA, 21 nt, synthetic construct
  source 1..21: mol_type = other RNA
atttcagaaagagaatagcag

SEQ ID NO: 74836 - RNA, 21 nt, synthetic construct
  source 1..21: mol_type = other RNA
atttcagagagacctgaagac

SEQ ID NO: 74837 - RNA, 21 nt, synthetic construct
  source 1..21: mol_type = other RNA
atttcagatctctgacattgg

SEQ ID NO: 74838 - RNA, 21 nt, synthetic construct
  source 1..21: mol_type = other RNA
atttcagccaaagctggcatg

SEQ ID NO: 74839 - RNA, 21 nt, synthetic construct
  source 1..21: mol_type = other RNA
atttcaggaatgcaaagtttc

SEQ ID NO: 74840 - RNA, 21 nt, synthetic construct
  source 1..21: mol_type = other RNA
atttcagggagaattggtagt

SEQ ID NO: 74841 - RNA, 21 nt, synthetic construct
  source 1..21: mol_type = other RNA
atttcaggtggtatttaatct

SEQ ID NO: 74842 - RNA, 21 nt, synthetic construct
  source 1..21: mol_type = other RNA
atttcaggtgtgtaaacactg

SEQ ID NO: 74843 - RNA, 21 nt, synthetic construct
  source 1..21: mol_type = other RNA
atttcaggttttcgaccaagt

SEQ ID NO: 74844 - RNA, 21 nt, synthetic construct
  source 1..21: mol_type = other RNA
atttcatagcagaatggccct

SEQ ID NO: 74845 - RNA, 21 nt, synthetic construct
  source 1..21: mol_type = other RNA
atttcataggcatctctccct

SEQ ID NO: 74846 - RNA, 21 nt, synthetic construct
  source 1..21: mol_type = other RNA
atttcatcgtaaaaagccatt

SEQ ID NO: 74847 - RNA, 21 nt, synthetic construct
  source 1..21: mol_type = other RNA
atttcatgccatcctggattt

SEQ ID NO: 74848 - RNA, 21 nt, synthetic construct
  source 1..21: mol_type = other RNA
atttcatgcctttcagcatag

SEQ ID NO: 74849 - RNA, 21 nt, synthetic construct
  source 1..21: mol_type = other RNA
atttcattaggttgatggctg

SEQ ID NO: 74850 - RNA, 21 nt, synthetic construct
  source 1..21: mol_type = other RNA
atttccaaagatcatgggttt

SEQ ID NO: 74851 - RNA, 21 nt, synthetic construct
  source 1..21: mol_type = other RNA
atttccaagaaccctttgtta

SEQ ID NO: 74852 - RNA, 21 nt, synthetic construct
  source 1..21: mol_type = other RNA
atttccaagattgaaaatggt

SEQ ID NO: 74853 - RNA, 21 nt, synthetic construct
  source 1..21: mol_type = other RNA
atttccacccatgaagccagc

SEQ ID NO: 74854 - RNA, 21 nt, synthetic construct
  source 1..21: mol_type = other RNA
atttccacgggtaaaaataaa

SEQ ID NO: 74855 - RNA, 21 nt, synthetic construct
  source 1..21: mol_type = other RNA
atttccagcattttataggca

SEQ ID NO: 74856 - RNA, 21 nt, synthetic construct
  source 1..21: mol_type = other RNA
atttccagcctttaatttagc

SEQ ID NO: 74857 - RNA, 21 nt, synthetic construct
  source 1..21: mol_type = other RNA
atttccagggggtatggagac

SEQ ID NO: 74858 - RNA, 21 nt, synthetic construct
  source 1..21: mol_type = other RNA
atttccaggtcattacatatt

SEQ ID NO: 74859 - RNA, 21 nt, synthetic construct
  source 1..21: mol_type = other RNA
atttccagtactttttcatcc

SEQ ID NO: 74860 - RNA, 21 nt, synthetic construct
  source 1..21: mol_type = other RNA
atttccagtgtttggttttta

SEQ ID NO: 74861 - RNA, 21 nt, synthetic construct
  source 1..21: mol_type = other RNA
atttcccatttgatttcttct

SEQ ID NO: 74862 - RNA, 21 nt, synthetic construct
  source 1..21: mol_type = other RNA
atttccccattagagtaagca

SEQ ID NO: 74863 - RNA, 21 nt, synthetic construct
  source 1..21: mol_type = other RNA
atttccctcagaatttgaggt

SEQ ID NO: 74864 - RNA, 21 nt, synthetic construct
  source 1..21: mol_type = other RNA
atttccctgcatacactcatt

SEQ ID NO: 74865 - RNA, 21 nt, synthetic construct
  source 1..21: mol_type = other RNA
atttccctgcttcatctggac

SEQ ID NO: 74866 - RNA, 21 nt, synthetic construct
  source 1..21: mol_type = other RNA
atttcccttttggatgcagat

SEQ ID NO: 74867 - RNA, 21 nt, synthetic construct
  source 1..21: mol_type = other RNA
atttccgatgataccttcttg

SEQ ID NO: 74868 - RNA, 21 nt, synthetic construct
  source 1..21: mol_type = other RNA
atttccgtatccagtggtttt

SEQ ID NO: 74869 - RNA, 21 nt, synthetic construct
  source 1..21: mol_type = other RNA
atttccgttgctgcatagtac

SEQ ID NO: 74870 - RNA, 21 nt, synthetic construct
  source 1..21: mol_type = other RNA
atttccttaagcacagactgt

SEQ ID NO: 74871 - RNA, 21 nt, synthetic construct
  source 1..21: mol_type = other RNA
atttccttaagccatttcagg

SEQ ID NO: 74872 - RNA, 21 nt, synthetic construct
  source 1..21: mol_type = other RNA
atttccttatagtattacctc

SEQ ID NO: 74873 - RNA, 21 nt, synthetic construct
  source 1..21: mol_type = other RNA
atttccttccagtttatatgc

SEQ ID NO: 74874 - RNA, 21 nt, synthetic construct
  source 1..21: mol_type = other RNA
atttcctttcagtcggttctt

SEQ ID NO: 74875 - RNA, 21 nt, synthetic construct
  source 1..21: mol_type = other RNA
atttcgaattatgctaacatg

SEQ ID NO: 74876 - RNA, 21 nt, synthetic construct
  source 1..21: mol_type = other RNA
atttcgcaaagcaacatgcta

SEQ ID NO: 74877 - RNA, 21 nt, synthetic construct
  source 1..21: mol_type = other RNA
atttcgcctagataagaaaat

SEQ ID NO: 74878 - RNA, 21 nt, synthetic construct
  source 1..21: mol_type = other RNA
atttcgccttctcagaaggac

SEQ ID NO: 74879 - RNA, 21 nt, synthetic construct
  source 1..21: mol_type = other RNA
atttcggctctgtgctgagat

SEQ ID NO: 74880 - RNA, 21 nt, synthetic construct
  source 1..21: mol_type = other RNA
atttctaaaaacgtgcaaact

SEQ ID NO: 74881 - RNA, 21 nt, synthetic construct
  source 1..21: mol_type = other RNA
atttctaaatcaacagtgtac

SEQ ID NO: 74882 - RNA, 21 nt, synthetic construct
  source 1..21: mol_type = other RNA
atttctaagccatgtttctcc

SEQ ID NO: 74883 - RNA, 21 nt, synthetic construct
  source 1..21: mol_type = other RNA
atttctaaggttctgctatgc

SEQ ID NO: 74884 - RNA, 21 nt, synthetic construct
  source 1..21: mol_type = other RNA
atttctaatttccaagaaccc

SEQ ID NO: 74885 - RNA, 21 nt, synthetic construct
  source 1..21: mol_type = other RNA
atttctactggggtcttagtt

SEQ ID NO: 74886 - RNA, 21 nt, synthetic construct
  source 1..21: mol_type = other RNA
atttctaggccctaaccccag

SEQ ID NO: 74887 - RNA, 21 nt, synthetic construct
  source 1..21: mol_type = other RNA
atttctatagtcattccgcta

SEQ ID NO: 74888 - RNA, 21 nt, synthetic construct
  source 1..21: mol_type = other RNA
atttctcatactttgtcaggc

SEQ ID NO: 74889 - RNA, 21 nt, synthetic construct
  source 1..21: mol_type = other RNA
atttctcatctgtcactttcc

SEQ ID NO: 74890 - RNA, 21 nt, synthetic construct
  source 1..21: mol_type = other RNA
atttctcatgtatgttttagc

SEQ ID NO: 74891 - RNA, 21 nt, synthetic construct
  source 1..21: mol_type = other RNA
atttctcggccgggcgcggtg

SEQ ID NO: 74892 - RNA, 21 nt, synthetic construct
  source 1..21: mol_type = other RNA
atttctctaatagctagtgat

SEQ ID NO: 74893 - RNA, 21 nt, synthetic construct
  source 1..21: mol_type = other RNA
atttctctttaaagctgaact

SEQ ID NO: 74894 - RNA, 21 nt, synthetic construct
  source 1..21: mol_type = other RNA
atttctgagagtattgccagg

SEQ ID NO: 74895 - RNA, 21 nt, synthetic construct
  source 1..21: mol_type = other RNA
atttctgcatagagatcttgt

SEQ ID NO: 74896 - RNA, 21 nt, synthetic construct
  source 1..21: mol_type = other RNA
atttctgcttagtcttctcag

SEQ ID NO: 74897 - RNA, 21 nt, synthetic construct
  source 1..21: mol_type = other RNA
atttctgcttgaatgtgccta

SEQ ID NO: 74898 - RNA, 21 nt, synthetic construct
  source 1..21: mol_type = other RNA
atttctgggctctctattcca

SEQ ID NO: 74899 - RNA, 21 nt, synthetic construct
  source 1..21: mol_type = other RNA
atttctgtaaacatgaacaag

SEQ ID NO: 74900 - RNA, 21 nt, synthetic construct
  source 1..21: mol_type = other RNA
atttctgtatcttttcagtcc

SEQ ID NO: 74901 - RNA, 21 nt, synthetic construct
  source 1..21: mol_type = other RNA
atttctgtcatctgaatcaat

SEQ ID NO: 74902 - RNA, 21 nt, synthetic construct
  source 1..21: mol_type = other RNA
atttctgtccttggattgcta

SEQ ID NO: 74903 - RNA, 21 nt, synthetic construct
  source 1..21: mol_type = other RNA
atttctgttagatggtgctga

SEQ ID NO: 74904 - RNA, 21 nt, synthetic construct
  source 1..21: mol_type = other RNA
atttctgttgcttaagtcact

SEQ ID NO: 74905 - RNA, 21 nt, synthetic construct
  source 1..21: mol_type = other RNA
atttcttacacattaggctct

SEQ ID NO: 74906 - RNA, 21 nt, synthetic construct
  source 1..21: mol_type = other RNA
atttcttctagtcacatttgc

SEQ ID NO: 74907 - RNA, 21 nt, synthetic construct
  source 1..21: mol_type = other RNA
atttcttctccctcttcgctc

SEQ ID NO: 74908 - RNA, 21 nt, synthetic construct
  source 1..21: mol_type = other RNA
atttcttctttggctcaatgg

SEQ ID NO: 74909 - RNA, 21 nt, synthetic construct
  source 1..21: mol_type = other RNA
atttcttgacctcagtggtag

SEQ ID NO: 74910 - RNA, 21 nt, synthetic construct
  source 1..21: mol_type = other RNA
atttctttaaaaccagagcgg

SEQ ID NO: 74911 - RNA, 21 nt, synthetic construct
  source 1..21: mol_type = other RNA
atttctttccattcaatcctt

SEQ ID NO: 74912 - RNA, 21 nt, synthetic construct
  source 1..21: mol_type = other RNA
atttctttggctgttagcctt

SEQ ID NO: 74913 - RNA, 21 nt, synthetic construct
  source 1..21: mol_type = other RNA
atttctttttcttgctttgct

SEQ ID NO: 74914 - RNA, 21 nt, synthetic construct
  source 1..21: mol_type = other RNA
atttgaaagaaagaaggccat

SEQ ID NO: 74915 - RNA, 21 nt, synthetic construct
  source 1..21: mol_type = other RNA
atttgaactcactggccagca

SEQ ID NO: 74916 - RNA, 21 nt, synthetic construct
  source 1..21: mol_type = other RNA
atttgaactttccagaagtaa

SEQ ID NO: 74917 - RNA, 21 nt, synthetic construct
  source 1..21: mol_type = other RNA
atttgaataaggtctgtaagt

SEQ ID NO: 74918 - RNA, 21 nt, synthetic construct
  source 1..21: mol_type = other RNA
atttgaatgatgcgaaagaaa

SEQ ID NO: 74919 - RNA, 21 nt, synthetic construct
  source 1..21: mol_type = other RNA
atttgacatgacaggtgagtg

SEQ ID NO: 74920 - RNA, 21 nt, synthetic construct
  source 1..21: mol_type = other RNA
atttgaccatgggacaagtgg

SEQ ID NO: 74921 - RNA, 21 nt, synthetic construct
  source 1..21: mol_type = other RNA
atttgaccttccttgtgtctt

SEQ ID NO: 74922 - RNA, 21 nt, synthetic construct
  source 1..21: mol_type = other RNA
atttgagaatttcaggtgtgt

SEQ ID NO: 74923 - RNA, 21 nt, synthetic construct
  source 1..21: mol_type = other RNA
atttgagagtaagttgcatac

SEQ ID NO: 74924 - RNA, 21 nt, synthetic construct
  source 1..21: mol_type = other RNA
atttgagcccaggaggttgaa

SEQ ID NO: 74925 - RNA, 21 nt, synthetic construct
  source 1..21: mol_type = other RNA
atttgaggcattagtgaattc

SEQ ID NO: 74926 - RNA, 21 nt, synthetic construct
  source 1..21: mol_type = other RNA
atttgaggccctattcaacct

SEQ ID NO: 74927 - RNA, 21 nt, synthetic construct
  source 1..21: mol_type = other RNA
atttgagggtgctgatcagga

SEQ ID NO: 74928 - RNA, 21 nt, synthetic construct
  source 1..21: mol_type = other RNA
atttgagggttagaagacaat

SEQ ID NO: 74929 - RNA, 21 nt, synthetic construct
  source 1..21: mol_type = other RNA
atttgaggtagcacaactagt

SEQ ID NO: 74930 - RNA, 21 nt, synthetic construct
  source 1..21: mol_type = other RNA
atttgaggtctaggctaatgt

SEQ ID NO: 74931 - RNA, 21 nt, synthetic construct
  source 1..21: mol_type = other RNA
atttgaggtcttctagctttc

SEQ ID NO: 74932 - RNA, 21 nt, synthetic construct
  source 1..21: mol_type = other RNA
atttgagtcttgctctcttgc

SEQ ID NO: 74933 - RNA, 21 nt, synthetic construct
  source 1..21: mol_type = other RNA
atttgatcctggaatagtagc

SEQ ID NO: 74934 - RNA, 21 nt, synthetic construct
  source 1..21: mol_type = other RNA
atttgattgccagttttctgg

SEQ ID NO: 74935 - RNA, 21 nt, synthetic construct
  source 1..21: mol_type = other RNA
atttgattgggcattaattga

SEQ ID NO: 74936 - RNA, 21 nt, synthetic construct
  source 1..21: mol_type = other RNA
atttgattgttagccacagcg

SEQ ID NO: 74937 - RNA, 21 nt, synthetic construct
  source 1..21: mol_type = other RNA
atttgatttcttctttggctc

SEQ ID NO: 74938 - RNA, 21 nt, synthetic construct
  source 1..21: mol_type = other RNA
atttgcagagcaaactcagat

SEQ ID NO: 74939 - RNA, 21 nt, synthetic construct
  source 1..21: mol_type = other RNA
atttgcagtagtattgaactg

SEQ ID NO: 74940 - RNA, 21 nt, synthetic construct
  source 1..21: mol_type = other RNA
atttgcatttctctaatagct

SEQ ID NO: 74941 - RNA, 21 nt, synthetic construct
  source 1..21: mol_type = other RNA
atttgccaaaatgattttcac

SEQ ID NO: 74942 - RNA, 21 nt, synthetic construct
  source 1..21: mol_type = other RNA
atttgccaatcaataattctg

SEQ ID NO: 74943 - RNA, 21 nt, synthetic construct
  source 1..21: mol_type = other RNA
atttgccacattttaccaaaa

SEQ ID NO: 74944 - RNA, 21 nt, synthetic construct
  source 1..21: mol_type = other RNA
atttgcctattctggggctca

SEQ ID NO: 74945 - RNA, 21 nt, synthetic construct
  source 1..21: mol_type = other RNA
atttgcggcttgattagcttc

SEQ ID NO: 74946 - RNA, 21 nt, synthetic construct
  source 1..21: mol_type = other RNA
atttgctggctcagtctgttt

SEQ ID NO: 74947 - RNA, 21 nt, synthetic construct
  source 1..21: mol_type = other RNA
atttgctgtcaggcaagggac

SEQ ID NO: 74948 - RNA, 21 nt, synthetic construct
  source 1..21: mol_type = other RNA
atttgcttaggctgttattag

SEQ ID NO: 74949 - RNA, 21 nt, synthetic construct
  source 1..21: mol_type = other RNA
atttgctttactactgcattt

SEQ ID NO: 74950 - RNA, 21 nt, synthetic construct
  source 1..21: mol_type = other RNA
atttgcttttcctggaaaact

SEQ ID NO: 74951 - RNA, 21 nt, synthetic construct
  source 1..21: mol_type = other RNA
atttggaaagggtagagcact

SEQ ID NO: 74952 - RNA, 21 nt, synthetic construct
  source 1..21: mol_type = other RNA
atttggaaatatggtcactgc

SEQ ID NO: 74953 - RNA, 21 nt, synthetic construct
  source 1..21: mol_type = other RNA
atttggaagagagaaggctgc

SEQ ID NO: 74954 - RNA, 21 nt, synthetic construct
  source 1..21: mol_type = other RNA
atttggaatagagagcccaga

SEQ ID NO: 74955 - RNA, 21 nt, synthetic construct
  source 1..21: mol_type = other RNA
atttggaattaaaatgttgcc

SEQ ID NO: 74956 - RNA, 21 nt, synthetic construct
  source 1..21: mol_type = other RNA
atttggatgaacgctaaatta

SEQ ID NO: 74957 - RNA, 21 nt, synthetic construct
  source 1..21: mol_type = other RNA
atttggcaaaaaatgcagtag

SEQ ID NO: 74958 - RNA, 21 nt, synthetic construct
  source 1..21: mol_type = other RNA
atttggccagaatccctttcg

SEQ ID NO: 74959 - RNA, 21 nt, synthetic construct
  source 1..21: mol_type = other RNA
atttggcccagccatcccatt

SEQ ID NO: 74960 - RNA, 21 nt, synthetic construct
  source 1..21: mol_type = other RNA
atttggcctctgcggcggctg

SEQ ID NO: 74961 - RNA, 21 nt, synthetic construct
  source 1..21: mol_type = other RNA
atttggctgttaccatttgac

SEQ ID NO: 74962 - RNA, 21 nt, synthetic construct
  source 1..21: mol_type = other RNA
atttggcttggggaacagttt

SEQ ID NO: 74963 - RNA, 21 nt, synthetic construct
  source 1..21: mol_type = other RNA
atttgggaaggatggccagtc

SEQ ID NO: 74964 - RNA, 21 nt, synthetic construct
  source 1..21: mol_type = other RNA
atttgggaatgtggtcacact

SEQ ID NO: 74965 - RNA, 21 nt, synthetic construct
  source 1..21: mol_type = other RNA
atttgggacagcctagttttg

SEQ ID NO: 74966 - RNA, 21 nt, synthetic construct
  source 1..21: mol_type = other RNA
atttgggactgagacagtatt

SEQ ID NO: 74967 - RNA, 21 nt, synthetic construct
  source 1..21: mol_type = other RNA
atttgggatatagctacaatg

SEQ ID NO: 74968 - RNA, 21 nt, synthetic construct
  source 1..21: mol_type = other RNA
atttggggattctgctactag

SEQ ID NO: 74969 - RNA, 21 nt, synthetic construct
  source 1..21: mol_type = other RNA
atttggggctaggatttcagt

SEQ ID NO: 74970 - RNA, 21 nt, synthetic construct
  source 1..21: mol_type = other RNA
atttgggtttgagtttccaga

SEQ ID NO: 74971 - RNA, 21 nt, synthetic construct
  source 1..21: mol_type = other RNA
atttggtattcttatccctac

SEQ ID NO: 74972 - RNA, 21 nt, synthetic construct
  source 1..21: mol_type = other RNA
atttggtctcattcactagac

SEQ ID NO: 74973 - RNA, 21 nt, synthetic construct
  source 1..21: mol_type = other RNA
atttggtgtgtgcaaaggatt

SEQ ID NO: 74974 - RNA, 21 nt, synthetic construct
  source 1..21: mol_type = other RNA
atttggttatgcgaatttact

SEQ ID NO: 74975 - RNA, 21 nt, synthetic construct
  source 1..21: mol_type = other RNA
atttggttttactactgtact

SEQ ID NO: 74976 - RNA, 21 nt, synthetic construct
  source 1..21: mol_type = other RNA
atttgtaattcatcctactag

SEQ ID NO: 74977 - RNA, 21 nt, synthetic construct
  source 1..21: mol_type = other RNA
atttgtcaacttttagtaggt

SEQ ID NO: 74978 - RNA, 21 nt, synthetic construct
  source 1..21: mol_type = other RNA
atttgtccatctggattatag

SEQ ID NO: 74979 - RNA, 21 nt, synthetic construct
  source 1..21: mol_type = other RNA
atttgtgaaccttgaagtact

SEQ ID NO: 74980 - RNA, 21 nt, synthetic construct
  source 1..21: mol_type = other RNA
atttgtgcatactgtgatgat

SEQ ID NO: 74981 - RNA, 21 nt, synthetic construct
  source 1..21: mol_type = other RNA
atttgtggcatctttgttaca

SEQ ID NO: 74982 - RNA, 21 nt, synthetic construct
  source 1..21: mol_type = other RNA
atttgttactgatctgctcaa

SEQ ID NO: 74983 - RNA, 21 nt, synthetic construct
  source 1..21: mol_type = other RNA
atttgttcaagcgctgaagta

SEQ ID NO: 74984 - RNA, 21 nt, synthetic construct
  source 1..21: mol_type = other RNA
atttgttcagaaatagactcc

SEQ ID NO: 74985 - RNA, 21 nt, synthetic construct
  source 1..21: mol_type = other RNA
atttgttctaatttgtgaacc

SEQ ID NO: 74986 - RNA, 21 nt, synthetic construct
  source 1..21: mol_type = other RNA
atttgttctgtcacggtgccc

SEQ ID NO: 74987 - RNA, 21 nt, synthetic construct
  source 1..21: mol_type = other RNA
atttgttgcatccccattcaa

SEQ ID NO: 74988 - RNA, 21 nt, synthetic construct
  source 1..21: mol_type = other RNA
atttgtttagtagctgtcttt

SEQ ID NO: 74989 - RNA, 21 nt, synthetic construct
  source 1..21: mol_type = other RNA
atttgtttgaattaagcacca

SEQ ID NO: 74990 - RNA, 21 nt, synthetic construct
  source 1..21: mol_type = other RNA
atttgttttaccatctaaagc

SEQ ID NO: 74991 - RNA, 21 nt, synthetic construct
  source 1..21: mol_type = other RNA
atttgttttccaagccttaaa

SEQ ID NO: 74992 - RNA, 21 nt, synthetic construct
  source 1..21: mol_type = other RNA
atttgttttgtgtttgtgacc

SEQ ID NO: 74993 - RNA, 21 nt, synthetic construct
  source 1..21: mol_type = other RNA
attttaaaagtcagctaggcg

SEQ ID NO: 74994 - RNA, 21 nt, synthetic construct
  source 1..21: mol_type = other RNA
attttaaatcagcaccatcta

SEQ ID NO: 74995 - RNA, 21 nt, synthetic construct
  source 1..21: mol_type = other RNA
attttaagattctctttaggg

SEQ ID NO: 74996 - RNA, 21 nt, synthetic construct
  source 1..21: mol_type = other RNA
attttaagcctagagattagg

SEQ ID NO: 74997 - RNA, 21 nt, synthetic construct
  source 1..21: mol_type = other RNA
attttaagtgcacaatgcagt

SEQ ID NO: 74998 - RNA, 21 nt, synthetic construct
  source 1..21: mol_type = other RNA
attttaagttctagggaacat

SEQ ID NO: 74999 - RNA, 21 nt, synthetic construct
  source 1..21: mol_type = other RNA
attttaataagcttcgaagca

SEQ ID NO: 75000 - RNA, 21 nt, synthetic construct
  source 1..21: mol_type = other RNA
attttaatcgaatcctcacaa

SEQ ID NO: 75001 - RNA, 21 nt, synthetic construct
  source 1..21: mol_type = other RNA
attttaatctgtcctgaatac

SEQ ID NO: 75002 - RNA, 21 nt, synthetic construct
  source 1..21: mol_type = other RNA
attttacaccatgcaggttca

SEQ ID NO: 75003 - RNA, 21 nt, synthetic construct
  source 1..21: mol_type = other RNA
attttaccaaaacagcttctt

SEQ ID NO: 75004 - RNA, 21 nt, synthetic construct
  source 1..21: mol_type = other RNA
attttaccaaggctaagttga

SEQ ID NO: 75005 - RNA, 21 nt, synthetic construct
  source 1..21: mol_type = other RNA
attttactgatcttttctgac

SEQ ID NO: 75006 - RNA, 21 nt, synthetic construct
  source 1..21: mol_type = other RNA
attttactgctatacaaccgg

SEQ ID NO: 75007 - RNA, 21 nt, synthetic construct
  source 1..21: mol_type = other RNA
attttacttactagttgtgct

SEQ ID NO: 75008 - RNA, 21 nt, synthetic construct
  source 1..21: mol_type = other RNA
attttagaaggtaagaatgtc

SEQ ID NO: 75009 - RNA, 21 nt, synthetic construct
  source 1..21: mol_type = other RNA
attttagatcaagtcctttcc

SEQ ID NO: 75010 - RNA, 21 nt, synthetic construct
  source 1..21: mol_type = other RNA
attttagctggggcagcaaag

SEQ ID NO: 75011 - RNA, 21 nt, synthetic construct
  source 1..21: mol_type = other RNA
attttaggacaaggaaaggat

SEQ ID NO: 75012 - RNA, 21 nt, synthetic construct
  source 1..21: mol_type = other RNA
attttaggctctgtggtttct

SEQ ID NO: 75013 - RNA, 21 nt, synthetic construct
  source 1..21: mol_type = other RNA
attttataatgggcaatcaga

SEQ ID NO: 75014 - RNA, 21 nt, synthetic construct
  source 1..21: mol_type = other RNA
attttatgctttgtctctgga

SEQ ID NO: 75015 - RNA, 21 nt, synthetic construct
  source 1..21: mol_type = other RNA
attttatggttttttcccccc

SEQ ID NO: 75016 - RNA, 21 nt, synthetic construct
  source 1..21: mol_type = other RNA
attttatgtacacgtcttgtc

SEQ ID NO: 75017 - RNA, 21 nt, synthetic construct
  source 1..21: mol_type = other RNA
attttattaatttggcttggg

SEQ ID NO: 75018 - RNA, 21 nt, synthetic construct
  source 1..21: mol_type = other RNA
attttattaggtgcacacaac

SEQ ID NO: 75019 - RNA, 21 nt, synthetic construct
  source 1..21: mol_type = other RNA
attttattgataagcacatgg

SEQ ID NO: 75020 - RNA, 21 nt, synthetic construct
  source 1..21: mol_type = other RNA
attttcaaggcttgtgcatca

SEQ ID NO: 75021 - RNA, 21 nt, synthetic construct
  source 1..21: mol_type = other RNA
attttcaagggtgttttcccc

SEQ ID NO: 75022 - RNA, 21 nt, synthetic construct
  source 1..21: mol_type = other RNA
attttcaaggtagaagtacaa

SEQ ID NO: 75023 - RNA, 21 nt, synthetic construct
  source 1..21: mol_type = other RNA
attttcacagggcagggagag

SEQ ID NO: 75024 - RNA, 21 nt, synthetic construct
  source 1..21: mol_type = other RNA
attttcaggactcatgagagc

SEQ ID NO: 75025 - RNA, 21 nt, synthetic construct
  source 1..21: mol_type = other RNA
attttcataacaaagctctga

SEQ ID NO: 75026 - RNA, 21 nt, synthetic construct
  source 1..21: mol_type = other RNA
attttcatagcagcattgttt

SEQ ID NO: 75027 - RNA, 21 nt, synthetic construct
  source 1..21: mol_type = other RNA
attttcatggttttaatgggc

SEQ ID NO: 75028 - RNA, 21 nt, synthetic construct
  source 1..21: mol_type = other RNA
attttcattctacctggagcc

SEQ ID NO: 75029 - RNA, 21 nt, synthetic construct
  source 1..21: mol_type = other RNA
attttccattcacacaccctt

SEQ ID NO: 75030 - RNA, 21 nt, synthetic construct
  source 1..21: mol_type = other RNA
attttccattcatgtaatgca

SEQ ID NO: 75031 - RNA, 21 nt, synthetic construct
  source 1..21: mol_type = other RNA
attttcccaaagatagactct

SEQ ID NO: 75032 - RNA, 21 nt, synthetic construct
  source 1..21: mol_type = other RNA
attttcccaatctctggtatt

SEQ ID NO: 75033 - RNA, 21 nt, synthetic construct
  source 1..21: mol_type = other RNA
attttcccccaattaaactat

SEQ ID NO: 75034 - RNA, 21 nt, synthetic construct
  source 1..21: mol_type = other RNA
attttccctcctttttatcac

SEQ ID NO: 75035 - RNA, 21 nt, synthetic construct
  source 1..21: mol_type = other RNA
attttccggttgtatagcagt

SEQ ID NO: 75036 - RNA, 21 nt, synthetic construct
  source 1..21: mol_type = other RNA
attttcctaaaactccccatg

SEQ ID NO: 75037 - RNA, 21 nt, synthetic construct
  source 1..21: mol_type = other RNA
attttcctaaccactgttatc

SEQ ID NO: 75038 - RNA, 21 nt, synthetic construct
  source 1..21: mol_type = other RNA
attttcctccttctgctcact

SEQ ID NO: 75039 - RNA, 21 nt, synthetic construct
  source 1..21: mol_type = other RNA
attttccttatccattcatct

SEQ ID NO: 75040 - RNA, 21 nt, synthetic construct
  source 1..21: mol_type = other RNA
attttcgtgtactgaaaccag

SEQ ID NO: 75041 - RNA, 21 nt, synthetic construct
  source 1..21: mol_type = other RNA
attttctaaattgaacagcct

SEQ ID NO: 75042 - RNA, 21 nt, synthetic construct
  source 1..21: mol_type = other RNA
attttctaagagccaaagaca

SEQ ID NO: 75043 - RNA, 21 nt, synthetic construct
  source 1..21: mol_type = other RNA
attttctaggaaccatattag

SEQ ID NO: 75044 - RNA, 21 nt, synthetic construct
  source 1..21: mol_type = other RNA
attttctatagtggctgcacc

SEQ ID NO: 75045 - RNA, 21 nt, synthetic construct
  source 1..21: mol_type = other RNA
attttctattcattaccaggc

SEQ ID NO: 75046 - RNA, 21 nt, synthetic construct
  source 1..21: mol_type = other RNA
attttctcccaaggttgcctg

SEQ ID NO: 75047 - RNA, 21 nt, synthetic construct
  source 1..21: mol_type = other RNA
attttctctcatgttgggtaa

SEQ ID NO: 75048 - RNA, 21 nt, synthetic construct
  source 1..21: mol_type = other RNA
attttctgactctgtgcttgt

SEQ ID NO: 75049 - RNA, 21 nt, synthetic construct
  source 1..21: mol_type = other RNA
attttctgagcaactactatt

SEQ ID NO: 75050 - RNA, 21 nt, synthetic construct
  source 1..21: mol_type = other RNA
attttctgcatttggtttgca

SEQ ID NO: 75051 - RNA, 21 nt, synthetic construct
  source 1..21: mol_type = other RNA
attttctgcttctcaataagg

SEQ ID NO: 75052 - RNA, 21 nt, synthetic construct
  source 1..21: mol_type = other RNA
attttctgtcattctgcagtt

SEQ ID NO: 75053 - RNA, 21 nt, synthetic construct
  source 1..21: mol_type = other RNA
attttcttaccctttactcag

SEQ ID NO: 75054 - RNA, 21 nt, synthetic construct
  source 1..21: mol_type = other RNA
attttcttatctaggcgaaat

SEQ ID NO: 75055 - RNA, 21 nt, synthetic construct
  source 1..21: mol_type = other RNA
attttctttgagtagttcatg

SEQ ID NO: 75056 - RNA, 21 nt, synthetic construct
  source 1..21: mol_type = other RNA
attttgaaaaacagatcttgg

SEQ ID NO: 75057 - RNA, 21 nt, synthetic construct
  source 1..21: mol_type = other RNA
attttgaagaaagttttgcag

SEQ ID NO: 75058 - RNA, 21 nt, synthetic construct
  source 1..21: mol_type = other RNA
attttgaatcatgggagccaa

SEQ ID NO: 75059 - RNA, 21 nt, synthetic construct
  source 1..21: mol_type = other RNA
attttgagacctcaggcagtc

SEQ ID NO: 75060 - RNA, 21 nt, synthetic construct
  source 1..21: mol_type = other RNA
attttgagagtgcagtatgta

SEQ ID NO: 75061 - RNA, 21 nt, synthetic construct
  source 1..21: mol_type = other RNA
attttgaggcagagagatggt

SEQ ID NO: 75062 - RNA, 21 nt, synthetic construct
  source 1..21: mol_type = other RNA
attttgaggcttttggatttt

SEQ ID NO: 75063 - RNA, 21 nt, synthetic construct
  source 1..21: mol_type = other RNA
attttgagttattgcataggg

SEQ ID NO: 75064 - RNA, 21 nt, synthetic construct
  source 1..21: mol_type = other RNA
attttgccagctaacttttaa

SEQ ID NO: 75065 - RNA, 21 nt, synthetic construct
  source 1..21: mol_type = other RNA
attttgctgccaagtcagcac

SEQ ID NO: 75066 - RNA, 21 nt, synthetic construct
  source 1..21: mol_type = other RNA
attttgcttaaagttggtcct

SEQ ID NO: 75067 - RNA, 21 nt, synthetic construct
  source 1..21: mol_type = other RNA
attttgcttttgctttgggtc

SEQ ID NO: 75068 - RNA, 21 nt, synthetic construct
  source 1..21: mol_type = other RNA
attttggaagactatgagaag

SEQ ID NO: 75069 - RNA, 21 nt, synthetic construct
  source 1..21: mol_type = other RNA
attttggattgcgattgtttc

SEQ ID NO: 75070 - RNA, 21 nt, synthetic construct
  source 1..21: mol_type = other RNA
attttggcaaattgtcagatt

SEQ ID NO: 75071 - RNA, 21 nt, synthetic construct
  source 1..21: mol_type = other RNA
attttggggccatctgaattc

SEQ ID NO: 75072 - RNA, 21 nt, synthetic construct
  source 1..21: mol_type = other RNA
attttggtagagatggggtct

SEQ ID NO: 75073 - RNA, 21 nt, synthetic construct
  source 1..21: mol_type = other RNA
attttggtcttaccctctagc

SEQ ID NO: 75074 - RNA, 21 nt, synthetic construct
  source 1..21: mol_type = other RNA
attttgtaacgtgtatagctt

SEQ ID NO: 75075 - RNA, 21 nt, synthetic construct
  source 1..21: mol_type = other RNA
attttgtatcctgagacttag

SEQ ID NO: 75076 - RNA, 21 nt, synthetic construct
  source 1..21: mol_type = other RNA
attttgtgacaagttcagcat

SEQ ID NO: 75077 - RNA, 21 nt, synthetic construct
  source 1..21: mol_type = other RNA
attttgtgggaattcagtcac

SEQ ID NO: 75078 - RNA, 21 nt, synthetic construct
  source 1..21: mol_type = other RNA
attttgtgtcttctgtttttc

SEQ ID NO: 75079 - RNA, 21 nt, synthetic construct
  source 1..21: mol_type = other RNA
attttgttattagggtaatgc

SEQ ID NO: 75080 - RNA, 21 nt, synthetic construct
  source 1..21: mol_type = other RNA
attttgttcaggagttttgcc

SEQ ID NO: 75081 - RNA, 21 nt, synthetic construct
  source 1..21: mol_type = other RNA
attttgttgacatcctttgcg

SEQ ID NO: 75082 - RNA, 21 nt, synthetic construct
  source 1..21: mol_type = other RNA
attttgttgttgttgtttctg

SEQ ID NO: 75083 - RNA, 21 nt, synthetic construct
  source 1..21: mol_type = other RNA
attttgtttatttgctgtcag

SEQ ID NO: 75084 - RNA, 21 nt, synthetic construct
  source 1..21: mol_type = other RNA
atttttaaaaagcagctacct

SEQ ID NO: 75085 - RNA, 21 nt, synthetic construct
  source 1..21: mol_type = other RNA
atttttaaaagagcgaagagg

SEQ ID NO: 75086 - RNA, 21 nt, synthetic construct
  source 1..21: mol_type = other RNA
atttttacccaacatgagaga

SEQ ID NO: 75087 - RNA, 21 nt, synthetic construct
  source 1..21: mol_type = other RNA
atttttacccgtggaaatact

SEQ ID NO: 75088 - RNA, 21 nt, synthetic construct
  source 1..21: mol_type = other RNA
atttttagtagagatgaggtt

SEQ ID NO: 75089 - RNA, 21 nt, synthetic construct
  source 1..21: mol_type = other RNA
atttttagtgactggcttaat

SEQ ID NO: 75090 - RNA, 21 nt, synthetic construct
  source 1..21: mol_type = other RNA
atttttatgcatttggtctca

SEQ ID NO: 75091 - RNA, 21 nt, synthetic construct
  source 1..21: mol_type = other RNA
atttttcacaaacacacaaac

SEQ ID NO: 75092 - RNA, 21 nt, synthetic construct
  source 1..21: mol_type = other RNA
atttttcacattcttcaccat

SEQ ID NO: 75093 - RNA, 21 nt, synthetic construct
  source 1..21: mol_type = other RNA
atttttcagattgaccttgta

SEQ ID NO: 75094 - RNA, 21 nt, synthetic construct
  source 1..21: mol_type = other RNA
atttttcaggggggccactgg

SEQ ID NO: 75095 - RNA, 21 nt, synthetic construct
  source 1..21: mol_type = other RNA
atttttccaacagtttacacg

SEQ ID NO: 75096 - RNA, 21 nt, synthetic construct
  source 1..21: mol_type = other RNA
atttttccacataaagtcttg

SEQ ID NO: 75097 - RNA, 21 nt, synthetic construct
  source 1..21: mol_type = other RNA
atttttcctttgcctaagtct

SEQ ID NO: 75098 - RNA, 21 nt, synthetic construct
  source 1..21: mol_type = other RNA
atttttctaaactggttttcc

SEQ ID NO: 75099 - RNA, 21 nt, synthetic construct
  source 1..21: mol_type = other RNA
atttttctcgacacacaatcc

SEQ ID NO: 75100 - RNA, 21 nt, synthetic construct
  source 1..21: mol_type = other RNA
atttttctgaccaactatttc

SEQ ID NO: 75101 - RNA, 21 nt, synthetic construct
  source 1..21: mol_type = other RNA
atttttctgcaattggaagac

SEQ ID NO: 75102 - RNA, 21 nt, synthetic construct
  source 1..21: mol_type = other RNA
atttttcttacctaagcatcg

SEQ ID NO: 75103 - RNA, 21 nt, synthetic construct
  source 1..21: mol_type = other RNA
atttttgacagccacgtgtat

SEQ ID NO: 75104 - RNA, 21 nt, synthetic construct
  source 1..21: mol_type = other RNA
atttttgagaaattgccaaac

SEQ ID NO: 75105 - RNA, 21 nt, synthetic construct
  source 1..21: mol_type = other RNA
atttttgagacaggttgttgc

SEQ ID NO: 75106 - RNA, 21 nt, synthetic construct
  source 1..21: mol_type = other RNA
atttttgcaaaccaaatgcag

SEQ ID NO: 75107 - RNA, 21 nt, synthetic construct
  source 1..21: mol_type = other RNA
atttttgccagtgttttaaag

SEQ ID NO: 75108 - RNA, 21 nt, synthetic construct
  source 1..21: mol_type = other RNA
atttttgctcacacttactaa

SEQ ID NO: 75109 - RNA, 21 nt, synthetic construct
  source 1..21: mol_type = other RNA
atttttgtcaagtgactccaa

SEQ ID NO: 75110 - RNA, 21 nt, synthetic construct
  source 1..21: mol_type = other RNA
atttttgtctggaacacacat

SEQ ID NO: 75111 - RNA, 21 nt, synthetic construct
  source 1..21: mol_type = other RNA
atttttgtctggtggacaaaa

SEQ ID NO: 75112 - RNA, 21 nt, synthetic construct
  source 1..21: mol_type = other RNA
atttttgtgtagaggtgaagt

SEQ ID NO: 75113 - RNA, 21 nt, synthetic construct
  source 1..21: mol_type = other RNA
attttttaagtggcgctgttt

SEQ ID NO: 75114 - RNA, 21 nt, synthetic construct
  source 1..21: mol_type = other RNA
attttttcaccagcggcatac

SEQ ID NO: 75115 - RNA, 21 nt, synthetic construct
  source 1..21: mol_type = other RNA
attttttcccagatacgttaa

SEQ ID NO: 75116 - RNA, 21 nt, synthetic construct
  source 1..21: mol_type = other RNA
attttttcccgctacacaagt

SEQ ID NO: 75117 - RNA, 21 nt, synthetic construct
  source 1..21: mol_type = other RNA
attttttcttcccatctcact

SEQ ID NO: 75118 - RNA, 21 nt, synthetic construct
  source 1..21: mol_type = other RNA
attttttgagacggaatctta

SEQ ID NO: 75119 - RNA, 21 nt, synthetic construct
  source 1..21: mol_type = other RNA
attttttgcagagacggggtc

SEQ ID NO: 75120 - RNA, 21 nt, synthetic construct
  source 1..21: mol_type = other RNA
attttttggcatacaactgct

SEQ ID NO: 75121 - RNA, 21 nt, synthetic construct
  source 1..21: mol_type = other RNA
attttttgttgttggtttgtg

SEQ ID NO: 75122 - RNA, 21 nt, synthetic construct
  source 1..21: mol_type = other RNA
caaaaaacaacaacaacaaca

SEQ ID NO: 75123 - RNA, 21 nt, synthetic construct
  source 1..21: mol_type = other RNA
caaaaaaccactggatacgga

SEQ ID NO: 75124 - RNA, 21 nt, synthetic construct
  source 1..21: mol_type = other RNA
caaaaaacgcggcacttggta

SEQ ID NO: 75125 - RNA, 21 nt, synthetic construct
  source 1..21: mol_type = other RNA
caaaaaactacgagtatcata

SEQ ID NO: 75126 - RNA, 21 nt, synthetic construct
  source 1..21: mol_type = other RNA
caaaaaagcaccagttatcac

SEQ ID NO: 75127 - RNA, 21 nt, synthetic construct
  source 1..21: mol_type = other RNA
caaaaaaggtgctgttgtatt

SEQ ID NO: 75128 - RNA, 21 nt, synthetic construct
  source 1..21: mol_type = other RNA
caaaaaagtcatgacctgctt

SEQ ID NO: 75129 - RNA, 21 nt, synthetic construct
  source 1..21: mol_type = other RNA
caaaaaatcttaaagatgcca

SEQ ID NO: 75130 - RNA, 21 nt, synthetic construct
  source 1..21: mol_type = other RNA
caaaaaatgcagtagtaaagc

SEQ ID NO: 75131 - RNA, 21 nt, synthetic construct
  source 1..21: mol_type = other RNA
caaaaaatgtggcatatcaca

SEQ ID NO: 75132 - RNA, 21 nt, synthetic construct
  source 1..21: mol_type = other RNA
caaaaacaaaagagtagattc

SEQ ID NO: 75133 - RNA, 21 nt, synthetic construct
  source 1..21: mol_type = other RNA
caaaaacacactgagcttttt

SEQ ID NO: 75134 - RNA, 21 nt, synthetic construct
  source 1..21: mol_type = other RNA
caaaaacactgtattttgaac

SEQ ID NO: 75135 - RNA, 21 nt, synthetic construct
  source 1..21: mol_type = other RNA
caaaaacagcatatacatgac

SEQ ID NO: 75136 - RNA, 21 nt, synthetic construct
  source 1..21: mol_type = other RNA
caaaaacagtttccctctgag

SEQ ID NO: 75137 - RNA, 21 nt, synthetic construct
  source 1..21: mol_type = other RNA
caaaaaccacatttcatagca

SEQ ID NO: 75138 - RNA, 21 nt, synthetic construct
  source 1..21: mol_type = other RNA
caaaaacccaactctttcttt

SEQ ID NO: 75139 - RNA, 21 nt, synthetic construct
  source 1..21: mol_type = other RNA
caaaaacctcccaacaggctg

SEQ ID NO: 75140 - RNA, 21 nt, synthetic construct
  source 1..21: mol_type = other RNA
caaaaagacaagtactgcatg

SEQ ID NO: 75141 - RNA, 21 nt, synthetic construct
  source 1..21: mol_type = other RNA
caaaaagagaaaaattacagg

SEQ ID NO: 75142 - RNA, 21 nt, synthetic construct
  source 1..21: mol_type = other RNA
caaaaagagaacacacaattt

SEQ ID NO: 75143 - RNA, 21 nt, synthetic construct
  source 1..21: mol_type = other RNA
caaaaagatctgtggacttta

SEQ ID NO: 75144 - RNA, 21 nt, synthetic construct
  source 1..21: mol_type = other RNA
caaaaagcacctaccataaca

SEQ ID NO: 75145 - RNA, 21 nt, synthetic construct
  source 1..21: mol_type = other RNA
caaaaagtaggggtaaatctt

SEQ ID NO: 75146 - RNA, 21 nt, synthetic construct
  source 1..21: mol_type = other RNA
caaaaagtgataccataaagt

SEQ ID NO: 75147 - RNA, 21 nt, synthetic construct
  source 1..21: mol_type = other RNA
caaaaagtgtgaccacattcc

SEQ ID NO: 75148 - RNA, 21 nt, synthetic construct
  source 1..21: mol_type = other RNA
caaaaataatatgataccctc

SEQ ID NO: 75149 - RNA, 21 nt, synthetic construct
  source 1..21: mol_type = other RNA
caaaaatacagctccaaagaa

SEQ ID NO: 75150 - RNA, 21 nt, synthetic construct
  source 1..21: mol_type = other RNA
caaaaatacgaaagtgctcta

SEQ ID NO: 75151 - RNA, 21 nt, synthetic construct
  source 1..21: mol_type = other RNA
caaaaatactacaagagttcc

SEQ ID NO: 75152 - RNA, 21 nt, synthetic construct
  source 1..21: mol_type = other RNA
caaaaatactcaagggctttc

SEQ ID NO: 75153 - RNA, 21 nt, synthetic construct
  source 1..21: mol_type = other RNA
caaaaatacttaagagcatgt

SEQ ID NO: 75154 - RNA, 21 nt, synthetic construct
  source 1..21: mol_type = other RNA
caaaaatagaggatgggcatt

SEQ ID NO: 75155 - RNA, 21 nt, synthetic construct
  source 1..21: mol_type = other RNA
caaaaatgacacaacttacta

SEQ ID NO: 75156 - RNA, 21 nt, synthetic construct
  source 1..21: mol_type = other RNA
caaaaatgtgtctagtgaatg

SEQ ID NO: 75157 - RNA, 21 nt, synthetic construct
  source 1..21: mol_type = other RNA
caaaaattagctgggcgagat

SEQ ID NO: 75158 - RNA, 21 nt, synthetic construct
  source 1..21: mol_type = other RNA
caaaaattttcattctacctg

SEQ ID NO: 75159 - RNA, 21 nt, synthetic construct
  source 1..21: mol_type = other RNA
caaaaattttgttcaggagtt

SEQ ID NO: 75160 - RNA, 21 nt, synthetic construct
  source 1..21: mol_type = other RNA
caaaacaaaaaacaaaccccc

SEQ ID NO: 75161 - RNA, 21 nt, synthetic construct
  source 1..21: mol_type = other RNA
caaaacaaaacacatggcatc

SEQ ID NO: 75162 - RNA, 21 nt, synthetic construct
  source 1..21: mol_type = other RNA
caaaacaaaaccctgttgggc

SEQ ID NO: 75163 - RNA, 21 nt, synthetic construct
  source 1..21: mol_type = other RNA
caaaacaaacaaacagaaagg

SEQ ID NO: 75164 - RNA, 21 nt, synthetic construct
  source 1..21: mol_type = other RNA
caaaacaaagtctttgggtaa

SEQ ID NO: 75165 - RNA, 21 nt, synthetic construct
  source 1..21: mol_type = other RNA
caaaacaaatggaaccactgt

SEQ ID NO: 75166 - RNA, 21 nt, synthetic construct
  source 1..21: mol_type = other RNA
caaaacaagaagaaaaagcaa

SEQ ID NO: 75167 - RNA, 21 nt, synthetic construct
  source 1..21: mol_type = other RNA
caaaacaataagacaccgctc

SEQ ID NO: 75168 - RNA, 21 nt, synthetic construct
  source 1..21: mol_type = other RNA
caaaacaatagcccagcagga

SEQ ID NO: 75169 - RNA, 21 nt, synthetic construct
  source 1..21: mol_type = other RNA
caaaacacacgggtacacatc

SEQ ID NO: 75170 - RNA, 21 nt, synthetic construct
  source 1..21: mol_type = other RNA
caaaacacatggcatcggggc

SEQ ID NO: 75171 - RNA, 21 nt, synthetic construct
  source 1..21: mol_type = other RNA
caaaacacttctgtgatcaga

SEQ ID NO: 75172 - RNA, 21 nt, synthetic construct
  source 1..21: mol_type = other RNA
caaaacagcttcttgttagaa

SEQ ID NO: 75173 - RNA, 21 nt, synthetic construct
  source 1..21: mol_type = other RNA
caaaacagggttattaacata

SEQ ID NO: 75174 - RNA, 21 nt, synthetic construct
  source 1..21: mol_type = other RNA
caaaacatatgtcagatggta

SEQ ID NO: 75175 - RNA, 21 nt, synthetic construct
  source 1..21: mol_type = other RNA
caaaacatcatctaatttccc

SEQ ID NO: 75176 - RNA, 21 nt, synthetic construct
  source 1..21: mol_type = other RNA
caaaacatgttttcaaatgct

SEQ ID NO: 75177 - RNA, 21 nt, synthetic construct
  source 1..21: mol_type = other RNA
caaaaccaaagaaaggggaag

SEQ ID NO: 75178 - RNA, 21 nt, synthetic construct
  source 1..21: mol_type = other RNA
caaaaccaggaggtttgcact

SEQ ID NO: 75179 - RNA, 21 nt, synthetic construct
  source 1..21: mol_type = other RNA
caaaaccctgttgggctatta

SEQ ID NO: 75180 - RNA, 21 nt, synthetic construct
  source 1..21: mol_type = other RNA
caaaacccttgggatgcagca

SEQ ID NO: 75181 - RNA, 21 nt, synthetic construct
  source 1..21: mol_type = other RNA
caaaacctggtatgagtgttt

SEQ ID NO: 75182 - RNA, 21 nt, synthetic construct
  source 1..21: mol_type = other RNA
caaaacggaaactttatacct

SEQ ID NO: 75183 - RNA, 21 nt, synthetic construct
  source 1..21: mol_type = other RNA
caaaactaggctgtcccaaat

SEQ ID NO: 75184 - RNA, 21 nt, synthetic construct
  source 1..21: mol_type = other RNA
caaaactcctgaacaaaattt

SEQ ID NO: 75185 - RNA, 21 nt, synthetic construct
  source 1..21: mol_type = other RNA
caaaactgaactcaaaatgga

SEQ ID NO: 75186 - RNA, 21 nt, synthetic construct
  source 1..21: mol_type = other RNA
caaaactgaagtttatcagtc

SEQ ID NO: 75187 - RNA, 21 nt, synthetic construct
  source 1..21: mol_type = other RNA
caaaactgggggctggacata

SEQ ID NO: 75188 - RNA, 21 nt, synthetic construct
  source 1..21: mol_type = other RNA
caaaacttaggaggctattaa

SEQ ID NO: 75189 - RNA, 21 nt, synthetic construct
  source 1..21: mol_type = other RNA
caaaagaaaattttctgagca

SEQ ID NO: 75190 - RNA, 21 nt, synthetic construct
  source 1..21: mol_type = other RNA
caaaagaacaggacttttggt

SEQ ID NO: 75191 - RNA, 21 nt, synthetic construct
  source 1..21: mol_type = other RNA
caaaagacatcactaagagtg

SEQ ID NO: 75192 - RNA, 21 nt, synthetic construct
  source 1..21: mol_type = other RNA
caaaagaccaagaattttcca

SEQ ID NO: 75193 - RNA, 21 nt, synthetic construct
  source 1..21: mol_type = other RNA
caaaagagctgggcccgcagt

SEQ ID NO: 75194 - RNA, 21 nt, synthetic construct
  source 1..21: mol_type = other RNA
caaaagagtagattccccctt

SEQ ID NO: 75195 - RNA, 21 nt, synthetic construct
  source 1..21: mol_type = other RNA
caaaagatacacaagatctct

SEQ ID NO: 75196 - RNA, 21 nt, synthetic construct
  source 1..21: mol_type = other RNA
caaaagatcatttcaaaccaa

SEQ ID NO: 75197 - RNA, 21 nt, synthetic construct
  source 1..21: mol_type = other RNA
caaaagatgatgaacaaaggc

SEQ ID NO: 75198 - RNA, 21 nt, synthetic construct
  source 1..21: mol_type = other RNA
caaaagatgcagaaaaagcat

SEQ ID NO: 75199 - RNA, 21 nt, synthetic construct
  source 1..21: mol_type = other RNA
caaaagatgctggtggagtat

SEQ ID NO: 75200 - RNA, 21 nt, synthetic construct
  source 1..21: mol_type = other RNA
caaaagcaaaattctaacaag

SEQ ID NO: 75201 - RNA, 21 nt, synthetic construct
  source 1..21: mol_type = other RNA
caaaagcaccactgagaggga

SEQ ID NO: 75202 - RNA, 21 nt, synthetic construct
  source 1..21: mol_type = other RNA
caaaagcaggccctgagaagt

SEQ ID NO: 75203 - RNA, 21 nt, synthetic construct
  source 1..21: mol_type = other RNA
caaaagccaagagcgaggcct

SEQ ID NO: 75204 - RNA, 21 nt, synthetic construct
  source 1..21: mol_type = other RNA
caaaagccatagtgtaaacta

SEQ ID NO: 75205 - RNA, 21 nt, synthetic construct
  source 1..21: mol_type = other RNA
caaaagccccaaaccatcaag

SEQ ID NO: 75206 - RNA, 21 nt, synthetic construct
  source 1..21: mol_type = other RNA
caaaagcctcaaaatttagta

SEQ ID NO: 75207 - RNA, 21 nt, synthetic construct
  source 1..21: mol_type = other RNA
caaaagctccccggatgattc

SEQ ID NO: 75208 - RNA, 21 nt, synthetic construct
  source 1..21: mol_type = other RNA
caaaaggaggaactaattgat

SEQ ID NO: 75209 - RNA, 21 nt, synthetic construct
  source 1..21: mol_type = other RNA
caaaaggccccttgaaagatc

SEQ ID NO: 75210 - RNA, 21 nt, synthetic construct
  source 1..21: mol_type = other RNA
caaaagggaaaacaattactt

SEQ ID NO: 75211 - RNA, 21 nt, synthetic construct
  source 1..21: mol_type = other RNA
caaaagggaaatatgaaccac

SEQ ID NO: 75212 - RNA, 21 nt, synthetic construct
  source 1..21: mol_type = other RNA
caaaaggtagaagataatgtt

SEQ ID NO: 75213 - RNA, 21 nt, synthetic construct
  source 1..21: mol_type = other RNA
caaaaggtttccagtggcccc

SEQ ID NO: 75214 - RNA, 21 nt, synthetic construct
  source 1..21: mol_type = other RNA
caaaagtcctgttcttttgta

SEQ ID NO: 75215 - RNA, 21 nt, synthetic construct
  source 1..21: mol_type = other RNA
caaaagtgaaaactaaggtca

SEQ ID NO: 75216 - RNA, 21 nt, synthetic construct
  source 1..21: mol_type = other RNA
caaaagtgaatatagctaaga

SEQ ID NO: 75217 - RNA, 21 nt, synthetic construct
  source 1..21: mol_type = other RNA
caaaagtgaatcactacagca

SEQ ID NO: 75218 - RNA, 21 nt, synthetic construct
  source 1..21: mol_type = other RNA
caaaagtgctgttgaggctgg

SEQ ID NO: 75219 - RNA, 21 nt, synthetic construct
  source 1..21: mol_type = other RNA
caaaatacccacaagaaaaac

SEQ ID NO: 75220 - RNA, 21 nt, synthetic construct
  source 1..21: mol_type = other RNA
caaaatacctgggaatccaac

SEQ ID NO: 75221 - RNA, 21 nt, synthetic construct
  source 1..21: mol_type = other RNA
caaaataggattaagacacta

SEQ ID NO: 75222 - RNA, 21 nt, synthetic construct
  source 1..21: mol_type = other RNA
caaaataggcagtcctctact

SEQ ID NO: 75223 - RNA, 21 nt, synthetic construct
  source 1..21: mol_type = other RNA
caaaatatgaagcattaatgc

SEQ ID NO: 75224 - RNA, 21 nt, synthetic construct
  source 1..21: mol_type = other RNA
caaaatatgtaatgacctgga

SEQ ID NO: 75225 - RNA, 21 nt, synthetic construct
  source 1..21: mol_type = other RNA
caaaatattgaagagggaaca

SEQ ID NO: 75226 - RNA, 21 nt, synthetic construct
  source 1..21: mol_type = other RNA
caaaatcaacattgcctccat

SEQ ID NO: 75227 - RNA, 21 nt, synthetic construct
  source 1..21: mol_type = other RNA
caaaatcaaggtgcgggatta

SEQ ID NO: 75228 - RNA, 21 nt, synthetic construct
  source 1..21: mol_type = other RNA
caaaatcagatatgaaagagg

SEQ ID NO: 75229 - RNA, 21 nt, synthetic construct
  source 1..21: mol_type = other RNA
caaaatcctctgtagataaac

SEQ ID NO: 75230 - RNA, 21 nt, synthetic construct
  source 1..21: mol_type = other RNA
caaaatctgatgtgtatgtta

SEQ ID NO: 75231 - RNA, 21 nt, synthetic construct
  source 1..21: mol_type = other RNA
caaaatgattttcacagggca

SEQ ID NO: 75232 - RNA, 21 nt, synthetic construct
  source 1..21: mol_type = other RNA
caaaatggaagtgctgggcta

SEQ ID NO: 75233 - RNA, 21 nt, synthetic construct
  source 1..21: mol_type = other RNA
caaaatggagacatctgagac

SEQ ID NO: 75234 - RNA, 21 nt, synthetic construct
  source 1..21: mol_type = other RNA
caaaatggagacccatactca

SEQ ID NO: 75235 - RNA, 21 nt, synthetic construct
  source 1..21: mol_type = other RNA
caaaatggatcaaagacctaa

SEQ ID NO: 75236 - RNA, 21 nt, synthetic construct
  source 1..21: mol_type = other RNA
caaaatgtgatggcatcattc

SEQ ID NO: 75237 - RNA, 21 nt, synthetic construct
  source 1..21: mol_type = other RNA
caaaatgtggatgcatgaggc

SEQ ID NO: 75238 - RNA, 21 nt, synthetic construct
  source 1..21: mol_type = other RNA
caaaatgtggtatatatgcac

SEQ ID NO: 75239 - RNA, 21 nt, synthetic construct
  source 1..21: mol_type = other RNA
caaaattaccccattcactca

SEQ ID NO: 75240 - RNA, 21 nt, synthetic construct
  source 1..21: mol_type = other RNA
caaaattctaacaagaagctg

SEQ ID NO: 75241 - RNA, 21 nt, synthetic construct
  source 1..21: mol_type = other RNA
caaaatttagtaagggtaaac

SEQ ID NO: 75242 - RNA, 21 nt, synthetic construct
  source 1..21: mol_type = other RNA
caaaattttaaatcagcacca

SEQ ID NO: 75243 - RNA, 21 nt, synthetic construct
  source 1..21: mol_type = other RNA
caaacaaacacactgggtaaa

SEQ ID NO: 75244 - RNA, 21 nt, synthetic construct
  source 1..21: mol_type = other RNA
caaacaaacagaaaggcccaa

SEQ ID NO: 75245 - RNA, 21 nt, synthetic construct
  source 1..21: mol_type = other RNA
caaacaaatccttttcccagg

SEQ ID NO: 75246 - RNA, 21 nt, synthetic construct
  source 1..21: mol_type = other RNA
caaacaattacttcatagatg

SEQ ID NO: 75247 - RNA, 21 nt, synthetic construct
  source 1..21: mol_type = other RNA
caaacaattagcacctttatt

SEQ ID NO: 75248 - RNA, 21 nt, synthetic construct
  source 1..21: mol_type = other RNA
caaacacaaaacaaatggaac

SEQ ID NO: 75249 - RNA, 21 nt, synthetic construct
  source 1..21: mol_type = other RNA
caaacacacaaaccaacaaca

SEQ ID NO: 75250 - RNA, 21 nt, synthetic construct
  source 1..21: mol_type = other RNA
caaacacactgggtaaacaag

SEQ ID NO: 75251 - RNA, 21 nt, synthetic construct
  source 1..21: mol_type = other RNA
caaacaccttacactcaaaag

SEQ ID NO: 75252 - RNA, 21 nt, synthetic construct
  source 1..21: mol_type = other RNA
caaacactggaaatcacaggt

SEQ ID NO: 75253 - RNA, 21 nt, synthetic construct
  source 1..21: mol_type = other RNA
caaacacttttcaaacactta

SEQ ID NO: 75254 - RNA, 21 nt, synthetic construct
  source 1..21: mol_type = other RNA
caaacagaaaccctgtaccca

SEQ ID NO: 75255 - RNA, 21 nt, synthetic construct
  source 1..21: mol_type = other RNA
caaacagaaaggcccaaaaag

SEQ ID NO: 75256 - RNA, 21 nt, synthetic construct
  source 1..21: mol_type = other RNA
caaacagactgagccagcaaa

SEQ ID NO: 75257 - RNA, 21 nt, synthetic construct
  source 1..21: mol_type = other RNA
caaacagcctaattgtacacc

SEQ ID NO: 75258 - RNA, 21 nt, synthetic construct
  source 1..21: mol_type = other RNA
caaacagcgccacttaaaaaa

SEQ ID NO: 75259 - RNA, 21 nt, synthetic construct
  source 1..21: mol_type = other RNA
caaacagcttgacattcttac

SEQ ID NO: 75260 - RNA, 21 nt, synthetic construct
  source 1..21: mol_type = other RNA
caaacaggatacaaaaagcac

SEQ ID NO: 75261 - RNA, 21 nt, synthetic construct
  source 1..21: mol_type = other RNA
caaacagtgaccacagtttga

SEQ ID NO: 75262 - RNA, 21 nt, synthetic construct
  source 1..21: mol_type = other RNA
caaacagtgtgatattggcat

SEQ ID NO: 75263 - RNA, 21 nt, synthetic construct
  source 1..21: mol_type = other RNA
caaacagtttttacatgtagt

SEQ ID NO: 75264 - RNA, 21 nt, synthetic construct
  source 1..21: mol_type = other RNA
caaacataccccaaccctacc

SEQ ID NO: 75265 - RNA, 21 nt, synthetic construct
  source 1..21: mol_type = other RNA
caaacatatgcatgttatttg

SEQ ID NO: 75266 - RNA, 21 nt, synthetic construct
  source 1..21: mol_type = other RNA
caaacatgaataaccaatgtc

SEQ ID NO: 75267 - RNA, 21 nt, synthetic construct
  source 1..21: mol_type = other RNA
caaacatgacagatcccaaaa

SEQ ID NO: 75268 - RNA, 21 nt, synthetic construct
  source 1..21: mol_type = other RNA
caaacatgtgaggatttattt

SEQ ID NO: 75269 - RNA, 21 nt, synthetic construct
  source 1..21: mol_type = other RNA
caaacattgaaggcagaatta

SEQ ID NO: 75270 - RNA, 21 nt, synthetic construct
  source 1..21: mol_type = other RNA
caaacatttatggaattgcca

SEQ ID NO: 75271 - RNA, 21 nt, synthetic construct
  source 1..21: mol_type = other RNA
caaacattttttgcagagacg

SEQ ID NO: 75272 - RNA, 21 nt, synthetic construct
  source 1..21: mol_type = other RNA
caaaccaaaaaatgtggcata

SEQ ID NO: 75273 - RNA, 21 nt, synthetic construct
  source 1..21: mol_type = other RNA
caaaccaaatgcagaaaataa

SEQ ID NO: 75274 - RNA, 21 nt, synthetic construct
  source 1..21: mol_type = other RNA
caaaccaacaacaaaaaatct

SEQ ID NO: 75275 - RNA, 21 nt, synthetic construct
  source 1..21: mol_type = other RNA
caaaccaatgttctcttttcc

SEQ ID NO: 75276 - RNA, 21 nt, synthetic construct
  source 1..21: mol_type = other RNA
caaaccacacagagaacagca

SEQ ID NO: 75277 - RNA, 21 nt, synthetic construct
  source 1..21: mol_type = other RNA
caaaccacctaactactaata

SEQ ID NO: 75278 - RNA, 21 nt, synthetic construct
  source 1..21: mol_type = other RNA
caaaccagacatttctcatac

SEQ ID NO: 75279 - RNA, 21 nt, synthetic construct
  source 1..21: mol_type = other RNA
caaaccatcaagtgtgatccc

SEQ ID NO: 75280 - RNA, 21 nt, synthetic construct
  source 1..21: mol_type = other RNA
caaaccatcctttccttgtcc

SEQ ID NO: 75281 - RNA, 21 nt, synthetic construct
  source 1..21: mol_type = other RNA
caaaccatgttcatgggaaga

SEQ ID NO: 75282 - RNA, 21 nt, synthetic construct
  source 1..21: mol_type = other RNA
caaacccaaattaaaggatgt

SEQ ID NO: 75283 - RNA, 21 nt, synthetic construct
  source 1..21: mol_type = other RNA
caaaccctacacccatccacc

SEQ ID NO: 75284 - RNA, 21 nt, synthetic construct
  source 1..21: mol_type = other RNA
caaacccttggctagactaag

SEQ ID NO: 75285 - RNA, 21 nt, synthetic construct
  source 1..21: mol_type = other RNA
caaacctcctggttttgatca

SEQ ID NO: 75286 - RNA, 21 nt, synthetic construct
  source 1..21: mol_type = other RNA
caaacctggcaatactctcag

SEQ ID NO: 75287 - RNA, 21 nt, synthetic construct
  source 1..21: mol_type = other RNA
caaaccttcttatttccttcc

SEQ ID NO: 75288 - RNA, 21 nt, synthetic construct
  source 1..21: mol_type = other RNA
caaacctttaagttctccaag

SEQ ID NO: 75289 - RNA, 21 nt, synthetic construct
  source 1..21: mol_type = other RNA
caaacgaaccaattaccataa

SEQ ID NO: 75290 - RNA, 21 nt, synthetic construct
  source 1..21: mol_type = other RNA
caaacgcattgtgatgtctca

SEQ ID NO: 75291 - RNA, 21 nt, synthetic construct
  source 1..21: mol_type = other RNA
caaacgtccatcaacagcaga

SEQ ID NO: 75292 - RNA, 21 nt, synthetic construct
  source 1..21: mol_type = other RNA
caaacgtgcacacccagttat

SEQ ID NO: 75293 - RNA, 21 nt, synthetic construct
  source 1..21: mol_type = other RNA
caaacgtgctttccttattga

SEQ ID NO: 75294 - RNA, 21 nt, synthetic construct
  source 1..21: mol_type = other RNA
caaacgtttagatgaatgatt

SEQ ID NO: 75295 - RNA, 21 nt, synthetic construct
  source 1..21: mol_type = other RNA
caaactaactagaaaaccgac

SEQ ID NO: 75296 - RNA, 21 nt, synthetic construct
  source 1..21: mol_type = other RNA
caaactaagtggtattctatc

SEQ ID NO: 75297 - RNA, 21 nt, synthetic construct
  source 1..21: mol_type = other RNA
caaactactgatagcgaaagg

SEQ ID NO: 75298 - RNA, 21 nt, synthetic construct
  source 1..21: mol_type = other RNA
caaactagaaaaagaataagc

SEQ ID NO: 75299 - RNA, 21 nt, synthetic construct
  source 1..21: mol_type = other RNA
caaactatacttcaatgctac

SEQ ID NO: 75300 - RNA, 21 nt, synthetic construct
  source 1..21: mol_type = other RNA
caaactatgcttaatctgatt

SEQ ID NO: 75301 - RNA, 21 nt, synthetic construct
  source 1..21: mol_type = other RNA
caaactcaaaaggacatattt

SEQ ID NO: 75302 - RNA, 21 nt, synthetic construct
  source 1..21: mol_type = other RNA
caaactcaagttccggttctc

SEQ ID NO: 75303 - RNA, 21 nt, synthetic construct
  source 1..21: mol_type = other RNA
caaactcacttattagcaaag

SEQ ID NO: 75304 - RNA, 21 nt, synthetic construct
  source 1..21: mol_type = other RNA
caaactcagatctgagagata

SEQ ID NO: 75305 - RNA, 21 nt, synthetic construct
  source 1..21: mol_type = other RNA
caaactccaaacctttaagtt

SEQ ID NO: 75306 - RNA, 21 nt, synthetic construct
  source 1..21: mol_type = other RNA
caaactccaagtctcatgcaa

SEQ ID NO: 75307 - RNA, 21 nt, synthetic construct
  source 1..21: mol_type = other RNA
caaactgaatcagacaacaca

SEQ ID NO: 75308 - RNA, 21 nt, synthetic construct
  source 1..21: mol_type = other RNA
caaactgcagaatgacagaaa

SEQ ID NO: 75309 - RNA, 21 nt, synthetic construct
  source 1..21: mol_type = other RNA
caaactgcgtggtttattcat

SEQ ID NO: 75310 - RNA, 21 nt, synthetic construct
  source 1..21: mol_type = other RNA
caaactggagtgcagtggtgc

SEQ ID NO: 75311 - RNA, 21 nt, synthetic construct
  source 1..21: mol_type = other RNA
caaactgtggtcactgtttgg

SEQ ID NO: 75312 - RNA, 21 nt, synthetic construct
  source 1..21: mol_type = other RNA
caaactgtgtgcttggagtca

SEQ ID NO: 75313 - RNA, 21 nt, synthetic construct
  source 1..21: mol_type = other RNA
caaactgttttccacagtgac

SEQ ID NO: 75314 - RNA, 21 nt, synthetic construct
  source 1..21: mol_type = other RNA
caaacttgaaccttcctcttc

SEQ ID NO: 75315 - RNA, 21 nt, synthetic construct
  source 1..21: mol_type = other RNA
caaacttggtttattttctgc

SEQ ID NO: 75316 - RNA, 21 nt, synthetic construct
  source 1..21: mol_type = other RNA
caaagaaaataatgttttccg

SEQ ID NO: 75317 - RNA, 21 nt, synthetic construct
  source 1..21: mol_type = other RNA
caaagaaactacctagaaaaa

SEQ ID NO: 75318 - RNA, 21 nt, synthetic construct
  source 1..21: mol_type = other RNA
caaagaaagagttgggttttt

SEQ ID NO: 75319 - RNA, 21 nt, synthetic construct
  source 1..21: mol_type = other RNA
caaagaaaggggaaggaattt

SEQ ID NO: 75320 - RNA, 21 nt, synthetic construct
  source 1..21: mol_type = other RNA
caaagaaattggacgggtggt

SEQ ID NO: 75321 - RNA, 21 nt, synthetic construct
  source 1..21: mol_type = other RNA
caaagaacaggaagggagaga

SEQ ID NO: 75322 - RNA, 21 nt, synthetic construct
  source 1..21: mol_type = other RNA
caaagaacaggagttaccata

SEQ ID NO: 75323 - RNA, 21 nt, synthetic construct
  source 1..21: mol_type = other RNA
caaagaagaaatcaaatggga

SEQ ID NO: 75324 - RNA, 21 nt, synthetic construct
  source 1..21: mol_type = other RNA
caaagaaggaaaaaacaccta

SEQ ID NO: 75325 - RNA, 21 nt, synthetic construct
  source 1..21: mol_type = other RNA
caaagacaagttcttacctca

SEQ ID NO: 75326 - RNA, 21 nt, synthetic construct
  source 1..21: mol_type = other RNA
caaagacagatcttatggaat

SEQ ID NO: 75327 - RNA, 21 nt, synthetic construct
  source 1..21: mol_type = other RNA
caaagacatcctgatttaggc

SEQ ID NO: 75328 - RNA, 21 nt, synthetic construct
  source 1..21: mol_type = other RNA
caaagacattgtcttacatag

SEQ ID NO: 75329 - RNA, 21 nt, synthetic construct
  source 1..21: mol_type = other RNA
caaagacctaagcttaagagc

SEQ ID NO: 75330 - RNA, 21 nt, synthetic construct
  source 1..21: mol_type = other RNA
caaagacttcaacggacattt

SEQ ID NO: 75331 - RNA, 21 nt, synthetic construct
  source 1..21: mol_type = other RNA
caaagacttcaggaacacctt

SEQ ID NO: 75332 - RNA, 21 nt, synthetic construct
  source 1..21: mol_type = other RNA
caaagagaacaaaatacctgg

SEQ ID NO: 75333 - RNA, 21 nt, synthetic construct
  source 1..21: mol_type = other RNA
caaagagaacaatggaataga

SEQ ID NO: 75334 - RNA, 21 nt, synthetic construct
  source 1..21: mol_type = other RNA
caaagagacctgattcttcca

SEQ ID NO: 75335 - RNA, 21 nt, synthetic construct
  source 1..21: mol_type = other RNA
caaagagctgggactacaggt

SEQ ID NO: 75336 - RNA, 21 nt, synthetic construct
  source 1..21: mol_type = other RNA
caaagaggcaaaactcctgaa

SEQ ID NO: 75337 - RNA, 21 nt, synthetic construct
  source 1..21: mol_type = other RNA
caaagataaaggtaaggaaac

SEQ ID NO: 75338 - RNA, 21 nt, synthetic construct
  source 1..21: mol_type = other RNA
caaagatagactcttcagagg

SEQ ID NO: 75339 - RNA, 21 nt, synthetic construct
  source 1..21: mol_type = other RNA
caaagatatgggttattcacc

SEQ ID NO: 75340 - RNA, 21 nt, synthetic construct
  source 1..21: mol_type = other RNA
caaagatattagctacaaaag

SEQ ID NO: 75341 - RNA, 21 nt, synthetic construct
  source 1..21: mol_type = other RNA
caaagatcatgggttttaata

SEQ ID NO: 75342 - RNA, 21 nt, synthetic construct
  source 1..21: mol_type = other RNA
caaagatcatttcacttgatt

SEQ ID NO: 75343 - RNA, 21 nt, synthetic construct
  source 1..21: mol_type = other RNA
caaagatgccacaaatggagt

SEQ ID NO: 75344 - RNA, 21 nt, synthetic construct
  source 1..21: mol_type = other RNA
caaagattatgttccacatgt

SEQ ID NO: 75345 - RNA, 21 nt, synthetic construct
  source 1..21: mol_type = other RNA
caaagattcttgtcatgaatg

SEQ ID NO: 75346 - RNA, 21 nt, synthetic construct
  source 1..21: mol_type = other RNA
caaagatttacccctactttt

SEQ ID NO: 75347 - RNA, 21 nt, synthetic construct
  source 1..21: mol_type = other RNA
caaagatttactaaactgaac

SEQ ID NO: 75348 - RNA, 21 nt, synthetic construct
  source 1..21: mol_type = other RNA
caaagcaaaagcaaaattcta

SEQ ID NO: 75349 - RNA, 21 nt, synthetic construct
  source 1..21: mol_type = other RNA
caaagcaaaccagacatttct

SEQ ID NO: 75350 - RNA, 21 nt, synthetic construct
  source 1..21: mol_type = other RNA
caaagcaaacgtgcacaccca

SEQ ID NO: 75351 - RNA, 21 nt, synthetic construct
  source 1..21: mol_type = other RNA
caaagcaacatgctaagtgtt

SEQ ID NO: 75352 - RNA, 21 nt, synthetic construct
  source 1..21: mol_type = other RNA
caaagcaagccttggcaaggg

SEQ ID NO: 75353 - RNA, 21 nt, synthetic construct
  source 1..21: mol_type = other RNA
caaagcaagttaaaagacatc

SEQ ID NO: 75354 - RNA, 21 nt, synthetic construct
  source 1..21: mol_type = other RNA
caaagcagaaatacagaccga

SEQ ID NO: 75355 - RNA, 21 nt, synthetic construct
  source 1..21: mol_type = other RNA
caaagcatatgaatctagaaa

SEQ ID NO: 75356 - RNA, 21 nt, synthetic construct
  source 1..21: mol_type = other RNA
caaagcccaccagcataagac

SEQ ID NO: 75357 - RNA, 21 nt, synthetic construct
  source 1..21: mol_type = other RNA
caaagccctcaggaccaggca

SEQ ID NO: 75358 - RNA, 21 nt, synthetic construct
  source 1..21: mol_type = other RNA
caaagcctgtggaggcagtac

SEQ ID NO: 75359 - RNA, 21 nt, synthetic construct
  source 1..21: mol_type = other RNA
caaagccttctctactctgcc

SEQ ID NO: 75360 - RNA, 21 nt, synthetic construct
  source 1..21: mol_type = other RNA
caaagctaccctttcttgtta

SEQ ID NO: 75361 - RNA, 21 nt, synthetic construct
  source 1..21: mol_type = other RNA
caaagctctgatgctttctct

SEQ ID NO: 75362 - RNA, 21 nt, synthetic construct
  source 1..21: mol_type = other RNA
caaagctggcatgttggatag

SEQ ID NO: 75363 - RNA, 21 nt, synthetic construct
  source 1..21: mol_type = other RNA
caaagctttaaactggatgaa

SEQ ID NO: 75364 - RNA, 21 nt, synthetic construct
  source 1..21: mol_type = other RNA
caaaggaaaaatctaaccctc

SEQ ID NO: 75365 - RNA, 21 nt, synthetic construct
  source 1..21: mol_type = other RNA
caaaggaaggaattttaggac

SEQ ID NO: 75366 - RNA, 21 nt, synthetic construct
  source 1..21: mol_type = other RNA
caaaggacactattgagagtg

SEQ ID NO: 75367 - RNA, 21 nt, synthetic construct
  source 1..21: mol_type = other RNA
caaaggactggaactcatttc

SEQ ID NO: 75368 - RNA, 21 nt, synthetic construct
  source 1..21: mol_type = other RNA
caaaggactgggatcctaagc

SEQ ID NO: 75369 - RNA, 21 nt, synthetic construct
  source 1..21: mol_type = other RNA
caaaggagagaagagggggca

SEQ ID NO: 75370 - RNA, 21 nt, synthetic construct
  source 1..21: mol_type = other RNA
caaaggatgtcaacaaaatac

SEQ ID NO: 75371 - RNA, 21 nt, synthetic construct
  source 1..21: mol_type = other RNA
caaaggattagaaagtagatt

SEQ ID NO: 75372 - RNA, 21 nt, synthetic construct
  source 1..21: mol_type = other RNA
caaaggattcgggggagagca

SEQ ID NO: 75373 - RNA, 21 nt, synthetic construct
  source 1..21: mol_type = other RNA
caaaggattgggaagattggc

SEQ ID NO: 75374 - RNA, 21 nt, synthetic construct
  source 1..21: mol_type = other RNA
caaaggcaggagcagtgtgaa

SEQ ID NO: 75375 - RNA, 21 nt, synthetic construct
  source 1..21: mol_type = other RNA
caaaggccgctcttgaccttg

SEQ ID NO: 75376 - RNA, 21 nt, synthetic construct
  source 1..21: mol_type = other RNA
caaaggcgaagcccgccgctc

SEQ ID NO: 75377 - RNA, 21 nt, synthetic construct
  source 1..21: mol_type = other RNA
caaagggcctgttccaggcct

SEQ ID NO: 75378 - RNA, 21 nt, synthetic construct
  source 1..21: mol_type = other RNA
caaaggggcattccgtggaag

SEQ ID NO: 75379 - RNA, 21 nt, synthetic construct
  source 1..21: mol_type = other RNA
caaagggtcactattaaccat

SEQ ID NO: 75380 - RNA, 21 nt, synthetic construct
  source 1..21: mol_type = other RNA
caaagggttcttggaaattag

SEQ ID NO: 75381 - RNA, 21 nt, synthetic construct
  source 1..21: mol_type = other RNA
caaaggtagaaacatcccaag

SEQ ID NO: 75382 - RNA, 21 nt, synthetic construct
  source 1..21: mol_type = other RNA
caaaggtgttaagccgttcca

SEQ ID NO: 75383 - RNA, 21 nt, synthetic construct
  source 1..21: mol_type = other RNA
caaaggttgaaaactcaactg

SEQ ID NO: 75384 - RNA, 21 nt, synthetic construct
  source 1..21: mol_type = other RNA
caaaggttgagacaagaccac

SEQ ID NO: 75385 - RNA, 21 nt, synthetic construct
  source 1..21: mol_type = other RNA
caaagtaaaaagcactatcca

SEQ ID NO: 75386 - RNA, 21 nt, synthetic construct
  source 1..21: mol_type = other RNA
caaagtatgagaaatgtctgg

SEQ ID NO: 75387 - RNA, 21 nt, synthetic construct
  source 1..21: mol_type = other RNA
caaagtatgcatagcagggtc

SEQ ID NO: 75388 - RNA, 21 nt, synthetic construct
  source 1..21: mol_type = other RNA
caaagtccccacatgactggc

SEQ ID NO: 75389 - RNA, 21 nt, synthetic construct
  source 1..21: mol_type = other RNA
caaagtcccctgtaattacat

SEQ ID NO: 75390 - RNA, 21 nt, synthetic construct
  source 1..21: mol_type = other RNA
caaagtctttgggtaatttat

SEQ ID NO: 75391 - RNA, 21 nt, synthetic construct
  source 1..21: mol_type = other RNA
caaagtgaaaggcaaaggaaa

SEQ ID NO: 75392 - RNA, 21 nt, synthetic construct
  source 1..21: mol_type = other RNA
caaagtgagcagaaggaggaa

SEQ ID NO: 75393 - RNA, 21 nt, synthetic construct
  source 1..21: mol_type = other RNA
caaagtggaaacaactcaaac

SEQ ID NO: 75394 - RNA, 21 nt, synthetic construct
  source 1..21: mol_type = other RNA
caaagttaaacttttgtgcat

SEQ ID NO: 75395 - RNA, 21 nt, synthetic construct
  source 1..21: mol_type = other RNA
caaagttaatagcctcctaag

SEQ ID NO: 75396 - RNA, 21 nt, synthetic construct
  source 1..21: mol_type = other RNA
caaagtttcctacatactgca

SEQ ID NO: 75397 - RNA, 21 nt, synthetic construct
  source 1..21: mol_type = other RNA
caaataaaacacaaggacagg

SEQ ID NO: 75398 - RNA, 21 nt, synthetic construct
  source 1..21: mol_type = other RNA
caaataacaccatagctgaag

SEQ ID NO: 75399 - RNA, 21 nt, synthetic construct
  source 1..21: mol_type = other RNA
caaataacatgcatatgtttg

SEQ ID NO: 75400 - RNA, 21 nt, synthetic construct
  source 1..21: mol_type = other RNA
caaataactccagcttttatt

SEQ ID NO: 75401 - RNA, 21 nt, synthetic construct
  source 1..21: mol_type = other RNA
caaataagaagattgagtcag

SEQ ID NO: 75402 - RNA, 21 nt, synthetic construct
  source 1..21: mol_type = other RNA
caaataaggtcacattcagag

SEQ ID NO: 75403 - RNA, 21 nt, synthetic construct
  source 1..21: mol_type = other RNA
caaataatagctatcctaatg

SEQ ID NO: 75404 - RNA, 21 nt, synthetic construct
  source 1..21: mol_type = other RNA
caaataatcccgcaccttgat

SEQ ID NO: 75405 - RNA, 21 nt, synthetic construct
  source 1..21: mol_type = other RNA
caaataattgctgcagttttt

SEQ ID NO: 75406 - RNA, 21 nt, synthetic construct
  source 1..21: mol_type = other RNA
caaatacctagttttccaatc

SEQ ID NO: 75407 - RNA, 21 nt, synthetic construct
  source 1..21: mol_type = other RNA
caaatacctctgaatgtgacc

SEQ ID NO: 75408 - RNA, 21 nt, synthetic construct
  source 1..21: mol_type = other RNA
caaatatccaatcactggcta

SEQ ID NO: 75409 - RNA, 21 nt, synthetic construct
  source 1..21: mol_type = other RNA
caaatcaaaacaataagacac

SEQ ID NO: 75410 - RNA, 21 nt, synthetic construct
  source 1..21: mol_type = other RNA
caaatcaatacttcatttcca

SEQ ID NO: 75411 - RNA, 21 nt, synthetic construct
  source 1..21: mol_type = other RNA
caaatcagaaaaggctgagac

SEQ ID NO: 75412 - RNA, 21 nt, synthetic construct
  source 1..21: mol_type = other RNA
caaatcagatttcaggtggta

SEQ ID NO: 75413 - RNA, 21 nt, synthetic construct
  source 1..21: mol_type = other RNA
caaatcatgaaagtggagaat

SEQ ID NO: 75414 - RNA, 21 nt, synthetic construct
  source 1..21: mol_type = other RNA
caaatccaaattcacagcatg

SEQ ID NO: 75415 - RNA, 21 nt, synthetic construct
  source 1..21: mol_type = other RNA
caaatccaggatggcatgaaa

SEQ ID NO: 75416 - RNA, 21 nt, synthetic construct
  source 1..21: mol_type = other RNA
caaatccagtcttcaggtctc

SEQ ID NO: 75417 - RNA, 21 nt, synthetic construct
  source 1..21: mol_type = other RNA
caaatccctgatcaagttgct

SEQ ID NO: 75418 - RNA, 21 nt, synthetic construct
  source 1..21: mol_type = other RNA
caaatccttttcccaggagct

SEQ ID NO: 75419 - RNA, 21 nt, synthetic construct
  source 1..21: mol_type = other RNA
caaatctctagaacttatgca

SEQ ID NO: 75420 - RNA, 21 nt, synthetic construct
  source 1..21: mol_type = other RNA
caaatctggctgcagggcttc

SEQ ID NO: 75421 - RNA, 21 nt, synthetic construct
  source 1..21: mol_type = other RNA
caaatctttagtgttgcttgg

SEQ ID NO: 75422 - RNA, 21 nt, synthetic construct
  source 1..21: mol_type = other RNA
caaatgaaaggcgtcggggct

SEQ ID NO: 75423 - RNA, 21 nt, synthetic construct
  source 1..21: mol_type = other RNA
caaatgaaagtcagctaattt

SEQ ID NO: 75424 - RNA, 21 nt, synthetic construct
  source 1..21: mol_type = other RNA
caaatgaacaggttcttcatc

SEQ ID NO: 75425 - RNA, 21 nt, synthetic construct
  source 1..21: mol_type = other RNA
caaatgaggcttttattggta

SEQ ID NO: 75426 - RNA, 21 nt, synthetic construct
  source 1..21: mol_type = other RNA
caaatgaggttgcttttactt

SEQ ID NO: 75427 - RNA, 21 nt, synthetic construct
  source 1..21: mol_type = other RNA
caaatgatgaagggttttctg

SEQ ID NO: 75428 - RNA, 21 nt, synthetic construct
  source 1..21: mol_type = other RNA
caaatgcaccaacacctgcag

SEQ ID NO: 75429 - RNA, 21 nt, synthetic construct
  source 1..21: mol_type = other RNA
caaatgcagaaaataaaccaa

SEQ ID NO: 75430 - RNA, 21 nt, synthetic construct
  source 1..21: mol_type = other RNA
caaatgccatagagctttaaa

SEQ ID NO: 75431 - RNA, 21 nt, synthetic construct
  source 1..21: mol_type = other RNA
caaatgctataaagaacatga

SEQ ID NO: 75432 - RNA, 21 nt, synthetic construct
  source 1..21: mol_type = other RNA
caaatggaaccactgtaggcc

SEQ ID NO: 75433 - RNA, 21 nt, synthetic construct
  source 1..21: mol_type = other RNA
caaatggagtgacttaagcaa

SEQ ID NO: 75434 - RNA, 21 nt, synthetic construct
  source 1..21: mol_type = other RNA
caaatggccttctttctttca

SEQ ID NO: 75435 - RNA, 21 nt, synthetic construct
  source 1..21: mol_type = other RNA
caaatgggaaattagatgatg

SEQ ID NO: 75436 - RNA, 21 nt, synthetic construct
  source 1..21: mol_type = other RNA
caaatgggagcatgcacacag

SEQ ID NO: 75437 - RNA, 21 nt, synthetic construct
  source 1..21: mol_type = other RNA
caaatggtaacagccaaataa

SEQ ID NO: 75438 - RNA, 21 nt, synthetic construct
  source 1..21: mol_type = other RNA
caaatgtcatcttctctctct

SEQ ID NO: 75439 - RNA, 21 nt, synthetic construct
  source 1..21: mol_type = other RNA
caaatgtctcattgtggatga

SEQ ID NO: 75440 - RNA, 21 nt, synthetic construct
  source 1..21: mol_type = other RNA
caaatgtctgtctttatgcca

SEQ ID NO: 75441 - RNA, 21 nt, synthetic construct
  source 1..21: mol_type = other RNA
caaatgtcttaagaaggaaaa

SEQ ID NO: 75442 - RNA, 21 nt, synthetic construct
  source 1..21: mol_type = other RNA
caaatgtgacagaacaaactc

SEQ ID NO: 75443 - RNA, 21 nt, synthetic construct
  source 1..21: mol_type = other RNA
caaatgtgactagaagaaatg

SEQ ID NO: 75444 - RNA, 21 nt, synthetic construct
  source 1..21: mol_type = other RNA
caaatgtggatagtgcttttt

SEQ ID NO: 75445 - RNA, 21 nt, synthetic construct
  source 1..21: mol_type = other RNA
caaatgttaagcccaacttca

SEQ ID NO: 75446 - RNA, 21 nt, synthetic construct
  source 1..21: mol_type = other RNA
caaatgttgcagagactggat

SEQ ID NO: 75447 - RNA, 21 nt, synthetic construct
  source 1..21: mol_type = other RNA
caaattaaaggatgtcaactg

SEQ ID NO: 75448 - RNA, 21 nt, synthetic construct
  source 1..21: mol_type = other RNA
caaattaatcagtctgtaagc

SEQ ID NO: 75449 - RNA, 21 nt, synthetic construct
  source 1..21: mol_type = other RNA
caaattaccatgtttccataa

SEQ ID NO: 75450 - RNA, 21 nt, synthetic construct
  source 1..21: mol_type = other RNA
caaattagccaggcgtggtgg

SEQ ID NO: 75451 - RNA, 21 nt, synthetic construct
  source 1..21: mol_type = other RNA
caaattagctttctcccagct

SEQ ID NO: 75452 - RNA, 21 nt, synthetic construct
  source 1..21: mol_type = other RNA
caaattagtcatagcagtggg

SEQ ID NO: 75453 - RNA, 21 nt, synthetic construct
  source 1..21: mol_type = other RNA
caaattatgactgagatactt

SEQ ID NO: 75454 - RNA, 21 nt, synthetic construct
  source 1..21: mol_type = other RNA
caaattattgacaagacgtgt

SEQ ID NO: 75455 - RNA, 21 nt, synthetic construct
  source 1..21: mol_type = other RNA
caaattattttcctccttctg

SEQ ID NO: 75456 - RNA, 21 nt, synthetic construct
  source 1..21: mol_type = other RNA
caaattcacagaactgtcact

SEQ ID NO: 75457 - RNA, 21 nt, synthetic construct
  source 1..21: mol_type = other RNA
caaattcacagcatgaatacc

SEQ ID NO: 75458 - RNA, 21 nt, synthetic construct
  source 1..21: mol_type = other RNA
caaattcacgagactgttagg

SEQ ID NO: 75459 - RNA, 21 nt, synthetic construct
  source 1..21: mol_type = other RNA
caaattcatagatcaccaggg

SEQ ID NO: 75460 - RNA, 21 nt, synthetic construct
  source 1..21: mol_type = other RNA
caaattcatgcaactgaaaac

SEQ ID NO: 75461 - RNA, 21 nt, synthetic construct
  source 1..21: mol_type = other RNA
caaattccctctacaaaagga

SEQ ID NO: 75462 - RNA, 21 nt, synthetic construct
  source 1..21: mol_type = other RNA
caaattctgagggaaattatt

SEQ ID NO: 75463 - RNA, 21 nt, synthetic construct
  source 1..21: mol_type = other RNA
caaattgcatcaactgcttcc

SEQ ID NO: 75464 - RNA, 21 nt, synthetic construct
  source 1..21: mol_type = other RNA
caaattggcatttaaaagaac

SEQ ID NO: 75465 - RNA, 21 nt, synthetic construct
  source 1..21: mol_type = other RNA
caaattgtcagattttcttgt

SEQ ID NO: 75466 - RNA, 21 nt, synthetic construct
  source 1..21: mol_type = other RNA
caaattgtgtgttctcttttt

SEQ ID NO: 75467 - RNA, 21 nt, synthetic construct
  source 1..21: mol_type = other RNA
caaatttaacacacaacaatg

SEQ ID NO: 75468 - RNA, 21 nt, synthetic construct
  source 1..21: mol_type = other RNA
caaatttatgttcatgaacct

SEQ ID NO: 75469 - RNA, 21 nt, synthetic construct
  source 1..21: mol_type = other RNA
caaatttctatagtcattccg

SEQ ID NO: 75470 - RNA, 21 nt, synthetic construct
  source 1..21: mol_type = other RNA
caaatttttcacattcttcac

SEQ ID NO: 75471 - RNA, 21 nt, synthetic construct
  source 1..21: mol_type = other RNA
caacaaaacaatctaattcga

SEQ ID NO: 75472 - RNA, 21 nt, synthetic construct
  source 1..21: mol_type = other RNA
caacaaaacacacgggtacac

SEQ ID NO: 75473 - RNA, 21 nt, synthetic construct
  source 1..21: mol_type = other RNA
caacaaaactgggggctggac

SEQ ID NO: 75474 - RNA, 21 nt, synthetic construct
  source 1..21: mol_type = other RNA
caacaaaatacccacaagaaa

SEQ ID NO: 75475 - RNA, 21 nt, synthetic construct
  source 1..21: mol_type = other RNA
caacaaacaattagcaccttt

SEQ ID NO: 75476 - RNA, 21 nt, synthetic construct
  source 1..21: mol_type = other RNA
caacaaactaactagaaaacc

SEQ ID NO: 75477 - RNA, 21 nt, synthetic construct
  source 1..21: mol_type = other RNA
caacaaaggcgaagcccgccg

SEQ ID NO: 75478 - RNA, 21 nt, synthetic construct
  source 1..21: mol_type = other RNA
caacaaaggttgaaaactcaa

SEQ ID NO: 75479 - RNA, 21 nt, synthetic construct
  source 1..21: mol_type = other RNA
caacaaatgttgcagagactg

SEQ ID NO: 75480 - RNA, 21 nt, synthetic construct
  source 1..21: mol_type = other RNA
caacaacaaaacacacgggta

SEQ ID NO: 75481 - RNA, 21 nt, synthetic construct
  source 1..21: mol_type = other RNA
caacaacaaaacatgttttca

SEQ ID NO: 75482 - RNA, 21 nt, synthetic construct
  source 1..21: mol_type = other RNA
caacaacaaaatacccacaag

SEQ ID NO: 75483 - RNA, 21 nt, synthetic construct
  source 1..21: mol_type = other RNA
caacaacaacaaaacacacgg

SEQ ID NO: 75484 - RNA, 21 nt, synthetic construct
  source 1..21: mol_type = other RNA
caacaacaacaaaacatgttt

SEQ ID NO: 75485 - RNA, 21 nt, synthetic construct
  source 1..21: mol_type = other RNA
caacaacaacaaaatacccac

SEQ ID NO: 75486 - RNA, 21 nt, synthetic construct
  source 1..21: mol_type = other RNA
caacaacaacaacaaaacaca

SEQ ID NO: 75487 - RNA, 21 nt, synthetic construct
  source 1..21: mol_type = other RNA
caacaacaacaacaaaacatg

SEQ ID NO: 75488 - RNA, 21 nt, synthetic construct
  source 1..21: mol_type = other RNA
caacaaccataatgagtaaca

SEQ ID NO: 75489 - RNA, 21 nt, synthetic construct
  source 1..21: mol_type = other RNA
caacaagagaggacagttggc

SEQ ID NO: 75490 - RNA, 21 nt, synthetic construct
  source 1..21: mol_type = other RNA
caacaagggttggtgcttcct

SEQ ID NO: 75491 - RNA, 21 nt, synthetic construct
  source 1..21: mol_type = other RNA
caacaatagcaacaaaacaat

SEQ ID NO: 75492 - RNA, 21 nt, synthetic construct
  source 1..21: mol_type = other RNA
caacaatcaacaggtagctgc

SEQ ID NO: 75493 - RNA, 21 nt, synthetic construct
  source 1..21: mol_type = other RNA
caacaattcaacaatagcaac

SEQ ID NO: 75494 - RNA, 21 nt, synthetic construct
  source 1..21: mol_type = other RNA
caacaattcaacagctactat

SEQ ID NO: 75495 - RNA, 21 nt, synthetic construct
  source 1..21: mol_type = other RNA
caacacaaagccttctctact

SEQ ID NO: 75496 - RNA, 21 nt, synthetic construct
  source 1..21: mol_type = other RNA
caacacactagccactgggtc

SEQ ID NO: 75497 - RNA, 21 nt, synthetic construct
  source 1..21: mol_type = other RNA
caacacatcagcgctaagtgc

SEQ ID NO: 75498 - RNA, 21 nt, synthetic construct
  source 1..21: mol_type = other RNA
caacacatgcacactagacct

SEQ ID NO: 75499 - RNA, 21 nt, synthetic construct
  source 1..21: mol_type = other RNA
caacacatggggcattaattt

SEQ ID NO: 75500 - RNA, 21 nt, synthetic construct
  source 1..21: mol_type = other RNA
caacacattcaaaattgttct

SEQ ID NO: 75501 - RNA, 21 nt, synthetic construct
  source 1..21: mol_type = other RNA
caacaccaagcaacactaaag

SEQ ID NO: 75502 - RNA, 21 nt, synthetic construct
  source 1..21: mol_type = other RNA
caacaccagatactcatgctt

SEQ ID NO: 75503 - RNA, 21 nt, synthetic construct
  source 1..21: mol_type = other RNA
caacacctgcagtggcgtgtg

SEQ ID NO: 75504 - RNA, 21 nt, synthetic construct
  source 1..21: mol_type = other RNA
caacaccttgggaggctgagg

SEQ ID NO: 75505 - RNA, 21 nt, synthetic construct
  source 1..21: mol_type = other RNA
caacactaaagatttgccaat

SEQ ID NO: 75506 - RNA, 21 nt, synthetic construct
  source 1..21: mol_type = other RNA
caacactaaccaacattgagt

SEQ ID NO: 75507 - RNA, 21 nt, synthetic construct
  source 1..21: mol_type = other RNA
caacactcagatatcaatctg

SEQ ID NO: 75508 - RNA, 21 nt, synthetic construct
  source 1..21: mol_type = other RNA
caacactgtgttcttttcctt

SEQ ID NO: 75509 - RNA, 21 nt, synthetic construct
  source 1..21: mol_type = other RNA
caacacttcagtggtaaggac

SEQ ID NO: 75510 - RNA, 21 nt, synthetic construct
  source 1..21: mol_type = other RNA
caacacttttccagtcttctc

SEQ ID NO: 75511 - RNA, 21 nt, synthetic construct
  source 1..21: mol_type = other RNA
caacagaagaagtttctagtt

SEQ ID NO: 75512 - RNA, 21 nt, synthetic construct
  source 1..21: mol_type = other RNA
caacagaataaatgaaaacag

SEQ ID NO: 75513 - RNA, 21 nt, synthetic construct
  source 1..21: mol_type = other RNA
caacagagacagagaatctgt

SEQ ID NO: 75514 - RNA, 21 nt, synthetic construct
  source 1..21: mol_type = other RNA
caacagatcctcacatcagtt

SEQ ID NO: 75515 - RNA, 21 nt, synthetic construct
  source 1..21: mol_type = other RNA
caacagatctgagaagactaa

SEQ ID NO: 75516 - RNA, 21 nt, synthetic construct
  source 1..21: mol_type = other RNA
caacagcaaggctcctgcaga

SEQ ID NO: 75517 - RNA, 21 nt, synthetic construct
  source 1..21: mol_type = other RNA
caacagcaccttttttggtat

SEQ ID NO: 75518 - RNA, 21 nt, synthetic construct
  source 1..21: mol_type = other RNA
caacagcacttttgtactact

SEQ ID NO: 75519 - RNA, 21 nt, synthetic construct
  source 1..21: mol_type = other RNA
caacagcagaacaaactgcgt

SEQ ID NO: 75520 - RNA, 21 nt, synthetic construct
  source 1..21: mol_type = other RNA
caacagctactatgaatatac

SEQ ID NO: 75521 - RNA, 21 nt, synthetic construct
  source 1..21: mol_type = other RNA
caacaggaagaggcagctaag

SEQ ID NO: 75522 - RNA, 21 nt, synthetic construct
  source 1..21: mol_type = other RNA
caacaggcctgagccgtcggt

SEQ ID NO: 75523 - RNA, 21 nt, synthetic construct
  source 1..21: mol_type = other RNA
caacaggctgagtgcggtggc

SEQ ID NO: 75524 - RNA, 21 nt, synthetic construct
  source 1..21: mol_type = other RNA
caacagggccactgagagctc

SEQ ID NO: 75525 - RNA, 21 nt, synthetic construct
  source 1..21: mol_type = other RNA
caacagggtaagattccgtct

SEQ ID NO: 75526 - RNA, 21 nt, synthetic construct
  source 1..21: mol_type = other RNA
caacagggttttgttttgttt

SEQ ID NO: 75527 - RNA, 21 nt, synthetic construct
  source 1..21: mol_type = other RNA
caacaggtagctgctttttaa

SEQ ID NO: 75528 - RNA, 21 nt, synthetic construct
  source 1..21: mol_type = other RNA
caacaggtataaagtttccgt

SEQ ID NO: 75529 - RNA, 21 nt, synthetic construct
  source 1..21: mol_type = other RNA
caacagtcattcaggtctatg

SEQ ID NO: 75530 - RNA, 21 nt, synthetic construct
  source 1..21: mol_type = other RNA
caacagtgtactagtctccat

SEQ ID NO: 75531 - RNA, 21 nt, synthetic construct
  source 1..21: mol_type = other RNA
caacagtgtgagaccgtgtct

SEQ ID NO: 75532 - RNA, 21 nt, synthetic construct
  source 1..21: mol_type = other RNA
caacagttactttcctttttc

SEQ ID NO: 75533 - RNA, 21 nt, synthetic construct
  source 1..21: mol_type = other RNA
caacagtttacacgccttcgc

SEQ ID NO: 75534 - RNA, 21 nt, synthetic construct
  source 1..21: mol_type = other RNA
caacataaatagggtgctact

SEQ ID NO: 75535 - RNA, 21 nt, synthetic construct
  source 1..21: mol_type = other RNA
caacataccaaaacccttggg

SEQ ID NO: 75536 - RNA, 21 nt, synthetic construct
  source 1..21: mol_type = other RNA
caacatcactagctattagag

SEQ ID NO: 75537 - RNA, 21 nt, synthetic construct
  source 1..21: mol_type = other RNA
caacatccacagctttctttt

SEQ ID NO: 75538 - RNA, 21 nt, synthetic construct
  source 1..21: mol_type = other RNA
caacatccctatgcaataact

SEQ ID NO: 75539 - RNA, 21 nt, synthetic construct
  source 1..21: mol_type = other RNA
caacatcgtaaaacctcatct

SEQ ID NO: 75540 - RNA, 21 nt, synthetic construct
  source 1..21: mol_type = other RNA
caacatctgcctcccgggtcc

SEQ ID NO: 75541 - RNA, 21 nt, synthetic construct
  source 1..21: mol_type = other RNA
caacatgaaaagatactcaac

SEQ ID NO: 75542 - RNA, 21 nt, synthetic construct
  source 1..21: mol_type = other RNA
caacatgagagaaaattgttc

SEQ ID NO: 75543 - RNA, 21 nt, synthetic construct
  source 1..21: mol_type = other RNA
caacatgccagctttggctga

SEQ ID NO: 75544 - RNA, 21 nt, synthetic construct
  source 1..21: mol_type = other RNA
caacatgctaagtgtttagga

SEQ ID NO: 75545 - RNA, 21 nt, synthetic construct
  source 1..21: mol_type = other RNA
caacatgctcttaagtatttt

SEQ ID NO: 75546 - RNA, 21 nt, synthetic construct
  source 1..21: mol_type = other RNA
caacatggcacatgtctacct

SEQ ID NO: 75547 - RNA, 21 nt, synthetic construct
  source 1..21: mol_type = other RNA
caacatggtagaccatataat

SEQ ID NO: 75548 - RNA, 21 nt, synthetic construct
  source 1..21: mol_type = other RNA
caacatgtgtatttagggagc

SEQ ID NO: 75549 - RNA, 21 nt, synthetic construct
  source 1..21: mol_type = other RNA
caacattaagggaaacagggt

SEQ ID NO: 75550 - RNA, 21 nt, synthetic construct
  source 1..21: mol_type = other RNA
caacattcatccctctaaata

SEQ ID NO: 75551 - RNA, 21 nt, synthetic construct
  source 1..21: mol_type = other RNA
caacattcattcatgacaaga

SEQ ID NO: 75552 - RNA, 21 nt, synthetic construct
  source 1..21: mol_type = other RNA
caacattgagtttcaatgact

SEQ ID NO: 75553 - RNA, 21 nt, synthetic construct
  source 1..21: mol_type = other RNA
caacattgcctccatatggga

SEQ ID NO: 75554 - RNA, 21 nt, synthetic construct
  source 1..21: mol_type = other RNA
caacattgtgcaaccatcccc

SEQ ID NO: 75555 - RNA, 21 nt, synthetic construct
  source 1..21: mol_type = other RNA
caacatttgttgcatccccat

SEQ ID NO: 75556 - RNA, 21 nt, synthetic construct
  source 1..21: mol_type = other RNA
caaccaagcccaactttttct

SEQ ID NO: 75557 - RNA, 21 nt, synthetic construct
  source 1..21: mol_type = other RNA
caaccaatcgcagggccattc

SEQ ID NO: 75558 - RNA, 21 nt, synthetic construct
  source 1..21: mol_type = other RNA
caaccactaaggtcaacacat

SEQ ID NO: 75559 - RNA, 21 nt, synthetic construct
  source 1..21: mol_type = other RNA
caaccactgaatcagatttta

SEQ ID NO: 75560 - RNA, 21 nt, synthetic construct
  source 1..21: mol_type = other RNA
caaccactgatggaattctga

SEQ ID NO: 75561 - RNA, 21 nt, synthetic construct
  source 1..21: mol_type = other RNA
caaccactggggagtgtgccc

SEQ ID NO: 75562 - RNA, 21 nt, synthetic construct
  source 1..21: mol_type = other RNA
caaccataatgagtaacatgt

SEQ ID NO: 75563 - RNA, 21 nt, synthetic construct
  source 1..21: mol_type = other RNA
caaccatacttttcaactgaa

SEQ ID NO: 75564 - RNA, 21 nt, synthetic construct
  source 1..21: mol_type = other RNA
caaccatccccgctgtccatt

SEQ ID NO: 75565 - RNA, 21 nt, synthetic construct
  source 1..21: mol_type = other RNA
caaccatcttcttagtgttcc

SEQ ID NO: 75566 - RNA, 21 nt, synthetic construct
  source 1..21: mol_type = other RNA
caaccattactcttctactca

SEQ ID NO: 75567 - RNA, 21 nt, synthetic construct
  source 1..21: mol_type = other RNA
caacccatgaaaattgaatta

SEQ ID NO: 75568 - RNA, 21 nt, synthetic construct
  source 1..21: mol_type = other RNA
caacccattccaggttttatc

SEQ ID NO: 75569 - RNA, 21 nt, synthetic construct
  source 1..21: mol_type = other RNA
caacccccggccctgccgctt

SEQ ID NO: 75570 - RNA, 21 nt, synthetic construct
  source 1..21: mol_type = other RNA
caaccctacctagggtgtaaa

SEQ ID NO: 75571 - RNA, 21 nt, synthetic construct
  source 1..21: mol_type = other RNA
caaccctcggcctctactgac

SEQ ID NO: 75572 - RNA, 21 nt, synthetic construct
  source 1..21: mol_type = other RNA
caacccttgttggacagctgg

SEQ ID NO: 75573 - RNA, 21 nt, synthetic construct
  source 1..21: mol_type = other RNA
caaccggaaaatgcttaacaa

SEQ ID NO: 75574 - RNA, 21 nt, synthetic construct
  source 1..21: mol_type = other RNA
caacctaaatgtccatcgaga

SEQ ID NO: 75575 - RNA, 21 nt, synthetic construct
  source 1..21: mol_type = other RNA
caacctaacatgtcttggtgt

SEQ ID NO: 75576 - RNA, 21 nt, synthetic construct
  source 1..21: mol_type = other RNA
caacctactttaaatcagggc

SEQ ID NO: 75577 - RNA, 21 nt, synthetic construct
  source 1..21: mol_type = other RNA
caacctataagacccagtggc

SEQ ID NO: 75578 - RNA, 21 nt, synthetic construct
  source 1..21: mol_type = other RNA
caacctcaactttaggttacg

SEQ ID NO: 75579 - RNA, 21 nt, synthetic construct
  source 1..21: mol_type = other RNA
caacctcatttgcagagcaaa

SEQ ID NO: 75580 - RNA, 21 nt, synthetic construct
  source 1..21: mol_type = other RNA
caacctccgtttttcaggttc

SEQ ID NO: 75581 - RNA, 21 nt, synthetic construct
  source 1..21: mol_type = other RNA
caacctgattagaggctgcac

SEQ ID NO: 75582 - RNA, 21 nt, synthetic construct
  source 1..21: mol_type = other RNA
caacctgcaggtatttctaaa

SEQ ID NO: 75583 - RNA, 21 nt, synthetic construct
  source 1..21: mol_type = other RNA
caacctgctttcctcatgtcc

SEQ ID NO: 75584 - RNA, 21 nt, synthetic construct
  source 1..21: mol_type = other RNA
caacctgtctcaaaaataaat

SEQ ID NO: 75585 - RNA, 21 nt, synthetic construct
  source 1..21: mol_type = other RNA
caaccttgggagaaaattttt

SEQ ID NO: 75586 - RNA, 21 nt, synthetic construct
  source 1..21: mol_type = other RNA
caacctttgcctcctgggttc

SEQ ID NO: 75587 - RNA, 21 nt, synthetic construct
  source 1..21: mol_type = other RNA
caacctttgttgaaaacgagg

SEQ ID NO: 75588 - RNA, 21 nt, synthetic construct
  source 1..21: mol_type = other RNA
caaccttttaggtgccccact

SEQ ID NO: 75589 - RNA, 21 nt, synthetic construct
  source 1..21: mol_type = other RNA
caacgacaatctctggggtta

SEQ ID NO: 75590 - RNA, 21 nt, synthetic construct
  source 1..21: mol_type = other RNA
caacgaccggacgtggtggct

SEQ ID NO: 75591 - RNA, 21 nt, synthetic construct
  source 1..21: mol_type = other RNA
caacgatttcttaaaaatgac

SEQ ID NO: 75592 - RNA, 21 nt, synthetic construct
  source 1..21: mol_type = other RNA
caacgcacccagagcgggttt

SEQ ID NO: 75593 - RNA, 21 nt, synthetic construct
  source 1..21: mol_type = other RNA
caacgcctgtgatcccagcta

SEQ ID NO: 75594 - RNA, 21 nt, synthetic construct
  source 1..21: mol_type = other RNA
caacgctgtggctaacaatca

SEQ ID NO: 75595 - RNA, 21 nt, synthetic construct
  source 1..21: mol_type = other RNA
caacgctttttatggaaacat

SEQ ID NO: 75596 - RNA, 21 nt, synthetic construct
  source 1..21: mol_type = other RNA
caacggaaatgagtgagccac

SEQ ID NO: 75597 - RNA, 21 nt, synthetic construct
  source 1..21: mol_type = other RNA
caacggacatttttccaaaga

SEQ ID NO: 75598 - RNA, 21 nt, synthetic construct
  source 1..21: mol_type = other RNA
caacgtgcaggtttgttacac

SEQ ID NO: 75599 - RNA, 21 nt, synthetic construct
  source 1..21: mol_type = other RNA
caactaataattgcttttgct

SEQ ID NO: 75600 - RNA, 21 nt, synthetic construct
  source 1..21: mol_type = other RNA
caactaatcaaacatacccca

SEQ ID NO: 75601 - RNA, 21 nt, synthetic construct
  source 1..21: mol_type = other RNA
caactactatttcgcaaagca

SEQ ID NO: 75602 - RNA, 21 nt, synthetic construct
  source 1..21: mol_type = other RNA
caactagagaaagcatcagag

SEQ ID NO: 75603 - RNA, 21 nt, synthetic construct
  source 1..21: mol_type = other RNA
caactagtaagtaaaatcgga

SEQ ID NO: 75604 - RNA, 21 nt, synthetic construct
  source 1..21: mol_type = other RNA
caactatcaaaacacttctgt

SEQ ID NO: 75605 - RNA, 21 nt, synthetic construct
  source 1..21: mol_type = other RNA
caactattccataagatctgt

SEQ ID NO: 75606 - RNA, 21 nt, synthetic construct
  source 1..21: mol_type = other RNA
caactcaaacgtccatcaaca

SEQ ID NO: 75607 - RNA, 21 nt, synthetic construct
  source 1..21: mol_type = other RNA
caactccacattgtcttaatt

SEQ ID NO: 75608 - RNA, 21 nt, synthetic construct
  source 1..21: mol_type = other RNA
caactcctgggctcatctaag

SEQ ID NO: 75609 - RNA, 21 nt, synthetic construct
  source 1..21: mol_type = other RNA
caactctaataacagcctaag

SEQ ID NO: 75610 - RNA, 21 nt, synthetic construct
  source 1..21: mol_type = other RNA
caactctgaccattgtgtgga

SEQ ID NO: 75611 - RNA, 21 nt, synthetic construct
  source 1..21: mol_type = other RNA
caactctggcaggtcacctag

SEQ ID NO: 75612 - RNA, 21 nt, synthetic construct
  source 1..21: mol_type = other RNA
caactcttggccattttcttt

SEQ ID NO: 75613 - RNA, 21 nt, synthetic construct
  source 1..21: mol_type = other RNA
caactgaacaacgctgtggct

SEQ ID NO: 75614 - RNA, 21 nt, synthetic construct
  source 1..21: mol_type = other RNA
caactgaagcggggctgccac

SEQ ID NO: 75615 - RNA, 21 nt, synthetic construct
  source 1..21: mol_type = other RNA
caactgactctaaagtctatg

SEQ ID NO: 75616 - RNA, 21 nt, synthetic construct
  source 1..21: mol_type = other RNA
caactgagaagagctgtaaca

SEQ ID NO: 75617 - RNA, 21 nt, synthetic construct
  source 1..21: mol_type = other RNA
caactgaggcagagtagagaa

SEQ ID NO: 75618 - RNA, 21 nt, synthetic construct
  source 1..21: mol_type = other RNA
caactgcaaaactttcttcaa

SEQ ID NO: 75619 - RNA, 21 nt, synthetic construct
  source 1..21: mol_type = other RNA
caactgcagtctgtcctcgta

SEQ ID NO: 75620 - RNA, 21 nt, synthetic construct
  source 1..21: mol_type = other RNA
caactgcatcttcttttactt

SEQ ID NO: 75621 - RNA, 21 nt, synthetic construct
  source 1..21: mol_type = other RNA
caactgcctctacatcacaga

SEQ ID NO: 75622 - RNA, 21 nt, synthetic construct
  source 1..21: mol_type = other RNA
caactgctcataatagtctca

SEQ ID NO: 75623 - RNA, 21 nt, synthetic construct
  source 1..21: mol_type = other RNA
caactgcttccctagcccagc

SEQ ID NO: 75624 - RNA, 21 nt, synthetic construct
  source 1..21: mol_type = other RNA
caactggcccctccatggaaa

SEQ ID NO: 75625 - RNA, 21 nt, synthetic construct
  source 1..21: mol_type = other RNA
caactgggagaatggcaaggc

SEQ ID NO: 75626 - RNA, 21 nt, synthetic construct
  source 1..21: mol_type = other RNA
caactggtttctgcatactta

SEQ ID NO: 75627 - RNA, 21 nt, synthetic construct
  source 1..21: mol_type = other RNA
caactgtataaatgttcagtt

SEQ ID NO: 75628 - RNA, 21 nt, synthetic construct
  source 1..21: mol_type = other RNA
caactgtcctctcttgttgag

SEQ ID NO: 75629 - RNA, 21 nt, synthetic construct
  source 1..21: mol_type = other RNA
caactgttttttcctcccttc

SEQ ID NO: 75630 - RNA, 21 nt, synthetic construct
  source 1..21: mol_type = other RNA
caacttagccttggtaaaatc

SEQ ID NO: 75631 - RNA, 21 nt, synthetic construct
  source 1..21: mol_type = other RNA
caacttcacaccatttagatc

SEQ ID NO: 75632 - RNA, 21 nt, synthetic construct
  source 1..21: mol_type = other RNA
caacttccagcaagactttat

SEQ ID NO: 75633 - RNA, 21 nt, synthetic construct
  source 1..21: mol_type = other RNA
caacttcctgttttagtggct

SEQ ID NO: 75634 - RNA, 21 nt, synthetic construct
  source 1..21: mol_type = other RNA
caacttgaaggcaatgtaggg

SEQ ID NO: 75635 - RNA, 21 nt, synthetic construct
  source 1..21: mol_type = other RNA
caacttgatcagggatttggc

SEQ ID NO: 75636 - RNA, 21 nt, synthetic construct
  source 1..21: mol_type = other RNA
caacttgcagaagagtgaagc

SEQ ID NO: 75637 - RNA, 21 nt, synthetic construct
  source 1..21: mol_type = other RNA
caacttggtaaaaagtgcttc

SEQ ID NO: 75638 - RNA, 21 nt, synthetic construct
  source 1..21: mol_type = other RNA
caacttgtatgaaattagttc

SEQ ID NO: 75639 - RNA, 21 nt, synthetic construct
  source 1..21: mol_type = other RNA
caactttaggttacgtactag

SEQ ID NO: 75640 - RNA, 21 nt, synthetic construct
  source 1..21: mol_type = other RNA
caacttttagtaggtctcctt

SEQ ID NO: 75641 - RNA, 21 nt, synthetic construct
  source 1..21: mol_type = other RNA
caagaaaaacctaaacctgtg

SEQ ID NO: 75642 - RNA, 21 nt, synthetic construct
  source 1..21: mol_type = other RNA
caagaaaaagcagagaaactg

SEQ ID NO: 75643 - RNA, 21 nt, synthetic construct
  source 1..21: mol_type = other RNA
caagaaaatctgacaatttgc

SEQ ID NO: 75644 - RNA, 21 nt, synthetic construct
  source 1..21: mol_type = other RNA
caagaaaccacagagcctaaa

SEQ ID NO: 75645 - RNA, 21 nt, synthetic construct
  source 1..21: mol_type = other RNA
caagaaagcaggtcatgactt

SEQ ID NO: 75646 - RNA, 21 nt, synthetic construct
  source 1..21: mol_type = other RNA
caagaaaggacttcagtcctt

SEQ ID NO: 75647 - RNA, 21 nt, synthetic construct
  source 1..21: mol_type = other RNA
caagaaagggtagctttgatg

SEQ ID NO: 75648 - RNA, 21 nt, synthetic construct
  source 1..21: mol_type = other RNA
caagaaataaaacatggccag

SEQ ID NO: 75649 - RNA, 21 nt, synthetic construct
  source 1..21: mol_type = other RNA
caagaacaaccttatctattt

SEQ ID NO: 75650 - RNA, 21 nt, synthetic construct
  source 1..21: mol_type = other RNA
caagaaccctttgttatctga

SEQ ID NO: 75651 - RNA, 21 nt, synthetic construct
  source 1..21: mol_type = other RNA
caagaagaaaaagcaacttga

SEQ ID NO: 75652 - RNA, 21 nt, synthetic construct
  source 1..21: mol_type = other RNA
caagaagacatgataaatacg

SEQ ID NO: 75653 - RNA, 21 nt, synthetic construct
  source 1..21: mol_type = other RNA
caagaagctgttttggtaaaa

SEQ ID NO: 75654 - RNA, 21 nt, synthetic construct
  source 1..21: mol_type = other RNA
caagaaggctagcacagaggc

SEQ ID NO: 75655 - RNA, 21 nt, synthetic construct
  source 1..21: mol_type = other RNA
caagaaggtatcatcggaaat

SEQ ID NO: 75656 - RNA, 21 nt, synthetic construct
  source 1..21: mol_type = other RNA
caagaatcctgctattttatt

SEQ ID NO: 75657 - RNA, 21 nt, synthetic construct
  source 1..21: mol_type = other RNA
caagaatctttggcaaactta

SEQ ID NO: 75658 - RNA, 21 nt, synthetic construct
  source 1..21: mol_type = other RNA
caagaatgaagtcagagattt

SEQ ID NO: 75659 - RNA, 21 nt, synthetic construct
  source 1..21: mol_type = other RNA
caagaatggtttaacacatac

SEQ ID NO: 75660 - RNA, 21 nt, synthetic construct
  source 1..21: mol_type = other RNA
caagaatttcatgcctttcag

SEQ ID NO: 75661 - RNA, 21 nt, synthetic construct
  source 1..21: mol_type = other RNA
caagaattttccattcatgta

SEQ ID NO: 75662 - RNA, 21 nt, synthetic construct
  source 1..21: mol_type = other RNA
caagacaagcaaggaagggct

SEQ ID NO: 75663 - RNA, 21 nt, synthetic construct
  source 1..21: mol_type = other RNA
caagacagagctccctctccc

SEQ ID NO: 75664 - RNA, 21 nt, synthetic construct
  source 1..21: mol_type = other RNA
caagacagatgtgcttaatct

SEQ ID NO: 75665 - RNA, 21 nt, synthetic construct
  source 1..21: mol_type = other RNA
caagacaggaagaattattgt

SEQ ID NO: 75666 - RNA, 21 nt, synthetic construct
  source 1..21: mol_type = other RNA
caagacataagcattttctaa

SEQ ID NO: 75667 - RNA, 21 nt, synthetic construct
  source 1..21: mol_type = other RNA
caagacatgttaggttgaaag

SEQ ID NO: 75668 - RNA, 21 nt, synthetic construct
  source 1..21: mol_type = other RNA
caagaccctgtctctaaaaaa

SEQ ID NO: 75669 - RNA, 21 nt, synthetic construct
  source 1..21: mol_type = other RNA
caagacgtgtacataaaataa

SEQ ID NO: 75670 - RNA, 21 nt, synthetic construct
  source 1..21: mol_type = other RNA
caagactacctaaaacaatct

SEQ ID NO: 75671 - RNA, 21 nt, synthetic construct
  source 1..21: mol_type = other RNA
caagactcaaatctcaaaaaa

SEQ ID NO: 75672 - RNA, 21 nt, synthetic construct
  source 1..21: mol_type = other RNA
caagactcaacatgtgtattt

SEQ ID NO: 75673 - RNA, 21 nt, synthetic construct
  source 1..21: mol_type = other RNA
caagactttatgtggaaaaat

SEQ ID NO: 75674 - RNA, 21 nt, synthetic construct
  source 1..21: mol_type = other RNA
caagagagattaaataacttc

SEQ ID NO: 75675 - RNA, 21 nt, synthetic construct
  source 1..21: mol_type = other RNA
caagagagcaagactcaaatc

SEQ ID NO: 75676 - RNA, 21 nt, synthetic construct
  source 1..21: mol_type = other RNA
caagagagcaagtccccatct

SEQ ID NO: 75677 - RNA, 21 nt, synthetic construct
  source 1..21: mol_type = other RNA
caagagaggaataaatggtag

SEQ ID NO: 75678 - RNA, 21 nt, synthetic construct
  source 1..21: mol_type = other RNA
caagagaggacagttggcctt

SEQ ID NO: 75679 - RNA, 21 nt, synthetic construct
  source 1..21: mol_type = other RNA
caagagcagaactccacctca

SEQ ID NO: 75680 - RNA, 21 nt, synthetic construct
  source 1..21: mol_type = other RNA
caagagcatagactttagagt

SEQ ID NO: 75681 - RNA, 21 nt, synthetic construct
  source 1..21: mol_type = other RNA
caagagcgaggcctggaacag

SEQ ID NO: 75682 - RNA, 21 nt, synthetic construct
  source 1..21: mol_type = other RNA
caagagcggcctttgcctctc

SEQ ID NO: 75683 - RNA, 21 nt, synthetic construct
  source 1..21: mol_type = other RNA
caagagcgtcgtacctttcgc

SEQ ID NO: 75684 - RNA, 21 nt, synthetic construct
  source 1..21: mol_type = other RNA
caagaggttaaaaccacaaac

SEQ ID NO: 75685 - RNA, 21 nt, synthetic construct
  source 1..21: mol_type = other RNA
caagagtctgcagaccaagaa

SEQ ID NO: 75686 - RNA, 21 nt, synthetic construct
  source 1..21: mol_type = other RNA
caagagtgtggctttaaggcg

SEQ ID NO: 75687 - RNA, 21 nt, synthetic construct
  source 1..21: mol_type = other RNA
caagagttaaaactcacaaaa

SEQ ID NO: 75688 - RNA, 21 nt, synthetic construct
  source 1..21: mol_type = other RNA
caagagttacttctggaaagt

SEQ ID NO: 75689 - RNA, 21 nt, synthetic construct
  source 1..21: mol_type = other RNA
caagagttccaactgtataaa

SEQ ID NO: 75690 - RNA, 21 nt, synthetic construct
  source 1..21: mol_type = other RNA
caagagttcccctatactgta

SEQ ID NO: 75691 - RNA, 21 nt, synthetic construct
  source 1..21: mol_type = other RNA
caagagttgctgacttcctgg

SEQ ID NO: 75692 - RNA, 21 nt, synthetic construct
  source 1..21: mol_type = other RNA
caagatactgcactaaactag

SEQ ID NO: 75693 - RNA, 21 nt, synthetic construct
  source 1..21: mol_type = other RNA
caagatctctatgcagaaatc

SEQ ID NO: 75694 - RNA, 21 nt, synthetic construct
  source 1..21: mol_type = other RNA
caagatctgtttttcaaaatg

SEQ ID NO: 75695 - RNA, 21 nt, synthetic construct
  source 1..21: mol_type = other RNA
caagatgaatctgcaactatc

SEQ ID NO: 75696 - RNA, 21 nt, synthetic construct
  source 1..21: mol_type = other RNA
caagatgcataagttctagag

SEQ ID NO: 75697 - RNA, 21 nt, synthetic construct
  source 1..21: mol_type = other RNA
caagatgcataccaagcccgg

SEQ ID NO: 75698 - RNA, 21 nt, synthetic construct
  source 1..21: mol_type = other RNA
caagatggcaagtttccattc

SEQ ID NO: 75699 - RNA, 21 nt, synthetic construct
  source 1..21: mol_type = other RNA
caagatgtcaacattaaggga

SEQ ID NO: 75700 - RNA, 21 nt, synthetic construct
  source 1..21: mol_type = other RNA
caagattaatcttgcaaaaca

SEQ ID NO: 75701 - RNA, 21 nt, synthetic construct
  source 1..21: mol_type = other RNA
caagattaatcttgtgaattg

SEQ ID NO: 75702 - RNA, 21 nt, synthetic construct
  source 1..21: mol_type = other RNA
caagattactggatacaaggt

SEQ ID NO: 75703 - RNA, 21 nt, synthetic construct
  source 1..21: mol_type = other RNA
caagattgaaaatggtttagg

SEQ ID NO: 75704 - RNA, 21 nt, synthetic construct
  source 1..21: mol_type = other RNA
caagattgtgtgatttcatat

SEQ ID NO: 75705 - RNA, 21 nt, synthetic construct
  source 1..21: mol_type = other RNA
caagatttcataggcatctct

SEQ ID NO: 75706 - RNA, 21 nt, synthetic construct
  source 1..21: mol_type = other RNA
caagattttcccaatctctgg

SEQ ID NO: 75707 - RNA, 21 nt, synthetic construct
  source 1..21: mol_type = other RNA
caagcaacaccagatactcat

SEQ ID NO: 75708 - RNA, 21 nt, synthetic construct
  source 1..21: mol_type = other RNA
caagcaacactaaagatttgc

SEQ ID NO: 75709 - RNA, 21 nt, synthetic construct
  source 1..21: mol_type = other RNA
caagcaacttgatcagggatt

SEQ ID NO: 75710 - RNA, 21 nt, synthetic construct
  source 1..21: mol_type = other RNA
caagcaaggaagggcttgatc

SEQ ID NO: 75711 - RNA, 21 nt, synthetic construct
  source 1..21: mol_type = other RNA
caagcaagtaaaagaagatgc

SEQ ID NO: 75712 - RNA, 21 nt, synthetic construct
  source 1..21: mol_type = other RNA
caagcaagtgtggtggtctca

SEQ ID NO: 75713 - RNA, 21 nt, synthetic construct
  source 1..21: mol_type = other RNA
caagcaatctgaaacgacctt

SEQ ID NO: 75714 - RNA, 21 nt, synthetic construct
  source 1..21: mol_type = other RNA
caagcacaaacctggcaatac

SEQ ID NO: 75715 - RNA, 21 nt, synthetic construct
  source 1..21: mol_type = other RNA
caagcacacagtttgagaagc

SEQ ID NO: 75716 - RNA, 21 nt, synthetic construct
  source 1..21: mol_type = other RNA
caagcacactttccttggaga

SEQ ID NO: 75717 - RNA, 21 nt, synthetic construct
  source 1..21: mol_type = other RNA
caagcacagagtcagaaaatt

SEQ ID NO: 75718 - RNA, 21 nt, synthetic construct
  source 1..21: mol_type = other RNA
caagcacaggcatctctctaa

SEQ ID NO: 75719 - RNA, 21 nt, synthetic construct
  source 1..21: mol_type = other RNA
caagcaccacttcgagaaggg

SEQ ID NO: 75720 - RNA, 21 nt, synthetic construct
  source 1..21: mol_type = other RNA
caagcacgttagcatcaccat

SEQ ID NO: 75721 - RNA, 21 nt, synthetic construct
  source 1..21: mol_type = other RNA
caagcactggtaaggaaacag

SEQ ID NO: 75722 - RNA, 21 nt, synthetic construct
  source 1..21: mol_type = other RNA
caagcagaaatgagttccagt

SEQ ID NO: 75723 - RNA, 21 nt, synthetic construct
  source 1..21: mol_type = other RNA
caagcagatctgctgtaagct

SEQ ID NO: 75724 - RNA, 21 nt, synthetic construct
  source 1..21: mol_type = other RNA
caagcagggacgggcggggga

SEQ ID NO: 75725 - RNA, 21 nt, synthetic construct
  source 1..21: mol_type = other RNA
caagcagtaaatatactgact

SEQ ID NO: 75726 - RNA, 21 nt, synthetic construct
  source 1..21: mol_type = other RNA
caagcagtcctgccttggcct

SEQ ID NO: 75727 - RNA, 21 nt, synthetic construct
  source 1..21: mol_type = other RNA
caagcatgagtatctggtgtt

SEQ ID NO: 75728 - RNA, 21 nt, synthetic construct
  source 1..21: mol_type = other RNA
caagcatggtggtaggtgtgt

SEQ ID NO: 75729 - RNA, 21 nt, synthetic construct
  source 1..21: mol_type = other RNA
caagcattgggagctttcatt

SEQ ID NO: 75730 - RNA, 21 nt, synthetic construct
  source 1..21: mol_type = other RNA
caagccaaattaataaaatgg

SEQ ID NO: 75731 - RNA, 21 nt, synthetic construct
  source 1..21: mol_type = other RNA
caagccacagcgtggaatggt

SEQ ID NO: 75732 - RNA, 21 nt, synthetic construct
  source 1..21: mol_type = other RNA
caagccacatgtggttattga

SEQ ID NO: 75733 - RNA, 21 nt, synthetic construct
  source 1..21: mol_type = other RNA
caagccacattagccactctg

SEQ ID NO: 75734 - RNA, 21 nt, synthetic construct
  source 1..21: mol_type = other RNA
caagccagggtctgtctcacc

SEQ ID NO: 75735 - RNA, 21 nt, synthetic construct
  source 1..21: mol_type = other RNA
caagccatcctccagccttaa

SEQ ID NO: 75736 - RNA, 21 nt, synthetic construct
  source 1..21: mol_type = other RNA
caagcccaactttttcttttt

SEQ ID NO: 75737 - RNA, 21 nt, synthetic construct
  source 1..21: mol_type = other RNA
caagccccagttctgcgcaat

SEQ ID NO: 75738 - RNA, 21 nt, synthetic construct
  source 1..21: mol_type = other RNA
caagcccggcacggtggctca

SEQ ID NO: 75739 - RNA, 21 nt, synthetic construct
  source 1..21: mol_type = other RNA
caagccctgccttaaaacatt

SEQ ID NO: 75740 - RNA, 21 nt, synthetic construct
  source 1..21: mol_type = other RNA
caagcccttccttgcttgtct

SEQ ID NO: 75741 - RNA, 21 nt, synthetic construct
  source 1..21: mol_type = other RNA
caagccgcaaataatcattct

SEQ ID NO: 75742 - RNA, 21 nt, synthetic construct
  source 1..21: mol_type = other RNA
caagcctgataagctcccagc

SEQ ID NO: 75743 - RNA, 21 nt, synthetic construct
  source 1..21: mol_type = other RNA
caagccttaaaagtgctgcag

SEQ ID NO: 75744 - RNA, 21 nt, synthetic construct
  source 1..21: mol_type = other RNA
caagccttgaaaatatactaa

SEQ ID NO: 75745 - RNA, 21 nt, synthetic construct
  source 1..21: mol_type = other RNA
caagccttggcaaggggaatg

SEQ ID NO: 75746 - RNA, 21 nt, synthetic construct
  source 1..21: mol_type = other RNA
caagcgctgaagtacttcaag

SEQ ID NO: 75747 - RNA, 21 nt, synthetic construct
  source 1..21: mol_type = other RNA
caagctaccatttattcctct

SEQ ID NO: 75748 - RNA, 21 nt, synthetic construct
  source 1..21: mol_type = other RNA
caagctatcagaattttattc

SEQ ID NO: 75749 - RNA, 21 nt, synthetic construct
  source 1..21: mol_type = other RNA
caagctccgcctcctggtggg

SEQ ID NO: 75750 - RNA, 21 nt, synthetic construct
  source 1..21: mol_type = other RNA
caagctcgccgtctccctcgg

SEQ ID NO: 75751 - RNA, 21 nt, synthetic construct
  source 1..21: mol_type = other RNA
caagctgtttgagctgaaagt

SEQ ID NO: 75752 - RNA, 21 nt, synthetic construct
  source 1..21: mol_type = other RNA
caagcttaggtcagattcctt

SEQ ID NO: 75753 - RNA, 21 nt, synthetic construct
  source 1..21: mol_type = other RNA
caaggaaaggatggtttgatt

SEQ ID NO: 75754 - RNA, 21 nt, synthetic construct
  source 1..21: mol_type = other RNA
caaggaaagtgtgcttgggct

SEQ ID NO: 75755 - RNA, 21 nt, synthetic construct
  source 1..21: mol_type = other RNA
caaggaagcagaatgtccatc

SEQ ID NO: 75756 - RNA, 21 nt, synthetic construct
  source 1..21: mol_type = other RNA
caaggaagcttcctaaagaga

SEQ ID NO: 75757 - RNA, 21 nt, synthetic construct
  source 1..21: mol_type = other RNA
caaggaaggaaaggagatact

SEQ ID NO: 75758 - RNA, 21 nt, synthetic construct
  source 1..21: mol_type = other RNA
caaggaaggcagggtaggaag

SEQ ID NO: 75759 - RNA, 21 nt, synthetic construct
  source 1..21: mol_type = other RNA
caaggaagggcttgatctagt

SEQ ID NO: 75760 - RNA, 21 nt, synthetic construct
  source 1..21: mol_type = other RNA
caaggaaggtcaaatggtaac

SEQ ID NO: 75761 - RNA, 21 nt, synthetic construct
  source 1..21: mol_type = other RNA
caaggacagaaattcaacttg

SEQ ID NO: 75762 - RNA, 21 nt, synthetic construct
  source 1..21: mol_type = other RNA
caaggacaggtcacattctgc

SEQ ID NO: 75763 - RNA, 21 nt, synthetic construct
  source 1..21: mol_type = other RNA
caaggaccattagcagttctg

SEQ ID NO: 75764 - RNA, 21 nt, synthetic construct
  source 1..21: mol_type = other RNA
caaggactggcttcagtgcca

SEQ ID NO: 75765 - RNA, 21 nt, synthetic construct
  source 1..21: mol_type = other RNA
caaggagacctactaaaagtt

SEQ ID NO: 75766 - RNA, 21 nt, synthetic construct
  source 1..21: mol_type = other RNA
caaggagagaaaaacaaaaca

SEQ ID NO: 75767 - RNA, 21 nt, synthetic construct
  source 1..21: mol_type = other RNA
caaggagggaggattgtttga

SEQ ID NO: 75768 - RNA, 21 nt, synthetic construct
  source 1..21: mol_type = other RNA
caaggataaacaaagagaaca

SEQ ID NO: 75769 - RNA, 21 nt, synthetic construct
  source 1..21: mol_type = other RNA
caaggattaatctttctgaac

SEQ ID NO: 75770 - RNA, 21 nt, synthetic construct
  source 1..21: mol_type = other RNA
caaggattgaatggaaagaaa

SEQ ID NO: 75771 - RNA, 21 nt, synthetic construct
  source 1..21: mol_type = other RNA
caaggcacagtctgtgcttaa

SEQ ID NO: 75772 - RNA, 21 nt, synthetic construct
  source 1..21: mol_type = other RNA
caaggcagaacacactgctct

SEQ ID NO: 75773 - RNA, 21 nt, synthetic construct
  source 1..21: mol_type = other RNA
caaggcaggactgcttgaggc

SEQ ID NO: 75774 - RNA, 21 nt, synthetic construct
  source 1..21: mol_type = other RNA
caaggccaactgtcctctctt

SEQ ID NO: 75775 - RNA, 21 nt, synthetic construct
  source 1..21: mol_type = other RNA
caaggcccaccatgatgcagc

SEQ ID NO: 75776 - RNA, 21 nt, synthetic construct
  source 1..21: mol_type = other RNA
caaggctaacagccaaagaaa

SEQ ID NO: 75777 - RNA, 21 nt, synthetic construct
  source 1..21: mol_type = other RNA
caaggctaagttgagaaacta

SEQ ID NO: 75778 - RNA, 21 nt, synthetic construct
  source 1..21: mol_type = other RNA
caaggctagagctcacacgag

SEQ ID NO: 75779 - RNA, 21 nt, synthetic construct
  source 1..21: mol_type = other RNA
caaggctcctgcagacatgca

SEQ ID NO: 75780 - RNA, 21 nt, synthetic construct
  source 1..21: mol_type = other RNA
caaggctggagtgcagtggcg

SEQ ID NO: 75781 - RNA, 21 nt, synthetic construct
  source 1..21: mol_type = other RNA
caaggcttgctttggctagaa

SEQ ID NO: 75782 - RNA, 21 nt, synthetic construct
  source 1..21: mol_type = other RNA
caaggcttgtgcatcagaatt

SEQ ID NO: 75783 - RNA, 21 nt, synthetic construct
  source 1..21: mol_type = other RNA
caagggaagaggccacaaagt

SEQ ID NO: 75784 - RNA, 21 nt, synthetic construct
  source 1..21: mol_type = other RNA
caagggactgtcgaagcttaa

SEQ ID NO: 75785 - RNA, 21 nt, synthetic construct
  source 1..21: mol_type = other RNA
caagggctttcaatagtgggt

SEQ ID NO: 75786 - RNA, 21 nt, synthetic construct
  source 1..21: mol_type = other RNA
caaggggaatggtactgcctc

SEQ ID NO: 75787 - RNA, 21 nt, synthetic construct
  source 1..21: mol_type = other RNA
caaggggagaggcctcatgta

SEQ ID NO: 75788 - RNA, 21 nt, synthetic construct
  source 1..21: mol_type = other RNA
caaggggccttttgtcaagct

SEQ ID NO: 75789 - RNA, 21 nt, synthetic construct
  source 1..21: mol_type = other RNA
caagggtgacagagccgagca

SEQ ID NO: 75790 - RNA, 21 nt, synthetic construct
  source 1..21: mol_type = other RNA
caagggtggctggcactttcc

SEQ ID NO: 75791 - RNA, 21 nt, synthetic construct
  source 1..21: mol_type = other RNA
caagggtggtgctggactgga

SEQ ID NO: 75792 - RNA, 21 nt, synthetic construct
  source 1..21: mol_type = other RNA
caagggtgtgtttaatttcca

SEQ ID NO: 75793 - RNA, 21 nt, synthetic construct
  source 1..21: mol_type = other RNA
caagggtgttttcccccctaa

SEQ ID NO: 75794 - RNA, 21 nt, synthetic construct
  source 1..21: mol_type = other RNA
caagggttggtgcttccttct

SEQ ID NO: 75795 - RNA, 21 nt, synthetic construct
  source 1..21: mol_type = other RNA
caagggtttgtcaattttgct

SEQ ID NO: 75796 - RNA, 21 nt, synthetic construct
  source 1..21: mol_type = other RNA
caagggttttggtatgttgtg

SEQ ID NO: 75797 - RNA, 21 nt, synthetic construct
  source 1..21: mol_type = other RNA
caaggtaatctagtttatctc

SEQ ID NO: 75798 - RNA, 21 nt, synthetic construct
  source 1..21: mol_type = other RNA
caaggtacaatacactaaatt

SEQ ID NO: 75799 - RNA, 21 nt, synthetic construct
  source 1..21: mol_type = other RNA
caaggtacaattacacatctc

SEQ ID NO: 75800 - RNA, 21 nt, synthetic construct
  source 1..21: mol_type = other RNA
caaggtagaagtacaaacatt

SEQ ID NO: 75801 - RNA, 21 nt, synthetic construct
  source 1..21: mol_type = other RNA
caaggtatctccccaaagata

SEQ ID NO: 75802 - RNA, 21 nt, synthetic construct
  source 1..21: mol_type = other RNA
caaggtcaagagcggcctttg

SEQ ID NO: 75803 - RNA, 21 nt, synthetic construct
  source 1..21: mol_type = other RNA
caaggtcaatctgaaaaatat

SEQ ID NO: 75804 - RNA, 21 nt, synthetic construct
  source 1..21: mol_type = other RNA
caaggtcagaagtttggaacc

SEQ ID NO: 75805 - RNA, 21 nt, synthetic construct
  source 1..21: mol_type = other RNA
caaggtcatcctttcccttct

SEQ ID NO: 75806 - RNA, 21 nt, synthetic construct
  source 1..21: mol_type = other RNA
caaggtcgtttcagattgctt

SEQ ID NO: 75807 - RNA, 21 nt, synthetic construct
  source 1..21: mol_type = other RNA
caaggtgcgggattatttgga

SEQ ID NO: 75808 - RNA, 21 nt, synthetic construct
  source 1..21: mol_type = other RNA
caaggtgttagcaggactgga

SEQ ID NO: 75809 - RNA, 21 nt, synthetic construct
  source 1..21: mol_type = other RNA
caaggtgttcctgaagtcttt

SEQ ID NO: 75810 - RNA, 21 nt, synthetic construct
  source 1..21: mol_type = other RNA
caaggttataatcagccgtga

SEQ ID NO: 75811 - RNA, 21 nt, synthetic construct
  source 1..21: mol_type = other RNA
caaggttcacaaattagaaca

SEQ ID NO: 75812 - RNA, 21 nt, synthetic construct
  source 1..21: mol_type = other RNA
caaggttgcctgttcactctg

SEQ ID NO: 75813 - RNA, 21 nt, synthetic construct
  source 1..21: mol_type = other RNA
caaggtttctctccaaggtac

SEQ ID NO: 75814 - RNA, 21 nt, synthetic construct
  source 1..21: mol_type = other RNA
caagtaaaagaagatgcagtt

SEQ ID NO: 75815 - RNA, 21 nt, synthetic construct
  source 1..21: mol_type = other RNA
caagtaaaagcaacctcattt

SEQ ID NO: 75816 - RNA, 21 nt, synthetic construct
  source 1..21: mol_type = other RNA
caagtaaacaactgactctaa

SEQ ID NO: 75817 - RNA, 21 nt, synthetic construct
  source 1..21: mol_type = other RNA
caagtaaacctcaagtctttt

SEQ ID NO: 75818 - RNA, 21 nt, synthetic construct
  source 1..21: mol_type = other RNA
caagtaaatgcaatgcaggcg

SEQ ID NO: 75819 - RNA, 21 nt, synthetic construct
  source 1..21: mol_type = other RNA
caagtaacactcagaagtact

SEQ ID NO: 75820 - RNA, 21 nt, synthetic construct
  source 1..21: mol_type = other RNA
caagtaacagttcaatactac

SEQ ID NO: 75821 - RNA, 21 nt, synthetic construct
  source 1..21: mol_type = other RNA
caagtaattgttttccctttt

SEQ ID NO: 75822 - RNA, 21 nt, synthetic construct
  source 1..21: mol_type = other RNA
caagtacaactaataattgct

SEQ ID NO: 75823 - RNA, 21 nt, synthetic construct
  source 1..21: mol_type = other RNA
caagtacatgaaatactcaaa

SEQ ID NO: 75824 - RNA, 21 nt, synthetic construct
  source 1..21: mol_type = other RNA
caagtactgcatgattcccct

SEQ ID NO: 75825 - RNA, 21 nt, synthetic construct
  source 1..21: mol_type = other RNA
caagtagcagggactacagtc

SEQ ID NO: 75826 - RNA, 21 nt, synthetic construct
  source 1..21: mol_type = other RNA
caagtagctaggaccataggc

SEQ ID NO: 75827 - RNA, 21 nt, synthetic construct
  source 1..21: mol_type = other RNA
caagtagctgggatcacaggc

SEQ ID NO: 75828 - RNA, 21 nt, synthetic construct
  source 1..21: mol_type = other RNA
caagtagtacaaaagtgctgt

SEQ ID NO: 75829 - RNA, 21 nt, synthetic construct
  source 1..21: mol_type = other RNA
caagtataagatgatgatatg

SEQ ID NO: 75830 - RNA, 21 nt, synthetic construct
  source 1..21: mol_type = other RNA
caagtatctccctgtgcgtga

SEQ ID NO: 75831 - RNA, 21 nt, synthetic construct
  source 1..21: mol_type = other RNA
caagtatgagccactagtcag

SEQ ID NO: 75832 - RNA, 21 nt, synthetic construct
  source 1..21: mol_type = other RNA
caagtatttccacgggtaaaa

SEQ ID NO: 75833 - RNA, 21 nt, synthetic construct
  source 1..21: mol_type = other RNA
caagtatttctcatctgtcac

SEQ ID NO: 75834 - RNA, 21 nt, synthetic construct
  source 1..21: mol_type = other RNA
caagtcacaaaaagacaagta

SEQ ID NO: 75835 - RNA, 21 nt, synthetic construct
  source 1..21: mol_type = other RNA
caagtcagcacttctgatatc

SEQ ID NO: 75836 - RNA, 21 nt, synthetic construct
  source 1..21: mol_type = other RNA
caagtccccatctccacaaaa

SEQ ID NO: 75837 - RNA, 21 nt, synthetic construct
  source 1..21: mol_type = other RNA
caagtcccggaagctgggcta

SEQ ID NO: 75838 - RNA, 21 nt, synthetic construct
  source 1..21: mol_type = other RNA
caagtccgtgcatgcctctgt

SEQ ID NO: 75839 - RNA, 21 nt, synthetic construct
  source 1..21: mol_type = other RNA
caagtcctttccagaggttct

SEQ ID NO: 75840 - RNA, 21 nt, synthetic construct
  source 1..21: mol_type = other RNA
caagtctcatgcaattcccca

SEQ ID NO: 75841 - RNA, 21 nt, synthetic construct
  source 1..21: mol_type = other RNA
caagtcttttcctagactgcc

SEQ ID NO: 75842 - RNA, 21 nt, synthetic construct
  source 1..21: mol_type = other RNA
caagtgaaatgatctttgaat

SEQ ID NO: 75843 - RNA, 21 nt, synthetic construct
  source 1..21: mol_type = other RNA
caagtgaaccaaaaaccacat

SEQ ID NO: 75844 - RNA, 21 nt, synthetic construct
  source 1..21: mol_type = other RNA
caagtgactccaagcacacag

SEQ ID NO: 75845 - RNA, 21 nt, synthetic construct
  source 1..21: mol_type = other RNA
caagtgatgcaactcctgggc

SEQ ID NO: 75846 - RNA, 21 nt, synthetic construct
  source 1..21: mol_type = other RNA
caagtgcccattaacagatga

SEQ ID NO: 75847 - RNA, 21 nt, synthetic construct
  source 1..21: mol_type = other RNA
caagtgccgcgttttttgtcc

SEQ ID NO: 75848 - RNA, 21 nt, synthetic construct
  source 1..21: mol_type = other RNA
caagtgctgtgattgcaggtg

SEQ ID NO: 75849 - RNA, 21 nt, synthetic construct
  source 1..21: mol_type = other RNA
caagtggagcctgctctgcag

SEQ ID NO: 75850 - RNA, 21 nt, synthetic construct
  source 1..21: mol_type = other RNA
caagtgggtggatgggtgtag

SEQ ID NO: 75851 - RNA, 21 nt, synthetic construct
  source 1..21: mol_type = other RNA
caagtgtggtggtctcaccct

SEQ ID NO: 75852 - RNA, 21 nt, synthetic construct
  source 1..21: mol_type = other RNA
caagttaaaagacatctttcc

SEQ ID NO: 75853 - RNA, 21 nt, synthetic construct
  source 1..21: mol_type = other RNA
caagttacaaacatatgcatg

SEQ ID NO: 75854 - RNA, 21 nt, synthetic construct
  source 1..21: mol_type = other RNA
caagttacaataatatgcctc

SEQ ID NO: 75855 - RNA, 21 nt, synthetic construct
  source 1..21: mol_type = other RNA
caagttacatgcttagccttc

SEQ ID NO: 75856 - RNA, 21 nt, synthetic construct
  source 1..21: mol_type = other RNA
caagttactagaagcactttt

SEQ ID NO: 75857 - RNA, 21 nt, synthetic construct
  source 1..21: mol_type = other RNA
caagttcagcatcttcactga

SEQ ID NO: 75858 - RNA, 21 nt, synthetic construct
  source 1..21: mol_type = other RNA
caagttccggttctcaggagc

SEQ ID NO: 75859 - RNA, 21 nt, synthetic construct
  source 1..21: mol_type = other RNA
caagttctcctgtgtgcatgc

SEQ ID NO: 75860 - RNA, 21 nt, synthetic construct
  source 1..21: mol_type = other RNA
caagttctgatttcaaagtta

SEQ ID NO: 75861 - RNA, 21 nt, synthetic construct
  source 1..21: mol_type = other RNA
caagttcttacctcaaaggag

SEQ ID NO: 75862 - RNA, 21 nt, synthetic construct
  source 1..21: mol_type = other RNA
caagttgaatttctgtccttg

SEQ ID NO: 75863 - RNA, 21 nt, synthetic construct
  source 1..21: mol_type = other RNA
caagttgctatccagtctctg

SEQ ID NO: 75864 - RNA, 21 nt, synthetic construct
  source 1..21: mol_type = other RNA
caagttgcttggcacagaatt

SEQ ID NO: 75865 - RNA, 21 nt, synthetic construct
  source 1..21: mol_type = other RNA
caagttgctttttcttcttgt

SEQ ID NO: 75866 - RNA, 21 nt, synthetic construct
  source 1..21: mol_type = other RNA
caagtttaaccaattatgctg

SEQ ID NO: 75867 - RNA, 21 nt, synthetic construct
  source 1..21: mol_type = other RNA
caagtttcaccctgcgaaggc

SEQ ID NO: 75868 - RNA, 21 nt, synthetic construct
  source 1..21: mol_type = other RNA
caagtttccattctcttaatt

SEQ ID NO: 75869 - RNA, 21 nt, synthetic construct
  source 1..21: mol_type = other RNA
caagtttctagccataatcct

SEQ ID NO: 75870 - RNA, 21 nt, synthetic construct
  source 1..21: mol_type = other RNA
caagtttggctcccatgattc

SEQ ID NO: 75871 - RNA, 21 nt, synthetic construct
  source 1..21: mol_type = other RNA
caagtttggttcatttcagga

SEQ ID NO: 75872 - RNA, 21 nt, synthetic construct
  source 1..21: mol_type = other RNA
caagttttaacttaagaactg

SEQ ID NO: 75873 - RNA, 21 nt, synthetic construct
  source 1..21: mol_type = other RNA
caataaaagcctcatttgaac

SEQ ID NO: 75874 - RNA, 21 nt, synthetic construct
  source 1..21: mol_type = other RNA
caataaatggtgcaggccaga

SEQ ID NO: 75875 - RNA, 21 nt, synthetic construct
  source 1..21: mol_type = other RNA
caataaccacatgtggcttgt

SEQ ID NO: 75876 - RNA, 21 nt, synthetic construct
  source 1..21: mol_type = other RNA
caataagaagtgaaaaatgac

SEQ ID NO: 75877 - RNA, 21 nt, synthetic construct
  source 1..21: mol_type = other RNA
caataagacaccgctccacgc

SEQ ID NO: 75878 - RNA, 21 nt, synthetic construct
  source 1..21: mol_type = other RNA
caataaggaaagcacgtttga

SEQ ID NO: 75879 - RNA, 21 nt, synthetic construct
  source 1..21: mol_type = other RNA
caataagttaactgaaatcgg

SEQ ID NO: 75880 - RNA, 21 nt, synthetic construct
  source 1..21: mol_type = other RNA
caataataactacacatcagt

SEQ ID NO: 75881 - RNA, 21 nt, synthetic construct
  source 1..21: mol_type = other RNA
caataatatgcctcatgcatc

SEQ ID NO: 75882 - RNA, 21 nt, synthetic construct
  source 1..21: mol_type = other RNA
caataatgcacatgggcatgg

SEQ ID NO: 75883 - RNA, 21 nt, synthetic construct
  source 1..21: mol_type = other RNA
caataattctgtgccaagcaa

SEQ ID NO: 75884 - RNA, 21 nt, synthetic construct
  source 1..21: mol_type = other RNA
caataattcttcctgtcttgg

SEQ ID NO: 75885 - RNA, 21 nt, synthetic construct
  source 1..21: mol_type = other RNA
caataatttggatgaacgcta

SEQ ID NO: 75886 - RNA, 21 nt, synthetic construct
  source 1..21: mol_type = other RNA
caatacacgtggctgtcaaaa

SEQ ID NO: 75887 - RNA, 21 nt, synthetic construct
  source 1..21: mol_type = other RNA
caatacagttaacgtatgaat

SEQ ID NO: 75888 - RNA, 21 nt, synthetic construct
  source 1..21: mol_type = other RNA
caatacctgaaaagtgtatta

SEQ ID NO: 75889 - RNA, 21 nt, synthetic construct
  source 1..21: mol_type = other RNA
caatactactgcaaatatcca

SEQ ID NO: 75890 - RNA, 21 nt, synthetic construct
  source 1..21: mol_type = other RNA
caatactgcattgtgcactta

SEQ ID NO: 75891 - RNA, 21 nt, synthetic construct
  source 1..21: mol_type = other RNA
caatactgtctcagtcccaaa

SEQ ID NO: 75892 - RNA, 21 nt, synthetic construct
  source 1..21: mol_type = other RNA
caatactgttatgacaagact

SEQ ID NO: 75893 - RNA, 21 nt, synthetic construct
  source 1..21: mol_type = other RNA
caatacttaatagcccaacag

SEQ ID NO: 75894 - RNA, 21 nt, synthetic construct
  source 1..21: mol_type = other RNA
caatacttcatttccattgta

SEQ ID NO: 75895 - RNA, 21 nt, synthetic construct
  source 1..21: mol_type = other RNA
caatacttggatcttatctgc

SEQ ID NO: 75896 - RNA, 21 nt, synthetic construct
  source 1..21: mol_type = other RNA
caatactttagacatgggcta

SEQ ID NO: 75897 - RNA, 21 nt, synthetic construct
  source 1..21: mol_type = other RNA
caatagcaacaaaacaatcta

SEQ ID NO: 75898 - RNA, 21 nt, synthetic construct
  source 1..21: mol_type = other RNA
caatagcagtgctgaaagcta

SEQ ID NO: 75899 - RNA, 21 nt, synthetic construct
  source 1..21: mol_type = other RNA
caatagcccagcaggattttt

SEQ ID NO: 75900 - RNA, 21 nt, synthetic construct
  source 1..21: mol_type = other RNA
caatagctagtgtcttagtct

SEQ ID NO: 75901 - RNA, 21 nt, synthetic construct
  source 1..21: mol_type = other RNA
caataggaatagtattcagga

SEQ ID NO: 75902 - RNA, 21 nt, synthetic construct
  source 1..21: mol_type = other RNA
caatagtgggtagaagcagca

SEQ ID NO: 75903 - RNA, 21 nt, synthetic construct
  source 1..21: mol_type = other RNA
caatataggagactatcgtta

SEQ ID NO: 75904 - RNA, 21 nt, synthetic construct
  source 1..21: mol_type = other RNA
caatatagtgggaccccgtct

SEQ ID NO: 75905 - RNA, 21 nt, synthetic construct
  source 1..21: mol_type = other RNA
caatatcacactgtttgatta

SEQ ID NO: 75906 - RNA, 21 nt, synthetic construct
  source 1..21: mol_type = other RNA
caatatccctgataatcacag

SEQ ID NO: 75907 - RNA, 21 nt, synthetic construct
  source 1..21: mol_type = other RNA
caatatctatcagggctgaaa

SEQ ID NO: 75908 - RNA, 21 nt, synthetic construct
  source 1..21: mol_type = other RNA
caatatgactggtgtccttct

SEQ ID NO: 75909 - RNA, 21 nt, synthetic construct
  source 1..21: mol_type = other RNA
caatatgcagtatgtgccatt

SEQ ID NO: 75910 - RNA, 21 nt, synthetic construct
  source 1..21: mol_type = other RNA
caatattaagagtctcatctg

SEQ ID NO: 75911 - RNA, 21 nt, synthetic construct
  source 1..21: mol_type = other RNA
caatattacagtaaggtttcc

SEQ ID NO: 75912 - RNA, 21 nt, synthetic construct
  source 1..21: mol_type = other RNA
caatattttggaagactatga

SEQ ID NO: 75913 - RNA, 21 nt, synthetic construct
  source 1..21: mol_type = other RNA
caatcaaaccatcctttcctt

SEQ ID NO: 75914 - RNA, 21 nt, synthetic construct
  source 1..21: mol_type = other RNA
caatcaaatccagtcttcagg

SEQ ID NO: 75915 - RNA, 21 nt, synthetic construct
  source 1..21: mol_type = other RNA
caatcaaatggccttctttct

SEQ ID NO: 75916 - RNA, 21 nt, synthetic construct
  source 1..21: mol_type = other RNA
caatcaaatttaacacacaac

SEQ ID NO: 75917 - RNA, 21 nt, synthetic construct
  source 1..21: mol_type = other RNA
caatcaacaggtagctgcttt

SEQ ID NO: 75918 - RNA, 21 nt, synthetic construct
  source 1..21: mol_type = other RNA
caatcaataattctgtgccaa

SEQ ID NO: 75919 - RNA, 21 nt, synthetic construct
  source 1..21: mol_type = other RNA
caatcacagcacttggggagg

SEQ ID NO: 75920 - RNA, 21 nt, synthetic construct
  source 1..21: mol_type = other RNA
caatcacggctgattataacc

SEQ ID NO: 75921 - RNA, 21 nt, synthetic construct
  source 1..21: mol_type = other RNA
caatcactggctagtaggcaa

SEQ ID NO: 75922 - RNA, 21 nt, synthetic construct
  source 1..21: mol_type = other RNA
caatcagggccttcccaaaga

SEQ ID NO: 75923 - RNA, 21 nt, synthetic construct
  source 1..21: mol_type = other RNA
caatcagtggccagtgaccag

SEQ ID NO: 75924 - RNA, 21 nt, synthetic construct
  source 1..21: mol_type = other RNA
caatcatagctcactagagct

SEQ ID NO: 75925 - RNA, 21 nt, synthetic construct
  source 1..21: mol_type = other RNA
caatcatgtcaagaatgaagt

SEQ ID NO: 75926 - RNA, 21 nt, synthetic construct
  source 1..21: mol_type = other RNA
caatcatgttctttatagcat

SEQ ID NO: 75927 - RNA, 21 nt, synthetic construct
  source 1..21: mol_type = other RNA
caatccaaaatcctctgtaga

SEQ ID NO: 75928 - RNA, 21 nt, synthetic construct
  source 1..21: mol_type = other RNA
caatccaaggacagaaattca

SEQ ID NO: 75929 - RNA, 21 nt, synthetic construct
  source 1..21: mol_type = other RNA
caatccaagtttctagccata

SEQ ID NO: 75930 - RNA, 21 nt, synthetic construct
  source 1..21: mol_type = other RNA
caatccagacagctaatatgc

SEQ ID NO: 75931 - RNA, 21 nt, synthetic construct
  source 1..21: mol_type = other RNA
caatccaggatcttactgtaa

SEQ ID NO: 75932 - RNA, 21 nt, synthetic construct
  source 1..21: mol_type = other RNA
caatccccatctgggatactt

SEQ ID NO: 75933 - RNA, 21 nt, synthetic construct
  source 1..21: mol_type = other RNA
caatcccttccccacctttcc

SEQ ID NO: 75934 - RNA, 21 nt, synthetic construct
  source 1..21: mol_type = other RNA
caatccgggaacatgacatgt

SEQ ID NO: 75935 - RNA, 21 nt, synthetic construct
  source 1..21: mol_type = other RNA
caatcctcagccccctcccta

SEQ ID NO: 75936 - RNA, 21 nt, synthetic construct
  source 1..21: mol_type = other RNA
caatccttccttcatgtcccc

SEQ ID NO: 75937 - RNA, 21 nt, synthetic construct
  source 1..21: mol_type = other RNA
caatccttctaatcagtaact

SEQ ID NO: 75938 - RNA, 21 nt, synthetic construct
  source 1..21: mol_type = other RNA
caatcctttgtgcaggtctgg

SEQ ID NO: 75939 - RNA, 21 nt, synthetic construct
  source 1..21: mol_type = other RNA
caatcgcaatccaaaatcctc

SEQ ID NO: 75940 - RNA, 21 nt, synthetic construct
  source 1..21: mol_type = other RNA
caatcgcagggccattctgct

SEQ ID NO: 75941 - RNA, 21 nt, synthetic construct
  source 1..21: mol_type = other RNA
caatctaattcgaaaatgggc

SEQ ID NO: 75942 - RNA, 21 nt, synthetic construct
  source 1..21: mol_type = other RNA
caatctacaggtcggaaggaa

SEQ ID NO: 75943 - RNA, 21 nt, synthetic construct
  source 1..21: mol_type = other RNA
caatctaggaggtctaagaga

SEQ ID NO: 75944 - RNA, 21 nt, synthetic construct
  source 1..21: mol_type = other RNA
caatctcacacctgggtatac

SEQ ID NO: 75945 - RNA, 21 nt, synthetic construct
  source 1..21: mol_type = other RNA
caatctcagctcattacagtc

SEQ ID NO: 75946 - RNA, 21 nt, synthetic construct
  source 1..21: mol_type = other RNA
caatctcctgatccacctgcc

SEQ ID NO: 75947 - RNA, 21 nt, synthetic construct
  source 1..21: mol_type = other RNA
caatctcggcttcactgcaac

SEQ ID NO: 75948 - RNA, 21 nt, synthetic construct
  source 1..21: mol_type = other RNA
caatctctggggttagggcct

SEQ ID NO: 75949 - RNA, 21 nt, synthetic construct
  source 1..21: mol_type = other RNA
caatctctggtattctgaact

SEQ ID NO: 75950 - RNA, 21 nt, synthetic construct
  source 1..21: mol_type = other RNA
caatctgaaacgaccttgctc

SEQ ID NO: 75951 - RNA, 21 nt, synthetic construct
  source 1..21: mol_type = other RNA
caatctggaatgcatcgtttc

SEQ ID NO: 75952 - RNA, 21 nt, synthetic construct
  source 1..21: mol_type = other RNA
caatctggatataacaaatca

SEQ ID NO: 75953 - RNA, 21 nt, synthetic construct
  source 1..21: mol_type = other RNA
caatctgtttcctaatctaac

SEQ ID NO: 75954 - RNA, 21 nt, synthetic construct
  source 1..21: mol_type = other RNA
caatcttacccccatcacact

SEQ ID NO: 75955 - RNA, 21 nt, synthetic construct
  source 1..21: mol_type = other RNA
caatcttcccaatcctttgtg

SEQ ID NO: 75956 - RNA, 21 nt, synthetic construct
  source 1..21: mol_type = other RNA
caatcttcttatttgttactg

SEQ ID NO: 75957 - RNA, 21 nt, synthetic construct
  source 1..21: mol_type = other RNA
caatcttgaaaggggccaggt

SEQ ID NO: 75958 - RNA, 21 nt, synthetic construct
  source 1..21: mol_type = other RNA
caatcttgagacggaagactc

SEQ ID NO: 75959 - RNA, 21 nt, synthetic construct
  source 1..21: mol_type = other RNA
caatcttggaaatgatacctc

SEQ ID NO: 75960 - RNA, 21 nt, synthetic construct
  source 1..21: mol_type = other RNA
caatgaatatgtactacctat

SEQ ID NO: 75961 - RNA, 21 nt, synthetic construct
  source 1..21: mol_type = other RNA
caatgaattagcaatgcgaat

SEQ ID NO: 75962 - RNA, 21 nt, synthetic construct
  source 1..21: mol_type = other RNA
caatgacttttatcaattcac

SEQ ID NO: 75963 - RNA, 21 nt, synthetic construct
  source 1..21: mol_type = other RNA
caatgagacatttgagggtgc

SEQ ID NO: 75964 - RNA, 21 nt, synthetic construct
  source 1..21: mol_type = other RNA
caatgagaccccatctctacc

SEQ ID NO: 75965 - RNA, 21 nt, synthetic construct
  source 1..21: mol_type = other RNA
caatgagggcagagataactg

SEQ ID NO: 75966 - RNA, 21 nt, synthetic construct
  source 1..21: mol_type = other RNA
caatgagtctgacatactgtc

SEQ ID NO: 75967 - RNA, 21 nt, synthetic construct
  source 1..21: mol_type = other RNA
caatgatagactggattaagg

SEQ ID NO: 75968 - RNA, 21 nt, synthetic construct
  source 1..21: mol_type = other RNA
caatgataggtcactgcagtc

SEQ ID NO: 75969 - RNA, 21 nt, synthetic construct
  source 1..21: mol_type = other RNA
caatgcaatacttaatagccc

SEQ ID NO: 75970 - RNA, 21 nt, synthetic construct
  source 1..21: mol_type = other RNA
caatgcaatgcgtgtgaaacc

SEQ ID NO: 75971 - RNA, 21 nt, synthetic construct
  source 1..21: mol_type = other RNA
caatgcaggcgcctggacagg

SEQ ID NO: 75972 - RNA, 21 nt, synthetic construct
  source 1..21: mol_type = other RNA
caatgcagtattgttaactgt

SEQ ID NO: 75973 - RNA, 21 nt, synthetic construct
  source 1..21: mol_type = other RNA
caatgccagggcgctcctctc

SEQ ID NO: 75974 - RNA, 21 nt, synthetic construct
  source 1..21: mol_type = other RNA
caatgcctgccgcagagcaag

SEQ ID NO: 75975 - RNA, 21 nt, synthetic construct
  source 1..21: mol_type = other RNA
caatgcctgcgattgcaggca

SEQ ID NO: 75976 - RNA, 21 nt, synthetic construct
  source 1..21: mol_type = other RNA
caatgcgaatcatctaggcat

SEQ ID NO: 75977 - RNA, 21 nt, synthetic construct
  source 1..21: mol_type = other RNA
caatgcgtgtgaaaccaagca

SEQ ID NO: 75978 - RNA, 21 nt, synthetic construct
  source 1..21: mol_type = other RNA
caatgcgtttgttagatctgg

SEQ ID NO: 75979 - RNA, 21 nt, synthetic construct
  source 1..21: mol_type = other RNA
caatgctctcttcccccaaaa

SEQ ID NO: 75980 - RNA, 21 nt, synthetic construct
  source 1..21: mol_type = other RNA
caatgctgctatgaaaattgg

SEQ ID NO: 75981 - RNA, 21 nt, synthetic construct
  source 1..21: mol_type = other RNA
caatgcttgaagagcgcttct

SEQ ID NO: 75982 - RNA, 21 nt, synthetic construct
  source 1..21: mol_type = other RNA
caatggaaaatgtaaaacatc

SEQ ID NO: 75983 - RNA, 21 nt, synthetic construct
  source 1..21: mol_type = other RNA
caatggaaatgaagtattgat

SEQ ID NO: 75984 - RNA, 21 nt, synthetic construct
  source 1..21: mol_type = other RNA
caatggaatagaagggagaac

SEQ ID NO: 75985 - RNA, 21 nt, synthetic construct
  source 1..21: mol_type = other RNA
caatggaatattactcagtct

SEQ ID NO: 75986 - RNA, 21 nt, synthetic construct
  source 1..21: mol_type = other RNA
caatggggaactttatttttt

SEQ ID NO: 75987 - RNA, 21 nt, synthetic construct
  source 1..21: mol_type = other RNA
caatggggcaatctcagctca

SEQ ID NO: 75988 - RNA, 21 nt, synthetic construct
  source 1..21: mol_type = other RNA
caatggggctttactgtatta

SEQ ID NO: 75989 - RNA, 21 nt, synthetic construct
  source 1..21: mol_type = other RNA
caatggtcagagttgtatctg

SEQ ID NO: 75990 - RNA, 21 nt, synthetic construct
  source 1..21: mol_type = other RNA
caatggtgggatctctgggct

SEQ ID NO: 75991 - RNA, 21 nt, synthetic construct
  source 1..21: mol_type = other RNA
caatggttaagactgctgttt

SEQ ID NO: 75992 - RNA, 21 nt, synthetic construct
  source 1..21: mol_type = other RNA
caatggttcataatatatcac

SEQ ID NO: 75993 - RNA, 21 nt, synthetic construct
  source 1..21: mol_type = other RNA
caatgtaacacagttctagtt

SEQ ID NO: 75994 - RNA, 21 nt, synthetic construct
  source 1..21: mol_type = other RNA
caatgtaaggtgcacgctgtg

SEQ ID NO: 75995 - RNA, 21 nt, synthetic construct
  source 1..21: mol_type = other RNA
caatgtagggaatagacaaag

SEQ ID NO: 75996 - RNA, 21 nt, synthetic construct
  source 1..21: mol_type = other RNA
caatgtcagagatctgaaatt

SEQ ID NO: 75997 - RNA, 21 nt, synthetic construct
  source 1..21: mol_type = other RNA
caatgtctttggctcttagaa

SEQ ID NO: 75998 - RNA, 21 nt, synthetic construct
  source 1..21: mol_type = other RNA
caatgtgagccacatacatag

SEQ ID NO: 75999 - RNA, 21 nt, synthetic construct
  source 1..21: mol_type = other RNA
caatgtggagttggtgcaagg

SEQ ID NO: 76000 - RNA, 21 nt, synthetic construct
  source 1..21: mol_type = other RNA
caatgttctcttttcctcgtt

SEQ ID NO: 76001 - RNA, 21 nt, synthetic construct
  source 1..21: mol_type = other RNA
caatgttgattttgaggcaga

SEQ ID NO: 76002 - RNA, 21 nt, synthetic construct
  source 1..21: mol_type = other RNA
caatgttggttagtgttgttt

SEQ ID NO: 76003 - RNA, 21 nt, synthetic construct
  source 1..21: mol_type = other RNA
caatgttgtggatgtccttaa

SEQ ID NO: 76004 - RNA, 21 nt, synthetic construct
  source 1..21: mol_type = other RNA
caatgtttggtagatttctgc

SEQ ID NO: 76005 - RNA, 21 nt, synthetic construct
  source 1..21: mol_type = other RNA
caattaaactatagacccaaa

SEQ ID NO: 76006 - RNA, 21 nt, synthetic construct
  source 1..21: mol_type = other RNA
caattaagcaaccttttaggt

SEQ ID NO: 76007 - RNA, 21 nt, synthetic construct
  source 1..21: mol_type = other RNA
caattaatgcccaatcaaatc

SEQ ID NO: 76008 - RNA, 21 nt, synthetic construct
  source 1..21: mol_type = other RNA
caattacacatctcccatacc

SEQ ID NO: 76009 - RNA, 21 nt, synthetic construct
  source 1..21: mol_type = other RNA
caattaccataaagtcttcca

SEQ ID NO: 76010 - RNA, 21 nt, synthetic construct
  source 1..21: mol_type = other RNA
caattacttccagtgttttag

SEQ ID NO: 76011 - RNA, 21 nt, synthetic construct
  source 1..21: mol_type = other RNA
caattacttgagagcagagac

SEQ ID NO: 76012 - RNA, 21 nt, synthetic construct
  source 1..21: mol_type = other RNA
caattagcacctttattaact

SEQ ID NO: 76013 - RNA, 21 nt, synthetic construct
  source 1..21: mol_type = other RNA
caattaggctgtttgagatct

SEQ ID NO: 76014 - RNA, 21 nt, synthetic construct
  source 1..21: mol_type = other RNA
caattagttcctccttttgta

SEQ ID NO: 76015 - RNA, 21 nt, synthetic construct
  source 1..21: mol_type = other RNA
caattatgctgagtgaatggg

SEQ ID NO: 76016 - RNA, 21 nt, synthetic construct
  source 1..21: mol_type = other RNA
caattattagttgtacttgac

SEQ ID NO: 76017 - RNA, 21 nt, synthetic construct
  source 1..21: mol_type = other RNA
caattatttgaataaggtctg

SEQ ID NO: 76018 - RNA, 21 nt, synthetic construct
  source 1..21: mol_type = other RNA
caattcaacaatagcaacaaa

SEQ ID NO: 76019 - RNA, 21 nt, synthetic construct
  source 1..21: mol_type = other RNA
caattcaacagctactatgaa

SEQ ID NO: 76020 - RNA, 21 nt, synthetic construct
  source 1..21: mol_type = other RNA
caattcacaagattaatcttg

SEQ ID NO: 76021 - RNA, 21 nt, synthetic construct
  source 1..21: mol_type = other RNA
caattcacagaatatactcag

SEQ ID NO: 76022 - RNA, 21 nt, synthetic construct
  source 1..21: mol_type = other RNA
caattcagaagctaaattttc

SEQ ID NO: 76023 - RNA, 21 nt, synthetic construct
  source 1..21: mol_type = other RNA
caattccataaatgtttgcta

SEQ ID NO: 76024 - RNA, 21 nt, synthetic construct
  source 1..21: mol_type = other RNA
caattccccagcctcagcctc

SEQ ID NO: 76025 - RNA, 21 nt, synthetic construct
  source 1..21: mol_type = other RNA
caattcctttctaggcatcta

SEQ ID NO: 76026 - RNA, 21 nt, synthetic construct
  source 1..21: mol_type = other RNA
caattcggtggcattaaggac

SEQ ID NO: 76027 - RNA, 21 nt, synthetic construct
  source 1..21: mol_type = other RNA
caattctagttaataaaggtg

SEQ ID NO: 76028 - RNA, 21 nt, synthetic construct
  source 1..21: mol_type = other RNA
caattctccctgaaattgtca

SEQ ID NO: 76029 - RNA, 21 nt, synthetic construct
  source 1..21: mol_type = other RNA
caattgaatggggatgcaaca

SEQ ID NO: 76030 - RNA, 21 nt, synthetic construct
  source 1..21: mol_type = other RNA
caattgaccaaacatgtgagg

SEQ ID NO: 76031 - RNA, 21 nt, synthetic construct
  source 1..21: mol_type = other RNA
caattgatctgccaggacaat

SEQ ID NO: 76032 - RNA, 21 nt, synthetic construct
  source 1..21: mol_type = other RNA
caattgcactccagcctaggc

SEQ ID NO: 76033 - RNA, 21 nt, synthetic construct
  source 1..21: mol_type = other RNA
caattgcagccagagagtgga

SEQ ID NO: 76034 - RNA, 21 nt, synthetic construct
  source 1..21: mol_type = other RNA
caattgcgcagaactggggct

SEQ ID NO: 76035 - RNA, 21 nt, synthetic construct
  source 1..21: mol_type = other RNA
caattggaagactatcacgat

SEQ ID NO: 76036 - RNA, 21 nt, synthetic construct
  source 1..21: mol_type = other RNA
caattggtgaatctgagtaaa

SEQ ID NO: 76037 - RNA, 21 nt, synthetic construct
  source 1..21: mol_type = other RNA
caattgtaatgtctcctcttt

SEQ ID NO: 76038 - RNA, 21 nt, synthetic construct
  source 1..21: mol_type = other RNA
caattgtcctggcagatcaat

SEQ ID NO: 76039 - RNA, 21 nt, synthetic construct
  source 1..21: mol_type = other RNA
caatttaacttctaatgccca

SEQ ID NO: 76040 - RNA, 21 nt, synthetic construct
  source 1..21: mol_type = other RNA
caatttaccatctgacatatg

SEQ ID NO: 76041 - RNA, 21 nt, synthetic construct
  source 1..21: mol_type = other RNA
caatttagaattctctctcaa

SEQ ID NO: 76042 - RNA, 21 nt, synthetic construct
  source 1..21: mol_type = other RNA
caatttatatgatactcgtag

SEQ ID NO: 76043 - RNA, 21 nt, synthetic construct
  source 1..21: mol_type = other RNA
caatttcagatctctgacatt

SEQ ID NO: 76044 - RNA, 21 nt, synthetic construct
  source 1..21: mol_type = other RNA
caatttcagggagaattggta

SEQ ID NO: 76045 - RNA, 21 nt, synthetic construct
  source 1..21: mol_type = other RNA
caatttcatcgtaaaaagcca

SEQ ID NO: 76046 - RNA, 21 nt, synthetic construct
  source 1..21: mol_type = other RNA
caatttctttggctgttagcc

SEQ ID NO: 76047 - RNA, 21 nt, synthetic construct
  source 1..21: mol_type = other RNA
caatttgaggtagcacaacta

SEQ ID NO: 76048 - RNA, 21 nt, synthetic construct
  source 1..21: mol_type = other RNA
caatttgccaaaatgattttc

SEQ ID NO: 76049 - RNA, 21 nt, synthetic construct
  source 1..21: mol_type = other RNA
caatttgggatatagctacaa

SEQ ID NO: 76050 - RNA, 21 nt, synthetic construct
  source 1..21: mol_type = other RNA
caatttgttttccaagcctta

SEQ ID NO: 76051 - RNA, 21 nt, synthetic construct
  source 1..21: mol_type = other RNA
caattttcatagcagcattgt

SEQ ID NO: 76052 - RNA, 21 nt, synthetic construct
  source 1..21: mol_type = other RNA
caattttcatgggttgatttt

SEQ ID NO: 76053 - RNA, 21 nt, synthetic construct
  source 1..21: mol_type = other RNA
caattttcccccaattaaact

SEQ ID NO: 76054 - RNA, 21 nt, synthetic construct
  source 1..21: mol_type = other RNA
caattttctctcatgttgggt

SEQ ID NO: 76055 - RNA, 21 nt, synthetic construct
  source 1..21: mol_type = other RNA
caattttcttaccctttactc

SEQ ID NO: 76056 - RNA, 21 nt, synthetic construct
  source 1..21: mol_type = other RNA
caattttttggcatacaactg

SEQ ID NO: 76057 - RNA, 21 nt, synthetic construct
  source 1..21: mol_type = other RNA
cacaaaaagatctgtggactt

SEQ ID NO: 76058 - RNA, 21 nt, synthetic construct
  source 1..21: mol_type = other RNA
cacaaaaagtgtgaccacatt

SEQ ID NO: 76059 - RNA, 21 nt, synthetic construct
  source 1..21: mol_type = other RNA
cacaaaacaaatggaaccact

SEQ ID NO: 76060 - RNA, 21 nt, synthetic construct
  source 1..21: mol_type = other RNA
cacaaaagaaaattttctgag

SEQ ID NO: 76061 - RNA, 21 nt, synthetic construct
  source 1..21: mol_type = other RNA
cacaaaagagctgggcccgca

SEQ ID NO: 76062 - RNA, 21 nt, synthetic construct
  source 1..21: mol_type = other RNA
cacaaaagtgaaaactaaggt

SEQ ID NO: 76063 - RNA, 21 nt, synthetic construct
  source 1..21: mol_type = other RNA
cacaaaagtttaactttgatg

SEQ ID NO: 76064 - RNA, 21 nt, synthetic construct
  source 1..21: mol_type = other RNA
cacaaaatcagatatgaaaga

SEQ ID NO: 76065 - RNA, 21 nt, synthetic construct
  source 1..21: mol_type = other RNA
cacaaaatgtggatgcatgag

SEQ ID NO: 76066 - RNA, 21 nt, synthetic construct
  source 1..21: mol_type = other RNA
cacaaacaaatccttttccca

SEQ ID NO: 76067 - RNA, 21 nt, synthetic construct
  source 1..21: mol_type = other RNA
cacaaacacaaaacaaatgga

SEQ ID NO: 76068 - RNA, 21 nt, synthetic construct
  source 1..21: mol_type = other RNA
cacaaacacacaaaccaacaa

SEQ ID NO: 76069 - RNA, 21 nt, synthetic construct
  source 1..21: mol_type = other RNA
cacaaacatgaataaccaatg

SEQ ID NO: 76070 - RNA, 21 nt, synthetic construct
  source 1..21: mol_type = other RNA
cacaaaccaacaacaaaaaat

SEQ ID NO: 76071 - RNA, 21 nt, synthetic construct
  source 1..21: mol_type = other RNA
cacaaacctggcaatactctc

SEQ ID NO: 76072 - RNA, 21 nt, synthetic construct
  source 1..21: mol_type = other RNA
cacaaactgcagaatgacaga

SEQ ID NO: 76073 - RNA, 21 nt, synthetic construct
  source 1..21: mol_type = other RNA
cacaaagccctcaggaccagg

SEQ ID NO: 76074 - RNA, 21 nt, synthetic construct
  source 1..21: mol_type = other RNA
cacaaagccttctctactctg

SEQ ID NO: 76075 - RNA, 21 nt, synthetic construct
  source 1..21: mol_type = other RNA
cacaaagctttaaactggatg

SEQ ID NO: 76076 - RNA, 21 nt, synthetic construct
  source 1..21: mol_type = other RNA
cacaaaggactggaactcatt

SEQ ID NO: 76077 - RNA, 21 nt, synthetic construct
  source 1..21: mol_type = other RNA
cacaaaggattgggaagattg

SEQ ID NO: 76078 - RNA, 21 nt, synthetic construct
  source 1..21: mol_type = other RNA
cacaaagtccccacatgactg

SEQ ID NO: 76079 - RNA, 21 nt, synthetic construct
  source 1..21: mol_type = other RNA
cacaaatggagtgacttaagc

SEQ ID NO: 76080 - RNA, 21 nt, synthetic construct
  source 1..21: mol_type = other RNA
cacaaattagccaggcgtggt

SEQ ID NO: 76081 - RNA, 21 nt, synthetic construct
  source 1..21: mol_type = other RNA
cacaaattatgactgagatac

SEQ ID NO: 76082 - RNA, 21 nt, synthetic construct
  source 1..21: mol_type = other RNA
cacaacaatgaattctcatat

SEQ ID NO: 76083 - RNA, 21 nt, synthetic construct
  source 1..21: mol_type = other RNA
cacaacacatgcacactagac

SEQ ID NO: 76084 - RNA, 21 nt, synthetic construct
  source 1..21: mol_type = other RNA
cacaacactcagatatcaatc

SEQ ID NO: 76085 - RNA, 21 nt, synthetic construct
  source 1..21: mol_type = other RNA
cacaacaggcctgagccgtcg

SEQ ID NO: 76086 - RNA, 21 nt, synthetic construct
  source 1..21: mol_type = other RNA
cacaacataccaaaacccttg

SEQ ID NO: 76087 - RNA, 21 nt, synthetic construct
  source 1..21: mol_type = other RNA
cacaacatgttttatttctgt

SEQ ID NO: 76088 - RNA, 21 nt, synthetic construct
  source 1..21: mol_type = other RNA
cacaacattgtgcaaccatcc

SEQ ID NO: 76089 - RNA, 21 nt, synthetic construct
  source 1..21: mol_type = other RNA
cacaaccactgatggaattct

SEQ ID NO: 76090 - RNA, 21 nt, synthetic construct
  source 1..21: mol_type = other RNA
cacaaccactggggagtgtgc

SEQ ID NO: 76091 - RNA, 21 nt, synthetic construct
  source 1..21: mol_type = other RNA
cacaacgatttcttaaaaatg

SEQ ID NO: 76092 - RNA, 21 nt, synthetic construct
  source 1..21: mol_type = other RNA
cacaactagtaagtaaaatcg

SEQ ID NO: 76093 - RNA, 21 nt, synthetic construct
  source 1..21: mol_type = other RNA
cacaacttgtatgaaattagt

SEQ ID NO: 76094 - RNA, 21 nt, synthetic construct
  source 1..21: mol_type = other RNA
cacaagaaaaacctaaacctg

SEQ ID NO: 76095 - RNA, 21 nt, synthetic construct
  source 1..21: mol_type = other RNA
cacaagacagatgtgcttaat

SEQ ID NO: 76096 - RNA, 21 nt, synthetic construct
  source 1..21: mol_type = other RNA
cacaagacataagcattttct

SEQ ID NO: 76097 - RNA, 21 nt, synthetic construct
  source 1..21: mol_type = other RNA
cacaagatctctatgcagaaa

SEQ ID NO: 76098 - RNA, 21 nt, synthetic construct
  source 1..21: mol_type = other RNA
cacaagattaatcttgcaaaa

SEQ ID NO: 76099 - RNA, 21 nt, synthetic construct
  source 1..21: mol_type = other RNA
cacaagcacagagtcagaaaa

SEQ ID NO: 76100 - RNA, 21 nt, synthetic construct
  source 1..21: mol_type = other RNA
cacaagccacatgtggttatt

SEQ ID NO: 76101 - RNA, 21 nt, synthetic construct
  source 1..21: mol_type = other RNA
cacaagccagggtctgtctca

SEQ ID NO: 76102 - RNA, 21 nt, synthetic construct
  source 1..21: mol_type = other RNA
cacaagccttgaaaatatact

SEQ ID NO: 76103 - RNA, 21 nt, synthetic construct
  source 1..21: mol_type = other RNA
cacaaggaaggtcaaatggta

SEQ ID NO: 76104 - RNA, 21 nt, synthetic construct
  source 1..21: mol_type = other RNA
cacaaggacaggtcacattct

SEQ ID NO: 76105 - RNA, 21 nt, synthetic construct
  source 1..21: mol_type = other RNA
cacaaggactggcttcagtgc

SEQ ID NO: 76106 - RNA, 21 nt, synthetic construct
  source 1..21: mol_type = other RNA
cacaaggattaatctttctga

SEQ ID NO: 76107 - RNA, 21 nt, synthetic construct
  source 1..21: mol_type = other RNA
cacaagggaagaggccacaaa

SEQ ID NO: 76108 - RNA, 21 nt, synthetic construct
  source 1..21: mol_type = other RNA
cacaaggtcaagagcggcctt

SEQ ID NO: 76109 - RNA, 21 nt, synthetic construct
  source 1..21: mol_type = other RNA
cacaaggtcagaagtttggaa

SEQ ID NO: 76110 - RNA, 21 nt, synthetic construct
  source 1..21: mol_type = other RNA
cacaagtagcagggactacag

SEQ ID NO: 76111 - RNA, 21 nt, synthetic construct
  source 1..21: mol_type = other RNA
cacaagtattaacgaattctt

SEQ ID NO: 76112 - RNA, 21 nt, synthetic construct
  source 1..21: mol_type = other RNA
cacaagtgtttcatttacaaa

SEQ ID NO: 76113 - RNA, 21 nt, synthetic construct
  source 1..21: mol_type = other RNA
cacaatactgtctcagtccca

SEQ ID NO: 76114 - RNA, 21 nt, synthetic construct
  source 1..21: mol_type = other RNA
cacaatcatagctcactagag

SEQ ID NO: 76115 - RNA, 21 nt, synthetic construct
  source 1..21: mol_type = other RNA
cacaatccaagtttctagcca

SEQ ID NO: 76116 - RNA, 21 nt, synthetic construct
  source 1..21: mol_type = other RNA
cacaatcttacccccatcaca

SEQ ID NO: 76117 - RNA, 21 nt, synthetic construct
  source 1..21: mol_type = other RNA
cacaatcttgagacggaagac

SEQ ID NO: 76118 - RNA, 21 nt, synthetic construct
  source 1..21: mol_type = other RNA
cacaatgagacatttgagggt

SEQ ID NO: 76119 - RNA, 21 nt, synthetic construct
  source 1..21: mol_type = other RNA
cacaatgcagtattgttaact

SEQ ID NO: 76120 - RNA, 21 nt, synthetic construct
  source 1..21: mol_type = other RNA
cacaatgcctgccgcagagca

SEQ ID NO: 76121 - RNA, 21 nt, synthetic construct
  source 1..21: mol_type = other RNA
cacaatgcgtttgttagatct

SEQ ID NO: 76122 - RNA, 21 nt, synthetic construct
  source 1..21: mol_type = other RNA
cacaatggaatattactcagt

SEQ ID NO: 76123 - RNA, 21 nt, synthetic construct
  source 1..21: mol_type = other RNA
cacaatggtcagagttgtatc

SEQ ID NO: 76124 - RNA, 21 nt, synthetic construct
  source 1..21: mol_type = other RNA
cacaatgttgtggatgtcctt

SEQ ID NO: 76125 - RNA, 21 nt, synthetic construct
  source 1..21: mol_type = other RNA
cacaattcacagaatatactc

SEQ ID NO: 76126 - RNA, 21 nt, synthetic construct
  source 1..21: mol_type = other RNA
cacaattgcactccagcctag

SEQ ID NO: 76127 - RNA, 21 nt, synthetic construct
  source 1..21: mol_type = other RNA
cacaatttgaggtagcacaac

SEQ ID NO: 76128 - RNA, 21 nt, synthetic construct
  source 1..21: mol_type = other RNA
cacacaaaccaacaacaaaaa

SEQ ID NO: 76129 - RNA, 21 nt, synthetic construct
  source 1..21: mol_type = other RNA
cacacaacaatgaattctcat

SEQ ID NO: 76130 - RNA, 21 nt, synthetic construct
  source 1..21: mol_type = other RNA
cacacaacactcagatatcaa

SEQ ID NO: 76131 - RNA, 21 nt, synthetic construct
  source 1..21: mol_type = other RNA
cacacaatccaagtttctagc

SEQ ID NO: 76132 - RNA, 21 nt, synthetic construct
  source 1..21: mol_type = other RNA
cacacaatcttgagacggaag

SEQ ID NO: 76133 - RNA, 21 nt, synthetic construct
  source 1..21: mol_type = other RNA
cacacaatggtcagagttgta

SEQ ID NO: 76134 - RNA, 21 nt, synthetic construct
  source 1..21: mol_type = other RNA
cacacaatttgaggtagcaca

SEQ ID NO: 76135 - RNA, 21 nt, synthetic construct
  source 1..21: mol_type = other RNA
cacacacagtcctgtgtttct

SEQ ID NO: 76136 - RNA, 21 nt, synthetic construct
  source 1..21: mol_type = other RNA
cacacaccaaatcatgaaagt

SEQ ID NO: 76137 - RNA, 21 nt, synthetic construct
  source 1..21: mol_type = other RNA
cacacaccactacacccggct

SEQ ID NO: 76138 - RNA, 21 nt, synthetic construct
  source 1..21: mol_type = other RNA
cacacaccctttcttaggaag

SEQ ID NO: 76139 - RNA, 21 nt, synthetic construct
  source 1..21: mol_type = other RNA
cacacacctaccaccatgctt

SEQ ID NO: 76140 - RNA, 21 nt, synthetic construct
  source 1..21: mol_type = other RNA
cacacacctattcataggtaa

SEQ ID NO: 76141 - RNA, 21 nt, synthetic construct
  source 1..21: mol_type = other RNA
cacacacgtttatattccttt

SEQ ID NO: 76142 - RNA, 21 nt, synthetic construct
  source 1..21: mol_type = other RNA
cacacagagaacagcattatc

SEQ ID NO: 76143 - RNA, 21 nt, synthetic construct
  source 1..21: mol_type = other RNA
cacacagagggagcgccacgt

SEQ ID NO: 76144 - RNA, 21 nt, synthetic construct
  source 1..21: mol_type = other RNA
cacacaggagaacttgtctcg

SEQ ID NO: 76145 - RNA, 21 nt, synthetic construct
  source 1..21: mol_type = other RNA
cacacagtacaaggctagagc

SEQ ID NO: 76146 - RNA, 21 nt, synthetic construct
  source 1..21: mol_type = other RNA
cacacagtcctgtgtttctgc

SEQ ID NO: 76147 - RNA, 21 nt, synthetic construct
  source 1..21: mol_type = other RNA
cacacagtttgagaagccaca

SEQ ID NO: 76148 - RNA, 21 nt, synthetic construct
  source 1..21: mol_type = other RNA
cacacataagggggaatctac

SEQ ID NO: 76149 - RNA, 21 nt, synthetic construct
  source 1..21: mol_type = other RNA
cacacatcagacacctacatt

SEQ ID NO: 76150 - RNA, 21 nt, synthetic construct
  source 1..21: mol_type = other RNA
cacacatccacgcgtaagggt

SEQ ID NO: 76151 - RNA, 21 nt, synthetic construct
  source 1..21: mol_type = other RNA
cacacatgaacctgcatggtg

SEQ ID NO: 76152 - RNA, 21 nt, synthetic construct
  source 1..21: mol_type = other RNA
cacacattaactatggacatg

SEQ ID NO: 76153 - RNA, 21 nt, synthetic construct
  source 1..21: mol_type = other RNA
cacacattagcctagacctca

SEQ ID NO: 76154 - RNA, 21 nt, synthetic construct
  source 1..21: mol_type = other RNA
cacaccaaatcatgaaagtgg

SEQ ID NO: 76155 - RNA, 21 nt, synthetic construct
  source 1..21: mol_type = other RNA
cacaccaacatggcacatgtc

SEQ ID NO: 76156 - RNA, 21 nt, synthetic construct
  source 1..21: mol_type = other RNA
cacaccaagacatgttaggtt

SEQ ID NO: 76157 - RNA, 21 nt, synthetic construct
  source 1..21: mol_type = other RNA
cacaccaaggtttctctccaa

SEQ ID NO: 76158 - RNA, 21 nt, synthetic construct
  source 1..21: mol_type = other RNA
cacaccacatccagctaattt

SEQ ID NO: 76159 - RNA, 21 nt, synthetic construct
  source 1..21: mol_type = other RNA
cacaccactacacccggctaa

SEQ ID NO: 76160 - RNA, 21 nt, synthetic construct
  source 1..21: mol_type = other RNA
cacaccatgacagagttccac

SEQ ID NO: 76161 - RNA, 21 nt, synthetic construct
  source 1..21: mol_type = other RNA
cacaccatttagatcatctta

SEQ ID NO: 76162 - RNA, 21 nt, synthetic construct
  source 1..21: mol_type = other RNA
cacacccagtatacacgtatt

SEQ ID NO: 76163 - RNA, 21 nt, synthetic construct
  source 1..21: mol_type = other RNA
cacacccagttatctctgccc

SEQ ID NO: 76164 - RNA, 21 nt, synthetic construct
  source 1..21: mol_type = other RNA
cacaccctcctaccttccaaa

SEQ ID NO: 76165 - RNA, 21 nt, synthetic construct
  source 1..21: mol_type = other RNA
cacacccttggtaaacagcag

SEQ ID NO: 76166 - RNA, 21 nt, synthetic construct
  source 1..21: mol_type = other RNA
cacaccctttcttaggaagct

SEQ ID NO: 76167 - RNA, 21 nt, synthetic construct
  source 1..21: mol_type = other RNA
cacaccgctgcattccagcct

SEQ ID NO: 76168 - RNA, 21 nt, synthetic construct
  source 1..21: mol_type = other RNA
cacacctaccaccatgcttgg

SEQ ID NO: 76169 - RNA, 21 nt, synthetic construct
  source 1..21: mol_type = other RNA
cacacctaggcctattttagg

SEQ ID NO: 76170 - RNA, 21 nt, synthetic construct
  source 1..21: mol_type = other RNA
cacacctattcataggtaata

SEQ ID NO: 76171 - RNA, 21 nt, synthetic construct
  source 1..21: mol_type = other RNA
cacacctgaaattctcaaatg

SEQ ID NO: 76172 - RNA, 21 nt, synthetic construct
  source 1..21: mol_type = other RNA
cacacctggcccctttcaaga

SEQ ID NO: 76173 - RNA, 21 nt, synthetic construct
  source 1..21: mol_type = other RNA
cacacctgggtatacagcaaa

SEQ ID NO: 76174 - RNA, 21 nt, synthetic construct
  source 1..21: mol_type = other RNA
cacacgagaaggacagcttcc

SEQ ID NO: 76175 - RNA, 21 nt, synthetic construct
  source 1..21: mol_type = other RNA
cacacgagtattcaagtttca

SEQ ID NO: 76176 - RNA, 21 nt, synthetic construct
  source 1..21: mol_type = other RNA
cacacgcattgcattgactac

SEQ ID NO: 76177 - RNA, 21 nt, synthetic construct
  source 1..21: mol_type = other RNA
cacacgccactgcaggtgttg

SEQ ID NO: 76178 - RNA, 21 nt, synthetic construct
  source 1..21: mol_type = other RNA
cacacgctggaagggagccca

SEQ ID NO: 76179 - RNA, 21 nt, synthetic construct
  source 1..21: mol_type = other RNA
cacacggaaaacattattttc

SEQ ID NO: 76180 - RNA, 21 nt, synthetic construct
  source 1..21: mol_type = other RNA
cacacgggctgggcgcgatgg

SEQ ID NO: 76181 - RNA, 21 nt, synthetic construct
  source 1..21: mol_type = other RNA
cacacgggtacacatcctaat

SEQ ID NO: 76182 - RNA, 21 nt, synthetic construct
  source 1..21: mol_type = other RNA
cacacgtttatattcctttta

SEQ ID NO: 76183 - RNA, 21 nt, synthetic construct
  source 1..21: mol_type = other RNA
cacactagacctttcttaggt

SEQ ID NO: 76184 - RNA, 21 nt, synthetic construct
  source 1..21: mol_type = other RNA
cacactagccactgggtctta

SEQ ID NO: 76185 - RNA, 21 nt, synthetic construct
  source 1..21: mol_type = other RNA
cacactagctgacccactggt

SEQ ID NO: 76186 - RNA, 21 nt, synthetic construct
  source 1..21: mol_type = other RNA
cacactagtcaccctacagac

SEQ ID NO: 76187 - RNA, 21 nt, synthetic construct
  source 1..21: mol_type = other RNA
cacactataacagatggaact

SEQ ID NO: 76188 - RNA, 21 nt, synthetic construct
  source 1..21: mol_type = other RNA
cacactccagcatccctccag

SEQ ID NO: 76189 - RNA, 21 nt, synthetic construct
  source 1..21: mol_type = other RNA
cacactccccagtggttgtgg

SEQ ID NO: 76190 - RNA, 21 nt, synthetic construct
  source 1..21: mol_type = other RNA
cacactcgcactccacttccc

SEQ ID NO: 76191 - RNA, 21 nt, synthetic construct
  source 1..21: mol_type = other RNA
cacactcgtgtatgatttcta

SEQ ID NO: 76192 - RNA, 21 nt, synthetic construct
  source 1..21: mol_type = other RNA
cacactcttaataactgccta

SEQ ID NO: 76193 - RNA, 21 nt, synthetic construct
  source 1..21: mol_type = other RNA
cacactcttggtctttctccc

SEQ ID NO: 76194 - RNA, 21 nt, synthetic construct
  source 1..21: mol_type = other RNA
cacactgaaacaatcgcaatc

SEQ ID NO: 76195 - RNA, 21 nt, synthetic construct
  source 1..21: mol_type = other RNA
cacactgacaggacagagcag

SEQ ID NO: 76196 - RNA, 21 nt, synthetic construct
  source 1..21: mol_type = other RNA
cacactgattttctgcttctc

SEQ ID NO: 76197 - RNA, 21 nt, synthetic construct
  source 1..21: mol_type = other RNA
cacactgctcctgcctttgtt

SEQ ID NO: 76198 - RNA, 21 nt, synthetic construct
  source 1..21: mol_type = other RNA
cacactgctcttctattccag

SEQ ID NO: 76199 - RNA, 21 nt, synthetic construct
  source 1..21: mol_type = other RNA
cacactgggtaaacaagactc

SEQ ID NO: 76200 - RNA, 21 nt, synthetic construct
  source 1..21: mol_type = other RNA
cacactggtcactggccactg

SEQ ID NO: 76201 - RNA, 21 nt, synthetic construct
  source 1..21: mol_type = other RNA
cacactgttgtccaggccaga

SEQ ID NO: 76202 - RNA, 21 nt, synthetic construct
  source 1..21: mol_type = other RNA
cacactgtttgattactgtag

SEQ ID NO: 76203 - RNA, 21 nt, synthetic construct
  source 1..21: mol_type = other RNA
cacacttactaaatgatcttt

SEQ ID NO: 76204 - RNA, 21 nt, synthetic construct
  source 1..21: mol_type = other RNA
cacacttagttcaagatgcat

SEQ ID NO: 76205 - RNA, 21 nt, synthetic construct
  source 1..21: mol_type = other RNA
cacacttgatggtttggggct

SEQ ID NO: 76206 - RNA, 21 nt, synthetic construct
  source 1..21: mol_type = other RNA
cacacttgcttgggaacagca

SEQ ID NO: 76207 - RNA, 21 nt, synthetic construct
  source 1..21: mol_type = other RNA
cacactttccttggagaagag

SEQ ID NO: 76208 - RNA, 21 nt, synthetic construct
  source 1..21: mol_type = other RNA
cacactttttgtgagttttaa

SEQ ID NO: 76209 - RNA, 21 nt, synthetic construct
  source 1..21: mol_type = other RNA
cacagaaacagaaaaatccat

SEQ ID NO: 76210 - RNA, 21 nt, synthetic construct
  source 1..21: mol_type = other RNA
cacagaaagcctcttcagaag

SEQ ID NO: 76211 - RNA, 21 nt, synthetic construct
  source 1..21: mol_type = other RNA
cacagaacactaaaggggatt

SEQ ID NO: 76212 - RNA, 21 nt, synthetic construct
  source 1..21: mol_type = other RNA
cacagaaccatgtaacaggtt

SEQ ID NO: 76213 - RNA, 21 nt, synthetic construct
  source 1..21: mol_type = other RNA
cacagaactgtcactgacaca

SEQ ID NO: 76214 - RNA, 21 nt, synthetic construct
  source 1..21: mol_type = other RNA
cacagaagtgttttgatagtt

SEQ ID NO: 76215 - RNA, 21 nt, synthetic construct
  source 1..21: mol_type = other RNA
cacagaatatactcagaaaaa

SEQ ID NO: 76216 - RNA, 21 nt, synthetic construct
  source 1..21: mol_type = other RNA
cacagaattactatatgatcc

SEQ ID NO: 76217 - RNA, 21 nt, synthetic construct
  source 1..21: mol_type = other RNA
cacagaattattgattggcaa

SEQ ID NO: 76218 - RNA, 21 nt, synthetic construct
  source 1..21: mol_type = other RNA
cacagacagggaatggggagc

SEQ ID NO: 76219 - RNA, 21 nt, synthetic construct
  source 1..21: mol_type = other RNA
cacagacagtaatttatacaa

SEQ ID NO: 76220 - RNA, 21 nt, synthetic construct
  source 1..21: mol_type = other RNA
cacagacatgaacaatccttc

SEQ ID NO: 76221 - RNA, 21 nt, synthetic construct
  source 1..21: mol_type = other RNA
cacagacgcaaaggatgtcaa

SEQ ID NO: 76222 - RNA, 21 nt, synthetic construct
  source 1..21: mol_type = other RNA
cacagactcaagcctgataag

SEQ ID NO: 76223 - RNA, 21 nt, synthetic construct
  source 1..21: mol_type = other RNA
cacagactgtgccttgatcca

SEQ ID NO: 76224 - RNA, 21 nt, synthetic construct
  source 1..21: mol_type = other RNA
cacagagaacagcattatctt

SEQ ID NO: 76225 - RNA, 21 nt, synthetic construct
  source 1..21: mol_type = other RNA
cacagagccgaaatgcactta

SEQ ID NO: 76226 - RNA, 21 nt, synthetic construct
  source 1..21: mol_type = other RNA
cacagagcctaaaataggcct

SEQ ID NO: 76227 - RNA, 21 nt, synthetic construct
  source 1..21: mol_type = other RNA
cacagaggcaacagtcattca

SEQ ID NO: 76228 - RNA, 21 nt, synthetic construct
  source 1..21: mol_type = other RNA
cacagaggctttttatatttc

SEQ ID NO: 76229 - RNA, 21 nt, synthetic construct
  source 1..21: mol_type = other RNA
cacagagggagcgccacgtga

SEQ ID NO: 76230 - RNA, 21 nt, synthetic construct
  source 1..21: mol_type = other RNA
cacagagtcagaaaattaaat

SEQ ID NO: 76231 - RNA, 21 nt, synthetic construct
  source 1..21: mol_type = other RNA
cacagagttcagcttacagtc

SEQ ID NO: 76232 - RNA, 21 nt, synthetic construct
  source 1..21: mol_type = other RNA
cacagataatttcttcagaag

SEQ ID NO: 76233 - RNA, 21 nt, synthetic construct
  source 1..21: mol_type = other RNA
cacagatacaactctgaccat

SEQ ID NO: 76234 - RNA, 21 nt, synthetic construct
  source 1..21: mol_type = other RNA
cacagatctttttgtgtatat

SEQ ID NO: 76235 - RNA, 21 nt, synthetic construct
  source 1..21: mol_type = other RNA
cacagcactgttaactgactt

SEQ ID NO: 76236 - RNA, 21 nt, synthetic construct
  source 1..21: mol_type = other RNA
cacagcagggctcctccaagg

SEQ ID NO: 76237 - RNA, 21 nt, synthetic construct
  source 1..21: mol_type = other RNA
cacagcatgaatacctattta

SEQ ID NO: 76238 - RNA, 21 nt, synthetic construct
  source 1..21: mol_type = other RNA
cacagccagtcagtgatggag

SEQ ID NO: 76239 - RNA, 21 nt, synthetic construct
  source 1..21: mol_type = other RNA
cacagcgcccggcccgttatt

SEQ ID NO: 76240 - RNA, 21 nt, synthetic construct
  source 1..21: mol_type = other RNA
cacagcgtgcaccttacattg

SEQ ID NO: 76241 - RNA, 21 nt, synthetic construct
  source 1..21: mol_type = other RNA
cacagcgtggaatggtcaatt

SEQ ID NO: 76242 - RNA, 21 nt, synthetic construct
  source 1..21: mol_type = other RNA
cacagcgttgttcagttgaaa

SEQ ID NO: 76243 - RNA, 21 nt, synthetic construct
  source 1..21: mol_type = other RNA
cacagctacactcaatacacg

SEQ ID NO: 76244 - RNA, 21 nt, synthetic construct
  source 1..21: mol_type = other RNA
cacagctatcaggccttccac

SEQ ID NO: 76245 - RNA, 21 nt, synthetic construct
  source 1..21: mol_type = other RNA
cacagctctcatgagtcctga

SEQ ID NO: 76246 - RNA, 21 nt, synthetic construct
  source 1..21: mol_type = other RNA
cacagcttaccaagtgccgcg

SEQ ID NO: 76247 - RNA, 21 nt, synthetic construct
  source 1..21: mol_type = other RNA
cacagctttcttttccaacca

SEQ ID NO: 76248 - RNA, 21 nt, synthetic construct
  source 1..21: mol_type = other RNA
cacaggaaagatgtcttttaa

SEQ ID NO: 76249 - RNA, 21 nt, synthetic construct
  source 1..21: mol_type = other RNA
cacaggactgtgtgtgtccag

SEQ ID NO: 76250 - RNA, 21 nt, synthetic construct
  source 1..21: mol_type = other RNA
cacaggagaacttgtctcgga

SEQ ID NO: 76251 - RNA, 21 nt, synthetic construct
  source 1..21: mol_type = other RNA
cacaggagagcgacagctacg

SEQ ID NO: 76252 - RNA, 21 nt, synthetic construct
  source 1..21: mol_type = other RNA
cacaggcatcggccgggcgtg

SEQ ID NO: 76253 - RNA, 21 nt, synthetic construct
  source 1..21: mol_type = other RNA
cacaggcatctctctaaaaac

SEQ ID NO: 76254 - RNA, 21 nt, synthetic construct
  source 1..21: mol_type = other RNA
cacaggcatgcgccatcacac

SEQ ID NO: 76255 - RNA, 21 nt, synthetic construct
  source 1..21: mol_type = other RNA
cacaggcgttgagccatcatg

SEQ ID NO: 76256 - RNA, 21 nt, synthetic construct
  source 1..21: mol_type = other RNA
cacaggctctcttcaccaact

SEQ ID NO: 76257 - RNA, 21 nt, synthetic construct
  source 1..21: mol_type = other RNA
cacaggctgaagggaggaaaa

SEQ ID NO: 76258 - RNA, 21 nt, synthetic construct
  source 1..21: mol_type = other RNA
cacaggctttcctacaataca

SEQ ID NO: 76259 - RNA, 21 nt, synthetic construct
  source 1..21: mol_type = other RNA
cacaggctttgacttctcagg

SEQ ID NO: 76260 - RNA, 21 nt, synthetic construct
  source 1..21: mol_type = other RNA
cacagggaaaactacatgtaa

SEQ ID NO: 76261 - RNA, 21 nt, synthetic construct
  source 1..21: mol_type = other RNA
cacagggactgatgaagaacc

SEQ ID NO: 76262 - RNA, 21 nt, synthetic construct
  source 1..21: mol_type = other RNA
cacagggagatacttgattac

SEQ ID NO: 76263 - RNA, 21 nt, synthetic construct
  source 1..21: mol_type = other RNA
cacagggcagggagagagaaa

SEQ ID NO: 76264 - RNA, 21 nt, synthetic construct
  source 1..21: mol_type = other RNA
cacagggcccagcctcaacag

SEQ ID NO: 76265 - RNA, 21 nt, synthetic construct
  source 1..21: mol_type = other RNA
cacaggtagacatgtgccatg

SEQ ID NO: 76266 - RNA, 21 nt, synthetic construct
  source 1..21: mol_type = other RNA
cacaggtttaggtttttcttg

SEQ ID NO: 76267 - RNA, 21 nt, synthetic construct
  source 1..21: mol_type = other RNA
cacagtacaaggctagagctc

SEQ ID NO: 76268 - RNA, 21 nt, synthetic construct
  source 1..21: mol_type = other RNA
cacagtacgcttttatgttat

SEQ ID NO: 76269 - RNA, 21 nt, synthetic construct
  source 1..21: mol_type = other RNA
cacagtagaagactcagcagt

SEQ ID NO: 76270 - RNA, 21 nt, synthetic construct
  source 1..21: mol_type = other RNA
cacagtatgcacaaataatta

SEQ ID NO: 76271 - RNA, 21 nt, synthetic construct
  source 1..21: mol_type = other RNA
cacagtatgcggggtttcagc

SEQ ID NO: 76272 - RNA, 21 nt, synthetic construct
  source 1..21: mol_type = other RNA
cacagtatgctgtttacatta

SEQ ID NO: 76273 - RNA, 21 nt, synthetic construct
  source 1..21: mol_type = other RNA
cacagtcacaaagctttaaac

SEQ ID NO: 76274 - RNA, 21 nt, synthetic construct
  source 1..21: mol_type = other RNA
cacagtccactcacctgtcat

SEQ ID NO: 76275 - RNA, 21 nt, synthetic construct
  source 1..21: mol_type = other RNA
cacagtccaggaacttacagt

SEQ ID NO: 76276 - RNA, 21 nt, synthetic construct
  source 1..21: mol_type = other RNA
cacagtcctgtgtttctgcta

SEQ ID NO: 76277 - RNA, 21 nt, synthetic construct
  source 1..21: mol_type = other RNA
cacagtctcccccaggtggtt

SEQ ID NO: 76278 - RNA, 21 nt, synthetic construct
  source 1..21: mol_type = other RNA
cacagtctctgcagagcaggc

SEQ ID NO: 76279 - RNA, 21 nt, synthetic construct
  source 1..21: mol_type = other RNA
cacagtctgtgcttaaggaaa

SEQ ID NO: 76280 - RNA, 21 nt, synthetic construct
  source 1..21: mol_type = other RNA
cacagtgaattctgacttagt

SEQ ID NO: 76281 - RNA, 21 nt, synthetic construct
  source 1..21: mol_type = other RNA
cacagtgactttactgttctc

SEQ ID NO: 76282 - RNA, 21 nt, synthetic construct
  source 1..21: mol_type = other RNA
cacagtgaggacgctgatgac

SEQ ID NO: 76283 - RNA, 21 nt, synthetic construct
  source 1..21: mol_type = other RNA
cacagtgctccatagcttcct

SEQ ID NO: 76284 - RNA, 21 nt, synthetic construct
  source 1..21: mol_type = other RNA
cacagtgttgagaaagcacat

SEQ ID NO: 76285 - RNA, 21 nt, synthetic construct
  source 1..21: mol_type = other RNA
cacagttctagttctaataaa

SEQ ID NO: 76286 - RNA, 21 nt, synthetic construct
  source 1..21: mol_type = other RNA
cacagtttgaaactttaagag

SEQ ID NO: 76287 - RNA, 21 nt, synthetic construct
  source 1..21: mol_type = other RNA
cacagtttgagaagccacaca

SEQ ID NO: 76288 - RNA, 21 nt, synthetic construct
  source 1..21: mol_type = other RNA
cacataaaaaaggaatctggg

SEQ ID NO: 76289 - RNA, 21 nt, synthetic construct
  source 1..21: mol_type = other RNA
cacataaaaggatatgggcca

SEQ ID NO: 76290 - RNA, 21 nt, synthetic construct
  source 1..21: mol_type = other RNA
cacataaagtcttgctggaag

SEQ ID NO: 76291 - RNA, 21 nt, synthetic construct
  source 1..21: mol_type = other RNA
cacataaatcacaggaaagat

SEQ ID NO: 76292 - RNA, 21 nt, synthetic construct
  source 1..21: mol_type = other RNA
cacataaatttgccacatttt

SEQ ID NO: 76293 - RNA, 21 nt, synthetic construct
  source 1..21: mol_type = other RNA
cacataagggggaatctactc

SEQ ID NO: 76294 - RNA, 21 nt, synthetic construct
  source 1..21: mol_type = other RNA
cacataaggtatatttctgta

SEQ ID NO: 76295 - RNA, 21 nt, synthetic construct
  source 1..21: mol_type = other RNA
cacataattgaacccactgag

SEQ ID NO: 76296 - RNA, 21 nt, synthetic construct
  source 1..21: mol_type = other RNA
cacatacaaaccaaaaaatgt

SEQ ID NO: 76297 - RNA, 21 nt, synthetic construct
  source 1..21: mol_type = other RNA
cacatacacagggaaaactac

SEQ ID NO: 76298 - RNA, 21 nt, synthetic construct
  source 1..21: mol_type = other RNA
cacatactgaaagacagacct

SEQ ID NO: 76299 - RNA, 21 nt, synthetic construct
  source 1..21: mol_type = other RNA
cacatactgcatattgaagcc

SEQ ID NO: 76300 - RNA, 21 nt, synthetic construct
  source 1..21: mol_type = other RNA
cacatagaagcgctcttcaag

SEQ ID NO: 76301 - RNA, 21 nt, synthetic construct
  source 1..21: mol_type = other RNA
cacatagacctgaatgactgt

SEQ ID NO: 76302 - RNA, 21 nt, synthetic construct
  source 1..21: mol_type = other RNA
cacataggatagttaaacatg

SEQ ID NO: 76303 - RNA, 21 nt, synthetic construct
  source 1..21: mol_type = other RNA
cacatatctaattaacatcca

SEQ ID NO: 76304 - RNA, 21 nt, synthetic construct
  source 1..21: mol_type = other RNA
cacatatctttaggtgttttt

SEQ ID NO: 76305 - RNA, 21 nt, synthetic construct
  source 1..21: mol_type = other RNA
cacatatttatcaacacatag

SEQ ID NO: 76306 - RNA, 21 nt, synthetic construct
  source 1..21: mol_type = other RNA
cacatattttaaaagtcagct

SEQ ID NO: 76307 - RNA, 21 nt, synthetic construct
  source 1..21: mol_type = other RNA
cacatattttatgctttgtct

SEQ ID NO: 76308 - RNA, 21 nt, synthetic construct
  source 1..21: mol_type = other RNA
cacatcagacacctacattaa

SEQ ID NO: 76309 - RNA, 21 nt, synthetic construct
  source 1..21: mol_type = other RNA
cacatcagattttgaagattt

SEQ ID NO: 76310 - RNA, 21 nt, synthetic construct
  source 1..21: mol_type = other RNA
cacatcagcgctaagtgcatt

SEQ ID NO: 76311 - RNA, 21 nt, synthetic construct
  source 1..21: mol_type = other RNA
cacatcagtgctgctctgacg

SEQ ID NO: 76312 - RNA, 21 nt, synthetic construct
  source 1..21: mol_type = other RNA
cacatcagttaccaccaagaa

SEQ ID NO: 76313 - RNA, 21 nt, synthetic construct
  source 1..21: mol_type = other RNA
cacatccacgcgtaagggtac

SEQ ID NO: 76314 - RNA, 21 nt, synthetic construct
  source 1..21: mol_type = other RNA
cacatccagaagtcacttttt

SEQ ID NO: 76315 - RNA, 21 nt, synthetic construct
  source 1..21: mol_type = other RNA
cacatccagctaattttcatt

SEQ ID NO: 76316 - RNA, 21 nt, synthetic construct
  source 1..21: mol_type = other RNA
cacatcctaatacagtaaagc

SEQ ID NO: 76317 - RNA, 21 nt, synthetic construct
  source 1..21: mol_type = other RNA
cacatccttgccaacagttac

SEQ ID NO: 76318 - RNA, 21 nt, synthetic construct
  source 1..21: mol_type = other RNA
cacatctcccataccacctgt

SEQ ID NO: 76319 - RNA, 21 nt, synthetic construct
  source 1..21: mol_type = other RNA
cacatctgtcttgtgcatcct

SEQ ID NO: 76320 - RNA, 21 nt, synthetic construct
  source 1..21: mol_type = other RNA
cacatgaacctgcatggtgta

SEQ ID NO: 76321 - RNA, 21 nt, synthetic construct
  source 1..21: mol_type = other RNA
cacatgactggccatccttcc

SEQ ID NO: 76322 - RNA, 21 nt, synthetic construct
  source 1..21: mol_type = other RNA
cacatgcacaaggtcaagagc

SEQ ID NO: 76323 - RNA, 21 nt, synthetic construct
  source 1..21: mol_type = other RNA
cacatgcacactagacctttc

SEQ ID NO: 76324 - RNA, 21 nt, synthetic construct
  source 1..21: mol_type = other RNA
cacatgcttccaaaagcaggc

SEQ ID NO: 76325 - RNA, 21 nt, synthetic construct
  source 1..21: mol_type = other RNA
cacatggcatcggggcctaca

SEQ ID NO: 76326 - RNA, 21 nt, synthetic construct
  source 1..21: mol_type = other RNA
cacatgggcatgggtccaaga

SEQ ID NO: 76327 - RNA, 21 nt, synthetic construct
  source 1..21: mol_type = other RNA
cacatggggcattaatttttt

SEQ ID NO: 76328 - RNA, 21 nt, synthetic construct
  source 1..21: mol_type = other RNA
cacatggtgataactggtgct

SEQ ID NO: 76329 - RNA, 21 nt, synthetic construct
  source 1..21: mol_type = other RNA
cacatgtcagccacaagacat

SEQ ID NO: 76330 - RNA, 21 nt, synthetic construct
  source 1..21: mol_type = other RNA
cacatgtcatgggccgggcgt

SEQ ID NO: 76331 - RNA, 21 nt, synthetic construct
  source 1..21: mol_type = other RNA
cacatgtggcttgtggctaca

SEQ ID NO: 76332 - RNA, 21 nt, synthetic construct
  source 1..21: mol_type = other RNA
cacatgtggttattgagtctg

SEQ ID NO: 76333 - RNA, 21 nt, synthetic construct
  source 1..21: mol_type = other RNA
cacatgttactcattatggtt

SEQ ID NO: 76334 - RNA, 21 nt, synthetic construct
  source 1..21: mol_type = other RNA
cacatgttccctagaacttaa

SEQ ID NO: 76335 - RNA, 21 nt, synthetic construct
  source 1..21: mol_type = other RNA
cacatgttgagtcttgtttac

SEQ ID NO: 76336 - RNA, 21 nt, synthetic construct
  source 1..21: mol_type = other RNA
cacatgtttggtcaattgatc

SEQ ID NO: 76337 - RNA, 21 nt, synthetic construct
  source 1..21: mol_type = other RNA
cacattaaataagggcatttt

SEQ ID NO: 76338 - RNA, 21 nt, synthetic construct
  source 1..21: mol_type = other RNA
cacattaactatggacatgag

SEQ ID NO: 76339 - RNA, 21 nt, synthetic construct
  source 1..21: mol_type = other RNA
cacattaataagatcatacac

SEQ ID NO: 76340 - RNA, 21 nt, synthetic construct
  source 1..21: mol_type = other RNA
cacattagaatcatccgggga

SEQ ID NO: 76341 - RNA, 21 nt, synthetic construct
  source 1..21: mol_type = other RNA
cacattagccactctgaattc

SEQ ID NO: 76342 - RNA, 21 nt, synthetic construct
  source 1..21: mol_type = other RNA
cacattagcctagacctcaaa

SEQ ID NO: 76343 - RNA, 21 nt, synthetic construct
  source 1..21: mol_type = other RNA
cacattaggctctgggtcaga

SEQ ID NO: 76344 - RNA, 21 nt, synthetic construct
  source 1..21: mol_type = other RNA
cacattcaaaattgttctaac

SEQ ID NO: 76345 - RNA, 21 nt, synthetic construct
  source 1..21: mol_type = other RNA
cacattcaacaacatggatga

SEQ ID NO: 76346 - RNA, 21 nt, synthetic construct
  source 1..21: mol_type = other RNA
cacattcaagcagaaatgagt

SEQ ID NO: 76347 - RNA, 21 nt, synthetic construct
  source 1..21: mol_type = other RNA
cacattcacagcgtgcacctt

SEQ ID NO: 76348 - RNA, 21 nt, synthetic construct
  source 1..21: mol_type = other RNA
cacattcagaggtatttgggg

SEQ ID NO: 76349 - RNA, 21 nt, synthetic construct
  source 1..21: mol_type = other RNA
cacattccaagagaggaataa

SEQ ID NO: 76350 - RNA, 21 nt, synthetic construct
  source 1..21: mol_type = other RNA
cacattccagaccagcagttc

SEQ ID NO: 76351 - RNA, 21 nt, synthetic construct
  source 1..21: mol_type = other RNA
cacattcccaaatgtcttaag

SEQ ID NO: 76352 - RNA, 21 nt, synthetic construct
  source 1..21: mol_type = other RNA
cacattccttccgacctgtag

SEQ ID NO: 76353 - RNA, 21 nt, synthetic construct
  source 1..21: mol_type = other RNA
cacattccttcttcacacatt

SEQ ID NO: 76354 - RNA, 21 nt, synthetic construct
  source 1..21: mol_type = other RNA
cacattcggccaagatctgtt

SEQ ID NO: 76355 - RNA, 21 nt, synthetic construct
  source 1..21: mol_type = other RNA
cacattctagtgatgggagat

SEQ ID NO: 76356 - RNA, 21 nt, synthetic construct
  source 1..21: mol_type = other RNA
cacattctgcctgcagactgc

SEQ ID NO: 76357 - RNA, 21 nt, synthetic construct
  source 1..21: mol_type = other RNA
cacattcttcaccattccagc

SEQ ID NO: 76358 - RNA, 21 nt, synthetic construct
  source 1..21: mol_type = other RNA
cacattgcacagtctccccca

SEQ ID NO: 76359 - RNA, 21 nt, synthetic construct
  source 1..21: mol_type = other RNA
cacattgtatttctgttagat

SEQ ID NO: 76360 - RNA, 21 nt, synthetic construct
  source 1..21: mol_type = other RNA
cacatttaagaagggaacact

SEQ ID NO: 76361 - RNA, 21 nt, synthetic construct
  source 1..21: mol_type = other RNA
cacatttagtttcatctatgt

SEQ ID NO: 76362 - RNA, 21 nt, synthetic construct
  source 1..21: mol_type = other RNA
cacatttcatagcagaatggc

SEQ ID NO: 76363 - RNA, 21 nt, synthetic construct
  source 1..21: mol_type = other RNA
cacatttcgccttctcagaag

SEQ ID NO: 76364 - RNA, 21 nt, synthetic construct
  source 1..21: mol_type = other RNA
cacatttctaatttccaagaa

SEQ ID NO: 76365 - RNA, 21 nt, synthetic construct
  source 1..21: mol_type = other RNA
cacatttctacacaacatgtt

SEQ ID NO: 76366 - RNA, 21 nt, synthetic construct
  source 1..21: mol_type = other RNA
cacatttgaaagaaagaaggc

SEQ ID NO: 76367 - RNA, 21 nt, synthetic construct
  source 1..21: mol_type = other RNA
cacatttgctttactactgca

SEQ ID NO: 76368 - RNA, 21 nt, synthetic construct
  source 1..21: mol_type = other RNA
cacatttggttttactactgt

SEQ ID NO: 76369 - RNA, 21 nt, synthetic construct
  source 1..21: mol_type = other RNA
cacattttaccaaaacagctt

SEQ ID NO: 76370 - RNA, 21 nt, synthetic construct
  source 1..21: mol_type = other RNA
cacattttcttatctaggcga

SEQ ID NO: 76371 - RNA, 21 nt, synthetic construct
  source 1..21: mol_type = other RNA
cacattttgaatcatgggagc

SEQ ID NO: 76372 - RNA, 21 nt, synthetic construct
  source 1..21: mol_type = other RNA
cacattttgtgacaagttcag

SEQ ID NO: 76373 - RNA, 21 nt, synthetic construct
  source 1..21: mol_type = other RNA
cacattttgttcattcatctg

SEQ ID NO: 76374 - RNA, 21 nt, synthetic construct
  source 1..21: mol_type = other RNA
cacatttttgacagccacgtg

SEQ ID NO: 76375 - RNA, 21 nt, synthetic construct
  source 1..21: mol_type = other RNA
cacattttttggtttgtatgt

SEQ ID NO: 76376 - RNA, 21 nt, synthetic construct
  source 1..21: mol_type = other RNA
caccaaaaaagcaccagttat

SEQ ID NO: 76377 - RNA, 21 nt, synthetic construct
  source 1..21: mol_type = other RNA
caccaaaactacaggcaacaa

SEQ ID NO: 76378 - RNA, 21 nt, synthetic construct
  source 1..21: mol_type = other RNA
caccaaacaccttacactcaa

SEQ ID NO: 76379 - RNA, 21 nt, synthetic construct
  source 1..21: mol_type = other RNA
caccaaacgtttagatgaatg

SEQ ID NO: 76380 - RNA, 21 nt, synthetic construct
  source 1..21: mol_type = other RNA
caccaaactcaaaaggacata

SEQ ID NO: 76381 - RNA, 21 nt, synthetic construct
  source 1..21: mol_type = other RNA
caccaaagacttcaggaacac

SEQ ID NO: 76382 - RNA, 21 nt, synthetic construct
  source 1..21: mol_type = other RNA
caccaaagattatgttccaca

SEQ ID NO: 76383 - RNA, 21 nt, synthetic construct
  source 1..21: mol_type = other RNA
caccaaagatttactaaactg

SEQ ID NO: 76384 - RNA, 21 nt, synthetic construct
  source 1..21: mol_type = other RNA
caccaaatcatgaaagtggag

SEQ ID NO: 76385 - RNA, 21 nt, synthetic construct
  source 1..21: mol_type = other RNA
caccaacacaaagccttctct

SEQ ID NO: 76386 - RNA, 21 nt, synthetic construct
  source 1..21: mol_type = other RNA
caccaacacctgcagtggcgt

SEQ ID NO: 76387 - RNA, 21 nt, synthetic construct
  source 1..21: mol_type = other RNA
caccaacagatcctcacatca

SEQ ID NO: 76388 - RNA, 21 nt, synthetic construct
  source 1..21: mol_type = other RNA
caccaacatccacagctttct

SEQ ID NO: 76389 - RNA, 21 nt, synthetic construct
  source 1..21: mol_type = other RNA
caccaacatggcacatgtcta

SEQ ID NO: 76390 - RNA, 21 nt, synthetic construct
  source 1..21: mol_type = other RNA
caccaacccttgttggacagc

SEQ ID NO: 76391 - RNA, 21 nt, synthetic construct
  source 1..21: mol_type = other RNA
caccaactccacattgtctta

SEQ ID NO: 76392 - RNA, 21 nt, synthetic construct
  source 1..21: mol_type = other RNA
caccaactgaagcggggctgc

SEQ ID NO: 76393 - RNA, 21 nt, synthetic construct
  source 1..21: mol_type = other RNA
caccaagaaaaagcagagaaa

SEQ ID NO: 76394 - RNA, 21 nt, synthetic construct
  source 1..21: mol_type = other RNA
caccaagacatgttaggttga

SEQ ID NO: 76395 - RNA, 21 nt, synthetic construct
  source 1..21: mol_type = other RNA
caccaagcaacactaaagatt

SEQ ID NO: 76396 - RNA, 21 nt, synthetic construct
  source 1..21: mol_type = other RNA
caccaagccctgccttaaaac

SEQ ID NO: 76397 - RNA, 21 nt, synthetic construct
  source 1..21: mol_type = other RNA
caccaaggtttctctccaagg

SEQ ID NO: 76398 - RNA, 21 nt, synthetic construct
  source 1..21: mol_type = other RNA
caccaattgttaacatttctt

SEQ ID NO: 76399 - RNA, 21 nt, synthetic construct
  source 1..21: mol_type = other RNA
caccacacttgcttgggaaca

SEQ ID NO: 76400 - RNA, 21 nt, synthetic construct
  source 1..21: mol_type = other RNA
caccacatccagctaattttc

SEQ ID NO: 76401 - RNA, 21 nt, synthetic construct
  source 1..21: mol_type = other RNA
caccacattcggccaagatct

SEQ ID NO: 76402 - RNA, 21 nt, synthetic construct
  source 1..21: mol_type = other RNA
caccacccttgatgtcacaag

SEQ ID NO: 76403 - RNA, 21 nt, synthetic construct
  source 1..21: mol_type = other RNA
caccacgtccggtcgttggat

SEQ ID NO: 76404 - RNA, 21 nt, synthetic construct
  source 1..21: mol_type = other RNA
caccactaatgtcacattttc

SEQ ID NO: 76405 - RNA, 21 nt, synthetic construct
  source 1..21: mol_type = other RNA
caccactacacccggctaatt

SEQ ID NO: 76406 - RNA, 21 nt, synthetic construct
  source 1..21: mol_type = other RNA
caccactagagtattacctat

SEQ ID NO: 76407 - RNA, 21 nt, synthetic construct
  source 1..21: mol_type = other RNA
caccactccaccttagcccaa

SEQ ID NO: 76408 - RNA, 21 nt, synthetic construct
  source 1..21: mol_type = other RNA
caccactcccggccgtatttt

SEQ ID NO: 76409 - RNA, 21 nt, synthetic construct
  source 1..21: mol_type = other RNA
caccactgagagggaagttta

SEQ ID NO: 76410 - RNA, 21 nt, synthetic construct
  source 1..21: mol_type = other RNA
caccacttcgagaagggaagt

SEQ ID NO: 76411 - RNA, 21 nt, synthetic construct
  source 1..21: mol_type = other RNA
caccagaactacacattccag

SEQ ID NO: 76412 - RNA, 21 nt, synthetic construct
  source 1..21: mol_type = other RNA
caccagacaaaaatagaggat

SEQ ID NO: 76413 - RNA, 21 nt, synthetic construct
  source 1..21: mol_type = other RNA
caccagatactcaatcagtgg

SEQ ID NO: 76414 - RNA, 21 nt, synthetic construct
  source 1..21: mol_type = other RNA
caccagatactcatgcttgct

SEQ ID NO: 76415 - RNA, 21 nt, synthetic construct
  source 1..21: mol_type = other RNA
caccagcataagacccctcag

SEQ ID NO: 76416 - RNA, 21 nt, synthetic construct
  source 1..21: mol_type = other RNA
caccagcatcttttgacgcgc

SEQ ID NO: 76417 - RNA, 21 nt, synthetic construct
  source 1..21: mol_type = other RNA
caccagcggcatacaggagtt

SEQ ID NO: 76418 - RNA, 21 nt, synthetic construct
  source 1..21: mol_type = other RNA
caccaggctggaatgcagcgg

SEQ ID NO: 76419 - RNA, 21 nt, synthetic construct
  source 1..21: mol_type = other RNA
caccagggcctctgaagacat

SEQ ID NO: 76420 - RNA, 21 nt, synthetic construct
  source 1..21: mol_type = other RNA
caccaggggctgggggatcca

SEQ ID NO: 76421 - RNA, 21 nt, synthetic construct
  source 1..21: mol_type = other RNA
caccagtaagattctgtctct

SEQ ID NO: 76422 - RNA, 21 nt, synthetic construct
  source 1..21: mol_type = other RNA
caccagttatcaccatgtgct

SEQ ID NO: 76423 - RNA, 21 nt, synthetic construct
  source 1..21: mol_type = other RNA
caccagtttctaattagaatt

SEQ ID NO: 76424 - RNA, 21 nt, synthetic construct
  source 1..21: mol_type = other RNA
caccatagctgaaggcactgt

SEQ ID NO: 76425 - RNA, 21 nt, synthetic construct
  source 1..21: mol_type = other RNA
caccatattggccaggctggt

SEQ ID NO: 76426 - RNA, 21 nt, synthetic construct
  source 1..21: mol_type = other RNA
caccatcatcatcaggctggc

SEQ ID NO: 76427 - RNA, 21 nt, synthetic construct
  source 1..21: mol_type = other RNA
caccatctaacagaaatacaa

SEQ ID NO: 76428 - RNA, 21 nt, synthetic construct
  source 1..21: mol_type = other RNA
caccatctctctgcctcaaaa

SEQ ID NO: 76429 - RNA, 21 nt, synthetic construct
  source 1..21: mol_type = other RNA
caccatctgataagcccaacc

SEQ ID NO: 76430 - RNA, 21 nt, synthetic construct
  source 1..21: mol_type = other RNA
caccatgacagagttccacct

SEQ ID NO: 76431 - RNA, 21 nt, synthetic construct
  source 1..21: mol_type = other RNA
caccatgatgcagcccctgcc

SEQ ID NO: 76432 - RNA, 21 nt, synthetic construct
  source 1..21: mol_type = other RNA
caccatgcaggttcatgtgtg

SEQ ID NO: 76433 - RNA, 21 nt, synthetic construct
  source 1..21: mol_type = other RNA
caccatggcaggtttcaagtg

SEQ ID NO: 76434 - RNA, 21 nt, synthetic construct
  source 1..21: mol_type = other RNA
caccatgtgcttatcaataaa

SEQ ID NO: 76435 - RNA, 21 nt, synthetic construct
  source 1..21: mol_type = other RNA
caccattccagccattctctt

SEQ ID NO: 76436 - RNA, 21 nt, synthetic construct
  source 1..21: mol_type = other RNA
caccatttagatcatcttata

SEQ ID NO: 76437 - RNA, 21 nt, synthetic construct
  source 1..21: mol_type = other RNA
caccatttattgtcaaggtca

SEQ ID NO: 76438 - RNA, 21 nt, synthetic construct
  source 1..21: mol_type = other RNA
caccattttttcaccagcggc

SEQ ID NO: 76439 - RNA, 21 nt, synthetic construct
  source 1..21: mol_type = other RNA
cacccaagaatttcatgcctt

SEQ ID NO: 76440 - RNA, 21 nt, synthetic construct
  source 1..21: mol_type = other RNA
cacccaagccacagcgtggaa

SEQ ID NO: 76441 - RNA, 21 nt, synthetic construct
  source 1..21: mol_type = other RNA
cacccaagtggagcctgctct

SEQ ID NO: 76442 - RNA, 21 nt, synthetic construct
  source 1..21: mol_type = other RNA
cacccacgtggagtgcaatgg

SEQ ID NO: 76443 - RNA, 21 nt, synthetic construct
  source 1..21: mol_type = other RNA
cacccacttgtcccatggtca

SEQ ID NO: 76444 - RNA, 21 nt, synthetic construct
  source 1..21: mol_type = other RNA
cacccagaccaagtttaacca

SEQ ID NO: 76445 - RNA, 21 nt, synthetic construct
  source 1..21: mol_type = other RNA
cacccagagcgggtttcctcg

SEQ ID NO: 76446 - RNA, 21 nt, synthetic construct
  source 1..21: mol_type = other RNA
cacccagctcgaccaggggaa

SEQ ID NO: 76447 - RNA, 21 nt, synthetic construct
  source 1..21: mol_type = other RNA
cacccagtatacacgtattta

SEQ ID NO: 76448 - RNA, 21 nt, synthetic construct
  source 1..21: mol_type = other RNA
cacccagttatctctgccctc

SEQ ID NO: 76449 - RNA, 21 nt, synthetic construct
  source 1..21: mol_type = other RNA
cacccagttcaccagtttcta

SEQ ID NO: 76450 - RNA, 21 nt, synthetic construct
  source 1..21: mol_type = other RNA
cacccatccacccacttgtcc

SEQ ID NO: 76451 - RNA, 21 nt, synthetic construct
  source 1..21: mol_type = other RNA
cacccatgaagccagcattac

SEQ ID NO: 76452 - RNA, 21 nt, synthetic construct
  source 1..21: mol_type = other RNA
cacccctgctctgcacgtact

SEQ ID NO: 76453 - RNA, 21 nt, synthetic construct
  source 1..21: mol_type = other RNA
cacccgaagaggacgattttt

SEQ ID NO: 76454 - RNA, 21 nt, synthetic construct
  source 1..21: mol_type = other RNA
cacccgacccactagtgaagt

SEQ ID NO: 76455 - RNA, 21 nt, synthetic construct
  source 1..21: mol_type = other RNA
cacccggctaattaaacaaac

SEQ ID NO: 76456 - RNA, 21 nt, synthetic construct
  source 1..21: mol_type = other RNA
cacccgtccaatttctttggc

SEQ ID NO: 76457 - RNA, 21 nt, synthetic construct
  source 1..21: mol_type = other RNA
caccctacagactcaataacc

SEQ ID NO: 76458 - RNA, 21 nt, synthetic construct
  source 1..21: mol_type = other RNA
caccctaggtagggttggggt

SEQ ID NO: 76459 - RNA, 21 nt, synthetic construct
  source 1..21: mol_type = other RNA
caccctatttatgttgcacaa

SEQ ID NO: 76460 - RNA, 21 nt, synthetic construct
  source 1..21: mol_type = other RNA
caccctcaaatgtctcattgt

SEQ ID NO: 76461 - RNA, 21 nt, synthetic construct
  source 1..21: mol_type = other RNA
caccctcaggactctgctcaa

SEQ ID NO: 76462 - RNA, 21 nt, synthetic construct
  source 1..21: mol_type = other RNA
caccctcctaccttccaaagt

SEQ ID NO: 76463 - RNA, 21 nt, synthetic construct
  source 1..21: mol_type = other RNA
caccctcctcctcctggccac

SEQ ID NO: 76464 - RNA, 21 nt, synthetic construct
  source 1..21: mol_type = other RNA
caccctgagcatccccgctgc

SEQ ID NO: 76465 - RNA, 21 nt, synthetic construct
  source 1..21: mol_type = other RNA
caccctgccccttatcctctt

SEQ ID NO: 76466 - RNA, 21 nt, synthetic construct
  source 1..21: mol_type = other RNA
caccctgcgaaggcaatgtaa

SEQ ID NO: 76467 - RNA, 21 nt, synthetic construct
  source 1..21: mol_type = other RNA
caccctgctccagtatgacct

SEQ ID NO: 76468 - RNA, 21 nt, synthetic construct
  source 1..21: mol_type = other RNA
caccctgggaaagcctggctt

SEQ ID NO: 76469 - RNA, 21 nt, synthetic construct
  source 1..21: mol_type = other RNA
cacccttataaaatgagggta

SEQ ID NO: 76470 - RNA, 21 nt, synthetic construct
  source 1..21: mol_type = other RNA
cacccttgaaaatttccagca

SEQ ID NO: 76471 - RNA, 21 nt, synthetic construct
  source 1..21: mol_type = other RNA
cacccttgatgtcacaagcca

SEQ ID NO: 76472 - RNA, 21 nt, synthetic construct
  source 1..21: mol_type = other RNA
cacccttgctgcttctaccca

SEQ ID NO: 76473 - RNA, 21 nt, synthetic construct
  source 1..21: mol_type = other RNA
cacccttggtaaacagcagtc

SEQ ID NO: 76474 - RNA, 21 nt, synthetic construct
  source 1..21: mol_type = other RNA
cacccttgtaatcaagtatct

SEQ ID NO: 76475 - RNA, 21 nt, synthetic construct
  source 1..21: mol_type = other RNA
caccctttcttaggaagctat

SEQ ID NO: 76476 - RNA, 21 nt, synthetic construct
  source 1..21: mol_type = other RNA
caccgcaacatctgcctcccg

SEQ ID NO: 76477 - RNA, 21 nt, synthetic construct
  source 1..21: mol_type = other RNA
caccgcacctggccgggattt

SEQ ID NO: 76478 - RNA, 21 nt, synthetic construct
  source 1..21: mol_type = other RNA
caccgcactcagcctgttggg

SEQ ID NO: 76479 - RNA, 21 nt, synthetic construct
  source 1..21: mol_type = other RNA
caccgccttcctaccctgcct

SEQ ID NO: 76480 - RNA, 21 nt, synthetic construct
  source 1..21: mol_type = other RNA
caccgcgcccggccaaatatc

SEQ ID NO: 76481 - RNA, 21 nt, synthetic construct
  source 1..21: mol_type = other RNA
caccgcgcccggcccagattc

SEQ ID NO: 76482 - RNA, 21 nt, synthetic construct
  source 1..21: mol_type = other RNA
caccgcgcccggccgagaaat

SEQ ID NO: 76483 - RNA, 21 nt, synthetic construct
  source 1..21: mol_type = other RNA
caccgcgcctggtgattaaag

SEQ ID NO: 76484 - RNA, 21 nt, synthetic construct
  source 1..21: mol_type = other RNA
caccgctccacgcccattagg

SEQ ID NO: 76485 - RNA, 21 nt, synthetic construct
  source 1..21: mol_type = other RNA
caccgctgcattccagcctgg

SEQ ID NO: 76486 - RNA, 21 nt, synthetic construct
  source 1..21: mol_type = other RNA
caccgtgacagaacaaataac

SEQ ID NO: 76487 - RNA, 21 nt, synthetic construct
  source 1..21: mol_type = other RNA
caccgtgcaactagagaaagc

SEQ ID NO: 76488 - RNA, 21 nt, synthetic construct
  source 1..21: mol_type = other RNA
caccgtgcccggccagacatt

SEQ ID NO: 76489 - RNA, 21 nt, synthetic construct
  source 1..21: mol_type = other RNA
caccgtgccgggcttggtatg

SEQ ID NO: 76490 - RNA, 21 nt, synthetic construct
  source 1..21: mol_type = other RNA
cacctaaaaggttgcttaatt

SEQ ID NO: 76491 - RNA, 21 nt, synthetic construct
  source 1..21: mol_type = other RNA
cacctaaagatatgtgtagga

SEQ ID NO: 76492 - RNA, 21 nt, synthetic construct
  source 1..21: mol_type = other RNA
cacctaacaatgattatttcg

SEQ ID NO: 76493 - RNA, 21 nt, synthetic construct
  source 1..21: mol_type = other RNA
cacctaactactaataaatgc

SEQ ID NO: 76494 - RNA, 21 nt, synthetic construct
  source 1..21: mol_type = other RNA
cacctaataaaatgtttagcg

SEQ ID NO: 76495 - RNA, 21 nt, synthetic construct
  source 1..21: mol_type = other RNA
cacctacattaatctcatcca

SEQ ID NO: 76496 - RNA, 21 nt, synthetic construct
  source 1..21: mol_type = other RNA
cacctagcctctctgggcttc

SEQ ID NO: 76497 - RNA, 21 nt, synthetic construct
  source 1..21: mol_type = other RNA
cacctagctgttttcatgcga

SEQ ID NO: 76498 - RNA, 21 nt, synthetic construct
  source 1..21: mol_type = other RNA
cacctaggcctattttaggct

SEQ ID NO: 76499 - RNA, 21 nt, synthetic construct
  source 1..21: mol_type = other RNA
cacctattcataggtaatact

SEQ ID NO: 76500 - RNA, 21 nt, synthetic construct
  source 1..21: mol_type = other RNA
cacctcaaactagaaaaagaa

SEQ ID NO: 76501 - RNA, 21 nt, synthetic construct
  source 1..21: mol_type = other RNA
cacctcaaggcagaacacact

SEQ ID NO: 76502 - RNA, 21 nt, synthetic construct
  source 1..21: mol_type = other RNA
cacctcaaggccaactgtcct

SEQ ID NO: 76503 - RNA, 21 nt, synthetic construct
  source 1..21: mol_type = other RNA
cacctcaagtgatgcaactcc

SEQ ID NO: 76504 - RNA, 21 nt, synthetic construct
  source 1..21: mol_type = other RNA
cacctcacattcacagcgtgc

SEQ ID NO: 76505 - RNA, 21 nt, synthetic construct
  source 1..21: mol_type = other RNA
cacctcagaaacaaacaaaaa

SEQ ID NO: 76506 - RNA, 21 nt, synthetic construct
  source 1..21: mol_type = other RNA
cacctcagccccacaagtagc

SEQ ID NO: 76507 - RNA, 21 nt, synthetic construct
  source 1..21: mol_type = other RNA
cacctcagttaaacccaacaa

SEQ ID NO: 76508 - RNA, 21 nt, synthetic construct
  source 1..21: mol_type = other RNA
cacctcatccggtctcagttt

SEQ ID NO: 76509 - RNA, 21 nt, synthetic construct
  source 1..21: mol_type = other RNA
cacctccagtgtcctgaatga

SEQ ID NO: 76510 - RNA, 21 nt, synthetic construct
  source 1..21: mol_type = other RNA
cacctccatcactgactggct

SEQ ID NO: 76511 - RNA, 21 nt, synthetic construct
  source 1..21: mol_type = other RNA
cacctcctccggggacccagt

SEQ ID NO: 76512 - RNA, 21 nt, synthetic construct
  source 1..21: mol_type = other RNA
cacctcgggttcaagccccag

SEQ ID NO: 76513 - RNA, 21 nt, synthetic construct
  source 1..21: mol_type = other RNA
cacctctacacaaaaatccag

SEQ ID NO: 76514 - RNA, 21 nt, synthetic construct
  source 1..21: mol_type = other RNA
cacctctccgggtaaaaagcc

SEQ ID NO: 76515 - RNA, 21 nt, synthetic construct
  source 1..21: mol_type = other RNA
cacctctggactcagggtcac

SEQ ID NO: 76516 - RNA, 21 nt, synthetic construct
  source 1..21: mol_type = other RNA
cacctgaaatctgatttgttt

SEQ ID NO: 76517 - RNA, 21 nt, synthetic construct
  source 1..21: mol_type = other RNA
cacctgaaattctcaaatgaa

SEQ ID NO: 76518 - RNA, 21 nt, synthetic construct
  source 1..21: mol_type = other RNA
cacctgaacccaggaggcaaa

SEQ ID NO: 76519 - RNA, 21 nt, synthetic construct
  source 1..21: mol_type = other RNA
cacctgacaagtagtacaaaa

SEQ ID NO: 76520 - RNA, 21 nt, synthetic construct
  source 1..21: mol_type = other RNA
cacctgaggggtcttatgctg

SEQ ID NO: 76521 - RNA, 21 nt, synthetic construct
  source 1..21: mol_type = other RNA
cacctgcagtggcgtgtgccc

SEQ ID NO: 76522 - RNA, 21 nt, synthetic construct
  source 1..21: mol_type = other RNA
cacctgcgagcggcgggcttc

SEQ ID NO: 76523 - RNA, 21 nt, synthetic construct
  source 1..21: mol_type = other RNA
cacctgctctttatctccaca

SEQ ID NO: 76524 - RNA, 21 nt, synthetic construct
  source 1..21: mol_type = other RNA
cacctggatcaagtgggattt

SEQ ID NO: 76525 - RNA, 21 nt, synthetic construct
  source 1..21: mol_type = other RNA
cacctggcaacaaaggcgaag

SEQ ID NO: 76526 - RNA, 21 nt, synthetic construct
  source 1..21: mol_type = other RNA
cacctggcccctttcaagatt

SEQ ID NO: 76527 - RNA, 21 nt, synthetic construct
  source 1..21: mol_type = other RNA
cacctggccgggatttacttc

SEQ ID NO: 76528 - RNA, 21 nt, synthetic construct
  source 1..21: mol_type = other RNA
cacctggctaatttttaaatg

SEQ ID NO: 76529 - RNA, 21 nt, synthetic construct
  source 1..21: mol_type = other RNA
cacctgggggagactgtgcaa

SEQ ID NO: 76530 - RNA, 21 nt, synthetic construct
  source 1..21: mol_type = other RNA
cacctgggtatacagcaaaag

SEQ ID NO: 76531 - RNA, 21 nt, synthetic construct
  source 1..21: mol_type = other RNA
cacctgtataaataaaatgtc

SEQ ID NO: 76532 - RNA, 21 nt, synthetic construct
  source 1..21: mol_type = other RNA
cacctgtcagaaacaccaaca

SEQ ID NO: 76533 - RNA, 21 nt, synthetic construct
  source 1..21: mol_type = other RNA
cacctgtcatgtcaaattttt

SEQ ID NO: 76534 - RNA, 21 nt, synthetic construct
  source 1..21: mol_type = other RNA
cacctgtttaaaaagaaaaag

SEQ ID NO: 76535 - RNA, 21 nt, synthetic construct
  source 1..21: mol_type = other RNA
caccttacactcaaaagccat

SEQ ID NO: 76536 - RNA, 21 nt, synthetic construct
  source 1..21: mol_type = other RNA
caccttacattgtaatcctgt

SEQ ID NO: 76537 - RNA, 21 nt, synthetic construct
  source 1..21: mol_type = other RNA
caccttagcccaagctaccat

SEQ ID NO: 76538 - RNA, 21 nt, synthetic construct
  source 1..21: mol_type = other RNA
caccttcagaagccctgcagc

SEQ ID NO: 76539 - RNA, 21 nt, synthetic construct
  source 1..21: mol_type = other RNA
caccttccctactcactgaaa

SEQ ID NO: 76540 - RNA, 21 nt, synthetic construct
  source 1..21: mol_type = other RNA
caccttctgctgggcccactc

SEQ ID NO: 76541 - RNA, 21 nt, synthetic construct
  source 1..21: mol_type = other RNA
caccttgaacatgaacgagaa

SEQ ID NO: 76542 - RNA, 21 nt, synthetic construct
  source 1..21: mol_type = other RNA
caccttgaactgggacttcta

SEQ ID NO: 76543 - RNA, 21 nt, synthetic construct
  source 1..21: mol_type = other RNA
caccttgggaggctgaggctg

SEQ ID NO: 76544 - RNA, 21 nt, synthetic construct
  source 1..21: mol_type = other RNA
cacctttattaactagaattg

SEQ ID NO: 76545 - RNA, 21 nt, synthetic construct
  source 1..21: mol_type = other RNA
cacctttcctgcccctccact

SEQ ID NO: 76546 - RNA, 21 nt, synthetic construct
  source 1..21: mol_type = other RNA
cacctttgtattcatccagtt

SEQ ID NO: 76547 - RNA, 21 nt, synthetic construct
  source 1..21: mol_type = other RNA
cacgaaaatatccctggggtt

SEQ ID NO: 76548 - RNA, 21 nt, synthetic construct
  source 1..21: mol_type = other RNA
cacgaaagcggtcaacgcacc

SEQ ID NO: 76549 - RNA, 21 nt, synthetic construct
  source 1..21: mol_type = other RNA
cacgagaaaagcacaggcatc

SEQ ID NO: 76550 - RNA, 21 nt, synthetic construct
  source 1..21: mol_type = other RNA
cacgagaaggacagcttccac

SEQ ID NO: 76551 - RNA, 21 nt, synthetic construct
  source 1..21: mol_type = other RNA
cacgagactgttagggactta

SEQ ID NO: 76552 - RNA, 21 nt, synthetic construct
  source 1..21: mol_type = other RNA
cacgagtaatggatgttttta

SEQ ID NO: 76553 - RNA, 21 nt, synthetic construct
  source 1..21: mol_type = other RNA
cacgagtattcaagtttcacc

SEQ ID NO: 76554 - RNA, 21 nt, synthetic construct
  source 1..21: mol_type = other RNA
cacgagtgtgtttcgcaaagt

SEQ ID NO: 76555 - RNA, 21 nt, synthetic construct
  source 1..21: mol_type = other RNA
cacgagttcaggaccagcttg

SEQ ID NO: 76556 - RNA, 21 nt, synthetic construct
  source 1..21: mol_type = other RNA
cacgatgcttaggtaagaaaa

SEQ ID NO: 76557 - RNA, 21 nt, synthetic construct
  source 1..21: mol_type = other RNA
cacgattctgacccagagcct

SEQ ID NO: 76558 - RNA, 21 nt, synthetic construct
  source 1..21: mol_type = other RNA
cacgcacagggagatacttga

SEQ ID NO: 76559 - RNA, 21 nt, synthetic construct
  source 1..21: mol_type = other RNA
cacgcagaacagtgtttacac

SEQ ID NO: 76560 - RNA, 21 nt, synthetic construct
  source 1..21: mol_type = other RNA
cacgcagaaccactgagcaca

SEQ ID NO: 76561 - RNA, 21 nt, synthetic construct
  source 1..21: mol_type = other RNA
cacgcagtttgttctgctgtt

SEQ ID NO: 76562 - RNA, 21 nt, synthetic construct
  source 1..21: mol_type = other RNA
cacgcatctggtctatctcat

SEQ ID NO: 76563 - RNA, 21 nt, synthetic construct
  source 1..21: mol_type = other RNA
cacgcattgcattgactacca

SEQ ID NO: 76564 - RNA, 21 nt, synthetic construct
  source 1..21: mol_type = other RNA
cacgccactgcaggtgttggt

SEQ ID NO: 76565 - RNA, 21 nt, synthetic construct
  source 1..21: mol_type = other RNA
cacgccactgcattccgcctg

SEQ ID NO: 76566 - RNA, 21 nt, synthetic construct
  source 1..21: mol_type = other RNA
cacgccatctcgcccagctaa

SEQ ID NO: 76567 - RNA, 21 nt, synthetic construct
  source 1..21: mol_type = other RNA
cacgcccattaggatagctat

SEQ ID NO: 76568 - RNA, 21 nt, synthetic construct
  source 1..21: mol_type = other RNA
cacgcccggccgatgcctgtg

SEQ ID NO: 76569 - RNA, 21 nt, synthetic construct
  source 1..21: mol_type = other RNA
cacgccttcgcgggcaccttc

SEQ ID NO: 76570 - RNA, 21 nt, synthetic construct
  source 1..21: mol_type = other RNA
cacgcgtaagggtacagaact

SEQ ID NO: 76571 - RNA, 21 nt, synthetic construct
  source 1..21: mol_type = other RNA
cacgctggaagggagcccaag

SEQ ID NO: 76572 - RNA, 21 nt, synthetic construct
  source 1..21: mol_type = other RNA
cacgctgtgaatgtgaggtga

SEQ ID NO: 76573 - RNA, 21 nt, synthetic construct
  source 1..21: mol_type = other RNA
cacgctgtggcttgggtgacc

SEQ ID NO: 76574 - RNA, 21 nt, synthetic construct
  source 1..21: mol_type = other RNA
cacggaaaacattattttctt

SEQ ID NO: 76575 - RNA, 21 nt, synthetic construct
  source 1..21: mol_type = other RNA
cacggaatgcccctttgagca

SEQ ID NO: 76576 - RNA, 21 nt, synthetic construct
  source 1..21: mol_type = other RNA
cacggacttggcacaggagag

SEQ ID NO: 76577 - RNA, 21 nt, synthetic construct
  source 1..21: mol_type = other RNA
cacggctgattataaccttga

SEQ ID NO: 76578 - RNA, 21 nt, synthetic construct
  source 1..21: mol_type = other RNA
cacgggctgggcgcgatggct

SEQ ID NO: 76579 - RNA, 21 nt, synthetic construct
  source 1..21: mol_type = other RNA
cacgggtaaaaataaatctaa

SEQ ID NO: 76580 - RNA, 21 nt, synthetic construct
  source 1..21: mol_type = other RNA
cacgggtacacatcctaatac

SEQ ID NO: 76581 - RNA, 21 nt, synthetic construct
  source 1..21: mol_type = other RNA
cacggtctcacactgttgtcc

SEQ ID NO: 76582 - RNA, 21 nt, synthetic construct
  source 1..21: mol_type = other RNA
cacggtgaagaaccgactgaa

SEQ ID NO: 76583 - RNA, 21 nt, synthetic construct
  source 1..21: mol_type = other RNA
cacggtgccctacatatggca

SEQ ID NO: 76584 - RNA, 21 nt, synthetic construct
  source 1..21: mol_type = other RNA
cacgtactagtcagcacactc

SEQ ID NO: 76585 - RNA, 21 nt, synthetic construct
  source 1..21: mol_type = other RNA
cacgtatttatattttggtag

SEQ ID NO: 76586 - RNA, 21 nt, synthetic construct
  source 1..21: mol_type = other RNA
cacgtcaccgcaacctccgcc

SEQ ID NO: 76587 - RNA, 21 nt, synthetic construct
  source 1..21: mol_type = other RNA
cacgtccggtcgttggattta

SEQ ID NO: 76588 - RNA, 21 nt, synthetic construct
  source 1..21: mol_type = other RNA
cacgtctgtggtctcagctcc

SEQ ID NO: 76589 - RNA, 21 nt, synthetic construct
  source 1..21: mol_type = other RNA
cacgtcttgtcaataatttgg

SEQ ID NO: 76590 - RNA, 21 nt, synthetic construct
  source 1..21: mol_type = other RNA
cacgtgaagatggagttacgc

SEQ ID NO: 76591 - RNA, 21 nt, synthetic construct
  source 1..21: mol_type = other RNA
cacgtgaagctacagactaat

SEQ ID NO: 76592 - RNA, 21 nt, synthetic construct
  source 1..21: mol_type = other RNA
cacgtgcattcatactgaagg

SEQ ID NO: 76593 - RNA, 21 nt, synthetic construct
  source 1..21: mol_type = other RNA
cacgtggagtgcaatggggca

SEQ ID NO: 76594 - RNA, 21 nt, synthetic construct
  source 1..21: mol_type = other RNA
cacgtggcgctccctctgtgt

SEQ ID NO: 76595 - RNA, 21 nt, synthetic construct
  source 1..21: mol_type = other RNA
cacgtggctgtcaaaaatgtg

SEQ ID NO: 76596 - RNA, 21 nt, synthetic construct
  source 1..21: mol_type = other RNA
cacgtgggtgacagagcaaga

SEQ ID NO: 76597 - RNA, 21 nt, synthetic construct
  source 1..21: mol_type = other RNA
cacgtgtattgagtgtagctg

SEQ ID NO: 76598 - RNA, 21 nt, synthetic construct
  source 1..21: mol_type = other RNA
cacgttacaaaatatgtaatg

SEQ ID NO: 76599 - RNA, 21 nt, synthetic construct
  source 1..21: mol_type = other RNA
cacgttaccctctggaatgcc

SEQ ID NO: 76600 - RNA, 21 nt, synthetic construct
  source 1..21: mol_type = other RNA
cacgttagcatcaccatcatc

SEQ ID NO: 76601 - RNA, 21 nt, synthetic construct
  source 1..21: mol_type = other RNA
cacgtttgatctggtcacaaa

SEQ ID NO: 76602 - RNA, 21 nt, synthetic construct
  source 1..21: mol_type = other RNA
cacgtttgctttggagtgaga

SEQ ID NO: 76603 - RNA, 21 nt, synthetic construct
  source 1..21: mol_type = other RNA
cacgtttttagaaatttaccc

SEQ ID NO: 76604 - RNA, 21 nt, synthetic construct
  source 1..21: mol_type = other RNA
cactaaaaatcagattaagca

SEQ ID NO: 76605 - RNA, 21 nt, synthetic construct
  source 1..21: mol_type = other RNA
cactaaaacaggaagttgaga

SEQ ID NO: 76606 - RNA, 21 nt, synthetic construct
  source 1..21: mol_type = other RNA
cactaaactagtatcaacctg

SEQ ID NO: 76607 - RNA, 21 nt, synthetic construct
  source 1..21: mol_type = other RNA
cactaaagatttgccaatcaa

SEQ ID NO: 76608 - RNA, 21 nt, synthetic construct
  source 1..21: mol_type = other RNA
cactaaaggggatttcatgaa

SEQ ID NO: 76609 - RNA, 21 nt, synthetic construct
  source 1..21: mol_type = other RNA
cactaacaaagggcctgttcc

SEQ ID NO: 76610 - RNA, 21 nt, synthetic construct
  source 1..21: mol_type = other RNA
cactaaccaacattgagtttc

SEQ ID NO: 76611 - RNA, 21 nt, synthetic construct
  source 1..21: mol_type = other RNA
cactaactttctattcccctg

SEQ ID NO: 76612 - RNA, 21 nt, synthetic construct
  source 1..21: mol_type = other RNA
cactaagaagatggttggaag

SEQ ID NO: 76613 - RNA, 21 nt, synthetic construct
  source 1..21: mol_type = other RNA
cactaagagtgaaaaggcaaa

SEQ ID NO: 76614 - RNA, 21 nt, synthetic construct
  source 1..21: mol_type = other RNA
cactaaggtcaacacatcagc

SEQ ID NO: 76615 - RNA, 21 nt, synthetic construct
  source 1..21: mol_type = other RNA
cactaagtcagaattcactgt

SEQ ID NO: 76616 - RNA, 21 nt, synthetic construct
  source 1..21: mol_type = other RNA
cactaatccttctcatagtct

SEQ ID NO: 76617 - RNA, 21 nt, synthetic construct
  source 1..21: mol_type = other RNA
cactaatgcctcaaattagtc

SEQ ID NO: 76618 - RNA, 21 nt, synthetic construct
  source 1..21: mol_type = other RNA
cactaatgtcacattttctta

SEQ ID NO: 76619 - RNA, 21 nt, synthetic construct
  source 1..21: mol_type = other RNA
cactaatgtccttttcctgtt

SEQ ID NO: 76620 - RNA, 21 nt, synthetic construct
  source 1..21: mol_type = other RNA
cactacacccggctaattaaa

SEQ ID NO: 76621 - RNA, 21 nt, synthetic construct
  source 1..21: mol_type = other RNA
cactacagcatattagctgtc

SEQ ID NO: 76622 - RNA, 21 nt, synthetic construct
  source 1..21: mol_type = other RNA
cactacgcccggcccatgaca

SEQ ID NO: 76623 - RNA, 21 nt, synthetic construct
  source 1..21: mol_type = other RNA
cactacttagcccctgctgcc

SEQ ID NO: 76624 - RNA, 21 nt, synthetic construct
  source 1..21: mol_type = other RNA
cactagaatgtgacttcgtca

SEQ ID NO: 76625 - RNA, 21 nt, synthetic construct
  source 1..21: mol_type = other RNA
cactagacacatttttgacag

SEQ ID NO: 76626 - RNA, 21 nt, synthetic construct
  source 1..21: mol_type = other RNA
cactagacctttcttaggttt

SEQ ID NO: 76627 - RNA, 21 nt, synthetic construct
  source 1..21: mol_type = other RNA
cactagagcttcaacctcctg

SEQ ID NO: 76628 - RNA, 21 nt, synthetic construct
  source 1..21: mol_type = other RNA
cactagagtattacctatgaa

SEQ ID NO: 76629 - RNA, 21 nt, synthetic construct
  source 1..21: mol_type = other RNA
cactagatctcttttccttta

SEQ ID NO: 76630 - RNA, 21 nt, synthetic construct
  source 1..21: mol_type = other RNA
cactagcaaactactgatagc

SEQ ID NO: 76631 - RNA, 21 nt, synthetic construct
  source 1..21: mol_type = other RNA
cactagcaatccaggatctta

SEQ ID NO: 76632 - RNA, 21 nt, synthetic construct
  source 1..21: mol_type = other RNA
cactagccactgggtcttata

SEQ ID NO: 76633 - RNA, 21 nt, synthetic construct
  source 1..21: mol_type = other RNA
cactagctattagagaaatgc

SEQ ID NO: 76634 - RNA, 21 nt, synthetic construct
  source 1..21: mol_type = other RNA
cactagctattgtcttttcta

SEQ ID NO: 76635 - RNA, 21 nt, synthetic construct
  source 1..21: mol_type = other RNA
cactagctgacccactggttt

SEQ ID NO: 76636 - RNA, 21 nt, synthetic construct
  source 1..21: mol_type = other RNA
cactagggactggcctcggcc

SEQ ID NO: 76637 - RNA, 21 nt, synthetic construct
  source 1..21: mol_type = other RNA
cactaggggactaacagggtc

SEQ ID NO: 76638 - RNA, 21 nt, synthetic construct
  source 1..21: mol_type = other RNA
cactagtcaccctacagactc

SEQ ID NO: 76639 - RNA, 21 nt, synthetic construct
  source 1..21: mol_type = other RNA
cactagtcagtatatttactg

SEQ ID NO: 76640 - RNA, 21 nt, synthetic construct
  source 1..21: mol_type = other RNA
cactagtgaagtcccatcttc

SEQ ID NO: 76641 - RNA, 21 nt, synthetic construct
  source 1..21: mol_type = other RNA
cactagtggaagaatcaggtc

SEQ ID NO: 76642 - RNA, 21 nt, synthetic construct
  source 1..21: mol_type = other RNA
cactagtgggatcaaaccatg

SEQ ID NO: 76643 - RNA, 21 nt, synthetic construct
  source 1..21: mol_type = other RNA
cactagtgggtcgggtgtcag

SEQ ID NO: 76644 - RNA, 21 nt, synthetic construct
  source 1..21: mol_type = other RNA
cactataacagatggaactct

SEQ ID NO: 76645 - RNA, 21 nt, synthetic construct
  source 1..21: mol_type = other RNA
cactataagccaatatccctg

SEQ ID NO: 76646 - RNA, 21 nt, synthetic construct
  source 1..21: mol_type = other RNA
cactataatccagatggacaa

SEQ ID NO: 76647 - RNA, 21 nt, synthetic construct
  source 1..21: mol_type = other RNA
cactatccacatttggtttta

SEQ ID NO: 76648 - RNA, 21 nt, synthetic construct
  source 1..21: mol_type = other RNA
cactatctaataaaatagcag

SEQ ID NO: 76649 - RNA, 21 nt, synthetic construct
  source 1..21: mol_type = other RNA
cactatggcttttgagtgtaa

SEQ ID NO: 76650 - RNA, 21 nt, synthetic construct
  source 1..21: mol_type = other RNA
cactatgtgttgataaatatg

SEQ ID NO: 76651 - RNA, 21 nt, synthetic construct
  source 1..21: mol_type = other RNA
cactattaaccatatggttta

SEQ ID NO: 76652 - RNA, 21 nt, synthetic construct
  source 1..21: mol_type = other RNA
cactattgaaagcccttgagt

SEQ ID NO: 76653 - RNA, 21 nt, synthetic construct
  source 1..21: mol_type = other RNA
cactattgagagtgaaaacac

SEQ ID NO: 76654 - RNA, 21 nt, synthetic construct
  source 1..21: mol_type = other RNA
cactcaaaactgaagtttatc

SEQ ID NO: 76655 - RNA, 21 nt, synthetic construct
  source 1..21: mol_type = other RNA
cactcaaaagccatagtgtaa

SEQ ID NO: 76656 - RNA, 21 nt, synthetic construct
  source 1..21: mol_type = other RNA
cactcaagcaatcctccggcc

SEQ ID NO: 76657 - RNA, 21 nt, synthetic construct
  source 1..21: mol_type = other RNA
cactcaatacacgtggctgtc

SEQ ID NO: 76658 - RNA, 21 nt, synthetic construct
  source 1..21: mol_type = other RNA
cactcacctagctgttttcat

SEQ ID NO: 76659 - RNA, 21 nt, synthetic construct
  source 1..21: mol_type = other RNA
cactcacctgtcatgtcaaat

SEQ ID NO: 76660 - RNA, 21 nt, synthetic construct
  source 1..21: mol_type = other RNA
cactcactggcctgagctctc

SEQ ID NO: 76661 - RNA, 21 nt, synthetic construct
  source 1..21: mol_type = other RNA
cactcagaagtactactcatt

SEQ ID NO: 76662 - RNA, 21 nt, synthetic construct
  source 1..21: mol_type = other RNA
cactcagatatcaatctggat

SEQ ID NO: 76663 - RNA, 21 nt, synthetic construct
  source 1..21: mol_type = other RNA
cactcagcataattggttaaa

SEQ ID NO: 76664 - RNA, 21 nt, synthetic construct
  source 1..21: mol_type = other RNA
cactcagcctgttgggaggtt

SEQ ID NO: 76665 - RNA, 21 nt, synthetic construct
  source 1..21: mol_type = other RNA
cactcataccaggttttggta

SEQ ID NO: 76666 - RNA, 21 nt, synthetic construct
  source 1..21: mol_type = other RNA
cactcatttccgttgctgcat

SEQ ID NO: 76667 - RNA, 21 nt, synthetic construct
  source 1..21: mol_type = other RNA
cactcatttcctttcagtcgg

SEQ ID NO: 76668 - RNA, 21 nt, synthetic construct
  source 1..21: mol_type = other RNA
cactccaaagcaaacgtgcac

SEQ ID NO: 76669 - RNA, 21 nt, synthetic construct
  source 1..21: mol_type = other RNA
cactccacacacgaagtagtt

SEQ ID NO: 76670 - RNA, 21 nt, synthetic construct
  source 1..21: mol_type = other RNA
cactccaccttagcccaagct

SEQ ID NO: 76671 - RNA, 21 nt, synthetic construct
  source 1..21: mol_type = other RNA
cactccacgtgggtgacagag

SEQ ID NO: 76672 - RNA, 21 nt, synthetic construct
  source 1..21: mol_type = other RNA
cactccacttcccactgctat

SEQ ID NO: 76673 - RNA, 21 nt, synthetic construct
  source 1..21: mol_type = other RNA
cactccagaatgaccgagata

SEQ ID NO: 76674 - RNA, 21 nt, synthetic construct
  source 1..21: mol_type = other RNA
cactccagcatccctccagtc

SEQ ID NO: 76675 - RNA, 21 nt, synthetic construct
  source 1..21: mol_type = other RNA
cactccagccttggtaagagt

SEQ ID NO: 76676 - RNA, 21 nt, synthetic construct
  source 1..21: mol_type = other RNA
cactccatttgtggcatcttt

SEQ ID NO: 76677 - RNA, 21 nt, synthetic construct
  source 1..21: mol_type = other RNA
cactccccagtggttgtggaa

SEQ ID NO: 76678 - RNA, 21 nt, synthetic construct
  source 1..21: mol_type = other RNA
cactcctcattcacactagtc

SEQ ID NO: 76679 - RNA, 21 nt, synthetic construct
  source 1..21: mol_type = other RNA
cactcgcactccacttcccac

SEQ ID NO: 76680 - RNA, 21 nt, synthetic construct
  source 1..21: mol_type = other RNA
cactcgtgtatgatttctagg

SEQ ID NO: 76681 - RNA, 21 nt, synthetic construct
  source 1..21: mol_type = other RNA
cactctaatatggttcctaga

SEQ ID NO: 76682 - RNA, 21 nt, synthetic construct
  source 1..21: mol_type = other RNA
cactctcaatagtgtcctttg

SEQ ID NO: 76683 - RNA, 21 nt, synthetic construct
  source 1..21: mol_type = other RNA
cactctcatctaaattaagct

SEQ ID NO: 76684 - RNA, 21 nt, synthetic construct
  source 1..21: mol_type = other RNA
cactctccccaagtaaacctc

SEQ ID NO: 76685 - RNA, 21 nt, synthetic construct
  source 1..21: mol_type = other RNA
cactctctggctgcaattgcg

SEQ ID NO: 76686 - RNA, 21 nt, synthetic construct
  source 1..21: mol_type = other RNA
cactctctttaggaagcttcc

SEQ ID NO: 76687 - RNA, 21 nt, synthetic construct
  source 1..21: mol_type = other RNA
cactctgaatcacctcaaggc

SEQ ID NO: 76688 - RNA, 21 nt, synthetic construct
  source 1..21: mol_type = other RNA
cactctgaattctctggaata

SEQ ID NO: 76689 - RNA, 21 nt, synthetic construct
  source 1..21: mol_type = other RNA
cactctgcaattttaaatgta

SEQ ID NO: 76690 - RNA, 21 nt, synthetic construct
  source 1..21: mol_type = other RNA
cactctggcctggacaacagt

SEQ ID NO: 76691 - RNA, 21 nt, synthetic construct
  source 1..21: mol_type = other RNA
cactctgtcgcccaggctgga

SEQ ID NO: 76692 - RNA, 21 nt, synthetic construct
  source 1..21: mol_type = other RNA
cactcttaaaaggagatatac

SEQ ID NO: 76693 - RNA, 21 nt, synthetic construct
  source 1..21: mol_type = other RNA
cactcttaataactgcctaag

SEQ ID NO: 76694 - RNA, 21 nt, synthetic construct
  source 1..21: mol_type = other RNA
cactcttaccaaggctggagt

SEQ ID NO: 76695 - RNA, 21 nt, synthetic construct
  source 1..21: mol_type = other RNA
cactcttagtgatgtcttttg

SEQ ID NO: 76696 - RNA, 21 nt, synthetic construct
  source 1..21: mol_type = other RNA
cactcttatatcctaaacact

SEQ ID NO: 76697 - RNA, 21 nt, synthetic construct
  source 1..21: mol_type = other RNA
cactcttctgcaagttgctat

SEQ ID NO: 76698 - RNA, 21 nt, synthetic construct
  source 1..21: mol_type = other RNA
cactcttggtctttctcccag

SEQ ID NO: 76699 - RNA, 21 nt, synthetic construct
  source 1..21: mol_type = other RNA
cactcttttaaacccatttca

SEQ ID NO: 76700 - RNA, 21 nt, synthetic construct
  source 1..21: mol_type = other RNA
cactcttttaaggtttagaaa

SEQ ID NO: 76701 - RNA, 21 nt, synthetic construct
  source 1..21: mol_type = other RNA
cactgaaacaatcgcaatcca

SEQ ID NO: 76702 - RNA, 21 nt, synthetic construct
  source 1..21: mol_type = other RNA
cactgaaaccctcacgaaagc

SEQ ID NO: 76703 - RNA, 21 nt, synthetic construct
  source 1..21: mol_type = other RNA
cactgaaacttttcttttctt

SEQ ID NO: 76704 - RNA, 21 nt, synthetic construct
  source 1..21: mol_type = other RNA
cactgaagccagtccttgtga

SEQ ID NO: 76705 - RNA, 21 nt, synthetic construct
  source 1..21: mol_type = other RNA
cactgaagggaattttactga

SEQ ID NO: 76706 - RNA, 21 nt, synthetic construct
  source 1..21: mol_type = other RNA
cactgaagtgttgagaggctt

SEQ ID NO: 76707 - RNA, 21 nt, synthetic construct
  source 1..21: mol_type = other RNA
cactgaatcagattttaaatg

SEQ ID NO: 76708 - RNA, 21 nt, synthetic construct
  source 1..21: mol_type = other RNA
cactgacacaggctgaaggga

SEQ ID NO: 76709 - RNA, 21 nt, synthetic construct
  source 1..21: mol_type = other RNA
cactgacaggacagagcagta

SEQ ID NO: 76710 - RNA, 21 nt, synthetic construct
  source 1..21: mol_type = other RNA
cactgacagtggacaaaggtt

SEQ ID NO: 76711 - RNA, 21 nt, synthetic construct
  source 1..21: mol_type = other RNA
cactgactacacatacacagg

SEQ ID NO: 76712 - RNA, 21 nt, synthetic construct
  source 1..21: mol_type = other RNA
cactgactggctgtgccaact

SEQ ID NO: 76713 - RNA, 21 nt, synthetic construct
  source 1..21: mol_type = other RNA
cactgagagctcaggccagtg

SEQ ID NO: 76714 - RNA, 21 nt, synthetic construct
  source 1..21: mol_type = other RNA
cactgagagggaagtttatag

SEQ ID NO: 76715 - RNA, 21 nt, synthetic construct
  source 1..21: mol_type = other RNA
cactgagcacaatgcctgccg

SEQ ID NO: 76716 - RNA, 21 nt, synthetic construct
  source 1..21: mol_type = other RNA
cactgagcatttatataagtt

SEQ ID NO: 76717 - RNA, 21 nt, synthetic construct
  source 1..21: mol_type = other RNA
cactgaggtcaagaaataaaa

SEQ ID NO: 76718 - RNA, 21 nt, synthetic construct
  source 1..21: mol_type = other RNA
cactgatggaattctgacacc

SEQ ID NO: 76719 - RNA, 21 nt, synthetic construct
  source 1..21: mol_type = other RNA
cactgatgtgtagttattatt

SEQ ID NO: 76720 - RNA, 21 nt, synthetic construct
  source 1..21: mol_type = other RNA
cactgattgagtatctggtgc

SEQ ID NO: 76721 - RNA, 21 nt, synthetic construct
  source 1..21: mol_type = other RNA
cactgattttctgcttctcaa

SEQ ID NO: 76722 - RNA, 21 nt, synthetic construct
  source 1..21: mol_type = other RNA
cactgcaagctccgcctcctg

SEQ ID NO: 76723 - RNA, 21 nt, synthetic construct
  source 1..21: mol_type = other RNA
cactgcacagtatgcggggtt

SEQ ID NO: 76724 - RNA, 21 nt, synthetic construct
  source 1..21: mol_type = other RNA
cactgcactccagccttggta

SEQ ID NO: 76725 - RNA, 21 nt, synthetic construct
  source 1..21: mol_type = other RNA
cactgcactctggcctggaca

SEQ ID NO: 76726 - RNA, 21 nt, synthetic construct
  source 1..21: mol_type = other RNA
cactgcagaattactgacaat

SEQ ID NO: 76727 - RNA, 21 nt, synthetic construct
  source 1..21: mol_type = other RNA
cactgcagatgaatgagcaag

SEQ ID NO: 76728 - RNA, 21 nt, synthetic construct
  source 1..21: mol_type = other RNA
cactgcaggtgttggtgcatt

SEQ ID NO: 76729 - RNA, 21 nt, synthetic construct
  source 1..21: mol_type = other RNA
cactgcattcatccaggcaaa

SEQ ID NO: 76730 - RNA, 21 nt, synthetic construct
  source 1..21: mol_type = other RNA
cactgcattccgcctgggcga

SEQ ID NO: 76731 - RNA, 21 nt, synthetic construct
  source 1..21: mol_type = other RNA
cactgcgccaagcagggacgg

SEQ ID NO: 76732 - RNA, 21 nt, synthetic construct
  source 1..21: mol_type = other RNA
cactgcgggcccagctctttt

SEQ ID NO: 76733 - RNA, 21 nt, synthetic construct
  source 1..21: mol_type = other RNA
cactgctatgactaatttgag

SEQ ID NO: 76734 - RNA, 21 nt, synthetic construct
  source 1..21: mol_type = other RNA
cactgctattgataaatctaa

SEQ ID NO: 76735 - RNA, 21 nt, synthetic construct
  source 1..21: mol_type = other RNA
cactgctcagaagctttcaga

SEQ ID NO: 76736 - RNA, 21 nt, synthetic construct
  source 1..21: mol_type = other RNA
cactgctcagtccctcacctt

SEQ ID NO: 76737 - RNA, 21 nt, synthetic construct
  source 1..21: mol_type = other RNA
cactgctcctgcctttgttca

SEQ ID NO: 76738 - RNA, 21 nt, synthetic construct
  source 1..21: mol_type = other RNA
cactgctcttctattccagag

SEQ ID NO: 76739 - RNA, 21 nt, synthetic construct
  source 1..21: mol_type = other RNA
cactgctgatgtaagtgggag

SEQ ID NO: 76740 - RNA, 21 nt, synthetic construct
  source 1..21: mol_type = other RNA
cactggaaaccttttgtagac

SEQ ID NO: 76741 - RNA, 21 nt, synthetic construct
  source 1..21: mol_type = other RNA
cactggaaatcacaggtttag

SEQ ID NO: 76742 - RNA, 21 nt, synthetic construct
  source 1..21: mol_type = other RNA
cactggaagtaattgggatct

SEQ ID NO: 76743 - RNA, 21 nt, synthetic construct
  source 1..21: mol_type = other RNA
cactggagaattctactaaac

SEQ ID NO: 76744 - RNA, 21 nt, synthetic construct
  source 1..21: mol_type = other RNA
cactggaggtgcacattccaa

SEQ ID NO: 76745 - RNA, 21 nt, synthetic construct
  source 1..21: mol_type = other RNA
cactggatacggaaatataac

SEQ ID NO: 76746 - RNA, 21 nt, synthetic construct
  source 1..21: mol_type = other RNA
cactggatagaagtgtatcag

SEQ ID NO: 76747 - RNA, 21 nt, synthetic construct
  source 1..21: mol_type = other RNA
cactggcaaaaatcatcatat

SEQ ID NO: 76748 - RNA, 21 nt, synthetic construct
  source 1..21: mol_type = other RNA
cactggcacagcactgttaac

SEQ ID NO: 76749 - RNA, 21 nt, synthetic construct
  source 1..21: mol_type = other RNA
cactggccactgattgagtat

SEQ ID NO: 76750 - RNA, 21 nt, synthetic construct
  source 1..21: mol_type = other RNA
cactggccagcattacttagg

SEQ ID NO: 76751 - RNA, 21 nt, synthetic construct
  source 1..21: mol_type = other RNA
cactggcctgagctctcagtg

SEQ ID NO: 76752 - RNA, 21 nt, synthetic construct
  source 1..21: mol_type = other RNA
cactggctagtaggcaacatc

SEQ ID NO: 76753 - RNA, 21 nt, synthetic construct
  source 1..21: mol_type = other RNA
cactggctattagttaacctt

SEQ ID NO: 76754 - RNA, 21 nt, synthetic construct
  source 1..21: mol_type = other RNA
cactgggagccctccaggatc

SEQ ID NO: 76755 - RNA, 21 nt, synthetic construct
  source 1..21: mol_type = other RNA
cactggggagtgtgcccaagg

SEQ ID NO: 76756 - RNA, 21 nt, synthetic construct
  source 1..21: mol_type = other RNA
cactgggtaaacaagactcaa

SEQ ID NO: 76757 - RNA, 21 nt, synthetic construct
  source 1..21: mol_type = other RNA
cactgggtccccggaggaggt

SEQ ID NO: 76758 - RNA, 21 nt, synthetic construct
  source 1..21: mol_type = other RNA
cactgggtcttataggttgaa

SEQ ID NO: 76759 - RNA, 21 nt, synthetic construct
  source 1..21: mol_type = other RNA
cactgggttctcaccaacatc

SEQ ID NO: 76760 - RNA, 21 nt, synthetic construct
  source 1..21: mol_type = other RNA
cactggtaaggaaacagagtt

SEQ ID NO: 76761 - RNA, 21 nt, synthetic construct
  source 1..21: mol_type = other RNA
cactggtcactggccactgat

SEQ ID NO: 76762 - RNA, 21 nt, synthetic construct
  source 1..21: mol_type = other RNA
cactggtttcagtacacgaaa

SEQ ID NO: 76763 - RNA, 21 nt, synthetic construct
  source 1..21: mol_type = other RNA
cactggtttcagtccctcctt

SEQ ID NO: 76764 - RNA, 21 nt, synthetic construct
  source 1..21: mol_type = other RNA
cactgtaacctccacctccca

SEQ ID NO: 76765 - RNA, 21 nt, synthetic construct
  source 1..21: mol_type = other RNA
cactgtaagaataatgtcttt

SEQ ID NO: 76766 - RNA, 21 nt, synthetic construct
  source 1..21: mol_type = other RNA
cactgtactactgacctggga

SEQ ID NO: 76767 - RNA, 21 nt, synthetic construct
  source 1..21: mol_type = other RNA
cactgtactcctagatactcg

SEQ ID NO: 76768 - RNA, 21 nt, synthetic construct
  source 1..21: mol_type = other RNA
cactgtaggccccgatgccat

SEQ ID NO: 76769 - RNA, 21 nt, synthetic construct
  source 1..21: mol_type = other RNA
cactgtagttcagtttttctt

SEQ ID NO: 76770 - RNA, 21 nt, synthetic construct
  source 1..21: mol_type = other RNA
cactgtatggttcttaagatg

SEQ ID NO: 76771 - RNA, 21 nt, synthetic construct
  source 1..21: mol_type = other RNA
cactgtcagtgggactggaga

SEQ ID NO: 76772 - RNA, 21 nt, synthetic construct
  source 1..21: mol_type = other RNA
cactgtctccatgtcctcacc

SEQ ID NO: 76773 - RNA, 21 nt, synthetic construct
  source 1..21: mol_type = other RNA
cactgtgactccaaagcaaac

SEQ ID NO: 76774 - RNA, 21 nt, synthetic construct
  source 1..21: mol_type = other RNA
cactgtgagccactaaaacag

SEQ ID NO: 76775 - RNA, 21 nt, synthetic construct
  source 1..21: mol_type = other RNA
cactgtgatacctagtacgta

SEQ ID NO: 76776 - RNA, 21 nt, synthetic construct
  source 1..21: mol_type = other RNA
cactgtgttcttttccttctt

SEQ ID NO: 76777 - RNA, 21 nt, synthetic construct
  source 1..21: mol_type = other RNA
cactgttaactgacttacaga

SEQ ID NO: 76778 - RNA, 21 nt, synthetic construct
  source 1..21: mol_type = other RNA
cactgttatctgggaacagcc

SEQ ID NO: 76779 - RNA, 21 nt, synthetic construct
  source 1..21: mol_type = other RNA
cactgttctgcgtggtttttt

SEQ ID NO: 76780 - RNA, 21 nt, synthetic construct
  source 1..21: mol_type = other RNA
cactgttgatttagaaatacc

SEQ ID NO: 76781 - RNA, 21 nt, synthetic construct
  source 1..21: mol_type = other RNA
cactgttgtccaggccagagt

SEQ ID NO: 76782 - RNA, 21 nt, synthetic construct
  source 1..21: mol_type = other RNA
cactgtttgattactgtagct

SEQ ID NO: 76783 - RNA, 21 nt, synthetic construct
  source 1..21: mol_type = other RNA
cactgtttggacagtaaaaaa

SEQ ID NO: 76784 - RNA, 21 nt, synthetic construct
  source 1..21: mol_type = other RNA
cacttaaaaaatgcgcgtccg

SEQ ID NO: 76785 - RNA, 21 nt, synthetic construct
  source 1..21: mol_type = other RNA
cacttaacatgagatctaaat

SEQ ID NO: 76786 - RNA, 21 nt, synthetic construct
  source 1..21: mol_type = other RNA
cacttacatcagcagtgacca

SEQ ID NO: 76787 - RNA, 21 nt, synthetic construct
  source 1..21: mol_type = other RNA
cacttactaaatgatctttca

SEQ ID NO: 76788 - RNA, 21 nt, synthetic construct
  source 1..21: mol_type = other RNA
cacttacttgagccccagaat

SEQ ID NO: 76789 - RNA, 21 nt, synthetic construct
  source 1..21: mol_type = other RNA
cacttagcatgttgctttgcg

SEQ ID NO: 76790 - RNA, 21 nt, synthetic construct
  source 1..21: mol_type = other RNA
cacttagcgctgatgtgttga

SEQ ID NO: 76791 - RNA, 21 nt, synthetic construct
  source 1..21: mol_type = other RNA
cacttagttcaagatgcatac

SEQ ID NO: 76792 - RNA, 21 nt, synthetic construct
  source 1..21: mol_type = other RNA
cacttagtttgcaatacagtt

SEQ ID NO: 76793 - RNA, 21 nt, synthetic construct
  source 1..21: mol_type = other RNA
cacttattagcaaagaggcaa

SEQ ID NO: 76794 - RNA, 21 nt, synthetic construct
  source 1..21: mol_type = other RNA
cacttcagtggtaaggactga

SEQ ID NO: 76795 - RNA, 21 nt, synthetic construct
  source 1..21: mol_type = other RNA
cacttccaagtcccggaagct

SEQ ID NO: 76796 - RNA, 21 nt, synthetic construct
  source 1..21: mol_type = other RNA
cacttccagtacatctcaatt

SEQ ID NO: 76797 - RNA, 21 nt, synthetic construct
  source 1..21: mol_type = other RNA
cacttccattttgcttaataa

SEQ ID NO: 76798 - RNA, 21 nt, synthetic construct
  source 1..21: mol_type = other RNA
cacttcccactgctatgacta

SEQ ID NO: 76799 - RNA, 21 nt, synthetic construct
  source 1..21: mol_type = other RNA
cacttcctattagaagaatga

SEQ ID NO: 76800 - RNA, 21 nt, synthetic construct
  source 1..21: mol_type = other RNA
cacttcctctcttaaatccga

SEQ ID NO: 76801 - RNA, 21 nt, synthetic construct
  source 1..21: mol_type = other RNA
cacttcgaaagttcagataga

SEQ ID NO: 76802 - RNA, 21 nt, synthetic construct
  source 1..21: mol_type = other RNA
cacttcgagaagggaagtaaa

SEQ ID NO: 76803 - RNA, 21 nt, synthetic construct
  source 1..21: mol_type = other RNA
cacttcgttcagtttagtaaa

SEQ ID NO: 76804 - RNA, 21 nt, synthetic construct
  source 1..21: mol_type = other RNA
cacttctatccagtgacacct

SEQ ID NO: 76805 - RNA, 21 nt, synthetic construct
  source 1..21: mol_type = other RNA
cacttctctgctgctgaaaaa

SEQ ID NO: 76806 - RNA, 21 nt, synthetic construct
  source 1..21: mol_type = other RNA
cacttctgatatcctgtaaac

SEQ ID NO: 76807 - RNA, 21 nt, synthetic construct
  source 1..21: mol_type = other RNA
cacttctgtgatcagaagagc

SEQ ID NO: 76808 - RNA, 21 nt, synthetic construct
  source 1..21: mol_type = other RNA
cacttcttagtaaatatccga

SEQ ID NO: 76809 - RNA, 21 nt, synthetic construct
  source 1..21: mol_type = other RNA
cacttcttattggttatctgt

SEQ ID NO: 76810 - RNA, 21 nt, synthetic construct
  source 1..21: mol_type = other RNA
cacttgaaacctgccatggtg

SEQ ID NO: 76811 - RNA, 21 nt, synthetic construct
  source 1..21: mol_type = other RNA
cacttgaattagtgattttac

SEQ ID NO: 76812 - RNA, 21 nt, synthetic construct
  source 1..21: mol_type = other RNA
cacttgagcctggaagttcaa

SEQ ID NO: 76813 - RNA, 21 nt, synthetic construct
  source 1..21: mol_type = other RNA
cacttgaggtgattaaaggcc

SEQ ID NO: 76814 - RNA, 21 nt, synthetic construct
  source 1..21: mol_type = other RNA
cacttgatccaggtgtatgat

SEQ ID NO: 76815 - RNA, 21 nt, synthetic construct
  source 1..21: mol_type = other RNA
cacttgatggtttggggcttt

SEQ ID NO: 76816 - RNA, 21 nt, synthetic construct
  source 1..21: mol_type = other RNA
cacttgattactttacagtta

SEQ ID NO: 76817 - RNA, 21 nt, synthetic construct
  source 1..21: mol_type = other RNA
cacttgcttgggaacagcagg

SEQ ID NO: 76818 - RNA, 21 nt, synthetic construct
  source 1..21: mol_type = other RNA
cacttggagttttccccctac

SEQ ID NO: 76819 - RNA, 21 nt, synthetic construct
  source 1..21: mol_type = other RNA
cacttgggatgtttctacctt

SEQ ID NO: 76820 - RNA, 21 nt, synthetic construct
  source 1..21: mol_type = other RNA
cacttggggaggccaaggcag

SEQ ID NO: 76821 - RNA, 21 nt, synthetic construct
  source 1..21: mol_type = other RNA
cacttgggtggaagctgtcct

SEQ ID NO: 76822 - RNA, 21 nt, synthetic construct
  source 1..21: mol_type = other RNA
cacttggtaagctgtgagtcc

SEQ ID NO: 76823 - RNA, 21 nt, synthetic construct
  source 1..21: mol_type = other RNA
cacttgtcccatggtcaaatc

SEQ ID NO: 76824 - RNA, 21 nt, synthetic construct
  source 1..21: mol_type = other RNA
cacttgtgtaactaccactga

SEQ ID NO: 76825 - RNA, 21 nt, synthetic construct
  source 1..21: mol_type = other RNA
cacttgtttcttttcactcta

SEQ ID NO: 76826 - RNA, 21 nt, synthetic construct
  source 1..21: mol_type = other RNA
cactttcatgatttggtgtgt

SEQ ID NO: 76827 - RNA, 21 nt, synthetic construct
  source 1..21: mol_type = other RNA
cactttccatcttaggccata

SEQ ID NO: 76828 - RNA, 21 nt, synthetic construct
  source 1..21: mol_type = other RNA
cactttcctattcacactgct

SEQ ID NO: 76829 - RNA, 21 nt, synthetic construct
  source 1..21: mol_type = other RNA
cactttcctgataaggggcta

SEQ ID NO: 76830 - RNA, 21 nt, synthetic construct
  source 1..21: mol_type = other RNA
cactttccttggagaagagtt

SEQ ID NO: 76831 - RNA, 21 nt, synthetic construct
  source 1..21: mol_type = other RNA
cactttcgtcatctataaggt

SEQ ID NO: 76832 - RNA, 21 nt, synthetic construct
  source 1..21: mol_type = other RNA
cactttgaggttattaagata

SEQ ID NO: 76833 - RNA, 21 nt, synthetic construct
  source 1..21: mol_type = other RNA
cactttgatcatacacatcca

SEQ ID NO: 76834 - RNA, 21 nt, synthetic construct
  source 1..21: mol_type = other RNA
cactttgggattagcttattc

SEQ ID NO: 76835 - RNA, 21 nt, synthetic construct
  source 1..21: mol_type = other RNA
cactttgttgctcaggctgga

SEQ ID NO: 76836 - RNA, 21 nt, synthetic construct
  source 1..21: mol_type = other RNA
cacttttaaggcttggaaaac

SEQ ID NO: 76837 - RNA, 21 nt, synthetic construct
  source 1..21: mol_type = other RNA
cacttttcaaacacttaacat

SEQ ID NO: 76838 - RNA, 21 nt, synthetic construct
  source 1..21: mol_type = other RNA
cacttttcaggtattgagcct

SEQ ID NO: 76839 - RNA, 21 nt, synthetic construct
  source 1..21: mol_type = other RNA
cacttttccagtcttctcata

SEQ ID NO: 76840 - RNA, 21 nt, synthetic construct
  source 1..21: mol_type = other RNA
cacttttctggttttctggag

SEQ ID NO: 76841 - RNA, 21 nt, synthetic construct
  source 1..21: mol_type = other RNA
cacttttgagttcagaaagat

SEQ ID NO: 76842 - RNA, 21 nt, synthetic construct
  source 1..21: mol_type = other RNA
cacttttggaatttaaggggt

SEQ ID NO: 76843 - RNA, 21 nt, synthetic construct
  source 1..21: mol_type = other RNA
cacttttgtactacttgtcag

SEQ ID NO: 76844 - RNA, 21 nt, synthetic construct
  source 1..21: mol_type = other RNA
cacttttgtgcaacataaata

SEQ ID NO: 76845 - RNA, 21 nt, synthetic construct
  source 1..21: mol_type = other RNA
cactttttaccaagttgaatt

SEQ ID NO: 76846 - RNA, 21 nt, synthetic construct
  source 1..21: mol_type = other RNA
cactttttattctgttctagc

SEQ ID NO: 76847 - RNA, 21 nt, synthetic construct
  source 1..21: mol_type = other RNA
cactttttgtgagttttaact

SEQ ID NO: 76848 - RNA, 21 nt, synthetic construct
  source 1..21: mol_type = other RNA
cagaaaaaattagccttttac

SEQ ID NO: 76849 - RNA, 21 nt, synthetic construct
  source 1..21: mol_type = other RNA
cagaaaaccagaaaagtgaaa

SEQ ID NO: 76850 - RNA, 21 nt, synthetic construct
  source 1..21: mol_type = other RNA
cagaaaacccttcatcatttg

SEQ ID NO: 76851 - RNA, 21 nt, synthetic construct
  source 1..21: mol_type = other RNA
cagaaaactggcaatcaaatg

SEQ ID NO: 76852 - RNA, 21 nt, synthetic construct
  source 1..21: mol_type = other RNA
cagaaaagatcagtaaaattc

SEQ ID NO: 76853 - RNA, 21 nt, synthetic construct
  source 1..21: mol_type = other RNA
cagaaaaggctgagacctcat

SEQ ID NO: 76854 - RNA, 21 nt, synthetic construct
  source 1..21: mol_type = other RNA
cagaaaataaaccaagtttgg

SEQ ID NO: 76855 - RNA, 21 nt, synthetic construct
  source 1..21: mol_type = other RNA
cagaaaatatctacaaatcac

SEQ ID NO: 76856 - RNA, 21 nt, synthetic construct
  source 1..21: mol_type = other RNA
cagaaaatcagtgtgaaagta

SEQ ID NO: 76857 - RNA, 21 nt, synthetic construct
  source 1..21: mol_type = other RNA
cagaaaattttcttttgtggg

SEQ ID NO: 76858 - RNA, 21 nt, synthetic construct
  source 1..21: mol_type = other RNA
cagaaacaacaacaacaaaat

SEQ ID NO: 76859 - RNA, 21 nt, synthetic construct
  source 1..21: mol_type = other RNA
cagaaacacaggactgtgtgt

SEQ ID NO: 76860 - RNA, 21 nt, synthetic construct
  source 1..21: mol_type = other RNA
cagaaacaccaacacaaagcc

SEQ ID NO: 76861 - RNA, 21 nt, synthetic construct
  source 1..21: mol_type = other RNA
cagaaacagaaaaatccatct

SEQ ID NO: 76862 - RNA, 21 nt, synthetic construct
  source 1..21: mol_type = other RNA
cagaaaccagttgtaattttt

SEQ ID NO: 76863 - RNA, 21 nt, synthetic construct
  source 1..21: mol_type = other RNA
cagaaaccatcgttcacactc

SEQ ID NO: 76864 - RNA, 21 nt, synthetic construct
  source 1..21: mol_type = other RNA
cagaaaccctgtacccattag

SEQ ID NO: 76865 - RNA, 21 nt, synthetic construct
  source 1..21: mol_type = other RNA
cagaaactgacaggactccac

SEQ ID NO: 76866 - RNA, 21 nt, synthetic construct
  source 1..21: mol_type = other RNA
cagaaacttccaaccatcttc

SEQ ID NO: 76867 - RNA, 21 nt, synthetic construct
  source 1..21: mol_type = other RNA
cagaaagacagggagagagag

SEQ ID NO: 76868 - RNA, 21 nt, synthetic construct
  source 1..21: mol_type = other RNA
cagaaagagaatagcagaaac

SEQ ID NO: 76869 - RNA, 21 nt, synthetic construct
  source 1..21: mol_type = other RNA
cagaaagagagaggggggaag

SEQ ID NO: 76870 - RNA, 21 nt, synthetic construct
  source 1..21: mol_type = other RNA
cagaaagattaatccttgtgg

SEQ ID NO: 76871 - RNA, 21 nt, synthetic construct
  source 1..21: mol_type = other RNA
cagaaagcctcttcagaagag

SEQ ID NO: 76872 - RNA, 21 nt, synthetic construct
  source 1..21: mol_type = other RNA
cagaaaggcccaaaaagtttt

SEQ ID NO: 76873 - RNA, 21 nt, synthetic construct
  source 1..21: mol_type = other RNA
cagaaataaaacatgttgtgt

SEQ ID NO: 76874 - RNA, 21 nt, synthetic construct
  source 1..21: mol_type = other RNA
cagaaataaatcctcacatgt

SEQ ID NO: 76875 - RNA, 21 nt, synthetic construct
  source 1..21: mol_type = other RNA
cagaaatacaatgtgagccac

SEQ ID NO: 76876 - RNA, 21 nt, synthetic construct
  source 1..21: mol_type = other RNA
cagaaatacagaccgatggaa

SEQ ID NO: 76877 - RNA, 21 nt, synthetic construct
  source 1..21: mol_type = other RNA
cagaaatagactcccaactta

SEQ ID NO: 76878 - RNA, 21 nt, synthetic construct
  source 1..21: mol_type = other RNA
cagaaatataccttatgtgaa

SEQ ID NO: 76879 - RNA, 21 nt, synthetic construct
  source 1..21: mol_type = other RNA
cagaaatctaccaaacattga

SEQ ID NO: 76880 - RNA, 21 nt, synthetic construct
  source 1..21: mol_type = other RNA
cagaaatgaaatggcccttaa

SEQ ID NO: 76881 - RNA, 21 nt, synthetic construct
  source 1..21: mol_type = other RNA
cagaaatgacaagtaaatgca

SEQ ID NO: 76882 - RNA, 21 nt, synthetic construct
  source 1..21: mol_type = other RNA
cagaaatgagttccagtcctt

SEQ ID NO: 76883 - RNA, 21 nt, synthetic construct
  source 1..21: mol_type = other RNA
cagaaatgtttaattcctact

SEQ ID NO: 76884 - RNA, 21 nt, synthetic construct
  source 1..21: mol_type = other RNA
cagaaattataagcttcctct

SEQ ID NO: 76885 - RNA, 21 nt, synthetic construct
  source 1..21: mol_type = other RNA
cagaaattcaacttggtaaaa

SEQ ID NO: 76886 - RNA, 21 nt, synthetic construct
  source 1..21: mol_type = other RNA
cagaacaaactcaagttccgg

SEQ ID NO: 76887 - RNA, 21 nt, synthetic construct
  source 1..21: mol_type = other RNA
cagaacaaactgcgtggttta

SEQ ID NO: 76888 - RNA, 21 nt, synthetic construct
  source 1..21: mol_type = other RNA
cagaacaaataacaccatagc

SEQ ID NO: 76889 - RNA, 21 nt, synthetic construct
  source 1..21: mol_type = other RNA
cagaacacactgctcttctat

SEQ ID NO: 76890 - RNA, 21 nt, synthetic construct
  source 1..21: mol_type = other RNA
cagaacactaaaggggatttc

SEQ ID NO: 76891 - RNA, 21 nt, synthetic construct
  source 1..21: mol_type = other RNA
cagaacagtgtttacacacct

SEQ ID NO: 76892 - RNA, 21 nt, synthetic construct
  source 1..21: mol_type = other RNA
cagaaccacctgggggagact

SEQ ID NO: 76893 - RNA, 21 nt, synthetic construct
  source 1..21: mol_type = other RNA
cagaaccactgagcacaatgc

SEQ ID NO: 76894 - RNA, 21 nt, synthetic construct
  source 1..21: mol_type = other RNA
cagaaccatgtaacaggttta

SEQ ID NO: 76895 - RNA, 21 nt, synthetic construct
  source 1..21: mol_type = other RNA
cagaaccttagaaatttaagg

SEQ ID NO: 76896 - RNA, 21 nt, synthetic construct
  source 1..21: mol_type = other RNA
cagaactaagaccccagtaga

SEQ ID NO: 76897 - RNA, 21 nt, synthetic construct
  source 1..21: mol_type = other RNA
cagaactacacattccagacc

SEQ ID NO: 76898 - RNA, 21 nt, synthetic construct
  source 1..21: mol_type = other RNA
cagaactccacctcagaaaca

SEQ ID NO: 76899 - RNA, 21 nt, synthetic construct
  source 1..21: mol_type = other RNA
cagaactcgaagccttcccct

SEQ ID NO: 76900 - RNA, 21 nt, synthetic construct
  source 1..21: mol_type = other RNA
cagaactcttctccaaggaaa

SEQ ID NO: 76901 - RNA, 21 nt, synthetic construct
  source 1..21: mol_type = other RNA
cagaactgctaatggtccttg

SEQ ID NO: 76902 - RNA, 21 nt, synthetic construct
  source 1..21: mol_type = other RNA
cagaactggggcttgaacccg

SEQ ID NO: 76903 - RNA, 21 nt, synthetic construct
  source 1..21: mol_type = other RNA
cagaactgtcactgacacagg

SEQ ID NO: 76904 - RNA, 21 nt, synthetic construct
  source 1..21: mol_type = other RNA
cagaacttgacaagtatatta

SEQ ID NO: 76905 - RNA, 21 nt, synthetic construct
  source 1..21: mol_type = other RNA
cagaagaaattacttctttct

SEQ ID NO: 76906 - RNA, 21 nt, synthetic construct
  source 1..21: mol_type = other RNA
cagaagaagaattctataggt

SEQ ID NO: 76907 - RNA, 21 nt, synthetic construct
  source 1..21: mol_type = other RNA
cagaagaagtttctagttatt

SEQ ID NO: 76908 - RNA, 21 nt, synthetic construct
  source 1..21: mol_type = other RNA
cagaagacacaaaatcagata

SEQ ID NO: 76909 - RNA, 21 nt, synthetic construct
  source 1..21: mol_type = other RNA
cagaagagaatggctggaatg

SEQ ID NO: 76910 - RNA, 21 nt, synthetic construct
  source 1..21: mol_type = other RNA
cagaagagcactatgtaaatt

SEQ ID NO: 76911 - RNA, 21 nt, synthetic construct
  source 1..21: mol_type = other RNA
cagaagaggataaggggcagg

SEQ ID NO: 76912 - RNA, 21 nt, synthetic construct
  source 1..21: mol_type = other RNA
cagaagagtgaagctggaccc

SEQ ID NO: 76913 - RNA, 21 nt, synthetic construct
  source 1..21: mol_type = other RNA
cagaagcacaccaaggtttct

SEQ ID NO: 76914 - RNA, 21 nt, synthetic construct
  source 1..21: mol_type = other RNA
cagaagccctgcagccagatt

SEQ ID NO: 76915 - RNA, 21 nt, synthetic construct
  source 1..21: mol_type = other RNA
cagaagctaaattttcatagg

SEQ ID NO: 76916 - RNA, 21 nt, synthetic construct
  source 1..21: mol_type = other RNA
cagaagctatagctgagaagt

SEQ ID NO: 76917 - RNA, 21 nt, synthetic construct
  source 1..21: mol_type = other RNA
cagaagctttcagacttaact

SEQ ID NO: 76918 - RNA, 21 nt, synthetic construct
  source 1..21: mol_type = other RNA
cagaaggagaaaacaaaaaga

SEQ ID NO: 76919 - RNA, 21 nt, synthetic construct
  source 1..21: mol_type = other RNA
cagaaggagaaaccatttacc

SEQ ID NO: 76920 - RNA, 21 nt, synthetic construct
  source 1..21: mol_type = other RNA
cagaaggaggaaaataatttg

SEQ ID NO: 76921 - RNA, 21 nt, synthetic construct
  source 1..21: mol_type = other RNA
cagaaggagtccagtcctgct

SEQ ID NO: 76922 - RNA, 21 nt, synthetic construct
  source 1..21: mol_type = other RNA
cagaagggaaaggatgacctt

SEQ ID NO: 76923 - RNA, 21 nt, synthetic construct
  source 1..21: mol_type = other RNA
cagaagggtatatacaatatt

SEQ ID NO: 76924 - RNA, 21 nt, synthetic construct
  source 1..21: mol_type = other RNA
cagaaggtgagggactgagca

SEQ ID NO: 76925 - RNA, 21 nt, synthetic construct
  source 1..21: mol_type = other RNA
cagaaggttaactaatagcca

SEQ ID NO: 76926 - RNA, 21 nt, synthetic construct
  source 1..21: mol_type = other RNA
cagaagtaactcttgagttag

SEQ ID NO: 76927 - RNA, 21 nt, synthetic construct
  source 1..21: mol_type = other RNA
cagaagtactactcattaaat

SEQ ID NO: 76928 - RNA, 21 nt, synthetic construct
  source 1..21: mol_type = other RNA
cagaagtcactttttattctg

SEQ ID NO: 76929 - RNA, 21 nt, synthetic construct
  source 1..21: mol_type = other RNA
cagaagtgctgacttggcagc

SEQ ID NO: 76930 - RNA, 21 nt, synthetic construct
  source 1..21: mol_type = other RNA
cagaagtgttttgatagttgc

SEQ ID NO: 76931 - RNA, 21 nt, synthetic construct
  source 1..21: mol_type = other RNA
cagaagttgtggtgagccaag

SEQ ID NO: 76932 - RNA, 21 nt, synthetic construct
  source 1..21: mol_type = other RNA
cagaagtttggaaccagcctg

SEQ ID NO: 76933 - RNA, 21 nt, synthetic construct
  source 1..21: mol_type = other RNA
cagaataaaaagtgacttctg

SEQ ID NO: 76934 - RNA, 21 nt, synthetic construct
  source 1..21: mol_type = other RNA
cagaatacaaaaatgacacaa

SEQ ID NO: 76935 - RNA, 21 nt, synthetic construct
  source 1..21: mol_type = other RNA
cagaataccagagattgggaa

SEQ ID NO: 76936 - RNA, 21 nt, synthetic construct
  source 1..21: mol_type = other RNA
cagaataggcaaattcataga

SEQ ID NO: 76937 - RNA, 21 nt, synthetic construct
  source 1..21: mol_type = other RNA
cagaatccccaaataacatgc

SEQ ID NO: 76938 - RNA, 21 nt, synthetic construct
  source 1..21: mol_type = other RNA
cagaatccctttcgctaatct

SEQ ID NO: 76939 - RNA, 21 nt, synthetic construct
  source 1..21: mol_type = other RNA
cagaatcgtgatagtcttcca

SEQ ID NO: 76940 - RNA, 21 nt, synthetic construct
  source 1..21: mol_type = other RNA
cagaatcttactggtgttagg

SEQ ID NO: 76941 - RNA, 21 nt, synthetic construct
  source 1..21: mol_type = other RNA
cagaatgacagaaaatatcta

SEQ ID NO: 76942 - RNA, 21 nt, synthetic construct
  source 1..21: mol_type = other RNA
cagaatgaccgagatacttaa

SEQ ID NO: 76943 - RNA, 21 nt, synthetic construct
  source 1..21: mol_type = other RNA
cagaatgcatcttttaaaaac

SEQ ID NO: 76944 - RNA, 21 nt, synthetic construct
  source 1..21: mol_type = other RNA
cagaatggccctgcgattggt

SEQ ID NO: 76945 - RNA, 21 nt, synthetic construct
  source 1..21: mol_type = other RNA
cagaatgtccatcaggaaaac

SEQ ID NO: 76946 - RNA, 21 nt, synthetic construct
  source 1..21: mol_type = other RNA
cagaatgtgacctgtccttgt

SEQ ID NO: 76947 - RNA, 21 nt, synthetic construct
  source 1..21: mol_type = other RNA
cagaatgttcaagtatttcca

SEQ ID NO: 76948 - RNA, 21 nt, synthetic construct
  source 1..21: mol_type = other RNA
cagaattactgacaatagcca

SEQ ID NO: 76949 - RNA, 21 nt, synthetic construct
  source 1..21: mol_type = other RNA
cagaattagaaagctggactc

SEQ ID NO: 76950 - RNA, 21 nt, synthetic construct
  source 1..21: mol_type = other RNA
cagaattatagagggcctaaa

SEQ ID NO: 76951 - RNA, 21 nt, synthetic construct
  source 1..21: mol_type = other RNA
cagaattattgattggcaaat

SEQ ID NO: 76952 - RNA, 21 nt, synthetic construct
  source 1..21: mol_type = other RNA
cagaattcaaaaacactgtat

SEQ ID NO: 76953 - RNA, 21 nt, synthetic construct
  source 1..21: mol_type = other RNA
cagaattcactgtgactccaa

SEQ ID NO: 76954 - RNA, 21 nt, synthetic construct
  source 1..21: mol_type = other RNA
cagaattccatcagtggttgt

SEQ ID NO: 76955 - RNA, 21 nt, synthetic construct
  source 1..21: mol_type = other RNA
cagaattccattccttttcga

SEQ ID NO: 76956 - RNA, 21 nt, synthetic construct
  source 1..21: mol_type = other RNA
cagaatttgaggtcttctagc

SEQ ID NO: 76957 - RNA, 21 nt, synthetic construct
  source 1..21: mol_type = other RNA
cagacaaaaatagaggatggg

SEQ ID NO: 76958 - RNA, 21 nt, synthetic construct
  source 1..21: mol_type = other RNA
cagacaacacattaataagat

SEQ ID NO: 76959 - RNA, 21 nt, synthetic construct
  source 1..21: mol_type = other RNA
cagacaataattcttcctgtc

SEQ ID NO: 76960 - RNA, 21 nt, synthetic construct
  source 1..21: mol_type = other RNA
cagacacaccatgacagagtt

SEQ ID NO: 76961 - RNA, 21 nt, synthetic construct
  source 1..21: mol_type = other RNA
cagacacactagctgacccac

SEQ ID NO: 76962 - RNA, 21 nt, synthetic construct
  source 1..21: mol_type = other RNA
cagacacctacattaatctca

SEQ ID NO: 76963 - RNA, 21 nt, synthetic construct
  source 1..21: mol_type = other RNA
cagacactgggttctcaccaa

SEQ ID NO: 76964 - RNA, 21 nt, synthetic construct
  source 1..21: mol_type = other RNA
cagacagaaagacagggagag

SEQ ID NO: 76965 - RNA, 21 nt, synthetic construct
  source 1..21: mol_type = other RNA
cagacagacatgcatgcacac

SEQ ID NO: 76966 - RNA, 21 nt, synthetic construct
  source 1..21: mol_type = other RNA
cagacagatatatgcattccc

SEQ ID NO: 76967 - RNA, 21 nt, synthetic construct
  source 1..21: mol_type = other RNA
cagacagctaatatgctgtag

SEQ ID NO: 76968 - RNA, 21 nt, synthetic construct
  source 1..21: mol_type = other RNA
cagacagggaatgcccctgta

SEQ ID NO: 76969 - RNA, 21 nt, synthetic construct
  source 1..21: mol_type = other RNA
cagacagggaatggggagcta

SEQ ID NO: 76970 - RNA, 21 nt, synthetic construct
  source 1..21: mol_type = other RNA
cagacatgaacaatccttcta

SEQ ID NO: 76971 - RNA, 21 nt, synthetic construct
  source 1..21: mol_type = other RNA
cagacatgcacgagaaaagca

SEQ ID NO: 76972 - RNA, 21 nt, synthetic construct
  source 1..21: mol_type = other RNA
cagacatgcatgcacacagag

SEQ ID NO: 76973 - RNA, 21 nt, synthetic construct
  source 1..21: mol_type = other RNA
cagacatgccacaccacatcc

SEQ ID NO: 76974 - RNA, 21 nt, synthetic construct
  source 1..21: mol_type = other RNA
cagacatttctcatactttgt

SEQ ID NO: 76975 - RNA, 21 nt, synthetic construct
  source 1..21: mol_type = other RNA
cagacatttggaatagagagc

SEQ ID NO: 76976 - RNA, 21 nt, synthetic construct
  source 1..21: mol_type = other RNA
cagacattttatttatacagg

SEQ ID NO: 76977 - RNA, 21 nt, synthetic construct
  source 1..21: mol_type = other RNA
cagaccaagaaaggacttcag

SEQ ID NO: 76978 - RNA, 21 nt, synthetic construct
  source 1..21: mol_type = other RNA
cagaccaagtttaaccaatta

SEQ ID NO: 76979 - RNA, 21 nt, synthetic construct
  source 1..21: mol_type = other RNA
cagaccagcagttcaagcacc

SEQ ID NO: 76980 - RNA, 21 nt, synthetic construct
  source 1..21: mol_type = other RNA
cagacccgccgcagagccgga

SEQ ID NO: 76981 - RNA, 21 nt, synthetic construct
  source 1..21: mol_type = other RNA
cagaccctggcttgtgacatc

SEQ ID NO: 76982 - RNA, 21 nt, synthetic construct
  source 1..21: mol_type = other RNA
cagacccttatgtccagcccc

SEQ ID NO: 76983 - RNA, 21 nt, synthetic construct
  source 1..21: mol_type = other RNA
cagaccctttatcggataagg

SEQ ID NO: 76984 - RNA, 21 nt, synthetic construct
  source 1..21: mol_type = other RNA
cagacctctattaaatcatga

SEQ ID NO: 76985 - RNA, 21 nt, synthetic construct
  source 1..21: mol_type = other RNA
cagacctctgaagagtctatc

SEQ ID NO: 76986 - RNA, 21 nt, synthetic construct
  source 1..21: mol_type = other RNA
cagacctgcacaaaggattgg

SEQ ID NO: 76987 - RNA, 21 nt, synthetic construct
  source 1..21: mol_type = other RNA
cagaccttattcaaataattg

SEQ ID NO: 76988 - RNA, 21 nt, synthetic construct
  source 1..21: mol_type = other RNA
cagacgcaaaggatgtcaaca

SEQ ID NO: 76989 - RNA, 21 nt, synthetic construct
  source 1..21: mol_type = other RNA
cagactaagacactagctatt

SEQ ID NO: 76990 - RNA, 21 nt, synthetic construct
  source 1..21: mol_type = other RNA
cagactaatatgagttcctgc

SEQ ID NO: 76991 - RNA, 21 nt, synthetic construct
  source 1..21: mol_type = other RNA
cagactcaagcctgataagct

SEQ ID NO: 76992 - RNA, 21 nt, synthetic construct
  source 1..21: mol_type = other RNA
cagactcaataaccacatgtg

SEQ ID NO: 76993 - RNA, 21 nt, synthetic construct
  source 1..21: mol_type = other RNA
cagactcattgcctatagaca

SEQ ID NO: 76994 - RNA, 21 nt, synthetic construct
  source 1..21: mol_type = other RNA
cagactccttcccctggtcga

SEQ ID NO: 76995 - RNA, 21 nt, synthetic construct
  source 1..21: mol_type = other RNA
cagactcttgtcccggcatgc

SEQ ID NO: 76996 - RNA, 21 nt, synthetic construct
  source 1..21: mol_type = other RNA
cagactgaccaacatggacaa

SEQ ID NO: 76997 - RNA, 21 nt, synthetic construct
  source 1..21: mol_type = other RNA
cagactgagccagcaaatcag

SEQ ID NO: 76998 - RNA, 21 nt, synthetic construct
  source 1..21: mol_type = other RNA
cagactgattaatttgaggtc

SEQ ID NO: 76999 - RNA, 21 nt, synthetic construct
  source 1..21: mol_type = other RNA
cagactgcaggtcttcaacct

SEQ ID NO: 77000 - RNA, 21 nt, synthetic construct
  source 1..21: mol_type = other RNA
cagactgcagttggattatat

SEQ ID NO: 77001 - RNA, 21 nt, synthetic construct
  source 1..21: mol_type = other RNA
cagactggagttcactggcac

SEQ ID NO: 77002 - RNA, 21 nt, synthetic construct
  source 1..21: mol_type = other RNA
cagactgggcaacagagacag

SEQ ID NO: 77003 - RNA, 21 nt, synthetic construct
  source 1..21: mol_type = other RNA
cagactgtattaccagcttac

SEQ ID NO: 77004 - RNA, 21 nt, synthetic construct
  source 1..21: mol_type = other RNA
cagactgtgccttgatccatt

SEQ ID NO: 77005 - RNA, 21 nt, synthetic construct
  source 1..21: mol_type = other RNA
cagacttaactataggagttc

SEQ ID NO: 77006 - RNA, 21 nt, synthetic construct
  source 1..21: mol_type = other RNA
cagagaaactggaatcaatcc

SEQ ID NO: 77007 - RNA, 21 nt, synthetic construct
  source 1..21: mol_type = other RNA
cagagaacagcattatcttaa

SEQ ID NO: 77008 - RNA, 21 nt, synthetic construct
  source 1..21: mol_type = other RNA
cagagaactgactgaaggatt

SEQ ID NO: 77009 - RNA, 21 nt, synthetic construct
  source 1..21: mol_type = other RNA
cagagaagtgaagcttcaaac

SEQ ID NO: 77010 - RNA, 21 nt, synthetic construct
  source 1..21: mol_type = other RNA
cagagaagttttccaggaaaa

SEQ ID NO: 77011 - RNA, 21 nt, synthetic construct
  source 1..21: mol_type = other RNA
cagagaattcagagtggctaa

SEQ ID NO: 77012 - RNA, 21 nt, synthetic construct
  source 1..21: mol_type = other RNA
cagagacaaagcataaaatat

SEQ ID NO: 77013 - RNA, 21 nt, synthetic construct
  source 1..21: mol_type = other RNA
cagagacacacatcagacacc

SEQ ID NO: 77014 - RNA, 21 nt, synthetic construct
  source 1..21: mol_type = other RNA
cagagacacatactgaaagac

SEQ ID NO: 77015 - RNA, 21 nt, synthetic construct
  source 1..21: mol_type = other RNA
cagagacagagaatctgtctc

SEQ ID NO: 77016 - RNA, 21 nt, synthetic construct
  source 1..21: mol_type = other RNA
cagagacggggtcccactata

SEQ ID NO: 77017 - RNA, 21 nt, synthetic construct
  source 1..21: mol_type = other RNA
cagagactggatagcaacttg

SEQ ID NO: 77018 - RNA, 21 nt, synthetic construct
  source 1..21: mol_type = other RNA
cagagactgtgcttccacagc

SEQ ID NO: 77019 - RNA, 21 nt, synthetic construct
  source 1..21: mol_type = other RNA
cagagagacctgaagactgga

SEQ ID NO: 77020 - RNA, 21 nt, synthetic construct
  source 1..21: mol_type = other RNA
cagagagagaagatgacattt

SEQ ID NO: 77021 - RNA, 21 nt, synthetic construct
  source 1..21: mol_type = other RNA
cagagagagacctttctttaa

SEQ ID NO: 77022 - RNA, 21 nt, synthetic construct
  source 1..21: mol_type = other RNA
cagagagagtaactggtccag

SEQ ID NO: 77023 - RNA, 21 nt, synthetic construct
  source 1..21: mol_type = other RNA
cagagagatggtgggagaggc

SEQ ID NO: 77024 - RNA, 21 nt, synthetic construct
  source 1..21: mol_type = other RNA
cagagaggctaggtgacctgc

SEQ ID NO: 77025 - RNA, 21 nt, synthetic construct
  source 1..21: mol_type = other RNA
cagagaggctttttattagat

SEQ ID NO: 77026 - RNA, 21 nt, synthetic construct
  source 1..21: mol_type = other RNA
cagagagtggaaagagccagc

SEQ ID NO: 77027 - RNA, 21 nt, synthetic construct
  source 1..21: mol_type = other RNA
cagagataactgggtgtgcac

SEQ ID NO: 77028 - RNA, 21 nt, synthetic construct
  source 1..21: mol_type = other RNA
cagagatctgaaattgacttc

SEQ ID NO: 77029 - RNA, 21 nt, synthetic construct
  source 1..21: mol_type = other RNA
cagagattgggaaaatcttgg

SEQ ID NO: 77030 - RNA, 21 nt, synthetic construct
  source 1..21: mol_type = other RNA
cagagattgtcgttgagtacc

SEQ ID NO: 77031 - RNA, 21 nt, synthetic construct
  source 1..21: mol_type = other RNA
cagagattttcccaaagatag

SEQ ID NO: 77032 - RNA, 21 nt, synthetic construct
  source 1..21: mol_type = other RNA
cagagcaaactcagatctgag

SEQ ID NO: 77033 - RNA, 21 nt, synthetic construct
  source 1..21: mol_type = other RNA
cagagcaacaacctgtctcaa

SEQ ID NO: 77034 - RNA, 21 nt, synthetic construct
  source 1..21: mol_type = other RNA
cagagcaagcacgttagcatc

SEQ ID NO: 77035 - RNA, 21 nt, synthetic construct
  source 1..21: mol_type = other RNA
cagagcacagactcaagcctg

SEQ ID NO: 77036 - RNA, 21 nt, synthetic construct
  source 1..21: mol_type = other RNA
cagagcagcactgatgtgtag

SEQ ID NO: 77037 - RNA, 21 nt, synthetic construct
  source 1..21: mol_type = other RNA
cagagcaggctccacttgggt

SEQ ID NO: 77038 - RNA, 21 nt, synthetic construct
  source 1..21: mol_type = other RNA
cagagcaggggtggggggatg

SEQ ID NO: 77039 - RNA, 21 nt, synthetic construct
  source 1..21: mol_type = other RNA
cagagcagtaggcttagatag

SEQ ID NO: 77040 - RNA, 21 nt, synthetic construct
  source 1..21: mol_type = other RNA
cagagcatgtcccctggagtt

SEQ ID NO: 77041 - RNA, 21 nt, synthetic construct
  source 1..21: mol_type = other RNA
cagagccgaaatgcacttagc

SEQ ID NO: 77042 - RNA, 21 nt, synthetic construct
  source 1..21: mol_type = other RNA
cagagccgagcagaagggaaa

SEQ ID NO: 77043 - RNA, 21 nt, synthetic construct
  source 1..21: mol_type = other RNA
cagagcctaaaataggcctag

SEQ ID NO: 77044 - RNA, 21 nt, synthetic construct
  source 1..21: mol_type = other RNA
cagagcctaatgtgtaagaaa

SEQ ID NO: 77045 - RNA, 21 nt, synthetic construct
  source 1..21: mol_type = other RNA
cagagcggaatttttatatta

SEQ ID NO: 77046 - RNA, 21 nt, synthetic construct
  source 1..21: mol_type = other RNA
cagagcgggtttcctcggtct

SEQ ID NO: 77047 - RNA, 21 nt, synthetic construct
  source 1..21: mol_type = other RNA
cagagctagaactagaatact

SEQ ID NO: 77048 - RNA, 21 nt, synthetic construct
  source 1..21: mol_type = other RNA
cagagctccctctccctcccc

SEQ ID NO: 77049 - RNA, 21 nt, synthetic construct
  source 1..21: mol_type = other RNA
cagagctttgttatgaaaata

SEQ ID NO: 77050 - RNA, 21 nt, synthetic construct
  source 1..21: mol_type = other RNA
cagaggaagcttataatttct

SEQ ID NO: 77051 - RNA, 21 nt, synthetic construct
  source 1..21: mol_type = other RNA
cagaggagcagttactcctga

SEQ ID NO: 77052 - RNA, 21 nt, synthetic construct
  source 1..21: mol_type = other RNA
cagaggaggaagagatagtct

SEQ ID NO: 77053 - RNA, 21 nt, synthetic construct
  source 1..21: mol_type = other RNA
cagaggagggatgcattctag

SEQ ID NO: 77054 - RNA, 21 nt, synthetic construct
  source 1..21: mol_type = other RNA
cagaggattttggattgcgat

SEQ ID NO: 77055 - RNA, 21 nt, synthetic construct
  source 1..21: mol_type = other RNA
cagaggcaacagtcattcagg

SEQ ID NO: 77056 - RNA, 21 nt, synthetic construct
  source 1..21: mol_type = other RNA
cagaggcatgcacggacttgg

SEQ ID NO: 77057 - RNA, 21 nt, synthetic construct
  source 1..21: mol_type = other RNA
cagaggccaaatgaaaggcgt

SEQ ID NO: 77058 - RNA, 21 nt, synthetic construct
  source 1..21: mol_type = other RNA
cagaggccctggtgctttcta

SEQ ID NO: 77059 - RNA, 21 nt, synthetic construct
  source 1..21: mol_type = other RNA
cagaggctttttatatttccg

SEQ ID NO: 77060 - RNA, 21 nt, synthetic construct
  source 1..21: mol_type = other RNA
cagagggaaactgtttttgca

SEQ ID NO: 77061 - RNA, 21 nt, synthetic construct
  source 1..21: mol_type = other RNA
cagagggaatctaggaaacac

SEQ ID NO: 77062 - RNA, 21 nt, synthetic construct
  source 1..21: mol_type = other RNA
cagagggagcgccacgtgaag

SEQ ID NO: 77063 - RNA, 21 nt, synthetic construct
  source 1..21: mol_type = other RNA
cagagggtaacgtgagctgga

SEQ ID NO: 77064 - RNA, 21 nt, synthetic construct
  source 1..21: mol_type = other RNA
cagaggtactcaacgacaatc

SEQ ID NO: 77065 - RNA, 21 nt, synthetic construct
  source 1..21: mol_type = other RNA
cagaggtatttggggctagga

SEQ ID NO: 77066 - RNA, 21 nt, synthetic construct
  source 1..21: mol_type = other RNA
cagaggtcaggaaggcaggag

SEQ ID NO: 77067 - RNA, 21 nt, synthetic construct
  source 1..21: mol_type = other RNA
cagaggtctgttactcccgat

SEQ ID NO: 77068 - RNA, 21 nt, synthetic construct
  source 1..21: mol_type = other RNA
cagaggtgagctttttctttt

SEQ ID NO: 77069 - RNA, 21 nt, synthetic construct
  source 1..21: mol_type = other RNA
cagaggttaaagcaacaggaa

SEQ ID NO: 77070 - RNA, 21 nt, synthetic construct
  source 1..21: mol_type = other RNA
cagaggttcttttaaatgcca

SEQ ID NO: 77071 - RNA, 21 nt, synthetic construct
  source 1..21: mol_type = other RNA
cagaggttgcagtgaagccga

SEQ ID NO: 77072 - RNA, 21 nt, synthetic construct
  source 1..21: mol_type = other RNA
cagagtagagaaggctttgtg

SEQ ID NO: 77073 - RNA, 21 nt, synthetic construct
  source 1..21: mol_type = other RNA
cagagtatatatgctccctaa

SEQ ID NO: 77074 - RNA, 21 nt, synthetic construct
  source 1..21: mol_type = other RNA
cagagtcctgagggtgagacc

SEQ ID NO: 77075 - RNA, 21 nt, synthetic construct
  source 1..21: mol_type = other RNA
cagagtgaaactctggctcag

SEQ ID NO: 77076 - RNA, 21 nt, synthetic construct
  source 1..21: mol_type = other RNA
cagagtgaacaggcaaccttg

SEQ ID NO: 77077 - RNA, 21 nt, synthetic construct
  source 1..21: mol_type = other RNA
cagagtgctgggtagagactg

SEQ ID NO: 77078 - RNA, 21 nt, synthetic construct
  source 1..21: mol_type = other RNA
cagagtggctaatgtggcttg

SEQ ID NO: 77079 - RNA, 21 nt, synthetic construct
  source 1..21: mol_type = other RNA
cagagtgttcaaaagccccaa

SEQ ID NO: 77080 - RNA, 21 nt, synthetic construct
  source 1..21: mol_type = other RNA
cagagttcagcttacagtcat

SEQ ID NO: 77081 - RNA, 21 nt, synthetic construct
  source 1..21: mol_type = other RNA
cagagttccacctccatcact

SEQ ID NO: 77082 - RNA, 21 nt, synthetic construct
  source 1..21: mol_type = other RNA
cagagttggcacagccagtca

SEQ ID NO: 77083 - RNA, 21 nt, synthetic construct
  source 1..21: mol_type = other RNA
cagagttgtatctgtgatccc

SEQ ID NO: 77084 - RNA, 21 nt, synthetic construct
  source 1..21: mol_type = other RNA
cagagttttccaataagttaa

SEQ ID NO: 77085 - RNA, 21 nt, synthetic construct
  source 1..21: mol_type = other RNA
cagataaattatagctccaaa

SEQ ID NO: 77086 - RNA, 21 nt, synthetic construct
  source 1..21: mol_type = other RNA
cagataacaaagggttcttgg

SEQ ID NO: 77087 - RNA, 21 nt, synthetic construct
  source 1..21: mol_type = other RNA
cagataacagtggttaggaaa

SEQ ID NO: 77088 - RNA, 21 nt, synthetic construct
  source 1..21: mol_type = other RNA
cagataaccaataagaagtga

SEQ ID NO: 77089 - RNA, 21 nt, synthetic construct
  source 1..21: mol_type = other RNA
cagataagatccaagtattgt

SEQ ID NO: 77090 - RNA, 21 nt, synthetic construct
  source 1..21: mol_type = other RNA
cagataatttcttcagaagaa

SEQ ID NO: 77091 - RNA, 21 nt, synthetic construct
  source 1..21: mol_type = other RNA
cagatacaactctgaccattg

SEQ ID NO: 77092 - RNA, 21 nt, synthetic construct
  source 1..21: mol_type = other RNA
cagatacgttaaaggaaaaga

SEQ ID NO: 77093 - RNA, 21 nt, synthetic construct
  source 1..21: mol_type = other RNA
cagatactcaatcagtggcca

SEQ ID NO: 77094 - RNA, 21 nt, synthetic construct
  source 1..21: mol_type = other RNA
cagatactcatgcttgctcca

SEQ ID NO: 77095 - RNA, 21 nt, synthetic construct
  source 1..21: mol_type = other RNA
cagatagaaaagacaatagct

SEQ ID NO: 77096 - RNA, 21 nt, synthetic construct
  source 1..21: mol_type = other RNA
cagatatatgcattcccatgt

SEQ ID NO: 77097 - RNA, 21 nt, synthetic construct
  source 1..21: mol_type = other RNA
cagatatcaatctggatataa

SEQ ID NO: 77098 - RNA, 21 nt, synthetic construct
  source 1..21: mol_type = other RNA
cagatatcacccagaccaagt

SEQ ID NO: 77099 - RNA, 21 nt, synthetic construct
  source 1..21: mol_type = other RNA
cagatatccacctgcctcagc

SEQ ID NO: 77100 - RNA, 21 nt, synthetic construct
  source 1..21: mol_type = other RNA
cagatatccataaggaaaaaa

SEQ ID NO: 77101 - RNA, 21 nt, synthetic construct
  source 1..21: mol_type = other RNA
cagatatgaaagaggagacat

SEQ ID NO: 77102 - RNA, 21 nt, synthetic construct
  source 1..21: mol_type = other RNA
cagatattatcctccaatgtt

SEQ ID NO: 77103 - RNA, 21 nt, synthetic construct
  source 1..21: mol_type = other RNA
cagatcaaacgtgctttcctt

SEQ ID NO: 77104 - RNA, 21 nt, synthetic construct
  source 1..21: mol_type = other RNA
cagatcaattgaccaaacatg

SEQ ID NO: 77105 - RNA, 21 nt, synthetic construct
  source 1..21: mol_type = other RNA
cagatcacaaggtcagaagtt

SEQ ID NO: 77106 - RNA, 21 nt, synthetic construct
  source 1..21: mol_type = other RNA
cagatcacgaggtcgagagtt

SEQ ID NO: 77107 - RNA, 21 nt, synthetic construct
  source 1..21: mol_type = other RNA
cagatcagtaacaaataagaa

SEQ ID NO: 77108 - RNA, 21 nt, synthetic construct
  source 1..21: mol_type = other RNA
cagatcccaaaaaggttttta

SEQ ID NO: 77109 - RNA, 21 nt, synthetic construct
  source 1..21: mol_type = other RNA
cagatcccaattacttccagt

SEQ ID NO: 77110 - RNA, 21 nt, synthetic construct
  source 1..21: mol_type = other RNA
cagatcctcacatcagttacc

SEQ ID NO: 77111 - RNA, 21 nt, synthetic construct
  source 1..21: mol_type = other RNA
cagatctaacaaacgcattgt

SEQ ID NO: 77112 - RNA, 21 nt, synthetic construct
  source 1..21: mol_type = other RNA
cagatctctgacattggttat

SEQ ID NO: 77113 - RNA, 21 nt, synthetic construct
  source 1..21: mol_type = other RNA
cagatctgagaagactaagca

SEQ ID NO: 77114 - RNA, 21 nt, synthetic construct
  source 1..21: mol_type = other RNA
cagatctgagagatagaaagc

SEQ ID NO: 77115 - RNA, 21 nt, synthetic construct
  source 1..21: mol_type = other RNA
cagatctgagtttgctctgca

SEQ ID NO: 77116 - RNA, 21 nt, synthetic construct
  source 1..21: mol_type = other RNA
cagatctgctgtaagctggta

SEQ ID NO: 77117 - RNA, 21 nt, synthetic construct
  source 1..21: mol_type = other RNA
cagatctgcttgcagacaata

SEQ ID NO: 77118 - RNA, 21 nt, synthetic construct
  source 1..21: mol_type = other RNA
cagatctgttgcagtccccgg

SEQ ID NO: 77119 - RNA, 21 nt, synthetic construct
  source 1..21: mol_type = other RNA
cagatcttatggaatagttga

SEQ ID NO: 77120 - RNA, 21 nt, synthetic construct
  source 1..21: mol_type = other RNA
cagatcttggccgaatgtggt

SEQ ID NO: 77121 - RNA, 21 nt, synthetic construct
  source 1..21: mol_type = other RNA
cagatctttttgtgtatatgg

SEQ ID NO: 77122 - RNA, 21 nt, synthetic construct
  source 1..21: mol_type = other RNA
cagatgaagcagggaaatgga

SEQ ID NO: 77123 - RNA, 21 nt, synthetic construct
  source 1..21: mol_type = other RNA
cagatgaatgaacaaaatgtg

SEQ ID NO: 77124 - RNA, 21 nt, synthetic construct
  source 1..21: mol_type = other RNA
cagatgaatgagcaaggtcgt

SEQ ID NO: 77125 - RNA, 21 nt, synthetic construct
  source 1..21: mol_type = other RNA
cagatgacagaaataatacaa

SEQ ID NO: 77126 - RNA, 21 nt, synthetic construct
  source 1..21: mol_type = other RNA
cagatgacttcactggagaat

SEQ ID NO: 77127 - RNA, 21 nt, synthetic construct
  source 1..21: mol_type = other RNA
cagatgagaaatacttggaca

SEQ ID NO: 77128 - RNA, 21 nt, synthetic construct
  source 1..21: mol_type = other RNA
cagatgagactcttaatattg

SEQ ID NO: 77129 - RNA, 21 nt, synthetic construct
  source 1..21: mol_type = other RNA
cagatgatcctcccgccttgg

SEQ ID NO: 77130 - RNA, 21 nt, synthetic construct
  source 1..21: mol_type = other RNA
cagatgcgtggttcacacctg

SEQ ID NO: 77131 - RNA, 21 nt, synthetic construct
  source 1..21: mol_type = other RNA
cagatgcttctagccaaagca

SEQ ID NO: 77132 - RNA, 21 nt, synthetic construct
  source 1..21: mol_type = other RNA
cagatggaactctattttcct

SEQ ID NO: 77133 - RNA, 21 nt, synthetic construct
  source 1..21: mol_type = other RNA
cagatggacaaattaccatgt

SEQ ID NO: 77134 - RNA, 21 nt, synthetic construct
  source 1..21: mol_type = other RNA
cagatggccccaaaattaccc

SEQ ID NO: 77135 - RNA, 21 nt, synthetic construct
  source 1..21: mol_type = other RNA
cagatggggattgagggttag

SEQ ID NO: 77136 - RNA, 21 nt, synthetic construct
  source 1..21: mol_type = other RNA
cagatggtaaattggtcctgg

SEQ ID NO: 77137 - RNA, 21 nt, synthetic construct
  source 1..21: mol_type = other RNA
cagatggtccttttttactga

SEQ ID NO: 77138 - RNA, 21 nt, synthetic construct
  source 1..21: mol_type = other RNA
cagatggtgatacctcttact

SEQ ID NO: 77139 - RNA, 21 nt, synthetic construct
  source 1..21: mol_type = other RNA
cagatgtagagaaacaggatt

SEQ ID NO: 77140 - RNA, 21 nt, synthetic construct
  source 1..21: mol_type = other RNA
cagatgtctccattttgccag

SEQ ID NO: 77141 - RNA, 21 nt, synthetic construct
  source 1..21: mol_type = other RNA
cagatgtgagcccccacgccc

SEQ ID NO: 77142 - RNA, 21 nt, synthetic construct
  source 1..21: mol_type = other RNA
cagatgtgcttaatcttcaca

SEQ ID NO: 77143 - RNA, 21 nt, synthetic construct
  source 1..21: mol_type = other RNA
cagatgttgcggtgagcagag

SEQ ID NO: 77144 - RNA, 21 nt, synthetic construct
  source 1..21: mol_type = other RNA
cagatgttttacacatgtcag

SEQ ID NO: 77145 - RNA, 21 nt, synthetic construct
  source 1..21: mol_type = other RNA
cagattaaataccacctgaaa

SEQ ID NO: 77146 - RNA, 21 nt, synthetic construct
  source 1..21: mol_type = other RNA
cagattaagcatagtttgagt

SEQ ID NO: 77147 - RNA, 21 nt, synthetic construct
  source 1..21: mol_type = other RNA
cagattcaatgcaatacttaa

SEQ ID NO: 77148 - RNA, 21 nt, synthetic construct
  source 1..21: mol_type = other RNA
cagattcaccaattgttaaca

SEQ ID NO: 77149 - RNA, 21 nt, synthetic construct
  source 1..21: mol_type = other RNA
cagattcacgcacagggagat

SEQ ID NO: 77150 - RNA, 21 nt, synthetic construct
  source 1..21: mol_type = other RNA
cagattcatcttgacttcact

SEQ ID NO: 77151 - RNA, 21 nt, synthetic construct
  source 1..21: mol_type = other RNA
cagattccttttttatgtgct

SEQ ID NO: 77152 - RNA, 21 nt, synthetic construct
  source 1..21: mol_type = other RNA
cagattctctgtctctgttgc

SEQ ID NO: 77153 - RNA, 21 nt, synthetic construct
  source 1..21: mol_type = other RNA
cagattgaaatctaggcatat

SEQ ID NO: 77154 - RNA, 21 nt, synthetic construct
  source 1..21: mol_type = other RNA
cagattgaccttgtatccagt

SEQ ID NO: 77155 - RNA, 21 nt, synthetic construct
  source 1..21: mol_type = other RNA
cagattgatatctgagtgttg

SEQ ID NO: 77156 - RNA, 21 nt, synthetic construct
  source 1..21: mol_type = other RNA
cagattgcttgagagagataa

SEQ ID NO: 77157 - RNA, 21 nt, synthetic construct
  source 1..21: mol_type = other RNA
cagatttcaggtggtatttaa

SEQ ID NO: 77158 - RNA, 21 nt, synthetic construct
  source 1..21: mol_type = other RNA
cagatttctttttactcatgt

SEQ ID NO: 77159 - RNA, 21 nt, synthetic construct
  source 1..21: mol_type = other RNA
cagatttgatcctggaatagt

SEQ ID NO: 77160 - RNA, 21 nt, synthetic construct
  source 1..21: mol_type = other RNA
cagattttcttgttataagca

SEQ ID NO: 77161 - RNA, 21 nt, synthetic construct
  source 1..21: mol_type = other RNA
cagcaaaagaattaaactcat

SEQ ID NO: 77162 - RNA, 21 nt, synthetic construct
  source 1..21: mol_type = other RNA
cagcaaaagcaattattagtt

SEQ ID NO: 77163 - RNA, 21 nt, synthetic construct
  source 1..21: mol_type = other RNA
cagcaaaagcaccactgagag

SEQ ID NO: 77164 - RNA, 21 nt, synthetic construct
  source 1..21: mol_type = other RNA
cagcaaagcaagaaaaagaaa

SEQ ID NO: 77165 - RNA, 21 nt, synthetic construct
  source 1..21: mol_type = other RNA
cagcaaatcagaaaaggctga

SEQ ID NO: 77166 - RNA, 21 nt, synthetic construct
  source 1..21: mol_type = other RNA
cagcaaatctctagaacttat

SEQ ID NO: 77167 - RNA, 21 nt, synthetic construct
  source 1..21: mol_type = other RNA
cagcaacggaaatgagtgagc

SEQ ID NO: 77168 - RNA, 21 nt, synthetic construct
  source 1..21: mol_type = other RNA
cagcaactcttggccattttc

SEQ ID NO: 77169 - RNA, 21 nt, synthetic construct
  source 1..21: mol_type = other RNA
cagcaagactttatgtggaaa

SEQ ID NO: 77170 - RNA, 21 nt, synthetic construct
  source 1..21: mol_type = other RNA
cagcaagcagtaaatatactg

SEQ ID NO: 77171 - RNA, 21 nt, synthetic construct
  source 1..21: mol_type = other RNA
cagcaaggaccattagcagtt

SEQ ID NO: 77172 - RNA, 21 nt, synthetic construct
  source 1..21: mol_type = other RNA
cagcaaggctcctgcagacat

SEQ ID NO: 77173 - RNA, 21 nt, synthetic construct
  source 1..21: mol_type = other RNA
cagcaagggtggctggcactt

SEQ ID NO: 77174 - RNA, 21 nt, synthetic construct
  source 1..21: mol_type = other RNA
cagcaattatttgaataaggt

SEQ ID NO: 77175 - RNA, 21 nt, synthetic construct
  source 1..21: mol_type = other RNA
cagcacaatactgtctcagtc

SEQ ID NO: 77176 - RNA, 21 nt, synthetic construct
  source 1..21: mol_type = other RNA
cagcacactcttaataactgc

SEQ ID NO: 77177 - RNA, 21 nt, synthetic construct
  source 1..21: mol_type = other RNA
cagcacagagccgaaatgcac

SEQ ID NO: 77178 - RNA, 21 nt, synthetic construct
  source 1..21: mol_type = other RNA
cagcacattaaataagggcat

SEQ ID NO: 77179 - RNA, 21 nt, synthetic construct
  source 1..21: mol_type = other RNA
cagcaccaaagattatgttcc

SEQ ID NO: 77180 - RNA, 21 nt, synthetic construct
  source 1..21: mol_type = other RNA
cagcaccacccttgatgtcac

SEQ ID NO: 77181 - RNA, 21 nt, synthetic construct
  source 1..21: mol_type = other RNA
cagcaccagatactcaatcag

SEQ ID NO: 77182 - RNA, 21 nt, synthetic construct
  source 1..21: mol_type = other RNA
cagcaccatctaacagaaata

SEQ ID NO: 77183 - RNA, 21 nt, synthetic construct
  source 1..21: mol_type = other RNA
cagcaccctcaaatgtctcat

SEQ ID NO: 77184 - RNA, 21 nt, synthetic construct
  source 1..21: mol_type = other RNA
cagcacctaacaatgattatt

SEQ ID NO: 77185 - RNA, 21 nt, synthetic construct
  source 1..21: mol_type = other RNA
cagcaccttttttggtatttt

SEQ ID NO: 77186 - RNA, 21 nt, synthetic construct
  source 1..21: mol_type = other RNA
cagcactctgaatcacctcaa

SEQ ID NO: 77187 - RNA, 21 nt, synthetic construct
  source 1..21: mol_type = other RNA
cagcactgatgtgtagttatt

SEQ ID NO: 77188 - RNA, 21 nt, synthetic construct
  source 1..21: mol_type = other RNA
cagcactgctattgataaatc

SEQ ID NO: 77189 - RNA, 21 nt, synthetic construct
  source 1..21: mol_type = other RNA
cagcactgttaactgacttac

SEQ ID NO: 77190 - RNA, 21 nt, synthetic construct
  source 1..21: mol_type = other RNA
cagcacttccattttgcttaa

SEQ ID NO: 77191 - RNA, 21 nt, synthetic construct
  source 1..21: mol_type = other RNA
cagcacttctgatatcctgta

SEQ ID NO: 77192 - RNA, 21 nt, synthetic construct
  source 1..21: mol_type = other RNA
cagcacttggggaggccaagg

SEQ ID NO: 77193 - RNA, 21 nt, synthetic construct
  source 1..21: mol_type = other RNA
cagcacttttaaggcttggaa

SEQ ID NO: 77194 - RNA, 21 nt, synthetic construct
  source 1..21: mol_type = other RNA
cagcacttttgtactacttgt

SEQ ID NO: 77195 - RNA, 21 nt, synthetic construct
  source 1..21: mol_type = other RNA
cagcagaacaaactgcgtggt

SEQ ID NO: 77196 - RNA, 21 nt, synthetic construct
  source 1..21: mol_type = other RNA
cagcagaaggtgagggactga

SEQ ID NO: 77197 - RNA, 21 nt, synthetic construct
  source 1..21: mol_type = other RNA
cagcagagaagtgaagcttca

SEQ ID NO: 77198 - RNA, 21 nt, synthetic construct
  source 1..21: mol_type = other RNA
cagcagataagatccaagtat

SEQ ID NO: 77199 - RNA, 21 nt, synthetic construct
  source 1..21: mol_type = other RNA
cagcagatctgcttgcagaca

SEQ ID NO: 77200 - RNA, 21 nt, synthetic construct
  source 1..21: mol_type = other RNA
cagcagcagagaagtgaagct

SEQ ID NO: 77201 - RNA, 21 nt, synthetic construct
  source 1..21: mol_type = other RNA
cagcagccccgacgcctttca

SEQ ID NO: 77202 - RNA, 21 nt, synthetic construct
  source 1..21: mol_type = other RNA
cagcagctctagcaaacaaac

SEQ ID NO: 77203 - RNA, 21 nt, synthetic construct
  source 1..21: mol_type = other RNA
cagcaggaaaagctaccctcg

SEQ ID NO: 77204 - RNA, 21 nt, synthetic construct
  source 1..21: mol_type = other RNA
cagcagggctcctccaaggct

SEQ ID NO: 77205 - RNA, 21 nt, synthetic construct
  source 1..21: mol_type = other RNA
cagcaggggaaggcttcgagt

SEQ ID NO: 77206 - RNA, 21 nt, synthetic construct
  source 1..21: mol_type = other RNA
cagcaggggctaagtagtggc

SEQ ID NO: 77207 - RNA, 21 nt, synthetic construct
  source 1..21: mol_type = other RNA
cagcagggtaaagtcaattct

SEQ ID NO: 77208 - RNA, 21 nt, synthetic construct
  source 1..21: mol_type = other RNA
cagcagtcttaaccattgagc

SEQ ID NO: 77209 - RNA, 21 nt, synthetic construct
  source 1..21: mol_type = other RNA
cagcagtgaccatatttccaa

SEQ ID NO: 77210 - RNA, 21 nt, synthetic construct
  source 1..21: mol_type = other RNA
cagcagttcaagcaccacttc

SEQ ID NO: 77211 - RNA, 21 nt, synthetic construct
  source 1..21: mol_type = other RNA
cagcagttcagcctgcagaag

SEQ ID NO: 77212 - RNA, 21 nt, synthetic construct
  source 1..21: mol_type = other RNA
cagcagtttcacttcttagta

SEQ ID NO: 77213 - RNA, 21 nt, synthetic construct
  source 1..21: mol_type = other RNA
cagcagttttaaagaattcgt

SEQ ID NO: 77214 - RNA, 21 nt, synthetic construct
  source 1..21: mol_type = other RNA
cagcataagacccctcaggtg

SEQ ID NO: 77215 - RNA, 21 nt, synthetic construct
  source 1..21: mol_type = other RNA
cagcataattggttaaacttg

SEQ ID NO: 77216 - RNA, 21 nt, synthetic construct
  source 1..21: mol_type = other RNA
cagcatactgtggatatcttt

SEQ ID NO: 77217 - RNA, 21 nt, synthetic construct
  source 1..21: mol_type = other RNA
cagcatagcagaaccttagaa

SEQ ID NO: 77218 - RNA, 21 nt, synthetic construct
  source 1..21: mol_type = other RNA
cagcatatacatgacatggtt

SEQ ID NO: 77219 - RNA, 21 nt, synthetic construct
  source 1..21: mol_type = other RNA
cagcatattagctgtctggat

SEQ ID NO: 77220 - RNA, 21 nt, synthetic construct
  source 1..21: mol_type = other RNA
cagcatccactaggggactaa

SEQ ID NO: 77221 - RNA, 21 nt, synthetic construct
  source 1..21: mol_type = other RNA
cagcatccccagaaagagaga

SEQ ID NO: 77222 - RNA, 21 nt, synthetic construct
  source 1..21: mol_type = other RNA
cagcatccctccagtccagca

SEQ ID NO: 77223 - RNA, 21 nt, synthetic construct
  source 1..21: mol_type = other RNA
cagcatccctgccgcgcgcga

SEQ ID NO: 77224 - RNA, 21 nt, synthetic construct
  source 1..21: mol_type = other RNA
cagcatcttcactgactacac

SEQ ID NO: 77225 - RNA, 21 nt, synthetic construct
  source 1..21: mol_type = other RNA
cagcatcttttgacgcgcaac

SEQ ID NO: 77226 - RNA, 21 nt, synthetic construct
  source 1..21: mol_type = other RNA
cagcatgaagccctctaagtc

SEQ ID NO: 77227 - RNA, 21 nt, synthetic construct
  source 1..21: mol_type = other RNA
cagcatgaatacctatttaga

SEQ ID NO: 77228 - RNA, 21 nt, synthetic construct
  source 1..21: mol_type = other RNA
cagcatgatttataatccatt

SEQ ID NO: 77229 - RNA, 21 nt, synthetic construct
  source 1..21: mol_type = other RNA
cagcatgctcactgtctccat

SEQ ID NO: 77230 - RNA, 21 nt, synthetic construct
  source 1..21: mol_type = other RNA
cagcatgtcttcagaggccct

SEQ ID NO: 77231 - RNA, 21 nt, synthetic construct
  source 1..21: mol_type = other RNA
cagcattaccctaataacaaa

SEQ ID NO: 77232 - RNA, 21 nt, synthetic construct
  source 1..21: mol_type = other RNA
cagcattacttaggcagttat

SEQ ID NO: 77233 - RNA, 21 nt, synthetic construct
  source 1..21: mol_type = other RNA
cagcattatcttaataacctc

SEQ ID NO: 77234 - RNA, 21 nt, synthetic construct
  source 1..21: mol_type = other RNA
cagcattgtttacagtagcca

SEQ ID NO: 77235 - RNA, 21 nt, synthetic construct
  source 1..21: mol_type = other RNA
cagcatttcagccaaagctgg

SEQ ID NO: 77236 - RNA, 21 nt, synthetic construct
  source 1..21: mol_type = other RNA
cagcattttataggcattcct

SEQ ID NO: 77237 - RNA, 21 nt, synthetic construct
  source 1..21: mol_type = other RNA
cagccaaacagtttttacatg

SEQ ID NO: 77238 - RNA, 21 nt, synthetic construct
  source 1..21: mol_type = other RNA
cagccaaagaaattggacggg

SEQ ID NO: 77239 - RNA, 21 nt, synthetic construct
  source 1..21: mol_type = other RNA
cagccaaagctggcatgttgg

SEQ ID NO: 77240 - RNA, 21 nt, synthetic construct
  source 1..21: mol_type = other RNA
cagccaaataaaacacaagga

SEQ ID NO: 77241 - RNA, 21 nt, synthetic construct
  source 1..21: mol_type = other RNA
cagccacaagacataagcatt

SEQ ID NO: 77242 - RNA, 21 nt, synthetic construct
  source 1..21: mol_type = other RNA
cagccacccttgctgcttcta

SEQ ID NO: 77243 - RNA, 21 nt, synthetic construct
  source 1..21: mol_type = other RNA
cagccacgtgtattgagtgta

SEQ ID NO: 77244 - RNA, 21 nt, synthetic construct
  source 1..21: mol_type = other RNA
cagccactatagaaaatagta

SEQ ID NO: 77245 - RNA, 21 nt, synthetic construct
  source 1..21: mol_type = other RNA
cagccagagagtggaaagagc

SEQ ID NO: 77246 - RNA, 21 nt, synthetic construct
  source 1..21: mol_type = other RNA
cagccagaggaagcttataat

SEQ ID NO: 77247 - RNA, 21 nt, synthetic construct
  source 1..21: mol_type = other RNA
cagccagatttgatcctggaa

SEQ ID NO: 77248 - RNA, 21 nt, synthetic construct
  source 1..21: mol_type = other RNA
cagccagtcagtgatggaggt

SEQ ID NO: 77249 - RNA, 21 nt, synthetic construct
  source 1..21: mol_type = other RNA
cagccatcaacctaatgaaat

SEQ ID NO: 77250 - RNA, 21 nt, synthetic construct
  source 1..21: mol_type = other RNA
cagccatcccagctacataac

SEQ ID NO: 77251 - RNA, 21 nt, synthetic construct
  source 1..21: mol_type = other RNA
cagccatggctcactgcggcc

SEQ ID NO: 77252 - RNA, 21 nt, synthetic construct
  source 1..21: mol_type = other RNA
cagccattctcttctggatag

SEQ ID NO: 77253 - RNA, 21 nt, synthetic construct
  source 1..21: mol_type = other RNA
cagcccccagttttgttgaat

SEQ ID NO: 77254 - RNA, 21 nt, synthetic construct
  source 1..21: mol_type = other RNA
cagccccctccctaccacccg

SEQ ID NO: 77255 - RNA, 21 nt, synthetic construct
  source 1..21: mol_type = other RNA
cagccccctcgaagagaccac

SEQ ID NO: 77256 - RNA, 21 nt, synthetic construct
  source 1..21: mol_type = other RNA
cagccccctgagtagctgtga

SEQ ID NO: 77257 - RNA, 21 nt, synthetic construct
  source 1..21: mol_type = other RNA
cagccccgacgcctttcattt

SEQ ID NO: 77258 - RNA, 21 nt, synthetic construct
  source 1..21: mol_type = other RNA
cagccccgcttcagttggtga

SEQ ID NO: 77259 - RNA, 21 nt, synthetic construct
  source 1..21: mol_type = other RNA
cagcccctagcatgcagtagc

SEQ ID NO: 77260 - RNA, 21 nt, synthetic construct
  source 1..21: mol_type = other RNA
cagcccctcatcctccgtagc

SEQ ID NO: 77261 - RNA, 21 nt, synthetic construct
  source 1..21: mol_type = other RNA
cagcccctgccacactccagc

SEQ ID NO: 77262 - RNA, 21 nt, synthetic construct
  source 1..21: mol_type = other RNA
cagcccctggtgatctatgaa

SEQ ID NO: 77263 - RNA, 21 nt, synthetic construct
  source 1..21: mol_type = other RNA
cagcccgacctccagcgctaa

SEQ ID NO: 77264 - RNA, 21 nt, synthetic construct
  source 1..21: mol_type = other RNA
cagcccgtgtgtttagaataa

SEQ ID NO: 77265 - RNA, 21 nt, synthetic construct
  source 1..21: mol_type = other RNA
cagccctgatagatattggca

SEQ ID NO: 77266 - RNA, 21 nt, synthetic construct
  source 1..21: mol_type = other RNA
cagccgccgcagaggccaaat

SEQ ID NO: 77267 - RNA, 21 nt, synthetic construct
  source 1..21: mol_type = other RNA
cagccggcatatgtcactgta

SEQ ID NO: 77268 - RNA, 21 nt, synthetic construct
  source 1..21: mol_type = other RNA
cagccgtgattgcaccactga

SEQ ID NO: 77269 - RNA, 21 nt, synthetic construct
  source 1..21: mol_type = other RNA
cagcctaaaccattttcaatc

SEQ ID NO: 77270 - RNA, 21 nt, synthetic construct
  source 1..21: mol_type = other RNA
cagcctaaagtccacagatct

SEQ ID NO: 77271 - RNA, 21 nt, synthetic construct
  source 1..21: mol_type = other RNA
cagcctaagcaaatgtaatga

SEQ ID NO: 77272 - RNA, 21 nt, synthetic construct
  source 1..21: mol_type = other RNA
cagcctaagcaagttacatgc

SEQ ID NO: 77273 - RNA, 21 nt, synthetic construct
  source 1..21: mol_type = other RNA
cagcctaattgtacacctcaa

SEQ ID NO: 77274 - RNA, 21 nt, synthetic construct
  source 1..21: mol_type = other RNA
cagcctaggcaagagagcaag

SEQ ID NO: 77275 - RNA, 21 nt, synthetic construct
  source 1..21: mol_type = other RNA
cagcctcaaacaatcctccct

SEQ ID NO: 77276 - RNA, 21 nt, synthetic construct
  source 1..21: mol_type = other RNA
cagcctcaacagcacttttgt

SEQ ID NO: 77277 - RNA, 21 nt, synthetic construct
  source 1..21: mol_type = other RNA
cagcctcccgagtagttgtaa

SEQ ID NO: 77278 - RNA, 21 nt, synthetic construct
  source 1..21: mol_type = other RNA
cagcctctaatcaggttgggc

SEQ ID NO: 77279 - RNA, 21 nt, synthetic construct
  source 1..21: mol_type = other RNA
cagcctgatgatgatggtgat

SEQ ID NO: 77280 - RNA, 21 nt, synthetic construct
  source 1..21: mol_type = other RNA
cagcctgcagaaggagaaacc

SEQ ID NO: 77281 - RNA, 21 nt, synthetic construct
  source 1..21: mol_type = other RNA
cagcctggccaacatcgtaaa

SEQ ID NO: 77282 - RNA, 21 nt, synthetic construct
  source 1..21: mol_type = other RNA
cagcctgggacagagcgagac

SEQ ID NO: 77283 - RNA, 21 nt, synthetic construct
  source 1..21: mol_type = other RNA
cagcctgggcacacgccactg

SEQ ID NO: 77284 - RNA, 21 nt, synthetic construct
  source 1..21: mol_type = other RNA
cagcctggtaatgaatagaaa

SEQ ID NO: 77285 - RNA, 21 nt, synthetic construct
  source 1..21: mol_type = other RNA
cagcctggtcaacagggtaag

SEQ ID NO: 77286 - RNA, 21 nt, synthetic construct
  source 1..21: mol_type = other RNA
cagcctgtgtcagtgacagtt

SEQ ID NO: 77287 - RNA, 21 nt, synthetic construct
  source 1..21: mol_type = other RNA
cagccttaatctcctgagtag

SEQ ID NO: 77288 - RNA, 21 nt, synthetic construct
  source 1..21: mol_type = other RNA
cagccttccctgaacaatgat

SEQ ID NO: 77289 - RNA, 21 nt, synthetic construct
  source 1..21: mol_type = other RNA
cagccttctctcttccaaata

SEQ ID NO: 77290 - RNA, 21 nt, synthetic construct
  source 1..21: mol_type = other RNA
cagccttggaggagccctgct

SEQ ID NO: 77291 - RNA, 21 nt, synthetic construct
  source 1..21: mol_type = other RNA
cagccttggtaagagtgagac

SEQ ID NO: 77292 - RNA, 21 nt, synthetic construct
  source 1..21: mol_type = other RNA
cagcctttaatttagcgttca

SEQ ID NO: 77293 - RNA, 21 nt, synthetic construct
  source 1..21: mol_type = other RNA
cagccttttctgatttgctgg

SEQ ID NO: 77294 - RNA, 21 nt, synthetic construct
  source 1..21: mol_type = other RNA
cagcgccacttaaaaaatgcg

SEQ ID NO: 77295 - RNA, 21 nt, synthetic construct
  source 1..21: mol_type = other RNA
cagcgcccggcccgttatttt

SEQ ID NO: 77296 - RNA, 21 nt, synthetic construct
  source 1..21: mol_type = other RNA
cagcgctaagcactgcgccaa

SEQ ID NO: 77297 - RNA, 21 nt, synthetic construct
  source 1..21: mol_type = other RNA
cagcgctaagtgcatttcggc

SEQ ID NO: 77298 - RNA, 21 nt, synthetic construct
  source 1..21: mol_type = other RNA
cagcgcttgaacaaatatgaa

SEQ ID NO: 77299 - RNA, 21 nt, synthetic construct
  source 1..21: mol_type = other RNA
cagcggcatacaggagttccg

SEQ ID NO: 77300 - RNA, 21 nt, synthetic construct
  source 1..21: mol_type = other RNA
cagcggggatgctcagggtgc

SEQ ID NO: 77301 - RNA, 21 nt, synthetic construct
  source 1..21: mol_type = other RNA
cagcggggatggttgcacaat

SEQ ID NO: 77302 - RNA, 21 nt, synthetic construct
  source 1..21: mol_type = other RNA
cagcgtaactccatcttcacg

SEQ ID NO: 77303 - RNA, 21 nt, synthetic construct
  source 1..21: mol_type = other RNA
cagcgtcctcactgtgatacc

SEQ ID NO: 77304 - RNA, 21 nt, synthetic construct
  source 1..21: mol_type = other RNA
cagcgtgcaccttacattgta

SEQ ID NO: 77305 - RNA, 21 nt, synthetic construct
  source 1..21: mol_type = other RNA
cagcgtggaatggtcaatttc

SEQ ID NO: 77306 - RNA, 21 nt, synthetic construct
  source 1..21: mol_type = other RNA
cagcgtgggcaacacaatgag

SEQ ID NO: 77307 - RNA, 21 nt, synthetic construct
  source 1..21: mol_type = other RNA
cagcgtgtgcatgaccctgct

SEQ ID NO: 77308 - RNA, 21 nt, synthetic construct
  source 1..21: mol_type = other RNA
cagcgttgttcagttgaaaag

SEQ ID NO: 77309 - RNA, 21 nt, synthetic construct
  source 1..21: mol_type = other RNA
cagctaaaatgttcagataga

SEQ ID NO: 77310 - RNA, 21 nt, synthetic construct
  source 1..21: mol_type = other RNA
cagctaacttttaacccacag

SEQ ID NO: 77311 - RNA, 21 nt, synthetic construct
  source 1..21: mol_type = other RNA
cagctaagcaccaacagatcc

SEQ ID NO: 77312 - RNA, 21 nt, synthetic construct
  source 1..21: mol_type = other RNA
cagctaatatgctgtagtgat

SEQ ID NO: 77313 - RNA, 21 nt, synthetic construct
  source 1..21: mol_type = other RNA
cagctaattttctaatcttca

SEQ ID NO: 77314 - RNA, 21 nt, synthetic construct
  source 1..21: mol_type = other RNA
cagctacactcaatacacgtg

SEQ ID NO: 77315 - RNA, 21 nt, synthetic construct
  source 1..21: mol_type = other RNA
cagctacataacttcccagac

SEQ ID NO: 77316 - RNA, 21 nt, synthetic construct
  source 1..21: mol_type = other RNA
cagctacctgttgattgttgc

SEQ ID NO: 77317 - RNA, 21 nt, synthetic construct
  source 1..21: mol_type = other RNA
cagctacggaggatgaggggc

SEQ ID NO: 77318 - RNA, 21 nt, synthetic construct
  source 1..21: mol_type = other RNA
cagctactaaacaaatcagat

SEQ ID NO: 77319 - RNA, 21 nt, synthetic construct
  source 1..21: mol_type = other RNA
cagctactatgaatatactgg

SEQ ID NO: 77320 - RNA, 21 nt, synthetic construct
  source 1..21: mol_type = other RNA
cagctaggcgtagtatctcat

SEQ ID NO: 77321 - RNA, 21 nt, synthetic construct
  source 1..21: mol_type = other RNA
cagctaggtgagtgagatggg

SEQ ID NO: 77322 - RNA, 21 nt, synthetic construct
  source 1..21: mol_type = other RNA
cagctagtgtgtctgactaca

SEQ ID NO: 77323 - RNA, 21 nt, synthetic construct
  source 1..21: mol_type = other RNA
cagctatagcttctgagctgt

SEQ ID NO: 77324 - RNA, 21 nt, synthetic construct
  source 1..21: mol_type = other RNA
cagctatcaggccttccacct

SEQ ID NO: 77325 - RNA, 21 nt, synthetic construct
  source 1..21: mol_type = other RNA
cagctatggtgttatttgttc

SEQ ID NO: 77326 - RNA, 21 nt, synthetic construct
  source 1..21: mol_type = other RNA
cagctcaaacagcttgacatt

SEQ ID NO: 77327 - RNA, 21 nt, synthetic construct
  source 1..21: mol_type = other RNA
cagctcaattaagcaaccttt

SEQ ID NO: 77328 - RNA, 21 nt, synthetic construct
  source 1..21: mol_type = other RNA
cagctcacgttaccctctgga

SEQ ID NO: 77329 - RNA, 21 nt, synthetic construct
  source 1..21: mol_type = other RNA
cagctcagaagctatagctga

SEQ ID NO: 77330 - RNA, 21 nt, synthetic construct
  source 1..21: mol_type = other RNA
cagctcattacagtctcgacc

SEQ ID NO: 77331 - RNA, 21 nt, synthetic construct
  source 1..21: mol_type = other RNA
cagctccaaagaacaggagtt

SEQ ID NO: 77332 - RNA, 21 nt, synthetic construct
  source 1..21: mol_type = other RNA
cagctcctcagaaggccaagg

SEQ ID NO: 77333 - RNA, 21 nt, synthetic construct
  source 1..21: mol_type = other RNA
cagctcgaccaggggaaggag

SEQ ID NO: 77334 - RNA, 21 nt, synthetic construct
  source 1..21: mol_type = other RNA
cagctctagcaaacaaacaca

SEQ ID NO: 77335 - RNA, 21 nt, synthetic construct
  source 1..21: mol_type = other RNA
cagctctcatgagtcctgaaa

SEQ ID NO: 77336 - RNA, 21 nt, synthetic construct
  source 1..21: mol_type = other RNA
cagctcttctcagttgcagca

SEQ ID NO: 77337 - RNA, 21 nt, synthetic construct
  source 1..21: mol_type = other RNA
cagctcttttgtgtcttttta

SEQ ID NO: 77338 - RNA, 21 nt, synthetic construct
  source 1..21: mol_type = other RNA
cagctgagtagcgctttaagc

SEQ ID NO: 77339 - RNA, 21 nt, synthetic construct
  source 1..21: mol_type = other RNA
cagctgggagaaagctaattt

SEQ ID NO: 77340 - RNA, 21 nt, synthetic construct
  source 1..21: mol_type = other RNA
cagctgtcactctctttagga

SEQ ID NO: 77341 - RNA, 21 nt, synthetic construct
  source 1..21: mol_type = other RNA
cagctgtccaacaagggttgg

SEQ ID NO: 77342 - RNA, 21 nt, synthetic construct
  source 1..21: mol_type = other RNA
cagcttacagcagatctgctt

SEQ ID NO: 77343 - RNA, 21 nt, synthetic construct
  source 1..21: mol_type = other RNA
cagcttacagtcatcacagtc

SEQ ID NO: 77344 - RNA, 21 nt, synthetic construct
  source 1..21: mol_type = other RNA
cagcttaccaagtgccgcgtt

SEQ ID NO: 77345 - RNA, 21 nt, synthetic construct
  source 1..21: mol_type = other RNA
cagcttcactcttctgcaagt

SEQ ID NO: 77346 - RNA, 21 nt, synthetic construct
  source 1..21: mol_type = other RNA
cagcttccacccaagtggagc

SEQ ID NO: 77347 - RNA, 21 nt, synthetic construct
  source 1..21: mol_type = other RNA
cagcttccgggacttggaagt

SEQ ID NO: 77348 - RNA, 21 nt, synthetic construct
  source 1..21: mol_type = other RNA
cagcttcctacccaagcttag

SEQ ID NO: 77349 - RNA, 21 nt, synthetic construct
  source 1..21: mol_type = other RNA
cagcttcttgttagaattttg

SEQ ID NO: 77350 - RNA, 21 nt, synthetic construct
  source 1..21: mol_type = other RNA
cagcttgacattcttaccttc

SEQ ID NO: 77351 - RNA, 21 nt, synthetic construct
  source 1..21: mol_type = other RNA
cagcttggccaacatggcgaa

SEQ ID NO: 77352 - RNA, 21 nt, synthetic construct
  source 1..21: mol_type = other RNA
cagcttgggcaagagagcaag

SEQ ID NO: 77353 - RNA, 21 nt, synthetic construct
  source 1..21: mol_type = other RNA
cagctttaaagagaaatagtt

SEQ ID NO: 77354 - RNA, 21 nt, synthetic construct
  source 1..21: mol_type = other RNA
cagctttctaattctgacaac

SEQ ID NO: 77355 - RNA, 21 nt, synthetic construct
  source 1..21: mol_type = other RNA
cagctttcttttccaaccaag

SEQ ID NO: 77356 - RNA, 21 nt, synthetic construct
  source 1..21: mol_type = other RNA
cagctttggctgaaatgctgt

SEQ ID NO: 77357 - RNA, 21 nt, synthetic construct
  source 1..21: mol_type = other RNA
cagcttttattagagctttaa

SEQ ID NO: 77358 - RNA, 21 nt, synthetic construct
  source 1..21: mol_type = other RNA
caggaaaaccagtttagaaaa

SEQ ID NO: 77359 - RNA, 21 nt, synthetic construct
  source 1..21: mol_type = other RNA
caggaaaagcaaatgtcatct

SEQ ID NO: 77360 - RNA, 21 nt, synthetic construct
  source 1..21: mol_type = other RNA
caggaaaagctaccctcgagt

SEQ ID NO: 77361 - RNA, 21 nt, synthetic construct
  source 1..21: mol_type = other RNA
caggaaacttccagaaacttc

SEQ ID NO: 77362 - RNA, 21 nt, synthetic construct
  source 1..21: mol_type = other RNA
caggaaagaccggggactgca

SEQ ID NO: 77363 - RNA, 21 nt, synthetic construct
  source 1..21: mol_type = other RNA
caggaaagatgaagtatagaa

SEQ ID NO: 77364 - RNA, 21 nt, synthetic construct
  source 1..21: mol_type = other RNA
caggaaagatgtcttttaact

SEQ ID NO: 77365 - RNA, 21 nt, synthetic construct
  source 1..21: mol_type = other RNA
caggaaaggtggggaagggat

SEQ ID NO: 77366 - RNA, 21 nt, synthetic construct
  source 1..21: mol_type = other RNA
caggaaagtgccagccaccct

SEQ ID NO: 77367 - RNA, 21 nt, synthetic construct
  source 1..21: mol_type = other RNA
caggaacaccttgaacatgaa

SEQ ID NO: 77368 - RNA, 21 nt, synthetic construct
  source 1..21: mol_type = other RNA
caggaacagattcacgcacag

SEQ ID NO: 77369 - RNA, 21 nt, synthetic construct
  source 1..21: mol_type = other RNA
caggaactcatattagtctgt

SEQ ID NO: 77370 - RNA, 21 nt, synthetic construct
  source 1..21: mol_type = other RNA
caggaacttacagtaagatcc

SEQ ID NO: 77371 - RNA, 21 nt, synthetic construct
  source 1..21: mol_type = other RNA
caggaagaattattgtctgca

SEQ ID NO: 77372 - RNA, 21 nt, synthetic construct
  source 1..21: mol_type = other RNA
caggaagagactatctcttcc

SEQ ID NO: 77373 - RNA, 21 nt, synthetic construct
  source 1..21: mol_type = other RNA
caggaagaggcagctaagcac

SEQ ID NO: 77374 - RNA, 21 nt, synthetic construct
  source 1..21: mol_type = other RNA
caggaaggcaggaggcctcag

SEQ ID NO: 77375 - RNA, 21 nt, synthetic construct
  source 1..21: mol_type = other RNA
caggaagggagagatgcctat

SEQ ID NO: 77376 - RNA, 21 nt, synthetic construct
  source 1..21: mol_type = other RNA
caggaagtatgagtcttccgt

SEQ ID NO: 77377 - RNA, 21 nt, synthetic construct
  source 1..21: mol_type = other RNA
caggaagtcagcaactcttgg

SEQ ID NO: 77378 - RNA, 21 nt, synthetic construct
  source 1..21: mol_type = other RNA
caggaagttgagaaagaggga

SEQ ID NO: 77379 - RNA, 21 nt, synthetic construct
  source 1..21: mol_type = other RNA
caggaatgcaaagtttcctac

SEQ ID NO: 77380 - RNA, 21 nt, synthetic construct
  source 1..21: mol_type = other RNA
caggacaattgaatggggatg

SEQ ID NO: 77381 - RNA, 21 nt, synthetic construct
  source 1..21: mol_type = other RNA
caggacactggaggtgcacat

SEQ ID NO: 77382 - RNA, 21 nt, synthetic construct
  source 1..21: mol_type = other RNA
caggacagagcagtaggctta

SEQ ID NO: 77383 - RNA, 21 nt, synthetic construct
  source 1..21: mol_type = other RNA
caggacagattaaaatcagat

SEQ ID NO: 77384 - RNA, 21 nt, synthetic construct
  source 1..21: mol_type = other RNA
caggacagtcatcctcaacaa

SEQ ID NO: 77385 - RNA, 21 nt, synthetic construct
  source 1..21: mol_type = other RNA
caggacagttattcttcagca

SEQ ID NO: 77386 - RNA, 21 nt, synthetic construct
  source 1..21: mol_type = other RNA
caggaccaactttaagcaaaa

SEQ ID NO: 77387 - RNA, 21 nt, synthetic construct
  source 1..21: mol_type = other RNA
caggaccaatttaccatctga

SEQ ID NO: 77388 - RNA, 21 nt, synthetic construct
  source 1..21: mol_type = other RNA
caggaccagcttgggcaagag

SEQ ID NO: 77389 - RNA, 21 nt, synthetic construct
  source 1..21: mol_type = other RNA
caggaccaggcagtcctctca

SEQ ID NO: 77390 - RNA, 21 nt, synthetic construct
  source 1..21: mol_type = other RNA
caggactcatgagagctgtgc

SEQ ID NO: 77391 - RNA, 21 nt, synthetic construct
  source 1..21: mol_type = other RNA
caggactccacagagttcagc

SEQ ID NO: 77392 - RNA, 21 nt, synthetic construct
  source 1..21: mol_type = other RNA
caggactctgctcaaaggggc

SEQ ID NO: 77393 - RNA, 21 nt, synthetic construct
  source 1..21: mol_type = other RNA
caggactgcttgaggccacga

SEQ ID NO: 77394 - RNA, 21 nt, synthetic construct
  source 1..21: mol_type = other RNA
caggactggactccttctgaa

SEQ ID NO: 77395 - RNA, 21 nt, synthetic construct
  source 1..21: mol_type = other RNA
caggactgtgtgtgtccaggc

SEQ ID NO: 77396 - RNA, 21 nt, synthetic construct
  source 1..21: mol_type = other RNA
caggacttttggtacacatct

SEQ ID NO: 77397 - RNA, 21 nt, synthetic construct
  source 1..21: mol_type = other RNA
caggagaaacatggcttagaa

SEQ ID NO: 77398 - RNA, 21 nt, synthetic construct
  source 1..21: mol_type = other RNA
caggagaactgcctggacccg

SEQ ID NO: 77399 - RNA, 21 nt, synthetic construct
  source 1..21: mol_type = other RNA
caggagaacttgtctcggatt

SEQ ID NO: 77400 - RNA, 21 nt, synthetic construct
  source 1..21: mol_type = other RNA
caggagaatctgggaggtgga

SEQ ID NO: 77401 - RNA, 21 nt, synthetic construct
  source 1..21: mol_type = other RNA
caggagaatggcatgaaccca

SEQ ID NO: 77402 - RNA, 21 nt, synthetic construct
  source 1..21: mol_type = other RNA
caggagagcgacagctacgga

SEQ ID NO: 77403 - RNA, 21 nt, synthetic construct
  source 1..21: mol_type = other RNA
caggagagtcgcttgaacctg

SEQ ID NO: 77404 - RNA, 21 nt, synthetic construct
  source 1..21: mol_type = other RNA
caggagattaaggctggagga

SEQ ID NO: 77405 - RNA, 21 nt, synthetic construct
  source 1..21: mol_type = other RNA
caggagcagtgtgaataggaa

SEQ ID NO: 77406 - RNA, 21 nt, synthetic construct
  source 1..21: mol_type = other RNA
caggagcatagcttgaaccag

SEQ ID NO: 77407 - RNA, 21 nt, synthetic construct
  source 1..21: mol_type = other RNA
caggagcccaccaccatgcct

SEQ ID NO: 77408 - RNA, 21 nt, synthetic construct
  source 1..21: mol_type = other RNA
caggagcctagtcatccactg

SEQ ID NO: 77409 - RNA, 21 nt, synthetic construct
  source 1..21: mol_type = other RNA
caggagccttgctgttgtaat

SEQ ID NO: 77410 - RNA, 21 nt, synthetic construct
  source 1..21: mol_type = other RNA
caggagctagaacagaataaa

SEQ ID NO: 77411 - RNA, 21 nt, synthetic construct
  source 1..21: mol_type = other RNA
caggaggaggagggtgcagcc

SEQ ID NO: 77412 - RNA, 21 nt, synthetic construct
  source 1..21: mol_type = other RNA
caggaggcaaaggttgagaca

SEQ ID NO: 77413 - RNA, 21 nt, synthetic construct
  source 1..21: mol_type = other RNA
caggaggcacctgaacccagg

SEQ ID NO: 77414 - RNA, 21 nt, synthetic construct
  source 1..21: mol_type = other RNA
caggaggcctcagaattaata

SEQ ID NO: 77415 - RNA, 21 nt, synthetic construct
  source 1..21: mol_type = other RNA
caggaggctgaggcaggaggc

SEQ ID NO: 77416 - RNA, 21 nt, synthetic construct
  source 1..21: mol_type = other RNA
caggaggttgaagctctagtg

SEQ ID NO: 77417 - RNA, 21 nt, synthetic construct
  source 1..21: mol_type = other RNA
caggaggtttgcactggcaca

SEQ ID NO: 77418 - RNA, 21 nt, synthetic construct
  source 1..21: mol_type = other RNA
caggagtaactgctcctctga

SEQ ID NO: 77419 - RNA, 21 nt, synthetic construct
  source 1..21: mol_type = other RNA
caggagttaccataaaaccat

SEQ ID NO: 77420 - RNA, 21 nt, synthetic construct
  source 1..21: mol_type = other RNA
caggagttccgatttctcggc

SEQ ID NO: 77421 - RNA, 21 nt, synthetic construct
  source 1..21: mol_type = other RNA
caggagttcttatgaggttat

SEQ ID NO: 77422 - RNA, 21 nt, synthetic construct
  source 1..21: mol_type = other RNA
caggagttgcatcacttgagg

SEQ ID NO: 77423 - RNA, 21 nt, synthetic construct
  source 1..21: mol_type = other RNA
caggagtttgagactgcagtg

SEQ ID NO: 77424 - RNA, 21 nt, synthetic construct
  source 1..21: mol_type = other RNA
caggagttttgcctctttgct

SEQ ID NO: 77425 - RNA, 21 nt, synthetic construct
  source 1..21: mol_type = other RNA
caggatacaaaaagcacctac

SEQ ID NO: 77426 - RNA, 21 nt, synthetic construct
  source 1..21: mol_type = other RNA
caggatatcagaagtgctgac

SEQ ID NO: 77427 - RNA, 21 nt, synthetic construct
  source 1..21: mol_type = other RNA
caggatcaaatctggctgcag

SEQ ID NO: 77428 - RNA, 21 nt, synthetic construct
  source 1..21: mol_type = other RNA
caggatccagatgtagagaaa

SEQ ID NO: 77429 - RNA, 21 nt, synthetic construct
  source 1..21: mol_type = other RNA
caggatccagtctctacccag

SEQ ID NO: 77430 - RNA, 21 nt, synthetic construct
  source 1..21: mol_type = other RNA
caggatcccggaacaggaaaa

SEQ ID NO: 77431 - RNA, 21 nt, synthetic construct
  source 1..21: mol_type = other RNA
caggatcttactgtaagttcc

SEQ ID NO: 77432 - RNA, 21 nt, synthetic construct
  source 1..21: mol_type = other RNA
caggatggcatgaaatgggtt

SEQ ID NO: 77433 - RNA, 21 nt, synthetic construct
  source 1..21: mol_type = other RNA
caggatgtctttgggaaggcc

SEQ ID NO: 77434 - RNA, 21 nt, synthetic construct
  source 1..21: mol_type = other RNA
caggattacaatgtaaggtgc

SEQ ID NO: 77435 - RNA, 21 nt, synthetic construct
  source 1..21: mol_type = other RNA
caggattcttgttaagcattt

SEQ ID NO: 77436 - RNA, 21 nt, synthetic construct
  source 1..21: mol_type = other RNA
caggcaaaagatgatgaacaa

SEQ ID NO: 77437 - RNA, 21 nt, synthetic construct
  source 1..21: mol_type = other RNA
caggcaaacagcgccacttaa

SEQ ID NO: 77438 - RNA, 21 nt, synthetic construct
  source 1..21: mol_type = other RNA
caggcaaccttgggagaaaat

SEQ ID NO: 77439 - RNA, 21 nt, synthetic construct
  source 1..21: mol_type = other RNA
caggcaagggactgtcgaagc

SEQ ID NO: 77440 - RNA, 21 nt, synthetic construct
  source 1..21: mol_type = other RNA
caggcaccttcagaagccctg

SEQ ID NO: 77441 - RNA, 21 nt, synthetic construct
  source 1..21: mol_type = other RNA
caggcagaatgtgacctgtcc

SEQ ID NO: 77442 - RNA, 21 nt, synthetic construct
  source 1..21: mol_type = other RNA
caggcagatcacgaggtcgag

SEQ ID NO: 77443 - RNA, 21 nt, synthetic construct
  source 1..21: mol_type = other RNA
caggcagtcctctcactccaa

SEQ ID NO: 77444 - RNA, 21 nt, synthetic construct
  source 1..21: mol_type = other RNA
caggcagtctagtccatgaag

SEQ ID NO: 77445 - RNA, 21 nt, synthetic construct
  source 1..21: mol_type = other RNA
caggcataagccaccgcactc

SEQ ID NO: 77446 - RNA, 21 nt, synthetic construct
  source 1..21: mol_type = other RNA
caggcatctctctaaaaacat

SEQ ID NO: 77447 - RNA, 21 nt, synthetic construct
  source 1..21: mol_type = other RNA
caggcatgagccactgcgggc

SEQ ID NO: 77448 - RNA, 21 nt, synthetic construct
  source 1..21: mol_type = other RNA
caggcatgagtcgccatacct

SEQ ID NO: 77449 - RNA, 21 nt, synthetic construct
  source 1..21: mol_type = other RNA
caggcatgatggctcaacgcc

SEQ ID NO: 77450 - RNA, 21 nt, synthetic construct
  source 1..21: mol_type = other RNA
caggcatgcgccatcacaccc

SEQ ID NO: 77451 - RNA, 21 nt, synthetic construct
  source 1..21: mol_type = other RNA
caggcatgctaactgcagagg

SEQ ID NO: 77452 - RNA, 21 nt, synthetic construct
  source 1..21: mol_type = other RNA
caggcatgggggcgcgtgcct

SEQ ID NO: 77453 - RNA, 21 nt, synthetic construct
  source 1..21: mol_type = other RNA
caggcattgtgctcagtggtt

SEQ ID NO: 77454 - RNA, 21 nt, synthetic construct
  source 1..21: mol_type = other RNA
caggccaacagggccactgag

SEQ ID NO: 77455 - RNA, 21 nt, synthetic construct
  source 1..21: mol_type = other RNA
caggccagatatccataagga

SEQ ID NO: 77456 - RNA, 21 nt, synthetic construct
  source 1..21: mol_type = other RNA
caggccagtgagtgatgaaaa

SEQ ID NO: 77457 - RNA, 21 nt, synthetic construct
  source 1..21: mol_type = other RNA
caggcccggggcagagaactg

SEQ ID NO: 77458 - RNA, 21 nt, synthetic construct
  source 1..21: mol_type = other RNA
caggccctgagaagtcaaagc

SEQ ID NO: 77459 - RNA, 21 nt, synthetic construct
  source 1..21: mol_type = other RNA
caggccctttgttagtgcctt

SEQ ID NO: 77460 - RNA, 21 nt, synthetic construct
  source 1..21: mol_type = other RNA
caggcctcgctcttggctttt

SEQ ID NO: 77461 - RNA, 21 nt, synthetic construct
  source 1..21: mol_type = other RNA
caggcctgagccgtcggtatg

SEQ ID NO: 77462 - RNA, 21 nt, synthetic construct
  source 1..21: mol_type = other RNA
caggcctgttgtgaggattcg

SEQ ID NO: 77463 - RNA, 21 nt, synthetic construct
  source 1..21: mol_type = other RNA
caggccttccacctgctcttt

SEQ ID NO: 77464 - RNA, 21 nt, synthetic construct
  source 1..21: mol_type = other RNA
caggccttcgaggcatctagt

SEQ ID NO: 77465 - RNA, 21 nt, synthetic construct
  source 1..21: mol_type = other RNA
caggcgcacgccatctcgccc

SEQ ID NO: 77466 - RNA, 21 nt, synthetic construct
  source 1..21: mol_type = other RNA
caggcgcctgcattgcattta

SEQ ID NO: 77467 - RNA, 21 nt, synthetic construct
  source 1..21: mol_type = other RNA
caggcgcctggacaggatccc

SEQ ID NO: 77468 - RNA, 21 nt, synthetic construct
  source 1..21: mol_type = other RNA
caggcggaatgcagtggcgtg

SEQ ID NO: 77469 - RNA, 21 nt, synthetic construct
  source 1..21: mol_type = other RNA
caggcggcagagggagcagcg

SEQ ID NO: 77470 - RNA, 21 nt, synthetic construct
  source 1..21: mol_type = other RNA
caggcgtgagccaccacgtcc

SEQ ID NO: 77471 - RNA, 21 nt, synthetic construct
  source 1..21: mol_type = other RNA
caggcgtgagccacctcatcc

SEQ ID NO: 77472 - RNA, 21 nt, synthetic construct
  source 1..21: mol_type = other RNA
caggcgtgagcctccacacct

SEQ ID NO: 77473 - RNA, 21 nt, synthetic construct
  source 1..21: mol_type = other RNA
caggcgtggtggcggatgccg

SEQ ID NO: 77474 - RNA, 21 nt, synthetic construct
  source 1..21: mol_type = other RNA
caggcgttgagccatcatgcc

SEQ ID NO: 77475 - RNA, 21 nt, synthetic construct
  source 1..21: mol_type = other RNA
caggctcaatacctgaaaagt

SEQ ID NO: 77476 - RNA, 21 nt, synthetic construct
  source 1..21: mol_type = other RNA
caggctccacttgggtggaag

SEQ ID NO: 77477 - RNA, 21 nt, synthetic construct
  source 1..21: mol_type = other RNA
caggctccaggtagaatgaaa

SEQ ID NO: 77478 - RNA, 21 nt, synthetic construct
  source 1..21: mol_type = other RNA
caggctctcttcaccaactga

SEQ ID NO: 77479 - RNA, 21 nt, synthetic construct
  source 1..21: mol_type = other RNA
caggctgaactgctgacagat

SEQ ID NO: 77480 - RNA, 21 nt, synthetic construct
  source 1..21: mol_type = other RNA
caggctgaagggaggaaaaaa

SEQ ID NO: 77481 - RNA, 21 nt, synthetic construct
  source 1..21: mol_type = other RNA
caggctgacttagagggcttc

SEQ ID NO: 77482 - RNA, 21 nt, synthetic construct
  source 1..21: mol_type = other RNA
caggctgagtgcggtggctta

SEQ ID NO: 77483 - RNA, 21 nt, synthetic construct
  source 1..21: mol_type = other RNA
caggctggaagaattttaagc

SEQ ID NO: 77484 - RNA, 21 nt, synthetic construct
  source 1..21: mol_type = other RNA
caggctggctctttccactct

SEQ ID NO: 77485 - RNA, 21 nt, synthetic construct
  source 1..21: mol_type = other RNA
caggctggtcttgtactccca

SEQ ID NO: 77486 - RNA, 21 nt, synthetic construct
  source 1..21: mol_type = other RNA
caggctggttccaaacttctg

SEQ ID NO: 77487 - RNA, 21 nt, synthetic construct
  source 1..21: mol_type = other RNA
caggcttgagtctgtgctctg

SEQ ID NO: 77488 - RNA, 21 nt, synthetic construct
  source 1..21: mol_type = other RNA
caggctttcccagggtgtagc

SEQ ID NO: 77489 - RNA, 21 nt, synthetic construct
  source 1..21: mol_type = other RNA
caggctttcctacaatacagc

SEQ ID NO: 77490 - RNA, 21 nt, synthetic construct
  source 1..21: mol_type = other RNA
caggctttgacttctcagggc

SEQ ID NO: 77491 - RNA, 21 nt, synthetic construct
  source 1..21: mol_type = other RNA
caggctttttacccggagagg

SEQ ID NO: 77492 - RNA, 21 nt, synthetic construct
  source 1..21: mol_type = other RNA
cagggaaaactacatgtaaaa

SEQ ID NO: 77493 - RNA, 21 nt, synthetic construct
  source 1..21: mol_type = other RNA
cagggaaaccttactgtaata

SEQ ID NO: 77494 - RNA, 21 nt, synthetic construct
  source 1..21: mol_type = other RNA
cagggaaatcattcaggacac

SEQ ID NO: 77495 - RNA, 21 nt, synthetic construct
  source 1..21: mol_type = other RNA
cagggaaatggagggccagag

SEQ ID NO: 77496 - RNA, 21 nt, synthetic construct
  source 1..21: mol_type = other RNA
cagggaaccgtaacttctttt

SEQ ID NO: 77497 - RNA, 21 nt, synthetic construct
  source 1..21: mol_type = other RNA
cagggaaggctgcaagcactg

SEQ ID NO: 77498 - RNA, 21 nt, synthetic construct
  source 1..21: mol_type = other RNA
cagggaatgcccctgtagcag

SEQ ID NO: 77499 - RNA, 21 nt, synthetic construct
  source 1..21: mol_type = other RNA
cagggaatggggagctagagg

SEQ ID NO: 77500 - RNA, 21 nt, synthetic construct
  source 1..21: mol_type = other RNA
cagggaccacaggcatgcgcc

SEQ ID NO: 77501 - RNA, 21 nt, synthetic construct
  source 1..21: mol_type = other RNA
cagggactacagtcacacacc

SEQ ID NO: 77502 - RNA, 21 nt, synthetic construct
  source 1..21: mol_type = other RNA
cagggactcccatatctacat

SEQ ID NO: 77503 - RNA, 21 nt, synthetic construct
  source 1..21: mol_type = other RNA
cagggactgatgaagaacctg

SEQ ID NO: 77504 - RNA, 21 nt, synthetic construct
  source 1..21: mol_type = other RNA
cagggagaattggtagtcaat

SEQ ID NO: 77505 - RNA, 21 nt, synthetic construct
  source 1..21: mol_type = other RNA
cagggagagagaaactttaca

SEQ ID NO: 77506 - RNA, 21 nt, synthetic construct
  source 1..21: mol_type = other RNA
cagggagatacttgattacaa

SEQ ID NO: 77507 - RNA, 21 nt, synthetic construct
  source 1..21: mol_type = other RNA
cagggaggaatccttcagtca

SEQ ID NO: 77508 - RNA, 21 nt, synthetic construct
  source 1..21: mol_type = other RNA
cagggaggcggaggttgcggt

SEQ ID NO: 77509 - RNA, 21 nt, synthetic construct
  source 1..21: mol_type = other RNA
cagggaggggtccccagcatc

SEQ ID NO: 77510 - RNA, 21 nt, synthetic construct
  source 1..21: mol_type = other RNA
cagggataaatcccacttgat

SEQ ID NO: 77511 - RNA, 21 nt, synthetic construct
  source 1..21: mol_type = other RNA
cagggatattggcttatagtg

SEQ ID NO: 77512 - RNA, 21 nt, synthetic construct
  source 1..21: mol_type = other RNA
cagggatattttcgtgtactg

SEQ ID NO: 77513 - RNA, 21 nt, synthetic construct
  source 1..21: mol_type = other RNA
cagggatcacagatacaactc

SEQ ID NO: 77514 - RNA, 21 nt, synthetic construct
  source 1..21: mol_type = other RNA
cagggatgctgcgagccccgg

SEQ ID NO: 77515 - RNA, 21 nt, synthetic construct
  source 1..21: mol_type = other RNA
cagggatttggccagaatccc

SEQ ID NO: 77516 - RNA, 21 nt, synthetic construct
  source 1..21: mol_type = other RNA
cagggcagggagagagaaact

SEQ ID NO: 77517 - RNA, 21 nt, synthetic construct
  source 1..21: mol_type = other RNA
cagggccactgagagctcagg

SEQ ID NO: 77518 - RNA, 21 nt, synthetic construct
  source 1..21: mol_type = other RNA
cagggccattctgctatgaaa

SEQ ID NO: 77519 - RNA, 21 nt, synthetic construct
  source 1..21: mol_type = other RNA
cagggcccagcctcaacagca

SEQ ID NO: 77520 - RNA, 21 nt, synthetic construct
  source 1..21: mol_type = other RNA
cagggcctctgaagacatgct

SEQ ID NO: 77521 - RNA, 21 nt, synthetic construct
  source 1..21: mol_type = other RNA
cagggcctgcttttggaagca

SEQ ID NO: 77522 - RNA, 21 nt, synthetic construct
  source 1..21: mol_type = other RNA
cagggccttcccaaagacatc

SEQ ID NO: 77523 - RNA, 21 nt, synthetic construct
  source 1..21: mol_type = other RNA
cagggcctttaatcacctcaa

SEQ ID NO: 77524 - RNA, 21 nt, synthetic construct
  source 1..21: mol_type = other RNA
cagggctcctccaaggctgcc

SEQ ID NO: 77525 - RNA, 21 nt, synthetic construct
  source 1..21: mol_type = other RNA
cagggctgaaaaacacctcag

SEQ ID NO: 77526 - RNA, 21 nt, synthetic construct
  source 1..21: mol_type = other RNA
cagggcttctgaaggtgcctg

SEQ ID NO: 77527 - RNA, 21 nt, synthetic construct
  source 1..21: mol_type = other RNA
cagggcttggtggcccacacc

SEQ ID NO: 77528 - RNA, 21 nt, synthetic construct
  source 1..21: mol_type = other RNA
caggggaaggagtctgcccat

SEQ ID NO: 77529 - RNA, 21 nt, synthetic construct
  source 1..21: mol_type = other RNA
caggggaaggcttcgagttct

SEQ ID NO: 77530 - RNA, 21 nt, synthetic construct
  source 1..21: mol_type = other RNA
caggggaatagaaagttagtg

SEQ ID NO: 77531 - RNA, 21 nt, synthetic construct
  source 1..21: mol_type = other RNA
caggggacatagatgaaacta

SEQ ID NO: 77532 - RNA, 21 nt, synthetic construct
  source 1..21: mol_type = other RNA
caggggacatgaaggaaggat

SEQ ID NO: 77533 - RNA, 21 nt, synthetic construct
  source 1..21: mol_type = other RNA
caggggacatgctctgatagg

SEQ ID NO: 77534 - RNA, 21 nt, synthetic construct
  source 1..21: mol_type = other RNA
caggggactttgatgttttac

SEQ ID NO: 77535 - RNA, 21 nt, synthetic construct
  source 1..21: mol_type = other RNA
caggggcattccctgtctggg

SEQ ID NO: 77536 - RNA, 21 nt, synthetic construct
  source 1..21: mol_type = other RNA
caggggctaagtagtggcagc

SEQ ID NO: 77537 - RNA, 21 nt, synthetic construct
  source 1..21: mol_type = other RNA
caggggctgcatcatggtggg

SEQ ID NO: 77538 - RNA, 21 nt, synthetic construct
  source 1..21: mol_type = other RNA
caggggctgggggatccaggg

SEQ ID NO: 77539 - RNA, 21 nt, synthetic construct
  source 1..21: mol_type = other RNA
cagggggctaaatgctcacat

SEQ ID NO: 77540 - RNA, 21 nt, synthetic construct
  source 1..21: mol_type = other RNA
caggggggaaaaaaccataaa

SEQ ID NO: 77541 - RNA, 21 nt, synthetic construct
  source 1..21: mol_type = other RNA
caggggggccactggaaacct

SEQ ID NO: 77542 - RNA, 21 nt, synthetic construct
  source 1..21: mol_type = other RNA
cagggggtatggagacactag

SEQ ID NO: 77543 - RNA, 21 nt, synthetic construct
  source 1..21: mol_type = other RNA
cagggggtcgagactgtaatg

SEQ ID NO: 77544 - RNA, 21 nt, synthetic construct
  source 1..21: mol_type = other RNA
caggggtaaaggggatggggg

SEQ ID NO: 77545 - RNA, 21 nt, synthetic construct
  source 1..21: mol_type = other RNA
caggggtggggggatgtagaa

SEQ ID NO: 77546 - RNA, 21 nt, synthetic construct
  source 1..21: mol_type = other RNA
cagggtaaagtcaattctagt

SEQ ID NO: 77547 - RNA, 21 nt, synthetic construct
  source 1..21: mol_type = other RNA
cagggtaagattccgtctcaa

SEQ ID NO: 77548 - RNA, 21 nt, synthetic construct
  source 1..21: mol_type = other RNA
cagggtaggaaaagacttctc

SEQ ID NO: 77549 - RNA, 21 nt, synthetic construct
  source 1..21: mol_type = other RNA
cagggtaggaaggcggtgggg

SEQ ID NO: 77550 - RNA, 21 nt, synthetic construct
  source 1..21: mol_type = other RNA
cagggtcacttcctctcttaa

SEQ ID NO: 77551 - RNA, 21 nt, synthetic construct
  source 1..21: mol_type = other RNA
cagggtcatgcacacgctgga

SEQ ID NO: 77552 - RNA, 21 nt, synthetic construct
  source 1..21: mol_type = other RNA
cagggtctacaaaaggtttcc

SEQ ID NO: 77553 - RNA, 21 nt, synthetic construct
  source 1..21: mol_type = other RNA
cagggtctcactcttaccaag

SEQ ID NO: 77554 - RNA, 21 nt, synthetic construct
  source 1..21: mol_type = other RNA
cagggtctgtctcacctcaag

SEQ ID NO: 77555 - RNA, 21 nt, synthetic construct
  source 1..21: mol_type = other RNA
cagggtcttgctctgtcaccc

SEQ ID NO: 77556 - RNA, 21 nt, synthetic construct
  source 1..21: mol_type = other RNA
cagggtgaaacttgaatactc

SEQ ID NO: 77557 - RNA, 21 nt, synthetic construct
  source 1..21: mol_type = other RNA
cagggtgcgacctcgaagcac

SEQ ID NO: 77558 - RNA, 21 nt, synthetic construct
  source 1..21: mol_type = other RNA
cagggtggagtccaaccaatc

SEQ ID NO: 77559 - RNA, 21 nt, synthetic construct
  source 1..21: mol_type = other RNA
cagggtgtagccacaagccac

SEQ ID NO: 77560 - RNA, 21 nt, synthetic construct
  source 1..21: mol_type = other RNA
cagggttacagtataggggaa

SEQ ID NO: 77561 - RNA, 21 nt, synthetic construct
  source 1..21: mol_type = other RNA
cagggttattaacataccgac

SEQ ID NO: 77562 - RNA, 21 nt, synthetic construct
  source 1..21: mol_type = other RNA
cagggtttctgtttggatgaa

SEQ ID NO: 77563 - RNA, 21 nt, synthetic construct
  source 1..21: mol_type = other RNA
cagggttttgttttgtttttt

SEQ ID NO: 77564 - RNA, 21 nt, synthetic construct
  source 1..21: mol_type = other RNA
caggtagaatgaaaatttttg

SEQ ID NO: 77565 - RNA, 21 nt, synthetic construct
  source 1..21: mol_type = other RNA
caggtagacatgagtaaaaag

SEQ ID NO: 77566 - RNA, 21 nt, synthetic construct
  source 1..21: mol_type = other RNA
caggtagacatgtgccatgtt

SEQ ID NO: 77567 - RNA, 21 nt, synthetic construct
  source 1..21: mol_type = other RNA
caggtagctgctttttaaaaa

SEQ ID NO: 77568 - RNA, 21 nt, synthetic construct
  source 1..21: mol_type = other RNA
caggtagggaggggtattcag

SEQ ID NO: 77569 - RNA, 21 nt, synthetic construct
  source 1..21: mol_type = other RNA
caggtataaagtttccgtttt

SEQ ID NO: 77570 - RNA, 21 nt, synthetic construct
  source 1..21: mol_type = other RNA
caggtatggcgactcatgcct

SEQ ID NO: 77571 - RNA, 21 nt, synthetic construct
  source 1..21: mol_type = other RNA
caggtattgagcctgttccga

SEQ ID NO: 77572 - RNA, 21 nt, synthetic construct
  source 1..21: mol_type = other RNA
caggtatttctaaatcaacag

SEQ ID NO: 77573 - RNA, 21 nt, synthetic construct
  source 1..21: mol_type = other RNA
caggtattttgttctctttga

SEQ ID NO: 77574 - RNA, 21 nt, synthetic construct
  source 1..21: mol_type = other RNA
caggtcaaactcacttattag

SEQ ID NO: 77575 - RNA, 21 nt, synthetic construct
  source 1..21: mol_type = other RNA
caggtcacattctgcctgcag

SEQ ID NO: 77576 - RNA, 21 nt, synthetic construct
  source 1..21: mol_type = other RNA
caggtcacctagcctctctgg

SEQ ID NO: 77577 - RNA, 21 nt, synthetic construct
  source 1..21: mol_type = other RNA
caggtcagccagaggaagctt

SEQ ID NO: 77578 - RNA, 21 nt, synthetic construct
  source 1..21: mol_type = other RNA
caggtcagtagtacagtgagt

SEQ ID NO: 77579 - RNA, 21 nt, synthetic construct
  source 1..21: mol_type = other RNA
caggtcatgacttttttgccc

SEQ ID NO: 77580 - RNA, 21 nt, synthetic construct
  source 1..21: mol_type = other RNA
caggtcattacatattttgta

SEQ ID NO: 77581 - RNA, 21 nt, synthetic construct
  source 1..21: mol_type = other RNA
caggtcggaaggaatgtgctt

SEQ ID NO: 77582 - RNA, 21 nt, synthetic construct
  source 1..21: mol_type = other RNA
caggtctatgtgacagaatgc

SEQ ID NO: 77583 - RNA, 21 nt, synthetic construct
  source 1..21: mol_type = other RNA
caggtctctctgaaattagct

SEQ ID NO: 77584 - RNA, 21 nt, synthetic construct
  source 1..21: mol_type = other RNA
caggtctctttgaaaggaatc

SEQ ID NO: 77585 - RNA, 21 nt, synthetic construct
  source 1..21: mol_type = other RNA
caggtcttcaacctcaacttt

SEQ ID NO: 77586 - RNA, 21 nt, synthetic construct
  source 1..21: mol_type = other RNA
caggtgagtggactgtgaggg

SEQ ID NO: 77587 - RNA, 21 nt, synthetic construct
  source 1..21: mol_type = other RNA
caggtgcctcctgcctcagcc

SEQ ID NO: 77588 - RNA, 21 nt, synthetic construct
  source 1..21: mol_type = other RNA
caggtgcttacagactgatta

SEQ ID NO: 77589 - RNA, 21 nt, synthetic construct
  source 1..21: mol_type = other RNA
caggtggaaggcctgatagct

SEQ ID NO: 77590 - RNA, 21 nt, synthetic construct
  source 1..21: mol_type = other RNA
caggtggatatctgaggtcag

SEQ ID NO: 77591 - RNA, 21 nt, synthetic construct
  source 1..21: mol_type = other RNA
caggtggatcaggagattgag

SEQ ID NO: 77592 - RNA, 21 nt, synthetic construct
  source 1..21: mol_type = other RNA
caggtgggcactgggagccct

SEQ ID NO: 77593 - RNA, 21 nt, synthetic construct
  source 1..21: mol_type = other RNA
caggtggtatgggagatgtgt

SEQ ID NO: 77594 - RNA, 21 nt, synthetic construct
  source 1..21: mol_type = other RNA
caggtggtatttaatctgtca

SEQ ID NO: 77595 - RNA, 21 nt, synthetic construct
  source 1..21: mol_type = other RNA
caggtggttctgcctaatctc

SEQ ID NO: 77596 - RNA, 21 nt, synthetic construct
  source 1..21: mol_type = other RNA
caggtgtaagagattaattca

SEQ ID NO: 77597 - RNA, 21 nt, synthetic construct
  source 1..21: mol_type = other RNA
caggtgtatgatcttattaat

SEQ ID NO: 77598 - RNA, 21 nt, synthetic construct
  source 1..21: mol_type = other RNA
caggtgtcactggatagaagt

SEQ ID NO: 77599 - RNA, 21 nt, synthetic construct
  source 1..21: mol_type = other RNA
caggtgtgaaccacgcatctg

SEQ ID NO: 77600 - RNA, 21 nt, synthetic construct
  source 1..21: mol_type = other RNA
caggtgtgagattgatagatc

SEQ ID NO: 77601 - RNA, 21 nt, synthetic construct
  source 1..21: mol_type = other RNA
caggtgtgagccaccgtgccg

SEQ ID NO: 77602 - RNA, 21 nt, synthetic construct
  source 1..21: mol_type = other RNA
caggtgtgggccaccaagccc

SEQ ID NO: 77603 - RNA, 21 nt, synthetic construct
  source 1..21: mol_type = other RNA
caggtgtgtaaacactgttct

SEQ ID NO: 77604 - RNA, 21 nt, synthetic construct
  source 1..21: mol_type = other RNA
caggtgttggtgcatttggga

SEQ ID NO: 77605 - RNA, 21 nt, synthetic construct
  source 1..21: mol_type = other RNA
caggttcatccatgttgttga

SEQ ID NO: 77606 - RNA, 21 nt, synthetic construct
  source 1..21: mol_type = other RNA
caggttcatgtgtgcttacac

SEQ ID NO: 77607 - RNA, 21 nt, synthetic construct
  source 1..21: mol_type = other RNA
caggttcattttaataagctt

SEQ ID NO: 77608 - RNA, 21 nt, synthetic construct
  source 1..21: mol_type = other RNA
caggttcttcatcagtccctg

SEQ ID NO: 77609 - RNA, 21 nt, synthetic construct
  source 1..21: mol_type = other RNA
caggttgatactagtttagtg

SEQ ID NO: 77610 - RNA, 21 nt, synthetic construct
  source 1..21: mol_type = other RNA
caggttgcattaatgcttcat

SEQ ID NO: 77611 - RNA, 21 nt, synthetic construct
  source 1..21: mol_type = other RNA
caggttgggcttatcagatgg

SEQ ID NO: 77612 - RNA, 21 nt, synthetic construct
  source 1..21: mol_type = other RNA
caggtttacaggatatcagaa

SEQ ID NO: 77613 - RNA, 21 nt, synthetic construct
  source 1..21: mol_type = other RNA
caggtttactccaagaaggct

SEQ ID NO: 77614 - RNA, 21 nt, synthetic construct
  source 1..21: mol_type = other RNA
caggtttaggaagcacattcc

SEQ ID NO: 77615 - RNA, 21 nt, synthetic construct
  source 1..21: mol_type = other RNA
caggtttaggtttttcttgtg

SEQ ID NO: 77616 - RNA, 21 nt, synthetic construct
  source 1..21: mol_type = other RNA
caggtttcaagtgaaccaaaa

SEQ ID NO: 77617 - RNA, 21 nt, synthetic construct
  source 1..21: mol_type = other RNA
caggtttgtgcttggatattc

SEQ ID NO: 77618 - RNA, 21 nt, synthetic construct
  source 1..21: mol_type = other RNA
caggttttatctctctcaagc

SEQ ID NO: 77619 - RNA, 21 nt, synthetic construct
  source 1..21: mol_type = other RNA
caggttttcgaccaagttact

SEQ ID NO: 77620 - RNA, 21 nt, synthetic construct
  source 1..21: mol_type = other RNA
caggttttggtaatgggaaag

SEQ ID NO: 77621 - RNA, 21 nt, synthetic construct
  source 1..21: mol_type = other RNA
cagtaaaaaaggaccatctgt

SEQ ID NO: 77622 - RNA, 21 nt, synthetic construct
  source 1..21: mol_type = other RNA
cagtaaaattcccttcagtgt

SEQ ID NO: 77623 - RNA, 21 nt, synthetic construct
  source 1..21: mol_type = other RNA
cagtaaagccccattgtacac

SEQ ID NO: 77624 - RNA, 21 nt, synthetic construct
  source 1..21: mol_type = other RNA
cagtaaagtcactgtggaaaa

SEQ ID NO: 77625 - RNA, 21 nt, synthetic construct
  source 1..21: mol_type = other RNA
cagtaaatatactgactagtg

SEQ ID NO: 77626 - RNA, 21 nt, synthetic construct
  source 1..21: mol_type = other RNA
cagtaaatgaaatttgaggcc

SEQ ID NO: 77627 - RNA, 21 nt, synthetic construct
  source 1..21: mol_type = other RNA
cagtaaatgcctacattaaaa

SEQ ID NO: 77628 - RNA, 21 nt, synthetic construct
  source 1..21: mol_type = other RNA
cagtaacaaataagaagattg

SEQ ID NO: 77629 - RNA, 21 nt, synthetic construct
  source 1..21: mol_type = other RNA
cagtaagaaaacagataacct

SEQ ID NO: 77630 - RNA, 21 nt, synthetic construct
  source 1..21: mol_type = other RNA
cagtaagatcctggattgcta

SEQ ID NO: 77631 - RNA, 21 nt, synthetic construct
  source 1..21: mol_type = other RNA
cagtaagattctgtctctaca

SEQ ID NO: 77632 - RNA, 21 nt, synthetic construct
  source 1..21: mol_type = other RNA
cagtaaggtttccctggggaa

SEQ ID NO: 77633 - RNA, 21 nt, synthetic construct
  source 1..21: mol_type = other RNA
cagtaatcaaacagtgtgata

SEQ ID NO: 77634 - RNA, 21 nt, synthetic construct
  source 1..21: mol_type = other RNA
cagtaatcttgctaaacatgt

SEQ ID NO: 77635 - RNA, 21 nt, synthetic construct
  source 1..21: mol_type = other RNA
cagtaattagttacatgaggt

SEQ ID NO: 77636 - RNA, 21 nt, synthetic construct
  source 1..21: mol_type = other RNA
cagtaattctgcagtgaacat

SEQ ID NO: 77637 - RNA, 21 nt, synthetic construct
  source 1..21: mol_type = other RNA
cagtaattgtagtttccatgg

SEQ ID NO: 77638 - RNA, 21 nt, synthetic construct
  source 1..21: mol_type = other RNA
cagtacaaggctagagctcac

SEQ ID NO: 77639 - RNA, 21 nt, synthetic construct
  source 1..21: mol_type = other RNA
cagtacacgaaaatatccctg

SEQ ID NO: 77640 - RNA, 21 nt, synthetic construct
  source 1..21: mol_type = other RNA
cagtacagtagtaaaaccaaa

SEQ ID NO: 77641 - RNA, 21 nt, synthetic construct
  source 1..21: mol_type = other RNA
cagtacatctcaattcagaag

SEQ ID NO: 77642 - RNA, 21 nt, synthetic construct
  source 1..21: mol_type = other RNA
cagtaccattccccttgccaa

SEQ ID NO: 77643 - RNA, 21 nt, synthetic construct
  source 1..21: mol_type = other RNA
cagtacgcttttatgttataa

SEQ ID NO: 77644 - RNA, 21 nt, synthetic construct
  source 1..21: mol_type = other RNA
cagtactatcttccctaaaga

SEQ ID NO: 77645 - RNA, 21 nt, synthetic construct
  source 1..21: mol_type = other RNA
cagtacttccctctttctcaa

SEQ ID NO: 77646 - RNA, 21 nt, synthetic construct
  source 1..21: mol_type = other RNA
cagtacttgtctttttgtgac

SEQ ID NO: 77647 - RNA, 21 nt, synthetic construct
  source 1..21: mol_type = other RNA
cagtactttttcatccaaaca

SEQ ID NO: 77648 - RNA, 21 nt, synthetic construct
  source 1..21: mol_type = other RNA
cagtagaaatcttccagaagg

SEQ ID NO: 77649 - RNA, 21 nt, synthetic construct
  source 1..21: mol_type = other RNA
cagtagaagactcagcagttt

SEQ ID NO: 77650 - RNA, 21 nt, synthetic construct
  source 1..21: mol_type = other RNA
cagtagaggccgagggttgaa

SEQ ID NO: 77651 - RNA, 21 nt, synthetic construct
  source 1..21: mol_type = other RNA
cagtagccaaaggtagaaaca

SEQ ID NO: 77652 - RNA, 21 nt, synthetic construct
  source 1..21: mol_type = other RNA
cagtagctcatcatttatacc

SEQ ID NO: 77653 - RNA, 21 nt, synthetic construct
  source 1..21: mol_type = other RNA
cagtaggcttagataggatgg

SEQ ID NO: 77654 - RNA, 21 nt, synthetic construct
  source 1..21: mol_type = other RNA
cagtagtaaaaccaaatgtgg

SEQ ID NO: 77655 - RNA, 21 nt, synthetic construct
  source 1..21: mol_type = other RNA
cagtagtaaagcaaatgtgac

SEQ ID NO: 77656 - RNA, 21 nt, synthetic construct
  source 1..21: mol_type = other RNA
cagtagtacagtgagtagaag

SEQ ID NO: 77657 - RNA, 21 nt, synthetic construct
  source 1..21: mol_type = other RNA
cagtagtattgaactgttact

SEQ ID NO: 77658 - RNA, 21 nt, synthetic construct
  source 1..21: mol_type = other RNA
cagtagtttgctagtggtaac

SEQ ID NO: 77659 - RNA, 21 nt, synthetic construct
  source 1..21: mol_type = other RNA
cagtataggggaactcttgta

SEQ ID NO: 77660 - RNA, 21 nt, synthetic construct
  source 1..21: mol_type = other RNA
cagtatatattttctaagagc

SEQ ID NO: 77661 - RNA, 21 nt, synthetic construct
  source 1..21: mol_type = other RNA
cagtatattcatagtagctgt

SEQ ID NO: 77662 - RNA, 21 nt, synthetic construct
  source 1..21: mol_type = other RNA
cagtatatttactgcttgctg

SEQ ID NO: 77663 - RNA, 21 nt, synthetic construct
  source 1..21: mol_type = other RNA
cagtatcctttcaaggtatct

SEQ ID NO: 77664 - RNA, 21 nt, synthetic construct
  source 1..21: mol_type = other RNA
cagtatctcctttccttcctt

SEQ ID NO: 77665 - RNA, 21 nt, synthetic construct
  source 1..21: mol_type = other RNA
cagtatcttgaagaaaccaag

SEQ ID NO: 77666 - RNA, 21 nt, synthetic construct
  source 1..21: mol_type = other RNA
cagtatgaatgcacgtgaagc

SEQ ID NO: 77667 - RNA, 21 nt, synthetic construct
  source 1..21: mol_type = other RNA
cagtatgacctcctcccactt

SEQ ID NO: 77668 - RNA, 21 nt, synthetic construct
  source 1..21: mol_type = other RNA
cagtatgatgccactcaaaac

SEQ ID NO: 77669 - RNA, 21 nt, synthetic construct
  source 1..21: mol_type = other RNA
cagtatgcacaaataattaac

SEQ ID NO: 77670 - RNA, 21 nt, synthetic construct
  source 1..21: mol_type = other RNA
cagtatgcatagatcacaagg

SEQ ID NO: 77671 - RNA, 21 nt, synthetic construct
  source 1..21: mol_type = other RNA
cagtatgcggggtttcagcac

SEQ ID NO: 77672 - RNA, 21 nt, synthetic construct
  source 1..21: mol_type = other RNA
cagtatgctgtttacattaga

SEQ ID NO: 77673 - RNA, 21 nt, synthetic construct
  source 1..21: mol_type = other RNA
cagtatgtaggaaactttgca

SEQ ID NO: 77674 - RNA, 21 nt, synthetic construct
  source 1..21: mol_type = other RNA
cagtatgtcagactcattgcc

SEQ ID NO: 77675 - RNA, 21 nt, synthetic construct
  source 1..21: mol_type = other RNA
cagtatgtgccatttttataa

SEQ ID NO: 77676 - RNA, 21 nt, synthetic construct
  source 1..21: mol_type = other RNA
cagtatgtgtctctgacatga

SEQ ID NO: 77677 - RNA, 21 nt, synthetic construct
  source 1..21: mol_type = other RNA
cagtattacacagaaagcctc

SEQ ID NO: 77678 - RNA, 21 nt, synthetic construct
  source 1..21: mol_type = other RNA
cagtattgtcttctaaccctc

SEQ ID NO: 77679 - RNA, 21 nt, synthetic construct
  source 1..21: mol_type = other RNA
cagtattgtgctgaaaccccg

SEQ ID NO: 77680 - RNA, 21 nt, synthetic construct
  source 1..21: mol_type = other RNA
cagtattgttaactgtagaga

SEQ ID NO: 77681 - RNA, 21 nt, synthetic construct
  source 1..21: mol_type = other RNA
cagtcaacacactagccactg

SEQ ID NO: 77682 - RNA, 21 nt, synthetic construct
  source 1..21: mol_type = other RNA
cagtcaacaccaagcaacact

SEQ ID NO: 77683 - RNA, 21 nt, synthetic construct
  source 1..21: mol_type = other RNA
cagtcacaaagctttaaactg

SEQ ID NO: 77684 - RNA, 21 nt, synthetic construct
  source 1..21: mol_type = other RNA
cagtcacacaccactacaccc

SEQ ID NO: 77685 - RNA, 21 nt, synthetic construct
  source 1..21: mol_type = other RNA
cagtcaccaaacgtttagatg

SEQ ID NO: 77686 - RNA, 21 nt, synthetic construct
  source 1..21: mol_type = other RNA
cagtcactaaaaatcagatta

SEQ ID NO: 77687 - RNA, 21 nt, synthetic construct
  source 1..21: mol_type = other RNA
cagtcagtgatggaggtggaa

SEQ ID NO: 77688 - RNA, 21 nt, synthetic construct
  source 1..21: mol_type = other RNA
cagtcagttctctgccccggg

SEQ ID NO: 77689 - RNA, 21 nt, synthetic construct
  source 1..21: mol_type = other RNA
cagtcataatttgtgtccttt

SEQ ID NO: 77690 - RNA, 21 nt, synthetic construct
  source 1..21: mol_type = other RNA
cagtcatcacagtccaggaac

SEQ ID NO: 77691 - RNA, 21 nt, synthetic construct
  source 1..21: mol_type = other RNA
cagtcatcctcaacaagagag

SEQ ID NO: 77692 - RNA, 21 nt, synthetic construct
  source 1..21: mol_type = other RNA
cagtcatgtggggactttgtg

SEQ ID NO: 77693 - RNA, 21 nt, synthetic construct
  source 1..21: mol_type = other RNA
cagtcattcaggtctatgtga

SEQ ID NO: 77694 - RNA, 21 nt, synthetic construct
  source 1..21: mol_type = other RNA
cagtccactcacctgtcatgt

SEQ ID NO: 77695 - RNA, 21 nt, synthetic construct
  source 1..21: mol_type = other RNA
cagtccagatattatcctcca

SEQ ID NO: 77696 - RNA, 21 nt, synthetic construct
  source 1..21: mol_type = other RNA
cagtccagcaccacccttgat

SEQ ID NO: 77697 - RNA, 21 nt, synthetic construct
  source 1..21: mol_type = other RNA
cagtccaggaacttacagtaa

SEQ ID NO: 77698 - RNA, 21 nt, synthetic construct
  source 1..21: mol_type = other RNA
cagtcccaaatgggagcatgc

SEQ ID NO: 77699 - RNA, 21 nt, synthetic construct
  source 1..21: mol_type = other RNA
cagtcccactgacagtggaca

SEQ ID NO: 77700 - RNA, 21 nt, synthetic construct
  source 1..21: mol_type = other RNA
cagtccccggtctttcctgat

SEQ ID NO: 77701 - RNA, 21 nt, synthetic construct
  source 1..21: mol_type = other RNA
cagtccctagtgtctccatac

SEQ ID NO: 77702 - RNA, 21 nt, synthetic construct
  source 1..21: mol_type = other RNA
cagtccctcaccttctgctgg

SEQ ID NO: 77703 - RNA, 21 nt, synthetic construct
  source 1..21: mol_type = other RNA
cagtccctcctttctagaatg

SEQ ID NO: 77704 - RNA, 21 nt, synthetic construct
  source 1..21: mol_type = other RNA
cagtcccttgcctgacagcaa

SEQ ID NO: 77705 - RNA, 21 nt, synthetic construct
  source 1..21: mol_type = other RNA
cagtcctctactttcacataa

SEQ ID NO: 77706 - RNA, 21 nt, synthetic construct
  source 1..21: mol_type = other RNA
cagtcctctcactccaaagca

SEQ ID NO: 77707 - RNA, 21 nt, synthetic construct
  source 1..21: mol_type = other RNA
cagtcctgccttggcctcccc

SEQ ID NO: 77708 - RNA, 21 nt, synthetic construct
  source 1..21: mol_type = other RNA
cagtcctgctaacaccttgaa

SEQ ID NO: 77709 - RNA, 21 nt, synthetic construct
  source 1..21: mol_type = other RNA
cagtcctgtgtttctgctatt

SEQ ID NO: 77710 - RNA, 21 nt, synthetic construct
  source 1..21: mol_type = other RNA
cagtccttaccactgaagtgt

SEQ ID NO: 77711 - RNA, 21 nt, synthetic construct
  source 1..21: mol_type = other RNA
cagtccttgtgatctatgcat

SEQ ID NO: 77712 - RNA, 21 nt, synthetic construct
  source 1..21: mol_type = other RNA
cagtcctttgggaggtcaagg

SEQ ID NO: 77713 - RNA, 21 nt, synthetic construct
  source 1..21: mol_type = other RNA
cagtcctttgtgtcaagtaca

SEQ ID NO: 77714 - RNA, 21 nt, synthetic construct
  source 1..21: mol_type = other RNA
cagtcggttcttcaccgtgca

SEQ ID NO: 77715 - RNA, 21 nt, synthetic construct
  source 1..21: mol_type = other RNA
cagtctaaccattaacagctc

SEQ ID NO: 77716 - RNA, 21 nt, synthetic construct
  source 1..21: mol_type = other RNA
cagtctaggaaaagacttgag

SEQ ID NO: 77717 - RNA, 21 nt, synthetic construct
  source 1..21: mol_type = other RNA
cagtctagtccatgaagaaaa

SEQ ID NO: 77718 - RNA, 21 nt, synthetic construct
  source 1..21: mol_type = other RNA
cagtctcaaactcctgcactc

SEQ ID NO: 77719 - RNA, 21 nt, synthetic construct
  source 1..21: mol_type = other RNA
cagtctccaatcctcagcccc

SEQ ID NO: 77720 - RNA, 21 nt, synthetic construct
  source 1..21: mol_type = other RNA
cagtctcccccaggtggttct

SEQ ID NO: 77721 - RNA, 21 nt, synthetic construct
  source 1..21: mol_type = other RNA
cagtctcgaaaaggaatggaa

SEQ ID NO: 77722 - RNA, 21 nt, synthetic construct
  source 1..21: mol_type = other RNA
cagtctcgaccccctgggctc

SEQ ID NO: 77723 - RNA, 21 nt, synthetic construct
  source 1..21: mol_type = other RNA
cagtctcgtgaatttggtatt

SEQ ID NO: 77724 - RNA, 21 nt, synthetic construct
  source 1..21: mol_type = other RNA
cagtctctacccagcactctg

SEQ ID NO: 77725 - RNA, 21 nt, synthetic construct
  source 1..21: mol_type = other RNA
cagtctctgcaacatttgttg

SEQ ID NO: 77726 - RNA, 21 nt, synthetic construct
  source 1..21: mol_type = other RNA
cagtctctgcagagcaggctc

SEQ ID NO: 77727 - RNA, 21 nt, synthetic construct
  source 1..21: mol_type = other RNA
cagtctctgctcactgcaacc

SEQ ID NO: 77728 - RNA, 21 nt, synthetic construct
  source 1..21: mol_type = other RNA
cagtctgcaggcagaatgtga

SEQ ID NO: 77729 - RNA, 21 nt, synthetic construct
  source 1..21: mol_type = other RNA
cagtctgtaagcacctgtata

SEQ ID NO: 77730 - RNA, 21 nt, synthetic construct
  source 1..21: mol_type = other RNA
cagtctgtcctcgtaaaagct

SEQ ID NO: 77731 - RNA, 21 nt, synthetic construct
  source 1..21: mol_type = other RNA
cagtctgtgcttaaggaaatg

SEQ ID NO: 77732 - RNA, 21 nt, synthetic construct
  source 1..21: mol_type = other RNA
cagtctgtttgccatcttcaa

SEQ ID NO: 77733 - RNA, 21 nt, synthetic construct
  source 1..21: mol_type = other RNA
cagtcttaaccattgagccaa

SEQ ID NO: 77734 - RNA, 21 nt, synthetic construct
  source 1..21: mol_type = other RNA
cagtcttcaggtctctctgaa

SEQ ID NO: 77735 - RNA, 21 nt, synthetic construct
  source 1..21: mol_type = other RNA
cagtcttctcatacagatttt

SEQ ID NO: 77736 - RNA, 21 nt, synthetic construct
  source 1..21: mol_type = other RNA
cagtcttggtagtttgcacgt

SEQ ID NO: 77737 - RNA, 21 nt, synthetic construct
  source 1..21: mol_type = other RNA
cagtgaaagtctccctaacca

SEQ ID NO: 77738 - RNA, 21 nt, synthetic construct
  source 1..21: mol_type = other RNA
cagtgaacatgggaatgcata

SEQ ID NO: 77739 - RNA, 21 nt, synthetic construct
  source 1..21: mol_type = other RNA
cagtgaactccagtctgggca

SEQ ID NO: 77740 - RNA, 21 nt, synthetic construct
  source 1..21: mol_type = other RNA
cagtgaagatgctgaacttgt

SEQ ID NO: 77741 - RNA, 21 nt, synthetic construct
  source 1..21: mol_type = other RNA
cagtgaagtcatctggtcctg

SEQ ID NO: 77742 - RNA, 21 nt, synthetic construct
  source 1..21: mol_type = other RNA
cagtgaatatcatttgaatga

SEQ ID NO: 77743 - RNA, 21 nt, synthetic construct
  source 1..21: mol_type = other RNA
cagtgaattctgacttagtga

SEQ ID NO: 77744 - RNA, 21 nt, synthetic construct
  source 1..21: mol_type = other RNA
cagtgacacctgaggggtctt

SEQ ID NO: 77745 - RNA, 21 nt, synthetic construct
  source 1..21: mol_type = other RNA
cagtgacagttctgtgaattt

SEQ ID NO: 77746 - RNA, 21 nt, synthetic construct
  source 1..21: mol_type = other RNA
cagtgacatatgccggctgtt

SEQ ID NO: 77747 - RNA, 21 nt, synthetic construct
  source 1..21: mol_type = other RNA
cagtgaccacagtttgaaact

SEQ ID NO: 77748 - RNA, 21 nt, synthetic construct
  source 1..21: mol_type = other RNA
cagtgaccagtgtgatggggg

SEQ ID NO: 77749 - RNA, 21 nt, synthetic construct
  source 1..21: mol_type = other RNA
cagtgactttactgttctcca

SEQ ID NO: 77750 - RNA, 21 nt, synthetic construct
  source 1..21: mol_type = other RNA
cagtgagcatgctgcaactga

SEQ ID NO: 77751 - RNA, 21 nt, synthetic construct
  source 1..21: mol_type = other RNA
cagtgagcccagagatcccac

SEQ ID NO: 77752 - RNA, 21 nt, synthetic construct
  source 1..21: mol_type = other RNA
cagtgaggacgctgatgacag

SEQ ID NO: 77753 - RNA, 21 nt, synthetic construct
  source 1..21: mol_type = other RNA
cagtgagtagaagagtaatgg

SEQ ID NO: 77754 - RNA, 21 nt, synthetic construct
  source 1..21: mol_type = other RNA
cagtgagtagggaaggtgccc

SEQ ID NO: 77755 - RNA, 21 nt, synthetic construct
  source 1..21: mol_type = other RNA
cagtgagtgatgaaaagagca

SEQ ID NO: 77756 - RNA, 21 nt, synthetic construct
  source 1..21: mol_type = other RNA
cagtgagttcaaatgttaagc

SEQ ID NO: 77757 - RNA, 21 nt, synthetic construct
  source 1..21: mol_type = other RNA
cagtgatggaggtggaactct

SEQ ID NO: 77758 - RNA, 21 nt, synthetic construct
  source 1..21: mol_type = other RNA
cagtgattggatatttgcagt

SEQ ID NO: 77759 - RNA, 21 nt, synthetic construct
  source 1..21: mol_type = other RNA
cagtgcaaacctcctggtttt

SEQ ID NO: 77760 - RNA, 21 nt, synthetic construct
  source 1..21: mol_type = other RNA
cagtgcagcaagcagtaaata

SEQ ID NO: 77761 - RNA, 21 nt, synthetic construct
  source 1..21: mol_type = other RNA
cagtgcataccaccacattcg

SEQ ID NO: 77762 - RNA, 21 nt, synthetic construct
  source 1..21: mol_type = other RNA
cagtgccaacacatggggcat

SEQ ID NO: 77763 - RNA, 21 nt, synthetic construct
  source 1..21: mol_type = other RNA
cagtgcccacctgacaagtag

SEQ ID NO: 77764 - RNA, 21 nt, synthetic construct
  source 1..21: mol_type = other RNA
cagtgccttcagctatggtgt

SEQ ID NO: 77765 - RNA, 21 nt, synthetic construct
  source 1..21: mol_type = other RNA
cagtgctccatagcttcctaa

SEQ ID NO: 77766 - RNA, 21 nt, synthetic construct
  source 1..21: mol_type = other RNA
cagtgctctcccccgaatcct

SEQ ID NO: 77767 - RNA, 21 nt, synthetic construct
  source 1..21: mol_type = other RNA
cagtgctgaaagctagaagac

SEQ ID NO: 77768 - RNA, 21 nt, synthetic construct
  source 1..21: mol_type = other RNA
cagtgctgctctgacgtttaa

SEQ ID NO: 77769 - RNA, 21 nt, synthetic construct
  source 1..21: mol_type = other RNA
cagtgctgtgccagtgcaaac

SEQ ID NO: 77770 - RNA, 21 nt, synthetic construct
  source 1..21: mol_type = other RNA
cagtgcttagcgctggaggtc

SEQ ID NO: 77771 - RNA, 21 nt, synthetic construct
  source 1..21: mol_type = other RNA
cagtgcttgcagccttccctg

SEQ ID NO: 77772 - RNA, 21 nt, synthetic construct
  source 1..21: mol_type = other RNA
cagtggatgactaggctcctg

SEQ ID NO: 77773 - RNA, 21 nt, synthetic construct
  source 1..21: mol_type = other RNA
cagtggccagtgaccagtgtg

SEQ ID NO: 77774 - RNA, 21 nt, synthetic construct
  source 1..21: mol_type = other RNA
cagtggcccccctgaaaaatg

SEQ ID NO: 77775 - RNA, 21 nt, synthetic construct
  source 1..21: mol_type = other RNA
cagtggccctgttggcctgga

SEQ ID NO: 77776 - RNA, 21 nt, synthetic construct
  source 1..21: mol_type = other RNA
cagtggcgcagccatggctca

SEQ ID NO: 77777 - RNA, 21 nt, synthetic construct
  source 1..21: mol_type = other RNA
cagtggcgtgtgcccaggctg

SEQ ID NO: 77778 - RNA, 21 nt, synthetic construct
  source 1..21: mol_type = other RNA
cagtggctagtgtgttgactg

SEQ ID NO: 77779 - RNA, 21 nt, synthetic construct
  source 1..21: mol_type = other RNA
cagtggcttcctaactggtct

SEQ ID NO: 77780 - RNA, 21 nt, synthetic construct
  source 1..21: mol_type = other RNA
cagtgggaagtggagtgcgag

SEQ ID NO: 77781 - RNA, 21 nt, synthetic construct
  source 1..21: mol_type = other RNA
cagtgggactggagaacagta

SEQ ID NO: 77782 - RNA, 21 nt, synthetic construct
  source 1..21: mol_type = other RNA
cagtgggtcagctagtgtgtc

SEQ ID NO: 77783 - RNA, 21 nt, synthetic construct
  source 1..21: mol_type = other RNA
cagtgggttcaattatgtgga

SEQ ID NO: 77784 - RNA, 21 nt, synthetic construct
  source 1..21: mol_type = other RNA
cagtggtaaggactgaagtcc

SEQ ID NO: 77785 - RNA, 21 nt, synthetic construct
  source 1..21: mol_type = other RNA
cagtggtagttacacaagtgt

SEQ ID NO: 77786 - RNA, 21 nt, synthetic construct
  source 1..21: mol_type = other RNA
cagtggtgcaatcacggctga

SEQ ID NO: 77787 - RNA, 21 nt, synthetic construct
  source 1..21: mol_type = other RNA
cagtggtgcttttgctgcatc

SEQ ID NO: 77788 - RNA, 21 nt, synthetic construct
  source 1..21: mol_type = other RNA
cagtggtgtggtcttgtctca

SEQ ID NO: 77789 - RNA, 21 nt, synthetic construct
  source 1..21: mol_type = other RNA
cagtggttaggaaaatacatg

SEQ ID NO: 77790 - RNA, 21 nt, synthetic construct
  source 1..21: mol_type = other RNA
cagtggttccatttgttttgt

SEQ ID NO: 77791 - RNA, 21 nt, synthetic construct
  source 1..21: mol_type = other RNA
cagtggttctgcgtgttattt

SEQ ID NO: 77792 - RNA, 21 nt, synthetic construct
  source 1..21: mol_type = other RNA
cagtggttggaaaacttttaa

SEQ ID NO: 77793 - RNA, 21 nt, synthetic construct
  source 1..21: mol_type = other RNA
cagtggttgtgcttcgaggtc

SEQ ID NO: 77794 - RNA, 21 nt, synthetic construct
  source 1..21: mol_type = other RNA
cagtggttgtggaattaactc

SEQ ID NO: 77795 - RNA, 21 nt, synthetic construct
  source 1..21: mol_type = other RNA
cagtgtactagtctccataca

SEQ ID NO: 77796 - RNA, 21 nt, synthetic construct
  source 1..21: mol_type = other RNA
cagtgtagtcagacacactag

SEQ ID NO: 77797 - RNA, 21 nt, synthetic construct
  source 1..21: mol_type = other RNA
cagtgtccatctcccatcact

SEQ ID NO: 77798 - RNA, 21 nt, synthetic construct
  source 1..21: mol_type = other RNA
cagtgtcctgaatgatttccc

SEQ ID NO: 77799 - RNA, 21 nt, synthetic construct
  source 1..21: mol_type = other RNA
cagtgtctgctacaggggcat

SEQ ID NO: 77800 - RNA, 21 nt, synthetic construct
  source 1..21: mol_type = other RNA
cagtgtgaaagtattaaaagc

SEQ ID NO: 77801 - RNA, 21 nt, synthetic construct
  source 1..21: mol_type = other RNA
cagtgtgaataggaaagtgac

SEQ ID NO: 77802 - RNA, 21 nt, synthetic construct
  source 1..21: mol_type = other RNA
cagtgtgatgggggtaagatt

SEQ ID NO: 77803 - RNA, 21 nt, synthetic construct
  source 1..21: mol_type = other RNA
cagtgtggttcatatttccct

SEQ ID NO: 77804 - RNA, 21 nt, synthetic construct
  source 1..21: mol_type = other RNA
cagtgtgtccacacaatggtc

SEQ ID NO: 77805 - RNA, 21 nt, synthetic construct
  source 1..21: mol_type = other RNA
cagtgtgttctgccttgaggt

SEQ ID NO: 77806 - RNA, 21 nt, synthetic construct
  source 1..21: mol_type = other RNA
cagtgtgtttgtttgctagag

SEQ ID NO: 77807 - RNA, 21 nt, synthetic construct
  source 1..21: mol_type = other RNA
cagtgtgtttttgtaaatgaa

SEQ ID NO: 77808 - RNA, 21 nt, synthetic construct
  source 1..21: mol_type = other RNA
cagtgttgagaaagcacataa

SEQ ID NO: 77809 - RNA, 21 nt, synthetic construct
  source 1..21: mol_type = other RNA
cagtgtttacacacctgaaat

SEQ ID NO: 77810 - RNA, 21 nt, synthetic construct
  source 1..21: mol_type = other RNA
cagtgtttagggacgaatgca

SEQ ID NO: 77811 - RNA, 21 nt, synthetic construct
  source 1..21: mol_type = other RNA
cagtgtttcctagattccctc

SEQ ID NO: 77812 - RNA, 21 nt, synthetic construct
  source 1..21: mol_type = other RNA
cagtgtttggtttttatggaa

SEQ ID NO: 77813 - RNA, 21 nt, synthetic construct
  source 1..21: mol_type = other RNA
cagtgttttaaagcagggagg

SEQ ID NO: 77814 - RNA, 21 nt, synthetic construct
  source 1..21: mol_type = other RNA
cagtgttttaggggggaaaac

SEQ ID NO: 77815 - RNA, 21 nt, synthetic construct
  source 1..21: mol_type = other RNA
cagtgtttttgaattctgctt

SEQ ID NO: 77816 - RNA, 21 nt, synthetic construct
  source 1..21: mol_type = other RNA
cagttaaaagttttccaacca

SEQ ID NO: 77817 - RNA, 21 nt, synthetic construct
  source 1..21: mol_type = other RNA
cagttaaaatgaaaatgttcc

SEQ ID NO: 77818 - RNA, 21 nt, synthetic construct
  source 1..21: mol_type = other RNA
cagttaaacccaacaaacaat

SEQ ID NO: 77819 - RNA, 21 nt, synthetic construct
  source 1..21: mol_type = other RNA
cagttaacaatactgcattgt

SEQ ID NO: 77820 - RNA, 21 nt, synthetic construct
  source 1..21: mol_type = other RNA
cagttaacagtgctgtgccag

SEQ ID NO: 77821 - RNA, 21 nt, synthetic construct
  source 1..21: mol_type = other RNA
cagttaacgtatgaataaact

SEQ ID NO: 77822 - RNA, 21 nt, synthetic construct
  source 1..21: mol_type = other RNA
cagttaacttattggaaaact

SEQ ID NO: 77823 - RNA, 21 nt, synthetic construct
  source 1..21: mol_type = other RNA
cagttacagcatttcagccaa

SEQ ID NO: 77824 - RNA, 21 nt, synthetic construct
  source 1..21: mol_type = other RNA
cagttaccaccaagaaaaagc

SEQ ID NO: 77825 - RNA, 21 nt, synthetic construct
  source 1..21: mol_type = other RNA
cagttactcctgagcaaggaa

SEQ ID NO: 77826 - RNA, 21 nt, synthetic construct
  source 1..21: mol_type = other RNA
cagttactctctctgcctcgg

SEQ ID NO: 77827 - RNA, 21 nt, synthetic construct
  source 1..21: mol_type = other RNA
cagttactttcctttttcaaa

SEQ ID NO: 77828 - RNA, 21 nt, synthetic construct
  source 1..21: mol_type = other RNA
cagttagcatgcctgacaaag

SEQ ID NO: 77829 - RNA, 21 nt, synthetic construct
  source 1..21: mol_type = other RNA
cagttaggaagccactgcatt

SEQ ID NO: 77830 - RNA, 21 nt, synthetic construct
  source 1..21: mol_type = other RNA
cagttatcacacctaggccta

SEQ ID NO: 77831 - RNA, 21 nt, synthetic construct
  source 1..21: mol_type = other RNA
cagttatcaccatgtgcttat

SEQ ID NO: 77832 - RNA, 21 nt, synthetic construct
  source 1..21: mol_type = other RNA
cagttatctctgccctcattg

SEQ ID NO: 77833 - RNA, 21 nt, synthetic construct
  source 1..21: mol_type = other RNA
cagttatgtcagtcaacacac

SEQ ID NO: 77834 - RNA, 21 nt, synthetic construct
  source 1..21: mol_type = other RNA
cagttattaagagtgtgctga

SEQ ID NO: 77835 - RNA, 21 nt, synthetic construct
  source 1..21: mol_type = other RNA
cagttattcttcagcaaggac

SEQ ID NO: 77836 - RNA, 21 nt, synthetic construct
  source 1..21: mol_type = other RNA
cagttcaagcaccacttcgag

SEQ ID NO: 77837 - RNA, 21 nt, synthetic construct
  source 1..21: mol_type = other RNA
cagttcaaggtgttagcagga

SEQ ID NO: 77838 - RNA, 21 nt, synthetic construct
  source 1..21: mol_type = other RNA
cagttcaatactactgcaaat

SEQ ID NO: 77839 - RNA, 21 nt, synthetic construct
  source 1..21: mol_type = other RNA
cagttcaccagtttctaatta

SEQ ID NO: 77840 - RNA, 21 nt, synthetic construct
  source 1..21: mol_type = other RNA
cagttcagcctgcagaaggag

SEQ ID NO: 77841 - RNA, 21 nt, synthetic construct
  source 1..21: mol_type = other RNA
cagttctagttctaataaacg

SEQ ID NO: 77842 - RNA, 21 nt, synthetic construct
  source 1..21: mol_type = other RNA
cagttctatttctttccattc

SEQ ID NO: 77843 - RNA, 21 nt, synthetic construct
  source 1..21: mol_type = other RNA
cagttctctgccccgggcctg

SEQ ID NO: 77844 - RNA, 21 nt, synthetic construct
  source 1..21: mol_type = other RNA
cagttctgcgcaattgcagcc

SEQ ID NO: 77845 - RNA, 21 nt, synthetic construct
  source 1..21: mol_type = other RNA
cagttctgtacccttacgcgt

SEQ ID NO: 77846 - RNA, 21 nt, synthetic construct
  source 1..21: mol_type = other RNA
cagttctgtgaatttgattat

SEQ ID NO: 77847 - RNA, 21 nt, synthetic construct
  source 1..21: mol_type = other RNA
cagttcttaagttaaaacttg

SEQ ID NO: 77848 - RNA, 21 nt, synthetic construct
  source 1..21: mol_type = other RNA
cagttctttcggatatttact

SEQ ID NO: 77849 - RNA, 21 nt, synthetic construct
  source 1..21: mol_type = other RNA
cagttgaaaagtatggttgaa

SEQ ID NO: 77850 - RNA, 21 nt, synthetic construct
  source 1..21: mol_type = other RNA
cagttgacatcctttaatttg

SEQ ID NO: 77851 - RNA, 21 nt, synthetic construct
  source 1..21: mol_type = other RNA
cagttgagagagaattctaaa

SEQ ID NO: 77852 - RNA, 21 nt, synthetic construct
  source 1..21: mol_type = other RNA
cagttgagttttcaacctttg

SEQ ID NO: 77853 - RNA, 21 nt, synthetic construct
  source 1..21: mol_type = other RNA
cagttgatgcaatttgttttc

SEQ ID NO: 77854 - RNA, 21 nt, synthetic construct
  source 1..21: mol_type = other RNA
cagttgcagcatgctcactgt

SEQ ID NO: 77855 - RNA, 21 nt, synthetic construct
  source 1..21: mol_type = other RNA
cagttgcatgaatttgttttc

SEQ ID NO: 77856 - RNA, 21 nt, synthetic construct
  source 1..21: mol_type = other RNA
cagttgctattcaacaggtat

SEQ ID NO: 77857 - RNA, 21 nt, synthetic construct
  source 1..21: mol_type = other RNA
cagttgcttactctaatgggg

SEQ ID NO: 77858 - RNA, 21 nt, synthetic construct
  source 1..21: mol_type = other RNA
cagttggaactcttgcggtct

SEQ ID NO: 77859 - RNA, 21 nt, synthetic construct
  source 1..21: mol_type = other RNA
cagttggattatatgttctaa

SEQ ID NO: 77860 - RNA, 21 nt, synthetic construct
  source 1..21: mol_type = other RNA
cagttggccttgaggtgagac

SEQ ID NO: 77861 - RNA, 21 nt, synthetic construct
  source 1..21: mol_type = other RNA
cagttggggactcttatggct

SEQ ID NO: 77862 - RNA, 21 nt, synthetic construct
  source 1..21: mol_type = other RNA
cagttggtgaagagagcctgt

SEQ ID NO: 77863 - RNA, 21 nt, synthetic construct
  source 1..21: mol_type = other RNA
cagttgtatgccaaaaaattg

SEQ ID NO: 77864 - RNA, 21 nt, synthetic construct
  source 1..21: mol_type = other RNA
cagttgtcagaattagaaagc

SEQ ID NO: 77865 - RNA, 21 nt, synthetic construct
  source 1..21: mol_type = other RNA
cagttgtttacttgggtataa

SEQ ID NO: 77866 - RNA, 21 nt, synthetic construct
  source 1..21: mol_type = other RNA
cagtttaaaagtaaattcgca

SEQ ID NO: 77867 - RNA, 21 nt, synthetic construct
  source 1..21: mol_type = other RNA
cagtttaaagctttgtgactg

SEQ ID NO: 77868 - RNA, 21 nt, synthetic construct
  source 1..21: mol_type = other RNA
cagtttacacgccttcgcggg

SEQ ID NO: 77869 - RNA, 21 nt, synthetic construct
  source 1..21: mol_type = other RNA
cagtttagcaatccaaggaca

SEQ ID NO: 77870 - RNA, 21 nt, synthetic construct
  source 1..21: mol_type = other RNA
cagtttagtaaatctttggtg

SEQ ID NO: 77871 - RNA, 21 nt, synthetic construct
  source 1..21: mol_type = other RNA
cagtttatatgcctagatgat

SEQ ID NO: 77872 - RNA, 21 nt, synthetic construct
  source 1..21: mol_type = other RNA
cagtttatgggtcaaccacta

SEQ ID NO: 77873 - RNA, 21 nt, synthetic construct
  source 1..21: mol_type = other RNA
cagtttcaaaagctccccgga

SEQ ID NO: 77874 - RNA, 21 nt, synthetic construct
  source 1..21: mol_type = other RNA
cagtttcacttcttagtaaat

SEQ ID NO: 77875 - RNA, 21 nt, synthetic construct
  source 1..21: mol_type = other RNA
cagtttccctctgagagaagt

SEQ ID NO: 77876 - RNA, 21 nt, synthetic construct
  source 1..21: mol_type = other RNA
cagtttctctgctttttcttg

SEQ ID NO: 77877 - RNA, 21 nt, synthetic construct
  source 1..21: mol_type = other RNA
cagtttctgatttatctttct

SEQ ID NO: 77878 - RNA, 21 nt, synthetic construct
  source 1..21: mol_type = other RNA
cagtttgaaactttaagagta

SEQ ID NO: 77879 - RNA, 21 nt, synthetic construct
  source 1..21: mol_type = other RNA
cagtttgagaagccacacagt

SEQ ID NO: 77880 - RNA, 21 nt, synthetic construct
  source 1..21: mol_type = other RNA
cagtttgctagtattttgttg

SEQ ID NO: 77881 - RNA, 21 nt, synthetic construct
  source 1..21: mol_type = other RNA
cagtttggcaatttctcaaaa

SEQ ID NO: 77882 - RNA, 21 nt, synthetic construct
  source 1..21: mol_type = other RNA
cagtttgggtgacagagagag

SEQ ID NO: 77883 - RNA, 21 nt, synthetic construct
  source 1..21: mol_type = other RNA
cagtttgtgttttcactctca

SEQ ID NO: 77884 - RNA, 21 nt, synthetic construct
  source 1..21: mol_type = other RNA
cagtttgttctgctgttgatg

SEQ ID NO: 77885 - RNA, 21 nt, synthetic construct
  source 1..21: mol_type = other RNA
cagttttatcaattagttcct

SEQ ID NO: 77886 - RNA, 21 nt, synthetic construct
  source 1..21: mol_type = other RNA
cagttttctggaaactcaaac

SEQ ID NO: 77887 - RNA, 21 nt, synthetic construct
  source 1..21: mol_type = other RNA
cagttttgaccaaaacaaaaa

SEQ ID NO: 77888 - RNA, 21 nt, synthetic construct
  source 1..21: mol_type = other RNA
cagttttgagtggcatcatac

SEQ ID NO: 77889 - RNA, 21 nt, synthetic construct
  source 1..21: mol_type = other RNA
cagttttgtatatggtttaag

SEQ ID NO: 77890 - RNA, 21 nt, synthetic construct
  source 1..21: mol_type = other RNA
cagttttgttgaatcttaaca

SEQ ID NO: 77891 - RNA, 21 nt, synthetic construct
  source 1..21: mol_type = other RNA
cagtttttacatgtagttttc

SEQ ID NO: 77892 - RNA, 21 nt, synthetic construct
  source 1..21: mol_type = other RNA
cataaaaaaggaatctgggcc

SEQ ID NO: 77893 - RNA, 21 nt, synthetic construct
  source 1..21: mol_type = other RNA
cataaaaaccaaacactggaa

SEQ ID NO: 77894 - RNA, 21 nt, synthetic construct
  source 1..21: mol_type = other RNA
cataaaaagcgttggagacag

SEQ ID NO: 77895 - RNA, 21 nt, synthetic construct
  source 1..21: mol_type = other RNA
cataaaagcgtactgtgatta

SEQ ID NO: 77896 - RNA, 21 nt, synthetic construct
  source 1..21: mol_type = other RNA
cataaaaggatatgggccaaa

SEQ ID NO: 77897 - RNA, 21 nt, synthetic construct
  source 1..21: mol_type = other RNA
cataaaatatgtccttttgag

SEQ ID NO: 77898 - RNA, 21 nt, synthetic construct
  source 1..21: mol_type = other RNA
cataaaatgatggcaacaatc

SEQ ID NO: 77899 - RNA, 21 nt, synthetic construct
  source 1..21: mol_type = other RNA
cataaacacagaacactaaag

SEQ ID NO: 77900 - RNA, 21 nt, synthetic construct
  source 1..21: mol_type = other RNA
cataaacgacagcaggaaaag

SEQ ID NO: 77901 - RNA, 21 nt, synthetic construct
  source 1..21: mol_type = other RNA
cataaagacagacatttggaa

SEQ ID NO: 77902 - RNA, 21 nt, synthetic construct
  source 1..21: mol_type = other RNA
cataaagccggattcctttca

SEQ ID NO: 77903 - RNA, 21 nt, synthetic construct
  source 1..21: mol_type = other RNA
cataaagtcagaggagcagtt

SEQ ID NO: 77904 - RNA, 21 nt, synthetic construct
  source 1..21: mol_type = other RNA
cataaagtcttccattttaga

SEQ ID NO: 77905 - RNA, 21 nt, synthetic construct
  source 1..21: mol_type = other RNA
cataaagtcttgctggaagtt

SEQ ID NO: 77906 - RNA, 21 nt, synthetic construct
  source 1..21: mol_type = other RNA
cataaatagggtgctactcaa

SEQ ID NO: 77907 - RNA, 21 nt, synthetic construct
  source 1..21: mol_type = other RNA
cataaatcaaggtacaataca

SEQ ID NO: 77908 - RNA, 21 nt, synthetic construct
  source 1..21: mol_type = other RNA
cataaatcacaggaaagatgt

SEQ ID NO: 77909 - RNA, 21 nt, synthetic construct
  source 1..21: mol_type = other RNA
cataaatttgccacattttac

SEQ ID NO: 77910 - RNA, 21 nt, synthetic construct
  source 1..21: mol_type = other RNA
cataacaaagctctgatgctt

SEQ ID NO: 77911 - RNA, 21 nt, synthetic construct
  source 1..21: mol_type = other RNA
cataacagtattgtcttctaa

SEQ ID NO: 77912 - RNA, 21 nt, synthetic construct
  source 1..21: mol_type = other RNA
cataactcgtaatgcgatgat

SEQ ID NO: 77913 - RNA, 21 nt, synthetic construct
  source 1..21: mol_type = other RNA
cataactgtaaagtaatcaag

SEQ ID NO: 77914 - RNA, 21 nt, synthetic construct
  source 1..21: mol_type = other RNA
cataacttcccagacagggaa

SEQ ID NO: 77915 - RNA, 21 nt, synthetic construct
  source 1..21: mol_type = other RNA
cataagaactcctggtctccc

SEQ ID NO: 77916 - RNA, 21 nt, synthetic construct
  source 1..21: mol_type = other RNA
cataagacccctcaggtgtca

SEQ ID NO: 77917 - RNA, 21 nt, synthetic construct
  source 1..21: mol_type = other RNA
cataagagtccccaactgcaa

SEQ ID NO: 77918 - RNA, 21 nt, synthetic construct
  source 1..21: mol_type = other RNA
cataagatctgtctttggccc

SEQ ID NO: 77919 - RNA, 21 nt, synthetic construct
  source 1..21: mol_type = other RNA
cataagccaccgcactcagcc

SEQ ID NO: 77920 - RNA, 21 nt, synthetic construct
  source 1..21: mol_type = other RNA
cataagggggaatctactctt

SEQ ID NO: 77921 - RNA, 21 nt, synthetic construct
  source 1..21: mol_type = other RNA
cataagggtctgttttacatg

SEQ ID NO: 77922 - RNA, 21 nt, synthetic construct
  source 1..21: mol_type = other RNA
cataagtccctaacagtctcg

SEQ ID NO: 77923 - RNA, 21 nt, synthetic construct
  source 1..21: mol_type = other RNA
cataagttctagagatttgct

SEQ ID NO: 77924 - RNA, 21 nt, synthetic construct
  source 1..21: mol_type = other RNA
cataatagtctcacgatactt

SEQ ID NO: 77925 - RNA, 21 nt, synthetic construct
  source 1..21: mol_type = other RNA
cataatcaaattcacagaact

SEQ ID NO: 77926 - RNA, 21 nt, synthetic construct
  source 1..21: mol_type = other RNA
cataatctttggtgctgataa

SEQ ID NO: 77927 - RNA, 21 nt, synthetic construct
  source 1..21: mol_type = other RNA
cataatgagtaacatgtggaa

SEQ ID NO: 77928 - RNA, 21 nt, synthetic construct
  source 1..21: mol_type = other RNA
cataattgaacccactgagca

SEQ ID NO: 77929 - RNA, 21 nt, synthetic construct
  source 1..21: mol_type = other RNA
cataattggttaaacttggtc

SEQ ID NO: 77930 - RNA, 21 nt, synthetic construct
  source 1..21: mol_type = other RNA
catacaaaccaaaaaatgtgg

SEQ ID NO: 77931 - RNA, 21 nt, synthetic construct
  source 1..21: mol_type = other RNA
catacaactgctcataatagt

SEQ ID NO: 77932 - RNA, 21 nt, synthetic construct
  source 1..21: mol_type = other RNA
catacaaggagacctactaaa

SEQ ID NO: 77933 - RNA, 21 nt, synthetic construct
  source 1..21: mol_type = other RNA
catacaatagtttagttactc

SEQ ID NO: 77934 - RNA, 21 nt, synthetic construct
  source 1..21: mol_type = other RNA
catacacagggaaaactacat

SEQ ID NO: 77935 - RNA, 21 nt, synthetic construct
  source 1..21: mol_type = other RNA
catacacatcagattttgaag

SEQ ID NO: 77936 - RNA, 21 nt, synthetic construct
  source 1..21: mol_type = other RNA
catacacatccagaagtcact

SEQ ID NO: 77937 - RNA, 21 nt, synthetic construct
  source 1..21: mol_type = other RNA
catacacctggatcaagtggg

SEQ ID NO: 77938 - RNA, 21 nt, synthetic construct
  source 1..21: mol_type = other RNA
catacacgagtgtgtttcgca

SEQ ID NO: 77939 - RNA, 21 nt, synthetic construct
  source 1..21: mol_type = other RNA
catacactcatttcctttcag

SEQ ID NO: 77940 - RNA, 21 nt, synthetic construct
  source 1..21: mol_type = other RNA
catacaggagttccgatttct

SEQ ID NO: 77941 - RNA, 21 nt, synthetic construct
  source 1..21: mol_type = other RNA
catacagtgccttcagctatg

SEQ ID NO: 77942 - RNA, 21 nt, synthetic construct
  source 1..21: mol_type = other RNA
catacatgagaaatgttaaga

SEQ ID NO: 77943 - RNA, 21 nt, synthetic construct
  source 1..21: mol_type = other RNA
cataccaaaacccttgggatg

SEQ ID NO: 77944 - RNA, 21 nt, synthetic construct
  source 1..21: mol_type = other RNA
cataccaagcccggcacggtg

SEQ ID NO: 77945 - RNA, 21 nt, synthetic construct
  source 1..21: mol_type = other RNA
cataccaccacattcggccaa

SEQ ID NO: 77946 - RNA, 21 nt, synthetic construct
  source 1..21: mol_type = other RNA
cataccacctgtcagaaacac

SEQ ID NO: 77947 - RNA, 21 nt, synthetic construct
  source 1..21: mol_type = other RNA
cataccaggttttggtaatgg

SEQ ID NO: 77948 - RNA, 21 nt, synthetic construct
  source 1..21: mol_type = other RNA
cataccccaaccctacctagg

SEQ ID NO: 77949 - RNA, 21 nt, synthetic construct
  source 1..21: mol_type = other RNA
cataccccctggaaataagtt

SEQ ID NO: 77950 - RNA, 21 nt, synthetic construct
  source 1..21: mol_type = other RNA
cataccgacggctcaggcctg

SEQ ID NO: 77951 - RNA, 21 nt, synthetic construct
  source 1..21: mol_type = other RNA
cataccgagtaatgggatggc

SEQ ID NO: 77952 - RNA, 21 nt, synthetic construct
  source 1..21: mol_type = other RNA
catacctggtccttaaatttc

SEQ ID NO: 77953 - RNA, 21 nt, synthetic construct
  source 1..21: mol_type = other RNA
catacgaaagcctttattttt

SEQ ID NO: 77954 - RNA, 21 nt, synthetic construct
  source 1..21: mol_type = other RNA
catacgtcgtcccccatcccc

SEQ ID NO: 77955 - RNA, 21 nt, synthetic construct
  source 1..21: mol_type = other RNA
catacgttaactgtattgcaa

SEQ ID NO: 77956 - RNA, 21 nt, synthetic construct
  source 1..21: mol_type = other RNA
catactattttctatagtggc

SEQ ID NO: 77957 - RNA, 21 nt, synthetic construct
  source 1..21: mol_type = other RNA
catactcagccccctcgaaga

SEQ ID NO: 77958 - RNA, 21 nt, synthetic construct
  source 1..21: mol_type = other RNA
catactgaaagacagacctct

SEQ ID NO: 77959 - RNA, 21 nt, synthetic construct
  source 1..21: mol_type = other RNA
catactgaaggcatagggcct

SEQ ID NO: 77960 - RNA, 21 nt, synthetic construct
  source 1..21: mol_type = other RNA
catactgcactctcaaaatta

SEQ ID NO: 77961 - RNA, 21 nt, synthetic construct
  source 1..21: mol_type = other RNA
catactgcagcacttttaagg

SEQ ID NO: 77962 - RNA, 21 nt, synthetic construct
  source 1..21: mol_type = other RNA
catactgcatattgaagccag

SEQ ID NO: 77963 - RNA, 21 nt, synthetic construct
  source 1..21: mol_type = other RNA
catactggaaggactcacagc

SEQ ID NO: 77964 - RNA, 21 nt, synthetic construct
  source 1..21: mol_type = other RNA
catactgtcacaggctttcct

SEQ ID NO: 77965 - RNA, 21 nt, synthetic construct
  source 1..21: mol_type = other RNA
catactgtgatgattttagaa

SEQ ID NO: 77966 - RNA, 21 nt, synthetic construct
  source 1..21: mol_type = other RNA
catactgtgcagtggatgact

SEQ ID NO: 77967 - RNA, 21 nt, synthetic construct
  source 1..21: mol_type = other RNA
catactgtggatatcttttaa

SEQ ID NO: 77968 - RNA, 21 nt, synthetic construct
  source 1..21: mol_type = other RNA
catacttagctaatttcagag

SEQ ID NO: 77969 - RNA, 21 nt, synthetic construct
  source 1..21: mol_type = other RNA
catacttcaaagggtcactat

SEQ ID NO: 77970 - RNA, 21 nt, synthetic construct
  source 1..21: mol_type = other RNA
catacttgctttattacttca

SEQ ID NO: 77971 - RNA, 21 nt, synthetic construct
  source 1..21: mol_type = other RNA
catactttggaaggtaggagg

SEQ ID NO: 77972 - RNA, 21 nt, synthetic construct
  source 1..21: mol_type = other RNA
catactttgtcaggcatgcta

SEQ ID NO: 77973 - RNA, 21 nt, synthetic construct
  source 1..21: mol_type = other RNA
catacttttcaactgaacaac

SEQ ID NO: 77974 - RNA, 21 nt, synthetic construct
  source 1..21: mol_type = other RNA
catagaagcgctcttcaagca

SEQ ID NO: 77975 - RNA, 21 nt, synthetic construct
  source 1..21: mol_type = other RNA
catagacctgaatgactgttg

SEQ ID NO: 77976 - RNA, 21 nt, synthetic construct
  source 1..21: mol_type = other RNA
catagactttagagtcagttg

SEQ ID NO: 77977 - RNA, 21 nt, synthetic construct
  source 1..21: mol_type = other RNA
catagagatcttgtgtatctt

SEQ ID NO: 77978 - RNA, 21 nt, synthetic construct
  source 1..21: mol_type = other RNA
catagagggagcatcttccca

SEQ ID NO: 77979 - RNA, 21 nt, synthetic construct
  source 1..21: mol_type = other RNA
catagagtaccaggtcagcca

SEQ ID NO: 77980 - RNA, 21 nt, synthetic construct
  source 1..21: mol_type = other RNA
catagatcacaaggactggct

SEQ ID NO: 77981 - RNA, 21 nt, synthetic construct
  source 1..21: mol_type = other RNA
catagatcaccaggggctggg

SEQ ID NO: 77982 - RNA, 21 nt, synthetic construct
  source 1..21: mol_type = other RNA
catagatgaaactaaatgtga

SEQ ID NO: 77983 - RNA, 21 nt, synthetic construct
  source 1..21: mol_type = other RNA
catagatgttatgccccctct

SEQ ID NO: 77984 - RNA, 21 nt, synthetic construct
  source 1..21: mol_type = other RNA
catagcaaggaagcagaatgt

SEQ ID NO: 77985 - RNA, 21 nt, synthetic construct
  source 1..21: mol_type = other RNA
catagcagaaccttagaaatt

SEQ ID NO: 77986 - RNA, 21 nt, synthetic construct
  source 1..21: mol_type = other RNA
catagcagaatggccctgcga

SEQ ID NO: 77987 - RNA, 21 nt, synthetic construct
  source 1..21: mol_type = other RNA
catagcagcattgtttacagt

SEQ ID NO: 77988 - RNA, 21 nt, synthetic construct
  source 1..21: mol_type = other RNA
catagcagggtcatgcacacg

SEQ ID NO: 77989 - RNA, 21 nt, synthetic construct
  source 1..21: mol_type = other RNA
catagcagtgggaagtggagt

SEQ ID NO: 77990 - RNA, 21 nt, synthetic construct
  source 1..21: mol_type = other RNA
catagctcactagagcttcaa

SEQ ID NO: 77991 - RNA, 21 nt, synthetic construct
  source 1..21: mol_type = other RNA
catagctgaaggcactgtatg

SEQ ID NO: 77992 - RNA, 21 nt, synthetic construct
  source 1..21: mol_type = other RNA
catagcttcctaagaaagggt

SEQ ID NO: 77993 - RNA, 21 nt, synthetic construct
  source 1..21: mol_type = other RNA
catagcttgaaccagggaggc

SEQ ID NO: 77994 - RNA, 21 nt, synthetic construct
  source 1..21: mol_type = other RNA
cataggaaatacttgatctac

SEQ ID NO: 77995 - RNA, 21 nt, synthetic construct
  source 1..21: mol_type = other RNA
cataggatagttaaacatgta

SEQ ID NO: 77996 - RNA, 21 nt, synthetic construct
  source 1..21: mol_type = other RNA
cataggcacgcgcccccatgc

SEQ ID NO: 77997 - RNA, 21 nt, synthetic construct
  source 1..21: mol_type = other RNA
cataggcatctctcccttcct

SEQ ID NO: 77998 - RNA, 21 nt, synthetic construct
  source 1..21: mol_type = other RNA
cataggcttagtacagccatc

SEQ ID NO: 77999 - RNA, 21 nt, synthetic construct
  source 1..21: mol_type = other RNA
catagggatgttgcctactag

SEQ ID NO: 78000 - RNA, 21 nt, synthetic construct
  source 1..21: mol_type = other RNA
catagggccttctactttaat

SEQ ID NO: 78001 - RNA, 21 nt, synthetic construct
  source 1..21: mol_type = other RNA
cataggtaatactctagtggt

SEQ ID NO: 78002 - RNA, 21 nt, synthetic construct
  source 1..21: mol_type = other RNA
catagtactccattatatgaa

SEQ ID NO: 78003 - RNA, 21 nt, synthetic construct
  source 1..21: mol_type = other RNA
catagtagctgttgaattgtt

SEQ ID NO: 78004 - RNA, 21 nt, synthetic construct
  source 1..21: mol_type = other RNA
catagtattccatggtatgtg

SEQ ID NO: 78005 - RNA, 21 nt, synthetic construct
  source 1..21: mol_type = other RNA
catagtcatcattattagcaa

SEQ ID NO: 78006 - RNA, 21 nt, synthetic construct
  source 1..21: mol_type = other RNA
catagtccactttccatctta

SEQ ID NO: 78007 - RNA, 21 nt, synthetic construct
  source 1..21: mol_type = other RNA
catagtcttccaaaatattga

SEQ ID NO: 78008 - RNA, 21 nt, synthetic construct
  source 1..21: mol_type = other RNA
catagtgctcttctgatcaca

SEQ ID NO: 78009 - RNA, 21 nt, synthetic construct
  source 1..21: mol_type = other RNA
catagtgttaattatttgtgc

SEQ ID NO: 78010 - RNA, 21 nt, synthetic construct
  source 1..21: mol_type = other RNA
catagttaatgtgtgaagaag

SEQ ID NO: 78011 - RNA, 21 nt, synthetic construct
  source 1..21: mol_type = other RNA
catagtttgagtatttcatgt

SEQ ID NO: 78012 - RNA, 21 nt, synthetic construct
  source 1..21: mol_type = other RNA
catataaactggaaggaaata

SEQ ID NO: 78013 - RNA, 21 nt, synthetic construct
  source 1..21: mol_type = other RNA
catataaatcaatctgtttcc

SEQ ID NO: 78014 - RNA, 21 nt, synthetic construct
  source 1..21: mol_type = other RNA
catataaggggaatcatgcag

SEQ ID NO: 78015 - RNA, 21 nt, synthetic construct
  source 1..21: mol_type = other RNA
catataagtggaatcattccg

SEQ ID NO: 78016 - RNA, 21 nt, synthetic construct
  source 1..21: mol_type = other RNA
catataatccaactgcagtct

SEQ ID NO: 78017 - RNA, 21 nt, synthetic construct
  source 1..21: mol_type = other RNA
catataatctaaccctcctcc

SEQ ID NO: 78018 - RNA, 21 nt, synthetic construct
  source 1..21: mol_type = other RNA
catataatggagtactatgca

SEQ ID NO: 78019 - RNA, 21 nt, synthetic construct
  source 1..21: mol_type = other RNA
catatacacaaaaagatctgt

SEQ ID NO: 78020 - RNA, 21 nt, synthetic construct
  source 1..21: mol_type = other RNA
catatacatgacatggttttc

SEQ ID NO: 78021 - RNA, 21 nt, synthetic construct
  source 1..21: mol_type = other RNA
catatacgtatttatcatgtc

SEQ ID NO: 78022 - RNA, 21 nt, synthetic construct
  source 1..21: mol_type = other RNA
catatagaagtaaatcccggc

SEQ ID NO: 78023 - RNA, 21 nt, synthetic construct
  source 1..21: mol_type = other RNA
catatagtaattctgtgctta

SEQ ID NO: 78024 - RNA, 21 nt, synthetic construct
  source 1..21: mol_type = other RNA
catatataccacattttgttc

SEQ ID NO: 78025 - RNA, 21 nt, synthetic construct
  source 1..21: mol_type = other RNA
catatatactctgagacagga

SEQ ID NO: 78026 - RNA, 21 nt, synthetic construct
  source 1..21: mol_type = other RNA
catatatctgtctgggataat

SEQ ID NO: 78027 - RNA, 21 nt, synthetic construct
  source 1..21: mol_type = other RNA
catatcacattaacagaatga

SEQ ID NO: 78028 - RNA, 21 nt, synthetic construct
  source 1..21: mol_type = other RNA
catatcagggatcacagatac

SEQ ID NO: 78029 - RNA, 21 nt, synthetic construct
  source 1..21: mol_type = other RNA
catatcagttatcacacctag

SEQ ID NO: 78030 - RNA, 21 nt, synthetic construct
  source 1..21: mol_type = other RNA
catatcatcatcttatacttg

SEQ ID NO: 78031 - RNA, 21 nt, synthetic construct
  source 1..21: mol_type = other RNA
catatccttctacatcccccc

SEQ ID NO: 78032 - RNA, 21 nt, synthetic construct
  source 1..21: mol_type = other RNA
catatccttttatgtgcagtc

SEQ ID NO: 78033 - RNA, 21 nt, synthetic construct
  source 1..21: mol_type = other RNA
catatctaattaacatccaga

SEQ ID NO: 78034 - RNA, 21 nt, synthetic construct
  source 1..21: mol_type = other RNA
catatctacatgtacgccaat

SEQ ID NO: 78035 - RNA, 21 nt, synthetic construct
  source 1..21: mol_type = other RNA
catatctgattttgtgtcttc

SEQ ID NO: 78036 - RNA, 21 nt, synthetic construct
  source 1..21: mol_type = other RNA
catatctttaggtgttttttc

SEQ ID NO: 78037 - RNA, 21 nt, synthetic construct
  source 1..21: mol_type = other RNA
catatctttgcttataacaag

SEQ ID NO: 78038 - RNA, 21 nt, synthetic construct
  source 1..21: mol_type = other RNA
catatgaaatcacacaatctt

SEQ ID NO: 78039 - RNA, 21 nt, synthetic construct
  source 1..21: mol_type = other RNA
catatgatctatcaatctcac

SEQ ID NO: 78040 - RNA, 21 nt, synthetic construct
  source 1..21: mol_type = other RNA
catatgcaggaccaactttaa

SEQ ID NO: 78041 - RNA, 21 nt, synthetic construct
  source 1..21: mol_type = other RNA
catatgcatgttatttgggga

SEQ ID NO: 78042 - RNA, 21 nt, synthetic construct
  source 1..21: mol_type = other RNA
catatgccggctgttaggtat

SEQ ID NO: 78043 - RNA, 21 nt, synthetic construct
  source 1..21: mol_type = other RNA
catatgctttgagctacaaac

SEQ ID NO: 78044 - RNA, 21 nt, synthetic construct
  source 1..21: mol_type = other RNA
catatggaggcaatgttgatt

SEQ ID NO: 78045 - RNA, 21 nt, synthetic construct
  source 1..21: mol_type = other RNA
catatggcaattccataaatg

SEQ ID NO: 78046 - RNA, 21 nt, synthetic construct
  source 1..21: mol_type = other RNA
catatgggatgcttaaagcgc

SEQ ID NO: 78047 - RNA, 21 nt, synthetic construct
  source 1..21: mol_type = other RNA
catatggttaatagtgaccct

SEQ ID NO: 78048 - RNA, 21 nt, synthetic construct
  source 1..21: mol_type = other RNA
catatggtttacaatggttca

SEQ ID NO: 78049 - RNA, 21 nt, synthetic construct
  source 1..21: mol_type = other RNA
catatgtagggcaccgtgaca

SEQ ID NO: 78050 - RNA, 21 nt, synthetic construct
  source 1..21: mol_type = other RNA
catatgtcactgtaagaataa

SEQ ID NO: 78051 - RNA, 21 nt, synthetic construct
  source 1..21: mol_type = other RNA
catatgtcagatggtaaattg

SEQ ID NO: 78052 - RNA, 21 nt, synthetic construct
  source 1..21: mol_type = other RNA
catatgtttgtaacttgttca

SEQ ID NO: 78053 - RNA, 21 nt, synthetic construct
  source 1..21: mol_type = other RNA
catatgttttgcttcgaagct

SEQ ID NO: 78054 - RNA, 21 nt, synthetic construct
  source 1..21: mol_type = other RNA
catattagagtgaaaagaaac

SEQ ID NO: 78055 - RNA, 21 nt, synthetic construct
  source 1..21: mol_type = other RNA
catattagctgtctggattga

SEQ ID NO: 78056 - RNA, 21 nt, synthetic construct
  source 1..21: mol_type = other RNA
catattagtctgtagcttcac

SEQ ID NO: 78057 - RNA, 21 nt, synthetic construct
  source 1..21: mol_type = other RNA
catattattttttcccgctac

SEQ ID NO: 78058 - RNA, 21 nt, synthetic construct
  source 1..21: mol_type = other RNA
catattgaagccagcacctaa

SEQ ID NO: 78059 - RNA, 21 nt, synthetic construct
  source 1..21: mol_type = other RNA
catattgaataatttccaggt

SEQ ID NO: 78060 - RNA, 21 nt, synthetic construct
  source 1..21: mol_type = other RNA
catattggattaagggcccac

SEQ ID NO: 78061 - RNA, 21 nt, synthetic construct
  source 1..21: mol_type = other RNA
catattggccaggctggttcc

SEQ ID NO: 78062 - RNA, 21 nt, synthetic construct
  source 1..21: mol_type = other RNA
catatttatcaacacatagtg

SEQ ID NO: 78063 - RNA, 21 nt, synthetic construct
  source 1..21: mol_type = other RNA
catatttatttccttaagcca

SEQ ID NO: 78064 - RNA, 21 nt, synthetic construct
  source 1..21: mol_type = other RNA
catatttccaaataaggtcac

SEQ ID NO: 78065 - RNA, 21 nt, synthetic construct
  source 1..21: mol_type = other RNA
catatttcccttttggatgca

SEQ ID NO: 78066 - RNA, 21 nt, synthetic construct
  source 1..21: mol_type = other RNA
catatttgttcaagcgctgaa

SEQ ID NO: 78067 - RNA, 21 nt, synthetic construct
  source 1..21: mol_type = other RNA
catattttaaaagtcagctag

SEQ ID NO: 78068 - RNA, 21 nt, synthetic construct
  source 1..21: mol_type = other RNA
catattttatgctttgtctct

SEQ ID NO: 78069 - RNA, 21 nt, synthetic construct
  source 1..21: mol_type = other RNA
catattttccttatccattca

SEQ ID NO: 78070 - RNA, 21 nt, synthetic construct
  source 1..21: mol_type = other RNA
catattttgtaacgtgtatag

SEQ ID NO: 78071 - RNA, 21 nt, synthetic construct
  source 1..21: mol_type = other RNA
catattttgtgggaattcagt

SEQ ID NO: 78072 - RNA, 21 nt, synthetic construct
  source 1..21: mol_type = other RNA
catcaaagctaccctttcttg

SEQ ID NO: 78073 - RNA, 21 nt, synthetic construct
  source 1..21: mol_type = other RNA
catcaaaggaaggaattttag

SEQ ID NO: 78074 - RNA, 21 nt, synthetic construct
  source 1..21: mol_type = other RNA
catcaaaggacactattgaga

SEQ ID NO: 78075 - RNA, 21 nt, synthetic construct
  source 1..21: mol_type = other RNA
catcaaagtcccctgtaatta

SEQ ID NO: 78076 - RNA, 21 nt, synthetic construct
  source 1..21: mol_type = other RNA
catcaaagttaaacttttgtg

SEQ ID NO: 78077 - RNA, 21 nt, synthetic construct
  source 1..21: mol_type = other RNA
catcaacagcagaacaaactg

SEQ ID NO: 78078 - RNA, 21 nt, synthetic construct
  source 1..21: mol_type = other RNA
catcaactgcttccctagccc

SEQ ID NO: 78079 - RNA, 21 nt, synthetic construct
  source 1..21: mol_type = other RNA
catcaagacagagctccctct

SEQ ID NO: 78080 - RNA, 21 nt, synthetic construct
  source 1..21: mol_type = other RNA
catcaagggtggtgctggact

SEQ ID NO: 78081 - RNA, 21 nt, synthetic construct
  source 1..21: mol_type = other RNA
catcaagtgtgatcccaaaaa

SEQ ID NO: 78082 - RNA, 21 nt, synthetic construct
  source 1..21: mol_type = other RNA
catcaatgatagactggatta

SEQ ID NO: 78083 - RNA, 21 nt, synthetic construct
  source 1..21: mol_type = other RNA
catcacaatgcgtttgttaga

SEQ ID NO: 78084 - RNA, 21 nt, synthetic construct
  source 1..21: mol_type = other RNA
catcacacccagtatacacgt

SEQ ID NO: 78085 - RNA, 21 nt, synthetic construct
  source 1..21: mol_type = other RNA
catcacactggtcactggcca

SEQ ID NO: 78086 - RNA, 21 nt, synthetic construct
  source 1..21: mol_type = other RNA
catcacagacagggaatgggg

SEQ ID NO: 78087 - RNA, 21 nt, synthetic construct
  source 1..21: mol_type = other RNA
catcacagtatgcacaaataa

SEQ ID NO: 78088 - RNA, 21 nt, synthetic construct
  source 1..21: mol_type = other RNA
catcacagtccaggaacttac

SEQ ID NO: 78089 - RNA, 21 nt, synthetic construct
  source 1..21: mol_type = other RNA
catcacattttgaatcatggg

SEQ ID NO: 78090 - RNA, 21 nt, synthetic construct
  source 1..21: mol_type = other RNA
catcaccatcatcatcaggct

SEQ ID NO: 78091 - RNA, 21 nt, synthetic construct
  source 1..21: mol_type = other RNA
catcacccagctcgaccaggg

SEQ ID NO: 78092 - RNA, 21 nt, synthetic construct
  source 1..21: mol_type = other RNA
catcactaagagtgaaaaggc

SEQ ID NO: 78093 - RNA, 21 nt, synthetic construct
  source 1..21: mol_type = other RNA
catcactagaatgtgacttcg

SEQ ID NO: 78094 - RNA, 21 nt, synthetic construct
  source 1..21: mol_type = other RNA
catcactagctattagagaaa

SEQ ID NO: 78095 - RNA, 21 nt, synthetic construct
  source 1..21: mol_type = other RNA
catcactcactggcctgagct

SEQ ID NO: 78096 - RNA, 21 nt, synthetic construct
  source 1..21: mol_type = other RNA
catcactgactggctgtgcca

SEQ ID NO: 78097 - RNA, 21 nt, synthetic construct
  source 1..21: mol_type = other RNA
catcacttgaggtgattaaag

SEQ ID NO: 78098 - RNA, 21 nt, synthetic construct
  source 1..21: mol_type = other RNA
catcagaattccattcctttt

SEQ ID NO: 78099 - RNA, 21 nt, synthetic construct
  source 1..21: mol_type = other RNA
catcagacacctacattaatc

SEQ ID NO: 78100 - RNA, 21 nt, synthetic construct
  source 1..21: mol_type = other RNA
catcagagaggctttttatta

SEQ ID NO: 78101 - RNA, 21 nt, synthetic construct
  source 1..21: mol_type = other RNA
catcagagctttgttatgaaa

SEQ ID NO: 78102 - RNA, 21 nt, synthetic construct
  source 1..21: mol_type = other RNA
catcagagtgaacaggcaacc

SEQ ID NO: 78103 - RNA, 21 nt, synthetic construct
  source 1..21: mol_type = other RNA
catcagcagtgaccatatttc

SEQ ID NO: 78104 - RNA, 21 nt, synthetic construct
  source 1..21: mol_type = other RNA
catcagcgctaagtgcatttc

SEQ ID NO: 78105 - RNA, 21 nt, synthetic construct
  source 1..21: mol_type = other RNA
catcagcgtcctcactgtgat

SEQ ID NO: 78106 - RNA, 21 nt, synthetic construct
  source 1..21: mol_type = other RNA
catcaggaaaaccagtttaga

SEQ ID NO: 78107 - RNA, 21 nt, synthetic construct
  source 1..21: mol_type = other RNA
catcaggctggctctttccac

SEQ ID NO: 78108 - RNA, 21 nt, synthetic construct
  source 1..21: mol_type = other RNA
catcagtgctgctctgacgtt

SEQ ID NO: 78109 - RNA, 21 nt, synthetic construct
  source 1..21: mol_type = other RNA
catcagtggttgtgcttcgag

SEQ ID NO: 78110 - RNA, 21 nt, synthetic construct
  source 1..21: mol_type = other RNA
catcagttaccaccaagaaaa

SEQ ID NO: 78111 - RNA, 21 nt, synthetic construct
  source 1..21: mol_type = other RNA
catcatactggaaggactcac

SEQ ID NO: 78112 - RNA, 21 nt, synthetic construct
  source 1..21: mol_type = other RNA
catcatcaggctggctctttc

SEQ ID NO: 78113 - RNA, 21 nt, synthetic construct
  source 1..21: mol_type = other RNA
catcatcatcaggctggctct

SEQ ID NO: 78114 - RNA, 21 nt, synthetic construct
  source 1..21: mol_type = other RNA
catcatctaatttcccatttg

SEQ ID NO: 78115 - RNA, 21 nt, synthetic construct
  source 1..21: mol_type = other RNA
catcatcttatacttggcaaa

SEQ ID NO: 78116 - RNA, 21 nt, synthetic construct
  source 1..21: mol_type = other RNA
catcatcttttgcctggatga

SEQ ID NO: 78117 - RNA, 21 nt, synthetic construct
  source 1..21: mol_type = other RNA
catcatgatttaatagaggtc

SEQ ID NO: 78118 - RNA, 21 nt, synthetic construct
  source 1..21: mol_type = other RNA
catcatgcctgggtaattaaa

SEQ ID NO: 78119 - RNA, 21 nt, synthetic construct
  source 1..21: mol_type = other RNA
catcatggtgggccttgcaag

SEQ ID NO: 78120 - RNA, 21 nt, synthetic construct
  source 1..21: mol_type = other RNA
catcattcaaatgatattcac

SEQ ID NO: 78121 - RNA, 21 nt, synthetic construct
  source 1..21: mol_type = other RNA
catcattcataaacacagaac

SEQ ID NO: 78122 - RNA, 21 nt, synthetic construct
  source 1..21: mol_type = other RNA
catcatttatacccaagtaaa

SEQ ID NO: 78123 - RNA, 21 nt, synthetic construct
  source 1..21: mol_type = other RNA
catccaaaagggaaatatgaa

SEQ ID NO: 78124 - RNA, 21 nt, synthetic construct
  source 1..21: mol_type = other RNA
catccaaacagaaaccctgta

SEQ ID NO: 78125 - RNA, 21 nt, synthetic construct
  source 1..21: mol_type = other RNA
catccaaattattgacaagac

SEQ ID NO: 78126 - RNA, 21 nt, synthetic construct
  source 1..21: mol_type = other RNA
catccacaacattgtgcaacc

SEQ ID NO: 78127 - RNA, 21 nt, synthetic construct
  source 1..21: mol_type = other RNA
catccacaatgagacatttga

SEQ ID NO: 78128 - RNA, 21 nt, synthetic construct
  source 1..21: mol_type = other RNA
catccacagctttcttttcca

SEQ ID NO: 78129 - RNA, 21 nt, synthetic construct
  source 1..21: mol_type = other RNA
catccacattttgtgacaagt

SEQ ID NO: 78130 - RNA, 21 nt, synthetic construct
  source 1..21: mol_type = other RNA
catccacccacttgtcccatg

SEQ ID NO: 78131 - RNA, 21 nt, synthetic construct
  source 1..21: mol_type = other RNA
catccacgcgtaagggtacag

SEQ ID NO: 78132 - RNA, 21 nt, synthetic construct
  source 1..21: mol_type = other RNA
catccactaggggactaacag

SEQ ID NO: 78133 - RNA, 21 nt, synthetic construct
  source 1..21: mol_type = other RNA
catccactgcacagtatgcgg

SEQ ID NO: 78134 - RNA, 21 nt, synthetic construct
  source 1..21: mol_type = other RNA
catccagaagtcactttttat

SEQ ID NO: 78135 - RNA, 21 nt, synthetic construct
  source 1..21: mol_type = other RNA
catccagctaattttcattac

SEQ ID NO: 78136 - RNA, 21 nt, synthetic construct
  source 1..21: mol_type = other RNA
catccaggcaaaagatgatga

SEQ ID NO: 78137 - RNA, 21 nt, synthetic construct
  source 1..21: mol_type = other RNA
catccagtttaaagctttgtg

SEQ ID NO: 78138 - RNA, 21 nt, synthetic construct
  source 1..21: mol_type = other RNA
catccatgttgttgaatgtgg

SEQ ID NO: 78139 - RNA, 21 nt, synthetic construct
  source 1..21: mol_type = other RNA
catccattactcgtggttata

SEQ ID NO: 78140 - RNA, 21 nt, synthetic construct
  source 1..21: mol_type = other RNA
catcccaagggttttggtatg

SEQ ID NO: 78141 - RNA, 21 nt, synthetic construct
  source 1..21: mol_type = other RNA
catcccaagtgcccattaaca

SEQ ID NO: 78142 - RNA, 21 nt, synthetic construct
  source 1..21: mol_type = other RNA
catcccagaggtactcaacga

SEQ ID NO: 78143 - RNA, 21 nt, synthetic construct
  source 1..21: mol_type = other RNA
catcccagctacataacttcc

SEQ ID NO: 78144 - RNA, 21 nt, synthetic construct
  source 1..21: mol_type = other RNA
catcccatatggaggcaatgt

SEQ ID NO: 78145 - RNA, 21 nt, synthetic construct
  source 1..21: mol_type = other RNA
catcccattactcggtatgta

SEQ ID NO: 78146 - RNA, 21 nt, synthetic construct
  source 1..21: mol_type = other RNA
catccccagaaagagagaggg

SEQ ID NO: 78147 - RNA, 21 nt, synthetic construct
  source 1..21: mol_type = other RNA
catccccattcaattgtcctg

SEQ ID NO: 78148 - RNA, 21 nt, synthetic construct
  source 1..21: mol_type = other RNA
catccccccacccctgctctg

SEQ ID NO: 78149 - RNA, 21 nt, synthetic construct
  source 1..21: mol_type = other RNA
catccccgctgcgagaaaggc

SEQ ID NO: 78150 - RNA, 21 nt, synthetic construct
  source 1..21: mol_type = other RNA
catccccgctgtccatttcca

SEQ ID NO: 78151 - RNA, 21 nt, synthetic construct
  source 1..21: mol_type = other RNA
catcccctttacccctgagaa

SEQ ID NO: 78152 - RNA, 21 nt, synthetic construct
  source 1..21: mol_type = other RNA
catccctatgcaataactcaa

SEQ ID NO: 78153 - RNA, 21 nt, synthetic construct
  source 1..21: mol_type = other RNA
catccctcatatcagttatca

SEQ ID NO: 78154 - RNA, 21 nt, synthetic construct
  source 1..21: mol_type = other RNA
catccctccagtccagcacca

SEQ ID NO: 78155 - RNA, 21 nt, synthetic construct
  source 1..21: mol_type = other RNA
catccctcctctggccctcca

SEQ ID NO: 78156 - RNA, 21 nt, synthetic construct
  source 1..21: mol_type = other RNA
catccctctaaataggtattc

SEQ ID NO: 78157 - RNA, 21 nt, synthetic construct
  source 1..21: mol_type = other RNA
catccctgccgcgcgcgaagg

SEQ ID NO: 78158 - RNA, 21 nt, synthetic construct
  source 1..21: mol_type = other RNA
catccgccaccacgcctggct

SEQ ID NO: 78159 - RNA, 21 nt, synthetic construct
  source 1..21: mol_type = other RNA
catccgggagggaggtagggg

SEQ ID NO: 78160 - RNA, 21 nt, synthetic construct
  source 1..21: mol_type = other RNA
catccggggagcttttgaaac

SEQ ID NO: 78161 - RNA, 21 nt, synthetic construct
  source 1..21: mol_type = other RNA
catccggtctcagtttttaat

SEQ ID NO: 78162 - RNA, 21 nt, synthetic construct
  source 1..21: mol_type = other RNA
catcctaatacagtaaagccc

SEQ ID NO: 78163 - RNA, 21 nt, synthetic construct
  source 1..21: mol_type = other RNA
catcctatctaagcctactgc

SEQ ID NO: 78164 - RNA, 21 nt, synthetic construct
  source 1..21: mol_type = other RNA
catcctcaacaagagaggaca

SEQ ID NO: 78165 - RNA, 21 nt, synthetic construct
  source 1..21: mol_type = other RNA
catcctccagccttaatctcc

SEQ ID NO: 78166 - RNA, 21 nt, synthetic construct
  source 1..21: mol_type = other RNA
catcctccgtagctgtcgctc

SEQ ID NO: 78167 - RNA, 21 nt, synthetic construct
  source 1..21: mol_type = other RNA
catcctctatttttgtctggt

SEQ ID NO: 78168 - RNA, 21 nt, synthetic construct
  source 1..21: mol_type = other RNA
catcctgatttaggccactct

SEQ ID NO: 78169 - RNA, 21 nt, synthetic construct
  source 1..21: mol_type = other RNA
catcctggatttgggaaggat

SEQ ID NO: 78170 - RNA, 21 nt, synthetic construct
  source 1..21: mol_type = other RNA
catccttcccaaatccaggat

SEQ ID NO: 78171 - RNA, 21 nt, synthetic construct
  source 1..21: mol_type = other RNA
catccttgccaacagttactt

SEQ ID NO: 78172 - RNA, 21 nt, synthetic construct
  source 1..21: mol_type = other RNA
catcctttaatttgggtttga

SEQ ID NO: 78173 - RNA, 21 nt, synthetic construct
  source 1..21: mol_type = other RNA
catcctttataccttttaatg

SEQ ID NO: 78174 - RNA, 21 nt, synthetic construct
  source 1..21: mol_type = other RNA
catcctttcccttctgctcgg

SEQ ID NO: 78175 - RNA, 21 nt, synthetic construct
  source 1..21: mol_type = other RNA
catcctttccttgtcctaaaa

SEQ ID NO: 78176 - RNA, 21 nt, synthetic construct
  source 1..21: mol_type = other RNA
catcctttgcgtctgtgatta

SEQ ID NO: 78177 - RNA, 21 nt, synthetic construct
  source 1..21: mol_type = other RNA
catcgagagatgaatggataa

SEQ ID NO: 78178 - RNA, 21 nt, synthetic construct
  source 1..21: mol_type = other RNA
catcgcattacgagttatgca

SEQ ID NO: 78179 - RNA, 21 nt, synthetic construct
  source 1..21: mol_type = other RNA
catcgcgcccagcccgtgtgt

SEQ ID NO: 78180 - RNA, 21 nt, synthetic construct
  source 1..21: mol_type = other RNA
catcggaaatataaaaagcct

SEQ ID NO: 78181 - RNA, 21 nt, synthetic construct
  source 1..21: mol_type = other RNA
catcggggcctacagtggttc

SEQ ID NO: 78182 - RNA, 21 nt, synthetic construct
  source 1..21: mol_type = other RNA
catcggtctgtatttctgctt

SEQ ID NO: 78183 - RNA, 21 nt, synthetic construct
  source 1..21: mol_type = other RNA
catcgtaaaaagccatttatc

SEQ ID NO: 78184 - RNA, 21 nt, synthetic construct
  source 1..21: mol_type = other RNA
catcgtaaaacctcatctcta

SEQ ID NO: 78185 - RNA, 21 nt, synthetic construct
  source 1..21: mol_type = other RNA
catcgtgaagtctttattttt

SEQ ID NO: 78186 - RNA, 21 nt, synthetic construct
  source 1..21: mol_type = other RNA
catcgttcacactcgcactcc

SEQ ID NO: 78187 - RNA, 21 nt, synthetic construct
  source 1..21: mol_type = other RNA
catcgtttcaatattaagagt

SEQ ID NO: 78188 - RNA, 21 nt, synthetic construct
  source 1..21: mol_type = other RNA
catctaaacgtttggtgactg

SEQ ID NO: 78189 - RNA, 21 nt, synthetic construct
  source 1..21: mol_type = other RNA
catctaaagccaggctttccc

SEQ ID NO: 78190 - RNA, 21 nt, synthetic construct
  source 1..21: mol_type = other RNA
catctaaattaagcttcgaca

SEQ ID NO: 78191 - RNA, 21 nt, synthetic construct
  source 1..21: mol_type = other RNA
catctaacagaaatacaatgt

SEQ ID NO: 78192 - RNA, 21 nt, synthetic construct
  source 1..21: mol_type = other RNA
catctaagcctacctcccttc

SEQ ID NO: 78193 - RNA, 21 nt, synthetic construct
  source 1..21: mol_type = other RNA
catctaatttcccatttgatt

SEQ ID NO: 78194 - RNA, 21 nt, synthetic construct
  source 1..21: mol_type = other RNA
catctagcacagaaccatgta

SEQ ID NO: 78195 - RNA, 21 nt, synthetic construct
  source 1..21: mol_type = other RNA
catctaggcatataaactgga

SEQ ID NO: 78196 - RNA, 21 nt, synthetic construct
  source 1..21: mol_type = other RNA
catctagttaccactagcaaa

SEQ ID NO: 78197 - RNA, 21 nt, synthetic construct
  source 1..21: mol_type = other RNA
catctataaggtaatgacaat

SEQ ID NO: 78198 - RNA, 21 nt, synthetic construct
  source 1..21: mol_type = other RNA
catctatgaagtaattgtttg

SEQ ID NO: 78199 - RNA, 21 nt, synthetic construct
  source 1..21: mol_type = other RNA
catctatgtcccctggggcct

SEQ ID NO: 78200 - RNA, 21 nt, synthetic construct
  source 1..21: mol_type = other RNA
catctatttccccattagagt

SEQ ID NO: 78201 - RNA, 21 nt, synthetic construct
  source 1..21: mol_type = other RNA
catctcaagaaaacaagaata

SEQ ID NO: 78202 - RNA, 21 nt, synthetic construct
  source 1..21: mol_type = other RNA
catctcactcacctagctgtt

SEQ ID NO: 78203 - RNA, 21 nt, synthetic construct
  source 1..21: mol_type = other RNA
catctcagcacagagccgaaa

SEQ ID NO: 78204 - RNA, 21 nt, synthetic construct
  source 1..21: mol_type = other RNA
catctcccataccacctgtca

SEQ ID NO: 78205 - RNA, 21 nt, synthetic construct
  source 1..21: mol_type = other RNA
catctcccatcactagaatgt

SEQ ID NO: 78206 - RNA, 21 nt, synthetic construct
  source 1..21: mol_type = other RNA
catctccttaatccagtctat

SEQ ID NO: 78207 - RNA, 21 nt, synthetic construct
  source 1..21: mol_type = other RNA
catctctagttttccagtata

SEQ ID NO: 78208 - RNA, 21 nt, synthetic construct
  source 1..21: mol_type = other RNA
catctctccaacagaagaagt

SEQ ID NO: 78209 - RNA, 21 nt, synthetic construct
  source 1..21: mol_type = other RNA
catctctcccttcctgttctt

SEQ ID NO: 78210 - RNA, 21 nt, synthetic construct
  source 1..21: mol_type = other RNA
catctctcgatggacatttag

SEQ ID NO: 78211 - RNA, 21 nt, synthetic construct
  source 1..21: mol_type = other RNA
catctctctaaaaacatccat

SEQ ID NO: 78212 - RNA, 21 nt, synthetic construct
  source 1..21: mol_type = other RNA
catctctctgcctcaaaatca

SEQ ID NO: 78213 - RNA, 21 nt, synthetic construct
  source 1..21: mol_type = other RNA
catctctgcaaaacatttaaa

SEQ ID NO: 78214 - RNA, 21 nt, synthetic construct
  source 1..21: mol_type = other RNA
catctgaatcaataagaatga

SEQ ID NO: 78215 - RNA, 21 nt, synthetic construct
  source 1..21: mol_type = other RNA
catctgaattcaagttacaat

SEQ ID NO: 78216 - RNA, 21 nt, synthetic construct
  source 1..21: mol_type = other RNA
catctgacatatgttttgctt

SEQ ID NO: 78217 - RNA, 21 nt, synthetic construct
  source 1..21: mol_type = other RNA
catctgagacatcacaatgcg

SEQ ID NO: 78218 - RNA, 21 nt, synthetic construct
  source 1..21: mol_type = other RNA
catctgataagcccaacctga

SEQ ID NO: 78219 - RNA, 21 nt, synthetic construct
  source 1..21: mol_type = other RNA
catctgatacacttctatcca

SEQ ID NO: 78220 - RNA, 21 nt, synthetic construct
  source 1..21: mol_type = other RNA
catctgcagtgtccatctccc

SEQ ID NO: 78221 - RNA, 21 nt, synthetic construct
  source 1..21: mol_type = other RNA
catctgcctcccgggtccagg

SEQ ID NO: 78222 - RNA, 21 nt, synthetic construct
  source 1..21: mol_type = other RNA
catctggaaggaaacactata

SEQ ID NO: 78223 - RNA, 21 nt, synthetic construct
  source 1..21: mol_type = other RNA
catctggaccagttactctct

SEQ ID NO: 78224 - RNA, 21 nt, synthetic construct
  source 1..21: mol_type = other RNA
catctggatcctgtctcagag

SEQ ID NO: 78225 - RNA, 21 nt, synthetic construct
  source 1..21: mol_type = other RNA
catctggattatagtggtaag

SEQ ID NO: 78226 - RNA, 21 nt, synthetic construct
  source 1..21: mol_type = other RNA
catctggcagcaggggctaag

SEQ ID NO: 78227 - RNA, 21 nt, synthetic construct
  source 1..21: mol_type = other RNA
catctgggatacttctaactt

SEQ ID NO: 78228 - RNA, 21 nt, synthetic construct
  source 1..21: mol_type = other RNA
catctggtcctgagctttcct

SEQ ID NO: 78229 - RNA, 21 nt, synthetic construct
  source 1..21: mol_type = other RNA
catctggtctatctcattata

SEQ ID NO: 78230 - RNA, 21 nt, synthetic construct
  source 1..21: mol_type = other RNA
catctgtcaaaaagagaacac

SEQ ID NO: 78231 - RNA, 21 nt, synthetic construct
  source 1..21: mol_type = other RNA
catctgtcactttcctattca

SEQ ID NO: 78232 - RNA, 21 nt, synthetic construct
  source 1..21: mol_type = other RNA
catctgtcttgtgcatccttt

SEQ ID NO: 78233 - RNA, 21 nt, synthetic construct
  source 1..21: mol_type = other RNA
catctgttaaaagatacgaaa

SEQ ID NO: 78234 - RNA, 21 nt, synthetic construct
  source 1..21: mol_type = other RNA
catctgttaatgggcacttgg

SEQ ID NO: 78235 - RNA, 21 nt, synthetic construct
  source 1..21: mol_type = other RNA
catctgttatagtgtgaaaaa

SEQ ID NO: 78236 - RNA, 21 nt, synthetic construct
  source 1..21: mol_type = other RNA
catcttaagaaccatacagtg

SEQ ID NO: 78237 - RNA, 21 nt, synthetic construct
  source 1..21: mol_type = other RNA
catcttagccgggaggagcca

SEQ ID NO: 78238 - RNA, 21 nt, synthetic construct
  source 1..21: mol_type = other RNA
catcttagctcttcccttaac

SEQ ID NO: 78239 - RNA, 21 nt, synthetic construct
  source 1..21: mol_type = other RNA
catcttaggccataaatcaag

SEQ ID NO: 78240 - RNA, 21 nt, synthetic construct
  source 1..21: mol_type = other RNA
catcttatacttggcaaaaaa

SEQ ID NO: 78241 - RNA, 21 nt, synthetic construct
  source 1..21: mol_type = other RNA
catcttatattaattctgagg

SEQ ID NO: 78242 - RNA, 21 nt, synthetic construct
  source 1..21: mol_type = other RNA
catcttcaagatttcataggc

SEQ ID NO: 78243 - RNA, 21 nt, synthetic construct
  source 1..21: mol_type = other RNA
catcttcacgtggcgctccct

SEQ ID NO: 78244 - RNA, 21 nt, synthetic construct
  source 1..21: mol_type = other RNA
catcttcactgactacacata

SEQ ID NO: 78245 - RNA, 21 nt, synthetic construct
  source 1..21: mol_type = other RNA
catcttcatttctaagccatg

SEQ ID NO: 78246 - RNA, 21 nt, synthetic construct
  source 1..21: mol_type = other RNA
catcttccatacgaaagcctt

SEQ ID NO: 78247 - RNA, 21 nt, synthetic construct
  source 1..21: mol_type = other RNA
catcttcccatgaacatggtt

SEQ ID NO: 78248 - RNA, 21 nt, synthetic construct
  source 1..21: mol_type = other RNA
catcttctctctctgcttcac

SEQ ID NO: 78249 - RNA, 21 nt, synthetic construct
  source 1..21: mol_type = other RNA
catcttcttagtgttcccttc

SEQ ID NO: 78250 - RNA, 21 nt, synthetic construct
  source 1..21: mol_type = other RNA
catcttcttttacttgcttgg

SEQ ID NO: 78251 - RNA, 21 nt, synthetic construct
  source 1..21: mol_type = other RNA
catcttgaactaagtgtgaag

SEQ ID NO: 78252 - RNA, 21 nt, synthetic construct
  source 1..21: mol_type = other RNA
catcttgacttcacttccaag

SEQ ID NO: 78253 - RNA, 21 nt, synthetic construct
  source 1..21: mol_type = other RNA
catcttgcaaaacggaaactt

SEQ ID NO: 78254 - RNA, 21 nt, synthetic construct
  source 1..21: mol_type = other RNA
catcttgcataactcgtaatg

SEQ ID NO: 78255 - RNA, 21 nt, synthetic construct
  source 1..21: mol_type = other RNA
catctttcctgatcacaccct

SEQ ID NO: 78256 - RNA, 21 nt, synthetic construct
  source 1..21: mol_type = other RNA
catctttcctgtgatttatgt

SEQ ID NO: 78257 - RNA, 21 nt, synthetic construct
  source 1..21: mol_type = other RNA
catctttgttacagcagctct

SEQ ID NO: 78258 - RNA, 21 nt, synthetic construct
  source 1..21: mol_type = other RNA
catcttttgacgcgcaacaat

SEQ ID NO: 78259 - RNA, 21 nt, synthetic construct
  source 1..21: mol_type = other RNA
catcttttgagggtatcatat

SEQ ID NO: 78260 - RNA, 21 nt, synthetic construct
  source 1..21: mol_type = other RNA
catcttttgcctggatgaatg

SEQ ID NO: 78261 - RNA, 21 nt, synthetic construct
  source 1..21: mol_type = other RNA
catgaaaacagctaggtgagt

SEQ ID NO: 78262 - RNA, 21 nt, synthetic construct
  source 1..21: mol_type = other RNA
catgaaaagatactcaacatc

SEQ ID NO: 78263 - RNA, 21 nt, synthetic construct
  source 1..21: mol_type = other RNA
catgaaaattgaattataggc

SEQ ID NO: 78264 - RNA, 21 nt, synthetic construct
  source 1..21: mol_type = other RNA
catgaaacttatttccagggg

SEQ ID NO: 78265 - RNA, 21 nt, synthetic construct
  source 1..21: mol_type = other RNA
catgaaagtggagaattacta

SEQ ID NO: 78266 - RNA, 21 nt, synthetic construct
  source 1..21: mol_type = other RNA
catgaaatactcaaactatgc

SEQ ID NO: 78267 - RNA, 21 nt, synthetic construct
  source 1..21: mol_type = other RNA
catgaaatcccctttagtgtt

SEQ ID NO: 78268 - RNA, 21 nt, synthetic construct
  source 1..21: mol_type = other RNA
catgaaatgggtttaaaagag

SEQ ID NO: 78269 - RNA, 21 nt, synthetic construct
  source 1..21: mol_type = other RNA
catgaaattcttgggtgaata

SEQ ID NO: 78270 - RNA, 21 nt, synthetic construct
  source 1..21: mol_type = other RNA
catgaacaagttacaaacata

SEQ ID NO: 78271 - RNA, 21 nt, synthetic construct
  source 1..21: mol_type = other RNA
catgaacaatccttctaatca

SEQ ID NO: 78272 - RNA, 21 nt, synthetic construct
  source 1..21: mol_type = other RNA
catgaacaattttctctcatg

SEQ ID NO: 78273 - RNA, 21 nt, synthetic construct
  source 1..21: mol_type = other RNA
catgaacatggtttgatccca

SEQ ID NO: 78274 - RNA, 21 nt, synthetic construct
  source 1..21: mol_type = other RNA
catgaacccaccaggaggcgg

SEQ ID NO: 78275 - RNA, 21 nt, synthetic construct
  source 1..21: mol_type = other RNA
catgaacctgcatggtgtaaa

SEQ ID NO: 78276 - RNA, 21 nt, synthetic construct
  source 1..21: mol_type = other RNA
catgaaccttcaccaaagatt

SEQ ID NO: 78277 - RNA, 21 nt, synthetic construct
  source 1..21: mol_type = other RNA
catgaacgagaacaaaacaag

SEQ ID NO: 78278 - RNA, 21 nt, synthetic construct
  source 1..21: mol_type = other RNA
catgaactactcaaagaaaat

SEQ ID NO: 78279 - RNA, 21 nt, synthetic construct
  source 1..21: mol_type = other RNA
catgaagaaaacactccagaa

SEQ ID NO: 78280 - RNA, 21 nt, synthetic construct
  source 1..21: mol_type = other RNA
catgaagccagcattacccta

SEQ ID NO: 78281 - RNA, 21 nt, synthetic construct
  source 1..21: mol_type = other RNA
catgaagccctctaagtcagc

SEQ ID NO: 78282 - RNA, 21 nt, synthetic construct
  source 1..21: mol_type = other RNA
catgaaggaaggattggaatg

SEQ ID NO: 78283 - RNA, 21 nt, synthetic construct
  source 1..21: mol_type = other RNA
catgaagtcctcaatcatgtc

SEQ ID NO: 78284 - RNA, 21 nt, synthetic construct
  source 1..21: mol_type = other RNA
catgaataaccaatgtcagag

SEQ ID NO: 78285 - RNA, 21 nt, synthetic construct
  source 1..21: mol_type = other RNA
catgaatacctatttagaggg

SEQ ID NO: 78286 - RNA, 21 nt, synthetic construct
  source 1..21: mol_type = other RNA
catgaatgaatgttgagtttt

SEQ ID NO: 78287 - RNA, 21 nt, synthetic construct
  source 1..21: mol_type = other RNA
catgaatggaaaattcttggt

SEQ ID NO: 78288 - RNA, 21 nt, synthetic construct
  source 1..21: mol_type = other RNA
catgacaagaatctttggcaa

SEQ ID NO: 78289 - RNA, 21 nt, synthetic construct
  source 1..21: mol_type = other RNA
catgacagagttccacctcca

SEQ ID NO: 78290 - RNA, 21 nt, synthetic construct
  source 1..21: mol_type = other RNA
catgacagatcccaaaaaggt

SEQ ID NO: 78291 - RNA, 21 nt, synthetic construct
  source 1..21: mol_type = other RNA
catgacaggtgagtggactgt

SEQ ID NO: 78292 - RNA, 21 nt, synthetic construct
  source 1..21: mol_type = other RNA
catgacatggttttcctacta

SEQ ID NO: 78293 - RNA, 21 nt, synthetic construct
  source 1..21: mol_type = other RNA
catgacatgtgttttatttag

SEQ ID NO: 78294 - RNA, 21 nt, synthetic construct
  source 1..21: mol_type = other RNA
catgaccctgctatgcatact

SEQ ID NO: 78295 - RNA, 21 nt, synthetic construct
  source 1..21: mol_type = other RNA
catgacctatctattaacaga

SEQ ID NO: 78296 - RNA, 21 nt, synthetic construct
  source 1..21: mol_type = other RNA
catgacctgctttcttggggc

SEQ ID NO: 78297 - RNA, 21 nt, synthetic construct
  source 1..21: mol_type = other RNA
catgactggccatccttccca

SEQ ID NO: 78298 - RNA, 21 nt, synthetic construct
  source 1..21: mol_type = other RNA
catgacttttttgcccactct

SEQ ID NO: 78299 - RNA, 21 nt, synthetic construct
  source 1..21: mol_type = other RNA
catgagaaatgttaagattca

SEQ ID NO: 78300 - RNA, 21 nt, synthetic construct
  source 1..21: mol_type = other RNA
catgagacttggagtttgaga

SEQ ID NO: 78301 - RNA, 21 nt, synthetic construct
  source 1..21: mol_type = other RNA
catgagagaaaattgttcatg

SEQ ID NO: 78302 - RNA, 21 nt, synthetic construct
  source 1..21: mol_type = other RNA
catgagagctaagggaagttt

SEQ ID NO: 78303 - RNA, 21 nt, synthetic construct
  source 1..21: mol_type = other RNA
catgagagctgtgccgaggca

SEQ ID NO: 78304 - RNA, 21 nt, synthetic construct
  source 1..21: mol_type = other RNA
catgagatactacgcctagct

SEQ ID NO: 78305 - RNA, 21 nt, synthetic construct
  source 1..21: mol_type = other RNA
catgagattacatagcaagga

SEQ ID NO: 78306 - RNA, 21 nt, synthetic construct
  source 1..21: mol_type = other RNA
catgagccacagggcccagcc

SEQ ID NO: 78307 - RNA, 21 nt, synthetic construct
  source 1..21: mol_type = other RNA
catgagccactgcgggcccag

SEQ ID NO: 78308 - RNA, 21 nt, synthetic construct
  source 1..21: mol_type = other RNA
catgaggaaagcaggttgcat

SEQ ID NO: 78309 - RNA, 21 nt, synthetic construct
  source 1..21: mol_type = other RNA
catgaggcatattattgtaac

SEQ ID NO: 78310 - RNA, 21 nt, synthetic construct
  source 1..21: mol_type = other RNA
catgaggcctctccccttgac

SEQ ID NO: 78311 - RNA, 21 nt, synthetic construct
  source 1..21: mol_type = other RNA
catgaggtcacccaagccaca

SEQ ID NO: 78312 - RNA, 21 nt, synthetic construct
  source 1..21: mol_type = other RNA
catgagtaaaaagaaatctgc

SEQ ID NO: 78313 - RNA, 21 nt, synthetic construct
  source 1..21: mol_type = other RNA
catgagtatctggtgttgctt

SEQ ID NO: 78314 - RNA, 21 nt, synthetic construct
  source 1..21: mol_type = other RNA
catgagtcctgaaaattcctt

SEQ ID NO: 78315 - RNA, 21 nt, synthetic construct
  source 1..21: mol_type = other RNA
catgagtcgccatacctggtc

SEQ ID NO: 78316 - RNA, 21 nt, synthetic construct
  source 1..21: mol_type = other RNA
catgatctcacgtcaccgcaa

SEQ ID NO: 78317 - RNA, 21 nt, synthetic construct
  source 1..21: mol_type = other RNA
catgatctttggaaatgaata

SEQ ID NO: 78318 - RNA, 21 nt, synthetic construct
  source 1..21: mol_type = other RNA
catgatgcagcccctgccaca

SEQ ID NO: 78319 - RNA, 21 nt, synthetic construct
  source 1..21: mol_type = other RNA
catgatggctcaacgcctgtg

SEQ ID NO: 78320 - RNA, 21 nt, synthetic construct
  source 1..21: mol_type = other RNA
catgatgtttggctccttacc

SEQ ID NO: 78321 - RNA, 21 nt, synthetic construct
  source 1..21: mol_type = other RNA
catgattcaaaatgtgatggc

SEQ ID NO: 78322 - RNA, 21 nt, synthetic construct
  source 1..21: mol_type = other RNA
catgattcagtcttggtagtt

SEQ ID NO: 78323 - RNA, 21 nt, synthetic construct
  source 1..21: mol_type = other RNA
catgattccccttatatggga

SEQ ID NO: 78324 - RNA, 21 nt, synthetic construct
  source 1..21: mol_type = other RNA
catgattgaggacttcatgta

SEQ ID NO: 78325 - RNA, 21 nt, synthetic construct
  source 1..21: mol_type = other RNA
catgattgggtcaacaaacta

SEQ ID NO: 78326 - RNA, 21 nt, synthetic construct
  source 1..21: mol_type = other RNA
catgatttaatagaggtctgt

SEQ ID NO: 78327 - RNA, 21 nt, synthetic construct
  source 1..21: mol_type = other RNA
catgatttataatccattggg

SEQ ID NO: 78328 - RNA, 21 nt, synthetic construct
  source 1..21: mol_type = other RNA
catgatttggtgtgtgcaaag

SEQ ID NO: 78329 - RNA, 21 nt, synthetic construct
  source 1..21: mol_type = other RNA
catgcaactgaaaacatcttt

SEQ ID NO: 78330 - RNA, 21 nt, synthetic construct
  source 1..21: mol_type = other RNA
catgcaattccccagcctcag

SEQ ID NO: 78331 - RNA, 21 nt, synthetic construct
  source 1..21: mol_type = other RNA
catgcacaaggtcaagagcgg

SEQ ID NO: 78332 - RNA, 21 nt, synthetic construct
  source 1..21: mol_type = other RNA
catgcacacagagggagcgcc

SEQ ID NO: 78333 - RNA, 21 nt, synthetic construct
  source 1..21: mol_type = other RNA
catgcacacaggagaacttgt

SEQ ID NO: 78334 - RNA, 21 nt, synthetic construct
  source 1..21: mol_type = other RNA
catgcacacgctggaagggag

SEQ ID NO: 78335 - RNA, 21 nt, synthetic construct
  source 1..21: mol_type = other RNA
catgcacactagacctttctt

SEQ ID NO: 78336 - RNA, 21 nt, synthetic construct
  source 1..21: mol_type = other RNA
catgcacgagaaaagcacagg

SEQ ID NO: 78337 - RNA, 21 nt, synthetic construct
  source 1..21: mol_type = other RNA
catgcacggacttggcacagg

SEQ ID NO: 78338 - RNA, 21 nt, synthetic construct
  source 1..21: mol_type = other RNA
catgcaggagaaacatggctt

SEQ ID NO: 78339 - RNA, 21 nt, synthetic construct
  source 1..21: mol_type = other RNA
catgcaggttcatgtgtgctt

SEQ ID NO: 78340 - RNA, 21 nt, synthetic construct
  source 1..21: mol_type = other RNA
catgcagtacttgtctttttg

SEQ ID NO: 78341 - RNA, 21 nt, synthetic construct
  source 1..21: mol_type = other RNA
catgcagtagctcatcattta

SEQ ID NO: 78342 - RNA, 21 nt, synthetic construct
  source 1..21: mol_type = other RNA
catgcatatgtttgtaacttg

SEQ ID NO: 78343 - RNA, 21 nt, synthetic construct
  source 1..21: mol_type = other RNA
catgcatccacattttgtgac

SEQ ID NO: 78344 - RNA, 21 nt, synthetic construct
  source 1..21: mol_type = other RNA
catgcatgcacacagagggag

SEQ ID NO: 78345 - RNA, 21 nt, synthetic construct
  source 1..21: mol_type = other RNA
catgcatgtctgtctgttcac

SEQ ID NO: 78346 - RNA, 21 nt, synthetic construct
  source 1..21: mol_type = other RNA
catgcattcgtccctaaacac

SEQ ID NO: 78347 - RNA, 21 nt, synthetic construct
  source 1..21: mol_type = other RNA
catgccacaccacatccagct

SEQ ID NO: 78348 - RNA, 21 nt, synthetic construct
  source 1..21: mol_type = other RNA
catgccagctttggctgaaat

SEQ ID NO: 78349 - RNA, 21 nt, synthetic construct
  source 1..21: mol_type = other RNA
catgccatcctggatttggga

SEQ ID NO: 78350 - RNA, 21 nt, synthetic construct
  source 1..21: mol_type = other RNA
catgcccatgtgcattattgt

SEQ ID NO: 78351 - RNA, 21 nt, synthetic construct
  source 1..21: mol_type = other RNA
catgccgggacaagagtctgc

SEQ ID NO: 78352 - RNA, 21 nt, synthetic construct
  source 1..21: mol_type = other RNA
catgcctctcccaccatctct

SEQ ID NO: 78353 - RNA, 21 nt, synthetic construct
  source 1..21: mol_type = other RNA
catgcctctgttacagctctt

SEQ ID NO: 78354 - RNA, 21 nt, synthetic construct
  source 1..21: mol_type = other RNA
catgcctgacaaagtatgaga

SEQ ID NO: 78355 - RNA, 21 nt, synthetic construct
  source 1..21: mol_type = other RNA
catgcctgggtaattaaacat

SEQ ID NO: 78356 - RNA, 21 nt, synthetic construct
  source 1..21: mol_type = other RNA
catgcctttcagcatagcaga

SEQ ID NO: 78357 - RNA, 21 nt, synthetic construct
  source 1..21: mol_type = other RNA
catgcgacatatcagggatca

SEQ ID NO: 78358 - RNA, 21 nt, synthetic construct
  source 1..21: mol_type = other RNA
catgcgccatcacacccagta

SEQ ID NO: 78359 - RNA, 21 nt, synthetic construct
  source 1..21: mol_type = other RNA
catgctaactgcagaggtcag

SEQ ID NO: 78360 - RNA, 21 nt, synthetic construct
  source 1..21: mol_type = other RNA
catgctaagtgtttaggatat

SEQ ID NO: 78361 - RNA, 21 nt, synthetic construct
  source 1..21: mol_type = other RNA
catgctaggggctgttcccag

SEQ ID NO: 78362 - RNA, 21 nt, synthetic construct
  source 1..21: mol_type = other RNA
catgctcactgtctccatgtc

SEQ ID NO: 78363 - RNA, 21 nt, synthetic construct
  source 1..21: mol_type = other RNA
catgctcccatttgggactga

SEQ ID NO: 78364 - RNA, 21 nt, synthetic construct
  source 1..21: mol_type = other RNA
catgctctgataggataatgt

SEQ ID NO: 78365 - RNA, 21 nt, synthetic construct
  source 1..21: mol_type = other RNA
catgctcttaagtatttttgt

SEQ ID NO: 78366 - RNA, 21 nt, synthetic construct
  source 1..21: mol_type = other RNA
catgctgaggccccaggggac

SEQ ID NO: 78367 - RNA, 21 nt, synthetic construct
  source 1..21: mol_type = other RNA
catgctgcaactgagaagagc

SEQ ID NO: 78368 - RNA, 21 nt, synthetic construct
  source 1..21: mol_type = other RNA
catgctgggagaccaggagtt

SEQ ID NO: 78369 - RNA, 21 nt, synthetic construct
  source 1..21: mol_type = other RNA
catgctgtgaatttggatttg

SEQ ID NO: 78370 - RNA, 21 nt, synthetic construct
  source 1..21: mol_type = other RNA
catgcttagccttccagagac

SEQ ID NO: 78371 - RNA, 21 nt, synthetic construct
  source 1..21: mol_type = other RNA
catgcttaggatcccagtcct

SEQ ID NO: 78372 - RNA, 21 nt, synthetic construct
  source 1..21: mol_type = other RNA
catgcttccaaaagcaggccc

SEQ ID NO: 78373 - RNA, 21 nt, synthetic construct
  source 1..21: mol_type = other RNA
catgcttgctccagagaagtt

SEQ ID NO: 78374 - RNA, 21 nt, synthetic construct
  source 1..21: mol_type = other RNA
catggaaacaacctaaatgtc

SEQ ID NO: 78375 - RNA, 21 nt, synthetic construct
  source 1..21: mol_type = other RNA
catggaaactacaattactgt

SEQ ID NO: 78376 - RNA, 21 nt, synthetic construct
  source 1..21: mol_type = other RNA
catggaagttatttaatctct

SEQ ID NO: 78377 - RNA, 21 nt, synthetic construct
  source 1..21: mol_type = other RNA
catggactagactgcctgagg

SEQ ID NO: 78378 - RNA, 21 nt, synthetic construct
  source 1..21: mol_type = other RNA
catggacttcctattttataa

SEQ ID NO: 78379 - RNA, 21 nt, synthetic construct
  source 1..21: mol_type = other RNA
catggagacagtgagcatgct

SEQ ID NO: 78380 - RNA, 21 nt, synthetic construct
  source 1..21: mol_type = other RNA
catggaggggccagttgagag

SEQ ID NO: 78381 - RNA, 21 nt, synthetic construct
  source 1..21: mol_type = other RNA
catggatatttggccgggcgc

SEQ ID NO: 78382 - RNA, 21 nt, synthetic construct
  source 1..21: mol_type = other RNA
catggcaggtttcaagtgaac

SEQ ID NO: 78383 - RNA, 21 nt, synthetic construct
  source 1..21: mol_type = other RNA
catggcatcggggcctacagt

SEQ ID NO: 78384 - RNA, 21 nt, synthetic construct
  source 1..21: mol_type = other RNA
catggccagtatctcctttcc

SEQ ID NO: 78385 - RNA, 21 nt, synthetic construct
  source 1..21: mol_type = other RNA
catggcttagaaatgaagatg

SEQ ID NO: 78386 - RNA, 21 nt, synthetic construct
  source 1..21: mol_type = other RNA
catgggaagatgctccctcta

SEQ ID NO: 78387 - RNA, 21 nt, synthetic construct
  source 1..21: mol_type = other RNA
catgggaatgcatatatctgt

SEQ ID NO: 78388 - RNA, 21 nt, synthetic construct
  source 1..21: mol_type = other RNA
catgggacaagtgggtggatg

SEQ ID NO: 78389 - RNA, 21 nt, synthetic construct
  source 1..21: mol_type = other RNA
catgggagccaaacttgaacc

SEQ ID NO: 78390 - RNA, 21 nt, synthetic construct
  source 1..21: mol_type = other RNA
catgggaggtaatactataag

SEQ ID NO: 78391 - RNA, 21 nt, synthetic construct
  source 1..21: mol_type = other RNA
catgggcatgggtccaagaca

SEQ ID NO: 78392 - RNA, 21 nt, synthetic construct
  source 1..21: mol_type = other RNA
catgggccgggcgtagtggct

SEQ ID NO: 78393 - RNA, 21 nt, synthetic construct
  source 1..21: mol_type = other RNA
catgggctaaataaaacatta

SEQ ID NO: 78394 - RNA, 21 nt, synthetic construct
  source 1..21: mol_type = other RNA
catggggagttttaggaaaat

SEQ ID NO: 78395 - RNA, 21 nt, synthetic construct
  source 1..21: mol_type = other RNA
catgggggcgcgtgcctatgg

SEQ ID NO: 78396 - RNA, 21 nt, synthetic construct
  source 1..21: mol_type = other RNA
catgggtccaagacaggaaga

SEQ ID NO: 78397 - RNA, 21 nt, synthetic construct
  source 1..21: mol_type = other RNA
catgggtggaaattaaacaca

SEQ ID NO: 78398 - RNA, 21 nt, synthetic construct
  source 1..21: mol_type = other RNA
catgggttgatttttaatgag

SEQ ID NO: 78399 - RNA, 21 nt, synthetic construct
  source 1..21: mol_type = other RNA
catggtaatttgtccatctgg

SEQ ID NO: 78400 - RNA, 21 nt, synthetic construct
  source 1..21: mol_type = other RNA
catggtagaccatataatcta

SEQ ID NO: 78401 - RNA, 21 nt, synthetic construct
  source 1..21: mol_type = other RNA
catggtatcaattgtaatgtc

SEQ ID NO: 78402 - RNA, 21 nt, synthetic construct
  source 1..21: mol_type = other RNA
catggtatgtgccatctcctt

SEQ ID NO: 78403 - RNA, 21 nt, synthetic construct
  source 1..21: mol_type = other RNA
catggtcaaatcaatacttca

SEQ ID NO: 78404 - RNA, 21 nt, synthetic construct
  source 1..21: mol_type = other RNA
catggtccacagaggcttttt

SEQ ID NO: 78405 - RNA, 21 nt, synthetic construct
  source 1..21: mol_type = other RNA
catggtgataactggtgcttt

SEQ ID NO: 78406 - RNA, 21 nt, synthetic construct
  source 1..21: mol_type = other RNA
catggtgggccttgcaagcca

SEQ ID NO: 78407 - RNA, 21 nt, synthetic construct
  source 1..21: mol_type = other RNA
catggtggtaggtgtgtgtaa

SEQ ID NO: 78408 - RNA, 21 nt, synthetic construct
  source 1..21: mol_type = other RNA
catggtgtaaaatacaacagc

SEQ ID NO: 78409 - RNA, 21 nt, synthetic construct
  source 1..21: mol_type = other RNA
catggtgtgtctgcgccttaa

SEQ ID NO: 78410 - RNA, 21 nt, synthetic construct
  source 1..21: mol_type = other RNA
catggttctgtgctagatgct

SEQ ID NO: 78411 - RNA, 21 nt, synthetic construct
  source 1..21: mol_type = other RNA
catggtttgatcccactagtg

SEQ ID NO: 78412 - RNA, 21 nt, synthetic construct
  source 1..21: mol_type = other RNA
catggttttaatgggcattag

SEQ ID NO: 78413 - RNA, 21 nt, synthetic construct
  source 1..21: mol_type = other RNA
catggttttcctactaacaag

SEQ ID NO: 78414 - RNA, 21 nt, synthetic construct
  source 1..21: mol_type = other RNA
catgtaaaaactgtttggctg

SEQ ID NO: 78415 - RNA, 21 nt, synthetic construct
  source 1..21: mol_type = other RNA
catgtaaaacagacccttatg

SEQ ID NO: 78416 - RNA, 21 nt, synthetic construct
  source 1..21: mol_type = other RNA
catgtaactaattactgtttc

SEQ ID NO: 78417 - RNA, 21 nt, synthetic construct
  source 1..21: mol_type = other RNA
catgtaacttgcttaggctga

SEQ ID NO: 78418 - RNA, 21 nt, synthetic construct
  source 1..21: mol_type = other RNA
catgtaatgcaaactctaaat

SEQ ID NO: 78419 - RNA, 21 nt, synthetic construct
  source 1..21: mol_type = other RNA
catgtacaatgaattagcaat

SEQ ID NO: 78420 - RNA, 21 nt, synthetic construct
  source 1..21: mol_type = other RNA
catgtacgccaattttcatag

SEQ ID NO: 78421 - RNA, 21 nt, synthetic construct
  source 1..21: mol_type = other RNA
catgtagatatgggagtccct

SEQ ID NO: 78422 - RNA, 21 nt, synthetic construct
  source 1..21: mol_type = other RNA
catgtagttttccctgtgtat

SEQ ID NO: 78423 - RNA, 21 nt, synthetic construct
  source 1..21: mol_type = other RNA
catgtatatgctgtttttgaa

SEQ ID NO: 78424 - RNA, 21 nt, synthetic construct
  source 1..21: mol_type = other RNA
catgtatgtttctcattcttc

SEQ ID NO: 78425 - RNA, 21 nt, synthetic construct
  source 1..21: mol_type = other RNA
catgtatgttttagccttaaa

SEQ ID NO: 78426 - RNA, 21 nt, synthetic construct
  source 1..21: mol_type = other RNA
catgtattttcctaaccactg

SEQ ID NO: 78427 - RNA, 21 nt, synthetic construct
  source 1..21: mol_type = other RNA
catgtcaaatttttcacattc

SEQ ID NO: 78428 - RNA, 21 nt, synthetic construct
  source 1..21: mol_type = other RNA
catgtcaagaatgaagtcaga

SEQ ID NO: 78429 - RNA, 21 nt, synthetic construct
  source 1..21: mol_type = other RNA
catgtcagagacacatactga

SEQ ID NO: 78430 - RNA, 21 nt, synthetic construct
  source 1..21: mol_type = other RNA
catgtcagccacaagacataa

SEQ ID NO: 78431 - RNA, 21 nt, synthetic construct
  source 1..21: mol_type = other RNA
catgtcatgggccgggcgtag

SEQ ID NO: 78432 - RNA, 21 nt, synthetic construct
  source 1..21: mol_type = other RNA
catgtcatgtatatgctgttt

SEQ ID NO: 78433 - RNA, 21 nt, synthetic construct
  source 1..21: mol_type = other RNA
catgtcatgttcccggattgg

SEQ ID NO: 78434 - RNA, 21 nt, synthetic construct
  source 1..21: mol_type = other RNA
catgtccatagttaatgtgtg

SEQ ID NO: 78435 - RNA, 21 nt, synthetic construct
  source 1..21: mol_type = other RNA
catgtcccctggagttaattc

SEQ ID NO: 78436 - RNA, 21 nt, synthetic construct
  source 1..21: mol_type = other RNA
catgtcccctgtccaagtatt

SEQ ID NO: 78437 - RNA, 21 nt, synthetic construct
  source 1..21: mol_type = other RNA
catgtcctcacctcacattca

SEQ ID NO: 78438 - RNA, 21 nt, synthetic construct
  source 1..21: mol_type = other RNA
catgtctaaagtattgtttca

SEQ ID NO: 78439 - RNA, 21 nt, synthetic construct
  source 1..21: mol_type = other RNA
catgtctacctgtctttccca

SEQ ID NO: 78440 - RNA, 21 nt, synthetic construct
  source 1..21: mol_type = other RNA
catgtctgcaggagccttgct

SEQ ID NO: 78441 - RNA, 21 nt, synthetic construct
  source 1..21: mol_type = other RNA
catgtctgtagttacaactac

SEQ ID NO: 78442 - RNA, 21 nt, synthetic construct
  source 1..21: mol_type = other RNA
catgtctgtctgttcacattt

SEQ ID NO: 78443 - RNA, 21 nt, synthetic construct
  source 1..21: mol_type = other RNA
catgtctgtgtagttcatcag

SEQ ID NO: 78444 - RNA, 21 nt, synthetic construct
  source 1..21: mol_type = other RNA
catgtcttcagaggccctggt

SEQ ID NO: 78445 - RNA, 21 nt, synthetic construct
  source 1..21: mol_type = other RNA
catgtcttcttggattttctt

SEQ ID NO: 78446 - RNA, 21 nt, synthetic construct
  source 1..21: mol_type = other RNA
catgtcttggctattgtcagt

SEQ ID NO: 78447 - RNA, 21 nt, synthetic construct
  source 1..21: mol_type = other RNA
catgtcttggtgtgctctttt

SEQ ID NO: 78448 - RNA, 21 nt, synthetic construct
  source 1..21: mol_type = other RNA
catgtgaggatttatttctgg

SEQ ID NO: 78449 - RNA, 21 nt, synthetic construct
  source 1..21: mol_type = other RNA
catgtgcaggaaacttccaga

SEQ ID NO: 78450 - RNA, 21 nt, synthetic construct
  source 1..21: mol_type = other RNA
catgtggaacataatctttgg

SEQ ID NO: 78451 - RNA, 21 nt, synthetic construct
  source 1..21: mol_type = other RNA
catgtggccaggaggaggagg

SEQ ID NO: 78452 - RNA, 21 nt, synthetic construct
  source 1..21: mol_type = other RNA
catgtggcttgtggctacacc

SEQ ID NO: 78453 - RNA, 21 nt, synthetic construct
  source 1..21: mol_type = other RNA
catgtggggactttgtggcct

SEQ ID NO: 78454 - RNA, 21 nt, synthetic construct
  source 1..21: mol_type = other RNA
catgtggttattgagtctgta

SEQ ID NO: 78455 - RNA, 21 nt, synthetic construct
  source 1..21: mol_type = other RNA
catgtgtaaaacatctggaag

SEQ ID NO: 78456 - RNA, 21 nt, synthetic construct
  source 1..21: mol_type = other RNA
catgtgtatttagggagcata

SEQ ID NO: 78457 - RNA, 21 nt, synthetic construct
  source 1..21: mol_type = other RNA
catgtgtgcttacacacacgt

SEQ ID NO: 78458 - RNA, 21 nt, synthetic construct
  source 1..21: mol_type = other RNA
catgtgttggcactgaagcca

SEQ ID NO: 78459 - RNA, 21 nt, synthetic construct
  source 1..21: mol_type = other RNA
catgtgttgtgcacacatcca

SEQ ID NO: 78460 - RNA, 21 nt, synthetic construct
  source 1..21: mol_type = other RNA
catgtgttttatttaggccct

SEQ ID NO: 78461 - RNA, 21 nt, synthetic construct
  source 1..21: mol_type = other RNA
catgttactcattatggttgt

SEQ ID NO: 78462 - RNA, 21 nt, synthetic construct
  source 1..21: mol_type = other RNA
catgttagattaggaaacaga

SEQ ID NO: 78463 - RNA, 21 nt, synthetic construct
  source 1..21: mol_type = other RNA
catgttagcataattcgaaat

SEQ ID NO: 78464 - RNA, 21 nt, synthetic construct
  source 1..21: mol_type = other RNA
catgttaggttgaaagttcag

SEQ ID NO: 78465 - RNA, 21 nt, synthetic construct
  source 1..21: mol_type = other RNA
catgttatttggggattctgc

SEQ ID NO: 78466 - RNA, 21 nt, synthetic construct
  source 1..21: mol_type = other RNA
catgttcaaggtgttcctgaa

SEQ ID NO: 78467 - RNA, 21 nt, synthetic construct
  source 1..21: mol_type = other RNA
catgttcactgcagaattact

SEQ ID NO: 78468 - RNA, 21 nt, synthetic construct
  source 1..21: mol_type = other RNA
catgttcatgggaagatgctc

SEQ ID NO: 78469 - RNA, 21 nt, synthetic construct
  source 1..21: mol_type = other RNA
catgttcccggattggaaaac

SEQ ID NO: 78470 - RNA, 21 nt, synthetic construct
  source 1..21: mol_type = other RNA
catgttccctagaacttaaaa

SEQ ID NO: 78471 - RNA, 21 nt, synthetic construct
  source 1..21: mol_type = other RNA
catgttctttatagcatttga

SEQ ID NO: 78472 - RNA, 21 nt, synthetic construct
  source 1..21: mol_type = other RNA
catgttgaccatttttatatc

SEQ ID NO: 78473 - RNA, 21 nt, synthetic construct
  source 1..21: mol_type = other RNA
catgttgagtcttgtttaccc

SEQ ID NO: 78474 - RNA, 21 nt, synthetic construct
  source 1..21: mol_type = other RNA
catgttgctttgcgaaatagt

SEQ ID NO: 78475 - RNA, 21 nt, synthetic construct
  source 1..21: mol_type = other RNA
catgttggatagtttctcaac

SEQ ID NO: 78476 - RNA, 21 nt, synthetic construct
  source 1..21: mol_type = other RNA
catgttgggccaacttccagc

SEQ ID NO: 78477 - RNA, 21 nt, synthetic construct
  source 1..21: mol_type = other RNA
catgttgggtaaaaataatca

SEQ ID NO: 78478 - RNA, 21 nt, synthetic construct
  source 1..21: mol_type = other RNA
catgttgtgtagaaatgtgga

SEQ ID NO: 78479 - RNA, 21 nt, synthetic construct
  source 1..21: mol_type = other RNA
catgttgttcttttcaaaaac

SEQ ID NO: 78480 - RNA, 21 nt, synthetic construct
  source 1..21: mol_type = other RNA
catgttgttgaatgtggcaga

SEQ ID NO: 78481 - RNA, 21 nt, synthetic construct
  source 1..21: mol_type = other RNA
catgtttaactatcctatgtg

SEQ ID NO: 78482 - RNA, 21 nt, synthetic construct
  source 1..21: mol_type = other RNA
catgtttacagaaatatacct

SEQ ID NO: 78483 - RNA, 21 nt, synthetic construct
  source 1..21: mol_type = other RNA
catgtttagcaagattactgg

SEQ ID NO: 78484 - RNA, 21 nt, synthetic construct
  source 1..21: mol_type = other RNA
catgtttccataaaaagcgtt

SEQ ID NO: 78485 - RNA, 21 nt, synthetic construct
  source 1..21: mol_type = other RNA
catgtttctcctgcatgggga

SEQ ID NO: 78486 - RNA, 21 nt, synthetic construct
  source 1..21: mol_type = other RNA
catgtttgaattttccattca

SEQ ID NO: 78487 - RNA, 21 nt, synthetic construct
  source 1..21: mol_type = other RNA
catgtttggtcaattgatctg

SEQ ID NO: 78488 - RNA, 21 nt, synthetic construct
  source 1..21: mol_type = other RNA
catgtttgtggttttaacctc

SEQ ID NO: 78489 - RNA, 21 nt, synthetic construct
  source 1..21: mol_type = other RNA
catgttttaggagtcaactaa

SEQ ID NO: 78490 - RNA, 21 nt, synthetic construct
  source 1..21: mol_type = other RNA
catgttttatttcttgacctc

SEQ ID NO: 78491 - RNA, 21 nt, synthetic construct
  source 1..21: mol_type = other RNA
cattaaaaatcaacccatgaa

SEQ ID NO: 78492 - RNA, 21 nt, synthetic construct
  source 1..21: mol_type = other RNA
cattaaaaggtataaaggatg

SEQ ID NO: 78493 - RNA, 21 nt, synthetic construct
  source 1..21: mol_type = other RNA
cattaaagacagctactaaac

SEQ ID NO: 78494 - RNA, 21 nt, synthetic construct
  source 1..21: mol_type = other RNA
cattaaataagggcattttca

SEQ ID NO: 78495 - RNA, 21 nt, synthetic construct
  source 1..21: mol_type = other RNA
cattaacagatgaatgaacaa

SEQ ID NO: 78496 - RNA, 21 nt, synthetic construct
  source 1..21: mol_type = other RNA
cattaacagctcagaagctat

SEQ ID NO: 78497 - RNA, 21 nt, synthetic construct
  source 1..21: mol_type = other RNA
cattaactatggacatgagga

SEQ ID NO: 78498 - RNA, 21 nt, synthetic construct
  source 1..21: mol_type = other RNA
cattaagccagtcactaaaaa

SEQ ID NO: 78499 - RNA, 21 nt, synthetic construct
  source 1..21: mol_type = other RNA
cattaaggaagaattaacact

SEQ ID NO: 78500 - RNA, 21 nt, synthetic construct
  source 1..21: mol_type = other RNA
cattaaggacatccacaacat

SEQ ID NO: 78501 - RNA, 21 nt, synthetic construct
  source 1..21: mol_type = other RNA
cattaagggaaacagggttac

SEQ ID NO: 78502 - RNA, 21 nt, synthetic construct
  source 1..21: mol_type = other RNA
cattaataagatcatacacct

SEQ ID NO: 78503 - RNA, 21 nt, synthetic construct
  source 1..21: mol_type = other RNA
cattaatctcatccacaatga

SEQ ID NO: 78504 - RNA, 21 nt, synthetic construct
  source 1..21: mol_type = other RNA
cattaatgcaacctgctttcc

SEQ ID NO: 78505 - RNA, 21 nt, synthetic construct
  source 1..21: mol_type = other RNA
cattaattgagagctttcttt

SEQ ID NO: 78506 - RNA, 21 nt, synthetic construct
  source 1..21: mol_type = other RNA
cattacaacagcaaggctcct

SEQ ID NO: 78507 - RNA, 21 nt, synthetic construct
  source 1..21: mol_type = other RNA
cattacaattgataccatgaa

SEQ ID NO: 78508 - RNA, 21 nt, synthetic construct
  source 1..21: mol_type = other RNA
cattacagaaaaaattagcct

SEQ ID NO: 78509 - RNA, 21 nt, synthetic construct
  source 1..21: mol_type = other RNA
cattacagtctcgaccccctg

SEQ ID NO: 78510 - RNA, 21 nt, synthetic construct
  source 1..21: mol_type = other RNA
cattacatattttgtaacgtg

SEQ ID NO: 78511 - RNA, 21 nt, synthetic construct
  source 1..21: mol_type = other RNA
cattacatgaatggaaaattc

SEQ ID NO: 78512 - RNA, 21 nt, synthetic construct
  source 1..21: mol_type = other RNA
cattacatttgcttaggctgt

SEQ ID NO: 78513 - RNA, 21 nt, synthetic construct
  source 1..21: mol_type = other RNA
cattaccaaaacctggtatga

SEQ ID NO: 78514 - RNA, 21 nt, synthetic construct
  source 1..21: mol_type = other RNA
cattaccaataaaagcctcat

SEQ ID NO: 78515 - RNA, 21 nt, synthetic construct
  source 1..21: mol_type = other RNA
cattaccaggctggaagaatt

SEQ ID NO: 78516 - RNA, 21 nt, synthetic construct
  source 1..21: mol_type = other RNA
cattaccttatagatgacgaa

SEQ ID NO: 78517 - RNA, 21 nt, synthetic construct
  source 1..21: mol_type = other RNA
cattacgagttatgcaagatg

SEQ ID NO: 78518 - RNA, 21 nt, synthetic construct
  source 1..21: mol_type = other RNA
cattactcggtatgtacccaa

SEQ ID NO: 78519 - RNA, 21 nt, synthetic construct
  source 1..21: mol_type = other RNA
cattactcgtggttatagcca

SEQ ID NO: 78520 - RNA, 21 nt, synthetic construct
  source 1..21: mol_type = other RNA
cattactcttctactcactgt

SEQ ID NO: 78521 - RNA, 21 nt, synthetic construct
  source 1..21: mol_type = other RNA
cattacttaggcagttattaa

SEQ ID NO: 78522 - RNA, 21 nt, synthetic construct
  source 1..21: mol_type = other RNA
cattacttttttgtagagaca

SEQ ID NO: 78523 - RNA, 21 nt, synthetic construct
  source 1..21: mol_type = other RNA
cattagaatcatccggggagc

SEQ ID NO: 78524 - RNA, 21 nt, synthetic construct
  source 1..21: mol_type = other RNA
cattagaattcaggacagtca

SEQ ID NO: 78525 - RNA, 21 nt, synthetic construct
  source 1..21: mol_type = other RNA
cattagacactaactttctat

SEQ ID NO: 78526 - RNA, 21 nt, synthetic construct
  source 1..21: mol_type = other RNA
cattagagaagaatgagaaac

SEQ ID NO: 78527 - RNA, 21 nt, synthetic construct
  source 1..21: mol_type = other RNA
cattagagccccaagaaagca

SEQ ID NO: 78528 - RNA, 21 nt, synthetic construct
  source 1..21: mol_type = other RNA
cattagagtaagcaactgcat

SEQ ID NO: 78529 - RNA, 21 nt, synthetic construct
  source 1..21: mol_type = other RNA
cattagcagttctgtaccctt

SEQ ID NO: 78530 - RNA, 21 nt, synthetic construct
  source 1..21: mol_type = other RNA
cattagccactctgaattctc

SEQ ID NO: 78531 - RNA, 21 nt, synthetic construct
  source 1..21: mol_type = other RNA
cattagcctagacctcaaatt

SEQ ID NO: 78532 - RNA, 21 nt, synthetic construct
  source 1..21: mol_type = other RNA
cattaggatagctattatttg

SEQ ID NO: 78533 - RNA, 21 nt, synthetic construct
  source 1..21: mol_type = other RNA
cattaggctctgggtcagaat

SEQ ID NO: 78534 - RNA, 21 nt, synthetic construct
  source 1..21: mol_type = other RNA
cattaggttgatggctgtact

SEQ ID NO: 78535 - RNA, 21 nt, synthetic construct
  source 1..21: mol_type = other RNA
cattagtgaattcacagtaga

SEQ ID NO: 78536 - RNA, 21 nt, synthetic construct
  source 1..21: mol_type = other RNA
cattagtggaaaaactgcagc

SEQ ID NO: 78537 - RNA, 21 nt, synthetic construct
  source 1..21: mol_type = other RNA
cattagtggtggtagtaagga

SEQ ID NO: 78538 - RNA, 21 nt, synthetic construct
  source 1..21: mol_type = other RNA
cattagttatctcttagacct

SEQ ID NO: 78539 - RNA, 21 nt, synthetic construct
  source 1..21: mol_type = other RNA
cattataaaataggaagtcca

SEQ ID NO: 78540 - RNA, 21 nt, synthetic construct
  source 1..21: mol_type = other RNA
cattataacataaaagcgtac

SEQ ID NO: 78541 - RNA, 21 nt, synthetic construct
  source 1..21: mol_type = other RNA
cattatatgaataaaccacgc

SEQ ID NO: 78542 - RNA, 21 nt, synthetic construct
  source 1..21: mol_type = other RNA
cattatcccagacagatatat

SEQ ID NO: 78543 - RNA, 21 nt, synthetic construct
  source 1..21: mol_type = other RNA
cattatcccagatctaacaaa

SEQ ID NO: 78544 - RNA, 21 nt, synthetic construct
  source 1..21: mol_type = other RNA
cattatcctatcagagcatgt

SEQ ID NO: 78545 - RNA, 21 nt, synthetic construct
  source 1..21: mol_type = other RNA
cattatcttctaccttttgtt

SEQ ID NO: 78546 - RNA, 21 nt, synthetic construct
  source 1..21: mol_type = other RNA
cattatggttgttggctaaaa

SEQ ID NO: 78547 - RNA, 21 nt, synthetic construct
  source 1..21: mol_type = other RNA
cattattcttacagtgacata

SEQ ID NO: 78548 - RNA, 21 nt, synthetic construct
  source 1..21: mol_type = other RNA
cattcaaatgatattcactga

SEQ ID NO: 78549 - RNA, 21 nt, synthetic construct
  source 1..21: mol_type = other RNA
cattcaacaacatggatgaac

SEQ ID NO: 78550 - RNA, 21 nt, synthetic construct
  source 1..21: mol_type = other RNA
cattcaagcagaaatgagttc

SEQ ID NO: 78551 - RNA, 21 nt, synthetic construct
  source 1..21: mol_type = other RNA
cattcaatccttgtaactttt

SEQ ID NO: 78552 - RNA, 21 nt, synthetic construct
  source 1..21: mol_type = other RNA
cattcaattgtcctggcagat

SEQ ID NO: 78553 - RNA, 21 nt, synthetic construct
  source 1..21: mol_type = other RNA
cattcacacaccctttcttag

SEQ ID NO: 78554 - RNA, 21 nt, synthetic construct
  source 1..21: mol_type = other RNA
cattcacactagtcaccctac

SEQ ID NO: 78555 - RNA, 21 nt, synthetic construct
  source 1..21: mol_type = other RNA
cattcacagcgtgcaccttac

SEQ ID NO: 78556 - RNA, 21 nt, synthetic construct
  source 1..21: mol_type = other RNA
cattcactagacacatttttg

SEQ ID NO: 78557 - RNA, 21 nt, synthetic construct
  source 1..21: mol_type = other RNA
cattcactcagcataattggt

SEQ ID NO: 78558 - RNA, 21 nt, synthetic construct
  source 1..21: mol_type = other RNA
cattcagaggtatttggggct

SEQ ID NO: 78559 - RNA, 21 nt, synthetic construct
  source 1..21: mol_type = other RNA
cattcaggacactggaggtgc

SEQ ID NO: 78560 - RNA, 21 nt, synthetic construct
  source 1..21: mol_type = other RNA
cattcaggtctatgtgacaga

SEQ ID NO: 78561 - RNA, 21 nt, synthetic construct
  source 1..21: mol_type = other RNA
cattcataaacacagaacact

SEQ ID NO: 78562 - RNA, 21 nt, synthetic construct
  source 1..21: mol_type = other RNA
cattcatactgaaggcatagg

SEQ ID NO: 78563 - RNA, 21 nt, synthetic construct
  source 1..21: mol_type = other RNA
cattcatatttgttcaagcgc

SEQ ID NO: 78564 - RNA, 21 nt, synthetic construct
  source 1..21: mol_type = other RNA
cattcatccaggcaaaagatg

SEQ ID NO: 78565 - RNA, 21 nt, synthetic construct
  source 1..21: mol_type = other RNA
cattcatccctctaaataggt

SEQ ID NO: 78566 - RNA, 21 nt, synthetic construct
  source 1..21: mol_type = other RNA
cattcatctaaacgtttggtg

SEQ ID NO: 78567 - RNA, 21 nt, synthetic construct
  source 1..21: mol_type = other RNA
cattcatctctcgatggacat

SEQ ID NO: 78568 - RNA, 21 nt, synthetic construct
  source 1..21: mol_type = other RNA
cattcatctgcagtgtccatc

SEQ ID NO: 78569 - RNA, 21 nt, synthetic construct
  source 1..21: mol_type = other RNA
cattcatctgttaatgggcac

SEQ ID NO: 78570 - RNA, 21 nt, synthetic construct
  source 1..21: mol_type = other RNA
cattcatgacaagaatctttg

SEQ ID NO: 78571 - RNA, 21 nt, synthetic construct
  source 1..21: mol_type = other RNA
cattcatgtaatgcaaactct

SEQ ID NO: 78572 - RNA, 21 nt, synthetic construct
  source 1..21: mol_type = other RNA
cattcattcatgacaagaatc

SEQ ID NO: 78573 - RNA, 21 nt, synthetic construct
  source 1..21: mol_type = other RNA
cattccaagagaggaataaat

SEQ ID NO: 78574 - RNA, 21 nt, synthetic construct
  source 1..21: mol_type = other RNA
cattccaatccttccttcatg

SEQ ID NO: 78575 - RNA, 21 nt, synthetic construct
  source 1..21: mol_type = other RNA
cattccacgctgtggcttggg

SEQ ID NO: 78576 - RNA, 21 nt, synthetic construct
  source 1..21: mol_type = other RNA
cattccagaccagcagttcaa

SEQ ID NO: 78577 - RNA, 21 nt, synthetic construct
  source 1..21: mol_type = other RNA
cattccagagggtaacgtgag

SEQ ID NO: 78578 - RNA, 21 nt, synthetic construct
  source 1..21: mol_type = other RNA
cattccagattgaaatctagg

SEQ ID NO: 78579 - RNA, 21 nt, synthetic construct
  source 1..21: mol_type = other RNA
cattccagccattctcttctg

SEQ ID NO: 78580 - RNA, 21 nt, synthetic construct
  source 1..21: mol_type = other RNA
cattccaggttttatctctct

SEQ ID NO: 78581 - RNA, 21 nt, synthetic construct
  source 1..21: mol_type = other RNA
cattcccaaatgtcttaagaa

SEQ ID NO: 78582 - RNA, 21 nt, synthetic construct
  source 1..21: mol_type = other RNA
cattcccatgttcactgcaga

SEQ ID NO: 78583 - RNA, 21 nt, synthetic construct
  source 1..21: mol_type = other RNA
cattccccacataggatagtt

SEQ ID NO: 78584 - RNA, 21 nt, synthetic construct
  source 1..21: mol_type = other RNA
cattccccttgccaaggcttg

SEQ ID NO: 78585 - RNA, 21 nt, synthetic construct
  source 1..21: mol_type = other RNA
cattccctgtctgggaagtta

SEQ ID NO: 78586 - RNA, 21 nt, synthetic construct
  source 1..21: mol_type = other RNA
cattccctgtctgtgatgtag

SEQ ID NO: 78587 - RNA, 21 nt, synthetic construct
  source 1..21: mol_type = other RNA
cattccgcctgggcgacagag

SEQ ID NO: 78588 - RNA, 21 nt, synthetic construct
  source 1..21: mol_type = other RNA
cattccgcgtttattagaact

SEQ ID NO: 78589 - RNA, 21 nt, synthetic construct
  source 1..21: mol_type = other RNA
cattccgctaaacattttatt

SEQ ID NO: 78590 - RNA, 21 nt, synthetic construct
  source 1..21: mol_type = other RNA
cattccgtggaaggccttctc

SEQ ID NO: 78591 - RNA, 21 nt, synthetic construct
  source 1..21: mol_type = other RNA
cattcctgaaatgaaccaaac

SEQ ID NO: 78592 - RNA, 21 nt, synthetic construct
  source 1..21: mol_type = other RNA
cattccttccgacctgtagat

SEQ ID NO: 78593 - RNA, 21 nt, synthetic construct
  source 1..21: mol_type = other RNA
cattccttcttcacacattaa

SEQ ID NO: 78594 - RNA, 21 nt, synthetic construct
  source 1..21: mol_type = other RNA
cattccttttcgagactgagt

SEQ ID NO: 78595 - RNA, 21 nt, synthetic construct
  source 1..21: mol_type = other RNA
cattcggccaagatctgtttt

SEQ ID NO: 78596 - RNA, 21 nt, synthetic construct
  source 1..21: mol_type = other RNA
cattcgtagcaggtttaggaa

SEQ ID NO: 78597 - RNA, 21 nt, synthetic construct
  source 1..21: mol_type = other RNA
cattcgtccctaaacactgta

SEQ ID NO: 78598 - RNA, 21 nt, synthetic construct
  source 1..21: mol_type = other RNA
cattcgttcaaaacatcatct

SEQ ID NO: 78599 - RNA, 21 nt, synthetic construct
  source 1..21: mol_type = other RNA
cattctacagtattacacaga

SEQ ID NO: 78600 - RNA, 21 nt, synthetic construct
  source 1..21: mol_type = other RNA
cattctacctggagcctgagg

SEQ ID NO: 78601 - RNA, 21 nt, synthetic construct
  source 1..21: mol_type = other RNA
cattctagaaaggagggactg

SEQ ID NO: 78602 - RNA, 21 nt, synthetic construct
  source 1..21: mol_type = other RNA
cattctagtgatgggagatgg

SEQ ID NO: 78603 - RNA, 21 nt, synthetic construct
  source 1..21: mol_type = other RNA
cattctcccagttgtcagaat

SEQ ID NO: 78604 - RNA, 21 nt, synthetic construct
  source 1..21: mol_type = other RNA
cattctcttctggatagcatt

SEQ ID NO: 78605 - RNA, 21 nt, synthetic construct
  source 1..21: mol_type = other RNA
cattctgcagtttgtgttttc

SEQ ID NO: 78606 - RNA, 21 nt, synthetic construct
  source 1..21: mol_type = other RNA
cattctgcctgcagactgcag

SEQ ID NO: 78607 - RNA, 21 nt, synthetic construct
  source 1..21: mol_type = other RNA
cattctgctatgaaatgtggt

SEQ ID NO: 78608 - RNA, 21 nt, synthetic construct
  source 1..21: mol_type = other RNA
cattctgcttccttgctatgt

SEQ ID NO: 78609 - RNA, 21 nt, synthetic construct
  source 1..21: mol_type = other RNA
cattctggagtgttttcttca

SEQ ID NO: 78610 - RNA, 21 nt, synthetic construct
  source 1..21: mol_type = other RNA
cattctgtcacatagacctga

SEQ ID NO: 78611 - RNA, 21 nt, synthetic construct
  source 1..21: mol_type = other RNA
cattcttaccttctaaaatca

SEQ ID NO: 78612 - RNA, 21 nt, synthetic construct
  source 1..21: mol_type = other RNA
cattcttattgattcagatga

SEQ ID NO: 78613 - RNA, 21 nt, synthetic construct
  source 1..21: mol_type = other RNA
cattcttcaccattccagcca

SEQ ID NO: 78614 - RNA, 21 nt, synthetic construct
  source 1..21: mol_type = other RNA
cattcttctaataggaagtgg

SEQ ID NO: 78615 - RNA, 21 nt, synthetic construct
  source 1..21: mol_type = other RNA
cattcttctctaatgtaaaca

SEQ ID NO: 78616 - RNA, 21 nt, synthetic construct
  source 1..21: mol_type = other RNA
cattcttgacatgattgagga

SEQ ID NO: 78617 - RNA, 21 nt, synthetic construct
  source 1..21: mol_type = other RNA
cattctttttactcgagggta

SEQ ID NO: 78618 - RNA, 21 nt, synthetic construct
  source 1..21: mol_type = other RNA
cattgaaactcaatgttggtt

SEQ ID NO: 78619 - RNA, 21 nt, synthetic construct
  source 1..21: mol_type = other RNA
cattgaagctactattccagg

SEQ ID NO: 78620 - RNA, 21 nt, synthetic construct
  source 1..21: mol_type = other RNA
cattgaaggcagaattataga

SEQ ID NO: 78621 - RNA, 21 nt, synthetic construct
  source 1..21: mol_type = other RNA
cattgaagtatagtttgaagt

SEQ ID NO: 78622 - RNA, 21 nt, synthetic construct
  source 1..21: mol_type = other RNA
cattgacaatataggagacta

SEQ ID NO: 78623 - RNA, 21 nt, synthetic construct
  source 1..21: mol_type = other RNA
cattgactaccaattctccct

SEQ ID NO: 78624 - RNA, 21 nt, synthetic construct
  source 1..21: mol_type = other RNA
cattgagccaaagaagaaatc

SEQ ID NO: 78625 - RNA, 21 nt, synthetic construct
  source 1..21: mol_type = other RNA
cattgagtttcaatgactttt

SEQ ID NO: 78626 - RNA, 21 nt, synthetic construct
  source 1..21: mol_type = other RNA
cattgatacaatacttggatc

SEQ ID NO: 78627 - RNA, 21 nt, synthetic construct
  source 1..21: mol_type = other RNA
cattgattttgtatcctgaga

SEQ ID NO: 78628 - RNA, 21 nt, synthetic construct
  source 1..21: mol_type = other RNA
cattgcacagtctcccccagg

SEQ ID NO: 78629 - RNA, 21 nt, synthetic construct
  source 1..21: mol_type = other RNA
cattgcaccactgcactccag

SEQ ID NO: 78630 - RNA, 21 nt, synthetic construct
  source 1..21: mol_type = other RNA
cattgcactccacgtgggtga

SEQ ID NO: 78631 - RNA, 21 nt, synthetic construct
  source 1..21: mol_type = other RNA
cattgcattgactaccaattc

SEQ ID NO: 78632 - RNA, 21 nt, synthetic construct
  source 1..21: mol_type = other RNA
cattgcatttacttgtcattt

SEQ ID NO: 78633 - RNA, 21 nt, synthetic construct
  source 1..21: mol_type = other RNA
cattgcctatagacagcatcc

SEQ ID NO: 78634 - RNA, 21 nt, synthetic construct
  source 1..21: mol_type = other RNA
cattgcctccatatgggatgc

SEQ ID NO: 78635 - RNA, 21 nt, synthetic construct
  source 1..21: mol_type = other RNA
cattgccttcaagttgctttt

SEQ ID NO: 78636 - RNA, 21 nt, synthetic construct
  source 1..21: mol_type = other RNA
cattgccttcgcagggtgaaa

SEQ ID NO: 78637 - RNA, 21 nt, synthetic construct
  source 1..21: mol_type = other RNA
cattgctaattcattgtacat

SEQ ID NO: 78638 - RNA, 21 nt, synthetic construct
  source 1..21: mol_type = other RNA
cattggaggataatatctgga

SEQ ID NO: 78639 - RNA, 21 nt, synthetic construct
  source 1..21: mol_type = other RNA
cattgggagctttcattatta

SEQ ID NO: 78640 - RNA, 21 nt, synthetic construct
  source 1..21: mol_type = other RNA
cattgggtacataccgagtaa

SEQ ID NO: 78641 - RNA, 21 nt, synthetic construct
  source 1..21: mol_type = other RNA
cattggttattcatgtttgtg

SEQ ID NO: 78642 - RNA, 21 nt, synthetic construct
  source 1..21: mol_type = other RNA
cattggtttgaaatgatcttt

SEQ ID NO: 78643 - RNA, 21 nt, synthetic construct
  source 1..21: mol_type = other RNA
cattgtaaaccatatggttaa

SEQ ID NO: 78644 - RNA, 21 nt, synthetic construct
  source 1..21: mol_type = other RNA
cattgtaatcctgtttctcta

SEQ ID NO: 78645 - RNA, 21 nt, synthetic construct
  source 1..21: mol_type = other RNA
cattgtacatgaagtcctcaa

SEQ ID NO: 78646 - RNA, 21 nt, synthetic construct
  source 1..21: mol_type = other RNA
cattgtagctatatcccaaat

SEQ ID NO: 78647 - RNA, 21 nt, synthetic construct
  source 1..21: mol_type = other RNA
cattgtatttctgttagatgg

SEQ ID NO: 78648 - RNA, 21 nt, synthetic construct
  source 1..21: mol_type = other RNA
cattgtcccgggggagggcgg

SEQ ID NO: 78649 - RNA, 21 nt, synthetic construct
  source 1..21: mol_type = other RNA
cattgtcttacataggcttag

SEQ ID NO: 78650 - RNA, 21 nt, synthetic construct
  source 1..21: mol_type = other RNA
cattgtgatgtctcagatgtc

SEQ ID NO: 78651 - RNA, 21 nt, synthetic construct
  source 1..21: mol_type = other RNA
cattgtgcaaccatccccgct

SEQ ID NO: 78652 - RNA, 21 nt, synthetic construct
  source 1..21: mol_type = other RNA
cattgtgcacttaaaatttag

SEQ ID NO: 78653 - RNA, 21 nt, synthetic construct
  source 1..21: mol_type = other RNA
cattgtgctcagtggttctgc

SEQ ID NO: 78654 - RNA, 21 nt, synthetic construct
  source 1..21: mol_type = other RNA
cattgtggatgagattaatgt

SEQ ID NO: 78655 - RNA, 21 nt, synthetic construct
  source 1..21: mol_type = other RNA
cattgtgtggacacactgaaa

SEQ ID NO: 78656 - RNA, 21 nt, synthetic construct
  source 1..21: mol_type = other RNA
cattgtgttgcccacgctggt

SEQ ID NO: 78657 - RNA, 21 nt, synthetic construct
  source 1..21: mol_type = other RNA
cattgttaggtgctggcttca

SEQ ID NO: 78658 - RNA, 21 nt, synthetic construct
  source 1..21: mol_type = other RNA
cattgttcagggaaggctgca

SEQ ID NO: 78659 - RNA, 21 nt, synthetic construct
  source 1..21: mol_type = other RNA
cattgttctctttgtttatcc

SEQ ID NO: 78660 - RNA, 21 nt, synthetic construct
  source 1..21: mol_type = other RNA
cattgttgtgtgttaaatttg

SEQ ID NO: 78661 - RNA, 21 nt, synthetic construct
  source 1..21: mol_type = other RNA
cattgtttacagtagccaaag

SEQ ID NO: 78662 - RNA, 21 nt, synthetic construct
  source 1..21: mol_type = other RNA
catttaaaaattagccaggtg

SEQ ID NO: 78663 - RNA, 21 nt, synthetic construct
  source 1..21: mol_type = other RNA
catttaaaagaaaatggccaa

SEQ ID NO: 78664 - RNA, 21 nt, synthetic construct
  source 1..21: mol_type = other RNA
catttaaaagaacctctggaa

SEQ ID NO: 78665 - RNA, 21 nt, synthetic construct
  source 1..21: mol_type = other RNA
catttaaaatctgattcagtg

SEQ ID NO: 78666 - RNA, 21 nt, synthetic construct
  source 1..21: mol_type = other RNA
catttaaaattgcagagtgtt

SEQ ID NO: 78667 - RNA, 21 nt, synthetic construct
  source 1..21: mol_type = other RNA
catttaaacgtcagagcagca

SEQ ID NO: 78668 - RNA, 21 nt, synthetic construct
  source 1..21: mol_type = other RNA
catttaagaagggaacactaa

SEQ ID NO: 78669 - RNA, 21 nt, synthetic construct
  source 1..21: mol_type = other RNA
catttacaaaaacacactgag

SEQ ID NO: 78670 - RNA, 21 nt, synthetic construct
  source 1..21: mol_type = other RNA
catttaccccttaaattccaa

SEQ ID NO: 78671 - RNA, 21 nt, synthetic construct
  source 1..21: mol_type = other RNA
catttactgaaatcctagccc

SEQ ID NO: 78672 - RNA, 21 nt, synthetic construct
  source 1..21: mol_type = other RNA
catttactgctataaacttcc

SEQ ID NO: 78673 - RNA, 21 nt, synthetic construct
  source 1..21: mol_type = other RNA
catttacttgtcatttctgct

SEQ ID NO: 78674 - RNA, 21 nt, synthetic construct
  source 1..21: mol_type = other RNA
catttagccccctgaataccc

SEQ ID NO: 78675 - RNA, 21 nt, synthetic construct
  source 1..21: mol_type = other RNA
catttagtaagtgtgagcaaa

SEQ ID NO: 78676 - RNA, 21 nt, synthetic construct
  source 1..21: mol_type = other RNA
catttagtttcatctatgtcc

SEQ ID NO: 78677 - RNA, 21 nt, synthetic construct
  source 1..21: mol_type = other RNA
catttatacagttggaactct

SEQ ID NO: 78678 - RNA, 21 nt, synthetic construct
  source 1..21: mol_type = other RNA
catttatacccaagtaaacaa

SEQ ID NO: 78679 - RNA, 21 nt, synthetic construct
  source 1..21: mol_type = other RNA
catttatcagcaccaaagatt

SEQ ID NO: 78680 - RNA, 21 nt, synthetic construct
  source 1..21: mol_type = other RNA
catttatggaattgccatatg

SEQ ID NO: 78681 - RNA, 21 nt, synthetic construct
  source 1..21: mol_type = other RNA
catttattaaagtagaaggcc

SEQ ID NO: 78682 - RNA, 21 nt, synthetic construct
  source 1..21: mol_type = other RNA
catttattagtagttaggtgg

SEQ ID NO: 78683 - RNA, 21 nt, synthetic construct
  source 1..21: mol_type = other RNA
catttattcctctcttggaat

SEQ ID NO: 78684 - RNA, 21 nt, synthetic construct
  source 1..21: mol_type = other RNA
catttattgtcaaggtcatcc

SEQ ID NO: 78685 - RNA, 21 nt, synthetic construct
  source 1..21: mol_type = other RNA
catttcaaaccaatgttctct

SEQ ID NO: 78686 - RNA, 21 nt, synthetic construct
  source 1..21: mol_type = other RNA
catttcactcttttaaggttt

SEQ ID NO: 78687 - RNA, 21 nt, synthetic construct
  source 1..21: mol_type = other RNA
catttcacttgattactttac

SEQ ID NO: 78688 - RNA, 21 nt, synthetic construct
  source 1..21: mol_type = other RNA
catttcagccaaagctggcat

SEQ ID NO: 78689 - RNA, 21 nt, synthetic construct
  source 1..21: mol_type = other RNA
catttcaggaatgcaaagttt

SEQ ID NO: 78690 - RNA, 21 nt, synthetic construct
  source 1..21: mol_type = other RNA
catttcaggttttcgaccaag

SEQ ID NO: 78691 - RNA, 21 nt, synthetic construct
  source 1..21: mol_type = other RNA
catttcatagcagaatggccc

SEQ ID NO: 78692 - RNA, 21 nt, synthetic construct
  source 1..21: mol_type = other RNA
catttcatgccatcctggatt

SEQ ID NO: 78693 - RNA, 21 nt, synthetic construct
  source 1..21: mol_type = other RNA
catttccaaagatcatgggtt

SEQ ID NO: 78694 - RNA, 21 nt, synthetic construct
  source 1..21: mol_type = other RNA
catttccaagattgaaaatgg

SEQ ID NO: 78695 - RNA, 21 nt, synthetic construct
  source 1..21: mol_type = other RNA
catttccagtactttttcatc

SEQ ID NO: 78696 - RNA, 21 nt, synthetic construct
  source 1..21: mol_type = other RNA
catttccctgcttcatctgga

SEQ ID NO: 78697 - RNA, 21 nt, synthetic construct
  source 1..21: mol_type = other RNA
catttccgttgctgcatagta

SEQ ID NO: 78698 - RNA, 21 nt, synthetic construct
  source 1..21: mol_type = other RNA
catttccttaagcacagactg

SEQ ID NO: 78699 - RNA, 21 nt, synthetic construct
  source 1..21: mol_type = other RNA
catttcctttcagtcggttct

SEQ ID NO: 78700 - RNA, 21 nt, synthetic construct
  source 1..21: mol_type = other RNA
catttcgccttctcagaagga

SEQ ID NO: 78701 - RNA, 21 nt, synthetic construct
  source 1..21: mol_type = other RNA
catttcggctctgtgctgaga

SEQ ID NO: 78702 - RNA, 21 nt, synthetic construct
  source 1..21: mol_type = other RNA
catttctaagccatgtttctc

SEQ ID NO: 78703 - RNA, 21 nt, synthetic construct
  source 1..21: mol_type = other RNA
catttctaatttccaagaacc

SEQ ID NO: 78704 - RNA, 21 nt, synthetic construct
  source 1..21: mol_type = other RNA
catttctacacaacatgtttt

SEQ ID NO: 78705 - RNA, 21 nt, synthetic construct
  source 1..21: mol_type = other RNA
catttctcatactttgtcagg

SEQ ID NO: 78706 - RNA, 21 nt, synthetic construct
  source 1..21: mol_type = other RNA
catttctcatgtatgttttag

SEQ ID NO: 78707 - RNA, 21 nt, synthetic construct
  source 1..21: mol_type = other RNA
catttctctaatagctagtga

SEQ ID NO: 78708 - RNA, 21 nt, synthetic construct
  source 1..21: mol_type = other RNA
catttctgcttagtcttctca

SEQ ID NO: 78709 - RNA, 21 nt, synthetic construct
  source 1..21: mol_type = other RNA
catttctgcttgaatgtgcct

SEQ ID NO: 78710 - RNA, 21 nt, synthetic construct
  source 1..21: mol_type = other RNA
catttcttacacattaggctc

SEQ ID NO: 78711 - RNA, 21 nt, synthetic construct
  source 1..21: mol_type = other RNA
catttcttctagtcacatttg

SEQ ID NO: 78712 - RNA, 21 nt, synthetic construct
  source 1..21: mol_type = other RNA
catttgaaagaaagaaggcca

SEQ ID NO: 78713 - RNA, 21 nt, synthetic construct
  source 1..21: mol_type = other RNA
catttgaactcactggccagc

SEQ ID NO: 78714 - RNA, 21 nt, synthetic construct
  source 1..21: mol_type = other RNA
catttgaactttccagaagta

SEQ ID NO: 78715 - RNA, 21 nt, synthetic construct
  source 1..21: mol_type = other RNA
catttgaatgatgcgaaagaa

SEQ ID NO: 78716 - RNA, 21 nt, synthetic construct
  source 1..21: mol_type = other RNA
catttgaccttccttgtgtct

SEQ ID NO: 78717 - RNA, 21 nt, synthetic construct
  source 1..21: mol_type = other RNA
catttgagaatttcaggtgtg

SEQ ID NO: 78718 - RNA, 21 nt, synthetic construct
  source 1..21: mol_type = other RNA
catttgagcccaggaggttga

SEQ ID NO: 78719 - RNA, 21 nt, synthetic construct
  source 1..21: mol_type = other RNA
catttgagggtgctgatcagg

SEQ ID NO: 78720 - RNA, 21 nt, synthetic construct
  source 1..21: mol_type = other RNA
catttgagggttagaagacaa

SEQ ID NO: 78721 - RNA, 21 nt, synthetic construct
  source 1..21: mol_type = other RNA
catttgattgccagttttctg

SEQ ID NO: 78722 - RNA, 21 nt, synthetic construct
  source 1..21: mol_type = other RNA
catttgatttcttctttggct

SEQ ID NO: 78723 - RNA, 21 nt, synthetic construct
  source 1..21: mol_type = other RNA
catttgcagagcaaactcaga

SEQ ID NO: 78724 - RNA, 21 nt, synthetic construct
  source 1..21: mol_type = other RNA
catttgcttaggctgttatta

SEQ ID NO: 78725 - RNA, 21 nt, synthetic construct
  source 1..21: mol_type = other RNA
catttgctttactactgcatt

SEQ ID NO: 78726 - RNA, 21 nt, synthetic construct
  source 1..21: mol_type = other RNA
catttgcttttcctggaaaac

SEQ ID NO: 78727 - RNA, 21 nt, synthetic construct
  source 1..21: mol_type = other RNA
catttggaatagagagcccag

SEQ ID NO: 78728 - RNA, 21 nt, synthetic construct
  source 1..21: mol_type = other RNA
catttggcccagccatcccat

SEQ ID NO: 78729 - RNA, 21 nt, synthetic construct
  source 1..21: mol_type = other RNA
catttggcctctgcggcggct

SEQ ID NO: 78730 - RNA, 21 nt, synthetic construct
  source 1..21: mol_type = other RNA
catttgggaatgtggtcacac

SEQ ID NO: 78731 - RNA, 21 nt, synthetic construct
  source 1..21: mol_type = other RNA
catttgggacagcctagtttt

SEQ ID NO: 78732 - RNA, 21 nt, synthetic construct
  source 1..21: mol_type = other RNA
catttgggactgagacagtat

SEQ ID NO: 78733 - RNA, 21 nt, synthetic construct
  source 1..21: mol_type = other RNA
catttggtctcattcactaga

SEQ ID NO: 78734 - RNA, 21 nt, synthetic construct
  source 1..21: mol_type = other RNA
catttggttttactactgtac

SEQ ID NO: 78735 - RNA, 21 nt, synthetic construct
  source 1..21: mol_type = other RNA
catttgtaattcatcctacta

SEQ ID NO: 78736 - RNA, 21 nt, synthetic construct
  source 1..21: mol_type = other RNA
catttgtggcatctttgttac

SEQ ID NO: 78737 - RNA, 21 nt, synthetic construct
  source 1..21: mol_type = other RNA
catttgttgcatccccattca

SEQ ID NO: 78738 - RNA, 21 nt, synthetic construct
  source 1..21: mol_type = other RNA
catttgttttgtgtttgtgac

SEQ ID NO: 78739 - RNA, 21 nt, synthetic construct
  source 1..21: mol_type = other RNA
cattttaaagggataatgcta

SEQ ID NO: 78740 - RNA, 21 nt, synthetic construct
  source 1..21: mol_type = other RNA
cattttaataagcttcgaagc

SEQ ID NO: 78741 - RNA, 21 nt, synthetic construct
  source 1..21: mol_type = other RNA
cattttaccaaaacagcttct

SEQ ID NO: 78742 - RNA, 21 nt, synthetic construct
  source 1..21: mol_type = other RNA
cattttactgctatacaaccg

SEQ ID NO: 78743 - RNA, 21 nt, synthetic construct
  source 1..21: mol_type = other RNA
cattttagatcaagtcctttc

SEQ ID NO: 78744 - RNA, 21 nt, synthetic construct
  source 1..21: mol_type = other RNA
cattttagctggggcagcaaa

SEQ ID NO: 78745 - RNA, 21 nt, synthetic construct
  source 1..21: mol_type = other RNA
cattttataggcattccttaa

SEQ ID NO: 78746 - RNA, 21 nt, synthetic construct
  source 1..21: mol_type = other RNA
cattttattaatttggcttgg

SEQ ID NO: 78747 - RNA, 21 nt, synthetic construct
  source 1..21: mol_type = other RNA
cattttattaggtgcacacaa

SEQ ID NO: 78748 - RNA, 21 nt, synthetic construct
  source 1..21: mol_type = other RNA
cattttatttatacaggtgct

SEQ ID NO: 78749 - RNA, 21 nt, synthetic construct
  source 1..21: mol_type = other RNA
cattttcaaggtagaagtaca

SEQ ID NO: 78750 - RNA, 21 nt, synthetic construct
  source 1..21: mol_type = other RNA
cattttcaatcttggaaatga

SEQ ID NO: 78751 - RNA, 21 nt, synthetic construct
  source 1..21: mol_type = other RNA
cattttccctcctttttatca

SEQ ID NO: 78752 - RNA, 21 nt, synthetic construct
  source 1..21: mol_type = other RNA
cattttccggttgtatagcag

SEQ ID NO: 78753 - RNA, 21 nt, synthetic construct
  source 1..21: mol_type = other RNA
cattttctaaattgaacagcc

SEQ ID NO: 78754 - RNA, 21 nt, synthetic construct
  source 1..21: mol_type = other RNA
cattttctctacagttaacaa

SEQ ID NO: 78755 - RNA, 21 nt, synthetic construct
  source 1..21: mol_type = other RNA
cattttcttatctaggcgaaa

SEQ ID NO: 78756 - RNA, 21 nt, synthetic construct
  source 1..21: mol_type = other RNA
cattttgaaaaacagatcttg

SEQ ID NO: 78757 - RNA, 21 nt, synthetic construct
  source 1..21: mol_type = other RNA
cattttgaatcatgggagcca

SEQ ID NO: 78758 - RNA, 21 nt, synthetic construct
  source 1..21: mol_type = other RNA
cattttgagttattgcatagg

SEQ ID NO: 78759 - RNA, 21 nt, synthetic construct
  source 1..21: mol_type = other RNA
cattttgccagctaactttta

SEQ ID NO: 78760 - RNA, 21 nt, synthetic construct
  source 1..21: mol_type = other RNA
cattttggcaaattgtcagat

SEQ ID NO: 78761 - RNA, 21 nt, synthetic construct
  source 1..21: mol_type = other RNA
cattttggtcttaccctctag

SEQ ID NO: 78762 - RNA, 21 nt, synthetic construct
  source 1..21: mol_type = other RNA
cattttgtgacaagttcagca

SEQ ID NO: 78763 - RNA, 21 nt, synthetic construct
  source 1..21: mol_type = other RNA
cattttgttcattcatctgtt

SEQ ID NO: 78764 - RNA, 21 nt, synthetic construct
  source 1..21: mol_type = other RNA
catttttaagaaatcgttgtg

SEQ ID NO: 78765 - RNA, 21 nt, synthetic construct
  source 1..21: mol_type = other RNA
catttttcacttcttattggt

SEQ ID NO: 78766 - RNA, 21 nt, synthetic construct
  source 1..21: mol_type = other RNA
catttttcaggggggccactg

SEQ ID NO: 78767 - RNA, 21 nt, synthetic construct
  source 1..21: mol_type = other RNA
catttttctcgacacacaatc

SEQ ID NO: 78768 - RNA, 21 nt, synthetic construct
  source 1..21: mol_type = other RNA
catttttctgaccaactattt

SEQ ID NO: 78769 - RNA, 21 nt, synthetic construct
  source 1..21: mol_type = other RNA
catttttgacagccacgtgta

SEQ ID NO: 78770 - RNA, 21 nt, synthetic construct
  source 1..21: mol_type = other RNA
catttttgtattctgacctaa

SEQ ID NO: 78771 - RNA, 21 nt, synthetic construct
  source 1..21: mol_type = other RNA
cattttttaagtggcgctgtt

SEQ ID NO: 78772 - RNA, 21 nt, synthetic construct
  source 1..21: mol_type = other RNA
cattttttcaccagcggcata

SEQ ID NO: 78773 - RNA, 21 nt, synthetic construct
  source 1..21: mol_type = other RNA
cattttttgcagagacggggt

SEQ ID NO: 78774 - RNA, 21 nt, synthetic construct
  source 1..21: mol_type = other RNA
cattttttggtttgtatgtgt

SEQ ID NO: 78775 - RNA, 21 nt, synthetic construct
  source 1..21: mol_type = other RNA
ccaaaaaactacgagtatcat

SEQ ID NO: 78776 - RNA, 21 nt, synthetic construct
  source 1..21: mol_type = other RNA
ccaaaaaagcaccagttatca

SEQ ID NO: 78777 - RNA, 21 nt, synthetic construct
  source 1..21: mol_type = other RNA
ccaaaaaaggtgctgttgtat

SEQ ID NO: 78778 - RNA, 21 nt, synthetic construct
  source 1..21: mol_type = other RNA
ccaaaaaatgtggcatatcac

SEQ ID NO: 78779 - RNA, 21 nt, synthetic construct
  source 1..21: mol_type = other RNA
ccaaaaacaaaagagtagatt

SEQ ID NO: 78780 - RNA, 21 nt, synthetic construct
  source 1..21: mol_type = other RNA
ccaaaaaccacatttcatagc

SEQ ID NO: 78781 - RNA, 21 nt, synthetic construct
  source 1..21: mol_type = other RNA
ccaaaacaaaaaacaaacccc

SEQ ID NO: 78782 - RNA, 21 nt, synthetic construct
  source 1..21: mol_type = other RNA
ccaaaacagcttcttgttaga

SEQ ID NO: 78783 - RNA, 21 nt, synthetic construct
  source 1..21: mol_type = other RNA
ccaaaacccttgggatgcagc

SEQ ID NO: 78784 - RNA, 21 nt, synthetic construct
  source 1..21: mol_type = other RNA
ccaaaacctggtatgagtgtt

SEQ ID NO: 78785 - RNA, 21 nt, synthetic construct
  source 1..21: mol_type = other RNA
ccaaaacttaggaggctatta

SEQ ID NO: 78786 - RNA, 21 nt, synthetic construct
  source 1..21: mol_type = other RNA
ccaaaagcaggccctgagaag

SEQ ID NO: 78787 - RNA, 21 nt, synthetic construct
  source 1..21: mol_type = other RNA
ccaaaagccaagagcgaggcc

SEQ ID NO: 78788 - RNA, 21 nt, synthetic construct
  source 1..21: mol_type = other RNA
ccaaaagcctcaaaatttagt

SEQ ID NO: 78789 - RNA, 21 nt, synthetic construct
  source 1..21: mol_type = other RNA
ccaaaagcgaaaggcaaaaaa

SEQ ID NO: 78790 - RNA, 21 nt, synthetic construct
  source 1..21: mol_type = other RNA
ccaaaagggaaatatgaacca

SEQ ID NO: 78791 - RNA, 21 nt, synthetic construct
  source 1..21: mol_type = other RNA
ccaaaagtcctgttcttttgt

SEQ ID NO: 78792 - RNA, 21 nt, synthetic construct
  source 1..21: mol_type = other RNA
ccaaaagtgaatatagctaag

SEQ ID NO: 78793 - RNA, 21 nt, synthetic construct
  source 1..21: mol_type = other RNA
ccaaaatattgaagagggaac

SEQ ID NO: 78794 - RNA, 21 nt, synthetic construct
  source 1..21: mol_type = other RNA
ccaaaatcctctgtagataaa

SEQ ID NO: 78795 - RNA, 21 nt, synthetic construct
  source 1..21: mol_type = other RNA
ccaaaatgattttcacagggc

SEQ ID NO: 78796 - RNA, 21 nt, synthetic construct
  source 1..21: mol_type = other RNA
ccaaaatggagacccatactc

SEQ ID NO: 78797 - RNA, 21 nt, synthetic construct
  source 1..21: mol_type = other RNA
ccaaaattaccccattcactc

SEQ ID NO: 78798 - RNA, 21 nt, synthetic construct
  source 1..21: mol_type = other RNA
ccaaacaccttacactcaaaa

SEQ ID NO: 78799 - RNA, 21 nt, synthetic construct
  source 1..21: mol_type = other RNA
ccaaacactggaaatcacagg

SEQ ID NO: 78800 - RNA, 21 nt, synthetic construct
  source 1..21: mol_type = other RNA
ccaaacagaaaccctgtaccc

SEQ ID NO: 78801 - RNA, 21 nt, synthetic construct
  source 1..21: mol_type = other RNA
ccaaacagtgaccacagtttg

SEQ ID NO: 78802 - RNA, 21 nt, synthetic construct
  source 1..21: mol_type = other RNA
ccaaacagtttttacatgtag

SEQ ID NO: 78803 - RNA, 21 nt, synthetic construct
  source 1..21: mol_type = other RNA
ccaaacatcatgatttaatag

SEQ ID NO: 78804 - RNA, 21 nt, synthetic construct
  source 1..21: mol_type = other RNA
ccaaacatgtgaggatttatt

SEQ ID NO: 78805 - RNA, 21 nt, synthetic construct
  source 1..21: mol_type = other RNA
ccaaacattgaaggcagaatt

SEQ ID NO: 78806 - RNA, 21 nt, synthetic construct
  source 1..21: mol_type = other RNA
ccaaaccatcaagtgtgatcc

SEQ ID NO: 78807 - RNA, 21 nt, synthetic construct
  source 1..21: mol_type = other RNA
ccaaaccctacacccatccac

SEQ ID NO: 78808 - RNA, 21 nt, synthetic construct
  source 1..21: mol_type = other RNA
ccaaacctttaagttctccaa

SEQ ID NO: 78809 - RNA, 21 nt, synthetic construct
  source 1..21: mol_type = other RNA
ccaaacgtttagatgaatgat

SEQ ID NO: 78810 - RNA, 21 nt, synthetic construct
  source 1..21: mol_type = other RNA
ccaaactcaaaaggacatatt

SEQ ID NO: 78811 - RNA, 21 nt, synthetic construct
  source 1..21: mol_type = other RNA
ccaaactggagtgcagtggtg

SEQ ID NO: 78812 - RNA, 21 nt, synthetic construct
  source 1..21: mol_type = other RNA
ccaaactgttttccacagtga

SEQ ID NO: 78813 - RNA, 21 nt, synthetic construct
  source 1..21: mol_type = other RNA
ccaaacttctgaccttgtgat

SEQ ID NO: 78814 - RNA, 21 nt, synthetic construct
  source 1..21: mol_type = other RNA
ccaaacttgaaccttcctctt

SEQ ID NO: 78815 - RNA, 21 nt, synthetic construct
  source 1..21: mol_type = other RNA
ccaaacttggtttattttctg

SEQ ID NO: 78816 - RNA, 21 nt, synthetic construct
  source 1..21: mol_type = other RNA
ccaaagaaaggggaaggaatt

SEQ ID NO: 78817 - RNA, 21 nt, synthetic construct
  source 1..21: mol_type = other RNA
ccaaagaaattggacgggtgg

SEQ ID NO: 78818 - RNA, 21 nt, synthetic construct
  source 1..21: mol_type = other RNA
ccaaagaacaggagttaccat

SEQ ID NO: 78819 - RNA, 21 nt, synthetic construct
  source 1..21: mol_type = other RNA
ccaaagaagaaatcaaatggg

SEQ ID NO: 78820 - RNA, 21 nt, synthetic construct
  source 1..21: mol_type = other RNA
ccaaagaaggaaaaaacacct

SEQ ID NO: 78821 - RNA, 21 nt, synthetic construct
  source 1..21: mol_type = other RNA
ccaaagacagatcttatggaa

SEQ ID NO: 78822 - RNA, 21 nt, synthetic construct
  source 1..21: mol_type = other RNA
ccaaagacatcctgatttagg

SEQ ID NO: 78823 - RNA, 21 nt, synthetic construct
  source 1..21: mol_type = other RNA
ccaaagacattgtcttacata

SEQ ID NO: 78824 - RNA, 21 nt, synthetic construct
  source 1..21: mol_type = other RNA
ccaaagacttcaacggacatt

SEQ ID NO: 78825 - RNA, 21 nt, synthetic construct
  source 1..21: mol_type = other RNA
ccaaagacttcaggaacacct

SEQ ID NO: 78826 - RNA, 21 nt, synthetic construct
  source 1..21: mol_type = other RNA
ccaaagactttgttttgtttt

SEQ ID NO: 78827 - RNA, 21 nt, synthetic construct
  source 1..21: mol_type = other RNA
ccaaagagctgggactacagg

SEQ ID NO: 78828 - RNA, 21 nt, synthetic construct
  source 1..21: mol_type = other RNA
ccaaagataaaggtaaggaaa

SEQ ID NO: 78829 - RNA, 21 nt, synthetic construct
  source 1..21: mol_type = other RNA
ccaaagatagactcttcagag

SEQ ID NO: 78830 - RNA, 21 nt, synthetic construct
  source 1..21: mol_type = other RNA
ccaaagatataaaaatggtca

SEQ ID NO: 78831 - RNA, 21 nt, synthetic construct
  source 1..21: mol_type = other RNA
ccaaagatattagctacaaaa

SEQ ID NO: 78832 - RNA, 21 nt, synthetic construct
  source 1..21: mol_type = other RNA
ccaaagatcatgggttttaat

SEQ ID NO: 78833 - RNA, 21 nt, synthetic construct
  source 1..21: mol_type = other RNA
ccaaagattatgttccacatg

SEQ ID NO: 78834 - RNA, 21 nt, synthetic construct
  source 1..21: mol_type = other RNA
ccaaagattcttgtcatgaat

SEQ ID NO: 78835 - RNA, 21 nt, synthetic construct
  source 1..21: mol_type = other RNA
ccaaagatttactaaactgaa

SEQ ID NO: 78836 - RNA, 21 nt, synthetic construct
  source 1..21: mol_type = other RNA
ccaaagcaaaagcaaaattct

SEQ ID NO: 78837 - RNA, 21 nt, synthetic construct
  source 1..21: mol_type = other RNA
ccaaagcaaaccagacatttc

SEQ ID NO: 78838 - RNA, 21 nt, synthetic construct
  source 1..21: mol_type = other RNA
ccaaagcaaacgtgcacaccc

SEQ ID NO: 78839 - RNA, 21 nt, synthetic construct
  source 1..21: mol_type = other RNA
ccaaagcaagccttggcaagg

SEQ ID NO: 78840 - RNA, 21 nt, synthetic construct
  source 1..21: mol_type = other RNA
ccaaagcagaaatacagaccg

SEQ ID NO: 78841 - RNA, 21 nt, synthetic construct
  source 1..21: mol_type = other RNA
ccaaagctggcatgttggata

SEQ ID NO: 78842 - RNA, 21 nt, synthetic construct
  source 1..21: mol_type = other RNA
ccaaaggactgggatcctaag

SEQ ID NO: 78843 - RNA, 21 nt, synthetic construct
  source 1..21: mol_type = other RNA
ccaaaggtagaaacatcccaa

SEQ ID NO: 78844 - RNA, 21 nt, synthetic construct
  source 1..21: mol_type = other RNA
ccaaagtatgcatagcagggt

SEQ ID NO: 78845 - RNA, 21 nt, synthetic construct
  source 1..21: mol_type = other RNA
ccaaagtgagcagaaggagga

SEQ ID NO: 78846 - RNA, 21 nt, synthetic construct
  source 1..21: mol_type = other RNA
ccaaataaaacacaaggacag

SEQ ID NO: 78847 - RNA, 21 nt, synthetic construct
  source 1..21: mol_type = other RNA
ccaaataacatgcatatgttt

SEQ ID NO: 78848 - RNA, 21 nt, synthetic construct
  source 1..21: mol_type = other RNA
ccaaataatcccgcaccttga

SEQ ID NO: 78849 - RNA, 21 nt, synthetic construct
  source 1..21: mol_type = other RNA
ccaaatacctctgaatgtgac

SEQ ID NO: 78850 - RNA, 21 nt, synthetic construct
  source 1..21: mol_type = other RNA
ccaaatcatgaaagtggagaa

SEQ ID NO: 78851 - RNA, 21 nt, synthetic construct
  source 1..21: mol_type = other RNA
ccaaatccaggatggcatgaa

SEQ ID NO: 78852 - RNA, 21 nt, synthetic construct
  source 1..21: mol_type = other RNA
ccaaatccctgatcaagttgc

SEQ ID NO: 78853 - RNA, 21 nt, synthetic construct
  source 1..21: mol_type = other RNA
ccaaatgaaaggcgtcggggc

SEQ ID NO: 78854 - RNA, 21 nt, synthetic construct
  source 1..21: mol_type = other RNA
ccaaatgcaccaacacctgca

SEQ ID NO: 78855 - RNA, 21 nt, synthetic construct
  source 1..21: mol_type = other RNA
ccaaatgcagaaaataaacca

SEQ ID NO: 78856 - RNA, 21 nt, synthetic construct
  source 1..21: mol_type = other RNA
ccaaatgggagcatgcacaca

SEQ ID NO: 78857 - RNA, 21 nt, synthetic construct
  source 1..21: mol_type = other RNA
ccaaatgtctgtctttatgcc

SEQ ID NO: 78858 - RNA, 21 nt, synthetic construct
  source 1..21: mol_type = other RNA
ccaaatgtcttaagaaggaaa

SEQ ID NO: 78859 - RNA, 21 nt, synthetic construct
  source 1..21: mol_type = other RNA
ccaaatgtggatagtgctttt

SEQ ID NO: 78860 - RNA, 21 nt, synthetic construct
  source 1..21: mol_type = other RNA
ccaaattaaaggatgtcaact

SEQ ID NO: 78861 - RNA, 21 nt, synthetic construct
  source 1..21: mol_type = other RNA
ccaaattagctttctcccagc

SEQ ID NO: 78862 - RNA, 21 nt, synthetic construct
  source 1..21: mol_type = other RNA
ccaaattattgacaagacgtg

SEQ ID NO: 78863 - RNA, 21 nt, synthetic construct
  source 1..21: mol_type = other RNA
ccaaattatttgagagtaagt

SEQ ID NO: 78864 - RNA, 21 nt, synthetic construct
  source 1..21: mol_type = other RNA
ccaaattcaaagcaagttaaa

SEQ ID NO: 78865 - RNA, 21 nt, synthetic construct
  source 1..21: mol_type = other RNA
ccaaattcacagcatgaatac

SEQ ID NO: 78866 - RNA, 21 nt, synthetic construct
  source 1..21: mol_type = other RNA
ccaaattcacgagactgttag

SEQ ID NO: 78867 - RNA, 21 nt, synthetic construct
  source 1..21: mol_type = other RNA
ccaaattggcatttaaaagaa

SEQ ID NO: 78868 - RNA, 21 nt, synthetic construct
  source 1..21: mol_type = other RNA
ccaacaaacaattagcacctt

SEQ ID NO: 78869 - RNA, 21 nt, synthetic construct
  source 1..21: mol_type = other RNA
ccaacaaccataatgagtaac

SEQ ID NO: 78870 - RNA, 21 nt, synthetic construct
  source 1..21: mol_type = other RNA
ccaacaagggttggtgcttcc

SEQ ID NO: 78871 - RNA, 21 nt, synthetic construct
  source 1..21: mol_type = other RNA
ccaacaattcaacaatagcaa

SEQ ID NO: 78872 - RNA, 21 nt, synthetic construct
  source 1..21: mol_type = other RNA
ccaacacaaagccttctctac

SEQ ID NO: 78873 - RNA, 21 nt, synthetic construct
  source 1..21: mol_type = other RNA
ccaacacatggggcattaatt

SEQ ID NO: 78874 - RNA, 21 nt, synthetic construct
  source 1..21: mol_type = other RNA
ccaacacctgcagtggcgtgt

SEQ ID NO: 78875 - RNA, 21 nt, synthetic construct
  source 1..21: mol_type = other RNA
ccaacaccttgggaggctgag

SEQ ID NO: 78876 - RNA, 21 nt, synthetic construct
  source 1..21: mol_type = other RNA
ccaacagaagaagtttctagt

SEQ ID NO: 78877 - RNA, 21 nt, synthetic construct
  source 1..21: mol_type = other RNA
ccaacagatcctcacatcagt

SEQ ID NO: 78878 - RNA, 21 nt, synthetic construct
  source 1..21: mol_type = other RNA
ccaacaggctgagtgcggtgg

SEQ ID NO: 78879 - RNA, 21 nt, synthetic construct
  source 1..21: mol_type = other RNA
ccaacagggccactgagagct

SEQ ID NO: 78880 - RNA, 21 nt, synthetic construct
  source 1..21: mol_type = other RNA
ccaacagggttttgttttgtt

SEQ ID NO: 78881 - RNA, 21 nt, synthetic construct
  source 1..21: mol_type = other RNA
ccaacagttactttccttttt

SEQ ID NO: 78882 - RNA, 21 nt, synthetic construct
  source 1..21: mol_type = other RNA
ccaacagtttacacgccttcg

SEQ ID NO: 78883 - RNA, 21 nt, synthetic construct
  source 1..21: mol_type = other RNA
ccaacatccacagctttcttt

SEQ ID NO: 78884 - RNA, 21 nt, synthetic construct
  source 1..21: mol_type = other RNA
ccaacatcgtaaaacctcatc

SEQ ID NO: 78885 - RNA, 21 nt, synthetic construct
  source 1..21: mol_type = other RNA
ccaacatgagagaaaattgtt

SEQ ID NO: 78886 - RNA, 21 nt, synthetic construct
  source 1..21: mol_type = other RNA
ccaacatgccagctttggctg

SEQ ID NO: 78887 - RNA, 21 nt, synthetic construct
  source 1..21: mol_type = other RNA
ccaacatgctcttaagtattt

SEQ ID NO: 78888 - RNA, 21 nt, synthetic construct
  source 1..21: mol_type = other RNA
ccaacatggcacatgtctacc

SEQ ID NO: 78889 - RNA, 21 nt, synthetic construct
  source 1..21: mol_type = other RNA
ccaacattgagtttcaatgac

SEQ ID NO: 78890 - RNA, 21 nt, synthetic construct
  source 1..21: mol_type = other RNA
ccaaccaagcccaactttttc

SEQ ID NO: 78891 - RNA, 21 nt, synthetic construct
  source 1..21: mol_type = other RNA
ccaaccaatcgcagggccatt

SEQ ID NO: 78892 - RNA, 21 nt, synthetic construct
  source 1..21: mol_type = other RNA
ccaaccactgaatcagatttt

SEQ ID NO: 78893 - RNA, 21 nt, synthetic construct
  source 1..21: mol_type = other RNA
ccaaccatcttcttagtgttc

SEQ ID NO: 78894 - RNA, 21 nt, synthetic construct
  source 1..21: mol_type = other RNA
ccaaccattactcttctactc

SEQ ID NO: 78895 - RNA, 21 nt, synthetic construct
  source 1..21: mol_type = other RNA
ccaacccattccaggttttat

SEQ ID NO: 78896 - RNA, 21 nt, synthetic construct
  source 1..21: mol_type = other RNA
ccaaccctacctagggtgtaa

SEQ ID NO: 78897 - RNA, 21 nt, synthetic construct
  source 1..21: mol_type = other RNA
ccaacccttgttggacagctg

SEQ ID NO: 78898 - RNA, 21 nt, synthetic construct
  source 1..21: mol_type = other RNA
ccaacctgattagaggctgca

SEQ ID NO: 78899 - RNA, 21 nt, synthetic construct
  source 1..21: mol_type = other RNA
ccaacgaccggacgtggtggc

SEQ ID NO: 78900 - RNA, 21 nt, synthetic construct
  source 1..21: mol_type = other RNA
ccaacgctttttatggaaaca

SEQ ID NO: 78901 - RNA, 21 nt, synthetic construct
  source 1..21: mol_type = other RNA
ccaactcaaaaaagaaaaaca

SEQ ID NO: 78902 - RNA, 21 nt, synthetic construct
  source 1..21: mol_type = other RNA
ccaactccacattgtcttaat

SEQ ID NO: 78903 - RNA, 21 nt, synthetic construct
  source 1..21: mol_type = other RNA
ccaactctggcaggtcaccta

SEQ ID NO: 78904 - RNA, 21 nt, synthetic construct
  source 1..21: mol_type = other RNA
ccaactctttctttgattttt

SEQ ID NO: 78905 - RNA, 21 nt, synthetic construct
  source 1..21: mol_type = other RNA
ccaactgaagcggggctgcca

SEQ ID NO: 78906 - RNA, 21 nt, synthetic construct
  source 1..21: mol_type = other RNA
ccaactgcaaaactttcttca

SEQ ID NO: 78907 - RNA, 21 nt, synthetic construct
  source 1..21: mol_type = other RNA
ccaactgcagtctgtcctcgt

SEQ ID NO: 78908 - RNA, 21 nt, synthetic construct
  source 1..21: mol_type = other RNA
ccaactgtataaatgttcagt

SEQ ID NO: 78909 - RNA, 21 nt, synthetic construct
  source 1..21: mol_type = other RNA
ccaactgtcctctcttgttga

SEQ ID NO: 78910 - RNA, 21 nt, synthetic construct
  source 1..21: mol_type = other RNA
ccaacttcacaccatttagat

SEQ ID NO: 78911 - RNA, 21 nt, synthetic construct
  source 1..21: mol_type = other RNA
ccaacttccagcaagacttta

SEQ ID NO: 78912 - RNA, 21 nt, synthetic construct
  source 1..21: mol_type = other RNA
ccaagaaaaagcagagaaact

SEQ ID NO: 78913 - RNA, 21 nt, synthetic construct
  source 1..21: mol_type = other RNA
ccaagaaagcaggtcatgact

SEQ ID NO: 78914 - RNA, 21 nt, synthetic construct
  source 1..21: mol_type = other RNA
ccaagaaaggacttcagtcct

SEQ ID NO: 78915 - RNA, 21 nt, synthetic construct
  source 1..21: mol_type = other RNA
ccaagaacaaccttatctatt

SEQ ID NO: 78916 - RNA, 21 nt, synthetic construct
  source 1..21: mol_type = other RNA
ccaagaaccctttgttatctg

SEQ ID NO: 78917 - RNA, 21 nt, synthetic construct
  source 1..21: mol_type = other RNA
ccaagaagacatgataaatac

SEQ ID NO: 78918 - RNA, 21 nt, synthetic construct
  source 1..21: mol_type = other RNA
ccaagaaggctagcacagagg

SEQ ID NO: 78919 - RNA, 21 nt, synthetic construct
  source 1..21: mol_type = other RNA
ccaagaatttcatgcctttca

SEQ ID NO: 78920 - RNA, 21 nt, synthetic construct
  source 1..21: mol_type = other RNA
ccaagaattttccattcatgt

SEQ ID NO: 78921 - RNA, 21 nt, synthetic construct
  source 1..21: mol_type = other RNA
ccaagacaggaagaattattg

SEQ ID NO: 78922 - RNA, 21 nt, synthetic construct
  source 1..21: mol_type = other RNA
ccaagacatgttaggttgaaa

SEQ ID NO: 78923 - RNA, 21 nt, synthetic construct
  source 1..21: mol_type = other RNA
ccaagagaggaataaatggta

SEQ ID NO: 78924 - RNA, 21 nt, synthetic construct
  source 1..21: mol_type = other RNA
ccaagagcatagactttagag

SEQ ID NO: 78925 - RNA, 21 nt, synthetic construct
  source 1..21: mol_type = other RNA
ccaagagcgaggcctggaaca

SEQ ID NO: 78926 - RNA, 21 nt, synthetic construct
  source 1..21: mol_type = other RNA
ccaagagtgtggctttaaggc

SEQ ID NO: 78927 - RNA, 21 nt, synthetic construct
  source 1..21: mol_type = other RNA
ccaagagttgctgacttcctg

SEQ ID NO: 78928 - RNA, 21 nt, synthetic construct
  source 1..21: mol_type = other RNA
ccaagatcataagcttttatt

SEQ ID NO: 78929 - RNA, 21 nt, synthetic construct
  source 1..21: mol_type = other RNA
ccaagatctgtttttcaaaat

SEQ ID NO: 78930 - RNA, 21 nt, synthetic construct
  source 1..21: mol_type = other RNA
ccaagattgaaaatggtttag

SEQ ID NO: 78931 - RNA, 21 nt, synthetic construct
  source 1..21: mol_type = other RNA
ccaagattttcccaatctctg

SEQ ID NO: 78932 - RNA, 21 nt, synthetic construct
  source 1..21: mol_type = other RNA
ccaagcaacactaaagatttg

SEQ ID NO: 78933 - RNA, 21 nt, synthetic construct
  source 1..21: mol_type = other RNA
ccaagcaacttgatcagggat

SEQ ID NO: 78934 - RNA, 21 nt, synthetic construct
  source 1..21: mol_type = other RNA
ccaagcaagtaaaagaagatg

SEQ ID NO: 78935 - RNA, 21 nt, synthetic construct
  source 1..21: mol_type = other RNA
ccaagcaagtgtggtggtctc

SEQ ID NO: 78936 - RNA, 21 nt, synthetic construct
  source 1..21: mol_type = other RNA
ccaagcacaaacctggcaata

SEQ ID NO: 78937 - RNA, 21 nt, synthetic construct
  source 1..21: mol_type = other RNA
ccaagcacacagtttgagaag

SEQ ID NO: 78938 - RNA, 21 nt, synthetic construct
  source 1..21: mol_type = other RNA
ccaagcacactttccttggag

SEQ ID NO: 78939 - RNA, 21 nt, synthetic construct
  source 1..21: mol_type = other RNA
ccaagcatggtggtaggtgtg

SEQ ID NO: 78940 - RNA, 21 nt, synthetic construct
  source 1..21: mol_type = other RNA
ccaagccaaattaataaaatg

SEQ ID NO: 78941 - RNA, 21 nt, synthetic construct
  source 1..21: mol_type = other RNA
ccaagccacagcgtggaatgg

SEQ ID NO: 78942 - RNA, 21 nt, synthetic construct
  source 1..21: mol_type = other RNA
ccaagcccaactttttctttt

SEQ ID NO: 78943 - RNA, 21 nt, synthetic construct
  source 1..21: mol_type = other RNA
ccaagcccggcacggtggctc

SEQ ID NO: 78944 - RNA, 21 nt, synthetic construct
  source 1..21: mol_type = other RNA
ccaagccctgccttaaaacat

SEQ ID NO: 78945 - RNA, 21 nt, synthetic construct
  source 1..21: mol_type = other RNA
ccaagccttaaaagtgctgca

SEQ ID NO: 78946 - RNA, 21 nt, synthetic construct
  source 1..21: mol_type = other RNA
ccaagctaccatttattcctc

SEQ ID NO: 78947 - RNA, 21 nt, synthetic construct
  source 1..21: mol_type = other RNA
ccaagcttaggtcagattcct

SEQ ID NO: 78948 - RNA, 21 nt, synthetic construct
  source 1..21: mol_type = other RNA
ccaaggaaagtgtgcttgggc

SEQ ID NO: 78949 - RNA, 21 nt, synthetic construct
  source 1..21: mol_type = other RNA
ccaaggaaggcagggtaggaa

SEQ ID NO: 78950 - RNA, 21 nt, synthetic construct
  source 1..21: mol_type = other RNA
ccaaggacagaaattcaactt

SEQ ID NO: 78951 - RNA, 21 nt, synthetic construct
  source 1..21: mol_type = other RNA
ccaaggagggaggattgtttg

SEQ ID NO: 78952 - RNA, 21 nt, synthetic construct
  source 1..21: mol_type = other RNA
ccaaggcaggactgcttgagg

SEQ ID NO: 78953 - RNA, 21 nt, synthetic construct
  source 1..21: mol_type = other RNA
ccaaggctaagttgagaaact

SEQ ID NO: 78954 - RNA, 21 nt, synthetic construct
  source 1..21: mol_type = other RNA
ccaaggctggagtgcagtggc

SEQ ID NO: 78955 - RNA, 21 nt, synthetic construct
  source 1..21: mol_type = other RNA
ccaaggcttgctttggctaga

SEQ ID NO: 78956 - RNA, 21 nt, synthetic construct
  source 1..21: mol_type = other RNA
ccaagggtgtgtttaatttcc

SEQ ID NO: 78957 - RNA, 21 nt, synthetic construct
  source 1..21: mol_type = other RNA
ccaagggtttgtcaattttgc

SEQ ID NO: 78958 - RNA, 21 nt, synthetic construct
  source 1..21: mol_type = other RNA
ccaagggttttggtatgttgt

SEQ ID NO: 78959 - RNA, 21 nt, synthetic construct
  source 1..21: mol_type = other RNA
ccaaggtacaattacacatct

SEQ ID NO: 78960 - RNA, 21 nt, synthetic construct
  source 1..21: mol_type = other RNA
ccaaggttgcctgttcactct

SEQ ID NO: 78961 - RNA, 21 nt, synthetic construct
  source 1..21: mol_type = other RNA
ccaaggtttctctccaaggta

SEQ ID NO: 78962 - RNA, 21 nt, synthetic construct
  source 1..21: mol_type = other RNA
ccaagtaaaagcaacctcatt

SEQ ID NO: 78963 - RNA, 21 nt, synthetic construct
  source 1..21: mol_type = other RNA
ccaagtaaacaactgactcta

SEQ ID NO: 78964 - RNA, 21 nt, synthetic construct
  source 1..21: mol_type = other RNA
ccaagtaaacctcaagtcttt

SEQ ID NO: 78965 - RNA, 21 nt, synthetic construct
  source 1..21: mol_type = other RNA
ccaagtagctaggaccatagg

SEQ ID NO: 78966 - RNA, 21 nt, synthetic construct
  source 1..21: mol_type = other RNA
ccaagtagctgggatcacagg

SEQ ID NO: 78967 - RNA, 21 nt, synthetic construct
  source 1..21: mol_type = other RNA
ccaagtataagatgatgatat

SEQ ID NO: 78968 - RNA, 21 nt, synthetic construct
  source 1..21: mol_type = other RNA
ccaagtattgtatcaatgtta

SEQ ID NO: 78969 - RNA, 21 nt, synthetic construct
  source 1..21: mol_type = other RNA
ccaagtatttctcatctgtca

SEQ ID NO: 78970 - RNA, 21 nt, synthetic construct
  source 1..21: mol_type = other RNA
ccaagtcagcacttctgatat

SEQ ID NO: 78971 - RNA, 21 nt, synthetic construct
  source 1..21: mol_type = other RNA
ccaagtcccggaagctgggct

SEQ ID NO: 78972 - RNA, 21 nt, synthetic construct
  source 1..21: mol_type = other RNA
ccaagtccgtgcatgcctctg

SEQ ID NO: 78973 - RNA, 21 nt, synthetic construct
  source 1..21: mol_type = other RNA
ccaagtctcatgcaattcccc

SEQ ID NO: 78974 - RNA, 21 nt, synthetic construct
  source 1..21: mol_type = other RNA
ccaagtgcccattaacagatg

SEQ ID NO: 78975 - RNA, 21 nt, synthetic construct
  source 1..21: mol_type = other RNA
ccaagtgccgcgttttttgtc

SEQ ID NO: 78976 - RNA, 21 nt, synthetic construct
  source 1..21: mol_type = other RNA
ccaagtgctgtgattgcaggt

SEQ ID NO: 78977 - RNA, 21 nt, synthetic construct
  source 1..21: mol_type = other RNA
ccaagtggagcctgctctgca

SEQ ID NO: 78978 - RNA, 21 nt, synthetic construct
  source 1..21: mol_type = other RNA
ccaagtgtaaaaagacattat

SEQ ID NO: 78979 - RNA, 21 nt, synthetic construct
  source 1..21: mol_type = other RNA
ccaagttactagaagcacttt

SEQ ID NO: 78980 - RNA, 21 nt, synthetic construct
  source 1..21: mol_type = other RNA
ccaagttgaatttctgtcctt

SEQ ID NO: 78981 - RNA, 21 nt, synthetic construct
  source 1..21: mol_type = other RNA
ccaagtttaaccaattatgct

SEQ ID NO: 78982 - RNA, 21 nt, synthetic construct
  source 1..21: mol_type = other RNA
ccaagtttctagccataatcc

SEQ ID NO: 78983 - RNA, 21 nt, synthetic construct
  source 1..21: mol_type = other RNA
ccaagtttggttcatttcagg

SEQ ID NO: 78984 - RNA, 21 nt, synthetic construct
  source 1..21: mol_type = other RNA
ccaataaaagcctcatttgaa

SEQ ID NO: 78985 - RNA, 21 nt, synthetic construct
  source 1..21: mol_type = other RNA
ccaataagaagtgaaaaatga

SEQ ID NO: 78986 - RNA, 21 nt, synthetic construct
  source 1..21: mol_type = other RNA
ccaataagttaactgaaatcg

SEQ ID NO: 78987 - RNA, 21 nt, synthetic construct
  source 1..21: mol_type = other RNA
ccaatatcacactgtttgatt

SEQ ID NO: 78988 - RNA, 21 nt, synthetic construct
  source 1..21: mol_type = other RNA
ccaatatccctgataatcaca

SEQ ID NO: 78989 - RNA, 21 nt, synthetic construct
  source 1..21: mol_type = other RNA
ccaatatctatcagggctgaa

SEQ ID NO: 78990 - RNA, 21 nt, synthetic construct
  source 1..21: mol_type = other RNA
ccaatcaaatccagtcttcag

SEQ ID NO: 78991 - RNA, 21 nt, synthetic construct
  source 1..21: mol_type = other RNA
ccaatcaataattctgtgcca

SEQ ID NO: 78992 - RNA, 21 nt, synthetic construct
  source 1..21: mol_type = other RNA
ccaatcactggctagtaggca

SEQ ID NO: 78993 - RNA, 21 nt, synthetic construct
  source 1..21: mol_type = other RNA
ccaatcatgttctttatagca

SEQ ID NO: 78994 - RNA, 21 nt, synthetic construct
  source 1..21: mol_type = other RNA
ccaatccgggaacatgacatg

SEQ ID NO: 78995 - RNA, 21 nt, synthetic construct
  source 1..21: mol_type = other RNA
ccaatcctcagccccctccct

SEQ ID NO: 78996 - RNA, 21 nt, synthetic construct
  source 1..21: mol_type = other RNA
ccaatccttccttcatgtccc

SEQ ID NO: 78997 - RNA, 21 nt, synthetic construct
  source 1..21: mol_type = other RNA
ccaatcctttgtgcaggtctg

SEQ ID NO: 78998 - RNA, 21 nt, synthetic construct
  source 1..21: mol_type = other RNA
ccaatcgcagggccattctgc

SEQ ID NO: 78999 - RNA, 21 nt, synthetic construct
  source 1..21: mol_type = other RNA
ccaatctacaggtcggaagga

SEQ ID NO: 79000 - RNA, 21 nt, synthetic construct
  source 1..21: mol_type = other RNA
ccaatctctggtattctgaac

SEQ ID NO: 79001 - RNA, 21 nt, synthetic construct
  source 1..21: mol_type = other RNA
ccaatcttcccaatcctttgt

SEQ ID NO: 79002 - RNA, 21 nt, synthetic construct
  source 1..21: mol_type = other RNA
ccaatgcctgcgattgcaggc

SEQ ID NO: 79003 - RNA, 21 nt, synthetic construct
  source 1..21: mol_type = other RNA
ccaatgcttgaagagcgcttc

SEQ ID NO: 79004 - RNA, 21 nt, synthetic construct
  source 1..21: mol_type = other RNA
ccaatgtcagagatctgaaat

SEQ ID NO: 79005 - RNA, 21 nt, synthetic construct
  source 1..21: mol_type = other RNA
ccaatgttctcttttcctcgt

SEQ ID NO: 79006 - RNA, 21 nt, synthetic construct
  source 1..21: mol_type = other RNA
ccaattaaactatagacccaa

SEQ ID NO: 79007 - RNA, 21 nt, synthetic construct
  source 1..21: mol_type = other RNA
ccaattaccataaagtcttcc

SEQ ID NO: 79008 - RNA, 21 nt, synthetic construct
  source 1..21: mol_type = other RNA
ccaattacttccagtgtttta

SEQ ID NO: 79009 - RNA, 21 nt, synthetic construct
  source 1..21: mol_type = other RNA
ccaattatgctgagtgaatgg

SEQ ID NO: 79010 - RNA, 21 nt, synthetic construct
  source 1..21: mol_type = other RNA
ccaattctccctgaaattgtc

SEQ ID NO: 79011 - RNA, 21 nt, synthetic construct
  source 1..21: mol_type = other RNA
ccaattgcagaaaaatagaat

SEQ ID NO: 79012 - RNA, 21 nt, synthetic construct
  source 1..21: mol_type = other RNA
ccaattgttaacatttcttct

SEQ ID NO: 79013 - RNA, 21 nt, synthetic construct
  source 1..21: mol_type = other RNA
ccaatttaccatctgacatat

SEQ ID NO: 79014 - RNA, 21 nt, synthetic construct
  source 1..21: mol_type = other RNA
ccaatttctttggctgttagc

SEQ ID NO: 79015 - RNA, 21 nt, synthetic construct
  source 1..21: mol_type = other RNA
ccaatttgggatatagctaca

SEQ ID NO: 79016 - RNA, 21 nt, synthetic construct
  source 1..21: mol_type = other RNA
ccaattttcatagcagcattg

SEQ ID NO: 79017 - RNA, 21 nt, synthetic construct
  source 1..21: mol_type = other RNA
ccaattttttggcatacaact

SEQ ID NO: 79018 - RNA, 21 nt, synthetic construct
  source 1..21: mol_type = other RNA
ccacaaaagaaaattttctga

SEQ ID NO: 79019 - RNA, 21 nt, synthetic construct
  source 1..21: mol_type = other RNA
ccacaaaatatgaagcattaa

SEQ ID NO: 79020 - RNA, 21 nt, synthetic construct
  source 1..21: mol_type = other RNA
ccacaaacatgaataaccaat

SEQ ID NO: 79021 - RNA, 21 nt, synthetic construct
  source 1..21: mol_type = other RNA
ccacaaagtccccacatgact

SEQ ID NO: 79022 - RNA, 21 nt, synthetic construct
  source 1..21: mol_type = other RNA
ccacaaatggagtgacttaag

SEQ ID NO: 79023 - RNA, 21 nt, synthetic construct
  source 1..21: mol_type = other RNA
ccacaacattgtgcaaccatc

SEQ ID NO: 79024 - RNA, 21 nt, synthetic construct
  source 1..21: mol_type = other RNA
ccacaaccactggggagtgtg

SEQ ID NO: 79025 - RNA, 21 nt, synthetic construct
  source 1..21: mol_type = other RNA
ccacaagaaaaacctaaacct

SEQ ID NO: 79026 - RNA, 21 nt, synthetic construct
  source 1..21: mol_type = other RNA
ccacaagacataagcattttc

SEQ ID NO: 79027 - RNA, 21 nt, synthetic construct
  source 1..21: mol_type = other RNA
ccacaagccacatgtggttat

SEQ ID NO: 79028 - RNA, 21 nt, synthetic construct
  source 1..21: mol_type = other RNA
ccacaaggattaatctttctg

SEQ ID NO: 79029 - RNA, 21 nt, synthetic construct
  source 1..21: mol_type = other RNA
ccacaagtagcagggactaca

SEQ ID NO: 79030 - RNA, 21 nt, synthetic construct
  source 1..21: mol_type = other RNA
ccacaatcttacccccatcac

SEQ ID NO: 79031 - RNA, 21 nt, synthetic construct
  source 1..21: mol_type = other RNA
ccacaatgagacatttgaggg

SEQ ID NO: 79032 - RNA, 21 nt, synthetic construct
  source 1..21: mol_type = other RNA
ccacacaatggtcagagttgt

SEQ ID NO: 79033 - RNA, 21 nt, synthetic construct
  source 1..21: mol_type = other RNA
ccacacacgaagtagtttttt

SEQ ID NO: 79034 - RNA, 21 nt, synthetic construct
  source 1..21: mol_type = other RNA
ccacacagagaacagcattat

SEQ ID NO: 79035 - RNA, 21 nt, synthetic construct
  source 1..21: mol_type = other RNA
ccacacagtacaaggctagag

SEQ ID NO: 79036 - RNA, 21 nt, synthetic construct
  source 1..21: mol_type = other RNA
ccacaccacatccagctaatt

SEQ ID NO: 79037 - RNA, 21 nt, synthetic construct
  source 1..21: mol_type = other RNA
ccacacctgcaatcacagcac

SEQ ID NO: 79038 - RNA, 21 nt, synthetic construct
  source 1..21: mol_type = other RNA
ccacacctggcccctttcaag

SEQ ID NO: 79039 - RNA, 21 nt, synthetic construct
  source 1..21: mol_type = other RNA
ccacactccagcatccctcca

SEQ ID NO: 79040 - RNA, 21 nt, synthetic construct
  source 1..21: mol_type = other RNA
ccacactcttggtctttctcc

SEQ ID NO: 79041 - RNA, 21 nt, synthetic construct
  source 1..21: mol_type = other RNA
ccacactgacaggacagagca

SEQ ID NO: 79042 - RNA, 21 nt, synthetic construct
  source 1..21: mol_type = other RNA
ccacacttgcttgggaacagc

SEQ ID NO: 79043 - RNA, 21 nt, synthetic construct
  source 1..21: mol_type = other RNA
ccacagagcctaaaataggcc

SEQ ID NO: 79044 - RNA, 21 nt, synthetic construct
  source 1..21: mol_type = other RNA
ccacagaggctttttatattt

SEQ ID NO: 79045 - RNA, 21 nt, synthetic construct
  source 1..21: mol_type = other RNA
ccacagagttcagcttacagt

SEQ ID NO: 79046 - RNA, 21 nt, synthetic construct
  source 1..21: mol_type = other RNA
ccacagataatttcttcagaa

SEQ ID NO: 79047 - RNA, 21 nt, synthetic construct
  source 1..21: mol_type = other RNA
ccacagatctttttgtgtata

SEQ ID NO: 79048 - RNA, 21 nt, synthetic construct
  source 1..21: mol_type = other RNA
ccacagcagggctcctccaag

SEQ ID NO: 79049 - RNA, 21 nt, synthetic construct
  source 1..21: mol_type = other RNA
ccacagcgcccggcccgttat

SEQ ID NO: 79050 - RNA, 21 nt, synthetic construct
  source 1..21: mol_type = other RNA
ccacagcgtggaatggtcaat

SEQ ID NO: 79051 - RNA, 21 nt, synthetic construct
  source 1..21: mol_type = other RNA
ccacagcgttgttcagttgaa

SEQ ID NO: 79052 - RNA, 21 nt, synthetic construct
  source 1..21: mol_type = other RNA
ccacagctacactcaatacac

SEQ ID NO: 79053 - RNA, 21 nt, synthetic construct
  source 1..21: mol_type = other RNA
ccacagctatcaggccttcca

SEQ ID NO: 79054 - RNA, 21 nt, synthetic construct
  source 1..21: mol_type = other RNA
ccacagctttcttttccaacc

SEQ ID NO: 79055 - RNA, 21 nt, synthetic construct
  source 1..21: mol_type = other RNA
ccacaggcatgcgccatcaca

SEQ ID NO: 79056 - RNA, 21 nt, synthetic construct
  source 1..21: mol_type = other RNA
ccacaggctctcttcaccaac

SEQ ID NO: 79057 - RNA, 21 nt, synthetic construct
  source 1..21: mol_type = other RNA
ccacaggctttgacttctcag

SEQ ID NO: 79058 - RNA, 21 nt, synthetic construct
  source 1..21: mol_type = other RNA
ccacagggcccagcctcaaca

SEQ ID NO: 79059 - RNA, 21 nt, synthetic construct
  source 1..21: mol_type = other RNA
ccacagtatgctgtttacatt

SEQ ID NO: 79060 - RNA, 21 nt, synthetic construct
  source 1..21: mol_type = other RNA
ccacagtgactttactgttct

SEQ ID NO: 79061 - RNA, 21 nt, synthetic construct
  source 1..21: mol_type = other RNA
ccacagtttgaaactttaaga

SEQ ID NO: 79062 - RNA, 21 nt, synthetic construct
  source 1..21: mol_type = other RNA
ccacataaagtcttgctggaa

SEQ ID NO: 79063 - RNA, 21 nt, synthetic construct
  source 1..21: mol_type = other RNA
ccacataaatcacaggaaaga

SEQ ID NO: 79064 - RNA, 21 nt, synthetic construct
  source 1..21: mol_type = other RNA
ccacataattgaacccactga

SEQ ID NO: 79065 - RNA, 21 nt, synthetic construct
  source 1..21: mol_type = other RNA
ccacataggatagttaaacat

SEQ ID NO: 79066 - RNA, 21 nt, synthetic construct
  source 1..21: mol_type = other RNA
ccacatattttaaaagtcagc

SEQ ID NO: 79067 - RNA, 21 nt, synthetic construct
  source 1..21: mol_type = other RNA
ccacatccagctaattttcat

SEQ ID NO: 79068 - RNA, 21 nt, synthetic construct
  source 1..21: mol_type = other RNA
ccacatccttgccaacagtta

SEQ ID NO: 79069 - RNA, 21 nt, synthetic construct
  source 1..21: mol_type = other RNA
ccacatgactggccatccttc

SEQ ID NO: 79070 - RNA, 21 nt, synthetic construct
  source 1..21: mol_type = other RNA
ccacatgcttccaaaagcagg

SEQ ID NO: 79071 - RNA, 21 nt, synthetic construct
  source 1..21: mol_type = other RNA
ccacatgtggcttgtggctac

SEQ ID NO: 79072 - RNA, 21 nt, synthetic construct
  source 1..21: mol_type = other RNA
ccacatgtggttattgagtct

SEQ ID NO: 79073 - RNA, 21 nt, synthetic construct
  source 1..21: mol_type = other RNA
ccacatgttactcattatggt

SEQ ID NO: 79074 - RNA, 21 nt, synthetic construct
  source 1..21: mol_type = other RNA
ccacattagccactctgaatt

SEQ ID NO: 79075 - RNA, 21 nt, synthetic construct
  source 1..21: mol_type = other RNA
ccacattcaacaacatggatg

SEQ ID NO: 79076 - RNA, 21 nt, synthetic construct
  source 1..21: mol_type = other RNA
ccacattcccaaatgtcttaa

SEQ ID NO: 79077 - RNA, 21 nt, synthetic construct
  source 1..21: mol_type = other RNA
ccacattcggccaagatctgt

SEQ ID NO: 79078 - RNA, 21 nt, synthetic construct
  source 1..21: mol_type = other RNA
ccacatttcatagcagaatgg

SEQ ID NO: 79079 - RNA, 21 nt, synthetic construct
  source 1..21: mol_type = other RNA
ccacatttctaatttccaaga

SEQ ID NO: 79080 - RNA, 21 nt, synthetic construct
  source 1..21: mol_type = other RNA
ccacatttctacacaacatgt

SEQ ID NO: 79081 - RNA, 21 nt, synthetic construct
  source 1..21: mol_type = other RNA
ccacatttggttttactactg

SEQ ID NO: 79082 - RNA, 21 nt, synthetic construct
  source 1..21: mol_type = other RNA
ccacattttaccaaaacagct

SEQ ID NO: 79083 - RNA, 21 nt, synthetic construct
  source 1..21: mol_type = other RNA
ccacattttgtgacaagttca

SEQ ID NO: 79084 - RNA, 21 nt, synthetic construct
  source 1..21: mol_type = other RNA
ccacattttgttcattcatct

SEQ ID NO: 79085 - RNA, 21 nt, synthetic construct
  source 1..21: mol_type = other RNA
ccacattttttggtttgtatg

SEQ ID NO: 79086 - RNA, 21 nt, synthetic construct
  source 1..21: mol_type = other RNA
ccaccaagaaaaagcagagaa

SEQ ID NO: 79087 - RNA, 21 nt, synthetic construct
  source 1..21: mol_type = other RNA
ccaccaagccctgccttaaaa

SEQ ID NO: 79088 - RNA, 21 nt, synthetic construct
  source 1..21: mol_type = other RNA
ccaccacacttgcttgggaac

SEQ ID NO: 79089 - RNA, 21 nt, synthetic construct
  source 1..21: mol_type = other RNA
ccaccacattcggccaagatc

SEQ ID NO: 79090 - RNA, 21 nt, synthetic construct
  source 1..21: mol_type = other RNA
ccaccacgtccggtcgttgga

SEQ ID NO: 79091 - RNA, 21 nt, synthetic construct
  source 1..21: mol_type = other RNA
ccaccactaatgtcacatttt

SEQ ID NO: 79092 - RNA, 21 nt, synthetic construct
  source 1..21: mol_type = other RNA
ccaccactccaccttagccca

SEQ ID NO: 79093 - RNA, 21 nt, synthetic construct
  source 1..21: mol_type = other RNA
ccaccactcccggccgtattt

SEQ ID NO: 79094 - RNA, 21 nt, synthetic construct
  source 1..21: mol_type = other RNA
ccaccagacaaaaatagagga

SEQ ID NO: 79095 - RNA, 21 nt, synthetic construct
  source 1..21: mol_type = other RNA
ccaccagcataagacccctca

SEQ ID NO: 79096 - RNA, 21 nt, synthetic construct
  source 1..21: mol_type = other RNA
ccaccagcatcttttgacgcg

SEQ ID NO: 79097 - RNA, 21 nt, synthetic construct
  source 1..21: mol_type = other RNA
ccaccaggaggcggagcttgc

SEQ ID NO: 79098 - RNA, 21 nt, synthetic construct
  source 1..21: mol_type = other RNA
ccaccatctctctgcctcaaa

SEQ ID NO: 79099 - RNA, 21 nt, synthetic construct
  source 1..21: mol_type = other RNA
ccaccatgatgcagcccctgc

SEQ ID NO: 79100 - RNA, 21 nt, synthetic construct
  source 1..21: mol_type = other RNA
ccacccaagtggagcctgctc

SEQ ID NO: 79101 - RNA, 21 nt, synthetic construct
  source 1..21: mol_type = other RNA
ccacccacttgtcccatggtc

SEQ ID NO: 79102 - RNA, 21 nt, synthetic construct
  source 1..21: mol_type = other RNA
ccacccatgaagccagcatta

SEQ ID NO: 79103 - RNA, 21 nt, synthetic construct
  source 1..21: mol_type = other RNA
ccacccctgctctgcacgtac

SEQ ID NO: 79104 - RNA, 21 nt, synthetic construct
  source 1..21: mol_type = other RNA
ccacccgtccaatttctttgg

SEQ ID NO: 79105 - RNA, 21 nt, synthetic construct
  source 1..21: mol_type = other RNA
ccaccctgccccttatcctct

SEQ ID NO: 79106 - RNA, 21 nt, synthetic construct
  source 1..21: mol_type = other RNA
ccaccctgctccagtatgacc

SEQ ID NO: 79107 - RNA, 21 nt, synthetic construct
  source 1..21: mol_type = other RNA
ccacccttgatgtcacaagcc

SEQ ID NO: 79108 - RNA, 21 nt, synthetic construct
  source 1..21: mol_type = other RNA
ccacccttgctgcttctaccc

SEQ ID NO: 79109 - RNA, 21 nt, synthetic construct
  source 1..21: mol_type = other RNA
ccaccgcacctggccgggatt

SEQ ID NO: 79110 - RNA, 21 nt, synthetic construct
  source 1..21: mol_type = other RNA
ccaccgcactcagcctgttgg

SEQ ID NO: 79111 - RNA, 21 nt, synthetic construct
  source 1..21: mol_type = other RNA
ccaccgccttcctaccctgcc

SEQ ID NO: 79112 - RNA, 21 nt, synthetic construct
  source 1..21: mol_type = other RNA
ccaccgcgcccggccaaatat

SEQ ID NO: 79113 - RNA, 21 nt, synthetic construct
  source 1..21: mol_type = other RNA
ccaccgcgcccggcccagatt

SEQ ID NO: 79114 - RNA, 21 nt, synthetic construct
  source 1..21: mol_type = other RNA
ccaccgcgcctggtgattaaa

SEQ ID NO: 79115 - RNA, 21 nt, synthetic construct
  source 1..21: mol_type = other RNA
ccaccgtgcccggccagacat

SEQ ID NO: 79116 - RNA, 21 nt, synthetic construct
  source 1..21: mol_type = other RNA
ccaccgtgccgggcttggtat

SEQ ID NO: 79117 - RNA, 21 nt, synthetic construct
  source 1..21: mol_type = other RNA
ccacctaactactaataaatg

SEQ ID NO: 79118 - RNA, 21 nt, synthetic construct
  source 1..21: mol_type = other RNA
ccacctcagaaacaaacaaaa

SEQ ID NO: 79119 - RNA, 21 nt, synthetic construct
  source 1..21: mol_type = other RNA
ccacctcagccccacaagtag

SEQ ID NO: 79120 - RNA, 21 nt, synthetic construct
  source 1..21: mol_type = other RNA
ccacctcatccggtctcagtt

SEQ ID NO: 79121 - RNA, 21 nt, synthetic construct
  source 1..21: mol_type = other RNA
ccacctccatcactgactggc

SEQ ID NO: 79122 - RNA, 21 nt, synthetic construct
  source 1..21: mol_type = other RNA
ccacctcctccggggacccag

SEQ ID NO: 79123 - RNA, 21 nt, synthetic construct
  source 1..21: mol_type = other RNA
ccacctgaaatctgatttgtt

SEQ ID NO: 79124 - RNA, 21 nt, synthetic construct
  source 1..21: mol_type = other RNA
ccacctgacaagtagtacaaa

SEQ ID NO: 79125 - RNA, 21 nt, synthetic construct
  source 1..21: mol_type = other RNA
ccacctgcgagcggcgggctt

SEQ ID NO: 79126 - RNA, 21 nt, synthetic construct
  source 1..21: mol_type = other RNA
ccacctgctctttatctccac

SEQ ID NO: 79127 - RNA, 21 nt, synthetic construct
  source 1..21: mol_type = other RNA
ccacctggcaacaaaggcgaa

SEQ ID NO: 79128 - RNA, 21 nt, synthetic construct
  source 1..21: mol_type = other RNA
ccacctgggggagactgtgca

SEQ ID NO: 79129 - RNA, 21 nt, synthetic construct
  source 1..21: mol_type = other RNA
ccacctgtcagaaacaccaac

SEQ ID NO: 79130 - RNA, 21 nt, synthetic construct
  source 1..21: mol_type = other RNA
ccaccttagcccaagctacca

SEQ ID NO: 79131 - RNA, 21 nt, synthetic construct
  source 1..21: mol_type = other RNA
ccacctttcctgcccctccac

SEQ ID NO: 79132 - RNA, 21 nt, synthetic construct
  source 1..21: mol_type = other RNA
ccacgagtaatggatgttttt

SEQ ID NO: 79133 - RNA, 21 nt, synthetic construct
  source 1..21: mol_type = other RNA
ccacgcagaacagtgtttaca

SEQ ID NO: 79134 - RNA, 21 nt, synthetic construct
  source 1..21: mol_type = other RNA
ccacgcagtttgttctgctgt

SEQ ID NO: 79135 - RNA, 21 nt, synthetic construct
  source 1..21: mol_type = other RNA
ccacgcatctggtctatctca

SEQ ID NO: 79136 - RNA, 21 nt, synthetic construct
  source 1..21: mol_type = other RNA
ccacgcccattaggatagcta

SEQ ID NO: 79137 - RNA, 21 nt, synthetic construct
  source 1..21: mol_type = other RNA
ccacgcccggccgatgcctgt

SEQ ID NO: 79138 - RNA, 21 nt, synthetic construct
  source 1..21: mol_type = other RNA
ccacgcgtaagggtacagaac

SEQ ID NO: 79139 - RNA, 21 nt, synthetic construct
  source 1..21: mol_type = other RNA
ccacgctgtggcttgggtgac

SEQ ID NO: 79140 - RNA, 21 nt, synthetic construct
  source 1..21: mol_type = other RNA
ccacggaatgcccctttgagc

SEQ ID NO: 79141 - RNA, 21 nt, synthetic construct
  source 1..21: mol_type = other RNA
ccacgggtaaaaataaatcta

SEQ ID NO: 79142 - RNA, 21 nt, synthetic construct
  source 1..21: mol_type = other RNA
ccacgtccggtcgttggattt

SEQ ID NO: 79143 - RNA, 21 nt, synthetic construct
  source 1..21: mol_type = other RNA
ccacgtgaagatggagttacg

SEQ ID NO: 79144 - RNA, 21 nt, synthetic construct
  source 1..21: mol_type = other RNA
ccacgtggagtgcaatggggc

SEQ ID NO: 79145 - RNA, 21 nt, synthetic construct
  source 1..21: mol_type = other RNA
ccacgtgggtgacagagcaag

SEQ ID NO: 79146 - RNA, 21 nt, synthetic construct
  source 1..21: mol_type = other RNA
ccacgtgtattgagtgtagct

SEQ ID NO: 79147 - RNA, 21 nt, synthetic construct
  source 1..21: mol_type = other RNA
ccactaaaacaggaagttgag

SEQ ID NO: 79148 - RNA, 21 nt, synthetic construct
  source 1..21: mol_type = other RNA
ccactaaggtcaacacatcag

SEQ ID NO: 79149 - RNA, 21 nt, synthetic construct
  source 1..21: mol_type = other RNA
ccactaatgtcacattttctt

SEQ ID NO: 79150 - RNA, 21 nt, synthetic construct
  source 1..21: mol_type = other RNA
ccactaatgtccttttcctgt

SEQ ID NO: 79151 - RNA, 21 nt, synthetic construct
  source 1..21: mol_type = other RNA
ccactacacccggctaattaa

SEQ ID NO: 79152 - RNA, 21 nt, synthetic construct
  source 1..21: mol_type = other RNA
ccactacgcccggcccatgac

SEQ ID NO: 79153 - RNA, 21 nt, synthetic construct
  source 1..21: mol_type = other RNA
ccactacttagcccctgctgc

SEQ ID NO: 79154 - RNA, 21 nt, synthetic construct
  source 1..21: mol_type = other RNA
ccactagagtattacctatga

SEQ ID NO: 79155 - RNA, 21 nt, synthetic construct
  source 1..21: mol_type = other RNA
ccactagcaaactactgatag

SEQ ID NO: 79156 - RNA, 21 nt, synthetic construct
  source 1..21: mol_type = other RNA
ccactaggggactaacagggt

SEQ ID NO: 79157 - RNA, 21 nt, synthetic construct
  source 1..21: mol_type = other RNA
ccactagtcagtatatttact

SEQ ID NO: 79158 - RNA, 21 nt, synthetic construct
  source 1..21: mol_type = other RNA
ccactagtgaagtcccatctt

SEQ ID NO: 79159 - RNA, 21 nt, synthetic construct
  source 1..21: mol_type = other RNA
ccactagtggaagaatcaggt

SEQ ID NO: 79160 - RNA, 21 nt, synthetic construct
  source 1..21: mol_type = other RNA
ccactagtgggatcaaaccat

SEQ ID NO: 79161 - RNA, 21 nt, synthetic construct
  source 1..21: mol_type = other RNA
ccactataatccagatggaca

SEQ ID NO: 79162 - RNA, 21 nt, synthetic construct
  source 1..21: mol_type = other RNA
ccactatagaaaatagtatga

SEQ ID NO: 79163 - RNA, 21 nt, synthetic construct
  source 1..21: mol_type = other RNA
ccactatattgcccaggctgg

SEQ ID NO: 79164 - RNA, 21 nt, synthetic construct
  source 1..21: mol_type = other RNA
ccactatctaataaaatagca

SEQ ID NO: 79165 - RNA, 21 nt, synthetic construct
  source 1..21: mol_type = other RNA
ccactattgaaagcccttgag

SEQ ID NO: 79166 - RNA, 21 nt, synthetic construct
  source 1..21: mol_type = other RNA
ccactcaaaactgaagtttat

SEQ ID NO: 79167 - RNA, 21 nt, synthetic construct
  source 1..21: mol_type = other RNA
ccactcacctgtcatgtcaaa

SEQ ID NO: 79168 - RNA, 21 nt, synthetic construct
  source 1..21: mol_type = other RNA
ccactccacacacgaagtagt

SEQ ID NO: 79169 - RNA, 21 nt, synthetic construct
  source 1..21: mol_type = other RNA
ccactccaccttagcccaagc

SEQ ID NO: 79170 - RNA, 21 nt, synthetic construct
  source 1..21: mol_type = other RNA
ccactccagcctgagcaacaa

SEQ ID NO: 79171 - RNA, 21 nt, synthetic construct
  source 1..21: mol_type = other RNA
ccactcccggccgtatttttt

SEQ ID NO: 79172 - RNA, 21 nt, synthetic construct
  source 1..21: mol_type = other RNA
ccactctcatctaaattaagc

SEQ ID NO: 79173 - RNA, 21 nt, synthetic construct
  source 1..21: mol_type = other RNA
ccactctccccaagtaaacct

SEQ ID NO: 79174 - RNA, 21 nt, synthetic construct
  source 1..21: mol_type = other RNA
ccactctctggctgcaattgc

SEQ ID NO: 79175 - RNA, 21 nt, synthetic construct
  source 1..21: mol_type = other RNA
ccactctgaattctctggaat

SEQ ID NO: 79176 - RNA, 21 nt, synthetic construct
  source 1..21: mol_type = other RNA
ccactcttatatcctaaacac

SEQ ID NO: 79177 - RNA, 21 nt, synthetic construct
  source 1..21: mol_type = other RNA
ccactgaaacttttcttttct

SEQ ID NO: 79178 - RNA, 21 nt, synthetic construct
  source 1..21: mol_type = other RNA
ccactgaagtgttgagaggct

SEQ ID NO: 79179 - RNA, 21 nt, synthetic construct
  source 1..21: mol_type = other RNA
ccactgaatcagattttaaat

SEQ ID NO: 79180 - RNA, 21 nt, synthetic construct
  source 1..21: mol_type = other RNA
ccactgacagtggacaaaggt

SEQ ID NO: 79181 - RNA, 21 nt, synthetic construct
  source 1..21: mol_type = other RNA
ccactgagagctcaggccagt

SEQ ID NO: 79182 - RNA, 21 nt, synthetic construct
  source 1..21: mol_type = other RNA
ccactgagagggaagtttata

SEQ ID NO: 79183 - RNA, 21 nt, synthetic construct
  source 1..21: mol_type = other RNA
ccactgagcacaatgcctgcc

SEQ ID NO: 79184 - RNA, 21 nt, synthetic construct
  source 1..21: mol_type = other RNA
ccactgagcatttatataagt

SEQ ID NO: 79185 - RNA, 21 nt, synthetic construct
  source 1..21: mol_type = other RNA
ccactgaggtcaagaaataaa

SEQ ID NO: 79186 - RNA, 21 nt, synthetic construct
  source 1..21: mol_type = other RNA
ccactgatggaattctgacac

SEQ ID NO: 79187 - RNA, 21 nt, synthetic construct
  source 1..21: mol_type = other RNA
ccactgattgagtatctggtg

SEQ ID NO: 79188 - RNA, 21 nt, synthetic construct
  source 1..21: mol_type = other RNA
ccactgcacagtatgcggggt

SEQ ID NO: 79189 - RNA, 21 nt, synthetic construct
  source 1..21: mol_type = other RNA
ccactgcactccagccttggt

SEQ ID NO: 79190 - RNA, 21 nt, synthetic construct
  source 1..21: mol_type = other RNA
ccactgcactctggcctggac

SEQ ID NO: 79191 - RNA, 21 nt, synthetic construct
  source 1..21: mol_type = other RNA
ccactgcaggtgttggtgcat

SEQ ID NO: 79192 - RNA, 21 nt, synthetic construct
  source 1..21: mol_type = other RNA
ccactgcattcatccaggcaa

SEQ ID NO: 79193 - RNA, 21 nt, synthetic construct
  source 1..21: mol_type = other RNA
ccactgcattccgcctgggcg

SEQ ID NO: 79194 - RNA, 21 nt, synthetic construct
  source 1..21: mol_type = other RNA
ccactgcgggcccagctcttt

SEQ ID NO: 79195 - RNA, 21 nt, synthetic construct
  source 1..21: mol_type = other RNA
ccactgctatgactaatttga

SEQ ID NO: 79196 - RNA, 21 nt, synthetic construct
  source 1..21: mol_type = other RNA
ccactggaaaccttttgtaga

SEQ ID NO: 79197 - RNA, 21 nt, synthetic construct
  source 1..21: mol_type = other RNA
ccactggatacggaaatataa

SEQ ID NO: 79198 - RNA, 21 nt, synthetic construct
  source 1..21: mol_type = other RNA
ccactggggagtgtgcccaag

SEQ ID NO: 79199 - RNA, 21 nt, synthetic construct
  source 1..21: mol_type = other RNA
ccactgggtcttataggttga

SEQ ID NO: 79200 - RNA, 21 nt, synthetic construct
  source 1..21: mol_type = other RNA
ccactggtttcagtccctcct

SEQ ID NO: 79201 - RNA, 21 nt, synthetic construct
  source 1..21: mol_type = other RNA
ccactgtaggccccgatgcca

SEQ ID NO: 79202 - RNA, 21 nt, synthetic construct
  source 1..21: mol_type = other RNA
ccactgtcagtgggactggag

SEQ ID NO: 79203 - RNA, 21 nt, synthetic construct
  source 1..21: mol_type = other RNA
ccactgttatctgggaacagc

SEQ ID NO: 79204 - RNA, 21 nt, synthetic construct
  source 1..21: mol_type = other RNA
ccacttaaaaaatgcgcgtcc

SEQ ID NO: 79205 - RNA, 21 nt, synthetic construct
  source 1..21: mol_type = other RNA
ccacttacatcagcagtgacc

SEQ ID NO: 79206 - RNA, 21 nt, synthetic construct
  source 1..21: mol_type = other RNA
ccacttagtttgcaatacagt

SEQ ID NO: 79207 - RNA, 21 nt, synthetic construct
  source 1..21: mol_type = other RNA
ccacttatatgaagctaaaaa

SEQ ID NO: 79208 - RNA, 21 nt, synthetic construct
  source 1..21: mol_type = other RNA
ccacttcccactgctatgact

SEQ ID NO: 79209 - RNA, 21 nt, synthetic construct
  source 1..21: mol_type = other RNA
ccacttcctattagaagaatg

SEQ ID NO: 79210 - RNA, 21 nt, synthetic construct
  source 1..21: mol_type = other RNA
ccacttcgaaagttcagatag

SEQ ID NO: 79211 - RNA, 21 nt, synthetic construct
  source 1..21: mol_type = other RNA
ccacttcgagaagggaagtaa

SEQ ID NO: 79212 - RNA, 21 nt, synthetic construct
  source 1..21: mol_type = other RNA
ccacttgatccaggtgtatga

SEQ ID NO: 79213 - RNA, 21 nt, synthetic construct
  source 1..21: mol_type = other RNA
ccacttgggtggaagctgtcc

SEQ ID NO: 79214 - RNA, 21 nt, synthetic construct
  source 1..21: mol_type = other RNA
ccacttgtcccatggtcaaat

SEQ ID NO: 79215 - RNA, 21 nt, synthetic construct
  source 1..21: mol_type = other RNA
ccactttcatgatttggtgtg

SEQ ID NO: 79216 - RNA, 21 nt, synthetic construct
  source 1..21: mol_type = other RNA
ccactttccatcttaggccat

SEQ ID NO: 79217 - RNA, 21 nt, synthetic construct
  source 1..21: mol_type = other RNA
ccactttgaggttattaagat

SEQ ID NO: 79218 - RNA, 21 nt, synthetic construct
  source 1..21: mol_type = other RNA
ccagaaaaccagaaaagtgaa

SEQ ID NO: 79219 - RNA, 21 nt, synthetic construct
  source 1..21: mol_type = other RNA
ccagaaaactggcaatcaaat

SEQ ID NO: 79220 - RNA, 21 nt, synthetic construct
  source 1..21: mol_type = other RNA
ccagaaaagtgaaacaataaa

SEQ ID NO: 79221 - RNA, 21 nt, synthetic construct
  source 1..21: mol_type = other RNA
ccagaaacttccaaccatctt

SEQ ID NO: 79222 - RNA, 21 nt, synthetic construct
  source 1..21: mol_type = other RNA
ccagaaagagagaggggggaa

SEQ ID NO: 79223 - RNA, 21 nt, synthetic construct
  source 1..21: mol_type = other RNA
ccagaaataaatcctcacatg

SEQ ID NO: 79224 - RNA, 21 nt, synthetic construct
  source 1..21: mol_type = other RNA
ccagaactacacattccagac

SEQ ID NO: 79225 - RNA, 21 nt, synthetic construct
  source 1..21: mol_type = other RNA
ccagaactcgaagccttcccc

SEQ ID NO: 79226 - RNA, 21 nt, synthetic construct
  source 1..21: mol_type = other RNA
ccagaagagaatggctggaat

SEQ ID NO: 79227 - RNA, 21 nt, synthetic construct
  source 1..21: mol_type = other RNA
ccagaaggagaaaacaaaaag

SEQ ID NO: 79228 - RNA, 21 nt, synthetic construct
  source 1..21: mol_type = other RNA
ccagaaggttaactaatagcc

SEQ ID NO: 79229 - RNA, 21 nt, synthetic construct
  source 1..21: mol_type = other RNA
ccagaagtaactcttgagtta

SEQ ID NO: 79230 - RNA, 21 nt, synthetic construct
  source 1..21: mol_type = other RNA
ccagaagtcactttttattct

SEQ ID NO: 79231 - RNA, 21 nt, synthetic construct
  source 1..21: mol_type = other RNA
ccagaataggcaaattcatag

SEQ ID NO: 79232 - RNA, 21 nt, synthetic construct
  source 1..21: mol_type = other RNA
ccagaatccctttcgctaatc

SEQ ID NO: 79233 - RNA, 21 nt, synthetic construct
  source 1..21: mol_type = other RNA
ccagaatgaccgagatactta

SEQ ID NO: 79234 - RNA, 21 nt, synthetic construct
  source 1..21: mol_type = other RNA
ccagacaaaaatagaggatgg

SEQ ID NO: 79235 - RNA, 21 nt, synthetic construct
  source 1..21: mol_type = other RNA
ccagacaaaaattttcattct

SEQ ID NO: 79236 - RNA, 21 nt, synthetic construct
  source 1..21: mol_type = other RNA
ccagacagatatatgcattcc

SEQ ID NO: 79237 - RNA, 21 nt, synthetic construct
  source 1..21: mol_type = other RNA
ccagacagctaatatgctgta

SEQ ID NO: 79238 - RNA, 21 nt, synthetic construct
  source 1..21: mol_type = other RNA
ccagacagggaatgcccctgt

SEQ ID NO: 79239 - RNA, 21 nt, synthetic construct
  source 1..21: mol_type = other RNA
ccagacatttctcatactttg

SEQ ID NO: 79240 - RNA, 21 nt, synthetic construct
  source 1..21: mol_type = other RNA
ccagacattttatttatacag

SEQ ID NO: 79241 - RNA, 21 nt, synthetic construct
  source 1..21: mol_type = other RNA
ccagaccaagtttaaccaatt

SEQ ID NO: 79242 - RNA, 21 nt, synthetic construct
  source 1..21: mol_type = other RNA
ccagaccagcagttcaagcac

SEQ ID NO: 79243 - RNA, 21 nt, synthetic construct
  source 1..21: mol_type = other RNA
ccagaccctttatcggataag

SEQ ID NO: 79244 - RNA, 21 nt, synthetic construct
  source 1..21: mol_type = other RNA
ccagacctgcacaaaggattg

SEQ ID NO: 79245 - RNA, 21 nt, synthetic construct
  source 1..21: mol_type = other RNA
ccagactgaccaacatggaca

SEQ ID NO: 79246 - RNA, 21 nt, synthetic construct
  source 1..21: mol_type = other RNA
ccagactggagttcactggca

SEQ ID NO: 79247 - RNA, 21 nt, synthetic construct
  source 1..21: mol_type = other RNA
ccagactgggcaacagagaca

SEQ ID NO: 79248 - RNA, 21 nt, synthetic construct
  source 1..21: mol_type = other RNA
ccagagaagttttccaggaaa

SEQ ID NO: 79249 - RNA, 21 nt, synthetic construct
  source 1..21: mol_type = other RNA
ccagagaattcagagtggcta

SEQ ID NO: 79250 - RNA, 21 nt, synthetic construct
  source 1..21: mol_type = other RNA
ccagagacaaagcataaaata

SEQ ID NO: 79251 - RNA, 21 nt, synthetic construct
  source 1..21: mol_type = other RNA
ccagagaggctaggtgacctg

SEQ ID NO: 79252 - RNA, 21 nt, synthetic construct
  source 1..21: mol_type = other RNA
ccagagagtggaaagagccag

SEQ ID NO: 79253 - RNA, 21 nt, synthetic construct
  source 1..21: mol_type = other RNA
ccagagatcccaccattgcac

SEQ ID NO: 79254 - RNA, 21 nt, synthetic construct
  source 1..21: mol_type = other RNA
ccagagattgggaaaatcttg

SEQ ID NO: 79255 - RNA, 21 nt, synthetic construct
  source 1..21: mol_type = other RNA
ccagagattgtcgttgagtac

SEQ ID NO: 79256 - RNA, 21 nt, synthetic construct
  source 1..21: mol_type = other RNA
ccagagcctaatgtgtaagaa

SEQ ID NO: 79257 - RNA, 21 nt, synthetic construct
  source 1..21: mol_type = other RNA
ccagagcggaatttttatatt

SEQ ID NO: 79258 - RNA, 21 nt, synthetic construct
  source 1..21: mol_type = other RNA
ccagagcgggtttcctcggtc

SEQ ID NO: 79259 - RNA, 21 nt, synthetic construct
  source 1..21: mol_type = other RNA
ccagaggaagcttataatttc

SEQ ID NO: 79260 - RNA, 21 nt, synthetic construct
  source 1..21: mol_type = other RNA
ccagaggaggaagagatagtc

SEQ ID NO: 79261 - RNA, 21 nt, synthetic construct
  source 1..21: mol_type = other RNA
ccagaggagggatgcattcta

SEQ ID NO: 79262 - RNA, 21 nt, synthetic construct
  source 1..21: mol_type = other RNA
ccagagggaatctaggaaaca

SEQ ID NO: 79263 - RNA, 21 nt, synthetic construct
  source 1..21: mol_type = other RNA
ccagagggtaacgtgagctgg

SEQ ID NO: 79264 - RNA, 21 nt, synthetic construct
  source 1..21: mol_type = other RNA
ccagaggtactcaacgacaat

SEQ ID NO: 79265 - RNA, 21 nt, synthetic construct
  source 1..21: mol_type = other RNA
ccagaggtgagctttttcttt

SEQ ID NO: 79266 - RNA, 21 nt, synthetic construct
  source 1..21: mol_type = other RNA
ccagaggttaaagcaacagga

SEQ ID NO: 79267 - RNA, 21 nt, synthetic construct
  source 1..21: mol_type = other RNA
ccagaggttcttttaaatgcc

SEQ ID NO: 79268 - RNA, 21 nt, synthetic construct
  source 1..21: mol_type = other RNA
ccagagttggcacagccagtc

SEQ ID NO: 79269 - RNA, 21 nt, synthetic construct
  source 1..21: mol_type = other RNA
ccagagtttcactctgtcgcc

SEQ ID NO: 79270 - RNA, 21 nt, synthetic construct
  source 1..21: mol_type = other RNA
ccagataaattatagctccaa

SEQ ID NO: 79271 - RNA, 21 nt, synthetic construct
  source 1..21: mol_type = other RNA
ccagataacagtggttaggaa

SEQ ID NO: 79272 - RNA, 21 nt, synthetic construct
  source 1..21: mol_type = other RNA
ccagatacgttaaaggaaaag

SEQ ID NO: 79273 - RNA, 21 nt, synthetic construct
  source 1..21: mol_type = other RNA
ccagatactcaatcagtggcc

SEQ ID NO: 79274 - RNA, 21 nt, synthetic construct
  source 1..21: mol_type = other RNA
ccagatactcatgcttgctcc

SEQ ID NO: 79275 - RNA, 21 nt, synthetic construct
  source 1..21: mol_type = other RNA
ccagatatccataaggaaaaa

SEQ ID NO: 79276 - RNA, 21 nt, synthetic construct
  source 1..21: mol_type = other RNA
ccagatattatcctccaatgt

SEQ ID NO: 79277 - RNA, 21 nt, synthetic construct
  source 1..21: mol_type = other RNA
ccagatcaaacgtgctttcct

SEQ ID NO: 79278 - RNA, 21 nt, synthetic construct
  source 1..21: mol_type = other RNA
ccagatctaacaaacgcattg

SEQ ID NO: 79279 - RNA, 21 nt, synthetic construct
  source 1..21: mol_type = other RNA
ccagatgaagcagggaaatgg

SEQ ID NO: 79280 - RNA, 21 nt, synthetic construct
  source 1..21: mol_type = other RNA
ccagatgcgtggttcacacct

SEQ ID NO: 79281 - RNA, 21 nt, synthetic construct
  source 1..21: mol_type = other RNA
ccagatggacaaattaccatg

SEQ ID NO: 79282 - RNA, 21 nt, synthetic construct
  source 1..21: mol_type = other RNA
ccagatggggattgagggtta

SEQ ID NO: 79283 - RNA, 21 nt, synthetic construct
  source 1..21: mol_type = other RNA
ccagatgtagagaaacaggat

SEQ ID NO: 79284 - RNA, 21 nt, synthetic construct
  source 1..21: mol_type = other RNA
ccagatgttctaatttcttta

SEQ ID NO: 79285 - RNA, 21 nt, synthetic construct
  source 1..21: mol_type = other RNA
ccagatgttttacacatgtca

SEQ ID NO: 79286 - RNA, 21 nt, synthetic construct
  source 1..21: mol_type = other RNA
ccagattccttttttatgtgc

SEQ ID NO: 79287 - RNA, 21 nt, synthetic construct
  source 1..21: mol_type = other RNA
ccagattgaaatctaggcata

SEQ ID NO: 79288 - RNA, 21 nt, synthetic construct
  source 1..21: mol_type = other RNA
ccagattgatatctgagtgtt

SEQ ID NO: 79289 - RNA, 21 nt, synthetic construct
  source 1..21: mol_type = other RNA
ccagatttgatcctggaatag

SEQ ID NO: 79290 - RNA, 21 nt, synthetic construct
  source 1..21: mol_type = other RNA
ccagcaaatcagaaaaggctg

SEQ ID NO: 79291 - RNA, 21 nt, synthetic construct
  source 1..21: mol_type = other RNA
ccagcaagactttatgtggaa

SEQ ID NO: 79292 - RNA, 21 nt, synthetic construct
  source 1..21: mol_type = other RNA
ccagcaccacccttgatgtca

SEQ ID NO: 79293 - RNA, 21 nt, synthetic construct
  source 1..21: mol_type = other RNA
ccagcaccagatactcaatca

SEQ ID NO: 79294 - RNA, 21 nt, synthetic construct
  source 1..21: mol_type = other RNA
ccagcacctaacaatgattat

SEQ ID NO: 79295 - RNA, 21 nt, synthetic construct
  source 1..21: mol_type = other RNA
ccagcactctgaatcacctca

SEQ ID NO: 79296 - RNA, 21 nt, synthetic construct
  source 1..21: mol_type = other RNA
ccagcacttccattttgctta

SEQ ID NO: 79297 - RNA, 21 nt, synthetic construct
  source 1..21: mol_type = other RNA
ccagcagaaggtgagggactg

SEQ ID NO: 79298 - RNA, 21 nt, synthetic construct
  source 1..21: mol_type = other RNA
ccagcagccccgacgcctttc

SEQ ID NO: 79299 - RNA, 21 nt, synthetic construct
  source 1..21: mol_type = other RNA
ccagcagggtaaagtcaattc

SEQ ID NO: 79300 - RNA, 21 nt, synthetic construct
  source 1..21: mol_type = other RNA
ccagcagttcaagcaccactt

SEQ ID NO: 79301 - RNA, 21 nt, synthetic construct
  source 1..21: mol_type = other RNA
ccagcagtttcacttcttagt

SEQ ID NO: 79302 - RNA, 21 nt, synthetic construct
  source 1..21: mol_type = other RNA
ccagcataagacccctcaggt

SEQ ID NO: 79303 - RNA, 21 nt, synthetic construct
  source 1..21: mol_type = other RNA
ccagcatccactaggggacta

SEQ ID NO: 79304 - RNA, 21 nt, synthetic construct
  source 1..21: mol_type = other RNA
ccagcatccctccagtccagc

SEQ ID NO: 79305 - RNA, 21 nt, synthetic construct
  source 1..21: mol_type = other RNA
ccagcatcttttgacgcgcaa

SEQ ID NO: 79306 - RNA, 21 nt, synthetic construct
  source 1..21: mol_type = other RNA
ccagcatgaagccctctaagt

SEQ ID NO: 79307 - RNA, 21 nt, synthetic construct
  source 1..21: mol_type = other RNA
ccagcattaccctaataacaa

SEQ ID NO: 79308 - RNA, 21 nt, synthetic construct
  source 1..21: mol_type = other RNA
ccagcattacttaggcagtta

SEQ ID NO: 79309 - RNA, 21 nt, synthetic construct
  source 1..21: mol_type = other RNA
ccagcattttataggcattcc

SEQ ID NO: 79310 - RNA, 21 nt, synthetic construct
  source 1..21: mol_type = other RNA
ccagccaaacagtttttacat

SEQ ID NO: 79311 - RNA, 21 nt, synthetic construct
  source 1..21: mol_type = other RNA
ccagccacccttgctgcttct

SEQ ID NO: 79312 - RNA, 21 nt, synthetic construct
  source 1..21: mol_type = other RNA
ccagccattctcttctggata

SEQ ID NO: 79313 - RNA, 21 nt, synthetic construct
  source 1..21: mol_type = other RNA
ccagcccccagttttgttgaa

SEQ ID NO: 79314 - RNA, 21 nt, synthetic construct
  source 1..21: mol_type = other RNA
ccagcccctggtgatctatga

SEQ ID NO: 79315 - RNA, 21 nt, synthetic construct
  source 1..21: mol_type = other RNA
ccagcccgtgtgtttagaata

SEQ ID NO: 79316 - RNA, 21 nt, synthetic construct
  source 1..21: mol_type = other RNA
ccagcctaggcaagagagcaa

SEQ ID NO: 79317 - RNA, 21 nt, synthetic construct
  source 1..21: mol_type = other RNA
ccagcctcaaacaatcctccc

SEQ ID NO: 79318 - RNA, 21 nt, synthetic construct
  source 1..21: mol_type = other RNA
ccagcctcaacagcacttttg

SEQ ID NO: 79319 - RNA, 21 nt, synthetic construct
  source 1..21: mol_type = other RNA
ccagcctgatgatgatggtga

SEQ ID NO: 79320 - RNA, 21 nt, synthetic construct
  source 1..21: mol_type = other RNA
ccagcctggccaacatcgtaa

SEQ ID NO: 79321 - RNA, 21 nt, synthetic construct
  source 1..21: mol_type = other RNA
ccagcctggtaatgaatagaa

SEQ ID NO: 79322 - RNA, 21 nt, synthetic construct
  source 1..21: mol_type = other RNA
ccagcctggtcaacagggtaa

SEQ ID NO: 79323 - RNA, 21 nt, synthetic construct
  source 1..21: mol_type = other RNA
ccagccttaatctcctgagta

SEQ ID NO: 79324 - RNA, 21 nt, synthetic construct
  source 1..21: mol_type = other RNA
ccagccttggtaagagtgaga

SEQ ID NO: 79325 - RNA, 21 nt, synthetic construct
  source 1..21: mol_type = other RNA
ccagcctttaatttagcgttc

SEQ ID NO: 79326 - RNA, 21 nt, synthetic construct
  source 1..21: mol_type = other RNA
ccagcgctaagcactgcgcca

SEQ ID NO: 79327 - RNA, 21 nt, synthetic construct
  source 1..21: mol_type = other RNA
ccagcggcatacaggagttcc

SEQ ID NO: 79328 - RNA, 21 nt, synthetic construct
  source 1..21: mol_type = other RNA
ccagcgtgtgcatgaccctgc

SEQ ID NO: 79329 - RNA, 21 nt, synthetic construct
  source 1..21: mol_type = other RNA
ccagctaaaatgttcagatag

SEQ ID NO: 79330 - RNA, 21 nt, synthetic construct
  source 1..21: mol_type = other RNA
ccagctaacttttaacccaca

SEQ ID NO: 79331 - RNA, 21 nt, synthetic construct
  source 1..21: mol_type = other RNA
ccagctaattttcattacttt

SEQ ID NO: 79332 - RNA, 21 nt, synthetic construct
  source 1..21: mol_type = other RNA
ccagctacataacttcccaga

SEQ ID NO: 79333 - RNA, 21 nt, synthetic construct
  source 1..21: mol_type = other RNA
ccagctcacgttaccctctgg

SEQ ID NO: 79334 - RNA, 21 nt, synthetic construct
  source 1..21: mol_type = other RNA
ccagctcgaccaggggaagga

SEQ ID NO: 79335 - RNA, 21 nt, synthetic construct
  source 1..21: mol_type = other RNA
ccagctcttttgtgtcttttt

SEQ ID NO: 79336 - RNA, 21 nt, synthetic construct
  source 1..21: mol_type = other RNA
ccagctgtccaacaagggttg

SEQ ID NO: 79337 - RNA, 21 nt, synthetic construct
  source 1..21: mol_type = other RNA
ccagcttacagcagatctgct

SEQ ID NO: 79338 - RNA, 21 nt, synthetic construct
  source 1..21: mol_type = other RNA
ccagcttcactcttctgcaag

SEQ ID NO: 79339 - RNA, 21 nt, synthetic construct
  source 1..21: mol_type = other RNA
ccagcttccgggacttggaag

SEQ ID NO: 79340 - RNA, 21 nt, synthetic construct
  source 1..21: mol_type = other RNA
ccagcttggccaacatggcga

SEQ ID NO: 79341 - RNA, 21 nt, synthetic construct
  source 1..21: mol_type = other RNA
ccagcttgggcaagagagcaa

SEQ ID NO: 79342 - RNA, 21 nt, synthetic construct
  source 1..21: mol_type = other RNA
ccagctttctaattctgacaa

SEQ ID NO: 79343 - RNA, 21 nt, synthetic construct
  source 1..21: mol_type = other RNA
ccagctttggctgaaatgctg

SEQ ID NO: 79344 - RNA, 21 nt, synthetic construct
  source 1..21: mol_type = other RNA
ccagcttttattagagcttta

SEQ ID NO: 79345 - RNA, 21 nt, synthetic construct
  source 1..21: mol_type = other RNA
ccaggaaaagcaaatgtcatc

SEQ ID NO: 79346 - RNA, 21 nt, synthetic construct
  source 1..21: mol_type = other RNA
ccaggaacagattcacgcaca

SEQ ID NO: 79347 - RNA, 21 nt, synthetic construct
  source 1..21: mol_type = other RNA
ccaggaacttacagtaagatc

SEQ ID NO: 79348 - RNA, 21 nt, synthetic construct
  source 1..21: mol_type = other RNA
ccaggaagtcagcaactcttg

SEQ ID NO: 79349 - RNA, 21 nt, synthetic construct
  source 1..21: mol_type = other RNA
ccaggacaattgaatggggat

SEQ ID NO: 79350 - RNA, 21 nt, synthetic construct
  source 1..21: mol_type = other RNA
ccaggaccaatttaccatctg

SEQ ID NO: 79351 - RNA, 21 nt, synthetic construct
  source 1..21: mol_type = other RNA
ccaggagctagaacagaataa

SEQ ID NO: 79352 - RNA, 21 nt, synthetic construct
  source 1..21: mol_type = other RNA
ccaggaggaggagggtgcagc

SEQ ID NO: 79353 - RNA, 21 nt, synthetic construct
  source 1..21: mol_type = other RNA
ccaggaggcaaaggttgagac

SEQ ID NO: 79354 - RNA, 21 nt, synthetic construct
  source 1..21: mol_type = other RNA
ccaggaggttgaagctctagt

SEQ ID NO: 79355 - RNA, 21 nt, synthetic construct
  source 1..21: mol_type = other RNA
ccaggaggtttgcactggcac

SEQ ID NO: 79356 - RNA, 21 nt, synthetic construct
  source 1..21: mol_type = other RNA
ccaggagttcttatgaggtta

SEQ ID NO: 79357 - RNA, 21 nt, synthetic construct
  source 1..21: mol_type = other RNA
ccaggagttgcatcacttgag

SEQ ID NO: 79358 - RNA, 21 nt, synthetic construct
  source 1..21: mol_type = other RNA
ccaggatcaaatctggctgca

SEQ ID NO: 79359 - RNA, 21 nt, synthetic construct
  source 1..21: mol_type = other RNA
ccaggatccagtctctaccca

SEQ ID NO: 79360 - RNA, 21 nt, synthetic construct
  source 1..21: mol_type = other RNA
ccaggatcttactgtaagttc

SEQ ID NO: 79361 - RNA, 21 nt, synthetic construct
  source 1..21: mol_type = other RNA
ccaggatggcatgaaatgggt

SEQ ID NO: 79362 - RNA, 21 nt, synthetic construct
  source 1..21: mol_type = other RNA
ccaggcaaaagatgatgaaca

SEQ ID NO: 79363 - RNA, 21 nt, synthetic construct
  source 1..21: mol_type = other RNA
ccaggcagtcctctcactcca

SEQ ID NO: 79364 - RNA, 21 nt, synthetic construct
  source 1..21: mol_type = other RNA
ccaggcagttctcctgcctca

SEQ ID NO: 79365 - RNA, 21 nt, synthetic construct
  source 1..21: mol_type = other RNA
ccaggcatgatggctcaacgc

SEQ ID NO: 79366 - RNA, 21 nt, synthetic construct
  source 1..21: mol_type = other RNA
ccaggccaacagggccactga

SEQ ID NO: 79367 - RNA, 21 nt, synthetic construct
  source 1..21: mol_type = other RNA
ccaggcccggggcagagaact

SEQ ID NO: 79368 - RNA, 21 nt, synthetic construct
  source 1..21: mol_type = other RNA
ccaggcctcgctcttggcttt

SEQ ID NO: 79369 - RNA, 21 nt, synthetic construct
  source 1..21: mol_type = other RNA
ccaggcgcctgcattgcattt

SEQ ID NO: 79370 - RNA, 21 nt, synthetic construct
  source 1..21: mol_type = other RNA
ccaggcggaatgcagtggcgt

SEQ ID NO: 79371 - RNA, 21 nt, synthetic construct
  source 1..21: mol_type = other RNA
ccaggcggcagagggagcagc

SEQ ID NO: 79372 - RNA, 21 nt, synthetic construct
  source 1..21: mol_type = other RNA
ccaggcgtggtggcggatgcc

SEQ ID NO: 79373 - RNA, 21 nt, synthetic construct
  source 1..21: mol_type = other RNA
ccaggctgacttagagggctt

SEQ ID NO: 79374 - RNA, 21 nt, synthetic construct
  source 1..21: mol_type = other RNA
ccaggctggaagaattttaag

SEQ ID NO: 79375 - RNA, 21 nt, synthetic construct
  source 1..21: mol_type = other RNA
ccaggctggtcttgtactccc

SEQ ID NO: 79376 - RNA, 21 nt, synthetic construct
  source 1..21: mol_type = other RNA
ccaggctggttccaaacttct

SEQ ID NO: 79377 - RNA, 21 nt, synthetic construct
  source 1..21: mol_type = other RNA
ccaggctttcccagggtgtag

SEQ ID NO: 79378 - RNA, 21 nt, synthetic construct
  source 1..21: mol_type = other RNA
ccagggaaaccttactgtaat

SEQ ID NO: 79379 - RNA, 21 nt, synthetic construct
  source 1..21: mol_type = other RNA
ccagggaggaatccttcagtc

SEQ ID NO: 79380 - RNA, 21 nt, synthetic construct
  source 1..21: mol_type = other RNA
ccagggaggcggaggttgcgg

SEQ ID NO: 79381 - RNA, 21 nt, synthetic construct
  source 1..21: mol_type = other RNA
ccagggataaatcccacttga

SEQ ID NO: 79382 - RNA, 21 nt, synthetic construct
  source 1..21: mol_type = other RNA
ccagggatattttcgtgtact

SEQ ID NO: 79383 - RNA, 21 nt, synthetic construct
  source 1..21: mol_type = other RNA
ccagggcctctgaagacatgc

SEQ ID NO: 79384 - RNA, 21 nt, synthetic construct
  source 1..21: mol_type = other RNA
ccaggggaaggagtctgccca

SEQ ID NO: 79385 - RNA, 21 nt, synthetic construct
  source 1..21: mol_type = other RNA
ccaggggaatagaaagttagt

SEQ ID NO: 79386 - RNA, 21 nt, synthetic construct
  source 1..21: mol_type = other RNA
ccaggggacatagatgaaact

SEQ ID NO: 79387 - RNA, 21 nt, synthetic construct
  source 1..21: mol_type = other RNA
ccaggggacatgctctgatag

SEQ ID NO: 79388 - RNA, 21 nt, synthetic construct
  source 1..21: mol_type = other RNA
ccaggggctgggggatccagg

SEQ ID NO: 79389 - RNA, 21 nt, synthetic construct
  source 1..21: mol_type = other RNA
ccaggggggaaaaaaccataa

SEQ ID NO: 79390 - RNA, 21 nt, synthetic construct
  source 1..21: mol_type = other RNA
ccagggggtatggagacacta

SEQ ID NO: 79391 - RNA, 21 nt, synthetic construct
  source 1..21: mol_type = other RNA
ccagggggtcgagactgtaat

SEQ ID NO: 79392 - RNA, 21 nt, synthetic construct
  source 1..21: mol_type = other RNA
ccagggtctgtctcacctcaa

SEQ ID NO: 79393 - RNA, 21 nt, synthetic construct
  source 1..21: mol_type = other RNA
ccagggtgtagccacaagcca

SEQ ID NO: 79394 - RNA, 21 nt, synthetic construct
  source 1..21: mol_type = other RNA
ccaggtagaatgaaaattttt

SEQ ID NO: 79395 - RNA, 21 nt, synthetic construct
  source 1..21: mol_type = other RNA
ccaggtagggaggggtattca

SEQ ID NO: 79396 - RNA, 21 nt, synthetic construct
  source 1..21: mol_type = other RNA
ccaggtatggcgactcatgcc

SEQ ID NO: 79397 - RNA, 21 nt, synthetic construct
  source 1..21: mol_type = other RNA
ccaggtattttgttctctttg

SEQ ID NO: 79398 - RNA, 21 nt, synthetic construct
  source 1..21: mol_type = other RNA
ccaggtcagccagaggaagct

SEQ ID NO: 79399 - RNA, 21 nt, synthetic construct
  source 1..21: mol_type = other RNA
ccaggtcagtagtacagtgag

SEQ ID NO: 79400 - RNA, 21 nt, synthetic construct
  source 1..21: mol_type = other RNA
ccaggtcattacatattttgt

SEQ ID NO: 79401 - RNA, 21 nt, synthetic construct
  source 1..21: mol_type = other RNA
ccaggtggttctgcctaatct

SEQ ID NO: 79402 - RNA, 21 nt, synthetic construct
  source 1..21: mol_type = other RNA
ccaggtgtatgatcttattaa

SEQ ID NO: 79403 - RNA, 21 nt, synthetic construct
  source 1..21: mol_type = other RNA
ccaggtgtgagattgatagat

SEQ ID NO: 79404 - RNA, 21 nt, synthetic construct
  source 1..21: mol_type = other RNA
ccaggttcatccatgttgttg

SEQ ID NO: 79405 - RNA, 21 nt, synthetic construct
  source 1..21: mol_type = other RNA
ccaggtttacaggatatcaga

SEQ ID NO: 79406 - RNA, 21 nt, synthetic construct
  source 1..21: mol_type = other RNA
ccaggtttgtgcttggatatt

SEQ ID NO: 79407 - RNA, 21 nt, synthetic construct
  source 1..21: mol_type = other RNA
ccaggttttatctctctcaag

SEQ ID NO: 79408 - RNA, 21 nt, synthetic construct
  source 1..21: mol_type = other RNA
ccaggttttggtaatgggaaa

SEQ ID NO: 79409 - RNA, 21 nt, synthetic construct
  source 1..21: mol_type = other RNA
ccagtaagattctgtctctac

SEQ ID NO: 79410 - RNA, 21 nt, synthetic construct
  source 1..21: mol_type = other RNA
ccagtaatcttgctaaacatg

SEQ ID NO: 79411 - RNA, 21 nt, synthetic construct
  source 1..21: mol_type = other RNA
ccagtacatctcaattcagaa

SEQ ID NO: 79412 - RNA, 21 nt, synthetic construct
  source 1..21: mol_type = other RNA
ccagtactttttcatccaaac

SEQ ID NO: 79413 - RNA, 21 nt, synthetic construct
  source 1..21: mol_type = other RNA
ccagtagaaatcttccagaag

SEQ ID NO: 79414 - RNA, 21 nt, synthetic construct
  source 1..21: mol_type = other RNA
ccagtatacacgtatttatat

SEQ ID NO: 79415 - RNA, 21 nt, synthetic construct
  source 1..21: mol_type = other RNA
ccagtatattcatagtagctg

SEQ ID NO: 79416 - RNA, 21 nt, synthetic construct
  source 1..21: mol_type = other RNA
ccagtatctcctttccttcct

SEQ ID NO: 79417 - RNA, 21 nt, synthetic construct
  source 1..21: mol_type = other RNA
ccagtatgacctcctcccact

SEQ ID NO: 79418 - RNA, 21 nt, synthetic construct
  source 1..21: mol_type = other RNA
ccagtatgatgccactcaaaa

SEQ ID NO: 79419 - RNA, 21 nt, synthetic construct
  source 1..21: mol_type = other RNA
ccagtcactaaaaatcagatt

SEQ ID NO: 79420 - RNA, 21 nt, synthetic construct
  source 1..21: mol_type = other RNA
ccagtcagtgatggaggtgga

SEQ ID NO: 79421 - RNA, 21 nt, synthetic construct
  source 1..21: mol_type = other RNA
ccagtcatgtggggactttgt

SEQ ID NO: 79422 - RNA, 21 nt, synthetic construct
  source 1..21: mol_type = other RNA
ccagtccagcaccacccttga

SEQ ID NO: 79423 - RNA, 21 nt, synthetic construct
  source 1..21: mol_type = other RNA
ccagtcccactgacagtggac

SEQ ID NO: 79424 - RNA, 21 nt, synthetic construct
  source 1..21: mol_type = other RNA
ccagtccctagtgtctccata

SEQ ID NO: 79425 - RNA, 21 nt, synthetic construct
  source 1..21: mol_type = other RNA
ccagtcctgctaacaccttga

SEQ ID NO: 79426 - RNA, 21 nt, synthetic construct
  source 1..21: mol_type = other RNA
ccagtccttgtgatctatgca

SEQ ID NO: 79427 - RNA, 21 nt, synthetic construct
  source 1..21: mol_type = other RNA
ccagtcctttgggaggtcaag

SEQ ID NO: 79428 - RNA, 21 nt, synthetic construct
  source 1..21: mol_type = other RNA
ccagtcctttgtgtcaagtac

SEQ ID NO: 79429 - RNA, 21 nt, synthetic construct
  source 1..21: mol_type = other RNA
ccagtctctacccagcactct

SEQ ID NO: 79430 - RNA, 21 nt, synthetic construct
  source 1..21: mol_type = other RNA
ccagtctctgcaacatttgtt

SEQ ID NO: 79431 - RNA, 21 nt, synthetic construct
  source 1..21: mol_type = other RNA
ccagtcttcaggtctctctga

SEQ ID NO: 79432 - RNA, 21 nt, synthetic construct
  source 1..21: mol_type = other RNA
ccagtcttctcatacagattt

SEQ ID NO: 79433 - RNA, 21 nt, synthetic construct
  source 1..21: mol_type = other RNA
ccagtgaactccagtctgggc

SEQ ID NO: 79434 - RNA, 21 nt, synthetic construct
  source 1..21: mol_type = other RNA
ccagtgaagtcatctggtcct

SEQ ID NO: 79435 - RNA, 21 nt, synthetic construct
  source 1..21: mol_type = other RNA
ccagtgacacctgaggggtct

SEQ ID NO: 79436 - RNA, 21 nt, synthetic construct
  source 1..21: mol_type = other RNA
ccagtgaccagtgtgatgggg

SEQ ID NO: 79437 - RNA, 21 nt, synthetic construct
  source 1..21: mol_type = other RNA
ccagtgagtgatgaaaagagc

SEQ ID NO: 79438 - RNA, 21 nt, synthetic construct
  source 1..21: mol_type = other RNA
ccagtgagttcaaatgttaag

SEQ ID NO: 79439 - RNA, 21 nt, synthetic construct
  source 1..21: mol_type = other RNA
ccagtgattggatatttgcag

SEQ ID NO: 79440 - RNA, 21 nt, synthetic construct
  source 1..21: mol_type = other RNA
ccagtgcaaacctcctggttt

SEQ ID NO: 79441 - RNA, 21 nt, synthetic construct
  source 1..21: mol_type = other RNA
ccagtgcagcaagcagtaaat

SEQ ID NO: 79442 - RNA, 21 nt, synthetic construct
  source 1..21: mol_type = other RNA
ccagtgcccacctgacaagta

SEQ ID NO: 79443 - RNA, 21 nt, synthetic construct
  source 1..21: mol_type = other RNA
ccagtgctctcccccgaatcc

SEQ ID NO: 79444 - RNA, 21 nt, synthetic construct
  source 1..21: mol_type = other RNA
ccagtgcttgcagccttccct

SEQ ID NO: 79445 - RNA, 21 nt, synthetic construct
  source 1..21: mol_type = other RNA
ccagtggcccccctgaaaaat

SEQ ID NO: 79446 - RNA, 21 nt, synthetic construct
  source 1..21: mol_type = other RNA
ccagtggctagtgtgttgact

SEQ ID NO: 79447 - RNA, 21 nt, synthetic construct
  source 1..21: mol_type = other RNA
ccagtgggtcagctagtgtgt

SEQ ID NO: 79448 - RNA, 21 nt, synthetic construct
  source 1..21: mol_type = other RNA
ccagtggttgtggaattaact

SEQ ID NO: 79449 - RNA, 21 nt, synthetic construct
  source 1..21: mol_type = other RNA
ccagtgtcctgaatgatttcc

SEQ ID NO: 79450 - RNA, 21 nt, synthetic construct
  source 1..21: mol_type = other RNA
ccagtgtctgctacaggggca

SEQ ID NO: 79451 - RNA, 21 nt, synthetic construct
  source 1..21: mol_type = other RNA
ccagtgtgatgggggtaagat

SEQ ID NO: 79452 - RNA, 21 nt, synthetic construct
  source 1..21: mol_type = other RNA
ccagtgtgtttgtttgctaga

SEQ ID NO: 79453 - RNA, 21 nt, synthetic construct
  source 1..21: mol_type = other RNA
ccagtgtttggtttttatgga

SEQ ID NO: 79454 - RNA, 21 nt, synthetic construct
  source 1..21: mol_type = other RNA
ccagtgttttaaagcagggag

SEQ ID NO: 79455 - RNA, 21 nt, synthetic construct
  source 1..21: mol_type = other RNA
ccagtgttttaggggggaaaa

SEQ ID NO: 79456 - RNA, 21 nt, synthetic construct
  source 1..21: mol_type = other RNA
ccagttactctctctgcctcg

SEQ ID NO: 79457 - RNA, 21 nt, synthetic construct
  source 1..21: mol_type = other RNA
ccagttaggaagccactgcat

SEQ ID NO: 79458 - RNA, 21 nt, synthetic construct
  source 1..21: mol_type = other RNA
ccagttatcaccatgtgctta

SEQ ID NO: 79459 - RNA, 21 nt, synthetic construct
  source 1..21: mol_type = other RNA
ccagttatctctgccctcatt

SEQ ID NO: 79460 - RNA, 21 nt, synthetic construct
  source 1..21: mol_type = other RNA
ccagttcaaggtgttagcagg

SEQ ID NO: 79461 - RNA, 21 nt, synthetic construct
  source 1..21: mol_type = other RNA
ccagttcaccagtttctaatt

SEQ ID NO: 79462 - RNA, 21 nt, synthetic construct
  source 1..21: mol_type = other RNA
ccagttctgcgcaattgcagc

SEQ ID NO: 79463 - RNA, 21 nt, synthetic construct
  source 1..21: mol_type = other RNA
ccagttgagagagaattctaa

SEQ ID NO: 79464 - RNA, 21 nt, synthetic construct
  source 1..21: mol_type = other RNA
ccagttgtcagaattagaaag

SEQ ID NO: 79465 - RNA, 21 nt, synthetic construct
  source 1..21: mol_type = other RNA
ccagtttaaagctttgtgact

SEQ ID NO: 79466 - RNA, 21 nt, synthetic construct
  source 1..21: mol_type = other RNA
ccagtttatatgcctagatga

SEQ ID NO: 79467 - RNA, 21 nt, synthetic construct
  source 1..21: mol_type = other RNA
ccagtttctctgctttttctt

SEQ ID NO: 79468 - RNA, 21 nt, synthetic construct
  source 1..21: mol_type = other RNA
ccagtttgggtgacagagaga

SEQ ID NO: 79469 - RNA, 21 nt, synthetic construct
  source 1..21: mol_type = other RNA
ccagttttctggaaactcaaa

SEQ ID NO: 79470 - RNA, 21 nt, synthetic construct
  source 1..21: mol_type = other RNA
ccagttttgttgaatcttaac

SEQ ID NO: 79471 - RNA, 21 nt, synthetic construct
  source 1..21: mol_type = other RNA
ccataaaaaccaaacactgga

SEQ ID NO: 79472 - RNA, 21 nt, synthetic construct
  source 1..21: mol_type = other RNA
ccataaaaagcgttggagaca

SEQ ID NO: 79473 - RNA, 21 nt, synthetic construct
  source 1..21: mol_type = other RNA
ccataaaaccatttttcagaa

SEQ ID NO: 79474 - RNA, 21 nt, synthetic construct
  source 1..21: mol_type = other RNA
ccataaactgaacatttatac

SEQ ID NO: 79475 - RNA, 21 nt, synthetic construct
  source 1..21: mol_type = other RNA
ccataaagtcagaggagcagt

SEQ ID NO: 79476 - RNA, 21 nt, synthetic construct
  source 1..21: mol_type = other RNA
ccataaagtcttccattttag

SEQ ID NO: 79477 - RNA, 21 nt, synthetic construct
  source 1..21: mol_type = other RNA
ccataaatcaaggtacaatac

SEQ ID NO: 79478 - RNA, 21 nt, synthetic construct
  source 1..21: mol_type = other RNA
ccataagagtccccaactgca

SEQ ID NO: 79479 - RNA, 21 nt, synthetic construct
  source 1..21: mol_type = other RNA
ccataagatctgtctttggcc

SEQ ID NO: 79480 - RNA, 21 nt, synthetic construct
  source 1..21: mol_type = other RNA
ccataagtccctaacagtctc

SEQ ID NO: 79481 - RNA, 21 nt, synthetic construct
  source 1..21: mol_type = other RNA
ccataatccttagattacaaa

SEQ ID NO: 79482 - RNA, 21 nt, synthetic construct
  source 1..21: mol_type = other RNA
ccataatgagtaacatgtgga

SEQ ID NO: 79483 - RNA, 21 nt, synthetic construct
  source 1..21: mol_type = other RNA
ccatacaaggagacctactaa

SEQ ID NO: 79484 - RNA, 21 nt, synthetic construct
  source 1..21: mol_type = other RNA
ccatacagtgccttcagctat

SEQ ID NO: 79485 - RNA, 21 nt, synthetic construct
  source 1..21: mol_type = other RNA
ccataccacctgtcagaaaca

SEQ ID NO: 79486 - RNA, 21 nt, synthetic construct
  source 1..21: mol_type = other RNA
ccataccccctggaaataagt

SEQ ID NO: 79487 - RNA, 21 nt, synthetic construct
  source 1..21: mol_type = other RNA
ccatacctggtccttaaattt

SEQ ID NO: 79488 - RNA, 21 nt, synthetic construct
  source 1..21: mol_type = other RNA
ccatacgaaagcctttatttt

SEQ ID NO: 79489 - RNA, 21 nt, synthetic construct
  source 1..21: mol_type = other RNA
ccatactcagccccctcgaag

SEQ ID NO: 79490 - RNA, 21 nt, synthetic construct
  source 1..21: mol_type = other RNA
ccatacttttcaactgaacaa

SEQ ID NO: 79491 - RNA, 21 nt, synthetic construct
  source 1..21: mol_type = other RNA
ccatagagctttaaagttaat

SEQ ID NO: 79492 - RNA, 21 nt, synthetic construct
  source 1..21: mol_type = other RNA
ccatagagggagcatcttccc

SEQ ID NO: 79493 - RNA, 21 nt, synthetic construct
  source 1..21: mol_type = other RNA
ccatagctgaaggcactgtat

SEQ ID NO: 79494 - RNA, 21 nt, synthetic construct
  source 1..21: mol_type = other RNA
ccatagcttcctaagaaaggg

SEQ ID NO: 79495 - RNA, 21 nt, synthetic construct
  source 1..21: mol_type = other RNA
ccataggcacgcgcccccatg

SEQ ID NO: 79496 - RNA, 21 nt, synthetic construct
  source 1..21: mol_type = other RNA
ccatagtgtaaactaaaagta

SEQ ID NO: 79497 - RNA, 21 nt, synthetic construct
  source 1..21: mol_type = other RNA
ccatagttaatgtgtgaagaa

SEQ ID NO: 79498 - RNA, 21 nt, synthetic construct
  source 1..21: mol_type = other RNA
ccatataaggggaatcatgca

SEQ ID NO: 79499 - RNA, 21 nt, synthetic construct
  source 1..21: mol_type = other RNA
ccatataatctaaccctcctc

SEQ ID NO: 79500 - RNA, 21 nt, synthetic construct
  source 1..21: mol_type = other RNA
ccatatacacaaaaagatctg

SEQ ID NO: 79501 - RNA, 21 nt, synthetic construct
  source 1..21: mol_type = other RNA
ccatatccttttatgtgcagt

SEQ ID NO: 79502 - RNA, 21 nt, synthetic construct
  source 1..21: mol_type = other RNA
ccatatctacatgtacgccaa

SEQ ID NO: 79503 - RNA, 21 nt, synthetic construct
  source 1..21: mol_type = other RNA
ccatatctttgcttataacaa

SEQ ID NO: 79504 - RNA, 21 nt, synthetic construct
  source 1..21: mol_type = other RNA
ccatatggaggcaatgttgat

SEQ ID NO: 79505 - RNA, 21 nt, synthetic construct
  source 1..21: mol_type = other RNA
ccatatgggatgcttaaagcg

SEQ ID NO: 79506 - RNA, 21 nt, synthetic construct
  source 1..21: mol_type = other RNA
ccatatggttaatagtgaccc

SEQ ID NO: 79507 - RNA, 21 nt, synthetic construct
  source 1..21: mol_type = other RNA
ccatatggtttacaatggttc

SEQ ID NO: 79508 - RNA, 21 nt, synthetic construct
  source 1..21: mol_type = other RNA
ccatatgtagggcaccgtgac

SEQ ID NO: 79509 - RNA, 21 nt, synthetic construct
  source 1..21: mol_type = other RNA
ccatattagagtgaaaagaaa

SEQ ID NO: 79510 - RNA, 21 nt, synthetic construct
  source 1..21: mol_type = other RNA
ccatattggccaggctggttc

SEQ ID NO: 79511 - RNA, 21 nt, synthetic construct
  source 1..21: mol_type = other RNA
ccatcaacagcagaacaaact

SEQ ID NO: 79512 - RNA, 21 nt, synthetic construct
  source 1..21: mol_type = other RNA
ccatcaacctaatgaaattta

SEQ ID NO: 79513 - RNA, 21 nt, synthetic construct
  source 1..21: mol_type = other RNA
ccatcaagtgtgatcccaaaa

SEQ ID NO: 79514 - RNA, 21 nt, synthetic construct
  source 1..21: mol_type = other RNA
ccatcaatgatagactggatt

SEQ ID NO: 79515 - RNA, 21 nt, synthetic construct
  source 1..21: mol_type = other RNA
ccatcacacccagtatacacg

SEQ ID NO: 79516 - RNA, 21 nt, synthetic construct
  source 1..21: mol_type = other RNA
ccatcacactggtcactggcc

SEQ ID NO: 79517 - RNA, 21 nt, synthetic construct
  source 1..21: mol_type = other RNA
ccatcacattttgaatcatgg

SEQ ID NO: 79518 - RNA, 21 nt, synthetic construct
  source 1..21: mol_type = other RNA
ccatcactagaatgtgacttc

SEQ ID NO: 79519 - RNA, 21 nt, synthetic construct
  source 1..21: mol_type = other RNA
ccatcactgactggctgtgcc

SEQ ID NO: 79520 - RNA, 21 nt, synthetic construct
  source 1..21: mol_type = other RNA
ccatcagagaggctttttatt

SEQ ID NO: 79521 - RNA, 21 nt, synthetic construct
  source 1..21: mol_type = other RNA
ccatcagagtgaacaggcaac

SEQ ID NO: 79522 - RNA, 21 nt, synthetic construct
  source 1..21: mol_type = other RNA
ccatcaggaaaaccagtttag

SEQ ID NO: 79523 - RNA, 21 nt, synthetic construct
  source 1..21: mol_type = other RNA
ccatcagtggttgtgcttcga

SEQ ID NO: 79524 - RNA, 21 nt, synthetic construct
  source 1..21: mol_type = other RNA
ccatcatcatcaggctggctc

SEQ ID NO: 79525 - RNA, 21 nt, synthetic construct
  source 1..21: mol_type = other RNA
ccatcatgcctgggtaattaa

SEQ ID NO: 79526 - RNA, 21 nt, synthetic construct
  source 1..21: mol_type = other RNA
ccatcattttatgaaaccatt

SEQ ID NO: 79527 - RNA, 21 nt, synthetic construct
  source 1..21: mol_type = other RNA
ccatccacccacttgtcccat

SEQ ID NO: 79528 - RNA, 21 nt, synthetic construct
  source 1..21: mol_type = other RNA
ccatcccagctacataacttc

SEQ ID NO: 79529 - RNA, 21 nt, synthetic construct
  source 1..21: mol_type = other RNA
ccatccccgctgtccatttcc

SEQ ID NO: 79530 - RNA, 21 nt, synthetic construct
  source 1..21: mol_type = other RNA
ccatcccctttacccctgaga

SEQ ID NO: 79531 - RNA, 21 nt, synthetic construct
  source 1..21: mol_type = other RNA
ccatccgggagggaggtaggg

SEQ ID NO: 79532 - RNA, 21 nt, synthetic construct
  source 1..21: mol_type = other RNA
ccatcctatctaagcctactg

SEQ ID NO: 79533 - RNA, 21 nt, synthetic construct
  source 1..21: mol_type = other RNA
ccatcctccagccttaatctc

SEQ ID NO: 79534 - RNA, 21 nt, synthetic construct
  source 1..21: mol_type = other RNA
ccatcctctatttttgtctgg

SEQ ID NO: 79535 - RNA, 21 nt, synthetic construct
  source 1..21: mol_type = other RNA
ccatcctggatttgggaagga

SEQ ID NO: 79536 - RNA, 21 nt, synthetic construct
  source 1..21: mol_type = other RNA
ccatccttcccaaatccagga

SEQ ID NO: 79537 - RNA, 21 nt, synthetic construct
  source 1..21: mol_type = other RNA
ccatcctttccttgtcctaaa

SEQ ID NO: 79538 - RNA, 21 nt, synthetic construct
  source 1..21: mol_type = other RNA
ccatcgagagatgaatggata

SEQ ID NO: 79539 - RNA, 21 nt, synthetic construct
  source 1..21: mol_type = other RNA
ccatcgcgcccagcccgtgtg

SEQ ID NO: 79540 - RNA, 21 nt, synthetic construct
  source 1..21: mol_type = other RNA
ccatcggtctgtatttctgct

SEQ ID NO: 79541 - RNA, 21 nt, synthetic construct
  source 1..21: mol_type = other RNA
ccatcgttcacactcgcactc

SEQ ID NO: 79542 - RNA, 21 nt, synthetic construct
  source 1..21: mol_type = other RNA
ccatctaaagccaggctttcc

SEQ ID NO: 79543 - RNA, 21 nt, synthetic construct
  source 1..21: mol_type = other RNA
ccatctaacagaaatacaatg

SEQ ID NO: 79544 - RNA, 21 nt, synthetic construct
  source 1..21: mol_type = other RNA
ccatctaattcacatttaaga

SEQ ID NO: 79545 - RNA, 21 nt, synthetic construct
  source 1..21: mol_type = other RNA
ccatctcaagaaaacaagaat

SEQ ID NO: 79546 - RNA, 21 nt, synthetic construct
  source 1..21: mol_type = other RNA
ccatctcactcacctagctgt

SEQ ID NO: 79547 - RNA, 21 nt, synthetic construct
  source 1..21: mol_type = other RNA
ccatctcagcacagagccgaa

SEQ ID NO: 79548 - RNA, 21 nt, synthetic construct
  source 1..21: mol_type = other RNA
ccatctcccatcactagaatg

SEQ ID NO: 79549 - RNA, 21 nt, synthetic construct
  source 1..21: mol_type = other RNA
ccatctccttaatccagtcta

SEQ ID NO: 79550 - RNA, 21 nt, synthetic construct
  source 1..21: mol_type = other RNA
ccatctctaccaaaatataaa

SEQ ID NO: 79551 - RNA, 21 nt, synthetic construct
  source 1..21: mol_type = other RNA
ccatctctagttttccagtat

SEQ ID NO: 79552 - RNA, 21 nt, synthetic construct
  source 1..21: mol_type = other RNA
ccatctctccaacagaagaag

SEQ ID NO: 79553 - RNA, 21 nt, synthetic construct
  source 1..21: mol_type = other RNA
ccatctctctgcctcaaaatc

SEQ ID NO: 79554 - RNA, 21 nt, synthetic construct
  source 1..21: mol_type = other RNA
ccatctgaattcaagttacaa

SEQ ID NO: 79555 - RNA, 21 nt, synthetic construct
  source 1..21: mol_type = other RNA
ccatctgacatatgttttgct

SEQ ID NO: 79556 - RNA, 21 nt, synthetic construct
  source 1..21: mol_type = other RNA
ccatctgataagcccaacctg

SEQ ID NO: 79557 - RNA, 21 nt, synthetic construct
  source 1..21: mol_type = other RNA
ccatctggattatagtggtaa

SEQ ID NO: 79558 - RNA, 21 nt, synthetic construct
  source 1..21: mol_type = other RNA
ccatctgggatacttctaact

SEQ ID NO: 79559 - RNA, 21 nt, synthetic construct
  source 1..21: mol_type = other RNA
ccatctgttaaaagatacgaa

SEQ ID NO: 79560 - RNA, 21 nt, synthetic construct
  source 1..21: mol_type = other RNA
ccatctgttatagtgtgaaaa

SEQ ID NO: 79561 - RNA, 21 nt, synthetic construct
  source 1..21: mol_type = other RNA
ccatcttaggccataaatcaa

SEQ ID NO: 79562 - RNA, 21 nt, synthetic construct
  source 1..21: mol_type = other RNA
ccatcttcaagatttcatagg

SEQ ID NO: 79563 - RNA, 21 nt, synthetic construct
  source 1..21: mol_type = other RNA
ccatcttcacgtggcgctccc

SEQ ID NO: 79564 - RNA, 21 nt, synthetic construct
  source 1..21: mol_type = other RNA
ccatcttcatttctaagccat

SEQ ID NO: 79565 - RNA, 21 nt, synthetic construct
  source 1..21: mol_type = other RNA
ccatcttccatacgaaagcct

SEQ ID NO: 79566 - RNA, 21 nt, synthetic construct
  source 1..21: mol_type = other RNA
ccatcttcttagtgttccctt

SEQ ID NO: 79567 - RNA, 21 nt, synthetic construct
  source 1..21: mol_type = other RNA
ccatgaaaataaaaagtatcg

SEQ ID NO: 79568 - RNA, 21 nt, synthetic construct
  source 1..21: mol_type = other RNA
ccatgaaaattgaattatagg

SEQ ID NO: 79569 - RNA, 21 nt, synthetic construct
  source 1..21: mol_type = other RNA
ccatgaaacttatttccaggg

SEQ ID NO: 79570 - RNA, 21 nt, synthetic construct
  source 1..21: mol_type = other RNA
ccatgaacatggtttgatccc

SEQ ID NO: 79571 - RNA, 21 nt, synthetic construct
  source 1..21: mol_type = other RNA
ccatgaagaaaacactccaga

SEQ ID NO: 79572 - RNA, 21 nt, synthetic construct
  source 1..21: mol_type = other RNA
ccatgaagccagcattaccct

SEQ ID NO: 79573 - RNA, 21 nt, synthetic construct
  source 1..21: mol_type = other RNA
ccatgacagagttccacctcc

SEQ ID NO: 79574 - RNA, 21 nt, synthetic construct
  source 1..21: mol_type = other RNA
ccatgacatgtgttttattta

SEQ ID NO: 79575 - RNA, 21 nt, synthetic construct
  source 1..21: mol_type = other RNA
ccatgagattacatagcaagg

SEQ ID NO: 79576 - RNA, 21 nt, synthetic construct
  source 1..21: mol_type = other RNA
ccatgatctttggaaatgaat

SEQ ID NO: 79577 - RNA, 21 nt, synthetic construct
  source 1..21: mol_type = other RNA
ccatgatgcagcccctgccac

SEQ ID NO: 79578 - RNA, 21 nt, synthetic construct
  source 1..21: mol_type = other RNA
ccatgattcaaaatgtgatgg

SEQ ID NO: 79579 - RNA, 21 nt, synthetic construct
  source 1..21: mol_type = other RNA
ccatgcaggagaaacatggct

SEQ ID NO: 79580 - RNA, 21 nt, synthetic construct
  source 1..21: mol_type = other RNA
ccatgcaggttcatgtgtgct

SEQ ID NO: 79581 - RNA, 21 nt, synthetic construct
  source 1..21: mol_type = other RNA
ccatgcattcgtccctaaaca

SEQ ID NO: 79582 - RNA, 21 nt, synthetic construct
  source 1..21: mol_type = other RNA
ccatgcccatgtgcattattg

SEQ ID NO: 79583 - RNA, 21 nt, synthetic construct
  source 1..21: mol_type = other RNA
ccatggaaactacaattactg

SEQ ID NO: 79584 - RNA, 21 nt, synthetic construct
  source 1..21: mol_type = other RNA
ccatggaggggccagttgaga

SEQ ID NO: 79585 - RNA, 21 nt, synthetic construct
  source 1..21: mol_type = other RNA
ccatggcaggtttcaagtgaa

SEQ ID NO: 79586 - RNA, 21 nt, synthetic construct
  source 1..21: mol_type = other RNA
ccatggctcactgcggcctca

SEQ ID NO: 79587 - RNA, 21 nt, synthetic construct
  source 1..21: mol_type = other RNA
ccatgggacaagtgggtggat

SEQ ID NO: 79588 - RNA, 21 nt, synthetic construct
  source 1..21: mol_type = other RNA
ccatggtatgtgccatctcct

SEQ ID NO: 79589 - RNA, 21 nt, synthetic construct
  source 1..21: mol_type = other RNA
ccatggtcaaatcaatacttc

SEQ ID NO: 79590 - RNA, 21 nt, synthetic construct
  source 1..21: mol_type = other RNA
ccatggtgttaaatatttact

SEQ ID NO: 79591 - RNA, 21 nt, synthetic construct
  source 1..21: mol_type = other RNA
ccatgtaacaggtttaataaa

SEQ ID NO: 79592 - RNA, 21 nt, synthetic construct
  source 1..21: mol_type = other RNA
ccatgtcatgtatatgctgtt

SEQ ID NO: 79593 - RNA, 21 nt, synthetic construct
  source 1..21: mol_type = other RNA
ccatgtcctcacctcacattc

SEQ ID NO: 79594 - RNA, 21 nt, synthetic construct
  source 1..21: mol_type = other RNA
ccatgtctaaagtattgtttc

SEQ ID NO: 79595 - RNA, 21 nt, synthetic construct
  source 1..21: mol_type = other RNA
ccatgtcttggctattgtcag

SEQ ID NO: 79596 - RNA, 21 nt, synthetic construct
  source 1..21: mol_type = other RNA
ccatgtgcattattgtaatta

SEQ ID NO: 79597 - RNA, 21 nt, synthetic construct
  source 1..21: mol_type = other RNA
ccatgtgcttatcaataaaat

SEQ ID NO: 79598 - RNA, 21 nt, synthetic construct
  source 1..21: mol_type = other RNA
ccatgtgttggcactgaagcc

SEQ ID NO: 79599 - RNA, 21 nt, synthetic construct
  source 1..21: mol_type = other RNA
ccatgtgttttgttttgaata

SEQ ID NO: 79600 - RNA, 21 nt, synthetic construct
  source 1..21: mol_type = other RNA
ccatgttcactgcagaattac

SEQ ID NO: 79601 - RNA, 21 nt, synthetic construct
  source 1..21: mol_type = other RNA
ccatgttcatgggaagatgct

SEQ ID NO: 79602 - RNA, 21 nt, synthetic construct
  source 1..21: mol_type = other RNA
ccatgttgttcttttcaaaaa

SEQ ID NO: 79603 - RNA, 21 nt, synthetic construct
  source 1..21: mol_type = other RNA
ccatgttgttgaatgtggcag

SEQ ID NO: 79604 - RNA, 21 nt, synthetic construct
  source 1..21: mol_type = other RNA
ccatgtttccataaaaagcgt

SEQ ID NO: 79605 - RNA, 21 nt, synthetic construct
  source 1..21: mol_type = other RNA
ccatgtttctcctgcatgggg

SEQ ID NO: 79606 - RNA, 21 nt, synthetic construct
  source 1..21: mol_type = other RNA
ccatgttttaggagtcaacta

SEQ ID NO: 79607 - RNA, 21 nt, synthetic construct
  source 1..21: mol_type = other RNA
ccatgttttatttcttgacct

SEQ ID NO: 79608 - RNA, 21 nt, synthetic construct
  source 1..21: mol_type = other RNA
ccattaacagatgaatgaaca

SEQ ID NO: 79609 - RNA, 21 nt, synthetic construct
  source 1..21: mol_type = other RNA
ccattaacagctcagaagcta

SEQ ID NO: 79610 - RNA, 21 nt, synthetic construct
  source 1..21: mol_type = other RNA
ccattaccaaaacctggtatg

SEQ ID NO: 79611 - RNA, 21 nt, synthetic construct
  source 1..21: mol_type = other RNA
ccattactcggtatgtaccca

SEQ ID NO: 79612 - RNA, 21 nt, synthetic construct
  source 1..21: mol_type = other RNA
ccattactcgtggttatagcc

SEQ ID NO: 79613 - RNA, 21 nt, synthetic construct
  source 1..21: mol_type = other RNA
ccattactcttctactcactg

SEQ ID NO: 79614 - RNA, 21 nt, synthetic construct
  source 1..21: mol_type = other RNA
ccattagacactaactttcta

SEQ ID NO: 79615 - RNA, 21 nt, synthetic construct
  source 1..21: mol_type = other RNA
ccattagagtaagcaactgca

SEQ ID NO: 79616 - RNA, 21 nt, synthetic construct
  source 1..21: mol_type = other RNA
ccattagcagttctgtaccct

SEQ ID NO: 79617 - RNA, 21 nt, synthetic construct
  source 1..21: mol_type = other RNA
ccattaggatagctattattt

SEQ ID NO: 79618 - RNA, 21 nt, synthetic construct
  source 1..21: mol_type = other RNA
ccattataaaataggaagtcc

SEQ ID NO: 79619 - RNA, 21 nt, synthetic construct
  source 1..21: mol_type = other RNA
ccattatatgaataaaccacg

SEQ ID NO: 79620 - RNA, 21 nt, synthetic construct
  source 1..21: mol_type = other RNA
ccattattccataaaaaccaa

SEQ ID NO: 79621 - RNA, 21 nt, synthetic construct
  source 1..21: mol_type = other RNA
ccattcaatccttgtaacttt

SEQ ID NO: 79622 - RNA, 21 nt, synthetic construct
  source 1..21: mol_type = other RNA
ccattcaattgtcctggcaga

SEQ ID NO: 79623 - RNA, 21 nt, synthetic construct
  source 1..21: mol_type = other RNA
ccattcacacaccctttctta

SEQ ID NO: 79624 - RNA, 21 nt, synthetic construct
  source 1..21: mol_type = other RNA
ccattcactcagcataattgg

SEQ ID NO: 79625 - RNA, 21 nt, synthetic construct
  source 1..21: mol_type = other RNA
ccattcatctctcgatggaca

SEQ ID NO: 79626 - RNA, 21 nt, synthetic construct
  source 1..21: mol_type = other RNA
ccattcatgtaatgcaaactc

SEQ ID NO: 79627 - RNA, 21 nt, synthetic construct
  source 1..21: mol_type = other RNA
ccattccacgctgtggcttgg

SEQ ID NO: 79628 - RNA, 21 nt, synthetic construct
  source 1..21: mol_type = other RNA
ccattccagccattctcttct

SEQ ID NO: 79629 - RNA, 21 nt, synthetic construct
  source 1..21: mol_type = other RNA
ccattccaggttttatctctc

SEQ ID NO: 79630 - RNA, 21 nt, synthetic construct
  source 1..21: mol_type = other RNA
ccattccccttgccaaggctt

SEQ ID NO: 79631 - RNA, 21 nt, synthetic construct
  source 1..21: mol_type = other RNA
ccattccctgtctgtgatgta

SEQ ID NO: 79632 - RNA, 21 nt, synthetic construct
  source 1..21: mol_type = other RNA
ccattccttttcgagactgag

SEQ ID NO: 79633 - RNA, 21 nt, synthetic construct
  source 1..21: mol_type = other RNA
ccattctcccagttgtcagaa

SEQ ID NO: 79634 - RNA, 21 nt, synthetic construct
  source 1..21: mol_type = other RNA
ccattctcttctggatagcat

SEQ ID NO: 79635 - RNA, 21 nt, synthetic construct
  source 1..21: mol_type = other RNA
ccattctgctatgaaatgtgg

SEQ ID NO: 79636 - RNA, 21 nt, synthetic construct
  source 1..21: mol_type = other RNA
ccattgacaatataggagact

SEQ ID NO: 79637 - RNA, 21 nt, synthetic construct
  source 1..21: mol_type = other RNA
ccattgagccaaagaagaaat

SEQ ID NO: 79638 - RNA, 21 nt, synthetic construct
  source 1..21: mol_type = other RNA
ccattgcactccacgtgggtg

SEQ ID NO: 79639 - RNA, 21 nt, synthetic construct
  source 1..21: mol_type = other RNA
ccattgggtacataccgagta

SEQ ID NO: 79640 - RNA, 21 nt, synthetic construct
  source 1..21: mol_type = other RNA
ccattgtaaaccatatggtta

SEQ ID NO: 79641 - RNA, 21 nt, synthetic construct
  source 1..21: mol_type = other RNA
ccattgtgtggacacactgaa

SEQ ID NO: 79642 - RNA, 21 nt, synthetic construct
  source 1..21: mol_type = other RNA
ccattgttctctttgtttatc

SEQ ID NO: 79643 - RNA, 21 nt, synthetic construct
  source 1..21: mol_type = other RNA
ccatttaccccttaaattcca

SEQ ID NO: 79644 - RNA, 21 nt, synthetic construct
  source 1..21: mol_type = other RNA
ccatttatcagcaccaaagat

SEQ ID NO: 79645 - RNA, 21 nt, synthetic construct
  source 1..21: mol_type = other RNA
ccatttattcctctcttggaa

SEQ ID NO: 79646 - RNA, 21 nt, synthetic construct
  source 1..21: mol_type = other RNA
ccatttattgtcaaggtcatc

SEQ ID NO: 79647 - RNA, 21 nt, synthetic construct
  source 1..21: mol_type = other RNA
ccatttcaggttttcgaccaa

SEQ ID NO: 79648 - RNA, 21 nt, synthetic construct
  source 1..21: mol_type = other RNA
ccatttcatgccatcctggat

SEQ ID NO: 79649 - RNA, 21 nt, synthetic construct
  source 1..21: mol_type = other RNA
ccatttccagtactttttcat

SEQ ID NO: 79650 - RNA, 21 nt, synthetic construct
  source 1..21: mol_type = other RNA
ccatttccctgcttcatctgg

SEQ ID NO: 79651 - RNA, 21 nt, synthetic construct
  source 1..21: mol_type = other RNA
ccatttccttaagcacagact

SEQ ID NO: 79652 - RNA, 21 nt, synthetic construct
  source 1..21: mol_type = other RNA
ccatttgaccttccttgtgtc

SEQ ID NO: 79653 - RNA, 21 nt, synthetic construct
  source 1..21: mol_type = other RNA
ccatttgattgccagttttct

SEQ ID NO: 79654 - RNA, 21 nt, synthetic construct
  source 1..21: mol_type = other RNA
ccatttgatttcttctttggc

SEQ ID NO: 79655 - RNA, 21 nt, synthetic construct
  source 1..21: mol_type = other RNA
ccatttggcccagccatccca

SEQ ID NO: 79656 - RNA, 21 nt, synthetic construct
  source 1..21: mol_type = other RNA
ccatttgggactgagacagta

SEQ ID NO: 79657 - RNA, 21 nt, synthetic construct
  source 1..21: mol_type = other RNA
ccatttgtaacatgttagatt

SEQ ID NO: 79658 - RNA, 21 nt, synthetic construct
  source 1..21: mol_type = other RNA
ccatttgtggcatctttgtta

SEQ ID NO: 79659 - RNA, 21 nt, synthetic construct
  source 1..21: mol_type = other RNA
ccatttgttttgtgtttgtga

SEQ ID NO: 79660 - RNA, 21 nt, synthetic construct
  source 1..21: mol_type = other RNA
ccattttagatcaagtccttt

SEQ ID NO: 79661 - RNA, 21 nt, synthetic construct
  source 1..21: mol_type = other RNA
ccattttattaatttggcttg

SEQ ID NO: 79662 - RNA, 21 nt, synthetic construct
  source 1..21: mol_type = other RNA
ccattttcaatcttggaaatg

SEQ ID NO: 79663 - RNA, 21 nt, synthetic construct
  source 1..21: mol_type = other RNA
ccattttcgaattagattgtt

SEQ ID NO: 79664 - RNA, 21 nt, synthetic construct
  source 1..21: mol_type = other RNA
ccattttgccagctaactttt

SEQ ID NO: 79665 - RNA, 21 nt, synthetic construct
  source 1..21: mol_type = other RNA
ccattttggtcttaccctcta

SEQ ID NO: 79666 - RNA, 21 nt, synthetic construct
  source 1..21: mol_type = other RNA
ccatttttctcgacacacaat

SEQ ID NO: 79667 - RNA, 21 nt, synthetic construct
  source 1..21: mol_type = other RNA
ccatttttctgaccaactatt

SEQ ID NO: 79668 - RNA, 21 nt, synthetic construct
  source 1..21: mol_type = other RNA
ccattttttcaccagcggcat

SEQ ID NO: 79669 - RNA, 21 nt, synthetic construct
  source 1..21: mol_type = other RNA
cccaaaaacaaaagagtagat

SEQ ID NO: 79670 - RNA, 21 nt, synthetic construct
  source 1..21: mol_type = other RNA
cccaaaacttaggaggctatt

SEQ ID NO: 79671 - RNA, 21 nt, synthetic construct
  source 1..21: mol_type = other RNA
cccaaaattaccccattcact

SEQ ID NO: 79672 - RNA, 21 nt, synthetic construct
  source 1..21: mol_type = other RNA
cccaaaccatcaagtgtgatc

SEQ ID NO: 79673 - RNA, 21 nt, synthetic construct
  source 1..21: mol_type = other RNA
cccaaactggagtgcagtggt

SEQ ID NO: 79674 - RNA, 21 nt, synthetic construct
  source 1..21: mol_type = other RNA
cccaaagaaggaaaaaacacc

SEQ ID NO: 79675 - RNA, 21 nt, synthetic construct
  source 1..21: mol_type = other RNA
cccaaagacatcctgatttag

SEQ ID NO: 79676 - RNA, 21 nt, synthetic construct
  source 1..21: mol_type = other RNA
cccaaagactttgttttgttt

SEQ ID NO: 79677 - RNA, 21 nt, synthetic construct
  source 1..21: mol_type = other RNA
cccaaagatagactcttcaga

SEQ ID NO: 79678 - RNA, 21 nt, synthetic construct
  source 1..21: mol_type = other RNA
cccaaagatattagctacaaa

SEQ ID NO: 79679 - RNA, 21 nt, synthetic construct
  source 1..21: mol_type = other RNA
cccaaagcaaaagcaaaattc

SEQ ID NO: 79680 - RNA, 21 nt, synthetic construct
  source 1..21: mol_type = other RNA
cccaaaggactgggatcctaa

SEQ ID NO: 79681 - RNA, 21 nt, synthetic construct
  source 1..21: mol_type = other RNA
cccaaagtgagcagaaggagg

SEQ ID NO: 79682 - RNA, 21 nt, synthetic construct
  source 1..21: mol_type = other RNA
cccaaataacatgcatatgtt

SEQ ID NO: 79683 - RNA, 21 nt, synthetic construct
  source 1..21: mol_type = other RNA
cccaaatacctctgaatgtga

SEQ ID NO: 79684 - RNA, 21 nt, synthetic construct
  source 1..21: mol_type = other RNA
cccaaatccaggatggcatga

SEQ ID NO: 79685 - RNA, 21 nt, synthetic construct
  source 1..21: mol_type = other RNA
cccaaatgcaccaacacctgc

SEQ ID NO: 79686 - RNA, 21 nt, synthetic construct
  source 1..21: mol_type = other RNA
cccaaatgggagcatgcacac

SEQ ID NO: 79687 - RNA, 21 nt, synthetic construct
  source 1..21: mol_type = other RNA
cccaaatgtcttaagaaggaa

SEQ ID NO: 79688 - RNA, 21 nt, synthetic construct
  source 1..21: mol_type = other RNA
cccaaattaaaggatgtcaac

SEQ ID NO: 79689 - RNA, 21 nt, synthetic construct
  source 1..21: mol_type = other RNA
cccaaattggcatttaaaaga

SEQ ID NO: 79690 - RNA, 21 nt, synthetic construct
  source 1..21: mol_type = other RNA
cccaacaaacaattagcacct

SEQ ID NO: 79691 - RNA, 21 nt, synthetic construct
  source 1..21: mol_type = other RNA
cccaacaggctgagtgcggtg

SEQ ID NO: 79692 - RNA, 21 nt, synthetic construct
  source 1..21: mol_type = other RNA
cccaacagggttttgttttgt

SEQ ID NO: 79693 - RNA, 21 nt, synthetic construct
  source 1..21: mol_type = other RNA
cccaacatgagagaaaattgt

SEQ ID NO: 79694 - RNA, 21 nt, synthetic construct
  source 1..21: mol_type = other RNA
cccaacatgctcttaagtatt

SEQ ID NO: 79695 - RNA, 21 nt, synthetic construct
  source 1..21: mol_type = other RNA
cccaaccctacctagggtgta

SEQ ID NO: 79696 - RNA, 21 nt, synthetic construct
  source 1..21: mol_type = other RNA
cccaacctgattagaggctgc

SEQ ID NO: 79697 - RNA, 21 nt, synthetic construct
  source 1..21: mol_type = other RNA
cccaactctttctttgatttt

SEQ ID NO: 79698 - RNA, 21 nt, synthetic construct
  source 1..21: mol_type = other RNA
cccaactgcaaaactttcttc

SEQ ID NO: 79699 - RNA, 21 nt, synthetic construct
  source 1..21: mol_type = other RNA
cccaacttcacaccatttaga

SEQ ID NO: 79700 - RNA, 21 nt, synthetic construct
  source 1..21: mol_type = other RNA
cccaactttttctttttagta

SEQ ID NO: 79701 - RNA, 21 nt, synthetic construct
  source 1..21: mol_type = other RNA
cccaagaaagcaggtcatgac

SEQ ID NO: 79702 - RNA, 21 nt, synthetic construct
  source 1..21: mol_type = other RNA
cccaagaatttcatgcctttc

SEQ ID NO: 79703 - RNA, 21 nt, synthetic construct
  source 1..21: mol_type = other RNA
cccaagatcataagcttttat

SEQ ID NO: 79704 - RNA, 21 nt, synthetic construct
  source 1..21: mol_type = other RNA
cccaagcaagtgtggtggtct

SEQ ID NO: 79705 - RNA, 21 nt, synthetic construct
  source 1..21: mol_type = other RNA
cccaagcacactttccttgga

SEQ ID NO: 79706 - RNA, 21 nt, synthetic construct
  source 1..21: mol_type = other RNA
cccaagccaaattaataaaat

SEQ ID NO: 79707 - RNA, 21 nt, synthetic construct
  source 1..21: mol_type = other RNA
cccaagccacagcgtggaatg

SEQ ID NO: 79708 - RNA, 21 nt, synthetic construct
  source 1..21: mol_type = other RNA
cccaagctaccatttattcct

SEQ ID NO: 79709 - RNA, 21 nt, synthetic construct
  source 1..21: mol_type = other RNA
cccaagcttaggtcagattcc

SEQ ID NO: 79710 - RNA, 21 nt, synthetic construct
  source 1..21: mol_type = other RNA
cccaaggaaggcagggtagga

SEQ ID NO: 79711 - RNA, 21 nt, synthetic construct
  source 1..21: mol_type = other RNA
cccaagggttttggtatgttg

SEQ ID NO: 79712 - RNA, 21 nt, synthetic construct
  source 1..21: mol_type = other RNA
cccaaggttgcctgttcactc

SEQ ID NO: 79713 - RNA, 21 nt, synthetic construct
  source 1..21: mol_type = other RNA
cccaagtaaacaactgactct

SEQ ID NO: 79714 - RNA, 21 nt, synthetic construct
  source 1..21: mol_type = other RNA
cccaagtaaacctcaagtctt

SEQ ID NO: 79715 - RNA, 21 nt, synthetic construct
  source 1..21: mol_type = other RNA
cccaagtagctgggatcacag

SEQ ID NO: 79716 - RNA, 21 nt, synthetic construct
  source 1..21: mol_type = other RNA
cccaagtgcccattaacagat

SEQ ID NO: 79717 - RNA, 21 nt, synthetic construct
  source 1..21: mol_type = other RNA
cccaagtgctgtgattgcagg

SEQ ID NO: 79718 - RNA, 21 nt, synthetic construct
  source 1..21: mol_type = other RNA
cccaagtggagcctgctctgc

SEQ ID NO: 79719 - RNA, 21 nt, synthetic construct
  source 1..21: mol_type = other RNA
cccaatcaaatccagtcttca

SEQ ID NO: 79720 - RNA, 21 nt, synthetic construct
  source 1..21: mol_type = other RNA
cccaatcatgttctttatagc

SEQ ID NO: 79721 - RNA, 21 nt, synthetic construct
  source 1..21: mol_type = other RNA
cccaatcctttgtgcaggtct

SEQ ID NO: 79722 - RNA, 21 nt, synthetic construct
  source 1..21: mol_type = other RNA
cccaatctacaggtcggaagg

SEQ ID NO: 79723 - RNA, 21 nt, synthetic construct
  source 1..21: mol_type = other RNA
cccaatctctggtattctgaa

SEQ ID NO: 79724 - RNA, 21 nt, synthetic construct
  source 1..21: mol_type = other RNA
cccaatgcctgcgattgcagg

SEQ ID NO: 79725 - RNA, 21 nt, synthetic construct
  source 1..21: mol_type = other RNA
cccaatgcttgaagagcgctt

SEQ ID NO: 79726 - RNA, 21 nt, synthetic construct
  source 1..21: mol_type = other RNA
cccaattaaactatagaccca

SEQ ID NO: 79727 - RNA, 21 nt, synthetic construct
  source 1..21: mol_type = other RNA
cccaattacttccagtgtttt

SEQ ID NO: 79728 - RNA, 21 nt, synthetic construct
  source 1..21: mol_type = other RNA
cccacaaaagaaaattttctg

SEQ ID NO: 79729 - RNA, 21 nt, synthetic construct
  source 1..21: mol_type = other RNA
cccacaaaatatgaagcatta

SEQ ID NO: 79730 - RNA, 21 nt, synthetic construct
  source 1..21: mol_type = other RNA
cccacaagaaaaacctaaacc

SEQ ID NO: 79731 - RNA, 21 nt, synthetic construct
  source 1..21: mol_type = other RNA
cccacaagtagcagggactac

SEQ ID NO: 79732 - RNA, 21 nt, synthetic construct
  source 1..21: mol_type = other RNA
cccacacctgcaatcacagca

SEQ ID NO: 79733 - RNA, 21 nt, synthetic construct
  source 1..21: mol_type = other RNA
cccacagataatttcttcaga

SEQ ID NO: 79734 - RNA, 21 nt, synthetic construct
  source 1..21: mol_type = other RNA
cccacataggatagttaaaca

SEQ ID NO: 79735 - RNA, 21 nt, synthetic construct
  source 1..21: mol_type = other RNA
cccacatgactggccatcctt

SEQ ID NO: 79736 - RNA, 21 nt, synthetic construct
  source 1..21: mol_type = other RNA
cccaccagcataagacccctc

SEQ ID NO: 79737 - RNA, 21 nt, synthetic construct
  source 1..21: mol_type = other RNA
cccaccaggaggcggagcttg

SEQ ID NO: 79738 - RNA, 21 nt, synthetic construct
  source 1..21: mol_type = other RNA
cccaccatctctctgcctcaa

SEQ ID NO: 79739 - RNA, 21 nt, synthetic construct
  source 1..21: mol_type = other RNA
cccaccatgatgcagcccctg

SEQ ID NO: 79740 - RNA, 21 nt, synthetic construct
  source 1..21: mol_type = other RNA
cccacccctgctctgcacgta

SEQ ID NO: 79741 - RNA, 21 nt, synthetic construct
  source 1..21: mol_type = other RNA
cccaccctgctccagtatgac

SEQ ID NO: 79742 - RNA, 21 nt, synthetic construct
  source 1..21: mol_type = other RNA
cccaccgccttcctaccctgc

SEQ ID NO: 79743 - RNA, 21 nt, synthetic construct
  source 1..21: mol_type = other RNA
cccacctcagccccacaagta

SEQ ID NO: 79744 - RNA, 21 nt, synthetic construct
  source 1..21: mol_type = other RNA
cccacctgacaagtagtacaa

SEQ ID NO: 79745 - RNA, 21 nt, synthetic construct
  source 1..21: mol_type = other RNA
cccacctttcctgcccctcca

SEQ ID NO: 79746 - RNA, 21 nt, synthetic construct
  source 1..21: mol_type = other RNA
cccacgtggagtgcaatgggg

SEQ ID NO: 79747 - RNA, 21 nt, synthetic construct
  source 1..21: mol_type = other RNA
cccactagtgaagtcccatct

SEQ ID NO: 79748 - RNA, 21 nt, synthetic construct
  source 1..21: mol_type = other RNA
cccactagtggaagaatcagg

SEQ ID NO: 79749 - RNA, 21 nt, synthetic construct
  source 1..21: mol_type = other RNA
cccactattgaaagcccttga

SEQ ID NO: 79750 - RNA, 21 nt, synthetic construct
  source 1..21: mol_type = other RNA
cccactccacacacgaagtag

SEQ ID NO: 79751 - RNA, 21 nt, synthetic construct
  source 1..21: mol_type = other RNA
cccactctccccaagtaaacc

SEQ ID NO: 79752 - RNA, 21 nt, synthetic construct
  source 1..21: mol_type = other RNA
cccactcttatatcctaaaca

SEQ ID NO: 79753 - RNA, 21 nt, synthetic construct
  source 1..21: mol_type = other RNA
cccactgacagtggacaaagg

SEQ ID NO: 79754 - RNA, 21 nt, synthetic construct
  source 1..21: mol_type = other RNA
cccactgagcatttatataag

SEQ ID NO: 79755 - RNA, 21 nt, synthetic construct
  source 1..21: mol_type = other RNA
cccactgctatgactaatttg

SEQ ID NO: 79756 - RNA, 21 nt, synthetic construct
  source 1..21: mol_type = other RNA
cccactggtttcagtccctcc

SEQ ID NO: 79757 - RNA, 21 nt, synthetic construct
  source 1..21: mol_type = other RNA
cccacttacatcagcagtgac

SEQ ID NO: 79758 - RNA, 21 nt, synthetic construct
  source 1..21: mol_type = other RNA
cccacttcgaaagttcagata

SEQ ID NO: 79759 - RNA, 21 nt, synthetic construct
  source 1..21: mol_type = other RNA
cccacttgatccaggtgtatg

SEQ ID NO: 79760 - RNA, 21 nt, synthetic construct
  source 1..21: mol_type = other RNA
cccacttgtcccatggtcaaa

SEQ ID NO: 79761 - RNA, 21 nt, synthetic construct
  source 1..21: mol_type = other RNA
cccagaaagagagagggggga

SEQ ID NO: 79762 - RNA, 21 nt, synthetic construct
  source 1..21: mol_type = other RNA
cccagaaataaatcctcacat

SEQ ID NO: 79763 - RNA, 21 nt, synthetic construct
  source 1..21: mol_type = other RNA
cccagaactcgaagccttccc

SEQ ID NO: 79764 - RNA, 21 nt, synthetic construct
  source 1..21: mol_type = other RNA
cccagaaggttaactaatagc

SEQ ID NO: 79765 - RNA, 21 nt, synthetic construct
  source 1..21: mol_type = other RNA
cccagaataggcaaattcata

SEQ ID NO: 79766 - RNA, 21 nt, synthetic construct
  source 1..21: mol_type = other RNA
cccagacagatatatgcattc

SEQ ID NO: 79767 - RNA, 21 nt, synthetic construct
  source 1..21: mol_type = other RNA
cccagacagggaatgcccctg

SEQ ID NO: 79768 - RNA, 21 nt, synthetic construct
  source 1..21: mol_type = other RNA
cccagaccaagtttaaccaat

SEQ ID NO: 79769 - RNA, 21 nt, synthetic construct
  source 1..21: mol_type = other RNA
cccagacctgcacaaaggatt

SEQ ID NO: 79770 - RNA, 21 nt, synthetic construct
  source 1..21: mol_type = other RNA
cccagactggagttcactggc

SEQ ID NO: 79771 - RNA, 21 nt, synthetic construct
  source 1..21: mol_type = other RNA
cccagagaggctaggtgacct

SEQ ID NO: 79772 - RNA, 21 nt, synthetic construct
  source 1..21: mol_type = other RNA
cccagagatcccaccattgca

SEQ ID NO: 79773 - RNA, 21 nt, synthetic construct
  source 1..21: mol_type = other RNA
cccagagattgtcgttgagta

SEQ ID NO: 79774 - RNA, 21 nt, synthetic construct
  source 1..21: mol_type = other RNA
cccagagcctaatgtgtaaga

SEQ ID NO: 79775 - RNA, 21 nt, synthetic construct
  source 1..21: mol_type = other RNA
cccagagcgggtttcctcggt

SEQ ID NO: 79776 - RNA, 21 nt, synthetic construct
  source 1..21: mol_type = other RNA
cccagaggtactcaacgacaa

SEQ ID NO: 79777 - RNA, 21 nt, synthetic construct
  source 1..21: mol_type = other RNA
cccagataacagtggttagga

SEQ ID NO: 79778 - RNA, 21 nt, synthetic construct
  source 1..21: mol_type = other RNA
cccagatacgttaaaggaaaa

SEQ ID NO: 79779 - RNA, 21 nt, synthetic construct
  source 1..21: mol_type = other RNA
cccagatctaacaaacgcatt

SEQ ID NO: 79780 - RNA, 21 nt, synthetic construct
  source 1..21: mol_type = other RNA
cccagatggggattgagggtt

SEQ ID NO: 79781 - RNA, 21 nt, synthetic construct
  source 1..21: mol_type = other RNA
cccagattccttttttatgtg

SEQ ID NO: 79782 - RNA, 21 nt, synthetic construct
  source 1..21: mol_type = other RNA
cccagcactctgaatcacctc

SEQ ID NO: 79783 - RNA, 21 nt, synthetic construct
  source 1..21: mol_type = other RNA
cccagcacttccattttgctt

SEQ ID NO: 79784 - RNA, 21 nt, synthetic construct
  source 1..21: mol_type = other RNA
cccagcagaaggtgagggact

SEQ ID NO: 79785 - RNA, 21 nt, synthetic construct
  source 1..21: mol_type = other RNA
cccagcagccccgacgccttt

SEQ ID NO: 79786 - RNA, 21 nt, synthetic construct
  source 1..21: mol_type = other RNA
cccagcatccactaggggact

SEQ ID NO: 79787 - RNA, 21 nt, synthetic construct
  source 1..21: mol_type = other RNA
cccagcatgaagccctctaag

SEQ ID NO: 79788 - RNA, 21 nt, synthetic construct
  source 1..21: mol_type = other RNA
cccagccaaacagtttttaca

SEQ ID NO: 79789 - RNA, 21 nt, synthetic construct
  source 1..21: mol_type = other RNA
cccagcccctggtgatctatg

SEQ ID NO: 79790 - RNA, 21 nt, synthetic construct
  source 1..21: mol_type = other RNA
cccagcccgtgtgtttagaat

SEQ ID NO: 79791 - RNA, 21 nt, synthetic construct
  source 1..21: mol_type = other RNA
cccagcctcaaacaatcctcc

SEQ ID NO: 79792 - RNA, 21 nt, synthetic construct
  source 1..21: mol_type = other RNA
cccagcctcaacagcactttt

SEQ ID NO: 79793 - RNA, 21 nt, synthetic construct
  source 1..21: mol_type = other RNA
cccagcctcagcctcccaagg

SEQ ID NO: 79794 - RNA, 21 nt, synthetic construct
  source 1..21: mol_type = other RNA
cccagctaaaatgttcagata

SEQ ID NO: 79795 - RNA, 21 nt, synthetic construct
  source 1..21: mol_type = other RNA
cccagctacataacttcccag

SEQ ID NO: 79796 - RNA, 21 nt, synthetic construct
  source 1..21: mol_type = other RNA
cccagctcgaccaggggaagg

SEQ ID NO: 79797 - RNA, 21 nt, synthetic construct
  source 1..21: mol_type = other RNA
cccagctcttttgtgtctttt

SEQ ID NO: 79798 - RNA, 21 nt, synthetic construct
  source 1..21: mol_type = other RNA
cccagctgtccaacaagggtt

SEQ ID NO: 79799 - RNA, 21 nt, synthetic construct
  source 1..21: mol_type = other RNA
cccagcttccgggacttggaa

SEQ ID NO: 79800 - RNA, 21 nt, synthetic construct
  source 1..21: mol_type = other RNA
cccaggaacagattcacgcac

SEQ ID NO: 79801 - RNA, 21 nt, synthetic construct
  source 1..21: mol_type = other RNA
cccaggagctagaacagaata

SEQ ID NO: 79802 - RNA, 21 nt, synthetic construct
  source 1..21: mol_type = other RNA
cccaggaggcaaaggttgaga

SEQ ID NO: 79803 - RNA, 21 nt, synthetic construct
  source 1..21: mol_type = other RNA
cccaggaggttgaagctctag

SEQ ID NO: 79804 - RNA, 21 nt, synthetic construct
  source 1..21: mol_type = other RNA
cccaggagttgcatcacttga

SEQ ID NO: 79805 - RNA, 21 nt, synthetic construct
  source 1..21: mol_type = other RNA
cccaggcatgatggctcaacg

SEQ ID NO: 79806 - RNA, 21 nt, synthetic construct
  source 1..21: mol_type = other RNA
cccaggcggaatgcagtggcg

SEQ ID NO: 79807 - RNA, 21 nt, synthetic construct
  source 1..21: mol_type = other RNA
cccaggcggcagagggagcag

SEQ ID NO: 79808 - RNA, 21 nt, synthetic construct
  source 1..21: mol_type = other RNA
cccaggctgacttagagggct

SEQ ID NO: 79809 - RNA, 21 nt, synthetic construct
  source 1..21: mol_type = other RNA
cccaggctggtcttgtactcc

SEQ ID NO: 79810 - RNA, 21 nt, synthetic construct
  source 1..21: mol_type = other RNA
cccagggaaaccttactgtaa

SEQ ID NO: 79811 - RNA, 21 nt, synthetic construct
  source 1..21: mol_type = other RNA
cccagggataaatcccacttg

SEQ ID NO: 79812 - RNA, 21 nt, synthetic construct
  source 1..21: mol_type = other RNA
cccagggatattttcgtgtac

SEQ ID NO: 79813 - RNA, 21 nt, synthetic construct
  source 1..21: mol_type = other RNA
cccaggggacatagatgaaac

SEQ ID NO: 79814 - RNA, 21 nt, synthetic construct
  source 1..21: mol_type = other RNA
cccagggggtcgagactgtaa

SEQ ID NO: 79815 - RNA, 21 nt, synthetic construct
  source 1..21: mol_type = other RNA
cccagggtgtagccacaagcc

SEQ ID NO: 79816 - RNA, 21 nt, synthetic construct
  source 1..21: mol_type = other RNA
cccaggtattttgttctcttt

SEQ ID NO: 79817 - RNA, 21 nt, synthetic construct
  source 1..21: mol_type = other RNA
cccaggtcagtagtacagtga

SEQ ID NO: 79818 - RNA, 21 nt, synthetic construct
  source 1..21: mol_type = other RNA
cccaggtggttctgcctaatc

SEQ ID NO: 79819 - RNA, 21 nt, synthetic construct
  source 1..21: mol_type = other RNA
cccaggtgtgagattgataga

SEQ ID NO: 79820 - RNA, 21 nt, synthetic construct
  source 1..21: mol_type = other RNA
cccagtagaaatcttccagaa

SEQ ID NO: 79821 - RNA, 21 nt, synthetic construct
  source 1..21: mol_type = other RNA
cccagtatacacgtatttata

SEQ ID NO: 79822 - RNA, 21 nt, synthetic construct
  source 1..21: mol_type = other RNA
cccagtcctttgggaggtcaa

SEQ ID NO: 79823 - RNA, 21 nt, synthetic construct
  source 1..21: mol_type = other RNA
cccagtgcccacctgacaagt

SEQ ID NO: 79824 - RNA, 21 nt, synthetic construct
  source 1..21: mol_type = other RNA
cccagtggctagtgtgttgac

SEQ ID NO: 79825 - RNA, 21 nt, synthetic construct
  source 1..21: mol_type = other RNA
cccagtggttgtggaattaac

SEQ ID NO: 79826 - RNA, 21 nt, synthetic construct
  source 1..21: mol_type = other RNA
cccagtgtctgctacaggggc

SEQ ID NO: 79827 - RNA, 21 nt, synthetic construct
  source 1..21: mol_type = other RNA
cccagtgtgtttgtttgctag

SEQ ID NO: 79828 - RNA, 21 nt, synthetic construct
  source 1..21: mol_type = other RNA
cccagttatctctgccctcat

SEQ ID NO: 79829 - RNA, 21 nt, synthetic construct
  source 1..21: mol_type = other RNA
cccagttcaaggtgttagcag

SEQ ID NO: 79830 - RNA, 21 nt, synthetic construct
  source 1..21: mol_type = other RNA
cccagttcaccagtttctaat

SEQ ID NO: 79831 - RNA, 21 nt, synthetic construct
  source 1..21: mol_type = other RNA
cccagttctgcgcaattgcag

SEQ ID NO: 79832 - RNA, 21 nt, synthetic construct
  source 1..21: mol_type = other RNA
cccagttgtcagaattagaaa

SEQ ID NO: 79833 - RNA, 21 nt, synthetic construct
  source 1..21: mol_type = other RNA
cccagttttgttgaatcttaa

SEQ ID NO: 79834 - RNA, 21 nt, synthetic construct
  source 1..21: mol_type = other RNA
cccataaactgaacatttata

SEQ ID NO: 79835 - RNA, 21 nt, synthetic construct
  source 1..21: mol_type = other RNA
cccataccacctgtcagaaac

SEQ ID NO: 79836 - RNA, 21 nt, synthetic construct
  source 1..21: mol_type = other RNA
cccatactcagccccctcgaa

SEQ ID NO: 79837 - RNA, 21 nt, synthetic construct
  source 1..21: mol_type = other RNA
cccatataaggggaatcatgc

SEQ ID NO: 79838 - RNA, 21 nt, synthetic construct
  source 1..21: mol_type = other RNA
cccatatccttttatgtgcag

SEQ ID NO: 79839 - RNA, 21 nt, synthetic construct
  source 1..21: mol_type = other RNA
cccatatctacatgtacgcca

SEQ ID NO: 79840 - RNA, 21 nt, synthetic construct
  source 1..21: mol_type = other RNA
cccatatctttgcttataaca

SEQ ID NO: 79841 - RNA, 21 nt, synthetic construct
  source 1..21: mol_type = other RNA
cccatatggaggcaatgttga

SEQ ID NO: 79842 - RNA, 21 nt, synthetic construct
  source 1..21: mol_type = other RNA
cccatcacactggtcactggc

SEQ ID NO: 79843 - RNA, 21 nt, synthetic construct
  source 1..21: mol_type = other RNA
cccatcactagaatgtgactt

SEQ ID NO: 79844 - RNA, 21 nt, synthetic construct
  source 1..21: mol_type = other RNA
cccatccacccacttgtccca

SEQ ID NO: 79845 - RNA, 21 nt, synthetic construct
  source 1..21: mol_type = other RNA
cccatcccctttacccctgag

SEQ ID NO: 79846 - RNA, 21 nt, synthetic construct
  source 1..21: mol_type = other RNA
cccatcctatctaagcctact

SEQ ID NO: 79847 - RNA, 21 nt, synthetic construct
  source 1..21: mol_type = other RNA
cccatcctctatttttgtctg

SEQ ID NO: 79848 - RNA, 21 nt, synthetic construct
  source 1..21: mol_type = other RNA
cccatctcactcacctagctg

SEQ ID NO: 79849 - RNA, 21 nt, synthetic construct
  source 1..21: mol_type = other RNA
cccatctctaccaaaatataa

SEQ ID NO: 79850 - RNA, 21 nt, synthetic construct
  source 1..21: mol_type = other RNA
cccatctctagttttccagta

SEQ ID NO: 79851 - RNA, 21 nt, synthetic construct
  source 1..21: mol_type = other RNA
cccatctgggatacttctaac

SEQ ID NO: 79852 - RNA, 21 nt, synthetic construct
  source 1..21: mol_type = other RNA
cccatcttccatacgaaagcc

SEQ ID NO: 79853 - RNA, 21 nt, synthetic construct
  source 1..21: mol_type = other RNA
cccatgaaaattgaattatag

SEQ ID NO: 79854 - RNA, 21 nt, synthetic construct
  source 1..21: mol_type = other RNA
cccatgaacatggtttgatcc

SEQ ID NO: 79855 - RNA, 21 nt, synthetic construct
  source 1..21: mol_type = other RNA
cccatgaagccagcattaccc

SEQ ID NO: 79856 - RNA, 21 nt, synthetic construct
  source 1..21: mol_type = other RNA
cccatgacatgtgttttattt

SEQ ID NO: 79857 - RNA, 21 nt, synthetic construct
  source 1..21: mol_type = other RNA
cccatgatctttggaaatgaa

SEQ ID NO: 79858 - RNA, 21 nt, synthetic construct
  source 1..21: mol_type = other RNA
cccatgattcaaaatgtgatg

SEQ ID NO: 79859 - RNA, 21 nt, synthetic construct
  source 1..21: mol_type = other RNA
cccatgcaggagaaacatggc

SEQ ID NO: 79860 - RNA, 21 nt, synthetic construct
  source 1..21: mol_type = other RNA
cccatgcattcgtccctaaac

SEQ ID NO: 79861 - RNA, 21 nt, synthetic construct
  source 1..21: mol_type = other RNA
cccatgcccatgtgcattatt

SEQ ID NO: 79862 - RNA, 21 nt, synthetic construct
  source 1..21: mol_type = other RNA
cccatggtcaaatcaatactt

SEQ ID NO: 79863 - RNA, 21 nt, synthetic construct
  source 1..21: mol_type = other RNA
cccatgtctaaagtattgttt

SEQ ID NO: 79864 - RNA, 21 nt, synthetic construct
  source 1..21: mol_type = other RNA
cccatgtgcattattgtaatt

SEQ ID NO: 79865 - RNA, 21 nt, synthetic construct
  source 1..21: mol_type = other RNA
cccatgtgttggcactgaagc

SEQ ID NO: 79866 - RNA, 21 nt, synthetic construct
  source 1..21: mol_type = other RNA
cccatgttcactgcagaatta

SEQ ID NO: 79867 - RNA, 21 nt, synthetic construct
  source 1..21: mol_type = other RNA
cccattaaaaccatgaaaata

SEQ ID NO: 79868 - RNA, 21 nt, synthetic construct
  source 1..21: mol_type = other RNA
cccattaacagatgaatgaac

SEQ ID NO: 79869 - RNA, 21 nt, synthetic construct
  source 1..21: mol_type = other RNA
cccattaccaaaacctggtat

SEQ ID NO: 79870 - RNA, 21 nt, synthetic construct
  source 1..21: mol_type = other RNA
cccattactcggtatgtaccc

SEQ ID NO: 79871 - RNA, 21 nt, synthetic construct
  source 1..21: mol_type = other RNA
cccattagacactaactttct

SEQ ID NO: 79872 - RNA, 21 nt, synthetic construct
  source 1..21: mol_type = other RNA
cccattagagtaagcaactgc

SEQ ID NO: 79873 - RNA, 21 nt, synthetic construct
  source 1..21: mol_type = other RNA
cccattaggatagctattatt

SEQ ID NO: 79874 - RNA, 21 nt, synthetic construct
  source 1..21: mol_type = other RNA
cccattataaaataggaagtc

SEQ ID NO: 79875 - RNA, 21 nt, synthetic construct
  source 1..21: mol_type = other RNA
cccattcaattgtcctggcag

SEQ ID NO: 79876 - RNA, 21 nt, synthetic construct
  source 1..21: mol_type = other RNA
cccattcactcagcataattg

SEQ ID NO: 79877 - RNA, 21 nt, synthetic construct
  source 1..21: mol_type = other RNA
cccattccaggttttatctct

SEQ ID NO: 79878 - RNA, 21 nt, synthetic construct
  source 1..21: mol_type = other RNA
cccattccctgtctgtgatgt

SEQ ID NO: 79879 - RNA, 21 nt, synthetic construct
  source 1..21: mol_type = other RNA
cccattgacaatataggagac

SEQ ID NO: 79880 - RNA, 21 nt, synthetic construct
  source 1..21: mol_type = other RNA
cccattgcactccacgtgggt

SEQ ID NO: 79881 - RNA, 21 nt, synthetic construct
  source 1..21: mol_type = other RNA
cccattgtacacatattaaat

SEQ ID NO: 79882 - RNA, 21 nt, synthetic construct
  source 1..21: mol_type = other RNA
cccatttcatgccatcctgga

SEQ ID NO: 79883 - RNA, 21 nt, synthetic construct
  source 1..21: mol_type = other RNA
cccatttcttctaggttatcc

SEQ ID NO: 79884 - RNA, 21 nt, synthetic construct
  source 1..21: mol_type = other RNA
cccatttgatttcttctttgg

SEQ ID NO: 79885 - RNA, 21 nt, synthetic construct
  source 1..21: mol_type = other RNA
cccatttgggactgagacagt

SEQ ID NO: 79886 - RNA, 21 nt, synthetic construct
  source 1..21: mol_type = other RNA
cccatttgtaacatgttagat

SEQ ID NO: 79887 - RNA, 21 nt, synthetic construct
  source 1..21: mol_type = other RNA
cccattttcgaattagattgt

SEQ ID NO: 79888 - RNA, 21 nt, synthetic construct
  source 1..21: mol_type = other RNA
cccatttttctcgacacacaa

SEQ ID NO: 79889 - RNA, 21 nt, synthetic construct
  source 1..21: mol_type = other RNA
ccccaaaaacaaaagagtaga

SEQ ID NO: 79890 - RNA, 21 nt, synthetic construct
  source 1..21: mol_type = other RNA
ccccaaaacttaggaggctat

SEQ ID NO: 79891 - RNA, 21 nt, synthetic construct
  source 1..21: mol_type = other RNA
ccccaaaattaccccattcac

SEQ ID NO: 79892 - RNA, 21 nt, synthetic construct
  source 1..21: mol_type = other RNA
ccccaaaccatcaagtgtgat

SEQ ID NO: 79893 - RNA, 21 nt, synthetic construct
  source 1..21: mol_type = other RNA
ccccaaagaaggaaaaaacac

SEQ ID NO: 79894 - RNA, 21 nt, synthetic construct
  source 1..21: mol_type = other RNA
ccccaaagatattagctacaa

SEQ ID NO: 79895 - RNA, 21 nt, synthetic construct
  source 1..21: mol_type = other RNA
ccccaaataacatgcatatgt

SEQ ID NO: 79896 - RNA, 21 nt, synthetic construct
  source 1..21: mol_type = other RNA
ccccaaatacctctgaatgtg

SEQ ID NO: 79897 - RNA, 21 nt, synthetic construct
  source 1..21: mol_type = other RNA
ccccaaccctacctagggtgt

SEQ ID NO: 79898 - RNA, 21 nt, synthetic construct
  source 1..21: mol_type = other RNA
ccccaactgcaaaactttctt

SEQ ID NO: 79899 - RNA, 21 nt, synthetic construct
  source 1..21: mol_type = other RNA
ccccaagaaagcaggtcatga

SEQ ID NO: 79900 - RNA, 21 nt, synthetic construct
  source 1..21: mol_type = other RNA
ccccaagccaaattaataaaa

SEQ ID NO: 79901 - RNA, 21 nt, synthetic construct
  source 1..21: mol_type = other RNA
ccccaagtaaacctcaagtct

SEQ ID NO: 79902 - RNA, 21 nt, synthetic construct
  source 1..21: mol_type = other RNA
ccccaagtgctgtgattgcag

SEQ ID NO: 79903 - RNA, 21 nt, synthetic construct
  source 1..21: mol_type = other RNA
ccccaattaaactatagaccc

SEQ ID NO: 79904 - RNA, 21 nt, synthetic construct
  source 1..21: mol_type = other RNA
ccccacaagtagcagggacta

SEQ ID NO: 79905 - RNA, 21 nt, synthetic construct
  source 1..21: mol_type = other RNA
ccccacataggatagttaaac

SEQ ID NO: 79906 - RNA, 21 nt, synthetic construct
  source 1..21: mol_type = other RNA
ccccacatgactggccatcct

SEQ ID NO: 79907 - RNA, 21 nt, synthetic construct
  source 1..21: mol_type = other RNA
ccccacccctgctctgcacgt

SEQ ID NO: 79908 - RNA, 21 nt, synthetic construct
  source 1..21: mol_type = other RNA
ccccaccgccttcctaccctg

SEQ ID NO: 79909 - RNA, 21 nt, synthetic construct
  source 1..21: mol_type = other RNA
ccccacctttcctgcccctcc

SEQ ID NO: 79910 - RNA, 21 nt, synthetic construct
  source 1..21: mol_type = other RNA
ccccactccacacacgaagta

SEQ ID NO: 79911 - RNA, 21 nt, synthetic construct
  source 1..21: mol_type = other RNA
ccccagaaagagagagggggg

SEQ ID NO: 79912 - RNA, 21 nt, synthetic construct
  source 1..21: mol_type = other RNA
ccccagaaggttaactaatag

SEQ ID NO: 79913 - RNA, 21 nt, synthetic construct
  source 1..21: mol_type = other RNA
ccccagaataggcaaattcat

SEQ ID NO: 79914 - RNA, 21 nt, synthetic construct
  source 1..21: mol_type = other RNA
ccccagagattgtcgttgagt

SEQ ID NO: 79915 - RNA, 21 nt, synthetic construct
  source 1..21: mol_type = other RNA
ccccagcagccccgacgcctt

SEQ ID NO: 79916 - RNA, 21 nt, synthetic construct
  source 1..21: mol_type = other RNA
ccccagcatccactaggggac

SEQ ID NO: 79917 - RNA, 21 nt, synthetic construct
  source 1..21: mol_type = other RNA
ccccagcccctggtgatctat

SEQ ID NO: 79918 - RNA, 21 nt, synthetic construct
  source 1..21: mol_type = other RNA
ccccagcctcagcctcccaag

SEQ ID NO: 79919 - RNA, 21 nt, synthetic construct
  source 1..21: mol_type = other RNA
ccccagctaaaatgttcagat

SEQ ID NO: 79920 - RNA, 21 nt, synthetic construct
  source 1..21: mol_type = other RNA
ccccaggcggcagagggagca

SEQ ID NO: 79921 - RNA, 21 nt, synthetic construct
  source 1..21: mol_type = other RNA
ccccagggaaaccttactgta

SEQ ID NO: 79922 - RNA, 21 nt, synthetic construct
  source 1..21: mol_type = other RNA
ccccagggatattttcgtgta

SEQ ID NO: 79923 - RNA, 21 nt, synthetic construct
  source 1..21: mol_type = other RNA
ccccaggggacatagatgaaa

SEQ ID NO: 79924 - RNA, 21 nt, synthetic construct
  source 1..21: mol_type = other RNA
ccccaggtggttctgcctaat

SEQ ID NO: 79925 - RNA, 21 nt, synthetic construct
  source 1..21: mol_type = other RNA
ccccagtagaaatcttccaga

SEQ ID NO: 79926 - RNA, 21 nt, synthetic construct
  source 1..21: mol_type = other RNA
ccccagtggttgtggaattaa

SEQ ID NO: 79927 - RNA, 21 nt, synthetic construct
  source 1..21: mol_type = other RNA
ccccagttctgcgcaattgca

SEQ ID NO: 79928 - RNA, 21 nt, synthetic construct
  source 1..21: mol_type = other RNA
ccccagttttgttgaatctta

SEQ ID NO: 79929 - RNA, 21 nt, synthetic construct
  source 1..21: mol_type = other RNA
ccccatcacactggtcactgg

SEQ ID NO: 79930 - RNA, 21 nt, synthetic construct
  source 1..21: mol_type = other RNA
ccccatcccctttacccctga

SEQ ID NO: 79931 - RNA, 21 nt, synthetic construct
  source 1..21: mol_type = other RNA
ccccatctctaccaaaatata

SEQ ID NO: 79932 - RNA, 21 nt, synthetic construct
  source 1..21: mol_type = other RNA
ccccatctgggatacttctaa

SEQ ID NO: 79933 - RNA, 21 nt, synthetic construct
  source 1..21: mol_type = other RNA
ccccatgcaggagaaacatgg

SEQ ID NO: 79934 - RNA, 21 nt, synthetic construct
  source 1..21: mol_type = other RNA
ccccatgtgttggcactgaag

SEQ ID NO: 79935 - RNA, 21 nt, synthetic construct
  source 1..21: mol_type = other RNA
ccccattagagtaagcaactg

SEQ ID NO: 79936 - RNA, 21 nt, synthetic construct
  source 1..21: mol_type = other RNA
ccccattcaattgtcctggca

SEQ ID NO: 79937 - RNA, 21 nt, synthetic construct
  source 1..21: mol_type = other RNA
ccccattcactcagcataatt

SEQ ID NO: 79938 - RNA, 21 nt, synthetic construct
  source 1..21: mol_type = other RNA
ccccattccctgtctgtgatg

SEQ ID NO: 79939 - RNA, 21 nt, synthetic construct
  source 1..21: mol_type = other RNA
ccccattgacaatataggaga

SEQ ID NO: 79940 - RNA, 21 nt, synthetic construct
  source 1..21: mol_type = other RNA
ccccattgcactccacgtggg

SEQ ID NO: 79941 - RNA, 21 nt, synthetic construct
  source 1..21: mol_type = other RNA
ccccattgtacacatattaaa

SEQ ID NO: 79942 - RNA, 21 nt, synthetic construct
  source 1..21: mol_type = other RNA
ccccatttttctcgacacaca

SEQ ID NO: 79943 - RNA, 21 nt, synthetic construct
  source 1..21: mol_type = other RNA
cccccaaaaacaaaagagtag

SEQ ID NO: 79944 - RNA, 21 nt, synthetic construct
  source 1..21: mol_type = other RNA
cccccaaaacttaggaggcta

SEQ ID NO: 79945 - RNA, 21 nt, synthetic construct
  source 1..21: mol_type = other RNA
cccccaaagaaggaaaaaaca

SEQ ID NO: 79946 - RNA, 21 nt, synthetic construct
  source 1..21: mol_type = other RNA
cccccaattaaactatagacc

SEQ ID NO: 79947 - RNA, 21 nt, synthetic construct
  source 1..21: mol_type = other RNA
cccccacccctgctctgcacg

SEQ ID NO: 79948 - RNA, 21 nt, synthetic construct
  source 1..21: mol_type = other RNA
cccccagcccctggtgatcta

SEQ ID NO: 79949 - RNA, 21 nt, synthetic construct
  source 1..21: mol_type = other RNA
cccccaggtggttctgcctaa

SEQ ID NO: 79950 - RNA, 21 nt, synthetic construct
  source 1..21: mol_type = other RNA
cccccagttttgttgaatctt

SEQ ID NO: 79951 - RNA, 21 nt, synthetic construct
  source 1..21: mol_type = other RNA
cccccatcacactggtcactg

SEQ ID NO: 79952 - RNA, 21 nt, synthetic construct
  source 1..21: mol_type = other RNA
cccccatcccctttacccctg

SEQ ID NO: 79953 - RNA, 21 nt, synthetic construct
  source 1..21: mol_type = other RNA
ccccccaaaaacaaaagagta

SEQ ID NO: 79954 - RNA, 21 nt, synthetic construct
  source 1..21: mol_type = other RNA
ccccccacccctgctctgcac

SEQ ID NO: 79955 - RNA, 21 nt, synthetic construct
  source 1..21: mol_type = other RNA
cccccctaaaacactggaagt

SEQ ID NO: 79956 - RNA, 21 nt, synthetic construct
  source 1..21: mol_type = other RNA
cccccctctctctttctgggg

SEQ ID NO: 79957 - RNA, 21 nt, synthetic construct
  source 1..21: mol_type = other RNA
cccccctgaaaaatgagaaac

SEQ ID NO: 79958 - RNA, 21 nt, synthetic construct
  source 1..21: mol_type = other RNA
cccccctggaacaatcaaacc

SEQ ID NO: 79959 - RNA, 21 nt, synthetic construct
  source 1..21: mol_type = other RNA
cccccgaatcctttgcttccc

SEQ ID NO: 79960 - RNA, 21 nt, synthetic construct
  source 1..21: mol_type = other RNA
cccccgggacaatgccagggc

SEQ ID NO: 79961 - RNA, 21 nt, synthetic construct
  source 1..21: mol_type = other RNA
ccccctaaaacactggaagta

SEQ ID NO: 79962 - RNA, 21 nt, synthetic construct
  source 1..21: mol_type = other RNA
ccccctacacccagttcacca

SEQ ID NO: 79963 - RNA, 21 nt, synthetic construct
  source 1..21: mol_type = other RNA
ccccctccctaccacccgtcc

SEQ ID NO: 79964 - RNA, 21 nt, synthetic construct
  source 1..21: mol_type = other RNA
ccccctcgaagagaccacagg

SEQ ID NO: 79965 - RNA, 21 nt, synthetic construct
  source 1..21: mol_type = other RNA
ccccctctctctttctgggga

SEQ ID NO: 79966 - RNA, 21 nt, synthetic construct
  source 1..21: mol_type = other RNA
ccccctcttctctcctttgag

SEQ ID NO: 79967 - RNA, 21 nt, synthetic construct
  source 1..21: mol_type = other RNA
ccccctgaaaaatgagaaacc

SEQ ID NO: 79968 - RNA, 21 nt, synthetic construct
  source 1..21: mol_type = other RNA
ccccctgaatacccctcccta

SEQ ID NO: 79969 - RNA, 21 nt, synthetic construct
  source 1..21: mol_type = other RNA
ccccctgagtagctgtgatta

SEQ ID NO: 79970 - RNA, 21 nt, synthetic construct
  source 1..21: mol_type = other RNA
ccccctggaaataagtttcat

SEQ ID NO: 79971 - RNA, 21 nt, synthetic construct
  source 1..21: mol_type = other RNA
ccccctggaacaatcaaacca

SEQ ID NO: 79972 - RNA, 21 nt, synthetic construct
  source 1..21: mol_type = other RNA
ccccctgggctcaagccatcc

SEQ ID NO: 79973 - RNA, 21 nt, synthetic construct
  source 1..21: mol_type = other RNA
cccccttatgtgtgtataacc

SEQ ID NO: 79974 - RNA, 21 nt, synthetic construct
  source 1..21: mol_type = other RNA
ccccgaatcctttgcttccca

SEQ ID NO: 79975 - RNA, 21 nt, synthetic construct
  source 1..21: mol_type = other RNA
ccccgacgcctttcatttggc

SEQ ID NO: 79976 - RNA, 21 nt, synthetic construct
  source 1..21: mol_type = other RNA
ccccgatgccatgtgttttgt

SEQ ID NO: 79977 - RNA, 21 nt, synthetic construct
  source 1..21: mol_type = other RNA
ccccgcatactgtgcagtgga

SEQ ID NO: 79978 - RNA, 21 nt, synthetic construct
  source 1..21: mol_type = other RNA
ccccgctgcgagaaaggcgaa

SEQ ID NO: 79979 - RNA, 21 nt, synthetic construct
  source 1..21: mol_type = other RNA
ccccgctgtccatttccagta

SEQ ID NO: 79980 - RNA, 21 nt, synthetic construct
  source 1..21: mol_type = other RNA
ccccgcttcagttggtgaaga

SEQ ID NO: 79981 - RNA, 21 nt, synthetic construct
  source 1..21: mol_type = other RNA
ccccggatgattctaatgtgc

SEQ ID NO: 79982 - RNA, 21 nt, synthetic construct
  source 1..21: mol_type = other RNA
ccccgggacaatgccagggcg

SEQ ID NO: 79983 - RNA, 21 nt, synthetic construct
  source 1..21: mol_type = other RNA
ccccgggcctggttagggaga

SEQ ID NO: 79984 - RNA, 21 nt, synthetic construct
  source 1..21: mol_type = other RNA
ccccggtctttcctgatcagc

SEQ ID NO: 79985 - RNA, 21 nt, synthetic construct
  source 1..21: mol_type = other RNA
ccccgtctctgcaaaaaatgt

SEQ ID NO: 79986 - RNA, 21 nt, synthetic construct
  source 1..21: mol_type = other RNA
cccctaaaacactggaagtaa

SEQ ID NO: 79987 - RNA, 21 nt, synthetic construct
  source 1..21: mol_type = other RNA
cccctacacccagttcaccag

SEQ ID NO: 79988 - RNA, 21 nt, synthetic construct
  source 1..21: mol_type = other RNA
cccctactttttgtcacacgg

SEQ ID NO: 79989 - RNA, 21 nt, synthetic construct
  source 1..21: mol_type = other RNA
cccctagcatgcagtagctca

SEQ ID NO: 79990 - RNA, 21 nt, synthetic construct
  source 1..21: mol_type = other RNA
cccctagtggatgctggggac

SEQ ID NO: 79991 - RNA, 21 nt, synthetic construct
  source 1..21: mol_type = other RNA
cccctatactgtaaccctgtt

SEQ ID NO: 79992 - RNA, 21 nt, synthetic construct
  source 1..21: mol_type = other RNA
cccctcaggtgtcactggata

SEQ ID NO: 79993 - RNA, 21 nt, synthetic construct
  source 1..21: mol_type = other RNA
cccctcatcctccgtagctgt

SEQ ID NO: 79994 - RNA, 21 nt, synthetic construct
  source 1..21: mol_type = other RNA
cccctccatggaaactacaat

SEQ ID NO: 79995 - RNA, 21 nt, synthetic construct
  source 1..21: mol_type = other RNA
cccctccctaccacccgtcca

SEQ ID NO: 79996 - RNA, 21 nt, synthetic construct
  source 1..21: mol_type = other RNA
cccctccctacctggcagtct

SEQ ID NO: 79997 - RNA, 21 nt, synthetic construct
  source 1..21: mol_type = other RNA
cccctccctgctttaaaacac

SEQ ID NO: 79998 - RNA, 21 nt, synthetic construct
  source 1..21: mol_type = other RNA
cccctcgaagagaccacaggc

SEQ ID NO: 79999 - RNA, 21 nt, synthetic construct
  source 1..21: mol_type = other RNA
cccctctctctttctggggat

SEQ ID NO: 80000 - RNA, 21 nt, synthetic construct
  source 1..21: mol_type = other RNA
cccctcttctctcctttgagg

SEQ ID NO: 80001 - RNA, 21 nt, synthetic construct
  source 1..21: mol_type = other RNA
cccctgaaaaatgagaaacct

SEQ ID NO: 80002 - RNA, 21 nt, synthetic construct
  source 1..21: mol_type = other RNA
cccctgaatacccctccctac

SEQ ID NO: 80003 - RNA, 21 nt, synthetic construct
  source 1..21: mol_type = other RNA
cccctgagaacttcagtatat

SEQ ID NO: 80004 - RNA, 21 nt, synthetic construct
  source 1..21: mol_type = other RNA
cccctgagtagctgtgattac

SEQ ID NO: 80005 - RNA, 21 nt, synthetic construct
  source 1..21: mol_type = other RNA
cccctgccacactccagcatc

SEQ ID NO: 80006 - RNA, 21 nt, synthetic construct
  source 1..21: mol_type = other RNA
cccctgctctgcacgtactag

SEQ ID NO: 80007 - RNA, 21 nt, synthetic construct
  source 1..21: mol_type = other RNA
cccctgctgccagatgttcta

SEQ ID NO: 80008 - RNA, 21 nt, synthetic construct
  source 1..21: mol_type = other RNA
cccctgctgttcccaagcaag

SEQ ID NO: 80009 - RNA, 21 nt, synthetic construct
  source 1..21: mol_type = other RNA
cccctggaaataagtttcatg

SEQ ID NO: 80010 - RNA, 21 nt, synthetic construct
  source 1..21: mol_type = other RNA
cccctggaacaatcaaaccat

SEQ ID NO: 80011 - RNA, 21 nt, synthetic construct
  source 1..21: mol_type = other RNA
cccctggagaaagcccagccg

SEQ ID NO: 80012 - RNA, 21 nt, synthetic construct
  source 1..21: mol_type = other RNA
cccctggagttaattccacaa

SEQ ID NO: 80013 - RNA, 21 nt, synthetic construct
  source 1..21: mol_type = other RNA
cccctggatcccccagcccct

SEQ ID NO: 80014 - RNA, 21 nt, synthetic construct
  source 1..21: mol_type = other RNA
cccctgggctcaagccatcct

SEQ ID NO: 80015 - RNA, 21 nt, synthetic construct
  source 1..21: mol_type = other RNA
cccctggggcctcagcatgtc

SEQ ID NO: 80016 - RNA, 21 nt, synthetic construct
  source 1..21: mol_type = other RNA
cccctggtcgagctgggtgat

SEQ ID NO: 80017 - RNA, 21 nt, synthetic construct
  source 1..21: mol_type = other RNA
cccctggtgatctatgaattt

SEQ ID NO: 80018 - RNA, 21 nt, synthetic construct
  source 1..21: mol_type = other RNA
cccctgtaattacatacttca

SEQ ID NO: 80019 - RNA, 21 nt, synthetic construct
  source 1..21: mol_type = other RNA
cccctgtagcagacactgggt

SEQ ID NO: 80020 - RNA, 21 nt, synthetic construct
  source 1..21: mol_type = other RNA
cccctgtccaagtatttctca

SEQ ID NO: 80021 - RNA, 21 nt, synthetic construct
  source 1..21: mol_type = other RNA
ccccttaaattccaaaagtga

SEQ ID NO: 80022 - RNA, 21 nt, synthetic construct
  source 1..21: mol_type = other RNA
ccccttatatgggatatctaa

SEQ ID NO: 80023 - RNA, 21 nt, synthetic construct
  source 1..21: mol_type = other RNA
ccccttatcaggaaagtgcca

SEQ ID NO: 80024 - RNA, 21 nt, synthetic construct
  source 1..21: mol_type = other RNA
ccccttatcctcttctgaaga

SEQ ID NO: 80025 - RNA, 21 nt, synthetic construct
  source 1..21: mol_type = other RNA
ccccttatgtgtgtataaccc

SEQ ID NO: 80026 - RNA, 21 nt, synthetic construct
  source 1..21: mol_type = other RNA
ccccttgaaagatcatttagt

SEQ ID NO: 80027 - RNA, 21 nt, synthetic construct
  source 1..21: mol_type = other RNA
ccccttgacgaagtcacattc

SEQ ID NO: 80028 - RNA, 21 nt, synthetic construct
  source 1..21: mol_type = other RNA
ccccttgccaaggcttgcttt

SEQ ID NO: 80029 - RNA, 21 nt, synthetic construct
  source 1..21: mol_type = other RNA
cccctttacccctgagaactt

SEQ ID NO: 80030 - RNA, 21 nt, synthetic construct
  source 1..21: mol_type = other RNA
cccctttagtgttctgtgttt

SEQ ID NO: 80031 - RNA, 21 nt, synthetic construct
  source 1..21: mol_type = other RNA
cccctttcaagattgtttaat

SEQ ID NO: 80032 - RNA, 21 nt, synthetic construct
  source 1..21: mol_type = other RNA
cccctttctttggttttgact

SEQ ID NO: 80033 - RNA, 21 nt, synthetic construct
  source 1..21: mol_type = other RNA
cccctttgagcagagtcctga

SEQ ID NO: 80034 - RNA, 21 nt, synthetic construct
  source 1..21: mol_type = other RNA
cccgaagaggacgatttttcc

SEQ ID NO: 80035 - RNA, 21 nt, synthetic construct
  source 1..21: mol_type = other RNA
cccgaatcctttgcttcccac

SEQ ID NO: 80036 - RNA, 21 nt, synthetic construct
  source 1..21: mol_type = other RNA
cccgacccactagtgaagtcc

SEQ ID NO: 80037 - RNA, 21 nt, synthetic construct
  source 1..21: mol_type = other RNA
cccgacctccagcgctaagca

SEQ ID NO: 80038 - RNA, 21 nt, synthetic construct
  source 1..21: mol_type = other RNA
cccgacgcctttcatttggcc

SEQ ID NO: 80039 - RNA, 21 nt, synthetic construct
  source 1..21: mol_type = other RNA
cccgaggtgcacaagggaaga

SEQ ID NO: 80040 - RNA, 21 nt, synthetic construct
  source 1..21: mol_type = other RNA
cccgagtagttgtaactacag

SEQ ID NO: 80041 - RNA, 21 nt, synthetic construct
  source 1..21: mol_type = other RNA
cccgagtatctaggagtacag

SEQ ID NO: 80042 - RNA, 21 nt, synthetic construct
  source 1..21: mol_type = other RNA
cccgatgccatgtgttttgtt

SEQ ID NO: 80043 - RNA, 21 nt, synthetic construct
  source 1..21: mol_type = other RNA
cccgatttcagttaacttatt

SEQ ID NO: 80044 - RNA, 21 nt, synthetic construct
  source 1..21: mol_type = other RNA
cccgcaccttgattttgataa

SEQ ID NO: 80045 - RNA, 21 nt, synthetic construct
  source 1..21: mol_type = other RNA
cccgcatactgtgcagtggat

SEQ ID NO: 80046 - RNA, 21 nt, synthetic construct
  source 1..21: mol_type = other RNA
cccgccctcccccgggacaat

SEQ ID NO: 80047 - RNA, 21 nt, synthetic construct
  source 1..21: mol_type = other RNA
cccgcgaaggcgtgtaaactg

SEQ ID NO: 80048 - RNA, 21 nt, synthetic construct
  source 1..21: mol_type = other RNA
cccgctacacaagtattaacg

SEQ ID NO: 80049 - RNA, 21 nt, synthetic construct
  source 1..21: mol_type = other RNA
cccgctctgggtgcgttgacc

SEQ ID NO: 80050 - RNA, 21 nt, synthetic construct
  source 1..21: mol_type = other RNA
cccgctgcgagaaaggcgaag

SEQ ID NO: 80051 - RNA, 21 nt, synthetic construct
  source 1..21: mol_type = other RNA
cccgctgtccatttccagtac

SEQ ID NO: 80052 - RNA, 21 nt, synthetic construct
  source 1..21: mol_type = other RNA
cccgcttcagttggtgaagag

SEQ ID NO: 80053 - RNA, 21 nt, synthetic construct
  source 1..21: mol_type = other RNA
cccggaacaggaaaaggacat

SEQ ID NO: 80054 - RNA, 21 nt, synthetic construct
  source 1..21: mol_type = other RNA
cccggaagctgggctagagcc

SEQ ID NO: 80055 - RNA, 21 nt, synthetic construct
  source 1..21: mol_type = other RNA
cccggagaggtgaactattag

SEQ ID NO: 80056 - RNA, 21 nt, synthetic construct
  source 1..21: mol_type = other RNA
cccggatgattctaatgtgca

SEQ ID NO: 80057 - RNA, 21 nt, synthetic construct
  source 1..21: mol_type = other RNA
cccggattggaaaactaggta

SEQ ID NO: 80058 - RNA, 21 nt, synthetic construct
  source 1..21: mol_type = other RNA
cccggcatgcctctcccacca

SEQ ID NO: 80059 - RNA, 21 nt, synthetic construct
  source 1..21: mol_type = other RNA
cccggccaaatatccatgttt

SEQ ID NO: 80060 - RNA, 21 nt, synthetic construct
  source 1..21: mol_type = other RNA
cccggccagacattttattta

SEQ ID NO: 80061 - RNA, 21 nt, synthetic construct
  source 1..21: mol_type = other RNA
cccggcccagattcctttttt

SEQ ID NO: 80062 - RNA, 21 nt, synthetic construct
  source 1..21: mol_type = other RNA
cccggcccatgacatgtgttt

SEQ ID NO: 80063 - RNA, 21 nt, synthetic construct
  source 1..21: mol_type = other RNA
cccggcccgttatttttatca

SEQ ID NO: 80064 - RNA, 21 nt, synthetic construct
  source 1..21: mol_type = other RNA
cccggccgagaaatcggaact

SEQ ID NO: 80065 - RNA, 21 nt, synthetic construct
  source 1..21: mol_type = other RNA
cccggccgatgcctgtgcttt

SEQ ID NO: 80066 - RNA, 21 nt, synthetic construct
  source 1..21: mol_type = other RNA
cccggctaagatgaggtctca

SEQ ID NO: 80067 - RNA, 21 nt, synthetic construct
  source 1..21: mol_type = other RNA
cccggctaattaaacaaacat

SEQ ID NO: 80068 - RNA, 21 nt, synthetic construct
  source 1..21: mol_type = other RNA
cccgggacaatgccagggcgc

SEQ ID NO: 80069 - RNA, 21 nt, synthetic construct
  source 1..21: mol_type = other RNA
cccgggagacaaaggttgcag

SEQ ID NO: 80070 - RNA, 21 nt, synthetic construct
  source 1..21: mol_type = other RNA
cccgggaggcagatgttgcgg

SEQ ID NO: 80071 - RNA, 21 nt, synthetic construct
  source 1..21: mol_type = other RNA
cccgggcctggttagggagac

SEQ ID NO: 80072 - RNA, 21 nt, synthetic construct
  source 1..21: mol_type = other RNA
cccggggcagagaactgactg

SEQ ID NO: 80073 - RNA, 21 nt, synthetic construct
  source 1..21: mol_type = other RNA
cccggggctcgcagcatccct

SEQ ID NO: 80074 - RNA, 21 nt, synthetic construct
  source 1..21: mol_type = other RNA
cccgggtccaggcagttctcc

SEQ ID NO: 80075 - RNA, 21 nt, synthetic construct
  source 1..21: mol_type = other RNA
cccgggtttaagcgattctcc

SEQ ID NO: 80076 - RNA, 21 nt, synthetic construct
  source 1..21: mol_type = other RNA
cccggtctttcctgatcagca

SEQ ID NO: 80077 - RNA, 21 nt, synthetic construct
  source 1..21: mol_type = other RNA
cccgtccaatttctttggctg

SEQ ID NO: 80078 - RNA, 21 nt, synthetic construct
  source 1..21: mol_type = other RNA
cccgtccctgcttggcgcagt

SEQ ID NO: 80079 - RNA, 21 nt, synthetic construct
  source 1..21: mol_type = other RNA
cccgtctctgcaaaaaatgtt

SEQ ID NO: 80080 - RNA, 21 nt, synthetic construct
  source 1..21: mol_type = other RNA
cccgtggaaatacttgaacat

SEQ ID NO: 80081 - RNA, 21 nt, synthetic construct
  source 1..21: mol_type = other RNA
cccgtgtgtttagaataatac

SEQ ID NO: 80082 - RNA, 21 nt, synthetic construct
  source 1..21: mol_type = other RNA
cccgtgtgttttgttgttgtt

SEQ ID NO: 80083 - RNA, 21 nt, synthetic construct
  source 1..21: mol_type = other RNA
cccgttatttttatcataact

SEQ ID NO: 80084 - RNA, 21 nt, synthetic construct
  source 1..21: mol_type = other RNA
cccgttttttccttcatttaa

SEQ ID NO: 80085 - RNA, 21 nt, synthetic construct
  source 1..21: mol_type = other RNA
ccctaaaacactggaagtaat

SEQ ID NO: 80086 - RNA, 21 nt, synthetic construct
  source 1..21: mol_type = other RNA
ccctaaacactgtagttcagt

SEQ ID NO: 80087 - RNA, 21 nt, synthetic construct
  source 1..21: mol_type = other RNA
ccctaaagagaatcttaaaat

SEQ ID NO: 80088 - RNA, 21 nt, synthetic construct
  source 1..21: mol_type = other RNA
ccctaaatacacatgttgagt

SEQ ID NO: 80089 - RNA, 21 nt, synthetic construct
  source 1..21: mol_type = other RNA
ccctaacagtctcgtgaattt

SEQ ID NO: 80090 - RNA, 21 nt, synthetic construct
  source 1..21: mol_type = other RNA
ccctaaccaggcccggggcag

SEQ ID NO: 80091 - RNA, 21 nt, synthetic construct
  source 1..21: mol_type = other RNA
ccctaaccccagagattgtcg

SEQ ID NO: 80092 - RNA, 21 nt, synthetic construct
  source 1..21: mol_type = other RNA
ccctaataacaaaataggatt

SEQ ID NO: 80093 - RNA, 21 nt, synthetic construct
  source 1..21: mol_type = other RNA
ccctacacccagttcaccagt

SEQ ID NO: 80094 - RNA, 21 nt, synthetic construct
  source 1..21: mol_type = other RNA
ccctacacccatccacccact

SEQ ID NO: 80095 - RNA, 21 nt, synthetic construct
  source 1..21: mol_type = other RNA
ccctacagactcaataaccac

SEQ ID NO: 80096 - RNA, 21 nt, synthetic construct
  source 1..21: mol_type = other RNA
ccctacatatggcaattccat

SEQ ID NO: 80097 - RNA, 21 nt, synthetic construct
  source 1..21: mol_type = other RNA
ccctacattgccttcaagttg

SEQ ID NO: 80098 - RNA, 21 nt, synthetic construct
  source 1..21: mol_type = other RNA
ccctaccacccgtccaatttc

SEQ ID NO: 80099 - RNA, 21 nt, synthetic construct
  source 1..21: mol_type = other RNA
ccctacctaaaaagggagtca

SEQ ID NO: 80100 - RNA, 21 nt, synthetic construct
  source 1..21: mol_type = other RNA
ccctacctagggtgtaaaagg

SEQ ID NO: 80101 - RNA, 21 nt, synthetic construct
  source 1..21: mol_type = other RNA
ccctacctggcagtctaggaa

SEQ ID NO: 80102 - RNA, 21 nt, synthetic construct
  source 1..21: mol_type = other RNA
ccctactcactgaaaccctca

SEQ ID NO: 80103 - RNA, 21 nt, synthetic construct
  source 1..21: mol_type = other RNA
ccctactttttgtcacacgga

SEQ ID NO: 80104 - RNA, 21 nt, synthetic construct
  source 1..21: mol_type = other RNA
ccctagcatgcagtagctcat

SEQ ID NO: 80105 - RNA, 21 nt, synthetic construct
  source 1..21: mol_type = other RNA
ccctagcccagcacttccatt

SEQ ID NO: 80106 - RNA, 21 nt, synthetic construct
  source 1..21: mol_type = other RNA
ccctaggtagggttggggtat

SEQ ID NO: 80107 - RNA, 21 nt, synthetic construct
  source 1..21: mol_type = other RNA
ccctagtggatgctggggacc

SEQ ID NO: 80108 - RNA, 21 nt, synthetic construct
  source 1..21: mol_type = other RNA
ccctagtgtctccataccccc

SEQ ID NO: 80109 - RNA, 21 nt, synthetic construct
  source 1..21: mol_type = other RNA
ccctatactgtaaccctgttt

SEQ ID NO: 80110 - RNA, 21 nt, synthetic construct
  source 1..21: mol_type = other RNA
ccctatgcaataactcaaaat

SEQ ID NO: 80111 - RNA, 21 nt, synthetic construct
  source 1..21: mol_type = other RNA
ccctatgccttcagtatgaat

SEQ ID NO: 80112 - RNA, 21 nt, synthetic construct
  source 1..21: mol_type = other RNA
ccctattcaacctataagacc

SEQ ID NO: 80113 - RNA, 21 nt, synthetic construct
  source 1..21: mol_type = other RNA
ccctatttatgttgcacaaaa

SEQ ID NO: 80114 - RNA, 21 nt, synthetic construct
  source 1..21: mol_type = other RNA
ccctattttctacaggtatat

SEQ ID NO: 80115 - RNA, 21 nt, synthetic construct
  source 1..21: mol_type = other RNA
ccctcaaaagatgcagaaaaa

SEQ ID NO: 80116 - RNA, 21 nt, synthetic construct
  source 1..21: mol_type = other RNA
ccctcaaatgccatagagctt

SEQ ID NO: 80117 - RNA, 21 nt, synthetic construct
  source 1..21: mol_type = other RNA
ccctcaaatgtctcattgtgg

SEQ ID NO: 80118 - RNA, 21 nt, synthetic construct
  source 1..21: mol_type = other RNA
ccctcaatccccatctgggat

SEQ ID NO: 80119 - RNA, 21 nt, synthetic construct
  source 1..21: mol_type = other RNA
ccctcacagtcacaaagcttt

SEQ ID NO: 80120 - RNA, 21 nt, synthetic construct
  source 1..21: mol_type = other RNA
ccctcacagtccactcacctg

SEQ ID NO: 80121 - RNA, 21 nt, synthetic construct
  source 1..21: mol_type = other RNA
ccctcaccttctgctgggccc

SEQ ID NO: 80122 - RNA, 21 nt, synthetic construct
  source 1..21: mol_type = other RNA
ccctcacgaaagcggtcaacg

SEQ ID NO: 80123 - RNA, 21 nt, synthetic construct
  source 1..21: mol_type = other RNA
ccctcactaagtcagaattca

SEQ ID NO: 80124 - RNA, 21 nt, synthetic construct
  source 1..21: mol_type = other RNA
ccctcagaatttgaggtcttc

SEQ ID NO: 80125 - RNA, 21 nt, synthetic construct
  source 1..21: mol_type = other RNA
ccctcagcaaaagcaattatt

SEQ ID NO: 80126 - RNA, 21 nt, synthetic construct
  source 1..21: mol_type = other RNA
ccctcaggaccaggcagtcct

SEQ ID NO: 80127 - RNA, 21 nt, synthetic construct
  source 1..21: mol_type = other RNA
ccctcaggactctgctcaaag

SEQ ID NO: 80128 - RNA, 21 nt, synthetic construct
  source 1..21: mol_type = other RNA
ccctcaggtgtcactggatag

SEQ ID NO: 80129 - RNA, 21 nt, synthetic construct
  source 1..21: mol_type = other RNA
ccctcatatcagttatcacac

SEQ ID NO: 80130 - RNA, 21 nt, synthetic construct
  source 1..21: mol_type = other RNA
ccctcatcctccgtagctgtc

SEQ ID NO: 80131 - RNA, 21 nt, synthetic construct
  source 1..21: mol_type = other RNA
ccctcattgaagctactattc

SEQ ID NO: 80132 - RNA, 21 nt, synthetic construct
  source 1..21: mol_type = other RNA
ccctcattttataagggtgat

SEQ ID NO: 80133 - RNA, 21 nt, synthetic construct
  source 1..21: mol_type = other RNA
ccctccaggatccagtctcta

SEQ ID NO: 80134 - RNA, 21 nt, synthetic construct
  source 1..21: mol_type = other RNA
ccctccagtccagcaccaccc

SEQ ID NO: 80135 - RNA, 21 nt, synthetic construct
  source 1..21: mol_type = other RNA
ccctccatggaaactacaatt

SEQ ID NO: 80136 - RNA, 21 nt, synthetic construct
  source 1..21: mol_type = other RNA
ccctccatttccctgcttcat

SEQ ID NO: 80137 - RNA, 21 nt, synthetic construct
  source 1..21: mol_type = other RNA
ccctcccccgggacaatgcca

SEQ ID NO: 80138 - RNA, 21 nt, synthetic construct
  source 1..21: mol_type = other RNA
ccctccctaccacccgtccaa

SEQ ID NO: 80139 - RNA, 21 nt, synthetic construct
  source 1..21: mol_type = other RNA
ccctccctacctggcagtcta

SEQ ID NO: 80140 - RNA, 21 nt, synthetic construct
  source 1..21: mol_type = other RNA
ccctccctccccccacggtct

SEQ ID NO: 80141 - RNA, 21 nt, synthetic construct
  source 1..21: mol_type = other RNA
ccctccctgctttaaaacact

SEQ ID NO: 80142 - RNA, 21 nt, synthetic construct
  source 1..21: mol_type = other RNA
ccctcctaccttccaaagtat

SEQ ID NO: 80143 - RNA, 21 nt, synthetic construct
  source 1..21: mol_type = other RNA
ccctcctcctcctggccacat

SEQ ID NO: 80144 - RNA, 21 nt, synthetic construct
  source 1..21: mol_type = other RNA
ccctcctcctctacaagtttt

SEQ ID NO: 80145 - RNA, 21 nt, synthetic construct
  source 1..21: mol_type = other RNA
ccctcctctggccctccattt

SEQ ID NO: 80146 - RNA, 21 nt, synthetic construct
  source 1..21: mol_type = other RNA
ccctcctttctagaatgcatc

SEQ ID NO: 80147 - RNA, 21 nt, synthetic construct
  source 1..21: mol_type = other RNA
ccctcctttttatcaccctta

SEQ ID NO: 80148 - RNA, 21 nt, synthetic construct
  source 1..21: mol_type = other RNA
ccctcgaagagaccacaggct

SEQ ID NO: 80149 - RNA, 21 nt, synthetic construct
  source 1..21: mol_type = other RNA
ccctcgagtaaaaagaatgaa

SEQ ID NO: 80150 - RNA, 21 nt, synthetic construct
  source 1..21: mol_type = other RNA
ccctcggccacagcagggctc

SEQ ID NO: 80151 - RNA, 21 nt, synthetic construct
  source 1..21: mol_type = other RNA
ccctcggcctctactgactcc

SEQ ID NO: 80152 - RNA, 21 nt, synthetic construct
  source 1..21: mol_type = other RNA
ccctctaaataggtattcatg

SEQ ID NO: 80153 - RNA, 21 nt, synthetic construct
  source 1..21: mol_type = other RNA
ccctctaagtcagcctgggca

SEQ ID NO: 80154 - RNA, 21 nt, synthetic construct
  source 1..21: mol_type = other RNA
ccctctacaaaaggaggaact

SEQ ID NO: 80155 - RNA, 21 nt, synthetic construct
  source 1..21: mol_type = other RNA
ccctctagctccccattccct

SEQ ID NO: 80156 - RNA, 21 nt, synthetic construct
  source 1..21: mol_type = other RNA
ccctctataattctgccttca

SEQ ID NO: 80157 - RNA, 21 nt, synthetic construct
  source 1..21: mol_type = other RNA
ccctctatggcaggcaccttc

SEQ ID NO: 80158 - RNA, 21 nt, synthetic construct
  source 1..21: mol_type = other RNA
ccctctcagtggtgcttttgc

SEQ ID NO: 80159 - RNA, 21 nt, synthetic construct
  source 1..21: mol_type = other RNA
ccctctctctttctggggatg

SEQ ID NO: 80160 - RNA, 21 nt, synthetic construct
  source 1..21: mol_type = other RNA
ccctctgagagaagtcagact

SEQ ID NO: 80161 - RNA, 21 nt, synthetic construct
  source 1..21: mol_type = other RNA
ccctctggaatgcccatcctc

SEQ ID NO: 80162 - RNA, 21 nt, synthetic construct
  source 1..21: mol_type = other RNA
ccctctggccttctatatttt

SEQ ID NO: 80163 - RNA, 21 nt, synthetic construct
  source 1..21: mol_type = other RNA
ccctctgtcaccaggctggaa

SEQ ID NO: 80164 - RNA, 21 nt, synthetic construct
  source 1..21: mol_type = other RNA
ccctctgtgtgcatgcatgtc

SEQ ID NO: 80165 - RNA, 21 nt, synthetic construct
  source 1..21: mol_type = other RNA
ccctcttcaatattttggaag

SEQ ID NO: 80166 - RNA, 21 nt, synthetic construct
  source 1..21: mol_type = other RNA
ccctcttcgctcttttaaaaa

SEQ ID NO: 80167 - RNA, 21 nt, synthetic construct
  source 1..21: mol_type = other RNA
ccctcttctctcctttgaggt

SEQ ID NO: 80168 - RNA, 21 nt, synthetic construct
  source 1..21: mol_type = other RNA
ccctctttctcaacttcctgt

SEQ ID NO: 80169 - RNA, 21 nt, synthetic construct
  source 1..21: mol_type = other RNA
ccctgaaaaatgagaaaccta

SEQ ID NO: 80170 - RNA, 21 nt, synthetic construct
  source 1..21: mol_type = other RNA
ccctgaaattgtcagaaaaga

SEQ ID NO: 80171 - RNA, 21 nt, synthetic construct
  source 1..21: mol_type = other RNA
ccctgaacaatgattttctta

SEQ ID NO: 80172 - RNA, 21 nt, synthetic construct
  source 1..21: mol_type = other RNA
ccctgaatacccctccctacc

SEQ ID NO: 80173 - RNA, 21 nt, synthetic construct
  source 1..21: mol_type = other RNA
ccctgagaacttcagtatata

SEQ ID NO: 80174 - RNA, 21 nt, synthetic construct
  source 1..21: mol_type = other RNA
ccctgagaagtcaaagcctgt

SEQ ID NO: 80175 - RNA, 21 nt, synthetic construct
  source 1..21: mol_type = other RNA
ccctgagcatccccgctgcga

SEQ ID NO: 80176 - RNA, 21 nt, synthetic construct
  source 1..21: mol_type = other RNA
ccctgaggatataacgatagt

SEQ ID NO: 80177 - RNA, 21 nt, synthetic construct
  source 1..21: mol_type = other RNA
ccctgagtagctgtgattacc

SEQ ID NO: 80178 - RNA, 21 nt, synthetic construct
  source 1..21: mol_type = other RNA
ccctgagtccagaggtgagct

SEQ ID NO: 80179 - RNA, 21 nt, synthetic construct
  source 1..21: mol_type = other RNA
ccctgataatcacagacgcaa

SEQ ID NO: 80180 - RNA, 21 nt, synthetic construct
  source 1..21: mol_type = other RNA
ccctgatagatattggcaaca

SEQ ID NO: 80181 - RNA, 21 nt, synthetic construct
  source 1..21: mol_type = other RNA
ccctgatatgtcgcatgaaaa

SEQ ID NO: 80182 - RNA, 21 nt, synthetic construct
  source 1..21: mol_type = other RNA
ccctgatcaagttgcttggca

SEQ ID NO: 80183 - RNA, 21 nt, synthetic construct
  source 1..21: mol_type = other RNA
ccctgattgagattagcgaaa

SEQ ID NO: 80184 - RNA, 21 nt, synthetic construct
  source 1..21: mol_type = other RNA
ccctgatttaaagtaggttga

SEQ ID NO: 80185 - RNA, 21 nt, synthetic construct
  source 1..21: mol_type = other RNA
ccctgcagccagatttgatcc

SEQ ID NO: 80186 - RNA, 21 nt, synthetic construct
  source 1..21: mol_type = other RNA
ccctgcatacactcatttcct

SEQ ID NO: 80187 - RNA, 21 nt, synthetic construct
  source 1..21: mol_type = other RNA
ccctgccacactccagcatcc

SEQ ID NO: 80188 - RNA, 21 nt, synthetic construct
  source 1..21: mol_type = other RNA
ccctgccccttatcctcttct

SEQ ID NO: 80189 - RNA, 21 nt, synthetic construct
  source 1..21: mol_type = other RNA
ccctgccctgtgaaaatcatt

SEQ ID NO: 80190 - RNA, 21 nt, synthetic construct
  source 1..21: mol_type = other RNA
ccctgccgcttcgcctttctc

SEQ ID NO: 80191 - RNA, 21 nt, synthetic construct
  source 1..21: mol_type = other RNA
ccctgccttaaaacatttttt

SEQ ID NO: 80192 - RNA, 21 nt, synthetic construct
  source 1..21: mol_type = other RNA
ccctgccttccttgggcacac

SEQ ID NO: 80193 - RNA, 21 nt, synthetic construct
  source 1..21: mol_type = other RNA
ccctgcgaaggcaatgtaaca

SEQ ID NO: 80194 - RNA, 21 nt, synthetic construct
  source 1..21: mol_type = other RNA
ccctgcgattggttggactcc

SEQ ID NO: 80195 - RNA, 21 nt, synthetic construct
  source 1..21: mol_type = other RNA
ccctgctactcaggagattaa

SEQ ID NO: 80196 - RNA, 21 nt, synthetic construct
  source 1..21: mol_type = other RNA
ccctgctacttgtggggctga

SEQ ID NO: 80197 - RNA, 21 nt, synthetic construct
  source 1..21: mol_type = other RNA
ccctgctatgcatactttgga

SEQ ID NO: 80198 - RNA, 21 nt, synthetic construct
  source 1..21: mol_type = other RNA
ccctgctccagtatgacctcc

SEQ ID NO: 80199 - RNA, 21 nt, synthetic construct
  source 1..21: mol_type = other RNA
ccctgctctgcacgtactagt

SEQ ID NO: 80200 - RNA, 21 nt, synthetic construct
  source 1..21: mol_type = other RNA
ccctgctgccagatgttctaa

SEQ ID NO: 80201 - RNA, 21 nt, synthetic construct
  source 1..21: mol_type = other RNA
ccctgctggaacgaatattca

SEQ ID NO: 80202 - RNA, 21 nt, synthetic construct
  source 1..21: mol_type = other RNA
ccctgctgtggccgagggaga

SEQ ID NO: 80203 - RNA, 21 nt, synthetic construct
  source 1..21: mol_type = other RNA
ccctgctgttcccaagcaagt

SEQ ID NO: 80204 - RNA, 21 nt, synthetic construct
  source 1..21: mol_type = other RNA
ccctgcttcatctggaccagt

SEQ ID NO: 80205 - RNA, 21 nt, synthetic construct
  source 1..21: mol_type = other RNA
ccctgcttggcgcagtgctta

SEQ ID NO: 80206 - RNA, 21 nt, synthetic construct
  source 1..21: mol_type = other RNA
ccctgctttaaaacactggca

SEQ ID NO: 80207 - RNA, 21 nt, synthetic construct
  source 1..21: mol_type = other RNA
ccctgctttcagttctttcgg

SEQ ID NO: 80208 - RNA, 21 nt, synthetic construct
  source 1..21: mol_type = other RNA
ccctggaaataagtttcatgg

SEQ ID NO: 80209 - RNA, 21 nt, synthetic construct
  source 1..21: mol_type = other RNA
ccctggaacaatcaaaccatc

SEQ ID NO: 80210 - RNA, 21 nt, synthetic construct
  source 1..21: mol_type = other RNA
ccctggagaaagcccagccgc

SEQ ID NO: 80211 - RNA, 21 nt, synthetic construct
  source 1..21: mol_type = other RNA
ccctggagaggcaaaggccgc

SEQ ID NO: 80212 - RNA, 21 nt, synthetic construct
  source 1..21: mol_type = other RNA
ccctggagttaattccacaac

SEQ ID NO: 80213 - RNA, 21 nt, synthetic construct
  source 1..21: mol_type = other RNA
ccctggatcccccagcccctg

SEQ ID NO: 80214 - RNA, 21 nt, synthetic construct
  source 1..21: mol_type = other RNA
ccctggcattgtcccggggga

SEQ ID NO: 80215 - RNA, 21 nt, synthetic construct
  source 1..21: mol_type = other RNA
ccctggcttgtgacatcaagg

SEQ ID NO: 80216 - RNA, 21 nt, synthetic construct
  source 1..21: mol_type = other RNA
ccctgggaaagcctggcttta

SEQ ID NO: 80217 - RNA, 21 nt, synthetic construct
  source 1..21: mol_type = other RNA
ccctgggatgcaagaatggtt

SEQ ID NO: 80218 - RNA, 21 nt, synthetic construct
  source 1..21: mol_type = other RNA
ccctgggctcaagccatcctc

SEQ ID NO: 80219 - RNA, 21 nt, synthetic construct
  source 1..21: mol_type = other RNA
ccctggggaataagattttag

SEQ ID NO: 80220 - RNA, 21 nt, synthetic construct
  source 1..21: mol_type = other RNA
ccctggggcctcagcatgtct

SEQ ID NO: 80221 - RNA, 21 nt, synthetic construct
  source 1..21: mol_type = other RNA
ccctggggtttccttaccttt

SEQ ID NO: 80222 - RNA, 21 nt, synthetic construct
  source 1..21: mol_type = other RNA
ccctggtcgagctgggtgatg

SEQ ID NO: 80223 - RNA, 21 nt, synthetic construct
  source 1..21: mol_type = other RNA
ccctggtgatctatgaatttg

SEQ ID NO: 80224 - RNA, 21 nt, synthetic construct
  source 1..21: mol_type = other RNA
ccctggtgctttctatctctc

SEQ ID NO: 80225 - RNA, 21 nt, synthetic construct
  source 1..21: mol_type = other RNA
ccctggttcaagctatgctcc

SEQ ID NO: 80226 - RNA, 21 nt, synthetic construct
  source 1..21: mol_type = other RNA
ccctgtaattacatacttcaa

SEQ ID NO: 80227 - RNA, 21 nt, synthetic construct
  source 1..21: mol_type = other RNA
ccctgtacccattagacacta

SEQ ID NO: 80228 - RNA, 21 nt, synthetic construct
  source 1..21: mol_type = other RNA
ccctgtagagatttttatcaa

SEQ ID NO: 80229 - RNA, 21 nt, synthetic construct
  source 1..21: mol_type = other RNA
ccctgtagcagacactgggtt

SEQ ID NO: 80230 - RNA, 21 nt, synthetic construct
  source 1..21: mol_type = other RNA
ccctgtccaagtatttctcat

SEQ ID NO: 80231 - RNA, 21 nt, synthetic construct
  source 1..21: mol_type = other RNA
ccctgtctctaaaaaatacca

SEQ ID NO: 80232 - RNA, 21 nt, synthetic construct
  source 1..21: mol_type = other RNA
ccctgtctgggaagttatgta

SEQ ID NO: 80233 - RNA, 21 nt, synthetic construct
  source 1..21: mol_type = other RNA
ccctgtctgtgatgtagaggc

SEQ ID NO: 80234 - RNA, 21 nt, synthetic construct
  source 1..21: mol_type = other RNA
ccctgtctttctgtctgcttt

SEQ ID NO: 80235 - RNA, 21 nt, synthetic construct
  source 1..21: mol_type = other RNA
ccctgtgaaaatcattttggc

SEQ ID NO: 80236 - RNA, 21 nt, synthetic construct
  source 1..21: mol_type = other RNA
ccctgtgcgtgaatctgttcc

SEQ ID NO: 80237 - RNA, 21 nt, synthetic construct
  source 1..21: mol_type = other RNA
ccctgtggctcatgcctgtaa

SEQ ID NO: 80238 - RNA, 21 nt, synthetic construct
  source 1..21: mol_type = other RNA
ccctgtgtatgtgtagtcagt

SEQ ID NO: 80239 - RNA, 21 nt, synthetic construct
  source 1..21: mol_type = other RNA
ccctgttagtcccctagtgga

SEQ ID NO: 80240 - RNA, 21 nt, synthetic construct
  source 1..21: mol_type = other RNA
ccctgttggcctggacacaca

SEQ ID NO: 80241 - RNA, 21 nt, synthetic construct
  source 1..21: mol_type = other RNA
ccctgttgggctattaagtat

SEQ ID NO: 80242 - RNA, 21 nt, synthetic construct
  source 1..21: mol_type = other RNA
ccctgtttcccttaatgttga

SEQ ID NO: 80243 - RNA, 21 nt, synthetic construct
  source 1..21: mol_type = other RNA
ccctgttttgtagattaaaaa

SEQ ID NO: 80244 - RNA, 21 nt, synthetic construct
  source 1..21: mol_type = other RNA
cccttaaaaggaactaatttc

SEQ ID NO: 80245 - RNA, 21 nt, synthetic construct
  source 1..21: mol_type = other RNA
cccttaaattccaaaagtgaa

SEQ ID NO: 80246 - RNA, 21 nt, synthetic construct
  source 1..21: mol_type = other RNA
cccttaacctttttcttttca

SEQ ID NO: 80247 - RNA, 21 nt, synthetic construct
  source 1..21: mol_type = other RNA
cccttaacttcacctctacac

SEQ ID NO: 80248 - RNA, 21 nt, synthetic construct
  source 1..21: mol_type = other RNA
cccttaatgttgacatcttgc

SEQ ID NO: 80249 - RNA, 21 nt, synthetic construct
  source 1..21: mol_type = other RNA
cccttaccttaaaccatatac

SEQ ID NO: 80250 - RNA, 21 nt, synthetic construct
  source 1..21: mol_type = other RNA
cccttacgcgtggatgtgtgc

SEQ ID NO: 80251 - RNA, 21 nt, synthetic construct
  source 1..21: mol_type = other RNA
cccttactaaattttgaggct

SEQ ID NO: 80252 - RNA, 21 nt, synthetic construct
  source 1..21: mol_type = other RNA
cccttagctctcatgtcagag

SEQ ID NO: 80253 - RNA, 21 nt, synthetic construct
  source 1..21: mol_type = other RNA
cccttataaaatgagggtaaa

SEQ ID NO: 80254 - RNA, 21 nt, synthetic construct
  source 1..21: mol_type = other RNA
cccttatatgggatatctaac

SEQ ID NO: 80255 - RNA, 21 nt, synthetic construct
  source 1..21: mol_type = other RNA
cccttatcaggaaagtgccag

SEQ ID NO: 80256 - RNA, 21 nt, synthetic construct
  source 1..21: mol_type = other RNA
cccttatcctcttctgaagag

SEQ ID NO: 80257 - RNA, 21 nt, synthetic construct
  source 1..21: mol_type = other RNA
cccttatgtccagcccccagt

SEQ ID NO: 80258 - RNA, 21 nt, synthetic construct
  source 1..21: mol_type = other RNA
cccttatgtgtgtataacccg

SEQ ID NO: 80259 - RNA, 21 nt, synthetic construct
  source 1..21: mol_type = other RNA
cccttatttaatgtgctgtcc

SEQ ID NO: 80260 - RNA, 21 nt, synthetic construct
  source 1..21: mol_type = other RNA
cccttcacaaagccctcagga

SEQ ID NO: 80261 - RNA, 21 nt, synthetic construct
  source 1..21: mol_type = other RNA
cccttcagcctgtgtcagtga

SEQ ID NO: 80262 - RNA, 21 nt, synthetic construct
  source 1..21: mol_type = other RNA
cccttcagtgtagtcagacac

SEQ ID NO: 80263 - RNA, 21 nt, synthetic construct
  source 1..21: mol_type = other RNA
cccttcatcatttgtattatt

SEQ ID NO: 80264 - RNA, 21 nt, synthetic construct
  source 1..21: mol_type = other RNA
cccttccagcgtgtgcatgac

SEQ ID NO: 80265 - RNA, 21 nt, synthetic construct
  source 1..21: mol_type = other RNA
cccttccccacctttcctgcc

SEQ ID NO: 80266 - RNA, 21 nt, synthetic construct
  source 1..21: mol_type = other RNA
cccttcctgttctttgttagt

SEQ ID NO: 80267 - RNA, 21 nt, synthetic construct
  source 1..21: mol_type = other RNA
cccttccttgcttgtcttgaa

SEQ ID NO: 80268 - RNA, 21 nt, synthetic construct
  source 1..21: mol_type = other RNA
cccttctattccattgttctc

SEQ ID NO: 80269 - RNA, 21 nt, synthetic construct
  source 1..21: mol_type = other RNA
cccttctcgaagtggtgcttg

SEQ ID NO: 80270 - RNA, 21 nt, synthetic construct
  source 1..21: mol_type = other RNA
cccttctgctcggctctgtca

SEQ ID NO: 80271 - RNA, 21 nt, synthetic construct
  source 1..21: mol_type = other RNA
cccttctgttaatagataggt

SEQ ID NO: 80272 - RNA, 21 nt, synthetic construct
  source 1..21: mol_type = other RNA
cccttcttaaatgtgaattag

SEQ ID NO: 80273 - RNA, 21 nt, synthetic construct
  source 1..21: mol_type = other RNA
cccttgaaaatttccagcatt

SEQ ID NO: 80274 - RNA, 21 nt, synthetic construct
  source 1..21: mol_type = other RNA
cccttgaaagatcatttagta

SEQ ID NO: 80275 - RNA, 21 nt, synthetic construct
  source 1..21: mol_type = other RNA
cccttgacgaagtcacattct

SEQ ID NO: 80276 - RNA, 21 nt, synthetic construct
  source 1..21: mol_type = other RNA
cccttgagtatttttgagctt

SEQ ID NO: 80277 - RNA, 21 nt, synthetic construct
  source 1..21: mol_type = other RNA
cccttgatgtcacaagccagg

SEQ ID NO: 80278 - RNA, 21 nt, synthetic construct
  source 1..21: mol_type = other RNA
cccttgccaaggcttgctttg

SEQ ID NO: 80279 - RNA, 21 nt, synthetic construct
  source 1..21: mol_type = other RNA
cccttgcctgacagcaaataa

SEQ ID NO: 80280 - RNA, 21 nt, synthetic construct
  source 1..21: mol_type = other RNA
cccttgctgcttctacccact

SEQ ID NO: 80281 - RNA, 21 nt, synthetic construct
  source 1..21: mol_type = other RNA
cccttggctagactaagaaaa

SEQ ID NO: 80282 - RNA, 21 nt, synthetic construct
  source 1..21: mol_type = other RNA
cccttgggatgcagcaaaagc

SEQ ID NO: 80283 - RNA, 21 nt, synthetic construct
  source 1..21: mol_type = other RNA
cccttggtaaacagcagtctt

SEQ ID NO: 80284 - RNA, 21 nt, synthetic construct
  source 1..21: mol_type = other RNA
cccttgtaatcaagtatctcc

SEQ ID NO: 80285 - RNA, 21 nt, synthetic construct
  source 1..21: mol_type = other RNA
cccttgtgcacctcgggttca

SEQ ID NO: 80286 - RNA, 21 nt, synthetic construct
  source 1..21: mol_type = other RNA
cccttgttggacagctgggag

SEQ ID NO: 80287 - RNA, 21 nt, synthetic construct
  source 1..21: mol_type = other RNA
ccctttaaaatgatagcatta

SEQ ID NO: 80288 - RNA, 21 nt, synthetic construct
  source 1..21: mol_type = other RNA
ccctttacccctgagaacttc

SEQ ID NO: 80289 - RNA, 21 nt, synthetic construct
  source 1..21: mol_type = other RNA
ccctttactcagattcaccaa

SEQ ID NO: 80290 - RNA, 21 nt, synthetic construct
  source 1..21: mol_type = other RNA
ccctttagtgttctgtgttta

SEQ ID NO: 80291 - RNA, 21 nt, synthetic construct
  source 1..21: mol_type = other RNA
ccctttatcggataaggaaga

SEQ ID NO: 80292 - RNA, 21 nt, synthetic construct
  source 1..21: mol_type = other RNA
ccctttattcaaagatcattt

SEQ ID NO: 80293 - RNA, 21 nt, synthetic construct
  source 1..21: mol_type = other RNA
ccctttcaagattgtttaatt

SEQ ID NO: 80294 - RNA, 21 nt, synthetic construct
  source 1..21: mol_type = other RNA
ccctttccaaattcaaagcaa

SEQ ID NO: 80295 - RNA, 21 nt, synthetic construct
  source 1..21: mol_type = other RNA
ccctttcgctaatctcaatca

SEQ ID NO: 80296 - RNA, 21 nt, synthetic construct
  source 1..21: mol_type = other RNA
ccctttcttaggaagctatgg

SEQ ID NO: 80297 - RNA, 21 nt, synthetic construct
  source 1..21: mol_type = other RNA
ccctttcttgttagtaggaaa

SEQ ID NO: 80298 - RNA, 21 nt, synthetic construct
  source 1..21: mol_type = other RNA
ccctttctttggttttgactc

SEQ ID NO: 80299 - RNA, 21 nt, synthetic construct
  source 1..21: mol_type = other RNA
ccctttgaagtatgtaattac

SEQ ID NO: 80300 - RNA, 21 nt, synthetic construct
  source 1..21: mol_type = other RNA
ccctttgagcagagtcctgag

SEQ ID NO: 80301 - RNA, 21 nt, synthetic construct
  source 1..21: mol_type = other RNA
ccctttgttagtgccttcaga

SEQ ID NO: 80302 - RNA, 21 nt, synthetic construct
  source 1..21: mol_type = other RNA
ccctttgttatctgaacgtct

SEQ ID NO: 80303 - RNA, 21 nt, synthetic construct
  source 1..21: mol_type = other RNA
cccttttggatgcagatttct

SEQ ID NO: 80304 - RNA, 21 nt, synthetic construct
  source 1..21: mol_type = other RNA
cccttttgtagctaatatctt

SEQ ID NO: 80305 - RNA, 21 nt, synthetic construct
  source 1..21: mol_type = other RNA
ccctttttaggtagggataag

SEQ ID NO: 80306 - RNA, 21 nt, synthetic construct
  source 1..21: mol_type = other RNA
ccgaaagaactgaaagcaggg

SEQ ID NO: 80307 - RNA, 21 nt, synthetic construct
  source 1..21: mol_type = other RNA
ccgaaatgcacttagcgctga

SEQ ID NO: 80308 - RNA, 21 nt, synthetic construct
  source 1..21: mol_type = other RNA
ccgaagaggacgatttttcca

SEQ ID NO: 80309 - RNA, 21 nt, synthetic construct
  source 1..21: mol_type = other RNA
ccgaatcctttgcttcccact

SEQ ID NO: 80310 - RNA, 21 nt, synthetic construct
  source 1..21: mol_type = other RNA
ccgaatgtggtggtatgcact

SEQ ID NO: 80311 - RNA, 21 nt, synthetic construct
  source 1..21: mol_type = other RNA
ccgacagcagataagatccaa

SEQ ID NO: 80312 - RNA, 21 nt, synthetic construct
  source 1..21: mol_type = other RNA
ccgacccactagtgaagtccc

SEQ ID NO: 80313 - RNA, 21 nt, synthetic construct
  source 1..21: mol_type = other RNA
ccgacccccctacctccctcc

SEQ ID NO: 80314 - RNA, 21 nt, synthetic construct
  source 1..21: mol_type = other RNA
ccgacctccagcgctaagcac

SEQ ID NO: 80315 - RNA, 21 nt, synthetic construct
  source 1..21: mol_type = other RNA
ccgacctgtagattgggcttt

SEQ ID NO: 80316 - RNA, 21 nt, synthetic construct
  source 1..21: mol_type = other RNA
ccgacgcctttcatttggcct

SEQ ID NO: 80317 - RNA, 21 nt, synthetic construct
  source 1..21: mol_type = other RNA
ccgacggctcaggcctgttgt

SEQ ID NO: 80318 - RNA, 21 nt, synthetic construct
  source 1..21: mol_type = other RNA
ccgactgaaaggaaatgagtg

SEQ ID NO: 80319 - RNA, 21 nt, synthetic construct
  source 1..21: mol_type = other RNA
ccgagaaatcggaactcctgt

SEQ ID NO: 80320 - RNA, 21 nt, synthetic construct
  source 1..21: mol_type = other RNA
ccgagacaagttctcctgtgt

SEQ ID NO: 80321 - RNA, 21 nt, synthetic construct
  source 1..21: mol_type = other RNA
ccgagatacttaagtttttaa

SEQ ID NO: 80322 - RNA, 21 nt, synthetic construct
  source 1..21: mol_type = other RNA
ccgagatcacgccactgcatt

SEQ ID NO: 80323 - RNA, 21 nt, synthetic construct
  source 1..21: mol_type = other RNA
ccgagcagaagggaaaggatg

SEQ ID NO: 80324 - RNA, 21 nt, synthetic construct
  source 1..21: mol_type = other RNA
ccgaggaaacccgctctgggt

SEQ ID NO: 80325 - RNA, 21 nt, synthetic construct
  source 1..21: mol_type = other RNA
ccgaggcagagagagtaactg

SEQ ID NO: 80326 - RNA, 21 nt, synthetic construct
  source 1..21: mol_type = other RNA
ccgaggcaggtggatcaggag

SEQ ID NO: 80327 - RNA, 21 nt, synthetic construct
  source 1..21: mol_type = other RNA
ccgaggccagtccctagtgtc

SEQ ID NO: 80328 - RNA, 21 nt, synthetic construct
  source 1..21: mol_type = other RNA
ccgagggagacggcgagcttg

SEQ ID NO: 80329 - RNA, 21 nt, synthetic construct
  source 1..21: mol_type = other RNA
ccgagggttgaacatcaccca

SEQ ID NO: 80330 - RNA, 21 nt, synthetic construct
  source 1..21: mol_type = other RNA
ccgaggtgcacaagggaagag

SEQ ID NO: 80331 - RNA, 21 nt, synthetic construct
  source 1..21: mol_type = other RNA
ccgagtaatgggatggctggg

SEQ ID NO: 80332 - RNA, 21 nt, synthetic construct
  source 1..21: mol_type = other RNA
ccgagtagttgtaactacaga

SEQ ID NO: 80333 - RNA, 21 nt, synthetic construct
  source 1..21: mol_type = other RNA
ccgagtatctaggagtacagt

SEQ ID NO: 80334 - RNA, 21 nt, synthetic construct
  source 1..21: mol_type = other RNA
ccgataaagggtctggtatct

SEQ ID NO: 80335 - RNA, 21 nt, synthetic construct
  source 1..21: mol_type = other RNA
ccgatgataccttcttgagag

SEQ ID NO: 80336 - RNA, 21 nt, synthetic construct
  source 1..21: mol_type = other RNA
ccgatgccatgtgttttgttt

SEQ ID NO: 80337 - RNA, 21 nt, synthetic construct
  source 1..21: mol_type = other RNA
ccgatgcctgtgcttttctcg

SEQ ID NO: 80338 - RNA, 21 nt, synthetic construct
  source 1..21: mol_type = other RNA
ccgatttcagttaacttattg

SEQ ID NO: 80339 - RNA, 21 nt, synthetic construct
  source 1..21: mol_type = other RNA
ccgatttctcggccgggcgcg

SEQ ID NO: 80340 - RNA, 21 nt, synthetic construct
  source 1..21: mol_type = other RNA
ccgattttacttactagttgt

SEQ ID NO: 80341 - RNA, 21 nt, synthetic construct
  source 1..21: mol_type = other RNA
ccgcaaataatcattcttcta

SEQ ID NO: 80342 - RNA, 21 nt, synthetic construct
  source 1..21: mol_type = other RNA
ccgcaacatctgcctcccggg

SEQ ID NO: 80343 - RNA, 21 nt, synthetic construct
  source 1..21: mol_type = other RNA
ccgcaagagttccaactgtat

SEQ ID NO: 80344 - RNA, 21 nt, synthetic construct
  source 1..21: mol_type = other RNA
ccgcacctggccgggatttac

SEQ ID NO: 80345 - RNA, 21 nt, synthetic construct
  source 1..21: mol_type = other RNA
ccgcaccttgattttgataaa

SEQ ID NO: 80346 - RNA, 21 nt, synthetic construct
  source 1..21: mol_type = other RNA
ccgcactcagcctgttgggag

SEQ ID NO: 80347 - RNA, 21 nt, synthetic construct
  source 1..21: mol_type = other RNA
ccgcagagcaagcacgttagc

SEQ ID NO: 80348 - RNA, 21 nt, synthetic construct
  source 1..21: mol_type = other RNA
ccgcagaggccaaatgaaagg

SEQ ID NO: 80349 - RNA, 21 nt, synthetic construct
  source 1..21: mol_type = other RNA
ccgcagtgagccatggctgcg

SEQ ID NO: 80350 - RNA, 21 nt, synthetic construct
  source 1..21: mol_type = other RNA
ccgcatactgtgcagtggatg

SEQ ID NO: 80351 - RNA, 21 nt, synthetic construct
  source 1..21: mol_type = other RNA
ccgcccctggagaaagcccag

SEQ ID NO: 80352 - RNA, 21 nt, synthetic construct
  source 1..21: mol_type = other RNA
ccgccctcccccgggacaatg

SEQ ID NO: 80353 - RNA, 21 nt, synthetic construct
  source 1..21: mol_type = other RNA
ccgccgcagaggccaaatgaa

SEQ ID NO: 80354 - RNA, 21 nt, synthetic construct
  source 1..21: mol_type = other RNA
ccgcctccctggttcaagcta

SEQ ID NO: 80355 - RNA, 21 nt, synthetic construct
  source 1..21: mol_type = other RNA
ccgcctcctggtgggttcatg

SEQ ID NO: 80356 - RNA, 21 nt, synthetic construct
  source 1..21: mol_type = other RNA
ccgccttcctaccctgccttc

SEQ ID NO: 80357 - RNA, 21 nt, synthetic construct
  source 1..21: mol_type = other RNA
ccgcgaaggcgtgtaaactgt

SEQ ID NO: 80358 - RNA, 21 nt, synthetic construct
  source 1..21: mol_type = other RNA
ccgcgcccggccaaatatcca

SEQ ID NO: 80359 - RNA, 21 nt, synthetic construct
  source 1..21: mol_type = other RNA
ccgcgcccggcccagattcct

SEQ ID NO: 80360 - RNA, 21 nt, synthetic construct
  source 1..21: mol_type = other RNA
ccgcgcccggccgagaaatcg

SEQ ID NO: 80361 - RNA, 21 nt, synthetic construct
  source 1..21: mol_type = other RNA
ccgcgcctggtgattaaagtt

SEQ ID NO: 80362 - RNA, 21 nt, synthetic construct
  source 1..21: mol_type = other RNA
ccgcggctgggctttctccag

SEQ ID NO: 80363 - RNA, 21 nt, synthetic construct
  source 1..21: mol_type = other RNA
ccgcgtccacctggcaacaaa

SEQ ID NO: 80364 - RNA, 21 nt, synthetic construct
  source 1..21: mol_type = other RNA
ccgcgtttattagaactagaa

SEQ ID NO: 80365 - RNA, 21 nt, synthetic construct
  source 1..21: mol_type = other RNA
ccgcgttttttgtccaccaga

SEQ ID NO: 80366 - RNA, 21 nt, synthetic construct
  source 1..21: mol_type = other RNA
ccgctaaacattttattaggt

SEQ ID NO: 80367 - RNA, 21 nt, synthetic construct
  source 1..21: mol_type = other RNA
ccgctacacaagtattaacga

SEQ ID NO: 80368 - RNA, 21 nt, synthetic construct
  source 1..21: mol_type = other RNA
ccgctccacgcccattaggat

SEQ ID NO: 80369 - RNA, 21 nt, synthetic construct
  source 1..21: mol_type = other RNA
ccgctctgggtgcgttgaccg

SEQ ID NO: 80370 - RNA, 21 nt, synthetic construct
  source 1..21: mol_type = other RNA
ccgctctggttttaaagaaat

SEQ ID NO: 80371 - RNA, 21 nt, synthetic construct
  source 1..21: mol_type = other RNA
ccgctcttgaccttgtgcatg

SEQ ID NO: 80372 - RNA, 21 nt, synthetic construct
  source 1..21: mol_type = other RNA
ccgctgcgagaaaggcgaagc

SEQ ID NO: 80373 - RNA, 21 nt, synthetic construct
  source 1..21: mol_type = other RNA
ccgctgctccctctgccgcct

SEQ ID NO: 80374 - RNA, 21 nt, synthetic construct
  source 1..21: mol_type = other RNA
ccgctggtgaaaaaatggtgc

SEQ ID NO: 80375 - RNA, 21 nt, synthetic construct
  source 1..21: mol_type = other RNA
ccgctgtccatttccagtact

SEQ ID NO: 80376 - RNA, 21 nt, synthetic construct
  source 1..21: mol_type = other RNA
ccgcttcagttggtgaagaga

SEQ ID NO: 80377 - RNA, 21 nt, synthetic construct
  source 1..21: mol_type = other RNA
ccgcttcgcctttctcgcagc

SEQ ID NO: 80378 - RNA, 21 nt, synthetic construct
  source 1..21: mol_type = other RNA
ccgctttcgtgagggtttcag

SEQ ID NO: 80379 - RNA, 21 nt, synthetic construct
  source 1..21: mol_type = other RNA
ccggaaaatgcttaacaagaa

SEQ ID NO: 80380 - RNA, 21 nt, synthetic construct
  source 1..21: mol_type = other RNA
ccggaacaggaaaaggacatt

SEQ ID NO: 80381 - RNA, 21 nt, synthetic construct
  source 1..21: mol_type = other RNA
ccggaacttgagtttgttctg

SEQ ID NO: 80382 - RNA, 21 nt, synthetic construct
  source 1..21: mol_type = other RNA
ccggaagctgggctagagcca

SEQ ID NO: 80383 - RNA, 21 nt, synthetic construct
  source 1..21: mol_type = other RNA
ccggagaggtgaactattaga

SEQ ID NO: 80384 - RNA, 21 nt, synthetic construct
  source 1..21: mol_type = other RNA
ccggagcgggcagccttggag

SEQ ID NO: 80385 - RNA, 21 nt, synthetic construct
  source 1..21: mol_type = other RNA
ccggaggattgcttgagtgca

SEQ ID NO: 80386 - RNA, 21 nt, synthetic construct
  source 1..21: mol_type = other RNA
ccggagtagctgggattacac

SEQ ID NO: 80387 - RNA, 21 nt, synthetic construct
  source 1..21: mol_type = other RNA
ccggagtccgcggctgggctt

SEQ ID NO: 80388 - RNA, 21 nt, synthetic construct
  source 1..21: mol_type = other RNA
ccggatgattctaatgtgcaa

SEQ ID NO: 80389 - RNA, 21 nt, synthetic construct
  source 1..21: mol_type = other RNA
ccggattcctttcaaagagac

SEQ ID NO: 80390 - RNA, 21 nt, synthetic construct
  source 1..21: mol_type = other RNA
ccggattggaaaactaggtat

SEQ ID NO: 80391 - RNA, 21 nt, synthetic construct
  source 1..21: mol_type = other RNA
ccggcatatgtcactgtaaga

SEQ ID NO: 80392 - RNA, 21 nt, synthetic construct
  source 1..21: mol_type = other RNA
ccggcatccgccaccacgcct

SEQ ID NO: 80393 - RNA, 21 nt, synthetic construct
  source 1..21: mol_type = other RNA
ccggcatgcctctcccaccat

SEQ ID NO: 80394 - RNA, 21 nt, synthetic construct
  source 1..21: mol_type = other RNA
ccggccaaatatccatgtttt

SEQ ID NO: 80395 - RNA, 21 nt, synthetic construct
  source 1..21: mol_type = other RNA
ccggccagacattttatttat

SEQ ID NO: 80396 - RNA, 21 nt, synthetic construct
  source 1..21: mol_type = other RNA
ccggcccagattcctttttta

SEQ ID NO: 80397 - RNA, 21 nt, synthetic construct
  source 1..21: mol_type = other RNA
ccggcccatgacatgtgtttt

SEQ ID NO: 80398 - RNA, 21 nt, synthetic construct
  source 1..21: mol_type = other RNA
ccggcccgttatttttatcat

SEQ ID NO: 80399 - RNA, 21 nt, synthetic construct
  source 1..21: mol_type = other RNA
ccggccctgccgcttcgcctt

SEQ ID NO: 80400 - RNA, 21 nt, synthetic construct
  source 1..21: mol_type = other RNA
ccggccgagaaatcggaactc

SEQ ID NO: 80401 - RNA, 21 nt, synthetic construct
  source 1..21: mol_type = other RNA
ccggccgatgcctgtgctttt

SEQ ID NO: 80402 - RNA, 21 nt, synthetic construct
  source 1..21: mol_type = other RNA
ccggcctcagcctcccgagta

SEQ ID NO: 80403 - RNA, 21 nt, synthetic construct
  source 1..21: mol_type = other RNA
ccggctaagatgaggtctcag

SEQ ID NO: 80404 - RNA, 21 nt, synthetic construct
  source 1..21: mol_type = other RNA
ccggctaattaaacaaacatt

SEQ ID NO: 80405 - RNA, 21 nt, synthetic construct
  source 1..21: mol_type = other RNA
ccggctgttaggtattatttt

SEQ ID NO: 80406 - RNA, 21 nt, synthetic construct
  source 1..21: mol_type = other RNA
ccggctttatgagacacacga

SEQ ID NO: 80407 - RNA, 21 nt, synthetic construct
  source 1..21: mol_type = other RNA
ccgggaacatgacatgtattt

SEQ ID NO: 80408 - RNA, 21 nt, synthetic construct
  source 1..21: mol_type = other RNA
ccgggacaagagtctgcagac

SEQ ID NO: 80409 - RNA, 21 nt, synthetic construct
  source 1..21: mol_type = other RNA
ccgggacaatgccagggcgct

SEQ ID NO: 80410 - RNA, 21 nt, synthetic construct
  source 1..21: mol_type = other RNA
ccgggacttggaagtgaagtc

SEQ ID NO: 80411 - RNA, 21 nt, synthetic construct
  source 1..21: mol_type = other RNA
ccgggagacaaaggttgcagt

SEQ ID NO: 80412 - RNA, 21 nt, synthetic construct
  source 1..21: mol_type = other RNA
ccgggaggagccaagtaaaag

SEQ ID NO: 80413 - RNA, 21 nt, synthetic construct
  source 1..21: mol_type = other RNA
ccgggaggcagatgttgcggt

SEQ ID NO: 80414 - RNA, 21 nt, synthetic construct
  source 1..21: mol_type = other RNA
ccgggatcctgtccaggcgcc

SEQ ID NO: 80415 - RNA, 21 nt, synthetic construct
  source 1..21: mol_type = other RNA
ccgggatttacttctatatgt

SEQ ID NO: 80416 - RNA, 21 nt, synthetic construct
  source 1..21: mol_type = other RNA
ccgggcctggttagggagact

SEQ ID NO: 80417 - RNA, 21 nt, synthetic construct
  source 1..21: mol_type = other RNA
ccgggcttggtatgcatcttg

SEQ ID NO: 80418 - RNA, 21 nt, synthetic construct
  source 1..21: mol_type = other RNA
ccggggactgcaacagatctg

SEQ ID NO: 80419 - RNA, 21 nt, synthetic construct
  source 1..21: mol_type = other RNA
ccggggagcttttgaaactga

SEQ ID NO: 80420 - RNA, 21 nt, synthetic construct
  source 1..21: mol_type = other RNA
ccggggcagagaactgactga

SEQ ID NO: 80421 - RNA, 21 nt, synthetic construct
  source 1..21: mol_type = other RNA
ccggggctcgcagcatccctg

SEQ ID NO: 80422 - RNA, 21 nt, synthetic construct
  source 1..21: mol_type = other RNA
ccgggtaaaaagcctgcttca

SEQ ID NO: 80423 - RNA, 21 nt, synthetic construct
  source 1..21: mol_type = other RNA
ccgggtccaggcagttctcct

SEQ ID NO: 80424 - RNA, 21 nt, synthetic construct
  source 1..21: mol_type = other RNA
ccgggtcgcggacgcgcattt

SEQ ID NO: 80425 - RNA, 21 nt, synthetic construct
  source 1..21: mol_type = other RNA
ccgggtgtagtggtgtgtgac

SEQ ID NO: 80426 - RNA, 21 nt, synthetic construct
  source 1..21: mol_type = other RNA
ccgggtttaagcgattctcct

SEQ ID NO: 80427 - RNA, 21 nt, synthetic construct
  source 1..21: mol_type = other RNA
ccggtaatcacagctactcag

SEQ ID NO: 80428 - RNA, 21 nt, synthetic construct
  source 1..21: mol_type = other RNA
ccggtcgttggatttatcttt

SEQ ID NO: 80429 - RNA, 21 nt, synthetic construct
  source 1..21: mol_type = other RNA
ccggtctcagtttttaattta

SEQ ID NO: 80430 - RNA, 21 nt, synthetic construct
  source 1..21: mol_type = other RNA
ccggtctttcctgatcagcac

SEQ ID NO: 80431 - RNA, 21 nt, synthetic construct
  source 1..21: mol_type = other RNA
ccggttctcaggagcctagtc

SEQ ID NO: 80432 - RNA, 21 nt, synthetic construct
  source 1..21: mol_type = other RNA
ccggttgtatagcagtaaaat

SEQ ID NO: 80433 - RNA, 21 nt, synthetic construct
  source 1..21: mol_type = other RNA
ccgtaacttcttttcttaaaa

SEQ ID NO: 80434 - RNA, 21 nt, synthetic construct
  source 1..21: mol_type = other RNA
ccgtagaccgaggaaacccgc

SEQ ID NO: 80435 - RNA, 21 nt, synthetic construct
  source 1..21: mol_type = other RNA
ccgtagctgtcgctctcctgt

SEQ ID NO: 80436 - RNA, 21 nt, synthetic construct
  source 1..21: mol_type = other RNA
ccgtatccagtggttttttgt

SEQ ID NO: 80437 - RNA, 21 nt, synthetic construct
  source 1..21: mol_type = other RNA
ccgtccaatttctttggctgt

SEQ ID NO: 80438 - RNA, 21 nt, synthetic construct
  source 1..21: mol_type = other RNA
ccgtccctattttctacaggt

SEQ ID NO: 80439 - RNA, 21 nt, synthetic construct
  source 1..21: mol_type = other RNA
ccgtccctgcttggcgcagtg

SEQ ID NO: 80440 - RNA, 21 nt, synthetic construct
  source 1..21: mol_type = other RNA
ccgtcggtatgttaataaccc

SEQ ID NO: 80441 - RNA, 21 nt, synthetic construct
  source 1..21: mol_type = other RNA
ccgtctagccacttcctatta

SEQ ID NO: 80442 - RNA, 21 nt, synthetic construct
  source 1..21: mol_type = other RNA
ccgtctcaagattgtgtgatt

SEQ ID NO: 80443 - RNA, 21 nt, synthetic construct
  source 1..21: mol_type = other RNA
ccgtctccctcggccacagca

SEQ ID NO: 80444 - RNA, 21 nt, synthetic construct
  source 1..21: mol_type = other RNA
ccgtctctgcaaaaaatgttt

SEQ ID NO: 80445 - RNA, 21 nt, synthetic construct
  source 1..21: mol_type = other RNA
ccgtgacagaacaaataacac

SEQ ID NO: 80446 - RNA, 21 nt, synthetic construct
  source 1..21: mol_type = other RNA
ccgtgcaactagagaaagcat

SEQ ID NO: 80447 - RNA, 21 nt, synthetic construct
  source 1..21: mol_type = other RNA
ccgtgcatgcctctgttacag

SEQ ID NO: 80448 - RNA, 21 nt, synthetic construct
  source 1..21: mol_type = other RNA
ccgtgcccggccagacatttt

SEQ ID NO: 80449 - RNA, 21 nt, synthetic construct
  source 1..21: mol_type = other RNA
ccgtgccgggcttggtatgca

SEQ ID NO: 80450 - RNA, 21 nt, synthetic construct
  source 1..21: mol_type = other RNA
ccgtggaaatacttgaacatt

SEQ ID NO: 80451 - RNA, 21 nt, synthetic construct
  source 1..21: mol_type = other RNA
ccgtggaaggccttctcctcc

SEQ ID NO: 80452 - RNA, 21 nt, synthetic construct
  source 1..21: mol_type = other RNA
ccgtgtgacaaaaagtagggg

SEQ ID NO: 80453 - RNA, 21 nt, synthetic construct
  source 1..21: mol_type = other RNA
ccgtgtgtttagaataataca

SEQ ID NO: 80454 - RNA, 21 nt, synthetic construct
  source 1..21: mol_type = other RNA
ccgtgtgttttgttgttgttg

SEQ ID NO: 80455 - RNA, 21 nt, synthetic construct
  source 1..21: mol_type = other RNA
ccgttccatcagagaggcttt

SEQ ID NO: 80456 - RNA, 21 nt, synthetic construct
  source 1..21: mol_type = other RNA
ccgttgaagtctttggcccat

SEQ ID NO: 80457 - RNA, 21 nt, synthetic construct
  source 1..21: mol_type = other RNA
ccgttgctgcatagtactcca

SEQ ID NO: 80458 - RNA, 21 nt, synthetic construct
  source 1..21: mol_type = other RNA
ccgttttgcaagatgcataag

SEQ ID NO: 80459 - RNA, 21 nt, synthetic construct
  source 1..21: mol_type = other RNA
ccgtttttcaggttcaagcga

SEQ ID NO: 80460 - RNA, 21 nt, synthetic construct
  source 1..21: mol_type = other RNA
ccgttttttccttcatttaac

SEQ ID NO: 80461 - RNA, 21 nt, synthetic construct
  source 1..21: mol_type = other RNA
cctaaaaagggagtcagtaga

SEQ ID NO: 80462 - RNA, 21 nt, synthetic construct
  source 1..21: mol_type = other RNA
cctaaaacactggaagtaatt

SEQ ID NO: 80463 - RNA, 21 nt, synthetic construct
  source 1..21: mol_type = other RNA
cctaaaacatggtccacagag

SEQ ID NO: 80464 - RNA, 21 nt, synthetic construct
  source 1..21: mol_type = other RNA
cctaaaactccccatgcagga

SEQ ID NO: 80465 - RNA, 21 nt, synthetic construct
  source 1..21: mol_type = other RNA
cctaaaaggttgcttaattga

SEQ ID NO: 80466 - RNA, 21 nt, synthetic construct
  source 1..21: mol_type = other RNA
cctaaaataggcctaggtgtg

SEQ ID NO: 80467 - RNA, 21 nt, synthetic construct
  source 1..21: mol_type = other RNA
cctaaaatcttattccccagg

SEQ ID NO: 80468 - RNA, 21 nt, synthetic construct
  source 1..21: mol_type = other RNA
cctaaaattccttcctttgat

SEQ ID NO: 80469 - RNA, 21 nt, synthetic construct
  source 1..21: mol_type = other RNA
cctaaacactgtagttcagtt

SEQ ID NO: 80470 - RNA, 21 nt, synthetic construct
  source 1..21: mol_type = other RNA
cctaaacacttagcatgttgc

SEQ ID NO: 80471 - RNA, 21 nt, synthetic construct
  source 1..21: mol_type = other RNA
cctaaaccattttcaatcttg

SEQ ID NO: 80472 - RNA, 21 nt, synthetic construct
  source 1..21: mol_type = other RNA
cctaaacctgctacgaatgaa

SEQ ID NO: 80473 - RNA, 21 nt, synthetic construct
  source 1..21: mol_type = other RNA
cctaaacctgtgatttccagt

SEQ ID NO: 80474 - RNA, 21 nt, synthetic construct
  source 1..21: mol_type = other RNA
cctaaagagagtgacagctga

SEQ ID NO: 80475 - RNA, 21 nt, synthetic construct
  source 1..21: mol_type = other RNA
cctaaagatatgtgtaggaag

SEQ ID NO: 80476 - RNA, 21 nt, synthetic construct
  source 1..21: mol_type = other RNA
cctaaagtccacagatctttt

SEQ ID NO: 80477 - RNA, 21 nt, synthetic construct
  source 1..21: mol_type = other RNA
cctaaagttgaggttgaagac

SEQ ID NO: 80478 - RNA, 21 nt, synthetic construct
  source 1..21: mol_type = other RNA
cctaaataaaacacatgtcat

SEQ ID NO: 80479 - RNA, 21 nt, synthetic construct
  source 1..21: mol_type = other RNA
cctaaatacacatgttgagtc

SEQ ID NO: 80480 - RNA, 21 nt, synthetic construct
  source 1..21: mol_type = other RNA
cctaaatcaggatgtctttgg

SEQ ID NO: 80481 - RNA, 21 nt, synthetic construct
  source 1..21: mol_type = other RNA
cctaaatgtccatcgagagat

SEQ ID NO: 80482 - RNA, 21 nt, synthetic construct
  source 1..21: mol_type = other RNA
cctaacaatgattatttcgaa

SEQ ID NO: 80483 - RNA, 21 nt, synthetic construct
  source 1..21: mol_type = other RNA
cctaacaccagtaagattctg

SEQ ID NO: 80484 - RNA, 21 nt, synthetic construct
  source 1..21: mol_type = other RNA
cctaacagccggcatatgtca

SEQ ID NO: 80485 - RNA, 21 nt, synthetic construct
  source 1..21: mol_type = other RNA
cctaacagtctcgtgaatttg

SEQ ID NO: 80486 - RNA, 21 nt, synthetic construct
  source 1..21: mol_type = other RNA
cctaacatgtcttggtgtgct

SEQ ID NO: 80487 - RNA, 21 nt, synthetic construct
  source 1..21: mol_type = other RNA
cctaaccactgttatctggga

SEQ ID NO: 80488 - RNA, 21 nt, synthetic construct
  source 1..21: mol_type = other RNA
cctaaccaggcccggggcaga

SEQ ID NO: 80489 - RNA, 21 nt, synthetic construct
  source 1..21: mol_type = other RNA
cctaaccccagagattgtcgt

SEQ ID NO: 80490 - RNA, 21 nt, synthetic construct
  source 1..21: mol_type = other RNA
cctaactactaataaatgcat

SEQ ID NO: 80491 - RNA, 21 nt, synthetic construct
  source 1..21: mol_type = other RNA
cctaactcaagagttacttct

SEQ ID NO: 80492 - RNA, 21 nt, synthetic construct
  source 1..21: mol_type = other RNA
cctaactggtctcctttctat

SEQ ID NO: 80493 - RNA, 21 nt, synthetic construct
  source 1..21: mol_type = other RNA
cctaagaaagggtgtgtgaat

SEQ ID NO: 80494 - RNA, 21 nt, synthetic construct
  source 1..21: mol_type = other RNA
cctaagaaaggtctagtgtgc

SEQ ID NO: 80495 - RNA, 21 nt, synthetic construct
  source 1..21: mol_type = other RNA
cctaagatggaaagtggacta

SEQ ID NO: 80496 - RNA, 21 nt, synthetic construct
  source 1..21: mol_type = other RNA
cctaagcaaatgtaatgaaaa

SEQ ID NO: 80497 - RNA, 21 nt, synthetic construct
  source 1..21: mol_type = other RNA
cctaagcaagttacatgctta

SEQ ID NO: 80498 - RNA, 21 nt, synthetic construct
  source 1..21: mol_type = other RNA
cctaagcatcgtgaagtcttt

SEQ ID NO: 80499 - RNA, 21 nt, synthetic construct
  source 1..21: mol_type = other RNA
cctaagcatgagatactacgc

SEQ ID NO: 80500 - RNA, 21 nt, synthetic construct
  source 1..21: mol_type = other RNA
cctaagccatctaattcacat

SEQ ID NO: 80501 - RNA, 21 nt, synthetic construct
  source 1..21: mol_type = other RNA
cctaagcttaagagctaagac

SEQ ID NO: 80502 - RNA, 21 nt, synthetic construct
  source 1..21: mol_type = other RNA
cctaagcttgggtaggaagct

SEQ ID NO: 80503 - RNA, 21 nt, synthetic construct
  source 1..21: mol_type = other RNA
cctaagtaatgctggccagtg

SEQ ID NO: 80504 - RNA, 21 nt, synthetic construct
  source 1..21: mol_type = other RNA
cctaagtctcaggatacaaaa

SEQ ID NO: 80505 - RNA, 21 nt, synthetic construct
  source 1..21: mol_type = other RNA
cctaagtcttcttctaagcta

SEQ ID NO: 80506 - RNA, 21 nt, synthetic construct
  source 1..21: mol_type = other RNA
cctaagttttgggggaagaga

SEQ ID NO: 80507 - RNA, 21 nt, synthetic construct
  source 1..21: mol_type = other RNA
cctaataaaatgtttagcgga

SEQ ID NO: 80508 - RNA, 21 nt, synthetic construct
  source 1..21: mol_type = other RNA
cctaatacagtaaagccccat

SEQ ID NO: 80509 - RNA, 21 nt, synthetic construct
  source 1..21: mol_type = other RNA
cctaatctaacatgttacaaa

SEQ ID NO: 80510 - RNA, 21 nt, synthetic construct
  source 1..21: mol_type = other RNA
cctaatctctaggcttaaaat

SEQ ID NO: 80511 - RNA, 21 nt, synthetic construct
  source 1..21: mol_type = other RNA
cctaatgggcgtggagcggtg

SEQ ID NO: 80512 - RNA, 21 nt, synthetic construct
  source 1..21: mol_type = other RNA
cctaatgtgtaagaaatgcca

SEQ ID NO: 80513 - RNA, 21 nt, synthetic construct
  source 1..21: mol_type = other RNA
cctaattgtacacctcaaact

SEQ ID NO: 80514 - RNA, 21 nt, synthetic construct
  source 1..21: mol_type = other RNA
cctacacatatctttaggtgt

SEQ ID NO: 80515 - RNA, 21 nt, synthetic construct
  source 1..21: mol_type = other RNA
cctacacccagttcaccagtt

SEQ ID NO: 80516 - RNA, 21 nt, synthetic construct
  source 1..21: mol_type = other RNA
cctacacccatccacccactt

SEQ ID NO: 80517 - RNA, 21 nt, synthetic construct
  source 1..21: mol_type = other RNA
cctacagactcaataaccaca

SEQ ID NO: 80518 - RNA, 21 nt, synthetic construct
  source 1..21: mol_type = other RNA
cctacagtggttccatttgtt

SEQ ID NO: 80519 - RNA, 21 nt, synthetic construct
  source 1..21: mol_type = other RNA
cctacatactgcactctcaaa

SEQ ID NO: 80520 - RNA, 21 nt, synthetic construct
  source 1..21: mol_type = other RNA
cctacatagtccactttccat

SEQ ID NO: 80521 - RNA, 21 nt, synthetic construct
  source 1..21: mol_type = other RNA
cctacatatggcaattccata

SEQ ID NO: 80522 - RNA, 21 nt, synthetic construct
  source 1..21: mol_type = other RNA
cctacattaatctcatccaca

SEQ ID NO: 80523 - RNA, 21 nt, synthetic construct
  source 1..21: mol_type = other RNA
cctacattgccttcaagttgc

SEQ ID NO: 80524 - RNA, 21 nt, synthetic construct
  source 1..21: mol_type = other RNA
cctaccacccgtccaatttct

SEQ ID NO: 80525 - RNA, 21 nt, synthetic construct
  source 1..21: mol_type = other RNA
cctacccaagcttaggtcaga

SEQ ID NO: 80526 - RNA, 21 nt, synthetic construct
  source 1..21: mol_type = other RNA
cctaccctgaggatataacga

SEQ ID NO: 80527 - RNA, 21 nt, synthetic construct
  source 1..21: mol_type = other RNA
cctaccctgccttccttgggc

SEQ ID NO: 80528 - RNA, 21 nt, synthetic construct
  source 1..21: mol_type = other RNA
cctacctaaaaagggagtcag

SEQ ID NO: 80529 - RNA, 21 nt, synthetic construct
  source 1..21: mol_type = other RNA
cctacctagggtgtaaaaggc

SEQ ID NO: 80530 - RNA, 21 nt, synthetic construct
  source 1..21: mol_type = other RNA
cctacctcccttcacaaagcc

SEQ ID NO: 80531 - RNA, 21 nt, synthetic construct
  source 1..21: mol_type = other RNA
cctacctggcagtctaggaaa

SEQ ID NO: 80532 - RNA, 21 nt, synthetic construct
  source 1..21: mol_type = other RNA
cctaccttccaaagtatgcat

SEQ ID NO: 80533 - RNA, 21 nt, synthetic construct
  source 1..21: mol_type = other RNA
cctactaaaagttgacaaatt

SEQ ID NO: 80534 - RNA, 21 nt, synthetic construct
  source 1..21: mol_type = other RNA
cctactaacaagaaagggtag

SEQ ID NO: 80535 - RNA, 21 nt, synthetic construct
  source 1..21: mol_type = other RNA
cctactagccagtgattggat

SEQ ID NO: 80536 - RNA, 21 nt, synthetic construct
  source 1..21: mol_type = other RNA
cctactagtatttattaaacc

SEQ ID NO: 80537 - RNA, 21 nt, synthetic construct
  source 1..21: mol_type = other RNA
cctactcactgaaaccctcac

SEQ ID NO: 80538 - RNA, 21 nt, synthetic construct
  source 1..21: mol_type = other RNA
cctactgctctgtcctgtcag

SEQ ID NO: 80539 - RNA, 21 nt, synthetic construct
  source 1..21: mol_type = other RNA
cctactttaaatcagggcctt

SEQ ID NO: 80540 - RNA, 21 nt, synthetic construct
  source 1..21: mol_type = other RNA
cctactttcttcaaccatact

SEQ ID NO: 80541 - RNA, 21 nt, synthetic construct
  source 1..21: mol_type = other RNA
cctactttttgtcacacggaa

SEQ ID NO: 80542 - RNA, 21 nt, synthetic construct
  source 1..21: mol_type = other RNA
cctagaaaaacaccaaaaaag

SEQ ID NO: 80543 - RNA, 21 nt, synthetic construct
  source 1..21: mol_type = other RNA
cctagaaaatcatacattttc

SEQ ID NO: 80544 - RNA, 21 nt, synthetic construct
  source 1..21: mol_type = other RNA
cctagaaaggaattgtaatca

SEQ ID NO: 80545 - RNA, 21 nt, synthetic construct
  source 1..21: mol_type = other RNA
cctagaaatcatacacgagtg

SEQ ID NO: 80546 - RNA, 21 nt, synthetic construct
  source 1..21: mol_type = other RNA
cctagaagaaatgggtaaatt

SEQ ID NO: 80547 - RNA, 21 nt, synthetic construct
  source 1..21: mol_type = other RNA
cctagacctcaaattaatcag

SEQ ID NO: 80548 - RNA, 21 nt, synthetic construct
  source 1..21: mol_type = other RNA
cctagactgccaggtagggag

SEQ ID NO: 80549 - RNA, 21 nt, synthetic construct
  source 1..21: mol_type = other RNA
cctagagattaggcagaacca

SEQ ID NO: 80550 - RNA, 21 nt, synthetic construct
  source 1..21: mol_type = other RNA
cctagataagaaaatgtgaca

SEQ ID NO: 80551 - RNA, 21 nt, synthetic construct
  source 1..21: mol_type = other RNA
cctagatgattcgcattgcta

SEQ ID NO: 80552 - RNA, 21 nt, synthetic construct
  source 1..21: mol_type = other RNA
cctagattccctctggccttc

SEQ ID NO: 80553 - RNA, 21 nt, synthetic construct
  source 1..21: mol_type = other RNA
cctagattgaccttctactta

SEQ ID NO: 80554 - RNA, 21 nt, synthetic construct
  source 1..21: mol_type = other RNA
cctagatttcaatctggaatg

SEQ ID NO: 80555 - RNA, 21 nt, synthetic construct
  source 1..21: mol_type = other RNA
cctagcatgcagtagctcatc

SEQ ID NO: 80556 - RNA, 21 nt, synthetic construct
  source 1..21: mol_type = other RNA
cctagcccagcacttccattt

SEQ ID NO: 80557 - RNA, 21 nt, synthetic construct
  source 1..21: mol_type = other RNA
cctagccccaaatacctctga

SEQ ID NO: 80558 - RNA, 21 nt, synthetic construct
  source 1..21: mol_type = other RNA
cctagcctctctgggcttcac

SEQ ID NO: 80559 - RNA, 21 nt, synthetic construct
  source 1..21: mol_type = other RNA
cctagctacttgggaggctga

SEQ ID NO: 80560 - RNA, 21 nt, synthetic construct
  source 1..21: mol_type = other RNA
cctagctgacttttaaaatat

SEQ ID NO: 80561 - RNA, 21 nt, synthetic construct
  source 1..21: mol_type = other RNA
cctagctgttttcatgcgaca

SEQ ID NO: 80562 - RNA, 21 nt, synthetic construct
  source 1..21: mol_type = other RNA
cctaggcaagagagcaagact

SEQ ID NO: 80563 - RNA, 21 nt, synthetic construct
  source 1..21: mol_type = other RNA
cctaggcctattttaggctct

SEQ ID NO: 80564 - RNA, 21 nt, synthetic construct
  source 1..21: mol_type = other RNA
cctagggtgtaaaaggctaat

SEQ ID NO: 80565 - RNA, 21 nt, synthetic construct
  source 1..21: mol_type = other RNA
cctaggtagggttggggtatg

SEQ ID NO: 80566 - RNA, 21 nt, synthetic construct
  source 1..21: mol_type = other RNA
cctaggtgtgataactgatat

SEQ ID NO: 80567 - RNA, 21 nt, synthetic construct
  source 1..21: mol_type = other RNA
cctagtacgtaacctaaagtt

SEQ ID NO: 80568 - RNA, 21 nt, synthetic construct
  source 1..21: mol_type = other RNA
cctagtcatccactgcacagt

SEQ ID NO: 80569 - RNA, 21 nt, synthetic construct
  source 1..21: mol_type = other RNA
cctagtggatgctggggaccc

SEQ ID NO: 80570 - RNA, 21 nt, synthetic construct
  source 1..21: mol_type = other RNA
cctagtgtctccataccccct

SEQ ID NO: 80571 - RNA, 21 nt, synthetic construct
  source 1..21: mol_type = other RNA
cctagttttccaatccgggaa

SEQ ID NO: 80572 - RNA, 21 nt, synthetic construct
  source 1..21: mol_type = other RNA
cctataaaatgctggaaattt

SEQ ID NO: 80573 - RNA, 21 nt, synthetic construct
  source 1..21: mol_type = other RNA
cctataagacccagtggctag

SEQ ID NO: 80574 - RNA, 21 nt, synthetic construct
  source 1..21: mol_type = other RNA
cctataattcaattttcatgg

SEQ ID NO: 80575 - RNA, 21 nt, synthetic construct
  source 1..21: mol_type = other RNA
cctatactgtaaccctgtttc

SEQ ID NO: 80576 - RNA, 21 nt, synthetic construct
  source 1..21: mol_type = other RNA
cctatagaattcttcttctgt

SEQ ID NO: 80577 - RNA, 21 nt, synthetic construct
  source 1..21: mol_type = other RNA
cctatagacagcatccccaga

SEQ ID NO: 80578 - RNA, 21 nt, synthetic construct
  source 1..21: mol_type = other RNA
cctatagttaagtctgaaagc

SEQ ID NO: 80579 - RNA, 21 nt, synthetic construct
  source 1..21: mol_type = other RNA
cctatattgtcaatggggaac

SEQ ID NO: 80580 - RNA, 21 nt, synthetic construct
  source 1..21: mol_type = other RNA
cctatatttttccacataaag

SEQ ID NO: 80581 - RNA, 21 nt, synthetic construct
  source 1..21: mol_type = other RNA
cctatcagaagcacaccaagg

SEQ ID NO: 80582 - RNA, 21 nt, synthetic construct
  source 1..21: mol_type = other RNA
cctatcagagcatgtcccctg

SEQ ID NO: 80583 - RNA, 21 nt, synthetic construct
  source 1..21: mol_type = other RNA
cctatcattgcaccactgcac

SEQ ID NO: 80584 - RNA, 21 nt, synthetic construct
  source 1..21: mol_type = other RNA
cctatctaagcctactgctct

SEQ ID NO: 80585 - RNA, 21 nt, synthetic construct
  source 1..21: mol_type = other RNA
cctatctattaacagaagggt

SEQ ID NO: 80586 - RNA, 21 nt, synthetic construct
  source 1..21: mol_type = other RNA
cctatgaaaatttagcttctg

SEQ ID NO: 80587 - RNA, 21 nt, synthetic construct
  source 1..21: mol_type = other RNA
cctatgaaatcttgaagatgg

SEQ ID NO: 80588 - RNA, 21 nt, synthetic construct
  source 1..21: mol_type = other RNA
cctatgaataggtgtgtgttc

SEQ ID NO: 80589 - RNA, 21 nt, synthetic construct
  source 1..21: mol_type = other RNA
cctatgcaataactcaaaatg

SEQ ID NO: 80590 - RNA, 21 nt, synthetic construct
  source 1..21: mol_type = other RNA
cctatgccttcagtatgaatg

SEQ ID NO: 80591 - RNA, 21 nt, synthetic construct
  source 1..21: mol_type = other RNA
cctatgtaagacaatgtcttt

SEQ ID NO: 80592 - RNA, 21 nt, synthetic construct
  source 1..21: mol_type = other RNA
cctatgtggggaatgctcata

SEQ ID NO: 80593 - RNA, 21 nt, synthetic construct
  source 1..21: mol_type = other RNA
cctattatttagagtttgcat

SEQ ID NO: 80594 - RNA, 21 nt, synthetic construct
  source 1..21: mol_type = other RNA
cctattcaacctataagaccc

SEQ ID NO: 80595 - RNA, 21 nt, synthetic construct
  source 1..21: mol_type = other RNA
cctattcacactgctcctgcc

SEQ ID NO: 80596 - RNA, 21 nt, synthetic construct
  source 1..21: mol_type = other RNA
cctattcataggtaatactct

SEQ ID NO: 80597 - RNA, 21 nt, synthetic construct
  source 1..21: mol_type = other RNA
cctattctggggctcaagtaa

SEQ ID NO: 80598 - RNA, 21 nt, synthetic construct
  source 1..21: mol_type = other RNA
cctattgtttaaaaacaacac

SEQ ID NO: 80599 - RNA, 21 nt, synthetic construct
  source 1..21: mol_type = other RNA
cctatttagagggatgaatgt

SEQ ID NO: 80600 - RNA, 21 nt, synthetic construct
  source 1..21: mol_type = other RNA
cctatttatgttgcacaaaag

SEQ ID NO: 80601 - RNA, 21 nt, synthetic construct
  source 1..21: mol_type = other RNA
cctattttaggctctgtggtt

SEQ ID NO: 80602 - RNA, 21 nt, synthetic construct
  source 1..21: mol_type = other RNA
cctattttataatgggcaatc

SEQ ID NO: 80603 - RNA, 21 nt, synthetic construct
  source 1..21: mol_type = other RNA
cctattttctacaggtatatt

SEQ ID NO: 80604 - RNA, 21 nt, synthetic construct
  source 1..21: mol_type = other RNA
cctattttgttattagggtaa

SEQ ID NO: 80605 - RNA, 21 nt, synthetic construct
  source 1..21: mol_type = other RNA
cctcaaaagatgcagaaaaag

SEQ ID NO: 80606 - RNA, 21 nt, synthetic construct
  source 1..21: mol_type = other RNA
cctcaaaatcaacattgcctc

SEQ ID NO: 80607 - RNA, 21 nt, synthetic construct
  source 1..21: mol_type = other RNA
cctcaaaatttagtaagggta

SEQ ID NO: 80608 - RNA, 21 nt, synthetic construct
  source 1..21: mol_type = other RNA
cctcaaacgaaccaattacca

SEQ ID NO: 80609 - RNA, 21 nt, synthetic construct
  source 1..21: mol_type = other RNA
cctcaaactagaaaaagaata

SEQ ID NO: 80610 - RNA, 21 nt, synthetic construct
  source 1..21: mol_type = other RNA
cctcaaaggagagaagagggg

SEQ ID NO: 80611 - RNA, 21 nt, synthetic construct
  source 1..21: mol_type = other RNA
cctcaaagtggaaacaactca

SEQ ID NO: 80612 - RNA, 21 nt, synthetic construct
  source 1..21: mol_type = other RNA
cctcaaatgccatagagcttt

SEQ ID NO: 80613 - RNA, 21 nt, synthetic construct
  source 1..21: mol_type = other RNA
cctcaaatgtctcattgtgga

SEQ ID NO: 80614 - RNA, 21 nt, synthetic construct
  source 1..21: mol_type = other RNA
cctcaaattaatcagtctgta

SEQ ID NO: 80615 - RNA, 21 nt, synthetic construct
  source 1..21: mol_type = other RNA
cctcaaattagtcatagcagt

SEQ ID NO: 80616 - RNA, 21 nt, synthetic construct
  source 1..21: mol_type = other RNA
cctcaaattctgagggaaatt

SEQ ID NO: 80617 - RNA, 21 nt, synthetic construct
  source 1..21: mol_type = other RNA
cctcaaattgtgtgttctctt

SEQ ID NO: 80618 - RNA, 21 nt, synthetic construct
  source 1..21: mol_type = other RNA
cctcaaatttcatttactgaa

SEQ ID NO: 80619 - RNA, 21 nt, synthetic construct
  source 1..21: mol_type = other RNA
cctcaacaagagaggacagtt

SEQ ID NO: 80620 - RNA, 21 nt, synthetic construct
  source 1..21: mol_type = other RNA
cctcaacagcacttttgtact

SEQ ID NO: 80621 - RNA, 21 nt, synthetic construct
  source 1..21: mol_type = other RNA
cctcaactttaggttacgtac

SEQ ID NO: 80622 - RNA, 21 nt, synthetic construct
  source 1..21: mol_type = other RNA
cctcaaggcagaacacactgc

SEQ ID NO: 80623 - RNA, 21 nt, synthetic construct
  source 1..21: mol_type = other RNA
cctcaaggccaactgtcctct

SEQ ID NO: 80624 - RNA, 21 nt, synthetic construct
  source 1..21: mol_type = other RNA
cctcaagtcttttcctagact

SEQ ID NO: 80625 - RNA, 21 nt, synthetic construct
  source 1..21: mol_type = other RNA
cctcaagtgatgcaactcctg

SEQ ID NO: 80626 - RNA, 21 nt, synthetic construct
  source 1..21: mol_type = other RNA
cctcaatcatgtcaagaatga

SEQ ID NO: 80627 - RNA, 21 nt, synthetic construct
  source 1..21: mol_type = other RNA
cctcaatccccatctgggata

SEQ ID NO: 80628 - RNA, 21 nt, synthetic construct
  source 1..21: mol_type = other RNA
cctcacaacaggcctgagccg

SEQ ID NO: 80629 - RNA, 21 nt, synthetic construct
  source 1..21: mol_type = other RNA
cctcacagtcacaaagcttta

SEQ ID NO: 80630 - RNA, 21 nt, synthetic construct
  source 1..21: mol_type = other RNA
cctcacagtccactcacctgt

SEQ ID NO: 80631 - RNA, 21 nt, synthetic construct
  source 1..21: mol_type = other RNA
cctcacatcagttaccaccaa

SEQ ID NO: 80632 - RNA, 21 nt, synthetic construct
  source 1..21: mol_type = other RNA
cctcacatgtttggtcaattg

SEQ ID NO: 80633 - RNA, 21 nt, synthetic construct
  source 1..21: mol_type = other RNA
cctcacattcacagcgtgcac

SEQ ID NO: 80634 - RNA, 21 nt, synthetic construct
  source 1..21: mol_type = other RNA
cctcacctcacattcacagcg

SEQ ID NO: 80635 - RNA, 21 nt, synthetic construct
  source 1..21: mol_type = other RNA
cctcaccttctgctgggccca

SEQ ID NO: 80636 - RNA, 21 nt, synthetic construct
  source 1..21: mol_type = other RNA
cctcacgaaagcggtcaacgc

SEQ ID NO: 80637 - RNA, 21 nt, synthetic construct
  source 1..21: mol_type = other RNA
cctcactaagtcagaattcac

SEQ ID NO: 80638 - RNA, 21 nt, synthetic construct
  source 1..21: mol_type = other RNA
cctcactgtgatacctagtac

SEQ ID NO: 80639 - RNA, 21 nt, synthetic construct
  source 1..21: mol_type = other RNA
cctcagaaggccaaggcagga

SEQ ID NO: 80640 - RNA, 21 nt, synthetic construct
  source 1..21: mol_type = other RNA
cctcagaattaatataagatg

SEQ ID NO: 80641 - RNA, 21 nt, synthetic construct
  source 1..21: mol_type = other RNA
cctcagaatttgaggtcttct

SEQ ID NO: 80642 - RNA, 21 nt, synthetic construct
  source 1..21: mol_type = other RNA
cctcagcaaaagcaattatta

SEQ ID NO: 80643 - RNA, 21 nt, synthetic construct
  source 1..21: mol_type = other RNA
cctcagcatgtcttcagaggc

SEQ ID NO: 80644 - RNA, 21 nt, synthetic construct
  source 1..21: mol_type = other RNA
cctcagccccctccctaccac

SEQ ID NO: 80645 - RNA, 21 nt, synthetic construct
  source 1..21: mol_type = other RNA
cctcagccgccgcagaggcca

SEQ ID NO: 80646 - RNA, 21 nt, synthetic construct
  source 1..21: mol_type = other RNA
cctcagcctcccgagtagttg

SEQ ID NO: 80647 - RNA, 21 nt, synthetic construct
  source 1..21: mol_type = other RNA
cctcagcctcccgagtatcta

SEQ ID NO: 80648 - RNA, 21 nt, synthetic construct
  source 1..21: mol_type = other RNA
cctcaggaccaggcagtcctc

SEQ ID NO: 80649 - RNA, 21 nt, synthetic construct
  source 1..21: mol_type = other RNA
cctcaggactctgctcaaagg

SEQ ID NO: 80650 - RNA, 21 nt, synthetic construct
  source 1..21: mol_type = other RNA
cctcaggatctacattaaaaa

SEQ ID NO: 80651 - RNA, 21 nt, synthetic construct
  source 1..21: mol_type = other RNA
cctcaggcagtctagtccatg

SEQ ID NO: 80652 - RNA, 21 nt, synthetic construct
  source 1..21: mol_type = other RNA
cctcaggctccaggtagaatg

SEQ ID NO: 80653 - RNA, 21 nt, synthetic construct
  source 1..21: mol_type = other RNA
cctcagggtaggaaaagactt

SEQ ID NO: 80654 - RNA, 21 nt, synthetic construct
  source 1..21: mol_type = other RNA
cctcaggtgtcactggataga

SEQ ID NO: 80655 - RNA, 21 nt, synthetic construct
  source 1..21: mol_type = other RNA
cctcaggtttagaatatattt

SEQ ID NO: 80656 - RNA, 21 nt, synthetic construct
  source 1..21: mol_type = other RNA
cctcagtggtagttacacaag

SEQ ID NO: 80657 - RNA, 21 nt, synthetic construct
  source 1..21: mol_type = other RNA
cctcagttaaacccaacaaac

SEQ ID NO: 80658 - RNA, 21 nt, synthetic construct
  source 1..21: mol_type = other RNA
cctcagttgacatcctttaat

SEQ ID NO: 80659 - RNA, 21 nt, synthetic construct
  source 1..21: mol_type = other RNA
cctcataagaactcctggtct

SEQ ID NO: 80660 - RNA, 21 nt, synthetic construct
  source 1..21: mol_type = other RNA
cctcatatcagttatcacacc

SEQ ID NO: 80661 - RNA, 21 nt, synthetic construct
  source 1..21: mol_type = other RNA
cctcatccctcatatcagtta

SEQ ID NO: 80662 - RNA, 21 nt, synthetic construct
  source 1..21: mol_type = other RNA
cctcatccggtctcagttttt

SEQ ID NO: 80663 - RNA, 21 nt, synthetic construct
  source 1..21: mol_type = other RNA
cctcatcctccgtagctgtcg

SEQ ID NO: 80664 - RNA, 21 nt, synthetic construct
  source 1..21: mol_type = other RNA
cctcatctctgcaaaacattt

SEQ ID NO: 80665 - RNA, 21 nt, synthetic construct
  source 1..21: mol_type = other RNA
cctcatcttagccgggaggag

SEQ ID NO: 80666 - RNA, 21 nt, synthetic construct
  source 1..21: mol_type = other RNA
cctcatgcatccacattttgt

SEQ ID NO: 80667 - RNA, 21 nt, synthetic construct
  source 1..21: mol_type = other RNA
cctcatgtaactaattactgt

SEQ ID NO: 80668 - RNA, 21 nt, synthetic construct
  source 1..21: mol_type = other RNA
cctcatgtattttcctaacca

SEQ ID NO: 80669 - RNA, 21 nt, synthetic construct
  source 1..21: mol_type = other RNA
cctcatgtccatagttaatgt

SEQ ID NO: 80670 - RNA, 21 nt, synthetic construct
  source 1..21: mol_type = other RNA
cctcattcacactagtcaccc

SEQ ID NO: 80671 - RNA, 21 nt, synthetic construct
  source 1..21: mol_type = other RNA
cctcattgaagctactattcc

SEQ ID NO: 80672 - RNA, 21 nt, synthetic construct
  source 1..21: mol_type = other RNA
cctcatttgaactttccagaa

SEQ ID NO: 80673 - RNA, 21 nt, synthetic construct
  source 1..21: mol_type = other RNA
cctcatttgcagagcaaactc

SEQ ID NO: 80674 - RNA, 21 nt, synthetic construct
  source 1..21: mol_type = other RNA
cctcattttataagggtgata

SEQ ID NO: 80675 - RNA, 21 nt, synthetic construct
  source 1..21: mol_type = other RNA
cctccaacccattccaggttt

SEQ ID NO: 80676 - RNA, 21 nt, synthetic construct
  source 1..21: mol_type = other RNA
cctccaaggctgcccgctccg

SEQ ID NO: 80677 - RNA, 21 nt, synthetic construct
  source 1..21: mol_type = other RNA
cctccaatgtttttaattctt

SEQ ID NO: 80678 - RNA, 21 nt, synthetic construct
  source 1..21: mol_type = other RNA
cctccacacctggcccctttc

SEQ ID NO: 80679 - RNA, 21 nt, synthetic construct
  source 1..21: mol_type = other RNA
cctccacaggctttgacttct

SEQ ID NO: 80680 - RNA, 21 nt, synthetic construct
  source 1..21: mol_type = other RNA
cctccagaaaaccagaaaagt

SEQ ID NO: 80681 - RNA, 21 nt, synthetic construct
  source 1..21: mol_type = other RNA
cctccagccttaatctcctga

SEQ ID NO: 80682 - RNA, 21 nt, synthetic construct
  source 1..21: mol_type = other RNA
cctccagcgctaagcactgcg

SEQ ID NO: 80683 - RNA, 21 nt, synthetic construct
  source 1..21: mol_type = other RNA
cctccaggatccagtctctac

SEQ ID NO: 80684 - RNA, 21 nt, synthetic construct
  source 1..21: mol_type = other RNA
cctccaggttcatccatgttg

SEQ ID NO: 80685 - RNA, 21 nt, synthetic construct
  source 1..21: mol_type = other RNA
cctccagtccagcaccaccct

SEQ ID NO: 80686 - RNA, 21 nt, synthetic construct
  source 1..21: mol_type = other RNA
cctccagtgtcctgaatgatt

SEQ ID NO: 80687 - RNA, 21 nt, synthetic construct
  source 1..21: mol_type = other RNA
cctccatatgggatgcttaaa

SEQ ID NO: 80688 - RNA, 21 nt, synthetic construct
  source 1..21: mol_type = other RNA
cctccatcactgactggctgt

SEQ ID NO: 80689 - RNA, 21 nt, synthetic construct
  source 1..21: mol_type = other RNA
cctccatggaaactacaatta

SEQ ID NO: 80690 - RNA, 21 nt, synthetic construct
  source 1..21: mol_type = other RNA
cctccatttccctgcttcatc

SEQ ID NO: 80691 - RNA, 21 nt, synthetic construct
  source 1..21: mol_type = other RNA
cctcccaaaggactgggatcc

SEQ ID NO: 80692 - RNA, 21 nt, synthetic construct
  source 1..21: mol_type = other RNA
cctcccaacaggctgagtgcg

SEQ ID NO: 80693 - RNA, 21 nt, synthetic construct
  source 1..21: mol_type = other RNA
cctcccacctcagccccacaa

SEQ ID NO: 80694 - RNA, 21 nt, synthetic construct
  source 1..21: mol_type = other RNA
cctcccacttacatcagcagt

SEQ ID NO: 80695 - RNA, 21 nt, synthetic construct
  source 1..21: mol_type = other RNA
cctcccatgcattcgtcccta

SEQ ID NO: 80696 - RNA, 21 nt, synthetic construct
  source 1..21: mol_type = other RNA
cctcccccgggacaatgccag

SEQ ID NO: 80697 - RNA, 21 nt, synthetic construct
  source 1..21: mol_type = other RNA
cctcccgagtagttgtaacta

SEQ ID NO: 80698 - RNA, 21 nt, synthetic construct
  source 1..21: mol_type = other RNA
cctcccgagtatctaggagta

SEQ ID NO: 80699 - RNA, 21 nt, synthetic construct
  source 1..21: mol_type = other RNA
cctcccggctaagatgaggtc

SEQ ID NO: 80700 - RNA, 21 nt, synthetic construct
  source 1..21: mol_type = other RNA
cctcccgggtccaggcagttc

SEQ ID NO: 80701 - RNA, 21 nt, synthetic construct
  source 1..21: mol_type = other RNA
cctcccgggtttaagcgattc

SEQ ID NO: 80702 - RNA, 21 nt, synthetic construct
  source 1..21: mol_type = other RNA
cctccctaccacccgtccaat

SEQ ID NO: 80703 - RNA, 21 nt, synthetic construct
  source 1..21: mol_type = other RNA
cctccctacctggcagtctag

SEQ ID NO: 80704 - RNA, 21 nt, synthetic construct
  source 1..21: mol_type = other RNA
cctccctcactaagtcagaat

SEQ ID NO: 80705 - RNA, 21 nt, synthetic construct
  source 1..21: mol_type = other RNA
cctccctccccccacggtctc

SEQ ID NO: 80706 - RNA, 21 nt, synthetic construct
  source 1..21: mol_type = other RNA
cctccctgctttaaaacactg

SEQ ID NO: 80707 - RNA, 21 nt, synthetic construct
  source 1..21: mol_type = other RNA
cctccctggagaggcaaaggc

SEQ ID NO: 80708 - RNA, 21 nt, synthetic construct
  source 1..21: mol_type = other RNA
cctccctggttcaagctatgc

SEQ ID NO: 80709 - RNA, 21 nt, synthetic construct
  source 1..21: mol_type = other RNA
cctcccttcacaaagccctca

SEQ ID NO: 80710 - RNA, 21 nt, synthetic construct
  source 1..21: mol_type = other RNA
cctcccttcagcctgtgtcag

SEQ ID NO: 80711 - RNA, 21 nt, synthetic construct
  source 1..21: mol_type = other RNA
cctccgcctccctggttcaag

SEQ ID NO: 80712 - RNA, 21 nt, synthetic construct
  source 1..21: mol_type = other RNA
cctccgtagctgtcgctctcc

SEQ ID NO: 80713 - RNA, 21 nt, synthetic construct
  source 1..21: mol_type = other RNA
cctccgtttttcaggttcaag

SEQ ID NO: 80714 - RNA, 21 nt, synthetic construct
  source 1..21: mol_type = other RNA
cctcctaagttttgggggaag

SEQ ID NO: 80715 - RNA, 21 nt, synthetic construct
  source 1..21: mol_type = other RNA
cctcctaccttccaaagtatg

SEQ ID NO: 80716 - RNA, 21 nt, synthetic construct
  source 1..21: mol_type = other RNA
cctcctagattgaccttctac

SEQ ID NO: 80717 - RNA, 21 nt, synthetic construct
  source 1..21: mol_type = other RNA
cctcctcccacttacatcagc

SEQ ID NO: 80718 - RNA, 21 nt, synthetic construct
  source 1..21: mol_type = other RNA
cctcctccggggacccagtgc

SEQ ID NO: 80719 - RNA, 21 nt, synthetic construct
  source 1..21: mol_type = other RNA
cctcctcctcctggccacatg

SEQ ID NO: 80720 - RNA, 21 nt, synthetic construct
  source 1..21: mol_type = other RNA
cctcctcctctacaagtttta

SEQ ID NO: 80721 - RNA, 21 nt, synthetic construct
  source 1..21: mol_type = other RNA
cctcctcctggccacatgctt

SEQ ID NO: 80722 - RNA, 21 nt, synthetic construct
  source 1..21: mol_type = other RNA
cctcctctacaagttttaact

SEQ ID NO: 80723 - RNA, 21 nt, synthetic construct
  source 1..21: mol_type = other RNA
cctcctctggacattatccta

SEQ ID NO: 80724 - RNA, 21 nt, synthetic construct
  source 1..21: mol_type = other RNA
cctcctctggccctccatttc

SEQ ID NO: 80725 - RNA, 21 nt, synthetic construct
  source 1..21: mol_type = other RNA
cctcctgccttcctgacctct

SEQ ID NO: 80726 - RNA, 21 nt, synthetic construct
  source 1..21: mol_type = other RNA
cctcctgccttggccttctga

SEQ ID NO: 80727 - RNA, 21 nt, synthetic construct
  source 1..21: mol_type = other RNA
cctcctggccacatgcttcca

SEQ ID NO: 80728 - RNA, 21 nt, synthetic construct
  source 1..21: mol_type = other RNA
cctcctgggttcaggtgcctc

SEQ ID NO: 80729 - RNA, 21 nt, synthetic construct
  source 1..21: mol_type = other RNA
cctcctggtgggttcatgcca

SEQ ID NO: 80730 - RNA, 21 nt, synthetic construct
  source 1..21: mol_type = other RNA
cctcctggttttgatcatcgc

SEQ ID NO: 80731 - RNA, 21 nt, synthetic construct
  source 1..21: mol_type = other RNA
cctccttctgctcactttggg

SEQ ID NO: 80732 - RNA, 21 nt, synthetic construct
  source 1..21: mol_type = other RNA
cctcctttctagaatgcatcc

SEQ ID NO: 80733 - RNA, 21 nt, synthetic construct
  source 1..21: mol_type = other RNA
cctccttttgtagagggaatt

SEQ ID NO: 80734 - RNA, 21 nt, synthetic construct
  source 1..21: mol_type = other RNA
cctcctttttatcacccttat

SEQ ID NO: 80735 - RNA, 21 nt, synthetic construct
  source 1..21: mol_type = other RNA
cctcgaagagaccacaggctc

SEQ ID NO: 80736 - RNA, 21 nt, synthetic construct
  source 1..21: mol_type = other RNA
cctcgaagcacaaccactgat

SEQ ID NO: 80737 - RNA, 21 nt, synthetic construct
  source 1..21: mol_type = other RNA
cctcgaaggcctgcttcattc

SEQ ID NO: 80738 - RNA, 21 nt, synthetic construct
  source 1..21: mol_type = other RNA
cctcgagtaaaaagaatgaat

SEQ ID NO: 80739 - RNA, 21 nt, synthetic construct
  source 1..21: mol_type = other RNA
cctcgctcttggcttttggca

SEQ ID NO: 80740 - RNA, 21 nt, synthetic construct
  source 1..21: mol_type = other RNA
cctcggcacagctctcatgag

SEQ ID NO: 80741 - RNA, 21 nt, synthetic construct
  source 1..21: mol_type = other RNA
cctcggccaaccattactctt

SEQ ID NO: 80742 - RNA, 21 nt, synthetic construct
  source 1..21: mol_type = other RNA
cctcggccacagcagggctcc

SEQ ID NO: 80743 - RNA, 21 nt, synthetic construct
  source 1..21: mol_type = other RNA
cctcggcctctactgactccc

SEQ ID NO: 80744 - RNA, 21 nt, synthetic construct
  source 1..21: mol_type = other RNA
cctcgggttcaagccccagtt

SEQ ID NO: 80745 - RNA, 21 nt, synthetic construct
  source 1..21: mol_type = other RNA
cctcggtctacggacgcaggc

SEQ ID NO: 80746 - RNA, 21 nt, synthetic construct
  source 1..21: mol_type = other RNA
cctcgtaaaagctaatctact

SEQ ID NO: 80747 - RNA, 21 nt, synthetic construct
  source 1..21: mol_type = other RNA
cctcgttttcaacaaaggttg

SEQ ID NO: 80748 - RNA, 21 nt, synthetic construct
  source 1..21: mol_type = other RNA
cctctaaataggtattcatgc

SEQ ID NO: 80749 - RNA, 21 nt, synthetic construct
  source 1..21: mol_type = other RNA
cctctaagtcagcctgggcac

SEQ ID NO: 80750 - RNA, 21 nt, synthetic construct
  source 1..21: mol_type = other RNA
cctctaatcaggttgggctta

SEQ ID NO: 80751 - RNA, 21 nt, synthetic construct
  source 1..21: mol_type = other RNA
cctctacaaaaggaggaacta

SEQ ID NO: 80752 - RNA, 21 nt, synthetic construct
  source 1..21: mol_type = other RNA
cctctacaagttttaacttaa

SEQ ID NO: 80753 - RNA, 21 nt, synthetic construct
  source 1..21: mol_type = other RNA
cctctacacaaaaatccagat

SEQ ID NO: 80754 - RNA, 21 nt, synthetic construct
  source 1..21: mol_type = other RNA
cctctacatcacagacaggga

SEQ ID NO: 80755 - RNA, 21 nt, synthetic construct
  source 1..21: mol_type = other RNA
cctctactgactcccttttta

SEQ ID NO: 80756 - RNA, 21 nt, synthetic construct
  source 1..21: mol_type = other RNA
cctctactttcacataaggta

SEQ ID NO: 80757 - RNA, 21 nt, synthetic construct
  source 1..21: mol_type = other RNA
cctctagctccccattccctg

SEQ ID NO: 80758 - RNA, 21 nt, synthetic construct
  source 1..21: mol_type = other RNA
cctctataattctgccttcaa

SEQ ID NO: 80759 - RNA, 21 nt, synthetic construct
  source 1..21: mol_type = other RNA
cctctatggcaggcaccttca

SEQ ID NO: 80760 - RNA, 21 nt, synthetic construct
  source 1..21: mol_type = other RNA
cctctattaaatcatgatgtt

SEQ ID NO: 80761 - RNA, 21 nt, synthetic construct
  source 1..21: mol_type = other RNA
cctctatttttgtctggtgga

SEQ ID NO: 80762 - RNA, 21 nt, synthetic construct
  source 1..21: mol_type = other RNA
cctctcaacacttcagtggta

SEQ ID NO: 80763 - RNA, 21 nt, synthetic construct
  source 1..21: mol_type = other RNA
cctctcactccaaagcaaacg

SEQ ID NO: 80764 - RNA, 21 nt, synthetic construct
  source 1..21: mol_type = other RNA
cctctcagtggtgcttttgct

SEQ ID NO: 80765 - RNA, 21 nt, synthetic construct
  source 1..21: mol_type = other RNA
cctctccagggaggaatcctt

SEQ ID NO: 80766 - RNA, 21 nt, synthetic construct
  source 1..21: mol_type = other RNA
cctctcccaccatctctctgc

SEQ ID NO: 80767 - RNA, 21 nt, synthetic construct
  source 1..21: mol_type = other RNA
cctctccccttgacgaagtca

SEQ ID NO: 80768 - RNA, 21 nt, synthetic construct
  source 1..21: mol_type = other RNA
cctctccgggtaaaaagcctg

SEQ ID NO: 80769 - RNA, 21 nt, synthetic construct
  source 1..21: mol_type = other RNA
cctctctctttctggggatgc

SEQ ID NO: 80770 - RNA, 21 nt, synthetic construct
  source 1..21: mol_type = other RNA
cctctctgatggaacggctta

SEQ ID NO: 80771 - RNA, 21 nt, synthetic construct
  source 1..21: mol_type = other RNA
cctctctgggcttcactttcg

SEQ ID NO: 80772 - RNA, 21 nt, synthetic construct
  source 1..21: mol_type = other RNA
cctctcttaaatccgagacaa

SEQ ID NO: 80773 - RNA, 21 nt, synthetic construct
  source 1..21: mol_type = other RNA
cctctcttggaatgtgcacct

SEQ ID NO: 80774 - RNA, 21 nt, synthetic construct
  source 1..21: mol_type = other RNA
cctctcttgttgaggatgact

SEQ ID NO: 80775 - RNA, 21 nt, synthetic construct
  source 1..21: mol_type = other RNA
cctctgaagacatgctgaggc

SEQ ID NO: 80776 - RNA, 21 nt, synthetic construct
  source 1..21: mol_type = other RNA
cctctgaagagtctatctttg

SEQ ID NO: 80777 - RNA, 21 nt, synthetic construct
  source 1..21: mol_type = other RNA
cctctgactttatggtatcac

SEQ ID NO: 80778 - RNA, 21 nt, synthetic construct
  source 1..21: mol_type = other RNA
cctctgagagaagtcagacta

SEQ ID NO: 80779 - RNA, 21 nt, synthetic construct
  source 1..21: mol_type = other RNA
cctctgcagttagcatgcctg

SEQ ID NO: 80780 - RNA, 21 nt, synthetic construct
  source 1..21: mol_type = other RNA
cctctgcggcggctgaggcag

SEQ ID NO: 80781 - RNA, 21 nt, synthetic construct
  source 1..21: mol_type = other RNA
cctctggaaaggacttgatct

SEQ ID NO: 80782 - RNA, 21 nt, synthetic construct
  source 1..21: mol_type = other RNA
cctctggaatgcccatcctct

SEQ ID NO: 80783 - RNA, 21 nt, synthetic construct
  source 1..21: mol_type = other RNA
cctctggacattatcctatca

SEQ ID NO: 80784 - RNA, 21 nt, synthetic construct
  source 1..21: mol_type = other RNA
cctctggactcagggtcactt

SEQ ID NO: 80785 - RNA, 21 nt, synthetic construct
  source 1..21: mol_type = other RNA
cctctggccctccatttccct

SEQ ID NO: 80786 - RNA, 21 nt, synthetic construct
  source 1..21: mol_type = other RNA
cctctggccttctatattttt

SEQ ID NO: 80787 - RNA, 21 nt, synthetic construct
  source 1..21: mol_type = other RNA
cctctggctgacctggtactc

SEQ ID NO: 80788 - RNA, 21 nt, synthetic construct
  source 1..21: mol_type = other RNA
cctctgggatgctcagtttca

SEQ ID NO: 80789 - RNA, 21 nt, synthetic construct
  source 1..21: mol_type = other RNA
cctctggtattttaagattct

SEQ ID NO: 80790 - RNA, 21 nt, synthetic construct
  source 1..21: mol_type = other RNA
cctctgtagataaacgttaac

SEQ ID NO: 80791 - RNA, 21 nt, synthetic construct
  source 1..21: mol_type = other RNA
cctctgtcaccaggctggaat

SEQ ID NO: 80792 - RNA, 21 nt, synthetic construct
  source 1..21: mol_type = other RNA
cctctgtgctagccttcttgg

SEQ ID NO: 80793 - RNA, 21 nt, synthetic construct
  source 1..21: mol_type = other RNA
cctctgtggaccatgttttag

SEQ ID NO: 80794 - RNA, 21 nt, synthetic construct
  source 1..21: mol_type = other RNA
cctctgtgtgcatgcatgtct

SEQ ID NO: 80795 - RNA, 21 nt, synthetic construct
  source 1..21: mol_type = other RNA
cctctgttacagctcttctca

SEQ ID NO: 80796 - RNA, 21 nt, synthetic construct
  source 1..21: mol_type = other RNA
cctcttactaaaaagaaaaag

SEQ ID NO: 80797 - RNA, 21 nt, synthetic construct
  source 1..21: mol_type = other RNA
cctcttcaatattttggaaga

SEQ ID NO: 80798 - RNA, 21 nt, synthetic construct
  source 1..21: mol_type = other RNA
cctcttcagaagaggataagg

SEQ ID NO: 80799 - RNA, 21 nt, synthetic construct
  source 1..21: mol_type = other RNA
cctcttcccttgtgcacctcg

SEQ ID NO: 80800 - RNA, 21 nt, synthetic construct
  source 1..21: mol_type = other RNA
cctcttcctcatccctcatat

SEQ ID NO: 80801 - RNA, 21 nt, synthetic construct
  source 1..21: mol_type = other RNA
cctcttcctgttgctttaacc

SEQ ID NO: 80802 - RNA, 21 nt, synthetic construct
  source 1..21: mol_type = other RNA
cctcttcgctcttttaaaaat

SEQ ID NO: 80803 - RNA, 21 nt, synthetic construct
  source 1..21: mol_type = other RNA
cctcttcgggtgtcagaattc

SEQ ID NO: 80804 - RNA, 21 nt, synthetic construct
  source 1..21: mol_type = other RNA
cctcttctctcctttgaggta

SEQ ID NO: 80805 - RNA, 21 nt, synthetic construct
  source 1..21: mol_type = other RNA
cctcttctgaagaggctttct

SEQ ID NO: 80806 - RNA, 21 nt, synthetic construct
  source 1..21: mol_type = other RNA
cctcttgaagtcagttacagc

SEQ ID NO: 80807 - RNA, 21 nt, synthetic construct
  source 1..21: mol_type = other RNA
cctctttcatatctgattttg

SEQ ID NO: 80808 - RNA, 21 nt, synthetic construct
  source 1..21: mol_type = other RNA
cctctttctcaacttcctgtt

SEQ ID NO: 80809 - RNA, 21 nt, synthetic construct
  source 1..21: mol_type = other RNA
cctctttgctaataagtgagt

SEQ ID NO: 80810 - RNA, 21 nt, synthetic construct
  source 1..21: mol_type = other RNA
cctgaaaaacggaggttgcag

SEQ ID NO: 80811 - RNA, 21 nt, synthetic construct
  source 1..21: mol_type = other RNA
cctgaaaaatgagaaacctaa

SEQ ID NO: 80812 - RNA, 21 nt, synthetic construct
  source 1..21: mol_type = other RNA
cctgaaaagtgtattattcta

SEQ ID NO: 80813 - RNA, 21 nt, synthetic construct
  source 1..21: mol_type = other RNA
cctgaaaattccttccccttt

SEQ ID NO: 80814 - RNA, 21 nt, synthetic construct
  source 1..21: mol_type = other RNA
cctgaaatctgatttgtttag

SEQ ID NO: 80815 - RNA, 21 nt, synthetic construct
  source 1..21: mol_type = other RNA
cctgaaatgaaccaaacttgg

SEQ ID NO: 80816 - RNA, 21 nt, synthetic construct
  source 1..21: mol_type = other RNA
cctgaaatggcttaaggaaat

SEQ ID NO: 80817 - RNA, 21 nt, synthetic construct
  source 1..21: mol_type = other RNA
cctgaaattctcaaatgaaca

SEQ ID NO: 80818 - RNA, 21 nt, synthetic construct
  source 1..21: mol_type = other RNA
cctgaaattgtcagaaaagat

SEQ ID NO: 80819 - RNA, 21 nt, synthetic construct
  source 1..21: mol_type = other RNA
cctgaacaaaatttttgcaaa

SEQ ID NO: 80820 - RNA, 21 nt, synthetic construct
  source 1..21: mol_type = other RNA
cctgaacaatgattttcttaa

SEQ ID NO: 80821 - RNA, 21 nt, synthetic construct
  source 1..21: mol_type = other RNA
cctgaacccaggaggcaaagg

SEQ ID NO: 80822 - RNA, 21 nt, synthetic construct
  source 1..21: mol_type = other RNA
cctgaactcgtggcctcaagc

SEQ ID NO: 80823 - RNA, 21 nt, synthetic construct
  source 1..21: mol_type = other RNA
cctgaagactggatttgattg

SEQ ID NO: 80824 - RNA, 21 nt, synthetic construct
  source 1..21: mol_type = other RNA
cctgaagtctttggtgatcct

SEQ ID NO: 80825 - RNA, 21 nt, synthetic construct
  source 1..21: mol_type = other RNA
cctgaatacccctccctacct

SEQ ID NO: 80826 - RNA, 21 nt, synthetic construct
  source 1..21: mol_type = other RNA
cctgaatactattcctattgt

SEQ ID NO: 80827 - RNA, 21 nt, synthetic construct
  source 1..21: mol_type = other RNA
cctgaatgactgttgcctctg

SEQ ID NO: 80828 - RNA, 21 nt, synthetic construct
  source 1..21: mol_type = other RNA
cctgaatgatttccctgcata

SEQ ID NO: 80829 - RNA, 21 nt, synthetic construct
  source 1..21: mol_type = other RNA
cctgaattctaacattatctt

SEQ ID NO: 80830 - RNA, 21 nt, synthetic construct
  source 1..21: mol_type = other RNA
cctgaattctaatgaactccc

SEQ ID NO: 80831 - RNA, 21 nt, synthetic construct
  source 1..21: mol_type = other RNA
cctgacaaagtatgagaaatg

SEQ ID NO: 80832 - RNA, 21 nt, synthetic construct
  source 1..21: mol_type = other RNA
cctgacaagtagtacaaaagt

SEQ ID NO: 80833 - RNA, 21 nt, synthetic construct
  source 1..21: mol_type = other RNA
cctgacagcaaataaacaaaa

SEQ ID NO: 80834 - RNA, 21 nt, synthetic construct
  source 1..21: mol_type = other RNA
cctgacctcaagcgatccagc

SEQ ID NO: 80835 - RNA, 21 nt, synthetic construct
  source 1..21: mol_type = other RNA
cctgacctcagatatccacct

SEQ ID NO: 80836 - RNA, 21 nt, synthetic construct
  source 1..21: mol_type = other RNA
cctgacctctgcagttagcat

SEQ ID NO: 80837 - RNA, 21 nt, synthetic construct
  source 1..21: mol_type = other RNA
cctgacttcaaactatacttc

SEQ ID NO: 80838 - RNA, 21 nt, synthetic construct
  source 1..21: mol_type = other RNA
cctgagaaccggaacttgagt

SEQ ID NO: 80839 - RNA, 21 nt, synthetic construct
  source 1..21: mol_type = other RNA
cctgagaacttcagtatatat

SEQ ID NO: 80840 - RNA, 21 nt, synthetic construct
  source 1..21: mol_type = other RNA
cctgagaagtcaaagcctgtg

SEQ ID NO: 80841 - RNA, 21 nt, synthetic construct
  source 1..21: mol_type = other RNA
cctgagacttaggcaaaggaa

SEQ ID NO: 80842 - RNA, 21 nt, synthetic construct
  source 1..21: mol_type = other RNA
cctgagcaaggaaggaaagga

SEQ ID NO: 80843 - RNA, 21 nt, synthetic construct
  source 1..21: mol_type = other RNA
cctgagcatccccgctgcgag

SEQ ID NO: 80844 - RNA, 21 nt, synthetic construct
  source 1..21: mol_type = other RNA
cctgagccgtcggtatgttaa

SEQ ID NO: 80845 - RNA, 21 nt, synthetic construct
  source 1..21: mol_type = other RNA
cctgagctctcagtggccctg

SEQ ID NO: 80846 - RNA, 21 nt, synthetic construct
  source 1..21: mol_type = other RNA
cctgagctttccttagttcga

SEQ ID NO: 80847 - RNA, 21 nt, synthetic construct
  source 1..21: mol_type = other RNA
cctgaggaagctaatcaagcc

SEQ ID NO: 80848 - RNA, 21 nt, synthetic construct
  source 1..21: mol_type = other RNA
cctgaggacactagcaatcca

SEQ ID NO: 80849 - RNA, 21 nt, synthetic construct
  source 1..21: mol_type = other RNA
cctgaggatataacgatagtc

SEQ ID NO: 80850 - RNA, 21 nt, synthetic construct
  source 1..21: mol_type = other RNA
cctgagggctttgtgaaggga

SEQ ID NO: 80851 - RNA, 21 nt, synthetic construct
  source 1..21: mol_type = other RNA
cctgaggggtcttatgctggt

SEQ ID NO: 80852 - RNA, 21 nt, synthetic construct
  source 1..21: mol_type = other RNA
cctgagggtgagaccaccaca

SEQ ID NO: 80853 - RNA, 21 nt, synthetic construct
  source 1..21: mol_type = other RNA
cctgaggtctcaaaatttaaa

SEQ ID NO: 80854 - RNA, 21 nt, synthetic construct
  source 1..21: mol_type = other RNA
cctgaggtctttaaaagaaag

SEQ ID NO: 80855 - RNA, 21 nt, synthetic construct
  source 1..21: mol_type = other RNA
cctgagtagctgtgattaccg

SEQ ID NO: 80856 - RNA, 21 nt, synthetic construct
  source 1..21: mol_type = other RNA
cctgagtccagaggtgagctt

SEQ ID NO: 80857 - RNA, 21 nt, synthetic construct
  source 1..21: mol_type = other RNA
cctgataagctcccagccaaa

SEQ ID NO: 80858 - RNA, 21 nt, synthetic construct
  source 1..21: mol_type = other RNA
cctgataaggggctatcttta

SEQ ID NO: 80859 - RNA, 21 nt, synthetic construct
  source 1..21: mol_type = other RNA
cctgataatcacagacgcaaa

SEQ ID NO: 80860 - RNA, 21 nt, synthetic construct
  source 1..21: mol_type = other RNA
cctgatagatattggcaacat

SEQ ID NO: 80861 - RNA, 21 nt, synthetic construct
  source 1..21: mol_type = other RNA
cctgatagctgtggaagcaca

SEQ ID NO: 80862 - RNA, 21 nt, synthetic construct
  source 1..21: mol_type = other RNA
cctgatatgtcgcatgaaaac

SEQ ID NO: 80863 - RNA, 21 nt, synthetic construct
  source 1..21: mol_type = other RNA
cctgatcaagttgcttggcac

SEQ ID NO: 80864 - RNA, 21 nt, synthetic construct
  source 1..21: mol_type = other RNA
cctgatcacaccctcctacct

SEQ ID NO: 80865 - RNA, 21 nt, synthetic construct
  source 1..21: mol_type = other RNA
cctgatcagcaccctcaaatg

SEQ ID NO: 80866 - RNA, 21 nt, synthetic construct
  source 1..21: mol_type = other RNA
cctgatgatgatggtgatgct

SEQ ID NO: 80867 - RNA, 21 nt, synthetic construct
  source 1..21: mol_type = other RNA
cctgatggacattctgcttcc

SEQ ID NO: 80868 - RNA, 21 nt, synthetic construct
  source 1..21: mol_type = other RNA
cctgattagaggctgcaccct

SEQ ID NO: 80869 - RNA, 21 nt, synthetic construct
  source 1..21: mol_type = other RNA
cctgattcttccactagtggg

SEQ ID NO: 80870 - RNA, 21 nt, synthetic construct
  source 1..21: mol_type = other RNA
cctgattgagattagcgaaag

SEQ ID NO: 80871 - RNA, 21 nt, synthetic construct
  source 1..21: mol_type = other RNA
cctgatttaaagtaggttgag

SEQ ID NO: 80872 - RNA, 21 nt, synthetic construct
  source 1..21: mol_type = other RNA
cctgatttaggccactctcat

SEQ ID NO: 80873 - RNA, 21 nt, synthetic construct
  source 1..21: mol_type = other RNA
cctgcaatcacagcacttggg

SEQ ID NO: 80874 - RNA, 21 nt, synthetic construct
  source 1..21: mol_type = other RNA
cctgcacaaaggattgggaag

SEQ ID NO: 80875 - RNA, 21 nt, synthetic construct
  source 1..21: mol_type = other RNA
cctgcacatgcacaaggtcaa

SEQ ID NO: 80876 - RNA, 21 nt, synthetic construct
  source 1..21: mol_type = other RNA
cctgcaccatttattgtcaag

SEQ ID NO: 80877 - RNA, 21 nt, synthetic construct
  source 1..21: mol_type = other RNA
cctgcactcaagcaatcctcc

SEQ ID NO: 80878 - RNA, 21 nt, synthetic construct
  source 1..21: mol_type = other RNA
cctgcagaaggagaaaccatt

SEQ ID NO: 80879 - RNA, 21 nt, synthetic construct
  source 1..21: mol_type = other RNA
cctgcagacatgcacgagaaa

SEQ ID NO: 80880 - RNA, 21 nt, synthetic construct
  source 1..21: mol_type = other RNA
cctgcagactgcaggtcttca

SEQ ID NO: 80881 - RNA, 21 nt, synthetic construct
  source 1..21: mol_type = other RNA
cctgcagccagatttgatcct

SEQ ID NO: 80882 - RNA, 21 nt, synthetic construct
  source 1..21: mol_type = other RNA
cctgcaggtatttctaaatca

SEQ ID NO: 80883 - RNA, 21 nt, synthetic construct
  source 1..21: mol_type = other RNA
cctgcaggttgatactagttt

SEQ ID NO: 80884 - RNA, 21 nt, synthetic construct
  source 1..21: mol_type = other RNA
cctgcagtctgcaggcagaat

SEQ ID NO: 80885 - RNA, 21 nt, synthetic construct
  source 1..21: mol_type = other RNA
cctgcagtggcgtgtgcccag

SEQ ID NO: 80886 - RNA, 21 nt, synthetic construct
  source 1..21: mol_type = other RNA
cctgcatacactcatttcctt

SEQ ID NO: 80887 - RNA, 21 nt, synthetic construct
  source 1..21: mol_type = other RNA
cctgcatatgtttttattagc

SEQ ID NO: 80888 - RNA, 21 nt, synthetic construct
  source 1..21: mol_type = other RNA
cctgcatggggagttttagga

SEQ ID NO: 80889 - RNA, 21 nt, synthetic construct
  source 1..21: mol_type = other RNA
cctgcatggtgtaaaatacaa

SEQ ID NO: 80890 - RNA, 21 nt, synthetic construct
  source 1..21: mol_type = other RNA
cctgcattgcatttacttgtc

SEQ ID NO: 80891 - RNA, 21 nt, synthetic construct
  source 1..21: mol_type = other RNA
cctgccacactccagcatccc

SEQ ID NO: 80892 - RNA, 21 nt, synthetic construct
  source 1..21: mol_type = other RNA
cctgccagagttggcacagcc

SEQ ID NO: 80893 - RNA, 21 nt, synthetic construct
  source 1..21: mol_type = other RNA
cctgccatagagggagcatct

SEQ ID NO: 80894 - RNA, 21 nt, synthetic construct
  source 1..21: mol_type = other RNA
cctgccatggtgttaaatatt

SEQ ID NO: 80895 - RNA, 21 nt, synthetic construct
  source 1..21: mol_type = other RNA
cctgcccctccactccacaaa

SEQ ID NO: 80896 - RNA, 21 nt, synthetic construct
  source 1..21: mol_type = other RNA
cctgccccttatcctcttctg

SEQ ID NO: 80897 - RNA, 21 nt, synthetic construct
  source 1..21: mol_type = other RNA
cctgccctgtgaaaatcattt

SEQ ID NO: 80898 - RNA, 21 nt, synthetic construct
  source 1..21: mol_type = other RNA
cctgccgcagagcaagcacgt

SEQ ID NO: 80899 - RNA, 21 nt, synthetic construct
  source 1..21: mol_type = other RNA
cctgccgcttcgcctttctcg

SEQ ID NO: 80900 - RNA, 21 nt, synthetic construct
  source 1..21: mol_type = other RNA
cctgccttcctgacctctgca

SEQ ID NO: 80901 - RNA, 21 nt, synthetic construct
  source 1..21: mol_type = other RNA
cctgccttccttgggcacact

SEQ ID NO: 80902 - RNA, 21 nt, synthetic construct
  source 1..21: mol_type = other RNA
cctgccttggccttctgagga

SEQ ID NO: 80903 - RNA, 21 nt, synthetic construct
  source 1..21: mol_type = other RNA
cctgcctttgttcatcatctt

SEQ ID NO: 80904 - RNA, 21 nt, synthetic construct
  source 1..21: mol_type = other RNA
cctgcgaaggcaatgtaacac

SEQ ID NO: 80905 - RNA, 21 nt, synthetic construct
  source 1..21: mol_type = other RNA
cctgcgattggttggactcca

SEQ ID NO: 80906 - RNA, 21 nt, synthetic construct
  source 1..21: mol_type = other RNA
cctgcgtccgtagaccgagga

SEQ ID NO: 80907 - RNA, 21 nt, synthetic construct
  source 1..21: mol_type = other RNA
cctgctaacaccttgaactgg

SEQ ID NO: 80908 - RNA, 21 nt, synthetic construct
  source 1..21: mol_type = other RNA
cctgctacgaatgaactccta

SEQ ID NO: 80909 - RNA, 21 nt, synthetic construct
  source 1..21: mol_type = other RNA
cctgctactcaggagattaag

SEQ ID NO: 80910 - RNA, 21 nt, synthetic construct
  source 1..21: mol_type = other RNA
cctgctacttgtggggctgag

SEQ ID NO: 80911 - RNA, 21 nt, synthetic construct
  source 1..21: mol_type = other RNA
cctgctatgcatactttggaa

SEQ ID NO: 80912 - RNA, 21 nt, synthetic construct
  source 1..21: mol_type = other RNA
cctgctattttattagatagt

SEQ ID NO: 80913 - RNA, 21 nt, synthetic construct
  source 1..21: mol_type = other RNA
cctgctccagtatgacctcct

SEQ ID NO: 80914 - RNA, 21 nt, synthetic construct
  source 1..21: mol_type = other RNA
cctgctctgcacgtactagtc

SEQ ID NO: 80915 - RNA, 21 nt, synthetic construct
  source 1..21: mol_type = other RNA
cctgctctgcagagactgtgc

SEQ ID NO: 80916 - RNA, 21 nt, synthetic construct
  source 1..21: mol_type = other RNA
cctgctctttatctccacatt

SEQ ID NO: 80917 - RNA, 21 nt, synthetic construct
  source 1..21: mol_type = other RNA
cctgctgccagatgttctaat

SEQ ID NO: 80918 - RNA, 21 nt, synthetic construct
  source 1..21: mol_type = other RNA
cctgctggaacgaatattcat

SEQ ID NO: 80919 - RNA, 21 nt, synthetic construct
  source 1..21: mol_type = other RNA
cctgctgggctattgttttgc

SEQ ID NO: 80920 - RNA, 21 nt, synthetic construct
  source 1..21: mol_type = other RNA
cctgctgtcgtttatgcattt

SEQ ID NO: 80921 - RNA, 21 nt, synthetic construct
  source 1..21: mol_type = other RNA
cctgctgtggccgagggagac

SEQ ID NO: 80922 - RNA, 21 nt, synthetic construct
  source 1..21: mol_type = other RNA
cctgctgttcccaagcaagtg

SEQ ID NO: 80923 - RNA, 21 nt, synthetic construct
  source 1..21: mol_type = other RNA
cctgcttcagcctaagcaagt

SEQ ID NO: 80924 - RNA, 21 nt, synthetic construct
  source 1..21: mol_type = other RNA
cctgcttcatctggaccagtt

SEQ ID NO: 80925 - RNA, 21 nt, synthetic construct
  source 1..21: mol_type = other RNA
cctgcttcattccgcgtttat

SEQ ID NO: 80926 - RNA, 21 nt, synthetic construct
  source 1..21: mol_type = other RNA
cctgcttcccccaaagaagga

SEQ ID NO: 80927 - RNA, 21 nt, synthetic construct
  source 1..21: mol_type = other RNA
cctgcttggcgcagtgcttag

SEQ ID NO: 80928 - RNA, 21 nt, synthetic construct
  source 1..21: mol_type = other RNA
cctgctttaaaacactggcaa

SEQ ID NO: 80929 - RNA, 21 nt, synthetic construct
  source 1..21: mol_type = other RNA
cctgctttcagttctttcgga

SEQ ID NO: 80930 - RNA, 21 nt, synthetic construct
  source 1..21: mol_type = other RNA
cctgctttcctcatgtccata

SEQ ID NO: 80931 - RNA, 21 nt, synthetic construct
  source 1..21: mol_type = other RNA
cctgctttctactagtataag

SEQ ID NO: 80932 - RNA, 21 nt, synthetic construct
  source 1..21: mol_type = other RNA
cctgctttcttggggctctaa

SEQ ID NO: 80933 - RNA, 21 nt, synthetic construct
  source 1..21: mol_type = other RNA
cctgcttttggaagcatgtgg

SEQ ID NO: 80934 - RNA, 21 nt, synthetic construct
  source 1..21: mol_type = other RNA
cctggaaaaagaccataatat

SEQ ID NO: 80935 - RNA, 21 nt, synthetic construct
  source 1..21: mol_type = other RNA
cctggaaaacttctctggagc

SEQ ID NO: 80936 - RNA, 21 nt, synthetic construct
  source 1..21: mol_type = other RNA
cctggaaataagtttcatgga

SEQ ID NO: 80937 - RNA, 21 nt, synthetic construct
  source 1..21: mol_type = other RNA
cctggaaattattcaatatgt

SEQ ID NO: 80938 - RNA, 21 nt, synthetic construct
  source 1..21: mol_type = other RNA
cctggaacaatcaaaccatcc

SEQ ID NO: 80939 - RNA, 21 nt, synthetic construct
  source 1..21: mol_type = other RNA
cctggaacaggccctttgtta

SEQ ID NO: 80940 - RNA, 21 nt, synthetic construct
  source 1..21: mol_type = other RNA
cctggaagttcaaggttataa

SEQ ID NO: 80941 - RNA, 21 nt, synthetic construct
  source 1..21: mol_type = other RNA
cctggaatagtagcttcaatg

SEQ ID NO: 80942 - RNA, 21 nt, synthetic construct
  source 1..21: mol_type = other RNA
cctggaatcctctaccaaaaa

SEQ ID NO: 80943 - RNA, 21 nt, synthetic construct
  source 1..21: mol_type = other RNA
cctggaatgggttggaggaga

SEQ ID NO: 80944 - RNA, 21 nt, synthetic construct
  source 1..21: mol_type = other RNA
cctggacaacagtgtgagacc

SEQ ID NO: 80945 - RNA, 21 nt, synthetic construct
  source 1..21: mol_type = other RNA
cctggacacacacagtcctgt

SEQ ID NO: 80946 - RNA, 21 nt, synthetic construct
  source 1..21: mol_type = other RNA
cctggacaggatcccggaaca

SEQ ID NO: 80947 - RNA, 21 nt, synthetic construct
  source 1..21: mol_type = other RNA
cctggacccgggaggcagatg

SEQ ID NO: 80948 - RNA, 21 nt, synthetic construct
  source 1..21: mol_type = other RNA
cctggactgtgatgactgtaa

SEQ ID NO: 80949 - RNA, 21 nt, synthetic construct
  source 1..21: mol_type = other RNA
cctggagaaagcccagccgcg

SEQ ID NO: 80950 - RNA, 21 nt, synthetic construct
  source 1..21: mol_type = other RNA
cctggagaggcaaaggccgct

SEQ ID NO: 80951 - RNA, 21 nt, synthetic construct
  source 1..21: mol_type = other RNA
cctggagcctgaggacactag

SEQ ID NO: 80952 - RNA, 21 nt, synthetic construct
  source 1..21: mol_type = other RNA
cctggagggctcccagtgccc

SEQ ID NO: 80953 - RNA, 21 nt, synthetic construct
  source 1..21: mol_type = other RNA
cctggagttaattccacaacc

SEQ ID NO: 80954 - RNA, 21 nt, synthetic construct
  source 1..21: mol_type = other RNA
cctggatcaagtgggatttat

SEQ ID NO: 80955 - RNA, 21 nt, synthetic construct
  source 1..21: mol_type = other RNA
cctggatcccccagcccctgg

SEQ ID NO: 80956 - RNA, 21 nt, synthetic construct
  source 1..21: mol_type = other RNA
cctggatgaatgcagtggctt

SEQ ID NO: 80957 - RNA, 21 nt, synthetic construct
  source 1..21: mol_type = other RNA
cctggattgctagtgtcctca

SEQ ID NO: 80958 - RNA, 21 nt, synthetic construct
  source 1..21: mol_type = other RNA
cctggatttgggaaggatggc

SEQ ID NO: 80959 - RNA, 21 nt, synthetic construct
  source 1..21: mol_type = other RNA
cctggcaacaaaggcgaagcc

SEQ ID NO: 80960 - RNA, 21 nt, synthetic construct
  source 1..21: mol_type = other RNA
cctggcaatactctcagaaat

SEQ ID NO: 80961 - RNA, 21 nt, synthetic construct
  source 1..21: mol_type = other RNA
cctggcagatcaattgaccaa

SEQ ID NO: 80962 - RNA, 21 nt, synthetic construct
  source 1..21: mol_type = other RNA
cctggcagtctaggaaaagac

SEQ ID NO: 80963 - RNA, 21 nt, synthetic construct
  source 1..21: mol_type = other RNA
cctggcattgtcccgggggag

SEQ ID NO: 80964 - RNA, 21 nt, synthetic construct
  source 1..21: mol_type = other RNA
cctggccaacatcgtaaaacc

SEQ ID NO: 80965 - RNA, 21 nt, synthetic construct
  source 1..21: mol_type = other RNA
cctggccacatgcttccaaaa

SEQ ID NO: 80966 - RNA, 21 nt, synthetic construct
  source 1..21: mol_type = other RNA
cctggcccctttcaagattgt

SEQ ID NO: 80967 - RNA, 21 nt, synthetic construct
  source 1..21: mol_type = other RNA
cctggccgggatttacttcta

SEQ ID NO: 80968 - RNA, 21 nt, synthetic construct
  source 1..21: mol_type = other RNA
cctggctctagcccagcttcc

SEQ ID NO: 80969 - RNA, 21 nt, synthetic construct
  source 1..21: mol_type = other RNA
cctggcttgtgacatcaaggg

SEQ ID NO: 80970 - RNA, 21 nt, synthetic construct
  source 1..21: mol_type = other RNA
cctggctttagatggtaaaac

SEQ ID NO: 80971 - RNA, 21 nt, synthetic construct
  source 1..21: mol_type = other RNA
cctgggaaaaggatttgtttg

SEQ ID NO: 80972 - RNA, 21 nt, synthetic construct
  source 1..21: mol_type = other RNA
cctgggaaagcctggctttag

SEQ ID NO: 80973 - RNA, 21 nt, synthetic construct
  source 1..21: mol_type = other RNA
cctgggacagagcgagactcc

SEQ ID NO: 80974 - RNA, 21 nt, synthetic construct
  source 1..21: mol_type = other RNA
cctgggagaaagaccaagagt

SEQ ID NO: 80975 - RNA, 21 nt, synthetic construct
  source 1..21: mol_type = other RNA
cctgggatgcaagaatggttt

SEQ ID NO: 80976 - RNA, 21 nt, synthetic construct
  source 1..21: mol_type = other RNA
cctgggcacacgccactgcag

SEQ ID NO: 80977 - RNA, 21 nt, synthetic construct
  source 1..21: mol_type = other RNA
cctgggcgacaagagcagaac

SEQ ID NO: 80978 - RNA, 21 nt, synthetic construct
  source 1..21: mol_type = other RNA
cctgggcgacagagtgaaact

SEQ ID NO: 80979 - RNA, 21 nt, synthetic construct
  source 1..21: mol_type = other RNA
cctgggctcatctaagcctac

SEQ ID NO: 80980 - RNA, 21 nt, synthetic construct
  source 1..21: mol_type = other RNA
cctggggaataagattttagg

SEQ ID NO: 80981 - RNA, 21 nt, synthetic construct
  source 1..21: mol_type = other RNA
cctggggcctcagcatgtctt

SEQ ID NO: 80982 - RNA, 21 nt, synthetic construct
  source 1..21: mol_type = other RNA
cctgggggagactgtgcaatg

SEQ ID NO: 80983 - RNA, 21 nt, synthetic construct
  source 1..21: mol_type = other RNA
cctggggtttccttaccttta

SEQ ID NO: 80984 - RNA, 21 nt, synthetic construct
  source 1..21: mol_type = other RNA
cctgggtaattaaacattttt

SEQ ID NO: 80985 - RNA, 21 nt, synthetic construct
  source 1..21: mol_type = other RNA
cctgggtatacagcaaaagaa

SEQ ID NO: 80986 - RNA, 21 nt, synthetic construct
  source 1..21: mol_type = other RNA
cctgggttcaggtgcctcctg

SEQ ID NO: 80987 - RNA, 21 nt, synthetic construct
  source 1..21: mol_type = other RNA
cctgggttctcccttctattc

SEQ ID NO: 80988 - RNA, 21 nt, synthetic construct
  source 1..21: mol_type = other RNA
cctggtaataatgaaagctcc

SEQ ID NO: 80989 - RNA, 21 nt, synthetic construct
  source 1..21: mol_type = other RNA
cctggtaatgaatagaaaatc

SEQ ID NO: 80990 - RNA, 21 nt, synthetic construct
  source 1..21: mol_type = other RNA
cctggtactctatgatatata

SEQ ID NO: 80991 - RNA, 21 nt, synthetic construct
  source 1..21: mol_type = other RNA
cctggtatgagtgtttccctt

SEQ ID NO: 80992 - RNA, 21 nt, synthetic construct
  source 1..21: mol_type = other RNA
cctggtcaacagggtaagatt

SEQ ID NO: 80993 - RNA, 21 nt, synthetic construct
  source 1..21: mol_type = other RNA
cctggtcctgagggctttgtg

SEQ ID NO: 80994 - RNA, 21 nt, synthetic construct
  source 1..21: mol_type = other RNA
cctggtccttaaatttctaag

SEQ ID NO: 80995 - RNA, 21 nt, synthetic construct
  source 1..21: mol_type = other RNA
cctggtcgagctgggtgatgt

SEQ ID NO: 80996 - RNA, 21 nt, synthetic construct
  source 1..21: mol_type = other RNA
cctggtctcccagcatgaagc

SEQ ID NO: 80997 - RNA, 21 nt, synthetic construct
  source 1..21: mol_type = other RNA
cctggtgatctatgaatttgc

SEQ ID NO: 80998 - RNA, 21 nt, synthetic construct
  source 1..21: mol_type = other RNA
cctggtgattaaagttatttc

SEQ ID NO: 80999 - RNA, 21 nt, synthetic construct
  source 1..21: mol_type = other RNA
cctggtgctttctatctctca

SEQ ID NO: 81000 - RNA, 21 nt, synthetic construct
  source 1..21: mol_type = other RNA
cctggtgggttcatgccattc

SEQ ID NO: 81001 - RNA, 21 nt, synthetic construct
  source 1..21: mol_type = other RNA
cctggttagggagactttcac

SEQ ID NO: 81002 - RNA, 21 nt, synthetic construct
  source 1..21: mol_type = other RNA
cctggttcaagctatgctcct

SEQ ID NO: 81003 - RNA, 21 nt, synthetic construct
  source 1..21: mol_type = other RNA
cctggttttgatcatcgcatt

SEQ ID NO: 81004 - RNA, 21 nt, synthetic construct
  source 1..21: mol_type = other RNA
cctgtaaacctggaatcctct

SEQ ID NO: 81005 - RNA, 21 nt, synthetic construct
  source 1..21: mol_type = other RNA
cctgtaattacatacttcaaa

SEQ ID NO: 81006 - RNA, 21 nt, synthetic construct
  source 1..21: mol_type = other RNA
cctgtaatttttctctttttg

SEQ ID NO: 81007 - RNA, 21 nt, synthetic construct
  source 1..21: mol_type = other RNA
cctgtacccattagacactaa

SEQ ID NO: 81008 - RNA, 21 nt, synthetic construct
  source 1..21: mol_type = other RNA
cctgtagaaaatagggacggc

SEQ ID NO: 81009 - RNA, 21 nt, synthetic construct
  source 1..21: mol_type = other RNA
cctgtagagatttttatcaaa

SEQ ID NO: 81010 - RNA, 21 nt, synthetic construct
  source 1..21: mol_type = other RNA
cctgtagattgggcttttcat

SEQ ID NO: 81011 - RNA, 21 nt, synthetic construct
  source 1..21: mol_type = other RNA
cctgtagcagacactgggttc

SEQ ID NO: 81012 - RNA, 21 nt, synthetic construct
  source 1..21: mol_type = other RNA
cctgtagttttggtgtcattt

SEQ ID NO: 81013 - RNA, 21 nt, synthetic construct
  source 1..21: mol_type = other RNA
cctgtataaataaaatgtctg

SEQ ID NO: 81014 - RNA, 21 nt, synthetic construct
  source 1..21: mol_type = other RNA
cctgtatatctccttttaaga

SEQ ID NO: 81015 - RNA, 21 nt, synthetic construct
  source 1..21: mol_type = other RNA
cctgtatgccgctggtgaaaa

SEQ ID NO: 81016 - RNA, 21 nt, synthetic construct
  source 1..21: mol_type = other RNA
cctgtcagaaacaccaacaca

SEQ ID NO: 81017 - RNA, 21 nt, synthetic construct
  source 1..21: mol_type = other RNA
cctgtcagtgtggttcatatt

SEQ ID NO: 81018 - RNA, 21 nt, synthetic construct
  source 1..21: mol_type = other RNA
cctgtcagtttctgatttatc

SEQ ID NO: 81019 - RNA, 21 nt, synthetic construct
  source 1..21: mol_type = other RNA
cctgtcatgtcaaatttttca

SEQ ID NO: 81020 - RNA, 21 nt, synthetic construct
  source 1..21: mol_type = other RNA
cctgtccaacatggcaaaacc

SEQ ID NO: 81021 - RNA, 21 nt, synthetic construct
  source 1..21: mol_type = other RNA
cctgtccaagtatttctcatc

SEQ ID NO: 81022 - RNA, 21 nt, synthetic construct
  source 1..21: mol_type = other RNA
cctgtccaggcgcctgcattg

SEQ ID NO: 81023 - RNA, 21 nt, synthetic construct
  source 1..21: mol_type = other RNA
cctgtccttgtgttttatttg

SEQ ID NO: 81024 - RNA, 21 nt, synthetic construct
  source 1..21: mol_type = other RNA
cctgtctcagagtatatatgc

SEQ ID NO: 81025 - RNA, 21 nt, synthetic construct
  source 1..21: mol_type = other RNA
cctgtctctaaaaaataccaa

SEQ ID NO: 81026 - RNA, 21 nt, synthetic construct
  source 1..21: mol_type = other RNA
cctgtctgggaagttatgtag

SEQ ID NO: 81027 - RNA, 21 nt, synthetic construct
  source 1..21: mol_type = other RNA
cctgtctgtgatgtagaggca

SEQ ID NO: 81028 - RNA, 21 nt, synthetic construct
  source 1..21: mol_type = other RNA
cctgtcttggacccatgccca

SEQ ID NO: 81029 - RNA, 21 nt, synthetic construct
  source 1..21: mol_type = other RNA
cctgtctttcccattaccaaa

SEQ ID NO: 81030 - RNA, 21 nt, synthetic construct
  source 1..21: mol_type = other RNA
cctgtctttctgtctgctttt

SEQ ID NO: 81031 - RNA, 21 nt, synthetic construct
  source 1..21: mol_type = other RNA
cctgtgaaaatcattttggca

SEQ ID NO: 81032 - RNA, 21 nt, synthetic construct
  source 1..21: mol_type = other RNA
cctgtgacagtatgtcagact

SEQ ID NO: 81033 - RNA, 21 nt, synthetic construct
  source 1..21: mol_type = other RNA
cctgtgatttatgtggcattt

SEQ ID NO: 81034 - RNA, 21 nt, synthetic construct
  source 1..21: mol_type = other RNA
cctgtgatttccagtgtttgg

SEQ ID NO: 81035 - RNA, 21 nt, synthetic construct
  source 1..21: mol_type = other RNA
cctgtgccaagtccgtgcatg

SEQ ID NO: 81036 - RNA, 21 nt, synthetic construct
  source 1..21: mol_type = other RNA
cctgtgcgtgaatctgttcct

SEQ ID NO: 81037 - RNA, 21 nt, synthetic construct
  source 1..21: mol_type = other RNA
cctgtgcttgtctctctcttt

SEQ ID NO: 81038 - RNA, 21 nt, synthetic construct
  source 1..21: mol_type = other RNA
cctgtgcttttctcgtgcatg

SEQ ID NO: 81039 - RNA, 21 nt, synthetic construct
  source 1..21: mol_type = other RNA
cctgtggaggcagtaccattc

SEQ ID NO: 81040 - RNA, 21 nt, synthetic construct
  source 1..21: mol_type = other RNA
cctgtggtccctgctactcag

SEQ ID NO: 81041 - RNA, 21 nt, synthetic construct
  source 1..21: mol_type = other RNA
cctgtggtctcttcgaggggg

SEQ ID NO: 81042 - RNA, 21 nt, synthetic construct
  source 1..21: mol_type = other RNA
cctgtgtatgtgtagtcagtg

SEQ ID NO: 81043 - RNA, 21 nt, synthetic construct
  source 1..21: mol_type = other RNA
cctgtgtcagtgacagttctg

SEQ ID NO: 81044 - RNA, 21 nt, synthetic construct
  source 1..21: mol_type = other RNA
cctgtgtgcatgctcccattt

SEQ ID NO: 81045 - RNA, 21 nt, synthetic construct
  source 1..21: mol_type = other RNA
cctgtgtttctgctattctct

SEQ ID NO: 81046 - RNA, 21 nt, synthetic construct
  source 1..21: mol_type = other RNA
cctgttacatggttctgtgct

SEQ ID NO: 81047 - RNA, 21 nt, synthetic construct
  source 1..21: mol_type = other RNA
cctgttagtcccctagtggat

SEQ ID NO: 81048 - RNA, 21 nt, synthetic construct
  source 1..21: mol_type = other RNA
cctgttcatttgagaatttca

SEQ ID NO: 81049 - RNA, 21 nt, synthetic construct
  source 1..21: mol_type = other RNA
cctgttccaggcctcgctctt

SEQ ID NO: 81050 - RNA, 21 nt, synthetic construct
  source 1..21: mol_type = other RNA
cctgttccgattttacttact

SEQ ID NO: 81051 - RNA, 21 nt, synthetic construct
  source 1..21: mol_type = other RNA
cctgttccgggatcctgtcca

SEQ ID NO: 81052 - RNA, 21 nt, synthetic construct
  source 1..21: mol_type = other RNA
cctgttctttggagctgtatt

SEQ ID NO: 81053 - RNA, 21 nt, synthetic construct
  source 1..21: mol_type = other RNA
cctgttctttgttagtttatt

SEQ ID NO: 81054 - RNA, 21 nt, synthetic construct
  source 1..21: mol_type = other RNA
cctgttcttttgtaatctaag

SEQ ID NO: 81055 - RNA, 21 nt, synthetic construct
  source 1..21: mol_type = other RNA
cctgttgaatagcaactgttt

SEQ ID NO: 81056 - RNA, 21 nt, synthetic construct
  source 1..21: mol_type = other RNA
cctgttgattgttgccatcat

SEQ ID NO: 81057 - RNA, 21 nt, synthetic construct
  source 1..21: mol_type = other RNA
cctgttgctttaacctctggt

SEQ ID NO: 81058 - RNA, 21 nt, synthetic construct
  source 1..21: mol_type = other RNA
cctgttggcctggacacacac

SEQ ID NO: 81059 - RNA, 21 nt, synthetic construct
  source 1..21: mol_type = other RNA
cctgttgggaggtttttgatt

SEQ ID NO: 81060 - RNA, 21 nt, synthetic construct
  source 1..21: mol_type = other RNA
cctgttgggctattaagtatt

SEQ ID NO: 81061 - RNA, 21 nt, synthetic construct
  source 1..21: mol_type = other RNA
cctgttgtgaggattcgatta

SEQ ID NO: 81062 - RNA, 21 nt, synthetic construct
  source 1..21: mol_type = other RNA
cctgtttaaaaagaaaaagct

SEQ ID NO: 81063 - RNA, 21 nt, synthetic construct
  source 1..21: mol_type = other RNA
cctgtttcccttaatgttgac

SEQ ID NO: 81064 - RNA, 21 nt, synthetic construct
  source 1..21: mol_type = other RNA
cctgtttctctacatctggat

SEQ ID NO: 81065 - RNA, 21 nt, synthetic construct
  source 1..21: mol_type = other RNA
cctgtttgagaagtcttttcc

SEQ ID NO: 81066 - RNA, 21 nt, synthetic construct
  source 1..21: mol_type = other RNA
cctgttttagtggctcacagt

SEQ ID NO: 81067 - RNA, 21 nt, synthetic construct
  source 1..21: mol_type = other RNA
ccttaaaaaaggtttttgaac

SEQ ID NO: 81068 - RNA, 21 nt, synthetic construct
  source 1..21: mol_type = other RNA
ccttaaaagagtgaaatgatt

SEQ ID NO: 81069 - RNA, 21 nt, synthetic construct
  source 1..21: mol_type = other RNA
ccttaaaaggaactaatttca

SEQ ID NO: 81070 - RNA, 21 nt, synthetic construct
  source 1..21: mol_type = other RNA
ccttaaaagtgctgcagtatg

SEQ ID NO: 81071 - RNA, 21 nt, synthetic construct
  source 1..21: mol_type = other RNA
ccttaaaccatatacaaaact

SEQ ID NO: 81072 - RNA, 21 nt, synthetic construct
  source 1..21: mol_type = other RNA
ccttaaagccacactcttggt

SEQ ID NO: 81073 - RNA, 21 nt, synthetic construct
  source 1..21: mol_type = other RNA
ccttaaattccaaaagtgaat

SEQ ID NO: 81074 - RNA, 21 nt, synthetic construct
  source 1..21: mol_type = other RNA
ccttaaatttctaaggttctg

SEQ ID NO: 81075 - RNA, 21 nt, synthetic construct
  source 1..21: mol_type = other RNA
ccttaacctttttcttttcac

SEQ ID NO: 81076 - RNA, 21 nt, synthetic construct
  source 1..21: mol_type = other RNA
ccttaacttcacctctacaca

SEQ ID NO: 81077 - RNA, 21 nt, synthetic construct
  source 1..21: mol_type = other RNA
ccttaagcacagactgtgcct

SEQ ID NO: 81078 - RNA, 21 nt, synthetic construct
  source 1..21: mol_type = other RNA
ccttaagccatttcaggtttt

SEQ ID NO: 81079 - RNA, 21 nt, synthetic construct
  source 1..21: mol_type = other RNA
ccttaatctcctgagtagcag

SEQ ID NO: 81080 - RNA, 21 nt, synthetic construct
  source 1..21: mol_type = other RNA
ccttaatgccaccgaattgta

SEQ ID NO: 81081 - RNA, 21 nt, synthetic construct
  source 1..21: mol_type = other RNA
ccttaatgttgacatcttgca

SEQ ID NO: 81082 - RNA, 21 nt, synthetic construct
  source 1..21: mol_type = other RNA
ccttaatgtttagtagaattc

SEQ ID NO: 81083 - RNA, 21 nt, synthetic construct
  source 1..21: mol_type = other RNA
ccttacactcaaaagccatag

SEQ ID NO: 81084 - RNA, 21 nt, synthetic construct
  source 1..21: mol_type = other RNA
ccttacattgtaatcctgttt

SEQ ID NO: 81085 - RNA, 21 nt, synthetic construct
  source 1..21: mol_type = other RNA
ccttaccactataatccagat

SEQ ID NO: 81086 - RNA, 21 nt, synthetic construct
  source 1..21: mol_type = other RNA
ccttaccactgaagtgttgag

SEQ ID NO: 81087 - RNA, 21 nt, synthetic construct
  source 1..21: mol_type = other RNA
ccttaccagtgcttgcagcct

SEQ ID NO: 81088 - RNA, 21 nt, synthetic construct
  source 1..21: mol_type = other RNA
ccttaccttaaaccatataca

SEQ ID NO: 81089 - RNA, 21 nt, synthetic construct
  source 1..21: mol_type = other RNA
ccttacctttatctttggata

SEQ ID NO: 81090 - RNA, 21 nt, synthetic construct
  source 1..21: mol_type = other RNA
ccttacgcgtggatgtgtgca

SEQ ID NO: 81091 - RNA, 21 nt, synthetic construct
  source 1..21: mol_type = other RNA
ccttactaaattttgaggctt

SEQ ID NO: 81092 - RNA, 21 nt, synthetic construct
  source 1..21: mol_type = other RNA
ccttactaccaccactaatgt

SEQ ID NO: 81093 - RNA, 21 nt, synthetic construct
  source 1..21: mol_type = other RNA
ccttacttccagctcacgtta

SEQ ID NO: 81094 - RNA, 21 nt, synthetic construct
  source 1..21: mol_type = other RNA
ccttagaaatttaaggaccag

SEQ ID NO: 81095 - RNA, 21 nt, synthetic construct
  source 1..21: mol_type = other RNA
ccttagattacaaaagaacag

SEQ ID NO: 81096 - RNA, 21 nt, synthetic construct
  source 1..21: mol_type = other RNA
ccttagcccaagctaccattt

SEQ ID NO: 81097 - RNA, 21 nt, synthetic construct
  source 1..21: mol_type = other RNA
ccttagcccacttgttgatgg

SEQ ID NO: 81098 - RNA, 21 nt, synthetic construct
  source 1..21: mol_type = other RNA
ccttagctctcatgtcagaga

SEQ ID NO: 81099 - RNA, 21 nt, synthetic construct
  source 1..21: mol_type = other RNA
ccttagtggttgacccataaa

SEQ ID NO: 81100 - RNA, 21 nt, synthetic construct
  source 1..21: mol_type = other RNA
ccttagttttcacttttgtgc

SEQ ID NO: 81101 - RNA, 21 nt, synthetic construct
  source 1..21: mol_type = other RNA
ccttataaaatgagggtaaaa

SEQ ID NO: 81102 - RNA, 21 nt, synthetic construct
  source 1..21: mol_type = other RNA
ccttatagatgacgaaagtga

SEQ ID NO: 81103 - RNA, 21 nt, synthetic construct
  source 1..21: mol_type = other RNA
ccttatagtattacctcccat

SEQ ID NO: 81104 - RNA, 21 nt, synthetic construct
  source 1..21: mol_type = other RNA
ccttatatgggatatctaaca

SEQ ID NO: 81105 - RNA, 21 nt, synthetic construct
  source 1..21: mol_type = other RNA
ccttatcaggaaagtgccagc

SEQ ID NO: 81106 - RNA, 21 nt, synthetic construct
  source 1..21: mol_type = other RNA
ccttatccattcatctctcga

SEQ ID NO: 81107 - RNA, 21 nt, synthetic construct
  source 1..21: mol_type = other RNA
ccttatccgataaagggtctg

SEQ ID NO: 81108 - RNA, 21 nt, synthetic construct
  source 1..21: mol_type = other RNA
ccttatcctcttctgaagagg

SEQ ID NO: 81109 - RNA, 21 nt, synthetic construct
  source 1..21: mol_type = other RNA
ccttatggatatctggcctgc

SEQ ID NO: 81110 - RNA, 21 nt, synthetic construct
  source 1..21: mol_type = other RNA
ccttatgtccagcccccagtt

SEQ ID NO: 81111 - RNA, 21 nt, synthetic construct
  source 1..21: mol_type = other RNA
ccttatgtgaaagtagaggac

SEQ ID NO: 81112 - RNA, 21 nt, synthetic construct
  source 1..21: mol_type = other RNA
ccttatgtgtgtataacccgt

SEQ ID NO: 81113 - RNA, 21 nt, synthetic construct
  source 1..21: mol_type = other RNA
ccttattcaaataattgctgc

SEQ ID NO: 81114 - RNA, 21 nt, synthetic construct
  source 1..21: mol_type = other RNA
ccttattgagaagcagaaaat

SEQ ID NO: 81115 - RNA, 21 nt, synthetic construct
  source 1..21: mol_type = other RNA
ccttatttaatgtgctgtcca

SEQ ID NO: 81116 - RNA, 21 nt, synthetic construct
  source 1..21: mol_type = other RNA
ccttatttggaaatatggtca

SEQ ID NO: 81117 - RNA, 21 nt, synthetic construct
  source 1..21: mol_type = other RNA
ccttcaagttgctttttcttc

SEQ ID NO: 81118 - RNA, 21 nt, synthetic construct
  source 1..21: mol_type = other RNA
ccttcaatgtttggtagattt

SEQ ID NO: 81119 - RNA, 21 nt, synthetic construct
  source 1..21: mol_type = other RNA
ccttcacaaagccctcaggac

SEQ ID NO: 81120 - RNA, 21 nt, synthetic construct
  source 1..21: mol_type = other RNA
ccttcaccaaagatttactaa

SEQ ID NO: 81121 - RNA, 21 nt, synthetic construct
  source 1..21: mol_type = other RNA
ccttcagaactcttctccaag

SEQ ID NO: 81122 - RNA, 21 nt, synthetic construct
  source 1..21: mol_type = other RNA
ccttcagaagccctgcagcca

SEQ ID NO: 81123 - RNA, 21 nt, synthetic construct
  source 1..21: mol_type = other RNA
ccttcagaaggagtccagtcc

SEQ ID NO: 81124 - RNA, 21 nt, synthetic construct
  source 1..21: mol_type = other RNA
ccttcagcctgtgtcagtgac

SEQ ID NO: 81125 - RNA, 21 nt, synthetic construct
  source 1..21: mol_type = other RNA
ccttcagctatggtgttattt

SEQ ID NO: 81126 - RNA, 21 nt, synthetic construct
  source 1..21: mol_type = other RNA
ccttcagtatgaatgcacgtg

SEQ ID NO: 81127 - RNA, 21 nt, synthetic construct
  source 1..21: mol_type = other RNA
ccttcagtcagttctctgccc

SEQ ID NO: 81128 - RNA, 21 nt, synthetic construct
  source 1..21: mol_type = other RNA
ccttcagtgtagtcagacaca

SEQ ID NO: 81129 - RNA, 21 nt, synthetic construct
  source 1..21: mol_type = other RNA
ccttcatactattttctatag

SEQ ID NO: 81130 - RNA, 21 nt, synthetic construct
  source 1..21: mol_type = other RNA
ccttcatgtcccctgtccaag

SEQ ID NO: 81131 - RNA, 21 nt, synthetic construct
  source 1..21: mol_type = other RNA
ccttccaaagtatgcatagca

SEQ ID NO: 81132 - RNA, 21 nt, synthetic construct
  source 1..21: mol_type = other RNA
ccttccacctgctctttatct

SEQ ID NO: 81133 - RNA, 21 nt, synthetic construct
  source 1..21: mol_type = other RNA
ccttccacggaatgccccttt

SEQ ID NO: 81134 - RNA, 21 nt, synthetic construct
  source 1..21: mol_type = other RNA
ccttccagagacaaagcataa

SEQ ID NO: 81135 - RNA, 21 nt, synthetic construct
  source 1..21: mol_type = other RNA
ccttccagatgttttacacat

SEQ ID NO: 81136 - RNA, 21 nt, synthetic construct
  source 1..21: mol_type = other RNA
ccttccagcgtgtgcatgacc

SEQ ID NO: 81137 - RNA, 21 nt, synthetic construct
  source 1..21: mol_type = other RNA
ccttccagtatgatgccactc

SEQ ID NO: 81138 - RNA, 21 nt, synthetic construct
  source 1..21: mol_type = other RNA
ccttccagtttatatgcctag

SEQ ID NO: 81139 - RNA, 21 nt, synthetic construct
  source 1..21: mol_type = other RNA
ccttcccaaagacatcctgat

SEQ ID NO: 81140 - RNA, 21 nt, synthetic construct
  source 1..21: mol_type = other RNA
ccttcccaaatccaggatggc

SEQ ID NO: 81141 - RNA, 21 nt, synthetic construct
  source 1..21: mol_type = other RNA
ccttccccacctttcctgccc

SEQ ID NO: 81142 - RNA, 21 nt, synthetic construct
  source 1..21: mol_type = other RNA
ccttcccctgctgttcccaag

SEQ ID NO: 81143 - RNA, 21 nt, synthetic construct
  source 1..21: mol_type = other RNA
ccttcccctggtcgagctggg

SEQ ID NO: 81144 - RNA, 21 nt, synthetic construct
  source 1..21: mol_type = other RNA
ccttcccctttctttggtttt

SEQ ID NO: 81145 - RNA, 21 nt, synthetic construct
  source 1..21: mol_type = other RNA
ccttccctactcactgaaacc

SEQ ID NO: 81146 - RNA, 21 nt, synthetic construct
  source 1..21: mol_type = other RNA
ccttccctgaacaatgatttt

SEQ ID NO: 81147 - RNA, 21 nt, synthetic construct
  source 1..21: mol_type = other RNA
ccttccgacctgtagattggg

SEQ ID NO: 81148 - RNA, 21 nt, synthetic construct
  source 1..21: mol_type = other RNA
ccttcctacacatatctttag

SEQ ID NO: 81149 - RNA, 21 nt, synthetic construct
  source 1..21: mol_type = other RNA
ccttcctaccctgccttcctt

SEQ ID NO: 81150 - RNA, 21 nt, synthetic construct
  source 1..21: mol_type = other RNA
ccttcctcttcctcatccctc

SEQ ID NO: 81151 - RNA, 21 nt, synthetic construct
  source 1..21: mol_type = other RNA
ccttcctgacctctgcagtta

SEQ ID NO: 81152 - RNA, 21 nt, synthetic construct
  source 1..21: mol_type = other RNA
ccttcctgttctttgttagtt

SEQ ID NO: 81153 - RNA, 21 nt, synthetic construct
  source 1..21: mol_type = other RNA
ccttccttcatgtcccctgtc

SEQ ID NO: 81154 - RNA, 21 nt, synthetic construct
  source 1..21: mol_type = other RNA
ccttccttgctcaggagtaac

SEQ ID NO: 81155 - RNA, 21 nt, synthetic construct
  source 1..21: mol_type = other RNA
ccttccttgcttgtcttgaat

SEQ ID NO: 81156 - RNA, 21 nt, synthetic construct
  source 1..21: mol_type = other RNA
ccttccttgggcacactcccc

SEQ ID NO: 81157 - RNA, 21 nt, synthetic construct
  source 1..21: mol_type = other RNA
ccttccttgtgtcttaaattc

SEQ ID NO: 81158 - RNA, 21 nt, synthetic construct
  source 1..21: mol_type = other RNA
ccttcctttgatgacttacag

SEQ ID NO: 81159 - RNA, 21 nt, synthetic construct
  source 1..21: mol_type = other RNA
ccttcgaggcatctagttacc

SEQ ID NO: 81160 - RNA, 21 nt, synthetic construct
  source 1..21: mol_type = other RNA
ccttcgcagggtgaaacttga

SEQ ID NO: 81161 - RNA, 21 nt, synthetic construct
  source 1..21: mol_type = other RNA
ccttcgcgcgcggcagggatg

SEQ ID NO: 81162 - RNA, 21 nt, synthetic construct
  source 1..21: mol_type = other RNA
ccttcgcgggcaccttcccta

SEQ ID NO: 81163 - RNA, 21 nt, synthetic construct
  source 1..21: mol_type = other RNA
ccttctaaaatcatcacagta

SEQ ID NO: 81164 - RNA, 21 nt, synthetic construct
  source 1..21: mol_type = other RNA
ccttctaatcagtaacttaaa

SEQ ID NO: 81165 - RNA, 21 nt, synthetic construct
  source 1..21: mol_type = other RNA
ccttctacatccccccacccc

SEQ ID NO: 81166 - RNA, 21 nt, synthetic construct
  source 1..21: mol_type = other RNA
ccttctacttatcttttctag

SEQ ID NO: 81167 - RNA, 21 nt, synthetic construct
  source 1..21: mol_type = other RNA
ccttctattccattgttctct

SEQ ID NO: 81168 - RNA, 21 nt, synthetic construct
  source 1..21: mol_type = other RNA
ccttctcagaaggacaccagt

SEQ ID NO: 81169 - RNA, 21 nt, synthetic construct
  source 1..21: mol_type = other RNA
ccttctcatagtcttccaaaa

SEQ ID NO: 81170 - RNA, 21 nt, synthetic construct
  source 1..21: mol_type = other RNA
ccttctcctccaacccattcc

SEQ ID NO: 81171 - RNA, 21 nt, synthetic construct
  source 1..21: mol_type = other RNA
ccttctcgaagtggtgcttga

SEQ ID NO: 81172 - RNA, 21 nt, synthetic construct
  source 1..21: mol_type = other RNA
ccttctcgtgtgagctctagc

SEQ ID NO: 81173 - RNA, 21 nt, synthetic construct
  source 1..21: mol_type = other RNA
ccttctctactctgcctcagt

SEQ ID NO: 81174 - RNA, 21 nt, synthetic construct
  source 1..21: mol_type = other RNA
ccttctctcttccaaataatc

SEQ ID NO: 81175 - RNA, 21 nt, synthetic construct
  source 1..21: mol_type = other RNA
ccttctcttatactagtagaa

SEQ ID NO: 81176 - RNA, 21 nt, synthetic construct
  source 1..21: mol_type = other RNA
ccttctgaaggcactaacaaa

SEQ ID NO: 81177 - RNA, 21 nt, synthetic construct
  source 1..21: mol_type = other RNA
ccttctgagaaggcgaaatgt

SEQ ID NO: 81178 - RNA, 21 nt, synthetic construct
  source 1..21: mol_type = other RNA
ccttctgaggagctgagacca

SEQ ID NO: 81179 - RNA, 21 nt, synthetic construct
  source 1..21: mol_type = other RNA
ccttctgcaggctgaactgct

SEQ ID NO: 81180 - RNA, 21 nt, synthetic construct
  source 1..21: mol_type = other RNA
ccttctgccttgacctcccaa

SEQ ID NO: 81181 - RNA, 21 nt, synthetic construct
  source 1..21: mol_type = other RNA
ccttctgctcactttgggatt

SEQ ID NO: 81182 - RNA, 21 nt, synthetic construct
  source 1..21: mol_type = other RNA
ccttctgctcggctctgtcac

SEQ ID NO: 81183 - RNA, 21 nt, synthetic construct
  source 1..21: mol_type = other RNA
ccttctgctgggcccactctc

SEQ ID NO: 81184 - RNA, 21 nt, synthetic construct
  source 1..21: mol_type = other RNA
ccttctggaagatttctactg

SEQ ID NO: 81185 - RNA, 21 nt, synthetic construct
  source 1..21: mol_type = other RNA
ccttctggggttcaaaccacc

SEQ ID NO: 81186 - RNA, 21 nt, synthetic construct
  source 1..21: mol_type = other RNA
ccttctgttaatagataggtc

SEQ ID NO: 81187 - RNA, 21 nt, synthetic construct
  source 1..21: mol_type = other RNA
ccttcttaaatgtgaattaga

SEQ ID NO: 81188 - RNA, 21 nt, synthetic construct
  source 1..21: mol_type = other RNA
ccttcttaagacatttgggaa

SEQ ID NO: 81189 - RNA, 21 nt, synthetic construct
  source 1..21: mol_type = other RNA
ccttcttatttccttccagtt

SEQ ID NO: 81190 - RNA, 21 nt, synthetic construct
  source 1..21: mol_type = other RNA
ccttcttcacacattaactat

SEQ ID NO: 81191 - RNA, 21 nt, synthetic construct
  source 1..21: mol_type = other RNA
ccttcttgagagtctcttaag

SEQ ID NO: 81192 - RNA, 21 nt, synthetic construct
  source 1..21: mol_type = other RNA
ccttcttggagtaaacctgca

SEQ ID NO: 81193 - RNA, 21 nt, synthetic construct
  source 1..21: mol_type = other RNA
ccttctttctttcaaatgtga

SEQ ID NO: 81194 - RNA, 21 nt, synthetic construct
  source 1..21: mol_type = other RNA
ccttctttgggggaagcagga

SEQ ID NO: 81195 - RNA, 21 nt, synthetic construct
  source 1..21: mol_type = other RNA
ccttgaaaatgcccttattta

SEQ ID NO: 81196 - RNA, 21 nt, synthetic construct
  source 1..21: mol_type = other RNA
ccttgaaaatttccagcattt

SEQ ID NO: 81197 - RNA, 21 nt, synthetic construct
  source 1..21: mol_type = other RNA
ccttgaaagatcatttagtaa

SEQ ID NO: 81198 - RNA, 21 nt, synthetic construct
  source 1..21: mol_type = other RNA
ccttgaaaggatactgagaac

SEQ ID NO: 81199 - RNA, 21 nt, synthetic construct
  source 1..21: mol_type = other RNA
ccttgaacatgaacgagaaca

SEQ ID NO: 81200 - RNA, 21 nt, synthetic construct
  source 1..21: mol_type = other RNA
ccttgaactgggacttctagc

SEQ ID NO: 81201 - RNA, 21 nt, synthetic construct
  source 1..21: mol_type = other RNA
ccttgaagtacttcagcgctt

SEQ ID NO: 81202 - RNA, 21 nt, synthetic construct
  source 1..21: mol_type = other RNA
ccttgacaataaatggtgcag

SEQ ID NO: 81203 - RNA, 21 nt, synthetic construct
  source 1..21: mol_type = other RNA
ccttgacctcccaaaggactg

SEQ ID NO: 81204 - RNA, 21 nt, synthetic construct
  source 1..21: mol_type = other RNA
ccttgacgaagtcacattcta

SEQ ID NO: 81205 - RNA, 21 nt, synthetic construct
  source 1..21: mol_type = other RNA
ccttgaggtgagacagaccct

SEQ ID NO: 81206 - RNA, 21 nt, synthetic construct
  source 1..21: mol_type = other RNA
ccttgaggtgattcagagtgc

SEQ ID NO: 81207 - RNA, 21 nt, synthetic construct
  source 1..21: mol_type = other RNA
ccttgagtatttttgagcttt

SEQ ID NO: 81208 - RNA, 21 nt, synthetic construct
  source 1..21: mol_type = other RNA
ccttgatcagcttcctaccca

SEQ ID NO: 81209 - RNA, 21 nt, synthetic construct
  source 1..21: mol_type = other RNA
ccttgatccattacatcaaca

SEQ ID NO: 81210 - RNA, 21 nt, synthetic construct
  source 1..21: mol_type = other RNA
ccttgatgtcacaagccaggg

SEQ ID NO: 81211 - RNA, 21 nt, synthetic construct
  source 1..21: mol_type = other RNA
ccttgatttatggcctaagat

SEQ ID NO: 81212 - RNA, 21 nt, synthetic construct
  source 1..21: mol_type = other RNA
ccttgcaagccacattagcca

SEQ ID NO: 81213 - RNA, 21 nt, synthetic construct
  source 1..21: mol_type = other RNA
ccttgcacattagaatcatcc

SEQ ID NO: 81214 - RNA, 21 nt, synthetic construct
  source 1..21: mol_type = other RNA
ccttgcaccaactccacattg

SEQ ID NO: 81215 - RNA, 21 nt, synthetic construct
  source 1..21: mol_type = other RNA
ccttgccaacagttactttcc

SEQ ID NO: 81216 - RNA, 21 nt, synthetic construct
  source 1..21: mol_type = other RNA
ccttgccaaggcttgctttgg

SEQ ID NO: 81217 - RNA, 21 nt, synthetic construct
  source 1..21: mol_type = other RNA
ccttgccattctcccagttgt

SEQ ID NO: 81218 - RNA, 21 nt, synthetic construct
  source 1..21: mol_type = other RNA
ccttgcctgacagcaaataaa

SEQ ID NO: 81219 - RNA, 21 nt, synthetic construct
  source 1..21: mol_type = other RNA
ccttgctatgtaatctcatgg

SEQ ID NO: 81220 - RNA, 21 nt, synthetic construct
  source 1..21: mol_type = other RNA
ccttgctcaggagtaactgct

SEQ ID NO: 81221 - RNA, 21 nt, synthetic construct
  source 1..21: mol_type = other RNA
ccttgctcattcatctgcagt

SEQ ID NO: 81222 - RNA, 21 nt, synthetic construct
  source 1..21: mol_type = other RNA
ccttgctgaagaataactgtc

SEQ ID NO: 81223 - RNA, 21 nt, synthetic construct
  source 1..21: mol_type = other RNA
ccttgctgcttctacccacta

SEQ ID NO: 81224 - RNA, 21 nt, synthetic construct
  source 1..21: mol_type = other RNA
ccttgctgttgtaatgttact

SEQ ID NO: 81225 - RNA, 21 nt, synthetic construct
  source 1..21: mol_type = other RNA
ccttgcttgtcttgaatagca

SEQ ID NO: 81226 - RNA, 21 nt, synthetic construct
  source 1..21: mol_type = other RNA
ccttggagaagagttctgaag

SEQ ID NO: 81227 - RNA, 21 nt, synthetic construct
  source 1..21: mol_type = other RNA
ccttggagagaaaccttggtg

SEQ ID NO: 81228 - RNA, 21 nt, synthetic construct
  source 1..21: mol_type = other RNA
ccttggaggagccctgctgtg

SEQ ID NO: 81229 - RNA, 21 nt, synthetic construct
  source 1..21: mol_type = other RNA
ccttggattgctaaactgttc

SEQ ID NO: 81230 - RNA, 21 nt, synthetic construct
  source 1..21: mol_type = other RNA
ccttggcaaggggaatggtac

SEQ ID NO: 81231 - RNA, 21 nt, synthetic construct
  source 1..21: mol_type = other RNA
ccttggcctccccaagtgctg

SEQ ID NO: 81232 - RNA, 21 nt, synthetic construct
  source 1..21: mol_type = other RNA
ccttggccttctgaggagctg

SEQ ID NO: 81233 - RNA, 21 nt, synthetic construct
  source 1..21: mol_type = other RNA
ccttggctagactaagaaaaa

SEQ ID NO: 81234 - RNA, 21 nt, synthetic construct
  source 1..21: mol_type = other RNA
ccttgggagaaaatttttaca

SEQ ID NO: 81235 - RNA, 21 nt, synthetic construct
  source 1..21: mol_type = other RNA
ccttgggaggctgaggctggg

SEQ ID NO: 81236 - RNA, 21 nt, synthetic construct
  source 1..21: mol_type = other RNA
ccttgggatgcagcaaaagca

SEQ ID NO: 81237 - RNA, 21 nt, synthetic construct
  source 1..21: mol_type = other RNA
ccttgggcacactccccagtg

SEQ ID NO: 81238 - RNA, 21 nt, synthetic construct
  source 1..21: mol_type = other RNA
ccttggtaaaatcactaattc

SEQ ID NO: 81239 - RNA, 21 nt, synthetic construct
  source 1..21: mol_type = other RNA
ccttggtaaacagcagtctta

SEQ ID NO: 81240 - RNA, 21 nt, synthetic construct
  source 1..21: mol_type = other RNA
ccttggtaagagtgagaccct

SEQ ID NO: 81241 - RNA, 21 nt, synthetic construct
  source 1..21: mol_type = other RNA
ccttggtgtgcttctgatagg

SEQ ID NO: 81242 - RNA, 21 nt, synthetic construct
  source 1..21: mol_type = other RNA
ccttgtaatcaagtatctccc

SEQ ID NO: 81243 - RNA, 21 nt, synthetic construct
  source 1..21: mol_type = other RNA
ccttgtactgtgtggcttctc

SEQ ID NO: 81244 - RNA, 21 nt, synthetic construct
  source 1..21: mol_type = other RNA
ccttgtatccagtaatcttgc

SEQ ID NO: 81245 - RNA, 21 nt, synthetic construct
  source 1..21: mol_type = other RNA
ccttgtatggagactagtaca

SEQ ID NO: 81246 - RNA, 21 nt, synthetic construct
  source 1..21: mol_type = other RNA
ccttgtcctaaaattccttcc

SEQ ID NO: 81247 - RNA, 21 nt, synthetic construct
  source 1..21: mol_type = other RNA
ccttgtgatctatgcatactg

SEQ ID NO: 81248 - RNA, 21 nt, synthetic construct
  source 1..21: mol_type = other RNA
ccttgtgcacctcgggttcaa

SEQ ID NO: 81249 - RNA, 21 nt, synthetic construct
  source 1..21: mol_type = other RNA
ccttgtgcatgtgcaggaaac

SEQ ID NO: 81250 - RNA, 21 nt, synthetic construct
  source 1..21: mol_type = other RNA
ccttgtggtcttaagagactc

SEQ ID NO: 81251 - RNA, 21 nt, synthetic construct
  source 1..21: mol_type = other RNA
ccttgtgtcttaaattcaaag

SEQ ID NO: 81252 - RNA, 21 nt, synthetic construct
  source 1..21: mol_type = other RNA
ccttgtgttttatttggctgt

SEQ ID NO: 81253 - RNA, 21 nt, synthetic construct
  source 1..21: mol_type = other RNA
ccttgttggacagctgggaga

SEQ ID NO: 81254 - RNA, 21 nt, synthetic construct
  source 1..21: mol_type = other RNA
cctttaacgtatctgggaaaa

SEQ ID NO: 81255 - RNA, 21 nt, synthetic construct
  source 1..21: mol_type = other RNA
cctttaagttctccaagttat

SEQ ID NO: 81256 - RNA, 21 nt, synthetic construct
  source 1..21: mol_type = other RNA
cctttaatcacctcaagtgat

SEQ ID NO: 81257 - RNA, 21 nt, synthetic construct
  source 1..21: mol_type = other RNA
cctttaatttagcgttcatcc

SEQ ID NO: 81258 - RNA, 21 nt, synthetic construct
  source 1..21: mol_type = other RNA
cctttaatttgggtttgagtt

SEQ ID NO: 81259 - RNA, 21 nt, synthetic construct
  source 1..21: mol_type = other RNA
cctttacccctgagaacttca

SEQ ID NO: 81260 - RNA, 21 nt, synthetic construct
  source 1..21: mol_type = other RNA
cctttactcagattcaccaat

SEQ ID NO: 81261 - RNA, 21 nt, synthetic construct
  source 1..21: mol_type = other RNA
cctttagtgttctgtgtttat

SEQ ID NO: 81262 - RNA, 21 nt, synthetic construct
  source 1..21: mol_type = other RNA
cctttatcggataaggaagag

SEQ ID NO: 81263 - RNA, 21 nt, synthetic construct
  source 1..21: mol_type = other RNA
cctttatctttggatatcccc

SEQ ID NO: 81264 - RNA, 21 nt, synthetic construct
  source 1..21: mol_type = other RNA
cctttattaactagaattgac

SEQ ID NO: 81265 - RNA, 21 nt, synthetic construct
  source 1..21: mol_type = other RNA
cctttattcaaagatcatttc

SEQ ID NO: 81266 - RNA, 21 nt, synthetic construct
  source 1..21: mol_type = other RNA
cctttattttttcttcccatc

SEQ ID NO: 81267 - RNA, 21 nt, synthetic construct
  source 1..21: mol_type = other RNA
cctttcaaagagacctgattc

SEQ ID NO: 81268 - RNA, 21 nt, synthetic construct
  source 1..21: mol_type = other RNA
cctttcaagattgtttaattc

SEQ ID NO: 81269 - RNA, 21 nt, synthetic construct
  source 1..21: mol_type = other RNA
cctttcaaggtatctccccaa

SEQ ID NO: 81270 - RNA, 21 nt, synthetic construct
  source 1..21: mol_type = other RNA
cctttcactttgatcatacac

SEQ ID NO: 81271 - RNA, 21 nt, synthetic construct
  source 1..21: mol_type = other RNA
cctttcagcatagcagaacct

SEQ ID NO: 81272 - RNA, 21 nt, synthetic construct
  source 1..21: mol_type = other RNA
cctttcagtcggttcttcacc

SEQ ID NO: 81273 - RNA, 21 nt, synthetic construct
  source 1..21: mol_type = other RNA
cctttcatttggcctctgcgg

SEQ ID NO: 81274 - RNA, 21 nt, synthetic construct
  source 1..21: mol_type = other RNA
cctttccaaattcaaagcaag

SEQ ID NO: 81275 - RNA, 21 nt, synthetic construct
  source 1..21: mol_type = other RNA
cctttccagaggttcttttaa

SEQ ID NO: 81276 - RNA, 21 nt, synthetic construct
  source 1..21: mol_type = other RNA
cctttcccttctgctcggctc

SEQ ID NO: 81277 - RNA, 21 nt, synthetic construct
  source 1..21: mol_type = other RNA
cctttcctgcccctccactcc

SEQ ID NO: 81278 - RNA, 21 nt, synthetic construct
  source 1..21: mol_type = other RNA
cctttccttccttgctcagga

SEQ ID NO: 81279 - RNA, 21 nt, synthetic construct
  source 1..21: mol_type = other RNA
cctttccttgtcctaaaattc

SEQ ID NO: 81280 - RNA, 21 nt, synthetic construct
  source 1..21: mol_type = other RNA
cctttcgctaatctcaatcag

SEQ ID NO: 81281 - RNA, 21 nt, synthetic construct
  source 1..21: mol_type = other RNA
cctttcgctatcagtagtttg

SEQ ID NO: 81282 - RNA, 21 nt, synthetic construct
  source 1..21: mol_type = other RNA
cctttcgcttttggagctata

SEQ ID NO: 81283 - RNA, 21 nt, synthetic construct
  source 1..21: mol_type = other RNA
cctttctagaatgcatccctc

SEQ ID NO: 81284 - RNA, 21 nt, synthetic construct
  source 1..21: mol_type = other RNA
cctttctaggcatctatttcc

SEQ ID NO: 81285 - RNA, 21 nt, synthetic construct
  source 1..21: mol_type = other RNA
cctttctatacttcatctttc

SEQ ID NO: 81286 - RNA, 21 nt, synthetic construct
  source 1..21: mol_type = other RNA
cctttctcaaagcccaccagc

SEQ ID NO: 81287 - RNA, 21 nt, synthetic construct
  source 1..21: mol_type = other RNA
cctttctcgcagcggggatgc

SEQ ID NO: 81288 - RNA, 21 nt, synthetic construct
  source 1..21: mol_type = other RNA
cctttctgtttgtttgttttg

SEQ ID NO: 81289 - RNA, 21 nt, synthetic construct
  source 1..21: mol_type = other RNA
cctttcttaccctcacagtca

SEQ ID NO: 81290 - RNA, 21 nt, synthetic construct
  source 1..21: mol_type = other RNA
cctttcttaggaagctatgga

SEQ ID NO: 81291 - RNA, 21 nt, synthetic construct
  source 1..21: mol_type = other RNA
cctttcttaggtttctcattt

SEQ ID NO: 81292 - RNA, 21 nt, synthetic construct
  source 1..21: mol_type = other RNA
cctttcttggtctgcagactc

SEQ ID NO: 81293 - RNA, 21 nt, synthetic construct
  source 1..21: mol_type = other RNA
cctttcttgttagtaggaaaa

SEQ ID NO: 81294 - RNA, 21 nt, synthetic construct
  source 1..21: mol_type = other RNA
cctttctttggttttgactca

SEQ ID NO: 81295 - RNA, 21 nt, synthetic construct
  source 1..21: mol_type = other RNA
cctttgaagtatgtaattaca

SEQ ID NO: 81296 - RNA, 21 nt, synthetic construct
  source 1..21: mol_type = other RNA
cctttgagcagagtcctgagg

SEQ ID NO: 81297 - RNA, 21 nt, synthetic construct
  source 1..21: mol_type = other RNA
cctttgaggtaagaacttgtc

SEQ ID NO: 81298 - RNA, 21 nt, synthetic construct
  source 1..21: mol_type = other RNA
cctttgatgacttacagatat

SEQ ID NO: 81299 - RNA, 21 nt, synthetic construct
  source 1..21: mol_type = other RNA
cctttgatgcacaaaagttta

SEQ ID NO: 81300 - RNA, 21 nt, synthetic construct
  source 1..21: mol_type = other RNA
cctttgcacacaccaaatcat

SEQ ID NO: 81301 - RNA, 21 nt, synthetic construct
  source 1..21: mol_type = other RNA
cctttgcctaagtctcaggat

SEQ ID NO: 81302 - RNA, 21 nt, synthetic construct
  source 1..21: mol_type = other RNA
cctttgcctcctgggttcagg

SEQ ID NO: 81303 - RNA, 21 nt, synthetic construct
  source 1..21: mol_type = other RNA
cctttgcctctccagggagga

SEQ ID NO: 81304 - RNA, 21 nt, synthetic construct
  source 1..21: mol_type = other RNA
cctttgcctttcactttgatc

SEQ ID NO: 81305 - RNA, 21 nt, synthetic construct
  source 1..21: mol_type = other RNA
cctttgcgtctgtgattatca

SEQ ID NO: 81306 - RNA, 21 nt, synthetic construct
  source 1..21: mol_type = other RNA
cctttgcttcccacttcgaaa

SEQ ID NO: 81307 - RNA, 21 nt, synthetic construct
  source 1..21: mol_type = other RNA
cctttggctactgtaaacaat

SEQ ID NO: 81308 - RNA, 21 nt, synthetic construct
  source 1..21: mol_type = other RNA
cctttgggaggtcaaggcaga

SEQ ID NO: 81309 - RNA, 21 nt, synthetic construct
  source 1..21: mol_type = other RNA
cctttgtattcatccagttta

SEQ ID NO: 81310 - RNA, 21 nt, synthetic construct
  source 1..21: mol_type = other RNA
cctttgtccactgtcagtggg

SEQ ID NO: 81311 - RNA, 21 nt, synthetic construct
  source 1..21: mol_type = other RNA
cctttgtgcaggtctgggttt

SEQ ID NO: 81312 - RNA, 21 nt, synthetic construct
  source 1..21: mol_type = other RNA
cctttgtgtcaagtacaacta

SEQ ID NO: 81313 - RNA, 21 nt, synthetic construct
  source 1..21: mol_type = other RNA
cctttgttagtgccttcagaa

SEQ ID NO: 81314 - RNA, 21 nt, synthetic construct
  source 1..21: mol_type = other RNA
cctttgttatctgaacgtctt

SEQ ID NO: 81315 - RNA, 21 nt, synthetic construct
  source 1..21: mol_type = other RNA
cctttgttcatcatcttttgc

SEQ ID NO: 81316 - RNA, 21 nt, synthetic construct
  source 1..21: mol_type = other RNA
cctttgttgaaaacgaggaaa

SEQ ID NO: 81317 - RNA, 21 nt, synthetic construct
  source 1..21: mol_type = other RNA
cctttgttgccaggtggacgc

SEQ ID NO: 81318 - RNA, 21 nt, synthetic construct
  source 1..21: mol_type = other RNA
ccttttaagagtgaagaaacc

SEQ ID NO: 81319 - RNA, 21 nt, synthetic construct
  source 1..21: mol_type = other RNA
ccttttaagggaaacactcat

SEQ ID NO: 81320 - RNA, 21 nt, synthetic construct
  source 1..21: mol_type = other RNA
ccttttacaccctaggtaggg

SEQ ID NO: 81321 - RNA, 21 nt, synthetic construct
  source 1..21: mol_type = other RNA
ccttttaggtgccccactcca

SEQ ID NO: 81322 - RNA, 21 nt, synthetic construct
  source 1..21: mol_type = other RNA
ccttttatgtgcagtctaacc

SEQ ID NO: 81323 - RNA, 21 nt, synthetic construct
  source 1..21: mol_type = other RNA
ccttttcactcttagtgatgt

SEQ ID NO: 81324 - RNA, 21 nt, synthetic construct
  source 1..21: mol_type = other RNA
ccttttcccaggagctagaac

SEQ ID NO: 81325 - RNA, 21 nt, synthetic construct
  source 1..21: mol_type = other RNA
ccttttcctgttccgggatcc

SEQ ID NO: 81326 - RNA, 21 nt, synthetic construct
  source 1..21: mol_type = other RNA
ccttttcgagactgagtaata

SEQ ID NO: 81327 - RNA, 21 nt, synthetic construct
  source 1..21: mol_type = other RNA
ccttttctgatttgctggctc

SEQ ID NO: 81328 - RNA, 21 nt, synthetic construct
  source 1..21: mol_type = other RNA
ccttttgagtttggtgtattt

SEQ ID NO: 81329 - RNA, 21 nt, synthetic construct
  source 1..21: mol_type = other RNA
ccttttggatgcagatttctt

SEQ ID NO: 81330 - RNA, 21 nt, synthetic construct
  source 1..21: mol_type = other RNA
ccttttgtagaccctgttagt

SEQ ID NO: 81331 - RNA, 21 nt, synthetic construct
  source 1..21: mol_type = other RNA
ccttttgtagagggaatttgt

SEQ ID NO: 81332 - RNA, 21 nt, synthetic construct
  source 1..21: mol_type = other RNA
ccttttgtagctaatatcttt

SEQ ID NO: 81333 - RNA, 21 nt, synthetic construct
  source 1..21: mol_type = other RNA
ccttttgtcaagctatcagaa

SEQ ID NO: 81334 - RNA, 21 nt, synthetic construct
  source 1..21: mol_type = other RNA
cctttttaggtagggataaga

SEQ ID NO: 81335 - RNA, 21 nt, synthetic construct
  source 1..21: mol_type = other RNA
cctttttatcacccttataaa

SEQ ID NO: 81336 - RNA, 21 nt, synthetic construct
  source 1..21: mol_type = other RNA
cctttttgggatctgtcatgt

SEQ ID NO: 81337 - RNA, 21 nt, synthetic construct
  source 1..21: mol_type = other RNA
ccttttttaaggaaaagtcag

SEQ ID NO: 81338 - RNA, 21 nt, synthetic construct
  source 1..21: mol_type = other RNA
ccttttttactgacttttcct

SEQ ID NO: 81339 - RNA, 21 nt, synthetic construct
  source 1..21: mol_type = other RNA
ccttttttatgtgctttctca

SEQ ID NO: 81340 - RNA, 21 nt, synthetic construct
  source 1..21: mol_type = other RNA
cgaaaacctgaaatggcttaa

SEQ ID NO: 81341 - RNA, 21 nt, synthetic construct
  source 1..21: mol_type = other RNA
cgaaaaggaatggaattctga

SEQ ID NO: 81342 - RNA, 21 nt, synthetic construct
  source 1..21: mol_type = other RNA
cgaaaatatccctggggtttc

SEQ ID NO: 81343 - RNA, 21 nt, synthetic construct
  source 1..21: mol_type = other RNA
cgaaaatgggccaaagacttc

SEQ ID NO: 81344 - RNA, 21 nt, synthetic construct
  source 1..21: mol_type = other RNA
cgaaacacactcgtgtatgat

SEQ ID NO: 81345 - RNA, 21 nt, synthetic construct
  source 1..21: mol_type = other RNA
cgaaagaactgaaagcaggga

SEQ ID NO: 81346 - RNA, 21 nt, synthetic construct
  source 1..21: mol_type = other RNA
cgaaagcctttattttttctt

SEQ ID NO: 81347 - RNA, 21 nt, synthetic construct
  source 1..21: mol_type = other RNA
cgaaagcggtcaacgcaccca

SEQ ID NO: 81348 - RNA, 21 nt, synthetic construct
  source 1..21: mol_type = other RNA
cgaaagggattctggccaaat

SEQ ID NO: 81349 - RNA, 21 nt, synthetic construct
  source 1..21: mol_type = other RNA
cgaaaggtacgacgctcttgt

SEQ ID NO: 81350 - RNA, 21 nt, synthetic construct
  source 1..21: mol_type = other RNA
cgaaagtgaagcccagagagg

SEQ ID NO: 81351 - RNA, 21 nt, synthetic construct
  source 1..21: mol_type = other RNA
cgaaagtgctctaccctttcc

SEQ ID NO: 81352 - RNA, 21 nt, synthetic construct
  source 1..21: mol_type = other RNA
cgaaagttcagatagaattaa

SEQ ID NO: 81353 - RNA, 21 nt, synthetic construct
  source 1..21: mol_type = other RNA
cgaaataatcattgttaggtg

SEQ ID NO: 81354 - RNA, 21 nt, synthetic construct
  source 1..21: mol_type = other RNA
cgaaatagtagttgctcagaa

SEQ ID NO: 81355 - RNA, 21 nt, synthetic construct
  source 1..21: mol_type = other RNA
cgaaatatctccctcacagtc

SEQ ID NO: 81356 - RNA, 21 nt, synthetic construct
  source 1..21: mol_type = other RNA
cgaaatgcacttagcgctgat

SEQ ID NO: 81357 - RNA, 21 nt, synthetic construct
  source 1..21: mol_type = other RNA
cgaaatgtgaacagacagaca

SEQ ID NO: 81358 - RNA, 21 nt, synthetic construct
  source 1..21: mol_type = other RNA
cgaaccaattaccataaagtc

SEQ ID NO: 81359 - RNA, 21 nt, synthetic construct
  source 1..21: mol_type = other RNA
cgaactaaggaaagctcagga

SEQ ID NO: 81360 - RNA, 21 nt, synthetic construct
  source 1..21: mol_type = other RNA
cgaactctcgacctcgtgatc

SEQ ID NO: 81361 - RNA, 21 nt, synthetic construct
  source 1..21: mol_type = other RNA
cgaagagaccacaggctctct

SEQ ID NO: 81362 - RNA, 21 nt, synthetic construct
  source 1..21: mol_type = other RNA
cgaagaggacgatttttccaa

SEQ ID NO: 81363 - RNA, 21 nt, synthetic construct
  source 1..21: mol_type = other RNA
cgaagagggagaagaaataaa

SEQ ID NO: 81364 - RNA, 21 nt, synthetic construct
  source 1..21: mol_type = other RNA
cgaagcaaaacatatgtcaga

SEQ ID NO: 81365 - RNA, 21 nt, synthetic construct
  source 1..21: mol_type = other RNA
cgaagcacaaccactgatgga

SEQ ID NO: 81366 - RNA, 21 nt, synthetic construct
  source 1..21: mol_type = other RNA
cgaagcccgccgctcgcaggt

SEQ ID NO: 81367 - RNA, 21 nt, synthetic construct
  source 1..21: mol_type = other RNA
cgaagccttcccctgctgttc

SEQ ID NO: 81368 - RNA, 21 nt, synthetic construct
  source 1..21: mol_type = other RNA
cgaagctacagtaatcaaaca

SEQ ID NO: 81369 - RNA, 21 nt, synthetic construct
  source 1..21: mol_type = other RNA
cgaagcttaatttagatgaga

SEQ ID NO: 81370 - RNA, 21 nt, synthetic construct
  source 1..21: mol_type = other RNA
cgaagcttattaaaatgaacc

SEQ ID NO: 81371 - RNA, 21 nt, synthetic construct
  source 1..21: mol_type = other RNA
cgaaggcaatgtaacacagtt

SEQ ID NO: 81372 - RNA, 21 nt, synthetic construct
  source 1..21: mol_type = other RNA
cgaaggcctgcttcattccgc

SEQ ID NO: 81373 - RNA, 21 nt, synthetic construct
  source 1..21: mol_type = other RNA
cgaaggcgtgtaaactgttgg

SEQ ID NO: 81374 - RNA, 21 nt, synthetic construct
  source 1..21: mol_type = other RNA
cgaagtcacattctagtgatg

SEQ ID NO: 81375 - RNA, 21 nt, synthetic construct
  source 1..21: mol_type = other RNA
cgaagtgggaagcaaaggatt

SEQ ID NO: 81376 - RNA, 21 nt, synthetic construct
  source 1..21: mol_type = other RNA
cgaagtggtgcttgaactgct

SEQ ID NO: 81377 - RNA, 21 nt, synthetic construct
  source 1..21: mol_type = other RNA
cgaatcatctaggcatataaa

SEQ ID NO: 81378 - RNA, 21 nt, synthetic construct
  source 1..21: mol_type = other RNA
cgaatcctcacaacaggcctg

SEQ ID NO: 81379 - RNA, 21 nt, synthetic construct
  source 1..21: mol_type = other RNA
cgaatcctttgcttcccactt

SEQ ID NO: 81380 - RNA, 21 nt, synthetic construct
  source 1..21: mol_type = other RNA
cgaatgaaaacacaacatacc

SEQ ID NO: 81381 - RNA, 21 nt, synthetic construct
  source 1..21: mol_type = other RNA
cgaatgaactcctatagttaa

SEQ ID NO: 81382 - RNA, 21 nt, synthetic construct
  source 1..21: mol_type = other RNA
cgaatgcatgggaggtaatac

SEQ ID NO: 81383 - RNA, 21 nt, synthetic construct
  source 1..21: mol_type = other RNA
cgaatgtggtggtatgcactg

SEQ ID NO: 81384 - RNA, 21 nt, synthetic construct
  source 1..21: mol_type = other RNA
cgaattagattgttttgttgc

SEQ ID NO: 81385 - RNA, 21 nt, synthetic construct
  source 1..21: mol_type = other RNA
cgaattatgctaacatgaact

SEQ ID NO: 81386 - RNA, 21 nt, synthetic construct
  source 1..21: mol_type = other RNA
cgaattctttaaaactgctga

SEQ ID NO: 81387 - RNA, 21 nt, synthetic construct
  source 1..21: mol_type = other RNA
cgacaagagcagaactccacc

SEQ ID NO: 81388 - RNA, 21 nt, synthetic construct
  source 1..21: mol_type = other RNA
cgacaatctctggggttaggg

SEQ ID NO: 81389 - RNA, 21 nt, synthetic construct
  source 1..21: mol_type = other RNA
cgacacacaatccaagtttct

SEQ ID NO: 81390 - RNA, 21 nt, synthetic construct
  source 1..21: mol_type = other RNA
cgacaccagaactacacattc

SEQ ID NO: 81391 - RNA, 21 nt, synthetic construct
  source 1..21: mol_type = other RNA
cgacagagtgaaactctggct

SEQ ID NO: 81392 - RNA, 21 nt, synthetic construct
  source 1..21: mol_type = other RNA
cgacagcagataagatccaag

SEQ ID NO: 81393 - RNA, 21 nt, synthetic construct
  source 1..21: mol_type = other RNA
cgacagcaggaaaagctaccc

SEQ ID NO: 81394 - RNA, 21 nt, synthetic construct
  source 1..21: mol_type = other RNA
cgacagctacggaggatgagg

SEQ ID NO: 81395 - RNA, 21 nt, synthetic construct
  source 1..21: mol_type = other RNA
cgacagtcccttgcctgacag

SEQ ID NO: 81396 - RNA, 21 nt, synthetic construct
  source 1..21: mol_type = other RNA
cgacatatcagggatcacaga

SEQ ID NO: 81397 - RNA, 21 nt, synthetic construct
  source 1..21: mol_type = other RNA
cgaccaagttactagaagcac

SEQ ID NO: 81398 - RNA, 21 nt, synthetic construct
  source 1..21: mol_type = other RNA
cgaccaggggaaggagtctgc

SEQ ID NO: 81399 - RNA, 21 nt, synthetic construct
  source 1..21: mol_type = other RNA
cgacccactagtgaagtccca

SEQ ID NO: 81400 - RNA, 21 nt, synthetic construct
  source 1..21: mol_type = other RNA
cgacccccctacctccctccc

SEQ ID NO: 81401 - RNA, 21 nt, synthetic construct
  source 1..21: mol_type = other RNA
cgaccccctgggctcaagcca

SEQ ID NO: 81402 - RNA, 21 nt, synthetic construct
  source 1..21: mol_type = other RNA
cgaccggacgtggtggctcac

SEQ ID NO: 81403 - RNA, 21 nt, synthetic construct
  source 1..21: mol_type = other RNA
cgacctccagcgctaagcact

SEQ ID NO: 81404 - RNA, 21 nt, synthetic construct
  source 1..21: mol_type = other RNA
cgacctcgaagcacaaccact

SEQ ID NO: 81405 - RNA, 21 nt, synthetic construct
  source 1..21: mol_type = other RNA
cgacctgtagattgggctttt

SEQ ID NO: 81406 - RNA, 21 nt, synthetic construct
  source 1..21: mol_type = other RNA
cgaccttgctcattcatctgc

SEQ ID NO: 81407 - RNA, 21 nt, synthetic construct
  source 1..21: mol_type = other RNA
cgacgcctttcatttggcctc

SEQ ID NO: 81408 - RNA, 21 nt, synthetic construct
  source 1..21: mol_type = other RNA
cgacgctcttgttcaaaaacc

SEQ ID NO: 81409 - RNA, 21 nt, synthetic construct
  source 1..21: mol_type = other RNA
cgacggctcaggcctgttgtg

SEQ ID NO: 81410 - RNA, 21 nt, synthetic construct
  source 1..21: mol_type = other RNA
cgacgtatgcaacttactctc

SEQ ID NO: 81411 - RNA, 21 nt, synthetic construct
  source 1..21: mol_type = other RNA
cgactcatgcctgtaattcta

SEQ ID NO: 81412 - RNA, 21 nt, synthetic construct
  source 1..21: mol_type = other RNA
cgactgaaaggaaatgagtgt

SEQ ID NO: 81413 - RNA, 21 nt, synthetic construct
  source 1..21: mol_type = other RNA
cgagaaaaatggggatatcca

SEQ ID NO: 81414 - RNA, 21 nt, synthetic construct
  source 1..21: mol_type = other RNA
cgagaaaagcacaggcatcgg

SEQ ID NO: 81415 - RNA, 21 nt, synthetic construct
  source 1..21: mol_type = other RNA
cgagaaaggcgaagcggcagg

SEQ ID NO: 81416 - RNA, 21 nt, synthetic construct
  source 1..21: mol_type = other RNA
cgagaaatcggaactcctgta

SEQ ID NO: 81417 - RNA, 21 nt, synthetic construct
  source 1..21: mol_type = other RNA
cgagaacaaaacaagaagaaa

SEQ ID NO: 81418 - RNA, 21 nt, synthetic construct
  source 1..21: mol_type = other RNA
cgagaaggacagcttccaccc

SEQ ID NO: 81419 - RNA, 21 nt, synthetic construct
  source 1..21: mol_type = other RNA
cgagaagggaagtaaagatca

SEQ ID NO: 81420 - RNA, 21 nt, synthetic construct
  source 1..21: mol_type = other RNA
cgagacaagttctcctgtgtg

SEQ ID NO: 81421 - RNA, 21 nt, synthetic construct
  source 1..21: mol_type = other RNA
cgagacctcatctctgcaaaa

SEQ ID NO: 81422 - RNA, 21 nt, synthetic construct
  source 1..21: mol_type = other RNA
cgagactccatctcaagaaaa

SEQ ID NO: 81423 - RNA, 21 nt, synthetic construct
  source 1..21: mol_type = other RNA
cgagactgagtaatattccat

SEQ ID NO: 81424 - RNA, 21 nt, synthetic construct
  source 1..21: mol_type = other RNA
cgagactgtaatgagctgaga

SEQ ID NO: 81425 - RNA, 21 nt, synthetic construct
  source 1..21: mol_type = other RNA
cgagactgttagggacttatg

SEQ ID NO: 81426 - RNA, 21 nt, synthetic construct
  source 1..21: mol_type = other RNA
cgagagatgaatggataagga

SEQ ID NO: 81427 - RNA, 21 nt, synthetic construct
  source 1..21: mol_type = other RNA
cgagatacttaagtttttaac

SEQ ID NO: 81428 - RNA, 21 nt, synthetic construct
  source 1..21: mol_type = other RNA
cgagatcacgccactgcattc

SEQ ID NO: 81429 - RNA, 21 nt, synthetic construct
  source 1..21: mol_type = other RNA
cgagatggcgtgcgcctgtaa

SEQ ID NO: 81430 - RNA, 21 nt, synthetic construct
  source 1..21: mol_type = other RNA
cgagcagaagggaaaggatga

SEQ ID NO: 81431 - RNA, 21 nt, synthetic construct
  source 1..21: mol_type = other RNA
cgagcggcgggcttcgccttt

SEQ ID NO: 81432 - RNA, 21 nt, synthetic construct
  source 1..21: mol_type = other RNA
cgagctcctgacctcagatat

SEQ ID NO: 81433 - RNA, 21 nt, synthetic construct
  source 1..21: mol_type = other RNA
cgagctgggtgatgttcaacc

SEQ ID NO: 81434 - RNA, 21 nt, synthetic construct
  source 1..21: mol_type = other RNA
cgagcttgatctttacttccc

SEQ ID NO: 81435 - RNA, 21 nt, synthetic construct
  source 1..21: mol_type = other RNA
cgaggaaaagagaacattggt

SEQ ID NO: 81436 - RNA, 21 nt, synthetic construct
  source 1..21: mol_type = other RNA
cgaggaaacccgctctgggtg

SEQ ID NO: 81437 - RNA, 21 nt, synthetic construct
  source 1..21: mol_type = other RNA
cgaggacagactgcagttgga

SEQ ID NO: 81438 - RNA, 21 nt, synthetic construct
  source 1..21: mol_type = other RNA
cgaggcagagagagtaactgg

SEQ ID NO: 81439 - RNA, 21 nt, synthetic construct
  source 1..21: mol_type = other RNA
cgaggcaggtggatcaggaga

SEQ ID NO: 81440 - RNA, 21 nt, synthetic construct
  source 1..21: mol_type = other RNA
cgaggcatctagttaccacta

SEQ ID NO: 81441 - RNA, 21 nt, synthetic construct
  source 1..21: mol_type = other RNA
cgaggccagtccctagtgtct

SEQ ID NO: 81442 - RNA, 21 nt, synthetic construct
  source 1..21: mol_type = other RNA
cgaggcctggaacaggccctt

SEQ ID NO: 81443 - RNA, 21 nt, synthetic construct
  source 1..21: mol_type = other RNA
cgagggagacggcgagcttga

SEQ ID NO: 81444 - RNA, 21 nt, synthetic construct
  source 1..21: mol_type = other RNA
cgagggagcgtacggggtccg

SEQ ID NO: 81445 - RNA, 21 nt, synthetic construct
  source 1..21: mol_type = other RNA
cgagggggctgagtatgggtc

SEQ ID NO: 81446 - RNA, 21 nt, synthetic construct
  source 1..21: mol_type = other RNA
cgagggtagcttttcctgctg

SEQ ID NO: 81447 - RNA, 21 nt, synthetic construct
  source 1..21: mol_type = other RNA
cgagggttgaacatcacccag

SEQ ID NO: 81448 - RNA, 21 nt, synthetic construct
  source 1..21: mol_type = other RNA
cgaggtcgcaccctgagcatc

SEQ ID NO: 81449 - RNA, 21 nt, synthetic construct
  source 1..21: mol_type = other RNA
cgaggtgcacaagggaagagg

SEQ ID NO: 81450 - RNA, 21 nt, synthetic construct
  source 1..21: mol_type = other RNA
cgagtaatggatgtttttaga

SEQ ID NO: 81451 - RNA, 21 nt, synthetic construct
  source 1..21: mol_type = other RNA
cgagtaatgggatggctgggc

SEQ ID NO: 81452 - RNA, 21 nt, synthetic construct
  source 1..21: mol_type = other RNA
cgagtagttgtaactacagac

SEQ ID NO: 81453 - RNA, 21 nt, synthetic construct
  source 1..21: mol_type = other RNA
cgagtatcatataaattgcaa

SEQ ID NO: 81454 - RNA, 21 nt, synthetic construct
  source 1..21: mol_type = other RNA
cgagtatctaggagtacagtg

SEQ ID NO: 81455 - RNA, 21 nt, synthetic construct
  source 1..21: mol_type = other RNA
cgagtattcaagtttcaccct

SEQ ID NO: 81456 - RNA, 21 nt, synthetic construct
  source 1..21: mol_type = other RNA
cgagtgtgaacgatggtttct

SEQ ID NO: 81457 - RNA, 21 nt, synthetic construct
  source 1..21: mol_type = other RNA
cgagtgtgtttcgcaaagtaa

SEQ ID NO: 81458 - RNA, 21 nt, synthetic construct
  source 1..21: mol_type = other RNA
cgagttatgcaagatgtcaac

SEQ ID NO: 81459 - RNA, 21 nt, synthetic construct
  source 1..21: mol_type = other RNA
cgagttcaggaccagcttggg

SEQ ID NO: 81460 - RNA, 21 nt, synthetic construct
  source 1..21: mol_type = other RNA
cgagttctgggagttcattag

SEQ ID NO: 81461 - RNA, 21 nt, synthetic construct
  source 1..21: mol_type = other RNA
cgataaacttcagttttatca

SEQ ID NO: 81462 - RNA, 21 nt, synthetic construct
  source 1..21: mol_type = other RNA
cgataaagggtctggtatcta

SEQ ID NO: 81463 - RNA, 21 nt, synthetic construct
  source 1..21: mol_type = other RNA
cgatactttttattttcatgg

SEQ ID NO: 81464 - RNA, 21 nt, synthetic construct
  source 1..21: mol_type = other RNA
cgatagtctcctatattgtca

SEQ ID NO: 81465 - RNA, 21 nt, synthetic construct
  source 1..21: mol_type = other RNA
cgatattcctatcagaagcac

SEQ ID NO: 81466 - RNA, 21 nt, synthetic construct
  source 1..21: mol_type = other RNA
cgatccttactaccaccacta

SEQ ID NO: 81467 - RNA, 21 nt, synthetic construct
  source 1..21: mol_type = other RNA
cgatgaaattgaccattccac

SEQ ID NO: 81468 - RNA, 21 nt, synthetic construct
  source 1..21: mol_type = other RNA
cgatgataccttcttgagagt

SEQ ID NO: 81469 - RNA, 21 nt, synthetic construct
  source 1..21: mol_type = other RNA
cgatgatcaaaaccaggaggt

SEQ ID NO: 81470 - RNA, 21 nt, synthetic construct
  source 1..21: mol_type = other RNA
cgatgcattccagattgaaat

SEQ ID NO: 81471 - RNA, 21 nt, synthetic construct
  source 1..21: mol_type = other RNA
cgatgccatgtgttttgtttt

SEQ ID NO: 81472 - RNA, 21 nt, synthetic construct
  source 1..21: mol_type = other RNA
cgatgcctgtgcttttctcgt

SEQ ID NO: 81473 - RNA, 21 nt, synthetic construct
  source 1..21: mol_type = other RNA
cgatgcttaggtaagaaaaat

SEQ ID NO: 81474 - RNA, 21 nt, synthetic construct
  source 1..21: mol_type = other RNA
cgatggacatttaggttgttt

SEQ ID NO: 81475 - RNA, 21 nt, synthetic construct
  source 1..21: mol_type = other RNA
cgatggtttctgacacccgac

SEQ ID NO: 81476 - RNA, 21 nt, synthetic construct
  source 1..21: mol_type = other RNA
cgattaaaataacacgcagaa

SEQ ID NO: 81477 - RNA, 21 nt, synthetic construct
  source 1..21: mol_type = other RNA
cgattctagtgtctcagcctc

SEQ ID NO: 81478 - RNA, 21 nt, synthetic construct
  source 1..21: mol_type = other RNA
cgattctgacccagagcctaa

SEQ ID NO: 81479 - RNA, 21 nt, synthetic construct
  source 1..21: mol_type = other RNA
cgattggttggactccaccct

SEQ ID NO: 81480 - RNA, 21 nt, synthetic construct
  source 1..21: mol_type = other RNA
cgattgtttcagtgtgtccac

SEQ ID NO: 81481 - RNA, 21 nt, synthetic construct
  source 1..21: mol_type = other RNA
cgatttcagttaacttattgg

SEQ ID NO: 81482 - RNA, 21 nt, synthetic construct
  source 1..21: mol_type = other RNA
cgatttctcggccgggcgcgg

SEQ ID NO: 81483 - RNA, 21 nt, synthetic construct
  source 1..21: mol_type = other RNA
cgatttcttaaaaatgacacc

SEQ ID NO: 81484 - RNA, 21 nt, synthetic construct
  source 1..21: mol_type = other RNA
cgattttacttactagttgtg

SEQ ID NO: 81485 - RNA, 21 nt, synthetic construct
  source 1..21: mol_type = other RNA
cgatttttccaacagtttaca

SEQ ID NO: 81486 - RNA, 21 nt, synthetic construct
  source 1..21: mol_type = other RNA
cgcaaagcaacatgctaagtg

SEQ ID NO: 81487 - RNA, 21 nt, synthetic construct
  source 1..21: mol_type = other RNA
cgcaaaggatgtcaacaaaat

SEQ ID NO: 81488 - RNA, 21 nt, synthetic construct
  source 1..21: mol_type = other RNA
cgcaaagtaaaaagcactatc

SEQ ID NO: 81489 - RNA, 21 nt, synthetic construct
  source 1..21: mol_type = other RNA
cgcaaataatcattcttctaa

SEQ ID NO: 81490 - RNA, 21 nt, synthetic construct
  source 1..21: mol_type = other RNA
cgcaacaattcaacagctact

SEQ ID NO: 81491 - RNA, 21 nt, synthetic construct
  source 1..21: mol_type = other RNA
cgcaacatctgcctcccgggt

SEQ ID NO: 81492 - RNA, 21 nt, synthetic construct
  source 1..21: mol_type = other RNA
cgcaagagttccaactgtata

SEQ ID NO: 81493 - RNA, 21 nt, synthetic construct
  source 1..21: mol_type = other RNA
cgcaatccaaaatcctctgta

SEQ ID NO: 81494 - RNA, 21 nt, synthetic construct
  source 1..21: mol_type = other RNA
cgcaatctcggcttcactgca

SEQ ID NO: 81495 - RNA, 21 nt, synthetic construct
  source 1..21: mol_type = other RNA
cgcaattgcagccagagagtg

SEQ ID NO: 81496 - RNA, 21 nt, synthetic construct
  source 1..21: mol_type = other RNA
cgcacagggagatacttgatt

SEQ ID NO: 81497 - RNA, 21 nt, synthetic construct
  source 1..21: mol_type = other RNA
cgcacccagagcgggtttcct

SEQ ID NO: 81498 - RNA, 21 nt, synthetic construct
  source 1..21: mol_type = other RNA
cgcaccctgagcatccccgct

SEQ ID NO: 81499 - RNA, 21 nt, synthetic construct
  source 1..21: mol_type = other RNA
cgcacctggccgggatttact

SEQ ID NO: 81500 - RNA, 21 nt, synthetic construct
  source 1..21: mol_type = other RNA
cgcaccttgattttgataaaa

SEQ ID NO: 81501 - RNA, 21 nt, synthetic construct
  source 1..21: mol_type = other RNA
cgcacgccatctcgcccagct

SEQ ID NO: 81502 - RNA, 21 nt, synthetic construct
  source 1..21: mol_type = other RNA
cgcactcagcctgttgggagg

SEQ ID NO: 81503 - RNA, 21 nt, synthetic construct
  source 1..21: mol_type = other RNA
cgcactccacttcccactgct

SEQ ID NO: 81504 - RNA, 21 nt, synthetic construct
  source 1..21: mol_type = other RNA
cgcagaacagtgtttacacac

SEQ ID NO: 81505 - RNA, 21 nt, synthetic construct
  source 1..21: mol_type = other RNA
cgcagaaccactgagcacaat

SEQ ID NO: 81506 - RNA, 21 nt, synthetic construct
  source 1..21: mol_type = other RNA
cgcagaactggggcttgaacc

SEQ ID NO: 81507 - RNA, 21 nt, synthetic construct
  source 1..21: mol_type = other RNA
cgcagacacaccatgacagag

SEQ ID NO: 81508 - RNA, 21 nt, synthetic construct
  source 1..21: mol_type = other RNA
cgcagagcaagcacgttagca

SEQ ID NO: 81509 - RNA, 21 nt, synthetic construct
  source 1..21: mol_type = other RNA
cgcagaggccaaatgaaaggc

SEQ ID NO: 81510 - RNA, 21 nt, synthetic construct
  source 1..21: mol_type = other RNA
cgcagccatggctcactgcgg

SEQ ID NO: 81511 - RNA, 21 nt, synthetic construct
  source 1..21: mol_type = other RNA
cgcagcggggatgctcagggt

SEQ ID NO: 81512 - RNA, 21 nt, synthetic construct
  source 1..21: mol_type = other RNA
cgcaggcaaacagcgccactt

SEQ ID NO: 81513 - RNA, 21 nt, synthetic construct
  source 1..21: mol_type = other RNA
cgcagggccattctgctatga

SEQ ID NO: 81514 - RNA, 21 nt, synthetic construct
  source 1..21: mol_type = other RNA
cgcagggtgaaacttgaatac

SEQ ID NO: 81515 - RNA, 21 nt, synthetic construct
  source 1..21: mol_type = other RNA
cgcagtgagccatggctgcgc

SEQ ID NO: 81516 - RNA, 21 nt, synthetic construct
  source 1..21: mol_type = other RNA
cgcagtgcttagcgctggagg

SEQ ID NO: 81517 - RNA, 21 nt, synthetic construct
  source 1..21: mol_type = other RNA
cgcagtttgttctgctgttga

SEQ ID NO: 81518 - RNA, 21 nt, synthetic construct
  source 1..21: mol_type = other RNA
cgcataaccaaattatttcag

SEQ ID NO: 81519 - RNA, 21 nt, synthetic construct
  source 1..21: mol_type = other RNA
cgcatactgtgcagtggatga

SEQ ID NO: 81520 - RNA, 21 nt, synthetic construct
  source 1..21: mol_type = other RNA
cgcatcattcaaatgatattc

SEQ ID NO: 81521 - RNA, 21 nt, synthetic construct
  source 1..21: mol_type = other RNA
cgcatctggtctatctcatta

SEQ ID NO: 81522 - RNA, 21 nt, synthetic construct
  source 1..21: mol_type = other RNA
cgcatgaaaacagctaggtga

SEQ ID NO: 81523 - RNA, 21 nt, synthetic construct
  source 1..21: mol_type = other RNA
cgcattacgagttatgcaaga

SEQ ID NO: 81524 - RNA, 21 nt, synthetic construct
  source 1..21: mol_type = other RNA
cgcattgcattgactaccaat

SEQ ID NO: 81525 - RNA, 21 nt, synthetic construct
  source 1..21: mol_type = other RNA
cgcattgctaattcattgtac

SEQ ID NO: 81526 - RNA, 21 nt, synthetic construct
  source 1..21: mol_type = other RNA
cgcattgtgatgtctcagatg

SEQ ID NO: 81527 - RNA, 21 nt, synthetic construct
  source 1..21: mol_type = other RNA
cgcattttttaagtggcgctg

SEQ ID NO: 81528 - RNA, 21 nt, synthetic construct
  source 1..21: mol_type = other RNA
cgccaattttcatagcagcat

SEQ ID NO: 81529 - RNA, 21 nt, synthetic construct
  source 1..21: mol_type = other RNA
cgccacgtgaagatggagtta

SEQ ID NO: 81530 - RNA, 21 nt, synthetic construct
  source 1..21: mol_type = other RNA
cgccactgcactccagccttg

SEQ ID NO: 81531 - RNA, 21 nt, synthetic construct
  source 1..21: mol_type = other RNA
cgccactgcaggtgttggtgc

SEQ ID NO: 81532 - RNA, 21 nt, synthetic construct
  source 1..21: mol_type = other RNA
cgccactgcattccgcctggg

SEQ ID NO: 81533 - RNA, 21 nt, synthetic construct
  source 1..21: mol_type = other RNA
cgccacttaaaaaatgcgcgt

SEQ ID NO: 81534 - RNA, 21 nt, synthetic construct
  source 1..21: mol_type = other RNA
cgccatacctggtccttaaat

SEQ ID NO: 81535 - RNA, 21 nt, synthetic construct
  source 1..21: mol_type = other RNA
cgccatcacacccagtataca

SEQ ID NO: 81536 - RNA, 21 nt, synthetic construct
  source 1..21: mol_type = other RNA
cgcccagcccgtgtgtttaga

SEQ ID NO: 81537 - RNA, 21 nt, synthetic construct
  source 1..21: mol_type = other RNA
cgcccaggcggaatgcagtgg

SEQ ID NO: 81538 - RNA, 21 nt, synthetic construct
  source 1..21: mol_type = other RNA
cgcccaggctggagctcactg

SEQ ID NO: 81539 - RNA, 21 nt, synthetic construct
  source 1..21: mol_type = other RNA
cgcccattaggatagctatta

SEQ ID NO: 81540 - RNA, 21 nt, synthetic construct
  source 1..21: mol_type = other RNA
cgcccctggagaaagcccagc

SEQ ID NO: 81541 - RNA, 21 nt, synthetic construct
  source 1..21: mol_type = other RNA
cgcccggccaaatatccatgt

SEQ ID NO: 81542 - RNA, 21 nt, synthetic construct
  source 1..21: mol_type = other RNA
cgcccggcccagattcctttt

SEQ ID NO: 81543 - RNA, 21 nt, synthetic construct
  source 1..21: mol_type = other RNA
cgcccggcccatgacatgtgt

SEQ ID NO: 81544 - RNA, 21 nt, synthetic construct
  source 1..21: mol_type = other RNA
cgcccggcccgttatttttat

SEQ ID NO: 81545 - RNA, 21 nt, synthetic construct
  source 1..21: mol_type = other RNA
cgcccggccgagaaatcggaa

SEQ ID NO: 81546 - RNA, 21 nt, synthetic construct
  source 1..21: mol_type = other RNA
cgcccggccgatgcctgtgct

SEQ ID NO: 81547 - RNA, 21 nt, synthetic construct
  source 1..21: mol_type = other RNA
cgcccgtccctgcttggcgca

SEQ ID NO: 81548 - RNA, 21 nt, synthetic construct
  source 1..21: mol_type = other RNA
cgccctcccccgggacaatgc

SEQ ID NO: 81549 - RNA, 21 nt, synthetic construct
  source 1..21: mol_type = other RNA
cgccctggcattgtcccgggg

SEQ ID NO: 81550 - RNA, 21 nt, synthetic construct
  source 1..21: mol_type = other RNA
cgccgcagaggccaaatgaaa

SEQ ID NO: 81551 - RNA, 21 nt, synthetic construct
  source 1..21: mol_type = other RNA
cgccgtctccctcggccacag

SEQ ID NO: 81552 - RNA, 21 nt, synthetic construct
  source 1..21: mol_type = other RNA
cgcctagataagaaaatgtga

SEQ ID NO: 81553 - RNA, 21 nt, synthetic construct
  source 1..21: mol_type = other RNA
cgcctagctgacttttaaaat

SEQ ID NO: 81554 - RNA, 21 nt, synthetic construct
  source 1..21: mol_type = other RNA
cgcctccctggttcaagctat

SEQ ID NO: 81555 - RNA, 21 nt, synthetic construct
  source 1..21: mol_type = other RNA
cgcctcctggtgggttcatgc

SEQ ID NO: 81556 - RNA, 21 nt, synthetic construct
  source 1..21: mol_type = other RNA
cgcctgcattgcatttacttg

SEQ ID NO: 81557 - RNA, 21 nt, synthetic construct
  source 1..21: mol_type = other RNA
cgcctggacaggatcccggaa

SEQ ID NO: 81558 - RNA, 21 nt, synthetic construct
  source 1..21: mol_type = other RNA
cgcctggtgattaaagttatt

SEQ ID NO: 81559 - RNA, 21 nt, synthetic construct
  source 1..21: mol_type = other RNA
cgccttaaagccacactcttg

SEQ ID NO: 81560 - RNA, 21 nt, synthetic construct
  source 1..21: mol_type = other RNA
cgccttcctaccctgccttcc

SEQ ID NO: 81561 - RNA, 21 nt, synthetic construct
  source 1..21: mol_type = other RNA
cgccttcgcgggcaccttccc

SEQ ID NO: 81562 - RNA, 21 nt, synthetic construct
  source 1..21: mol_type = other RNA
cgccttctcagaaggacacca

SEQ ID NO: 81563 - RNA, 21 nt, synthetic construct
  source 1..21: mol_type = other RNA
cgcctttcatttggcctctgc

SEQ ID NO: 81564 - RNA, 21 nt, synthetic construct
  source 1..21: mol_type = other RNA
cgcctttctcgcagcggggat

SEQ ID NO: 81565 - RNA, 21 nt, synthetic construct
  source 1..21: mol_type = other RNA
cgcctttgttgccaggtggac

SEQ ID NO: 81566 - RNA, 21 nt, synthetic construct
  source 1..21: mol_type = other RNA
cgcgaaggcgtgtaaactgtt

SEQ ID NO: 81567 - RNA, 21 nt, synthetic construct
  source 1..21: mol_type = other RNA
cgcgagggagcgtacggggtc

SEQ ID NO: 81568 - RNA, 21 nt, synthetic construct
  source 1..21: mol_type = other RNA
cgcgcaacaattcaacagcta

SEQ ID NO: 81569 - RNA, 21 nt, synthetic construct
  source 1..21: mol_type = other RNA
cgcgcattttttaagtggcgc

SEQ ID NO: 81570 - RNA, 21 nt, synthetic construct
  source 1..21: mol_type = other RNA
cgcgcccagcccgtgtgttta

SEQ ID NO: 81571 - RNA, 21 nt, synthetic construct
  source 1..21: mol_type = other RNA
cgcgcccggccaaatatccat

SEQ ID NO: 81572 - RNA, 21 nt, synthetic construct
  source 1..21: mol_type = other RNA
cgcgcccggcccagattcctt

SEQ ID NO: 81573 - RNA, 21 nt, synthetic construct
  source 1..21: mol_type = other RNA
cgcgcccggccgagaaatcgg

SEQ ID NO: 81574 - RNA, 21 nt, synthetic construct
  source 1..21: mol_type = other RNA
cgcgcctggtgattaaagtta

SEQ ID NO: 81575 - RNA, 21 nt, synthetic construct
  source 1..21: mol_type = other RNA
cgcgcggcagggatgctgcga

SEQ ID NO: 81576 - RNA, 21 nt, synthetic construct
  source 1..21: mol_type = other RNA
cgcggaatgaagcaggccttc

SEQ ID NO: 81577 - RNA, 21 nt, synthetic construct
  source 1..21: mol_type = other RNA
cgcggaccccgtacgctccct

SEQ ID NO: 81578 - RNA, 21 nt, synthetic construct
  source 1..21: mol_type = other RNA
cgcggacgcgcattttttaag

SEQ ID NO: 81579 - RNA, 21 nt, synthetic construct
  source 1..21: mol_type = other RNA
cgcggcacttggtaagctgtg

SEQ ID NO: 81580 - RNA, 21 nt, synthetic construct
  source 1..21: mol_type = other RNA
cgcggcagggatgctgcgagc

SEQ ID NO: 81581 - RNA, 21 nt, synthetic construct
  source 1..21: mol_type = other RNA
cgcggctgggctttctccagg

SEQ ID NO: 81582 - RNA, 21 nt, synthetic construct
  source 1..21: mol_type = other RNA
cgcgggaggctgaggcaggag

SEQ ID NO: 81583 - RNA, 21 nt, synthetic construct
  source 1..21: mol_type = other RNA
cgcgggcaccttccctactca

SEQ ID NO: 81584 - RNA, 21 nt, synthetic construct
  source 1..21: mol_type = other RNA
cgcgtaagggtacagaactgc

SEQ ID NO: 81585 - RNA, 21 nt, synthetic construct
  source 1..21: mol_type = other RNA
cgcgtcaaaagatgctggtgg

SEQ ID NO: 81586 - RNA, 21 nt, synthetic construct
  source 1..21: mol_type = other RNA
cgcgtccacctggcaacaaag

SEQ ID NO: 81587 - RNA, 21 nt, synthetic construct
  source 1..21: mol_type = other RNA
cgcgtgcctatggtcctagct

SEQ ID NO: 81588 - RNA, 21 nt, synthetic construct
  source 1..21: mol_type = other RNA
cgcgtgcctgcaatcgcaggc

SEQ ID NO: 81589 - RNA, 21 nt, synthetic construct
  source 1..21: mol_type = other RNA
cgcgtggatgtgtgcacaaca

SEQ ID NO: 81590 - RNA, 21 nt, synthetic construct
  source 1..21: mol_type = other RNA
cgcgtttattagaactagaac

SEQ ID NO: 81591 - RNA, 21 nt, synthetic construct
  source 1..21: mol_type = other RNA
cgcgttttttgtccaccagac

SEQ ID NO: 81592 - RNA, 21 nt, synthetic construct
  source 1..21: mol_type = other RNA
cgctaaacattttattaggtg

SEQ ID NO: 81593 - RNA, 21 nt, synthetic construct
  source 1..21: mol_type = other RNA
cgctaaattaaaggctggaaa

SEQ ID NO: 81594 - RNA, 21 nt, synthetic construct
  source 1..21: mol_type = other RNA
cgctaagcactgcgccaagca

SEQ ID NO: 81595 - RNA, 21 nt, synthetic construct
  source 1..21: mol_type = other RNA
cgctaagtgcatttcggctct

SEQ ID NO: 81596 - RNA, 21 nt, synthetic construct
  source 1..21: mol_type = other RNA
cgctaatctcaatcagggcct

SEQ ID NO: 81597 - RNA, 21 nt, synthetic construct
  source 1..21: mol_type = other RNA
cgctacacaagtattaacgaa

SEQ ID NO: 81598 - RNA, 21 nt, synthetic construct
  source 1..21: mol_type = other RNA
cgctactcagctgtcactctc

SEQ ID NO: 81599 - RNA, 21 nt, synthetic construct
  source 1..21: mol_type = other RNA
cgctatcagtagtttgctagt

SEQ ID NO: 81600 - RNA, 21 nt, synthetic construct
  source 1..21: mol_type = other RNA
cgctccacgcccattaggata

SEQ ID NO: 81601 - RNA, 21 nt, synthetic construct
  source 1..21: mol_type = other RNA
cgctccctctgtgtgcatgca

SEQ ID NO: 81602 - RNA, 21 nt, synthetic construct
  source 1..21: mol_type = other RNA
cgctcctctcccgccggagtc

SEQ ID NO: 81603 - RNA, 21 nt, synthetic construct
  source 1..21: mol_type = other RNA
cgctctcctgtgccaagtccg

SEQ ID NO: 81604 - RNA, 21 nt, synthetic construct
  source 1..21: mol_type = other RNA
cgctctgggtgcgttgaccgc

SEQ ID NO: 81605 - RNA, 21 nt, synthetic construct
  source 1..21: mol_type = other RNA
cgctctggttttaaagaaatt

SEQ ID NO: 81606 - RNA, 21 nt, synthetic construct
  source 1..21: mol_type = other RNA
cgctctgtcgcccaggcggaa

SEQ ID NO: 81607 - RNA, 21 nt, synthetic construct
  source 1..21: mol_type = other RNA
cgctctgttgcccagactgga

SEQ ID NO: 81608 - RNA, 21 nt, synthetic construct
  source 1..21: mol_type = other RNA
cgctcttcaagcattgggagc

SEQ ID NO: 81609 - RNA, 21 nt, synthetic construct
  source 1..21: mol_type = other RNA
cgctcttgaccttgtgcatgt

SEQ ID NO: 81610 - RNA, 21 nt, synthetic construct
  source 1..21: mol_type = other RNA
cgctcttggcttttggcagcg

SEQ ID NO: 81611 - RNA, 21 nt, synthetic construct
  source 1..21: mol_type = other RNA
cgctcttgttcaaaaaccttt

SEQ ID NO: 81612 - RNA, 21 nt, synthetic construct
  source 1..21: mol_type = other RNA
cgctcttttaaaaattacaac

SEQ ID NO: 81613 - RNA, 21 nt, synthetic construct
  source 1..21: mol_type = other RNA
cgctgaagtacttcaaggttc

SEQ ID NO: 81614 - RNA, 21 nt, synthetic construct
  source 1..21: mol_type = other RNA
cgctgatgacagttactctaa

SEQ ID NO: 81615 - RNA, 21 nt, synthetic construct
  source 1..21: mol_type = other RNA
cgctgatgtgttgaccttagt

SEQ ID NO: 81616 - RNA, 21 nt, synthetic construct
  source 1..21: mol_type = other RNA
cgctgcattccagcctggtga

SEQ ID NO: 81617 - RNA, 21 nt, synthetic construct
  source 1..21: mol_type = other RNA
cgctgccaaaagccaagagcg

SEQ ID NO: 81618 - RNA, 21 nt, synthetic construct
  source 1..21: mol_type = other RNA
cgctgcgagaaaggcgaagcg

SEQ ID NO: 81619 - RNA, 21 nt, synthetic construct
  source 1..21: mol_type = other RNA
cgctgctccctctgccgcctg

SEQ ID NO: 81620 - RNA, 21 nt, synthetic construct
  source 1..21: mol_type = other RNA
cgctggaagggagcccaagca

SEQ ID NO: 81621 - RNA, 21 nt, synthetic construct
  source 1..21: mol_type = other RNA
cgctggaggtcgggctgcctc

SEQ ID NO: 81622 - RNA, 21 nt, synthetic construct
  source 1..21: mol_type = other RNA
cgctggtgaaaaaatggtgca

SEQ ID NO: 81623 - RNA, 21 nt, synthetic construct
  source 1..21: mol_type = other RNA
cgctgtccatttccagtactt

SEQ ID NO: 81624 - RNA, 21 nt, synthetic construct
  source 1..21: mol_type = other RNA
cgctgtgaatgtgaggtgagg

SEQ ID NO: 81625 - RNA, 21 nt, synthetic construct
  source 1..21: mol_type = other RNA
cgctgtggctaacaatcaaat

SEQ ID NO: 81626 - RNA, 21 nt, synthetic construct
  source 1..21: mol_type = other RNA
cgctgtggcttgggtgacctc

SEQ ID NO: 81627 - RNA, 21 nt, synthetic construct
  source 1..21: mol_type = other RNA
cgctgtttgcctgcgtccgta

SEQ ID NO: 81628 - RNA, 21 nt, synthetic construct
  source 1..21: mol_type = other RNA
cgcttcagttggtgaagagag

SEQ ID NO: 81629 - RNA, 21 nt, synthetic construct
  source 1..21: mol_type = other RNA
cgcttcgcctttctcgcagcg

SEQ ID NO: 81630 - RNA, 21 nt, synthetic construct
  source 1..21: mol_type = other RNA
cgcttctatgtgacaaacact

SEQ ID NO: 81631 - RNA, 21 nt, synthetic construct
  source 1..21: mol_type = other RNA
cgcttgaacaaatatgaatga

SEQ ID NO: 81632 - RNA, 21 nt, synthetic construct
  source 1..21: mol_type = other RNA
cgcttgaacctgaaaaacgga

SEQ ID NO: 81633 - RNA, 21 nt, synthetic construct
  source 1..21: mol_type = other RNA
cgctttaagcatcccatatgg

SEQ ID NO: 81634 - RNA, 21 nt, synthetic construct
  source 1..21: mol_type = other RNA
cgctttcgtgagggtttcagt

SEQ ID NO: 81635 - RNA, 21 nt, synthetic construct
  source 1..21: mol_type = other RNA
cgcttttatgttataatgaga

SEQ ID NO: 81636 - RNA, 21 nt, synthetic construct
  source 1..21: mol_type = other RNA
cgcttttggagctataattta

SEQ ID NO: 81637 - RNA, 21 nt, synthetic construct
  source 1..21: mol_type = other RNA
cgctttttatggaaacatggt

SEQ ID NO: 81638 - RNA, 21 nt, synthetic construct
  source 1..21: mol_type = other RNA
cggaaaaacattctacagtat

SEQ ID NO: 81639 - RNA, 21 nt, synthetic construct
  source 1..21: mol_type = other RNA
cggaaaacattattttctttg

SEQ ID NO: 81640 - RNA, 21 nt, synthetic construct
  source 1..21: mol_type = other RNA
cggaaaatgcttaacaagaat

SEQ ID NO: 81641 - RNA, 21 nt, synthetic construct
  source 1..21: mol_type = other RNA
cggaaactttatacctgttga

SEQ ID NO: 81642 - RNA, 21 nt, synthetic construct
  source 1..21: mol_type = other RNA
cggaaatataaaaagcctctg

SEQ ID NO: 81643 - RNA, 21 nt, synthetic construct
  source 1..21: mol_type = other RNA
cggaaatataacattaccaat

SEQ ID NO: 81644 - RNA, 21 nt, synthetic construct
  source 1..21: mol_type = other RNA
cggaaatgagtgagccacagc

SEQ ID NO: 81645 - RNA, 21 nt, synthetic construct
  source 1..21: mol_type = other RNA
cggaacaggaaaaggacatta

SEQ ID NO: 81646 - RNA, 21 nt, synthetic construct
  source 1..21: mol_type = other RNA
cggaacaggctcaatacctga

SEQ ID NO: 81647 - RNA, 21 nt, synthetic construct
  source 1..21: mol_type = other RNA
cggaactcctgtatgccgctg

SEQ ID NO: 81648 - RNA, 21 nt, synthetic construct
  source 1..21: mol_type = other RNA
cggaacttgagtttgttctgt

SEQ ID NO: 81649 - RNA, 21 nt, synthetic construct
  source 1..21: mol_type = other RNA
cggaagactcatacttcctga

SEQ ID NO: 81650 - RNA, 21 nt, synthetic construct
  source 1..21: mol_type = other RNA
cggaagctgggctagagccag

SEQ ID NO: 81651 - RNA, 21 nt, synthetic construct
  source 1..21: mol_type = other RNA
cggaaggaatgtgcttcctaa

SEQ ID NO: 81652 - RNA, 21 nt, synthetic construct
  source 1..21: mol_type = other RNA
cggaaggattgcctaacacca

SEQ ID NO: 81653 - RNA, 21 nt, synthetic construct
  source 1..21: mol_type = other RNA
cggaaggcggaagttgcagtg

SEQ ID NO: 81654 - RNA, 21 nt, synthetic construct
  source 1..21: mol_type = other RNA
cggaagttgcagtgagcccag

SEQ ID NO: 81655 - RNA, 21 nt, synthetic construct
  source 1..21: mol_type = other RNA
cggaatcttaccctgttgacc

SEQ ID NO: 81656 - RNA, 21 nt, synthetic construct
  source 1..21: mol_type = other RNA
cggaatgaagcaggccttcga

SEQ ID NO: 81657 - RNA, 21 nt, synthetic construct
  source 1..21: mol_type = other RNA
cggaatgactatagaaatttg

SEQ ID NO: 81658 - RNA, 21 nt, synthetic construct
  source 1..21: mol_type = other RNA
cggaatgattccacttatatg

SEQ ID NO: 81659 - RNA, 21 nt, synthetic construct
  source 1..21: mol_type = other RNA
cggaatgcccctttgagcaga

SEQ ID NO: 81660 - RNA, 21 nt, synthetic construct
  source 1..21: mol_type = other RNA
cggacatttttccaaagatat

SEQ ID NO: 81661 - RNA, 21 nt, synthetic construct
  source 1..21: mol_type = other RNA
cggaccccgtacgctccctcg

SEQ ID NO: 81662 - RNA, 21 nt, synthetic construct
  source 1..21: mol_type = other RNA
cggacgcaggcaaacagcgcc

SEQ ID NO: 81663 - RNA, 21 nt, synthetic construct
  source 1..21: mol_type = other RNA
cggacgcgcattttttaagtg

SEQ ID NO: 81664 - RNA, 21 nt, synthetic construct
  source 1..21: mol_type = other RNA
cggactccggcgggagaggag

SEQ ID NO: 81665 - RNA, 21 nt, synthetic construct
  source 1..21: mol_type = other RNA
cggacttggcacaggagagcg

SEQ ID NO: 81666 - RNA, 21 nt, synthetic construct
  source 1..21: mol_type = other RNA
cggagaggtgaactattagag

SEQ ID NO: 81667 - RNA, 21 nt, synthetic construct
  source 1..21: mol_type = other RNA
cggagcgggcagccttggagg

SEQ ID NO: 81668 - RNA, 21 nt, synthetic construct
  source 1..21: mol_type = other RNA
cggaggatgaggggctgagcc

SEQ ID NO: 81669 - RNA, 21 nt, synthetic construct
  source 1..21: mol_type = other RNA
cggaggattgcttgagtgcag

SEQ ID NO: 81670 - RNA, 21 nt, synthetic construct
  source 1..21: mol_type = other RNA
cggaggttgcggtgacgtgag

SEQ ID NO: 81671 - RNA, 21 nt, synthetic construct
  source 1..21: mol_type = other RNA
cggagtagctgggattacaca

SEQ ID NO: 81672 - RNA, 21 nt, synthetic construct
  source 1..21: mol_type = other RNA
cggagtccgcggctgggcttt

SEQ ID NO: 81673 - RNA, 21 nt, synthetic construct
  source 1..21: mol_type = other RNA
cggataaggaagagtttatat

SEQ ID NO: 81674 - RNA, 21 nt, synthetic construct
  source 1..21: mol_type = other RNA
cggatatttactaagaagtga

SEQ ID NO: 81675 - RNA, 21 nt, synthetic construct
  source 1..21: mol_type = other RNA
cggatgattctaatgtgcaag

SEQ ID NO: 81676 - RNA, 21 nt, synthetic construct
  source 1..21: mol_type = other RNA
cggatgccggtaatcacagct

SEQ ID NO: 81677 - RNA, 21 nt, synthetic construct
  source 1..21: mol_type = other RNA
cggattcctttcaaagagacc

SEQ ID NO: 81678 - RNA, 21 nt, synthetic construct
  source 1..21: mol_type = other RNA
cggattggaaaactaggtatt

SEQ ID NO: 81679 - RNA, 21 nt, synthetic construct
  source 1..21: mol_type = other RNA
cggatttaagagaggaagtga

SEQ ID NO: 81680 - RNA, 21 nt, synthetic construct
  source 1..21: mol_type = other RNA
cggcacagctctcatgagtcc

SEQ ID NO: 81681 - RNA, 21 nt, synthetic construct
  source 1..21: mol_type = other RNA
cggcacttggtaagctgtgag

SEQ ID NO: 81682 - RNA, 21 nt, synthetic construct
  source 1..21: mol_type = other RNA
cggcaggcattgtgctcagtg

SEQ ID NO: 81683 - RNA, 21 nt, synthetic construct
  source 1..21: mol_type = other RNA
cggcagggatgctgcgagccc

SEQ ID NO: 81684 - RNA, 21 nt, synthetic construct
  source 1..21: mol_type = other RNA
cggcatacaggagttccgatt

SEQ ID NO: 81685 - RNA, 21 nt, synthetic construct
  source 1..21: mol_type = other RNA
cggcatatgtcactgtaagaa

SEQ ID NO: 81686 - RNA, 21 nt, synthetic construct
  source 1..21: mol_type = other RNA
cggcatccgccaccacgcctg

SEQ ID NO: 81687 - RNA, 21 nt, synthetic construct
  source 1..21: mol_type = other RNA
cggcatgcctctcccaccatc

SEQ ID NO: 81688 - RNA, 21 nt, synthetic construct
  source 1..21: mol_type = other RNA
cggccaaatatccatgtttta

SEQ ID NO: 81689 - RNA, 21 nt, synthetic construct
  source 1..21: mol_type = other RNA
cggccaaccattactcttcta

SEQ ID NO: 81690 - RNA, 21 nt, synthetic construct
  source 1..21: mol_type = other RNA
cggccaagatctgtttttcaa

SEQ ID NO: 81691 - RNA, 21 nt, synthetic construct
  source 1..21: mol_type = other RNA
cggccacagcagggctcctcc

SEQ ID NO: 81692 - RNA, 21 nt, synthetic construct
  source 1..21: mol_type = other RNA
cggccagacattttatttata

SEQ ID NO: 81693 - RNA, 21 nt, synthetic construct
  source 1..21: mol_type = other RNA
cggcccagattccttttttat

SEQ ID NO: 81694 - RNA, 21 nt, synthetic construct
  source 1..21: mol_type = other RNA
cggcccatgacatgtgtttta

SEQ ID NO: 81695 - RNA, 21 nt, synthetic construct
  source 1..21: mol_type = other RNA
cggcccgttatttttatcata

SEQ ID NO: 81696 - RNA, 21 nt, synthetic construct
  source 1..21: mol_type = other RNA
cggccctgccgcttcgccttt

SEQ ID NO: 81697 - RNA, 21 nt, synthetic construct
  source 1..21: mol_type = other RNA
cggccgagaaatcggaactcc

SEQ ID NO: 81698 - RNA, 21 nt, synthetic construct
  source 1..21: mol_type = other RNA
cggccgatgcctgtgcttttc

SEQ ID NO: 81699 - RNA, 21 nt, synthetic construct
  source 1..21: mol_type = other RNA
cggcctcagcctcccgagtag

SEQ ID NO: 81700 - RNA, 21 nt, synthetic construct
  source 1..21: mol_type = other RNA
cggcctctactgactcccttt

SEQ ID NO: 81701 - RNA, 21 nt, synthetic construct
  source 1..21: mol_type = other RNA
cggcctttgcctctccaggga

SEQ ID NO: 81702 - RNA, 21 nt, synthetic construct
  source 1..21: mol_type = other RNA
cggcgagcttgatctttactt

SEQ ID NO: 81703 - RNA, 21 nt, synthetic construct
  source 1..21: mol_type = other RNA
cggcgggcttcgcctttgttg

SEQ ID NO: 81704 - RNA, 21 nt, synthetic construct
  source 1..21: mol_type = other RNA
cggcgtttcgccatgttggcc

SEQ ID NO: 81705 - RNA, 21 nt, synthetic construct
  source 1..21: mol_type = other RNA
cggctaagatgaggtctcagc

SEQ ID NO: 81706 - RNA, 21 nt, synthetic construct
  source 1..21: mol_type = other RNA
cggctaattaaacaaacattt

SEQ ID NO: 81707 - RNA, 21 nt, synthetic construct
  source 1..21: mol_type = other RNA
cggctcaggcctgttgtgagg

SEQ ID NO: 81708 - RNA, 21 nt, synthetic construct
  source 1..21: mol_type = other RNA
cggctctgtcacccttgtaat

SEQ ID NO: 81709 - RNA, 21 nt, synthetic construct
  source 1..21: mol_type = other RNA
cggctctgtgctgagatggtc

SEQ ID NO: 81710 - RNA, 21 nt, synthetic construct
  source 1..21: mol_type = other RNA
cggctgaggcagcccgacctc

SEQ ID NO: 81711 - RNA, 21 nt, synthetic construct
  source 1..21: mol_type = other RNA
cggctgattataaccttgaac

SEQ ID NO: 81712 - RNA, 21 nt, synthetic construct
  source 1..21: mol_type = other RNA
cggctggatcgcttgaggtca

SEQ ID NO: 81713 - RNA, 21 nt, synthetic construct
  source 1..21: mol_type = other RNA
cggctgggctttctccagggg

SEQ ID NO: 81714 - RNA, 21 nt, synthetic construct
  source 1..21: mol_type = other RNA
cggctgttaggtattattttc

SEQ ID NO: 81715 - RNA, 21 nt, synthetic construct
  source 1..21: mol_type = other RNA
cggcttaacacctttgtattc

SEQ ID NO: 81716 - RNA, 21 nt, synthetic construct
  source 1..21: mol_type = other RNA
cggcttactgcaacctccgtt

SEQ ID NO: 81717 - RNA, 21 nt, synthetic construct
  source 1..21: mol_type = other RNA
cggcttgattagcttcctcag

SEQ ID NO: 81718 - RNA, 21 nt, synthetic construct
  source 1..21: mol_type = other RNA
cggctttatgagacacacgag

SEQ ID NO: 81719 - RNA, 21 nt, synthetic construct
  source 1..21: mol_type = other RNA
cggctttgtggagtggagggg

SEQ ID NO: 81720 - RNA, 21 nt, synthetic construct
  source 1..21: mol_type = other RNA
cgggaaaaaataatatgagaa

SEQ ID NO: 81721 - RNA, 21 nt, synthetic construct
  source 1..21: mol_type = other RNA
cgggaacatgacatgtatttt

SEQ ID NO: 81722 - RNA, 21 nt, synthetic construct
  source 1..21: mol_type = other RNA
cgggacaagagtctgcagacc

SEQ ID NO: 81723 - RNA, 21 nt, synthetic construct
  source 1..21: mol_type = other RNA
cgggacaatgccagggcgctc

SEQ ID NO: 81724 - RNA, 21 nt, synthetic construct
  source 1..21: mol_type = other RNA
cgggacttggaagtgaagtca

SEQ ID NO: 81725 - RNA, 21 nt, synthetic construct
  source 1..21: mol_type = other RNA
cgggagacaaaggttgcagtg

SEQ ID NO: 81726 - RNA, 21 nt, synthetic construct
  source 1..21: mol_type = other RNA
cgggagaggagcgccctggca

SEQ ID NO: 81727 - RNA, 21 nt, synthetic construct
  source 1..21: mol_type = other RNA
cgggaggagccaagtaaaagc

SEQ ID NO: 81728 - RNA, 21 nt, synthetic construct
  source 1..21: mol_type = other RNA
cgggaggcagatgttgcggtg

SEQ ID NO: 81729 - RNA, 21 nt, synthetic construct
  source 1..21: mol_type = other RNA
cgggagtaacagacctctgaa

SEQ ID NO: 81730 - RNA, 21 nt, synthetic construct
  source 1..21: mol_type = other RNA
cgggatcctgtccaggcgcct

SEQ ID NO: 81731 - RNA, 21 nt, synthetic construct
  source 1..21: mol_type = other RNA
cgggattatttggaagagaga

SEQ ID NO: 81732 - RNA, 21 nt, synthetic construct
  source 1..21: mol_type = other RNA
cgggatttacttctatatgta

SEQ ID NO: 81733 - RNA, 21 nt, synthetic construct
  source 1..21: mol_type = other RNA
cgggcaccttccctactcact

SEQ ID NO: 81734 - RNA, 21 nt, synthetic construct
  source 1..21: mol_type = other RNA
cgggcagccttggaggagccc

SEQ ID NO: 81735 - RNA, 21 nt, synthetic construct
  source 1..21: mol_type = other RNA
cgggcccagctcttttgtgtc

SEQ ID NO: 81736 - RNA, 21 nt, synthetic construct
  source 1..21: mol_type = other RNA
cgggcctggttagggagactt

SEQ ID NO: 81737 - RNA, 21 nt, synthetic construct
  source 1..21: mol_type = other RNA
cgggctgggcgcgatggctca

SEQ ID NO: 81738 - RNA, 21 nt, synthetic construct
  source 1..21: mol_type = other RNA
cgggcttcgcctttgttgcca

SEQ ID NO: 81739 - RNA, 21 nt, synthetic construct
  source 1..21: mol_type = other RNA
cgggcttggtatgcatcttga

SEQ ID NO: 81740 - RNA, 21 nt, synthetic construct
  source 1..21: mol_type = other RNA
cggggactgcaacagatctga

SEQ ID NO: 81741 - RNA, 21 nt, synthetic construct
  source 1..21: mol_type = other RNA
cggggagcttttgaaactgag

SEQ ID NO: 81742 - RNA, 21 nt, synthetic construct
  source 1..21: mol_type = other RNA
cggggatgctcagggtgcgac

SEQ ID NO: 81743 - RNA, 21 nt, synthetic construct
  source 1..21: mol_type = other RNA
cggggatggttgcacaatgtt

SEQ ID NO: 81744 - RNA, 21 nt, synthetic construct
  source 1..21: mol_type = other RNA
cggggcagagaactgactgaa

SEQ ID NO: 81745 - RNA, 21 nt, synthetic construct
  source 1..21: mol_type = other RNA
cggggccgcccctggagaaag

SEQ ID NO: 81746 - RNA, 21 nt, synthetic construct
  source 1..21: mol_type = other RNA
cggggcctacagtggttccat

SEQ ID NO: 81747 - RNA, 21 nt, synthetic construct
  source 1..21: mol_type = other RNA
cggggctcgcagcatccctgc

SEQ ID NO: 81748 - RNA, 21 nt, synthetic construct
  source 1..21: mol_type = other RNA
cggggctgccactacttagcc

SEQ ID NO: 81749 - RNA, 21 nt, synthetic construct
  source 1..21: mol_type = other RNA
cgggggagagcactggtttca

SEQ ID NO: 81750 - RNA, 21 nt, synthetic construct
  source 1..21: mol_type = other RNA
cggggtttcagcacaatactg

SEQ ID NO: 81751 - RNA, 21 nt, synthetic construct
  source 1..21: mol_type = other RNA
cgggtaaaaagcctgcttcag

SEQ ID NO: 81752 - RNA, 21 nt, synthetic construct
  source 1..21: mol_type = other RNA
cgggtacacatcctaatacag

SEQ ID NO: 81753 - RNA, 21 nt, synthetic construct
  source 1..21: mol_type = other RNA
cgggtccaggcagttctcctg

SEQ ID NO: 81754 - RNA, 21 nt, synthetic construct
  source 1..21: mol_type = other RNA
cgggtcgcggacgcgcatttt

SEQ ID NO: 81755 - RNA, 21 nt, synthetic construct
  source 1..21: mol_type = other RNA
cgggtggtagggagggggctg

SEQ ID NO: 81756 - RNA, 21 nt, synthetic construct
  source 1..21: mol_type = other RNA
cgggtgtagtggtgtgtgact

SEQ ID NO: 81757 - RNA, 21 nt, synthetic construct
  source 1..21: mol_type = other RNA
cgggtgtcagaaaccatcgtt

SEQ ID NO: 81758 - RNA, 21 nt, synthetic construct
  source 1..21: mol_type = other RNA
cgggtgtcagaattccatcag

SEQ ID NO: 81759 - RNA, 21 nt, synthetic construct
  source 1..21: mol_type = other RNA
cgggttatacacacataaggg

SEQ ID NO: 81760 - RNA, 21 nt, synthetic construct
  source 1..21: mol_type = other RNA
cgggttcaagccccagttctg

SEQ ID NO: 81761 - RNA, 21 nt, synthetic construct
  source 1..21: mol_type = other RNA
cgggtttaagcgattctcctt

SEQ ID NO: 81762 - RNA, 21 nt, synthetic construct
  source 1..21: mol_type = other RNA
cgggtttcctcggtctacgga

SEQ ID NO: 81763 - RNA, 21 nt, synthetic construct
  source 1..21: mol_type = other RNA
cggtaatcacagctactcagg

SEQ ID NO: 81764 - RNA, 21 nt, synthetic construct
  source 1..21: mol_type = other RNA
cggtatgtacccaatggatta

SEQ ID NO: 81765 - RNA, 21 nt, synthetic construct
  source 1..21: mol_type = other RNA
cggtatgttaataaccctgtt

SEQ ID NO: 81766 - RNA, 21 nt, synthetic construct
  source 1..21: mol_type = other RNA
cggtcaacgcacccagagcgg

SEQ ID NO: 81767 - RNA, 21 nt, synthetic construct
  source 1..21: mol_type = other RNA
cggtcattctggagtgttttc

SEQ ID NO: 81768 - RNA, 21 nt, synthetic construct
  source 1..21: mol_type = other RNA
cggtcgttggatttatctttc

SEQ ID NO: 81769 - RNA, 21 nt, synthetic construct
  source 1..21: mol_type = other RNA
cggtctacggacgcaggcaaa

SEQ ID NO: 81770 - RNA, 21 nt, synthetic construct
  source 1..21: mol_type = other RNA
cggtctcaaaacaaacaaaca

SEQ ID NO: 81771 - RNA, 21 nt, synthetic construct
  source 1..21: mol_type = other RNA
cggtctcacactgttgtccag

SEQ ID NO: 81772 - RNA, 21 nt, synthetic construct
  source 1..21: mol_type = other RNA
cggtctcagtttttaatttaa

SEQ ID NO: 81773 - RNA, 21 nt, synthetic construct
  source 1..21: mol_type = other RNA
cggtctgtatttctgctttgg

SEQ ID NO: 81774 - RNA, 21 nt, synthetic construct
  source 1..21: mol_type = other RNA
cggtctttcctgatcagcacc

SEQ ID NO: 81775 - RNA, 21 nt, synthetic construct
  source 1..21: mol_type = other RNA
cggtcttttagccaacaacca

SEQ ID NO: 81776 - RNA, 21 nt, synthetic construct
  source 1..21: mol_type = other RNA
cggtgaagaaccgactgaaag

SEQ ID NO: 81777 - RNA, 21 nt, synthetic construct
  source 1..21: mol_type = other RNA
cggtgacgtgagatcatgcca

SEQ ID NO: 81778 - RNA, 21 nt, synthetic construct
  source 1..21: mol_type = other RNA
cggtgccctacatatggcaat

SEQ ID NO: 81779 - RNA, 21 nt, synthetic construct
  source 1..21: mol_type = other RNA
cggtggcattaaggacatcca

SEQ ID NO: 81780 - RNA, 21 nt, synthetic construct
  source 1..21: mol_type = other RNA
cggtggggacagctcaattaa

SEQ ID NO: 81781 - RNA, 21 nt, synthetic construct
  source 1..21: mol_type = other RNA
cggtgtcttattgttttgatt

SEQ ID NO: 81782 - RNA, 21 nt, synthetic construct
  source 1..21: mol_type = other RNA
cggttccctgtagagattttt

SEQ ID NO: 81783 - RNA, 21 nt, synthetic construct
  source 1..21: mol_type = other RNA
cggttctcaggagcctagtca

SEQ ID NO: 81784 - RNA, 21 nt, synthetic construct
  source 1..21: mol_type = other RNA
cggttcttcaccgtgcaacta

SEQ ID NO: 81785 - RNA, 21 nt, synthetic construct
  source 1..21: mol_type = other RNA
cggttgtatagcagtaaaatg

SEQ ID NO: 81786 - RNA, 21 nt, synthetic construct
  source 1..21: mol_type = other RNA
cggttttctagttagtttgtt

SEQ ID NO: 81787 - RNA, 21 nt, synthetic construct
  source 1..21: mol_type = other RNA
cgtaaaaagccatttatcagc

SEQ ID NO: 81788 - RNA, 21 nt, synthetic construct
  source 1..21: mol_type = other RNA
cgtaaaacctcatctctacta

SEQ ID NO: 81789 - RNA, 21 nt, synthetic construct
  source 1..21: mol_type = other RNA
cgtaaaagctaatctactttc

SEQ ID NO: 81790 - RNA, 21 nt, synthetic construct
  source 1..21: mol_type = other RNA
cgtaacctaaagttgaggttg

SEQ ID NO: 81791 - RNA, 21 nt, synthetic construct
  source 1..21: mol_type = other RNA
cgtaactccatcttcacgtgg

SEQ ID NO: 81792 - RNA, 21 nt, synthetic construct
  source 1..21: mol_type = other RNA
cgtaacttcttttcttaaaac

SEQ ID NO: 81793 - RNA, 21 nt, synthetic construct
  source 1..21: mol_type = other RNA
cgtaagggtacagaactgcta

SEQ ID NO: 81794 - RNA, 21 nt, synthetic construct
  source 1..21: mol_type = other RNA
cgtaatgcgatgatcaaaacc

SEQ ID NO: 81795 - RNA, 21 nt, synthetic construct
  source 1..21: mol_type = other RNA
cgtacatgtagatatgggagt

SEQ ID NO: 81796 - RNA, 21 nt, synthetic construct
  source 1..21: mol_type = other RNA
cgtacctttcgctatcagtag

SEQ ID NO: 81797 - RNA, 21 nt, synthetic construct
  source 1..21: mol_type = other RNA
cgtacgctccctcgcgcggca

SEQ ID NO: 81798 - RNA, 21 nt, synthetic construct
  source 1..21: mol_type = other RNA
cgtactaggtatcacagtgag

SEQ ID NO: 81799 - RNA, 21 nt, synthetic construct
  source 1..21: mol_type = other RNA
cgtactagtcagcacactctt

SEQ ID NO: 81800 - RNA, 21 nt, synthetic construct
  source 1..21: mol_type = other RNA
cgtactgtgattacaattcct

SEQ ID NO: 81801 - RNA, 21 nt, synthetic construct
  source 1..21: mol_type = other RNA
cgtagaccgaggaaacccgct

SEQ ID NO: 81802 - RNA, 21 nt, synthetic construct
  source 1..21: mol_type = other RNA
cgtagcaggtttaggaagcac

SEQ ID NO: 81803 - RNA, 21 nt, synthetic construct
  source 1..21: mol_type = other RNA
cgtagctgtcgctctcctgtg

SEQ ID NO: 81804 - RNA, 21 nt, synthetic construct
  source 1..21: mol_type = other RNA
cgtagtaagttttgaaatcag

SEQ ID NO: 81805 - RNA, 21 nt, synthetic construct
  source 1..21: mol_type = other RNA
cgtagtatctcatgcttagga

SEQ ID NO: 81806 - RNA, 21 nt, synthetic construct
  source 1..21: mol_type = other RNA
cgtagttttttggtagatacc

SEQ ID NO: 81807 - RNA, 21 nt, synthetic construct
  source 1..21: mol_type = other RNA
cgtatatgaaaagcccaatct

SEQ ID NO: 81808 - RNA, 21 nt, synthetic construct
  source 1..21: mol_type = other RNA
cgtatccagtggttttttgtt

SEQ ID NO: 81809 - RNA, 21 nt, synthetic construct
  source 1..21: mol_type = other RNA
cgtatctgggaaaaaataaga

SEQ ID NO: 81810 - RNA, 21 nt, synthetic construct
  source 1..21: mol_type = other RNA
cgtatcttttaacagatggtc

SEQ ID NO: 81811 - RNA, 21 nt, synthetic construct
  source 1..21: mol_type = other RNA
cgtatgaataaactaacaaag

SEQ ID NO: 81812 - RNA, 21 nt, synthetic construct
  source 1..21: mol_type = other RNA
cgtatgcaacttactctcaaa

SEQ ID NO: 81813 - RNA, 21 nt, synthetic construct
  source 1..21: mol_type = other RNA
cgtatggaagatgggacttca

SEQ ID NO: 81814 - RNA, 21 nt, synthetic construct
  source 1..21: mol_type = other RNA
cgtatttatattttggtagag

SEQ ID NO: 81815 - RNA, 21 nt, synthetic construct
  source 1..21: mol_type = other RNA
cgtatttatcatgtcttcttg

SEQ ID NO: 81816 - RNA, 21 nt, synthetic construct
  source 1..21: mol_type = other RNA
cgtcaaaagatgctggtggag

SEQ ID NO: 81817 - RNA, 21 nt, synthetic construct
  source 1..21: mol_type = other RNA
cgtcaaggggagaggcctcat

SEQ ID NO: 81818 - RNA, 21 nt, synthetic construct
  source 1..21: mol_type = other RNA
cgtcaccgcaacctccgcctc

SEQ ID NO: 81819 - RNA, 21 nt, synthetic construct
  source 1..21: mol_type = other RNA
cgtcagagcagcactgatgtg

SEQ ID NO: 81820 - RNA, 21 nt, synthetic construct
  source 1..21: mol_type = other RNA
cgtcatctataaggtaatgac

SEQ ID NO: 81821 - RNA, 21 nt, synthetic construct
  source 1..21: mol_type = other RNA
cgtccaatttctttggctgtt

SEQ ID NO: 81822 - RNA, 21 nt, synthetic construct
  source 1..21: mol_type = other RNA
cgtccacctggcaacaaaggc

SEQ ID NO: 81823 - RNA, 21 nt, synthetic construct
  source 1..21: mol_type = other RNA
cgtccatcaacagcagaacaa

SEQ ID NO: 81824 - RNA, 21 nt, synthetic construct
  source 1..21: mol_type = other RNA
cgtcccccatcccctttaccc

SEQ ID NO: 81825 - RNA, 21 nt, synthetic construct
  source 1..21: mol_type = other RNA
cgtccctaaacactgtagttc

SEQ ID NO: 81826 - RNA, 21 nt, synthetic construct
  source 1..21: mol_type = other RNA
cgtccctattttctacaggta

SEQ ID NO: 81827 - RNA, 21 nt, synthetic construct
  source 1..21: mol_type = other RNA
cgtccctgcttggcgcagtgc

SEQ ID NO: 81828 - RNA, 21 nt, synthetic construct
  source 1..21: mol_type = other RNA
cgtccggtcgttggatttatc

SEQ ID NO: 81829 - RNA, 21 nt, synthetic construct
  source 1..21: mol_type = other RNA
cgtccgtagaccgaggaaacc

SEQ ID NO: 81830 - RNA, 21 nt, synthetic construct
  source 1..21: mol_type = other RNA
cgtcctcactgtgatacctag

SEQ ID NO: 81831 - RNA, 21 nt, synthetic construct
  source 1..21: mol_type = other RNA
cgtcctcttcgggtgtcagaa

SEQ ID NO: 81832 - RNA, 21 nt, synthetic construct
  source 1..21: mol_type = other RNA
cgtcggtatgttaataaccct

SEQ ID NO: 81833 - RNA, 21 nt, synthetic construct
  source 1..21: mol_type = other RNA
cgtcgtacctttcgctatcag

SEQ ID NO: 81834 - RNA, 21 nt, synthetic construct
  source 1..21: mol_type = other RNA
cgtcgtcccccatccccttta

SEQ ID NO: 81835 - RNA, 21 nt, synthetic construct
  source 1..21: mol_type = other RNA
cgtctagccacttcctattag

SEQ ID NO: 81836 - RNA, 21 nt, synthetic construct
  source 1..21: mol_type = other RNA
cgtctcaagattgtgtgattt

SEQ ID NO: 81837 - RNA, 21 nt, synthetic construct
  source 1..21: mol_type = other RNA
cgtctccctcggccacagcag

SEQ ID NO: 81838 - RNA, 21 nt, synthetic construct
  source 1..21: mol_type = other RNA
cgtctctgcaaaaaatgtttg

SEQ ID NO: 81839 - RNA, 21 nt, synthetic construct
  source 1..21: mol_type = other RNA
cgtctgtgattatcagggata

SEQ ID NO: 81840 - RNA, 21 nt, synthetic construct
  source 1..21: mol_type = other RNA
cgtctgtggtctcagctcctc

SEQ ID NO: 81841 - RNA, 21 nt, synthetic construct
  source 1..21: mol_type = other RNA
cgtcttgtcaataatttggat

SEQ ID NO: 81842 - RNA, 21 nt, synthetic construct
  source 1..21: mol_type = other RNA
cgtgaagatggagttacgctg

SEQ ID NO: 81843 - RNA, 21 nt, synthetic construct
  source 1..21: mol_type = other RNA
cgtgaagctacagactaatat

SEQ ID NO: 81844 - RNA, 21 nt, synthetic construct
  source 1..21: mol_type = other RNA
cgtgaatctgttcctgggttc

SEQ ID NO: 81845 - RNA, 21 nt, synthetic construct
  source 1..21: mol_type = other RNA
cgtgaatttggtattcttatc

SEQ ID NO: 81846 - RNA, 21 nt, synthetic construct
  source 1..21: mol_type = other RNA
cgtgacagaacaaataacacc

SEQ ID NO: 81847 - RNA, 21 nt, synthetic construct
  source 1..21: mol_type = other RNA
cgtgagactattatgagcagt

SEQ ID NO: 81848 - RNA, 21 nt, synthetic construct
  source 1..21: mol_type = other RNA
cgtgagatcatgccactccac

SEQ ID NO: 81849 - RNA, 21 nt, synthetic construct
  source 1..21: mol_type = other RNA
cgtgagccaccacgtccggtc

SEQ ID NO: 81850 - RNA, 21 nt, synthetic construct
  source 1..21: mol_type = other RNA
cgtgagccaccactcccggcc

SEQ ID NO: 81851 - RNA, 21 nt, synthetic construct
  source 1..21: mol_type = other RNA
cgtgagccaccgcgcctggtg

SEQ ID NO: 81852 - RNA, 21 nt, synthetic construct
  source 1..21: mol_type = other RNA
cgtgagccacctcatccggtc

SEQ ID NO: 81853 - RNA, 21 nt, synthetic construct
  source 1..21: mol_type = other RNA
cgtgagccatcgcgcccagcc

SEQ ID NO: 81854 - RNA, 21 nt, synthetic construct
  source 1..21: mol_type = other RNA
cgtgagcctccacacctggcc

SEQ ID NO: 81855 - RNA, 21 nt, synthetic construct
  source 1..21: mol_type = other RNA
cgtgagctggaagtaaggatt

SEQ ID NO: 81856 - RNA, 21 nt, synthetic construct
  source 1..21: mol_type = other RNA
cgtgagggtttcagtgagtag

SEQ ID NO: 81857 - RNA, 21 nt, synthetic construct
  source 1..21: mol_type = other RNA
cgtgatagtcttccaattgca

SEQ ID NO: 81858 - RNA, 21 nt, synthetic construct
  source 1..21: mol_type = other RNA
cgtgcaaactaccaagactga

SEQ ID NO: 81859 - RNA, 21 nt, synthetic construct
  source 1..21: mol_type = other RNA
cgtgcaactagagaaagcatc

SEQ ID NO: 81860 - RNA, 21 nt, synthetic construct
  source 1..21: mol_type = other RNA
cgtgcacacccagttatctct

SEQ ID NO: 81861 - RNA, 21 nt, synthetic construct
  source 1..21: mol_type = other RNA
cgtgcaccttacattgtaatc

SEQ ID NO: 81862 - RNA, 21 nt, synthetic construct
  source 1..21: mol_type = other RNA
cgtgcagagcaggggtggggg

SEQ ID NO: 81863 - RNA, 21 nt, synthetic construct
  source 1..21: mol_type = other RNA
cgtgcatgcctctgttacagc

SEQ ID NO: 81864 - RNA, 21 nt, synthetic construct
  source 1..21: mol_type = other RNA
cgtgcatgtctgcaggagcct

SEQ ID NO: 81865 - RNA, 21 nt, synthetic construct
  source 1..21: mol_type = other RNA
cgtgcattcatactgaaggca

SEQ ID NO: 81866 - RNA, 21 nt, synthetic construct
  source 1..21: mol_type = other RNA
cgtgcccggccagacatttta

SEQ ID NO: 81867 - RNA, 21 nt, synthetic construct
  source 1..21: mol_type = other RNA
cgtgccgggcttggtatgcat

SEQ ID NO: 81868 - RNA, 21 nt, synthetic construct
  source 1..21: mol_type = other RNA
cgtgcttgctctgcggcaggc

SEQ ID NO: 81869 - RNA, 21 nt, synthetic construct
  source 1..21: mol_type = other RNA
cgtgctttccttattgagaag

SEQ ID NO: 81870 - RNA, 21 nt, synthetic construct
  source 1..21: mol_type = other RNA
cgtggaaatacttgaacattc

SEQ ID NO: 81871 - RNA, 21 nt, synthetic construct
  source 1..21: mol_type = other RNA
cgtggaaggccttctcctcca

SEQ ID NO: 81872 - RNA, 21 nt, synthetic construct
  source 1..21: mol_type = other RNA
cgtggaatggtcaatttcatc

SEQ ID NO: 81873 - RNA, 21 nt, synthetic construct
  source 1..21: mol_type = other RNA
cgtggagcggtgtcttattgt

SEQ ID NO: 81874 - RNA, 21 nt, synthetic construct
  source 1..21: mol_type = other RNA
cgtggagtgcaatggggcaat

SEQ ID NO: 81875 - RNA, 21 nt, synthetic construct
  source 1..21: mol_type = other RNA
cgtggatgtgtgcacaacaca

SEQ ID NO: 81876 - RNA, 21 nt, synthetic construct
  source 1..21: mol_type = other RNA
cgtggcctcaagcagtcctgc

SEQ ID NO: 81877 - RNA, 21 nt, synthetic construct
  source 1..21: mol_type = other RNA
cgtggcgctccctctgtgtgc

SEQ ID NO: 81878 - RNA, 21 nt, synthetic construct
  source 1..21: mol_type = other RNA
cgtggctgtcaaaaatgtgtc

SEQ ID NO: 81879 - RNA, 21 nt, synthetic construct
  source 1..21: mol_type = other RNA
cgtgggcaacacaatgagacc

SEQ ID NO: 81880 - RNA, 21 nt, synthetic construct
  source 1..21: mol_type = other RNA
cgtgggggctcacatctgtaa

SEQ ID NO: 81881 - RNA, 21 nt, synthetic construct
  source 1..21: mol_type = other RNA
cgtggtggcggatgccggtaa

SEQ ID NO: 81882 - RNA, 21 nt, synthetic construct
  source 1..21: mol_type = other RNA
cgtggttatagccataagagt

SEQ ID NO: 81883 - RNA, 21 nt, synthetic construct
  source 1..21: mol_type = other RNA
cgtggttcacacctgtagtcc

SEQ ID NO: 81884 - RNA, 21 nt, synthetic construct
  source 1..21: mol_type = other RNA
cgtggtttattcatataatgg

SEQ ID NO: 81885 - RNA, 21 nt, synthetic construct
  source 1..21: mol_type = other RNA
cgtgtaaactgttggaaaaat

SEQ ID NO: 81886 - RNA, 21 nt, synthetic construct
  source 1..21: mol_type = other RNA
cgtgtacataaaataaaaacc

SEQ ID NO: 81887 - RNA, 21 nt, synthetic construct
  source 1..21: mol_type = other RNA
cgtgtactgaaaccagtgctc

SEQ ID NO: 81888 - RNA, 21 nt, synthetic construct
  source 1..21: mol_type = other RNA
cgtgtatactgggtgtgatgg

SEQ ID NO: 81889 - RNA, 21 nt, synthetic construct
  source 1..21: mol_type = other RNA
cgtgtatgatttctaggccct

SEQ ID NO: 81890 - RNA, 21 nt, synthetic construct
  source 1..21: mol_type = other RNA
cgtgtattgagtgtagctgtg

SEQ ID NO: 81891 - RNA, 21 nt, synthetic construct
  source 1..21: mol_type = other RNA
cgtgtgaaaccaagcaagtaa

SEQ ID NO: 81892 - RNA, 21 nt, synthetic construct
  source 1..21: mol_type = other RNA
cgtgtgacaaaaagtaggggt

SEQ ID NO: 81893 - RNA, 21 nt, synthetic construct
  source 1..21: mol_type = other RNA
cgtgtgagctctagccttgta

SEQ ID NO: 81894 - RNA, 21 nt, synthetic construct
  source 1..21: mol_type = other RNA
cgtgtgcatgaccctgctatg

SEQ ID NO: 81895 - RNA, 21 nt, synthetic construct
  source 1..21: mol_type = other RNA
cgtgtgcccaggctgacttag

SEQ ID NO: 81896 - RNA, 21 nt, synthetic construct
  source 1..21: mol_type = other RNA
cgtgtgtctcataaagccgga

SEQ ID NO: 81897 - RNA, 21 nt, synthetic construct
  source 1..21: mol_type = other RNA
cgtgtgtggagtggggcacct

SEQ ID NO: 81898 - RNA, 21 nt, synthetic construct
  source 1..21: mol_type = other RNA
cgtgtgtgtaagcacacatga

SEQ ID NO: 81899 - RNA, 21 nt, synthetic construct
  source 1..21: mol_type = other RNA
cgtgtgtttagaataatacac

SEQ ID NO: 81900 - RNA, 21 nt, synthetic construct
  source 1..21: mol_type = other RNA
cgtgtgttttgttgttgttgt

SEQ ID NO: 81901 - RNA, 21 nt, synthetic construct
  source 1..21: mol_type = other RNA
cgtgttattttaatcgaatcc

SEQ ID NO: 81902 - RNA, 21 nt, synthetic construct
  source 1..21: mol_type = other RNA
cgttaaaggaaaagagatcta

SEQ ID NO: 81903 - RNA, 21 nt, synthetic construct
  source 1..21: mol_type = other RNA
cgttaactgtattgcaaacta

SEQ ID NO: 81904 - RNA, 21 nt, synthetic construct
  source 1..21: mol_type = other RNA
cgttaatacttgtgtagcggg

SEQ ID NO: 81905 - RNA, 21 nt, synthetic construct
  source 1..21: mol_type = other RNA
cgttacaaaatatgtaatgac

SEQ ID NO: 81906 - RNA, 21 nt, synthetic construct
  source 1..21: mol_type = other RNA
cgttaccctctggaatgccca

SEQ ID NO: 81907 - RNA, 21 nt, synthetic construct
  source 1..21: mol_type = other RNA
cgttagcatcaccatcatcat

SEQ ID NO: 81908 - RNA, 21 nt, synthetic construct
  source 1..21: mol_type = other RNA
cgttatatcctcagggtagga

SEQ ID NO: 81909 - RNA, 21 nt, synthetic construct
  source 1..21: mol_type = other RNA
cgttcaaaacatcatctaatt

SEQ ID NO: 81910 - RNA, 21 nt, synthetic construct
  source 1..21: mol_type = other RNA
cgttcacactcgcactccact

SEQ ID NO: 81911 - RNA, 21 nt, synthetic construct
  source 1..21: mol_type = other RNA
cgttcagataacaaagggttc

SEQ ID NO: 81912 - RNA, 21 nt, synthetic construct
  source 1..21: mol_type = other RNA
cgttcagtttagtaaatcttt

SEQ ID NO: 81913 - RNA, 21 nt, synthetic construct
  source 1..21: mol_type = other RNA
cgttcatccaaattattgaca

SEQ ID NO: 81914 - RNA, 21 nt, synthetic construct
  source 1..21: mol_type = other RNA
cgttcatgttcaaggtgttcc

SEQ ID NO: 81915 - RNA, 21 nt, synthetic construct
  source 1..21: mol_type = other RNA
cgttccagcagggtaaagtca

SEQ ID NO: 81916 - RNA, 21 nt, synthetic construct
  source 1..21: mol_type = other RNA
cgttccatcagagaggctttt

SEQ ID NO: 81917 - RNA, 21 nt, synthetic construct
  source 1..21: mol_type = other RNA
cgttgaagtctttggcccatt

SEQ ID NO: 81918 - RNA, 21 nt, synthetic construct
  source 1..21: mol_type = other RNA
cgttgaccgctttcgtgaggg

SEQ ID NO: 81919 - RNA, 21 nt, synthetic construct
  source 1..21: mol_type = other RNA
cgttgagccatcatgcctggg

SEQ ID NO: 81920 - RNA, 21 nt, synthetic construct
  source 1..21: mol_type = other RNA
cgttgagtacctctgggatgc

SEQ ID NO: 81921 - RNA, 21 nt, synthetic construct
  source 1..21: mol_type = other RNA
cgttgctgcatagtactccat

SEQ ID NO: 81922 - RNA, 21 nt, synthetic construct
  source 1..21: mol_type = other RNA
cgttggagacagcctaaacca

SEQ ID NO: 81923 - RNA, 21 nt, synthetic construct
  source 1..21: mol_type = other RNA
cgttggatttatctttctaga

SEQ ID NO: 81924 - RNA, 21 nt, synthetic construct
  source 1..21: mol_type = other RNA
cgttgttcagttgaaaagtat

SEQ ID NO: 81925 - RNA, 21 nt, synthetic construct
  source 1..21: mol_type = other RNA
cgtttatctacagaggatttt

SEQ ID NO: 81926 - RNA, 21 nt, synthetic construct
  source 1..21: mol_type = other RNA
cgtttatgcatttattagtag

SEQ ID NO: 81927 - RNA, 21 nt, synthetic construct
  source 1..21: mol_type = other RNA
cgtttattagaactagaactg

SEQ ID NO: 81928 - RNA, 21 nt, synthetic construct
  source 1..21: mol_type = other RNA
cgtttatttcttctccctctt

SEQ ID NO: 81929 - RNA, 21 nt, synthetic construct
  source 1..21: mol_type = other RNA
cgtttcaatattaagagtctc

SEQ ID NO: 81930 - RNA, 21 nt, synthetic construct
  source 1..21: mol_type = other RNA
cgtttcagattgcttgagaga

SEQ ID NO: 81931 - RNA, 21 nt, synthetic construct
  source 1..21: mol_type = other RNA
cgtttgaggcttttcatagtc

SEQ ID NO: 81932 - RNA, 21 nt, synthetic construct
  source 1..21: mol_type = other RNA
cgtttgagttgtttccacttt

SEQ ID NO: 81933 - RNA, 21 nt, synthetic construct
  source 1..21: mol_type = other RNA
cgtttgatctggtcacaaaca

SEQ ID NO: 81934 - RNA, 21 nt, synthetic construct
  source 1..21: mol_type = other RNA
cgtttgctttggagtgagagg

SEQ ID NO: 81935 - RNA, 21 nt, synthetic construct
  source 1..21: mol_type = other RNA
cgtttggtgactgaattccca

SEQ ID NO: 81936 - RNA, 21 nt, synthetic construct
  source 1..21: mol_type = other RNA
cgtttgttagatctgggataa

SEQ ID NO: 81937 - RNA, 21 nt, synthetic construct
  source 1..21: mol_type = other RNA
cgttttcaacaaaggttgaaa

SEQ ID NO: 81938 - RNA, 21 nt, synthetic construct
  source 1..21: mol_type = other RNA
cgttttgcaagatgcataagt

SEQ ID NO: 81939 - RNA, 21 nt, synthetic construct
  source 1..21: mol_type = other RNA
cgtttttagaaatttacccat

SEQ ID NO: 81940 - RNA, 21 nt, synthetic construct
  source 1..21: mol_type = other RNA
cgtttttcaggttcaagcgac

SEQ ID NO: 81941 - RNA, 21 nt, synthetic construct
  source 1..21: mol_type = other RNA
cgttttttccttcatttaaca

SEQ ID NO: 81942 - RNA, 21 nt, synthetic construct
  source 1..21: mol_type = other RNA
cgttttttgtccaccagacaa

SEQ ID NO: 81943 - RNA, 21 nt, synthetic construct
  source 1..21: mol_type = other RNA
ctaaaaacatccattactcgt

SEQ ID NO: 81944 - RNA, 21 nt, synthetic construct
  source 1..21: mol_type = other RNA
ctaaaaacgtgcaaactacca

SEQ ID NO: 81945 - RNA, 21 nt, synthetic construct
  source 1..21: mol_type = other RNA
ctaaaaagaaaaagttgggct

SEQ ID NO: 81946 - RNA, 21 nt, synthetic construct
  source 1..21: mol_type = other RNA
ctaaaaagggagtcagtagag

SEQ ID NO: 81947 - RNA, 21 nt, synthetic construct
  source 1..21: mol_type = other RNA
ctaaaacactggaagtaattg

SEQ ID NO: 81948 - RNA, 21 nt, synthetic construct
  source 1..21: mol_type = other RNA
ctaaaacaggaagttgagaaa

SEQ ID NO: 81949 - RNA, 21 nt, synthetic construct
  source 1..21: mol_type = other RNA
ctaaaacatacatgagaaatg

SEQ ID NO: 81950 - RNA, 21 nt, synthetic construct
  source 1..21: mol_type = other RNA
ctaaaacatggtccacagagg

SEQ ID NO: 81951 - RNA, 21 nt, synthetic construct
  source 1..21: mol_type = other RNA
ctaaaactccccatgcaggag

SEQ ID NO: 81952 - RNA, 21 nt, synthetic construct
  source 1..21: mol_type = other RNA
ctaaaagaccgcaagagttcc

SEQ ID NO: 81953 - RNA, 21 nt, synthetic construct
  source 1..21: mol_type = other RNA
ctaaaaggttgcttaattgag

SEQ ID NO: 81954 - RNA, 21 nt, synthetic construct
  source 1..21: mol_type = other RNA
ctaaaataggcctaggtgtga

SEQ ID NO: 81955 - RNA, 21 nt, synthetic construct
  source 1..21: mol_type = other RNA
ctaaaatcatcacagtatgca

SEQ ID NO: 81956 - RNA, 21 nt, synthetic construct
  source 1..21: mol_type = other RNA
ctaaaatcttattccccaggg

SEQ ID NO: 81957 - RNA, 21 nt, synthetic construct
  source 1..21: mol_type = other RNA
ctaaaatggaagactttatgg

SEQ ID NO: 81958 - RNA, 21 nt, synthetic construct
  source 1..21: mol_type = other RNA
ctaaaattccttcctttgatg

SEQ ID NO: 81959 - RNA, 21 nt, synthetic construct
  source 1..21: mol_type = other RNA
ctaaacaaatcagatttcagg

SEQ ID NO: 81960 - RNA, 21 nt, synthetic construct
  source 1..21: mol_type = other RNA
ctaaacacacgggctgggcgc

SEQ ID NO: 81961 - RNA, 21 nt, synthetic construct
  source 1..21: mol_type = other RNA
ctaaacactgtagttcagttt

SEQ ID NO: 81962 - RNA, 21 nt, synthetic construct
  source 1..21: mol_type = other RNA
ctaaacacttagcatgttgct

SEQ ID NO: 81963 - RNA, 21 nt, synthetic construct
  source 1..21: mol_type = other RNA
ctaaacagtacagtagtaaaa

SEQ ID NO: 81964 - RNA, 21 nt, synthetic construct
  source 1..21: mol_type = other RNA
ctaaacattttattaggtgca

SEQ ID NO: 81965 - RNA, 21 nt, synthetic construct
  source 1..21: mol_type = other RNA
ctaaaccattttcaatcttgg

SEQ ID NO: 81966 - RNA, 21 nt, synthetic construct
  source 1..21: mol_type = other RNA
ctaaacctgaggtctttaaaa

SEQ ID NO: 81967 - RNA, 21 nt, synthetic construct
  source 1..21: mol_type = other RNA
ctaaacctgctacgaatgaac

SEQ ID NO: 81968 - RNA, 21 nt, synthetic construct
  source 1..21: mol_type = other RNA
ctaaacctgtgatttccagtg

SEQ ID NO: 81969 - RNA, 21 nt, synthetic construct
  source 1..21: mol_type = other RNA
ctaaaccttaaaagagtgaaa

SEQ ID NO: 81970 - RNA, 21 nt, synthetic construct
  source 1..21: mol_type = other RNA
ctaaacgtttggtgactgaat

SEQ ID NO: 81971 - RNA, 21 nt, synthetic construct
  source 1..21: mol_type = other RNA
ctaaactagtatcaacctgca

SEQ ID NO: 81972 - RNA, 21 nt, synthetic construct
  source 1..21: mol_type = other RNA
ctaaactagttcaaccattgt

SEQ ID NO: 81973 - RNA, 21 nt, synthetic construct
  source 1..21: mol_type = other RNA
ctaaactgaacgaagtgaaaa

SEQ ID NO: 81974 - RNA, 21 nt, synthetic construct
  source 1..21: mol_type = other RNA
ctaaactggttttcctgatgg

SEQ ID NO: 81975 - RNA, 21 nt, synthetic construct
  source 1..21: mol_type = other RNA
ctaaactgttccccaagccaa

SEQ ID NO: 81976 - RNA, 21 nt, synthetic construct
  source 1..21: mol_type = other RNA
ctaaactttgagtagcaccct

SEQ ID NO: 81977 - RNA, 21 nt, synthetic construct
  source 1..21: mol_type = other RNA
ctaaagagagtgacagctgag

SEQ ID NO: 81978 - RNA, 21 nt, synthetic construct
  source 1..21: mol_type = other RNA
ctaaagatatgtgtaggaagg

SEQ ID NO: 81979 - RNA, 21 nt, synthetic construct
  source 1..21: mol_type = other RNA
ctaaagatttgccaatcaata

SEQ ID NO: 81980 - RNA, 21 nt, synthetic construct
  source 1..21: mol_type = other RNA
ctaaagccaatcttcccaatc

SEQ ID NO: 81981 - RNA, 21 nt, synthetic construct
  source 1..21: mol_type = other RNA
ctaaagccaggctttcccagg

SEQ ID NO: 81982 - RNA, 21 nt, synthetic construct
  source 1..21: mol_type = other RNA
ctaaaggggatttcatgaaca

SEQ ID NO: 81983 - RNA, 21 nt, synthetic construct
  source 1..21: mol_type = other RNA
ctaaagtccacagatcttttt

SEQ ID NO: 81984 - RNA, 21 nt, synthetic construct
  source 1..21: mol_type = other RNA
ctaaagtctatgctcttggtt

SEQ ID NO: 81985 - RNA, 21 nt, synthetic construct
  source 1..21: mol_type = other RNA
ctaaagttagaagtatcccag

SEQ ID NO: 81986 - RNA, 21 nt, synthetic construct
  source 1..21: mol_type = other RNA
ctaaagttgaggttgaagacc

SEQ ID NO: 81987 - RNA, 21 nt, synthetic construct
  source 1..21: mol_type = other RNA
ctaaataaaacacatgtcatg

SEQ ID NO: 81988 - RNA, 21 nt, synthetic construct
  source 1..21: mol_type = other RNA
ctaaatacacatgttgagtct

SEQ ID NO: 81989 - RNA, 21 nt, synthetic construct
  source 1..21: mol_type = other RNA
ctaaatacaccaaactcaaaa

SEQ ID NO: 81990 - RNA, 21 nt, synthetic construct
  source 1..21: mol_type = other RNA
ctaaataggtattcatgctgt

SEQ ID NO: 81991 - RNA, 21 nt, synthetic construct
  source 1..21: mol_type = other RNA
ctaaatcaacagtgtactagt

SEQ ID NO: 81992 - RNA, 21 nt, synthetic construct
  source 1..21: mol_type = other RNA
ctaaatcaggatgtctttggg

SEQ ID NO: 81993 - RNA, 21 nt, synthetic construct
  source 1..21: mol_type = other RNA
ctaaatgatctttcaaggggc

SEQ ID NO: 81994 - RNA, 21 nt, synthetic construct
  source 1..21: mol_type = other RNA
ctaaatgctcacatttagttt

SEQ ID NO: 81995 - RNA, 21 nt, synthetic construct
  source 1..21: mol_type = other RNA
ctaaatggtgtgaagttgggc

SEQ ID NO: 81996 - RNA, 21 nt, synthetic construct
  source 1..21: mol_type = other RNA
ctaaatgtccatcgagagatg

SEQ ID NO: 81997 - RNA, 21 nt, synthetic construct
  source 1..21: mol_type = other RNA
ctaaatgtgagcatttagccc

SEQ ID NO: 81998 - RNA, 21 nt, synthetic construct
  source 1..21: mol_type = other RNA
ctaaattaaaggctggaaata

SEQ ID NO: 81999 - RNA, 21 nt, synthetic construct
  source 1..21: mol_type = other RNA
ctaaattaagcttcgacagtc

SEQ ID NO: 82000 - RNA, 21 nt, synthetic construct
  source 1..21: mol_type = other RNA
ctaaattgaacagcctaaagt

SEQ ID NO: 82001 - RNA, 21 nt, synthetic construct
  source 1..21: mol_type = other RNA
ctaaattttaagtgcacaatg

SEQ ID NO: 82002 - RNA, 21 nt, synthetic construct
  source 1..21: mol_type = other RNA
ctaaattttgaggcttttgga

SEQ ID NO: 82003 - RNA, 21 nt, synthetic construct
  source 1..21: mol_type = other RNA
ctaacaaaaatacttaagagc

SEQ ID NO: 82004 - RNA, 21 nt, synthetic construct
  source 1..21: mol_type = other RNA
ctaacaaaactaggctgtccc

SEQ ID NO: 82005 - RNA, 21 nt, synthetic construct
  source 1..21: mol_type = other RNA
ctaacaaaagatacacaagat

SEQ ID NO: 82006 - RNA, 21 nt, synthetic construct
  source 1..21: mol_type = other RNA
ctaacaaacgcattgtgatgt

SEQ ID NO: 82007 - RNA, 21 nt, synthetic construct
  source 1..21: mol_type = other RNA
ctaacaaagaacaggaaggga

SEQ ID NO: 82008 - RNA, 21 nt, synthetic construct
  source 1..21: mol_type = other RNA
ctaacaaagggcctgttccag

SEQ ID NO: 82009 - RNA, 21 nt, synthetic construct
  source 1..21: mol_type = other RNA
ctaacaagaaagggtagcttt

SEQ ID NO: 82010 - RNA, 21 nt, synthetic construct
  source 1..21: mol_type = other RNA
ctaacaagaagctgttttggt

SEQ ID NO: 82011 - RNA, 21 nt, synthetic construct
  source 1..21: mol_type = other RNA
ctaacaccagtaagattctgt

SEQ ID NO: 82012 - RNA, 21 nt, synthetic construct
  source 1..21: mol_type = other RNA
ctaacaccttgaactgggact

SEQ ID NO: 82013 - RNA, 21 nt, synthetic construct
  source 1..21: mol_type = other RNA
ctaacagccaaagaaattgga

SEQ ID NO: 82014 - RNA, 21 nt, synthetic construct
  source 1..21: mol_type = other RNA
ctaacagccggcatatgtcac

SEQ ID NO: 82015 - RNA, 21 nt, synthetic construct
  source 1..21: mol_type = other RNA
ctaacagggtctacaaaaggt

SEQ ID NO: 82016 - RNA, 21 nt, synthetic construct
  source 1..21: mol_type = other RNA
ctaacagtctcgtgaatttgg

SEQ ID NO: 82017 - RNA, 21 nt, synthetic construct
  source 1..21: mol_type = other RNA
ctaacataatcaaattcacag

SEQ ID NO: 82018 - RNA, 21 nt, synthetic construct
  source 1..21: mol_type = other RNA
ctaacatgaactactcaaaga

SEQ ID NO: 82019 - RNA, 21 nt, synthetic construct
  source 1..21: mol_type = other RNA
ctaacatgtcttggtgtgctc

SEQ ID NO: 82020 - RNA, 21 nt, synthetic construct
  source 1..21: mol_type = other RNA
ctaacattatcttctaccttt

SEQ ID NO: 82021 - RNA, 21 nt, synthetic construct
  source 1..21: mol_type = other RNA
ctaaccaacattgagtttcaa

SEQ ID NO: 82022 - RNA, 21 nt, synthetic construct
  source 1..21: mol_type = other RNA
ctaaccactgttatctgggaa

SEQ ID NO: 82023 - RNA, 21 nt, synthetic construct
  source 1..21: mol_type = other RNA
ctaaccaggcccggggcagag

SEQ ID NO: 82024 - RNA, 21 nt, synthetic construct
  source 1..21: mol_type = other RNA
ctaaccattaacagctcagaa

SEQ ID NO: 82025 - RNA, 21 nt, synthetic construct
  source 1..21: mol_type = other RNA
ctaaccccagagattgtcgtt

SEQ ID NO: 82026 - RNA, 21 nt, synthetic construct
  source 1..21: mol_type = other RNA
ctaaccctcaaatgccataga

SEQ ID NO: 82027 - RNA, 21 nt, synthetic construct
  source 1..21: mol_type = other RNA
ctaaccctcaatccccatctg

SEQ ID NO: 82028 - RNA, 21 nt, synthetic construct
  source 1..21: mol_type = other RNA
ctaaccctcctcctctacaag

SEQ ID NO: 82029 - RNA, 21 nt, synthetic construct
  source 1..21: mol_type = other RNA
ctaacgatccttactaccacc

SEQ ID NO: 82030 - RNA, 21 nt, synthetic construct
  source 1..21: mol_type = other RNA
ctaacgtgcttgctctgcggc

SEQ ID NO: 82031 - RNA, 21 nt, synthetic construct
  source 1..21: mol_type = other RNA
ctaactagaaaaccgacagca

SEQ ID NO: 82032 - RNA, 21 nt, synthetic construct
  source 1..21: mol_type = other RNA
ctaactcaagagttacttctg

SEQ ID NO: 82033 - RNA, 21 nt, synthetic construct
  source 1..21: mol_type = other RNA
ctaactgcagaggtcaggaag

SEQ ID NO: 82034 - RNA, 21 nt, synthetic construct
  source 1..21: mol_type = other RNA
ctaactggtctcctttctata

SEQ ID NO: 82035 - RNA, 21 nt, synthetic construct
  source 1..21: mol_type = other RNA
ctaactttaaattttgagacc

SEQ ID NO: 82036 - RNA, 21 nt, synthetic construct
  source 1..21: mol_type = other RNA
ctaactttctattcccctgga

SEQ ID NO: 82037 - RNA, 21 nt, synthetic construct
  source 1..21: mol_type = other RNA
ctaacttttaacccacagata

SEQ ID NO: 82038 - RNA, 21 nt, synthetic construct
  source 1..21: mol_type = other RNA
ctaagaaaaacagaagacaca

SEQ ID NO: 82039 - RNA, 21 nt, synthetic construct
  source 1..21: mol_type = other RNA
ctaagaaagggtgtgtgaatg

SEQ ID NO: 82040 - RNA, 21 nt, synthetic construct
  source 1..21: mol_type = other RNA
ctaagaaaggtctagtgtgca

SEQ ID NO: 82041 - RNA, 21 nt, synthetic construct
  source 1..21: mol_type = other RNA
ctaagaagatggttggaagtt

SEQ ID NO: 82042 - RNA, 21 nt, synthetic construct
  source 1..21: mol_type = other RNA
ctaagaagtgaaactgctgga

SEQ ID NO: 82043 - RNA, 21 nt, synthetic construct
  source 1..21: mol_type = other RNA
ctaagacactagctattgtct

SEQ ID NO: 82044 - RNA, 21 nt, synthetic construct
  source 1..21: mol_type = other RNA
ctaagaccccagtagaaatct

SEQ ID NO: 82045 - RNA, 21 nt, synthetic construct
  source 1..21: mol_type = other RNA
ctaagactataaaactcttag

SEQ ID NO: 82046 - RNA, 21 nt, synthetic construct
  source 1..21: mol_type = other RNA
ctaagagataactaatgagaa

SEQ ID NO: 82047 - RNA, 21 nt, synthetic construct
  source 1..21: mol_type = other RNA
ctaagagccaaagacattgtc

SEQ ID NO: 82048 - RNA, 21 nt, synthetic construct
  source 1..21: mol_type = other RNA
ctaagagtgaaaaggcaaacc

SEQ ID NO: 82049 - RNA, 21 nt, synthetic construct
  source 1..21: mol_type = other RNA
ctaagatgaggtctcagcctt

SEQ ID NO: 82050 - RNA, 21 nt, synthetic construct
  source 1..21: mol_type = other RNA
ctaagatgctattcaagacaa

SEQ ID NO: 82051 - RNA, 21 nt, synthetic construct
  source 1..21: mol_type = other RNA
ctaagatggaaagtggactat

SEQ ID NO: 82052 - RNA, 21 nt, synthetic construct
  source 1..21: mol_type = other RNA
ctaagcaagttacatgcttag

SEQ ID NO: 82053 - RNA, 21 nt, synthetic construct
  source 1..21: mol_type = other RNA
ctaagcaccaacagatcctca

SEQ ID NO: 82054 - RNA, 21 nt, synthetic construct
  source 1..21: mol_type = other RNA
ctaagcactgcgccaagcagg

SEQ ID NO: 82055 - RNA, 21 nt, synthetic construct
  source 1..21: mol_type = other RNA
ctaagcagaaatgacaagtaa

SEQ ID NO: 82056 - RNA, 21 nt, synthetic construct
  source 1..21: mol_type = other RNA
ctaagcatcgtgaagtcttta

SEQ ID NO: 82057 - RNA, 21 nt, synthetic construct
  source 1..21: mol_type = other RNA
ctaagcatgagatactacgcc

SEQ ID NO: 82058 - RNA, 21 nt, synthetic construct
  source 1..21: mol_type = other RNA
ctaagcatgtaacttgcttag

SEQ ID NO: 82059 - RNA, 21 nt, synthetic construct
  source 1..21: mol_type = other RNA
ctaagccatctaattcacatt

SEQ ID NO: 82060 - RNA, 21 nt, synthetic construct
  source 1..21: mol_type = other RNA
ctaagccatgtttctcctgca

SEQ ID NO: 82061 - RNA, 21 nt, synthetic construct
  source 1..21: mol_type = other RNA
ctaagcctacctcccttcaca

SEQ ID NO: 82062 - RNA, 21 nt, synthetic construct
  source 1..21: mol_type = other RNA
ctaagcctactgctctgtcct

SEQ ID NO: 82063 - RNA, 21 nt, synthetic construct
  source 1..21: mol_type = other RNA
ctaagcctatgtaagacaatg

SEQ ID NO: 82064 - RNA, 21 nt, synthetic construct
  source 1..21: mol_type = other RNA
ctaagctaagagttttatagt

SEQ ID NO: 82065 - RNA, 21 nt, synthetic construct
  source 1..21: mol_type = other RNA
ctaagcttaagagctaagact

SEQ ID NO: 82066 - RNA, 21 nt, synthetic construct
  source 1..21: mol_type = other RNA
ctaagcttgggtaggaagctg

SEQ ID NO: 82067 - RNA, 21 nt, synthetic construct
  source 1..21: mol_type = other RNA
ctaaggaaagctcaggaccag

SEQ ID NO: 82068 - RNA, 21 nt, synthetic construct
  source 1..21: mol_type = other RNA
ctaaggattatggctagaaac

SEQ ID NO: 82069 - RNA, 21 nt, synthetic construct
  source 1..21: mol_type = other RNA
ctaagggaagttttttcaaaa

SEQ ID NO: 82070 - RNA, 21 nt, synthetic construct
  source 1..21: mol_type = other RNA
ctaaggtcaacacatcagcgc

SEQ ID NO: 82071 - RNA, 21 nt, synthetic construct
  source 1..21: mol_type = other RNA
ctaaggtcaagagagattaaa

SEQ ID NO: 82072 - RNA, 21 nt, synthetic construct
  source 1..21: mol_type = other RNA
ctaaggtggagtggtggatag

SEQ ID NO: 82073 - RNA, 21 nt, synthetic construct
  source 1..21: mol_type = other RNA
ctaaggttctgctatgctgaa

SEQ ID NO: 82074 - RNA, 21 nt, synthetic construct
  source 1..21: mol_type = other RNA
ctaagtaatgctggccagtga

SEQ ID NO: 82075 - RNA, 21 nt, synthetic construct
  source 1..21: mol_type = other RNA
ctaagtagtggcagccccgct

SEQ ID NO: 82076 - RNA, 21 nt, synthetic construct
  source 1..21: mol_type = other RNA
ctaagtatgcagaaaccagtt

SEQ ID NO: 82077 - RNA, 21 nt, synthetic construct
  source 1..21: mol_type = other RNA
ctaagtcagaattcactgtga

SEQ ID NO: 82078 - RNA, 21 nt, synthetic construct
  source 1..21: mol_type = other RNA
ctaagtcagcctgggcacacg

SEQ ID NO: 82079 - RNA, 21 nt, synthetic construct
  source 1..21: mol_type = other RNA
ctaagtctcaacctactttaa

SEQ ID NO: 82080 - RNA, 21 nt, synthetic construct
  source 1..21: mol_type = other RNA
ctaagtcttcttctaagctaa

SEQ ID NO: 82081 - RNA, 21 nt, synthetic construct
  source 1..21: mol_type = other RNA
ctaagtgcatttcggctctgt

SEQ ID NO: 82082 - RNA, 21 nt, synthetic construct
  source 1..21: mol_type = other RNA
ctaagtggtattctatcatca

SEQ ID NO: 82083 - RNA, 21 nt, synthetic construct
  source 1..21: mol_type = other RNA
ctaagtgtgaagattaagcac

SEQ ID NO: 82084 - RNA, 21 nt, synthetic construct
  source 1..21: mol_type = other RNA
ctaagtgtttaggatataaga

SEQ ID NO: 82085 - RNA, 21 nt, synthetic construct
  source 1..21: mol_type = other RNA
ctaagttgagaaactatccaa

SEQ ID NO: 82086 - RNA, 21 nt, synthetic construct
  source 1..21: mol_type = other RNA
ctaagtttgccaaagattctt

SEQ ID NO: 82087 - RNA, 21 nt, synthetic construct
  source 1..21: mol_type = other RNA
ctaagttttgggggaagagag

SEQ ID NO: 82088 - RNA, 21 nt, synthetic construct
  source 1..21: mol_type = other RNA
ctaataaaaacatatgcagga

SEQ ID NO: 82089 - RNA, 21 nt, synthetic construct
  source 1..21: mol_type = other RNA
ctaataaaaagcctctctgat

SEQ ID NO: 82090 - RNA, 21 nt, synthetic construct
  source 1..21: mol_type = other RNA
ctaataaaagctggagttatt

SEQ ID NO: 82091 - RNA, 21 nt, synthetic construct
  source 1..21: mol_type = other RNA
ctaataaaatagcaggattct

SEQ ID NO: 82092 - RNA, 21 nt, synthetic construct
  source 1..21: mol_type = other RNA
ctaataaaatgtttagcggaa

SEQ ID NO: 82093 - RNA, 21 nt, synthetic construct
  source 1..21: mol_type = other RNA
ctaataaacgcggaatgaagc

SEQ ID NO: 82094 - RNA, 21 nt, synthetic construct
  source 1..21: mol_type = other RNA
ctaataaatgcataaacgaca

SEQ ID NO: 82095 - RNA, 21 nt, synthetic construct
  source 1..21: mol_type = other RNA
ctaataacagcctaagcaaat

SEQ ID NO: 82096 - RNA, 21 nt, synthetic construct
  source 1..21: mol_type = other RNA
ctaataagtgagtttgacctg

SEQ ID NO: 82097 - RNA, 21 nt, synthetic construct
  source 1..21: mol_type = other RNA
ctaataattgcttttgctgag

SEQ ID NO: 82098 - RNA, 21 nt, synthetic construct
  source 1..21: mol_type = other RNA
ctaataatttatcagatccca

SEQ ID NO: 82099 - RNA, 21 nt, synthetic construct
  source 1..21: mol_type = other RNA
ctaatacagtaaagccccatt

SEQ ID NO: 82100 - RNA, 21 nt, synthetic construct
  source 1..21: mol_type = other RNA
ctaatagccagtgcagcaagc

SEQ ID NO: 82101 - RNA, 21 nt, synthetic construct
  source 1..21: mol_type = other RNA
ctaatagctagtgatgttgag

SEQ ID NO: 82102 - RNA, 21 nt, synthetic construct
  source 1..21: mol_type = other RNA
ctaataggaagtggctagacg

SEQ ID NO: 82103 - RNA, 21 nt, synthetic construct
  source 1..21: mol_type = other RNA
ctaatagttcacctctccggg

SEQ ID NO: 82104 - RNA, 21 nt, synthetic construct
  source 1..21: mol_type = other RNA
ctaatatctttggggagatac

SEQ ID NO: 82105 - RNA, 21 nt, synthetic construct
  source 1..21: mol_type = other RNA
ctaatatgagttcctgcttcc

SEQ ID NO: 82106 - RNA, 21 nt, synthetic construct
  source 1..21: mol_type = other RNA
ctaatatgctgtagtgattca

SEQ ID NO: 82107 - RNA, 21 nt, synthetic construct
  source 1..21: mol_type = other RNA
ctaatatggttcctagaaaat

SEQ ID NO: 82108 - RNA, 21 nt, synthetic construct
  source 1..21: mol_type = other RNA
ctaatcaaacataccccaacc

SEQ ID NO: 82109 - RNA, 21 nt, synthetic construct
  source 1..21: mol_type = other RNA
ctaatcaagccgcaaataatc

SEQ ID NO: 82110 - RNA, 21 nt, synthetic construct
  source 1..21: mol_type = other RNA
ctaatcaggttgggcttatca

SEQ ID NO: 82111 - RNA, 21 nt, synthetic construct
  source 1..21: mol_type = other RNA
ctaatcccaaagtgagcagaa

SEQ ID NO: 82112 - RNA, 21 nt, synthetic construct
  source 1..21: mol_type = other RNA
ctaatccttctcatagtcttc

SEQ ID NO: 82113 - RNA, 21 nt, synthetic construct
  source 1..21: mol_type = other RNA
ctaatcctttgcacacaccaa

SEQ ID NO: 82114 - RNA, 21 nt, synthetic construct
  source 1..21: mol_type = other RNA
ctaatctactttctaatcctt

SEQ ID NO: 82115 - RNA, 21 nt, synthetic construct
  source 1..21: mol_type = other RNA
ctaatctcaatcagggccttc

SEQ ID NO: 82116 - RNA, 21 nt, synthetic construct
  source 1..21: mol_type = other RNA
ctaatctctaggcttaaaatt

SEQ ID NO: 82117 - RNA, 21 nt, synthetic construct
  source 1..21: mol_type = other RNA
ctaatgaactcccagaactcg

SEQ ID NO: 82118 - RNA, 21 nt, synthetic construct
  source 1..21: mol_type = other RNA
ctaatgagaatttcagaaaga

SEQ ID NO: 82119 - RNA, 21 nt, synthetic construct
  source 1..21: mol_type = other RNA
ctaatgcaagagttaaaactc

SEQ ID NO: 82120 - RNA, 21 nt, synthetic construct
  source 1..21: mol_type = other RNA
ctaatgcccattaaaaccatg

SEQ ID NO: 82121 - RNA, 21 nt, synthetic construct
  source 1..21: mol_type = other RNA
ctaatgcctcaaattagtcat

SEQ ID NO: 82122 - RNA, 21 nt, synthetic construct
  source 1..21: mol_type = other RNA
ctaatgggcgtggagcggtgt

SEQ ID NO: 82123 - RNA, 21 nt, synthetic construct
  source 1..21: mol_type = other RNA
ctaatggggaaatagatgcct

SEQ ID NO: 82124 - RNA, 21 nt, synthetic construct
  source 1..21: mol_type = other RNA
ctaatgggtacagggtttctg

SEQ ID NO: 82125 - RNA, 21 nt, synthetic construct
  source 1..21: mol_type = other RNA
ctaatggtccttgctgaagaa

SEQ ID NO: 82126 - RNA, 21 nt, synthetic construct
  source 1..21: mol_type = other RNA
ctaatgtaaacagcatactgt

SEQ ID NO: 82127 - RNA, 21 nt, synthetic construct
  source 1..21: mol_type = other RNA
ctaatgtcacattttcttatc

SEQ ID NO: 82128 - RNA, 21 nt, synthetic construct
  source 1..21: mol_type = other RNA
ctaatgtccttttcctgttcc

SEQ ID NO: 82129 - RNA, 21 nt, synthetic construct
  source 1..21: mol_type = other RNA
ctaatgtgcaaggagagaaaa

SEQ ID NO: 82130 - RNA, 21 nt, synthetic construct
  source 1..21: mol_type = other RNA
ctaatgtggcttgcaaggccc

SEQ ID NO: 82131 - RNA, 21 nt, synthetic construct
  source 1..21: mol_type = other RNA
ctaatgtgtaagaaatgccac

SEQ ID NO: 82132 - RNA, 21 nt, synthetic construct
  source 1..21: mol_type = other RNA
ctaatgtgtgttccagacaaa

SEQ ID NO: 82133 - RNA, 21 nt, synthetic construct
  source 1..21: mol_type = other RNA
ctaattactgtttcttagcta

SEQ ID NO: 82134 - RNA, 21 nt, synthetic construct
  source 1..21: mol_type = other RNA
ctaattagaaactggtgaact

SEQ ID NO: 82135 - RNA, 21 nt, synthetic construct
  source 1..21: mol_type = other RNA
ctaattcacatttaagaaggg

SEQ ID NO: 82136 - RNA, 21 nt, synthetic construct
  source 1..21: mol_type = other RNA
ctaattcattgtacatgaagt

SEQ ID NO: 82137 - RNA, 21 nt, synthetic construct
  source 1..21: mol_type = other RNA
ctaattcgaaaatgggccaaa

SEQ ID NO: 82138 - RNA, 21 nt, synthetic construct
  source 1..21: mol_type = other RNA
ctaattctgacaactgggaga

SEQ ID NO: 82139 - RNA, 21 nt, synthetic construct
  source 1..21: mol_type = other RNA
ctaattgtacacctcaaacta

SEQ ID NO: 82140 - RNA, 21 nt, synthetic construct
  source 1..21: mol_type = other RNA
ctaattgtttgttgggtttaa

SEQ ID NO: 82141 - RNA, 21 nt, synthetic construct
  source 1..21: mol_type = other RNA
ctaatttcagagagacctgaa

SEQ ID NO: 82142 - RNA, 21 nt, synthetic construct
  source 1..21: mol_type = other RNA
ctaatttcatacaagttgtga

SEQ ID NO: 82143 - RNA, 21 nt, synthetic construct
  source 1..21: mol_type = other RNA
ctaatttccaagaaccctttg

SEQ ID NO: 82144 - RNA, 21 nt, synthetic construct
  source 1..21: mol_type = other RNA
ctaatttcccatttgatttct

SEQ ID NO: 82145 - RNA, 21 nt, synthetic construct
  source 1..21: mol_type = other RNA
ctaatttctttaaaaccagag

SEQ ID NO: 82146 - RNA, 21 nt, synthetic construct
  source 1..21: mol_type = other RNA
ctaatttgaggcattagtgaa

SEQ ID NO: 82147 - RNA, 21 nt, synthetic construct
  source 1..21: mol_type = other RNA
ctaatttgtgaaccttgaagt

SEQ ID NO: 82148 - RNA, 21 nt, synthetic construct
  source 1..21: mol_type = other RNA
ctacaaaacagggttattaac

SEQ ID NO: 82149 - RNA, 21 nt, synthetic construct
  source 1..21: mol_type = other RNA
ctacaaaagatcatttcaaac

SEQ ID NO: 82150 - RNA, 21 nt, synthetic construct
  source 1..21: mol_type = other RNA
ctacaaaaggaggaactaatt

SEQ ID NO: 82151 - RNA, 21 nt, synthetic construct
  source 1..21: mol_type = other RNA
ctacaaaagggaaaacaatta

SEQ ID NO: 82152 - RNA, 21 nt, synthetic construct
  source 1..21: mol_type = other RNA
ctacaaaaggtttccagtggc

SEQ ID NO: 82153 - RNA, 21 nt, synthetic construct
  source 1..21: mol_type = other RNA
ctacaaaccttcttatttcct

SEQ ID NO: 82154 - RNA, 21 nt, synthetic construct
  source 1..21: mol_type = other RNA
ctacaaactccaaacctttaa

SEQ ID NO: 82155 - RNA, 21 nt, synthetic construct
  source 1..21: mol_type = other RNA
ctacaagagttcccctatact

SEQ ID NO: 82156 - RNA, 21 nt, synthetic construct
  source 1..21: mol_type = other RNA
ctacaatggttgaactagttt

SEQ ID NO: 82157 - RNA, 21 nt, synthetic construct
  source 1..21: mol_type = other RNA
ctacaattactgtacaaagat

SEQ ID NO: 82158 - RNA, 21 nt, synthetic construct
  source 1..21: mol_type = other RNA
ctacacaaaaatccagataaa

SEQ ID NO: 82159 - RNA, 21 nt, synthetic construct
  source 1..21: mol_type = other RNA
ctacacaacatgttttatttc

SEQ ID NO: 82160 - RNA, 21 nt, synthetic construct
  source 1..21: mol_type = other RNA
ctacacaagtattaacgaatt

SEQ ID NO: 82161 - RNA, 21 nt, synthetic construct
  source 1..21: mol_type = other RNA
ctacacagacatgaacaatcc

SEQ ID NO: 82162 - RNA, 21 nt, synthetic construct
  source 1..21: mol_type = other RNA
ctacacatacacagggaaaac

SEQ ID NO: 82163 - RNA, 21 nt, synthetic construct
  source 1..21: mol_type = other RNA
ctacacatatctttaggtgtt

SEQ ID NO: 82164 - RNA, 21 nt, synthetic construct
  source 1..21: mol_type = other RNA
ctacacatcagtgctgctctg

SEQ ID NO: 82165 - RNA, 21 nt, synthetic construct
  source 1..21: mol_type = other RNA
ctacacattccagaccagcag

SEQ ID NO: 82166 - RNA, 21 nt, synthetic construct
  source 1..21: mol_type = other RNA
ctacacccagttcaccagttt

SEQ ID NO: 82167 - RNA, 21 nt, synthetic construct
  source 1..21: mol_type = other RNA
ctacacccatccacccacttg

SEQ ID NO: 82168 - RNA, 21 nt, synthetic construct
  source 1..21: mol_type = other RNA
ctacacccggctaattaaaca

SEQ ID NO: 82169 - RNA, 21 nt, synthetic construct
  source 1..21: mol_type = other RNA
ctacaccctgggaaagcctgg

SEQ ID NO: 82170 - RNA, 21 nt, synthetic construct
  source 1..21: mol_type = other RNA
ctacactcaatacacgtggct

SEQ ID NO: 82171 - RNA, 21 nt, synthetic construct
  source 1..21: mol_type = other RNA
ctacactgaagggaattttac

SEQ ID NO: 82172 - RNA, 21 nt, synthetic construct
  source 1..21: mol_type = other RNA
ctacagaaaacccttcatcat

SEQ ID NO: 82173 - RNA, 21 nt, synthetic construct
  source 1..21: mol_type = other RNA
ctacagaatgttcaagtattt

SEQ ID NO: 82174 - RNA, 21 nt, synthetic construct
  source 1..21: mol_type = other RNA
ctacagacatgccacaccaca

SEQ ID NO: 82175 - RNA, 21 nt, synthetic construct
  source 1..21: mol_type = other RNA
ctacagactaatatgagttcc

SEQ ID NO: 82176 - RNA, 21 nt, synthetic construct
  source 1..21: mol_type = other RNA
ctacagactcaataaccacat

SEQ ID NO: 82177 - RNA, 21 nt, synthetic construct
  source 1..21: mol_type = other RNA
ctacagaggattttggattgc

SEQ ID NO: 82178 - RNA, 21 nt, synthetic construct
  source 1..21: mol_type = other RNA
ctacagattcaatgcaatact

SEQ ID NO: 82179 - RNA, 21 nt, synthetic construct
  source 1..21: mol_type = other RNA
ctacagcatattagctgtctg

SEQ ID NO: 82180 - RNA, 21 nt, synthetic construct
  source 1..21: mol_type = other RNA
ctacaggcaacaaaagaaaaa

SEQ ID NO: 82181 - RNA, 21 nt, synthetic construct
  source 1..21: mol_type = other RNA
ctacagggaaccgtaacttct

SEQ ID NO: 82182 - RNA, 21 nt, synthetic construct
  source 1..21: mol_type = other RNA
ctacaggggcattccctgtct

SEQ ID NO: 82183 - RNA, 21 nt, synthetic construct
  source 1..21: mol_type = other RNA
ctacaggtcggaaggaatgtg

SEQ ID NO: 82184 - RNA, 21 nt, synthetic construct
  source 1..21: mol_type = other RNA
ctacaggtgtgaaccacgcat

SEQ ID NO: 82185 - RNA, 21 nt, synthetic construct
  source 1..21: mol_type = other RNA
ctacagtaatcaaacagtgtg

SEQ ID NO: 82186 - RNA, 21 nt, synthetic construct
  source 1..21: mol_type = other RNA
ctacagtattacacagaaagc

SEQ ID NO: 82187 - RNA, 21 nt, synthetic construct
  source 1..21: mol_type = other RNA
ctacagtcacacaccactaca

SEQ ID NO: 82188 - RNA, 21 nt, synthetic construct
  source 1..21: mol_type = other RNA
ctacagtggttccatttgttt

SEQ ID NO: 82189 - RNA, 21 nt, synthetic construct
  source 1..21: mol_type = other RNA
ctacagtgtttagggacgaat

SEQ ID NO: 82190 - RNA, 21 nt, synthetic construct
  source 1..21: mol_type = other RNA
ctacagttaacaatactgcat

SEQ ID NO: 82191 - RNA, 21 nt, synthetic construct
  source 1..21: mol_type = other RNA
ctacataacttcccagacagg

SEQ ID NO: 82192 - RNA, 21 nt, synthetic construct
  source 1..21: mol_type = other RNA
ctacatactgcactctcaaaa

SEQ ID NO: 82193 - RNA, 21 nt, synthetic construct
  source 1..21: mol_type = other RNA
ctacatagtccactttccatc

SEQ ID NO: 82194 - RNA, 21 nt, synthetic construct
  source 1..21: mol_type = other RNA
ctacatatggcaattccataa

SEQ ID NO: 82195 - RNA, 21 nt, synthetic construct
  source 1..21: mol_type = other RNA
ctacatcacagacagggaatg

SEQ ID NO: 82196 - RNA, 21 nt, synthetic construct
  source 1..21: mol_type = other RNA
ctacatccccccacccctgct

SEQ ID NO: 82197 - RNA, 21 nt, synthetic construct
  source 1..21: mol_type = other RNA
ctacatctggatcctgtctca

SEQ ID NO: 82198 - RNA, 21 nt, synthetic construct
  source 1..21: mol_type = other RNA
ctacatgtaaaaactgtttgg

SEQ ID NO: 82199 - RNA, 21 nt, synthetic construct
  source 1..21: mol_type = other RNA
ctacatgtacgccaattttca

SEQ ID NO: 82200 - RNA, 21 nt, synthetic construct
  source 1..21: mol_type = other RNA
ctacattaatctcatccacaa

SEQ ID NO: 82201 - RNA, 21 nt, synthetic construct
  source 1..21: mol_type = other RNA
ctacattgccttcaagttgct

SEQ ID NO: 82202 - RNA, 21 nt, synthetic construct
  source 1..21: mol_type = other RNA
ctaccaaaaaactacgagtat

SEQ ID NO: 82203 - RNA, 21 nt, synthetic construct
  source 1..21: mol_type = other RNA
ctaccaaaatataaatacgtg

SEQ ID NO: 82204 - RNA, 21 nt, synthetic construct
  source 1..21: mol_type = other RNA
ctaccaaacattgaaggcaga

SEQ ID NO: 82205 - RNA, 21 nt, synthetic construct
  source 1..21: mol_type = other RNA
ctaccaattctccctgaaatt

SEQ ID NO: 82206 - RNA, 21 nt, synthetic construct
  source 1..21: mol_type = other RNA
ctaccaccactaatgtcacat

SEQ ID NO: 82207 - RNA, 21 nt, synthetic construct
  source 1..21: mol_type = other RNA
ctaccacccgtccaatttctt

SEQ ID NO: 82208 - RNA, 21 nt, synthetic construct
  source 1..21: mol_type = other RNA
ctaccactgaggtcaagaaat

SEQ ID NO: 82209 - RNA, 21 nt, synthetic construct
  source 1..21: mol_type = other RNA
ctaccatctctccaacagaag

SEQ ID NO: 82210 - RNA, 21 nt, synthetic construct
  source 1..21: mol_type = other RNA
ctaccatgttgttcttttcaa

SEQ ID NO: 82211 - RNA, 21 nt, synthetic construct
  source 1..21: mol_type = other RNA
ctaccatttattcctctcttg

SEQ ID NO: 82212 - RNA, 21 nt, synthetic construct
  source 1..21: mol_type = other RNA
ctacccaagcttaggtcagat

SEQ ID NO: 82213 - RNA, 21 nt, synthetic construct
  source 1..21: mol_type = other RNA
ctacccactattgaaagccct

SEQ ID NO: 82214 - RNA, 21 nt, synthetic construct
  source 1..21: mol_type = other RNA
ctacccagcactctgaatcac

SEQ ID NO: 82215 - RNA, 21 nt, synthetic construct
  source 1..21: mol_type = other RNA
ctaccctcgagtaaaaagaat

SEQ ID NO: 82216 - RNA, 21 nt, synthetic construct
  source 1..21: mol_type = other RNA
ctaccctgaggatataacgat

SEQ ID NO: 82217 - RNA, 21 nt, synthetic construct
  source 1..21: mol_type = other RNA
ctaccctgccttccttgggca

SEQ ID NO: 82218 - RNA, 21 nt, synthetic construct
  source 1..21: mol_type = other RNA
ctaccctttccaaattcaaag

SEQ ID NO: 82219 - RNA, 21 nt, synthetic construct
  source 1..21: mol_type = other RNA
ctaccctttcttgttagtagg

SEQ ID NO: 82220 - RNA, 21 nt, synthetic construct
  source 1..21: mol_type = other RNA
ctacctaaaaagggagtcagt

SEQ ID NO: 82221 - RNA, 21 nt, synthetic construct
  source 1..21: mol_type = other RNA
ctacctagaaaaacaccaaaa

SEQ ID NO: 82222 - RNA, 21 nt, synthetic construct
  source 1..21: mol_type = other RNA
ctacctagggtgtaaaaggct

SEQ ID NO: 82223 - RNA, 21 nt, synthetic construct
  source 1..21: mol_type = other RNA
ctacctatagaattcttcttc

SEQ ID NO: 82224 - RNA, 21 nt, synthetic construct
  source 1..21: mol_type = other RNA
ctacctcaaattgtgtgttct

SEQ ID NO: 82225 - RNA, 21 nt, synthetic construct
  source 1..21: mol_type = other RNA
ctacctcccttcacaaagccc

SEQ ID NO: 82226 - RNA, 21 nt, synthetic construct
  source 1..21: mol_type = other RNA
ctacctgacttcaaactatac

SEQ ID NO: 82227 - RNA, 21 nt, synthetic construct
  source 1..21: mol_type = other RNA
ctacctggagcctgaggacac

SEQ ID NO: 82228 - RNA, 21 nt, synthetic construct
  source 1..21: mol_type = other RNA
ctacctggcagtctaggaaaa

SEQ ID NO: 82229 - RNA, 21 nt, synthetic construct
  source 1..21: mol_type = other RNA
ctacctgtctttcccattacc

SEQ ID NO: 82230 - RNA, 21 nt, synthetic construct
  source 1..21: mol_type = other RNA
ctacctgtgtaacaaacctgc

SEQ ID NO: 82231 - RNA, 21 nt, synthetic construct
  source 1..21: mol_type = other RNA
ctacctgttgattgttgccat

SEQ ID NO: 82232 - RNA, 21 nt, synthetic construct
  source 1..21: mol_type = other RNA
ctaccttccaaagtatgcata

SEQ ID NO: 82233 - RNA, 21 nt, synthetic construct
  source 1..21: mol_type = other RNA
ctaccttgaaaatgcccttat

SEQ ID NO: 82234 - RNA, 21 nt, synthetic construct
  source 1..21: mol_type = other RNA
ctacctttggctactgtaaac

SEQ ID NO: 82235 - RNA, 21 nt, synthetic construct
  source 1..21: mol_type = other RNA
ctacgaagctacagtaatcaa

SEQ ID NO: 82236 - RNA, 21 nt, synthetic construct
  source 1..21: mol_type = other RNA
ctacgaatgaactcctatagt

SEQ ID NO: 82237 - RNA, 21 nt, synthetic construct
  source 1..21: mol_type = other RNA
ctacgagtatcatataaattg

SEQ ID NO: 82238 - RNA, 21 nt, synthetic construct
  source 1..21: mol_type = other RNA
ctacgcccggcccatgacatg

SEQ ID NO: 82239 - RNA, 21 nt, synthetic construct
  source 1..21: mol_type = other RNA
ctacgcctagctgacttttaa

SEQ ID NO: 82240 - RNA, 21 nt, synthetic construct
  source 1..21: mol_type = other RNA
ctacggacgcaggcaaacagc

SEQ ID NO: 82241 - RNA, 21 nt, synthetic construct
  source 1..21: mol_type = other RNA
ctacggaggatgaggggctga

SEQ ID NO: 82242 - RNA, 21 nt, synthetic construct
  source 1..21: mol_type = other RNA
ctactaaacaaatcagatttc

SEQ ID NO: 82243 - RNA, 21 nt, synthetic construct
  source 1..21: mol_type = other RNA
ctactaaacattaaggaagaa

SEQ ID NO: 82244 - RNA, 21 nt, synthetic construct
  source 1..21: mol_type = other RNA
ctactaacaagaaagggtagc

SEQ ID NO: 82245 - RNA, 21 nt, synthetic construct
  source 1..21: mol_type = other RNA
ctactaataaatgcataaacg

SEQ ID NO: 82246 - RNA, 21 nt, synthetic construct
  source 1..21: mol_type = other RNA
ctactagcaagctaataattt

SEQ ID NO: 82247 - RNA, 21 nt, synthetic construct
  source 1..21: mol_type = other RNA
ctactagccagtgattggata

SEQ ID NO: 82248 - RNA, 21 nt, synthetic construct
  source 1..21: mol_type = other RNA
ctactagtataagagaaggaa

SEQ ID NO: 82249 - RNA, 21 nt, synthetic construct
  source 1..21: mol_type = other RNA
ctactatgaatatactggaaa

SEQ ID NO: 82250 - RNA, 21 nt, synthetic construct
  source 1..21: mol_type = other RNA
ctactattccaggatcaaatc

SEQ ID NO: 82251 - RNA, 21 nt, synthetic construct
  source 1..21: mol_type = other RNA
ctactatttcgcaaagcaaca

SEQ ID NO: 82252 - RNA, 21 nt, synthetic construct
  source 1..21: mol_type = other RNA
ctactcactgaaaccctcacg

SEQ ID NO: 82253 - RNA, 21 nt, synthetic construct
  source 1..21: mol_type = other RNA
ctactcactgtactactgacc

SEQ ID NO: 82254 - RNA, 21 nt, synthetic construct
  source 1..21: mol_type = other RNA
ctactcagctgtcactctctt

SEQ ID NO: 82255 - RNA, 21 nt, synthetic construct
  source 1..21: mol_type = other RNA
ctactcaggagattaaggctg

SEQ ID NO: 82256 - RNA, 21 nt, synthetic construct
  source 1..21: mol_type = other RNA
ctactcagggggctgaggcag

SEQ ID NO: 82257 - RNA, 21 nt, synthetic construct
  source 1..21: mol_type = other RNA
ctactctgcctcagttgacat

SEQ ID NO: 82258 - RNA, 21 nt, synthetic construct
  source 1..21: mol_type = other RNA
ctactcttttgtttttggggg

SEQ ID NO: 82259 - RNA, 21 nt, synthetic construct
  source 1..21: mol_type = other RNA
ctactgacctgggagaaagac

SEQ ID NO: 82260 - RNA, 21 nt, synthetic construct
  source 1..21: mol_type = other RNA
ctactgactccctttttaggt

SEQ ID NO: 82261 - RNA, 21 nt, synthetic construct
  source 1..21: mol_type = other RNA
ctactgatagcgaaaggtacg

SEQ ID NO: 82262 - RNA, 21 nt, synthetic construct
  source 1..21: mol_type = other RNA
ctactgcaaatatccaatcac

SEQ ID NO: 82263 - RNA, 21 nt, synthetic construct
  source 1..21: mol_type = other RNA
ctactgcatgctaggggctgt

SEQ ID NO: 82264 - RNA, 21 nt, synthetic construct
  source 1..21: mol_type = other RNA
ctactgcattttttgccaaat

SEQ ID NO: 82265 - RNA, 21 nt, synthetic construct
  source 1..21: mol_type = other RNA
ctactgctctgtcctgtcagt

SEQ ID NO: 82266 - RNA, 21 nt, synthetic construct
  source 1..21: mol_type = other RNA
ctactggggtcttagttctgc

SEQ ID NO: 82267 - RNA, 21 nt, synthetic construct
  source 1..21: mol_type = other RNA
ctactgtaaacaatgctgcta

SEQ ID NO: 82268 - RNA, 21 nt, synthetic construct
  source 1..21: mol_type = other RNA
ctactgtactgtttagcatct

SEQ ID NO: 82269 - RNA, 21 nt, synthetic construct
  source 1..21: mol_type = other RNA
ctactgtgaattcactaatgc

SEQ ID NO: 82270 - RNA, 21 nt, synthetic construct
  source 1..21: mol_type = other RNA
ctacttagcccctgctgccag

SEQ ID NO: 82271 - RNA, 21 nt, synthetic construct
  source 1..21: mol_type = other RNA
ctacttatcttttctagtttc

SEQ ID NO: 82272 - RNA, 21 nt, synthetic construct
  source 1..21: mol_type = other RNA
ctacttcgtgtgtggagtggg

SEQ ID NO: 82273 - RNA, 21 nt, synthetic construct
  source 1..21: mol_type = other RNA
ctacttgtcaggtgggcactg

SEQ ID NO: 82274 - RNA, 21 nt, synthetic construct
  source 1..21: mol_type = other RNA
ctactttaaatcagggccttt

SEQ ID NO: 82275 - RNA, 21 nt, synthetic construct
  source 1..21: mol_type = other RNA
ctactttcacataaggtatat

SEQ ID NO: 82276 - RNA, 21 nt, synthetic construct
  source 1..21: mol_type = other RNA
ctactttctaatcctttgcac

SEQ ID NO: 82277 - RNA, 21 nt, synthetic construct
  source 1..21: mol_type = other RNA
ctactttcttcaaccatactt

SEQ ID NO: 82278 - RNA, 21 nt, synthetic construct
  source 1..21: mol_type = other RNA
ctactttttgtcacacggaaa

SEQ ID NO: 82279 - RNA, 21 nt, synthetic construct
  source 1..21: mol_type = other RNA
ctagaaaaacaccaaaaaagc

SEQ ID NO: 82280 - RNA, 21 nt, synthetic construct
  source 1..21: mol_type = other RNA
ctagaaaaccgacagcagata

SEQ ID NO: 82281 - RNA, 21 nt, synthetic construct
  source 1..21: mol_type = other RNA
ctagaaaagataagtagaagg

SEQ ID NO: 82282 - RNA, 21 nt, synthetic construct
  source 1..21: mol_type = other RNA
ctagaaaatcatacattttcc

SEQ ID NO: 82283 - RNA, 21 nt, synthetic construct
  source 1..21: mol_type = other RNA
ctagaaacttcttctgttgga

SEQ ID NO: 82284 - RNA, 21 nt, synthetic construct
  source 1..21: mol_type = other RNA
ctagaaacttggattgtgtgt

SEQ ID NO: 82285 - RNA, 21 nt, synthetic construct
  source 1..21: mol_type = other RNA
ctagaaagataaatccaacga

SEQ ID NO: 82286 - RNA, 21 nt, synthetic construct
  source 1..21: mol_type = other RNA
ctagaaaggaattgtaatcac

SEQ ID NO: 82287 - RNA, 21 nt, synthetic construct
  source 1..21: mol_type = other RNA
ctagaaaggagggactgaaac

SEQ ID NO: 82288 - RNA, 21 nt, synthetic construct
  source 1..21: mol_type = other RNA
ctagaaatcatacacgagtgt

SEQ ID NO: 82289 - RNA, 21 nt, synthetic construct
  source 1..21: mol_type = other RNA
ctagaacagaataaaaagtga

SEQ ID NO: 82290 - RNA, 21 nt, synthetic construct
  source 1..21: mol_type = other RNA
ctagaactagaatactccacc

SEQ ID NO: 82291 - RNA, 21 nt, synthetic construct
  source 1..21: mol_type = other RNA
ctagaactgtgttacattgcc

SEQ ID NO: 82292 - RNA, 21 nt, synthetic construct
  source 1..21: mol_type = other RNA
ctagaacttatgcatcttgca

SEQ ID NO: 82293 - RNA, 21 nt, synthetic construct
  source 1..21: mol_type = other RNA
ctagaagaaatgggtaaattt

SEQ ID NO: 82294 - RNA, 21 nt, synthetic construct
  source 1..21: mol_type = other RNA
ctagaagacctcaaattctga

SEQ ID NO: 82295 - RNA, 21 nt, synthetic construct
  source 1..21: mol_type = other RNA
ctagaagcactttttaccaag

SEQ ID NO: 82296 - RNA, 21 nt, synthetic construct
  source 1..21: mol_type = other RNA
ctagaagcatctgatacactt

SEQ ID NO: 82297 - RNA, 21 nt, synthetic construct
  source 1..21: mol_type = other RNA
ctagaagtcccagttcaaggt

SEQ ID NO: 82298 - RNA, 21 nt, synthetic construct
  source 1..21: mol_type = other RNA
ctagaatactccaccagcatc

SEQ ID NO: 82299 - RNA, 21 nt, synthetic construct
  source 1..21: mol_type = other RNA
ctagaatgcatccctcctctg

SEQ ID NO: 82300 - RNA, 21 nt, synthetic construct
  source 1..21: mol_type = other RNA
ctagaatgtgacttcgtcaag

SEQ ID NO: 82301 - RNA, 21 nt, synthetic construct
  source 1..21: mol_type = other RNA
ctagaattgactttaccctgc

SEQ ID NO: 82302 - RNA, 21 nt, synthetic construct
  source 1..21: mol_type = other RNA
ctagacacatttttgacagcc

SEQ ID NO: 82303 - RNA, 21 nt, synthetic construct
  source 1..21: mol_type = other RNA
ctagacctcaaattaatcagt

SEQ ID NO: 82304 - RNA, 21 nt, synthetic construct
  source 1..21: mol_type = other RNA
ctagacctttcttaggtttct

SEQ ID NO: 82305 - RNA, 21 nt, synthetic construct
  source 1..21: mol_type = other RNA
ctagacggaaaaacattctac

SEQ ID NO: 82306 - RNA, 21 nt, synthetic construct
  source 1..21: mol_type = other RNA
ctagactaagaaaaacagaag

SEQ ID NO: 82307 - RNA, 21 nt, synthetic construct
  source 1..21: mol_type = other RNA
ctagactgccaggtagggagg

SEQ ID NO: 82308 - RNA, 21 nt, synthetic construct
  source 1..21: mol_type = other RNA
ctagactgcctgaggtctcaa

SEQ ID NO: 82309 - RNA, 21 nt, synthetic construct
  source 1..21: mol_type = other RNA
ctagagaaagcatcagagctt

SEQ ID NO: 82310 - RNA, 21 nt, synthetic construct
  source 1..21: mol_type = other RNA
ctagagatgggaaagtattcc

SEQ ID NO: 82311 - RNA, 21 nt, synthetic construct
  source 1..21: mol_type = other RNA
ctagagattaggcagaaccac

SEQ ID NO: 82312 - RNA, 21 nt, synthetic construct
  source 1..21: mol_type = other RNA
ctagagatttgctgtataaca

SEQ ID NO: 82313 - RNA, 21 nt, synthetic construct
  source 1..21: mol_type = other RNA
ctagagccaggaagtcagcaa

SEQ ID NO: 82314 - RNA, 21 nt, synthetic construct
  source 1..21: mol_type = other RNA
ctagagctcacacgagaagga

SEQ ID NO: 82315 - RNA, 21 nt, synthetic construct
  source 1..21: mol_type = other RNA
ctagagctgctgtaacaaaga

SEQ ID NO: 82316 - RNA, 21 nt, synthetic construct
  source 1..21: mol_type = other RNA
ctagagcttcaacctcctggg

SEQ ID NO: 82317 - RNA, 21 nt, synthetic construct
  source 1..21: mol_type = other RNA
ctagagggtaagaccaaaatg

SEQ ID NO: 82318 - RNA, 21 nt, synthetic construct
  source 1..21: mol_type = other RNA
ctagagtattacctatgaata

SEQ ID NO: 82319 - RNA, 21 nt, synthetic construct
  source 1..21: mol_type = other RNA
ctagataagaaaatgtgacat

SEQ ID NO: 82320 - RNA, 21 nt, synthetic construct
  source 1..21: mol_type = other RNA
ctagatcaagcccttccttgc

SEQ ID NO: 82321 - RNA, 21 nt, synthetic construct
  source 1..21: mol_type = other RNA
ctagatctcttttcctttaac

SEQ ID NO: 82322 - RNA, 21 nt, synthetic construct
  source 1..21: mol_type = other RNA
ctagatgattcgcattgctaa

SEQ ID NO: 82323 - RNA, 21 nt, synthetic construct
  source 1..21: mol_type = other RNA
ctagatgcctcgaaggcctgc

SEQ ID NO: 82324 - RNA, 21 nt, synthetic construct
  source 1..21: mol_type = other RNA
ctagatgctaaacagtacagt

SEQ ID NO: 82325 - RNA, 21 nt, synthetic construct
  source 1..21: mol_type = other RNA
ctagattaccttgaagtttaa

SEQ ID NO: 82326 - RNA, 21 nt, synthetic construct
  source 1..21: mol_type = other RNA
ctagattcatatgctttgagc

SEQ ID NO: 82327 - RNA, 21 nt, synthetic construct
  source 1..21: mol_type = other RNA
ctagattccctctggccttct

SEQ ID NO: 82328 - RNA, 21 nt, synthetic construct
  source 1..21: mol_type = other RNA
ctagattgaccttctacttat

SEQ ID NO: 82329 - RNA, 21 nt, synthetic construct
  source 1..21: mol_type = other RNA
ctagatttcaatctggaatgc

SEQ ID NO: 82330 - RNA, 21 nt, synthetic construct
  source 1..21: mol_type = other RNA
ctagcaaacaaacacactggg

SEQ ID NO: 82331 - RNA, 21 nt, synthetic construct
  source 1..21: mol_type = other RNA
ctagcaaactactgatagcga

SEQ ID NO: 82332 - RNA, 21 nt, synthetic construct
  source 1..21: mol_type = other RNA
ctagcaaactgaatcagacaa

SEQ ID NO: 82333 - RNA, 21 nt, synthetic construct
  source 1..21: mol_type = other RNA
ctagcaagctaataatttatc

SEQ ID NO: 82334 - RNA, 21 nt, synthetic construct
  source 1..21: mol_type = other RNA
ctagcaatccaggatcttact

SEQ ID NO: 82335 - RNA, 21 nt, synthetic construct
  source 1..21: mol_type = other RNA
ctagcacagaaccatgtaaca

SEQ ID NO: 82336 - RNA, 21 nt, synthetic construct
  source 1..21: mol_type = other RNA
ctagcacagaggcaacagtca

SEQ ID NO: 82337 - RNA, 21 nt, synthetic construct
  source 1..21: mol_type = other RNA
ctagcatgcagtagctcatca

SEQ ID NO: 82338 - RNA, 21 nt, synthetic construct
  source 1..21: mol_type = other RNA
ctagccaaagcaagccttggc

SEQ ID NO: 82339 - RNA, 21 nt, synthetic construct
  source 1..21: mol_type = other RNA
ctagccaagggtttgtcaatt

SEQ ID NO: 82340 - RNA, 21 nt, synthetic construct
  source 1..21: mol_type = other RNA
ctagccactgggtcttatagg

SEQ ID NO: 82341 - RNA, 21 nt, synthetic construct
  source 1..21: mol_type = other RNA
ctagccacttcctattagaag

SEQ ID NO: 82342 - RNA, 21 nt, synthetic construct
  source 1..21: mol_type = other RNA
ctagccagtgattggatattt

SEQ ID NO: 82343 - RNA, 21 nt, synthetic construct
  source 1..21: mol_type = other RNA
ctagccataatccttagatta

SEQ ID NO: 82344 - RNA, 21 nt, synthetic construct
  source 1..21: mol_type = other RNA
ctagcccagcacttccatttt

SEQ ID NO: 82345 - RNA, 21 nt, synthetic construct
  source 1..21: mol_type = other RNA
ctagcccagcttccgggactt

SEQ ID NO: 82346 - RNA, 21 nt, synthetic construct
  source 1..21: mol_type = other RNA
ctagccccaaatacctctgaa

SEQ ID NO: 82347 - RNA, 21 nt, synthetic construct
  source 1..21: mol_type = other RNA
ctagcctccagaaaaccagaa

SEQ ID NO: 82348 - RNA, 21 nt, synthetic construct
  source 1..21: mol_type = other RNA
ctagcctctctgggcttcact

SEQ ID NO: 82349 - RNA, 21 nt, synthetic construct
  source 1..21: mol_type = other RNA
ctagccttcttggagtaaacc

SEQ ID NO: 82350 - RNA, 21 nt, synthetic construct
  source 1..21: mol_type = other RNA
ctagccttgtactgtgtggct

SEQ ID NO: 82351 - RNA, 21 nt, synthetic construct
  source 1..21: mol_type = other RNA
ctagctacttgggaggctgag

SEQ ID NO: 82352 - RNA, 21 nt, synthetic construct
  source 1..21: mol_type = other RNA
ctagctattagagaaatgcaa

SEQ ID NO: 82353 - RNA, 21 nt, synthetic construct
  source 1..21: mol_type = other RNA
ctagctattgtcttttctatc

SEQ ID NO: 82354 - RNA, 21 nt, synthetic construct
  source 1..21: mol_type = other RNA
ctagctccccattccctgtct

SEQ ID NO: 82355 - RNA, 21 nt, synthetic construct
  source 1..21: mol_type = other RNA
ctagctcctgggaaaaggatt

SEQ ID NO: 82356 - RNA, 21 nt, synthetic construct
  source 1..21: mol_type = other RNA
ctagctgacccactggtttca

SEQ ID NO: 82357 - RNA, 21 nt, synthetic construct
  source 1..21: mol_type = other RNA
ctagctgacttttaaaatatg

SEQ ID NO: 82358 - RNA, 21 nt, synthetic construct
  source 1..21: mol_type = other RNA
ctagctgttttcatgcgacat

SEQ ID NO: 82359 - RNA, 21 nt, synthetic construct
  source 1..21: mol_type = other RNA
ctagctttcagcactgctatt

SEQ ID NO: 82360 - RNA, 21 nt, synthetic construct
  source 1..21: mol_type = other RNA
ctaggaaaagacttgaggttt

SEQ ID NO: 82361 - RNA, 21 nt, synthetic construct
  source 1..21: mol_type = other RNA
ctaggaaacactgctcagaag

SEQ ID NO: 82362 - RNA, 21 nt, synthetic construct
  source 1..21: mol_type = other RNA
ctaggaaccatattagagtga

SEQ ID NO: 82363 - RNA, 21 nt, synthetic construct
  source 1..21: mol_type = other RNA
ctaggaccataggcacgcgcc

SEQ ID NO: 82364 - RNA, 21 nt, synthetic construct
  source 1..21: mol_type = other RNA
ctaggaggtctaagagataac

SEQ ID NO: 82365 - RNA, 21 nt, synthetic construct
  source 1..21: mol_type = other RNA
ctaggagtacagtgcatacca

SEQ ID NO: 82366 - RNA, 21 nt, synthetic construct
  source 1..21: mol_type = other RNA
ctaggatttcagtaaatgaaa

SEQ ID NO: 82367 - RNA, 21 nt, synthetic construct
  source 1..21: mol_type = other RNA
ctaggcaagagagcaagactc

SEQ ID NO: 82368 - RNA, 21 nt, synthetic construct
  source 1..21: mol_type = other RNA
ctaggcatataaactggaagg

SEQ ID NO: 82369 - RNA, 21 nt, synthetic construct
  source 1..21: mol_type = other RNA
ctaggcatataataagcagaa

SEQ ID NO: 82370 - RNA, 21 nt, synthetic construct
  source 1..21: mol_type = other RNA
ctaggcatctatttccccatt

SEQ ID NO: 82371 - RNA, 21 nt, synthetic construct
  source 1..21: mol_type = other RNA
ctaggccctaaccccagagat

SEQ ID NO: 82372 - RNA, 21 nt, synthetic construct
  source 1..21: mol_type = other RNA
ctaggcctattttaggctctg

SEQ ID NO: 82373 - RNA, 21 nt, synthetic construct
  source 1..21: mol_type = other RNA
ctaggcgaaatatctccctca

SEQ ID NO: 82374 - RNA, 21 nt, synthetic construct
  source 1..21: mol_type = other RNA
ctaggcgtagtatctcatgct

SEQ ID NO: 82375 - RNA, 21 nt, synthetic construct
  source 1..21: mol_type = other RNA
ctaggctaatgtgtgttccag

SEQ ID NO: 82376 - RNA, 21 nt, synthetic construct
  source 1..21: mol_type = other RNA
ctaggctcctgagaaccggaa

SEQ ID NO: 82377 - RNA, 21 nt, synthetic construct
  source 1..21: mol_type = other RNA
ctaggctgtcccaaatgcacc

SEQ ID NO: 82378 - RNA, 21 nt, synthetic construct
  source 1..21: mol_type = other RNA
ctaggcttaaaattcttccag

SEQ ID NO: 82379 - RNA, 21 nt, synthetic construct
  source 1..21: mol_type = other RNA
ctagggaagcagttgatgcaa

SEQ ID NO: 82380 - RNA, 21 nt, synthetic construct
  source 1..21: mol_type = other RNA
ctagggactggcctcggccaa

SEQ ID NO: 82381 - RNA, 21 nt, synthetic construct
  source 1..21: mol_type = other RNA
ctaggggactaacagggtcta

SEQ ID NO: 82382 - RNA, 21 nt, synthetic construct
  source 1..21: mol_type = other RNA
ctaggggctgttcccagataa

SEQ ID NO: 82383 - RNA, 21 nt, synthetic construct
  source 1..21: mol_type = other RNA
ctagggtgtaaaaggctaatt

SEQ ID NO: 82384 - RNA, 21 nt, synthetic construct
  source 1..21: mol_type = other RNA
ctaggtagggttggggtatgt

SEQ ID NO: 82385 - RNA, 21 nt, synthetic construct
  source 1..21: mol_type = other RNA
ctaggtagtttctttgaactt

SEQ ID NO: 82386 - RNA, 21 nt, synthetic construct
  source 1..21: mol_type = other RNA
ctaggtatcacagtgaggacg

SEQ ID NO: 82387 - RNA, 21 nt, synthetic construct
  source 1..21: mol_type = other RNA
ctaggtatttgaaaaatgtca

SEQ ID NO: 82388 - RNA, 21 nt, synthetic construct
  source 1..21: mol_type = other RNA
ctaggtgacctgccagagttg

SEQ ID NO: 82389 - RNA, 21 nt, synthetic construct
  source 1..21: mol_type = other RNA
ctaggtgagtgagatgggaag

SEQ ID NO: 82390 - RNA, 21 nt, synthetic construct
  source 1..21: mol_type = other RNA
ctaggtgtgataactgatatg

SEQ ID NO: 82391 - RNA, 21 nt, synthetic construct
  source 1..21: mol_type = other RNA
ctaggttatctgttttcttac

SEQ ID NO: 82392 - RNA, 21 nt, synthetic construct
  source 1..21: mol_type = other RNA
ctagtaacttggtcgaaaacc

SEQ ID NO: 82393 - RNA, 21 nt, synthetic construct
  source 1..21: mol_type = other RNA
ctagtaagtaaaatcggaaca

SEQ ID NO: 82394 - RNA, 21 nt, synthetic construct
  source 1..21: mol_type = other RNA
ctagtacactgttgatttaga

SEQ ID NO: 82395 - RNA, 21 nt, synthetic construct
  source 1..21: mol_type = other RNA
ctagtacgtaacctaaagttg

SEQ ID NO: 82396 - RNA, 21 nt, synthetic construct
  source 1..21: mol_type = other RNA
ctagtacgtgcagagcagggg

SEQ ID NO: 82397 - RNA, 21 nt, synthetic construct
  source 1..21: mol_type = other RNA
ctagtagaaagcaggttcatt

SEQ ID NO: 82398 - RNA, 21 nt, synthetic construct
  source 1..21: mol_type = other RNA
ctagtagcagaatccccaaat

SEQ ID NO: 82399 - RNA, 21 nt, synthetic construct
  source 1..21: mol_type = other RNA
ctagtaggatgaattacaaat

SEQ ID NO: 82400 - RNA, 21 nt, synthetic construct
  source 1..21: mol_type = other RNA
ctagtaggcaacatccctatg

SEQ ID NO: 82401 - RNA, 21 nt, synthetic construct
  source 1..21: mol_type = other RNA
ctagtataagagaaggaagca

SEQ ID NO: 82402 - RNA, 21 nt, synthetic construct
  source 1..21: mol_type = other RNA
ctagtatcaacctgcaggtat

SEQ ID NO: 82403 - RNA, 21 nt, synthetic construct
  source 1..21: mol_type = other RNA
ctagtattttgttgacatcct

SEQ ID NO: 82404 - RNA, 21 nt, synthetic construct
  source 1..21: mol_type = other RNA
ctagtcacatttgctttacta

SEQ ID NO: 82405 - RNA, 21 nt, synthetic construct
  source 1..21: mol_type = other RNA
ctagtcaccctacagactcaa

SEQ ID NO: 82406 - RNA, 21 nt, synthetic construct
  source 1..21: mol_type = other RNA
ctagtcagcacactcttaata

SEQ ID NO: 82407 - RNA, 21 nt, synthetic construct
  source 1..21: mol_type = other RNA
ctagtcagtatatttactgct

SEQ ID NO: 82408 - RNA, 21 nt, synthetic construct
  source 1..21: mol_type = other RNA
ctagtcatccactgcacagta

SEQ ID NO: 82409 - RNA, 21 nt, synthetic construct
  source 1..21: mol_type = other RNA
ctagtccatgaagaaaacact

SEQ ID NO: 82410 - RNA, 21 nt, synthetic construct
  source 1..21: mol_type = other RNA
ctagtctccatacaaggagac

SEQ ID NO: 82411 - RNA, 21 nt, synthetic construct
  source 1..21: mol_type = other RNA
ctagtgaagtcaatttcagat

SEQ ID NO: 82412 - RNA, 21 nt, synthetic construct
  source 1..21: mol_type = other RNA
ctagtgaagtcccatcttcca

SEQ ID NO: 82413 - RNA, 21 nt, synthetic construct
  source 1..21: mol_type = other RNA
ctagtgaatgagaccaaatgc

SEQ ID NO: 82414 - RNA, 21 nt, synthetic construct
  source 1..21: mol_type = other RNA
ctagtgatgggagatggacac

SEQ ID NO: 82415 - RNA, 21 nt, synthetic construct
  source 1..21: mol_type = other RNA
ctagtggaagaatcaggtctc

SEQ ID NO: 82416 - RNA, 21 nt, synthetic construct
  source 1..21: mol_type = other RNA
ctagtggatgctggggacccc

SEQ ID NO: 82417 - RNA, 21 nt, synthetic construct
  source 1..21: mol_type = other RNA
ctagtggctcatacttgcttt

SEQ ID NO: 82418 - RNA, 21 nt, synthetic construct
  source 1..21: mol_type = other RNA
ctagtgggatcaaaccatgtt

SEQ ID NO: 82419 - RNA, 21 nt, synthetic construct
  source 1..21: mol_type = other RNA
ctagtgggtcgggtgtcagaa

SEQ ID NO: 82420 - RNA, 21 nt, synthetic construct
  source 1..21: mol_type = other RNA
ctagtggtaactagatgcctc

SEQ ID NO: 82421 - RNA, 21 nt, synthetic construct
  source 1..21: mol_type = other RNA
ctagtggtgcttaattcaaac

SEQ ID NO: 82422 - RNA, 21 nt, synthetic construct
  source 1..21: mol_type = other RNA
ctagtgtcctcaggctccagg

SEQ ID NO: 82423 - RNA, 21 nt, synthetic construct
  source 1..21: mol_type = other RNA
ctagtgtctcagcctcccaag

SEQ ID NO: 82424 - RNA, 21 nt, synthetic construct
  source 1..21: mol_type = other RNA
ctagtgtctccataccccctg

SEQ ID NO: 82425 - RNA, 21 nt, synthetic construct
  source 1..21: mol_type = other RNA
ctagtgtcttagtctgacttc

SEQ ID NO: 82426 - RNA, 21 nt, synthetic construct
  source 1..21: mol_type = other RNA
ctagtgtgaatgaggagtgaa

SEQ ID NO: 82427 - RNA, 21 nt, synthetic construct
  source 1..21: mol_type = other RNA
ctagtgtgcatgtgttgtgca

SEQ ID NO: 82428 - RNA, 21 nt, synthetic construct
  source 1..21: mol_type = other RNA
ctagtgtgtctgactacactg

SEQ ID NO: 82429 - RNA, 21 nt, synthetic construct
  source 1..21: mol_type = other RNA
ctagtgtgttgactgacataa

SEQ ID NO: 82430 - RNA, 21 nt, synthetic construct
  source 1..21: mol_type = other RNA
ctagttaataaaggtgctaat

SEQ ID NO: 82431 - RNA, 21 nt, synthetic construct
  source 1..21: mol_type = other RNA
ctagttaccactagcaaacta

SEQ ID NO: 82432 - RNA, 21 nt, synthetic construct
  source 1..21: mol_type = other RNA
ctagttagtttgttgacccaa

SEQ ID NO: 82433 - RNA, 21 nt, synthetic construct
  source 1..21: mol_type = other RNA
ctagttctaataaacgcggaa

SEQ ID NO: 82434 - RNA, 21 nt, synthetic construct
  source 1..21: mol_type = other RNA
ctagttctagctctgtctttt

SEQ ID NO: 82435 - RNA, 21 nt, synthetic construct
  source 1..21: mol_type = other RNA
ctagttgcacggtgaagaacc

SEQ ID NO: 82436 - RNA, 21 nt, synthetic construct
  source 1..21: mol_type = other RNA
ctagttgtgctacctcaaatt

SEQ ID NO: 82437 - RNA, 21 nt, synthetic construct
  source 1..21: mol_type = other RNA
ctagtttagtgcagtatcttg

SEQ ID NO: 82438 - RNA, 21 nt, synthetic construct
  source 1..21: mol_type = other RNA
ctagtttctttttgttttctc

SEQ ID NO: 82439 - RNA, 21 nt, synthetic construct
  source 1..21: mol_type = other RNA
ctagtttgaggtgtacaatta

SEQ ID NO: 82440 - RNA, 21 nt, synthetic construct
  source 1..21: mol_type = other RNA
ctagttttccaatccgggaac

SEQ ID NO: 82441 - RNA, 21 nt, synthetic construct
  source 1..21: mol_type = other RNA
ctagttttccagtatattcat

SEQ ID NO: 82442 - RNA, 21 nt, synthetic construct
  source 1..21: mol_type = other RNA
ctataaaactcttagcttaga

SEQ ID NO: 82443 - RNA, 21 nt, synthetic construct
  source 1..21: mol_type = other RNA
ctataaacttccctctcagtg

SEQ ID NO: 82444 - RNA, 21 nt, synthetic construct
  source 1..21: mol_type = other RNA
ctataaagaacatgattgggt

SEQ ID NO: 82445 - RNA, 21 nt, synthetic construct
  source 1..21: mol_type = other RNA
ctataacagatggaactctat

SEQ ID NO: 82446 - RNA, 21 nt, synthetic construct
  source 1..21: mol_type = other RNA
ctataaccacgagtaatggat

SEQ ID NO: 82447 - RNA, 21 nt, synthetic construct
  source 1..21: mol_type = other RNA
ctataagacccagtggctagt

SEQ ID NO: 82448 - RNA, 21 nt, synthetic construct
  source 1..21: mol_type = other RNA
ctataagccaatatccctgat

SEQ ID NO: 82449 - RNA, 21 nt, synthetic construct
  source 1..21: mol_type = other RNA
ctataatccagatggacaaat

SEQ ID NO: 82450 - RNA, 21 nt, synthetic construct
  source 1..21: mol_type = other RNA
ctataattcaattttcatggg

SEQ ID NO: 82451 - RNA, 21 nt, synthetic construct
  source 1..21: mol_type = other RNA
ctataattctgccttcaatgt

SEQ ID NO: 82452 - RNA, 21 nt, synthetic construct
  source 1..21: mol_type = other RNA
ctatacaaccggaaaatgctt

SEQ ID NO: 82453 - RNA, 21 nt, synthetic construct
  source 1..21: mol_type = other RNA
ctatacacgttacaaaatatg

SEQ ID NO: 82454 - RNA, 21 nt, synthetic construct
  source 1..21: mol_type = other RNA
ctatactgtaaccctgtttcc

SEQ ID NO: 82455 - RNA, 21 nt, synthetic construct
  source 1..21: mol_type = other RNA
ctatacttcaatgctacagta

SEQ ID NO: 82456 - RNA, 21 nt, synthetic construct
  source 1..21: mol_type = other RNA
ctatacttcatctttcctgat

SEQ ID NO: 82457 - RNA, 21 nt, synthetic construct
  source 1..21: mol_type = other RNA
ctatagaaaatagtatgaagg

SEQ ID NO: 82458 - RNA, 21 nt, synthetic construct
  source 1..21: mol_type = other RNA
ctatagaattcttcttctgtt

SEQ ID NO: 82459 - RNA, 21 nt, synthetic construct
  source 1..21: mol_type = other RNA
ctatagacagcatccccagaa

SEQ ID NO: 82460 - RNA, 21 nt, synthetic construct
  source 1..21: mol_type = other RNA
ctatagacccaaagcaaaagc

SEQ ID NO: 82461 - RNA, 21 nt, synthetic construct
  source 1..21: mol_type = other RNA
ctatagctgagaagtaacatt

SEQ ID NO: 82462 - RNA, 21 nt, synthetic construct
  source 1..21: mol_type = other RNA
ctatagcttctgagctgttaa

SEQ ID NO: 82463 - RNA, 21 nt, synthetic construct
  source 1..21: mol_type = other RNA
ctataggagttcattcgtagc

SEQ ID NO: 82464 - RNA, 21 nt, synthetic construct
  source 1..21: mol_type = other RNA
ctataggcaatgagtctgaca

SEQ ID NO: 82465 - RNA, 21 nt, synthetic construct
  source 1..21: mol_type = other RNA
ctataggtagtacatattcat

SEQ ID NO: 82466 - RNA, 21 nt, synthetic construct
  source 1..21: mol_type = other RNA
ctatagtcattccgctaaaca

SEQ ID NO: 82467 - RNA, 21 nt, synthetic construct
  source 1..21: mol_type = other RNA
ctatagtggctgcaccatttt

SEQ ID NO: 82468 - RNA, 21 nt, synthetic construct
  source 1..21: mol_type = other RNA
ctatagttaagtctgaaagct

SEQ ID NO: 82469 - RNA, 21 nt, synthetic construct
  source 1..21: mol_type = other RNA
ctatagtttaattgggggaaa

SEQ ID NO: 82470 - RNA, 21 nt, synthetic construct
  source 1..21: mol_type = other RNA
ctatatcccaaattggcattt

SEQ ID NO: 82471 - RNA, 21 nt, synthetic construct
  source 1..21: mol_type = other RNA
ctatatgatccagcagtttca

SEQ ID NO: 82472 - RNA, 21 nt, synthetic construct
  source 1..21: mol_type = other RNA
ctatattgtcaatggggaact

SEQ ID NO: 82473 - RNA, 21 nt, synthetic construct
  source 1..21: mol_type = other RNA
ctatcaaaacacttctgtgat

SEQ ID NO: 82474 - RNA, 21 nt, synthetic construct
  source 1..21: mol_type = other RNA
ctatcaatctcacacctgggt

SEQ ID NO: 82475 - RNA, 21 nt, synthetic construct
  source 1..21: mol_type = other RNA
ctatcacgattctgacccaga

SEQ ID NO: 82476 - RNA, 21 nt, synthetic construct
  source 1..21: mol_type = other RNA
ctatcagaagcacaccaaggt

SEQ ID NO: 82477 - RNA, 21 nt, synthetic construct
  source 1..21: mol_type = other RNA
ctatcagagcatgtcccctgg

SEQ ID NO: 82478 - RNA, 21 nt, synthetic construct
  source 1..21: mol_type = other RNA
ctatcaggccttccacctgct

SEQ ID NO: 82479 - RNA, 21 nt, synthetic construct
  source 1..21: mol_type = other RNA
ctatcagggctgaaaaacacc

SEQ ID NO: 82480 - RNA, 21 nt, synthetic construct
  source 1..21: mol_type = other RNA
ctatcagtagtttgctagtgg

SEQ ID NO: 82481 - RNA, 21 nt, synthetic construct
  source 1..21: mol_type = other RNA
ctatcatcaagacagagctcc

SEQ ID NO: 82482 - RNA, 21 nt, synthetic construct
  source 1..21: mol_type = other RNA
ctatcattgcaccactgcact

SEQ ID NO: 82483 - RNA, 21 nt, synthetic construct
  source 1..21: mol_type = other RNA
ctatccaacatgccagctttg

SEQ ID NO: 82484 - RNA, 21 nt, synthetic construct
  source 1..21: mol_type = other RNA
ctatccacatttggttttact

SEQ ID NO: 82485 - RNA, 21 nt, synthetic construct
  source 1..21: mol_type = other RNA
ctatccaccactccaccttag

SEQ ID NO: 82486 - RNA, 21 nt, synthetic construct
  source 1..21: mol_type = other RNA
ctatccagaagagaatggctg

SEQ ID NO: 82487 - RNA, 21 nt, synthetic construct
  source 1..21: mol_type = other RNA
ctatccagtctctgcaacatt

SEQ ID NO: 82488 - RNA, 21 nt, synthetic construct
  source 1..21: mol_type = other RNA
ctatccagtgacacctgaggg

SEQ ID NO: 82489 - RNA, 21 nt, synthetic construct
  source 1..21: mol_type = other RNA
ctatcctaatgggcgtggagc

SEQ ID NO: 82490 - RNA, 21 nt, synthetic construct
  source 1..21: mol_type = other RNA
ctatcctatgtggggaatgct

SEQ ID NO: 82491 - RNA, 21 nt, synthetic construct
  source 1..21: mol_type = other RNA
ctatcgttatatcctcagggt

SEQ ID NO: 82492 - RNA, 21 nt, synthetic construct
  source 1..21: mol_type = other RNA
ctatctaagcctactgctctg

SEQ ID NO: 82493 - RNA, 21 nt, synthetic construct
  source 1..21: mol_type = other RNA
ctatctaataaaatagcagga

SEQ ID NO: 82494 - RNA, 21 nt, synthetic construct
  source 1..21: mol_type = other RNA
ctatctattaacagaagggta

SEQ ID NO: 82495 - RNA, 21 nt, synthetic construct
  source 1..21: mol_type = other RNA
ctatctctcagatctgagttt

SEQ ID NO: 82496 - RNA, 21 nt, synthetic construct
  source 1..21: mol_type = other RNA
ctatctcttcctcctctggac

SEQ ID NO: 82497 - RNA, 21 nt, synthetic construct
  source 1..21: mol_type = other RNA
ctatctgaacattttagctgg

SEQ ID NO: 82498 - RNA, 21 nt, synthetic construct
  source 1..21: mol_type = other RNA
ctatctgaactttcgaagtgg

SEQ ID NO: 82499 - RNA, 21 nt, synthetic construct
  source 1..21: mol_type = other RNA
ctatcttccctaaagagaatc

SEQ ID NO: 82500 - RNA, 21 nt, synthetic construct
  source 1..21: mol_type = other RNA
ctatctttactttcagctcaa

SEQ ID NO: 82501 - RNA, 21 nt, synthetic construct
  source 1..21: mol_type = other RNA
ctatctttgggaaaatctctg

SEQ ID NO: 82502 - RNA, 21 nt, synthetic construct
  source 1..21: mol_type = other RNA
ctatgaaaagcctcaaacgaa

SEQ ID NO: 82503 - RNA, 21 nt, synthetic construct
  source 1..21: mol_type = other RNA
ctatgaaaattggcgtacatg

SEQ ID NO: 82504 - RNA, 21 nt, synthetic construct
  source 1..21: mol_type = other RNA
ctatgaaaatttagcttctga

SEQ ID NO: 82505 - RNA, 21 nt, synthetic construct
  source 1..21: mol_type = other RNA
ctatgaaatcttgaagatggc

SEQ ID NO: 82506 - RNA, 21 nt, synthetic construct
  source 1..21: mol_type = other RNA
ctatgaaatgtggtttttggt

SEQ ID NO: 82507 - RNA, 21 nt, synthetic construct
  source 1..21: mol_type = other RNA
ctatgaataggtgtgtgttcc

SEQ ID NO: 82508 - RNA, 21 nt, synthetic construct
  source 1..21: mol_type = other RNA
ctatgaatatactggaaaact

SEQ ID NO: 82509 - RNA, 21 nt, synthetic construct
  source 1..21: mol_type = other RNA
ctatgaatttgcctattctgg

SEQ ID NO: 82510 - RNA, 21 nt, synthetic construct
  source 1..21: mol_type = other RNA
ctatgactaatttgaggcatt

SEQ ID NO: 82511 - RNA, 21 nt, synthetic construct
  source 1..21: mol_type = other RNA
ctatgagaaggattagtgtta

SEQ ID NO: 82512 - RNA, 21 nt, synthetic construct
  source 1..21: mol_type = other RNA
ctatgcaataactcaaaatgt

SEQ ID NO: 82513 - RNA, 21 nt, synthetic construct
  source 1..21: mol_type = other RNA
ctatgcagaaatctaccaaac

SEQ ID NO: 82514 - RNA, 21 nt, synthetic construct
  source 1..21: mol_type = other RNA
ctatgcagcaacggaaatgag

SEQ ID NO: 82515 - RNA, 21 nt, synthetic construct
  source 1..21: mol_type = other RNA
ctatgcatactgcagcacttt

SEQ ID NO: 82516 - RNA, 21 nt, synthetic construct
  source 1..21: mol_type = other RNA
ctatgcatactttggaaggta

SEQ ID NO: 82517 - RNA, 21 nt, synthetic construct
  source 1..21: mol_type = other RNA
ctatgccttcagtatgaatgc

SEQ ID NO: 82518 - RNA, 21 nt, synthetic construct
  source 1..21: mol_type = other RNA
ctatgctcctgcctcagcctc

SEQ ID NO: 82519 - RNA, 21 nt, synthetic construct
  source 1..21: mol_type = other RNA
ctatgctcttggtttcttcaa

SEQ ID NO: 82520 - RNA, 21 nt, synthetic construct
  source 1..21: mol_type = other RNA
ctatgctgaaaggcatgaaat

SEQ ID NO: 82521 - RNA, 21 nt, synthetic construct
  source 1..21: mol_type = other RNA
ctatggacatgaggaaagcag

SEQ ID NO: 82522 - RNA, 21 nt, synthetic construct
  source 1..21: mol_type = other RNA
ctatggagcactgtgagccac

SEQ ID NO: 82523 - RNA, 21 nt, synthetic construct
  source 1..21: mol_type = other RNA
ctatggcaggcaccttcagaa

SEQ ID NO: 82524 - RNA, 21 nt, synthetic construct
  source 1..21: mol_type = other RNA
ctatggcatttgagggttaga

SEQ ID NO: 82525 - RNA, 21 nt, synthetic construct
  source 1..21: mol_type = other RNA
ctatggcttttgagtgtaagg

SEQ ID NO: 82526 - RNA, 21 nt, synthetic construct
  source 1..21: mol_type = other RNA
ctatggtgttatttgttctgt

SEQ ID NO: 82527 - RNA, 21 nt, synthetic construct
  source 1..21: mol_type = other RNA
ctatgtaagacaatgtctttg

SEQ ID NO: 82528 - RNA, 21 nt, synthetic construct
  source 1..21: mol_type = other RNA
ctatgtaatctcatggaagtt

SEQ ID NO: 82529 - RNA, 21 nt, synthetic construct
  source 1..21: mol_type = other RNA
ctatgtaggcacattcaagca

SEQ ID NO: 82530 - RNA, 21 nt, synthetic construct
  source 1..21: mol_type = other RNA
ctatgtatgtggctcacattg

SEQ ID NO: 82531 - RNA, 21 nt, synthetic construct
  source 1..21: mol_type = other RNA
ctatgtcccctggggcctcag

SEQ ID NO: 82532 - RNA, 21 nt, synthetic construct
  source 1..21: mol_type = other RNA
ctatgtgacaaacacttttca

SEQ ID NO: 82533 - RNA, 21 nt, synthetic construct
  source 1..21: mol_type = other RNA
ctatgtgacagaatgcatctt

SEQ ID NO: 82534 - RNA, 21 nt, synthetic construct
  source 1..21: mol_type = other RNA
ctatgtggggaatgctcataa

SEQ ID NO: 82535 - RNA, 21 nt, synthetic construct
  source 1..21: mol_type = other RNA
ctatgtgttgataaatatgtg

SEQ ID NO: 82536 - RNA, 21 nt, synthetic construct
  source 1..21: mol_type = other RNA
ctattaaatcatgatgtttgg

SEQ ID NO: 82537 - RNA, 21 nt, synthetic construct
  source 1..21: mol_type = other RNA
ctattaacagaagggtatata

SEQ ID NO: 82538 - RNA, 21 nt, synthetic construct
  source 1..21: mol_type = other RNA
ctattaaccatatggtttaca

SEQ ID NO: 82539 - RNA, 21 nt, synthetic construct
  source 1..21: mol_type = other RNA
ctattagagaaatgcaaatca

SEQ ID NO: 82540 - RNA, 21 nt, synthetic construct
  source 1..21: mol_type = other RNA
ctattagttaaccttctgggg

SEQ ID NO: 82541 - RNA, 21 nt, synthetic construct
  source 1..21: mol_type = other RNA
ctattatgagcagttgtatgc

SEQ ID NO: 82542 - RNA, 21 nt, synthetic construct
  source 1..21: mol_type = other RNA
ctattcaacaggtataaagtt

SEQ ID NO: 82543 - RNA, 21 nt, synthetic construct
  source 1..21: mol_type = other RNA
ctattcaacctataagaccca

SEQ ID NO: 82544 - RNA, 21 nt, synthetic construct
  source 1..21: mol_type = other RNA
ctattcaagacaagcaaggaa

SEQ ID NO: 82545 - RNA, 21 nt, synthetic construct
  source 1..21: mol_type = other RNA
ctattcacactgctcctgcct

SEQ ID NO: 82546 - RNA, 21 nt, synthetic construct
  source 1..21: mol_type = other RNA
ctattcataggtaatactcta

SEQ ID NO: 82547 - RNA, 21 nt, synthetic construct
  source 1..21: mol_type = other RNA
ctattcattaccaggctggaa

SEQ ID NO: 82548 - RNA, 21 nt, synthetic construct
  source 1..21: mol_type = other RNA
ctattccaaatgtctgtcttt

SEQ ID NO: 82549 - RNA, 21 nt, synthetic construct
  source 1..21: mol_type = other RNA
ctattccagagaattcagagt

SEQ ID NO: 82550 - RNA, 21 nt, synthetic construct
  source 1..21: mol_type = other RNA
ctattccaggatcaaatctgg

SEQ ID NO: 82551 - RNA, 21 nt, synthetic construct
  source 1..21: mol_type = other RNA
ctattccataagatctgtctt

SEQ ID NO: 82552 - RNA, 21 nt, synthetic construct
  source 1..21: mol_type = other RNA
ctattccattgttctctttgt

SEQ ID NO: 82553 - RNA, 21 nt, synthetic construct
  source 1..21: mol_type = other RNA
ctattcccctggatcccccag

SEQ ID NO: 82554 - RNA, 21 nt, synthetic construct
  source 1..21: mol_type = other RNA
ctattccctacattgccttca

SEQ ID NO: 82555 - RNA, 21 nt, synthetic construct
  source 1..21: mol_type = other RNA
ctattctctttctgaaattct

SEQ ID NO: 82556 - RNA, 21 nt, synthetic construct
  source 1..21: mol_type = other RNA
ctattctggggctcaagtaag

SEQ ID NO: 82557 - RNA, 21 nt, synthetic construct
  source 1..21: mol_type = other RNA
ctattgaaagcccttgagtat

SEQ ID NO: 82558 - RNA, 21 nt, synthetic construct
  source 1..21: mol_type = other RNA
ctattgagagtgaaaacacaa

SEQ ID NO: 82559 - RNA, 21 nt, synthetic construct
  source 1..21: mol_type = other RNA
ctattgataaatctaaagcca

SEQ ID NO: 82560 - RNA, 21 nt, synthetic construct
  source 1..21: mol_type = other RNA
ctattgtatgaacattttgag

SEQ ID NO: 82561 - RNA, 21 nt, synthetic construct
  source 1..21: mol_type = other RNA
ctattgtcagtaattctgcag

SEQ ID NO: 82562 - RNA, 21 nt, synthetic construct
  source 1..21: mol_type = other RNA
ctattgtcttttctatctgaa

SEQ ID NO: 82563 - RNA, 21 nt, synthetic construct
  source 1..21: mol_type = other RNA
ctattgttgaattgttggagt

SEQ ID NO: 82564 - RNA, 21 nt, synthetic construct
  source 1..21: mol_type = other RNA
ctatttagagggatgaatgtt

SEQ ID NO: 82565 - RNA, 21 nt, synthetic construct
  source 1..21: mol_type = other RNA
ctatttatgttgcacaaaagt

SEQ ID NO: 82566 - RNA, 21 nt, synthetic construct
  source 1..21: mol_type = other RNA
ctatttccccattagagtaag

SEQ ID NO: 82567 - RNA, 21 nt, synthetic construct
  source 1..21: mol_type = other RNA
ctatttcgcaaagcaacatgc

SEQ ID NO: 82568 - RNA, 21 nt, synthetic construct
  source 1..21: mol_type = other RNA
ctatttctctttaaagctgaa

SEQ ID NO: 82569 - RNA, 21 nt, synthetic construct
  source 1..21: mol_type = other RNA
ctatttctttccattcaatcc

SEQ ID NO: 82570 - RNA, 21 nt, synthetic construct
  source 1..21: mol_type = other RNA
ctatttgtatcttcacaaaca

SEQ ID NO: 82571 - RNA, 21 nt, synthetic construct
  source 1..21: mol_type = other RNA
ctattttaggctctgtggttt

SEQ ID NO: 82572 - RNA, 21 nt, synthetic construct
  source 1..21: mol_type = other RNA
ctattttataatgggcaatca

SEQ ID NO: 82573 - RNA, 21 nt, synthetic construct
  source 1..21: mol_type = other RNA
ctattttcataacaaagctct

SEQ ID NO: 82574 - RNA, 21 nt, synthetic construct
  source 1..21: mol_type = other RNA
ctattttcctaaaactcccca

SEQ ID NO: 82575 - RNA, 21 nt, synthetic construct
  source 1..21: mol_type = other RNA
ctattttctatagtggctgca

SEQ ID NO: 82576 - RNA, 21 nt, synthetic construct
  source 1..21: mol_type = other RNA
ctatttttctgcaattggaag

SEQ ID NO: 82577 - RNA, 21 nt, synthetic construct
  source 1..21: mol_type = other RNA
ctatttttgtctggtggacaa

SEQ ID NO: 82578 - RNA, 21 nt, synthetic construct
  source 1..21: mol_type = other RNA
ctcaaaaatactcaagggctt

SEQ ID NO: 82579 - RNA, 21 nt, synthetic construct
  source 1..21: mol_type = other RNA
ctcaaaaatttaagcacagaa

SEQ ID NO: 82580 - RNA, 21 nt, synthetic construct
  source 1..21: mol_type = other RNA
ctcaaaacaaacaaacagaaa

SEQ ID NO: 82581 - RNA, 21 nt, synthetic construct
  source 1..21: mol_type = other RNA
ctcaaaactgaagtttatcag

SEQ ID NO: 82582 - RNA, 21 nt, synthetic construct
  source 1..21: mol_type = other RNA
ctcaaaagatgcagaaaaagc

SEQ ID NO: 82583 - RNA, 21 nt, synthetic construct
  source 1..21: mol_type = other RNA
ctcaaaagccatagtgtaaac

SEQ ID NO: 82584 - RNA, 21 nt, synthetic construct
  source 1..21: mol_type = other RNA
ctcaaaaggacatattttatg

SEQ ID NO: 82585 - RNA, 21 nt, synthetic construct
  source 1..21: mol_type = other RNA
ctcaaaagtgaatcactacag

SEQ ID NO: 82586 - RNA, 21 nt, synthetic construct
  source 1..21: mol_type = other RNA
ctcaaaatcaacattgcctcc

SEQ ID NO: 82587 - RNA, 21 nt, synthetic construct
  source 1..21: mol_type = other RNA
ctcaaaatggatcaaagacct

SEQ ID NO: 82588 - RNA, 21 nt, synthetic construct
  source 1..21: mol_type = other RNA
ctcaaaatgttcatacaatag

SEQ ID NO: 82589 - RNA, 21 nt, synthetic construct
  source 1..21: mol_type = other RNA
ctcaaaatttagtaagggtaa

SEQ ID NO: 82590 - RNA, 21 nt, synthetic construct
  source 1..21: mol_type = other RNA
ctcaaacagcctaattgtaca

SEQ ID NO: 82591 - RNA, 21 nt, synthetic construct
  source 1..21: mol_type = other RNA
ctcaaacagcttgacattctt

SEQ ID NO: 82592 - RNA, 21 nt, synthetic construct
  source 1..21: mol_type = other RNA
ctcaaacaggatacaaaaagc

SEQ ID NO: 82593 - RNA, 21 nt, synthetic construct
  source 1..21: mol_type = other RNA
ctcaaacccaaattaaaggat

SEQ ID NO: 82594 - RNA, 21 nt, synthetic construct
  source 1..21: mol_type = other RNA
ctcaaacgaaccaattaccat

SEQ ID NO: 82595 - RNA, 21 nt, synthetic construct
  source 1..21: mol_type = other RNA
ctcaaacgtccatcaacagca

SEQ ID NO: 82596 - RNA, 21 nt, synthetic construct
  source 1..21: mol_type = other RNA
ctcaaactatgcttaatctga

SEQ ID NO: 82597 - RNA, 21 nt, synthetic construct
  source 1..21: mol_type = other RNA
ctcaaactccaagtctcatgc

SEQ ID NO: 82598 - RNA, 21 nt, synthetic construct
  source 1..21: mol_type = other RNA
ctcaaactgtgtgcttggagt

SEQ ID NO: 82599 - RNA, 21 nt, synthetic construct
  source 1..21: mol_type = other RNA
ctcaaagcatatgaatctaga

SEQ ID NO: 82600 - RNA, 21 nt, synthetic construct
  source 1..21: mol_type = other RNA
ctcaaagcccaccagcataag

SEQ ID NO: 82601 - RNA, 21 nt, synthetic construct
  source 1..21: mol_type = other RNA
ctcaaaggagagaagaggggg

SEQ ID NO: 82602 - RNA, 21 nt, synthetic construct
  source 1..21: mol_type = other RNA
ctcaaaggggcattccgtgga

SEQ ID NO: 82603 - RNA, 21 nt, synthetic construct
  source 1..21: mol_type = other RNA
ctcaaagtggaaacaactcaa

SEQ ID NO: 82604 - RNA, 21 nt, synthetic construct
  source 1..21: mol_type = other RNA
ctcaaatccaaattcacagca

SEQ ID NO: 82605 - RNA, 21 nt, synthetic construct
  source 1..21: mol_type = other RNA
ctcaaatgaacaggttcttca

SEQ ID NO: 82606 - RNA, 21 nt, synthetic construct
  source 1..21: mol_type = other RNA
ctcaaatgccatagagcttta

SEQ ID NO: 82607 - RNA, 21 nt, synthetic construct
  source 1..21: mol_type = other RNA
ctcaaatgtctcattgtggat

SEQ ID NO: 82608 - RNA, 21 nt, synthetic construct
  source 1..21: mol_type = other RNA
ctcaaattaatcagtctgtaa

SEQ ID NO: 82609 - RNA, 21 nt, synthetic construct
  source 1..21: mol_type = other RNA
ctcaaattagtcatagcagtg

SEQ ID NO: 82610 - RNA, 21 nt, synthetic construct
  source 1..21: mol_type = other RNA
ctcaaattctgagggaaatta

SEQ ID NO: 82611 - RNA, 21 nt, synthetic construct
  source 1..21: mol_type = other RNA
ctcaaattgtgtgttctcttt

SEQ ID NO: 82612 - RNA, 21 nt, synthetic construct
  source 1..21: mol_type = other RNA
ctcaacaagagaggacagttg

SEQ ID NO: 82613 - RNA, 21 nt, synthetic construct
  source 1..21: mol_type = other RNA
ctcaacactgtgttcttttcc

SEQ ID NO: 82614 - RNA, 21 nt, synthetic construct
  source 1..21: mol_type = other RNA
ctcaacacttcagtggtaagg

SEQ ID NO: 82615 - RNA, 21 nt, synthetic construct
  source 1..21: mol_type = other RNA
ctcaacagcacttttgtacta

SEQ ID NO: 82616 - RNA, 21 nt, synthetic construct
  source 1..21: mol_type = other RNA
ctcaacatcactagctattag

SEQ ID NO: 82617 - RNA, 21 nt, synthetic construct
  source 1..21: mol_type = other RNA
ctcaacatgtgtatttaggga

SEQ ID NO: 82618 - RNA, 21 nt, synthetic construct
  source 1..21: mol_type = other RNA
ctcaacattcattcatgacaa

SEQ ID NO: 82619 - RNA, 21 nt, synthetic construct
  source 1..21: mol_type = other RNA
ctcaacctactttaaatcagg

SEQ ID NO: 82620 - RNA, 21 nt, synthetic construct
  source 1..21: mol_type = other RNA
ctcaacctttgcctcctgggt

SEQ ID NO: 82621 - RNA, 21 nt, synthetic construct
  source 1..21: mol_type = other RNA
ctcaacgacaatctctggggt

SEQ ID NO: 82622 - RNA, 21 nt, synthetic construct
  source 1..21: mol_type = other RNA
ctcaacgcctgtgatcccagc

SEQ ID NO: 82623 - RNA, 21 nt, synthetic construct
  source 1..21: mol_type = other RNA
ctcaactgcctctacatcaca

SEQ ID NO: 82624 - RNA, 21 nt, synthetic construct
  source 1..21: mol_type = other RNA
ctcaactggcccctccatgga

SEQ ID NO: 82625 - RNA, 21 nt, synthetic construct
  source 1..21: mol_type = other RNA
ctcaacttagccttggtaaaa

SEQ ID NO: 82626 - RNA, 21 nt, synthetic construct
  source 1..21: mol_type = other RNA
ctcaacttcctgttttagtgg

SEQ ID NO: 82627 - RNA, 21 nt, synthetic construct
  source 1..21: mol_type = other RNA
ctcaactttaggttacgtact

SEQ ID NO: 82628 - RNA, 21 nt, synthetic construct
  source 1..21: mol_type = other RNA
ctcaagaaggtatcatcggaa

SEQ ID NO: 82629 - RNA, 21 nt, synthetic construct
  source 1..21: mol_type = other RNA
ctcaagagttacttctggaaa

SEQ ID NO: 82630 - RNA, 21 nt, synthetic construct
  source 1..21: mol_type = other RNA
ctcaagattgtgtgatttcat

SEQ ID NO: 82631 - RNA, 21 nt, synthetic construct
  source 1..21: mol_type = other RNA
ctcaagcaatctgaaacgacc

SEQ ID NO: 82632 - RNA, 21 nt, synthetic construct
  source 1..21: mol_type = other RNA
ctcaagcagtcctgccttggc

SEQ ID NO: 82633 - RNA, 21 nt, synthetic construct
  source 1..21: mol_type = other RNA
ctcaagccatcctccagcctt

SEQ ID NO: 82634 - RNA, 21 nt, synthetic construct
  source 1..21: mol_type = other RNA
ctcaagcctgataagctccca

SEQ ID NO: 82635 - RNA, 21 nt, synthetic construct
  source 1..21: mol_type = other RNA
ctcaaggcagaacacactgct

SEQ ID NO: 82636 - RNA, 21 nt, synthetic construct
  source 1..21: mol_type = other RNA
ctcaaggccaactgtcctctc

SEQ ID NO: 82637 - RNA, 21 nt, synthetic construct
  source 1..21: mol_type = other RNA
ctcaagggctttcaatagtgg

SEQ ID NO: 82638 - RNA, 21 nt, synthetic construct
  source 1..21: mol_type = other RNA
ctcaagtaagtgaaatcataa

SEQ ID NO: 82639 - RNA, 21 nt, synthetic construct
  source 1..21: mol_type = other RNA
ctcaagtaattgttttccctt

SEQ ID NO: 82640 - RNA, 21 nt, synthetic construct
  source 1..21: mol_type = other RNA
ctcaagtcttttcctagactg

SEQ ID NO: 82641 - RNA, 21 nt, synthetic construct
  source 1..21: mol_type = other RNA
ctcaagtgatgcaactcctgg

SEQ ID NO: 82642 - RNA, 21 nt, synthetic construct
  source 1..21: mol_type = other RNA
ctcaagttccggttctcagga

SEQ ID NO: 82643 - RNA, 21 nt, synthetic construct
  source 1..21: mol_type = other RNA
ctcaataaggaaagcacgttt

SEQ ID NO: 82644 - RNA, 21 nt, synthetic construct
  source 1..21: mol_type = other RNA
ctcaatacacgtggctgtcaa

SEQ ID NO: 82645 - RNA, 21 nt, synthetic construct
  source 1..21: mol_type = other RNA
ctcaatacctgaaaagtgtat

SEQ ID NO: 82646 - RNA, 21 nt, synthetic construct
  source 1..21: mol_type = other RNA
ctcaatagtgtcctttgatgc

SEQ ID NO: 82647 - RNA, 21 nt, synthetic construct
  source 1..21: mol_type = other RNA
ctcaatcagggccttcccaaa

SEQ ID NO: 82648 - RNA, 21 nt, synthetic construct
  source 1..21: mol_type = other RNA
ctcaatcagtggccagtgacc

SEQ ID NO: 82649 - RNA, 21 nt, synthetic construct
  source 1..21: mol_type = other RNA
ctcaatcatgtcaagaatgaa

SEQ ID NO: 82650 - RNA, 21 nt, synthetic construct
  source 1..21: mol_type = other RNA
ctcaatccccatctgggatac

SEQ ID NO: 82651 - RNA, 21 nt, synthetic construct
  source 1..21: mol_type = other RNA
ctcaatcccttccccaccttt

SEQ ID NO: 82652 - RNA, 21 nt, synthetic construct
  source 1..21: mol_type = other RNA
ctcaatctcctgatccacctg

SEQ ID NO: 82653 - RNA, 21 nt, synthetic construct
  source 1..21: mol_type = other RNA
ctcaatcttcttatttgttac

SEQ ID NO: 82654 - RNA, 21 nt, synthetic construct
  source 1..21: mol_type = other RNA
ctcaatggttaagactgctgt

SEQ ID NO: 82655 - RNA, 21 nt, synthetic construct
  source 1..21: mol_type = other RNA
ctcaatgttggttagtgttgt

SEQ ID NO: 82656 - RNA, 21 nt, synthetic construct
  source 1..21: mol_type = other RNA
ctcaattaagcaaccttttag

SEQ ID NO: 82657 - RNA, 21 nt, synthetic construct
  source 1..21: mol_type = other RNA
ctcaattaatgcccaatcaaa

SEQ ID NO: 82658 - RNA, 21 nt, synthetic construct
  source 1..21: mol_type = other RNA
ctcaattcagaagctaaattt

SEQ ID NO: 82659 - RNA, 21 nt, synthetic construct
  source 1..21: mol_type = other RNA
ctcacaaaaagtgtgaccaca

SEQ ID NO: 82660 - RNA, 21 nt, synthetic construct
  source 1..21: mol_type = other RNA
ctcacaacaggcctgagccgt

SEQ ID NO: 82661 - RNA, 21 nt, synthetic construct
  source 1..21: mol_type = other RNA
ctcacacctgggtatacagca

SEQ ID NO: 82662 - RNA, 21 nt, synthetic construct
  source 1..21: mol_type = other RNA
ctcacacgagaaggacagctt

SEQ ID NO: 82663 - RNA, 21 nt, synthetic construct
  source 1..21: mol_type = other RNA
ctcacactgttgtccaggcca

SEQ ID NO: 82664 - RNA, 21 nt, synthetic construct
  source 1..21: mol_type = other RNA
ctcacacttactaaatgatct

SEQ ID NO: 82665 - RNA, 21 nt, synthetic construct
  source 1..21: mol_type = other RNA
ctcacagcttaccaagtgccg

SEQ ID NO: 82666 - RNA, 21 nt, synthetic construct
  source 1..21: mol_type = other RNA
ctcacagtcacaaagctttaa

SEQ ID NO: 82667 - RNA, 21 nt, synthetic construct
  source 1..21: mol_type = other RNA
ctcacagtccactcacctgtc

SEQ ID NO: 82668 - RNA, 21 nt, synthetic construct
  source 1..21: mol_type = other RNA
ctcacagtgctccatagcttc

SEQ ID NO: 82669 - RNA, 21 nt, synthetic construct
  source 1..21: mol_type = other RNA
ctcacatcagttaccaccaag

SEQ ID NO: 82670 - RNA, 21 nt, synthetic construct
  source 1..21: mol_type = other RNA
ctcacatgtttggtcaattga

SEQ ID NO: 82671 - RNA, 21 nt, synthetic construct
  source 1..21: mol_type = other RNA
ctcacattcacagcgtgcacc

SEQ ID NO: 82672 - RNA, 21 nt, synthetic construct
  source 1..21: mol_type = other RNA
ctcacattgtatttctgttag

SEQ ID NO: 82673 - RNA, 21 nt, synthetic construct
  source 1..21: mol_type = other RNA
ctcacatttagtttcatctat

SEQ ID NO: 82674 - RNA, 21 nt, synthetic construct
  source 1..21: mol_type = other RNA
ctcaccaacatccacagcttt

SEQ ID NO: 82675 - RNA, 21 nt, synthetic construct
  source 1..21: mol_type = other RNA
ctcaccctcaggactctgctc

SEQ ID NO: 82676 - RNA, 21 nt, synthetic construct
  source 1..21: mol_type = other RNA
ctcaccgcaacatctgcctcc

SEQ ID NO: 82677 - RNA, 21 nt, synthetic construct
  source 1..21: mol_type = other RNA
ctcacctagctgttttcatgc

SEQ ID NO: 82678 - RNA, 21 nt, synthetic construct
  source 1..21: mol_type = other RNA
ctcacctcaaggccaactgtc

SEQ ID NO: 82679 - RNA, 21 nt, synthetic construct
  source 1..21: mol_type = other RNA
ctcacctcacattcacagcgt

SEQ ID NO: 82680 - RNA, 21 nt, synthetic construct
  source 1..21: mol_type = other RNA
ctcacctctggactcagggtc

SEQ ID NO: 82681 - RNA, 21 nt, synthetic construct
  source 1..21: mol_type = other RNA
ctcacctgtcatgtcaaattt

SEQ ID NO: 82682 - RNA, 21 nt, synthetic construct
  source 1..21: mol_type = other RNA
ctcaccttctgctgggcccac

SEQ ID NO: 82683 - RNA, 21 nt, synthetic construct
  source 1..21: mol_type = other RNA
ctcacgaaagcggtcaacgca

SEQ ID NO: 82684 - RNA, 21 nt, synthetic construct
  source 1..21: mol_type = other RNA
ctcacgatactttttattttc

SEQ ID NO: 82685 - RNA, 21 nt, synthetic construct
  source 1..21: mol_type = other RNA
ctcacgtcaccgcaacctccg

SEQ ID NO: 82686 - RNA, 21 nt, synthetic construct
  source 1..21: mol_type = other RNA
ctcacgttaccctctggaatg

SEQ ID NO: 82687 - RNA, 21 nt, synthetic construct
  source 1..21: mol_type = other RNA
ctcactaagtcagaattcact

SEQ ID NO: 82688 - RNA, 21 nt, synthetic construct
  source 1..21: mol_type = other RNA
ctcactagagcttcaacctcc

SEQ ID NO: 82689 - RNA, 21 nt, synthetic construct
  source 1..21: mol_type = other RNA
ctcactcacctagctgttttc

SEQ ID NO: 82690 - RNA, 21 nt, synthetic construct
  source 1..21: mol_type = other RNA
ctcactcatttccgttgctgc

SEQ ID NO: 82691 - RNA, 21 nt, synthetic construct
  source 1..21: mol_type = other RNA
ctcactccaaagcaaacgtgc

SEQ ID NO: 82692 - RNA, 21 nt, synthetic construct
  source 1..21: mol_type = other RNA
ctcactcttaccaaggctgga

SEQ ID NO: 82693 - RNA, 21 nt, synthetic construct
  source 1..21: mol_type = other RNA
ctcactgaaaccctcacgaaa

SEQ ID NO: 82694 - RNA, 21 nt, synthetic construct
  source 1..21: mol_type = other RNA
ctcactgcaagctccgcctcc

SEQ ID NO: 82695 - RNA, 21 nt, synthetic construct
  source 1..21: mol_type = other RNA
ctcactggccagcattactta

SEQ ID NO: 82696 - RNA, 21 nt, synthetic construct
  source 1..21: mol_type = other RNA
ctcactggcctgagctctcag

SEQ ID NO: 82697 - RNA, 21 nt, synthetic construct
  source 1..21: mol_type = other RNA
ctcactgtactactgacctgg

SEQ ID NO: 82698 - RNA, 21 nt, synthetic construct
  source 1..21: mol_type = other RNA
ctcactgtctccatgtcctca

SEQ ID NO: 82699 - RNA, 21 nt, synthetic construct
  source 1..21: mol_type = other RNA
ctcactgtgatacctagtacg

SEQ ID NO: 82700 - RNA, 21 nt, synthetic construct
  source 1..21: mol_type = other RNA
ctcacttattagcaaagaggc

SEQ ID NO: 82701 - RNA, 21 nt, synthetic construct
  source 1..21: mol_type = other RNA
ctcactttgggattagcttat

SEQ ID NO: 82702 - RNA, 21 nt, synthetic construct
  source 1..21: mol_type = other RNA
ctcactttgttgctcaggctg

SEQ ID NO: 82703 - RNA, 21 nt, synthetic construct
  source 1..21: mol_type = other RNA
ctcagaaaattttcttttgtg

SEQ ID NO: 82704 - RNA, 21 nt, synthetic construct
  source 1..21: mol_type = other RNA
ctcagaaacaacaacaacaaa

SEQ ID NO: 82705 - RNA, 21 nt, synthetic construct
  source 1..21: mol_type = other RNA
ctcagaaattataagcttcct

SEQ ID NO: 82706 - RNA, 21 nt, synthetic construct
  source 1..21: mol_type = other RNA
ctcagaagctatagctgagaa

SEQ ID NO: 82707 - RNA, 21 nt, synthetic construct
  source 1..21: mol_type = other RNA
ctcagaagctttcagacttaa

SEQ ID NO: 82708 - RNA, 21 nt, synthetic construct
  source 1..21: mol_type = other RNA
ctcagaagtactactcattaa

SEQ ID NO: 82709 - RNA, 21 nt, synthetic construct
  source 1..21: mol_type = other RNA
ctcagaatttgaggtcttcta

SEQ ID NO: 82710 - RNA, 21 nt, synthetic construct
  source 1..21: mol_type = other RNA
ctcagagggaaactgtttttg

SEQ ID NO: 82711 - RNA, 21 nt, synthetic construct
  source 1..21: mol_type = other RNA
ctcagagtatatatgctccct

SEQ ID NO: 82712 - RNA, 21 nt, synthetic construct
  source 1..21: mol_type = other RNA
ctcagatatcaatctggatat

SEQ ID NO: 82713 - RNA, 21 nt, synthetic construct
  source 1..21: mol_type = other RNA
ctcagatctgagagatagaaa

SEQ ID NO: 82714 - RNA, 21 nt, synthetic construct
  source 1..21: mol_type = other RNA
ctcagatctgagtttgctctg

SEQ ID NO: 82715 - RNA, 21 nt, synthetic construct
  source 1..21: mol_type = other RNA
ctcagatctgttgcagtcccc

SEQ ID NO: 82716 - RNA, 21 nt, synthetic construct
  source 1..21: mol_type = other RNA
ctcagatgtctccattttgcc

SEQ ID NO: 82717 - RNA, 21 nt, synthetic construct
  source 1..21: mol_type = other RNA
ctcagattcaccaattgttaa

SEQ ID NO: 82718 - RNA, 21 nt, synthetic construct
  source 1..21: mol_type = other RNA
ctcagcaaaagcaattattag

SEQ ID NO: 82719 - RNA, 21 nt, synthetic construct
  source 1..21: mol_type = other RNA
ctcagcacagagccgaaatgc

SEQ ID NO: 82720 - RNA, 21 nt, synthetic construct
  source 1..21: mol_type = other RNA
ctcagcagttttaaagaattc

SEQ ID NO: 82721 - RNA, 21 nt, synthetic construct
  source 1..21: mol_type = other RNA
ctcagcataattggttaaact

SEQ ID NO: 82722 - RNA, 21 nt, synthetic construct
  source 1..21: mol_type = other RNA
ctcagcatgtcttcagaggcc

SEQ ID NO: 82723 - RNA, 21 nt, synthetic construct
  source 1..21: mol_type = other RNA
ctcagccccctccctaccacc

SEQ ID NO: 82724 - RNA, 21 nt, synthetic construct
  source 1..21: mol_type = other RNA
ctcagccccctcgaagagacc

SEQ ID NO: 82725 - RNA, 21 nt, synthetic construct
  source 1..21: mol_type = other RNA
ctcagcccctcatcctccgta

SEQ ID NO: 82726 - RNA, 21 nt, synthetic construct
  source 1..21: mol_type = other RNA
ctcagccgccgcagaggccaa

SEQ ID NO: 82727 - RNA, 21 nt, synthetic construct
  source 1..21: mol_type = other RNA
ctcagcctcccgagtagttgt

SEQ ID NO: 82728 - RNA, 21 nt, synthetic construct
  source 1..21: mol_type = other RNA
ctcagcctgttgggaggtttt

SEQ ID NO: 82729 - RNA, 21 nt, synthetic construct
  source 1..21: mol_type = other RNA
ctcagccttttctgatttgct

SEQ ID NO: 82730 - RNA, 21 nt, synthetic construct
  source 1..21: mol_type = other RNA
ctcagctatagcttctgagct

SEQ ID NO: 82731 - RNA, 21 nt, synthetic construct
  source 1..21: mol_type = other RNA
ctcagctcattacagtctcga

SEQ ID NO: 82732 - RNA, 21 nt, synthetic construct
  source 1..21: mol_type = other RNA
ctcagctcctcagaaggccaa

SEQ ID NO: 82733 - RNA, 21 nt, synthetic construct
  source 1..21: mol_type = other RNA
ctcagctgtcactctctttag

SEQ ID NO: 82734 - RNA, 21 nt, synthetic construct
  source 1..21: mol_type = other RNA
ctcaggaccagatgacttcac

SEQ ID NO: 82735 - RNA, 21 nt, synthetic construct
  source 1..21: mol_type = other RNA
ctcaggaccaggcagtcctct

SEQ ID NO: 82736 - RNA, 21 nt, synthetic construct
  source 1..21: mol_type = other RNA
ctcaggactctgctcaaaggg

SEQ ID NO: 82737 - RNA, 21 nt, synthetic construct
  source 1..21: mol_type = other RNA
ctcaggagattaaggctggag

SEQ ID NO: 82738 - RNA, 21 nt, synthetic construct
  source 1..21: mol_type = other RNA
ctcaggagcctagtcatccac

SEQ ID NO: 82739 - RNA, 21 nt, synthetic construct
  source 1..21: mol_type = other RNA
ctcaggaggctgaggcaggag

SEQ ID NO: 82740 - RNA, 21 nt, synthetic construct
  source 1..21: mol_type = other RNA
ctcaggagtaactgctcctct

SEQ ID NO: 82741 - RNA, 21 nt, synthetic construct
  source 1..21: mol_type = other RNA
ctcaggatctacattaaaaaa

SEQ ID NO: 82742 - RNA, 21 nt, synthetic construct
  source 1..21: mol_type = other RNA
ctcaggcagtctagtccatga

SEQ ID NO: 82743 - RNA, 21 nt, synthetic construct
  source 1..21: mol_type = other RNA
ctcaggccagtgagtgatgaa

SEQ ID NO: 82744 - RNA, 21 nt, synthetic construct
  source 1..21: mol_type = other RNA
ctcaggcctgttgtgaggatt

SEQ ID NO: 82745 - RNA, 21 nt, synthetic construct
  source 1..21: mol_type = other RNA
ctcaggctccaggtagaatga

SEQ ID NO: 82746 - RNA, 21 nt, synthetic construct
  source 1..21: mol_type = other RNA
ctcagggcctgcttttggaag

SEQ ID NO: 82747 - RNA, 21 nt, synthetic construct
  source 1..21: mol_type = other RNA
ctcaggggtaaaggggatggg

SEQ ID NO: 82748 - RNA, 21 nt, synthetic construct
  source 1..21: mol_type = other RNA
ctcagggtaggaaaagacttc

SEQ ID NO: 82749 - RNA, 21 nt, synthetic construct
  source 1..21: mol_type = other RNA
ctcagggtcacttcctctctt

SEQ ID NO: 82750 - RNA, 21 nt, synthetic construct
  source 1..21: mol_type = other RNA
ctcagggtgcgacctcgaagc

SEQ ID NO: 82751 - RNA, 21 nt, synthetic construct
  source 1..21: mol_type = other RNA
ctcaggtgtcactggatagaa

SEQ ID NO: 82752 - RNA, 21 nt, synthetic construct
  source 1..21: mol_type = other RNA
ctcagtacttccctctttctc

SEQ ID NO: 82753 - RNA, 21 nt, synthetic construct
  source 1..21: mol_type = other RNA
ctcagtatcctttcaaggtat

SEQ ID NO: 82754 - RNA, 21 nt, synthetic construct
  source 1..21: mol_type = other RNA
ctcagtcataatttgtgtcct

SEQ ID NO: 82755 - RNA, 21 nt, synthetic construct
  source 1..21: mol_type = other RNA
ctcagtcccaaatgggagcat

SEQ ID NO: 82756 - RNA, 21 nt, synthetic construct
  source 1..21: mol_type = other RNA
ctcagtccctcaccttctgct

SEQ ID NO: 82757 - RNA, 21 nt, synthetic construct
  source 1..21: mol_type = other RNA
ctcagtctcgaaaaggaatgg

SEQ ID NO: 82758 - RNA, 21 nt, synthetic construct
  source 1..21: mol_type = other RNA
ctcagtctgtttgccatcttc

SEQ ID NO: 82759 - RNA, 21 nt, synthetic construct
  source 1..21: mol_type = other RNA
ctcagtggccctgttggcctg

SEQ ID NO: 82760 - RNA, 21 nt, synthetic construct
  source 1..21: mol_type = other RNA
ctcagtgggttcaattatgtg

SEQ ID NO: 82761 - RNA, 21 nt, synthetic construct
  source 1..21: mol_type = other RNA
ctcagtggtagttacacaagt

SEQ ID NO: 82762 - RNA, 21 nt, synthetic construct
  source 1..21: mol_type = other RNA
ctcagtggtgcttttgctgca

SEQ ID NO: 82763 - RNA, 21 nt, synthetic construct
  source 1..21: mol_type = other RNA
ctcagtggttctgcgtgttat

SEQ ID NO: 82764 - RNA, 21 nt, synthetic construct
  source 1..21: mol_type = other RNA
ctcagtgtgtttttgtaaatg

SEQ ID NO: 82765 - RNA, 21 nt, synthetic construct
  source 1..21: mol_type = other RNA
ctcagttaaacccaacaaaca

SEQ ID NO: 82766 - RNA, 21 nt, synthetic construct
  source 1..21: mol_type = other RNA
ctcagttgacatcctttaatt

SEQ ID NO: 82767 - RNA, 21 nt, synthetic construct
  source 1..21: mol_type = other RNA
ctcagttgcagcatgctcact

SEQ ID NO: 82768 - RNA, 21 nt, synthetic construct
  source 1..21: mol_type = other RNA
ctcagtttcaaaagctccccg

SEQ ID NO: 82769 - RNA, 21 nt, synthetic construct
  source 1..21: mol_type = other RNA
ctcataaagccggattccttt

SEQ ID NO: 82770 - RNA, 21 nt, synthetic construct
  source 1..21: mol_type = other RNA
ctcataagaactcctggtctc

SEQ ID NO: 82771 - RNA, 21 nt, synthetic construct
  source 1..21: mol_type = other RNA
ctcataatagtctcacgatac

SEQ ID NO: 82772 - RNA, 21 nt, synthetic construct
  source 1..21: mol_type = other RNA
ctcataccaggttttggtaat

SEQ ID NO: 82773 - RNA, 21 nt, synthetic construct
  source 1..21: mol_type = other RNA
ctcatacttgctttattactt

SEQ ID NO: 82774 - RNA, 21 nt, synthetic construct
  source 1..21: mol_type = other RNA
ctcatactttgtcaggcatgc

SEQ ID NO: 82775 - RNA, 21 nt, synthetic construct
  source 1..21: mol_type = other RNA
ctcatagtcttccaaaatatt

SEQ ID NO: 82776 - RNA, 21 nt, synthetic construct
  source 1..21: mol_type = other RNA
ctcatatcagttatcacacct

SEQ ID NO: 82777 - RNA, 21 nt, synthetic construct
  source 1..21: mol_type = other RNA
ctcatattagtctgtagcttc

SEQ ID NO: 82778 - RNA, 21 nt, synthetic construct
  source 1..21: mol_type = other RNA
ctcatattattttttcccgct

SEQ ID NO: 82779 - RNA, 21 nt, synthetic construct
  source 1..21: mol_type = other RNA
ctcatcatttatacccaagta

SEQ ID NO: 82780 - RNA, 21 nt, synthetic construct
  source 1..21: mol_type = other RNA
ctcatccacaatgagacattt

SEQ ID NO: 82781 - RNA, 21 nt, synthetic construct
  source 1..21: mol_type = other RNA
ctcatccctcatatcagttat

SEQ ID NO: 82782 - RNA, 21 nt, synthetic construct
  source 1..21: mol_type = other RNA
ctcatccggtctcagttttta

SEQ ID NO: 82783 - RNA, 21 nt, synthetic construct
  source 1..21: mol_type = other RNA
ctcatcctccgtagctgtcgc

SEQ ID NO: 82784 - RNA, 21 nt, synthetic construct
  source 1..21: mol_type = other RNA
ctcatctaaattaagcttcga

SEQ ID NO: 82785 - RNA, 21 nt, synthetic construct
  source 1..21: mol_type = other RNA
ctcatctaagcctacctccct

SEQ ID NO: 82786 - RNA, 21 nt, synthetic construct
  source 1..21: mol_type = other RNA
ctcatctctgcaaaacattta

SEQ ID NO: 82787 - RNA, 21 nt, synthetic construct
  source 1..21: mol_type = other RNA
ctcatctgtcaaaaagagaac

SEQ ID NO: 82788 - RNA, 21 nt, synthetic construct
  source 1..21: mol_type = other RNA
ctcatctgtcactttcctatt

SEQ ID NO: 82789 - RNA, 21 nt, synthetic construct
  source 1..21: mol_type = other RNA
ctcatcttagccgggaggagc

SEQ ID NO: 82790 - RNA, 21 nt, synthetic construct
  source 1..21: mol_type = other RNA
ctcatgagagctgtgccgagg

SEQ ID NO: 82791 - RNA, 21 nt, synthetic construct
  source 1..21: mol_type = other RNA
ctcatgagtcctgaaaattcc

SEQ ID NO: 82792 - RNA, 21 nt, synthetic construct
  source 1..21: mol_type = other RNA
ctcatgcaattccccagcctc

SEQ ID NO: 82793 - RNA, 21 nt, synthetic construct
  source 1..21: mol_type = other RNA
ctcatgcatccacattttgtg

SEQ ID NO: 82794 - RNA, 21 nt, synthetic construct
  source 1..21: mol_type = other RNA
ctcatgcttaggatcccagtc

SEQ ID NO: 82795 - RNA, 21 nt, synthetic construct
  source 1..21: mol_type = other RNA
ctcatgcttgctccagagaag

SEQ ID NO: 82796 - RNA, 21 nt, synthetic construct
  source 1..21: mol_type = other RNA
ctcatggaagttatttaatct

SEQ ID NO: 82797 - RNA, 21 nt, synthetic construct
  source 1..21: mol_type = other RNA
ctcatgtaactaattactgtt

SEQ ID NO: 82798 - RNA, 21 nt, synthetic construct
  source 1..21: mol_type = other RNA
ctcatgtatgttttagcctta

SEQ ID NO: 82799 - RNA, 21 nt, synthetic construct
  source 1..21: mol_type = other RNA
ctcatgtattttcctaaccac

SEQ ID NO: 82800 - RNA, 21 nt, synthetic construct
  source 1..21: mol_type = other RNA
ctcatgtcagagacacatact

SEQ ID NO: 82801 - RNA, 21 nt, synthetic construct
  source 1..21: mol_type = other RNA
ctcatgtccatagttaatgtg

SEQ ID NO: 82802 - RNA, 21 nt, synthetic construct
  source 1..21: mol_type = other RNA
ctcatgtctacctgtctttcc

SEQ ID NO: 82803 - RNA, 21 nt, synthetic construct
  source 1..21: mol_type = other RNA
ctcatgttgggtaaaaataat

SEQ ID NO: 82804 - RNA, 21 nt, synthetic construct
  source 1..21: mol_type = other RNA
ctcattaaaaatcaacccatg

SEQ ID NO: 82805 - RNA, 21 nt, synthetic construct
  source 1..21: mol_type = other RNA
ctcattacagtctcgaccccc

SEQ ID NO: 82806 - RNA, 21 nt, synthetic construct
  source 1..21: mol_type = other RNA
ctcattagttatctcttagac

SEQ ID NO: 82807 - RNA, 21 nt, synthetic construct
  source 1..21: mol_type = other RNA
ctcattataacataaaagcgt

SEQ ID NO: 82808 - RNA, 21 nt, synthetic construct
  source 1..21: mol_type = other RNA
ctcattatcccagacagatat

SEQ ID NO: 82809 - RNA, 21 nt, synthetic construct
  source 1..21: mol_type = other RNA
ctcattatggttgttggctaa

SEQ ID NO: 82810 - RNA, 21 nt, synthetic construct
  source 1..21: mol_type = other RNA
ctcattcacactagtcaccct

SEQ ID NO: 82811 - RNA, 21 nt, synthetic construct
  source 1..21: mol_type = other RNA
ctcattcactagacacatttt

SEQ ID NO: 82812 - RNA, 21 nt, synthetic construct
  source 1..21: mol_type = other RNA
ctcattcatctgcagtgtcca

SEQ ID NO: 82813 - RNA, 21 nt, synthetic construct
  source 1..21: mol_type = other RNA
ctcattccaatccttccttca

SEQ ID NO: 82814 - RNA, 21 nt, synthetic construct
  source 1..21: mol_type = other RNA
ctcattcttctctaatgtaaa

SEQ ID NO: 82815 - RNA, 21 nt, synthetic construct
  source 1..21: mol_type = other RNA
ctcattgaagctactattcca

SEQ ID NO: 82816 - RNA, 21 nt, synthetic construct
  source 1..21: mol_type = other RNA
ctcattgcctatagacagcat

SEQ ID NO: 82817 - RNA, 21 nt, synthetic construct
  source 1..21: mol_type = other RNA
ctcattgtggatgagattaat

SEQ ID NO: 82818 - RNA, 21 nt, synthetic construct
  source 1..21: mol_type = other RNA
ctcattgtgttgcccacgctg

SEQ ID NO: 82819 - RNA, 21 nt, synthetic construct
  source 1..21: mol_type = other RNA
ctcatttaaacgtcagagcag

SEQ ID NO: 82820 - RNA, 21 nt, synthetic construct
  source 1..21: mol_type = other RNA
ctcatttccgttgctgcatag

SEQ ID NO: 82821 - RNA, 21 nt, synthetic construct
  source 1..21: mol_type = other RNA
ctcatttcctttcagtcggtt

SEQ ID NO: 82822 - RNA, 21 nt, synthetic construct
  source 1..21: mol_type = other RNA
ctcatttctgcttgaatgtgc

SEQ ID NO: 82823 - RNA, 21 nt, synthetic construct
  source 1..21: mol_type = other RNA
ctcatttgaactttccagaag

SEQ ID NO: 82824 - RNA, 21 nt, synthetic construct
  source 1..21: mol_type = other RNA
ctcatttgcagagcaaactca

SEQ ID NO: 82825 - RNA, 21 nt, synthetic construct
  source 1..21: mol_type = other RNA
ctcattttataagggtgataa

SEQ ID NO: 82826 - RNA, 21 nt, synthetic construct
  source 1..21: mol_type = other RNA
ctcattttgaaaaacagatct

SEQ ID NO: 82827 - RNA, 21 nt, synthetic construct
  source 1..21: mol_type = other RNA
ctcatttttcaggggggccac

SEQ ID NO: 82828 - RNA, 21 nt, synthetic construct
  source 1..21: mol_type = other RNA
ctccaaaagcgaaaggcaaaa

SEQ ID NO: 82829 - RNA, 21 nt, synthetic construct
  source 1..21: mol_type = other RNA
ctccaaacctttaagttctcc

SEQ ID NO: 82830 - RNA, 21 nt, synthetic construct
  source 1..21: mol_type = other RNA
ctccaaagaacaggagttacc

SEQ ID NO: 82831 - RNA, 21 nt, synthetic construct
  source 1..21: mol_type = other RNA
ctccaaagcaaaccagacatt

SEQ ID NO: 82832 - RNA, 21 nt, synthetic construct
  source 1..21: mol_type = other RNA
ctccaaagcaaacgtgcacac

SEQ ID NO: 82833 - RNA, 21 nt, synthetic construct
  source 1..21: mol_type = other RNA
ctccaacaattcaacaatagc

SEQ ID NO: 82834 - RNA, 21 nt, synthetic construct
  source 1..21: mol_type = other RNA
ctccaacagaagaagtttcta

SEQ ID NO: 82835 - RNA, 21 nt, synthetic construct
  source 1..21: mol_type = other RNA
ctccaacccattccaggtttt

SEQ ID NO: 82836 - RNA, 21 nt, synthetic construct
  source 1..21: mol_type = other RNA
ctccaacgctttttatggaaa

SEQ ID NO: 82837 - RNA, 21 nt, synthetic construct
  source 1..21: mol_type = other RNA
ctccaactcaaaaaagaaaaa

SEQ ID NO: 82838 - RNA, 21 nt, synthetic construct
  source 1..21: mol_type = other RNA
ctccaagaaggctagcacaga

SEQ ID NO: 82839 - RNA, 21 nt, synthetic construct
  source 1..21: mol_type = other RNA
ctccaagcacacagtttgaga

SEQ ID NO: 82840 - RNA, 21 nt, synthetic construct
  source 1..21: mol_type = other RNA
ctccaaggaaagtgtgcttgg

SEQ ID NO: 82841 - RNA, 21 nt, synthetic construct
  source 1..21: mol_type = other RNA
ctccaaggctgcccgctccgg

SEQ ID NO: 82842 - RNA, 21 nt, synthetic construct
  source 1..21: mol_type = other RNA
ctccaaggtacaattacacat

SEQ ID NO: 82843 - RNA, 21 nt, synthetic construct
  source 1..21: mol_type = other RNA
ctccaagtctcatgcaattcc

SEQ ID NO: 82844 - RNA, 21 nt, synthetic construct
  source 1..21: mol_type = other RNA
ctccaagtgtaaaaagacatt

SEQ ID NO: 82845 - RNA, 21 nt, synthetic construct
  source 1..21: mol_type = other RNA
ctccaatcctcagccccctcc

SEQ ID NO: 82846 - RNA, 21 nt, synthetic construct
  source 1..21: mol_type = other RNA
ctccacacacgaagtagtttt

SEQ ID NO: 82847 - RNA, 21 nt, synthetic construct
  source 1..21: mol_type = other RNA
ctccacacctggcccctttca

SEQ ID NO: 82848 - RNA, 21 nt, synthetic construct
  source 1..21: mol_type = other RNA
ctccacagagttcagcttaca

SEQ ID NO: 82849 - RNA, 21 nt, synthetic construct
  source 1..21: mol_type = other RNA
ctccacaggctttgacttctc

SEQ ID NO: 82850 - RNA, 21 nt, synthetic construct
  source 1..21: mol_type = other RNA
ctccacatccttgccaacagt

SEQ ID NO: 82851 - RNA, 21 nt, synthetic construct
  source 1..21: mol_type = other RNA
ctccacattgtcttaattatt

SEQ ID NO: 82852 - RNA, 21 nt, synthetic construct
  source 1..21: mol_type = other RNA
ctccacatttctacacaacat

SEQ ID NO: 82853 - RNA, 21 nt, synthetic construct
  source 1..21: mol_type = other RNA
ctccaccagcatcttttgacg

SEQ ID NO: 82854 - RNA, 21 nt, synthetic construct
  source 1..21: mol_type = other RNA
ctccaccctgccccttatcct

SEQ ID NO: 82855 - RNA, 21 nt, synthetic construct
  source 1..21: mol_type = other RNA
ctccacctcagaaacaaacaa

SEQ ID NO: 82856 - RNA, 21 nt, synthetic construct
  source 1..21: mol_type = other RNA
ctccaccttagcccaagctac

SEQ ID NO: 82857 - RNA, 21 nt, synthetic construct
  source 1..21: mol_type = other RNA
ctccacgcccattaggatagc

SEQ ID NO: 82858 - RNA, 21 nt, synthetic construct
  source 1..21: mol_type = other RNA
ctccacgtgggtgacagagca

SEQ ID NO: 82859 - RNA, 21 nt, synthetic construct
  source 1..21: mol_type = other RNA
ctccactccagcctgagcaac

SEQ ID NO: 82860 - RNA, 21 nt, synthetic construct
  source 1..21: mol_type = other RNA
ctccacttcccactgctatga

SEQ ID NO: 82861 - RNA, 21 nt, synthetic construct
  source 1..21: mol_type = other RNA
ctccacttgggtggaagctgt

SEQ ID NO: 82862 - RNA, 21 nt, synthetic construct
  source 1..21: mol_type = other RNA
ctccactttcatgatttggtg

SEQ ID NO: 82863 - RNA, 21 nt, synthetic construct
  source 1..21: mol_type = other RNA
ctccagaaaaccagaaaagtg

SEQ ID NO: 82864 - RNA, 21 nt, synthetic construct
  source 1..21: mol_type = other RNA
ctccagaatgaccgagatact

SEQ ID NO: 82865 - RNA, 21 nt, synthetic construct
  source 1..21: mol_type = other RNA
ctccagactgggcaacagaga

SEQ ID NO: 82866 - RNA, 21 nt, synthetic construct
  source 1..21: mol_type = other RNA
ctccagagaagttttccagga

SEQ ID NO: 82867 - RNA, 21 nt, synthetic construct
  source 1..21: mol_type = other RNA
ctccagcatccctccagtcca

SEQ ID NO: 82868 - RNA, 21 nt, synthetic construct
  source 1..21: mol_type = other RNA
ctccagcctggtcaacagggt

SEQ ID NO: 82869 - RNA, 21 nt, synthetic construct
  source 1..21: mol_type = other RNA
ctccagccttaatctcctgag

SEQ ID NO: 82870 - RNA, 21 nt, synthetic construct
  source 1..21: mol_type = other RNA
ctccagccttggtaagagtga

SEQ ID NO: 82871 - RNA, 21 nt, synthetic construct
  source 1..21: mol_type = other RNA
ctccagcgctaagcactgcgc

SEQ ID NO: 82872 - RNA, 21 nt, synthetic construct
  source 1..21: mol_type = other RNA
ctccagcttttattagagctt

SEQ ID NO: 82873 - RNA, 21 nt, synthetic construct
  source 1..21: mol_type = other RNA
ctccaggatccagtctctacc

SEQ ID NO: 82874 - RNA, 21 nt, synthetic construct
  source 1..21: mol_type = other RNA
ctccagggaggaatccttcag

SEQ ID NO: 82875 - RNA, 21 nt, synthetic construct
  source 1..21: mol_type = other RNA
ctccaggggacatgctctgat

SEQ ID NO: 82876 - RNA, 21 nt, synthetic construct
  source 1..21: mol_type = other RNA
ctccaggtagaatgaaaattt

SEQ ID NO: 82877 - RNA, 21 nt, synthetic construct
  source 1..21: mol_type = other RNA
ctccaggttcatccatgttgt

SEQ ID NO: 82878 - RNA, 21 nt, synthetic construct
  source 1..21: mol_type = other RNA
ctccagtatgacctcctccca

SEQ ID NO: 82879 - RNA, 21 nt, synthetic construct
  source 1..21: mol_type = other RNA
ctccagtccagcaccaccctt

SEQ ID NO: 82880 - RNA, 21 nt, synthetic construct
  source 1..21: mol_type = other RNA
ctccagtcccactgacagtgg

SEQ ID NO: 82881 - RNA, 21 nt, synthetic construct
  source 1..21: mol_type = other RNA
ctccagtgaagtcatctggtc

SEQ ID NO: 82882 - RNA, 21 nt, synthetic construct
  source 1..21: mol_type = other RNA
ctccagtgtcctgaatgattt

SEQ ID NO: 82883 - RNA, 21 nt, synthetic construct
  source 1..21: mol_type = other RNA
ctccataagtccctaacagtc

SEQ ID NO: 82884 - RNA, 21 nt, synthetic construct
  source 1..21: mol_type = other RNA
ctccatacaaggagacctact

SEQ ID NO: 82885 - RNA, 21 nt, synthetic construct
  source 1..21: mol_type = other RNA
ctccataccccctggaaataa

SEQ ID NO: 82886 - RNA, 21 nt, synthetic construct
  source 1..21: mol_type = other RNA
ctccatagcttcctaagaaag

SEQ ID NO: 82887 - RNA, 21 nt, synthetic construct
  source 1..21: mol_type = other RNA
ctccatatgggatgcttaaag

SEQ ID NO: 82888 - RNA, 21 nt, synthetic construct
  source 1..21: mol_type = other RNA
ctccatcactgactggctgtg

SEQ ID NO: 82889 - RNA, 21 nt, synthetic construct
  source 1..21: mol_type = other RNA
ctccatctcaagaaaacaaga

SEQ ID NO: 82890 - RNA, 21 nt, synthetic construct
  source 1..21: mol_type = other RNA
ctccatcttcacgtggcgctc

SEQ ID NO: 82891 - RNA, 21 nt, synthetic construct
  source 1..21: mol_type = other RNA
ctccatggaaactacaattac

SEQ ID NO: 82892 - RNA, 21 nt, synthetic construct
  source 1..21: mol_type = other RNA
ctccatgtcctcacctcacat

SEQ ID NO: 82893 - RNA, 21 nt, synthetic construct
  source 1..21: mol_type = other RNA
ctccattatatgaataaacca

SEQ ID NO: 82894 - RNA, 21 nt, synthetic construct
  source 1..21: mol_type = other RNA
ctccatttccctgcttcatct

SEQ ID NO: 82895 - RNA, 21 nt, synthetic construct
  source 1..21: mol_type = other RNA
ctccatttgtggcatctttgt

SEQ ID NO: 82896 - RNA, 21 nt, synthetic construct
  source 1..21: mol_type = other RNA
ctccattttgccagctaactt

SEQ ID NO: 82897 - RNA, 21 nt, synthetic construct
  source 1..21: mol_type = other RNA
ctccattttggtcttaccctc

SEQ ID NO: 82898 - RNA, 21 nt, synthetic construct
  source 1..21: mol_type = other RNA
ctcccaaaggactgggatcct

SEQ ID NO: 82899 - RNA, 21 nt, synthetic construct
  source 1..21: mol_type = other RNA
ctcccaacaggctgagtgcgg

SEQ ID NO: 82900 - RNA, 21 nt, synthetic construct
  source 1..21: mol_type = other RNA
ctcccaaggttgcctgttcac

SEQ ID NO: 82901 - RNA, 21 nt, synthetic construct
  source 1..21: mol_type = other RNA
ctcccaatgcttgaagagcgc

SEQ ID NO: 82902 - RNA, 21 nt, synthetic construct
  source 1..21: mol_type = other RNA
ctcccaccatctctctgcctc

SEQ ID NO: 82903 - RNA, 21 nt, synthetic construct
  source 1..21: mol_type = other RNA
ctcccacctcagccccacaag

SEQ ID NO: 82904 - RNA, 21 nt, synthetic construct
  source 1..21: mol_type = other RNA
ctcccacttacatcagcagtg

SEQ ID NO: 82905 - RNA, 21 nt, synthetic construct
  source 1..21: mol_type = other RNA
ctcccagaactcgaagccttc

SEQ ID NO: 82906 - RNA, 21 nt, synthetic construct
  source 1..21: mol_type = other RNA
ctcccagcatgaagccctcta

SEQ ID NO: 82907 - RNA, 21 nt, synthetic construct
  source 1..21: mol_type = other RNA
ctcccagccaaacagttttta

SEQ ID NO: 82908 - RNA, 21 nt, synthetic construct
  source 1..21: mol_type = other RNA
ctcccagcctcaaacaatcct

SEQ ID NO: 82909 - RNA, 21 nt, synthetic construct
  source 1..21: mol_type = other RNA
ctcccagctgtccaacaaggg

SEQ ID NO: 82910 - RNA, 21 nt, synthetic construct
  source 1..21: mol_type = other RNA
ctcccaggtcagtagtacagt

SEQ ID NO: 82911 - RNA, 21 nt, synthetic construct
  source 1..21: mol_type = other RNA
ctcccagtgcccacctgacaa

SEQ ID NO: 82912 - RNA, 21 nt, synthetic construct
  source 1..21: mol_type = other RNA
ctcccagttgtcagaattaga

SEQ ID NO: 82913 - RNA, 21 nt, synthetic construct
  source 1..21: mol_type = other RNA
ctcccataccacctgtcagaa

SEQ ID NO: 82914 - RNA, 21 nt, synthetic construct
  source 1..21: mol_type = other RNA
ctcccatatctacatgtacgc

SEQ ID NO: 82915 - RNA, 21 nt, synthetic construct
  source 1..21: mol_type = other RNA
ctcccatcactagaatgtgac

SEQ ID NO: 82916 - RNA, 21 nt, synthetic construct
  source 1..21: mol_type = other RNA
ctcccatgattcaaaatgtga

SEQ ID NO: 82917 - RNA, 21 nt, synthetic construct
  source 1..21: mol_type = other RNA
ctcccatgcattcgtccctaa

SEQ ID NO: 82918 - RNA, 21 nt, synthetic construct
  source 1..21: mol_type = other RNA
ctcccatttgggactgagaca

SEQ ID NO: 82919 - RNA, 21 nt, synthetic construct
  source 1..21: mol_type = other RNA
ctccccaaagatattagctac

SEQ ID NO: 82920 - RNA, 21 nt, synthetic construct
  source 1..21: mol_type = other RNA
ctccccaagtaaacctcaagt

SEQ ID NO: 82921 - RNA, 21 nt, synthetic construct
  source 1..21: mol_type = other RNA
ctccccagtggttgtggaatt

SEQ ID NO: 82922 - RNA, 21 nt, synthetic construct
  source 1..21: mol_type = other RNA
ctccccatgcaggagaaacat

SEQ ID NO: 82923 - RNA, 21 nt, synthetic construct
  source 1..21: mol_type = other RNA
ctccccattccctgtctgtga

SEQ ID NO: 82924 - RNA, 21 nt, synthetic construct
  source 1..21: mol_type = other RNA
ctcccccaggtggttctgcct

SEQ ID NO: 82925 - RNA, 21 nt, synthetic construct
  source 1..21: mol_type = other RNA
ctcccccgaatcctttgcttc

SEQ ID NO: 82926 - RNA, 21 nt, synthetic construct
  source 1..21: mol_type = other RNA
ctcccccgcccgtccctgctt

SEQ ID NO: 82927 - RNA, 21 nt, synthetic construct
  source 1..21: mol_type = other RNA
ctcccccgggacaatgccagg

SEQ ID NO: 82928 - RNA, 21 nt, synthetic construct
  source 1..21: mol_type = other RNA
ctcccccggggctcgcagcat

SEQ ID NO: 82929 - RNA, 21 nt, synthetic construct
  source 1..21: mol_type = other RNA
ctccccggatgattctaatgt

SEQ ID NO: 82930 - RNA, 21 nt, synthetic construct
  source 1..21: mol_type = other RNA
ctccccttgacgaagtcacat

SEQ ID NO: 82931 - RNA, 21 nt, synthetic construct
  source 1..21: mol_type = other RNA
ctcccgagtagttgtaactac

SEQ ID NO: 82932 - RNA, 21 nt, synthetic construct
  source 1..21: mol_type = other RNA
ctcccgagtatctaggagtac

SEQ ID NO: 82933 - RNA, 21 nt, synthetic construct
  source 1..21: mol_type = other RNA
ctcccgatttcagttaactta

SEQ ID NO: 82934 - RNA, 21 nt, synthetic construct
  source 1..21: mol_type = other RNA
ctcccggctaagatgaggtct

SEQ ID NO: 82935 - RNA, 21 nt, synthetic construct
  source 1..21: mol_type = other RNA
ctcccgggtccaggcagttct

SEQ ID NO: 82936 - RNA, 21 nt, synthetic construct
  source 1..21: mol_type = other RNA
ctcccgggtttaagcgattct

SEQ ID NO: 82937 - RNA, 21 nt, synthetic construct
  source 1..21: mol_type = other RNA
ctccctaaatacacatgttga

SEQ ID NO: 82938 - RNA, 21 nt, synthetic construct
  source 1..21: mol_type = other RNA
ctccctaaccaggcccggggc

SEQ ID NO: 82939 - RNA, 21 nt, synthetic construct
  source 1..21: mol_type = other RNA
ctccctaccacccgtccaatt

SEQ ID NO: 82940 - RNA, 21 nt, synthetic construct
  source 1..21: mol_type = other RNA
ctccctacctggcagtctagg

SEQ ID NO: 82941 - RNA, 21 nt, synthetic construct
  source 1..21: mol_type = other RNA
ctccctcacagtccactcacc

SEQ ID NO: 82942 - RNA, 21 nt, synthetic construct
  source 1..21: mol_type = other RNA
ctccctcactaagtcagaatt

SEQ ID NO: 82943 - RNA, 21 nt, synthetic construct
  source 1..21: mol_type = other RNA
ctccctccccccacggtctcc

SEQ ID NO: 82944 - RNA, 21 nt, synthetic construct
  source 1..21: mol_type = other RNA
ctccctcggccacagcagggc

SEQ ID NO: 82945 - RNA, 21 nt, synthetic construct
  source 1..21: mol_type = other RNA
ctccctctatggcaggcacct

SEQ ID NO: 82946 - RNA, 21 nt, synthetic construct
  source 1..21: mol_type = other RNA
ctccctctgtgtgcatgcatg

SEQ ID NO: 82947 - RNA, 21 nt, synthetic construct
  source 1..21: mol_type = other RNA
ctccctcttcgctcttttaaa

SEQ ID NO: 82948 - RNA, 21 nt, synthetic construct
  source 1..21: mol_type = other RNA
ctccctgaaattgtcagaaaa

SEQ ID NO: 82949 - RNA, 21 nt, synthetic construct
  source 1..21: mol_type = other RNA
ctccctgccctgtgaaaatca

SEQ ID NO: 82950 - RNA, 21 nt, synthetic construct
  source 1..21: mol_type = other RNA
ctccctgctttaaaacactgg

SEQ ID NO: 82951 - RNA, 21 nt, synthetic construct
  source 1..21: mol_type = other RNA
ctccctggagaggcaaaggcc

SEQ ID NO: 82952 - RNA, 21 nt, synthetic construct
  source 1..21: mol_type = other RNA
ctccctggttcaagctatgct

SEQ ID NO: 82953 - RNA, 21 nt, synthetic construct
  source 1..21: mol_type = other RNA
ctccctgtctttctgtctgct

SEQ ID NO: 82954 - RNA, 21 nt, synthetic construct
  source 1..21: mol_type = other RNA
ctccctgtgcgtgaatctgtt

SEQ ID NO: 82955 - RNA, 21 nt, synthetic construct
  source 1..21: mol_type = other RNA
ctcccttcacaaagccctcag

SEQ ID NO: 82956 - RNA, 21 nt, synthetic construct
  source 1..21: mol_type = other RNA
ctcccttcagcctgtgtcagt

SEQ ID NO: 82957 - RNA, 21 nt, synthetic construct
  source 1..21: mol_type = other RNA
ctcccttccagcgtgtgcatg

SEQ ID NO: 82958 - RNA, 21 nt, synthetic construct
  source 1..21: mol_type = other RNA
ctcccttcctgttctttgtta

SEQ ID NO: 82959 - RNA, 21 nt, synthetic construct
  source 1..21: mol_type = other RNA
ctcccttctattccattgttc

SEQ ID NO: 82960 - RNA, 21 nt, synthetic construct
  source 1..21: mol_type = other RNA
ctccctttttaggtagggata

SEQ ID NO: 82961 - RNA, 21 nt, synthetic construct
  source 1..21: mol_type = other RNA
ctccgcctccctggttcaagc

SEQ ID NO: 82962 - RNA, 21 nt, synthetic construct
  source 1..21: mol_type = other RNA
ctccgcctcctggtgggttca

SEQ ID NO: 82963 - RNA, 21 nt, synthetic construct
  source 1..21: mol_type = other RNA
ctccgggcctcccacctgcga

SEQ ID NO: 82964 - RNA, 21 nt, synthetic construct
  source 1..21: mol_type = other RNA
ctccgggtaaaaagcctgctt

SEQ ID NO: 82965 - RNA, 21 nt, synthetic construct
  source 1..21: mol_type = other RNA
ctccgtagctgtcgctctcct

SEQ ID NO: 82966 - RNA, 21 nt, synthetic construct
  source 1..21: mol_type = other RNA
ctccgtttttcaggttcaagc

SEQ ID NO: 82967 - RNA, 21 nt, synthetic construct
  source 1..21: mol_type = other RNA
ctcctaaaacatggtccacag

SEQ ID NO: 82968 - RNA, 21 nt, synthetic construct
  source 1..21: mol_type = other RNA
ctcctaagtcttcttctaagc

SEQ ID NO: 82969 - RNA, 21 nt, synthetic construct
  source 1..21: mol_type = other RNA
ctcctaagttttgggggaaga

SEQ ID NO: 82970 - RNA, 21 nt, synthetic construct
  source 1..21: mol_type = other RNA
ctcctaccttccaaagtatgc

SEQ ID NO: 82971 - RNA, 21 nt, synthetic construct
  source 1..21: mol_type = other RNA
ctcctagatactcgggaggct

SEQ ID NO: 82972 - RNA, 21 nt, synthetic construct
  source 1..21: mol_type = other RNA
ctcctagattgaccttctact

SEQ ID NO: 82973 - RNA, 21 nt, synthetic construct
  source 1..21: mol_type = other RNA
ctcctatagttaagtctgaaa

SEQ ID NO: 82974 - RNA, 21 nt, synthetic construct
  source 1..21: mol_type = other RNA
ctcctatattgtcaatgggga

SEQ ID NO: 82975 - RNA, 21 nt, synthetic construct
  source 1..21: mol_type = other RNA
ctcctcagaaggccaaggcag

SEQ ID NO: 82976 - RNA, 21 nt, synthetic construct
  source 1..21: mol_type = other RNA
ctcctcattcacactagtcac

SEQ ID NO: 82977 - RNA, 21 nt, synthetic construct
  source 1..21: mol_type = other RNA
ctcctccaacccattccaggt

SEQ ID NO: 82978 - RNA, 21 nt, synthetic construct
  source 1..21: mol_type = other RNA
ctcctccaaggctgcccgctc

SEQ ID NO: 82979 - RNA, 21 nt, synthetic construct
  source 1..21: mol_type = other RNA
ctcctcccacttacatcagca

SEQ ID NO: 82980 - RNA, 21 nt, synthetic construct
  source 1..21: mol_type = other RNA
ctcctcccggctaagatgagg

SEQ ID NO: 82981 - RNA, 21 nt, synthetic construct
  source 1..21: mol_type = other RNA
ctcctccggggacccagtgcc

SEQ ID NO: 82982 - RNA, 21 nt, synthetic construct
  source 1..21: mol_type = other RNA
ctcctcctcctggccacatgc

SEQ ID NO: 82983 - RNA, 21 nt, synthetic construct
  source 1..21: mol_type = other RNA
ctcctcctctacaagttttaa

SEQ ID NO: 82984 - RNA, 21 nt, synthetic construct
  source 1..21: mol_type = other RNA
ctcctcctggccacatgcttc

SEQ ID NO: 82985 - RNA, 21 nt, synthetic construct
  source 1..21: mol_type = other RNA
ctcctctacaagttttaactt

SEQ ID NO: 82986 - RNA, 21 nt, synthetic construct
  source 1..21: mol_type = other RNA
ctcctctcccgccggagtccg

SEQ ID NO: 82987 - RNA, 21 nt, synthetic construct
  source 1..21: mol_type = other RNA
ctcctctgactttatggtatc

SEQ ID NO: 82988 - RNA, 21 nt, synthetic construct
  source 1..21: mol_type = other RNA
ctcctctggacattatcctat

SEQ ID NO: 82989 - RNA, 21 nt, synthetic construct
  source 1..21: mol_type = other RNA
ctcctctggccctccatttcc

SEQ ID NO: 82990 - RNA, 21 nt, synthetic construct
  source 1..21: mol_type = other RNA
ctcctctttcatatctgattt

SEQ ID NO: 82991 - RNA, 21 nt, synthetic construct
  source 1..21: mol_type = other RNA
ctcctgaacaaaatttttgca

SEQ ID NO: 82992 - RNA, 21 nt, synthetic construct
  source 1..21: mol_type = other RNA
ctcctgacctcaagcgatcca

SEQ ID NO: 82993 - RNA, 21 nt, synthetic construct
  source 1..21: mol_type = other RNA
ctcctgacctcagatatccac

SEQ ID NO: 82994 - RNA, 21 nt, synthetic construct
  source 1..21: mol_type = other RNA
ctcctgagaaccggaacttga

SEQ ID NO: 82995 - RNA, 21 nt, synthetic construct
  source 1..21: mol_type = other RNA
ctcctgagcaaggaaggaaag

SEQ ID NO: 82996 - RNA, 21 nt, synthetic construct
  source 1..21: mol_type = other RNA
ctcctgcactcaagcaatcct

SEQ ID NO: 82997 - RNA, 21 nt, synthetic construct
  source 1..21: mol_type = other RNA
ctcctgcagacatgcacgaga

SEQ ID NO: 82998 - RNA, 21 nt, synthetic construct
  source 1..21: mol_type = other RNA
ctcctgcatggggagttttag

SEQ ID NO: 82999 - RNA, 21 nt, synthetic construct
  source 1..21: mol_type = other RNA
ctcctgccttcctgacctctg

SEQ ID NO: 83000 - RNA, 21 nt, synthetic construct
  source 1..21: mol_type = other RNA
ctcctgccttggccttctgag

SEQ ID NO: 83001 - RNA, 21 nt, synthetic construct
  source 1..21: mol_type = other RNA
ctcctgcctttgttcatcatc

SEQ ID NO: 83002 - RNA, 21 nt, synthetic construct
  source 1..21: mol_type = other RNA
ctcctggccacatgcttccaa

SEQ ID NO: 83003 - RNA, 21 nt, synthetic construct
  source 1..21: mol_type = other RNA
ctcctgggaaaaggatttgtt

SEQ ID NO: 83004 - RNA, 21 nt, synthetic construct
  source 1..21: mol_type = other RNA
ctcctgggctcatctaagcct

SEQ ID NO: 83005 - RNA, 21 nt, synthetic construct
  source 1..21: mol_type = other RNA
ctcctgggttcaggtgcctcc

SEQ ID NO: 83006 - RNA, 21 nt, synthetic construct
  source 1..21: mol_type = other RNA
ctcctggtctcccagcatgaa

SEQ ID NO: 83007 - RNA, 21 nt, synthetic construct
  source 1..21: mol_type = other RNA
ctcctggtgggttcatgccat

SEQ ID NO: 83008 - RNA, 21 nt, synthetic construct
  source 1..21: mol_type = other RNA
ctcctggttttgatcatcgca

SEQ ID NO: 83009 - RNA, 21 nt, synthetic construct
  source 1..21: mol_type = other RNA
ctcctgtatgccgctggtgaa

SEQ ID NO: 83010 - RNA, 21 nt, synthetic construct
  source 1..21: mol_type = other RNA
ctcctgtgccaagtccgtgca

SEQ ID NO: 83011 - RNA, 21 nt, synthetic construct
  source 1..21: mol_type = other RNA
ctcctgtgtgcatgctcccat

SEQ ID NO: 83012 - RNA, 21 nt, synthetic construct
  source 1..21: mol_type = other RNA
ctcctgttctttggagctgta

SEQ ID NO: 83013 - RNA, 21 nt, synthetic construct
  source 1..21: mol_type = other RNA
ctccttaatccagtctatcat

SEQ ID NO: 83014 - RNA, 21 nt, synthetic construct
  source 1..21: mol_type = other RNA
ctccttaccactataatccag

SEQ ID NO: 83015 - RNA, 21 nt, synthetic construct
  source 1..21: mol_type = other RNA
ctccttcccctggtcgagctg

SEQ ID NO: 83016 - RNA, 21 nt, synthetic construct
  source 1..21: mol_type = other RNA
ctccttctgaaggcactaaca

SEQ ID NO: 83017 - RNA, 21 nt, synthetic construct
  source 1..21: mol_type = other RNA
ctccttctgcaggctgaactg

SEQ ID NO: 83018 - RNA, 21 nt, synthetic construct
  source 1..21: mol_type = other RNA
ctccttctgctcactttggga

SEQ ID NO: 83019 - RNA, 21 nt, synthetic construct
  source 1..21: mol_type = other RNA
ctccttctggaagatttctac

SEQ ID NO: 83020 - RNA, 21 nt, synthetic construct
  source 1..21: mol_type = other RNA
ctccttgcacattagaatcat

SEQ ID NO: 83021 - RNA, 21 nt, synthetic construct
  source 1..21: mol_type = other RNA
ctccttgtatggagactagta

SEQ ID NO: 83022 - RNA, 21 nt, synthetic construct
  source 1..21: mol_type = other RNA
ctcctttccttccttgctcag

SEQ ID NO: 83023 - RNA, 21 nt, synthetic construct
  source 1..21: mol_type = other RNA
ctcctttctagaatgcatccc

SEQ ID NO: 83024 - RNA, 21 nt, synthetic construct
  source 1..21: mol_type = other RNA
ctcctttctatacttcatctt

SEQ ID NO: 83025 - RNA, 21 nt, synthetic construct
  source 1..21: mol_type = other RNA
ctcctttcttaccctcacagt

SEQ ID NO: 83026 - RNA, 21 nt, synthetic construct
  source 1..21: mol_type = other RNA
ctcctttgaggtaagaacttg

SEQ ID NO: 83027 - RNA, 21 nt, synthetic construct
  source 1..21: mol_type = other RNA
ctccttttaagagtgaagaaa

SEQ ID NO: 83028 - RNA, 21 nt, synthetic construct
  source 1..21: mol_type = other RNA
ctccttttgtagagggaattt

SEQ ID NO: 83029 - RNA, 21 nt, synthetic construct
  source 1..21: mol_type = other RNA
ctcctttttatcacccttata

SEQ ID NO: 83030 - RNA, 21 nt, synthetic construct
  source 1..21: mol_type = other RNA
ctcgaaaaggaatggaattct

SEQ ID NO: 83031 - RNA, 21 nt, synthetic construct
  source 1..21: mol_type = other RNA
ctcgaactctcgacctcgtga

SEQ ID NO: 83032 - RNA, 21 nt, synthetic construct
  source 1..21: mol_type = other RNA
ctcgaagagaccacaggctct

SEQ ID NO: 83033 - RNA, 21 nt, synthetic construct
  source 1..21: mol_type = other RNA
ctcgaagcacaaccactgatg

SEQ ID NO: 83034 - RNA, 21 nt, synthetic construct
  source 1..21: mol_type = other RNA
ctcgaagccttcccctgctgt

SEQ ID NO: 83035 - RNA, 21 nt, synthetic construct
  source 1..21: mol_type = other RNA
ctcgaaggcctgcttcattcc

SEQ ID NO: 83036 - RNA, 21 nt, synthetic construct
  source 1..21: mol_type = other RNA
ctcgaagtggtgcttgaactg

SEQ ID NO: 83037 - RNA, 21 nt, synthetic construct
  source 1..21: mol_type = other RNA
ctcgacacacaatccaagttt

SEQ ID NO: 83038 - RNA, 21 nt, synthetic construct
  source 1..21: mol_type = other RNA
ctcgaccaggggaaggagtct

SEQ ID NO: 83039 - RNA, 21 nt, synthetic construct
  source 1..21: mol_type = other RNA
ctcgaccccctgggctcaagc

SEQ ID NO: 83040 - RNA, 21 nt, synthetic construct
  source 1..21: mol_type = other RNA
ctcgagctcctgacctcagat

SEQ ID NO: 83041 - RNA, 21 nt, synthetic construct
  source 1..21: mol_type = other RNA
ctcgagggtagcttttcctgc

SEQ ID NO: 83042 - RNA, 21 nt, synthetic construct
  source 1..21: mol_type = other RNA
ctcgagtaaaaagaatgaata

SEQ ID NO: 83043 - RNA, 21 nt, synthetic construct
  source 1..21: mol_type = other RNA
ctcgatggacatttaggttgt

SEQ ID NO: 83044 - RNA, 21 nt, synthetic construct
  source 1..21: mol_type = other RNA
ctcgcactccacttcccactg

SEQ ID NO: 83045 - RNA, 21 nt, synthetic construct
  source 1..21: mol_type = other RNA
ctcgcagcatccctgccgcgc

SEQ ID NO: 83046 - RNA, 21 nt, synthetic construct
  source 1..21: mol_type = other RNA
ctcgcagcggggatgctcagg

SEQ ID NO: 83047 - RNA, 21 nt, synthetic construct
  source 1..21: mol_type = other RNA
ctcgcaggtgggaggcccgga

SEQ ID NO: 83048 - RNA, 21 nt, synthetic construct
  source 1..21: mol_type = other RNA
ctcgccgtctccctcggccac

SEQ ID NO: 83049 - RNA, 21 nt, synthetic construct
  source 1..21: mol_type = other RNA
ctcgctctgtcgcccaggcgg

SEQ ID NO: 83050 - RNA, 21 nt, synthetic construct
  source 1..21: mol_type = other RNA
ctcgctcttggcttttggcag

SEQ ID NO: 83051 - RNA, 21 nt, synthetic construct
  source 1..21: mol_type = other RNA
ctcggatttaagagaggaagt

SEQ ID NO: 83052 - RNA, 21 nt, synthetic construct
  source 1..21: mol_type = other RNA
ctcggcacagctctcatgagt

SEQ ID NO: 83053 - RNA, 21 nt, synthetic construct
  source 1..21: mol_type = other RNA
ctcggccaaccattactcttc

SEQ ID NO: 83054 - RNA, 21 nt, synthetic construct
  source 1..21: mol_type = other RNA
ctcggccacagcagggctcct

SEQ ID NO: 83055 - RNA, 21 nt, synthetic construct
  source 1..21: mol_type = other RNA
ctcggccgacccagcccccaa

SEQ ID NO: 83056 - RNA, 21 nt, synthetic construct
  source 1..21: mol_type = other RNA
ctcggcctctactgactccct

SEQ ID NO: 83057 - RNA, 21 nt, synthetic construct
  source 1..21: mol_type = other RNA
ctcggctctgtcacccttgta

SEQ ID NO: 83058 - RNA, 21 nt, synthetic construct
  source 1..21: mol_type = other RNA
ctcggcttactgcaacctccg

SEQ ID NO: 83059 - RNA, 21 nt, synthetic construct
  source 1..21: mol_type = other RNA
ctcgggttcaagccccagttc

SEQ ID NO: 83060 - RNA, 21 nt, synthetic construct
  source 1..21: mol_type = other RNA
ctcggtatgtacccaatggat

SEQ ID NO: 83061 - RNA, 21 nt, synthetic construct
  source 1..21: mol_type = other RNA
ctcggtcattctggagtgttt

SEQ ID NO: 83062 - RNA, 21 nt, synthetic construct
  source 1..21: mol_type = other RNA
ctcggtctacggacgcaggca

SEQ ID NO: 83063 - RNA, 21 nt, synthetic construct
  source 1..21: mol_type = other RNA
ctcggtctcaaaacaaacaaa

SEQ ID NO: 83064 - RNA, 21 nt, synthetic construct
  source 1..21: mol_type = other RNA
ctcgtaaaagctaatctactt

SEQ ID NO: 83065 - RNA, 21 nt, synthetic construct
  source 1..21: mol_type = other RNA
ctcgtaatgcgatgatcaaaa

SEQ ID NO: 83066 - RNA, 21 nt, synthetic construct
  source 1..21: mol_type = other RNA
ctcgtagttttttggtagata

SEQ ID NO: 83067 - RNA, 21 nt, synthetic construct
  source 1..21: mol_type = other RNA
ctcgtgaatttggtattctta

SEQ ID NO: 83068 - RNA, 21 nt, synthetic construct
  source 1..21: mol_type = other RNA
ctcgtgcatgtctgcaggagc

SEQ ID NO: 83069 - RNA, 21 nt, synthetic construct
  source 1..21: mol_type = other RNA
ctcgtggcctcaagcagtcct

SEQ ID NO: 83070 - RNA, 21 nt, synthetic construct
  source 1..21: mol_type = other RNA
ctcgtggttatagccataaga

SEQ ID NO: 83071 - RNA, 21 nt, synthetic construct
  source 1..21: mol_type = other RNA
ctcgtgtatgatttctaggcc

SEQ ID NO: 83072 - RNA, 21 nt, synthetic construct
  source 1..21: mol_type = other RNA
ctcgtgtgagctctagccttg

SEQ ID NO: 83073 - RNA, 21 nt, synthetic construct
  source 1..21: mol_type = other RNA
ctcgtgtgtctcataaagccg

SEQ ID NO: 83074 - RNA, 21 nt, synthetic construct
  source 1..21: mol_type = other RNA
ctcgttcatgttcaaggtgtt

SEQ ID NO: 83075 - RNA, 21 nt, synthetic construct
  source 1..21: mol_type = other RNA
ctcgttttcaacaaaggttga

SEQ ID NO: 83076 - RNA, 21 nt, synthetic construct
  source 1..21: mol_type = other RNA
ctctaaaaacatccattactc

SEQ ID NO: 83077 - RNA, 21 nt, synthetic construct
  source 1..21: mol_type = other RNA
ctctaaactagttcaaccatt

SEQ ID NO: 83078 - RNA, 21 nt, synthetic construct
  source 1..21: mol_type = other RNA
ctctaaagtctatgctcttgg

SEQ ID NO: 83079 - RNA, 21 nt, synthetic construct
  source 1..21: mol_type = other RNA
ctctaaataggtattcatgct

SEQ ID NO: 83080 - RNA, 21 nt, synthetic construct
  source 1..21: mol_type = other RNA
ctctaacaaaactaggctgtc

SEQ ID NO: 83081 - RNA, 21 nt, synthetic construct
  source 1..21: mol_type = other RNA
ctctaagtcagcctgggcaca

SEQ ID NO: 83082 - RNA, 21 nt, synthetic construct
  source 1..21: mol_type = other RNA
ctctaataaaagctggagtta

SEQ ID NO: 83083 - RNA, 21 nt, synthetic construct
  source 1..21: mol_type = other RNA
ctctaataacagcctaagcaa

SEQ ID NO: 83084 - RNA, 21 nt, synthetic construct
  source 1..21: mol_type = other RNA
ctctaatagctagtgatgttg

SEQ ID NO: 83085 - RNA, 21 nt, synthetic construct
  source 1..21: mol_type = other RNA
ctctaatagttcacctctccg

SEQ ID NO: 83086 - RNA, 21 nt, synthetic construct
  source 1..21: mol_type = other RNA
ctctaatatggttcctagaaa

SEQ ID NO: 83087 - RNA, 21 nt, synthetic construct
  source 1..21: mol_type = other RNA
ctctaatcaggttgggcttat

SEQ ID NO: 83088 - RNA, 21 nt, synthetic construct
  source 1..21: mol_type = other RNA
ctctaatgcaagagttaaaac

SEQ ID NO: 83089 - RNA, 21 nt, synthetic construct
  source 1..21: mol_type = other RNA
ctctaatggggaaatagatgc

SEQ ID NO: 83090 - RNA, 21 nt, synthetic construct
  source 1..21: mol_type = other RNA
ctctaatgtaaacagcatact

SEQ ID NO: 83091 - RNA, 21 nt, synthetic construct
  source 1..21: mol_type = other RNA
ctctacaaaaggaggaactaa

SEQ ID NO: 83092 - RNA, 21 nt, synthetic construct
  source 1..21: mol_type = other RNA
ctctacaaaccttcttatttc

SEQ ID NO: 83093 - RNA, 21 nt, synthetic construct
  source 1..21: mol_type = other RNA
ctctacaagttttaacttaag

SEQ ID NO: 83094 - RNA, 21 nt, synthetic construct
  source 1..21: mol_type = other RNA
ctctacacaaaaatccagata

SEQ ID NO: 83095 - RNA, 21 nt, synthetic construct
  source 1..21: mol_type = other RNA
ctctacagggaaccgtaactt

SEQ ID NO: 83096 - RNA, 21 nt, synthetic construct
  source 1..21: mol_type = other RNA
ctctacagttaacaatactgc

SEQ ID NO: 83097 - RNA, 21 nt, synthetic construct
  source 1..21: mol_type = other RNA
ctctacatcacagacagggaa

SEQ ID NO: 83098 - RNA, 21 nt, synthetic construct
  source 1..21: mol_type = other RNA
ctctacatctggatcctgtct

SEQ ID NO: 83099 - RNA, 21 nt, synthetic construct
  source 1..21: mol_type = other RNA
ctctaccaaaatataaatacg

SEQ ID NO: 83100 - RNA, 21 nt, synthetic construct
  source 1..21: mol_type = other RNA
ctctacccagcactctgaatc

SEQ ID NO: 83101 - RNA, 21 nt, synthetic construct
  source 1..21: mol_type = other RNA
ctctaccctttccaaattcaa

SEQ ID NO: 83102 - RNA, 21 nt, synthetic construct
  source 1..21: mol_type = other RNA
ctctactctgcctcagttgac

SEQ ID NO: 83103 - RNA, 21 nt, synthetic construct
  source 1..21: mol_type = other RNA
ctctactgactccctttttag

SEQ ID NO: 83104 - RNA, 21 nt, synthetic construct
  source 1..21: mol_type = other RNA
ctctactttcacataaggtat

SEQ ID NO: 83105 - RNA, 21 nt, synthetic construct
  source 1..21: mol_type = other RNA
ctctagaacttatgcatcttg

SEQ ID NO: 83106 - RNA, 21 nt, synthetic construct
  source 1..21: mol_type = other RNA
ctctagcaaacaaacacactg

SEQ ID NO: 83107 - RNA, 21 nt, synthetic construct
  source 1..21: mol_type = other RNA
ctctagcccagcttccgggac

SEQ ID NO: 83108 - RNA, 21 nt, synthetic construct
  source 1..21: mol_type = other RNA
ctctagccttgtactgtgtgg

SEQ ID NO: 83109 - RNA, 21 nt, synthetic construct
  source 1..21: mol_type = other RNA
ctctagctccccattccctgt

SEQ ID NO: 83110 - RNA, 21 nt, synthetic construct
  source 1..21: mol_type = other RNA
ctctaggcttaaaattcttcc

SEQ ID NO: 83111 - RNA, 21 nt, synthetic construct
  source 1..21: mol_type = other RNA
ctctagtggtgcttaattcaa

SEQ ID NO: 83112 - RNA, 21 nt, synthetic construct
  source 1..21: mol_type = other RNA
ctctagttgcacggtgaagaa

SEQ ID NO: 83113 - RNA, 21 nt, synthetic construct
  source 1..21: mol_type = other RNA
ctctagttttccagtatattc

SEQ ID NO: 83114 - RNA, 21 nt, synthetic construct
  source 1..21: mol_type = other RNA
ctctataattctgccttcaat

SEQ ID NO: 83115 - RNA, 21 nt, synthetic construct
  source 1..21: mol_type = other RNA
ctctatccaccactccacctt

SEQ ID NO: 83116 - RNA, 21 nt, synthetic construct
  source 1..21: mol_type = other RNA
ctctatgcagaaatctaccaa

SEQ ID NO: 83117 - RNA, 21 nt, synthetic construct
  source 1..21: mol_type = other RNA
ctctatggcaggcaccttcag

SEQ ID NO: 83118 - RNA, 21 nt, synthetic construct
  source 1..21: mol_type = other RNA
ctctatggcatttgagggtta

SEQ ID NO: 83119 - RNA, 21 nt, synthetic construct
  source 1..21: mol_type = other RNA
ctctattccaaatgtctgtct

SEQ ID NO: 83120 - RNA, 21 nt, synthetic construct
  source 1..21: mol_type = other RNA
ctctattttcctaaaactccc

SEQ ID NO: 83121 - RNA, 21 nt, synthetic construct
  source 1..21: mol_type = other RNA
ctctatttttgtctggtggac

SEQ ID NO: 83122 - RNA, 21 nt, synthetic construct
  source 1..21: mol_type = other RNA
ctctcaaataatttggcaaaa

SEQ ID NO: 83123 - RNA, 21 nt, synthetic construct
  source 1..21: mol_type = other RNA
ctctcaacacttcagtggtaa

SEQ ID NO: 83124 - RNA, 21 nt, synthetic construct
  source 1..21: mol_type = other RNA
ctctcaactggcccctccatg

SEQ ID NO: 83125 - RNA, 21 nt, synthetic construct
  source 1..21: mol_type = other RNA
ctctcaagaaggtatcatcgg

SEQ ID NO: 83126 - RNA, 21 nt, synthetic construct
  source 1..21: mol_type = other RNA
ctctcaagcaatctgaaacga

SEQ ID NO: 83127 - RNA, 21 nt, synthetic construct
  source 1..21: mol_type = other RNA
ctctcaagtaattgttttccc

SEQ ID NO: 83128 - RNA, 21 nt, synthetic construct
  source 1..21: mol_type = other RNA
ctctcaatagtgtcctttgat

SEQ ID NO: 83129 - RNA, 21 nt, synthetic construct
  source 1..21: mol_type = other RNA
ctctcaattaatgcccaatca

SEQ ID NO: 83130 - RNA, 21 nt, synthetic construct
  source 1..21: mol_type = other RNA
ctctcactccaaagcaaacgt

SEQ ID NO: 83131 - RNA, 21 nt, synthetic construct
  source 1..21: mol_type = other RNA
ctctcagaaattataagcttc

SEQ ID NO: 83132 - RNA, 21 nt, synthetic construct
  source 1..21: mol_type = other RNA
ctctcagagggaaactgtttt

SEQ ID NO: 83133 - RNA, 21 nt, synthetic construct
  source 1..21: mol_type = other RNA
ctctcagatctgagtttgctc

SEQ ID NO: 83134 - RNA, 21 nt, synthetic construct
  source 1..21: mol_type = other RNA
ctctcagtggccctgttggcc

SEQ ID NO: 83135 - RNA, 21 nt, synthetic construct
  source 1..21: mol_type = other RNA
ctctcagtggtgcttttgctg

SEQ ID NO: 83136 - RNA, 21 nt, synthetic construct
  source 1..21: mol_type = other RNA
ctctcatctaaattaagcttc

SEQ ID NO: 83137 - RNA, 21 nt, synthetic construct
  source 1..21: mol_type = other RNA
ctctcatgagtcctgaaaatt

SEQ ID NO: 83138 - RNA, 21 nt, synthetic construct
  source 1..21: mol_type = other RNA
ctctcatgtcagagacacata

SEQ ID NO: 83139 - RNA, 21 nt, synthetic construct
  source 1..21: mol_type = other RNA
ctctcatgttgggtaaaaata

SEQ ID NO: 83140 - RNA, 21 nt, synthetic construct
  source 1..21: mol_type = other RNA
ctctccaacagaagaagtttc

SEQ ID NO: 83141 - RNA, 21 nt, synthetic construct
  source 1..21: mol_type = other RNA
ctctccaaggtacaattacac

SEQ ID NO: 83142 - RNA, 21 nt, synthetic construct
  source 1..21: mol_type = other RNA
ctctccagggaggaatccttc

SEQ ID NO: 83143 - RNA, 21 nt, synthetic construct
  source 1..21: mol_type = other RNA
ctctcccaccatctctctgcc

SEQ ID NO: 83144 - RNA, 21 nt, synthetic construct
  source 1..21: mol_type = other RNA
ctctccccaagtaaacctcaa

SEQ ID NO: 83145 - RNA, 21 nt, synthetic construct
  source 1..21: mol_type = other RNA
ctctcccccgaatcctttgct

SEQ ID NO: 83146 - RNA, 21 nt, synthetic construct
  source 1..21: mol_type = other RNA
ctctccccttgacgaagtcac

SEQ ID NO: 83147 - RNA, 21 nt, synthetic construct
  source 1..21: mol_type = other RNA
ctctccctgccctgtgaaaat

SEQ ID NO: 83148 - RNA, 21 nt, synthetic construct
  source 1..21: mol_type = other RNA
ctctccctgtctttctgtctg

SEQ ID NO: 83149 - RNA, 21 nt, synthetic construct
  source 1..21: mol_type = other RNA
ctctcccttcctgttctttgt

SEQ ID NO: 83150 - RNA, 21 nt, synthetic construct
  source 1..21: mol_type = other RNA
ctctccgggtaaaaagcctgc

SEQ ID NO: 83151 - RNA, 21 nt, synthetic construct
  source 1..21: mol_type = other RNA
ctctcctgtgccaagtccgtg

SEQ ID NO: 83152 - RNA, 21 nt, synthetic construct
  source 1..21: mol_type = other RNA
ctctccttgcacattagaatc

SEQ ID NO: 83153 - RNA, 21 nt, synthetic construct
  source 1..21: mol_type = other RNA
ctctcctttgaggtaagaact

SEQ ID NO: 83154 - RNA, 21 nt, synthetic construct
  source 1..21: mol_type = other RNA
ctctcgatggacatttaggtt

SEQ ID NO: 83155 - RNA, 21 nt, synthetic construct
  source 1..21: mol_type = other RNA
ctctctaaaaacatccattac

SEQ ID NO: 83156 - RNA, 21 nt, synthetic construct
  source 1..21: mol_type = other RNA
ctctctatccaccactccacc

SEQ ID NO: 83157 - RNA, 21 nt, synthetic construct
  source 1..21: mol_type = other RNA
ctctctattccaaatgtctgt

SEQ ID NO: 83158 - RNA, 21 nt, synthetic construct
  source 1..21: mol_type = other RNA
ctctctcaactggcccctcca

SEQ ID NO: 83159 - RNA, 21 nt, synthetic construct
  source 1..21: mol_type = other RNA
ctctctcaagcaatctgaaac

SEQ ID NO: 83160 - RNA, 21 nt, synthetic construct
  source 1..21: mol_type = other RNA
ctctctccctgccctgtgaaa

SEQ ID NO: 83161 - RNA, 21 nt, synthetic construct
  source 1..21: mol_type = other RNA
ctctctccctgtctttctgtc

SEQ ID NO: 83162 - RNA, 21 nt, synthetic construct
  source 1..21: mol_type = other RNA
ctctctctccctgtctttctg

SEQ ID NO: 83163 - RNA, 21 nt, synthetic construct
  source 1..21: mol_type = other RNA
ctctctctctccctgtctttc

SEQ ID NO: 83164 - RNA, 21 nt, synthetic construct
  source 1..21: mol_type = other RNA
ctctctctgcctcggcacagc

SEQ ID NO: 83165 - RNA, 21 nt, synthetic construct
  source 1..21: mol_type = other RNA
ctctctctgcttcactaactt

SEQ ID NO: 83166 - RNA, 21 nt, synthetic construct
  source 1..21: mol_type = other RNA
ctctctctttctggggatgct

SEQ ID NO: 83167 - RNA, 21 nt, synthetic construct
  source 1..21: mol_type = other RNA
ctctctgaaattagctaagta

SEQ ID NO: 83168 - RNA, 21 nt, synthetic construct
  source 1..21: mol_type = other RNA
ctctctgatggaacggcttaa

SEQ ID NO: 83169 - RNA, 21 nt, synthetic construct
  source 1..21: mol_type = other RNA
ctctctgcctcaaaatcaaca

SEQ ID NO: 83170 - RNA, 21 nt, synthetic construct
  source 1..21: mol_type = other RNA
ctctctgcctcggcacagctc

SEQ ID NO: 83171 - RNA, 21 nt, synthetic construct
  source 1..21: mol_type = other RNA
ctctctgcttcactaacttta

SEQ ID NO: 83172 - RNA, 21 nt, synthetic construct
  source 1..21: mol_type = other RNA
ctctctggctgcaattgcgca

SEQ ID NO: 83173 - RNA, 21 nt, synthetic construct
  source 1..21: mol_type = other RNA
ctctctgggcttcactttcgt

SEQ ID NO: 83174 - RNA, 21 nt, synthetic construct
  source 1..21: mol_type = other RNA
ctctcttaaatccgagacaag

SEQ ID NO: 83175 - RNA, 21 nt, synthetic construct
  source 1..21: mol_type = other RNA
ctctcttcaccaactgaagcg

SEQ ID NO: 83176 - RNA, 21 nt, synthetic construct
  source 1..21: mol_type = other RNA
ctctcttccaaataatcccgc

SEQ ID NO: 83177 - RNA, 21 nt, synthetic construct
  source 1..21: mol_type = other RNA
ctctcttcccccaaaacttag

SEQ ID NO: 83178 - RNA, 21 nt, synthetic construct
  source 1..21: mol_type = other RNA
ctctcttgaccttagttttca

SEQ ID NO: 83179 - RNA, 21 nt, synthetic construct
  source 1..21: mol_type = other RNA
ctctcttgcccaagctggtcc

SEQ ID NO: 83180 - RNA, 21 nt, synthetic construct
  source 1..21: mol_type = other RNA
ctctcttgcctaggctggagt

SEQ ID NO: 83181 - RNA, 21 nt, synthetic construct
  source 1..21: mol_type = other RNA
ctctcttggaatgtgcacctc

SEQ ID NO: 83182 - RNA, 21 nt, synthetic construct
  source 1..21: mol_type = other RNA
ctctcttgttgaggatgactg

SEQ ID NO: 83183 - RNA, 21 nt, synthetic construct
  source 1..21: mol_type = other RNA
ctctctttaattatgagcatt

SEQ ID NO: 83184 - RNA, 21 nt, synthetic construct
  source 1..21: mol_type = other RNA
ctctctttaggaagcttcctt

SEQ ID NO: 83185 - RNA, 21 nt, synthetic construct
  source 1..21: mol_type = other RNA
ctctctttctggggatgctgt

SEQ ID NO: 83186 - RNA, 21 nt, synthetic construct
  source 1..21: mol_type = other RNA
ctctgaaattagctaagtatg

SEQ ID NO: 83187 - RNA, 21 nt, synthetic construct
  source 1..21: mol_type = other RNA
ctctgaagacatgctgaggcc

SEQ ID NO: 83188 - RNA, 21 nt, synthetic construct
  source 1..21: mol_type = other RNA
ctctgaagagtctatctttgg

SEQ ID NO: 83189 - RNA, 21 nt, synthetic construct
  source 1..21: mol_type = other RNA
ctctgaatcacctcaaggcag

SEQ ID NO: 83190 - RNA, 21 nt, synthetic construct
  source 1..21: mol_type = other RNA
ctctgaattctctggaataga

SEQ ID NO: 83191 - RNA, 21 nt, synthetic construct
  source 1..21: mol_type = other RNA
ctctgacatgagagctaaggg

SEQ ID NO: 83192 - RNA, 21 nt, synthetic construct
  source 1..21: mol_type = other RNA
ctctgacattggttattcatg

SEQ ID NO: 83193 - RNA, 21 nt, synthetic construct
  source 1..21: mol_type = other RNA
ctctgaccattgtgtggacac

SEQ ID NO: 83194 - RNA, 21 nt, synthetic construct
  source 1..21: mol_type = other RNA
ctctgacgtttaaatgagtta

SEQ ID NO: 83195 - RNA, 21 nt, synthetic construct
  source 1..21: mol_type = other RNA
ctctgacttcattcttgacat

SEQ ID NO: 83196 - RNA, 21 nt, synthetic construct
  source 1..21: mol_type = other RNA
ctctgactttatggtatcact

SEQ ID NO: 83197 - RNA, 21 nt, synthetic construct
  source 1..21: mol_type = other RNA
ctctgagacaggatccagatg

SEQ ID NO: 83198 - RNA, 21 nt, synthetic construct
  source 1..21: mol_type = other RNA
ctctgagagaagtcagactaa

SEQ ID NO: 83199 - RNA, 21 nt, synthetic construct
  source 1..21: mol_type = other RNA
ctctgataggataatgtccag

SEQ ID NO: 83200 - RNA, 21 nt, synthetic construct
  source 1..21: mol_type = other RNA
ctctgatgctttctctagttg

SEQ ID NO: 83201 - RNA, 21 nt, synthetic construct
  source 1..21: mol_type = other RNA
ctctgatggaacggcttaaca

SEQ ID NO: 83202 - RNA, 21 nt, synthetic construct
  source 1..21: mol_type = other RNA
ctctgcaaaaaatgtttgttt

SEQ ID NO: 83203 - RNA, 21 nt, synthetic construct
  source 1..21: mol_type = other RNA
ctctgcaaatgaggttgcttt

SEQ ID NO: 83204 - RNA, 21 nt, synthetic construct
  source 1..21: mol_type = other RNA
ctctgcaacatttgttgcatc

SEQ ID NO: 83205 - RNA, 21 nt, synthetic construct
  source 1..21: mol_type = other RNA
ctctgcaattttaaatgtaca

SEQ ID NO: 83206 - RNA, 21 nt, synthetic construct
  source 1..21: mol_type = other RNA
ctctgcacgtactagtcagca

SEQ ID NO: 83207 - RNA, 21 nt, synthetic construct
  source 1..21: mol_type = other RNA
ctctgcagagactgtgcttcc

SEQ ID NO: 83208 - RNA, 21 nt, synthetic construct
  source 1..21: mol_type = other RNA
ctctgcagagcaggctccact

SEQ ID NO: 83209 - RNA, 21 nt, synthetic construct
  source 1..21: mol_type = other RNA
ctctgcagttagcatgcctga

SEQ ID NO: 83210 - RNA, 21 nt, synthetic construct
  source 1..21: mol_type = other RNA
ctctgccccgggcctggttag

SEQ ID NO: 83211 - RNA, 21 nt, synthetic construct
  source 1..21: mol_type = other RNA
ctctgccctcattgaagctac

SEQ ID NO: 83212 - RNA, 21 nt, synthetic construct
  source 1..21: mol_type = other RNA
ctctgcctcaaaatcaacatt

SEQ ID NO: 83213 - RNA, 21 nt, synthetic construct
  source 1..21: mol_type = other RNA
ctctgcctcagttgacatcct

SEQ ID NO: 83214 - RNA, 21 nt, synthetic construct
  source 1..21: mol_type = other RNA
ctctgcctcggcacagctctc

SEQ ID NO: 83215 - RNA, 21 nt, synthetic construct
  source 1..21: mol_type = other RNA
ctctgcggcaggcattgtgct

SEQ ID NO: 83216 - RNA, 21 nt, synthetic construct
  source 1..21: mol_type = other RNA
ctctgcggcggctgaggcagc

SEQ ID NO: 83217 - RNA, 21 nt, synthetic construct
  source 1..21: mol_type = other RNA
ctctgctcaaaggggcattcc

SEQ ID NO: 83218 - RNA, 21 nt, synthetic construct
  source 1..21: mol_type = other RNA
ctctgctcaccgcaacatctg

SEQ ID NO: 83219 - RNA, 21 nt, synthetic construct
  source 1..21: mol_type = other RNA
ctctgctctcaagtaattgtt

SEQ ID NO: 83220 - RNA, 21 nt, synthetic construct
  source 1..21: mol_type = other RNA
ctctgctgctgaaaaagatac

SEQ ID NO: 83221 - RNA, 21 nt, synthetic construct
  source 1..21: mol_type = other RNA
ctctgcttcactaactttaaa

SEQ ID NO: 83222 - RNA, 21 nt, synthetic construct
  source 1..21: mol_type = other RNA
ctctgctttttcttggtggta

SEQ ID NO: 83223 - RNA, 21 nt, synthetic construct
  source 1..21: mol_type = other RNA
ctctggaaaggacttgatcta

SEQ ID NO: 83224 - RNA, 21 nt, synthetic construct
  source 1..21: mol_type = other RNA
ctctggaaggctaagcatgta

SEQ ID NO: 83225 - RNA, 21 nt, synthetic construct
  source 1..21: mol_type = other RNA
ctctggaatagaagagcagtg

SEQ ID NO: 83226 - RNA, 21 nt, synthetic construct
  source 1..21: mol_type = other RNA
ctctggaatgcccatcctcta

SEQ ID NO: 83227 - RNA, 21 nt, synthetic construct
  source 1..21: mol_type = other RNA
ctctggacattatcctatcag

SEQ ID NO: 83228 - RNA, 21 nt, synthetic construct
  source 1..21: mol_type = other RNA
ctctggactcagggtcacttc

SEQ ID NO: 83229 - RNA, 21 nt, synthetic construct
  source 1..21: mol_type = other RNA
ctctggagcaagcatgagtat

SEQ ID NO: 83230 - RNA, 21 nt, synthetic construct
  source 1..21: mol_type = other RNA
ctctggcaggtcacctagcct

SEQ ID NO: 83231 - RNA, 21 nt, synthetic construct
  source 1..21: mol_type = other RNA
ctctggccctccatttccctg

SEQ ID NO: 83232 - RNA, 21 nt, synthetic construct
  source 1..21: mol_type = other RNA
ctctggcctggacaacagtgt

SEQ ID NO: 83233 - RNA, 21 nt, synthetic construct
  source 1..21: mol_type = other RNA
ctctggccttctatattttta

SEQ ID NO: 83234 - RNA, 21 nt, synthetic construct
  source 1..21: mol_type = other RNA
ctctggctcagaaacaacaac

SEQ ID NO: 83235 - RNA, 21 nt, synthetic construct
  source 1..21: mol_type = other RNA
ctctggctgacctggtactct

SEQ ID NO: 83236 - RNA, 21 nt, synthetic construct
  source 1..21: mol_type = other RNA
ctctggctgcaattgcgcaga

SEQ ID NO: 83237 - RNA, 21 nt, synthetic construct
  source 1..21: mol_type = other RNA
ctctgggatgctcagtttcaa

SEQ ID NO: 83238 - RNA, 21 nt, synthetic construct
  source 1..21: mol_type = other RNA
ctctgggctcactgcaacttc

SEQ ID NO: 83239 - RNA, 21 nt, synthetic construct
  source 1..21: mol_type = other RNA
ctctgggcttcactttcgtca

SEQ ID NO: 83240 - RNA, 21 nt, synthetic construct
  source 1..21: mol_type = other RNA
ctctggggttagggcctagaa

SEQ ID NO: 83241 - RNA, 21 nt, synthetic construct
  source 1..21: mol_type = other RNA
ctctgggtcagaatcgtgata

SEQ ID NO: 83242 - RNA, 21 nt, synthetic construct
  source 1..21: mol_type = other RNA
ctctgggtgcgttgaccgctt

SEQ ID NO: 83243 - RNA, 21 nt, synthetic construct
  source 1..21: mol_type = other RNA
ctctggtattctgaactttca

SEQ ID NO: 83244 - RNA, 21 nt, synthetic construct
  source 1..21: mol_type = other RNA
ctctggtattttaagattctc

SEQ ID NO: 83245 - RNA, 21 nt, synthetic construct
  source 1..21: mol_type = other RNA
ctctggttttaaagaaattag

SEQ ID NO: 83246 - RNA, 21 nt, synthetic construct
  source 1..21: mol_type = other RNA
ctctgtagataaacgttaact

SEQ ID NO: 83247 - RNA, 21 nt, synthetic construct
  source 1..21: mol_type = other RNA
ctctgtcacccacgtggagtg

SEQ ID NO: 83248 - RNA, 21 nt, synthetic construct
  source 1..21: mol_type = other RNA
ctctgtcacccttgtaatcaa

SEQ ID NO: 83249 - RNA, 21 nt, synthetic construct
  source 1..21: mol_type = other RNA
ctctgtcatggtgtgtctgcg

SEQ ID NO: 83250 - RNA, 21 nt, synthetic construct
  source 1..21: mol_type = other RNA
ctctgtcctgtcagtgtggtt

SEQ ID NO: 83251 - RNA, 21 nt, synthetic construct
  source 1..21: mol_type = other RNA
ctctgtcgcccaggcggaatg

SEQ ID NO: 83252 - RNA, 21 nt, synthetic construct
  source 1..21: mol_type = other RNA
ctctgtctctgttgcccagtc

SEQ ID NO: 83253 - RNA, 21 nt, synthetic construct
  source 1..21: mol_type = other RNA
ctctgtcttgatgatagaata

SEQ ID NO: 83254 - RNA, 21 nt, synthetic construct
  source 1..21: mol_type = other RNA
ctctgtgctagccttcttgga

SEQ ID NO: 83255 - RNA, 21 nt, synthetic construct
  source 1..21: mol_type = other RNA
ctctgtgctgagatggtcagt

SEQ ID NO: 83256 - RNA, 21 nt, synthetic construct
  source 1..21: mol_type = other RNA
ctctgtgcttgtgcttttaat

SEQ ID NO: 83257 - RNA, 21 nt, synthetic construct
  source 1..21: mol_type = other RNA
ctctgtggaccatgttttagg

SEQ ID NO: 83258 - RNA, 21 nt, synthetic construct
  source 1..21: mol_type = other RNA
ctctgtggagtcctgtcagtt

SEQ ID NO: 83259 - RNA, 21 nt, synthetic construct
  source 1..21: mol_type = other RNA
ctctgtggtttcttgaatctc

SEQ ID NO: 83260 - RNA, 21 nt, synthetic construct
  source 1..21: mol_type = other RNA
ctctgtgtgcatgcatgtctg

SEQ ID NO: 83261 - RNA, 21 nt, synthetic construct
  source 1..21: mol_type = other RNA
ctctgtgtggtttgccttttc

SEQ ID NO: 83262 - RNA, 21 nt, synthetic construct
  source 1..21: mol_type = other RNA
ctctgttacagctcttctcag

SEQ ID NO: 83263 - RNA, 21 nt, synthetic construct
  source 1..21: mol_type = other RNA
ctctgttctgttccatcggtc

SEQ ID NO: 83264 - RNA, 21 nt, synthetic construct
  source 1..21: mol_type = other RNA
ctctgttgcccagactggagt

SEQ ID NO: 83265 - RNA, 21 nt, synthetic construct
  source 1..21: mol_type = other RNA
ctctgtttccttaccagtgct

SEQ ID NO: 83266 - RNA, 21 nt, synthetic construct
  source 1..21: mol_type = other RNA
ctcttaaaaggagatatacag

SEQ ID NO: 83267 - RNA, 21 nt, synthetic construct
  source 1..21: mol_type = other RNA
ctcttaaagtttcaaactgtg

SEQ ID NO: 83268 - RNA, 21 nt, synthetic construct
  source 1..21: mol_type = other RNA
ctcttaaatccgagacaagtt

SEQ ID NO: 83269 - RNA, 21 nt, synthetic construct
  source 1..21: mol_type = other RNA
ctcttaagaccacaaggatta

SEQ ID NO: 83270 - RNA, 21 nt, synthetic construct
  source 1..21: mol_type = other RNA
ctcttaagcttaggtctttga

SEQ ID NO: 83271 - RNA, 21 nt, synthetic construct
  source 1..21: mol_type = other RNA
ctcttaataactgcctaagta

SEQ ID NO: 83272 - RNA, 21 nt, synthetic construct
  source 1..21: mol_type = other RNA
ctcttaatattgaaacgatgc

SEQ ID NO: 83273 - RNA, 21 nt, synthetic construct
  source 1..21: mol_type = other RNA
ctcttacacctgtttaaaaag

SEQ ID NO: 83274 - RNA, 21 nt, synthetic construct
  source 1..21: mol_type = other RNA
ctcttagacctcctagattga

SEQ ID NO: 83275 - RNA, 21 nt, synthetic construct
  source 1..21: mol_type = other RNA
ctcttagcttagaagaagact

SEQ ID NO: 83276 - RNA, 21 nt, synthetic construct
  source 1..21: mol_type = other RNA
ctcttagtgatgtcttttgaa

SEQ ID NO: 83277 - RNA, 21 nt, synthetic construct
  source 1..21: mol_type = other RNA
ctcttatactagtagaaagca

SEQ ID NO: 83278 - RNA, 21 nt, synthetic construct
  source 1..21: mol_type = other RNA
ctcttatatcctaaacactta

SEQ ID NO: 83279 - RNA, 21 nt, synthetic construct
  source 1..21: mol_type = other RNA
ctcttatggctataaccacga

SEQ ID NO: 83280 - RNA, 21 nt, synthetic construct
  source 1..21: mol_type = other RNA
ctcttcaagcattgggagctt

SEQ ID NO: 83281 - RNA, 21 nt, synthetic construct
  source 1..21: mol_type = other RNA
ctcttcaatattttggaagac

SEQ ID NO: 83282 - RNA, 21 nt, synthetic construct
  source 1..21: mol_type = other RNA
ctcttcaccaactgaagcggg

SEQ ID NO: 83283 - RNA, 21 nt, synthetic construct
  source 1..21: mol_type = other RNA
ctcttcagaagaggataaggg

SEQ ID NO: 83284 - RNA, 21 nt, synthetic construct
  source 1..21: mol_type = other RNA
ctcttcagaggtctgttactc

SEQ ID NO: 83285 - RNA, 21 nt, synthetic construct
  source 1..21: mol_type = other RNA
ctcttccaaataatcccgcac

SEQ ID NO: 83286 - RNA, 21 nt, synthetic construct
  source 1..21: mol_type = other RNA
ctcttcccccaaaacttagga

SEQ ID NO: 83287 - RNA, 21 nt, synthetic construct
  source 1..21: mol_type = other RNA
ctcttcccttaacctttttct

SEQ ID NO: 83288 - RNA, 21 nt, synthetic construct
  source 1..21: mol_type = other RNA
ctcttcccttgtgcacctcgg

SEQ ID NO: 83289 - RNA, 21 nt, synthetic construct
  source 1..21: mol_type = other RNA
ctcttcctcatccctcatatc

SEQ ID NO: 83290 - RNA, 21 nt, synthetic construct
  source 1..21: mol_type = other RNA
ctcttcctcctctggacatta

SEQ ID NO: 83291 - RNA, 21 nt, synthetic construct
  source 1..21: mol_type = other RNA
ctcttcctgtatatctccttt

SEQ ID NO: 83292 - RNA, 21 nt, synthetic construct
  source 1..21: mol_type = other RNA
ctcttcctgttgctttaacct

SEQ ID NO: 83293 - RNA, 21 nt, synthetic construct
  source 1..21: mol_type = other RNA
ctcttccttatccgataaagg

SEQ ID NO: 83294 - RNA, 21 nt, synthetic construct
  source 1..21: mol_type = other RNA
ctcttcgagggggctgagtat

SEQ ID NO: 83295 - RNA, 21 nt, synthetic construct
  source 1..21: mol_type = other RNA
ctcttcgctcttttaaaaatt

SEQ ID NO: 83296 - RNA, 21 nt, synthetic construct
  source 1..21: mol_type = other RNA
ctcttcgggtgtcagaattcc

SEQ ID NO: 83297 - RNA, 21 nt, synthetic construct
  source 1..21: mol_type = other RNA
ctcttctactcactgtactac

SEQ ID NO: 83298 - RNA, 21 nt, synthetic construct
  source 1..21: mol_type = other RNA
ctcttctattccagagaattc

SEQ ID NO: 83299 - RNA, 21 nt, synthetic construct
  source 1..21: mol_type = other RNA
ctcttctcagttgcagcatgc

SEQ ID NO: 83300 - RNA, 21 nt, synthetic construct
  source 1..21: mol_type = other RNA
ctcttctccaaggaaagtgtg

SEQ ID NO: 83301 - RNA, 21 nt, synthetic construct
  source 1..21: mol_type = other RNA
ctcttctctcctttgaggtaa

SEQ ID NO: 83302 - RNA, 21 nt, synthetic construct
  source 1..21: mol_type = other RNA
ctcttctgaagaggctttctg

SEQ ID NO: 83303 - RNA, 21 nt, synthetic construct
  source 1..21: mol_type = other RNA
ctcttctgatcacagaagtgt

SEQ ID NO: 83304 - RNA, 21 nt, synthetic construct
  source 1..21: mol_type = other RNA
ctcttctgcaagttgctatcc

SEQ ID NO: 83305 - RNA, 21 nt, synthetic construct
  source 1..21: mol_type = other RNA
ctcttctggatagcattatcc

SEQ ID NO: 83306 - RNA, 21 nt, synthetic construct
  source 1..21: mol_type = other RNA
ctcttgaagtcagttacagca

SEQ ID NO: 83307 - RNA, 21 nt, synthetic construct
  source 1..21: mol_type = other RNA
ctcttgaccttagttttcact

SEQ ID NO: 83308 - RNA, 21 nt, synthetic construct
  source 1..21: mol_type = other RNA
ctcttgaccttgtgcatgtgc

SEQ ID NO: 83309 - RNA, 21 nt, synthetic construct
  source 1..21: mol_type = other RNA
ctcttgagttaggaatttaca

SEQ ID NO: 83310 - RNA, 21 nt, synthetic construct
  source 1..21: mol_type = other RNA
ctcttgcattagagccccaag

SEQ ID NO: 83311 - RNA, 21 nt, synthetic construct
  source 1..21: mol_type = other RNA
ctcttgcccaagctggtcctg

SEQ ID NO: 83312 - RNA, 21 nt, synthetic construct
  source 1..21: mol_type = other RNA
ctcttgcctaggctggagtgc

SEQ ID NO: 83313 - RNA, 21 nt, synthetic construct
  source 1..21: mol_type = other RNA
ctcttgcggtcttttagccaa

SEQ ID NO: 83314 - RNA, 21 nt, synthetic construct
  source 1..21: mol_type = other RNA
ctcttggaatgtgcacctcca

SEQ ID NO: 83315 - RNA, 21 nt, synthetic construct
  source 1..21: mol_type = other RNA
ctcttggccattttcttttaa

SEQ ID NO: 83316 - RNA, 21 nt, synthetic construct
  source 1..21: mol_type = other RNA
ctcttggcttttggcagcgta

SEQ ID NO: 83317 - RNA, 21 nt, synthetic construct
  source 1..21: mol_type = other RNA
ctcttggtctttctcccaggt

SEQ ID NO: 83318 - RNA, 21 nt, synthetic construct
  source 1..21: mol_type = other RNA
ctcttggtttcttcaagatac

SEQ ID NO: 83319 - RNA, 21 nt, synthetic construct
  source 1..21: mol_type = other RNA
ctcttgtagtatttttgcaac

SEQ ID NO: 83320 - RNA, 21 nt, synthetic construct
  source 1..21: mol_type = other RNA
ctcttgtcccggcatgcctct

SEQ ID NO: 83321 - RNA, 21 nt, synthetic construct
  source 1..21: mol_type = other RNA
ctcttgttcaaaaaccttttt

SEQ ID NO: 83322 - RNA, 21 nt, synthetic construct
  source 1..21: mol_type = other RNA
ctcttgttgaggatgactgtc

SEQ ID NO: 83323 - RNA, 21 nt, synthetic construct
  source 1..21: mol_type = other RNA
ctctttaaagctgaactcctt

SEQ ID NO: 83324 - RNA, 21 nt, synthetic construct
  source 1..21: mol_type = other RNA
ctctttaattatgagcattcc

SEQ ID NO: 83325 - RNA, 21 nt, synthetic construct
  source 1..21: mol_type = other RNA
ctctttaggaagcttccttga

SEQ ID NO: 83326 - RNA, 21 nt, synthetic construct
  source 1..21: mol_type = other RNA
ctctttagggaagatagtact

SEQ ID NO: 83327 - RNA, 21 nt, synthetic construct
  source 1..21: mol_type = other RNA
ctctttatctccacatttcta

SEQ ID NO: 83328 - RNA, 21 nt, synthetic construct
  source 1..21: mol_type = other RNA
ctctttcagccatcccagcta

SEQ ID NO: 83329 - RNA, 21 nt, synthetic construct
  source 1..21: mol_type = other RNA
ctctttcatatctgattttgt

SEQ ID NO: 83330 - RNA, 21 nt, synthetic construct
  source 1..21: mol_type = other RNA
ctctttccactctctggctgc

SEQ ID NO: 83331 - RNA, 21 nt, synthetic construct
  source 1..21: mol_type = other RNA
ctctttctcaacttcctgttt

SEQ ID NO: 83332 - RNA, 21 nt, synthetic construct
  source 1..21: mol_type = other RNA
ctctttctgaaattctcatta

SEQ ID NO: 83333 - RNA, 21 nt, synthetic construct
  source 1..21: mol_type = other RNA
ctctttctggggatgctgtct

SEQ ID NO: 83334 - RNA, 21 nt, synthetic construct
  source 1..21: mol_type = other RNA
ctctttgaaaggaatccggct

SEQ ID NO: 83335 - RNA, 21 nt, synthetic construct
  source 1..21: mol_type = other RNA
ctctttgctaataagtgagtt

SEQ ID NO: 83336 - RNA, 21 nt, synthetic construct
  source 1..21: mol_type = other RNA
ctctttgtttatccttgcacc

SEQ ID NO: 83337 - RNA, 21 nt, synthetic construct
  source 1..21: mol_type = other RNA
ctcttttaaacccatttcatg

SEQ ID NO: 83338 - RNA, 21 nt, synthetic construct
  source 1..21: mol_type = other RNA
ctcttttaaggtttagaaaac

SEQ ID NO: 83339 - RNA, 21 nt, synthetic construct
  source 1..21: mol_type = other RNA
ctcttttcatcactcactggc

SEQ ID NO: 83340 - RNA, 21 nt, synthetic construct
  source 1..21: mol_type = other RNA
ctcttttcctcgttttcaaca

SEQ ID NO: 83341 - RNA, 21 nt, synthetic construct
  source 1..21: mol_type = other RNA
ctcttttcctttaacgtatct

SEQ ID NO: 83342 - RNA, 21 nt, synthetic construct
  source 1..21: mol_type = other RNA
ctctttttgacagatgagact

SEQ ID NO: 83343 - RNA, 21 nt, synthetic construct
  source 1..21: mol_type = other RNA
ctgaaaaacacctcagttaaa

SEQ ID NO: 83344 - RNA, 21 nt, synthetic construct
  source 1..21: mol_type = other RNA
ctgaaaaacggaggttgcagt

SEQ ID NO: 83345 - RNA, 21 nt, synthetic construct
  source 1..21: mol_type = other RNA
ctgaaaaagatactcttaaag

SEQ ID NO: 83346 - RNA, 21 nt, synthetic construct
  source 1..21: mol_type = other RNA
ctgaaaaatgagaaacctaag

SEQ ID NO: 83347 - RNA, 21 nt, synthetic construct
  source 1..21: mol_type = other RNA
ctgaaaaatggttttatggta

SEQ ID NO: 83348 - RNA, 21 nt, synthetic construct
  source 1..21: mol_type = other RNA
ctgaaaattccttcccctttc

SEQ ID NO: 83349 - RNA, 21 nt, synthetic construct
  source 1..21: mol_type = other RNA
ctgaaacaatcgcaatccaaa

SEQ ID NO: 83350 - RNA, 21 nt, synthetic construct
  source 1..21: mol_type = other RNA
ctgaaaccagtgctctccccc

SEQ ID NO: 83351 - RNA, 21 nt, synthetic construct
  source 1..21: mol_type = other RNA
ctgaaaccagtgggtcagcta

SEQ ID NO: 83352 - RNA, 21 nt, synthetic construct
  source 1..21: mol_type = other RNA
ctgaaaccccgcatactgtgc

SEQ ID NO: 83353 - RNA, 21 nt, synthetic construct
  source 1..21: mol_type = other RNA
ctgaaaccctcacgaaagcgg

SEQ ID NO: 83354 - RNA, 21 nt, synthetic construct
  source 1..21: mol_type = other RNA
ctgaaacgaccttgctcattc

SEQ ID NO: 83355 - RNA, 21 nt, synthetic construct
  source 1..21: mol_type = other RNA
ctgaaagacagacctctatta

SEQ ID NO: 83356 - RNA, 21 nt, synthetic construct
  source 1..21: mol_type = other RNA
ctgaaagagaaagaagtaatt

SEQ ID NO: 83357 - RNA, 21 nt, synthetic construct
  source 1..21: mol_type = other RNA
ctgaaagcagggactcccata

SEQ ID NO: 83358 - RNA, 21 nt, synthetic construct
  source 1..21: mol_type = other RNA
ctgaaagctagaagacctcaa

SEQ ID NO: 83359 - RNA, 21 nt, synthetic construct
  source 1..21: mol_type = other RNA
ctgaaagcttctgagcagtgt

SEQ ID NO: 83360 - RNA, 21 nt, synthetic construct
  source 1..21: mol_type = other RNA
ctgaaaggaaatgagtgtatg

SEQ ID NO: 83361 - RNA, 21 nt, synthetic construct
  source 1..21: mol_type = other RNA
ctgaaaggcatgaaattcttg

SEQ ID NO: 83362 - RNA, 21 nt, synthetic construct
  source 1..21: mol_type = other RNA
ctgaaagtaaagatagcccct

SEQ ID NO: 83363 - RNA, 21 nt, synthetic construct
  source 1..21: mol_type = other RNA
ctgaaataatttggttatgcg

SEQ ID NO: 83364 - RNA, 21 nt, synthetic construct
  source 1..21: mol_type = other RNA
ctgaaatcctagccccaaata

SEQ ID NO: 83365 - RNA, 21 nt, synthetic construct
  source 1..21: mol_type = other RNA
ctgaaatcgggagtaacagac

SEQ ID NO: 83366 - RNA, 21 nt, synthetic construct
  source 1..21: mol_type = other RNA
ctgaaatctgatttgtttagt

SEQ ID NO: 83367 - RNA, 21 nt, synthetic construct
  source 1..21: mol_type = other RNA
ctgaaatgaaccaaacttggt

SEQ ID NO: 83368 - RNA, 21 nt, synthetic construct
  source 1..21: mol_type = other RNA
ctgaaatgctgtaactgactt

SEQ ID NO: 83369 - RNA, 21 nt, synthetic construct
  source 1..21: mol_type = other RNA
ctgaaatggcttaaggaaata

SEQ ID NO: 83370 - RNA, 21 nt, synthetic construct
  source 1..21: mol_type = other RNA
ctgaaattagctaagtatgca

SEQ ID NO: 83371 - RNA, 21 nt, synthetic construct
  source 1..21: mol_type = other RNA
ctgaaattctcaaatgaacag

SEQ ID NO: 83372 - RNA, 21 nt, synthetic construct
  source 1..21: mol_type = other RNA
ctgaaattctcattagttatc

SEQ ID NO: 83373 - RNA, 21 nt, synthetic construct
  source 1..21: mol_type = other RNA
ctgaaattgacttcactagat

SEQ ID NO: 83374 - RNA, 21 nt, synthetic construct
  source 1..21: mol_type = other RNA
ctgaaattgtcagaaaagatc

SEQ ID NO: 83375 - RNA, 21 nt, synthetic construct
  source 1..21: mol_type = other RNA
ctgaacaaaatttttgcaaac

SEQ ID NO: 83376 - RNA, 21 nt, synthetic construct
  source 1..21: mol_type = other RNA
ctgaacaacgctgtggctaac

SEQ ID NO: 83377 - RNA, 21 nt, synthetic construct
  source 1..21: mol_type = other RNA
ctgaacatgtatgtttctcat

SEQ ID NO: 83378 - RNA, 21 nt, synthetic construct
  source 1..21: mol_type = other RNA
ctgaacatttatacagttgga

SEQ ID NO: 83379 - RNA, 21 nt, synthetic construct
  source 1..21: mol_type = other RNA
ctgaacattttagctggggca

SEQ ID NO: 83380 - RNA, 21 nt, synthetic construct
  source 1..21: mol_type = other RNA
ctgaacccaggaggcaaaggt

SEQ ID NO: 83381 - RNA, 21 nt, synthetic construct
  source 1..21: mol_type = other RNA
ctgaacgtctttaaatttcaa

SEQ ID NO: 83382 - RNA, 21 nt, synthetic construct
  source 1..21: mol_type = other RNA
ctgaactacagtgtttaggga

SEQ ID NO: 83383 - RNA, 21 nt, synthetic construct
  source 1..21: mol_type = other RNA
ctgaactcaaaagtgaatcac

SEQ ID NO: 83384 - RNA, 21 nt, synthetic construct
  source 1..21: mol_type = other RNA
ctgaactcaaaatggatcaaa

SEQ ID NO: 83385 - RNA, 21 nt, synthetic construct
  source 1..21: mol_type = other RNA
ctgaactcctttcttaccctc

SEQ ID NO: 83386 - RNA, 21 nt, synthetic construct
  source 1..21: mol_type = other RNA
ctgaactcgtggcctcaagca

SEQ ID NO: 83387 - RNA, 21 nt, synthetic construct
  source 1..21: mol_type = other RNA
ctgaactctgtggagtcctgt

SEQ ID NO: 83388 - RNA, 21 nt, synthetic construct
  source 1..21: mol_type = other RNA
ctgaactgctgacagattaaa

SEQ ID NO: 83389 - RNA, 21 nt, synthetic construct
  source 1..21: mol_type = other RNA
ctgaacttgtcacaaaatgtg

SEQ ID NO: 83390 - RNA, 21 nt, synthetic construct
  source 1..21: mol_type = other RNA
ctgaactttcaacctaacatg

SEQ ID NO: 83391 - RNA, 21 nt, synthetic construct
  source 1..21: mol_type = other RNA
ctgaactttcgaagtgggaag

SEQ ID NO: 83392 - RNA, 21 nt, synthetic construct
  source 1..21: mol_type = other RNA
ctgaagaaattatctgtgggt

SEQ ID NO: 83393 - RNA, 21 nt, synthetic construct
  source 1..21: mol_type = other RNA
ctgaagaataactgtcctgaa

SEQ ID NO: 83394 - RNA, 21 nt, synthetic construct
  source 1..21: mol_type = other RNA
ctgaagacatgctgaggcccc

SEQ ID NO: 83395 - RNA, 21 nt, synthetic construct
  source 1..21: mol_type = other RNA
ctgaagactggatttgattgg

SEQ ID NO: 83396 - RNA, 21 nt, synthetic construct
  source 1..21: mol_type = other RNA
ctgaagaggctttctgtgtaa

SEQ ID NO: 83397 - RNA, 21 nt, synthetic construct
  source 1..21: mol_type = other RNA
ctgaagagtctatctttggga

SEQ ID NO: 83398 - RNA, 21 nt, synthetic construct
  source 1..21: mol_type = other RNA
ctgaagcaggctttttacccg

SEQ ID NO: 83399 - RNA, 21 nt, synthetic construct
  source 1..21: mol_type = other RNA
ctgaagccagtccttgtgatc

SEQ ID NO: 83400 - RNA, 21 nt, synthetic construct
  source 1..21: mol_type = other RNA
ctgaagcggggctgccactac

SEQ ID NO: 83401 - RNA, 21 nt, synthetic construct
  source 1..21: mol_type = other RNA
ctgaaggattcctccctggag

SEQ ID NO: 83402 - RNA, 21 nt, synthetic construct
  source 1..21: mol_type = other RNA
ctgaaggcactaacaaagggc

SEQ ID NO: 83403 - RNA, 21 nt, synthetic construct
  source 1..21: mol_type = other RNA
ctgaaggcactgtatggttct

SEQ ID NO: 83404 - RNA, 21 nt, synthetic construct
  source 1..21: mol_type = other RNA
ctgaaggcatagggccttcta

SEQ ID NO: 83405 - RNA, 21 nt, synthetic construct
  source 1..21: mol_type = other RNA
ctgaaggctcagcccctcatc

SEQ ID NO: 83406 - RNA, 21 nt, synthetic construct
  source 1..21: mol_type = other RNA
ctgaagggaattttactgatc

SEQ ID NO: 83407 - RNA, 21 nt, synthetic construct
  source 1..21: mol_type = other RNA
ctgaagggaggaaaaaacagt

SEQ ID NO: 83408 - RNA, 21 nt, synthetic construct
  source 1..21: mol_type = other RNA
ctgaaggtgcctgccatagag

SEQ ID NO: 83409 - RNA, 21 nt, synthetic construct
  source 1..21: mol_type = other RNA
ctgaagtaataaagcaagtat

SEQ ID NO: 83410 - RNA, 21 nt, synthetic construct
  source 1..21: mol_type = other RNA
ctgaagtacttcaaggttcac

SEQ ID NO: 83411 - RNA, 21 nt, synthetic construct
  source 1..21: mol_type = other RNA
ctgaagtcctttcttggtctg

SEQ ID NO: 83412 - RNA, 21 nt, synthetic construct
  source 1..21: mol_type = other RNA
ctgaagtctttggtgatccta

SEQ ID NO: 83413 - RNA, 21 nt, synthetic construct
  source 1..21: mol_type = other RNA
ctgaagtgttgagaggcttta

SEQ ID NO: 83414 - RNA, 21 nt, synthetic construct
  source 1..21: mol_type = other RNA
ctgaagttctcaggggtaaag

SEQ ID NO: 83415 - RNA, 21 nt, synthetic construct
  source 1..21: mol_type = other RNA
ctgaagtttatcagtctccaa

SEQ ID NO: 83416 - RNA, 21 nt, synthetic construct
  source 1..21: mol_type = other RNA
ctgaagtttatcgtatttatc

SEQ ID NO: 83417 - RNA, 21 nt, synthetic construct
  source 1..21: mol_type = other RNA
ctgaatacccctccctacctg

SEQ ID NO: 83418 - RNA, 21 nt, synthetic construct
  source 1..21: mol_type = other RNA
ctgaatactattcctattgtt

SEQ ID NO: 83419 - RNA, 21 nt, synthetic construct
  source 1..21: mol_type = other RNA
ctgaatcacctcaaggcagaa

SEQ ID NO: 83420 - RNA, 21 nt, synthetic construct
  source 1..21: mol_type = other RNA
ctgaatcagacaacacattaa

SEQ ID NO: 83421 - RNA, 21 nt, synthetic construct
  source 1..21: mol_type = other RNA
ctgaatgactgttgcctctgt

SEQ ID NO: 83422 - RNA, 21 nt, synthetic construct
  source 1..21: mol_type = other RNA
ctgaatgatttccctgcatac

SEQ ID NO: 83423 - RNA, 21 nt, synthetic construct
  source 1..21: mol_type = other RNA
ctgaatgtgaccttatttgga

SEQ ID NO: 83424 - RNA, 21 nt, synthetic construct
  source 1..21: mol_type = other RNA
ctgaattaatctcttacacct

SEQ ID NO: 83425 - RNA, 21 nt, synthetic construct
  source 1..21: mol_type = other RNA
ctgaattcccacaaaatatga

SEQ ID NO: 83426 - RNA, 21 nt, synthetic construct
  source 1..21: mol_type = other RNA
ctgaattctaacattatcttc

SEQ ID NO: 83427 - RNA, 21 nt, synthetic construct
  source 1..21: mol_type = other RNA
ctgaattctaatgaactccca

SEQ ID NO: 83428 - RNA, 21 nt, synthetic construct
  source 1..21: mol_type = other RNA
ctgaattctctggaatagaag

SEQ ID NO: 83429 - RNA, 21 nt, synthetic construct
  source 1..21: mol_type = other RNA
ctgaattgagatgtactggaa

SEQ ID NO: 83430 - RNA, 21 nt, synthetic construct
  source 1..21: mol_type = other RNA
ctgacaaagtatgagaaatgt

SEQ ID NO: 83431 - RNA, 21 nt, synthetic construct
  source 1..21: mol_type = other RNA
ctgacaactgggagaatggca

SEQ ID NO: 83432 - RNA, 21 nt, synthetic construct
  source 1..21: mol_type = other RNA
ctgacaagtagtacaaaagtg

SEQ ID NO: 83433 - RNA, 21 nt, synthetic construct
  source 1..21: mol_type = other RNA
ctgacaatagccaagacatgg

SEQ ID NO: 83434 - RNA, 21 nt, synthetic construct
  source 1..21: mol_type = other RNA
ctgacaatttcagggagaatt

SEQ ID NO: 83435 - RNA, 21 nt, synthetic construct
  source 1..21: mol_type = other RNA
ctgacaatttgccaaaatgat

SEQ ID NO: 83436 - RNA, 21 nt, synthetic construct
  source 1..21: mol_type = other RNA
ctgacacaggctgaagggagg

SEQ ID NO: 83437 - RNA, 21 nt, synthetic construct
  source 1..21: mol_type = other RNA
ctgacacccgaagaggacgat

SEQ ID NO: 83438 - RNA, 21 nt, synthetic construct
  source 1..21: mol_type = other RNA
ctgacacccgacccactagtg

SEQ ID NO: 83439 - RNA, 21 nt, synthetic construct
  source 1..21: mol_type = other RNA
ctgacagattaaataccacct

SEQ ID NO: 83440 - RNA, 21 nt, synthetic construct
  source 1..21: mol_type = other RNA
ctgacagcaaataaacaaaat

SEQ ID NO: 83441 - RNA, 21 nt, synthetic construct
  source 1..21: mol_type = other RNA
ctgacaggacagagcagtagg

SEQ ID NO: 83442 - RNA, 21 nt, synthetic construct
  source 1..21: mol_type = other RNA
ctgacaggactccacagagtt

SEQ ID NO: 83443 - RNA, 21 nt, synthetic construct
  source 1..21: mol_type = other RNA
ctgacaggtggtatgggagat

SEQ ID NO: 83444 - RNA, 21 nt, synthetic construct
  source 1..21: mol_type = other RNA
ctgacagtggacaaaggttcc

SEQ ID NO: 83445 - RNA, 21 nt, synthetic construct
  source 1..21: mol_type = other RNA
ctgacataactgtaaagtaat

SEQ ID NO: 83446 - RNA, 21 nt, synthetic construct
  source 1..21: mol_type = other RNA
ctgacatactgtcacaggctt

SEQ ID NO: 83447 - RNA, 21 nt, synthetic construct
  source 1..21: mol_type = other RNA
ctgacatatgttttgcttcga

SEQ ID NO: 83448 - RNA, 21 nt, synthetic construct
  source 1..21: mol_type = other RNA
ctgacatgagagctaagggaa

SEQ ID NO: 83449 - RNA, 21 nt, synthetic construct
  source 1..21: mol_type = other RNA
ctgacatgtgtaaaacatctg

SEQ ID NO: 83450 - RNA, 21 nt, synthetic construct
  source 1..21: mol_type = other RNA
ctgacattggttattcatgtt

SEQ ID NO: 83451 - RNA, 21 nt, synthetic construct
  source 1..21: mol_type = other RNA
ctgaccaactatttcactaaa

SEQ ID NO: 83452 - RNA, 21 nt, synthetic construct
  source 1..21: mol_type = other RNA
ctgaccatctcagcacagagc

SEQ ID NO: 83453 - RNA, 21 nt, synthetic construct
  source 1..21: mol_type = other RNA
ctgaccattgtgtggacacac

SEQ ID NO: 83454 - RNA, 21 nt, synthetic construct
  source 1..21: mol_type = other RNA
ctgacccactggtttcagtcc

SEQ ID NO: 83455 - RNA, 21 nt, synthetic construct
  source 1..21: mol_type = other RNA
ctgacccagagcctaatgtgt

SEQ ID NO: 83456 - RNA, 21 nt, synthetic construct
  source 1..21: mol_type = other RNA
ctgaccctttattcaaagatc

SEQ ID NO: 83457 - RNA, 21 nt, synthetic construct
  source 1..21: mol_type = other RNA
ctgacctaaagttttaagaaa

SEQ ID NO: 83458 - RNA, 21 nt, synthetic construct
  source 1..21: mol_type = other RNA
ctgacctaagcttgggtagga

SEQ ID NO: 83459 - RNA, 21 nt, synthetic construct
  source 1..21: mol_type = other RNA
ctgacctcaagcgatccagcc

SEQ ID NO: 83460 - RNA, 21 nt, synthetic construct
  source 1..21: mol_type = other RNA
ctgacctctgcagttagcatg

SEQ ID NO: 83461 - RNA, 21 nt, synthetic construct
  source 1..21: mol_type = other RNA
ctgacctgggagaaagaccaa

SEQ ID NO: 83462 - RNA, 21 nt, synthetic construct
  source 1..21: mol_type = other RNA
ctgacctggtactctatgata

SEQ ID NO: 83463 - RNA, 21 nt, synthetic construct
  source 1..21: mol_type = other RNA
ctgacgtttaaatgagttaat

SEQ ID NO: 83464 - RNA, 21 nt, synthetic construct
  source 1..21: mol_type = other RNA
ctgactacacatacacaggga

SEQ ID NO: 83465 - RNA, 21 nt, synthetic construct
  source 1..21: mol_type = other RNA
ctgactacactgaagggaatt

SEQ ID NO: 83466 - RNA, 21 nt, synthetic construct
  source 1..21: mol_type = other RNA
ctgactagtacgtgcagagca

SEQ ID NO: 83467 - RNA, 21 nt, synthetic construct
  source 1..21: mol_type = other RNA
ctgactagtggctcatacttg

SEQ ID NO: 83468 - RNA, 21 nt, synthetic construct
  source 1..21: mol_type = other RNA
ctgactcaatcttcttatttg

SEQ ID NO: 83469 - RNA, 21 nt, synthetic construct
  source 1..21: mol_type = other RNA
ctgactccctttttaggtagg

SEQ ID NO: 83470 - RNA, 21 nt, synthetic construct
  source 1..21: mol_type = other RNA
ctgactctaaagtctatgctc

SEQ ID NO: 83471 - RNA, 21 nt, synthetic construct
  source 1..21: mol_type = other RNA
ctgactctgtgcttgtgcttt

SEQ ID NO: 83472 - RNA, 21 nt, synthetic construct
  source 1..21: mol_type = other RNA
ctgactgaaggattcctccct

SEQ ID NO: 83473 - RNA, 21 nt, synthetic construct
  source 1..21: mol_type = other RNA
ctgactggctgtgccaactct

SEQ ID NO: 83474 - RNA, 21 nt, synthetic construct
  source 1..21: mol_type = other RNA
ctgacttacagaccttattca

SEQ ID NO: 83475 - RNA, 21 nt, synthetic construct
  source 1..21: mol_type = other RNA
ctgacttagagggcttcatgc

SEQ ID NO: 83476 - RNA, 21 nt, synthetic construct
  source 1..21: mol_type = other RNA
ctgacttagtgagggaggcca

SEQ ID NO: 83477 - RNA, 21 nt, synthetic construct
  source 1..21: mol_type = other RNA
ctgacttcaaactatacttca

SEQ ID NO: 83478 - RNA, 21 nt, synthetic construct
  source 1..21: mol_type = other RNA
ctgacttcaagaggttaaaac

SEQ ID NO: 83479 - RNA, 21 nt, synthetic construct
  source 1..21: mol_type = other RNA
ctgacttcattcttgacatga

SEQ ID NO: 83480 - RNA, 21 nt, synthetic construct
  source 1..21: mol_type = other RNA
ctgacttcctggctctagccc

SEQ ID NO: 83481 - RNA, 21 nt, synthetic construct
  source 1..21: mol_type = other RNA
ctgacttctctcagagggaaa

SEQ ID NO: 83482 - RNA, 21 nt, synthetic construct
  source 1..21: mol_type = other RNA
ctgactttatggtatcacttt

SEQ ID NO: 83483 - RNA, 21 nt, synthetic construct
  source 1..21: mol_type = other RNA
ctgactttcatttgtaattca

SEQ ID NO: 83484 - RNA, 21 nt, synthetic construct
  source 1..21: mol_type = other RNA
ctgacttttaaaatatgtgga

SEQ ID NO: 83485 - RNA, 21 nt, synthetic construct
  source 1..21: mol_type = other RNA
ctgacttttccttaaaaaagg

SEQ ID NO: 83486 - RNA, 21 nt, synthetic construct
  source 1..21: mol_type = other RNA
ctgagaaccggaacttgagtt

SEQ ID NO: 83487 - RNA, 21 nt, synthetic construct
  source 1..21: mol_type = other RNA
ctgagaacttcagtatatatt

SEQ ID NO: 83488 - RNA, 21 nt, synthetic construct
  source 1..21: mol_type = other RNA
ctgagaagactaagcagaaat

SEQ ID NO: 83489 - RNA, 21 nt, synthetic construct
  source 1..21: mol_type = other RNA
ctgagaagagctgtaacagag

SEQ ID NO: 83490 - RNA, 21 nt, synthetic construct
  source 1..21: mol_type = other RNA
ctgagaaggcgaaatgtgaac

SEQ ID NO: 83491 - RNA, 21 nt, synthetic construct
  source 1..21: mol_type = other RNA
ctgagaagtaacattacaaca

SEQ ID NO: 83492 - RNA, 21 nt, synthetic construct
  source 1..21: mol_type = other RNA
ctgagaagtcaaagcctgtgg

SEQ ID NO: 83493 - RNA, 21 nt, synthetic construct
  source 1..21: mol_type = other RNA
ctgagacaggatccagatgta

SEQ ID NO: 83494 - RNA, 21 nt, synthetic construct
  source 1..21: mol_type = other RNA
ctgagacagtattgtgctgaa

SEQ ID NO: 83495 - RNA, 21 nt, synthetic construct
  source 1..21: mol_type = other RNA
ctgagacatcacaatgcgttt

SEQ ID NO: 83496 - RNA, 21 nt, synthetic construct
  source 1..21: mol_type = other RNA
ctgagaccacagacgtgcagc

SEQ ID NO: 83497 - RNA, 21 nt, synthetic construct
  source 1..21: mol_type = other RNA
ctgagaccggatgaggtggct

SEQ ID NO: 83498 - RNA, 21 nt, synthetic construct
  source 1..21: mol_type = other RNA
ctgagacctcatcttagccgg

SEQ ID NO: 83499 - RNA, 21 nt, synthetic construct
  source 1..21: mol_type = other RNA
ctgagacttaggcaaaggaaa

SEQ ID NO: 83500 - RNA, 21 nt, synthetic construct
  source 1..21: mol_type = other RNA
ctgagagaagtcagactaaga

SEQ ID NO: 83501 - RNA, 21 nt, synthetic construct
  source 1..21: mol_type = other RNA
ctgagagatagaaagcaccag

SEQ ID NO: 83502 - RNA, 21 nt, synthetic construct
  source 1..21: mol_type = other RNA
ctgagagctcaggccagtgag

SEQ ID NO: 83503 - RNA, 21 nt, synthetic construct
  source 1..21: mol_type = other RNA
ctgagagtattgccaggtttg

SEQ ID NO: 83504 - RNA, 21 nt, synthetic construct
  source 1..21: mol_type = other RNA
ctgagatggtcagtactatct

SEQ ID NO: 83505 - RNA, 21 nt, synthetic construct
  source 1..21: mol_type = other RNA
ctgagattacagatgtgagcc

SEQ ID NO: 83506 - RNA, 21 nt, synthetic construct
  source 1..21: mol_type = other RNA
ctgagattgccccattgcact

SEQ ID NO: 83507 - RNA, 21 nt, synthetic construct
  source 1..21: mol_type = other RNA
ctgagattgtgccagtgaact

SEQ ID NO: 83508 - RNA, 21 nt, synthetic construct
  source 1..21: mol_type = other RNA
ctgagcaactactatttcgca

SEQ ID NO: 83509 - RNA, 21 nt, synthetic construct
  source 1..21: mol_type = other RNA
ctgagcaaggaaggaaaggag

SEQ ID NO: 83510 - RNA, 21 nt, synthetic construct
  source 1..21: mol_type = other RNA
ctgagcacaatgcctgccgca

SEQ ID NO: 83511 - RNA, 21 nt, synthetic construct
  source 1..21: mol_type = other RNA
ctgagcagtgaaagtctccct

SEQ ID NO: 83512 - RNA, 21 nt, synthetic construct
  source 1..21: mol_type = other RNA
ctgagcagtgtttcctagatt

SEQ ID NO: 83513 - RNA, 21 nt, synthetic construct
  source 1..21: mol_type = other RNA
ctgagcatcccagaggtactc

SEQ ID NO: 83514 - RNA, 21 nt, synthetic construct
  source 1..21: mol_type = other RNA
ctgagcatccccgctgcgaga

SEQ ID NO: 83515 - RNA, 21 nt, synthetic construct
  source 1..21: mol_type = other RNA
ctgagcatttatataagttca

SEQ ID NO: 83516 - RNA, 21 nt, synthetic construct
  source 1..21: mol_type = other RNA
ctgagccagagtttcactctg

SEQ ID NO: 83517 - RNA, 21 nt, synthetic construct
  source 1..21: mol_type = other RNA
ctgagccagcaaatcagaaaa

SEQ ID NO: 83518 - RNA, 21 nt, synthetic construct
  source 1..21: mol_type = other RNA
ctgagccgtcggtatgttaat

SEQ ID NO: 83519 - RNA, 21 nt, synthetic construct
  source 1..21: mol_type = other RNA
ctgagccttcagaactcttct

SEQ ID NO: 83520 - RNA, 21 nt, synthetic construct
  source 1..21: mol_type = other RNA
ctgagctctcagtggccctgt

SEQ ID NO: 83521 - RNA, 21 nt, synthetic construct
  source 1..21: mol_type = other RNA
ctgagctgttaatggttagac

SEQ ID NO: 83522 - RNA, 21 nt, synthetic construct
  source 1..21: mol_type = other RNA
ctgagctttccttagttcgaa

SEQ ID NO: 83523 - RNA, 21 nt, synthetic construct
  source 1..21: mol_type = other RNA
ctgaggaagctaatcaagccg

SEQ ID NO: 83524 - RNA, 21 nt, synthetic construct
  source 1..21: mol_type = other RNA
ctgaggaaggagaatcgctta

SEQ ID NO: 83525 - RNA, 21 nt, synthetic construct
  source 1..21: mol_type = other RNA
ctgaggacactagcaatccag

SEQ ID NO: 83526 - RNA, 21 nt, synthetic construct
  source 1..21: mol_type = other RNA
ctgaggagctgagaccacaga

SEQ ID NO: 83527 - RNA, 21 nt, synthetic construct
  source 1..21: mol_type = other RNA
ctgaggatataacgatagtct

SEQ ID NO: 83528 - RNA, 21 nt, synthetic construct
  source 1..21: mol_type = other RNA
ctgaggattggagactgataa

SEQ ID NO: 83529 - RNA, 21 nt, synthetic construct
  source 1..21: mol_type = other RNA
ctgaggcagagtagagaaggc

SEQ ID NO: 83530 - RNA, 21 nt, synthetic construct
  source 1..21: mol_type = other RNA
ctgaggcagcccgacctccag

SEQ ID NO: 83531 - RNA, 21 nt, synthetic construct
  source 1..21: mol_type = other RNA
ctgaggcaggagaactgcctg

SEQ ID NO: 83532 - RNA, 21 nt, synthetic construct
  source 1..21: mol_type = other RNA
ctgaggcaggagcatagcttg

SEQ ID NO: 83533 - RNA, 21 nt, synthetic construct
  source 1..21: mol_type = other RNA
ctgaggcaggaggcacctgaa

SEQ ID NO: 83534 - RNA, 21 nt, synthetic construct
  source 1..21: mol_type = other RNA
ctgaggccccaggggacatag

SEQ ID NO: 83535 - RNA, 21 nt, synthetic construct
  source 1..21: mol_type = other RNA
ctgaggccggaggattgcttg

SEQ ID NO: 83536 - RNA, 21 nt, synthetic construct
  source 1..21: mol_type = other RNA
ctgaggcctcctgccttcctg

SEQ ID NO: 83537 - RNA, 21 nt, synthetic construct
  source 1..21: mol_type = other RNA
ctgaggcggaaggattgccta

SEQ ID NO: 83538 - RNA, 21 nt, synthetic construct
  source 1..21: mol_type = other RNA
ctgaggcggctggatcgcttg

SEQ ID NO: 83539 - RNA, 21 nt, synthetic construct
  source 1..21: mol_type = other RNA
ctgaggctggggaattgcatg

SEQ ID NO: 83540 - RNA, 21 nt, synthetic construct
  source 1..21: mol_type = other RNA
ctgagggaaattatttccagc

SEQ ID NO: 83541 - RNA, 21 nt, synthetic construct
  source 1..21: mol_type = other RNA
ctgagggaatttttcttacct

SEQ ID NO: 83542 - RNA, 21 nt, synthetic construct
  source 1..21: mol_type = other RNA
ctgagggctttgtgaagggag

SEQ ID NO: 83543 - RNA, 21 nt, synthetic construct
  source 1..21: mol_type = other RNA
ctgaggggtcttatgctggtg

SEQ ID NO: 83544 - RNA, 21 nt, synthetic construct
  source 1..21: mol_type = other RNA
ctgagggtgagaccaccacac

SEQ ID NO: 83545 - RNA, 21 nt, synthetic construct
  source 1..21: mol_type = other RNA
ctgaggtcaagaaataaaaca

SEQ ID NO: 83546 - RNA, 21 nt, synthetic construct
  source 1..21: mol_type = other RNA
ctgaggtctcaaaatttaaag

SEQ ID NO: 83547 - RNA, 21 nt, synthetic construct
  source 1..21: mol_type = other RNA
ctgaggtctttaaaagaaagc

SEQ ID NO: 83548 - RNA, 21 nt, synthetic construct
  source 1..21: mol_type = other RNA
ctgaggtggagttctgctctt

SEQ ID NO: 83549 - RNA, 21 nt, synthetic construct
  source 1..21: mol_type = other RNA
ctgaggtgtttttcagccctg

SEQ ID NO: 83550 - RNA, 21 nt, synthetic construct
  source 1..21: mol_type = other RNA
ctgagtaaagggtaagaaaat

SEQ ID NO: 83551 - RNA, 21 nt, synthetic construct
  source 1..21: mol_type = other RNA
ctgagtagcgctttaagcatc

SEQ ID NO: 83552 - RNA, 21 nt, synthetic construct
  source 1..21: mol_type = other RNA
ctgagtagctgtgattaccgg

SEQ ID NO: 83553 - RNA, 21 nt, synthetic construct
  source 1..21: mol_type = other RNA
ctgagtatattctgtgaattg

SEQ ID NO: 83554 - RNA, 21 nt, synthetic construct
  source 1..21: mol_type = other RNA
ctgagtatgggtctccatttt

SEQ ID NO: 83555 - RNA, 21 nt, synthetic construct
  source 1..21: mol_type = other RNA
ctgagtcaaaaccaaagaaag

SEQ ID NO: 83556 - RNA, 21 nt, synthetic construct
  source 1..21: mol_type = other RNA
ctgagtccagaggtgagcttt

SEQ ID NO: 83557 - RNA, 21 nt, synthetic construct
  source 1..21: mol_type = other RNA
ctgagtcttctactgtgaatt

SEQ ID NO: 83558 - RNA, 21 nt, synthetic construct
  source 1..21: mol_type = other RNA
ctgagtgaatggggtaatttt

SEQ ID NO: 83559 - RNA, 21 nt, synthetic construct
  source 1..21: mol_type = other RNA
ctgagtgttacttgaaatcat

SEQ ID NO: 83560 - RNA, 21 nt, synthetic construct
  source 1..21: mol_type = other RNA
ctgagtgttgtgtgcacctaa

SEQ ID NO: 83561 - RNA, 21 nt, synthetic construct
  source 1..21: mol_type = other RNA
ctgagtttgctctgcaaatga

SEQ ID NO: 83562 - RNA, 21 nt, synthetic construct
  source 1..21: mol_type = other RNA
ctgataaacttcagttttgag

SEQ ID NO: 83563 - RNA, 21 nt, synthetic construct
  source 1..21: mol_type = other RNA
ctgataaatggctttttacga

SEQ ID NO: 83564 - RNA, 21 nt, synthetic construct
  source 1..21: mol_type = other RNA
ctgataaattattagcttgct

SEQ ID NO: 83565 - RNA, 21 nt, synthetic construct
  source 1..21: mol_type = other RNA
ctgataagcccaacctgatta

SEQ ID NO: 83566 - RNA, 21 nt, synthetic construct
  source 1..21: mol_type = other RNA
ctgataagctcccagccaaac

SEQ ID NO: 83567 - RNA, 21 nt, synthetic construct
  source 1..21: mol_type = other RNA
ctgataaggggctatctttac

SEQ ID NO: 83568 - RNA, 21 nt, synthetic construct
  source 1..21: mol_type = other RNA
ctgataatcacagacgcaaag

SEQ ID NO: 83569 - RNA, 21 nt, synthetic construct
  source 1..21: mol_type = other RNA
ctgatacacttctatccagtg

SEQ ID NO: 83570 - RNA, 21 nt, synthetic construct
  source 1..21: mol_type = other RNA
ctgatagatattggcaacatt

SEQ ID NO: 83571 - RNA, 21 nt, synthetic construct
  source 1..21: mol_type = other RNA
ctgatagcgaaaggtacgacg

SEQ ID NO: 83572 - RNA, 21 nt, synthetic construct
  source 1..21: mol_type = other RNA
ctgatagctgtggaagcacag

SEQ ID NO: 83573 - RNA, 21 nt, synthetic construct
  source 1..21: mol_type = other RNA
ctgatagcttgacaaaaggcc

SEQ ID NO: 83574 - RNA, 21 nt, synthetic construct
  source 1..21: mol_type = other RNA
ctgataggaatatcgtctttt

SEQ ID NO: 83575 - RNA, 21 nt, synthetic construct
  source 1..21: mol_type = other RNA
ctgataggataatgtccagag

SEQ ID NO: 83576 - RNA, 21 nt, synthetic construct
  source 1..21: mol_type = other RNA
ctgatatcctgtaaacctgga

SEQ ID NO: 83577 - RNA, 21 nt, synthetic construct
  source 1..21: mol_type = other RNA
ctgatatgagggatgaggaag

SEQ ID NO: 83578 - RNA, 21 nt, synthetic construct
  source 1..21: mol_type = other RNA
ctgatatgtcgcatgaaaaca

SEQ ID NO: 83579 - RNA, 21 nt, synthetic construct
  source 1..21: mol_type = other RNA
ctgatcaaggaagcttcctaa

SEQ ID NO: 83580 - RNA, 21 nt, synthetic construct
  source 1..21: mol_type = other RNA
ctgatcaagttgcttggcaca

SEQ ID NO: 83581 - RNA, 21 nt, synthetic construct
  source 1..21: mol_type = other RNA
ctgatcacaccctcctacctt

SEQ ID NO: 83582 - RNA, 21 nt, synthetic construct
  source 1..21: mol_type = other RNA
ctgatcacagaagtgttttga

SEQ ID NO: 83583 - RNA, 21 nt, synthetic construct
  source 1..21: mol_type = other RNA
ctgatcagcaccctcaaatgt

SEQ ID NO: 83584 - RNA, 21 nt, synthetic construct
  source 1..21: mol_type = other RNA
ctgatcaggaaagaccgggga

SEQ ID NO: 83585 - RNA, 21 nt, synthetic construct
  source 1..21: mol_type = other RNA
ctgatctgctcaagttttcta

SEQ ID NO: 83586 - RNA, 21 nt, synthetic construct
  source 1..21: mol_type = other RNA
ctgatcttttctgacaatttc

SEQ ID NO: 83587 - RNA, 21 nt, synthetic construct
  source 1..21: mol_type = other RNA
ctgatgaactacacagacatg

SEQ ID NO: 83588 - RNA, 21 nt, synthetic construct
  source 1..21: mol_type = other RNA
ctgatgaagaacctgttcatt

SEQ ID NO: 83589 - RNA, 21 nt, synthetic construct
  source 1..21: mol_type = other RNA
ctgatgacagttactctaaaa

SEQ ID NO: 83590 - RNA, 21 nt, synthetic construct
  source 1..21: mol_type = other RNA
ctgatgatgatggtgatgcta

SEQ ID NO: 83591 - RNA, 21 nt, synthetic construct
  source 1..21: mol_type = other RNA
ctgatgcacaagccttgaaaa

SEQ ID NO: 83592 - RNA, 21 nt, synthetic construct
  source 1..21: mol_type = other RNA
ctgatgctttctctagttgca

SEQ ID NO: 83593 - RNA, 21 nt, synthetic construct
  source 1..21: mol_type = other RNA
ctgatggaacggcttaacacc

SEQ ID NO: 83594 - RNA, 21 nt, synthetic construct
  source 1..21: mol_type = other RNA
ctgatggaattctgacacccg

SEQ ID NO: 83595 - RNA, 21 nt, synthetic construct
  source 1..21: mol_type = other RNA
ctgatggacattctgcttcct

SEQ ID NO: 83596 - RNA, 21 nt, synthetic construct
  source 1..21: mol_type = other RNA
ctgatgtaagtgggaggaggt

SEQ ID NO: 83597 - RNA, 21 nt, synthetic construct
  source 1..21: mol_type = other RNA
ctgatgtgaggatctgttggt

SEQ ID NO: 83598 - RNA, 21 nt, synthetic construct
  source 1..21: mol_type = other RNA
ctgatgtgtagttattattgt

SEQ ID NO: 83599 - RNA, 21 nt, synthetic construct
  source 1..21: mol_type = other RNA
ctgatgtgtatgttacacttc

SEQ ID NO: 83600 - RNA, 21 nt, synthetic construct
  source 1..21: mol_type = other RNA
ctgatgtgtgtctctgctctc

SEQ ID NO: 83601 - RNA, 21 nt, synthetic construct
  source 1..21: mol_type = other RNA
ctgatgtgttgaccttagtgg

SEQ ID NO: 83602 - RNA, 21 nt, synthetic construct
  source 1..21: mol_type = other RNA
ctgattaatttgaggtctagg

SEQ ID NO: 83603 - RNA, 21 nt, synthetic construct
  source 1..21: mol_type = other RNA
ctgattagaaggattgttcat

SEQ ID NO: 83604 - RNA, 21 nt, synthetic construct
  source 1..21: mol_type = other RNA
ctgattagaggctgcaccctc

SEQ ID NO: 83605 - RNA, 21 nt, synthetic construct
  source 1..21: mol_type = other RNA
ctgattataaccttgaacttc

SEQ ID NO: 83606 - RNA, 21 nt, synthetic construct
  source 1..21: mol_type = other RNA
ctgattcagtggttggaaaac

SEQ ID NO: 83607 - RNA, 21 nt, synthetic construct
  source 1..21: mol_type = other RNA
ctgattcttccactagtggga

SEQ ID NO: 83608 - RNA, 21 nt, synthetic construct
  source 1..21: mol_type = other RNA
ctgattgagattagcgaaagg

SEQ ID NO: 83609 - RNA, 21 nt, synthetic construct
  source 1..21: mol_type = other RNA
ctgattgagtatctggtgctg

SEQ ID NO: 83610 - RNA, 21 nt, synthetic construct
  source 1..21: mol_type = other RNA
ctgattgcccattataaaata

SEQ ID NO: 83611 - RNA, 21 nt, synthetic construct
  source 1..21: mol_type = other RNA
ctgatttaaagtaggttgaga

SEQ ID NO: 83612 - RNA, 21 nt, synthetic construct
  source 1..21: mol_type = other RNA
ctgatttaggccactctcatc

SEQ ID NO: 83613 - RNA, 21 nt, synthetic construct
  source 1..21: mol_type = other RNA
ctgatttatagtgtttccttc

SEQ ID NO: 83614 - RNA, 21 nt, synthetic construct
  source 1..21: mol_type = other RNA
ctgatttcaaagttaatagcc

SEQ ID NO: 83615 - RNA, 21 nt, synthetic construct
  source 1..21: mol_type = other RNA
ctgatttgctggctcagtctg

SEQ ID NO: 83616 - RNA, 21 nt, synthetic construct
  source 1..21: mol_type = other RNA
ctgatttgtttagtagctgtc

SEQ ID NO: 83617 - RNA, 21 nt, synthetic construct
  source 1..21: mol_type = other RNA
ctgattttaatctgtcctgaa

SEQ ID NO: 83618 - RNA, 21 nt, synthetic construct
  source 1..21: mol_type = other RNA
ctgattttctgcttctcaata

SEQ ID NO: 83619 - RNA, 21 nt, synthetic construct
  source 1..21: mol_type = other RNA
ctgattttgtgtcttctgttt

SEQ ID NO: 83620 - RNA, 21 nt, synthetic construct
  source 1..21: mol_type = other RNA
ctgatttttagtgactggctt

SEQ ID NO: 83621 - RNA, 21 nt, synthetic construct
  source 1..21: mol_type = other RNA
ctgcaaaactttcttcaaaat

SEQ ID NO: 83622 - RNA, 21 nt, synthetic construct
  source 1..21: mol_type = other RNA
ctgcaaatatccaatcactgg

SEQ ID NO: 83623 - RNA, 21 nt, synthetic construct
  source 1..21: mol_type = other RNA
ctgcaaatgaggttgctttta

SEQ ID NO: 83624 - RNA, 21 nt, synthetic construct
  source 1..21: mol_type = other RNA
ctgcaacagatctgagaagac

SEQ ID NO: 83625 - RNA, 21 nt, synthetic construct
  source 1..21: mol_type = other RNA
ctgcaacatttgttgcatccc

SEQ ID NO: 83626 - RNA, 21 nt, synthetic construct
  source 1..21: mol_type = other RNA
ctgcaacctccgtttttcagg

SEQ ID NO: 83627 - RNA, 21 nt, synthetic construct
  source 1..21: mol_type = other RNA
ctgcaactatcaaaacacttc

SEQ ID NO: 83628 - RNA, 21 nt, synthetic construct
  source 1..21: mol_type = other RNA
ctgcaactgagaagagctgta

SEQ ID NO: 83629 - RNA, 21 nt, synthetic construct
  source 1..21: mol_type = other RNA
ctgcaagcactggtaaggaaa

SEQ ID NO: 83630 - RNA, 21 nt, synthetic construct
  source 1..21: mol_type = other RNA
ctgcaagcagatctgctgtaa

SEQ ID NO: 83631 - RNA, 21 nt, synthetic construct
  source 1..21: mol_type = other RNA
ctgcaagctccgcctcctggt

SEQ ID NO: 83632 - RNA, 21 nt, synthetic construct
  source 1..21: mol_type = other RNA
ctgcaagttgctatccagtct

SEQ ID NO: 83633 - RNA, 21 nt, synthetic construct
  source 1..21: mol_type = other RNA
ctgcaatcacagcacttgggg

SEQ ID NO: 83634 - RNA, 21 nt, synthetic construct
  source 1..21: mol_type = other RNA
ctgcaattgcgcagaactggg

SEQ ID NO: 83635 - RNA, 21 nt, synthetic construct
  source 1..21: mol_type = other RNA
ctgcaattggaagactatcac

SEQ ID NO: 83636 - RNA, 21 nt, synthetic construct
  source 1..21: mol_type = other RNA
ctgcaattttaaatgtacaac

SEQ ID NO: 83637 - RNA, 21 nt, synthetic construct
  source 1..21: mol_type = other RNA
ctgcacaaaggattgggaaga

SEQ ID NO: 83638 - RNA, 21 nt, synthetic construct
  source 1..21: mol_type = other RNA
ctgcacagtatgcggggtttc

SEQ ID NO: 83639 - RNA, 21 nt, synthetic construct
  source 1..21: mol_type = other RNA
ctgcacataaaaggatatggg

SEQ ID NO: 83640 - RNA, 21 nt, synthetic construct
  source 1..21: mol_type = other RNA
ctgcacatgcacaaggtcaag

SEQ ID NO: 83641 - RNA, 21 nt, synthetic construct
  source 1..21: mol_type = other RNA
ctgcaccatttattgtcaagg

SEQ ID NO: 83642 - RNA, 21 nt, synthetic construct
  source 1..21: mol_type = other RNA
ctgcaccattttttcaccagc

SEQ ID NO: 83643 - RNA, 21 nt, synthetic construct
  source 1..21: mol_type = other RNA
ctgcaccctcctcctcctggc

SEQ ID NO: 83644 - RNA, 21 nt, synthetic construct
  source 1..21: mol_type = other RNA
ctgcacgtactagtcagcaca

SEQ ID NO: 83645 - RNA, 21 nt, synthetic construct
  source 1..21: mol_type = other RNA
ctgcacgtctgtggtctcagc

SEQ ID NO: 83646 - RNA, 21 nt, synthetic construct
  source 1..21: mol_type = other RNA
ctgcactaaactagtatcaac

SEQ ID NO: 83647 - RNA, 21 nt, synthetic construct
  source 1..21: mol_type = other RNA
ctgcactcaagcaatcctccg

SEQ ID NO: 83648 - RNA, 21 nt, synthetic construct
  source 1..21: mol_type = other RNA
ctgcactccagccttggtaag

SEQ ID NO: 83649 - RNA, 21 nt, synthetic construct
  source 1..21: mol_type = other RNA
ctgcactctcaaaattaaatt

SEQ ID NO: 83650 - RNA, 21 nt, synthetic construct
  source 1..21: mol_type = other RNA
ctgcactctggcctggacaac

SEQ ID NO: 83651 - RNA, 21 nt, synthetic construct
  source 1..21: mol_type = other RNA
ctgcactggctattagttaac

SEQ ID NO: 83652 - RNA, 21 nt, synthetic construct
  source 1..21: mol_type = other RNA
ctgcagaaggagaaaccattt

SEQ ID NO: 83653 - RNA, 21 nt, synthetic construct
  source 1..21: mol_type = other RNA
ctgcagaatgacagaaaatat

SEQ ID NO: 83654 - RNA, 21 nt, synthetic construct
  source 1..21: mol_type = other RNA
ctgcagaattactgacaatag

SEQ ID NO: 83655 - RNA, 21 nt, synthetic construct
  source 1..21: mol_type = other RNA
ctgcagacatgcacgagaaaa

SEQ ID NO: 83656 - RNA, 21 nt, synthetic construct
  source 1..21: mol_type = other RNA
ctgcagaccaagaaaggactt

SEQ ID NO: 83657 - RNA, 21 nt, synthetic construct
  source 1..21: mol_type = other RNA
ctgcagactcttgtcccggca

SEQ ID NO: 83658 - RNA, 21 nt, synthetic construct
  source 1..21: mol_type = other RNA
ctgcagactgcaggtcttcaa

SEQ ID NO: 83659 - RNA, 21 nt, synthetic construct
  source 1..21: mol_type = other RNA
ctgcagagactgtgcttccac

SEQ ID NO: 83660 - RNA, 21 nt, synthetic construct
  source 1..21: mol_type = other RNA
ctgcagagcaggctccacttg

SEQ ID NO: 83661 - RNA, 21 nt, synthetic construct
  source 1..21: mol_type = other RNA
ctgcagaggtcaggaaggcag

SEQ ID NO: 83662 - RNA, 21 nt, synthetic construct
  source 1..21: mol_type = other RNA
ctgcagatgaatgagcaaggt

SEQ ID NO: 83663 - RNA, 21 nt, synthetic construct
  source 1..21: mol_type = other RNA
ctgcagcaattatttgaataa

SEQ ID NO: 83664 - RNA, 21 nt, synthetic construct
  source 1..21: mol_type = other RNA
ctgcagccagatttgatcctg

SEQ ID NO: 83665 - RNA, 21 nt, synthetic construct
  source 1..21: mol_type = other RNA
ctgcaggagccttgctgttgt

SEQ ID NO: 83666 - RNA, 21 nt, synthetic construct
  source 1..21: mol_type = other RNA
ctgcaggcagaatgtgacctg

SEQ ID NO: 83667 - RNA, 21 nt, synthetic construct
  source 1..21: mol_type = other RNA
ctgcaggctgaactgctgaca

SEQ ID NO: 83668 - RNA, 21 nt, synthetic construct
  source 1..21: mol_type = other RNA
ctgcagggcttctgaaggtgc

SEQ ID NO: 83669 - RNA, 21 nt, synthetic construct
  source 1..21: mol_type = other RNA
ctgcaggtatttctaaatcaa

SEQ ID NO: 83670 - RNA, 21 nt, synthetic construct
  source 1..21: mol_type = other RNA
ctgcaggtcttcaacctcaac

SEQ ID NO: 83671 - RNA, 21 nt, synthetic construct
  source 1..21: mol_type = other RNA
ctgcaggtgttggtgcatttg

SEQ ID NO: 83672 - RNA, 21 nt, synthetic construct
  source 1..21: mol_type = other RNA
ctgcaggttgatactagttta

SEQ ID NO: 83673 - RNA, 21 nt, synthetic construct
  source 1..21: mol_type = other RNA
ctgcagtatgcatagatcaca

SEQ ID NO: 83674 - RNA, 21 nt, synthetic construct
  source 1..21: mol_type = other RNA
ctgcagtctcaaactcctgca

SEQ ID NO: 83675 - RNA, 21 nt, synthetic construct
  source 1..21: mol_type = other RNA
ctgcagtctgcaggcagaatg

SEQ ID NO: 83676 - RNA, 21 nt, synthetic construct
  source 1..21: mol_type = other RNA
ctgcagtctgtcctcgtaaaa

SEQ ID NO: 83677 - RNA, 21 nt, synthetic construct
  source 1..21: mol_type = other RNA
ctgcagtgaacatgggaatgc

SEQ ID NO: 83678 - RNA, 21 nt, synthetic construct
  source 1..21: mol_type = other RNA
ctgcagtggcgtgtgcccagg

SEQ ID NO: 83679 - RNA, 21 nt, synthetic construct
  source 1..21: mol_type = other RNA
ctgcagtgtccatctcccatc

SEQ ID NO: 83680 - RNA, 21 nt, synthetic construct
  source 1..21: mol_type = other RNA
ctgcagttagcatgcctgaca

SEQ ID NO: 83681 - RNA, 21 nt, synthetic construct
  source 1..21: mol_type = other RNA
ctgcagttggattatatgttc

SEQ ID NO: 83682 - RNA, 21 nt, synthetic construct
  source 1..21: mol_type = other RNA
ctgcagtttgtgttttcactc

SEQ ID NO: 83683 - RNA, 21 nt, synthetic construct
  source 1..21: mol_type = other RNA
ctgcagtttttccactaatgt

SEQ ID NO: 83684 - RNA, 21 nt, synthetic construct
  source 1..21: mol_type = other RNA
ctgcatacactcatttccttt

SEQ ID NO: 83685 - RNA, 21 nt, synthetic construct
  source 1..21: mol_type = other RNA
ctgcatacttagctaatttca

SEQ ID NO: 83686 - RNA, 21 nt, synthetic construct
  source 1..21: mol_type = other RNA
ctgcatagagatcttgtgtat

SEQ ID NO: 83687 - RNA, 21 nt, synthetic construct
  source 1..21: mol_type = other RNA
ctgcatagtactccattatat

SEQ ID NO: 83688 - RNA, 21 nt, synthetic construct
  source 1..21: mol_type = other RNA
ctgcatatgtttttattagca

SEQ ID NO: 83689 - RNA, 21 nt, synthetic construct
  source 1..21: mol_type = other RNA
ctgcatattgaagccagcacc

SEQ ID NO: 83690 - RNA, 21 nt, synthetic construct
  source 1..21: mol_type = other RNA
ctgcatcatggtgggccttgc

SEQ ID NO: 83691 - RNA, 21 nt, synthetic construct
  source 1..21: mol_type = other RNA
ctgcatccaaaagggaaatat

SEQ ID NO: 83692 - RNA, 21 nt, synthetic construct
  source 1..21: mol_type = other RNA
ctgcatcccaagggttttggt

SEQ ID NO: 83693 - RNA, 21 nt, synthetic construct
  source 1..21: mol_type = other RNA
ctgcatcttcttttacttgct

SEQ ID NO: 83694 - RNA, 21 nt, synthetic construct
  source 1..21: mol_type = other RNA
ctgcatcttttgagggtatca

SEQ ID NO: 83695 - RNA, 21 nt, synthetic construct
  source 1..21: mol_type = other RNA
ctgcatgattccccttatatg

SEQ ID NO: 83696 - RNA, 21 nt, synthetic construct
  source 1..21: mol_type = other RNA
ctgcatgctaggggctgttcc

SEQ ID NO: 83697 - RNA, 21 nt, synthetic construct
  source 1..21: mol_type = other RNA
ctgcatggggagttttaggaa

SEQ ID NO: 83698 - RNA, 21 nt, synthetic construct
  source 1..21: mol_type = other RNA
ctgcatggtgtaaaatacaac

SEQ ID NO: 83699 - RNA, 21 nt, synthetic construct
  source 1..21: mol_type = other RNA
ctgcattcatccaggcaaaag

SEQ ID NO: 83700 - RNA, 21 nt, synthetic construct
  source 1..21: mol_type = other RNA
ctgcattccgcctgggcgaca

SEQ ID NO: 83701 - RNA, 21 nt, synthetic construct
  source 1..21: mol_type = other RNA
ctgcattgcatttacttgtca

SEQ ID NO: 83702 - RNA, 21 nt, synthetic construct
  source 1..21: mol_type = other RNA
ctgcattgtgcacttaaaatt

SEQ ID NO: 83703 - RNA, 21 nt, synthetic construct
  source 1..21: mol_type = other RNA
ctgcatttggtttgcaaaaat

SEQ ID NO: 83704 - RNA, 21 nt, synthetic construct
  source 1..21: mol_type = other RNA
ctgcattttttgccaaattat

SEQ ID NO: 83705 - RNA, 21 nt, synthetic construct
  source 1..21: mol_type = other RNA
ctgccaaaagccaagagcgag

SEQ ID NO: 83706 - RNA, 21 nt, synthetic construct
  source 1..21: mol_type = other RNA
ctgccaaaccctacacccatc

SEQ ID NO: 83707 - RNA, 21 nt, synthetic construct
  source 1..21: mol_type = other RNA
ctgccaagtcagcacttctga

SEQ ID NO: 83708 - RNA, 21 nt, synthetic construct
  source 1..21: mol_type = other RNA
ctgccacactccagcatccct

SEQ ID NO: 83709 - RNA, 21 nt, synthetic construct
  source 1..21: mol_type = other RNA
ctgccacattcaacaacatgg

SEQ ID NO: 83710 - RNA, 21 nt, synthetic construct
  source 1..21: mol_type = other RNA
ctgccactacttagcccctgc

SEQ ID NO: 83711 - RNA, 21 nt, synthetic construct
  source 1..21: mol_type = other RNA
ctgccagagttggcacagcca

SEQ ID NO: 83712 - RNA, 21 nt, synthetic construct
  source 1..21: mol_type = other RNA
ctgccagatgttctaatttct

SEQ ID NO: 83713 - RNA, 21 nt, synthetic construct
  source 1..21: mol_type = other RNA
ctgccagcaccagatactcaa

SEQ ID NO: 83714 - RNA, 21 nt, synthetic construct
  source 1..21: mol_type = other RNA
ctgccaggacaattgaatggg

SEQ ID NO: 83715 - RNA, 21 nt, synthetic construct
  source 1..21: mol_type = other RNA
ctgccaggtagggaggggtat

SEQ ID NO: 83716 - RNA, 21 nt, synthetic construct
  source 1..21: mol_type = other RNA
ctgccatagagggagcatctt

SEQ ID NO: 83717 - RNA, 21 nt, synthetic construct
  source 1..21: mol_type = other RNA
ctgccatggtgttaaatattt

SEQ ID NO: 83718 - RNA, 21 nt, synthetic construct
  source 1..21: mol_type = other RNA
ctgcccatcctatctaagcct

SEQ ID NO: 83719 - RNA, 21 nt, synthetic construct
  source 1..21: mol_type = other RNA
ctgccccagctaaaatgttca

SEQ ID NO: 83720 - RNA, 21 nt, synthetic construct
  source 1..21: mol_type = other RNA
ctgccccgggcctggttaggg

SEQ ID NO: 83721 - RNA, 21 nt, synthetic construct
  source 1..21: mol_type = other RNA
ctgcccctccactccacaaag

SEQ ID NO: 83722 - RNA, 21 nt, synthetic construct
  source 1..21: mol_type = other RNA
ctgccccttatcctcttctga

SEQ ID NO: 83723 - RNA, 21 nt, synthetic construct
  source 1..21: mol_type = other RNA
ctgccctcattgaagctacta

SEQ ID NO: 83724 - RNA, 21 nt, synthetic construct
  source 1..21: mol_type = other RNA
ctgccctgtgaaaatcatttt

SEQ ID NO: 83725 - RNA, 21 nt, synthetic construct
  source 1..21: mol_type = other RNA
ctgccgcagagcaagcacgtt

SEQ ID NO: 83726 - RNA, 21 nt, synthetic construct
  source 1..21: mol_type = other RNA
ctgccgcttcgcctttctcgc

SEQ ID NO: 83727 - RNA, 21 nt, synthetic construct
  source 1..21: mol_type = other RNA
ctgcctaagtaatgctggcca

SEQ ID NO: 83728 - RNA, 21 nt, synthetic construct
  source 1..21: mol_type = other RNA
ctgcctaatctctaggcttaa

SEQ ID NO: 83729 - RNA, 21 nt, synthetic construct
  source 1..21: mol_type = other RNA
ctgcctcaaaatcaacattgc

SEQ ID NO: 83730 - RNA, 21 nt, synthetic construct
  source 1..21: mol_type = other RNA
ctgcctcagccgccgcagagg

SEQ ID NO: 83731 - RNA, 21 nt, synthetic construct
  source 1..21: mol_type = other RNA
ctgcctcagttgacatccttt

SEQ ID NO: 83732 - RNA, 21 nt, synthetic construct
  source 1..21: mol_type = other RNA
ctgcctccacaggctttgact

SEQ ID NO: 83733 - RNA, 21 nt, synthetic construct
  source 1..21: mol_type = other RNA
ctgcctcccgggtccaggcag

SEQ ID NO: 83734 - RNA, 21 nt, synthetic construct
  source 1..21: mol_type = other RNA
ctgcctcggcacagctctcat

SEQ ID NO: 83735 - RNA, 21 nt, synthetic construct
  source 1..21: mol_type = other RNA
ctgcctctacatcacagacag

SEQ ID NO: 83736 - RNA, 21 nt, synthetic construct
  source 1..21: mol_type = other RNA
ctgcctcttcctgttgcttta

SEQ ID NO: 83737 - RNA, 21 nt, synthetic construct
  source 1..21: mol_type = other RNA
ctgcctgaggtctcaaaattt

SEQ ID NO: 83738 - RNA, 21 nt, synthetic construct
  source 1..21: mol_type = other RNA
ctgcctgcagactgcaggtct

SEQ ID NO: 83739 - RNA, 21 nt, synthetic construct
  source 1..21: mol_type = other RNA
ctgcctggacccgggaggcag

SEQ ID NO: 83740 - RNA, 21 nt, synthetic construct
  source 1..21: mol_type = other RNA
ctgcctggtcctgagggcttt

SEQ ID NO: 83741 - RNA, 21 nt, synthetic construct
  source 1..21: mol_type = other RNA
ctgccttcaatgtttggtaga

SEQ ID NO: 83742 - RNA, 21 nt, synthetic construct
  source 1..21: mol_type = other RNA
ctgccttcctgacctctgcag

SEQ ID NO: 83743 - RNA, 21 nt, synthetic construct
  source 1..21: mol_type = other RNA
ctgccttccttgggcacactc

SEQ ID NO: 83744 - RNA, 21 nt, synthetic construct
  source 1..21: mol_type = other RNA
ctgccttgacctcccaaagga

SEQ ID NO: 83745 - RNA, 21 nt, synthetic construct
  source 1..21: mol_type = other RNA
ctgccttgaggtgattcagag

SEQ ID NO: 83746 - RNA, 21 nt, synthetic construct
  source 1..21: mol_type = other RNA
ctgccttggccttctgaggag

SEQ ID NO: 83747 - RNA, 21 nt, synthetic construct
  source 1..21: mol_type = other RNA
ctgcctttgttcatcatcttt

SEQ ID NO: 83748 - RNA, 21 nt, synthetic construct
  source 1..21: mol_type = other RNA
ctgcgaaggcaatgtaacaca

SEQ ID NO: 83749 - RNA, 21 nt, synthetic construct
  source 1..21: mol_type = other RNA
ctgcgagaaaggcgaagcggc

SEQ ID NO: 83750 - RNA, 21 nt, synthetic construct
  source 1..21: mol_type = other RNA
ctgcgattggttggactccac

SEQ ID NO: 83751 - RNA, 21 nt, synthetic construct
  source 1..21: mol_type = other RNA
ctgcgcaattgcagccagaga

SEQ ID NO: 83752 - RNA, 21 nt, synthetic construct
  source 1..21: mol_type = other RNA
ctgcgccaagcagggacgggc

SEQ ID NO: 83753 - RNA, 21 nt, synthetic construct
  source 1..21: mol_type = other RNA
ctgcgccttaaagccacactc

SEQ ID NO: 83754 - RNA, 21 nt, synthetic construct
  source 1..21: mol_type = other RNA
ctgcggcaggcattgtgctca

SEQ ID NO: 83755 - RNA, 21 nt, synthetic construct
  source 1..21: mol_type = other RNA
ctgcgggcccagctcttttgt

SEQ ID NO: 83756 - RNA, 21 nt, synthetic construct
  source 1..21: mol_type = other RNA
ctgcgtccgtagaccgaggaa

SEQ ID NO: 83757 - RNA, 21 nt, synthetic construct
  source 1..21: mol_type = other RNA
ctgcgtggtttattcatataa

SEQ ID NO: 83758 - RNA, 21 nt, synthetic construct
  source 1..21: mol_type = other RNA
ctgcgtgttattttaatcgaa

SEQ ID NO: 83759 - RNA, 21 nt, synthetic construct
  source 1..21: mol_type = other RNA
ctgctaacaccttgaactggg

SEQ ID NO: 83760 - RNA, 21 nt, synthetic construct
  source 1..21: mol_type = other RNA
ctgctaataaaaacatatgca

SEQ ID NO: 83761 - RNA, 21 nt, synthetic construct
  source 1..21: mol_type = other RNA
ctgctaatggtccttgctgaa

SEQ ID NO: 83762 - RNA, 21 nt, synthetic construct
  source 1..21: mol_type = other RNA
ctgctacaggggcattccctg

SEQ ID NO: 83763 - RNA, 21 nt, synthetic construct
  source 1..21: mol_type = other RNA
ctgctacgaatgaactcctat

SEQ ID NO: 83764 - RNA, 21 nt, synthetic construct
  source 1..21: mol_type = other RNA
ctgctactagcaagctaataa

SEQ ID NO: 83765 - RNA, 21 nt, synthetic construct
  source 1..21: mol_type = other RNA
ctgctactcaggagattaagg

SEQ ID NO: 83766 - RNA, 21 nt, synthetic construct
  source 1..21: mol_type = other RNA
ctgctacttgtggggctgagg

SEQ ID NO: 83767 - RNA, 21 nt, synthetic construct
  source 1..21: mol_type = other RNA
ctgctataaacttccctctca

SEQ ID NO: 83768 - RNA, 21 nt, synthetic construct
  source 1..21: mol_type = other RNA
ctgctatacaaccggaaaatg

SEQ ID NO: 83769 - RNA, 21 nt, synthetic construct
  source 1..21: mol_type = other RNA
ctgctatgaaaattggcgtac

SEQ ID NO: 83770 - RNA, 21 nt, synthetic construct
  source 1..21: mol_type = other RNA
ctgctatgaaatgtggttttt

SEQ ID NO: 83771 - RNA, 21 nt, synthetic construct
  source 1..21: mol_type = other RNA
ctgctatgactaatttgaggc

SEQ ID NO: 83772 - RNA, 21 nt, synthetic construct
  source 1..21: mol_type = other RNA
ctgctatgcatactttggaag

SEQ ID NO: 83773 - RNA, 21 nt, synthetic construct
  source 1..21: mol_type = other RNA
ctgctatgctgaaaggcatga

SEQ ID NO: 83774 - RNA, 21 nt, synthetic construct
  source 1..21: mol_type = other RNA
ctgctattctctttctgaaat

SEQ ID NO: 83775 - RNA, 21 nt, synthetic construct
  source 1..21: mol_type = other RNA
ctgctattgataaatctaaag

SEQ ID NO: 83776 - RNA, 21 nt, synthetic construct
  source 1..21: mol_type = other RNA
ctgctattttattagatagtg

SEQ ID NO: 83777 - RNA, 21 nt, synthetic construct
  source 1..21: mol_type = other RNA
ctgctcaaaggggcattccgt

SEQ ID NO: 83778 - RNA, 21 nt, synthetic construct
  source 1..21: mol_type = other RNA
ctgctcaccgcaacatctgcc

SEQ ID NO: 83779 - RNA, 21 nt, synthetic construct
  source 1..21: mol_type = other RNA
ctgctcactgcaacctttgtc

SEQ ID NO: 83780 - RNA, 21 nt, synthetic construct
  source 1..21: mol_type = other RNA
ctgctcactttgggattagct

SEQ ID NO: 83781 - RNA, 21 nt, synthetic construct
  source 1..21: mol_type = other RNA
ctgctcagaagctttcagact

SEQ ID NO: 83782 - RNA, 21 nt, synthetic construct
  source 1..21: mol_type = other RNA
ctgctcagtccctcaccttct

SEQ ID NO: 83783 - RNA, 21 nt, synthetic construct
  source 1..21: mol_type = other RNA
ctgctcataatagtctcacga

SEQ ID NO: 83784 - RNA, 21 nt, synthetic construct
  source 1..21: mol_type = other RNA
ctgctccagtatgacctcctc

SEQ ID NO: 83785 - RNA, 21 nt, synthetic construct
  source 1..21: mol_type = other RNA
ctgctccctctgccgcctggg

SEQ ID NO: 83786 - RNA, 21 nt, synthetic construct
  source 1..21: mol_type = other RNA
ctgctcctctgactttatggt

SEQ ID NO: 83787 - RNA, 21 nt, synthetic construct
  source 1..21: mol_type = other RNA
ctgctcctgcctttgttcatc

SEQ ID NO: 83788 - RNA, 21 nt, synthetic construct
  source 1..21: mol_type = other RNA
ctgctcggctctgtcaccctt

SEQ ID NO: 83789 - RNA, 21 nt, synthetic construct
  source 1..21: mol_type = other RNA
ctgctctcaagtaattgtttt

SEQ ID NO: 83790 - RNA, 21 nt, synthetic construct
  source 1..21: mol_type = other RNA
ctgctctgacgtttaaatgag

SEQ ID NO: 83791 - RNA, 21 nt, synthetic construct
  source 1..21: mol_type = other RNA
ctgctctgcacgtactagtca

SEQ ID NO: 83792 - RNA, 21 nt, synthetic construct
  source 1..21: mol_type = other RNA
ctgctctgcagagactgtgct

SEQ ID NO: 83793 - RNA, 21 nt, synthetic construct
  source 1..21: mol_type = other RNA
ctgctctgtcctgtcagtgtg

SEQ ID NO: 83794 - RNA, 21 nt, synthetic construct
  source 1..21: mol_type = other RNA
ctgctcttctattccagagaa

SEQ ID NO: 83795 - RNA, 21 nt, synthetic construct
  source 1..21: mol_type = other RNA
ctgctctttatctccacattt

SEQ ID NO: 83796 - RNA, 21 nt, synthetic construct
  source 1..21: mol_type = other RNA
ctgctgaaaaagatactctta

SEQ ID NO: 83797 - RNA, 21 nt, synthetic construct
  source 1..21: mol_type = other RNA
ctgctgacagattaaatacca

SEQ ID NO: 83798 - RNA, 21 nt, synthetic construct
  source 1..21: mol_type = other RNA
ctgctgagtcttctactgtga

SEQ ID NO: 83799 - RNA, 21 nt, synthetic construct
  source 1..21: mol_type = other RNA
ctgctgatgtaagtgggagga

SEQ ID NO: 83800 - RNA, 21 nt, synthetic construct
  source 1..21: mol_type = other RNA
ctgctgccagatgttctaatt

SEQ ID NO: 83801 - RNA, 21 nt, synthetic construct
  source 1..21: mol_type = other RNA
ctgctgctgaaaaagatactc

SEQ ID NO: 83802 - RNA, 21 nt, synthetic construct
  source 1..21: mol_type = other RNA
ctgctggaacgaatattcatt

SEQ ID NO: 83803 - RNA, 21 nt, synthetic construct
  source 1..21: mol_type = other RNA
ctgctggatcatatagtaatt

SEQ ID NO: 83804 - RNA, 21 nt, synthetic construct
  source 1..21: mol_type = other RNA
ctgctgggcccactctcccca

SEQ ID NO: 83805 - RNA, 21 nt, synthetic construct
  source 1..21: mol_type = other RNA
ctgctgggctattgttttgca

SEQ ID NO: 83806 - RNA, 21 nt, synthetic construct
  source 1..21: mol_type = other RNA
ctgctggtctggaatgtgtag

SEQ ID NO: 83807 - RNA, 21 nt, synthetic construct
  source 1..21: mol_type = other RNA
ctgctgtaacaaagatgccac

SEQ ID NO: 83808 - RNA, 21 nt, synthetic construct
  source 1..21: mol_type = other RNA
ctgctgtaagctggtaataca

SEQ ID NO: 83809 - RNA, 21 nt, synthetic construct
  source 1..21: mol_type = other RNA
ctgctgtcggttttctagtta

SEQ ID NO: 83810 - RNA, 21 nt, synthetic construct
  source 1..21: mol_type = other RNA
ctgctgtcgtttatgcattta

SEQ ID NO: 83811 - RNA, 21 nt, synthetic construct
  source 1..21: mol_type = other RNA
ctgctgtggccgagggagacg

SEQ ID NO: 83812 - RNA, 21 nt, synthetic construct
  source 1..21: mol_type = other RNA
ctgctgttcccaagcaagtgt

SEQ ID NO: 83813 - RNA, 21 nt, synthetic construct
  source 1..21: mol_type = other RNA
ctgctgttgatggacgtttga

SEQ ID NO: 83814 - RNA, 21 nt, synthetic construct
  source 1..21: mol_type = other RNA
ctgctgtttaccaagggtgtg

SEQ ID NO: 83815 - RNA, 21 nt, synthetic construct
  source 1..21: mol_type = other RNA
ctgcttaaagcctctcaacac

SEQ ID NO: 83816 - RNA, 21 nt, synthetic construct
  source 1..21: mol_type = other RNA
ctgcttagtcttctcagatct

SEQ ID NO: 83817 - RNA, 21 nt, synthetic construct
  source 1..21: mol_type = other RNA
ctgcttattatatgcctagat

SEQ ID NO: 83818 - RNA, 21 nt, synthetic construct
  source 1..21: mol_type = other RNA
ctgcttcactaactttaaatt

SEQ ID NO: 83819 - RNA, 21 nt, synthetic construct
  source 1..21: mol_type = other RNA
ctgcttcagcctaagcaagtt

SEQ ID NO: 83820 - RNA, 21 nt, synthetic construct
  source 1..21: mol_type = other RNA
ctgcttcatctggaccagtta

SEQ ID NO: 83821 - RNA, 21 nt, synthetic construct
  source 1..21: mol_type = other RNA
ctgcttcattccgcgtttatt

SEQ ID NO: 83822 - RNA, 21 nt, synthetic construct
  source 1..21: mol_type = other RNA
ctgcttccacatttctaattt

SEQ ID NO: 83823 - RNA, 21 nt, synthetic construct
  source 1..21: mol_type = other RNA
ctgcttcccccaaagaaggaa

SEQ ID NO: 83824 - RNA, 21 nt, synthetic construct
  source 1..21: mol_type = other RNA
ctgcttccctagcccagcact

SEQ ID NO: 83825 - RNA, 21 nt, synthetic construct
  source 1..21: mol_type = other RNA
ctgcttccttgctatgtaatc

SEQ ID NO: 83826 - RNA, 21 nt, synthetic construct
  source 1..21: mol_type = other RNA
ctgcttctacccactattgaa

SEQ ID NO: 83827 - RNA, 21 nt, synthetic construct
  source 1..21: mol_type = other RNA
ctgcttctcaataaggaaagc

SEQ ID NO: 83828 - RNA, 21 nt, synthetic construct
  source 1..21: mol_type = other RNA
ctgcttgaatgtgcctacata

SEQ ID NO: 83829 - RNA, 21 nt, synthetic construct
  source 1..21: mol_type = other RNA
ctgcttgaggccacgagttca

SEQ ID NO: 83830 - RNA, 21 nt, synthetic construct
  source 1..21: mol_type = other RNA
ctgcttgcagacaataattct

SEQ ID NO: 83831 - RNA, 21 nt, synthetic construct
  source 1..21: mol_type = other RNA
ctgcttgctgcactggctatt

SEQ ID NO: 83832 - RNA, 21 nt, synthetic construct
  source 1..21: mol_type = other RNA
ctgcttggcgcagtgcttagc

SEQ ID NO: 83833 - RNA, 21 nt, synthetic construct
  source 1..21: mol_type = other RNA
ctgctttaaaacactggcaaa

SEQ ID NO: 83834 - RNA, 21 nt, synthetic construct
  source 1..21: mol_type = other RNA
ctgctttcagttctttcggat

SEQ ID NO: 83835 - RNA, 21 nt, synthetic construct
  source 1..21: mol_type = other RNA
ctgctttcctcatgtccatag

SEQ ID NO: 83836 - RNA, 21 nt, synthetic construct
  source 1..21: mol_type = other RNA
ctgctttctactagtataaga

SEQ ID NO: 83837 - RNA, 21 nt, synthetic construct
  source 1..21: mol_type = other RNA
ctgctttcttggggctctaat

SEQ ID NO: 83838 - RNA, 21 nt, synthetic construct
  source 1..21: mol_type = other RNA
ctgcttttggaagcatgtggc

SEQ ID NO: 83839 - RNA, 21 nt, synthetic construct
  source 1..21: mol_type = other RNA
ctgctttttcttggtggtaac

SEQ ID NO: 83840 - RNA, 21 nt, synthetic construct
  source 1..21: mol_type = other RNA
ctggaaaaagaccataatata

SEQ ID NO: 83841 - RNA, 21 nt, synthetic construct
  source 1..21: mol_type = other RNA
ctggaaaactagagatgggaa

SEQ ID NO: 83842 - RNA, 21 nt, synthetic construct
  source 1..21: mol_type = other RNA
ctggaaaacttctctggagca

SEQ ID NO: 83843 - RNA, 21 nt, synthetic construct
  source 1..21: mol_type = other RNA
ctggaaaagtgttgactacca

SEQ ID NO: 83844 - RNA, 21 nt, synthetic construct
  source 1..21: mol_type = other RNA
ctggaaaccttttgtagaccc

SEQ ID NO: 83845 - RNA, 21 nt, synthetic construct
  source 1..21: mol_type = other RNA
ctggaaactcaaacccaaatt

SEQ ID NO: 83846 - RNA, 21 nt, synthetic construct
  source 1..21: mol_type = other RNA
ctggaaaggacttgatctaaa

SEQ ID NO: 83847 - RNA, 21 nt, synthetic construct
  source 1..21: mol_type = other RNA
ctggaaagttcaaatgaggct

SEQ ID NO: 83848 - RNA, 21 nt, synthetic construct
  source 1..21: mol_type = other RNA
ctggaaataagtttcatggac

SEQ ID NO: 83849 - RNA, 21 nt, synthetic construct
  source 1..21: mol_type = other RNA
ctggaaataatttccctcaga

SEQ ID NO: 83850 - RNA, 21 nt, synthetic construct
  source 1..21: mol_type = other RNA
ctggaaatcacaggtttaggt

SEQ ID NO: 83851 - RNA, 21 nt, synthetic construct
  source 1..21: mol_type = other RNA
ctggaaatggacagcggggat

SEQ ID NO: 83852 - RNA, 21 nt, synthetic construct
  source 1..21: mol_type = other RNA
ctggaaattttcaagggtgtt

SEQ ID NO: 83853 - RNA, 21 nt, synthetic construct
  source 1..21: mol_type = other RNA
ctggaacaatcaaaccatcct

SEQ ID NO: 83854 - RNA, 21 nt, synthetic construct
  source 1..21: mol_type = other RNA
ctggaacacacattagcctag

SEQ ID NO: 83855 - RNA, 21 nt, synthetic construct
  source 1..21: mol_type = other RNA
ctggaacaggccctttgttag

SEQ ID NO: 83856 - RNA, 21 nt, synthetic construct
  source 1..21: mol_type = other RNA
ctggaacgaatattcatttat

SEQ ID NO: 83857 - RNA, 21 nt, synthetic construct
  source 1..21: mol_type = other RNA
ctggaactcatttctgcttga

SEQ ID NO: 83858 - RNA, 21 nt, synthetic construct
  source 1..21: mol_type = other RNA
ctggaagaattttaagcctag

SEQ ID NO: 83859 - RNA, 21 nt, synthetic construct
  source 1..21: mol_type = other RNA
ctggaagatttctactggggt

SEQ ID NO: 83860 - RNA, 21 nt, synthetic construct
  source 1..21: mol_type = other RNA
ctggaaggaaacactataaat

SEQ ID NO: 83861 - RNA, 21 nt, synthetic construct
  source 1..21: mol_type = other RNA
ctggaaggaaataagaaggtt

SEQ ID NO: 83862 - RNA, 21 nt, synthetic construct
  source 1..21: mol_type = other RNA
ctggaaggactcacagcttac

SEQ ID NO: 83863 - RNA, 21 nt, synthetic construct
  source 1..21: mol_type = other RNA
ctggaaggctaagcatgtaac

SEQ ID NO: 83864 - RNA, 21 nt, synthetic construct
  source 1..21: mol_type = other RNA
ctggaagggagcccaagcaca

SEQ ID NO: 83865 - RNA, 21 nt, synthetic construct
  source 1..21: mol_type = other RNA
ctggaagtaaggattttctat

SEQ ID NO: 83866 - RNA, 21 nt, synthetic construct
  source 1..21: mol_type = other RNA
ctggaagtaattgggatctga

SEQ ID NO: 83867 - RNA, 21 nt, synthetic construct
  source 1..21: mol_type = other RNA
ctggaagtgtaacatacacat

SEQ ID NO: 83868 - RNA, 21 nt, synthetic construct
  source 1..21: mol_type = other RNA
ctggaagttcaaggttataat

SEQ ID NO: 83869 - RNA, 21 nt, synthetic construct
  source 1..21: mol_type = other RNA
ctggaagttggcccaacatgc

SEQ ID NO: 83870 - RNA, 21 nt, synthetic construct
  source 1..21: mol_type = other RNA
ctggaagtttcctgcacatgc

SEQ ID NO: 83871 - RNA, 21 nt, synthetic construct
  source 1..21: mol_type = other RNA
ctggaatagaagagcagtgtg

SEQ ID NO: 83872 - RNA, 21 nt, synthetic construct
  source 1..21: mol_type = other RNA
ctggaatagtagcttcaatga

SEQ ID NO: 83873 - RNA, 21 nt, synthetic construct
  source 1..21: mol_type = other RNA
ctggaatcaatccagacagct

SEQ ID NO: 83874 - RNA, 21 nt, synthetic construct
  source 1..21: mol_type = other RNA
ctggaatcctctaccaaaaaa

SEQ ID NO: 83875 - RNA, 21 nt, synthetic construct
  source 1..21: mol_type = other RNA
ctggaatgcatcgtttcaata

SEQ ID NO: 83876 - RNA, 21 nt, synthetic construct
  source 1..21: mol_type = other RNA
ctggaatgcccatcctctatt

SEQ ID NO: 83877 - RNA, 21 nt, synthetic construct
  source 1..21: mol_type = other RNA
ctggaatgggttggaggagaa

SEQ ID NO: 83878 - RNA, 21 nt, synthetic construct
  source 1..21: mol_type = other RNA
ctggaatggtgaagaatgtga

SEQ ID NO: 83879 - RNA, 21 nt, synthetic construct
  source 1..21: mol_type = other RNA
ctggaatgtgtagttctggtg

SEQ ID NO: 83880 - RNA, 21 nt, synthetic construct
  source 1..21: mol_type = other RNA
ctggaattcatcaaagttaaa

SEQ ID NO: 83881 - RNA, 21 nt, synthetic construct
  source 1..21: mol_type = other RNA
ctggacaacagtgtgagaccg

SEQ ID NO: 83882 - RNA, 21 nt, synthetic construct
  source 1..21: mol_type = other RNA
ctggacacacacagtcctgtg

SEQ ID NO: 83883 - RNA, 21 nt, synthetic construct
  source 1..21: mol_type = other RNA
ctggacaggatcccggaacag

SEQ ID NO: 83884 - RNA, 21 nt, synthetic construct
  source 1..21: mol_type = other RNA
ctggacataagggtctgtttt

SEQ ID NO: 83885 - RNA, 21 nt, synthetic construct
  source 1..21: mol_type = other RNA
ctggacattatcctatcagag

SEQ ID NO: 83886 - RNA, 21 nt, synthetic construct
  source 1..21: mol_type = other RNA
ctggaccacaatcttaccccc

SEQ ID NO: 83887 - RNA, 21 nt, synthetic construct
  source 1..21: mol_type = other RNA
ctggaccagttactctctctg

SEQ ID NO: 83888 - RNA, 21 nt, synthetic construct
  source 1..21: mol_type = other RNA
ctggacccgggaggcagatgt

SEQ ID NO: 83889 - RNA, 21 nt, synthetic construct
  source 1..21: mol_type = other RNA
ctggacccttaccttaaacca

SEQ ID NO: 83890 - RNA, 21 nt, synthetic construct
  source 1..21: mol_type = other RNA
ctggactcagggtcacttcct

SEQ ID NO: 83891 - RNA, 21 nt, synthetic construct
  source 1..21: mol_type = other RNA
ctggactcattccaatccttc

SEQ ID NO: 83892 - RNA, 21 nt, synthetic construct
  source 1..21: mol_type = other RNA
ctggactccttctgaaggcac

SEQ ID NO: 83893 - RNA, 21 nt, synthetic construct
  source 1..21: mol_type = other RNA
ctggactgaaaagatacagaa

SEQ ID NO: 83894 - RNA, 21 nt, synthetic construct
  source 1..21: mol_type = other RNA
ctggactggagggatgctgga

SEQ ID NO: 83895 - RNA, 21 nt, synthetic construct
  source 1..21: mol_type = other RNA
ctggactgtgatgactgtaag

SEQ ID NO: 83896 - RNA, 21 nt, synthetic construct
  source 1..21: mol_type = other RNA
ctggagaaagcccagccgcgg

SEQ ID NO: 83897 - RNA, 21 nt, synthetic construct
  source 1..21: mol_type = other RNA
ctggagaacagtaaagtcact

SEQ ID NO: 83898 - RNA, 21 nt, synthetic construct
  source 1..21: mol_type = other RNA
ctggagaattctactaaacat

SEQ ID NO: 83899 - RNA, 21 nt, synthetic construct
  source 1..21: mol_type = other RNA
ctggagaggcaaaggccgctc

SEQ ID NO: 83900 - RNA, 21 nt, synthetic construct
  source 1..21: mol_type = other RNA
ctggagcaagcatgagtatct

SEQ ID NO: 83901 - RNA, 21 nt, synthetic construct
  source 1..21: mol_type = other RNA
ctggagcagggtgggccctta

SEQ ID NO: 83902 - RNA, 21 nt, synthetic construct
  source 1..21: mol_type = other RNA
ctggagcctgaggacactagc

SEQ ID NO: 83903 - RNA, 21 nt, synthetic construct
  source 1..21: mol_type = other RNA
ctggagctcactgcagcctca

SEQ ID NO: 83904 - RNA, 21 nt, synthetic construct
  source 1..21: mol_type = other RNA
ctggaggatggcttgagccca

SEQ ID NO: 83905 - RNA, 21 nt, synthetic construct
  source 1..21: mol_type = other RNA
ctggaggctagaagtcccagt

SEQ ID NO: 83906 - RNA, 21 nt, synthetic construct
  source 1..21: mol_type = other RNA
ctggagggatgctggagtgtg

SEQ ID NO: 83907 - RNA, 21 nt, synthetic construct
  source 1..21: mol_type = other RNA
ctggagggctcccagtgccca

SEQ ID NO: 83908 - RNA, 21 nt, synthetic construct
  source 1..21: mol_type = other RNA
ctggaggtcgggctgcctcag

SEQ ID NO: 83909 - RNA, 21 nt, synthetic construct
  source 1..21: mol_type = other RNA
ctggaggtgcacattccaaga

SEQ ID NO: 83910 - RNA, 21 nt, synthetic construct
  source 1..21: mol_type = other RNA
ctggagtgcaatggtgggatc

SEQ ID NO: 83911 - RNA, 21 nt, synthetic construct
  source 1..21: mol_type = other RNA
ctggagtggagtggcatgatc

SEQ ID NO: 83912 - RNA, 21 nt, synthetic construct
  source 1..21: mol_type = other RNA
ctggagtgtggcaggggctgc

SEQ ID NO: 83913 - RNA, 21 nt, synthetic construct
  source 1..21: mol_type = other RNA
ctggagtgttttcttcatgga

SEQ ID NO: 83914 - RNA, 21 nt, synthetic construct
  source 1..21: mol_type = other RNA
ctggagttaattccacaacca

SEQ ID NO: 83915 - RNA, 21 nt, synthetic construct
  source 1..21: mol_type = other RNA
ctggatacaaggtcaatctga

SEQ ID NO: 83916 - RNA, 21 nt, synthetic construct
  source 1..21: mol_type = other RNA
ctggatacggaaatataacat

SEQ ID NO: 83917 - RNA, 21 nt, synthetic construct
  source 1..21: mol_type = other RNA
ctggatagaagtgtatcagat

SEQ ID NO: 83918 - RNA, 21 nt, synthetic construct
  source 1..21: mol_type = other RNA
ctggatagcaacttgcagaag

SEQ ID NO: 83919 - RNA, 21 nt, synthetic construct
  source 1..21: mol_type = other RNA
ctggatagcattatcccttta

SEQ ID NO: 83920 - RNA, 21 nt, synthetic construct
  source 1..21: mol_type = other RNA
ctggatcaagtgggatttatc

SEQ ID NO: 83921 - RNA, 21 nt, synthetic construct
  source 1..21: mol_type = other RNA
ctggatcatatagtaattctg

SEQ ID NO: 83922 - RNA, 21 nt, synthetic construct
  source 1..21: mol_type = other RNA
ctggatcccccagcccctggt

SEQ ID NO: 83923 - RNA, 21 nt, synthetic construct
  source 1..21: mol_type = other RNA
ctggatcctggagggctccca

SEQ ID NO: 83924 - RNA, 21 nt, synthetic construct
  source 1..21: mol_type = other RNA
ctggatcctgtctcagagtat

SEQ ID NO: 83925 - RNA, 21 nt, synthetic construct
  source 1..21: mol_type = other RNA
ctggatgaatacaaaggtgtt

SEQ ID NO: 83926 - RNA, 21 nt, synthetic construct
  source 1..21: mol_type = other RNA
ctggatgaatgcagtggcttc

SEQ ID NO: 83927 - RNA, 21 nt, synthetic construct
  source 1..21: mol_type = other RNA
ctggatgtggtgtggcatgtc

SEQ ID NO: 83928 - RNA, 21 nt, synthetic construct
  source 1..21: mol_type = other RNA
ctggatgtgtatgatcaaagt

SEQ ID NO: 83929 - RNA, 21 nt, synthetic construct
  source 1..21: mol_type = other RNA
ctggatgttaattagatatgt

SEQ ID NO: 83930 - RNA, 21 nt, synthetic construct
  source 1..21: mol_type = other RNA
ctggattaaggagatggcaca

SEQ ID NO: 83931 - RNA, 21 nt, synthetic construct
  source 1..21: mol_type = other RNA
ctggattatagtggtaaggag

SEQ ID NO: 83932 - RNA, 21 nt, synthetic construct
  source 1..21: mol_type = other RNA
ctggattgattccagtttctc

SEQ ID NO: 83933 - RNA, 21 nt, synthetic construct
  source 1..21: mol_type = other RNA
ctggattgctagtgtcctcag

SEQ ID NO: 83934 - RNA, 21 nt, synthetic construct
  source 1..21: mol_type = other RNA
ctggatttgattgggcattaa

SEQ ID NO: 83935 - RNA, 21 nt, synthetic construct
  source 1..21: mol_type = other RNA
ctggatttgggaaggatggcc

SEQ ID NO: 83936 - RNA, 21 nt, synthetic construct
  source 1..21: mol_type = other RNA
ctggatttttgtgtagaggtg

SEQ ID NO: 83937 - RNA, 21 nt, synthetic construct
  source 1..21: mol_type = other RNA
ctggcaaaaatcatcatatat

SEQ ID NO: 83938 - RNA, 21 nt, synthetic construct
  source 1..21: mol_type = other RNA
ctggcaaaatggagacatctg

SEQ ID NO: 83939 - RNA, 21 nt, synthetic construct
  source 1..21: mol_type = other RNA
ctggcaacaaaggcgaagccc

SEQ ID NO: 83940 - RNA, 21 nt, synthetic construct
  source 1..21: mol_type = other RNA
ctggcaatactctcagaaatt

SEQ ID NO: 83941 - RNA, 21 nt, synthetic construct
  source 1..21: mol_type = other RNA
ctggcaatcaaatggccttct

SEQ ID NO: 83942 - RNA, 21 nt, synthetic construct
  source 1..21: mol_type = other RNA
ctggcacagcactgttaactg

SEQ ID NO: 83943 - RNA, 21 nt, synthetic construct
  source 1..21: mol_type = other RNA
ctggcactttcctgataaggg

SEQ ID NO: 83944 - RNA, 21 nt, synthetic construct
  source 1..21: mol_type = other RNA
ctggcagatcaattgaccaaa

SEQ ID NO: 83945 - RNA, 21 nt, synthetic construct
  source 1..21: mol_type = other RNA
ctggcagcaggggctaagtag

SEQ ID NO: 83946 - RNA, 21 nt, synthetic construct
  source 1..21: mol_type = other RNA
ctggcagccttctctcttcca

SEQ ID NO: 83947 - RNA, 21 nt, synthetic construct
  source 1..21: mol_type = other RNA
ctggcaggtcacctagcctct

SEQ ID NO: 83948 - RNA, 21 nt, synthetic construct
  source 1..21: mol_type = other RNA
ctggcagtctaggaaaagact

SEQ ID NO: 83949 - RNA, 21 nt, synthetic construct
  source 1..21: mol_type = other RNA
ctggcatgttggatagtttct

SEQ ID NO: 83950 - RNA, 21 nt, synthetic construct
  source 1..21: mol_type = other RNA
ctggcattgtcccgggggagg

SEQ ID NO: 83951 - RNA, 21 nt, synthetic construct
  source 1..21: mol_type = other RNA
ctggccaaatccctgatcaag

SEQ ID NO: 83952 - RNA, 21 nt, synthetic construct
  source 1..21: mol_type = other RNA
ctggccaacatcgtaaaacct

SEQ ID NO: 83953 - RNA, 21 nt, synthetic construct
  source 1..21: mol_type = other RNA
ctggccacatgcttccaaaag

SEQ ID NO: 83954 - RNA, 21 nt, synthetic construct
  source 1..21: mol_type = other RNA
ctggccactgattgagtatct

SEQ ID NO: 83955 - RNA, 21 nt, synthetic construct
  source 1..21: mol_type = other RNA
ctggccagcattacttaggca

SEQ ID NO: 83956 - RNA, 21 nt, synthetic construct
  source 1..21: mol_type = other RNA
ctggccagtgagttcaaatgt

SEQ ID NO: 83957 - RNA, 21 nt, synthetic construct
  source 1..21: mol_type = other RNA
ctggccatccttcccaaatcc

SEQ ID NO: 83958 - RNA, 21 nt, synthetic construct
  source 1..21: mol_type = other RNA
ctggccatgttttatttcttg

SEQ ID NO: 83959 - RNA, 21 nt, synthetic construct
  source 1..21: mol_type = other RNA
ctggcccctccatggaaacta

SEQ ID NO: 83960 - RNA, 21 nt, synthetic construct
  source 1..21: mol_type = other RNA
ctggcccctttcaagattgtt

SEQ ID NO: 83961 - RNA, 21 nt, synthetic construct
  source 1..21: mol_type = other RNA
ctggccctccatttccctgct

SEQ ID NO: 83962 - RNA, 21 nt, synthetic construct
  source 1..21: mol_type = other RNA
ctggccgggatttacttctat

SEQ ID NO: 83963 - RNA, 21 nt, synthetic construct
  source 1..21: mol_type = other RNA
ctggcctcggccaaccattac

SEQ ID NO: 83964 - RNA, 21 nt, synthetic construct
  source 1..21: mol_type = other RNA
ctggcctgagctctcagtggc

SEQ ID NO: 83965 - RNA, 21 nt, synthetic construct
  source 1..21: mol_type = other RNA
ctggcctgcaccatttattgt

SEQ ID NO: 83966 - RNA, 21 nt, synthetic construct
  source 1..21: mol_type = other RNA
ctggcctggacaacagtgtga

SEQ ID NO: 83967 - RNA, 21 nt, synthetic construct
  source 1..21: mol_type = other RNA
ctggccttctatatttttaca

SEQ ID NO: 83968 - RNA, 21 nt, synthetic construct
  source 1..21: mol_type = other RNA
ctggctagtaggcaacatccc

SEQ ID NO: 83969 - RNA, 21 nt, synthetic construct
  source 1..21: mol_type = other RNA
ctggctattagttaaccttct

SEQ ID NO: 83970 - RNA, 21 nt, synthetic construct
  source 1..21: mol_type = other RNA
ctggctcagaaacaacaacaa

SEQ ID NO: 83971 - RNA, 21 nt, synthetic construct
  source 1..21: mol_type = other RNA
ctggctcagtctgtttgccat

SEQ ID NO: 83972 - RNA, 21 nt, synthetic construct
  source 1..21: mol_type = other RNA
ctggctctagcccagcttccg

SEQ ID NO: 83973 - RNA, 21 nt, synthetic construct
  source 1..21: mol_type = other RNA
ctggctctttccactctctgg

SEQ ID NO: 83974 - RNA, 21 nt, synthetic construct
  source 1..21: mol_type = other RNA
ctggctgacctggtactctat

SEQ ID NO: 83975 - RNA, 21 nt, synthetic construct
  source 1..21: mol_type = other RNA
ctggctgcaattgcgcagaac

SEQ ID NO: 83976 - RNA, 21 nt, synthetic construct
  source 1..21: mol_type = other RNA
ctggctgcagggcttctgaag

SEQ ID NO: 83977 - RNA, 21 nt, synthetic construct
  source 1..21: mol_type = other RNA
ctggctgtgccaactctggca

SEQ ID NO: 83978 - RNA, 21 nt, synthetic construct
  source 1..21: mol_type = other RNA
ctggcttaatgcatataaaaa

SEQ ID NO: 83979 - RNA, 21 nt, synthetic construct
  source 1..21: mol_type = other RNA
ctggcttcaatatgcagtatg

SEQ ID NO: 83980 - RNA, 21 nt, synthetic construct
  source 1..21: mol_type = other RNA
ctggcttcagtgccaacacat

SEQ ID NO: 83981 - RNA, 21 nt, synthetic construct
  source 1..21: mol_type = other RNA
ctggcttcatgggtggaaatt

SEQ ID NO: 83982 - RNA, 21 nt, synthetic construct
  source 1..21: mol_type = other RNA
ctggcttgtgacatcaagggt

SEQ ID NO: 83983 - RNA, 21 nt, synthetic construct
  source 1..21: mol_type = other RNA
ctggctttagatggtaaaaca

SEQ ID NO: 83984 - RNA, 21 nt, synthetic construct
  source 1..21: mol_type = other RNA
ctgggaaaaaataagaaaaca

SEQ ID NO: 83985 - RNA, 21 nt, synthetic construct
  source 1..21: mol_type = other RNA
ctgggaaaaggatttgtttgt

SEQ ID NO: 83986 - RNA, 21 nt, synthetic construct
  source 1..21: mol_type = other RNA
ctgggaaagcctggctttaga

SEQ ID NO: 83987 - RNA, 21 nt, synthetic construct
  source 1..21: mol_type = other RNA
ctgggaacagcccctagcatg

SEQ ID NO: 83988 - RNA, 21 nt, synthetic construct
  source 1..21: mol_type = other RNA
ctgggaagttatgtagctggg

SEQ ID NO: 83989 - RNA, 21 nt, synthetic construct
  source 1..21: mol_type = other RNA
ctgggacagagcgagactccg

SEQ ID NO: 83990 - RNA, 21 nt, synthetic construct
  source 1..21: mol_type = other RNA
ctgggactacaggtgtgaacc

SEQ ID NO: 83991 - RNA, 21 nt, synthetic construct
  source 1..21: mol_type = other RNA
ctgggacttctagcctccaga

SEQ ID NO: 83992 - RNA, 21 nt, synthetic construct
  source 1..21: mol_type = other RNA
ctgggagaaagaccaagagtg

SEQ ID NO: 83993 - RNA, 21 nt, synthetic construct
  source 1..21: mol_type = other RNA
ctgggagaaagctaatttgga

SEQ ID NO: 83994 - RNA, 21 nt, synthetic construct
  source 1..21: mol_type = other RNA
ctgggagaatggcaaggctaa

SEQ ID NO: 83995 - RNA, 21 nt, synthetic construct
  source 1..21: mol_type = other RNA
ctgggagaccaggagttctta

SEQ ID NO: 83996 - RNA, 21 nt, synthetic construct
  source 1..21: mol_type = other RNA
ctgggagccctccaggatcca

SEQ ID NO: 83997 - RNA, 21 nt, synthetic construct
  source 1..21: mol_type = other RNA
ctgggagcttatcaggcttga

SEQ ID NO: 83998 - RNA, 21 nt, synthetic construct
  source 1..21: mol_type = other RNA
ctgggagtacaagaccagcct

SEQ ID NO: 83999 - RNA, 21 nt, synthetic construct
  source 1..21: mol_type = other RNA
ctgggagttcattagaattca

SEQ ID NO: 84000 - RNA, 21 nt, synthetic construct
  source 1..21: mol_type = other RNA
ctgggataatgagtttaattc

SEQ ID NO: 84001 - RNA, 21 nt, synthetic construct
  source 1..21: mol_type = other RNA
ctgggataatgctatcatttt

SEQ ID NO: 84002 - RNA, 21 nt, synthetic construct
  source 1..21: mol_type = other RNA
ctgggatacttctaactttag

SEQ ID NO: 84003 - RNA, 21 nt, synthetic construct
  source 1..21: mol_type = other RNA
ctgggatcacaggcgttgagc

SEQ ID NO: 84004 - RNA, 21 nt, synthetic construct
  source 1..21: mol_type = other RNA
ctgggatcctaagcatgagat

SEQ ID NO: 84005 - RNA, 21 nt, synthetic construct
  source 1..21: mol_type = other RNA
ctgggatgcaagaatggttta

SEQ ID NO: 84006 - RNA, 21 nt, synthetic construct
  source 1..21: mol_type = other RNA
ctgggatgctcagtttcaaaa

SEQ ID NO: 84007 - RNA, 21 nt, synthetic construct
  source 1..21: mol_type = other RNA
ctgggatggctgaaagagaaa

SEQ ID NO: 84008 - RNA, 21 nt, synthetic construct
  source 1..21: mol_type = other RNA
ctgggattacacacacctacc

SEQ ID NO: 84009 - RNA, 21 nt, synthetic construct
  source 1..21: mol_type = other RNA
ctgggattacaggcgcacgcc

SEQ ID NO: 84010 - RNA, 21 nt, synthetic construct
  source 1..21: mol_type = other RNA
ctgggcaacagagacagagaa

SEQ ID NO: 84011 - RNA, 21 nt, synthetic construct
  source 1..21: mol_type = other RNA
ctgggcacacgccactgcagg

SEQ ID NO: 84012 - RNA, 21 nt, synthetic construct
  source 1..21: mol_type = other RNA
ctgggcccactctccccaagt

SEQ ID NO: 84013 - RNA, 21 nt, synthetic construct
  source 1..21: mol_type = other RNA
ctgggcccgcagtggctcatg

SEQ ID NO: 84014 - RNA, 21 nt, synthetic construct
  source 1..21: mol_type = other RNA
ctgggcgacaagagcagaact

SEQ ID NO: 84015 - RNA, 21 nt, synthetic construct
  source 1..21: mol_type = other RNA
ctgggcgacagagtgaaactc

SEQ ID NO: 84016 - RNA, 21 nt, synthetic construct
  source 1..21: mol_type = other RNA
ctgggcgagatggcgtgcgcc

SEQ ID NO: 84017 - RNA, 21 nt, synthetic construct
  source 1..21: mol_type = other RNA
ctgggctagagccaggaagtc

SEQ ID NO: 84018 - RNA, 21 nt, synthetic construct
  source 1..21: mol_type = other RNA
ctgggctagggaagcagttga

SEQ ID NO: 84019 - RNA, 21 nt, synthetic construct
  source 1..21: mol_type = other RNA
ctgggctattgttttgcaaga

SEQ ID NO: 84020 - RNA, 21 nt, synthetic construct
  source 1..21: mol_type = other RNA
ctgggctcactgcaacttccg

SEQ ID NO: 84021 - RNA, 21 nt, synthetic construct
  source 1..21: mol_type = other RNA
ctgggctcatctaagcctacc

SEQ ID NO: 84022 - RNA, 21 nt, synthetic construct
  source 1..21: mol_type = other RNA
ctgggctctctattccaaatg

SEQ ID NO: 84023 - RNA, 21 nt, synthetic construct
  source 1..21: mol_type = other RNA
ctgggcttcactttcgtcatc

SEQ ID NO: 84024 - RNA, 21 nt, synthetic construct
  source 1..21: mol_type = other RNA
ctgggctttctccaggggcgg

SEQ ID NO: 84025 - RNA, 21 nt, synthetic construct
  source 1..21: mol_type = other RNA
ctggggaataagattttaggt

SEQ ID NO: 84026 - RNA, 21 nt, synthetic construct
  source 1..21: mol_type = other RNA
ctggggaattgcatgagactt

SEQ ID NO: 84027 - RNA, 21 nt, synthetic construct
  source 1..21: mol_type = other RNA
ctggggacccctccctgcttt

SEQ ID NO: 84028 - RNA, 21 nt, synthetic construct
  source 1..21: mol_type = other RNA
ctggggagtgtgcccaaggaa

SEQ ID NO: 84029 - RNA, 21 nt, synthetic construct
  source 1..21: mol_type = other RNA
ctggggatgctgtctataggc

SEQ ID NO: 84030 - RNA, 21 nt, synthetic construct
  source 1..21: mol_type = other RNA
ctggggcagcaaagcaagaaa

SEQ ID NO: 84031 - RNA, 21 nt, synthetic construct
  source 1..21: mol_type = other RNA
ctggggcctcagcatgtcttc

SEQ ID NO: 84032 - RNA, 21 nt, synthetic construct
  source 1..21: mol_type = other RNA
ctggggctcaagtaagtgaaa

SEQ ID NO: 84033 - RNA, 21 nt, synthetic construct
  source 1..21: mol_type = other RNA
ctggggcttgaacccgaggtg

SEQ ID NO: 84034 - RNA, 21 nt, synthetic construct
  source 1..21: mol_type = other RNA
ctgggggagactgtgcaatgt

SEQ ID NO: 84035 - RNA, 21 nt, synthetic construct
  source 1..21: mol_type = other RNA
ctgggggatccaggggaatag

SEQ ID NO: 84036 - RNA, 21 nt, synthetic construct
  source 1..21: mol_type = other RNA
ctgggggctggacataagggt

SEQ ID NO: 84037 - RNA, 21 nt, synthetic construct
  source 1..21: mol_type = other RNA
ctggggtcttagttctgcttc

SEQ ID NO: 84038 - RNA, 21 nt, synthetic construct
  source 1..21: mol_type = other RNA
ctggggttagggcctagaaat

SEQ ID NO: 84039 - RNA, 21 nt, synthetic construct
  source 1..21: mol_type = other RNA
ctggggttcaaaccacctaac

SEQ ID NO: 84040 - RNA, 21 nt, synthetic construct
  source 1..21: mol_type = other RNA
ctggggtttccttacctttat

SEQ ID NO: 84041 - RNA, 21 nt, synthetic construct
  source 1..21: mol_type = other RNA
ctggggtttttatggttttaa

SEQ ID NO: 84042 - RNA, 21 nt, synthetic construct
  source 1..21: mol_type = other RNA
ctgggtaaacaagactcaaca

SEQ ID NO: 84043 - RNA, 21 nt, synthetic construct
  source 1..21: mol_type = other RNA
ctgggtagagactggatcctg

SEQ ID NO: 84044 - RNA, 21 nt, synthetic construct
  source 1..21: mol_type = other RNA
ctgggtatacagcaaaagaat

SEQ ID NO: 84045 - RNA, 21 nt, synthetic construct
  source 1..21: mol_type = other RNA
ctgggtcagaatcgtgatagt

SEQ ID NO: 84046 - RNA, 21 nt, synthetic construct
  source 1..21: mol_type = other RNA
ctgggtccccggaggaggtgg

SEQ ID NO: 84047 - RNA, 21 nt, synthetic construct
  source 1..21: mol_type = other RNA
ctgggtcttataggttgaata

SEQ ID NO: 84048 - RNA, 21 nt, synthetic construct
  source 1..21: mol_type = other RNA
ctgggtgatatctgtaagtca

SEQ ID NO: 84049 - RNA, 21 nt, synthetic construct
  source 1..21: mol_type = other RNA
ctgggtgatgttcaaccctcg

SEQ ID NO: 84050 - RNA, 21 nt, synthetic construct
  source 1..21: mol_type = other RNA
ctgggtgcgttgaccgctttc

SEQ ID NO: 84051 - RNA, 21 nt, synthetic construct
  source 1..21: mol_type = other RNA
ctgggtgtagggggaaaactc

SEQ ID NO: 84052 - RNA, 21 nt, synthetic construct
  source 1..21: mol_type = other RNA
ctgggtgtgcacgtttgcttt

SEQ ID NO: 84053 - RNA, 21 nt, synthetic construct
  source 1..21: mol_type = other RNA
ctgggttcaggtgcctcctgc

SEQ ID NO: 84054 - RNA, 21 nt, synthetic construct
  source 1..21: mol_type = other RNA
ctgggttctcaccaacatcca

SEQ ID NO: 84055 - RNA, 21 nt, synthetic construct
  source 1..21: mol_type = other RNA
ctgggttctcccttctattcc

SEQ ID NO: 84056 - RNA, 21 nt, synthetic construct
  source 1..21: mol_type = other RNA
ctggtaaggaaacagagtttt

SEQ ID NO: 84057 - RNA, 21 nt, synthetic construct
  source 1..21: mol_type = other RNA
ctggtaataatgaaagctccc

SEQ ID NO: 84058 - RNA, 21 nt, synthetic construct
  source 1..21: mol_type = other RNA
ctggtaatacagtctgattta

SEQ ID NO: 84059 - RNA, 21 nt, synthetic construct
  source 1..21: mol_type = other RNA
ctggtaatgaatagaaaatcc

SEQ ID NO: 84060 - RNA, 21 nt, synthetic construct
  source 1..21: mol_type = other RNA
ctggtaccaaagcagaaatac

SEQ ID NO: 84061 - RNA, 21 nt, synthetic construct
  source 1..21: mol_type = other RNA
ctggtactctatgatatatac

SEQ ID NO: 84062 - RNA, 21 nt, synthetic construct
  source 1..21: mol_type = other RNA
ctggtatctaccaaaaaacta

SEQ ID NO: 84063 - RNA, 21 nt, synthetic construct
  source 1..21: mol_type = other RNA
ctggtatgagtgtttccctta

SEQ ID NO: 84064 - RNA, 21 nt, synthetic construct
  source 1..21: mol_type = other RNA
ctggtattctgaactttcaac

SEQ ID NO: 84065 - RNA, 21 nt, synthetic construct
  source 1..21: mol_type = other RNA
ctggtattttaagattctctt

SEQ ID NO: 84066 - RNA, 21 nt, synthetic construct
  source 1..21: mol_type = other RNA
ctggtcaacagggtaagattc

SEQ ID NO: 84067 - RNA, 21 nt, synthetic construct
  source 1..21: mol_type = other RNA
ctggtcacaaacacaaaacaa

SEQ ID NO: 84068 - RNA, 21 nt, synthetic construct
  source 1..21: mol_type = other RNA
ctggtcactggccactgattg

SEQ ID NO: 84069 - RNA, 21 nt, synthetic construct
  source 1..21: mol_type = other RNA
ctggtccagatgaagcaggga

SEQ ID NO: 84070 - RNA, 21 nt, synthetic construct
  source 1..21: mol_type = other RNA
ctggtcctgaactcgtggcct

SEQ ID NO: 84071 - RNA, 21 nt, synthetic construct
  source 1..21: mol_type = other RNA
ctggtcctgagctttccttag

SEQ ID NO: 84072 - RNA, 21 nt, synthetic construct
  source 1..21: mol_type = other RNA
ctggtcctgagggctttgtga

SEQ ID NO: 84073 - RNA, 21 nt, synthetic construct
  source 1..21: mol_type = other RNA
ctggtccttaaatttctaagg

SEQ ID NO: 84074 - RNA, 21 nt, synthetic construct
  source 1..21: mol_type = other RNA
ctggtcgagctgggtgatgtt

SEQ ID NO: 84075 - RNA, 21 nt, synthetic construct
  source 1..21: mol_type = other RNA
ctggtctatctcattataaca

SEQ ID NO: 84076 - RNA, 21 nt, synthetic construct
  source 1..21: mol_type = other RNA
ctggtctcaaactccaagtct

SEQ ID NO: 84077 - RNA, 21 nt, synthetic construct
  source 1..21: mol_type = other RNA
ctggtctcccagcatgaagcc

SEQ ID NO: 84078 - RNA, 21 nt, synthetic construct
  source 1..21: mol_type = other RNA
ctggtctcctttctatacttc

SEQ ID NO: 84079 - RNA, 21 nt, synthetic construct
  source 1..21: mol_type = other RNA
ctggtctggaatgtgtagttc

SEQ ID NO: 84080 - RNA, 21 nt, synthetic construct
  source 1..21: mol_type = other RNA
ctggtcttgtactcccagcct

SEQ ID NO: 84081 - RNA, 21 nt, synthetic construct
  source 1..21: mol_type = other RNA
ctggtgaaaaaatggtgcagc

SEQ ID NO: 84082 - RNA, 21 nt, synthetic construct
  source 1..21: mol_type = other RNA
ctggtgaactgggtgtagggg

SEQ ID NO: 84083 - RNA, 21 nt, synthetic construct
  source 1..21: mol_type = other RNA
ctggtgatctatgaatttgcc

SEQ ID NO: 84084 - RNA, 21 nt, synthetic construct
  source 1..21: mol_type = other RNA
ctggtgattaaagttatttct

SEQ ID NO: 84085 - RNA, 21 nt, synthetic construct
  source 1..21: mol_type = other RNA
ctggtgctggcagccttctct

SEQ ID NO: 84086 - RNA, 21 nt, synthetic construct
  source 1..21: mol_type = other RNA
ctggtgctttctatctctcag

SEQ ID NO: 84087 - RNA, 21 nt, synthetic construct
  source 1..21: mol_type = other RNA
ctggtgcttttttggtgtttt

SEQ ID NO: 84088 - RNA, 21 nt, synthetic construct
  source 1..21: mol_type = other RNA
ctggtggacaaaaaacgcggc

SEQ ID NO: 84089 - RNA, 21 nt, synthetic construct
  source 1..21: mol_type = other RNA
ctggtggagtattctagttct

SEQ ID NO: 84090 - RNA, 21 nt, synthetic construct
  source 1..21: mol_type = other RNA
ctggtgggctttgagaaaggt

SEQ ID NO: 84091 - RNA, 21 nt, synthetic construct
  source 1..21: mol_type = other RNA
ctggtgggttcatgccattct

SEQ ID NO: 84092 - RNA, 21 nt, synthetic construct
  source 1..21: mol_type = other RNA
ctggtgtccttctgagaaggc

SEQ ID NO: 84093 - RNA, 21 nt, synthetic construct
  source 1..21: mol_type = other RNA
ctggtgtcgtttatttcttct

SEQ ID NO: 84094 - RNA, 21 nt, synthetic construct
  source 1..21: mol_type = other RNA
ctggtgttaggcaatccttcc

SEQ ID NO: 84095 - RNA, 21 nt, synthetic construct
  source 1..21: mol_type = other RNA
ctggtgttgcttgctctacaa

SEQ ID NO: 84096 - RNA, 21 nt, synthetic construct
  source 1..21: mol_type = other RNA
ctggttagggagactttcact

SEQ ID NO: 84097 - RNA, 21 nt, synthetic construct
  source 1..21: mol_type = other RNA
ctggttcaagctatgctcctg

SEQ ID NO: 84098 - RNA, 21 nt, synthetic construct
  source 1..21: mol_type = other RNA
ctggttccaaacttctgacct

SEQ ID NO: 84099 - RNA, 21 nt, synthetic construct
  source 1..21: mol_type = other RNA
ctggtttcagtacacgaaaat

SEQ ID NO: 84100 - RNA, 21 nt, synthetic construct
  source 1..21: mol_type = other RNA
ctggtttcagtccctcctttc

SEQ ID NO: 84101 - RNA, 21 nt, synthetic construct
  source 1..21: mol_type = other RNA
ctggtttctgcatacttagct

SEQ ID NO: 84102 - RNA, 21 nt, synthetic construct
  source 1..21: mol_type = other RNA
ctggtttgctttggagtcaca

SEQ ID NO: 84103 - RNA, 21 nt, synthetic construct
  source 1..21: mol_type = other RNA
ctggttttcctgatggacatt

SEQ ID NO: 84104 - RNA, 21 nt, synthetic construct
  source 1..21: mol_type = other RNA
ctggttttctggaggctagaa

SEQ ID NO: 84105 - RNA, 21 nt, synthetic construct
  source 1..21: mol_type = other RNA
ctggttttgatcatcgcatta

SEQ ID NO: 84106 - RNA, 21 nt, synthetic construct
  source 1..21: mol_type = other RNA
ctgtaaaaattttctcccaag

SEQ ID NO: 84107 - RNA, 21 nt, synthetic construct
  source 1..21: mol_type = other RNA
ctgtaaacaatgctgctatga

SEQ ID NO: 84108 - RNA, 21 nt, synthetic construct
  source 1..21: mol_type = other RNA
ctgtaaacatgaacaagttac

SEQ ID NO: 84109 - RNA, 21 nt, synthetic construct
  source 1..21: mol_type = other RNA
ctgtaaacctggaatcctcta

SEQ ID NO: 84110 - RNA, 21 nt, synthetic construct
  source 1..21: mol_type = other RNA
ctgtaaagtaatcaagtgaaa

SEQ ID NO: 84111 - RNA, 21 nt, synthetic construct
  source 1..21: mol_type = other RNA
ctgtaacaaagatgccacaaa

SEQ ID NO: 84112 - RNA, 21 nt, synthetic construct
  source 1..21: mol_type = other RNA
ctgtaacagaggcatgcacgg

SEQ ID NO: 84113 - RNA, 21 nt, synthetic construct
  source 1..21: mol_type = other RNA
ctgtaaccctgtttcccttaa

SEQ ID NO: 84114 - RNA, 21 nt, synthetic construct
  source 1..21: mol_type = other RNA
ctgtaacctccacctcccaga

SEQ ID NO: 84115 - RNA, 21 nt, synthetic construct
  source 1..21: mol_type = other RNA
ctgtaactgacttcaagaggt

SEQ ID NO: 84116 - RNA, 21 nt, synthetic construct
  source 1..21: mol_type = other RNA
ctgtaagcacctgtataaata

SEQ ID NO: 84117 - RNA, 21 nt, synthetic construct
  source 1..21: mol_type = other RNA
ctgtaagctgaactctgtgga

SEQ ID NO: 84118 - RNA, 21 nt, synthetic construct
  source 1..21: mol_type = other RNA
ctgtaagctggtaatacagtc

SEQ ID NO: 84119 - RNA, 21 nt, synthetic construct
  source 1..21: mol_type = other RNA
ctgtaagtcagttaacagtgc

SEQ ID NO: 84120 - RNA, 21 nt, synthetic construct
  source 1..21: mol_type = other RNA
ctgtaagtcatcaaaggaagg

SEQ ID NO: 84121 - RNA, 21 nt, synthetic construct
  source 1..21: mol_type = other RNA
ctgtaagttcctggactgtga

SEQ ID NO: 84122 - RNA, 21 nt, synthetic construct
  source 1..21: mol_type = other RNA
ctgtaatattaaccaagaaca

SEQ ID NO: 84123 - RNA, 21 nt, synthetic construct
  source 1..21: mol_type = other RNA
ctgtaatattgtatataccct

SEQ ID NO: 84124 - RNA, 21 nt, synthetic construct
  source 1..21: mol_type = other RNA
ctgtaatgagctgagattgcc

SEQ ID NO: 84125 - RNA, 21 nt, synthetic construct
  source 1..21: mol_type = other RNA
ctgtaatgtttgtacttctac

SEQ ID NO: 84126 - RNA, 21 nt, synthetic construct
  source 1..21: mol_type = other RNA
ctgtaattacatacttcaaag

SEQ ID NO: 84127 - RNA, 21 nt, synthetic construct
  source 1..21: mol_type = other RNA
ctgtacaaagatttaccccta

SEQ ID NO: 84128 - RNA, 21 nt, synthetic construct
  source 1..21: mol_type = other RNA
ctgtacccattagacactaac

SEQ ID NO: 84129 - RNA, 21 nt, synthetic construct
  source 1..21: mol_type = other RNA
ctgtacccttacgcgtggatg

SEQ ID NO: 84130 - RNA, 21 nt, synthetic construct
  source 1..21: mol_type = other RNA
ctgtactaagcctatgtaaga

SEQ ID NO: 84131 - RNA, 21 nt, synthetic construct
  source 1..21: mol_type = other RNA
ctgtactactgacctgggaga

SEQ ID NO: 84132 - RNA, 21 nt, synthetic construct
  source 1..21: mol_type = other RNA
ctgtactgtttagcatctagc

SEQ ID NO: 84133 - RNA, 21 nt, synthetic construct
  source 1..21: mol_type = other RNA
ctgtagaaaatagggacggcc

SEQ ID NO: 84134 - RNA, 21 nt, synthetic construct
  source 1..21: mol_type = other RNA
ctgtagaatatccaagcacaa

SEQ ID NO: 84135 - RNA, 21 nt, synthetic construct
  source 1..21: mol_type = other RNA
ctgtagaatgtttttccgtct

SEQ ID NO: 84136 - RNA, 21 nt, synthetic construct
  source 1..21: mol_type = other RNA
ctgtagagaaaatgttataca

SEQ ID NO: 84137 - RNA, 21 nt, synthetic construct
  source 1..21: mol_type = other RNA
ctgtagataaacgttaactat

SEQ ID NO: 84138 - RNA, 21 nt, synthetic construct
  source 1..21: mol_type = other RNA
ctgtagattgggcttttcata

SEQ ID NO: 84139 - RNA, 21 nt, synthetic construct
  source 1..21: mol_type = other RNA
ctgtagattgttttaggtagt

SEQ ID NO: 84140 - RNA, 21 nt, synthetic construct
  source 1..21: mol_type = other RNA
ctgtagcagacactgggttct

SEQ ID NO: 84141 - RNA, 21 nt, synthetic construct
  source 1..21: mol_type = other RNA
ctgtagcttcacgtgcattca

SEQ ID NO: 84142 - RNA, 21 nt, synthetic construct
  source 1..21: mol_type = other RNA
ctgtaggccccgatgccatgt

SEQ ID NO: 84143 - RNA, 21 nt, synthetic construct
  source 1..21: mol_type = other RNA
ctgtagggtgactagtgtgaa

SEQ ID NO: 84144 - RNA, 21 nt, synthetic construct
  source 1..21: mol_type = other RNA
ctgtagtgattcacttttgag

SEQ ID NO: 84145 - RNA, 21 nt, synthetic construct
  source 1..21: mol_type = other RNA
ctgtagttacaactactcggg

SEQ ID NO: 84146 - RNA, 21 nt, synthetic construct
  source 1..21: mol_type = other RNA
ctgtagttcagtttttctttc

SEQ ID NO: 84147 - RNA, 21 nt, synthetic construct
  source 1..21: mol_type = other RNA
ctgtagttttggtgtcatttt

SEQ ID NO: 84148 - RNA, 21 nt, synthetic construct
  source 1..21: mol_type = other RNA
ctgtataaataaaatgtctgg

SEQ ID NO: 84149 - RNA, 21 nt, synthetic construct
  source 1..21: mol_type = other RNA
ctgtataacattttctctaca

SEQ ID NO: 84150 - RNA, 21 nt, synthetic construct
  source 1..21: mol_type = other RNA
ctgtatacccaggtgtgagat

SEQ ID NO: 84151 - RNA, 21 nt, synthetic construct
  source 1..21: mol_type = other RNA
ctgtatatctccttttaagag

SEQ ID NO: 84152 - RNA, 21 nt, synthetic construct
  source 1..21: mol_type = other RNA
ctgtatatgaaaagcttcccc

SEQ ID NO: 84153 - RNA, 21 nt, synthetic construct
  source 1..21: mol_type = other RNA
ctgtatcttttcagtccagat

SEQ ID NO: 84154 - RNA, 21 nt, synthetic construct
  source 1..21: mol_type = other RNA
ctgtatgagaagactggaaaa

SEQ ID NO: 84155 - RNA, 21 nt, synthetic construct
  source 1..21: mol_type = other RNA
ctgtatgccgctggtgaaaaa

SEQ ID NO: 84156 - RNA, 21 nt, synthetic construct
  source 1..21: mol_type = other RNA
ctgtatggttcttaagatgat

SEQ ID NO: 84157 - RNA, 21 nt, synthetic construct
  source 1..21: mol_type = other RNA
ctgtattaccagcttacagca

SEQ ID NO: 84158 - RNA, 21 nt, synthetic construct
  source 1..21: mol_type = other RNA
ctgtattaggatgtgtacccg

SEQ ID NO: 84159 - RNA, 21 nt, synthetic construct
  source 1..21: mol_type = other RNA
ctgtattgcaaactaagtggt

SEQ ID NO: 84160 - RNA, 21 nt, synthetic construct
  source 1..21: mol_type = other RNA
ctgtattgtaggaaagcctgt

SEQ ID NO: 84161 - RNA, 21 nt, synthetic construct
  source 1..21: mol_type = other RNA
ctgtatttctgctttggtacc

SEQ ID NO: 84162 - RNA, 21 nt, synthetic construct
  source 1..21: mol_type = other RNA
ctgtatttttgctcacactta

SEQ ID NO: 84163 - RNA, 21 nt, synthetic construct
  source 1..21: mol_type = other RNA
ctgtcaaaaagagaacacaca

SEQ ID NO: 84164 - RNA, 21 nt, synthetic construct
  source 1..21: mol_type = other RNA
ctgtcaaaaatgtgtctagtg

SEQ ID NO: 84165 - RNA, 21 nt, synthetic construct
  source 1..21: mol_type = other RNA
ctgtcacaattcacagaatat

SEQ ID NO: 84166 - RNA, 21 nt, synthetic construct
  source 1..21: mol_type = other RNA
ctgtcacaggctttcctacaa

SEQ ID NO: 84167 - RNA, 21 nt, synthetic construct
  source 1..21: mol_type = other RNA
ctgtcacatagacctgaatga

SEQ ID NO: 84168 - RNA, 21 nt, synthetic construct
  source 1..21: mol_type = other RNA
ctgtcacatttgaaagaaaga

SEQ ID NO: 84169 - RNA, 21 nt, synthetic construct
  source 1..21: mol_type = other RNA
ctgtcaccaggctggaatgca

SEQ ID NO: 84170 - RNA, 21 nt, synthetic construct
  source 1..21: mol_type = other RNA
ctgtcacccacgtggagtgca

SEQ ID NO: 84171 - RNA, 21 nt, synthetic construct
  source 1..21: mol_type = other RNA
ctgtcacccttgtaatcaagt

SEQ ID NO: 84172 - RNA, 21 nt, synthetic construct
  source 1..21: mol_type = other RNA
ctgtcacggtgccctacatat

SEQ ID NO: 84173 - RNA, 21 nt, synthetic construct
  source 1..21: mol_type = other RNA
ctgtcactctctttaggaagc

SEQ ID NO: 84174 - RNA, 21 nt, synthetic construct
  source 1..21: mol_type = other RNA
ctgtcactgacacaggctgaa

SEQ ID NO: 84175 - RNA, 21 nt, synthetic construct
  source 1..21: mol_type = other RNA
ctgtcactttcctattcacac

SEQ ID NO: 84176 - RNA, 21 nt, synthetic construct
  source 1..21: mol_type = other RNA
ctgtcagaaacaccaacacaa

SEQ ID NO: 84177 - RNA, 21 nt, synthetic construct
  source 1..21: mol_type = other RNA
ctgtcagcagttcagcctgca

SEQ ID NO: 84178 - RNA, 21 nt, synthetic construct
  source 1..21: mol_type = other RNA
ctgtcaggcaagggactgtcg

SEQ ID NO: 84179 - RNA, 21 nt, synthetic construct
  source 1..21: mol_type = other RNA
ctgtcagtgggactggagaac

SEQ ID NO: 84180 - RNA, 21 nt, synthetic construct
  source 1..21: mol_type = other RNA
ctgtcagtgtggttcatattt

SEQ ID NO: 84181 - RNA, 21 nt, synthetic construct
  source 1..21: mol_type = other RNA
ctgtcagtttctgatttatct

SEQ ID NO: 84182 - RNA, 21 nt, synthetic construct
  source 1..21: mol_type = other RNA
ctgtcatcagcgtcctcactg

SEQ ID NO: 84183 - RNA, 21 nt, synthetic construct
  source 1..21: mol_type = other RNA
ctgtcatctgaatcaataaga

SEQ ID NO: 84184 - RNA, 21 nt, synthetic construct
  source 1..21: mol_type = other RNA
ctgtcatggtgtgtctgcgcc

SEQ ID NO: 84185 - RNA, 21 nt, synthetic construct
  source 1..21: mol_type = other RNA
ctgtcatgtcaaatttttcac

SEQ ID NO: 84186 - RNA, 21 nt, synthetic construct
  source 1..21: mol_type = other RNA
ctgtcatgtttgaattttcca

SEQ ID NO: 84187 - RNA, 21 nt, synthetic construct
  source 1..21: mol_type = other RNA
ctgtcattctgcagtttgtgt

SEQ ID NO: 84188 - RNA, 21 nt, synthetic construct
  source 1..21: mol_type = other RNA
ctgtccaaacagtgaccacag

SEQ ID NO: 84189 - RNA, 21 nt, synthetic construct
  source 1..21: mol_type = other RNA
ctgtccaacaagggttggtgc

SEQ ID NO: 84190 - RNA, 21 nt, synthetic construct
  source 1..21: mol_type = other RNA
ctgtccaacatggcaaaaccc

SEQ ID NO: 84191 - RNA, 21 nt, synthetic construct
  source 1..21: mol_type = other RNA
ctgtccaagtatttctcatct

SEQ ID NO: 84192 - RNA, 21 nt, synthetic construct
  source 1..21: mol_type = other RNA
ctgtccaggcgcctgcattgc

SEQ ID NO: 84193 - RNA, 21 nt, synthetic construct
  source 1..21: mol_type = other RNA
ctgtccatttccagtactttt

SEQ ID NO: 84194 - RNA, 21 nt, synthetic construct
  source 1..21: mol_type = other RNA
ctgtccatttccttaagcaca

SEQ ID NO: 84195 - RNA, 21 nt, synthetic construct
  source 1..21: mol_type = other RNA
ctgtcccaaatgcaccaacac

SEQ ID NO: 84196 - RNA, 21 nt, synthetic construct
  source 1..21: mol_type = other RNA
ctgtccccaccgccttcctac

SEQ ID NO: 84197 - RNA, 21 nt, synthetic construct
  source 1..21: mol_type = other RNA
ctgtcctcgtaaaagctaatc

SEQ ID NO: 84198 - RNA, 21 nt, synthetic construct
  source 1..21: mol_type = other RNA
ctgtcctctcttgttgaggat

SEQ ID NO: 84199 - RNA, 21 nt, synthetic construct
  source 1..21: mol_type = other RNA
ctgtcctgaatactattccta

SEQ ID NO: 84200 - RNA, 21 nt, synthetic construct
  source 1..21: mol_type = other RNA
ctgtcctgaattctaacatta

SEQ ID NO: 84201 - RNA, 21 nt, synthetic construct
  source 1..21: mol_type = other RNA
ctgtcctgaattctaatgaac

SEQ ID NO: 84202 - RNA, 21 nt, synthetic construct
  source 1..21: mol_type = other RNA
ctgtcctgtcagtgtggttca

SEQ ID NO: 84203 - RNA, 21 nt, synthetic construct
  source 1..21: mol_type = other RNA
ctgtccttctcgtgtgagctc

SEQ ID NO: 84204 - RNA, 21 nt, synthetic construct
  source 1..21: mol_type = other RNA
ctgtccttggattgctaaact

SEQ ID NO: 84205 - RNA, 21 nt, synthetic construct
  source 1..21: mol_type = other RNA
ctgtccttgtgttttatttgg

SEQ ID NO: 84206 - RNA, 21 nt, synthetic construct
  source 1..21: mol_type = other RNA
ctgtcgaagcttaatttagat

SEQ ID NO: 84207 - RNA, 21 nt, synthetic construct
  source 1..21: mol_type = other RNA
ctgtcgcccaggcggaatgca

SEQ ID NO: 84208 - RNA, 21 nt, synthetic construct
  source 1..21: mol_type = other RNA
ctgtcgctctcctgtgccaag

SEQ ID NO: 84209 - RNA, 21 nt, synthetic construct
  source 1..21: mol_type = other RNA
ctgtcggttttctagttagtt

SEQ ID NO: 84210 - RNA, 21 nt, synthetic construct
  source 1..21: mol_type = other RNA
ctgtcgtttatgcatttatta

SEQ ID NO: 84211 - RNA, 21 nt, synthetic construct
  source 1..21: mol_type = other RNA
ctgtctataggcaatgagtct

SEQ ID NO: 84212 - RNA, 21 nt, synthetic construct
  source 1..21: mol_type = other RNA
ctgtctcacctcaaggccaac

SEQ ID NO: 84213 - RNA, 21 nt, synthetic construct
  source 1..21: mol_type = other RNA
ctgtctcagagtatatatgct

SEQ ID NO: 84214 - RNA, 21 nt, synthetic construct
  source 1..21: mol_type = other RNA
ctgtctcagtcccaaatggga

SEQ ID NO: 84215 - RNA, 21 nt, synthetic construct
  source 1..21: mol_type = other RNA
ctgtctccaacgctttttatg

SEQ ID NO: 84216 - RNA, 21 nt, synthetic construct
  source 1..21: mol_type = other RNA
ctgtctccatgtcctcacctc

SEQ ID NO: 84217 - RNA, 21 nt, synthetic construct
  source 1..21: mol_type = other RNA
ctgtctctaaaaaataccaaa

SEQ ID NO: 84218 - RNA, 21 nt, synthetic construct
  source 1..21: mol_type = other RNA
ctgtctggattgattccagtt

SEQ ID NO: 84219 - RNA, 21 nt, synthetic construct
  source 1..21: mol_type = other RNA
ctgtctgggaagttatgtagc

SEQ ID NO: 84220 - RNA, 21 nt, synthetic construct
  source 1..21: mol_type = other RNA
ctgtctgggataatgagttta

SEQ ID NO: 84221 - RNA, 21 nt, synthetic construct
  source 1..21: mol_type = other RNA
ctgtctgtgaaaataatacct

SEQ ID NO: 84222 - RNA, 21 nt, synthetic construct
  source 1..21: mol_type = other RNA
ctgtctgtgatgtagaggcag

SEQ ID NO: 84223 - RNA, 21 nt, synthetic construct
  source 1..21: mol_type = other RNA
ctgtctgttcacatttcgcct

SEQ ID NO: 84224 - RNA, 21 nt, synthetic construct
  source 1..21: mol_type = other RNA
ctgtcttgatgatagaatacc

SEQ ID NO: 84225 - RNA, 21 nt, synthetic construct
  source 1..21: mol_type = other RNA
ctgtcttggacccatgcccat

SEQ ID NO: 84226 - RNA, 21 nt, synthetic construct
  source 1..21: mol_type = other RNA
ctgtcttgtgcatcctttata

SEQ ID NO: 84227 - RNA, 21 nt, synthetic construct
  source 1..21: mol_type = other RNA
ctgtctttcagtatgtgtctc

SEQ ID NO: 84228 - RNA, 21 nt, synthetic construct
  source 1..21: mol_type = other RNA
ctgtctttcccattaccaaaa

SEQ ID NO: 84229 - RNA, 21 nt, synthetic construct
  source 1..21: mol_type = other RNA
ctgtctttctgtctgcttttt

SEQ ID NO: 84230 - RNA, 21 nt, synthetic construct
  source 1..21: mol_type = other RNA
ctgtctttggcccatatcctt

SEQ ID NO: 84231 - RNA, 21 nt, synthetic construct
  source 1..21: mol_type = other RNA
ctgtgaaaataatacctaaca

SEQ ID NO: 84232 - RNA, 21 nt, synthetic construct
  source 1..21: mol_type = other RNA
ctgtgaaaatcattttggcaa

SEQ ID NO: 84233 - RNA, 21 nt, synthetic construct
  source 1..21: mol_type = other RNA
ctgtgaatgtgaggtgaggac

SEQ ID NO: 84234 - RNA, 21 nt, synthetic construct
  source 1..21: mol_type = other RNA
ctgtgaattcactaatgcctc

SEQ ID NO: 84235 - RNA, 21 nt, synthetic construct
  source 1..21: mol_type = other RNA
ctgtgaattgtgacagttcta

SEQ ID NO: 84236 - RNA, 21 nt, synthetic construct
  source 1..21: mol_type = other RNA
ctgtgaatttgattatgttag

SEQ ID NO: 84237 - RNA, 21 nt, synthetic construct
  source 1..21: mol_type = other RNA
ctgtgaatttggatttgagta

SEQ ID NO: 84238 - RNA, 21 nt, synthetic construct
  source 1..21: mol_type = other RNA
ctgtgacagtatgtcagactc

SEQ ID NO: 84239 - RNA, 21 nt, synthetic construct
  source 1..21: mol_type = other RNA
ctgtgactccaaagcaaacca

SEQ ID NO: 84240 - RNA, 21 nt, synthetic construct
  source 1..21: mol_type = other RNA
ctgtgagccactaaaacagga

SEQ ID NO: 84241 - RNA, 21 nt, synthetic construct
  source 1..21: mol_type = other RNA
ctgtgagggagatatttcgcc

SEQ ID NO: 84242 - RNA, 21 nt, synthetic construct
  source 1..21: mol_type = other RNA
ctgtgagggtaagaaaggagt

SEQ ID NO: 84243 - RNA, 21 nt, synthetic construct
  source 1..21: mol_type = other RNA
ctgtgagtccttccagtatga

SEQ ID NO: 84244 - RNA, 21 nt, synthetic construct
  source 1..21: mol_type = other RNA
ctgtgatacctagtacgtaac

SEQ ID NO: 84245 - RNA, 21 nt, synthetic construct
  source 1..21: mol_type = other RNA
ctgtgatcagaagagcactat

SEQ ID NO: 84246 - RNA, 21 nt, synthetic construct
  source 1..21: mol_type = other RNA
ctgtgatccctgatatgtcgc

SEQ ID NO: 84247 - RNA, 21 nt, synthetic construct
  source 1..21: mol_type = other RNA
ctgtgatgactgtaagctgaa

SEQ ID NO: 84248 - RNA, 21 nt, synthetic construct
  source 1..21: mol_type = other RNA
ctgtgatgattttagaaggta

SEQ ID NO: 84249 - RNA, 21 nt, synthetic construct
  source 1..21: mol_type = other RNA
ctgtgatgtagaggcagttga

SEQ ID NO: 84250 - RNA, 21 nt, synthetic construct
  source 1..21: mol_type = other RNA
ctgtgattacaattcctttct

SEQ ID NO: 84251 - RNA, 21 nt, synthetic construct
  source 1..21: mol_type = other RNA
ctgtgattaccggcatccgcc

SEQ ID NO: 84252 - RNA, 21 nt, synthetic construct
  source 1..21: mol_type = other RNA
ctgtgattatcagggatattg

SEQ ID NO: 84253 - RNA, 21 nt, synthetic construct
  source 1..21: mol_type = other RNA
ctgtgattgcaggtgtgggcc

SEQ ID NO: 84254 - RNA, 21 nt, synthetic construct
  source 1..21: mol_type = other RNA
ctgtgatttatgtggcattta

SEQ ID NO: 84255 - RNA, 21 nt, synthetic construct
  source 1..21: mol_type = other RNA
ctgtgatttccagtgtttggt

SEQ ID NO: 84256 - RNA, 21 nt, synthetic construct
  source 1..21: mol_type = other RNA
ctgtgcagtggatgactaggc

SEQ ID NO: 84257 - RNA, 21 nt, synthetic construct
  source 1..21: mol_type = other RNA
ctgtgccaactctggcaggtc

SEQ ID NO: 84258 - RNA, 21 nt, synthetic construct
  source 1..21: mol_type = other RNA
ctgtgccaagcaacttgatca

SEQ ID NO: 84259 - RNA, 21 nt, synthetic construct
  source 1..21: mol_type = other RNA
ctgtgccaagtccgtgcatgc

SEQ ID NO: 84260 - RNA, 21 nt, synthetic construct
  source 1..21: mol_type = other RNA
ctgtgccagtgcaaacctcct

SEQ ID NO: 84261 - RNA, 21 nt, synthetic construct
  source 1..21: mol_type = other RNA
ctgtgccgaggcagagagagt

SEQ ID NO: 84262 - RNA, 21 nt, synthetic construct
  source 1..21: mol_type = other RNA
ctgtgccttgatccattacat

SEQ ID NO: 84263 - RNA, 21 nt, synthetic construct
  source 1..21: mol_type = other RNA
ctgtgcgtgaatctgttcctg

SEQ ID NO: 84264 - RNA, 21 nt, synthetic construct
  source 1..21: mol_type = other RNA
ctgtgctagatgctaaacagt

SEQ ID NO: 84265 - RNA, 21 nt, synthetic construct
  source 1..21: mol_type = other RNA
ctgtgctagccttcttggagt

SEQ ID NO: 84266 - RNA, 21 nt, synthetic construct
  source 1..21: mol_type = other RNA
ctgtgctctgtatttaatctt

SEQ ID NO: 84267 - RNA, 21 nt, synthetic construct
  source 1..21: mol_type = other RNA
ctgtgctgagatggtcagtac

SEQ ID NO: 84268 - RNA, 21 nt, synthetic construct
  source 1..21: mol_type = other RNA
ctgtgcttaaatttttgagaa

SEQ ID NO: 84269 - RNA, 21 nt, synthetic construct
  source 1..21: mol_type = other RNA
ctgtgcttaaggaaatggaca

SEQ ID NO: 84270 - RNA, 21 nt, synthetic construct
  source 1..21: mol_type = other RNA
ctgtgcttccacagctatcag

SEQ ID NO: 84271 - RNA, 21 nt, synthetic construct
  source 1..21: mol_type = other RNA
ctgtgcttgtctctctctttc

SEQ ID NO: 84272 - RNA, 21 nt, synthetic construct
  source 1..21: mol_type = other RNA
ctgtgcttgtgcttttaatac

SEQ ID NO: 84273 - RNA, 21 nt, synthetic construct
  source 1..21: mol_type = other RNA
ctgtgcttttctcgtgcatgt

SEQ ID NO: 84274 - RNA, 21 nt, synthetic construct
  source 1..21: mol_type = other RNA
ctgtggaagcacagtctctgc

SEQ ID NO: 84275 - RNA, 21 nt, synthetic construct
  source 1..21: mol_type = other RNA
ctgtggaccatgttttaggag

SEQ ID NO: 84276 - RNA, 21 nt, synthetic construct
  source 1..21: mol_type = other RNA
ctgtggactttaggctgttca

SEQ ID NO: 84277 - RNA, 21 nt, synthetic construct
  source 1..21: mol_type = other RNA
ctgtggaggcagtaccattcc

SEQ ID NO: 84278 - RNA, 21 nt, synthetic construct
  source 1..21: mol_type = other RNA
ctgtggagtcctgtcagtttc

SEQ ID NO: 84279 - RNA, 21 nt, synthetic construct
  source 1..21: mol_type = other RNA
ctgtggatgttggtgagaacc

SEQ ID NO: 84280 - RNA, 21 nt, synthetic construct
  source 1..21: mol_type = other RNA
ctgtggccgagggagacggcg

SEQ ID NO: 84281 - RNA, 21 nt, synthetic construct
  source 1..21: mol_type = other RNA
ctgtggctaacaatcaaattt

SEQ ID NO: 84282 - RNA, 21 nt, synthetic construct
  source 1..21: mol_type = other RNA
ctgtggctcactcatttccgt

SEQ ID NO: 84283 - RNA, 21 nt, synthetic construct
  source 1..21: mol_type = other RNA
ctgtggcttgggtgacctcat

SEQ ID NO: 84284 - RNA, 21 nt, synthetic construct
  source 1..21: mol_type = other RNA
ctgtgggttaaaagttagctg

SEQ ID NO: 84285 - RNA, 21 nt, synthetic construct
  source 1..21: mol_type = other RNA
ctgtggtcactgtttggacag

SEQ ID NO: 84286 - RNA, 21 nt, synthetic construct
  source 1..21: mol_type = other RNA
ctgtggtccctgctactcagg

SEQ ID NO: 84287 - RNA, 21 nt, synthetic construct
  source 1..21: mol_type = other RNA
ctgtggtctcagctcctcaga

SEQ ID NO: 84288 - RNA, 21 nt, synthetic construct
  source 1..21: mol_type = other RNA
ctgtggtctcttcgagggggc

SEQ ID NO: 84289 - RNA, 21 nt, synthetic construct
  source 1..21: mol_type = other RNA
ctgtggtttcttgaatctctc

SEQ ID NO: 84290 - RNA, 21 nt, synthetic construct
  source 1..21: mol_type = other RNA
ctgtgtaatactgtagaatgt

SEQ ID NO: 84291 - RNA, 21 nt, synthetic construct
  source 1..21: mol_type = other RNA
ctgtgtagttcatcagcataa

SEQ ID NO: 84292 - RNA, 21 nt, synthetic construct
  source 1..21: mol_type = other RNA
ctgtgtatgtgtagtcagtga

SEQ ID NO: 84293 - RNA, 21 nt, synthetic construct
  source 1..21: mol_type = other RNA
ctgtgtcagtgacagttctgt

SEQ ID NO: 84294 - RNA, 21 nt, synthetic construct
  source 1..21: mol_type = other RNA
ctgtgtgcatgcatgtctgtc

SEQ ID NO: 84295 - RNA, 21 nt, synthetic construct
  source 1..21: mol_type = other RNA
ctgtgtgcatgctcccatttg

SEQ ID NO: 84296 - RNA, 21 nt, synthetic construct
  source 1..21: mol_type = other RNA
ctgtgtgcttggagtcacttg

SEQ ID NO: 84297 - RNA, 21 nt, synthetic construct
  source 1..21: mol_type = other RNA
ctgtgtggcttctcaaactgt

SEQ ID NO: 84298 - RNA, 21 nt, synthetic construct
  source 1..21: mol_type = other RNA
ctgtgtggtttgccttttcac

SEQ ID NO: 84299 - RNA, 21 nt, synthetic construct
  source 1..21: mol_type = other RNA
ctgtgtgtgtccaggccaaca

SEQ ID NO: 84300 - RNA, 21 nt, synthetic construct
  source 1..21: mol_type = other RNA
ctgtgttacattgccttcgca

SEQ ID NO: 84301 - RNA, 21 nt, synthetic construct
  source 1..21: mol_type = other RNA
ctgtgttcttttccttcttaa

SEQ ID NO: 84302 - RNA, 21 nt, synthetic construct
  source 1..21: mol_type = other RNA
ctgtgtttatgaatgatgcca

SEQ ID NO: 84303 - RNA, 21 nt, synthetic construct
  source 1..21: mol_type = other RNA
ctgtgtttctgctattctctt

SEQ ID NO: 84304 - RNA, 21 nt, synthetic construct
  source 1..21: mol_type = other RNA
ctgttaaaagatacgaaaatc

SEQ ID NO: 84305 - RNA, 21 nt, synthetic construct
  source 1..21: mol_type = other RNA
ctgttaactgacttacagacc

SEQ ID NO: 84306 - RNA, 21 nt, synthetic construct
  source 1..21: mol_type = other RNA
ctgttaatagataggtcatgt

SEQ ID NO: 84307 - RNA, 21 nt, synthetic construct
  source 1..21: mol_type = other RNA
ctgttaatgggcacttgggat

SEQ ID NO: 84308 - RNA, 21 nt, synthetic construct
  source 1..21: mol_type = other RNA
ctgttaatggttagactgcac

SEQ ID NO: 84309 - RNA, 21 nt, synthetic construct
  source 1..21: mol_type = other RNA
ctgttaatgtgatatgccaca

SEQ ID NO: 84310 - RNA, 21 nt, synthetic construct
  source 1..21: mol_type = other RNA
ctgttacagctcttctcagtt

SEQ ID NO: 84311 - RNA, 21 nt, synthetic construct
  source 1..21: mol_type = other RNA
ctgttacatggttctgtgcta

SEQ ID NO: 84312 - RNA, 21 nt, synthetic construct
  source 1..21: mol_type = other RNA
ctgttaccatttgaccttcct

SEQ ID NO: 84313 - RNA, 21 nt, synthetic construct
  source 1..21: mol_type = other RNA
ctgttactcccgatttcagtt

SEQ ID NO: 84314 - RNA, 21 nt, synthetic construct
  source 1..21: mol_type = other RNA
ctgttacttgactattttacc

SEQ ID NO: 84315 - RNA, 21 nt, synthetic construct
  source 1..21: mol_type = other RNA
ctgttagatggtgctgattta

SEQ ID NO: 84316 - RNA, 21 nt, synthetic construct
  source 1..21: mol_type = other RNA
ctgttagccttgccattctcc

SEQ ID NO: 84317 - RNA, 21 nt, synthetic construct
  source 1..21: mol_type = other RNA
ctgttagggacttatggagat

SEQ ID NO: 84318 - RNA, 21 nt, synthetic construct
  source 1..21: mol_type = other RNA
ctgttaggtattattttcaca

SEQ ID NO: 84319 - RNA, 21 nt, synthetic construct
  source 1..21: mol_type = other RNA
ctgttagtcccctagtggatg

SEQ ID NO: 84320 - RNA, 21 nt, synthetic construct
  source 1..21: mol_type = other RNA
ctgttatctgggaacagcccc

SEQ ID NO: 84321 - RNA, 21 nt, synthetic construct
  source 1..21: mol_type = other RNA
ctgttatgacaagactaccta

SEQ ID NO: 84322 - RNA, 21 nt, synthetic construct
  source 1..21: mol_type = other RNA
ctgttattagagttgtaacac

SEQ ID NO: 84323 - RNA, 21 nt, synthetic construct
  source 1..21: mol_type = other RNA
ctgttcaatttagaaaatgct

SEQ ID NO: 84324 - RNA, 21 nt, synthetic construct
  source 1..21: mol_type = other RNA
ctgttcacatttcgccttctc

SEQ ID NO: 84325 - RNA, 21 nt, synthetic construct
  source 1..21: mol_type = other RNA
ctgttcatttgagaatttcag

SEQ ID NO: 84326 - RNA, 21 nt, synthetic construct
  source 1..21: mol_type = other RNA
ctgttccaggcctcgctcttg

SEQ ID NO: 84327 - RNA, 21 nt, synthetic construct
  source 1..21: mol_type = other RNA
ctgttccatcggtctgtattt

SEQ ID NO: 84328 - RNA, 21 nt, synthetic construct
  source 1..21: mol_type = other RNA
ctgttcccaagcaagtgtggt

SEQ ID NO: 84329 - RNA, 21 nt, synthetic construct
  source 1..21: mol_type = other RNA
ctgttcccagataacagtggt

SEQ ID NO: 84330 - RNA, 21 nt, synthetic construct
  source 1..21: mol_type = other RNA
ctgttccccaagccaaattaa

SEQ ID NO: 84331 - RNA, 21 nt, synthetic construct
  source 1..21: mol_type = other RNA
ctgttccgattttacttacta

SEQ ID NO: 84332 - RNA, 21 nt, synthetic construct
  source 1..21: mol_type = other RNA
ctgttccgggatcctgtccag

SEQ ID NO: 84333 - RNA, 21 nt, synthetic construct
  source 1..21: mol_type = other RNA
ctgttcctgggttctcccttc

SEQ ID NO: 84334 - RNA, 21 nt, synthetic construct
  source 1..21: mol_type = other RNA
ctgttctagctcctgggaaaa

SEQ ID NO: 84335 - RNA, 21 nt, synthetic construct
  source 1..21: mol_type = other RNA
ctgttctcagtatcctttcaa

SEQ ID NO: 84336 - RNA, 21 nt, synthetic construct
  source 1..21: mol_type = other RNA
ctgttctccagtcccactgac

SEQ ID NO: 84337 - RNA, 21 nt, synthetic construct
  source 1..21: mol_type = other RNA
ctgttctctgtgtggtttgcc

SEQ ID NO: 84338 - RNA, 21 nt, synthetic construct
  source 1..21: mol_type = other RNA
ctgttctgttccatcggtctg

SEQ ID NO: 84339 - RNA, 21 nt, synthetic construct
  source 1..21: mol_type = other RNA
ctgttctttggagctgtattt

SEQ ID NO: 84340 - RNA, 21 nt, synthetic construct
  source 1..21: mol_type = other RNA
ctgttctttgttagtttattc

SEQ ID NO: 84341 - RNA, 21 nt, synthetic construct
  source 1..21: mol_type = other RNA
ctgttcttttgtaatctaagg

SEQ ID NO: 84342 - RNA, 21 nt, synthetic construct
  source 1..21: mol_type = other RNA
ctgttgaatagcaactgtttt

SEQ ID NO: 84343 - RNA, 21 nt, synthetic construct
  source 1..21: mol_type = other RNA
ctgttgaattgttgcgcgtca

SEQ ID NO: 84344 - RNA, 21 nt, synthetic construct
  source 1..21: mol_type = other RNA
ctgttgaggctgggccctgtg

SEQ ID NO: 84345 - RNA, 21 nt, synthetic construct
  source 1..21: mol_type = other RNA
ctgttgatggacgtttgagtt

SEQ ID NO: 84346 - RNA, 21 nt, synthetic construct
  source 1..21: mol_type = other RNA
ctgttgattgttgccatcatt

SEQ ID NO: 84347 - RNA, 21 nt, synthetic construct
  source 1..21: mol_type = other RNA
ctgttgatttagaaatacctg

SEQ ID NO: 84348 - RNA, 21 nt, synthetic construct
  source 1..21: mol_type = other RNA
ctgttgcaaattattttcctc

SEQ ID NO: 84349 - RNA, 21 nt, synthetic construct
  source 1..21: mol_type = other RNA
ctgttgcagtccccggtcttt

SEQ ID NO: 84350 - RNA, 21 nt, synthetic construct
  source 1..21: mol_type = other RNA
ctgttgcccagactggagttc

SEQ ID NO: 84351 - RNA, 21 nt, synthetic construct
  source 1..21: mol_type = other RNA
ctgttgcctctgtgctagcct

SEQ ID NO: 84352 - RNA, 21 nt, synthetic construct
  source 1..21: mol_type = other RNA
ctgttgcttaagtcactccat

SEQ ID NO: 84353 - RNA, 21 nt, synthetic construct
  source 1..21: mol_type = other RNA
ctgttgctttaacctctggta

SEQ ID NO: 84354 - RNA, 21 nt, synthetic construct
  source 1..21: mol_type = other RNA
ctgttggaaaaatcgtcctct

SEQ ID NO: 84355 - RNA, 21 nt, synthetic construct
  source 1..21: mol_type = other RNA
ctgttggagagatggtagtca

SEQ ID NO: 84356 - RNA, 21 nt, synthetic construct
  source 1..21: mol_type = other RNA
ctgttggcctggacacacaca

SEQ ID NO: 84357 - RNA, 21 nt, synthetic construct
  source 1..21: mol_type = other RNA
ctgttgggaggtttttgatta

SEQ ID NO: 84358 - RNA, 21 nt, synthetic construct
  source 1..21: mol_type = other RNA
ctgttgggctattaagtattg

SEQ ID NO: 84359 - RNA, 21 nt, synthetic construct
  source 1..21: mol_type = other RNA
ctgttggtgcttagctgcctc

SEQ ID NO: 84360 - RNA, 21 nt, synthetic construct
  source 1..21: mol_type = other RNA
ctgttgtaatgttacttctca

SEQ ID NO: 84361 - RNA, 21 nt, synthetic construct
  source 1..21: mol_type = other RNA
ctgttgtattttacaccatgc

SEQ ID NO: 84362 - RNA, 21 nt, synthetic construct
  source 1..21: mol_type = other RNA
ctgttgtgaggattcgattaa

SEQ ID NO: 84363 - RNA, 21 nt, synthetic construct
  source 1..21: mol_type = other RNA
ctgtttaaaaagaaaaagctc

SEQ ID NO: 84364 - RNA, 21 nt, synthetic construct
  source 1..21: mol_type = other RNA
ctgtttacattagagaagaat

SEQ ID NO: 84365 - RNA, 21 nt, synthetic construct
  source 1..21: mol_type = other RNA
ctgtttaccaagggtgtgttt

SEQ ID NO: 84366 - RNA, 21 nt, synthetic construct
  source 1..21: mol_type = other RNA
ctgtttacccttactaaattt

SEQ ID NO: 84367 - RNA, 21 nt, synthetic construct
  source 1..21: mol_type = other RNA
ctgtttagcatctagcacaga

SEQ ID NO: 84368 - RNA, 21 nt, synthetic construct
  source 1..21: mol_type = other RNA
ctgtttcccttaatgttgaca

SEQ ID NO: 84369 - RNA, 21 nt, synthetic construct
  source 1..21: mol_type = other RNA
ctgtttcctaatctaacatgt

SEQ ID NO: 84370 - RNA, 21 nt, synthetic construct
  source 1..21: mol_type = other RNA
ctgtttccttaccagtgcttg

SEQ ID NO: 84371 - RNA, 21 nt, synthetic construct
  source 1..21: mol_type = other RNA
ctgtttctctacatctggatc

SEQ ID NO: 84372 - RNA, 21 nt, synthetic construct
  source 1..21: mol_type = other RNA
ctgtttctgtgaaaaaacaaa

SEQ ID NO: 84373 - RNA, 21 nt, synthetic construct
  source 1..21: mol_type = other RNA
ctgtttcttagctatattcac

SEQ ID NO: 84374 - RNA, 21 nt, synthetic construct
  source 1..21: mol_type = other RNA
ctgtttgagaagtcttttcct

SEQ ID NO: 84375 - RNA, 21 nt, synthetic construct
  source 1..21: mol_type = other RNA
ctgtttgagatctttcttatt

SEQ ID NO: 84376 - RNA, 21 nt, synthetic construct
  source 1..21: mol_type = other RNA
ctgtttgagctgaaagtaaag

SEQ ID NO: 84377 - RNA, 21 nt, synthetic construct
  source 1..21: mol_type = other RNA
ctgtttgattactgtagcttc

SEQ ID NO: 84378 - RNA, 21 nt, synthetic construct
  source 1..21: mol_type = other RNA
ctgtttgccatcttcaagatt

SEQ ID NO: 84379 - RNA, 21 nt, synthetic construct
  source 1..21: mol_type = other RNA
ctgtttgcctgcgtccgtaga

SEQ ID NO: 84380 - RNA, 21 nt, synthetic construct
  source 1..21: mol_type = other RNA
ctgtttggatgaaaaagtact

SEQ ID NO: 84381 - RNA, 21 nt, synthetic construct
  source 1..21: mol_type = other RNA
ctgtttggctgggagcttatc

SEQ ID NO: 84382 - RNA, 21 nt, synthetic construct
  source 1..21: mol_type = other RNA
ctgtttgtttgttttgagacc

SEQ ID NO: 84383 - RNA, 21 nt, synthetic construct
  source 1..21: mol_type = other RNA
ctgttttagtggctcacagtg

SEQ ID NO: 84384 - RNA, 21 nt, synthetic construct
  source 1..21: mol_type = other RNA
ctgttttcatgcgacatatca

SEQ ID NO: 84385 - RNA, 21 nt, synthetic construct
  source 1..21: mol_type = other RNA
ctgttttcatttattctgttg

SEQ ID NO: 84386 - RNA, 21 nt, synthetic construct
  source 1..21: mol_type = other RNA
ctgttttccacagtgacttta

SEQ ID NO: 84387 - RNA, 21 nt, synthetic construct
  source 1..21: mol_type = other RNA
ctgttttgcttactgtagcat

SEQ ID NO: 84388 - RNA, 21 nt, synthetic construct
  source 1..21: mol_type = other RNA
ctgttttggtaaaatgtggca

SEQ ID NO: 84389 - RNA, 21 nt, synthetic construct
  source 1..21: mol_type = other RNA
ctgtttttcaaaatgagatct

SEQ ID NO: 84390 - RNA, 21 nt, synthetic construct
  source 1..21: mol_type = other RNA
ctgtttttcttagtctagcca

SEQ ID NO: 84391 - RNA, 21 nt, synthetic construct
  source 1..21: mol_type = other RNA
ctgtttttgaaaagaacaaca

SEQ ID NO: 84392 - RNA, 21 nt, synthetic construct
  source 1..21: mol_type = other RNA
ctgttttttcctcccttcagc

SEQ ID NO: 84393 - RNA, 21 nt, synthetic construct
  source 1..21: mol_type = other RNA
cttaaaaaatgcgcgtccgcg

SEQ ID NO: 84394 - RNA, 21 nt, synthetic construct
  source 1..21: mol_type = other RNA
cttaaaaatgacaccaaaact

SEQ ID NO: 84395 - RNA, 21 nt, synthetic construct
  source 1..21: mol_type = other RNA
cttaaaactttaggtcagaat

SEQ ID NO: 84396 - RNA, 21 nt, synthetic construct
  source 1..21: mol_type = other RNA
cttaaaaggagatatacagga

SEQ ID NO: 84397 - RNA, 21 nt, synthetic construct
  source 1..21: mol_type = other RNA
cttaaaagtgctgcagtatgc

SEQ ID NO: 84398 - RNA, 21 nt, synthetic construct
  source 1..21: mol_type = other RNA
cttaaaataccagaggttaaa

SEQ ID NO: 84399 - RNA, 21 nt, synthetic construct
  source 1..21: mol_type = other RNA
cttaaaattcttccagcctgg

SEQ ID NO: 84400 - RNA, 21 nt, synthetic construct
  source 1..21: mol_type = other RNA
cttaaaccatatacaaaactg

SEQ ID NO: 84401 - RNA, 21 nt, synthetic construct
  source 1..21: mol_type = other RNA
cttaaactgccaaaccctaca

SEQ ID NO: 84402 - RNA, 21 nt, synthetic construct
  source 1..21: mol_type = other RNA
cttaaagccacactcttggtc

SEQ ID NO: 84403 - RNA, 21 nt, synthetic construct
  source 1..21: mol_type = other RNA
cttaaagcctctcaacacttc

SEQ ID NO: 84404 - RNA, 21 nt, synthetic construct
  source 1..21: mol_type = other RNA
cttaaagcgctactcagctgt

SEQ ID NO: 84405 - RNA, 21 nt, synthetic construct
  source 1..21: mol_type = other RNA
cttaaaggtttggagtttgta

SEQ ID NO: 84406 - RNA, 21 nt, synthetic construct
  source 1..21: mol_type = other RNA
cttaaagttggtcctgcatat

SEQ ID NO: 84407 - RNA, 21 nt, synthetic construct
  source 1..21: mol_type = other RNA
cttaaagtttcaaactgtggt

SEQ ID NO: 84408 - RNA, 21 nt, synthetic construct
  source 1..21: mol_type = other RNA
cttaaatccgagacaagttct

SEQ ID NO: 84409 - RNA, 21 nt, synthetic construct
  source 1..21: mol_type = other RNA
cttaaatgtgaattagatggc

SEQ ID NO: 84410 - RNA, 21 nt, synthetic construct
  source 1..21: mol_type = other RNA
cttaaatttctaaggttctgc

SEQ ID NO: 84411 - RNA, 21 nt, synthetic construct
  source 1..21: mol_type = other RNA
cttaacaagaatcctgctatt

SEQ ID NO: 84412 - RNA, 21 nt, synthetic construct
  source 1..21: mol_type = other RNA
cttaacacctttgtattcatc

SEQ ID NO: 84413 - RNA, 21 nt, synthetic construct
  source 1..21: mol_type = other RNA
cttaacatttctcatgtatgt

SEQ ID NO: 84414 - RNA, 21 nt, synthetic construct
  source 1..21: mol_type = other RNA
cttaacatttgaactcactgg

SEQ ID NO: 84415 - RNA, 21 nt, synthetic construct
  source 1..21: mol_type = other RNA
cttaaccattgagccaaagaa

SEQ ID NO: 84416 - RNA, 21 nt, synthetic construct
  source 1..21: mol_type = other RNA
cttaacctttttcttttcaca

SEQ ID NO: 84417 - RNA, 21 nt, synthetic construct
  source 1..21: mol_type = other RNA
cttaactataggagttcattc

SEQ ID NO: 84418 - RNA, 21 nt, synthetic construct
  source 1..21: mol_type = other RNA
cttaacttcacctctacacaa

SEQ ID NO: 84419 - RNA, 21 nt, synthetic construct
  source 1..21: mol_type = other RNA
cttaagaaccatacagtgcct

SEQ ID NO: 84420 - RNA, 21 nt, synthetic construct
  source 1..21: mol_type = other RNA
cttaagaaggaaaagaacaca

SEQ ID NO: 84421 - RNA, 21 nt, synthetic construct
  source 1..21: mol_type = other RNA
cttaagacatttgggaatgtg

SEQ ID NO: 84422 - RNA, 21 nt, synthetic construct
  source 1..21: mol_type = other RNA
cttaagaccacaaggattaat

SEQ ID NO: 84423 - RNA, 21 nt, synthetic construct
  source 1..21: mol_type = other RNA
cttaagagactctcaagaagg

SEQ ID NO: 84424 - RNA, 21 nt, synthetic construct
  source 1..21: mol_type = other RNA
cttaagagcatgttgggccaa

SEQ ID NO: 84425 - RNA, 21 nt, synthetic construct
  source 1..21: mol_type = other RNA
cttaagagctaagactataaa

SEQ ID NO: 84426 - RNA, 21 nt, synthetic construct
  source 1..21: mol_type = other RNA
cttaagcacagactgtgcctt

SEQ ID NO: 84427 - RNA, 21 nt, synthetic construct
  source 1..21: mol_type = other RNA
cttaagccatttcaggttttc

SEQ ID NO: 84428 - RNA, 21 nt, synthetic construct
  source 1..21: mol_type = other RNA
cttaagcttaggtctttgatc

SEQ ID NO: 84429 - RNA, 21 nt, synthetic construct
  source 1..21: mol_type = other RNA
cttaaggaaatggacagcaca

SEQ ID NO: 84430 - RNA, 21 nt, synthetic construct
  source 1..21: mol_type = other RNA
cttaagtatctcagtcataat

SEQ ID NO: 84431 - RNA, 21 nt, synthetic construct
  source 1..21: mol_type = other RNA
cttaagtatctcggtcattct

SEQ ID NO: 84432 - RNA, 21 nt, synthetic construct
  source 1..21: mol_type = other RNA
cttaagtcactccatttgtgg

SEQ ID NO: 84433 - RNA, 21 nt, synthetic construct
  source 1..21: mol_type = other RNA
cttaagttaaaacttgtagag

SEQ ID NO: 84434 - RNA, 21 nt, synthetic construct
  source 1..21: mol_type = other RNA
cttaataacctcaaagtggaa

SEQ ID NO: 84435 - RNA, 21 nt, synthetic construct
  source 1..21: mol_type = other RNA
cttaataactgcctaagtaat

SEQ ID NO: 84436 - RNA, 21 nt, synthetic construct
  source 1..21: mol_type = other RNA
cttaatagcccaacagggttt

SEQ ID NO: 84437 - RNA, 21 nt, synthetic construct
  source 1..21: mol_type = other RNA
cttaatattgaaacgatgcat

SEQ ID NO: 84438 - RNA, 21 nt, synthetic construct
  source 1..21: mol_type = other RNA
cttaatctcctgagtagcagg

SEQ ID NO: 84439 - RNA, 21 nt, synthetic construct
  source 1..21: mol_type = other RNA
cttaatctgatttttagtgac

SEQ ID NO: 84440 - RNA, 21 nt, synthetic construct
  source 1..21: mol_type = other RNA
cttaatcttcacacttagttc

SEQ ID NO: 84441 - RNA, 21 nt, synthetic construct
  source 1..21: mol_type = other RNA
cttaatgttgacatcttgcat

SEQ ID NO: 84442 - RNA, 21 nt, synthetic construct
  source 1..21: mol_type = other RNA
cttaattgagctgtccccacc

SEQ ID NO: 84443 - RNA, 21 nt, synthetic construct
  source 1..21: mol_type = other RNA
cttaatttacccacaaaagaa

SEQ ID NO: 84444 - RNA, 21 nt, synthetic construct
  source 1..21: mol_type = other RNA
cttaatttagatgagagtggc

SEQ ID NO: 84445 - RNA, 21 nt, synthetic construct
  source 1..21: mol_type = other RNA
cttacaatgaatatgtactac

SEQ ID NO: 84446 - RNA, 21 nt, synthetic construct
  source 1..21: mol_type = other RNA
cttacacacacgtttatattc

SEQ ID NO: 84447 - RNA, 21 nt, synthetic construct
  source 1..21: mol_type = other RNA
cttacacattaggctctgggt

SEQ ID NO: 84448 - RNA, 21 nt, synthetic construct
  source 1..21: mol_type = other RNA
cttacacctgtttaaaaagaa

SEQ ID NO: 84449 - RNA, 21 nt, synthetic construct
  source 1..21: mol_type = other RNA
cttacactcaaaagccatagt

SEQ ID NO: 84450 - RNA, 21 nt, synthetic construct
  source 1..21: mol_type = other RNA
cttacagaccttattcaaata

SEQ ID NO: 84451 - RNA, 21 nt, synthetic construct
  source 1..21: mol_type = other RNA
cttacagactgattaatttga

SEQ ID NO: 84452 - RNA, 21 nt, synthetic construct
  source 1..21: mol_type = other RNA
cttacagatatcacccagacc

SEQ ID NO: 84453 - RNA, 21 nt, synthetic construct
  source 1..21: mol_type = other RNA
cttacagcagatctgcttgca

SEQ ID NO: 84454 - RNA, 21 nt, synthetic construct
  source 1..21: mol_type = other RNA
cttacagtaagatcctggatt

SEQ ID NO: 84455 - RNA, 21 nt, synthetic construct
  source 1..21: mol_type = other RNA
cttacagtcatcacagtccag

SEQ ID NO: 84456 - RNA, 21 nt, synthetic construct
  source 1..21: mol_type = other RNA
cttacagtgacatatgccggc

SEQ ID NO: 84457 - RNA, 21 nt, synthetic construct
  source 1..21: mol_type = other RNA
cttacataggcttagtacagc

SEQ ID NO: 84458 - RNA, 21 nt, synthetic construct
  source 1..21: mol_type = other RNA
cttacatcagcagtgaccata

SEQ ID NO: 84459 - RNA, 21 nt, synthetic construct
  source 1..21: mol_type = other RNA
cttacattgtaatcctgtttc

SEQ ID NO: 84460 - RNA, 21 nt, synthetic construct
  source 1..21: mol_type = other RNA
cttaccaaggctggagtgcag

SEQ ID NO: 84461 - RNA, 21 nt, synthetic construct
  source 1..21: mol_type = other RNA
cttaccaagtgccgcgttttt

SEQ ID NO: 84462 - RNA, 21 nt, synthetic construct
  source 1..21: mol_type = other RNA
cttaccactataatccagatg

SEQ ID NO: 84463 - RNA, 21 nt, synthetic construct
  source 1..21: mol_type = other RNA
cttaccactgaagtgttgaga

SEQ ID NO: 84464 - RNA, 21 nt, synthetic construct
  source 1..21: mol_type = other RNA
cttaccagtgcttgcagcctt

SEQ ID NO: 84465 - RNA, 21 nt, synthetic construct
  source 1..21: mol_type = other RNA
cttacccccatcacactggtc

SEQ ID NO: 84466 - RNA, 21 nt, synthetic construct
  source 1..21: mol_type = other RNA
cttaccctcacagtcacaaag

SEQ ID NO: 84467 - RNA, 21 nt, synthetic construct
  source 1..21: mol_type = other RNA
cttaccctctagctccccatt

SEQ ID NO: 84468 - RNA, 21 nt, synthetic construct
  source 1..21: mol_type = other RNA
cttaccctttactcagattca

SEQ ID NO: 84469 - RNA, 21 nt, synthetic construct
  source 1..21: mol_type = other RNA
cttacctaagcatcgtgaagt

SEQ ID NO: 84470 - RNA, 21 nt, synthetic construct
  source 1..21: mol_type = other RNA
cttacctcaaaggagagaaga

SEQ ID NO: 84471 - RNA, 21 nt, synthetic construct
  source 1..21: mol_type = other RNA
cttaccttaaaccatatacaa

SEQ ID NO: 84472 - RNA, 21 nt, synthetic construct
  source 1..21: mol_type = other RNA
cttaccttctaaaatcatcac

SEQ ID NO: 84473 - RNA, 21 nt, synthetic construct
  source 1..21: mol_type = other RNA
cttacctttatctttggatat

SEQ ID NO: 84474 - RNA, 21 nt, synthetic construct
  source 1..21: mol_type = other RNA
cttacgcgtggatgtgtgcac

SEQ ID NO: 84475 - RNA, 21 nt, synthetic construct
  source 1..21: mol_type = other RNA
cttactaaatgatctttcaag

SEQ ID NO: 84476 - RNA, 21 nt, synthetic construct
  source 1..21: mol_type = other RNA
cttactaaattttgaggcttt

SEQ ID NO: 84477 - RNA, 21 nt, synthetic construct
  source 1..21: mol_type = other RNA
cttactaccaccactaatgtc

SEQ ID NO: 84478 - RNA, 21 nt, synthetic construct
  source 1..21: mol_type = other RNA
cttactagttgtgctacctca

SEQ ID NO: 84479 - RNA, 21 nt, synthetic construct
  source 1..21: mol_type = other RNA
cttactctaatggggaaatag

SEQ ID NO: 84480 - RNA, 21 nt, synthetic construct
  source 1..21: mol_type = other RNA
cttactctcaaataatttggc

SEQ ID NO: 84481 - RNA, 21 nt, synthetic construct
  source 1..21: mol_type = other RNA
cttactgatttatagtgtttc

SEQ ID NO: 84482 - RNA, 21 nt, synthetic construct
  source 1..21: mol_type = other RNA
cttactgcaacctccgttttt

SEQ ID NO: 84483 - RNA, 21 nt, synthetic construct
  source 1..21: mol_type = other RNA
cttactggtgttaggcaatcc

SEQ ID NO: 84484 - RNA, 21 nt, synthetic construct
  source 1..21: mol_type = other RNA
cttactgtaagttcctggact

SEQ ID NO: 84485 - RNA, 21 nt, synthetic construct
  source 1..21: mol_type = other RNA
cttactgtagcattgaagtat

SEQ ID NO: 84486 - RNA, 21 nt, synthetic construct
  source 1..21: mol_type = other RNA
cttacttccagctcacgttac

SEQ ID NO: 84487 - RNA, 21 nt, synthetic construct
  source 1..21: mol_type = other RNA
cttacttgagccccagaatag

SEQ ID NO: 84488 - RNA, 21 nt, synthetic construct
  source 1..21: mol_type = other RNA
cttagaaatgaagatggcctc

SEQ ID NO: 84489 - RNA, 21 nt, synthetic construct
  source 1..21: mol_type = other RNA
cttagaaatttaaggaccagg

SEQ ID NO: 84490 - RNA, 21 nt, synthetic construct
  source 1..21: mol_type = other RNA
cttagaagaagacttaggaga

SEQ ID NO: 84491 - RNA, 21 nt, synthetic construct
  source 1..21: mol_type = other RNA
cttagaatataaactcttcct

SEQ ID NO: 84492 - RNA, 21 nt, synthetic construct
  source 1..21: mol_type = other RNA
cttagacctcctagattgacc

SEQ ID NO: 84493 - RNA, 21 nt, synthetic construct
  source 1..21: mol_type = other RNA
cttagagggcttcatgctggg

SEQ ID NO: 84494 - RNA, 21 nt, synthetic construct
  source 1..21: mol_type = other RNA
cttagataggatgggcagact

SEQ ID NO: 84495 - RNA, 21 nt, synthetic construct
  source 1..21: mol_type = other RNA
cttagatgagcccaggagttg

SEQ ID NO: 84496 - RNA, 21 nt, synthetic construct
  source 1..21: mol_type = other RNA
cttagattacaaaagaacagg

SEQ ID NO: 84497 - RNA, 21 nt, synthetic construct
  source 1..21: mol_type = other RNA
cttagcatgttgctttgcgaa

SEQ ID NO: 84498 - RNA, 21 nt, synthetic construct
  source 1..21: mol_type = other RNA
cttagcccaagctaccattta

SEQ ID NO: 84499 - RNA, 21 nt, synthetic construct
  source 1..21: mol_type = other RNA
cttagcccacttgttgatggg

SEQ ID NO: 84500 - RNA, 21 nt, synthetic construct
  source 1..21: mol_type = other RNA
cttagcccctgctgccagatg

SEQ ID NO: 84501 - RNA, 21 nt, synthetic construct
  source 1..21: mol_type = other RNA
cttagccgggaggagccaagt

SEQ ID NO: 84502 - RNA, 21 nt, synthetic construct
  source 1..21: mol_type = other RNA
cttagccttccagagacaaag

SEQ ID NO: 84503 - RNA, 21 nt, synthetic construct
  source 1..21: mol_type = other RNA
cttagccttggtaaaatcact

SEQ ID NO: 84504 - RNA, 21 nt, synthetic construct
  source 1..21: mol_type = other RNA
cttagcgctgatgtgttgacc

SEQ ID NO: 84505 - RNA, 21 nt, synthetic construct
  source 1..21: mol_type = other RNA
cttagcgctggaggtcgggct

SEQ ID NO: 84506 - RNA, 21 nt, synthetic construct
  source 1..21: mol_type = other RNA
cttagctaatttcagagagac

SEQ ID NO: 84507 - RNA, 21 nt, synthetic construct
  source 1..21: mol_type = other RNA
cttagctatattcacttttgg

SEQ ID NO: 84508 - RNA, 21 nt, synthetic construct
  source 1..21: mol_type = other RNA
cttagctctcatgtcagagac

SEQ ID NO: 84509 - RNA, 21 nt, synthetic construct
  source 1..21: mol_type = other RNA
cttagctcttaagcttaggtc

SEQ ID NO: 84510 - RNA, 21 nt, synthetic construct
  source 1..21: mol_type = other RNA
cttagctcttcccttaacctt

SEQ ID NO: 84511 - RNA, 21 nt, synthetic construct
  source 1..21: mol_type = other RNA
cttagctgcctcttcctgttg

SEQ ID NO: 84512 - RNA, 21 nt, synthetic construct
  source 1..21: mol_type = other RNA
cttagcttagaagaagactta

SEQ ID NO: 84513 - RNA, 21 nt, synthetic construct
  source 1..21: mol_type = other RNA
cttaggaagctatggagcact

SEQ ID NO: 84514 - RNA, 21 nt, synthetic construct
  source 1..21: mol_type = other RNA
cttaggagaaaagcttcataa

SEQ ID NO: 84515 - RNA, 21 nt, synthetic construct
  source 1..21: mol_type = other RNA
cttaggaggctattaactttg

SEQ ID NO: 84516 - RNA, 21 nt, synthetic construct
  source 1..21: mol_type = other RNA
cttaggatcaccaaagacttc

SEQ ID NO: 84517 - RNA, 21 nt, synthetic construct
  source 1..21: mol_type = other RNA
cttaggatcccagtcctttgg

SEQ ID NO: 84518 - RNA, 21 nt, synthetic construct
  source 1..21: mol_type = other RNA
cttaggcaaaggaaaaatcta

SEQ ID NO: 84519 - RNA, 21 nt, synthetic construct
  source 1..21: mol_type = other RNA
cttaggcagttattaagagtg

SEQ ID NO: 84520 - RNA, 21 nt, synthetic construct
  source 1..21: mol_type = other RNA
cttaggccataaatcaaggta

SEQ ID NO: 84521 - RNA, 21 nt, synthetic construct
  source 1..21: mol_type = other RNA
cttaggctgaagcaggctttt

SEQ ID NO: 84522 - RNA, 21 nt, synthetic construct
  source 1..21: mol_type = other RNA
cttaggctgttattagagttg

SEQ ID NO: 84523 - RNA, 21 nt, synthetic construct
  source 1..21: mol_type = other RNA
cttaggtaagaaaaattccct

SEQ ID NO: 84524 - RNA, 21 nt, synthetic construct
  source 1..21: mol_type = other RNA
cttaggtcagattcctttttt

SEQ ID NO: 84525 - RNA, 21 nt, synthetic construct
  source 1..21: mol_type = other RNA
cttaggtttctcatttttcag

SEQ ID NO: 84526 - RNA, 21 nt, synthetic construct
  source 1..21: mol_type = other RNA
cttagtaaatatccgaaagaa

SEQ ID NO: 84527 - RNA, 21 nt, synthetic construct
  source 1..21: mol_type = other RNA
cttagtacagccatcaaccta

SEQ ID NO: 84528 - RNA, 21 nt, synthetic construct
  source 1..21: mol_type = other RNA
cttagtctgacttctctcaga

SEQ ID NO: 84529 - RNA, 21 nt, synthetic construct
  source 1..21: mol_type = other RNA
cttagtcttctcagatctgtt

SEQ ID NO: 84530 - RNA, 21 nt, synthetic construct
  source 1..21: mol_type = other RNA
cttagtgagggaggccatctt

SEQ ID NO: 84531 - RNA, 21 nt, synthetic construct
  source 1..21: mol_type = other RNA
cttagtgatgtcttttgaaga

SEQ ID NO: 84532 - RNA, 21 nt, synthetic construct
  source 1..21: mol_type = other RNA
cttagtggttgacccataaac

SEQ ID NO: 84533 - RNA, 21 nt, synthetic construct
  source 1..21: mol_type = other RNA
cttagtgttcccttcttaaat

SEQ ID NO: 84534 - RNA, 21 nt, synthetic construct
  source 1..21: mol_type = other RNA
cttagttcaagatgcatacca

SEQ ID NO: 84535 - RNA, 21 nt, synthetic construct
  source 1..21: mol_type = other RNA
cttagttccattattccataa

SEQ ID NO: 84536 - RNA, 21 nt, synthetic construct
  source 1..21: mol_type = other RNA
cttagttctgcttccacattt

SEQ ID NO: 84537 - RNA, 21 nt, synthetic construct
  source 1..21: mol_type = other RNA
cttagtttgcaatacagttaa

SEQ ID NO: 84538 - RNA, 21 nt, synthetic construct
  source 1..21: mol_type = other RNA
cttagttttcacttttgtgca

SEQ ID NO: 84539 - RNA, 21 nt, synthetic construct
  source 1..21: mol_type = other RNA
cttataacaagaaaatctgac

SEQ ID NO: 84540 - RNA, 21 nt, synthetic construct
  source 1..21: mol_type = other RNA
cttatactagtagaaagcagg

SEQ ID NO: 84541 - RNA, 21 nt, synthetic construct
  source 1..21: mol_type = other RNA
cttatagatgacgaaagtgaa

SEQ ID NO: 84542 - RNA, 21 nt, synthetic construct
  source 1..21: mol_type = other RNA
cttataggttgaatagggcct

SEQ ID NO: 84543 - RNA, 21 nt, synthetic construct
  source 1..21: mol_type = other RNA
cttatagtattacctcccatg

SEQ ID NO: 84544 - RNA, 21 nt, synthetic construct
  source 1..21: mol_type = other RNA
cttatataaatgctcagtggg

SEQ ID NO: 84545 - RNA, 21 nt, synthetic construct
  source 1..21: mol_type = other RNA
cttatatcctaaacacttagc

SEQ ID NO: 84546 - RNA, 21 nt, synthetic construct
  source 1..21: mol_type = other RNA
cttatatgggatatctaacat

SEQ ID NO: 84547 - RNA, 21 nt, synthetic construct
  source 1..21: mol_type = other RNA
cttatattaattctgaggcct

SEQ ID NO: 84548 - RNA, 21 nt, synthetic construct
  source 1..21: mol_type = other RNA
cttatcagatggtgatacctc

SEQ ID NO: 84549 - RNA, 21 nt, synthetic construct
  source 1..21: mol_type = other RNA
cttatcaggaaagtgccagcc

SEQ ID NO: 84550 - RNA, 21 nt, synthetic construct
  source 1..21: mol_type = other RNA
cttatcaggcttgagtctgtg

SEQ ID NO: 84551 - RNA, 21 nt, synthetic construct
  source 1..21: mol_type = other RNA
cttatccattcatctctcgat

SEQ ID NO: 84552 - RNA, 21 nt, synthetic construct
  source 1..21: mol_type = other RNA
cttatccctacctaaaaaggg

SEQ ID NO: 84553 - RNA, 21 nt, synthetic construct
  source 1..21: mol_type = other RNA
cttatccgataaagggtctgg

SEQ ID NO: 84554 - RNA, 21 nt, synthetic construct
  source 1..21: mol_type = other RNA
cttatcctcttctgaagaggc

SEQ ID NO: 84555 - RNA, 21 nt, synthetic construct
  source 1..21: mol_type = other RNA
cttatctaggcgaaatatctc

SEQ ID NO: 84556 - RNA, 21 nt, synthetic construct
  source 1..21: mol_type = other RNA
cttatctgctgtcggttttct

SEQ ID NO: 84557 - RNA, 21 nt, synthetic construct
  source 1..21: mol_type = other RNA
cttatcttttcaaaaacccaa

SEQ ID NO: 84558 - RNA, 21 nt, synthetic construct
  source 1..21: mol_type = other RNA
cttatgaggttattcaaaaca

SEQ ID NO: 84559 - RNA, 21 nt, synthetic construct
  source 1..21: mol_type = other RNA
cttatgatcttgggaatactt

SEQ ID NO: 84560 - RNA, 21 nt, synthetic construct
  source 1..21: mol_type = other RNA
cttatgcaagatggcaagttt

SEQ ID NO: 84561 - RNA, 21 nt, synthetic construct
  source 1..21: mol_type = other RNA
cttatgcatcttgcaaaacgg

SEQ ID NO: 84562 - RNA, 21 nt, synthetic construct
  source 1..21: mol_type = other RNA
cttatgctggtgggctttgag

SEQ ID NO: 84563 - RNA, 21 nt, synthetic construct
  source 1..21: mol_type = other RNA
cttatggagataaattaccca

SEQ ID NO: 84564 - RNA, 21 nt, synthetic construct
  source 1..21: mol_type = other RNA
cttatggatatctggcctgca

SEQ ID NO: 84565 - RNA, 21 nt, synthetic construct
  source 1..21: mol_type = other RNA
cttatggctataaccacgagt

SEQ ID NO: 84566 - RNA, 21 nt, synthetic construct
  source 1..21: mol_type = other RNA
cttatgtccagcccccagttt

SEQ ID NO: 84567 - RNA, 21 nt, synthetic construct
  source 1..21: mol_type = other RNA
cttatgtcttgtggctgacat

SEQ ID NO: 84568 - RNA, 21 nt, synthetic construct
  source 1..21: mol_type = other RNA
cttatgtgaaagtagaggact

SEQ ID NO: 84569 - RNA, 21 nt, synthetic construct
  source 1..21: mol_type = other RNA
cttatgtgtgtataacccgtt

SEQ ID NO: 84570 - RNA, 21 nt, synthetic construct
  source 1..21: mol_type = other RNA
cttattaaaatgaacctgctt

SEQ ID NO: 84571 - RNA, 21 nt, synthetic construct
  source 1..21: mol_type = other RNA
cttattaatgtgttgtctgat

SEQ ID NO: 84572 - RNA, 21 nt, synthetic construct
  source 1..21: mol_type = other RNA
cttattagcaaagaggcaaaa

SEQ ID NO: 84573 - RNA, 21 nt, synthetic construct
  source 1..21: mol_type = other RNA
cttattatatgcctagatttc

SEQ ID NO: 84574 - RNA, 21 nt, synthetic construct
  source 1..21: mol_type = other RNA
cttattcaaataattgctgca

SEQ ID NO: 84575 - RNA, 21 nt, synthetic construct
  source 1..21: mol_type = other RNA
cttattccccagggaaacctt

SEQ ID NO: 84576 - RNA, 21 nt, synthetic construct
  source 1..21: mol_type = other RNA
cttattgagaagcagaaaatc

SEQ ID NO: 84577 - RNA, 21 nt, synthetic construct
  source 1..21: mol_type = other RNA
cttattgattcagatgacaga

SEQ ID NO: 84578 - RNA, 21 nt, synthetic construct
  source 1..21: mol_type = other RNA
cttattggaaaactctgtttc

SEQ ID NO: 84579 - RNA, 21 nt, synthetic construct
  source 1..21: mol_type = other RNA
cttattggttatctgtacttt

SEQ ID NO: 84580 - RNA, 21 nt, synthetic construct
  source 1..21: mol_type = other RNA
cttatttaatgtgctgtccat

SEQ ID NO: 84581 - RNA, 21 nt, synthetic construct
  source 1..21: mol_type = other RNA
cttatttccagggggtatgga

SEQ ID NO: 84582 - RNA, 21 nt, synthetic construct
  source 1..21: mol_type = other RNA
cttatttccttccagtttata

SEQ ID NO: 84583 - RNA, 21 nt, synthetic construct
  source 1..21: mol_type = other RNA
cttatttggaaatatggtcac

SEQ ID NO: 84584 - RNA, 21 nt, synthetic construct
  source 1..21: mol_type = other RNA
cttatttgttactgatctgct

SEQ ID NO: 84585 - RNA, 21 nt, synthetic construct
  source 1..21: mol_type = other RNA
cttattttttcccagatacgt

SEQ ID NO: 84586 - RNA, 21 nt, synthetic construct
  source 1..21: mol_type = other RNA
cttcaaaagacatcactaaga

SEQ ID NO: 84587 - RNA, 21 nt, synthetic construct
  source 1..21: mol_type = other RNA
cttcaaaatctgatgtgtatg

SEQ ID NO: 84588 - RNA, 21 nt, synthetic construct
  source 1..21: mol_type = other RNA
cttcaaaccactatctaataa

SEQ ID NO: 84589 - RNA, 21 nt, synthetic construct
  source 1..21: mol_type = other RNA
cttcaaagagaacaaaatacc

SEQ ID NO: 84590 - RNA, 21 nt, synthetic construct
  source 1..21: mol_type = other RNA
cttcaaagggtcactattaac

SEQ ID NO: 84591 - RNA, 21 nt, synthetic construct
  source 1..21: mol_type = other RNA
cttcaaagttatgtttatgac

SEQ ID NO: 84592 - RNA, 21 nt, synthetic construct
  source 1..21: mol_type = other RNA
cttcaaccatacttttcaact

SEQ ID NO: 84593 - RNA, 21 nt, synthetic construct
  source 1..21: mol_type = other RNA
cttcaacctcaactttaggtt

SEQ ID NO: 84594 - RNA, 21 nt, synthetic construct
  source 1..21: mol_type = other RNA
cttcaacctcctgggctcaaa

SEQ ID NO: 84595 - RNA, 21 nt, synthetic construct
  source 1..21: mol_type = other RNA
cttcaacggacatttttccaa

SEQ ID NO: 84596 - RNA, 21 nt, synthetic construct
  source 1..21: mol_type = other RNA
cttcaagaggttaaaaccaca

SEQ ID NO: 84597 - RNA, 21 nt, synthetic construct
  source 1..21: mol_type = other RNA
cttcaagatactgcactaaac

SEQ ID NO: 84598 - RNA, 21 nt, synthetic construct
  source 1..21: mol_type = other RNA
cttcaagatttcataggcatc

SEQ ID NO: 84599 - RNA, 21 nt, synthetic construct
  source 1..21: mol_type = other RNA
cttcaagcattgggagctttc

SEQ ID NO: 84600 - RNA, 21 nt, synthetic construct
  source 1..21: mol_type = other RNA
cttcaaggtaatctagtttat

SEQ ID NO: 84601 - RNA, 21 nt, synthetic construct
  source 1..21: mol_type = other RNA
cttcaaggttcacaaattaga

SEQ ID NO: 84602 - RNA, 21 nt, synthetic construct
  source 1..21: mol_type = other RNA
cttcaagttgctttttcttct

SEQ ID NO: 84603 - RNA, 21 nt, synthetic construct
  source 1..21: mol_type = other RNA
cttcaatatgcagtatgtgcc

SEQ ID NO: 84604 - RNA, 21 nt, synthetic construct
  source 1..21: mol_type = other RNA
cttcaatattttggaagacta

SEQ ID NO: 84605 - RNA, 21 nt, synthetic construct
  source 1..21: mol_type = other RNA
cttcaatgagggcagagataa

SEQ ID NO: 84606 - RNA, 21 nt, synthetic construct
  source 1..21: mol_type = other RNA
cttcaatgctacagtaagcaa

SEQ ID NO: 84607 - RNA, 21 nt, synthetic construct
  source 1..21: mol_type = other RNA
cttcaatgtttggtagatttc

SEQ ID NO: 84608 - RNA, 21 nt, synthetic construct
  source 1..21: mol_type = other RNA
cttcacaaacaaatccttttc

SEQ ID NO: 84609 - RNA, 21 nt, synthetic construct
  source 1..21: mol_type = other RNA
cttcacaaagccctcaggacc

SEQ ID NO: 84610 - RNA, 21 nt, synthetic construct
  source 1..21: mol_type = other RNA
cttcacacattaactatggac

SEQ ID NO: 84611 - RNA, 21 nt, synthetic construct
  source 1..21: mol_type = other RNA
cttcacaccatttagatcatc

SEQ ID NO: 84612 - RNA, 21 nt, synthetic construct
  source 1..21: mol_type = other RNA
cttcacacttagttcaagatg

SEQ ID NO: 84613 - RNA, 21 nt, synthetic construct
  source 1..21: mol_type = other RNA
cttcaccaaagatttactaaa

SEQ ID NO: 84614 - RNA, 21 nt, synthetic construct
  source 1..21: mol_type = other RNA
cttcaccaactgaagcggggc

SEQ ID NO: 84615 - RNA, 21 nt, synthetic construct
  source 1..21: mol_type = other RNA
cttcaccattccagccattct

SEQ ID NO: 84616 - RNA, 21 nt, synthetic construct
  source 1..21: mol_type = other RNA
cttcaccgtgcaactagagaa

SEQ ID NO: 84617 - RNA, 21 nt, synthetic construct
  source 1..21: mol_type = other RNA
cttcacctctacacaaaaatc

SEQ ID NO: 84618 - RNA, 21 nt, synthetic construct
  source 1..21: mol_type = other RNA
cttcacgatgcttaggtaaga

SEQ ID NO: 84619 - RNA, 21 nt, synthetic construct
  source 1..21: mol_type = other RNA
cttcacgtgcattcatactga

SEQ ID NO: 84620 - RNA, 21 nt, synthetic construct
  source 1..21: mol_type = other RNA
cttcacgtggcgctccctctg

SEQ ID NO: 84621 - RNA, 21 nt, synthetic construct
  source 1..21: mol_type = other RNA
cttcactagatctcttttcct

SEQ ID NO: 84622 - RNA, 21 nt, synthetic construct
  source 1..21: mol_type = other RNA
cttcactagtgggtcgggtgt

SEQ ID NO: 84623 - RNA, 21 nt, synthetic construct
  source 1..21: mol_type = other RNA
cttcactcttaaaaggagata

SEQ ID NO: 84624 - RNA, 21 nt, synthetic construct
  source 1..21: mol_type = other RNA
cttcactcttctgcaagttgc

SEQ ID NO: 84625 - RNA, 21 nt, synthetic construct
  source 1..21: mol_type = other RNA
cttcactgactacacatacac

SEQ ID NO: 84626 - RNA, 21 nt, synthetic construct
  source 1..21: mol_type = other RNA
cttcacttccaagtcccggaa

SEQ ID NO: 84627 - RNA, 21 nt, synthetic construct
  source 1..21: mol_type = other RNA
cttcacttctctgctgctgaa

SEQ ID NO: 84628 - RNA, 21 nt, synthetic construct
  source 1..21: mol_type = other RNA
cttcactttcgtcatctataa

SEQ ID NO: 84629 - RNA, 21 nt, synthetic construct
  source 1..21: mol_type = other RNA
cttcagaactcttctccaagg

SEQ ID NO: 84630 - RNA, 21 nt, synthetic construct
  source 1..21: mol_type = other RNA
cttcagaagaaattacttctt

SEQ ID NO: 84631 - RNA, 21 nt, synthetic construct
  source 1..21: mol_type = other RNA
cttcagaagaggataaggggc

SEQ ID NO: 84632 - RNA, 21 nt, synthetic construct
  source 1..21: mol_type = other RNA
cttcagaagccctgcagccag

SEQ ID NO: 84633 - RNA, 21 nt, synthetic construct
  source 1..21: mol_type = other RNA
cttcagaaggagtccagtcct

SEQ ID NO: 84634 - RNA, 21 nt, synthetic construct
  source 1..21: mol_type = other RNA
cttcagaggccctggtgcttt

SEQ ID NO: 84635 - RNA, 21 nt, synthetic construct
  source 1..21: mol_type = other RNA
cttcagaggtctgttactccc

SEQ ID NO: 84636 - RNA, 21 nt, synthetic construct
  source 1..21: mol_type = other RNA
cttcagcaaggaccattagca

SEQ ID NO: 84637 - RNA, 21 nt, synthetic construct
  source 1..21: mol_type = other RNA
cttcagcctaagcaagttaca

SEQ ID NO: 84638 - RNA, 21 nt, synthetic construct
  source 1..21: mol_type = other RNA
cttcagcctgtgtcagtgaca

SEQ ID NO: 84639 - RNA, 21 nt, synthetic construct
  source 1..21: mol_type = other RNA
cttcagcgcttgaacaaatat

SEQ ID NO: 84640 - RNA, 21 nt, synthetic construct
  source 1..21: mol_type = other RNA
cttcagctatggtgttatttg

SEQ ID NO: 84641 - RNA, 21 nt, synthetic construct
  source 1..21: mol_type = other RNA
cttcaggaacaccttgaacat

SEQ ID NO: 84642 - RNA, 21 nt, synthetic construct
  source 1..21: mol_type = other RNA
cttcaggtctctctgaaatta

SEQ ID NO: 84643 - RNA, 21 nt, synthetic construct
  source 1..21: mol_type = other RNA
cttcagtatgaatgcacgtga

SEQ ID NO: 84644 - RNA, 21 nt, synthetic construct
  source 1..21: mol_type = other RNA
cttcagtcagttctctgcccc

SEQ ID NO: 84645 - RNA, 21 nt, synthetic construct
  source 1..21: mol_type = other RNA
cttcagtccttaccactgaag

SEQ ID NO: 84646 - RNA, 21 nt, synthetic construct
  source 1..21: mol_type = other RNA
cttcagtgccaacacatgggg

SEQ ID NO: 84647 - RNA, 21 nt, synthetic construct
  source 1..21: mol_type = other RNA
cttcagtggtaaggactgaag

SEQ ID NO: 84648 - RNA, 21 nt, synthetic construct
  source 1..21: mol_type = other RNA
cttcagtgtagtcagacacac

SEQ ID NO: 84649 - RNA, 21 nt, synthetic construct
  source 1..21: mol_type = other RNA
cttcagttggtgaagagagcc

SEQ ID NO: 84650 - RNA, 21 nt, synthetic construct
  source 1..21: mol_type = other RNA
cttcagttttgagtggcatca

SEQ ID NO: 84651 - RNA, 21 nt, synthetic construct
  source 1..21: mol_type = other RNA
cttcatagatgttatgccccc

SEQ ID NO: 84652 - RNA, 21 nt, synthetic construct
  source 1..21: mol_type = other RNA
cttcatataagtggaatcatt

SEQ ID NO: 84653 - RNA, 21 nt, synthetic construct
  source 1..21: mol_type = other RNA
cttcatattttgtgggaattc

SEQ ID NO: 84654 - RNA, 21 nt, synthetic construct
  source 1..21: mol_type = other RNA
cttcatcagtccctgtgtttt

SEQ ID NO: 84655 - RNA, 21 nt, synthetic construct
  source 1..21: mol_type = other RNA
cttcatctggaccagttactc

SEQ ID NO: 84656 - RNA, 21 nt, synthetic construct
  source 1..21: mol_type = other RNA
cttcatctttcctgatcacac

SEQ ID NO: 84657 - RNA, 21 nt, synthetic construct
  source 1..21: mol_type = other RNA
cttcatgattcagtcttggta

SEQ ID NO: 84658 - RNA, 21 nt, synthetic construct
  source 1..21: mol_type = other RNA
cttcatgctgggagaccagga

SEQ ID NO: 84659 - RNA, 21 nt, synthetic construct
  source 1..21: mol_type = other RNA
cttcatggactagactgcctg

SEQ ID NO: 84660 - RNA, 21 nt, synthetic construct
  source 1..21: mol_type = other RNA
cttcatgggtggaaattaaac

SEQ ID NO: 84661 - RNA, 21 nt, synthetic construct
  source 1..21: mol_type = other RNA
cttcatgtacaatgaattagc

SEQ ID NO: 84662 - RNA, 21 nt, synthetic construct
  source 1..21: mol_type = other RNA
cttcatgtcccctgtccaagt

SEQ ID NO: 84663 - RNA, 21 nt, synthetic construct
  source 1..21: mol_type = other RNA
cttcattccgcgtttattaga

SEQ ID NO: 84664 - RNA, 21 nt, synthetic construct
  source 1..21: mol_type = other RNA
cttcattcttgacatgattga

SEQ ID NO: 84665 - RNA, 21 nt, synthetic construct
  source 1..21: mol_type = other RNA
cttcatttctaagccatgttt

SEQ ID NO: 84666 - RNA, 21 nt, synthetic construct
  source 1..21: mol_type = other RNA
cttccaaaagcaggccctgag

SEQ ID NO: 84667 - RNA, 21 nt, synthetic construct
  source 1..21: mol_type = other RNA
cttccaaaatattgaagaggg

SEQ ID NO: 84668 - RNA, 21 nt, synthetic construct
  source 1..21: mol_type = other RNA
cttccaaagtatgcatagcag

SEQ ID NO: 84669 - RNA, 21 nt, synthetic construct
  source 1..21: mol_type = other RNA
cttccaaataatcccgcacct

SEQ ID NO: 84670 - RNA, 21 nt, synthetic construct
  source 1..21: mol_type = other RNA
cttccaaccatcttcttagtg

SEQ ID NO: 84671 - RNA, 21 nt, synthetic construct
  source 1..21: mol_type = other RNA
cttccaagtcccggaagctgg

SEQ ID NO: 84672 - RNA, 21 nt, synthetic construct
  source 1..21: mol_type = other RNA
cttccaattgcagaaaaatag

SEQ ID NO: 84673 - RNA, 21 nt, synthetic construct
  source 1..21: mol_type = other RNA
cttccacagctatcaggcctt

SEQ ID NO: 84674 - RNA, 21 nt, synthetic construct
  source 1..21: mol_type = other RNA
cttccacatttctaatttcca

SEQ ID NO: 84675 - RNA, 21 nt, synthetic construct
  source 1..21: mol_type = other RNA
cttccacccaagtggagcctg

SEQ ID NO: 84676 - RNA, 21 nt, synthetic construct
  source 1..21: mol_type = other RNA
cttccacctgctctttatctc

SEQ ID NO: 84677 - RNA, 21 nt, synthetic construct
  source 1..21: mol_type = other RNA
cttccacggaatgcccctttg

SEQ ID NO: 84678 - RNA, 21 nt, synthetic construct
  source 1..21: mol_type = other RNA
cttccactagtgggatcaaac

SEQ ID NO: 84679 - RNA, 21 nt, synthetic construct
  source 1..21: mol_type = other RNA
cttccagaaacttccaaccat

SEQ ID NO: 84680 - RNA, 21 nt, synthetic construct
  source 1..21: mol_type = other RNA
cttccagaaggagaaaacaaa

SEQ ID NO: 84681 - RNA, 21 nt, synthetic construct
  source 1..21: mol_type = other RNA
cttccagagacaaagcataaa

SEQ ID NO: 84682 - RNA, 21 nt, synthetic construct
  source 1..21: mol_type = other RNA
cttccagatgttttacacatg

SEQ ID NO: 84683 - RNA, 21 nt, synthetic construct
  source 1..21: mol_type = other RNA
cttccagcaagactttatgtg

SEQ ID NO: 84684 - RNA, 21 nt, synthetic construct
  source 1..21: mol_type = other RNA
cttccagcctggtaatgaata

SEQ ID NO: 84685 - RNA, 21 nt, synthetic construct
  source 1..21: mol_type = other RNA
cttccagcgtgtgcatgaccc

SEQ ID NO: 84686 - RNA, 21 nt, synthetic construct
  source 1..21: mol_type = other RNA
cttccagctcacgttaccctc

SEQ ID NO: 84687 - RNA, 21 nt, synthetic construct
  source 1..21: mol_type = other RNA
cttccagtacatctcaattca

SEQ ID NO: 84688 - RNA, 21 nt, synthetic construct
  source 1..21: mol_type = other RNA
cttccagtatgatgccactca

SEQ ID NO: 84689 - RNA, 21 nt, synthetic construct
  source 1..21: mol_type = other RNA
cttccagtgttttagggggga

SEQ ID NO: 84690 - RNA, 21 nt, synthetic construct
  source 1..21: mol_type = other RNA
cttccagtttatatgcctaga

SEQ ID NO: 84691 - RNA, 21 nt, synthetic construct
  source 1..21: mol_type = other RNA
cttccatacgaaagcctttat

SEQ ID NO: 84692 - RNA, 21 nt, synthetic construct
  source 1..21: mol_type = other RNA
cttccatgagattacatagca

SEQ ID NO: 84693 - RNA, 21 nt, synthetic construct
  source 1..21: mol_type = other RNA
cttccattttagatcaagtcc

SEQ ID NO: 84694 - RNA, 21 nt, synthetic construct
  source 1..21: mol_type = other RNA
cttcccaaagacatcctgatt

SEQ ID NO: 84695 - RNA, 21 nt, synthetic construct
  source 1..21: mol_type = other RNA
cttcccaaatccaggatggca

SEQ ID NO: 84696 - RNA, 21 nt, synthetic construct
  source 1..21: mol_type = other RNA
cttcccaatcctttgtgcagg

SEQ ID NO: 84697 - RNA, 21 nt, synthetic construct
  source 1..21: mol_type = other RNA
cttcccactgctatgactaat

SEQ ID NO: 84698 - RNA, 21 nt, synthetic construct
  source 1..21: mol_type = other RNA
cttcccacttcgaaagttcag

SEQ ID NO: 84699 - RNA, 21 nt, synthetic construct
  source 1..21: mol_type = other RNA
cttcccagacagggaatgccc

SEQ ID NO: 84700 - RNA, 21 nt, synthetic construct
  source 1..21: mol_type = other RNA
cttcccatctcactcacctag

SEQ ID NO: 84701 - RNA, 21 nt, synthetic construct
  source 1..21: mol_type = other RNA
cttcccatgaacatggtttga

SEQ ID NO: 84702 - RNA, 21 nt, synthetic construct
  source 1..21: mol_type = other RNA
cttccccacctttcctgcccc

SEQ ID NO: 84703 - RNA, 21 nt, synthetic construct
  source 1..21: mol_type = other RNA
cttcccccaaaacttaggagg

SEQ ID NO: 84704 - RNA, 21 nt, synthetic construct
  source 1..21: mol_type = other RNA
cttcccccaaagaaggaaaaa

SEQ ID NO: 84705 - RNA, 21 nt, synthetic construct
  source 1..21: mol_type = other RNA
cttcccccctctctctttctg

SEQ ID NO: 84706 - RNA, 21 nt, synthetic construct
  source 1..21: mol_type = other RNA
cttcccctgctgttcccaagc

SEQ ID NO: 84707 - RNA, 21 nt, synthetic construct
  source 1..21: mol_type = other RNA
cttcccctggtcgagctgggt

SEQ ID NO: 84708 - RNA, 21 nt, synthetic construct
  source 1..21: mol_type = other RNA
cttcccctttctttggttttg

SEQ ID NO: 84709 - RNA, 21 nt, synthetic construct
  source 1..21: mol_type = other RNA
cttccctaaagagaatcttaa

SEQ ID NO: 84710 - RNA, 21 nt, synthetic construct
  source 1..21: mol_type = other RNA
cttccctactcactgaaaccc

SEQ ID NO: 84711 - RNA, 21 nt, synthetic construct
  source 1..21: mol_type = other RNA
cttccctagcccagcacttcc

SEQ ID NO: 84712 - RNA, 21 nt, synthetic construct
  source 1..21: mol_type = other RNA
cttccctctcagtggtgcttt

SEQ ID NO: 84713 - RNA, 21 nt, synthetic construct
  source 1..21: mol_type = other RNA
cttccctctttctcaacttcc

SEQ ID NO: 84714 - RNA, 21 nt, synthetic construct
  source 1..21: mol_type = other RNA
cttccctgaacaatgattttc

SEQ ID NO: 84715 - RNA, 21 nt, synthetic construct
  source 1..21: mol_type = other RNA
cttcccttaacctttttcttt

SEQ ID NO: 84716 - RNA, 21 nt, synthetic construct
  source 1..21: mol_type = other RNA
cttcccttagctctcatgtca

SEQ ID NO: 84717 - RNA, 21 nt, synthetic construct
  source 1..21: mol_type = other RNA
cttcccttctcgaagtggtgc

SEQ ID NO: 84718 - RNA, 21 nt, synthetic construct
  source 1..21: mol_type = other RNA
cttcccttgtgcacctcgggt

SEQ ID NO: 84719 - RNA, 21 nt, synthetic construct
  source 1..21: mol_type = other RNA
cttccgacctgtagattgggc

SEQ ID NO: 84720 - RNA, 21 nt, synthetic construct
  source 1..21: mol_type = other RNA
cttccgggacttggaagtgaa

SEQ ID NO: 84721 - RNA, 21 nt, synthetic construct
  source 1..21: mol_type = other RNA
cttccgtctcaagattgtgtg

SEQ ID NO: 84722 - RNA, 21 nt, synthetic construct
  source 1..21: mol_type = other RNA
cttcctaaacctgctacgaat

SEQ ID NO: 84723 - RNA, 21 nt, synthetic construct
  source 1..21: mol_type = other RNA
cttcctaaagagagtgacagc

SEQ ID NO: 84724 - RNA, 21 nt, synthetic construct
  source 1..21: mol_type = other RNA
cttcctaactggtctcctttc

SEQ ID NO: 84725 - RNA, 21 nt, synthetic construct
  source 1..21: mol_type = other RNA
cttcctaagaaagggtgtgtg

SEQ ID NO: 84726 - RNA, 21 nt, synthetic construct
  source 1..21: mol_type = other RNA
cttcctacacatatctttagg

SEQ ID NO: 84727 - RNA, 21 nt, synthetic construct
  source 1..21: mol_type = other RNA
cttcctacccaagcttaggtc

SEQ ID NO: 84728 - RNA, 21 nt, synthetic construct
  source 1..21: mol_type = other RNA
cttcctaccctgccttccttg

SEQ ID NO: 84729 - RNA, 21 nt, synthetic construct
  source 1..21: mol_type = other RNA
cttcctattagaagaatgatt

SEQ ID NO: 84730 - RNA, 21 nt, synthetic construct
  source 1..21: mol_type = other RNA
cttcctattttataatgggca

SEQ ID NO: 84731 - RNA, 21 nt, synthetic construct
  source 1..21: mol_type = other RNA
cttcctcaggatctacattaa

SEQ ID NO: 84732 - RNA, 21 nt, synthetic construct
  source 1..21: mol_type = other RNA
cttcctcatccctcatatcag

SEQ ID NO: 84733 - RNA, 21 nt, synthetic construct
  source 1..21: mol_type = other RNA
cttcctcctctggacattatc

SEQ ID NO: 84734 - RNA, 21 nt, synthetic construct
  source 1..21: mol_type = other RNA
cttcctctcttaaatccgaga

SEQ ID NO: 84735 - RNA, 21 nt, synthetic construct
  source 1..21: mol_type = other RNA
cttcctctggctgacctggta

SEQ ID NO: 84736 - RNA, 21 nt, synthetic construct
  source 1..21: mol_type = other RNA
cttcctcttcctcatccctca

SEQ ID NO: 84737 - RNA, 21 nt, synthetic construct
  source 1..21: mol_type = other RNA
cttcctgacctctgcagttag

SEQ ID NO: 84738 - RNA, 21 nt, synthetic construct
  source 1..21: mol_type = other RNA
cttcctggctctagcccagct

SEQ ID NO: 84739 - RNA, 21 nt, synthetic construct
  source 1..21: mol_type = other RNA
cttcctgtatatctcctttta

SEQ ID NO: 84740 - RNA, 21 nt, synthetic construct
  source 1..21: mol_type = other RNA
cttcctgtcttggacccatgc

SEQ ID NO: 84741 - RNA, 21 nt, synthetic construct
  source 1..21: mol_type = other RNA
cttcctgttctttgttagttt

SEQ ID NO: 84742 - RNA, 21 nt, synthetic construct
  source 1..21: mol_type = other RNA
cttcctgttgctttaacctct

SEQ ID NO: 84743 - RNA, 21 nt, synthetic construct
  source 1..21: mol_type = other RNA
cttcctgttttagtggctcac

SEQ ID NO: 84744 - RNA, 21 nt, synthetic construct
  source 1..21: mol_type = other RNA
cttccttaatgtttagtagaa

SEQ ID NO: 84745 - RNA, 21 nt, synthetic construct
  source 1..21: mol_type = other RNA
cttccttatccgataaagggt

SEQ ID NO: 84746 - RNA, 21 nt, synthetic construct
  source 1..21: mol_type = other RNA
cttccttcatgtcccctgtcc

SEQ ID NO: 84747 - RNA, 21 nt, synthetic construct
  source 1..21: mol_type = other RNA
cttccttctcttatactagta

SEQ ID NO: 84748 - RNA, 21 nt, synthetic construct
  source 1..21: mol_type = other RNA
cttccttgatcagcttcctac

SEQ ID NO: 84749 - RNA, 21 nt, synthetic construct
  source 1..21: mol_type = other RNA
cttccttgctatgtaatctca

SEQ ID NO: 84750 - RNA, 21 nt, synthetic construct
  source 1..21: mol_type = other RNA
cttccttgctcaggagtaact

SEQ ID NO: 84751 - RNA, 21 nt, synthetic construct
  source 1..21: mol_type = other RNA
cttccttgcttgtcttgaata

SEQ ID NO: 84752 - RNA, 21 nt, synthetic construct
  source 1..21: mol_type = other RNA
cttccttgggcacactcccca

SEQ ID NO: 84753 - RNA, 21 nt, synthetic construct
  source 1..21: mol_type = other RNA
cttccttgtgtcttaaattca

SEQ ID NO: 84754 - RNA, 21 nt, synthetic construct
  source 1..21: mol_type = other RNA
cttcctttgatgacttacaga

SEQ ID NO: 84755 - RNA, 21 nt, synthetic construct
  source 1..21: mol_type = other RNA
cttcgaaagttcagatagaat

SEQ ID NO: 84756 - RNA, 21 nt, synthetic construct
  source 1..21: mol_type = other RNA
cttcgaactaaggaaagctca

SEQ ID NO: 84757 - RNA, 21 nt, synthetic construct
  source 1..21: mol_type = other RNA
cttcgaagcaaaacatatgtc

SEQ ID NO: 84758 - RNA, 21 nt, synthetic construct
  source 1..21: mol_type = other RNA
cttcgaagcttattaaaatga

SEQ ID NO: 84759 - RNA, 21 nt, synthetic construct
  source 1..21: mol_type = other RNA
cttcgacagtcccttgcctga

SEQ ID NO: 84760 - RNA, 21 nt, synthetic construct
  source 1..21: mol_type = other RNA
cttcgagaagggaagtaaaga

SEQ ID NO: 84761 - RNA, 21 nt, synthetic construct
  source 1..21: mol_type = other RNA
cttcgaggcatctagttacca

SEQ ID NO: 84762 - RNA, 21 nt, synthetic construct
  source 1..21: mol_type = other RNA
cttcgagggggctgagtatgg

SEQ ID NO: 84763 - RNA, 21 nt, synthetic construct
  source 1..21: mol_type = other RNA
cttcgaggtcgcaccctgagc

SEQ ID NO: 84764 - RNA, 21 nt, synthetic construct
  source 1..21: mol_type = other RNA
cttcgagttctgggagttcat

SEQ ID NO: 84765 - RNA, 21 nt, synthetic construct
  source 1..21: mol_type = other RNA
cttcgcagggtgaaacttgaa

SEQ ID NO: 84766 - RNA, 21 nt, synthetic construct
  source 1..21: mol_type = other RNA
cttcgcctttctcgcagcggg

SEQ ID NO: 84767 - RNA, 21 nt, synthetic construct
  source 1..21: mol_type = other RNA
cttcgcctttgttgccaggtg

SEQ ID NO: 84768 - RNA, 21 nt, synthetic construct
  source 1..21: mol_type = other RNA
cttcgcgcgcggcagggatgc

SEQ ID NO: 84769 - RNA, 21 nt, synthetic construct
  source 1..21: mol_type = other RNA
cttcgcgggcaccttccctac

SEQ ID NO: 84770 - RNA, 21 nt, synthetic construct
  source 1..21: mol_type = other RNA
cttcgctcttttaaaaattac

SEQ ID NO: 84771 - RNA, 21 nt, synthetic construct
  source 1..21: mol_type = other RNA
cttcgggtgtcagaattccat

SEQ ID NO: 84772 - RNA, 21 nt, synthetic construct
  source 1..21: mol_type = other RNA
cttcgtcaaggggagaggcct

SEQ ID NO: 84773 - RNA, 21 nt, synthetic construct
  source 1..21: mol_type = other RNA
cttcgtgtgtggagtggggca

SEQ ID NO: 84774 - RNA, 21 nt, synthetic construct
  source 1..21: mol_type = other RNA
cttcgttcagtttagtaaatc

SEQ ID NO: 84775 - RNA, 21 nt, synthetic construct
  source 1..21: mol_type = other RNA
cttctaaaatcatcacagtat

SEQ ID NO: 84776 - RNA, 21 nt, synthetic construct
  source 1..21: mol_type = other RNA
cttctaaccctcaaatgccat

SEQ ID NO: 84777 - RNA, 21 nt, synthetic construct
  source 1..21: mol_type = other RNA
cttctaagctaagagttttat

SEQ ID NO: 84778 - RNA, 21 nt, synthetic construct
  source 1..21: mol_type = other RNA
cttctaataggaagtggctag

SEQ ID NO: 84779 - RNA, 21 nt, synthetic construct
  source 1..21: mol_type = other RNA
cttctaatgcccattaaaacc

SEQ ID NO: 84780 - RNA, 21 nt, synthetic construct
  source 1..21: mol_type = other RNA
cttctacaatggttgaactag

SEQ ID NO: 84781 - RNA, 21 nt, synthetic construct
  source 1..21: mol_type = other RNA
cttctacagaatgttcaagta

SEQ ID NO: 84782 - RNA, 21 nt, synthetic construct
  source 1..21: mol_type = other RNA
cttctacatccccccacccct

SEQ ID NO: 84783 - RNA, 21 nt, synthetic construct
  source 1..21: mol_type = other RNA
cttctacccactattgaaagc

SEQ ID NO: 84784 - RNA, 21 nt, synthetic construct
  source 1..21: mol_type = other RNA
cttctaccttgaaaatgccct

SEQ ID NO: 84785 - RNA, 21 nt, synthetic construct
  source 1..21: mol_type = other RNA
cttctactcactgtactactg

SEQ ID NO: 84786 - RNA, 21 nt, synthetic construct
  source 1..21: mol_type = other RNA
cttctactgtgaattcactaa

SEQ ID NO: 84787 - RNA, 21 nt, synthetic construct
  source 1..21: mol_type = other RNA
cttctacttatcttttctagt

SEQ ID NO: 84788 - RNA, 21 nt, synthetic construct
  source 1..21: mol_type = other RNA
cttctagccaaagcaagcctt

SEQ ID NO: 84789 - RNA, 21 nt, synthetic construct
  source 1..21: mol_type = other RNA
cttctagcctccagaaaacca

SEQ ID NO: 84790 - RNA, 21 nt, synthetic construct
  source 1..21: mol_type = other RNA
cttctagctttcagcactgct

SEQ ID NO: 84791 - RNA, 21 nt, synthetic construct
  source 1..21: mol_type = other RNA
cttctagtaacttggtcgaaa

SEQ ID NO: 84792 - RNA, 21 nt, synthetic construct
  source 1..21: mol_type = other RNA
cttctagtcacatttgcttta

SEQ ID NO: 84793 - RNA, 21 nt, synthetic construct
  source 1..21: mol_type = other RNA
cttctatccagtgacacctga

SEQ ID NO: 84794 - RNA, 21 nt, synthetic construct
  source 1..21: mol_type = other RNA
cttctatgtgacaaacacttt

SEQ ID NO: 84795 - RNA, 21 nt, synthetic construct
  source 1..21: mol_type = other RNA
cttctattccagagaattcag

SEQ ID NO: 84796 - RNA, 21 nt, synthetic construct
  source 1..21: mol_type = other RNA
cttctattccattgttctctt

SEQ ID NO: 84797 - RNA, 21 nt, synthetic construct
  source 1..21: mol_type = other RNA
cttctcaaacaggatacaaaa

SEQ ID NO: 84798 - RNA, 21 nt, synthetic construct
  source 1..21: mol_type = other RNA
cttctcaaactgtgtgcttgg

SEQ ID NO: 84799 - RNA, 21 nt, synthetic construct
  source 1..21: mol_type = other RNA
cttctcaataaggaaagcacg

SEQ ID NO: 84800 - RNA, 21 nt, synthetic construct
  source 1..21: mol_type = other RNA
cttctcagaaggacaccagtc

SEQ ID NO: 84801 - RNA, 21 nt, synthetic construct
  source 1..21: mol_type = other RNA
cttctcagatctgttgcagtc

SEQ ID NO: 84802 - RNA, 21 nt, synthetic construct
  source 1..21: mol_type = other RNA
cttctcagctatagcttctga

SEQ ID NO: 84803 - RNA, 21 nt, synthetic construct
  source 1..21: mol_type = other RNA
cttctcagggcctgcttttgg

SEQ ID NO: 84804 - RNA, 21 nt, synthetic construct
  source 1..21: mol_type = other RNA
cttctcagttgcagcatgctc

SEQ ID NO: 84805 - RNA, 21 nt, synthetic construct
  source 1..21: mol_type = other RNA
cttctcatagtcttccaaaat

SEQ ID NO: 84806 - RNA, 21 nt, synthetic construct
  source 1..21: mol_type = other RNA
cttctccaaggaaagtgtgct

SEQ ID NO: 84807 - RNA, 21 nt, synthetic construct
  source 1..21: mol_type = other RNA
cttctccctcttcgctctttt

SEQ ID NO: 84808 - RNA, 21 nt, synthetic construct
  source 1..21: mol_type = other RNA
cttctcctccaacccattcca

SEQ ID NO: 84809 - RNA, 21 nt, synthetic construct
  source 1..21: mol_type = other RNA
cttctcgaagtggtgcttgaa

SEQ ID NO: 84810 - RNA, 21 nt, synthetic construct
  source 1..21: mol_type = other RNA
cttctcgtgtgagctctagcc

SEQ ID NO: 84811 - RNA, 21 nt, synthetic construct
  source 1..21: mol_type = other RNA
cttctctaatgtaaacagcat

SEQ ID NO: 84812 - RNA, 21 nt, synthetic construct
  source 1..21: mol_type = other RNA
cttctctactctgcctcagtt

SEQ ID NO: 84813 - RNA, 21 nt, synthetic construct
  source 1..21: mol_type = other RNA
cttctctcagagggaaactgt

SEQ ID NO: 84814 - RNA, 21 nt, synthetic construct
  source 1..21: mol_type = other RNA
cttctctcctttgaggtaaga

SEQ ID NO: 84815 - RNA, 21 nt, synthetic construct
  source 1..21: mol_type = other RNA
cttctctctctgcttcactaa

SEQ ID NO: 84816 - RNA, 21 nt, synthetic construct
  source 1..21: mol_type = other RNA
cttctctcttccaaataatcc

SEQ ID NO: 84817 - RNA, 21 nt, synthetic construct
  source 1..21: mol_type = other RNA
cttctctgctgctgaaaaaga

SEQ ID NO: 84818 - RNA, 21 nt, synthetic construct
  source 1..21: mol_type = other RNA
cttctctggagcaagcatgag

SEQ ID NO: 84819 - RNA, 21 nt, synthetic construct
  source 1..21: mol_type = other RNA
cttctcttatactagtagaaa

SEQ ID NO: 84820 - RNA, 21 nt, synthetic construct
  source 1..21: mol_type = other RNA
cttctgaagaaattatctgtg

SEQ ID NO: 84821 - RNA, 21 nt, synthetic construct
  source 1..21: mol_type = other RNA
cttctgaagaggctttctgtg

SEQ ID NO: 84822 - RNA, 21 nt, synthetic construct
  source 1..21: mol_type = other RNA
cttctgaaggcactaacaaag

SEQ ID NO: 84823 - RNA, 21 nt, synthetic construct
  source 1..21: mol_type = other RNA
cttctgaaggtgcctgccata

SEQ ID NO: 84824 - RNA, 21 nt, synthetic construct
  source 1..21: mol_type = other RNA
cttctgaattgagatgtactg

SEQ ID NO: 84825 - RNA, 21 nt, synthetic construct
  source 1..21: mol_type = other RNA
cttctgagaaggcgaaatgtg

SEQ ID NO: 84826 - RNA, 21 nt, synthetic construct
  source 1..21: mol_type = other RNA
cttctgagcagtgtttcctag

SEQ ID NO: 84827 - RNA, 21 nt, synthetic construct
  source 1..21: mol_type = other RNA
cttctgagctgttaatggtta

SEQ ID NO: 84828 - RNA, 21 nt, synthetic construct
  source 1..21: mol_type = other RNA
cttctgaggagctgagaccac

SEQ ID NO: 84829 - RNA, 21 nt, synthetic construct
  source 1..21: mol_type = other RNA
cttctgagtgttacttgaaat

SEQ ID NO: 84830 - RNA, 21 nt, synthetic construct
  source 1..21: mol_type = other RNA
cttctgataggaatatcgtct

SEQ ID NO: 84831 - RNA, 21 nt, synthetic construct
  source 1..21: mol_type = other RNA
cttctgatatcctgtaaacct

SEQ ID NO: 84832 - RNA, 21 nt, synthetic construct
  source 1..21: mol_type = other RNA
cttctgatcacagaagtgttt

SEQ ID NO: 84833 - RNA, 21 nt, synthetic construct
  source 1..21: mol_type = other RNA
cttctgcaagttgctatccag

SEQ ID NO: 84834 - RNA, 21 nt, synthetic construct
  source 1..21: mol_type = other RNA
cttctgcaggctgaactgctg

SEQ ID NO: 84835 - RNA, 21 nt, synthetic construct
  source 1..21: mol_type = other RNA
cttctgccttgacctcccaaa

SEQ ID NO: 84836 - RNA, 21 nt, synthetic construct
  source 1..21: mol_type = other RNA
cttctgctcactttgggatta

SEQ ID NO: 84837 - RNA, 21 nt, synthetic construct
  source 1..21: mol_type = other RNA
cttctgctcggctctgtcacc

SEQ ID NO: 84838 - RNA, 21 nt, synthetic construct
  source 1..21: mol_type = other RNA
cttctgctgggcccactctcc

SEQ ID NO: 84839 - RNA, 21 nt, synthetic construct
  source 1..21: mol_type = other RNA
cttctggaaagttcaaatgag

SEQ ID NO: 84840 - RNA, 21 nt, synthetic construct
  source 1..21: mol_type = other RNA
cttctggaagatttctactgg

SEQ ID NO: 84841 - RNA, 21 nt, synthetic construct
  source 1..21: mol_type = other RNA
cttctggatagcattatccct

SEQ ID NO: 84842 - RNA, 21 nt, synthetic construct
  source 1..21: mol_type = other RNA
cttctggatgtgtatgatcaa

SEQ ID NO: 84843 - RNA, 21 nt, synthetic construct
  source 1..21: mol_type = other RNA
cttctggggttcaaaccacct

SEQ ID NO: 84844 - RNA, 21 nt, synthetic construct
  source 1..21: mol_type = other RNA
cttctgtaatattaaccaaga

SEQ ID NO: 84845 - RNA, 21 nt, synthetic construct
  source 1..21: mol_type = other RNA
cttctgtgatcagaagagcac

SEQ ID NO: 84846 - RNA, 21 nt, synthetic construct
  source 1..21: mol_type = other RNA
cttctgttaatagataggtca

SEQ ID NO: 84847 - RNA, 21 nt, synthetic construct
  source 1..21: mol_type = other RNA
cttctgttggagagatggtag

SEQ ID NO: 84848 - RNA, 21 nt, synthetic construct
  source 1..21: mol_type = other RNA
cttctgtttttcttagtctag

SEQ ID NO: 84849 - RNA, 21 nt, synthetic construct
  source 1..21: mol_type = other RNA
cttcttaagacatttgggaat

SEQ ID NO: 84850 - RNA, 21 nt, synthetic construct
  source 1..21: mol_type = other RNA
cttcttagtaaatatccgaaa

SEQ ID NO: 84851 - RNA, 21 nt, synthetic construct
  source 1..21: mol_type = other RNA
cttcttagtgttcccttctta

SEQ ID NO: 84852 - RNA, 21 nt, synthetic construct
  source 1..21: mol_type = other RNA
cttcttattggttatctgtac

SEQ ID NO: 84853 - RNA, 21 nt, synthetic construct
  source 1..21: mol_type = other RNA
cttcttatttccttccagttt

SEQ ID NO: 84854 - RNA, 21 nt, synthetic construct
  source 1..21: mol_type = other RNA
cttcttatttgttactgatct

SEQ ID NO: 84855 - RNA, 21 nt, synthetic construct
  source 1..21: mol_type = other RNA
cttcttcaaaagacatcacta

SEQ ID NO: 84856 - RNA, 21 nt, synthetic construct
  source 1..21: mol_type = other RNA
cttcttcacacattaactatg

SEQ ID NO: 84857 - RNA, 21 nt, synthetic construct
  source 1..21: mol_type = other RNA
cttcttctaagctaagagttt

SEQ ID NO: 84858 - RNA, 21 nt, synthetic construct
  source 1..21: mol_type = other RNA
cttcttctgttggagagatgg

SEQ ID NO: 84859 - RNA, 21 nt, synthetic construct
  source 1..21: mol_type = other RNA
cttcttgagagtctcttaaga

SEQ ID NO: 84860 - RNA, 21 nt, synthetic construct
  source 1..21: mol_type = other RNA
cttcttggagtaaacctgcaa

SEQ ID NO: 84861 - RNA, 21 nt, synthetic construct
  source 1..21: mol_type = other RNA
cttcttggattttcttcattt

SEQ ID NO: 84862 - RNA, 21 nt, synthetic construct
  source 1..21: mol_type = other RNA
cttcttgttagaattttgctt

SEQ ID NO: 84863 - RNA, 21 nt, synthetic construct
  source 1..21: mol_type = other RNA
cttcttgttttgttctcgttc

SEQ ID NO: 84864 - RNA, 21 nt, synthetic construct
  source 1..21: mol_type = other RNA
cttctttctctttcagccatc

SEQ ID NO: 84865 - RNA, 21 nt, synthetic construct
  source 1..21: mol_type = other RNA
cttctttctttcaaatgtgac

SEQ ID NO: 84866 - RNA, 21 nt, synthetic construct
  source 1..21: mol_type = other RNA
cttctttggctcaatggttaa

SEQ ID NO: 84867 - RNA, 21 nt, synthetic construct
  source 1..21: mol_type = other RNA
cttctttgggggaagcaggaa

SEQ ID NO: 84868 - RNA, 21 nt, synthetic construct
  source 1..21: mol_type = other RNA
cttcttttacttgcttggttt

SEQ ID NO: 84869 - RNA, 21 nt, synthetic construct
  source 1..21: mol_type = other RNA
cttgaaaatgcccttatttaa

SEQ ID NO: 84870 - RNA, 21 nt, synthetic construct
  source 1..21: mol_type = other RNA
cttgaaaatttccagcatttt

SEQ ID NO: 84871 - RNA, 21 nt, synthetic construct
  source 1..21: mol_type = other RNA
cttgaaacctgccatggtgtt

SEQ ID NO: 84872 - RNA, 21 nt, synthetic construct
  source 1..21: mol_type = other RNA
cttgaaagatcatttagtaag

SEQ ID NO: 84873 - RNA, 21 nt, synthetic construct
  source 1..21: mol_type = other RNA
cttgaaaggatactgagaaca

SEQ ID NO: 84874 - RNA, 21 nt, synthetic construct
  source 1..21: mol_type = other RNA
cttgaaaggggccaggtgtgg

SEQ ID NO: 84875 - RNA, 21 nt, synthetic construct
  source 1..21: mol_type = other RNA
cttgaaatcatttcactcttt

SEQ ID NO: 84876 - RNA, 21 nt, synthetic construct
  source 1..21: mol_type = other RNA
cttgaacatgaacgagaacaa

SEQ ID NO: 84877 - RNA, 21 nt, synthetic construct
  source 1..21: mol_type = other RNA
cttgaacattctgtagaagta

SEQ ID NO: 84878 - RNA, 21 nt, synthetic construct
  source 1..21: mol_type = other RNA
cttgaacccgaggtgcacaag

SEQ ID NO: 84879 - RNA, 21 nt, synthetic construct
  source 1..21: mol_type = other RNA
cttgaacctgaaaaacggagg

SEQ ID NO: 84880 - RNA, 21 nt, synthetic construct
  source 1..21: mol_type = other RNA
cttgaaccttcctcttcctca

SEQ ID NO: 84881 - RNA, 21 nt, synthetic construct
  source 1..21: mol_type = other RNA
cttgaactaagtgtgaagatt

SEQ ID NO: 84882 - RNA, 21 nt, synthetic construct
  source 1..21: mol_type = other RNA
cttgaactgctggtctggaat

SEQ ID NO: 84883 - RNA, 21 nt, synthetic construct
  source 1..21: mol_type = other RNA
cttgaactgggacttctagcc

SEQ ID NO: 84884 - RNA, 21 nt, synthetic construct
  source 1..21: mol_type = other RNA
cttgaagaaaccaagagcata

SEQ ID NO: 84885 - RNA, 21 nt, synthetic construct
  source 1..21: mol_type = other RNA
cttgaagagcgcttctatgtg

SEQ ID NO: 84886 - RNA, 21 nt, synthetic construct
  source 1..21: mol_type = other RNA
cttgaagatggcaaacagact

SEQ ID NO: 84887 - RNA, 21 nt, synthetic construct
  source 1..21: mol_type = other RNA
cttgaaggcaatgtagggaat

SEQ ID NO: 84888 - RNA, 21 nt, synthetic construct
  source 1..21: mol_type = other RNA
cttgaagtacttcagcgcttg

SEQ ID NO: 84889 - RNA, 21 nt, synthetic construct
  source 1..21: mol_type = other RNA
cttgaagtcagttacagcatt

SEQ ID NO: 84890 - RNA, 21 nt, synthetic construct
  source 1..21: mol_type = other RNA
cttgaatactcgtgtgtctca

SEQ ID NO: 84891 - RNA, 21 nt, synthetic construct
  source 1..21: mol_type = other RNA
cttgaatagcatcttagctct

SEQ ID NO: 84892 - RNA, 21 nt, synthetic construct
  source 1..21: mol_type = other RNA
cttgaatctctctatccacca

SEQ ID NO: 84893 - RNA, 21 nt, synthetic construct
  source 1..21: mol_type = other RNA
cttgaatgtgcctacatagtc

SEQ ID NO: 84894 - RNA, 21 nt, synthetic construct
  source 1..21: mol_type = other RNA
cttgaattagtgattttacca

SEQ ID NO: 84895 - RNA, 21 nt, synthetic construct
  source 1..21: mol_type = other RNA
cttgaattcagatggccccaa

SEQ ID NO: 84896 - RNA, 21 nt, synthetic construct
  source 1..21: mol_type = other RNA
cttgacaaaaggccccttgaa

SEQ ID NO: 84897 - RNA, 21 nt, synthetic construct
  source 1..21: mol_type = other RNA
cttgacaataaatggtgcagg

SEQ ID NO: 84898 - RNA, 21 nt, synthetic construct
  source 1..21: mol_type = other RNA
cttgacacaaaggactggaac

SEQ ID NO: 84899 - RNA, 21 nt, synthetic construct
  source 1..21: mol_type = other RNA
cttgacatgattgaggacttc

SEQ ID NO: 84900 - RNA, 21 nt, synthetic construct
  source 1..21: mol_type = other RNA
cttgacattcttaccttctaa

SEQ ID NO: 84901 - RNA, 21 nt, synthetic construct
  source 1..21: mol_type = other RNA
cttgacctcagtggtagttac

SEQ ID NO: 84902 - RNA, 21 nt, synthetic construct
  source 1..21: mol_type = other RNA
cttgacctcccaaaggactgg

SEQ ID NO: 84903 - RNA, 21 nt, synthetic construct
  source 1..21: mol_type = other RNA
cttgaccttagttttcacttt

SEQ ID NO: 84904 - RNA, 21 nt, synthetic construct
  source 1..21: mol_type = other RNA
cttgaccttgtgcatgtgcag

SEQ ID NO: 84905 - RNA, 21 nt, synthetic construct
  source 1..21: mol_type = other RNA
cttgacgaagtcacattctag

SEQ ID NO: 84906 - RNA, 21 nt, synthetic construct
  source 1..21: mol_type = other RNA
cttgactattttaccctcatt

SEQ ID NO: 84907 - RNA, 21 nt, synthetic construct
  source 1..21: mol_type = other RNA
cttgacttcacttccaagtcc

SEQ ID NO: 84908 - RNA, 21 nt, synthetic construct
  source 1..21: mol_type = other RNA
cttgagacggaagactcatac

SEQ ID NO: 84909 - RNA, 21 nt, synthetic construct
  source 1..21: mol_type = other RNA
cttgagagagataaaacctgg

SEQ ID NO: 84910 - RNA, 21 nt, synthetic construct
  source 1..21: mol_type = other RNA
cttgagagcagagacacacat

SEQ ID NO: 84911 - RNA, 21 nt, synthetic construct
  source 1..21: mol_type = other RNA
cttgagagtctcttaagacca

SEQ ID NO: 84912 - RNA, 21 nt, synthetic construct
  source 1..21: mol_type = other RNA
cttgagcagatcagtaacaaa

SEQ ID NO: 84913 - RNA, 21 nt, synthetic construct
  source 1..21: mol_type = other RNA
cttgagcccagggggtcgaga

SEQ ID NO: 84914 - RNA, 21 nt, synthetic construct
  source 1..21: mol_type = other RNA
cttgagccccagaataggcaa

SEQ ID NO: 84915 - RNA, 21 nt, synthetic construct
  source 1..21: mol_type = other RNA
cttgagcctggaagttcaagg

SEQ ID NO: 84916 - RNA, 21 nt, synthetic construct
  source 1..21: mol_type = other RNA
cttgaggtgagacagaccctg

SEQ ID NO: 84917 - RNA, 21 nt, synthetic construct
  source 1..21: mol_type = other RNA
cttgaggtgattaaaggccct

SEQ ID NO: 84918 - RNA, 21 nt, synthetic construct
  source 1..21: mol_type = other RNA
cttgaggtgattcagagtgct

SEQ ID NO: 84919 - RNA, 21 nt, synthetic construct
  source 1..21: mol_type = other RNA
cttgaggtttacttggggaga

SEQ ID NO: 84920 - RNA, 21 nt, synthetic construct
  source 1..21: mol_type = other RNA
cttgagtatttttgagctttt

SEQ ID NO: 84921 - RNA, 21 nt, synthetic construct
  source 1..21: mol_type = other RNA
cttgagtctgtgctctgtatt

SEQ ID NO: 84922 - RNA, 21 nt, synthetic construct
  source 1..21: mol_type = other RNA
cttgagtgcaggagtttgaga

SEQ ID NO: 84923 - RNA, 21 nt, synthetic construct
  source 1..21: mol_type = other RNA
cttgagttaggaatttacatt

SEQ ID NO: 84924 - RNA, 21 nt, synthetic construct
  source 1..21: mol_type = other RNA
cttgagtttgttctgtcacat

SEQ ID NO: 84925 - RNA, 21 nt, synthetic construct
  source 1..21: mol_type = other RNA
cttgatcagcttcctacccaa

SEQ ID NO: 84926 - RNA, 21 nt, synthetic construct
  source 1..21: mol_type = other RNA
cttgatcagggatttggccag

SEQ ID NO: 84927 - RNA, 21 nt, synthetic construct
  source 1..21: mol_type = other RNA
cttgatccaggtgtatgatct

SEQ ID NO: 84928 - RNA, 21 nt, synthetic construct
  source 1..21: mol_type = other RNA
cttgatccattacatcaacat

SEQ ID NO: 84929 - RNA, 21 nt, synthetic construct
  source 1..21: mol_type = other RNA
cttgatctaaaatggaagact

SEQ ID NO: 84930 - RNA, 21 nt, synthetic construct
  source 1..21: mol_type = other RNA
cttgatctacatttagatttc

SEQ ID NO: 84931 - RNA, 21 nt, synthetic construct
  source 1..21: mol_type = other RNA
cttgatctttacttcccttct

SEQ ID NO: 84932 - RNA, 21 nt, synthetic construct
  source 1..21: mol_type = other RNA
cttgatgatagaataccactt

SEQ ID NO: 84933 - RNA, 21 nt, synthetic construct
  source 1..21: mol_type = other RNA
cttgatggtttggggcttttg

SEQ ID NO: 84934 - RNA, 21 nt, synthetic construct
  source 1..21: mol_type = other RNA
cttgatgtcacaagccagggt

SEQ ID NO: 84935 - RNA, 21 nt, synthetic construct
  source 1..21: mol_type = other RNA
cttgattacaagggtgacaga

SEQ ID NO: 84936 - RNA, 21 nt, synthetic construct
  source 1..21: mol_type = other RNA
cttgattactttacagttatg

SEQ ID NO: 84937 - RNA, 21 nt, synthetic construct
  source 1..21: mol_type = other RNA
cttgattagcttcctcaggat

SEQ ID NO: 84938 - RNA, 21 nt, synthetic construct
  source 1..21: mol_type = other RNA
cttgatttatggcctaagatg

SEQ ID NO: 84939 - RNA, 21 nt, synthetic construct
  source 1..21: mol_type = other RNA
cttgcaaaacaatagcccagc

SEQ ID NO: 84940 - RNA, 21 nt, synthetic construct
  source 1..21: mol_type = other RNA
cttgcaaaacggaaactttat

SEQ ID NO: 84941 - RNA, 21 nt, synthetic construct
  source 1..21: mol_type = other RNA
cttgcaagccacattagccac

SEQ ID NO: 84942 - RNA, 21 nt, synthetic construct
  source 1..21: mol_type = other RNA
cttgcaaggcccaccatgatg

SEQ ID NO: 84943 - RNA, 21 nt, synthetic construct
  source 1..21: mol_type = other RNA
cttgcacattagaatcatccg

SEQ ID NO: 84944 - RNA, 21 nt, synthetic construct
  source 1..21: mol_type = other RNA
cttgcaccaactccacattgt

SEQ ID NO: 84945 - RNA, 21 nt, synthetic construct
  source 1..21: mol_type = other RNA
cttgcagaagagtgaagctgg

SEQ ID NO: 84946 - RNA, 21 nt, synthetic construct
  source 1..21: mol_type = other RNA
cttgcagacaataattcttcc

SEQ ID NO: 84947 - RNA, 21 nt, synthetic construct
  source 1..21: mol_type = other RNA
cttgcagccttccctgaacaa

SEQ ID NO: 84948 - RNA, 21 nt, synthetic construct
  source 1..21: mol_type = other RNA
cttgcataactcgtaatgcga

SEQ ID NO: 84949 - RNA, 21 nt, synthetic construct
  source 1..21: mol_type = other RNA
cttgcattagagccccaagaa

SEQ ID NO: 84950 - RNA, 21 nt, synthetic construct
  source 1..21: mol_type = other RNA
cttgccaacagttactttcct

SEQ ID NO: 84951 - RNA, 21 nt, synthetic construct
  source 1..21: mol_type = other RNA
cttgccaaggcttgctttggc

SEQ ID NO: 84952 - RNA, 21 nt, synthetic construct
  source 1..21: mol_type = other RNA
cttgccatcttgcataagttt

SEQ ID NO: 84953 - RNA, 21 nt, synthetic construct
  source 1..21: mol_type = other RNA
cttgccattctcccagttgtc

SEQ ID NO: 84954 - RNA, 21 nt, synthetic construct
  source 1..21: mol_type = other RNA
cttgcccaagctggtcctgaa

SEQ ID NO: 84955 - RNA, 21 nt, synthetic construct
  source 1..21: mol_type = other RNA
cttgcctaggctggagtgcaa

SEQ ID NO: 84956 - RNA, 21 nt, synthetic construct
  source 1..21: mol_type = other RNA
cttgcctgacagcaaataaac

SEQ ID NO: 84957 - RNA, 21 nt, synthetic construct
  source 1..21: mol_type = other RNA
cttgcggtcttttagccaaca

SEQ ID NO: 84958 - RNA, 21 nt, synthetic construct
  source 1..21: mol_type = other RNA
cttgctaaacatgtatactaa

SEQ ID NO: 84959 - RNA, 21 nt, synthetic construct
  source 1..21: mol_type = other RNA
cttgctagtagcagaatcccc

SEQ ID NO: 84960 - RNA, 21 nt, synthetic construct
  source 1..21: mol_type = other RNA
cttgctatgtaatctcatgga

SEQ ID NO: 84961 - RNA, 21 nt, synthetic construct
  source 1..21: mol_type = other RNA
cttgctcaggagtaactgctc

SEQ ID NO: 84962 - RNA, 21 nt, synthetic construct
  source 1..21: mol_type = other RNA
cttgctcattcatctgcagtg

SEQ ID NO: 84963 - RNA, 21 nt, synthetic construct
  source 1..21: mol_type = other RNA
cttgctccagagaagttttcc

SEQ ID NO: 84964 - RNA, 21 nt, synthetic construct
  source 1..21: mol_type = other RNA
cttgctctacaaaccttctta

SEQ ID NO: 84965 - RNA, 21 nt, synthetic construct
  source 1..21: mol_type = other RNA
cttgctctcttgcccaagctg

SEQ ID NO: 84966 - RNA, 21 nt, synthetic construct
  source 1..21: mol_type = other RNA
cttgctctgcggcaggcattg

SEQ ID NO: 84967 - RNA, 21 nt, synthetic construct
  source 1..21: mol_type = other RNA
cttgctctgtcacccacgtgg

SEQ ID NO: 84968 - RNA, 21 nt, synthetic construct
  source 1..21: mol_type = other RNA
cttgctgaagaataactgtcc

SEQ ID NO: 84969 - RNA, 21 nt, synthetic construct
  source 1..21: mol_type = other RNA
cttgctgcactggctattagt

SEQ ID NO: 84970 - RNA, 21 nt, synthetic construct
  source 1..21: mol_type = other RNA
cttgctgcttctacccactat

SEQ ID NO: 84971 - RNA, 21 nt, synthetic construct
  source 1..21: mol_type = other RNA
cttgctggaagttggcccaac

SEQ ID NO: 84972 - RNA, 21 nt, synthetic construct
  source 1..21: mol_type = other RNA
cttgctgttgtaatgttactt

SEQ ID NO: 84973 - RNA, 21 nt, synthetic construct
  source 1..21: mol_type = other RNA
cttgcttaggctgaagcaggc

SEQ ID NO: 84974 - RNA, 21 nt, synthetic construct
  source 1..21: mol_type = other RNA
cttgcttgggaacagcagggg

SEQ ID NO: 84975 - RNA, 21 nt, synthetic construct
  source 1..21: mol_type = other RNA
cttgcttggtttcacacgcat

SEQ ID NO: 84976 - RNA, 21 nt, synthetic construct
  source 1..21: mol_type = other RNA
cttgcttgtcttgaatagcat

SEQ ID NO: 84977 - RNA, 21 nt, synthetic construct
  source 1..21: mol_type = other RNA
cttgctttattacttcagttt

SEQ ID NO: 84978 - RNA, 21 nt, synthetic construct
  source 1..21: mol_type = other RNA
cttgctttgaatttggaaagg

SEQ ID NO: 84979 - RNA, 21 nt, synthetic construct
  source 1..21: mol_type = other RNA
cttgctttgctgccccagcta

SEQ ID NO: 84980 - RNA, 21 nt, synthetic construct
  source 1..21: mol_type = other RNA
cttgctttggctagaagcatc

SEQ ID NO: 84981 - RNA, 21 nt, synthetic construct
  source 1..21: mol_type = other RNA
cttggaaaacaaattgcatca

SEQ ID NO: 84982 - RNA, 21 nt, synthetic construct
  source 1..21: mol_type = other RNA
cttggaaatgatacctcattt

SEQ ID NO: 84983 - RNA, 21 nt, synthetic construct
  source 1..21: mol_type = other RNA
cttggaaattagaaatgtgga

SEQ ID NO: 84984 - RNA, 21 nt, synthetic construct
  source 1..21: mol_type = other RNA
cttggaagtgaagtcaagatg

SEQ ID NO: 84985 - RNA, 21 nt, synthetic construct
  source 1..21: mol_type = other RNA
cttggaatgtgcacctccagt

SEQ ID NO: 84986 - RNA, 21 nt, synthetic construct
  source 1..21: mol_type = other RNA
cttggacaggggacatgaagg

SEQ ID NO: 84987 - RNA, 21 nt, synthetic construct
  source 1..21: mol_type = other RNA
cttggacccatgcccatgtgc

SEQ ID NO: 84988 - RNA, 21 nt, synthetic construct
  source 1..21: mol_type = other RNA
cttggagaacttaaaggtttg

SEQ ID NO: 84989 - RNA, 21 nt, synthetic construct
  source 1..21: mol_type = other RNA
cttggagaagagttctgaagg

SEQ ID NO: 84990 - RNA, 21 nt, synthetic construct
  source 1..21: mol_type = other RNA
cttggagagaaaccttggtgt

SEQ ID NO: 84991 - RNA, 21 nt, synthetic construct
  source 1..21: mol_type = other RNA
cttggaggagccctgctgtgg

SEQ ID NO: 84992 - RNA, 21 nt, synthetic construct
  source 1..21: mol_type = other RNA
cttggagtaaacctgcaattt

SEQ ID NO: 84993 - RNA, 21 nt, synthetic construct
  source 1..21: mol_type = other RNA
cttggagtcacttgacaaaaa

SEQ ID NO: 84994 - RNA, 21 nt, synthetic construct
  source 1..21: mol_type = other RNA
cttggagttttccccctacac

SEQ ID NO: 84995 - RNA, 21 nt, synthetic construct
  source 1..21: mol_type = other RNA
cttggatattctacagaaaac

SEQ ID NO: 84996 - RNA, 21 nt, synthetic construct
  source 1..21: mol_type = other RNA
cttggatcttatctgctgtcg

SEQ ID NO: 84997 - RNA, 21 nt, synthetic construct
  source 1..21: mol_type = other RNA
cttggattgctaaactgttcc

SEQ ID NO: 84998 - RNA, 21 nt, synthetic construct
  source 1..21: mol_type = other RNA
cttggattgtgtgtcgagaaa

SEQ ID NO: 84999 - RNA, 21 nt, synthetic construct
  source 1..21: mol_type = other RNA
cttggcaaggggaatggtact

SEQ ID NO: 85000 - RNA, 21 nt, synthetic construct
  source 1..21: mol_type = other RNA
cttggcacagaattattgatt

SEQ ID NO: 85001 - RNA, 21 nt, synthetic construct
  source 1..21: mol_type = other RNA
cttggcacaggagagcgacag

SEQ ID NO: 85002 - RNA, 21 nt, synthetic construct
  source 1..21: mol_type = other RNA
cttggccaacatggcgaaacg

SEQ ID NO: 85003 - RNA, 21 nt, synthetic construct
  source 1..21: mol_type = other RNA
cttggccattttcttttaaat

SEQ ID NO: 85004 - RNA, 21 nt, synthetic construct
  source 1..21: mol_type = other RNA
cttggccgaatgtggtggtat

SEQ ID NO: 85005 - RNA, 21 nt, synthetic construct
  source 1..21: mol_type = other RNA
cttggcctccccaagtgctgt

SEQ ID NO: 85006 - RNA, 21 nt, synthetic construct
  source 1..21: mol_type = other RNA
cttggccttctgaggagctga

SEQ ID NO: 85007 - RNA, 21 nt, synthetic construct
  source 1..21: mol_type = other RNA
cttggcgcagtgcttagcgct

SEQ ID NO: 85008 - RNA, 21 nt, synthetic construct
  source 1..21: mol_type = other RNA
cttggctagactaagaaaaac

SEQ ID NO: 85009 - RNA, 21 nt, synthetic construct
  source 1..21: mol_type = other RNA
cttggctattgtcagtaattc

SEQ ID NO: 85010 - RNA, 21 nt, synthetic construct
  source 1..21: mol_type = other RNA
cttggctcctcccggctaaga

SEQ ID NO: 85011 - RNA, 21 nt, synthetic construct
  source 1..21: mol_type = other RNA
cttggcttttggcagcgtaac

SEQ ID NO: 85012 - RNA, 21 nt, synthetic construct
  source 1..21: mol_type = other RNA
cttgggaacagcaggggaagg

SEQ ID NO: 85013 - RNA, 21 nt, synthetic construct
  source 1..21: mol_type = other RNA
cttgggaatactttcccatct

SEQ ID NO: 85014 - RNA, 21 nt, synthetic construct
  source 1..21: mol_type = other RNA
cttgggagaaaatttttacag

SEQ ID NO: 85015 - RNA, 21 nt, synthetic construct
  source 1..21: mol_type = other RNA
cttgggatgcagcaaaagcac

SEQ ID NO: 85016 - RNA, 21 nt, synthetic construct
  source 1..21: mol_type = other RNA
cttgggatgtttctacctttg

SEQ ID NO: 85017 - RNA, 21 nt, synthetic construct
  source 1..21: mol_type = other RNA
cttgggcaagagagcaagtcc

SEQ ID NO: 85018 - RNA, 21 nt, synthetic construct
  source 1..21: mol_type = other RNA
cttgggcacactccccagtgg

SEQ ID NO: 85019 - RNA, 21 nt, synthetic construct
  source 1..21: mol_type = other RNA
cttgggctaaggtggagtggt

SEQ ID NO: 85020 - RNA, 21 nt, synthetic construct
  source 1..21: mol_type = other RNA
cttgggctcccttccagcgtg

SEQ ID NO: 85021 - RNA, 21 nt, synthetic construct
  source 1..21: mol_type = other RNA
cttggggaacagtttagcaat

SEQ ID NO: 85022 - RNA, 21 nt, synthetic construct
  source 1..21: mol_type = other RNA
cttggggagagtgggcccagc

SEQ ID NO: 85023 - RNA, 21 nt, synthetic construct
  source 1..21: mol_type = other RNA
cttggggaggccaaggcagga

SEQ ID NO: 85024 - RNA, 21 nt, synthetic construct
  source 1..21: mol_type = other RNA
cttggggctctaatgcaagag

SEQ ID NO: 85025 - RNA, 21 nt, synthetic construct
  source 1..21: mol_type = other RNA
cttgggtaggaagctgatcaa

SEQ ID NO: 85026 - RNA, 21 nt, synthetic construct
  source 1..21: mol_type = other RNA
cttgggtataaatgatgagct

SEQ ID NO: 85027 - RNA, 21 nt, synthetic construct
  source 1..21: mol_type = other RNA
cttgggtgaataacccatatc

SEQ ID NO: 85028 - RNA, 21 nt, synthetic construct
  source 1..21: mol_type = other RNA
cttgggtgacctcatgtaact

SEQ ID NO: 85029 - RNA, 21 nt, synthetic construct
  source 1..21: mol_type = other RNA
cttgggtggaagctgtccttc

SEQ ID NO: 85030 - RNA, 21 nt, synthetic construct
  source 1..21: mol_type = other RNA
cttggtaaaaagtgcttctag

SEQ ID NO: 85031 - RNA, 21 nt, synthetic construct
  source 1..21: mol_type = other RNA
cttggtaaaatcactaattca

SEQ ID NO: 85032 - RNA, 21 nt, synthetic construct
  source 1..21: mol_type = other RNA
cttggtaaacagcagtcttaa

SEQ ID NO: 85033 - RNA, 21 nt, synthetic construct
  source 1..21: mol_type = other RNA
cttggtaagagtgagaccctg

SEQ ID NO: 85034 - RNA, 21 nt, synthetic construct
  source 1..21: mol_type = other RNA
cttggtaagctgtgagtcctt

SEQ ID NO: 85035 - RNA, 21 nt, synthetic construct
  source 1..21: mol_type = other RNA
cttggtagtttgcacgttttt

SEQ ID NO: 85036 - RNA, 21 nt, synthetic construct
  source 1..21: mol_type = other RNA
cttggtatgcatcttgaacta

SEQ ID NO: 85037 - RNA, 21 nt, synthetic construct
  source 1..21: mol_type = other RNA
cttggtcgaaaacctgaaatg

SEQ ID NO: 85038 - RNA, 21 nt, synthetic construct
  source 1..21: mol_type = other RNA
cttggtctgcagactcttgtc

SEQ ID NO: 85039 - RNA, 21 nt, synthetic construct
  source 1..21: mol_type = other RNA
cttggtctgggtgatatctgt

SEQ ID NO: 85040 - RNA, 21 nt, synthetic construct
  source 1..21: mol_type = other RNA
cttggtctttctcccaggtca

SEQ ID NO: 85041 - RNA, 21 nt, synthetic construct
  source 1..21: mol_type = other RNA
cttggtggcccacacctgcaa

SEQ ID NO: 85042 - RNA, 21 nt, synthetic construct
  source 1..21: mol_type = other RNA
cttggtggtaactgatgtgag

SEQ ID NO: 85043 - RNA, 21 nt, synthetic construct
  source 1..21: mol_type = other RNA
cttggtgtgctcttttcatca

SEQ ID NO: 85044 - RNA, 21 nt, synthetic construct
  source 1..21: mol_type = other RNA
cttggtgtgcttctgatagga

SEQ ID NO: 85045 - RNA, 21 nt, synthetic construct
  source 1..21: mol_type = other RNA
cttggtgttgactgaattaat

SEQ ID NO: 85046 - RNA, 21 nt, synthetic construct
  source 1..21: mol_type = other RNA
cttggttaatattacagaaga

SEQ ID NO: 85047 - RNA, 21 nt, synthetic construct
  source 1..21: mol_type = other RNA
cttggttggaaaagaaagctg

SEQ ID NO: 85048 - RNA, 21 nt, synthetic construct
  source 1..21: mol_type = other RNA
cttggtttattttctgcattt

SEQ ID NO: 85049 - RNA, 21 nt, synthetic construct
  source 1..21: mol_type = other RNA
cttggtttcacacgcattgca

SEQ ID NO: 85050 - RNA, 21 nt, synthetic construct
  source 1..21: mol_type = other RNA
cttggtttcttcaagatactg

SEQ ID NO: 85051 - RNA, 21 nt, synthetic construct
  source 1..21: mol_type = other RNA
cttgtaatcaagtatctccct

SEQ ID NO: 85052 - RNA, 21 nt, synthetic construct
  source 1..21: mol_type = other RNA
cttgtactcccagcctcaaac

SEQ ID NO: 85053 - RNA, 21 nt, synthetic construct
  source 1..21: mol_type = other RNA
cttgtactgtgtggcttctca

SEQ ID NO: 85054 - RNA, 21 nt, synthetic construct
  source 1..21: mol_type = other RNA
cttgtagaggaggagggttag

SEQ ID NO: 85055 - RNA, 21 nt, synthetic construct
  source 1..21: mol_type = other RNA
cttgtagtatttttgcaactt

SEQ ID NO: 85056 - RNA, 21 nt, synthetic construct
  source 1..21: mol_type = other RNA
cttgtatccagtaatcttgct

SEQ ID NO: 85057 - RNA, 21 nt, synthetic construct
  source 1..21: mol_type = other RNA
cttgtatgaaattagttcctt

SEQ ID NO: 85058 - RNA, 21 nt, synthetic construct
  source 1..21: mol_type = other RNA
cttgtatggagactagtacac

SEQ ID NO: 85059 - RNA, 21 nt, synthetic construct
  source 1..21: mol_type = other RNA
cttgtcaagttctgatttcaa

SEQ ID NO: 85060 - RNA, 21 nt, synthetic construct
  source 1..21: mol_type = other RNA
cttgtcaataatttggatgaa

SEQ ID NO: 85061 - RNA, 21 nt, synthetic construct
  source 1..21: mol_type = other RNA
cttgtcacaaaatgtggatgc

SEQ ID NO: 85062 - RNA, 21 nt, synthetic construct
  source 1..21: mol_type = other RNA
cttgtcaggtgggcactggga

SEQ ID NO: 85063 - RNA, 21 nt, synthetic construct
  source 1..21: mol_type = other RNA
cttgtcataacagtattgtct

SEQ ID NO: 85064 - RNA, 21 nt, synthetic construct
  source 1..21: mol_type = other RNA
cttgtcatgaatgaatgttga

SEQ ID NO: 85065 - RNA, 21 nt, synthetic construct
  source 1..21: mol_type = other RNA
cttgtcatttctgcttagtct

SEQ ID NO: 85066 - RNA, 21 nt, synthetic construct
  source 1..21: mol_type = other RNA
cttgtcccatggtcaaatcaa

SEQ ID NO: 85067 - RNA, 21 nt, synthetic construct
  source 1..21: mol_type = other RNA
cttgtcccggcatgcctctcc

SEQ ID NO: 85068 - RNA, 21 nt, synthetic construct
  source 1..21: mol_type = other RNA
cttgtcctaaaattccttcct

SEQ ID NO: 85069 - RNA, 21 nt, synthetic construct
  source 1..21: mol_type = other RNA
cttgtctcaacctttgcctcc

SEQ ID NO: 85070 - RNA, 21 nt, synthetic construct
  source 1..21: mol_type = other RNA
cttgtctcggatttaagagag

SEQ ID NO: 85071 - RNA, 21 nt, synthetic construct
  source 1..21: mol_type = other RNA
cttgtcttgaatagcatctta

SEQ ID NO: 85072 - RNA, 21 nt, synthetic construct
  source 1..21: mol_type = other RNA
cttgtctttgtctattcccta

SEQ ID NO: 85073 - RNA, 21 nt, synthetic construct
  source 1..21: mol_type = other RNA
cttgtctttttgtgacttgtt

SEQ ID NO: 85074 - RNA, 21 nt, synthetic construct
  source 1..21: mol_type = other RNA
cttgtgaattgataaaagtca

SEQ ID NO: 85075 - RNA, 21 nt, synthetic construct
  source 1..21: mol_type = other RNA
cttgtgacatcaagggtggtg

SEQ ID NO: 85076 - RNA, 21 nt, synthetic construct
  source 1..21: mol_type = other RNA
cttgtgatctatgcatactgc

SEQ ID NO: 85077 - RNA, 21 nt, synthetic construct
  source 1..21: mol_type = other RNA
cttgtgcacctcgggttcaag

SEQ ID NO: 85078 - RNA, 21 nt, synthetic construct
  source 1..21: mol_type = other RNA
cttgtgcatcagaattccatt

SEQ ID NO: 85079 - RNA, 21 nt, synthetic construct
  source 1..21: mol_type = other RNA
cttgtgcatcctttatacctt

SEQ ID NO: 85080 - RNA, 21 nt, synthetic construct
  source 1..21: mol_type = other RNA
cttgtgcatgtgcaggaaact

SEQ ID NO: 85081 - RNA, 21 nt, synthetic construct
  source 1..21: mol_type = other RNA
cttgtgcttttaatactttca

SEQ ID NO: 85082 - RNA, 21 nt, synthetic construct
  source 1..21: mol_type = other RNA
cttgtggctacaccctgggaa

SEQ ID NO: 85083 - RNA, 21 nt, synthetic construct
  source 1..21: mol_type = other RNA
cttgtggctgacatgtgtaaa

SEQ ID NO: 85084 - RNA, 21 nt, synthetic construct
  source 1..21: mol_type = other RNA
cttgtgggtattttgttgttg

SEQ ID NO: 85085 - RNA, 21 nt, synthetic construct
  source 1..21: mol_type = other RNA
cttgtggtcttaagagactct

SEQ ID NO: 85086 - RNA, 21 nt, synthetic construct
  source 1..21: mol_type = other RNA
cttgtgtaactaccactgagg

SEQ ID NO: 85087 - RNA, 21 nt, synthetic construct
  source 1..21: mol_type = other RNA
cttgtgtagcgggaaaaaata

SEQ ID NO: 85088 - RNA, 21 nt, synthetic construct
  source 1..21: mol_type = other RNA
cttgtgtatcttttgttagat

SEQ ID NO: 85089 - RNA, 21 nt, synthetic construct
  source 1..21: mol_type = other RNA
cttgtgtcttaaattcaaagt

SEQ ID NO: 85090 - RNA, 21 nt, synthetic construct
  source 1..21: mol_type = other RNA
cttgtgttttatttggctgtt

SEQ ID NO: 85091 - RNA, 21 nt, synthetic construct
  source 1..21: mol_type = other RNA
cttgttaagcattttccggtt

SEQ ID NO: 85092 - RNA, 21 nt, synthetic construct
  source 1..21: mol_type = other RNA
cttgttagaattttgcttttg

SEQ ID NO: 85093 - RNA, 21 nt, synthetic construct
  source 1..21: mol_type = other RNA
cttgttagtaggaaaaccatg

SEQ ID NO: 85094 - RNA, 21 nt, synthetic construct
  source 1..21: mol_type = other RNA
cttgttataagcaaagatatg

SEQ ID NO: 85095 - RNA, 21 nt, synthetic construct
  source 1..21: mol_type = other RNA
cttgttcatgtttacagaaat

SEQ ID NO: 85096 - RNA, 21 nt, synthetic construct
  source 1..21: mol_type = other RNA
cttgttgaggatgactgtcct

SEQ ID NO: 85097 - RNA, 21 nt, synthetic construct
  source 1..21: mol_type = other RNA
cttgttggacagctgggagaa

SEQ ID NO: 85098 - RNA, 21 nt, synthetic construct
  source 1..21: mol_type = other RNA
cttgtttacccagtgtgtttg

SEQ ID NO: 85099 - RNA, 21 nt, synthetic construct
  source 1..21: mol_type = other RNA
cttgtttcttttcactctaat

SEQ ID NO: 85100 - RNA, 21 nt, synthetic construct
  source 1..21: mol_type = other RNA
cttgttttcttgagatggagt

SEQ ID NO: 85101 - RNA, 21 nt, synthetic construct
  source 1..21: mol_type = other RNA
cttgttttgttctcgttcatg

SEQ ID NO: 85102 - RNA, 21 nt, synthetic construct
  source 1..21: mol_type = other RNA
ctttaaaacactggcaaaaat

SEQ ID NO: 85103 - RNA, 21 nt, synthetic construct
  source 1..21: mol_type = other RNA
ctttaaaaccagagcggaatt

SEQ ID NO: 85104 - RNA, 21 nt, synthetic construct
  source 1..21: mol_type = other RNA
ctttaaaactgctgagtcttc

SEQ ID NO: 85105 - RNA, 21 nt, synthetic construct
  source 1..21: mol_type = other RNA
ctttaaaagaaagctctcaat

SEQ ID NO: 85106 - RNA, 21 nt, synthetic construct
  source 1..21: mol_type = other RNA
ctttaaactggatgaatacaa

SEQ ID NO: 85107 - RNA, 21 nt, synthetic construct
  source 1..21: mol_type = other RNA
ctttaaagctctatggcattt

SEQ ID NO: 85108 - RNA, 21 nt, synthetic construct
  source 1..21: mol_type = other RNA
ctttaaagctgaactcctttc

SEQ ID NO: 85109 - RNA, 21 nt, synthetic construct
  source 1..21: mol_type = other RNA
ctttaaatcagggcctttaat

SEQ ID NO: 85110 - RNA, 21 nt, synthetic construct
  source 1..21: mol_type = other RNA
ctttaaattttgagacctcag

SEQ ID NO: 85111 - RNA, 21 nt, synthetic construct
  source 1..21: mol_type = other RNA
ctttaacctctggtattttaa

SEQ ID NO: 85112 - RNA, 21 nt, synthetic construct
  source 1..21: mol_type = other RNA
ctttaacgtatctgggaaaaa

SEQ ID NO: 85113 - RNA, 21 nt, synthetic construct
  source 1..21: mol_type = other RNA
ctttaagagtatctttttcag

SEQ ID NO: 85114 - RNA, 21 nt, synthetic construct
  source 1..21: mol_type = other RNA
ctttaagcagaaagttactat

SEQ ID NO: 85115 - RNA, 21 nt, synthetic construct
  source 1..21: mol_type = other RNA
ctttaagcatcccatatggag

SEQ ID NO: 85116 - RNA, 21 nt, synthetic construct
  source 1..21: mol_type = other RNA
ctttaaggcgcagacacacca

SEQ ID NO: 85117 - RNA, 21 nt, synthetic construct
  source 1..21: mol_type = other RNA
ctttaagttctccaagttatt

SEQ ID NO: 85118 - RNA, 21 nt, synthetic construct
  source 1..21: mol_type = other RNA
ctttaatcaccaggcgcggtg

SEQ ID NO: 85119 - RNA, 21 nt, synthetic construct
  source 1..21: mol_type = other RNA
ctttaatcacctcaagtgatg

SEQ ID NO: 85120 - RNA, 21 nt, synthetic construct
  source 1..21: mol_type = other RNA
ctttaattatgagcattcccc

SEQ ID NO: 85121 - RNA, 21 nt, synthetic construct
  source 1..21: mol_type = other RNA
ctttaatttagcgttcatcca

SEQ ID NO: 85122 - RNA, 21 nt, synthetic construct
  source 1..21: mol_type = other RNA
ctttaatttgggtttgagttt

SEQ ID NO: 85123 - RNA, 21 nt, synthetic construct
  source 1..21: mol_type = other RNA
ctttacagttatgtcagtcaa

SEQ ID NO: 85124 - RNA, 21 nt, synthetic construct
  source 1..21: mol_type = other RNA
ctttacccctgagaacttcag

SEQ ID NO: 85125 - RNA, 21 nt, synthetic construct
  source 1..21: mol_type = other RNA
ctttaccctgctggaacgaat

SEQ ID NO: 85126 - RNA, 21 nt, synthetic construct
  source 1..21: mol_type = other RNA
ctttactactgcattttttgc

SEQ ID NO: 85127 - RNA, 21 nt, synthetic construct
  source 1..21: mol_type = other RNA
ctttactcagattcaccaatt

SEQ ID NO: 85128 - RNA, 21 nt, synthetic construct
  source 1..21: mol_type = other RNA
ctttactgtattaggatgtgt

SEQ ID NO: 85129 - RNA, 21 nt, synthetic construct
  source 1..21: mol_type = other RNA
ctttactgttctccagtccca

SEQ ID NO: 85130 - RNA, 21 nt, synthetic construct
  source 1..21: mol_type = other RNA
ctttacttcccttctcgaagt

SEQ ID NO: 85131 - RNA, 21 nt, synthetic construct
  source 1..21: mol_type = other RNA
ctttactttcagctcaaacag

SEQ ID NO: 85132 - RNA, 21 nt, synthetic construct
  source 1..21: mol_type = other RNA
ctttagaacatataatccaac

SEQ ID NO: 85133 - RNA, 21 nt, synthetic construct
  source 1..21: mol_type = other RNA
ctttagacatgggctaaataa

SEQ ID NO: 85134 - RNA, 21 nt, synthetic construct
  source 1..21: mol_type = other RNA
ctttagagtcagttgtttact

SEQ ID NO: 85135 - RNA, 21 nt, synthetic construct
  source 1..21: mol_type = other RNA
ctttagatttatcaatagcag

SEQ ID NO: 85136 - RNA, 21 nt, synthetic construct
  source 1..21: mol_type = other RNA
ctttaggaagcttccttgatc

SEQ ID NO: 85137 - RNA, 21 nt, synthetic construct
  source 1..21: mol_type = other RNA
ctttaggctgttcaatttaga

SEQ ID NO: 85138 - RNA, 21 nt, synthetic construct
  source 1..21: mol_type = other RNA
ctttagggaagatagtactga

SEQ ID NO: 85139 - RNA, 21 nt, synthetic construct
  source 1..21: mol_type = other RNA
ctttaggtcagaatacaaaaa

SEQ ID NO: 85140 - RNA, 21 nt, synthetic construct
  source 1..21: mol_type = other RNA
ctttaggtgttttttccttct

SEQ ID NO: 85141 - RNA, 21 nt, synthetic construct
  source 1..21: mol_type = other RNA
ctttaggttacgtactaggta

SEQ ID NO: 85142 - RNA, 21 nt, synthetic construct
  source 1..21: mol_type = other RNA
ctttagtgttctgtgtttatg

SEQ ID NO: 85143 - RNA, 21 nt, synthetic construct
  source 1..21: mol_type = other RNA
ctttagtgttgcttggtgttg

SEQ ID NO: 85144 - RNA, 21 nt, synthetic construct
  source 1..21: mol_type = other RNA
ctttatacctgttgaatagca

SEQ ID NO: 85145 - RNA, 21 nt, synthetic construct
  source 1..21: mol_type = other RNA
ctttatcggataaggaagagt

SEQ ID NO: 85146 - RNA, 21 nt, synthetic construct
  source 1..21: mol_type = other RNA
ctttatctccacatttctaca

SEQ ID NO: 85147 - RNA, 21 nt, synthetic construct
  source 1..21: mol_type = other RNA
ctttatctttggatatcccca

SEQ ID NO: 85148 - RNA, 21 nt, synthetic construct
  source 1..21: mol_type = other RNA
ctttatgagacacacgagtat

SEQ ID NO: 85149 - RNA, 21 nt, synthetic construct
  source 1..21: mol_type = other RNA
ctttatgccaatatcacactg

SEQ ID NO: 85150 - RNA, 21 nt, synthetic construct
  source 1..21: mol_type = other RNA
ctttatggtaattggttcgtt

SEQ ID NO: 85151 - RNA, 21 nt, synthetic construct
  source 1..21: mol_type = other RNA
ctttatggtatcactttttgt

SEQ ID NO: 85152 - RNA, 21 nt, synthetic construct
  source 1..21: mol_type = other RNA
ctttatgtggaaaaatatagg

SEQ ID NO: 85153 - RNA, 21 nt, synthetic construct
  source 1..21: mol_type = other RNA
ctttattttttcttcccatct

SEQ ID NO: 85154 - RNA, 21 nt, synthetic construct
  source 1..21: mol_type = other RNA
ctttcaaagagacctgattct

SEQ ID NO: 85155 - RNA, 21 nt, synthetic construct
  source 1..21: mol_type = other RNA
ctttcaaatgtgacagaacaa

SEQ ID NO: 85156 - RNA, 21 nt, synthetic construct
  source 1..21: mol_type = other RNA
ctttcaacctaacatgtcttg

SEQ ID NO: 85157 - RNA, 21 nt, synthetic construct
  source 1..21: mol_type = other RNA
ctttcaaggggccttttgtca

SEQ ID NO: 85158 - RNA, 21 nt, synthetic construct
  source 1..21: mol_type = other RNA
ctttcaaggtatctccccaaa

SEQ ID NO: 85159 - RNA, 21 nt, synthetic construct
  source 1..21: mol_type = other RNA
ctttcaatagtgggtagaagc

SEQ ID NO: 85160 - RNA, 21 nt, synthetic construct
  source 1..21: mol_type = other RNA
ctttcacactgattttctgct

SEQ ID NO: 85161 - RNA, 21 nt, synthetic construct
  source 1..21: mol_type = other RNA
ctttcacataaggtatatttc

SEQ ID NO: 85162 - RNA, 21 nt, synthetic construct
  source 1..21: mol_type = other RNA
ctttcactgctcagtccctca

SEQ ID NO: 85163 - RNA, 21 nt, synthetic construct
  source 1..21: mol_type = other RNA
ctttcactttgatcatacaca

SEQ ID NO: 85164 - RNA, 21 nt, synthetic construct
  source 1..21: mol_type = other RNA
ctttcagacttaactatagga

SEQ ID NO: 85165 - RNA, 21 nt, synthetic construct
  source 1..21: mol_type = other RNA
ctttcagcactgctattgata

SEQ ID NO: 85166 - RNA, 21 nt, synthetic construct
  source 1..21: mol_type = other RNA
ctttcagcatagcagaacctt

SEQ ID NO: 85167 - RNA, 21 nt, synthetic construct
  source 1..21: mol_type = other RNA
ctttcagccatcccagctaca

SEQ ID NO: 85168 - RNA, 21 nt, synthetic construct
  source 1..21: mol_type = other RNA
ctttcagctcaaacagcttga

SEQ ID NO: 85169 - RNA, 21 nt, synthetic construct
  source 1..21: mol_type = other RNA
ctttcagtatgtgtctctgac

SEQ ID NO: 85170 - RNA, 21 nt, synthetic construct
  source 1..21: mol_type = other RNA
ctttcagtcggttcttcaccg

SEQ ID NO: 85171 - RNA, 21 nt, synthetic construct
  source 1..21: mol_type = other RNA
ctttcagttctttcggatatt

SEQ ID NO: 85172 - RNA, 21 nt, synthetic construct
  source 1..21: mol_type = other RNA
ctttcatatctgattttgtgt

SEQ ID NO: 85173 - RNA, 21 nt, synthetic construct
  source 1..21: mol_type = other RNA
ctttcatgatttggtgtgtgc

SEQ ID NO: 85174 - RNA, 21 nt, synthetic construct
  source 1..21: mol_type = other RNA
ctttcattattaccaggtttt

SEQ ID NO: 85175 - RNA, 21 nt, synthetic construct
  source 1..21: mol_type = other RNA
ctttcatttggcctctgcggc

SEQ ID NO: 85176 - RNA, 21 nt, synthetic construct
  source 1..21: mol_type = other RNA
ctttcatttgtaattcatcct

SEQ ID NO: 85177 - RNA, 21 nt, synthetic construct
  source 1..21: mol_type = other RNA
ctttccaaattcaaagcaagt

SEQ ID NO: 85178 - RNA, 21 nt, synthetic construct
  source 1..21: mol_type = other RNA
ctttccactctctggctgcaa

SEQ ID NO: 85179 - RNA, 21 nt, synthetic construct
  source 1..21: mol_type = other RNA
ctttccagaagtaactcttga

SEQ ID NO: 85180 - RNA, 21 nt, synthetic construct
  source 1..21: mol_type = other RNA
ctttccagaggttcttttaaa

SEQ ID NO: 85181 - RNA, 21 nt, synthetic construct
  source 1..21: mol_type = other RNA
ctttccatcttaggccataaa

SEQ ID NO: 85182 - RNA, 21 nt, synthetic construct
  source 1..21: mol_type = other RNA
ctttccattcaatccttgtaa

SEQ ID NO: 85183 - RNA, 21 nt, synthetic construct
  source 1..21: mol_type = other RNA
ctttcccagggtgtagccaca

SEQ ID NO: 85184 - RNA, 21 nt, synthetic construct
  source 1..21: mol_type = other RNA
ctttcccatctctagttttcc

SEQ ID NO: 85185 - RNA, 21 nt, synthetic construct
  source 1..21: mol_type = other RNA
ctttcccattaccaaaacctg

SEQ ID NO: 85186 - RNA, 21 nt, synthetic construct
  source 1..21: mol_type = other RNA
ctttcccttctgctcggctct

SEQ ID NO: 85187 - RNA, 21 nt, synthetic construct
  source 1..21: mol_type = other RNA
ctttcctattcacactgctcc

SEQ ID NO: 85188 - RNA, 21 nt, synthetic construct
  source 1..21: mol_type = other RNA
ctttcctcatgtccatagtta

SEQ ID NO: 85189 - RNA, 21 nt, synthetic construct
  source 1..21: mol_type = other RNA
ctttcctgataaggggctatc

SEQ ID NO: 85190 - RNA, 21 nt, synthetic construct
  source 1..21: mol_type = other RNA
ctttcctgatcacaccctcct

SEQ ID NO: 85191 - RNA, 21 nt, synthetic construct
  source 1..21: mol_type = other RNA
ctttcctgatcagcaccctca

SEQ ID NO: 85192 - RNA, 21 nt, synthetic construct
  source 1..21: mol_type = other RNA
ctttcctgcccctccactcca

SEQ ID NO: 85193 - RNA, 21 nt, synthetic construct
  source 1..21: mol_type = other RNA
ctttcctgtgatttatgtggc

SEQ ID NO: 85194 - RNA, 21 nt, synthetic construct
  source 1..21: mol_type = other RNA
ctttccttagttcgaagtttt

SEQ ID NO: 85195 - RNA, 21 nt, synthetic construct
  source 1..21: mol_type = other RNA
ctttccttattgagaagcaga

SEQ ID NO: 85196 - RNA, 21 nt, synthetic construct
  source 1..21: mol_type = other RNA
ctttccttccttgctcaggag

SEQ ID NO: 85197 - RNA, 21 nt, synthetic construct
  source 1..21: mol_type = other RNA
ctttccttggagaagagttct

SEQ ID NO: 85198 - RNA, 21 nt, synthetic construct
  source 1..21: mol_type = other RNA
ctttccttgtcctaaaattcc

SEQ ID NO: 85199 - RNA, 21 nt, synthetic construct
  source 1..21: mol_type = other RNA
ctttcgaagtgggaagcaaag

SEQ ID NO: 85200 - RNA, 21 nt, synthetic construct
  source 1..21: mol_type = other RNA
ctttcgcatcattcaaatgat

SEQ ID NO: 85201 - RNA, 21 nt, synthetic construct
  source 1..21: mol_type = other RNA
ctttcgctaatctcaatcagg

SEQ ID NO: 85202 - RNA, 21 nt, synthetic construct
  source 1..21: mol_type = other RNA
ctttcgctatcagtagtttgc

SEQ ID NO: 85203 - RNA, 21 nt, synthetic construct
  source 1..21: mol_type = other RNA
ctttcgcttttggagctataa

SEQ ID NO: 85204 - RNA, 21 nt, synthetic construct
  source 1..21: mol_type = other RNA
ctttcggatatttactaagaa

SEQ ID NO: 85205 - RNA, 21 nt, synthetic construct
  source 1..21: mol_type = other RNA
ctttcgtatggaagatgggac

SEQ ID NO: 85206 - RNA, 21 nt, synthetic construct
  source 1..21: mol_type = other RNA
ctttcgtcatctataaggtaa

SEQ ID NO: 85207 - RNA, 21 nt, synthetic construct
  source 1..21: mol_type = other RNA
ctttcgtgagggtttcagtga

SEQ ID NO: 85208 - RNA, 21 nt, synthetic construct
  source 1..21: mol_type = other RNA
ctttctaatcctttgcacaca

SEQ ID NO: 85209 - RNA, 21 nt, synthetic construct
  source 1..21: mol_type = other RNA
ctttctaattctgacaactgg

SEQ ID NO: 85210 - RNA, 21 nt, synthetic construct
  source 1..21: mol_type = other RNA
ctttctactagtataagagaa

SEQ ID NO: 85211 - RNA, 21 nt, synthetic construct
  source 1..21: mol_type = other RNA
ctttctagaatgcatccctcc

SEQ ID NO: 85212 - RNA, 21 nt, synthetic construct
  source 1..21: mol_type = other RNA
ctttctagattcatatgcttt

SEQ ID NO: 85213 - RNA, 21 nt, synthetic construct
  source 1..21: mol_type = other RNA
ctttctaggcatctatttccc

SEQ ID NO: 85214 - RNA, 21 nt, synthetic construct
  source 1..21: mol_type = other RNA
ctttctatacttcatctttcc

SEQ ID NO: 85215 - RNA, 21 nt, synthetic construct
  source 1..21: mol_type = other RNA
ctttctatctctcagatctga

SEQ ID NO: 85216 - RNA, 21 nt, synthetic construct
  source 1..21: mol_type = other RNA
ctttctattcccctggatccc

SEQ ID NO: 85217 - RNA, 21 nt, synthetic construct
  source 1..21: mol_type = other RNA
ctttctcaaagcccaccagca

SEQ ID NO: 85218 - RNA, 21 nt, synthetic construct
  source 1..21: mol_type = other RNA
ctttctcaacactgtgttctt

SEQ ID NO: 85219 - RNA, 21 nt, synthetic construct
  source 1..21: mol_type = other RNA
ctttctcaacttcctgtttta

SEQ ID NO: 85220 - RNA, 21 nt, synthetic construct
  source 1..21: mol_type = other RNA
ctttctccaggggcggccccg

SEQ ID NO: 85221 - RNA, 21 nt, synthetic construct
  source 1..21: mol_type = other RNA
ctttctcccagctgtccaaca

SEQ ID NO: 85222 - RNA, 21 nt, synthetic construct
  source 1..21: mol_type = other RNA
ctttctcccaggtcagtagta

SEQ ID NO: 85223 - RNA, 21 nt, synthetic construct
  source 1..21: mol_type = other RNA
ctttctcgcagcggggatgct

SEQ ID NO: 85224 - RNA, 21 nt, synthetic construct
  source 1..21: mol_type = other RNA
ctttctctagttgcacggtga

SEQ ID NO: 85225 - RNA, 21 nt, synthetic construct
  source 1..21: mol_type = other RNA
ctttctctttcagccatccca

SEQ ID NO: 85226 - RNA, 21 nt, synthetic construct
  source 1..21: mol_type = other RNA
ctttctgaaattctcattagt

SEQ ID NO: 85227 - RNA, 21 nt, synthetic construct
  source 1..21: mol_type = other RNA
ctttctgaactcaaaagtgaa

SEQ ID NO: 85228 - RNA, 21 nt, synthetic construct
  source 1..21: mol_type = other RNA
ctttctgcttaaagcctctca

SEQ ID NO: 85229 - RNA, 21 nt, synthetic construct
  source 1..21: mol_type = other RNA
ctttctggggatgctgtctat

SEQ ID NO: 85230 - RNA, 21 nt, synthetic construct
  source 1..21: mol_type = other RNA
ctttctgtgtaatactgtaga

SEQ ID NO: 85231 - RNA, 21 nt, synthetic construct
  source 1..21: mol_type = other RNA
ctttctgtttgtttgttttga

SEQ ID NO: 85232 - RNA, 21 nt, synthetic construct
  source 1..21: mol_type = other RNA
ctttcttaccctcacagtcac

SEQ ID NO: 85233 - RNA, 21 nt, synthetic construct
  source 1..21: mol_type = other RNA
ctttcttaggaagctatggag

SEQ ID NO: 85234 - RNA, 21 nt, synthetic construct
  source 1..21: mol_type = other RNA
ctttcttaggtttctcatttt

SEQ ID NO: 85235 - RNA, 21 nt, synthetic construct
  source 1..21: mol_type = other RNA
ctttcttcaaccatacttttc

SEQ ID NO: 85236 - RNA, 21 nt, synthetic construct
  source 1..21: mol_type = other RNA
ctttcttggggctctaatgca

SEQ ID NO: 85237 - RNA, 21 nt, synthetic construct
  source 1..21: mol_type = other RNA
ctttcttggtctgcagactct

SEQ ID NO: 85238 - RNA, 21 nt, synthetic construct
  source 1..21: mol_type = other RNA
ctttcttgttagtaggaaaac

SEQ ID NO: 85239 - RNA, 21 nt, synthetic construct
  source 1..21: mol_type = other RNA
ctttctttcaaatgtgacaga

SEQ ID NO: 85240 - RNA, 21 nt, synthetic construct
  source 1..21: mol_type = other RNA
ctttctttggttttgactcag

SEQ ID NO: 85241 - RNA, 21 nt, synthetic construct
  source 1..21: mol_type = other RNA
ctttcttttaaagacctcagg

SEQ ID NO: 85242 - RNA, 21 nt, synthetic construct
  source 1..21: mol_type = other RNA
ctttcttttccaaccaagccc

SEQ ID NO: 85243 - RNA, 21 nt, synthetic construct
  source 1..21: mol_type = other RNA
ctttgaaaggaatccggcttt

SEQ ID NO: 85244 - RNA, 21 nt, synthetic construct
  source 1..21: mol_type = other RNA
ctttgaaatcagaacttgaca

SEQ ID NO: 85245 - RNA, 21 nt, synthetic construct
  source 1..21: mol_type = other RNA
ctttgaagtatgtaattacag

SEQ ID NO: 85246 - RNA, 21 nt, synthetic construct
  source 1..21: mol_type = other RNA
ctttgaataaagggtcagaat

SEQ ID NO: 85247 - RNA, 21 nt, synthetic construct
  source 1..21: mol_type = other RNA
ctttgaatttaagacacaagg

SEQ ID NO: 85248 - RNA, 21 nt, synthetic construct
  source 1..21: mol_type = other RNA
ctttgaatttggaaagggtag

SEQ ID NO: 85249 - RNA, 21 nt, synthetic construct
  source 1..21: mol_type = other RNA
ctttgacttctcagggcctgc

SEQ ID NO: 85250 - RNA, 21 nt, synthetic construct
  source 1..21: mol_type = other RNA
ctttgagaaaggtttcttcac

SEQ ID NO: 85251 - RNA, 21 nt, synthetic construct
  source 1..21: mol_type = other RNA
ctttgagcagagtcctgaggg

SEQ ID NO: 85252 - RNA, 21 nt, synthetic construct
  source 1..21: mol_type = other RNA
ctttgagctacaaactccaaa

SEQ ID NO: 85253 - RNA, 21 nt, synthetic construct
  source 1..21: mol_type = other RNA
ctttgaggtaagaacttgtct

SEQ ID NO: 85254 - RNA, 21 nt, synthetic construct
  source 1..21: mol_type = other RNA
ctttgagtagcaccctattta

SEQ ID NO: 85255 - RNA, 21 nt, synthetic construct
  source 1..21: mol_type = other RNA
ctttgagtagttcatgttagc

SEQ ID NO: 85256 - RNA, 21 nt, synthetic construct
  source 1..21: mol_type = other RNA
ctttgatcatacacatccaga

SEQ ID NO: 85257 - RNA, 21 nt, synthetic construct
  source 1..21: mol_type = other RNA
ctttgatccattttgagttca

SEQ ID NO: 85258 - RNA, 21 nt, synthetic construct
  source 1..21: mol_type = other RNA
ctttgatgaattccagtttat

SEQ ID NO: 85259 - RNA, 21 nt, synthetic construct
  source 1..21: mol_type = other RNA
ctttgatgacttacagatatc

SEQ ID NO: 85260 - RNA, 21 nt, synthetic construct
  source 1..21: mol_type = other RNA
ctttgatgcacaaaagtttaa

SEQ ID NO: 85261 - RNA, 21 nt, synthetic construct
  source 1..21: mol_type = other RNA
ctttgatgcccccaccctttt

SEQ ID NO: 85262 - RNA, 21 nt, synthetic construct
  source 1..21: mol_type = other RNA
ctttgatgttttacattttcc

SEQ ID NO: 85263 - RNA, 21 nt, synthetic construct
  source 1..21: mol_type = other RNA
ctttgcacacaccaaatcatg

SEQ ID NO: 85264 - RNA, 21 nt, synthetic construct
  source 1..21: mol_type = other RNA
ctttgcattcctgaaatgaac

SEQ ID NO: 85265 - RNA, 21 nt, synthetic construct
  source 1..21: mol_type = other RNA
ctttgcctaagtctcaggata

SEQ ID NO: 85266 - RNA, 21 nt, synthetic construct
  source 1..21: mol_type = other RNA
ctttgcctcctgggttcaggt

SEQ ID NO: 85267 - RNA, 21 nt, synthetic construct
  source 1..21: mol_type = other RNA
ctttgcctctccagggaggaa

SEQ ID NO: 85268 - RNA, 21 nt, synthetic construct
  source 1..21: mol_type = other RNA
ctttgcctttcactttgatca

SEQ ID NO: 85269 - RNA, 21 nt, synthetic construct
  source 1..21: mol_type = other RNA
ctttgcgaaacacactcgtgt

SEQ ID NO: 85270 - RNA, 21 nt, synthetic construct
  source 1..21: mol_type = other RNA
ctttgcgaaatagtagttgct

SEQ ID NO: 85271 - RNA, 21 nt, synthetic construct
  source 1..21: mol_type = other RNA
ctttgcgtctgtgattatcag

SEQ ID NO: 85272 - RNA, 21 nt, synthetic construct
  source 1..21: mol_type = other RNA
ctttgctaataagtgagtttg

SEQ ID NO: 85273 - RNA, 21 nt, synthetic construct
  source 1..21: mol_type = other RNA
ctttgctgccccagctaaaat

SEQ ID NO: 85274 - RNA, 21 nt, synthetic construct
  source 1..21: mol_type = other RNA
ctttgcttcccacttcgaaag

SEQ ID NO: 85275 - RNA, 21 nt, synthetic construct
  source 1..21: mol_type = other RNA
ctttggaaaaatgtccgttga

SEQ ID NO: 85276 - RNA, 21 nt, synthetic construct
  source 1..21: mol_type = other RNA
ctttggaaggtaggagggtgt

SEQ ID NO: 85277 - RNA, 21 nt, synthetic construct
  source 1..21: mol_type = other RNA
ctttggagctgtatttttgct

SEQ ID NO: 85278 - RNA, 21 nt, synthetic construct
  source 1..21: mol_type = other RNA
ctttggagtcacagtgaattc

SEQ ID NO: 85279 - RNA, 21 nt, synthetic construct
  source 1..21: mol_type = other RNA
ctttggagtgagaggactgcc

SEQ ID NO: 85280 - RNA, 21 nt, synthetic construct
  source 1..21: mol_type = other RNA
ctttggatatccccatttttc

SEQ ID NO: 85281 - RNA, 21 nt, synthetic construct
  source 1..21: mol_type = other RNA
ctttggcaaacttagaatata

SEQ ID NO: 85282 - RNA, 21 nt, synthetic construct
  source 1..21: mol_type = other RNA
ctttggcccatatccttttat

SEQ ID NO: 85283 - RNA, 21 nt, synthetic construct
  source 1..21: mol_type = other RNA
ctttggcccattttcgaatta

SEQ ID NO: 85284 - RNA, 21 nt, synthetic construct
  source 1..21: mol_type = other RNA
ctttggctactgtaaacaatg

SEQ ID NO: 85285 - RNA, 21 nt, synthetic construct
  source 1..21: mol_type = other RNA
ctttggctagaagcatctgat

SEQ ID NO: 85286 - RNA, 21 nt, synthetic construct
  source 1..21: mol_type = other RNA
ctttggctcaatggttaagac

SEQ ID NO: 85287 - RNA, 21 nt, synthetic construct
  source 1..21: mol_type = other RNA
ctttggctcttagaaaatata

SEQ ID NO: 85288 - RNA, 21 nt, synthetic construct
  source 1..21: mol_type = other RNA
ctttggctgaaatgctgtaac

SEQ ID NO: 85289 - RNA, 21 nt, synthetic construct
  source 1..21: mol_type = other RNA
ctttggctgttagccttgcca

SEQ ID NO: 85290 - RNA, 21 nt, synthetic construct
  source 1..21: mol_type = other RNA
ctttgggaaaatctctgactt

SEQ ID NO: 85291 - RNA, 21 nt, synthetic construct
  source 1..21: mol_type = other RNA
ctttgggaaggccctgattga

SEQ ID NO: 85292 - RNA, 21 nt, synthetic construct
  source 1..21: mol_type = other RNA
ctttgggattagcttattctt

SEQ ID NO: 85293 - RNA, 21 nt, synthetic construct
  source 1..21: mol_type = other RNA
ctttggggagataccttgaaa

SEQ ID NO: 85294 - RNA, 21 nt, synthetic construct
  source 1..21: mol_type = other RNA
ctttgggggaagcaggaactc

SEQ ID NO: 85295 - RNA, 21 nt, synthetic construct
  source 1..21: mol_type = other RNA
ctttgggtaatttatctccat

SEQ ID NO: 85296 - RNA, 21 nt, synthetic construct
  source 1..21: mol_type = other RNA
ctttgggtctatagtttaatt

SEQ ID NO: 85297 - RNA, 21 nt, synthetic construct
  source 1..21: mol_type = other RNA
ctttggtgaaggttcatgaac

SEQ ID NO: 85298 - RNA, 21 nt, synthetic construct
  source 1..21: mol_type = other RNA
ctttggtgatcctaagccatc

SEQ ID NO: 85299 - RNA, 21 nt, synthetic construct
  source 1..21: mol_type = other RNA
ctttggtgctgataaatggct

SEQ ID NO: 85300 - RNA, 21 nt, synthetic construct
  source 1..21: mol_type = other RNA
ctttggttttgactcagtact

SEQ ID NO: 85301 - RNA, 21 nt, synthetic construct
  source 1..21: mol_type = other RNA
ctttgtacagtaattgtagtt

SEQ ID NO: 85302 - RNA, 21 nt, synthetic construct
  source 1..21: mol_type = other RNA
ctttgtattcatccagtttaa

SEQ ID NO: 85303 - RNA, 21 nt, synthetic construct
  source 1..21: mol_type = other RNA
ctttgtcaggcatgctaactg

SEQ ID NO: 85304 - RNA, 21 nt, synthetic construct
  source 1..21: mol_type = other RNA
ctttgtccactgtcagtggga

SEQ ID NO: 85305 - RNA, 21 nt, synthetic construct
  source 1..21: mol_type = other RNA
ctttgtctattccctacattg

SEQ ID NO: 85306 - RNA, 21 nt, synthetic construct
  source 1..21: mol_type = other RNA
ctttgtctctggaaggctaag

SEQ ID NO: 85307 - RNA, 21 nt, synthetic construct
  source 1..21: mol_type = other RNA
ctttgtgaagggaggtaggct

SEQ ID NO: 85308 - RNA, 21 nt, synthetic construct
  source 1..21: mol_type = other RNA
ctttgtgactgtgagggtaag

SEQ ID NO: 85309 - RNA, 21 nt, synthetic construct
  source 1..21: mol_type = other RNA
ctttgtgcaggtctgggtttt

SEQ ID NO: 85310 - RNA, 21 nt, synthetic construct
  source 1..21: mol_type = other RNA
ctttgtggagtggaggggcag

SEQ ID NO: 85311 - RNA, 21 nt, synthetic construct
  source 1..21: mol_type = other RNA
ctttgtggcctcttcccttgt

SEQ ID NO: 85312 - RNA, 21 nt, synthetic construct
  source 1..21: mol_type = other RNA
ctttgtgtcaagtacaactaa

SEQ ID NO: 85313 - RNA, 21 nt, synthetic construct
  source 1..21: mol_type = other RNA
ctttgtgttggtgtttctgac

SEQ ID NO: 85314 - RNA, 21 nt, synthetic construct
  source 1..21: mol_type = other RNA
ctttgttacagcagctctagc

SEQ ID NO: 85315 - RNA, 21 nt, synthetic construct
  source 1..21: mol_type = other RNA
ctttgttagtgccttcagaag

SEQ ID NO: 85316 - RNA, 21 nt, synthetic construct
  source 1..21: mol_type = other RNA
ctttgttagtttattcatacg

SEQ ID NO: 85317 - RNA, 21 nt, synthetic construct
  source 1..21: mol_type = other RNA
ctttgttatctgaacgtcttt

SEQ ID NO: 85318 - RNA, 21 nt, synthetic construct
  source 1..21: mol_type = other RNA
ctttgttcatcatcttttgcc

SEQ ID NO: 85319 - RNA, 21 nt, synthetic construct
  source 1..21: mol_type = other RNA
ctttgttgaaaacgaggaaaa

SEQ ID NO: 85320 - RNA, 21 nt, synthetic construct
  source 1..21: mol_type = other RNA
ctttgttgccaggtggacgcg

SEQ ID NO: 85321 - RNA, 21 nt, synthetic construct
  source 1..21: mol_type = other RNA
ctttgtttatccttgcaccaa

SEQ ID NO: 85322 - RNA, 21 nt, synthetic construct
  source 1..21: mol_type = other RNA
ctttgttttgtttttctctcc

SEQ ID NO: 85323 - RNA, 21 nt, synthetic construct
  source 1..21: mol_type = other RNA
cttttaaacccatttcatgcc

SEQ ID NO: 85324 - RNA, 21 nt, synthetic construct
  source 1..21: mol_type = other RNA
cttttaaagaaaggtctctct

SEQ ID NO: 85325 - RNA, 21 nt, synthetic construct
  source 1..21: mol_type = other RNA
cttttaaagacctcaggttta

SEQ ID NO: 85326 - RNA, 21 nt, synthetic construct
  source 1..21: mol_type = other RNA
cttttaaatgccaatttggga

SEQ ID NO: 85327 - RNA, 21 nt, synthetic construct
  source 1..21: mol_type = other RNA
cttttaacagatggtcctttt

SEQ ID NO: 85328 - RNA, 21 nt, synthetic construct
  source 1..21: mol_type = other RNA
cttttaacccacagataattt

SEQ ID NO: 85329 - RNA, 21 nt, synthetic construct
  source 1..21: mol_type = other RNA
cttttaagagtgaagaaacct

SEQ ID NO: 85330 - RNA, 21 nt, synthetic construct
  source 1..21: mol_type = other RNA
cttttaaggcttggaaaacaa

SEQ ID NO: 85331 - RNA, 21 nt, synthetic construct
  source 1..21: mol_type = other RNA
cttttaagggaaacactcata

SEQ ID NO: 85332 - RNA, 21 nt, synthetic construct
  source 1..21: mol_type = other RNA
cttttaatactttcacactga

SEQ ID NO: 85333 - RNA, 21 nt, synthetic construct
  source 1..21: mol_type = other RNA
cttttacaccctaggtagggt

SEQ ID NO: 85334 - RNA, 21 nt, synthetic construct
  source 1..21: mol_type = other RNA
cttttacgaggacagactgca

SEQ ID NO: 85335 - RNA, 21 nt, synthetic construct
  source 1..21: mol_type = other RNA
cttttacttgcttggtttcac

SEQ ID NO: 85336 - RNA, 21 nt, synthetic construct
  source 1..21: mol_type = other RNA
cttttacttggctcctcccgg

SEQ ID NO: 85337 - RNA, 21 nt, synthetic construct
  source 1..21: mol_type = other RNA
cttttagagtaactgtcatca

SEQ ID NO: 85338 - RNA, 21 nt, synthetic construct
  source 1..21: mol_type = other RNA
cttttagccaacaaccataat

SEQ ID NO: 85339 - RNA, 21 nt, synthetic construct
  source 1..21: mol_type = other RNA
cttttaggtgccccactccac

SEQ ID NO: 85340 - RNA, 21 nt, synthetic construct
  source 1..21: mol_type = other RNA
cttttagtaggtctccttgta

SEQ ID NO: 85341 - RNA, 21 nt, synthetic construct
  source 1..21: mol_type = other RNA
cttttagtttacactatggct

SEQ ID NO: 85342 - RNA, 21 nt, synthetic construct
  source 1..21: mol_type = other RNA
cttttatgtgcagtctaacca

SEQ ID NO: 85343 - RNA, 21 nt, synthetic construct
  source 1..21: mol_type = other RNA
cttttcaaaaacagcatatac

SEQ ID NO: 85344 - RNA, 21 nt, synthetic construct
  source 1..21: mol_type = other RNA
cttttcaaaaacccaactctt

SEQ ID NO: 85345 - RNA, 21 nt, synthetic construct
  source 1..21: mol_type = other RNA
cttttcaactgaacaacgctg

SEQ ID NO: 85346 - RNA, 21 nt, synthetic construct
  source 1..21: mol_type = other RNA
cttttcacataaatttgccac

SEQ ID NO: 85347 - RNA, 21 nt, synthetic construct
  source 1..21: mol_type = other RNA
cttttcactctaatatggttc

SEQ ID NO: 85348 - RNA, 21 nt, synthetic construct
  source 1..21: mol_type = other RNA
cttttcactcttagtgatgtc

SEQ ID NO: 85349 - RNA, 21 nt, synthetic construct
  source 1..21: mol_type = other RNA
cttttcaggtattgagcctgt

SEQ ID NO: 85350 - RNA, 21 nt, synthetic construct
  source 1..21: mol_type = other RNA
cttttcagtccagatattatc

SEQ ID NO: 85351 - RNA, 21 nt, synthetic construct
  source 1..21: mol_type = other RNA
cttttcatcactcactggcct

SEQ ID NO: 85352 - RNA, 21 nt, synthetic construct
  source 1..21: mol_type = other RNA
cttttcatgttgaccattttt

SEQ ID NO: 85353 - RNA, 21 nt, synthetic construct
  source 1..21: mol_type = other RNA
cttttccaaccaagcccaact

SEQ ID NO: 85354 - RNA, 21 nt, synthetic construct
  source 1..21: mol_type = other RNA
cttttccagtcttctcataca

SEQ ID NO: 85355 - RNA, 21 nt, synthetic construct
  source 1..21: mol_type = other RNA
cttttcccaggagctagaaca

SEQ ID NO: 85356 - RNA, 21 nt, synthetic construct
  source 1..21: mol_type = other RNA
cttttcctaccctgaggatat

SEQ ID NO: 85357 - RNA, 21 nt, synthetic construct
  source 1..21: mol_type = other RNA
cttttcctagactgccaggta

SEQ ID NO: 85358 - RNA, 21 nt, synthetic construct
  source 1..21: mol_type = other RNA
cttttcctcgttttcaacaaa

SEQ ID NO: 85359 - RNA, 21 nt, synthetic construct
  source 1..21: mol_type = other RNA
cttttcctgctgtcgtttatg

SEQ ID NO: 85360 - RNA, 21 nt, synthetic construct
  source 1..21: mol_type = other RNA
cttttcctggaaaacttctct

SEQ ID NO: 85361 - RNA, 21 nt, synthetic construct
  source 1..21: mol_type = other RNA
cttttcctgttccgggatcct

SEQ ID NO: 85362 - RNA, 21 nt, synthetic construct
  source 1..21: mol_type = other RNA
cttttccttcttaagacattt

SEQ ID NO: 85363 - RNA, 21 nt, synthetic construct
  source 1..21: mol_type = other RNA
cttttcctttaacgtatctgg

SEQ ID NO: 85364 - RNA, 21 nt, synthetic construct
  source 1..21: mol_type = other RNA
cttttcgagactgagtaatat

SEQ ID NO: 85365 - RNA, 21 nt, synthetic construct
  source 1..21: mol_type = other RNA
cttttctcctaagtcttcttc

SEQ ID NO: 85366 - RNA, 21 nt, synthetic construct
  source 1..21: mol_type = other RNA
cttttctcgtgcatgtctgca

SEQ ID NO: 85367 - RNA, 21 nt, synthetic construct
  source 1..21: mol_type = other RNA
cttttctgacaatttcaggga

SEQ ID NO: 85368 - RNA, 21 nt, synthetic construct
  source 1..21: mol_type = other RNA
cttttctgatttgctggctca

SEQ ID NO: 85369 - RNA, 21 nt, synthetic construct
  source 1..21: mol_type = other RNA
cttttctggttttctggaggc

SEQ ID NO: 85370 - RNA, 21 nt, synthetic construct
  source 1..21: mol_type = other RNA
cttttcttaaaactttaggtc

SEQ ID NO: 85371 - RNA, 21 nt, synthetic construct
  source 1..21: mol_type = other RNA
cttttgaaactgagcatccca

SEQ ID NO: 85372 - RNA, 21 nt, synthetic construct
  source 1..21: mol_type = other RNA
cttttgaacactctgcaattt

SEQ ID NO: 85373 - RNA, 21 nt, synthetic construct
  source 1..21: mol_type = other RNA
cttttgacgcgcaacaattca

SEQ ID NO: 85374 - RNA, 21 nt, synthetic construct
  source 1..21: mol_type = other RNA
cttttgagggtatcatattat

SEQ ID NO: 85375 - RNA, 21 nt, synthetic construct
  source 1..21: mol_type = other RNA
cttttgagtgtaaggtgtttg

SEQ ID NO: 85376 - RNA, 21 nt, synthetic construct
  source 1..21: mol_type = other RNA
cttttgagttcagaaagatta

SEQ ID NO: 85377 - RNA, 21 nt, synthetic construct
  source 1..21: mol_type = other RNA
cttttgagtttggtgtattta

SEQ ID NO: 85378 - RNA, 21 nt, synthetic construct
  source 1..21: mol_type = other RNA
cttttgcctggatgaatgcag

SEQ ID NO: 85379 - RNA, 21 nt, synthetic construct
  source 1..21: mol_type = other RNA
cttttgctgagggaatttttc

SEQ ID NO: 85380 - RNA, 21 nt, synthetic construct
  source 1..21: mol_type = other RNA
cttttgctgcatcccaagggt

SEQ ID NO: 85381 - RNA, 21 nt, synthetic construct
  source 1..21: mol_type = other RNA
cttttgctgtatacccaggtg

SEQ ID NO: 85382 - RNA, 21 nt, synthetic construct
  source 1..21: mol_type = other RNA
cttttgctttgggtctatagt

SEQ ID NO: 85383 - RNA, 21 nt, synthetic construct
  source 1..21: mol_type = other RNA
cttttggaagcatgtggccag

SEQ ID NO: 85384 - RNA, 21 nt, synthetic construct
  source 1..21: mol_type = other RNA
cttttggaatttaaggggtaa

SEQ ID NO: 85385 - RNA, 21 nt, synthetic construct
  source 1..21: mol_type = other RNA
cttttggagctataatttatc

SEQ ID NO: 85386 - RNA, 21 nt, synthetic construct
  source 1..21: mol_type = other RNA
cttttggatgcagatttcttt

SEQ ID NO: 85387 - RNA, 21 nt, synthetic construct
  source 1..21: mol_type = other RNA
cttttggcagcgtaactccat

SEQ ID NO: 85388 - RNA, 21 nt, synthetic construct
  source 1..21: mol_type = other RNA
cttttggtacacatctttttt

SEQ ID NO: 85389 - RNA, 21 nt, synthetic construct
  source 1..21: mol_type = other RNA
cttttgtactacttgtcaggt

SEQ ID NO: 85390 - RNA, 21 nt, synthetic construct
  source 1..21: mol_type = other RNA
cttttgtagaccctgttagtc

SEQ ID NO: 85391 - RNA, 21 nt, synthetic construct
  source 1..21: mol_type = other RNA
cttttgtagagggaatttgtt

SEQ ID NO: 85392 - RNA, 21 nt, synthetic construct
  source 1..21: mol_type = other RNA
cttttgtagctaatatctttg

SEQ ID NO: 85393 - RNA, 21 nt, synthetic construct
  source 1..21: mol_type = other RNA
cttttgtcaagctatcagaat

SEQ ID NO: 85394 - RNA, 21 nt, synthetic construct
  source 1..21: mol_type = other RNA
cttttgtgcaacataaatagg

SEQ ID NO: 85395 - RNA, 21 nt, synthetic construct
  source 1..21: mol_type = other RNA
cttttgtgggtaaattaagta

SEQ ID NO: 85396 - RNA, 21 nt, synthetic construct
  source 1..21: mol_type = other RNA
cttttgttgcctgtagttttg

SEQ ID NO: 85397 - RNA, 21 nt, synthetic construct
  source 1..21: mol_type = other RNA
ctttttaaacaggtgtaagag

SEQ ID NO: 85398 - RNA, 21 nt, synthetic construct
  source 1..21: mol_type = other RNA
ctttttacacttggagttttc

SEQ ID NO: 85399 - RNA, 21 nt, synthetic construct
  source 1..21: mol_type = other RNA
ctttttaccaagttgaatttc

SEQ ID NO: 85400 - RNA, 21 nt, synthetic construct
  source 1..21: mol_type = other RNA
ctttttacccggagaggtgaa

SEQ ID NO: 85401 - RNA, 21 nt, synthetic construct
  source 1..21: mol_type = other RNA
ctttttacgatgaaattgacc

SEQ ID NO: 85402 - RNA, 21 nt, synthetic construct
  source 1..21: mol_type = other RNA
ctttttactcatgtctacctg

SEQ ID NO: 85403 - RNA, 21 nt, synthetic construct
  source 1..21: mol_type = other RNA
ctttttactcgagggtagctt

SEQ ID NO: 85404 - RNA, 21 nt, synthetic construct
  source 1..21: mol_type = other RNA
ctttttactttgcgaaacaca

SEQ ID NO: 85405 - RNA, 21 nt, synthetic construct
  source 1..21: mol_type = other RNA
ctttttaggtagggataagaa

SEQ ID NO: 85406 - RNA, 21 nt, synthetic construct
  source 1..21: mol_type = other RNA
ctttttagtaagaggtatcac

SEQ ID NO: 85407 - RNA, 21 nt, synthetic construct
  source 1..21: mol_type = other RNA
ctttttatggaaacatggtaa

SEQ ID NO: 85408 - RNA, 21 nt, synthetic construct
  source 1..21: mol_type = other RNA
ctttttattctgttctagctc

SEQ ID NO: 85409 - RNA, 21 nt, synthetic construct
  source 1..21: mol_type = other RNA
ctttttcagcagcagagaagt

SEQ ID NO: 85410 - RNA, 21 nt, synthetic construct
  source 1..21: mol_type = other RNA
ctttttcatccaaacagaaac

SEQ ID NO: 85411 - RNA, 21 nt, synthetic construct
  source 1..21: mol_type = other RNA
ctttttccaggaccaatttac

SEQ ID NO: 85412 - RNA, 21 nt, synthetic construct
  source 1..21: mol_type = other RNA
ctttttctagtttgaggtgta

SEQ ID NO: 85413 - RNA, 21 nt, synthetic construct
  source 1..21: mol_type = other RNA
ctttttctgcatcttttgagg

SEQ ID NO: 85414 - RNA, 21 nt, synthetic construct
  source 1..21: mol_type = other RNA
ctttttcttcttgttttgttc

SEQ ID NO: 85415 - RNA, 21 nt, synthetic construct
  source 1..21: mol_type = other RNA
ctttttcttgctttgctgccc

SEQ ID NO: 85416 - RNA, 21 nt, synthetic construct
  source 1..21: mol_type = other RNA
ctttttcttggtggtaactga

SEQ ID NO: 85417 - RNA, 21 nt, synthetic construct
  source 1..21: mol_type = other RNA
ctttttctttttaaacaggtg

SEQ ID NO: 85418 - RNA, 21 nt, synthetic construct
  source 1..21: mol_type = other RNA
ctttttctttttagtaagagg

SEQ ID NO: 85419 - RNA, 21 nt, synthetic construct
  source 1..21: mol_type = other RNA
ctttttgacagatgagactct

SEQ ID NO: 85420 - RNA, 21 nt, synthetic construct
  source 1..21: mol_type = other RNA
ctttttgggatctgtcatgtt

SEQ ID NO: 85421 - RNA, 21 nt, synthetic construct
  source 1..21: mol_type = other RNA
ctttttgggcctttctgtttg

SEQ ID NO: 85422 - RNA, 21 nt, synthetic construct
  source 1..21: mol_type = other RNA
ctttttgtatcctgtttgaga

SEQ ID NO: 85423 - RNA, 21 nt, synthetic construct
  source 1..21: mol_type = other RNA
ctttttgtcacacggaaaaca

SEQ ID NO: 85424 - RNA, 21 nt, synthetic construct
  source 1..21: mol_type = other RNA
ctttttgtgagttttaactct

SEQ ID NO: 85425 - RNA, 21 nt, synthetic construct
  source 1..21: mol_type = other RNA
ctttttgttttctccttctgg

SEQ ID NO: 85426 - RNA, 21 nt, synthetic construct
  source 1..21: mol_type = other RNA
cttttttaaggaaaagtcagt

SEQ ID NO: 85427 - RNA, 21 nt, synthetic construct
  source 1..21: mol_type = other RNA
cttttttactgacttttcctt

SEQ ID NO: 85428 - RNA, 21 nt, synthetic construct
  source 1..21: mol_type = other RNA
cttttttatgtgctttctcaa

SEQ ID NO: 85429 - RNA, 21 nt, synthetic construct
  source 1..21: mol_type = other RNA
cttttttgcccactcttatat

SEQ ID NO: 85430 - RNA, 21 nt, synthetic construct
  source 1..21: mol_type = other RNA
cttttttggtgtttttctagg

SEQ ID NO: 85431 - RNA, 21 nt, synthetic construct
  source 1..21: mol_type = other RNA
cttttttgtagagacagaatc

SEQ ID NO: 85432 - RNA, 21 nt, synthetic construct
  source 1..21: mol_type = other RNA
gaaaaaacaaaacaaaaccct

SEQ ID NO: 85433 - RNA, 21 nt, synthetic construct
  source 1..21: mol_type = other RNA
gaaaaaacacctaaagatatg

SEQ ID NO: 85434 - RNA, 21 nt, synthetic construct
  source 1..21: mol_type = other RNA
gaaaaaacagttgctattcaa

SEQ ID NO: 85435 - RNA, 21 nt, synthetic construct
  source 1..21: mol_type = other RNA
gaaaaaacgggttatacacac

SEQ ID NO: 85436 - RNA, 21 nt, synthetic construct
  source 1..21: mol_type = other RNA
gaaaaaacttcccttagctct

SEQ ID NO: 85437 - RNA, 21 nt, synthetic construct
  source 1..21: mol_type = other RNA
gaaaaaataaaggctttcgta

SEQ ID NO: 85438 - RNA, 21 nt, synthetic construct
  source 1..21: mol_type = other RNA
gaaaaaatggtgcagccacta

SEQ ID NO: 85439 - RNA, 21 nt, synthetic construct
  source 1..21: mol_type = other RNA
gaaaaaattagccttttacac

SEQ ID NO: 85440 - RNA, 21 nt, synthetic construct
  source 1..21: mol_type = other RNA
gaaaaacaccaaaaaagcacc

SEQ ID NO: 85441 - RNA, 21 nt, synthetic construct
  source 1..21: mol_type = other RNA
gaaaaacacctcagttaaacc

SEQ ID NO: 85442 - RNA, 21 nt, synthetic construct
  source 1..21: mol_type = other RNA
gaaaaacagaagacacaaaat

SEQ ID NO: 85443 - RNA, 21 nt, synthetic construct
  source 1..21: mol_type = other RNA
gaaaaacagatcttggccgaa

SEQ ID NO: 85444 - RNA, 21 nt, synthetic construct
  source 1..21: mol_type = other RNA
gaaaaacctaaacctgtgatt

SEQ ID NO: 85445 - RNA, 21 nt, synthetic construct
  source 1..21: mol_type = other RNA
gaaaaacggaggttgcagtaa

SEQ ID NO: 85446 - RNA, 21 nt, synthetic construct
  source 1..21: mol_type = other RNA
gaaaaactgaactacagtgtt

SEQ ID NO: 85447 - RNA, 21 nt, synthetic construct
  source 1..21: mol_type = other RNA
gaaaaactgcagcaattattt

SEQ ID NO: 85448 - RNA, 21 nt, synthetic construct
  source 1..21: mol_type = other RNA
gaaaaagaaaagacaagacta

SEQ ID NO: 85449 - RNA, 21 nt, synthetic construct
  source 1..21: mol_type = other RNA
gaaaaagaataagctaatccc

SEQ ID NO: 85450 - RNA, 21 nt, synthetic construct
  source 1..21: mol_type = other RNA
gaaaaagcaacttgaaggcaa

SEQ ID NO: 85451 - RNA, 21 nt, synthetic construct
  source 1..21: mol_type = other RNA
gaaaaagcagagaaactggaa

SEQ ID NO: 85452 - RNA, 21 nt, synthetic construct
  source 1..21: mol_type = other RNA
gaaaaagctcacctctggact

SEQ ID NO: 85453 - RNA, 21 nt, synthetic construct
  source 1..21: mol_type = other RNA
gaaaaaggaaagtaactgttg

SEQ ID NO: 85454 - RNA, 21 nt, synthetic construct
  source 1..21: mol_type = other RNA
gaaaaaggttaagggaagagc

SEQ ID NO: 85455 - RNA, 21 nt, synthetic construct
  source 1..21: mol_type = other RNA
gaaaaagtactggaaatggac

SEQ ID NO: 85456 - RNA, 21 nt, synthetic construct
  source 1..21: mol_type = other RNA
gaaaaagttgggcttggttgg

SEQ ID NO: 85457 - RNA, 21 nt, synthetic construct
  source 1..21: mol_type = other RNA
gaaaaatcgtcctcttcgggt

SEQ ID NO: 85458 - RNA, 21 nt, synthetic construct
  source 1..21: mol_type = other RNA
gaaaaatctaaccctcaatcc

SEQ ID NO: 85459 - RNA, 21 nt, synthetic construct
  source 1..21: mol_type = other RNA
gaaaaatgagaaacctaagaa

SEQ ID NO: 85460 - RNA, 21 nt, synthetic construct
  source 1..21: mol_type = other RNA
gaaaaatggggatatccaaag

SEQ ID NO: 85461 - RNA, 21 nt, synthetic construct
  source 1..21: mol_type = other RNA
gaaaaatggttttatggtaac

SEQ ID NO: 85462 - RNA, 21 nt, synthetic construct
  source 1..21: mol_type = other RNA
gaaaaatgtcaattttccccc

SEQ ID NO: 85463 - RNA, 21 nt, synthetic construct
  source 1..21: mol_type = other RNA
gaaaaatgtccgttgaagtct

SEQ ID NO: 85464 - RNA, 21 nt, synthetic construct
  source 1..21: mol_type = other RNA
gaaaaattacaggtcaaactc

SEQ ID NO: 85465 - RNA, 21 nt, synthetic construct
  source 1..21: mol_type = other RNA
gaaaaattcactcctcattca

SEQ ID NO: 85466 - RNA, 21 nt, synthetic construct
  source 1..21: mol_type = other RNA
gaaaaattccctcagcaaaag

SEQ ID NO: 85467 - RNA, 21 nt, synthetic construct
  source 1..21: mol_type = other RNA
gaaaaatttgacatgacaggt

SEQ ID NO: 85468 - RNA, 21 nt, synthetic construct
  source 1..21: mol_type = other RNA
gaaaacaaattcatgcaactg

SEQ ID NO: 85469 - RNA, 21 nt, synthetic construct
  source 1..21: mol_type = other RNA
gaaaacaaattgcatcaactg

SEQ ID NO: 85470 - RNA, 21 nt, synthetic construct
  source 1..21: mol_type = other RNA
gaaaacaattacttgagagca

SEQ ID NO: 85471 - RNA, 21 nt, synthetic construct
  source 1..21: mol_type = other RNA
gaaaacacaaactgcagaatg

SEQ ID NO: 85472 - RNA, 21 nt, synthetic construct
  source 1..21: mol_type = other RNA
gaaaacacaacataccaaaac

SEQ ID NO: 85473 - RNA, 21 nt, synthetic construct
  source 1..21: mol_type = other RNA
gaaaacacccttgaaaatttc

SEQ ID NO: 85474 - RNA, 21 nt, synthetic construct
  source 1..21: mol_type = other RNA
gaaaacactccagaatgaccg

SEQ ID NO: 85475 - RNA, 21 nt, synthetic construct
  source 1..21: mol_type = other RNA
gaaaacagataacctagattt

SEQ ID NO: 85476 - RNA, 21 nt, synthetic construct
  source 1..21: mol_type = other RNA
gaaaacagctaggtgagtgag

SEQ ID NO: 85477 - RNA, 21 nt, synthetic construct
  source 1..21: mol_type = other RNA
gaaaacatatccttctacatc

SEQ ID NO: 85478 - RNA, 21 nt, synthetic construct
  source 1..21: mol_type = other RNA
gaaaacatgttttgttgttgt

SEQ ID NO: 85479 - RNA, 21 nt, synthetic construct
  source 1..21: mol_type = other RNA
gaaaaccagaaaagtgaaaca

SEQ ID NO: 85480 - RNA, 21 nt, synthetic construct
  source 1..21: mol_type = other RNA
gaaaaccatgtcatgtatatg

SEQ ID NO: 85481 - RNA, 21 nt, synthetic construct
  source 1..21: mol_type = other RNA
gaaaacccttcatcatttgta

SEQ ID NO: 85482 - RNA, 21 nt, synthetic construct
  source 1..21: mol_type = other RNA
gaaaaccgacagcagataaga

SEQ ID NO: 85483 - RNA, 21 nt, synthetic construct
  source 1..21: mol_type = other RNA
gaaaacctgaaatggcttaag

SEQ ID NO: 85484 - RNA, 21 nt, synthetic construct
  source 1..21: mol_type = other RNA
gaaaacgaggaaaagagaaca

SEQ ID NO: 85485 - RNA, 21 nt, synthetic construct
  source 1..21: mol_type = other RNA
gaaaactaaggtcaagagaga

SEQ ID NO: 85486 - RNA, 21 nt, synthetic construct
  source 1..21: mol_type = other RNA
gaaaactacatgtaaaaactg

SEQ ID NO: 85487 - RNA, 21 nt, synthetic construct
  source 1..21: mol_type = other RNA
gaaaactagagatgggaaagt

SEQ ID NO: 85488 - RNA, 21 nt, synthetic construct
  source 1..21: mol_type = other RNA
gaaaactcaactgcctctaca

SEQ ID NO: 85489 - RNA, 21 nt, synthetic construct
  source 1..21: mol_type = other RNA
gaaaactccaagtgtaaaaag

SEQ ID NO: 85490 - RNA, 21 nt, synthetic construct
  source 1..21: mol_type = other RNA
gaaaactctgtttccttacca

SEQ ID NO: 85491 - RNA, 21 nt, synthetic construct
  source 1..21: mol_type = other RNA
gaaaactggcaatcaaatggc

SEQ ID NO: 85492 - RNA, 21 nt, synthetic construct
  source 1..21: mol_type = other RNA
gaaaacttctctggagcaagc

SEQ ID NO: 85493 - RNA, 21 nt, synthetic construct
  source 1..21: mol_type = other RNA
gaaaacttgagcagatcagta

SEQ ID NO: 85494 - RNA, 21 nt, synthetic construct
  source 1..21: mol_type = other RNA
gaaaagaaaaaggttaaggga

SEQ ID NO: 85495 - RNA, 21 nt, synthetic construct
  source 1..21: mol_type = other RNA
gaaaagaaaagtttcagtggt

SEQ ID NO: 85496 - RNA, 21 nt, synthetic construct
  source 1..21: mol_type = other RNA
gaaaagaaagctgtggatgtt

SEQ ID NO: 85497 - RNA, 21 nt, synthetic construct
  source 1..21: mol_type = other RNA
gaaaagaacaacatggtagac

SEQ ID NO: 85498 - RNA, 21 nt, synthetic construct
  source 1..21: mol_type = other RNA
gaaaagaacacagtgttgaga

SEQ ID NO: 85499 - RNA, 21 nt, synthetic construct
  source 1..21: mol_type = other RNA
gaaaagaagttacggttccct

SEQ ID NO: 85500 - RNA, 21 nt, synthetic construct
  source 1..21: mol_type = other RNA
gaaaagacaatagctagtgtc

SEQ ID NO: 85501 - RNA, 21 nt, synthetic construct
  source 1..21: mol_type = other RNA
gaaaagacttctcaaacagga

SEQ ID NO: 85502 - RNA, 21 nt, synthetic construct
  source 1..21: mol_type = other RNA
gaaaagacttgaggtttactt

SEQ ID NO: 85503 - RNA, 21 nt, synthetic construct
  source 1..21: mol_type = other RNA
gaaaagagaacattggtttga

SEQ ID NO: 85504 - RNA, 21 nt, synthetic construct
  source 1..21: mol_type = other RNA
gaaaagagatctagtgaagtc

SEQ ID NO: 85505 - RNA, 21 nt, synthetic construct
  source 1..21: mol_type = other RNA
gaaaagagcacaccaagacat

SEQ ID NO: 85506 - RNA, 21 nt, synthetic construct
  source 1..21: mol_type = other RNA
gaaaagataagtagaaggtca

SEQ ID NO: 85507 - RNA, 21 nt, synthetic construct
  source 1..21: mol_type = other RNA
gaaaagatactcaacatcact

SEQ ID NO: 85508 - RNA, 21 nt, synthetic construct
  source 1..21: mol_type = other RNA
gaaaagatcagtaaaattccc

SEQ ID NO: 85509 - RNA, 21 nt, synthetic construct
  source 1..21: mol_type = other RNA
gaaaagcaaatgtcatcttct

SEQ ID NO: 85510 - RNA, 21 nt, synthetic construct
  source 1..21: mol_type = other RNA
gaaaagcacaggcatcggccg

SEQ ID NO: 85511 - RNA, 21 nt, synthetic construct
  source 1..21: mol_type = other RNA
gaaaagcccaatctacaggtc

SEQ ID NO: 85512 - RNA, 21 nt, synthetic construct
  source 1..21: mol_type = other RNA
gaaaagcctcaaacgaaccaa

SEQ ID NO: 85513 - RNA, 21 nt, synthetic construct
  source 1..21: mol_type = other RNA
gaaaagctaccctcgagtaaa

SEQ ID NO: 85514 - RNA, 21 nt, synthetic construct
  source 1..21: mol_type = other RNA
gaaaagctcaaaaatactcaa

SEQ ID NO: 85515 - RNA, 21 nt, synthetic construct
  source 1..21: mol_type = other RNA
gaaaagcttcccccctctctc

SEQ ID NO: 85516 - RNA, 21 nt, synthetic construct
  source 1..21: mol_type = other RNA
gaaaaggaatggaattctgat

SEQ ID NO: 85517 - RNA, 21 nt, synthetic construct
  source 1..21: mol_type = other RNA
gaaaaggacattagtggaaaa

SEQ ID NO: 85518 - RNA, 21 nt, synthetic construct
  source 1..21: mol_type = other RNA
gaaaaggatttgtttgtgaag

SEQ ID NO: 85519 - RNA, 21 nt, synthetic construct
  source 1..21: mol_type = other RNA
gaaaaggcaaaccacacagag

SEQ ID NO: 85520 - RNA, 21 nt, synthetic construct
  source 1..21: mol_type = other RNA
gaaaaggctgagacctcatct

SEQ ID NO: 85521 - RNA, 21 nt, synthetic construct
  source 1..21: mol_type = other RNA
gaaaagtatggttgaagaaag

SEQ ID NO: 85522 - RNA, 21 nt, synthetic construct
  source 1..21: mol_type = other RNA
gaaaagtcagtaaaaaaggac

SEQ ID NO: 85523 - RNA, 21 nt, synthetic construct
  source 1..21: mol_type = other RNA
gaaaagtgttgactaccatct

SEQ ID NO: 85524 - RNA, 21 nt, synthetic construct
  source 1..21: mol_type = other RNA
gaaaagtgtttgtcacataga

SEQ ID NO: 85525 - RNA, 21 nt, synthetic construct
  source 1..21: mol_type = other RNA
gaaaagtttcagtggttaata

SEQ ID NO: 85526 - RNA, 21 nt, synthetic construct
  source 1..21: mol_type = other RNA
gaaaataaaaagtatcgtgag

SEQ ID NO: 85527 - RNA, 21 nt, synthetic construct
  source 1..21: mol_type = other RNA
gaaaataaaattctgaccctt

SEQ ID NO: 85528 - RNA, 21 nt, synthetic construct
  source 1..21: mol_type = other RNA
gaaaataaaccaagtttggtt

SEQ ID NO: 85529 - RNA, 21 nt, synthetic construct
  source 1..21: mol_type = other RNA
gaaaataatacctaacagccg

SEQ ID NO: 85530 - RNA, 21 nt, synthetic construct
  source 1..21: mol_type = other RNA
gaaaataatgttttccgtgtg

SEQ ID NO: 85531 - RNA, 21 nt, synthetic construct
  source 1..21: mol_type = other RNA
gaaaatacagttttgaccaaa

SEQ ID NO: 85532 - RNA, 21 nt, synthetic construct
  source 1..21: mol_type = other RNA
gaaaatacatgaggcctctcc

SEQ ID NO: 85533 - RNA, 21 nt, synthetic construct
  source 1..21: mol_type = other RNA
gaaaatactaacgatccttac

SEQ ID NO: 85534 - RNA, 21 nt, synthetic construct
  source 1..21: mol_type = other RNA
gaaaatagagttccatctgtt

SEQ ID NO: 85535 - RNA, 21 nt, synthetic construct
  source 1..21: mol_type = other RNA
gaaaatagggacggccttctt

SEQ ID NO: 85536 - RNA, 21 nt, synthetic construct
  source 1..21: mol_type = other RNA
gaaaatagtaactttctgctt

SEQ ID NO: 85537 - RNA, 21 nt, synthetic construct
  source 1..21: mol_type = other RNA
gaaaatagtatgaaggttctt

SEQ ID NO: 85538 - RNA, 21 nt, synthetic construct
  source 1..21: mol_type = other RNA
gaaaatatccctggggtttcc

SEQ ID NO: 85539 - RNA, 21 nt, synthetic construct
  source 1..21: mol_type = other RNA
gaaaatcagtgtgaaagtatt

SEQ ID NO: 85540 - RNA, 21 nt, synthetic construct
  source 1..21: mol_type = other RNA
gaaaatcatacattttccaca

SEQ ID NO: 85541 - RNA, 21 nt, synthetic construct
  source 1..21: mol_type = other RNA
gaaaatcattgttcagggaag

SEQ ID NO: 85542 - RNA, 21 nt, synthetic construct
  source 1..21: mol_type = other RNA
gaaaatcattttggcaaattg

SEQ ID NO: 85543 - RNA, 21 nt, synthetic construct
  source 1..21: mol_type = other RNA
gaaaatccaaaagcctcaaaa

SEQ ID NO: 85544 - RNA, 21 nt, synthetic construct
  source 1..21: mol_type = other RNA
gaaaatccaagaagacatgat

SEQ ID NO: 85545 - RNA, 21 nt, synthetic construct
  source 1..21: mol_type = other RNA
gaaaatccttacttccagctc

SEQ ID NO: 85546 - RNA, 21 nt, synthetic construct
  source 1..21: mol_type = other RNA
gaaaatctctgacttcattct

SEQ ID NO: 85547 - RNA, 21 nt, synthetic construct
  source 1..21: mol_type = other RNA
gaaaatctgacaatttgccaa

SEQ ID NO: 85548 - RNA, 21 nt, synthetic construct
  source 1..21: mol_type = other RNA
gaaaatgcccttatttaatgt

SEQ ID NO: 85549 - RNA, 21 nt, synthetic construct
  source 1..21: mol_type = other RNA
gaaaatgcttaacaagaatcc

SEQ ID NO: 85550 - RNA, 21 nt, synthetic construct
  source 1..21: mol_type = other RNA
gaaaatgcttatgtcttgtgg

SEQ ID NO: 85551 - RNA, 21 nt, synthetic construct
  source 1..21: mol_type = other RNA
gaaaatggccaagagttgctg

SEQ ID NO: 85552 - RNA, 21 nt, synthetic construct
  source 1..21: mol_type = other RNA
gaaaatgggccaaagacttca

SEQ ID NO: 85553 - RNA, 21 nt, synthetic construct
  source 1..21: mol_type = other RNA
gaaaatggtttaggctgtctc

SEQ ID NO: 85554 - RNA, 21 nt, synthetic construct
  source 1..21: mol_type = other RNA
gaaaatgtatgattttctagg

SEQ ID NO: 85555 - RNA, 21 nt, synthetic construct
  source 1..21: mol_type = other RNA
gaaaatgtgacattagtggtg

SEQ ID NO: 85556 - RNA, 21 nt, synthetic construct
  source 1..21: mol_type = other RNA
gaaaatgttatacagcaaatc

SEQ ID NO: 85557 - RNA, 21 nt, synthetic construct
  source 1..21: mol_type = other RNA
gaaaatgttccctcttcaata

SEQ ID NO: 85558 - RNA, 21 nt, synthetic construct
  source 1..21: mol_type = other RNA
gaaaattagctgactttcatt

SEQ ID NO: 85559 - RNA, 21 nt, synthetic construct
  source 1..21: mol_type = other RNA
gaaaattagctggatgtggtg

SEQ ID NO: 85560 - RNA, 21 nt, synthetic construct
  source 1..21: mol_type = other RNA
gaaaattcaaacatgacagat

SEQ ID NO: 85561 - RNA, 21 nt, synthetic construct
  source 1..21: mol_type = other RNA
gaaaattccttcccctttctt

SEQ ID NO: 85562 - RNA, 21 nt, synthetic construct
  source 1..21: mol_type = other RNA
gaaaattcttggtcttttgat

SEQ ID NO: 85563 - RNA, 21 nt, synthetic construct
  source 1..21: mol_type = other RNA
gaaaattggcgtacatgtaga

SEQ ID NO: 85564 - RNA, 21 nt, synthetic construct
  source 1..21: mol_type = other RNA
gaaaattgttcatgaaatccc

SEQ ID NO: 85565 - RNA, 21 nt, synthetic construct
  source 1..21: mol_type = other RNA
gaaaattttctgagcaactac

SEQ ID NO: 85566 - RNA, 21 nt, synthetic construct
  source 1..21: mol_type = other RNA
gaaaattttcttttgtgggta

SEQ ID NO: 85567 - RNA, 21 nt, synthetic construct
  source 1..21: mol_type = other RNA
gaaaatttttgtctggaacac

SEQ ID NO: 85568 - RNA, 21 nt, synthetic construct
  source 1..21: mol_type = other RNA
gaaacaacaacaacaaaatac

SEQ ID NO: 85569 - RNA, 21 nt, synthetic construct
  source 1..21: mol_type = other RNA
gaaacaacctaaatgtccatc

SEQ ID NO: 85570 - RNA, 21 nt, synthetic construct
  source 1..21: mol_type = other RNA
gaaacaactcaaacgtccatc

SEQ ID NO: 85571 - RNA, 21 nt, synthetic construct
  source 1..21: mol_type = other RNA
gaaacaataaatttctgttgc

SEQ ID NO: 85572 - RNA, 21 nt, synthetic construct
  source 1..21: mol_type = other RNA
gaaacaatactttagacatgg

SEQ ID NO: 85573 - RNA, 21 nt, synthetic construct
  source 1..21: mol_type = other RNA
gaaacaatcgcaatccaaaat

SEQ ID NO: 85574 - RNA, 21 nt, synthetic construct
  source 1..21: mol_type = other RNA
gaaacacactcgtgtatgatt

SEQ ID NO: 85575 - RNA, 21 nt, synthetic construct
  source 1..21: mol_type = other RNA
gaaacacaggactgtgtgtgt

SEQ ID NO: 85576 - RNA, 21 nt, synthetic construct
  source 1..21: mol_type = other RNA
gaaacaccaacacaaagcctt

SEQ ID NO: 85577 - RNA, 21 nt, synthetic construct
  source 1..21: mol_type = other RNA
gaaacactataaatcagtaag

SEQ ID NO: 85578 - RNA, 21 nt, synthetic construct
  source 1..21: mol_type = other RNA
gaaacactcataccaggtttt

SEQ ID NO: 85579 - RNA, 21 nt, synthetic construct
  source 1..21: mol_type = other RNA
gaaacactgctcagaagcttt

SEQ ID NO: 85580 - RNA, 21 nt, synthetic construct
  source 1..21: mol_type = other RNA
gaaacacttgtgtaactacca

SEQ ID NO: 85581 - RNA, 21 nt, synthetic construct
  source 1..21: mol_type = other RNA
gaaacagaaaaatccatctta

SEQ ID NO: 85582 - RNA, 21 nt, synthetic construct
  source 1..21: mol_type = other RNA
gaaacagagttttccaataag

SEQ ID NO: 85583 - RNA, 21 nt, synthetic construct
  source 1..21: mol_type = other RNA
gaaacaggattacaatgtaag

SEQ ID NO: 85584 - RNA, 21 nt, synthetic construct
  source 1..21: mol_type = other RNA
gaaacagggttacagtatagg

SEQ ID NO: 85585 - RNA, 21 nt, synthetic construct
  source 1..21: mol_type = other RNA
gaaacagtaattagttacatg

SEQ ID NO: 85586 - RNA, 21 nt, synthetic construct
  source 1..21: mol_type = other RNA
gaaacatacatgttcagttat

SEQ ID NO: 85587 - RNA, 21 nt, synthetic construct
  source 1..21: mol_type = other RNA
gaaacatcccaagtgcccatt

SEQ ID NO: 85588 - RNA, 21 nt, synthetic construct
  source 1..21: mol_type = other RNA
gaaacatggcttagaaatgaa

SEQ ID NO: 85589 - RNA, 21 nt, synthetic construct
  source 1..21: mol_type = other RNA
gaaacatggtaatttgtccat

SEQ ID NO: 85590 - RNA, 21 nt, synthetic construct
  source 1..21: mol_type = other RNA
gaaaccaagagcatagacttt

SEQ ID NO: 85591 - RNA, 21 nt, synthetic construct
  source 1..21: mol_type = other RNA
gaaaccaagcaagtaaaagaa

SEQ ID NO: 85592 - RNA, 21 nt, synthetic construct
  source 1..21: mol_type = other RNA
gaaaccacagagcctaaaata

SEQ ID NO: 85593 - RNA, 21 nt, synthetic construct
  source 1..21: mol_type = other RNA
gaaaccagtgctctcccccga

SEQ ID NO: 85594 - RNA, 21 nt, synthetic construct
  source 1..21: mol_type = other RNA
gaaaccagtgggtcagctagt

SEQ ID NO: 85595 - RNA, 21 nt, synthetic construct
  source 1..21: mol_type = other RNA
gaaaccatcgttcacactcgc

SEQ ID NO: 85596 - RNA, 21 nt, synthetic construct
  source 1..21: mol_type = other RNA
gaaaccatttaccccttaaat

SEQ ID NO: 85597 - RNA, 21 nt, synthetic construct
  source 1..21: mol_type = other RNA
gaaaccccagggatattttcg

SEQ ID NO: 85598 - RNA, 21 nt, synthetic construct
  source 1..21: mol_type = other RNA
gaaaccccgcatactgtgcag

SEQ ID NO: 85599 - RNA, 21 nt, synthetic construct
  source 1..21: mol_type = other RNA
gaaacccgctctgggtgcgtt

SEQ ID NO: 85600 - RNA, 21 nt, synthetic construct
  source 1..21: mol_type = other RNA
gaaaccctcacgaaagcggtc

SEQ ID NO: 85601 - RNA, 21 nt, synthetic construct
  source 1..21: mol_type = other RNA
gaaaccctgtacccattagac

SEQ ID NO: 85602 - RNA, 21 nt, synthetic construct
  source 1..21: mol_type = other RNA
gaaacctaagaaaggtctagt

SEQ ID NO: 85603 - RNA, 21 nt, synthetic construct
  source 1..21: mol_type = other RNA
gaaacctgccatggtgttaaa

SEQ ID NO: 85604 - RNA, 21 nt, synthetic construct
  source 1..21: mol_type = other RNA
gaaaccttactgtaatattgt

SEQ ID NO: 85605 - RNA, 21 nt, synthetic construct
  source 1..21: mol_type = other RNA
gaaaccttggtgtgcttctga

SEQ ID NO: 85606 - RNA, 21 nt, synthetic construct
  source 1..21: mol_type = other RNA
gaaacctttctcaaagcccac

SEQ ID NO: 85607 - RNA, 21 nt, synthetic construct
  source 1..21: mol_type = other RNA
gaaaccttttgtagaccctgt

SEQ ID NO: 85608 - RNA, 21 nt, synthetic construct
  source 1..21: mol_type = other RNA
gaaacgaccttgctcattcat

SEQ ID NO: 85609 - RNA, 21 nt, synthetic construct
  source 1..21: mol_type = other RNA
gaaacgatgcattccagattg

SEQ ID NO: 85610 - RNA, 21 nt, synthetic construct
  source 1..21: mol_type = other RNA
gaaactaaatgtgagcattta

SEQ ID NO: 85611 - RNA, 21 nt, synthetic construct
  source 1..21: mol_type = other RNA
gaaactacaattactgtacaa

SEQ ID NO: 85612 - RNA, 21 nt, synthetic construct
  source 1..21: mol_type = other RNA
gaaactacctagaaaaacacc

SEQ ID NO: 85613 - RNA, 21 nt, synthetic construct
  source 1..21: mol_type = other RNA
gaaactagaaaagataagtag

SEQ ID NO: 85614 - RNA, 21 nt, synthetic construct
  source 1..21: mol_type = other RNA
gaaactatccaacatgccagc

SEQ ID NO: 85615 - RNA, 21 nt, synthetic construct
  source 1..21: mol_type = other RNA
gaaactcaaacccaaattaaa

SEQ ID NO: 85616 - RNA, 21 nt, synthetic construct
  source 1..21: mol_type = other RNA
gaaactcaatgttggttagtg

SEQ ID NO: 85617 - RNA, 21 nt, synthetic construct
  source 1..21: mol_type = other RNA
gaaactctggctcagaaacaa

SEQ ID NO: 85618 - RNA, 21 nt, synthetic construct
  source 1..21: mol_type = other RNA
gaaactgacaggactccacag

SEQ ID NO: 85619 - RNA, 21 nt, synthetic construct
  source 1..21: mol_type = other RNA
gaaactgagcatcccagaggt

SEQ ID NO: 85620 - RNA, 21 nt, synthetic construct
  source 1..21: mol_type = other RNA
gaaactggaatcaatccagac

SEQ ID NO: 85621 - RNA, 21 nt, synthetic construct
  source 1..21: mol_type = other RNA
gaaactggtgaactgggtgta

SEQ ID NO: 85622 - RNA, 21 nt, synthetic construct
  source 1..21: mol_type = other RNA
gaaacttatttccagggggta

SEQ ID NO: 85623 - RNA, 21 nt, synthetic construct
  source 1..21: mol_type = other RNA
gaaacttccaaccatcttctt

SEQ ID NO: 85624 - RNA, 21 nt, synthetic construct
  source 1..21: mol_type = other RNA
gaaacttccagaaacttccaa

SEQ ID NO: 85625 - RNA, 21 nt, synthetic construct
  source 1..21: mol_type = other RNA
gaaacttcttctgttggagag

SEQ ID NO: 85626 - RNA, 21 nt, synthetic construct
  source 1..21: mol_type = other RNA
gaaacttgaatactcgtgtgt

SEQ ID NO: 85627 - RNA, 21 nt, synthetic construct
  source 1..21: mol_type = other RNA
gaaacttgccatcttgcataa

SEQ ID NO: 85628 - RNA, 21 nt, synthetic construct
  source 1..21: mol_type = other RNA
gaaacttggattgtgtgtcga

SEQ ID NO: 85629 - RNA, 21 nt, synthetic construct
  source 1..21: mol_type = other RNA
gaaactttgcattcctgaaat

SEQ ID NO: 85630 - RNA, 21 nt, synthetic construct
  source 1..21: mol_type = other RNA
gaaagaaaaactgaactacag

SEQ ID NO: 85631 - RNA, 21 nt, synthetic construct
  source 1..21: mol_type = other RNA
gaaagaaaatccaaaagcctc

SEQ ID NO: 85632 - RNA, 21 nt, synthetic construct
  source 1..21: mol_type = other RNA
gaaagaaagaaggccatttga

SEQ ID NO: 85633 - RNA, 21 nt, synthetic construct
  source 1..21: mol_type = other RNA
gaaagaaatagaactgtcaca

SEQ ID NO: 85634 - RNA, 21 nt, synthetic construct
  source 1..21: mol_type = other RNA
gaaagaactgaaagcagggac

SEQ ID NO: 85635 - RNA, 21 nt, synthetic construct
  source 1..21: mol_type = other RNA
gaaagaaggccatttgattgc

SEQ ID NO: 85636 - RNA, 21 nt, synthetic construct
  source 1..21: mol_type = other RNA
gaaagaagtaatttcttctga

SEQ ID NO: 85637 - RNA, 21 nt, synthetic construct
  source 1..21: mol_type = other RNA
gaaagacagacctctattaaa

SEQ ID NO: 85638 - RNA, 21 nt, synthetic construct
  source 1..21: mol_type = other RNA
gaaagacagggagagagagag

SEQ ID NO: 85639 - RNA, 21 nt, synthetic construct
  source 1..21: mol_type = other RNA
gaaagacaggtagacatgagt

SEQ ID NO: 85640 - RNA, 21 nt, synthetic construct
  source 1..21: mol_type = other RNA
gaaagaccaagagtgtggctt

SEQ ID NO: 85641 - RNA, 21 nt, synthetic construct
  source 1..21: mol_type = other RNA
gaaagaccggggactgcaaca

SEQ ID NO: 85642 - RNA, 21 nt, synthetic construct
  source 1..21: mol_type = other RNA
gaaagagaaagaagtaatttc

SEQ ID NO: 85643 - RNA, 21 nt, synthetic construct
  source 1..21: mol_type = other RNA
gaaagagaatagcagaaacac

SEQ ID NO: 85644 - RNA, 21 nt, synthetic construct
  source 1..21: mol_type = other RNA
gaaagagagagacaagcacag

SEQ ID NO: 85645 - RNA, 21 nt, synthetic construct
  source 1..21: mol_type = other RNA
gaaagagagaggggggaagct

SEQ ID NO: 85646 - RNA, 21 nt, synthetic construct
  source 1..21: mol_type = other RNA
gaaagagccagcctgatgatg

SEQ ID NO: 85647 - RNA, 21 nt, synthetic construct
  source 1..21: mol_type = other RNA
gaaagaggagacattacaatt

SEQ ID NO: 85648 - RNA, 21 nt, synthetic construct
  source 1..21: mol_type = other RNA
gaaagagggaagtactgagtc

SEQ ID NO: 85649 - RNA, 21 nt, synthetic construct
  source 1..21: mol_type = other RNA
gaaagagttgggtttttgaaa

SEQ ID NO: 85650 - RNA, 21 nt, synthetic construct
  source 1..21: mol_type = other RNA
gaaagataaatcagaaactga

SEQ ID NO: 85651 - RNA, 21 nt, synthetic construct
  source 1..21: mol_type = other RNA
gaaagataaatccaacgaccg

SEQ ID NO: 85652 - RNA, 21 nt, synthetic construct
  source 1..21: mol_type = other RNA
gaaagatcatttagtaagtgt

SEQ ID NO: 85653 - RNA, 21 nt, synthetic construct
  source 1..21: mol_type = other RNA
gaaagatctcaaacagcctaa

SEQ ID NO: 85654 - RNA, 21 nt, synthetic construct
  source 1..21: mol_type = other RNA
gaaagatgaagtatagaaagg

SEQ ID NO: 85655 - RNA, 21 nt, synthetic construct
  source 1..21: mol_type = other RNA
gaaagatgtcttttaacttgc

SEQ ID NO: 85656 - RNA, 21 nt, synthetic construct
  source 1..21: mol_type = other RNA
gaaagattaatccttgtggtc

SEQ ID NO: 85657 - RNA, 21 nt, synthetic construct
  source 1..21: mol_type = other RNA
gaaagcacataaaaaaggaat

SEQ ID NO: 85658 - RNA, 21 nt, synthetic construct
  source 1..21: mol_type = other RNA
gaaagcaccagggcctctgaa

SEQ ID NO: 85659 - RNA, 21 nt, synthetic construct
  source 1..21: mol_type = other RNA
gaaagcacgtttgatctggtc

SEQ ID NO: 85660 - RNA, 21 nt, synthetic construct
  source 1..21: mol_type = other RNA
gaaagcagggactcccatatc

SEQ ID NO: 85661 - RNA, 21 nt, synthetic construct
  source 1..21: mol_type = other RNA
gaaagcaggtcatgacttttt

SEQ ID NO: 85662 - RNA, 21 nt, synthetic construct
  source 1..21: mol_type = other RNA
gaaagcaggttcattttaata

SEQ ID NO: 85663 - RNA, 21 nt, synthetic construct
  source 1..21: mol_type = other RNA
gaaagcaggttgcattaatgc

SEQ ID NO: 85664 - RNA, 21 nt, synthetic construct
  source 1..21: mol_type = other RNA
gaaagcatcagagctttgtta

SEQ ID NO: 85665 - RNA, 21 nt, synthetic construct
  source 1..21: mol_type = other RNA
gaaagcccagccgcggactcc

SEQ ID NO: 85666 - RNA, 21 nt, synthetic construct
  source 1..21: mol_type = other RNA
gaaagcccttgagtatttttg

SEQ ID NO: 85667 - RNA, 21 nt, synthetic construct
  source 1..21: mol_type = other RNA
gaaagcctcttcagaagagga

SEQ ID NO: 85668 - RNA, 21 nt, synthetic construct
  source 1..21: mol_type = other RNA
gaaagcctggctttagatggt

SEQ ID NO: 85669 - RNA, 21 nt, synthetic construct
  source 1..21: mol_type = other RNA
gaaagcctgtgacagtatgtc

SEQ ID NO: 85670 - RNA, 21 nt, synthetic construct
  source 1..21: mol_type = other RNA
gaaagcctttattttttcttc

SEQ ID NO: 85671 - RNA, 21 nt, synthetic construct
  source 1..21: mol_type = other RNA
gaaagcggtcaacgcacccag

SEQ ID NO: 85672 - RNA, 21 nt, synthetic construct
  source 1..21: mol_type = other RNA
gaaagctagaagacctcaaat

SEQ ID NO: 85673 - RNA, 21 nt, synthetic construct
  source 1..21: mol_type = other RNA
gaaagctcaggaccagatgac

SEQ ID NO: 85674 - RNA, 21 nt, synthetic construct
  source 1..21: mol_type = other RNA
gaaagctcccaatgcttgaag

SEQ ID NO: 85675 - RNA, 21 nt, synthetic construct
  source 1..21: mol_type = other RNA
gaaagctctcaattaatgccc

SEQ ID NO: 85676 - RNA, 21 nt, synthetic construct
  source 1..21: mol_type = other RNA
gaaagctggactcattccaat

SEQ ID NO: 85677 - RNA, 21 nt, synthetic construct
  source 1..21: mol_type = other RNA
gaaagctgtggatgttggtga

SEQ ID NO: 85678 - RNA, 21 nt, synthetic construct
  source 1..21: mol_type = other RNA
gaaagcttctgagcagtgttt

SEQ ID NO: 85679 - RNA, 21 nt, synthetic construct
  source 1..21: mol_type = other RNA
gaaaggaaatgagtgtatgca

SEQ ID NO: 85680 - RNA, 21 nt, synthetic construct
  source 1..21: mol_type = other RNA
gaaaggaatccggctttatga

SEQ ID NO: 85681 - RNA, 21 nt, synthetic construct
  source 1..21: mol_type = other RNA
gaaaggaattgtaatcacagt

SEQ ID NO: 85682 - RNA, 21 nt, synthetic construct
  source 1..21: mol_type = other RNA
gaaaggacttcagtccttacc

SEQ ID NO: 85683 - RNA, 21 nt, synthetic construct
  source 1..21: mol_type = other RNA
gaaaggacttgatctaaaatg

SEQ ID NO: 85684 - RNA, 21 nt, synthetic construct
  source 1..21: mol_type = other RNA
gaaaggagaccagttaggaag

SEQ ID NO: 85685 - RNA, 21 nt, synthetic construct
  source 1..21: mol_type = other RNA
gaaaggagatactggccatgt

SEQ ID NO: 85686 - RNA, 21 nt, synthetic construct
  source 1..21: mol_type = other RNA
gaaaggagggactgaaaccag

SEQ ID NO: 85687 - RNA, 21 nt, synthetic construct
  source 1..21: mol_type = other RNA
gaaaggagttcagctttaaag

SEQ ID NO: 85688 - RNA, 21 nt, synthetic construct
  source 1..21: mol_type = other RNA
gaaaggatactgagaacagaa

SEQ ID NO: 85689 - RNA, 21 nt, synthetic construct
  source 1..21: mol_type = other RNA
gaaaggatgaccttgacaata

SEQ ID NO: 85690 - RNA, 21 nt, synthetic construct
  source 1..21: mol_type = other RNA
gaaaggatggtttgattgttc

SEQ ID NO: 85691 - RNA, 21 nt, synthetic construct
  source 1..21: mol_type = other RNA
gaaaggcaaaggaaaaaactt

SEQ ID NO: 85692 - RNA, 21 nt, synthetic construct
  source 1..21: mol_type = other RNA
gaaaggcatgaaattcttggg

SEQ ID NO: 85693 - RNA, 21 nt, synthetic construct
  source 1..21: mol_type = other RNA
gaaaggcccaaaaagttttta

SEQ ID NO: 85694 - RNA, 21 nt, synthetic construct
  source 1..21: mol_type = other RNA
gaaaggcgaagcggcagggcc

SEQ ID NO: 85695 - RNA, 21 nt, synthetic construct
  source 1..21: mol_type = other RNA
gaaaggcgtcggggctgctgg

SEQ ID NO: 85696 - RNA, 21 nt, synthetic construct
  source 1..21: mol_type = other RNA
gaaagggattctggccaaatc

SEQ ID NO: 85697 - RNA, 21 nt, synthetic construct
  source 1..21: mol_type = other RNA
gaaaggggaaggaattttcag

SEQ ID NO: 85698 - RNA, 21 nt, synthetic construct
  source 1..21: mol_type = other RNA
gaaaggggccaggtgtggagg

SEQ ID NO: 85699 - RNA, 21 nt, synthetic construct
  source 1..21: mol_type = other RNA
gaaagggtagagcactttcgt

SEQ ID NO: 85700 - RNA, 21 nt, synthetic construct
  source 1..21: mol_type = other RNA
gaaagggtagctttgatgccc

SEQ ID NO: 85701 - RNA, 21 nt, synthetic construct
  source 1..21: mol_type = other RNA
gaaagggtgtgtgaatggaaa

SEQ ID NO: 85702 - RNA, 21 nt, synthetic construct
  source 1..21: mol_type = other RNA
gaaaggtacgacgctcttgtt

SEQ ID NO: 85703 - RNA, 21 nt, synthetic construct
  source 1..21: mol_type = other RNA
gaaaggtctagtgtgcatgtg

SEQ ID NO: 85704 - RNA, 21 nt, synthetic construct
  source 1..21: mol_type = other RNA
gaaaggtctctctctgtcacc

SEQ ID NO: 85705 - RNA, 21 nt, synthetic construct
  source 1..21: mol_type = other RNA
gaaaggtttcttcactcttaa

SEQ ID NO: 85706 - RNA, 21 nt, synthetic construct
  source 1..21: mol_type = other RNA
gaaagtaaagatagcccctta

SEQ ID NO: 85707 - RNA, 21 nt, synthetic construct
  source 1..21: mol_type = other RNA
gaaagtaactgttggcaagga

SEQ ID NO: 85708 - RNA, 21 nt, synthetic construct
  source 1..21: mol_type = other RNA
gaaagtagaggactgcctatt

SEQ ID NO: 85709 - RNA, 21 nt, synthetic construct
  source 1..21: mol_type = other RNA
gaaagtagattagcttttacg

SEQ ID NO: 85710 - RNA, 21 nt, synthetic construct
  source 1..21: mol_type = other RNA
gaaagtattaaaagcacaagc

SEQ ID NO: 85711 - RNA, 21 nt, synthetic construct
  source 1..21: mol_type = other RNA
gaaagtattcccaagatcata

SEQ ID NO: 85712 - RNA, 21 nt, synthetic construct
  source 1..21: mol_type = other RNA
gaaagtcagctaattttctaa

SEQ ID NO: 85713 - RNA, 21 nt, synthetic construct
  source 1..21: mol_type = other RNA
gaaagtctccctaaccaggcc

SEQ ID NO: 85714 - RNA, 21 nt, synthetic construct
  source 1..21: mol_type = other RNA
gaaagtgaagcccagagaggc

SEQ ID NO: 85715 - RNA, 21 nt, synthetic construct
  source 1..21: mol_type = other RNA
gaaagtgacagatgagaaata

SEQ ID NO: 85716 - RNA, 21 nt, synthetic construct
  source 1..21: mol_type = other RNA
gaaagtgccagccacccttgc

SEQ ID NO: 85717 - RNA, 21 nt, synthetic construct
  source 1..21: mol_type = other RNA
gaaagtgctctaccctttcca

SEQ ID NO: 85718 - RNA, 21 nt, synthetic construct
  source 1..21: mol_type = other RNA
gaaagtggactatgtaggcac

SEQ ID NO: 85719 - RNA, 21 nt, synthetic construct
  source 1..21: mol_type = other RNA
gaaagtggagaattactaaaa

SEQ ID NO: 85720 - RNA, 21 nt, synthetic construct
  source 1..21: mol_type = other RNA
gaaagtgtgcttgggctccct

SEQ ID NO: 85721 - RNA, 21 nt, synthetic construct
  source 1..21: mol_type = other RNA
gaaagttagtgtctaatgggt

SEQ ID NO: 85722 - RNA, 21 nt, synthetic construct
  source 1..21: mol_type = other RNA
gaaagttcaaatgaggctttt

SEQ ID NO: 85723 - RNA, 21 nt, synthetic construct
  source 1..21: mol_type = other RNA
gaaagttcagaataccagaga

SEQ ID NO: 85724 - RNA, 21 nt, synthetic construct
  source 1..21: mol_type = other RNA
gaaagttttgcagttggggac

SEQ ID NO: 85725 - RNA, 21 nt, synthetic construct
  source 1..21: mol_type = other RNA
gaaataaaacatggccagtat

SEQ ID NO: 85726 - RNA, 21 nt, synthetic construct
  source 1..21: mol_type = other RNA
gaaataaaacatgttgtgtag

SEQ ID NO: 85727 - RNA, 21 nt, synthetic construct
  source 1..21: mol_type = other RNA
gaaataaacgacaccagaact

SEQ ID NO: 85728 - RNA, 21 nt, synthetic construct
  source 1..21: mol_type = other RNA
gaaataaatcctcacatgttt

SEQ ID NO: 85729 - RNA, 21 nt, synthetic construct
  source 1..21: mol_type = other RNA
gaaataactttaatcaccagg

SEQ ID NO: 85730 - RNA, 21 nt, synthetic construct
  source 1..21: mol_type = other RNA
gaaataagaaggtttgtagag

SEQ ID NO: 85731 - RNA, 21 nt, synthetic construct
  source 1..21: mol_type = other RNA
gaaataagtttcatggacttc

SEQ ID NO: 85732 - RNA, 21 nt, synthetic construct
  source 1..21: mol_type = other RNA
gaaataatcattgttaggtgc

SEQ ID NO: 85733 - RNA, 21 nt, synthetic construct
  source 1..21: mol_type = other RNA
gaaataatttccctcagaatt

SEQ ID NO: 85734 - RNA, 21 nt, synthetic construct
  source 1..21: mol_type = other RNA
gaaataatttggttatgcgaa

SEQ ID NO: 85735 - RNA, 21 nt, synthetic construct
  source 1..21: mol_type = other RNA
gaaatacaaaaagtgatacca

SEQ ID NO: 85736 - RNA, 21 nt, synthetic construct
  source 1..21: mol_type = other RNA
gaaatacaatgtgagccacat

SEQ ID NO: 85737 - RNA, 21 nt, synthetic construct
  source 1..21: mol_type = other RNA
gaaatacagaccgatggaaca

SEQ ID NO: 85738 - RNA, 21 nt, synthetic construct
  source 1..21: mol_type = other RNA
gaaatacctgcaggttgatac

SEQ ID NO: 85739 - RNA, 21 nt, synthetic construct
  source 1..21: mol_type = other RNA
gaaatactcaaactatgctta

SEQ ID NO: 85740 - RNA, 21 nt, synthetic construct
  source 1..21: mol_type = other RNA
gaaatacttgaacattctgta

SEQ ID NO: 85741 - RNA, 21 nt, synthetic construct
  source 1..21: mol_type = other RNA
gaaatacttggacaggggaca

SEQ ID NO: 85742 - RNA, 21 nt, synthetic construct
  source 1..21: mol_type = other RNA
gaaatagaaaacttgagcaga

SEQ ID NO: 85743 - RNA, 21 nt, synthetic construct
  source 1..21: mol_type = other RNA
gaaatagaactgtcacaattc

SEQ ID NO: 85744 - RNA, 21 nt, synthetic construct
  source 1..21: mol_type = other RNA
gaaatagactcccaacttata

SEQ ID NO: 85745 - RNA, 21 nt, synthetic construct
  source 1..21: mol_type = other RNA
gaaatagatgcctagaaagga

SEQ ID NO: 85746 - RNA, 21 nt, synthetic construct
  source 1..21: mol_type = other RNA
gaaatagtagttgctcagaaa

SEQ ID NO: 85747 - RNA, 21 nt, synthetic construct
  source 1..21: mol_type = other RNA
gaaatagttggtcagaaaaat

SEQ ID NO: 85748 - RNA, 21 nt, synthetic construct
  source 1..21: mol_type = other RNA
gaaatataaaaagcctctgtg

SEQ ID NO: 85749 - RNA, 21 nt, synthetic construct
  source 1..21: mol_type = other RNA
gaaatataccttatgtgaaag

SEQ ID NO: 85750 - RNA, 21 nt, synthetic construct
  source 1..21: mol_type = other RNA
gaaatatctccctcacagtcc

SEQ ID NO: 85751 - RNA, 21 nt, synthetic construct
  source 1..21: mol_type = other RNA
gaaatatgaaccacactgaca

SEQ ID NO: 85752 - RNA, 21 nt, synthetic construct
  source 1..21: mol_type = other RNA
gaaatatggtcactgctgatg

SEQ ID NO: 85753 - RNA, 21 nt, synthetic construct
  source 1..21: mol_type = other RNA
gaaatcaaatgggaaattaga

SEQ ID NO: 85754 - RNA, 21 nt, synthetic construct
  source 1..21: mol_type = other RNA
gaaatcacacaatcttgagac

SEQ ID NO: 85755 - RNA, 21 nt, synthetic construct
  source 1..21: mol_type = other RNA
gaaatcacaggtttaggtttt

SEQ ID NO: 85756 - RNA, 21 nt, synthetic construct
  source 1..21: mol_type = other RNA
gaaatcagaacttgacaagta

SEQ ID NO: 85757 - RNA, 21 nt, synthetic construct
  source 1..21: mol_type = other RNA
gaaatcaggaagtatgagtct

SEQ ID NO: 85758 - RNA, 21 nt, synthetic construct
  source 1..21: mol_type = other RNA
gaaatcatacacgagtgtgtt

SEQ ID NO: 85759 - RNA, 21 nt, synthetic construct
  source 1..21: mol_type = other RNA
gaaatcattcaggacactgga

SEQ ID NO: 85760 - RNA, 21 nt, synthetic construct
  source 1..21: mol_type = other RNA
gaaatcccctttagtgttctg

SEQ ID NO: 85761 - RNA, 21 nt, synthetic construct
  source 1..21: mol_type = other RNA
gaaatcctagccccaaatacc

SEQ ID NO: 85762 - RNA, 21 nt, synthetic construct
  source 1..21: mol_type = other RNA
gaaatcggaactcctgtatgc

SEQ ID NO: 85763 - RNA, 21 nt, synthetic construct
  source 1..21: mol_type = other RNA
gaaatcgggagtaacagacct

SEQ ID NO: 85764 - RNA, 21 nt, synthetic construct
  source 1..21: mol_type = other RNA
gaaatctaaatgtagatcaag

SEQ ID NO: 85765 - RNA, 21 nt, synthetic construct
  source 1..21: mol_type = other RNA
gaaatctaccaaacattgaag

SEQ ID NO: 85766 - RNA, 21 nt, synthetic construct
  source 1..21: mol_type = other RNA
gaaatctaggcatataataag

SEQ ID NO: 85767 - RNA, 21 nt, synthetic construct
  source 1..21: mol_type = other RNA
gaaatctgatttgtttagtag

SEQ ID NO: 85768 - RNA, 21 nt, synthetic construct
  source 1..21: mol_type = other RNA
gaaatctgcatccaaaaggga

SEQ ID NO: 85769 - RNA, 21 nt, synthetic construct
  source 1..21: mol_type = other RNA
gaaatcttccagaaggagaaa

SEQ ID NO: 85770 - RNA, 21 nt, synthetic construct
  source 1..21: mol_type = other RNA
gaaatcttgaagatggcaaac

SEQ ID NO: 85771 - RNA, 21 nt, synthetic construct
  source 1..21: mol_type = other RNA
gaaatgaaatggcccttaact

SEQ ID NO: 85772 - RNA, 21 nt, synthetic construct
  source 1..21: mol_type = other RNA
gaaatgaaccaaacttggttt

SEQ ID NO: 85773 - RNA, 21 nt, synthetic construct
  source 1..21: mol_type = other RNA
gaaatgaagatggcctccctc

SEQ ID NO: 85774 - RNA, 21 nt, synthetic construct
  source 1..21: mol_type = other RNA
gaaatgaagtattgatttgac

SEQ ID NO: 85775 - RNA, 21 nt, synthetic construct
  source 1..21: mol_type = other RNA
gaaatgacaagtaaatgcaat

SEQ ID NO: 85776 - RNA, 21 nt, synthetic construct
  source 1..21: mol_type = other RNA
gaaatgagtgagccacagcta

SEQ ID NO: 85777 - RNA, 21 nt, synthetic construct
  source 1..21: mol_type = other RNA
gaaatgagtgtatgcagggaa

SEQ ID NO: 85778 - RNA, 21 nt, synthetic construct
  source 1..21: mol_type = other RNA
gaaatgagttccagtcctttg

SEQ ID NO: 85779 - RNA, 21 nt, synthetic construct
  source 1..21: mol_type = other RNA
gaaatgatacctcatttatac

SEQ ID NO: 85780 - RNA, 21 nt, synthetic construct
  source 1..21: mol_type = other RNA
gaaatgatctttgaataaagg

SEQ ID NO: 85781 - RNA, 21 nt, synthetic construct
  source 1..21: mol_type = other RNA
gaaatgatttcaagtaacact

SEQ ID NO: 85782 - RNA, 21 nt, synthetic construct
  source 1..21: mol_type = other RNA
gaaatgcacttagcgctgatg

SEQ ID NO: 85783 - RNA, 21 nt, synthetic construct
  source 1..21: mol_type = other RNA
gaaatgctgtaactgacttca

SEQ ID NO: 85784 - RNA, 21 nt, synthetic construct
  source 1..21: mol_type = other RNA
gaaatggacagcacattaaat

SEQ ID NO: 85785 - RNA, 21 nt, synthetic construct
  source 1..21: mol_type = other RNA
gaaatggacagcggggatggt

SEQ ID NO: 85786 - RNA, 21 nt, synthetic construct
  source 1..21: mol_type = other RNA
gaaatggagggccagaggagg

SEQ ID NO: 85787 - RNA, 21 nt, synthetic construct
  source 1..21: mol_type = other RNA
gaaatggcccttaacttcacc

SEQ ID NO: 85788 - RNA, 21 nt, synthetic construct
  source 1..21: mol_type = other RNA
gaaatggcttaaggaaataaa

SEQ ID NO: 85789 - RNA, 21 nt, synthetic construct
  source 1..21: mol_type = other RNA
gaaatgggtttaaaagagtgc

SEQ ID NO: 85790 - RNA, 21 nt, synthetic construct
  source 1..21: mol_type = other RNA
gaaatgtaaattcctaactca

SEQ ID NO: 85791 - RNA, 21 nt, synthetic construct
  source 1..21: mol_type = other RNA
gaaatgtctggtttgctttgg

SEQ ID NO: 85792 - RNA, 21 nt, synthetic construct
  source 1..21: mol_type = other RNA
gaaatgtgaacagacagacat

SEQ ID NO: 85793 - RNA, 21 nt, synthetic construct
  source 1..21: mol_type = other RNA
gaaatgtggaagcagaactaa

SEQ ID NO: 85794 - RNA, 21 nt, synthetic construct
  source 1..21: mol_type = other RNA
gaaatgtggagataaagagca

SEQ ID NO: 85795 - RNA, 21 nt, synthetic construct
  source 1..21: mol_type = other RNA
gaaatgtggtttttggttcac

SEQ ID NO: 85796 - RNA, 21 nt, synthetic construct
  source 1..21: mol_type = other RNA
gaaatgttaacaattggtgaa

SEQ ID NO: 85797 - RNA, 21 nt, synthetic construct
  source 1..21: mol_type = other RNA
gaaattaaacacacccttggt

SEQ ID NO: 85798 - RNA, 21 nt, synthetic construct
  source 1..21: mol_type = other RNA
gaaattacttctttctctttc

SEQ ID NO: 85799 - RNA, 21 nt, synthetic construct
  source 1..21: mol_type = other RNA
gaaattagaaatgtggaagca

SEQ ID NO: 85800 - RNA, 21 nt, synthetic construct
  source 1..21: mol_type = other RNA
gaaattagaacatctggcagc

SEQ ID NO: 85801 - RNA, 21 nt, synthetic construct
  source 1..21: mol_type = other RNA
gaaattagctaagtatgcaga

SEQ ID NO: 85802 - RNA, 21 nt, synthetic construct
  source 1..21: mol_type = other RNA
gaaattagttccttttaaggg

SEQ ID NO: 85803 - RNA, 21 nt, synthetic construct
  source 1..21: mol_type = other RNA
gaaattataagcttcctctgg

SEQ ID NO: 85804 - RNA, 21 nt, synthetic construct
  source 1..21: mol_type = other RNA
gaaattatctgtgggttaaaa

SEQ ID NO: 85805 - RNA, 21 nt, synthetic construct
  source 1..21: mol_type = other RNA
gaaattatttccagcctttaa

SEQ ID NO: 85806 - RNA, 21 nt, synthetic construct
  source 1..21: mol_type = other RNA
gaaattcaacttggtaaaaag

SEQ ID NO: 85807 - RNA, 21 nt, synthetic construct
  source 1..21: mol_type = other RNA
gaaattctcaaatgaacaggt

SEQ ID NO: 85808 - RNA, 21 nt, synthetic construct
  source 1..21: mol_type = other RNA
gaaattctcattagttatctc

SEQ ID NO: 85809 - RNA, 21 nt, synthetic construct
  source 1..21: mol_type = other RNA
gaaattcttgggtgaataacc

SEQ ID NO: 85810 - RNA, 21 nt, synthetic construct
  source 1..21: mol_type = other RNA
gaaattgaccattccacgctg

SEQ ID NO: 85811 - RNA, 21 nt, synthetic construct
  source 1..21: mol_type = other RNA
gaaattgacttcactagatct

SEQ ID NO: 85812 - RNA, 21 nt, synthetic construct
  source 1..21: mol_type = other RNA
gaaattggaacctttgtccac

SEQ ID NO: 85813 - RNA, 21 nt, synthetic construct
  source 1..21: mol_type = other RNA
gaaattggacgggtggtaggg

SEQ ID NO: 85814 - RNA, 21 nt, synthetic construct
  source 1..21: mol_type = other RNA
gaaattgtcagaaaagatcag

SEQ ID NO: 85815 - RNA, 21 nt, synthetic construct
  source 1..21: mol_type = other RNA
gaaatttaaagacgttcagat

SEQ ID NO: 85816 - RNA, 21 nt, synthetic construct
  source 1..21: mol_type = other RNA
gaaatttaaggaccaggtatg

SEQ ID NO: 85817 - RNA, 21 nt, synthetic construct
  source 1..21: mol_type = other RNA
gaaatttgaggccctattcaa

SEQ ID NO: 85818 - RNA, 21 nt, synthetic construct
  source 1..21: mol_type = other RNA
gaaattttcaagggtgttttc

SEQ ID NO: 85819 - RNA, 21 nt, synthetic construct
  source 1..21: mol_type = other RNA
gaacaaaacaagaagaaaaag

SEQ ID NO: 85820 - RNA, 21 nt, synthetic construct
  source 1..21: mol_type = other RNA
gaacaaaatacctgggaatcc

SEQ ID NO: 85821 - RNA, 21 nt, synthetic construct
  source 1..21: mol_type = other RNA
gaacaaaatgtggtatatatg

SEQ ID NO: 85822 - RNA, 21 nt, synthetic construct
  source 1..21: mol_type = other RNA
gaacaaaatttttgcaaacca

SEQ ID NO: 85823 - RNA, 21 nt, synthetic construct
  source 1..21: mol_type = other RNA
gaacaaactcaagttccggtt

SEQ ID NO: 85824 - RNA, 21 nt, synthetic construct
  source 1..21: mol_type = other RNA
gaacaaactgcgtggtttatt

SEQ ID NO: 85825 - RNA, 21 nt, synthetic construct
  source 1..21: mol_type = other RNA
gaacaaaggcaggagcagtgt

SEQ ID NO: 85826 - RNA, 21 nt, synthetic construct
  source 1..21: mol_type = other RNA
gaacaaataacaccatagctg

SEQ ID NO: 85827 - RNA, 21 nt, synthetic construct
  source 1..21: mol_type = other RNA
gaacaacatggtagaccatat

SEQ ID NO: 85828 - RNA, 21 nt, synthetic construct
  source 1..21: mol_type = other RNA
gaacaacgctgtggctaacaa

SEQ ID NO: 85829 - RNA, 21 nt, synthetic construct
  source 1..21: mol_type = other RNA
gaacaagagcgtcgtaccttt

SEQ ID NO: 85830 - RNA, 21 nt, synthetic construct
  source 1..21: mol_type = other RNA
gaacaagttacaaacatatgc

SEQ ID NO: 85831 - RNA, 21 nt, synthetic construct
  source 1..21: mol_type = other RNA
gaacaatcaaaccatcctttc

SEQ ID NO: 85832 - RNA, 21 nt, synthetic construct
  source 1..21: mol_type = other RNA
gaacaatccttctaatcagta

SEQ ID NO: 85833 - RNA, 21 nt, synthetic construct
  source 1..21: mol_type = other RNA
gaacaatggaatagaagggag

SEQ ID NO: 85834 - RNA, 21 nt, synthetic construct
  source 1..21: mol_type = other RNA
gaacaattttctctcatgttg

SEQ ID NO: 85835 - RNA, 21 nt, synthetic construct
  source 1..21: mol_type = other RNA
gaacaattttgaatgtgttga

SEQ ID NO: 85836 - RNA, 21 nt, synthetic construct
  source 1..21: mol_type = other RNA
gaacacacaatttgaggtagc

SEQ ID NO: 85837 - RNA, 21 nt, synthetic construct
  source 1..21: mol_type = other RNA
gaacacacacctattcatagg

SEQ ID NO: 85838 - RNA, 21 nt, synthetic construct
  source 1..21: mol_type = other RNA
gaacacacattagcctagacc

SEQ ID NO: 85839 - RNA, 21 nt, synthetic construct
  source 1..21: mol_type = other RNA
gaacacactgctcttctattc

SEQ ID NO: 85840 - RNA, 21 nt, synthetic construct
  source 1..21: mol_type = other RNA
gaacacagtgttgagaaagca

SEQ ID NO: 85841 - RNA, 21 nt, synthetic construct
  source 1..21: mol_type = other RNA
gaacaccttgaacatgaacga

SEQ ID NO: 85842 - RNA, 21 nt, synthetic construct
  source 1..21: mol_type = other RNA
gaacactaaaggggatttcat

SEQ ID NO: 85843 - RNA, 21 nt, synthetic construct
  source 1..21: mol_type = other RNA
gaacactaagaagatggttgg

SEQ ID NO: 85844 - RNA, 21 nt, synthetic construct
  source 1..21: mol_type = other RNA
gaacactataagccaatatcc

SEQ ID NO: 85845 - RNA, 21 nt, synthetic construct
  source 1..21: mol_type = other RNA
gaacactctgcaattttaaat

SEQ ID NO: 85846 - RNA, 21 nt, synthetic construct
  source 1..21: mol_type = other RNA
gaacacttaacatgagatcta

SEQ ID NO: 85847 - RNA, 21 nt, synthetic construct
  source 1..21: mol_type = other RNA
gaacagaataaaaagtgactt

SEQ ID NO: 85848 - RNA, 21 nt, synthetic construct
  source 1..21: mol_type = other RNA
gaacagacagacatgcatgca

SEQ ID NO: 85849 - RNA, 21 nt, synthetic construct
  source 1..21: mol_type = other RNA
gaacagattcacgcacaggga

SEQ ID NO: 85850 - RNA, 21 nt, synthetic construct
  source 1..21: mol_type = other RNA
gaacagcaggggaaggcttcg

SEQ ID NO: 85851 - RNA, 21 nt, synthetic construct
  source 1..21: mol_type = other RNA
gaacagcattatcttaataac

SEQ ID NO: 85852 - RNA, 21 nt, synthetic construct
  source 1..21: mol_type = other RNA
gaacagcccctagcatgcagt

SEQ ID NO: 85853 - RNA, 21 nt, synthetic construct
  source 1..21: mol_type = other RNA
gaacagcctaaagtccacaga

SEQ ID NO: 85854 - RNA, 21 nt, synthetic construct
  source 1..21: mol_type = other RNA
gaacaggaagggagagatgcc

SEQ ID NO: 85855 - RNA, 21 nt, synthetic construct
  source 1..21: mol_type = other RNA
gaacaggacttttggtacaca

SEQ ID NO: 85856 - RNA, 21 nt, synthetic construct
  source 1..21: mol_type = other RNA
gaacaggagttaccataaaac

SEQ ID NO: 85857 - RNA, 21 nt, synthetic construct
  source 1..21: mol_type = other RNA
gaacaggcaaccttgggagaa

SEQ ID NO: 85858 - RNA, 21 nt, synthetic construct
  source 1..21: mol_type = other RNA
gaacaggccctttgttagtgc

SEQ ID NO: 85859 - RNA, 21 nt, synthetic construct
  source 1..21: mol_type = other RNA
gaacaggctcaatacctgaaa

SEQ ID NO: 85860 - RNA, 21 nt, synthetic construct
  source 1..21: mol_type = other RNA
gaacaggttcttcatcagtcc

SEQ ID NO: 85861 - RNA, 21 nt, synthetic construct
  source 1..21: mol_type = other RNA
gaacagtaaagtcactgtgga

SEQ ID NO: 85862 - RNA, 21 nt, synthetic construct
  source 1..21: mol_type = other RNA
gaacagtgtttacacacctga

SEQ ID NO: 85863 - RNA, 21 nt, synthetic construct
  source 1..21: mol_type = other RNA
gaacagtttagcaatccaagg

SEQ ID NO: 85864 - RNA, 21 nt, synthetic construct
  source 1..21: mol_type = other RNA
gaacataatctttggtgctga

SEQ ID NO: 85865 - RNA, 21 nt, synthetic construct
  source 1..21: mol_type = other RNA
gaacatataatccaactgcag

SEQ ID NO: 85866 - RNA, 21 nt, synthetic construct
  source 1..21: mol_type = other RNA
gaacatcacccagctcgacca

SEQ ID NO: 85867 - RNA, 21 nt, synthetic construct
  source 1..21: mol_type = other RNA
gaacatctggcagcaggggct

SEQ ID NO: 85868 - RNA, 21 nt, synthetic construct
  source 1..21: mol_type = other RNA
gaacatgaacgagaacaaaac

SEQ ID NO: 85869 - RNA, 21 nt, synthetic construct
  source 1..21: mol_type = other RNA
gaacatgattgggtcaacaaa

SEQ ID NO: 85870 - RNA, 21 nt, synthetic construct
  source 1..21: mol_type = other RNA
gaacatgggaatgcatatatc

SEQ ID NO: 85871 - RNA, 21 nt, synthetic construct
  source 1..21: mol_type = other RNA
gaacatggtttgatcccacta

SEQ ID NO: 85872 - RNA, 21 nt, synthetic construct
  source 1..21: mol_type = other RNA
gaacatgtatgtttctcattc

SEQ ID NO: 85873 - RNA, 21 nt, synthetic construct
  source 1..21: mol_type = other RNA
gaacattctgtagaagtaaat

SEQ ID NO: 85874 - RNA, 21 nt, synthetic construct
  source 1..21: mol_type = other RNA
gaacattggtttgaaatgatc

SEQ ID NO: 85875 - RNA, 21 nt, synthetic construct
  source 1..21: mol_type = other RNA
gaacatttatacagttggaac

SEQ ID NO: 85876 - RNA, 21 nt, synthetic construct
  source 1..21: mol_type = other RNA
gaacattttagctggggcagc

SEQ ID NO: 85877 - RNA, 21 nt, synthetic construct
  source 1..21: mol_type = other RNA
gaacattttgagttattgcat

SEQ ID NO: 85878 - RNA, 21 nt, synthetic construct
  source 1..21: mol_type = other RNA
gaaccaaaaaccacatttcat

SEQ ID NO: 85879 - RNA, 21 nt, synthetic construct
  source 1..21: mol_type = other RNA
gaaccaaacttggtttatttt

SEQ ID NO: 85880 - RNA, 21 nt, synthetic construct
  source 1..21: mol_type = other RNA
gaaccaattaccataaagtct

SEQ ID NO: 85881 - RNA, 21 nt, synthetic construct
  source 1..21: mol_type = other RNA
gaaccacactgacaggacaga

SEQ ID NO: 85882 - RNA, 21 nt, synthetic construct
  source 1..21: mol_type = other RNA
gaaccacctgggggagactgt

SEQ ID NO: 85883 - RNA, 21 nt, synthetic construct
  source 1..21: mol_type = other RNA
gaaccacgcatctggtctatc

SEQ ID NO: 85884 - RNA, 21 nt, synthetic construct
  source 1..21: mol_type = other RNA
gaaccactgagcacaatgcct

SEQ ID NO: 85885 - RNA, 21 nt, synthetic construct
  source 1..21: mol_type = other RNA
gaaccactgtaggccccgatg

SEQ ID NO: 85886 - RNA, 21 nt, synthetic construct
  source 1..21: mol_type = other RNA
gaaccatacagtgccttcagc

SEQ ID NO: 85887 - RNA, 21 nt, synthetic construct
  source 1..21: mol_type = other RNA
gaaccatattagagtgaaaag

SEQ ID NO: 85888 - RNA, 21 nt, synthetic construct
  source 1..21: mol_type = other RNA
gaaccatgtaacaggtttaat

SEQ ID NO: 85889 - RNA, 21 nt, synthetic construct
  source 1..21: mol_type = other RNA
gaaccattgtaaaccatatgg

SEQ ID NO: 85890 - RNA, 21 nt, synthetic construct
  source 1..21: mol_type = other RNA
gaacccaccaggaggcggagc

SEQ ID NO: 85891 - RNA, 21 nt, synthetic construct
  source 1..21: mol_type = other RNA
gaacccactgagcatttatat

SEQ ID NO: 85892 - RNA, 21 nt, synthetic construct
  source 1..21: mol_type = other RNA
gaacccaggaacagattcacg

SEQ ID NO: 85893 - RNA, 21 nt, synthetic construct
  source 1..21: mol_type = other RNA
gaacccaggaggcaaaggttg

SEQ ID NO: 85894 - RNA, 21 nt, synthetic construct
  source 1..21: mol_type = other RNA
gaacccagtgtctgctacagg

SEQ ID NO: 85895 - RNA, 21 nt, synthetic construct
  source 1..21: mol_type = other RNA
gaaccccagaaggttaactaa

SEQ ID NO: 85896 - RNA, 21 nt, synthetic construct
  source 1..21: mol_type = other RNA
gaacccgaggtgcacaaggga

SEQ ID NO: 85897 - RNA, 21 nt, synthetic construct
  source 1..21: mol_type = other RNA
gaaccctttgttatctgaacg

SEQ ID NO: 85898 - RNA, 21 nt, synthetic construct
  source 1..21: mol_type = other RNA
gaaccgactgaaaggaaatga

SEQ ID NO: 85899 - RNA, 21 nt, synthetic construct
  source 1..21: mol_type = other RNA
gaaccggaacttgagtttgtt

SEQ ID NO: 85900 - RNA, 21 nt, synthetic construct
  source 1..21: mol_type = other RNA
gaaccgtaacttcttttctta

SEQ ID NO: 85901 - RNA, 21 nt, synthetic construct
  source 1..21: mol_type = other RNA
gaacctctggaaaggacttga

SEQ ID NO: 85902 - RNA, 21 nt, synthetic construct
  source 1..21: mol_type = other RNA
gaacctgaaaaacggaggttg

SEQ ID NO: 85903 - RNA, 21 nt, synthetic construct
  source 1..21: mol_type = other RNA
gaacctgcatggtgtaaaata

SEQ ID NO: 85904 - RNA, 21 nt, synthetic construct
  source 1..21: mol_type = other RNA
gaacctgctttctactagtat

SEQ ID NO: 85905 - RNA, 21 nt, synthetic construct
  source 1..21: mol_type = other RNA
gaacctgttcatttgagaatt

SEQ ID NO: 85906 - RNA, 21 nt, synthetic construct
  source 1..21: mol_type = other RNA
gaaccttagaaatttaaggac

SEQ ID NO: 85907 - RNA, 21 nt, synthetic construct
  source 1..21: mol_type = other RNA
gaaccttcaccaaagatttac

SEQ ID NO: 85908 - RNA, 21 nt, synthetic construct
  source 1..21: mol_type = other RNA
gaaccttcatactattttcta

SEQ ID NO: 85909 - RNA, 21 nt, synthetic construct
  source 1..21: mol_type = other RNA
gaaccttcctcttcctcatcc

SEQ ID NO: 85910 - RNA, 21 nt, synthetic construct
  source 1..21: mol_type = other RNA
gaaccttgaagtacttcagcg

SEQ ID NO: 85911 - RNA, 21 nt, synthetic construct
  source 1..21: mol_type = other RNA
gaacctttgtccactgtcagt

SEQ ID NO: 85912 - RNA, 21 nt, synthetic construct
  source 1..21: mol_type = other RNA
gaacgaatgaaaacacaacat

SEQ ID NO: 85913 - RNA, 21 nt, synthetic construct
  source 1..21: mol_type = other RNA
gaacgagaacaaaacaagaag

SEQ ID NO: 85914 - RNA, 21 nt, synthetic construct
  source 1..21: mol_type = other RNA
gaacgatggtttctgacaccc

SEQ ID NO: 85915 - RNA, 21 nt, synthetic construct
  source 1..21: mol_type = other RNA
gaacgctaaattaaaggctgg

SEQ ID NO: 85916 - RNA, 21 nt, synthetic construct
  source 1..21: mol_type = other RNA
gaacggcttaacacctttgta

SEQ ID NO: 85917 - RNA, 21 nt, synthetic construct
  source 1..21: mol_type = other RNA
gaacgtctttaaatttcaaac

SEQ ID NO: 85918 - RNA, 21 nt, synthetic construct
  source 1..21: mol_type = other RNA
gaactaagaccccagtagaaa

SEQ ID NO: 85919 - RNA, 21 nt, synthetic construct
  source 1..21: mol_type = other RNA
gaactaaggaaagctcaggac

SEQ ID NO: 85920 - RNA, 21 nt, synthetic construct
  source 1..21: mol_type = other RNA
gaactaagtgtgaagattaag

SEQ ID NO: 85921 - RNA, 21 nt, synthetic construct
  source 1..21: mol_type = other RNA
gaactaatttcatacaagttg

SEQ ID NO: 85922 - RNA, 21 nt, synthetic construct
  source 1..21: mol_type = other RNA
gaactacacagacatgaacaa

SEQ ID NO: 85923 - RNA, 21 nt, synthetic construct
  source 1..21: mol_type = other RNA
gaactacacattccagaccag

SEQ ID NO: 85924 - RNA, 21 nt, synthetic construct
  source 1..21: mol_type = other RNA
gaactacagtgtttagggacg

SEQ ID NO: 85925 - RNA, 21 nt, synthetic construct
  source 1..21: mol_type = other RNA
gaactagaactgtgttacatt

SEQ ID NO: 85926 - RNA, 21 nt, synthetic construct
  source 1..21: mol_type = other RNA
gaactagaatactccaccagc

SEQ ID NO: 85927 - RNA, 21 nt, synthetic construct
  source 1..21: mol_type = other RNA
gaactcaaaagtgaatcacta

SEQ ID NO: 85928 - RNA, 21 nt, synthetic construct
  source 1..21: mol_type = other RNA
gaactcactggccagcattac

SEQ ID NO: 85929 - RNA, 21 nt, synthetic construct
  source 1..21: mol_type = other RNA
gaactcatattagtctgtagc

SEQ ID NO: 85930 - RNA, 21 nt, synthetic construct
  source 1..21: mol_type = other RNA
gaactcatttctgcttgaatg

SEQ ID NO: 85931 - RNA, 21 nt, synthetic construct
  source 1..21: mol_type = other RNA
gaactccaacaattcaacaat

SEQ ID NO: 85932 - RNA, 21 nt, synthetic construct
  source 1..21: mol_type = other RNA
gaactccacctcagaaacaaa

SEQ ID NO: 85933 - RNA, 21 nt, synthetic construct
  source 1..21: mol_type = other RNA
gaactcccagaactcgaagcc

SEQ ID NO: 85934 - RNA, 21 nt, synthetic construct
  source 1..21: mol_type = other RNA
gaactcctatagttaagtctg

SEQ ID NO: 85935 - RNA, 21 nt, synthetic construct
  source 1..21: mol_type = other RNA
gaactcctggtctcccagcat

SEQ ID NO: 85936 - RNA, 21 nt, synthetic construct
  source 1..21: mol_type = other RNA
gaactcctgtatgccgctggt

SEQ ID NO: 85937 - RNA, 21 nt, synthetic construct
  source 1..21: mol_type = other RNA
gaactcctttcttaccctcac

SEQ ID NO: 85938 - RNA, 21 nt, synthetic construct
  source 1..21: mol_type = other RNA
gaactcgaagccttcccctgc

SEQ ID NO: 85939 - RNA, 21 nt, synthetic construct
  source 1..21: mol_type = other RNA
gaactcgtggcctcaagcagt

SEQ ID NO: 85940 - RNA, 21 nt, synthetic construct
  source 1..21: mol_type = other RNA
gaactctattttcctaaaact

SEQ ID NO: 85941 - RNA, 21 nt, synthetic construct
  source 1..21: mol_type = other RNA
gaactctcgacctcgtgatct

SEQ ID NO: 85942 - RNA, 21 nt, synthetic construct
  source 1..21: mol_type = other RNA
gaactctgtcatggtgtgtct

SEQ ID NO: 85943 - RNA, 21 nt, synthetic construct
  source 1..21: mol_type = other RNA
gaactctgtggagtcctgtca

SEQ ID NO: 85944 - RNA, 21 nt, synthetic construct
  source 1..21: mol_type = other RNA
gaactcttctccaaggaaagt

SEQ ID NO: 85945 - RNA, 21 nt, synthetic construct
  source 1..21: mol_type = other RNA
gaactcttgcggtcttttagc

SEQ ID NO: 85946 - RNA, 21 nt, synthetic construct
  source 1..21: mol_type = other RNA
gaactcttgtagtatttttgc

SEQ ID NO: 85947 - RNA, 21 nt, synthetic construct
  source 1..21: mol_type = other RNA
gaactgaaagcagggactccc

SEQ ID NO: 85948 - RNA, 21 nt, synthetic construct
  source 1..21: mol_type = other RNA
gaactgactgaaggattcctc

SEQ ID NO: 85949 - RNA, 21 nt, synthetic construct
  source 1..21: mol_type = other RNA
gaactgcctggacccgggagg

SEQ ID NO: 85950 - RNA, 21 nt, synthetic construct
  source 1..21: mol_type = other RNA
gaactgctaatggtccttgct

SEQ ID NO: 85951 - RNA, 21 nt, synthetic construct
  source 1..21: mol_type = other RNA
gaactgctgacagattaaata

SEQ ID NO: 85952 - RNA, 21 nt, synthetic construct
  source 1..21: mol_type = other RNA
gaactgctggtctggaatgtg

SEQ ID NO: 85953 - RNA, 21 nt, synthetic construct
  source 1..21: mol_type = other RNA
gaactgggacttctagcctcc

SEQ ID NO: 85954 - RNA, 21 nt, synthetic construct
  source 1..21: mol_type = other RNA
gaactggggcttgaacccgag

SEQ ID NO: 85955 - RNA, 21 nt, synthetic construct
  source 1..21: mol_type = other RNA
gaactgggtgtagggggaaaa

SEQ ID NO: 85956 - RNA, 21 nt, synthetic construct
  source 1..21: mol_type = other RNA
gaactgtcacaattcacagaa

SEQ ID NO: 85957 - RNA, 21 nt, synthetic construct
  source 1..21: mol_type = other RNA
gaactgtcactgacacaggct

SEQ ID NO: 85958 - RNA, 21 nt, synthetic construct
  source 1..21: mol_type = other RNA
gaactgtgttacattgccttc

SEQ ID NO: 85959 - RNA, 21 nt, synthetic construct
  source 1..21: mol_type = other RNA
gaactgttacttgactatttt

SEQ ID NO: 85960 - RNA, 21 nt, synthetic construct
  source 1..21: mol_type = other RNA
gaacttaaaggtttggagttt

SEQ ID NO: 85961 - RNA, 21 nt, synthetic construct
  source 1..21: mol_type = other RNA
gaacttacagtaagatcctgg

SEQ ID NO: 85962 - RNA, 21 nt, synthetic construct
  source 1..21: mol_type = other RNA
gaacttatataaatgctcagt

SEQ ID NO: 85963 - RNA, 21 nt, synthetic construct
  source 1..21: mol_type = other RNA
gaacttatgcatcttgcaaaa

SEQ ID NO: 85964 - RNA, 21 nt, synthetic construct
  source 1..21: mol_type = other RNA
gaacttcttcaaaagacatca

SEQ ID NO: 85965 - RNA, 21 nt, synthetic construct
  source 1..21: mol_type = other RNA
gaacttgacaagtatattaca

SEQ ID NO: 85966 - RNA, 21 nt, synthetic construct
  source 1..21: mol_type = other RNA
gaacttgagtttgttctgtca

SEQ ID NO: 85967 - RNA, 21 nt, synthetic construct
  source 1..21: mol_type = other RNA
gaacttgtcacaaaatgtgga

SEQ ID NO: 85968 - RNA, 21 nt, synthetic construct
  source 1..21: mol_type = other RNA
gaacttgtctcggatttaaga

SEQ ID NO: 85969 - RNA, 21 nt, synthetic construct
  source 1..21: mol_type = other RNA
gaacttgtctttgtctattcc

SEQ ID NO: 85970 - RNA, 21 nt, synthetic construct
  source 1..21: mol_type = other RNA
gaactttcaacctaacatgtc

SEQ ID NO: 85971 - RNA, 21 nt, synthetic construct
  source 1..21: mol_type = other RNA
gaactttccagaagtaactct

SEQ ID NO: 85972 - RNA, 21 nt, synthetic construct
  source 1..21: mol_type = other RNA
gaactttcgaagtgggaagca

SEQ ID NO: 85973 - RNA, 21 nt, synthetic construct
  source 1..21: mol_type = other RNA
gaagaaaaaataaaggctttc

SEQ ID NO: 85974 - RNA, 21 nt, synthetic construct
  source 1..21: mol_type = other RNA
gaagaaaaagcaacttgaagg

SEQ ID NO: 85975 - RNA, 21 nt, synthetic construct
  source 1..21: mol_type = other RNA
gaagaaaacactccagaatga

SEQ ID NO: 85976 - RNA, 21 nt, synthetic construct
  source 1..21: mol_type = other RNA
gaagaaaataaaattctgacc

SEQ ID NO: 85977 - RNA, 21 nt, synthetic construct
  source 1..21: mol_type = other RNA
gaagaaaatccaagaagacat

SEQ ID NO: 85978 - RNA, 21 nt, synthetic construct
  source 1..21: mol_type = other RNA
gaagaaaccaagagcatagac

SEQ ID NO: 85979 - RNA, 21 nt, synthetic construct
  source 1..21: mol_type = other RNA
gaagaaacctttctcaaagcc

SEQ ID NO: 85980 - RNA, 21 nt, synthetic construct
  source 1..21: mol_type = other RNA
gaagaaagtaggaattaaaca

SEQ ID NO: 85981 - RNA, 21 nt, synthetic construct
  source 1..21: mol_type = other RNA
gaagaaagttttgcagttggg

SEQ ID NO: 85982 - RNA, 21 nt, synthetic construct
  source 1..21: mol_type = other RNA
gaagaaataaacgacaccaga

SEQ ID NO: 85983 - RNA, 21 nt, synthetic construct
  source 1..21: mol_type = other RNA
gaagaaatagaaaacttgagc

SEQ ID NO: 85984 - RNA, 21 nt, synthetic construct
  source 1..21: mol_type = other RNA
gaagaaatcaaatgggaaatt

SEQ ID NO: 85985 - RNA, 21 nt, synthetic construct
  source 1..21: mol_type = other RNA
gaagaaatgggtaaatttcta

SEQ ID NO: 85986 - RNA, 21 nt, synthetic construct
  source 1..21: mol_type = other RNA
gaagaaatgttaacaattggt

SEQ ID NO: 85987 - RNA, 21 nt, synthetic construct
  source 1..21: mol_type = other RNA
gaagaaattacttctttctct

SEQ ID NO: 85988 - RNA, 21 nt, synthetic construct
  source 1..21: mol_type = other RNA
gaagaaattatctgtgggtta

SEQ ID NO: 85989 - RNA, 21 nt, synthetic construct
  source 1..21: mol_type = other RNA
gaagaaccgactgaaaggaaa

SEQ ID NO: 85990 - RNA, 21 nt, synthetic construct
  source 1..21: mol_type = other RNA
gaagaacctgttcatttgaga

SEQ ID NO: 85991 - RNA, 21 nt, synthetic construct
  source 1..21: mol_type = other RNA
gaagaagaattctataggtag

SEQ ID NO: 85992 - RNA, 21 nt, synthetic construct
  source 1..21: mol_type = other RNA
gaagaagacttaggagaaaag

SEQ ID NO: 85993 - RNA, 21 nt, synthetic construct
  source 1..21: mol_type = other RNA
gaagaaggaatgtgcactctt

SEQ ID NO: 85994 - RNA, 21 nt, synthetic construct
  source 1..21: mol_type = other RNA
gaagaataactgtcctgaatt

SEQ ID NO: 85995 - RNA, 21 nt, synthetic construct
  source 1..21: mol_type = other RNA
gaagaatcaggtctctttgaa

SEQ ID NO: 85996 - RNA, 21 nt, synthetic construct
  source 1..21: mol_type = other RNA
gaagaatcgcttgaacccggg

SEQ ID NO: 85997 - RNA, 21 nt, synthetic construct
  source 1..21: mol_type = other RNA
gaagaatgagaaacatacatg

SEQ ID NO: 85998 - RNA, 21 nt, synthetic construct
  source 1..21: mol_type = other RNA
gaagaatgattatttgcggct

SEQ ID NO: 85999 - RNA, 21 nt, synthetic construct
  source 1..21: mol_type = other RNA
gaagaatgtgaaaaatttgac

SEQ ID NO: 86000 - RNA, 21 nt, synthetic construct
  source 1..21: mol_type = other RNA
gaagaattaacactaatcctt

SEQ ID NO: 86001 - RNA, 21 nt, synthetic construct
  source 1..21: mol_type = other RNA
gaagaattattgtctgcaagc

SEQ ID NO: 86002 - RNA, 21 nt, synthetic construct
  source 1..21: mol_type = other RNA
gaagaattctataggtagtac

SEQ ID NO: 86003 - RNA, 21 nt, synthetic construct
  source 1..21: mol_type = other RNA
gaagaattttaagcctagaga

SEQ ID NO: 86004 - RNA, 21 nt, synthetic construct
  source 1..21: mol_type = other RNA
gaagacaatactgttatgaca

SEQ ID NO: 86005 - RNA, 21 nt, synthetic construct
  source 1..21: mol_type = other RNA
gaagacacaaaatcagatatg

SEQ ID NO: 86006 - RNA, 21 nt, synthetic construct
  source 1..21: mol_type = other RNA
gaagacatgataaatacgtat

SEQ ID NO: 86007 - RNA, 21 nt, synthetic construct
  source 1..21: mol_type = other RNA
gaagacatgctgaggccccag

SEQ ID NO: 86008 - RNA, 21 nt, synthetic construct
  source 1..21: mol_type = other RNA
gaagacctcaaattctgaggg

SEQ ID NO: 86009 - RNA, 21 nt, synthetic construct
  source 1..21: mol_type = other RNA
gaagacctgcagtctgcaggc

SEQ ID NO: 86010 - RNA, 21 nt, synthetic construct
  source 1..21: mol_type = other RNA
gaagactaagcagaaatgaca

SEQ ID NO: 86011 - RNA, 21 nt, synthetic construct
  source 1..21: mol_type = other RNA
gaagactatcacgattctgac

SEQ ID NO: 86012 - RNA, 21 nt, synthetic construct
  source 1..21: mol_type = other RNA
gaagactatgagaaggattag

SEQ ID NO: 86013 - RNA, 21 nt, synthetic construct
  source 1..21: mol_type = other RNA
gaagactcagcagttttaaag

SEQ ID NO: 86014 - RNA, 21 nt, synthetic construct
  source 1..21: mol_type = other RNA
gaagactggaaaagtgttgac

SEQ ID NO: 86015 - RNA, 21 nt, synthetic construct
  source 1..21: mol_type = other RNA
gaagactggatttgattgggc

SEQ ID NO: 86016 - RNA, 21 nt, synthetic construct
  source 1..21: mol_type = other RNA
gaagacttaggagaaaagctt

SEQ ID NO: 86017 - RNA, 21 nt, synthetic construct
  source 1..21: mol_type = other RNA
gaagactttatggtaattggt

SEQ ID NO: 86018 - RNA, 21 nt, synthetic construct
  source 1..21: mol_type = other RNA
gaagagaatggctggaatggt

SEQ ID NO: 86019 - RNA, 21 nt, synthetic construct
  source 1..21: mol_type = other RNA
gaagagaccacaggctctctt

SEQ ID NO: 86020 - RNA, 21 nt, synthetic construct
  source 1..21: mol_type = other RNA
gaagagactatctcttcctcc

SEQ ID NO: 86021 - RNA, 21 nt, synthetic construct
  source 1..21: mol_type = other RNA
gaagagagaaggctgccagca

SEQ ID NO: 86022 - RNA, 21 nt, synthetic construct
  source 1..21: mol_type = other RNA
gaagagagcattgcctttatt

SEQ ID NO: 86023 - RNA, 21 nt, synthetic construct
  source 1..21: mol_type = other RNA
gaagagagcctgtggtctctt

SEQ ID NO: 86024 - RNA, 21 nt, synthetic construct
  source 1..21: mol_type = other RNA
gaagagatagtctcttcctgt

SEQ ID NO: 86025 - RNA, 21 nt, synthetic construct
  source 1..21: mol_type = other RNA
gaagagcactatgtaaattat

SEQ ID NO: 86026 - RNA, 21 nt, synthetic construct
  source 1..21: mol_type = other RNA
gaagagcagtgtgttctgcct

SEQ ID NO: 86027 - RNA, 21 nt, synthetic construct
  source 1..21: mol_type = other RNA
gaagagcgcttctatgtgaca

SEQ ID NO: 86028 - RNA, 21 nt, synthetic construct
  source 1..21: mol_type = other RNA
gaagagctaagatgctattca

SEQ ID NO: 86029 - RNA, 21 nt, synthetic construct
  source 1..21: mol_type = other RNA
gaagagctgtaacagaggcat

SEQ ID NO: 86030 - RNA, 21 nt, synthetic construct
  source 1..21: mol_type = other RNA
gaagaggaaggttcaagtttg

SEQ ID NO: 86031 - RNA, 21 nt, synthetic construct
  source 1..21: mol_type = other RNA
gaagaggacgatttttccaac

SEQ ID NO: 86032 - RNA, 21 nt, synthetic construct
  source 1..21: mol_type = other RNA
gaagaggataaggggcagggt

SEQ ID NO: 86033 - RNA, 21 nt, synthetic construct
  source 1..21: mol_type = other RNA
gaagaggcagctaagcaccaa

SEQ ID NO: 86034 - RNA, 21 nt, synthetic construct
  source 1..21: mol_type = other RNA
gaagaggccacaaagtcccca

SEQ ID NO: 86035 - RNA, 21 nt, synthetic construct
  source 1..21: mol_type = other RNA
gaagaggctttctgtgtaata

SEQ ID NO: 86036 - RNA, 21 nt, synthetic construct
  source 1..21: mol_type = other RNA
gaagagggaacattttcattt

SEQ ID NO: 86037 - RNA, 21 nt, synthetic construct
  source 1..21: mol_type = other RNA
gaagagggagaagaaataaac

SEQ ID NO: 86038 - RNA, 21 nt, synthetic construct
  source 1..21: mol_type = other RNA
gaagagggggcataacatcta

SEQ ID NO: 86039 - RNA, 21 nt, synthetic construct
  source 1..21: mol_type = other RNA
gaagagtaatggttggccgag

SEQ ID NO: 86040 - RNA, 21 nt, synthetic construct
  source 1..21: mol_type = other RNA
gaagagtctatctttgggaaa

SEQ ID NO: 86041 - RNA, 21 nt, synthetic construct
  source 1..21: mol_type = other RNA
gaagagtgaagctggaccctt

SEQ ID NO: 86042 - RNA, 21 nt, synthetic construct
  source 1..21: mol_type = other RNA
gaagagttctgaaggctcagc

SEQ ID NO: 86043 - RNA, 21 nt, synthetic construct
  source 1..21: mol_type = other RNA
gaagataatgttagaattcag

SEQ ID NO: 86044 - RNA, 21 nt, synthetic construct
  source 1..21: mol_type = other RNA
gaagatagtactgaccatctc

SEQ ID NO: 86045 - RNA, 21 nt, synthetic construct
  source 1..21: mol_type = other RNA
gaagatgacatttgcttttcc

SEQ ID NO: 86046 - RNA, 21 nt, synthetic construct
  source 1..21: mol_type = other RNA
gaagatgcagttgcttactct

SEQ ID NO: 86047 - RNA, 21 nt, synthetic construct
  source 1..21: mol_type = other RNA
gaagatgctccctctatggca

SEQ ID NO: 86048 - RNA, 21 nt, synthetic construct
  source 1..21: mol_type = other RNA
gaagatgctgaacttgtcaca

SEQ ID NO: 86049 - RNA, 21 nt, synthetic construct
  source 1..21: mol_type = other RNA
gaagatggagttacgctgcca

SEQ ID NO: 86050 - RNA, 21 nt, synthetic construct
  source 1..21: mol_type = other RNA
gaagatggcaaacagactgag

SEQ ID NO: 86051 - RNA, 21 nt, synthetic construct
  source 1..21: mol_type = other RNA
gaagatggcctccctcactaa

SEQ ID NO: 86052 - RNA, 21 nt, synthetic construct
  source 1..21: mol_type = other RNA
gaagatgggacttcactagtg

SEQ ID NO: 86053 - RNA, 21 nt, synthetic construct
  source 1..21: mol_type = other RNA
gaagatggttggaagtttctg

SEQ ID NO: 86054 - RNA, 21 nt, synthetic construct
  source 1..21: mol_type = other RNA
gaagattaagcacatctgtct

SEQ ID NO: 86055 - RNA, 21 nt, synthetic construct
  source 1..21: mol_type = other RNA
gaagattagaaaattagctga

SEQ ID NO: 86056 - RNA, 21 nt, synthetic construct
  source 1..21: mol_type = other RNA
gaagattgagtcagtaatcaa

SEQ ID NO: 86057 - RNA, 21 nt, synthetic construct
  source 1..21: mol_type = other RNA
gaagattggctttagatttat

SEQ ID NO: 86058 - RNA, 21 nt, synthetic construct
  source 1..21: mol_type = other RNA
gaagatttctactggggtctt

SEQ ID NO: 86059 - RNA, 21 nt, synthetic construct
  source 1..21: mol_type = other RNA
gaagcaaaacatatgtcagat

SEQ ID NO: 86060 - RNA, 21 nt, synthetic construct
  source 1..21: mol_type = other RNA
gaagcaaaggattcgggggag

SEQ ID NO: 86061 - RNA, 21 nt, synthetic construct
  source 1..21: mol_type = other RNA
gaagcacaaccactgatggaa

SEQ ID NO: 86062 - RNA, 21 nt, synthetic construct
  source 1..21: mol_type = other RNA
gaagcacaccaaggtttctct

SEQ ID NO: 86063 - RNA, 21 nt, synthetic construct
  source 1..21: mol_type = other RNA
gaagcacagtctctgcagagc

SEQ ID NO: 86064 - RNA, 21 nt, synthetic construct
  source 1..21: mol_type = other RNA
gaagcacattccttccgacct

SEQ ID NO: 86065 - RNA, 21 nt, synthetic construct
  source 1..21: mol_type = other RNA
gaagcaccaacccttgttgga

SEQ ID NO: 86066 - RNA, 21 nt, synthetic construct
  source 1..21: mol_type = other RNA
gaagcactttttaccaagttg

SEQ ID NO: 86067 - RNA, 21 nt, synthetic construct
  source 1..21: mol_type = other RNA
gaagcagaaaatcagtgtgaa

SEQ ID NO: 86068 - RNA, 21 nt, synthetic construct
  source 1..21: mol_type = other RNA
gaagcagaactaagaccccag

SEQ ID NO: 86069 - RNA, 21 nt, synthetic construct
  source 1..21: mol_type = other RNA
gaagcagaatgtccatcagga

SEQ ID NO: 86070 - RNA, 21 nt, synthetic construct
  source 1..21: mol_type = other RNA
gaagcagagagagaagatgac

SEQ ID NO: 86071 - RNA, 21 nt, synthetic construct
  source 1..21: mol_type = other RNA
gaagcagcaagggtggctggc

SEQ ID NO: 86072 - RNA, 21 nt, synthetic construct
  source 1..21: mol_type = other RNA
gaagcaggaactcatattagt

SEQ ID NO: 86073 - RNA, 21 nt, synthetic construct
  source 1..21: mol_type = other RNA
gaagcaggccttcgaggcatc

SEQ ID NO: 86074 - RNA, 21 nt, synthetic construct
  source 1..21: mol_type = other RNA
gaagcaggctttttacccgga

SEQ ID NO: 86075 - RNA, 21 nt, synthetic construct
  source 1..21: mol_type = other RNA
gaagcagggaaatggagggcc

SEQ ID NO: 86076 - RNA, 21 nt, synthetic construct
  source 1..21: mol_type = other RNA
gaagcagttgatgcaatttgt

SEQ ID NO: 86077 - RNA, 21 nt, synthetic construct
  source 1..21: mol_type = other RNA
gaagcatctgatacacttcta

SEQ ID NO: 86078 - RNA, 21 nt, synthetic construct
  source 1..21: mol_type = other RNA
gaagcatgtggccaggaggag

SEQ ID NO: 86079 - RNA, 21 nt, synthetic construct
  source 1..21: mol_type = other RNA
gaagcattaatgcaacctgct

SEQ ID NO: 86080 - RNA, 21 nt, synthetic construct
  source 1..21: mol_type = other RNA
gaagccacacagtacaaggct

SEQ ID NO: 86081 - RNA, 21 nt, synthetic construct
  source 1..21: mol_type = other RNA
gaagccactgcattcatccag

SEQ ID NO: 86082 - RNA, 21 nt, synthetic construct
  source 1..21: mol_type = other RNA
gaagccagcacctaacaatga

SEQ ID NO: 86083 - RNA, 21 nt, synthetic construct
  source 1..21: mol_type = other RNA
gaagccagcattaccctaata

SEQ ID NO: 86084 - RNA, 21 nt, synthetic construct
  source 1..21: mol_type = other RNA
gaagccagtccttgtgatcta

SEQ ID NO: 86085 - RNA, 21 nt, synthetic construct
  source 1..21: mol_type = other RNA
gaagcccagagaggctaggtg

SEQ ID NO: 86086 - RNA, 21 nt, synthetic construct
  source 1..21: mol_type = other RNA
gaagcccgccgctcgcaggtg

SEQ ID NO: 86087 - RNA, 21 nt, synthetic construct
  source 1..21: mol_type = other RNA
gaagccctctaagtcagcctg

SEQ ID NO: 86088 - RNA, 21 nt, synthetic construct
  source 1..21: mol_type = other RNA
gaagccctgcagccagatttg

SEQ ID NO: 86089 - RNA, 21 nt, synthetic construct
  source 1..21: mol_type = other RNA
gaagccttcccctgctgttcc

SEQ ID NO: 86090 - RNA, 21 nt, synthetic construct
  source 1..21: mol_type = other RNA
gaagcgctcttcaagcattgg

SEQ ID NO: 86091 - RNA, 21 nt, synthetic construct
  source 1..21: mol_type = other RNA
gaagcggcagggccgggggtt

SEQ ID NO: 86092 - RNA, 21 nt, synthetic construct
  source 1..21: mol_type = other RNA
gaagcggggctgccactactt

SEQ ID NO: 86093 - RNA, 21 nt, synthetic construct
  source 1..21: mol_type = other RNA
gaagctaaattttcataggaa

SEQ ID NO: 86094 - RNA, 21 nt, synthetic construct
  source 1..21: mol_type = other RNA
gaagctaatcaagccgcaaat

SEQ ID NO: 86095 - RNA, 21 nt, synthetic construct
  source 1..21: mol_type = other RNA
gaagctacagactaatatgag

SEQ ID NO: 86096 - RNA, 21 nt, synthetic construct
  source 1..21: mol_type = other RNA
gaagctacagtaatcaaacag

SEQ ID NO: 86097 - RNA, 21 nt, synthetic construct
  source 1..21: mol_type = other RNA
gaagctactattccaggatca

SEQ ID NO: 86098 - RNA, 21 nt, synthetic construct
  source 1..21: mol_type = other RNA
gaagctatagctgagaagtaa

SEQ ID NO: 86099 - RNA, 21 nt, synthetic construct
  source 1..21: mol_type = other RNA
gaagctatggagcactgtgag

SEQ ID NO: 86100 - RNA, 21 nt, synthetic construct
  source 1..21: mol_type = other RNA
gaagctctagtgagctatgat

SEQ ID NO: 86101 - RNA, 21 nt, synthetic construct
  source 1..21: mol_type = other RNA
gaagctgatcaaggaagcttc

SEQ ID NO: 86102 - RNA, 21 nt, synthetic construct
  source 1..21: mol_type = other RNA
gaagctggacccttaccttaa

SEQ ID NO: 86103 - RNA, 21 nt, synthetic construct
  source 1..21: mol_type = other RNA
gaagctgggctagagccagga

SEQ ID NO: 86104 - RNA, 21 nt, synthetic construct
  source 1..21: mol_type = other RNA
gaagctgtccttctcgtgtga

SEQ ID NO: 86105 - RNA, 21 nt, synthetic construct
  source 1..21: mol_type = other RNA
gaagctgttttggtaaaatgt

SEQ ID NO: 86106 - RNA, 21 nt, synthetic construct
  source 1..21: mol_type = other RNA
gaagcttaatttagatgagag

SEQ ID NO: 86107 - RNA, 21 nt, synthetic construct
  source 1..21: mol_type = other RNA
gaagcttataatttctgagag

SEQ ID NO: 86108 - RNA, 21 nt, synthetic construct
  source 1..21: mol_type = other RNA
gaagcttattaaaatgaacct

SEQ ID NO: 86109 - RNA, 21 nt, synthetic construct
  source 1..21: mol_type = other RNA
gaagcttcaaaccactatcta

SEQ ID NO: 86110 - RNA, 21 nt, synthetic construct
  source 1..21: mol_type = other RNA
gaagcttcacttctctgctgc

SEQ ID NO: 86111 - RNA, 21 nt, synthetic construct
  source 1..21: mol_type = other RNA
gaagcttcctaaagagagtga

SEQ ID NO: 86112 - RNA, 21 nt, synthetic construct
  source 1..21: mol_type = other RNA
gaagcttccttgatcagcttc

SEQ ID NO: 86113 - RNA, 21 nt, synthetic construct
  source 1..21: mol_type = other RNA
gaagctttcagacttaactat

SEQ ID NO: 86114 - RNA, 21 nt, synthetic construct
  source 1..21: mol_type = other RNA
gaagcttttcatatacagatt

SEQ ID NO: 86115 - RNA, 21 nt, synthetic construct
  source 1..21: mol_type = other RNA
gaagcttttctcctaagtctt

SEQ ID NO: 86116 - RNA, 21 nt, synthetic construct
  source 1..21: mol_type = other RNA
gaaggaaaaaacacctaaaga

SEQ ID NO: 86117 - RNA, 21 nt, synthetic construct
  source 1..21: mol_type = other RNA
gaaggaaaaaacgggttatac

SEQ ID NO: 86118 - RNA, 21 nt, synthetic construct
  source 1..21: mol_type = other RNA
gaaggaaaagaacacagtgtt

SEQ ID NO: 86119 - RNA, 21 nt, synthetic construct
  source 1..21: mol_type = other RNA
gaaggaaacactataaatcag

SEQ ID NO: 86120 - RNA, 21 nt, synthetic construct
  source 1..21: mol_type = other RNA
gaaggaaaggagatactggcc

SEQ ID NO: 86121 - RNA, 21 nt, synthetic construct
  source 1..21: mol_type = other RNA
gaaggaaataagaaggtttgt

SEQ ID NO: 86122 - RNA, 21 nt, synthetic construct
  source 1..21: mol_type = other RNA
gaaggaacacacacctattca

SEQ ID NO: 86123 - RNA, 21 nt, synthetic construct
  source 1..21: mol_type = other RNA
gaaggaagcaccaacccttgt

SEQ ID NO: 86124 - RNA, 21 nt, synthetic construct
  source 1..21: mol_type = other RNA
gaaggaaggattggaatgagt

SEQ ID NO: 86125 - RNA, 21 nt, synthetic construct
  source 1..21: mol_type = other RNA
gaaggaatgtgcactctttta

SEQ ID NO: 86126 - RNA, 21 nt, synthetic construct
  source 1..21: mol_type = other RNA
gaaggaatgtgcttcctaaac

SEQ ID NO: 86127 - RNA, 21 nt, synthetic construct
  source 1..21: mol_type = other RNA
gaaggaattttaggacaagga

SEQ ID NO: 86128 - RNA, 21 nt, synthetic construct
  source 1..21: mol_type = other RNA
gaaggaattttcaggactcat

SEQ ID NO: 86129 - RNA, 21 nt, synthetic construct
  source 1..21: mol_type = other RNA
gaaggacagcttccacccaag

SEQ ID NO: 86130 - RNA, 21 nt, synthetic construct
  source 1..21: mol_type = other RNA
gaaggactcacagcttaccaa

SEQ ID NO: 86131 - RNA, 21 nt, synthetic construct
  source 1..21: mol_type = other RNA
gaaggagaaaacaaaaagaaa

SEQ ID NO: 86132 - RNA, 21 nt, synthetic construct
  source 1..21: mol_type = other RNA
gaaggagaaaccatttacccc

SEQ ID NO: 86133 - RNA, 21 nt, synthetic construct
  source 1..21: mol_type = other RNA
gaaggagaatcgcttaaaccc

SEQ ID NO: 86134 - RNA, 21 nt, synthetic construct
  source 1..21: mol_type = other RNA
gaaggaggaaaataatttgca

SEQ ID NO: 86135 - RNA, 21 nt, synthetic construct
  source 1..21: mol_type = other RNA
gaaggagtccagtcctgctaa

SEQ ID NO: 86136 - RNA, 21 nt, synthetic construct
  source 1..21: mol_type = other RNA
gaaggagtctgcccatcctat

SEQ ID NO: 86137 - RNA, 21 nt, synthetic construct
  source 1..21: mol_type = other RNA
gaaggatatgttttctaaacc

SEQ ID NO: 86138 - RNA, 21 nt, synthetic construct
  source 1..21: mol_type = other RNA
gaaggatggccagtcatgtgg

SEQ ID NO: 86139 - RNA, 21 nt, synthetic construct
  source 1..21: mol_type = other RNA
gaaggattcctccctggagag

SEQ ID NO: 86140 - RNA, 21 nt, synthetic construct
  source 1..21: mol_type = other RNA
gaaggattgcctaacaccagt

SEQ ID NO: 86141 - RNA, 21 nt, synthetic construct
  source 1..21: mol_type = other RNA
gaaggattggaatgagtccag

SEQ ID NO: 86142 - RNA, 21 nt, synthetic construct
  source 1..21: mol_type = other RNA
gaaggattgttcatgtctgtg

SEQ ID NO: 86143 - RNA, 21 nt, synthetic construct
  source 1..21: mol_type = other RNA
gaaggcaatgtaacacagttc

SEQ ID NO: 86144 - RNA, 21 nt, synthetic construct
  source 1..21: mol_type = other RNA
gaaggcaatgtagggaataga

SEQ ID NO: 86145 - RNA, 21 nt, synthetic construct
  source 1..21: mol_type = other RNA
gaaggcactaacaaagggcct

SEQ ID NO: 86146 - RNA, 21 nt, synthetic construct
  source 1..21: mol_type = other RNA
gaaggcactgtatggttctta

SEQ ID NO: 86147 - RNA, 21 nt, synthetic construct
  source 1..21: mol_type = other RNA
gaaggcagaattatagagggc

SEQ ID NO: 86148 - RNA, 21 nt, synthetic construct
  source 1..21: mol_type = other RNA
gaaggcaggaggcctcagaat

SEQ ID NO: 86149 - RNA, 21 nt, synthetic construct
  source 1..21: mol_type = other RNA
gaaggcagggtaggaaggcgg

SEQ ID NO: 86150 - RNA, 21 nt, synthetic construct
  source 1..21: mol_type = other RNA
gaaggcatagggccttctact

SEQ ID NO: 86151 - RNA, 21 nt, synthetic construct
  source 1..21: mol_type = other RNA
gaaggccagagggaatctagg

SEQ ID NO: 86152 - RNA, 21 nt, synthetic construct
  source 1..21: mol_type = other RNA
gaaggccatttgattgccagt

SEQ ID NO: 86153 - RNA, 21 nt, synthetic construct
  source 1..21: mol_type = other RNA
gaaggccctatgccttcagta

SEQ ID NO: 86154 - RNA, 21 nt, synthetic construct
  source 1..21: mol_type = other RNA
gaaggccctgattgagattag

SEQ ID NO: 86155 - RNA, 21 nt, synthetic construct
  source 1..21: mol_type = other RNA
gaaggccgtccctattttcta

SEQ ID NO: 86156 - RNA, 21 nt, synthetic construct
  source 1..21: mol_type = other RNA
gaaggcctgatagctgtggaa

SEQ ID NO: 86157 - RNA, 21 nt, synthetic construct
  source 1..21: mol_type = other RNA
gaaggcctgcttcattccgcg

SEQ ID NO: 86158 - RNA, 21 nt, synthetic construct
  source 1..21: mol_type = other RNA
gaaggccttccacggaatgcc

SEQ ID NO: 86159 - RNA, 21 nt, synthetic construct
  source 1..21: mol_type = other RNA
gaaggccttctcctccaaccc

SEQ ID NO: 86160 - RNA, 21 nt, synthetic construct
  source 1..21: mol_type = other RNA
gaaggcgaaatgtgaacagac

SEQ ID NO: 86161 - RNA, 21 nt, synthetic construct
  source 1..21: mol_type = other RNA
gaaggcggaagttgcagtgag

SEQ ID NO: 86162 - RNA, 21 nt, synthetic construct
  source 1..21: mol_type = other RNA
gaaggcggtggggacagctca

SEQ ID NO: 86163 - RNA, 21 nt, synthetic construct
  source 1..21: mol_type = other RNA
gaaggcgtgtaaactgttgga

SEQ ID NO: 86164 - RNA, 21 nt, synthetic construct
  source 1..21: mol_type = other RNA
gaaggctaagcatgtaacttg

SEQ ID NO: 86165 - RNA, 21 nt, synthetic construct
  source 1..21: mol_type = other RNA
gaaggctagcacagaggcaac

SEQ ID NO: 86166 - RNA, 21 nt, synthetic construct
  source 1..21: mol_type = other RNA
gaaggctcagcccctcatcct

SEQ ID NO: 86167 - RNA, 21 nt, synthetic construct
  source 1..21: mol_type = other RNA
gaaggctgcaagcactggtaa

SEQ ID NO: 86168 - RNA, 21 nt, synthetic construct
  source 1..21: mol_type = other RNA
gaaggctgccagcaccagata

SEQ ID NO: 86169 - RNA, 21 nt, synthetic construct
  source 1..21: mol_type = other RNA
gaaggcttcgagttctgggag

SEQ ID NO: 86170 - RNA, 21 nt, synthetic construct
  source 1..21: mol_type = other RNA
gaaggctttgtgttggtgttt

SEQ ID NO: 86171 - RNA, 21 nt, synthetic construct
  source 1..21: mol_type = other RNA
gaagggaaaggatgaccttga

SEQ ID NO: 86172 - RNA, 21 nt, synthetic construct
  source 1..21: mol_type = other RNA
gaagggaacactaagaagatg

SEQ ID NO: 86173 - RNA, 21 nt, synthetic construct
  source 1..21: mol_type = other RNA
gaagggaagtaaagatcaagc

SEQ ID NO: 86174 - RNA, 21 nt, synthetic construct
  source 1..21: mol_type = other RNA
gaagggaattttactgatctt

SEQ ID NO: 86175 - RNA, 21 nt, synthetic construct
  source 1..21: mol_type = other RNA
gaagggagaacccaggaacag

SEQ ID NO: 86176 - RNA, 21 nt, synthetic construct
  source 1..21: mol_type = other RNA
gaagggagagatgcctatgaa

SEQ ID NO: 86177 - RNA, 21 nt, synthetic construct
  source 1..21: mol_type = other RNA
gaagggagcccaagcacactt

SEQ ID NO: 86178 - RNA, 21 nt, synthetic construct
  source 1..21: mol_type = other RNA
gaagggaggaaaaaacagttg

SEQ ID NO: 86179 - RNA, 21 nt, synthetic construct
  source 1..21: mol_type = other RNA
gaagggaggtaggcttagatg

SEQ ID NO: 86180 - RNA, 21 nt, synthetic construct
  source 1..21: mol_type = other RNA
gaagggcttgatctagtaaat

SEQ ID NO: 86181 - RNA, 21 nt, synthetic construct
  source 1..21: mol_type = other RNA
gaagggtatatacaatattac

SEQ ID NO: 86182 - RNA, 21 nt, synthetic construct
  source 1..21: mol_type = other RNA
gaagggttttctgtagaatat

SEQ ID NO: 86183 - RNA, 21 nt, synthetic construct
  source 1..21: mol_type = other RNA
gaaggtaagaatgtcaagctg

SEQ ID NO: 86184 - RNA, 21 nt, synthetic construct
  source 1..21: mol_type = other RNA
gaaggtaggagggtgtgatca

SEQ ID NO: 86185 - RNA, 21 nt, synthetic construct
  source 1..21: mol_type = other RNA
gaaggtatcatcggaaatata

SEQ ID NO: 86186 - RNA, 21 nt, synthetic construct
  source 1..21: mol_type = other RNA
gaaggtcaaatggtaacagcc

SEQ ID NO: 86187 - RNA, 21 nt, synthetic construct
  source 1..21: mol_type = other RNA
gaaggtcaatctaggaggtct

SEQ ID NO: 86188 - RNA, 21 nt, synthetic construct
  source 1..21: mol_type = other RNA
gaaggtgagggactgagcagt

SEQ ID NO: 86189 - RNA, 21 nt, synthetic construct
  source 1..21: mol_type = other RNA
gaaggtgcccgcgaaggcgtg

SEQ ID NO: 86190 - RNA, 21 nt, synthetic construct
  source 1..21: mol_type = other RNA
gaaggtgcctgccatagaggg

SEQ ID NO: 86191 - RNA, 21 nt, synthetic construct
  source 1..21: mol_type = other RNA
gaaggttaactaatagccagt

SEQ ID NO: 86192 - RNA, 21 nt, synthetic construct
  source 1..21: mol_type = other RNA
gaaggttcaagtttggctccc

SEQ ID NO: 86193 - RNA, 21 nt, synthetic construct
  source 1..21: mol_type = other RNA
gaaggttcatgaacataaatt

SEQ ID NO: 86194 - RNA, 21 nt, synthetic construct
  source 1..21: mol_type = other RNA
gaaggtttgtagagcaagcaa

SEQ ID NO: 86195 - RNA, 21 nt, synthetic construct
  source 1..21: mol_type = other RNA
gaagtaaagatcaagctcgcc

SEQ ID NO: 86196 - RNA, 21 nt, synthetic construct
  source 1..21: mol_type = other RNA
gaagtaaatcccggccaggtg

SEQ ID NO: 86197 - RNA, 21 nt, synthetic construct
  source 1..21: mol_type = other RNA
gaagtaacattacaacagcaa

SEQ ID NO: 86198 - RNA, 21 nt, synthetic construct
  source 1..21: mol_type = other RNA
gaagtaactcttgagttagga

SEQ ID NO: 86199 - RNA, 21 nt, synthetic construct
  source 1..21: mol_type = other RNA
gaagtaaggattttctattca

SEQ ID NO: 86200 - RNA, 21 nt, synthetic construct
  source 1..21: mol_type = other RNA
gaagtaataaagcaagtatga

SEQ ID NO: 86201 - RNA, 21 nt, synthetic construct
  source 1..21: mol_type = other RNA
gaagtaattgggatctgataa

SEQ ID NO: 86202 - RNA, 21 nt, synthetic construct
  source 1..21: mol_type = other RNA
gaagtaatttcttctgaagaa

SEQ ID NO: 86203 - RNA, 21 nt, synthetic construct
  source 1..21: mol_type = other RNA
gaagtacaaacattacagaaa

SEQ ID NO: 86204 - RNA, 21 nt, synthetic construct
  source 1..21: mol_type = other RNA
gaagtactgagtcaaaaccaa

SEQ ID NO: 86205 - RNA, 21 nt, synthetic construct
  source 1..21: mol_type = other RNA
gaagtacttcaaggttcacaa

SEQ ID NO: 86206 - RNA, 21 nt, synthetic construct
  source 1..21: mol_type = other RNA
gaagtacttcagcgcttgaac

SEQ ID NO: 86207 - RNA, 21 nt, synthetic construct
  source 1..21: mol_type = other RNA
gaagtatagaaaggagaccag

SEQ ID NO: 86208 - RNA, 21 nt, synthetic construct
  source 1..21: mol_type = other RNA
gaagtatcccagatggggatt

SEQ ID NO: 86209 - RNA, 21 nt, synthetic construct
  source 1..21: mol_type = other RNA
gaagtatgagtcttccgtctc

SEQ ID NO: 86210 - RNA, 21 nt, synthetic construct
  source 1..21: mol_type = other RNA
gaagtatgtaattacagggga

SEQ ID NO: 86211 - RNA, 21 nt, synthetic construct
  source 1..21: mol_type = other RNA
gaagtattgatttgaccatgg

SEQ ID NO: 86212 - RNA, 21 nt, synthetic construct
  source 1..21: mol_type = other RNA
gaagtcaaagcctgtggaggc

SEQ ID NO: 86213 - RNA, 21 nt, synthetic construct
  source 1..21: mol_type = other RNA
gaagtcaagatgaatctgcaa

SEQ ID NO: 86214 - RNA, 21 nt, synthetic construct
  source 1..21: mol_type = other RNA
gaagtcaatttcagatctctg

SEQ ID NO: 86215 - RNA, 21 nt, synthetic construct
  source 1..21: mol_type = other RNA
gaagtcacattctagtgatgg

SEQ ID NO: 86216 - RNA, 21 nt, synthetic construct
  source 1..21: mol_type = other RNA
gaagtcactttttattctgtt

SEQ ID NO: 86217 - RNA, 21 nt, synthetic construct
  source 1..21: mol_type = other RNA
gaagtcagactaagacactag

SEQ ID NO: 86218 - RNA, 21 nt, synthetic construct
  source 1..21: mol_type = other RNA
gaagtcagagattttcccaaa

SEQ ID NO: 86219 - RNA, 21 nt, synthetic construct
  source 1..21: mol_type = other RNA
gaagtcagcaactcttggcca

SEQ ID NO: 86220 - RNA, 21 nt, synthetic construct
  source 1..21: mol_type = other RNA
gaagtcagttacagcatttca

SEQ ID NO: 86221 - RNA, 21 nt, synthetic construct
  source 1..21: mol_type = other RNA
gaagtcatctggtcctgagct

SEQ ID NO: 86222 - RNA, 21 nt, synthetic construct
  source 1..21: mol_type = other RNA
gaagtccatgaaacttatttc

SEQ ID NO: 86223 - RNA, 21 nt, synthetic construct
  source 1..21: mol_type = other RNA
gaagtcccagttcaaggtgtt

SEQ ID NO: 86224 - RNA, 21 nt, synthetic construct
  source 1..21: mol_type = other RNA
gaagtcccatcttccatacga

SEQ ID NO: 86225 - RNA, 21 nt, synthetic construct
  source 1..21: mol_type = other RNA
gaagtcctcaatcatgtcaag

SEQ ID NO: 86226 - RNA, 21 nt, synthetic construct
  source 1..21: mol_type = other RNA
gaagtcctttcttggtctgca

SEQ ID NO: 86227 - RNA, 21 nt, synthetic construct
  source 1..21: mol_type = other RNA
gaagtctttggcccattttcg

SEQ ID NO: 86228 - RNA, 21 nt, synthetic construct
  source 1..21: mol_type = other RNA
gaagtctttggtgatcctaag

SEQ ID NO: 86229 - RNA, 21 nt, synthetic construct
  source 1..21: mol_type = other RNA
gaagtcttttcctaccctgag

SEQ ID NO: 86230 - RNA, 21 nt, synthetic construct
  source 1..21: mol_type = other RNA
gaagtgaaaaatgacctaaaa

SEQ ID NO: 86231 - RNA, 21 nt, synthetic construct
  source 1..21: mol_type = other RNA
gaagtgaaactgctggatcat

SEQ ID NO: 86232 - RNA, 21 nt, synthetic construct
  source 1..21: mol_type = other RNA
gaagtgaagcttcaaaccact

SEQ ID NO: 86233 - RNA, 21 nt, synthetic construct
  source 1..21: mol_type = other RNA
gaagtgaagtcaagatgaatc

SEQ ID NO: 86234 - RNA, 21 nt, synthetic construct
  source 1..21: mol_type = other RNA
gaagtgaccctgagtccagag

SEQ ID NO: 86235 - RNA, 21 nt, synthetic construct
  source 1..21: mol_type = other RNA
gaagtgctgggctagggaagc

SEQ ID NO: 86236 - RNA, 21 nt, synthetic construct
  source 1..21: mol_type = other RNA
gaagtggagtgcgagtgtgaa

SEQ ID NO: 86237 - RNA, 21 nt, synthetic construct
  source 1..21: mol_type = other RNA
gaagtggctagacggaaaaac

SEQ ID NO: 86238 - RNA, 21 nt, synthetic construct
  source 1..21: mol_type = other RNA
gaagtgggaagcaaaggattc

SEQ ID NO: 86239 - RNA, 21 nt, synthetic construct
  source 1..21: mol_type = other RNA
gaagtggtgcttgaactgctg

SEQ ID NO: 86240 - RNA, 21 nt, synthetic construct
  source 1..21: mol_type = other RNA
gaagtgtaacatacacatcag

SEQ ID NO: 86241 - RNA, 21 nt, synthetic construct
  source 1..21: mol_type = other RNA
gaagtgtatcagatgcttcta

SEQ ID NO: 86242 - RNA, 21 nt, synthetic construct
  source 1..21: mol_type = other RNA
gaagtgttgagaggctttaag

SEQ ID NO: 86243 - RNA, 21 nt, synthetic construct
  source 1..21: mol_type = other RNA
gaagtgttttgatagttgcag

SEQ ID NO: 86244 - RNA, 21 nt, synthetic construct
  source 1..21: mol_type = other RNA
gaagttaagggccatttcatt

SEQ ID NO: 86245 - RNA, 21 nt, synthetic construct
  source 1..21: mol_type = other RNA
gaagttacggttccctgtaga

SEQ ID NO: 86246 - RNA, 21 nt, synthetic construct
  source 1..21: mol_type = other RNA
gaagttatgtagctgggatgg

SEQ ID NO: 86247 - RNA, 21 nt, synthetic construct
  source 1..21: mol_type = other RNA
gaagttatttaatctctcttg

SEQ ID NO: 86248 - RNA, 21 nt, synthetic construct
  source 1..21: mol_type = other RNA
gaagttcaaggttataatcag

SEQ ID NO: 86249 - RNA, 21 nt, synthetic construct
  source 1..21: mol_type = other RNA
gaagttctcaggggtaaaggg

SEQ ID NO: 86250 - RNA, 21 nt, synthetic construct
  source 1..21: mol_type = other RNA
gaagttgagaaagagggaagt

SEQ ID NO: 86251 - RNA, 21 nt, synthetic construct
  source 1..21: mol_type = other RNA
gaagttgcagtgagcccagag

SEQ ID NO: 86252 - RNA, 21 nt, synthetic construct
  source 1..21: mol_type = other RNA
gaagttggcccaacatgctct

SEQ ID NO: 86253 - RNA, 21 nt, synthetic construct
  source 1..21: mol_type = other RNA
gaagttgggcttaacatttga

SEQ ID NO: 86254 - RNA, 21 nt, synthetic construct
  source 1..21: mol_type = other RNA
gaagttgtggtgagccaagat

SEQ ID NO: 86255 - RNA, 21 nt, synthetic construct
  source 1..21: mol_type = other RNA
gaagtttatcagtctccaatc

SEQ ID NO: 86256 - RNA, 21 nt, synthetic construct
  source 1..21: mol_type = other RNA
gaagtttcctgcacatgcaca

SEQ ID NO: 86257 - RNA, 21 nt, synthetic construct
  source 1..21: mol_type = other RNA
gaagtttctggaagtttcctg

SEQ ID NO: 86258 - RNA, 21 nt, synthetic construct
  source 1..21: mol_type = other RNA
gaagtttggaaccagcctggc

SEQ ID NO: 86259 - RNA, 21 nt, synthetic construct
  source 1..21: mol_type = other RNA
gaagttttccaggaaaagcaa

SEQ ID NO: 86260 - RNA, 21 nt, synthetic construct
  source 1..21: mol_type = other RNA
gaataaaaagtgacttctgga

SEQ ID NO: 86261 - RNA, 21 nt, synthetic construct
  source 1..21: mol_type = other RNA
gaataaaattcaccaaacacc

SEQ ID NO: 86262 - RNA, 21 nt, synthetic construct
  source 1..21: mol_type = other RNA
gaataaaattctgatagcttg

SEQ ID NO: 86263 - RNA, 21 nt, synthetic construct
  source 1..21: mol_type = other RNA
gaataaaccacgcagtttgtt

SEQ ID NO: 86264 - RNA, 21 nt, synthetic construct
  source 1..21: mol_type = other RNA
gaataaactaacaaagaacag

SEQ ID NO: 86265 - RNA, 21 nt, synthetic construct
  source 1..21: mol_type = other RNA
gaataaagggtcagaatttta

SEQ ID NO: 86266 - RNA, 21 nt, synthetic construct
  source 1..21: mol_type = other RNA
gaataaatggtagcttgggct

SEQ ID NO: 86267 - RNA, 21 nt, synthetic construct
  source 1..21: mol_type = other RNA
gaataaccaatgtcagagatc

SEQ ID NO: 86268 - RNA, 21 nt, synthetic construct
  source 1..21: mol_type = other RNA
gaataacccatatctttgctt

SEQ ID NO: 86269 - RNA, 21 nt, synthetic construct
  source 1..21: mol_type = other RNA
gaataacctcataagaactcc

SEQ ID NO: 86270 - RNA, 21 nt, synthetic construct
  source 1..21: mol_type = other RNA
gaataactgtcctgaattcta

SEQ ID NO: 86271 - RNA, 21 nt, synthetic construct
  source 1..21: mol_type = other RNA
gaataagctaatcccaaagtg

SEQ ID NO: 86272 - RNA, 21 nt, synthetic construct
  source 1..21: mol_type = other RNA
gaataaggtctgtaagtcagt

SEQ ID NO: 86273 - RNA, 21 nt, synthetic construct
  source 1..21: mol_type = other RNA
gaataatacacttttcaggta

SEQ ID NO: 86274 - RNA, 21 nt, synthetic construct
  source 1..21: mol_type = other RNA
gaataatttccaggtcattac

SEQ ID NO: 86275 - RNA, 21 nt, synthetic construct
  source 1..21: mol_type = other RNA
gaatacaaaaatgacacaact

SEQ ID NO: 86276 - RNA, 21 nt, synthetic construct
  source 1..21: mol_type = other RNA
gaatacaaaggtgttaagccg

SEQ ID NO: 86277 - RNA, 21 nt, synthetic construct
  source 1..21: mol_type = other RNA
gaataccaaattcacgagact

SEQ ID NO: 86278 - RNA, 21 nt, synthetic construct
  source 1..21: mol_type = other RNA
gaataccacttagtttgcaat

SEQ ID NO: 86279 - RNA, 21 nt, synthetic construct
  source 1..21: mol_type = other RNA
gaataccagagattgggaaaa

SEQ ID NO: 86280 - RNA, 21 nt, synthetic construct
  source 1..21: mol_type = other RNA
gaatacccctccctacctggc

SEQ ID NO: 86281 - RNA, 21 nt, synthetic construct
  source 1..21: mol_type = other RNA
gaatacctatttagagggatg

SEQ ID NO: 86282 - RNA, 21 nt, synthetic construct
  source 1..21: mol_type = other RNA
gaatactccaccagcatcttt

SEQ ID NO: 86283 - RNA, 21 nt, synthetic construct
  source 1..21: mol_type = other RNA
gaatactcgtgtgtctcataa

SEQ ID NO: 86284 - RNA, 21 nt, synthetic construct
  source 1..21: mol_type = other RNA
gaatactttcccatctctagt

SEQ ID NO: 86285 - RNA, 21 nt, synthetic construct
  source 1..21: mol_type = other RNA
gaatagaaaatccttacttcc

SEQ ID NO: 86286 - RNA, 21 nt, synthetic construct
  source 1..21: mol_type = other RNA
gaatagaaagttagtgtctaa

SEQ ID NO: 86287 - RNA, 21 nt, synthetic construct
  source 1..21: mol_type = other RNA
gaatagaagagcagtgtgttc

SEQ ID NO: 86288 - RNA, 21 nt, synthetic construct
  source 1..21: mol_type = other RNA
gaatagaagggagaacccagg

SEQ ID NO: 86289 - RNA, 21 nt, synthetic construct
  source 1..21: mol_type = other RNA
gaatagacaaagacaagttct

SEQ ID NO: 86290 - RNA, 21 nt, synthetic construct
  source 1..21: mol_type = other RNA
gaatagcaactgttttttcct

SEQ ID NO: 86291 - RNA, 21 nt, synthetic construct
  source 1..21: mol_type = other RNA
gaatagcagaaacacaggact

SEQ ID NO: 86292 - RNA, 21 nt, synthetic construct
  source 1..21: mol_type = other RNA
gaatagcatcttagctcttcc

SEQ ID NO: 86293 - RNA, 21 nt, synthetic construct
  source 1..21: mol_type = other RNA
gaataggaaagtgacagatga

SEQ ID NO: 86294 - RNA, 21 nt, synthetic construct
  source 1..21: mol_type = other RNA
gaataggcaaattcatagatc

SEQ ID NO: 86295 - RNA, 21 nt, synthetic construct
  source 1..21: mol_type = other RNA
gaatagggcctcaaatttcat

SEQ ID NO: 86296 - RNA, 21 nt, synthetic construct
  source 1..21: mol_type = other RNA
gaataggtgtgtgttccttcc

SEQ ID NO: 86297 - RNA, 21 nt, synthetic construct
  source 1..21: mol_type = other RNA
gaatagtagcttcaatgaggg

SEQ ID NO: 86298 - RNA, 21 nt, synthetic construct
  source 1..21: mol_type = other RNA
gaatagtattcaggacagatt

SEQ ID NO: 86299 - RNA, 21 nt, synthetic construct
  source 1..21: mol_type = other RNA
gaatataaacgtgtgtgtaag

SEQ ID NO: 86300 - RNA, 21 nt, synthetic construct
  source 1..21: mol_type = other RNA
gaatataaactcttccttatc

SEQ ID NO: 86301 - RNA, 21 nt, synthetic construct
  source 1..21: mol_type = other RNA
gaatatactggaaaactagag

SEQ ID NO: 86302 - RNA, 21 nt, synthetic construct
  source 1..21: mol_type = other RNA
gaatatagctaagaaacagta

SEQ ID NO: 86303 - RNA, 21 nt, synthetic construct
  source 1..21: mol_type = other RNA
gaatatataaagaactccaac

SEQ ID NO: 86304 - RNA, 21 nt, synthetic construct
  source 1..21: mol_type = other RNA
gaatatcatttgaatgatgcg

SEQ ID NO: 86305 - RNA, 21 nt, synthetic construct
  source 1..21: mol_type = other RNA
gaatatccaagcacaaacctg

SEQ ID NO: 86306 - RNA, 21 nt, synthetic construct
  source 1..21: mol_type = other RNA
gaatatgtactacctatagaa

SEQ ID NO: 86307 - RNA, 21 nt, synthetic construct
  source 1..21: mol_type = other RNA
gaatattactcagtctcgaaa

SEQ ID NO: 86308 - RNA, 21 nt, synthetic construct
  source 1..21: mol_type = other RNA
gaatattcgttccagcagggt

SEQ ID NO: 86309 - RNA, 21 nt, synthetic construct
  source 1..21: mol_type = other RNA
gaatattgttcagccttaaaa

SEQ ID NO: 86310 - RNA, 21 nt, synthetic construct
  source 1..21: mol_type = other RNA
gaatcaatccagacagctaat

SEQ ID NO: 86311 - RNA, 21 nt, synthetic construct
  source 1..21: mol_type = other RNA
gaatcacctcaaggcagaaca

SEQ ID NO: 86312 - RNA, 21 nt, synthetic construct
  source 1..21: mol_type = other RNA
gaatcactacagcatattagc

SEQ ID NO: 86313 - RNA, 21 nt, synthetic construct
  source 1..21: mol_type = other RNA
gaatcagacaacacattaata

SEQ ID NO: 86314 - RNA, 21 nt, synthetic construct
  source 1..21: mol_type = other RNA
gaatcaggtctctttgaaagg

SEQ ID NO: 86315 - RNA, 21 nt, synthetic construct
  source 1..21: mol_type = other RNA
gaatcatccggggagcttttg

SEQ ID NO: 86316 - RNA, 21 nt, synthetic construct
  source 1..21: mol_type = other RNA
gaatcatctaggcatataaac

SEQ ID NO: 86317 - RNA, 21 nt, synthetic construct
  source 1..21: mol_type = other RNA
gaatcatgggagccaaacttg

SEQ ID NO: 86318 - RNA, 21 nt, synthetic construct
  source 1..21: mol_type = other RNA
gaatccccaaataacatgcat

SEQ ID NO: 86319 - RNA, 21 nt, synthetic construct
  source 1..21: mol_type = other RNA
gaatccctttcgctaatctca

SEQ ID NO: 86320 - RNA, 21 nt, synthetic construct
  source 1..21: mol_type = other RNA
gaatccggctttatgagacac

SEQ ID NO: 86321 - RNA, 21 nt, synthetic construct
  source 1..21: mol_type = other RNA
gaatcctcacaacaggcctga

SEQ ID NO: 86322 - RNA, 21 nt, synthetic construct
  source 1..21: mol_type = other RNA
gaatcctgctattttattaga

SEQ ID NO: 86323 - RNA, 21 nt, synthetic construct
  source 1..21: mol_type = other RNA
gaatccttcagtcagttctct

SEQ ID NO: 86324 - RNA, 21 nt, synthetic construct
  source 1..21: mol_type = other RNA
gaatcctttgcttcccacttc

SEQ ID NO: 86325 - RNA, 21 nt, synthetic construct
  source 1..21: mol_type = other RNA
gaatcgtgatagtcttccaat

SEQ ID NO: 86326 - RNA, 21 nt, synthetic construct
  source 1..21: mol_type = other RNA
gaatctactcttttgtttttg

SEQ ID NO: 86327 - RNA, 21 nt, synthetic construct
  source 1..21: mol_type = other RNA
gaatctagaaagataaatcca

SEQ ID NO: 86328 - RNA, 21 nt, synthetic construct
  source 1..21: mol_type = other RNA
gaatctaggaaacactgctca

SEQ ID NO: 86329 - RNA, 21 nt, synthetic construct
  source 1..21: mol_type = other RNA
gaatctctctatccaccactc

SEQ ID NO: 86330 - RNA, 21 nt, synthetic construct
  source 1..21: mol_type = other RNA
gaatctgacctaagcttgggt

SEQ ID NO: 86331 - RNA, 21 nt, synthetic construct
  source 1..21: mol_type = other RNA
gaatctgagtaaagggtaaga

SEQ ID NO: 86332 - RNA, 21 nt, synthetic construct
  source 1..21: mol_type = other RNA
gaatctgcaactatcaaaaca

SEQ ID NO: 86333 - RNA, 21 nt, synthetic construct
  source 1..21: mol_type = other RNA
gaatctgtagattgttttagg

SEQ ID NO: 86334 - RNA, 21 nt, synthetic construct
  source 1..21: mol_type = other RNA
gaatctgttcctgggttctcc

SEQ ID NO: 86335 - RNA, 21 nt, synthetic construct
  source 1..21: mol_type = other RNA
gaatcttaaaataccagaggt

SEQ ID NO: 86336 - RNA, 21 nt, synthetic construct
  source 1..21: mol_type = other RNA
gaatcttaacatttctcatgt

SEQ ID NO: 86337 - RNA, 21 nt, synthetic construct
  source 1..21: mol_type = other RNA
gaatcttaccctgttgaccag

SEQ ID NO: 86338 - RNA, 21 nt, synthetic construct
  source 1..21: mol_type = other RNA
gaatcttactggtgttaggca

SEQ ID NO: 86339 - RNA, 21 nt, synthetic construct
  source 1..21: mol_type = other RNA
gaatctttggcaaacttagaa

SEQ ID NO: 86340 - RNA, 21 nt, synthetic construct
  source 1..21: mol_type = other RNA
gaatgaaaatttttgtctgga

SEQ ID NO: 86341 - RNA, 21 nt, synthetic construct
  source 1..21: mol_type = other RNA
gaatgaacaaaatgtggtata

SEQ ID NO: 86342 - RNA, 21 nt, synthetic construct
  source 1..21: mol_type = other RNA
gaatgaactcctatagttaag

SEQ ID NO: 86343 - RNA, 21 nt, synthetic construct
  source 1..21: mol_type = other RNA
gaatgaagcaggccttcgagg

SEQ ID NO: 86344 - RNA, 21 nt, synthetic construct
  source 1..21: mol_type = other RNA
gaatgaagtcagagattttcc

SEQ ID NO: 86345 - RNA, 21 nt, synthetic construct
  source 1..21: mol_type = other RNA
gaatgacagaaaatatctaca

SEQ ID NO: 86346 - RNA, 21 nt, synthetic construct
  source 1..21: mol_type = other RNA
gaatgaccgagatacttaagt

SEQ ID NO: 86347 - RNA, 21 nt, synthetic construct
  source 1..21: mol_type = other RNA
gaatgactgttgcctctgtgc

SEQ ID NO: 86348 - RNA, 21 nt, synthetic construct
  source 1..21: mol_type = other RNA
gaatgagaaacatacatgttc

SEQ ID NO: 86349 - RNA, 21 nt, synthetic construct
  source 1..21: mol_type = other RNA
gaatgagaccaaatgcataaa

SEQ ID NO: 86350 - RNA, 21 nt, synthetic construct
  source 1..21: mol_type = other RNA
gaatgagcaaggtcgtttcag

SEQ ID NO: 86351 - RNA, 21 nt, synthetic construct
  source 1..21: mol_type = other RNA
gaatgaggagtgaatttttca

SEQ ID NO: 86352 - RNA, 21 nt, synthetic construct
  source 1..21: mol_type = other RNA
gaatgagtccagctttctaat

SEQ ID NO: 86353 - RNA, 21 nt, synthetic construct
  source 1..21: mol_type = other RNA
gaatgatgccatcacattttg

SEQ ID NO: 86354 - RNA, 21 nt, synthetic construct
  source 1..21: mol_type = other RNA
gaatgattatttgcggcttga

SEQ ID NO: 86355 - RNA, 21 nt, synthetic construct
  source 1..21: mol_type = other RNA
gaatgattccacttatatgaa

SEQ ID NO: 86356 - RNA, 21 nt, synthetic construct
  source 1..21: mol_type = other RNA
gaatgatttccctgcatacac

SEQ ID NO: 86357 - RNA, 21 nt, synthetic construct
  source 1..21: mol_type = other RNA
gaatgcaaagtttcctacata

SEQ ID NO: 86358 - RNA, 21 nt, synthetic construct
  source 1..21: mol_type = other RNA
gaatgcacgtgaagctacaga

SEQ ID NO: 86359 - RNA, 21 nt, synthetic construct
  source 1..21: mol_type = other RNA
gaatgcagtggcttcctaact

SEQ ID NO: 86360 - RNA, 21 nt, synthetic construct
  source 1..21: mol_type = other RNA
gaatgcatatatctgtctggg

SEQ ID NO: 86361 - RNA, 21 nt, synthetic construct
  source 1..21: mol_type = other RNA
gaatgcatccctcctctggcc

SEQ ID NO: 86362 - RNA, 21 nt, synthetic construct
  source 1..21: mol_type = other RNA
gaatgcatcgtttcaatatta

SEQ ID NO: 86363 - RNA, 21 nt, synthetic construct
  source 1..21: mol_type = other RNA
gaatgcatcttttaaaaacct

SEQ ID NO: 86364 - RNA, 21 nt, synthetic construct
  source 1..21: mol_type = other RNA
gaatgcatgggaggtaatact

SEQ ID NO: 86365 - RNA, 21 nt, synthetic construct
  source 1..21: mol_type = other RNA
gaatgcccatcctctattttt

SEQ ID NO: 86366 - RNA, 21 nt, synthetic construct
  source 1..21: mol_type = other RNA
gaatgcccctgtagcagacac

SEQ ID NO: 86367 - RNA, 21 nt, synthetic construct
  source 1..21: mol_type = other RNA
gaatgcccctttgagcagagt

SEQ ID NO: 86368 - RNA, 21 nt, synthetic construct
  source 1..21: mol_type = other RNA
gaatgcctataaaatgctgga

SEQ ID NO: 86369 - RNA, 21 nt, synthetic construct
  source 1..21: mol_type = other RNA
gaatgctcataattaaagaga

SEQ ID NO: 86370 - RNA, 21 nt, synthetic construct
  source 1..21: mol_type = other RNA
gaatggaaaattcaaacatga

SEQ ID NO: 86371 - RNA, 21 nt, synthetic construct
  source 1..21: mol_type = other RNA
gaatggaaaattcttggtctt

SEQ ID NO: 86372 - RNA, 21 nt, synthetic construct
  source 1..21: mol_type = other RNA
gaatggaaacttgccatcttg

SEQ ID NO: 86373 - RNA, 21 nt, synthetic construct
  source 1..21: mol_type = other RNA
gaatggaaagaaatagaactg

SEQ ID NO: 86374 - RNA, 21 nt, synthetic construct
  source 1..21: mol_type = other RNA
gaatggaaatgtaaattccta

SEQ ID NO: 86375 - RNA, 21 nt, synthetic construct
  source 1..21: mol_type = other RNA
gaatggaattctgatgcacaa

SEQ ID NO: 86376 - RNA, 21 nt, synthetic construct
  source 1..21: mol_type = other RNA
gaatggataaggaaaatatga

SEQ ID NO: 86377 - RNA, 21 nt, synthetic construct
  source 1..21: mol_type = other RNA
gaatggcaaggctaacagcca

SEQ ID NO: 86378 - RNA, 21 nt, synthetic construct
  source 1..21: mol_type = other RNA
gaatggcatgaacccaccagg

SEQ ID NO: 86379 - RNA, 21 nt, synthetic construct
  source 1..21: mol_type = other RNA
gaatggccctgcgattggttg

SEQ ID NO: 86380 - RNA, 21 nt, synthetic construct
  source 1..21: mol_type = other RNA
gaatggctggaatggtgaaga

SEQ ID NO: 86381 - RNA, 21 nt, synthetic construct
  source 1..21: mol_type = other RNA
gaatggggagctagagggtaa

SEQ ID NO: 86382 - RNA, 21 nt, synthetic construct
  source 1..21: mol_type = other RNA
gaatggggatgcaacaaatgt

SEQ ID NO: 86383 - RNA, 21 nt, synthetic construct
  source 1..21: mol_type = other RNA
gaatggggtaattttggggcc

SEQ ID NO: 86384 - RNA, 21 nt, synthetic construct
  source 1..21: mol_type = other RNA
gaatgggttggaggagaaggc

SEQ ID NO: 86385 - RNA, 21 nt, synthetic construct
  source 1..21: mol_type = other RNA
gaatggtactgcctccacagg

SEQ ID NO: 86386 - RNA, 21 nt, synthetic construct
  source 1..21: mol_type = other RNA
gaatggtcaatttcatcgtaa

SEQ ID NO: 86387 - RNA, 21 nt, synthetic construct
  source 1..21: mol_type = other RNA
gaatggtgaagaatgtgaaaa

SEQ ID NO: 86388 - RNA, 21 nt, synthetic construct
  source 1..21: mol_type = other RNA
gaatggtttaacacatacaaa

SEQ ID NO: 86389 - RNA, 21 nt, synthetic construct
  source 1..21: mol_type = other RNA
gaatgtcaagctgtttgagct

SEQ ID NO: 86390 - RNA, 21 nt, synthetic construct
  source 1..21: mol_type = other RNA
gaatgtccatcaggaaaacca

SEQ ID NO: 86391 - RNA, 21 nt, synthetic construct
  source 1..21: mol_type = other RNA
gaatgtgaaaaatttgacatg

SEQ ID NO: 86392 - RNA, 21 nt, synthetic construct
  source 1..21: mol_type = other RNA
gaatgtgacctgtccttgtgt

SEQ ID NO: 86393 - RNA, 21 nt, synthetic construct
  source 1..21: mol_type = other RNA
gaatgtgacttcgtcaagggg

SEQ ID NO: 86394 - RNA, 21 nt, synthetic construct
  source 1..21: mol_type = other RNA
gaatgtgaggtgaggacatgg

SEQ ID NO: 86395 - RNA, 21 nt, synthetic construct
  source 1..21: mol_type = other RNA
gaatgtgcacctccagtgtcc

SEQ ID NO: 86396 - RNA, 21 nt, synthetic construct
  source 1..21: mol_type = other RNA
gaatgtgcactcttttaaacc

SEQ ID NO: 86397 - RNA, 21 nt, synthetic construct
  source 1..21: mol_type = other RNA
gaatgtgcctacatagtccac

SEQ ID NO: 86398 - RNA, 21 nt, synthetic construct
  source 1..21: mol_type = other RNA
gaatgtgcttcctaaacctgc

SEQ ID NO: 86399 - RNA, 21 nt, synthetic construct
  source 1..21: mol_type = other RNA
gaatgtggcagaatttacatt

SEQ ID NO: 86400 - RNA, 21 nt, synthetic construct
  source 1..21: mol_type = other RNA
gaatgtggtcacactttttgt

SEQ ID NO: 86401 - RNA, 21 nt, synthetic construct
  source 1..21: mol_type = other RNA
gaatgtggtggtatgcactgt

SEQ ID NO: 86402 - RNA, 21 nt, synthetic construct
  source 1..21: mol_type = other RNA
gaatgtgtagttctggtgtcg

SEQ ID NO: 86403 - RNA, 21 nt, synthetic construct
  source 1..21: mol_type = other RNA
gaatgttcaagtatttccacg

SEQ ID NO: 86404 - RNA, 21 nt, synthetic construct
  source 1..21: mol_type = other RNA
gaatgtttttccgtctagcca

SEQ ID NO: 86405 - RNA, 21 nt, synthetic construct
  source 1..21: mol_type = other RNA
gaattaaaaacattggaggat

SEQ ID NO: 86406 - RNA, 21 nt, synthetic construct
  source 1..21: mol_type = other RNA
gaattaaacaatcttgaaagg

SEQ ID NO: 86407 - RNA, 21 nt, synthetic construct
  source 1..21: mol_type = other RNA
gaattaaactcattatcccag

SEQ ID NO: 86408 - RNA, 21 nt, synthetic construct
  source 1..21: mol_type = other RNA
gaattaacactaatccttctc

SEQ ID NO: 86409 - RNA, 21 nt, synthetic construct
  source 1..21: mol_type = other RNA
gaattaactccaggggacatg

SEQ ID NO: 86410 - RNA, 21 nt, synthetic construct
  source 1..21: mol_type = other RNA
gaattaagcaccactagagta

SEQ ID NO: 86411 - RNA, 21 nt, synthetic construct
  source 1..21: mol_type = other RNA
gaattaatctcttacacctgt

SEQ ID NO: 86412 - RNA, 21 nt, synthetic construct
  source 1..21: mol_type = other RNA
gaattacaaatgaaagtcagc

SEQ ID NO: 86413 - RNA, 21 nt, synthetic construct
  source 1..21: mol_type = other RNA
gaattacaggcatgagtcgcc

SEQ ID NO: 86414 - RNA, 21 nt, synthetic construct
  source 1..21: mol_type = other RNA
gaattactgacaatagccaag

SEQ ID NO: 86415 - RNA, 21 nt, synthetic construct
  source 1..21: mol_type = other RNA
gaattagaaagctggactcat

SEQ ID NO: 86416 - RNA, 21 nt, synthetic construct
  source 1..21: mol_type = other RNA
gaattagatggcttaggatca

SEQ ID NO: 86417 - RNA, 21 nt, synthetic construct
  source 1..21: mol_type = other RNA
gaattagattgttttgttgct

SEQ ID NO: 86418 - RNA, 21 nt, synthetic construct
  source 1..21: mol_type = other RNA
gaattagcaatgcgaatcatc

SEQ ID NO: 86419 - RNA, 21 nt, synthetic construct
  source 1..21: mol_type = other RNA
gaattagtgattttaccaagg

SEQ ID NO: 86420 - RNA, 21 nt, synthetic construct
  source 1..21: mol_type = other RNA
gaattatagagggcctaaata

SEQ ID NO: 86421 - RNA, 21 nt, synthetic construct
  source 1..21: mol_type = other RNA
gaattatgctaacatgaacta

SEQ ID NO: 86422 - RNA, 21 nt, synthetic construct
  source 1..21: mol_type = other RNA
gaattattgattggcaaatct

SEQ ID NO: 86423 - RNA, 21 nt, synthetic construct
  source 1..21: mol_type = other RNA
gaattattgtctgcaagcaga

SEQ ID NO: 86424 - RNA, 21 nt, synthetic construct
  source 1..21: mol_type = other RNA
gaattcacagtagaagactca

SEQ ID NO: 86425 - RNA, 21 nt, synthetic construct
  source 1..21: mol_type = other RNA
gaattcactaatgcctcaaat

SEQ ID NO: 86426 - RNA, 21 nt, synthetic construct
  source 1..21: mol_type = other RNA
gaattcactgtgactccaaag

SEQ ID NO: 86427 - RNA, 21 nt, synthetic construct
  source 1..21: mol_type = other RNA
gaattcagagtggctaatgtg

SEQ ID NO: 86428 - RNA, 21 nt, synthetic construct
  source 1..21: mol_type = other RNA
gaattcagatggccccaaaat

SEQ ID NO: 86429 - RNA, 21 nt, synthetic construct
  source 1..21: mol_type = other RNA
gaattcaggacagtcatcctc

SEQ ID NO: 86430 - RNA, 21 nt, synthetic construct
  source 1..21: mol_type = other RNA
gaattcaggacagttattctt

SEQ ID NO: 86431 - RNA, 21 nt, synthetic construct
  source 1..21: mol_type = other RNA
gaattcagtcaccaaacgttt

SEQ ID NO: 86432 - RNA, 21 nt, synthetic construct
  source 1..21: mol_type = other RNA
gaattcattgttgtgtgttaa

SEQ ID NO: 86433 - RNA, 21 nt, synthetic construct
  source 1..21: mol_type = other RNA
gaattccatcagtggttgtgc

SEQ ID NO: 86434 - RNA, 21 nt, synthetic construct
  source 1..21: mol_type = other RNA
gaattccattccttttcgaga

SEQ ID NO: 86435 - RNA, 21 nt, synthetic construct
  source 1..21: mol_type = other RNA
gaattcccacaaaatatgaag

SEQ ID NO: 86436 - RNA, 21 nt, synthetic construct
  source 1..21: mol_type = other RNA
gaattcgttaatacttgtgta

SEQ ID NO: 86437 - RNA, 21 nt, synthetic construct
  source 1..21: mol_type = other RNA
gaattctaatgaactcccaga

SEQ ID NO: 86438 - RNA, 21 nt, synthetic construct
  source 1..21: mol_type = other RNA
gaattctactaaacattaagg

SEQ ID NO: 86439 - RNA, 21 nt, synthetic construct
  source 1..21: mol_type = other RNA
gaattctataggtagtacata

SEQ ID NO: 86440 - RNA, 21 nt, synthetic construct
  source 1..21: mol_type = other RNA
gaattctctctcaactggccc

SEQ ID NO: 86441 - RNA, 21 nt, synthetic construct
  source 1..21: mol_type = other RNA
gaattctctggaatagaagag

SEQ ID NO: 86442 - RNA, 21 nt, synthetic construct
  source 1..21: mol_type = other RNA
gaattctgacacccgaagagg

SEQ ID NO: 86443 - RNA, 21 nt, synthetic construct
  source 1..21: mol_type = other RNA
gaattctgacttagtgaggga

SEQ ID NO: 86444 - RNA, 21 nt, synthetic construct
  source 1..21: mol_type = other RNA
gaattctgatgcacaagcctt

SEQ ID NO: 86445 - RNA, 21 nt, synthetic construct
  source 1..21: mol_type = other RNA
gaattctgcttattatatgcc

SEQ ID NO: 86446 - RNA, 21 nt, synthetic construct
  source 1..21: mol_type = other RNA
gaattcttgacctcaaatgat

SEQ ID NO: 86447 - RNA, 21 nt, synthetic construct
  source 1..21: mol_type = other RNA
gaattctttaaaactgctgag

SEQ ID NO: 86448 - RNA, 21 nt, synthetic construct
  source 1..21: mol_type = other RNA
gaattgactttaccctgctgg

SEQ ID NO: 86449 - RNA, 21 nt, synthetic construct
  source 1..21: mol_type = other RNA
gaattgagatgtactggaagt

SEQ ID NO: 86450 - RNA, 21 nt, synthetic construct
  source 1..21: mol_type = other RNA
gaattgcatgagacttggagt

SEQ ID NO: 86451 - RNA, 21 nt, synthetic construct
  source 1..21: mol_type = other RNA
gaattgccatatgtagggcac

SEQ ID NO: 86452 - RNA, 21 nt, synthetic construct
  source 1..21: mol_type = other RNA
gaattggtagtcaatgcaatg

SEQ ID NO: 86453 - RNA, 21 nt, synthetic construct
  source 1..21: mol_type = other RNA
gaattgtaatcacagtacgct

SEQ ID NO: 86454 - RNA, 21 nt, synthetic construct
  source 1..21: mol_type = other RNA
gaattgtgacagttctatttc

SEQ ID NO: 86455 - RNA, 21 nt, synthetic construct
  source 1..21: mol_type = other RNA
gaattgttgcgcgtcaaaaga

SEQ ID NO: 86456 - RNA, 21 nt, synthetic construct
  source 1..21: mol_type = other RNA
gaattgttggagttctttata

SEQ ID NO: 86457 - RNA, 21 nt, synthetic construct
  source 1..21: mol_type = other RNA
gaatttaagacacaaggaagg

SEQ ID NO: 86458 - RNA, 21 nt, synthetic construct
  source 1..21: mol_type = other RNA
gaatttaaggggtaaatggtt

SEQ ID NO: 86459 - RNA, 21 nt, synthetic construct
  source 1..21: mol_type = other RNA
gaatttaattttgagagtgca

SEQ ID NO: 86460 - RNA, 21 nt, synthetic construct
  source 1..21: mol_type = other RNA
gaatttcagaaagagaatagc

SEQ ID NO: 86461 - RNA, 21 nt, synthetic construct
  source 1..21: mol_type = other RNA
gaatttcaggtgtgtaaacac

SEQ ID NO: 86462 - RNA, 21 nt, synthetic construct
  source 1..21: mol_type = other RNA
gaatttcatgcctttcagcat

SEQ ID NO: 86463 - RNA, 21 nt, synthetic construct
  source 1..21: mol_type = other RNA
gaatttctgtccttggattgc

SEQ ID NO: 86464 - RNA, 21 nt, synthetic construct
  source 1..21: mol_type = other RNA
gaatttgaggtcttctagctt

SEQ ID NO: 86465 - RNA, 21 nt, synthetic construct
  source 1..21: mol_type = other RNA
gaatttgcctattctggggct

SEQ ID NO: 86466 - RNA, 21 nt, synthetic construct
  source 1..21: mol_type = other RNA
gaatttggaaagggtagagca

SEQ ID NO: 86467 - RNA, 21 nt, synthetic construct
  source 1..21: mol_type = other RNA
gaatttggatttgagtaacta

SEQ ID NO: 86468 - RNA, 21 nt, synthetic construct
  source 1..21: mol_type = other RNA
gaatttggtattcttatccct

SEQ ID NO: 86469 - RNA, 21 nt, synthetic construct
  source 1..21: mol_type = other RNA
gaattttaagcctagagatta

SEQ ID NO: 86470 - RNA, 21 nt, synthetic construct
  source 1..21: mol_type = other RNA
gaattttactgatcttttctg

SEQ ID NO: 86471 - RNA, 21 nt, synthetic construct
  source 1..21: mol_type = other RNA
gaattttaggacaaggaaagg

SEQ ID NO: 86472 - RNA, 21 nt, synthetic construct
  source 1..21: mol_type = other RNA
gaattttagtaattctccact

SEQ ID NO: 86473 - RNA, 21 nt, synthetic construct
  source 1..21: mol_type = other RNA
gaattttcaggactcatgaga

SEQ ID NO: 86474 - RNA, 21 nt, synthetic construct
  source 1..21: mol_type = other RNA
gaattttccattcacacaccc

SEQ ID NO: 86475 - RNA, 21 nt, synthetic construct
  source 1..21: mol_type = other RNA
gaattttccattcatgtaatg

SEQ ID NO: 86476 - RNA, 21 nt, synthetic construct
  source 1..21: mol_type = other RNA
gaattttgcttttgctttggg

SEQ ID NO: 86477 - RNA, 21 nt, synthetic construct
  source 1..21: mol_type = other RNA
gaatttttcttacctaagcat

SEQ ID NO: 86478 - RNA, 21 nt, synthetic construct
  source 1..21: mol_type = other RNA
gacaaaaaacgcggcacttgg

SEQ ID NO: 86479 - RNA, 21 nt, synthetic construct
  source 1..21: mol_type = other RNA
gacaaaaagtaggggtaaatc

SEQ ID NO: 86480 - RNA, 21 nt, synthetic construct
  source 1..21: mol_type = other RNA
gacaaaaataatatgataccc

SEQ ID NO: 86481 - RNA, 21 nt, synthetic construct
  source 1..21: mol_type = other RNA
gacaaaaatagaggatgggca

SEQ ID NO: 86482 - RNA, 21 nt, synthetic construct
  source 1..21: mol_type = other RNA
gacaaaaattttcattctacc

SEQ ID NO: 86483 - RNA, 21 nt, synthetic construct
  source 1..21: mol_type = other RNA
gacaaaaggccccttgaaaga

SEQ ID NO: 86484 - RNA, 21 nt, synthetic construct
  source 1..21: mol_type = other RNA
gacaaacacttttcaaacact

SEQ ID NO: 86485 - RNA, 21 nt, synthetic construct
  source 1..21: mol_type = other RNA
gacaaagacaagttcttacct

SEQ ID NO: 86486 - RNA, 21 nt, synthetic construct
  source 1..21: mol_type = other RNA
gacaaagcataaaatatgtga

SEQ ID NO: 86487 - RNA, 21 nt, synthetic construct
  source 1..21: mol_type = other RNA
gacaaaggttgcagtgagcag

SEQ ID NO: 86488 - RNA, 21 nt, synthetic construct
  source 1..21: mol_type = other RNA
gacaaagtatgagaaatgtct

SEQ ID NO: 86489 - RNA, 21 nt, synthetic construct
  source 1..21: mol_type = other RNA
gacaaataaaagcttatgatc

SEQ ID NO: 86490 - RNA, 21 nt, synthetic construct
  source 1..21: mol_type = other RNA
gacaaattaccatgtttccat

SEQ ID NO: 86491 - RNA, 21 nt, synthetic construct
  source 1..21: mol_type = other RNA
gacaacacattaataagatca

SEQ ID NO: 86492 - RNA, 21 nt, synthetic construct
  source 1..21: mol_type = other RNA
gacaacagtgtgagaccgtgt

SEQ ID NO: 86493 - RNA, 21 nt, synthetic construct
  source 1..21: mol_type = other RNA
gacaactgggagaatggcaag

SEQ ID NO: 86494 - RNA, 21 nt, synthetic construct
  source 1..21: mol_type = other RNA
gacaagaatctttggcaaact

SEQ ID NO: 86495 - RNA, 21 nt, synthetic construct
  source 1..21: mol_type = other RNA
gacaagacgtgtacataaaat

SEQ ID NO: 86496 - RNA, 21 nt, synthetic construct
  source 1..21: mol_type = other RNA
gacaagactaaaaaattagac

SEQ ID NO: 86497 - RNA, 21 nt, synthetic construct
  source 1..21: mol_type = other RNA
gacaagactacctaaaacaat

SEQ ID NO: 86498 - RNA, 21 nt, synthetic construct
  source 1..21: mol_type = other RNA
gacaagagcagaactccacct

SEQ ID NO: 86499 - RNA, 21 nt, synthetic construct
  source 1..21: mol_type = other RNA
gacaagagtctgcagaccaag

SEQ ID NO: 86500 - RNA, 21 nt, synthetic construct
  source 1..21: mol_type = other RNA
gacaagcaaggaagggcttga

SEQ ID NO: 86501 - RNA, 21 nt, synthetic construct
  source 1..21: mol_type = other RNA
gacaagcacaggcatctctct

SEQ ID NO: 86502 - RNA, 21 nt, synthetic construct
  source 1..21: mol_type = other RNA
gacaaggaaaggatggtttga

SEQ ID NO: 86503 - RNA, 21 nt, synthetic construct
  source 1..21: mol_type = other RNA
gacaagtaaatgcaatgcagg

SEQ ID NO: 86504 - RNA, 21 nt, synthetic construct
  source 1..21: mol_type = other RNA
gacaagtactgcatgattccc

SEQ ID NO: 86505 - RNA, 21 nt, synthetic construct
  source 1..21: mol_type = other RNA
gacaagtagtacaaaagtgct

SEQ ID NO: 86506 - RNA, 21 nt, synthetic construct
  source 1..21: mol_type = other RNA
gacaagtgggtggatgggtgt

SEQ ID NO: 86507 - RNA, 21 nt, synthetic construct
  source 1..21: mol_type = other RNA
gacaagttcagcatcttcact

SEQ ID NO: 86508 - RNA, 21 nt, synthetic construct
  source 1..21: mol_type = other RNA
gacaagttctcctgtgtgcat

SEQ ID NO: 86509 - RNA, 21 nt, synthetic construct
  source 1..21: mol_type = other RNA
gacaagttcttacctcaaagg

SEQ ID NO: 86510 - RNA, 21 nt, synthetic construct
  source 1..21: mol_type = other RNA
gacaataaatggtgcaggcca

SEQ ID NO: 86511 - RNA, 21 nt, synthetic construct
  source 1..21: mol_type = other RNA
gacaataataactacacatca

SEQ ID NO: 86512 - RNA, 21 nt, synthetic construct
  source 1..21: mol_type = other RNA
gacaataattcttcctgtctt

SEQ ID NO: 86513 - RNA, 21 nt, synthetic construct
  source 1..21: mol_type = other RNA
gacaatactgttatgacaaga

SEQ ID NO: 86514 - RNA, 21 nt, synthetic construct
  source 1..21: mol_type = other RNA
gacaatagccaagacatggaa

SEQ ID NO: 86515 - RNA, 21 nt, synthetic construct
  source 1..21: mol_type = other RNA
gacaatagctagtgtcttagt

SEQ ID NO: 86516 - RNA, 21 nt, synthetic construct
  source 1..21: mol_type = other RNA
gacaatataggagactatcgt

SEQ ID NO: 86517 - RNA, 21 nt, synthetic construct
  source 1..21: mol_type = other RNA
gacaatctctggggttagggc

SEQ ID NO: 86518 - RNA, 21 nt, synthetic construct
  source 1..21: mol_type = other RNA
gacaatgccagggcgctcctc

SEQ ID NO: 86519 - RNA, 21 nt, synthetic construct
  source 1..21: mol_type = other RNA
gacaatgtctttggctcttag

SEQ ID NO: 86520 - RNA, 21 nt, synthetic construct
  source 1..21: mol_type = other RNA
gacaatgtggagttggtgcaa

SEQ ID NO: 86521 - RNA, 21 nt, synthetic construct
  source 1..21: mol_type = other RNA
gacaattgaatggggatgcaa

SEQ ID NO: 86522 - RNA, 21 nt, synthetic construct
  source 1..21: mol_type = other RNA
gacaatttcagggagaattgg

SEQ ID NO: 86523 - RNA, 21 nt, synthetic construct
  source 1..21: mol_type = other RNA
gacaatttgccaaaatgattt

SEQ ID NO: 86524 - RNA, 21 nt, synthetic construct
  source 1..21: mol_type = other RNA
gacacaaaagagctgggcccg

SEQ ID NO: 86525 - RNA, 21 nt, synthetic construct
  source 1..21: mol_type = other RNA
gacacaaaatcagatatgaaa

SEQ ID NO: 86526 - RNA, 21 nt, synthetic construct
  source 1..21: mol_type = other RNA
gacacaaaggactggaactca

SEQ ID NO: 86527 - RNA, 21 nt, synthetic construct
  source 1..21: mol_type = other RNA
gacacaaattatgactgagat

SEQ ID NO: 86528 - RNA, 21 nt, synthetic construct
  source 1..21: mol_type = other RNA
gacacaacttactactaaaaa

SEQ ID NO: 86529 - RNA, 21 nt, synthetic construct
  source 1..21: mol_type = other RNA
gacacaaggaaggtcaaatgg

SEQ ID NO: 86530 - RNA, 21 nt, synthetic construct
  source 1..21: mol_type = other RNA
gacacacaatccaagtttcta

SEQ ID NO: 86531 - RNA, 21 nt, synthetic construct
  source 1..21: mol_type = other RNA
gacacacacagtcctgtgttt

SEQ ID NO: 86532 - RNA, 21 nt, synthetic construct
  source 1..21: mol_type = other RNA
gacacacatcagacacctaca

SEQ ID NO: 86533 - RNA, 21 nt, synthetic construct
  source 1..21: mol_type = other RNA
gacacaccatgacagagttcc

SEQ ID NO: 86534 - RNA, 21 nt, synthetic construct
  source 1..21: mol_type = other RNA
gacacacgagtattcaagttt

SEQ ID NO: 86535 - RNA, 21 nt, synthetic construct
  source 1..21: mol_type = other RNA
gacacactagctgacccactg

SEQ ID NO: 86536 - RNA, 21 nt, synthetic construct
  source 1..21: mol_type = other RNA
gacacactgaaacaatcgcaa

SEQ ID NO: 86537 - RNA, 21 nt, synthetic construct
  source 1..21: mol_type = other RNA
gacacaggctgaagggaggaa

SEQ ID NO: 86538 - RNA, 21 nt, synthetic construct
  source 1..21: mol_type = other RNA
gacacatactgaaagacagac

SEQ ID NO: 86539 - RNA, 21 nt, synthetic construct
  source 1..21: mol_type = other RNA
gacacatttttgacagccacg

SEQ ID NO: 86540 - RNA, 21 nt, synthetic construct
  source 1..21: mol_type = other RNA
gacaccaaaactacaggcaac

SEQ ID NO: 86541 - RNA, 21 nt, synthetic construct
  source 1..21: mol_type = other RNA
gacaccagaactacacattcc

SEQ ID NO: 86542 - RNA, 21 nt, synthetic construct
  source 1..21: mol_type = other RNA
gacacccgaagaggacgattt

SEQ ID NO: 86543 - RNA, 21 nt, synthetic construct
  source 1..21: mol_type = other RNA
gacacccgacccactagtgaa

SEQ ID NO: 86544 - RNA, 21 nt, synthetic construct
  source 1..21: mol_type = other RNA
gacaccgctccacgcccatta

SEQ ID NO: 86545 - RNA, 21 nt, synthetic construct
  source 1..21: mol_type = other RNA
gacacctacaatattaacttt

SEQ ID NO: 86546 - RNA, 21 nt, synthetic construct
  source 1..21: mol_type = other RNA
gacacctacattaatctcatc

SEQ ID NO: 86547 - RNA, 21 nt, synthetic construct
  source 1..21: mol_type = other RNA
gacacctgaggggtcttatgc

SEQ ID NO: 86548 - RNA, 21 nt, synthetic construct
  source 1..21: mol_type = other RNA
gacacggtctcacactgttgt

SEQ ID NO: 86549 - RNA, 21 nt, synthetic construct
  source 1..21: mol_type = other RNA
gacactaactttctattcccc

SEQ ID NO: 86550 - RNA, 21 nt, synthetic construct
  source 1..21: mol_type = other RNA
gacactagcaatccaggatct

SEQ ID NO: 86551 - RNA, 21 nt, synthetic construct
  source 1..21: mol_type = other RNA
gacactagctattgtcttttc

SEQ ID NO: 86552 - RNA, 21 nt, synthetic construct
  source 1..21: mol_type = other RNA
gacactagggactggcctcgg

SEQ ID NO: 86553 - RNA, 21 nt, synthetic construct
  source 1..21: mol_type = other RNA
gacactattgagagtgaaaac

SEQ ID NO: 86554 - RNA, 21 nt, synthetic construct
  source 1..21: mol_type = other RNA
gacactgcagatgaatgagca

SEQ ID NO: 86555 - RNA, 21 nt, synthetic construct
  source 1..21: mol_type = other RNA
gacactggaggtgcacattcc

SEQ ID NO: 86556 - RNA, 21 nt, synthetic construct
  source 1..21: mol_type = other RNA
gacactgggttctcaccaaca

SEQ ID NO: 86557 - RNA, 21 nt, synthetic construct
  source 1..21: mol_type = other RNA
gacagaaaatatctacaaatc

SEQ ID NO: 86558 - RNA, 21 nt, synthetic construct
  source 1..21: mol_type = other RNA
gacagaaattcaacttggtaa

SEQ ID NO: 86559 - RNA, 21 nt, synthetic construct
  source 1..21: mol_type = other RNA
gacagaacaaactcaagttcc

SEQ ID NO: 86560 - RNA, 21 nt, synthetic construct
  source 1..21: mol_type = other RNA
gacagaacaaataacaccata

SEQ ID NO: 86561 - RNA, 21 nt, synthetic construct
  source 1..21: mol_type = other RNA
gacagaatcttactggtgtta

SEQ ID NO: 86562 - RNA, 21 nt, synthetic construct
  source 1..21: mol_type = other RNA
gacagaatgcatcttttaaaa

SEQ ID NO: 86563 - RNA, 21 nt, synthetic construct
  source 1..21: mol_type = other RNA
gacagacatgcatgcacacag

SEQ ID NO: 86564 - RNA, 21 nt, synthetic construct
  source 1..21: mol_type = other RNA
gacagacatttggaatagaga

SEQ ID NO: 86565 - RNA, 21 nt, synthetic construct
  source 1..21: mol_type = other RNA
gacagaccctggcttgtgaca

SEQ ID NO: 86566 - RNA, 21 nt, synthetic construct
  source 1..21: mol_type = other RNA
gacagacctctattaaatcat

SEQ ID NO: 86567 - RNA, 21 nt, synthetic construct
  source 1..21: mol_type = other RNA
gacagactgcagttggattat

SEQ ID NO: 86568 - RNA, 21 nt, synthetic construct
  source 1..21: mol_type = other RNA
gacagagagagacctttcttt

SEQ ID NO: 86569 - RNA, 21 nt, synthetic construct
  source 1..21: mol_type = other RNA
gacagagcaacaacctgtctc

SEQ ID NO: 86570 - RNA, 21 nt, synthetic construct
  source 1..21: mol_type = other RNA
gacagagcagtaggcttagat

SEQ ID NO: 86571 - RNA, 21 nt, synthetic construct
  source 1..21: mol_type = other RNA
gacagagccgagcagaaggga

SEQ ID NO: 86572 - RNA, 21 nt, synthetic construct
  source 1..21: mol_type = other RNA
gacagagctagaactagaata

SEQ ID NO: 86573 - RNA, 21 nt, synthetic construct
  source 1..21: mol_type = other RNA
gacagagctccctctccctcc

SEQ ID NO: 86574 - RNA, 21 nt, synthetic construct
  source 1..21: mol_type = other RNA
gacagagtgaaactctggctc

SEQ ID NO: 86575 - RNA, 21 nt, synthetic construct
  source 1..21: mol_type = other RNA
gacagagttccacctccatca

SEQ ID NO: 86576 - RNA, 21 nt, synthetic construct
  source 1..21: mol_type = other RNA
gacagatatatgcattcccat

SEQ ID NO: 86577 - RNA, 21 nt, synthetic construct
  source 1..21: mol_type = other RNA
gacagatcccaaaaaggtttt

SEQ ID NO: 86578 - RNA, 21 nt, synthetic construct
  source 1..21: mol_type = other RNA
gacagatcttatggaatagtt

SEQ ID NO: 86579 - RNA, 21 nt, synthetic construct
  source 1..21: mol_type = other RNA
gacagatgagaaatacttgga

SEQ ID NO: 86580 - RNA, 21 nt, synthetic construct
  source 1..21: mol_type = other RNA
gacagatgagactcttaatat

SEQ ID NO: 86581 - RNA, 21 nt, synthetic construct
  source 1..21: mol_type = other RNA
gacagatgtgcttaatcttca

SEQ ID NO: 86582 - RNA, 21 nt, synthetic construct
  source 1..21: mol_type = other RNA
gacagattaaataccacctga

SEQ ID NO: 86583 - RNA, 21 nt, synthetic construct
  source 1..21: mol_type = other RNA
gacagattctctgtctctgtt

SEQ ID NO: 86584 - RNA, 21 nt, synthetic construct
  source 1..21: mol_type = other RNA
gacagcaaataaacaaaatca

SEQ ID NO: 86585 - RNA, 21 nt, synthetic construct
  source 1..21: mol_type = other RNA
gacagcacattaaataagggc

SEQ ID NO: 86586 - RNA, 21 nt, synthetic construct
  source 1..21: mol_type = other RNA
gacagcagataagatccaagt

SEQ ID NO: 86587 - RNA, 21 nt, synthetic construct
  source 1..21: mol_type = other RNA
gacagcaggaaaagctaccct

SEQ ID NO: 86588 - RNA, 21 nt, synthetic construct
  source 1..21: mol_type = other RNA
gacagcatccccagaaagaga

SEQ ID NO: 86589 - RNA, 21 nt, synthetic construct
  source 1..21: mol_type = other RNA
gacagccacgtgtattgagtg

SEQ ID NO: 86590 - RNA, 21 nt, synthetic construct
  source 1..21: mol_type = other RNA
gacagcctaaaccattttcaa

SEQ ID NO: 86591 - RNA, 21 nt, synthetic construct
  source 1..21: mol_type = other RNA
gacagcggggatggttgcaca

SEQ ID NO: 86592 - RNA, 21 nt, synthetic construct
  source 1..21: mol_type = other RNA
gacagctaatatgctgtagtg

SEQ ID NO: 86593 - RNA, 21 nt, synthetic construct
  source 1..21: mol_type = other RNA
gacagctacggaggatgaggg

SEQ ID NO: 86594 - RNA, 21 nt, synthetic construct
  source 1..21: mol_type = other RNA
gacagctactaaacaaatcag

SEQ ID NO: 86595 - RNA, 21 nt, synthetic construct
  source 1..21: mol_type = other RNA
gacagctcaattaagcaacct

SEQ ID NO: 86596 - RNA, 21 nt, synthetic construct
  source 1..21: mol_type = other RNA
gacagctgagtagcgctttaa

SEQ ID NO: 86597 - RNA, 21 nt, synthetic construct
  source 1..21: mol_type = other RNA
gacagctgggagaaagctaat

SEQ ID NO: 86598 - RNA, 21 nt, synthetic construct
  source 1..21: mol_type = other RNA
gacagcttccacccaagtgga

SEQ ID NO: 86599 - RNA, 21 nt, synthetic construct
  source 1..21: mol_type = other RNA
gacaggaagaattattgtctg

SEQ ID NO: 86600 - RNA, 21 nt, synthetic construct
  source 1..21: mol_type = other RNA
gacaggacagagcagtaggct

SEQ ID NO: 86601 - RNA, 21 nt, synthetic construct
  source 1..21: mol_type = other RNA
gacaggactccacagagttca

SEQ ID NO: 86602 - RNA, 21 nt, synthetic construct
  source 1..21: mol_type = other RNA
gacaggatccagatgtagaga

SEQ ID NO: 86603 - RNA, 21 nt, synthetic construct
  source 1..21: mol_type = other RNA
gacaggatcccggaacaggaa

SEQ ID NO: 86604 - RNA, 21 nt, synthetic construct
  source 1..21: mol_type = other RNA
gacagggaatgcccctgtagc

SEQ ID NO: 86605 - RNA, 21 nt, synthetic construct
  source 1..21: mol_type = other RNA
gacagggaatggggagctaga

SEQ ID NO: 86606 - RNA, 21 nt, synthetic construct
  source 1..21: mol_type = other RNA
gacaggggacatgaaggaagg

SEQ ID NO: 86607 - RNA, 21 nt, synthetic construct
  source 1..21: mol_type = other RNA
gacagggtctcactcttacca

SEQ ID NO: 86608 - RNA, 21 nt, synthetic construct
  source 1..21: mol_type = other RNA
gacaggtagacatgagtaaaa

SEQ ID NO: 86609 - RNA, 21 nt, synthetic construct
  source 1..21: mol_type = other RNA
gacaggtcacattctgcctgc

SEQ ID NO: 86610 - RNA, 21 nt, synthetic construct
  source 1..21: mol_type = other RNA
gacaggtgagtggactgtgag

SEQ ID NO: 86611 - RNA, 21 nt, synthetic construct
  source 1..21: mol_type = other RNA
gacaggtggtatgggagatgt

SEQ ID NO: 86612 - RNA, 21 nt, synthetic construct
  source 1..21: mol_type = other RNA
gacagtatgtcagactcattg

SEQ ID NO: 86613 - RNA, 21 nt, synthetic construct
  source 1..21: mol_type = other RNA
gacagtattgtgctgaaaccc

SEQ ID NO: 86614 - RNA, 21 nt, synthetic construct
  source 1..21: mol_type = other RNA
gacagtcatcctcaacaagag

SEQ ID NO: 86615 - RNA, 21 nt, synthetic construct
  source 1..21: mol_type = other RNA
gacagtcccttgcctgacagc

SEQ ID NO: 86616 - RNA, 21 nt, synthetic construct
  source 1..21: mol_type = other RNA
gacagtgagcatgctgcaact

SEQ ID NO: 86617 - RNA, 21 nt, synthetic construct
  source 1..21: mol_type = other RNA
gacagtggacaaaggttccaa

SEQ ID NO: 86618 - RNA, 21 nt, synthetic construct
  source 1..21: mol_type = other RNA
gacagttactctaaaagaata

SEQ ID NO: 86619 - RNA, 21 nt, synthetic construct
  source 1..21: mol_type = other RNA
gacagttattcttcagcaagg

SEQ ID NO: 86620 - RNA, 21 nt, synthetic construct
  source 1..21: mol_type = other RNA
gacagttctatttctttccat

SEQ ID NO: 86621 - RNA, 21 nt, synthetic construct
  source 1..21: mol_type = other RNA
gacagttctgtgaatttgatt

SEQ ID NO: 86622 - RNA, 21 nt, synthetic construct
  source 1..21: mol_type = other RNA
gacagttggccttgaggtgag

SEQ ID NO: 86623 - RNA, 21 nt, synthetic construct
  source 1..21: mol_type = other RNA
gacataactgtaaagtaatca

SEQ ID NO: 86624 - RNA, 21 nt, synthetic construct
  source 1..21: mol_type = other RNA
gacataagggtctgttttaca

SEQ ID NO: 86625 - RNA, 21 nt, synthetic construct
  source 1..21: mol_type = other RNA
gacatactgtcacaggctttc

SEQ ID NO: 86626 - RNA, 21 nt, synthetic construct
  source 1..21: mol_type = other RNA
gacatagatgaaactaaatgt

SEQ ID NO: 86627 - RNA, 21 nt, synthetic construct
  source 1..21: mol_type = other RNA
gacatatcagggatcacagat

SEQ ID NO: 86628 - RNA, 21 nt, synthetic construct
  source 1..21: mol_type = other RNA
gacatatgccggctgttaggt

SEQ ID NO: 86629 - RNA, 21 nt, synthetic construct
  source 1..21: mol_type = other RNA
gacatatgttttgcttcgaag

SEQ ID NO: 86630 - RNA, 21 nt, synthetic construct
  source 1..21: mol_type = other RNA
gacatcaagggtggtgctgga

SEQ ID NO: 86631 - RNA, 21 nt, synthetic construct
  source 1..21: mol_type = other RNA
gacatcacaatgcgtttgtta

SEQ ID NO: 86632 - RNA, 21 nt, synthetic construct
  source 1..21: mol_type = other RNA
gacatcactaagagtgaaaag

SEQ ID NO: 86633 - RNA, 21 nt, synthetic construct
  source 1..21: mol_type = other RNA
gacatccacaacattgtgcaa

SEQ ID NO: 86634 - RNA, 21 nt, synthetic construct
  source 1..21: mol_type = other RNA
gacatcctgatttaggccact

SEQ ID NO: 86635 - RNA, 21 nt, synthetic construct
  source 1..21: mol_type = other RNA
gacatcctttaatttgggttt

SEQ ID NO: 86636 - RNA, 21 nt, synthetic construct
  source 1..21: mol_type = other RNA
gacatcctttgcgtctgtgat

SEQ ID NO: 86637 - RNA, 21 nt, synthetic construct
  source 1..21: mol_type = other RNA
gacatctgagacatcacaatg

SEQ ID NO: 86638 - RNA, 21 nt, synthetic construct
  source 1..21: mol_type = other RNA
gacatcttgcataactcgtaa

SEQ ID NO: 86639 - RNA, 21 nt, synthetic construct
  source 1..21: mol_type = other RNA
gacatctttcctgtgatttat

SEQ ID NO: 86640 - RNA, 21 nt, synthetic construct
  source 1..21: mol_type = other RNA
gacatgaacaatccttctaat

SEQ ID NO: 86641 - RNA, 21 nt, synthetic construct
  source 1..21: mol_type = other RNA
gacatgaaggaaggattggaa

SEQ ID NO: 86642 - RNA, 21 nt, synthetic construct
  source 1..21: mol_type = other RNA
gacatgacaggtgagtggact

SEQ ID NO: 86643 - RNA, 21 nt, synthetic construct
  source 1..21: mol_type = other RNA
gacatgagagctaagggaagt

SEQ ID NO: 86644 - RNA, 21 nt, synthetic construct
  source 1..21: mol_type = other RNA
gacatgaggaaagcaggttgc

SEQ ID NO: 86645 - RNA, 21 nt, synthetic construct
  source 1..21: mol_type = other RNA
gacatgagtaaaaagaaatct

SEQ ID NO: 86646 - RNA, 21 nt, synthetic construct
  source 1..21: mol_type = other RNA
gacatgataaatacgtatatg

SEQ ID NO: 86647 - RNA, 21 nt, synthetic construct
  source 1..21: mol_type = other RNA
gacatgattgaggacttcatg

SEQ ID NO: 86648 - RNA, 21 nt, synthetic construct
  source 1..21: mol_type = other RNA
gacatgcacgagaaaagcaca

SEQ ID NO: 86649 - RNA, 21 nt, synthetic construct
  source 1..21: mol_type = other RNA
gacatgcatgcacacagaggg

SEQ ID NO: 86650 - RNA, 21 nt, synthetic construct
  source 1..21: mol_type = other RNA
gacatgccacaccacatccag

SEQ ID NO: 86651 - RNA, 21 nt, synthetic construct
  source 1..21: mol_type = other RNA
gacatgctctgataggataat

SEQ ID NO: 86652 - RNA, 21 nt, synthetic construct
  source 1..21: mol_type = other RNA
gacatgctgaggccccagggg

SEQ ID NO: 86653 - RNA, 21 nt, synthetic construct
  source 1..21: mol_type = other RNA
gacatggaaacaacctaaatg

SEQ ID NO: 86654 - RNA, 21 nt, synthetic construct
  source 1..21: mol_type = other RNA
gacatggagacagtgagcatg

SEQ ID NO: 86655 - RNA, 21 nt, synthetic construct
  source 1..21: mol_type = other RNA
gacatgggctaaataaaacat

SEQ ID NO: 86656 - RNA, 21 nt, synthetic construct
  source 1..21: mol_type = other RNA
gacatggttttcctactaaca

SEQ ID NO: 86657 - RNA, 21 nt, synthetic construct
  source 1..21: mol_type = other RNA
gacatgtgtaaaacatctgga

SEQ ID NO: 86658 - RNA, 21 nt, synthetic construct
  source 1..21: mol_type = other RNA
gacatgtgttttatttaggcc

SEQ ID NO: 86659 - RNA, 21 nt, synthetic construct
  source 1..21: mol_type = other RNA
gacatgttaggttgaaagttc

SEQ ID NO: 86660 - RNA, 21 nt, synthetic construct
  source 1..21: mol_type = other RNA
gacattacaattgataccatg

SEQ ID NO: 86661 - RNA, 21 nt, synthetic construct
  source 1..21: mol_type = other RNA
gacattagtggaaaaactgca

SEQ ID NO: 86662 - RNA, 21 nt, synthetic construct
  source 1..21: mol_type = other RNA
gacattagtggtggtagtaag

SEQ ID NO: 86663 - RNA, 21 nt, synthetic construct
  source 1..21: mol_type = other RNA
gacattatcctatcagagcat

SEQ ID NO: 86664 - RNA, 21 nt, synthetic construct
  source 1..21: mol_type = other RNA
gacattattcttacagtgaca

SEQ ID NO: 86665 - RNA, 21 nt, synthetic construct
  source 1..21: mol_type = other RNA
gacattctgcttccttgctat

SEQ ID NO: 86666 - RNA, 21 nt, synthetic construct
  source 1..21: mol_type = other RNA
gacattcttaccttctaaaat

SEQ ID NO: 86667 - RNA, 21 nt, synthetic construct
  source 1..21: mol_type = other RNA
gacattggttattcatgtttg

SEQ ID NO: 86668 - RNA, 21 nt, synthetic construct
  source 1..21: mol_type = other RNA
gacattgtcttacataggctt

SEQ ID NO: 86669 - RNA, 21 nt, synthetic construct
  source 1..21: mol_type = other RNA
gacatttctcatactttgtca

SEQ ID NO: 86670 - RNA, 21 nt, synthetic construct
  source 1..21: mol_type = other RNA
gacatttgagggtgctgatca

SEQ ID NO: 86671 - RNA, 21 nt, synthetic construct
  source 1..21: mol_type = other RNA
gacatttgcttttcctggaaa

SEQ ID NO: 86672 - RNA, 21 nt, synthetic construct
  source 1..21: mol_type = other RNA
gacatttggaatagagagccc

SEQ ID NO: 86673 - RNA, 21 nt, synthetic construct
  source 1..21: mol_type = other RNA
gacatttgggaatgtggtcac

SEQ ID NO: 86674 - RNA, 21 nt, synthetic construct
  source 1..21: mol_type = other RNA
gacattttatttatacaggtg

SEQ ID NO: 86675 - RNA, 21 nt, synthetic construct
  source 1..21: mol_type = other RNA
gacatttttcaaatacctagt

SEQ ID NO: 86676 - RNA, 21 nt, synthetic construct
  source 1..21: mol_type = other RNA
gaccaaaacaaaaaacaaacc

SEQ ID NO: 86677 - RNA, 21 nt, synthetic construct
  source 1..21: mol_type = other RNA
gaccaaaatggagacccatac

SEQ ID NO: 86678 - RNA, 21 nt, synthetic construct
  source 1..21: mol_type = other RNA
gaccaaacatgtgaggattta

SEQ ID NO: 86679 - RNA, 21 nt, synthetic construct
  source 1..21: mol_type = other RNA
gaccaactatttcactaaata

SEQ ID NO: 86680 - RNA, 21 nt, synthetic construct
  source 1..21: mol_type = other RNA
gaccaactttaagcaaaattt

SEQ ID NO: 86681 - RNA, 21 nt, synthetic construct
  source 1..21: mol_type = other RNA
gaccaagaaaggacttcagtc

SEQ ID NO: 86682 - RNA, 21 nt, synthetic construct
  source 1..21: mol_type = other RNA
gaccaagaattttccattcat

SEQ ID NO: 86683 - RNA, 21 nt, synthetic construct
  source 1..21: mol_type = other RNA
gaccaagagtgtggctttaag

SEQ ID NO: 86684 - RNA, 21 nt, synthetic construct
  source 1..21: mol_type = other RNA
gaccaagttactagaagcact

SEQ ID NO: 86685 - RNA, 21 nt, synthetic construct
  source 1..21: mol_type = other RNA
gaccaagtttaaccaattatg

SEQ ID NO: 86686 - RNA, 21 nt, synthetic construct
  source 1..21: mol_type = other RNA
gaccaatttaccatctgacat

SEQ ID NO: 86687 - RNA, 21 nt, synthetic construct
  source 1..21: mol_type = other RNA
gaccacaaggattaatctttc

SEQ ID NO: 86688 - RNA, 21 nt, synthetic construct
  source 1..21: mol_type = other RNA
gaccacaatcttacccccatc

SEQ ID NO: 86689 - RNA, 21 nt, synthetic construct
  source 1..21: mol_type = other RNA
gaccacaggctctcttcacca

SEQ ID NO: 86690 - RNA, 21 nt, synthetic construct
  source 1..21: mol_type = other RNA
gaccacagtttgaaactttaa

SEQ ID NO: 86691 - RNA, 21 nt, synthetic construct
  source 1..21: mol_type = other RNA
gaccacattcccaaatgtctt

SEQ ID NO: 86692 - RNA, 21 nt, synthetic construct
  source 1..21: mol_type = other RNA
gaccaccacacttgcttggga

SEQ ID NO: 86693 - RNA, 21 nt, synthetic construct
  source 1..21: mol_type = other RNA
gaccagatcaaacgtgctttc

SEQ ID NO: 86694 - RNA, 21 nt, synthetic construct
  source 1..21: mol_type = other RNA
gaccagatgcgtggttcacac

SEQ ID NO: 86695 - RNA, 21 nt, synthetic construct
  source 1..21: mol_type = other RNA
gaccagcagttcaagcaccac

SEQ ID NO: 86696 - RNA, 21 nt, synthetic construct
  source 1..21: mol_type = other RNA
gaccagcttgggcaagagagc

SEQ ID NO: 86697 - RNA, 21 nt, synthetic construct
  source 1..21: mol_type = other RNA
gaccaggagttcttatgaggt

SEQ ID NO: 86698 - RNA, 21 nt, synthetic construct
  source 1..21: mol_type = other RNA
gaccaggcagtcctctcactc

SEQ ID NO: 86699 - RNA, 21 nt, synthetic construct
  source 1..21: mol_type = other RNA
gaccaggggaaggagtctgcc

SEQ ID NO: 86700 - RNA, 21 nt, synthetic construct
  source 1..21: mol_type = other RNA
gaccaggtatggcgactcatg

SEQ ID NO: 86701 - RNA, 21 nt, synthetic construct
  source 1..21: mol_type = other RNA
gaccagtgtgatgggggtaag

SEQ ID NO: 86702 - RNA, 21 nt, synthetic construct
  source 1..21: mol_type = other RNA
gaccagttactctctctgcct

SEQ ID NO: 86703 - RNA, 21 nt, synthetic construct
  source 1..21: mol_type = other RNA
gaccagttaggaagccactgc

SEQ ID NO: 86704 - RNA, 21 nt, synthetic construct
  source 1..21: mol_type = other RNA
gaccataggcacgcgccccca

SEQ ID NO: 86705 - RNA, 21 nt, synthetic construct
  source 1..21: mol_type = other RNA
gaccatataatctaaccctcc

SEQ ID NO: 86706 - RNA, 21 nt, synthetic construct
  source 1..21: mol_type = other RNA
gaccatctcagcacagagccg

SEQ ID NO: 86707 - RNA, 21 nt, synthetic construct
  source 1..21: mol_type = other RNA
gaccatctgttaaaagatacg

SEQ ID NO: 86708 - RNA, 21 nt, synthetic construct
  source 1..21: mol_type = other RNA
gaccatgggacaagtgggtgg

SEQ ID NO: 86709 - RNA, 21 nt, synthetic construct
  source 1..21: mol_type = other RNA
gaccatgttttaggagtcaac

SEQ ID NO: 86710 - RNA, 21 nt, synthetic construct
  source 1..21: mol_type = other RNA
gaccattagcagttctgtacc

SEQ ID NO: 86711 - RNA, 21 nt, synthetic construct
  source 1..21: mol_type = other RNA
gaccattccacgctgtggctt

SEQ ID NO: 86712 - RNA, 21 nt, synthetic construct
  source 1..21: mol_type = other RNA
gaccattgtgtggacacactg

SEQ ID NO: 86713 - RNA, 21 nt, synthetic construct
  source 1..21: mol_type = other RNA
gaccatttttatatctttgga

SEQ ID NO: 86714 - RNA, 21 nt, synthetic construct
  source 1..21: mol_type = other RNA
gacccaaagcaaaagcaaaat

SEQ ID NO: 86715 - RNA, 21 nt, synthetic construct
  source 1..21: mol_type = other RNA
gacccaatcatgttctttata

SEQ ID NO: 86716 - RNA, 21 nt, synthetic construct
  source 1..21: mol_type = other RNA
gacccactagtgaagtcccat

SEQ ID NO: 86717 - RNA, 21 nt, synthetic construct
  source 1..21: mol_type = other RNA
gacccactggtttcagtccct

SEQ ID NO: 86718 - RNA, 21 nt, synthetic construct
  source 1..21: mol_type = other RNA
gacccagagcctaatgtgtaa

SEQ ID NO: 86719 - RNA, 21 nt, synthetic construct
  source 1..21: mol_type = other RNA
gacccagtggctagtgtgttg

SEQ ID NO: 86720 - RNA, 21 nt, synthetic construct
  source 1..21: mol_type = other RNA
gacccataaactgaacattta

SEQ ID NO: 86721 - RNA, 21 nt, synthetic construct
  source 1..21: mol_type = other RNA
gacccatactcagccccctcg

SEQ ID NO: 86722 - RNA, 21 nt, synthetic construct
  source 1..21: mol_type = other RNA
gacccatgcccatgtgcatta

SEQ ID NO: 86723 - RNA, 21 nt, synthetic construct
  source 1..21: mol_type = other RNA
gaccccagtagaaatcttcca

SEQ ID NO: 86724 - RNA, 21 nt, synthetic construct
  source 1..21: mol_type = other RNA
gaccccatctctaccaaaata

SEQ ID NO: 86725 - RNA, 21 nt, synthetic construct
  source 1..21: mol_type = other RNA
gaccccctgggctcaagccat

SEQ ID NO: 86726 - RNA, 21 nt, synthetic construct
  source 1..21: mol_type = other RNA
gaccccgtacgctccctcgcg

SEQ ID NO: 86727 - RNA, 21 nt, synthetic construct
  source 1..21: mol_type = other RNA
gaccccgtctctgcaaaaaat

SEQ ID NO: 86728 - RNA, 21 nt, synthetic construct
  source 1..21: mol_type = other RNA
gacccctcaggtgtcactgga

SEQ ID NO: 86729 - RNA, 21 nt, synthetic construct
  source 1..21: mol_type = other RNA
gacccctccctgctttaaaac

SEQ ID NO: 86730 - RNA, 21 nt, synthetic construct
  source 1..21: mol_type = other RNA
gacccgggaggcagatgttgc

SEQ ID NO: 86731 - RNA, 21 nt, synthetic construct
  source 1..21: mol_type = other RNA
gaccctgagtccagaggtgag

SEQ ID NO: 86732 - RNA, 21 nt, synthetic construct
  source 1..21: mol_type = other RNA
gaccctgctatgcatactttg

SEQ ID NO: 86733 - RNA, 21 nt, synthetic construct
  source 1..21: mol_type = other RNA
gaccctggcttgtgacatcaa

SEQ ID NO: 86734 - RNA, 21 nt, synthetic construct
  source 1..21: mol_type = other RNA
gaccctgtctctaaaaaatac

SEQ ID NO: 86735 - RNA, 21 nt, synthetic construct
  source 1..21: mol_type = other RNA
gaccctgttagtcccctagtg

SEQ ID NO: 86736 - RNA, 21 nt, synthetic construct
  source 1..21: mol_type = other RNA
gacccttaccttaaaccatat

SEQ ID NO: 86737 - RNA, 21 nt, synthetic construct
  source 1..21: mol_type = other RNA
gacccttatgtccagccccca

SEQ ID NO: 86738 - RNA, 21 nt, synthetic construct
  source 1..21: mol_type = other RNA
gaccctttatcggataaggaa

SEQ ID NO: 86739 - RNA, 21 nt, synthetic construct
  source 1..21: mol_type = other RNA
gaccctttattcaaagatcat

SEQ ID NO: 86740 - RNA, 21 nt, synthetic construct
  source 1..21: mol_type = other RNA
gaccctttgaagtatgtaatt

SEQ ID NO: 86741 - RNA, 21 nt, synthetic construct
  source 1..21: mol_type = other RNA
gaccgagatacttaagttttt

SEQ ID NO: 86742 - RNA, 21 nt, synthetic construct
  source 1..21: mol_type = other RNA
gaccgaggaaacccgctctgg

SEQ ID NO: 86743 - RNA, 21 nt, synthetic construct
  source 1..21: mol_type = other RNA
gaccgcaagagttccaactgt

SEQ ID NO: 86744 - RNA, 21 nt, synthetic construct
  source 1..21: mol_type = other RNA
gaccgctttcgtgagggtttc

SEQ ID NO: 86745 - RNA, 21 nt, synthetic construct
  source 1..21: mol_type = other RNA
gaccggatgaggtggctcacg

SEQ ID NO: 86746 - RNA, 21 nt, synthetic construct
  source 1..21: mol_type = other RNA
gaccggggactgcaacagatc

SEQ ID NO: 86747 - RNA, 21 nt, synthetic construct
  source 1..21: mol_type = other RNA
gacctaaaatcttattcccca

SEQ ID NO: 86748 - RNA, 21 nt, synthetic construct
  source 1..21: mol_type = other RNA
gacctaaagttttaagaaaag

SEQ ID NO: 86749 - RNA, 21 nt, synthetic construct
  source 1..21: mol_type = other RNA
gacctaagcttaagagctaag

SEQ ID NO: 86750 - RNA, 21 nt, synthetic construct
  source 1..21: mol_type = other RNA
gacctaagcttgggtaggaag

SEQ ID NO: 86751 - RNA, 21 nt, synthetic construct
  source 1..21: mol_type = other RNA
gacctactaaaagttgacaaa

SEQ ID NO: 86752 - RNA, 21 nt, synthetic construct
  source 1..21: mol_type = other RNA
gacctatctattaacagaagg

SEQ ID NO: 86753 - RNA, 21 nt, synthetic construct
  source 1..21: mol_type = other RNA
gacctcaaattaatcagtctg

SEQ ID NO: 86754 - RNA, 21 nt, synthetic construct
  source 1..21: mol_type = other RNA
gacctcaaattctgagggaaa

SEQ ID NO: 86755 - RNA, 21 nt, synthetic construct
  source 1..21: mol_type = other RNA
gacctcaagcgatccagccgc

SEQ ID NO: 86756 - RNA, 21 nt, synthetic construct
  source 1..21: mol_type = other RNA
gacctcaggcagtctagtcca

SEQ ID NO: 86757 - RNA, 21 nt, synthetic construct
  source 1..21: mol_type = other RNA
gacctcaggtttagaatatat

SEQ ID NO: 86758 - RNA, 21 nt, synthetic construct
  source 1..21: mol_type = other RNA
gacctcagtggtagttacaca

SEQ ID NO: 86759 - RNA, 21 nt, synthetic construct
  source 1..21: mol_type = other RNA
gacctcatctctgcaaaacat

SEQ ID NO: 86760 - RNA, 21 nt, synthetic construct
  source 1..21: mol_type = other RNA
gacctcatcttagccgggagg

SEQ ID NO: 86761 - RNA, 21 nt, synthetic construct
  source 1..21: mol_type = other RNA
gacctcatgtaactaattact

SEQ ID NO: 86762 - RNA, 21 nt, synthetic construct
  source 1..21: mol_type = other RNA
gacctccagcgctaagcactg

SEQ ID NO: 86763 - RNA, 21 nt, synthetic construct
  source 1..21: mol_type = other RNA
gacctcccaaaggactgggat

SEQ ID NO: 86764 - RNA, 21 nt, synthetic construct
  source 1..21: mol_type = other RNA
gacctcctagattgaccttct

SEQ ID NO: 86765 - RNA, 21 nt, synthetic construct
  source 1..21: mol_type = other RNA
gacctcctcccacttacatca

SEQ ID NO: 86766 - RNA, 21 nt, synthetic construct
  source 1..21: mol_type = other RNA
gacctcgaagcacaaccactg

SEQ ID NO: 86767 - RNA, 21 nt, synthetic construct
  source 1..21: mol_type = other RNA
gacctctattaaatcatgatg

SEQ ID NO: 86768 - RNA, 21 nt, synthetic construct
  source 1..21: mol_type = other RNA
gacctctgaagagtctatctt

SEQ ID NO: 86769 - RNA, 21 nt, synthetic construct
  source 1..21: mol_type = other RNA
gacctctgcagttagcatgcc

SEQ ID NO: 86770 - RNA, 21 nt, synthetic construct
  source 1..21: mol_type = other RNA
gacctgaagactggatttgat

SEQ ID NO: 86771 - RNA, 21 nt, synthetic construct
  source 1..21: mol_type = other RNA
gacctgaatgactgttgcctc

SEQ ID NO: 86772 - RNA, 21 nt, synthetic construct
  source 1..21: mol_type = other RNA
gacctgattcttccactagtg

SEQ ID NO: 86773 - RNA, 21 nt, synthetic construct
  source 1..21: mol_type = other RNA
gacctgcacaaaggattggga

SEQ ID NO: 86774 - RNA, 21 nt, synthetic construct
  source 1..21: mol_type = other RNA
gacctgcagtctgcaggcaga

SEQ ID NO: 86775 - RNA, 21 nt, synthetic construct
  source 1..21: mol_type = other RNA
gacctgccagagttggcacag

SEQ ID NO: 86776 - RNA, 21 nt, synthetic construct
  source 1..21: mol_type = other RNA
gacctgctttcttggggctct

SEQ ID NO: 86777 - RNA, 21 nt, synthetic construct
  source 1..21: mol_type = other RNA
gacctggaaattattcaatat

SEQ ID NO: 86778 - RNA, 21 nt, synthetic construct
  source 1..21: mol_type = other RNA
gacctgggagaaagaccaaga

SEQ ID NO: 86779 - RNA, 21 nt, synthetic construct
  source 1..21: mol_type = other RNA
gacctggtactctatgatata

SEQ ID NO: 86780 - RNA, 21 nt, synthetic construct
  source 1..21: mol_type = other RNA
gacctgtaatttttctctttt

SEQ ID NO: 86781 - RNA, 21 nt, synthetic construct
  source 1..21: mol_type = other RNA
gacctgtagattgggcttttc

SEQ ID NO: 86782 - RNA, 21 nt, synthetic construct
  source 1..21: mol_type = other RNA
gacctgtccttgtgttttatt

SEQ ID NO: 86783 - RNA, 21 nt, synthetic construct
  source 1..21: mol_type = other RNA
gaccttagtggttgacccata

SEQ ID NO: 86784 - RNA, 21 nt, synthetic construct
  source 1..21: mol_type = other RNA
gaccttagttttcacttttgt

SEQ ID NO: 86785 - RNA, 21 nt, synthetic construct
  source 1..21: mol_type = other RNA
gaccttattcaaataattgct

SEQ ID NO: 86786 - RNA, 21 nt, synthetic construct
  source 1..21: mol_type = other RNA
gaccttccttgtgtcttaaat

SEQ ID NO: 86787 - RNA, 21 nt, synthetic construct
  source 1..21: mol_type = other RNA
gaccttctacttatcttttct

SEQ ID NO: 86788 - RNA, 21 nt, synthetic construct
  source 1..21: mol_type = other RNA
gaccttgacaataaatggtgc

SEQ ID NO: 86789 - RNA, 21 nt, synthetic construct
  source 1..21: mol_type = other RNA
gaccttgctcattcatctgca

SEQ ID NO: 86790 - RNA, 21 nt, synthetic construct
  source 1..21: mol_type = other RNA
gaccttgtatccagtaatctt

SEQ ID NO: 86791 - RNA, 21 nt, synthetic construct
  source 1..21: mol_type = other RNA
gaccttgtgcatgtgcaggaa

SEQ ID NO: 86792 - RNA, 21 nt, synthetic construct
  source 1..21: mol_type = other RNA
gacctttcttaggtttctcat

SEQ ID NO: 86793 - RNA, 21 nt, synthetic construct
  source 1..21: mol_type = other RNA
gacgaaagtgaagcccagaga

SEQ ID NO: 86794 - RNA, 21 nt, synthetic construct
  source 1..21: mol_type = other RNA
gacgaagtcacattctagtga

SEQ ID NO: 86795 - RNA, 21 nt, synthetic construct
  source 1..21: mol_type = other RNA
gacgaatgcatgggaggtaat

SEQ ID NO: 86796 - RNA, 21 nt, synthetic construct
  source 1..21: mol_type = other RNA
gacgacgtatgcaacttactc

SEQ ID NO: 86797 - RNA, 21 nt, synthetic construct
  source 1..21: mol_type = other RNA
gacgatattcctatcagaagc

SEQ ID NO: 86798 - RNA, 21 nt, synthetic construct
  source 1..21: mol_type = other RNA
gacgatttttccaacagttta

SEQ ID NO: 86799 - RNA, 21 nt, synthetic construct
  source 1..21: mol_type = other RNA
gacgcaaaggatgtcaacaaa

SEQ ID NO: 86800 - RNA, 21 nt, synthetic construct
  source 1..21: mol_type = other RNA
gacgcaggcaaacagcgccac

SEQ ID NO: 86801 - RNA, 21 nt, synthetic construct
  source 1..21: mol_type = other RNA
gacgcctttcatttggcctct

SEQ ID NO: 86802 - RNA, 21 nt, synthetic construct
  source 1..21: mol_type = other RNA
gacgcgcaacaattcaacagc

SEQ ID NO: 86803 - RNA, 21 nt, synthetic construct
  source 1..21: mol_type = other RNA
gacgcgcattttttaagtggc

SEQ ID NO: 86804 - RNA, 21 nt, synthetic construct
  source 1..21: mol_type = other RNA
gacgctcttgttcaaaaacct

SEQ ID NO: 86805 - RNA, 21 nt, synthetic construct
  source 1..21: mol_type = other RNA
gacgctgatgacagttactct

SEQ ID NO: 86806 - RNA, 21 nt, synthetic construct
  source 1..21: mol_type = other RNA
gacggaaaaacattctacagt

SEQ ID NO: 86807 - RNA, 21 nt, synthetic construct
  source 1..21: mol_type = other RNA
gacggaagactcatacttcct

SEQ ID NO: 86808 - RNA, 21 nt, synthetic construct
  source 1..21: mol_type = other RNA
gacggaatcttaccctgttga

SEQ ID NO: 86809 - RNA, 21 nt, synthetic construct
  source 1..21: mol_type = other RNA
gacggcgagcttgatctttac

SEQ ID NO: 86810 - RNA, 21 nt, synthetic construct
  source 1..21: mol_type = other RNA
gacggcgtttcgccatgttgg

SEQ ID NO: 86811 - RNA, 21 nt, synthetic construct
  source 1..21: mol_type = other RNA
gacggctcaggcctgttgtga

SEQ ID NO: 86812 - RNA, 21 nt, synthetic construct
  source 1..21: mol_type = other RNA
gacgggtggtagggagggggc

SEQ ID NO: 86813 - RNA, 21 nt, synthetic construct
  source 1..21: mol_type = other RNA
gacgtatgcaacttactctca

SEQ ID NO: 86814 - RNA, 21 nt, synthetic construct
  source 1..21: mol_type = other RNA
gacgtgagatcatgccactcc

SEQ ID NO: 86815 - RNA, 21 nt, synthetic construct
  source 1..21: mol_type = other RNA
gacgtgagccaccgcacctgg

SEQ ID NO: 86816 - RNA, 21 nt, synthetic construct
  source 1..21: mol_type = other RNA
gacgttcagataacaaagggt

SEQ ID NO: 86817 - RNA, 21 nt, synthetic construct
  source 1..21: mol_type = other RNA
gacgtttgagttgtttccact

SEQ ID NO: 86818 - RNA, 21 nt, synthetic construct
  source 1..21: mol_type = other RNA
gactaacagggtctacaaaag

SEQ ID NO: 86819 - RNA, 21 nt, synthetic construct
  source 1..21: mol_type = other RNA
gactaagaaaaacagaagaca

SEQ ID NO: 86820 - RNA, 21 nt, synthetic construct
  source 1..21: mol_type = other RNA
gactaagacactagctattgt

SEQ ID NO: 86821 - RNA, 21 nt, synthetic construct
  source 1..21: mol_type = other RNA
gactaagcagaaatgacaagt

SEQ ID NO: 86822 - RNA, 21 nt, synthetic construct
  source 1..21: mol_type = other RNA
gactaatatgagttcctgctt

SEQ ID NO: 86823 - RNA, 21 nt, synthetic construct
  source 1..21: mol_type = other RNA
gactaatttgaggcattagtg

SEQ ID NO: 86824 - RNA, 21 nt, synthetic construct
  source 1..21: mol_type = other RNA
gactacacatacacagggaaa

SEQ ID NO: 86825 - RNA, 21 nt, synthetic construct
  source 1..21: mol_type = other RNA
gactacactgaagggaatttt

SEQ ID NO: 86826 - RNA, 21 nt, synthetic construct
  source 1..21: mol_type = other RNA
gactacaggtgtgaaccacgc

SEQ ID NO: 86827 - RNA, 21 nt, synthetic construct
  source 1..21: mol_type = other RNA
gactacagtcacacaccacta

SEQ ID NO: 86828 - RNA, 21 nt, synthetic construct
  source 1..21: mol_type = other RNA
gactaccaattctccctgaaa

SEQ ID NO: 86829 - RNA, 21 nt, synthetic construct
  source 1..21: mol_type = other RNA
gactaccatctctccaacaga

SEQ ID NO: 86830 - RNA, 21 nt, synthetic construct
  source 1..21: mol_type = other RNA
gactacctaaaacaatctaca

SEQ ID NO: 86831 - RNA, 21 nt, synthetic construct
  source 1..21: mol_type = other RNA
gactagaagaaatgttaacaa

SEQ ID NO: 86832 - RNA, 21 nt, synthetic construct
  source 1..21: mol_type = other RNA
gactagactgcctgaggtctc

SEQ ID NO: 86833 - RNA, 21 nt, synthetic construct
  source 1..21: mol_type = other RNA
gactaggctcctgagaaccgg

SEQ ID NO: 86834 - RNA, 21 nt, synthetic construct
  source 1..21: mol_type = other RNA
gactagtacactgttgattta

SEQ ID NO: 86835 - RNA, 21 nt, synthetic construct
  source 1..21: mol_type = other RNA
gactagtacgtgcagagcagg

SEQ ID NO: 86836 - RNA, 21 nt, synthetic construct
  source 1..21: mol_type = other RNA
gactagtggctcatacttgct

SEQ ID NO: 86837 - RNA, 21 nt, synthetic construct
  source 1..21: mol_type = other RNA
gactagtgtgaatgaggagtg

SEQ ID NO: 86838 - RNA, 21 nt, synthetic construct
  source 1..21: mol_type = other RNA
gactataaaactcttagctta

SEQ ID NO: 86839 - RNA, 21 nt, synthetic construct
  source 1..21: mol_type = other RNA
gactatcacgattctgaccca

SEQ ID NO: 86840 - RNA, 21 nt, synthetic construct
  source 1..21: mol_type = other RNA
gactatcgttatatcctcagg

SEQ ID NO: 86841 - RNA, 21 nt, synthetic construct
  source 1..21: mol_type = other RNA
gactatctcttcctcctctgg

SEQ ID NO: 86842 - RNA, 21 nt, synthetic construct
  source 1..21: mol_type = other RNA
gactatgaaaagcctcaaacg

SEQ ID NO: 86843 - RNA, 21 nt, synthetic construct
  source 1..21: mol_type = other RNA
gactatgagaaggattagtgt

SEQ ID NO: 86844 - RNA, 21 nt, synthetic construct
  source 1..21: mol_type = other RNA
gactatgtaggcacattcaag

SEQ ID NO: 86845 - RNA, 21 nt, synthetic construct
  source 1..21: mol_type = other RNA
gactattatgagcagttgtat

SEQ ID NO: 86846 - RNA, 21 nt, synthetic construct
  source 1..21: mol_type = other RNA
gactattttaccctcatttta

SEQ ID NO: 86847 - RNA, 21 nt, synthetic construct
  source 1..21: mol_type = other RNA
gactcaacatgtgtatttagg

SEQ ID NO: 86848 - RNA, 21 nt, synthetic construct
  source 1..21: mol_type = other RNA
gactcaagcctgataagctcc

SEQ ID NO: 86849 - RNA, 21 nt, synthetic construct
  source 1..21: mol_type = other RNA
gactcaataaccacatgtggc

SEQ ID NO: 86850 - RNA, 21 nt, synthetic construct
  source 1..21: mol_type = other RNA
gactcaatcttcttatttgtt

SEQ ID NO: 86851 - RNA, 21 nt, synthetic construct
  source 1..21: mol_type = other RNA
gactcacagcttaccaagtgc

SEQ ID NO: 86852 - RNA, 21 nt, synthetic construct
  source 1..21: mol_type = other RNA
gactcagcagttttaaagaat

SEQ ID NO: 86853 - RNA, 21 nt, synthetic construct
  source 1..21: mol_type = other RNA
gactcagggtcacttcctctc

SEQ ID NO: 86854 - RNA, 21 nt, synthetic construct
  source 1..21: mol_type = other RNA
gactcagtacttccctctttc

SEQ ID NO: 86855 - RNA, 21 nt, synthetic construct
  source 1..21: mol_type = other RNA
gactcatgagagctgtgccga

SEQ ID NO: 86856 - RNA, 21 nt, synthetic construct
  source 1..21: mol_type = other RNA
gactcattccaatccttcctt

SEQ ID NO: 86857 - RNA, 21 nt, synthetic construct
  source 1..21: mol_type = other RNA
gactcattgcctatagacagc

SEQ ID NO: 86858 - RNA, 21 nt, synthetic construct
  source 1..21: mol_type = other RNA
gactccaaagcaaaccagaca

SEQ ID NO: 86859 - RNA, 21 nt, synthetic construct
  source 1..21: mol_type = other RNA
gactccaactcaaaaaagaaa

SEQ ID NO: 86860 - RNA, 21 nt, synthetic construct
  source 1..21: mol_type = other RNA
gactccaagcacacagtttga

SEQ ID NO: 86861 - RNA, 21 nt, synthetic construct
  source 1..21: mol_type = other RNA
gactccacagagttcagctta

SEQ ID NO: 86862 - RNA, 21 nt, synthetic construct
  source 1..21: mol_type = other RNA
gactccaccctgccccttatc

SEQ ID NO: 86863 - RNA, 21 nt, synthetic construct
  source 1..21: mol_type = other RNA
gactccatctcaagaaaacaa

SEQ ID NO: 86864 - RNA, 21 nt, synthetic construct
  source 1..21: mol_type = other RNA
gactcccaacttataatatta

SEQ ID NO: 86865 - RNA, 21 nt, synthetic construct
  source 1..21: mol_type = other RNA
gactcccatatctacatgtac

SEQ ID NO: 86866 - RNA, 21 nt, synthetic construct
  source 1..21: mol_type = other RNA
gactccctttttaggtaggga

SEQ ID NO: 86867 - RNA, 21 nt, synthetic construct
  source 1..21: mol_type = other RNA
gactccggcgggagaggagcg

SEQ ID NO: 86868 - RNA, 21 nt, synthetic construct
  source 1..21: mol_type = other RNA
gactcctaaaacatggtccac

SEQ ID NO: 86869 - RNA, 21 nt, synthetic construct
  source 1..21: mol_type = other RNA
gactccttcccctggtcgagc

SEQ ID NO: 86870 - RNA, 21 nt, synthetic construct
  source 1..21: mol_type = other RNA
gactccttctgaaggcactaa

SEQ ID NO: 86871 - RNA, 21 nt, synthetic construct
  source 1..21: mol_type = other RNA
gactcggtctcaaaacaaaca

SEQ ID NO: 86872 - RNA, 21 nt, synthetic construct
  source 1..21: mol_type = other RNA
gactctaaactagttcaacca

SEQ ID NO: 86873 - RNA, 21 nt, synthetic construct
  source 1..21: mol_type = other RNA
gactctaaagtctatgctctt

SEQ ID NO: 86874 - RNA, 21 nt, synthetic construct
  source 1..21: mol_type = other RNA
gactctcaagaaggtatcatc

SEQ ID NO: 86875 - RNA, 21 nt, synthetic construct
  source 1..21: mol_type = other RNA
gactctgctcaaaggggcatt

SEQ ID NO: 86876 - RNA, 21 nt, synthetic construct
  source 1..21: mol_type = other RNA
gactctgtgcttgtgctttta

SEQ ID NO: 86877 - RNA, 21 nt, synthetic construct
  source 1..21: mol_type = other RNA
gactcttaatattgaaacgat

SEQ ID NO: 86878 - RNA, 21 nt, synthetic construct
  source 1..21: mol_type = other RNA
gactcttatggctataaccac

SEQ ID NO: 86879 - RNA, 21 nt, synthetic construct
  source 1..21: mol_type = other RNA
gactcttcagaggtctgttac

SEQ ID NO: 86880 - RNA, 21 nt, synthetic construct
  source 1..21: mol_type = other RNA
gactcttgtcccggcatgcct

SEQ ID NO: 86881 - RNA, 21 nt, synthetic construct
  source 1..21: mol_type = other RNA
gactgaaaagatacagaaata

SEQ ID NO: 86882 - RNA, 21 nt, synthetic construct
  source 1..21: mol_type = other RNA
gactgaaaccagtgggtcagc

SEQ ID NO: 86883 - RNA, 21 nt, synthetic construct
  source 1..21: mol_type = other RNA
gactgaaaggaaatgagtgta

SEQ ID NO: 86884 - RNA, 21 nt, synthetic construct
  source 1..21: mol_type = other RNA
gactgaaggattcctccctgg

SEQ ID NO: 86885 - RNA, 21 nt, synthetic construct
  source 1..21: mol_type = other RNA
gactgaagtcctttcttggtc

SEQ ID NO: 86886 - RNA, 21 nt, synthetic construct
  source 1..21: mol_type = other RNA
gactgaatcatgaagaaatag

SEQ ID NO: 86887 - RNA, 21 nt, synthetic construct
  source 1..21: mol_type = other RNA
gactgaattaatctcttacac

SEQ ID NO: 86888 - RNA, 21 nt, synthetic construct
  source 1..21: mol_type = other RNA
gactgaattcccacaaaatat

SEQ ID NO: 86889 - RNA, 21 nt, synthetic construct
  source 1..21: mol_type = other RNA
gactgacataactgtaaagta

SEQ ID NO: 86890 - RNA, 21 nt, synthetic construct
  source 1..21: mol_type = other RNA
gactgaccaacatggacaaac

SEQ ID NO: 86891 - RNA, 21 nt, synthetic construct
  source 1..21: mol_type = other RNA
gactgagacagtattgtgctg

SEQ ID NO: 86892 - RNA, 21 nt, synthetic construct
  source 1..21: mol_type = other RNA
gactgagatacttaagttttt

SEQ ID NO: 86893 - RNA, 21 nt, synthetic construct
  source 1..21: mol_type = other RNA
gactgagcagtgaaagtctcc

SEQ ID NO: 86894 - RNA, 21 nt, synthetic construct
  source 1..21: mol_type = other RNA
gactgagccagcaaatcagaa

SEQ ID NO: 86895 - RNA, 21 nt, synthetic construct
  source 1..21: mol_type = other RNA
gactgagtaatattccattgt

SEQ ID NO: 86896 - RNA, 21 nt, synthetic construct
  source 1..21: mol_type = other RNA
gactgataaacttcagttttg

SEQ ID NO: 86897 - RNA, 21 nt, synthetic construct
  source 1..21: mol_type = other RNA
gactgatgaagaacctgttca

SEQ ID NO: 86898 - RNA, 21 nt, synthetic construct
  source 1..21: mol_type = other RNA
gactgattaatttgaggtcta

SEQ ID NO: 86899 - RNA, 21 nt, synthetic construct
  source 1..21: mol_type = other RNA
gactgcaacagatctgagaag

SEQ ID NO: 86900 - RNA, 21 nt, synthetic construct
  source 1..21: mol_type = other RNA
gactgcacataaaaggatatg

SEQ ID NO: 86901 - RNA, 21 nt, synthetic construct
  source 1..21: mol_type = other RNA
gactgcaggtcttcaacctca

SEQ ID NO: 86902 - RNA, 21 nt, synthetic construct
  source 1..21: mol_type = other RNA
gactgcagtgacctatcattg

SEQ ID NO: 86903 - RNA, 21 nt, synthetic construct
  source 1..21: mol_type = other RNA
gactgcagttggattatatgt

SEQ ID NO: 86904 - RNA, 21 nt, synthetic construct
  source 1..21: mol_type = other RNA
gactgccaggtagggaggggt

SEQ ID NO: 86905 - RNA, 21 nt, synthetic construct
  source 1..21: mol_type = other RNA
gactgcctattttgtaattta

SEQ ID NO: 86906 - RNA, 21 nt, synthetic construct
  source 1..21: mol_type = other RNA
gactgcctgaggtctcaaaat

SEQ ID NO: 86907 - RNA, 21 nt, synthetic construct
  source 1..21: mol_type = other RNA
gactgcctggtcctgagggct

SEQ ID NO: 86908 - RNA, 21 nt, synthetic construct
  source 1..21: mol_type = other RNA
gactgctgtttaccaagggtg

SEQ ID NO: 86909 - RNA, 21 nt, synthetic construct
  source 1..21: mol_type = other RNA
gactgcttgaggccacgagtt

SEQ ID NO: 86910 - RNA, 21 nt, synthetic construct
  source 1..21: mol_type = other RNA
gactggaaaagtgttgactac

SEQ ID NO: 86911 - RNA, 21 nt, synthetic construct
  source 1..21: mol_type = other RNA
gactggaactcatttctgctt

SEQ ID NO: 86912 - RNA, 21 nt, synthetic construct
  source 1..21: mol_type = other RNA
gactggactccttctgaaggc

SEQ ID NO: 86913 - RNA, 21 nt, synthetic construct
  source 1..21: mol_type = other RNA
gactggagaacagtaaagtca

SEQ ID NO: 86914 - RNA, 21 nt, synthetic construct
  source 1..21: mol_type = other RNA
gactggagggatgctggagtg

SEQ ID NO: 86915 - RNA, 21 nt, synthetic construct
  source 1..21: mol_type = other RNA
gactggagttcactggcacaa

SEQ ID NO: 86916 - RNA, 21 nt, synthetic construct
  source 1..21: mol_type = other RNA
gactggatagcaacttgcaga

SEQ ID NO: 86917 - RNA, 21 nt, synthetic construct
  source 1..21: mol_type = other RNA
gactggatcctggagggctcc

SEQ ID NO: 86918 - RNA, 21 nt, synthetic construct
  source 1..21: mol_type = other RNA
gactggattaaggagatggca

SEQ ID NO: 86919 - RNA, 21 nt, synthetic construct
  source 1..21: mol_type = other RNA
gactggatttgattgggcatt

SEQ ID NO: 86920 - RNA, 21 nt, synthetic construct
  source 1..21: mol_type = other RNA
gactggccatccttcccaaat

SEQ ID NO: 86921 - RNA, 21 nt, synthetic construct
  source 1..21: mol_type = other RNA
gactggcctcggccaaccatt

SEQ ID NO: 86922 - RNA, 21 nt, synthetic construct
  source 1..21: mol_type = other RNA
gactggctgtgccaactctgg

SEQ ID NO: 86923 - RNA, 21 nt, synthetic construct
  source 1..21: mol_type = other RNA
gactggcttaatgcatataaa

SEQ ID NO: 86924 - RNA, 21 nt, synthetic construct
  source 1..21: mol_type = other RNA
gactggcttcagtgccaacac

SEQ ID NO: 86925 - RNA, 21 nt, synthetic construct
  source 1..21: mol_type = other RNA
gactgggatcctaagcatgag

SEQ ID NO: 86926 - RNA, 21 nt, synthetic construct
  source 1..21: mol_type = other RNA
gactgggcaacagagacagag

SEQ ID NO: 86927 - RNA, 21 nt, synthetic construct
  source 1..21: mol_type = other RNA
gactggtgtccttctgagaag

SEQ ID NO: 86928 - RNA, 21 nt, synthetic construct
  source 1..21: mol_type = other RNA
gactgtaaaaattttctccca

SEQ ID NO: 86929 - RNA, 21 nt, synthetic construct
  source 1..21: mol_type = other RNA
gactgtaagctgaactctgtg

SEQ ID NO: 86930 - RNA, 21 nt, synthetic construct
  source 1..21: mol_type = other RNA
gactgtaatgagctgagattg

SEQ ID NO: 86931 - RNA, 21 nt, synthetic construct
  source 1..21: mol_type = other RNA
gactgtagtccctgctacttg

SEQ ID NO: 86932 - RNA, 21 nt, synthetic construct
  source 1..21: mol_type = other RNA
gactgtattaccagcttacag

SEQ ID NO: 86933 - RNA, 21 nt, synthetic construct
  source 1..21: mol_type = other RNA
gactgtcctgaattctaatga

SEQ ID NO: 86934 - RNA, 21 nt, synthetic construct
  source 1..21: mol_type = other RNA
gactgtcgaagcttaatttag

SEQ ID NO: 86935 - RNA, 21 nt, synthetic construct
  source 1..21: mol_type = other RNA
gactgtgagggagatatttcg

SEQ ID NO: 86936 - RNA, 21 nt, synthetic construct
  source 1..21: mol_type = other RNA
gactgtgagggtaagaaagga

SEQ ID NO: 86937 - RNA, 21 nt, synthetic construct
  source 1..21: mol_type = other RNA
gactgtgatgactgtaagctg

SEQ ID NO: 86938 - RNA, 21 nt, synthetic construct
  source 1..21: mol_type = other RNA
gactgtgccttgatccattac

SEQ ID NO: 86939 - RNA, 21 nt, synthetic construct
  source 1..21: mol_type = other RNA
gactgtgcttccacagctatc

SEQ ID NO: 86940 - RNA, 21 nt, synthetic construct
  source 1..21: mol_type = other RNA
gactgtgtgtgtccaggccaa

SEQ ID NO: 86941 - RNA, 21 nt, synthetic construct
  source 1..21: mol_type = other RNA
gactgttagggacttatggag

SEQ ID NO: 86942 - RNA, 21 nt, synthetic construct
  source 1..21: mol_type = other RNA
gactgttgcctctgtgctagc

SEQ ID NO: 86943 - RNA, 21 nt, synthetic construct
  source 1..21: mol_type = other RNA
gacttaactataggagttcat

SEQ ID NO: 86944 - RNA, 21 nt, synthetic construct
  source 1..21: mol_type = other RNA
gacttaagcaacagaaattta

SEQ ID NO: 86945 - RNA, 21 nt, synthetic construct
  source 1..21: mol_type = other RNA
gacttacagaccttattcaaa

SEQ ID NO: 86946 - RNA, 21 nt, synthetic construct
  source 1..21: mol_type = other RNA
gacttacagatatcacccaga

SEQ ID NO: 86947 - RNA, 21 nt, synthetic construct
  source 1..21: mol_type = other RNA
gacttagagggcttcatgctg

SEQ ID NO: 86948 - RNA, 21 nt, synthetic construct
  source 1..21: mol_type = other RNA
gacttaggagaaaagcttcat

SEQ ID NO: 86949 - RNA, 21 nt, synthetic construct
  source 1..21: mol_type = other RNA
gacttaggcaaaggaaaaatc

SEQ ID NO: 86950 - RNA, 21 nt, synthetic construct
  source 1..21: mol_type = other RNA
gacttagtgagggaggccatc

SEQ ID NO: 86951 - RNA, 21 nt, synthetic construct
  source 1..21: mol_type = other RNA
gacttatggagataaattacc

SEQ ID NO: 86952 - RNA, 21 nt, synthetic construct
  source 1..21: mol_type = other RNA
gacttcaaactatacttcaat

SEQ ID NO: 86953 - RNA, 21 nt, synthetic construct
  source 1..21: mol_type = other RNA
gacttcaacggacatttttcc

SEQ ID NO: 86954 - RNA, 21 nt, synthetic construct
  source 1..21: mol_type = other RNA
gacttcaagaggttaaaacca

SEQ ID NO: 86955 - RNA, 21 nt, synthetic construct
  source 1..21: mol_type = other RNA
gacttcacgatgcttaggtaa

SEQ ID NO: 86956 - RNA, 21 nt, synthetic construct
  source 1..21: mol_type = other RNA
gacttcactagatctcttttc

SEQ ID NO: 86957 - RNA, 21 nt, synthetic construct
  source 1..21: mol_type = other RNA
gacttcactagtgggtcgggt

SEQ ID NO: 86958 - RNA, 21 nt, synthetic construct
  source 1..21: mol_type = other RNA
gacttcactggagaattctac

SEQ ID NO: 86959 - RNA, 21 nt, synthetic construct
  source 1..21: mol_type = other RNA
gacttcacttccaagtcccgg

SEQ ID NO: 86960 - RNA, 21 nt, synthetic construct
  source 1..21: mol_type = other RNA
gacttcaggaacaccttgaac

SEQ ID NO: 86961 - RNA, 21 nt, synthetic construct
  source 1..21: mol_type = other RNA
gacttcagtccttaccactga

SEQ ID NO: 86962 - RNA, 21 nt, synthetic construct
  source 1..21: mol_type = other RNA
gacttcatgtacaatgaatta

SEQ ID NO: 86963 - RNA, 21 nt, synthetic construct
  source 1..21: mol_type = other RNA
gacttcattcttgacatgatt

SEQ ID NO: 86964 - RNA, 21 nt, synthetic construct
  source 1..21: mol_type = other RNA
gacttcctattttataatggg

SEQ ID NO: 86965 - RNA, 21 nt, synthetic construct
  source 1..21: mol_type = other RNA
gacttcctggctctagcccag

SEQ ID NO: 86966 - RNA, 21 nt, synthetic construct
  source 1..21: mol_type = other RNA
gacttcgtcaaggggagaggc

SEQ ID NO: 86967 - RNA, 21 nt, synthetic construct
  source 1..21: mol_type = other RNA
gacttctagcctccagaaaac

SEQ ID NO: 86968 - RNA, 21 nt, synthetic construct
  source 1..21: mol_type = other RNA
gacttctcaaacaggatacaa

SEQ ID NO: 86969 - RNA, 21 nt, synthetic construct
  source 1..21: mol_type = other RNA
gacttctcagggcctgctttt

SEQ ID NO: 86970 - RNA, 21 nt, synthetic construct
  source 1..21: mol_type = other RNA
gacttctctcagagggaaact

SEQ ID NO: 86971 - RNA, 21 nt, synthetic construct
  source 1..21: mol_type = other RNA
gacttctggatgtgtatgatc

SEQ ID NO: 86972 - RNA, 21 nt, synthetic construct
  source 1..21: mol_type = other RNA
gacttgaggtttacttgggga

SEQ ID NO: 86973 - RNA, 21 nt, synthetic construct
  source 1..21: mol_type = other RNA
gacttgatctaaaatggaaga

SEQ ID NO: 86974 - RNA, 21 nt, synthetic construct
  source 1..21: mol_type = other RNA
gacttgctctcttgcccaagc

SEQ ID NO: 86975 - RNA, 21 nt, synthetic construct
  source 1..21: mol_type = other RNA
gacttggaagtgaagtcaaga

SEQ ID NO: 86976 - RNA, 21 nt, synthetic construct
  source 1..21: mol_type = other RNA
gacttggcacaggagagcgac

SEQ ID NO: 86977 - RNA, 21 nt, synthetic construct
  source 1..21: mol_type = other RNA
gacttgtttattttacttagc

SEQ ID NO: 86978 - RNA, 21 nt, synthetic construct
  source 1..21: mol_type = other RNA
gactttaccctgctggaacga

SEQ ID NO: 86979 - RNA, 21 nt, synthetic construct
  source 1..21: mol_type = other RNA
gactttactgttctccagtcc

SEQ ID NO: 86980 - RNA, 21 nt, synthetic construct
  source 1..21: mol_type = other RNA
gactttagagtcagttgttta

SEQ ID NO: 86981 - RNA, 21 nt, synthetic construct
  source 1..21: mol_type = other RNA
gactttaggctgttcaattta

SEQ ID NO: 86982 - RNA, 21 nt, synthetic construct
  source 1..21: mol_type = other RNA
gactttatggtaattggttcg

SEQ ID NO: 86983 - RNA, 21 nt, synthetic construct
  source 1..21: mol_type = other RNA
gactttatggtatcacttttt

SEQ ID NO: 86984 - RNA, 21 nt, synthetic construct
  source 1..21: mol_type = other RNA
gactttcactgctcagtccct

SEQ ID NO: 86985 - RNA, 21 nt, synthetic construct
  source 1..21: mol_type = other RNA
gactttcatttgtaattcatc

SEQ ID NO: 86986 - RNA, 21 nt, synthetic construct
  source 1..21: mol_type = other RNA
gactttgtggcctcttccctt

SEQ ID NO: 86987 - RNA, 21 nt, synthetic construct
  source 1..21: mol_type = other RNA
gactttgttttgtttttctct

SEQ ID NO: 86988 - RNA, 21 nt, synthetic construct
  source 1..21: mol_type = other RNA
gacttttatcaattcacaaga

SEQ ID NO: 86989 - RNA, 21 nt, synthetic construct
  source 1..21: mol_type = other RNA
gacttttccttaaaaaaggtt

SEQ ID NO: 86990 - RNA, 21 nt, synthetic construct
  source 1..21: mol_type = other RNA
gacttttggtacacatctttt

SEQ ID NO: 86991 - RNA, 21 nt, synthetic construct
  source 1..21: mol_type = other RNA
gacttttttgcccactcttat

SEQ ID NO: 86992 - RNA, 21 nt, synthetic construct
  source 1..21: mol_type = other RNA
gagaaaaacaaaacaaagtct

SEQ ID NO: 86993 - RNA, 21 nt, synthetic construct
  source 1..21: mol_type = other RNA
gagaaaaatggggatatccaa

SEQ ID NO: 86994 - RNA, 21 nt, synthetic construct
  source 1..21: mol_type = other RNA
gagaaaaattacaggtcaaac

SEQ ID NO: 86995 - RNA, 21 nt, synthetic construct
  source 1..21: mol_type = other RNA
gagaaaacaaaaagaaactag

SEQ ID NO: 86996 - RNA, 21 nt, synthetic construct
  source 1..21: mol_type = other RNA
gagaaaagcacaggcatcggc

SEQ ID NO: 86997 - RNA, 21 nt, synthetic construct
  source 1..21: mol_type = other RNA
gagaaaagcttcataacatta

SEQ ID NO: 86998 - RNA, 21 nt, synthetic construct
  source 1..21: mol_type = other RNA
gagaaaatgttatacagcaaa

SEQ ID NO: 86999 - RNA, 21 nt, synthetic construct
  source 1..21: mol_type = other RNA
gagaaaattgttcatgaaatc

SEQ ID NO: 87000 - RNA, 21 nt, synthetic construct
  source 1..21: mol_type = other RNA
gagaaacaggattacaatgta

SEQ ID NO: 87001 - RNA, 21 nt, synthetic construct
  source 1..21: mol_type = other RNA
gagaaacatacatgttcagtt

SEQ ID NO: 87002 - RNA, 21 nt, synthetic construct
  source 1..21: mol_type = other RNA
gagaaacatggcttagaaatg

SEQ ID NO: 87003 - RNA, 21 nt, synthetic construct
  source 1..21: mol_type = other RNA
gagaaaccatttaccccttaa

SEQ ID NO: 87004 - RNA, 21 nt, synthetic construct
  source 1..21: mol_type = other RNA
gagaaacctaagaaaggtcta

SEQ ID NO: 87005 - RNA, 21 nt, synthetic construct
  source 1..21: mol_type = other RNA
gagaaaccttggtgtgcttct

SEQ ID NO: 87006 - RNA, 21 nt, synthetic construct
  source 1..21: mol_type = other RNA
gagaaactatccaacatgcca

SEQ ID NO: 87007 - RNA, 21 nt, synthetic construct
  source 1..21: mol_type = other RNA
gagaaactggaatcaatccag

SEQ ID NO: 87008 - RNA, 21 nt, synthetic construct
  source 1..21: mol_type = other RNA
gagaaagaagtaatttcttct

SEQ ID NO: 87009 - RNA, 21 nt, synthetic construct
  source 1..21: mol_type = other RNA
gagaaagaccaagagtgtggc

SEQ ID NO: 87010 - RNA, 21 nt, synthetic construct
  source 1..21: mol_type = other RNA
gagaaagagagagacaagcac

SEQ ID NO: 87011 - RNA, 21 nt, synthetic construct
  source 1..21: mol_type = other RNA
gagaaagagggaagtactgag

SEQ ID NO: 87012 - RNA, 21 nt, synthetic construct
  source 1..21: mol_type = other RNA
gagaaagcacataaaaaagga

SEQ ID NO: 87013 - RNA, 21 nt, synthetic construct
  source 1..21: mol_type = other RNA
gagaaagcatcagagctttgt

SEQ ID NO: 87014 - RNA, 21 nt, synthetic construct
  source 1..21: mol_type = other RNA
gagaaagcccagccgcggact

SEQ ID NO: 87015 - RNA, 21 nt, synthetic construct
  source 1..21: mol_type = other RNA
gagaaagctaatttggaatta

SEQ ID NO: 87016 - RNA, 21 nt, synthetic construct
  source 1..21: mol_type = other RNA
gagaaaggcgaagcggcaggg

SEQ ID NO: 87017 - RNA, 21 nt, synthetic construct
  source 1..21: mol_type = other RNA
gagaaaggtttcttcactctt

SEQ ID NO: 87018 - RNA, 21 nt, synthetic construct
  source 1..21: mol_type = other RNA
gagaaatacttggacagggga

SEQ ID NO: 87019 - RNA, 21 nt, synthetic construct
  source 1..21: mol_type = other RNA
gagaaatagttaacgtttatc

SEQ ID NO: 87020 - RNA, 21 nt, synthetic construct
  source 1..21: mol_type = other RNA
gagaaatcggaactcctgtat

SEQ ID NO: 87021 - RNA, 21 nt, synthetic construct
  source 1..21: mol_type = other RNA
gagaaatgcaaatcaaaacaa

SEQ ID NO: 87022 - RNA, 21 nt, synthetic construct
  source 1..21: mol_type = other RNA
gagaaatgtctggtttgcttt

SEQ ID NO: 87023 - RNA, 21 nt, synthetic construct
  source 1..21: mol_type = other RNA
gagaaatgttaagattcaaca

SEQ ID NO: 87024 - RNA, 21 nt, synthetic construct
  source 1..21: mol_type = other RNA
gagaaattggaacctttgtcc

SEQ ID NO: 87025 - RNA, 21 nt, synthetic construct
  source 1..21: mol_type = other RNA
gagaacaaaacaagaagaaaa

SEQ ID NO: 87026 - RNA, 21 nt, synthetic construct
  source 1..21: mol_type = other RNA
gagaacaaaatacctgggaat

SEQ ID NO: 87027 - RNA, 21 nt, synthetic construct
  source 1..21: mol_type = other RNA
gagaacaatggaatagaaggg

SEQ ID NO: 87028 - RNA, 21 nt, synthetic construct
  source 1..21: mol_type = other RNA
gagaacacacaatttgaggta

SEQ ID NO: 87029 - RNA, 21 nt, synthetic construct
  source 1..21: mol_type = other RNA
gagaacagcattatcttaata

SEQ ID NO: 87030 - RNA, 21 nt, synthetic construct
  source 1..21: mol_type = other RNA
gagaacagtaaagtcactgtg

SEQ ID NO: 87031 - RNA, 21 nt, synthetic construct
  source 1..21: mol_type = other RNA
gagaacattggtttgaaatga

SEQ ID NO: 87032 - RNA, 21 nt, synthetic construct
  source 1..21: mol_type = other RNA
gagaacccaggaacagattca

SEQ ID NO: 87033 - RNA, 21 nt, synthetic construct
  source 1..21: mol_type = other RNA
gagaacccagtgtctgctaca

SEQ ID NO: 87034 - RNA, 21 nt, synthetic construct
  source 1..21: mol_type = other RNA
gagaaccggaacttgagtttg

SEQ ID NO: 87035 - RNA, 21 nt, synthetic construct
  source 1..21: mol_type = other RNA
gagaactgactgaaggattcc

SEQ ID NO: 87036 - RNA, 21 nt, synthetic construct
  source 1..21: mol_type = other RNA
gagaactgcctggacccggga

SEQ ID NO: 87037 - RNA, 21 nt, synthetic construct
  source 1..21: mol_type = other RNA
gagaacttaaaggtttggagt

SEQ ID NO: 87038 - RNA, 21 nt, synthetic construct
  source 1..21: mol_type = other RNA
gagaacttgcacataatataa

SEQ ID NO: 87039 - RNA, 21 nt, synthetic construct
  source 1..21: mol_type = other RNA
gagaacttgtctcggatttaa

SEQ ID NO: 87040 - RNA, 21 nt, synthetic construct
  source 1..21: mol_type = other RNA
gagaagaaataaacgacacca

SEQ ID NO: 87041 - RNA, 21 nt, synthetic construct
  source 1..21: mol_type = other RNA
gagaagaatgagaaacataca

SEQ ID NO: 87042 - RNA, 21 nt, synthetic construct
  source 1..21: mol_type = other RNA
gagaagactaagcagaaatga

SEQ ID NO: 87043 - RNA, 21 nt, synthetic construct
  source 1..21: mol_type = other RNA
gagaagactggaaaagtgttg

SEQ ID NO: 87044 - RNA, 21 nt, synthetic construct
  source 1..21: mol_type = other RNA
gagaagagctgtaacagaggc

SEQ ID NO: 87045 - RNA, 21 nt, synthetic construct
  source 1..21: mol_type = other RNA
gagaagagggggcataacatc

SEQ ID NO: 87046 - RNA, 21 nt, synthetic construct
  source 1..21: mol_type = other RNA
gagaagagttctgaaggctca

SEQ ID NO: 87047 - RNA, 21 nt, synthetic construct
  source 1..21: mol_type = other RNA
gagaagatgacatttgctttt

SEQ ID NO: 87048 - RNA, 21 nt, synthetic construct
  source 1..21: mol_type = other RNA
gagaagcagaaaatcagtgtg

SEQ ID NO: 87049 - RNA, 21 nt, synthetic construct
  source 1..21: mol_type = other RNA
gagaagccacacagtacaagg

SEQ ID NO: 87050 - RNA, 21 nt, synthetic construct
  source 1..21: mol_type = other RNA
gagaaggaagcaccaaccctt

SEQ ID NO: 87051 - RNA, 21 nt, synthetic construct
  source 1..21: mol_type = other RNA
gagaaggacagcttccaccca

SEQ ID NO: 87052 - RNA, 21 nt, synthetic construct
  source 1..21: mol_type = other RNA
gagaaggccttccacggaatg

SEQ ID NO: 87053 - RNA, 21 nt, synthetic construct
  source 1..21: mol_type = other RNA
gagaaggcgaaatgtgaacag

SEQ ID NO: 87054 - RNA, 21 nt, synthetic construct
  source 1..21: mol_type = other RNA
gagaaggctgccagcaccaga

SEQ ID NO: 87055 - RNA, 21 nt, synthetic construct
  source 1..21: mol_type = other RNA
gagaaggctttgtgttggtgt

SEQ ID NO: 87056 - RNA, 21 nt, synthetic construct
  source 1..21: mol_type = other RNA
gagaagggaagtaaagatcaa

SEQ ID NO: 87057 - RNA, 21 nt, synthetic construct
  source 1..21: mol_type = other RNA
gagaagtaacattacaacagc

SEQ ID NO: 87058 - RNA, 21 nt, synthetic construct
  source 1..21: mol_type = other RNA
gagaagtcaaagcctgtggag

SEQ ID NO: 87059 - RNA, 21 nt, synthetic construct
  source 1..21: mol_type = other RNA
gagaagtcagactaagacact

SEQ ID NO: 87060 - RNA, 21 nt, synthetic construct
  source 1..21: mol_type = other RNA
gagaagtcttttcctaccctg

SEQ ID NO: 87061 - RNA, 21 nt, synthetic construct
  source 1..21: mol_type = other RNA
gagaagtgaagcttcaaacca

SEQ ID NO: 87062 - RNA, 21 nt, synthetic construct
  source 1..21: mol_type = other RNA
gagaagttttccaggaaaagc

SEQ ID NO: 87063 - RNA, 21 nt, synthetic construct
  source 1..21: mol_type = other RNA
gagaatagcagaaacacagga

SEQ ID NO: 87064 - RNA, 21 nt, synthetic construct
  source 1..21: mol_type = other RNA
gagaatctgggaggtggaggt

SEQ ID NO: 87065 - RNA, 21 nt, synthetic construct
  source 1..21: mol_type = other RNA
gagaatcttaaaataccagag

SEQ ID NO: 87066 - RNA, 21 nt, synthetic construct
  source 1..21: mol_type = other RNA
gagaatggaaacttgccatct

SEQ ID NO: 87067 - RNA, 21 nt, synthetic construct
  source 1..21: mol_type = other RNA
gagaatggcaaggctaacagc

SEQ ID NO: 87068 - RNA, 21 nt, synthetic construct
  source 1..21: mol_type = other RNA
gagaatggcatgaacccacca

SEQ ID NO: 87069 - RNA, 21 nt, synthetic construct
  source 1..21: mol_type = other RNA
gagaatggctggaatggtgaa

SEQ ID NO: 87070 - RNA, 21 nt, synthetic construct
  source 1..21: mol_type = other RNA
gagaattcagagtggctaatg

SEQ ID NO: 87071 - RNA, 21 nt, synthetic construct
  source 1..21: mol_type = other RNA
gagaattcattgttgtgtgtt

SEQ ID NO: 87072 - RNA, 21 nt, synthetic construct
  source 1..21: mol_type = other RNA
gagaattctaaattgcctata

SEQ ID NO: 87073 - RNA, 21 nt, synthetic construct
  source 1..21: mol_type = other RNA
gagaattggtagtcaatgcaa

SEQ ID NO: 87074 - RNA, 21 nt, synthetic construct
  source 1..21: mol_type = other RNA
gagaatttcagaaagagaata

SEQ ID NO: 87075 - RNA, 21 nt, synthetic construct
  source 1..21: mol_type = other RNA
gagaatttcaggtgtgtaaac

SEQ ID NO: 87076 - RNA, 21 nt, synthetic construct
  source 1..21: mol_type = other RNA
gagacaaagcataaaatatgt

SEQ ID NO: 87077 - RNA, 21 nt, synthetic construct
  source 1..21: mol_type = other RNA
gagacaaaggttgcagtgagc

SEQ ID NO: 87078 - RNA, 21 nt, synthetic construct
  source 1..21: mol_type = other RNA
gagacaagcacaggcatctct

SEQ ID NO: 87079 - RNA, 21 nt, synthetic construct
  source 1..21: mol_type = other RNA
gagacaagttctcctgtgtgc

SEQ ID NO: 87080 - RNA, 21 nt, synthetic construct
  source 1..21: mol_type = other RNA
gagacacacatcagacaccta

SEQ ID NO: 87081 - RNA, 21 nt, synthetic construct
  source 1..21: mol_type = other RNA
gagacacacgagtattcaagt

SEQ ID NO: 87082 - RNA, 21 nt, synthetic construct
  source 1..21: mol_type = other RNA
gagacacatactgaaagacag

SEQ ID NO: 87083 - RNA, 21 nt, synthetic construct
  source 1..21: mol_type = other RNA
gagacacctacaatattaact

SEQ ID NO: 87084 - RNA, 21 nt, synthetic construct
  source 1..21: mol_type = other RNA
gagacacggtctcacactgtt

SEQ ID NO: 87085 - RNA, 21 nt, synthetic construct
  source 1..21: mol_type = other RNA
gagacactagggactggcctc

SEQ ID NO: 87086 - RNA, 21 nt, synthetic construct
  source 1..21: mol_type = other RNA
gagacagaatcttactggtgt

SEQ ID NO: 87087 - RNA, 21 nt, synthetic construct
  source 1..21: mol_type = other RNA
gagacagaccctggcttgtga

SEQ ID NO: 87088 - RNA, 21 nt, synthetic construct
  source 1..21: mol_type = other RNA
gagacagattctctgtctctg

SEQ ID NO: 87089 - RNA, 21 nt, synthetic construct
  source 1..21: mol_type = other RNA
gagacagcctaaaccattttc

SEQ ID NO: 87090 - RNA, 21 nt, synthetic construct
  source 1..21: mol_type = other RNA
gagacaggatccagatgtaga

SEQ ID NO: 87091 - RNA, 21 nt, synthetic construct
  source 1..21: mol_type = other RNA
gagacagggtctcactcttac

SEQ ID NO: 87092 - RNA, 21 nt, synthetic construct
  source 1..21: mol_type = other RNA
gagacagtattgtgctgaaac

SEQ ID NO: 87093 - RNA, 21 nt, synthetic construct
  source 1..21: mol_type = other RNA
gagacagtgagcatgctgcaa

SEQ ID NO: 87094 - RNA, 21 nt, synthetic construct
  source 1..21: mol_type = other RNA
gagacatcacaatgcgtttgt

SEQ ID NO: 87095 - RNA, 21 nt, synthetic construct
  source 1..21: mol_type = other RNA
gagacatctgagacatcacaa

SEQ ID NO: 87096 - RNA, 21 nt, synthetic construct
  source 1..21: mol_type = other RNA
gagacattacaattgatacca

SEQ ID NO: 87097 - RNA, 21 nt, synthetic construct
  source 1..21: mol_type = other RNA
gagacatttgagggtgctgat

SEQ ID NO: 87098 - RNA, 21 nt, synthetic construct
  source 1..21: mol_type = other RNA
gagaccaaatgcataaaaata

SEQ ID NO: 87099 - RNA, 21 nt, synthetic construct
  source 1..21: mol_type = other RNA
gagaccacagacgtgcagcac

SEQ ID NO: 87100 - RNA, 21 nt, synthetic construct
  source 1..21: mol_type = other RNA
gagaccacaggctctcttcac

SEQ ID NO: 87101 - RNA, 21 nt, synthetic construct
  source 1..21: mol_type = other RNA
gagaccaccacacttgcttgg

SEQ ID NO: 87102 - RNA, 21 nt, synthetic construct
  source 1..21: mol_type = other RNA
gagaccaggagttcttatgag

SEQ ID NO: 87103 - RNA, 21 nt, synthetic construct
  source 1..21: mol_type = other RNA
gagaccagttaggaagccact

SEQ ID NO: 87104 - RNA, 21 nt, synthetic construct
  source 1..21: mol_type = other RNA
gagacccatactcagccccct

SEQ ID NO: 87105 - RNA, 21 nt, synthetic construct
  source 1..21: mol_type = other RNA
gagaccccatctctaccaaaa

SEQ ID NO: 87106 - RNA, 21 nt, synthetic construct
  source 1..21: mol_type = other RNA
gagaccggatgaggtggctca

SEQ ID NO: 87107 - RNA, 21 nt, synthetic construct
  source 1..21: mol_type = other RNA
gagaccgtggggggagggagg

SEQ ID NO: 87108 - RNA, 21 nt, synthetic construct
  source 1..21: mol_type = other RNA
gagacctactaaaagttgaca

SEQ ID NO: 87109 - RNA, 21 nt, synthetic construct
  source 1..21: mol_type = other RNA
gagacctcaggcagtctagtc

SEQ ID NO: 87110 - RNA, 21 nt, synthetic construct
  source 1..21: mol_type = other RNA
gagacctcatctctgcaaaac

SEQ ID NO: 87111 - RNA, 21 nt, synthetic construct
  source 1..21: mol_type = other RNA
gagacctcatcttagccggga

SEQ ID NO: 87112 - RNA, 21 nt, synthetic construct
  source 1..21: mol_type = other RNA
gagacctgaagactggatttg

SEQ ID NO: 87113 - RNA, 21 nt, synthetic construct
  source 1..21: mol_type = other RNA
gagacctgattcttccactag

SEQ ID NO: 87114 - RNA, 21 nt, synthetic construct
  source 1..21: mol_type = other RNA
gagacctttctttaaaagtaa

SEQ ID NO: 87115 - RNA, 21 nt, synthetic construct
  source 1..21: mol_type = other RNA
gagacggaagactcatacttc

SEQ ID NO: 87116 - RNA, 21 nt, synthetic construct
  source 1..21: mol_type = other RNA
gagacggaatcttaccctgtt

SEQ ID NO: 87117 - RNA, 21 nt, synthetic construct
  source 1..21: mol_type = other RNA
gagacggcgagcttgatcttt

SEQ ID NO: 87118 - RNA, 21 nt, synthetic construct
  source 1..21: mol_type = other RNA
gagacggcgtttcgccatgtt

SEQ ID NO: 87119 - RNA, 21 nt, synthetic construct
  source 1..21: mol_type = other RNA
gagactagtacactgttgatt

SEQ ID NO: 87120 - RNA, 21 nt, synthetic construct
  source 1..21: mol_type = other RNA
gagactatcgttatatcctca

SEQ ID NO: 87121 - RNA, 21 nt, synthetic construct
  source 1..21: mol_type = other RNA
gagactatctcttcctcctct

SEQ ID NO: 87122 - RNA, 21 nt, synthetic construct
  source 1..21: mol_type = other RNA
gagactattatgagcagttgt

SEQ ID NO: 87123 - RNA, 21 nt, synthetic construct
  source 1..21: mol_type = other RNA
gagactccaactcaaaaaaga

SEQ ID NO: 87124 - RNA, 21 nt, synthetic construct
  source 1..21: mol_type = other RNA
gagactccatctcaagaaaac

SEQ ID NO: 87125 - RNA, 21 nt, synthetic construct
  source 1..21: mol_type = other RNA
gagactctcaagaaggtatca

SEQ ID NO: 87126 - RNA, 21 nt, synthetic construct
  source 1..21: mol_type = other RNA
gagactcttaatattgaaacg

SEQ ID NO: 87127 - RNA, 21 nt, synthetic construct
  source 1..21: mol_type = other RNA
gagactgagtaatattccatt

SEQ ID NO: 87128 - RNA, 21 nt, synthetic construct
  source 1..21: mol_type = other RNA
gagactgataaacttcagttt

SEQ ID NO: 87129 - RNA, 21 nt, synthetic construct
  source 1..21: mol_type = other RNA
gagactgcagtgacctatcat

SEQ ID NO: 87130 - RNA, 21 nt, synthetic construct
  source 1..21: mol_type = other RNA
gagactggatagcaacttgca

SEQ ID NO: 87131 - RNA, 21 nt, synthetic construct
  source 1..21: mol_type = other RNA
gagactggatcctggagggct

SEQ ID NO: 87132 - RNA, 21 nt, synthetic construct
  source 1..21: mol_type = other RNA
gagactgtaatgagctgagat

SEQ ID NO: 87133 - RNA, 21 nt, synthetic construct
  source 1..21: mol_type = other RNA
gagactgtgcaatgtgaaaaa

SEQ ID NO: 87134 - RNA, 21 nt, synthetic construct
  source 1..21: mol_type = other RNA
gagactgtgcttccacagcta

SEQ ID NO: 87135 - RNA, 21 nt, synthetic construct
  source 1..21: mol_type = other RNA
gagactgttagggacttatgg

SEQ ID NO: 87136 - RNA, 21 nt, synthetic construct
  source 1..21: mol_type = other RNA
gagacttaggcaaaggaaaaa

SEQ ID NO: 87137 - RNA, 21 nt, synthetic construct
  source 1..21: mol_type = other RNA
gagactttcactgctcagtcc

SEQ ID NO: 87138 - RNA, 21 nt, synthetic construct
  source 1..21: mol_type = other RNA
gagagaaaaacaaaacaaagt

SEQ ID NO: 87139 - RNA, 21 nt, synthetic construct
  source 1..21: mol_type = other RNA
gagagaaaattgttcatgaaa

SEQ ID NO: 87140 - RNA, 21 nt, synthetic construct
  source 1..21: mol_type = other RNA
gagagaaaccttggtgtgctt

SEQ ID NO: 87141 - RNA, 21 nt, synthetic construct
  source 1..21: mol_type = other RNA
gagagaaactttacactttaa

SEQ ID NO: 87142 - RNA, 21 nt, synthetic construct
  source 1..21: mol_type = other RNA
gagagaaagagagagacaagc

SEQ ID NO: 87143 - RNA, 21 nt, synthetic construct
  source 1..21: mol_type = other RNA
gagagaagagggggcataaca

SEQ ID NO: 87144 - RNA, 21 nt, synthetic construct
  source 1..21: mol_type = other RNA
gagagaagatgacatttgctt

SEQ ID NO: 87145 - RNA, 21 nt, synthetic construct
  source 1..21: mol_type = other RNA
gagagaaggctgccagcacca

SEQ ID NO: 87146 - RNA, 21 nt, synthetic construct
  source 1..21: mol_type = other RNA
gagagaagtcagactaagaca

SEQ ID NO: 87147 - RNA, 21 nt, synthetic construct
  source 1..21: mol_type = other RNA
gagagaattctaaattgccta

SEQ ID NO: 87148 - RNA, 21 nt, synthetic construct
  source 1..21: mol_type = other RNA
gagagacaagcacaggcatct

SEQ ID NO: 87149 - RNA, 21 nt, synthetic construct
  source 1..21: mol_type = other RNA
gagagacctgaagactggatt

SEQ ID NO: 87150 - RNA, 21 nt, synthetic construct
  source 1..21: mol_type = other RNA
gagagacctttctttaaaagt

SEQ ID NO: 87151 - RNA, 21 nt, synthetic construct
  source 1..21: mol_type = other RNA
gagagagaaactttacacttt

SEQ ID NO: 87152 - RNA, 21 nt, synthetic construct
  source 1..21: mol_type = other RNA
gagagagaaagagagagacaa

SEQ ID NO: 87153 - RNA, 21 nt, synthetic construct
  source 1..21: mol_type = other RNA
gagagagaagatgacatttgc

SEQ ID NO: 87154 - RNA, 21 nt, synthetic construct
  source 1..21: mol_type = other RNA
gagagagaattctaaattgcc

SEQ ID NO: 87155 - RNA, 21 nt, synthetic construct
  source 1..21: mol_type = other RNA
gagagagacaagcacaggcat

SEQ ID NO: 87156 - RNA, 21 nt, synthetic construct
  source 1..21: mol_type = other RNA
gagagagacctttctttaaaa

SEQ ID NO: 87157 - RNA, 21 nt, synthetic construct
  source 1..21: mol_type = other RNA
gagagagagaaagagagagac

SEQ ID NO: 87158 - RNA, 21 nt, synthetic construct
  source 1..21: mol_type = other RNA
gagagagataaaacctggaat

SEQ ID NO: 87159 - RNA, 21 nt, synthetic construct
  source 1..21: mol_type = other RNA
gagagaggggggaagcttttc

SEQ ID NO: 87160 - RNA, 21 nt, synthetic construct
  source 1..21: mol_type = other RNA
gagagagtaactggtccagat

SEQ ID NO: 87161 - RNA, 21 nt, synthetic construct
  source 1..21: mol_type = other RNA
gagagataaaacctggaatgg

SEQ ID NO: 87162 - RNA, 21 nt, synthetic construct
  source 1..21: mol_type = other RNA
gagagatagaaagcaccaggg

SEQ ID NO: 87163 - RNA, 21 nt, synthetic construct
  source 1..21: mol_type = other RNA
gagagatgaatggataaggaa

SEQ ID NO: 87164 - RNA, 21 nt, synthetic construct
  source 1..21: mol_type = other RNA
gagagatgcctatgaaatctt

SEQ ID NO: 87165 - RNA, 21 nt, synthetic construct
  source 1..21: mol_type = other RNA
gagagatgcctgtgcttgtct

SEQ ID NO: 87166 - RNA, 21 nt, synthetic construct
  source 1..21: mol_type = other RNA
gagagatggtagtcaacactt

SEQ ID NO: 87167 - RNA, 21 nt, synthetic construct
  source 1..21: mol_type = other RNA
gagagatggtgggagaggcat

SEQ ID NO: 87168 - RNA, 21 nt, synthetic construct
  source 1..21: mol_type = other RNA
gagagattaaataacttccat

SEQ ID NO: 87169 - RNA, 21 nt, synthetic construct
  source 1..21: mol_type = other RNA
gagagattcaagaaaccacag

SEQ ID NO: 87170 - RNA, 21 nt, synthetic construct
  source 1..21: mol_type = other RNA
gagagcaagactcaaatctca

SEQ ID NO: 87171 - RNA, 21 nt, synthetic construct
  source 1..21: mol_type = other RNA
gagagcaagtccccatctcca

SEQ ID NO: 87172 - RNA, 21 nt, synthetic construct
  source 1..21: mol_type = other RNA
gagagcactggtttcagtaca

SEQ ID NO: 87173 - RNA, 21 nt, synthetic construct
  source 1..21: mol_type = other RNA
gagagcagagacacacatcag

SEQ ID NO: 87174 - RNA, 21 nt, synthetic construct
  source 1..21: mol_type = other RNA
gagagcattgcctttattact

SEQ ID NO: 87175 - RNA, 21 nt, synthetic construct
  source 1..21: mol_type = other RNA
gagagcccagaaataaatcct

SEQ ID NO: 87176 - RNA, 21 nt, synthetic construct
  source 1..21: mol_type = other RNA
gagagcctgtggtctcttcga

SEQ ID NO: 87177 - RNA, 21 nt, synthetic construct
  source 1..21: mol_type = other RNA
gagagcgacagctacggagga

SEQ ID NO: 87178 - RNA, 21 nt, synthetic construct
  source 1..21: mol_type = other RNA
gagagctaagggaagtttttt

SEQ ID NO: 87179 - RNA, 21 nt, synthetic construct
  source 1..21: mol_type = other RNA
gagagctcaggccagtgagtg

SEQ ID NO: 87180 - RNA, 21 nt, synthetic construct
  source 1..21: mol_type = other RNA
gagagctgtgccgaggcagag

SEQ ID NO: 87181 - RNA, 21 nt, synthetic construct
  source 1..21: mol_type = other RNA
gagagctttcttttaaagacc

SEQ ID NO: 87182 - RNA, 21 nt, synthetic construct
  source 1..21: mol_type = other RNA
gagaggaagtgaccctgagtc

SEQ ID NO: 87183 - RNA, 21 nt, synthetic construct
  source 1..21: mol_type = other RNA
gagaggaataaatggtagctt

SEQ ID NO: 87184 - RNA, 21 nt, synthetic construct
  source 1..21: mol_type = other RNA
gagaggacagttggccttgag

SEQ ID NO: 87185 - RNA, 21 nt, synthetic construct
  source 1..21: mol_type = other RNA
gagaggactgcctggtcctga

SEQ ID NO: 87186 - RNA, 21 nt, synthetic construct
  source 1..21: mol_type = other RNA
gagaggagcgccctggcattg

SEQ ID NO: 87187 - RNA, 21 nt, synthetic construct
  source 1..21: mol_type = other RNA
gagaggcaaaggccgctcttg

SEQ ID NO: 87188 - RNA, 21 nt, synthetic construct
  source 1..21: mol_type = other RNA
gagaggcatgccgggacaaga

SEQ ID NO: 87189 - RNA, 21 nt, synthetic construct
  source 1..21: mol_type = other RNA
gagaggcctcatgtattttcc

SEQ ID NO: 87190 - RNA, 21 nt, synthetic construct
  source 1..21: mol_type = other RNA
gagaggctaggtgacctgcca

SEQ ID NO: 87191 - RNA, 21 nt, synthetic construct
  source 1..21: mol_type = other RNA
gagaggctttaagcagaaagt

SEQ ID NO: 87192 - RNA, 21 nt, synthetic construct
  source 1..21: mol_type = other RNA
gagaggctttttattagattt

SEQ ID NO: 87193 - RNA, 21 nt, synthetic construct
  source 1..21: mol_type = other RNA
gagagggaagtttatagcagt

SEQ ID NO: 87194 - RNA, 21 nt, synthetic construct
  source 1..21: mol_type = other RNA
gagagggagaccgtgggggga

SEQ ID NO: 87195 - RNA, 21 nt, synthetic construct
  source 1..21: mol_type = other RNA
gagagggagctctgtcttgat

SEQ ID NO: 87196 - RNA, 21 nt, synthetic construct
  source 1..21: mol_type = other RNA
gagaggggggaagcttttcat

SEQ ID NO: 87197 - RNA, 21 nt, synthetic construct
  source 1..21: mol_type = other RNA
gagaggtgaactattagagct

SEQ ID NO: 87198 - RNA, 21 nt, synthetic construct
  source 1..21: mol_type = other RNA
gagagtaaaataaaagctcta

SEQ ID NO: 87199 - RNA, 21 nt, synthetic construct
  source 1..21: mol_type = other RNA
gagagtaactggtccagatga

SEQ ID NO: 87200 - RNA, 21 nt, synthetic construct
  source 1..21: mol_type = other RNA
gagagtaagttgcatacgtcg

SEQ ID NO: 87201 - RNA, 21 nt, synthetic construct
  source 1..21: mol_type = other RNA
gagagtattgccaggtttgtg

SEQ ID NO: 87202 - RNA, 21 nt, synthetic construct
  source 1..21: mol_type = other RNA
gagagtcgcttgaacctgaaa

SEQ ID NO: 87203 - RNA, 21 nt, synthetic construct
  source 1..21: mol_type = other RNA
gagagtctcttaagaccacaa

SEQ ID NO: 87204 - RNA, 21 nt, synthetic construct
  source 1..21: mol_type = other RNA
gagagtgaaaacacaaactgc

SEQ ID NO: 87205 - RNA, 21 nt, synthetic construct
  source 1..21: mol_type = other RNA
gagagtgacagctgagtagcg

SEQ ID NO: 87206 - RNA, 21 nt, synthetic construct
  source 1..21: mol_type = other RNA
gagagtgcagtatgtaggaaa

SEQ ID NO: 87207 - RNA, 21 nt, synthetic construct
  source 1..21: mol_type = other RNA
gagagtggaaagagccagcct

SEQ ID NO: 87208 - RNA, 21 nt, synthetic construct
  source 1..21: mol_type = other RNA
gagagtggcctaaatcaggat

SEQ ID NO: 87209 - RNA, 21 nt, synthetic construct
  source 1..21: mol_type = other RNA
gagagtgggcccagcagaagg

SEQ ID NO: 87210 - RNA, 21 nt, synthetic construct
  source 1..21: mol_type = other RNA
gagataaaacctggaatgggt

SEQ ID NO: 87211 - RNA, 21 nt, synthetic construct
  source 1..21: mol_type = other RNA
gagataaactagattaccttg

SEQ ID NO: 87212 - RNA, 21 nt, synthetic construct
  source 1..21: mol_type = other RNA
gagataaagagcaggtggaag

SEQ ID NO: 87213 - RNA, 21 nt, synthetic construct
  source 1..21: mol_type = other RNA
gagataaattacccaaagact

SEQ ID NO: 87214 - RNA, 21 nt, synthetic construct
  source 1..21: mol_type = other RNA
gagataactaatgagaatttc

SEQ ID NO: 87215 - RNA, 21 nt, synthetic construct
  source 1..21: mol_type = other RNA
gagataactgggtgtgcacgt

SEQ ID NO: 87216 - RNA, 21 nt, synthetic construct
  source 1..21: mol_type = other RNA
gagataccttgaaaggatact

SEQ ID NO: 87217 - RNA, 21 nt, synthetic construct
  source 1..21: mol_type = other RNA
gagatactacgcctagctgac

SEQ ID NO: 87218 - RNA, 21 nt, synthetic construct
  source 1..21: mol_type = other RNA
gagatactggccatgttttat

SEQ ID NO: 87219 - RNA, 21 nt, synthetic construct
  source 1..21: mol_type = other RNA
gagatacttgattacaagggt

SEQ ID NO: 87220 - RNA, 21 nt, synthetic construct
  source 1..21: mol_type = other RNA
gagatagaaagcaccagggcc

SEQ ID NO: 87221 - RNA, 21 nt, synthetic construct
  source 1..21: mol_type = other RNA
gagatagaccagatgcgtggt

SEQ ID NO: 87222 - RNA, 21 nt, synthetic construct
  source 1..21: mol_type = other RNA
gagatagtctcttcctgtata

SEQ ID NO: 87223 - RNA, 21 nt, synthetic construct
  source 1..21: mol_type = other RNA
gagatatacaggaagagacta

SEQ ID NO: 87224 - RNA, 21 nt, synthetic construct
  source 1..21: mol_type = other RNA
gagatatttcgcctagataag

SEQ ID NO: 87225 - RNA, 21 nt, synthetic construct
  source 1..21: mol_type = other RNA
gagatcacgccactgcattcc

SEQ ID NO: 87226 - RNA, 21 nt, synthetic construct
  source 1..21: mol_type = other RNA
gagatctaaattttaagtgca

SEQ ID NO: 87227 - RNA, 21 nt, synthetic construct
  source 1..21: mol_type = other RNA
gagatctagtgaagtcaattt

SEQ ID NO: 87228 - RNA, 21 nt, synthetic construct
  source 1..21: mol_type = other RNA
gagatctgaaattgacttcac

SEQ ID NO: 87229 - RNA, 21 nt, synthetic construct
  source 1..21: mol_type = other RNA
gagatcttgtgtatcttttgt

SEQ ID NO: 87230 - RNA, 21 nt, synthetic construct
  source 1..21: mol_type = other RNA
gagatgaatggataaggaaaa

SEQ ID NO: 87231 - RNA, 21 nt, synthetic construct
  source 1..21: mol_type = other RNA
gagatgaggttttacgatgtt

SEQ ID NO: 87232 - RNA, 21 nt, synthetic construct
  source 1..21: mol_type = other RNA
gagatgcctatgaaatcttga

SEQ ID NO: 87233 - RNA, 21 nt, synthetic construct
  source 1..21: mol_type = other RNA
gagatgcctgtgcttgtctct

SEQ ID NO: 87234 - RNA, 21 nt, synthetic construct
  source 1..21: mol_type = other RNA
gagatggacactgcagatgaa

SEQ ID NO: 87235 - RNA, 21 nt, synthetic construct
  source 1..21: mol_type = other RNA
gagatggcacataccatggaa

SEQ ID NO: 87236 - RNA, 21 nt, synthetic construct
  source 1..21: mol_type = other RNA
gagatggcgtgcgcctgtaat

SEQ ID NO: 87237 - RNA, 21 nt, synthetic construct
  source 1..21: mol_type = other RNA
gagatgggaaagtattcccaa

SEQ ID NO: 87238 - RNA, 21 nt, synthetic construct
  source 1..21: mol_type = other RNA
gagatgggaagaaaaaataaa

SEQ ID NO: 87239 - RNA, 21 nt, synthetic construct
  source 1..21: mol_type = other RNA
gagatggggacttgctctctt

SEQ ID NO: 87240 - RNA, 21 nt, synthetic construct
  source 1..21: mol_type = other RNA
gagatggggtctcattgtgtt

SEQ ID NO: 87241 - RNA, 21 nt, synthetic construct
  source 1..21: mol_type = other RNA
gagatggtagtcaacactttt

SEQ ID NO: 87242 - RNA, 21 nt, synthetic construct
  source 1..21: mol_type = other RNA
gagatggtcagtactatcttc

SEQ ID NO: 87243 - RNA, 21 nt, synthetic construct
  source 1..21: mol_type = other RNA
gagatggtgggagaggcatgc

SEQ ID NO: 87244 - RNA, 21 nt, synthetic construct
  source 1..21: mol_type = other RNA
gagatgtactggaagtgtaac

SEQ ID NO: 87245 - RNA, 21 nt, synthetic construct
  source 1..21: mol_type = other RNA
gagatgtgtaattgtaccttg

SEQ ID NO: 87246 - RNA, 21 nt, synthetic construct
  source 1..21: mol_type = other RNA
gagattaaataacttccatga

SEQ ID NO: 87247 - RNA, 21 nt, synthetic construct
  source 1..21: mol_type = other RNA
gagattaaggctggaggatgg

SEQ ID NO: 87248 - RNA, 21 nt, synthetic construct
  source 1..21: mol_type = other RNA
gagattaatgtaggtgtctga

SEQ ID NO: 87249 - RNA, 21 nt, synthetic construct
  source 1..21: mol_type = other RNA
gagattaattcagtcaacacc

SEQ ID NO: 87250 - RNA, 21 nt, synthetic construct
  source 1..21: mol_type = other RNA
gagattacagatgtgagcccc

SEQ ID NO: 87251 - RNA, 21 nt, synthetic construct
  source 1..21: mol_type = other RNA
gagattacatagcaaggaagc

SEQ ID NO: 87252 - RNA, 21 nt, synthetic construct
  source 1..21: mol_type = other RNA
gagattagcgaaagggattct

SEQ ID NO: 87253 - RNA, 21 nt, synthetic construct
  source 1..21: mol_type = other RNA
gagattaggcagaaccacctg

SEQ ID NO: 87254 - RNA, 21 nt, synthetic construct
  source 1..21: mol_type = other RNA
gagattcaagaaaccacagag

SEQ ID NO: 87255 - RNA, 21 nt, synthetic construct
  source 1..21: mol_type = other RNA
gagattgatagatcatatgat

SEQ ID NO: 87256 - RNA, 21 nt, synthetic construct
  source 1..21: mol_type = other RNA
gagattgcacaattgcactcc

SEQ ID NO: 87257 - RNA, 21 nt, synthetic construct
  source 1..21: mol_type = other RNA
gagattgccccattgcactcc

SEQ ID NO: 87258 - RNA, 21 nt, synthetic construct
  source 1..21: mol_type = other RNA
gagattgggaaaatcttggaa

SEQ ID NO: 87259 - RNA, 21 nt, synthetic construct
  source 1..21: mol_type = other RNA
gagattgtcgttgagtacctc

SEQ ID NO: 87260 - RNA, 21 nt, synthetic construct
  source 1..21: mol_type = other RNA
gagattgtgccagtgaactcc

SEQ ID NO: 87261 - RNA, 21 nt, synthetic construct
  source 1..21: mol_type = other RNA
gagatttgagtcttgctctct

SEQ ID NO: 87262 - RNA, 21 nt, synthetic construct
  source 1..21: mol_type = other RNA
gagatttgctgtataacattt

SEQ ID NO: 87263 - RNA, 21 nt, synthetic construct
  source 1..21: mol_type = other RNA
gagattttcccaaagatagac

SEQ ID NO: 87264 - RNA, 21 nt, synthetic construct
  source 1..21: mol_type = other RNA
gagcaaaaatacagctccaaa

SEQ ID NO: 87265 - RNA, 21 nt, synthetic construct
  source 1..21: mol_type = other RNA
gagcaaactcagatctgagag

SEQ ID NO: 87266 - RNA, 21 nt, synthetic construct
  source 1..21: mol_type = other RNA
gagcaacaacctgtctcaaaa

SEQ ID NO: 87267 - RNA, 21 nt, synthetic construct
  source 1..21: mol_type = other RNA
gagcaactactatttcgcaaa

SEQ ID NO: 87268 - RNA, 21 nt, synthetic construct
  source 1..21: mol_type = other RNA
gagcaagactcaaatctcaaa

SEQ ID NO: 87269 - RNA, 21 nt, synthetic construct
  source 1..21: mol_type = other RNA
gagcaagcaacaccagatact

SEQ ID NO: 87270 - RNA, 21 nt, synthetic construct
  source 1..21: mol_type = other RNA
gagcaagcacgttagcatcac

SEQ ID NO: 87271 - RNA, 21 nt, synthetic construct
  source 1..21: mol_type = other RNA
gagcaagcatgagtatctggt

SEQ ID NO: 87272 - RNA, 21 nt, synthetic construct
  source 1..21: mol_type = other RNA
gagcaaggaaggaaaggagat

SEQ ID NO: 87273 - RNA, 21 nt, synthetic construct
  source 1..21: mol_type = other RNA
gagcaaggtcgtttcagattg

SEQ ID NO: 87274 - RNA, 21 nt, synthetic construct
  source 1..21: mol_type = other RNA
gagcaagtccccatctccaca

SEQ ID NO: 87275 - RNA, 21 nt, synthetic construct
  source 1..21: mol_type = other RNA
gagcacaatgcctgccgcaga

SEQ ID NO: 87276 - RNA, 21 nt, synthetic construct
  source 1..21: mol_type = other RNA
gagcacaccaagacatgttag

SEQ ID NO: 87277 - RNA, 21 nt, synthetic construct
  source 1..21: mol_type = other RNA
gagcacagactcaagcctgat

SEQ ID NO: 87278 - RNA, 21 nt, synthetic construct
  source 1..21: mol_type = other RNA
gagcactggtttcagtacacg

SEQ ID NO: 87279 - RNA, 21 nt, synthetic construct
  source 1..21: mol_type = other RNA
gagcactgtgagccactaaaa

SEQ ID NO: 87280 - RNA, 21 nt, synthetic construct
  source 1..21: mol_type = other RNA
gagcactttcgtatttttgtt

SEQ ID NO: 87281 - RNA, 21 nt, synthetic construct
  source 1..21: mol_type = other RNA
gagcagaactccacctcagaa

SEQ ID NO: 87282 - RNA, 21 nt, synthetic construct
  source 1..21: mol_type = other RNA
gagcagaaggaggaaaataat

SEQ ID NO: 87283 - RNA, 21 nt, synthetic construct
  source 1..21: mol_type = other RNA
gagcagaagggaaaggatgac

SEQ ID NO: 87284 - RNA, 21 nt, synthetic construct
  source 1..21: mol_type = other RNA
gagcagagacacacatcagac

SEQ ID NO: 87285 - RNA, 21 nt, synthetic construct
  source 1..21: mol_type = other RNA
gagcagagtcctgagggtgag

SEQ ID NO: 87286 - RNA, 21 nt, synthetic construct
  source 1..21: mol_type = other RNA
gagcagatcagtaacaaataa

SEQ ID NO: 87287 - RNA, 21 nt, synthetic construct
  source 1..21: mol_type = other RNA
gagcagcactgatgtgtagtt

SEQ ID NO: 87288 - RNA, 21 nt, synthetic construct
  source 1..21: mol_type = other RNA
gagcaggctccacttgggtgg

SEQ ID NO: 87289 - RNA, 21 nt, synthetic construct
  source 1..21: mol_type = other RNA
gagcaggggtggggggatgta

SEQ ID NO: 87290 - RNA, 21 nt, synthetic construct
  source 1..21: mol_type = other RNA
gagcagggtgggcccttaatc

SEQ ID NO: 87291 - RNA, 21 nt, synthetic construct
  source 1..21: mol_type = other RNA
gagcaggtggaaggcctgata

SEQ ID NO: 87292 - RNA, 21 nt, synthetic construct
  source 1..21: mol_type = other RNA
gagcagtaggcttagatagga

SEQ ID NO: 87293 - RNA, 21 nt, synthetic construct
  source 1..21: mol_type = other RNA
gagcagtgaaagtctccctaa

SEQ ID NO: 87294 - RNA, 21 nt, synthetic construct
  source 1..21: mol_type = other RNA
gagcagtgtgaataggaaagt

SEQ ID NO: 87295 - RNA, 21 nt, synthetic construct
  source 1..21: mol_type = other RNA
gagcagtgtgttctgccttga

SEQ ID NO: 87296 - RNA, 21 nt, synthetic construct
  source 1..21: mol_type = other RNA
gagcagtgtttcctagattcc

SEQ ID NO: 87297 - RNA, 21 nt, synthetic construct
  source 1..21: mol_type = other RNA
gagcagttactcctgagcaag

SEQ ID NO: 87298 - RNA, 21 nt, synthetic construct
  source 1..21: mol_type = other RNA
gagcagttgtatgccaaaaaa

SEQ ID NO: 87299 - RNA, 21 nt, synthetic construct
  source 1..21: mol_type = other RNA
gagcatagactttagagtcag

SEQ ID NO: 87300 - RNA, 21 nt, synthetic construct
  source 1..21: mol_type = other RNA
gagcatagcttgaaccaggga

SEQ ID NO: 87301 - RNA, 21 nt, synthetic construct
  source 1..21: mol_type = other RNA
gagcatatatactctgagaca

SEQ ID NO: 87302 - RNA, 21 nt, synthetic construct
  source 1..21: mol_type = other RNA
gagcatcccagaggtactcaa

SEQ ID NO: 87303 - RNA, 21 nt, synthetic construct
  source 1..21: mol_type = other RNA
gagcatccccgctgcgagaaa

SEQ ID NO: 87304 - RNA, 21 nt, synthetic construct
  source 1..21: mol_type = other RNA
gagcatcttcccatgaacatg

SEQ ID NO: 87305 - RNA, 21 nt, synthetic construct
  source 1..21: mol_type = other RNA
gagcatgcacacaggagaact

SEQ ID NO: 87306 - RNA, 21 nt, synthetic construct
  source 1..21: mol_type = other RNA
gagcatgctgcaactgagaag

SEQ ID NO: 87307 - RNA, 21 nt, synthetic construct
  source 1..21: mol_type = other RNA
gagcatgtcccctggagttaa

SEQ ID NO: 87308 - RNA, 21 nt, synthetic construct
  source 1..21: mol_type = other RNA
gagcatgttgggccaacttcc

SEQ ID NO: 87309 - RNA, 21 nt, synthetic construct
  source 1..21: mol_type = other RNA
gagcattccccacataggata

SEQ ID NO: 87310 - RNA, 21 nt, synthetic construct
  source 1..21: mol_type = other RNA
gagcattgcctttattactat

SEQ ID NO: 87311 - RNA, 21 nt, synthetic construct
  source 1..21: mol_type = other RNA
gagcatttagccccctgaata

SEQ ID NO: 87312 - RNA, 21 nt, synthetic construct
  source 1..21: mol_type = other RNA
gagccaaacatcatgatttaa

SEQ ID NO: 87313 - RNA, 21 nt, synthetic construct
  source 1..21: mol_type = other RNA
gagccaaacttgaaccttcct

SEQ ID NO: 87314 - RNA, 21 nt, synthetic construct
  source 1..21: mol_type = other RNA
gagccaaagaagaaatcaaat

SEQ ID NO: 87315 - RNA, 21 nt, synthetic construct
  source 1..21: mol_type = other RNA
gagccaaagacattgtcttac

SEQ ID NO: 87316 - RNA, 21 nt, synthetic construct
  source 1..21: mol_type = other RNA
gagccaagtaaaagcaacctc

SEQ ID NO: 87317 - RNA, 21 nt, synthetic construct
  source 1..21: mol_type = other RNA
gagccacagctacactcaata

SEQ ID NO: 87318 - RNA, 21 nt, synthetic construct
  source 1..21: mol_type = other RNA
gagccacagggcccagcctca

SEQ ID NO: 87319 - RNA, 21 nt, synthetic construct
  source 1..21: mol_type = other RNA
gagccacatacatagtattaa

SEQ ID NO: 87320 - RNA, 21 nt, synthetic construct
  source 1..21: mol_type = other RNA
gagccaccacgtccggtcgtt

SEQ ID NO: 87321 - RNA, 21 nt, synthetic construct
  source 1..21: mol_type = other RNA
gagccaccactcccggccgta

SEQ ID NO: 87322 - RNA, 21 nt, synthetic construct
  source 1..21: mol_type = other RNA
gagccaccgcgcccggccaaa

SEQ ID NO: 87323 - RNA, 21 nt, synthetic construct
  source 1..21: mol_type = other RNA
gagccaccgcgcctggtgatt

SEQ ID NO: 87324 - RNA, 21 nt, synthetic construct
  source 1..21: mol_type = other RNA
gagccaccgtgccgggcttgg

SEQ ID NO: 87325 - RNA, 21 nt, synthetic construct
  source 1..21: mol_type = other RNA
gagccacctcatccggtctca

SEQ ID NO: 87326 - RNA, 21 nt, synthetic construct
  source 1..21: mol_type = other RNA
gagccactaaaacaggaagtt

SEQ ID NO: 87327 - RNA, 21 nt, synthetic construct
  source 1..21: mol_type = other RNA
gagccactacgcccggcccat

SEQ ID NO: 87328 - RNA, 21 nt, synthetic construct
  source 1..21: mol_type = other RNA
gagccactagtcagtatattt

SEQ ID NO: 87329 - RNA, 21 nt, synthetic construct
  source 1..21: mol_type = other RNA
gagccactgcgggcccagctc

SEQ ID NO: 87330 - RNA, 21 nt, synthetic construct
  source 1..21: mol_type = other RNA
gagccagagtttcactctgtc

SEQ ID NO: 87331 - RNA, 21 nt, synthetic construct
  source 1..21: mol_type = other RNA
gagccagcaaatcagaaaagg

SEQ ID NO: 87332 - RNA, 21 nt, synthetic construct
  source 1..21: mol_type = other RNA
gagccagcctgatgatgatgg

SEQ ID NO: 87333 - RNA, 21 nt, synthetic construct
  source 1..21: mol_type = other RNA
gagccaggaagtcagcaactc

SEQ ID NO: 87334 - RNA, 21 nt, synthetic construct
  source 1..21: mol_type = other RNA
gagccaggcatggtggtgggc

SEQ ID NO: 87335 - RNA, 21 nt, synthetic construct
  source 1..21: mol_type = other RNA
gagccatcatgcctgggtaat

SEQ ID NO: 87336 - RNA, 21 nt, synthetic construct
  source 1..21: mol_type = other RNA
gagccatcgcgcccagcccgt

SEQ ID NO: 87337 - RNA, 21 nt, synthetic construct
  source 1..21: mol_type = other RNA
gagcccaagcacactttcctt

SEQ ID NO: 87338 - RNA, 21 nt, synthetic construct
  source 1..21: mol_type = other RNA
gagcccaccaccatgcctggc

SEQ ID NO: 87339 - RNA, 21 nt, synthetic construct
  source 1..21: mol_type = other RNA
gagcccagaaataaatcctca

SEQ ID NO: 87340 - RNA, 21 nt, synthetic construct
  source 1..21: mol_type = other RNA
gagcccagagatcccaccatt

SEQ ID NO: 87341 - RNA, 21 nt, synthetic construct
  source 1..21: mol_type = other RNA
gagcccaggaggttgaagctc

SEQ ID NO: 87342 - RNA, 21 nt, synthetic construct
  source 1..21: mol_type = other RNA
gagcccaggagttgcatcact

SEQ ID NO: 87343 - RNA, 21 nt, synthetic construct
  source 1..21: mol_type = other RNA
gagcccagggggtcgagactg

SEQ ID NO: 87344 - RNA, 21 nt, synthetic construct
  source 1..21: mol_type = other RNA
gagccccaagaaagcaggtca

SEQ ID NO: 87345 - RNA, 21 nt, synthetic construct
  source 1..21: mol_type = other RNA
gagccccagaataggcaaatt

SEQ ID NO: 87346 - RNA, 21 nt, synthetic construct
  source 1..21: mol_type = other RNA
gagccctccaggatccagtct

SEQ ID NO: 87347 - RNA, 21 nt, synthetic construct
  source 1..21: mol_type = other RNA
gagccctgctgtggccgaggg

SEQ ID NO: 87348 - RNA, 21 nt, synthetic construct
  source 1..21: mol_type = other RNA
gagccgaaatgcacttagcgc

SEQ ID NO: 87349 - RNA, 21 nt, synthetic construct
  source 1..21: mol_type = other RNA
gagccgagcagaagggaaagg

SEQ ID NO: 87350 - RNA, 21 nt, synthetic construct
  source 1..21: mol_type = other RNA
gagccgtcggtatgttaataa

SEQ ID NO: 87351 - RNA, 21 nt, synthetic construct
  source 1..21: mol_type = other RNA
gagcctaaaataggcctaggt

SEQ ID NO: 87352 - RNA, 21 nt, synthetic construct
  source 1..21: mol_type = other RNA
gagcctaatgtgtaagaaatg

SEQ ID NO: 87353 - RNA, 21 nt, synthetic construct
  source 1..21: mol_type = other RNA
gagcctagtcatccactgcac

SEQ ID NO: 87354 - RNA, 21 nt, synthetic construct
  source 1..21: mol_type = other RNA
gagcctccacacctggcccct

SEQ ID NO: 87355 - RNA, 21 nt, synthetic construct
  source 1..21: mol_type = other RNA
gagcctgaggacactagcaat

SEQ ID NO: 87356 - RNA, 21 nt, synthetic construct
  source 1..21: mol_type = other RNA
gagcctgctctgcagagactg

SEQ ID NO: 87357 - RNA, 21 nt, synthetic construct
  source 1..21: mol_type = other RNA
gagcctggaagttcaaggtta

SEQ ID NO: 87358 - RNA, 21 nt, synthetic construct
  source 1..21: mol_type = other RNA
gagcctgtggtctcttcgagg

SEQ ID NO: 87359 - RNA, 21 nt, synthetic construct
  source 1..21: mol_type = other RNA
gagcctgttccgattttactt

SEQ ID NO: 87360 - RNA, 21 nt, synthetic construct
  source 1..21: mol_type = other RNA
gagccttcagaactcttctcc

SEQ ID NO: 87361 - RNA, 21 nt, synthetic construct
  source 1..21: mol_type = other RNA
gagccttgctgttgtaatgtt

SEQ ID NO: 87362 - RNA, 21 nt, synthetic construct
  source 1..21: mol_type = other RNA
gagcgaagagggagaagaaat

SEQ ID NO: 87363 - RNA, 21 nt, synthetic construct
  source 1..21: mol_type = other RNA
gagcgacagctacggaggatg

SEQ ID NO: 87364 - RNA, 21 nt, synthetic construct
  source 1..21: mol_type = other RNA
gagcgaggcctggaacaggcc

SEQ ID NO: 87365 - RNA, 21 nt, synthetic construct
  source 1..21: mol_type = other RNA
gagcgccacgtgaagatggag

SEQ ID NO: 87366 - RNA, 21 nt, synthetic construct
  source 1..21: mol_type = other RNA
gagcgccctggcattgtcccg

SEQ ID NO: 87367 - RNA, 21 nt, synthetic construct
  source 1..21: mol_type = other RNA
gagcgcttctatgtgacaaac

SEQ ID NO: 87368 - RNA, 21 nt, synthetic construct
  source 1..21: mol_type = other RNA
gagcggcctttgcctctccag

SEQ ID NO: 87369 - RNA, 21 nt, synthetic construct
  source 1..21: mol_type = other RNA
gagcggcgggcttcgcctttg

SEQ ID NO: 87370 - RNA, 21 nt, synthetic construct
  source 1..21: mol_type = other RNA
gagcgggcagccttggaggag

SEQ ID NO: 87371 - RNA, 21 nt, synthetic construct
  source 1..21: mol_type = other RNA
gagcgggtttcctcggtctac

SEQ ID NO: 87372 - RNA, 21 nt, synthetic construct
  source 1..21: mol_type = other RNA
gagcggtgtcttattgttttg

SEQ ID NO: 87373 - RNA, 21 nt, synthetic construct
  source 1..21: mol_type = other RNA
gagcgtcgtacctttcgctat

SEQ ID NO: 87374 - RNA, 21 nt, synthetic construct
  source 1..21: mol_type = other RNA
gagctaagactataaaactct

SEQ ID NO: 87375 - RNA, 21 nt, synthetic construct
  source 1..21: mol_type = other RNA
gagctaagatgctattcaaga

SEQ ID NO: 87376 - RNA, 21 nt, synthetic construct
  source 1..21: mol_type = other RNA
gagctaagggaagttttttca

SEQ ID NO: 87377 - RNA, 21 nt, synthetic construct
  source 1..21: mol_type = other RNA
gagctacaaactccaaacctt

SEQ ID NO: 87378 - RNA, 21 nt, synthetic construct
  source 1..21: mol_type = other RNA
gagctactgcatgctaggggc

SEQ ID NO: 87379 - RNA, 21 nt, synthetic construct
  source 1..21: mol_type = other RNA
gagctagaacagaataaaaag

SEQ ID NO: 87380 - RNA, 21 nt, synthetic construct
  source 1..21: mol_type = other RNA
gagctagaactagaatactcc

SEQ ID NO: 87381 - RNA, 21 nt, synthetic construct
  source 1..21: mol_type = other RNA
gagctagagggtaagaccaaa

SEQ ID NO: 87382 - RNA, 21 nt, synthetic construct
  source 1..21: mol_type = other RNA
gagctataatttatctggatt

SEQ ID NO: 87383 - RNA, 21 nt, synthetic construct
  source 1..21: mol_type = other RNA
gagctcacacgagaaggacag

SEQ ID NO: 87384 - RNA, 21 nt, synthetic construct
  source 1..21: mol_type = other RNA
gagctcaggccagtgagtgat

SEQ ID NO: 87385 - RNA, 21 nt, synthetic construct
  source 1..21: mol_type = other RNA
gagctccagcctgggcgacag

SEQ ID NO: 87386 - RNA, 21 nt, synthetic construct
  source 1..21: mol_type = other RNA
gagctcctgacctcagatatc

SEQ ID NO: 87387 - RNA, 21 nt, synthetic construct
  source 1..21: mol_type = other RNA
gagctctagccttgtactgtg

SEQ ID NO: 87388 - RNA, 21 nt, synthetic construct
  source 1..21: mol_type = other RNA
gagctctcagtggccctgttg

SEQ ID NO: 87389 - RNA, 21 nt, synthetic construct
  source 1..21: mol_type = other RNA
gagctctgtcttgatgataga

SEQ ID NO: 87390 - RNA, 21 nt, synthetic construct
  source 1..21: mol_type = other RNA
gagctgaaagtaaagatagcc

SEQ ID NO: 87391 - RNA, 21 nt, synthetic construct
  source 1..21: mol_type = other RNA
gagctgagaccacagacgtgc

SEQ ID NO: 87392 - RNA, 21 nt, synthetic construct
  source 1..21: mol_type = other RNA
gagctgctgtaacaaagatgc

SEQ ID NO: 87393 - RNA, 21 nt, synthetic construct
  source 1..21: mol_type = other RNA
gagctggaagtaaggattttc

SEQ ID NO: 87394 - RNA, 21 nt, synthetic construct
  source 1..21: mol_type = other RNA
gagctgggactacaggtgtga

SEQ ID NO: 87395 - RNA, 21 nt, synthetic construct
  source 1..21: mol_type = other RNA
gagctgggcccgcagtggctc

SEQ ID NO: 87396 - RNA, 21 nt, synthetic construct
  source 1..21: mol_type = other RNA
gagctgggtgatgttcaaccc

SEQ ID NO: 87397 - RNA, 21 nt, synthetic construct
  source 1..21: mol_type = other RNA
gagctgtaacagaggcatgca

SEQ ID NO: 87398 - RNA, 21 nt, synthetic construct
  source 1..21: mol_type = other RNA
gagctgtatttttgctcacac

SEQ ID NO: 87399 - RNA, 21 nt, synthetic construct
  source 1..21: mol_type = other RNA
gagctgtccccaccgccttcc

SEQ ID NO: 87400 - RNA, 21 nt, synthetic construct
  source 1..21: mol_type = other RNA
gagctgtgccgaggcagagag

SEQ ID NO: 87401 - RNA, 21 nt, synthetic construct
  source 1..21: mol_type = other RNA
gagctgttaatggttagactg

SEQ ID NO: 87402 - RNA, 21 nt, synthetic construct
  source 1..21: mol_type = other RNA
gagcttatcaggcttgagtct

SEQ ID NO: 87403 - RNA, 21 nt, synthetic construct
  source 1..21: mol_type = other RNA
gagcttcaacctcctgggctc

SEQ ID NO: 87404 - RNA, 21 nt, synthetic construct
  source 1..21: mol_type = other RNA
gagcttgatctttacttccct

SEQ ID NO: 87405 - RNA, 21 nt, synthetic construct
  source 1..21: mol_type = other RNA
gagctttcattattaccaggt

SEQ ID NO: 87406 - RNA, 21 nt, synthetic construct
  source 1..21: mol_type = other RNA
gagctttccttagttcgaagt

SEQ ID NO: 87407 - RNA, 21 nt, synthetic construct
  source 1..21: mol_type = other RNA
gagctttcttttaaagacctc

SEQ ID NO: 87408 - RNA, 21 nt, synthetic construct
  source 1..21: mol_type = other RNA
gagctttgttatgaaaatagt

SEQ ID NO: 87409 - RNA, 21 nt, synthetic construct
  source 1..21: mol_type = other RNA
gagcttttattttactctctt

SEQ ID NO: 87410 - RNA, 21 nt, synthetic construct
  source 1..21: mol_type = other RNA
gagcttttgaaactgagcatc

SEQ ID NO: 87411 - RNA, 21 nt, synthetic construct
  source 1..21: mol_type = other RNA
gagctttttctttttaaacag

SEQ ID NO: 87412 - RNA, 21 nt, synthetic construct
  source 1..21: mol_type = other RNA
gaggaaaaaacagttgctatt

SEQ ID NO: 87413 - RNA, 21 nt, synthetic construct
  source 1..21: mol_type = other RNA
gaggaaaagagaacattggtt

SEQ ID NO: 87414 - RNA, 21 nt, synthetic construct
  source 1..21: mol_type = other RNA
gaggaaaataatttgcaacag

SEQ ID NO: 87415 - RNA, 21 nt, synthetic construct
  source 1..21: mol_type = other RNA
gaggaaacccgctctgggtgc

SEQ ID NO: 87416 - RNA, 21 nt, synthetic construct
  source 1..21: mol_type = other RNA
gaggaaagcaggttgcattaa

SEQ ID NO: 87417 - RNA, 21 nt, synthetic construct
  source 1..21: mol_type = other RNA
gaggaactaattgataaaact

SEQ ID NO: 87418 - RNA, 21 nt, synthetic construct
  source 1..21: mol_type = other RNA
gaggaagagatagtctcttcc

SEQ ID NO: 87419 - RNA, 21 nt, synthetic construct
  source 1..21: mol_type = other RNA
gaggaagaggaaggttcaagt

SEQ ID NO: 87420 - RNA, 21 nt, synthetic construct
  source 1..21: mol_type = other RNA
gaggaagctaatcaagccgca

SEQ ID NO: 87421 - RNA, 21 nt, synthetic construct
  source 1..21: mol_type = other RNA
gaggaagcttataatttctga

SEQ ID NO: 87422 - RNA, 21 nt, synthetic construct
  source 1..21: mol_type = other RNA
gaggaaggagaatcgcttaaa

SEQ ID NO: 87423 - RNA, 21 nt, synthetic construct
  source 1..21: mol_type = other RNA
gaggaaggttcaagtttggct

SEQ ID NO: 87424 - RNA, 21 nt, synthetic construct
  source 1..21: mol_type = other RNA
gaggaagtgaccctgagtcca

SEQ ID NO: 87425 - RNA, 21 nt, synthetic construct
  source 1..21: mol_type = other RNA
gaggaataaatggtagcttgg

SEQ ID NO: 87426 - RNA, 21 nt, synthetic construct
  source 1..21: mol_type = other RNA
gaggaatccttcagtcagttc

SEQ ID NO: 87427 - RNA, 21 nt, synthetic construct
  source 1..21: mol_type = other RNA
gaggacactagcaatccagga

SEQ ID NO: 87428 - RNA, 21 nt, synthetic construct
  source 1..21: mol_type = other RNA
gaggacagactgcagttggat

SEQ ID NO: 87429 - RNA, 21 nt, synthetic construct
  source 1..21: mol_type = other RNA
gaggacagttggccttgaggt

SEQ ID NO: 87430 - RNA, 21 nt, synthetic construct
  source 1..21: mol_type = other RNA
gaggacatggagacagtgagc

SEQ ID NO: 87431 - RNA, 21 nt, synthetic construct
  source 1..21: mol_type = other RNA
gaggacgatttttccaacagt

SEQ ID NO: 87432 - RNA, 21 nt, synthetic construct
  source 1..21: mol_type = other RNA
gaggacgctgatgacagttac

SEQ ID NO: 87433 - RNA, 21 nt, synthetic construct
  source 1..21: mol_type = other RNA
gaggactgcctattttgtaat

SEQ ID NO: 87434 - RNA, 21 nt, synthetic construct
  source 1..21: mol_type = other RNA
gaggactgcctggtcctgagg

SEQ ID NO: 87435 - RNA, 21 nt, synthetic construct
  source 1..21: mol_type = other RNA
gaggacttcatgtacaatgaa

SEQ ID NO: 87436 - RNA, 21 nt, synthetic construct
  source 1..21: mol_type = other RNA
gaggagaaggccttccacgga

SEQ ID NO: 87437 - RNA, 21 nt, synthetic construct
  source 1..21: mol_type = other RNA
gaggagacattacaattgata

SEQ ID NO: 87438 - RNA, 21 nt, synthetic construct
  source 1..21: mol_type = other RNA
gaggagcagttactcctgagc

SEQ ID NO: 87439 - RNA, 21 nt, synthetic construct
  source 1..21: mol_type = other RNA
gaggagccaagtaaaagcaac

SEQ ID NO: 87440 - RNA, 21 nt, synthetic construct
  source 1..21: mol_type = other RNA
gaggagccctgctgtggccga

SEQ ID NO: 87441 - RNA, 21 nt, synthetic construct
  source 1..21: mol_type = other RNA
gaggagcgccctggcattgtc

SEQ ID NO: 87442 - RNA, 21 nt, synthetic construct
  source 1..21: mol_type = other RNA
gaggagctgagaccacagacg

SEQ ID NO: 87443 - RNA, 21 nt, synthetic construct
  source 1..21: mol_type = other RNA
gaggaggaagagatagtctct

SEQ ID NO: 87444 - RNA, 21 nt, synthetic construct
  source 1..21: mol_type = other RNA
gaggaggagggtgcagcctct

SEQ ID NO: 87445 - RNA, 21 nt, synthetic construct
  source 1..21: mol_type = other RNA
gaggaggagggttagattata

SEQ ID NO: 87446 - RNA, 21 nt, synthetic construct
  source 1..21: mol_type = other RNA
gaggagggatgcattctagaa

SEQ ID NO: 87447 - RNA, 21 nt, synthetic construct
  source 1..21: mol_type = other RNA
gaggagggtgcagcctctaat

SEQ ID NO: 87448 - RNA, 21 nt, synthetic construct
  source 1..21: mol_type = other RNA
gaggagggttagattatatgg

SEQ ID NO: 87449 - RNA, 21 nt, synthetic construct
  source 1..21: mol_type = other RNA
gaggaggtcatactggagcag

SEQ ID NO: 87450 - RNA, 21 nt, synthetic construct
  source 1..21: mol_type = other RNA
gaggagtgaatttttcatttt

SEQ ID NO: 87451 - RNA, 21 nt, synthetic construct
  source 1..21: mol_type = other RNA
gaggataaggggcagggtgga

SEQ ID NO: 87452 - RNA, 21 nt, synthetic construct
  source 1..21: mol_type = other RNA
gaggataatatctggactgaa

SEQ ID NO: 87453 - RNA, 21 nt, synthetic construct
  source 1..21: mol_type = other RNA
gaggatataacgatagtctcc

SEQ ID NO: 87454 - RNA, 21 nt, synthetic construct
  source 1..21: mol_type = other RNA
gaggatctgttggtgcttagc

SEQ ID NO: 87455 - RNA, 21 nt, synthetic construct
  source 1..21: mol_type = other RNA
gaggatgactgtcctgaattc

SEQ ID NO: 87456 - RNA, 21 nt, synthetic construct
  source 1..21: mol_type = other RNA
gaggatgaggggctgagcctt

SEQ ID NO: 87457 - RNA, 21 nt, synthetic construct
  source 1..21: mol_type = other RNA
gaggatggcttgagcccaggg

SEQ ID NO: 87458 - RNA, 21 nt, synthetic construct
  source 1..21: mol_type = other RNA
gaggatgggcattccagaggg

SEQ ID NO: 87459 - RNA, 21 nt, synthetic construct
  source 1..21: mol_type = other RNA
gaggattccaggtttacagga

SEQ ID NO: 87460 - RNA, 21 nt, synthetic construct
  source 1..21: mol_type = other RNA
gaggattcgattaaaataaca

SEQ ID NO: 87461 - RNA, 21 nt, synthetic construct
  source 1..21: mol_type = other RNA
gaggattggagactgataaac

SEQ ID NO: 87462 - RNA, 21 nt, synthetic construct
  source 1..21: mol_type = other RNA
gaggattgtttgaggctggga

SEQ ID NO: 87463 - RNA, 21 nt, synthetic construct
  source 1..21: mol_type = other RNA
gaggattttggattgcgattg

SEQ ID NO: 87464 - RNA, 21 nt, synthetic construct
  source 1..21: mol_type = other RNA
gaggcaaaactcctgaacaaa

SEQ ID NO: 87465 - RNA, 21 nt, synthetic construct
  source 1..21: mol_type = other RNA
gaggcaaaggccgctcttgac

SEQ ID NO: 87466 - RNA, 21 nt, synthetic construct
  source 1..21: mol_type = other RNA
gaggcaaaggttgagacaaga

SEQ ID NO: 87467 - RNA, 21 nt, synthetic construct
  source 1..21: mol_type = other RNA
gaggcaacagtcattcaggtc

SEQ ID NO: 87468 - RNA, 21 nt, synthetic construct
  source 1..21: mol_type = other RNA
gaggcaatgttgattttgagg

SEQ ID NO: 87469 - RNA, 21 nt, synthetic construct
  source 1..21: mol_type = other RNA
gaggcacctgaacccaggagg

SEQ ID NO: 87470 - RNA, 21 nt, synthetic construct
  source 1..21: mol_type = other RNA
gaggcagagagagtaactggt

SEQ ID NO: 87471 - RNA, 21 nt, synthetic construct
  source 1..21: mol_type = other RNA
gaggcagagagatggtgggag

SEQ ID NO: 87472 - RNA, 21 nt, synthetic construct
  source 1..21: mol_type = other RNA
gaggcagagtagagaaggctt

SEQ ID NO: 87473 - RNA, 21 nt, synthetic construct
  source 1..21: mol_type = other RNA
gaggcagcccgacctccagcg

SEQ ID NO: 87474 - RNA, 21 nt, synthetic construct
  source 1..21: mol_type = other RNA
gaggcagctaagcaccaacag

SEQ ID NO: 87475 - RNA, 21 nt, synthetic construct
  source 1..21: mol_type = other RNA
gaggcaggagaactgcctgga

SEQ ID NO: 87476 - RNA, 21 nt, synthetic construct
  source 1..21: mol_type = other RNA
gaggcaggagagtcgcttgaa

SEQ ID NO: 87477 - RNA, 21 nt, synthetic construct
  source 1..21: mol_type = other RNA
gaggcaggagcatagcttgaa

SEQ ID NO: 87478 - RNA, 21 nt, synthetic construct
  source 1..21: mol_type = other RNA
gaggcaggaggcacctgaacc

SEQ ID NO: 87479 - RNA, 21 nt, synthetic construct
  source 1..21: mol_type = other RNA
gaggcaggtggatatctgagg

SEQ ID NO: 87480 - RNA, 21 nt, synthetic construct
  source 1..21: mol_type = other RNA
gaggcaggtggatcaggagat

SEQ ID NO: 87481 - RNA, 21 nt, synthetic construct
  source 1..21: mol_type = other RNA
gaggcagtaccattccccttg

SEQ ID NO: 87482 - RNA, 21 nt, synthetic construct
  source 1..21: mol_type = other RNA
gaggcagttgagttttcaacc

SEQ ID NO: 87483 - RNA, 21 nt, synthetic construct
  source 1..21: mol_type = other RNA
gaggcatattattgtaacttg

SEQ ID NO: 87484 - RNA, 21 nt, synthetic construct
  source 1..21: mol_type = other RNA
gaggcatctagttaccactag

SEQ ID NO: 87485 - RNA, 21 nt, synthetic construct
  source 1..21: mol_type = other RNA
gaggcatgcacggacttggca

SEQ ID NO: 87486 - RNA, 21 nt, synthetic construct
  source 1..21: mol_type = other RNA
gaggcatgccgggacaagagt

SEQ ID NO: 87487 - RNA, 21 nt, synthetic construct
  source 1..21: mol_type = other RNA
gaggcattagtgaattcacag

SEQ ID NO: 87488 - RNA, 21 nt, synthetic construct
  source 1..21: mol_type = other RNA
gaggccaaatgaaaggcgtcg

SEQ ID NO: 87489 - RNA, 21 nt, synthetic construct
  source 1..21: mol_type = other RNA
gaggccacaaagtccccacat

SEQ ID NO: 87490 - RNA, 21 nt, synthetic construct
  source 1..21: mol_type = other RNA
gaggccagtccctagtgtctc

SEQ ID NO: 87491 - RNA, 21 nt, synthetic construct
  source 1..21: mol_type = other RNA
gaggccatcttcatttctaag

SEQ ID NO: 87492 - RNA, 21 nt, synthetic construct
  source 1..21: mol_type = other RNA
gaggccccaggggacatagat

SEQ ID NO: 87493 - RNA, 21 nt, synthetic construct
  source 1..21: mol_type = other RNA
gaggccctattcaacctataa

SEQ ID NO: 87494 - RNA, 21 nt, synthetic construct
  source 1..21: mol_type = other RNA
gaggccctggtgctttctatc

SEQ ID NO: 87495 - RNA, 21 nt, synthetic construct
  source 1..21: mol_type = other RNA
gaggccgagggttgaacatca

SEQ ID NO: 87496 - RNA, 21 nt, synthetic construct
  source 1..21: mol_type = other RNA
gaggccgcagtgagccatggc

SEQ ID NO: 87497 - RNA, 21 nt, synthetic construct
  source 1..21: mol_type = other RNA
gaggccggaggattgcttgag

SEQ ID NO: 87498 - RNA, 21 nt, synthetic construct
  source 1..21: mol_type = other RNA
gaggcctcagaattaatataa

SEQ ID NO: 87499 - RNA, 21 nt, synthetic construct
  source 1..21: mol_type = other RNA
gaggcctcatgtattttccta

SEQ ID NO: 87500 - RNA, 21 nt, synthetic construct
  source 1..21: mol_type = other RNA
gaggcctcctgccttcctgac

SEQ ID NO: 87501 - RNA, 21 nt, synthetic construct
  source 1..21: mol_type = other RNA
gaggcctctccccttgacgaa

SEQ ID NO: 87502 - RNA, 21 nt, synthetic construct
  source 1..21: mol_type = other RNA
gaggcctggaacaggcccttt

SEQ ID NO: 87503 - RNA, 21 nt, synthetic construct
  source 1..21: mol_type = other RNA
gaggcggaaggattgcctaac

SEQ ID NO: 87504 - RNA, 21 nt, synthetic construct
  source 1..21: mol_type = other RNA
gaggcggaggttgcggtgacg

SEQ ID NO: 87505 - RNA, 21 nt, synthetic construct
  source 1..21: mol_type = other RNA
gaggcggctggatcgcttgag

SEQ ID NO: 87506 - RNA, 21 nt, synthetic construct
  source 1..21: mol_type = other RNA
gaggctagaagtcccagttca

SEQ ID NO: 87507 - RNA, 21 nt, synthetic construct
  source 1..21: mol_type = other RNA
gaggctaggtgacctgccaga

SEQ ID NO: 87508 - RNA, 21 nt, synthetic construct
  source 1..21: mol_type = other RNA
gaggctattaactttgaaatc

SEQ ID NO: 87509 - RNA, 21 nt, synthetic construct
  source 1..21: mol_type = other RNA
gaggctgaggcaggaggcacc

SEQ ID NO: 87510 - RNA, 21 nt, synthetic construct
  source 1..21: mol_type = other RNA
gaggctgaggcggaaggattg

SEQ ID NO: 87511 - RNA, 21 nt, synthetic construct
  source 1..21: mol_type = other RNA
gaggctgaggctggggaattg

SEQ ID NO: 87512 - RNA, 21 nt, synthetic construct
  source 1..21: mol_type = other RNA
gaggctgcaccctcctcctcc

SEQ ID NO: 87513 - RNA, 21 nt, synthetic construct
  source 1..21: mol_type = other RNA
gaggctgcagtgagctccagc

SEQ ID NO: 87514 - RNA, 21 nt, synthetic construct
  source 1..21: mol_type = other RNA
gaggctgggagtacaagacca

SEQ ID NO: 87515 - RNA, 21 nt, synthetic construct
  source 1..21: mol_type = other RNA
gaggctggggaattgcatgag

SEQ ID NO: 87516 - RNA, 21 nt, synthetic construct
  source 1..21: mol_type = other RNA
gaggctgtattgtaggaaagc

SEQ ID NO: 87517 - RNA, 21 nt, synthetic construct
  source 1..21: mol_type = other RNA
gaggctttaagcagaaagtta

SEQ ID NO: 87518 - RNA, 21 nt, synthetic construct
  source 1..21: mol_type = other RNA
gaggctttctgtgtaatactg

SEQ ID NO: 87519 - RNA, 21 nt, synthetic construct
  source 1..21: mol_type = other RNA
gaggcttttattggtaatgtt

SEQ ID NO: 87520 - RNA, 21 nt, synthetic construct
  source 1..21: mol_type = other RNA
gaggcttttcatagtcatcat

SEQ ID NO: 87521 - RNA, 21 nt, synthetic construct
  source 1..21: mol_type = other RNA
gaggcttttggattttctttc

SEQ ID NO: 87522 - RNA, 21 nt, synthetic construct
  source 1..21: mol_type = other RNA
gaggctttttatatttccgat

SEQ ID NO: 87523 - RNA, 21 nt, synthetic construct
  source 1..21: mol_type = other RNA
gagggaaactgtttttgcaat

SEQ ID NO: 87524 - RNA, 21 nt, synthetic construct
  source 1..21: mol_type = other RNA
gagggaaattatttccagcct

SEQ ID NO: 87525 - RNA, 21 nt, synthetic construct
  source 1..21: mol_type = other RNA
gagggaacattttcattttaa

SEQ ID NO: 87526 - RNA, 21 nt, synthetic construct
  source 1..21: mol_type = other RNA
gagggaagtactgagtcaaaa

SEQ ID NO: 87527 - RNA, 21 nt, synthetic construct
  source 1..21: mol_type = other RNA
gagggaatctaggaaacactg

SEQ ID NO: 87528 - RNA, 21 nt, synthetic construct
  source 1..21: mol_type = other RNA
gagggaatttgttttaccatc

SEQ ID NO: 87529 - RNA, 21 nt, synthetic construct
  source 1..21: mol_type = other RNA
gagggaatttttcttacctaa

SEQ ID NO: 87530 - RNA, 21 nt, synthetic construct
  source 1..21: mol_type = other RNA
gagggactgaaaccagtgggt

SEQ ID NO: 87531 - RNA, 21 nt, synthetic construct
  source 1..21: mol_type = other RNA
gagggactgagcagtgaaagt

SEQ ID NO: 87532 - RNA, 21 nt, synthetic construct
  source 1..21: mol_type = other RNA
gagggagaagaaataaacgac

SEQ ID NO: 87533 - RNA, 21 nt, synthetic construct
  source 1..21: mol_type = other RNA
gagggagaccgtggggggagg

SEQ ID NO: 87534 - RNA, 21 nt, synthetic construct
  source 1..21: mol_type = other RNA
gagggagacggcgagcttgat

SEQ ID NO: 87535 - RNA, 21 nt, synthetic construct
  source 1..21: mol_type = other RNA
gagggagagggagctctgtct

SEQ ID NO: 87536 - RNA, 21 nt, synthetic construct
  source 1..21: mol_type = other RNA
gagggagatatttcgcctaga

SEQ ID NO: 87537 - RNA, 21 nt, synthetic construct
  source 1..21: mol_type = other RNA
gagggagcatcttcccatgaa

SEQ ID NO: 87538 - RNA, 21 nt, synthetic construct
  source 1..21: mol_type = other RNA
gagggagcgccacgtgaagat

SEQ ID NO: 87539 - RNA, 21 nt, synthetic construct
  source 1..21: mol_type = other RNA
gagggagcgtacggggtccgc

SEQ ID NO: 87540 - RNA, 21 nt, synthetic construct
  source 1..21: mol_type = other RNA
gagggagctctgtcttgatga

SEQ ID NO: 87541 - RNA, 21 nt, synthetic construct
  source 1..21: mol_type = other RNA
gagggaggattgtttgaggct

SEQ ID NO: 87542 - RNA, 21 nt, synthetic construct
  source 1..21: mol_type = other RNA
gagggaggccatcttcatttc

SEQ ID NO: 87543 - RNA, 21 nt, synthetic construct
  source 1..21: mol_type = other RNA
gagggatgaatgttgtacatt

SEQ ID NO: 87544 - RNA, 21 nt, synthetic construct
  source 1..21: mol_type = other RNA
gagggatgaggaagaggaagg

SEQ ID NO: 87545 - RNA, 21 nt, synthetic construct
  source 1..21: mol_type = other RNA
gagggatgcattctagaaagg

SEQ ID NO: 87546 - RNA, 21 nt, synthetic construct
  source 1..21: mol_type = other RNA
gagggatgctggagtgtggca

SEQ ID NO: 87547 - RNA, 21 nt, synthetic construct
  source 1..21: mol_type = other RNA
gagggcagagataactgggtg

SEQ ID NO: 87548 - RNA, 21 nt, synthetic construct
  source 1..21: mol_type = other RNA
gagggccagaggagggatgca

SEQ ID NO: 87549 - RNA, 21 nt, synthetic construct
  source 1..21: mol_type = other RNA
gagggcctaaataaaacacat

SEQ ID NO: 87550 - RNA, 21 nt, synthetic construct
  source 1..21: mol_type = other RNA
gagggctcccagtgcccacct

SEQ ID NO: 87551 - RNA, 21 nt, synthetic construct
  source 1..21: mol_type = other RNA
gagggcttcatgctgggagac

SEQ ID NO: 87552 - RNA, 21 nt, synthetic construct
  source 1..21: mol_type = other RNA
gagggctttgtgaagggaggt

SEQ ID NO: 87553 - RNA, 21 nt, synthetic construct
  source 1..21: mol_type = other RNA
gaggggcaggaaaggtgggga

SEQ ID NO: 87554 - RNA, 21 nt, synthetic construct
  source 1..21: mol_type = other RNA
gaggggccagttgagagagaa

SEQ ID NO: 87555 - RNA, 21 nt, synthetic construct
  source 1..21: mol_type = other RNA
gaggggctgagccttcagaac

SEQ ID NO: 87556 - RNA, 21 nt, synthetic construct
  source 1..21: mol_type = other RNA
gagggggagggagagggagct

SEQ ID NO: 87557 - RNA, 21 nt, synthetic construct
  source 1..21: mol_type = other RNA
gagggggcataacatctatga

SEQ ID NO: 87558 - RNA, 21 nt, synthetic construct
  source 1..21: mol_type = other RNA
gagggggctgaggattggaga

SEQ ID NO: 87559 - RNA, 21 nt, synthetic construct
  source 1..21: mol_type = other RNA
gagggggctgagtatgggtct

SEQ ID NO: 87560 - RNA, 21 nt, synthetic construct
  source 1..21: mol_type = other RNA
gaggggggaagcttttcatat

SEQ ID NO: 87561 - RNA, 21 nt, synthetic construct
  source 1..21: mol_type = other RNA
gaggggtattcagggggctaa

SEQ ID NO: 87562 - RNA, 21 nt, synthetic construct
  source 1..21: mol_type = other RNA
gaggggtccccagcatccact

SEQ ID NO: 87563 - RNA, 21 nt, synthetic construct
  source 1..21: mol_type = other RNA
gaggggtcttatgctggtggg

SEQ ID NO: 87564 - RNA, 21 nt, synthetic construct
  source 1..21: mol_type = other RNA
gagggtaaaatagtcaagtaa

SEQ ID NO: 87565 - RNA, 21 nt, synthetic construct
  source 1..21: mol_type = other RNA
gagggtaacgtgagctggaag

SEQ ID NO: 87566 - RNA, 21 nt, synthetic construct
  source 1..21: mol_type = other RNA
gagggtaagaaaggagttcag

SEQ ID NO: 87567 - RNA, 21 nt, synthetic construct
  source 1..21: mol_type = other RNA
gagggtaagaccaaaatggag

SEQ ID NO: 87568 - RNA, 21 nt, synthetic construct
  source 1..21: mol_type = other RNA
gagggtagcttttcctgctgt

SEQ ID NO: 87569 - RNA, 21 nt, synthetic construct
  source 1..21: mol_type = other RNA
gagggtatcatattatttttg

SEQ ID NO: 87570 - RNA, 21 nt, synthetic construct
  source 1..21: mol_type = other RNA
gagggtgagaccaccacactt

SEQ ID NO: 87571 - RNA, 21 nt, synthetic construct
  source 1..21: mol_type = other RNA
gagggtgcagcctctaatcag

SEQ ID NO: 87572 - RNA, 21 nt, synthetic construct
  source 1..21: mol_type = other RNA
gagggtgctgatcaggaaaga

SEQ ID NO: 87573 - RNA, 21 nt, synthetic construct
  source 1..21: mol_type = other RNA
gagggtgtgatcaggaaagat

SEQ ID NO: 87574 - RNA, 21 nt, synthetic construct
  source 1..21: mol_type = other RNA
gagggttagaagacaatactg

SEQ ID NO: 87575 - RNA, 21 nt, synthetic construct
  source 1..21: mol_type = other RNA
gagggttagattatatggtct

SEQ ID NO: 87576 - RNA, 21 nt, synthetic construct
  source 1..21: mol_type = other RNA
gagggttagatttttcctttg

SEQ ID NO: 87577 - RNA, 21 nt, synthetic construct
  source 1..21: mol_type = other RNA
gagggttgaacatcacccagc

SEQ ID NO: 87578 - RNA, 21 nt, synthetic construct
  source 1..21: mol_type = other RNA
gagggtttcagtgagtaggga

SEQ ID NO: 87579 - RNA, 21 nt, synthetic construct
  source 1..21: mol_type = other RNA
gaggtaagaacttgtctttgt

SEQ ID NO: 87580 - RNA, 21 nt, synthetic construct
  source 1..21: mol_type = other RNA
gaggtaatactataaggaaat

SEQ ID NO: 87581 - RNA, 21 nt, synthetic construct
  source 1..21: mol_type = other RNA
gaggtactcaacgacaatctc

SEQ ID NO: 87582 - RNA, 21 nt, synthetic construct
  source 1..21: mol_type = other RNA
gaggtagcacaactagtaagt

SEQ ID NO: 87583 - RNA, 21 nt, synthetic construct
  source 1..21: mol_type = other RNA
gaggtaggcttagatgagccc

SEQ ID NO: 87584 - RNA, 21 nt, synthetic construct
  source 1..21: mol_type = other RNA
gaggtatcaccatctgataag

SEQ ID NO: 87585 - RNA, 21 nt, synthetic construct
  source 1..21: mol_type = other RNA
gaggtatcatttccaagattg

SEQ ID NO: 87586 - RNA, 21 nt, synthetic construct
  source 1..21: mol_type = other RNA
gaggtatttggggctaggatt

SEQ ID NO: 87587 - RNA, 21 nt, synthetic construct
  source 1..21: mol_type = other RNA
gaggtcaagaaataaaacatg

SEQ ID NO: 87588 - RNA, 21 nt, synthetic construct
  source 1..21: mol_type = other RNA
gaggtcacccaagccacagcg

SEQ ID NO: 87589 - RNA, 21 nt, synthetic construct
  source 1..21: mol_type = other RNA
gaggtcaggaaggcaggaggc

SEQ ID NO: 87590 - RNA, 21 nt, synthetic construct
  source 1..21: mol_type = other RNA
gaggtcgcaccctgagcatcc

SEQ ID NO: 87591 - RNA, 21 nt, synthetic construct
  source 1..21: mol_type = other RNA
gaggtcgggctgcctcagccg

SEQ ID NO: 87592 - RNA, 21 nt, synthetic construct
  source 1..21: mol_type = other RNA
gaggtctaagagataactaat

SEQ ID NO: 87593 - RNA, 21 nt, synthetic construct
  source 1..21: mol_type = other RNA
gaggtctaggctaatgtgtgt

SEQ ID NO: 87594 - RNA, 21 nt, synthetic construct
  source 1..21: mol_type = other RNA
gaggtctcaaaatttaaagtt

SEQ ID NO: 87595 - RNA, 21 nt, synthetic construct
  source 1..21: mol_type = other RNA
gaggtctcagccttttctgat

SEQ ID NO: 87596 - RNA, 21 nt, synthetic construct
  source 1..21: mol_type = other RNA
gaggtctgtctttcagtatgt

SEQ ID NO: 87597 - RNA, 21 nt, synthetic construct
  source 1..21: mol_type = other RNA
gaggtctgttactcccgattt

SEQ ID NO: 87598 - RNA, 21 nt, synthetic construct
  source 1..21: mol_type = other RNA
gaggtcttctagctttcagca

SEQ ID NO: 87599 - RNA, 21 nt, synthetic construct
  source 1..21: mol_type = other RNA
gaggtctttaaaagaaagctc

SEQ ID NO: 87600 - RNA, 21 nt, synthetic construct
  source 1..21: mol_type = other RNA
gaggtgaactattagagcttt

SEQ ID NO: 87601 - RNA, 21 nt, synthetic construct
  source 1..21: mol_type = other RNA
gaggtgaagttaagggccatt

SEQ ID NO: 87602 - RNA, 21 nt, synthetic construct
  source 1..21: mol_type = other RNA
gaggtgagacagaccctggct

SEQ ID NO: 87603 - RNA, 21 nt, synthetic construct
  source 1..21: mol_type = other RNA
gaggtgagctttttcttttta

SEQ ID NO: 87604 - RNA, 21 nt, synthetic construct
  source 1..21: mol_type = other RNA
gaggtgaggacatggagacag

SEQ ID NO: 87605 - RNA, 21 nt, synthetic construct
  source 1..21: mol_type = other RNA
gaggtgattaaaggccctgat

SEQ ID NO: 87606 - RNA, 21 nt, synthetic construct
  source 1..21: mol_type = other RNA
gaggtgattcagagtgctggg

SEQ ID NO: 87607 - RNA, 21 nt, synthetic construct
  source 1..21: mol_type = other RNA
gaggtgcacaagggaagaggc

SEQ ID NO: 87608 - RNA, 21 nt, synthetic construct
  source 1..21: mol_type = other RNA
gaggtgcacattccaagagag

SEQ ID NO: 87609 - RNA, 21 nt, synthetic construct
  source 1..21: mol_type = other RNA
gaggtggaactctgtcatggt

SEQ ID NO: 87610 - RNA, 21 nt, synthetic construct
  source 1..21: mol_type = other RNA
gaggtggagttctgctcttgt

SEQ ID NO: 87611 - RNA, 21 nt, synthetic construct
  source 1..21: mol_type = other RNA
gaggtgtacaattaggctgtt

SEQ ID NO: 87612 - RNA, 21 nt, synthetic construct
  source 1..21: mol_type = other RNA
gaggtgtttttcagccctgat

SEQ ID NO: 87613 - RNA, 21 nt, synthetic construct
  source 1..21: mol_type = other RNA
gaggttaaaaccacaaacatg

SEQ ID NO: 87614 - RNA, 21 nt, synthetic construct
  source 1..21: mol_type = other RNA
gaggttaaagcaacaggaaga

SEQ ID NO: 87615 - RNA, 21 nt, synthetic construct
  source 1..21: mol_type = other RNA
gaggttattaagataatgctg

SEQ ID NO: 87616 - RNA, 21 nt, synthetic construct
  source 1..21: mol_type = other RNA
gaggttattcaaaacaaaaca

SEQ ID NO: 87617 - RNA, 21 nt, synthetic construct
  source 1..21: mol_type = other RNA
gaggttcttttaaatgccaat

SEQ ID NO: 87618 - RNA, 21 nt, synthetic construct
  source 1..21: mol_type = other RNA
gaggttgaagacctgcagtct

SEQ ID NO: 87619 - RNA, 21 nt, synthetic construct
  source 1..21: mol_type = other RNA
gaggttgaagctctagtgagc

SEQ ID NO: 87620 - RNA, 21 nt, synthetic construct
  source 1..21: mol_type = other RNA
gaggttgaggctgcagtgagc

SEQ ID NO: 87621 - RNA, 21 nt, synthetic construct
  source 1..21: mol_type = other RNA
gaggttgcggtgacgtgagat

SEQ ID NO: 87622 - RNA, 21 nt, synthetic construct
  source 1..21: mol_type = other RNA
gaggttgcttttacttggctc

SEQ ID NO: 87623 - RNA, 21 nt, synthetic construct
  source 1..21: mol_type = other RNA
gaggtttacttggggagagtg

SEQ ID NO: 87624 - RNA, 21 nt, synthetic construct
  source 1..21: mol_type = other RNA
gaggtttgcactggcacagca

SEQ ID NO: 87625 - RNA, 21 nt, synthetic construct
  source 1..21: mol_type = other RNA
gaggttttacgatgttggcca

SEQ ID NO: 87626 - RNA, 21 nt, synthetic construct
  source 1..21: mol_type = other RNA
gaggtttttgattactgactc

SEQ ID NO: 87627 - RNA, 21 nt, synthetic construct
  source 1..21: mol_type = other RNA
gagtaaaaagaaatctgcatc

SEQ ID NO: 87628 - RNA, 21 nt, synthetic construct
  source 1..21: mol_type = other RNA
gagtaaagggtaagaaaattg

SEQ ID NO: 87629 - RNA, 21 nt, synthetic construct
  source 1..21: mol_type = other RNA
gagtaacagacctctgaagag

SEQ ID NO: 87630 - RNA, 21 nt, synthetic construct
  source 1..21: mol_type = other RNA
gagtaacatgtggaacataat

SEQ ID NO: 87631 - RNA, 21 nt, synthetic construct
  source 1..21: mol_type = other RNA
gagtaactaaactattgtatg

SEQ ID NO: 87632 - RNA, 21 nt, synthetic construct
  source 1..21: mol_type = other RNA
gagtaactgctcctctgactt

SEQ ID NO: 87633 - RNA, 21 nt, synthetic construct
  source 1..21: mol_type = other RNA
gagtaactggtccagatgaag

SEQ ID NO: 87634 - RNA, 21 nt, synthetic construct
  source 1..21: mol_type = other RNA
gagtaactgtcatcagcgtcc

SEQ ID NO: 87635 - RNA, 21 nt, synthetic construct
  source 1..21: mol_type = other RNA
gagtaagcaactgcatcttct

SEQ ID NO: 87636 - RNA, 21 nt, synthetic construct
  source 1..21: mol_type = other RNA
gagtaagttgcatacgtcgtc

SEQ ID NO: 87637 - RNA, 21 nt, synthetic construct
  source 1..21: mol_type = other RNA
gagtaatggatgtttttagag

SEQ ID NO: 87638 - RNA, 21 nt, synthetic construct
  source 1..21: mol_type = other RNA
gagtaatgggatggctgggcc

SEQ ID NO: 87639 - RNA, 21 nt, synthetic construct
  source 1..21: mol_type = other RNA
gagtaatggttggccgaggcc

SEQ ID NO: 87640 - RNA, 21 nt, synthetic construct
  source 1..21: mol_type = other RNA
gagtacagtgcataccaccac

SEQ ID NO: 87641 - RNA, 21 nt, synthetic construct
  source 1..21: mol_type = other RNA
gagtaccaggtcagccagagg

SEQ ID NO: 87642 - RNA, 21 nt, synthetic construct
  source 1..21: mol_type = other RNA
gagtacctctgggatgctcag

SEQ ID NO: 87643 - RNA, 21 nt, synthetic construct
  source 1..21: mol_type = other RNA
gagtactatgcagcaacggaa

SEQ ID NO: 87644 - RNA, 21 nt, synthetic construct
  source 1..21: mol_type = other RNA
gagtagaagagtaatggttgg

SEQ ID NO: 87645 - RNA, 21 nt, synthetic construct
  source 1..21: mol_type = other RNA
gagtagagaaggctttgtgtt

SEQ ID NO: 87646 - RNA, 21 nt, synthetic construct
  source 1..21: mol_type = other RNA
gagtagattcccccttatgtg

SEQ ID NO: 87647 - RNA, 21 nt, synthetic construct
  source 1..21: mol_type = other RNA
gagtagcaccctatttatgtt

SEQ ID NO: 87648 - RNA, 21 nt, synthetic construct
  source 1..21: mol_type = other RNA
gagtagcgctttaagcatccc

SEQ ID NO: 87649 - RNA, 21 nt, synthetic construct
  source 1..21: mol_type = other RNA
gagtagctgggattacacaca

SEQ ID NO: 87650 - RNA, 21 nt, synthetic construct
  source 1..21: mol_type = other RNA
gagtagctgtgattaccggca

SEQ ID NO: 87651 - RNA, 21 nt, synthetic construct
  source 1..21: mol_type = other RNA
gagtagggaaggtgcccgcga

SEQ ID NO: 87652 - RNA, 21 nt, synthetic construct
  source 1..21: mol_type = other RNA
gagtagtacttctgagtgtta

SEQ ID NO: 87653 - RNA, 21 nt, synthetic construct
  source 1..21: mol_type = other RNA
gagtagttcatgttagcataa

SEQ ID NO: 87654 - RNA, 21 nt, synthetic construct
  source 1..21: mol_type = other RNA
gagtagttgtaactacagaca

SEQ ID NO: 87655 - RNA, 21 nt, synthetic construct
  source 1..21: mol_type = other RNA
gagtatatatgctccctaaat

SEQ ID NO: 87656 - RNA, 21 nt, synthetic construct
  source 1..21: mol_type = other RNA
gagtatattctgtgaattgtg

SEQ ID NO: 87657 - RNA, 21 nt, synthetic construct
  source 1..21: mol_type = other RNA
gagtatctaggagtacagtgc

SEQ ID NO: 87658 - RNA, 21 nt, synthetic construct
  source 1..21: mol_type = other RNA
gagtatctggtgctggcagcc

SEQ ID NO: 87659 - RNA, 21 nt, synthetic construct
  source 1..21: mol_type = other RNA
gagtatctggtgttgcttgct

SEQ ID NO: 87660 - RNA, 21 nt, synthetic construct
  source 1..21: mol_type = other RNA
gagtatcttttcatgttgacc

SEQ ID NO: 87661 - RNA, 21 nt, synthetic construct
  source 1..21: mol_type = other RNA
gagtatctttttcagcagcag

SEQ ID NO: 87662 - RNA, 21 nt, synthetic construct
  source 1..21: mol_type = other RNA
gagtatgggtctccattttgg

SEQ ID NO: 87663 - RNA, 21 nt, synthetic construct
  source 1..21: mol_type = other RNA
gagtattacctatgaataggt

SEQ ID NO: 87664 - RNA, 21 nt, synthetic construct
  source 1..21: mol_type = other RNA
gagtattcaagtttcaccctg

SEQ ID NO: 87665 - RNA, 21 nt, synthetic construct
  source 1..21: mol_type = other RNA
gagtattctagttctagctct

SEQ ID NO: 87666 - RNA, 21 nt, synthetic construct
  source 1..21: mol_type = other RNA
gagtattgccaggtttgtgct

SEQ ID NO: 87667 - RNA, 21 nt, synthetic construct
  source 1..21: mol_type = other RNA
gagtatttcatgtacttgtaa

SEQ ID NO: 87668 - RNA, 21 nt, synthetic construct
  source 1..21: mol_type = other RNA
gagtatttttgagcttttcaa

SEQ ID NO: 87669 - RNA, 21 nt, synthetic construct
  source 1..21: mol_type = other RNA
gagtcaaaaccaaagaaaggg

SEQ ID NO: 87670 - RNA, 21 nt, synthetic construct
  source 1..21: mol_type = other RNA
gagtcaactaatcaaacatac

SEQ ID NO: 87671 - RNA, 21 nt, synthetic construct
  source 1..21: mol_type = other RNA
gagtcacagtgaattctgact

SEQ ID NO: 87672 - RNA, 21 nt, synthetic construct
  source 1..21: mol_type = other RNA
gagtcacttgacaaaaattaa

SEQ ID NO: 87673 - RNA, 21 nt, synthetic construct
  source 1..21: mol_type = other RNA
gagtcagtaatcaaaaacctc

SEQ ID NO: 87674 - RNA, 21 nt, synthetic construct
  source 1..21: mol_type = other RNA
gagtcagtagaggccgagggt

SEQ ID NO: 87675 - RNA, 21 nt, synthetic construct
  source 1..21: mol_type = other RNA
gagtcagttgtttacttgggt

SEQ ID NO: 87676 - RNA, 21 nt, synthetic construct
  source 1..21: mol_type = other RNA
gagtcatttgagcccaggagg

SEQ ID NO: 87677 - RNA, 21 nt, synthetic construct
  source 1..21: mol_type = other RNA
gagtccaaccaatcgcagggc

SEQ ID NO: 87678 - RNA, 21 nt, synthetic construct
  source 1..21: mol_type = other RNA
gagtccagaggtgagcttttt

SEQ ID NO: 87679 - RNA, 21 nt, synthetic construct
  source 1..21: mol_type = other RNA
gagtccagctttctaattctg

SEQ ID NO: 87680 - RNA, 21 nt, synthetic construct
  source 1..21: mol_type = other RNA
gagtccagtcctgctaacacc

SEQ ID NO: 87681 - RNA, 21 nt, synthetic construct
  source 1..21: mol_type = other RNA
gagtccccaactgcaaaactt

SEQ ID NO: 87682 - RNA, 21 nt, synthetic construct
  source 1..21: mol_type = other RNA
gagtccctgctttcagttctt

SEQ ID NO: 87683 - RNA, 21 nt, synthetic construct
  source 1..21: mol_type = other RNA
gagtccgcggctgggctttct

SEQ ID NO: 87684 - RNA, 21 nt, synthetic construct
  source 1..21: mol_type = other RNA
gagtcctgaaaattccttccc

SEQ ID NO: 87685 - RNA, 21 nt, synthetic construct
  source 1..21: mol_type = other RNA
gagtcctgagggtgagaccac

SEQ ID NO: 87686 - RNA, 21 nt, synthetic construct
  source 1..21: mol_type = other RNA
gagtcctgtcagtttctgatt

SEQ ID NO: 87687 - RNA, 21 nt, synthetic construct
  source 1..21: mol_type = other RNA
gagtccttccagtatgatgcc

SEQ ID NO: 87688 - RNA, 21 nt, synthetic construct
  source 1..21: mol_type = other RNA
gagtcgccatacctggtcctt

SEQ ID NO: 87689 - RNA, 21 nt, synthetic construct
  source 1..21: mol_type = other RNA
gagtcgcttgaacctgaaaaa

SEQ ID NO: 87690 - RNA, 21 nt, synthetic construct
  source 1..21: mol_type = other RNA
gagtctatctttgggaaaatc

SEQ ID NO: 87691 - RNA, 21 nt, synthetic construct
  source 1..21: mol_type = other RNA
gagtctatttctgaacaaata

SEQ ID NO: 87692 - RNA, 21 nt, synthetic construct
  source 1..21: mol_type = other RNA
gagtctcatctgtcaaaaaga

SEQ ID NO: 87693 - RNA, 21 nt, synthetic construct
  source 1..21: mol_type = other RNA
gagtctcttaagaccacaagg

SEQ ID NO: 87694 - RNA, 21 nt, synthetic construct
  source 1..21: mol_type = other RNA
gagtctgacatactgtcacag

SEQ ID NO: 87695 - RNA, 21 nt, synthetic construct
  source 1..21: mol_type = other RNA
gagtctgcagaccaagaaagg

SEQ ID NO: 87696 - RNA, 21 nt, synthetic construct
  source 1..21: mol_type = other RNA
gagtctgcccatcctatctaa

SEQ ID NO: 87697 - RNA, 21 nt, synthetic construct
  source 1..21: mol_type = other RNA
gagtctgtagggtgactagtg

SEQ ID NO: 87698 - RNA, 21 nt, synthetic construct
  source 1..21: mol_type = other RNA
gagtctgtgctctgtatttaa

SEQ ID NO: 87699 - RNA, 21 nt, synthetic construct
  source 1..21: mol_type = other RNA
gagtcttccgtctcaagattg

SEQ ID NO: 87700 - RNA, 21 nt, synthetic construct
  source 1..21: mol_type = other RNA
gagtcttctactgtgaattca

SEQ ID NO: 87701 - RNA, 21 nt, synthetic construct
  source 1..21: mol_type = other RNA
gagtcttgtttacccagtgtg

SEQ ID NO: 87702 - RNA, 21 nt, synthetic construct
  source 1..21: mol_type = other RNA
gagtgaaaacacaaactgcag

SEQ ID NO: 87703 - RNA, 21 nt, synthetic construct
  source 1..21: mol_type = other RNA
gagtgaaaagaaacaagtgaa

SEQ ID NO: 87704 - RNA, 21 nt, synthetic construct
  source 1..21: mol_type = other RNA
gagtgaaaaggcaaaccacac

SEQ ID NO: 87705 - RNA, 21 nt, synthetic construct
  source 1..21: mol_type = other RNA
gagtgaaactctggctcagaa

SEQ ID NO: 87706 - RNA, 21 nt, synthetic construct
  source 1..21: mol_type = other RNA
gagtgaaatgatttcaagtaa

SEQ ID NO: 87707 - RNA, 21 nt, synthetic construct
  source 1..21: mol_type = other RNA
gagtgaacaggcaaccttggg

SEQ ID NO: 87708 - RNA, 21 nt, synthetic construct
  source 1..21: mol_type = other RNA
gagtgaagaaacctttctcaa

SEQ ID NO: 87709 - RNA, 21 nt, synthetic construct
  source 1..21: mol_type = other RNA
gagtgaagctggacccttacc

SEQ ID NO: 87710 - RNA, 21 nt, synthetic construct
  source 1..21: mol_type = other RNA
gagtgaatggggtaattttgg

SEQ ID NO: 87711 - RNA, 21 nt, synthetic construct
  source 1..21: mol_type = other RNA
gagtgacagctgagtagcgct

SEQ ID NO: 87712 - RNA, 21 nt, synthetic construct
  source 1..21: mol_type = other RNA
gagtgagaggactgcctggtc

SEQ ID NO: 87713 - RNA, 21 nt, synthetic construct
  source 1..21: mol_type = other RNA
gagtgagatgggaagaaaaaa

SEQ ID NO: 87714 - RNA, 21 nt, synthetic construct
  source 1..21: mol_type = other RNA
gagtgagccacagctacactc

SEQ ID NO: 87715 - RNA, 21 nt, synthetic construct
  source 1..21: mol_type = other RNA
gagtgatgaaaagagcacacc

SEQ ID NO: 87716 - RNA, 21 nt, synthetic construct
  source 1..21: mol_type = other RNA
gagtgcaatggtgggatctct

SEQ ID NO: 87717 - RNA, 21 nt, synthetic construct
  source 1..21: mol_type = other RNA
gagtgcacattccttcttcac

SEQ ID NO: 87718 - RNA, 21 nt, synthetic construct
  source 1..21: mol_type = other RNA
gagtgcagtatgtaggaaact

SEQ ID NO: 87719 - RNA, 21 nt, synthetic construct
  source 1..21: mol_type = other RNA
gagtgcagtggtgtggtcttg

SEQ ID NO: 87720 - RNA, 21 nt, synthetic construct
  source 1..21: mol_type = other RNA
gagtgcgagtgtgaacgatgg

SEQ ID NO: 87721 - RNA, 21 nt, synthetic construct
  source 1..21: mol_type = other RNA
gagtgctgggtagagactgga

SEQ ID NO: 87722 - RNA, 21 nt, synthetic construct
  source 1..21: mol_type = other RNA
gagtggaaagagccagcctga

SEQ ID NO: 87723 - RNA, 21 nt, synthetic construct
  source 1..21: mol_type = other RNA
gagtggactgtgagggagata

SEQ ID NO: 87724 - RNA, 21 nt, synthetic construct
  source 1..21: mol_type = other RNA
gagtggaggggcaggaaaggt

SEQ ID NO: 87725 - RNA, 21 nt, synthetic construct
  source 1..21: mol_type = other RNA
gagtggagtggcatgatctca

SEQ ID NO: 87726 - RNA, 21 nt, synthetic construct
  source 1..21: mol_type = other RNA
gagtggatcatttgaggtcaa

SEQ ID NO: 87727 - RNA, 21 nt, synthetic construct
  source 1..21: mol_type = other RNA
gagtggcatcatactggaagg

SEQ ID NO: 87728 - RNA, 21 nt, synthetic construct
  source 1..21: mol_type = other RNA
gagtggcatgatctcacgtca

SEQ ID NO: 87729 - RNA, 21 nt, synthetic construct
  source 1..21: mol_type = other RNA
gagtggcctaaatcaggatgt

SEQ ID NO: 87730 - RNA, 21 nt, synthetic construct
  source 1..21: mol_type = other RNA
gagtggctaatgtggcttgca

SEQ ID NO: 87731 - RNA, 21 nt, synthetic construct
  source 1..21: mol_type = other RNA
gagtgggcaaaaaagtcatga

SEQ ID NO: 87732 - RNA, 21 nt, synthetic construct
  source 1..21: mol_type = other RNA
gagtgggcccagcagaaggtg

SEQ ID NO: 87733 - RNA, 21 nt, synthetic construct
  source 1..21: mol_type = other RNA
gagtggggcacctaaaaggtt

SEQ ID NO: 87734 - RNA, 21 nt, synthetic construct
  source 1..21: mol_type = other RNA
gagtggtggatagagagattc

SEQ ID NO: 87735 - RNA, 21 nt, synthetic construct
  source 1..21: mol_type = other RNA
gagtgtaaggtgtttggtgaa

SEQ ID NO: 87736 - RNA, 21 nt, synthetic construct
  source 1..21: mol_type = other RNA
gagtgtagctgtggctcactc

SEQ ID NO: 87737 - RNA, 21 nt, synthetic construct
  source 1..21: mol_type = other RNA
gagtgtatgcagggaaatcat

SEQ ID NO: 87738 - RNA, 21 nt, synthetic construct
  source 1..21: mol_type = other RNA
gagtgtgaacgatggtttctg

SEQ ID NO: 87739 - RNA, 21 nt, synthetic construct
  source 1..21: mol_type = other RNA
gagtgtgcccaaggaaggcag

SEQ ID NO: 87740 - RNA, 21 nt, synthetic construct
  source 1..21: mol_type = other RNA
gagtgtgctgactagtacgtg

SEQ ID NO: 87741 - RNA, 21 nt, synthetic construct
  source 1..21: mol_type = other RNA
gagtgtggcaggggctgcatc

SEQ ID NO: 87742 - RNA, 21 nt, synthetic construct
  source 1..21: mol_type = other RNA
gagtgtggctttaaggcgcag

SEQ ID NO: 87743 - RNA, 21 nt, synthetic construct
  source 1..21: mol_type = other RNA
gagtgtgtttcgcaaagtaaa

SEQ ID NO: 87744 - RNA, 21 nt, synthetic construct
  source 1..21: mol_type = other RNA
gagtgttacttgaaatcattt

SEQ ID NO: 87745 - RNA, 21 nt, synthetic construct
  source 1..21: mol_type = other RNA
gagtgttcaaaagccccaaac

SEQ ID NO: 87746 - RNA, 21 nt, synthetic construct
  source 1..21: mol_type = other RNA
gagtgttgtgtgcacctaata

SEQ ID NO: 87747 - RNA, 21 nt, synthetic construct
  source 1..21: mol_type = other RNA
gagtgtttcccttaaaaggaa

SEQ ID NO: 87748 - RNA, 21 nt, synthetic construct
  source 1..21: mol_type = other RNA
gagtgttttcttcatggacta

SEQ ID NO: 87749 - RNA, 21 nt, synthetic construct
  source 1..21: mol_type = other RNA
gagttaaaactcacaaaaagt

SEQ ID NO: 87750 - RNA, 21 nt, synthetic construct
  source 1..21: mol_type = other RNA
gagttaattccacaaccactg

SEQ ID NO: 87751 - RNA, 21 nt, synthetic construct
  source 1..21: mol_type = other RNA
gagttaccataaaaccatttt

SEQ ID NO: 87752 - RNA, 21 nt, synthetic construct
  source 1..21: mol_type = other RNA
gagttacgctgccaaaagcca

SEQ ID NO: 87753 - RNA, 21 nt, synthetic construct
  source 1..21: mol_type = other RNA
gagttacttctggaaagttca

SEQ ID NO: 87754 - RNA, 21 nt, synthetic construct
  source 1..21: mol_type = other RNA
gagttaggaatttacatttcc

SEQ ID NO: 87755 - RNA, 21 nt, synthetic construct
  source 1..21: mol_type = other RNA
gagttatgcaagatgtcaaca

SEQ ID NO: 87756 - RNA, 21 nt, synthetic construct
  source 1..21: mol_type = other RNA
gagttattgcatagggatgtt

SEQ ID NO: 87757 - RNA, 21 nt, synthetic construct
  source 1..21: mol_type = other RNA
gagttcaaatgttaagcccaa

SEQ ID NO: 87758 - RNA, 21 nt, synthetic construct
  source 1..21: mol_type = other RNA
gagttcagaaagattaatcct

SEQ ID NO: 87759 - RNA, 21 nt, synthetic construct
  source 1..21: mol_type = other RNA
gagttcagcttacagtcatca

SEQ ID NO: 87760 - RNA, 21 nt, synthetic construct
  source 1..21: mol_type = other RNA
gagttcagctttaaagagaaa

SEQ ID NO: 87761 - RNA, 21 nt, synthetic construct
  source 1..21: mol_type = other RNA
gagttcaggaccagcttgggc

SEQ ID NO: 87762 - RNA, 21 nt, synthetic construct
  source 1..21: mol_type = other RNA
gagttcagtggtgcaatcacg

SEQ ID NO: 87763 - RNA, 21 nt, synthetic construct
  source 1..21: mol_type = other RNA
gagttcagttttgtatatggt

SEQ ID NO: 87764 - RNA, 21 nt, synthetic construct
  source 1..21: mol_type = other RNA
gagttcattagaattcaggac

SEQ ID NO: 87765 - RNA, 21 nt, synthetic construct
  source 1..21: mol_type = other RNA
gagttcattcgtagcaggttt

SEQ ID NO: 87766 - RNA, 21 nt, synthetic construct
  source 1..21: mol_type = other RNA
gagttccaactgtataaatgt

SEQ ID NO: 87767 - RNA, 21 nt, synthetic construct
  source 1..21: mol_type = other RNA
gagttccacctccatcactga

SEQ ID NO: 87768 - RNA, 21 nt, synthetic construct
  source 1..21: mol_type = other RNA
gagttccagtcctttgtgtca

SEQ ID NO: 87769 - RNA, 21 nt, synthetic construct
  source 1..21: mol_type = other RNA
gagttccatctgttatagtgt

SEQ ID NO: 87770 - RNA, 21 nt, synthetic construct
  source 1..21: mol_type = other RNA
gagttcccctatactgtaacc

SEQ ID NO: 87771 - RNA, 21 nt, synthetic construct
  source 1..21: mol_type = other RNA
gagttccgatttctcggccgg

SEQ ID NO: 87772 - RNA, 21 nt, synthetic construct
  source 1..21: mol_type = other RNA
gagttcctgcttcccccaaag

SEQ ID NO: 87773 - RNA, 21 nt, synthetic construct
  source 1..21: mol_type = other RNA
gagttctgaaggctcagcccc

SEQ ID NO: 87774 - RNA, 21 nt, synthetic construct
  source 1..21: mol_type = other RNA
gagttctgggagttcattaga

SEQ ID NO: 87775 - RNA, 21 nt, synthetic construct
  source 1..21: mol_type = other RNA
gagttcttatgaggttattca

SEQ ID NO: 87776 - RNA, 21 nt, synthetic construct
  source 1..21: mol_type = other RNA
gagttgcatcacttgaggtga

SEQ ID NO: 87777 - RNA, 21 nt, synthetic construct
  source 1..21: mol_type = other RNA
gagttgctgacttcctggctc

SEQ ID NO: 87778 - RNA, 21 nt, synthetic construct
  source 1..21: mol_type = other RNA
gagttggcacagccagtcagt

SEQ ID NO: 87779 - RNA, 21 nt, synthetic construct
  source 1..21: mol_type = other RNA
gagttggtgcaaggataaaca

SEQ ID NO: 87780 - RNA, 21 nt, synthetic construct
  source 1..21: mol_type = other RNA
gagttgtaacacatatttatc

SEQ ID NO: 87781 - RNA, 21 nt, synthetic construct
  source 1..21: mol_type = other RNA
gagttgtatctgtgatccctg

SEQ ID NO: 87782 - RNA, 21 nt, synthetic construct
  source 1..21: mol_type = other RNA
gagttgtttccactttgaggt

SEQ ID NO: 87783 - RNA, 21 nt, synthetic construct
  source 1..21: mol_type = other RNA
gagtttaattcttttgctgta

SEQ ID NO: 87784 - RNA, 21 nt, synthetic construct
  source 1..21: mol_type = other RNA
gagtttatattctaagtttgc

SEQ ID NO: 87785 - RNA, 21 nt, synthetic construct
  source 1..21: mol_type = other RNA
gagtttcaatgacttttatca

SEQ ID NO: 87786 - RNA, 21 nt, synthetic construct
  source 1..21: mol_type = other RNA
gagtttccagaaaactggcaa

SEQ ID NO: 87787 - RNA, 21 nt, synthetic construct
  source 1..21: mol_type = other RNA
gagtttgacctgtaatttttc

SEQ ID NO: 87788 - RNA, 21 nt, synthetic construct
  source 1..21: mol_type = other RNA
gagtttgagactgcagtgacc

SEQ ID NO: 87789 - RNA, 21 nt, synthetic construct
  source 1..21: mol_type = other RNA
gagtttgaggccgcagtgagc

SEQ ID NO: 87790 - RNA, 21 nt, synthetic construct
  source 1..21: mol_type = other RNA
gagtttgcattacatgaatgg

SEQ ID NO: 87791 - RNA, 21 nt, synthetic construct
  source 1..21: mol_type = other RNA
gagtttgctctgcaaatgagg

SEQ ID NO: 87792 - RNA, 21 nt, synthetic construct
  source 1..21: mol_type = other RNA
gagtttggtgtatttagtata

SEQ ID NO: 87793 - RNA, 21 nt, synthetic construct
  source 1..21: mol_type = other RNA
gagtttgtagctcaaagcata

SEQ ID NO: 87794 - RNA, 21 nt, synthetic construct
  source 1..21: mol_type = other RNA
gagtttgttctgtcacatttg

SEQ ID NO: 87795 - RNA, 21 nt, synthetic construct
  source 1..21: mol_type = other RNA
gagttttaactcttgcattag

SEQ ID NO: 87796 - RNA, 21 nt, synthetic construct
  source 1..21: mol_type = other RNA
gagttttaggaaaatagagtt

SEQ ID NO: 87797 - RNA, 21 nt, synthetic construct
  source 1..21: mol_type = other RNA
gagttttatagtcttagctct

SEQ ID NO: 87798 - RNA, 21 nt, synthetic construct
  source 1..21: mol_type = other RNA
gagttttcaacctttgttgaa

SEQ ID NO: 87799 - RNA, 21 nt, synthetic construct
  source 1..21: mol_type = other RNA
gagttttccaataagttaact

SEQ ID NO: 87800 - RNA, 21 nt, synthetic construct
  source 1..21: mol_type = other RNA
gagttttccccctacacccag

SEQ ID NO: 87801 - RNA, 21 nt, synthetic construct
  source 1..21: mol_type = other RNA
gagttttgcctctttgctaat

SEQ ID NO: 87802 - RNA, 21 nt, synthetic construct
  source 1..21: mol_type = other RNA
gataaaaaggagggaaaatgt

SEQ ID NO: 87803 - RNA, 21 nt, synthetic construct
  source 1..21: mol_type = other RNA
gataaaaataacgggccgggc

SEQ ID NO: 87804 - RNA, 21 nt, synthetic construct
  source 1..21: mol_type = other RNA
gataaaaatctctacagggaa

SEQ ID NO: 87805 - RNA, 21 nt, synthetic construct
  source 1..21: mol_type = other RNA
gataaaacctggaatgggttg

SEQ ID NO: 87806 - RNA, 21 nt, synthetic construct
  source 1..21: mol_type = other RNA
gataaaactgaagtttatcgt

SEQ ID NO: 87807 - RNA, 21 nt, synthetic construct
  source 1..21: mol_type = other RNA
gataaaagtcattgaaactca

SEQ ID NO: 87808 - RNA, 21 nt, synthetic construct
  source 1..21: mol_type = other RNA
gataaacaaagagaacaatgg

SEQ ID NO: 87809 - RNA, 21 nt, synthetic construct
  source 1..21: mol_type = other RNA
gataaacgttaactatttctc

SEQ ID NO: 87810 - RNA, 21 nt, synthetic construct
  source 1..21: mol_type = other RNA
gataaactagattaccttgaa

SEQ ID NO: 87811 - RNA, 21 nt, synthetic construct
  source 1..21: mol_type = other RNA
gataaactggaattcatcaaa

SEQ ID NO: 87812 - RNA, 21 nt, synthetic construct
  source 1..21: mol_type = other RNA
gataaacttcagttttgagtg

SEQ ID NO: 87813 - RNA, 21 nt, synthetic construct
  source 1..21: mol_type = other RNA
gataaagagcaggtggaaggc

SEQ ID NO: 87814 - RNA, 21 nt, synthetic construct
  source 1..21: mol_type = other RNA
gataaagggtctggtatctac

SEQ ID NO: 87815 - RNA, 21 nt, synthetic construct
  source 1..21: mol_type = other RNA
gataaaggtaaggaaacccca

SEQ ID NO: 87816 - RNA, 21 nt, synthetic construct
  source 1..21: mol_type = other RNA
gataaatacgataaacttcag

SEQ ID NO: 87817 - RNA, 21 nt, synthetic construct
  source 1..21: mol_type = other RNA
gataaatatgtgttacaactc

SEQ ID NO: 87818 - RNA, 21 nt, synthetic construct
  source 1..21: mol_type = other RNA
gataaatcagaaactgacagg

SEQ ID NO: 87819 - RNA, 21 nt, synthetic construct
  source 1..21: mol_type = other RNA
gataaatccaacgaccggacg

SEQ ID NO: 87820 - RNA, 21 nt, synthetic construct
  source 1..21: mol_type = other RNA
gataaatcccacttgatccag

SEQ ID NO: 87821 - RNA, 21 nt, synthetic construct
  source 1..21: mol_type = other RNA
gataaatctaaagccaatctt

SEQ ID NO: 87822 - RNA, 21 nt, synthetic construct
  source 1..21: mol_type = other RNA
gataaatggctttttacgatg

SEQ ID NO: 87823 - RNA, 21 nt, synthetic construct
  source 1..21: mol_type = other RNA
gataaattacccaaagacttt

SEQ ID NO: 87824 - RNA, 21 nt, synthetic construct
  source 1..21: mol_type = other RNA
gataaattatagctccaaaag

SEQ ID NO: 87825 - RNA, 21 nt, synthetic construct
  source 1..21: mol_type = other RNA
gataaattattagcttgctag

SEQ ID NO: 87826 - RNA, 21 nt, synthetic construct
  source 1..21: mol_type = other RNA
gataacaaagggttcttggaa

SEQ ID NO: 87827 - RNA, 21 nt, synthetic construct
  source 1..21: mol_type = other RNA
gataacagtggttaggaaaat

SEQ ID NO: 87828 - RNA, 21 nt, synthetic construct
  source 1..21: mol_type = other RNA
gataaccaataagaagtgaaa

SEQ ID NO: 87829 - RNA, 21 nt, synthetic construct
  source 1..21: mol_type = other RNA
gataacctagaagaaatgggt

SEQ ID NO: 87830 - RNA, 21 nt, synthetic construct
  source 1..21: mol_type = other RNA
gataactaatgagaatttcag

SEQ ID NO: 87831 - RNA, 21 nt, synthetic construct
  source 1..21: mol_type = other RNA
gataactgatatgagggatga

SEQ ID NO: 87832 - RNA, 21 nt, synthetic construct
  source 1..21: mol_type = other RNA
gataactgggtgtgcacgttt

SEQ ID NO: 87833 - RNA, 21 nt, synthetic construct
  source 1..21: mol_type = other RNA
gataactggtgcttttttggt

SEQ ID NO: 87834 - RNA, 21 nt, synthetic construct
  source 1..21: mol_type = other RNA
gataagaaaatgtgacattag

SEQ ID NO: 87835 - RNA, 21 nt, synthetic construct
  source 1..21: mol_type = other RNA
gataagaataccaaattcacg

SEQ ID NO: 87836 - RNA, 21 nt, synthetic construct
  source 1..21: mol_type = other RNA
gataagatccaagtattgtat

SEQ ID NO: 87837 - RNA, 21 nt, synthetic construct
  source 1..21: mol_type = other RNA
gataagcaaaattgacaaacc

SEQ ID NO: 87838 - RNA, 21 nt, synthetic construct
  source 1..21: mol_type = other RNA
gataagcacatggtgataact

SEQ ID NO: 87839 - RNA, 21 nt, synthetic construct
  source 1..21: mol_type = other RNA
gataagcccaacctgattaga

SEQ ID NO: 87840 - RNA, 21 nt, synthetic construct
  source 1..21: mol_type = other RNA
gataagctcccagccaaacag

SEQ ID NO: 87841 - RNA, 21 nt, synthetic construct
  source 1..21: mol_type = other RNA
gataaggaagagtttatattc

SEQ ID NO: 87842 - RNA, 21 nt, synthetic construct
  source 1..21: mol_type = other RNA
gataaggggcagggtggagtc

SEQ ID NO: 87843 - RNA, 21 nt, synthetic construct
  source 1..21: mol_type = other RNA
gataaggggctatctttactt

SEQ ID NO: 87844 - RNA, 21 nt, synthetic construct
  source 1..21: mol_type = other RNA
gataaggttgttcttggttaa

SEQ ID NO: 87845 - RNA, 21 nt, synthetic construct
  source 1..21: mol_type = other RNA
gataagtagaaggtcaatcta

SEQ ID NO: 87846 - RNA, 21 nt, synthetic construct
  source 1..21: mol_type = other RNA
gataatatctggactgaaaag

SEQ ID NO: 87847 - RNA, 21 nt, synthetic construct
  source 1..21: mol_type = other RNA
gataatcacagacgcaaagga

SEQ ID NO: 87848 - RNA, 21 nt, synthetic construct
  source 1..21: mol_type = other RNA
gataatgctatccagaagaga

SEQ ID NO: 87849 - RNA, 21 nt, synthetic construct
  source 1..21: mol_type = other RNA
gataatgctgttctctgtgtg

SEQ ID NO: 87850 - RNA, 21 nt, synthetic construct
  source 1..21: mol_type = other RNA
gataatgtccagaggaggaag

SEQ ID NO: 87851 - RNA, 21 nt, synthetic construct
  source 1..21: mol_type = other RNA
gataatgttagaattcaggac

SEQ ID NO: 87852 - RNA, 21 nt, synthetic construct
  source 1..21: mol_type = other RNA
gatacaaaaagcacctaccat

SEQ ID NO: 87853 - RNA, 21 nt, synthetic construct
  source 1..21: mol_type = other RNA
gatacaactctgaccattgtg

SEQ ID NO: 87854 - RNA, 21 nt, synthetic construct
  source 1..21: mol_type = other RNA
gatacaaggtcaatctgaaaa

SEQ ID NO: 87855 - RNA, 21 nt, synthetic construct
  source 1..21: mol_type = other RNA
gatacaatacttggatcttat

SEQ ID NO: 87856 - RNA, 21 nt, synthetic construct
  source 1..21: mol_type = other RNA
gatacacaagatctctatgca

SEQ ID NO: 87857 - RNA, 21 nt, synthetic construct
  source 1..21: mol_type = other RNA
gatacacttctatccagtgac

SEQ ID NO: 87858 - RNA, 21 nt, synthetic construct
  source 1..21: mol_type = other RNA
gataccagaccctttatcgga

SEQ ID NO: 87859 - RNA, 21 nt, synthetic construct
  source 1..21: mol_type = other RNA
gataccataaagtcagaggag

SEQ ID NO: 87860 - RNA, 21 nt, synthetic construct
  source 1..21: mol_type = other RNA
gataccctcaaaagatgcaga

SEQ ID NO: 87861 - RNA, 21 nt, synthetic construct
  source 1..21: mol_type = other RNA
gatacctagtacgtaacctaa

SEQ ID NO: 87862 - RNA, 21 nt, synthetic construct
  source 1..21: mol_type = other RNA
gatacctcttactaaaaagaa

SEQ ID NO: 87863 - RNA, 21 nt, synthetic construct
  source 1..21: mol_type = other RNA
gataccttcttgagagtctct

SEQ ID NO: 87864 - RNA, 21 nt, synthetic construct
  source 1..21: mol_type = other RNA
gataccttgaaaggatactga

SEQ ID NO: 87865 - RNA, 21 nt, synthetic construct
  source 1..21: mol_type = other RNA
gatacggaaatataacattac

SEQ ID NO: 87866 - RNA, 21 nt, synthetic construct
  source 1..21: mol_type = other RNA
gatacggagtctcgctctgtc

SEQ ID NO: 87867 - RNA, 21 nt, synthetic construct
  source 1..21: mol_type = other RNA
gatacgttaaaggaaaagaga

SEQ ID NO: 87868 - RNA, 21 nt, synthetic construct
  source 1..21: mol_type = other RNA
gatactacgcctagctgactt

SEQ ID NO: 87869 - RNA, 21 nt, synthetic construct
  source 1..21: mol_type = other RNA
gatactagtttagtgcagtat

SEQ ID NO: 87870 - RNA, 21 nt, synthetic construct
  source 1..21: mol_type = other RNA
gatactcaacatcactagcta

SEQ ID NO: 87871 - RNA, 21 nt, synthetic construct
  source 1..21: mol_type = other RNA
gatactcaatcagtggccagt

SEQ ID NO: 87872 - RNA, 21 nt, synthetic construct
  source 1..21: mol_type = other RNA
gatactcatgcttgctccaga

SEQ ID NO: 87873 - RNA, 21 nt, synthetic construct
  source 1..21: mol_type = other RNA
gatactcgtagttttttggta

SEQ ID NO: 87874 - RNA, 21 nt, synthetic construct
  source 1..21: mol_type = other RNA
gatactcttaaagtttcaaac

SEQ ID NO: 87875 - RNA, 21 nt, synthetic construct
  source 1..21: mol_type = other RNA
gatactgagaacagaattttt

SEQ ID NO: 87876 - RNA, 21 nt, synthetic construct
  source 1..21: mol_type = other RNA
gatactgcactaaactagtat

SEQ ID NO: 87877 - RNA, 21 nt, synthetic construct
  source 1..21: mol_type = other RNA
gatactggccatgttttattt

SEQ ID NO: 87878 - RNA, 21 nt, synthetic construct
  source 1..21: mol_type = other RNA
gatacttctaactttagaaca

SEQ ID NO: 87879 - RNA, 21 nt, synthetic construct
  source 1..21: mol_type = other RNA
gatacttgattacaagggtga

SEQ ID NO: 87880 - RNA, 21 nt, synthetic construct
  source 1..21: mol_type = other RNA
gatagaaaagacaatagctag

SEQ ID NO: 87881 - RNA, 21 nt, synthetic construct
  source 1..21: mol_type = other RNA
gatagaaagcaccagggcctc

SEQ ID NO: 87882 - RNA, 21 nt, synthetic construct
  source 1..21: mol_type = other RNA
gatagaagtgtatcagatgct

SEQ ID NO: 87883 - RNA, 21 nt, synthetic construct
  source 1..21: mol_type = other RNA
gatagaataccacttagtttg

SEQ ID NO: 87884 - RNA, 21 nt, synthetic construct
  source 1..21: mol_type = other RNA
gatagaccagatgcgtggttc

SEQ ID NO: 87885 - RNA, 21 nt, synthetic construct
  source 1..21: mol_type = other RNA
gatagactcttcagaggtctg

SEQ ID NO: 87886 - RNA, 21 nt, synthetic construct
  source 1..21: mol_type = other RNA
gatagactggattaaggagat

SEQ ID NO: 87887 - RNA, 21 nt, synthetic construct
  source 1..21: mol_type = other RNA
gatagagagattcaagaaacc

SEQ ID NO: 87888 - RNA, 21 nt, synthetic construct
  source 1..21: mol_type = other RNA
gatagatattggcaacatttt

SEQ ID NO: 87889 - RNA, 21 nt, synthetic construct
  source 1..21: mol_type = other RNA
gatagcaacttgcagaagagt

SEQ ID NO: 87890 - RNA, 21 nt, synthetic construct
  source 1..21: mol_type = other RNA
gatagcattatcccagatcta

SEQ ID NO: 87891 - RNA, 21 nt, synthetic construct
  source 1..21: mol_type = other RNA
gatagcattatccctttaaaa

SEQ ID NO: 87892 - RNA, 21 nt, synthetic construct
  source 1..21: mol_type = other RNA
gatagccccttatcaggaaag

SEQ ID NO: 87893 - RNA, 21 nt, synthetic construct
  source 1..21: mol_type = other RNA
gatagcgaaaggtacgacgct

SEQ ID NO: 87894 - RNA, 21 nt, synthetic construct
  source 1..21: mol_type = other RNA
gatagctgtggaagcacagtc

SEQ ID NO: 87895 - RNA, 21 nt, synthetic construct
  source 1..21: mol_type = other RNA
gatagcttgacaaaaggcccc

SEQ ID NO: 87896 - RNA, 21 nt, synthetic construct
  source 1..21: mol_type = other RNA
gataggaatatcgtctttttt

SEQ ID NO: 87897 - RNA, 21 nt, synthetic construct
  source 1..21: mol_type = other RNA
gataggataatgtccagagga

SEQ ID NO: 87898 - RNA, 21 nt, synthetic construct
  source 1..21: mol_type = other RNA
gataggatgggcagactcctt

SEQ ID NO: 87899 - RNA, 21 nt, synthetic construct
  source 1..21: mol_type = other RNA
gataggtcactgcagtctcaa

SEQ ID NO: 87900 - RNA, 21 nt, synthetic construct
  source 1..21: mol_type = other RNA
gataggtcatgtacataaatt

SEQ ID NO: 87901 - RNA, 21 nt, synthetic construct
  source 1..21: mol_type = other RNA
gatagtactgaccatctcagc

SEQ ID NO: 87902 - RNA, 21 nt, synthetic construct
  source 1..21: mol_type = other RNA
gatagtctcctatattgtcaa

SEQ ID NO: 87903 - RNA, 21 nt, synthetic construct
  source 1..21: mol_type = other RNA
gatagtctcttcctgtatatc

SEQ ID NO: 87904 - RNA, 21 nt, synthetic construct
  source 1..21: mol_type = other RNA
gatagtcttccaattgcagaa

SEQ ID NO: 87905 - RNA, 21 nt, synthetic construct
  source 1..21: mol_type = other RNA
gatagtgctttttactttgcg

SEQ ID NO: 87906 - RNA, 21 nt, synthetic construct
  source 1..21: mol_type = other RNA
gatagtggtttgaagcttcac

SEQ ID NO: 87907 - RNA, 21 nt, synthetic construct
  source 1..21: mol_type = other RNA
gatagttgcagattcatcttg

SEQ ID NO: 87908 - RNA, 21 nt, synthetic construct
  source 1..21: mol_type = other RNA
gatagtttctcaacttagcct

SEQ ID NO: 87909 - RNA, 21 nt, synthetic construct
  source 1..21: mol_type = other RNA
gatataaaaatggtcaacatg

SEQ ID NO: 87910 - RNA, 21 nt, synthetic construct
  source 1..21: mol_type = other RNA
gatataacgatagtctcctat

SEQ ID NO: 87911 - RNA, 21 nt, synthetic construct
  source 1..21: mol_type = other RNA
gatataagagtgggcaaaaaa

SEQ ID NO: 87912 - RNA, 21 nt, synthetic construct
  source 1..21: mol_type = other RNA
gatatacaggaagagactatc

SEQ ID NO: 87913 - RNA, 21 nt, synthetic construct
  source 1..21: mol_type = other RNA
gatatatgcattcccatgttc

SEQ ID NO: 87914 - RNA, 21 nt, synthetic construct
  source 1..21: mol_type = other RNA
gatatcaatctggatataaca

SEQ ID NO: 87915 - RNA, 21 nt, synthetic construct
  source 1..21: mol_type = other RNA
gatatcacccagaccaagttt

SEQ ID NO: 87916 - RNA, 21 nt, synthetic construct
  source 1..21: mol_type = other RNA
gatatcagaagtgctgacttg

SEQ ID NO: 87917 - RNA, 21 nt, synthetic construct
  source 1..21: mol_type = other RNA
gatatccaaagataaaggtaa

SEQ ID NO: 87918 - RNA, 21 nt, synthetic construct
  source 1..21: mol_type = other RNA
gatatccacagtatgctgttt

SEQ ID NO: 87919 - RNA, 21 nt, synthetic construct
  source 1..21: mol_type = other RNA
gatatcccatataaggggaat

SEQ ID NO: 87920 - RNA, 21 nt, synthetic construct
  source 1..21: mol_type = other RNA
gatatccccatttttctcgac

SEQ ID NO: 87921 - RNA, 21 nt, synthetic construct
  source 1..21: mol_type = other RNA
gatatcctgtaaacctggaat

SEQ ID NO: 87922 - RNA, 21 nt, synthetic construct
  source 1..21: mol_type = other RNA
gatatctgaggtcaggagctc

SEQ ID NO: 87923 - RNA, 21 nt, synthetic construct
  source 1..21: mol_type = other RNA
gatatctgagtgttgtgtgca

SEQ ID NO: 87924 - RNA, 21 nt, synthetic construct
  source 1..21: mol_type = other RNA
gatatctggcctgcaccattt

SEQ ID NO: 87925 - RNA, 21 nt, synthetic construct
  source 1..21: mol_type = other RNA
gatatctgtaagtcatcaaag

SEQ ID NO: 87926 - RNA, 21 nt, synthetic construct
  source 1..21: mol_type = other RNA
gatatgaaagaggagacatta

SEQ ID NO: 87927 - RNA, 21 nt, synthetic construct
  source 1..21: mol_type = other RNA
gatatgagggatgaggaagag

SEQ ID NO: 87928 - RNA, 21 nt, synthetic construct
  source 1..21: mol_type = other RNA
gatatgccacattttttggtt

SEQ ID NO: 87929 - RNA, 21 nt, synthetic construct
  source 1..21: mol_type = other RNA
gatatgggagtccctgctttc

SEQ ID NO: 87930 - RNA, 21 nt, synthetic construct
  source 1..21: mol_type = other RNA
gatatgggccaaagacagatc

SEQ ID NO: 87931 - RNA, 21 nt, synthetic construct
  source 1..21: mol_type = other RNA
gatatgggttattcacccaag

SEQ ID NO: 87932 - RNA, 21 nt, synthetic construct
  source 1..21: mol_type = other RNA
gatatgtcgcatgaaaacagc

SEQ ID NO: 87933 - RNA, 21 nt, synthetic construct
  source 1..21: mol_type = other RNA
gatatgtgtaggaaggaacac

SEQ ID NO: 87934 - RNA, 21 nt, synthetic construct
  source 1..21: mol_type = other RNA
gatattagctacaaaagggaa

SEQ ID NO: 87935 - RNA, 21 nt, synthetic construct
  source 1..21: mol_type = other RNA
gatattatcctccaatgtttt

SEQ ID NO: 87936 - RNA, 21 nt, synthetic construct
  source 1..21: mol_type = other RNA
gatattcctatcagaagcaca

SEQ ID NO: 87937 - RNA, 21 nt, synthetic construct
  source 1..21: mol_type = other RNA
gatattctacagaaaaccctt

SEQ ID NO: 87938 - RNA, 21 nt, synthetic construct
  source 1..21: mol_type = other RNA
gatattggcataaagacagac

SEQ ID NO: 87939 - RNA, 21 nt, synthetic construct
  source 1..21: mol_type = other RNA
gatattggcttatagtgttct

SEQ ID NO: 87940 - RNA, 21 nt, synthetic construct
  source 1..21: mol_type = other RNA
gatatttcgcctagataagaa

SEQ ID NO: 87941 - RNA, 21 nt, synthetic construct
  source 1..21: mol_type = other RNA
gatatttgcagtagtattgaa

SEQ ID NO: 87942 - RNA, 21 nt, synthetic construct
  source 1..21: mol_type = other RNA
gatatttgttcagaaatagac

SEQ ID NO: 87943 - RNA, 21 nt, synthetic construct
  source 1..21: mol_type = other RNA
gatattttcgtgtactgaaac

SEQ ID NO: 87944 - RNA, 21 nt, synthetic construct
  source 1..21: mol_type = other RNA
gatattttctgtcattctgca

SEQ ID NO: 87945 - RNA, 21 nt, synthetic construct
  source 1..21: mol_type = other RNA
gatatttttcagattgacctt

SEQ ID NO: 87946 - RNA, 21 nt, synthetic construct
  source 1..21: mol_type = other RNA
gatcaaaaccaggaggtttgc

SEQ ID NO: 87947 - RNA, 21 nt, synthetic construct
  source 1..21: mol_type = other RNA
gatcaaaccatgttcatggga

SEQ ID NO: 87948 - RNA, 21 nt, synthetic construct
  source 1..21: mol_type = other RNA
gatcaaacgtgctttccttat

SEQ ID NO: 87949 - RNA, 21 nt, synthetic construct
  source 1..21: mol_type = other RNA
gatcaaagacctaagcttaag

SEQ ID NO: 87950 - RNA, 21 nt, synthetic construct
  source 1..21: mol_type = other RNA
gatcaaagtgaaaggcaaagg

SEQ ID NO: 87951 - RNA, 21 nt, synthetic construct
  source 1..21: mol_type = other RNA
gatcaaatctggctgcagggc

SEQ ID NO: 87952 - RNA, 21 nt, synthetic construct
  source 1..21: mol_type = other RNA
gatcaagcccttccttgcttg

SEQ ID NO: 87953 - RNA, 21 nt, synthetic construct
  source 1..21: mol_type = other RNA
gatcaagctcgccgtctccct

SEQ ID NO: 87954 - RNA, 21 nt, synthetic construct
  source 1..21: mol_type = other RNA
gatcaaggaagcttcctaaag

SEQ ID NO: 87955 - RNA, 21 nt, synthetic construct
  source 1..21: mol_type = other RNA
gatcaaggcacagtctgtgct

SEQ ID NO: 87956 - RNA, 21 nt, synthetic construct
  source 1..21: mol_type = other RNA
gatcaagtatttcctatgaaa

SEQ ID NO: 87957 - RNA, 21 nt, synthetic construct
  source 1..21: mol_type = other RNA
gatcaagtcctttccagaggt

SEQ ID NO: 87958 - RNA, 21 nt, synthetic construct
  source 1..21: mol_type = other RNA
gatcaagttgcttggcacaga

SEQ ID NO: 87959 - RNA, 21 nt, synthetic construct
  source 1..21: mol_type = other RNA
gatcaattgaccaaacatgtg

SEQ ID NO: 87960 - RNA, 21 nt, synthetic construct
  source 1..21: mol_type = other RNA
gatcacaaggactggcttcag

SEQ ID NO: 87961 - RNA, 21 nt, synthetic construct
  source 1..21: mol_type = other RNA
gatcacaaggtcagaagtttg

SEQ ID NO: 87962 - RNA, 21 nt, synthetic construct
  source 1..21: mol_type = other RNA
gatcacaccctcctaccttcc

SEQ ID NO: 87963 - RNA, 21 nt, synthetic construct
  source 1..21: mol_type = other RNA
gatcacaccgctgcattccag

SEQ ID NO: 87964 - RNA, 21 nt, synthetic construct
  source 1..21: mol_type = other RNA
gatcacacttgatggtttggg

SEQ ID NO: 87965 - RNA, 21 nt, synthetic construct
  source 1..21: mol_type = other RNA
gatcacagaagtgttttgata

SEQ ID NO: 87966 - RNA, 21 nt, synthetic construct
  source 1..21: mol_type = other RNA
gatcacagatacaactctgac

SEQ ID NO: 87967 - RNA, 21 nt, synthetic construct
  source 1..21: mol_type = other RNA
gatcacaggcgttgagccatc

SEQ ID NO: 87968 - RNA, 21 nt, synthetic construct
  source 1..21: mol_type = other RNA
gatcaccaaagacttcaggaa

SEQ ID NO: 87969 - RNA, 21 nt, synthetic construct
  source 1..21: mol_type = other RNA
gatcaccaggggctgggggat

SEQ ID NO: 87970 - RNA, 21 nt, synthetic construct
  source 1..21: mol_type = other RNA
gatcacgccactgcattccgc

SEQ ID NO: 87971 - RNA, 21 nt, synthetic construct
  source 1..21: mol_type = other RNA
gatcagaagagcactatgtaa

SEQ ID NO: 87972 - RNA, 21 nt, synthetic construct
  source 1..21: mol_type = other RNA
gatcagcaccctcaaatgtct

SEQ ID NO: 87973 - RNA, 21 nt, synthetic construct
  source 1..21: mol_type = other RNA
gatcagcttcctacccaagct

SEQ ID NO: 87974 - RNA, 21 nt, synthetic construct
  source 1..21: mol_type = other RNA
gatcaggaaagaccggggact

SEQ ID NO: 87975 - RNA, 21 nt, synthetic construct
  source 1..21: mol_type = other RNA
gatcaggaaagatgaagtata

SEQ ID NO: 87976 - RNA, 21 nt, synthetic construct
  source 1..21: mol_type = other RNA
gatcagggatttggccagaat

SEQ ID NO: 87977 - RNA, 21 nt, synthetic construct
  source 1..21: mol_type = other RNA
gatcagtaaaattcccttcag

SEQ ID NO: 87978 - RNA, 21 nt, synthetic construct
  source 1..21: mol_type = other RNA
gatcagtaacaaataagaaga

SEQ ID NO: 87979 - RNA, 21 nt, synthetic construct
  source 1..21: mol_type = other RNA
gatcataagcttttatttgtc

SEQ ID NO: 87980 - RNA, 21 nt, synthetic construct
  source 1..21: mol_type = other RNA
gatcatacacatccagaagtc

SEQ ID NO: 87981 - RNA, 21 nt, synthetic construct
  source 1..21: mol_type = other RNA
gatcatacacctggatcaagt

SEQ ID NO: 87982 - RNA, 21 nt, synthetic construct
  source 1..21: mol_type = other RNA
gatcatatagtaattctgtgc

SEQ ID NO: 87983 - RNA, 21 nt, synthetic construct
  source 1..21: mol_type = other RNA
gatcatcgcattacgagttat

SEQ ID NO: 87984 - RNA, 21 nt, synthetic construct
  source 1..21: mol_type = other RNA
gatcatttagtaagtgtgagc

SEQ ID NO: 87985 - RNA, 21 nt, synthetic construct
  source 1..21: mol_type = other RNA
gatcatttcaaaccaatgttc

SEQ ID NO: 87986 - RNA, 21 nt, synthetic construct
  source 1..21: mol_type = other RNA
gatcatttcacttgattactt

SEQ ID NO: 87987 - RNA, 21 nt, synthetic construct
  source 1..21: mol_type = other RNA
gatccaagtattgtatcaatg

SEQ ID NO: 87988 - RNA, 21 nt, synthetic construct
  source 1..21: mol_type = other RNA
gatccagatgtagagaaacag

SEQ ID NO: 87989 - RNA, 21 nt, synthetic construct
  source 1..21: mol_type = other RNA
gatccagcagtttcacttctt

SEQ ID NO: 87990 - RNA, 21 nt, synthetic construct
  source 1..21: mol_type = other RNA
gatccaggggaatagaaagtt

SEQ ID NO: 87991 - RNA, 21 nt, synthetic construct
  source 1..21: mol_type = other RNA
gatccaggtgtatgatcttat

SEQ ID NO: 87992 - RNA, 21 nt, synthetic construct
  source 1..21: mol_type = other RNA
gatccagtctctacccagcac

SEQ ID NO: 87993 - RNA, 21 nt, synthetic construct
  source 1..21: mol_type = other RNA
gatccattacatcaacatata

SEQ ID NO: 87994 - RNA, 21 nt, synthetic construct
  source 1..21: mol_type = other RNA
gatcccaaaaaggtttttatt

SEQ ID NO: 87995 - RNA, 21 nt, synthetic construct
  source 1..21: mol_type = other RNA
gatcccaattacttccagtgt

SEQ ID NO: 87996 - RNA, 21 nt, synthetic construct
  source 1..21: mol_type = other RNA
gatcccactagtggaagaatc

SEQ ID NO: 87997 - RNA, 21 nt, synthetic construct
  source 1..21: mol_type = other RNA
gatcccagtcctttgggaggt

SEQ ID NO: 87998 - RNA, 21 nt, synthetic construct
  source 1..21: mol_type = other RNA
gatcccccagcccctggtgat

SEQ ID NO: 87999 - RNA, 21 nt, synthetic construct
  source 1..21: mol_type = other RNA
gatcccggaacaggaaaagga

SEQ ID NO: 88000 - RNA, 21 nt, synthetic construct
  source 1..21: mol_type = other RNA
gatccctgatatgtcgcatga

SEQ ID NO: 88001 - RNA, 21 nt, synthetic construct
  source 1..21: mol_type = other RNA
gatcctaagcatgagatacta

SEQ ID NO: 88002 - RNA, 21 nt, synthetic construct
  source 1..21: mol_type = other RNA
gatcctaagccatctaattca

SEQ ID NO: 88003 - RNA, 21 nt, synthetic construct
  source 1..21: mol_type = other RNA
gatcctcacatcagttaccac

SEQ ID NO: 88004 - RNA, 21 nt, synthetic construct
  source 1..21: mol_type = other RNA
gatcctcctgccttggccttc

SEQ ID NO: 88005 - RNA, 21 nt, synthetic construct
  source 1..21: mol_type = other RNA
gatcctgaggaagctaatcaa

SEQ ID NO: 88006 - RNA, 21 nt, synthetic construct
  source 1..21: mol_type = other RNA
gatcctggaatagtagcttca

SEQ ID NO: 88007 - RNA, 21 nt, synthetic construct
  source 1..21: mol_type = other RNA
gatcctggagggctcccagtg

SEQ ID NO: 88008 - RNA, 21 nt, synthetic construct
  source 1..21: mol_type = other RNA
gatcctggattgctagtgtcc

SEQ ID NO: 88009 - RNA, 21 nt, synthetic construct
  source 1..21: mol_type = other RNA
gatcctgtccaggcgcctgca

SEQ ID NO: 88010 - RNA, 21 nt, synthetic construct
  source 1..21: mol_type = other RNA
gatcctgtctcagagtatata

SEQ ID NO: 88011 - RNA, 21 nt, synthetic construct
  source 1..21: mol_type = other RNA
gatccttactaccaccactaa

SEQ ID NO: 88012 - RNA, 21 nt, synthetic construct
  source 1..21: mol_type = other RNA
gatccttctgccttgacctcc

SEQ ID NO: 88013 - RNA, 21 nt, synthetic construct
  source 1..21: mol_type = other RNA
gatcgttagtattttcacata

SEQ ID NO: 88014 - RNA, 21 nt, synthetic construct
  source 1..21: mol_type = other RNA
gatctaaaatggaagacttta

SEQ ID NO: 88015 - RNA, 21 nt, synthetic construct
  source 1..21: mol_type = other RNA
gatctaaatggtgtgaagttg

SEQ ID NO: 88016 - RNA, 21 nt, synthetic construct
  source 1..21: mol_type = other RNA
gatctaaattttaagtgcaca

SEQ ID NO: 88017 - RNA, 21 nt, synthetic construct
  source 1..21: mol_type = other RNA
gatctaacaaacgcattgtga

SEQ ID NO: 88018 - RNA, 21 nt, synthetic construct
  source 1..21: mol_type = other RNA
gatctagtgaagtcaatttca

SEQ ID NO: 88019 - RNA, 21 nt, synthetic construct
  source 1..21: mol_type = other RNA
gatctatcaatctcacacctg

SEQ ID NO: 88020 - RNA, 21 nt, synthetic construct
  source 1..21: mol_type = other RNA
gatctatgaatttgcctattc

SEQ ID NO: 88021 - RNA, 21 nt, synthetic construct
  source 1..21: mol_type = other RNA
gatctatgcatactgcagcac

SEQ ID NO: 88022 - RNA, 21 nt, synthetic construct
  source 1..21: mol_type = other RNA
gatctcaaacagcctaattgt

SEQ ID NO: 88023 - RNA, 21 nt, synthetic construct
  source 1..21: mol_type = other RNA
gatctcacgtcaccgcaacct

SEQ ID NO: 88024 - RNA, 21 nt, synthetic construct
  source 1..21: mol_type = other RNA
gatctcattttgaaaaacaga

SEQ ID NO: 88025 - RNA, 21 nt, synthetic construct
  source 1..21: mol_type = other RNA
gatctctatgcagaaatctac

SEQ ID NO: 88026 - RNA, 21 nt, synthetic construct
  source 1..21: mol_type = other RNA
gatctctgacattggttattc

SEQ ID NO: 88027 - RNA, 21 nt, synthetic construct
  source 1..21: mol_type = other RNA
gatctctgctcaccgcaacat

SEQ ID NO: 88028 - RNA, 21 nt, synthetic construct
  source 1..21: mol_type = other RNA
gatctctgggctcactgcaac

SEQ ID NO: 88029 - RNA, 21 nt, synthetic construct
  source 1..21: mol_type = other RNA
gatctcttttcctttaacgta

SEQ ID NO: 88030 - RNA, 21 nt, synthetic construct
  source 1..21: mol_type = other RNA
gatctgaaattgacttcacta

SEQ ID NO: 88031 - RNA, 21 nt, synthetic construct
  source 1..21: mol_type = other RNA
gatctgagaagactaagcaga

SEQ ID NO: 88032 - RNA, 21 nt, synthetic construct
  source 1..21: mol_type = other RNA
gatctgagagatagaaagcac

SEQ ID NO: 88033 - RNA, 21 nt, synthetic construct
  source 1..21: mol_type = other RNA
gatctgagtttgctctgcaaa

SEQ ID NO: 88034 - RNA, 21 nt, synthetic construct
  source 1..21: mol_type = other RNA
gatctgccaggacaattgaat

SEQ ID NO: 88035 - RNA, 21 nt, synthetic construct
  source 1..21: mol_type = other RNA
gatctgctcaagttttctatt

SEQ ID NO: 88036 - RNA, 21 nt, synthetic construct
  source 1..21: mol_type = other RNA
gatctgctgtaagctggtaat

SEQ ID NO: 88037 - RNA, 21 nt, synthetic construct
  source 1..21: mol_type = other RNA
gatctgcttgcagacaataat

SEQ ID NO: 88038 - RNA, 21 nt, synthetic construct
  source 1..21: mol_type = other RNA
gatctgggataatgctatcat

SEQ ID NO: 88039 - RNA, 21 nt, synthetic construct
  source 1..21: mol_type = other RNA
gatctggtcacaaacacaaaa

SEQ ID NO: 88040 - RNA, 21 nt, synthetic construct
  source 1..21: mol_type = other RNA
gatctgtcatgtttgaatttt

SEQ ID NO: 88041 - RNA, 21 nt, synthetic construct
  source 1..21: mol_type = other RNA
gatctgtctttggcccatatc

SEQ ID NO: 88042 - RNA, 21 nt, synthetic construct
  source 1..21: mol_type = other RNA
gatctgtggactttaggctgt

SEQ ID NO: 88043 - RNA, 21 nt, synthetic construct
  source 1..21: mol_type = other RNA
gatctgttgcagtccccggtc

SEQ ID NO: 88044 - RNA, 21 nt, synthetic construct
  source 1..21: mol_type = other RNA
gatctgttggtgcttagctgc

SEQ ID NO: 88045 - RNA, 21 nt, synthetic construct
  source 1..21: mol_type = other RNA
gatctgtttttcaaaatgaga

SEQ ID NO: 88046 - RNA, 21 nt, synthetic construct
  source 1..21: mol_type = other RNA
gatcttactgtaagttcctgg

SEQ ID NO: 88047 - RNA, 21 nt, synthetic construct
  source 1..21: mol_type = other RNA
gatcttatctgctgtcggttt

SEQ ID NO: 88048 - RNA, 21 nt, synthetic construct
  source 1..21: mol_type = other RNA
gatcttatggaatagttgatt

SEQ ID NO: 88049 - RNA, 21 nt, synthetic construct
  source 1..21: mol_type = other RNA
gatcttattaatgtgttgtct

SEQ ID NO: 88050 - RNA, 21 nt, synthetic construct
  source 1..21: mol_type = other RNA
gatcttggccgaatgtggtgg

SEQ ID NO: 88051 - RNA, 21 nt, synthetic construct
  source 1..21: mol_type = other RNA
gatcttgggaatactttccca

SEQ ID NO: 88052 - RNA, 21 nt, synthetic construct
  source 1..21: mol_type = other RNA
gatcttgtgtatcttttgtta

SEQ ID NO: 88053 - RNA, 21 nt, synthetic construct
  source 1..21: mol_type = other RNA
gatctttacttcccttctcga

SEQ ID NO: 88054 - RNA, 21 nt, synthetic construct
  source 1..21: mol_type = other RNA
gatctttcaaggggccttttg

SEQ ID NO: 88055 - RNA, 21 nt, synthetic construct
  source 1..21: mol_type = other RNA
gatctttgaataaagggtcag

SEQ ID NO: 88056 - RNA, 21 nt, synthetic construct
  source 1..21: mol_type = other RNA
gatcttttctgacaatttcag

SEQ ID NO: 88057 - RNA, 21 nt, synthetic construct
  source 1..21: mol_type = other RNA
gatctttttgtgtatatggta

SEQ ID NO: 88058 - RNA, 21 nt, synthetic construct
  source 1..21: mol_type = other RNA
gatgaaaaagtactggaaatg

SEQ ID NO: 88059 - RNA, 21 nt, synthetic construct
  source 1..21: mol_type = other RNA
gatgaaaagagcacaccaaga

SEQ ID NO: 88060 - RNA, 21 nt, synthetic construct
  source 1..21: mol_type = other RNA
gatgaaactaaatgtgagcat

SEQ ID NO: 88061 - RNA, 21 nt, synthetic construct
  source 1..21: mol_type = other RNA
gatgaaattgaccattccacg

SEQ ID NO: 88062 - RNA, 21 nt, synthetic construct
  source 1..21: mol_type = other RNA
gatgaacaaaggcaggagcag

SEQ ID NO: 88063 - RNA, 21 nt, synthetic construct
  source 1..21: mol_type = other RNA
gatgaacgctaaattaaaggc

SEQ ID NO: 88064 - RNA, 21 nt, synthetic construct
  source 1..21: mol_type = other RNA
gatgaactacacagacatgaa

SEQ ID NO: 88065 - RNA, 21 nt, synthetic construct
  source 1..21: mol_type = other RNA
gatgaagaacctgttcatttg

SEQ ID NO: 88066 - RNA, 21 nt, synthetic construct
  source 1..21: mol_type = other RNA
gatgaagattagaaaattagc

SEQ ID NO: 88067 - RNA, 21 nt, synthetic construct
  source 1..21: mol_type = other RNA
gatgaagcagggaaatggagg

SEQ ID NO: 88068 - RNA, 21 nt, synthetic construct
  source 1..21: mol_type = other RNA
gatgaagggttttctgtagaa

SEQ ID NO: 88069 - RNA, 21 nt, synthetic construct
  source 1..21: mol_type = other RNA
gatgaagtatagaaaggagac

SEQ ID NO: 88070 - RNA, 21 nt, synthetic construct
  source 1..21: mol_type = other RNA
gatgaatacaaaggtgttaag

SEQ ID NO: 88071 - RNA, 21 nt, synthetic construct
  source 1..21: mol_type = other RNA
gatgaatctgcaactatcaaa

SEQ ID NO: 88072 - RNA, 21 nt, synthetic construct
  source 1..21: mol_type = other RNA
gatgaatgaacaaaatgtggt

SEQ ID NO: 88073 - RNA, 21 nt, synthetic construct
  source 1..21: mol_type = other RNA
gatgaatgagcaaggtcgttt

SEQ ID NO: 88074 - RNA, 21 nt, synthetic construct
  source 1..21: mol_type = other RNA
gatgaatgcagtggcttccta

SEQ ID NO: 88075 - RNA, 21 nt, synthetic construct
  source 1..21: mol_type = other RNA
gatgaatggataaggaaaata

SEQ ID NO: 88076 - RNA, 21 nt, synthetic construct
  source 1..21: mol_type = other RNA
gatgaattacaaatgaaagtc

SEQ ID NO: 88077 - RNA, 21 nt, synthetic construct
  source 1..21: mol_type = other RNA
gatgaattccagtttatctat

SEQ ID NO: 88078 - RNA, 21 nt, synthetic construct
  source 1..21: mol_type = other RNA
gatgacagttactctaaaaga

SEQ ID NO: 88079 - RNA, 21 nt, synthetic construct
  source 1..21: mol_type = other RNA
gatgacatttgcttttcctgg

SEQ ID NO: 88080 - RNA, 21 nt, synthetic construct
  source 1..21: mol_type = other RNA
gatgaccttgacaataaatgg

SEQ ID NO: 88081 - RNA, 21 nt, synthetic construct
  source 1..21: mol_type = other RNA
gatgacgaaagtgaagcccag

SEQ ID NO: 88082 - RNA, 21 nt, synthetic construct
  source 1..21: mol_type = other RNA
gatgactaggctcctgagaac

SEQ ID NO: 88083 - RNA, 21 nt, synthetic construct
  source 1..21: mol_type = other RNA
gatgactatgaaaagcctcaa

SEQ ID NO: 88084 - RNA, 21 nt, synthetic construct
  source 1..21: mol_type = other RNA
gatgactgtaagctgaactct

SEQ ID NO: 88085 - RNA, 21 nt, synthetic construct
  source 1..21: mol_type = other RNA
gatgactgtcctgaattctaa

SEQ ID NO: 88086 - RNA, 21 nt, synthetic construct
  source 1..21: mol_type = other RNA
gatgacttacagatatcaccc

SEQ ID NO: 88087 - RNA, 21 nt, synthetic construct
  source 1..21: mol_type = other RNA
gatgacttcactggagaattc

SEQ ID NO: 88088 - RNA, 21 nt, synthetic construct
  source 1..21: mol_type = other RNA
gatgagaaatacttggacagg

SEQ ID NO: 88089 - RNA, 21 nt, synthetic construct
  source 1..21: mol_type = other RNA
gatgagactcttaatattgaa

SEQ ID NO: 88090 - RNA, 21 nt, synthetic construct
  source 1..21: mol_type = other RNA
gatgagagtggcctaaatcag

SEQ ID NO: 88091 - RNA, 21 nt, synthetic construct
  source 1..21: mol_type = other RNA
gatgagattaatgtaggtgtc

SEQ ID NO: 88092 - RNA, 21 nt, synthetic construct
  source 1..21: mol_type = other RNA
gatgagcccaggagttgcatc

SEQ ID NO: 88093 - RNA, 21 nt, synthetic construct
  source 1..21: mol_type = other RNA
gatgagctactgcatgctagg

SEQ ID NO: 88094 - RNA, 21 nt, synthetic construct
  source 1..21: mol_type = other RNA
gatgaggaagaggaaggttca

SEQ ID NO: 88095 - RNA, 21 nt, synthetic construct
  source 1..21: mol_type = other RNA
gatgaggggctgagccttcag

SEQ ID NO: 88096 - RNA, 21 nt, synthetic construct
  source 1..21: mol_type = other RNA
gatgaggtctcagccttttct

SEQ ID NO: 88097 - RNA, 21 nt, synthetic construct
  source 1..21: mol_type = other RNA
gatgaggttttacgatgttgg

SEQ ID NO: 88098 - RNA, 21 nt, synthetic construct
  source 1..21: mol_type = other RNA
gatgataccttcttgagagtc

SEQ ID NO: 88099 - RNA, 21 nt, synthetic construct
  source 1..21: mol_type = other RNA
gatgatagaataccacttagt

SEQ ID NO: 88100 - RNA, 21 nt, synthetic construct
  source 1..21: mol_type = other RNA
gatgatcaaaaccaggaggtt

SEQ ID NO: 88101 - RNA, 21 nt, synthetic construct
  source 1..21: mol_type = other RNA
gatgatcctcccgccttggcc

SEQ ID NO: 88102 - RNA, 21 nt, synthetic construct
  source 1..21: mol_type = other RNA
gatgatctaaatggtgtgaag

SEQ ID NO: 88103 - RNA, 21 nt, synthetic construct
  source 1..21: mol_type = other RNA
gatgatgaacaaaggcaggag

SEQ ID NO: 88104 - RNA, 21 nt, synthetic construct
  source 1..21: mol_type = other RNA
gatgatgatggtgatgctaac

SEQ ID NO: 88105 - RNA, 21 nt, synthetic construct
  source 1..21: mol_type = other RNA
gatgatggtgatgctaacgtg

SEQ ID NO: 88106 - RNA, 21 nt, synthetic construct
  source 1..21: mol_type = other RNA
gatgatgttttgaacgaatga

SEQ ID NO: 88107 - RNA, 21 nt, synthetic construct
  source 1..21: mol_type = other RNA
gatgattcgcattgctaattc

SEQ ID NO: 88108 - RNA, 21 nt, synthetic construct
  source 1..21: mol_type = other RNA
gatgattctaatgtgcaagga

SEQ ID NO: 88109 - RNA, 21 nt, synthetic construct
  source 1..21: mol_type = other RNA
gatgattttagaaggtaagaa

SEQ ID NO: 88110 - RNA, 21 nt, synthetic construct
  source 1..21: mol_type = other RNA
gatgatttttgccagtgtttt

SEQ ID NO: 88111 - RNA, 21 nt, synthetic construct
  source 1..21: mol_type = other RNA
gatgcaacaaatgttgcagag

SEQ ID NO: 88112 - RNA, 21 nt, synthetic construct
  source 1..21: mol_type = other RNA
gatgcaactcctgggctcatc

SEQ ID NO: 88113 - RNA, 21 nt, synthetic construct
  source 1..21: mol_type = other RNA
gatgcaagaatggtttaacac

SEQ ID NO: 88114 - RNA, 21 nt, synthetic construct
  source 1..21: mol_type = other RNA
gatgcaatttgttttccaagc

SEQ ID NO: 88115 - RNA, 21 nt, synthetic construct
  source 1..21: mol_type = other RNA
gatgcacaaaagtttaacttt

SEQ ID NO: 88116 - RNA, 21 nt, synthetic construct
  source 1..21: mol_type = other RNA
gatgcacaagacagatgtgct

SEQ ID NO: 88117 - RNA, 21 nt, synthetic construct
  source 1..21: mol_type = other RNA
gatgcacaagccttgaaaata

SEQ ID NO: 88118 - RNA, 21 nt, synthetic construct
  source 1..21: mol_type = other RNA
gatgcagaaaaagcatttttt

SEQ ID NO: 88119 - RNA, 21 nt, synthetic construct
  source 1..21: mol_type = other RNA
gatgcagatttctttttactc

SEQ ID NO: 88120 - RNA, 21 nt, synthetic construct
  source 1..21: mol_type = other RNA
gatgcagcaaaagcaccactg

SEQ ID NO: 88121 - RNA, 21 nt, synthetic construct
  source 1..21: mol_type = other RNA
gatgcagcccctgccacactc

SEQ ID NO: 88122 - RNA, 21 nt, synthetic construct
  source 1..21: mol_type = other RNA
gatgcagttgcttactctaat

SEQ ID NO: 88123 - RNA, 21 nt, synthetic construct
  source 1..21: mol_type = other RNA
gatgcataagttctagagatt

SEQ ID NO: 88124 - RNA, 21 nt, synthetic construct
  source 1..21: mol_type = other RNA
gatgcataccaagcccggcac

SEQ ID NO: 88125 - RNA, 21 nt, synthetic construct
  source 1..21: mol_type = other RNA
gatgcatgaggcatattattg

SEQ ID NO: 88126 - RNA, 21 nt, synthetic construct
  source 1..21: mol_type = other RNA
gatgcattccagattgaaatc

SEQ ID NO: 88127 - RNA, 21 nt, synthetic construct
  source 1..21: mol_type = other RNA
gatgcattctagaaaggaggg

SEQ ID NO: 88128 - RNA, 21 nt, synthetic construct
  source 1..21: mol_type = other RNA
gatgcattctgtcacatagac

SEQ ID NO: 88129 - RNA, 21 nt, synthetic construct
  source 1..21: mol_type = other RNA
gatgccacaaatggagtgact

SEQ ID NO: 88130 - RNA, 21 nt, synthetic construct
  source 1..21: mol_type = other RNA
gatgccactcaaaactgaagt

SEQ ID NO: 88131 - RNA, 21 nt, synthetic construct
  source 1..21: mol_type = other RNA
gatgccatcacattttgaatc

SEQ ID NO: 88132 - RNA, 21 nt, synthetic construct
  source 1..21: mol_type = other RNA
gatgccatgtgttttgttttg

SEQ ID NO: 88133 - RNA, 21 nt, synthetic construct
  source 1..21: mol_type = other RNA
gatgccatttataatagcata

SEQ ID NO: 88134 - RNA, 21 nt, synthetic construct
  source 1..21: mol_type = other RNA
gatgccggtaatcacagctac

SEQ ID NO: 88135 - RNA, 21 nt, synthetic construct
  source 1..21: mol_type = other RNA
gatgcctagaaaggaattgta

SEQ ID NO: 88136 - RNA, 21 nt, synthetic construct
  source 1..21: mol_type = other RNA
gatgcctatgaaatcttgaag

SEQ ID NO: 88137 - RNA, 21 nt, synthetic construct
  source 1..21: mol_type = other RNA
gatgcctcgaaggcctgcttc

SEQ ID NO: 88138 - RNA, 21 nt, synthetic construct
  source 1..21: mol_type = other RNA
gatgcctgtgcttgtctctct

SEQ ID NO: 88139 - RNA, 21 nt, synthetic construct
  source 1..21: mol_type = other RNA
gatgcctgtgcttttctcgtg

SEQ ID NO: 88140 - RNA, 21 nt, synthetic construct
  source 1..21: mol_type = other RNA
gatgcgtggttcacacctgta

SEQ ID NO: 88141 - RNA, 21 nt, synthetic construct
  source 1..21: mol_type = other RNA
gatgctaaacagtacagtagt

SEQ ID NO: 88142 - RNA, 21 nt, synthetic construct
  source 1..21: mol_type = other RNA
gatgctaacgtgcttgctctg

SEQ ID NO: 88143 - RNA, 21 nt, synthetic construct
  source 1..21: mol_type = other RNA
gatgctattcaagacaagcaa

SEQ ID NO: 88144 - RNA, 21 nt, synthetic construct
  source 1..21: mol_type = other RNA
gatgctcagggtgcgacctcg

SEQ ID NO: 88145 - RNA, 21 nt, synthetic construct
  source 1..21: mol_type = other RNA
gatgctcagtttcaaaagctc

SEQ ID NO: 88146 - RNA, 21 nt, synthetic construct
  source 1..21: mol_type = other RNA
gatgctccctctatggcaggc

SEQ ID NO: 88147 - RNA, 21 nt, synthetic construct
  source 1..21: mol_type = other RNA
gatgctgaacttgtcacaaaa

SEQ ID NO: 88148 - RNA, 21 nt, synthetic construct
  source 1..21: mol_type = other RNA
gatgctgcgagccccggggga

SEQ ID NO: 88149 - RNA, 21 nt, synthetic construct
  source 1..21: mol_type = other RNA
gatgctggagtgtggcagggg

SEQ ID NO: 88150 - RNA, 21 nt, synthetic construct
  source 1..21: mol_type = other RNA
gatgctggggacccctccctg

SEQ ID NO: 88151 - RNA, 21 nt, synthetic construct
  source 1..21: mol_type = other RNA
gatgctggtggagtattctag

SEQ ID NO: 88152 - RNA, 21 nt, synthetic construct
  source 1..21: mol_type = other RNA
gatgctgtctataggcaatga

SEQ ID NO: 88153 - RNA, 21 nt, synthetic construct
  source 1..21: mol_type = other RNA
gatgcttaaagcgctactcag

SEQ ID NO: 88154 - RNA, 21 nt, synthetic construct
  source 1..21: mol_type = other RNA
gatgcttaggtaagaaaaatt

SEQ ID NO: 88155 - RNA, 21 nt, synthetic construct
  source 1..21: mol_type = other RNA
gatgcttctagccaaagcaag

SEQ ID NO: 88156 - RNA, 21 nt, synthetic construct
  source 1..21: mol_type = other RNA
gatgctttctctagttgcacg

SEQ ID NO: 88157 - RNA, 21 nt, synthetic construct
  source 1..21: mol_type = other RNA
gatggaaagtggactatgtag

SEQ ID NO: 88158 - RNA, 21 nt, synthetic construct
  source 1..21: mol_type = other RNA
gatggaacggcttaacacctt

SEQ ID NO: 88159 - RNA, 21 nt, synthetic construct
  source 1..21: mol_type = other RNA
gatggaactctattttcctaa

SEQ ID NO: 88160 - RNA, 21 nt, synthetic construct
  source 1..21: mol_type = other RNA
gatggaattctgacacccgaa

SEQ ID NO: 88161 - RNA, 21 nt, synthetic construct
  source 1..21: mol_type = other RNA
gatggacaaattaccatgttt

SEQ ID NO: 88162 - RNA, 21 nt, synthetic construct
  source 1..21: mol_type = other RNA
gatggacactgcagatgaatg

SEQ ID NO: 88163 - RNA, 21 nt, synthetic construct
  source 1..21: mol_type = other RNA
gatggacattctgcttccttg

SEQ ID NO: 88164 - RNA, 21 nt, synthetic construct
  source 1..21: mol_type = other RNA
gatggacatttaggttgtttc

SEQ ID NO: 88165 - RNA, 21 nt, synthetic construct
  source 1..21: mol_type = other RNA
gatggaggtggaactctgtca

SEQ ID NO: 88166 - RNA, 21 nt, synthetic construct
  source 1..21: mol_type = other RNA
gatggagttacgctgccaaaa

SEQ ID NO: 88167 - RNA, 21 nt, synthetic construct
  source 1..21: mol_type = other RNA
gatggatttttctgtttctgt

SEQ ID NO: 88168 - RNA, 21 nt, synthetic construct
  source 1..21: mol_type = other RNA
gatggcaaacagactgagcca

SEQ ID NO: 88169 - RNA, 21 nt, synthetic construct
  source 1..21: mol_type = other RNA
gatggcaacaatcaacaggta

SEQ ID NO: 88170 - RNA, 21 nt, synthetic construct
  source 1..21: mol_type = other RNA
gatggcaagtttccattctct

SEQ ID NO: 88171 - RNA, 21 nt, synthetic construct
  source 1..21: mol_type = other RNA
gatggcacataccatggaata

SEQ ID NO: 88172 - RNA, 21 nt, synthetic construct
  source 1..21: mol_type = other RNA
gatggcatcattcataaacac

SEQ ID NO: 88173 - RNA, 21 nt, synthetic construct
  source 1..21: mol_type = other RNA
gatggcatgaaatgggtttaa

SEQ ID NO: 88174 - RNA, 21 nt, synthetic construct
  source 1..21: mol_type = other RNA
gatggccagtcatgtggggac

SEQ ID NO: 88175 - RNA, 21 nt, synthetic construct
  source 1..21: mol_type = other RNA
gatggccccaaaattacccca

SEQ ID NO: 88176 - RNA, 21 nt, synthetic construct
  source 1..21: mol_type = other RNA
gatggcctccctcactaagtc

SEQ ID NO: 88177 - RNA, 21 nt, synthetic construct
  source 1..21: mol_type = other RNA
gatggcgcatgcctgtggtcc

SEQ ID NO: 88178 - RNA, 21 nt, synthetic construct
  source 1..21: mol_type = other RNA
gatggctcaacgcctgtgatc

SEQ ID NO: 88179 - RNA, 21 nt, synthetic construct
  source 1..21: mol_type = other RNA
gatggctgaaagagaaagaag

SEQ ID NO: 88180 - RNA, 21 nt, synthetic construct
  source 1..21: mol_type = other RNA
gatggctgtactaagcctatg

SEQ ID NO: 88181 - RNA, 21 nt, synthetic construct
  source 1..21: mol_type = other RNA
gatggcttaggatcaccaaag

SEQ ID NO: 88182 - RNA, 21 nt, synthetic construct
  source 1..21: mol_type = other RNA
gatggcttgagcccagggggt

SEQ ID NO: 88183 - RNA, 21 nt, synthetic construct
  source 1..21: mol_type = other RNA
gatgggaaagtattcccaaga

SEQ ID NO: 88184 - RNA, 21 nt, synthetic construct
  source 1..21: mol_type = other RNA
gatgggaagaaaaaataaagg

SEQ ID NO: 88185 - RNA, 21 nt, synthetic construct
  source 1..21: mol_type = other RNA
gatgggacttcactagtgggt

SEQ ID NO: 88186 - RNA, 21 nt, synthetic construct
  source 1..21: mol_type = other RNA
gatgggagatggacactgcag

SEQ ID NO: 88187 - RNA, 21 nt, synthetic construct
  source 1..21: mol_type = other RNA
gatgggcagactccttcccct

SEQ ID NO: 88188 - RNA, 21 nt, synthetic construct
  source 1..21: mol_type = other RNA
gatgggcattccagagggtaa

SEQ ID NO: 88189 - RNA, 21 nt, synthetic construct
  source 1..21: mol_type = other RNA
gatggggacttgctctcttgc

SEQ ID NO: 88190 - RNA, 21 nt, synthetic construct
  source 1..21: mol_type = other RNA
gatggggattgagggttagat

SEQ ID NO: 88191 - RNA, 21 nt, synthetic construct
  source 1..21: mol_type = other RNA
gatgggggacgacgtatgcaa

SEQ ID NO: 88192 - RNA, 21 nt, synthetic construct
  source 1..21: mol_type = other RNA
gatgggggtaagattgtggtc

SEQ ID NO: 88193 - RNA, 21 nt, synthetic construct
  source 1..21: mol_type = other RNA
gatggggtctcattgtgttgc

SEQ ID NO: 88194 - RNA, 21 nt, synthetic construct
  source 1..21: mol_type = other RNA
gatggggtttgtccatgttgg

SEQ ID NO: 88195 - RNA, 21 nt, synthetic construct
  source 1..21: mol_type = other RNA
gatgggtgtagggtttggcag

SEQ ID NO: 88196 - RNA, 21 nt, synthetic construct
  source 1..21: mol_type = other RNA
gatggtaaaacaaattccctc

SEQ ID NO: 88197 - RNA, 21 nt, synthetic construct
  source 1..21: mol_type = other RNA
gatggtaaattggtcctggaa

SEQ ID NO: 88198 - RNA, 21 nt, synthetic construct
  source 1..21: mol_type = other RNA
gatggtagtcaacacttttcc

SEQ ID NO: 88199 - RNA, 21 nt, synthetic construct
  source 1..21: mol_type = other RNA
gatggtcagtactatcttccc

SEQ ID NO: 88200 - RNA, 21 nt, synthetic construct
  source 1..21: mol_type = other RNA
gatggtccttttttactgact

SEQ ID NO: 88201 - RNA, 21 nt, synthetic construct
  source 1..21: mol_type = other RNA
gatggtctcaatctcctgatc

SEQ ID NO: 88202 - RNA, 21 nt, synthetic construct
  source 1..21: mol_type = other RNA
gatggtgatacctcttactaa

SEQ ID NO: 88203 - RNA, 21 nt, synthetic construct
  source 1..21: mol_type = other RNA
gatggtgatgctaacgtgctt

SEQ ID NO: 88204 - RNA, 21 nt, synthetic construct
  source 1..21: mol_type = other RNA
gatggtgctgatttaaaattt

SEQ ID NO: 88205 - RNA, 21 nt, synthetic construct
  source 1..21: mol_type = other RNA
gatggtgggagaggcatgccg

SEQ ID NO: 88206 - RNA, 21 nt, synthetic construct
  source 1..21: mol_type = other RNA
gatggttgcacaatgttgtgg

SEQ ID NO: 88207 - RNA, 21 nt, synthetic construct
  source 1..21: mol_type = other RNA
gatggttggaagtttctggaa

SEQ ID NO: 88208 - RNA, 21 nt, synthetic construct
  source 1..21: mol_type = other RNA
gatggtttctgacacccgacc

SEQ ID NO: 88209 - RNA, 21 nt, synthetic construct
  source 1..21: mol_type = other RNA
gatggtttgattgttccaggg

SEQ ID NO: 88210 - RNA, 21 nt, synthetic construct
  source 1..21: mol_type = other RNA
gatggtttggggcttttgaac

SEQ ID NO: 88211 - RNA, 21 nt, synthetic construct
  source 1..21: mol_type = other RNA
gatgtaagtgggaggaggtca

SEQ ID NO: 88212 - RNA, 21 nt, synthetic construct
  source 1..21: mol_type = other RNA
gatgtaatggatcaaggcaca

SEQ ID NO: 88213 - RNA, 21 nt, synthetic construct
  source 1..21: mol_type = other RNA
gatgtactggaagtgtaacat

SEQ ID NO: 88214 - RNA, 21 nt, synthetic construct
  source 1..21: mol_type = other RNA
gatgtagaaggatatgttttc

SEQ ID NO: 88215 - RNA, 21 nt, synthetic construct
  source 1..21: mol_type = other RNA
gatgtagagaaacaggattac

SEQ ID NO: 88216 - RNA, 21 nt, synthetic construct
  source 1..21: mol_type = other RNA
gatgtagaggcagttgagttt

SEQ ID NO: 88217 - RNA, 21 nt, synthetic construct
  source 1..21: mol_type = other RNA
gatgtcaacaaaatactagca

SEQ ID NO: 88218 - RNA, 21 nt, synthetic construct
  source 1..21: mol_type = other RNA
gatgtcaacattaagggaaac

SEQ ID NO: 88219 - RNA, 21 nt, synthetic construct
  source 1..21: mol_type = other RNA
gatgtcaactgaggcagagta

SEQ ID NO: 88220 - RNA, 21 nt, synthetic construct
  source 1..21: mol_type = other RNA
gatgtcacaagccagggtctg

SEQ ID NO: 88221 - RNA, 21 nt, synthetic construct
  source 1..21: mol_type = other RNA
gatgtccttaatgccaccgaa

SEQ ID NO: 88222 - RNA, 21 nt, synthetic construct
  source 1..21: mol_type = other RNA
gatgtctcagatgtctccatt

SEQ ID NO: 88223 - RNA, 21 nt, synthetic construct
  source 1..21: mol_type = other RNA
gatgtctccattttgccagct

SEQ ID NO: 88224 - RNA, 21 nt, synthetic construct
  source 1..21: mol_type = other RNA
gatgtctttgggaaggccctg

SEQ ID NO: 88225 - RNA, 21 nt, synthetic construct
  source 1..21: mol_type = other RNA
gatgtcttttaacttgctttg

SEQ ID NO: 88226 - RNA, 21 nt, synthetic construct
  source 1..21: mol_type = other RNA
gatgtcttttgaagaagttct

SEQ ID NO: 88227 - RNA, 21 nt, synthetic construct
  source 1..21: mol_type = other RNA
gatgtgagcccccacgcccgg

SEQ ID NO: 88228 - RNA, 21 nt, synthetic construct
  source 1..21: mol_type = other RNA
gatgtgaggatctgttggtgc

SEQ ID NO: 88229 - RNA, 21 nt, synthetic construct
  source 1..21: mol_type = other RNA
gatgtgcttaatcttcacact

SEQ ID NO: 88230 - RNA, 21 nt, synthetic construct
  source 1..21: mol_type = other RNA
gatgtggtgtggcatgtctgt

SEQ ID NO: 88231 - RNA, 21 nt, synthetic construct
  source 1..21: mol_type = other RNA
gatgtgtaattgtaccttgga

SEQ ID NO: 88232 - RNA, 21 nt, synthetic construct
  source 1..21: mol_type = other RNA
gatgtgtaccaaaagtcctgt

SEQ ID NO: 88233 - RNA, 21 nt, synthetic construct
  source 1..21: mol_type = other RNA
gatgtgtacccgtgtgttttg

SEQ ID NO: 88234 - RNA, 21 nt, synthetic construct
  source 1..21: mol_type = other RNA
gatgtgtagttattattgtca

SEQ ID NO: 88235 - RNA, 21 nt, synthetic construct
  source 1..21: mol_type = other RNA
gatgtgtatgatcaaagtgaa

SEQ ID NO: 88236 - RNA, 21 nt, synthetic construct
  source 1..21: mol_type = other RNA
gatgtgtatgttacacttcca

SEQ ID NO: 88237 - RNA, 21 nt, synthetic construct
  source 1..21: mol_type = other RNA
gatgtgtgcacaacacatgca

SEQ ID NO: 88238 - RNA, 21 nt, synthetic construct
  source 1..21: mol_type = other RNA
gatgtgtgtctctgctctcaa

SEQ ID NO: 88239 - RNA, 21 nt, synthetic construct
  source 1..21: mol_type = other RNA
gatgtgttgaccttagtggtt

SEQ ID NO: 88240 - RNA, 21 nt, synthetic construct
  source 1..21: mol_type = other RNA
gatgttatgccccctcttctc

SEQ ID NO: 88241 - RNA, 21 nt, synthetic construct
  source 1..21: mol_type = other RNA
gatgttcaaccctcggcctct

SEQ ID NO: 88242 - RNA, 21 nt, synthetic construct
  source 1..21: mol_type = other RNA
gatgttgagtatcttttcatg

SEQ ID NO: 88243 - RNA, 21 nt, synthetic construct
  source 1..21: mol_type = other RNA
gatgttgcctactagccagtg

SEQ ID NO: 88244 - RNA, 21 nt, synthetic construct
  source 1..21: mol_type = other RNA
gatgttgcggtgagcagagat

SEQ ID NO: 88245 - RNA, 21 nt, synthetic construct
  source 1..21: mol_type = other RNA
gatgttggtgagaacccagtg

SEQ ID NO: 88246 - RNA, 21 nt, synthetic construct
  source 1..21: mol_type = other RNA
gatgtttctacctttggctac

SEQ ID NO: 88247 - RNA, 21 nt, synthetic construct
  source 1..21: mol_type = other RNA
gatgtttggctccttaccact

SEQ ID NO: 88248 - RNA, 21 nt, synthetic construct
  source 1..21: mol_type = other RNA
gatgttttacacatgtcagcc

SEQ ID NO: 88249 - RNA, 21 nt, synthetic construct
  source 1..21: mol_type = other RNA
gatgttttacattttccattg

SEQ ID NO: 88250 - RNA, 21 nt, synthetic construct
  source 1..21: mol_type = other RNA
gatgttttcagttgcatgaat

SEQ ID NO: 88251 - RNA, 21 nt, synthetic construct
  source 1..21: mol_type = other RNA
gatgttttgaacgaatgaaaa

SEQ ID NO: 88252 - RNA, 21 nt, synthetic construct
  source 1..21: mol_type = other RNA
gatgtttttagagagatgcct

SEQ ID NO: 88253 - RNA, 21 nt, synthetic construct
  source 1..21: mol_type = other RNA
gattaaaataacacgcagaac

SEQ ID NO: 88254 - RNA, 21 nt, synthetic construct
  source 1..21: mol_type = other RNA
gattaaaggccctgatttaaa

SEQ ID NO: 88255 - RNA, 21 nt, synthetic construct
  source 1..21: mol_type = other RNA
gattaaataacttccatgaga

SEQ ID NO: 88256 - RNA, 21 nt, synthetic construct
  source 1..21: mol_type = other RNA
gattaaatacagagcacagac

SEQ ID NO: 88257 - RNA, 21 nt, synthetic construct
  source 1..21: mol_type = other RNA
gattaaataccacctgaaatc

SEQ ID NO: 88258 - RNA, 21 nt, synthetic construct
  source 1..21: mol_type = other RNA
gattaagcacatctgtcttgt

SEQ ID NO: 88259 - RNA, 21 nt, synthetic construct
  source 1..21: mol_type = other RNA
gattaagcatagtttgagtat

SEQ ID NO: 88260 - RNA, 21 nt, synthetic construct
  source 1..21: mol_type = other RNA
gattaaggagatggcacatac

SEQ ID NO: 88261 - RNA, 21 nt, synthetic construct
  source 1..21: mol_type = other RNA
gattaaggctggaggatggct

SEQ ID NO: 88262 - RNA, 21 nt, synthetic construct
  source 1..21: mol_type = other RNA
gattaatccttgtggtcttaa

SEQ ID NO: 88263 - RNA, 21 nt, synthetic construct
  source 1..21: mol_type = other RNA
gattaatctttctgaactcaa

SEQ ID NO: 88264 - RNA, 21 nt, synthetic construct
  source 1..21: mol_type = other RNA
gattaatgtaggtgtctgatg

SEQ ID NO: 88265 - RNA, 21 nt, synthetic construct
  source 1..21: mol_type = other RNA
gattaattcagtcaacaccaa

SEQ ID NO: 88266 - RNA, 21 nt, synthetic construct
  source 1..21: mol_type = other RNA
gattaatttgaggtctaggct

SEQ ID NO: 88267 - RNA, 21 nt, synthetic construct
  source 1..21: mol_type = other RNA
gattacaaaagaacaggactt

SEQ ID NO: 88268 - RNA, 21 nt, synthetic construct
  source 1..21: mol_type = other RNA
gattacaagggtgacagagcc

SEQ ID NO: 88269 - RNA, 21 nt, synthetic construct
  source 1..21: mol_type = other RNA
gattacaatgtaaggtgcacg

SEQ ID NO: 88270 - RNA, 21 nt, synthetic construct
  source 1..21: mol_type = other RNA
gattacaattcctttctaggc

SEQ ID NO: 88271 - RNA, 21 nt, synthetic construct
  source 1..21: mol_type = other RNA
gattacacacacctaccacca

SEQ ID NO: 88272 - RNA, 21 nt, synthetic construct
  source 1..21: mol_type = other RNA
gattacaggcatgagccactg

SEQ ID NO: 88273 - RNA, 21 nt, synthetic construct
  source 1..21: mol_type = other RNA
gattacaggcgcacgccatct

SEQ ID NO: 88274 - RNA, 21 nt, synthetic construct
  source 1..21: mol_type = other RNA
gattacatagcaaggaagcag

SEQ ID NO: 88275 - RNA, 21 nt, synthetic construct
  source 1..21: mol_type = other RNA
gattaccggcatccgccacca

SEQ ID NO: 88276 - RNA, 21 nt, synthetic construct
  source 1..21: mol_type = other RNA
gattactgactcaatcttctt

SEQ ID NO: 88277 - RNA, 21 nt, synthetic construct
  source 1..21: mol_type = other RNA
gattactggatacaaggtcaa

SEQ ID NO: 88278 - RNA, 21 nt, synthetic construct
  source 1..21: mol_type = other RNA
gattactttacagttatgtca

SEQ ID NO: 88279 - RNA, 21 nt, synthetic construct
  source 1..21: mol_type = other RNA
gattagaaaattagctgactt

SEQ ID NO: 88280 - RNA, 21 nt, synthetic construct
  source 1..21: mol_type = other RNA
gattagaaagtagattagctt

SEQ ID NO: 88281 - RNA, 21 nt, synthetic construct
  source 1..21: mol_type = other RNA
gattagaaggattgttcatgt

SEQ ID NO: 88282 - RNA, 21 nt, synthetic construct
  source 1..21: mol_type = other RNA
gattagaggctgcaccctcct

SEQ ID NO: 88283 - RNA, 21 nt, synthetic construct
  source 1..21: mol_type = other RNA
gattagcgaaagggattctgg

SEQ ID NO: 88284 - RNA, 21 nt, synthetic construct
  source 1..21: mol_type = other RNA
gattagcttcctcaggatcta

SEQ ID NO: 88285 - RNA, 21 nt, synthetic construct
  source 1..21: mol_type = other RNA
gattagcttttacgaggacag

SEQ ID NO: 88286 - RNA, 21 nt, synthetic construct
  source 1..21: mol_type = other RNA
gattaggaaacagattgattt

SEQ ID NO: 88287 - RNA, 21 nt, synthetic construct
  source 1..21: mol_type = other RNA
gattaggcagaaccacctggg

SEQ ID NO: 88288 - RNA, 21 nt, synthetic construct
  source 1..21: mol_type = other RNA
gattagtgttaattcttcctt

SEQ ID NO: 88289 - RNA, 21 nt, synthetic construct
  source 1..21: mol_type = other RNA
gattagttgactcctaaaaca

SEQ ID NO: 88290 - RNA, 21 nt, synthetic construct
  source 1..21: mol_type = other RNA
gattataaccttgaacttcca

SEQ ID NO: 88291 - RNA, 21 nt, synthetic construct
  source 1..21: mol_type = other RNA
gattatagtggtaaggagcca

SEQ ID NO: 88292 - RNA, 21 nt, synthetic construct
  source 1..21: mol_type = other RNA
gattatatggtctaccatgtt

SEQ ID NO: 88293 - RNA, 21 nt, synthetic construct
  source 1..21: mol_type = other RNA
gattatcagggatattggctt

SEQ ID NO: 88294 - RNA, 21 nt, synthetic construct
  source 1..21: mol_type = other RNA
gattatggctagaaacttgga

SEQ ID NO: 88295 - RNA, 21 nt, synthetic construct
  source 1..21: mol_type = other RNA
gattatgttagatatcccata

SEQ ID NO: 88296 - RNA, 21 nt, synthetic construct
  source 1..21: mol_type = other RNA
gattatgttccacatgttact

SEQ ID NO: 88297 - RNA, 21 nt, synthetic construct
  source 1..21: mol_type = other RNA
gattatttgcggcttgattag

SEQ ID NO: 88298 - RNA, 21 nt, synthetic construct
  source 1..21: mol_type = other RNA
gattatttggaagagagaagg

SEQ ID NO: 88299 - RNA, 21 nt, synthetic construct
  source 1..21: mol_type = other RNA
gattatttttacccaacatga

SEQ ID NO: 88300 - RNA, 21 nt, synthetic construct
  source 1..21: mol_type = other RNA
gattcaaaatgtgatggcatc

SEQ ID NO: 88301 - RNA, 21 nt, synthetic construct
  source 1..21: mol_type = other RNA
gattcaacaaaactgggggct

SEQ ID NO: 88302 - RNA, 21 nt, synthetic construct
  source 1..21: mol_type = other RNA
gattcaagaaaccacagagcc

SEQ ID NO: 88303 - RNA, 21 nt, synthetic construct
  source 1..21: mol_type = other RNA
gattcaccaattgttaacatt

SEQ ID NO: 88304 - RNA, 21 nt, synthetic construct
  source 1..21: mol_type = other RNA
gattcacgcacagggagatac

SEQ ID NO: 88305 - RNA, 21 nt, synthetic construct
  source 1..21: mol_type = other RNA
gattcacttttgagttcagaa

SEQ ID NO: 88306 - RNA, 21 nt, synthetic construct
  source 1..21: mol_type = other RNA
gattcagagtgctgggtagag

SEQ ID NO: 88307 - RNA, 21 nt, synthetic construct
  source 1..21: mol_type = other RNA
gattcagatgacagaaataat

SEQ ID NO: 88308 - RNA, 21 nt, synthetic construct
  source 1..21: mol_type = other RNA
gattcagtcttggtagtttgc

SEQ ID NO: 88309 - RNA, 21 nt, synthetic construct
  source 1..21: mol_type = other RNA
gattcagtggttggaaaactt

SEQ ID NO: 88310 - RNA, 21 nt, synthetic construct
  source 1..21: mol_type = other RNA
gattcatatgctttgagctac

SEQ ID NO: 88311 - RNA, 21 nt, synthetic construct
  source 1..21: mol_type = other RNA
gattcatcttgacttcacttc

SEQ ID NO: 88312 - RNA, 21 nt, synthetic construct
  source 1..21: mol_type = other RNA
gattccacttatatgaagcta

SEQ ID NO: 88313 - RNA, 21 nt, synthetic construct
  source 1..21: mol_type = other RNA
gattccaggtttacaggatat

SEQ ID NO: 88314 - RNA, 21 nt, synthetic construct
  source 1..21: mol_type = other RNA
gattccagtttctctgctttt

SEQ ID NO: 88315 - RNA, 21 nt, synthetic construct
  source 1..21: mol_type = other RNA
gattcccaggtattttgttct

SEQ ID NO: 88316 - RNA, 21 nt, synthetic construct
  source 1..21: mol_type = other RNA
gattcccccttatgtgtgtat

SEQ ID NO: 88317 - RNA, 21 nt, synthetic construct
  source 1..21: mol_type = other RNA
gattccccttatatgggatat

SEQ ID NO: 88318 - RNA, 21 nt, synthetic construct
  source 1..21: mol_type = other RNA
gattccctctggccttctata

SEQ ID NO: 88319 - RNA, 21 nt, synthetic construct
  source 1..21: mol_type = other RNA
gattccgtctcaaaaaattat

SEQ ID NO: 88320 - RNA, 21 nt, synthetic construct
  source 1..21: mol_type = other RNA
gattcctccctggagaggcaa

SEQ ID NO: 88321 - RNA, 21 nt, synthetic construct
  source 1..21: mol_type = other RNA
gattcctttcaaagagacctg

SEQ ID NO: 88322 - RNA, 21 nt, synthetic construct
  source 1..21: mol_type = other RNA
gattccttttttatgtgcttt

SEQ ID NO: 88323 - RNA, 21 nt, synthetic construct
  source 1..21: mol_type = other RNA
gattcgattaaaataacacgc

SEQ ID NO: 88324 - RNA, 21 nt, synthetic construct
  source 1..21: mol_type = other RNA
gattcgcattgctaattcatt

SEQ ID NO: 88325 - RNA, 21 nt, synthetic construct
  source 1..21: mol_type = other RNA
gattcgggggagagcactggt

SEQ ID NO: 88326 - RNA, 21 nt, synthetic construct
  source 1..21: mol_type = other RNA
gattctaatgtgcaaggagag

SEQ ID NO: 88327 - RNA, 21 nt, synthetic construct
  source 1..21: mol_type = other RNA
gattctctgtctctgttgccc

SEQ ID NO: 88328 - RNA, 21 nt, synthetic construct
  source 1..21: mol_type = other RNA
gattctctttagggaagatag

SEQ ID NO: 88329 - RNA, 21 nt, synthetic construct
  source 1..21: mol_type = other RNA
gattctgacccagagcctaat

SEQ ID NO: 88330 - RNA, 21 nt, synthetic construct
  source 1..21: mol_type = other RNA
gattctgctactagcaagcta

SEQ ID NO: 88331 - RNA, 21 nt, synthetic construct
  source 1..21: mol_type = other RNA
gattctggccaaatccctgat

SEQ ID NO: 88332 - RNA, 21 nt, synthetic construct
  source 1..21: mol_type = other RNA
gattctgtctctacaaaaaag

SEQ ID NO: 88333 - RNA, 21 nt, synthetic construct
  source 1..21: mol_type = other RNA
gattcttccactagtgggatc

SEQ ID NO: 88334 - RNA, 21 nt, synthetic construct
  source 1..21: mol_type = other RNA
gattcttgtcatgaatgaatg

SEQ ID NO: 88335 - RNA, 21 nt, synthetic construct
  source 1..21: mol_type = other RNA
gattcttgttaagcattttcc

SEQ ID NO: 88336 - RNA, 21 nt, synthetic construct
  source 1..21: mol_type = other RNA
gattgaaaatggtttaggctg

SEQ ID NO: 88337 - RNA, 21 nt, synthetic construct
  source 1..21: mol_type = other RNA
gattgaaatctaggcatataa

SEQ ID NO: 88338 - RNA, 21 nt, synthetic construct
  source 1..21: mol_type = other RNA
gattgaatggaaagaaataga

SEQ ID NO: 88339 - RNA, 21 nt, synthetic construct
  source 1..21: mol_type = other RNA
gattgaccttctacttatctt

SEQ ID NO: 88340 - RNA, 21 nt, synthetic construct
  source 1..21: mol_type = other RNA
gattgaccttgtatccagtaa

SEQ ID NO: 88341 - RNA, 21 nt, synthetic construct
  source 1..21: mol_type = other RNA
gattgagattagcgaaaggga

SEQ ID NO: 88342 - RNA, 21 nt, synthetic construct
  source 1..21: mol_type = other RNA
gattgaggacttcatgtacaa

SEQ ID NO: 88343 - RNA, 21 nt, synthetic construct
  source 1..21: mol_type = other RNA
gattgagggttagatttttcc

SEQ ID NO: 88344 - RNA, 21 nt, synthetic construct
  source 1..21: mol_type = other RNA
gattgagtatctggtgctggc

SEQ ID NO: 88345 - RNA, 21 nt, synthetic construct
  source 1..21: mol_type = other RNA
gattgatatctgagtgttgtg

SEQ ID NO: 88346 - RNA, 21 nt, synthetic construct
  source 1..21: mol_type = other RNA
gattgattccagtttctctgc

SEQ ID NO: 88347 - RNA, 21 nt, synthetic construct
  source 1..21: mol_type = other RNA
gattgcaggtgtgggccacca

SEQ ID NO: 88348 - RNA, 21 nt, synthetic construct
  source 1..21: mol_type = other RNA
gattgccagttttctggaaac

SEQ ID NO: 88349 - RNA, 21 nt, synthetic construct
  source 1..21: mol_type = other RNA
gattgcccattataaaatagg

SEQ ID NO: 88350 - RNA, 21 nt, synthetic construct
  source 1..21: mol_type = other RNA
gattgccccattgcactccac

SEQ ID NO: 88351 - RNA, 21 nt, synthetic construct
  source 1..21: mol_type = other RNA
gattgcctaacaccagtaaga

SEQ ID NO: 88352 - RNA, 21 nt, synthetic construct
  source 1..21: mol_type = other RNA
gattgcgattgtttcagtgtg

SEQ ID NO: 88353 - RNA, 21 nt, synthetic construct
  source 1..21: mol_type = other RNA
gattgctaaactgttccccaa

SEQ ID NO: 88354 - RNA, 21 nt, synthetic construct
  source 1..21: mol_type = other RNA
gattgctagtgtcctcaggct

SEQ ID NO: 88355 - RNA, 21 nt, synthetic construct
  source 1..21: mol_type = other RNA
gattgcttgagagagataaaa

SEQ ID NO: 88356 - RNA, 21 nt, synthetic construct
  source 1..21: mol_type = other RNA
gattggaaaactaggtatttg

SEQ ID NO: 88357 - RNA, 21 nt, synthetic construct
  source 1..21: mol_type = other RNA
gattggaatgagtccagcttt

SEQ ID NO: 88358 - RNA, 21 nt, synthetic construct
  source 1..21: mol_type = other RNA
gattggagactgataaacttc

SEQ ID NO: 88359 - RNA, 21 nt, synthetic construct
  source 1..21: mol_type = other RNA
gattggatatttgcagtagta

SEQ ID NO: 88360 - RNA, 21 nt, synthetic construct
  source 1..21: mol_type = other RNA
gattggcaaatctttagtgtt

SEQ ID NO: 88361 - RNA, 21 nt, synthetic construct
  source 1..21: mol_type = other RNA
gattggctttagatttatcaa

SEQ ID NO: 88362 - RNA, 21 nt, synthetic construct
  source 1..21: mol_type = other RNA
gattgggaaaatcttggaact

SEQ ID NO: 88363 - RNA, 21 nt, synthetic construct
  source 1..21: mol_type = other RNA
gattgggaagattggctttag

SEQ ID NO: 88364 - RNA, 21 nt, synthetic construct
  source 1..21: mol_type = other RNA
gattgggcattaattgagagc

SEQ ID NO: 88365 - RNA, 21 nt, synthetic construct
  source 1..21: mol_type = other RNA
gattgggcttttcatatacgt

SEQ ID NO: 88366 - RNA, 21 nt, synthetic construct
  source 1..21: mol_type = other RNA
gattgggtcaacaaactaact

SEQ ID NO: 88367 - RNA, 21 nt, synthetic construct
  source 1..21: mol_type = other RNA
gattggttggactccaccctg

SEQ ID NO: 88368 - RNA, 21 nt, synthetic construct
  source 1..21: mol_type = other RNA
gattgtcgttgagtacctctg

SEQ ID NO: 88369 - RNA, 21 nt, synthetic construct
  source 1..21: mol_type = other RNA
gattgtgccagtgaactccag

SEQ ID NO: 88370 - RNA, 21 nt, synthetic construct
  source 1..21: mol_type = other RNA
gattgtgtgatttcatatgaa

SEQ ID NO: 88371 - RNA, 21 nt, synthetic construct
  source 1..21: mol_type = other RNA
gattgtgtgtcgagaaaaatg

SEQ ID NO: 88372 - RNA, 21 nt, synthetic construct
  source 1..21: mol_type = other RNA
gattgttagccacagcgttgt

SEQ ID NO: 88373 - RNA, 21 nt, synthetic construct
  source 1..21: mol_type = other RNA
gattgttcatgtctgtgtagt

SEQ ID NO: 88374 - RNA, 21 nt, synthetic construct
  source 1..21: mol_type = other RNA
gattgttccaggggggaaaaa

SEQ ID NO: 88375 - RNA, 21 nt, synthetic construct
  source 1..21: mol_type = other RNA
gattgttgccatcattttatg

SEQ ID NO: 88376 - RNA, 21 nt, synthetic construct
  source 1..21: mol_type = other RNA
gattgtttaattctgtttacc

SEQ ID NO: 88377 - RNA, 21 nt, synthetic construct
  source 1..21: mol_type = other RNA
gattgtttcagtgtgtccaca

SEQ ID NO: 88378 - RNA, 21 nt, synthetic construct
  source 1..21: mol_type = other RNA
gattgtttgaggctgggagta

SEQ ID NO: 88379 - RNA, 21 nt, synthetic construct
  source 1..21: mol_type = other RNA
gattgttttaggtagtcttgt

SEQ ID NO: 88380 - RNA, 21 nt, synthetic construct
  source 1..21: mol_type = other RNA
gattgttttgttgctattgtt

SEQ ID NO: 88381 - RNA, 21 nt, synthetic construct
  source 1..21: mol_type = other RNA
gatttaaagtaggttgagact

SEQ ID NO: 88382 - RNA, 21 nt, synthetic construct
  source 1..21: mol_type = other RNA
gatttaagagaggaagtgacc

SEQ ID NO: 88383 - RNA, 21 nt, synthetic construct
  source 1..21: mol_type = other RNA
gatttaatagaggtctgtctt

SEQ ID NO: 88384 - RNA, 21 nt, synthetic construct
  source 1..21: mol_type = other RNA
gatttacccctactttttgtc

SEQ ID NO: 88385 - RNA, 21 nt, synthetic construct
  source 1..21: mol_type = other RNA
gatttactaaactgaacgaag

SEQ ID NO: 88386 - RNA, 21 nt, synthetic construct
  source 1..21: mol_type = other RNA
gatttagaaatacctgcaggt

SEQ ID NO: 88387 - RNA, 21 nt, synthetic construct
  source 1..21: mol_type = other RNA
gatttaggccactctcatcta

SEQ ID NO: 88388 - RNA, 21 nt, synthetic construct
  source 1..21: mol_type = other RNA
gatttataatccattgggtac

SEQ ID NO: 88389 - RNA, 21 nt, synthetic construct
  source 1..21: mol_type = other RNA
gatttatagtgtttccttcca

SEQ ID NO: 88390 - RNA, 21 nt, synthetic construct
  source 1..21: mol_type = other RNA
gatttatcaatagcagtgctg

SEQ ID NO: 88391 - RNA, 21 nt, synthetic construct
  source 1..21: mol_type = other RNA
gatttatggcctaagatggaa

SEQ ID NO: 88392 - RNA, 21 nt, synthetic construct
  source 1..21: mol_type = other RNA
gatttatttctgggctctcta

SEQ ID NO: 88393 - RNA, 21 nt, synthetic construct
  source 1..21: mol_type = other RNA
gatttatttttacccgtggaa

SEQ ID NO: 88394 - RNA, 21 nt, synthetic construct
  source 1..21: mol_type = other RNA
gatttcaaagttaatagcctc

SEQ ID NO: 88395 - RNA, 21 nt, synthetic construct
  source 1..21: mol_type = other RNA
gatttcaagtaacactcagaa

SEQ ID NO: 88396 - RNA, 21 nt, synthetic construct
  source 1..21: mol_type = other RNA
gatttcaatctggaatgcatc

SEQ ID NO: 88397 - RNA, 21 nt, synthetic construct
  source 1..21: mol_type = other RNA
gatttcacttacttgagcccc

SEQ ID NO: 88398 - RNA, 21 nt, synthetic construct
  source 1..21: mol_type = other RNA
gatttcaggtggtatttaatc

SEQ ID NO: 88399 - RNA, 21 nt, synthetic construct
  source 1..21: mol_type = other RNA
gatttcagttaacttattgga

SEQ ID NO: 88400 - RNA, 21 nt, synthetic construct
  source 1..21: mol_type = other RNA
gatttcataggcatctctccc

SEQ ID NO: 88401 - RNA, 21 nt, synthetic construct
  source 1..21: mol_type = other RNA
gatttcatgaacaattttctc

SEQ ID NO: 88402 - RNA, 21 nt, synthetic construct
  source 1..21: mol_type = other RNA
gatttccagtgtttggttttt

SEQ ID NO: 88403 - RNA, 21 nt, synthetic construct
  source 1..21: mol_type = other RNA
gatttccctgcatacactcat

SEQ ID NO: 88404 - RNA, 21 nt, synthetic construct
  source 1..21: mol_type = other RNA
gatttctactggggtcttagt

SEQ ID NO: 88405 - RNA, 21 nt, synthetic construct
  source 1..21: mol_type = other RNA
gatttctaggccctaacccca

SEQ ID NO: 88406 - RNA, 21 nt, synthetic construct
  source 1..21: mol_type = other RNA
gatttctcggccgggcgcggt

SEQ ID NO: 88407 - RNA, 21 nt, synthetic construct
  source 1..21: mol_type = other RNA
gatttctgcatagagatcttg

SEQ ID NO: 88408 - RNA, 21 nt, synthetic construct
  source 1..21: mol_type = other RNA
gatttcttaaaaatgacacca

SEQ ID NO: 88409 - RNA, 21 nt, synthetic construct
  source 1..21: mol_type = other RNA
gatttcttctttggctcaatg

SEQ ID NO: 88410 - RNA, 21 nt, synthetic construct
  source 1..21: mol_type = other RNA
gatttctttttactcatgtct

SEQ ID NO: 88411 - RNA, 21 nt, synthetic construct
  source 1..21: mol_type = other RNA
gatttgaccatgggacaagtg

SEQ ID NO: 88412 - RNA, 21 nt, synthetic construct
  source 1..21: mol_type = other RNA
gatttgagtcttgctctcttg

SEQ ID NO: 88413 - RNA, 21 nt, synthetic construct
  source 1..21: mol_type = other RNA
gatttgatcctggaatagtag

SEQ ID NO: 88414 - RNA, 21 nt, synthetic construct
  source 1..21: mol_type = other RNA
gatttgattgggcattaattg

SEQ ID NO: 88415 - RNA, 21 nt, synthetic construct
  source 1..21: mol_type = other RNA
gatttgcatttctctaatagc

SEQ ID NO: 88416 - RNA, 21 nt, synthetic construct
  source 1..21: mol_type = other RNA
gatttgccaatcaataattct

SEQ ID NO: 88417 - RNA, 21 nt, synthetic construct
  source 1..21: mol_type = other RNA
gatttgctggctcagtctgtt

SEQ ID NO: 88418 - RNA, 21 nt, synthetic construct
  source 1..21: mol_type = other RNA
gatttgctgtataacattttc

SEQ ID NO: 88419 - RNA, 21 nt, synthetic construct
  source 1..21: mol_type = other RNA
gatttggccagaatccctttc

SEQ ID NO: 88420 - RNA, 21 nt, synthetic construct
  source 1..21: mol_type = other RNA
gatttgggaaggatggccagt

SEQ ID NO: 88421 - RNA, 21 nt, synthetic construct
  source 1..21: mol_type = other RNA
gatttggtgtgtgcaaaggat

SEQ ID NO: 88422 - RNA, 21 nt, synthetic construct
  source 1..21: mol_type = other RNA
gatttgtagatattttctgtc

SEQ ID NO: 88423 - RNA, 21 nt, synthetic construct
  source 1..21: mol_type = other RNA
gatttgttatatccagattga

SEQ ID NO: 88424 - RNA, 21 nt, synthetic construct
  source 1..21: mol_type = other RNA
gatttgtttagtagctgtctt

SEQ ID NO: 88425 - RNA, 21 nt, synthetic construct
  source 1..21: mol_type = other RNA
gatttgtttgaattaagcacc

SEQ ID NO: 88426 - RNA, 21 nt, synthetic construct
  source 1..21: mol_type = other RNA
gatttgtttgtgaagatacaa

SEQ ID NO: 88427 - RNA, 21 nt, synthetic construct
  source 1..21: mol_type = other RNA
gattttaatctgtcctgaata

SEQ ID NO: 88428 - RNA, 21 nt, synthetic construct
  source 1..21: mol_type = other RNA
gattttaccaaggctaagttg

SEQ ID NO: 88429 - RNA, 21 nt, synthetic construct
  source 1..21: mol_type = other RNA
gattttacttactagttgtgc

SEQ ID NO: 88430 - RNA, 21 nt, synthetic construct
  source 1..21: mol_type = other RNA
gattttagaaggtaagaatgt

SEQ ID NO: 88431 - RNA, 21 nt, synthetic construct
  source 1..21: mol_type = other RNA
gattttaggtcatttttcact

SEQ ID NO: 88432 - RNA, 21 nt, synthetic construct
  source 1..21: mol_type = other RNA
gattttcacagggcagggaga

SEQ ID NO: 88433 - RNA, 21 nt, synthetic construct
  source 1..21: mol_type = other RNA
gattttcccaaagatagactc

SEQ ID NO: 88434 - RNA, 21 nt, synthetic construct
  source 1..21: mol_type = other RNA
gattttcccaatctctggtat

SEQ ID NO: 88435 - RNA, 21 nt, synthetic construct
  source 1..21: mol_type = other RNA
gattttcgtatcttttaacag

SEQ ID NO: 88436 - RNA, 21 nt, synthetic construct
  source 1..21: mol_type = other RNA
gattttctattcattaccagg

SEQ ID NO: 88437 - RNA, 21 nt, synthetic construct
  source 1..21: mol_type = other RNA
gattttctgcttctcaataag

SEQ ID NO: 88438 - RNA, 21 nt, synthetic construct
  source 1..21: mol_type = other RNA
gattttgaggcagagagatgg

SEQ ID NO: 88439 - RNA, 21 nt, synthetic construct
  source 1..21: mol_type = other RNA
gattttgctgccaagtcagca

SEQ ID NO: 88440 - RNA, 21 nt, synthetic construct
  source 1..21: mol_type = other RNA
gattttggattgcgattgttt

SEQ ID NO: 88441 - RNA, 21 nt, synthetic construct
  source 1..21: mol_type = other RNA
gattttgtatcctgagactta

SEQ ID NO: 88442 - RNA, 21 nt, synthetic construct
  source 1..21: mol_type = other RNA
gattttgtgtcttctgttttt

SEQ ID NO: 88443 - RNA, 21 nt, synthetic construct
  source 1..21: mol_type = other RNA
gattttgtttatttgctgtca

SEQ ID NO: 88444 - RNA, 21 nt, synthetic construct
  source 1..21: mol_type = other RNA
gatttttagtgactggcttaa

SEQ ID NO: 88445 - RNA, 21 nt, synthetic construct
  source 1..21: mol_type = other RNA
gatttttccaacagtttacac

SEQ ID NO: 88446 - RNA, 21 nt, synthetic construct
  source 1..21: mol_type = other RNA
gatttttcctttgcctaagtc

SEQ ID NO: 88447 - RNA, 21 nt, synthetic construct
  source 1..21: mol_type = other RNA
gatttttctgtttctgtgaaa

SEQ ID NO: 88448 - RNA, 21 nt, synthetic construct
  source 1..21: mol_type = other RNA
gatttttgccagtgttttaaa

SEQ ID NO: 88449 - RNA, 21 nt, synthetic construct
  source 1..21: mol_type = other RNA
gatttttgtgtagaggtgaag

SEQ ID NO: 88450 - RNA, 21 nt, synthetic construct
  source 1..21: mol_type = other RNA
gattttttgttgttggtttgt

SEQ ID NO: 88451 - RNA, 21 nt, synthetic construct
  source 1..21: mol_type = other RNA
gcaaaaaagtcatgacctgct

SEQ ID NO: 88452 - RNA, 21 nt, synthetic construct
  source 1..21: mol_type = other RNA
gcaaaaaatgcagtagtaaag

SEQ ID NO: 88453 - RNA, 21 nt, synthetic construct
  source 1..21: mol_type = other RNA
gcaaaaacagtttccctctga

SEQ ID NO: 88454 - RNA, 21 nt, synthetic construct
  source 1..21: mol_type = other RNA
gcaaaaatacagctccaaaga

SEQ ID NO: 88455 - RNA, 21 nt, synthetic construct
  source 1..21: mol_type = other RNA
gcaaaaatactacaagagttc

SEQ ID NO: 88456 - RNA, 21 nt, synthetic construct
  source 1..21: mol_type = other RNA
gcaaaaattttgttcaggagt

SEQ ID NO: 88457 - RNA, 21 nt, synthetic construct
  source 1..21: mol_type = other RNA
gcaaaacaatagcccagcagg

SEQ ID NO: 88458 - RNA, 21 nt, synthetic construct
  source 1..21: mol_type = other RNA
gcaaaacatatgtcagatggt

SEQ ID NO: 88459 - RNA, 21 nt, synthetic construct
  source 1..21: mol_type = other RNA
gcaaaacggaaactttatacc

SEQ ID NO: 88460 - RNA, 21 nt, synthetic construct
  source 1..21: mol_type = other RNA
gcaaaactcctgaacaaaatt

SEQ ID NO: 88461 - RNA, 21 nt, synthetic construct
  source 1..21: mol_type = other RNA
gcaaaagatgatgaacaaagg

SEQ ID NO: 88462 - RNA, 21 nt, synthetic construct
  source 1..21: mol_type = other RNA
gcaaaagcaaaattctaacaa

SEQ ID NO: 88463 - RNA, 21 nt, synthetic construct
  source 1..21: mol_type = other RNA
gcaaaagcaattattagttgt

SEQ ID NO: 88464 - RNA, 21 nt, synthetic construct
  source 1..21: mol_type = other RNA
gcaaaagcaccactgagaggg

SEQ ID NO: 88465 - RNA, 21 nt, synthetic construct
  source 1..21: mol_type = other RNA
gcaaaatggaagtgctgggct

SEQ ID NO: 88466 - RNA, 21 nt, synthetic construct
  source 1..21: mol_type = other RNA
gcaaaatggagacatctgaga

SEQ ID NO: 88467 - RNA, 21 nt, synthetic construct
  source 1..21: mol_type = other RNA
gcaaaattctaacaagaagct

SEQ ID NO: 88468 - RNA, 21 nt, synthetic construct
  source 1..21: mol_type = other RNA
gcaaaattgacaaacccttgg

SEQ ID NO: 88469 - RNA, 21 nt, synthetic construct
  source 1..21: mol_type = other RNA
gcaaaattttaaatcagcacc

SEQ ID NO: 88470 - RNA, 21 nt, synthetic construct
  source 1..21: mol_type = other RNA
gcaaacaaacacactgggtaa

SEQ ID NO: 88471 - RNA, 21 nt, synthetic construct
  source 1..21: mol_type = other RNA
gcaaacagactgagccagcaa

SEQ ID NO: 88472 - RNA, 21 nt, synthetic construct
  source 1..21: mol_type = other RNA
gcaaacagcgccacttaaaaa

SEQ ID NO: 88473 - RNA, 21 nt, synthetic construct
  source 1..21: mol_type = other RNA
gcaaacatttatggaattgcc

SEQ ID NO: 88474 - RNA, 21 nt, synthetic construct
  source 1..21: mol_type = other RNA
gcaaaccaaatgcagaaaata

SEQ ID NO: 88475 - RNA, 21 nt, synthetic construct
  source 1..21: mol_type = other RNA
gcaaaccacacagagaacagc

SEQ ID NO: 88476 - RNA, 21 nt, synthetic construct
  source 1..21: mol_type = other RNA
gcaaaccagacatttctcata

SEQ ID NO: 88477 - RNA, 21 nt, synthetic construct
  source 1..21: mol_type = other RNA
gcaaacctcctggttttgatc

SEQ ID NO: 88478 - RNA, 21 nt, synthetic construct
  source 1..21: mol_type = other RNA
gcaaacgtgcacacccagtta

SEQ ID NO: 88479 - RNA, 21 nt, synthetic construct
  source 1..21: mol_type = other RNA
gcaaactaagtggtattctat

SEQ ID NO: 88480 - RNA, 21 nt, synthetic construct
  source 1..21: mol_type = other RNA
gcaaactaccaagactgaatc

SEQ ID NO: 88481 - RNA, 21 nt, synthetic construct
  source 1..21: mol_type = other RNA
gcaaactactgatagcgaaag

SEQ ID NO: 88482 - RNA, 21 nt, synthetic construct
  source 1..21: mol_type = other RNA
gcaaactcagatctgagagat

SEQ ID NO: 88483 - RNA, 21 nt, synthetic construct
  source 1..21: mol_type = other RNA
gcaaactctaaataataggtt

SEQ ID NO: 88484 - RNA, 21 nt, synthetic construct
  source 1..21: mol_type = other RNA
gcaaactgaatcagacaacac

SEQ ID NO: 88485 - RNA, 21 nt, synthetic construct
  source 1..21: mol_type = other RNA
gcaaacttagaatataaactc

SEQ ID NO: 88486 - RNA, 21 nt, synthetic construct
  source 1..21: mol_type = other RNA
gcaaagaggcaaaactcctga

SEQ ID NO: 88487 - RNA, 21 nt, synthetic construct
  source 1..21: mol_type = other RNA
gcaaagatatgggttattcac

SEQ ID NO: 88488 - RNA, 21 nt, synthetic construct
  source 1..21: mol_type = other RNA
gcaaagcaacatgctaagtgt

SEQ ID NO: 88489 - RNA, 21 nt, synthetic construct
  source 1..21: mol_type = other RNA
gcaaagcaagaaaaagaaata

SEQ ID NO: 88490 - RNA, 21 nt, synthetic construct
  source 1..21: mol_type = other RNA
gcaaaggaaaaatctaaccct

SEQ ID NO: 88491 - RNA, 21 nt, synthetic construct
  source 1..21: mol_type = other RNA
gcaaaggatgtcaacaaaata

SEQ ID NO: 88492 - RNA, 21 nt, synthetic construct
  source 1..21: mol_type = other RNA
gcaaaggattagaaagtagat

SEQ ID NO: 88493 - RNA, 21 nt, synthetic construct
  source 1..21: mol_type = other RNA
gcaaaggattcgggggagagc

SEQ ID NO: 88494 - RNA, 21 nt, synthetic construct
  source 1..21: mol_type = other RNA
gcaaaggccgctcttgacctt

SEQ ID NO: 88495 - RNA, 21 nt, synthetic construct
  source 1..21: mol_type = other RNA
gcaaaggttgagacaagacca

SEQ ID NO: 88496 - RNA, 21 nt, synthetic construct
  source 1..21: mol_type = other RNA
gcaaagtaaaaagcactatcc

SEQ ID NO: 88497 - RNA, 21 nt, synthetic construct
  source 1..21: mol_type = other RNA
gcaaagtttcctacatactgc

SEQ ID NO: 88498 - RNA, 21 nt, synthetic construct
  source 1..21: mol_type = other RNA
gcaaatatccaatcactggct

SEQ ID NO: 88499 - RNA, 21 nt, synthetic construct
  source 1..21: mol_type = other RNA
gcaaatcaaaacaataagaca

SEQ ID NO: 88500 - RNA, 21 nt, synthetic construct
  source 1..21: mol_type = other RNA
gcaaatcagaaaaggctgaga

SEQ ID NO: 88501 - RNA, 21 nt, synthetic construct
  source 1..21: mol_type = other RNA
gcaaatctctagaacttatgc

SEQ ID NO: 88502 - RNA, 21 nt, synthetic construct
  source 1..21: mol_type = other RNA
gcaaatctttagtgttgcttg

SEQ ID NO: 88503 - RNA, 21 nt, synthetic construct
  source 1..21: mol_type = other RNA
gcaaatgaggttgcttttact

SEQ ID NO: 88504 - RNA, 21 nt, synthetic construct
  source 1..21: mol_type = other RNA
gcaaatgtcatcttctctctc

SEQ ID NO: 88505 - RNA, 21 nt, synthetic construct
  source 1..21: mol_type = other RNA
gcaaatgtgactagaagaaat

SEQ ID NO: 88506 - RNA, 21 nt, synthetic construct
  source 1..21: mol_type = other RNA
gcaaattattttcctccttct

SEQ ID NO: 88507 - RNA, 21 nt, synthetic construct
  source 1..21: mol_type = other RNA
gcaaattcatagatcaccagg

SEQ ID NO: 88508 - RNA, 21 nt, synthetic construct
  source 1..21: mol_type = other RNA
gcaaattgtcagattttcttg

SEQ ID NO: 88509 - RNA, 21 nt, synthetic construct
  source 1..21: mol_type = other RNA
gcaacaaaacaatctaattcg

SEQ ID NO: 88510 - RNA, 21 nt, synthetic construct
  source 1..21: mol_type = other RNA
gcaacaaaggcgaagcccgcc

SEQ ID NO: 88511 - RNA, 21 nt, synthetic construct
  source 1..21: mol_type = other RNA
gcaacaaatgttgcagagact

SEQ ID NO: 88512 - RNA, 21 nt, synthetic construct
  source 1..21: mol_type = other RNA
gcaacaatcaacaggtagctg

SEQ ID NO: 88513 - RNA, 21 nt, synthetic construct
  source 1..21: mol_type = other RNA
gcaacaattcaacagctacta

SEQ ID NO: 88514 - RNA, 21 nt, synthetic construct
  source 1..21: mol_type = other RNA
gcaacaccagatactcatgct

SEQ ID NO: 88515 - RNA, 21 nt, synthetic construct
  source 1..21: mol_type = other RNA
gcaacactaaagatttgccaa

SEQ ID NO: 88516 - RNA, 21 nt, synthetic construct
  source 1..21: mol_type = other RNA
gcaacagaaatttattgtttc

SEQ ID NO: 88517 - RNA, 21 nt, synthetic construct
  source 1..21: mol_type = other RNA
gcaacagaataaatgaaaaca

SEQ ID NO: 88518 - RNA, 21 nt, synthetic construct
  source 1..21: mol_type = other RNA
gcaacagagacagagaatctg

SEQ ID NO: 88519 - RNA, 21 nt, synthetic construct
  source 1..21: mol_type = other RNA
gcaacagatctgagaagacta

SEQ ID NO: 88520 - RNA, 21 nt, synthetic construct
  source 1..21: mol_type = other RNA
gcaacaggaagaggcagctaa

SEQ ID NO: 88521 - RNA, 21 nt, synthetic construct
  source 1..21: mol_type = other RNA
gcaacagtcattcaggtctat

SEQ ID NO: 88522 - RNA, 21 nt, synthetic construct
  source 1..21: mol_type = other RNA
gcaacataaatagggtgctac

SEQ ID NO: 88523 - RNA, 21 nt, synthetic construct
  source 1..21: mol_type = other RNA
gcaacatccctatgcaataac

SEQ ID NO: 88524 - RNA, 21 nt, synthetic construct
  source 1..21: mol_type = other RNA
gcaacatctgcctcccgggtc

SEQ ID NO: 88525 - RNA, 21 nt, synthetic construct
  source 1..21: mol_type = other RNA
gcaacatgctaagtgtttagg

SEQ ID NO: 88526 - RNA, 21 nt, synthetic construct
  source 1..21: mol_type = other RNA
gcaacatttgttgcatcccca

SEQ ID NO: 88527 - RNA, 21 nt, synthetic construct
  source 1..21: mol_type = other RNA
gcaaccatccccgctgtccat

SEQ ID NO: 88528 - RNA, 21 nt, synthetic construct
  source 1..21: mol_type = other RNA
gcaacctcatttgcagagcaa

SEQ ID NO: 88529 - RNA, 21 nt, synthetic construct
  source 1..21: mol_type = other RNA
gcaacctccgtttttcaggtt

SEQ ID NO: 88530 - RNA, 21 nt, synthetic construct
  source 1..21: mol_type = other RNA
gcaacctgctttcctcatgtc

SEQ ID NO: 88531 - RNA, 21 nt, synthetic construct
  source 1..21: mol_type = other RNA
gcaaccttgggagaaaatttt

SEQ ID NO: 88532 - RNA, 21 nt, synthetic construct
  source 1..21: mol_type = other RNA
gcaaccttttaggtgccccac

SEQ ID NO: 88533 - RNA, 21 nt, synthetic construct
  source 1..21: mol_type = other RNA
gcaacggaaatgagtgagcca

SEQ ID NO: 88534 - RNA, 21 nt, synthetic construct
  source 1..21: mol_type = other RNA
gcaactactatttcgcaaagc

SEQ ID NO: 88535 - RNA, 21 nt, synthetic construct
  source 1..21: mol_type = other RNA
gcaactagagaaagcatcaga

SEQ ID NO: 88536 - RNA, 21 nt, synthetic construct
  source 1..21: mol_type = other RNA
gcaactatcaaaacacttctg

SEQ ID NO: 88537 - RNA, 21 nt, synthetic construct
  source 1..21: mol_type = other RNA
gcaactcctgggctcatctaa

SEQ ID NO: 88538 - RNA, 21 nt, synthetic construct
  source 1..21: mol_type = other RNA
gcaactcttggccattttctt

SEQ ID NO: 88539 - RNA, 21 nt, synthetic construct
  source 1..21: mol_type = other RNA
gcaactgaaaacatctttttt

SEQ ID NO: 88540 - RNA, 21 nt, synthetic construct
  source 1..21: mol_type = other RNA
gcaactgagaagagctgtaac

SEQ ID NO: 88541 - RNA, 21 nt, synthetic construct
  source 1..21: mol_type = other RNA
gcaactgcatcttcttttact

SEQ ID NO: 88542 - RNA, 21 nt, synthetic construct
  source 1..21: mol_type = other RNA
gcaactgttttttcctccctt

SEQ ID NO: 88543 - RNA, 21 nt, synthetic construct
  source 1..21: mol_type = other RNA
gcaacttactctcaaataatt

SEQ ID NO: 88544 - RNA, 21 nt, synthetic construct
  source 1..21: mol_type = other RNA
gcaacttgaaggcaatgtagg

SEQ ID NO: 88545 - RNA, 21 nt, synthetic construct
  source 1..21: mol_type = other RNA
gcaacttgatcagggatttgg

SEQ ID NO: 88546 - RNA, 21 nt, synthetic construct
  source 1..21: mol_type = other RNA
gcaacttgcagaagagtgaag

SEQ ID NO: 88547 - RNA, 21 nt, synthetic construct
  source 1..21: mol_type = other RNA
gcaagaatggtttaacacata

SEQ ID NO: 88548 - RNA, 21 nt, synthetic construct
  source 1..21: mol_type = other RNA
gcaagaccctgtctctaaaaa

SEQ ID NO: 88549 - RNA, 21 nt, synthetic construct
  source 1..21: mol_type = other RNA
gcaagactcaaatctcaaaaa

SEQ ID NO: 88550 - RNA, 21 nt, synthetic construct
  source 1..21: mol_type = other RNA
gcaagactttatgtggaaaaa

SEQ ID NO: 88551 - RNA, 21 nt, synthetic construct
  source 1..21: mol_type = other RNA
gcaagagagcaagactcaaat

SEQ ID NO: 88552 - RNA, 21 nt, synthetic construct
  source 1..21: mol_type = other RNA
gcaagagagcaagtccccatc

SEQ ID NO: 88553 - RNA, 21 nt, synthetic construct
  source 1..21: mol_type = other RNA
gcaagagttaaaactcacaaa

SEQ ID NO: 88554 - RNA, 21 nt, synthetic construct
  source 1..21: mol_type = other RNA
gcaagagttccaactgtataa

SEQ ID NO: 88555 - RNA, 21 nt, synthetic construct
  source 1..21: mol_type = other RNA
gcaagatgcataagttctaga

SEQ ID NO: 88556 - RNA, 21 nt, synthetic construct
  source 1..21: mol_type = other RNA
gcaagatggcaagtttccatt

SEQ ID NO: 88557 - RNA, 21 nt, synthetic construct
  source 1..21: mol_type = other RNA
gcaagatgtcaacattaaggg

SEQ ID NO: 88558 - RNA, 21 nt, synthetic construct
  source 1..21: mol_type = other RNA
gcaagattaatcttgtgaatt

SEQ ID NO: 88559 - RNA, 21 nt, synthetic construct
  source 1..21: mol_type = other RNA
gcaagattactggatacaagg

SEQ ID NO: 88560 - RNA, 21 nt, synthetic construct
  source 1..21: mol_type = other RNA
gcaagcaacaccagatactca

SEQ ID NO: 88561 - RNA, 21 nt, synthetic construct
  source 1..21: mol_type = other RNA
gcaagcacgttagcatcacca

SEQ ID NO: 88562 - RNA, 21 nt, synthetic construct
  source 1..21: mol_type = other RNA
gcaagcactggtaaggaaaca

SEQ ID NO: 88563 - RNA, 21 nt, synthetic construct
  source 1..21: mol_type = other RNA
gcaagcagatctgctgtaagc

SEQ ID NO: 88564 - RNA, 21 nt, synthetic construct
  source 1..21: mol_type = other RNA
gcaagcagtaaatatactgac

SEQ ID NO: 88565 - RNA, 21 nt, synthetic construct
  source 1..21: mol_type = other RNA
gcaagcatgagtatctggtgt

SEQ ID NO: 88566 - RNA, 21 nt, synthetic construct
  source 1..21: mol_type = other RNA
gcaagccacattagccactct

SEQ ID NO: 88567 - RNA, 21 nt, synthetic construct
  source 1..21: mol_type = other RNA
gcaagccttggcaaggggaat

SEQ ID NO: 88568 - RNA, 21 nt, synthetic construct
  source 1..21: mol_type = other RNA
gcaagctaataatttatcaga

SEQ ID NO: 88569 - RNA, 21 nt, synthetic construct
  source 1..21: mol_type = other RNA
gcaagctccgcctcctggtgg

SEQ ID NO: 88570 - RNA, 21 nt, synthetic construct
  source 1..21: mol_type = other RNA
gcaaggaagcagaatgtccat

SEQ ID NO: 88571 - RNA, 21 nt, synthetic construct
  source 1..21: mol_type = other RNA
gcaaggaaggaaaggagatac

SEQ ID NO: 88572 - RNA, 21 nt, synthetic construct
  source 1..21: mol_type = other RNA
gcaaggaagggcttgatctag

SEQ ID NO: 88573 - RNA, 21 nt, synthetic construct
  source 1..21: mol_type = other RNA
gcaaggaccattagcagttct

SEQ ID NO: 88574 - RNA, 21 nt, synthetic construct
  source 1..21: mol_type = other RNA
gcaaggagagaaaaacaaaac

SEQ ID NO: 88575 - RNA, 21 nt, synthetic construct
  source 1..21: mol_type = other RNA
gcaaggataaacaaagagaac

SEQ ID NO: 88576 - RNA, 21 nt, synthetic construct
  source 1..21: mol_type = other RNA
gcaaggcccaccatgatgcag

SEQ ID NO: 88577 - RNA, 21 nt, synthetic construct
  source 1..21: mol_type = other RNA
gcaaggctaacagccaaagaa

SEQ ID NO: 88578 - RNA, 21 nt, synthetic construct
  source 1..21: mol_type = other RNA
gcaaggctcctgcagacatgc

SEQ ID NO: 88579 - RNA, 21 nt, synthetic construct
  source 1..21: mol_type = other RNA
gcaagggactgtcgaagctta

SEQ ID NO: 88580 - RNA, 21 nt, synthetic construct
  source 1..21: mol_type = other RNA
gcaaggggaatggtactgcct

SEQ ID NO: 88581 - RNA, 21 nt, synthetic construct
  source 1..21: mol_type = other RNA
gcaagggtggctggcactttc

SEQ ID NO: 88582 - RNA, 21 nt, synthetic construct
  source 1..21: mol_type = other RNA
gcaaggtcgtttcagattgct

SEQ ID NO: 88583 - RNA, 21 nt, synthetic construct
  source 1..21: mol_type = other RNA
gcaagtaaaagaagatgcagt

SEQ ID NO: 88584 - RNA, 21 nt, synthetic construct
  source 1..21: mol_type = other RNA
gcaagtatgagccactagtca

SEQ ID NO: 88585 - RNA, 21 nt, synthetic construct
  source 1..21: mol_type = other RNA
gcaagtccccatctccacaaa

SEQ ID NO: 88586 - RNA, 21 nt, synthetic construct
  source 1..21: mol_type = other RNA
gcaagtgtggtggtctcaccc

SEQ ID NO: 88587 - RNA, 21 nt, synthetic construct
  source 1..21: mol_type = other RNA
gcaagttaaaagacatctttc

SEQ ID NO: 88588 - RNA, 21 nt, synthetic construct
  source 1..21: mol_type = other RNA
gcaagttacatgcttagcctt

SEQ ID NO: 88589 - RNA, 21 nt, synthetic construct
  source 1..21: mol_type = other RNA
gcaagttgctatccagtctct

SEQ ID NO: 88590 - RNA, 21 nt, synthetic construct
  source 1..21: mol_type = other RNA
gcaagtttccattctcttaat

SEQ ID NO: 88591 - RNA, 21 nt, synthetic construct
  source 1..21: mol_type = other RNA
gcaataactcaaaatgttcat

SEQ ID NO: 88592 - RNA, 21 nt, synthetic construct
  source 1..21: mol_type = other RNA
gcaatacagttaacgtatgaa

SEQ ID NO: 88593 - RNA, 21 nt, synthetic construct
  source 1..21: mol_type = other RNA
gcaatactctcagaaattata

SEQ ID NO: 88594 - RNA, 21 nt, synthetic construct
  source 1..21: mol_type = other RNA
gcaatacttaatagcccaaca

SEQ ID NO: 88595 - RNA, 21 nt, synthetic construct
  source 1..21: mol_type = other RNA
gcaatatagtgggaccccgtc

SEQ ID NO: 88596 - RNA, 21 nt, synthetic construct
  source 1..21: mol_type = other RNA
gcaatcaaatggccttctttc

SEQ ID NO: 88597 - RNA, 21 nt, synthetic construct
  source 1..21: mol_type = other RNA
gcaatcacagcacttggggag

SEQ ID NO: 88598 - RNA, 21 nt, synthetic construct
  source 1..21: mol_type = other RNA
gcaatcacggctgattataac

SEQ ID NO: 88599 - RNA, 21 nt, synthetic construct
  source 1..21: mol_type = other RNA
gcaatccaaaatcctctgtag

SEQ ID NO: 88600 - RNA, 21 nt, synthetic construct
  source 1..21: mol_type = other RNA
gcaatccaaggacagaaattc

SEQ ID NO: 88601 - RNA, 21 nt, synthetic construct
  source 1..21: mol_type = other RNA
gcaatccaggatcttactgta

SEQ ID NO: 88602 - RNA, 21 nt, synthetic construct
  source 1..21: mol_type = other RNA
gcaatctcagctcattacagt

SEQ ID NO: 88603 - RNA, 21 nt, synthetic construct
  source 1..21: mol_type = other RNA
gcaatctcggcttcactgcaa

SEQ ID NO: 88604 - RNA, 21 nt, synthetic construct
  source 1..21: mol_type = other RNA
gcaatctgaaacgaccttgct

SEQ ID NO: 88605 - RNA, 21 nt, synthetic construct
  source 1..21: mol_type = other RNA
gcaatgagtctgacatactgt

SEQ ID NO: 88606 - RNA, 21 nt, synthetic construct
  source 1..21: mol_type = other RNA
gcaatgataggtcactgcagt

SEQ ID NO: 88607 - RNA, 21 nt, synthetic construct
  source 1..21: mol_type = other RNA
gcaatgcaggcgcctggacag

SEQ ID NO: 88608 - RNA, 21 nt, synthetic construct
  source 1..21: mol_type = other RNA
gcaatgcgaatcatctaggca

SEQ ID NO: 88609 - RNA, 21 nt, synthetic construct
  source 1..21: mol_type = other RNA
gcaatgcgtgtgaaaccaagc

SEQ ID NO: 88610 - RNA, 21 nt, synthetic construct
  source 1..21: mol_type = other RNA
gcaatgctctcttcccccaaa

SEQ ID NO: 88611 - RNA, 21 nt, synthetic construct
  source 1..21: mol_type = other RNA
gcaatggggcaatctcagctc

SEQ ID NO: 88612 - RNA, 21 nt, synthetic construct
  source 1..21: mol_type = other RNA
gcaatggtgggatctctgggc

SEQ ID NO: 88613 - RNA, 21 nt, synthetic construct
  source 1..21: mol_type = other RNA
gcaatgtaacacagttctagt

SEQ ID NO: 88614 - RNA, 21 nt, synthetic construct
  source 1..21: mol_type = other RNA
gcaatgtagggaatagacaaa

SEQ ID NO: 88615 - RNA, 21 nt, synthetic construct
  source 1..21: mol_type = other RNA
gcaatgttgattttgaggcag

SEQ ID NO: 88616 - RNA, 21 nt, synthetic construct
  source 1..21: mol_type = other RNA
gcaattattagttgtacttga

SEQ ID NO: 88617 - RNA, 21 nt, synthetic construct
  source 1..21: mol_type = other RNA
gcaattatttgaataaggtct

SEQ ID NO: 88618 - RNA, 21 nt, synthetic construct
  source 1..21: mol_type = other RNA
gcaattccataaatgtttgct

SEQ ID NO: 88619 - RNA, 21 nt, synthetic construct
  source 1..21: mol_type = other RNA
gcaattgcagccagagagtgg

SEQ ID NO: 88620 - RNA, 21 nt, synthetic construct
  source 1..21: mol_type = other RNA
gcaattgcgcagaactggggc

SEQ ID NO: 88621 - RNA, 21 nt, synthetic construct
  source 1..21: mol_type = other RNA
gcaattggaagactatcacga

SEQ ID NO: 88622 - RNA, 21 nt, synthetic construct
  source 1..21: mol_type = other RNA
gcaatttagaattctctctca

SEQ ID NO: 88623 - RNA, 21 nt, synthetic construct
  source 1..21: mol_type = other RNA
gcaatttatatgatactcgta

SEQ ID NO: 88624 - RNA, 21 nt, synthetic construct
  source 1..21: mol_type = other RNA
gcaatttgttttccaagcctt

SEQ ID NO: 88625 - RNA, 21 nt, synthetic construct
  source 1..21: mol_type = other RNA
gcacaaaagtgaaaactaagg

SEQ ID NO: 88626 - RNA, 21 nt, synthetic construct
  source 1..21: mol_type = other RNA
gcacaaaagtttaactttgat

SEQ ID NO: 88627 - RNA, 21 nt, synthetic construct
  source 1..21: mol_type = other RNA
gcacaaacctggcaatactct

SEQ ID NO: 88628 - RNA, 21 nt, synthetic construct
  source 1..21: mol_type = other RNA
gcacaaaggattgggaagatt

SEQ ID NO: 88629 - RNA, 21 nt, synthetic construct
  source 1..21: mol_type = other RNA
gcacaaataattaacactatg

SEQ ID NO: 88630 - RNA, 21 nt, synthetic construct
  source 1..21: mol_type = other RNA
gcacaacacatgcacactaga

SEQ ID NO: 88631 - RNA, 21 nt, synthetic construct
  source 1..21: mol_type = other RNA
gcacaaccactgatggaattc

SEQ ID NO: 88632 - RNA, 21 nt, synthetic construct
  source 1..21: mol_type = other RNA
gcacaactagtaagtaaaatc

SEQ ID NO: 88633 - RNA, 21 nt, synthetic construct
  source 1..21: mol_type = other RNA
gcacaagacagatgtgcttaa

SEQ ID NO: 88634 - RNA, 21 nt, synthetic construct
  source 1..21: mol_type = other RNA
gcacaagcacagagtcagaaa

SEQ ID NO: 88635 - RNA, 21 nt, synthetic construct
  source 1..21: mol_type = other RNA
gcacaagccttgaaaatatac

SEQ ID NO: 88636 - RNA, 21 nt, synthetic construct
  source 1..21: mol_type = other RNA
gcacaagggaagaggccacaa

SEQ ID NO: 88637 - RNA, 21 nt, synthetic construct
  source 1..21: mol_type = other RNA
gcacaaggtcaagagcggcct

SEQ ID NO: 88638 - RNA, 21 nt, synthetic construct
  source 1..21: mol_type = other RNA
gcacaatactgtctcagtccc

SEQ ID NO: 88639 - RNA, 21 nt, synthetic construct
  source 1..21: mol_type = other RNA
gcacaatcatagctcactaga

SEQ ID NO: 88640 - RNA, 21 nt, synthetic construct
  source 1..21: mol_type = other RNA
gcacaatgcagtattgttaac

SEQ ID NO: 88641 - RNA, 21 nt, synthetic construct
  source 1..21: mol_type = other RNA
gcacaatgcctgccgcagagc

SEQ ID NO: 88642 - RNA, 21 nt, synthetic construct
  source 1..21: mol_type = other RNA
gcacaatggaatattactcag

SEQ ID NO: 88643 - RNA, 21 nt, synthetic construct
  source 1..21: mol_type = other RNA
gcacaatgttgtggatgtcct

SEQ ID NO: 88644 - RNA, 21 nt, synthetic construct
  source 1..21: mol_type = other RNA
gcacaattgcactccagccta

SEQ ID NO: 88645 - RNA, 21 nt, synthetic construct
  source 1..21: mol_type = other RNA
gcacacaacactcagatatca

SEQ ID NO: 88646 - RNA, 21 nt, synthetic construct
  source 1..21: mol_type = other RNA
gcacacaccaaatcatgaaag

SEQ ID NO: 88647 - RNA, 21 nt, synthetic construct
  source 1..21: mol_type = other RNA
gcacacagagggagcgccacg

SEQ ID NO: 88648 - RNA, 21 nt, synthetic construct
  source 1..21: mol_type = other RNA
gcacacaggagaacttgtctc

SEQ ID NO: 88649 - RNA, 21 nt, synthetic construct
  source 1..21: mol_type = other RNA
gcacacagtttgagaagccac

SEQ ID NO: 88650 - RNA, 21 nt, synthetic construct
  source 1..21: mol_type = other RNA
gcacacatccacgcgtaaggg

SEQ ID NO: 88651 - RNA, 21 nt, synthetic construct
  source 1..21: mol_type = other RNA
gcacacatgaacctgcatggt

SEQ ID NO: 88652 - RNA, 21 nt, synthetic construct
  source 1..21: mol_type = other RNA
gcacaccaacatggcacatgt

SEQ ID NO: 88653 - RNA, 21 nt, synthetic construct
  source 1..21: mol_type = other RNA
gcacaccaagacatgttaggt

SEQ ID NO: 88654 - RNA, 21 nt, synthetic construct
  source 1..21: mol_type = other RNA
gcacaccaaggtttctctcca

SEQ ID NO: 88655 - RNA, 21 nt, synthetic construct
  source 1..21: mol_type = other RNA
gcacacccagttatctctgcc

SEQ ID NO: 88656 - RNA, 21 nt, synthetic construct
  source 1..21: mol_type = other RNA
gcacacgccactgcaggtgtt

SEQ ID NO: 88657 - RNA, 21 nt, synthetic construct
  source 1..21: mol_type = other RNA
gcacacgctggaagggagccc

SEQ ID NO: 88658 - RNA, 21 nt, synthetic construct
  source 1..21: mol_type = other RNA
gcacactagacctttcttagg

SEQ ID NO: 88659 - RNA, 21 nt, synthetic construct
  source 1..21: mol_type = other RNA
gcacactccccagtggttgtg

SEQ ID NO: 88660 - RNA, 21 nt, synthetic construct
  source 1..21: mol_type = other RNA
gcacactcttaataactgcct

SEQ ID NO: 88661 - RNA, 21 nt, synthetic construct
  source 1..21: mol_type = other RNA
gcacactttccttggagaaga

SEQ ID NO: 88662 - RNA, 21 nt, synthetic construct
  source 1..21: mol_type = other RNA
gcacagaaccatgtaacaggt

SEQ ID NO: 88663 - RNA, 21 nt, synthetic construct
  source 1..21: mol_type = other RNA
gcacagaattactatatgatc

SEQ ID NO: 88664 - RNA, 21 nt, synthetic construct
  source 1..21: mol_type = other RNA
gcacagaattattgattggca

SEQ ID NO: 88665 - RNA, 21 nt, synthetic construct
  source 1..21: mol_type = other RNA
gcacagactcaagcctgataa

SEQ ID NO: 88666 - RNA, 21 nt, synthetic construct
  source 1..21: mol_type = other RNA
gcacagactgtgccttgatcc

SEQ ID NO: 88667 - RNA, 21 nt, synthetic construct
  source 1..21: mol_type = other RNA
gcacagagccgaaatgcactt

SEQ ID NO: 88668 - RNA, 21 nt, synthetic construct
  source 1..21: mol_type = other RNA
gcacagaggcaacagtcattc

SEQ ID NO: 88669 - RNA, 21 nt, synthetic construct
  source 1..21: mol_type = other RNA
gcacagagtcagaaaattaaa

SEQ ID NO: 88670 - RNA, 21 nt, synthetic construct
  source 1..21: mol_type = other RNA
gcacagcactgttaactgact

SEQ ID NO: 88671 - RNA, 21 nt, synthetic construct
  source 1..21: mol_type = other RNA
gcacagccagtcagtgatgga

SEQ ID NO: 88672 - RNA, 21 nt, synthetic construct
  source 1..21: mol_type = other RNA
gcacagctctcatgagtcctg

SEQ ID NO: 88673 - RNA, 21 nt, synthetic construct
  source 1..21: mol_type = other RNA
gcacaggagagcgacagctac

SEQ ID NO: 88674 - RNA, 21 nt, synthetic construct
  source 1..21: mol_type = other RNA
gcacaggcatcggccgggcgt

SEQ ID NO: 88675 - RNA, 21 nt, synthetic construct
  source 1..21: mol_type = other RNA
gcacaggcatctctctaaaaa

SEQ ID NO: 88676 - RNA, 21 nt, synthetic construct
  source 1..21: mol_type = other RNA
gcacagggagatacttgatta

SEQ ID NO: 88677 - RNA, 21 nt, synthetic construct
  source 1..21: mol_type = other RNA
gcacagtatgcggggtttcag

SEQ ID NO: 88678 - RNA, 21 nt, synthetic construct
  source 1..21: mol_type = other RNA
gcacagtctcccccaggtggt

SEQ ID NO: 88679 - RNA, 21 nt, synthetic construct
  source 1..21: mol_type = other RNA
gcacagtctctgcagagcagg

SEQ ID NO: 88680 - RNA, 21 nt, synthetic construct
  source 1..21: mol_type = other RNA
gcacagtctgtgcttaaggaa

SEQ ID NO: 88681 - RNA, 21 nt, synthetic construct
  source 1..21: mol_type = other RNA
gcacataaaaaaggaatctgg

SEQ ID NO: 88682 - RNA, 21 nt, synthetic construct
  source 1..21: mol_type = other RNA
gcacataaaaggatatgggcc

SEQ ID NO: 88683 - RNA, 21 nt, synthetic construct
  source 1..21: mol_type = other RNA
gcacataatataaaaagacac

SEQ ID NO: 88684 - RNA, 21 nt, synthetic construct
  source 1..21: mol_type = other RNA
gcacatactgcatattgaagc

SEQ ID NO: 88685 - RNA, 21 nt, synthetic construct
  source 1..21: mol_type = other RNA
gcacatctgtcttgtgcatcc

SEQ ID NO: 88686 - RNA, 21 nt, synthetic construct
  source 1..21: mol_type = other RNA
gcacatgcacaaggtcaagag

SEQ ID NO: 88687 - RNA, 21 nt, synthetic construct
  source 1..21: mol_type = other RNA
gcacatgggcatgggtccaag

SEQ ID NO: 88688 - RNA, 21 nt, synthetic construct
  source 1..21: mol_type = other RNA
gcacatggtgataactggtgc

SEQ ID NO: 88689 - RNA, 21 nt, synthetic construct
  source 1..21: mol_type = other RNA
gcacatgttccctagaactta

SEQ ID NO: 88690 - RNA, 21 nt, synthetic construct
  source 1..21: mol_type = other RNA
gcacattaaataagggcattt

SEQ ID NO: 88691 - RNA, 21 nt, synthetic construct
  source 1..21: mol_type = other RNA
gcacattagaatcatccgggg

SEQ ID NO: 88692 - RNA, 21 nt, synthetic construct
  source 1..21: mol_type = other RNA
gcacattcaagcagaaatgag

SEQ ID NO: 88693 - RNA, 21 nt, synthetic construct
  source 1..21: mol_type = other RNA
gcacattccaagagaggaata

SEQ ID NO: 88694 - RNA, 21 nt, synthetic construct
  source 1..21: mol_type = other RNA
gcacattccttccgacctgta

SEQ ID NO: 88695 - RNA, 21 nt, synthetic construct
  source 1..21: mol_type = other RNA
gcacattccttcttcacacat

SEQ ID NO: 88696 - RNA, 21 nt, synthetic construct
  source 1..21: mol_type = other RNA
gcaccaaagattatgttccac

SEQ ID NO: 88697 - RNA, 21 nt, synthetic construct
  source 1..21: mol_type = other RNA
gcaccaacacctgcagtggcg

SEQ ID NO: 88698 - RNA, 21 nt, synthetic construct
  source 1..21: mol_type = other RNA
gcaccaacagatcctcacatc

SEQ ID NO: 88699 - RNA, 21 nt, synthetic construct
  source 1..21: mol_type = other RNA
gcaccaacccttgttggacag

SEQ ID NO: 88700 - RNA, 21 nt, synthetic construct
  source 1..21: mol_type = other RNA
gcaccaactccacattgtctt

SEQ ID NO: 88701 - RNA, 21 nt, synthetic construct
  source 1..21: mol_type = other RNA
gcaccacacctggctaatttt

SEQ ID NO: 88702 - RNA, 21 nt, synthetic construct
  source 1..21: mol_type = other RNA
gcaccacccttgatgtcacaa

SEQ ID NO: 88703 - RNA, 21 nt, synthetic construct
  source 1..21: mol_type = other RNA
gcaccactagagtattaccta

SEQ ID NO: 88704 - RNA, 21 nt, synthetic construct
  source 1..21: mol_type = other RNA
gcaccactgagagggaagttt

SEQ ID NO: 88705 - RNA, 21 nt, synthetic construct
  source 1..21: mol_type = other RNA
gcaccacttcgagaagggaag

SEQ ID NO: 88706 - RNA, 21 nt, synthetic construct
  source 1..21: mol_type = other RNA
gcaccagatactcaatcagtg

SEQ ID NO: 88707 - RNA, 21 nt, synthetic construct
  source 1..21: mol_type = other RNA
gcaccagggcctctgaagaca

SEQ ID NO: 88708 - RNA, 21 nt, synthetic construct
  source 1..21: mol_type = other RNA
gcaccagttatcaccatgtgc

SEQ ID NO: 88709 - RNA, 21 nt, synthetic construct
  source 1..21: mol_type = other RNA
gcaccatctaacagaaataca

SEQ ID NO: 88710 - RNA, 21 nt, synthetic construct
  source 1..21: mol_type = other RNA
gcaccatttattgtcaaggtc

SEQ ID NO: 88711 - RNA, 21 nt, synthetic construct
  source 1..21: mol_type = other RNA
gcaccattttttcaccagcgg

SEQ ID NO: 88712 - RNA, 21 nt, synthetic construct
  source 1..21: mol_type = other RNA
gcacccagagcgggtttcctc

SEQ ID NO: 88713 - RNA, 21 nt, synthetic construct
  source 1..21: mol_type = other RNA
gcaccctatttatgttgcaca

SEQ ID NO: 88714 - RNA, 21 nt, synthetic construct
  source 1..21: mol_type = other RNA
gcaccctcaaatgtctcattg

SEQ ID NO: 88715 - RNA, 21 nt, synthetic construct
  source 1..21: mol_type = other RNA
gcaccctcctcctcctggcca

SEQ ID NO: 88716 - RNA, 21 nt, synthetic construct
  source 1..21: mol_type = other RNA
gcaccctgagcatccccgctg

SEQ ID NO: 88717 - RNA, 21 nt, synthetic construct
  source 1..21: mol_type = other RNA
gcaccgcgcccggccgagaaa

SEQ ID NO: 88718 - RNA, 21 nt, synthetic construct
  source 1..21: mol_type = other RNA
gcaccgtgacagaacaaataa

SEQ ID NO: 88719 - RNA, 21 nt, synthetic construct
  source 1..21: mol_type = other RNA
gcacctaaaaggttgcttaat

SEQ ID NO: 88720 - RNA, 21 nt, synthetic construct
  source 1..21: mol_type = other RNA
gcacctaacaatgattatttc

SEQ ID NO: 88721 - RNA, 21 nt, synthetic construct
  source 1..21: mol_type = other RNA
gcacctaataaaatgtttagc

SEQ ID NO: 88722 - RNA, 21 nt, synthetic construct
  source 1..21: mol_type = other RNA
gcacctccagtgtcctgaatg

SEQ ID NO: 88723 - RNA, 21 nt, synthetic construct
  source 1..21: mol_type = other RNA
gcacctcgggttcaagcccca

SEQ ID NO: 88724 - RNA, 21 nt, synthetic construct
  source 1..21: mol_type = other RNA
gcacctgaacccaggaggcaa

SEQ ID NO: 88725 - RNA, 21 nt, synthetic construct
  source 1..21: mol_type = other RNA
gcacctggccgggatttactt

SEQ ID NO: 88726 - RNA, 21 nt, synthetic construct
  source 1..21: mol_type = other RNA
gcacctgtataaataaaatgt

SEQ ID NO: 88727 - RNA, 21 nt, synthetic construct
  source 1..21: mol_type = other RNA
gcaccttacattgtaatcctg

SEQ ID NO: 88728 - RNA, 21 nt, synthetic construct
  source 1..21: mol_type = other RNA
gcaccttcagaagccctgcag

SEQ ID NO: 88729 - RNA, 21 nt, synthetic construct
  source 1..21: mol_type = other RNA
gcaccttccctactcactgaa

SEQ ID NO: 88730 - RNA, 21 nt, synthetic construct
  source 1..21: mol_type = other RNA
gcaccttgattttgataaaaa

SEQ ID NO: 88731 - RNA, 21 nt, synthetic construct
  source 1..21: mol_type = other RNA
gcacctttattaactagaatt

SEQ ID NO: 88732 - RNA, 21 nt, synthetic construct
  source 1..21: mol_type = other RNA
gcaccttttttggtatttttt

SEQ ID NO: 88733 - RNA, 21 nt, synthetic construct
  source 1..21: mol_type = other RNA
gcacgagaaaagcacaggcat

SEQ ID NO: 88734 - RNA, 21 nt, synthetic construct
  source 1..21: mol_type = other RNA
gcacgccatctcgcccagcta

SEQ ID NO: 88735 - RNA, 21 nt, synthetic construct
  source 1..21: mol_type = other RNA
gcacgctgtgaatgtgaggtg

SEQ ID NO: 88736 - RNA, 21 nt, synthetic construct
  source 1..21: mol_type = other RNA
gcacggacttggcacaggaga

SEQ ID NO: 88737 - RNA, 21 nt, synthetic construct
  source 1..21: mol_type = other RNA
gcacggtgaagaaccgactga

SEQ ID NO: 88738 - RNA, 21 nt, synthetic construct
  source 1..21: mol_type = other RNA
gcacgtactagtcagcacact

SEQ ID NO: 88739 - RNA, 21 nt, synthetic construct
  source 1..21: mol_type = other RNA
gcacgtctgtggtctcagctc

SEQ ID NO: 88740 - RNA, 21 nt, synthetic construct
  source 1..21: mol_type = other RNA
gcacgtgaagctacagactaa

SEQ ID NO: 88741 - RNA, 21 nt, synthetic construct
  source 1..21: mol_type = other RNA
gcacgttagcatcaccatcat

SEQ ID NO: 88742 - RNA, 21 nt, synthetic construct
  source 1..21: mol_type = other RNA
gcacgtttgatctggtcacaa

SEQ ID NO: 88743 - RNA, 21 nt, synthetic construct
  source 1..21: mol_type = other RNA
gcacgtttgctttggagtgag

SEQ ID NO: 88744 - RNA, 21 nt, synthetic construct
  source 1..21: mol_type = other RNA
gcacgtttttagaaatttacc

SEQ ID NO: 88745 - RNA, 21 nt, synthetic construct
  source 1..21: mol_type = other RNA
gcactaaactagtatcaacct

SEQ ID NO: 88746 - RNA, 21 nt, synthetic construct
  source 1..21: mol_type = other RNA
gcactaacaaagggcctgttc

SEQ ID NO: 88747 - RNA, 21 nt, synthetic construct
  source 1..21: mol_type = other RNA
gcactatccacatttggtttt

SEQ ID NO: 88748 - RNA, 21 nt, synthetic construct
  source 1..21: mol_type = other RNA
gcactcaagcaatcctccggc

SEQ ID NO: 88749 - RNA, 21 nt, synthetic construct
  source 1..21: mol_type = other RNA
gcactcagcctgttgggaggt

SEQ ID NO: 88750 - RNA, 21 nt, synthetic construct
  source 1..21: mol_type = other RNA
gcactccacgtgggtgacaga

SEQ ID NO: 88751 - RNA, 21 nt, synthetic construct
  source 1..21: mol_type = other RNA
gcactccacttcccactgcta

SEQ ID NO: 88752 - RNA, 21 nt, synthetic construct
  source 1..21: mol_type = other RNA
gcactccagccttggtaagag

SEQ ID NO: 88753 - RNA, 21 nt, synthetic construct
  source 1..21: mol_type = other RNA
gcactctcaaaattaaattca

SEQ ID NO: 88754 - RNA, 21 nt, synthetic construct
  source 1..21: mol_type = other RNA
gcactctgaatcacctcaagg

SEQ ID NO: 88755 - RNA, 21 nt, synthetic construct
  source 1..21: mol_type = other RNA
gcactctggcctggacaacag

SEQ ID NO: 88756 - RNA, 21 nt, synthetic construct
  source 1..21: mol_type = other RNA
gcactcttttaaacccatttc

SEQ ID NO: 88757 - RNA, 21 nt, synthetic construct
  source 1..21: mol_type = other RNA
gcactgaagccagtccttgtg

SEQ ID NO: 88758 - RNA, 21 nt, synthetic construct
  source 1..21: mol_type = other RNA
gcactgatgtgtagttattat

SEQ ID NO: 88759 - RNA, 21 nt, synthetic construct
  source 1..21: mol_type = other RNA
gcactgcgccaagcagggacg

SEQ ID NO: 88760 - RNA, 21 nt, synthetic construct
  source 1..21: mol_type = other RNA
gcactgctattgataaatcta

SEQ ID NO: 88761 - RNA, 21 nt, synthetic construct
  source 1..21: mol_type = other RNA
gcactggcacagcactgttaa

SEQ ID NO: 88762 - RNA, 21 nt, synthetic construct
  source 1..21: mol_type = other RNA
gcactggctattagttaacct

SEQ ID NO: 88763 - RNA, 21 nt, synthetic construct
  source 1..21: mol_type = other RNA
gcactgggagccctccaggat

SEQ ID NO: 88764 - RNA, 21 nt, synthetic construct
  source 1..21: mol_type = other RNA
gcactgggtccccggaggagg

SEQ ID NO: 88765 - RNA, 21 nt, synthetic construct
  source 1..21: mol_type = other RNA
gcactggtaaggaaacagagt

SEQ ID NO: 88766 - RNA, 21 nt, synthetic construct
  source 1..21: mol_type = other RNA
gcactggtttcagtacacgaa

SEQ ID NO: 88767 - RNA, 21 nt, synthetic construct
  source 1..21: mol_type = other RNA
gcactgtactcctagatactc

SEQ ID NO: 88768 - RNA, 21 nt, synthetic construct
  source 1..21: mol_type = other RNA
gcactgtatggttcttaagat

SEQ ID NO: 88769 - RNA, 21 nt, synthetic construct
  source 1..21: mol_type = other RNA
gcactgtgagccactaaaaca

SEQ ID NO: 88770 - RNA, 21 nt, synthetic construct
  source 1..21: mol_type = other RNA
gcactgttaactgacttacag

SEQ ID NO: 88771 - RNA, 21 nt, synthetic construct
  source 1..21: mol_type = other RNA
gcacttaaaatttagatctca

SEQ ID NO: 88772 - RNA, 21 nt, synthetic construct
  source 1..21: mol_type = other RNA
gcacttagcgctgatgtgttg

SEQ ID NO: 88773 - RNA, 21 nt, synthetic construct
  source 1..21: mol_type = other RNA
gcacttccattttgcttaata

SEQ ID NO: 88774 - RNA, 21 nt, synthetic construct
  source 1..21: mol_type = other RNA
gcacttctgatatcctgtaaa

SEQ ID NO: 88775 - RNA, 21 nt, synthetic construct
  source 1..21: mol_type = other RNA
gcacttgggatgtttctacct

SEQ ID NO: 88776 - RNA, 21 nt, synthetic construct
  source 1..21: mol_type = other RNA
gcacttggggaggccaaggca

SEQ ID NO: 88777 - RNA, 21 nt, synthetic construct
  source 1..21: mol_type = other RNA
gcacttggtaagctgtgagtc

SEQ ID NO: 88778 - RNA, 21 nt, synthetic construct
  source 1..21: mol_type = other RNA
gcactttcctgataaggggct

SEQ ID NO: 88779 - RNA, 21 nt, synthetic construct
  source 1..21: mol_type = other RNA
gcactttcgtatttttgttat

SEQ ID NO: 88780 - RNA, 21 nt, synthetic construct
  source 1..21: mol_type = other RNA
gcacttttaaggcttggaaaa

SEQ ID NO: 88781 - RNA, 21 nt, synthetic construct
  source 1..21: mol_type = other RNA
gcacttttgtactacttgtca

SEQ ID NO: 88782 - RNA, 21 nt, synthetic construct
  source 1..21: mol_type = other RNA
gcactttttaccaagttgaat

SEQ ID NO: 88783 - RNA, 21 nt, synthetic construct
  source 1..21: mol_type = other RNA
gcagaaaataaaccaagtttg

SEQ ID NO: 88784 - RNA, 21 nt, synthetic construct
  source 1..21: mol_type = other RNA
gcagaaaatcagtgtgaaagt

SEQ ID NO: 88785 - RNA, 21 nt, synthetic construct
  source 1..21: mol_type = other RNA
gcagaaacacaggactgtgtg

SEQ ID NO: 88786 - RNA, 21 nt, synthetic construct
  source 1..21: mol_type = other RNA
gcagaaaccagttgtaatttt

SEQ ID NO: 88787 - RNA, 21 nt, synthetic construct
  source 1..21: mol_type = other RNA
gcagaaagttactattttcat

SEQ ID NO: 88788 - RNA, 21 nt, synthetic construct
  source 1..21: mol_type = other RNA
gcagaaatacagaccgatgga

SEQ ID NO: 88789 - RNA, 21 nt, synthetic construct
  source 1..21: mol_type = other RNA
gcagaaatctaccaaacattg

SEQ ID NO: 88790 - RNA, 21 nt, synthetic construct
  source 1..21: mol_type = other RNA
gcagaaatgacaagtaaatgc

SEQ ID NO: 88791 - RNA, 21 nt, synthetic construct
  source 1..21: mol_type = other RNA
gcagaaatgagttccagtcct

SEQ ID NO: 88792 - RNA, 21 nt, synthetic construct
  source 1..21: mol_type = other RNA
gcagaacaaactgcgtggttt

SEQ ID NO: 88793 - RNA, 21 nt, synthetic construct
  source 1..21: mol_type = other RNA
gcagaacacactgctcttcta

SEQ ID NO: 88794 - RNA, 21 nt, synthetic construct
  source 1..21: mol_type = other RNA
gcagaacagtgtttacacacc

SEQ ID NO: 88795 - RNA, 21 nt, synthetic construct
  source 1..21: mol_type = other RNA
gcagaaccacctgggggagac

SEQ ID NO: 88796 - RNA, 21 nt, synthetic construct
  source 1..21: mol_type = other RNA
gcagaaccactgagcacaatg

SEQ ID NO: 88797 - RNA, 21 nt, synthetic construct
  source 1..21: mol_type = other RNA
gcagaaccttagaaatttaag

SEQ ID NO: 88798 - RNA, 21 nt, synthetic construct
  source 1..21: mol_type = other RNA
gcagaactaagaccccagtag

SEQ ID NO: 88799 - RNA, 21 nt, synthetic construct
  source 1..21: mol_type = other RNA
gcagaactccacctcagaaac

SEQ ID NO: 88800 - RNA, 21 nt, synthetic construct
  source 1..21: mol_type = other RNA
gcagaactggggcttgaaccc

SEQ ID NO: 88801 - RNA, 21 nt, synthetic construct
  source 1..21: mol_type = other RNA
gcagaagagtgaagctggacc

SEQ ID NO: 88802 - RNA, 21 nt, synthetic construct
  source 1..21: mol_type = other RNA
gcagaaggagaaaccatttac

SEQ ID NO: 88803 - RNA, 21 nt, synthetic construct
  source 1..21: mol_type = other RNA
gcagaaggaggaaaataattt

SEQ ID NO: 88804 - RNA, 21 nt, synthetic construct
  source 1..21: mol_type = other RNA
gcagaagggaaaggatgacct

SEQ ID NO: 88805 - RNA, 21 nt, synthetic construct
  source 1..21: mol_type = other RNA
gcagaaggtgagggactgagc

SEQ ID NO: 88806 - RNA, 21 nt, synthetic construct
  source 1..21: mol_type = other RNA
gcagaatccccaaataacatg

SEQ ID NO: 88807 - RNA, 21 nt, synthetic construct
  source 1..21: mol_type = other RNA
gcagaatgacagaaaatatct

SEQ ID NO: 88808 - RNA, 21 nt, synthetic construct
  source 1..21: mol_type = other RNA
gcagaatggccctgcgattgg

SEQ ID NO: 88809 - RNA, 21 nt, synthetic construct
  source 1..21: mol_type = other RNA
gcagaatgtccatcaggaaaa

SEQ ID NO: 88810 - RNA, 21 nt, synthetic construct
  source 1..21: mol_type = other RNA
gcagaatgtgacctgtccttg

SEQ ID NO: 88811 - RNA, 21 nt, synthetic construct
  source 1..21: mol_type = other RNA
gcagaattactgacaatagcc

SEQ ID NO: 88812 - RNA, 21 nt, synthetic construct
  source 1..21: mol_type = other RNA
gcagaattatagagggcctaa

SEQ ID NO: 88813 - RNA, 21 nt, synthetic construct
  source 1..21: mol_type = other RNA
gcagaattcaaaaacactgta

SEQ ID NO: 88814 - RNA, 21 nt, synthetic construct
  source 1..21: mol_type = other RNA
gcagacaataattcttcctgt

SEQ ID NO: 88815 - RNA, 21 nt, synthetic construct
  source 1..21: mol_type = other RNA
gcagacacaccatgacagagt

SEQ ID NO: 88816 - RNA, 21 nt, synthetic construct
  source 1..21: mol_type = other RNA
gcagacactgggttctcacca

SEQ ID NO: 88817 - RNA, 21 nt, synthetic construct
  source 1..21: mol_type = other RNA
gcagacagaaagacagggaga

SEQ ID NO: 88818 - RNA, 21 nt, synthetic construct
  source 1..21: mol_type = other RNA
gcagacatgcacgagaaaagc

SEQ ID NO: 88819 - RNA, 21 nt, synthetic construct
  source 1..21: mol_type = other RNA
gcagaccaagaaaggacttca

SEQ ID NO: 88820 - RNA, 21 nt, synthetic construct
  source 1..21: mol_type = other RNA
gcagactccttcccctggtcg

SEQ ID NO: 88821 - RNA, 21 nt, synthetic construct
  source 1..21: mol_type = other RNA
gcagactcttgtcccggcatg

SEQ ID NO: 88822 - RNA, 21 nt, synthetic construct
  source 1..21: mol_type = other RNA
gcagactgcaggtcttcaacc

SEQ ID NO: 88823 - RNA, 21 nt, synthetic construct
  source 1..21: mol_type = other RNA
gcagagaaactggaatcaatc

SEQ ID NO: 88824 - RNA, 21 nt, synthetic construct
  source 1..21: mol_type = other RNA
gcagagaactgactgaaggat

SEQ ID NO: 88825 - RNA, 21 nt, synthetic construct
  source 1..21: mol_type = other RNA
gcagagaagtgaagcttcaaa

SEQ ID NO: 88826 - RNA, 21 nt, synthetic construct
  source 1..21: mol_type = other RNA
gcagagacacacatcagacac

SEQ ID NO: 88827 - RNA, 21 nt, synthetic construct
  source 1..21: mol_type = other RNA
gcagagacggggtcccactat

SEQ ID NO: 88828 - RNA, 21 nt, synthetic construct
  source 1..21: mol_type = other RNA
gcagagactggatagcaactt

SEQ ID NO: 88829 - RNA, 21 nt, synthetic construct
  source 1..21: mol_type = other RNA
gcagagactgtgcttccacag

SEQ ID NO: 88830 - RNA, 21 nt, synthetic construct
  source 1..21: mol_type = other RNA
gcagagagagaagatgacatt

SEQ ID NO: 88831 - RNA, 21 nt, synthetic construct
  source 1..21: mol_type = other RNA
gcagagagagtaactggtcca

SEQ ID NO: 88832 - RNA, 21 nt, synthetic construct
  source 1..21: mol_type = other RNA
gcagagagatggtgggagagg

SEQ ID NO: 88833 - RNA, 21 nt, synthetic construct
  source 1..21: mol_type = other RNA
gcagagataactgggtgtgca

SEQ ID NO: 88834 - RNA, 21 nt, synthetic construct
  source 1..21: mol_type = other RNA
gcagagcaaactcagatctga

SEQ ID NO: 88835 - RNA, 21 nt, synthetic construct
  source 1..21: mol_type = other RNA
gcagagcaagcacgttagcat

SEQ ID NO: 88836 - RNA, 21 nt, synthetic construct
  source 1..21: mol_type = other RNA
gcagagcaggctccacttggg

SEQ ID NO: 88837 - RNA, 21 nt, synthetic construct
  source 1..21: mol_type = other RNA
gcagagcaggggtggggggat

SEQ ID NO: 88838 - RNA, 21 nt, synthetic construct
  source 1..21: mol_type = other RNA
gcagaggccaaatgaaaggcg

SEQ ID NO: 88839 - RNA, 21 nt, synthetic construct
  source 1..21: mol_type = other RNA
gcagaggtcaggaaggcagga

SEQ ID NO: 88840 - RNA, 21 nt, synthetic construct
  source 1..21: mol_type = other RNA
gcagaggttgcagtgaagccg

SEQ ID NO: 88841 - RNA, 21 nt, synthetic construct
  source 1..21: mol_type = other RNA
gcagagtagagaaggctttgt

SEQ ID NO: 88842 - RNA, 21 nt, synthetic construct
  source 1..21: mol_type = other RNA
gcagagtcctgagggtgagac

SEQ ID NO: 88843 - RNA, 21 nt, synthetic construct
  source 1..21: mol_type = other RNA
gcagagtgttcaaaagcccca

SEQ ID NO: 88844 - RNA, 21 nt, synthetic construct
  source 1..21: mol_type = other RNA
gcagataagatccaagtattg

SEQ ID NO: 88845 - RNA, 21 nt, synthetic construct
  source 1..21: mol_type = other RNA
gcagatcaattgaccaaacat

SEQ ID NO: 88846 - RNA, 21 nt, synthetic construct
  source 1..21: mol_type = other RNA
gcagatcacaaggtcagaagt

SEQ ID NO: 88847 - RNA, 21 nt, synthetic construct
  source 1..21: mol_type = other RNA
gcagatcacgaggtcgagagt

SEQ ID NO: 88848 - RNA, 21 nt, synthetic construct
  source 1..21: mol_type = other RNA
gcagatcagtaacaaataaga

SEQ ID NO: 88849 - RNA, 21 nt, synthetic construct
  source 1..21: mol_type = other RNA
gcagatctgctgtaagctggt

SEQ ID NO: 88850 - RNA, 21 nt, synthetic construct
  source 1..21: mol_type = other RNA
gcagatctgcttgcagacaat

SEQ ID NO: 88851 - RNA, 21 nt, synthetic construct
  source 1..21: mol_type = other RNA
gcagatgaatgagcaaggtcg

SEQ ID NO: 88852 - RNA, 21 nt, synthetic construct
  source 1..21: mol_type = other RNA
gcagatgttgcggtgagcaga

SEQ ID NO: 88853 - RNA, 21 nt, synthetic construct
  source 1..21: mol_type = other RNA
gcagattcatcttgacttcac

SEQ ID NO: 88854 - RNA, 21 nt, synthetic construct
  source 1..21: mol_type = other RNA
gcagatttctttttactcatg

SEQ ID NO: 88855 - RNA, 21 nt, synthetic construct
  source 1..21: mol_type = other RNA
gcagcaaaagcaccactgaga

SEQ ID NO: 88856 - RNA, 21 nt, synthetic construct
  source 1..21: mol_type = other RNA
gcagcaaagcaagaaaaagaa

SEQ ID NO: 88857 - RNA, 21 nt, synthetic construct
  source 1..21: mol_type = other RNA
gcagcaacggaaatgagtgag

SEQ ID NO: 88858 - RNA, 21 nt, synthetic construct
  source 1..21: mol_type = other RNA
gcagcaagcagtaaatatact

SEQ ID NO: 88859 - RNA, 21 nt, synthetic construct
  source 1..21: mol_type = other RNA
gcagcaagggtggctggcact

SEQ ID NO: 88860 - RNA, 21 nt, synthetic construct
  source 1..21: mol_type = other RNA
gcagcaattatttgaataagg

SEQ ID NO: 88861 - RNA, 21 nt, synthetic construct
  source 1..21: mol_type = other RNA
gcagcactgatgtgtagttat

SEQ ID NO: 88862 - RNA, 21 nt, synthetic construct
  source 1..21: mol_type = other RNA
gcagcagagaagtgaagcttc

SEQ ID NO: 88863 - RNA, 21 nt, synthetic construct
  source 1..21: mol_type = other RNA
gcagcaggggctaagtagtgg

SEQ ID NO: 88864 - RNA, 21 nt, synthetic construct
  source 1..21: mol_type = other RNA
gcagcatgctcactgtctcca

SEQ ID NO: 88865 - RNA, 21 nt, synthetic construct
  source 1..21: mol_type = other RNA
gcagcattgtttacagtagcc

SEQ ID NO: 88866 - RNA, 21 nt, synthetic construct
  source 1..21: mol_type = other RNA
gcagccactatagaaaatagt

SEQ ID NO: 88867 - RNA, 21 nt, synthetic construct
  source 1..21: mol_type = other RNA
gcagccagagagtggaaagag

SEQ ID NO: 88868 - RNA, 21 nt, synthetic construct
  source 1..21: mol_type = other RNA
gcagccagatttgatcctgga

SEQ ID NO: 88869 - RNA, 21 nt, synthetic construct
  source 1..21: mol_type = other RNA
gcagccatggctcactgcggc

SEQ ID NO: 88870 - RNA, 21 nt, synthetic construct
  source 1..21: mol_type = other RNA
gcagccccgacgcctttcatt

SEQ ID NO: 88871 - RNA, 21 nt, synthetic construct
  source 1..21: mol_type = other RNA
gcagccccgcttcagttggtg

SEQ ID NO: 88872 - RNA, 21 nt, synthetic construct
  source 1..21: mol_type = other RNA
gcagcccctgccacactccag

SEQ ID NO: 88873 - RNA, 21 nt, synthetic construct
  source 1..21: mol_type = other RNA
gcagcccgacctccagcgcta

SEQ ID NO: 88874 - RNA, 21 nt, synthetic construct
  source 1..21: mol_type = other RNA
gcagcctctaatcaggttggg

SEQ ID NO: 88875 - RNA, 21 nt, synthetic construct
  source 1..21: mol_type = other RNA
gcagccttccctgaacaatga

SEQ ID NO: 88876 - RNA, 21 nt, synthetic construct
  source 1..21: mol_type = other RNA
gcagccttctctcttccaaat

SEQ ID NO: 88877 - RNA, 21 nt, synthetic construct
  source 1..21: mol_type = other RNA
gcagccttggaggagccctgc

SEQ ID NO: 88878 - RNA, 21 nt, synthetic construct
  source 1..21: mol_type = other RNA
gcagcggggatgctcagggtg

SEQ ID NO: 88879 - RNA, 21 nt, synthetic construct
  source 1..21: mol_type = other RNA
gcagcgtaactccatcttcac

SEQ ID NO: 88880 - RNA, 21 nt, synthetic construct
  source 1..21: mol_type = other RNA
gcagctaagcaccaacagatc

SEQ ID NO: 88881 - RNA, 21 nt, synthetic construct
  source 1..21: mol_type = other RNA
gcagctacctgttgattgttg

SEQ ID NO: 88882 - RNA, 21 nt, synthetic construct
  source 1..21: mol_type = other RNA
gcagctctagcaaacaaacac

SEQ ID NO: 88883 - RNA, 21 nt, synthetic construct
  source 1..21: mol_type = other RNA
gcaggaaaagctaccctcgag

SEQ ID NO: 88884 - RNA, 21 nt, synthetic construct
  source 1..21: mol_type = other RNA
gcaggaaacttccagaaactt

SEQ ID NO: 88885 - RNA, 21 nt, synthetic construct
  source 1..21: mol_type = other RNA
gcaggaaaggtggggaaggga

SEQ ID NO: 88886 - RNA, 21 nt, synthetic construct
  source 1..21: mol_type = other RNA
gcaggaactcatattagtctg

SEQ ID NO: 88887 - RNA, 21 nt, synthetic construct
  source 1..21: mol_type = other RNA
gcaggaccaactttaagcaaa

SEQ ID NO: 88888 - RNA, 21 nt, synthetic construct
  source 1..21: mol_type = other RNA
gcaggactgcttgaggccacg

SEQ ID NO: 88889 - RNA, 21 nt, synthetic construct
  source 1..21: mol_type = other RNA
gcaggactggactccttctga

SEQ ID NO: 88890 - RNA, 21 nt, synthetic construct
  source 1..21: mol_type = other RNA
gcaggagaaacatggcttaga

SEQ ID NO: 88891 - RNA, 21 nt, synthetic construct
  source 1..21: mol_type = other RNA
gcaggagaactgcctggaccc

SEQ ID NO: 88892 - RNA, 21 nt, synthetic construct
  source 1..21: mol_type = other RNA
gcaggagaatctgggaggtgg

SEQ ID NO: 88893 - RNA, 21 nt, synthetic construct
  source 1..21: mol_type = other RNA
gcaggagaatggcatgaaccc

SEQ ID NO: 88894 - RNA, 21 nt, synthetic construct
  source 1..21: mol_type = other RNA
gcaggagagtcgcttgaacct

SEQ ID NO: 88895 - RNA, 21 nt, synthetic construct
  source 1..21: mol_type = other RNA
gcaggagcagtgtgaatagga

SEQ ID NO: 88896 - RNA, 21 nt, synthetic construct
  source 1..21: mol_type = other RNA
gcaggagcatagcttgaacca

SEQ ID NO: 88897 - RNA, 21 nt, synthetic construct
  source 1..21: mol_type = other RNA
gcaggagccttgctgttgtaa

SEQ ID NO: 88898 - RNA, 21 nt, synthetic construct
  source 1..21: mol_type = other RNA
gcaggaggcacctgaacccag

SEQ ID NO: 88899 - RNA, 21 nt, synthetic construct
  source 1..21: mol_type = other RNA
gcaggaggcctcagaattaat

SEQ ID NO: 88900 - RNA, 21 nt, synthetic construct
  source 1..21: mol_type = other RNA
gcaggagtttgagactgcagt

SEQ ID NO: 88901 - RNA, 21 nt, synthetic construct
  source 1..21: mol_type = other RNA
gcaggattcttgttaagcatt

SEQ ID NO: 88902 - RNA, 21 nt, synthetic construct
  source 1..21: mol_type = other RNA
gcaggcaaacagcgccactta

SEQ ID NO: 88903 - RNA, 21 nt, synthetic construct
  source 1..21: mol_type = other RNA
gcaggcaccttcagaagccct

SEQ ID NO: 88904 - RNA, 21 nt, synthetic construct
  source 1..21: mol_type = other RNA
gcaggcagaatgtgacctgtc

SEQ ID NO: 88905 - RNA, 21 nt, synthetic construct
  source 1..21: mol_type = other RNA
gcaggcagatcacgaggtcga

SEQ ID NO: 88906 - RNA, 21 nt, synthetic construct
  source 1..21: mol_type = other RNA
gcaggcattgtgctcagtggt

SEQ ID NO: 88907 - RNA, 21 nt, synthetic construct
  source 1..21: mol_type = other RNA
gcaggccagatatccataagg

SEQ ID NO: 88908 - RNA, 21 nt, synthetic construct
  source 1..21: mol_type = other RNA
gcaggccctgagaagtcaaag

SEQ ID NO: 88909 - RNA, 21 nt, synthetic construct
  source 1..21: mol_type = other RNA
gcaggccttcgaggcatctag

SEQ ID NO: 88910 - RNA, 21 nt, synthetic construct
  source 1..21: mol_type = other RNA
gcaggcgcctggacaggatcc

SEQ ID NO: 88911 - RNA, 21 nt, synthetic construct
  source 1..21: mol_type = other RNA
gcaggctccacttgggtggaa

SEQ ID NO: 88912 - RNA, 21 nt, synthetic construct
  source 1..21: mol_type = other RNA
gcaggctgaactgctgacaga

SEQ ID NO: 88913 - RNA, 21 nt, synthetic construct
  source 1..21: mol_type = other RNA
gcaggctttttacccggagag

SEQ ID NO: 88914 - RNA, 21 nt, synthetic construct
  source 1..21: mol_type = other RNA
gcagggaaatcattcaggaca

SEQ ID NO: 88915 - RNA, 21 nt, synthetic construct
  source 1..21: mol_type = other RNA
gcagggaaatggagggccaga

SEQ ID NO: 88916 - RNA, 21 nt, synthetic construct
  source 1..21: mol_type = other RNA
gcagggaccacaggcatgcgc

SEQ ID NO: 88917 - RNA, 21 nt, synthetic construct
  source 1..21: mol_type = other RNA
gcagggactacagtcacacac

SEQ ID NO: 88918 - RNA, 21 nt, synthetic construct
  source 1..21: mol_type = other RNA
gcagggactcccatatctaca

SEQ ID NO: 88919 - RNA, 21 nt, synthetic construct
  source 1..21: mol_type = other RNA
gcagggagagagaaactttac

SEQ ID NO: 88920 - RNA, 21 nt, synthetic construct
  source 1..21: mol_type = other RNA
gcagggaggggtccccagcat

SEQ ID NO: 88921 - RNA, 21 nt, synthetic construct
  source 1..21: mol_type = other RNA
gcagggatgctgcgagccccg

SEQ ID NO: 88922 - RNA, 21 nt, synthetic construct
  source 1..21: mol_type = other RNA
gcagggccattctgctatgaa

SEQ ID NO: 88923 - RNA, 21 nt, synthetic construct
  source 1..21: mol_type = other RNA
gcagggctcctccaaggctgc

SEQ ID NO: 88924 - RNA, 21 nt, synthetic construct
  source 1..21: mol_type = other RNA
gcagggcttctgaaggtgcct

SEQ ID NO: 88925 - RNA, 21 nt, synthetic construct
  source 1..21: mol_type = other RNA
gcagggcttggtggcccacac

SEQ ID NO: 88926 - RNA, 21 nt, synthetic construct
  source 1..21: mol_type = other RNA
gcaggggaaggcttcgagttc

SEQ ID NO: 88927 - RNA, 21 nt, synthetic construct
  source 1..21: mol_type = other RNA
gcaggggctaagtagtggcag

SEQ ID NO: 88928 - RNA, 21 nt, synthetic construct
  source 1..21: mol_type = other RNA
gcaggggctgcatcatggtgg

SEQ ID NO: 88929 - RNA, 21 nt, synthetic construct
  source 1..21: mol_type = other RNA
gcaggggtggggggatgtaga

SEQ ID NO: 88930 - RNA, 21 nt, synthetic construct
  source 1..21: mol_type = other RNA
gcagggtaaagtcaattctag

SEQ ID NO: 88931 - RNA, 21 nt, synthetic construct
  source 1..21: mol_type = other RNA
gcagggtaggaaggcggtggg

SEQ ID NO: 88932 - RNA, 21 nt, synthetic construct
  source 1..21: mol_type = other RNA
gcagggtcatgcacacgctgg

SEQ ID NO: 88933 - RNA, 21 nt, synthetic construct
  source 1..21: mol_type = other RNA
gcagggtgaaacttgaatact

SEQ ID NO: 88934 - RNA, 21 nt, synthetic construct
  source 1..21: mol_type = other RNA
gcagggtggagtccaaccaat

SEQ ID NO: 88935 - RNA, 21 nt, synthetic construct
  source 1..21: mol_type = other RNA
gcagggtgggcccttaatcca

SEQ ID NO: 88936 - RNA, 21 nt, synthetic construct
  source 1..21: mol_type = other RNA
gcaggtatttctaaatcaaca

SEQ ID NO: 88937 - RNA, 21 nt, synthetic construct
  source 1..21: mol_type = other RNA
gcaggtcacctagcctctctg

SEQ ID NO: 88938 - RNA, 21 nt, synthetic construct
  source 1..21: mol_type = other RNA
gcaggtcatgacttttttgcc

SEQ ID NO: 88939 - RNA, 21 nt, synthetic construct
  source 1..21: mol_type = other RNA
gcaggtcttcaacctcaactt

SEQ ID NO: 88940 - RNA, 21 nt, synthetic construct
  source 1..21: mol_type = other RNA
gcaggtggaaggcctgatagc

SEQ ID NO: 88941 - RNA, 21 nt, synthetic construct
  source 1..21: mol_type = other RNA
gcaggtggatatctgaggtca

SEQ ID NO: 88942 - RNA, 21 nt, synthetic construct
  source 1..21: mol_type = other RNA
gcaggtggatcaggagattga

SEQ ID NO: 88943 - RNA, 21 nt, synthetic construct
  source 1..21: mol_type = other RNA
gcaggtgtgggccaccaagcc

SEQ ID NO: 88944 - RNA, 21 nt, synthetic construct
  source 1..21: mol_type = other RNA
gcaggtgttggtgcatttggg

SEQ ID NO: 88945 - RNA, 21 nt, synthetic construct
  source 1..21: mol_type = other RNA
gcaggttcatgtgtgcttaca

SEQ ID NO: 88946 - RNA, 21 nt, synthetic construct
  source 1..21: mol_type = other RNA
gcaggttcattttaataagct

SEQ ID NO: 88947 - RNA, 21 nt, synthetic construct
  source 1..21: mol_type = other RNA
gcaggttgatactagtttagt

SEQ ID NO: 88948 - RNA, 21 nt, synthetic construct
  source 1..21: mol_type = other RNA
gcaggttgcattaatgcttca

SEQ ID NO: 88949 - RNA, 21 nt, synthetic construct
  source 1..21: mol_type = other RNA
gcaggtttactccaagaaggc

SEQ ID NO: 88950 - RNA, 21 nt, synthetic construct
  source 1..21: mol_type = other RNA
gcaggtttaggaagcacattc

SEQ ID NO: 88951 - RNA, 21 nt, synthetic construct
  source 1..21: mol_type = other RNA
gcaggtttcaagtgaaccaaa

SEQ ID NO: 88952 - RNA, 21 nt, synthetic construct
  source 1..21: mol_type = other RNA
gcagtaaaatgaaaaaaccta

SEQ ID NO: 88953 - RNA, 21 nt, synthetic construct
  source 1..21: mol_type = other RNA
gcagtaaatatactgactagt

SEQ ID NO: 88954 - RNA, 21 nt, synthetic construct
  source 1..21: mol_type = other RNA
gcagtaaatgcctacattaaa

SEQ ID NO: 88955 - RNA, 21 nt, synthetic construct
  source 1..21: mol_type = other RNA
gcagtaccattccccttgcca

SEQ ID NO: 88956 - RNA, 21 nt, synthetic construct
  source 1..21: mol_type = other RNA
gcagtacttgtctttttgtga

SEQ ID NO: 88957 - RNA, 21 nt, synthetic construct
  source 1..21: mol_type = other RNA
gcagtagctcatcatttatac

SEQ ID NO: 88958 - RNA, 21 nt, synthetic construct
  source 1..21: mol_type = other RNA
gcagtaggcttagataggatg

SEQ ID NO: 88959 - RNA, 21 nt, synthetic construct
  source 1..21: mol_type = other RNA
gcagtagtaaagcaaatgtga

SEQ ID NO: 88960 - RNA, 21 nt, synthetic construct
  source 1..21: mol_type = other RNA
gcagtagtattgaactgttac

SEQ ID NO: 88961 - RNA, 21 nt, synthetic construct
  source 1..21: mol_type = other RNA
gcagtatcttgaagaaaccaa

SEQ ID NO: 88962 - RNA, 21 nt, synthetic construct
  source 1..21: mol_type = other RNA
gcagtatgcatagatcacaag

SEQ ID NO: 88963 - RNA, 21 nt, synthetic construct
  source 1..21: mol_type = other RNA
gcagtatgtaggaaactttgc

SEQ ID NO: 88964 - RNA, 21 nt, synthetic construct
  source 1..21: mol_type = other RNA
gcagtatgtgccatttttata

SEQ ID NO: 88965 - RNA, 21 nt, synthetic construct
  source 1..21: mol_type = other RNA
gcagtattgttaactgtagag

SEQ ID NO: 88966 - RNA, 21 nt, synthetic construct
  source 1..21: mol_type = other RNA
gcagtccccggtctttcctga

SEQ ID NO: 88967 - RNA, 21 nt, synthetic construct
  source 1..21: mol_type = other RNA
gcagtcctctactttcacata

SEQ ID NO: 88968 - RNA, 21 nt, synthetic construct
  source 1..21: mol_type = other RNA
gcagtcctctcactccaaagc

SEQ ID NO: 88969 - RNA, 21 nt, synthetic construct
  source 1..21: mol_type = other RNA
gcagtcctgccttggcctccc

SEQ ID NO: 88970 - RNA, 21 nt, synthetic construct
  source 1..21: mol_type = other RNA
gcagtctaaccattaacagct

SEQ ID NO: 88971 - RNA, 21 nt, synthetic construct
  source 1..21: mol_type = other RNA
gcagtctaggaaaagacttga

SEQ ID NO: 88972 - RNA, 21 nt, synthetic construct
  source 1..21: mol_type = other RNA
gcagtctagtccatgaagaaa

SEQ ID NO: 88973 - RNA, 21 nt, synthetic construct
  source 1..21: mol_type = other RNA
gcagtctcaaactcctgcact

SEQ ID NO: 88974 - RNA, 21 nt, synthetic construct
  source 1..21: mol_type = other RNA
gcagtctctgctcactgcaac

SEQ ID NO: 88975 - RNA, 21 nt, synthetic construct
  source 1..21: mol_type = other RNA
gcagtctgcaggcagaatgtg

SEQ ID NO: 88976 - RNA, 21 nt, synthetic construct
  source 1..21: mol_type = other RNA
gcagtctgtcctcgtaaaagc

SEQ ID NO: 88977 - RNA, 21 nt, synthetic construct
  source 1..21: mol_type = other RNA
gcagtcttaaccattgagcca

SEQ ID NO: 88978 - RNA, 21 nt, synthetic construct
  source 1..21: mol_type = other RNA
gcagtgaaagtctccctaacc

SEQ ID NO: 88979 - RNA, 21 nt, synthetic construct
  source 1..21: mol_type = other RNA
gcagtgaacatgggaatgcat

SEQ ID NO: 88980 - RNA, 21 nt, synthetic construct
  source 1..21: mol_type = other RNA
gcagtgagcccagagatccca

SEQ ID NO: 88981 - RNA, 21 nt, synthetic construct
  source 1..21: mol_type = other RNA
gcagtgctgaaagctagaaga

SEQ ID NO: 88982 - RNA, 21 nt, synthetic construct
  source 1..21: mol_type = other RNA
gcagtgcttagcgctggaggt

SEQ ID NO: 88983 - RNA, 21 nt, synthetic construct
  source 1..21: mol_type = other RNA
gcagtggatgactaggctcct

SEQ ID NO: 88984 - RNA, 21 nt, synthetic construct
  source 1..21: mol_type = other RNA
gcagtggcgcagccatggctc

SEQ ID NO: 88985 - RNA, 21 nt, synthetic construct
  source 1..21: mol_type = other RNA
gcagtggcgtgtgcccaggct

SEQ ID NO: 88986 - RNA, 21 nt, synthetic construct
  source 1..21: mol_type = other RNA
gcagtggcttcctaactggtc

SEQ ID NO: 88987 - RNA, 21 nt, synthetic construct
  source 1..21: mol_type = other RNA
gcagtgggaagtggagtgcga

SEQ ID NO: 88988 - RNA, 21 nt, synthetic construct
  source 1..21: mol_type = other RNA
gcagtggtgtggtcttgtctc

SEQ ID NO: 88989 - RNA, 21 nt, synthetic construct
  source 1..21: mol_type = other RNA
gcagtgtccatctcccatcac

SEQ ID NO: 88990 - RNA, 21 nt, synthetic construct
  source 1..21: mol_type = other RNA
gcagtgtgaataggaaagtga

SEQ ID NO: 88991 - RNA, 21 nt, synthetic construct
  source 1..21: mol_type = other RNA
gcagtgtgttctgccttgagg

SEQ ID NO: 88992 - RNA, 21 nt, synthetic construct
  source 1..21: mol_type = other RNA
gcagtgtttcctagattccct

SEQ ID NO: 88993 - RNA, 21 nt, synthetic construct
  source 1..21: mol_type = other RNA
gcagttactcctgagcaagga

SEQ ID NO: 88994 - RNA, 21 nt, synthetic construct
  source 1..21: mol_type = other RNA
gcagttagcatgcctgacaaa

SEQ ID NO: 88995 - RNA, 21 nt, synthetic construct
  source 1..21: mol_type = other RNA
gcagttattaagagtgtgctg

SEQ ID NO: 88996 - RNA, 21 nt, synthetic construct
  source 1..21: mol_type = other RNA
gcagttcaagcaccacttcga

SEQ ID NO: 88997 - RNA, 21 nt, synthetic construct
  source 1..21: mol_type = other RNA
gcagttcagcctgcagaagga

SEQ ID NO: 88998 - RNA, 21 nt, synthetic construct
  source 1..21: mol_type = other RNA
gcagttctgtacccttacgcg

SEQ ID NO: 88999 - RNA, 21 nt, synthetic construct
  source 1..21: mol_type = other RNA
gcagttgagttttcaaccttt

SEQ ID NO: 89000 - RNA, 21 nt, synthetic construct
  source 1..21: mol_type = other RNA
gcagttgatgcaatttgtttt

SEQ ID NO: 89001 - RNA, 21 nt, synthetic construct
  source 1..21: mol_type = other RNA
gcagttgcttactctaatggg

SEQ ID NO: 89002 - RNA, 21 nt, synthetic construct
  source 1..21: mol_type = other RNA
gcagttggattatatgttcta

SEQ ID NO: 89003 - RNA, 21 nt, synthetic construct
  source 1..21: mol_type = other RNA
gcagttggggactcttatggc

SEQ ID NO: 89004 - RNA, 21 nt, synthetic construct
  source 1..21: mol_type = other RNA
gcagttgtatgccaaaaaatt

SEQ ID NO: 89005 - RNA, 21 nt, synthetic construct
  source 1..21: mol_type = other RNA
gcagtttcacttcttagtaaa

SEQ ID NO: 89006 - RNA, 21 nt, synthetic construct
  source 1..21: mol_type = other RNA
gcagtttgtgttttcactctc

SEQ ID NO: 89007 - RNA, 21 nt, synthetic construct
  source 1..21: mol_type = other RNA
gcagtttgttctgctgttgat

SEQ ID NO: 89008 - RNA, 21 nt, synthetic construct
  source 1..21: mol_type = other RNA
gcagttttaaagaattcgtta

SEQ ID NO: 89009 - RNA, 21 nt, synthetic construct
  source 1..21: mol_type = other RNA
gcagtttttccactaatgtcc

SEQ ID NO: 89010 - RNA, 21 nt, synthetic construct
  source 1..21: mol_type = other RNA
gcataaaaaagatcaaatgac

SEQ ID NO: 89011 - RNA, 21 nt, synthetic construct
  source 1..21: mol_type = other RNA
gcataaacgacagcaggaaaa

SEQ ID NO: 89012 - RNA, 21 nt, synthetic construct
  source 1..21: mol_type = other RNA
gcataaagacagacatttgga

SEQ ID NO: 89013 - RNA, 21 nt, synthetic construct
  source 1..21: mol_type = other RNA
gcataacatctatgaagtaat

SEQ ID NO: 89014 - RNA, 21 nt, synthetic construct
  source 1..21: mol_type = other RNA
gcataaccaaattatttcagt

SEQ ID NO: 89015 - RNA, 21 nt, synthetic construct
  source 1..21: mol_type = other RNA
gcataactcgtaatgcgatga

SEQ ID NO: 89016 - RNA, 21 nt, synthetic construct
  source 1..21: mol_type = other RNA
gcataagacccctcaggtgtc

SEQ ID NO: 89017 - RNA, 21 nt, synthetic construct
  source 1..21: mol_type = other RNA
gcataagccaccgcactcagc

SEQ ID NO: 89018 - RNA, 21 nt, synthetic construct
  source 1..21: mol_type = other RNA
gcataagttctagagatttgc

SEQ ID NO: 89019 - RNA, 21 nt, synthetic construct
  source 1..21: mol_type = other RNA
gcataattggttaaacttggt

SEQ ID NO: 89020 - RNA, 21 nt, synthetic construct
  source 1..21: mol_type = other RNA
gcatacaactgctcataatag

SEQ ID NO: 89021 - RNA, 21 nt, synthetic construct
  source 1..21: mol_type = other RNA
gcatacactcatttcctttca

SEQ ID NO: 89022 - RNA, 21 nt, synthetic construct
  source 1..21: mol_type = other RNA
gcatacaggagttccgatttc

SEQ ID NO: 89023 - RNA, 21 nt, synthetic construct
  source 1..21: mol_type = other RNA
gcataccaagcccggcacggt

SEQ ID NO: 89024 - RNA, 21 nt, synthetic construct
  source 1..21: mol_type = other RNA
gcataccaccacattcggcca

SEQ ID NO: 89025 - RNA, 21 nt, synthetic construct
  source 1..21: mol_type = other RNA
gcatacgtcgtcccccatccc

SEQ ID NO: 89026 - RNA, 21 nt, synthetic construct
  source 1..21: mol_type = other RNA
gcatactgcagcacttttaag

SEQ ID NO: 89027 - RNA, 21 nt, synthetic construct
  source 1..21: mol_type = other RNA
gcatactgtgatgattttaga

SEQ ID NO: 89028 - RNA, 21 nt, synthetic construct
  source 1..21: mol_type = other RNA
gcatactgtgcagtggatgac

SEQ ID NO: 89029 - RNA, 21 nt, synthetic construct
  source 1..21: mol_type = other RNA
gcatactgtggatatctttta

SEQ ID NO: 89030 - RNA, 21 nt, synthetic construct
  source 1..21: mol_type = other RNA
gcatacttagctaatttcaga

SEQ ID NO: 89031 - RNA, 21 nt, synthetic construct
  source 1..21: mol_type = other RNA
gcatactttggaaggtaggag

SEQ ID NO: 89032 - RNA, 21 nt, synthetic construct
  source 1..21: mol_type = other RNA
gcatagactttagagtcagtt

SEQ ID NO: 89033 - RNA, 21 nt, synthetic construct
  source 1..21: mol_type = other RNA
gcatagagatcttgtgtatct

SEQ ID NO: 89034 - RNA, 21 nt, synthetic construct
  source 1..21: mol_type = other RNA
gcatagatcacaaggactggc

SEQ ID NO: 89035 - RNA, 21 nt, synthetic construct
  source 1..21: mol_type = other RNA
gcatagcagaaccttagaaat

SEQ ID NO: 89036 - RNA, 21 nt, synthetic construct
  source 1..21: mol_type = other RNA
gcatagcagggtcatgcacac

SEQ ID NO: 89037 - RNA, 21 nt, synthetic construct
  source 1..21: mol_type = other RNA
gcatagcttgaaccagggagg

SEQ ID NO: 89038 - RNA, 21 nt, synthetic construct
  source 1..21: mol_type = other RNA
gcatagggatgttgcctacta

SEQ ID NO: 89039 - RNA, 21 nt, synthetic construct
  source 1..21: mol_type = other RNA
gcatagggccttctactttaa

SEQ ID NO: 89040 - RNA, 21 nt, synthetic construct
  source 1..21: mol_type = other RNA
gcatagtactccattatatga

SEQ ID NO: 89041 - RNA, 21 nt, synthetic construct
  source 1..21: mol_type = other RNA
gcatagtattccatggtatgt

SEQ ID NO: 89042 - RNA, 21 nt, synthetic construct
  source 1..21: mol_type = other RNA
gcatagtttgagtatttcatg

SEQ ID NO: 89043 - RNA, 21 nt, synthetic construct
  source 1..21: mol_type = other RNA
gcatataaactggaaggaaat

SEQ ID NO: 89044 - RNA, 21 nt, synthetic construct
  source 1..21: mol_type = other RNA
gcatataataagcagaattca

SEQ ID NO: 89045 - RNA, 21 nt, synthetic construct
  source 1..21: mol_type = other RNA
gcatatacatgacatggtttt

SEQ ID NO: 89046 - RNA, 21 nt, synthetic construct
  source 1..21: mol_type = other RNA
gcatatataccacattttgtt

SEQ ID NO: 89047 - RNA, 21 nt, synthetic construct
  source 1..21: mol_type = other RNA
gcatatatactctgagacagg

SEQ ID NO: 89048 - RNA, 21 nt, synthetic construct
  source 1..21: mol_type = other RNA
gcatatatctgtctgggataa

SEQ ID NO: 89049 - RNA, 21 nt, synthetic construct
  source 1..21: mol_type = other RNA
gcatatgaatctagaaagata

SEQ ID NO: 89050 - RNA, 21 nt, synthetic construct
  source 1..21: mol_type = other RNA
gcatatgtcactgtaagaata

SEQ ID NO: 89051 - RNA, 21 nt, synthetic construct
  source 1..21: mol_type = other RNA
gcatatgtttgtaacttgttc

SEQ ID NO: 89052 - RNA, 21 nt, synthetic construct
  source 1..21: mol_type = other RNA
gcatatgtttttattagcaga

SEQ ID NO: 89053 - RNA, 21 nt, synthetic construct
  source 1..21: mol_type = other RNA
gcatattagctgtctggattg

SEQ ID NO: 89054 - RNA, 21 nt, synthetic construct
  source 1..21: mol_type = other RNA
gcatattgaagccagcaccta

SEQ ID NO: 89055 - RNA, 21 nt, synthetic construct
  source 1..21: mol_type = other RNA
gcatcaaagctaccctttctt

SEQ ID NO: 89056 - RNA, 21 nt, synthetic construct
  source 1..21: mol_type = other RNA
gcatcaaaggacactattgag

SEQ ID NO: 89057 - RNA, 21 nt, synthetic construct
  source 1..21: mol_type = other RNA
gcatcaactgcttccctagcc

SEQ ID NO: 89058 - RNA, 21 nt, synthetic construct
  source 1..21: mol_type = other RNA
gcatcaccatcatcatcaggc

SEQ ID NO: 89059 - RNA, 21 nt, synthetic construct
  source 1..21: mol_type = other RNA
gcatcacttgaggtgattaaa

SEQ ID NO: 89060 - RNA, 21 nt, synthetic construct
  source 1..21: mol_type = other RNA
gcatcagaattccattccttt

SEQ ID NO: 89061 - RNA, 21 nt, synthetic construct
  source 1..21: mol_type = other RNA
gcatcagagctttgttatgaa

SEQ ID NO: 89062 - RNA, 21 nt, synthetic construct
  source 1..21: mol_type = other RNA
gcatcatactggaaggactca

SEQ ID NO: 89063 - RNA, 21 nt, synthetic construct
  source 1..21: mol_type = other RNA
gcatcatggtgggccttgcaa

SEQ ID NO: 89064 - RNA, 21 nt, synthetic construct
  source 1..21: mol_type = other RNA
gcatcattcaaatgatattca

SEQ ID NO: 89065 - RNA, 21 nt, synthetic construct
  source 1..21: mol_type = other RNA
gcatcattcataaacacagaa

SEQ ID NO: 89066 - RNA, 21 nt, synthetic construct
  source 1..21: mol_type = other RNA
gcatccaaaagggaaatatga

SEQ ID NO: 89067 - RNA, 21 nt, synthetic construct
  source 1..21: mol_type = other RNA
gcatccacattttgtgacaag

SEQ ID NO: 89068 - RNA, 21 nt, synthetic construct
  source 1..21: mol_type = other RNA
gcatccactaggggactaaca

SEQ ID NO: 89069 - RNA, 21 nt, synthetic construct
  source 1..21: mol_type = other RNA
gcatcccaagggttttggtat

SEQ ID NO: 89070 - RNA, 21 nt, synthetic construct
  source 1..21: mol_type = other RNA
gcatcccagaggtactcaacg

SEQ ID NO: 89071 - RNA, 21 nt, synthetic construct
  source 1..21: mol_type = other RNA
gcatcccatatggaggcaatg

SEQ ID NO: 89072 - RNA, 21 nt, synthetic construct
  source 1..21: mol_type = other RNA
gcatccccagaaagagagagg

SEQ ID NO: 89073 - RNA, 21 nt, synthetic construct
  source 1..21: mol_type = other RNA
gcatccccattcaattgtcct

SEQ ID NO: 89074 - RNA, 21 nt, synthetic construct
  source 1..21: mol_type = other RNA
gcatccccgctgcgagaaagg

SEQ ID NO: 89075 - RNA, 21 nt, synthetic construct
  source 1..21: mol_type = other RNA
gcatccctccagtccagcacc

SEQ ID NO: 89076 - RNA, 21 nt, synthetic construct
  source 1..21: mol_type = other RNA
gcatccctcctctggccctcc

SEQ ID NO: 89077 - RNA, 21 nt, synthetic construct
  source 1..21: mol_type = other RNA
gcatccctgccgcgcgcgaag

SEQ ID NO: 89078 - RNA, 21 nt, synthetic construct
  source 1..21: mol_type = other RNA
gcatcctttataccttttaat

SEQ ID NO: 89079 - RNA, 21 nt, synthetic construct
  source 1..21: mol_type = other RNA
gcatcggggcctacagtggtt

SEQ ID NO: 89080 - RNA, 21 nt, synthetic construct
  source 1..21: mol_type = other RNA
gcatcgtgaagtctttatttt

SEQ ID NO: 89081 - RNA, 21 nt, synthetic construct
  source 1..21: mol_type = other RNA
gcatcgtttcaatattaagag

SEQ ID NO: 89082 - RNA, 21 nt, synthetic construct
  source 1..21: mol_type = other RNA
gcatctagcacagaaccatgt

SEQ ID NO: 89083 - RNA, 21 nt, synthetic construct
  source 1..21: mol_type = other RNA
gcatctagttaccactagcaa

SEQ ID NO: 89084 - RNA, 21 nt, synthetic construct
  source 1..21: mol_type = other RNA
gcatctatttccccattagag

SEQ ID NO: 89085 - RNA, 21 nt, synthetic construct
  source 1..21: mol_type = other RNA
gcatctctcccttcctgttct

SEQ ID NO: 89086 - RNA, 21 nt, synthetic construct
  source 1..21: mol_type = other RNA
gcatctctctaaaaacatcca

SEQ ID NO: 89087 - RNA, 21 nt, synthetic construct
  source 1..21: mol_type = other RNA
gcatctgatacacttctatcc

SEQ ID NO: 89088 - RNA, 21 nt, synthetic construct
  source 1..21: mol_type = other RNA
gcatctggtctatctcattat

SEQ ID NO: 89089 - RNA, 21 nt, synthetic construct
  source 1..21: mol_type = other RNA
gcatcttagctcttcccttaa

SEQ ID NO: 89090 - RNA, 21 nt, synthetic construct
  source 1..21: mol_type = other RNA
gcatcttcactgactacacat

SEQ ID NO: 89091 - RNA, 21 nt, synthetic construct
  source 1..21: mol_type = other RNA
gcatcttcccatgaacatggt

SEQ ID NO: 89092 - RNA, 21 nt, synthetic construct
  source 1..21: mol_type = other RNA
gcatcttcttttacttgcttg

SEQ ID NO: 89093 - RNA, 21 nt, synthetic construct
  source 1..21: mol_type = other RNA
gcatcttgaactaagtgtgaa

SEQ ID NO: 89094 - RNA, 21 nt, synthetic construct
  source 1..21: mol_type = other RNA
gcatcttgcaaaacggaaact

SEQ ID NO: 89095 - RNA, 21 nt, synthetic construct
  source 1..21: mol_type = other RNA
gcatctttgttacagcagctc

SEQ ID NO: 89096 - RNA, 21 nt, synthetic construct
  source 1..21: mol_type = other RNA
gcatcttttgacgcgcaacaa

SEQ ID NO: 89097 - RNA, 21 nt, synthetic construct
  source 1..21: mol_type = other RNA
gcatcttttgagggtatcata

SEQ ID NO: 89098 - RNA, 21 nt, synthetic construct
  source 1..21: mol_type = other RNA
gcatgaaaacagctaggtgag

SEQ ID NO: 89099 - RNA, 21 nt, synthetic construct
  source 1..21: mol_type = other RNA
gcatgaaatgggtttaaaaga

SEQ ID NO: 89100 - RNA, 21 nt, synthetic construct
  source 1..21: mol_type = other RNA
gcatgaaattcttgggtgaat

SEQ ID NO: 89101 - RNA, 21 nt, synthetic construct
  source 1..21: mol_type = other RNA
gcatgaacccaccaggaggcg

SEQ ID NO: 89102 - RNA, 21 nt, synthetic construct
  source 1..21: mol_type = other RNA
gcatgaagccctctaagtcag

SEQ ID NO: 89103 - RNA, 21 nt, synthetic construct
  source 1..21: mol_type = other RNA
gcatgaatacctatttagagg

SEQ ID NO: 89104 - RNA, 21 nt, synthetic construct
  source 1..21: mol_type = other RNA
gcatgaccctgctatgcatac

SEQ ID NO: 89105 - RNA, 21 nt, synthetic construct
  source 1..21: mol_type = other RNA
gcatgagacttggagtttgag

SEQ ID NO: 89106 - RNA, 21 nt, synthetic construct
  source 1..21: mol_type = other RNA
gcatgagatactacgcctagc

SEQ ID NO: 89107 - RNA, 21 nt, synthetic construct
  source 1..21: mol_type = other RNA
gcatgagccacagggcccagc

SEQ ID NO: 89108 - RNA, 21 nt, synthetic construct
  source 1..21: mol_type = other RNA
gcatgagccactgcgggccca

SEQ ID NO: 89109 - RNA, 21 nt, synthetic construct
  source 1..21: mol_type = other RNA
gcatgaggcatattattgtaa

SEQ ID NO: 89110 - RNA, 21 nt, synthetic construct
  source 1..21: mol_type = other RNA
gcatgagtatctggtgttgct

SEQ ID NO: 89111 - RNA, 21 nt, synthetic construct
  source 1..21: mol_type = other RNA
gcatgagtcgccatacctggt

SEQ ID NO: 89112 - RNA, 21 nt, synthetic construct
  source 1..21: mol_type = other RNA
gcatgatctcacgtcaccgca

SEQ ID NO: 89113 - RNA, 21 nt, synthetic construct
  source 1..21: mol_type = other RNA
gcatgatggctcaacgcctgt

SEQ ID NO: 89114 - RNA, 21 nt, synthetic construct
  source 1..21: mol_type = other RNA
gcatgattccccttatatggg

SEQ ID NO: 89115 - RNA, 21 nt, synthetic construct
  source 1..21: mol_type = other RNA
gcatgatttataatccattgg

SEQ ID NO: 89116 - RNA, 21 nt, synthetic construct
  source 1..21: mol_type = other RNA
gcatgcacacagagggagcgc

SEQ ID NO: 89117 - RNA, 21 nt, synthetic construct
  source 1..21: mol_type = other RNA
gcatgcacacaggagaacttg

SEQ ID NO: 89118 - RNA, 21 nt, synthetic construct
  source 1..21: mol_type = other RNA
gcatgcacggacttggcacag

SEQ ID NO: 89119 - RNA, 21 nt, synthetic construct
  source 1..21: mol_type = other RNA
gcatgcagtagctcatcattt

SEQ ID NO: 89120 - RNA, 21 nt, synthetic construct
  source 1..21: mol_type = other RNA
gcatgcatgtctgtctgttca

SEQ ID NO: 89121 - RNA, 21 nt, synthetic construct
  source 1..21: mol_type = other RNA
gcatgccgggacaagagtctg

SEQ ID NO: 89122 - RNA, 21 nt, synthetic construct
  source 1..21: mol_type = other RNA
gcatgcctctcccaccatctc

SEQ ID NO: 89123 - RNA, 21 nt, synthetic construct
  source 1..21: mol_type = other RNA
gcatgcctctgttacagctct

SEQ ID NO: 89124 - RNA, 21 nt, synthetic construct
  source 1..21: mol_type = other RNA
gcatgcctgacaaagtatgag

SEQ ID NO: 89125 - RNA, 21 nt, synthetic construct
  source 1..21: mol_type = other RNA
gcatgcgccatcacacccagt

SEQ ID NO: 89126 - RNA, 21 nt, synthetic construct
  source 1..21: mol_type = other RNA
gcatgctaactgcagaggtca

SEQ ID NO: 89127 - RNA, 21 nt, synthetic construct
  source 1..21: mol_type = other RNA
gcatgctaggggctgttccca

SEQ ID NO: 89128 - RNA, 21 nt, synthetic construct
  source 1..21: mol_type = other RNA
gcatgctcactgtctccatgt

SEQ ID NO: 89129 - RNA, 21 nt, synthetic construct
  source 1..21: mol_type = other RNA
gcatgctcccatttgggactg

SEQ ID NO: 89130 - RNA, 21 nt, synthetic construct
  source 1..21: mol_type = other RNA
gcatgctgcaactgagaagag

SEQ ID NO: 89131 - RNA, 21 nt, synthetic construct
  source 1..21: mol_type = other RNA
gcatgggaggtaatactataa

SEQ ID NO: 89132 - RNA, 21 nt, synthetic construct
  source 1..21: mol_type = other RNA
gcatggggagttttaggaaaa

SEQ ID NO: 89133 - RNA, 21 nt, synthetic construct
  source 1..21: mol_type = other RNA
gcatgggggcgcgtgcctatg

SEQ ID NO: 89134 - RNA, 21 nt, synthetic construct
  source 1..21: mol_type = other RNA
gcatgggtccaagacaggaag

SEQ ID NO: 89135 - RNA, 21 nt, synthetic construct
  source 1..21: mol_type = other RNA
gcatggtggtaggtgtgtgta

SEQ ID NO: 89136 - RNA, 21 nt, synthetic construct
  source 1..21: mol_type = other RNA
gcatggtgtaaaatacaacag

SEQ ID NO: 89137 - RNA, 21 nt, synthetic construct
  source 1..21: mol_type = other RNA
gcatgtaacttgcttaggctg

SEQ ID NO: 89138 - RNA, 21 nt, synthetic construct
  source 1..21: mol_type = other RNA
gcatgtcccctggagttaatt

SEQ ID NO: 89139 - RNA, 21 nt, synthetic construct
  source 1..21: mol_type = other RNA
gcatgtctgcaggagccttgc

SEQ ID NO: 89140 - RNA, 21 nt, synthetic construct
  source 1..21: mol_type = other RNA
gcatgtctgtagttacaacta

SEQ ID NO: 89141 - RNA, 21 nt, synthetic construct
  source 1..21: mol_type = other RNA
gcatgtctgtctgttcacatt

SEQ ID NO: 89142 - RNA, 21 nt, synthetic construct
  source 1..21: mol_type = other RNA
gcatgtcttcagaggccctgg

SEQ ID NO: 89143 - RNA, 21 nt, synthetic construct
  source 1..21: mol_type = other RNA
gcatgtgcaggaaacttccag

SEQ ID NO: 89144 - RNA, 21 nt, synthetic construct
  source 1..21: mol_type = other RNA
gcatgtggccaggaggaggag

SEQ ID NO: 89145 - RNA, 21 nt, synthetic construct
  source 1..21: mol_type = other RNA
gcatgtgttgtgcacacatcc

SEQ ID NO: 89146 - RNA, 21 nt, synthetic construct
  source 1..21: mol_type = other RNA
gcatgttatttggggattctg

SEQ ID NO: 89147 - RNA, 21 nt, synthetic construct
  source 1..21: mol_type = other RNA
gcatgttgctttgcgaaatag

SEQ ID NO: 89148 - RNA, 21 nt, synthetic construct
  source 1..21: mol_type = other RNA
gcatgttggatagtttctcaa

SEQ ID NO: 89149 - RNA, 21 nt, synthetic construct
  source 1..21: mol_type = other RNA
gcatgttgggccaacttccag

SEQ ID NO: 89150 - RNA, 21 nt, synthetic construct
  source 1..21: mol_type = other RNA
gcattaagccagtcactaaaa

SEQ ID NO: 89151 - RNA, 21 nt, synthetic construct
  source 1..21: mol_type = other RNA
gcattaaggacatccacaaca

SEQ ID NO: 89152 - RNA, 21 nt, synthetic construct
  source 1..21: mol_type = other RNA
gcattaatgcaacctgctttc

SEQ ID NO: 89153 - RNA, 21 nt, synthetic construct
  source 1..21: mol_type = other RNA
gcattaatgcttcatattttg

SEQ ID NO: 89154 - RNA, 21 nt, synthetic construct
  source 1..21: mol_type = other RNA
gcattaattgagagctttctt

SEQ ID NO: 89155 - RNA, 21 nt, synthetic construct
  source 1..21: mol_type = other RNA
gcattacatgaatggaaaatt

SEQ ID NO: 89156 - RNA, 21 nt, synthetic construct
  source 1..21: mol_type = other RNA
gcattaccctaataacaaaat

SEQ ID NO: 89157 - RNA, 21 nt, synthetic construct
  source 1..21: mol_type = other RNA
gcattacgagttatgcaagat

SEQ ID NO: 89158 - RNA, 21 nt, synthetic construct
  source 1..21: mol_type = other RNA
gcattacttaggcagttatta

SEQ ID NO: 89159 - RNA, 21 nt, synthetic construct
  source 1..21: mol_type = other RNA
gcattagagccccaagaaagc

SEQ ID NO: 89160 - RNA, 21 nt, synthetic construct
  source 1..21: mol_type = other RNA
gcattagtgaattcacagtag

SEQ ID NO: 89161 - RNA, 21 nt, synthetic construct
  source 1..21: mol_type = other RNA
gcattatcccagatctaacaa

SEQ ID NO: 89162 - RNA, 21 nt, synthetic construct
  source 1..21: mol_type = other RNA
gcattatccctttaaaatgat

SEQ ID NO: 89163 - RNA, 21 nt, synthetic construct
  source 1..21: mol_type = other RNA
gcattatcttaataacctcaa

SEQ ID NO: 89164 - RNA, 21 nt, synthetic construct
  source 1..21: mol_type = other RNA
gcattcatactgaaggcatag

SEQ ID NO: 89165 - RNA, 21 nt, synthetic construct
  source 1..21: mol_type = other RNA
gcattcatccaggcaaaagat

SEQ ID NO: 89166 - RNA, 21 nt, synthetic construct
  source 1..21: mol_type = other RNA
gcattccagagggtaacgtga

SEQ ID NO: 89167 - RNA, 21 nt, synthetic construct
  source 1..21: mol_type = other RNA
gcattccagattgaaatctag

SEQ ID NO: 89168 - RNA, 21 nt, synthetic construct
  source 1..21: mol_type = other RNA
gcattcccatgttcactgcag

SEQ ID NO: 89169 - RNA, 21 nt, synthetic construct
  source 1..21: mol_type = other RNA
gcattccccacataggatagt

SEQ ID NO: 89170 - RNA, 21 nt, synthetic construct
  source 1..21: mol_type = other RNA
gcattccctgtctgggaagtt

SEQ ID NO: 89171 - RNA, 21 nt, synthetic construct
  source 1..21: mol_type = other RNA
gcattccgcctgggcgacaga

SEQ ID NO: 89172 - RNA, 21 nt, synthetic construct
  source 1..21: mol_type = other RNA
gcattccgtggaaggccttct

SEQ ID NO: 89173 - RNA, 21 nt, synthetic construct
  source 1..21: mol_type = other RNA
gcattcctgaaatgaaccaaa

SEQ ID NO: 89174 - RNA, 21 nt, synthetic construct
  source 1..21: mol_type = other RNA
gcattcgtccctaaacactgt

SEQ ID NO: 89175 - RNA, 21 nt, synthetic construct
  source 1..21: mol_type = other RNA
gcattctagaaaggagggact

SEQ ID NO: 89176 - RNA, 21 nt, synthetic construct
  source 1..21: mol_type = other RNA
gcattctgtcacatagacctg

SEQ ID NO: 89177 - RNA, 21 nt, synthetic construct
  source 1..21: mol_type = other RNA
gcattgaagtatagtttgaag

SEQ ID NO: 89178 - RNA, 21 nt, synthetic construct
  source 1..21: mol_type = other RNA
gcattgactaccaattctccc

SEQ ID NO: 89179 - RNA, 21 nt, synthetic construct
  source 1..21: mol_type = other RNA
gcattgcattgactaccaatt

SEQ ID NO: 89180 - RNA, 21 nt, synthetic construct
  source 1..21: mol_type = other RNA
gcattgcatttacttgtcatt

SEQ ID NO: 89181 - RNA, 21 nt, synthetic construct
  source 1..21: mol_type = other RNA
gcattgcctttattactatta

SEQ ID NO: 89182 - RNA, 21 nt, synthetic construct
  source 1..21: mol_type = other RNA
gcattgctaattcattgtaca

SEQ ID NO: 89183 - RNA, 21 nt, synthetic construct
  source 1..21: mol_type = other RNA
gcattgggagctttcattatt

SEQ ID NO: 89184 - RNA, 21 nt, synthetic construct
  source 1..21: mol_type = other RNA
gcattgtcccgggggagggcg

SEQ ID NO: 89185 - RNA, 21 nt, synthetic construct
  source 1..21: mol_type = other RNA
gcattgtgatgtctcagatgt

SEQ ID NO: 89186 - RNA, 21 nt, synthetic construct
  source 1..21: mol_type = other RNA
gcattgtgcacttaaaattta

SEQ ID NO: 89187 - RNA, 21 nt, synthetic construct
  source 1..21: mol_type = other RNA
gcattgtgctcagtggttctg

SEQ ID NO: 89188 - RNA, 21 nt, synthetic construct
  source 1..21: mol_type = other RNA
gcattgtttacagtagccaaa

SEQ ID NO: 89189 - RNA, 21 nt, synthetic construct
  source 1..21: mol_type = other RNA
gcatttaaaagaacctctgga

SEQ ID NO: 89190 - RNA, 21 nt, synthetic construct
  source 1..21: mol_type = other RNA
gcatttactgctataaacttc

SEQ ID NO: 89191 - RNA, 21 nt, synthetic construct
  source 1..21: mol_type = other RNA
gcatttacttgtcatttctgc

SEQ ID NO: 89192 - RNA, 21 nt, synthetic construct
  source 1..21: mol_type = other RNA
gcatttagccccctgaatacc

SEQ ID NO: 89193 - RNA, 21 nt, synthetic construct
  source 1..21: mol_type = other RNA
gcatttattagtagttaggtg

SEQ ID NO: 89194 - RNA, 21 nt, synthetic construct
  source 1..21: mol_type = other RNA
gcatttcagccaaagctggca

SEQ ID NO: 89195 - RNA, 21 nt, synthetic construct
  source 1..21: mol_type = other RNA
gcatttcggctctgtgctgag

SEQ ID NO: 89196 - RNA, 21 nt, synthetic construct
  source 1..21: mol_type = other RNA
gcatttctctaatagctagtg

SEQ ID NO: 89197 - RNA, 21 nt, synthetic construct
  source 1..21: mol_type = other RNA
gcatttcttacacattaggct

SEQ ID NO: 89198 - RNA, 21 nt, synthetic construct
  source 1..21: mol_type = other RNA
gcatttgaaaacatgttttgt

SEQ ID NO: 89199 - RNA, 21 nt, synthetic construct
  source 1..21: mol_type = other RNA
gcatttgagggttagaagaca

SEQ ID NO: 89200 - RNA, 21 nt, synthetic construct
  source 1..21: mol_type = other RNA
gcatttgggacagcctagttt

SEQ ID NO: 89201 - RNA, 21 nt, synthetic construct
  source 1..21: mol_type = other RNA
gcatttggtctcattcactag

SEQ ID NO: 89202 - RNA, 21 nt, synthetic construct
  source 1..21: mol_type = other RNA
gcatttggtttgcaaaaattt

SEQ ID NO: 89203 - RNA, 21 nt, synthetic construct
  source 1..21: mol_type = other RNA
gcattttataggcattcctta

SEQ ID NO: 89204 - RNA, 21 nt, synthetic construct
  source 1..21: mol_type = other RNA
gcattttcaaggtagaagtac

SEQ ID NO: 89205 - RNA, 21 nt, synthetic construct
  source 1..21: mol_type = other RNA
gcattttccggttgtatagca

SEQ ID NO: 89206 - RNA, 21 nt, synthetic construct
  source 1..21: mol_type = other RNA
gcattttctaaattgaacagc

SEQ ID NO: 89207 - RNA, 21 nt, synthetic construct
  source 1..21: mol_type = other RNA
gcattttttaagtggcgctgt

SEQ ID NO: 89208 - RNA, 21 nt, synthetic construct
  source 1..21: mol_type = other RNA
gccaaaagccaagagcgaggc

SEQ ID NO: 89209 - RNA, 21 nt, synthetic construct
  source 1..21: mol_type = other RNA
gccaaaatgattttcacaggg

SEQ ID NO: 89210 - RNA, 21 nt, synthetic construct
  source 1..21: mol_type = other RNA
gccaaacagtttttacatgta

SEQ ID NO: 89211 - RNA, 21 nt, synthetic construct
  source 1..21: mol_type = other RNA
gccaaacatcatgatttaata

SEQ ID NO: 89212 - RNA, 21 nt, synthetic construct
  source 1..21: mol_type = other RNA
gccaaaccctacacccatcca

SEQ ID NO: 89213 - RNA, 21 nt, synthetic construct
  source 1..21: mol_type = other RNA
gccaaactgttttccacagtg

SEQ ID NO: 89214 - RNA, 21 nt, synthetic construct
  source 1..21: mol_type = other RNA
gccaaacttgaaccttcctct

SEQ ID NO: 89215 - RNA, 21 nt, synthetic construct
  source 1..21: mol_type = other RNA
gccaaagaaattggacgggtg

SEQ ID NO: 89216 - RNA, 21 nt, synthetic construct
  source 1..21: mol_type = other RNA
gccaaagaagaaatcaaatgg

SEQ ID NO: 89217 - RNA, 21 nt, synthetic construct
  source 1..21: mol_type = other RNA
gccaaagacagatcttatgga

SEQ ID NO: 89218 - RNA, 21 nt, synthetic construct
  source 1..21: mol_type = other RNA
gccaaagacattgtcttacat

SEQ ID NO: 89219 - RNA, 21 nt, synthetic construct
  source 1..21: mol_type = other RNA
gccaaagacttcaacggacat

SEQ ID NO: 89220 - RNA, 21 nt, synthetic construct
  source 1..21: mol_type = other RNA
gccaaagattcttgtcatgaa

SEQ ID NO: 89221 - RNA, 21 nt, synthetic construct
  source 1..21: mol_type = other RNA
gccaaagcaagccttggcaag

SEQ ID NO: 89222 - RNA, 21 nt, synthetic construct
  source 1..21: mol_type = other RNA
gccaaagctggcatgttggat

SEQ ID NO: 89223 - RNA, 21 nt, synthetic construct
  source 1..21: mol_type = other RNA
gccaaaggtagaaacatccca

SEQ ID NO: 89224 - RNA, 21 nt, synthetic construct
  source 1..21: mol_type = other RNA
gccaaataaaacacaaggaca

SEQ ID NO: 89225 - RNA, 21 nt, synthetic construct
  source 1..21: mol_type = other RNA
gccaaatatccatgttttaat

SEQ ID NO: 89226 - RNA, 21 nt, synthetic construct
  source 1..21: mol_type = other RNA
gccaaatccctgatcaagttg

SEQ ID NO: 89227 - RNA, 21 nt, synthetic construct
  source 1..21: mol_type = other RNA
gccaaatgaaaggcgtcgggg

SEQ ID NO: 89228 - RNA, 21 nt, synthetic construct
  source 1..21: mol_type = other RNA
gccaaattatttgagagtaag

SEQ ID NO: 89229 - RNA, 21 nt, synthetic construct
  source 1..21: mol_type = other RNA
gccaacaaccataatgagtaa

SEQ ID NO: 89230 - RNA, 21 nt, synthetic construct
  source 1..21: mol_type = other RNA
gccaacacatggggcattaat

SEQ ID NO: 89231 - RNA, 21 nt, synthetic construct
  source 1..21: mol_type = other RNA
gccaacagggccactgagagc

SEQ ID NO: 89232 - RNA, 21 nt, synthetic construct
  source 1..21: mol_type = other RNA
gccaacagttactttcctttt

SEQ ID NO: 89233 - RNA, 21 nt, synthetic construct
  source 1..21: mol_type = other RNA
gccaacatcgtaaaacctcat

SEQ ID NO: 89234 - RNA, 21 nt, synthetic construct
  source 1..21: mol_type = other RNA
gccaaccattactcttctact

SEQ ID NO: 89235 - RNA, 21 nt, synthetic construct
  source 1..21: mol_type = other RNA
gccaactctggcaggtcacct

SEQ ID NO: 89236 - RNA, 21 nt, synthetic construct
  source 1..21: mol_type = other RNA
gccaactgtcctctcttgttg

SEQ ID NO: 89237 - RNA, 21 nt, synthetic construct
  source 1..21: mol_type = other RNA
gccaacttccagcaagacttt

SEQ ID NO: 89238 - RNA, 21 nt, synthetic construct
  source 1..21: mol_type = other RNA
gccaagagcgaggcctggaac

SEQ ID NO: 89239 - RNA, 21 nt, synthetic construct
  source 1..21: mol_type = other RNA
gccaagagttgctgacttcct

SEQ ID NO: 89240 - RNA, 21 nt, synthetic construct
  source 1..21: mol_type = other RNA
gccaagatctgtttttcaaaa

SEQ ID NO: 89241 - RNA, 21 nt, synthetic construct
  source 1..21: mol_type = other RNA
gccaagcaacttgatcaggga

SEQ ID NO: 89242 - RNA, 21 nt, synthetic construct
  source 1..21: mol_type = other RNA
gccaagcatggtggtaggtgt

SEQ ID NO: 89243 - RNA, 21 nt, synthetic construct
  source 1..21: mol_type = other RNA
gccaaggagggaggattgttt

SEQ ID NO: 89244 - RNA, 21 nt, synthetic construct
  source 1..21: mol_type = other RNA
gccaaggcaggactgcttgag

SEQ ID NO: 89245 - RNA, 21 nt, synthetic construct
  source 1..21: mol_type = other RNA
gccaaggcttgctttggctag

SEQ ID NO: 89246 - RNA, 21 nt, synthetic construct
  source 1..21: mol_type = other RNA
gccaagggtttgtcaattttg

SEQ ID NO: 89247 - RNA, 21 nt, synthetic construct
  source 1..21: mol_type = other RNA
gccaagtaaaagcaacctcat

SEQ ID NO: 89248 - RNA, 21 nt, synthetic construct
  source 1..21: mol_type = other RNA
gccaagtataagatgatgata

SEQ ID NO: 89249 - RNA, 21 nt, synthetic construct
  source 1..21: mol_type = other RNA
gccaagtcagcacttctgata

SEQ ID NO: 89250 - RNA, 21 nt, synthetic construct
  source 1..21: mol_type = other RNA
gccaagtccgtgcatgcctct

SEQ ID NO: 89251 - RNA, 21 nt, synthetic construct
  source 1..21: mol_type = other RNA
gccaatatcacactgtttgat

SEQ ID NO: 89252 - RNA, 21 nt, synthetic construct
  source 1..21: mol_type = other RNA
gccaatatccctgataatcac

SEQ ID NO: 89253 - RNA, 21 nt, synthetic construct
  source 1..21: mol_type = other RNA
gccaatatctatcagggctga

SEQ ID NO: 89254 - RNA, 21 nt, synthetic construct
  source 1..21: mol_type = other RNA
gccaatcaataattctgtgcc

SEQ ID NO: 89255 - RNA, 21 nt, synthetic construct
  source 1..21: mol_type = other RNA
gccaatcttcccaatcctttg

SEQ ID NO: 89256 - RNA, 21 nt, synthetic construct
  source 1..21: mol_type = other RNA
gccaatttgggatatagctac

SEQ ID NO: 89257 - RNA, 21 nt, synthetic construct
  source 1..21: mol_type = other RNA
gccaattttcatagcagcatt

SEQ ID NO: 89258 - RNA, 21 nt, synthetic construct
  source 1..21: mol_type = other RNA
gccacaaagtccccacatgac

SEQ ID NO: 89259 - RNA, 21 nt, synthetic construct
  source 1..21: mol_type = other RNA
gccacaaatggagtgacttaa

SEQ ID NO: 89260 - RNA, 21 nt, synthetic construct
  source 1..21: mol_type = other RNA
gccacaagacataagcatttt

SEQ ID NO: 89261 - RNA, 21 nt, synthetic construct
  source 1..21: mol_type = other RNA
gccacaagccacatgtggtta

SEQ ID NO: 89262 - RNA, 21 nt, synthetic construct
  source 1..21: mol_type = other RNA
gccacacagtacaaggctaga

SEQ ID NO: 89263 - RNA, 21 nt, synthetic construct
  source 1..21: mol_type = other RNA
gccacaccacatccagctaat

SEQ ID NO: 89264 - RNA, 21 nt, synthetic construct
  source 1..21: mol_type = other RNA
gccacactccagcatccctcc

SEQ ID NO: 89265 - RNA, 21 nt, synthetic construct
  source 1..21: mol_type = other RNA
gccacactcttggtctttctc

SEQ ID NO: 89266 - RNA, 21 nt, synthetic construct
  source 1..21: mol_type = other RNA
gccacagcagggctcctccaa

SEQ ID NO: 89267 - RNA, 21 nt, synthetic construct
  source 1..21: mol_type = other RNA
gccacagcgcccggcccgtta

SEQ ID NO: 89268 - RNA, 21 nt, synthetic construct
  source 1..21: mol_type = other RNA
gccacagcgtggaatggtcaa

SEQ ID NO: 89269 - RNA, 21 nt, synthetic construct
  source 1..21: mol_type = other RNA
gccacagcgttgttcagttga

SEQ ID NO: 89270 - RNA, 21 nt, synthetic construct
  source 1..21: mol_type = other RNA
gccacagctacactcaataca

SEQ ID NO: 89271 - RNA, 21 nt, synthetic construct
  source 1..21: mol_type = other RNA
gccacagggcccagcctcaac

SEQ ID NO: 89272 - RNA, 21 nt, synthetic construct
  source 1..21: mol_type = other RNA
gccacataaatcacaggaaag

SEQ ID NO: 89273 - RNA, 21 nt, synthetic construct
  source 1..21: mol_type = other RNA
gccacatacatagtattaaat

SEQ ID NO: 89274 - RNA, 21 nt, synthetic construct
  source 1..21: mol_type = other RNA
gccacatgcttccaaaagcag

SEQ ID NO: 89275 - RNA, 21 nt, synthetic construct
  source 1..21: mol_type = other RNA
gccacatgtggttattgagtc

SEQ ID NO: 89276 - RNA, 21 nt, synthetic construct
  source 1..21: mol_type = other RNA
gccacattagccactctgaat

SEQ ID NO: 89277 - RNA, 21 nt, synthetic construct
  source 1..21: mol_type = other RNA
gccacattcaacaacatggat

SEQ ID NO: 89278 - RNA, 21 nt, synthetic construct
  source 1..21: mol_type = other RNA
gccacattttaccaaaacagc

SEQ ID NO: 89279 - RNA, 21 nt, synthetic construct
  source 1..21: mol_type = other RNA
gccacattttttggtttgtat

SEQ ID NO: 89280 - RNA, 21 nt, synthetic construct
  source 1..21: mol_type = other RNA
gccaccaagccctgccttaaa

SEQ ID NO: 89281 - RNA, 21 nt, synthetic construct
  source 1..21: mol_type = other RNA
gccaccacgtccggtcgttgg

SEQ ID NO: 89282 - RNA, 21 nt, synthetic construct
  source 1..21: mol_type = other RNA
gccaccactcccggccgtatt

SEQ ID NO: 89283 - RNA, 21 nt, synthetic construct
  source 1..21: mol_type = other RNA
gccacccttgctgcttctacc

SEQ ID NO: 89284 - RNA, 21 nt, synthetic construct
  source 1..21: mol_type = other RNA
gccaccgcacctggccgggat

SEQ ID NO: 89285 - RNA, 21 nt, synthetic construct
  source 1..21: mol_type = other RNA
gccaccgcactcagcctgttg

SEQ ID NO: 89286 - RNA, 21 nt, synthetic construct
  source 1..21: mol_type = other RNA
gccaccgcgcccggccaaata

SEQ ID NO: 89287 - RNA, 21 nt, synthetic construct
  source 1..21: mol_type = other RNA
gccaccgcgcctggtgattaa

SEQ ID NO: 89288 - RNA, 21 nt, synthetic construct
  source 1..21: mol_type = other RNA
gccaccgtgcccggccagaca

SEQ ID NO: 89289 - RNA, 21 nt, synthetic construct
  source 1..21: mol_type = other RNA
gccaccgtgccgggcttggta

SEQ ID NO: 89290 - RNA, 21 nt, synthetic construct
  source 1..21: mol_type = other RNA
gccacctcatccggtctcagt

SEQ ID NO: 89291 - RNA, 21 nt, synthetic construct
  source 1..21: mol_type = other RNA
gccacctcctccggggaccca

SEQ ID NO: 89292 - RNA, 21 nt, synthetic construct
  source 1..21: mol_type = other RNA
gccacgtgaagatggagttac

SEQ ID NO: 89293 - RNA, 21 nt, synthetic construct
  source 1..21: mol_type = other RNA
gccacgtgtattgagtgtagc

SEQ ID NO: 89294 - RNA, 21 nt, synthetic construct
  source 1..21: mol_type = other RNA
gccactaaaacaggaagttga

SEQ ID NO: 89295 - RNA, 21 nt, synthetic construct
  source 1..21: mol_type = other RNA
gccactacgcccggcccatga

SEQ ID NO: 89296 - RNA, 21 nt, synthetic construct
  source 1..21: mol_type = other RNA
gccactacttagcccctgctg

SEQ ID NO: 89297 - RNA, 21 nt, synthetic construct
  source 1..21: mol_type = other RNA
gccactagtcagtatatttac

SEQ ID NO: 89298 - RNA, 21 nt, synthetic construct
  source 1..21: mol_type = other RNA
gccactatagaaaatagtatg

SEQ ID NO: 89299 - RNA, 21 nt, synthetic construct
  source 1..21: mol_type = other RNA
gccactcaaaactgaagttta

SEQ ID NO: 89300 - RNA, 21 nt, synthetic construct
  source 1..21: mol_type = other RNA
gccactctcatctaaattaag

SEQ ID NO: 89301 - RNA, 21 nt, synthetic construct
  source 1..21: mol_type = other RNA
gccactctgaattctctggaa

SEQ ID NO: 89302 - RNA, 21 nt, synthetic construct
  source 1..21: mol_type = other RNA
gccactgagagctcaggccag

SEQ ID NO: 89303 - RNA, 21 nt, synthetic construct
  source 1..21: mol_type = other RNA
gccactgattgagtatctggt

SEQ ID NO: 89304 - RNA, 21 nt, synthetic construct
  source 1..21: mol_type = other RNA
gccactgcaggtgttggtgca

SEQ ID NO: 89305 - RNA, 21 nt, synthetic construct
  source 1..21: mol_type = other RNA
gccactgcattcatccaggca

SEQ ID NO: 89306 - RNA, 21 nt, synthetic construct
  source 1..21: mol_type = other RNA
gccactgcattccgcctgggc

SEQ ID NO: 89307 - RNA, 21 nt, synthetic construct
  source 1..21: mol_type = other RNA
gccactgcgggcccagctctt

SEQ ID NO: 89308 - RNA, 21 nt, synthetic construct
  source 1..21: mol_type = other RNA
gccactggaaaccttttgtag

SEQ ID NO: 89309 - RNA, 21 nt, synthetic construct
  source 1..21: mol_type = other RNA
gccactgggtcttataggttg

SEQ ID NO: 89310 - RNA, 21 nt, synthetic construct
  source 1..21: mol_type = other RNA
gccacttaaaaaatgcgcgtc

SEQ ID NO: 89311 - RNA, 21 nt, synthetic construct
  source 1..21: mol_type = other RNA
gccacttcctattagaagaat

SEQ ID NO: 89312 - RNA, 21 nt, synthetic construct
  source 1..21: mol_type = other RNA
gccagaatccctttcgctaat

SEQ ID NO: 89313 - RNA, 21 nt, synthetic construct
  source 1..21: mol_type = other RNA
gccagacattttatttataca

SEQ ID NO: 89314 - RNA, 21 nt, synthetic construct
  source 1..21: mol_type = other RNA
gccagagagtggaaagagcca

SEQ ID NO: 89315 - RNA, 21 nt, synthetic construct
  source 1..21: mol_type = other RNA
gccagaggaagcttataattt

SEQ ID NO: 89316 - RNA, 21 nt, synthetic construct
  source 1..21: mol_type = other RNA
gccagaggagggatgcattct

SEQ ID NO: 89317 - RNA, 21 nt, synthetic construct
  source 1..21: mol_type = other RNA
gccagagggaatctaggaaac

SEQ ID NO: 89318 - RNA, 21 nt, synthetic construct
  source 1..21: mol_type = other RNA
gccagagttggcacagccagt

SEQ ID NO: 89319 - RNA, 21 nt, synthetic construct
  source 1..21: mol_type = other RNA
gccagagtttcactctgtcgc

SEQ ID NO: 89320 - RNA, 21 nt, synthetic construct
  source 1..21: mol_type = other RNA
gccagatatccataaggaaaa

SEQ ID NO: 89321 - RNA, 21 nt, synthetic construct
  source 1..21: mol_type = other RNA
gccagatgttctaatttcttt

SEQ ID NO: 89322 - RNA, 21 nt, synthetic construct
  source 1..21: mol_type = other RNA
gccagatttgatcctggaata

SEQ ID NO: 89323 - RNA, 21 nt, synthetic construct
  source 1..21: mol_type = other RNA
gccagcaaatcagaaaaggct

SEQ ID NO: 89324 - RNA, 21 nt, synthetic construct
  source 1..21: mol_type = other RNA
gccagcaccagatactcaatc

SEQ ID NO: 89325 - RNA, 21 nt, synthetic construct
  source 1..21: mol_type = other RNA
gccagcacctaacaatgatta

SEQ ID NO: 89326 - RNA, 21 nt, synthetic construct
  source 1..21: mol_type = other RNA
gccagcattaccctaataaca

SEQ ID NO: 89327 - RNA, 21 nt, synthetic construct
  source 1..21: mol_type = other RNA
gccagcattacttaggcagtt

SEQ ID NO: 89328 - RNA, 21 nt, synthetic construct
  source 1..21: mol_type = other RNA
gccagccacccttgctgcttc

SEQ ID NO: 89329 - RNA, 21 nt, synthetic construct
  source 1..21: mol_type = other RNA
gccagcctgatgatgatggtg

SEQ ID NO: 89330 - RNA, 21 nt, synthetic construct
  source 1..21: mol_type = other RNA
gccagctaacttttaacccac

SEQ ID NO: 89331 - RNA, 21 nt, synthetic construct
  source 1..21: mol_type = other RNA
gccagctttggctgaaatgct

SEQ ID NO: 89332 - RNA, 21 nt, synthetic construct
  source 1..21: mol_type = other RNA
gccaggaagtcagcaactctt

SEQ ID NO: 89333 - RNA, 21 nt, synthetic construct
  source 1..21: mol_type = other RNA
gccaggacaattgaatgggga

SEQ ID NO: 89334 - RNA, 21 nt, synthetic construct
  source 1..21: mol_type = other RNA
gccaggaggaggagggtgcag

SEQ ID NO: 89335 - RNA, 21 nt, synthetic construct
  source 1..21: mol_type = other RNA
gccaggcgtggtggcggatgc

SEQ ID NO: 89336 - RNA, 21 nt, synthetic construct
  source 1..21: mol_type = other RNA
gccaggctggttccaaacttc

SEQ ID NO: 89337 - RNA, 21 nt, synthetic construct
  source 1..21: mol_type = other RNA
gccaggctttcccagggtgta

SEQ ID NO: 89338 - RNA, 21 nt, synthetic construct
  source 1..21: mol_type = other RNA
gccagggtctgtctcacctca

SEQ ID NO: 89339 - RNA, 21 nt, synthetic construct
  source 1..21: mol_type = other RNA
gccaggtagggaggggtattc

SEQ ID NO: 89340 - RNA, 21 nt, synthetic construct
  source 1..21: mol_type = other RNA
gccaggtttgtgcttggatat

SEQ ID NO: 89341 - RNA, 21 nt, synthetic construct
  source 1..21: mol_type = other RNA
gccagtatctcctttccttcc

SEQ ID NO: 89342 - RNA, 21 nt, synthetic construct
  source 1..21: mol_type = other RNA
gccagtcactaaaaatcagat

SEQ ID NO: 89343 - RNA, 21 nt, synthetic construct
  source 1..21: mol_type = other RNA
gccagtcagtgatggaggtgg

SEQ ID NO: 89344 - RNA, 21 nt, synthetic construct
  source 1..21: mol_type = other RNA
gccagtcatgtggggactttg

SEQ ID NO: 89345 - RNA, 21 nt, synthetic construct
  source 1..21: mol_type = other RNA
gccagtccctagtgtctccat

SEQ ID NO: 89346 - RNA, 21 nt, synthetic construct
  source 1..21: mol_type = other RNA
gccagtccttgtgatctatgc

SEQ ID NO: 89347 - RNA, 21 nt, synthetic construct
  source 1..21: mol_type = other RNA
gccagtgaactccagtctggg

SEQ ID NO: 89348 - RNA, 21 nt, synthetic construct
  source 1..21: mol_type = other RNA
gccagtgaccagtgtgatggg

SEQ ID NO: 89349 - RNA, 21 nt, synthetic construct
  source 1..21: mol_type = other RNA
gccagtgagtgatgaaaagag

SEQ ID NO: 89350 - RNA, 21 nt, synthetic construct
  source 1..21: mol_type = other RNA
gccagtgagttcaaatgttaa

SEQ ID NO: 89351 - RNA, 21 nt, synthetic construct
  source 1..21: mol_type = other RNA
gccagtgattggatatttgca

SEQ ID NO: 89352 - RNA, 21 nt, synthetic construct
  source 1..21: mol_type = other RNA
gccagtgcaaacctcctggtt

SEQ ID NO: 89353 - RNA, 21 nt, synthetic construct
  source 1..21: mol_type = other RNA
gccagtgcagcaagcagtaaa

SEQ ID NO: 89354 - RNA, 21 nt, synthetic construct
  source 1..21: mol_type = other RNA
gccagtgttttaaagcaggga

SEQ ID NO: 89355 - RNA, 21 nt, synthetic construct
  source 1..21: mol_type = other RNA
gccagttgagagagaattcta

SEQ ID NO: 89356 - RNA, 21 nt, synthetic construct
  source 1..21: mol_type = other RNA
gccagttttctggaaactcaa

SEQ ID NO: 89357 - RNA, 21 nt, synthetic construct
  source 1..21: mol_type = other RNA
gccataaatcaaggtacaata

SEQ ID NO: 89358 - RNA, 21 nt, synthetic construct
  source 1..21: mol_type = other RNA
gccataagagtccccaactgc

SEQ ID NO: 89359 - RNA, 21 nt, synthetic construct
  source 1..21: mol_type = other RNA
gccataatccttagattacaa

SEQ ID NO: 89360 - RNA, 21 nt, synthetic construct
  source 1..21: mol_type = other RNA
gccatacctggtccttaaatt

SEQ ID NO: 89361 - RNA, 21 nt, synthetic construct
  source 1..21: mol_type = other RNA
gccatagagctttaaagttaa

SEQ ID NO: 89362 - RNA, 21 nt, synthetic construct
  source 1..21: mol_type = other RNA
gccatagagggagcatcttcc

SEQ ID NO: 89363 - RNA, 21 nt, synthetic construct
  source 1..21: mol_type = other RNA
gccatagtgtaaactaaaagt

SEQ ID NO: 89364 - RNA, 21 nt, synthetic construct
  source 1..21: mol_type = other RNA
gccatatgtagggcaccgtga

SEQ ID NO: 89365 - RNA, 21 nt, synthetic construct
  source 1..21: mol_type = other RNA
gccatcaacctaatgaaattt

SEQ ID NO: 89366 - RNA, 21 nt, synthetic construct
  source 1..21: mol_type = other RNA
gccatcacacccagtatacac

SEQ ID NO: 89367 - RNA, 21 nt, synthetic construct
  source 1..21: mol_type = other RNA
gccatcacattttgaatcatg

SEQ ID NO: 89368 - RNA, 21 nt, synthetic construct
  source 1..21: mol_type = other RNA
gccatcatgcctgggtaatta

SEQ ID NO: 89369 - RNA, 21 nt, synthetic construct
  source 1..21: mol_type = other RNA
gccatcattttatgaaaccat

SEQ ID NO: 89370 - RNA, 21 nt, synthetic construct
  source 1..21: mol_type = other RNA
gccatcccagctacataactt

SEQ ID NO: 89371 - RNA, 21 nt, synthetic construct
  source 1..21: mol_type = other RNA
gccatcctccagccttaatct

SEQ ID NO: 89372 - RNA, 21 nt, synthetic construct
  source 1..21: mol_type = other RNA
gccatcctggatttgggaagg

SEQ ID NO: 89373 - RNA, 21 nt, synthetic construct
  source 1..21: mol_type = other RNA
gccatccttcccaaatccagg

SEQ ID NO: 89374 - RNA, 21 nt, synthetic construct
  source 1..21: mol_type = other RNA
gccatcgcgcccagcccgtgt

SEQ ID NO: 89375 - RNA, 21 nt, synthetic construct
  source 1..21: mol_type = other RNA
gccatctaattcacatttaag

SEQ ID NO: 89376 - RNA, 21 nt, synthetic construct
  source 1..21: mol_type = other RNA
gccatctccttaatccagtct

SEQ ID NO: 89377 - RNA, 21 nt, synthetic construct
  source 1..21: mol_type = other RNA
gccatctgaattcaagttaca

SEQ ID NO: 89378 - RNA, 21 nt, synthetic construct
  source 1..21: mol_type = other RNA
gccatcttcaagatttcatag

SEQ ID NO: 89379 - RNA, 21 nt, synthetic construct
  source 1..21: mol_type = other RNA
gccatcttcatttctaagcca

SEQ ID NO: 89380 - RNA, 21 nt, synthetic construct
  source 1..21: mol_type = other RNA
gccatcttgcataagtttttt

SEQ ID NO: 89381 - RNA, 21 nt, synthetic construct
  source 1..21: mol_type = other RNA
gccatggctcactgcggcctc

SEQ ID NO: 89382 - RNA, 21 nt, synthetic construct
  source 1..21: mol_type = other RNA
gccatggtgttaaatatttac

SEQ ID NO: 89383 - RNA, 21 nt, synthetic construct
  source 1..21: mol_type = other RNA
gccatgtgttttgttttgaat

SEQ ID NO: 89384 - RNA, 21 nt, synthetic construct
  source 1..21: mol_type = other RNA
gccatgtttctcctgcatggg

SEQ ID NO: 89385 - RNA, 21 nt, synthetic construct
  source 1..21: mol_type = other RNA
gccatgttttatttcttgacc

SEQ ID NO: 89386 - RNA, 21 nt, synthetic construct
  source 1..21: mol_type = other RNA
gccattctcccagttgtcaga

SEQ ID NO: 89387 - RNA, 21 nt, synthetic construct
  source 1..21: mol_type = other RNA
gccattctcttctggatagca

SEQ ID NO: 89388 - RNA, 21 nt, synthetic construct
  source 1..21: mol_type = other RNA
gccattctgctatgaaatgtg

SEQ ID NO: 89389 - RNA, 21 nt, synthetic construct
  source 1..21: mol_type = other RNA
gccatttatcagcaccaaaga

SEQ ID NO: 89390 - RNA, 21 nt, synthetic construct
  source 1..21: mol_type = other RNA
gccatttcaggttttcgacca

SEQ ID NO: 89391 - RNA, 21 nt, synthetic construct
  source 1..21: mol_type = other RNA
gccatttcatttctgtttttt

SEQ ID NO: 89392 - RNA, 21 nt, synthetic construct
  source 1..21: mol_type = other RNA
gccatttgattgccagttttc

SEQ ID NO: 89393 - RNA, 21 nt, synthetic construct
  source 1..21: mol_type = other RNA
gcccaacagggttttgttttg

SEQ ID NO: 89394 - RNA, 21 nt, synthetic construct
  source 1..21: mol_type = other RNA
gcccaacatgctcttaagtat

SEQ ID NO: 89395 - RNA, 21 nt, synthetic construct
  source 1..21: mol_type = other RNA
gcccaacctgattagaggctg

SEQ ID NO: 89396 - RNA, 21 nt, synthetic construct
  source 1..21: mol_type = other RNA
gcccaacttcacaccatttag

SEQ ID NO: 89397 - RNA, 21 nt, synthetic construct
  source 1..21: mol_type = other RNA
gcccaactttttctttttagt

SEQ ID NO: 89398 - RNA, 21 nt, synthetic construct
  source 1..21: mol_type = other RNA
gcccaagcacactttccttgg

SEQ ID NO: 89399 - RNA, 21 nt, synthetic construct
  source 1..21: mol_type = other RNA
gcccaagctaccatttattcc

SEQ ID NO: 89400 - RNA, 21 nt, synthetic construct
  source 1..21: mol_type = other RNA
gcccaaggaaggcagggtagg

SEQ ID NO: 89401 - RNA, 21 nt, synthetic construct
  source 1..21: mol_type = other RNA
gcccaatcaaatccagtcttc

SEQ ID NO: 89402 - RNA, 21 nt, synthetic construct
  source 1..21: mol_type = other RNA
gcccaatctacaggtcggaag

SEQ ID NO: 89403 - RNA, 21 nt, synthetic construct
  source 1..21: mol_type = other RNA
gcccaatgcctgcgattgcag

SEQ ID NO: 89404 - RNA, 21 nt, synthetic construct
  source 1..21: mol_type = other RNA
gcccacacctgcaatcacagc

SEQ ID NO: 89405 - RNA, 21 nt, synthetic construct
  source 1..21: mol_type = other RNA
gcccaccagcataagacccct

SEQ ID NO: 89406 - RNA, 21 nt, synthetic construct
  source 1..21: mol_type = other RNA
gcccaccatgatgcagcccct

SEQ ID NO: 89407 - RNA, 21 nt, synthetic construct
  source 1..21: mol_type = other RNA
gcccaccctgctccagtatga

SEQ ID NO: 89408 - RNA, 21 nt, synthetic construct
  source 1..21: mol_type = other RNA
gcccacctgacaagtagtaca

SEQ ID NO: 89409 - RNA, 21 nt, synthetic construct
  source 1..21: mol_type = other RNA
gcccactctccccaagtaaac

SEQ ID NO: 89410 - RNA, 21 nt, synthetic construct
  source 1..21: mol_type = other RNA
gcccactcttatatcctaaac

SEQ ID NO: 89411 - RNA, 21 nt, synthetic construct
  source 1..21: mol_type = other RNA
gcccagaaataaatcctcaca

SEQ ID NO: 89412 - RNA, 21 nt, synthetic construct
  source 1..21: mol_type = other RNA
gcccagactggagttcactgg

SEQ ID NO: 89413 - RNA, 21 nt, synthetic construct
  source 1..21: mol_type = other RNA
gcccagagaggctaggtgacc

SEQ ID NO: 89414 - RNA, 21 nt, synthetic construct
  source 1..21: mol_type = other RNA
gcccagagatcccaccattgc

SEQ ID NO: 89415 - RNA, 21 nt, synthetic construct
  source 1..21: mol_type = other RNA
gcccagattccttttttatgt

SEQ ID NO: 89416 - RNA, 21 nt, synthetic construct
  source 1..21: mol_type = other RNA
gcccagcacttccattttgct

SEQ ID NO: 89417 - RNA, 21 nt, synthetic construct
  source 1..21: mol_type = other RNA
gcccagcagaaggtgagggac

SEQ ID NO: 89418 - RNA, 21 nt, synthetic construct
  source 1..21: mol_type = other RNA
gcccagccatcccattactcg

SEQ ID NO: 89419 - RNA, 21 nt, synthetic construct
  source 1..21: mol_type = other RNA
gcccagcccgtgtgtttagaa

SEQ ID NO: 89420 - RNA, 21 nt, synthetic construct
  source 1..21: mol_type = other RNA
gcccagcctcaacagcacttt

SEQ ID NO: 89421 - RNA, 21 nt, synthetic construct
  source 1..21: mol_type = other RNA
gcccagctcttttgtgtcttt

SEQ ID NO: 89422 - RNA, 21 nt, synthetic construct
  source 1..21: mol_type = other RNA
gcccagcttccgggacttgga

SEQ ID NO: 89423 - RNA, 21 nt, synthetic construct
  source 1..21: mol_type = other RNA
gcccaggaggttgaagctcta

SEQ ID NO: 89424 - RNA, 21 nt, synthetic construct
  source 1..21: mol_type = other RNA
gcccaggagttgcatcacttg

SEQ ID NO: 89425 - RNA, 21 nt, synthetic construct
  source 1..21: mol_type = other RNA
gcccaggcggaatgcagtggc

SEQ ID NO: 89426 - RNA, 21 nt, synthetic construct
  source 1..21: mol_type = other RNA
gcccaggctgacttagagggc

SEQ ID NO: 89427 - RNA, 21 nt, synthetic construct
  source 1..21: mol_type = other RNA
gcccaggctggagctcactgc

SEQ ID NO: 89428 - RNA, 21 nt, synthetic construct
  source 1..21: mol_type = other RNA
gcccaggctggtcttgtactc

SEQ ID NO: 89429 - RNA, 21 nt, synthetic construct
  source 1..21: mol_type = other RNA
gcccagggggtcgagactgta

SEQ ID NO: 89430 - RNA, 21 nt, synthetic construct
  source 1..21: mol_type = other RNA
gcccatatccttttatgtgca

SEQ ID NO: 89431 - RNA, 21 nt, synthetic construct
  source 1..21: mol_type = other RNA
gcccatcctatctaagcctac

SEQ ID NO: 89432 - RNA, 21 nt, synthetic construct
  source 1..21: mol_type = other RNA
gcccatcctctatttttgtct

SEQ ID NO: 89433 - RNA, 21 nt, synthetic construct
  source 1..21: mol_type = other RNA
gcccatgacatgtgttttatt

SEQ ID NO: 89434 - RNA, 21 nt, synthetic construct
  source 1..21: mol_type = other RNA
gcccatgtctaaagtattgtt

SEQ ID NO: 89435 - RNA, 21 nt, synthetic construct
  source 1..21: mol_type = other RNA
gcccatgtgcattattgtaat

SEQ ID NO: 89436 - RNA, 21 nt, synthetic construct
  source 1..21: mol_type = other RNA
gcccattaaaaccatgaaaat

SEQ ID NO: 89437 - RNA, 21 nt, synthetic construct
  source 1..21: mol_type = other RNA
gcccattaacagatgaatgaa

SEQ ID NO: 89438 - RNA, 21 nt, synthetic construct
  source 1..21: mol_type = other RNA
gcccattaggatagctattat

SEQ ID NO: 89439 - RNA, 21 nt, synthetic construct
  source 1..21: mol_type = other RNA
gcccattataaaataggaagt

SEQ ID NO: 89440 - RNA, 21 nt, synthetic construct
  source 1..21: mol_type = other RNA
gcccattttcgaattagattg

SEQ ID NO: 89441 - RNA, 21 nt, synthetic construct
  source 1..21: mol_type = other RNA
gccccaaaattaccccattca

SEQ ID NO: 89442 - RNA, 21 nt, synthetic construct
  source 1..21: mol_type = other RNA
gccccaaaccatcaagtgtga

SEQ ID NO: 89443 - RNA, 21 nt, synthetic construct
  source 1..21: mol_type = other RNA
gccccaaatacctctgaatgt

SEQ ID NO: 89444 - RNA, 21 nt, synthetic construct
  source 1..21: mol_type = other RNA
gccccaagaaagcaggtcatg

SEQ ID NO: 89445 - RNA, 21 nt, synthetic construct
  source 1..21: mol_type = other RNA
gccccacaagtagcagggact

SEQ ID NO: 89446 - RNA, 21 nt, synthetic construct
  source 1..21: mol_type = other RNA
gccccactccacacacgaagt

SEQ ID NO: 89447 - RNA, 21 nt, synthetic construct
  source 1..21: mol_type = other RNA
gccccagaataggcaaattca

SEQ ID NO: 89448 - RNA, 21 nt, synthetic construct
  source 1..21: mol_type = other RNA
gccccagctaaaatgttcaga

SEQ ID NO: 89449 - RNA, 21 nt, synthetic construct
  source 1..21: mol_type = other RNA
gccccaggggacatagatgaa

SEQ ID NO: 89450 - RNA, 21 nt, synthetic construct
  source 1..21: mol_type = other RNA
gccccagttctgcgcaattgc

SEQ ID NO: 89451 - RNA, 21 nt, synthetic construct
  source 1..21: mol_type = other RNA
gccccatgtgttggcactgaa

SEQ ID NO: 89452 - RNA, 21 nt, synthetic construct
  source 1..21: mol_type = other RNA
gccccattgcactccacgtgg

SEQ ID NO: 89453 - RNA, 21 nt, synthetic construct
  source 1..21: mol_type = other RNA
gccccattgtacacatattaa

SEQ ID NO: 89454 - RNA, 21 nt, synthetic construct
  source 1..21: mol_type = other RNA
gcccccagttttgttgaatct

SEQ ID NO: 89455 - RNA, 21 nt, synthetic construct
  source 1..21: mol_type = other RNA
gcccccctgaaaaatgagaaa

SEQ ID NO: 89456 - RNA, 21 nt, synthetic construct
  source 1..21: mol_type = other RNA
gccccctccctaccacccgtc

SEQ ID NO: 89457 - RNA, 21 nt, synthetic construct
  source 1..21: mol_type = other RNA
gccccctcgaagagaccacag

SEQ ID NO: 89458 - RNA, 21 nt, synthetic construct
  source 1..21: mol_type = other RNA
gccccctcttctctcctttga

SEQ ID NO: 89459 - RNA, 21 nt, synthetic construct
  source 1..21: mol_type = other RNA
gccccctgaatacccctccct

SEQ ID NO: 89460 - RNA, 21 nt, synthetic construct
  source 1..21: mol_type = other RNA
gccccctgagtagctgtgatt

SEQ ID NO: 89461 - RNA, 21 nt, synthetic construct
  source 1..21: mol_type = other RNA
gccccgacgcctttcatttgg

SEQ ID NO: 89462 - RNA, 21 nt, synthetic construct
  source 1..21: mol_type = other RNA
gccccgatgccatgtgttttg

SEQ ID NO: 89463 - RNA, 21 nt, synthetic construct
  source 1..21: mol_type = other RNA
gccccgcttcagttggtgaag

SEQ ID NO: 89464 - RNA, 21 nt, synthetic construct
  source 1..21: mol_type = other RNA
gccccgggcctggttagggag

SEQ ID NO: 89465 - RNA, 21 nt, synthetic construct
  source 1..21: mol_type = other RNA
gcccctagcatgcagtagctc

SEQ ID NO: 89466 - RNA, 21 nt, synthetic construct
  source 1..21: mol_type = other RNA
gcccctcatcctccgtagctg

SEQ ID NO: 89467 - RNA, 21 nt, synthetic construct
  source 1..21: mol_type = other RNA
gcccctccactccacaaagcc

SEQ ID NO: 89468 - RNA, 21 nt, synthetic construct
  source 1..21: mol_type = other RNA
gcccctccatggaaactacaa

SEQ ID NO: 89469 - RNA, 21 nt, synthetic construct
  source 1..21: mol_type = other RNA
gcccctgccacactccagcat

SEQ ID NO: 89470 - RNA, 21 nt, synthetic construct
  source 1..21: mol_type = other RNA
gcccctgctgccagatgttct

SEQ ID NO: 89471 - RNA, 21 nt, synthetic construct
  source 1..21: mol_type = other RNA
gcccctggagaaagcccagcc

SEQ ID NO: 89472 - RNA, 21 nt, synthetic construct
  source 1..21: mol_type = other RNA
gcccctggtgatctatgaatt

SEQ ID NO: 89473 - RNA, 21 nt, synthetic construct
  source 1..21: mol_type = other RNA
gcccctgtagcagacactggg

SEQ ID NO: 89474 - RNA, 21 nt, synthetic construct
  source 1..21: mol_type = other RNA
gccccttatcaggaaagtgcc

SEQ ID NO: 89475 - RNA, 21 nt, synthetic construct
  source 1..21: mol_type = other RNA
gccccttatcctcttctgaag

SEQ ID NO: 89476 - RNA, 21 nt, synthetic construct
  source 1..21: mol_type = other RNA
gccccttgaaagatcatttag

SEQ ID NO: 89477 - RNA, 21 nt, synthetic construct
  source 1..21: mol_type = other RNA
gcccctttcaagattgtttaa

SEQ ID NO: 89478 - RNA, 21 nt, synthetic construct
  source 1..21: mol_type = other RNA
gcccctttgagcagagtcctg

SEQ ID NO: 89479 - RNA, 21 nt, synthetic construct
  source 1..21: mol_type = other RNA
gcccgacctccagcgctaagc

SEQ ID NO: 89480 - RNA, 21 nt, synthetic construct
  source 1..21: mol_type = other RNA
gcccgcgaaggcgtgtaaact

SEQ ID NO: 89481 - RNA, 21 nt, synthetic construct
  source 1..21: mol_type = other RNA
gcccggccaaatatccatgtt

SEQ ID NO: 89482 - RNA, 21 nt, synthetic construct
  source 1..21: mol_type = other RNA
gcccggccagacattttattt

SEQ ID NO: 89483 - RNA, 21 nt, synthetic construct
  source 1..21: mol_type = other RNA
gcccggcccagattccttttt

SEQ ID NO: 89484 - RNA, 21 nt, synthetic construct
  source 1..21: mol_type = other RNA
gcccggcccatgacatgtgtt

SEQ ID NO: 89485 - RNA, 21 nt, synthetic construct
  source 1..21: mol_type = other RNA
gcccggcccgttatttttatc

SEQ ID NO: 89486 - RNA, 21 nt, synthetic construct
  source 1..21: mol_type = other RNA
gcccggccgagaaatcggaac

SEQ ID NO: 89487 - RNA, 21 nt, synthetic construct
  source 1..21: mol_type = other RNA
gcccggccgatgcctgtgctt

SEQ ID NO: 89488 - RNA, 21 nt, synthetic construct
  source 1..21: mol_type = other RNA
gcccggggcagagaactgact

SEQ ID NO: 89489 - RNA, 21 nt, synthetic construct
  source 1..21: mol_type = other RNA
gcccgtccctgcttggcgcag

SEQ ID NO: 89490 - RNA, 21 nt, synthetic construct
  source 1..21: mol_type = other RNA
gcccgtgtgtttagaataata

SEQ ID NO: 89491 - RNA, 21 nt, synthetic construct
  source 1..21: mol_type = other RNA
gcccgttatttttatcataac

SEQ ID NO: 89492 - RNA, 21 nt, synthetic construct
  source 1..21: mol_type = other RNA
gccctaaccccagagattgtc

SEQ ID NO: 89493 - RNA, 21 nt, synthetic construct
  source 1..21: mol_type = other RNA
gccctacatatggcaattcca

SEQ ID NO: 89494 - RNA, 21 nt, synthetic construct
  source 1..21: mol_type = other RNA
gccctatgccttcagtatgaa

SEQ ID NO: 89495 - RNA, 21 nt, synthetic construct
  source 1..21: mol_type = other RNA
gccctattcaacctataagac

SEQ ID NO: 89496 - RNA, 21 nt, synthetic construct
  source 1..21: mol_type = other RNA
gccctcaggaccaggcagtcc

SEQ ID NO: 89497 - RNA, 21 nt, synthetic construct
  source 1..21: mol_type = other RNA
gccctcattgaagctactatt

SEQ ID NO: 89498 - RNA, 21 nt, synthetic construct
  source 1..21: mol_type = other RNA
gccctccaggatccagtctct

SEQ ID NO: 89499 - RNA, 21 nt, synthetic construct
  source 1..21: mol_type = other RNA
gccctccatttccctgcttca

SEQ ID NO: 89500 - RNA, 21 nt, synthetic construct
  source 1..21: mol_type = other RNA
gccctcccccgggacaatgcc

SEQ ID NO: 89501 - RNA, 21 nt, synthetic construct
  source 1..21: mol_type = other RNA
gccctctaagtcagcctgggc

SEQ ID NO: 89502 - RNA, 21 nt, synthetic construct
  source 1..21: mol_type = other RNA
gccctctataattctgccttc

SEQ ID NO: 89503 - RNA, 21 nt, synthetic construct
  source 1..21: mol_type = other RNA
gccctgagaagtcaaagcctg

SEQ ID NO: 89504 - RNA, 21 nt, synthetic construct
  source 1..21: mol_type = other RNA
gccctgatagatattggcaac

SEQ ID NO: 89505 - RNA, 21 nt, synthetic construct
  source 1..21: mol_type = other RNA
gccctgattgagattagcgaa

SEQ ID NO: 89506 - RNA, 21 nt, synthetic construct
  source 1..21: mol_type = other RNA
gccctgatttaaagtaggttg

SEQ ID NO: 89507 - RNA, 21 nt, synthetic construct
  source 1..21: mol_type = other RNA
gccctgcagccagatttgatc

SEQ ID NO: 89508 - RNA, 21 nt, synthetic construct
  source 1..21: mol_type = other RNA
gccctgccgcttcgcctttct

SEQ ID NO: 89509 - RNA, 21 nt, synthetic construct
  source 1..21: mol_type = other RNA
gccctgccttaaaacattttt

SEQ ID NO: 89510 - RNA, 21 nt, synthetic construct
  source 1..21: mol_type = other RNA
gccctgcgattggttggactc

SEQ ID NO: 89511 - RNA, 21 nt, synthetic construct
  source 1..21: mol_type = other RNA
gccctgctgtggccgagggag

SEQ ID NO: 89512 - RNA, 21 nt, synthetic construct
  source 1..21: mol_type = other RNA
gccctggcattgtcccggggg

SEQ ID NO: 89513 - RNA, 21 nt, synthetic construct
  source 1..21: mol_type = other RNA
gccctggtgctttctatctct

SEQ ID NO: 89514 - RNA, 21 nt, synthetic construct
  source 1..21: mol_type = other RNA
gccctgtgaaaatcattttgg

SEQ ID NO: 89515 - RNA, 21 nt, synthetic construct
  source 1..21: mol_type = other RNA
gccctgttggcctggacacac

SEQ ID NO: 89516 - RNA, 21 nt, synthetic construct
  source 1..21: mol_type = other RNA
gcccttaacttcacctctaca

SEQ ID NO: 89517 - RNA, 21 nt, synthetic construct
  source 1..21: mol_type = other RNA
gcccttatttaatgtgctgtc

SEQ ID NO: 89518 - RNA, 21 nt, synthetic construct
  source 1..21: mol_type = other RNA
gcccttccttgcttgtcttga

SEQ ID NO: 89519 - RNA, 21 nt, synthetic construct
  source 1..21: mol_type = other RNA
gcccttgagtatttttgagct

SEQ ID NO: 89520 - RNA, 21 nt, synthetic construct
  source 1..21: mol_type = other RNA
gccctttgttagtgccttcag

SEQ ID NO: 89521 - RNA, 21 nt, synthetic construct
  source 1..21: mol_type = other RNA
gccgaaatgcacttagcgctg

SEQ ID NO: 89522 - RNA, 21 nt, synthetic construct
  source 1..21: mol_type = other RNA
gccgaatgtggtggtatgcac

SEQ ID NO: 89523 - RNA, 21 nt, synthetic construct
  source 1..21: mol_type = other RNA
gccgacccccctacctccctc

SEQ ID NO: 89524 - RNA, 21 nt, synthetic construct
  source 1..21: mol_type = other RNA
gccgagaaatcggaactcctg

SEQ ID NO: 89525 - RNA, 21 nt, synthetic construct
  source 1..21: mol_type = other RNA
gccgagatcacgccactgcat

SEQ ID NO: 89526 - RNA, 21 nt, synthetic construct
  source 1..21: mol_type = other RNA
gccgagcagaagggaaaggat

SEQ ID NO: 89527 - RNA, 21 nt, synthetic construct
  source 1..21: mol_type = other RNA
gccgaggcagagagagtaact

SEQ ID NO: 89528 - RNA, 21 nt, synthetic construct
  source 1..21: mol_type = other RNA
gccgaggcaggtggatcagga

SEQ ID NO: 89529 - RNA, 21 nt, synthetic construct
  source 1..21: mol_type = other RNA
gccgaggccagtccctagtgt

SEQ ID NO: 89530 - RNA, 21 nt, synthetic construct
  source 1..21: mol_type = other RNA
gccgagggagacggcgagctt

SEQ ID NO: 89531 - RNA, 21 nt, synthetic construct
  source 1..21: mol_type = other RNA
gccgagggttgaacatcaccc

SEQ ID NO: 89532 - RNA, 21 nt, synthetic construct
  source 1..21: mol_type = other RNA
gccgatgcctgtgcttttctc

SEQ ID NO: 89533 - RNA, 21 nt, synthetic construct
  source 1..21: mol_type = other RNA
gccgcaaataatcattcttct

SEQ ID NO: 89534 - RNA, 21 nt, synthetic construct
  source 1..21: mol_type = other RNA
gccgcagagcaagcacgttag

SEQ ID NO: 89535 - RNA, 21 nt, synthetic construct
  source 1..21: mol_type = other RNA
gccgcagaggccaaatgaaag

SEQ ID NO: 89536 - RNA, 21 nt, synthetic construct
  source 1..21: mol_type = other RNA
gccgcagtgagccatggctgc

SEQ ID NO: 89537 - RNA, 21 nt, synthetic construct
  source 1..21: mol_type = other RNA
gccgcccctggagaaagccca

SEQ ID NO: 89538 - RNA, 21 nt, synthetic construct
  source 1..21: mol_type = other RNA
gccgccgcagaggccaaatga

SEQ ID NO: 89539 - RNA, 21 nt, synthetic construct
  source 1..21: mol_type = other RNA
gccgcgtccacctggcaacaa

SEQ ID NO: 89540 - RNA, 21 nt, synthetic construct
  source 1..21: mol_type = other RNA
gccgcgttttttgtccaccag

SEQ ID NO: 89541 - RNA, 21 nt, synthetic construct
  source 1..21: mol_type = other RNA
gccgctcttgaccttgtgcat

SEQ ID NO: 89542 - RNA, 21 nt, synthetic construct
  source 1..21: mol_type = other RNA
gccgctggtgaaaaaatggtg

SEQ ID NO: 89543 - RNA, 21 nt, synthetic construct
  source 1..21: mol_type = other RNA
gccgcttcgcctttctcgcag

SEQ ID NO: 89544 - RNA, 21 nt, synthetic construct
  source 1..21: mol_type = other RNA
gccggagcgggcagccttgga

SEQ ID NO: 89545 - RNA, 21 nt, synthetic construct
  source 1..21: mol_type = other RNA
gccggaggattgcttgagtgc

SEQ ID NO: 89546 - RNA, 21 nt, synthetic construct
  source 1..21: mol_type = other RNA
gccggattcctttcaaagaga

SEQ ID NO: 89547 - RNA, 21 nt, synthetic construct
  source 1..21: mol_type = other RNA
gccggcatatgtcactgtaag

SEQ ID NO: 89548 - RNA, 21 nt, synthetic construct
  source 1..21: mol_type = other RNA
gccggctgttaggtattattt

SEQ ID NO: 89549 - RNA, 21 nt, synthetic construct
  source 1..21: mol_type = other RNA
gccgggacaagagtctgcaga

SEQ ID NO: 89550 - RNA, 21 nt, synthetic construct
  source 1..21: mol_type = other RNA
gccgggaggagccaagtaaaa

SEQ ID NO: 89551 - RNA, 21 nt, synthetic construct
  source 1..21: mol_type = other RNA
gccgggatttacttctatatg

SEQ ID NO: 89552 - RNA, 21 nt, synthetic construct
  source 1..21: mol_type = other RNA
gccgggcttggtatgcatctt

SEQ ID NO: 89553 - RNA, 21 nt, synthetic construct
  source 1..21: mol_type = other RNA
gccgggtcgcggacgcgcatt

SEQ ID NO: 89554 - RNA, 21 nt, synthetic construct
  source 1..21: mol_type = other RNA
gccgggtgtagtggtgtgtga

SEQ ID NO: 89555 - RNA, 21 nt, synthetic construct
  source 1..21: mol_type = other RNA
gccggtaatcacagctactca

SEQ ID NO: 89556 - RNA, 21 nt, synthetic construct
  source 1..21: mol_type = other RNA
gccgtccctattttctacagg

SEQ ID NO: 89557 - RNA, 21 nt, synthetic construct
  source 1..21: mol_type = other RNA
gccgtcggtatgttaataacc

SEQ ID NO: 89558 - RNA, 21 nt, synthetic construct
  source 1..21: mol_type = other RNA
gccgtctccctcggccacagc

SEQ ID NO: 89559 - RNA, 21 nt, synthetic construct
  source 1..21: mol_type = other RNA
gccgttccatcagagaggctt

SEQ ID NO: 89560 - RNA, 21 nt, synthetic construct
  source 1..21: mol_type = other RNA
gcctaaaataggcctaggtgt

SEQ ID NO: 89561 - RNA, 21 nt, synthetic construct
  source 1..21: mol_type = other RNA
gcctaaaccattttcaatctt

SEQ ID NO: 89562 - RNA, 21 nt, synthetic construct
  source 1..21: mol_type = other RNA
gcctaaagtccacagatcttt

SEQ ID NO: 89563 - RNA, 21 nt, synthetic construct
  source 1..21: mol_type = other RNA
gcctaaataaaacacatgtca

SEQ ID NO: 89564 - RNA, 21 nt, synthetic construct
  source 1..21: mol_type = other RNA
gcctaaatcaggatgtctttg

SEQ ID NO: 89565 - RNA, 21 nt, synthetic construct
  source 1..21: mol_type = other RNA
gcctaacaccagtaagattct

SEQ ID NO: 89566 - RNA, 21 nt, synthetic construct
  source 1..21: mol_type = other RNA
gcctaagatggaaagtggact

SEQ ID NO: 89567 - RNA, 21 nt, synthetic construct
  source 1..21: mol_type = other RNA
gcctaagcaaatgtaatgaaa

SEQ ID NO: 89568 - RNA, 21 nt, synthetic construct
  source 1..21: mol_type = other RNA
gcctaagcaagttacatgctt

SEQ ID NO: 89569 - RNA, 21 nt, synthetic construct
  source 1..21: mol_type = other RNA
gcctaagtaatgctggccagt

SEQ ID NO: 89570 - RNA, 21 nt, synthetic construct
  source 1..21: mol_type = other RNA
gcctaagtctcaggatacaaa

SEQ ID NO: 89571 - RNA, 21 nt, synthetic construct
  source 1..21: mol_type = other RNA
gcctaatctctaggcttaaaa

SEQ ID NO: 89572 - RNA, 21 nt, synthetic construct
  source 1..21: mol_type = other RNA
gcctaatgtgtaagaaatgcc

SEQ ID NO: 89573 - RNA, 21 nt, synthetic construct
  source 1..21: mol_type = other RNA
gcctaattgtacacctcaaac

SEQ ID NO: 89574 - RNA, 21 nt, synthetic construct
  source 1..21: mol_type = other RNA
gcctacagtggttccatttgt

SEQ ID NO: 89575 - RNA, 21 nt, synthetic construct
  source 1..21: mol_type = other RNA
gcctacatagtccactttcca

SEQ ID NO: 89576 - RNA, 21 nt, synthetic construct
  source 1..21: mol_type = other RNA
gcctacctcccttcacaaagc

SEQ ID NO: 89577 - RNA, 21 nt, synthetic construct
  source 1..21: mol_type = other RNA
gcctactagccagtgattgga

SEQ ID NO: 89578 - RNA, 21 nt, synthetic construct
  source 1..21: mol_type = other RNA
gcctactgctctgtcctgtca

SEQ ID NO: 89579 - RNA, 21 nt, synthetic construct
  source 1..21: mol_type = other RNA
gcctagaaaggaattgtaatc

SEQ ID NO: 89580 - RNA, 21 nt, synthetic construct
  source 1..21: mol_type = other RNA
gcctagaaatcatacacgagt

SEQ ID NO: 89581 - RNA, 21 nt, synthetic construct
  source 1..21: mol_type = other RNA
gcctagacctcaaattaatca

SEQ ID NO: 89582 - RNA, 21 nt, synthetic construct
  source 1..21: mol_type = other RNA
gcctagagattaggcagaacc

SEQ ID NO: 89583 - RNA, 21 nt, synthetic construct
  source 1..21: mol_type = other RNA
gcctagataagaaaatgtgac

SEQ ID NO: 89584 - RNA, 21 nt, synthetic construct
  source 1..21: mol_type = other RNA
gcctagatgattcgcattgct

SEQ ID NO: 89585 - RNA, 21 nt, synthetic construct
  source 1..21: mol_type = other RNA
gcctagatttcaatctggaat

SEQ ID NO: 89586 - RNA, 21 nt, synthetic construct
  source 1..21: mol_type = other RNA
gcctagctgacttttaaaata

SEQ ID NO: 89587 - RNA, 21 nt, synthetic construct
  source 1..21: mol_type = other RNA
gcctaggcaagagagcaagac

SEQ ID NO: 89588 - RNA, 21 nt, synthetic construct
  source 1..21: mol_type = other RNA
gcctaggtgtgataactgata

SEQ ID NO: 89589 - RNA, 21 nt, synthetic construct
  source 1..21: mol_type = other RNA
gcctagtcatccactgcacag

SEQ ID NO: 89590 - RNA, 21 nt, synthetic construct
  source 1..21: mol_type = other RNA
gcctataaaatgctggaaatt

SEQ ID NO: 89591 - RNA, 21 nt, synthetic construct
  source 1..21: mol_type = other RNA
gcctataattcaattttcatg

SEQ ID NO: 89592 - RNA, 21 nt, synthetic construct
  source 1..21: mol_type = other RNA
gcctatagacagcatccccag

SEQ ID NO: 89593 - RNA, 21 nt, synthetic construct
  source 1..21: mol_type = other RNA
gcctatgaaatcttgaagatg

SEQ ID NO: 89594 - RNA, 21 nt, synthetic construct
  source 1..21: mol_type = other RNA
gcctatgtaagacaatgtctt

SEQ ID NO: 89595 - RNA, 21 nt, synthetic construct
  source 1..21: mol_type = other RNA
gcctattctggggctcaagta

SEQ ID NO: 89596 - RNA, 21 nt, synthetic construct
  source 1..21: mol_type = other RNA
gcctattttaggctctgtggt

SEQ ID NO: 89597 - RNA, 21 nt, synthetic construct
  source 1..21: mol_type = other RNA
gcctcaaaatcaacattgcct

SEQ ID NO: 89598 - RNA, 21 nt, synthetic construct
  source 1..21: mol_type = other RNA
gcctcaaaatttagtaagggt

SEQ ID NO: 89599 - RNA, 21 nt, synthetic construct
  source 1..21: mol_type = other RNA
gcctcaaacgaaccaattacc

SEQ ID NO: 89600 - RNA, 21 nt, synthetic construct
  source 1..21: mol_type = other RNA
gcctcaaattagtcatagcag

SEQ ID NO: 89601 - RNA, 21 nt, synthetic construct
  source 1..21: mol_type = other RNA
gcctcaaatttcatttactga

SEQ ID NO: 89602 - RNA, 21 nt, synthetic construct
  source 1..21: mol_type = other RNA
gcctcaacagcacttttgtac

SEQ ID NO: 89603 - RNA, 21 nt, synthetic construct
  source 1..21: mol_type = other RNA
gcctcagaattaatataagat

SEQ ID NO: 89604 - RNA, 21 nt, synthetic construct
  source 1..21: mol_type = other RNA
gcctcagcatgtcttcagagg

SEQ ID NO: 89605 - RNA, 21 nt, synthetic construct
  source 1..21: mol_type = other RNA
gcctcagcctcccgagtagtt

SEQ ID NO: 89606 - RNA, 21 nt, synthetic construct
  source 1..21: mol_type = other RNA
gcctcagcctcccgagtatct

SEQ ID NO: 89607 - RNA, 21 nt, synthetic construct
  source 1..21: mol_type = other RNA
gcctcagttgacatcctttaa

SEQ ID NO: 89608 - RNA, 21 nt, synthetic construct
  source 1..21: mol_type = other RNA
gcctcatgcatccacattttg

SEQ ID NO: 89609 - RNA, 21 nt, synthetic construct
  source 1..21: mol_type = other RNA
gcctcatgtattttcctaacc

SEQ ID NO: 89610 - RNA, 21 nt, synthetic construct
  source 1..21: mol_type = other RNA
gcctcatttgaactttccaga

SEQ ID NO: 89611 - RNA, 21 nt, synthetic construct
  source 1..21: mol_type = other RNA
gcctccacacctggccccttt

SEQ ID NO: 89612 - RNA, 21 nt, synthetic construct
  source 1..21: mol_type = other RNA
gcctccacaggctttgacttc

SEQ ID NO: 89613 - RNA, 21 nt, synthetic construct
  source 1..21: mol_type = other RNA
gcctccagaaaaccagaaaag

SEQ ID NO: 89614 - RNA, 21 nt, synthetic construct
  source 1..21: mol_type = other RNA
gcctccatatgggatgcttaa

SEQ ID NO: 89615 - RNA, 21 nt, synthetic construct
  source 1..21: mol_type = other RNA
gcctcccgagtagttgtaact

SEQ ID NO: 89616 - RNA, 21 nt, synthetic construct
  source 1..21: mol_type = other RNA
gcctcccgagtatctaggagt

SEQ ID NO: 89617 - RNA, 21 nt, synthetic construct
  source 1..21: mol_type = other RNA
gcctcccgggtccaggcagtt

SEQ ID NO: 89618 - RNA, 21 nt, synthetic construct
  source 1..21: mol_type = other RNA
gcctccctcactaagtcagaa

SEQ ID NO: 89619 - RNA, 21 nt, synthetic construct
  source 1..21: mol_type = other RNA
gcctccctggttcaagctatg

SEQ ID NO: 89620 - RNA, 21 nt, synthetic construct
  source 1..21: mol_type = other RNA
gcctcctaagttttgggggaa

SEQ ID NO: 89621 - RNA, 21 nt, synthetic construct
  source 1..21: mol_type = other RNA
gcctcctgccttcctgacctc

SEQ ID NO: 89622 - RNA, 21 nt, synthetic construct
  source 1..21: mol_type = other RNA
gcctcctgggttcaggtgcct

SEQ ID NO: 89623 - RNA, 21 nt, synthetic construct
  source 1..21: mol_type = other RNA
gcctcctggtgggttcatgcc

SEQ ID NO: 89624 - RNA, 21 nt, synthetic construct
  source 1..21: mol_type = other RNA
gcctcgaaggcctgcttcatt

SEQ ID NO: 89625 - RNA, 21 nt, synthetic construct
  source 1..21: mol_type = other RNA
gcctcgctcttggcttttggc

SEQ ID NO: 89626 - RNA, 21 nt, synthetic construct
  source 1..21: mol_type = other RNA
gcctcggcacagctctcatga

SEQ ID NO: 89627 - RNA, 21 nt, synthetic construct
  source 1..21: mol_type = other RNA
gcctcggccaaccattactct

SEQ ID NO: 89628 - RNA, 21 nt, synthetic construct
  source 1..21: mol_type = other RNA
gcctctaatcaggttgggctt

SEQ ID NO: 89629 - RNA, 21 nt, synthetic construct
  source 1..21: mol_type = other RNA
gcctctacatcacagacaggg

SEQ ID NO: 89630 - RNA, 21 nt, synthetic construct
  source 1..21: mol_type = other RNA
gcctctactgactcccttttt

SEQ ID NO: 89631 - RNA, 21 nt, synthetic construct
  source 1..21: mol_type = other RNA
gcctctcaacacttcagtggt

SEQ ID NO: 89632 - RNA, 21 nt, synthetic construct
  source 1..21: mol_type = other RNA
gcctctccagggaggaatcct

SEQ ID NO: 89633 - RNA, 21 nt, synthetic construct
  source 1..21: mol_type = other RNA
gcctctcccaccatctctctg

SEQ ID NO: 89634 - RNA, 21 nt, synthetic construct
  source 1..21: mol_type = other RNA
gcctctccccttgacgaagtc

SEQ ID NO: 89635 - RNA, 21 nt, synthetic construct
  source 1..21: mol_type = other RNA
gcctctctgatggaacggctt

SEQ ID NO: 89636 - RNA, 21 nt, synthetic construct
  source 1..21: mol_type = other RNA
gcctctctgggcttcactttc

SEQ ID NO: 89637 - RNA, 21 nt, synthetic construct
  source 1..21: mol_type = other RNA
gcctctgaagacatgctgagg

SEQ ID NO: 89638 - RNA, 21 nt, synthetic construct
  source 1..21: mol_type = other RNA
gcctctgcggcggctgaggca

SEQ ID NO: 89639 - RNA, 21 nt, synthetic construct
  source 1..21: mol_type = other RNA
gcctctgtgctagccttcttg

SEQ ID NO: 89640 - RNA, 21 nt, synthetic construct
  source 1..21: mol_type = other RNA
gcctctgtggaccatgtttta

SEQ ID NO: 89641 - RNA, 21 nt, synthetic construct
  source 1..21: mol_type = other RNA
gcctctgttacagctcttctc

SEQ ID NO: 89642 - RNA, 21 nt, synthetic construct
  source 1..21: mol_type = other RNA
gcctcttcagaagaggataag

SEQ ID NO: 89643 - RNA, 21 nt, synthetic construct
  source 1..21: mol_type = other RNA
gcctcttcccttgtgcacctc

SEQ ID NO: 89644 - RNA, 21 nt, synthetic construct
  source 1..21: mol_type = other RNA
gcctcttcctgttgctttaac

SEQ ID NO: 89645 - RNA, 21 nt, synthetic construct
  source 1..21: mol_type = other RNA
gcctctttgctaataagtgag

SEQ ID NO: 89646 - RNA, 21 nt, synthetic construct
  source 1..21: mol_type = other RNA
gcctgacaaagtatgagaaat

SEQ ID NO: 89647 - RNA, 21 nt, synthetic construct
  source 1..21: mol_type = other RNA
gcctgacagcaaataaacaaa

SEQ ID NO: 89648 - RNA, 21 nt, synthetic construct
  source 1..21: mol_type = other RNA
gcctgagccgtcggtatgtta

SEQ ID NO: 89649 - RNA, 21 nt, synthetic construct
  source 1..21: mol_type = other RNA
gcctgagctctcagtggccct

SEQ ID NO: 89650 - RNA, 21 nt, synthetic construct
  source 1..21: mol_type = other RNA
gcctgaggacactagcaatcc

SEQ ID NO: 89651 - RNA, 21 nt, synthetic construct
  source 1..21: mol_type = other RNA
gcctgaggtctcaaaatttaa

SEQ ID NO: 89652 - RNA, 21 nt, synthetic construct
  source 1..21: mol_type = other RNA
gcctgataagctcccagccaa

SEQ ID NO: 89653 - RNA, 21 nt, synthetic construct
  source 1..21: mol_type = other RNA
gcctgatagctgtggaagcac

SEQ ID NO: 89654 - RNA, 21 nt, synthetic construct
  source 1..21: mol_type = other RNA
gcctgatgatgatggtgatgc

SEQ ID NO: 89655 - RNA, 21 nt, synthetic construct
  source 1..21: mol_type = other RNA
gcctgcaccatttattgtcaa

SEQ ID NO: 89656 - RNA, 21 nt, synthetic construct
  source 1..21: mol_type = other RNA
gcctgcagaaggagaaaccat

SEQ ID NO: 89657 - RNA, 21 nt, synthetic construct
  source 1..21: mol_type = other RNA
gcctgcagactgcaggtcttc

SEQ ID NO: 89658 - RNA, 21 nt, synthetic construct
  source 1..21: mol_type = other RNA
gcctgcattgcatttacttgt

SEQ ID NO: 89659 - RNA, 21 nt, synthetic construct
  source 1..21: mol_type = other RNA
gcctgccatagagggagcatc

SEQ ID NO: 89660 - RNA, 21 nt, synthetic construct
  source 1..21: mol_type = other RNA
gcctgccgcagagcaagcacg

SEQ ID NO: 89661 - RNA, 21 nt, synthetic construct
  source 1..21: mol_type = other RNA
gcctgcgtccgtagaccgagg

SEQ ID NO: 89662 - RNA, 21 nt, synthetic construct
  source 1..21: mol_type = other RNA
gcctgctctgcagagactgtg

SEQ ID NO: 89663 - RNA, 21 nt, synthetic construct
  source 1..21: mol_type = other RNA
gcctgcttcagcctaagcaag

SEQ ID NO: 89664 - RNA, 21 nt, synthetic construct
  source 1..21: mol_type = other RNA
gcctgcttcattccgcgttta

SEQ ID NO: 89665 - RNA, 21 nt, synthetic construct
  source 1..21: mol_type = other RNA
gcctgcttttggaagcatgtg

SEQ ID NO: 89666 - RNA, 21 nt, synthetic construct
  source 1..21: mol_type = other RNA
gcctggaacaggccctttgtt

SEQ ID NO: 89667 - RNA, 21 nt, synthetic construct
  source 1..21: mol_type = other RNA
gcctggaagttcaaggttata

SEQ ID NO: 89668 - RNA, 21 nt, synthetic construct
  source 1..21: mol_type = other RNA
gcctggacaacagtgtgagac

SEQ ID NO: 89669 - RNA, 21 nt, synthetic construct
  source 1..21: mol_type = other RNA
gcctggacacacacagtcctg

SEQ ID NO: 89670 - RNA, 21 nt, synthetic construct
  source 1..21: mol_type = other RNA
gcctggacaggatcccggaac

SEQ ID NO: 89671 - RNA, 21 nt, synthetic construct
  source 1..21: mol_type = other RNA
gcctggacccgggaggcagat

SEQ ID NO: 89672 - RNA, 21 nt, synthetic construct
  source 1..21: mol_type = other RNA
gcctggatgaatgcagtggct

SEQ ID NO: 89673 - RNA, 21 nt, synthetic construct
  source 1..21: mol_type = other RNA
gcctggccaacatcgtaaaac

SEQ ID NO: 89674 - RNA, 21 nt, synthetic construct
  source 1..21: mol_type = other RNA
gcctggctttagatggtaaaa

SEQ ID NO: 89675 - RNA, 21 nt, synthetic construct
  source 1..21: mol_type = other RNA
gcctgggacagagcgagactc

SEQ ID NO: 89676 - RNA, 21 nt, synthetic construct
  source 1..21: mol_type = other RNA
gcctgggcacacgccactgca

SEQ ID NO: 89677 - RNA, 21 nt, synthetic construct
  source 1..21: mol_type = other RNA
gcctgggcgacaagagcagaa

SEQ ID NO: 89678 - RNA, 21 nt, synthetic construct
  source 1..21: mol_type = other RNA
gcctgggcgacagagtgaaac

SEQ ID NO: 89679 - RNA, 21 nt, synthetic construct
  source 1..21: mol_type = other RNA
gcctgggtaattaaacatttt

SEQ ID NO: 89680 - RNA, 21 nt, synthetic construct
  source 1..21: mol_type = other RNA
gcctggtaatgaatagaaaat

SEQ ID NO: 89681 - RNA, 21 nt, synthetic construct
  source 1..21: mol_type = other RNA
gcctggtcaacagggtaagat

SEQ ID NO: 89682 - RNA, 21 nt, synthetic construct
  source 1..21: mol_type = other RNA
gcctggtcctgagggctttgt

SEQ ID NO: 89683 - RNA, 21 nt, synthetic construct
  source 1..21: mol_type = other RNA
gcctggtgattaaagttattt

SEQ ID NO: 89684 - RNA, 21 nt, synthetic construct
  source 1..21: mol_type = other RNA
gcctggttagggagactttca

SEQ ID NO: 89685 - RNA, 21 nt, synthetic construct
  source 1..21: mol_type = other RNA
gcctgtagttttggtgtcatt

SEQ ID NO: 89686 - RNA, 21 nt, synthetic construct
  source 1..21: mol_type = other RNA
gcctgtgacagtatgtcagac

SEQ ID NO: 89687 - RNA, 21 nt, synthetic construct
  source 1..21: mol_type = other RNA
gcctgtgcttgtctctctctt

SEQ ID NO: 89688 - RNA, 21 nt, synthetic construct
  source 1..21: mol_type = other RNA
gcctgtgcttttctcgtgcat

SEQ ID NO: 89689 - RNA, 21 nt, synthetic construct
  source 1..21: mol_type = other RNA
gcctgtggaggcagtaccatt

SEQ ID NO: 89690 - RNA, 21 nt, synthetic construct
  source 1..21: mol_type = other RNA
gcctgtggtccctgctactca

SEQ ID NO: 89691 - RNA, 21 nt, synthetic construct
  source 1..21: mol_type = other RNA
gcctgtggtctcttcgagggg

SEQ ID NO: 89692 - RNA, 21 nt, synthetic construct
  source 1..21: mol_type = other RNA
gcctgtgtcagtgacagttct

SEQ ID NO: 89693 - RNA, 21 nt, synthetic construct
  source 1..21: mol_type = other RNA
gcctgttccaggcctcgctct

SEQ ID NO: 89694 - RNA, 21 nt, synthetic construct
  source 1..21: mol_type = other RNA
gcctgttccgattttacttac

SEQ ID NO: 89695 - RNA, 21 nt, synthetic construct
  source 1..21: mol_type = other RNA
gcctgttgtgaggattcgatt

SEQ ID NO: 89696 - RNA, 21 nt, synthetic construct
  source 1..21: mol_type = other RNA
gccttaaaagtgctgcagtat

SEQ ID NO: 89697 - RNA, 21 nt, synthetic construct
  source 1..21: mol_type = other RNA
gccttaaagccacactcttgg

SEQ ID NO: 89698 - RNA, 21 nt, synthetic construct
  source 1..21: mol_type = other RNA
gccttaatctcctgagtagca

SEQ ID NO: 89699 - RNA, 21 nt, synthetic construct
  source 1..21: mol_type = other RNA
gccttcaagttgctttttctt

SEQ ID NO: 89700 - RNA, 21 nt, synthetic construct
  source 1..21: mol_type = other RNA
gccttcaatgtttggtagatt

SEQ ID NO: 89701 - RNA, 21 nt, synthetic construct
  source 1..21: mol_type = other RNA
gccttcagaactcttctccaa

SEQ ID NO: 89702 - RNA, 21 nt, synthetic construct
  source 1..21: mol_type = other RNA
gccttcagaaggagtccagtc

SEQ ID NO: 89703 - RNA, 21 nt, synthetic construct
  source 1..21: mol_type = other RNA
gccttcagctatggtgttatt

SEQ ID NO: 89704 - RNA, 21 nt, synthetic construct
  source 1..21: mol_type = other RNA
gccttcagtatgaatgcacgt

SEQ ID NO: 89705 - RNA, 21 nt, synthetic construct
  source 1..21: mol_type = other RNA
gccttccacctgctctttatc

SEQ ID NO: 89706 - RNA, 21 nt, synthetic construct
  source 1..21: mol_type = other RNA
gccttccacggaatgcccctt

SEQ ID NO: 89707 - RNA, 21 nt, synthetic construct
  source 1..21: mol_type = other RNA
gccttccagagacaaagcata

SEQ ID NO: 89708 - RNA, 21 nt, synthetic construct
  source 1..21: mol_type = other RNA
gccttcccaaagacatcctga

SEQ ID NO: 89709 - RNA, 21 nt, synthetic construct
  source 1..21: mol_type = other RNA
gccttcccctgctgttcccaa

SEQ ID NO: 89710 - RNA, 21 nt, synthetic construct
  source 1..21: mol_type = other RNA
gccttccctgaacaatgattt

SEQ ID NO: 89711 - RNA, 21 nt, synthetic construct
  source 1..21: mol_type = other RNA
gccttcctaccctgccttcct

SEQ ID NO: 89712 - RNA, 21 nt, synthetic construct
  source 1..21: mol_type = other RNA
gccttcctgacctctgcagtt

SEQ ID NO: 89713 - RNA, 21 nt, synthetic construct
  source 1..21: mol_type = other RNA
gccttccttgggcacactccc

SEQ ID NO: 89714 - RNA, 21 nt, synthetic construct
  source 1..21: mol_type = other RNA
gccttcgaggcatctagttac

SEQ ID NO: 89715 - RNA, 21 nt, synthetic construct
  source 1..21: mol_type = other RNA
gccttcgcagggtgaaacttg

SEQ ID NO: 89716 - RNA, 21 nt, synthetic construct
  source 1..21: mol_type = other RNA
gccttcgcgcgcggcagggat

SEQ ID NO: 89717 - RNA, 21 nt, synthetic construct
  source 1..21: mol_type = other RNA
gccttcgcgggcaccttccct

SEQ ID NO: 89718 - RNA, 21 nt, synthetic construct
  source 1..21: mol_type = other RNA
gccttctactttaataaatga

SEQ ID NO: 89719 - RNA, 21 nt, synthetic construct
  source 1..21: mol_type = other RNA
gccttctcagaaggacaccag

SEQ ID NO: 89720 - RNA, 21 nt, synthetic construct
  source 1..21: mol_type = other RNA
gccttctcctccaacccattc

SEQ ID NO: 89721 - RNA, 21 nt, synthetic construct
  source 1..21: mol_type = other RNA
gccttctctactctgcctcag

SEQ ID NO: 89722 - RNA, 21 nt, synthetic construct
  source 1..21: mol_type = other RNA
gccttctctcttccaaataat

SEQ ID NO: 89723 - RNA, 21 nt, synthetic construct
  source 1..21: mol_type = other RNA
gccttctgaggagctgagacc

SEQ ID NO: 89724 - RNA, 21 nt, synthetic construct
  source 1..21: mol_type = other RNA
gccttcttggagtaaacctgc

SEQ ID NO: 89725 - RNA, 21 nt, synthetic construct
  source 1..21: mol_type = other RNA
gccttctttctttcaaatgtg

SEQ ID NO: 89726 - RNA, 21 nt, synthetic construct
  source 1..21: mol_type = other RNA
gccttgacctcccaaaggact

SEQ ID NO: 89727 - RNA, 21 nt, synthetic construct
  source 1..21: mol_type = other RNA
gccttgaggtgagacagaccc

SEQ ID NO: 89728 - RNA, 21 nt, synthetic construct
  source 1..21: mol_type = other RNA
gccttgaggtgattcagagtg

SEQ ID NO: 89729 - RNA, 21 nt, synthetic construct
  source 1..21: mol_type = other RNA
gccttgatccattacatcaac

SEQ ID NO: 89730 - RNA, 21 nt, synthetic construct
  source 1..21: mol_type = other RNA
gccttgcaagccacattagcc

SEQ ID NO: 89731 - RNA, 21 nt, synthetic construct
  source 1..21: mol_type = other RNA
gccttgccattctcccagttg

SEQ ID NO: 89732 - RNA, 21 nt, synthetic construct
  source 1..21: mol_type = other RNA
gccttgctgttgtaatgttac

SEQ ID NO: 89733 - RNA, 21 nt, synthetic construct
  source 1..21: mol_type = other RNA
gccttggaggagccctgctgt

SEQ ID NO: 89734 - RNA, 21 nt, synthetic construct
  source 1..21: mol_type = other RNA
gccttggcaaggggaatggta

SEQ ID NO: 89735 - RNA, 21 nt, synthetic construct
  source 1..21: mol_type = other RNA
gccttggccttctgaggagct

SEQ ID NO: 89736 - RNA, 21 nt, synthetic construct
  source 1..21: mol_type = other RNA
gccttggtaaaatcactaatt

SEQ ID NO: 89737 - RNA, 21 nt, synthetic construct
  source 1..21: mol_type = other RNA
gccttggtaagagtgagaccc

SEQ ID NO: 89738 - RNA, 21 nt, synthetic construct
  source 1..21: mol_type = other RNA
gccttgtactgtgtggcttct

SEQ ID NO: 89739 - RNA, 21 nt, synthetic construct
  source 1..21: mol_type = other RNA
gcctttaatcacctcaagtga

SEQ ID NO: 89740 - RNA, 21 nt, synthetic construct
  source 1..21: mol_type = other RNA
gcctttaatttagcgttcatc

SEQ ID NO: 89741 - RNA, 21 nt, synthetic construct
  source 1..21: mol_type = other RNA
gcctttattttttcttcccat

SEQ ID NO: 89742 - RNA, 21 nt, synthetic construct
  source 1..21: mol_type = other RNA
gcctttcactttgatcataca

SEQ ID NO: 89743 - RNA, 21 nt, synthetic construct
  source 1..21: mol_type = other RNA
gcctttcagcatagcagaacc

SEQ ID NO: 89744 - RNA, 21 nt, synthetic construct
  source 1..21: mol_type = other RNA
gcctttcatttggcctctgcg

SEQ ID NO: 89745 - RNA, 21 nt, synthetic construct
  source 1..21: mol_type = other RNA
gcctttcgcttttggagctat

SEQ ID NO: 89746 - RNA, 21 nt, synthetic construct
  source 1..21: mol_type = other RNA
gcctttctcgcagcggggatg

SEQ ID NO: 89747 - RNA, 21 nt, synthetic construct
  source 1..21: mol_type = other RNA
gcctttctgtttgtttgtttt

SEQ ID NO: 89748 - RNA, 21 nt, synthetic construct
  source 1..21: mol_type = other RNA
gcctttgcctctccagggagg

SEQ ID NO: 89749 - RNA, 21 nt, synthetic construct
  source 1..21: mol_type = other RNA
gcctttgttcatcatcttttg

SEQ ID NO: 89750 - RNA, 21 nt, synthetic construct
  source 1..21: mol_type = other RNA
gcctttgttgccaggtggacg

SEQ ID NO: 89751 - RNA, 21 nt, synthetic construct
  source 1..21: mol_type = other RNA
gccttttacaccctaggtagg

SEQ ID NO: 89752 - RNA, 21 nt, synthetic construct
  source 1..21: mol_type = other RNA
gccttttcactcttagtgatg

SEQ ID NO: 89753 - RNA, 21 nt, synthetic construct
  source 1..21: mol_type = other RNA
gccttttctgatttgctggct

SEQ ID NO: 89754 - RNA, 21 nt, synthetic construct
  source 1..21: mol_type = other RNA
gccttttgtcaagctatcaga

SEQ ID NO: 89755 - RNA, 21 nt, synthetic construct
  source 1..21: mol_type = other RNA
gcgaaacacactcgtgtatga

SEQ ID NO: 89756 - RNA, 21 nt, synthetic construct
  source 1..21: mol_type = other RNA
gcgaaagggattctggccaaa

SEQ ID NO: 89757 - RNA, 21 nt, synthetic construct
  source 1..21: mol_type = other RNA
gcgaaaggtacgacgctcttg

SEQ ID NO: 89758 - RNA, 21 nt, synthetic construct
  source 1..21: mol_type = other RNA
gcgaaatagtagttgctcaga

SEQ ID NO: 89759 - RNA, 21 nt, synthetic construct
  source 1..21: mol_type = other RNA
gcgaaatatctccctcacagt

SEQ ID NO: 89760 - RNA, 21 nt, synthetic construct
  source 1..21: mol_type = other RNA
gcgaaatgtgaacagacagac

SEQ ID NO: 89761 - RNA, 21 nt, synthetic construct
  source 1..21: mol_type = other RNA
gcgaagagggagaagaaataa

SEQ ID NO: 89762 - RNA, 21 nt, synthetic construct
  source 1..21: mol_type = other RNA
gcgaaggcaatgtaacacagt

SEQ ID NO: 89763 - RNA, 21 nt, synthetic construct
  source 1..21: mol_type = other RNA
gcgaaggcgtgtaaactgttg

SEQ ID NO: 89764 - RNA, 21 nt, synthetic construct
  source 1..21: mol_type = other RNA
gcgaatcatctaggcatataa

SEQ ID NO: 89765 - RNA, 21 nt, synthetic construct
  source 1..21: mol_type = other RNA
gcgaatttacttttaaactgt

SEQ ID NO: 89766 - RNA, 21 nt, synthetic construct
  source 1..21: mol_type = other RNA
gcgacaagagcagaactccac

SEQ ID NO: 89767 - RNA, 21 nt, synthetic construct
  source 1..21: mol_type = other RNA
gcgacagagtgaaactctggc

SEQ ID NO: 89768 - RNA, 21 nt, synthetic construct
  source 1..21: mol_type = other RNA
gcgacagctacggaggatgag

SEQ ID NO: 89769 - RNA, 21 nt, synthetic construct
  source 1..21: mol_type = other RNA
gcgacatatcagggatcacag

SEQ ID NO: 89770 - RNA, 21 nt, synthetic construct
  source 1..21: mol_type = other RNA
gcgacctcgaagcacaaccac

SEQ ID NO: 89771 - RNA, 21 nt, synthetic construct
  source 1..21: mol_type = other RNA
gcgactcatgcctgtaattct

SEQ ID NO: 89772 - RNA, 21 nt, synthetic construct
  source 1..21: mol_type = other RNA
gcgagaaaggcgaagcggcag

SEQ ID NO: 89773 - RNA, 21 nt, synthetic construct
  source 1..21: mol_type = other RNA
gcgagacctcatctctgcaaa

SEQ ID NO: 89774 - RNA, 21 nt, synthetic construct
  source 1..21: mol_type = other RNA
gcgagactccatctcaagaaa

SEQ ID NO: 89775 - RNA, 21 nt, synthetic construct
  source 1..21: mol_type = other RNA
gcgagatggcgtgcgcctgta

SEQ ID NO: 89776 - RNA, 21 nt, synthetic construct
  source 1..21: mol_type = other RNA
gcgagcggcgggcttcgcctt

SEQ ID NO: 89777 - RNA, 21 nt, synthetic construct
  source 1..21: mol_type = other RNA
gcgagcttgatctttacttcc

SEQ ID NO: 89778 - RNA, 21 nt, synthetic construct
  source 1..21: mol_type = other RNA
gcgaggcctggaacaggccct

SEQ ID NO: 89779 - RNA, 21 nt, synthetic construct
  source 1..21: mol_type = other RNA
gcgagggagcgtacggggtcc

SEQ ID NO: 89780 - RNA, 21 nt, synthetic construct
  source 1..21: mol_type = other RNA
gcgagtgtgaacgatggtttc

SEQ ID NO: 89781 - RNA, 21 nt, synthetic construct
  source 1..21: mol_type = other RNA
gcgatgatcaaaaccaggagg

SEQ ID NO: 89782 - RNA, 21 nt, synthetic construct
  source 1..21: mol_type = other RNA
gcgattggttggactccaccc

SEQ ID NO: 89783 - RNA, 21 nt, synthetic construct
  source 1..21: mol_type = other RNA
gcgattgtttcagtgtgtcca

SEQ ID NO: 89784 - RNA, 21 nt, synthetic construct
  source 1..21: mol_type = other RNA
gcgcaacaattcaacagctac

SEQ ID NO: 89785 - RNA, 21 nt, synthetic construct
  source 1..21: mol_type = other RNA
gcgcaattgcagccagagagt

SEQ ID NO: 89786 - RNA, 21 nt, synthetic construct
  source 1..21: mol_type = other RNA
gcgcacgccatctcgcccagc

SEQ ID NO: 89787 - RNA, 21 nt, synthetic construct
  source 1..21: mol_type = other RNA
gcgcagaactggggcttgaac

SEQ ID NO: 89788 - RNA, 21 nt, synthetic construct
  source 1..21: mol_type = other RNA
gcgcagacacaccatgacaga

SEQ ID NO: 89789 - RNA, 21 nt, synthetic construct
  source 1..21: mol_type = other RNA
gcgcagccatggctcactgcg

SEQ ID NO: 89790 - RNA, 21 nt, synthetic construct
  source 1..21: mol_type = other RNA
gcgcagtgcttagcgctggag

SEQ ID NO: 89791 - RNA, 21 nt, synthetic construct
  source 1..21: mol_type = other RNA
gcgcattttttaagtggcgct

SEQ ID NO: 89792 - RNA, 21 nt, synthetic construct
  source 1..21: mol_type = other RNA
gcgccacgtgaagatggagtt

SEQ ID NO: 89793 - RNA, 21 nt, synthetic construct
  source 1..21: mol_type = other RNA
gcgccactgcactccagcctt

SEQ ID NO: 89794 - RNA, 21 nt, synthetic construct
  source 1..21: mol_type = other RNA
gcgccacttaaaaaatgcgcg

SEQ ID NO: 89795 - RNA, 21 nt, synthetic construct
  source 1..21: mol_type = other RNA
gcgccatcacacccagtatac

SEQ ID NO: 89796 - RNA, 21 nt, synthetic construct
  source 1..21: mol_type = other RNA
gcgcccagcccgtgtgtttag

SEQ ID NO: 89797 - RNA, 21 nt, synthetic construct
  source 1..21: mol_type = other RNA
gcgcccggccaaatatccatg

SEQ ID NO: 89798 - RNA, 21 nt, synthetic construct
  source 1..21: mol_type = other RNA
gcgcccggcccagattccttt

SEQ ID NO: 89799 - RNA, 21 nt, synthetic construct
  source 1..21: mol_type = other RNA
gcgcccggcccgttattttta

SEQ ID NO: 89800 - RNA, 21 nt, synthetic construct
  source 1..21: mol_type = other RNA
gcgcccggccgagaaatcgga

SEQ ID NO: 89801 - RNA, 21 nt, synthetic construct
  source 1..21: mol_type = other RNA
gcgccctggcattgtcccggg

SEQ ID NO: 89802 - RNA, 21 nt, synthetic construct
  source 1..21: mol_type = other RNA
gcgcctgcattgcatttactt

SEQ ID NO: 89803 - RNA, 21 nt, synthetic construct
  source 1..21: mol_type = other RNA
gcgcctggacaggatcccgga

SEQ ID NO: 89804 - RNA, 21 nt, synthetic construct
  source 1..21: mol_type = other RNA
gcgcctggtgattaaagttat

SEQ ID NO: 89805 - RNA, 21 nt, synthetic construct
  source 1..21: mol_type = other RNA
gcgccttaaagccacactctt

SEQ ID NO: 89806 - RNA, 21 nt, synthetic construct
  source 1..21: mol_type = other RNA
gcgcgagggagcgtacggggt

SEQ ID NO: 89807 - RNA, 21 nt, synthetic construct
  source 1..21: mol_type = other RNA
gcgcggcagggatgctgcgag

SEQ ID NO: 89808 - RNA, 21 nt, synthetic construct
  source 1..21: mol_type = other RNA
gcgcgtcaaaagatgctggtg

SEQ ID NO: 89809 - RNA, 21 nt, synthetic construct
  source 1..21: mol_type = other RNA
gcgcgtgcctatggtcctagc

SEQ ID NO: 89810 - RNA, 21 nt, synthetic construct
  source 1..21: mol_type = other RNA
gcgcgtgcctgcaatcgcagg

SEQ ID NO: 89811 - RNA, 21 nt, synthetic construct
  source 1..21: mol_type = other RNA
gcgctaagcactgcgccaagc

SEQ ID NO: 89812 - RNA, 21 nt, synthetic construct
  source 1..21: mol_type = other RNA
gcgctaagtgcatttcggctc

SEQ ID NO: 89813 - RNA, 21 nt, synthetic construct
  source 1..21: mol_type = other RNA
gcgctactcagctgtcactct

SEQ ID NO: 89814 - RNA, 21 nt, synthetic construct
  source 1..21: mol_type = other RNA
gcgctccctctgtgtgcatgc

SEQ ID NO: 89815 - RNA, 21 nt, synthetic construct
  source 1..21: mol_type = other RNA
gcgctcctctcccgccggagt

SEQ ID NO: 89816 - RNA, 21 nt, synthetic construct
  source 1..21: mol_type = other RNA
gcgctcttcaagcattgggag

SEQ ID NO: 89817 - RNA, 21 nt, synthetic construct
  source 1..21: mol_type = other RNA
gcgctgaagtacttcaaggtt

SEQ ID NO: 89818 - RNA, 21 nt, synthetic construct
  source 1..21: mol_type = other RNA
gcgctgatgtgttgaccttag

SEQ ID NO: 89819 - RNA, 21 nt, synthetic construct
  source 1..21: mol_type = other RNA
gcgctggaggtcgggctgcct

SEQ ID NO: 89820 - RNA, 21 nt, synthetic construct
  source 1..21: mol_type = other RNA
gcgctgtttgcctgcgtccgt

SEQ ID NO: 89821 - RNA, 21 nt, synthetic construct
  source 1..21: mol_type = other RNA
gcgcttctatgtgacaaacac

SEQ ID NO: 89822 - RNA, 21 nt, synthetic construct
  source 1..21: mol_type = other RNA
gcgcttgaacaaatatgaatg

SEQ ID NO: 89823 - RNA, 21 nt, synthetic construct
  source 1..21: mol_type = other RNA
gcgctttaagcatcccatatg

SEQ ID NO: 89824 - RNA, 21 nt, synthetic construct
  source 1..21: mol_type = other RNA
gcggaaggattgcctaacacc

SEQ ID NO: 89825 - RNA, 21 nt, synthetic construct
  source 1..21: mol_type = other RNA
gcggaagttgcagtgagccca

SEQ ID NO: 89826 - RNA, 21 nt, synthetic construct
  source 1..21: mol_type = other RNA
gcggaatgaagcaggccttcg

SEQ ID NO: 89827 - RNA, 21 nt, synthetic construct
  source 1..21: mol_type = other RNA
gcggaatgactatagaaattt

SEQ ID NO: 89828 - RNA, 21 nt, synthetic construct
  source 1..21: mol_type = other RNA
gcggaatgcagtggcgtgatc

SEQ ID NO: 89829 - RNA, 21 nt, synthetic construct
  source 1..21: mol_type = other RNA
gcggaccccgtacgctccctc

SEQ ID NO: 89830 - RNA, 21 nt, synthetic construct
  source 1..21: mol_type = other RNA
gcggacgcgcattttttaagt

SEQ ID NO: 89831 - RNA, 21 nt, synthetic construct
  source 1..21: mol_type = other RNA
gcggactccggcgggagagga

SEQ ID NO: 89832 - RNA, 21 nt, synthetic construct
  source 1..21: mol_type = other RNA
gcggaggttgcggtgacgtga

SEQ ID NO: 89833 - RNA, 21 nt, synthetic construct
  source 1..21: mol_type = other RNA
gcggatgccggtaatcacagc

SEQ ID NO: 89834 - RNA, 21 nt, synthetic construct
  source 1..21: mol_type = other RNA
gcggcacttggtaagctgtga

SEQ ID NO: 89835 - RNA, 21 nt, synthetic construct
  source 1..21: mol_type = other RNA
gcggcaggcattgtgctcagt

SEQ ID NO: 89836 - RNA, 21 nt, synthetic construct
  source 1..21: mol_type = other RNA
gcggcagggatgctgcgagcc

SEQ ID NO: 89837 - RNA, 21 nt, synthetic construct
  source 1..21: mol_type = other RNA
gcggcatacaggagttccgat

SEQ ID NO: 89838 - RNA, 21 nt, synthetic construct
  source 1..21: mol_type = other RNA
gcggcctttgcctctccaggg

SEQ ID NO: 89839 - RNA, 21 nt, synthetic construct
  source 1..21: mol_type = other RNA
gcggcgggcttcgcctttgtt

SEQ ID NO: 89840 - RNA, 21 nt, synthetic construct
  source 1..21: mol_type = other RNA
gcggctgaggcagcccgacct

SEQ ID NO: 89841 - RNA, 21 nt, synthetic construct
  source 1..21: mol_type = other RNA
gcggctggatcgcttgaggtc

SEQ ID NO: 89842 - RNA, 21 nt, synthetic construct
  source 1..21: mol_type = other RNA
gcggctgggctttctccaggg

SEQ ID NO: 89843 - RNA, 21 nt, synthetic construct
  source 1..21: mol_type = other RNA
gcggcttgattagcttcctca

SEQ ID NO: 89844 - RNA, 21 nt, synthetic construct
  source 1..21: mol_type = other RNA
gcggctttgtggagtggaggg

SEQ ID NO: 89845 - RNA, 21 nt, synthetic construct
  source 1..21: mol_type = other RNA
gcgggaaaaaataatatgaga

SEQ ID NO: 89846 - RNA, 21 nt, synthetic construct
  source 1..21: mol_type = other RNA
gcgggaggctgaggcaggagc

SEQ ID NO: 89847 - RNA, 21 nt, synthetic construct
  source 1..21: mol_type = other RNA
gcgggattatttggaagagag

SEQ ID NO: 89848 - RNA, 21 nt, synthetic construct
  source 1..21: mol_type = other RNA
gcgggcaccttccctactcac

SEQ ID NO: 89849 - RNA, 21 nt, synthetic construct
  source 1..21: mol_type = other RNA
gcgggcagccttggaggagcc

SEQ ID NO: 89850 - RNA, 21 nt, synthetic construct
  source 1..21: mol_type = other RNA
gcgggcccagctcttttgtgt

SEQ ID NO: 89851 - RNA, 21 nt, synthetic construct
  source 1..21: mol_type = other RNA
gcgggcttcgcctttgttgcc

SEQ ID NO: 89852 - RNA, 21 nt, synthetic construct
  source 1..21: mol_type = other RNA
gcggggatgctcagggtgcga

SEQ ID NO: 89853 - RNA, 21 nt, synthetic construct
  source 1..21: mol_type = other RNA
gcggggatggttgcacaatgt

SEQ ID NO: 89854 - RNA, 21 nt, synthetic construct
  source 1..21: mol_type = other RNA
gcggggccgcccctggagaaa

SEQ ID NO: 89855 - RNA, 21 nt, synthetic construct
  source 1..21: mol_type = other RNA
gcggggctgccactacttagc

SEQ ID NO: 89856 - RNA, 21 nt, synthetic construct
  source 1..21: mol_type = other RNA
gcggggtttcagcacaatact

SEQ ID NO: 89857 - RNA, 21 nt, synthetic construct
  source 1..21: mol_type = other RNA
gcgggtttcctcggtctacgg

SEQ ID NO: 89858 - RNA, 21 nt, synthetic construct
  source 1..21: mol_type = other RNA
gcggtcaacgcacccagagcg

SEQ ID NO: 89859 - RNA, 21 nt, synthetic construct
  source 1..21: mol_type = other RNA
gcggtcttttagccaacaacc

SEQ ID NO: 89860 - RNA, 21 nt, synthetic construct
  source 1..21: mol_type = other RNA
gcggtgacgtgagatcatgcc

SEQ ID NO: 89861 - RNA, 21 nt, synthetic construct
  source 1..21: mol_type = other RNA
gcggtggggacagctcaatta

SEQ ID NO: 89862 - RNA, 21 nt, synthetic construct
  source 1..21: mol_type = other RNA
gcggtgtcttattgttttgat

SEQ ID NO: 89863 - RNA, 21 nt, synthetic construct
  source 1..21: mol_type = other RNA
gcgtaactccatcttcacgtg

SEQ ID NO: 89864 - RNA, 21 nt, synthetic construct
  source 1..21: mol_type = other RNA
gcgtaagggtacagaactgct

SEQ ID NO: 89865 - RNA, 21 nt, synthetic construct
  source 1..21: mol_type = other RNA
gcgtacatgtagatatgggag

SEQ ID NO: 89866 - RNA, 21 nt, synthetic construct
  source 1..21: mol_type = other RNA
gcgtactgtgattacaattcc

SEQ ID NO: 89867 - RNA, 21 nt, synthetic construct
  source 1..21: mol_type = other RNA
gcgtagtatctcatgcttagg

SEQ ID NO: 89868 - RNA, 21 nt, synthetic construct
  source 1..21: mol_type = other RNA
gcgtcaaaagatgctggtgga

SEQ ID NO: 89869 - RNA, 21 nt, synthetic construct
  source 1..21: mol_type = other RNA
gcgtccacctggcaacaaagg

SEQ ID NO: 89870 - RNA, 21 nt, synthetic construct
  source 1..21: mol_type = other RNA
gcgtccgtagaccgaggaaac

SEQ ID NO: 89871 - RNA, 21 nt, synthetic construct
  source 1..21: mol_type = other RNA
gcgtcctcactgtgataccta

SEQ ID NO: 89872 - RNA, 21 nt, synthetic construct
  source 1..21: mol_type = other RNA
gcgtcgtacctttcgctatca

SEQ ID NO: 89873 - RNA, 21 nt, synthetic construct
  source 1..21: mol_type = other RNA
gcgtctgtgattatcagggat

SEQ ID NO: 89874 - RNA, 21 nt, synthetic construct
  source 1..21: mol_type = other RNA
gcgtgaatctgttcctgggtt

SEQ ID NO: 89875 - RNA, 21 nt, synthetic construct
  source 1..21: mol_type = other RNA
gcgtgagccaccacgtccggt

SEQ ID NO: 89876 - RNA, 21 nt, synthetic construct
  source 1..21: mol_type = other RNA
gcgtgagccaccactcccggc

SEQ ID NO: 89877 - RNA, 21 nt, synthetic construct
  source 1..21: mol_type = other RNA
gcgtgagccaccgcgcctggt

SEQ ID NO: 89878 - RNA, 21 nt, synthetic construct
  source 1..21: mol_type = other RNA
gcgtgagccacctcatccggt

SEQ ID NO: 89879 - RNA, 21 nt, synthetic construct
  source 1..21: mol_type = other RNA
gcgtgagccatcgcgcccagc

SEQ ID NO: 89880 - RNA, 21 nt, synthetic construct
  source 1..21: mol_type = other RNA
gcgtgagcctccacacctggc

SEQ ID NO: 89881 - RNA, 21 nt, synthetic construct
  source 1..21: mol_type = other RNA
gcgtgcaccttacattgtaat

SEQ ID NO: 89882 - RNA, 21 nt, synthetic construct
  source 1..21: mol_type = other RNA
gcgtgcctgcaatcgcaggca

SEQ ID NO: 89883 - RNA, 21 nt, synthetic construct
  source 1..21: mol_type = other RNA
gcgtggaatggtcaatttcat

SEQ ID NO: 89884 - RNA, 21 nt, synthetic construct
  source 1..21: mol_type = other RNA
gcgtggagcggtgtcttattg

SEQ ID NO: 89885 - RNA, 21 nt, synthetic construct
  source 1..21: mol_type = other RNA
gcgtggatgtgtgcacaacac

SEQ ID NO: 89886 - RNA, 21 nt, synthetic construct
  source 1..21: mol_type = other RNA
gcgtgggcaacacaatgagac

SEQ ID NO: 89887 - RNA, 21 nt, synthetic construct
  source 1..21: mol_type = other RNA
gcgtgggggctcacatctgta

SEQ ID NO: 89888 - RNA, 21 nt, synthetic construct
  source 1..21: mol_type = other RNA
gcgtggtggcggatgccggta

SEQ ID NO: 89889 - RNA, 21 nt, synthetic construct
  source 1..21: mol_type = other RNA
gcgtggttcacacctgtagtc

SEQ ID NO: 89890 - RNA, 21 nt, synthetic construct
  source 1..21: mol_type = other RNA
gcgtggtttattcatataatg

SEQ ID NO: 89891 - RNA, 21 nt, synthetic construct
  source 1..21: mol_type = other RNA
gcgtgtaaactgttggaaaaa

SEQ ID NO: 89892 - RNA, 21 nt, synthetic construct
  source 1..21: mol_type = other RNA
gcgtgtgaaaccaagcaagta

SEQ ID NO: 89893 - RNA, 21 nt, synthetic construct
  source 1..21: mol_type = other RNA
gcgtgtgcatgaccctgctat

SEQ ID NO: 89894 - RNA, 21 nt, synthetic construct
  source 1..21: mol_type = other RNA
gcgtgtgcccaggctgactta

SEQ ID NO: 89895 - RNA, 21 nt, synthetic construct
  source 1..21: mol_type = other RNA
gcgtgttattttaatcgaatc

SEQ ID NO: 89896 - RNA, 21 nt, synthetic construct
  source 1..21: mol_type = other RNA
gcgttcatccaaattattgac

SEQ ID NO: 89897 - RNA, 21 nt, synthetic construct
  source 1..21: mol_type = other RNA
gcgttgaccgctttcgtgagg

SEQ ID NO: 89898 - RNA, 21 nt, synthetic construct
  source 1..21: mol_type = other RNA
gcgttgagccatcatgcctgg

SEQ ID NO: 89899 - RNA, 21 nt, synthetic construct
  source 1..21: mol_type = other RNA
gcgttggagacagcctaaacc

SEQ ID NO: 89900 - RNA, 21 nt, synthetic construct
  source 1..21: mol_type = other RNA
gcgttgttcagttgaaaagta

SEQ ID NO: 89901 - RNA, 21 nt, synthetic construct
  source 1..21: mol_type = other RNA
gcgtttattagaactagaact

SEQ ID NO: 89902 - RNA, 21 nt, synthetic construct
  source 1..21: mol_type = other RNA
gcgtttgttagatctgggata

SEQ ID NO: 89903 - RNA, 21 nt, synthetic construct
  source 1..21: mol_type = other RNA
gcgttttttgtccaccagaca

SEQ ID NO: 89904 - RNA, 21 nt, synthetic construct
  source 1..21: mol_type = other RNA
gctaaaacatacatgagaaat

SEQ ID NO: 89905 - RNA, 21 nt, synthetic construct
  source 1..21: mol_type = other RNA
gctaaaagaccgcaagagttc

SEQ ID NO: 89906 - RNA, 21 nt, synthetic construct
  source 1..21: mol_type = other RNA
gctaaaatgttcagatagaaa

SEQ ID NO: 89907 - RNA, 21 nt, synthetic construct
  source 1..21: mol_type = other RNA
gctaaacagtacagtagtaaa

SEQ ID NO: 89908 - RNA, 21 nt, synthetic construct
  source 1..21: mol_type = other RNA
gctaaacattttattaggtgc

SEQ ID NO: 89909 - RNA, 21 nt, synthetic construct
  source 1..21: mol_type = other RNA
gctaaactgttccccaagcca

SEQ ID NO: 89910 - RNA, 21 nt, synthetic construct
  source 1..21: mol_type = other RNA
gctaaatgctcacatttagtt

SEQ ID NO: 89911 - RNA, 21 nt, synthetic construct
  source 1..21: mol_type = other RNA
gctaaattaaaggctggaaat

SEQ ID NO: 89912 - RNA, 21 nt, synthetic construct
  source 1..21: mol_type = other RNA
gctaacaatcaaatttaacac

SEQ ID NO: 89913 - RNA, 21 nt, synthetic construct
  source 1..21: mol_type = other RNA
gctaacaccttgaactgggac

SEQ ID NO: 89914 - RNA, 21 nt, synthetic construct
  source 1..21: mol_type = other RNA
gctaacagccaaagaaattgg

SEQ ID NO: 89915 - RNA, 21 nt, synthetic construct
  source 1..21: mol_type = other RNA
gctaacatgaactactcaaag

SEQ ID NO: 89916 - RNA, 21 nt, synthetic construct
  source 1..21: mol_type = other RNA
gctaacgtgcttgctctgcgg

SEQ ID NO: 89917 - RNA, 21 nt, synthetic construct
  source 1..21: mol_type = other RNA
gctaactgcagaggtcaggaa

SEQ ID NO: 89918 - RNA, 21 nt, synthetic construct
  source 1..21: mol_type = other RNA
gctaacttttaacccacagat

SEQ ID NO: 89919 - RNA, 21 nt, synthetic construct
  source 1..21: mol_type = other RNA
gctaagaaacagtaattagtt

SEQ ID NO: 89920 - RNA, 21 nt, synthetic construct
  source 1..21: mol_type = other RNA
gctaagactataaaactctta

SEQ ID NO: 89921 - RNA, 21 nt, synthetic construct
  source 1..21: mol_type = other RNA
gctaagagttttatagtctta

SEQ ID NO: 89922 - RNA, 21 nt, synthetic construct
  source 1..21: mol_type = other RNA
gctaagatgaggtctcagcct

SEQ ID NO: 89923 - RNA, 21 nt, synthetic construct
  source 1..21: mol_type = other RNA
gctaagatgctattcaagaca

SEQ ID NO: 89924 - RNA, 21 nt, synthetic construct
  source 1..21: mol_type = other RNA
gctaagcaccaacagatcctc

SEQ ID NO: 89925 - RNA, 21 nt, synthetic construct
  source 1..21: mol_type = other RNA
gctaagcactgcgccaagcag

SEQ ID NO: 89926 - RNA, 21 nt, synthetic construct
  source 1..21: mol_type = other RNA
gctaagcatgtaacttgctta

SEQ ID NO: 89927 - RNA, 21 nt, synthetic construct
  source 1..21: mol_type = other RNA
gctaagggaagttttttcaaa

SEQ ID NO: 89928 - RNA, 21 nt, synthetic construct
  source 1..21: mol_type = other RNA
gctaaggtggagtggtggata

SEQ ID NO: 89929 - RNA, 21 nt, synthetic construct
  source 1..21: mol_type = other RNA
gctaagtaaaataaacaagtc

SEQ ID NO: 89930 - RNA, 21 nt, synthetic construct
  source 1..21: mol_type = other RNA
gctaagtagtggcagccccgc

SEQ ID NO: 89931 - RNA, 21 nt, synthetic construct
  source 1..21: mol_type = other RNA
gctaagtatgcagaaaccagt

SEQ ID NO: 89932 - RNA, 21 nt, synthetic construct
  source 1..21: mol_type = other RNA
gctaagtgcatttcggctctg

SEQ ID NO: 89933 - RNA, 21 nt, synthetic construct
  source 1..21: mol_type = other RNA
gctaagtgtttaggatataag

SEQ ID NO: 89934 - RNA, 21 nt, synthetic construct
  source 1..21: mol_type = other RNA
gctaagttgagaaactatcca

SEQ ID NO: 89935 - RNA, 21 nt, synthetic construct
  source 1..21: mol_type = other RNA
gctaataaaaacatatgcagg

SEQ ID NO: 89936 - RNA, 21 nt, synthetic construct
  source 1..21: mol_type = other RNA
gctaataagtgagtttgacct

SEQ ID NO: 89937 - RNA, 21 nt, synthetic construct
  source 1..21: mol_type = other RNA
gctaataatgatgactatgaa

SEQ ID NO: 89938 - RNA, 21 nt, synthetic construct
  source 1..21: mol_type = other RNA
gctaataatttatcagatccc

SEQ ID NO: 89939 - RNA, 21 nt, synthetic construct
  source 1..21: mol_type = other RNA
gctaatatctttggggagata

SEQ ID NO: 89940 - RNA, 21 nt, synthetic construct
  source 1..21: mol_type = other RNA
gctaatatgctgtagtgattc

SEQ ID NO: 89941 - RNA, 21 nt, synthetic construct
  source 1..21: mol_type = other RNA
gctaatcaagccgcaaataat

SEQ ID NO: 89942 - RNA, 21 nt, synthetic construct
  source 1..21: mol_type = other RNA
gctaatcccaaagtgagcaga

SEQ ID NO: 89943 - RNA, 21 nt, synthetic construct
  source 1..21: mol_type = other RNA
gctaatctactttctaatcct

SEQ ID NO: 89944 - RNA, 21 nt, synthetic construct
  source 1..21: mol_type = other RNA
gctaatctcaatcagggcctt

SEQ ID NO: 89945 - RNA, 21 nt, synthetic construct
  source 1..21: mol_type = other RNA
gctaatggtccttgctgaaga

SEQ ID NO: 89946 - RNA, 21 nt, synthetic construct
  source 1..21: mol_type = other RNA
gctaatgtggcttgcaaggcc

SEQ ID NO: 89947 - RNA, 21 nt, synthetic construct
  source 1..21: mol_type = other RNA
gctaatgtgtgttccagacaa

SEQ ID NO: 89948 - RNA, 21 nt, synthetic construct
  source 1..21: mol_type = other RNA
gctaattcattgtacatgaag

SEQ ID NO: 89949 - RNA, 21 nt, synthetic construct
  source 1..21: mol_type = other RNA
gctaattgtttgttgggttta

SEQ ID NO: 89950 - RNA, 21 nt, synthetic construct
  source 1..21: mol_type = other RNA
gctaatttcagagagacctga

SEQ ID NO: 89951 - RNA, 21 nt, synthetic construct
  source 1..21: mol_type = other RNA
gctaattttctaatcttcatc

SEQ ID NO: 89952 - RNA, 21 nt, synthetic construct
  source 1..21: mol_type = other RNA
gctacaaaagggaaaacaatt

SEQ ID NO: 89953 - RNA, 21 nt, synthetic construct
  source 1..21: mol_type = other RNA
gctacaaactccaaaccttta

SEQ ID NO: 89954 - RNA, 21 nt, synthetic construct
  source 1..21: mol_type = other RNA
gctacacaagtattaacgaat

SEQ ID NO: 89955 - RNA, 21 nt, synthetic construct
  source 1..21: mol_type = other RNA
gctacaccctgggaaagcctg

SEQ ID NO: 89956 - RNA, 21 nt, synthetic construct
  source 1..21: mol_type = other RNA
gctacactcaatacacgtggc

SEQ ID NO: 89957 - RNA, 21 nt, synthetic construct
  source 1..21: mol_type = other RNA
gctacagactaatatgagttc

SEQ ID NO: 89958 - RNA, 21 nt, synthetic construct
  source 1..21: mol_type = other RNA
gctacaggggcattccctgtc

SEQ ID NO: 89959 - RNA, 21 nt, synthetic construct
  source 1..21: mol_type = other RNA
gctacagtaatcaaacagtgt

SEQ ID NO: 89960 - RNA, 21 nt, synthetic construct
  source 1..21: mol_type = other RNA
gctacataacttcccagacag

SEQ ID NO: 89961 - RNA, 21 nt, synthetic construct
  source 1..21: mol_type = other RNA
gctaccatttattcctctctt

SEQ ID NO: 89962 - RNA, 21 nt, synthetic construct
  source 1..21: mol_type = other RNA
gctaccctcgagtaaaaagaa

SEQ ID NO: 89963 - RNA, 21 nt, synthetic construct
  source 1..21: mol_type = other RNA
gctaccctttcttgttagtag

SEQ ID NO: 89964 - RNA, 21 nt, synthetic construct
  source 1..21: mol_type = other RNA
gctacctcaaattgtgtgttc

SEQ ID NO: 89965 - RNA, 21 nt, synthetic construct
  source 1..21: mol_type = other RNA
gctacctgttgattgttgcca

SEQ ID NO: 89966 - RNA, 21 nt, synthetic construct
  source 1..21: mol_type = other RNA
gctacgaatgaactcctatag

SEQ ID NO: 89967 - RNA, 21 nt, synthetic construct
  source 1..21: mol_type = other RNA
gctacggaggatgaggggctg

SEQ ID NO: 89968 - RNA, 21 nt, synthetic construct
  source 1..21: mol_type = other RNA
gctactaaacaaatcagattt

SEQ ID NO: 89969 - RNA, 21 nt, synthetic construct
  source 1..21: mol_type = other RNA
gctactagcaagctaataatt

SEQ ID NO: 89970 - RNA, 21 nt, synthetic construct
  source 1..21: mol_type = other RNA
gctactatgaatatactggaa

SEQ ID NO: 89971 - RNA, 21 nt, synthetic construct
  source 1..21: mol_type = other RNA
gctactattccaggatcaaat

SEQ ID NO: 89972 - RNA, 21 nt, synthetic construct
  source 1..21: mol_type = other RNA
gctactcaaagtttagttatt

SEQ ID NO: 89973 - RNA, 21 nt, synthetic construct
  source 1..21: mol_type = other RNA
gctactcagctgtcactctct

SEQ ID NO: 89974 - RNA, 21 nt, synthetic construct
  source 1..21: mol_type = other RNA
gctactcaggagattaaggct

SEQ ID NO: 89975 - RNA, 21 nt, synthetic construct
  source 1..21: mol_type = other RNA
gctactgcatgctaggggctg

SEQ ID NO: 89976 - RNA, 21 nt, synthetic construct
  source 1..21: mol_type = other RNA
gctactgtaaacaatgctgct

SEQ ID NO: 89977 - RNA, 21 nt, synthetic construct
  source 1..21: mol_type = other RNA
gctagaaacttggattgtgtg

SEQ ID NO: 89978 - RNA, 21 nt, synthetic construct
  source 1..21: mol_type = other RNA
gctagaacagaataaaaagtg

SEQ ID NO: 89979 - RNA, 21 nt, synthetic construct
  source 1..21: mol_type = other RNA
gctagaactagaatactccac

SEQ ID NO: 89980 - RNA, 21 nt, synthetic construct
  source 1..21: mol_type = other RNA
gctagaagacctcaaattctg

SEQ ID NO: 89981 - RNA, 21 nt, synthetic construct
  source 1..21: mol_type = other RNA
gctagaagcatctgatacact

SEQ ID NO: 89982 - RNA, 21 nt, synthetic construct
  source 1..21: mol_type = other RNA
gctagaagtcccagttcaagg

SEQ ID NO: 89983 - RNA, 21 nt, synthetic construct
  source 1..21: mol_type = other RNA
gctagacggaaaaacattcta

SEQ ID NO: 89984 - RNA, 21 nt, synthetic construct
  source 1..21: mol_type = other RNA
gctagactaagaaaaacagaa

SEQ ID NO: 89985 - RNA, 21 nt, synthetic construct
  source 1..21: mol_type = other RNA
gctagagccaggaagtcagca

SEQ ID NO: 89986 - RNA, 21 nt, synthetic construct
  source 1..21: mol_type = other RNA
gctagagctcacacgagaagg

SEQ ID NO: 89987 - RNA, 21 nt, synthetic construct
  source 1..21: mol_type = other RNA
gctagagctgctgtaacaaag

SEQ ID NO: 89988 - RNA, 21 nt, synthetic construct
  source 1..21: mol_type = other RNA
gctagagggtaagaccaaaat

SEQ ID NO: 89989 - RNA, 21 nt, synthetic construct
  source 1..21: mol_type = other RNA
gctagatgctaaacagtacag

SEQ ID NO: 89990 - RNA, 21 nt, synthetic construct
  source 1..21: mol_type = other RNA
gctagcacagaggcaacagtc

SEQ ID NO: 89991 - RNA, 21 nt, synthetic construct
  source 1..21: mol_type = other RNA
gctagccttcttggagtaaac

SEQ ID NO: 89992 - RNA, 21 nt, synthetic construct
  source 1..21: mol_type = other RNA
gctaggaccataggcacgcgc

SEQ ID NO: 89993 - RNA, 21 nt, synthetic construct
  source 1..21: mol_type = other RNA
gctaggatttcagtaaatgaa

SEQ ID NO: 89994 - RNA, 21 nt, synthetic construct
  source 1..21: mol_type = other RNA
gctaggcgtagtatctcatgc

SEQ ID NO: 89995 - RNA, 21 nt, synthetic construct
  source 1..21: mol_type = other RNA
gctagggaagcagttgatgca

SEQ ID NO: 89996 - RNA, 21 nt, synthetic construct
  source 1..21: mol_type = other RNA
gctaggggctgttcccagata

SEQ ID NO: 89997 - RNA, 21 nt, synthetic construct
  source 1..21: mol_type = other RNA
gctaggtgacctgccagagtt

SEQ ID NO: 89998 - RNA, 21 nt, synthetic construct
  source 1..21: mol_type = other RNA
gctaggtgagtgagatgggaa

SEQ ID NO: 89999 - RNA, 21 nt, synthetic construct
  source 1..21: mol_type = other RNA
gctagtagcagaatccccaaa

SEQ ID NO: 90000 - RNA, 21 nt, synthetic construct
  source 1..21: mol_type = other RNA
gctagtaggcaacatccctat

SEQ ID NO: 90001 - RNA, 21 nt, synthetic construct
  source 1..21: mol_type = other RNA
gctagtattttgttgacatcc

SEQ ID NO: 90002 - RNA, 21 nt, synthetic construct
  source 1..21: mol_type = other RNA
gctagtgatgttgagtatctt

SEQ ID NO: 90003 - RNA, 21 nt, synthetic construct
  source 1..21: mol_type = other RNA
gctagtggtaactagatgcct

SEQ ID NO: 90004 - RNA, 21 nt, synthetic construct
  source 1..21: mol_type = other RNA
gctagtgtcctcaggctccag

SEQ ID NO: 90005 - RNA, 21 nt, synthetic construct
  source 1..21: mol_type = other RNA
gctagtgtcttagtctgactt

SEQ ID NO: 90006 - RNA, 21 nt, synthetic construct
  source 1..21: mol_type = other RNA
gctagtgtgtctgactacact

SEQ ID NO: 90007 - RNA, 21 nt, synthetic construct
  source 1..21: mol_type = other RNA
gctagtgtgttgactgacata

SEQ ID NO: 90008 - RNA, 21 nt, synthetic construct
  source 1..21: mol_type = other RNA
gctataaacttccctctcagt

SEQ ID NO: 90009 - RNA, 21 nt, synthetic construct
  source 1..21: mol_type = other RNA
gctataaagaacatgattggg

SEQ ID NO: 90010 - RNA, 21 nt, synthetic construct
  source 1..21: mol_type = other RNA
gctataaccacgagtaatgga

SEQ ID NO: 90011 - RNA, 21 nt, synthetic construct
  source 1..21: mol_type = other RNA
gctatacaaccggaaaatgct

SEQ ID NO: 90012 - RNA, 21 nt, synthetic construct
  source 1..21: mol_type = other RNA
gctatacacgttacaaaatat

SEQ ID NO: 90013 - RNA, 21 nt, synthetic construct
  source 1..21: mol_type = other RNA
gctatagctgagaagtaacat

SEQ ID NO: 90014 - RNA, 21 nt, synthetic construct
  source 1..21: mol_type = other RNA
gctatagcttctgagctgtta

SEQ ID NO: 90015 - RNA, 21 nt, synthetic construct
  source 1..21: mol_type = other RNA
gctatatcccaaattggcatt

SEQ ID NO: 90016 - RNA, 21 nt, synthetic construct
  source 1..21: mol_type = other RNA
gctatattcacttttggaatt

SEQ ID NO: 90017 - RNA, 21 nt, synthetic construct
  source 1..21: mol_type = other RNA
gctatcaggccttccacctgc

SEQ ID NO: 90018 - RNA, 21 nt, synthetic construct
  source 1..21: mol_type = other RNA
gctatcagtagtttgctagtg

SEQ ID NO: 90019 - RNA, 21 nt, synthetic construct
  source 1..21: mol_type = other RNA
gctatcattttaaagggataa

SEQ ID NO: 90020 - RNA, 21 nt, synthetic construct
  source 1..21: mol_type = other RNA
gctatccagaagagaatggct

SEQ ID NO: 90021 - RNA, 21 nt, synthetic construct
  source 1..21: mol_type = other RNA
gctatccagtctctgcaacat

SEQ ID NO: 90022 - RNA, 21 nt, synthetic construct
  source 1..21: mol_type = other RNA
gctatcctaatgggcgtggag

SEQ ID NO: 90023 - RNA, 21 nt, synthetic construct
  source 1..21: mol_type = other RNA
gctatctttactttcagctca

SEQ ID NO: 90024 - RNA, 21 nt, synthetic construct
  source 1..21: mol_type = other RNA
gctatgaaaattggcgtacat

SEQ ID NO: 90025 - RNA, 21 nt, synthetic construct
  source 1..21: mol_type = other RNA
gctatgaaatgtggtttttgg

SEQ ID NO: 90026 - RNA, 21 nt, synthetic construct
  source 1..21: mol_type = other RNA
gctatgactaatttgaggcat

SEQ ID NO: 90027 - RNA, 21 nt, synthetic construct
  source 1..21: mol_type = other RNA
gctatgcatactttggaaggt

SEQ ID NO: 90028 - RNA, 21 nt, synthetic construct
  source 1..21: mol_type = other RNA
gctatgctcctgcctcagcct

SEQ ID NO: 90029 - RNA, 21 nt, synthetic construct
  source 1..21: mol_type = other RNA
gctatgctgaaaggcatgaaa

SEQ ID NO: 90030 - RNA, 21 nt, synthetic construct
  source 1..21: mol_type = other RNA
gctatggagcactgtgagcca

SEQ ID NO: 90031 - RNA, 21 nt, synthetic construct
  source 1..21: mol_type = other RNA
gctatggtgttatttgttctg

SEQ ID NO: 90032 - RNA, 21 nt, synthetic construct
  source 1..21: mol_type = other RNA
gctatgtaatctcatggaagt

SEQ ID NO: 90033 - RNA, 21 nt, synthetic construct
  source 1..21: mol_type = other RNA
gctattaactttgaaatcaga

SEQ ID NO: 90034 - RNA, 21 nt, synthetic construct
  source 1..21: mol_type = other RNA
gctattaagtattgcattgaa

SEQ ID NO: 90035 - RNA, 21 nt, synthetic construct
  source 1..21: mol_type = other RNA
gctattagagaaatgcaaatc

SEQ ID NO: 90036 - RNA, 21 nt, synthetic construct
  source 1..21: mol_type = other RNA
gctattagttaaccttctggg

SEQ ID NO: 90037 - RNA, 21 nt, synthetic construct
  source 1..21: mol_type = other RNA
gctattataaatggcatcttt

SEQ ID NO: 90038 - RNA, 21 nt, synthetic construct
  source 1..21: mol_type = other RNA
gctattcaacaggtataaagt

SEQ ID NO: 90039 - RNA, 21 nt, synthetic construct
  source 1..21: mol_type = other RNA
gctattcaagacaagcaagga

SEQ ID NO: 90040 - RNA, 21 nt, synthetic construct
  source 1..21: mol_type = other RNA
gctattctctttctgaaattc

SEQ ID NO: 90041 - RNA, 21 nt, synthetic construct
  source 1..21: mol_type = other RNA
gctattgataaatctaaagcc

SEQ ID NO: 90042 - RNA, 21 nt, synthetic construct
  source 1..21: mol_type = other RNA
gctattgtcagtaattctgca

SEQ ID NO: 90043 - RNA, 21 nt, synthetic construct
  source 1..21: mol_type = other RNA
gctattgtcttttctatctga

SEQ ID NO: 90044 - RNA, 21 nt, synthetic construct
  source 1..21: mol_type = other RNA
gctattgttgaattgttggag

SEQ ID NO: 90045 - RNA, 21 nt, synthetic construct
  source 1..21: mol_type = other RNA
gctattgttttgcaagattaa

SEQ ID NO: 90046 - RNA, 21 nt, synthetic construct
  source 1..21: mol_type = other RNA
gctattttattagatagtggt

SEQ ID NO: 90047 - RNA, 21 nt, synthetic construct
  source 1..21: mol_type = other RNA
gctcaaaaatactcaagggct

SEQ ID NO: 90048 - RNA, 21 nt, synthetic construct
  source 1..21: mol_type = other RNA
gctcaaacagcttgacattct

SEQ ID NO: 90049 - RNA, 21 nt, synthetic construct
  source 1..21: mol_type = other RNA
gctcaaagcatatgaatctag

SEQ ID NO: 90050 - RNA, 21 nt, synthetic construct
  source 1..21: mol_type = other RNA
gctcaaaggggcattccgtgg

SEQ ID NO: 90051 - RNA, 21 nt, synthetic construct
  source 1..21: mol_type = other RNA
gctcaacgcctgtgatcccag

SEQ ID NO: 90052 - RNA, 21 nt, synthetic construct
  source 1..21: mol_type = other RNA
gctcaagccatcctccagcct

SEQ ID NO: 90053 - RNA, 21 nt, synthetic construct
  source 1..21: mol_type = other RNA
gctcaagtaagtgaaatcata

SEQ ID NO: 90054 - RNA, 21 nt, synthetic construct
  source 1..21: mol_type = other RNA
gctcaatacctgaaaagtgta

SEQ ID NO: 90055 - RNA, 21 nt, synthetic construct
  source 1..21: mol_type = other RNA
gctcaatggttaagactgctg

SEQ ID NO: 90056 - RNA, 21 nt, synthetic construct
  source 1..21: mol_type = other RNA
gctcaattaagcaacctttta

SEQ ID NO: 90057 - RNA, 21 nt, synthetic construct
  source 1..21: mol_type = other RNA
gctcacacgagaaggacagct

SEQ ID NO: 90058 - RNA, 21 nt, synthetic construct
  source 1..21: mol_type = other RNA
gctcacacttactaaatgatc

SEQ ID NO: 90059 - RNA, 21 nt, synthetic construct
  source 1..21: mol_type = other RNA
gctcacagtgctccatagctt

SEQ ID NO: 90060 - RNA, 21 nt, synthetic construct
  source 1..21: mol_type = other RNA
gctcacattgtatttctgtta

SEQ ID NO: 90061 - RNA, 21 nt, synthetic construct
  source 1..21: mol_type = other RNA
gctcacatttagtttcatcta

SEQ ID NO: 90062 - RNA, 21 nt, synthetic construct
  source 1..21: mol_type = other RNA
gctcacctctggactcagggt

SEQ ID NO: 90063 - RNA, 21 nt, synthetic construct
  source 1..21: mol_type = other RNA
gctcacgttaccctctggaat

SEQ ID NO: 90064 - RNA, 21 nt, synthetic construct
  source 1..21: mol_type = other RNA
gctcactagagcttcaacctc

SEQ ID NO: 90065 - RNA, 21 nt, synthetic construct
  source 1..21: mol_type = other RNA
gctcactcatttccgttgctg

SEQ ID NO: 90066 - RNA, 21 nt, synthetic construct
  source 1..21: mol_type = other RNA
gctcactgtctccatgtcctc

SEQ ID NO: 90067 - RNA, 21 nt, synthetic construct
  source 1..21: mol_type = other RNA
gctcactttgggattagctta

SEQ ID NO: 90068 - RNA, 21 nt, synthetic construct
  source 1..21: mol_type = other RNA
gctcagaaaattttcttttgt

SEQ ID NO: 90069 - RNA, 21 nt, synthetic construct
  source 1..21: mol_type = other RNA
gctcagaaacaacaacaacaa

SEQ ID NO: 90070 - RNA, 21 nt, synthetic construct
  source 1..21: mol_type = other RNA
gctcagaagctatagctgaga

SEQ ID NO: 90071 - RNA, 21 nt, synthetic construct
  source 1..21: mol_type = other RNA
gctcagaagctttcagactta

SEQ ID NO: 90072 - RNA, 21 nt, synthetic construct
  source 1..21: mol_type = other RNA
gctcagcccctcatcctccgt

SEQ ID NO: 90073 - RNA, 21 nt, synthetic construct
  source 1..21: mol_type = other RNA
gctcaggaccagatgacttca

SEQ ID NO: 90074 - RNA, 21 nt, synthetic construct
  source 1..21: mol_type = other RNA
gctcaggagtaactgctcctc

SEQ ID NO: 90075 - RNA, 21 nt, synthetic construct
  source 1..21: mol_type = other RNA
gctcaggccagtgagtgatga

SEQ ID NO: 90076 - RNA, 21 nt, synthetic construct
  source 1..21: mol_type = other RNA
gctcaggcctgttgtgaggat

SEQ ID NO: 90077 - RNA, 21 nt, synthetic construct
  source 1..21: mol_type = other RNA
gctcagggtgcgacctcgaag

SEQ ID NO: 90078 - RNA, 21 nt, synthetic construct
  source 1..21: mol_type = other RNA
gctcagtccctcaccttctgc

SEQ ID NO: 90079 - RNA, 21 nt, synthetic construct
  source 1..21: mol_type = other RNA
gctcagtctgtttgccatctt

SEQ ID NO: 90080 - RNA, 21 nt, synthetic construct
  source 1..21: mol_type = other RNA
gctcagtgggttcaattatgt

SEQ ID NO: 90081 - RNA, 21 nt, synthetic construct
  source 1..21: mol_type = other RNA
gctcagtggttctgcgtgtta

SEQ ID NO: 90082 - RNA, 21 nt, synthetic construct
  source 1..21: mol_type = other RNA
gctcagtgtgtttttgtaaat

SEQ ID NO: 90083 - RNA, 21 nt, synthetic construct
  source 1..21: mol_type = other RNA
gctcagtttcaaaagctcccc

SEQ ID NO: 90084 - RNA, 21 nt, synthetic construct
  source 1..21: mol_type = other RNA
gctcataatagtctcacgata

SEQ ID NO: 90085 - RNA, 21 nt, synthetic construct
  source 1..21: mol_type = other RNA
gctcataattaaagagagtaa

SEQ ID NO: 90086 - RNA, 21 nt, synthetic construct
  source 1..21: mol_type = other RNA
gctcatacttgctttattact

SEQ ID NO: 90087 - RNA, 21 nt, synthetic construct
  source 1..21: mol_type = other RNA
gctcatcatttatacccaagt

SEQ ID NO: 90088 - RNA, 21 nt, synthetic construct
  source 1..21: mol_type = other RNA
gctcatctaagcctacctccc

SEQ ID NO: 90089 - RNA, 21 nt, synthetic construct
  source 1..21: mol_type = other RNA
gctcattacagtctcgacccc

SEQ ID NO: 90090 - RNA, 21 nt, synthetic construct
  source 1..21: mol_type = other RNA
gctcattcatctgcagtgtcc

SEQ ID NO: 90091 - RNA, 21 nt, synthetic construct
  source 1..21: mol_type = other RNA
gctccaaaagcgaaaggcaaa

SEQ ID NO: 90092 - RNA, 21 nt, synthetic construct
  source 1..21: mol_type = other RNA
gctccaaagaacaggagttac

SEQ ID NO: 90093 - RNA, 21 nt, synthetic construct
  source 1..21: mol_type = other RNA
gctccacgcccattaggatag

SEQ ID NO: 90094 - RNA, 21 nt, synthetic construct
  source 1..21: mol_type = other RNA
gctccacttgggtggaagctg

SEQ ID NO: 90095 - RNA, 21 nt, synthetic construct
  source 1..21: mol_type = other RNA
gctccagagaagttttccagg

SEQ ID NO: 90096 - RNA, 21 nt, synthetic construct
  source 1..21: mol_type = other RNA
gctccaggtagaatgaaaatt

SEQ ID NO: 90097 - RNA, 21 nt, synthetic construct
  source 1..21: mol_type = other RNA
gctccagtatgacctcctccc

SEQ ID NO: 90098 - RNA, 21 nt, synthetic construct
  source 1..21: mol_type = other RNA
gctccatagcttcctaagaaa

SEQ ID NO: 90099 - RNA, 21 nt, synthetic construct
  source 1..21: mol_type = other RNA
gctcccaatgcttgaagagcg

SEQ ID NO: 90100 - RNA, 21 nt, synthetic construct
  source 1..21: mol_type = other RNA
gctcccagccaaacagttttt

SEQ ID NO: 90101 - RNA, 21 nt, synthetic construct
  source 1..21: mol_type = other RNA
gctcccagtgcccacctgaca

SEQ ID NO: 90102 - RNA, 21 nt, synthetic construct
  source 1..21: mol_type = other RNA
gctcccatgattcaaaatgtg

SEQ ID NO: 90103 - RNA, 21 nt, synthetic construct
  source 1..21: mol_type = other RNA
gctcccatttgggactgagac

SEQ ID NO: 90104 - RNA, 21 nt, synthetic construct
  source 1..21: mol_type = other RNA
gctccccattccctgtctgtg

SEQ ID NO: 90105 - RNA, 21 nt, synthetic construct
  source 1..21: mol_type = other RNA
gctccccggatgattctaatg

SEQ ID NO: 90106 - RNA, 21 nt, synthetic construct
  source 1..21: mol_type = other RNA
gctccctaaatacacatgttg

SEQ ID NO: 90107 - RNA, 21 nt, synthetic construct
  source 1..21: mol_type = other RNA
gctccctctatggcaggcacc

SEQ ID NO: 90108 - RNA, 21 nt, synthetic construct
  source 1..21: mol_type = other RNA
gctccctctgtgtgcatgcat

SEQ ID NO: 90109 - RNA, 21 nt, synthetic construct
  source 1..21: mol_type = other RNA
gctcccttccagcgtgtgcat

SEQ ID NO: 90110 - RNA, 21 nt, synthetic construct
  source 1..21: mol_type = other RNA
gctccgcctcctggtgggttc

SEQ ID NO: 90111 - RNA, 21 nt, synthetic construct
  source 1..21: mol_type = other RNA
gctcctcagaaggccaaggca

SEQ ID NO: 90112 - RNA, 21 nt, synthetic construct
  source 1..21: mol_type = other RNA
gctcctccaaggctgcccgct

SEQ ID NO: 90113 - RNA, 21 nt, synthetic construct
  source 1..21: mol_type = other RNA
gctcctcccggctaagatgag

SEQ ID NO: 90114 - RNA, 21 nt, synthetic construct
  source 1..21: mol_type = other RNA
gctcctctcccgccggagtcc

SEQ ID NO: 90115 - RNA, 21 nt, synthetic construct
  source 1..21: mol_type = other RNA
gctcctctgactttatggtat

SEQ ID NO: 90116 - RNA, 21 nt, synthetic construct
  source 1..21: mol_type = other RNA
gctcctgacctcagatatcca

SEQ ID NO: 90117 - RNA, 21 nt, synthetic construct
  source 1..21: mol_type = other RNA
gctcctgagaaccggaacttg

SEQ ID NO: 90118 - RNA, 21 nt, synthetic construct
  source 1..21: mol_type = other RNA
gctcctgcagacatgcacgag

SEQ ID NO: 90119 - RNA, 21 nt, synthetic construct
  source 1..21: mol_type = other RNA
gctcctgcctttgttcatcat

SEQ ID NO: 90120 - RNA, 21 nt, synthetic construct
  source 1..21: mol_type = other RNA
gctcctgggaaaaggatttgt

SEQ ID NO: 90121 - RNA, 21 nt, synthetic construct
  source 1..21: mol_type = other RNA
gctccttaccactataatcca

SEQ ID NO: 90122 - RNA, 21 nt, synthetic construct
  source 1..21: mol_type = other RNA
gctcgaccaggggaaggagtc

SEQ ID NO: 90123 - RNA, 21 nt, synthetic construct
  source 1..21: mol_type = other RNA
gctcgcagcatccctgccgcg

SEQ ID NO: 90124 - RNA, 21 nt, synthetic construct
  source 1..21: mol_type = other RNA
gctcgccgtctccctcggcca

SEQ ID NO: 90125 - RNA, 21 nt, synthetic construct
  source 1..21: mol_type = other RNA
gctcggctctgtcacccttgt

SEQ ID NO: 90126 - RNA, 21 nt, synthetic construct
  source 1..21: mol_type = other RNA
gctctaataaaagctggagtt

SEQ ID NO: 90127 - RNA, 21 nt, synthetic construct
  source 1..21: mol_type = other RNA
gctctaatagttcacctctcc

SEQ ID NO: 90128 - RNA, 21 nt, synthetic construct
  source 1..21: mol_type = other RNA
gctctaatgcaagagttaaaa

SEQ ID NO: 90129 - RNA, 21 nt, synthetic construct
  source 1..21: mol_type = other RNA
gctctacaaaccttcttattt

SEQ ID NO: 90130 - RNA, 21 nt, synthetic construct
  source 1..21: mol_type = other RNA
gctctaccctttccaaattca

SEQ ID NO: 90131 - RNA, 21 nt, synthetic construct
  source 1..21: mol_type = other RNA
gctctagcaaacaaacacact

SEQ ID NO: 90132 - RNA, 21 nt, synthetic construct
  source 1..21: mol_type = other RNA
gctctagcccagcttccggga

SEQ ID NO: 90133 - RNA, 21 nt, synthetic construct
  source 1..21: mol_type = other RNA
gctctagccttgtactgtgtg

SEQ ID NO: 90134 - RNA, 21 nt, synthetic construct
  source 1..21: mol_type = other RNA
gctctatggcatttgagggtt

SEQ ID NO: 90135 - RNA, 21 nt, synthetic construct
  source 1..21: mol_type = other RNA
gctctcaagtaattgttttcc

SEQ ID NO: 90136 - RNA, 21 nt, synthetic construct
  source 1..21: mol_type = other RNA
gctctcaattaatgcccaatc

SEQ ID NO: 90137 - RNA, 21 nt, synthetic construct
  source 1..21: mol_type = other RNA
gctctcagtggccctgttggc

SEQ ID NO: 90138 - RNA, 21 nt, synthetic construct
  source 1..21: mol_type = other RNA
gctctcatgagtcctgaaaat

SEQ ID NO: 90139 - RNA, 21 nt, synthetic construct
  source 1..21: mol_type = other RNA
gctctcatgtcagagacacat

SEQ ID NO: 90140 - RNA, 21 nt, synthetic construct
  source 1..21: mol_type = other RNA
gctctcccccgaatcctttgc

SEQ ID NO: 90141 - RNA, 21 nt, synthetic construct
  source 1..21: mol_type = other RNA
gctctcctgtgccaagtccgt

SEQ ID NO: 90142 - RNA, 21 nt, synthetic construct
  source 1..21: mol_type = other RNA
gctctctattccaaatgtctg

SEQ ID NO: 90143 - RNA, 21 nt, synthetic construct
  source 1..21: mol_type = other RNA
gctctcttcaccaactgaagc

SEQ ID NO: 90144 - RNA, 21 nt, synthetic construct
  source 1..21: mol_type = other RNA
gctctcttcccccaaaactta

SEQ ID NO: 90145 - RNA, 21 nt, synthetic construct
  source 1..21: mol_type = other RNA
gctctcttgcccaagctggtc

SEQ ID NO: 90146 - RNA, 21 nt, synthetic construct
  source 1..21: mol_type = other RNA
gctctgacgtttaaatgagtt

SEQ ID NO: 90147 - RNA, 21 nt, synthetic construct
  source 1..21: mol_type = other RNA
gctctgataggataatgtcca

SEQ ID NO: 90148 - RNA, 21 nt, synthetic construct
  source 1..21: mol_type = other RNA
gctctgatgctttctctagtt

SEQ ID NO: 90149 - RNA, 21 nt, synthetic construct
  source 1..21: mol_type = other RNA
gctctgcaaatgaggttgctt

SEQ ID NO: 90150 - RNA, 21 nt, synthetic construct
  source 1..21: mol_type = other RNA
gctctgcacgtactagtcagc

SEQ ID NO: 90151 - RNA, 21 nt, synthetic construct
  source 1..21: mol_type = other RNA
gctctgcagagactgtgcttc

SEQ ID NO: 90152 - RNA, 21 nt, synthetic construct
  source 1..21: mol_type = other RNA
gctctgcggcaggcattgtgc

SEQ ID NO: 90153 - RNA, 21 nt, synthetic construct
  source 1..21: mol_type = other RNA
gctctgggtcagaatcgtgat

SEQ ID NO: 90154 - RNA, 21 nt, synthetic construct
  source 1..21: mol_type = other RNA
gctctgggtgcgttgaccgct

SEQ ID NO: 90155 - RNA, 21 nt, synthetic construct
  source 1..21: mol_type = other RNA
gctctggttttaaagaaatta

SEQ ID NO: 90156 - RNA, 21 nt, synthetic construct
  source 1..21: mol_type = other RNA
gctctgtcacccacgtggagt

SEQ ID NO: 90157 - RNA, 21 nt, synthetic construct
  source 1..21: mol_type = other RNA
gctctgtcacccttgtaatca

SEQ ID NO: 90158 - RNA, 21 nt, synthetic construct
  source 1..21: mol_type = other RNA
gctctgtcctgtcagtgtggt

SEQ ID NO: 90159 - RNA, 21 nt, synthetic construct
  source 1..21: mol_type = other RNA
gctctgtcgcccaggcggaat

SEQ ID NO: 90160 - RNA, 21 nt, synthetic construct
  source 1..21: mol_type = other RNA
gctctgtcttgatgatagaat

SEQ ID NO: 90161 - RNA, 21 nt, synthetic construct
  source 1..21: mol_type = other RNA
gctctgtgctgagatggtcag

SEQ ID NO: 90162 - RNA, 21 nt, synthetic construct
  source 1..21: mol_type = other RNA
gctctgtggtttcttgaatct

SEQ ID NO: 90163 - RNA, 21 nt, synthetic construct
  source 1..21: mol_type = other RNA
gctctgttgcccagactggag

SEQ ID NO: 90164 - RNA, 21 nt, synthetic construct
  source 1..21: mol_type = other RNA
gctcttaagcttaggtctttg

SEQ ID NO: 90165 - RNA, 21 nt, synthetic construct
  source 1..21: mol_type = other RNA
gctcttaagtatttttgttag

SEQ ID NO: 90166 - RNA, 21 nt, synthetic construct
  source 1..21: mol_type = other RNA
gctcttagaaaatatatactg

SEQ ID NO: 90167 - RNA, 21 nt, synthetic construct
  source 1..21: mol_type = other RNA
gctcttcaagcattgggagct

SEQ ID NO: 90168 - RNA, 21 nt, synthetic construct
  source 1..21: mol_type = other RNA
gctcttcccttaacctttttc

SEQ ID NO: 90169 - RNA, 21 nt, synthetic construct
  source 1..21: mol_type = other RNA
gctcttctattccagagaatt

SEQ ID NO: 90170 - RNA, 21 nt, synthetic construct
  source 1..21: mol_type = other RNA
gctcttctcagttgcagcatg

SEQ ID NO: 90171 - RNA, 21 nt, synthetic construct
  source 1..21: mol_type = other RNA
gctcttctgatcacagaagtg

SEQ ID NO: 90172 - RNA, 21 nt, synthetic construct
  source 1..21: mol_type = other RNA
gctcttgaccttgtgcatgtg

SEQ ID NO: 90173 - RNA, 21 nt, synthetic construct
  source 1..21: mol_type = other RNA
gctcttggcttttggcagcgt

SEQ ID NO: 90174 - RNA, 21 nt, synthetic construct
  source 1..21: mol_type = other RNA
gctcttggtttcttcaagata

SEQ ID NO: 90175 - RNA, 21 nt, synthetic construct
  source 1..21: mol_type = other RNA
gctcttgttcaaaaacctttt

SEQ ID NO: 90176 - RNA, 21 nt, synthetic construct
  source 1..21: mol_type = other RNA
gctctttatctccacatttct

SEQ ID NO: 90177 - RNA, 21 nt, synthetic construct
  source 1..21: mol_type = other RNA
gctctttccactctctggctg

SEQ ID NO: 90178 - RNA, 21 nt, synthetic construct
  source 1..21: mol_type = other RNA
gctcttttcatcactcactgg

SEQ ID NO: 90179 - RNA, 21 nt, synthetic construct
  source 1..21: mol_type = other RNA
gctcttttgtgtctttttata

SEQ ID NO: 90180 - RNA, 21 nt, synthetic construct
  source 1..21: mol_type = other RNA
gctgaaaaacacctcagttaa

SEQ ID NO: 90181 - RNA, 21 nt, synthetic construct
  source 1..21: mol_type = other RNA
gctgaaaaagatactcttaaa

SEQ ID NO: 90182 - RNA, 21 nt, synthetic construct
  source 1..21: mol_type = other RNA
gctgaaaccccgcatactgtg

SEQ ID NO: 90183 - RNA, 21 nt, synthetic construct
  source 1..21: mol_type = other RNA
gctgaaagagaaagaagtaat

SEQ ID NO: 90184 - RNA, 21 nt, synthetic construct
  source 1..21: mol_type = other RNA
gctgaaagctagaagacctca

SEQ ID NO: 90185 - RNA, 21 nt, synthetic construct
  source 1..21: mol_type = other RNA
gctgaaaggcatgaaattctt

SEQ ID NO: 90186 - RNA, 21 nt, synthetic construct
  source 1..21: mol_type = other RNA
gctgaaagtaaagatagcccc

SEQ ID NO: 90187 - RNA, 21 nt, synthetic construct
  source 1..21: mol_type = other RNA
gctgaaatgctgtaactgact

SEQ ID NO: 90188 - RNA, 21 nt, synthetic construct
  source 1..21: mol_type = other RNA
gctgaacaatattccatttta

SEQ ID NO: 90189 - RNA, 21 nt, synthetic construct
  source 1..21: mol_type = other RNA
gctgaactcctttcttaccct

SEQ ID NO: 90190 - RNA, 21 nt, synthetic construct
  source 1..21: mol_type = other RNA
gctgaactctgtggagtcctg

SEQ ID NO: 90191 - RNA, 21 nt, synthetic construct
  source 1..21: mol_type = other RNA
gctgaactgctgacagattaa

SEQ ID NO: 90192 - RNA, 21 nt, synthetic construct
  source 1..21: mol_type = other RNA
gctgaacttgtcacaaaatgt

SEQ ID NO: 90193 - RNA, 21 nt, synthetic construct
  source 1..21: mol_type = other RNA
gctgaagaataactgtcctga

SEQ ID NO: 90194 - RNA, 21 nt, synthetic construct
  source 1..21: mol_type = other RNA
gctgaagcaggctttttaccc

SEQ ID NO: 90195 - RNA, 21 nt, synthetic construct
  source 1..21: mol_type = other RNA
gctgaaggcactgtatggttc

SEQ ID NO: 90196 - RNA, 21 nt, synthetic construct
  source 1..21: mol_type = other RNA
gctgaagggaggaaaaaacag

SEQ ID NO: 90197 - RNA, 21 nt, synthetic construct
  source 1..21: mol_type = other RNA
gctgaagtacttcaaggttca

SEQ ID NO: 90198 - RNA, 21 nt, synthetic construct
  source 1..21: mol_type = other RNA
gctgacagattaaataccacc

SEQ ID NO: 90199 - RNA, 21 nt, synthetic construct
  source 1..21: mol_type = other RNA
gctgacatgtgtaaaacatct

SEQ ID NO: 90200 - RNA, 21 nt, synthetic construct
  source 1..21: mol_type = other RNA
gctgacccactggtttcagtc

SEQ ID NO: 90201 - RNA, 21 nt, synthetic construct
  source 1..21: mol_type = other RNA
gctgacctggtactctatgat

SEQ ID NO: 90202 - RNA, 21 nt, synthetic construct
  source 1..21: mol_type = other RNA
gctgactagtacgtgcagagc

SEQ ID NO: 90203 - RNA, 21 nt, synthetic construct
  source 1..21: mol_type = other RNA
gctgacttagagggcttcatg

SEQ ID NO: 90204 - RNA, 21 nt, synthetic construct
  source 1..21: mol_type = other RNA
gctgacttcctggctctagcc

SEQ ID NO: 90205 - RNA, 21 nt, synthetic construct
  source 1..21: mol_type = other RNA
gctgactttcatttgtaattc

SEQ ID NO: 90206 - RNA, 21 nt, synthetic construct
  source 1..21: mol_type = other RNA
gctgacttttaaaatatgtgg

SEQ ID NO: 90207 - RNA, 21 nt, synthetic construct
  source 1..21: mol_type = other RNA
gctgagaagtaacattacaac

SEQ ID NO: 90208 - RNA, 21 nt, synthetic construct
  source 1..21: mol_type = other RNA
gctgagaccacagacgtgcag

SEQ ID NO: 90209 - RNA, 21 nt, synthetic construct
  source 1..21: mol_type = other RNA
gctgagacctcatcttagccg

SEQ ID NO: 90210 - RNA, 21 nt, synthetic construct
  source 1..21: mol_type = other RNA
gctgagatggtcagtactatc

SEQ ID NO: 90211 - RNA, 21 nt, synthetic construct
  source 1..21: mol_type = other RNA
gctgagattacagatgtgagc

SEQ ID NO: 90212 - RNA, 21 nt, synthetic construct
  source 1..21: mol_type = other RNA
gctgagattgccccattgcac

SEQ ID NO: 90213 - RNA, 21 nt, synthetic construct
  source 1..21: mol_type = other RNA
gctgagattgtgccagtgaac

SEQ ID NO: 90214 - RNA, 21 nt, synthetic construct
  source 1..21: mol_type = other RNA
gctgagccttcagaactcttc

SEQ ID NO: 90215 - RNA, 21 nt, synthetic construct
  source 1..21: mol_type = other RNA
gctgaggattggagactgata

SEQ ID NO: 90216 - RNA, 21 nt, synthetic construct
  source 1..21: mol_type = other RNA
gctgaggcagcccgacctcca

SEQ ID NO: 90217 - RNA, 21 nt, synthetic construct
  source 1..21: mol_type = other RNA
gctgaggcaggagaactgcct

SEQ ID NO: 90218 - RNA, 21 nt, synthetic construct
  source 1..21: mol_type = other RNA
gctgaggcaggagcatagctt

SEQ ID NO: 90219 - RNA, 21 nt, synthetic construct
  source 1..21: mol_type = other RNA
gctgaggcaggaggcacctga

SEQ ID NO: 90220 - RNA, 21 nt, synthetic construct
  source 1..21: mol_type = other RNA
gctgaggccccaggggacata

SEQ ID NO: 90221 - RNA, 21 nt, synthetic construct
  source 1..21: mol_type = other RNA
gctgaggccggaggattgctt

SEQ ID NO: 90222 - RNA, 21 nt, synthetic construct
  source 1..21: mol_type = other RNA
gctgaggcggaaggattgcct

SEQ ID NO: 90223 - RNA, 21 nt, synthetic construct
  source 1..21: mol_type = other RNA
gctgaggcggctggatcgctt

SEQ ID NO: 90224 - RNA, 21 nt, synthetic construct
  source 1..21: mol_type = other RNA
gctgaggctggggaattgcat

SEQ ID NO: 90225 - RNA, 21 nt, synthetic construct
  source 1..21: mol_type = other RNA
gctgagggaatttttcttacc

SEQ ID NO: 90226 - RNA, 21 nt, synthetic construct
  source 1..21: mol_type = other RNA
gctgagtagcgctttaagcat

SEQ ID NO: 90227 - RNA, 21 nt, synthetic construct
  source 1..21: mol_type = other RNA
gctgagtatgggtctccattt

SEQ ID NO: 90228 - RNA, 21 nt, synthetic construct
  source 1..21: mol_type = other RNA
gctgagtcttctactgtgaat

SEQ ID NO: 90229 - RNA, 21 nt, synthetic construct
  source 1..21: mol_type = other RNA
gctgagtgaatggggtaattt

SEQ ID NO: 90230 - RNA, 21 nt, synthetic construct
  source 1..21: mol_type = other RNA
gctgataaatggctttttacg

SEQ ID NO: 90231 - RNA, 21 nt, synthetic construct
  source 1..21: mol_type = other RNA
gctgatcaaggaagcttccta

SEQ ID NO: 90232 - RNA, 21 nt, synthetic construct
  source 1..21: mol_type = other RNA
gctgatcaggaaagaccgggg

SEQ ID NO: 90233 - RNA, 21 nt, synthetic construct
  source 1..21: mol_type = other RNA
gctgatgaactacacagacat

SEQ ID NO: 90234 - RNA, 21 nt, synthetic construct
  source 1..21: mol_type = other RNA
gctgatgacagttactctaaa

SEQ ID NO: 90235 - RNA, 21 nt, synthetic construct
  source 1..21: mol_type = other RNA
gctgatgtaagtgggaggagg

SEQ ID NO: 90236 - RNA, 21 nt, synthetic construct
  source 1..21: mol_type = other RNA
gctgatgtgttgaccttagtg

SEQ ID NO: 90237 - RNA, 21 nt, synthetic construct
  source 1..21: mol_type = other RNA
gctgattataaccttgaactt

SEQ ID NO: 90238 - RNA, 21 nt, synthetic construct
  source 1..21: mol_type = other RNA
gctgcaactgagaagagctgt

SEQ ID NO: 90239 - RNA, 21 nt, synthetic construct
  source 1..21: mol_type = other RNA
gctgcaagcactggtaaggaa

SEQ ID NO: 90240 - RNA, 21 nt, synthetic construct
  source 1..21: mol_type = other RNA
gctgcaattgcgcagaactgg

SEQ ID NO: 90241 - RNA, 21 nt, synthetic construct
  source 1..21: mol_type = other RNA
gctgcaccattttttcaccag

SEQ ID NO: 90242 - RNA, 21 nt, synthetic construct
  source 1..21: mol_type = other RNA
gctgcaccctcctcctcctgg

SEQ ID NO: 90243 - RNA, 21 nt, synthetic construct
  source 1..21: mol_type = other RNA
gctgcacgtctgtggtctcag

SEQ ID NO: 90244 - RNA, 21 nt, synthetic construct
  source 1..21: mol_type = other RNA
gctgcactggctattagttaa

SEQ ID NO: 90245 - RNA, 21 nt, synthetic construct
  source 1..21: mol_type = other RNA
gctgcagggcttctgaaggtg

SEQ ID NO: 90246 - RNA, 21 nt, synthetic construct
  source 1..21: mol_type = other RNA
gctgcagtatgcatagatcac

SEQ ID NO: 90247 - RNA, 21 nt, synthetic construct
  source 1..21: mol_type = other RNA
gctgcagtgagctccagcctg

SEQ ID NO: 90248 - RNA, 21 nt, synthetic construct
  source 1..21: mol_type = other RNA
gctgcagtttttccactaatg

SEQ ID NO: 90249 - RNA, 21 nt, synthetic construct
  source 1..21: mol_type = other RNA
gctgcatagtactccattata

SEQ ID NO: 90250 - RNA, 21 nt, synthetic construct
  source 1..21: mol_type = other RNA
gctgcatcatggtgggccttg

SEQ ID NO: 90251 - RNA, 21 nt, synthetic construct
  source 1..21: mol_type = other RNA
gctgcatcccaagggttttgg

SEQ ID NO: 90252 - RNA, 21 nt, synthetic construct
  source 1..21: mol_type = other RNA
gctgcattccagcctggtgac

SEQ ID NO: 90253 - RNA, 21 nt, synthetic construct
  source 1..21: mol_type = other RNA
gctgccaaaagccaagagcga

SEQ ID NO: 90254 - RNA, 21 nt, synthetic construct
  source 1..21: mol_type = other RNA
gctgccaagtcagcacttctg

SEQ ID NO: 90255 - RNA, 21 nt, synthetic construct
  source 1..21: mol_type = other RNA
gctgccactacttagcccctg

SEQ ID NO: 90256 - RNA, 21 nt, synthetic construct
  source 1..21: mol_type = other RNA
gctgccagatgttctaatttc

SEQ ID NO: 90257 - RNA, 21 nt, synthetic construct
  source 1..21: mol_type = other RNA
gctgccagcaccagatactca

SEQ ID NO: 90258 - RNA, 21 nt, synthetic construct
  source 1..21: mol_type = other RNA
gctgccccagctaaaatgttc

SEQ ID NO: 90259 - RNA, 21 nt, synthetic construct
  source 1..21: mol_type = other RNA
gctgcctcagccgccgcagag

SEQ ID NO: 90260 - RNA, 21 nt, synthetic construct
  source 1..21: mol_type = other RNA
gctgcctcttcctgttgcttt

SEQ ID NO: 90261 - RNA, 21 nt, synthetic construct
  source 1..21: mol_type = other RNA
gctgcgagaaaggcgaagcgg

SEQ ID NO: 90262 - RNA, 21 nt, synthetic construct
  source 1..21: mol_type = other RNA
gctgcgccactgcactccagc

SEQ ID NO: 90263 - RNA, 21 nt, synthetic construct
  source 1..21: mol_type = other RNA
gctgctatgaaaattggcgta

SEQ ID NO: 90264 - RNA, 21 nt, synthetic construct
  source 1..21: mol_type = other RNA
gctgctccctctgccgcctgg

SEQ ID NO: 90265 - RNA, 21 nt, synthetic construct
  source 1..21: mol_type = other RNA
gctgctctgacgtttaaatga

SEQ ID NO: 90266 - RNA, 21 nt, synthetic construct
  source 1..21: mol_type = other RNA
gctgctgaaaaagatactctt

SEQ ID NO: 90267 - RNA, 21 nt, synthetic construct
  source 1..21: mol_type = other RNA
gctgctgtaacaaagatgcca

SEQ ID NO: 90268 - RNA, 21 nt, synthetic construct
  source 1..21: mol_type = other RNA
gctgcttctacccactattga

SEQ ID NO: 90269 - RNA, 21 nt, synthetic construct
  source 1..21: mol_type = other RNA
gctggaaataatttccctcag

SEQ ID NO: 90270 - RNA, 21 nt, synthetic construct
  source 1..21: mol_type = other RNA
gctggaaattttcaagggtgt

SEQ ID NO: 90271 - RNA, 21 nt, synthetic construct
  source 1..21: mol_type = other RNA
gctggaacgaatattcattta

SEQ ID NO: 90272 - RNA, 21 nt, synthetic construct
  source 1..21: mol_type = other RNA
gctggaagaattttaagccta

SEQ ID NO: 90273 - RNA, 21 nt, synthetic construct
  source 1..21: mol_type = other RNA
gctggaagggagcccaagcac

SEQ ID NO: 90274 - RNA, 21 nt, synthetic construct
  source 1..21: mol_type = other RNA
gctggaagtaaggattttcta

SEQ ID NO: 90275 - RNA, 21 nt, synthetic construct
  source 1..21: mol_type = other RNA
gctggaagttggcccaacatg

SEQ ID NO: 90276 - RNA, 21 nt, synthetic construct
  source 1..21: mol_type = other RNA
gctggaatggtgaagaatgtg

SEQ ID NO: 90277 - RNA, 21 nt, synthetic construct
  source 1..21: mol_type = other RNA
gctggacataagggtctgttt

SEQ ID NO: 90278 - RNA, 21 nt, synthetic construct
  source 1..21: mol_type = other RNA
gctggacccttaccttaaacc

SEQ ID NO: 90279 - RNA, 21 nt, synthetic construct
  source 1..21: mol_type = other RNA
gctggactcattccaatcctt

SEQ ID NO: 90280 - RNA, 21 nt, synthetic construct
  source 1..21: mol_type = other RNA
gctggactggagggatgctgg

SEQ ID NO: 90281 - RNA, 21 nt, synthetic construct
  source 1..21: mol_type = other RNA
gctggagctcactgcagcctc

SEQ ID NO: 90282 - RNA, 21 nt, synthetic construct
  source 1..21: mol_type = other RNA
gctggaggatggcttgagccc

SEQ ID NO: 90283 - RNA, 21 nt, synthetic construct
  source 1..21: mol_type = other RNA
gctggaggtcgggctgcctca

SEQ ID NO: 90284 - RNA, 21 nt, synthetic construct
  source 1..21: mol_type = other RNA
gctggagtgcaatggtgggat

SEQ ID NO: 90285 - RNA, 21 nt, synthetic construct
  source 1..21: mol_type = other RNA
gctggagtggagtggcatgat

SEQ ID NO: 90286 - RNA, 21 nt, synthetic construct
  source 1..21: mol_type = other RNA
gctggagtgtggcaggggctg

SEQ ID NO: 90287 - RNA, 21 nt, synthetic construct
  source 1..21: mol_type = other RNA
gctggagttatttgtataaat

SEQ ID NO: 90288 - RNA, 21 nt, synthetic construct
  source 1..21: mol_type = other RNA
gctggatcatatagtaattct

SEQ ID NO: 90289 - RNA, 21 nt, synthetic construct
  source 1..21: mol_type = other RNA
gctggatgtggtgtggcatgt

SEQ ID NO: 90290 - RNA, 21 nt, synthetic construct
  source 1..21: mol_type = other RNA
gctggcaaaatggagacatct

SEQ ID NO: 90291 - RNA, 21 nt, synthetic construct
  source 1..21: mol_type = other RNA
gctggcactttcctgataagg

SEQ ID NO: 90292 - RNA, 21 nt, synthetic construct
  source 1..21: mol_type = other RNA
gctggcagccttctctcttcc

SEQ ID NO: 90293 - RNA, 21 nt, synthetic construct
  source 1..21: mol_type = other RNA
gctggcatgttggatagtttc

SEQ ID NO: 90294 - RNA, 21 nt, synthetic construct
  source 1..21: mol_type = other RNA
gctggccagtgagttcaaatg

SEQ ID NO: 90295 - RNA, 21 nt, synthetic construct
  source 1..21: mol_type = other RNA
gctggctcagtctgtttgcca

SEQ ID NO: 90296 - RNA, 21 nt, synthetic construct
  source 1..21: mol_type = other RNA
gctggctctttccactctctg

SEQ ID NO: 90297 - RNA, 21 nt, synthetic construct
  source 1..21: mol_type = other RNA
gctggcttcaatatgcagtat

SEQ ID NO: 90298 - RNA, 21 nt, synthetic construct
  source 1..21: mol_type = other RNA
gctggcttcatgggtggaaat

SEQ ID NO: 90299 - RNA, 21 nt, synthetic construct
  source 1..21: mol_type = other RNA
gctgggactacaggtgtgaac

SEQ ID NO: 90300 - RNA, 21 nt, synthetic construct
  source 1..21: mol_type = other RNA
gctgggagaaagctaatttgg

SEQ ID NO: 90301 - RNA, 21 nt, synthetic construct
  source 1..21: mol_type = other RNA
gctgggagaccaggagttctt

SEQ ID NO: 90302 - RNA, 21 nt, synthetic construct
  source 1..21: mol_type = other RNA
gctgggagcttatcaggcttg

SEQ ID NO: 90303 - RNA, 21 nt, synthetic construct
  source 1..21: mol_type = other RNA
gctgggagtacaagaccagcc

SEQ ID NO: 90304 - RNA, 21 nt, synthetic construct
  source 1..21: mol_type = other RNA
gctgggatcacaggcgttgag

SEQ ID NO: 90305 - RNA, 21 nt, synthetic construct
  source 1..21: mol_type = other RNA
gctgggatggctgaaagagaa

SEQ ID NO: 90306 - RNA, 21 nt, synthetic construct
  source 1..21: mol_type = other RNA
gctgggattacacacacctac

SEQ ID NO: 90307 - RNA, 21 nt, synthetic construct
  source 1..21: mol_type = other RNA
gctgggattacaggcgcacgc

SEQ ID NO: 90308 - RNA, 21 nt, synthetic construct
  source 1..21: mol_type = other RNA
gctgggcccactctccccaag

SEQ ID NO: 90309 - RNA, 21 nt, synthetic construct
  source 1..21: mol_type = other RNA
gctgggcccgcagtggctcat

SEQ ID NO: 90310 - RNA, 21 nt, synthetic construct
  source 1..21: mol_type = other RNA
gctgggcgagatggcgtgcgc

SEQ ID NO: 90311 - RNA, 21 nt, synthetic construct
  source 1..21: mol_type = other RNA
gctgggctagagccaggaagt

SEQ ID NO: 90312 - RNA, 21 nt, synthetic construct
  source 1..21: mol_type = other RNA
gctgggctagggaagcagttg

SEQ ID NO: 90313 - RNA, 21 nt, synthetic construct
  source 1..21: mol_type = other RNA
gctgggctattgttttgcaag

SEQ ID NO: 90314 - RNA, 21 nt, synthetic construct
  source 1..21: mol_type = other RNA
gctgggctttctccaggggcg

SEQ ID NO: 90315 - RNA, 21 nt, synthetic construct
  source 1..21: mol_type = other RNA
gctggggaattgcatgagact

SEQ ID NO: 90316 - RNA, 21 nt, synthetic construct
  source 1..21: mol_type = other RNA
gctggggacccctccctgctt

SEQ ID NO: 90317 - RNA, 21 nt, synthetic construct
  source 1..21: mol_type = other RNA
gctggggcagcaaagcaagaa

SEQ ID NO: 90318 - RNA, 21 nt, synthetic construct
  source 1..21: mol_type = other RNA
gctgggggatccaggggaata

SEQ ID NO: 90319 - RNA, 21 nt, synthetic construct
  source 1..21: mol_type = other RNA
gctgggtagagactggatcct

SEQ ID NO: 90320 - RNA, 21 nt, synthetic construct
  source 1..21: mol_type = other RNA
gctgggtgatgttcaaccctc

SEQ ID NO: 90321 - RNA, 21 nt, synthetic construct
  source 1..21: mol_type = other RNA
gctggtaatacagtctgattt

SEQ ID NO: 90322 - RNA, 21 nt, synthetic construct
  source 1..21: mol_type = other RNA
gctggtcctgaactcgtggcc

SEQ ID NO: 90323 - RNA, 21 nt, synthetic construct
  source 1..21: mol_type = other RNA
gctggtctcaaactccaagtc

SEQ ID NO: 90324 - RNA, 21 nt, synthetic construct
  source 1..21: mol_type = other RNA
gctggtctggaatgtgtagtt

SEQ ID NO: 90325 - RNA, 21 nt, synthetic construct
  source 1..21: mol_type = other RNA
gctggtcttgtactcccagcc

SEQ ID NO: 90326 - RNA, 21 nt, synthetic construct
  source 1..21: mol_type = other RNA
gctggtgaaaaaatggtgcag

SEQ ID NO: 90327 - RNA, 21 nt, synthetic construct
  source 1..21: mol_type = other RNA
gctggtggagtattctagttc

SEQ ID NO: 90328 - RNA, 21 nt, synthetic construct
  source 1..21: mol_type = other RNA
gctggtgggctttgagaaagg

SEQ ID NO: 90329 - RNA, 21 nt, synthetic construct
  source 1..21: mol_type = other RNA
gctggttccaaacttctgacc

SEQ ID NO: 90330 - RNA, 21 nt, synthetic construct
  source 1..21: mol_type = other RNA
gctgtaacaaagatgccacaa

SEQ ID NO: 90331 - RNA, 21 nt, synthetic construct
  source 1..21: mol_type = other RNA
gctgtaacagaggcatgcacg

SEQ ID NO: 90332 - RNA, 21 nt, synthetic construct
  source 1..21: mol_type = other RNA
gctgtaactgacttcaagagg

SEQ ID NO: 90333 - RNA, 21 nt, synthetic construct
  source 1..21: mol_type = other RNA
gctgtaagctggtaatacagt

SEQ ID NO: 90334 - RNA, 21 nt, synthetic construct
  source 1..21: mol_type = other RNA
gctgtactaagcctatgtaag

SEQ ID NO: 90335 - RNA, 21 nt, synthetic construct
  source 1..21: mol_type = other RNA
gctgtagtgattcacttttga

SEQ ID NO: 90336 - RNA, 21 nt, synthetic construct
  source 1..21: mol_type = other RNA
gctgtataacattttctctac

SEQ ID NO: 90337 - RNA, 21 nt, synthetic construct
  source 1..21: mol_type = other RNA
gctgtatacccaggtgtgaga

SEQ ID NO: 90338 - RNA, 21 nt, synthetic construct
  source 1..21: mol_type = other RNA
gctgtattgtaggaaagcctg

SEQ ID NO: 90339 - RNA, 21 nt, synthetic construct
  source 1..21: mol_type = other RNA
gctgtatttttgctcacactt

SEQ ID NO: 90340 - RNA, 21 nt, synthetic construct
  source 1..21: mol_type = other RNA
gctgtcaaaaatgtgtctagt

SEQ ID NO: 90341 - RNA, 21 nt, synthetic construct
  source 1..21: mol_type = other RNA
gctgtcactctctttaggaag

SEQ ID NO: 90342 - RNA, 21 nt, synthetic construct
  source 1..21: mol_type = other RNA
gctgtcaggcaagggactgtc

SEQ ID NO: 90343 - RNA, 21 nt, synthetic construct
  source 1..21: mol_type = other RNA
gctgtccaacaagggttggtg

SEQ ID NO: 90344 - RNA, 21 nt, synthetic construct
  source 1..21: mol_type = other RNA
gctgtccatttccagtacttt

SEQ ID NO: 90345 - RNA, 21 nt, synthetic construct
  source 1..21: mol_type = other RNA
gctgtccatttccttaagcac

SEQ ID NO: 90346 - RNA, 21 nt, synthetic construct
  source 1..21: mol_type = other RNA
gctgtcccaaatgcaccaaca

SEQ ID NO: 90347 - RNA, 21 nt, synthetic construct
  source 1..21: mol_type = other RNA
gctgtccccaccgccttccta

SEQ ID NO: 90348 - RNA, 21 nt, synthetic construct
  source 1..21: mol_type = other RNA
gctgtccttctcgtgtgagct

SEQ ID NO: 90349 - RNA, 21 nt, synthetic construct
  source 1..21: mol_type = other RNA
gctgtcgctctcctgtgccaa

SEQ ID NO: 90350 - RNA, 21 nt, synthetic construct
  source 1..21: mol_type = other RNA
gctgtcggttttctagttagt

SEQ ID NO: 90351 - RNA, 21 nt, synthetic construct
  source 1..21: mol_type = other RNA
gctgtcgtttatgcatttatt

SEQ ID NO: 90352 - RNA, 21 nt, synthetic construct
  source 1..21: mol_type = other RNA
gctgtctataggcaatgagtc

SEQ ID NO: 90353 - RNA, 21 nt, synthetic construct
  source 1..21: mol_type = other RNA
gctgtctccaacgctttttat

SEQ ID NO: 90354 - RNA, 21 nt, synthetic construct
  source 1..21: mol_type = other RNA
gctgtctggattgattccagt

SEQ ID NO: 90355 - RNA, 21 nt, synthetic construct
  source 1..21: mol_type = other RNA
gctgtgaatgtgaggtgagga

SEQ ID NO: 90356 - RNA, 21 nt, synthetic construct
  source 1..21: mol_type = other RNA
gctgtgaatttggatttgagt

SEQ ID NO: 90357 - RNA, 21 nt, synthetic construct
  source 1..21: mol_type = other RNA
gctgtgagtccttccagtatg

SEQ ID NO: 90358 - RNA, 21 nt, synthetic construct
  source 1..21: mol_type = other RNA
gctgtgattaccggcatccgc

SEQ ID NO: 90359 - RNA, 21 nt, synthetic construct
  source 1..21: mol_type = other RNA
gctgtgattgcaggtgtgggc

SEQ ID NO: 90360 - RNA, 21 nt, synthetic construct
  source 1..21: mol_type = other RNA
gctgtgccaactctggcaggt

SEQ ID NO: 90361 - RNA, 21 nt, synthetic construct
  source 1..21: mol_type = other RNA
gctgtgccagtgcaaacctcc

SEQ ID NO: 90362 - RNA, 21 nt, synthetic construct
  source 1..21: mol_type = other RNA
gctgtgccgaggcagagagag

SEQ ID NO: 90363 - RNA, 21 nt, synthetic construct
  source 1..21: mol_type = other RNA
gctgtggaagcacagtctctg

SEQ ID NO: 90364 - RNA, 21 nt, synthetic construct
  source 1..21: mol_type = other RNA
gctgtggatgttggtgagaac

SEQ ID NO: 90365 - RNA, 21 nt, synthetic construct
  source 1..21: mol_type = other RNA
gctgtggccgagggagacggc

SEQ ID NO: 90366 - RNA, 21 nt, synthetic construct
  source 1..21: mol_type = other RNA
gctgtggctaacaatcaaatt

SEQ ID NO: 90367 - RNA, 21 nt, synthetic construct
  source 1..21: mol_type = other RNA
gctgtggctcactcatttccg

SEQ ID NO: 90368 - RNA, 21 nt, synthetic construct
  source 1..21: mol_type = other RNA
gctgtggcttgggtgacctca

SEQ ID NO: 90369 - RNA, 21 nt, synthetic construct
  source 1..21: mol_type = other RNA
gctgttaatggttagactgca

SEQ ID NO: 90370 - RNA, 21 nt, synthetic construct
  source 1..21: mol_type = other RNA
gctgttaccatttgaccttcc

SEQ ID NO: 90371 - RNA, 21 nt, synthetic construct
  source 1..21: mol_type = other RNA
gctgttagccttgccattctc

SEQ ID NO: 90372 - RNA, 21 nt, synthetic construct
  source 1..21: mol_type = other RNA
gctgttaggtattattttcac

SEQ ID NO: 90373 - RNA, 21 nt, synthetic construct
  source 1..21: mol_type = other RNA
gctgttattagagttgtaaca

SEQ ID NO: 90374 - RNA, 21 nt, synthetic construct
  source 1..21: mol_type = other RNA
gctgttcaatttagaaaatgc

SEQ ID NO: 90375 - RNA, 21 nt, synthetic construct
  source 1..21: mol_type = other RNA
gctgttcccaagcaagtgtgg

SEQ ID NO: 90376 - RNA, 21 nt, synthetic construct
  source 1..21: mol_type = other RNA
gctgttcccagataacagtgg

SEQ ID NO: 90377 - RNA, 21 nt, synthetic construct
  source 1..21: mol_type = other RNA
gctgttctctgtgtggtttgc

SEQ ID NO: 90378 - RNA, 21 nt, synthetic construct
  source 1..21: mol_type = other RNA
gctgttgaattgttgcgcgtc

SEQ ID NO: 90379 - RNA, 21 nt, synthetic construct
  source 1..21: mol_type = other RNA
gctgttgaggctgggccctgt

SEQ ID NO: 90380 - RNA, 21 nt, synthetic construct
  source 1..21: mol_type = other RNA
gctgttgatggacgtttgagt

SEQ ID NO: 90381 - RNA, 21 nt, synthetic construct
  source 1..21: mol_type = other RNA
gctgttgtaatgttacttctc

SEQ ID NO: 90382 - RNA, 21 nt, synthetic construct
  source 1..21: mol_type = other RNA
gctgttgtattttacaccatg

SEQ ID NO: 90383 - RNA, 21 nt, synthetic construct
  source 1..21: mol_type = other RNA
gctgtttacattagagaagaa

SEQ ID NO: 90384 - RNA, 21 nt, synthetic construct
  source 1..21: mol_type = other RNA
gctgtttaccaagggtgtgtt

SEQ ID NO: 90385 - RNA, 21 nt, synthetic construct
  source 1..21: mol_type = other RNA
gctgtttgagatctttcttat

SEQ ID NO: 90386 - RNA, 21 nt, synthetic construct
  source 1..21: mol_type = other RNA
gctgtttgagctgaaagtaaa

SEQ ID NO: 90387 - RNA, 21 nt, synthetic construct
  source 1..21: mol_type = other RNA
gctgtttgcctgcgtccgtag

SEQ ID NO: 90388 - RNA, 21 nt, synthetic construct
  source 1..21: mol_type = other RNA
gctgttttcatgcgacatatc

SEQ ID NO: 90389 - RNA, 21 nt, synthetic construct
  source 1..21: mol_type = other RNA
gctgttttgcttactgtagca

SEQ ID NO: 90390 - RNA, 21 nt, synthetic construct
  source 1..21: mol_type = other RNA
gctgttttggtaaaatgtggc

SEQ ID NO: 90391 - RNA, 21 nt, synthetic construct
  source 1..21: mol_type = other RNA
gctgtttttgaaaagaacaac

SEQ ID NO: 90392 - RNA, 21 nt, synthetic construct
  source 1..21: mol_type = other RNA
gcttaaaattcttccagcctg

SEQ ID NO: 90393 - RNA, 21 nt, synthetic construct
  source 1..21: mol_type = other RNA
gcttaaagcctctcaacactt

SEQ ID NO: 90394 - RNA, 21 nt, synthetic construct
  source 1..21: mol_type = other RNA
gcttaaagcgctactcagctg

SEQ ID NO: 90395 - RNA, 21 nt, synthetic construct
  source 1..21: mol_type = other RNA
gcttaaagttggtcctgcata

SEQ ID NO: 90396 - RNA, 21 nt, synthetic construct
  source 1..21: mol_type = other RNA
gcttaacaagaatcctgctat

SEQ ID NO: 90397 - RNA, 21 nt, synthetic construct
  source 1..21: mol_type = other RNA
gcttaacacctttgtattcat

SEQ ID NO: 90398 - RNA, 21 nt, synthetic construct
  source 1..21: mol_type = other RNA
gcttaacatttgaactcactg

SEQ ID NO: 90399 - RNA, 21 nt, synthetic construct
  source 1..21: mol_type = other RNA
gcttaagagctaagactataa

SEQ ID NO: 90400 - RNA, 21 nt, synthetic construct
  source 1..21: mol_type = other RNA
gcttaaggaaatggacagcac

SEQ ID NO: 90401 - RNA, 21 nt, synthetic construct
  source 1..21: mol_type = other RNA
gcttaagtcactccatttgtg

SEQ ID NO: 90402 - RNA, 21 nt, synthetic construct
  source 1..21: mol_type = other RNA
gcttaatctgatttttagtga

SEQ ID NO: 90403 - RNA, 21 nt, synthetic construct
  source 1..21: mol_type = other RNA
gcttaatcttcacacttagtt

SEQ ID NO: 90404 - RNA, 21 nt, synthetic construct
  source 1..21: mol_type = other RNA
gcttaattgagctgtccccac

SEQ ID NO: 90405 - RNA, 21 nt, synthetic construct
  source 1..21: mol_type = other RNA
gcttaatttagatgagagtgg

SEQ ID NO: 90406 - RNA, 21 nt, synthetic construct
  source 1..21: mol_type = other RNA
gcttacacacacgtttatatt

SEQ ID NO: 90407 - RNA, 21 nt, synthetic construct
  source 1..21: mol_type = other RNA
gcttacagactgattaatttg

SEQ ID NO: 90408 - RNA, 21 nt, synthetic construct
  source 1..21: mol_type = other RNA
gcttacagcagatctgcttgc

SEQ ID NO: 90409 - RNA, 21 nt, synthetic construct
  source 1..21: mol_type = other RNA
gcttacagtcatcacagtcca

SEQ ID NO: 90410 - RNA, 21 nt, synthetic construct
  source 1..21: mol_type = other RNA
gcttaccaagtgccgcgtttt

SEQ ID NO: 90411 - RNA, 21 nt, synthetic construct
  source 1..21: mol_type = other RNA
gcttactctaatggggaaata

SEQ ID NO: 90412 - RNA, 21 nt, synthetic construct
  source 1..21: mol_type = other RNA
gcttactgcaacctccgtttt

SEQ ID NO: 90413 - RNA, 21 nt, synthetic construct
  source 1..21: mol_type = other RNA
gcttactgtagcattgaagta

SEQ ID NO: 90414 - RNA, 21 nt, synthetic construct
  source 1..21: mol_type = other RNA
gcttagaaatgaagatggcct

SEQ ID NO: 90415 - RNA, 21 nt, synthetic construct
  source 1..21: mol_type = other RNA
gcttagaagaagacttaggag

SEQ ID NO: 90416 - RNA, 21 nt, synthetic construct
  source 1..21: mol_type = other RNA
gcttagataggatgggcagac

SEQ ID NO: 90417 - RNA, 21 nt, synthetic construct
  source 1..21: mol_type = other RNA
gcttagatgagcccaggagtt

SEQ ID NO: 90418 - RNA, 21 nt, synthetic construct
  source 1..21: mol_type = other RNA
gcttagccttccagagacaaa

SEQ ID NO: 90419 - RNA, 21 nt, synthetic construct
  source 1..21: mol_type = other RNA
gcttagcgctggaggtcgggc

SEQ ID NO: 90420 - RNA, 21 nt, synthetic construct
  source 1..21: mol_type = other RNA
gcttagctgcctcttcctgtt

SEQ ID NO: 90421 - RNA, 21 nt, synthetic construct
  source 1..21: mol_type = other RNA
gcttaggatcaccaaagactt

SEQ ID NO: 90422 - RNA, 21 nt, synthetic construct
  source 1..21: mol_type = other RNA
gcttaggatcccagtcctttg

SEQ ID NO: 90423 - RNA, 21 nt, synthetic construct
  source 1..21: mol_type = other RNA
gcttaggctgaagcaggcttt

SEQ ID NO: 90424 - RNA, 21 nt, synthetic construct
  source 1..21: mol_type = other RNA
gcttaggctgttattagagtt

SEQ ID NO: 90425 - RNA, 21 nt, synthetic construct
  source 1..21: mol_type = other RNA
gcttaggtaagaaaaattccc

SEQ ID NO: 90426 - RNA, 21 nt, synthetic construct
  source 1..21: mol_type = other RNA
gcttaggtcagattccttttt

SEQ ID NO: 90427 - RNA, 21 nt, synthetic construct
  source 1..21: mol_type = other RNA
gcttagtacagccatcaacct

SEQ ID NO: 90428 - RNA, 21 nt, synthetic construct
  source 1..21: mol_type = other RNA
gcttagtcttctcagatctgt

SEQ ID NO: 90429 - RNA, 21 nt, synthetic construct
  source 1..21: mol_type = other RNA
gcttataacaagaaaatctga

SEQ ID NO: 90430 - RNA, 21 nt, synthetic construct
  source 1..21: mol_type = other RNA
gcttataatttctgagagtat

SEQ ID NO: 90431 - RNA, 21 nt, synthetic construct
  source 1..21: mol_type = other RNA
gcttatcagatggtgatacct

SEQ ID NO: 90432 - RNA, 21 nt, synthetic construct
  source 1..21: mol_type = other RNA
gcttatcaggcttgagtctgt

SEQ ID NO: 90433 - RNA, 21 nt, synthetic construct
  source 1..21: mol_type = other RNA
gcttatgatcttgggaatact

SEQ ID NO: 90434 - RNA, 21 nt, synthetic construct
  source 1..21: mol_type = other RNA
gcttatgtcttgtggctgaca

SEQ ID NO: 90435 - RNA, 21 nt, synthetic construct
  source 1..21: mol_type = other RNA
gcttattaaaatgaacctgct

SEQ ID NO: 90436 - RNA, 21 nt, synthetic construct
  source 1..21: mol_type = other RNA
gcttattatatgcctagattt

SEQ ID NO: 90437 - RNA, 21 nt, synthetic construct
  source 1..21: mol_type = other RNA
gcttattctttttctagtttg

SEQ ID NO: 90438 - RNA, 21 nt, synthetic construct
  source 1..21: mol_type = other RNA
gcttcaaaccactatctaata

SEQ ID NO: 90439 - RNA, 21 nt, synthetic construct
  source 1..21: mol_type = other RNA
gcttcaaagagaacaaaatac

SEQ ID NO: 90440 - RNA, 21 nt, synthetic construct
  source 1..21: mol_type = other RNA
gcttcaacctcctgggctcaa

SEQ ID NO: 90441 - RNA, 21 nt, synthetic construct
  source 1..21: mol_type = other RNA
gcttcaatatgcagtatgtgc

SEQ ID NO: 90442 - RNA, 21 nt, synthetic construct
  source 1..21: mol_type = other RNA
gcttcaatgagggcagagata

SEQ ID NO: 90443 - RNA, 21 nt, synthetic construct
  source 1..21: mol_type = other RNA
gcttcacgtgcattcatactg

SEQ ID NO: 90444 - RNA, 21 nt, synthetic construct
  source 1..21: mol_type = other RNA
gcttcactcttctgcaagttg

SEQ ID NO: 90445 - RNA, 21 nt, synthetic construct
  source 1..21: mol_type = other RNA
gcttcacttctctgctgctga

SEQ ID NO: 90446 - RNA, 21 nt, synthetic construct
  source 1..21: mol_type = other RNA
gcttcactttcgtcatctata

SEQ ID NO: 90447 - RNA, 21 nt, synthetic construct
  source 1..21: mol_type = other RNA
gcttcagcctaagcaagttac

SEQ ID NO: 90448 - RNA, 21 nt, synthetic construct
  source 1..21: mol_type = other RNA
gcttcagtgccaacacatggg

SEQ ID NO: 90449 - RNA, 21 nt, synthetic construct
  source 1..21: mol_type = other RNA
gcttcagttggtgaagagagc

SEQ ID NO: 90450 - RNA, 21 nt, synthetic construct
  source 1..21: mol_type = other RNA
gcttcatataagtggaatcat

SEQ ID NO: 90451 - RNA, 21 nt, synthetic construct
  source 1..21: mol_type = other RNA
gcttcatattttgtgggaatt

SEQ ID NO: 90452 - RNA, 21 nt, synthetic construct
  source 1..21: mol_type = other RNA
gcttcatctggaccagttact

SEQ ID NO: 90453 - RNA, 21 nt, synthetic construct
  source 1..21: mol_type = other RNA
gcttcatgctgggagaccagg

SEQ ID NO: 90454 - RNA, 21 nt, synthetic construct
  source 1..21: mol_type = other RNA
gcttcatgggtggaaattaaa

SEQ ID NO: 90455 - RNA, 21 nt, synthetic construct
  source 1..21: mol_type = other RNA
gcttcattccgcgtttattag

SEQ ID NO: 90456 - RNA, 21 nt, synthetic construct
  source 1..21: mol_type = other RNA
gcttccaaaagcaggccctga

SEQ ID NO: 90457 - RNA, 21 nt, synthetic construct
  source 1..21: mol_type = other RNA
gcttccacagctatcaggcct

SEQ ID NO: 90458 - RNA, 21 nt, synthetic construct
  source 1..21: mol_type = other RNA
gcttccacatttctaatttcc

SEQ ID NO: 90459 - RNA, 21 nt, synthetic construct
  source 1..21: mol_type = other RNA
gcttccacccaagtggagcct

SEQ ID NO: 90460 - RNA, 21 nt, synthetic construct
  source 1..21: mol_type = other RNA
gcttcccacttcgaaagttca

SEQ ID NO: 90461 - RNA, 21 nt, synthetic construct
  source 1..21: mol_type = other RNA
gcttcccccaaagaaggaaaa

SEQ ID NO: 90462 - RNA, 21 nt, synthetic construct
  source 1..21: mol_type = other RNA
gcttcccccctctctctttct

SEQ ID NO: 90463 - RNA, 21 nt, synthetic construct
  source 1..21: mol_type = other RNA
gcttccctagcccagcacttc

SEQ ID NO: 90464 - RNA, 21 nt, synthetic construct
  source 1..21: mol_type = other RNA
gcttccgggacttggaagtga

SEQ ID NO: 90465 - RNA, 21 nt, synthetic construct
  source 1..21: mol_type = other RNA
gcttcctaaacctgctacgaa

SEQ ID NO: 90466 - RNA, 21 nt, synthetic construct
  source 1..21: mol_type = other RNA
gcttcctaaagagagtgacag

SEQ ID NO: 90467 - RNA, 21 nt, synthetic construct
  source 1..21: mol_type = other RNA
gcttcctaactggtctccttt

SEQ ID NO: 90468 - RNA, 21 nt, synthetic construct
  source 1..21: mol_type = other RNA
gcttcctaagaaagggtgtgt

SEQ ID NO: 90469 - RNA, 21 nt, synthetic construct
  source 1..21: mol_type = other RNA
gcttcctacccaagcttaggt

SEQ ID NO: 90470 - RNA, 21 nt, synthetic construct
  source 1..21: mol_type = other RNA
gcttcctcaggatctacatta

SEQ ID NO: 90471 - RNA, 21 nt, synthetic construct
  source 1..21: mol_type = other RNA
gcttcctctggctgacctggt

SEQ ID NO: 90472 - RNA, 21 nt, synthetic construct
  source 1..21: mol_type = other RNA
gcttccttctcttatactagt

SEQ ID NO: 90473 - RNA, 21 nt, synthetic construct
  source 1..21: mol_type = other RNA
gcttccttgatcagcttccta

SEQ ID NO: 90474 - RNA, 21 nt, synthetic construct
  source 1..21: mol_type = other RNA
gcttccttgctatgtaatctc

SEQ ID NO: 90475 - RNA, 21 nt, synthetic construct
  source 1..21: mol_type = other RNA
gcttcgaagcaaaacatatgt

SEQ ID NO: 90476 - RNA, 21 nt, synthetic construct
  source 1..21: mol_type = other RNA
gcttcgaagcttattaaaatg

SEQ ID NO: 90477 - RNA, 21 nt, synthetic construct
  source 1..21: mol_type = other RNA
gcttcgacagtcccttgcctg

SEQ ID NO: 90478 - RNA, 21 nt, synthetic construct
  source 1..21: mol_type = other RNA
gcttcgaggtcgcaccctgag

SEQ ID NO: 90479 - RNA, 21 nt, synthetic construct
  source 1..21: mol_type = other RNA
gcttcgagttctgggagttca

SEQ ID NO: 90480 - RNA, 21 nt, synthetic construct
  source 1..21: mol_type = other RNA
gcttcgcctttctcgcagcgg

SEQ ID NO: 90481 - RNA, 21 nt, synthetic construct
  source 1..21: mol_type = other RNA
gcttcgcctttgttgccaggt

SEQ ID NO: 90482 - RNA, 21 nt, synthetic construct
  source 1..21: mol_type = other RNA
gcttctacccactattgaaag

SEQ ID NO: 90483 - RNA, 21 nt, synthetic construct
  source 1..21: mol_type = other RNA
gcttctagccaaagcaagcct

SEQ ID NO: 90484 - RNA, 21 nt, synthetic construct
  source 1..21: mol_type = other RNA
gcttctagtaacttggtcgaa

SEQ ID NO: 90485 - RNA, 21 nt, synthetic construct
  source 1..21: mol_type = other RNA
gcttctatgtgacaaacactt

SEQ ID NO: 90486 - RNA, 21 nt, synthetic construct
  source 1..21: mol_type = other RNA
gcttctcaaactgtgtgcttg

SEQ ID NO: 90487 - RNA, 21 nt, synthetic construct
  source 1..21: mol_type = other RNA
gcttctcaataaggaaagcac

SEQ ID NO: 90488 - RNA, 21 nt, synthetic construct
  source 1..21: mol_type = other RNA
gcttctgaaggtgcctgccat

SEQ ID NO: 90489 - RNA, 21 nt, synthetic construct
  source 1..21: mol_type = other RNA
gcttctgaattgagatgtact

SEQ ID NO: 90490 - RNA, 21 nt, synthetic construct
  source 1..21: mol_type = other RNA
gcttctgagcagtgtttccta

SEQ ID NO: 90491 - RNA, 21 nt, synthetic construct
  source 1..21: mol_type = other RNA
gcttctgagctgttaatggtt

SEQ ID NO: 90492 - RNA, 21 nt, synthetic construct
  source 1..21: mol_type = other RNA
gcttctgataggaatatcgtc

SEQ ID NO: 90493 - RNA, 21 nt, synthetic construct
  source 1..21: mol_type = other RNA
gcttcttgttagaattttgct

SEQ ID NO: 90494 - RNA, 21 nt, synthetic construct
  source 1..21: mol_type = other RNA
gcttgaacaaatatgaatgaa

SEQ ID NO: 90495 - RNA, 21 nt, synthetic construct
  source 1..21: mol_type = other RNA
gcttgaacccgaggtgcacaa

SEQ ID NO: 90496 - RNA, 21 nt, synthetic construct
  source 1..21: mol_type = other RNA
gcttgaacctgaaaaacggag

SEQ ID NO: 90497 - RNA, 21 nt, synthetic construct
  source 1..21: mol_type = other RNA
gcttgaactgctggtctggaa

SEQ ID NO: 90498 - RNA, 21 nt, synthetic construct
  source 1..21: mol_type = other RNA
gcttgaagagcgcttctatgt

SEQ ID NO: 90499 - RNA, 21 nt, synthetic construct
  source 1..21: mol_type = other RNA
gcttgaatgtgcctacatagt

SEQ ID NO: 90500 - RNA, 21 nt, synthetic construct
  source 1..21: mol_type = other RNA
gcttgacaaaaggccccttga

SEQ ID NO: 90501 - RNA, 21 nt, synthetic construct
  source 1..21: mol_type = other RNA
gcttgacattcttaccttcta

SEQ ID NO: 90502 - RNA, 21 nt, synthetic construct
  source 1..21: mol_type = other RNA
gcttgagagagataaaacctg

SEQ ID NO: 90503 - RNA, 21 nt, synthetic construct
  source 1..21: mol_type = other RNA
gcttgagcccagggggtcgag

SEQ ID NO: 90504 - RNA, 21 nt, synthetic construct
  source 1..21: mol_type = other RNA
gcttgaggccacgagttcagg

SEQ ID NO: 90505 - RNA, 21 nt, synthetic construct
  source 1..21: mol_type = other RNA
gcttgagtctgtgctctgtat

SEQ ID NO: 90506 - RNA, 21 nt, synthetic construct
  source 1..21: mol_type = other RNA
gcttgagtgcaggagtttgag

SEQ ID NO: 90507 - RNA, 21 nt, synthetic construct
  source 1..21: mol_type = other RNA
gcttgatctttacttcccttc

SEQ ID NO: 90508 - RNA, 21 nt, synthetic construct
  source 1..21: mol_type = other RNA
gcttgattagcttcctcagga

SEQ ID NO: 90509 - RNA, 21 nt, synthetic construct
  source 1..21: mol_type = other RNA
gcttgcaaggcccaccatgat

SEQ ID NO: 90510 - RNA, 21 nt, synthetic construct
  source 1..21: mol_type = other RNA
gcttgcagacaataattcttc

SEQ ID NO: 90511 - RNA, 21 nt, synthetic construct
  source 1..21: mol_type = other RNA
gcttgcagccttccctgaaca

SEQ ID NO: 90512 - RNA, 21 nt, synthetic construct
  source 1..21: mol_type = other RNA
gcttgctagtagcagaatccc

SEQ ID NO: 90513 - RNA, 21 nt, synthetic construct
  source 1..21: mol_type = other RNA
gcttgctccagagaagttttc

SEQ ID NO: 90514 - RNA, 21 nt, synthetic construct
  source 1..21: mol_type = other RNA
gcttgctctacaaaccttctt

SEQ ID NO: 90515 - RNA, 21 nt, synthetic construct
  source 1..21: mol_type = other RNA
gcttgctctgcggcaggcatt

SEQ ID NO: 90516 - RNA, 21 nt, synthetic construct
  source 1..21: mol_type = other RNA
gcttgctgcactggctattag

SEQ ID NO: 90517 - RNA, 21 nt, synthetic construct
  source 1..21: mol_type = other RNA
gcttgctttggctagaagcat

SEQ ID NO: 90518 - RNA, 21 nt, synthetic construct
  source 1..21: mol_type = other RNA
gcttggaaaacaaattgcatc

SEQ ID NO: 90519 - RNA, 21 nt, synthetic construct
  source 1..21: mol_type = other RNA
gcttggagtcacttgacaaaa

SEQ ID NO: 90520 - RNA, 21 nt, synthetic construct
  source 1..21: mol_type = other RNA
gcttggatattctacagaaaa

SEQ ID NO: 90521 - RNA, 21 nt, synthetic construct
  source 1..21: mol_type = other RNA
gcttggcacagaattattgat

SEQ ID NO: 90522 - RNA, 21 nt, synthetic construct
  source 1..21: mol_type = other RNA
gcttggccaacatggcgaaac

SEQ ID NO: 90523 - RNA, 21 nt, synthetic construct
  source 1..21: mol_type = other RNA
gcttggcgcagtgcttagcgc

SEQ ID NO: 90524 - RNA, 21 nt, synthetic construct
  source 1..21: mol_type = other RNA
gcttgggaacagcaggggaag

SEQ ID NO: 90525 - RNA, 21 nt, synthetic construct
  source 1..21: mol_type = other RNA
gcttgggcaagagagcaagtc

SEQ ID NO: 90526 - RNA, 21 nt, synthetic construct
  source 1..21: mol_type = other RNA
gcttgggctaaggtggagtgg

SEQ ID NO: 90527 - RNA, 21 nt, synthetic construct
  source 1..21: mol_type = other RNA
gcttgggctcccttccagcgt

SEQ ID NO: 90528 - RNA, 21 nt, synthetic construct
  source 1..21: mol_type = other RNA
gcttggggaacagtttagcaa

SEQ ID NO: 90529 - RNA, 21 nt, synthetic construct
  source 1..21: mol_type = other RNA
gcttgggtaggaagctgatca

SEQ ID NO: 90530 - RNA, 21 nt, synthetic construct
  source 1..21: mol_type = other RNA
gcttgggtgacctcatgtaac

SEQ ID NO: 90531 - RNA, 21 nt, synthetic construct
  source 1..21: mol_type = other RNA
gcttggtatgcatcttgaact

SEQ ID NO: 90532 - RNA, 21 nt, synthetic construct
  source 1..21: mol_type = other RNA
gcttggtggcccacacctgca

SEQ ID NO: 90533 - RNA, 21 nt, synthetic construct
  source 1..21: mol_type = other RNA
gcttggtgttgactgaattaa

SEQ ID NO: 90534 - RNA, 21 nt, synthetic construct
  source 1..21: mol_type = other RNA
gcttggttggaaaagaaagct

SEQ ID NO: 90535 - RNA, 21 nt, synthetic construct
  source 1..21: mol_type = other RNA
gcttggtttcacacgcattgc

SEQ ID NO: 90536 - RNA, 21 nt, synthetic construct
  source 1..21: mol_type = other RNA
gcttgtctctctctttctctc

SEQ ID NO: 90537 - RNA, 21 nt, synthetic construct
  source 1..21: mol_type = other RNA
gcttgtcttgaatagcatctt

SEQ ID NO: 90538 - RNA, 21 nt, synthetic construct
  source 1..21: mol_type = other RNA
gcttgtgacatcaagggtggt

SEQ ID NO: 90539 - RNA, 21 nt, synthetic construct
  source 1..21: mol_type = other RNA
gcttgtgcatcagaattccat

SEQ ID NO: 90540 - RNA, 21 nt, synthetic construct
  source 1..21: mol_type = other RNA
gcttgtgcttttaatactttc

SEQ ID NO: 90541 - RNA, 21 nt, synthetic construct
  source 1..21: mol_type = other RNA
gcttgtggctacaccctggga

SEQ ID NO: 90542 - RNA, 21 nt, synthetic construct
  source 1..21: mol_type = other RNA
gctttaaaacactggcaaaaa

SEQ ID NO: 90543 - RNA, 21 nt, synthetic construct
  source 1..21: mol_type = other RNA
gctttaaactggatgaataca

SEQ ID NO: 90544 - RNA, 21 nt, synthetic construct
  source 1..21: mol_type = other RNA
gctttaacctctggtatttta

SEQ ID NO: 90545 - RNA, 21 nt, synthetic construct
  source 1..21: mol_type = other RNA
gctttaagcagaaagttacta

SEQ ID NO: 90546 - RNA, 21 nt, synthetic construct
  source 1..21: mol_type = other RNA
gctttaagcatcccatatgga

SEQ ID NO: 90547 - RNA, 21 nt, synthetic construct
  source 1..21: mol_type = other RNA
gctttaaggcgcagacacacc

SEQ ID NO: 90548 - RNA, 21 nt, synthetic construct
  source 1..21: mol_type = other RNA
gctttactactgcattttttg

SEQ ID NO: 90549 - RNA, 21 nt, synthetic construct
  source 1..21: mol_type = other RNA
gctttactgtattaggatgtg

SEQ ID NO: 90550 - RNA, 21 nt, synthetic construct
  source 1..21: mol_type = other RNA
gctttagatggtaaaacaaat

SEQ ID NO: 90551 - RNA, 21 nt, synthetic construct
  source 1..21: mol_type = other RNA
gctttagatttatcaatagca

SEQ ID NO: 90552 - RNA, 21 nt, synthetic construct
  source 1..21: mol_type = other RNA
gctttatgagacacacgagta

SEQ ID NO: 90553 - RNA, 21 nt, synthetic construct
  source 1..21: mol_type = other RNA
gctttcaatagtgggtagaag

SEQ ID NO: 90554 - RNA, 21 nt, synthetic construct
  source 1..21: mol_type = other RNA
gctttcagacttaactatagg

SEQ ID NO: 90555 - RNA, 21 nt, synthetic construct
  source 1..21: mol_type = other RNA
gctttcagcactgctattgat

SEQ ID NO: 90556 - RNA, 21 nt, synthetic construct
  source 1..21: mol_type = other RNA
gctttcagttctttcggatat

SEQ ID NO: 90557 - RNA, 21 nt, synthetic construct
  source 1..21: mol_type = other RNA
gctttcattattaccaggttt

SEQ ID NO: 90558 - RNA, 21 nt, synthetic construct
  source 1..21: mol_type = other RNA
gctttcccagggtgtagccac

SEQ ID NO: 90559 - RNA, 21 nt, synthetic construct
  source 1..21: mol_type = other RNA
gctttcctcatgtccatagtt

SEQ ID NO: 90560 - RNA, 21 nt, synthetic construct
  source 1..21: mol_type = other RNA
gctttccttagttcgaagttt

SEQ ID NO: 90561 - RNA, 21 nt, synthetic construct
  source 1..21: mol_type = other RNA
gctttccttattgagaagcag

SEQ ID NO: 90562 - RNA, 21 nt, synthetic construct
  source 1..21: mol_type = other RNA
gctttcgtatggaagatggga

SEQ ID NO: 90563 - RNA, 21 nt, synthetic construct
  source 1..21: mol_type = other RNA
gctttcgtgagggtttcagtg

SEQ ID NO: 90564 - RNA, 21 nt, synthetic construct
  source 1..21: mol_type = other RNA
gctttctaattctgacaactg

SEQ ID NO: 90565 - RNA, 21 nt, synthetic construct
  source 1..21: mol_type = other RNA
gctttctactagtataagaga

SEQ ID NO: 90566 - RNA, 21 nt, synthetic construct
  source 1..21: mol_type = other RNA
gctttctatctctcagatctg

SEQ ID NO: 90567 - RNA, 21 nt, synthetic construct
  source 1..21: mol_type = other RNA
gctttctcaacactgtgttct

SEQ ID NO: 90568 - RNA, 21 nt, synthetic construct
  source 1..21: mol_type = other RNA
gctttctccaggggcggcccc

SEQ ID NO: 90569 - RNA, 21 nt, synthetic construct
  source 1..21: mol_type = other RNA
gctttctcccagctgtccaac

SEQ ID NO: 90570 - RNA, 21 nt, synthetic construct
  source 1..21: mol_type = other RNA
gctttctctagttgcacggtg

SEQ ID NO: 90571 - RNA, 21 nt, synthetic construct
  source 1..21: mol_type = other RNA
gctttctgtgtaatactgtag

SEQ ID NO: 90572 - RNA, 21 nt, synthetic construct
  source 1..21: mol_type = other RNA
gctttcttggggctctaatgc

SEQ ID NO: 90573 - RNA, 21 nt, synthetic construct
  source 1..21: mol_type = other RNA
gctttcttttaaagacctcag

SEQ ID NO: 90574 - RNA, 21 nt, synthetic construct
  source 1..21: mol_type = other RNA
gctttcttttccaaccaagcc

SEQ ID NO: 90575 - RNA, 21 nt, synthetic construct
  source 1..21: mol_type = other RNA
gctttgaatttggaaagggta

SEQ ID NO: 90576 - RNA, 21 nt, synthetic construct
  source 1..21: mol_type = other RNA
gctttgacttctcagggcctg

SEQ ID NO: 90577 - RNA, 21 nt, synthetic construct
  source 1..21: mol_type = other RNA
gctttgagaaaggtttcttca

SEQ ID NO: 90578 - RNA, 21 nt, synthetic construct
  source 1..21: mol_type = other RNA
gctttgagctacaaactccaa

SEQ ID NO: 90579 - RNA, 21 nt, synthetic construct
  source 1..21: mol_type = other RNA
gctttgatgcccccacccttt

SEQ ID NO: 90580 - RNA, 21 nt, synthetic construct
  source 1..21: mol_type = other RNA
gctttgcgaaatagtagttgc

SEQ ID NO: 90581 - RNA, 21 nt, synthetic construct
  source 1..21: mol_type = other RNA
gctttgctgccccagctaaaa

SEQ ID NO: 90582 - RNA, 21 nt, synthetic construct
  source 1..21: mol_type = other RNA
gctttggagtcacagtgaatt

SEQ ID NO: 90583 - RNA, 21 nt, synthetic construct
  source 1..21: mol_type = other RNA
gctttggagtgagaggactgc

SEQ ID NO: 90584 - RNA, 21 nt, synthetic construct
  source 1..21: mol_type = other RNA
gctttggctagaagcatctga

SEQ ID NO: 90585 - RNA, 21 nt, synthetic construct
  source 1..21: mol_type = other RNA
gctttggctgaaatgctgtaa

SEQ ID NO: 90586 - RNA, 21 nt, synthetic construct
  source 1..21: mol_type = other RNA
gctttgggtctatagtttaat

SEQ ID NO: 90587 - RNA, 21 nt, synthetic construct
  source 1..21: mol_type = other RNA
gctttgtctctggaaggctaa

SEQ ID NO: 90588 - RNA, 21 nt, synthetic construct
  source 1..21: mol_type = other RNA
gctttgtgaagggaggtaggc

SEQ ID NO: 90589 - RNA, 21 nt, synthetic construct
  source 1..21: mol_type = other RNA
gctttgtgactgtgagggtaa

SEQ ID NO: 90590 - RNA, 21 nt, synthetic construct
  source 1..21: mol_type = other RNA
gctttgtggagtggaggggca

SEQ ID NO: 90591 - RNA, 21 nt, synthetic construct
  source 1..21: mol_type = other RNA
gctttgtgttggtgtttctga

SEQ ID NO: 90592 - RNA, 21 nt, synthetic construct
  source 1..21: mol_type = other RNA
gcttttaatactttcacactg

SEQ ID NO: 90593 - RNA, 21 nt, synthetic construct
  source 1..21: mol_type = other RNA
gcttttacgaggacagactgc

SEQ ID NO: 90594 - RNA, 21 nt, synthetic construct
  source 1..21: mol_type = other RNA
gcttttacttggctcctcccg

SEQ ID NO: 90595 - RNA, 21 nt, synthetic construct
  source 1..21: mol_type = other RNA
gcttttcatagtcatcattat

SEQ ID NO: 90596 - RNA, 21 nt, synthetic construct
  source 1..21: mol_type = other RNA
gcttttcctgctgtcgtttat

SEQ ID NO: 90597 - RNA, 21 nt, synthetic construct
  source 1..21: mol_type = other RNA
gcttttcctggaaaacttctc

SEQ ID NO: 90598 - RNA, 21 nt, synthetic construct
  source 1..21: mol_type = other RNA
gcttttctcctaagtcttctt

SEQ ID NO: 90599 - RNA, 21 nt, synthetic construct
  source 1..21: mol_type = other RNA
gcttttctcgtgcatgtctgc

SEQ ID NO: 90600 - RNA, 21 nt, synthetic construct
  source 1..21: mol_type = other RNA
gcttttgaaactgagcatccc

SEQ ID NO: 90601 - RNA, 21 nt, synthetic construct
  source 1..21: mol_type = other RNA
gcttttgaacactctgcaatt

SEQ ID NO: 90602 - RNA, 21 nt, synthetic construct
  source 1..21: mol_type = other RNA
gcttttgagtgtaaggtgttt

SEQ ID NO: 90603 - RNA, 21 nt, synthetic construct
  source 1..21: mol_type = other RNA
gcttttgctgagggaattttt

SEQ ID NO: 90604 - RNA, 21 nt, synthetic construct
  source 1..21: mol_type = other RNA
gcttttgctgcatcccaaggg

SEQ ID NO: 90605 - RNA, 21 nt, synthetic construct
  source 1..21: mol_type = other RNA
gcttttgctttgggtctatag

SEQ ID NO: 90606 - RNA, 21 nt, synthetic construct
  source 1..21: mol_type = other RNA
gcttttggaagcatgtggcca

SEQ ID NO: 90607 - RNA, 21 nt, synthetic construct
  source 1..21: mol_type = other RNA
gcttttggagctataatttat

SEQ ID NO: 90608 - RNA, 21 nt, synthetic construct
  source 1..21: mol_type = other RNA
gcttttggattttctttctaa

SEQ ID NO: 90609 - RNA, 21 nt, synthetic construct
  source 1..21: mol_type = other RNA
gcttttggcagcgtaactcca

SEQ ID NO: 90610 - RNA, 21 nt, synthetic construct
  source 1..21: mol_type = other RNA
gctttttacccggagaggtga

SEQ ID NO: 90611 - RNA, 21 nt, synthetic construct
  source 1..21: mol_type = other RNA
gctttttacgatgaaattgac

SEQ ID NO: 90612 - RNA, 21 nt, synthetic construct
  source 1..21: mol_type = other RNA
gctttttactttgcgaaacac

SEQ ID NO: 90613 - RNA, 21 nt, synthetic construct
  source 1..21: mol_type = other RNA
gctttttatatttccgatgat

SEQ ID NO: 90614 - RNA, 21 nt, synthetic construct
  source 1..21: mol_type = other RNA
gctttttatggaaacatggta

SEQ ID NO: 90615 - RNA, 21 nt, synthetic construct
  source 1..21: mol_type = other RNA
gctttttctgcatcttttgag

SEQ ID NO: 90616 - RNA, 21 nt, synthetic construct
  source 1..21: mol_type = other RNA
gctttttcttcttgttttgtt

SEQ ID NO: 90617 - RNA, 21 nt, synthetic construct
  source 1..21: mol_type = other RNA
gctttttcttggtggtaactg

SEQ ID NO: 90618 - RNA, 21 nt, synthetic construct
  source 1..21: mol_type = other RNA
gctttttctttttaaacaggt

SEQ ID NO: 90619 - RNA, 21 nt, synthetic construct
  source 1..21: mol_type = other RNA
gctttttgtatcctgtttgag

SEQ ID NO: 90620 - RNA, 21 nt, synthetic construct
  source 1..21: mol_type = other RNA
gcttttttggtgtttttctag

SEQ ID NO: 90621 - RNA, 21 nt, synthetic construct
  source 1..21: mol_type = other RNA
ggaaaaaacacctaaagatat

SEQ ID NO: 90622 - RNA, 21 nt, synthetic construct
  source 1..21: mol_type = other RNA
ggaaaaaacagttgctattca

SEQ ID NO: 90623 - RNA, 21 nt, synthetic construct
  source 1..21: mol_type = other RNA
ggaaaaaacgggttatacaca

SEQ ID NO: 90624 - RNA, 21 nt, synthetic construct
  source 1..21: mol_type = other RNA
ggaaaaacattctacagtatt

SEQ ID NO: 90625 - RNA, 21 nt, synthetic construct
  source 1..21: mol_type = other RNA
ggaaaaactgcagcaattatt

SEQ ID NO: 90626 - RNA, 21 nt, synthetic construct
  source 1..21: mol_type = other RNA
ggaaaaatcgtcctcttcggg

SEQ ID NO: 90627 - RNA, 21 nt, synthetic construct
  source 1..21: mol_type = other RNA
ggaaaaatctaaccctcaatc

SEQ ID NO: 90628 - RNA, 21 nt, synthetic construct
  source 1..21: mol_type = other RNA
ggaaaaatgtccgttgaagtc

SEQ ID NO: 90629 - RNA, 21 nt, synthetic construct
  source 1..21: mol_type = other RNA
ggaaaacaaattgcatcaact

SEQ ID NO: 90630 - RNA, 21 nt, synthetic construct
  source 1..21: mol_type = other RNA
ggaaaacaattacttgagagc

SEQ ID NO: 90631 - RNA, 21 nt, synthetic construct
  source 1..21: mol_type = other RNA
ggaaaacacccttgaaaattt

SEQ ID NO: 90632 - RNA, 21 nt, synthetic construct
  source 1..21: mol_type = other RNA
ggaaaaccagtttagaaaaat

SEQ ID NO: 90633 - RNA, 21 nt, synthetic construct
  source 1..21: mol_type = other RNA
ggaaaaccatgtcatgtatat

SEQ ID NO: 90634 - RNA, 21 nt, synthetic construct
  source 1..21: mol_type = other RNA
ggaaaactacatgtaaaaact

SEQ ID NO: 90635 - RNA, 21 nt, synthetic construct
  source 1..21: mol_type = other RNA
ggaaaactagagatgggaaag

SEQ ID NO: 90636 - RNA, 21 nt, synthetic construct
  source 1..21: mol_type = other RNA
ggaaaactaggtatttgaaaa

SEQ ID NO: 90637 - RNA, 21 nt, synthetic construct
  source 1..21: mol_type = other RNA
ggaaaactccaagtgtaaaaa

SEQ ID NO: 90638 - RNA, 21 nt, synthetic construct
  source 1..21: mol_type = other RNA
ggaaaactctgtttccttacc

SEQ ID NO: 90639 - RNA, 21 nt, synthetic construct
  source 1..21: mol_type = other RNA
ggaaaacttctctggagcaag

SEQ ID NO: 90640 - RNA, 21 nt, synthetic construct
  source 1..21: mol_type = other RNA
ggaaaagaaagctgtggatgt

SEQ ID NO: 90641 - RNA, 21 nt, synthetic construct
  source 1..21: mol_type = other RNA
ggaaaagaacacagtgttgag

SEQ ID NO: 90642 - RNA, 21 nt, synthetic construct
  source 1..21: mol_type = other RNA
ggaaaagacttctcaaacagg

SEQ ID NO: 90643 - RNA, 21 nt, synthetic construct
  source 1..21: mol_type = other RNA
ggaaaagacttgaggtttact

SEQ ID NO: 90644 - RNA, 21 nt, synthetic construct
  source 1..21: mol_type = other RNA
ggaaaagagaacattggtttg

SEQ ID NO: 90645 - RNA, 21 nt, synthetic construct
  source 1..21: mol_type = other RNA
ggaaaagagatctagtgaagt

SEQ ID NO: 90646 - RNA, 21 nt, synthetic construct
  source 1..21: mol_type = other RNA
ggaaaagcaaatgtcatcttc

SEQ ID NO: 90647 - RNA, 21 nt, synthetic construct
  source 1..21: mol_type = other RNA
ggaaaagctaccctcgagtaa

SEQ ID NO: 90648 - RNA, 21 nt, synthetic construct
  source 1..21: mol_type = other RNA
ggaaaaggacattagtggaaa

SEQ ID NO: 90649 - RNA, 21 nt, synthetic construct
  source 1..21: mol_type = other RNA
ggaaaaggatttgtttgtgaa

SEQ ID NO: 90650 - RNA, 21 nt, synthetic construct
  source 1..21: mol_type = other RNA
ggaaaagtcagtaaaaaagga

SEQ ID NO: 90651 - RNA, 21 nt, synthetic construct
  source 1..21: mol_type = other RNA
ggaaaagtgttgactaccatc

SEQ ID NO: 90652 - RNA, 21 nt, synthetic construct
  source 1..21: mol_type = other RNA
ggaaaataatttgcaacagaa

SEQ ID NO: 90653 - RNA, 21 nt, synthetic construct
  source 1..21: mol_type = other RNA
ggaaaatacatgaggcctctc

SEQ ID NO: 90654 - RNA, 21 nt, synthetic construct
  source 1..21: mol_type = other RNA
ggaaaatagagttccatctgt

SEQ ID NO: 90655 - RNA, 21 nt, synthetic construct
  source 1..21: mol_type = other RNA
ggaaaatctctgacttcattc

SEQ ID NO: 90656 - RNA, 21 nt, synthetic construct
  source 1..21: mol_type = other RNA
ggaaaatcttggaacttttat

SEQ ID NO: 90657 - RNA, 21 nt, synthetic construct
  source 1..21: mol_type = other RNA
ggaaaatgcttaacaagaatc

SEQ ID NO: 90658 - RNA, 21 nt, synthetic construct
  source 1..21: mol_type = other RNA
ggaaaatgtaaaacatcaaag

SEQ ID NO: 90659 - RNA, 21 nt, synthetic construct
  source 1..21: mol_type = other RNA
ggaaaatgtatgattttctag

SEQ ID NO: 90660 - RNA, 21 nt, synthetic construct
  source 1..21: mol_type = other RNA
ggaaaattcaaacatgacaga

SEQ ID NO: 90661 - RNA, 21 nt, synthetic construct
  source 1..21: mol_type = other RNA
ggaaaattcttggtcttttga

SEQ ID NO: 90662 - RNA, 21 nt, synthetic construct
  source 1..21: mol_type = other RNA
ggaaacaacctaaatgtccat

SEQ ID NO: 90663 - RNA, 21 nt, synthetic construct
  source 1..21: mol_type = other RNA
ggaaacaactcaaacgtccat

SEQ ID NO: 90664 - RNA, 21 nt, synthetic construct
  source 1..21: mol_type = other RNA
ggaaacactataaatcagtaa

SEQ ID NO: 90665 - RNA, 21 nt, synthetic construct
  source 1..21: mol_type = other RNA
ggaaacactcataccaggttt

SEQ ID NO: 90666 - RNA, 21 nt, synthetic construct
  source 1..21: mol_type = other RNA
ggaaacactgctcagaagctt

SEQ ID NO: 90667 - RNA, 21 nt, synthetic construct
  source 1..21: mol_type = other RNA
ggaaacagagttttccaataa

SEQ ID NO: 90668 - RNA, 21 nt, synthetic construct
  source 1..21: mol_type = other RNA
ggaaacagattgatttatatg

SEQ ID NO: 90669 - RNA, 21 nt, synthetic construct
  source 1..21: mol_type = other RNA
ggaaacagggttacagtatag

SEQ ID NO: 90670 - RNA, 21 nt, synthetic construct
  source 1..21: mol_type = other RNA
ggaaacatggtaatttgtcca

SEQ ID NO: 90671 - RNA, 21 nt, synthetic construct
  source 1..21: mol_type = other RNA
ggaaaccccagggatattttc

SEQ ID NO: 90672 - RNA, 21 nt, synthetic construct
  source 1..21: mol_type = other RNA
ggaaacccgctctgggtgcgt

SEQ ID NO: 90673 - RNA, 21 nt, synthetic construct
  source 1..21: mol_type = other RNA
ggaaaccttactgtaatattg

SEQ ID NO: 90674 - RNA, 21 nt, synthetic construct
  source 1..21: mol_type = other RNA
ggaaaccttttgtagaccctg

SEQ ID NO: 90675 - RNA, 21 nt, synthetic construct
  source 1..21: mol_type = other RNA
ggaaactacaattactgtaca

SEQ ID NO: 90676 - RNA, 21 nt, synthetic construct
  source 1..21: mol_type = other RNA
ggaaactcaaacccaaattaa

SEQ ID NO: 90677 - RNA, 21 nt, synthetic construct
  source 1..21: mol_type = other RNA
ggaaactgtttttgcaattta

SEQ ID NO: 90678 - RNA, 21 nt, synthetic construct
  source 1..21: mol_type = other RNA
ggaaacttccagaaacttcca

SEQ ID NO: 90679 - RNA, 21 nt, synthetic construct
  source 1..21: mol_type = other RNA
ggaaacttgccatcttgcata

SEQ ID NO: 90680 - RNA, 21 nt, synthetic construct
  source 1..21: mol_type = other RNA
ggaaactttatacctgttgaa

SEQ ID NO: 90681 - RNA, 21 nt, synthetic construct
  source 1..21: mol_type = other RNA
ggaaactttgcattcctgaaa

SEQ ID NO: 90682 - RNA, 21 nt, synthetic construct
  source 1..21: mol_type = other RNA
ggaaagaaatagaactgtcac

SEQ ID NO: 90683 - RNA, 21 nt, synthetic construct
  source 1..21: mol_type = other RNA
ggaaagacaggtagacatgag

SEQ ID NO: 90684 - RNA, 21 nt, synthetic construct
  source 1..21: mol_type = other RNA
ggaaagaccggggactgcaac

SEQ ID NO: 90685 - RNA, 21 nt, synthetic construct
  source 1..21: mol_type = other RNA
ggaaagagccagcctgatgat

SEQ ID NO: 90686 - RNA, 21 nt, synthetic construct
  source 1..21: mol_type = other RNA
ggaaagatgaagtatagaaag

SEQ ID NO: 90687 - RNA, 21 nt, synthetic construct
  source 1..21: mol_type = other RNA
ggaaagatgtcttttaacttg

SEQ ID NO: 90688 - RNA, 21 nt, synthetic construct
  source 1..21: mol_type = other RNA
ggaaagcacgtttgatctggt

SEQ ID NO: 90689 - RNA, 21 nt, synthetic construct
  source 1..21: mol_type = other RNA
ggaaagcaggttgcattaatg

SEQ ID NO: 90690 - RNA, 21 nt, synthetic construct
  source 1..21: mol_type = other RNA
ggaaagcctggctttagatgg

SEQ ID NO: 90691 - RNA, 21 nt, synthetic construct
  source 1..21: mol_type = other RNA
ggaaagcctgtgacagtatgt

SEQ ID NO: 90692 - RNA, 21 nt, synthetic construct
  source 1..21: mol_type = other RNA
ggaaagctcaggaccagatga

SEQ ID NO: 90693 - RNA, 21 nt, synthetic construct
  source 1..21: mol_type = other RNA
ggaaaggacttgatctaaaat

SEQ ID NO: 90694 - RNA, 21 nt, synthetic construct
  source 1..21: mol_type = other RNA
ggaaaggagatactggccatg

SEQ ID NO: 90695 - RNA, 21 nt, synthetic construct
  source 1..21: mol_type = other RNA
ggaaaggatgaccttgacaat

SEQ ID NO: 90696 - RNA, 21 nt, synthetic construct
  source 1..21: mol_type = other RNA
ggaaaggatggtttgattgtt

SEQ ID NO: 90697 - RNA, 21 nt, synthetic construct
  source 1..21: mol_type = other RNA
ggaaagggtagagcactttcg

SEQ ID NO: 90698 - RNA, 21 nt, synthetic construct
  source 1..21: mol_type = other RNA
ggaaagtaactgttggcaagg

SEQ ID NO: 90699 - RNA, 21 nt, synthetic construct
  source 1..21: mol_type = other RNA
ggaaagtattcccaagatcat

SEQ ID NO: 90700 - RNA, 21 nt, synthetic construct
  source 1..21: mol_type = other RNA
ggaaagtgacagatgagaaat

SEQ ID NO: 90701 - RNA, 21 nt, synthetic construct
  source 1..21: mol_type = other RNA
ggaaagtgccagccacccttg

SEQ ID NO: 90702 - RNA, 21 nt, synthetic construct
  source 1..21: mol_type = other RNA
ggaaagtggactatgtaggca

SEQ ID NO: 90703 - RNA, 21 nt, synthetic construct
  source 1..21: mol_type = other RNA
ggaaagtgtgcttgggctccc

SEQ ID NO: 90704 - RNA, 21 nt, synthetic construct
  source 1..21: mol_type = other RNA
ggaaagttcaaatgaggcttt

SEQ ID NO: 90705 - RNA, 21 nt, synthetic construct
  source 1..21: mol_type = other RNA
ggaaataagaaggtttgtaga

SEQ ID NO: 90706 - RNA, 21 nt, synthetic construct
  source 1..21: mol_type = other RNA
ggaaataagtttcatggactt

SEQ ID NO: 90707 - RNA, 21 nt, synthetic construct
  source 1..21: mol_type = other RNA
ggaaataatttccctcagaat

SEQ ID NO: 90708 - RNA, 21 nt, synthetic construct
  source 1..21: mol_type = other RNA
ggaaatacaaaaagtgatacc

SEQ ID NO: 90709 - RNA, 21 nt, synthetic construct
  source 1..21: mol_type = other RNA
ggaaatacttgaacattctgt

SEQ ID NO: 90710 - RNA, 21 nt, synthetic construct
  source 1..21: mol_type = other RNA
ggaaatacttgatctacattt

SEQ ID NO: 90711 - RNA, 21 nt, synthetic construct
  source 1..21: mol_type = other RNA
ggaaatagatgcctagaaagg

SEQ ID NO: 90712 - RNA, 21 nt, synthetic construct
  source 1..21: mol_type = other RNA
ggaaatataaaaagcctctgt

SEQ ID NO: 90713 - RNA, 21 nt, synthetic construct
  source 1..21: mol_type = other RNA
ggaaatatgaaccacactgac

SEQ ID NO: 90714 - RNA, 21 nt, synthetic construct
  source 1..21: mol_type = other RNA
ggaaatatggtcactgctgat

SEQ ID NO: 90715 - RNA, 21 nt, synthetic construct
  source 1..21: mol_type = other RNA
ggaaatcacaggtttaggttt

SEQ ID NO: 90716 - RNA, 21 nt, synthetic construct
  source 1..21: mol_type = other RNA
ggaaatcattcaggacactgg

SEQ ID NO: 90717 - RNA, 21 nt, synthetic construct
  source 1..21: mol_type = other RNA
ggaaatgaagtattgatttga

SEQ ID NO: 90718 - RNA, 21 nt, synthetic construct
  source 1..21: mol_type = other RNA
ggaaatgagtgagccacagct

SEQ ID NO: 90719 - RNA, 21 nt, synthetic construct
  source 1..21: mol_type = other RNA
ggaaatgagtgtatgcaggga

SEQ ID NO: 90720 - RNA, 21 nt, synthetic construct
  source 1..21: mol_type = other RNA
ggaaatgatacctcatttata

SEQ ID NO: 90721 - RNA, 21 nt, synthetic construct
  source 1..21: mol_type = other RNA
ggaaatggacagcacattaaa

SEQ ID NO: 90722 - RNA, 21 nt, synthetic construct
  source 1..21: mol_type = other RNA
ggaaatggacagcggggatgg

SEQ ID NO: 90723 - RNA, 21 nt, synthetic construct
  source 1..21: mol_type = other RNA
ggaaatggagggccagaggag

SEQ ID NO: 90724 - RNA, 21 nt, synthetic construct
  source 1..21: mol_type = other RNA
ggaaatgtaaattcctaactc

SEQ ID NO: 90725 - RNA, 21 nt, synthetic construct
  source 1..21: mol_type = other RNA
ggaaattaaacacacccttgg

SEQ ID NO: 90726 - RNA, 21 nt, synthetic construct
  source 1..21: mol_type = other RNA
ggaaattagaaatgtggaagc

SEQ ID NO: 90727 - RNA, 21 nt, synthetic construct
  source 1..21: mol_type = other RNA
ggaaattagatgatgttttga

SEQ ID NO: 90728 - RNA, 21 nt, synthetic construct
  source 1..21: mol_type = other RNA
ggaaattatttccagccttta

SEQ ID NO: 90729 - RNA, 21 nt, synthetic construct
  source 1..21: mol_type = other RNA
ggaaattttcaagggtgtttt

SEQ ID NO: 90730 - RNA, 21 nt, synthetic construct
  source 1..21: mol_type = other RNA
ggaacaatcaaaccatccttt

SEQ ID NO: 90731 - RNA, 21 nt, synthetic construct
  source 1..21: mol_type = other RNA
ggaacacacacctattcatag

SEQ ID NO: 90732 - RNA, 21 nt, synthetic construct
  source 1..21: mol_type = other RNA
ggaacacacattagcctagac

SEQ ID NO: 90733 - RNA, 21 nt, synthetic construct
  source 1..21: mol_type = other RNA
ggaacaccttgaacatgaacg

SEQ ID NO: 90734 - RNA, 21 nt, synthetic construct
  source 1..21: mol_type = other RNA
ggaacactaagaagatggttg

SEQ ID NO: 90735 - RNA, 21 nt, synthetic construct
  source 1..21: mol_type = other RNA
ggaacagattcacgcacaggg

SEQ ID NO: 90736 - RNA, 21 nt, synthetic construct
  source 1..21: mol_type = other RNA
ggaacagcaggggaaggcttc

SEQ ID NO: 90737 - RNA, 21 nt, synthetic construct
  source 1..21: mol_type = other RNA
ggaacagcccctagcatgcag

SEQ ID NO: 90738 - RNA, 21 nt, synthetic construct
  source 1..21: mol_type = other RNA
ggaacaggccctttgttagtg

SEQ ID NO: 90739 - RNA, 21 nt, synthetic construct
  source 1..21: mol_type = other RNA
ggaacaggctcaatacctgaa

SEQ ID NO: 90740 - RNA, 21 nt, synthetic construct
  source 1..21: mol_type = other RNA
ggaacagtttagcaatccaag

SEQ ID NO: 90741 - RNA, 21 nt, synthetic construct
  source 1..21: mol_type = other RNA
ggaacataatctttggtgctg

SEQ ID NO: 90742 - RNA, 21 nt, synthetic construct
  source 1..21: mol_type = other RNA
ggaacatgacatgtatttttt

SEQ ID NO: 90743 - RNA, 21 nt, synthetic construct
  source 1..21: mol_type = other RNA
ggaacattttcattttaactg

SEQ ID NO: 90744 - RNA, 21 nt, synthetic construct
  source 1..21: mol_type = other RNA
ggaaccactgtaggccccgat

SEQ ID NO: 90745 - RNA, 21 nt, synthetic construct
  source 1..21: mol_type = other RNA
ggaaccatattagagtgaaaa

SEQ ID NO: 90746 - RNA, 21 nt, synthetic construct
  source 1..21: mol_type = other RNA
ggaaccgtaacttcttttctt

SEQ ID NO: 90747 - RNA, 21 nt, synthetic construct
  source 1..21: mol_type = other RNA
ggaacctttgtccactgtcag

SEQ ID NO: 90748 - RNA, 21 nt, synthetic construct
  source 1..21: mol_type = other RNA
ggaacggcttaacacctttgt

SEQ ID NO: 90749 - RNA, 21 nt, synthetic construct
  source 1..21: mol_type = other RNA
ggaactaattgataaaactga

SEQ ID NO: 90750 - RNA, 21 nt, synthetic construct
  source 1..21: mol_type = other RNA
ggaactaatttcatacaagtt

SEQ ID NO: 90751 - RNA, 21 nt, synthetic construct
  source 1..21: mol_type = other RNA
ggaactcatattagtctgtag

SEQ ID NO: 90752 - RNA, 21 nt, synthetic construct
  source 1..21: mol_type = other RNA
ggaactcatttctgcttgaat

SEQ ID NO: 90753 - RNA, 21 nt, synthetic construct
  source 1..21: mol_type = other RNA
ggaactcctgtatgccgctgg

SEQ ID NO: 90754 - RNA, 21 nt, synthetic construct
  source 1..21: mol_type = other RNA
ggaactctattttcctaaaac

SEQ ID NO: 90755 - RNA, 21 nt, synthetic construct
  source 1..21: mol_type = other RNA
ggaactctgtcatggtgtgtc

SEQ ID NO: 90756 - RNA, 21 nt, synthetic construct
  source 1..21: mol_type = other RNA
ggaactcttgcggtcttttag

SEQ ID NO: 90757 - RNA, 21 nt, synthetic construct
  source 1..21: mol_type = other RNA
ggaactcttgtagtatttttg

SEQ ID NO: 90758 - RNA, 21 nt, synthetic construct
  source 1..21: mol_type = other RNA
ggaacttacagtaagatcctg

SEQ ID NO: 90759 - RNA, 21 nt, synthetic construct
  source 1..21: mol_type = other RNA
ggaacttgagtttgttctgtc

SEQ ID NO: 90760 - RNA, 21 nt, synthetic construct
  source 1..21: mol_type = other RNA
ggaagaaaaaataaaggcttt

SEQ ID NO: 90761 - RNA, 21 nt, synthetic construct
  source 1..21: mol_type = other RNA
ggaagaatcaggtctctttga

SEQ ID NO: 90762 - RNA, 21 nt, synthetic construct
  source 1..21: mol_type = other RNA
ggaagaattaacactaatcct

SEQ ID NO: 90763 - RNA, 21 nt, synthetic construct
  source 1..21: mol_type = other RNA
ggaagaattattgtctgcaag

SEQ ID NO: 90764 - RNA, 21 nt, synthetic construct
  source 1..21: mol_type = other RNA
ggaagaattttaagcctagag

SEQ ID NO: 90765 - RNA, 21 nt, synthetic construct
  source 1..21: mol_type = other RNA
ggaagactatcacgattctga

SEQ ID NO: 90766 - RNA, 21 nt, synthetic construct
  source 1..21: mol_type = other RNA
ggaagactatgagaaggatta

SEQ ID NO: 90767 - RNA, 21 nt, synthetic construct
  source 1..21: mol_type = other RNA
ggaagactttatggtaattgg

SEQ ID NO: 90768 - RNA, 21 nt, synthetic construct
  source 1..21: mol_type = other RNA
ggaagagactatctcttcctc

SEQ ID NO: 90769 - RNA, 21 nt, synthetic construct
  source 1..21: mol_type = other RNA
ggaagagagaaggctgccagc

SEQ ID NO: 90770 - RNA, 21 nt, synthetic construct
  source 1..21: mol_type = other RNA
ggaagagagcattgcctttat

SEQ ID NO: 90771 - RNA, 21 nt, synthetic construct
  source 1..21: mol_type = other RNA
ggaagagatagtctcttcctg

SEQ ID NO: 90772 - RNA, 21 nt, synthetic construct
  source 1..21: mol_type = other RNA
ggaagagctaagatgctattc

SEQ ID NO: 90773 - RNA, 21 nt, synthetic construct
  source 1..21: mol_type = other RNA
ggaagaggaaggttcaagttt

SEQ ID NO: 90774 - RNA, 21 nt, synthetic construct
  source 1..21: mol_type = other RNA
ggaagaggcagctaagcacca

SEQ ID NO: 90775 - RNA, 21 nt, synthetic construct
  source 1..21: mol_type = other RNA
ggaagaggccacaaagtcccc

SEQ ID NO: 90776 - RNA, 21 nt, synthetic construct
  source 1..21: mol_type = other RNA
ggaagagtttatattctaagt

SEQ ID NO: 90777 - RNA, 21 nt, synthetic construct
  source 1..21: mol_type = other RNA
ggaagatagtactgaccatct

SEQ ID NO: 90778 - RNA, 21 nt, synthetic construct
  source 1..21: mol_type = other RNA
ggaagatgctccctctatggc

SEQ ID NO: 90779 - RNA, 21 nt, synthetic construct
  source 1..21: mol_type = other RNA
ggaagatgggacttcactagt

SEQ ID NO: 90780 - RNA, 21 nt, synthetic construct
  source 1..21: mol_type = other RNA
ggaagattggctttagattta

SEQ ID NO: 90781 - RNA, 21 nt, synthetic construct
  source 1..21: mol_type = other RNA
ggaagatttctactggggtct

SEQ ID NO: 90782 - RNA, 21 nt, synthetic construct
  source 1..21: mol_type = other RNA
ggaagcaaaggattcggggga

SEQ ID NO: 90783 - RNA, 21 nt, synthetic construct
  source 1..21: mol_type = other RNA
ggaagcacagtctctgcagag

SEQ ID NO: 90784 - RNA, 21 nt, synthetic construct
  source 1..21: mol_type = other RNA
ggaagcacattccttccgacc

SEQ ID NO: 90785 - RNA, 21 nt, synthetic construct
  source 1..21: mol_type = other RNA
ggaagcaccaacccttgttgg

SEQ ID NO: 90786 - RNA, 21 nt, synthetic construct
  source 1..21: mol_type = other RNA
ggaagcagaactaagacccca

SEQ ID NO: 90787 - RNA, 21 nt, synthetic construct
  source 1..21: mol_type = other RNA
ggaagcagaatgtccatcagg

SEQ ID NO: 90788 - RNA, 21 nt, synthetic construct
  source 1..21: mol_type = other RNA
ggaagcaggaactcatattag

SEQ ID NO: 90789 - RNA, 21 nt, synthetic construct
  source 1..21: mol_type = other RNA
ggaagcagttgatgcaatttg

SEQ ID NO: 90790 - RNA, 21 nt, synthetic construct
  source 1..21: mol_type = other RNA
ggaagcatgtggccaggagga

SEQ ID NO: 90791 - RNA, 21 nt, synthetic construct
  source 1..21: mol_type = other RNA
ggaagccactgcattcatcca

SEQ ID NO: 90792 - RNA, 21 nt, synthetic construct
  source 1..21: mol_type = other RNA
ggaagctaatcaagccgcaaa

SEQ ID NO: 90793 - RNA, 21 nt, synthetic construct
  source 1..21: mol_type = other RNA
ggaagctatggagcactgtga

SEQ ID NO: 90794 - RNA, 21 nt, synthetic construct
  source 1..21: mol_type = other RNA
ggaagctgatcaaggaagctt

SEQ ID NO: 90795 - RNA, 21 nt, synthetic construct
  source 1..21: mol_type = other RNA
ggaagctgggctagagccagg

SEQ ID NO: 90796 - RNA, 21 nt, synthetic construct
  source 1..21: mol_type = other RNA
ggaagctgtccttctcgtgtg

SEQ ID NO: 90797 - RNA, 21 nt, synthetic construct
  source 1..21: mol_type = other RNA
ggaagcttataatttctgaga

SEQ ID NO: 90798 - RNA, 21 nt, synthetic construct
  source 1..21: mol_type = other RNA
ggaagcttcctaaagagagtg

SEQ ID NO: 90799 - RNA, 21 nt, synthetic construct
  source 1..21: mol_type = other RNA
ggaagcttccttgatcagctt

SEQ ID NO: 90800 - RNA, 21 nt, synthetic construct
  source 1..21: mol_type = other RNA
ggaagcttttcatatacagat

SEQ ID NO: 90801 - RNA, 21 nt, synthetic construct
  source 1..21: mol_type = other RNA
ggaaggaaacactataaatca

SEQ ID NO: 90802 - RNA, 21 nt, synthetic construct
  source 1..21: mol_type = other RNA
ggaaggaaaggagatactggc

SEQ ID NO: 90803 - RNA, 21 nt, synthetic construct
  source 1..21: mol_type = other RNA
ggaaggaaataagaaggtttg

SEQ ID NO: 90804 - RNA, 21 nt, synthetic construct
  source 1..21: mol_type = other RNA
ggaaggaacacacacctattc

SEQ ID NO: 90805 - RNA, 21 nt, synthetic construct
  source 1..21: mol_type = other RNA
ggaaggaatgtgcttcctaaa

SEQ ID NO: 90806 - RNA, 21 nt, synthetic construct
  source 1..21: mol_type = other RNA
ggaaggaattttaggacaagg

SEQ ID NO: 90807 - RNA, 21 nt, synthetic construct
  source 1..21: mol_type = other RNA
ggaaggaattttcaggactca

SEQ ID NO: 90808 - RNA, 21 nt, synthetic construct
  source 1..21: mol_type = other RNA
ggaaggactcacagcttacca

SEQ ID NO: 90809 - RNA, 21 nt, synthetic construct
  source 1..21: mol_type = other RNA
ggaaggagaatcgcttaaacc

SEQ ID NO: 90810 - RNA, 21 nt, synthetic construct
  source 1..21: mol_type = other RNA
ggaaggagtctgcccatccta

SEQ ID NO: 90811 - RNA, 21 nt, synthetic construct
  source 1..21: mol_type = other RNA
ggaaggatggccagtcatgtg

SEQ ID NO: 90812 - RNA, 21 nt, synthetic construct
  source 1..21: mol_type = other RNA
ggaaggattgcctaacaccag

SEQ ID NO: 90813 - RNA, 21 nt, synthetic construct
  source 1..21: mol_type = other RNA
ggaaggattggaatgagtcca

SEQ ID NO: 90814 - RNA, 21 nt, synthetic construct
  source 1..21: mol_type = other RNA
ggaaggcaggaggcctcagaa

SEQ ID NO: 90815 - RNA, 21 nt, synthetic construct
  source 1..21: mol_type = other RNA
ggaaggcagggtaggaaggcg

SEQ ID NO: 90816 - RNA, 21 nt, synthetic construct
  source 1..21: mol_type = other RNA
ggaaggccctgattgagatta

SEQ ID NO: 90817 - RNA, 21 nt, synthetic construct
  source 1..21: mol_type = other RNA
ggaaggcctgatagctgtgga

SEQ ID NO: 90818 - RNA, 21 nt, synthetic construct
  source 1..21: mol_type = other RNA
ggaaggccttctcctccaacc

SEQ ID NO: 90819 - RNA, 21 nt, synthetic construct
  source 1..21: mol_type = other RNA
ggaaggcggaagttgcagtga

SEQ ID NO: 90820 - RNA, 21 nt, synthetic construct
  source 1..21: mol_type = other RNA
ggaaggcggtggggacagctc

SEQ ID NO: 90821 - RNA, 21 nt, synthetic construct
  source 1..21: mol_type = other RNA
ggaaggctaagcatgtaactt

SEQ ID NO: 90822 - RNA, 21 nt, synthetic construct
  source 1..21: mol_type = other RNA
ggaaggctgcaagcactggta

SEQ ID NO: 90823 - RNA, 21 nt, synthetic construct
  source 1..21: mol_type = other RNA
ggaaggcttcgagttctggga

SEQ ID NO: 90824 - RNA, 21 nt, synthetic construct
  source 1..21: mol_type = other RNA
ggaagggagagatgcctatga

SEQ ID NO: 90825 - RNA, 21 nt, synthetic construct
  source 1..21: mol_type = other RNA
ggaagggagcccaagcacact

SEQ ID NO: 90826 - RNA, 21 nt, synthetic construct
  source 1..21: mol_type = other RNA
ggaagggcttgatctagtaaa

SEQ ID NO: 90827 - RNA, 21 nt, synthetic construct
  source 1..21: mol_type = other RNA
ggaaggtaggagggtgtgatc

SEQ ID NO: 90828 - RNA, 21 nt, synthetic construct
  source 1..21: mol_type = other RNA
ggaaggtcaaatggtaacagc

SEQ ID NO: 90829 - RNA, 21 nt, synthetic construct
  source 1..21: mol_type = other RNA
ggaaggtgcccgcgaaggcgt

SEQ ID NO: 90830 - RNA, 21 nt, synthetic construct
  source 1..21: mol_type = other RNA
ggaaggttcaagtttggctcc

SEQ ID NO: 90831 - RNA, 21 nt, synthetic construct
  source 1..21: mol_type = other RNA
ggaagtaaagatcaagctcgc

SEQ ID NO: 90832 - RNA, 21 nt, synthetic construct
  source 1..21: mol_type = other RNA
ggaagtaaggattttctattc

SEQ ID NO: 90833 - RNA, 21 nt, synthetic construct
  source 1..21: mol_type = other RNA
ggaagtaattgggatctgata

SEQ ID NO: 90834 - RNA, 21 nt, synthetic construct
  source 1..21: mol_type = other RNA
ggaagtactgagtcaaaacca

SEQ ID NO: 90835 - RNA, 21 nt, synthetic construct
  source 1..21: mol_type = other RNA
ggaagtatgagtcttccgtct

SEQ ID NO: 90836 - RNA, 21 nt, synthetic construct
  source 1..21: mol_type = other RNA
ggaagtcagcaactcttggcc

SEQ ID NO: 90837 - RNA, 21 nt, synthetic construct
  source 1..21: mol_type = other RNA
ggaagtccatgaaacttattt

SEQ ID NO: 90838 - RNA, 21 nt, synthetic construct
  source 1..21: mol_type = other RNA
ggaagtgaagtcaagatgaat

SEQ ID NO: 90839 - RNA, 21 nt, synthetic construct
  source 1..21: mol_type = other RNA
ggaagtgaccctgagtccaga

SEQ ID NO: 90840 - RNA, 21 nt, synthetic construct
  source 1..21: mol_type = other RNA
ggaagtgctgggctagggaag

SEQ ID NO: 90841 - RNA, 21 nt, synthetic construct
  source 1..21: mol_type = other RNA
ggaagtggagtgcgagtgtga

SEQ ID NO: 90842 - RNA, 21 nt, synthetic construct
  source 1..21: mol_type = other RNA
ggaagtggctagacggaaaaa

SEQ ID NO: 90843 - RNA, 21 nt, synthetic construct
  source 1..21: mol_type = other RNA
ggaagtgtaacatacacatca

SEQ ID NO: 90844 - RNA, 21 nt, synthetic construct
  source 1..21: mol_type = other RNA
ggaagttatgtagctgggatg

SEQ ID NO: 90845 - RNA, 21 nt, synthetic construct
  source 1..21: mol_type = other RNA
ggaagttatttaatctctctt

SEQ ID NO: 90846 - RNA, 21 nt, synthetic construct
  source 1..21: mol_type = other RNA
ggaagttcaaggttataatca

SEQ ID NO: 90847 - RNA, 21 nt, synthetic construct
  source 1..21: mol_type = other RNA
ggaagttgagaaagagggaag

SEQ ID NO: 90848 - RNA, 21 nt, synthetic construct
  source 1..21: mol_type = other RNA
ggaagttgcagtgagcccaga

SEQ ID NO: 90849 - RNA, 21 nt, synthetic construct
  source 1..21: mol_type = other RNA
ggaagttggcccaacatgctc

SEQ ID NO: 90850 - RNA, 21 nt, synthetic construct
  source 1..21: mol_type = other RNA
ggaagtttcctgcacatgcac

SEQ ID NO: 90851 - RNA, 21 nt, synthetic construct
  source 1..21: mol_type = other RNA
ggaagtttctggaagtttcct

SEQ ID NO: 90852 - RNA, 21 nt, synthetic construct
  source 1..21: mol_type = other RNA
ggaataaatggtagcttgggc

SEQ ID NO: 90853 - RNA, 21 nt, synthetic construct
  source 1..21: mol_type = other RNA
ggaataagattttaggtcatt

SEQ ID NO: 90854 - RNA, 21 nt, synthetic construct
  source 1..21: mol_type = other RNA
ggaataatggaactaagaaaa

SEQ ID NO: 90855 - RNA, 21 nt, synthetic construct
  source 1..21: mol_type = other RNA
ggaatactttcccatctctag

SEQ ID NO: 90856 - RNA, 21 nt, synthetic construct
  source 1..21: mol_type = other RNA
ggaatagaaagttagtgtcta

SEQ ID NO: 90857 - RNA, 21 nt, synthetic construct
  source 1..21: mol_type = other RNA
ggaatagaagagcagtgtgtt

SEQ ID NO: 90858 - RNA, 21 nt, synthetic construct
  source 1..21: mol_type = other RNA
ggaatagaagggagaacccag

SEQ ID NO: 90859 - RNA, 21 nt, synthetic construct
  source 1..21: mol_type = other RNA
ggaatagacaaagacaagttc

SEQ ID NO: 90860 - RNA, 21 nt, synthetic construct
  source 1..21: mol_type = other RNA
ggaatagtagcttcaatgagg

SEQ ID NO: 90861 - RNA, 21 nt, synthetic construct
  source 1..21: mol_type = other RNA
ggaatagtattcaggacagat

SEQ ID NO: 90862 - RNA, 21 nt, synthetic construct
  source 1..21: mol_type = other RNA
ggaatataaacgtgtgtgtaa

SEQ ID NO: 90863 - RNA, 21 nt, synthetic construct
  source 1..21: mol_type = other RNA
ggaatattactcagtctcgaa

SEQ ID NO: 90864 - RNA, 21 nt, synthetic construct
  source 1..21: mol_type = other RNA
ggaatattgttcagccttaaa

SEQ ID NO: 90865 - RNA, 21 nt, synthetic construct
  source 1..21: mol_type = other RNA
ggaatcaatccagacagctaa

SEQ ID NO: 90866 - RNA, 21 nt, synthetic construct
  source 1..21: mol_type = other RNA
ggaatcattccgtatatattt

SEQ ID NO: 90867 - RNA, 21 nt, synthetic construct
  source 1..21: mol_type = other RNA
ggaatccggctttatgagaca

SEQ ID NO: 90868 - RNA, 21 nt, synthetic construct
  source 1..21: mol_type = other RNA
ggaatccttcagtcagttctc

SEQ ID NO: 90869 - RNA, 21 nt, synthetic construct
  source 1..21: mol_type = other RNA
ggaatctactcttttgttttt

SEQ ID NO: 90870 - RNA, 21 nt, synthetic construct
  source 1..21: mol_type = other RNA
ggaatctaggaaacactgctc

SEQ ID NO: 90871 - RNA, 21 nt, synthetic construct
  source 1..21: mol_type = other RNA
ggaatctgacctaagcttggg

SEQ ID NO: 90872 - RNA, 21 nt, synthetic construct
  source 1..21: mol_type = other RNA
ggaatcttaccctgttgacca

SEQ ID NO: 90873 - RNA, 21 nt, synthetic construct
  source 1..21: mol_type = other RNA
ggaatgaagcaggccttcgag

SEQ ID NO: 90874 - RNA, 21 nt, synthetic construct
  source 1..21: mol_type = other RNA
ggaatgactatagaaatttgt

SEQ ID NO: 90875 - RNA, 21 nt, synthetic construct
  source 1..21: mol_type = other RNA
ggaatgagtccagctttctaa

SEQ ID NO: 90876 - RNA, 21 nt, synthetic construct
  source 1..21: mol_type = other RNA
ggaatgattccacttatatga

SEQ ID NO: 90877 - RNA, 21 nt, synthetic construct
  source 1..21: mol_type = other RNA
ggaatgcaaagtttcctacat

SEQ ID NO: 90878 - RNA, 21 nt, synthetic construct
  source 1..21: mol_type = other RNA
ggaatgcatatatctgtctgg

SEQ ID NO: 90879 - RNA, 21 nt, synthetic construct
  source 1..21: mol_type = other RNA
ggaatgcatcgtttcaatatt

SEQ ID NO: 90880 - RNA, 21 nt, synthetic construct
  source 1..21: mol_type = other RNA
ggaatgcccatcctctatttt

SEQ ID NO: 90881 - RNA, 21 nt, synthetic construct
  source 1..21: mol_type = other RNA
ggaatgcccctgtagcagaca

SEQ ID NO: 90882 - RNA, 21 nt, synthetic construct
  source 1..21: mol_type = other RNA
ggaatgcccctttgagcagag

SEQ ID NO: 90883 - RNA, 21 nt, synthetic construct
  source 1..21: mol_type = other RNA
ggaatgcctataaaatgctgg

SEQ ID NO: 90884 - RNA, 21 nt, synthetic construct
  source 1..21: mol_type = other RNA
ggaatgctcataattaaagag

SEQ ID NO: 90885 - RNA, 21 nt, synthetic construct
  source 1..21: mol_type = other RNA
ggaatggaattctgatgcaca

SEQ ID NO: 90886 - RNA, 21 nt, synthetic construct
  source 1..21: mol_type = other RNA
ggaatggggagctagagggta

SEQ ID NO: 90887 - RNA, 21 nt, synthetic construct
  source 1..21: mol_type = other RNA
ggaatgggttggaggagaagg

SEQ ID NO: 90888 - RNA, 21 nt, synthetic construct
  source 1..21: mol_type = other RNA
ggaatggtactgcctccacag

SEQ ID NO: 90889 - RNA, 21 nt, synthetic construct
  source 1..21: mol_type = other RNA
ggaatggtcaatttcatcgta

SEQ ID NO: 90890 - RNA, 21 nt, synthetic construct
  source 1..21: mol_type = other RNA
ggaatggtgaagaatgtgaaa

SEQ ID NO: 90891 - RNA, 21 nt, synthetic construct
  source 1..21: mol_type = other RNA
ggaatgtgcacctccagtgtc

SEQ ID NO: 90892 - RNA, 21 nt, synthetic construct
  source 1..21: mol_type = other RNA
ggaatgtgcactcttttaaac

SEQ ID NO: 90893 - RNA, 21 nt, synthetic construct
  source 1..21: mol_type = other RNA
ggaatgtgcttcctaaacctg

SEQ ID NO: 90894 - RNA, 21 nt, synthetic construct
  source 1..21: mol_type = other RNA
ggaatgtggtcacactttttg

SEQ ID NO: 90895 - RNA, 21 nt, synthetic construct
  source 1..21: mol_type = other RNA
ggaatgtgtagttctggtgtc

SEQ ID NO: 90896 - RNA, 21 nt, synthetic construct
  source 1..21: mol_type = other RNA
ggaattaaaatgttgccaata

SEQ ID NO: 90897 - RNA, 21 nt, synthetic construct
  source 1..21: mol_type = other RNA
ggaattaactccaggggacat

SEQ ID NO: 90898 - RNA, 21 nt, synthetic construct
  source 1..21: mol_type = other RNA
ggaattcagtcaccaaacgtt

SEQ ID NO: 90899 - RNA, 21 nt, synthetic construct
  source 1..21: mol_type = other RNA
ggaattcatcaaagttaaact

SEQ ID NO: 90900 - RNA, 21 nt, synthetic construct
  source 1..21: mol_type = other RNA
ggaattctgacacccgaagag

SEQ ID NO: 90901 - RNA, 21 nt, synthetic construct
  source 1..21: mol_type = other RNA
ggaattctgatgcacaagcct

SEQ ID NO: 90902 - RNA, 21 nt, synthetic construct
  source 1..21: mol_type = other RNA
ggaattgcatgagacttggag

SEQ ID NO: 90903 - RNA, 21 nt, synthetic construct
  source 1..21: mol_type = other RNA
ggaattgccatatgtagggca

SEQ ID NO: 90904 - RNA, 21 nt, synthetic construct
  source 1..21: mol_type = other RNA
ggaattgtaatcacagtacgc

SEQ ID NO: 90905 - RNA, 21 nt, synthetic construct
  source 1..21: mol_type = other RNA
ggaatttaaggggtaaatggt

SEQ ID NO: 90906 - RNA, 21 nt, synthetic construct
  source 1..21: mol_type = other RNA
ggaatttacatttccattcat

SEQ ID NO: 90907 - RNA, 21 nt, synthetic construct
  source 1..21: mol_type = other RNA
ggaatttgttttaccatctaa

SEQ ID NO: 90908 - RNA, 21 nt, synthetic construct
  source 1..21: mol_type = other RNA
ggaattttactgatcttttct

SEQ ID NO: 90909 - RNA, 21 nt, synthetic construct
  source 1..21: mol_type = other RNA
ggaattttaggacaaggaaag

SEQ ID NO: 90910 - RNA, 21 nt, synthetic construct
  source 1..21: mol_type = other RNA
ggaattttagtaattctccac

SEQ ID NO: 90911 - RNA, 21 nt, synthetic construct
  source 1..21: mol_type = other RNA
ggaattttcaggactcatgag

SEQ ID NO: 90912 - RNA, 21 nt, synthetic construct
  source 1..21: mol_type = other RNA
ggaatttttcttacctaagca

SEQ ID NO: 90913 - RNA, 21 nt, synthetic construct
  source 1..21: mol_type = other RNA
ggacaaaaaacgcggcacttg

SEQ ID NO: 90914 - RNA, 21 nt, synthetic construct
  source 1..21: mol_type = other RNA
ggacaaaaataatatgatacc

SEQ ID NO: 90915 - RNA, 21 nt, synthetic construct
  source 1..21: mol_type = other RNA
ggacaaattaccatgtttcca

SEQ ID NO: 90916 - RNA, 21 nt, synthetic construct
  source 1..21: mol_type = other RNA
ggacaacagtgtgagaccgtg

SEQ ID NO: 90917 - RNA, 21 nt, synthetic construct
  source 1..21: mol_type = other RNA
ggacaagagtctgcagaccaa

SEQ ID NO: 90918 - RNA, 21 nt, synthetic construct
  source 1..21: mol_type = other RNA
ggacaaggaaaggatggtttg

SEQ ID NO: 90919 - RNA, 21 nt, synthetic construct
  source 1..21: mol_type = other RNA
ggacaagtgggtggatgggtg

SEQ ID NO: 90920 - RNA, 21 nt, synthetic construct
  source 1..21: mol_type = other RNA
ggacaatgccagggcgctcct

SEQ ID NO: 90921 - RNA, 21 nt, synthetic construct
  source 1..21: mol_type = other RNA
ggacaattgaatggggatgca

SEQ ID NO: 90922 - RNA, 21 nt, synthetic construct
  source 1..21: mol_type = other RNA
ggacacaaattatgactgaga

SEQ ID NO: 90923 - RNA, 21 nt, synthetic construct
  source 1..21: mol_type = other RNA
ggacacacacagtcctgtgtt

SEQ ID NO: 90924 - RNA, 21 nt, synthetic construct
  source 1..21: mol_type = other RNA
ggacacactgaaacaatcgca

SEQ ID NO: 90925 - RNA, 21 nt, synthetic construct
  source 1..21: mol_type = other RNA
ggacactagcaatccaggatc

SEQ ID NO: 90926 - RNA, 21 nt, synthetic construct
  source 1..21: mol_type = other RNA
ggacactattgagagtgaaaa

SEQ ID NO: 90927 - RNA, 21 nt, synthetic construct
  source 1..21: mol_type = other RNA
ggacactgcagatgaatgagc

SEQ ID NO: 90928 - RNA, 21 nt, synthetic construct
  source 1..21: mol_type = other RNA
ggacactggaggtgcacattc

SEQ ID NO: 90929 - RNA, 21 nt, synthetic construct
  source 1..21: mol_type = other RNA
ggacagaaattcaacttggta

SEQ ID NO: 90930 - RNA, 21 nt, synthetic construct
  source 1..21: mol_type = other RNA
ggacagactgcagttggatta

SEQ ID NO: 90931 - RNA, 21 nt, synthetic construct
  source 1..21: mol_type = other RNA
ggacagagcagtaggcttaga

SEQ ID NO: 90932 - RNA, 21 nt, synthetic construct
  source 1..21: mol_type = other RNA
ggacagattaaaatcagatta

SEQ ID NO: 90933 - RNA, 21 nt, synthetic construct
  source 1..21: mol_type = other RNA
ggacagcacattaaataaggg

SEQ ID NO: 90934 - RNA, 21 nt, synthetic construct
  source 1..21: mol_type = other RNA
ggacagcggggatggttgcac

SEQ ID NO: 90935 - RNA, 21 nt, synthetic construct
  source 1..21: mol_type = other RNA
ggacagctcaattaagcaacc

SEQ ID NO: 90936 - RNA, 21 nt, synthetic construct
  source 1..21: mol_type = other RNA
ggacagctgggagaaagctaa

SEQ ID NO: 90937 - RNA, 21 nt, synthetic construct
  source 1..21: mol_type = other RNA
ggacagcttccacccaagtgg

SEQ ID NO: 90938 - RNA, 21 nt, synthetic construct
  source 1..21: mol_type = other RNA
ggacaggatcccggaacagga

SEQ ID NO: 90939 - RNA, 21 nt, synthetic construct
  source 1..21: mol_type = other RNA
ggacaggggacatgaaggaag

SEQ ID NO: 90940 - RNA, 21 nt, synthetic construct
  source 1..21: mol_type = other RNA
ggacaggtcacattctgcctg

SEQ ID NO: 90941 - RNA, 21 nt, synthetic construct
  source 1..21: mol_type = other RNA
ggacagtcatcctcaacaaga

SEQ ID NO: 90942 - RNA, 21 nt, synthetic construct
  source 1..21: mol_type = other RNA
ggacagttattcttcagcaag

SEQ ID NO: 90943 - RNA, 21 nt, synthetic construct
  source 1..21: mol_type = other RNA
ggacagttggccttgaggtga

SEQ ID NO: 90944 - RNA, 21 nt, synthetic construct
  source 1..21: mol_type = other RNA
ggacataagggtctgttttac

SEQ ID NO: 90945 - RNA, 21 nt, synthetic construct
  source 1..21: mol_type = other RNA
ggacatagatgaaactaaatg

SEQ ID NO: 90946 - RNA, 21 nt, synthetic construct
  source 1..21: mol_type = other RNA
ggacatattttatgatttcac

SEQ ID NO: 90947 - RNA, 21 nt, synthetic construct
  source 1..21: mol_type = other RNA
ggacatccacaacattgtgca

SEQ ID NO: 90948 - RNA, 21 nt, synthetic construct
  source 1..21: mol_type = other RNA
ggacatgaaggaaggattgga

SEQ ID NO: 90949 - RNA, 21 nt, synthetic construct
  source 1..21: mol_type = other RNA
ggacatgaggaaagcaggttg

SEQ ID NO: 90950 - RNA, 21 nt, synthetic construct
  source 1..21: mol_type = other RNA
ggacatgctctgataggataa

SEQ ID NO: 90951 - RNA, 21 nt, synthetic construct
  source 1..21: mol_type = other RNA
ggacatggagacagtgagcat

SEQ ID NO: 90952 - RNA, 21 nt, synthetic construct
  source 1..21: mol_type = other RNA
ggacattagtggaaaaactgc

SEQ ID NO: 90953 - RNA, 21 nt, synthetic construct
  source 1..21: mol_type = other RNA
ggacattatcctatcagagca

SEQ ID NO: 90954 - RNA, 21 nt, synthetic construct
  source 1..21: mol_type = other RNA
ggacattatgctaagtaaaat

SEQ ID NO: 90955 - RNA, 21 nt, synthetic construct
  source 1..21: mol_type = other RNA
ggacattctgcttccttgcta

SEQ ID NO: 90956 - RNA, 21 nt, synthetic construct
  source 1..21: mol_type = other RNA
ggacatttttccaaagatata

SEQ ID NO: 90957 - RNA, 21 nt, synthetic construct
  source 1..21: mol_type = other RNA
ggaccaactttaagcaaaatt

SEQ ID NO: 90958 - RNA, 21 nt, synthetic construct
  source 1..21: mol_type = other RNA
ggaccaatttaccatctgaca

SEQ ID NO: 90959 - RNA, 21 nt, synthetic construct
  source 1..21: mol_type = other RNA
ggaccacaatcttacccccat

SEQ ID NO: 90960 - RNA, 21 nt, synthetic construct
  source 1..21: mol_type = other RNA
ggaccagcttgggcaagagag

SEQ ID NO: 90961 - RNA, 21 nt, synthetic construct
  source 1..21: mol_type = other RNA
ggaccaggcagtcctctcact

SEQ ID NO: 90962 - RNA, 21 nt, synthetic construct
  source 1..21: mol_type = other RNA
ggaccaggtatggcgactcat

SEQ ID NO: 90963 - RNA, 21 nt, synthetic construct
  source 1..21: mol_type = other RNA
ggaccagttactctctctgcc

SEQ ID NO: 90964 - RNA, 21 nt, synthetic construct
  source 1..21: mol_type = other RNA
ggaccataggcacgcgccccc

SEQ ID NO: 90965 - RNA, 21 nt, synthetic construct
  source 1..21: mol_type = other RNA
ggaccatctgttaaaagatac

SEQ ID NO: 90966 - RNA, 21 nt, synthetic construct
  source 1..21: mol_type = other RNA
ggaccatgttttaggagtcaa

SEQ ID NO: 90967 - RNA, 21 nt, synthetic construct
  source 1..21: mol_type = other RNA
ggaccattagcagttctgtac

SEQ ID NO: 90968 - RNA, 21 nt, synthetic construct
  source 1..21: mol_type = other RNA
ggacccatgcccatgtgcatt

SEQ ID NO: 90969 - RNA, 21 nt, synthetic construct
  source 1..21: mol_type = other RNA
ggaccccgtacgctccctcgc

SEQ ID NO: 90970 - RNA, 21 nt, synthetic construct
  source 1..21: mol_type = other RNA
ggaccccgtctctgcaaaaaa

SEQ ID NO: 90971 - RNA, 21 nt, synthetic construct
  source 1..21: mol_type = other RNA
ggacccctccctgctttaaaa

SEQ ID NO: 90972 - RNA, 21 nt, synthetic construct
  source 1..21: mol_type = other RNA
ggacccgggaggcagatgttg

SEQ ID NO: 90973 - RNA, 21 nt, synthetic construct
  source 1..21: mol_type = other RNA
ggacccttaccttaaaccata

SEQ ID NO: 90974 - RNA, 21 nt, synthetic construct
  source 1..21: mol_type = other RNA
ggacgaatgcatgggaggtaa

SEQ ID NO: 90975 - RNA, 21 nt, synthetic construct
  source 1..21: mol_type = other RNA
ggacgacgtatgcaacttact

SEQ ID NO: 90976 - RNA, 21 nt, synthetic construct
  source 1..21: mol_type = other RNA
ggacgatttttccaacagttt

SEQ ID NO: 90977 - RNA, 21 nt, synthetic construct
  source 1..21: mol_type = other RNA
ggacgcaggcaaacagcgcca

SEQ ID NO: 90978 - RNA, 21 nt, synthetic construct
  source 1..21: mol_type = other RNA
ggacgcgcattttttaagtgg

SEQ ID NO: 90979 - RNA, 21 nt, synthetic construct
  source 1..21: mol_type = other RNA
ggacgctgatgacagttactc

SEQ ID NO: 90980 - RNA, 21 nt, synthetic construct
  source 1..21: mol_type = other RNA
ggacggggttttgccatgttg

SEQ ID NO: 90981 - RNA, 21 nt, synthetic construct
  source 1..21: mol_type = other RNA
ggacgggtggtagggaggggg

SEQ ID NO: 90982 - RNA, 21 nt, synthetic construct
  source 1..21: mol_type = other RNA
ggacgtttgagttgtttccac

SEQ ID NO: 90983 - RNA, 21 nt, synthetic construct
  source 1..21: mol_type = other RNA
ggactaacagggtctacaaaa

SEQ ID NO: 90984 - RNA, 21 nt, synthetic construct
  source 1..21: mol_type = other RNA
ggactacaggtgtgaaccacg

SEQ ID NO: 90985 - RNA, 21 nt, synthetic construct
  source 1..21: mol_type = other RNA
ggactagactgcctgaggtct

SEQ ID NO: 90986 - RNA, 21 nt, synthetic construct
  source 1..21: mol_type = other RNA
ggactatgtaggcacattcaa

SEQ ID NO: 90987 - RNA, 21 nt, synthetic construct
  source 1..21: mol_type = other RNA
ggactcacagcttaccaagtg

SEQ ID NO: 90988 - RNA, 21 nt, synthetic construct
  source 1..21: mol_type = other RNA
ggactcagggtcacttcctct

SEQ ID NO: 90989 - RNA, 21 nt, synthetic construct
  source 1..21: mol_type = other RNA
ggactcatgagagctgtgccg

SEQ ID NO: 90990 - RNA, 21 nt, synthetic construct
  source 1..21: mol_type = other RNA
ggactcattccaatccttcct

SEQ ID NO: 90991 - RNA, 21 nt, synthetic construct
  source 1..21: mol_type = other RNA
ggactccacagagttcagctt

SEQ ID NO: 90992 - RNA, 21 nt, synthetic construct
  source 1..21: mol_type = other RNA
ggactccaccctgccccttat

SEQ ID NO: 90993 - RNA, 21 nt, synthetic construct
  source 1..21: mol_type = other RNA
ggactcccatatctacatgta

SEQ ID NO: 90994 - RNA, 21 nt, synthetic construct
  source 1..21: mol_type = other RNA
ggactccggcgggagaggagc

SEQ ID NO: 90995 - RNA, 21 nt, synthetic construct
  source 1..21: mol_type = other RNA
ggactccttctgaaggcacta

SEQ ID NO: 90996 - RNA, 21 nt, synthetic construct
  source 1..21: mol_type = other RNA
ggactctaaactagttcaacc

SEQ ID NO: 90997 - RNA, 21 nt, synthetic construct
  source 1..21: mol_type = other RNA
ggactctgctcaaaggggcat

SEQ ID NO: 90998 - RNA, 21 nt, synthetic construct
  source 1..21: mol_type = other RNA
ggactcttatggctataacca

SEQ ID NO: 90999 - RNA, 21 nt, synthetic construct
  source 1..21: mol_type = other RNA
ggactgaaaagatacagaaat

SEQ ID NO: 91000 - RNA, 21 nt, synthetic construct
  source 1..21: mol_type = other RNA
ggactgaaaccagtgggtcag

SEQ ID NO: 91001 - RNA, 21 nt, synthetic construct
  source 1..21: mol_type = other RNA
ggactgaagtcctttcttggt

SEQ ID NO: 91002 - RNA, 21 nt, synthetic construct
  source 1..21: mol_type = other RNA
ggactgagacagtattgtgct

SEQ ID NO: 91003 - RNA, 21 nt, synthetic construct
  source 1..21: mol_type = other RNA
ggactgagcagtgaaagtctc

SEQ ID NO: 91004 - RNA, 21 nt, synthetic construct
  source 1..21: mol_type = other RNA
ggactgatgaagaacctgttc

SEQ ID NO: 91005 - RNA, 21 nt, synthetic construct
  source 1..21: mol_type = other RNA
ggactgcaacagatctgagaa

SEQ ID NO: 91006 - RNA, 21 nt, synthetic construct
  source 1..21: mol_type = other RNA
ggactgcctattttgtaattt

SEQ ID NO: 91007 - RNA, 21 nt, synthetic construct
  source 1..21: mol_type = other RNA
ggactgcctggtcctgagggc

SEQ ID NO: 91008 - RNA, 21 nt, synthetic construct
  source 1..21: mol_type = other RNA
ggactgcttgaggccacgagt

SEQ ID NO: 91009 - RNA, 21 nt, synthetic construct
  source 1..21: mol_type = other RNA
ggactggaactcatttctgct

SEQ ID NO: 91010 - RNA, 21 nt, synthetic construct
  source 1..21: mol_type = other RNA
ggactggactccttctgaagg

SEQ ID NO: 91011 - RNA, 21 nt, synthetic construct
  source 1..21: mol_type = other RNA
ggactggagaacagtaaagtc

SEQ ID NO: 91012 - RNA, 21 nt, synthetic construct
  source 1..21: mol_type = other RNA
ggactggagggatgctggagt

SEQ ID NO: 91013 - RNA, 21 nt, synthetic construct
  source 1..21: mol_type = other RNA
ggactggcctcggccaaccat

SEQ ID NO: 91014 - RNA, 21 nt, synthetic construct
  source 1..21: mol_type = other RNA
ggactggcttcagtgccaaca

SEQ ID NO: 91015 - RNA, 21 nt, synthetic construct
  source 1..21: mol_type = other RNA
ggactgggatcctaagcatga

SEQ ID NO: 91016 - RNA, 21 nt, synthetic construct
  source 1..21: mol_type = other RNA
ggactgtcgaagcttaattta

SEQ ID NO: 91017 - RNA, 21 nt, synthetic construct
  source 1..21: mol_type = other RNA
ggactgtgagggagatatttc

SEQ ID NO: 91018 - RNA, 21 nt, synthetic construct
  source 1..21: mol_type = other RNA
ggactgtgatgactgtaagct

SEQ ID NO: 91019 - RNA, 21 nt, synthetic construct
  source 1..21: mol_type = other RNA
ggactgtgtgtgtccaggcca

SEQ ID NO: 91020 - RNA, 21 nt, synthetic construct
  source 1..21: mol_type = other RNA
ggacttatggagataaattac

SEQ ID NO: 91021 - RNA, 21 nt, synthetic construct
  source 1..21: mol_type = other RNA
ggacttcactagtgggtcggg

SEQ ID NO: 91022 - RNA, 21 nt, synthetic construct
  source 1..21: mol_type = other RNA
ggacttcagtccttaccactg

SEQ ID NO: 91023 - RNA, 21 nt, synthetic construct
  source 1..21: mol_type = other RNA
ggacttcatgtacaatgaatt

SEQ ID NO: 91024 - RNA, 21 nt, synthetic construct
  source 1..21: mol_type = other RNA
ggacttcctattttataatgg

SEQ ID NO: 91025 - RNA, 21 nt, synthetic construct
  source 1..21: mol_type = other RNA
ggacttctagcctccagaaaa

SEQ ID NO: 91026 - RNA, 21 nt, synthetic construct
  source 1..21: mol_type = other RNA
ggacttgatctaaaatggaag

SEQ ID NO: 91027 - RNA, 21 nt, synthetic construct
  source 1..21: mol_type = other RNA
ggacttgctctcttgcccaag

SEQ ID NO: 91028 - RNA, 21 nt, synthetic construct
  source 1..21: mol_type = other RNA
ggacttggaagtgaagtcaag

SEQ ID NO: 91029 - RNA, 21 nt, synthetic construct
  source 1..21: mol_type = other RNA
ggacttggcacaggagagcga

SEQ ID NO: 91030 - RNA, 21 nt, synthetic construct
  source 1..21: mol_type = other RNA
ggactttaggctgttcaattt

SEQ ID NO: 91031 - RNA, 21 nt, synthetic construct
  source 1..21: mol_type = other RNA
ggactttgatgttttacattt

SEQ ID NO: 91032 - RNA, 21 nt, synthetic construct
  source 1..21: mol_type = other RNA
ggactttgtggcctcttccct

SEQ ID NO: 91033 - RNA, 21 nt, synthetic construct
  source 1..21: mol_type = other RNA
ggacttttggtacacatcttt

SEQ ID NO: 91034 - RNA, 21 nt, synthetic construct
  source 1..21: mol_type = other RNA
ggagaaaacaaaaagaaacta

SEQ ID NO: 91035 - RNA, 21 nt, synthetic construct
  source 1..21: mol_type = other RNA
ggagaaaagcttcataacatt

SEQ ID NO: 91036 - RNA, 21 nt, synthetic construct
  source 1..21: mol_type = other RNA
ggagaaacatggcttagaaat

SEQ ID NO: 91037 - RNA, 21 nt, synthetic construct
  source 1..21: mol_type = other RNA
ggagaaaccatttacccctta

SEQ ID NO: 91038 - RNA, 21 nt, synthetic construct
  source 1..21: mol_type = other RNA
ggagaaagaccaagagtgtgg

SEQ ID NO: 91039 - RNA, 21 nt, synthetic construct
  source 1..21: mol_type = other RNA
ggagaaagcccagccgcggac

SEQ ID NO: 91040 - RNA, 21 nt, synthetic construct
  source 1..21: mol_type = other RNA
ggagaaagctaatttggaatt

SEQ ID NO: 91041 - RNA, 21 nt, synthetic construct
  source 1..21: mol_type = other RNA
ggagaacagtaaagtcactgt

SEQ ID NO: 91042 - RNA, 21 nt, synthetic construct
  source 1..21: mol_type = other RNA
ggagaacccaggaacagattc

SEQ ID NO: 91043 - RNA, 21 nt, synthetic construct
  source 1..21: mol_type = other RNA
ggagaactgcctggacccggg

SEQ ID NO: 91044 - RNA, 21 nt, synthetic construct
  source 1..21: mol_type = other RNA
ggagaacttaaaggtttggag

SEQ ID NO: 91045 - RNA, 21 nt, synthetic construct
  source 1..21: mol_type = other RNA
ggagaacttgtctcggattta

SEQ ID NO: 91046 - RNA, 21 nt, synthetic construct
  source 1..21: mol_type = other RNA
ggagaagaaataaacgacacc

SEQ ID NO: 91047 - RNA, 21 nt, synthetic construct
  source 1..21: mol_type = other RNA
ggagaagagttctgaaggctc

SEQ ID NO: 91048 - RNA, 21 nt, synthetic construct
  source 1..21: mol_type = other RNA
ggagaaggccttccacggaat

SEQ ID NO: 91049 - RNA, 21 nt, synthetic construct
  source 1..21: mol_type = other RNA
ggagaatctgggaggtggagg

SEQ ID NO: 91050 - RNA, 21 nt, synthetic construct
  source 1..21: mol_type = other RNA
ggagaatggcaaggctaacag

SEQ ID NO: 91051 - RNA, 21 nt, synthetic construct
  source 1..21: mol_type = other RNA
ggagaatggcatgaacccacc

SEQ ID NO: 91052 - RNA, 21 nt, synthetic construct
  source 1..21: mol_type = other RNA
ggagaattactaaaattccaa

SEQ ID NO: 91053 - RNA, 21 nt, synthetic construct
  source 1..21: mol_type = other RNA
ggagaattctactaaacatta

SEQ ID NO: 91054 - RNA, 21 nt, synthetic construct
  source 1..21: mol_type = other RNA
ggagaattggtagtcaatgca

SEQ ID NO: 91055 - RNA, 21 nt, synthetic construct
  source 1..21: mol_type = other RNA
ggagacactagggactggcct

SEQ ID NO: 91056 - RNA, 21 nt, synthetic construct
  source 1..21: mol_type = other RNA
ggagacagcctaaaccatttt

SEQ ID NO: 91057 - RNA, 21 nt, synthetic construct
  source 1..21: mol_type = other RNA
ggagacagtgagcatgctgca

SEQ ID NO: 91058 - RNA, 21 nt, synthetic construct
  source 1..21: mol_type = other RNA
ggagacatctgagacatcaca

SEQ ID NO: 91059 - RNA, 21 nt, synthetic construct
  source 1..21: mol_type = other RNA
ggagacattacaattgatacc

SEQ ID NO: 91060 - RNA, 21 nt, synthetic construct
  source 1..21: mol_type = other RNA
ggagaccaggagttcttatga

SEQ ID NO: 91061 - RNA, 21 nt, synthetic construct
  source 1..21: mol_type = other RNA
ggagaccagttaggaagccac

SEQ ID NO: 91062 - RNA, 21 nt, synthetic construct
  source 1..21: mol_type = other RNA
ggagacccatactcagccccc

SEQ ID NO: 91063 - RNA, 21 nt, synthetic construct
  source 1..21: mol_type = other RNA
ggagaccgtggggggagggag

SEQ ID NO: 91064 - RNA, 21 nt, synthetic construct
  source 1..21: mol_type = other RNA
ggagacctactaaaagttgac

SEQ ID NO: 91065 - RNA, 21 nt, synthetic construct
  source 1..21: mol_type = other RNA
ggagacggcgagcttgatctt

SEQ ID NO: 91066 - RNA, 21 nt, synthetic construct
  source 1..21: mol_type = other RNA
ggagactagtacactgttgat

SEQ ID NO: 91067 - RNA, 21 nt, synthetic construct
  source 1..21: mol_type = other RNA
ggagactatcgttatatcctc

SEQ ID NO: 91068 - RNA, 21 nt, synthetic construct
  source 1..21: mol_type = other RNA
ggagactgataaacttcagtt

SEQ ID NO: 91069 - RNA, 21 nt, synthetic construct
  source 1..21: mol_type = other RNA
ggagactgtgcaatgtgaaaa

SEQ ID NO: 91070 - RNA, 21 nt, synthetic construct
  source 1..21: mol_type = other RNA
ggagactttcactgctcagtc

SEQ ID NO: 91071 - RNA, 21 nt, synthetic construct
  source 1..21: mol_type = other RNA
ggagagaaaaacaaaacaaag

SEQ ID NO: 91072 - RNA, 21 nt, synthetic construct
  source 1..21: mol_type = other RNA
ggagagaaaccttggtgtgct

SEQ ID NO: 91073 - RNA, 21 nt, synthetic construct
  source 1..21: mol_type = other RNA
ggagagaagagggggcataac

SEQ ID NO: 91074 - RNA, 21 nt, synthetic construct
  source 1..21: mol_type = other RNA
ggagagagaaactttacactt

SEQ ID NO: 91075 - RNA, 21 nt, synthetic construct
  source 1..21: mol_type = other RNA
ggagagatgcctatgaaatct

SEQ ID NO: 91076 - RNA, 21 nt, synthetic construct
  source 1..21: mol_type = other RNA
ggagagatggtagtcaacact

SEQ ID NO: 91077 - RNA, 21 nt, synthetic construct
  source 1..21: mol_type = other RNA
ggagagcactggtttcagtac

SEQ ID NO: 91078 - RNA, 21 nt, synthetic construct
  source 1..21: mol_type = other RNA
ggagagcgacagctacggagg

SEQ ID NO: 91079 - RNA, 21 nt, synthetic construct
  source 1..21: mol_type = other RNA
ggagaggagcgccctggcatt

SEQ ID NO: 91080 - RNA, 21 nt, synthetic construct
  source 1..21: mol_type = other RNA
ggagaggcaaaggccgctctt

SEQ ID NO: 91081 - RNA, 21 nt, synthetic construct
  source 1..21: mol_type = other RNA
ggagaggcatgccgggacaag

SEQ ID NO: 91082 - RNA, 21 nt, synthetic construct
  source 1..21: mol_type = other RNA
ggagaggcctcatgtattttc

SEQ ID NO: 91083 - RNA, 21 nt, synthetic construct
  source 1..21: mol_type = other RNA
ggagagggagctctgtcttga

SEQ ID NO: 91084 - RNA, 21 nt, synthetic construct
  source 1..21: mol_type = other RNA
ggagaggtgaactattagagc

SEQ ID NO: 91085 - RNA, 21 nt, synthetic construct
  source 1..21: mol_type = other RNA
ggagagtcgcttgaacctgaa

SEQ ID NO: 91086 - RNA, 21 nt, synthetic construct
  source 1..21: mol_type = other RNA
ggagagtgggcccagcagaag

SEQ ID NO: 91087 - RNA, 21 nt, synthetic construct
  source 1..21: mol_type = other RNA
ggagataaagagcaggtggaa

SEQ ID NO: 91088 - RNA, 21 nt, synthetic construct
  source 1..21: mol_type = other RNA
ggagataaattacccaaagac

SEQ ID NO: 91089 - RNA, 21 nt, synthetic construct
  source 1..21: mol_type = other RNA
ggagataccttgaaaggatac

SEQ ID NO: 91090 - RNA, 21 nt, synthetic construct
  source 1..21: mol_type = other RNA
ggagatactggccatgtttta

SEQ ID NO: 91091 - RNA, 21 nt, synthetic construct
  source 1..21: mol_type = other RNA
ggagatacttgattacaaggg

SEQ ID NO: 91092 - RNA, 21 nt, synthetic construct
  source 1..21: mol_type = other RNA
ggagatatacaggaagagact

SEQ ID NO: 91093 - RNA, 21 nt, synthetic construct
  source 1..21: mol_type = other RNA
ggagatatttcgcctagataa

SEQ ID NO: 91094 - RNA, 21 nt, synthetic construct
  source 1..21: mol_type = other RNA
ggagatggacactgcagatga

SEQ ID NO: 91095 - RNA, 21 nt, synthetic construct
  source 1..21: mol_type = other RNA
ggagatggcacataccatgga

SEQ ID NO: 91096 - RNA, 21 nt, synthetic construct
  source 1..21: mol_type = other RNA
ggagatggggacttgctctct

SEQ ID NO: 91097 - RNA, 21 nt, synthetic construct
  source 1..21: mol_type = other RNA
ggagatgtgtaattgtacctt

SEQ ID NO: 91098 - RNA, 21 nt, synthetic construct
  source 1..21: mol_type = other RNA
ggagattaaggctggaggatg

SEQ ID NO: 91099 - RNA, 21 nt, synthetic construct
  source 1..21: mol_type = other RNA
ggagcaagcatgagtatctgg

SEQ ID NO: 91100 - RNA, 21 nt, synthetic construct
  source 1..21: mol_type = other RNA
ggagcactgtgagccactaaa

SEQ ID NO: 91101 - RNA, 21 nt, synthetic construct
  source 1..21: mol_type = other RNA
ggagcagggtgggcccttaat

SEQ ID NO: 91102 - RNA, 21 nt, synthetic construct
  source 1..21: mol_type = other RNA
ggagcagtgtgaataggaaag

SEQ ID NO: 91103 - RNA, 21 nt, synthetic construct
  source 1..21: mol_type = other RNA
ggagcagttactcctgagcaa

SEQ ID NO: 91104 - RNA, 21 nt, synthetic construct
  source 1..21: mol_type = other RNA
ggagcatagcttgaaccaggg

SEQ ID NO: 91105 - RNA, 21 nt, synthetic construct
  source 1..21: mol_type = other RNA
ggagcatatatactctgagac

SEQ ID NO: 91106 - RNA, 21 nt, synthetic construct
  source 1..21: mol_type = other RNA
ggagcatcttcccatgaacat

SEQ ID NO: 91107 - RNA, 21 nt, synthetic construct
  source 1..21: mol_type = other RNA
ggagcatgcacacaggagaac

SEQ ID NO: 91108 - RNA, 21 nt, synthetic construct
  source 1..21: mol_type = other RNA
ggagccaaacatcatgattta

SEQ ID NO: 91109 - RNA, 21 nt, synthetic construct
  source 1..21: mol_type = other RNA
ggagccaaacttgaaccttcc

SEQ ID NO: 91110 - RNA, 21 nt, synthetic construct
  source 1..21: mol_type = other RNA
ggagccaagtaaaagcaacct

SEQ ID NO: 91111 - RNA, 21 nt, synthetic construct
  source 1..21: mol_type = other RNA
ggagcccaagcacactttcct

SEQ ID NO: 91112 - RNA, 21 nt, synthetic construct
  source 1..21: mol_type = other RNA
ggagcccaccaccatgcctgg

SEQ ID NO: 91113 - RNA, 21 nt, synthetic construct
  source 1..21: mol_type = other RNA
ggagccctccaggatccagtc

SEQ ID NO: 91114 - RNA, 21 nt, synthetic construct
  source 1..21: mol_type = other RNA
ggagccctgctgtggccgagg

SEQ ID NO: 91115 - RNA, 21 nt, synthetic construct
  source 1..21: mol_type = other RNA
ggagcctagtcatccactgca

SEQ ID NO: 91116 - RNA, 21 nt, synthetic construct
  source 1..21: mol_type = other RNA
ggagcctgaggacactagcaa

SEQ ID NO: 91117 - RNA, 21 nt, synthetic construct
  source 1..21: mol_type = other RNA
ggagcctgctctgcagagact

SEQ ID NO: 91118 - RNA, 21 nt, synthetic construct
  source 1..21: mol_type = other RNA
ggagccttgctgttgtaatgt

SEQ ID NO: 91119 - RNA, 21 nt, synthetic construct
  source 1..21: mol_type = other RNA
ggagcgccacgtgaagatgga

SEQ ID NO: 91120 - RNA, 21 nt, synthetic construct
  source 1..21: mol_type = other RNA
ggagcgccctggcattgtccc

SEQ ID NO: 91121 - RNA, 21 nt, synthetic construct
  source 1..21: mol_type = other RNA
ggagcgggcagccttggagga

SEQ ID NO: 91122 - RNA, 21 nt, synthetic construct
  source 1..21: mol_type = other RNA
ggagcggtgtcttattgtttt

SEQ ID NO: 91123 - RNA, 21 nt, synthetic construct
  source 1..21: mol_type = other RNA
ggagctagaacagaataaaaa

SEQ ID NO: 91124 - RNA, 21 nt, synthetic construct
  source 1..21: mol_type = other RNA
ggagctagagggtaagaccaa

SEQ ID NO: 91125 - RNA, 21 nt, synthetic construct
  source 1..21: mol_type = other RNA
ggagctataatttatctggat

SEQ ID NO: 91126 - RNA, 21 nt, synthetic construct
  source 1..21: mol_type = other RNA
ggagctcactgcagcctcaac

SEQ ID NO: 91127 - RNA, 21 nt, synthetic construct
  source 1..21: mol_type = other RNA
ggagctctgtcttgatgatag

SEQ ID NO: 91128 - RNA, 21 nt, synthetic construct
  source 1..21: mol_type = other RNA
ggagctgagaccacagacgtg

SEQ ID NO: 91129 - RNA, 21 nt, synthetic construct
  source 1..21: mol_type = other RNA
ggagctgtatttttgctcaca

SEQ ID NO: 91130 - RNA, 21 nt, synthetic construct
  source 1..21: mol_type = other RNA
ggagcttatcaggcttgagtc

SEQ ID NO: 91131 - RNA, 21 nt, synthetic construct
  source 1..21: mol_type = other RNA
ggagctttcattattaccagg

SEQ ID NO: 91132 - RNA, 21 nt, synthetic construct
  source 1..21: mol_type = other RNA
ggagcttttgaaactgagcat

SEQ ID NO: 91133 - RNA, 21 nt, synthetic construct
  source 1..21: mol_type = other RNA
ggaggaaaaaacagttgctat

SEQ ID NO: 91134 - RNA, 21 nt, synthetic construct
  source 1..21: mol_type = other RNA
ggaggaaaataatttgcaaca

SEQ ID NO: 91135 - RNA, 21 nt, synthetic construct
  source 1..21: mol_type = other RNA
ggaggaactaattgataaaac

SEQ ID NO: 91136 - RNA, 21 nt, synthetic construct
  source 1..21: mol_type = other RNA
ggaggaagagatagtctcttc

SEQ ID NO: 91137 - RNA, 21 nt, synthetic construct
  source 1..21: mol_type = other RNA
ggaggaatccttcagtcagtt

SEQ ID NO: 91138 - RNA, 21 nt, synthetic construct
  source 1..21: mol_type = other RNA
ggaggagaaggccttccacgg

SEQ ID NO: 91139 - RNA, 21 nt, synthetic construct
  source 1..21: mol_type = other RNA
ggaggagccaagtaaaagcaa

SEQ ID NO: 91140 - RNA, 21 nt, synthetic construct
  source 1..21: mol_type = other RNA
ggaggagccctgctgtggccg

SEQ ID NO: 91141 - RNA, 21 nt, synthetic construct
  source 1..21: mol_type = other RNA
ggaggaggagggtgcagcctc

SEQ ID NO: 91142 - RNA, 21 nt, synthetic construct
  source 1..21: mol_type = other RNA
ggaggagggtgcagcctctaa

SEQ ID NO: 91143 - RNA, 21 nt, synthetic construct
  source 1..21: mol_type = other RNA
ggaggagggttagattatatg

SEQ ID NO: 91144 - RNA, 21 nt, synthetic construct
  source 1..21: mol_type = other RNA
ggaggaggtcatactggagca

SEQ ID NO: 91145 - RNA, 21 nt, synthetic construct
  source 1..21: mol_type = other RNA
ggaggataatatctggactga

SEQ ID NO: 91146 - RNA, 21 nt, synthetic construct
  source 1..21: mol_type = other RNA
ggaggatgaggggctgagcct

SEQ ID NO: 91147 - RNA, 21 nt, synthetic construct
  source 1..21: mol_type = other RNA
ggaggatggcttgagcccagg

SEQ ID NO: 91148 - RNA, 21 nt, synthetic construct
  source 1..21: mol_type = other RNA
ggaggattgtttgaggctggg

SEQ ID NO: 91149 - RNA, 21 nt, synthetic construct
  source 1..21: mol_type = other RNA
ggaggcaaaggttgagacaag

SEQ ID NO: 91150 - RNA, 21 nt, synthetic construct
  source 1..21: mol_type = other RNA
ggaggcaatgttgattttgag

SEQ ID NO: 91151 - RNA, 21 nt, synthetic construct
  source 1..21: mol_type = other RNA
ggaggcacctgaacccaggag

SEQ ID NO: 91152 - RNA, 21 nt, synthetic construct
  source 1..21: mol_type = other RNA
ggaggcagtaccattcccctt

SEQ ID NO: 91153 - RNA, 21 nt, synthetic construct
  source 1..21: mol_type = other RNA
ggaggccatcttcatttctaa

SEQ ID NO: 91154 - RNA, 21 nt, synthetic construct
  source 1..21: mol_type = other RNA
ggaggcctcagaattaatata

SEQ ID NO: 91155 - RNA, 21 nt, synthetic construct
  source 1..21: mol_type = other RNA
ggaggcggaggttgcggtgac

SEQ ID NO: 91156 - RNA, 21 nt, synthetic construct
  source 1..21: mol_type = other RNA
ggaggctagaagtcccagttc

SEQ ID NO: 91157 - RNA, 21 nt, synthetic construct
  source 1..21: mol_type = other RNA
ggaggctattaactttgaaat

SEQ ID NO: 91158 - RNA, 21 nt, synthetic construct
  source 1..21: mol_type = other RNA
ggaggctgaggcaggagaact

SEQ ID NO: 91159 - RNA, 21 nt, synthetic construct
  source 1..21: mol_type = other RNA
ggaggctgaggcaggaggcac

SEQ ID NO: 91160 - RNA, 21 nt, synthetic construct
  source 1..21: mol_type = other RNA
ggaggctgaggcggaaggatt

SEQ ID NO: 91161 - RNA, 21 nt, synthetic construct
  source 1..21: mol_type = other RNA
ggaggctgaggctggggaatt

SEQ ID NO: 91162 - RNA, 21 nt, synthetic construct
  source 1..21: mol_type = other RNA
ggagggaaaatgtttatttta

SEQ ID NO: 91163 - RNA, 21 nt, synthetic construct
  source 1..21: mol_type = other RNA
ggagggactgaaaccagtggg

SEQ ID NO: 91164 - RNA, 21 nt, synthetic construct
  source 1..21: mol_type = other RNA
ggagggagagggagctctgtc

SEQ ID NO: 91165 - RNA, 21 nt, synthetic construct
  source 1..21: mol_type = other RNA
ggagggaggattgtttgaggc

SEQ ID NO: 91166 - RNA, 21 nt, synthetic construct
  source 1..21: mol_type = other RNA
ggagggatgcattctagaaag

SEQ ID NO: 91167 - RNA, 21 nt, synthetic construct
  source 1..21: mol_type = other RNA
ggagggatgctggagtgtggc

SEQ ID NO: 91168 - RNA, 21 nt, synthetic construct
  source 1..21: mol_type = other RNA
ggagggccagaggagggatgc

SEQ ID NO: 91169 - RNA, 21 nt, synthetic construct
  source 1..21: mol_type = other RNA
ggagggctcccagtgcccacc

SEQ ID NO: 91170 - RNA, 21 nt, synthetic construct
  source 1..21: mol_type = other RNA
ggaggggcaggaaaggtgggg

SEQ ID NO: 91171 - RNA, 21 nt, synthetic construct
  source 1..21: mol_type = other RNA
ggaggggccagttgagagaga

SEQ ID NO: 91172 - RNA, 21 nt, synthetic construct
  source 1..21: mol_type = other RNA
ggagggggagggagagggagc

SEQ ID NO: 91173 - RNA, 21 nt, synthetic construct
  source 1..21: mol_type = other RNA
ggagggggctgaggattggag

SEQ ID NO: 91174 - RNA, 21 nt, synthetic construct
  source 1..21: mol_type = other RNA
ggaggggtattcagggggcta

SEQ ID NO: 91175 - RNA, 21 nt, synthetic construct
  source 1..21: mol_type = other RNA
ggaggggtccccagcatccac

SEQ ID NO: 91176 - RNA, 21 nt, synthetic construct
  source 1..21: mol_type = other RNA
ggagggtgcagcctctaatca

SEQ ID NO: 91177 - RNA, 21 nt, synthetic construct
  source 1..21: mol_type = other RNA
ggagggtgtgatcaggaaaga

SEQ ID NO: 91178 - RNA, 21 nt, synthetic construct
  source 1..21: mol_type = other RNA
ggagggttagattatatggtc

SEQ ID NO: 91179 - RNA, 21 nt, synthetic construct
  source 1..21: mol_type = other RNA
ggaggtaatactataaggaaa

SEQ ID NO: 91180 - RNA, 21 nt, synthetic construct
  source 1..21: mol_type = other RNA
ggaggtaggcttagatgagcc

SEQ ID NO: 91181 - RNA, 21 nt, synthetic construct
  source 1..21: mol_type = other RNA
ggaggtcatactggagcaggg

SEQ ID NO: 91182 - RNA, 21 nt, synthetic construct
  source 1..21: mol_type = other RNA
ggaggtcgggctgcctcagcc

SEQ ID NO: 91183 - RNA, 21 nt, synthetic construct
  source 1..21: mol_type = other RNA
ggaggtctaagagataactaa

SEQ ID NO: 91184 - RNA, 21 nt, synthetic construct
  source 1..21: mol_type = other RNA
ggaggtgcacattccaagaga

SEQ ID NO: 91185 - RNA, 21 nt, synthetic construct
  source 1..21: mol_type = other RNA
ggaggtggaactctgtcatgg

SEQ ID NO: 91186 - RNA, 21 nt, synthetic construct
  source 1..21: mol_type = other RNA
ggaggttgaagctctagtgag

SEQ ID NO: 91187 - RNA, 21 nt, synthetic construct
  source 1..21: mol_type = other RNA
ggaggttgaggctgcagtgag

SEQ ID NO: 91188 - RNA, 21 nt, synthetic construct
  source 1..21: mol_type = other RNA
ggaggttgcggtgacgtgaga

SEQ ID NO: 91189 - RNA, 21 nt, synthetic construct
  source 1..21: mol_type = other RNA
ggaggtttgcactggcacagc

SEQ ID NO: 91190 - RNA, 21 nt, synthetic construct
  source 1..21: mol_type = other RNA
ggagtaaacctgcaatttttt

SEQ ID NO: 91191 - RNA, 21 nt, synthetic construct
  source 1..21: mol_type = other RNA
ggagtaacagacctctgaaga

SEQ ID NO: 91192 - RNA, 21 nt, synthetic construct
  source 1..21: mol_type = other RNA
ggagtaactgctcctctgact

SEQ ID NO: 91193 - RNA, 21 nt, synthetic construct
  source 1..21: mol_type = other RNA
ggagtacagtgcataccacca

SEQ ID NO: 91194 - RNA, 21 nt, synthetic construct
  source 1..21: mol_type = other RNA
ggagtactatgcagcaacgga

SEQ ID NO: 91195 - RNA, 21 nt, synthetic construct
  source 1..21: mol_type = other RNA
ggagtagctgggattacacac

SEQ ID NO: 91196 - RNA, 21 nt, synthetic construct
  source 1..21: mol_type = other RNA
ggagtattctagttctagctc

SEQ ID NO: 91197 - RNA, 21 nt, synthetic construct
  source 1..21: mol_type = other RNA
ggagtcaactaatcaaacata

SEQ ID NO: 91198 - RNA, 21 nt, synthetic construct
  source 1..21: mol_type = other RNA
ggagtcacagtgaattctgac

SEQ ID NO: 91199 - RNA, 21 nt, synthetic construct
  source 1..21: mol_type = other RNA
ggagtcacttgacaaaaatta

SEQ ID NO: 91200 - RNA, 21 nt, synthetic construct
  source 1..21: mol_type = other RNA
ggagtcagtagaggccgaggg

SEQ ID NO: 91201 - RNA, 21 nt, synthetic construct
  source 1..21: mol_type = other RNA
ggagtccaaccaatcgcaggg

SEQ ID NO: 91202 - RNA, 21 nt, synthetic construct
  source 1..21: mol_type = other RNA
ggagtccagtcctgctaacac

SEQ ID NO: 91203 - RNA, 21 nt, synthetic construct
  source 1..21: mol_type = other RNA
ggagtccctgctttcagttct

SEQ ID NO: 91204 - RNA, 21 nt, synthetic construct
  source 1..21: mol_type = other RNA
ggagtccgcggctgggctttc

SEQ ID NO: 91205 - RNA, 21 nt, synthetic construct
  source 1..21: mol_type = other RNA
ggagtcctgtcagtttctgat

SEQ ID NO: 91206 - RNA, 21 nt, synthetic construct
  source 1..21: mol_type = other RNA
ggagtctatttctgaacaaat

SEQ ID NO: 91207 - RNA, 21 nt, synthetic construct
  source 1..21: mol_type = other RNA
ggagtctgcccatcctatcta

SEQ ID NO: 91208 - RNA, 21 nt, synthetic construct
  source 1..21: mol_type = other RNA
ggagtgacttaagcaacagaa

SEQ ID NO: 91209 - RNA, 21 nt, synthetic construct
  source 1..21: mol_type = other RNA
ggagtgagaggactgcctggt

SEQ ID NO: 91210 - RNA, 21 nt, synthetic construct
  source 1..21: mol_type = other RNA
ggagtgcaatggtgggatctc

SEQ ID NO: 91211 - RNA, 21 nt, synthetic construct
  source 1..21: mol_type = other RNA
ggagtgcgagtgtgaacgatg

SEQ ID NO: 91212 - RNA, 21 nt, synthetic construct
  source 1..21: mol_type = other RNA
ggagtggaggggcaggaaagg

SEQ ID NO: 91213 - RNA, 21 nt, synthetic construct
  source 1..21: mol_type = other RNA
ggagtggagtggcatgatctc

SEQ ID NO: 91214 - RNA, 21 nt, synthetic construct
  source 1..21: mol_type = other RNA
ggagtggcatgatctcacgtc

SEQ ID NO: 91215 - RNA, 21 nt, synthetic construct
  source 1..21: mol_type = other RNA
ggagtggggcacctaaaaggt

SEQ ID NO: 91216 - RNA, 21 nt, synthetic construct
  source 1..21: mol_type = other RNA
ggagtggtggatagagagatt

SEQ ID NO: 91217 - RNA, 21 nt, synthetic construct
  source 1..21: mol_type = other RNA
ggagtgtgcccaaggaaggca

SEQ ID NO: 91218 - RNA, 21 nt, synthetic construct
  source 1..21: mol_type = other RNA
ggagtgtggcaggggctgcat

SEQ ID NO: 91219 - RNA, 21 nt, synthetic construct
  source 1..21: mol_type = other RNA
ggagtgttttcttcatggact

SEQ ID NO: 91220 - RNA, 21 nt, synthetic construct
  source 1..21: mol_type = other RNA
ggagttaattccacaaccact

SEQ ID NO: 91221 - RNA, 21 nt, synthetic construct
  source 1..21: mol_type = other RNA
ggagttaccataaaaccattt

SEQ ID NO: 91222 - RNA, 21 nt, synthetic construct
  source 1..21: mol_type = other RNA
ggagttacgctgccaaaagcc

SEQ ID NO: 91223 - RNA, 21 nt, synthetic construct
  source 1..21: mol_type = other RNA
ggagttcagctttaaagagaa

SEQ ID NO: 91224 - RNA, 21 nt, synthetic construct
  source 1..21: mol_type = other RNA
ggagttcagtggtgcaatcac

SEQ ID NO: 91225 - RNA, 21 nt, synthetic construct
  source 1..21: mol_type = other RNA
ggagttcattagaattcagga

SEQ ID NO: 91226 - RNA, 21 nt, synthetic construct
  source 1..21: mol_type = other RNA
ggagttcattcgtagcaggtt

SEQ ID NO: 91227 - RNA, 21 nt, synthetic construct
  source 1..21: mol_type = other RNA
ggagttccgatttctcggccg

SEQ ID NO: 91228 - RNA, 21 nt, synthetic construct
  source 1..21: mol_type = other RNA
ggagttcttatgaggttattc

SEQ ID NO: 91229 - RNA, 21 nt, synthetic construct
  source 1..21: mol_type = other RNA
ggagttgcatcacttgaggtg

SEQ ID NO: 91230 - RNA, 21 nt, synthetic construct
  source 1..21: mol_type = other RNA
ggagttggtgcaaggataaac

SEQ ID NO: 91231 - RNA, 21 nt, synthetic construct
  source 1..21: mol_type = other RNA
ggagtttgagactgcagtgac

SEQ ID NO: 91232 - RNA, 21 nt, synthetic construct
  source 1..21: mol_type = other RNA
ggagtttgaggccgcagtgag

SEQ ID NO: 91233 - RNA, 21 nt, synthetic construct
  source 1..21: mol_type = other RNA
ggagtttgtagctcaaagcat

SEQ ID NO: 91234 - RNA, 21 nt, synthetic construct
  source 1..21: mol_type = other RNA
ggagttttaggaaaatagagt

SEQ ID NO: 91235 - RNA, 21 nt, synthetic construct
  source 1..21: mol_type = other RNA
ggagttttccccctacaccca

SEQ ID NO: 91236 - RNA, 21 nt, synthetic construct
  source 1..21: mol_type = other RNA
ggagttttgcctctttgctaa

SEQ ID NO: 91237 - RNA, 21 nt, synthetic construct
  source 1..21: mol_type = other RNA
ggataaacaaagagaacaatg

SEQ ID NO: 91238 - RNA, 21 nt, synthetic construct
  source 1..21: mol_type = other RNA
ggataaatcccacttgatcca

SEQ ID NO: 91239 - RNA, 21 nt, synthetic construct
  source 1..21: mol_type = other RNA
ggataagaataccaaattcac

SEQ ID NO: 91240 - RNA, 21 nt, synthetic construct
  source 1..21: mol_type = other RNA
ggataaggaagagtttatatt

SEQ ID NO: 91241 - RNA, 21 nt, synthetic construct
  source 1..21: mol_type = other RNA
ggataaggggcagggtggagt

SEQ ID NO: 91242 - RNA, 21 nt, synthetic construct
  source 1..21: mol_type = other RNA
ggataatatctggactgaaaa

SEQ ID NO: 91243 - RNA, 21 nt, synthetic construct
  source 1..21: mol_type = other RNA
ggataatgctatccagaagag

SEQ ID NO: 91244 - RNA, 21 nt, synthetic construct
  source 1..21: mol_type = other RNA
ggataatgtccagaggaggaa

SEQ ID NO: 91245 - RNA, 21 nt, synthetic construct
  source 1..21: mol_type = other RNA
ggatacaaaaagcacctacca

SEQ ID NO: 91246 - RNA, 21 nt, synthetic construct
  source 1..21: mol_type = other RNA
ggatacaaggtcaatctgaaa

SEQ ID NO: 91247 - RNA, 21 nt, synthetic construct
  source 1..21: mol_type = other RNA
ggatacggaaatataacatta

SEQ ID NO: 91248 - RNA, 21 nt, synthetic construct
  source 1..21: mol_type = other RNA
ggatactgagaacagaatttt

SEQ ID NO: 91249 - RNA, 21 nt, synthetic construct
  source 1..21: mol_type = other RNA
ggatacttctaactttagaac

SEQ ID NO: 91250 - RNA, 21 nt, synthetic construct
  source 1..21: mol_type = other RNA
ggatagaagtgtatcagatgc

SEQ ID NO: 91251 - RNA, 21 nt, synthetic construct
  source 1..21: mol_type = other RNA
ggatagagagattcaagaaac

SEQ ID NO: 91252 - RNA, 21 nt, synthetic construct
  source 1..21: mol_type = other RNA
ggatagcaacttgcagaagag

SEQ ID NO: 91253 - RNA, 21 nt, synthetic construct
  source 1..21: mol_type = other RNA
ggatagcattatccctttaaa

SEQ ID NO: 91254 - RNA, 21 nt, synthetic construct
  source 1..21: mol_type = other RNA
ggatagtgctttttactttgc

SEQ ID NO: 91255 - RNA, 21 nt, synthetic construct
  source 1..21: mol_type = other RNA
ggatagttaaacatgtaaaac

SEQ ID NO: 91256 - RNA, 21 nt, synthetic construct
  source 1..21: mol_type = other RNA
ggatagtttctcaacttagcc

SEQ ID NO: 91257 - RNA, 21 nt, synthetic construct
  source 1..21: mol_type = other RNA
ggatataacgatagtctccta

SEQ ID NO: 91258 - RNA, 21 nt, synthetic construct
  source 1..21: mol_type = other RNA
ggatataagagtgggcaaaaa

SEQ ID NO: 91259 - RNA, 21 nt, synthetic construct
  source 1..21: mol_type = other RNA
ggatatagctacaatgatttt

SEQ ID NO: 91260 - RNA, 21 nt, synthetic construct
  source 1..21: mol_type = other RNA
ggatatcagaagtgctgactt

SEQ ID NO: 91261 - RNA, 21 nt, synthetic construct
  source 1..21: mol_type = other RNA
ggatatccaaagataaaggta

SEQ ID NO: 91262 - RNA, 21 nt, synthetic construct
  source 1..21: mol_type = other RNA
ggatatccccatttttctcga

SEQ ID NO: 91263 - RNA, 21 nt, synthetic construct
  source 1..21: mol_type = other RNA
ggatatctgaggtcaggagct

SEQ ID NO: 91264 - RNA, 21 nt, synthetic construct
  source 1..21: mol_type = other RNA
ggatatctggcctgcaccatt

SEQ ID NO: 91265 - RNA, 21 nt, synthetic construct
  source 1..21: mol_type = other RNA
ggatatgggccaaagacagat

SEQ ID NO: 91266 - RNA, 21 nt, synthetic construct
  source 1..21: mol_type = other RNA
ggatatgttttctaaacctta

SEQ ID NO: 91267 - RNA, 21 nt, synthetic construct
  source 1..21: mol_type = other RNA
ggatattctacagaaaaccct

SEQ ID NO: 91268 - RNA, 21 nt, synthetic construct
  source 1..21: mol_type = other RNA
ggatattggcttatagtgttc

SEQ ID NO: 91269 - RNA, 21 nt, synthetic construct
  source 1..21: mol_type = other RNA
ggatatttactaagaagtgaa

SEQ ID NO: 91270 - RNA, 21 nt, synthetic construct
  source 1..21: mol_type = other RNA
ggatatttgcagtagtattga

SEQ ID NO: 91271 - RNA, 21 nt, synthetic construct
  source 1..21: mol_type = other RNA
ggatatttggccgggcgcggt

SEQ ID NO: 91272 - RNA, 21 nt, synthetic construct
  source 1..21: mol_type = other RNA
ggatattttcgtgtactgaaa

SEQ ID NO: 91273 - RNA, 21 nt, synthetic construct
  source 1..21: mol_type = other RNA
ggatcaaaccatgttcatggg

SEQ ID NO: 91274 - RNA, 21 nt, synthetic construct
  source 1..21: mol_type = other RNA
ggatcaaagacctaagcttaa

SEQ ID NO: 91275 - RNA, 21 nt, synthetic construct
  source 1..21: mol_type = other RNA
ggatcaaatctggctgcaggg

SEQ ID NO: 91276 - RNA, 21 nt, synthetic construct
  source 1..21: mol_type = other RNA
ggatcaaggcacagtctgtgc

SEQ ID NO: 91277 - RNA, 21 nt, synthetic construct
  source 1..21: mol_type = other RNA
ggatcacacttgatggtttgg

SEQ ID NO: 91278 - RNA, 21 nt, synthetic construct
  source 1..21: mol_type = other RNA
ggatcacagatacaactctga

SEQ ID NO: 91279 - RNA, 21 nt, synthetic construct
  source 1..21: mol_type = other RNA
ggatcacaggcgttgagccat

SEQ ID NO: 91280 - RNA, 21 nt, synthetic construct
  source 1..21: mol_type = other RNA
ggatcaccaaagacttcagga

SEQ ID NO: 91281 - RNA, 21 nt, synthetic construct
  source 1..21: mol_type = other RNA
ggatcatatagtaattctgtg

SEQ ID NO: 91282 - RNA, 21 nt, synthetic construct
  source 1..21: mol_type = other RNA
ggatccagatgtagagaaaca

SEQ ID NO: 91283 - RNA, 21 nt, synthetic construct
  source 1..21: mol_type = other RNA
ggatccaggggaatagaaagt

SEQ ID NO: 91284 - RNA, 21 nt, synthetic construct
  source 1..21: mol_type = other RNA
ggatccagtctctacccagca

SEQ ID NO: 91285 - RNA, 21 nt, synthetic construct
  source 1..21: mol_type = other RNA
ggatcccagtcctttgggagg

SEQ ID NO: 91286 - RNA, 21 nt, synthetic construct
  source 1..21: mol_type = other RNA
ggatcccccagcccctggtga

SEQ ID NO: 91287 - RNA, 21 nt, synthetic construct
  source 1..21: mol_type = other RNA
ggatcccggaacaggaaaagg

SEQ ID NO: 91288 - RNA, 21 nt, synthetic construct
  source 1..21: mol_type = other RNA
ggatcctaagcatgagatact

SEQ ID NO: 91289 - RNA, 21 nt, synthetic construct
  source 1..21: mol_type = other RNA
ggatcctggagggctcccagt

SEQ ID NO: 91290 - RNA, 21 nt, synthetic construct
  source 1..21: mol_type = other RNA
ggatcctgtccaggcgcctgc

SEQ ID NO: 91291 - RNA, 21 nt, synthetic construct
  source 1..21: mol_type = other RNA
ggatcctgtctcagagtatat

SEQ ID NO: 91292 - RNA, 21 nt, synthetic construct
  source 1..21: mol_type = other RNA
ggatcgttagtattttcacat

SEQ ID NO: 91293 - RNA, 21 nt, synthetic construct
  source 1..21: mol_type = other RNA
ggatctctgggctcactgcaa

SEQ ID NO: 91294 - RNA, 21 nt, synthetic construct
  source 1..21: mol_type = other RNA
ggatctgataaattattagct

SEQ ID NO: 91295 - RNA, 21 nt, synthetic construct
  source 1..21: mol_type = other RNA
ggatctgtcatgtttgaattt

SEQ ID NO: 91296 - RNA, 21 nt, synthetic construct
  source 1..21: mol_type = other RNA
ggatctgttggtgcttagctg

SEQ ID NO: 91297 - RNA, 21 nt, synthetic construct
  source 1..21: mol_type = other RNA
ggatcttactgtaagttcctg

SEQ ID NO: 91298 - RNA, 21 nt, synthetic construct
  source 1..21: mol_type = other RNA
ggatcttatctgctgtcggtt

SEQ ID NO: 91299 - RNA, 21 nt, synthetic construct
  source 1..21: mol_type = other RNA
ggatgaaaaagtactggaaat

SEQ ID NO: 91300 - RNA, 21 nt, synthetic construct
  source 1..21: mol_type = other RNA
ggatgaacgctaaattaaagg

SEQ ID NO: 91301 - RNA, 21 nt, synthetic construct
  source 1..21: mol_type = other RNA
ggatgaatacaaaggtgttaa

SEQ ID NO: 91302 - RNA, 21 nt, synthetic construct
  source 1..21: mol_type = other RNA
ggatgaatgcagtggcttcct

SEQ ID NO: 91303 - RNA, 21 nt, synthetic construct
  source 1..21: mol_type = other RNA
ggatgaatgttgtacatttaa

SEQ ID NO: 91304 - RNA, 21 nt, synthetic construct
  source 1..21: mol_type = other RNA
ggatgaattacaaatgaaagt

SEQ ID NO: 91305 - RNA, 21 nt, synthetic construct
  source 1..21: mol_type = other RNA
ggatgaccttgacaataaatg

SEQ ID NO: 91306 - RNA, 21 nt, synthetic construct
  source 1..21: mol_type = other RNA
ggatgactaggctcctgagaa

SEQ ID NO: 91307 - RNA, 21 nt, synthetic construct
  source 1..21: mol_type = other RNA
ggatgactgtcctgaattcta

SEQ ID NO: 91308 - RNA, 21 nt, synthetic construct
  source 1..21: mol_type = other RNA
ggatgagattaatgtaggtgt

SEQ ID NO: 91309 - RNA, 21 nt, synthetic construct
  source 1..21: mol_type = other RNA
ggatgaggaagaggaaggttc

SEQ ID NO: 91310 - RNA, 21 nt, synthetic construct
  source 1..21: mol_type = other RNA
ggatgaggggctgagccttca

SEQ ID NO: 91311 - RNA, 21 nt, synthetic construct
  source 1..21: mol_type = other RNA
ggatgattctaatgtgcaagg

SEQ ID NO: 91312 - RNA, 21 nt, synthetic construct
  source 1..21: mol_type = other RNA
ggatgcaacaaatgttgcaga

SEQ ID NO: 91313 - RNA, 21 nt, synthetic construct
  source 1..21: mol_type = other RNA
ggatgcaagaatggtttaaca

SEQ ID NO: 91314 - RNA, 21 nt, synthetic construct
  source 1..21: mol_type = other RNA
ggatgcacaagacagatgtgc

SEQ ID NO: 91315 - RNA, 21 nt, synthetic construct
  source 1..21: mol_type = other RNA
ggatgcagatttctttttact

SEQ ID NO: 91316 - RNA, 21 nt, synthetic construct
  source 1..21: mol_type = other RNA
ggatgcagcaaaagcaccact

SEQ ID NO: 91317 - RNA, 21 nt, synthetic construct
  source 1..21: mol_type = other RNA
ggatgcatgaggcatattatt

SEQ ID NO: 91318 - RNA, 21 nt, synthetic construct
  source 1..21: mol_type = other RNA
ggatgcattctagaaaggagg

SEQ ID NO: 91319 - RNA, 21 nt, synthetic construct
  source 1..21: mol_type = other RNA
ggatgccggtaatcacagcta

SEQ ID NO: 91320 - RNA, 21 nt, synthetic construct
  source 1..21: mol_type = other RNA
ggatgctcagggtgcgacctc

SEQ ID NO: 91321 - RNA, 21 nt, synthetic construct
  source 1..21: mol_type = other RNA
ggatgctcagtttcaaaagct

SEQ ID NO: 91322 - RNA, 21 nt, synthetic construct
  source 1..21: mol_type = other RNA
ggatgctggagtgtggcaggg

SEQ ID NO: 91323 - RNA, 21 nt, synthetic construct
  source 1..21: mol_type = other RNA
ggatgctggggacccctccct

SEQ ID NO: 91324 - RNA, 21 nt, synthetic construct
  source 1..21: mol_type = other RNA
ggatgctgtctataggcaatg

SEQ ID NO: 91325 - RNA, 21 nt, synthetic construct
  source 1..21: mol_type = other RNA
ggatgcttaaagcgctactca

SEQ ID NO: 91326 - RNA, 21 nt, synthetic construct
  source 1..21: mol_type = other RNA
ggatggcatgaaatgggttta

SEQ ID NO: 91327 - RNA, 21 nt, synthetic construct
  source 1..21: mol_type = other RNA
ggatggccagtcatgtgggga

SEQ ID NO: 91328 - RNA, 21 nt, synthetic construct
  source 1..21: mol_type = other RNA
ggatggctgaaagagaaagaa

SEQ ID NO: 91329 - RNA, 21 nt, synthetic construct
  source 1..21: mol_type = other RNA
ggatggcttgagcccaggggg

SEQ ID NO: 91330 - RNA, 21 nt, synthetic construct
  source 1..21: mol_type = other RNA
ggatgggcagactccttcccc

SEQ ID NO: 91331 - RNA, 21 nt, synthetic construct
  source 1..21: mol_type = other RNA
ggatgggcattccagagggta

SEQ ID NO: 91332 - RNA, 21 nt, synthetic construct
  source 1..21: mol_type = other RNA
ggatgggggacgacgtatgca

SEQ ID NO: 91333 - RNA, 21 nt, synthetic construct
  source 1..21: mol_type = other RNA
ggatgggtgtagggtttggca

SEQ ID NO: 91334 - RNA, 21 nt, synthetic construct
  source 1..21: mol_type = other RNA
ggatggtctcaatctcctgat

SEQ ID NO: 91335 - RNA, 21 nt, synthetic construct
  source 1..21: mol_type = other RNA
ggatggttgcacaatgttgtg

SEQ ID NO: 91336 - RNA, 21 nt, synthetic construct
  source 1..21: mol_type = other RNA
ggatggtttgattgttccagg

SEQ ID NO: 91337 - RNA, 21 nt, synthetic construct
  source 1..21: mol_type = other RNA
ggatgtagaaggatatgtttt

SEQ ID NO: 91338 - RNA, 21 nt, synthetic construct
  source 1..21: mol_type = other RNA
ggatgtcaacaaaatactagc

SEQ ID NO: 91339 - RNA, 21 nt, synthetic construct
  source 1..21: mol_type = other RNA
ggatgtcaactgaggcagagt

SEQ ID NO: 91340 - RNA, 21 nt, synthetic construct
  source 1..21: mol_type = other RNA
ggatgtccttaatgccaccga

SEQ ID NO: 91341 - RNA, 21 nt, synthetic construct
  source 1..21: mol_type = other RNA
ggatgtctttgggaaggccct

SEQ ID NO: 91342 - RNA, 21 nt, synthetic construct
  source 1..21: mol_type = other RNA
ggatgtggtgtggcatgtctg

SEQ ID NO: 91343 - RNA, 21 nt, synthetic construct
  source 1..21: mol_type = other RNA
ggatgtgtacccgtgtgtttt

SEQ ID NO: 91344 - RNA, 21 nt, synthetic construct
  source 1..21: mol_type = other RNA
ggatgtgtatgatcaaagtga

SEQ ID NO: 91345 - RNA, 21 nt, synthetic construct
  source 1..21: mol_type = other RNA
ggatgtgtgcacaacacatgc

SEQ ID NO: 91346 - RNA, 21 nt, synthetic construct
  source 1..21: mol_type = other RNA
ggatgttaattagatatgtga

SEQ ID NO: 91347 - RNA, 21 nt, synthetic construct
  source 1..21: mol_type = other RNA
ggatgttgcctactagccagt

SEQ ID NO: 91348 - RNA, 21 nt, synthetic construct
  source 1..21: mol_type = other RNA
ggatgttggtgagaacccagt

SEQ ID NO: 91349 - RNA, 21 nt, synthetic construct
  source 1..21: mol_type = other RNA
ggatgtttctacctttggcta

SEQ ID NO: 91350 - RNA, 21 nt, synthetic construct
  source 1..21: mol_type = other RNA
ggatgtttttagagagatgcc

SEQ ID NO: 91351 - RNA, 21 nt, synthetic construct
  source 1..21: mol_type = other RNA
ggattaagacactacaaaaaa

SEQ ID NO: 91352 - RNA, 21 nt, synthetic construct
  source 1..21: mol_type = other RNA
ggattaaggagatggcacata

SEQ ID NO: 91353 - RNA, 21 nt, synthetic construct
  source 1..21: mol_type = other RNA
ggattaatctttctgaactca

SEQ ID NO: 91354 - RNA, 21 nt, synthetic construct
  source 1..21: mol_type = other RNA
ggattacaatgtaaggtgcac

SEQ ID NO: 91355 - RNA, 21 nt, synthetic construct
  source 1..21: mol_type = other RNA
ggattacacacacctaccacc

SEQ ID NO: 91356 - RNA, 21 nt, synthetic construct
  source 1..21: mol_type = other RNA
ggattacaggcgcacgccatc

SEQ ID NO: 91357 - RNA, 21 nt, synthetic construct
  source 1..21: mol_type = other RNA
ggattagaaagtagattagct

SEQ ID NO: 91358 - RNA, 21 nt, synthetic construct
  source 1..21: mol_type = other RNA
ggattagcttattctttttct

SEQ ID NO: 91359 - RNA, 21 nt, synthetic construct
  source 1..21: mol_type = other RNA
ggattagtgttaattcttcct

SEQ ID NO: 91360 - RNA, 21 nt, synthetic construct
  source 1..21: mol_type = other RNA
ggattatagtggtaaggagcc

SEQ ID NO: 91361 - RNA, 21 nt, synthetic construct
  source 1..21: mol_type = other RNA
ggattatggctagaaacttgg

SEQ ID NO: 91362 - RNA, 21 nt, synthetic construct
  source 1..21: mol_type = other RNA
ggattatttggaagagagaag

SEQ ID NO: 91363 - RNA, 21 nt, synthetic construct
  source 1..21: mol_type = other RNA
ggattccaggtttacaggata

SEQ ID NO: 91364 - RNA, 21 nt, synthetic construct
  source 1..21: mol_type = other RNA
ggattcccaggtattttgttc

SEQ ID NO: 91365 - RNA, 21 nt, synthetic construct
  source 1..21: mol_type = other RNA
ggattcctccctggagaggca

SEQ ID NO: 91366 - RNA, 21 nt, synthetic construct
  source 1..21: mol_type = other RNA
ggattcctttcaaagagacct

SEQ ID NO: 91367 - RNA, 21 nt, synthetic construct
  source 1..21: mol_type = other RNA
ggattcgattaaaataacacg

SEQ ID NO: 91368 - RNA, 21 nt, synthetic construct
  source 1..21: mol_type = other RNA
ggattcgggggagagcactgg

SEQ ID NO: 91369 - RNA, 21 nt, synthetic construct
  source 1..21: mol_type = other RNA
ggattctgctactagcaagct

SEQ ID NO: 91370 - RNA, 21 nt, synthetic construct
  source 1..21: mol_type = other RNA
ggattctggccaaatccctga

SEQ ID NO: 91371 - RNA, 21 nt, synthetic construct
  source 1..21: mol_type = other RNA
ggattcttgttaagcattttc

SEQ ID NO: 91372 - RNA, 21 nt, synthetic construct
  source 1..21: mol_type = other RNA
ggattgaatggaaagaaatag

SEQ ID NO: 91373 - RNA, 21 nt, synthetic construct
  source 1..21: mol_type = other RNA
ggattgagggttagatttttc

SEQ ID NO: 91374 - RNA, 21 nt, synthetic construct
  source 1..21: mol_type = other RNA
ggattgattccagtttctctg

SEQ ID NO: 91375 - RNA, 21 nt, synthetic construct
  source 1..21: mol_type = other RNA
ggattgcctaacaccagtaag

SEQ ID NO: 91376 - RNA, 21 nt, synthetic construct
  source 1..21: mol_type = other RNA
ggattgcgattgtttcagtgt

SEQ ID NO: 91377 - RNA, 21 nt, synthetic construct
  source 1..21: mol_type = other RNA
ggattgctaaactgttcccca

SEQ ID NO: 91378 - RNA, 21 nt, synthetic construct
  source 1..21: mol_type = other RNA
ggattgctagtgtcctcaggc

SEQ ID NO: 91379 - RNA, 21 nt, synthetic construct
  source 1..21: mol_type = other RNA
ggattggaaaactaggtattt

SEQ ID NO: 91380 - RNA, 21 nt, synthetic construct
  source 1..21: mol_type = other RNA
ggattggaatgagtccagctt

SEQ ID NO: 91381 - RNA, 21 nt, synthetic construct
  source 1..21: mol_type = other RNA
ggattggagactgataaactt

SEQ ID NO: 91382 - RNA, 21 nt, synthetic construct
  source 1..21: mol_type = other RNA
ggattgggaagattggcttta

SEQ ID NO: 91383 - RNA, 21 nt, synthetic construct
  source 1..21: mol_type = other RNA
ggattgtgtgtcgagaaaaat

SEQ ID NO: 91384 - RNA, 21 nt, synthetic construct
  source 1..21: mol_type = other RNA
ggattgttcatgtctgtgtag

SEQ ID NO: 91385 - RNA, 21 nt, synthetic construct
  source 1..21: mol_type = other RNA
ggattgtttgaggctgggagt

SEQ ID NO: 91386 - RNA, 21 nt, synthetic construct
  source 1..21: mol_type = other RNA
ggatttaagagaggaagtgac

SEQ ID NO: 91387 - RNA, 21 nt, synthetic construct
  source 1..21: mol_type = other RNA
ggatttatctttctagattca

SEQ ID NO: 91388 - RNA, 21 nt, synthetic construct
  source 1..21: mol_type = other RNA
ggatttcatgaacaattttct

SEQ ID NO: 91389 - RNA, 21 nt, synthetic construct
  source 1..21: mol_type = other RNA
ggatttgagtaactaaactat

SEQ ID NO: 91390 - RNA, 21 nt, synthetic construct
  source 1..21: mol_type = other RNA
ggatttgattgggcattaatt

SEQ ID NO: 91391 - RNA, 21 nt, synthetic construct
  source 1..21: mol_type = other RNA
ggatttggccagaatcccttt

SEQ ID NO: 91392 - RNA, 21 nt, synthetic construct
  source 1..21: mol_type = other RNA
ggatttgggaaggatggccag

SEQ ID NO: 91393 - RNA, 21 nt, synthetic construct
  source 1..21: mol_type = other RNA
ggatttgtttgtgaagataca

SEQ ID NO: 91394 - RNA, 21 nt, synthetic construct
  source 1..21: mol_type = other RNA
ggattttcgtatcttttaaca

SEQ ID NO: 91395 - RNA, 21 nt, synthetic construct
  source 1..21: mol_type = other RNA
ggattttctattcattaccag

SEQ ID NO: 91396 - RNA, 21 nt, synthetic construct
  source 1..21: mol_type = other RNA
ggattttgctgccaagtcagc

SEQ ID NO: 91397 - RNA, 21 nt, synthetic construct
  source 1..21: mol_type = other RNA
ggattttggattgcgattgtt

SEQ ID NO: 91398 - RNA, 21 nt, synthetic construct
  source 1..21: mol_type = other RNA
ggatttttctgtttctgtgaa

SEQ ID NO: 91399 - RNA, 21 nt, synthetic construct
  source 1..21: mol_type = other RNA
ggatttttgtgtagaggtgaa

SEQ ID NO: 91400 - RNA, 21 nt, synthetic construct
  source 1..21: mol_type = other RNA
ggcaaaaaagtcatgacctgc

SEQ ID NO: 91401 - RNA, 21 nt, synthetic construct
  source 1..21: mol_type = other RNA
ggcaaaaaatgcagtagtaaa

SEQ ID NO: 91402 - RNA, 21 nt, synthetic construct
  source 1..21: mol_type = other RNA
ggcaaaactcctgaacaaaat

SEQ ID NO: 91403 - RNA, 21 nt, synthetic construct
  source 1..21: mol_type = other RNA
ggcaaaagatgatgaacaaag

SEQ ID NO: 91404 - RNA, 21 nt, synthetic construct
  source 1..21: mol_type = other RNA
ggcaaaatggagacatctgag

SEQ ID NO: 91405 - RNA, 21 nt, synthetic construct
  source 1..21: mol_type = other RNA
ggcaaacagactgagccagca

SEQ ID NO: 91406 - RNA, 21 nt, synthetic construct
  source 1..21: mol_type = other RNA
ggcaaacagcgccacttaaaa

SEQ ID NO: 91407 - RNA, 21 nt, synthetic construct
  source 1..21: mol_type = other RNA
ggcaaaccacacagagaacag

SEQ ID NO: 91408 - RNA, 21 nt, synthetic construct
  source 1..21: mol_type = other RNA
ggcaaacttagaatataaact

SEQ ID NO: 91409 - RNA, 21 nt, synthetic construct
  source 1..21: mol_type = other RNA
ggcaaaggaaaaaactttttt

SEQ ID NO: 91410 - RNA, 21 nt, synthetic construct
  source 1..21: mol_type = other RNA
ggcaaaggaaaaatctaaccc

SEQ ID NO: 91411 - RNA, 21 nt, synthetic construct
  source 1..21: mol_type = other RNA
ggcaaaggccgctcttgacct

SEQ ID NO: 91412 - RNA, 21 nt, synthetic construct
  source 1..21: mol_type = other RNA
ggcaaaggttgagacaagacc

SEQ ID NO: 91413 - RNA, 21 nt, synthetic construct
  source 1..21: mol_type = other RNA
ggcaaatctttagtgttgctt

SEQ ID NO: 91414 - RNA, 21 nt, synthetic construct
  source 1..21: mol_type = other RNA
ggcaaattcatagatcaccag

SEQ ID NO: 91415 - RNA, 21 nt, synthetic construct
  source 1..21: mol_type = other RNA
ggcaaattgtcagattttctt

SEQ ID NO: 91416 - RNA, 21 nt, synthetic construct
  source 1..21: mol_type = other RNA
ggcaaatttatgtgaaaagaa

SEQ ID NO: 91417 - RNA, 21 nt, synthetic construct
  source 1..21: mol_type = other RNA
ggcaacaaaggcgaagcccgc

SEQ ID NO: 91418 - RNA, 21 nt, synthetic construct
  source 1..21: mol_type = other RNA
ggcaacaatcaacaggtagct

SEQ ID NO: 91419 - RNA, 21 nt, synthetic construct
  source 1..21: mol_type = other RNA
ggcaacagagacagagaatct

SEQ ID NO: 91420 - RNA, 21 nt, synthetic construct
  source 1..21: mol_type = other RNA
ggcaacagtcattcaggtcta

SEQ ID NO: 91421 - RNA, 21 nt, synthetic construct
  source 1..21: mol_type = other RNA
ggcaacatccctatgcaataa

SEQ ID NO: 91422 - RNA, 21 nt, synthetic construct
  source 1..21: mol_type = other RNA
ggcaacattttaattccaaat

SEQ ID NO: 91423 - RNA, 21 nt, synthetic construct
  source 1..21: mol_type = other RNA
ggcaaccttgggagaaaattt

SEQ ID NO: 91424 - RNA, 21 nt, synthetic construct
  source 1..21: mol_type = other RNA
ggcaagagagcaagactcaaa

SEQ ID NO: 91425 - RNA, 21 nt, synthetic construct
  source 1..21: mol_type = other RNA
ggcaagagagcaagtccccat

SEQ ID NO: 91426 - RNA, 21 nt, synthetic construct
  source 1..21: mol_type = other RNA
ggcaaggctaacagccaaaga

SEQ ID NO: 91427 - RNA, 21 nt, synthetic construct
  source 1..21: mol_type = other RNA
ggcaagggactgtcgaagctt

SEQ ID NO: 91428 - RNA, 21 nt, synthetic construct
  source 1..21: mol_type = other RNA
ggcaaggggaatggtactgcc

SEQ ID NO: 91429 - RNA, 21 nt, synthetic construct
  source 1..21: mol_type = other RNA
ggcaagtttccattctcttaa

SEQ ID NO: 91430 - RNA, 21 nt, synthetic construct
  source 1..21: mol_type = other RNA
ggcaatactctcagaaattat

SEQ ID NO: 91431 - RNA, 21 nt, synthetic construct
  source 1..21: mol_type = other RNA
ggcaatatagtgggaccccgt

SEQ ID NO: 91432 - RNA, 21 nt, synthetic construct
  source 1..21: mol_type = other RNA
ggcaatcaaatggccttcttt

SEQ ID NO: 91433 - RNA, 21 nt, synthetic construct
  source 1..21: mol_type = other RNA
ggcaatccttccgcctcagcc

SEQ ID NO: 91434 - RNA, 21 nt, synthetic construct
  source 1..21: mol_type = other RNA
ggcaatctcagctcattacag

SEQ ID NO: 91435 - RNA, 21 nt, synthetic construct
  source 1..21: mol_type = other RNA
ggcaatgagtctgacatactg

SEQ ID NO: 91436 - RNA, 21 nt, synthetic construct
  source 1..21: mol_type = other RNA
ggcaatgctctcttcccccaa

SEQ ID NO: 91437 - RNA, 21 nt, synthetic construct
  source 1..21: mol_type = other RNA
ggcaatgtaacacagttctag

SEQ ID NO: 91438 - RNA, 21 nt, synthetic construct
  source 1..21: mol_type = other RNA
ggcaatgtagggaatagacaa

SEQ ID NO: 91439 - RNA, 21 nt, synthetic construct
  source 1..21: mol_type = other RNA
ggcaatgttgattttgaggca

SEQ ID NO: 91440 - RNA, 21 nt, synthetic construct
  source 1..21: mol_type = other RNA
ggcaattccataaatgtttgc

SEQ ID NO: 91441 - RNA, 21 nt, synthetic construct
  source 1..21: mol_type = other RNA
ggcaatttagaattctctctc

SEQ ID NO: 91442 - RNA, 21 nt, synthetic construct
  source 1..21: mol_type = other RNA
ggcacaatcatagctcactag

SEQ ID NO: 91443 - RNA, 21 nt, synthetic construct
  source 1..21: mol_type = other RNA
ggcacacgccactgcaggtgt

SEQ ID NO: 91444 - RNA, 21 nt, synthetic construct
  source 1..21: mol_type = other RNA
ggcacactccccagtggttgt

SEQ ID NO: 91445 - RNA, 21 nt, synthetic construct
  source 1..21: mol_type = other RNA
ggcacagaattattgattggc

SEQ ID NO: 91446 - RNA, 21 nt, synthetic construct
  source 1..21: mol_type = other RNA
ggcacagcactgttaactgac

SEQ ID NO: 91447 - RNA, 21 nt, synthetic construct
  source 1..21: mol_type = other RNA
ggcacagccagtcagtgatgg

SEQ ID NO: 91448 - RNA, 21 nt, synthetic construct
  source 1..21: mol_type = other RNA
ggcacagctctcatgagtcct

SEQ ID NO: 91449 - RNA, 21 nt, synthetic construct
  source 1..21: mol_type = other RNA
ggcacaggagagcgacagcta

SEQ ID NO: 91450 - RNA, 21 nt, synthetic construct
  source 1..21: mol_type = other RNA
ggcacagtctgtgcttaagga

SEQ ID NO: 91451 - RNA, 21 nt, synthetic construct
  source 1..21: mol_type = other RNA
ggcacatactgcatattgaag

SEQ ID NO: 91452 - RNA, 21 nt, synthetic construct
  source 1..21: mol_type = other RNA
ggcacattcaagcagaaatga

SEQ ID NO: 91453 - RNA, 21 nt, synthetic construct
  source 1..21: mol_type = other RNA
ggcaccgtgacagaacaaata

SEQ ID NO: 91454 - RNA, 21 nt, synthetic construct
  source 1..21: mol_type = other RNA
ggcacctaaaaggttgcttaa

SEQ ID NO: 91455 - RNA, 21 nt, synthetic construct
  source 1..21: mol_type = other RNA
ggcacctgaacccaggaggca

SEQ ID NO: 91456 - RNA, 21 nt, synthetic construct
  source 1..21: mol_type = other RNA
ggcaccttcagaagccctgca

SEQ ID NO: 91457 - RNA, 21 nt, synthetic construct
  source 1..21: mol_type = other RNA
ggcaccttccctactcactga

SEQ ID NO: 91458 - RNA, 21 nt, synthetic construct
  source 1..21: mol_type = other RNA
ggcactaacaaagggcctgtt

SEQ ID NO: 91459 - RNA, 21 nt, synthetic construct
  source 1..21: mol_type = other RNA
ggcactgaagccagtccttgt

SEQ ID NO: 91460 - RNA, 21 nt, synthetic construct
  source 1..21: mol_type = other RNA
ggcactgggagccctccagga

SEQ ID NO: 91461 - RNA, 21 nt, synthetic construct
  source 1..21: mol_type = other RNA
ggcactgggtccccggaggag

SEQ ID NO: 91462 - RNA, 21 nt, synthetic construct
  source 1..21: mol_type = other RNA
ggcactgtatggttcttaaga

SEQ ID NO: 91463 - RNA, 21 nt, synthetic construct
  source 1..21: mol_type = other RNA
ggcacttgggatgtttctacc

SEQ ID NO: 91464 - RNA, 21 nt, synthetic construct
  source 1..21: mol_type = other RNA
ggcacttggtaagctgtgagt

SEQ ID NO: 91465 - RNA, 21 nt, synthetic construct
  source 1..21: mol_type = other RNA
ggcactttcctgataaggggc

SEQ ID NO: 91466 - RNA, 21 nt, synthetic construct
  source 1..21: mol_type = other RNA
ggcagaacacactgctcttct

SEQ ID NO: 91467 - RNA, 21 nt, synthetic construct
  source 1..21: mol_type = other RNA
ggcagaaccacctgggggaga

SEQ ID NO: 91468 - RNA, 21 nt, synthetic construct
  source 1..21: mol_type = other RNA
ggcagaatgtgacctgtcctt

SEQ ID NO: 91469 - RNA, 21 nt, synthetic construct
  source 1..21: mol_type = other RNA
ggcagaattatagagggccta

SEQ ID NO: 91470 - RNA, 21 nt, synthetic construct
  source 1..21: mol_type = other RNA
ggcagactccttcccctggtc

SEQ ID NO: 91471 - RNA, 21 nt, synthetic construct
  source 1..21: mol_type = other RNA
ggcagagaactgactgaagga

SEQ ID NO: 91472 - RNA, 21 nt, synthetic construct
  source 1..21: mol_type = other RNA
ggcagagagagtaactggtcc

SEQ ID NO: 91473 - RNA, 21 nt, synthetic construct
  source 1..21: mol_type = other RNA
ggcagagagatggtgggagag

SEQ ID NO: 91474 - RNA, 21 nt, synthetic construct
  source 1..21: mol_type = other RNA
ggcagagataactgggtgtgc

SEQ ID NO: 91475 - RNA, 21 nt, synthetic construct
  source 1..21: mol_type = other RNA
ggcagagtagagaaggctttg

SEQ ID NO: 91476 - RNA, 21 nt, synthetic construct
  source 1..21: mol_type = other RNA
ggcagatcaattgaccaaaca

SEQ ID NO: 91477 - RNA, 21 nt, synthetic construct
  source 1..21: mol_type = other RNA
ggcagatcacaaggtcagaag

SEQ ID NO: 91478 - RNA, 21 nt, synthetic construct
  source 1..21: mol_type = other RNA
ggcagatcacgaggtcgagag

SEQ ID NO: 91479 - RNA, 21 nt, synthetic construct
  source 1..21: mol_type = other RNA
ggcagatgttgcggtgagcag

SEQ ID NO: 91480 - RNA, 21 nt, synthetic construct
  source 1..21: mol_type = other RNA
ggcagcaaagcaagaaaaaga

SEQ ID NO: 91481 - RNA, 21 nt, synthetic construct
  source 1..21: mol_type = other RNA
ggcagcaggggctaagtagtg

SEQ ID NO: 91482 - RNA, 21 nt, synthetic construct
  source 1..21: mol_type = other RNA
ggcagccccgcttcagttggt

SEQ ID NO: 91483 - RNA, 21 nt, synthetic construct
  source 1..21: mol_type = other RNA
ggcagcccgacctccagcgct

SEQ ID NO: 91484 - RNA, 21 nt, synthetic construct
  source 1..21: mol_type = other RNA
ggcagccttctctcttccaaa

SEQ ID NO: 91485 - RNA, 21 nt, synthetic construct
  source 1..21: mol_type = other RNA
ggcagccttggaggagccctg

SEQ ID NO: 91486 - RNA, 21 nt, synthetic construct
  source 1..21: mol_type = other RNA
ggcagcgtaactccatcttca

SEQ ID NO: 91487 - RNA, 21 nt, synthetic construct
  source 1..21: mol_type = other RNA
ggcagctaagcaccaacagat

SEQ ID NO: 91488 - RNA, 21 nt, synthetic construct
  source 1..21: mol_type = other RNA
ggcaggaaaggtggggaaggg

SEQ ID NO: 91489 - RNA, 21 nt, synthetic construct
  source 1..21: mol_type = other RNA
ggcaggactgcttgaggccac

SEQ ID NO: 91490 - RNA, 21 nt, synthetic construct
  source 1..21: mol_type = other RNA
ggcaggagaactgcctggacc

SEQ ID NO: 91491 - RNA, 21 nt, synthetic construct
  source 1..21: mol_type = other RNA
ggcaggagaatggcatgaacc

SEQ ID NO: 91492 - RNA, 21 nt, synthetic construct
  source 1..21: mol_type = other RNA
ggcaggagagtcgcttgaacc

SEQ ID NO: 91493 - RNA, 21 nt, synthetic construct
  source 1..21: mol_type = other RNA
ggcaggagcagtgtgaatagg

SEQ ID NO: 91494 - RNA, 21 nt, synthetic construct
  source 1..21: mol_type = other RNA
ggcaggagcatagcttgaacc

SEQ ID NO: 91495 - RNA, 21 nt, synthetic construct
  source 1..21: mol_type = other RNA
ggcaggaggcacctgaaccca

SEQ ID NO: 91496 - RNA, 21 nt, synthetic construct
  source 1..21: mol_type = other RNA
ggcaggaggcctcagaattaa

SEQ ID NO: 91497 - RNA, 21 nt, synthetic construct
  source 1..21: mol_type = other RNA
ggcaggcaccttcagaagccc

SEQ ID NO: 91498 - RNA, 21 nt, synthetic construct
  source 1..21: mol_type = other RNA
ggcaggcagatcacgaggtcg

SEQ ID NO: 91499 - RNA, 21 nt, synthetic construct
  source 1..21: mol_type = other RNA
ggcaggcattgtgctcagtgg

SEQ ID NO: 91500 - RNA, 21 nt, synthetic construct
  source 1..21: mol_type = other RNA
ggcagggagagagaaacttta

SEQ ID NO: 91501 - RNA, 21 nt, synthetic construct
  source 1..21: mol_type = other RNA
ggcagggatgctgcgagcccc

SEQ ID NO: 91502 - RNA, 21 nt, synthetic construct
  source 1..21: mol_type = other RNA
ggcagggcttggtggcccaca

SEQ ID NO: 91503 - RNA, 21 nt, synthetic construct
  source 1..21: mol_type = other RNA
ggcaggggctgcatcatggtg

SEQ ID NO: 91504 - RNA, 21 nt, synthetic construct
  source 1..21: mol_type = other RNA
ggcagggtaggaaggcggtgg

SEQ ID NO: 91505 - RNA, 21 nt, synthetic construct
  source 1..21: mol_type = other RNA
ggcagggtggagtccaaccaa

SEQ ID NO: 91506 - RNA, 21 nt, synthetic construct
  source 1..21: mol_type = other RNA
ggcaggtcacctagcctctct

SEQ ID NO: 91507 - RNA, 21 nt, synthetic construct
  source 1..21: mol_type = other RNA
ggcaggtggatatctgaggtc

SEQ ID NO: 91508 - RNA, 21 nt, synthetic construct
  source 1..21: mol_type = other RNA
ggcaggtggatcaggagattg

SEQ ID NO: 91509 - RNA, 21 nt, synthetic construct
  source 1..21: mol_type = other RNA
ggcaggtttcaagtgaaccaa

SEQ ID NO: 91510 - RNA, 21 nt, synthetic construct
  source 1..21: mol_type = other RNA
ggcagtaccattccccttgcc

SEQ ID NO: 91511 - RNA, 21 nt, synthetic construct
  source 1..21: mol_type = other RNA
ggcagtcctctactttcacat

SEQ ID NO: 91512 - RNA, 21 nt, synthetic construct
  source 1..21: mol_type = other RNA
ggcagtcctctcactccaaag

SEQ ID NO: 91513 - RNA, 21 nt, synthetic construct
  source 1..21: mol_type = other RNA
ggcagtctaggaaaagacttg

SEQ ID NO: 91514 - RNA, 21 nt, synthetic construct
  source 1..21: mol_type = other RNA
ggcagtctagtccatgaagaa

SEQ ID NO: 91515 - RNA, 21 nt, synthetic construct
  source 1..21: mol_type = other RNA
ggcagttattaagagtgtgct

SEQ ID NO: 91516 - RNA, 21 nt, synthetic construct
  source 1..21: mol_type = other RNA
ggcagttgagttttcaacctt

SEQ ID NO: 91517 - RNA, 21 nt, synthetic construct
  source 1..21: mol_type = other RNA
ggcagtttaagaattaaaaac

SEQ ID NO: 91518 - RNA, 21 nt, synthetic construct
  source 1..21: mol_type = other RNA
ggcataaagacagacatttgg

SEQ ID NO: 91519 - RNA, 21 nt, synthetic construct
  source 1..21: mol_type = other RNA
ggcataacatctatgaagtaa

SEQ ID NO: 91520 - RNA, 21 nt, synthetic construct
  source 1..21: mol_type = other RNA
ggcataagccaccgcactcag

SEQ ID NO: 91521 - RNA, 21 nt, synthetic construct
  source 1..21: mol_type = other RNA
ggcatacaactgctcataata

SEQ ID NO: 91522 - RNA, 21 nt, synthetic construct
  source 1..21: mol_type = other RNA
ggcatacaggagttccgattt

SEQ ID NO: 91523 - RNA, 21 nt, synthetic construct
  source 1..21: mol_type = other RNA
ggcatagggccttctacttta

SEQ ID NO: 91524 - RNA, 21 nt, synthetic construct
  source 1..21: mol_type = other RNA
ggcatataaactggaaggaaa

SEQ ID NO: 91525 - RNA, 21 nt, synthetic construct
  source 1..21: mol_type = other RNA
ggcatataataagcagaattc

SEQ ID NO: 91526 - RNA, 21 nt, synthetic construct
  source 1..21: mol_type = other RNA
ggcatatgtcactgtaagaat

SEQ ID NO: 91527 - RNA, 21 nt, synthetic construct
  source 1..21: mol_type = other RNA
ggcatattattgtaacttgaa

SEQ ID NO: 91528 - RNA, 21 nt, synthetic construct
  source 1..21: mol_type = other RNA
ggcatcaaagctaccctttct

SEQ ID NO: 91529 - RNA, 21 nt, synthetic construct
  source 1..21: mol_type = other RNA
ggcatcatactggaaggactc

SEQ ID NO: 91530 - RNA, 21 nt, synthetic construct
  source 1..21: mol_type = other RNA
ggcatcattcataaacacaga

SEQ ID NO: 91531 - RNA, 21 nt, synthetic construct
  source 1..21: mol_type = other RNA
ggcatcggggcctacagtggt

SEQ ID NO: 91532 - RNA, 21 nt, synthetic construct
  source 1..21: mol_type = other RNA
ggcatctagttaccactagca

SEQ ID NO: 91533 - RNA, 21 nt, synthetic construct
  source 1..21: mol_type = other RNA
ggcatctatttccccattaga

SEQ ID NO: 91534 - RNA, 21 nt, synthetic construct
  source 1..21: mol_type = other RNA
ggcatctctcccttcctgttc

SEQ ID NO: 91535 - RNA, 21 nt, synthetic construct
  source 1..21: mol_type = other RNA
ggcatctctctaaaaacatcc

SEQ ID NO: 91536 - RNA, 21 nt, synthetic construct
  source 1..21: mol_type = other RNA
ggcatctttaagattttttgt

SEQ ID NO: 91537 - RNA, 21 nt, synthetic construct
  source 1..21: mol_type = other RNA
ggcatctttgttacagcagct

SEQ ID NO: 91538 - RNA, 21 nt, synthetic construct
  source 1..21: mol_type = other RNA
ggcatgaaatgggtttaaaag

SEQ ID NO: 91539 - RNA, 21 nt, synthetic construct
  source 1..21: mol_type = other RNA
ggcatgaaattcttgggtgaa

SEQ ID NO: 91540 - RNA, 21 nt, synthetic construct
  source 1..21: mol_type = other RNA
ggcatgaacccaccaggaggc

SEQ ID NO: 91541 - RNA, 21 nt, synthetic construct
  source 1..21: mol_type = other RNA
ggcatgagccacagggcccag

SEQ ID NO: 91542 - RNA, 21 nt, synthetic construct
  source 1..21: mol_type = other RNA
ggcatgagccactgcgggccc

SEQ ID NO: 91543 - RNA, 21 nt, synthetic construct
  source 1..21: mol_type = other RNA
ggcatgagtcgccatacctgg

SEQ ID NO: 91544 - RNA, 21 nt, synthetic construct
  source 1..21: mol_type = other RNA
ggcatgatctcacgtcaccgc

SEQ ID NO: 91545 - RNA, 21 nt, synthetic construct
  source 1..21: mol_type = other RNA
ggcatgatggctcaacgcctg

SEQ ID NO: 91546 - RNA, 21 nt, synthetic construct
  source 1..21: mol_type = other RNA
ggcatgcacggacttggcaca

SEQ ID NO: 91547 - RNA, 21 nt, synthetic construct
  source 1..21: mol_type = other RNA
ggcatgccgggacaagagtct

SEQ ID NO: 91548 - RNA, 21 nt, synthetic construct
  source 1..21: mol_type = other RNA
ggcatgcctctcccaccatct

SEQ ID NO: 91549 - RNA, 21 nt, synthetic construct
  source 1..21: mol_type = other RNA
ggcatgcgccatcacacccag

SEQ ID NO: 91550 - RNA, 21 nt, synthetic construct
  source 1..21: mol_type = other RNA
ggcatgctaactgcagaggtc

SEQ ID NO: 91551 - RNA, 21 nt, synthetic construct
  source 1..21: mol_type = other RNA
ggcatgggggcgcgtgcctat

SEQ ID NO: 91552 - RNA, 21 nt, synthetic construct
  source 1..21: mol_type = other RNA
ggcatgggtccaagacaggaa

SEQ ID NO: 91553 - RNA, 21 nt, synthetic construct
  source 1..21: mol_type = other RNA
ggcatgtctgtagttacaact

SEQ ID NO: 91554 - RNA, 21 nt, synthetic construct
  source 1..21: mol_type = other RNA
ggcatgttggatagtttctca

SEQ ID NO: 91555 - RNA, 21 nt, synthetic construct
  source 1..21: mol_type = other RNA
ggcattaaggacatccacaac

SEQ ID NO: 91556 - RNA, 21 nt, synthetic construct
  source 1..21: mol_type = other RNA
ggcattaattgagagctttct

SEQ ID NO: 91557 - RNA, 21 nt, synthetic construct
  source 1..21: mol_type = other RNA
ggcattagaagttaaattgat

SEQ ID NO: 91558 - RNA, 21 nt, synthetic construct
  source 1..21: mol_type = other RNA
ggcattagtgaattcacagta

SEQ ID NO: 91559 - RNA, 21 nt, synthetic construct
  source 1..21: mol_type = other RNA
ggcattccagagggtaacgtg

SEQ ID NO: 91560 - RNA, 21 nt, synthetic construct
  source 1..21: mol_type = other RNA
ggcattccctgtctgggaagt

SEQ ID NO: 91561 - RNA, 21 nt, synthetic construct
  source 1..21: mol_type = other RNA
ggcattccgtggaaggccttc

SEQ ID NO: 91562 - RNA, 21 nt, synthetic construct
  source 1..21: mol_type = other RNA
ggcattgtcccgggggagggc

SEQ ID NO: 91563 - RNA, 21 nt, synthetic construct
  source 1..21: mol_type = other RNA
ggcattgtgctcagtggttct

SEQ ID NO: 91564 - RNA, 21 nt, synthetic construct
  source 1..21: mol_type = other RNA
ggcatttaaaagaacctctgg

SEQ ID NO: 91565 - RNA, 21 nt, synthetic construct
  source 1..21: mol_type = other RNA
ggcatttcttacacattaggc

SEQ ID NO: 91566 - RNA, 21 nt, synthetic construct
  source 1..21: mol_type = other RNA
ggcatttgagggttagaagac

SEQ ID NO: 91567 - RNA, 21 nt, synthetic construct
  source 1..21: mol_type = other RNA
ggcattttcaaggtagaagta

SEQ ID NO: 91568 - RNA, 21 nt, synthetic construct
  source 1..21: mol_type = other RNA
ggccaaagacagatcttatgg

SEQ ID NO: 91569 - RNA, 21 nt, synthetic construct
  source 1..21: mol_type = other RNA
ggccaaagacttcaacggaca

SEQ ID NO: 91570 - RNA, 21 nt, synthetic construct
  source 1..21: mol_type = other RNA
ggccaaatatccatgttttaa

SEQ ID NO: 91571 - RNA, 21 nt, synthetic construct
  source 1..21: mol_type = other RNA
ggccaaatccctgatcaagtt

SEQ ID NO: 91572 - RNA, 21 nt, synthetic construct
  source 1..21: mol_type = other RNA
ggccaaatgaaaggcgtcggg

SEQ ID NO: 91573 - RNA, 21 nt, synthetic construct
  source 1..21: mol_type = other RNA
ggccaacagggccactgagag

SEQ ID NO: 91574 - RNA, 21 nt, synthetic construct
  source 1..21: mol_type = other RNA
ggccaacatcgtaaaacctca

SEQ ID NO: 91575 - RNA, 21 nt, synthetic construct
  source 1..21: mol_type = other RNA
ggccaaccattactcttctac

SEQ ID NO: 91576 - RNA, 21 nt, synthetic construct
  source 1..21: mol_type = other RNA
ggccaactgtcctctcttgtt

SEQ ID NO: 91577 - RNA, 21 nt, synthetic construct
  source 1..21: mol_type = other RNA
ggccaacttccagcaagactt

SEQ ID NO: 91578 - RNA, 21 nt, synthetic construct
  source 1..21: mol_type = other RNA
ggccaagagttgctgacttcc

SEQ ID NO: 91579 - RNA, 21 nt, synthetic construct
  source 1..21: mol_type = other RNA
ggccaagatctgtttttcaaa

SEQ ID NO: 91580 - RNA, 21 nt, synthetic construct
  source 1..21: mol_type = other RNA
ggccaaggcaggactgcttga

SEQ ID NO: 91581 - RNA, 21 nt, synthetic construct
  source 1..21: mol_type = other RNA
ggccacaaagtccccacatga

SEQ ID NO: 91582 - RNA, 21 nt, synthetic construct
  source 1..21: mol_type = other RNA
ggccacagcagggctcctcca

SEQ ID NO: 91583 - RNA, 21 nt, synthetic construct
  source 1..21: mol_type = other RNA
ggccacatgcttccaaaagca

SEQ ID NO: 91584 - RNA, 21 nt, synthetic construct
  source 1..21: mol_type = other RNA
ggccaccaagccctgccttaa

SEQ ID NO: 91585 - RNA, 21 nt, synthetic construct
  source 1..21: mol_type = other RNA
ggccactctcatctaaattaa

SEQ ID NO: 91586 - RNA, 21 nt, synthetic construct
  source 1..21: mol_type = other RNA
ggccactgagagctcaggcca

SEQ ID NO: 91587 - RNA, 21 nt, synthetic construct
  source 1..21: mol_type = other RNA
ggccactgattgagtatctgg

SEQ ID NO: 91588 - RNA, 21 nt, synthetic construct
  source 1..21: mol_type = other RNA
ggccactggaaaccttttgta

SEQ ID NO: 91589 - RNA, 21 nt, synthetic construct
  source 1..21: mol_type = other RNA
ggccagaatccctttcgctaa

SEQ ID NO: 91590 - RNA, 21 nt, synthetic construct
  source 1..21: mol_type = other RNA
ggccagacattttatttatac

SEQ ID NO: 91591 - RNA, 21 nt, synthetic construct
  source 1..21: mol_type = other RNA
ggccagaggagggatgcattc

SEQ ID NO: 91592 - RNA, 21 nt, synthetic construct
  source 1..21: mol_type = other RNA
ggccagagggaatctaggaaa

SEQ ID NO: 91593 - RNA, 21 nt, synthetic construct
  source 1..21: mol_type = other RNA
ggccagatatccataaggaaa

SEQ ID NO: 91594 - RNA, 21 nt, synthetic construct
  source 1..21: mol_type = other RNA
ggccagcattacttaggcagt

SEQ ID NO: 91595 - RNA, 21 nt, synthetic construct
  source 1..21: mol_type = other RNA
ggccaggaggaggagggtgca

SEQ ID NO: 91596 - RNA, 21 nt, synthetic construct
  source 1..21: mol_type = other RNA
ggccaggctggttccaaactt

SEQ ID NO: 91597 - RNA, 21 nt, synthetic construct
  source 1..21: mol_type = other RNA
ggccagtatctcctttccttc

SEQ ID NO: 91598 - RNA, 21 nt, synthetic construct
  source 1..21: mol_type = other RNA
ggccagtcatgtggggacttt

SEQ ID NO: 91599 - RNA, 21 nt, synthetic construct
  source 1..21: mol_type = other RNA
ggccagtccctagtgtctcca

SEQ ID NO: 91600 - RNA, 21 nt, synthetic construct
  source 1..21: mol_type = other RNA
ggccagtgaccagtgtgatgg

SEQ ID NO: 91601 - RNA, 21 nt, synthetic construct
  source 1..21: mol_type = other RNA
ggccagtgagtgatgaaaaga

SEQ ID NO: 91602 - RNA, 21 nt, synthetic construct
  source 1..21: mol_type = other RNA
ggccagtgagttcaaatgtta

SEQ ID NO: 91603 - RNA, 21 nt, synthetic construct
  source 1..21: mol_type = other RNA
ggccagttgagagagaattct

SEQ ID NO: 91604 - RNA, 21 nt, synthetic construct
  source 1..21: mol_type = other RNA
ggccataaatcaaggtacaat

SEQ ID NO: 91605 - RNA, 21 nt, synthetic construct
  source 1..21: mol_type = other RNA
ggccatccttcccaaatccag

SEQ ID NO: 91606 - RNA, 21 nt, synthetic construct
  source 1..21: mol_type = other RNA
ggccatctgaattcaagttac

SEQ ID NO: 91607 - RNA, 21 nt, synthetic construct
  source 1..21: mol_type = other RNA
ggccatcttcatttctaagcc

SEQ ID NO: 91608 - RNA, 21 nt, synthetic construct
  source 1..21: mol_type = other RNA
ggccatgttttatttcttgac

SEQ ID NO: 91609 - RNA, 21 nt, synthetic construct
  source 1..21: mol_type = other RNA
ggccattctgctatgaaatgt

SEQ ID NO: 91610 - RNA, 21 nt, synthetic construct
  source 1..21: mol_type = other RNA
ggccatttcatttctgttttt

SEQ ID NO: 91611 - RNA, 21 nt, synthetic construct
  source 1..21: mol_type = other RNA
ggccatttgattgccagtttt

SEQ ID NO: 91612 - RNA, 21 nt, synthetic construct
  source 1..21: mol_type = other RNA
ggccattttcttttaaatgta

SEQ ID NO: 91613 - RNA, 21 nt, synthetic construct
  source 1..21: mol_type = other RNA
ggcccaaaaagtttttaaaaa

SEQ ID NO: 91614 - RNA, 21 nt, synthetic construct
  source 1..21: mol_type = other RNA
ggcccaacatgctcttaagta

SEQ ID NO: 91615 - RNA, 21 nt, synthetic construct
  source 1..21: mol_type = other RNA
ggcccacacctgcaatcacag

SEQ ID NO: 91616 - RNA, 21 nt, synthetic construct
  source 1..21: mol_type = other RNA
ggcccaccatgatgcagcccc

SEQ ID NO: 91617 - RNA, 21 nt, synthetic construct
  source 1..21: mol_type = other RNA
ggcccaccctgctccagtatg

SEQ ID NO: 91618 - RNA, 21 nt, synthetic construct
  source 1..21: mol_type = other RNA
ggcccactctccccaagtaaa

SEQ ID NO: 91619 - RNA, 21 nt, synthetic construct
  source 1..21: mol_type = other RNA
ggcccagattccttttttatg

SEQ ID NO: 91620 - RNA, 21 nt, synthetic construct
  source 1..21: mol_type = other RNA
ggcccagcagaaggtgaggga

SEQ ID NO: 91621 - RNA, 21 nt, synthetic construct
  source 1..21: mol_type = other RNA
ggcccagccatcccattactc

SEQ ID NO: 91622 - RNA, 21 nt, synthetic construct
  source 1..21: mol_type = other RNA
ggcccagcctcaacagcactt

SEQ ID NO: 91623 - RNA, 21 nt, synthetic construct
  source 1..21: mol_type = other RNA
ggcccagctcttttgtgtctt

SEQ ID NO: 91624 - RNA, 21 nt, synthetic construct
  source 1..21: mol_type = other RNA
ggcccatatccttttatgtgc

SEQ ID NO: 91625 - RNA, 21 nt, synthetic construct
  source 1..21: mol_type = other RNA
ggcccatgacatgtgttttat

SEQ ID NO: 91626 - RNA, 21 nt, synthetic construct
  source 1..21: mol_type = other RNA
ggcccattttcgaattagatt

SEQ ID NO: 91627 - RNA, 21 nt, synthetic construct
  source 1..21: mol_type = other RNA
ggccccaaaattaccccattc

SEQ ID NO: 91628 - RNA, 21 nt, synthetic construct
  source 1..21: mol_type = other RNA
ggccccaggggacatagatga

SEQ ID NO: 91629 - RNA, 21 nt, synthetic construct
  source 1..21: mol_type = other RNA
ggcccccctgaaaaatgagaa

SEQ ID NO: 91630 - RNA, 21 nt, synthetic construct
  source 1..21: mol_type = other RNA
ggccccgatgccatgtgtttt

SEQ ID NO: 91631 - RNA, 21 nt, synthetic construct
  source 1..21: mol_type = other RNA
ggcccctccatggaaactaca

SEQ ID NO: 91632 - RNA, 21 nt, synthetic construct
  source 1..21: mol_type = other RNA
ggccccttgaaagatcattta

SEQ ID NO: 91633 - RNA, 21 nt, synthetic construct
  source 1..21: mol_type = other RNA
ggcccctttcaagattgttta

SEQ ID NO: 91634 - RNA, 21 nt, synthetic construct
  source 1..21: mol_type = other RNA
ggcccgcagtggctcatgcct

SEQ ID NO: 91635 - RNA, 21 nt, synthetic construct
  source 1..21: mol_type = other RNA
ggcccggggcagagaactgac

SEQ ID NO: 91636 - RNA, 21 nt, synthetic construct
  source 1..21: mol_type = other RNA
ggcccgttatttttatcataa

SEQ ID NO: 91637 - RNA, 21 nt, synthetic construct
  source 1..21: mol_type = other RNA
ggccctaaccccagagattgt

SEQ ID NO: 91638 - RNA, 21 nt, synthetic construct
  source 1..21: mol_type = other RNA
ggccctatgccttcagtatga

SEQ ID NO: 91639 - RNA, 21 nt, synthetic construct
  source 1..21: mol_type = other RNA
ggccctattcaacctataaga

SEQ ID NO: 91640 - RNA, 21 nt, synthetic construct
  source 1..21: mol_type = other RNA
ggccctccatttccctgcttc

SEQ ID NO: 91641 - RNA, 21 nt, synthetic construct
  source 1..21: mol_type = other RNA
ggccctctataattctgcctt

SEQ ID NO: 91642 - RNA, 21 nt, synthetic construct
  source 1..21: mol_type = other RNA
ggccctgagaagtcaaagcct

SEQ ID NO: 91643 - RNA, 21 nt, synthetic construct
  source 1..21: mol_type = other RNA
ggccctgattgagattagcga

SEQ ID NO: 91644 - RNA, 21 nt, synthetic construct
  source 1..21: mol_type = other RNA
ggccctgatttaaagtaggtt

SEQ ID NO: 91645 - RNA, 21 nt, synthetic construct
  source 1..21: mol_type = other RNA
ggccctgccgcttcgcctttc

SEQ ID NO: 91646 - RNA, 21 nt, synthetic construct
  source 1..21: mol_type = other RNA
ggccctgcgattggttggact

SEQ ID NO: 91647 - RNA, 21 nt, synthetic construct
  source 1..21: mol_type = other RNA
ggccctggtgctttctatctc

SEQ ID NO: 91648 - RNA, 21 nt, synthetic construct
  source 1..21: mol_type = other RNA
ggccctgttggcctggacaca

SEQ ID NO: 91649 - RNA, 21 nt, synthetic construct
  source 1..21: mol_type = other RNA
ggcccttaacttcacctctac

SEQ ID NO: 91650 - RNA, 21 nt, synthetic construct
  source 1..21: mol_type = other RNA
ggccctttgttagtgccttca

SEQ ID NO: 91651 - RNA, 21 nt, synthetic construct
  source 1..21: mol_type = other RNA
ggccgaatgtggtggtatgca

SEQ ID NO: 91652 - RNA, 21 nt, synthetic construct
  source 1..21: mol_type = other RNA
ggccgagaaatcggaactcct

SEQ ID NO: 91653 - RNA, 21 nt, synthetic construct
  source 1..21: mol_type = other RNA
ggccgaggcaggtggatcagg

SEQ ID NO: 91654 - RNA, 21 nt, synthetic construct
  source 1..21: mol_type = other RNA
ggccgaggccagtccctagtg

SEQ ID NO: 91655 - RNA, 21 nt, synthetic construct
  source 1..21: mol_type = other RNA
ggccgagggagacggcgagct

SEQ ID NO: 91656 - RNA, 21 nt, synthetic construct
  source 1..21: mol_type = other RNA
ggccgagggttgaacatcacc

SEQ ID NO: 91657 - RNA, 21 nt, synthetic construct
  source 1..21: mol_type = other RNA
ggccgatgcctgtgcttttct

SEQ ID NO: 91658 - RNA, 21 nt, synthetic construct
  source 1..21: mol_type = other RNA
ggccgcagtgagccatggctg

SEQ ID NO: 91659 - RNA, 21 nt, synthetic construct
  source 1..21: mol_type = other RNA
ggccgcccctggagaaagccc

SEQ ID NO: 91660 - RNA, 21 nt, synthetic construct
  source 1..21: mol_type = other RNA
ggccgcgtccacctggcaaca

SEQ ID NO: 91661 - RNA, 21 nt, synthetic construct
  source 1..21: mol_type = other RNA
ggccgctcttgaccttgtgca

SEQ ID NO: 91662 - RNA, 21 nt, synthetic construct
  source 1..21: mol_type = other RNA
ggccggaggattgcttgagtg

SEQ ID NO: 91663 - RNA, 21 nt, synthetic construct
  source 1..21: mol_type = other RNA
ggccgggatttacttctatat

SEQ ID NO: 91664 - RNA, 21 nt, synthetic construct
  source 1..21: mol_type = other RNA
ggccgtccctattttctacag

SEQ ID NO: 91665 - RNA, 21 nt, synthetic construct
  source 1..21: mol_type = other RNA
ggcctaaataaaacacatgtc

SEQ ID NO: 91666 - RNA, 21 nt, synthetic construct
  source 1..21: mol_type = other RNA
ggcctaaatcaggatgtcttt

SEQ ID NO: 91667 - RNA, 21 nt, synthetic construct
  source 1..21: mol_type = other RNA
ggcctaagatggaaagtggac

SEQ ID NO: 91668 - RNA, 21 nt, synthetic construct
  source 1..21: mol_type = other RNA
ggcctacagtggttccatttg

SEQ ID NO: 91669 - RNA, 21 nt, synthetic construct
  source 1..21: mol_type = other RNA
ggcctagaaatcatacacgag

SEQ ID NO: 91670 - RNA, 21 nt, synthetic construct
  source 1..21: mol_type = other RNA
ggcctaggtgtgataactgat

SEQ ID NO: 91671 - RNA, 21 nt, synthetic construct
  source 1..21: mol_type = other RNA
ggcctattttaggctctgtgg

SEQ ID NO: 91672 - RNA, 21 nt, synthetic construct
  source 1..21: mol_type = other RNA
ggcctcaaatttcatttactg

SEQ ID NO: 91673 - RNA, 21 nt, synthetic construct
  source 1..21: mol_type = other RNA
ggcctcagaattaatataaga

SEQ ID NO: 91674 - RNA, 21 nt, synthetic construct
  source 1..21: mol_type = other RNA
ggcctcagcatgtcttcagag

SEQ ID NO: 91675 - RNA, 21 nt, synthetic construct
  source 1..21: mol_type = other RNA
ggcctcagcctcccgagtagt

SEQ ID NO: 91676 - RNA, 21 nt, synthetic construct
  source 1..21: mol_type = other RNA
ggcctcatgtattttcctaac

SEQ ID NO: 91677 - RNA, 21 nt, synthetic construct
  source 1..21: mol_type = other RNA
ggcctccccaagtgctgtgat

SEQ ID NO: 91678 - RNA, 21 nt, synthetic construct
  source 1..21: mol_type = other RNA
ggcctccctcactaagtcaga

SEQ ID NO: 91679 - RNA, 21 nt, synthetic construct
  source 1..21: mol_type = other RNA
ggcctcctgccttcctgacct

SEQ ID NO: 91680 - RNA, 21 nt, synthetic construct
  source 1..21: mol_type = other RNA
ggcctcgctcttggcttttgg

SEQ ID NO: 91681 - RNA, 21 nt, synthetic construct
  source 1..21: mol_type = other RNA
ggcctcggccaaccattactc

SEQ ID NO: 91682 - RNA, 21 nt, synthetic construct
  source 1..21: mol_type = other RNA
ggcctctactgactccctttt

SEQ ID NO: 91683 - RNA, 21 nt, synthetic construct
  source 1..21: mol_type = other RNA
ggcctctccccttgacgaagt

SEQ ID NO: 91684 - RNA, 21 nt, synthetic construct
  source 1..21: mol_type = other RNA
ggcctctgaagacatgctgag

SEQ ID NO: 91685 - RNA, 21 nt, synthetic construct
  source 1..21: mol_type = other RNA
ggcctcttcccttgtgcacct

SEQ ID NO: 91686 - RNA, 21 nt, synthetic construct
  source 1..21: mol_type = other RNA
ggcctgagccgtcggtatgtt

SEQ ID NO: 91687 - RNA, 21 nt, synthetic construct
  source 1..21: mol_type = other RNA
ggcctgagctctcagtggccc

SEQ ID NO: 91688 - RNA, 21 nt, synthetic construct
  source 1..21: mol_type = other RNA
ggcctgatagctgtggaagca

SEQ ID NO: 91689 - RNA, 21 nt, synthetic construct
  source 1..21: mol_type = other RNA
ggcctgcaccatttattgtca

SEQ ID NO: 91690 - RNA, 21 nt, synthetic construct
  source 1..21: mol_type = other RNA
ggcctgcttcattccgcgttt

SEQ ID NO: 91691 - RNA, 21 nt, synthetic construct
  source 1..21: mol_type = other RNA
ggcctgcttttggaagcatgt

SEQ ID NO: 91692 - RNA, 21 nt, synthetic construct
  source 1..21: mol_type = other RNA
ggcctggaacaggccctttgt

SEQ ID NO: 91693 - RNA, 21 nt, synthetic construct
  source 1..21: mol_type = other RNA
ggcctggacaacagtgtgaga

SEQ ID NO: 91694 - RNA, 21 nt, synthetic construct
  source 1..21: mol_type = other RNA
ggcctggacacacacagtcct

SEQ ID NO: 91695 - RNA, 21 nt, synthetic construct
  source 1..21: mol_type = other RNA
ggcctggttagggagactttc

SEQ ID NO: 91696 - RNA, 21 nt, synthetic construct
  source 1..21: mol_type = other RNA
ggcctgttccaggcctcgctc

SEQ ID NO: 91697 - RNA, 21 nt, synthetic construct
  source 1..21: mol_type = other RNA
ggcctgttgtgaggattcgat

SEQ ID NO: 91698 - RNA, 21 nt, synthetic construct
  source 1..21: mol_type = other RNA
ggccttccacctgctctttat

SEQ ID NO: 91699 - RNA, 21 nt, synthetic construct
  source 1..21: mol_type = other RNA
ggccttccacggaatgcccct

SEQ ID NO: 91700 - RNA, 21 nt, synthetic construct
  source 1..21: mol_type = other RNA
ggccttcccaaagacatcctg

SEQ ID NO: 91701 - RNA, 21 nt, synthetic construct
  source 1..21: mol_type = other RNA
ggccttcgaggcatctagtta

SEQ ID NO: 91702 - RNA, 21 nt, synthetic construct
  source 1..21: mol_type = other RNA
ggccttctactttaataaatg

SEQ ID NO: 91703 - RNA, 21 nt, synthetic construct
  source 1..21: mol_type = other RNA
ggccttctatatttttacatt

SEQ ID NO: 91704 - RNA, 21 nt, synthetic construct
  source 1..21: mol_type = other RNA
ggccttctcctccaacccatt

SEQ ID NO: 91705 - RNA, 21 nt, synthetic construct
  source 1..21: mol_type = other RNA
ggccttctgaggagctgagac

SEQ ID NO: 91706 - RNA, 21 nt, synthetic construct
  source 1..21: mol_type = other RNA
ggccttctttctttcaaatgt

SEQ ID NO: 91707 - RNA, 21 nt, synthetic construct
  source 1..21: mol_type = other RNA
ggccttgaggtgagacagacc

SEQ ID NO: 91708 - RNA, 21 nt, synthetic construct
  source 1..21: mol_type = other RNA
ggccttgcaagccacattagc

SEQ ID NO: 91709 - RNA, 21 nt, synthetic construct
  source 1..21: mol_type = other RNA
ggcctttaatcacctcaagtg

SEQ ID NO: 91710 - RNA, 21 nt, synthetic construct
  source 1..21: mol_type = other RNA
ggcctttctgtttgtttgttt

SEQ ID NO: 91711 - RNA, 21 nt, synthetic construct
  source 1..21: mol_type = other RNA
ggcctttgcctctccagggag

SEQ ID NO: 91712 - RNA, 21 nt, synthetic construct
  source 1..21: mol_type = other RNA
ggccttttgtcaagctatcag

SEQ ID NO: 91713 - RNA, 21 nt, synthetic construct
  source 1..21: mol_type = other RNA
ggcgaaatatctccctcacag

SEQ ID NO: 91714 - RNA, 21 nt, synthetic construct
  source 1..21: mol_type = other RNA
ggcgaaatgtgaacagacaga

SEQ ID NO: 91715 - RNA, 21 nt, synthetic construct
  source 1..21: mol_type = other RNA
ggcgacaagagcagaactcca

SEQ ID NO: 91716 - RNA, 21 nt, synthetic construct
  source 1..21: mol_type = other RNA
ggcgacagagtgaaactctgg

SEQ ID NO: 91717 - RNA, 21 nt, synthetic construct
  source 1..21: mol_type = other RNA
ggcgactcatgcctgtaattc

SEQ ID NO: 91718 - RNA, 21 nt, synthetic construct
  source 1..21: mol_type = other RNA
ggcgagatggcgtgcgcctgt

SEQ ID NO: 91719 - RNA, 21 nt, synthetic construct
  source 1..21: mol_type = other RNA
ggcgagcttgatctttacttc

SEQ ID NO: 91720 - RNA, 21 nt, synthetic construct
  source 1..21: mol_type = other RNA
ggcgatcttggctcaccacaa

SEQ ID NO: 91721 - RNA, 21 nt, synthetic construct
  source 1..21: mol_type = other RNA
ggcgcacgccatctcgcccag

SEQ ID NO: 91722 - RNA, 21 nt, synthetic construct
  source 1..21: mol_type = other RNA
ggcgcagacacaccatgacag

SEQ ID NO: 91723 - RNA, 21 nt, synthetic construct
  source 1..21: mol_type = other RNA
ggcgcagccatggctcactgc

SEQ ID NO: 91724 - RNA, 21 nt, synthetic construct
  source 1..21: mol_type = other RNA
ggcgcagtgcttagcgctgga

SEQ ID NO: 91725 - RNA, 21 nt, synthetic construct
  source 1..21: mol_type = other RNA
ggcgcctgcattgcatttact

SEQ ID NO: 91726 - RNA, 21 nt, synthetic construct
  source 1..21: mol_type = other RNA
ggcgcctggacaggatcccgg

SEQ ID NO: 91727 - RNA, 21 nt, synthetic construct
  source 1..21: mol_type = other RNA
ggcgcgtgcctatggtcctag

SEQ ID NO: 91728 - RNA, 21 nt, synthetic construct
  source 1..21: mol_type = other RNA
ggcgcgtgcctgcaatcgcag

SEQ ID NO: 91729 - RNA, 21 nt, synthetic construct
  source 1..21: mol_type = other RNA
ggcgctccctctgtgtgcatg

SEQ ID NO: 91730 - RNA, 21 nt, synthetic construct
  source 1..21: mol_type = other RNA
ggcgctgtttgcctgcgtccg

SEQ ID NO: 91731 - RNA, 21 nt, synthetic construct
  source 1..21: mol_type = other RNA
ggcggaaggattgcctaacac

SEQ ID NO: 91732 - RNA, 21 nt, synthetic construct
  source 1..21: mol_type = other RNA
ggcggaagttgcagtgagccc

SEQ ID NO: 91733 - RNA, 21 nt, synthetic construct
  source 1..21: mol_type = other RNA
ggcggaatgcagtggcgtgat

SEQ ID NO: 91734 - RNA, 21 nt, synthetic construct
  source 1..21: mol_type = other RNA
ggcggaggttgcggtgacgtg

SEQ ID NO: 91735 - RNA, 21 nt, synthetic construct
  source 1..21: mol_type = other RNA
ggcggatgccggtaatcacag

SEQ ID NO: 91736 - RNA, 21 nt, synthetic construct
  source 1..21: mol_type = other RNA
ggcggctggatcgcttgaggt

SEQ ID NO: 91737 - RNA, 21 nt, synthetic construct
  source 1..21: mol_type = other RNA
ggcggctttgtggagtggagg

SEQ ID NO: 91738 - RNA, 21 nt, synthetic construct
  source 1..21: mol_type = other RNA
ggcgggcttcgcctttgttgc

SEQ ID NO: 91739 - RNA, 21 nt, synthetic construct
  source 1..21: mol_type = other RNA
ggcggtggggacagctcaatt

SEQ ID NO: 91740 - RNA, 21 nt, synthetic construct
  source 1..21: mol_type = other RNA
ggcgtacatgtagatatggga

SEQ ID NO: 91741 - RNA, 21 nt, synthetic construct
  source 1..21: mol_type = other RNA
ggcgtagtatctcatgcttag

SEQ ID NO: 91742 - RNA, 21 nt, synthetic construct
  source 1..21: mol_type = other RNA
ggcgtgagccaccacgtccgg

SEQ ID NO: 91743 - RNA, 21 nt, synthetic construct
  source 1..21: mol_type = other RNA
ggcgtgagccacctcatccgg

SEQ ID NO: 91744 - RNA, 21 nt, synthetic construct
  source 1..21: mol_type = other RNA
ggcgtgagccatcgcgcccag

SEQ ID NO: 91745 - RNA, 21 nt, synthetic construct
  source 1..21: mol_type = other RNA
ggcgtgagcctccacacctgg

SEQ ID NO: 91746 - RNA, 21 nt, synthetic construct
  source 1..21: mol_type = other RNA
ggcgtggagcggtgtcttatt

SEQ ID NO: 91747 - RNA, 21 nt, synthetic construct
  source 1..21: mol_type = other RNA
ggcgtgggggctcacatctgt

SEQ ID NO: 91748 - RNA, 21 nt, synthetic construct
  source 1..21: mol_type = other RNA
ggcgtggtggcggatgccggt

SEQ ID NO: 91749 - RNA, 21 nt, synthetic construct
  source 1..21: mol_type = other RNA
ggcgtgtaaactgttggaaaa

SEQ ID NO: 91750 - RNA, 21 nt, synthetic construct
  source 1..21: mol_type = other RNA
ggcgtgtgcccaggctgactt

SEQ ID NO: 91751 - RNA, 21 nt, synthetic construct
  source 1..21: mol_type = other RNA
ggcgttgagccatcatgcctg

SEQ ID NO: 91752 - RNA, 21 nt, synthetic construct
  source 1..21: mol_type = other RNA
ggcgtttcgccatgttggcca

SEQ ID NO: 91753 - RNA, 21 nt, synthetic construct
  source 1..21: mol_type = other RNA
ggctaaaacatacatgagaaa

SEQ ID NO: 91754 - RNA, 21 nt, synthetic construct
  source 1..21: mol_type = other RNA
ggctaaaagaccgcaagagtt

SEQ ID NO: 91755 - RNA, 21 nt, synthetic construct
  source 1..21: mol_type = other RNA
ggctaaatgctcacatttagt

SEQ ID NO: 91756 - RNA, 21 nt, synthetic construct
  source 1..21: mol_type = other RNA
ggctaacaatcaaatttaaca

SEQ ID NO: 91757 - RNA, 21 nt, synthetic construct
  source 1..21: mol_type = other RNA
ggctaacagccaaagaaattg

SEQ ID NO: 91758 - RNA, 21 nt, synthetic construct
  source 1..21: mol_type = other RNA
ggctaagatgaggtctcagcc

SEQ ID NO: 91759 - RNA, 21 nt, synthetic construct
  source 1..21: mol_type = other RNA
ggctaagcatgtaacttgctt

SEQ ID NO: 91760 - RNA, 21 nt, synthetic construct
  source 1..21: mol_type = other RNA
ggctaaggtggagtggtggat

SEQ ID NO: 91761 - RNA, 21 nt, synthetic construct
  source 1..21: mol_type = other RNA
ggctaagtagtggcagccccg

SEQ ID NO: 91762 - RNA, 21 nt, synthetic construct
  source 1..21: mol_type = other RNA
ggctaagttgagaaactatcc

SEQ ID NO: 91763 - RNA, 21 nt, synthetic construct
  source 1..21: mol_type = other RNA
ggctaatgtggcttgcaaggc

SEQ ID NO: 91764 - RNA, 21 nt, synthetic construct
  source 1..21: mol_type = other RNA
ggctaatgtgtgttccagaca

SEQ ID NO: 91765 - RNA, 21 nt, synthetic construct
  source 1..21: mol_type = other RNA
ggctaattttttctgtaatgt

SEQ ID NO: 91766 - RNA, 21 nt, synthetic construct
  source 1..21: mol_type = other RNA
ggctacaccctgggaaagcct

SEQ ID NO: 91767 - RNA, 21 nt, synthetic construct
  source 1..21: mol_type = other RNA
ggctactgtaaacaatgctgc

SEQ ID NO: 91768 - RNA, 21 nt, synthetic construct
  source 1..21: mol_type = other RNA
ggctagaaacttggattgtgt

SEQ ID NO: 91769 - RNA, 21 nt, synthetic construct
  source 1..21: mol_type = other RNA
ggctagaagcatctgatacac

SEQ ID NO: 91770 - RNA, 21 nt, synthetic construct
  source 1..21: mol_type = other RNA
ggctagaagtcccagttcaag

SEQ ID NO: 91771 - RNA, 21 nt, synthetic construct
  source 1..21: mol_type = other RNA
ggctagacggaaaaacattct

SEQ ID NO: 91772 - RNA, 21 nt, synthetic construct
  source 1..21: mol_type = other RNA
ggctagactaagaaaaacaga

SEQ ID NO: 91773 - RNA, 21 nt, synthetic construct
  source 1..21: mol_type = other RNA
ggctagagccaggaagtcagc

SEQ ID NO: 91774 - RNA, 21 nt, synthetic construct
  source 1..21: mol_type = other RNA
ggctagagctcacacgagaag

SEQ ID NO: 91775 - RNA, 21 nt, synthetic construct
  source 1..21: mol_type = other RNA
ggctagcacagaggcaacagt

SEQ ID NO: 91776 - RNA, 21 nt, synthetic construct
  source 1..21: mol_type = other RNA
ggctaggatttcagtaaatga

SEQ ID NO: 91777 - RNA, 21 nt, synthetic construct
  source 1..21: mol_type = other RNA
ggctagggaagcagttgatgc

SEQ ID NO: 91778 - RNA, 21 nt, synthetic construct
  source 1..21: mol_type = other RNA
ggctaggtgacctgccagagt

SEQ ID NO: 91779 - RNA, 21 nt, synthetic construct
  source 1..21: mol_type = other RNA
ggctagtaggcaacatcccta

SEQ ID NO: 91780 - RNA, 21 nt, synthetic construct
  source 1..21: mol_type = other RNA
ggctagtgtgttgactgacat

SEQ ID NO: 91781 - RNA, 21 nt, synthetic construct
  source 1..21: mol_type = other RNA
ggctataaccacgagtaatgg

SEQ ID NO: 91782 - RNA, 21 nt, synthetic construct
  source 1..21: mol_type = other RNA
ggctatctttactttcagctc

SEQ ID NO: 91783 - RNA, 21 nt, synthetic construct
  source 1..21: mol_type = other RNA
ggctattaactttgaaatcag

SEQ ID NO: 91784 - RNA, 21 nt, synthetic construct
  source 1..21: mol_type = other RNA
ggctattaagtattgcattga

SEQ ID NO: 91785 - RNA, 21 nt, synthetic construct
  source 1..21: mol_type = other RNA
ggctattagttaaccttctgg

SEQ ID NO: 91786 - RNA, 21 nt, synthetic construct
  source 1..21: mol_type = other RNA
ggctattgtcagtaattctgc

SEQ ID NO: 91787 - RNA, 21 nt, synthetic construct
  source 1..21: mol_type = other RNA
ggctattgttttgcaagatta

SEQ ID NO: 91788 - RNA, 21 nt, synthetic construct
  source 1..21: mol_type = other RNA
ggctcaacgcctgtgatccca

SEQ ID NO: 91789 - RNA, 21 nt, synthetic construct
  source 1..21: mol_type = other RNA
ggctcaagccatcctccagcc

SEQ ID NO: 91790 - RNA, 21 nt, synthetic construct
  source 1..21: mol_type = other RNA
ggctcaagtaagtgaaatcat

SEQ ID NO: 91791 - RNA, 21 nt, synthetic construct
  source 1..21: mol_type = other RNA
ggctcaatacctgaaaagtgt

SEQ ID NO: 91792 - RNA, 21 nt, synthetic construct
  source 1..21: mol_type = other RNA
ggctcaatggttaagactgct

SEQ ID NO: 91793 - RNA, 21 nt, synthetic construct
  source 1..21: mol_type = other RNA
ggctcacagtgctccatagct

SEQ ID NO: 91794 - RNA, 21 nt, synthetic construct
  source 1..21: mol_type = other RNA
ggctcacattgtatttctgtt

SEQ ID NO: 91795 - RNA, 21 nt, synthetic construct
  source 1..21: mol_type = other RNA
ggctcactcatttccgttgct

SEQ ID NO: 91796 - RNA, 21 nt, synthetic construct
  source 1..21: mol_type = other RNA
ggctcagaaacaacaacaaca

SEQ ID NO: 91797 - RNA, 21 nt, synthetic construct
  source 1..21: mol_type = other RNA
ggctcagcccctcatcctccg

SEQ ID NO: 91798 - RNA, 21 nt, synthetic construct
  source 1..21: mol_type = other RNA
ggctcaggcctgttgtgagga

SEQ ID NO: 91799 - RNA, 21 nt, synthetic construct
  source 1..21: mol_type = other RNA
ggctcagtctgtttgccatct

SEQ ID NO: 91800 - RNA, 21 nt, synthetic construct
  source 1..21: mol_type = other RNA
ggctcatacttgctttattac

SEQ ID NO: 91801 - RNA, 21 nt, synthetic construct
  source 1..21: mol_type = other RNA
ggctcatctaagcctacctcc

SEQ ID NO: 91802 - RNA, 21 nt, synthetic construct
  source 1..21: mol_type = other RNA
ggctccacttgggtggaagct

SEQ ID NO: 91803 - RNA, 21 nt, synthetic construct
  source 1..21: mol_type = other RNA
ggctccaggtagaatgaaaat

SEQ ID NO: 91804 - RNA, 21 nt, synthetic construct
  source 1..21: mol_type = other RNA
ggctcccagtgcccacctgac

SEQ ID NO: 91805 - RNA, 21 nt, synthetic construct
  source 1..21: mol_type = other RNA
ggctcccatgattcaaaatgt

SEQ ID NO: 91806 - RNA, 21 nt, synthetic construct
  source 1..21: mol_type = other RNA
ggctcccttccagcgtgtgca

SEQ ID NO: 91807 - RNA, 21 nt, synthetic construct
  source 1..21: mol_type = other RNA
ggctcctccaaggctgcccgc

SEQ ID NO: 91808 - RNA, 21 nt, synthetic construct
  source 1..21: mol_type = other RNA
ggctcctcccggctaagatga

SEQ ID NO: 91809 - RNA, 21 nt, synthetic construct
  source 1..21: mol_type = other RNA
ggctcctgagaaccggaactt

SEQ ID NO: 91810 - RNA, 21 nt, synthetic construct
  source 1..21: mol_type = other RNA
ggctcctgcagacatgcacga

SEQ ID NO: 91811 - RNA, 21 nt, synthetic construct
  source 1..21: mol_type = other RNA
ggctccttaccactataatcc

SEQ ID NO: 91812 - RNA, 21 nt, synthetic construct
  source 1..21: mol_type = other RNA
ggctcgcagcatccctgccgc

SEQ ID NO: 91813 - RNA, 21 nt, synthetic construct
  source 1..21: mol_type = other RNA
ggctctaatgcaagagttaaa

SEQ ID NO: 91814 - RNA, 21 nt, synthetic construct
  source 1..21: mol_type = other RNA
ggctctagcccagcttccggg

SEQ ID NO: 91815 - RNA, 21 nt, synthetic construct
  source 1..21: mol_type = other RNA
ggctctctattccaaatgtct

SEQ ID NO: 91816 - RNA, 21 nt, synthetic construct
  source 1..21: mol_type = other RNA
ggctctcttcaccaactgaag

SEQ ID NO: 91817 - RNA, 21 nt, synthetic construct
  source 1..21: mol_type = other RNA
ggctctgggtcagaatcgtga

SEQ ID NO: 91818 - RNA, 21 nt, synthetic construct
  source 1..21: mol_type = other RNA
ggctctgtcacccttgtaatc

SEQ ID NO: 91819 - RNA, 21 nt, synthetic construct
  source 1..21: mol_type = other RNA
ggctctgtgctgagatggtca

SEQ ID NO: 91820 - RNA, 21 nt, synthetic construct
  source 1..21: mol_type = other RNA
ggctctgtggtttcttgaatc

SEQ ID NO: 91821 - RNA, 21 nt, synthetic construct
  source 1..21: mol_type = other RNA
ggctcttagaaaatatatact

SEQ ID NO: 91822 - RNA, 21 nt, synthetic construct
  source 1..21: mol_type = other RNA
ggctctttccactctctggct

SEQ ID NO: 91823 - RNA, 21 nt, synthetic construct
  source 1..21: mol_type = other RNA
ggctgaaaaacacctcagtta

SEQ ID NO: 91824 - RNA, 21 nt, synthetic construct
  source 1..21: mol_type = other RNA
ggctgaaagagaaagaagtaa

SEQ ID NO: 91825 - RNA, 21 nt, synthetic construct
  source 1..21: mol_type = other RNA
ggctgaaatgctgtaactgac

SEQ ID NO: 91826 - RNA, 21 nt, synthetic construct
  source 1..21: mol_type = other RNA
ggctgaactgctgacagatta

SEQ ID NO: 91827 - RNA, 21 nt, synthetic construct
  source 1..21: mol_type = other RNA
ggctgaagcaggctttttacc

SEQ ID NO: 91828 - RNA, 21 nt, synthetic construct
  source 1..21: mol_type = other RNA
ggctgaagggaggaaaaaaca

SEQ ID NO: 91829 - RNA, 21 nt, synthetic construct
  source 1..21: mol_type = other RNA
ggctgacatgtgtaaaacatc

SEQ ID NO: 91830 - RNA, 21 nt, synthetic construct
  source 1..21: mol_type = other RNA
ggctgacctggtactctatga

SEQ ID NO: 91831 - RNA, 21 nt, synthetic construct
  source 1..21: mol_type = other RNA
ggctgacttagagggcttcat

SEQ ID NO: 91832 - RNA, 21 nt, synthetic construct
  source 1..21: mol_type = other RNA
ggctgagacctcatcttagcc

SEQ ID NO: 91833 - RNA, 21 nt, synthetic construct
  source 1..21: mol_type = other RNA
ggctgagccttcagaactctt

SEQ ID NO: 91834 - RNA, 21 nt, synthetic construct
  source 1..21: mol_type = other RNA
ggctgaggattggagactgat

SEQ ID NO: 91835 - RNA, 21 nt, synthetic construct
  source 1..21: mol_type = other RNA
ggctgaggcagcccgacctcc

SEQ ID NO: 91836 - RNA, 21 nt, synthetic construct
  source 1..21: mol_type = other RNA
ggctgaggcaggaggcacctg

SEQ ID NO: 91837 - RNA, 21 nt, synthetic construct
  source 1..21: mol_type = other RNA
ggctgaggccggaggattgct

SEQ ID NO: 91838 - RNA, 21 nt, synthetic construct
  source 1..21: mol_type = other RNA
ggctgaggcggaaggattgcc

SEQ ID NO: 91839 - RNA, 21 nt, synthetic construct
  source 1..21: mol_type = other RNA
ggctgaggcggctggatcgct

SEQ ID NO: 91840 - RNA, 21 nt, synthetic construct
  source 1..21: mol_type = other RNA
ggctgaggctggggaattgca

SEQ ID NO: 91841 - RNA, 21 nt, synthetic construct
  source 1..21: mol_type = other RNA
ggctgagtatgggtctccatt

SEQ ID NO: 91842 - RNA, 21 nt, synthetic construct
  source 1..21: mol_type = other RNA
ggctgattataaccttgaact

SEQ ID NO: 91843 - RNA, 21 nt, synthetic construct
  source 1..21: mol_type = other RNA
ggctgcaagcactggtaagga

SEQ ID NO: 91844 - RNA, 21 nt, synthetic construct
  source 1..21: mol_type = other RNA
ggctgcaattgcgcagaactg

SEQ ID NO: 91845 - RNA, 21 nt, synthetic construct
  source 1..21: mol_type = other RNA
ggctgcaccattttttcacca

SEQ ID NO: 91846 - RNA, 21 nt, synthetic construct
  source 1..21: mol_type = other RNA
ggctgcaccctcctcctcctg

SEQ ID NO: 91847 - RNA, 21 nt, synthetic construct
  source 1..21: mol_type = other RNA
ggctgcagggcttctgaaggt

SEQ ID NO: 91848 - RNA, 21 nt, synthetic construct
  source 1..21: mol_type = other RNA
ggctgcagtgagctccagcct

SEQ ID NO: 91849 - RNA, 21 nt, synthetic construct
  source 1..21: mol_type = other RNA
ggctgcatcatggtgggcctt

SEQ ID NO: 91850 - RNA, 21 nt, synthetic construct
  source 1..21: mol_type = other RNA
ggctgccactacttagcccct

SEQ ID NO: 91851 - RNA, 21 nt, synthetic construct
  source 1..21: mol_type = other RNA
ggctgccagcaccagatactc

SEQ ID NO: 91852 - RNA, 21 nt, synthetic construct
  source 1..21: mol_type = other RNA
ggctgcctcagccgccgcaga

SEQ ID NO: 91853 - RNA, 21 nt, synthetic construct
  source 1..21: mol_type = other RNA
ggctgcgccactgcactccag

SEQ ID NO: 91854 - RNA, 21 nt, synthetic construct
  source 1..21: mol_type = other RNA
ggctggaaataatttccctca

SEQ ID NO: 91855 - RNA, 21 nt, synthetic construct
  source 1..21: mol_type = other RNA
ggctggaagaattttaagcct

SEQ ID NO: 91856 - RNA, 21 nt, synthetic construct
  source 1..21: mol_type = other RNA
ggctggaatggtgaagaatgt

SEQ ID NO: 91857 - RNA, 21 nt, synthetic construct
  source 1..21: mol_type = other RNA
ggctggacataagggtctgtt

SEQ ID NO: 91858 - RNA, 21 nt, synthetic construct
  source 1..21: mol_type = other RNA
ggctggagctcactgcagcct

SEQ ID NO: 91859 - RNA, 21 nt, synthetic construct
  source 1..21: mol_type = other RNA
ggctggaggatggcttgagcc

SEQ ID NO: 91860 - RNA, 21 nt, synthetic construct
  source 1..21: mol_type = other RNA
ggctggagtggagtggcatga

SEQ ID NO: 91861 - RNA, 21 nt, synthetic construct
  source 1..21: mol_type = other RNA
ggctggcactttcctgataag

SEQ ID NO: 91862 - RNA, 21 nt, synthetic construct
  source 1..21: mol_type = other RNA
ggctggctctttccactctct

SEQ ID NO: 91863 - RNA, 21 nt, synthetic construct
  source 1..21: mol_type = other RNA
ggctgggagcttatcaggctt

SEQ ID NO: 91864 - RNA, 21 nt, synthetic construct
  source 1..21: mol_type = other RNA
ggctgggagtacaagaccagc

SEQ ID NO: 91865 - RNA, 21 nt, synthetic construct
  source 1..21: mol_type = other RNA
ggctgggctttctccaggggc

SEQ ID NO: 91866 - RNA, 21 nt, synthetic construct
  source 1..21: mol_type = other RNA
ggctggggaattgcatgagac

SEQ ID NO: 91867 - RNA, 21 nt, synthetic construct
  source 1..21: mol_type = other RNA
ggctgggggatccaggggaat

SEQ ID NO: 91868 - RNA, 21 nt, synthetic construct
  source 1..21: mol_type = other RNA
ggctggtctcaaactccaagt

SEQ ID NO: 91869 - RNA, 21 nt, synthetic construct
  source 1..21: mol_type = other RNA
ggctggtcttgtactcccagc

SEQ ID NO: 91870 - RNA, 21 nt, synthetic construct
  source 1..21: mol_type = other RNA
ggctggttccaaacttctgac

SEQ ID NO: 91871 - RNA, 21 nt, synthetic construct
  source 1..21: mol_type = other RNA
ggctgtactaagcctatgtaa

SEQ ID NO: 91872 - RNA, 21 nt, synthetic construct
  source 1..21: mol_type = other RNA
ggctgtattgtaggaaagcct

SEQ ID NO: 91873 - RNA, 21 nt, synthetic construct
  source 1..21: mol_type = other RNA
ggctgtcaaaaatgtgtctag

SEQ ID NO: 91874 - RNA, 21 nt, synthetic construct
  source 1..21: mol_type = other RNA
ggctgtcccaaatgcaccaac

SEQ ID NO: 91875 - RNA, 21 nt, synthetic construct
  source 1..21: mol_type = other RNA
ggctgtctccaacgcttttta

SEQ ID NO: 91876 - RNA, 21 nt, synthetic construct
  source 1..21: mol_type = other RNA
ggctgtgccaactctggcagg

SEQ ID NO: 91877 - RNA, 21 nt, synthetic construct
  source 1..21: mol_type = other RNA
ggctgttaccatttgaccttc

SEQ ID NO: 91878 - RNA, 21 nt, synthetic construct
  source 1..21: mol_type = other RNA
ggctgttagccttgccattct

SEQ ID NO: 91879 - RNA, 21 nt, synthetic construct
  source 1..21: mol_type = other RNA
ggctgttaggtattattttca

SEQ ID NO: 91880 - RNA, 21 nt, synthetic construct
  source 1..21: mol_type = other RNA
ggctgttattagagttgtaac

SEQ ID NO: 91881 - RNA, 21 nt, synthetic construct
  source 1..21: mol_type = other RNA
ggctgttcaatttagaaaatg

SEQ ID NO: 91882 - RNA, 21 nt, synthetic construct
  source 1..21: mol_type = other RNA
ggctgttcccagataacagtg

SEQ ID NO: 91883 - RNA, 21 nt, synthetic construct
  source 1..21: mol_type = other RNA
ggctgtttgagatctttctta

SEQ ID NO: 91884 - RNA, 21 nt, synthetic construct
  source 1..21: mol_type = other RNA
ggcttaaaattcttccagcct

SEQ ID NO: 91885 - RNA, 21 nt, synthetic construct
  source 1..21: mol_type = other RNA
ggcttaacacctttgtattca

SEQ ID NO: 91886 - RNA, 21 nt, synthetic construct
  source 1..21: mol_type = other RNA
ggcttaacatttgaactcact

SEQ ID NO: 91887 - RNA, 21 nt, synthetic construct
  source 1..21: mol_type = other RNA
ggcttaaggaaataaatatgt

SEQ ID NO: 91888 - RNA, 21 nt, synthetic construct
  source 1..21: mol_type = other RNA
ggcttaatgcatataaaaaca

SEQ ID NO: 91889 - RNA, 21 nt, synthetic construct
  source 1..21: mol_type = other RNA
ggcttactgcaacctccgttt

SEQ ID NO: 91890 - RNA, 21 nt, synthetic construct
  source 1..21: mol_type = other RNA
ggcttagaaatgaagatggcc

SEQ ID NO: 91891 - RNA, 21 nt, synthetic construct
  source 1..21: mol_type = other RNA
ggcttagataggatgggcaga

SEQ ID NO: 91892 - RNA, 21 nt, synthetic construct
  source 1..21: mol_type = other RNA
ggcttagatgagcccaggagt

SEQ ID NO: 91893 - RNA, 21 nt, synthetic construct
  source 1..21: mol_type = other RNA
ggcttaggatcaccaaagact

SEQ ID NO: 91894 - RNA, 21 nt, synthetic construct
  source 1..21: mol_type = other RNA
ggcttagtacagccatcaacc

SEQ ID NO: 91895 - RNA, 21 nt, synthetic construct
  source 1..21: mol_type = other RNA
ggcttatcagatggtgatacc

SEQ ID NO: 91896 - RNA, 21 nt, synthetic construct
  source 1..21: mol_type = other RNA
ggcttcaatatgcagtatgtg

SEQ ID NO: 91897 - RNA, 21 nt, synthetic construct
  source 1..21: mol_type = other RNA
ggcttcactttcgtcatctat

SEQ ID NO: 91898 - RNA, 21 nt, synthetic construct
  source 1..21: mol_type = other RNA
ggcttcagtgccaacacatgg

SEQ ID NO: 91899 - RNA, 21 nt, synthetic construct
  source 1..21: mol_type = other RNA
ggcttcatgctgggagaccag

SEQ ID NO: 91900 - RNA, 21 nt, synthetic construct
  source 1..21: mol_type = other RNA
ggcttcatgggtggaaattaa

SEQ ID NO: 91901 - RNA, 21 nt, synthetic construct
  source 1..21: mol_type = other RNA
ggcttcctaactggtctcctt

SEQ ID NO: 91902 - RNA, 21 nt, synthetic construct
  source 1..21: mol_type = other RNA
ggcttcgagttctgggagttc

SEQ ID NO: 91903 - RNA, 21 nt, synthetic construct
  source 1..21: mol_type = other RNA
ggcttcgcctttgttgccagg

SEQ ID NO: 91904 - RNA, 21 nt, synthetic construct
  source 1..21: mol_type = other RNA
ggcttctcaaactgtgtgctt

SEQ ID NO: 91905 - RNA, 21 nt, synthetic construct
  source 1..21: mol_type = other RNA
ggcttctgaaggtgcctgcca

SEQ ID NO: 91906 - RNA, 21 nt, synthetic construct
  source 1..21: mol_type = other RNA
ggcttgaacccgaggtgcaca

SEQ ID NO: 91907 - RNA, 21 nt, synthetic construct
  source 1..21: mol_type = other RNA
ggcttgagcccagggggtcga

SEQ ID NO: 91908 - RNA, 21 nt, synthetic construct
  source 1..21: mol_type = other RNA
ggcttgagtctgtgctctgta

SEQ ID NO: 91909 - RNA, 21 nt, synthetic construct
  source 1..21: mol_type = other RNA
ggcttgatctagtaaatataa

SEQ ID NO: 91910 - RNA, 21 nt, synthetic construct
  source 1..21: mol_type = other RNA
ggcttgattagcttcctcagg

SEQ ID NO: 91911 - RNA, 21 nt, synthetic construct
  source 1..21: mol_type = other RNA
ggcttgcaaggcccaccatga

SEQ ID NO: 91912 - RNA, 21 nt, synthetic construct
  source 1..21: mol_type = other RNA
ggcttgctttggctagaagca

SEQ ID NO: 91913 - RNA, 21 nt, synthetic construct
  source 1..21: mol_type = other RNA
ggcttggaaaacaaattgcat

SEQ ID NO: 91914 - RNA, 21 nt, synthetic construct
  source 1..21: mol_type = other RNA
ggcttggggaacagtttagca

SEQ ID NO: 91915 - RNA, 21 nt, synthetic construct
  source 1..21: mol_type = other RNA
ggcttgggtgacctcatgtaa

SEQ ID NO: 91916 - RNA, 21 nt, synthetic construct
  source 1..21: mol_type = other RNA
ggcttggtatgcatcttgaac

SEQ ID NO: 91917 - RNA, 21 nt, synthetic construct
  source 1..21: mol_type = other RNA
ggcttggtggcccacacctgc

SEQ ID NO: 91918 - RNA, 21 nt, synthetic construct
  source 1..21: mol_type = other RNA
ggcttggttggaaaagaaagc

SEQ ID NO: 91919 - RNA, 21 nt, synthetic construct
  source 1..21: mol_type = other RNA
ggcttgtgacatcaagggtgg

SEQ ID NO: 91920 - RNA, 21 nt, synthetic construct
  source 1..21: mol_type = other RNA
ggcttgtgcatcagaattcca

SEQ ID NO: 91921 - RNA, 21 nt, synthetic construct
  source 1..21: mol_type = other RNA
ggcttgtggctacaccctggg

SEQ ID NO: 91922 - RNA, 21 nt, synthetic construct
  source 1..21: mol_type = other RNA
ggctttaagcagaaagttact

SEQ ID NO: 91923 - RNA, 21 nt, synthetic construct
  source 1..21: mol_type = other RNA
ggctttaaggcgcagacacac

SEQ ID NO: 91924 - RNA, 21 nt, synthetic construct
  source 1..21: mol_type = other RNA
ggctttactgtattaggatgt

SEQ ID NO: 91925 - RNA, 21 nt, synthetic construct
  source 1..21: mol_type = other RNA
ggctttagatggtaaaacaaa

SEQ ID NO: 91926 - RNA, 21 nt, synthetic construct
  source 1..21: mol_type = other RNA
ggctttagatttatcaatagc

SEQ ID NO: 91927 - RNA, 21 nt, synthetic construct
  source 1..21: mol_type = other RNA
ggctttatgagacacacgagt

SEQ ID NO: 91928 - RNA, 21 nt, synthetic construct
  source 1..21: mol_type = other RNA
ggctttcaatagtgggtagaa

SEQ ID NO: 91929 - RNA, 21 nt, synthetic construct
  source 1..21: mol_type = other RNA
ggctttcccagggtgtagcca

SEQ ID NO: 91930 - RNA, 21 nt, synthetic construct
  source 1..21: mol_type = other RNA
ggctttcgtatggaagatggg

SEQ ID NO: 91931 - RNA, 21 nt, synthetic construct
  source 1..21: mol_type = other RNA
ggctttctccaggggcggccc

SEQ ID NO: 91932 - RNA, 21 nt, synthetic construct
  source 1..21: mol_type = other RNA
ggctttctgtgtaatactgta

SEQ ID NO: 91933 - RNA, 21 nt, synthetic construct
  source 1..21: mol_type = other RNA
ggctttgacttctcagggcct

SEQ ID NO: 91934 - RNA, 21 nt, synthetic construct
  source 1..21: mol_type = other RNA
ggctttgagaaaggtttcttc

SEQ ID NO: 91935 - RNA, 21 nt, synthetic construct
  source 1..21: mol_type = other RNA
ggctttgtgaagggaggtagg

SEQ ID NO: 91936 - RNA, 21 nt, synthetic construct
  source 1..21: mol_type = other RNA
ggctttgtggagtggaggggc

SEQ ID NO: 91937 - RNA, 21 nt, synthetic construct
  source 1..21: mol_type = other RNA
ggctttgtgttggtgtttctg

SEQ ID NO: 91938 - RNA, 21 nt, synthetic construct
  source 1..21: mol_type = other RNA
ggcttttattggtaatgttat

SEQ ID NO: 91939 - RNA, 21 nt, synthetic construct
  source 1..21: mol_type = other RNA
ggcttttcatagtcatcatta

SEQ ID NO: 91940 - RNA, 21 nt, synthetic construct
  source 1..21: mol_type = other RNA
ggcttttcatatacgtattta

SEQ ID NO: 91941 - RNA, 21 nt, synthetic construct
  source 1..21: mol_type = other RNA
ggcttttgaacactctgcaat

SEQ ID NO: 91942 - RNA, 21 nt, synthetic construct
  source 1..21: mol_type = other RNA
ggcttttgagtgtaaggtgtt

SEQ ID NO: 91943 - RNA, 21 nt, synthetic construct
  source 1..21: mol_type = other RNA
ggcttttggattttctttcta

SEQ ID NO: 91944 - RNA, 21 nt, synthetic construct
  source 1..21: mol_type = other RNA
ggcttttggcagcgtaactcc

SEQ ID NO: 91945 - RNA, 21 nt, synthetic construct
  source 1..21: mol_type = other RNA
ggctttttacccggagaggtg

SEQ ID NO: 91946 - RNA, 21 nt, synthetic construct
  source 1..21: mol_type = other RNA
ggctttttacgatgaaattga

SEQ ID NO: 91947 - RNA, 21 nt, synthetic construct
  source 1..21: mol_type = other RNA
ggctttttatatttccgatga

SEQ ID NO: 91948 - RNA, 21 nt, synthetic construct
  source 1..21: mol_type = other RNA
gggaaaacaattacttgagag

SEQ ID NO: 91949 - RNA, 21 nt, synthetic construct
  source 1..21: mol_type = other RNA
gggaaaacacccttgaaaatt

SEQ ID NO: 91950 - RNA, 21 nt, synthetic construct
  source 1..21: mol_type = other RNA
gggaaaactacatgtaaaaac

SEQ ID NO: 91951 - RNA, 21 nt, synthetic construct
  source 1..21: mol_type = other RNA
gggaaaactccaagtgtaaaa

SEQ ID NO: 91952 - RNA, 21 nt, synthetic construct
  source 1..21: mol_type = other RNA
gggaaaaggatttgtttgtga

SEQ ID NO: 91953 - RNA, 21 nt, synthetic construct
  source 1..21: mol_type = other RNA
gggaaaatctctgacttcatt

SEQ ID NO: 91954 - RNA, 21 nt, synthetic construct
  source 1..21: mol_type = other RNA
gggaaaatcttggaactttta

SEQ ID NO: 91955 - RNA, 21 nt, synthetic construct
  source 1..21: mol_type = other RNA
gggaaaattgacatttttcaa

SEQ ID NO: 91956 - RNA, 21 nt, synthetic construct
  source 1..21: mol_type = other RNA
gggaaacactcataccaggtt

SEQ ID NO: 91957 - RNA, 21 nt, synthetic construct
  source 1..21: mol_type = other RNA
gggaaacagggttacagtata

SEQ ID NO: 91958 - RNA, 21 nt, synthetic construct
  source 1..21: mol_type = other RNA
gggaaaccttactgtaatatt

SEQ ID NO: 91959 - RNA, 21 nt, synthetic construct
  source 1..21: mol_type = other RNA
gggaaactgtttttgcaattt

SEQ ID NO: 91960 - RNA, 21 nt, synthetic construct
  source 1..21: mol_type = other RNA
gggaaagacaggtagacatga

SEQ ID NO: 91961 - RNA, 21 nt, synthetic construct
  source 1..21: mol_type = other RNA
gggaaagcctggctttagatg

SEQ ID NO: 91962 - RNA, 21 nt, synthetic construct
  source 1..21: mol_type = other RNA
gggaaaggatgaccttgacaa

SEQ ID NO: 91963 - RNA, 21 nt, synthetic construct
  source 1..21: mol_type = other RNA
gggaaagtattcccaagatca

SEQ ID NO: 91964 - RNA, 21 nt, synthetic construct
  source 1..21: mol_type = other RNA
gggaaatagatgcctagaaag

SEQ ID NO: 91965 - RNA, 21 nt, synthetic construct
  source 1..21: mol_type = other RNA
gggaaatatgaaccacactga

SEQ ID NO: 91966 - RNA, 21 nt, synthetic construct
  source 1..21: mol_type = other RNA
gggaaatcattcaggacactg

SEQ ID NO: 91967 - RNA, 21 nt, synthetic construct
  source 1..21: mol_type = other RNA
gggaaatggagggccagagga

SEQ ID NO: 91968 - RNA, 21 nt, synthetic construct
  source 1..21: mol_type = other RNA
gggaaattagatgatgttttg

SEQ ID NO: 91969 - RNA, 21 nt, synthetic construct
  source 1..21: mol_type = other RNA
gggaaattatttccagccttt

SEQ ID NO: 91970 - RNA, 21 nt, synthetic construct
  source 1..21: mol_type = other RNA
gggaacactaagaagatggtt

SEQ ID NO: 91971 - RNA, 21 nt, synthetic construct
  source 1..21: mol_type = other RNA
gggaacagcaggggaaggctt

SEQ ID NO: 91972 - RNA, 21 nt, synthetic construct
  source 1..21: mol_type = other RNA
gggaacagcccctagcatgca

SEQ ID NO: 91973 - RNA, 21 nt, synthetic construct
  source 1..21: mol_type = other RNA
gggaacagtttagcaatccaa

SEQ ID NO: 91974 - RNA, 21 nt, synthetic construct
  source 1..21: mol_type = other RNA
gggaacatgacatgtattttt

SEQ ID NO: 91975 - RNA, 21 nt, synthetic construct
  source 1..21: mol_type = other RNA
gggaacattttcattttaact

SEQ ID NO: 91976 - RNA, 21 nt, synthetic construct
  source 1..21: mol_type = other RNA
gggaaccgtaacttcttttct

SEQ ID NO: 91977 - RNA, 21 nt, synthetic construct
  source 1..21: mol_type = other RNA
gggaactcttgtagtattttt

SEQ ID NO: 91978 - RNA, 21 nt, synthetic construct
  source 1..21: mol_type = other RNA
gggaagaaaaaataaaggctt

SEQ ID NO: 91979 - RNA, 21 nt, synthetic construct
  source 1..21: mol_type = other RNA
gggaagagagcattgccttta

SEQ ID NO: 91980 - RNA, 21 nt, synthetic construct
  source 1..21: mol_type = other RNA
gggaagagctaagatgctatt

SEQ ID NO: 91981 - RNA, 21 nt, synthetic construct
  source 1..21: mol_type = other RNA
gggaagaggccacaaagtccc

SEQ ID NO: 91982 - RNA, 21 nt, synthetic construct
  source 1..21: mol_type = other RNA
gggaagatagtactgaccatc

SEQ ID NO: 91983 - RNA, 21 nt, synthetic construct
  source 1..21: mol_type = other RNA
gggaagatgctccctctatgg

SEQ ID NO: 91984 - RNA, 21 nt, synthetic construct
  source 1..21: mol_type = other RNA
gggaagattggctttagattt

SEQ ID NO: 91985 - RNA, 21 nt, synthetic construct
  source 1..21: mol_type = other RNA
gggaagcaaaggattcggggg

SEQ ID NO: 91986 - RNA, 21 nt, synthetic construct
  source 1..21: mol_type = other RNA
gggaagcaggaactcatatta

SEQ ID NO: 91987 - RNA, 21 nt, synthetic construct
  source 1..21: mol_type = other RNA
gggaagcagttgatgcaattt

SEQ ID NO: 91988 - RNA, 21 nt, synthetic construct
  source 1..21: mol_type = other RNA
gggaagcttttcatatacaga

SEQ ID NO: 91989 - RNA, 21 nt, synthetic construct
  source 1..21: mol_type = other RNA
gggaaggaattttcaggactc

SEQ ID NO: 91990 - RNA, 21 nt, synthetic construct
  source 1..21: mol_type = other RNA
gggaaggagtctgcccatcct

SEQ ID NO: 91991 - RNA, 21 nt, synthetic construct
  source 1..21: mol_type = other RNA
gggaaggatggccagtcatgt

SEQ ID NO: 91992 - RNA, 21 nt, synthetic construct
  source 1..21: mol_type = other RNA
gggaaggccctgattgagatt

SEQ ID NO: 91993 - RNA, 21 nt, synthetic construct
  source 1..21: mol_type = other RNA
gggaaggctgcaagcactggt

SEQ ID NO: 91994 - RNA, 21 nt, synthetic construct
  source 1..21: mol_type = other RNA
gggaaggcttcgagttctggg

SEQ ID NO: 91995 - RNA, 21 nt, synthetic construct
  source 1..21: mol_type = other RNA
gggaaggtgcccgcgaaggcg

SEQ ID NO: 91996 - RNA, 21 nt, synthetic construct
  source 1..21: mol_type = other RNA
gggaagtaaagatcaagctcg

SEQ ID NO: 91997 - RNA, 21 nt, synthetic construct
  source 1..21: mol_type = other RNA
gggaagtactgagtcaaaacc

SEQ ID NO: 91998 - RNA, 21 nt, synthetic construct
  source 1..21: mol_type = other RNA
gggaagtggagtgcgagtgtg

SEQ ID NO: 91999 - RNA, 21 nt, synthetic construct
  source 1..21: mol_type = other RNA
gggaagttatgtagctgggat

SEQ ID NO: 92000 - RNA, 21 nt, synthetic construct
  source 1..21: mol_type = other RNA
gggaataagattttaggtcat

SEQ ID NO: 92001 - RNA, 21 nt, synthetic construct
  source 1..21: mol_type = other RNA
gggaatactttcccatctcta

SEQ ID NO: 92002 - RNA, 21 nt, synthetic construct
  source 1..21: mol_type = other RNA
gggaatagaaagttagtgtct

SEQ ID NO: 92003 - RNA, 21 nt, synthetic construct
  source 1..21: mol_type = other RNA
gggaatagacaaagacaagtt

SEQ ID NO: 92004 - RNA, 21 nt, synthetic construct
  source 1..21: mol_type = other RNA
gggaatcatgcagtacttgtc

SEQ ID NO: 92005 - RNA, 21 nt, synthetic construct
  source 1..21: mol_type = other RNA
gggaatctactcttttgtttt

SEQ ID NO: 92006 - RNA, 21 nt, synthetic construct
  source 1..21: mol_type = other RNA
gggaatctaggaaacactgct

SEQ ID NO: 92007 - RNA, 21 nt, synthetic construct
  source 1..21: mol_type = other RNA
gggaatgcatatatctgtctg

SEQ ID NO: 92008 - RNA, 21 nt, synthetic construct
  source 1..21: mol_type = other RNA
gggaatgcccctgtagcagac

SEQ ID NO: 92009 - RNA, 21 nt, synthetic construct
  source 1..21: mol_type = other RNA
gggaatgctcataattaaaga

SEQ ID NO: 92010 - RNA, 21 nt, synthetic construct
  source 1..21: mol_type = other RNA
gggaatggggagctagagggt

SEQ ID NO: 92011 - RNA, 21 nt, synthetic construct
  source 1..21: mol_type = other RNA
gggaatggtactgcctccaca

SEQ ID NO: 92012 - RNA, 21 nt, synthetic construct
  source 1..21: mol_type = other RNA
gggaatgtggtcacacttttt

SEQ ID NO: 92013 - RNA, 21 nt, synthetic construct
  source 1..21: mol_type = other RNA
gggaattcagtcaccaaacgt

SEQ ID NO: 92014 - RNA, 21 nt, synthetic construct
  source 1..21: mol_type = other RNA
gggaattgcatgagacttgga

SEQ ID NO: 92015 - RNA, 21 nt, synthetic construct
  source 1..21: mol_type = other RNA
gggaatttgttttaccatcta

SEQ ID NO: 92016 - RNA, 21 nt, synthetic construct
  source 1..21: mol_type = other RNA
gggaattttactgatcttttc

SEQ ID NO: 92017 - RNA, 21 nt, synthetic construct
  source 1..21: mol_type = other RNA
gggaatttttcttacctaagc

SEQ ID NO: 92018 - RNA, 21 nt, synthetic construct
  source 1..21: mol_type = other RNA
gggacaagagtctgcagacca

SEQ ID NO: 92019 - RNA, 21 nt, synthetic construct
  source 1..21: mol_type = other RNA
gggacaagtgggtggatgggt

SEQ ID NO: 92020 - RNA, 21 nt, synthetic construct
  source 1..21: mol_type = other RNA
gggacaatgccagggcgctcc

SEQ ID NO: 92021 - RNA, 21 nt, synthetic construct
  source 1..21: mol_type = other RNA
gggacagctcaattaagcaac

SEQ ID NO: 92022 - RNA, 21 nt, synthetic construct
  source 1..21: mol_type = other RNA
gggacatagatgaaactaaat

SEQ ID NO: 92023 - RNA, 21 nt, synthetic construct
  source 1..21: mol_type = other RNA
gggacatgaaggaaggattgg

SEQ ID NO: 92024 - RNA, 21 nt, synthetic construct
  source 1..21: mol_type = other RNA
gggacatgctctgataggata

SEQ ID NO: 92025 - RNA, 21 nt, synthetic construct
  source 1..21: mol_type = other RNA
gggaccccgtctctgcaaaaa

SEQ ID NO: 92026 - RNA, 21 nt, synthetic construct
  source 1..21: mol_type = other RNA
gggacccctccctgctttaaa

SEQ ID NO: 92027 - RNA, 21 nt, synthetic construct
  source 1..21: mol_type = other RNA
gggacgaatgcatgggaggta

SEQ ID NO: 92028 - RNA, 21 nt, synthetic construct
  source 1..21: mol_type = other RNA
gggacgacgtatgcaacttac

SEQ ID NO: 92029 - RNA, 21 nt, synthetic construct
  source 1..21: mol_type = other RNA
gggacggggttttgccatgtt

SEQ ID NO: 92030 - RNA, 21 nt, synthetic construct
  source 1..21: mol_type = other RNA
gggactaacagggtctacaaa

SEQ ID NO: 92031 - RNA, 21 nt, synthetic construct
  source 1..21: mol_type = other RNA
gggactacaggtgtgaaccac

SEQ ID NO: 92032 - RNA, 21 nt, synthetic construct
  source 1..21: mol_type = other RNA
gggactcccatatctacatgt

SEQ ID NO: 92033 - RNA, 21 nt, synthetic construct
  source 1..21: mol_type = other RNA
gggactcttatggctataacc

SEQ ID NO: 92034 - RNA, 21 nt, synthetic construct
  source 1..21: mol_type = other RNA
gggactgaaaccagtgggtca

SEQ ID NO: 92035 - RNA, 21 nt, synthetic construct
  source 1..21: mol_type = other RNA
gggactgagacagtattgtgc

SEQ ID NO: 92036 - RNA, 21 nt, synthetic construct
  source 1..21: mol_type = other RNA
gggactgagcagtgaaagtct

SEQ ID NO: 92037 - RNA, 21 nt, synthetic construct
  source 1..21: mol_type = other RNA
gggactgatgaagaacctgtt

SEQ ID NO: 92038 - RNA, 21 nt, synthetic construct
  source 1..21: mol_type = other RNA
gggactgcaacagatctgaga

SEQ ID NO: 92039 - RNA, 21 nt, synthetic construct
  source 1..21: mol_type = other RNA
gggactggagaacagtaaagt

SEQ ID NO: 92040 - RNA, 21 nt, synthetic construct
  source 1..21: mol_type = other RNA
gggactggcctcggccaacca

SEQ ID NO: 92041 - RNA, 21 nt, synthetic construct
  source 1..21: mol_type = other RNA
gggactgtcgaagcttaattt

SEQ ID NO: 92042 - RNA, 21 nt, synthetic construct
  source 1..21: mol_type = other RNA
gggacttatggagataaatta

SEQ ID NO: 92043 - RNA, 21 nt, synthetic construct
  source 1..21: mol_type = other RNA
gggacttcactagtgggtcgg

SEQ ID NO: 92044 - RNA, 21 nt, synthetic construct
  source 1..21: mol_type = other RNA
gggacttctagcctccagaaa

SEQ ID NO: 92045 - RNA, 21 nt, synthetic construct
  source 1..21: mol_type = other RNA
gggacttgctctcttgcccaa

SEQ ID NO: 92046 - RNA, 21 nt, synthetic construct
  source 1..21: mol_type = other RNA
gggacttggaagtgaagtcaa

SEQ ID NO: 92047 - RNA, 21 nt, synthetic construct
  source 1..21: mol_type = other RNA
gggactttgatgttttacatt

SEQ ID NO: 92048 - RNA, 21 nt, synthetic construct
  source 1..21: mol_type = other RNA
gggactttgtggcctcttccc

SEQ ID NO: 92049 - RNA, 21 nt, synthetic construct
  source 1..21: mol_type = other RNA
gggagaaagaccaagagtgtg

SEQ ID NO: 92050 - RNA, 21 nt, synthetic construct
  source 1..21: mol_type = other RNA
gggagaaagctaatttggaat

SEQ ID NO: 92051 - RNA, 21 nt, synthetic construct
  source 1..21: mol_type = other RNA
gggagaacccaggaacagatt

SEQ ID NO: 92052 - RNA, 21 nt, synthetic construct
  source 1..21: mol_type = other RNA
gggagaagaaataaacgacac

SEQ ID NO: 92053 - RNA, 21 nt, synthetic construct
  source 1..21: mol_type = other RNA
gggagaatggcaaggctaaca

SEQ ID NO: 92054 - RNA, 21 nt, synthetic construct
  source 1..21: mol_type = other RNA
gggagaattggtagtcaatgc

SEQ ID NO: 92055 - RNA, 21 nt, synthetic construct
  source 1..21: mol_type = other RNA
gggagaccaggagttcttatg

SEQ ID NO: 92056 - RNA, 21 nt, synthetic construct
  source 1..21: mol_type = other RNA
gggagaccgtggggggaggga

SEQ ID NO: 92057 - RNA, 21 nt, synthetic construct
  source 1..21: mol_type = other RNA
gggagacggcgagcttgatct

SEQ ID NO: 92058 - RNA, 21 nt, synthetic construct
  source 1..21: mol_type = other RNA
gggagactgtgcaatgtgaaa

SEQ ID NO: 92059 - RNA, 21 nt, synthetic construct
  source 1..21: mol_type = other RNA
gggagactttcactgctcagt

SEQ ID NO: 92060 - RNA, 21 nt, synthetic construct
  source 1..21: mol_type = other RNA
gggagagagaaactttacact

SEQ ID NO: 92061 - RNA, 21 nt, synthetic construct
  source 1..21: mol_type = other RNA
gggagagatgcctatgaaatc

SEQ ID NO: 92062 - RNA, 21 nt, synthetic construct
  source 1..21: mol_type = other RNA
gggagagcactggtttcagta

SEQ ID NO: 92063 - RNA, 21 nt, synthetic construct
  source 1..21: mol_type = other RNA
gggagaggagcgccctggcat

SEQ ID NO: 92064 - RNA, 21 nt, synthetic construct
  source 1..21: mol_type = other RNA
gggagaggcatgccgggacaa

SEQ ID NO: 92065 - RNA, 21 nt, synthetic construct
  source 1..21: mol_type = other RNA
gggagaggcctcatgtatttt

SEQ ID NO: 92066 - RNA, 21 nt, synthetic construct
  source 1..21: mol_type = other RNA
gggagagggagctctgtcttg

SEQ ID NO: 92067 - RNA, 21 nt, synthetic construct
  source 1..21: mol_type = other RNA
gggagagtgggcccagcagaa

SEQ ID NO: 92068 - RNA, 21 nt, synthetic construct
  source 1..21: mol_type = other RNA
gggagataccttgaaaggata

SEQ ID NO: 92069 - RNA, 21 nt, synthetic construct
  source 1..21: mol_type = other RNA
gggagatacttgattacaagg

SEQ ID NO: 92070 - RNA, 21 nt, synthetic construct
  source 1..21: mol_type = other RNA
gggagatatttcgcctagata

SEQ ID NO: 92071 - RNA, 21 nt, synthetic construct
  source 1..21: mol_type = other RNA
gggagatggacactgcagatg

SEQ ID NO: 92072 - RNA, 21 nt, synthetic construct
  source 1..21: mol_type = other RNA
gggagatgtgtaattgtacct

SEQ ID NO: 92073 - RNA, 21 nt, synthetic construct
  source 1..21: mol_type = other RNA
gggagcatatatactctgaga

SEQ ID NO: 92074 - RNA, 21 nt, synthetic construct
  source 1..21: mol_type = other RNA
gggagcatcttcccatgaaca

SEQ ID NO: 92075 - RNA, 21 nt, synthetic construct
  source 1..21: mol_type = other RNA
gggagcatgcacacaggagaa

SEQ ID NO: 92076 - RNA, 21 nt, synthetic construct
  source 1..21: mol_type = other RNA
gggagccaaacttgaaccttc

SEQ ID NO: 92077 - RNA, 21 nt, synthetic construct
  source 1..21: mol_type = other RNA
gggagcccaagcacactttcc

SEQ ID NO: 92078 - RNA, 21 nt, synthetic construct
  source 1..21: mol_type = other RNA
gggagccctccaggatccagt

SEQ ID NO: 92079 - RNA, 21 nt, synthetic construct
  source 1..21: mol_type = other RNA
gggagcgccacgtgaagatgg

SEQ ID NO: 92080 - RNA, 21 nt, synthetic construct
  source 1..21: mol_type = other RNA
gggagctagagggtaagacca

SEQ ID NO: 92081 - RNA, 21 nt, synthetic construct
  source 1..21: mol_type = other RNA
gggagctctgtcttgatgata

SEQ ID NO: 92082 - RNA, 21 nt, synthetic construct
  source 1..21: mol_type = other RNA
gggagcttatcaggcttgagt

SEQ ID NO: 92083 - RNA, 21 nt, synthetic construct
  source 1..21: mol_type = other RNA
gggagctttcattattaccag

SEQ ID NO: 92084 - RNA, 21 nt, synthetic construct
  source 1..21: mol_type = other RNA
gggagcttttgaaactgagca

SEQ ID NO: 92085 - RNA, 21 nt, synthetic construct
  source 1..21: mol_type = other RNA
gggaggaaaaaacagttgcta

SEQ ID NO: 92086 - RNA, 21 nt, synthetic construct
  source 1..21: mol_type = other RNA
gggaggaatccttcagtcagt

SEQ ID NO: 92087 - RNA, 21 nt, synthetic construct
  source 1..21: mol_type = other RNA
gggaggagccaagtaaaagca

SEQ ID NO: 92088 - RNA, 21 nt, synthetic construct
  source 1..21: mol_type = other RNA
gggaggaggtcatactggagc

SEQ ID NO: 92089 - RNA, 21 nt, synthetic construct
  source 1..21: mol_type = other RNA
gggaggattgtttgaggctgg

SEQ ID NO: 92090 - RNA, 21 nt, synthetic construct
  source 1..21: mol_type = other RNA
gggaggcagatgttgcggtga

SEQ ID NO: 92091 - RNA, 21 nt, synthetic construct
  source 1..21: mol_type = other RNA
gggaggccatcttcatttcta

SEQ ID NO: 92092 - RNA, 21 nt, synthetic construct
  source 1..21: mol_type = other RNA
gggaggcggaggttgcggtga

SEQ ID NO: 92093 - RNA, 21 nt, synthetic construct
  source 1..21: mol_type = other RNA
gggaggctgaggcaggtggat

SEQ ID NO: 92094 - RNA, 21 nt, synthetic construct
  source 1..21: mol_type = other RNA
gggaggctgaggcggaaggat

SEQ ID NO: 92095 - RNA, 21 nt, synthetic construct
  source 1..21: mol_type = other RNA
gggaggctgaggctggggaat

SEQ ID NO: 92096 - RNA, 21 nt, synthetic construct
  source 1..21: mol_type = other RNA
gggagggagagggagctctgt

SEQ ID NO: 92097 - RNA, 21 nt, synthetic construct
  source 1..21: mol_type = other RNA
gggagggggagggagagggag

SEQ ID NO: 92098 - RNA, 21 nt, synthetic construct
  source 1..21: mol_type = other RNA
gggagggggctgaggattgga

SEQ ID NO: 92099 - RNA, 21 nt, synthetic construct
  source 1..21: mol_type = other RNA
gggaggggtattcagggggct

SEQ ID NO: 92100 - RNA, 21 nt, synthetic construct
  source 1..21: mol_type = other RNA
gggaggggtccccagcatcca

SEQ ID NO: 92101 - RNA, 21 nt, synthetic construct
  source 1..21: mol_type = other RNA
gggaggtaatactataaggaa

SEQ ID NO: 92102 - RNA, 21 nt, synthetic construct
  source 1..21: mol_type = other RNA
gggaggtaggcttagatgagc

SEQ ID NO: 92103 - RNA, 21 nt, synthetic construct
  source 1..21: mol_type = other RNA
gggaggttgaggctgcagtga

SEQ ID NO: 92104 - RNA, 21 nt, synthetic construct
  source 1..21: mol_type = other RNA
gggagtaacagacctctgaag

SEQ ID NO: 92105 - RNA, 21 nt, synthetic construct
  source 1..21: mol_type = other RNA
gggagtacaagaccagcctgg

SEQ ID NO: 92106 - RNA, 21 nt, synthetic construct
  source 1..21: mol_type = other RNA
gggagtcagtagaggccgagg

SEQ ID NO: 92107 - RNA, 21 nt, synthetic construct
  source 1..21: mol_type = other RNA
gggagtccctgctttcagttc

SEQ ID NO: 92108 - RNA, 21 nt, synthetic construct
  source 1..21: mol_type = other RNA
gggagtctatttctgaacaaa

SEQ ID NO: 92109 - RNA, 21 nt, synthetic construct
  source 1..21: mol_type = other RNA
gggagtgtgcccaaggaaggc

SEQ ID NO: 92110 - RNA, 21 nt, synthetic construct
  source 1..21: mol_type = other RNA
gggagttcattagaattcagg

SEQ ID NO: 92111 - RNA, 21 nt, synthetic construct
  source 1..21: mol_type = other RNA
gggagttttaggaaaatagag

SEQ ID NO: 92112 - RNA, 21 nt, synthetic construct
  source 1..21: mol_type = other RNA
gggataaatcccacttgatcc

SEQ ID NO: 92113 - RNA, 21 nt, synthetic construct
  source 1..21: mol_type = other RNA
gggataagaataccaaattca

SEQ ID NO: 92114 - RNA, 21 nt, synthetic construct
  source 1..21: mol_type = other RNA
gggataatgagtttaattctt

SEQ ID NO: 92115 - RNA, 21 nt, synthetic construct
  source 1..21: mol_type = other RNA
gggataatgctatcattttaa

SEQ ID NO: 92116 - RNA, 21 nt, synthetic construct
  source 1..21: mol_type = other RNA
gggataatgctatccagaaga

SEQ ID NO: 92117 - RNA, 21 nt, synthetic construct
  source 1..21: mol_type = other RNA
gggatacttctaactttagaa

SEQ ID NO: 92118 - RNA, 21 nt, synthetic construct
  source 1..21: mol_type = other RNA
gggatatagctacaatgattt

SEQ ID NO: 92119 - RNA, 21 nt, synthetic construct
  source 1..21: mol_type = other RNA
gggatatccaaagataaaggt

SEQ ID NO: 92120 - RNA, 21 nt, synthetic construct
  source 1..21: mol_type = other RNA
gggatatctaacataatcaaa

SEQ ID NO: 92121 - RNA, 21 nt, synthetic construct
  source 1..21: mol_type = other RNA
gggatattggcttatagtgtt

SEQ ID NO: 92122 - RNA, 21 nt, synthetic construct
  source 1..21: mol_type = other RNA
gggatattttcgtgtactgaa

SEQ ID NO: 92123 - RNA, 21 nt, synthetic construct
  source 1..21: mol_type = other RNA
gggatcaaaccatgttcatgg

SEQ ID NO: 92124 - RNA, 21 nt, synthetic construct
  source 1..21: mol_type = other RNA
gggatcacacttgatggtttg

SEQ ID NO: 92125 - RNA, 21 nt, synthetic construct
  source 1..21: mol_type = other RNA
gggatcacagatacaactctg

SEQ ID NO: 92126 - RNA, 21 nt, synthetic construct
  source 1..21: mol_type = other RNA
gggatcacaggcgttgagcca

SEQ ID NO: 92127 - RNA, 21 nt, synthetic construct
  source 1..21: mol_type = other RNA
gggatccaggggaatagaaag

SEQ ID NO: 92128 - RNA, 21 nt, synthetic construct
  source 1..21: mol_type = other RNA
gggatcctaagcatgagatac

SEQ ID NO: 92129 - RNA, 21 nt, synthetic construct
  source 1..21: mol_type = other RNA
gggatcctgtccaggcgcctg

SEQ ID NO: 92130 - RNA, 21 nt, synthetic construct
  source 1..21: mol_type = other RNA
gggatctctgggctcactgca

SEQ ID NO: 92131 - RNA, 21 nt, synthetic construct
  source 1..21: mol_type = other RNA
gggatctgataaattattagc

SEQ ID NO: 92132 - RNA, 21 nt, synthetic construct
  source 1..21: mol_type = other RNA
gggatctgtcatgtttgaatt

SEQ ID NO: 92133 - RNA, 21 nt, synthetic construct
  source 1..21: mol_type = other RNA
gggatgaatgttgtacattta

SEQ ID NO: 92134 - RNA, 21 nt, synthetic construct
  source 1..21: mol_type = other RNA
gggatgaggaagaggaaggtt

SEQ ID NO: 92135 - RNA, 21 nt, synthetic construct
  source 1..21: mol_type = other RNA
gggatgcaacaaatgttgcag

SEQ ID NO: 92136 - RNA, 21 nt, synthetic construct
  source 1..21: mol_type = other RNA
gggatgcaagaatggtttaac

SEQ ID NO: 92137 - RNA, 21 nt, synthetic construct
  source 1..21: mol_type = other RNA
gggatgcagcaaaagcaccac

SEQ ID NO: 92138 - RNA, 21 nt, synthetic construct
  source 1..21: mol_type = other RNA
gggatgcattctagaaaggag

SEQ ID NO: 92139 - RNA, 21 nt, synthetic construct
  source 1..21: mol_type = other RNA
gggatgctcagggtgcgacct

SEQ ID NO: 92140 - RNA, 21 nt, synthetic construct
  source 1..21: mol_type = other RNA
gggatgctcagtttcaaaagc

SEQ ID NO: 92141 - RNA, 21 nt, synthetic construct
  source 1..21: mol_type = other RNA
gggatgctggagtgtggcagg

SEQ ID NO: 92142 - RNA, 21 nt, synthetic construct
  source 1..21: mol_type = other RNA
gggatgctgtctataggcaat

SEQ ID NO: 92143 - RNA, 21 nt, synthetic construct
  source 1..21: mol_type = other RNA
gggatgcttaaagcgctactc

SEQ ID NO: 92144 - RNA, 21 nt, synthetic construct
  source 1..21: mol_type = other RNA
gggatggctgaaagagaaaga

SEQ ID NO: 92145 - RNA, 21 nt, synthetic construct
  source 1..21: mol_type = other RNA
gggatgggggacgacgtatgc

SEQ ID NO: 92146 - RNA, 21 nt, synthetic construct
  source 1..21: mol_type = other RNA
gggatggttgcacaatgttgt

SEQ ID NO: 92147 - RNA, 21 nt, synthetic construct
  source 1..21: mol_type = other RNA
gggatgtagaaggatatgttt

SEQ ID NO: 92148 - RNA, 21 nt, synthetic construct
  source 1..21: mol_type = other RNA
gggatgttgcctactagccag

SEQ ID NO: 92149 - RNA, 21 nt, synthetic construct
  source 1..21: mol_type = other RNA
gggatgtttctacctttggct

SEQ ID NO: 92150 - RNA, 21 nt, synthetic construct
  source 1..21: mol_type = other RNA
gggattacacacacctaccac

SEQ ID NO: 92151 - RNA, 21 nt, synthetic construct
  source 1..21: mol_type = other RNA
gggattacaggcgcacgccat

SEQ ID NO: 92152 - RNA, 21 nt, synthetic construct
  source 1..21: mol_type = other RNA
gggattagcttattctttttc

SEQ ID NO: 92153 - RNA, 21 nt, synthetic construct
  source 1..21: mol_type = other RNA
gggattatttggaagagagaa

SEQ ID NO: 92154 - RNA, 21 nt, synthetic construct
  source 1..21: mol_type = other RNA
gggattctgctactagcaagc

SEQ ID NO: 92155 - RNA, 21 nt, synthetic construct
  source 1..21: mol_type = other RNA
gggattctggccaaatccctg

SEQ ID NO: 92156 - RNA, 21 nt, synthetic construct
  source 1..21: mol_type = other RNA
gggattgagggttagattttt

SEQ ID NO: 92157 - RNA, 21 nt, synthetic construct
  source 1..21: mol_type = other RNA
gggatttacttctatatgtaa

SEQ ID NO: 92158 - RNA, 21 nt, synthetic construct
  source 1..21: mol_type = other RNA
gggatttcatgaacaattttc

SEQ ID NO: 92159 - RNA, 21 nt, synthetic construct
  source 1..21: mol_type = other RNA
gggatttggccagaatccctt

SEQ ID NO: 92160 - RNA, 21 nt, synthetic construct
  source 1..21: mol_type = other RNA
gggcaaaaaagtcatgacctg

SEQ ID NO: 92161 - RNA, 21 nt, synthetic construct
  source 1..21: mol_type = other RNA
gggcaacagagacagagaatc

SEQ ID NO: 92162 - RNA, 21 nt, synthetic construct
  source 1..21: mol_type = other RNA
gggcaagagagcaagtcccca

SEQ ID NO: 92163 - RNA, 21 nt, synthetic construct
  source 1..21: mol_type = other RNA
gggcaatatagtgggaccccg

SEQ ID NO: 92164 - RNA, 21 nt, synthetic construct
  source 1..21: mol_type = other RNA
gggcaatctcagctcattaca

SEQ ID NO: 92165 - RNA, 21 nt, synthetic construct
  source 1..21: mol_type = other RNA
gggcacacgccactgcaggtg

SEQ ID NO: 92166 - RNA, 21 nt, synthetic construct
  source 1..21: mol_type = other RNA
gggcacactccccagtggttg

SEQ ID NO: 92167 - RNA, 21 nt, synthetic construct
  source 1..21: mol_type = other RNA
gggcaccgtgacagaacaaat

SEQ ID NO: 92168 - RNA, 21 nt, synthetic construct
  source 1..21: mol_type = other RNA
gggcacctaaaaggttgctta

SEQ ID NO: 92169 - RNA, 21 nt, synthetic construct
  source 1..21: mol_type = other RNA
gggcaccttccctactcactg

SEQ ID NO: 92170 - RNA, 21 nt, synthetic construct
  source 1..21: mol_type = other RNA
gggcactgggagccctccagg

SEQ ID NO: 92171 - RNA, 21 nt, synthetic construct
  source 1..21: mol_type = other RNA
gggcactgggtccccggagga
